United States Patent Application Publication US 2018/0305689 A1 - sequence listing, part 122

SEQ ID NO: 1769937 - RNA, 19 nt, Artificial Sequence
  Description of Artificial Sequence: Synthetic oligonucleotide
  Sense strand starting at position 3002 of SEQ ID NO: 1562749
cugaauccgucauuaggga

SEQ ID NO: 1769938 - RNA, 19 nt, Artificial Sequence
  Description of Artificial Sequence: Synthetic oligonucleotide
  Antisense strand to SEQ ID NO: 1769937
ucccuaaugacggauucag

SEQ ID NO: 1769939 - RNA, 19 nt, Artificial Sequence
  Description of Artificial Sequence: Synthetic oligonucleotide
  Sense strand starting at position 3022 of SEQ ID NO: 1562749
augagcaagaguuagcuua

SEQ ID NO: 1769940 - RNA, 19 nt, Artificial Sequence
  Description of Artificial Sequence: Synthetic oligonucleotide
  Antisense strand to SEQ ID NO: 1769939
uaagcuaacucuugcucau

SEQ ID NO: 1769941 - RNA, 19 nt, Artificial Sequence
  Description of Artificial Sequence: Synthetic oligonucleotide
  Sense strand starting at position 3032 of SEQ ID NO: 1562749
guuagcuuauuucuuggua

SEQ ID NO: 1769942 - RNA, 19 nt, Artificial Sequence
  Description of Artificial Sequence: Synthetic oligonucleotide
  Antisense strand to SEQ ID NO: 1769941
uaccaagaaauaagcuaac

SEQ ID NO: 1769943 - RNA, 19 nt, Artificial Sequence
  Description of Artificial Sequence: Synthetic oligonucleotide
  Sense strand starting at position 3033 of SEQ ID NO: 1562749
uuagcuuauuucuugguaa

SEQ ID NO: 1769944 - RNA, 19 nt, Artificial Sequence
  Description of Artificial Sequence: Synthetic oligonucleotide
  Antisense strand to SEQ ID NO: 1769943
uuaccaagaaauaagcuaa

SEQ ID NO: 1769945 - RNA, 19 nt, Artificial Sequence
  Description of Artificial Sequence: Synthetic oligonucleotide
  Sense strand starting at position 3035 of SEQ ID NO: 1562749
agcuuauuucuugguaagu

SEQ ID NO: 1769946 - RNA, 19 nt, Artificial Sequence
  Description of Artificial Sequence: Synthetic oligonucleotide
  Antisense strand to SEQ ID NO: 1769945
acuuaccaagaaauaagcu

SEQ ID NO: 1769947 - RNA, 19 nt, Artificial Sequence
  Description of Artificial Sequence: Synthetic oligonucleotide
  Sense strand starting at position 3036 of SEQ ID NO: 1562749
gcuuauuucuugguaaguu

SEQ ID NO: 1769948 - RNA, 19 nt, Artificial Sequence
  Description of Artificial Sequence: Synthetic oligonucleotide
  Antisense strand to SEQ ID NO: 1769947
aacuuaccaagaaauaagc

SEQ ID NO: 1769949 - RNA, 19 nt, Artificial Sequence
  Description of Artificial Sequence: Synthetic oligonucleotide
  Sense strand starting at position 3235 of SEQ ID NO: 1562749
ggcacauugaggcagaauu

SEQ ID NO: 1769950 - RNA, 19 nt, Artificial Sequence
  Description of Artificial Sequence: Synthetic oligonucleotide
  Antisense strand to SEQ ID NO: 1769949
aauucugccucaaugugcc

SEQ ID NO: 1769951 - RNA, 19 nt, Artificial Sequence
  Description of Artificial Sequence: Synthetic oligonucleotide
  Sense strand starting at position 3283 of SEQ ID NO: 1562749
gaauguaauguaugaugga

SEQ ID NO: 1769952 - RNA, 19 nt, Artificial Sequence
  Description of Artificial Sequence: Synthetic oligonucleotide
  Antisense strand to SEQ ID NO: 1769951
uccaucauacauuacauuc

SEQ ID NO: 1769953 - RNA, 19 nt, Artificial Sequence
  Description of Artificial Sequence: Synthetic oligonucleotide
  Sense strand starting at position 3338 of SEQ ID NO: 1562749
ugaucucaagucugaaaca

SEQ ID NO: 1769954 - RNA, 19 nt, Artificial Sequence
  Description of Artificial Sequence: Synthetic oligonucleotide
  Antisense strand to SEQ ID NO: 1769953
uguuucagacuugagauca

SEQ ID NO: 1769955 - RNA, 19 nt, Artificial Sequence
  Description of Artificial Sequence: Synthetic oligonucleotide
  Sense strand starting at position 3474 of SEQ ID NO: 1562749
guccaaaguccuuagagug

SEQ ID NO: 1769956 - RNA, 19 nt, Artificial Sequence
  Description of Artificial Sequence: Synthetic oligonucleotide
  Antisense strand to SEQ ID NO: 1769955
cacucuaaggacuuuggac

SEQ ID NO: 1769957 - RNA, 19 nt, Artificial Sequence
  Description of Artificial Sequence: Synthetic oligonucleotide
  Sense strand starting at position 3633 of SEQ ID NO: 1562749
guccaucuccuuuaggauu

SEQ ID NO: 1769958 - RNA, 19 nt, Artificial Sequence
  Description of Artificial Sequence: Synthetic oligonucleotide
  Antisense strand to SEQ ID NO: 1769957
aauccuaaaggagauggac

SEQ ID NO: 1769959 - RNA, 19 nt, Artificial Sequence
  Description of Artificial Sequence: Synthetic oligonucleotide
  Sense strand starting at position 3852 of SEQ ID NO: 1562749
augaauggguauccuacau

SEQ ID NO: 1769960 - RNA, 19 nt, Artificial Sequence
  Description of Artificial Sequence: Synthetic oligonucleotide
  Antisense strand to SEQ ID NO: 1769959
auguaggauacccauucau

SEQ ID NO: 1769961 - RNA, 19 nt, Artificial Sequence
  Description of Artificial Sequence: Synthetic oligonucleotide
  Sense strand starting at position 3923 of SEQ ID NO: 1562749
aguguagugguauaaucuu

SEQ ID NO: 1769962 - RNA, 19 nt, Artificial Sequence
  Description of Artificial Sequence: Synthetic oligonucleotide
  Antisense strand to SEQ ID NO: 1769961
aagauuauaccacuacacu

SEQ ID NO: 1769963 - RNA, 19 nt, Artificial Sequence
  Description of Artificial Sequence: Synthetic oligonucleotide
  Sense strand starting at position 47 of SEQ ID NO: 1562750
gugucaaucccacagacau

SEQ ID NO: 1769964 - RNA, 19 nt, Artificial Sequence
  Description of Artificial Sequence: Synthetic oligonucleotide
  Antisense strand to SEQ ID NO: 1769963
augucugugggauugacac

SEQ ID NO: 1769965 - RNA, 19 nt, Artificial Sequence
  Description of Artificial Sequence: Synthetic oligonucleotide
  Sense strand starting at position 65 of SEQ ID NO: 1562750
uuuccauagggucauuaua

SEQ ID NO: 1769966 - RNA, 19 nt, Artificial Sequence
  Description of Artificial Sequence: Synthetic oligonucleotide
  Antisense strand to SEQ ID NO: 1769965
uauaaugacccuauggaaa

SEQ ID NO: 1769967 - RNA, 19 nt, Artificial Sequence
  Description of Artificial Sequence: Synthetic oligonucleotide
  Sense strand starting at position 67 of SEQ ID NO: 1562750
uccauagggucauuauacu

SEQ ID NO: 1769968 - RNA, 19 nt, Artificial Sequence
  Description of Artificial Sequence: Synthetic oligonucleotide
  Antisense strand to SEQ ID NO: 1769967
aguauaaugacccuaugga

SEQ ID NO: 1769969 - RNA, 19 nt, Artificial Sequence
  Description of Artificial Sequence: Synthetic oligonucleotide
  Sense strand starting at position 119 of SEQ ID NO: 1562750
gaauguugcagggagggua

SEQ ID NO: 1769970 - RNA, 19 nt, Artificial Sequence
  Description of Artificial Sequence: Synthetic oligonucleotide
  Antisense strand to SEQ ID NO: 1769969
uacccucccugcaacauuc

SEQ ID NO: 1769971 - RNA, 19 nt, Artificial Sequence
  Description of Artificial Sequence: Synthetic oligonucleotide
  Sense strand starting at position 142 of SEQ ID NO: 1562750
gcagauuccagagaguugu

SEQ ID NO: 1769972 - RNA, 19 nt, Artificial Sequence
  Description of Artificial Sequence: Synthetic oligonucleotide
  Antisense strand to SEQ ID NO: 1769971
acaacucucuggaaucugc

SEQ ID NO: 1769973 - RNA, 19 nt, Artificial Sequence
  Description of Artificial Sequence: Synthetic oligonucleotide
  Sense strand starting at position 146 of SEQ ID NO: 1562750
auuccagagaguuguggaa

SEQ ID NO: 1769974 - RNA, 19 nt, Artificial Sequence
  Description of Artificial Sequence: Synthetic oligonucleotide
  Antisense strand to SEQ ID NO: 1769973
uuccacaacucucuggaau

SEQ ID NO: 1769975 - RNA, 19 nt, Artificial Sequence
  Description of Artificial Sequence: Synthetic oligonucleotide
  Sense strand starting at position 201 of SEQ ID NO: 1562750
agagaauucuucccaguau

SEQ ID NO: 1769976 - RNA, 19 nt, Artificial Sequence
  Description of Artificial Sequence: Synthetic oligonucleotide
  Antisense strand to SEQ ID NO: 1769975
auacugggaagaauucucu

SEQ ID NO: 1769977 - RNA, 19 nt, Artificial Sequence
  Description of Artificial Sequence: Synthetic oligonucleotide
  Sense strand starting at position 262 of SEQ ID NO: 1562750
agcagaguugagcaaaguu

SEQ ID NO: 1769978 - RNA, 19 nt, Artificial Sequence
  Description of Artificial Sequence: Synthetic oligonucleotide
  Antisense strand to SEQ ID NO: 1769977
aacuuugcucaacucugcu

SEQ ID NO: 1769979 - RNA, 19 nt, Artificial Sequence
  Description of Artificial Sequence: Synthetic oligonucleotide
  Sense strand starting at position 382 of SEQ ID NO: 1562750
gauggucuccaguggauga

SEQ ID NO: 1769980 - RNA, 19 nt, Artificial Sequence
  Description of Artificial Sequence: Synthetic oligonucleotide
  Antisense strand to SEQ ID NO: 1769979
ucauccacuggagaccauc

SEQ ID NO: 1769981 - RNA, 19 nt, Artificial Sequence
  Description of Artificial Sequence: Synthetic oligonucleotide
  Sense strand starting at position 592 of SEQ ID NO: 1562750
caguuagaaggcuaccuaa

SEQ ID NO: 1769982 - RNA, 19 nt, Artificial Sequence
  Description of Artificial Sequence: Synthetic oligonucleotide
  Antisense strand to SEQ ID NO: 1769981
uuagguagccuucuaacug

SEQ ID NO: 1769983 - RNA, 19 nt, Artificial Sequence
  Description of Artificial Sequence: Synthetic oligonucleotide
  Sense strand starting at position 693 of SEQ ID NO: 1562750
ugacaagguucuuuguaua

SEQ ID NO: 1769984 - RNA, 19 nt, Artificial Sequence
  Description of Artificial Sequence: Synthetic oligonucleotide
  Antisense strand to SEQ ID NO: 1769983
uauacaaagaaccuuguca

SEQ ID NO: 1769985 - RNA, 19 nt, Artificial Sequence
  Description of Artificial Sequence: Synthetic oligonucleotide
  Sense strand starting at position 698 of SEQ ID NO: 1562750
agguucuuuguauaacaaa

SEQ ID NO: 1769986 - RNA, 19 nt, Artificial Sequence
  Description of Artificial Sequence: Synthetic oligonucleotide
  Antisense strand to SEQ ID NO: 1769985
uuuguuauacaaagaaccu

SEQ ID NO: 1769987 - RNA, 19 nt, Artificial Sequence
  Description of Artificial Sequence: Synthetic oligonucleotide
  Sense strand starting at position 973 of SEQ ID NO: 1562750
agaugcagagucugaaagu

SEQ ID NO: 1769988 - RNA, 19 nt, Artificial Sequence
  Description of Artificial Sequence: Synthetic oligonucleotide
  Antisense strand to SEQ ID NO: 1769987
acuuucagacucugcaucu

SEQ ID NO: 1769989 - RNA, 19 nt, Artificial Sequence
  Description of Artificial Sequence: Synthetic oligonucleotide
  Sense strand starting at position 986 of SEQ ID NO: 1562750
gaaaguauggugcaugaau

SEQ ID NO: 1769990 - RNA, 19 nt, Artificial Sequence
  Description of Artificial Sequence: Synthetic oligonucleotide
  Antisense strand to SEQ ID NO: 1769989
auucaugcaccauacuuuc

SEQ ID NO: 1769991 - RNA, 19 nt, Artificial Sequence
  Description of Artificial Sequence: Synthetic oligonucleotide
  Sense strand starting at position 994 of SEQ ID NO: 1562750
ggugcaugaaugugggaga

SEQ ID NO: 1769992 - RNA, 19 nt, Artificial Sequence
  Description of Artificial Sequence: Synthetic oligonucleotide
  Antisense strand to SEQ ID NO: 1769991
ucucccacauucaugcacc

SEQ ID NO: 1769993 - RNA, 19 nt, Artificial Sequence
  Description of Artificial Sequence: Synthetic oligonucleotide
  Sense strand starting at position 1233 of SEQ ID NO: 1562750
aucucugagcuuuagcuaa

SEQ ID NO: 1769994 - RNA, 19 nt, Artificial Sequence
  Description of Artificial Sequence: Synthetic oligonucleotide
  Antisense strand to SEQ ID NO: 1769993
uuagcuaaagcucagagau

SEQ ID NO: 1769995 - RNA, 19 nt, Artificial Sequence
  Description of Artificial Sequence: Synthetic oligonucleotide
  Sense strand starting at position 1572 of SEQ ID NO: 1562750
acugucagauuacugagua

SEQ ID NO: 1769996 - RNA, 19 nt, Artificial Sequence
  Description of Artificial Sequence: Synthetic oligonucleotide
  Antisense strand to SEQ ID NO: 1769995
uacucaguaaucugacagu

SEQ ID NO: 1769997 - RNA, 19 nt, Artificial Sequence
  Description of Artificial Sequence: Synthetic oligonucleotide
  Sense strand starting at position 1576 of SEQ ID NO: 1562750
ucagauuacugaguaacug

SEQ ID NO: 1769998 - RNA, 19 nt, Artificial Sequence
  Description of Artificial Sequence: Synthetic oligonucleotide
  Antisense strand to SEQ ID NO: 1769997
caguuacucaguaaucuga

SEQ ID NO: 1769999 - RNA, 19 nt, Artificial Sequence
  Description of Artificial Sequence: Synthetic oligonucleotide
  Sense strand starting at position 2092 of SEQ ID NO: 1562750
uggaaagacuauucuguaa

SEQ ID NO: 1770000 - RNA, 19 nt, Artificial Sequence
  Description of Artificial Sequence: Synthetic oligonucleotide
  Antisense strand to SEQ ID NO: 1769999
uuacagaauagucuuucca

SEQ ID NO: 1770001 - RNA, 19 nt, Artificial Sequence
  Description of Artificial Sequence: Synthetic oligonucleotide
  Sense strand starting at position 2158 of SEQ ID NO: 1562750
guuaauuagacggaugcca

SEQ ID NO: 1770002 - RNA, 19 nt, Artificial Sequence
  Description of Artificial Sequence: Synthetic oligonucleotide
  Antisense strand to SEQ ID NO: 1770001
uggcauccgucuaauuaac

SEQ ID NO: 1770003 - RNA, 19 nt, Artificial Sequence
  Description of Artificial Sequence: Synthetic oligonucleotide
  Sense strand starting at position 2160 of SEQ ID NO: 1562750
uaauuagacggaugccauu

SEQ ID NO: 1770004 - RNA, 19 nt, Artificial Sequence
  Description of Artificial Sequence: Synthetic oligonucleotide
  Antisense strand to SEQ ID NO: 1770003
aauggcauccgucuaauua

SEQ ID NO: 1770005 - RNA, 19 nt, Artificial Sequence
  Description of Artificial Sequence: Synthetic oligonucleotide
  Sense strand starting at position 2291 of SEQ ID NO: 1562750
ggaggcucaauuggucaga

SEQ ID NO: 1770006 - RNA, 19 nt, Artificial Sequence
  Description of Artificial Sequence: Synthetic oligonucleotide
  Antisense strand to SEQ ID NO: 1770005
ucugaccaauugagccucc

SEQ ID NO: 1770007 - RNA, 19 nt, Artificial Sequence
  Description of Artificial Sequence: Synthetic oligonucleotide
  Sense strand starting at position 2292 of SEQ ID NO: 1562750
gaggcucaauuggucagau

SEQ ID NO: 1770008 - RNA, 19 nt, Artificial Sequence
  Description of Artificial Sequence: Synthetic oligonucleotide
  Antisense strand to SEQ ID NO: 1770007
aucugaccaauugagccuc

SEQ ID NO: 1770009 - RNA, 19 nt, Artificial Sequence
  Description of Artificial Sequence: Synthetic oligonucleotide
  Sense strand starting at position 2293 of SEQ ID NO: 1562750
aggcucaauuggucagauu

SEQ ID NO: 1770010 - RNA, 19 nt, Artificial Sequence
  Description of Artificial Sequence: Synthetic oligonucleotide
  Antisense strand to SEQ ID NO: 1770009
aaucugaccaauugagccu

SEQ ID NO: 1770011 - RNA, 19 nt, Artificial Sequence
  Description of Artificial Sequence: Synthetic oligonucleotide
  Sense strand starting at position 2294 of SEQ ID NO: 1562750
ggcucaauuggucagauua

SEQ ID NO: 1770012 - RNA, 19 nt, Artificial Sequence
  Description of Artificial Sequence: Synthetic oligonucleotide
  Antisense strand to SEQ ID NO: 1770011
uaaucugaccaauugagcc

SEQ ID NO: 1770013 - RNA, 19 nt, Artificial Sequence
  Description of Artificial Sequence: Synthetic oligonucleotide
  Sense strand starting at position 2408 of SEQ ID NO: 1562750
gcaugagacccauguaaag

SEQ ID NO: 1770014 - RNA, 19 nt, Artificial Sequence
  Description of Artificial Sequence: Synthetic oligonucleotide
  Antisense strand to SEQ ID NO: 1770013
cuuuacaugggucucaugc

SEQ ID NO: 1770015 - RNA, 19 nt, Artificial Sequence
  Description of Artificial Sequence: Synthetic oligonucleotide
  Sense strand starting at position 2533 of SEQ ID NO: 1562750
gguagauagcuguagacuc

SEQ ID NO: 1770016 - RNA, 19 nt, Artificial Sequence
  Description of Artificial Sequence: Synthetic oligonucleotide
  Antisense strand to SEQ ID NO: 1770015
gagucuacagcuaucuacc

SEQ ID NO: 1770017 - RNA, 19 nt, Artificial Sequence
  Description of Artificial Sequence: Synthetic oligonucleotide
  Sense strand starting at position 2545 of SEQ ID NO: 1562750
uagacucuugggcaaguaa

SEQ ID NO: 1770018 - RNA, 19 nt, Artificial Sequence
  Description of Artificial Sequence: Synthetic oligonucleotide
  Antisense strand to SEQ ID NO: 1770017
uuacuugcccaagagucua

SEQ ID NO: 1770019 - RNA, 19 nt, Artificial Sequence
  Description of Artificial Sequence: Synthetic oligonucleotide
  Sense strand starting at position 2993 of SEQ ID NO: 1562750
gcuaaauaguauuuacguu

SEQ ID NO: 1770020 - RNA, 19 nt, Artificial Sequence
  Description of Artificial Sequence: Synthetic oligonucleotide
  Antisense strand to SEQ ID NO: 1770019
aacguaaauacuauuuagc

SEQ ID NO: 1770021 - RNA, 19 nt, Artificial Sequence
  Description of Artificial Sequence: Synthetic oligonucleotide
  Sense strand starting at position 3304 of SEQ ID NO: 1562750
ccacauuuguccucucagu

SEQ ID NO: 1770022 - RNA, 19 nt, Artificial Sequence
  Description of Artificial Sequence: Synthetic oligonucleotide
  Antisense strand to SEQ ID NO: 1770021
acugagaggacaaaugugg

SEQ ID NO: 1770023 - RNA, 19 nt, Artificial Sequence
  Description of Artificial Sequence: Synthetic oligonucleotide
  Sense strand starting at position 3323 of SEQ ID NO: 1562750
gggaauuccuacccaaguu

SEQ ID NO: 1770024 - RNA, 19 nt, Artificial Sequence
  Description of Artificial Sequence: Synthetic oligonucleotide
  Antisense strand to SEQ ID NO: 1770023
aacuuggguaggaauuccc

SEQ ID NO: 1770025 - RNA, 19 nt, Artificial Sequence
  Description of Artificial Sequence: Synthetic oligonucleotide
  Sense strand starting at position 3340 of SEQ ID NO: 1562750
uuaacaagauuuggguaaa

SEQ ID NO: 1770026 - RNA, 19 nt, Artificial Sequence
  Description of Artificial Sequence: Synthetic oligonucleotide
  Antisense strand to SEQ ID NO: 1770025
uuuacccaaaucuuguuaa

SEQ ID NO: 1770027 - RNA, 19 nt, Artificial Sequence
  Description of Artificial Sequence: Synthetic oligonucleotide
  Sense strand starting at position 3441 of SEQ ID NO: 1562750
ggcucauuucucugauucu

SEQ ID NO: 1770028 - RNA, 19 nt, Artificial Sequence
  Description of Artificial Sequence: Synthetic oligonucleotide
  Antisense strand to SEQ ID NO: 1770027
agaaucagagaaaugagcc

SEQ ID NO: 1770029 - RNA, 19 nt, Artificial Sequence
  Description of Artificial Sequence: Synthetic oligonucleotide
  Sense strand starting at position 3480 of SEQ ID NO: 1562750
gaagguaauuuauagagau

SEQ ID NO: 1770030 - RNA, 19 nt, Artificial Sequence
  Description of Artificial Sequence: Synthetic oligonucleotide
  Antisense strand to SEQ ID NO: 1770029
aucucuauaaauuaccuuc

SEQ ID NO: 1770031 - RNA, 19 nt, Artificial Sequence
  Description of Artificial Sequence: Synthetic oligonucleotide
  Sense strand starting at position 3641 of SEQ ID NO: 1562750
ccaucuaucgaaggcaaau

SEQ ID NO: 1770032 - RNA, 19 nt, Artificial Sequence
  Description of Artificial Sequence: Synthetic oligonucleotide
  Antisense strand to SEQ ID NO: 1770031
auuugccuucgauagaugg

SEQ ID NO: 1770033 - RNA, 19 nt, Artificial Sequence
  Description of Artificial Sequence: Synthetic oligonucleotide
  Sense strand starting at position 3731 of SEQ ID NO: 1562750
ugccuuugcugauuugauu

SEQ ID NO: 1770034 - RNA, 19 nt, Artificial Sequence
  Description of Artificial Sequence: Synthetic oligonucleotide
  Antisense strand to SEQ ID NO: 1770033
aaucaaaucagcaaaggca

SEQ ID NO: 1770035 - RNA, 19 nt, Artificial Sequence
  Description of Artificial Sequence: Synthetic oligonucleotide
  Sense strand starting at position 3799 of SEQ ID NO: 1562750
cuaguuugcagagagacau

SEQ ID NO: 1770036 - RNA, 19 nt, Artificial Sequence
  Description of Artificial Sequence: Synthetic oligonucleotide
  Antisense strand to SEQ ID NO: 1770035
augucucucugcaaacuag

SEQ ID NO: 1770037 - RNA, 19 nt, Artificial Sequence
  Description of Artificial Sequence: Synthetic oligonucleotide
  Sense strand starting at position 3825 of SEQ ID NO: 1562750
gugggucauccucauggua

SEQ ID NO: 1770038 - RNA, 19 nt, Artificial Sequence
  Description of Artificial Sequence: Synthetic oligonucleotide
  Antisense strand to SEQ ID NO: 1770037
uaccaugaggaugacccac

SEQ ID NO: 1770039 - RNA, 19 nt, Artificial Sequence
  Description of Artificial Sequence: Synthetic oligonucleotide
  Sense strand starting at position 3881 of SEQ ID NO: 1562750
ucaggugaaugguccugaa

SEQ ID NO: 1770040 - RNA, 19 nt, Artificial Sequence
  Description of Artificial Sequence: Synthetic oligonucleotide
  Antisense strand to SEQ ID NO: 1770039
uucaggaccauucaccuga

SEQ ID NO: 1770041 - RNA, 19 nt, Artificial Sequence
  Description of Artificial Sequence: Synthetic oligonucleotide
  Sense strand starting at position 3907 of SEQ ID NO: 1562750
gucccauuuguaugcaaau

SEQ ID NO: 1770042 - RNA, 19 nt, Artificial Sequence
  Description of Artificial Sequence: Synthetic oligonucleotide
  Antisense strand to SEQ ID NO: 1770041
auuugcauacaaaugggac

SEQ ID NO: 1770043 - RNA, 19 nt, Artificial Sequence
  Description of Artificial Sequence: Synthetic oligonucleotide
  Sense strand starting at position 12 of SEQ ID NO: 1562751
ucagaugggugacuccaau

SEQ ID NO: 1770044 - RNA, 19 nt, Artificial Sequence
  Description of Artificial Sequence: Synthetic oligonucleotide
  Antisense strand to SEQ ID NO: 1770043
auuggagucacccaucuga

SEQ ID NO: 1770045 - RNA, 19 nt, Artificial Sequence
  Description of Artificial Sequence: Synthetic oligonucleotide
  Sense strand starting at position 68 of SEQ ID NO: 1562751
acaguaggcuccuccauaa

SEQ ID NO: 1770046 - RNA, 19 nt, Artificial Sequence
  Description of Artificial Sequence: Synthetic oligonucleotide
  Antisense strand to SEQ ID NO: 1770045
uuauggaggagccuacugu

SEQ ID NO: 1770047 - RNA, 19 nt, Artificial Sequence
  Description of Artificial Sequence: Synthetic oligonucleotide
  Sense strand starting at position 240 of SEQ ID NO: 1562751
agggaauaguggcuaucca

SEQ ID NO: 1770048 - RNA, 19 nt, Artificial Sequence
  Description of Artificial Sequence: Synthetic oligonucleotide
  Antisense strand to SEQ ID NO: 1770047
uggauagccacuauucccu

SEQ ID NO: 1770049 - RNA, 19 nt, Artificial Sequence
  Description of Artificial Sequence: Synthetic oligonucleotide
  Sense strand starting at position 241 of SEQ ID NO: 1562751
gggaauaguggcuauccau

SEQ ID NO: 1770050 - RNA, 19 nt, Artificial Sequence
  Description of Artificial Sequence: Synthetic oligonucleotide
  Antisense strand to SEQ ID NO: 1770049
auggauagccacuauuccc

SEQ ID NO: 1770051 - RNA, 19 nt, Artificial Sequence
  Description of Artificial Sequence: Synthetic oligonucleotide
  Sense strand starting at position 347 of SEQ ID NO: 1562751
uuuguuaauggguaaacau

SEQ ID NO: 1770052 - RNA, 19 nt, Artificial Sequence
  Description of Artificial Sequence: Synthetic oligonucleotide
  Antisense strand to SEQ ID NO: 1770051
auguuuacccauuaacaaa

SEQ ID NO: 1770053 - RNA, 19 nt, Artificial Sequence
  Description of Artificial Sequence: Synthetic oligonucleotide
  Sense strand starting at position 375 of SEQ ID NO: 1562751
uucuuucucccuuggagau

SEQ ID NO: 1770054 - RNA, 19 nt, Artificial Sequence
  Description of Artificial Sequence: Synthetic oligonucleotide
  Antisense strand to SEQ ID NO: 1770053
aucuccaagggagaaagaa

SEQ ID NO: 1770055 - RNA, 19 nt, Artificial Sequence
  Description of Artificial Sequence: Synthetic oligonucleotide
  Sense strand starting at position 376 of SEQ ID NO: 1562751
ucuuucucccuuggagaua

SEQ ID NO: 1770056 - RNA, 19 nt, Artificial Sequence
  Description of Artificial Sequence: Synthetic oligonucleotide
  Antisense strand to SEQ ID NO: 1770055
uaucuccaagggagaaaga

SEQ ID NO: 1770057 - RNA, 19 nt, Artificial Sequence
  Description of Artificial Sequence: Synthetic oligonucleotide
  Sense strand starting at position 522 of SEQ ID NO: 1562751
gaguuuggccucgacaauu

SEQ ID NO: 1770058 - RNA, 19 nt, Artificial Sequence
  Description of Artificial Sequence: Synthetic oligonucleotide
  Antisense strand to SEQ ID NO: 1770057
aauugucgaggccaaacuc

SEQ ID NO: 1770059 - RNA, 19 nt, Artificial Sequence
  Description of Artificial Sequence: Synthetic oligonucleotide
  Sense strand starting at position 583 of SEQ ID NO: 1562751
gaacauggguggucagaug

SEQ ID NO: 1770060 - RNA, 19 nt, Artificial Sequence
  Description of Artificial Sequence: Synthetic oligonucleotide
  Antisense strand to SEQ ID NO: 1770059
caucugaccacccauguuc

SEQ ID NO: 1770061 - RNA, 19 nt, Artificial Sequence
  Description of Artificial Sequence: Synthetic oligonucleotide
  Sense strand starting at position 594 of SEQ ID NO: 1562751
gucagaugccuuuagggac

SEQ ID NO: 1770062 - RNA, 19 nt, Artificial Sequence
  Description of Artificial Sequence: Synthetic oligonucleotide
  Antisense strand to SEQ ID NO: 1770061
gucccuaaaggcaucugac

SEQ ID NO: 1770063 - RNA, 19 nt, Artificial Sequence
  Description of Artificial Sequence: Synthetic oligonucleotide
  Sense strand starting at position 600 of SEQ ID NO: 1562751
ugccuuuagggacagugau

SEQ ID NO: 1770064 - RNA, 19 nt, Artificial Sequence
  Description of Artificial Sequence: Synthetic oligonucleotide
  Antisense strand to SEQ ID NO: 1770063
aucacugucccuaaaggca

SEQ ID NO: 1770065 - RNA, 19 nt, Artificial Sequence
  Description of Artificial Sequence: Synthetic oligonucleotide
  Sense strand starting at position 691 of SEQ ID NO: 1562751
acuugugguauccauagua

SEQ ID NO: 1770066 - RNA, 19 nt, Artificial Sequence
  Description of Artificial Sequence: Synthetic oligonucleotide
  Antisense strand to SEQ ID NO: 1770065
uacuauggauaccacaagu

SEQ ID NO: 1770067 - RNA, 19 nt, Artificial Sequence
  Description of Artificial Sequence: Synthetic oligonucleotide
  Sense strand starting at position 757 of SEQ ID NO: 1562751
gcaauuugcagcugugaag

SEQ ID NO: 1770068 - RNA, 19 nt, Artificial Sequence
  Description of Artificial Sequence: Synthetic oligonucleotide
  Antisense strand to SEQ ID NO: 1770067
cuucacagcugcaaauugc

SEQ ID NO: 1770069 - RNA, 19 nt, Artificial Sequence
  Description of Artificial Sequence: Synthetic oligonucleotide
  Sense strand starting at position 932 of SEQ ID NO: 1562751
caaguagucaugggugaga

SEQ ID NO: 1770070 - RNA, 19 nt, Artificial Sequence
  Description of Artificial Sequence: Synthetic oligonucleotide
  Antisense strand to SEQ ID NO: 1770069
ucucacccaugacuacuug

SEQ ID NO: 1770071 - RNA, 19 nt, Artificial Sequence
  Description of Artificial Sequence: Synthetic oligonucleotide
  Sense strand starting at position 1071 of SEQ ID NO: 1562751
gaccauuuguuugaggaag

SEQ ID NO: 1770072 - RNA, 19 nt, Artificial Sequence
  Description of Artificial Sequence: Synthetic oligonucleotide
  Antisense strand to SEQ ID NO: 1770071
cuuccucaaacaaaugguc

SEQ ID NO: 1770073 - RNA, 19 nt, Artificial Sequence
  Description of Artificial Sequence: Synthetic oligonucleotide
  Sense strand starting at position 1108 of SEQ ID NO: 1562751
uuugaaaucugggcagaug

SEQ ID NO: 1770074 - RNA, 19 nt, Artificial Sequence
  Description of Artificial Sequence: Synthetic oligonucleotide
  Antisense strand to SEQ ID NO: 1770073
caucugcccagauuucaaa

SEQ ID NO: 1770075 - RNA, 19 nt, Artificial Sequence
  Description of Artificial Sequence: Synthetic oligonucleotide
  Sense strand starting at position 1570 of SEQ ID NO: 1562751
aguuucucucugggagaag

SEQ ID NO: 1770076 - RNA, 19 nt, Artificial Sequence
  Description of Artificial Sequence: Synthetic oligonucleotide
  Antisense strand to SEQ ID NO: 1770075
cuucucccagagagaaacu

SEQ ID NO: 1770077 - RNA, 19 nt, Artificial Sequence
  Description of Artificial Sequence: Synthetic oligonucleotide
  Sense strand starting at position 2206 of SEQ ID NO: 1562751
ggacaucuggcacacaguu

SEQ ID NO: 1770078 - RNA, 19 nt, Artificial Sequence
  Description of Artificial Sequence: Synthetic oligonucleotide
  Antisense strand to SEQ ID NO: 1770077
aacugugugccagaugucc

SEQ ID NO: 1770079 - RNA, 19 nt, Artificial Sequence
  Description of Artificial Sequence: Synthetic oligonucleotide
  Sense strand starting at position 2231 of SEQ ID NO: 1562751
auuugcuagcucugguauu

SEQ ID NO: 1770080 - RNA, 19 nt, Artificial Sequence
  Description of Artificial Sequence: Synthetic oligonucleotide
  Antisense strand to SEQ ID NO: 1770079
aauaccagagcuagcaaau

SEQ ID NO: 1770081 - RNA, 19 nt, Artificial Sequence
  Description of Artificial Sequence: Synthetic oligonucleotide
  Sense strand starting at position 2237 of SEQ ID NO: 1562751
uagcucugguauuuguaga

SEQ ID NO: 1770082 - RNA, 19 nt, Artificial Sequence
  Description of Artificial Sequence: Synthetic oligonucleotide
  Antisense strand to SEQ ID NO: 1770081
ucuacaaauaccagagcua

SEQ ID NO: 1770083 - RNA, 19 nt, Artificial Sequence
  Description of Artificial Sequence: Synthetic oligonucleotide
  Sense strand starting at position 2238 of SEQ ID NO: 1562751
agcucugguauuuguagau

SEQ ID NO: 1770084 - RNA, 19 nt, Artificial Sequence
  Description of Artificial Sequence: Synthetic oligonucleotide
  Antisense strand to SEQ ID NO: 1770083
aucuacaaauaccagagcu

SEQ ID NO: 1770085 - RNA, 19 nt, Artificial Sequence
  Description of Artificial Sequence: Synthetic oligonucleotide
  Sense strand starting at position 2271 of SEQ ID NO: 1562751
cugcgugugcauguuaaca

SEQ ID NO: 1770086 - RNA, 19 nt, Artificial Sequence
  Description of Artificial Sequence: Synthetic oligonucleotide
  Antisense strand to SEQ ID NO: 1770085
uguuaacaugcacacgcag

SEQ ID NO: 1770087 - RNA, 19 nt, Artificial Sequence
  Description of Artificial Sequence: Synthetic oligonucleotide
  Sense strand starting at position 2297 of SEQ ID NO: 1562751
uguauaauuuaugcaugca

SEQ ID NO: 1770088 - RNA, 19 nt, Artificial Sequence
  Description of Artificial Sequence: Synthetic oligonucleotide
  Antisense strand to SEQ ID NO: 1770087
ugcaugcauaaauuauaca

SEQ ID NO: 1770089 - RNA, 19 nt, Artificial Sequence
  Description of Artificial Sequence: Synthetic oligonucleotide
  Sense strand starting at position 2348 of SEQ ID NO: 1562751
gauguuuaaguguaacuac

SEQ ID NO: 1770090 - RNA, 19 nt, Artificial Sequence
  Description of Artificial Sequence: Synthetic oligonucleotide
  Antisense strand to SEQ ID NO: 1770089
guaguuacacuuaaacauc

SEQ ID NO: 1770091 - RNA, 19 nt, Artificial Sequence
  Description of Artificial Sequence: Synthetic oligonucleotide
  Sense strand starting at position 2351 of SEQ ID NO: 1562751
guuuaaguguaacuacaca

SEQ ID NO: 1770092 - RNA, 19 nt, Artificial Sequence
  Description of Artificial Sequence: Synthetic oligonucleotide
  Antisense strand to SEQ ID NO: 1770091
uguguaguuacacuuaaac

SEQ ID NO: 1770093 - RNA, 19 nt, Artificial Sequence
  Description of Artificial Sequence: Synthetic oligonucleotide
  Sense strand starting at position 2547 of SEQ ID NO: 1562751
ggagcucacaguugaagga

SEQ ID NO: 1770094 - RNA, 19 nt, Artificial Sequence
  Description of Artificial Sequence: Synthetic oligonucleotide
  Antisense strand to SEQ ID NO: 1770093
uccuucaacugugagcucc

SEQ ID NO: 1770095 - RNA, 19 nt, Artificial Sequence
  Description of Artificial Sequence: Synthetic oligonucleotide
  Sense strand starting at position 2655 of SEQ ID NO: 1562751
ggaagcuugguccaccuaa

SEQ ID NO: 1770096 - RNA, 19 nt, Artificial Sequence
  Description of Artificial Sequence: Synthetic oligonucleotide
  Antisense strand to SEQ ID NO: 1770095
uuagguggaccaagcuucc

SEQ ID NO: 1770097 - RNA, 19 nt, Artificial Sequence
  Description of Artificial Sequence: Synthetic oligonucleotide
  Sense strand starting at position 2941 of SEQ ID NO: 1562751
ucuggauugcaccacaauu

SEQ ID NO: 1770098 - RNA, 19 nt, Artificial Sequence
  Description of Artificial Sequence: Synthetic oligonucleotide
  Antisense strand to SEQ ID NO: 1770097
aauuguggugcaauccaga

SEQ ID NO: 1770099 - RNA, 19 nt, Artificial Sequence
  Description of Artificial Sequence: Synthetic oligonucleotide
  Sense strand starting at position 3039 of SEQ ID NO: 1562751
cugaauccgucauuaggga

SEQ ID NO: 1770100 - RNA, 19 nt, Artificial Sequence
  Description of Artificial Sequence: Synthetic oligonucleotide
  Antisense strand to SEQ ID NO: 1770099
ucccuaaugacggauucag

SEQ ID NO: 1770101 - RNA, 19 nt, Artificial Sequence
  Description of Artificial Sequence: Synthetic oligonucleotide
  Sense strand starting at position 3059 of SEQ ID NO: 1562751
augagcaagaguuagcuua

SEQ ID NO: 1770102 - RNA, 19 nt, Artificial Sequence
  Description of Artificial Sequence: Synthetic oligonucleotide
  Antisense strand to SEQ ID NO: 1770101
uaagcuaacucuugcucau

SEQ ID NO: 1770103 - RNA, 19 nt, Artificial Sequence
  Description of Artificial Sequence: Synthetic oligonucleotide
  Sense strand starting at position 3069 of SEQ ID NO: 1562751
guuagcuuauuucuuggua

SEQ ID NO: 1770104 - RNA, 19 nt, Artificial Sequence
  Description of Artificial Sequence: Synthetic oligonucleotide
  Antisense strand to SEQ ID NO: 1770103
uaccaagaaauaagcuaac

SEQ ID NO: 1770105 - RNA, 19 nt, Artificial Sequence
  Description of Artificial Sequence: Synthetic oligonucleotide
  Sense strand starting at position 3070 of SEQ ID NO: 1562751
uuagcuuauuucuugguaa

SEQ ID NO: 1770106 - RNA, 19 nt, Artificial Sequence
  Description of Artificial Sequence: Synthetic oligonucleotide
  Antisense strand to SEQ ID NO: 1770105
uuaccaagaaauaagcuaa

SEQ ID NO: 1770107 - RNA, 19 nt, Artificial Sequence
  Description of Artificial Sequence: Synthetic oligonucleotide
  Sense strand starting at position 3072 of SEQ ID NO: 1562751
agcuuauuucuugguaagu

SEQ ID NO: 1770108 - RNA, 19 nt, Artificial Sequence
  Description of Artificial Sequence: Synthetic oligonucleotide
  Antisense strand to SEQ ID NO: 1770107
acuuaccaagaaauaagcu

SEQ ID NO: 1770109 - RNA, 19 nt, Artificial Sequence
  Description of Artificial Sequence: Synthetic oligonucleotide
  Sense strand starting at position 3073 of SEQ ID NO: 1562751
gcuuauuucuugguaaguu

SEQ ID NO: 1770110 - RNA, 19 nt, Artificial Sequence
  Description of Artificial Sequence: Synthetic oligonucleotide
  Antisense strand to SEQ ID NO: 1770109
aacuuaccaagaaauaagc

SEQ ID NO: 1770111 - RNA, 19 nt, Artificial Sequence
  Description of Artificial Sequence: Synthetic oligonucleotide
  Sense strand starting at position 3272 of SEQ ID NO: 1562751
ggcacauugaggcagaauu

SEQ ID NO: 1770112 - RNA, 19 nt, Artificial Sequence
  Description of Artificial Sequence: Synthetic oligonucleotide
  Antisense strand to SEQ ID NO: 1770111
aauucugccucaaugugcc

SEQ ID NO: 1770113 - RNA, 19 nt, Artificial Sequence
  Description of Artificial Sequence: Synthetic oligonucleotide
  Sense strand starting at position 3320 of SEQ ID NO: 1562751
gaauguaauguaugaugga

SEQ ID NO: 1770114 - RNA, 19 nt, Artificial Sequence
  Description of Artificial Sequence: Synthetic oligonucleotide
  Antisense strand to SEQ ID NO: 1770113
uccaucauacauuacauuc

SEQ ID NO: 1770115 - RNA, 19 nt, Artificial Sequence
  Description of Artificial Sequence: Synthetic oligonucleotide
  Sense strand starting at position 3375 of SEQ ID NO: 1562751
ugaucucaagucugaaaca

SEQ ID NO: 1770116 - RNA, 19 nt, Artificial Sequence
  Description of Artificial Sequence: Synthetic oligonucleotide
  Antisense strand to SEQ ID NO: 1770115
uguuucagacuugagauca

SEQ ID NO: 1770117 - RNA, 19 nt, Artificial Sequence
  Description of Artificial Sequence: Synthetic oligonucleotide
  Sense strand starting at position 3511 of SEQ ID NO: 1562751
guccaaaguccuuagagug

SEQ ID NO: 1770118 - RNA, 19 nt, Artificial Sequence
  Description of Artificial Sequence: Synthetic oligonucleotide
  Antisense strand to SEQ ID NO: 1770117
cacucuaaggacuuuggac

SEQ ID NO: 1770119 - RNA, 19 nt, Artificial Sequence
  Description of Artificial Sequence: Synthetic oligonucleotide
  Sense strand starting at position 3670 of SEQ ID NO: 1562751
guccaucuccuuuaggauu

SEQ ID NO: 1770120 - RNA, 19 nt, Artificial Sequence
  Description of Artificial Sequence: Synthetic oligonucleotide
  Antisense strand to SEQ ID NO: 1770119
aauccuaaaggagauggac

SEQ ID NO: 1770121 - RNA, 19 nt, Artificial Sequence
  Description of Artificial Sequence: Synthetic oligonucleotide
  Sense strand starting at position 3889 of SEQ ID NO: 1562751
augaauggguauccuacau

SEQ ID NO: 1770122 - RNA, 19 nt, Artificial Sequence
  Description of Artificial Sequence: Synthetic oligonucleotide
  Antisense strand to SEQ ID NO: 1770121
auguaggauacccauucau

SEQ ID NO: 1770123 - RNA, 19 nt, Artificial Sequence
  Description of Artificial Sequence: Synthetic oligonucleotide
  Sense strand starting at position 20 of SEQ ID NO: 1562752
gucagucaucaacaccagu

SEQ ID NO: 1770124 - RNA, 19 nt, Artificial Sequence
  Description of Artificial Sequence: Synthetic oligonucleotide
  Antisense strand to SEQ ID NO: 1770123
acugguguugaugacugac

SEQ ID NO: 1770125 - RNA, 19 nt, Artificial Sequence
  Description of Artificial Sequence: Synthetic oligonucleotide
  Sense strand starting at position 39 of SEQ ID NO: 1562752
ggguguuauuaucugggaa

SEQ ID NO: 1770126 - RNA, 19 nt, Artificial Sequence
  Description of Artificial Sequence: Synthetic oligonucleotide
  Antisense strand to SEQ ID NO: 1770125
uucccagauaauaacaccc

SEQ ID NO: 1770127 - RNA, 19 nt, Artificial Sequence
  Description of Artificial Sequence: Synthetic oligonucleotide
  Sense strand starting at position 40 of SEQ ID NO: 1562752
gguguuauuaucugggaau

SEQ ID NO: 1770128 - RNA, 19 nt, Artificial Sequence
  Description of Artificial Sequence: Synthetic oligonucleotide
  Antisense strand to SEQ ID NO: 1770127
auucccagauaauaacacc

SEQ ID NO: 1770129 - RNA, 19 nt, Artificial Sequence
  Description of Artificial Sequence: Synthetic oligonucleotide
  Sense strand starting at position 42 of SEQ ID NO: 1562752
uguuauuaucugggaauca

SEQ ID NO: 1770130 - RNA, 19 nt, Artificial Sequence
  Description of Artificial Sequence: Synthetic oligonucleotide
  Antisense strand to SEQ ID NO: 1770129
ugauucccagauaauaaca

SEQ ID NO: 1770131 - RNA, 19 nt, Artificial Sequence
  Description of Artificial Sequence: Synthetic oligonucleotide
  Sense strand starting at position 202 of SEQ ID NO: 1562752
augauaucgccuugcauuu

SEQ ID NO: 1770132 - RNA, 19 nt, Artificial Sequence
  Description of Artificial Sequence: Synthetic oligonucleotide
  Antisense strand to SEQ ID NO: 1770131
aaaugcaaggcgauaucau

SEQ ID NO: 1770133 - RNA, 19 nt, Artificial Sequence
  Description of Artificial Sequence: Synthetic oligonucleotide
  Sense strand starting at position 275 of SEQ ID NO: 1562752
acaacaucccuacgaggua

SEQ ID NO: 1770134 - RNA, 19 nt, Artificial Sequence
  Description of Artificial Sequence: Synthetic oligonucleotide
  Antisense strand to SEQ ID NO: 1770133
uaccucguagggauguugu

SEQ ID NO: 1770135 - RNA, 19 nt, Artificial Sequence
  Description of Artificial Sequence: Synthetic oligonucleotide
  Sense strand starting at position 323 of SEQ ID NO: 1562752
gggccuaagaugugggaga

SEQ ID NO: 1770136 - RNA, 19 nt, Artificial Sequence
  Description of Artificial Sequence: Synthetic oligonucleotide
  Antisense strand to SEQ ID NO: 1770135
ucucccacaucuuaggccc

SEQ ID NO: 1770137 - RNA, 19 nt, Artificial Sequence
  Description of Artificial Sequence: Synthetic oligonucleotide
  Sense strand starting at position 325 of SEQ ID NO: 1562752
gccuaagaugugggagaua

SEQ ID NO: 1770138 - RNA, 19 nt, Artificial Sequence
  Description of Artificial Sequence: Synthetic oligonucleotide
  Antisense strand to SEQ ID NO: 1770137
uaucucccacaucuuaggc

SEQ ID NO: 1770139 - RNA, 19 nt, Artificial Sequence
  Description of Artificial Sequence: Synthetic oligonucleotide
  Sense strand starting at position 356 of SEQ ID NO: 1562752
uuguauuagcaacagagau

SEQ ID NO: 1770140 - RNA, 19 nt, Artificial Sequence
  Description of Artificial Sequence: Synthetic oligonucleotide
  Antisense strand to SEQ ID NO: 1770139
aucucuguugcuaauacaa

SEQ ID NO: 1770141 - RNA, 19 nt, Artificial Sequence
  Description of Artificial Sequence: Synthetic oligonucleotide
  Sense strand starting at position 716 of SEQ ID NO: 1562752
uggauuguuaaaggagagu

SEQ ID NO: 1770142 - RNA, 19 nt, Artificial Sequence
  Description of Artificial Sequence: Synthetic oligonucleotide
  Antisense strand to SEQ ID NO: 1770141
acucuccuuuaacaaucca

SEQ ID NO: 1770143 - RNA, 19 nt, Artificial Sequence
  Description of Artificial Sequence: Synthetic oligonucleotide
  Sense strand starting at position 730 of SEQ ID NO: 1562752
agaguaacuucugcuaaau

SEQ ID NO: 1770144 - RNA, 19 nt, Artificial Sequence
  Description of Artificial Sequence: Synthetic oligonucleotide
  Antisense strand to SEQ ID NO: 1770143
auuuagcagaaguuacucu

SEQ ID NO: 1770145 - RNA, 19 nt, Artificial Sequence
  Description of Artificial Sequence: Synthetic oligonucleotide
  Sense strand starting at position 809 of SEQ ID NO: 1562752
ugacaaacauugcugcaua

SEQ ID NO: 1770146 - RNA, 19 nt, Artificial Sequence
  Description of Artificial Sequence: Synthetic oligonucleotide
  Antisense strand to SEQ ID NO: 1770145
uaugcagcaauguuuguca

SEQ ID NO: 1770147 - RNA, 19 nt, Artificial Sequence
  Description of Artificial Sequence: Synthetic oligonucleotide
  Sense strand starting at position 851 of SEQ ID NO: 1562752
aguuucccauccucagaua

SEQ ID NO: 1770148 - RNA, 19 nt, Artificial Sequence
  Description of Artificial Sequence: Synthetic oligonucleotide
  Antisense strand to SEQ ID NO: 1770147
uaucugaggaugggaaacu

SEQ ID NO: 1770149 - RNA, 19 nt, Artificial Sequence
  Description of Artificial Sequence: Synthetic oligonucleotide
  Sense strand starting at position 929 of SEQ ID NO: 1562752
cuccuaguuuaucuaggga

SEQ ID NO: 1770150 - RNA, 19 nt, Artificial Sequence
  Description of Artificial Sequence: Synthetic oligonucleotide
  Antisense strand to SEQ ID NO: 1770149
ucccuagauaaacuaggag

SEQ ID NO: 1770151 - RNA, 19 nt, Artificial Sequence
  Description of Artificial Sequence: Synthetic oligonucleotide
  Sense strand starting at position 934 of SEQ ID NO: 1562752
aguuuaucuagggaugugu

SEQ ID NO: 1770152 - RNA, 19 nt, Artificial Sequence
  Description of Artificial Sequence: Synthetic oligonucleotide
  Antisense strand to SEQ ID NO: 1770151
acacaucccuagauaaacu

SEQ ID NO: 1770153 - RNA, 19 nt, Artificial Sequence
  Description of Artificial Sequence: Synthetic oligonucleotide
  Sense strand starting at position 986 of SEQ ID NO: 1562752
cuuuauuaagaaggccuaa

SEQ ID NO: 1770154 - RNA, 19 nt, Artificial Sequence
  Description of Artificial Sequence: Synthetic oligonucleotide
  Antisense strand to SEQ ID NO: 1770153
uuaggccuucuuaauaaag

SEQ ID NO: 1770155 - RNA, 19 nt, Artificial Sequence
  Description of Artificial Sequence: Synthetic oligonucleotide
  Sense strand starting at position 998 of SEQ ID NO: 1562752
ggccuaauuccagguagau

SEQ ID NO: 1770156 - RNA, 19 nt, Artificial Sequence
  Description of Artificial Sequence: Synthetic oligonucleotide
  Antisense strand to SEQ ID NO: 1770155
aucuaccuggaauuaggcc

SEQ ID NO: 1770157 - RNA, 19 nt, Artificial Sequence
  Description of Artificial Sequence: Synthetic oligonucleotide
  Sense strand starting at position 1010 of SEQ ID NO: 1562752
gguagauaaauacgguaaa

SEQ ID NO: 1770158 - RNA, 19 nt, Artificial Sequence
  Description of Artificial Sequence: Synthetic oligonucleotide
  Antisense strand to SEQ ID NO: 1770157
uuuaccguauuuaucuacc

SEQ ID NO: 1770159 - RNA, 19 nt, Artificial Sequence
  Description of Artificial Sequence: Synthetic oligonucleotide
  Sense strand starting at position 1042 of SEQ ID NO: 1562752
uauaccugucagggcaaua

SEQ ID NO: 1770160 - RNA, 19 nt, Artificial Sequence
  Description of Artificial Sequence: Synthetic oligonucleotide
  Antisense strand to SEQ ID NO: 1770159
uauugcccugacagguaua

SEQ ID NO: 1770161 - RNA, 19 nt, Artificial Sequence
  Description of Artificial Sequence: Synthetic oligonucleotide
  Sense strand starting at position 1416 of SEQ ID NO: 1562752
auuaaauucugaccauggu

SEQ ID NO: 1770162 - RNA, 19 nt, Artificial Sequence
  Description of Artificial Sequence: Synthetic oligonucleotide
  Antisense strand to SEQ ID NO: 1770161
accauggucagaauuuaau

SEQ ID NO: 1770163 - RNA, 19 nt, Artificial Sequence
  Description of Artificial Sequence: Synthetic oligonucleotide
  Sense strand starting at position 1419 of SEQ ID NO: 1562752
aaauucugaccauggugaa

SEQ ID NO: 1770164 - RNA, 19 nt, Artificial Sequence
  Description of Artificial Sequence: Synthetic oligonucleotide
  Antisense strand to SEQ ID NO: 1770163
uucaccauggucagaauuu

SEQ ID NO: 1770165 - RNA, 19 nt, Artificial Sequence
  Description of Artificial Sequence: Synthetic oligonucleotide
  Sense strand starting at position 1452 of SEQ ID NO: 1562752
ccaugaucccaaggucgaa

SEQ ID NO: 1770166 - RNA, 19 nt, Artificial Sequence
  Description of Artificial Sequence: Synthetic oligonucleotide
  Antisense strand to SEQ ID NO: 1770165
uucgaccuugggaucaugg

SEQ ID NO: 1770167 - RNA, 19 nt, Artificial Sequence
  Description of Artificial Sequence: Synthetic oligonucleotide
  Sense strand starting at position 1516 of SEQ ID NO: 1562752
guguuauggacuggguaag

SEQ ID NO: 1770168 - RNA, 19 nt, Artificial Sequence
  Description of Artificial Sequence: Synthetic oligonucleotide
  Antisense strand to SEQ ID NO: 1770167
cuuacccaguccauaacac

SEQ ID NO: 1770169 - RNA, 19 nt, Artificial Sequence
  Description of Artificial Sequence: Synthetic oligonucleotide
  Sense strand starting at position 1711 of SEQ ID NO: 1562752
aaguuucuagaguauaugu

SEQ ID NO: 1770170 - RNA, 19 nt, Artificial Sequence
  Description of Artificial Sequence: Synthetic oligonucleotide
  Antisense strand to SEQ ID NO: 1770169
acauauacucuagaaacuu

SEQ ID NO: 1770171 - RNA, 19 nt, Artificial Sequence
  Description of Artificial Sequence: Synthetic oligonucleotide
  Sense strand starting at position 1716 of SEQ ID NO: 1562752
ucuagaguauauguacaga

SEQ ID NO: 1770172 - RNA, 19 nt, Artificial Sequence
  Description of Artificial Sequence: Synthetic oligonucleotide
  Antisense strand to SEQ ID NO: 1770171
ucuguacauauacucuaga

SEQ ID NO: 1770173 - RNA, 19 nt, Artificial Sequence
  Description of Artificial Sequence: Synthetic oligonucleotide
  Sense strand starting at position 1719 of SEQ ID NO: 1562752
agaguauauguacagaugu

SEQ ID NO: 1770174 - RNA, 19 nt, Artificial Sequence
  Description of Artificial Sequence: Synthetic oligonucleotide
  Antisense strand to SEQ ID NO: 1770173
acaucuguacauauacucu

SEQ ID NO: 1770175 - RNA, 19 nt, Artificial Sequence
  Description of Artificial Sequence: Synthetic oligonucleotide
  Sense strand starting at position 2402 of SEQ ID NO: 1562752
gaaacauucugagcuggga

SEQ ID NO: 1770176 - RNA, 19 nt, Artificial Sequence
  Description of Artificial Sequence: Synthetic oligonucleotide
  Antisense strand to SEQ ID NO: 1770175
ucccagcucagaauguuuc

SEQ ID NO: 1770177 - RNA, 19 nt, Artificial Sequence
  Description of Artificial Sequence: Synthetic oligonucleotide
  Sense strand starting at position 2510 of SEQ ID NO: 1562752
acugaaggcuuucugggau

SEQ ID NO: 1770178 - RNA, 19 nt, Artificial Sequence
  Description of Artificial Sequence: Synthetic oligonucleotide
  Antisense strand to SEQ ID NO: 1770177
aucccagaaagccuucagu

SEQ ID NO: 1770179 - RNA, 19 nt, Artificial Sequence
  Description of Artificial Sequence: Synthetic oligonucleotide
  Sense strand starting at position 2575 of SEQ ID NO: 1562752
aguucuuaccuuuaaaugu

SEQ ID NO: 1770180 - RNA, 19 nt, Artificial Sequence
  Description of Artificial Sequence: Synthetic oligonucleotide
  Antisense strand to SEQ ID NO: 1770179
acauuuaaagguaagaacu

SEQ ID NO: 1770181 - RNA, 19 nt, Artificial Sequence
  Description of Artificial Sequence: Synthetic oligonucleotide
  Sense strand starting at position 2764 of SEQ ID NO: 1562752
agggaaauguuggcucacu

SEQ ID NO: 1770182 - RNA, 19 nt, Artificial Sequence
  Description of Artificial Sequence: Synthetic oligonucleotide
  Antisense strand to SEQ ID NO: 1770181
agugagccaacauuucccu

SEQ ID NO: 1770183 - RNA, 19 nt, Artificial Sequence
  Description of Artificial Sequence: Synthetic oligonucleotide
  Sense strand starting at position 2769 of SEQ ID NO: 1562752
aauguuggcucacugggau

SEQ ID NO: 1770184 - RNA, 19 nt, Artificial Sequence
  Description of Artificial Sequence: Synthetic oligonucleotide
  Antisense strand to SEQ ID NO: 1770183
aucccagugagccaacauu

SEQ ID NO: 1770185 - RNA, 19 nt, Artificial Sequence
  Description of Artificial Sequence: Synthetic oligonucleotide
  Sense strand starting at position 2794 of SEQ ID NO: 1562752
agcauuaaucccuggaaua

SEQ ID NO: 1770186 - RNA, 19 nt, Artificial Sequence
  Description of Artificial Sequence: Synthetic oligonucleotide
  Antisense strand to SEQ ID NO: 1770185
uauuccagggauuaaugcu

SEQ ID NO: 1770187 - RNA, 19 nt, Artificial Sequence
  Description of Artificial Sequence: Synthetic oligonucleotide
  Sense strand starting at position 2795 of SEQ ID NO: 1562752
gcauuaaucccuggaauac

SEQ ID NO: 1770188 - RNA, 19 nt, Artificial Sequence
  Description of Artificial Sequence: Synthetic oligonucleotide
  Antisense strand to SEQ ID NO: 1770187
guauuccagggauuaaugc

SEQ ID NO: 1770189 - RNA, 19 nt, Artificial Sequence
  Description of Artificial Sequence: Synthetic oligonucleotide
  Sense strand starting at position 3044 of SEQ ID NO: 1562752
ugucgaaugaguuaaagga

SEQ ID NO: 1770190 - RNA, 19 nt, Artificial Sequence
  Description of Artificial Sequence: Synthetic oligonucleotide
  Antisense strand to SEQ ID NO: 1770189
uccuuuaacucauucgaca

SEQ ID NO: 1770191 - RNA, 19 nt, Artificial Sequence
  Description of Artificial Sequence: Synthetic oligonucleotide
  Sense strand starting at position 3644 of SEQ ID NO: 1562752
aguccuuauucuuugauag

SEQ ID NO: 1770192 - RNA, 19 nt, Artificial Sequence
  Description of Artificial Sequence: Synthetic oligonucleotide
  Antisense strand to SEQ ID NO: 1770191
cuaucaaagaauaaggacu

SEQ ID NO: 1770193 - RNA, 19 nt, Artificial Sequence
  Description of Artificial Sequence: Synthetic oligonucleotide
  Sense strand starting at position 3747 of SEQ ID NO: 1562752
ugguguuacauggaaagua

SEQ ID NO: 1770194 - RNA, 19 nt, Artificial Sequence
  Description of Artificial Sequence: Synthetic oligonucleotide
  Antisense strand to SEQ ID NO: 1770193
uacuuuccauguaacacca

SEQ ID NO: 1770195 - RNA, 19 nt, Artificial Sequence
  Description of Artificial Sequence: Synthetic oligonucleotide
  Sense strand starting at position 3908 of SEQ ID NO: 1562752
guaguaaguacugauugac

SEQ ID NO: 1770196 - RNA, 19 nt, Artificial Sequence
  Description of Artificial Sequence: Synthetic oligonucleotide
  Antisense strand to SEQ ID NO: 1770195
gucaaucaguacuuacuac

SEQ ID NO: 1770197 - RNA, 19 nt, Artificial Sequence
  Description of Artificial Sequence: Synthetic oligonucleotide
  Sense strand starting at position 3911 of SEQ ID NO: 1562752
guaaguacugauugacaga

SEQ ID NO: 1770198 - RNA, 19 nt, Artificial Sequence
  Description of Artificial Sequence: Synthetic oligonucleotide
  Antisense strand to SEQ ID NO: 1770197
ucugucaaucaguacuuac

SEQ ID NO: 1770199 - RNA, 19 nt, Artificial Sequence
  Description of Artificial Sequence: Synthetic oligonucleotide
  Sense strand starting at position 3927 of SEQ ID NO: 1562752
agacauguuauguagagca

SEQ ID NO: 1770200 - RNA, 19 nt, Artificial Sequence
  Description of Artificial Sequence: Synthetic oligonucleotide
  Antisense strand to SEQ ID NO: 1770199
ugcucuacauaacaugucu

SEQ ID NO: 1770201 - RNA, 19 nt, Artificial Sequence
  Description of Artificial Sequence: Synthetic oligonucleotide
  Sense strand starting at position 3929 of SEQ ID NO: 1562752
acauguuauguagagcaua

SEQ ID NO: 1770202 - RNA, 19 nt, Artificial Sequence
  Description of Artificial Sequence: Synthetic oligonucleotide
  Antisense strand to SEQ ID NO: 1770201
uaugcucuacauaacaugu

SEQ ID NO: 1770203 - RNA, 19 nt, Artificial Sequence
  Description of Artificial Sequence: Synthetic oligonucleotide
  Sense strand starting at position 85 of SEQ ID NO: 1562753
gggcggcuucugugguauu

SEQ ID NO: 1770204 - RNA, 19 nt, Artificial Sequence
  Description of Artificial Sequence: Synthetic oligonucleotide
  Antisense strand to SEQ ID NO: 1770203
aauaccacagaagccgccc

SEQ ID NO: 1770205 - RNA, 19 nt, Artificial Sequence
  Description of Artificial Sequence: Synthetic oligonucleotide
  Sense strand starting at position 88 of SEQ ID NO: 1562753
cggcuucugugguauuuga

SEQ ID NO: 1770206 - RNA, 19 nt, Artificial Sequence
  Description of Artificial Sequence: Synthetic oligonucleotide
  Antisense strand to SEQ ID NO: 1770205
ucaaauaccacagaagccg

SEQ ID NO: 1770207 - RNA, 19 nt, Artificial Sequence
  Description of Artificial Sequence: Synthetic oligonucleotide
  Sense strand starting at position 98 of SEQ ID NO: 1562753
gguauuugaaguugcuagu

SEQ ID NO: 1770208 - RNA, 19 nt, Artificial Sequence
  Description of Artificial Sequence: Synthetic oligonucleotide
  Antisense strand to SEQ ID NO: 1770207
acuagcaacuucaaauacc

SEQ ID NO: 1770209 - RNA, 19 nt, Artificial Sequence
  Description of Artificial Sequence: Synthetic oligonucleotide
  Sense strand starting at position 104 of SEQ ID NO: 1562753
ugaaguugcuaguuucuca

SEQ ID NO: 1770210 - RNA, 19 nt, Artificial Sequence
  Description of Artificial Sequence: Synthetic oligonucleotide
  Antisense strand to SEQ ID NO: 1770209
ugagaaacuagcaacuuca

SEQ ID NO: 1770211 - RNA, 19 nt, Artificial Sequence
  Description of Artificial Sequence: Synthetic oligonucleotide
  Sense strand starting at position 107 of SEQ ID NO: 1562753
aguugcuaguuucucagua

SEQ ID NO: 1770212 - RNA, 19 nt, Artificial Sequence
  Description of Artificial Sequence: Synthetic oligonucleotide
  Antisense strand to SEQ ID NO: 1770211
uacugagaaacuagcaacu

SEQ ID NO: 1770213 - RNA, 19 nt, Artificial Sequence
  Description of Artificial Sequence: Synthetic oligonucleotide
  Sense strand starting at position 108 of SEQ ID NO: 1562753
guugcuaguuucucaguau

SEQ ID NO: 1770214 - RNA, 19 nt, Artificial Sequence
  Description of Artificial Sequence: Synthetic oligonucleotide
  Antisense strand to SEQ ID NO: 1770213
auacugagaaacuagcaac

SEQ ID NO: 1770215 - RNA, 19 nt, Artificial Sequence
  Description of Artificial Sequence: Synthetic oligonucleotide
  Sense strand starting at position 111 of SEQ ID NO: 1562753
gcuaguuucucaguaucag

SEQ ID NO: 1770216 - RNA, 19 nt, Artificial Sequence
  Description of Artificial Sequence: Synthetic oligonucleotide
  Antisense strand to SEQ ID NO: 1770215
cugauacugagaaacuagc

SEQ ID NO: 1770217 - RNA, 19 nt, Artificial Sequence
  Description of Artificial Sequence: Synthetic oligonucleotide
  Sense strand starting at position 179 of SEQ ID NO: 1562753
cugcgaccuucuuauucua

SEQ ID NO: 1770218 - RNA, 19 nt, Artificial Sequence
  Description of Artificial Sequence: Synthetic oligonucleotide
  Antisense strand to SEQ ID NO: 1770217
uagaauaagaaggucgcag

SEQ ID NO: 1770219 - RNA, 19 nt, Artificial Sequence
  Description of Artificial Sequence: Synthetic oligonucleotide
  Sense strand starting at position 181 of SEQ ID NO: 1562753
gcgaccuucuuauucuaca

SEQ ID NO: 1770220 - RNA, 19 nt, Artificial Sequence
  Description of Artificial Sequence: Synthetic oligonucleotide
  Antisense strand to SEQ ID NO: 1770219
uguagaauaagaaggucgc

SEQ ID NO: 1770221 - RNA, 19 nt, Artificial Sequence
  Description of Artificial Sequence: Synthetic oligonucleotide
  Sense strand starting at position 312 of SEQ ID NO: 1562753
ggucaauguccacauugag

SEQ ID NO: 1770222 - RNA, 19 nt, Artificial Sequence
  Description of Artificial Sequence: Synthetic oligonucleotide
  Antisense strand to SEQ ID NO: 1770221
cucaauguggacauugacc

SEQ ID NO: 1770223 - RNA, 19 nt, Artificial Sequence
  Description of Artificial Sequence: Synthetic oligonucleotide
  Sense strand starting at position 315 of SEQ ID NO: 1562753
caauguccacauugagaag

SEQ ID NO: 1770224 - RNA, 19 nt, Artificial Sequence
  Description of Artificial Sequence: Synthetic oligonucleotide
  Antisense strand to SEQ ID NO: 1770223
cuucucaauguggacauug

SEQ ID NO: 1770225 - RNA, 19 nt, Artificial Sequence
  Description of Artificial Sequence: Synthetic oligonucleotide
  Sense strand starting at position 967 of SEQ ID NO: 1562753
cccuuauucgcugcggaca

SEQ ID NO: 1770226 - RNA, 19 nt, Artificial Sequence
  Description of Artificial Sequence: Synthetic oligonucleotide
  Antisense strand to SEQ ID NO: 1770225
uguccgcagcgaauaaggg

SEQ ID NO: 1770227 - RNA, 19 nt, Artificial Sequence
  Description of Artificial Sequence: Synthetic oligonucleotide
  Sense strand starting at position 1093 of SEQ ID NO: 1562753
ucccaaauucuggacguga

SEQ ID NO: 1770228 - RNA, 19 nt, Artificial Sequence
  Description of Artificial Sequence: Synthetic oligonucleotide
  Antisense strand to SEQ ID NO: 1770227
ucacguccagaauuuggga

SEQ ID NO: 1770229 - RNA, 19 nt, Artificial Sequence
  Description of Artificial Sequence: Synthetic oligonucleotide
  Sense strand starting at position 1095 of SEQ ID NO: 1562753
ccaaauucuggacgugaac

SEQ ID NO: 1770230 - RNA, 19 nt, Artificial Sequence
  Description of Artificial Sequence: Synthetic oligonucleotide
  Antisense strand to SEQ ID NO: 1770229
guucacguccagaauuugg

SEQ ID NO: 1770231 - RNA, 19 nt, Artificial Sequence
  Description of Artificial Sequence: Synthetic oligonucleotide
  Sense strand starting at position 1117 of SEQ ID NO: 1562753
ggccucuuucgucaccaga

SEQ ID NO: 1770232 - RNA, 19 nt, Artificial Sequence
  Description of Artificial Sequence: Synthetic oligonucleotide
  Antisense strand to SEQ ID NO: 1770231
ucuggugacgaaagaggcc

SEQ ID NO: 1770233 - RNA, 19 nt, Artificial Sequence
  Description of Artificial Sequence: Synthetic oligonucleotide
  Sense strand starting at position 1426 of SEQ ID NO: 1562753
cgcguacucacgucaggau

SEQ ID NO: 1770234 - RNA, 19 nt, Artificial Sequence
  Description of Artificial Sequence: Synthetic oligonucleotide
  Antisense strand to SEQ ID NO: 1770233
auccugacgugaguacgcg

SEQ ID NO: 1770235 - RNA, 19 nt, Artificial Sequence
  Description of Artificial Sequence: Synthetic oligonucleotide
  Sense strand starting at position 1427 of SEQ ID NO: 1562753
gcguacucacgucaggaua

SEQ ID NO: 1770236 - RNA, 19 nt, Artificial Sequence
  Description of Artificial Sequence: Synthetic oligonucleotide
  Antisense strand to SEQ ID NO: 1770235
uauccugacgugaguacgc

SEQ ID NO: 1770237 - RNA, 19 nt, Artificial Sequence
  Description of Artificial Sequence: Synthetic oligonucleotide
  Sense strand starting at position 1442 of SEQ ID NO: 1562753
gauacugguucugcacgaa

SEQ ID NO: 1770238 - RNA, 19 nt, Artificial Sequence
  Description of Artificial Sequence: Synthetic oligonucleotide
  Antisense strand to SEQ ID NO: 1770237
uucgugcagaaccaguauc

SEQ ID NO: 1770239 - RNA, 19 nt, Artificial Sequence
  Description of Artificial Sequence: Synthetic oligonucleotide
  Sense strand starting at position 1480 of SEQ ID NO: 1562753
agcugcucuucgcugaaga

SEQ ID NO: 1770240 - RNA, 19 nt, Artificial Sequence
  Description of Artificial Sequence: Synthetic oligonucleotide
  Antisense strand to SEQ ID NO: 1770239
ucuucagcgaagagcagcu

SEQ ID NO: 1770241 - RNA, 19 nt, Artificial Sequence
  Description of Artificial Sequence: Synthetic oligonucleotide
  Sense strand starting at position 1481 of SEQ ID NO: 1562753
gcugcucuucgcugaagau

SEQ ID NO: 1770242 - RNA, 19 nt, Artificial Sequence
  Description of Artificial Sequence: Synthetic oligonucleotide
  Antisense strand to SEQ ID NO: 1770241
aucuucagcgaagagcagc

SEQ ID NO: 1770243 - RNA, 19 nt, Artificial Sequence
  Description of Artificial Sequence: Synthetic oligonucleotide
  Sense strand starting at position 1925 of SEQ ID NO: 1562753
ggaugugcucgauggagaa

SEQ ID NO: 1770244 - RNA, 19 nt, Artificial Sequence
  Description of Artificial Sequence: Synthetic oligonucleotide
  Antisense strand to SEQ ID NO: 1770243
uucuccaucgagcacaucc

SEQ ID NO: 1770245 - RNA, 19 nt, Artificial Sequence
  Description of Artificial Sequence: Synthetic oligonucleotide
  Sense strand starting at position 2047 of SEQ ID NO: 1562753
ggagggagcgcgcaguaau

SEQ ID NO: 1770246 - RNA, 19 nt, Artificial Sequence
  Description of Artificial Sequence: Synthetic oligonucleotide
  Antisense strand to SEQ ID NO: 1770245
auuacugcgcgcucccucc

SEQ ID NO: 1770247 - RNA, 19 nt, Artificial Sequence
  Description of Artificial Sequence: Synthetic oligonucleotide
  Sense strand starting at position 3032 of SEQ ID NO: 1562753
ggcucauacuccguuguca

SEQ ID NO: 1770248 - RNA, 19 nt, Artificial Sequence
  Description of Artificial Sequence: Synthetic oligonucleotide
  Antisense strand to SEQ ID NO: 1770247
ugacaacggaguaugagcc

SEQ ID NO: 1770249 - RNA, 19 nt, Artificial Sequence
  Description of Artificial Sequence: Synthetic oligonucleotide
  Sense strand starting at position 3034 of SEQ ID NO: 1562753
cucauacuccguugucaau

SEQ ID NO: 1770250 - RNA, 19 nt, Artificial Sequence
  Description of Artificial Sequence: Synthetic oligonucleotide
  Antisense strand to SEQ ID NO: 1770249
auugacaacggaguaugag

SEQ ID NO: 1770251 - RNA, 19 nt, Artificial Sequence
  Description of Artificial Sequence: Synthetic oligonucleotide
  Sense strand starting at position 3048 of SEQ ID NO: 1562753
ucaauuucuggccguguga

SEQ ID NO: 1770252 - RNA, 19 nt, Artificial Sequence
  Description of Artificial Sequence: Synthetic oligonucleotide
  Antisense strand to SEQ ID NO: 1770251
ucacacggccagaaauuga

SEQ ID NO: 1770253 - RNA, 19 nt, Artificial Sequence
  Description of Artificial Sequence: Synthetic oligonucleotide
  Sense strand starting at position 3116 of SEQ ID NO: 1562753
guguagugacuagguguga

SEQ ID NO: 1770254 - RNA, 19 nt, Artificial Sequence
  Description of Artificial Sequence: Synthetic oligonucleotide
  Antisense strand to SEQ ID NO: 1770253
ucacaccuagucacuacac

SEQ ID NO: 1770255 - RNA, 19 nt, Artificial Sequence
  Description of Artificial Sequence: Synthetic oligonucleotide
  Sense strand starting at position 3222 of SEQ ID NO: 1562753
ccacucugcuaucagugaa

SEQ ID NO: 1770256 - RNA, 19 nt, Artificial Sequence
  Description of Artificial Sequence: Synthetic oligonucleotide
  Antisense strand to SEQ ID NO: 1770255
uucacugauagcagagugg

SEQ ID NO: 1770257 - RNA, 19 nt, Artificial Sequence
  Description of Artificial Sequence: Synthetic oligonucleotide
  Sense strand starting at position 3225 of SEQ ID NO: 1562753
cucugcuaucagugaaagu

SEQ ID NO: 1770258 - RNA, 19 nt, Artificial Sequence
  Description of Artificial Sequence: Synthetic oligonucleotide
  Antisense strand to SEQ ID NO: 1770257
acuuucacugauagcagag

SEQ ID NO: 1770259 - RNA, 19 nt, Artificial Sequence
  Description of Artificial Sequence: Synthetic oligonucleotide
  Sense strand starting at position 3226 of SEQ ID NO: 1562753
ucugcuaucagugaaagug

SEQ ID NO: 1770260 - RNA, 19 nt, Artificial Sequence
  Description of Artificial Sequence: Synthetic oligonucleotide
  Antisense strand to SEQ ID NO: 1770259
cacuuucacugauagcaga

SEQ ID NO: 1770261 - RNA, 19 nt, Artificial Sequence
  Description of Artificial Sequence: Synthetic oligonucleotide
  Sense strand starting at position 3236 of SEQ ID NO: 1562753
gugaaagugcuguggacau

SEQ ID NO: 1770262 - RNA, 19 nt, Artificial Sequence
  Description of Artificial Sequence: Synthetic oligonucleotide
  Antisense strand to SEQ ID NO: 1770261
auguccacagcacuuucac

SEQ ID NO: 1770263 - RNA, 19 nt, Artificial Sequence
  Description of Artificial Sequence: Synthetic oligonucleotide
  Sense strand starting at position 3238 of SEQ ID NO: 1562753
gaaagugcuguggacauca

SEQ ID NO: 1770264 - RNA, 19 nt, Artificial Sequence
  Description of Artificial Sequence: Synthetic oligonucleotide
  Antisense strand to SEQ ID NO: 1770263
ugauguccacagcacuuuc

SEQ ID NO: 1770265 - RNA, 19 nt, Artificial Sequence
  Description of Artificial Sequence: Synthetic oligonucleotide
  Sense strand starting at position 3249 of SEQ ID NO: 1562753
ggacaucacugugaccgaa

SEQ ID NO: 1770266 - RNA, 19 nt, Artificial Sequence
  Description of Artificial Sequence: Synthetic oligonucleotide
  Antisense strand to SEQ ID NO: 1770265
uucggucacagugaugucc

SEQ ID NO: 1770267 - RNA, 19 nt, Artificial Sequence
  Description of Artificial Sequence: Synthetic oligonucleotide
  Sense strand starting at position 3261 of SEQ ID NO: 1562753
gaccgaaccugcugauuua

SEQ ID NO: 1770268 - RNA, 19 nt, Artificial Sequence
  Description of Artificial Sequence: Synthetic oligonucleotide
  Antisense strand to SEQ ID NO: 1770267
uaaaucagcagguucgguc

SEQ ID NO: 1770269 - RNA, 19 nt, Artificial Sequence
  Description of Artificial Sequence: Synthetic oligonucleotide
  Sense strand starting at position 3322 of SEQ ID NO: 1562753
ucuggaggcucagugauga

SEQ ID NO: 1770270 - RNA, 19 nt, Artificial Sequence
  Description of Artificial Sequence: Synthetic oligonucleotide
  Antisense strand to SEQ ID NO: 1770269
ucaucacugagccuccaga

SEQ ID NO: 1770271 - RNA, 19 nt, Artificial Sequence
  Description of Artificial Sequence: Synthetic oligonucleotide
  Sense strand starting at position 3382 of SEQ ID NO: 1562753
ccaccucuuggugguagaa

SEQ ID NO: 1770272 - RNA, 19 nt, Artificial Sequence
  Description of Artificial Sequence: Synthetic oligonucleotide
  Antisense strand to SEQ ID NO: 1770271
uucuaccaccaagaggugg

SEQ ID NO: 1770273 - RNA, 19 nt, Artificial Sequence
  Description of Artificial Sequence: Synthetic oligonucleotide
  Sense strand starting at position 3662 of SEQ ID NO: 1562753
agacaccaucuuugugaca

SEQ ID NO: 1770274 - RNA, 19 nt, Artificial Sequence
  Description of Artificial Sequence: Synthetic oligonucleotide
  Antisense strand to SEQ ID NO: 1770273
ugucacaaagauggugucu

SEQ ID NO: 1770275 - RNA, 19 nt, Artificial Sequence
  Description of Artificial Sequence: Synthetic oligonucleotide
  Sense strand starting at position 3675 of SEQ ID NO: 1562753
gugacagugacucacaagu

SEQ ID NO: 1770276 - RNA, 19 nt, Artificial Sequence
  Description of Artificial Sequence: Synthetic oligonucleotide
  Antisense strand to SEQ ID NO: 1770275
acuugugagucacugucac

SEQ ID NO: 1770277 - RNA, 19 nt, Artificial Sequence
  Description of Artificial Sequence: Synthetic oligonucleotide
  Sense strand starting at position 3769 of SEQ ID NO: 1562753
ccaauaaaguucucccagu

SEQ ID NO: 1770278 - RNA, 19 nt, Artificial Sequence
  Description of Artificial Sequence: Synthetic oligonucleotide
  Antisense strand to SEQ ID NO: 1770277
acugggagaacuuuauugg

SEQ ID NO: 1770279 - RNA, 19 nt, Artificial Sequence
  Description of Artificial Sequence: Synthetic oligonucleotide
  Sense strand starting at position 3936 of SEQ ID NO: 1562753
accaguccaccuugguaaa

SEQ ID NO: 1770280 - RNA, 19 nt, Artificial Sequence
  Description of Artificial Sequence: Synthetic oligonucleotide
  Antisense strand to SEQ ID NO: 1770279
uuuaccaagguggacuggu

SEQ ID NO: 1770281 - RNA, 19 nt, Artificial Sequence
  Description of Artificial Sequence: Synthetic oligonucleotide
  Sense strand starting at position 3937 of SEQ ID NO: 1562753
ccaguccaccuugguaaau

SEQ ID NO: 1770282 - RNA, 19 nt, Artificial Sequence
  Description of Artificial Sequence: Synthetic oligonucleotide
  Antisense strand to SEQ ID NO: 1770281
auuuaccaagguggacugg

SEQ ID NO: 1770283 - RNA, 19 nt, Artificial Sequence
  Description of Artificial Sequence: Synthetic oligonucleotide
  Sense strand starting at position 6 of SEQ ID NO: 1562754
uagauuggguagucugcaa

SEQ ID NO: 1770284 - RNA, 19 nt, Artificial Sequence
  Description of Artificial Sequence: Synthetic oligonucleotide
  Antisense strand to SEQ ID NO: 1770283
uugcagacuacccaaucua

SEQ ID NO: 1770285 - RNA, 19 nt, Artificial Sequence
  Description of Artificial Sequence: Synthetic oligonucleotide
  Sense strand starting at position 13 of SEQ ID NO: 1562754
gguagucugcaacaaguca

SEQ ID NO: 1770286 - RNA, 19 nt, Artificial Sequence
  Description of Artificial Sequence: Synthetic oligonucleotide
  Antisense strand to SEQ ID NO: 1770285
ugacuuguugcagacuacc

SEQ ID NO: 1770287 - RNA, 19 nt, Artificial Sequence
  Description of Artificial Sequence: Synthetic oligonucleotide
  Sense strand starting at position 987 of SEQ ID NO: 1562754
gggcaccuuucggucaaga

SEQ ID NO: 1770288 - RNA, 19 nt, Artificial Sequence
  Description of Artificial Sequence: Synthetic oligonucleotide
  Antisense strand to SEQ ID NO: 1770287
ucuugaccgaaaggugccc

SEQ ID NO: 1770289 - RNA, 19 nt, Artificial Sequence
  Description of Artificial Sequence: Synthetic oligonucleotide
  Sense strand starting at position 989 of SEQ ID NO: 1562754
gcaccuuucggucaagaug

SEQ ID NO: 1770290 - RNA, 19 nt, Artificial Sequence
  Description of Artificial Sequence: Synthetic oligonucleotide
  Antisense strand to SEQ ID NO: 1770289
caucuugaccgaaaggugc

SEQ ID NO: 1770291 - RNA, 19 nt, Artificial Sequence
  Description of Artificial Sequence: Synthetic oligonucleotide
  Sense strand starting at position 992 of SEQ ID NO: 1562754
ccuuucggucaagaugaaa

SEQ ID NO: 1770292 - RNA, 19 nt, Artificial Sequence
  Description of Artificial Sequence: Synthetic oligonucleotide
  Antisense strand to SEQ ID NO: 1770291
uuucaucuugaccgaaagg

SEQ ID NO: 1770293 - RNA, 19 nt, Artificial Sequence
  Description of Artificial Sequence: Synthetic oligonucleotide
  Sense strand starting at position 1042 of SEQ ID NO: 1562754
ggcuguugaucugcaagaa

SEQ ID NO: 1770294 - RNA, 19 nt, Artificial Sequence
  Description of Artificial Sequence: Synthetic oligonucleotide
  Antisense strand to SEQ ID NO: 1770293
uucuugcagaucaacagcc

SEQ ID NO: 1770295 - RNA, 19 nt, Artificial Sequence
  Description of Artificial Sequence: Synthetic oligonucleotide
  Sense strand starting at position 1043 of SEQ ID NO: 1562754
gcuguugaucugcaagaac

SEQ ID NO: 1770296 - RNA, 19 nt, Artificial Sequence
  Description of Artificial Sequence: Synthetic oligonucleotide
  Antisense strand to SEQ ID NO: 1770295
guucuugcagaucaacagc

SEQ ID NO: 1770297 - RNA, 19 nt, Artificial Sequence
  Description of Artificial Sequence: Synthetic oligonucleotide
  Sense strand starting at position 1054 of SEQ ID NO: 1562754
gcaagaacuccuugcucuu

SEQ ID NO: 1770298 - RNA, 19 nt, Artificial Sequence
  Description of Artificial Sequence: Synthetic oligonucleotide
  Antisense strand to SEQ ID NO: 1770297
aagagcaaggaguucuugc

SEQ ID NO: 1770299 - RNA, 19 nt, Artificial Sequence
  Description of Artificial Sequence: Synthetic oligonucleotide
  Sense strand starting at position 1067 of SEQ ID NO: 1562754
gcucuugugcugcccugaa

SEQ ID NO: 1770300 - RNA, 19 nt, Artificial Sequence
  Description of Artificial Sequence: Synthetic oligonucleotide
  Antisense strand to SEQ ID NO: 1770299
uucagggcagcacaagagc

SEQ ID NO: 1770301 - RNA, 19 nt, Artificial Sequence
  Description of Artificial Sequence: Synthetic oligonucleotide
  Sense strand starting at position 1192 of SEQ ID NO: 1562754
ggacuagaggccuggauca

SEQ ID NO: 1770302 - RNA, 19 nt, Artificial Sequence
  Description of Artificial Sequence: Synthetic oligonucleotide
  Antisense strand to SEQ ID NO: 1770301
ugauccaggccucuagucc

SEQ ID NO: 1770303 - RNA, 19 nt, Artificial Sequence
  Description of Artificial Sequence: Synthetic oligonucleotide
  Sense strand starting at position 1414 of SEQ ID NO: 1562754
ucuucugggcuuugugaau

SEQ ID NO: 1770304 - RNA, 19 nt, Artificial Sequence
  Description of Artificial Sequence: Synthetic oligonucleotide
  Antisense strand to SEQ ID NO: 1770303
auucacaaagcccagaaga

SEQ ID NO: 1770305 - RNA, 19 nt, Artificial Sequence
  Description of Artificial Sequence: Synthetic oligonucleotide
  Sense strand starting at position 1427 of SEQ ID NO: 1562754
gugaauuuauaugcgugca

SEQ ID NO: 1770306 - RNA, 19 nt, Artificial Sequence
  Description of Artificial Sequence: Synthetic oligonucleotide
  Antisense strand to SEQ ID NO: 1770305
ugcacgcauauaaauucac

SEQ ID NO: 1770307 - RNA, 19 nt, Artificial Sequence
  Description of Artificial Sequence: Synthetic oligonucleotide
  Sense strand starting at position 1428 of SEQ ID NO: 1562754
ugaauuuauaugcgugcau

SEQ ID NO: 1770308 - RNA, 19 nt, Artificial Sequence
  Description of Artificial Sequence: Synthetic oligonucleotide
  Antisense strand to SEQ ID NO: 1770307
augcacgcauauaaauuca

SEQ ID NO: 1770309 - RNA, 19 nt, Artificial Sequence
  Description of Artificial Sequence: Synthetic oligonucleotide
  Sense strand starting at position 1429 of SEQ ID NO: 1562754
gaauuuauaugcgugcauu

SEQ ID NO: 1770310 - RNA, 19 nt, Artificial Sequence
  Description of Artificial Sequence: Synthetic oligonucleotide
  Antisense strand to SEQ ID NO: 1770309
aaugcacgcauauaaauuc

SEQ ID NO: 1770311 - RNA, 19 nt, Artificial Sequence
  Description of Artificial Sequence: Synthetic oligonucleotide
  Sense strand starting at position 1430 of SEQ ID NO: 1562754
aauuuauaugcgugcauuc

SEQ ID NO: 1770312 - RNA, 19 nt, Artificial Sequence
  Description of Artificial Sequence: Synthetic oligonucleotide
  Antisense strand to SEQ ID NO: 1770311
gaaugcacgcauauaaauu

SEQ ID NO: 1770313 - RNA, 19 nt, Artificial Sequence
  Description of Artificial Sequence: Synthetic oligonucleotide
  Sense strand starting at position 1441 of SEQ ID NO: 1562754
gugcauuccacgcaagaac

SEQ ID NO: 1770314 - RNA, 19 nt, Artificial Sequence
  Description of Artificial Sequence: Synthetic oligonucleotide
  Antisense strand to SEQ ID NO: 1770313
guucuugcguggaaugcac

SEQ ID NO: 1770315 - RNA, 19 nt, Artificial Sequence
  Description of Artificial Sequence: Synthetic oligonucleotide
  Sense strand starting at position 1450 of SEQ ID NO: 1562754
acgcaagaacucugucaac

SEQ ID NO: 1770316 - RNA, 19 nt, Artificial Sequence
  Description of Artificial Sequence: Synthetic oligonucleotide
  Antisense strand to SEQ ID NO: 1770315
guugacagaguucuugcgu

SEQ ID NO: 1770317 - RNA, 19 nt, Artificial Sequence
  Description of Artificial Sequence: Synthetic oligonucleotide
  Sense strand starting at position 1757 of SEQ ID NO: 1562754
ccauucuucuuggcgaaga

SEQ ID NO: 1770318 - RNA, 19 nt, Artificial Sequence
  Description of Artificial Sequence: Synthetic oligonucleotide
  Antisense strand to SEQ ID NO: 1770317
ucuucgccaagaagaaugg

SEQ ID NO: 1770319 - RNA, 19 nt, Artificial Sequence
  Description of Artificial Sequence: Synthetic oligonucleotide
  Sense strand starting at position 2295 of SEQ ID NO: 1562754
aucugaggguucguucaga

SEQ ID NO: 1770320 - RNA, 19 nt, Artificial Sequence
  Description of Artificial Sequence: Synthetic oligonucleotide
  Antisense strand to SEQ ID NO: 1770319
ucugaacgaacccucagau

SEQ ID NO: 1770321 - RNA, 19 nt, Artificial Sequence
  Description of Artificial Sequence: Synthetic oligonucleotide
  Sense strand starting at position 2588 of SEQ ID NO: 1562754
aggaaugacuguccgggaa

SEQ ID NO: 1770322 - RNA, 19 nt, Artificial Sequence
  Description of Artificial Sequence: Synthetic oligonucleotide
  Antisense strand to SEQ ID NO: 1770321
uucccggacagucauuccu

SEQ ID NO: 1770323 - RNA, 19 nt, Artificial Sequence
  Description of Artificial Sequence: Synthetic oligonucleotide
  Sense strand starting at position 2680 of SEQ ID NO: 1562754
gggacucuagcugaaucuu

SEQ ID NO: 1770324 - RNA, 19 nt, Artificial Sequence
  Description of Artificial Sequence: Synthetic oligonucleotide
  Antisense strand to SEQ ID NO: 1770323
aagauucagcuagaguccc

SEQ ID NO: 1770325 - RNA, 19 nt, Artificial Sequence
  Description of Artificial Sequence: Synthetic oligonucleotide
  Sense strand starting at position 2745 of SEQ ID NO: 1562754
gaaugcuuccuugggaguu

SEQ ID NO: 1770326 - RNA, 19 nt, Artificial Sequence
  Description of Artificial Sequence: Synthetic oligonucleotide
  Antisense strand to SEQ ID NO: 1770325
aacucccaaggaagcauuc

SEQ ID NO: 1770327 - RNA, 19 nt, Artificial Sequence
  Description of Artificial Sequence: Synthetic oligonucleotide
  Sense strand starting at position 2837 of SEQ ID NO: 1562754
uccugaguucgaggaguag

SEQ ID NO: 1770328 - RNA, 19 nt, Artificial Sequence
  Description of Artificial Sequence: Synthetic oligonucleotide
  Antisense strand to SEQ ID NO: 1770327
cuacuccucgaacucagga

SEQ ID NO: 1770329 - RNA, 19 nt, Artificial Sequence
  Description of Artificial Sequence: Synthetic oligonucleotide
  Sense strand starting at position 2942 of SEQ ID NO: 1562754
cgggaucuguuucucugau

SEQ ID NO: 1770330 - RNA, 19 nt, Artificial Sequence
  Description of Artificial Sequence: Synthetic oligonucleotide
  Antisense strand to SEQ ID NO: 1770329
aucagagaaacagaucccg

SEQ ID NO: 1770331 - RNA, 19 nt, Artificial Sequence
  Description of Artificial Sequence: Synthetic oligonucleotide
  Sense strand starting at position 2943 of SEQ ID NO: 1562754
gggaucuguuucucugaug

SEQ ID NO: 1770332 - RNA, 19 nt, Artificial Sequence
  Description of Artificial Sequence: Synthetic oligonucleotide
  Antisense strand to SEQ ID NO: 1770331
caucagagaaacagauccc

SEQ ID NO: 1770333 - RNA, 19 nt, Artificial Sequence
  Description of Artificial Sequence: Synthetic oligonucleotide
  Sense strand starting at position 2944 of SEQ ID NO: 1562754
ggaucuguuucucugaugu

SEQ ID NO: 1770334 - RNA, 19 nt, Artificial Sequence
  Description of Artificial Sequence: Synthetic oligonucleotide
  Antisense strand to SEQ ID NO: 1770333
acaucagagaaacagaucc

SEQ ID NO: 1770335 - RNA, 19 nt, Artificial Sequence
  Description of Artificial Sequence: Synthetic oligonucleotide
  Sense strand starting at position 2952 of SEQ ID NO: 1562754
uucucugaugucuggguau

SEQ ID NO: 1770336 - RNA, 19 nt, Artificial Sequence
  Description of Artificial Sequence: Synthetic oligonucleotide
  Antisense strand to SEQ ID NO: 1770335
auacccagacaucagagaa

SEQ ID NO: 1770337 - RNA, 19 nt, Artificial Sequence
  Description of Artificial Sequence: Synthetic oligonucleotide
  Sense strand starting at position 2954 of SEQ ID NO: 1562754
cucugaugucuggguauga

SEQ ID NO: 1770338 - RNA, 19 nt, Artificial Sequence
  Description of Artificial Sequence: Synthetic oligonucleotide
  Antisense strand to SEQ ID NO: 1770337
ucauacccagacaucagag

SEQ ID NO: 1770339 - RNA, 19 nt, Artificial Sequence
  Description of Artificial Sequence: Synthetic oligonucleotide
  Sense strand starting at position 2955 of SEQ ID NO: 1562754
ucugaugucuggguaugaa

SEQ ID NO: 1770340 - RNA, 19 nt, Artificial Sequence
  Description of Artificial Sequence: Synthetic oligonucleotide
  Antisense strand to SEQ ID NO: 1770339
uucauacccagacaucaga

SEQ ID NO: 1770341 - RNA, 19 nt, Artificial Sequence
  Description of Artificial Sequence: Synthetic oligonucleotide
  Sense strand starting at position 3099 of SEQ ID NO: 1562754
aaagauacgucagaaggaa

SEQ ID NO: 1770342 - RNA, 19 nt, Artificial Sequence
  Description of Artificial Sequence: Synthetic oligonucleotide
  Antisense strand to SEQ ID NO: 1770341
uuccuucugacguaucuuu

SEQ ID NO: 1770343 - RNA, 19 nt, Artificial Sequence
  Description of Artificial Sequence: Synthetic oligonucleotide
  Sense strand starting at position 3115 of SEQ ID NO: 1562754
gaaguaauguccuuuaaga

SEQ ID NO: 1770344 - RNA, 19 nt, Artificial Sequence
  Description of Artificial Sequence: Synthetic oligonucleotide
  Antisense strand to SEQ ID NO: 1770343
ucuuaaaggacauuacuuc

SEQ ID NO: 1770345 - RNA, 19 nt, Artificial Sequence
  Description of Artificial Sequence: Synthetic oligonucleotide
  Sense strand starting at position 3117 of SEQ ID NO: 1562754
aguaauguccuuuaagaug

SEQ ID NO: 1770346 - RNA, 19 nt, Artificial Sequence
  Description of Artificial Sequence: Synthetic oligonucleotide
  Antisense strand to SEQ ID NO: 1770345
caucuuaaaggacauuacu

SEQ ID NO: 1770347 - RNA, 19 nt, Artificial Sequence
  Description of Artificial Sequence: Synthetic oligonucleotide
  Sense strand starting at position 3125 of SEQ ID NO: 1562754
ccuuuaagauguucuuaga

SEQ ID NO: 1770348 - RNA, 19 nt, Artificial Sequence
  Description of Artificial Sequence: Synthetic oligonucleotide
  Antisense strand to SEQ ID NO: 1770347
ucuaagaacaucuuaaagg

SEQ ID NO: 1770349 - RNA, 19 nt, Artificial Sequence
  Description of Artificial Sequence: Synthetic oligonucleotide
  Sense strand starting at position 3203 of SEQ ID NO: 1562754
cagagaugggcggaucagu

SEQ ID NO: 1770350 - RNA, 19 nt, Artificial Sequence
  Description of Artificial Sequence: Synthetic oligonucleotide
  Antisense strand to SEQ ID NO: 1770349
acugauccgcccaucucug

SEQ ID NO: 1770351 - RNA, 19 nt, Artificial Sequence
  Description of Artificial Sequence: Synthetic oligonucleotide
  Sense strand starting at position 3561 of SEQ ID NO: 1562754
aguaauaaucaaggaagca

SEQ ID NO: 1770352 - RNA, 19 nt, Artificial Sequence
  Description of Artificial Sequence: Synthetic oligonucleotide
  Antisense strand to SEQ ID NO: 1770351
ugcuuccuugauuauuacu

SEQ ID NO: 1770353 - RNA, 19 nt, Artificial Sequence
  Description of Artificial Sequence: Synthetic oligonucleotide
  Sense strand starting at position 3635 of SEQ ID NO: 1562754
ugaaaugaguacuccuaau

SEQ ID NO: 1770354 - RNA, 19 nt, Artificial Sequence
  Description of Artificial Sequence: Synthetic oligonucleotide
  Antisense strand to SEQ ID NO: 1770353
auuaggaguacucauuuca

SEQ ID NO: 1770355 - RNA, 19 nt, Artificial Sequence
  Description of Artificial Sequence: Synthetic oligonucleotide
  Sense strand starting at position 3766 of SEQ ID NO: 1562754
ggaggauccaucgggcaau

SEQ ID NO: 1770356 - RNA, 19 nt, Artificial Sequence
  Description of Artificial Sequence: Synthetic oligonucleotide
  Antisense strand to SEQ ID NO: 1770355
auugcccgauggauccucc

SEQ ID NO: 1770357 - RNA, 19 nt, Artificial Sequence
  Description of Artificial Sequence: Synthetic oligonucleotide
  Sense strand starting at position 3913 of SEQ ID NO: 1562754
aguguagacucuuccuauc

SEQ ID NO: 1770358 - RNA, 19 nt, Artificial Sequence
  Description of Artificial Sequence: Synthetic oligonucleotide
  Antisense strand to SEQ ID NO: 1770357
gauaggaagagucuacacu

SEQ ID NO: 1770359 - RNA, 19 nt, Artificial Sequence
  Description of Artificial Sequence: Synthetic oligonucleotide
  Sense strand starting at position 3915 of SEQ ID NO: 1562754
uguagacucuuccuaucca

SEQ ID NO: 1770360 - RNA, 19 nt, Artificial Sequence
  Description of Artificial Sequence: Synthetic oligonucleotide
  Antisense strand to SEQ ID NO: 1770359
uggauaggaagagucuaca

SEQ ID NO: 1770361 - RNA, 19 nt, Artificial Sequence
  Description of Artificial Sequence: Synthetic oligonucleotide
  Sense strand starting at position 3940 of SEQ ID NO: 1562754
ggucaauggacugggagua

SEQ ID NO: 1770362 - RNA, 19 nt, Artificial Sequence
  Description of Artificial Sequence: Synthetic oligonucleotide
  Antisense strand to SEQ ID NO: 1770361
uacucccaguccauugacc

SEQ ID NO: 1770363 - RNA, 19 nt, Artificial Sequence
  Description of Artificial Sequence: Synthetic oligonucleotide
  Sense strand starting at position 14 of SEQ ID NO: 1562755
gguagucugcgacaaguca

SEQ ID NO: 1770364 - RNA, 19 nt, Artificial Sequence
  Description of Artificial Sequence: Synthetic oligonucleotide
  Antisense strand to SEQ ID NO: 1770363
ugacuugucgcagacuacc

SEQ ID NO: 1770365 - RNA, 19 nt, Artificial Sequence
  Description of Artificial Sequence: Synthetic oligonucleotide
  Sense strand starting at position 49 of SEQ ID NO: 1562755
gcuagcauuuguugaacaa

SEQ ID NO: 1770366 - RNA, 19 nt, Artificial Sequence
  Description of Artificial Sequence: Synthetic oligonucleotide
  Antisense strand to SEQ ID NO: 1770365
uuguucaacaaaugcuagc

SEQ ID NO: 1770367 - RNA, 19 nt, Artificial Sequence
  Description of Artificial Sequence: Synthetic oligonucleotide
  Sense strand starting at position 988 of SEQ ID NO: 1562755
gggcaucuuucggucaaga

SEQ ID NO: 1770368 - RNA, 19 nt, Artificial Sequence
  Description of Artificial Sequence: Synthetic oligonucleotide
  Antisense strand to SEQ ID NO: 1770367
ucuugaccgaaagaugccc

SEQ ID NO: 1770369 - RNA, 19 nt, Artificial Sequence
  Description of Artificial Sequence: Synthetic oligonucleotide
  Sense strand starting at position 990 of SEQ ID NO: 1562755
gcaucuuucggucaagaug

SEQ ID NO: 1770370 - RNA, 19 nt, Artificial Sequence
  Description of Artificial Sequence: Synthetic oligonucleotide
  Antisense strand to SEQ ID NO: 1770369
caucuugaccgaaagaugc

SEQ ID NO: 1770371 - RNA, 19 nt, Artificial Sequence
  Description of Artificial Sequence: Synthetic oligonucleotide
  Sense strand starting at position 1068 of SEQ ID NO: 1562755
gcucuugugcugcccugaa

SEQ ID NO: 1770372 - RNA, 19 nt, Artificial Sequence
  Description of Artificial Sequence: Synthetic oligonucleotide
  Antisense strand to SEQ ID NO: 1770371
uucagggcagcacaagagc

SEQ ID NO: 1770373 - RNA, 19 nt, Artificial Sequence
  Description of Artificial Sequence: Synthetic oligonucleotide
  Sense strand starting at position 1193 of SEQ ID NO: 1562755
ggacuagaggccuggauca

SEQ ID NO: 1770374 - RNA, 19 nt, Artificial Sequence
  Description of Artificial Sequence: Synthetic oligonucleotide
  Antisense strand to SEQ ID NO: 1770373
ugauccaggccucuagucc

SEQ ID NO: 1770375 - RNA, 19 nt, Artificial Sequence
  Description of Artificial Sequence: Synthetic oligonucleotide
  Sense strand starting at position 1415 of SEQ ID NO: 1562755
ucuucugggcuuugugaau

SEQ ID NO: 1770376 - RNA, 19 nt, Artificial Sequence
  Description of Artificial Sequence: Synthetic oligonucleotide
  Antisense strand to SEQ ID NO: 1770375
auucacaaagcccagaaga

SEQ ID NO: 1770377 - RNA, 19 nt, Artificial Sequence
  Description of Artificial Sequence: Synthetic oligonucleotide
  Sense strand starting at position 1428 of SEQ ID NO: 1562755
gugaauuuauaugcgugca

SEQ ID NO: 1770378 - RNA, 19 nt, Artificial Sequence
  Description of Artificial Sequence: Synthetic oligonucleotide
  Antisense strand to SEQ ID NO: 1770377
ugcacgcauauaaauucac

SEQ ID NO: 1770379 - RNA, 19 nt, Artificial Sequence
  Description of Artificial Sequence: Synthetic oligonucleotide
  Sense strand starting at position 1429 of SEQ ID NO: 1562755
ugaauuuauaugcgugcau

SEQ ID NO: 1770380 - RNA, 19 nt, Artificial Sequence
  Description of Artificial Sequence: Synthetic oligonucleotide
  Antisense strand to SEQ ID NO: 1770379
augcacgcauauaaauuca

SEQ ID NO: 1770381 - RNA, 19 nt, Artificial Sequence
  Description of Artificial Sequence: Synthetic oligonucleotide
  Sense strand starting at position 1430 of SEQ ID NO: 1562755
gaauuuauaugcgugcauu

SEQ ID NO: 1770382 - RNA, 19 nt, Artificial Sequence
  Description of Artificial Sequence: Synthetic oligonucleotide
  Antisense strand to SEQ ID NO: 1770381
aaugcacgcauauaaauuc

SEQ ID NO: 1770383 - RNA, 19 nt, Artificial Sequence
  Description of Artificial Sequence: Synthetic oligonucleotide
  Sense strand starting at position 1431 of SEQ ID NO: 1562755
aauuuauaugcgugcauuc

SEQ ID NO: 1770384 - RNA, 19 nt, Artificial Sequence
  Description of Artificial Sequence: Synthetic oligonucleotide
  Antisense strand to SEQ ID NO: 1770383
gaaugcacgcauauaaauu

SEQ ID NO: 1770385 - RNA, 19 nt, Artificial Sequence
  Description of Artificial Sequence: Synthetic oligonucleotide
  Sense strand starting at position 1442 of SEQ ID NO: 1562755
gugcauuccacgcaagaac

SEQ ID NO: 1770386 - RNA, 19 nt, Artificial Sequence
  Description of Artificial Sequence: Synthetic oligonucleotide
  Antisense strand to SEQ ID NO: 1770385
guucuugcguggaaugcac

SEQ ID NO: 1770387 - RNA, 19 nt, Artificial Sequence
  Description of Artificial Sequence: Synthetic oligonucleotide
  Sense strand starting at position 1451 of SEQ ID NO: 1562755
acgcaagaacucugucaac

SEQ ID NO: 1770388 - RNA, 19 nt, Artificial Sequence
  Description of Artificial Sequence: Synthetic oligonucleotide
  Antisense strand to SEQ ID NO: 1770387
guugacagaguucuugcgu

SEQ ID NO: 1770389 - RNA, 19 nt, Artificial Sequence
  Description of Artificial Sequence: Synthetic oligonucleotide
  Sense strand starting at position 2296 of SEQ ID NO: 1562755
aucugaggguucguucaga

SEQ ID NO: 1770390 - RNA, 19 nt, Artificial Sequence
  Description of Artificial Sequence: Synthetic oligonucleotide
  Antisense strand to SEQ ID NO: 1770389
ucugaacgaacccucagau

SEQ ID NO: 1770391 - RNA, 19 nt, Artificial Sequence
  Description of Artificial Sequence: Synthetic oligonucleotide
  Sense strand starting at position 2589 of SEQ ID NO: 1562755
aggaaugacuguccgggaa

SEQ ID NO: 1770392 - RNA, 19 nt, Artificial Sequence
  Description of Artificial Sequence: Synthetic oligonucleotide
  Antisense strand to SEQ ID NO: 1770391
uucccggacagucauuccu

SEQ ID NO: 1770393 - RNA, 19 nt, Artificial Sequence
  Description of Artificial Sequence: Synthetic oligonucleotide
  Sense strand starting at position 2681 of SEQ ID NO: 1562755
gggacucuagcugaaucuu

SEQ ID NO: 1770394 - RNA, 19 nt, Artificial Sequence
  Description of Artificial Sequence: Synthetic oligonucleotide
  Antisense strand to SEQ ID NO: 1770393
aagauucagcuagaguccc

SEQ ID NO: 1770395 - RNA, 19 nt, Artificial Sequence
  Description of Artificial Sequence: Synthetic oligonucleotide
  Sense strand starting at position 2743 of SEQ ID NO: 1562755
ccagaaugcuuccuuggga

SEQ ID NO: 1770396 - RNA, 19 nt, Artificial Sequence
  Description of Artificial Sequence: Synthetic oligonucleotide
  Antisense strand to SEQ ID NO: 1770395
ucccaaggaagcauucugg

SEQ ID NO: 1770397 - RNA, 19 nt, Artificial Sequence
  Description of Artificial Sequence: Synthetic oligonucleotide
  Sense strand starting at position 2746 of SEQ ID NO: 1562755
gaaugcuuccuugggaguu

SEQ ID NO: 1770398 - RNA, 19 nt, Artificial Sequence
  Description of Artificial Sequence: Synthetic oligonucleotide
  Antisense strand to SEQ ID NO: 1770397
aacucccaaggaagcauuc

SEQ ID NO: 1770399 - RNA, 19 nt, Artificial Sequence
  Description of Artificial Sequence: Synthetic oligonucleotide
  Sense strand starting at position 2829 of SEQ ID NO: 1562755
agugacauuuccugaguuc

SEQ ID NO: 1770400 - RNA, 19 nt, Artificial Sequence
  Description of Artificial Sequence: Synthetic oligonucleotide
  Antisense strand to SEQ ID NO: 1770399
gaacucaggaaaugucacu

SEQ ID NO: 1770401 - RNA, 19 nt, Artificial Sequence
  Description of Artificial Sequence: Synthetic oligonucleotide
  Sense strand starting at position 2838 of SEQ ID NO: 1562755
uccugaguucgaggaguag

SEQ ID NO: 1770402 - RNA, 19 nt, Artificial Sequence
  Description of Artificial Sequence: Synthetic oligonucleotide
  Antisense strand to SEQ ID NO: 1770401
cuacuccucgaacucagga

SEQ ID NO: 1770403 - RNA, 19 nt, Artificial Sequence
  Description of Artificial Sequence: Synthetic oligonucleotide
  Sense strand starting at position 2873 of SEQ ID NO: 1562755
aaagcugacucagagaaag

SEQ ID NO: 1770404 - RNA, 19 nt, Artificial Sequence
  Description of Artificial Sequence: Synthetic oligonucleotide
  Antisense strand to SEQ ID NO: 1770403
cuuucucugagucagcuuu

SEQ ID NO: 1770405 - RNA, 19 nt, Artificial Sequence
  Description of Artificial Sequence: Synthetic oligonucleotide
  Sense strand starting at position 2943 of SEQ ID NO: 1562755
cgggaucuguuucucugau

SEQ ID NO: 1770406 - RNA, 19 nt, Artificial Sequence
  Description of Artificial Sequence: Synthetic oligonucleotide
  Antisense strand to SEQ ID NO: 1770405
aucagagaaacagaucccg

SEQ ID NO: 1770407 - RNA, 19 nt, Artificial Sequence
  Description of Artificial Sequence: Synthetic oligonucleotide
  Sense strand starting at position 2944 of SEQ ID NO: 1562755
gggaucuguuucucugaug

SEQ ID NO: 1770408 - RNA, 19 nt, Artificial Sequence
  Description of Artificial Sequence: Synthetic oligonucleotide
  Antisense strand to SEQ ID NO: 1770407
caucagagaaacagauccc

SEQ ID NO: 1770409 - RNA, 19 nt, Artificial Sequence
  Description of Artificial Sequence: Synthetic oligonucleotide
  Sense strand starting at position 2945 of SEQ ID NO: 1562755
ggaucuguuucucugaugu

SEQ ID NO: 1770410 - RNA, 19 nt, Artificial Sequence
  Description of Artificial Sequence: Synthetic oligonucleotide
  Antisense strand to SEQ ID NO: 1770409
acaucagagaaacagaucc

SEQ ID NO: 1770411 - RNA, 19 nt, Artificial Sequence
  Description of Artificial Sequence: Synthetic oligonucleotide
  Sense strand starting at position 2953 of SEQ ID NO: 1562755
uucucugaugucuggguau

SEQ ID NO: 1770412 - RNA, 19 nt, Artificial Sequence
  Description of Artificial Sequence: Synthetic oligonucleotide
  Antisense strand to SEQ ID NO: 1770411
auacccagacaucagagaa

SEQ ID NO: 1770413 - RNA, 19 nt, Artificial Sequence
  Description of Artificial Sequence: Synthetic oligonucleotide
  Sense strand starting at position 2955 of SEQ ID NO: 1562755
cucugaugucuggguauga

SEQ ID NO: 1770414 - RNA, 19 nt, Artificial Sequence
  Description of Artificial Sequence: Synthetic oligonucleotide
  Antisense strand to SEQ ID NO: 1770413
ucauacccagacaucagag

SEQ ID NO: 1770415 - RNA, 19 nt, Artificial Sequence
  Description of Artificial Sequence: Synthetic oligonucleotide
  Sense strand starting at position 2956 of SEQ ID NO: 1562755
ucugaugucuggguaugaa

SEQ ID NO: 1770416 - RNA, 19 nt, Artificial Sequence
  Description of Artificial Sequence: Synthetic oligonucleotide
  Antisense strand to SEQ ID NO: 1770415
uucauacccagacaucaga

SEQ ID NO: 1770417 - RNA, 19 nt, Artificial Sequence
  Description of Artificial Sequence: Synthetic oligonucleotide
  Sense strand starting at position 3083 of SEQ ID NO: 1562755
ugggaaggaucucgguaaa

SEQ ID NO: 1770418 - RNA, 19 nt, Artificial Sequence
  Description of Artificial Sequence: Synthetic oligonucleotide
  Antisense strand to SEQ ID NO: 1770417
uuuaccgagauccuuccca

SEQ ID NO: 1770419 - RNA, 19 nt, Artificial Sequence
  Description of Artificial Sequence: Synthetic oligonucleotide
  Sense strand starting at position 3100 of SEQ ID NO: 1562755
aaagauacgucagaaggaa

SEQ ID NO: 1770420 - RNA, 19 nt, Artificial Sequence
  Description of Artificial Sequence: Synthetic oligonucleotide
  Antisense strand to SEQ ID NO: 1770419
uuccuucugacguaucuuu

SEQ ID NO: 1770421 - RNA, 19 nt, Artificial Sequence
  Description of Artificial Sequence: Synthetic oligonucleotide
  Sense strand starting at position 3116 of SEQ ID NO: 1562755
gaaguaauguccuuuaaga

SEQ ID NO: 1770422 - RNA, 19 nt, Artificial Sequence
  Description of Artificial Sequence: Synthetic oligonucleotide
  Antisense strand to SEQ ID NO: 1770421
ucuuaaaggacauuacuuc

SEQ ID NO: 1770423 - RNA, 19 nt, Artificial Sequence
  Description of Artificial Sequence: Synthetic oligonucleotide
  Sense strand starting at position 3118 of SEQ ID NO: 1562755
aguaauguccuuuaagaug

SEQ ID NO: 1770424 - RNA, 19 nt, Artificial Sequence
  Description of Artificial Sequence: Synthetic oligonucleotide
  Antisense strand to SEQ ID NO: 1770423
caucuuaaaggacauuacu

SEQ ID NO: 1770425 - RNA, 19 nt, Artificial Sequence
  Description of Artificial Sequence: Synthetic oligonucleotide
  Sense strand starting at position 3126 of SEQ ID NO: 1562755
ccuuuaagauguucuuaga

SEQ ID NO: 1770426 - RNA, 19 nt, Artificial Sequence
  Description of Artificial Sequence: Synthetic oligonucleotide
  Antisense strand to SEQ ID NO: 1770425
ucuaagaacaucuuaaagg

SEQ ID NO: 1770427 - RNA, 19 nt, Artificial Sequence
  Description of Artificial Sequence: Synthetic oligonucleotide
  Sense strand starting at position 3204 of SEQ ID NO: 1562755
cagagaugggcggaucagu

SEQ ID NO: 1770428 - RNA, 19 nt, Artificial Sequence
  Description of Artificial Sequence: Synthetic oligonucleotide
  Antisense strand to SEQ ID NO: 1770427
acugauccgcccaucucug

SEQ ID NO: 1770429 - RNA, 19 nt, Artificial Sequence
  Description of Artificial Sequence: Synthetic oligonucleotide
  Sense strand starting at position 3562 of SEQ ID NO: 1562755
aguaauaaucaaggaagca

SEQ ID NO: 1770430 - RNA, 19 nt, Artificial Sequence
  Description of Artificial Sequence: Synthetic oligonucleotide
  Antisense strand to SEQ ID NO: 1770429
ugcuuccuugauuauuacu

SEQ ID NO: 1770431 - RNA, 19 nt, Artificial Sequence
  Description of Artificial Sequence: Synthetic oligonucleotide
  Sense strand starting at position 3636 of SEQ ID NO: 1562755
ugaaaugaguacuccuaau

SEQ ID NO: 1770432 - RNA, 19 nt, Artificial Sequence
  Description of Artificial Sequence: Synthetic oligonucleotide
  Antisense strand to SEQ ID NO: 1770431
auuaggaguacucauuuca

SEQ ID NO: 1770433 - RNA, 19 nt, Artificial Sequence
  Description of Artificial Sequence: Synthetic oligonucleotide
  Sense strand starting at position 3767 of SEQ ID NO: 1562755
ggaggauccaucgggcaau

SEQ ID NO: 1770434 - RNA, 19 nt, Artificial Sequence
  Description of Artificial Sequence: Synthetic oligonucleotide
  Antisense strand to SEQ ID NO: 1770433
auugcccgauggauccucc

SEQ ID NO: 1770435 - RNA, 19 nt, Artificial Sequence
  Description of Artificial Sequence: Synthetic oligonucleotide
  Sense strand starting at position 3865 of SEQ ID NO: 1562755
ggaagcgugguguguuuga

SEQ ID NO: 1770436 - RNA, 19 nt, Artificial Sequence
  Description of Artificial Sequence: Synthetic oligonucleotide
  Antisense strand to SEQ ID NO: 1770435
ucaaacacaccacgcuucc

SEQ ID NO: 1770437 - RNA, 19 nt, Artificial Sequence
  Description of Artificial Sequence: Synthetic oligonucleotide
  Sense strand starting at position 3914 of SEQ ID NO: 1562755
aguguagacucuuccuauc

SEQ ID NO: 1770438 - RNA, 19 nt, Artificial Sequence
  Description of Artificial Sequence: Synthetic oligonucleotide
  Antisense strand to SEQ ID NO: 1770437
gauaggaagagucuacacu

SEQ ID NO: 1770439 - RNA, 19 nt, Artificial Sequence
  Description of Artificial Sequence: Synthetic oligonucleotide
  Sense strand starting at position 3916 of SEQ ID NO: 1562755
uguagacucuuccuaucca

SEQ ID NO: 1770440 - RNA, 19 nt, Artificial Sequence
  Description of Artificial Sequence: Synthetic oligonucleotide
  Antisense strand to SEQ ID NO: 1770439
uggauaggaagagucuaca

SEQ ID NO: 1770441 - RNA, 19 nt, Artificial Sequence
  Description of Artificial Sequence: Synthetic oligonucleotide
  Sense strand starting at position 3941 of SEQ ID NO: 1562755
ggucaauggacugggagua

SEQ ID NO: 1770442 - RNA, 19 nt, Artificial Sequence
  Description of Artificial Sequence: Synthetic oligonucleotide
  Antisense strand to SEQ ID NO: 1770441
uacucccaguccauugacc

SEQ ID NO: 1770443 - RNA, 19 nt, Artificial Sequence
  Description of Artificial Sequence: Synthetic oligonucleotide
  Sense strand starting at position 126 of SEQ ID NO: 1562756
uagauuggguagucugcaa

SEQ ID NO: 1770444 - RNA, 19 nt, Artificial Sequence
  Description of Artificial Sequence: Synthetic oligonucleotide
  Antisense strand to SEQ ID NO: 1770443
uugcagacuacccaaucua

SEQ ID NO: 1770445 - RNA, 19 nt, Artificial Sequence
  Description of Artificial Sequence: Synthetic oligonucleotide
  Sense strand starting at position 133 of SEQ ID NO: 1562756
gguagucugcaacaaguca

SEQ ID NO: 1770446 - RNA, 19 nt, Artificial Sequence
  Description of Artificial Sequence: Synthetic oligonucleotide
  Antisense strand to SEQ ID NO: 1770445
ugacuuguugcagacuacc

SEQ ID NO: 1770447 - RNA, 19 nt, Artificial Sequence
  Description of Artificial Sequence: Synthetic oligonucleotide
  Sense strand starting at position 168 of SEQ ID NO: 1562756
gcuagcauuuguugaacaa

SEQ ID NO: 1770448 - RNA, 19 nt, Artificial Sequence
  Description of Artificial Sequence: Synthetic oligonucleotide
  Antisense strand to SEQ ID NO: 1770447
uuguucaacaaaugcuagc

SEQ ID NO: 1770449 - RNA, 19 nt, Artificial Sequence
  Description of Artificial Sequence: Synthetic oligonucleotide
  Sense strand starting at position 1107 of SEQ ID NO: 1562756
gggcaccuuucggucaaga

SEQ ID NO: 1770450 - RNA, 19 nt, Artificial Sequence
  Description of Artificial Sequence: Synthetic oligonucleotide
  Antisense strand to SEQ ID NO: 1770449
ucuugaccgaaaggugccc

SEQ ID NO: 1770451 - RNA, 19 nt, Artificial Sequence
  Description of Artificial Sequence: Synthetic oligonucleotide
  Sense strand starting at position 1109 of SEQ ID NO: 1562756
gcaccuuucggucaagaug

SEQ ID NO: 1770452 - RNA, 19 nt, Artificial Sequence
  Description of Artificial Sequence: Synthetic oligonucleotide
  Antisense strand to SEQ ID NO: 1770451
caucuugaccgaaaggugc

SEQ ID NO: 1770453 - RNA, 19 nt, Artificial Sequence
  Description of Artificial Sequence: Synthetic oligonucleotide
  Sense strand starting at position 1112 of SEQ ID NO: 1562756
ccuuucggucaagaugaaa

SEQ ID NO: 1770454 - RNA, 19 nt, Artificial Sequence
  Description of Artificial Sequence: Synthetic oligonucleotide
  Antisense strand to SEQ ID NO: 1770453
uuucaucuugaccgaaagg

SEQ ID NO: 1770455 - RNA, 19 nt, Artificial Sequence
  Description of Artificial Sequence: Synthetic oligonucleotide
  Sense strand starting at position 1162 of SEQ ID NO: 1562756
ggcuguugaucugcaagaa

SEQ ID NO: 1770456 - RNA, 19 nt, Artificial Sequence
  Description of Artificial Sequence: Synthetic oligonucleotide
  Antisense strand to SEQ ID NO: 1770455
uucuugcagaucaacagcc

SEQ ID NO: 1770457 - RNA, 19 nt, Artificial Sequence
  Description of Artificial Sequence: Synthetic oligonucleotide
  Sense strand starting at position 1163 of SEQ ID NO: 1562756
gcuguugaucugcaagaac

SEQ ID NO: 1770458 - RNA, 19 nt, Artificial Sequence
  Description of Artificial Sequence: Synthetic oligonucleotide
  Antisense strand to SEQ ID NO: 1770457
guucuugcagaucaacagc

SEQ ID NO: 1770459 - RNA, 19 nt, Artificial Sequence
  Description of Artificial Sequence: Synthetic oligonucleotide
  Sense strand starting at position 1174 of SEQ ID NO: 1562756
gcaagaacuccuugcucuu

SEQ ID NO: 1770460 - RNA, 19 nt, Artificial Sequence
  Description of Artificial Sequence: Synthetic oligonucleotide
  Antisense strand to SEQ ID NO: 1770459
aagagcaaggaguucuugc

SEQ ID NO: 1770461 - RNA, 19 nt, Artificial Sequence
  Description of Artificial Sequence: Synthetic oligonucleotide
  Sense strand starting at position 1187 of SEQ ID NO: 1562756
gcucuugugcugcccugaa

SEQ ID NO: 1770462 - RNA, 19 nt, Artificial Sequence
  Description of Artificial Sequence: Synthetic oligonucleotide
  Antisense strand to SEQ ID NO: 1770461
uucagggcagcacaagagc

SEQ ID NO: 1770463 - RNA, 19 nt, Artificial Sequence
  Description of Artificial Sequence: Synthetic oligonucleotide
  Sense strand starting at position 1312 of SEQ ID NO: 1562756
ggacuagaggccuggauca

SEQ ID NO: 1770464 - RNA, 19 nt, Artificial Sequence
  Description of Artificial Sequence: Synthetic oligonucleotide
  Antisense strand to SEQ ID NO: 1770463
ugauccaggccucuagucc

SEQ ID NO: 1770465 - RNA, 19 nt, Artificial Sequence
  Description of Artificial Sequence: Synthetic oligonucleotide
  Sense strand starting at position 1534 of SEQ ID NO: 1562756
ucuucugggcuuugugaau

SEQ ID NO: 1770466 - RNA, 19 nt, Artificial Sequence
  Description of Artificial Sequence: Synthetic oligonucleotide
  Antisense strand to SEQ ID NO: 1770465
auucacaaagcccagaaga

SEQ ID NO: 1770467 - RNA, 19 nt, Artificial Sequence
  Description of Artificial Sequence: Synthetic oligonucleotide
  Sense strand starting at position 1547 of SEQ ID NO: 1562756
gugaauuuauaugcgugca

SEQ ID NO: 1770468 - RNA, 19 nt, Artificial Sequence
  Description of Artificial Sequence: Synthetic oligonucleotide
  Antisense strand to SEQ ID NO: 1770467
ugcacgcauauaaauucac

SEQ ID NO: 1770469 - RNA, 19 nt, Artificial Sequence
  Description of Artificial Sequence: Synthetic oligonucleotide
  Sense strand starting at position 1548 of SEQ ID NO: 1562756
ugaauuuauaugcgugcau

SEQ ID NO: 1770470 - RNA, 19 nt, Artificial Sequence
  Description of Artificial Sequence: Synthetic oligonucleotide
  Antisense strand to SEQ ID NO: 1770469
augcacgcauauaaauuca

SEQ ID NO: 1770471 - RNA, 19 nt, Artificial Sequence
  Description of Artificial Sequence: Synthetic oligonucleotide
  Sense strand starting at position 1549 of SEQ ID NO: 1562756
gaauuuauaugcgugcauu

SEQ ID NO: 1770472 - RNA, 19 nt, Artificial Sequence
  Description of Artificial Sequence: Synthetic oligonucleotide
  Antisense strand to SEQ ID NO: 1770471
aaugcacgcauauaaauuc

SEQ ID NO: 1770473 - RNA, 19 nt, Artificial Sequence
  Description of Artificial Sequence: Synthetic oligonucleotide
  Sense strand starting at position 1550 of SEQ ID NO: 1562756
aauuuauaugcgugcauuc

SEQ ID NO: 1770474 - RNA, 19 nt, Artificial Sequence
  Description of Artificial Sequence: Synthetic oligonucleotide
  Antisense strand to SEQ ID NO: 1770473
gaaugcacgcauauaaauu

SEQ ID NO: 1770475 - RNA, 19 nt, Artificial Sequence
  Description of Artificial Sequence: Synthetic oligonucleotide
  Sense strand starting at position 1561 of SEQ ID NO: 1562756
gugcauuccacgcaagaac

SEQ ID NO: 1770476 - RNA, 19 nt, Artificial Sequence
  Description of Artificial Sequence: Synthetic oligonucleotide
  Antisense strand to SEQ ID NO: 1770475
guucuugcguggaaugcac

SEQ ID NO: 1770477 - RNA, 19 nt, Artificial Sequence
  Description of Artificial Sequence: Synthetic oligonucleotide
  Sense strand starting at position 1570 of SEQ ID NO: 1562756
acgcaagaacucugucaac

SEQ ID NO: 1770478 - RNA, 19 nt, Artificial Sequence
  Description of Artificial Sequence: Synthetic oligonucleotide
  Antisense strand to SEQ ID NO: 1770477
guugacagaguucuugcgu

SEQ ID NO: 1770479 - RNA, 19 nt, Artificial Sequence
  Description of Artificial Sequence: Synthetic oligonucleotide
  Sense strand starting at position 1877 of SEQ ID NO: 1562756
ccauucuucuuggcgaaga

SEQ ID NO: 1770480 - RNA, 19 nt, Artificial Sequence
  Description of Artificial Sequence: Synthetic oligonucleotide
  Antisense strand to SEQ ID NO: 1770479
ucuucgccaagaagaaugg

SEQ ID NO: 1770481 - RNA, 19 nt, Artificial Sequence
  Description of Artificial Sequence: Synthetic oligonucleotide
  Sense strand starting at position 2415 of SEQ ID NO: 1562756
aucugaggguucguucaga

SEQ ID NO: 1770482 - RNA, 19 nt, Artificial Sequence
  Description of Artificial Sequence: Synthetic oligonucleotide
  Antisense strand to SEQ ID NO: 1770481
ucugaacgaacccucagau

SEQ ID NO: 1770483 - RNA, 19 nt, Artificial Sequence
  Description of Artificial Sequence: Synthetic oligonucleotide
  Sense strand starting at position 2708 of SEQ ID NO: 1562756
aggaaugacuguccgggaa

SEQ ID NO: 1770484 - RNA, 19 nt, Artificial Sequence
  Description of Artificial Sequence: Synthetic oligonucleotide
  Antisense strand to SEQ ID NO: 1770483
uucccggacagucauuccu

SEQ ID NO: 1770485 - RNA, 19 nt, Artificial Sequence
  Description of Artificial Sequence: Synthetic oligonucleotide
  Sense strand starting at position 2800 of SEQ ID NO: 1562756
gggacucuagcugaaucuu

SEQ ID NO: 1770486 - RNA, 19 nt, Artificial Sequence
  Description of Artificial Sequence: Synthetic oligonucleotide
  Antisense strand to SEQ ID NO: 1770485
aagauucagcuagaguccc

SEQ ID NO: 1770487 - RNA, 19 nt, Artificial Sequence
  Description of Artificial Sequence: Synthetic oligonucleotide
  Sense strand starting at position 2865 of SEQ ID NO: 1562756
gaaugcuuccuugggaguu

SEQ ID NO: 1770488 - RNA, 19 nt, Artificial Sequence
  Description of Artificial Sequence: Synthetic oligonucleotide
  Antisense strand to SEQ ID NO: 1770487
aacucccaaggaagcauuc

SEQ ID NO: 1770489 - RNA, 19 nt, Artificial Sequence
  Description of Artificial Sequence: Synthetic oligonucleotide
  Sense strand starting at position 2948 of SEQ ID NO: 1562756
agugacauuuccugaguuc

SEQ ID NO: 1770490 - RNA, 19 nt, Artificial Sequence
  Description of Artificial Sequence: Synthetic oligonucleotide
  Antisense strand to SEQ ID NO: 1770489
gaacucaggaaaugucacu

SEQ ID NO: 1770491 - RNA, 19 nt, Artificial Sequence
  Description of Artificial Sequence: Synthetic oligonucleotide
  Sense strand starting at position 2957 of SEQ ID NO: 1562756
uccugaguucgaggaguag

SEQ ID NO: 1770492 - RNA, 19 nt, Artificial Sequence
  Description of Artificial Sequence: Synthetic oligonucleotide
  Antisense strand to SEQ ID NO: 1770491
cuacuccucgaacucagga

SEQ ID NO: 1770493 - RNA, 19 nt, Artificial Sequence
  Description of Artificial Sequence: Synthetic oligonucleotide
  Sense strand starting at position 3062 of SEQ ID NO: 1562756
cgggaucuguuucucugau

SEQ ID NO: 1770494 - RNA, 19 nt, Artificial Sequence
  Description of Artificial Sequence: Synthetic oligonucleotide
  Antisense strand to SEQ ID NO: 1770493
aucagagaaacagaucccg

SEQ ID NO: 1770495 - RNA, 19 nt, Artificial Sequence
  Description of Artificial Sequence: Synthetic oligonucleotide
  Sense strand starting at position 3063 of SEQ ID NO: 1562756
gggaucuguuucucugaug

SEQ ID NO: 1770496 - RNA, 19 nt, Artificial Sequence
  Description of Artificial Sequence: Synthetic oligonucleotide
  Antisense strand to SEQ ID NO: 1770495
caucagagaaacagauccc

SEQ ID NO: 1770497 - RNA, 19 nt, Artificial Sequence
  Description of Artificial Sequence: Synthetic oligonucleotide
  Sense strand starting at position 3064 of SEQ ID NO: 1562756
ggaucuguuucucugaugu

SEQ ID NO: 1770498 - RNA, 19 nt, Artificial Sequence
  Description of Artificial Sequence: Synthetic oligonucleotide
  Antisense strand to SEQ ID NO: 1770497
acaucagagaaacagaucc

SEQ ID NO: 1770499 - RNA, 19 nt, Artificial Sequence
  Description of Artificial Sequence: Synthetic oligonucleotide
  Sense strand starting at position 3072 of SEQ ID NO: 1562756
uucucugaugucuggguau

SEQ ID NO: 1770500 - RNA, 19 nt, Artificial Sequence
  Description of Artificial Sequence: Synthetic oligonucleotide
  Antisense strand to SEQ ID NO: 1770499
auacccagacaucagagaa

SEQ ID NO: 1770501 - RNA, 19 nt, Artificial Sequence
  Description of Artificial Sequence: Synthetic oligonucleotide
  Sense strand starting at position 3074 of SEQ ID NO: 1562756
cucugaugucuggguauga

SEQ ID NO: 1770502 - RNA, 19 nt, Artificial Sequence
  Description of Artificial Sequence: Synthetic oligonucleotide
  Antisense strand to SEQ ID NO: 1770501
ucauacccagacaucagag

SEQ ID NO: 1770503 - RNA, 19 nt, Artificial Sequence
  Description of Artificial Sequence: Synthetic oligonucleotide
  Sense strand starting at position 3075 of SEQ ID NO: 1562756
ucugaugucuggguaugaa

SEQ ID NO: 1770504 - RNA, 19 nt, Artificial Sequence
  Description of Artificial Sequence: Synthetic oligonucleotide
  Antisense strand to SEQ ID NO: 1770503
uucauacccagacaucaga

SEQ ID NO: 1770505 - RNA, 19 nt, Artificial Sequence
  Description of Artificial Sequence: Synthetic oligonucleotide
  Sense strand starting at position 3219 of SEQ ID NO: 1562756
aaagauacgucagaaggaa

SEQ ID NO: 1770506 - RNA, 19 nt, Artificial Sequence
  Description of Artificial Sequence: Synthetic oligonucleotide
  Antisense strand to SEQ ID NO: 1770505
uuccuucugacguaucuuu

SEQ ID NO: 1770507 - RNA, 19 nt, Artificial Sequence
  Description of Artificial Sequence: Synthetic oligonucleotide
  Sense strand starting at position 3235 of SEQ ID NO: 1562756
gaaguaauguccuuuaaga

SEQ ID NO: 1770508 - RNA, 19 nt, Artificial Sequence
  Description of Artificial Sequence: Synthetic oligonucleotide
  Antisense strand to SEQ ID NO: 1770507
ucuuaaaggacauuacuuc

SEQ ID NO: 1770509 - RNA, 19 nt, Artificial Sequence
  Description of Artificial Sequence: Synthetic oligonucleotide
  Sense strand starting at position 3237 of SEQ ID NO: 1562756
aguaauguccuuuaagaug

SEQ ID NO: 1770510 - RNA, 19 nt, Artificial Sequence
  Description of Artificial Sequence: Synthetic oligonucleotide
  Antisense strand to SEQ ID NO: 1770509
caucuuaaaggacauuacu

SEQ ID NO: 1770511 - RNA, 19 nt, Artificial Sequence
  Description of Artificial Sequence: Synthetic oligonucleotide
  Sense strand starting at position 3245 of SEQ ID NO: 1562756
ccuuuaagauguucuuaga

SEQ ID NO: 1770512 - RNA, 19 nt, Artificial Sequence
  Description of Artificial Sequence: Synthetic oligonucleotide
  Antisense strand to SEQ ID NO: 1770511
ucuaagaacaucuuaaagg

SEQ ID NO: 1770513 - RNA, 19 nt, Artificial Sequence
  Description of Artificial Sequence: Synthetic oligonucleotide
  Sense strand starting at position 3248 of SEQ ID NO: 1562756
uuaagauguucuuagaaac

SEQ ID NO: 1770514 - RNA, 19 nt, Artificial Sequence
  Description of Artificial Sequence: Synthetic oligonucleotide
  Antisense strand to SEQ ID NO: 1770513
guuucuaagaacaucuuaa

SEQ ID NO: 1770515 - RNA, 19 nt, Artificial Sequence
  Description of Artificial Sequence: Synthetic oligonucleotide
  Sense strand starting at position 3323 of SEQ ID NO: 1562756
cagagaugggcggaucagu

SEQ ID NO: 1770516 - RNA, 19 nt, Artificial Sequence
  Description of Artificial Sequence: Synthetic oligonucleotide
  Antisense strand to SEQ ID NO: 1770515
acugauccgcccaucucug

SEQ ID NO: 1770517 - RNA, 19 nt, Artificial Sequence
  Description of Artificial Sequence: Synthetic oligonucleotide
  Sense strand starting at position 3681 of SEQ ID NO: 1562756
aguaauaaucaaggaagca

SEQ ID NO: 1770518 - RNA, 19 nt, Artificial Sequence
  Description of Artificial Sequence: Synthetic oligonucleotide
  Antisense strand to SEQ ID NO: 1770517
ugcuuccuugauuauuacu

SEQ ID NO: 1770519 - RNA, 19 nt, Artificial Sequence
  Description of Artificial Sequence: Synthetic oligonucleotide
  Sense strand starting at position 3755 of SEQ ID NO: 1562756
ugaaaugaguacuccuaau

SEQ ID NO: 1770520 - RNA, 19 nt, Artificial Sequence
  Description of Artificial Sequence: Synthetic oligonucleotide
  Antisense strand to SEQ ID NO: 1770519
auuaggaguacucauuuca

SEQ ID NO: 1770521 - RNA, 19 nt, Artificial Sequence
  Description of Artificial Sequence: Synthetic oligonucleotide
  Sense strand starting at position 3886 of SEQ ID NO: 1562756
ggaggauccaucgggcaau

SEQ ID NO: 1770522 - RNA, 19 nt, Artificial Sequence
  Description of Artificial Sequence: Synthetic oligonucleotide
  Antisense strand to SEQ ID NO: 1770521
auugcccgauggauccucc

SEQ ID NO: 1770523 - RNA, 19 nt, Artificial Sequence
  Description of Artificial Sequence: Synthetic oligonucleotide
  Sense strand starting at position 134 of SEQ ID NO: 1562757
gguagucugcgacaaguca

SEQ ID NO: 1770524 - RNA, 19 nt, Artificial Sequence
  Description of Artificial Sequence: Synthetic oligonucleotide
  Antisense strand to SEQ ID NO: 1770523
ugacuugucgcagacuacc

SEQ ID NO: 1770525 - RNA, 19 nt, Artificial Sequence
  Description of Artificial Sequence: Synthetic oligonucleotide
  Sense strand starting at position 169 of SEQ ID NO: 1562757
gcuagcauuuguugaacaa

SEQ ID NO: 1770526 - RNA, 19 nt, Artificial Sequence
  Description of Artificial Sequence: Synthetic oligonucleotide
  Antisense strand to SEQ ID NO: 1770525
uuguucaacaaaugcuagc

SEQ ID NO: 1770527 - RNA, 19 nt, Artificial Sequence
  Description of Artificial Sequence: Synthetic oligonucleotide
  Sense strand starting at position 1108 of SEQ ID NO: 1562757
gggcaucuuucggucaaga

SEQ ID NO: 1770528 - RNA, 19 nt, Artificial Sequence
  Description of Artificial Sequence: Synthetic oligonucleotide
  Antisense strand to SEQ ID NO: 1770527
ucuugaccgaaagaugccc

SEQ ID NO: 1770529 - RNA, 19 nt, Artificial Sequence
  Description of Artificial Sequence: Synthetic oligonucleotide
  Sense strand starting at position 1110 of SEQ ID NO: 1562757
gcaucuuucggucaagaug

SEQ ID NO: 1770530 - RNA, 19 nt, Artificial Sequence
  Description of Artificial Sequence: Synthetic oligonucleotide
  Antisense strand to SEQ ID NO: 1770529
caucuugaccgaaagaugc

SEQ ID NO: 1770531 - RNA, 19 nt, Artificial Sequence
  Description of Artificial Sequence: Synthetic oligonucleotide
  Sense strand starting at position 1188 of SEQ ID NO: 1562757
gcucuugugcugcccugaa

SEQ ID NO: 1770532 - RNA, 19 nt, Artificial Sequence
  Description of Artificial Sequence: Synthetic oligonucleotide
  Antisense strand to SEQ ID NO: 1770531
uucagggcagcacaagagc

SEQ ID NO: 1770533 - RNA, 19 nt, Artificial Sequence
  Description of Artificial Sequence: Synthetic oligonucleotide
  Sense strand starting at position 1313 of SEQ ID NO: 1562757
ggacuagaggccuggauca

SEQ ID NO: 1770534 - RNA, 19 nt, Artificial Sequence
  Description of Artificial Sequence: Synthetic oligonucleotide
  Antisense strand to SEQ ID NO: 1770533
ugauccaggccucuagucc

SEQ ID NO: 1770535 - RNA, 19 nt, Artificial Sequence
  Description of Artificial Sequence: Synthetic oligonucleotide
  Sense strand starting at position 1535 of SEQ ID NO: 1562757
ucuucugggcuuugugaau

SEQ ID NO: 1770536 - RNA, 19 nt, Artificial Sequence
  Description of Artificial Sequence: Synthetic oligonucleotide
  Antisense strand to SEQ ID NO: 1770535
auucacaaagcccagaaga

SEQ ID NO: 1770537 - RNA, 19 nt, Artificial Sequence
  Description of Artificial Sequence: Synthetic oligonucleotide
  Sense strand starting at position 1548 of SEQ ID NO: 1562757
gugaauuuauaugcgugca

SEQ ID NO: 1770538 - RNA, 19 nt, Artificial Sequence
  Description of Artificial Sequence: Synthetic oligonucleotide
  Antisense strand to SEQ ID NO: 1770537
ugcacgcauauaaauucac

SEQ ID NO: 1770539 - RNA, 19 nt, Artificial Sequence
  Description of Artificial Sequence: Synthetic oligonucleotide
  Sense strand starting at position 1549 of SEQ ID NO: 1562757
ugaauuuauaugcgugcau

SEQ ID NO: 1770540 - RNA, 19 nt, Artificial Sequence
  Description of Artificial Sequence: Synthetic oligonucleotide
  Antisense strand to SEQ ID NO: 1770539
augcacgcauauaaauuca

SEQ ID NO: 1770541 - RNA, 19 nt, Artificial Sequence
  Description of Artificial Sequence: Synthetic oligonucleotide
  Sense strand starting at position 1550 of SEQ ID NO: 1562757
gaauuuauaugcgugcauu

SEQ ID NO: 1770542 - RNA, 19 nt, Artificial Sequence
  Description of Artificial Sequence: Synthetic oligonucleotide
  Antisense strand to SEQ ID NO: 1770541
aaugcacgcauauaaauuc

SEQ ID NO: 1770543 - RNA, 19 nt, Artificial Sequence
  Description of Artificial Sequence: Synthetic oligonucleotide
  Sense strand starting at position 1551 of SEQ ID NO: 1562757
aauuuauaugcgugcauuc

SEQ ID NO: 1770544 - RNA, 19 nt, Artificial Sequence
  Description of Artificial Sequence: Synthetic oligonucleotide
  Antisense strand to SEQ ID NO: 1770543
gaaugcacgcauauaaauu

SEQ ID NO: 1770545 - RNA, 19 nt, Artificial Sequence
  Description of Artificial Sequence: Synthetic oligonucleotide
  Sense strand starting at position 1560 of SEQ ID NO: 1562757
gcgugcauuccacgcaaga

SEQ ID NO: 1770546 - RNA, 19 nt, Artificial Sequence
  Description of Artificial Sequence: Synthetic oligonucleotide
  Antisense strand to SEQ ID NO: 1770545
ucuugcguggaaugcacgc

SEQ ID NO: 1770547 - RNA, 19 nt, Artificial Sequence
  Description of Artificial Sequence: Synthetic oligonucleotide
  Sense strand starting at position 1562 of SEQ ID NO: 1562757
gugcauuccacgcaagaac

SEQ ID NO: 1770548 - RNA, 19 nt, Artificial Sequence
  Description of Artificial Sequence: Synthetic oligonucleotide
  Antisense strand to SEQ ID NO: 1770547
guucuugcguggaaugcac

SEQ ID NO: 1770549 - RNA, 19 nt, Artificial Sequence
  Description of Artificial Sequence: Synthetic oligonucleotide
  Sense strand starting at position 1571 of SEQ ID NO: 1562757
acgcaagaacucugucaac

SEQ ID NO: 1770550 - RNA, 19 nt, Artificial Sequence
  Description of Artificial Sequence: Synthetic oligonucleotide
  Antisense strand to SEQ ID NO: 1770549
guugacagaguucuugcgu

SEQ ID NO: 1770551 - RNA, 19 nt, Artificial Sequence
  Description of Artificial Sequence: Synthetic oligonucleotide
  Sense strand starting at position 2416 of SEQ ID NO: 1562757
aucugaggguucguucaga

SEQ ID NO: 1770552 - RNA, 19 nt, Artificial Sequence
  Description of Artificial Sequence: Synthetic oligonucleotide
  Antisense strand to SEQ ID NO: 1770551
ucugaacgaacccucagau

SEQ ID NO: 1770553 - RNA, 19 nt, Artificial Sequence
  Description of Artificial Sequence: Synthetic oligonucleotide
  Sense strand starting at position 2709 of SEQ ID NO: 1562757
aggaaugacuguccgggaa

SEQ ID NO: 1770554 - RNA, 19 nt, Artificial Sequence
  Description of Artificial Sequence: Synthetic oligonucleotide
  Antisense strand to SEQ ID NO: 1770553
uucccggacagucauuccu

SEQ ID NO: 1770555 - RNA, 19 nt, Artificial Sequence
  Description of Artificial Sequence: Synthetic oligonucleotide
  Sense strand starting at position 2801 of SEQ ID NO: 1562757
gggacucuagcugaaucuu

SEQ ID NO: 1770556 - RNA, 19 nt, Artificial Sequence
  Description of Artificial Sequence: Synthetic oligonucleotide
  Antisense strand to SEQ ID NO: 1770555
aagauucagcuagaguccc

SEQ ID NO: 1770557 - RNA, 19 nt, Artificial Sequence
  Description of Artificial Sequence: Synthetic oligonucleotide
  Sense strand starting at position 2863 of SEQ ID NO: 1562757
ccagaaugcuuccuuggga

SEQ ID NO: 1770558 - RNA, 19 nt, Artificial Sequence
  Description of Artificial Sequence: Synthetic oligonucleotide
  Antisense strand to SEQ ID NO: 1770557
ucccaaggaagcauucugg

SEQ ID NO: 1770559 - RNA, 19 nt, Artificial Sequence
  Description of Artificial Sequence: Synthetic oligonucleotide
  Sense strand starting at position 2866 of SEQ ID NO: 1562757
gaaugcuuccuugggaguu

SEQ ID NO: 1770560 - RNA, 19 nt, Artificial Sequence
  Description of Artificial Sequence: Synthetic oligonucleotide
  Antisense strand to SEQ ID NO: 1770559
aacucccaaggaagcauuc

SEQ ID NO: 1770561 - RNA, 19 nt, Artificial Sequence
  Description of Artificial Sequence: Synthetic oligonucleotide
  Sense strand starting at position 2949 of SEQ ID NO: 1562757
agugacauuuccugaguuc

SEQ ID NO: 1770562 - RNA, 19 nt, Artificial Sequence
  Description of Artificial Sequence: Synthetic oligonucleotide
  Antisense strand to SEQ ID NO: 1770561
gaacucaggaaaugucacu

SEQ ID NO: 1770563 - RNA, 19 nt, Artificial Sequence
  Description of Artificial Sequence: Synthetic oligonucleotide
  Sense strand starting at position 2958 of SEQ ID NO: 1562757
uccugaguucgaggaguag

SEQ ID NO: 1770564 - RNA, 19 nt, Artificial Sequence
  Description of Artificial Sequence: Synthetic oligonucleotide
  Antisense strand to SEQ ID NO: 1770563
cuacuccucgaacucagga

SEQ ID NO: 1770565 - RNA, 19 nt, Artificial Sequence
  Description of Artificial Sequence: Synthetic oligonucleotide
  Sense strand starting at position 2993 of SEQ ID NO: 1562757
aaagcugacucagagaaag

SEQ ID NO: 1770566 - RNA, 19 nt, Artificial Sequence
  Description of Artificial Sequence: Synthetic oligonucleotide
  Antisense strand to SEQ ID NO: 1770565
cuuucucugagucagcuuu

SEQ ID NO: 1770567 - RNA, 19 nt, Artificial Sequence
  Description of Artificial Sequence: Synthetic oligonucleotide
  Sense strand starting at position 3063 of SEQ ID NO: 1562757
cgggaucuguuucucugau

SEQ ID NO: 1770568 - RNA, 19 nt, Artificial Sequence
  Description of Artificial Sequence: Synthetic oligonucleotide
  Antisense strand to SEQ ID NO: 1770567
aucagagaaacagaucccg

SEQ ID NO: 1770569 - RNA, 19 nt, Artificial Sequence
  Description of Artificial Sequence: Synthetic oligonucleotide
  Sense strand starting at position 3064 of SEQ ID NO: 1562757
gggaucuguuucucugaug

SEQ ID NO: 1770570 - RNA, 19 nt, Artificial Sequence
  Description of Artificial Sequence: Synthetic oligonucleotide
  Antisense strand to SEQ ID NO: 1770569
caucagagaaacagauccc

SEQ ID NO: 1770571 - RNA, 19 nt, Artificial Sequence
  Description of Artificial Sequence: Synthetic oligonucleotide
  Sense strand starting at position 3065 of SEQ ID NO: 1562757
ggaucuguuucucugaugu

SEQ ID NO: 1770572 - RNA, 19 nt, Artificial Sequence
  Description of Artificial Sequence: Synthetic oligonucleotide
  Antisense strand to SEQ ID NO: 1770571
acaucagagaaacagaucc

SEQ ID NO: 1770573 - RNA, 19 nt, Artificial Sequence
  Description of Artificial Sequence: Synthetic oligonucleotide
  Sense strand starting at position 3073 of SEQ ID NO: 1562757
uucucugaugucuggguau

SEQ ID NO: 1770574 - RNA, 19 nt, Artificial Sequence
  Description of Artificial Sequence: Synthetic oligonucleotide
  Antisense strand to SEQ ID NO: 1770573
auacccagacaucagagaa

SEQ ID NO: 1770575 - RNA, 19 nt, Artificial Sequence
  Description of Artificial Sequence: Synthetic oligonucleotide
  Sense strand starting at position 3075 of SEQ ID NO: 1562757
cucugaugucuggguauga

SEQ ID NO: 1770576 - RNA, 19 nt, Artificial Sequence
  Description of Artificial Sequence: Synthetic oligonucleotide
  Antisense strand to SEQ ID NO: 1770575
ucauacccagacaucagag

SEQ ID NO: 1770577 - RNA, 19 nt, Artificial Sequence
  Description of Artificial Sequence: Synthetic oligonucleotide
  Sense strand starting at position 3076 of SEQ ID NO: 1562757
ucugaugucuggguaugaa

SEQ ID NO: 1770578 - RNA, 19 nt, Artificial Sequence
  Description of Artificial Sequence: Synthetic oligonucleotide
  Antisense strand to SEQ ID NO: 1770577
uucauacccagacaucaga

SEQ ID NO: 1770579 - RNA, 19 nt, Artificial Sequence
  Description of Artificial Sequence: Synthetic oligonucleotide
  Sense strand starting at position 3101 of SEQ ID NO: 1562757
uucuaagccucagaacagu

SEQ ID NO: 1770580 - RNA, 19 nt, Artificial Sequence
  Description of Artificial Sequence: Synthetic oligonucleotide
  Antisense strand to SEQ ID NO: 1770579
acuguucugaggcuuagaa

SEQ ID NO: 1770581 - RNA, 19 nt, Artificial Sequence
  Description of Artificial Sequence: Synthetic oligonucleotide
  Sense strand starting at position 3156 of SEQ ID NO: 1562757
aagguuacuuuguggagga

SEQ ID NO: 1770582 - RNA, 19 nt, Artificial Sequence
  Description of Artificial Sequence: Synthetic oligonucleotide
  Antisense strand to SEQ ID NO: 1770581
uccuccacaaaguaaccuu

SEQ ID NO: 1770583 - RNA, 19 nt, Artificial Sequence
  Description of Artificial Sequence: Synthetic oligonucleotide
  Sense strand starting at position 3157 of SEQ ID NO: 1562757
agguuacuuuguggaggaa

SEQ ID NO: 1770584 - RNA, 19 nt, Artificial Sequence
  Description of Artificial Sequence: Synthetic oligonucleotide
  Antisense strand to SEQ ID NO: 1770583
uuccuccacaaaguaaccu

SEQ ID NO: 1770585 - RNA, 19 nt, Artificial Sequence
  Description of Artificial Sequence: Synthetic oligonucleotide
  Sense strand starting at position 3203 of SEQ ID NO: 1562757
ugggaaggaucucgguaaa

SEQ ID NO: 1770586 - RNA, 19 nt, Artificial Sequence
  Description of Artificial Sequence: Synthetic oligonucleotide
  Antisense strand to SEQ ID NO: 1770585
uuuaccgagauccuuccca

SEQ ID NO: 1770587 - RNA, 19 nt, Artificial Sequence
  Description of Artificial Sequence: Synthetic oligonucleotide
  Sense strand starting at position 3220 of SEQ ID NO: 1562757
aaagauacgucagaaggaa

SEQ ID NO: 1770588 - RNA, 19 nt, Artificial Sequence
  Description of Artificial Sequence: Synthetic oligonucleotide
  Antisense strand to SEQ ID NO: 1770587
uuccuucugacguaucuuu

SEQ ID NO: 1770589 - RNA, 19 nt, Artificial Sequence
  Description of Artificial Sequence: Synthetic oligonucleotide
  Sense strand starting at position 3236 of SEQ ID NO: 1562757
gaaguaauguccuuuaaga

SEQ ID NO: 1770590 - RNA, 19 nt, Artificial Sequence
  Description of Artificial Sequence: Synthetic oligonucleotide
  Antisense strand to SEQ ID NO: 1770589
ucuuaaaggacauuacuuc

SEQ ID NO: 1770591 - RNA, 19 nt, Artificial Sequence
  Description of Artificial Sequence: Synthetic oligonucleotide
  Sense strand starting at position 3238 of SEQ ID NO: 1562757
aguaauguccuuuaagaug

SEQ ID NO: 1770592 - RNA, 19 nt, Artificial Sequence
  Description of Artificial Sequence: Synthetic oligonucleotide
  Antisense strand to SEQ ID NO: 1770591
caucuuaaaggacauuacu

SEQ ID NO: 1770593 - RNA, 19 nt, Artificial Sequence
  Description of Artificial Sequence: Synthetic oligonucleotide
  Sense strand starting at position 3246 of SEQ ID NO: 1562757
ccuuuaagauguucuuaga

SEQ ID NO: 1770594 - RNA, 19 nt, Artificial Sequence
  Description of Artificial Sequence: Synthetic oligonucleotide
  Antisense strand to SEQ ID NO: 1770593
ucuaagaacaucuuaaagg

SEQ ID NO: 1770595 - RNA, 19 nt, Artificial Sequence
  Description of Artificial Sequence: Synthetic oligonucleotide
  Sense strand starting at position 3324 of SEQ ID NO: 1562757
cagagaugggcggaucagu

SEQ ID NO: 1770596 - RNA, 19 nt, Artificial Sequence
  Description of Artificial Sequence: Synthetic oligonucleotide
  Antisense strand to SEQ ID NO: 1770595
acugauccgcccaucucug

SEQ ID NO: 1770597 - RNA, 19 nt, Artificial Sequence
  Description of Artificial Sequence: Synthetic oligonucleotide
  Sense strand starting at position 3682 of SEQ ID NO: 1562757
aguaauaaucaaggaagca

SEQ ID NO: 1770598 - RNA, 19 nt, Artificial Sequence
  Description of Artificial Sequence: Synthetic oligonucleotide
  Antisense strand to SEQ ID NO: 1770597
ugcuuccuugauuauuacu

SEQ ID NO: 1770599 - RNA, 19 nt, Artificial Sequence
  Description of Artificial Sequence: Synthetic oligonucleotide
  Sense strand starting at position 3756 of SEQ ID NO: 1562757
ugaaaugaguacuccuaau

SEQ ID NO: 1770600 - RNA, 19 nt, Artificial Sequence
  Description of Artificial Sequence: Synthetic oligonucleotide
  Antisense strand to SEQ ID NO: 1770599
auuaggaguacucauuuca

SEQ ID NO: 1770601 - RNA, 19 nt, Artificial Sequence
  Description of Artificial Sequence: Synthetic oligonucleotide
  Sense strand starting at position 3887 of SEQ ID NO: 1562757
ggaggauccaucgggcaau

SEQ ID NO: 1770602 - RNA, 19 nt, Artificial Sequence
  Description of Artificial Sequence: Synthetic oligonucleotide
  Antisense strand to SEQ ID NO: 1770601
auugcccgauggauccucc

SEQ ID NO: 1770603 - RNA, 19 nt, Artificial Sequence
  Description of Artificial Sequence: Synthetic oligonucleotide
  Sense strand starting at position 79 of SEQ ID NO: 1562758
auuaaaugagcuggucaag

SEQ ID NO: 1770604 - RNA, 19 nt, Artificial Sequence
  Description of Artificial Sequence: Synthetic oligonucleotide
  Antisense strand to SEQ ID NO: 1770603
cuugaccagcucauuuaau

SEQ ID NO: 1770605 - RNA, 19 nt, Artificial Sequence
  Description of Artificial Sequence: Synthetic oligonucleotide
  Sense strand starting at position 195 of SEQ ID NO: 1562758
uugagucagguccauaauc

SEQ ID NO: 1770606 - RNA, 19 nt, Artificial Sequence
  Description of Artificial Sequence: Synthetic oligonucleotide
  Antisense strand to SEQ ID NO: 1770605
gauuauggaccugacucaa

SEQ ID NO: 1770607 - RNA, 19 nt, Artificial Sequence
  Description of Artificial Sequence: Synthetic oligonucleotide
  Sense strand starting at position 197 of SEQ ID NO: 1562758
gagucagguccauaaucuu

SEQ ID NO: 1770608 - RNA, 19 nt, Artificial Sequence
  Description of Artificial Sequence: Synthetic oligonucleotide
  Antisense strand to SEQ ID NO: 1770607
aagauuauggaccugacuc

SEQ ID NO: 1770609 - RNA, 19 nt, Artificial Sequence
  Description of Artificial Sequence: Synthetic oligonucleotide
  Sense strand starting at position 214 of SEQ ID NO: 1562758
uuguaacuuccugaguuga

SEQ ID NO: 1770610 - RNA, 19 nt, Artificial Sequence
  Description of Artificial Sequence: Synthetic oligonucleotide
  Antisense strand to SEQ ID NO: 1770609
ucaacucaggaaguuacaa

SEQ ID NO: 1770611 - RNA, 19 nt, Artificial Sequence
  Description of Artificial Sequence: Synthetic oligonucleotide
  Sense strand starting at position 216 of SEQ ID NO: 1562758
guaacuuccugaguugacu

SEQ ID NO: 1770612 - RNA, 19 nt, Artificial Sequence
  Description of Artificial Sequence: Synthetic oligonucleotide
  Antisense strand to SEQ ID NO: 1770611
agucaacucaggaaguuac

SEQ ID NO: 1770613 - RNA, 19 nt, Artificial Sequence
  Description of Artificial Sequence: Synthetic oligonucleotide
  Sense strand starting at position 225 of SEQ ID NO: 1562758
ugaguugacucaucagagc

SEQ ID NO: 1770614 - RNA, 19 nt, Artificial Sequence
  Description of Artificial Sequence: Synthetic oligonucleotide
  Antisense strand to SEQ ID NO: 1770613
gcucugaugagucaacuca

SEQ ID NO: 1770615 - RNA, 19 nt, Artificial Sequence
  Description of Artificial Sequence: Synthetic oligonucleotide
  Sense strand starting at position 244 of SEQ ID NO: 1562758
uuguaauuguaaccuggau

SEQ ID NO: 1770616 - RNA, 19 nt, Artificial Sequence
  Description of Artificial Sequence: Synthetic oligonucleotide
  Antisense strand to SEQ ID NO: 1770615
auccagguuacaauuacaa

SEQ ID NO: 1770617 - RNA, 19 nt, Artificial Sequence
  Description of Artificial Sequence: Synthetic oligonucleotide
  Sense strand starting at position 248 of SEQ ID NO: 1562758
aauuguaaccuggauguuu

SEQ ID NO: 1770618 - RNA, 19 nt, Artificial Sequence
  Description of Artificial Sequence: Synthetic oligonucleotide
  Antisense strand to SEQ ID NO: 1770617
aaacauccagguuacaauu

SEQ ID NO: 1770619 - RNA, 19 nt, Artificial Sequence
  Description of Artificial Sequence: Synthetic oligonucleotide
  Sense strand starting at position 376 of SEQ ID NO: 1562758
aagugcucaccugagacua

SEQ ID NO: 1770620 - RNA, 19 nt, Artificial Sequence
  Description of Artificial Sequence: Synthetic oligonucleotide
  Antisense strand to SEQ ID NO: 1770619
uagucucaggugagcacuu

SEQ ID NO: 1770621 - RNA, 19 nt, Artificial Sequence
  Description of Artificial Sequence: Synthetic oligonucleotide
  Sense strand starting at position 386 of SEQ ID NO: 1562758
cugagacuacaauggcaaa

SEQ ID NO: 1770622 - RNA, 19 nt, Artificial Sequence
  Description of Artificial Sequence: Synthetic oligonucleotide
  Antisense strand to SEQ ID NO: 1770621
uuugccauuguagucucag

SEQ ID NO: 1770623 - RNA, 19 nt, Artificial Sequence
  Description of Artificial Sequence: Synthetic oligonucleotide
  Sense strand starting at position 426 of SEQ ID NO: 1562758
uuagguugcagggaaaguu

SEQ ID NO: 1770624 - RNA, 19 nt, Artificial Sequence
  Description of Artificial Sequence: Synthetic oligonucleotide
  Antisense strand to SEQ ID NO: 1770623
aacuuucccugcaaccuaa

SEQ ID NO: 1770625 - RNA, 19 nt, Artificial Sequence
  Description of Artificial Sequence: Synthetic oligonucleotide
  Sense strand starting at position 537 of SEQ ID NO: 1562758
guaacuauccuacaaaugu

SEQ ID NO: 1770626 - RNA, 19 nt, Artificial Sequence
  Description of Artificial Sequence: Synthetic oligonucleotide
  Antisense strand to SEQ ID NO: 1770625
acauuuguaggauaguuac

SEQ ID NO: 1770627 - RNA, 19 nt, Artificial Sequence
  Description of Artificial Sequence: Synthetic oligonucleotide
  Sense strand starting at position 548 of SEQ ID NO: 1562758
acaaauguaagugguggua

SEQ ID NO: 1770628 - RNA, 19 nt, Artificial Sequence
  Description of Artificial Sequence: Synthetic oligonucleotide
  Antisense strand to SEQ ID NO: 1770627
uaccaccacuuacauuugu

SEQ ID NO: 1770629 - RNA, 19 nt, Artificial Sequence
  Description of Artificial Sequence: Synthetic oligonucleotide
  Sense strand starting at position 673 of SEQ ID NO: 1562758
uuaggugucuucuuaaaua

SEQ ID NO: 1770630 - RNA, 19 nt, Artificial Sequence
  Description of Artificial Sequence: Synthetic oligonucleotide
  Antisense strand to SEQ ID NO: 1770629
uauuuaagaagacaccuaa

SEQ ID NO: 1770631 - RNA, 19 nt, Artificial Sequence
  Description of Artificial Sequence: Synthetic oligonucleotide
  Sense strand starting at position 833 of SEQ ID NO: 1562758
ggcauucuuucccuaagga

SEQ ID NO: 1770632 - RNA, 19 nt, Artificial Sequence
  Description of Artificial Sequence: Synthetic oligonucleotide
  Antisense strand to SEQ ID NO: 1770631
uccuuagggaaagaaugcc

SEQ ID NO: 1770633 - RNA, 19 nt, Artificial Sequence
  Description of Artificial Sequence: Synthetic oligonucleotide
  Sense strand starting at position 834 of SEQ ID NO: 1562758
gcauucuuucccuaaggaa

SEQ ID NO: 1770634 - RNA, 19 nt, Artificial Sequence
  Description of Artificial Sequence: Synthetic oligonucleotide
  Antisense strand to SEQ ID NO: 1770633
uuccuuagggaaagaaugc

SEQ ID NO: 1770635 - RNA, 19 nt, Artificial Sequence
  Description of Artificial Sequence: Synthetic oligonucleotide
  Sense strand starting at position 1082 of SEQ ID NO: 1562758
guagacauucucggacaug

SEQ ID NO: 1770636 - RNA, 19 nt, Artificial Sequence
  Description of Artificial Sequence: Synthetic oligonucleotide
  Antisense strand to SEQ ID NO: 1770635
cauguccgagaaugucuac

SEQ ID NO: 1770637 - RNA, 19 nt, Artificial Sequence
  Description of Artificial Sequence: Synthetic oligonucleotide
  Sense strand starting at position 2178 of SEQ ID NO: 1562758
cagagaagugucugacuga

SEQ ID NO: 1770638 - RNA, 19 nt, Artificial Sequence
  Description of Artificial Sequence: Synthetic oligonucleotide
  Antisense strand to SEQ ID NO: 1770637
ucagucagacacuucucug

SEQ ID NO: 1770639 - RNA, 19 nt, Artificial Sequence
  Description of Artificial Sequence: Synthetic oligonucleotide
  Sense strand starting at position 2181 of SEQ ID NO: 1562758
agaagugucugacugacac

SEQ ID NO: 1770640 - RNA, 19 nt, Artificial Sequence
  Description of Artificial Sequence: Synthetic oligonucleotide
  Antisense strand to SEQ ID NO: 1770639
gugucagucagacacuucu

SEQ ID NO: 1770641 - RNA, 19 nt, Artificial Sequence
  Description of Artificial Sequence: Synthetic oligonucleotide
  Sense strand starting at position 2278 of SEQ ID NO: 1562758
guacuaagccugcaaaucu

SEQ ID NO: 1770642 - RNA, 19 nt, Artificial Sequence
  Description of Artificial Sequence: Synthetic oligonucleotide
  Antisense strand to SEQ ID NO: 1770641
agauuugcaggcuuaguac

SEQ ID NO: 1770643 - RNA, 19 nt, Artificial Sequence
  Description of Artificial Sequence: Synthetic oligonucleotide
  Sense strand starting at position 2314 of SEQ ID NO: 1562758
cgcuguaagccuuccgaug

SEQ ID NO: 1770644 - RNA, 19 nt, Artificial Sequence
  Description of Artificial Sequence: Synthetic oligonucleotide
  Antisense strand to SEQ ID NO: 1770643
caucggaaggcuuacagcg

SEQ ID NO: 1770645 - RNA, 19 nt, Artificial Sequence
  Description of Artificial Sequence: Synthetic oligonucleotide
  Sense strand starting at position 2381 of SEQ ID NO: 1562758
ggaccugcucauggagaua

SEQ ID NO: 1770646 - RNA, 19 nt, Artificial Sequence
  Description of Artificial Sequence: Synthetic oligonucleotide
  Antisense strand to SEQ ID NO: 1770645
uaucuccaugagcaggucc

SEQ ID NO: 1770647 - RNA, 19 nt, Artificial Sequence
  Description of Artificial Sequence: Synthetic oligonucleotide
  Sense strand starting at position 2384 of SEQ ID NO: 1562758
ccugcucauggagauagua

SEQ ID NO: 1770648 - RNA, 19 nt, Artificial Sequence
  Description of Artificial Sequence: Synthetic oligonucleotide
  Antisense strand to SEQ ID NO: 1770647
uacuaucuccaugagcagg

SEQ ID NO: 1770649 - RNA, 19 nt, Artificial Sequence
  Description of Artificial Sequence: Synthetic oligonucleotide
  Sense strand starting at position 2489 of SEQ ID NO: 1562758
acuuuaauaguaggaucga

SEQ ID NO: 1770650 - RNA, 19 nt, Artificial Sequence
  Description of Artificial Sequence: Synthetic oligonucleotide
  Antisense strand to SEQ ID NO: 1770649
ucgauccuacuauuaaagu

SEQ ID NO: 1770651 - RNA, 19 nt, Artificial Sequence
  Description of Artificial Sequence: Synthetic oligonucleotide
  Sense strand starting at position 2542 of SEQ ID NO: 1562758
gccagagugaggcaauaau

SEQ ID NO: 1770652 - RNA, 19 nt, Artificial Sequence
  Description of Artificial Sequence: Synthetic oligonucleotide
  Antisense strand to SEQ ID NO: 1770651
auuauugccucacucuggc

SEQ ID NO: 1770653 - RNA, 19 nt, Artificial Sequence
  Description of Artificial Sequence: Synthetic oligonucleotide
  Sense strand starting at position 2707 of SEQ ID NO: 1562758
cucauaagguaguuuccua

SEQ ID NO: 1770654 - RNA, 19 nt, Artificial Sequence
  Description of Artificial Sequence: Synthetic oligonucleotide
  Antisense strand to SEQ ID NO: 1770653
uaggaaacuaccuuaugag

SEQ ID NO: 1770655 - RNA, 19 nt, Artificial Sequence
  Description of Artificial Sequence: Synthetic oligonucleotide
  Sense strand starting at position 2711 of SEQ ID NO: 1562758
uaagguaguuuccuaugga

SEQ ID NO: 1770656 - RNA, 19 nt, Artificial Sequence
  Description of Artificial Sequence: Synthetic oligonucleotide
  Antisense strand to SEQ ID NO: 1770655
uccauaggaaacuaccuua

SEQ ID NO: 1770657 - RNA, 19 nt, Artificial Sequence
  Description of Artificial Sequence: Synthetic oligonucleotide
  Sense strand starting at position 2714 of SEQ ID NO: 1562758
gguaguuuccuauggauua

SEQ ID NO: 1770658 - RNA, 19 nt, Artificial Sequence
  Description of Artificial Sequence: Synthetic oligonucleotide
  Antisense strand to SEQ ID NO: 1770657
uaauccauaggaaacuacc

SEQ ID NO: 1770659 - RNA, 19 nt, Artificial Sequence
  Description of Artificial Sequence: Synthetic oligonucleotide
  Sense strand starting at position 2856 of SEQ ID NO: 1562758
gggauuaaccaacgucuau

SEQ ID NO: 1770660 - RNA, 19 nt, Artificial Sequence
  Description of Artificial Sequence: Synthetic oligonucleotide
  Antisense strand to SEQ ID NO: 1770659
auagacguugguuaauccc

SEQ ID NO: 1770661 - RNA, 19 nt, Artificial Sequence
  Description of Artificial Sequence: Synthetic oligonucleotide
  Sense strand starting at position 2860 of SEQ ID NO: 1562758
uuaaccaacgucuaugaau

SEQ ID NO: 1770662 - RNA, 19 nt, Artificial Sequence
  Description of Artificial Sequence: Synthetic oligonucleotide
  Antisense strand to SEQ ID NO: 1770661
auucauagacguugguuaa

SEQ ID NO: 1770663 - RNA, 19 nt, Artificial Sequence
  Description of Artificial Sequence: Synthetic oligonucleotide
  Sense strand starting at position 2911 of SEQ ID NO: 1562758
caaacaagagcauguuuga

SEQ ID NO: 1770664 - RNA, 19 nt, Artificial Sequence
  Description of Artificial Sequence: Synthetic oligonucleotide
  Antisense strand to SEQ ID NO: 1770663
ucaaacaugcucuuguuug

SEQ ID NO: 1770665 - RNA, 19 nt, Artificial Sequence
  Description of Artificial Sequence: Synthetic oligonucleotide
  Sense strand starting at position 2914 of SEQ ID NO: 1562758
acaagagcauguuugagaa

SEQ ID NO: 1770666 - RNA, 19 nt, Artificial Sequence
  Description of Artificial Sequence: Synthetic oligonucleotide
  Antisense strand to SEQ ID NO: 1770665
uucucaaacaugcucuugu

SEQ ID NO: 1770667 - RNA, 19 nt, Artificial Sequence
  Description of Artificial Sequence: Synthetic oligonucleotide
  Sense strand starting at position 2969 of SEQ ID NO: 1562758
ccuaaaucuuuagugagca

SEQ ID NO: 1770668 - RNA, 19 nt, Artificial Sequence
  Description of Artificial Sequence: Synthetic oligonucleotide
  Antisense strand to SEQ ID NO: 1770667
ugcucacuaaagauuuagg

SEQ ID NO: 1770669 - RNA, 19 nt, Artificial Sequence
  Description of Artificial Sequence: Synthetic oligonucleotide
  Sense strand starting at position 3124 of SEQ ID NO: 1562758
aucugauuccaauggucuu

SEQ ID NO: 1770670 - RNA, 19 nt, Artificial Sequence
  Description of Artificial Sequence: Synthetic oligonucleotide
  Antisense strand to SEQ ID NO: 1770669
aagaccauuggaaucagau

SEQ ID NO: 1770671 - RNA, 19 nt, Artificial Sequence
  Description of Artificial Sequence: Synthetic oligonucleotide
  Sense strand starting at position 3127 of SEQ ID NO: 1562758
ugauuccaauggucuugau

SEQ ID NO: 1770672 - RNA, 19 nt, Artificial Sequence
  Description of Artificial Sequence: Synthetic oligonucleotide
  Antisense strand to SEQ ID NO: 1770671
aucaagaccauuggaauca

SEQ ID NO: 1770673 - RNA, 19 nt, Artificial Sequence
  Description of Artificial Sequence: Synthetic oligonucleotide
  Sense strand starting at position 3139 of SEQ ID NO: 1562758
ucuugauacuguucuuaug

SEQ ID NO: 1770674 - RNA, 19 nt, Artificial Sequence
  Description of Artificial Sequence: Synthetic oligonucleotide
  Antisense strand to SEQ ID NO: 1770673
cauaagaacaguaucaaga

SEQ ID NO: 1770675 - RNA, 19 nt, Artificial Sequence
  Description of Artificial Sequence: Synthetic oligonucleotide
  Sense strand starting at position 3597 of SEQ ID NO: 1562758
agcccuuaaucagugggau

SEQ ID NO: 1770676 - RNA, 19 nt, Artificial Sequence
  Description of Artificial Sequence: Synthetic oligonucleotide
  Antisense strand to SEQ ID NO: 1770675
aucccacugauuaagggcu

SEQ ID NO: 1770677 - RNA, 19 nt, Artificial Sequence
  Description of Artificial Sequence: Synthetic oligonucleotide
  Sense strand starting at position 3605 of SEQ ID NO: 1562758
aucagugggaucugacagu

SEQ ID NO: 1770678 - RNA, 19 nt, Artificial Sequence
  Description of Artificial Sequence: Synthetic oligonucleotide
  Antisense strand to SEQ ID NO: 1770677
acugucagaucccacugau

SEQ ID NO: 1770679 - RNA, 19 nt, Artificial Sequence
  Description of Artificial Sequence: Synthetic oligonucleotide
  Sense strand starting at position 3619 of SEQ ID NO: 1562758
acaguaucuccagguagac

SEQ ID NO: 1770680 - RNA, 19 nt, Artificial Sequence
  Description of Artificial Sequence: Synthetic oligonucleotide
  Antisense strand to SEQ ID NO: 1770679
gucuaccuggagauacugu

SEQ ID NO: 1770681 - RNA, 19 nt, Artificial Sequence
  Description of Artificial Sequence: Synthetic oligonucleotide
  Sense strand starting at position 3795 of SEQ ID NO: 1562758
cuuuauggcccagauugau

SEQ ID NO: 1770682 - RNA, 19 nt, Artificial Sequence
  Description of Artificial Sequence: Synthetic oligonucleotide
  Antisense strand to SEQ ID NO: 1770681
aucaaucugggccauaaag

SEQ ID NO: 1770683 - RNA, 19 nt, Artificial Sequence
  Description of Artificial Sequence: Synthetic oligonucleotide
  Sense strand starting at position 48 of SEQ ID NO: 1562759
agcgccuugcuagauauga

SEQ ID NO: 1770684 - RNA, 19 nt, Artificial Sequence
  Description of Artificial Sequence: Synthetic oligonucleotide
  Antisense strand to SEQ ID NO: 1770683
ucauaucuagcaaggcgcu

SEQ ID NO: 1770685 - RNA, 19 nt, Artificial Sequence
  Description of Artificial Sequence: Synthetic oligonucleotide
  Sense strand starting at position 50 of SEQ ID NO: 1562759
cgccuugcuagauaugaag

SEQ ID NO: 1770686 - RNA, 19 nt, Artificial Sequence
  Description of Artificial Sequence: Synthetic oligonucleotide
  Antisense strand to SEQ ID NO: 1770685
cuucauaucuagcaaggcg

SEQ ID NO: 1770687 - RNA, 19 nt, Artificial Sequence
  Description of Artificial Sequence: Synthetic oligonucleotide
  Sense strand starting at position 82 of SEQ ID NO: 1562759
uuguaaagucuccaggaca

SEQ ID NO: 1770688 - RNA, 19 nt, Artificial Sequence
  Description of Artificial Sequence: Synthetic oligonucleotide
  Antisense strand to SEQ ID NO: 1770687
uguccuggagacuuuacaa

SEQ ID NO: 1770689 - RNA, 19 nt, Artificial Sequence
  Description of Artificial Sequence: Synthetic oligonucleotide
  Sense strand starting at position 85 of SEQ ID NO: 1562759
uaaagucuccaggacaguu

SEQ ID NO: 1770690 - RNA, 19 nt, Artificial Sequence
  Description of Artificial Sequence: Synthetic oligonucleotide
  Antisense strand to SEQ ID NO: 1770689
aacuguccuggagacuuua

SEQ ID NO: 1770691 - RNA, 19 nt, Artificial Sequence
  Description of Artificial Sequence: Synthetic oligonucleotide
  Sense strand starting at position 93 of SEQ ID NO: 1562759
ccaggacaguuccugcaaa

SEQ ID NO: 1770692 - RNA, 19 nt, Artificial Sequence
  Description of Artificial Sequence: Synthetic oligonucleotide
  Antisense strand to SEQ ID NO: 1770691
uuugcaggaacuguccugg

SEQ ID NO: 1770693 - RNA, 19 nt, Artificial Sequence
  Description of Artificial Sequence: Synthetic oligonucleotide
  Sense strand starting at position 450 of SEQ ID NO: 1562759
cuacccaagggaugucaaa

SEQ ID NO: 1770694 - RNA, 19 nt, Artificial Sequence
  Description of Artificial Sequence: Synthetic oligonucleotide
  Antisense strand to SEQ ID NO: 1770693
uuugacaucccuuggguag

SEQ ID NO: 1770695 - RNA, 19 nt, Artificial Sequence
  Description of Artificial Sequence: Synthetic oligonucleotide
  Sense strand starting at position 804 of SEQ ID NO: 1562759
gaggguguggccuguaacu

SEQ ID NO: 1770696 - RNA, 19 nt, Artificial Sequence
  Description of Artificial Sequence: Synthetic oligonucleotide
  Antisense strand to SEQ ID NO: 1770695
aguuacaggccacacccuc

SEQ ID NO: 1770697 - RNA, 19 nt, Artificial Sequence
  Description of Artificial Sequence: Synthetic oligonucleotide
  Sense strand starting at position 806 of SEQ ID NO: 1562759
ggguguggccuguaacuca

SEQ ID NO: 1770698 - RNA, 19 nt, Artificial Sequence
  Description of Artificial Sequence: Synthetic oligonucleotide
  Antisense strand to SEQ ID NO: 1770697
ugaguuacaggccacaccc

SEQ ID NO: 1770699 - RNA, 19 nt, Artificial Sequence
  Description of Artificial Sequence: Synthetic oligonucleotide
  Sense strand starting at position 891 of SEQ ID NO: 1562759
gggccaggcuuacucauua

SEQ ID NO: 1770700 - RNA, 19 nt, Artificial Sequence
  Description of Artificial Sequence: Synthetic oligonucleotide
  Antisense strand to SEQ ID NO: 1770699
uaaugaguaagccuggccc

SEQ ID NO: 1770701 - RNA, 19 nt, Artificial Sequence
  Description of Artificial Sequence: Synthetic oligonucleotide
  Sense strand starting at position 896 of SEQ ID NO: 1562759
aggcuuacucauuaacaug

SEQ ID NO: 1770702 - RNA, 19 nt, Artificial Sequence
  Description of Artificial Sequence: Synthetic oligonucleotide
  Antisense strand to SEQ ID NO: 1770701
cauguuaaugaguaagccu

SEQ ID NO: 1770703 - RNA, 19 nt, Artificial Sequence
  Description of Artificial Sequence: Synthetic oligonucleotide
  Sense strand starting at position 907 of SEQ ID NO: 1562759
uuaacauggucucaaagau

SEQ ID NO: 1770704 - RNA, 19 nt, Artificial Sequence
  Description of Artificial Sequence: Synthetic oligonucleotide
  Antisense strand to SEQ ID NO: 1770703
aucuuugagaccauguuaa

SEQ ID NO: 1770705 - RNA, 19 nt, Artificial Sequence
  Description of Artificial Sequence: Synthetic oligonucleotide
  Sense strand starting at position 991 of SEQ ID NO: 1562759
auaaauauuugagagccca

SEQ ID NO: 1770706 - RNA, 19 nt, Artificial Sequence
  Description of Artificial Sequence: Synthetic oligonucleotide
  Antisense strand to SEQ ID NO: 1770705
ugggcucucaaauauuuau

SEQ ID NO: 1770707 - RNA, 19 nt, Artificial Sequence
  Description of Artificial Sequence: Synthetic oligonucleotide
  Sense strand starting at position 1038 of SEQ ID NO: 1562759
ggagcacugcgguaaauaa

SEQ ID NO: 1770708 - RNA, 19 nt, Artificial Sequence
  Description of Artificial Sequence: Synthetic oligonucleotide
  Antisense strand to SEQ ID NO: 1770707
uuauuuaccgcagugcucc

SEQ ID NO: 1770709 - RNA, 19 nt, Artificial Sequence
  Description of Artificial Sequence: Synthetic oligonucleotide
  Sense strand starting at position 1063 of SEQ ID NO: 1562759
ugagaauccuggcugugau

SEQ ID NO: 1770710 - RNA, 19 nt, Artificial Sequence
  Description of Artificial Sequence: Synthetic oligonucleotide
  Antisense strand to SEQ ID NO: 1770709
aucacagccaggauucuca

SEQ ID NO: 1770711 - RNA, 19 nt, Artificial Sequence
  Description of Artificial Sequence: Synthetic oligonucleotide
  Sense strand starting at position 1064 of SEQ ID NO: 1562759
gagaauccuggcugugaug

SEQ ID NO: 1770712 - RNA, 19 nt, Artificial Sequence
  Description of Artificial Sequence: Synthetic oligonucleotide
  Antisense strand to SEQ ID NO: 1770711
caucacagccaggauucuc

SEQ ID NO: 1770713 - RNA, 19 nt, Artificial Sequence
  Description of Artificial Sequence: Synthetic oligonucleotide
  Sense strand starting at position 1066 of SEQ ID NO: 1562759
gaauccuggcugugaugaa

SEQ ID NO: 1770714 - RNA, 19 nt, Artificial Sequence
  Description of Artificial Sequence: Synthetic oligonucleotide
  Antisense strand to SEQ ID NO: 1770713
uucaucacagccaggauuc

SEQ ID NO: 1770715 - RNA, 19 nt, Artificial Sequence
  Description of Artificial Sequence: Synthetic oligonucleotide
  Sense strand starting at position 1070 of SEQ ID NO: 1562759
ccuggcugugaugaaacuu

SEQ ID NO: 1770716 - RNA, 19 nt, Artificial Sequence
  Description of Artificial Sequence: Synthetic oligonucleotide
  Antisense strand to SEQ ID NO: 1770715
aaguuucaucacagccagg

SEQ ID NO: 1770717 - RNA, 19 nt, Artificial Sequence
  Description of Artificial Sequence: Synthetic oligonucleotide
  Sense strand starting at position 1563 of SEQ ID NO: 1562759
acgccaucagacgagauaa

SEQ ID NO: 1770718 - RNA, 19 nt, Artificial Sequence
  Description of Artificial Sequence: Synthetic oligonucleotide
  Antisense strand to SEQ ID NO: 1770717
uuaucucgucugauggcgu

SEQ ID NO: 1770719 - RNA, 19 nt, Artificial Sequence
  Description of Artificial Sequence: Synthetic oligonucleotide
  Sense strand starting at position 2082 of SEQ ID NO: 1562759
gccggaaccauguauagca

SEQ ID NO: 1770720 - RNA, 19 nt, Artificial Sequence
  Description of Artificial Sequence: Synthetic oligonucleotide
  Antisense strand to SEQ ID NO: 1770719
ugcuauacaugguuccggc

SEQ ID NO: 1770721 - RNA, 19 nt, Artificial Sequence
  Description of Artificial Sequence: Synthetic oligonucleotide
  Sense strand starting at position 2132 of SEQ ID NO: 1562759
gccaucuaagggugucgau

SEQ ID NO: 1770722 - RNA, 19 nt, Artificial Sequence
  Description of Artificial Sequence: Synthetic oligonucleotide
  Antisense strand to SEQ ID NO: 1770721
aucgacacccuuagauggc

SEQ ID NO: 1770723 - RNA, 19 nt, Artificial Sequence
  Description of Artificial Sequence: Synthetic oligonucleotide
  Sense strand starting at position 2193 of SEQ ID NO: 1562759
gcgcgcgagcuguuacuaa

SEQ ID NO: 1770724 - RNA, 19 nt, Artificial Sequence
  Description of Artificial Sequence: Synthetic oligonucleotide
  Antisense strand to SEQ ID NO: 1770723
uuaguaacagcucgcgcgc

SEQ ID NO: 1770725 - RNA, 19 nt, Artificial Sequence
  Description of Artificial Sequence: Synthetic oligonucleotide
  Sense strand starting at position 2480 of SEQ ID NO: 1562759
agugcauguguuggagaga

SEQ ID NO: 1770726 - RNA, 19 nt, Artificial Sequence
  Description of Artificial Sequence: Synthetic oligonucleotide
  Antisense strand to SEQ ID NO: 1770725
ucucuccaacacaugcacu

SEQ ID NO: 1770727 - RNA, 19 nt, Artificial Sequence
  Description of Artificial Sequence: Synthetic oligonucleotide
  Sense strand starting at position 2483 of SEQ ID NO: 1562759
gcauguguuggagagaggu

SEQ ID NO: 1770728 - RNA, 19 nt, Artificial Sequence
  Description of Artificial Sequence: Synthetic oligonucleotide
  Antisense strand to SEQ ID NO: 1770727
accucucuccaacacaugc

SEQ ID NO: 1770729 - RNA, 19 nt, Artificial Sequence
  Description of Artificial Sequence: Synthetic oligonucleotide
  Sense strand starting at position 2609 of SEQ ID NO: 1562759
cugcgaacgagguauaaua

SEQ ID NO: 1770730 - RNA, 19 nt, Artificial Sequence
  Description of Artificial Sequence: Synthetic oligonucleotide
  Antisense strand to SEQ ID NO: 1770729
uauuauaccucguucgcag

SEQ ID NO: 1770731 - RNA, 19 nt, Artificial Sequence
  Description of Artificial Sequence: Synthetic oligonucleotide
  Sense strand starting at position 2804 of SEQ ID NO: 1562759
gggagagcugugcagcaaa

SEQ ID NO: 1770732 - RNA, 19 nt, Artificial Sequence
  Description of Artificial Sequence: Synthetic oligonucleotide
  Antisense strand to SEQ ID NO: 1770731
uuugcugcacagcucuccc

SEQ ID NO: 1770733 - RNA, 19 nt, Artificial Sequence
  Description of Artificial Sequence: Synthetic oligonucleotide
  Sense strand starting at position 3117 of SEQ ID NO: 1562759
augucugcucaugggagaa

SEQ ID NO: 1770734 - RNA, 19 nt, Artificial Sequence
  Description of Artificial Sequence: Synthetic oligonucleotide
  Antisense strand to SEQ ID NO: 1770733
uucucccaugagcagacau

SEQ ID NO: 1770735 - RNA, 19 nt, Artificial Sequence
  Description of Artificial Sequence: Synthetic oligonucleotide
  Sense strand starting at position 3153 of SEQ ID NO: 1562759
acagucauuccugauacuc

SEQ ID NO: 1770736 - RNA, 19 nt, Artificial Sequence
  Description of Artificial Sequence: Synthetic oligonucleotide
  Antisense strand to SEQ ID NO: 1770735
gaguaucaggaaugacugu

SEQ ID NO: 1770737 - RNA, 19 nt, Artificial Sequence
  Description of Artificial Sequence: Synthetic oligonucleotide
  Sense strand starting at position 3179 of SEQ ID NO: 1562759
uguaucaugucagcacaua

SEQ ID NO: 1770738 - RNA, 19 nt, Artificial Sequence
  Description of Artificial Sequence: Synthetic oligonucleotide
  Antisense strand to SEQ ID NO: 1770737
uaugugcugacaugauaca

SEQ ID NO: 1770739 - RNA, 19 nt, Artificial Sequence
  Description of Artificial Sequence: Synthetic oligonucleotide
  Sense strand starting at position 3180 of SEQ ID NO: 1562759
guaucaugucagcacauag

SEQ ID NO: 1770740 - RNA, 19 nt, Artificial Sequence
  Description of Artificial Sequence: Synthetic oligonucleotide
  Antisense strand to SEQ ID NO: 1770739
cuaugugcugacaugauac

SEQ ID NO: 1770741 - RNA, 19 nt, Artificial Sequence
  Description of Artificial Sequence: Synthetic oligonucleotide
  Sense strand starting at position 3198 of SEQ ID NO: 1562759
guagguguggccuauguau

SEQ ID NO: 1770742 - RNA, 19 nt, Artificial Sequence
  Description of Artificial Sequence: Synthetic oligonucleotide
  Antisense strand to SEQ ID NO: 1770741
auacauaggccacaccuac

SEQ ID NO: 1770743 - RNA, 19 nt, Artificial Sequence
  Description of Artificial Sequence: Synthetic oligonucleotide
  Sense strand starting at position 3323 of SEQ ID NO: 1562759
ggaaguaauugggucguga

SEQ ID NO: 1770744 - RNA, 19 nt, Artificial Sequence
  Description of Artificial Sequence: Synthetic oligonucleotide
  Antisense strand to SEQ ID NO: 1770743
ucacgacccaauuacuucc

SEQ ID NO: 1770745 - RNA, 19 nt, Artificial Sequence
  Description of Artificial Sequence: Synthetic oligonucleotide
  Sense strand starting at position 3380 of SEQ ID NO: 1562759
ggugaugaguucuugcuua

SEQ ID NO: 1770746 - RNA, 19 nt, Artificial Sequence
  Description of Artificial Sequence: Synthetic oligonucleotide
  Antisense strand to SEQ ID NO: 1770745
uaagcaagaacucaucacc

SEQ ID NO: 1770747 - RNA, 19 nt, Artificial Sequence
  Description of Artificial Sequence: Synthetic oligonucleotide
  Sense strand starting at position 3384 of SEQ ID NO: 1562759
augaguucuugcuuaguuc

SEQ ID NO: 1770748 - RNA, 19 nt, Artificial Sequence
  Description of Artificial Sequence: Synthetic oligonucleotide
  Antisense strand to SEQ ID NO: 1770747
gaacuaagcaagaacucau

SEQ ID NO: 1770749 - RNA, 19 nt, Artificial Sequence
  Description of Artificial Sequence: Synthetic oligonucleotide
  Sense strand starting at position 3412 of SEQ ID NO: 1562759
cugguuauuuaagagucua

SEQ ID NO: 1770750 - RNA, 19 nt, Artificial Sequence
  Description of Artificial Sequence: Synthetic oligonucleotide
  Antisense strand to SEQ ID NO: 1770749
uagacucuuaaauaaccag

SEQ ID NO: 1770751 - RNA, 19 nt, Artificial Sequence
  Description of Artificial Sequence: Synthetic oligonucleotide
  Sense strand starting at position 3488 of SEQ ID NO: 1562759
accuuaugucaugaucuua

SEQ ID NO: 1770752 - RNA, 19 nt, Artificial Sequence
  Description of Artificial Sequence: Synthetic oligonucleotide
  Antisense strand to SEQ ID NO: 1770751
uaagaucaugacauaaggu

SEQ ID NO: 1770753 - RNA, 19 nt, Artificial Sequence
  Description of Artificial Sequence: Synthetic oligonucleotide
  Sense strand starting at position 3501 of SEQ ID NO: 1562759
aucuuaagcuuccugaggu

SEQ ID NO: 1770754 - RNA, 19 nt, Artificial Sequence
  Description of Artificial Sequence: Synthetic oligonucleotide
  Antisense strand to SEQ ID NO: 1770753
accucaggaagcuuaagau

SEQ ID NO: 1770755 - RNA, 19 nt, Artificial Sequence
  Description of Artificial Sequence: Synthetic oligonucleotide
  Sense strand starting at position 3902 of SEQ ID NO: 1562759
caugucuucuugcuuggaa

SEQ ID NO: 1770756 - RNA, 19 nt, Artificial Sequence
  Description of Artificial Sequence: Synthetic oligonucleotide
  Antisense strand to SEQ ID NO: 1770755
uuccaagcaagaagacaug

SEQ ID NO: 1770757 - RNA, 19 nt, Artificial Sequence
  Description of Artificial Sequence: Synthetic oligonucleotide
  Sense strand starting at position 3956 of SEQ ID NO: 1562759
ucccuaguucuuggguaga

SEQ ID NO: 1770758 - RNA, 19 nt, Artificial Sequence
  Description of Artificial Sequence: Synthetic oligonucleotide
  Antisense strand to SEQ ID NO: 1770757
ucuacccaagaacuaggga

SEQ ID NO: 1770759 - RNA, 19 nt, Artificial Sequence
  Description of Artificial Sequence: Synthetic oligonucleotide
  Sense strand starting at position 3958 of SEQ ID NO: 1562759
ccuaguucuuggguagaga

SEQ ID NO: 1770760 - RNA, 19 nt, Artificial Sequence
  Description of Artificial Sequence: Synthetic oligonucleotide
  Antisense strand to SEQ ID NO: 1770759
ucucuacccaagaacuagg

SEQ ID NO: 1770761 - RNA, 19 nt, Artificial Sequence
  Description of Artificial Sequence: Synthetic oligonucleotide
  Sense strand starting at position 3959 of SEQ ID NO: 1562759
cuaguucuuggguagagaa

SEQ ID NO: 1770762 - RNA, 19 nt, Artificial Sequence
  Description of Artificial Sequence: Synthetic oligonucleotide
  Antisense strand to SEQ ID NO: 1770761
uucucuacccaagaacuag

SEQ ID NO: 1770763 - RNA, 19 nt, Artificial Sequence
  Description of Artificial Sequence: Synthetic oligonucleotide
  Sense strand starting at position 58 of SEQ ID NO: 1562760
aguggcugucacuaaggaa

SEQ ID NO: 1770764 - RNA, 19 nt, Artificial Sequence
  Description of Artificial Sequence: Synthetic oligonucleotide
  Antisense strand to SEQ ID NO: 1770763
uuccuuagugacagccacu

SEQ ID NO: 1770765 - RNA, 19 nt, Artificial Sequence
  Description of Artificial Sequence: Synthetic oligonucleotide
  Sense strand starting at position 172 of SEQ ID NO: 1562760
guucguuaugaggauuaau

SEQ ID NO: 1770766 - RNA, 19 nt, Artificial Sequence
  Description of Artificial Sequence: Synthetic oligonucleotide
  Antisense strand to SEQ ID NO: 1770765
auuaauccucauaacgaac

SEQ ID NO: 1770767 - RNA, 19 nt, Artificial Sequence
  Description of Artificial Sequence: Synthetic oligonucleotide
  Sense strand starting at position 235 of SEQ ID NO: 1562760
auagaacacucccugugaa

SEQ ID NO: 1770768 - RNA, 19 nt, Artificial Sequence
  Description of Artificial Sequence: Synthetic oligonucleotide
  Antisense strand to SEQ ID NO: 1770767
uucacagggaguguucuau

SEQ ID NO: 1770769 - RNA, 19 nt, Artificial Sequence
  Description of Artificial Sequence: Synthetic oligonucleotide
  Sense strand starting at position 238 of SEQ ID NO: 1562760
gaacacucccugugaaugu

SEQ ID NO: 1770770 - RNA, 19 nt, Artificial Sequence
  Description of Artificial Sequence: Synthetic oligonucleotide
  Antisense strand to SEQ ID NO: 1770769
acauucacagggaguguuc

SEQ ID NO: 1770771 - RNA, 19 nt, Artificial Sequence
  Description of Artificial Sequence: Synthetic oligonucleotide
  Sense strand starting at position 287 of SEQ ID NO: 1562760
gcaaguaucuugucucaga

SEQ ID NO: 1770772 - RNA, 19 nt, Artificial Sequence
  Description of Artificial Sequence: Synthetic oligonucleotide
  Antisense strand to SEQ ID NO: 1770771
ucugagacaagauacuugc

SEQ ID NO: 1770773 - RNA, 19 nt, Artificial Sequence
  Description of Artificial Sequence: Synthetic oligonucleotide
  Sense strand starting at position 375 of SEQ ID NO: 1562760
gggaacacucccugggagu

SEQ ID NO: 1770774 - RNA, 19 nt, Artificial Sequence
  Description of Artificial Sequence: Synthetic oligonucleotide
  Antisense strand to SEQ ID NO: 1770773
acucccagggaguguuccc

SEQ ID NO: 1770775 - RNA, 19 nt, Artificial Sequence
  Description of Artificial Sequence: Synthetic oligonucleotide
  Sense strand starting at position 455 of SEQ ID NO: 1562760
agaguuuacuagcuagaac

SEQ ID NO: 1770776 - RNA, 19 nt, Artificial Sequence
  Description of Artificial Sequence: Synthetic oligonucleotide
  Antisense strand to SEQ ID NO: 1770775
guucuagcuaguaaacucu

SEQ ID NO: 1770777 - RNA, 19 nt, Artificial Sequence
  Description of Artificial Sequence: Synthetic oligonucleotide
  Sense strand starting at position 470 of SEQ ID NO: 1562760
gaacuccguuugucaucaa

SEQ ID NO: 1770778 - RNA, 19 nt, Artificial Sequence
  Description of Artificial Sequence: Synthetic oligonucleotide
  Antisense strand to SEQ ID NO: 1770777
uugaugacaaacggaguuc

SEQ ID NO: 1770779 - RNA, 19 nt, Artificial Sequence
  Description of Artificial Sequence: Synthetic oligonucleotide
  Sense strand starting at position 532 of SEQ ID NO: 1562760
cuacgucuugggcaagcaa

SEQ ID NO: 1770780 - RNA, 19 nt, Artificial Sequence
  Description of Artificial Sequence: Synthetic oligonucleotide
  Antisense strand to SEQ ID NO: 1770779
uugcuugcccaagacguag

SEQ ID NO: 1770781 - RNA, 19 nt, Artificial Sequence
  Description of Artificial Sequence: Synthetic oligonucleotide
  Sense strand starting at position 1301 of SEQ ID NO: 1562760
ccagccucuugauuuaagu

SEQ ID NO: 1770782 - RNA, 19 nt, Artificial Sequence
  Description of Artificial Sequence: Synthetic oligonucleotide
  Antisense strand to SEQ ID NO: 1770781
acuuaaaucaagaggcugg

SEQ ID NO: 1770783 - RNA, 19 nt, Artificial Sequence
  Description of Artificial Sequence: Synthetic oligonucleotide
  Sense strand starting at position 1448 of SEQ ID NO: 1562760
gcucgugcauuuccugaau

SEQ ID NO: 1770784 - RNA, 19 nt, Artificial Sequence
  Description of Artificial Sequence: Synthetic oligonucleotide
  Antisense strand to SEQ ID NO: 1770783
auucaggaaaugcacgagc

SEQ ID NO: 1770785 - RNA, 19 nt, Artificial Sequence
  Description of Artificial Sequence: Synthetic oligonucleotide
  Sense strand starting at position 1579 of SEQ ID NO: 1562760
cuccaacugucuuuaggga

SEQ ID NO: 1770786 - RNA, 19 nt, Artificial Sequence
  Description of Artificial Sequence: Synthetic oligonucleotide
  Antisense strand to SEQ ID NO: 1770785
ucccuaaagacaguuggag

SEQ ID NO: 1770787 - RNA, 19 nt, Artificial Sequence
  Description of Artificial Sequence: Synthetic oligonucleotide
  Sense strand starting at position 1580 of SEQ ID NO: 1562760
uccaacugucuuuagggau

SEQ ID NO: 1770788 - RNA, 19 nt, Artificial Sequence
  Description of Artificial Sequence: Synthetic oligonucleotide
  Antisense strand to SEQ ID NO: 1770787
aucccuaaagacaguugga

SEQ ID NO: 1770789 - RNA, 19 nt, Artificial Sequence
  Description of Artificial Sequence: Synthetic oligonucleotide
  Sense strand starting at position 1703 of SEQ ID NO: 1562760
ugaaauugugacgggaagu

SEQ ID NO: 1770790 - RNA, 19 nt, Artificial Sequence
  Description of Artificial Sequence: Synthetic oligonucleotide
  Antisense strand to SEQ ID NO: 1770789
acuucccgucacaauuuca

SEQ ID NO: 1770791 - RNA, 19 nt, Artificial Sequence
  Description of Artificial Sequence: Synthetic oligonucleotide
  Sense strand starting at position 1704 of SEQ ID NO: 1562760
gaaauugugacgggaaguc

SEQ ID NO: 1770792 - RNA, 19 nt, Artificial Sequence
  Description of Artificial Sequence: Synthetic oligonucleotide
  Antisense strand to SEQ ID NO: 1770791
gacuucccgucacaauuuc

SEQ ID NO: 1770793 - RNA, 19 nt, Artificial Sequence
  Description of Artificial Sequence: Synthetic oligonucleotide
  Sense strand starting at position 2191 of SEQ ID NO: 1562760
uggagaaagacuugcugca

SEQ ID NO: 1770794 - RNA, 19 nt, Artificial Sequence
  Description of Artificial Sequence: Synthetic oligonucleotide
  Antisense strand to SEQ ID NO: 1770793
ugcagcaagucuuucucca

SEQ ID NO: 1770795 - RNA, 19 nt, Artificial Sequence
  Description of Artificial Sequence: Synthetic oligonucleotide
  Sense strand starting at position 2193 of SEQ ID NO: 1562760
gagaaagacuugcugcaug

SEQ ID NO: 1770796 - RNA, 19 nt, Artificial Sequence
  Description of Artificial Sequence: Synthetic oligonucleotide
  Antisense strand to SEQ ID NO: 1770795
caugcagcaagucuuucuc

SEQ ID NO: 1770797 - RNA, 19 nt, Artificial Sequence
  Description of Artificial Sequence: Synthetic oligonucleotide
  Sense strand starting at position 2196 of SEQ ID NO: 1562760
aaagacuugcugcauggaa

SEQ ID NO: 1770798 - RNA, 19 nt, Artificial Sequence
  Description of Artificial Sequence: Synthetic oligonucleotide
  Antisense strand to SEQ ID NO: 1770797
uuccaugcagcaagucuuu

SEQ ID NO: 1770799 - RNA, 19 nt, Artificial Sequence
  Description of Artificial Sequence: Synthetic oligonucleotide
  Sense strand starting at position 2278 of SEQ ID NO: 1562760
ucacuagcuccuggaagua

SEQ ID NO: 1770800 - RNA, 19 nt, Artificial Sequence
  Description of Artificial Sequence: Synthetic oligonucleotide
  Antisense strand to SEQ ID NO: 1770799
uacuuccaggagcuaguga

SEQ ID NO: 1770801 - RNA, 19 nt, Artificial Sequence
  Description of Artificial Sequence: Synthetic oligonucleotide
  Sense strand starting at position 2337 of SEQ ID NO: 1562760
ucuguaucucuccagguga

SEQ ID NO: 1770802 - RNA, 19 nt, Artificial Sequence
  Description of Artificial Sequence: Synthetic oligonucleotide
  Antisense strand to SEQ ID NO: 1770801
ucaccuggagagauacaga

SEQ ID NO: 1770803 - RNA, 19 nt, Artificial Sequence
  Description of Artificial Sequence: Synthetic oligonucleotide
  Sense strand starting at position 2375 of SEQ ID NO: 1562760
ggcaguaaucucgaaguca

SEQ ID NO: 1770804 - RNA, 19 nt, Artificial Sequence
  Description of Artificial Sequence: Synthetic oligonucleotide
  Antisense strand to SEQ ID NO: 1770803
ugacuucgagauuacugcc

SEQ ID NO: 1770805 - RNA, 19 nt, Artificial Sequence
  Description of Artificial Sequence: Synthetic oligonucleotide
  Sense strand starting at position 2387 of SEQ ID NO: 1562760
gaagucauuucugauugac

SEQ ID NO: 1770806 - RNA, 19 nt, Artificial Sequence
  Description of Artificial Sequence: Synthetic oligonucleotide
  Antisense strand to SEQ ID NO: 1770805
gucaaucagaaaugacuuc

SEQ ID NO: 1770807 - RNA, 19 nt, Artificial Sequence
  Description of Artificial Sequence: Synthetic oligonucleotide
  Sense strand starting at position 2665 of SEQ ID NO: 1562760
uuaacuguugcagaaguuu

SEQ ID NO: 1770808 - RNA, 19 nt, Artificial Sequence
  Description of Artificial Sequence: Synthetic oligonucleotide
  Antisense strand to SEQ ID NO: 1770807
aaacuucugcaacaguuaa

SEQ ID NO: 1770809 - RNA, 19 nt, Artificial Sequence
  Description of Artificial Sequence: Synthetic oligonucleotide
  Sense strand starting at position 2753 of SEQ ID NO: 1562760
ugcgucauucuuuacauau

SEQ ID NO: 1770810 - RNA, 19 nt, Artificial Sequence
  Description of Artificial Sequence: Synthetic oligonucleotide
  Antisense strand to SEQ ID NO: 1770809
auauguaaagaaugacgca

SEQ ID NO: 1770811 - RNA, 19 nt, Artificial Sequence
  Description of Artificial Sequence: Synthetic oligonucleotide
  Sense strand starting at position 2902 of SEQ ID NO: 1562760
aacuuagaguuguugcuca

SEQ ID NO: 1770812 - RNA, 19 nt, Artificial Sequence
  Description of Artificial Sequence: Synthetic oligonucleotide
  Antisense strand to SEQ ID NO: 1770811
ugagcaacaacucuaaguu

SEQ ID NO: 1770813 - RNA, 19 nt, Artificial Sequence
  Description of Artificial Sequence: Synthetic oligonucleotide
  Sense strand starting at position 2907 of SEQ ID NO: 1562760
agaguuguugcucaucuca

SEQ ID NO: 1770814 - RNA, 19 nt, Artificial Sequence
  Description of Artificial Sequence: Synthetic oligonucleotide
  Antisense strand to SEQ ID NO: 1770813
ugagaugagcaacaacucu

SEQ ID NO: 1770815 - RNA, 19 nt, Artificial Sequence
  Description of Artificial Sequence: Synthetic oligonucleotide
  Sense strand starting at position 2998 of SEQ ID NO: 1562760
gcauuuccugcauauagca

SEQ ID NO: 1770816 - RNA, 19 nt, Artificial Sequence
  Description of Artificial Sequence: Synthetic oligonucleotide
  Antisense strand to SEQ ID NO: 1770815
ugcuauaugcaggaaaugc

SEQ ID NO: 1770817 - RNA, 19 nt, Artificial Sequence
  Description of Artificial Sequence: Synthetic oligonucleotide
  Sense strand starting at position 3067 of SEQ ID NO: 1562760
ggguuaaagggcugaauua

SEQ ID NO: 1770818 - RNA, 19 nt, Artificial Sequence
  Description of Artificial Sequence: Synthetic oligonucleotide
  Antisense strand to SEQ ID NO: 1770817
uaauucagcccuuuaaccc

SEQ ID NO: 1770819 - RNA, 19 nt, Artificial Sequence
  Description of Artificial Sequence: Synthetic oligonucleotide
  Sense strand starting at position 3171 of SEQ ID NO: 1562760
cguugaggacuuggaauau

SEQ ID NO: 1770820 - RNA, 19 nt, Artificial Sequence
  Description of Artificial Sequence: Synthetic oligonucleotide
  Antisense strand to SEQ ID NO: 1770819
auauuccaaguccucaacg

SEQ ID NO: 1770821 - RNA, 19 nt, Artificial Sequence
  Description of Artificial Sequence: Synthetic oligonucleotide
  Sense strand starting at position 3184 of SEQ ID NO: 1562760
gaauauggccacugggauu

SEQ ID NO: 1770822 - RNA, 19 nt, Artificial Sequence
  Description of Artificial Sequence: Synthetic oligonucleotide
  Antisense strand to SEQ ID NO: 1770821
aaucccaguggccauauuc

SEQ ID NO: 1770823 - RNA, 19 nt, Artificial Sequence
  Description of Artificial Sequence: Synthetic oligonucleotide
  Sense strand starting at position 3299 of SEQ ID NO: 1562760
gggccuguauuauucucaa

SEQ ID NO: 1770824 - RNA, 19 nt, Artificial Sequence
  Description of Artificial Sequence: Synthetic oligonucleotide
  Antisense strand to SEQ ID NO: 1770823
uugagaauaauacaggccc

SEQ ID NO: 1770825 - RNA, 19 nt, Artificial Sequence
  Description of Artificial Sequence: Synthetic oligonucleotide
  Sense strand starting at position 3410 of SEQ ID NO: 1562760
ugguccuuuagcugaagau

SEQ ID NO: 1770826 - RNA, 19 nt, Artificial Sequence
  Description of Artificial Sequence: Synthetic oligonucleotide
  Antisense strand to SEQ ID NO: 1770825
aucuucagcuaaaggacca

SEQ ID NO: 1770827 - RNA, 19 nt, Artificial Sequence
  Description of Artificial Sequence: Synthetic oligonucleotide
  Sense strand starting at position 3411 of SEQ ID NO: 1562760
gguccuuuagcugaagauu

SEQ ID NO: 1770828 - RNA, 19 nt, Artificial Sequence
  Description of Artificial Sequence: Synthetic oligonucleotide
  Antisense strand to SEQ ID NO: 1770827
aaucuucagcuaaaggacc

SEQ ID NO: 1770829 - RNA, 19 nt, Artificial Sequence
  Description of Artificial Sequence: Synthetic oligonucleotide
  Sense strand starting at position 3534 of SEQ ID NO: 1562760
gcacauauuugccagauag

SEQ ID NO: 1770830 - RNA, 19 nt, Artificial Sequence
  Description of Artificial Sequence: Synthetic oligonucleotide
  Antisense strand to SEQ ID NO: 1770829
cuaucuggcaaauaugugc

SEQ ID NO: 1770831 - RNA, 19 nt, Artificial Sequence
  Description of Artificial Sequence: Synthetic oligonucleotide
  Sense strand starting at position 3544 of SEQ ID NO: 1562760
gccagauaguuuccuccaa

SEQ ID NO: 1770832 - RNA, 19 nt, Artificial Sequence
  Description of Artificial Sequence: Synthetic oligonucleotide
  Antisense strand to SEQ ID NO: 1770831
uuggaggaaacuaucuggc

SEQ ID NO: 1770833 - RNA, 19 nt, Artificial Sequence
  Description of Artificial Sequence: Synthetic oligonucleotide
  Sense strand starting at position 3896 of SEQ ID NO: 1562760
gaggaauggcccugugucu

SEQ ID NO: 1770834 - RNA, 19 nt, Artificial Sequence
  Description of Artificial Sequence: Synthetic oligonucleotide
  Antisense strand to SEQ ID NO: 1770833
agacacagggccauuccuc

SEQ ID NO: 1770835 - RNA, 19 nt, Artificial Sequence
  Description of Artificial Sequence: Synthetic oligonucleotide
  Sense strand starting at position 3907 of SEQ ID NO: 1562760
cugugucuugaaggacaga

SEQ ID NO: 1770836 - RNA, 19 nt, Artificial Sequence
  Description of Artificial Sequence: Synthetic oligonucleotide
  Antisense strand to SEQ ID NO: 1770835
ucuguccuucaagacacag

SEQ ID NO: 1770837 - RNA, 19 nt, Artificial Sequence
  Description of Artificial Sequence: Synthetic oligonucleotide
  Sense strand starting at position 3934 of SEQ ID NO: 1562760
uguugagggucucuggaaa

SEQ ID NO: 1770838 - RNA, 19 nt, Artificial Sequence
  Description of Artificial Sequence: Synthetic oligonucleotide
  Antisense strand to SEQ ID NO: 1770837
uuuccagagacccucaaca

SEQ ID NO: 1770839 - RNA, 19 nt, Artificial Sequence
  Description of Artificial Sequence: Synthetic oligonucleotide
  Sense strand starting at position 3945 of SEQ ID NO: 1562760
ucuggaaauuguucucauu

SEQ ID NO: 1770840 - RNA, 19 nt, Artificial Sequence
  Description of Artificial Sequence: Synthetic oligonucleotide
  Antisense strand to SEQ ID NO: 1770839
aaugagaacaauuuccaga

SEQ ID NO: 1770841 - RNA, 19 nt, Artificial Sequence
  Description of Artificial Sequence: Synthetic oligonucleotide
  Sense strand starting at position 3969 of SEQ ID NO: 1562760
gugauuuccuaagugccua

SEQ ID NO: 1770842 - RNA, 19 nt, Artificial Sequence
  Description of Artificial Sequence: Synthetic oligonucleotide
  Antisense strand to SEQ ID NO: 1770841
uaggcacuuaggaaaucac

SEQ ID NO: 1770843 - RNA, 19 nt, Artificial Sequence
  Description of Artificial Sequence: Synthetic oligonucleotide
  Sense strand starting at position 3 of SEQ ID NO: 1562761
ugagccuuagucugaaaug

SEQ ID NO: 1770844 - RNA, 19 nt, Artificial Sequence
  Description of Artificial Sequence: Synthetic oligonucleotide
  Antisense strand to SEQ ID NO: 1770843
cauuucagacuaaggcuca

SEQ ID NO: 1770845 - RNA, 19 nt, Artificial Sequence
  Description of Artificial Sequence: Synthetic oligonucleotide
  Sense strand starting at position 19 of SEQ ID NO: 1562761
auguuaauguugucuccau

SEQ ID NO: 1770846 - RNA, 19 nt, Artificial Sequence
  Description of Artificial Sequence: Synthetic oligonucleotide
  Antisense strand to SEQ ID NO: 1770845
auggagacaacauuaacau

SEQ ID NO: 1770847 - RNA, 19 nt, Artificial Sequence
  Description of Artificial Sequence: Synthetic oligonucleotide
  Sense strand starting at position 204 of SEQ ID NO: 1562761
gaccucauaccuugagaug

SEQ ID NO: 1770848 - RNA, 19 nt, Artificial Sequence
  Description of Artificial Sequence: Synthetic oligonucleotide
  Antisense strand to SEQ ID NO: 1770847
caucucaagguaugagguc

SEQ ID NO: 1770849 - RNA, 19 nt, Artificial Sequence
  Description of Artificial Sequence: Synthetic oligonucleotide
  Sense strand starting at position 554 of SEQ ID NO: 1562761
gggugauaagguuaggcga

SEQ ID NO: 1770850 - RNA, 19 nt, Artificial Sequence
  Description of Artificial Sequence: Synthetic oligonucleotide
  Antisense strand to SEQ ID NO: 1770849
ucgccuaaccuuaucaccc

SEQ ID NO: 1770851 - RNA, 19 nt, Artificial Sequence
  Description of Artificial Sequence: Synthetic oligonucleotide
  Sense strand starting at position 686 of SEQ ID NO: 1562761
aguggcugucacuaaggaa

SEQ ID NO: 1770852 - RNA, 19 nt, Artificial Sequence
  Description of Artificial Sequence: Synthetic oligonucleotide
  Antisense strand to SEQ ID NO: 1770851
uuccuuagugacagccacu

SEQ ID NO: 1770853 - RNA, 19 nt, Artificial Sequence
  Description of Artificial Sequence: Synthetic oligonucleotide
  Sense strand starting at position 800 of SEQ ID NO: 1562761
guucguuaugaggauuaau

SEQ ID NO: 1770854 - RNA, 19 nt, Artificial Sequence
  Description of Artificial Sequence: Synthetic oligonucleotide
  Antisense strand to SEQ ID NO: 1770853
auuaauccucauaacgaac

SEQ ID NO: 1770855 - RNA, 19 nt, Artificial Sequence
  Description of Artificial Sequence: Synthetic oligonucleotide
  Sense strand starting at position 863 of SEQ ID NO: 1562761
auagaacacucccugugaa

SEQ ID NO: 1770856 - RNA, 19 nt, Artificial Sequence
  Description of Artificial Sequence: Synthetic oligonucleotide
  Antisense strand to SEQ ID NO: 1770855
uucacagggaguguucuau

SEQ ID NO: 1770857 - RNA, 19 nt, Artificial Sequence
  Description of Artificial Sequence: Synthetic oligonucleotide
  Sense strand starting at position 866 of SEQ ID NO: 1562761
gaacacucccugugaaugu

SEQ ID NO: 1770858 - RNA, 19 nt, Artificial Sequence
  Description of Artificial Sequence: Synthetic oligonucleotide
  Antisense strand to SEQ ID NO: 1770857
acauucacagggaguguuc

SEQ ID NO: 1770859 - RNA, 19 nt, Artificial Sequence
  Description of Artificial Sequence: Synthetic oligonucleotide
  Sense strand starting at position 915 of SEQ ID NO: 1562761
gcaaguaucuugucucaga

SEQ ID NO: 1770860 - RNA, 19 nt, Artificial Sequence
  Description of Artificial Sequence: Synthetic oligonucleotide
  Antisense strand to SEQ ID NO: 1770859
ucugagacaagauacuugc

SEQ ID NO: 1770861 - RNA, 19 nt, Artificial Sequence
  Description of Artificial Sequence: Synthetic oligonucleotide
  Sense strand starting at position 1003 of SEQ ID NO: 1562761
gggaacacucccugggagu

SEQ ID NO: 1770862 - RNA, 19 nt, Artificial Sequence
  Description of Artificial Sequence: Synthetic oligonucleotide
  Antisense strand to SEQ ID NO: 1770861
acucccagggaguguuccc

SEQ ID NO: 1770863 - RNA, 19 nt, Artificial Sequence
  Description of Artificial Sequence: Synthetic oligonucleotide
  Sense strand starting at position 1083 of SEQ ID NO: 1562761
agaguuuacuagcuagaac

SEQ ID NO: 1770864 - RNA, 19 nt, Artificial Sequence
  Description of Artificial Sequence: Synthetic oligonucleotide
  Antisense strand to SEQ ID NO: 1770863
guucuagcuaguaaacucu

SEQ ID NO: 1770865 - RNA, 19 nt, Artificial Sequence
  Description of Artificial Sequence: Synthetic oligonucleotide
  Sense strand starting at position 1096 of SEQ ID NO: 1562761
uagaacuccguuugucauc

SEQ ID NO: 1770866 - RNA, 19 nt, Artificial Sequence
  Description of Artificial Sequence: Synthetic oligonucleotide
  Antisense strand to SEQ ID NO: 1770865
gaugacaaacggaguucua

SEQ ID NO: 1770867 - RNA, 19 nt, Artificial Sequence
  Description of Artificial Sequence: Synthetic oligonucleotide
  Sense strand starting at position 1098 of SEQ ID NO: 1562761
gaacuccguuugucaucaa

SEQ ID NO: 1770868 - RNA, 19 nt, Artificial Sequence
  Description of Artificial Sequence: Synthetic oligonucleotide
  Antisense strand to SEQ ID NO: 1770867
uugaugacaaacggaguuc

SEQ ID NO: 1770869 - RNA, 19 nt, Artificial Sequence
  Description of Artificial Sequence: Synthetic oligonucleotide
  Sense strand starting at position 1160 of SEQ ID NO: 1562761
cuacgucuugggcaagcaa

SEQ ID NO: 1770870 - RNA, 19 nt, Artificial Sequence
  Description of Artificial Sequence: Synthetic oligonucleotide
  Antisense strand to SEQ ID NO: 1770869
uugcuugcccaagacguag

SEQ ID NO: 1770871 - RNA, 19 nt, Artificial Sequence
  Description of Artificial Sequence: Synthetic oligonucleotide
  Sense strand starting at position 1929 of SEQ ID NO: 1562761
ccagccucuugauuuaagu

SEQ ID NO: 1770872 - RNA, 19 nt, Artificial Sequence
  Description of Artificial Sequence: Synthetic oligonucleotide
  Antisense strand to SEQ ID NO: 1770871
acuuaaaucaagaggcugg

SEQ ID NO: 1770873 - RNA, 19 nt, Artificial Sequence
  Description of Artificial Sequence: Synthetic oligonucleotide
  Sense strand starting at position 2076 of SEQ ID NO: 1562761
gcucgugcauuuccugaau

SEQ ID NO: 1770874 - RNA, 19 nt, Artificial Sequence
  Description of Artificial Sequence: Synthetic oligonucleotide
  Antisense strand to SEQ ID NO: 1770873
auucaggaaaugcacgagc

SEQ ID NO: 1770875 - RNA, 19 nt, Artificial Sequence
  Description of Artificial Sequence: Synthetic oligonucleotide
  Sense strand starting at position 2207 of SEQ ID NO: 1562761
cuccaacugucuuuaggga

SEQ ID NO: 1770876 - RNA, 19 nt, Artificial Sequence
  Description of Artificial Sequence: Synthetic oligonucleotide
  Antisense strand to SEQ ID NO: 1770875
ucccuaaagacaguuggag

SEQ ID NO: 1770877 - RNA, 19 nt, Artificial Sequence
  Description of Artificial Sequence: Synthetic oligonucleotide
  Sense strand starting at position 2208 of SEQ ID NO: 1562761
uccaacugucuuuagggau

SEQ ID NO: 1770878 - RNA, 19 nt, Artificial Sequence
  Description of Artificial Sequence: Synthetic oligonucleotide
  Antisense strand to SEQ ID NO: 1770877
aucccuaaagacaguugga

SEQ ID NO: 1770879 - RNA, 19 nt, Artificial Sequence
  Description of Artificial Sequence: Synthetic oligonucleotide
  Sense strand starting at position 2331 of SEQ ID NO: 1562761
ugaaauugugacgggaagu

SEQ ID NO: 1770880 - RNA, 19 nt, Artificial Sequence
  Description of Artificial Sequence: Synthetic oligonucleotide
  Antisense strand to SEQ ID NO: 1770879
acuucccgucacaauuuca

SEQ ID NO: 1770881 - RNA, 19 nt, Artificial Sequence
  Description of Artificial Sequence: Synthetic oligonucleotide
  Sense strand starting at position 2332 of SEQ ID NO: 1562761
gaaauugugacgggaaguc

SEQ ID NO: 1770882 - RNA, 19 nt, Artificial Sequence
  Description of Artificial Sequence: Synthetic oligonucleotide
  Antisense strand to SEQ ID NO: 1770881
gacuucccgucacaauuuc

SEQ ID NO: 1770883 - RNA, 19 nt, Artificial Sequence
  Description of Artificial Sequence: Synthetic oligonucleotide
  Sense strand starting at position 2819 of SEQ ID NO: 1562761
uggagaaagacuugcugca

SEQ ID NO: 1770884 - RNA, 19 nt, Artificial Sequence
  Description of Artificial Sequence: Synthetic oligonucleotide
  Antisense strand to SEQ ID NO: 1770883
ugcagcaagucuuucucca

SEQ ID NO: 1770885 - RNA, 19 nt, Artificial Sequence
  Description of Artificial Sequence: Synthetic oligonucleotide
  Sense strand starting at position 2821 of SEQ ID NO: 1562761
gagaaagacuugcugcaug

SEQ ID NO: 1770886 - RNA, 19 nt, Artificial Sequence
  Description of Artificial Sequence: Synthetic oligonucleotide
  Antisense strand to SEQ ID NO: 1770885
caugcagcaagucuuucuc

SEQ ID NO: 1770887 - RNA, 19 nt, Artificial Sequence
  Description of Artificial Sequence: Synthetic oligonucleotide
  Sense strand starting at position 2824 of SEQ ID NO: 1562761
aaagacuugcugcauggaa

SEQ ID NO: 1770888 - RNA, 19 nt, Artificial Sequence
  Description of Artificial Sequence: Synthetic oligonucleotide
  Antisense strand to SEQ ID NO: 1770887
uuccaugcagcaagucuuu

SEQ ID NO: 1770889 - RNA, 19 nt, Artificial Sequence
  Description of Artificial Sequence: Synthetic oligonucleotide
  Sense strand starting at position 2906 of SEQ ID NO: 1562761
ucacuagcuccuggaagua

SEQ ID NO: 1770890 - RNA, 19 nt, Artificial Sequence
  Description of Artificial Sequence: Synthetic oligonucleotide
  Antisense strand to SEQ ID NO: 1770889
uacuuccaggagcuaguga

SEQ ID NO: 1770891 - RNA, 19 nt, Artificial Sequence
  Description of Artificial Sequence: Synthetic oligonucleotide
  Sense strand starting at position 2965 of SEQ ID NO: 1562761
ucuguaucucuccagguga

SEQ ID NO: 1770892 - RNA, 19 nt, Artificial Sequence
  Description of Artificial Sequence: Synthetic oligonucleotide
  Antisense strand to SEQ ID NO: 1770891
ucaccuggagagauacaga

SEQ ID NO: 1770893 - RNA, 19 nt, Artificial Sequence
  Description of Artificial Sequence: Synthetic oligonucleotide
  Sense strand starting at position 2967 of SEQ ID NO: 1562761
uguaucucuccaggugagu

SEQ ID NO: 1770894 - RNA, 19 nt, Artificial Sequence
  Description of Artificial Sequence: Synthetic oligonucleotide
  Antisense strand to SEQ ID NO: 1770893
acucaccuggagagauaca

SEQ ID NO: 1770895 - RNA, 19 nt, Artificial Sequence
  Description of Artificial Sequence: Synthetic oligonucleotide
  Sense strand starting at position 3003 of SEQ ID NO: 1562761
ggcaguaaucucgaaguca

SEQ ID NO: 1770896 - RNA, 19 nt, Artificial Sequence
  Description of Artificial Sequence: Synthetic oligonucleotide
  Antisense strand to SEQ ID NO: 1770895
ugacuucgagauuacugcc

SEQ ID NO: 1770897 - RNA, 19 nt, Artificial Sequence
  Description of Artificial Sequence: Synthetic oligonucleotide
  Sense strand starting at position 3015 of SEQ ID NO: 1562761
gaagucauuucugauugac

SEQ ID NO: 1770898 - RNA, 19 nt, Artificial Sequence
  Description of Artificial Sequence: Synthetic oligonucleotide
  Antisense strand to SEQ ID NO: 1770897
gucaaucagaaaugacuuc

SEQ ID NO: 1770899 - RNA, 19 nt, Artificial Sequence
  Description of Artificial Sequence: Synthetic oligonucleotide
  Sense strand starting at position 3293 of SEQ ID NO: 1562761
uuaacuguugcagaaguuu

SEQ ID NO: 1770900 - RNA, 19 nt, Artificial Sequence
  Description of Artificial Sequence: Synthetic oligonucleotide
  Antisense strand to SEQ ID NO: 1770899
aaacuucugcaacaguuaa

SEQ ID NO: 1770901 - RNA, 19 nt, Artificial Sequence
  Description of Artificial Sequence: Synthetic oligonucleotide
  Sense strand starting at position 3381 of SEQ ID NO: 1562761
ugcgucauucuuuacauau

SEQ ID NO: 1770902 - RNA, 19 nt, Artificial Sequence
  Description of Artificial Sequence: Synthetic oligonucleotide
  Antisense strand to SEQ ID NO: 1770901
auauguaaagaaugacgca

SEQ ID NO: 1770903 - RNA, 19 nt, Artificial Sequence
  Description of Artificial Sequence: Synthetic oligonucleotide
  Sense strand starting at position 3515 of SEQ ID NO: 1562761
guacgcuuaaguugaaacu

SEQ ID NO: 1770904 - RNA, 19 nt, Artificial Sequence
  Description of Artificial Sequence: Synthetic oligonucleotide
  Antisense strand to SEQ ID NO: 1770903
aguuucaacuuaagcguac

SEQ ID NO: 1770905 - RNA, 19 nt, Artificial Sequence
  Description of Artificial Sequence: Synthetic oligonucleotide
  Sense strand starting at position 3530 of SEQ ID NO: 1562761
aacuuagaguuguugcuca

SEQ ID NO: 1770906 - RNA, 19 nt, Artificial Sequence
  Description of Artificial Sequence: Synthetic oligonucleotide
  Antisense strand to SEQ ID NO: 1770905
ugagcaacaacucuaaguu

SEQ ID NO: 1770907 - RNA, 19 nt, Artificial Sequence
  Description of Artificial Sequence: Synthetic oligonucleotide
  Sense strand starting at position 3535 of SEQ ID NO: 1562761
agaguuguugcucaucuca

SEQ ID NO: 1770908 - RNA, 19 nt, Artificial Sequence
  Description of Artificial Sequence: Synthetic oligonucleotide
  Antisense strand to SEQ ID NO: 1770907
ugagaugagcaacaacucu

SEQ ID NO: 1770909 - RNA, 19 nt, Artificial Sequence
  Description of Artificial Sequence: Synthetic oligonucleotide
  Sense strand starting at position 3537 of SEQ ID NO: 1562761
aguuguugcucaucucaau

SEQ ID NO: 1770910 - RNA, 19 nt, Artificial Sequence
  Description of Artificial Sequence: Synthetic oligonucleotide
  Antisense strand to SEQ ID NO: 1770909
auugagaugagcaacaacu

SEQ ID NO: 1770911 - RNA, 19 nt, Artificial Sequence
  Description of Artificial Sequence: Synthetic oligonucleotide
  Sense strand starting at position 3593 of SEQ ID NO: 1562761
ucaggugcuuucccugauu

SEQ ID NO: 1770912 - RNA, 19 nt, Artificial Sequence
  Description of Artificial Sequence: Synthetic oligonucleotide
  Antisense strand to SEQ ID NO: 1770911
aaucagggaaagcaccuga

SEQ ID NO: 1770913 - RNA, 19 nt, Artificial Sequence
  Description of Artificial Sequence: Synthetic oligonucleotide
  Sense strand starting at position 3626 of SEQ ID NO: 1562761
gcauuuccugcauauagca

SEQ ID NO: 1770914 - RNA, 19 nt, Artificial Sequence
  Description of Artificial Sequence: Synthetic oligonucleotide
  Antisense strand to SEQ ID NO: 1770913
ugcuauaugcaggaaaugc

SEQ ID NO: 1770915 - RNA, 19 nt, Artificial Sequence
  Description of Artificial Sequence: Synthetic oligonucleotide
  Sense strand starting at position 3695 of SEQ ID NO: 1562761
ggguuaaagggcugaauua

SEQ ID NO: 1770916 - RNA, 19 nt, Artificial Sequence
  Description of Artificial Sequence: Synthetic oligonucleotide
  Antisense strand to SEQ ID NO: 1770915
uaauucagcccuuuaaccc

SEQ ID NO: 1770917 - RNA, 19 nt, Artificial Sequence
  Description of Artificial Sequence: Synthetic oligonucleotide
  Sense strand starting at position 3799 of SEQ ID NO: 1562761
cguugaggacuuggaauau

SEQ ID NO: 1770918 - RNA, 19 nt, Artificial Sequence
  Description of Artificial Sequence: Synthetic oligonucleotide
  Antisense strand to SEQ ID NO: 1770917
auauuccaaguccucaacg

SEQ ID NO: 1770919 - RNA, 19 nt, Artificial Sequence
  Description of Artificial Sequence: Synthetic oligonucleotide
  Sense strand starting at position 3812 of SEQ ID NO: 1562761
gaauauggccacugggauu

SEQ ID NO: 1770920 - RNA, 19 nt, Artificial Sequence
  Description of Artificial Sequence: Synthetic oligonucleotide
  Antisense strand to SEQ ID NO: 1770919
aaucccaguggccauauuc

SEQ ID NO: 1770921 - RNA, 19 nt, Artificial Sequence
  Description of Artificial Sequence: Synthetic oligonucleotide
  Sense strand starting at position 3927 of SEQ ID NO: 1562761
gggccuguauuauucucaa

SEQ ID NO: 1770922 - RNA, 19 nt, Artificial Sequence
  Description of Artificial Sequence: Synthetic oligonucleotide
  Antisense strand to SEQ ID NO: 1770921
uugagaauaauacaggccc

SEQ ID NO: 1770923 - RNA, 19 nt, Artificial Sequence
  Description of Artificial Sequence: Synthetic oligonucleotide
  Sense strand starting at position 1991 of SEQ ID NO: 1562762
guguuucuuccgccgagca

SEQ ID NO: 1770924 - RNA, 19 nt, Artificial Sequence
  Description of Artificial Sequence: Synthetic oligonucleotide
  Antisense strand to SEQ ID NO: 1770923
ugcucggcggaagaaacac

SEQ ID NO: 1770925 - RNA, 19 nt, Artificial Sequence
  Description of Artificial Sequence: Synthetic oligonucleotide
  Sense strand starting at position 1992 of SEQ ID NO: 1562762
uguuucuuccgccgagcaa

SEQ ID NO: 1770926 - RNA, 19 nt, Artificial Sequence
  Description of Artificial Sequence: Synthetic oligonucleotide
  Antisense strand to SEQ ID NO: 1770925
uugcucggcggaagaaaca

SEQ ID NO: 1770927 - RNA, 19 nt, Artificial Sequence
  Description of Artificial Sequence: Synthetic oligonucleotide
  Sense strand starting at position 1993 of SEQ ID NO: 1562762
guuucuuccgccgagcaaa

SEQ ID NO: 1770928 - RNA, 19 nt, Artificial Sequence
  Description of Artificial Sequence: Synthetic oligonucleotide
  Antisense strand to SEQ ID NO: 1770927
uuugcucggcggaagaaac

SEQ ID NO: 1770929 - RNA, 19 nt, Artificial Sequence
  Description of Artificial Sequence: Synthetic oligonucleotide
  Sense strand starting at position 2160 of SEQ ID NO: 1562762
gcuggugugccggcacauu

SEQ ID NO: 1770930 - RNA, 19 nt, Artificial Sequence
  Description of Artificial Sequence: Synthetic oligonucleotide
  Antisense strand to SEQ ID NO: 1770929
aaugugccggcacaccagc

SEQ ID NO: 1770931 - RNA, 19 nt, Artificial Sequence
  Description of Artificial Sequence: Synthetic oligonucleotide
  Sense strand starting at position 2571 of SEQ ID NO: 1562762
cgaccucugccuugagguu

SEQ ID NO: 1770932 - RNA, 19 nt, Artificial Sequence
  Description of Artificial Sequence: Synthetic oligonucleotide
  Antisense strand to SEQ ID NO: 1770931
aaccucaaggcagaggucg

SEQ ID NO: 1770933 - RNA, 19 nt, Artificial Sequence
  Description of Artificial Sequence: Synthetic oligonucleotide
  Sense strand starting at position 2618 of SEQ ID NO: 1562762
cccggacccucugagagau

SEQ ID NO: 1770934 - RNA, 19 nt, Artificial Sequence
  Description of Artificial Sequence: Synthetic oligonucleotide
  Antisense strand to SEQ ID NO: 1770933
aucucucagaggguccggg

SEQ ID NO: 1770935 - RNA, 19 nt, Artificial Sequence
  Description of Artificial Sequence: Synthetic oligonucleotide
  Sense strand starting at position 2653 of SEQ ID NO: 1562762
guggccucuucuccucaaa

SEQ ID NO: 1770936 - RNA, 19 nt, Artificial Sequence
  Description of Artificial Sequence: Synthetic oligonucleotide
  Antisense strand to SEQ ID NO: 1770935
uuugaggagaagaggccac

SEQ ID NO: 1770937 - RNA, 19 nt, Artificial Sequence
  Description of Artificial Sequence: Synthetic oligonucleotide
  Sense strand starting at position 2655 of SEQ ID NO: 1562762
ggccucuucuccucaaaga

SEQ ID NO: 1770938 - RNA, 19 nt, Artificial Sequence
  Description of Artificial Sequence: Synthetic oligonucleotide
  Antisense strand to SEQ ID NO: 1770937
ucuuugaggagaagaggcc

SEQ ID NO: 1770939 - RNA, 19 nt, Artificial Sequence
  Description of Artificial Sequence: Synthetic oligonucleotide
  Sense strand starting at position 2701 of SEQ ID NO: 1562762
gggaauucauuugugugcu

SEQ ID NO: 1770940 - RNA, 19 nt, Artificial Sequence
  Description of Artificial Sequence: Synthetic oligonucleotide
  Antisense strand to SEQ ID NO: 1770939
agcacacaaaugaauuccc

SEQ ID NO: 1770941 - RNA, 19 nt, Artificial Sequence
  Description of Artificial Sequence: Synthetic oligonucleotide
  Sense strand starting at position 2718 of SEQ ID NO: 1562762
cuucucuuagccuggaagu

SEQ ID NO: 1770942 - RNA, 19 nt, Artificial Sequence
  Description of Artificial Sequence: Synthetic oligonucleotide
  Antisense strand to SEQ ID NO: 1770941
acuuccaggcuaagagaag

SEQ ID NO: 1770943 - RNA, 19 nt, Artificial Sequence
  Description of Artificial Sequence: Synthetic oligonucleotide
  Sense strand starting at position 2719 of SEQ ID NO: 1562762
uucucuuagccuggaaguu

SEQ ID NO: 1770944 - RNA, 19 nt, Artificial Sequence
  Description of Artificial Sequence: Synthetic oligonucleotide
  Antisense strand to SEQ ID NO: 1770943
aacuuccaggcuaagagaa

SEQ ID NO: 1770945 - RNA, 19 nt, Artificial Sequence
  Description of Artificial Sequence: Synthetic oligonucleotide
  Sense strand starting at position 2720 of SEQ ID NO: 1562762
ucucuuagccuggaaguuu

SEQ ID NO: 1770946 - RNA, 19 nt, Artificial Sequence
  Description of Artificial Sequence: Synthetic oligonucleotide
  Antisense strand to SEQ ID NO: 1770945
aaacuuccaggcuaagaga

SEQ ID NO: 1770947 - RNA, 19 nt, Artificial Sequence
  Description of Artificial Sequence: Synthetic oligonucleotide
  Sense strand starting at position 2993 of SEQ ID NO: 1562762
ugugaccuguccucggaaa

SEQ ID NO: 1770948 - RNA, 19 nt, Artificial Sequence
  Description of Artificial Sequence: Synthetic oligonucleotide
  Antisense strand to SEQ ID NO: 1770947
uuuccgaggacaggucaca

SEQ ID NO: 1770949 - RNA, 19 nt, Artificial Sequence
  Description of Artificial Sequence: Synthetic oligonucleotide
  Sense strand starting at position 2994 of SEQ ID NO: 1562762
gugaccuguccucggaaag

SEQ ID NO: 1770950 - RNA, 19 nt, Artificial Sequence
  Description of Artificial Sequence: Synthetic oligonucleotide
  Antisense strand to SEQ ID NO: 1770949
cuuuccgaggacaggucac

SEQ ID NO: 1770951 - RNA, 19 nt, Artificial Sequence
  Description of Artificial Sequence: Synthetic oligonucleotide
  Sense strand starting at position 2995 of SEQ ID NO: 1562762
ugaccuguccucggaaagu

SEQ ID NO: 1770952 - RNA, 19 nt, Artificial Sequence
  Description of Artificial Sequence: Synthetic oligonucleotide
  Antisense strand to SEQ ID NO: 1770951
acuuuccgaggacagguca

SEQ ID NO: 1770953 - RNA, 19 nt, Artificial Sequence
  Description of Artificial Sequence: Synthetic oligonucleotide
  Sense strand starting at position 3006 of SEQ ID NO: 1562762
cggaaaguguggaguuguu

SEQ ID NO: 1770954 - RNA, 19 nt, Artificial Sequence
  Description of Artificial Sequence: Synthetic oligonucleotide
  Antisense strand to SEQ ID NO: 1770953
aacaacuccacacuuuccg

SEQ ID NO: 1770955 - RNA, 19 nt, Artificial Sequence
  Description of Artificial Sequence: Synthetic oligonucleotide
  Sense strand starting at position 3013 of SEQ ID NO: 1562762
uguggaguuguuuagagag

SEQ ID NO: 1770956 - RNA, 19 nt, Artificial Sequence
  Description of Artificial Sequence: Synthetic oligonucleotide
  Antisense strand to SEQ ID NO: 1770955
cucucuaaacaacuccaca

SEQ ID NO: 1770957 - RNA, 19 nt, Artificial Sequence
  Description of Artificial Sequence: Synthetic oligonucleotide
  Sense strand starting at position 3066 of SEQ ID NO: 1562762
augcgaugucuuuguuaaa

SEQ ID NO: 1770958 - RNA, 19 nt, Artificial Sequence
  Description of Artificial Sequence: Synthetic oligonucleotide
  Antisense strand to SEQ ID NO: 1770957
uuuaacaaagacaucgcau

SEQ ID NO: 1770959 - RNA, 19 nt, Artificial Sequence
  Description of Artificial Sequence: Synthetic oligonucleotide
  Sense strand starting at position 3283 of SEQ ID NO: 1562762
cugagauucugcgacguuu

SEQ ID NO: 1770960 - RNA, 19 nt, Artificial Sequence
  Description of Artificial Sequence: Synthetic oligonucleotide
  Antisense strand to SEQ ID NO: 1770959
aaacgucgcagaaucucag

SEQ ID NO: 1770961 - RNA, 19 nt, Artificial Sequence
  Description of Artificial Sequence: Synthetic oligonucleotide
  Sense strand starting at position 3370 of SEQ ID NO: 1562762
uaaacaauacccugggagu

SEQ ID NO: 1770962 - RNA, 19 nt, Artificial Sequence
  Description of Artificial Sequence: Synthetic oligonucleotide
  Antisense strand to SEQ ID NO: 1770961
acucccaggguauuguuua

SEQ ID NO: 1770963 - RNA, 19 nt, Artificial Sequence
  Description of Artificial Sequence: Synthetic oligonucleotide
  Sense strand starting at position 3389 of SEQ ID NO: 1562762
gggaguuuguugcugguca

SEQ ID NO: 1770964 - RNA, 19 nt, Artificial Sequence
  Description of Artificial Sequence: Synthetic oligonucleotide
  Antisense strand to SEQ ID NO: 1770963
ugaccagcaacaaacuccc

SEQ ID NO: 1770965 - RNA, 19 nt, Artificial Sequence
  Description of Artificial Sequence: Synthetic oligonucleotide
  Sense strand starting at position 3391 of SEQ ID NO: 1562762
gaguuuguugcuggucaaa

SEQ ID NO: 1770966 - RNA, 19 nt, Artificial Sequence
  Description of Artificial Sequence: Synthetic oligonucleotide
  Antisense strand to SEQ ID NO: 1770965
uuugaccagcaacaaacuc

SEQ ID NO: 1770967 - RNA, 19 nt, Artificial Sequence
  Description of Artificial Sequence: Synthetic oligonucleotide
  Sense strand starting at position 3682 of SEQ ID NO: 1562762
ggcuuaucuccguggcaca

SEQ ID NO: 1770968 - RNA, 19 nt, Artificial Sequence
  Description of Artificial Sequence: Synthetic oligonucleotide
  Antisense strand to SEQ ID NO: 1770967
ugugccacggagauaagcc

SEQ ID NO: 1770969 - RNA, 19 nt, Artificial Sequence
  Description of Artificial Sequence: Synthetic oligonucleotide
  Sense strand starting at position 3764 of SEQ ID NO: 1562762
gugucaauuucucuuaagu

SEQ ID NO: 1770970 - RNA, 19 nt, Artificial Sequence
  Description of Artificial Sequence: Synthetic oligonucleotide
  Antisense strand to SEQ ID NO: 1770969
acuuaagagaaauugacac

SEQ ID NO: 1770971 - RNA, 19 nt, Artificial Sequence
  Description of Artificial Sequence: Synthetic oligonucleotide
  Sense strand starting at position 3766 of SEQ ID NO: 1562762
gucaauuucucuuaaguuu

SEQ ID NO: 1770972 - RNA, 19 nt, Artificial Sequence
  Description of Artificial Sequence: Synthetic oligonucleotide
  Antisense strand to SEQ ID NO: 1770971
aaacuuaagagaaauugac

SEQ ID NO: 1770973 - RNA, 19 nt, Artificial Sequence
  Description of Artificial Sequence: Synthetic oligonucleotide
  Sense strand starting at position 3774 of SEQ ID NO: 1562762
cucuuaaguuucgucauuu

SEQ ID NO: 1770974 - RNA, 19 nt, Artificial Sequence
  Description of Artificial Sequence: Synthetic oligonucleotide
  Antisense strand to SEQ ID NO: 1770973
aaaugacgaaacuuaagag

SEQ ID NO: 1770975 - RNA, 19 nt, Artificial Sequence
  Description of Artificial Sequence: Synthetic oligonucleotide
  Sense strand starting at position 3775 of SEQ ID NO: 1562762
ucuuaaguuucgucauuug

SEQ ID NO: 1770976 - RNA, 19 nt, Artificial Sequence
  Description of Artificial Sequence: Synthetic oligonucleotide
  Antisense strand to SEQ ID NO: 1770975
caaaugacgaaacuuaaga

SEQ ID NO: 1770977 - RNA, 19 nt, Artificial Sequence
  Description of Artificial Sequence: Synthetic oligonucleotide
  Sense strand starting at position 3853 of SEQ ID NO: 1562762
uuaagaccugguuggguua

SEQ ID NO: 1770978 - RNA, 19 nt, Artificial Sequence
  Description of Artificial Sequence: Synthetic oligonucleotide
  Antisense strand to SEQ ID NO: 1770977
uaacccaaccaggucuuaa

SEQ ID NO: 1770979 - RNA, 19 nt, Artificial Sequence
  Description of Artificial Sequence: Synthetic oligonucleotide
  Sense strand starting at position 3855 of SEQ ID NO: 1562762
aagaccugguuggguuaau

SEQ ID NO: 1770980 - RNA, 19 nt, Artificial Sequence
  Description of Artificial Sequence: Synthetic oligonucleotide
  Antisense strand to SEQ ID NO: 1770979
auuaacccaaccaggucuu

SEQ ID NO: 1770981 - RNA, 19 nt, Artificial Sequence
  Description of Artificial Sequence: Synthetic oligonucleotide
  Sense strand starting at position 3856 of SEQ ID NO: 1562762
agaccugguuggguuaaua

SEQ ID NO: 1770982 - RNA, 19 nt, Artificial Sequence
  Description of Artificial Sequence: Synthetic oligonucleotide
  Antisense strand to SEQ ID NO: 1770981
uauuaacccaaccaggucu

SEQ ID NO: 1770983 - RNA, 19 nt, Artificial Sequence
  Description of Artificial Sequence: Synthetic oligonucleotide
  Sense strand starting at position 3865 of SEQ ID NO: 1562762
uggguuaauacgcacccaa

SEQ ID NO: 1770984 - RNA, 19 nt, Artificial Sequence
  Description of Artificial Sequence: Synthetic oligonucleotide
  Antisense strand to SEQ ID NO: 1770983
uugggugcguauuaaccca

SEQ ID NO: 1770985 - RNA, 19 nt, Artificial Sequence
  Description of Artificial Sequence: Synthetic oligonucleotide
  Sense strand starting at position 3898 of SEQ ID NO: 1562762
ccguauccgagauguucca

SEQ ID NO: 1770986 - RNA, 19 nt, Artificial Sequence
  Description of Artificial Sequence: Synthetic oligonucleotide
  Antisense strand to SEQ ID NO: 1770985
uggaacaucucggauacgg

SEQ ID NO: 1770987 - RNA, 19 nt, Artificial Sequence
  Description of Artificial Sequence: Synthetic oligonucleotide
  Sense strand starting at position 3956 of SEQ ID NO: 1562762
cagauccgugcaugucuua

SEQ ID NO: 1770988 - RNA, 19 nt, Artificial Sequence
  Description of Artificial Sequence: Synthetic oligonucleotide
  Antisense strand to SEQ ID NO: 1770987
uaagacaugcacggaucug

SEQ ID NO: 1770989 - RNA, 19 nt, Artificial Sequence
  Description of Artificial Sequence: Synthetic oligonucleotide
  Sense strand starting at position 3961 of SEQ ID NO: 1562762
ccgugcaugucuuaaagac

SEQ ID NO: 1770990 - RNA, 19 nt, Artificial Sequence
  Description of Artificial Sequence: Synthetic oligonucleotide
  Antisense strand to SEQ ID NO: 1770989
gucuuuaagacaugcacgg

SEQ ID NO: 1770991 - RNA, 19 nt, Artificial Sequence
  Description of Artificial Sequence: Synthetic oligonucleotide
  Sense strand starting at position 3965 of SEQ ID NO: 1562762
gcaugucuuaaagacugga

SEQ ID NO: 1770992 - RNA, 19 nt, Artificial Sequence
  Description of Artificial Sequence: Synthetic oligonucleotide
  Antisense strand to SEQ ID NO: 1770991
uccagucuuuaagacaugc

SEQ ID NO: 1770993 - RNA, 19 nt, Artificial Sequence
  Description of Artificial Sequence: Synthetic oligonucleotide
  Sense strand starting at position 3968 of SEQ ID NO: 1562762
ugucuuaaagacuggauga

SEQ ID NO: 1770994 - RNA, 19 nt, Artificial Sequence
  Description of Artificial Sequence: Synthetic oligonucleotide
  Antisense strand to SEQ ID NO: 1770993
ucauccagucuuuaagaca

SEQ ID NO: 1770995 - RNA, 19 nt, Artificial Sequence
  Description of Artificial Sequence: Synthetic oligonucleotide
  Sense strand starting at position 132 of SEQ ID NO: 1562763
agcacaugucuguaucuca

SEQ ID NO: 1770996 - RNA, 19 nt, Artificial Sequence
  Description of Artificial Sequence: Synthetic oligonucleotide
  Antisense strand to SEQ ID NO: 1770995
ugagauacagacaugugcu

SEQ ID NO: 1770997 - RNA, 19 nt, Artificial Sequence
  Description of Artificial Sequence: Synthetic oligonucleotide
  Sense strand starting at position 291 of SEQ ID NO: 1562763
cgaggauccuggguacaga

SEQ ID NO: 1770998 - RNA, 19 nt, Artificial Sequence
  Description of Artificial Sequence: Synthetic oligonucleotide
  Antisense strand to SEQ ID NO: 1770997
ucuguacccaggauccucg

SEQ ID NO: 1770999 - RNA, 19 nt, Artificial Sequence
  Description of Artificial Sequence: Synthetic oligonucleotide
  Sense strand starting at position 464 of SEQ ID NO: 1562763
ccguguuucugcuuggcau

SEQ ID NO: 1771000 - RNA, 19 nt, Artificial Sequence
  Description of Artificial Sequence: Synthetic oligonucleotide
  Antisense strand to SEQ ID NO: 1770999
augccaagcagaaacacgg

SEQ ID NO: 1771001 - RNA, 19 nt, Artificial Sequence
  Description of Artificial Sequence: Synthetic oligonucleotide
  Sense strand starting at position 501 of SEQ ID NO: 1562763
cguuguugaacacacagaa

SEQ ID NO: 1771002 - RNA, 19 nt, Artificial Sequence
  Description of Artificial Sequence: Synthetic oligonucleotide
  Antisense strand to SEQ ID NO: 1771001
uucuguguguucaacaacg

SEQ ID NO: 1771003 - RNA, 19 nt, Artificial Sequence
  Description of Artificial Sequence: Synthetic oligonucleotide
  Sense strand starting at position 903 of SEQ ID NO: 1562763
agggcaaugucauguguau

SEQ ID NO: 1771004 - RNA, 19 nt, Artificial Sequence
  Description of Artificial Sequence: Synthetic oligonucleotide
  Antisense strand to SEQ ID NO: 1771003
auacacaugacauugcccu

SEQ ID NO: 1771005 - RNA, 19 nt, Artificial Sequence
  Description of Artificial Sequence: Synthetic oligonucleotide
  Sense strand starting at position 1188 of SEQ ID NO: 1562763
ugggauucauggugggagu

SEQ ID NO: 1771006 - RNA, 19 nt, Artificial Sequence
  Description of Artificial Sequence: Synthetic oligonucleotide
  Antisense strand to SEQ ID NO: 1771005
acucccaccaugaauccca

SEQ ID NO: 1771007 - RNA, 19 nt, Artificial Sequence
  Description of Artificial Sequence: Synthetic oligonucleotide
  Sense strand starting at position 1297 of SEQ ID NO: 1562763
ccagguucuuagguuucua

SEQ ID NO: 1771008 - RNA, 19 nt, Artificial Sequence
  Description of Artificial Sequence: Synthetic oligonucleotide
  Antisense strand to SEQ ID NO: 1771007
uagaaaccuaagaaccugg

SEQ ID NO: 1771009 - RNA, 19 nt, Artificial Sequence
  Description of Artificial Sequence: Synthetic oligonucleotide
  Sense strand starting at position 1560 of SEQ ID NO: 1562763
cccacuuacucgucccaga

SEQ ID NO: 1771010 - RNA, 19 nt, Artificial Sequence
  Description of Artificial Sequence: Synthetic oligonucleotide
  Antisense strand to SEQ ID NO: 1771009
ucugggacgaguaaguggg

SEQ ID NO: 1771011 - RNA, 19 nt, Artificial Sequence
  Description of Artificial Sequence: Synthetic oligonucleotide
  Sense strand starting at position 1591 of SEQ ID NO: 1562763
ccgucauguccucauggua

SEQ ID NO: 1771012 - RNA, 19 nt, Artificial Sequence
  Description of Artificial Sequence: Synthetic oligonucleotide
  Antisense strand to SEQ ID NO: 1771011
uaccaugaggacaugacgg

SEQ ID NO: 1771013 - RNA, 19 nt, Artificial Sequence
  Description of Artificial Sequence: Synthetic oligonucleotide
  Sense strand starting at position 2345 of SEQ ID NO: 1562763
gggagugaguccgguucua

SEQ ID NO: 1771014 - RNA, 19 nt, Artificial Sequence
  Description of Artificial Sequence: Synthetic oligonucleotide
  Antisense strand to SEQ ID NO: 1771013
uagaaccggacucacuccc

SEQ ID NO: 1771015 - RNA, 19 nt, Artificial Sequence
  Description of Artificial Sequence: Synthetic oligonucleotide
  Sense strand starting at position 2559 of SEQ ID NO: 1562763
ccagcugggucacagaauu

SEQ ID NO: 1771016 - RNA, 19 nt, Artificial Sequence
  Description of Artificial Sequence: Synthetic oligonucleotide
  Antisense strand to SEQ ID NO: 1771015
aauucugugacccagcugg

SEQ ID NO: 1771017 - RNA, 19 nt, Artificial Sequence
  Description of Artificial Sequence: Synthetic oligonucleotide
  Sense strand starting at position 2831 of SEQ ID NO: 1562763
acuggucucucugcuguaa

SEQ ID NO: 1771018 - RNA, 19 nt, Artificial Sequence
  Description of Artificial Sequence: Synthetic oligonucleotide
  Antisense strand to SEQ ID NO: 1771017
uuacagcagagagaccagu

SEQ ID NO: 1771019 - RNA, 19 nt, Artificial Sequence
  Description of Artificial Sequence: Synthetic oligonucleotide
  Sense strand starting at position 2973 of SEQ ID NO: 1562763
gggcuagagguuugaucaa

SEQ ID NO: 1771020 - RNA, 19 nt, Artificial Sequence
  Description of Artificial Sequence: Synthetic oligonucleotide
  Antisense strand to SEQ ID NO: 1771019
uugaucaaaccucuagccc

SEQ ID NO: 1771021 - RNA, 19 nt, Artificial Sequence
  Description of Artificial Sequence: Synthetic oligonucleotide
  Sense strand starting at position 3175 of SEQ ID NO: 1562763
uaggguagauccuaacacu

SEQ ID NO: 1771022 - RNA, 19 nt, Artificial Sequence
  Description of Artificial Sequence: Synthetic oligonucleotide
  Antisense strand to SEQ ID NO: 1771021
aguguuaggaucuacccua

SEQ ID NO: 1771023 - RNA, 19 nt, Artificial Sequence
  Description of Artificial Sequence: Synthetic oligonucleotide
  Sense strand starting at position 3247 of SEQ ID NO: 1562763
cuuagagucuaagccauua

SEQ ID NO: 1771024 - RNA, 19 nt, Artificial Sequence
  Description of Artificial Sequence: Synthetic oligonucleotide
  Antisense strand to SEQ ID NO: 1771023
uaauggcuuagacucuaag

SEQ ID NO: 1771025 - RNA, 19 nt, Artificial Sequence
  Description of Artificial Sequence: Synthetic oligonucleotide
  Sense strand starting at position 3354 of SEQ ID NO: 1562763
cuuuguggccugggagaga

SEQ ID NO: 1771026 - RNA, 19 nt, Artificial Sequence
  Description of Artificial Sequence: Synthetic oligonucleotide
  Antisense strand to SEQ ID NO: 1771025
ucucucccaggccacaaag

SEQ ID NO: 1771027 - RNA, 19 nt, Artificial Sequence
  Description of Artificial Sequence: Synthetic oligonucleotide
  Sense strand starting at position 3397 of SEQ ID NO: 1562763
gcucuaagggucugagcua

SEQ ID NO: 1771028 - RNA, 19 nt, Artificial Sequence
  Description of Artificial Sequence: Synthetic oligonucleotide
  Antisense strand to SEQ ID NO: 1771027
uagcucagacccuuagagc

SEQ ID NO: 1771029 - RNA, 19 nt, Artificial Sequence
  Description of Artificial Sequence: Synthetic oligonucleotide
  Sense strand starting at position 3398 of SEQ ID NO: 1562763
cucuaagggucugagcuau

SEQ ID NO: 1771030 - RNA, 19 nt, Artificial Sequence
  Description of Artificial Sequence: Synthetic oligonucleotide
  Antisense strand to SEQ ID NO: 1771029
auagcucagacccuuagag

SEQ ID NO: 1771031 - RNA, 19 nt, Artificial Sequence
  Description of Artificial Sequence: Synthetic oligonucleotide
  Sense strand starting at position 3784 of SEQ ID NO: 1562763
aggucuuguccagaaaguu

SEQ ID NO: 1771032 - RNA, 19 nt, Artificial Sequence
  Description of Artificial Sequence: Synthetic oligonucleotide
  Antisense strand to SEQ ID NO: 1771031
aacuuucuggacaagaccu

SEQ ID NO: 1771033 - RNA, 19 nt, Artificial Sequence
  Description of Artificial Sequence: Synthetic oligonucleotide
  Sense strand starting at position 3872 of SEQ ID NO: 1562763
gggcgucugcucugaugga

SEQ ID NO: 1771034 - RNA, 19 nt, Artificial Sequence
  Description of Artificial Sequence: Synthetic oligonucleotide
  Antisense strand to SEQ ID NO: 1771033
uccaucagagcagacgccc

SEQ ID NO: 1771035 - RNA, 19 nt, Artificial Sequence
  Description of Artificial Sequence: Synthetic oligonucleotide
  Sense strand starting at position 3873 of SEQ ID NO: 1562763
ggcgucugcucugauggau

SEQ ID NO: 1771036 - RNA, 19 nt, Artificial Sequence
  Description of Artificial Sequence: Synthetic oligonucleotide
  Antisense strand to SEQ ID NO: 1771035
auccaucagagcagacgcc

SEQ ID NO: 1771037 - RNA, 19 nt, Artificial Sequence
  Description of Artificial Sequence: Synthetic oligonucleotide
  Sense strand starting at position 301 of SEQ ID NO: 1562764
ccagcagucuugccacaca

SEQ ID NO: 1771038 - RNA, 19 nt, Artificial Sequence
  Description of Artificial Sequence: Synthetic oligonucleotide
  Antisense strand to SEQ ID NO: 1771037
uguguggcaagacugcugg

SEQ ID NO: 1771039 - RNA, 19 nt, Artificial Sequence
  Description of Artificial Sequence: Synthetic oligonucleotide
  Sense strand starting at position 541 of SEQ ID NO: 1562764
ccagaaaggccuuagguuu

SEQ ID NO: 1771040 - RNA, 19 nt, Artificial Sequence
  Description of Artificial Sequence: Synthetic oligonucleotide
  Antisense strand to SEQ ID NO: 1771039
aaaccuaaggccuuucugg

SEQ ID NO: 1771041 - RNA, 19 nt, Artificial Sequence
  Description of Artificial Sequence: Synthetic oligonucleotide
  Sense strand starting at position 547 of SEQ ID NO: 1562764
aggccuuagguuugaguga

SEQ ID NO: 1771042 - RNA, 19 nt, Artificial Sequence
  Description of Artificial Sequence: Synthetic oligonucleotide
  Antisense strand to SEQ ID NO: 1771041
ucacucaaaccuaaggccu

SEQ ID NO: 1771043 - RNA, 19 nt, Artificial Sequence
  Description of Artificial Sequence: Synthetic oligonucleotide
  Sense strand starting at position 585 of SEQ ID NO: 1562764
ccuggauccuuggaggaca

SEQ ID NO: 1771044 - RNA, 19 nt, Artificial Sequence
  Description of Artificial Sequence: Synthetic oligonucleotide
  Antisense strand to SEQ ID NO: 1771043
uguccuccaaggauccagg

SEQ ID NO: 1771045 - RNA, 19 nt, Artificial Sequence
  Description of Artificial Sequence: Synthetic oligonucleotide
  Sense strand starting at position 826 of SEQ ID NO: 1562764
uccagaugugcuuggcaac

SEQ ID NO: 1771046 - RNA, 19 nt, Artificial Sequence
  Description of Artificial Sequence: Synthetic oligonucleotide
  Antisense strand to SEQ ID NO: 1771045
guugccaagcacaucugga

SEQ ID NO: 1771047 - RNA, 19 nt, Artificial Sequence
  Description of Artificial Sequence: Synthetic oligonucleotide
  Sense strand starting at position 827 of SEQ ID NO: 1562764
ccagaugugcuuggcaacu

SEQ ID NO: 1771048 - RNA, 19 nt, Artificial Sequence
  Description of Artificial Sequence: Synthetic oligonucleotide
  Antisense strand to SEQ ID NO: 1771047
aguugccaagcacaucugg

SEQ ID NO: 1771049 - RNA, 19 nt, Artificial Sequence
  Description of Artificial Sequence: Synthetic oligonucleotide
  Sense strand starting at position 836 of SEQ ID NO: 1562764
cuuggcaacuccuacuaga

SEQ ID NO: 1771050 - RNA, 19 nt, Artificial Sequence
  Description of Artificial Sequence: Synthetic oligonucleotide
  Antisense strand to SEQ ID NO: 1771049
ucuaguaggaguugccaag

SEQ ID NO: 1771051 - RNA, 19 nt, Artificial Sequence
  Description of Artificial Sequence: Synthetic oligonucleotide
  Sense strand starting at position 982 of SEQ ID NO: 1562764
ggagcauuaucuggccuca

SEQ ID NO: 1771052 - RNA, 19 nt, Artificial Sequence
  Description of Artificial Sequence: Synthetic oligonucleotide
  Antisense strand to SEQ ID NO: 1771051
ugaggccagauaaugcucc

SEQ ID NO: 1771053 - RNA, 19 nt, Artificial Sequence
  Description of Artificial Sequence: Synthetic oligonucleotide
  Sense strand starting at position 984 of SEQ ID NO: 1562764
agcauuaucuggccucauu

SEQ ID NO: 1771054 - RNA, 19 nt, Artificial Sequence
  Description of Artificial Sequence: Synthetic oligonucleotide
  Antisense strand to SEQ ID NO: 1771053
aaugaggccagauaaugcu

SEQ ID NO: 1771055 - RNA, 19 nt, Artificial Sequence
  Description of Artificial Sequence: Synthetic oligonucleotide
  Sense strand starting at position 1080 of SEQ ID NO: 1562764
cugugugaauaugaaccau

SEQ ID NO: 1771056 - RNA, 19 nt, Artificial Sequence
  Description of Artificial Sequence: Synthetic oligonucleotide
  Antisense strand to SEQ ID NO: 1771055
augguucauauucacacag

SEQ ID NO: 1771057 - RNA, 19 nt, Artificial Sequence
  Description of Artificial Sequence: Synthetic oligonucleotide
  Sense strand starting at position 1091 of SEQ ID NO: 1562764
ugaaccaucuuggaagaua

SEQ ID NO: 1771058 - RNA, 19 nt, Artificial Sequence
  Description of Artificial Sequence: Synthetic oligonucleotide
  Antisense strand to SEQ ID NO: 1771057
uaucuuccaagaugguuca

SEQ ID NO: 1771059 - RNA, 19 nt, Artificial Sequence
  Description of Artificial Sequence: Synthetic oligonucleotide
  Sense strand starting at position 1376 of SEQ ID NO: 1562764
gaccgcaguccuggaaauc

SEQ ID NO: 1771060 - RNA, 19 nt, Artificial Sequence
  Description of Artificial Sequence: Synthetic oligonucleotide
  Antisense strand to SEQ ID NO: 1771059
gauuuccaggacugcgguc

SEQ ID NO: 1771061 - RNA, 19 nt, Artificial Sequence
  Description of Artificial Sequence: Synthetic oligonucleotide
  Sense strand starting at position 1483 of SEQ ID NO: 1562764
cgacgcuguucggauuaga

SEQ ID NO: 1771062 - RNA, 19 nt, Artificial Sequence
  Description of Artificial Sequence: Synthetic oligonucleotide
  Antisense strand to SEQ ID NO: 1771061
ucuaauccgaacagcgucg

SEQ ID NO: 1771063 - RNA, 19 nt, Artificial Sequence
  Description of Artificial Sequence: Synthetic oligonucleotide
  Sense strand starting at position 1486 of SEQ ID NO: 1562764
cgcuguucggauuagauug

SEQ ID NO: 1771064 - RNA, 19 nt, Artificial Sequence
  Description of Artificial Sequence: Synthetic oligonucleotide
  Antisense strand to SEQ ID NO: 1771063
caaucuaauccgaacagcg

SEQ ID NO: 1771065 - RNA, 19 nt, Artificial Sequence
  Description of Artificial Sequence: Synthetic oligonucleotide
  Sense strand starting at position 1491 of SEQ ID NO: 1562764
uucggauuagauugcuaau

SEQ ID NO: 1771066 - RNA, 19 nt, Artificial Sequence
  Description of Artificial Sequence: Synthetic oligonucleotide
  Antisense strand to SEQ ID NO: 1771065
auuagcaaucuaauccgaa

SEQ ID NO: 1771067 - RNA, 19 nt, Artificial Sequence
  Description of Artificial Sequence: Synthetic oligonucleotide
  Sense strand starting at position 1493 of SEQ ID NO: 1562764
cggauuagauugcuaauga

SEQ ID NO: 1771068 - RNA, 19 nt, Artificial Sequence
  Description of Artificial Sequence: Synthetic oligonucleotide
  Antisense strand to SEQ ID NO: 1771067
ucauuagcaaucuaauccg

SEQ ID NO: 1771069 - RNA, 19 nt, Artificial Sequence
  Description of Artificial Sequence: Synthetic oligonucleotide
  Sense strand starting at position 1494 of SEQ ID NO: 1562764
ggauuagauugcuaaugaa

SEQ ID NO: 1771070 - RNA, 19 nt, Artificial Sequence
  Description of Artificial Sequence: Synthetic oligonucleotide
  Antisense strand to SEQ ID NO: 1771069
uucauuagcaaucuaaucc

SEQ ID NO: 1771071 - RNA, 19 nt, Artificial Sequence
  Description of Artificial Sequence: Synthetic oligonucleotide
  Sense strand starting at position 2843 of SEQ ID NO: 1562764
cugcuucucuagggagcua

SEQ ID NO: 1771072 - RNA, 19 nt, Artificial Sequence
  Description of Artificial Sequence: Synthetic oligonucleotide
  Antisense strand to SEQ ID NO: 1771071
uagcucccuagagaagcag

SEQ ID NO: 1771073 - RNA, 19 nt, Artificial Sequence
  Description of Artificial Sequence: Synthetic oligonucleotide
  Sense strand starting at position 2848 of SEQ ID NO: 1562764
ucucuagggagcuaguuaa

SEQ ID NO: 1771074 - RNA, 19 nt, Artificial Sequence
  Description of Artificial Sequence: Synthetic oligonucleotide
  Antisense strand to SEQ ID NO: 1771073
uuaacuagcucccuagaga

SEQ ID NO: 1771075 - RNA, 19 nt, Artificial Sequence
  Description of Artificial Sequence: Synthetic oligonucleotide
  Sense strand starting at position 2971 of SEQ ID NO: 1562764
agcuccagucaagaucaaa

SEQ ID NO: 1771076 - RNA, 19 nt, Artificial Sequence
  Description of Artificial Sequence: Synthetic oligonucleotide
  Antisense strand to SEQ ID NO: 1771075
uuugaucuugacuggagcu

SEQ ID NO: 1771077 - RNA, 19 nt, Artificial Sequence
  Description of Artificial Sequence: Synthetic oligonucleotide
  Sense strand starting at position 3031 of SEQ ID NO: 1562764
uuucuuuccuaauggaugu

SEQ ID NO: 1771078 - RNA, 19 nt, Artificial Sequence
  Description of Artificial Sequence: Synthetic oligonucleotide
  Antisense strand to SEQ ID NO: 1771077
acauccauuaggaaagaaa

SEQ ID NO: 1771079 - RNA, 19 nt, Artificial Sequence
  Description of Artificial Sequence: Synthetic oligonucleotide
  Sense strand starting at position 3042 of SEQ ID NO: 1562764
auggauguauagguuuaau

SEQ ID NO: 1771080 - RNA, 19 nt, Artificial Sequence
  Description of Artificial Sequence: Synthetic oligonucleotide
  Antisense strand to SEQ ID NO: 1771079
auuaaaccuauacauccau

SEQ ID NO: 1771081 - RNA, 19 nt, Artificial Sequence
  Description of Artificial Sequence: Synthetic oligonucleotide
  Sense strand starting at position 3045 of SEQ ID NO: 1562764
gauguauagguuuaauguc

SEQ ID NO: 1771082 - RNA, 19 nt, Artificial Sequence
  Description of Artificial Sequence: Synthetic oligonucleotide
  Antisense strand to SEQ ID NO: 1771081
gacauuaaaccuauacauc

SEQ ID NO: 1771083 - RNA, 19 nt, Artificial Sequence
  Description of Artificial Sequence: Synthetic oligonucleotide
  Sense strand starting at position 3053 of SEQ ID NO: 1562764
gguuuaaugucauccuaac

SEQ ID NO: 1771084 - RNA, 19 nt, Artificial Sequence
  Description of Artificial Sequence: Synthetic oligonucleotide
  Antisense strand to SEQ ID NO: 1771083
guuaggaugacauuaaacc

SEQ ID NO: 1771085 - RNA, 19 nt, Artificial Sequence
  Description of Artificial Sequence: Synthetic oligonucleotide
  Sense strand starting at position 3173 of SEQ ID NO: 1562764
guagacuugcccuaacaga

SEQ ID NO: 1771086 - RNA, 19 nt, Artificial Sequence
  Description of Artificial Sequence: Synthetic oligonucleotide
  Antisense strand to SEQ ID NO: 1771085
ucuguuagggcaagucuac

SEQ ID NO: 1771087 - RNA, 19 nt, Artificial Sequence
  Description of Artificial Sequence: Synthetic oligonucleotide
  Sense strand starting at position 3220 of SEQ ID NO: 1562764
ggcauuucagugugguaca

SEQ ID NO: 1771088 - RNA, 19 nt, Artificial Sequence
  Description of Artificial Sequence: Synthetic oligonucleotide
  Antisense strand to SEQ ID NO: 1771087
uguaccacacugaaaugcc

SEQ ID NO: 1771089 - RNA, 19 nt, Artificial Sequence
  Description of Artificial Sequence: Synthetic oligonucleotide
  Sense strand starting at position 3845 of SEQ ID NO: 1562764
aaggucugauagguaauca

SEQ ID NO: 1771090 - RNA, 19 nt, Artificial Sequence
  Description of Artificial Sequence: Synthetic oligonucleotide
  Antisense strand to SEQ ID NO: 1771089
ugauuaccuaucagaccuu

SEQ ID NO: 1771091 - RNA, 19 nt, Artificial Sequence
  Description of Artificial Sequence: Synthetic oligonucleotide
  Sense strand starting at position 3908 of SEQ ID NO: 1562764
ggacaugaguuuggcggua

SEQ ID NO: 1771092 - RNA, 19 nt, Artificial Sequence
  Description of Artificial Sequence: Synthetic oligonucleotide
  Antisense strand to SEQ ID NO: 1771091
uaccgccaaacucaugucc

SEQ ID NO: 1771093 - RNA, 19 nt, Artificial Sequence
  Description of Artificial Sequence: Synthetic oligonucleotide
  Sense strand starting at position 3910 of SEQ ID NO: 1562764
acaugaguuuggcgguaug

SEQ ID NO: 1771094 - RNA, 19 nt, Artificial Sequence
  Description of Artificial Sequence: Synthetic oligonucleotide
  Antisense strand to SEQ ID NO: 1771093
cauaccgccaaacucaugu

SEQ ID NO: 1771095 - RNA, 19 nt, Artificial Sequence
  Description of Artificial Sequence: Synthetic oligonucleotide
  Sense strand starting at position 4 of SEQ ID NO: 1562765
ugacuuacuuauguuuaca

SEQ ID NO: 1771096 - RNA, 19 nt, Artificial Sequence
  Description of Artificial Sequence: Synthetic oligonucleotide
  Antisense strand to SEQ ID NO: 1771095
uguaaacauaaguaaguca

SEQ ID NO: 1771097 - RNA, 19 nt, Artificial Sequence
  Description of Artificial Sequence: Synthetic oligonucleotide
  Sense strand starting at position 62 of SEQ ID NO: 1562765
aggaacaaguuauaugaca

SEQ ID NO: 1771098 - RNA, 19 nt, Artificial Sequence
  Description of Artificial Sequence: Synthetic oligonucleotide
  Antisense strand to SEQ ID NO: 1771097
ugucauauaacuuguuccu

SEQ ID NO: 1771099 - RNA, 19 nt, Artificial Sequence
  Description of Artificial Sequence: Synthetic oligonucleotide
  Sense strand starting at position 240 of SEQ ID NO: 1562765
uguccaguucuccagggaa

SEQ ID NO: 1771100 - RNA, 19 nt, Artificial Sequence
  Description of Artificial Sequence: Synthetic oligonucleotide
  Antisense strand to SEQ ID NO: 1771099
uucccuggagaacuggaca

SEQ ID NO: 1771101 - RNA, 19 nt, Artificial Sequence
  Description of Artificial Sequence: Synthetic oligonucleotide
  Sense strand starting at position 242 of SEQ ID NO: 1562765
uccaguucuccagggaaag

SEQ ID NO: 1771102 - RNA, 19 nt, Artificial Sequence
  Description of Artificial Sequence: Synthetic oligonucleotide
  Antisense strand to SEQ ID NO: 1771101
cuuucccuggagaacugga

SEQ ID NO: 1771103 - RNA, 19 nt, Artificial Sequence
  Description of Artificial Sequence: Synthetic oligonucleotide
  Sense strand starting at position 243 of SEQ ID NO: 1562765
ccaguucuccagggaaaga

SEQ ID NO: 1771104 - RNA, 19 nt, Artificial Sequence
  Description of Artificial Sequence: Synthetic oligonucleotide
  Antisense strand to SEQ ID NO: 1771103
ucuuucccuggagaacugg

SEQ ID NO: 1771105 - RNA, 19 nt, Artificial Sequence
  Description of Artificial Sequence: Synthetic oligonucleotide
  Sense strand starting at position 253 of SEQ ID NO: 1562765
agggaaagaucugcacagu

SEQ ID NO: 1771106 - RNA, 19 nt, Artificial Sequence
  Description of Artificial Sequence: Synthetic oligonucleotide
  Antisense strand to SEQ ID NO: 1771105
acugugcagaucuuucccu

SEQ ID NO: 1771107 - RNA, 19 nt, Artificial Sequence
  Description of Artificial Sequence: Synthetic oligonucleotide
  Sense strand starting at position 280 of SEQ ID NO: 1562765
ggaaaugcucuuggagauc

SEQ ID NO: 1771108 - RNA, 19 nt, Artificial Sequence
  Description of Artificial Sequence: Synthetic oligonucleotide
  Antisense strand to SEQ ID NO: 1771107
gaucuccaagagcauuucc

SEQ ID NO: 1771109 - RNA, 19 nt, Artificial Sequence
  Description of Artificial Sequence: Synthetic oligonucleotide
  Sense strand starting at position 428 of SEQ ID NO: 1562765
uguggaagagguuguucaa

SEQ ID NO: 1771110 - RNA, 19 nt, Artificial Sequence
  Description of Artificial Sequence: Synthetic oligonucleotide
  Antisense strand to SEQ ID NO: 1771109
uugaacaaccucuuccaca

SEQ ID NO: 1771111 - RNA, 19 nt, Artificial Sequence
  Description of Artificial Sequence: Synthetic oligonucleotide
  Sense strand starting at position 789 of SEQ ID NO: 1562765
ccuguagucgcacugcaaa

SEQ ID NO: 1771112 - RNA, 19 nt, Artificial Sequence
  Description of Artificial Sequence: Synthetic oligonucleotide
  Antisense strand to SEQ ID NO: 1771111
uuugcagugcgacuacagg

SEQ ID NO: 1771113 - RNA, 19 nt, Artificial Sequence
  Description of Artificial Sequence: Synthetic oligonucleotide
  Sense strand starting at position 797 of SEQ ID NO: 1562765
cgcacugcaaaguagaaau

SEQ ID NO: 1771114 - RNA, 19 nt, Artificial Sequence
  Description of Artificial Sequence: Synthetic oligonucleotide
  Antisense strand to SEQ ID NO: 1771113
auuucuacuuugcagugcg

SEQ ID NO: 1771115 - RNA, 19 nt, Artificial Sequence
  Description of Artificial Sequence: Synthetic oligonucleotide
  Sense strand starting at position 888 of SEQ ID NO: 1562765
ggaggagucucccuggguu

SEQ ID NO: 1771116 - RNA, 19 nt, Artificial Sequence
  Description of Artificial Sequence: Synthetic oligonucleotide
  Antisense strand to SEQ ID NO: 1771115
aacccagggagacuccucc

SEQ ID NO: 1771117 - RNA, 19 nt, Artificial Sequence
  Description of Artificial Sequence: Synthetic oligonucleotide
  Sense strand starting at position 890 of SEQ ID NO: 1562765
aggagucucccuggguuga

SEQ ID NO: 1771118 - RNA, 19 nt, Artificial Sequence
  Description of Artificial Sequence: Synthetic oligonucleotide
  Antisense strand to SEQ ID NO: 1771117
ucaacccagggagacuccu

SEQ ID NO: 1771119 - RNA, 19 nt, Artificial Sequence
  Description of Artificial Sequence: Synthetic oligonucleotide
  Sense strand starting at position 891 of SEQ ID NO: 1562765
ggagucucccuggguugau

SEQ ID NO: 1771120 - RNA, 19 nt, Artificial Sequence
  Description of Artificial Sequence: Synthetic oligonucleotide
  Antisense strand to SEQ ID NO: 1771119
aucaacccagggagacucc

SEQ ID NO: 1771121 - RNA, 19 nt, Artificial Sequence
  Description of Artificial Sequence: Synthetic oligonucleotide
  Sense strand starting at position 892 of SEQ ID NO: 1562765
gagucucccuggguugauu

SEQ ID NO: 1771122 - RNA, 19 nt, Artificial Sequence
  Description of Artificial Sequence: Synthetic oligonucleotide
  Antisense strand to SEQ ID NO: 1771121
aaucaacccagggagacuc

SEQ ID NO: 1771123 - RNA, 19 nt, Artificial Sequence
  Description of Artificial Sequence: Synthetic oligonucleotide
  Sense strand starting at position 903 of SEQ ID NO: 1562765
gguugauuucugugcuaca

SEQ ID NO: 1771124 - RNA, 19 nt, Artificial Sequence
  Description of Artificial Sequence: Synthetic oligonucleotide
  Antisense strand to SEQ ID NO: 1771123
uguagcacagaaaucaacc

SEQ ID NO: 1771125 - RNA, 19 nt, Artificial Sequence
  Description of Artificial Sequence: Synthetic oligonucleotide
  Sense strand starting at position 904 of SEQ ID NO: 1562765
guugauuucugugcuacag

SEQ ID NO: 1771126 - RNA, 19 nt, Artificial Sequence
  Description of Artificial Sequence: Synthetic oligonucleotide
  Antisense strand to SEQ ID NO: 1771125
cuguagcacagaaaucaac

SEQ ID NO: 1771127 - RNA, 19 nt, Artificial Sequence
  Description of Artificial Sequence: Synthetic oligonucleotide
  Sense strand starting at position 1015 of SEQ ID NO: 1562765
aaggcagaacuaugacgaa

SEQ ID NO: 1771128 - RNA, 19 nt, Artificial Sequence
  Description of Artificial Sequence: Synthetic oligonucleotide
  Antisense strand to SEQ ID NO: 1771127
uucgucauaguucugccuu

SEQ ID NO: 1771129 - RNA, 19 nt, Artificial Sequence
  Description of Artificial Sequence: Synthetic oligonucleotide
  Sense strand starting at position 1045 of SEQ ID NO: 1562765
cuagccucucuguaucaga

SEQ ID NO: 1771130 - RNA, 19 nt, Artificial Sequence
  Description of Artificial Sequence: Synthetic oligonucleotide
  Antisense strand to SEQ ID NO: 1771129
ucugauacagagaggcuag

SEQ ID NO: 1771131 - RNA, 19 nt, Artificial Sequence
  Description of Artificial Sequence: Synthetic oligonucleotide
  Sense strand starting at position 1190 of SEQ ID NO: 1562765
gucccagcucagcauuaau

SEQ ID NO: 1771132 - RNA, 19 nt, Artificial Sequence
  Description of Artificial Sequence: Synthetic oligonucleotide
  Antisense strand to SEQ ID NO: 1771131
auuaaugcugagcugggac

SEQ ID NO: 1771133 - RNA, 19 nt, Artificial Sequence
  Description of Artificial Sequence: Synthetic oligonucleotide
  Sense strand starting at position 1197 of SEQ ID NO: 1562765
cucagcauuaaucguggau

SEQ ID NO: 1771134 - RNA, 19 nt, Artificial Sequence
  Description of Artificial Sequence: Synthetic oligonucleotide
  Antisense strand to SEQ ID NO: 1771133
auccacgauuaaugcugag

SEQ ID NO: 1771135 - RNA, 19 nt, Artificial Sequence
  Description of Artificial Sequence: Synthetic oligonucleotide
  Sense strand starting at position 1200 of SEQ ID NO: 1562765
agcauuaaucguggauccu

SEQ ID NO: 1771136 - RNA, 19 nt, Artificial Sequence
  Description of Artificial Sequence: Synthetic oligonucleotide
  Antisense strand to SEQ ID NO: 1771135
aggauccacgauuaaugcu

SEQ ID NO: 1771137 - RNA, 19 nt, Artificial Sequence
  Description of Artificial Sequence: Synthetic oligonucleotide
  Sense strand starting at position 1201 of SEQ ID NO: 1562765
gcauuaaucguggauccuu

SEQ ID NO: 1771138 - RNA, 19 nt, Artificial Sequence
  Description of Artificial Sequence: Synthetic oligonucleotide
  Antisense strand to SEQ ID NO: 1771137
aaggauccacgauuaaugc

SEQ ID NO: 1771139 - RNA, 19 nt, Artificial Sequence
  Description of Artificial Sequence: Synthetic oligonucleotide
  Sense strand starting at position 2288 of SEQ ID NO: 1562765
gaguccgacuuauuaacua

SEQ ID NO: 1771140 - RNA, 19 nt, Artificial Sequence
  Description of Artificial Sequence: Synthetic oligonucleotide
  Antisense strand to SEQ ID NO: 1771139
uaguuaauaagucggacuc

SEQ ID NO: 1771141 - RNA, 19 nt, Artificial Sequence
  Description of Artificial Sequence: Synthetic oligonucleotide
  Sense strand starting at position 2441 of SEQ ID NO: 1562765
gcggacgcguuuauuagaa

SEQ ID NO: 1771142 - RNA, 19 nt, Artificial Sequence
  Description of Artificial Sequence: Synthetic oligonucleotide
  Antisense strand to SEQ ID NO: 1771141
uucuaauaaacgcguccgc

SEQ ID NO: 1771143 - RNA, 19 nt, Artificial Sequence
  Description of Artificial Sequence: Synthetic oligonucleotide
  Sense strand starting at position 2472 of SEQ ID NO: 1562765
uugccuagacaugaacauu

SEQ ID NO: 1771144 - RNA, 19 nt, Artificial Sequence
  Description of Artificial Sequence: Synthetic oligonucleotide
  Antisense strand to SEQ ID NO: 1771143
aauguucaugucuaggcaa

SEQ ID NO: 1771145 - RNA, 19 nt, Artificial Sequence
  Description of Artificial Sequence: Synthetic oligonucleotide
  Sense strand starting at position 3045 of SEQ ID NO: 1562765
cgugacucuuaugcaugaa

SEQ ID NO: 1771146 - RNA, 19 nt, Artificial Sequence
  Description of Artificial Sequence: Synthetic oligonucleotide
  Antisense strand to SEQ ID NO: 1771145
uucaugcauaagagucacg

SEQ ID NO: 1771147 - RNA, 19 nt, Artificial Sequence
  Description of Artificial Sequence: Synthetic oligonucleotide
  Sense strand starting at position 3106 of SEQ ID NO: 1562765
uguggucugaacgaaagau

SEQ ID NO: 1771148 - RNA, 19 nt, Artificial Sequence
  Description of Artificial Sequence: Synthetic oligonucleotide
  Antisense strand to SEQ ID NO: 1771147
aucuuucguucagaccaca

SEQ ID NO: 1771149 - RNA, 19 nt, Artificial Sequence
  Description of Artificial Sequence: Synthetic oligonucleotide
  Sense strand starting at position 3153 of SEQ ID NO: 1562765
ugucauaucaaguaguuag

SEQ ID NO: 1771150 - RNA, 19 nt, Artificial Sequence
  Description of Artificial Sequence: Synthetic oligonucleotide
  Antisense strand to SEQ ID NO: 1771149
cuaacuacuugauaugaca

SEQ ID NO: 1771151 - RNA, 19 nt, Artificial Sequence
  Description of Artificial Sequence: Synthetic oligonucleotide
  Sense strand starting at position 3156 of SEQ ID NO: 1562765
cauaucaaguaguuagaag

SEQ ID NO: 1771152 - RNA, 19 nt, Artificial Sequence
  Description of Artificial Sequence: Synthetic oligonucleotide
  Antisense strand to SEQ ID NO: 1771151
cuucuaacuacuugauaug

SEQ ID NO: 1771153 - RNA, 19 nt, Artificial Sequence
  Description of Artificial Sequence: Synthetic oligonucleotide
  Sense strand starting at position 3693 of SEQ ID NO: 1562765
gucagucuauguguagaga

SEQ ID NO: 1771154 - RNA, 19 nt, Artificial Sequence
  Description of Artificial Sequence: Synthetic oligonucleotide
  Antisense strand to SEQ ID NO: 1771153
ucucuacacauagacugac

SEQ ID NO: 1771155 - RNA, 19 nt, Artificial Sequence
  Description of Artificial Sequence: Synthetic oligonucleotide
  Sense strand starting at position 3694 of SEQ ID NO: 1562765
ucagucuauguguagagaa

SEQ ID NO: 1771156 - RNA, 19 nt, Artificial Sequence
  Description of Artificial Sequence: Synthetic oligonucleotide
  Antisense strand to SEQ ID NO: 1771155
uucucuacacauagacuga

SEQ ID NO: 1771157 - RNA, 19 nt, Artificial Sequence
  Description of Artificial Sequence: Synthetic oligonucleotide
  Sense strand starting at position 3696 of SEQ ID NO: 1562765
agucuauguguagagaaca

SEQ ID NO: 1771158 - RNA, 19 nt, Artificial Sequence
  Description of Artificial Sequence: Synthetic oligonucleotide
  Antisense strand to SEQ ID NO: 1771157
uguucucuacacauagacu

SEQ ID NO: 1771159 - RNA, 19 nt, Artificial Sequence
  Description of Artificial Sequence: Synthetic oligonucleotide
  Sense strand starting at position 3717 of SEQ ID NO: 1562765
gcaagaaugcuggaugugu

SEQ ID NO: 1771160 - RNA, 19 nt, Artificial Sequence
  Description of Artificial Sequence: Synthetic oligonucleotide
  Antisense strand to SEQ ID NO: 1771159
acacauccagcauucuugc

SEQ ID NO: 1771161 - RNA, 19 nt, Artificial Sequence
  Description of Artificial Sequence: Synthetic oligonucleotide
  Sense strand starting at position 3725 of SEQ ID NO: 1562765
gcuggaugugugguuugca

SEQ ID NO: 1771162 - RNA, 19 nt, Artificial Sequence
  Description of Artificial Sequence: Synthetic oligonucleotide
  Antisense strand to SEQ ID NO: 1771161
ugcaaaccacacauccagc

SEQ ID NO: 1771163 - RNA, 19 nt, Artificial Sequence
  Description of Artificial Sequence: Synthetic oligonucleotide
  Sense strand starting at position 3754 of SEQ ID NO: 1562765
ccuacaaaguuucucaguu

SEQ ID NO: 1771164 - RNA, 19 nt, Artificial Sequence
  Description of Artificial Sequence: Synthetic oligonucleotide
  Antisense strand to SEQ ID NO: 1771163
aacugagaaacuuuguagg

SEQ ID NO: 1771165 - RNA, 19 nt, Artificial Sequence
  Description of Artificial Sequence: Synthetic oligonucleotide
  Sense strand starting at position 3755 of SEQ ID NO: 1562765
cuacaaaguuucucaguua

SEQ ID NO: 1771166 - RNA, 19 nt, Artificial Sequence
  Description of Artificial Sequence: Synthetic oligonucleotide
  Antisense strand to SEQ ID NO: 1771165
uaacugagaaacuuuguag

SEQ ID NO: 1771167 - RNA, 19 nt, Artificial Sequence
  Description of Artificial Sequence: Synthetic oligonucleotide
  Sense strand starting at position 3846 of SEQ ID NO: 1562765
uugagcaguuucucaagaa

SEQ ID NO: 1771168 - RNA, 19 nt, Artificial Sequence
  Description of Artificial Sequence: Synthetic oligonucleotide
  Antisense strand to SEQ ID NO: 1771167
uucuugagaaacugcucaa

SEQ ID NO: 1771169 - RNA, 19 nt, Artificial Sequence
  Description of Artificial Sequence: Synthetic oligonucleotide
  Sense strand starting at position 3850 of SEQ ID NO: 1562765
gcaguuucucaagaaguaa

SEQ ID NO: 1771170 - RNA, 19 nt, Artificial Sequence
  Description of Artificial Sequence: Synthetic oligonucleotide
  Antisense strand to SEQ ID NO: 1771169
uuacuucuugagaaacugc

SEQ ID NO: 1771171 - RNA, 19 nt, Artificial Sequence
  Description of Artificial Sequence: Synthetic oligonucleotide
  Sense strand starting at position 3861 of SEQ ID NO: 1562765
agaaguaaguauucuccuu

SEQ ID NO: 1771172 - RNA, 19 nt, Artificial Sequence
  Description of Artificial Sequence: Synthetic oligonucleotide
  Antisense strand to SEQ ID NO: 1771171
aaggagaauacuuacuucu

SEQ ID NO: 1771173 - RNA, 19 nt, Artificial Sequence
  Description of Artificial Sequence: Synthetic oligonucleotide
  Sense strand starting at position 3866 of SEQ ID NO: 1562765
uaaguauucuccuugaagg

SEQ ID NO: 1771174 - RNA, 19 nt, Artificial Sequence
  Description of Artificial Sequence: Synthetic oligonucleotide
  Antisense strand to SEQ ID NO: 1771173
ccuucaaggagaauacuua

SEQ ID NO: 1771175 - RNA, 19 nt, Artificial Sequence
  Description of Artificial Sequence: Synthetic oligonucleotide
  Sense strand starting at position 46 of SEQ ID NO: 1562766
acauuaaauguuggcaaau

SEQ ID NO: 1771176 - RNA, 19 nt, Artificial Sequence
  Description of Artificial Sequence: Synthetic oligonucleotide
  Antisense strand to SEQ ID NO: 1771175
auuugccaacauuuaaugu

SEQ ID NO: 1771177 - RNA, 19 nt, Artificial Sequence
  Description of Artificial Sequence: Synthetic oligonucleotide
  Sense strand starting at position 47 of SEQ ID NO: 1562766
cauuaaauguuggcaaaug

SEQ ID NO: 1771178 - RNA, 19 nt, Artificial Sequence
  Description of Artificial Sequence: Synthetic oligonucleotide
  Antisense strand to SEQ ID NO: 1771177
cauuugccaacauuuaaug

SEQ ID NO: 1771179 - RNA, 19 nt, Artificial Sequence
  Description of Artificial Sequence: Synthetic oligonucleotide
  Sense strand starting at position 95 of SEQ ID NO: 1562766
ucaauaauuugggaguuua

SEQ ID NO: 1771180 - RNA, 19 nt, Artificial Sequence
  Description of Artificial Sequence: Synthetic oligonucleotide
  Antisense strand to SEQ ID NO: 1771179
uaaacucccaaauuauuga

SEQ ID NO: 1771181 - RNA, 19 nt, Artificial Sequence
  Description of Artificial Sequence: Synthetic oligonucleotide
  Sense strand starting at position 156 of SEQ ID NO: 1562766
guuugucucagugugcuaa

SEQ ID NO: 1771182 - RNA, 19 nt, Artificial Sequence
  Description of Artificial Sequence: Synthetic oligonucleotide
  Antisense strand to SEQ ID NO: 1771181
uuagcacacugagacaaac

SEQ ID NO: 1771183 - RNA, 19 nt, Artificial Sequence
  Description of Artificial Sequence: Synthetic oligonucleotide
  Sense strand starting at position 339 of SEQ ID NO: 1562766
gguagauaagcauacaagu

SEQ ID NO: 1771184 - RNA, 19 nt, Artificial Sequence
  Description of Artificial Sequence: Synthetic oligonucleotide
  Antisense strand to SEQ ID NO: 1771183
acuuguaugcuuaucuacc

SEQ ID NO: 1771185 - RNA, 19 nt, Artificial Sequence
  Description of Artificial Sequence: Synthetic oligonucleotide
  Sense strand starting at position 371 of SEQ ID NO: 1562766
aggccuuugggaugaccaa

SEQ ID NO: 1771186 - RNA, 19 nt, Artificial Sequence
  Description of Artificial Sequence: Synthetic oligonucleotide
  Antisense strand to SEQ ID NO: 1771185
uuggucaucccaaaggccu

SEQ ID NO: 1771187 - RNA, 19 nt, Artificial Sequence
  Description of Artificial Sequence: Synthetic oligonucleotide
  Sense strand starting at position 523 of SEQ ID NO: 1562766
uaauguaaaugaguaucga

SEQ ID NO: 1771188 - RNA, 19 nt, Artificial Sequence
  Description of Artificial Sequence: Synthetic oligonucleotide
  Antisense strand to SEQ ID NO: 1771187
ucgauacucauuuacauua

SEQ ID NO: 1771189 - RNA, 19 nt, Artificial Sequence
  Description of Artificial Sequence: Synthetic oligonucleotide
  Sense strand starting at position 599 of SEQ ID NO: 1562766
aggucuguuccaggaugag

SEQ ID NO: 1771190 - RNA, 19 nt, Artificial Sequence
  Description of Artificial Sequence: Synthetic oligonucleotide
  Antisense strand to SEQ ID NO: 1771189
cucauccuggaacagaccu

SEQ ID NO: 1771191 - RNA, 19 nt, Artificial Sequence
  Description of Artificial Sequence: Synthetic oligonucleotide
  Sense strand starting at position 611 of SEQ ID NO: 1562766
ggaugagagccauguccaa

SEQ ID NO: 1771192 - RNA, 19 nt, Artificial Sequence
  Description of Artificial Sequence: Synthetic oligonucleotide
  Antisense strand to SEQ ID NO: 1771191
uuggacauggcucucaucc

SEQ ID NO: 1771193 - RNA, 19 nt, Artificial Sequence
  Description of Artificial Sequence: Synthetic oligonucleotide
  Sense strand starting at position 615 of SEQ ID NO: 1562766
gagagccauguccaagauu

SEQ ID NO: 1771194 - RNA, 19 nt, Artificial Sequence
  Description of Artificial Sequence: Synthetic oligonucleotide
  Antisense strand to SEQ ID NO: 1771193
aaucuuggacauggcucuc

SEQ ID NO: 1771195 - RNA, 19 nt, Artificial Sequence
  Description of Artificial Sequence: Synthetic oligonucleotide
  Sense strand starting at position 915 of SEQ ID NO: 1562766
gggauugaauccucucauu

SEQ ID NO: 1771196 - RNA, 19 nt, Artificial Sequence
  Description of Artificial Sequence: Synthetic oligonucleotide
  Antisense strand to SEQ ID NO: 1771195
aaugagaggauucaauccc

SEQ ID NO: 1771197 - RNA, 19 nt, Artificial Sequence
  Description of Artificial Sequence: Synthetic oligonucleotide
  Sense strand starting at position 1015 of SEQ ID NO: 1562766
agaagccuuguccaaucaa

SEQ ID NO: 1771198 - RNA, 19 nt, Artificial Sequence
  Description of Artificial Sequence: Synthetic oligonucleotide
  Antisense strand to SEQ ID NO: 1771197
uugauuggacaaggcuucu

SEQ ID NO: 1771199 - RNA, 19 nt, Artificial Sequence
  Description of Artificial Sequence: Synthetic oligonucleotide
  Sense strand starting at position 1312 of SEQ ID NO: 1562766
aaggcaaaccagugggauu

SEQ ID NO: 1771200 - RNA, 19 nt, Artificial Sequence
  Description of Artificial Sequence: Synthetic oligonucleotide
  Antisense strand to SEQ ID NO: 1771199
aaucccacugguuugccuu

SEQ ID NO: 1771201 - RNA, 19 nt, Artificial Sequence
  Description of Artificial Sequence: Synthetic oligonucleotide
  Sense strand starting at position 1360 of SEQ ID NO: 1562766
ucaacaaagcucugugaag

SEQ ID NO: 1771202 - RNA, 19 nt, Artificial Sequence
  Description of Artificial Sequence: Synthetic oligonucleotide
  Antisense strand to SEQ ID NO: 1771201
cuucacagagcuuuguuga

SEQ ID NO: 1771203 - RNA, 19 nt, Artificial Sequence
  Description of Artificial Sequence: Synthetic oligonucleotide
  Sense strand starting at position 1362 of SEQ ID NO: 1562766
aacaaagcucugugaagag

SEQ ID NO: 1771204 - RNA, 19 nt, Artificial Sequence
  Description of Artificial Sequence: Synthetic oligonucleotide
  Antisense strand to SEQ ID NO: 1771203
cucuucacagagcuuuguu

SEQ ID NO: 1771205 - RNA, 19 nt, Artificial Sequence
  Description of Artificial Sequence: Synthetic oligonucleotide
  Sense strand starting at position 2088 of SEQ ID NO: 1562766
gcuggcacuuauuuauuga

SEQ ID NO: 1771206 - RNA, 19 nt, Artificial Sequence
  Description of Artificial Sequence: Synthetic oligonucleotide
  Antisense strand to SEQ ID NO: 1771205
ucaauaaauaagugccagc

SEQ ID NO: 1771207 - RNA, 19 nt, Artificial Sequence
  Description of Artificial Sequence: Synthetic oligonucleotide
  Sense strand starting at position 2216 of SEQ ID NO: 1562766
aagugacgugcccaaggau

SEQ ID NO: 1771208 - RNA, 19 nt, Artificial Sequence
  Description of Artificial Sequence: Synthetic oligonucleotide
  Antisense strand to SEQ ID NO: 1771207
auccuugggcacgucacuu

SEQ ID NO: 1771209 - RNA, 19 nt, Artificial Sequence
  Description of Artificial Sequence: Synthetic oligonucleotide
  Sense strand starting at position 2248 of SEQ ID NO: 1562766
gaaugugagaccgaguauu

SEQ ID NO: 1771210 - RNA, 19 nt, Artificial Sequence
  Description of Artificial Sequence: Synthetic oligonucleotide
  Antisense strand to SEQ ID NO: 1771209
aauacucggucucacauuc

SEQ ID NO: 1771211 - RNA, 19 nt, Artificial Sequence
  Description of Artificial Sequence: Synthetic oligonucleotide
  Sense strand starting at position 2256 of SEQ ID NO: 1562766
gaccgaguauuacuccaag

SEQ ID NO: 1771212 - RNA, 19 nt, Artificial Sequence
  Description of Artificial Sequence: Synthetic oligonucleotide
  Antisense strand to SEQ ID NO: 1771211
cuuggaguaauacucgguc

SEQ ID NO: 1771213 - RNA, 19 nt, Artificial Sequence
  Description of Artificial Sequence: Synthetic oligonucleotide
  Sense strand starting at position 2417 of SEQ ID NO: 1562766
auuugaacauuuggcauau

SEQ ID NO: 1771214 - RNA, 19 nt, Artificial Sequence
  Description of Artificial Sequence: Synthetic oligonucleotide
  Antisense strand to SEQ ID NO: 1771213
auaugccaaauguucaaau

SEQ ID NO: 1771215 - RNA, 19 nt, Artificial Sequence
  Description of Artificial Sequence: Synthetic oligonucleotide
  Sense strand starting at position 2610 of SEQ ID NO: 1562766
uagaaauuacaguguauag

SEQ ID NO: 1771216 - RNA, 19 nt, Artificial Sequence
  Description of Artificial Sequence: Synthetic oligonucleotide
  Antisense strand to SEQ ID NO: 1771215
cuauacacuguaauuucua

SEQ ID NO: 1771217 - RNA, 19 nt, Artificial Sequence
  Description of Artificial Sequence: Synthetic oligonucleotide
  Sense strand starting at position 2622 of SEQ ID NO: 1562766
uguauagaacuugguuuga

SEQ ID NO: 1771218 - RNA, 19 nt, Artificial Sequence
  Description of Artificial Sequence: Synthetic oligonucleotide
  Antisense strand to SEQ ID NO: 1771217
ucaaaccaaguucuauaca

SEQ ID NO: 1771219 - RNA, 19 nt, Artificial Sequence
  Description of Artificial Sequence: Synthetic oligonucleotide
  Sense strand starting at position 2624 of SEQ ID NO: 1562766
uauagaacuugguuugaua

SEQ ID NO: 1771220 - RNA, 19 nt, Artificial Sequence
  Description of Artificial Sequence: Synthetic oligonucleotide
  Antisense strand to SEQ ID NO: 1771219
uaucaaaccaaguucuaua

SEQ ID NO: 1771221 - RNA, 19 nt, Artificial Sequence
  Description of Artificial Sequence: Synthetic oligonucleotide
  Sense strand starting at position 2626 of SEQ ID NO: 1562766
uagaacuugguuugauaug

SEQ ID NO: 1771222 - RNA, 19 nt, Artificial Sequence
  Description of Artificial Sequence: Synthetic oligonucleotide
  Antisense strand to SEQ ID NO: 1771221
cauaucaaaccaaguucua

SEQ ID NO: 1771223 - RNA, 19 nt, Artificial Sequence
  Description of Artificial Sequence: Synthetic oligonucleotide
  Sense strand starting at position 2631 of SEQ ID NO: 1562766
cuugguuugauaugaagaa

SEQ ID NO: 1771224 - RNA, 19 nt, Artificial Sequence
  Description of Artificial Sequence: Synthetic oligonucleotide
  Antisense strand to SEQ ID NO: 1771223
uucuucauaucaaaccaag

SEQ ID NO: 1771225 - RNA, 19 nt, Artificial Sequence
  Description of Artificial Sequence: Synthetic oligonucleotide
  Sense strand starting at position 3060 of SEQ ID NO: 1562766
cuguaaagcagagaaguua

SEQ ID NO: 1771226 - RNA, 19 nt, Artificial Sequence
  Description of Artificial Sequence: Synthetic oligonucleotide
  Antisense strand to SEQ ID NO: 1771225
uaacuucucugcuuuacag

SEQ ID NO: 1771227 - RNA, 19 nt, Artificial Sequence
  Description of Artificial Sequence: Synthetic oligonucleotide
  Sense strand starting at position 3230 of SEQ ID NO: 1562766
cgagguagucaugagacca

SEQ ID NO: 1771228 - RNA, 19 nt, Artificial Sequence
  Description of Artificial Sequence: Synthetic oligonucleotide
  Antisense strand to SEQ ID NO: 1771227
uggucucaugacuaccucg

SEQ ID NO: 1771229 - RNA, 19 nt, Artificial Sequence
  Description of Artificial Sequence: Synthetic oligonucleotide
  Sense strand starting at position 3281 of SEQ ID NO: 1562766
ucuaaucagugaucagaua

SEQ ID NO: 1771230 - RNA, 19 nt, Artificial Sequence
  Description of Artificial Sequence: Synthetic oligonucleotide
  Antisense strand to SEQ ID NO: 1771229
uaucugaucacugauuaga

SEQ ID NO: 1771231 - RNA, 19 nt, Artificial Sequence
  Description of Artificial Sequence: Synthetic oligonucleotide
  Sense strand starting at position 3368 of SEQ ID NO: 1562766
cugcacugaguagaagauu

SEQ ID NO: 1771232 - RNA, 19 nt, Artificial Sequence
  Description of Artificial Sequence: Synthetic oligonucleotide
  Antisense strand to SEQ ID NO: 1771231
aaucuucuacucagugcag

SEQ ID NO: 1771233 - RNA, 19 nt, Artificial Sequence
  Description of Artificial Sequence: Synthetic oligonucleotide
  Sense strand starting at position 3374 of SEQ ID NO: 1562766
ugaguagaagauugauucu

SEQ ID NO: 1771234 - RNA, 19 nt, Artificial Sequence
  Description of Artificial Sequence: Synthetic oligonucleotide
  Antisense strand to SEQ ID NO: 1771233
agaaucaaucuucuacuca

SEQ ID NO: 1771235 - RNA, 19 nt, Artificial Sequence
  Description of Artificial Sequence: Synthetic oligonucleotide
  Sense strand starting at position 3377 of SEQ ID NO: 1562766
guagaagauugauucuguu

SEQ ID NO: 1771236 - RNA, 19 nt, Artificial Sequence
  Description of Artificial Sequence: Synthetic oligonucleotide
  Antisense strand to SEQ ID NO: 1771235
aacagaaucaaucuucuac

SEQ ID NO: 1771237 - RNA, 19 nt, Artificial Sequence
  Description of Artificial Sequence: Synthetic oligonucleotide
  Sense strand starting at position 3395 of SEQ ID NO: 1562766
uucuuacaacugugagaug

SEQ ID NO: 1771238 - RNA, 19 nt, Artificial Sequence
  Description of Artificial Sequence: Synthetic oligonucleotide
  Antisense strand to SEQ ID NO: 1771237
caucucacaguuguaagaa

SEQ ID NO: 1771239 - RNA, 19 nt, Artificial Sequence
  Description of Artificial Sequence: Synthetic oligonucleotide
  Sense strand starting at position 3404 of SEQ ID NO: 1562766
cugugagaugcugagaugu

SEQ ID NO: 1771240 - RNA, 19 nt, Artificial Sequence
  Description of Artificial Sequence: Synthetic oligonucleotide
  Antisense strand to SEQ ID NO: 1771239
acaucucagcaucucacag

SEQ ID NO: 1771241 - RNA, 19 nt, Artificial Sequence
  Description of Artificial Sequence: Synthetic oligonucleotide
  Sense strand starting at position 3431 of SEQ ID NO: 1562766
cugagauaaaguugcugaa

SEQ ID NO: 1771242 - RNA, 19 nt, Artificial Sequence
  Description of Artificial Sequence: Synthetic oligonucleotide
  Antisense strand to SEQ ID NO: 1771241
uucagcaacuuuaucucag

SEQ ID NO: 1771243 - RNA, 19 nt, Artificial Sequence
  Description of Artificial Sequence: Synthetic oligonucleotide
  Sense strand starting at position 3433 of SEQ ID NO: 1562766
gagauaaaguugcugaaau

SEQ ID NO: 1771244 - RNA, 19 nt, Artificial Sequence
  Description of Artificial Sequence: Synthetic oligonucleotide
  Antisense strand to SEQ ID NO: 1771243
auuucagcaacuuuaucuc

SEQ ID NO: 1771245 - RNA, 19 nt, Artificial Sequence
  Description of Artificial Sequence: Synthetic oligonucleotide
  Sense strand starting at position 3659 of SEQ ID NO: 1562766
uaaauccauuggucaggau

SEQ ID NO: 1771246 - RNA, 19 nt, Artificial Sequence
  Description of Artificial Sequence: Synthetic oligonucleotide
  Antisense strand to SEQ ID NO: 1771245
auccugaccaauggauuua

SEQ ID NO: 1771247 - RNA, 19 nt, Artificial Sequence
  Description of Artificial Sequence: Synthetic oligonucleotide
  Sense strand starting at position 3736 of SEQ ID NO: 1562766
uggcucacaugauugaaau

SEQ ID NO: 1771248 - RNA, 19 nt, Artificial Sequence
  Description of Artificial Sequence: Synthetic oligonucleotide
  Antisense strand to SEQ ID NO: 1771247
auuucaaucaugugagcca

SEQ ID NO: 1771249 - RNA, 19 nt, Artificial Sequence
  Description of Artificial Sequence: Synthetic oligonucleotide
  Sense strand starting at position 3737 of SEQ ID NO: 1562766
ggcucacaugauugaaauu

SEQ ID NO: 1771250 - RNA, 19 nt, Artificial Sequence
  Description of Artificial Sequence: Synthetic oligonucleotide
  Antisense strand to SEQ ID NO: 1771249
aauuucaaucaugugagcc

SEQ ID NO: 1771251 - RNA, 19 nt, Artificial Sequence
  Description of Artificial Sequence: Synthetic oligonucleotide
  Sense strand starting at position 3774 of SEQ ID NO: 1562766
ggucacuuccagggaggua

SEQ ID NO: 1771252 - RNA, 19 nt, Artificial Sequence
  Description of Artificial Sequence: Synthetic oligonucleotide
  Antisense strand to SEQ ID NO: 1771251
uaccucccuggaagugacc

SEQ ID NO: 1771253 - RNA, 19 nt, Artificial Sequence
  Description of Artificial Sequence: Synthetic oligonucleotide
  Sense strand starting at position 3775 of SEQ ID NO: 1562766
gucacuuccagggagguaa

SEQ ID NO: 1771254 - RNA, 19 nt, Artificial Sequence
  Description of Artificial Sequence: Synthetic oligonucleotide
  Antisense strand to SEQ ID NO: 1771253
uuaccucccuggaagugac

SEQ ID NO: 1771255 - RNA, 19 nt, Artificial Sequence
  Description of Artificial Sequence: Synthetic oligonucleotide
  Sense strand starting at position 83 of SEQ ID NO: 1562767
ucucaaucgcuuuaagaug

SEQ ID NO: 1771256 - RNA, 19 nt, Artificial Sequence
  Description of Artificial Sequence: Synthetic oligonucleotide
  Antisense strand to SEQ ID NO: 1771255
caucuuaaagcgauugaga

SEQ ID NO: 1771257 - RNA, 19 nt, Artificial Sequence
  Description of Artificial Sequence: Synthetic oligonucleotide
  Sense strand starting at position 278 of SEQ ID NO: 1562767
agcaauuaugccuguaauu

SEQ ID NO: 1771258 - RNA, 19 nt, Artificial Sequence
  Description of Artificial Sequence: Synthetic oligonucleotide
  Antisense strand to SEQ ID NO: 1771257
aauuacaggcauaauugcu

SEQ ID NO: 1771259 - RNA, 19 nt, Artificial Sequence
  Description of Artificial Sequence: Synthetic oligonucleotide
  Sense strand starting at position 771 of SEQ ID NO: 1562767
ggcucucgcagcuuuguaa

SEQ ID NO: 1771260 - RNA, 19 nt, Artificial Sequence
  Description of Artificial Sequence: Synthetic oligonucleotide
  Antisense strand to SEQ ID NO: 1771259
uuacaaagcugcgagagcc

SEQ ID NO: 1771261 - RNA, 19 nt, Artificial Sequence
  Description of Artificial Sequence: Synthetic oligonucleotide
  Sense strand starting at position 772 of SEQ ID NO: 1562767
gcucucgcagcuuuguaaa

SEQ ID NO: 1771262 - RNA, 19 nt, Artificial Sequence
  Description of Artificial Sequence: Synthetic oligonucleotide
  Antisense strand to SEQ ID NO: 1771261
uuuacaaagcugcgagagc

SEQ ID NO: 1771263 - RNA, 19 nt, Artificial Sequence
  Description of Artificial Sequence: Synthetic oligonucleotide
  Sense strand starting at position 988 of SEQ ID NO: 1562767
guuaaaguuccagaugcaa

SEQ ID NO: 1771264 - RNA, 19 nt, Artificial Sequence
  Description of Artificial Sequence: Synthetic oligonucleotide
  Antisense strand to SEQ ID NO: 1771263
uugcaucuggaacuuuaac

SEQ ID NO: 1771265 - RNA, 19 nt, Artificial Sequence
  Description of Artificial Sequence: Synthetic oligonucleotide
  Sense strand starting at position 1023 of SEQ ID NO: 1562767
ucauguuaugcucaucaug

SEQ ID NO: 1771266 - RNA, 19 nt, Artificial Sequence
  Description of Artificial Sequence: Synthetic oligonucleotide
  Antisense strand to SEQ ID NO: 1771265
caugaugagcauaacauga

SEQ ID NO: 1771267 - RNA, 19 nt, Artificial Sequence
  Description of Artificial Sequence: Synthetic oligonucleotide
  Sense strand starting at position 1025 of SEQ ID NO: 1562767
auguuaugcucaucaugaa

SEQ ID NO: 1771268 - RNA, 19 nt, Artificial Sequence
  Description of Artificial Sequence: Synthetic oligonucleotide
  Antisense strand to SEQ ID NO: 1771267
uucaugaugagcauaacau

SEQ ID NO: 1771269 - RNA, 19 nt, Artificial Sequence
  Description of Artificial Sequence: Synthetic oligonucleotide
  Sense strand starting at position 1026 of SEQ ID NO: 1562767
uguuaugcucaucaugaag

SEQ ID NO: 1771270 - RNA, 19 nt, Artificial Sequence
  Description of Artificial Sequence: Synthetic oligonucleotide
  Antisense strand to SEQ ID NO: 1771269
cuucaugaugagcauaaca

SEQ ID NO: 1771271 - RNA, 19 nt, Artificial Sequence
  Description of Artificial Sequence: Synthetic oligonucleotide
  Sense strand starting at position 1063 of SEQ ID NO: 1562767
cugagaaagucugcuuuag

SEQ ID NO: 1771272 - RNA, 19 nt, Artificial Sequence
  Description of Artificial Sequence: Synthetic oligonucleotide
  Antisense strand to SEQ ID NO: 1771271
cuaaagcagacuuucucag

SEQ ID NO: 1771273 - RNA, 19 nt, Artificial Sequence
  Description of Artificial Sequence: Synthetic oligonucleotide
  Sense strand starting at position 1065 of SEQ ID NO: 1562767
gagaaagucugcuuuaguc

SEQ ID NO: 1771274 - RNA, 19 nt, Artificial Sequence
  Description of Artificial Sequence: Synthetic oligonucleotide
  Antisense strand to SEQ ID NO: 1771273
gacuaaagcagacuuucuc

SEQ ID NO: 1771275 - RNA, 19 nt, Artificial Sequence
  Description of Artificial Sequence: Synthetic oligonucleotide
  Sense strand starting at position 1067 of SEQ ID NO: 1562767
gaaagucugcuuuagucaa

SEQ ID NO: 1771276 - RNA, 19 nt, Artificial Sequence
  Description of Artificial Sequence: Synthetic oligonucleotide
  Antisense strand to SEQ ID NO: 1771275
uugacuaaagcagacuuuc

SEQ ID NO: 1771277 - RNA, 19 nt, Artificial Sequence
  Description of Artificial Sequence: Synthetic oligonucleotide
  Sense strand starting at position 1090 of SEQ ID NO: 1562767
aaagucuuucugggaguau

SEQ ID NO: 1771278 - RNA, 19 nt, Artificial Sequence
  Description of Artificial Sequence: Synthetic oligonucleotide
  Antisense strand to SEQ ID NO: 1771277
auacucccagaaagacuuu

SEQ ID NO: 1771279 - RNA, 19 nt, Artificial Sequence
  Description of Artificial Sequence: Synthetic oligonucleotide
  Sense strand starting at position 1217 of SEQ ID NO: 1562767
auggcacaugucuguaagu

SEQ ID NO: 1771280 - RNA, 19 nt, Artificial Sequence
  Description of Artificial Sequence: Synthetic oligonucleotide
  Antisense strand to SEQ ID NO: 1771279
acuuacagacaugugccau

SEQ ID NO: 1771281 - RNA, 19 nt, Artificial Sequence
  Description of Artificial Sequence: Synthetic oligonucleotide
  Sense strand starting at position 1414 of SEQ ID NO: 1562767
cugggcuaucugugagaca

SEQ ID NO: 1771282 - RNA, 19 nt, Artificial Sequence
  Description of Artificial Sequence: Synthetic oligonucleotide
  Antisense strand to SEQ ID NO: 1771281
ugucucacagauagcccag

SEQ ID NO: 1771283 - RNA, 19 nt, Artificial Sequence
  Description of Artificial Sequence: Synthetic oligonucleotide
  Sense strand starting at position 1447 of SEQ ID NO: 1562767
cagggugaugucuggcuca

SEQ ID NO: 1771284 - RNA, 19 nt, Artificial Sequence
  Description of Artificial Sequence: Synthetic oligonucleotide
  Antisense strand to SEQ ID NO: 1771283
ugagccagacaucacccug

SEQ ID NO: 1771285 - RNA, 19 nt, Artificial Sequence
  Description of Artificial Sequence: Synthetic oligonucleotide
  Sense strand starting at position 1665 of SEQ ID NO: 1562767
gggugccaggcauguaaau

SEQ ID NO: 1771286 - RNA, 19 nt, Artificial Sequence
  Description of Artificial Sequence: Synthetic oligonucleotide
  Antisense strand to SEQ ID NO: 1771285
auuuacaugccuggcaccc

SEQ ID NO: 1771287 - RNA, 19 nt, Artificial Sequence
  Description of Artificial Sequence: Synthetic oligonucleotide
  Sense strand starting at position 1667 of SEQ ID NO: 1562767
gugccaggcauguaaauua

SEQ ID NO: 1771288 - RNA, 19 nt, Artificial Sequence
  Description of Artificial Sequence: Synthetic oligonucleotide
  Antisense strand to SEQ ID NO: 1771287
uaauuuacaugccuggcac

SEQ ID NO: 1771289 - RNA, 19 nt, Artificial Sequence
  Description of Artificial Sequence: Synthetic oligonucleotide
  Sense strand starting at position 2118 of SEQ ID NO: 1562767
ggagcagucauaugacccu

SEQ ID NO: 1771290 - RNA, 19 nt, Artificial Sequence
  Description of Artificial Sequence: Synthetic oligonucleotide
  Antisense strand to SEQ ID NO: 1771289
agggucauaugacugcucc

SEQ ID NO: 1771291 - RNA, 19 nt, Artificial Sequence
  Description of Artificial Sequence: Synthetic oligonucleotide
  Sense strand starting at position 2461 of SEQ ID NO: 1562767
gcuggaauccucugcugac

SEQ ID NO: 1771292 - RNA, 19 nt, Artificial Sequence
  Description of Artificial Sequence: Synthetic oligonucleotide
  Antisense strand to SEQ ID NO: 1771291
gucagcagaggauuccagc

SEQ ID NO: 1771293 - RNA, 19 nt, Artificial Sequence
  Description of Artificial Sequence: Synthetic oligonucleotide
  Sense strand starting at position 2462 of SEQ ID NO: 1562767
cuggaauccucugcugacu

SEQ ID NO: 1771294 - RNA, 19 nt, Artificial Sequence
  Description of Artificial Sequence: Synthetic oligonucleotide
  Antisense strand to SEQ ID NO: 1771293
agucagcagaggauuccag

SEQ ID NO: 1771295 - RNA, 19 nt, Artificial Sequence
  Description of Artificial Sequence: Synthetic oligonucleotide
  Sense strand starting at position 2592 of SEQ ID NO: 1562767
gaggguagaucgcuucuau

SEQ ID NO: 1771296 - RNA, 19 nt, Artificial Sequence
  Description of Artificial Sequence: Synthetic oligonucleotide
  Antisense strand to SEQ ID NO: 1771295
auagaagcgaucuacccuc

SEQ ID NO: 1771297 - RNA, 19 nt, Artificial Sequence
  Description of Artificial Sequence: Synthetic oligonucleotide
  Sense strand starting at position 2646 of SEQ ID NO: 1562767
aguggugucacacauaaag

SEQ ID NO: 1771298 - RNA, 19 nt, Artificial Sequence
  Description of Artificial Sequence: Synthetic oligonucleotide
  Antisense strand to SEQ ID NO: 1771297
cuuuaugugugacaccacu

SEQ ID NO: 1771299 - RNA, 19 nt, Artificial Sequence
  Description of Artificial Sequence: Synthetic oligonucleotide
  Sense strand starting at position 2997 of SEQ ID NO: 1562767
cugugauucucauucuaag

SEQ ID NO: 1771300 - RNA, 19 nt, Artificial Sequence
  Description of Artificial Sequence: Synthetic oligonucleotide
  Antisense strand to SEQ ID NO: 1771299
cuuagaaugagaaucacag

SEQ ID NO: 1771301 - RNA, 19 nt, Artificial Sequence
  Description of Artificial Sequence: Synthetic oligonucleotide
  Sense strand starting at position 3121 of SEQ ID NO: 1562767
ugggaagauugcuuugagu

SEQ ID NO: 1771302 - RNA, 19 nt, Artificial Sequence
  Description of Artificial Sequence: Synthetic oligonucleotide
  Antisense strand to SEQ ID NO: 1771301
acucaaagcaaucuuccca

SEQ ID NO: 1771303 - RNA, 19 nt, Artificial Sequence
  Description of Artificial Sequence: Synthetic oligonucleotide
  Sense strand starting at position 3123 of SEQ ID NO: 1562767
ggaagauugcuuugaguuc

SEQ ID NO: 1771304 - RNA, 19 nt, Artificial Sequence
  Description of Artificial Sequence: Synthetic oligonucleotide
  Antisense strand to SEQ ID NO: 1771303
gaacucaaagcaaucuucc

SEQ ID NO: 1771305 - RNA, 19 nt, Artificial Sequence
  Description of Artificial Sequence: Synthetic oligonucleotide
  Sense strand starting at position 3129 of SEQ ID NO: 1562767
uugcuuugaguucgagacu

SEQ ID NO: 1771306 - RNA, 19 nt, Artificial Sequence
  Description of Artificial Sequence: Synthetic oligonucleotide
  Antisense strand to SEQ ID NO: 1771305
agucucgaacucaaagcaa

SEQ ID NO: 1771307 - RNA, 19 nt, Artificial Sequence
  Description of Artificial Sequence: Synthetic oligonucleotide
  Sense strand starting at position 3427 of SEQ ID NO: 1562767
gagauuguauuggaaagga

SEQ ID NO: 1771308 - RNA, 19 nt, Artificial Sequence
  Description of Artificial Sequence: Synthetic oligonucleotide
  Antisense strand to SEQ ID NO: 1771307
uccuuuccaauacaaucuc

SEQ ID NO: 1771309 - RNA, 19 nt, Artificial Sequence
  Description of Artificial Sequence: Synthetic oligonucleotide
  Sense strand starting at position 3431 of SEQ ID NO: 1562767
uuguauuggaaaggaucau

SEQ ID NO: 1771310 - RNA, 19 nt, Artificial Sequence
  Description of Artificial Sequence: Synthetic oligonucleotide
  Antisense strand to SEQ ID NO: 1771309
augauccuuuccaauacaa

SEQ ID NO: 1771311 - RNA, 19 nt, Artificial Sequence
  Description of Artificial Sequence: Synthetic oligonucleotide
  Sense strand starting at position 3585 of SEQ ID NO: 1562767
gaagaauggugacccugua

SEQ ID NO: 1771312 - RNA, 19 nt, Artificial Sequence
  Description of Artificial Sequence: Synthetic oligonucleotide
  Antisense strand to SEQ ID NO: 1771311
uacagggucaccauucuuc

SEQ ID NO: 1771313 - RNA, 19 nt, Artificial Sequence
  Description of Artificial Sequence: Synthetic oligonucleotide
  Sense strand starting at position 3598 of SEQ ID NO: 1562767
ccuguaacccaguggagua

SEQ ID NO: 1771314 - RNA, 19 nt, Artificial Sequence
  Description of Artificial Sequence: Synthetic oligonucleotide
  Antisense strand to SEQ ID NO: 1771313
uacuccacuggguuacagg

SEQ ID NO: 1771315 - RNA, 19 nt, Artificial Sequence
  Description of Artificial Sequence: Synthetic oligonucleotide
  Sense strand starting at position 3686 of SEQ ID NO: 1562767
aguaaaucauuagcaagaa

SEQ ID NO: 1771316 - RNA, 19 nt, Artificial Sequence
  Description of Artificial Sequence: Synthetic oligonucleotide
  Antisense strand to SEQ ID NO: 1771315
uucuugcuaaugauuuacu

SEQ ID NO: 1771317 - RNA, 19 nt, Artificial Sequence
  Description of Artificial Sequence: Synthetic oligonucleotide
  Sense strand starting at position 3718 of SEQ ID NO: 1562767
aggugaaaggccgacuuua

SEQ ID NO: 1771318 - RNA, 19 nt, Artificial Sequence
  Description of Artificial Sequence: Synthetic oligonucleotide
  Antisense strand to SEQ ID NO: 1771317
uaaagucggccuuucaccu

SEQ ID NO: 1771319 - RNA, 19 nt, Artificial Sequence
  Description of Artificial Sequence: Synthetic oligonucleotide
  Sense strand starting at position 3769 of SEQ ID NO: 1562767
aagguuguccuaggcagau

SEQ ID NO: 1771320 - RNA, 19 nt, Artificial Sequence
  Description of Artificial Sequence: Synthetic oligonucleotide
  Antisense strand to SEQ ID NO: 1771319
aucugccuaggacaaccuu

SEQ ID NO: 1771321 - RNA, 19 nt, Artificial Sequence
  Description of Artificial Sequence: Synthetic oligonucleotide
  Sense strand starting at position 3771 of SEQ ID NO: 1562767
gguuguccuaggcagauaa

SEQ ID NO: 1771322 - RNA, 19 nt, Artificial Sequence
  Description of Artificial Sequence: Synthetic oligonucleotide
  Antisense strand to SEQ ID NO: 1771321
uuaucugccuaggacaacc

SEQ ID NO: 1771323 - RNA, 19 nt, Artificial Sequence
  Description of Artificial Sequence: Synthetic oligonucleotide
  Sense strand starting at position 3799 of SEQ ID NO: 1562767
gguaaucucuuggcacugu

SEQ ID NO: 1771324 - RNA, 19 nt, Artificial Sequence
  Description of Artificial Sequence: Synthetic oligonucleotide
  Antisense strand to SEQ ID NO: 1771323
acagugccaagagauuacc

SEQ ID NO: 1771325 - RNA, 19 nt, Artificial Sequence
  Description of Artificial Sequence: Synthetic oligonucleotide
  Sense strand starting at position 3809 of SEQ ID NO: 1562767
uggcacuguccucagaaga

SEQ ID NO: 1771326 - RNA, 19 nt, Artificial Sequence
  Description of Artificial Sequence: Synthetic oligonucleotide
  Antisense strand to SEQ ID NO: 1771325
ucuucugaggacagugcca

SEQ ID NO: 1771327 - RNA, 19 nt, Artificial Sequence
  Description of Artificial Sequence: Synthetic oligonucleotide
  Sense strand starting at position 3831 of SEQ ID NO: 1562767
gguaaaucugucugggucu

SEQ ID NO: 1771328 - RNA, 19 nt, Artificial Sequence
  Description of Artificial Sequence: Synthetic oligonucleotide
  Antisense strand to SEQ ID NO: 1771327
agacccagacagauuuacc

SEQ ID NO: 1771329 - RNA, 19 nt, Artificial Sequence
  Description of Artificial Sequence: Synthetic oligonucleotide
  Sense strand starting at position 3883 of SEQ ID NO: 1562767
gguugaucuuuccuggaua

SEQ ID NO: 1771330 - RNA, 19 nt, Artificial Sequence
  Description of Artificial Sequence: Synthetic oligonucleotide
  Antisense strand to SEQ ID NO: 1771329
uauccaggaaagaucaacc

SEQ ID NO: 1771331 - RNA, 19 nt, Artificial Sequence
  Description of Artificial Sequence: Synthetic oligonucleotide
  Sense strand starting at position 3885 of SEQ ID NO: 1562767
uugaucuuuccuggauauu

SEQ ID NO: 1771332 - RNA, 19 nt, Artificial Sequence
  Description of Artificial Sequence: Synthetic oligonucleotide
  Antisense strand to SEQ ID NO: 1771331
aauauccaggaaagaucaa

SEQ ID NO: 1771333 - RNA, 19 nt, Artificial Sequence
  Description of Artificial Sequence: Synthetic oligonucleotide
  Sense strand starting at position 3898 of SEQ ID NO: 1562767
gauauuugaugagauuacu

SEQ ID NO: 1771334 - RNA, 19 nt, Artificial Sequence
  Description of Artificial Sequence: Synthetic oligonucleotide
  Antisense strand to SEQ ID NO: 1771333
aguaaucucaucaaauauc

SEQ ID NO: 1771335 - RNA, 19 nt, Artificial Sequence
  Description of Artificial Sequence: Synthetic oligonucleotide
  Sense strand starting at position 212 of SEQ ID NO: 1562768
uuucuaucaggugaacacu

SEQ ID NO: 1771336 - RNA, 19 nt, Artificial Sequence
  Description of Artificial Sequence: Synthetic oligonucleotide
  Antisense strand to SEQ ID NO: 1771335
aguguucaccugauagaaa

SEQ ID NO: 1771337 - RNA, 19 nt, Artificial Sequence
  Description of Artificial Sequence: Synthetic oligonucleotide
  Sense strand starting at position 221 of SEQ ID NO: 1562768
ggugaacacuauccaauag

SEQ ID NO: 1771338 - RNA, 19 nt, Artificial Sequence
  Description of Artificial Sequence: Synthetic oligonucleotide
  Antisense strand to SEQ ID NO: 1771337
cuauuggauaguguucacc

SEQ ID NO: 1771339 - RNA, 19 nt, Artificial Sequence
  Description of Artificial Sequence: Synthetic oligonucleotide
  Sense strand starting at position 276 of SEQ ID NO: 1562768
acaugcauguuguuaagaa

SEQ ID NO: 1771340 - RNA, 19 nt, Artificial Sequence
  Description of Artificial Sequence: Synthetic oligonucleotide
  Antisense strand to SEQ ID NO: 1771339
uucuuaacaacaugcaugu

SEQ ID NO: 1771341 - RNA, 19 nt, Artificial Sequence
  Description of Artificial Sequence: Synthetic oligonucleotide
  Sense strand starting at position 284 of SEQ ID NO: 1562768
guuguuaagaauggcuuua

SEQ ID NO: 1771342 - RNA, 19 nt, Artificial Sequence
  Description of Artificial Sequence: Synthetic oligonucleotide
  Antisense strand to SEQ ID NO: 1771341
uaaagccauucuuaacaac

SEQ ID NO: 1771343 - RNA, 19 nt, Artificial Sequence
  Description of Artificial Sequence: Synthetic oligonucleotide
  Sense strand starting at position 286 of SEQ ID NO: 1562768
uguuaagaauggcuuuacu

SEQ ID NO: 1771344 - RNA, 19 nt, Artificial Sequence
  Description of Artificial Sequence: Synthetic oligonucleotide
  Antisense strand to SEQ ID NO: 1771343
aguaaagccauucuuaaca

SEQ ID NO: 1771345 - RNA, 19 nt, Artificial Sequence
  Description of Artificial Sequence: Synthetic oligonucleotide
  Sense strand starting at position 307 of SEQ ID NO: 1562768
aaagaaguguacguuaaca

SEQ ID NO: 1771346 - RNA, 19 nt, Artificial Sequence
  Description of Artificial Sequence: Synthetic oligonucleotide
  Antisense strand to SEQ ID NO: 1771345
uguuaacguacacuucuuu

SEQ ID NO: 1771347 - RNA, 19 nt, Artificial Sequence
  Description of Artificial Sequence: Synthetic oligonucleotide
  Sense strand starting at position 309 of SEQ ID NO: 1562768
agaaguguacguuaacaua

SEQ ID NO: 1771348 - RNA, 19 nt, Artificial Sequence
  Description of Artificial Sequence: Synthetic oligonucleotide
  Antisense strand to SEQ ID NO: 1771347
uauguuaacguacacuucu

SEQ ID NO: 1771349 - RNA, 19 nt, Artificial Sequence
  Description of Artificial Sequence: Synthetic oligonucleotide
  Sense strand starting at position 397 of SEQ ID NO: 1562768
gauccaauucuguggagga

SEQ ID NO: 1771350 - RNA, 19 nt, Artificial Sequence
  Description of Artificial Sequence: Synthetic oligonucleotide
  Antisense strand to SEQ ID NO: 1771349
uccuccacagaauuggauc

SEQ ID NO: 1771351 - RNA, 19 nt, Artificial Sequence
  Description of Artificial Sequence: Synthetic oligonucleotide
  Sense strand starting at position 913 of SEQ ID NO: 1562768
gggaacuugguuugccaaa

SEQ ID NO: 1771352 - RNA, 19 nt, Artificial Sequence
  Description of Artificial Sequence: Synthetic oligonucleotide
  Antisense strand to SEQ ID NO: 1771351
uuuggcaaaccaaguuccc

SEQ ID NO: 1771353 - RNA, 19 nt, Artificial Sequence
  Description of Artificial Sequence: Synthetic oligonucleotide
  Sense strand starting at position 915 of SEQ ID NO: 1562768
gaacuugguuugccaaagu

SEQ ID NO: 1771354 - RNA, 19 nt, Artificial Sequence
  Description of Artificial Sequence: Synthetic oligonucleotide
  Antisense strand to SEQ ID NO: 1771353
acuuuggcaaaccaaguuc

SEQ ID NO: 1771355 - RNA, 19 nt, Artificial Sequence
  Description of Artificial Sequence: Synthetic oligonucleotide
  Sense strand starting at position 999 of SEQ ID NO: 1562768
uccauuuggcccugguaau

SEQ ID NO: 1771356 - RNA, 19 nt, Artificial Sequence
  Description of Artificial Sequence: Synthetic oligonucleotide
  Antisense strand to SEQ ID NO: 1771355
auuaccagggccaaaugga

SEQ ID NO: 1771357 - RNA, 19 nt, Artificial Sequence
  Description of Artificial Sequence: Synthetic oligonucleotide
  Sense strand starting at position 1000 of SEQ ID NO: 1562768
ccauuuggcccugguaauu

SEQ ID NO: 1771358 - RNA, 19 nt, Artificial Sequence
  Description of Artificial Sequence: Synthetic oligonucleotide
  Antisense strand to SEQ ID NO: 1771357
aauuaccagggccaaaugg

SEQ ID NO: 1771359 - RNA, 19 nt, Artificial Sequence
  Description of Artificial Sequence: Synthetic oligonucleotide
  Sense strand starting at position 1174 of SEQ ID NO: 1562768
gcaggauuacgagauguaa

SEQ ID NO: 1771360 - RNA, 19 nt, Artificial Sequence
  Description of Artificial Sequence: Synthetic oligonucleotide
  Antisense strand to SEQ ID NO: 1771359
uuacaucucguaauccugc

SEQ ID NO: 1771361 - RNA, 19 nt, Artificial Sequence
  Description of Artificial Sequence: Synthetic oligonucleotide
  Sense strand starting at position 1211 of SEQ ID NO: 1562768
acagauugaugguccaaug

SEQ ID NO: 1771362 - RNA, 19 nt, Artificial Sequence
  Description of Artificial Sequence: Synthetic oligonucleotide
  Antisense strand to SEQ ID NO: 1771361
cauuggaccaucaaucugu

SEQ ID NO: 1771363 - RNA, 19 nt, Artificial Sequence
  Description of Artificial Sequence: Synthetic oligonucleotide
  Sense strand starting at position 1245 of SEQ ID NO: 1562768
uaugauccugcugagauua

SEQ ID NO: 1771364 - RNA, 19 nt, Artificial Sequence
  Description of Artificial Sequence: Synthetic oligonucleotide
  Antisense strand to SEQ ID NO: 1771363
uaaucucagcaggaucaua

SEQ ID NO: 1771365 - RNA, 19 nt, Artificial Sequence
  Description of Artificial Sequence: Synthetic oligonucleotide
  Sense strand starting at position 1344 of SEQ ID NO: 1562768
ugcguacucggacacauuu

SEQ ID NO: 1771366 - RNA, 19 nt, Artificial Sequence
  Description of Artificial Sequence: Synthetic oligonucleotide
  Antisense strand to SEQ ID NO: 1771365
aaauguguccgaguacgca

SEQ ID NO: 1771367 - RNA, 19 nt, Artificial Sequence
  Description of Artificial Sequence: Synthetic oligonucleotide
  Sense strand starting at position 1425 of SEQ ID NO: 1562768
agggauuaauuggcaaauc

SEQ ID NO: 1771368 - RNA, 19 nt, Artificial Sequence
  Description of Artificial Sequence: Synthetic oligonucleotide
  Antisense strand to SEQ ID NO: 1771367
gauuugccaauuaaucccu

SEQ ID NO: 1771369 - RNA, 19 nt, Artificial Sequence
  Description of Artificial Sequence: Synthetic oligonucleotide
  Sense strand starting at position 1436 of SEQ ID NO: 1562768
ggcaaauccucacuaaagu

SEQ ID NO: 1771370 - RNA, 19 nt, Artificial Sequence
  Description of Artificial Sequence: Synthetic oligonucleotide
  Antisense strand to SEQ ID NO: 1771369
acuuuagugaggauuugcc

SEQ ID NO: 1771371 - RNA, 19 nt, Artificial Sequence
  Description of Artificial Sequence: Synthetic oligonucleotide
  Sense strand starting at position 1437 of SEQ ID NO: 1562768
gcaaauccucacuaaagug

SEQ ID NO: 1771372 - RNA, 19 nt, Artificial Sequence
  Description of Artificial Sequence: Synthetic oligonucleotide
  Antisense strand to SEQ ID NO: 1771371
cacuuuagugaggauuugc

SEQ ID NO: 1771373 - RNA, 19 nt, Artificial Sequence
  Description of Artificial Sequence: Synthetic oligonucleotide
  Sense strand starting at position 1525 of SEQ ID NO: 1562768
ggcaucgauccuggcagaa

SEQ ID NO: 1771374 - RNA, 19 nt, Artificial Sequence
  Description of Artificial Sequence: Synthetic oligonucleotide
  Antisense strand to SEQ ID NO: 1771373
uucugccaggaucgaugcc

SEQ ID NO: 1771375 - RNA, 19 nt, Artificial Sequence
  Description of Artificial Sequence: Synthetic oligonucleotide
  Sense strand starting at position 1651 of SEQ ID NO: 1562768
gccucaucauggcucauua

SEQ ID NO: 1771376 - RNA, 19 nt, Artificial Sequence
  Description of Artificial Sequence: Synthetic oligonucleotide
  Antisense strand to SEQ ID NO: 1771375
uaaugagccaugaugaggc

SEQ ID NO: 1771377 - RNA, 19 nt, Artificial Sequence
  Description of Artificial Sequence: Synthetic oligonucleotide
  Sense strand starting at position 1819 of SEQ ID NO: 1562768
acuuuaggcccucacgaaa

SEQ ID NO: 1771378 - RNA, 19 nt, Artificial Sequence
  Description of Artificial Sequence: Synthetic oligonucleotide
  Antisense strand to SEQ ID NO: 1771377
uuucgugagggccuaaagu

SEQ ID NO: 1771379 - RNA, 19 nt, Artificial Sequence
  Description of Artificial Sequence: Synthetic oligonucleotide
  Sense strand starting at position 1822 of SEQ ID NO: 1562768
uuaggcccucacgaaauau

SEQ ID NO: 1771380 - RNA, 19 nt, Artificial Sequence
  Description of Artificial Sequence: Synthetic oligonucleotide
  Antisense strand to SEQ ID NO: 1771379
auauuucgugagggccuaa

SEQ ID NO: 1771381 - RNA, 19 nt, Artificial Sequence
  Description of Artificial Sequence: Synthetic oligonucleotide
  Sense strand starting at position 1945 of SEQ ID NO: 1562768
ccgagaccucgcgucucaa

SEQ ID NO: 1771382 - RNA, 19 nt, Artificial Sequence
  Description of Artificial Sequence: Synthetic oligonucleotide
  Antisense strand to SEQ ID NO: 1771381
uugagacgcgaggucucgg

SEQ ID NO: 1771383 - RNA, 19 nt, Artificial Sequence
  Description of Artificial Sequence: Synthetic oligonucleotide
  Sense strand starting at position 2038 of SEQ ID NO: 1562768
ucggcucaugaauagucaa

SEQ ID NO: 1771384 - RNA, 19 nt, Artificial Sequence
  Description of Artificial Sequence: Synthetic oligonucleotide
  Antisense strand to SEQ ID NO: 1771383
uugacuauucaugagccga

SEQ ID NO: 1771385 - RNA, 19 nt, Artificial Sequence
  Description of Artificial Sequence: Synthetic oligonucleotide
  Sense strand starting at position 2041 of SEQ ID NO: 1562768
gcucaugaauagucaacga

SEQ ID NO: 1771386 - RNA, 19 nt, Artificial Sequence
  Description of Artificial Sequence: Synthetic oligonucleotide
  Antisense strand to SEQ ID NO: 1771385
ucguugacuauucaugagc

SEQ ID NO: 1771387 - RNA, 19 nt, Artificial Sequence
  Description of Artificial Sequence: Synthetic oligonucleotide
  Sense strand starting at position 2076 of SEQ ID NO: 1562768
accagagguuuccucauga

SEQ ID NO: 1771388 - RNA, 19 nt, Artificial Sequence
  Description of Artificial Sequence: Synthetic oligonucleotide
  Antisense strand to SEQ ID NO: 1771387
ucaugaggaaaccucuggu

SEQ ID NO: 1771389 - RNA, 19 nt, Artificial Sequence
  Description of Artificial Sequence: Synthetic oligonucleotide
  Sense strand starting at position 2992 of SEQ ID NO: 1562768
agagcuuuccaauacuuga

SEQ ID NO: 1771390 - RNA, 19 nt, Artificial Sequence
  Description of Artificial Sequence: Synthetic oligonucleotide
  Antisense strand to SEQ ID NO: 1771389
ucaaguauuggaaagcucu

SEQ ID NO: 1771391 - RNA, 19 nt, Artificial Sequence
  Description of Artificial Sequence: Synthetic oligonucleotide
  Sense strand starting at position 3187 of SEQ ID NO: 1562768
uuucucaccuguuuaggua

SEQ ID NO: 1771392 - RNA, 19 nt, Artificial Sequence
  Description of Artificial Sequence: Synthetic oligonucleotide
  Antisense strand to SEQ ID NO: 1771391
uaccuaaacaggugagaaa

SEQ ID NO: 1771393 - RNA, 19 nt, Artificial Sequence
  Description of Artificial Sequence: Synthetic oligonucleotide
  Sense strand starting at position 3191 of SEQ ID NO: 1562768
ucaccuguuuagguagaua

SEQ ID NO: 1771394 - RNA, 19 nt, Artificial Sequence
  Description of Artificial Sequence: Synthetic oligonucleotide
  Antisense strand to SEQ ID NO: 1771393
uaucuaccuaaacagguga

SEQ ID NO: 1771395 - RNA, 19 nt, Artificial Sequence
  Description of Artificial Sequence: Synthetic oligonucleotide
  Sense strand starting at position 3202 of SEQ ID NO: 1562768
gguagauauuucguauccu

SEQ ID NO: 1771396 - RNA, 19 nt, Artificial Sequence
  Description of Artificial Sequence: Synthetic oligonucleotide
  Antisense strand to SEQ ID NO: 1771395
aggauacgaaauaucuacc

SEQ ID NO: 1771397 - RNA, 19 nt, Artificial Sequence
  Description of Artificial Sequence: Synthetic oligonucleotide
  Sense strand starting at position 3320 of SEQ ID NO: 1562768
uuuguuucugcaggaaaga

SEQ ID NO: 1771398 - RNA, 19 nt, Artificial Sequence
  Description of Artificial Sequence: Synthetic oligonucleotide
  Antisense strand to SEQ ID NO: 1771397
ucuuuccugcagaaacaaa

SEQ ID NO: 1771399 - RNA, 19 nt, Artificial Sequence
  Description of Artificial Sequence: Synthetic oligonucleotide
  Sense strand starting at position 3321 of SEQ ID NO: 1562768
uuguuucugcaggaaagaa

SEQ ID NO: 1771400 - RNA, 19 nt, Artificial Sequence
  Description of Artificial Sequence: Synthetic oligonucleotide
  Antisense strand to SEQ ID NO: 1771399
uucuuuccugcagaaacaa

SEQ ID NO: 1771401 - RNA, 19 nt, Artificial Sequence
  Description of Artificial Sequence: Synthetic oligonucleotide
  Sense strand starting at position 3358 of SEQ ID NO: 1562768
uggcgagaacaugaguuua

SEQ ID NO: 1771402 - RNA, 19 nt, Artificial Sequence
  Description of Artificial Sequence: Synthetic oligonucleotide
  Antisense strand to SEQ ID NO: 1771401
uaaacucauguucucgcca

SEQ ID NO: 1771403 - RNA, 19 nt, Artificial Sequence
  Description of Artificial Sequence: Synthetic oligonucleotide
  Sense strand starting at position 3360 of SEQ ID NO: 1562768
gcgagaacaugaguuuaga

SEQ ID NO: 1771404 - RNA, 19 nt, Artificial Sequence
  Description of Artificial Sequence: Synthetic oligonucleotide
  Antisense strand to SEQ ID NO: 1771403
ucuaaacucauguucucgc

SEQ ID NO: 1771405 - RNA, 19 nt, Artificial Sequence
  Description of Artificial Sequence: Synthetic oligonucleotide
  Sense strand starting at position 3392 of SEQ ID NO: 1562768
aacugaaauuugggcugaa

SEQ ID NO: 1771406 - RNA, 19 nt, Artificial Sequence
  Description of Artificial Sequence: Synthetic oligonucleotide
  Antisense strand to SEQ ID NO: 1771405
uucagcccaaauuucaguu

SEQ ID NO: 1771407 - RNA, 19 nt, Artificial Sequence
  Description of Artificial Sequence: Synthetic oligonucleotide
  Sense strand starting at position 3546 of SEQ ID NO: 1562768
cuauacuuuccggaaguaa

SEQ ID NO: 1771408 - RNA, 19 nt, Artificial Sequence
  Description of Artificial Sequence: Synthetic oligonucleotide
  Antisense strand to SEQ ID NO: 1771407
uuacuuccggaaaguauag

SEQ ID NO: 1771409 - RNA, 19 nt, Artificial Sequence
  Description of Artificial Sequence: Synthetic oligonucleotide
  Sense strand starting at position 3661 of SEQ ID NO: 1562768
cugugcuggcuguucuaau

SEQ ID NO: 1771410 - RNA, 19 nt, Artificial Sequence
  Description of Artificial Sequence: Synthetic oligonucleotide
  Antisense strand to SEQ ID NO: 1771409
auuagaacagccagcacag

SEQ ID NO: 1771411 - RNA, 19 nt, Artificial Sequence
  Description of Artificial Sequence: Synthetic oligonucleotide
  Sense strand starting at position 3693 of SEQ ID NO: 1562768
cagaucugagcucagucaa

SEQ ID NO: 1771412 - RNA, 19 nt, Artificial Sequence
  Description of Artificial Sequence: Synthetic oligonucleotide
  Antisense strand to SEQ ID NO: 1771411
uugacugagcucagaucug

SEQ ID NO: 1771413 - RNA, 19 nt, Artificial Sequence
  Description of Artificial Sequence: Synthetic oligonucleotide
  Sense strand starting at position 3780 of SEQ ID NO: 1562768
acaguuauucguuauucug

SEQ ID NO: 1771414 - RNA, 19 nt, Artificial Sequence
  Description of Artificial Sequence: Synthetic oligonucleotide
  Antisense strand to SEQ ID NO: 1771413
cagaauaacgaauaacugu

SEQ ID NO: 1771415 - RNA, 19 nt, Artificial Sequence
  Description of Artificial Sequence: Synthetic oligonucleotide
  Sense strand starting at position 108 of SEQ ID NO: 1562769
uguauauuuccaugccucu

SEQ ID NO: 1771416 - RNA, 19 nt, Artificial Sequence
  Description of Artificial Sequence: Synthetic oligonucleotide
  Antisense strand to SEQ ID NO: 1771415
agaggcauggaaauauaca

SEQ ID NO: 1771417 - RNA, 19 nt, Artificial Sequence
  Description of Artificial Sequence: Synthetic oligonucleotide
  Sense strand starting at position 322 of SEQ ID NO: 1562769
ugaagacucuuauuaaacg

SEQ ID NO: 1771418 - RNA, 19 nt, Artificial Sequence
  Description of Artificial Sequence: Synthetic oligonucleotide
  Antisense strand to SEQ ID NO: 1771417
cguuuaauaagagucuuca

SEQ ID NO: 1771419 - RNA, 19 nt, Artificial Sequence
  Description of Artificial Sequence: Synthetic oligonucleotide
  Sense strand starting at position 435 of SEQ ID NO: 1562769
gcaggauuaaacgaauggu

SEQ ID NO: 1771420 - RNA, 19 nt, Artificial Sequence
  Description of Artificial Sequence: Synthetic oligonucleotide
  Antisense strand to SEQ ID NO: 1771419
accauucguuuaauccugc

SEQ ID NO: 1771421 - RNA, 19 nt, Artificial Sequence
  Description of Artificial Sequence: Synthetic oligonucleotide
  Sense strand starting at position 438 of SEQ ID NO: 1562769
ggauuaaacgaaugguaua

SEQ ID NO: 1771422 - RNA, 19 nt, Artificial Sequence
  Description of Artificial Sequence: Synthetic oligonucleotide
  Antisense strand to SEQ ID NO: 1771421
uauaccauucguuuaaucc

SEQ ID NO: 1771423 - RNA, 19 nt, Artificial Sequence
  Description of Artificial Sequence: Synthetic oligonucleotide
  Sense strand starting at position 528 of SEQ ID NO: 1562769
gaguaagggcuuuaguuuc

SEQ ID NO: 1771424 - RNA, 19 nt, Artificial Sequence
  Description of Artificial Sequence: Synthetic oligonucleotide
  Antisense strand to SEQ ID NO: 1771423
gaaacuaaagcccuuacuc

SEQ ID NO: 1771425 - RNA, 19 nt, Artificial Sequence
  Description of Artificial Sequence: Synthetic oligonucleotide
  Sense strand starting at position 540 of SEQ ID NO: 1562769
uaguuucucgaacaguuaa

SEQ ID NO: 1771426 - RNA, 19 nt, Artificial Sequence
  Description of Artificial Sequence: Synthetic oligonucleotide
  Antisense strand to SEQ ID NO: 1771425
uuaacuguucgagaaacua

SEQ ID NO: 1771427 - RNA, 19 nt, Artificial Sequence
  Description of Artificial Sequence: Synthetic oligonucleotide
  Sense strand starting at position 621 of SEQ ID NO: 1562769
uguggacagcuauacaaau

SEQ ID NO: 1771428 - RNA, 19 nt, Artificial Sequence
  Description of Artificial Sequence: Synthetic oligonucleotide
  Antisense strand to SEQ ID NO: 1771427
auuuguauagcuguccaca

SEQ ID NO: 1771429 - RNA, 19 nt, Artificial Sequence
  Description of Artificial Sequence: Synthetic oligonucleotide
  Sense strand starting at position 675 of SEQ ID NO: 1562769
aaggaacugucaucuugac

SEQ ID NO: 1771430 - RNA, 19 nt, Artificial Sequence
  Description of Artificial Sequence: Synthetic oligonucleotide
  Antisense strand to SEQ ID NO: 1771429
gucaagaugacaguuccuu

SEQ ID NO: 1771431 - RNA, 19 nt, Artificial Sequence
  Description of Artificial Sequence: Synthetic oligonucleotide
  Sense strand starting at position 793 of SEQ ID NO: 1562769
aagacagcucaguguauca

SEQ ID NO: 1771432 - RNA, 19 nt, Artificial Sequence
  Description of Artificial Sequence: Synthetic oligonucleotide
  Antisense strand to SEQ ID NO: 1771431
ugauacacugagcugucuu

SEQ ID NO: 1771433 - RNA, 19 nt, Artificial Sequence
  Description of Artificial Sequence: Synthetic oligonucleotide
  Sense strand starting at position 1002 of SEQ ID NO: 1562769
gauaacgcucugcaggaaa

SEQ ID NO: 1771434 - RNA, 19 nt, Artificial Sequence
  Description of Artificial Sequence: Synthetic oligonucleotide
  Antisense strand to SEQ ID NO: 1771433
uuuccugcagagcguuauc

SEQ ID NO: 1771435 - RNA, 19 nt, Artificial Sequence
  Description of Artificial Sequence: Synthetic oligonucleotide
  Sense strand starting at position 1117 of SEQ ID NO: 1562769
uuagcaacauggucucaaa

SEQ ID NO: 1771436 - RNA, 19 nt, Artificial Sequence
  Description of Artificial Sequence: Synthetic oligonucleotide
  Antisense strand to SEQ ID NO: 1771435
uuugagaccauguugcuaa

SEQ ID NO: 1771437 - RNA, 19 nt, Artificial Sequence
  Description of Artificial Sequence: Synthetic oligonucleotide
  Sense strand starting at position 1153 of SEQ ID NO: 1562769
gcaaucuguggguacacaa

SEQ ID NO: 1771438 - RNA, 19 nt, Artificial Sequence
  Description of Artificial Sequence: Synthetic oligonucleotide
  Antisense strand to SEQ ID NO: 1771437
uuguguacccacagauugc

SEQ ID NO: 1771439 - RNA, 19 nt, Artificial Sequence
  Description of Artificial Sequence: Synthetic oligonucleotide
  Sense strand starting at position 1277 of SEQ ID NO: 1562769
ggaccacacucauuguauu

SEQ ID NO: 1771440 - RNA, 19 nt, Artificial Sequence
  Description of Artificial Sequence: Synthetic oligonucleotide
  Antisense strand to SEQ ID NO: 1771439
aauacaaugaguguggucc

SEQ ID NO: 1771441 - RNA, 19 nt, Artificial Sequence
  Description of Artificial Sequence: Synthetic oligonucleotide
  Sense strand starting at position 1414 of SEQ ID NO: 1562769
cucucuuaucucugaaagg

SEQ ID NO: 1771442 - RNA, 19 nt, Artificial Sequence
  Description of Artificial Sequence: Synthetic oligonucleotide
  Antisense strand to SEQ ID NO: 1771441
ccuuucagagauaagagag

SEQ ID NO: 1771443 - RNA, 19 nt, Artificial Sequence
  Description of Artificial Sequence: Synthetic oligonucleotide
  Sense strand starting at position 1445 of SEQ ID NO: 1562769
caauaauggcccuggagua

SEQ ID NO: 1771444 - RNA, 19 nt, Artificial Sequence
  Description of Artificial Sequence: Synthetic oligonucleotide
  Antisense strand to SEQ ID NO: 1771443
uacuccagggccauuauug

SEQ ID NO: 1771445 - RNA, 19 nt, Artificial Sequence
  Description of Artificial Sequence: Synthetic oligonucleotide
  Sense strand starting at position 1464 of SEQ ID NO: 1562769
ggaagagacgucggaacau

SEQ ID NO: 1771446 - RNA, 19 nt, Artificial Sequence
  Description of Artificial Sequence: Synthetic oligonucleotide
  Antisense strand to SEQ ID NO: 1771445
auguuccgacgucucuucc

SEQ ID NO: 1771447 - RNA, 19 nt, Artificial Sequence
  Description of Artificial Sequence: Synthetic oligonucleotide
  Sense strand starting at position 2011 of SEQ ID NO: 1562769
gcugacgucagagaccaau

SEQ ID NO: 1771448 - RNA, 19 nt, Artificial Sequence
  Description of Artificial Sequence: Synthetic oligonucleotide
  Antisense strand to SEQ ID NO: 1771447
auuggucucugacgucagc

SEQ ID NO: 1771449 - RNA, 19 nt, Artificial Sequence
  Description of Artificial Sequence: Synthetic oligonucleotide
  Sense strand starting at position 2301 of SEQ ID NO: 1562769
ccaucuguagaguggagau

SEQ ID NO: 1771450 - RNA, 19 nt, Artificial Sequence
  Description of Artificial Sequence: Synthetic oligonucleotide
  Antisense strand to SEQ ID NO: 1771449
aucuccacucuacagaugg

SEQ ID NO: 1771451 - RNA, 19 nt, Artificial Sequence
  Description of Artificial Sequence: Synthetic oligonucleotide
  Sense strand starting at position 2331 of SEQ ID NO: 1562769
ccuuuaaggaguuauugug

SEQ ID NO: 1771452 - RNA, 19 nt, Artificial Sequence
  Description of Artificial Sequence: Synthetic oligonucleotide
  Antisense strand to SEQ ID NO: 1771451
cacaauaacuccuuaaagg

SEQ ID NO: 1771453 - RNA, 19 nt, Artificial Sequence
  Description of Artificial Sequence: Synthetic oligonucleotide
  Sense strand starting at position 2340 of SEQ ID NO: 1562769
aguuauugugaagaguuaa

SEQ ID NO: 1771454 - RNA, 19 nt, Artificial Sequence
  Description of Artificial Sequence: Synthetic oligonucleotide
  Antisense strand to SEQ ID NO: 1771453
uuaacucuucacaauaacu

SEQ ID NO: 1771455 - RNA, 19 nt, Artificial Sequence
  Description of Artificial Sequence: Synthetic oligonucleotide
  Sense strand starting at position 2362 of SEQ ID NO: 1562769
agguaacgagcucauuaaa

SEQ ID NO: 1771456 - RNA, 19 nt, Artificial Sequence
  Description of Artificial Sequence: Synthetic oligonucleotide
  Antisense strand to SEQ ID NO: 1771455
uuuaaugagcucguuaccu

SEQ ID NO: 1771457 - RNA, 19 nt, Artificial Sequence
  Description of Artificial Sequence: Synthetic oligonucleotide
  Sense strand starting at position 2371 of SEQ ID NO: 1562769
gcucauuaaagauguggau

SEQ ID NO: 1771458 - RNA, 19 nt, Artificial Sequence
  Description of Artificial Sequence: Synthetic oligonucleotide
  Antisense strand to SEQ ID NO: 1771457
auccacaucuuuaaugagc

SEQ ID NO: 1771459 - RNA, 19 nt, Artificial Sequence
  Description of Artificial Sequence: Synthetic oligonucleotide
  Sense strand starting at position 2810 of SEQ ID NO: 1562769
aacccaggucuuugugaca

SEQ ID NO: 1771460 - RNA, 19 nt, Artificial Sequence
  Description of Artificial Sequence: Synthetic oligonucleotide
  Antisense strand to SEQ ID NO: 1771459
ugucacaaagaccuggguu

SEQ ID NO: 1771461 - RNA, 19 nt, Artificial Sequence
  Description of Artificial Sequence: Synthetic oligonucleotide
  Sense strand starting at position 2894 of SEQ ID NO: 1562769
ugcucuguaccuuagaaag

SEQ ID NO: 1771462 - RNA, 19 nt, Artificial Sequence
  Description of Artificial Sequence: Synthetic oligonucleotide
  Antisense strand to SEQ ID NO: 1771461
cuuucuaagguacagagca

SEQ ID NO: 1771463 - RNA, 19 nt, Artificial Sequence
  Description of Artificial Sequence: Synthetic oligonucleotide
  Sense strand starting at position 2998 of SEQ ID NO: 1562769
uuuguuuaggcucaauaaa

SEQ ID NO: 1771464 - RNA, 19 nt, Artificial Sequence
  Description of Artificial Sequence: Synthetic oligonucleotide
  Antisense strand to SEQ ID NO: 1771463
uuuauugagccuaaacaaa

SEQ ID NO: 1771465 - RNA, 19 nt, Artificial Sequence
  Description of Artificial Sequence: Synthetic oligonucleotide
  Sense strand starting at position 3124 of SEQ ID NO: 1562769
aguaaugucccagaguuua

SEQ ID NO: 1771466 - RNA, 19 nt, Artificial Sequence
  Description of Artificial Sequence: Synthetic oligonucleotide
  Antisense strand to SEQ ID NO: 1771465
uaaacucugggacauuacu

SEQ ID NO: 1771467 - RNA, 19 nt, Artificial Sequence
  Description of Artificial Sequence: Synthetic oligonucleotide
  Sense strand starting at position 3132 of SEQ ID NO: 1562769
cccagaguuuaccucugaa

SEQ ID NO: 1771468 - RNA, 19 nt, Artificial Sequence
  Description of Artificial Sequence: Synthetic oligonucleotide
  Antisense strand to SEQ ID NO: 1771467
uucagagguaaacucuggg

SEQ ID NO: 1771469 - RNA, 19 nt, Artificial Sequence
  Description of Artificial Sequence: Synthetic oligonucleotide
  Sense strand starting at position 3135 of SEQ ID NO: 1562769
agaguuuaccucugaagag

SEQ ID NO: 1771470 - RNA, 19 nt, Artificial Sequence
  Description of Artificial Sequence: Synthetic oligonucleotide
  Antisense strand to SEQ ID NO: 1771469
cucuucagagguaaacucu

SEQ ID NO: 1771471 - RNA, 19 nt, Artificial Sequence
  Description of Artificial Sequence: Synthetic oligonucleotide
  Sense strand starting at position 3151 of SEQ ID NO: 1562769
gagaaaguugcugaccauu

SEQ ID NO: 1771472 - RNA, 19 nt, Artificial Sequence
  Description of Artificial Sequence: Synthetic oligonucleotide
  Antisense strand to SEQ ID NO: 1771471
aauggucagcaacuuucuc

SEQ ID NO: 1771473 - RNA, 19 nt, Artificial Sequence
  Description of Artificial Sequence: Synthetic oligonucleotide
  Sense strand starting at position 3165 of SEQ ID NO: 1562769
ccauuuggcucagccugaa

SEQ ID NO: 1771474 - RNA, 19 nt, Artificial Sequence
  Description of Artificial Sequence: Synthetic oligonucleotide
  Antisense strand to SEQ ID NO: 1771473
uucaggcugagccaaaugg

SEQ ID NO: 1771475 - RNA, 19 nt, Artificial Sequence
  Description of Artificial Sequence: Synthetic oligonucleotide
  Sense strand starting at position 3169 of SEQ ID NO: 1562769
uuggcucagccugaauaaa

SEQ ID NO: 1771476 - RNA, 19 nt, Artificial Sequence
  Description of Artificial Sequence: Synthetic oligonucleotide
  Antisense strand to SEQ ID NO: 1771475
uuuauucaggcugagccaa

SEQ ID NO: 1771477 - RNA, 19 nt, Artificial Sequence
  Description of Artificial Sequence: Synthetic oligonucleotide
  Sense strand starting at position 3216 of SEQ ID NO: 1562769
agaggaugccagugagagu

SEQ ID NO: 1771478 - RNA, 19 nt, Artificial Sequence
  Description of Artificial Sequence: Synthetic oligonucleotide
  Antisense strand to SEQ ID NO: 1771477
acucucacuggcauccucu

SEQ ID NO: 1771479 - RNA, 19 nt, Artificial Sequence
  Description of Artificial Sequence: Synthetic oligonucleotide
  Sense strand starting at position 3366 of SEQ ID NO: 1562769
caucgcucugaguagagau

SEQ ID NO: 1771480 - RNA, 19 nt, Artificial Sequence
  Description of Artificial Sequence: Synthetic oligonucleotide
  Antisense strand to SEQ ID NO: 1771479
aucucuacucagagcgaug

SEQ ID NO: 1771481 - RNA, 19 nt, Artificial Sequence
  Description of Artificial Sequence: Synthetic oligonucleotide
  Sense strand starting at position 3405 of SEQ ID NO: 1562769
auaucuguguacgcauuua

SEQ ID NO: 1771482 - RNA, 19 nt, Artificial Sequence
  Description of Artificial Sequence: Synthetic oligonucleotide
  Antisense strand to SEQ ID NO: 1771481
uaaaugcguacacagauau

SEQ ID NO: 1771483 - RNA, 19 nt, Artificial Sequence
  Description of Artificial Sequence: Synthetic oligonucleotide
  Sense strand starting at position 3435 of SEQ ID NO: 1562769
agcauuccuguguacauca

SEQ ID NO: 1771484 - RNA, 19 nt, Artificial Sequence
  Description of Artificial Sequence: Synthetic oligonucleotide
  Antisense strand to SEQ ID NO: 1771483
ugauguacacaggaaugcu

SEQ ID NO: 1771485 - RNA, 19 nt, Artificial Sequence
  Description of Artificial Sequence: Synthetic oligonucleotide
  Sense strand starting at position 3440 of SEQ ID NO: 1562769
uccuguguacaucagaacu

SEQ ID NO: 1771486 - RNA, 19 nt, Artificial Sequence
  Description of Artificial Sequence: Synthetic oligonucleotide
  Antisense strand to SEQ ID NO: 1771485
aguucugauguacacagga

SEQ ID NO: 1771487 - RNA, 19 nt, Artificial Sequence
  Description of Artificial Sequence: Synthetic oligonucleotide
  Sense strand starting at position 3458 of SEQ ID NO: 1562769
ucucuacccucugugagaa

SEQ ID NO: 1771488 - RNA, 19 nt, Artificial Sequence
  Description of Artificial Sequence: Synthetic oligonucleotide
  Antisense strand to SEQ ID NO: 1771487
uucucacagaggguagaga

SEQ ID NO: 1771489 - RNA, 19 nt, Artificial Sequence
  Description of Artificial Sequence: Synthetic oligonucleotide
  Sense strand starting at position 3459 of SEQ ID NO: 1562769
cucuacccucugugagaaa

SEQ ID NO: 1771490 - RNA, 19 nt, Artificial Sequence
  Description of Artificial Sequence: Synthetic oligonucleotide
  Antisense strand to SEQ ID NO: 1771489
uuucucacagaggguagag

SEQ ID NO: 1771491 - RNA, 19 nt, Artificial Sequence
  Description of Artificial Sequence: Synthetic oligonucleotide
  Sense strand starting at position 3836 of SEQ ID NO: 1562769
gcuaauucugagcacuuaa

SEQ ID NO: 1771492 - RNA, 19 nt, Artificial Sequence
  Description of Artificial Sequence: Synthetic oligonucleotide
  Antisense strand to SEQ ID NO: 1771491
uuaagugcucagaauuagc

SEQ ID NO: 1771493 - RNA, 19 nt, Artificial Sequence
  Description of Artificial Sequence: Synthetic oligonucleotide
  Sense strand starting at position 3889 of SEQ ID NO: 1562769
ucuguuguagacugagaau

SEQ ID NO: 1771494 - RNA, 19 nt, Artificial Sequence
  Description of Artificial Sequence: Synthetic oligonucleotide
  Antisense strand to SEQ ID NO: 1771493
auucucagucuacaacaga

SEQ ID NO: 1771495 - RNA, 19 nt, Artificial Sequence
  Description of Artificial Sequence: Synthetic oligonucleotide
  Sense strand starting at position 222 of SEQ ID NO: 1562770
cugggugaggacuguuauu

SEQ ID NO: 1771496 - RNA, 19 nt, Artificial Sequence
  Description of Artificial Sequence: Synthetic oligonucleotide
  Antisense strand to SEQ ID NO: 1771495
aauaacaguccucacccag

SEQ ID NO: 1771497 - RNA, 19 nt, Artificial Sequence
  Description of Artificial Sequence: Synthetic oligonucleotide
  Sense strand starting at position 288 of SEQ ID NO: 1562770
uuuggauccuuauuaggaa

SEQ ID NO: 1771498 - RNA, 19 nt, Artificial Sequence
  Description of Artificial Sequence: Synthetic oligonucleotide
  Antisense strand to SEQ ID NO: 1771497
uuccuaauaaggauccaaa

SEQ ID NO: 1771499 - RNA, 19 nt, Artificial Sequence
  Description of Artificial Sequence: Synthetic oligonucleotide
  Sense strand starting at position 326 of SEQ ID NO: 1562770
gauggaaguaugggugcau

SEQ ID NO: 1771500 - RNA, 19 nt, Artificial Sequence
  Description of Artificial Sequence: Synthetic oligonucleotide
  Antisense strand to SEQ ID NO: 1771499
augcacccauacuuccauc

SEQ ID NO: 1771501 - RNA, 19 nt, Artificial Sequence
  Description of Artificial Sequence: Synthetic oligonucleotide
  Sense strand starting at position 330 of SEQ ID NO: 1562770
gaaguaugggugcauggaa

SEQ ID NO: 1771502 - RNA, 19 nt, Artificial Sequence
  Description of Artificial Sequence: Synthetic oligonucleotide
  Antisense strand to SEQ ID NO: 1771501
uuccaugcacccauacuuc

SEQ ID NO: 1771503 - RNA, 19 nt, Artificial Sequence
  Description of Artificial Sequence: Synthetic oligonucleotide
  Sense strand starting at position 397 of SEQ ID NO: 1562770
gaauacagucuggguauca

SEQ ID NO: 1771504 - RNA, 19 nt, Artificial Sequence
  Description of Artificial Sequence: Synthetic oligonucleotide
  Antisense strand to SEQ ID NO: 1771503
ugauacccagacuguauuc

SEQ ID NO: 1771505 - RNA, 19 nt, Artificial Sequence
  Description of Artificial Sequence: Synthetic oligonucleotide
  Sense strand starting at position 406 of SEQ ID NO: 1562770
cuggguaucagguaauauu

SEQ ID NO: 1771506 - RNA, 19 nt, Artificial Sequence
  Description of Artificial Sequence: Synthetic oligonucleotide
  Antisense strand to SEQ ID NO: 1771505
aauauuaccugauacccag

SEQ ID NO: 1771507 - RNA, 19 nt, Artificial Sequence
  Description of Artificial Sequence: Synthetic oligonucleotide
  Sense strand starting at position 456 of SEQ ID NO: 1562770
ucguuaggugugguaaugu

SEQ ID NO: 1771508 - RNA, 19 nt, Artificial Sequence
  Description of Artificial Sequence: Synthetic oligonucleotide
  Antisense strand to SEQ ID NO: 1771507
acauuaccacaccuaacga

SEQ ID NO: 1771509 - RNA, 19 nt, Artificial Sequence
  Description of Artificial Sequence: Synthetic oligonucleotide
  Sense strand starting at position 497 of SEQ ID NO: 1562770
uagagauguugcuugauac

SEQ ID NO: 1771510 - RNA, 19 nt, Artificial Sequence
  Description of Artificial Sequence: Synthetic oligonucleotide
  Antisense strand to SEQ ID NO: 1771509
guaucaagcaacaucucua

SEQ ID NO: 1771511 - RNA, 19 nt, Artificial Sequence
  Description of Artificial Sequence: Synthetic oligonucleotide
  Sense strand starting at position 498 of SEQ ID NO: 1562770
agagauguugcuugauacu

SEQ ID NO: 1771512 - RNA, 19 nt, Artificial Sequence
  Description of Artificial Sequence: Synthetic oligonucleotide
  Antisense strand to SEQ ID NO: 1771511
aguaucaagcaacaucucu

SEQ ID NO: 1771513 - RNA, 19 nt, Artificial Sequence
  Description of Artificial Sequence: Synthetic oligonucleotide
  Sense strand starting at position 505 of SEQ ID NO: 1562770
uugcuugauacuggugaga

SEQ ID NO: 1771514 - RNA, 19 nt, Artificial Sequence
  Description of Artificial Sequence: Synthetic oligonucleotide
  Antisense strand to SEQ ID NO: 1771513
ucucaccaguaucaagcaa

SEQ ID NO: 1771515 - RNA, 19 nt, Artificial Sequence
  Description of Artificial Sequence: Synthetic oligonucleotide
  Sense strand starting at position 910 of SEQ ID NO: 1562770
cggcaaaguauugauaauu

SEQ ID NO: 1771516 - RNA, 19 nt, Artificial Sequence
  Description of Artificial Sequence: Synthetic oligonucleotide
  Antisense strand to SEQ ID NO: 1771515
aauuaucaauacuuugccg

SEQ ID NO: 1771517 - RNA, 19 nt, Artificial Sequence
  Description of Artificial Sequence: Synthetic oligonucleotide
  Sense strand starting at position 942 of SEQ ID NO: 1562770
auggcauaugaggguucau

SEQ ID NO: 1771518 - RNA, 19 nt, Artificial Sequence
  Description of Artificial Sequence: Synthetic oligonucleotide
  Antisense strand to SEQ ID NO: 1771517
augaacccucauaugccau

SEQ ID NO: 1771519 - RNA, 19 nt, Artificial Sequence
  Description of Artificial Sequence: Synthetic oligonucleotide
  Sense strand starting at position 1465 of SEQ ID NO: 1562770
guagaaaugucauugucug

SEQ ID NO: 1771520 - RNA, 19 nt, Artificial Sequence
  Description of Artificial Sequence: Synthetic oligonucleotide
  Antisense strand to SEQ ID NO: 1771519
cagacaaugacauuucuac

SEQ ID NO: 1771521 - RNA, 19 nt, Artificial Sequence
  Description of Artificial Sequence: Synthetic oligonucleotide
  Sense strand starting at position 1469 of SEQ ID NO: 1562770
aaaugucauugucuggauu

SEQ ID NO: 1771522 - RNA, 19 nt, Artificial Sequence
  Description of Artificial Sequence: Synthetic oligonucleotide
  Antisense strand to SEQ ID NO: 1771521
aauccagacaaugacauuu

SEQ ID NO: 1771523 - RNA, 19 nt, Artificial Sequence
  Description of Artificial Sequence: Synthetic oligonucleotide
  Sense strand starting at position 1470 of SEQ ID NO: 1562770
aaugucauugucuggauua

SEQ ID NO: 1771524 - RNA, 19 nt, Artificial Sequence
  Description of Artificial Sequence: Synthetic oligonucleotide
  Antisense strand to SEQ ID NO: 1771523
uaauccagacaaugacauu

SEQ ID NO: 1771525 - RNA, 19 nt, Artificial Sequence
  Description of Artificial Sequence: Synthetic oligonucleotide
  Sense strand starting at position 1544 of SEQ ID NO: 1562770
cugggauccucacugaaca

SEQ ID NO: 1771526 - RNA, 19 nt, Artificial Sequence
  Description of Artificial Sequence: Synthetic oligonucleotide
  Antisense strand to SEQ ID NO: 1771525
uguucagugaggaucccag

SEQ ID NO: 1771527 - RNA, 19 nt, Artificial Sequence
  Description of Artificial Sequence: Synthetic oligonucleotide
  Sense strand starting at position 1575 of SEQ ID NO: 1562770
guggcuuaccugggaagga

SEQ ID NO: 1771528 - RNA, 19 nt, Artificial Sequence
  Description of Artificial Sequence: Synthetic oligonucleotide
  Antisense strand to SEQ ID NO: 1771527
uccuucccagguaagccac

SEQ ID NO: 1771529 - RNA, 19 nt, Artificial Sequence
  Description of Artificial Sequence: Synthetic oligonucleotide
  Sense strand starting at position 1665 of SEQ ID NO: 1562770
auaauuccaccuggcaaga

SEQ ID NO: 1771530 - RNA, 19 nt, Artificial Sequence
  Description of Artificial Sequence: Synthetic oligonucleotide
  Antisense strand to SEQ ID NO: 1771529
ucuugccagguggaauuau

SEQ ID NO: 1771531 - RNA, 19 nt, Artificial Sequence
  Description of Artificial Sequence: Synthetic oligonucleotide
  Sense strand starting at position 1712 of SEQ ID NO: 1562770
uccagugaucacggcauuu

SEQ ID NO: 1771532 - RNA, 19 nt, Artificial Sequence
  Description of Artificial Sequence: Synthetic oligonucleotide
  Antisense strand to SEQ ID NO: 1771531
aaaugccgugaucacugga

SEQ ID NO: 1771533 - RNA, 19 nt, Artificial Sequence
  Description of Artificial Sequence: Synthetic oligonucleotide
  Sense strand starting at position 1767 of SEQ ID NO: 1562770
uuauuacuguguuugaaag

SEQ ID NO: 1771534 - RNA, 19 nt, Artificial Sequence
  Description of Artificial Sequence: Synthetic oligonucleotide
  Antisense strand to SEQ ID NO: 1771533
cuuucaaacacaguaauaa

SEQ ID NO: 1771535 - RNA, 19 nt, Artificial Sequence
  Description of Artificial Sequence: Synthetic oligonucleotide
  Sense strand starting at position 1986 of SEQ ID NO: 1562770
acaaccacauggucugaua

SEQ ID NO: 1771536 - RNA, 19 nt, Artificial Sequence
  Description of Artificial Sequence: Synthetic oligonucleotide
  Antisense strand to SEQ ID NO: 1771535
uaucagaccaugugguugu

SEQ ID NO: 1771537 - RNA, 19 nt, Artificial Sequence
  Description of Artificial Sequence: Synthetic oligonucleotide
  Sense strand starting at position 2033 of SEQ ID NO: 1562770
auaaguuagggauguauua

SEQ ID NO: 1771538 - RNA, 19 nt, Artificial Sequence
  Description of Artificial Sequence: Synthetic oligonucleotide
  Antisense strand to SEQ ID NO: 1771537
uaauacaucccuaacuuau

SEQ ID NO: 1771539 - RNA, 19 nt, Artificial Sequence
  Description of Artificial Sequence: Synthetic oligonucleotide
  Sense strand starting at position 2042 of SEQ ID NO: 1562770
ggauguauuagaugcacuc

SEQ ID NO: 1771540 - RNA, 19 nt, Artificial Sequence
  Description of Artificial Sequence: Synthetic oligonucleotide
  Antisense strand to SEQ ID NO: 1771539
gagugcaucuaauacaucc

SEQ ID NO: 1771541 - RNA, 19 nt, Artificial Sequence
  Description of Artificial Sequence: Synthetic oligonucleotide
  Sense strand starting at position 2051 of SEQ ID NO: 1562770
agaugcacuccucauaagu

SEQ ID NO: 1771542 - RNA, 19 nt, Artificial Sequence
  Description of Artificial Sequence: Synthetic oligonucleotide
  Antisense strand to SEQ ID NO: 1771541
acuuaugaggagugcaucu

SEQ ID NO: 1771543 - RNA, 19 nt, Artificial Sequence
  Description of Artificial Sequence: Synthetic oligonucleotide
  Sense strand starting at position 2066 of SEQ ID NO: 1562770
aagugcugagcacaaagau

SEQ ID NO: 1771544 - RNA, 19 nt, Artificial Sequence
  Description of Artificial Sequence: Synthetic oligonucleotide
  Antisense strand to SEQ ID NO: 1771543
aucuuugugcucagcacuu

SEQ ID NO: 1771545 - RNA, 19 nt, Artificial Sequence
  Description of Artificial Sequence: Synthetic oligonucleotide
  Sense strand starting at position 2188 of SEQ ID NO: 1562770
gcaggauagugaguccaaa

SEQ ID NO: 1771546 - RNA, 19 nt, Artificial Sequence
  Description of Artificial Sequence: Synthetic oligonucleotide
  Antisense strand to SEQ ID NO: 1771545
uuuggacucacuauccugc

SEQ ID NO: 1771547 - RNA, 19 nt, Artificial Sequence
  Description of Artificial Sequence: Synthetic oligonucleotide
  Sense strand starting at position 2344 of SEQ ID NO: 1562770
agauaucucuuuguucuga

SEQ ID NO: 1771548 - RNA, 19 nt, Artificial Sequence
  Description of Artificial Sequence: Synthetic oligonucleotide
  Antisense strand to SEQ ID NO: 1771547
ucagaacaaagagauaucu

SEQ ID NO: 1771549 - RNA, 19 nt, Artificial Sequence
  Description of Artificial Sequence: Synthetic oligonucleotide
  Sense strand starting at position 2434 of SEQ ID NO: 1562770
guuauuaucugauuaccuc

SEQ ID NO: 1771550 - RNA, 19 nt, Artificial Sequence
  Description of Artificial Sequence: Synthetic oligonucleotide
  Antisense strand to SEQ ID NO: 1771549
gagguaaucagauaauaac

SEQ ID NO: 1771551 - RNA, 19 nt, Artificial Sequence
  Description of Artificial Sequence: Synthetic oligonucleotide
  Sense strand starting at position 2801 of SEQ ID NO: 1562770
acuucuaagucucugagaa

SEQ ID NO: 1771552 - RNA, 19 nt, Artificial Sequence
  Description of Artificial Sequence: Synthetic oligonucleotide
  Antisense strand to SEQ ID NO: 1771551
uucucagagacuuagaagu

SEQ ID NO: 1771553 - RNA, 19 nt, Artificial Sequence
  Description of Artificial Sequence: Synthetic oligonucleotide
  Sense strand starting at position 2802 of SEQ ID NO: 1562770
cuucuaagucucugagaac

SEQ ID NO: 1771554 - RNA, 19 nt, Artificial Sequence
  Description of Artificial Sequence: Synthetic oligonucleotide
  Antisense strand to SEQ ID NO: 1771553
guucucagagacuuagaag

SEQ ID NO: 1771555 - RNA, 19 nt, Artificial Sequence
  Description of Artificial Sequence: Synthetic oligonucleotide
  Sense strand starting at position 2923 of SEQ ID NO: 1562770
cccugccuuccugaugaaa

SEQ ID NO: 1771556 - RNA, 19 nt, Artificial Sequence
  Description of Artificial Sequence: Synthetic oligonucleotide
  Antisense strand to SEQ ID NO: 1771555
uuucaucaggaaggcaggg

SEQ ID NO: 1771557 - RNA, 19 nt, Artificial Sequence
  Description of Artificial Sequence: Synthetic oligonucleotide
  Sense strand starting at position 3201 of SEQ ID NO: 1562770
cacucuggccuggaggaua

SEQ ID NO: 1771558 - RNA, 19 nt, Artificial Sequence
  Description of Artificial Sequence: Synthetic oligonucleotide
  Antisense strand to SEQ ID NO: 1771557
uauccuccaggccagagug

SEQ ID NO: 1771559 - RNA, 19 nt, Artificial Sequence
  Description of Artificial Sequence: Synthetic oligonucleotide
  Sense strand starting at position 3411 of SEQ ID NO: 1562770
ccacguucucuugaugaaa

SEQ ID NO: 1771560 - RNA, 19 nt, Artificial Sequence
  Description of Artificial Sequence: Synthetic oligonucleotide
  Antisense strand to SEQ ID NO: 1771559
uuucaucaagagaacgugg

SEQ ID NO: 1771561 - RNA, 19 nt, Artificial Sequence
  Description of Artificial Sequence: Synthetic oligonucleotide
  Sense strand starting at position 3414 of SEQ ID NO: 1562770
cguucucuugaugaaagca

SEQ ID NO: 1771562 - RNA, 19 nt, Artificial Sequence
  Description of Artificial Sequence: Synthetic oligonucleotide
  Antisense strand to SEQ ID NO: 1771561
ugcuuucaucaagagaacg

SEQ ID NO: 1771563 - RNA, 19 nt, Artificial Sequence
  Description of Artificial Sequence: Synthetic oligonucleotide
  Sense strand starting at position 3563 of SEQ ID NO: 1562770
cuccucuaugacugauguu

SEQ ID NO: 1771564 - RNA, 19 nt, Artificial Sequence
  Description of Artificial Sequence: Synthetic oligonucleotide
  Antisense strand to SEQ ID NO: 1771563
aacaucagucauagaggag

SEQ ID NO: 1771565 - RNA, 19 nt, Artificial Sequence
  Description of Artificial Sequence: Synthetic oligonucleotide
  Sense strand starting at position 3569 of SEQ ID NO: 1562770
uaugacugauguuugcuaa

SEQ ID NO: 1771566 - RNA, 19 nt, Artificial Sequence
  Description of Artificial Sequence: Synthetic oligonucleotide
  Antisense strand to SEQ ID NO: 1771565
uuagcaaacaucagucaua

SEQ ID NO: 1771567 - RNA, 19 nt, Artificial Sequence
  Description of Artificial Sequence: Synthetic oligonucleotide
  Sense strand starting at position 3570 of SEQ ID NO: 1562770
augacugauguuugcuaaa

SEQ ID NO: 1771568 - RNA, 19 nt, Artificial Sequence
  Description of Artificial Sequence: Synthetic oligonucleotide
  Antisense strand to SEQ ID NO: 1771567
uuuagcaaacaucagucau

SEQ ID NO: 1771569 - RNA, 19 nt, Artificial Sequence
  Description of Artificial Sequence: Synthetic oligonucleotide
  Sense strand starting at position 3813 of SEQ ID NO: 1562770
ccagcaaugccagacucau

SEQ ID NO: 1771570 - RNA, 19 nt, Artificial Sequence
  Description of Artificial Sequence: Synthetic oligonucleotide
  Antisense strand to SEQ ID NO: 1771569
augagucuggcauugcugg

SEQ ID NO: 1771571 - RNA, 19 nt, Artificial Sequence
  Description of Artificial Sequence: Synthetic oligonucleotide
  Sense strand starting at position 3844 of SEQ ID NO: 1562770
agaggcuugcaagguuaaa

SEQ ID NO: 1771572 - RNA, 19 nt, Artificial Sequence
  Description of Artificial Sequence: Synthetic oligonucleotide
  Antisense strand to SEQ ID NO: 1771571
uuuaaccuugcaagccucu

SEQ ID NO: 1771573 - RNA, 19 nt, Artificial Sequence
  Description of Artificial Sequence: Synthetic oligonucleotide
  Sense strand starting at position 3863 of SEQ ID NO: 1562770
acauguuagcuuuggagag

SEQ ID NO: 1771574 - RNA, 19 nt, Artificial Sequence
  Description of Artificial Sequence: Synthetic oligonucleotide
  Antisense strand to SEQ ID NO: 1771573
cucuccaaagcuaacaugu

SEQ ID NO: 1771575 - RNA, 19 nt, Artificial Sequence
  Description of Artificial Sequence: Synthetic oligonucleotide
  Sense strand starting at position 76 of SEQ ID NO: 1562771
accugagaccucuggcuga

SEQ ID NO: 1771576 - RNA, 19 nt, Artificial Sequence
  Description of Artificial Sequence: Synthetic oligonucleotide
  Antisense strand to SEQ ID NO: 1771575
ucagccagaggucucaggu

SEQ ID NO: 1771577 - RNA, 19 nt, Artificial Sequence
  Description of Artificial Sequence: Synthetic oligonucleotide
  Sense strand starting at position 178 of SEQ ID NO: 1562771
gaaggaaauugggagauua

SEQ ID NO: 1771578 - RNA, 19 nt, Artificial Sequence
  Description of Artificial Sequence: Synthetic oligonucleotide
  Antisense strand to SEQ ID NO: 1771577
uaaucucccaauuuccuuc

SEQ ID NO: 1771579 - RNA, 19 nt, Artificial Sequence
  Description of Artificial Sequence: Synthetic oligonucleotide
  Sense strand starting at position 339 of SEQ ID NO: 1562771
agcagauguaguggacaaa

SEQ ID NO: 1771580 - RNA, 19 nt, Artificial Sequence
  Description of Artificial Sequence: Synthetic oligonucleotide
  Antisense strand to SEQ ID NO: 1771579
uuuguccacuacaucugcu

SEQ ID NO: 1771581 - RNA, 19 nt, Artificial Sequence
  Description of Artificial Sequence: Synthetic oligonucleotide
  Sense strand starting at position 412 of SEQ ID NO: 1562771
aagagacguccagguagaa

SEQ ID NO: 1771582 - RNA, 19 nt, Artificial Sequence
  Description of Artificial Sequence: Synthetic oligonucleotide
  Antisense strand to SEQ ID NO: 1771581
uucuaccuggacgucucuu

SEQ ID NO: 1771583 - RNA, 19 nt, Artificial Sequence
  Description of Artificial Sequence: Synthetic oligonucleotide
  Sense strand starting at position 425 of SEQ ID NO: 1562771
guagaauugcaagagcaag

SEQ ID NO: 1771584 - RNA, 19 nt, Artificial Sequence
  Description of Artificial Sequence: Synthetic oligonucleotide
  Antisense strand to SEQ ID NO: 1771583
cuugcucuugcaauucuac

SEQ ID NO: 1771585 - RNA, 19 nt, Artificial Sequence
  Description of Artificial Sequence: Synthetic oligonucleotide
  Sense strand starting at position 479 of SEQ ID NO: 1562771
gaacuuaaagaucagcguu

SEQ ID NO: 1771586 - RNA, 19 nt, Artificial Sequence
  Description of Artificial Sequence: Synthetic oligonucleotide
  Antisense strand to SEQ ID NO: 1771585
aacgcugaucuuuaaguuc

SEQ ID NO: 1771587 - RNA, 19 nt, Artificial Sequence
  Description of Artificial Sequence: Synthetic oligonucleotide
  Sense strand starting at position 485 of SEQ ID NO: 1562771
aaagaucagcguuacugua

SEQ ID NO: 1771588 - RNA, 19 nt, Artificial Sequence
  Description of Artificial Sequence: Synthetic oligonucleotide
  Antisense strand to SEQ ID NO: 1771587
uacaguaacgcugaucuuu

SEQ ID NO: 1771589 - RNA, 19 nt, Artificial Sequence
  Description of Artificial Sequence: Synthetic oligonucleotide
  Sense strand starting at position 597 of SEQ ID NO: 1562771
gccaaacuuuagucagauu

SEQ ID NO: 1771590 - RNA, 19 nt, Artificial Sequence
  Description of Artificial Sequence: Synthetic oligonucleotide
  Antisense strand to SEQ ID NO: 1771589
aaucugacuaaaguuuggc

SEQ ID NO: 1771591 - RNA, 19 nt, Artificial Sequence
  Description of Artificial Sequence: Synthetic oligonucleotide
  Sense strand starting at position 626 of SEQ ID NO: 1562771
cuccuaggcccagauguau

SEQ ID NO: 1771592 - RNA, 19 nt, Artificial Sequence
  Description of Artificial Sequence: Synthetic oligonucleotide
  Antisense strand to SEQ ID NO: 1771591
auacaucugggccuaggag

SEQ ID NO: 1771593 - RNA, 19 nt, Artificial Sequence
  Description of Artificial Sequence: Synthetic oligonucleotide
  Sense strand starting at position 695 of SEQ ID NO: 1562771
gcuagaauccucgauccuc

SEQ ID NO: 1771594 - RNA, 19 nt, Artificial Sequence
  Description of Artificial Sequence: Synthetic oligonucleotide
  Antisense strand to SEQ ID NO: 1771593
gaggaucgaggauucuagc

SEQ ID NO: 1771595 - RNA, 19 nt, Artificial Sequence
  Description of Artificial Sequence: Synthetic oligonucleotide
  Sense strand starting at position 726 of SEQ ID NO: 1562771
auccuagaucucugaucag

SEQ ID NO: 1771596 - RNA, 19 nt, Artificial Sequence
  Description of Artificial Sequence: Synthetic oligonucleotide
  Antisense strand to SEQ ID NO: 1771595
cugaucagagaucuaggau

SEQ ID NO: 1771597 - RNA, 19 nt, Artificial Sequence
  Description of Artificial Sequence: Synthetic oligonucleotide
  Sense strand starting at position 729 of SEQ ID NO: 1562771
cuagaucucugaucagauu

SEQ ID NO: 1771598 - RNA, 19 nt, Artificial Sequence
  Description of Artificial Sequence: Synthetic oligonucleotide
  Antisense strand to SEQ ID NO: 1771597
aaucugaucagagaucuag

SEQ ID NO: 1771599 - RNA, 19 nt, Artificial Sequence
  Description of Artificial Sequence: Synthetic oligonucleotide
  Sense strand starting at position 939 of SEQ ID NO: 1562771
ucuacaagauggucuugaa

SEQ ID NO: 1771600 - RNA, 19 nt, Artificial Sequence
  Description of Artificial Sequence: Synthetic oligonucleotide
  Antisense strand to SEQ ID NO: 1771599
uucaagaccaucuuguaga

SEQ ID NO: 1771601 - RNA, 19 nt, Artificial Sequence
  Description of Artificial Sequence: Synthetic oligonucleotide
  Sense strand starting at position 954 of SEQ ID NO: 1562771
ugaagaaagucuuucuggu

SEQ ID NO: 1771602 - RNA, 19 nt, Artificial Sequence
  Description of Artificial Sequence: Synthetic oligonucleotide
  Antisense strand to SEQ ID NO: 1771601
accagaaagacuuucuuca

SEQ ID NO: 1771603 - RNA, 19 nt, Artificial Sequence
  Description of Artificial Sequence: Synthetic oligonucleotide
  Sense strand starting at position 977 of SEQ ID NO: 1562771
gaacaagugugacugaauc

SEQ ID NO: 1771604 - RNA, 19 nt, Artificial Sequence
  Description of Artificial Sequence: Synthetic oligonucleotide
  Antisense strand to SEQ ID NO: 1771603
gauucagucacacuuguuc

SEQ ID NO: 1771605 - RNA, 19 nt, Artificial Sequence
  Description of Artificial Sequence: Synthetic oligonucleotide
  Sense strand starting at position 983 of SEQ ID NO: 1562771
gugugacugaaucauguuu

SEQ ID NO: 1771606 - RNA, 19 nt, Artificial Sequence
  Description of Artificial Sequence: Synthetic oligonucleotide
  Antisense strand to SEQ ID NO: 1771605
aaacaugauucagucacac

SEQ ID NO: 1771607 - RNA, 19 nt, Artificial Sequence
  Description of Artificial Sequence: Synthetic oligonucleotide
  Sense strand starting at position 1094 of SEQ ID NO: 1562771
cccagagucuguccuauuu

SEQ ID NO: 1771608 - RNA, 19 nt, Artificial Sequence
  Description of Artificial Sequence: Synthetic oligonucleotide
  Antisense strand to SEQ ID NO: 1771607
aaauaggacagacucuggg

SEQ ID NO: 1771609 - RNA, 19 nt, Artificial Sequence
  Description of Artificial Sequence: Synthetic oligonucleotide
  Sense strand starting at position 2011 of SEQ ID NO: 1562771
agcgucuaaccagacuaau

SEQ ID NO: 1771610 - RNA, 19 nt, Artificial Sequence
  Description of Artificial Sequence: Synthetic oligonucleotide
  Antisense strand to SEQ ID NO: 1771609
auuagucugguuagacgcu

SEQ ID NO: 1771611 - RNA, 19 nt, Artificial Sequence
  Description of Artificial Sequence: Synthetic oligonucleotide
  Sense strand starting at position 2014 of SEQ ID NO: 1562771
gucuaaccagacuaauguu

SEQ ID NO: 1771612 - RNA, 19 nt, Artificial Sequence
  Description of Artificial Sequence: Synthetic oligonucleotide
  Antisense strand to SEQ ID NO: 1771611
aacauuagucugguuagac

SEQ ID NO: 1771613 - RNA, 19 nt, Artificial Sequence
  Description of Artificial Sequence: Synthetic oligonucleotide
  Sense strand starting at position 2279 of SEQ ID NO: 1562771
gcucacgcggugagucaua

SEQ ID NO: 1771614 - RNA, 19 nt, Artificial Sequence
  Description of Artificial Sequence: Synthetic oligonucleotide
  Antisense strand to SEQ ID NO: 1771613
uaugacucaccgcgugagc

SEQ ID NO: 1771615 - RNA, 19 nt, Artificial Sequence
  Description of Artificial Sequence: Synthetic oligonucleotide
  Sense strand starting at position 2432 of SEQ ID NO: 1562771
aguagaucauccucgaggu

SEQ ID NO: 1771616 - RNA, 19 nt, Artificial Sequence
  Description of Artificial Sequence: Synthetic oligonucleotide
  Antisense strand to SEQ ID NO: 1771615
accucgaggaugaucuacu

SEQ ID NO: 1771617 - RNA, 19 nt, Artificial Sequence
  Description of Artificial Sequence: Synthetic oligonucleotide
  Sense strand starting at position 2434 of SEQ ID NO: 1562771
uagaucauccucgagguga

SEQ ID NO: 1771618 - RNA, 19 nt, Artificial Sequence
  Description of Artificial Sequence: Synthetic oligonucleotide
  Antisense strand to SEQ ID NO: 1771617
ucaccucgaggaugaucua

SEQ ID NO: 1771619 - RNA, 19 nt, Artificial Sequence
  Description of Artificial Sequence: Synthetic oligonucleotide
  Sense strand starting at position 2436 of SEQ ID NO: 1562771
gaucauccucgaggugaag

SEQ ID NO: 1771620 - RNA, 19 nt, Artificial Sequence
  Description of Artificial Sequence: Synthetic oligonucleotide
  Antisense strand to SEQ ID NO: 1771619
cuucaccucgaggaugauc

SEQ ID NO: 1771621 - RNA, 19 nt, Artificial Sequence
  Description of Artificial Sequence: Synthetic oligonucleotide
  Sense strand starting at position 2479 of SEQ ID NO: 1562771
cugaaacaggccugaacau

SEQ ID NO: 1771622 - RNA, 19 nt, Artificial Sequence
  Description of Artificial Sequence: Synthetic oligonucleotide
  Antisense strand to SEQ ID NO: 1771621
auguucaggccuguuucag

SEQ ID NO: 1771623 - RNA, 19 nt, Artificial Sequence
  Description of Artificial Sequence: Synthetic oligonucleotide
  Sense strand starting at position 2698 of SEQ ID NO: 1562771
auaagucccuaaguaaaug

SEQ ID NO: 1771624 - RNA, 19 nt, Artificial Sequence
  Description of Artificial Sequence: Synthetic oligonucleotide
  Antisense strand to SEQ ID NO: 1771623
cauuuacuuagggacuuau

SEQ ID NO: 1771625 - RNA, 19 nt, Artificial Sequence
  Description of Artificial Sequence: Synthetic oligonucleotide
  Sense strand starting at position 2707 of SEQ ID NO: 1562771
uaaguaaauguaugggaua

SEQ ID NO: 1771626 - RNA, 19 nt, Artificial Sequence
  Description of Artificial Sequence: Synthetic oligonucleotide
  Antisense strand to SEQ ID NO: 1771625
uaucccauacauuuacuua

SEQ ID NO: 1771627 - RNA, 19 nt, Artificial Sequence
  Description of Artificial Sequence: Synthetic oligonucleotide
  Sense strand starting at position 2867 of SEQ ID NO: 1562771
ugauuaccaucuguaccuu

SEQ ID NO: 1771628 - RNA, 19 nt, Artificial Sequence
  Description of Artificial Sequence: Synthetic oligonucleotide
  Antisense strand to SEQ ID NO: 1771627
aagguacagaugguaauca

SEQ ID NO: 1771629 - RNA, 19 nt, Artificial Sequence
  Description of Artificial Sequence: Synthetic oligonucleotide
  Sense strand starting at position 3246 of SEQ ID NO: 1562771
ccaccagugguguauguga

SEQ ID NO: 1771630 - RNA, 19 nt, Artificial Sequence
  Description of Artificial Sequence: Synthetic oligonucleotide
  Antisense strand to SEQ ID NO: 1771629
ucacauacaccacuggugg

SEQ ID NO: 1771631 - RNA, 19 nt, Artificial Sequence
  Description of Artificial Sequence: Synthetic oligonucleotide
  Sense strand starting at position 3303 of SEQ ID NO: 1562771
ugugucuuuccacaagauc

SEQ ID NO: 1771632 - RNA, 19 nt, Artificial Sequence
  Description of Artificial Sequence: Synthetic oligonucleotide
  Antisense strand to SEQ ID NO: 1771631
gaucuuguggaaagacaca

SEQ ID NO: 1771633 - RNA, 19 nt, Artificial Sequence
  Description of Artificial Sequence: Synthetic oligonucleotide
  Sense strand starting at position 3317 of SEQ ID NO: 1562771
agaucagacuuauugaugu

SEQ ID NO: 1771634 - RNA, 19 nt, Artificial Sequence
  Description of Artificial Sequence: Synthetic oligonucleotide
  Antisense strand to SEQ ID NO: 1771633
acaucaauaagucugaucu

SEQ ID NO: 1771635 - RNA, 19 nt, Artificial Sequence
  Description of Artificial Sequence: Synthetic oligonucleotide
  Sense strand starting at position 3453 of SEQ ID NO: 1562771
caagucagucaguauugua

SEQ ID NO: 1771636 - RNA, 19 nt, Artificial Sequence
  Description of Artificial Sequence: Synthetic oligonucleotide
  Antisense strand to SEQ ID NO: 1771635
uacaauacugacugacuug

SEQ ID NO: 1771637 - RNA, 19 nt, Artificial Sequence
  Description of Artificial Sequence: Synthetic oligonucleotide
  Sense strand starting at position 3467 of SEQ ID NO: 1562771
uuguaaaccguacacaaua

SEQ ID NO: 1771638 - RNA, 19 nt, Artificial Sequence
  Description of Artificial Sequence: Synthetic oligonucleotide
  Antisense strand to SEQ ID NO: 1771637
uauuguguacgguuuacaa

SEQ ID NO: 1771639 - RNA, 19 nt, Artificial Sequence
  Description of Artificial Sequence: Synthetic oligonucleotide
  Sense strand starting at position 3565 of SEQ ID NO: 1562771
uagggaaagugguuaucaa

SEQ ID NO: 1771640 - RNA, 19 nt, Artificial Sequence
  Description of Artificial Sequence: Synthetic oligonucleotide
  Antisense strand to SEQ ID NO: 1771639
uugauaaccacuuucccua

SEQ ID NO: 1771641 - RNA, 19 nt, Artificial Sequence
  Description of Artificial Sequence: Synthetic oligonucleotide
  Sense strand starting at position 3643 of SEQ ID NO: 1562771
gugucuuguaaggaagagu

SEQ ID NO: 1771642 - RNA, 19 nt, Artificial Sequence
  Description of Artificial Sequence: Synthetic oligonucleotide
  Antisense strand to SEQ ID NO: 1771641
acucuuccuuacaagacac

SEQ ID NO: 1771643 - RNA, 19 nt, Artificial Sequence
  Description of Artificial Sequence: Synthetic oligonucleotide
  Sense strand starting at position 3695 of SEQ ID NO: 1562771
cuggguguuaaucaugagu

SEQ ID NO: 1771644 - RNA, 19 nt, Artificial Sequence
  Description of Artificial Sequence: Synthetic oligonucleotide
  Antisense strand to SEQ ID NO: 1771643
acucaugauuaacacccag

SEQ ID NO: 1771645 - RNA, 19 nt, Artificial Sequence
  Description of Artificial Sequence: Synthetic oligonucleotide
  Sense strand starting at position 3698 of SEQ ID NO: 1562771
gguguuaaucaugagugac

SEQ ID NO: 1771646 - RNA, 19 nt, Artificial Sequence
  Description of Artificial Sequence: Synthetic oligonucleotide
  Antisense strand to SEQ ID NO: 1771645
gucacucaugauuaacacc

SEQ ID NO: 1771647 - RNA, 19 nt, Artificial Sequence
  Description of Artificial Sequence: Synthetic oligonucleotide
  Sense strand starting at position 3700 of SEQ ID NO: 1562771
uguuaaucaugagugacag

SEQ ID NO: 1771648 - RNA, 19 nt, Artificial Sequence
  Description of Artificial Sequence: Synthetic oligonucleotide
  Antisense strand to SEQ ID NO: 1771647
cugucacucaugauuaaca

SEQ ID NO: 1771649 - RNA, 19 nt, Artificial Sequence
  Description of Artificial Sequence: Synthetic oligonucleotide
  Sense strand starting at position 3763 of SEQ ID NO: 1562771
cugcucuuaugaccaaaga

SEQ ID NO: 1771650 - RNA, 19 nt, Artificial Sequence
  Description of Artificial Sequence: Synthetic oligonucleotide
  Antisense strand to SEQ ID NO: 1771649
ucuuuggucauaagagcag

SEQ ID NO: 1771651 - RNA, 19 nt, Artificial Sequence
  Description of Artificial Sequence: Synthetic oligonucleotide
  Sense strand starting at position 3809 of SEQ ID NO: 1562771
gcguguacauauuuauauc

SEQ ID NO: 1771652 - RNA, 19 nt, Artificial Sequence
  Description of Artificial Sequence: Synthetic oligonucleotide
  Antisense strand to SEQ ID NO: 1771651
gauauaaauauguacacgc

SEQ ID NO: 1771653 - RNA, 19 nt, Artificial Sequence
  Description of Artificial Sequence: Synthetic oligonucleotide
  Sense strand starting at position 3827 of SEQ ID NO: 1562771
ccuuaucugguuuaguaca

SEQ ID NO: 1771654 - RNA, 19 nt, Artificial Sequence
  Description of Artificial Sequence: Synthetic oligonucleotide
  Antisense strand to SEQ ID NO: 1771653
uguacuaaaccagauaagg

SEQ ID NO: 1771655 - RNA, 19 nt, Artificial Sequence
  Description of Artificial Sequence: Synthetic oligonucleotide
  Sense strand starting at position 143 of SEQ ID NO: 1562772
uuauucucagucuggaaga

SEQ ID NO: 1771656 - RNA, 19 nt, Artificial Sequence
  Description of Artificial Sequence: Synthetic oligonucleotide
  Antisense strand to SEQ ID NO: 1771655
ucuuccagacugagaauaa

SEQ ID NO: 1771657 - RNA, 19 nt, Artificial Sequence
  Description of Artificial Sequence: Synthetic oligonucleotide
  Sense strand starting at position 284 of SEQ ID NO: 1562772
uggaguuggccagaucuag

SEQ ID NO: 1771658 - RNA, 19 nt, Artificial Sequence
  Description of Artificial Sequence: Synthetic oligonucleotide
  Antisense strand to SEQ ID NO: 1771657
cuagaucuggccaacucca

SEQ ID NO: 1771659 - RNA, 19 nt, Artificial Sequence
  Description of Artificial Sequence: Synthetic oligonucleotide
  Sense strand starting at position 785 of SEQ ID NO: 1562772
caugcauauguguuucgca

SEQ ID NO: 1771660 - RNA, 19 nt, Artificial Sequence
  Description of Artificial Sequence: Synthetic oligonucleotide
  Antisense strand to SEQ ID NO: 1771659
ugcgaaacacauaugcaug

SEQ ID NO: 1771661 - RNA, 19 nt, Artificial Sequence
  Description of Artificial Sequence: Synthetic oligonucleotide
  Sense strand starting at position 787 of SEQ ID NO: 1562772
ugcauauguguuucgcagu

SEQ ID NO: 1771662 - RNA, 19 nt, Artificial Sequence
  Description of Artificial Sequence: Synthetic oligonucleotide
  Antisense strand to SEQ ID NO: 1771661
acugcgaaacacauaugca

SEQ ID NO: 1771663 - RNA, 19 nt, Artificial Sequence
  Description of Artificial Sequence: Synthetic oligonucleotide
  Sense strand starting at position 792 of SEQ ID NO: 1562772
auguguuucgcagucuaua

SEQ ID NO: 1771664 - RNA, 19 nt, Artificial Sequence
  Description of Artificial Sequence: Synthetic oligonucleotide
  Antisense strand to SEQ ID NO: 1771663
uauagacugcgaaacacau

SEQ ID NO: 1771665 - RNA, 19 nt, Artificial Sequence
  Description of Artificial Sequence: Synthetic oligonucleotide
  Sense strand starting at position 793 of SEQ ID NO: 1562772
uguguuucgcagucuauaa

SEQ ID NO: 1771666 - RNA, 19 nt, Artificial Sequence
  Description of Artificial Sequence: Synthetic oligonucleotide
  Antisense strand to SEQ ID NO: 1771665
uuauagacugcgaaacaca

SEQ ID NO: 1771667 - RNA, 19 nt, Artificial Sequence
  Description of Artificial Sequence: Synthetic oligonucleotide
  Sense strand starting at position 794 of SEQ ID NO: 1562772
guguuucgcagucuauaau

SEQ ID NO: 1771668 - RNA, 19 nt, Artificial Sequence
  Description of Artificial Sequence: Synthetic oligonucleotide
  Antisense strand to SEQ ID NO: 1771667
auuauagacugcgaaacac

SEQ ID NO: 1771669 - RNA, 19 nt, Artificial Sequence
  Description of Artificial Sequence: Synthetic oligonucleotide
  Sense strand starting at position 828 of SEQ ID NO: 1562772
ucuaaaugugcagacugau

SEQ ID NO: 1771670 - RNA, 19 nt, Artificial Sequence
  Description of Artificial Sequence: Synthetic oligonucleotide
  Antisense strand to SEQ ID NO: 1771669
aucagucugcacauuuaga

SEQ ID NO: 1771671 - RNA, 19 nt, Artificial Sequence
  Description of Artificial Sequence: Synthetic oligonucleotide
  Sense strand starting at position 831 of SEQ ID NO: 1562772
aaaugugcagacugauaca

SEQ ID NO: 1771672 - RNA, 19 nt, Artificial Sequence
  Description of Artificial Sequence: Synthetic oligonucleotide
  Antisense strand to SEQ ID NO: 1771671
uguaucagucugcacauuu

SEQ ID NO: 1771673 - RNA, 19 nt, Artificial Sequence
  Description of Artificial Sequence: Synthetic oligonucleotide
  Sense strand starting at position 951 of SEQ ID NO: 1562772
ugggauguaucagucaaca

SEQ ID NO: 1771674 - RNA, 19 nt, Artificial Sequence
  Description of Artificial Sequence: Synthetic oligonucleotide
  Antisense strand to SEQ ID NO: 1771673
uguugacugauacauccca

SEQ ID NO: 1771675 - RNA, 19 nt, Artificial Sequence
  Description of Artificial Sequence: Synthetic oligonucleotide
  Sense strand starting at position 977 of SEQ ID NO: 1562772
gauuccugccuuugggaga

SEQ ID NO: 1771676 - RNA, 19 nt, Artificial Sequence
  Description of Artificial Sequence: Synthetic oligonucleotide
  Antisense strand to SEQ ID NO: 1771675
ucucccaaaggcaggaauc

SEQ ID NO: 1771677 - RNA, 19 nt, Artificial Sequence
  Description of Artificial Sequence: Synthetic oligonucleotide
  Sense strand starting at position 982 of SEQ ID NO: 1562772
cugccuuugggagacucaa

SEQ ID NO: 1771678 - RNA, 19 nt, Artificial Sequence
  Description of Artificial Sequence: Synthetic oligonucleotide
  Antisense strand to SEQ ID NO: 1771677
uugagucucccaaaggcag

SEQ ID NO: 1771679 - RNA, 19 nt, Artificial Sequence
  Description of Artificial Sequence: Synthetic oligonucleotide
  Sense strand starting at position 1031 of SEQ ID NO: 1562772
caguaacuuugggucuuaa

SEQ ID NO: 1771680 - RNA, 19 nt, Artificial Sequence
  Description of Artificial Sequence: Synthetic oligonucleotide
  Antisense strand to SEQ ID NO: 1771679
uuaagacccaaaguuacug

SEQ ID NO: 1771681 - RNA, 19 nt, Artificial Sequence
  Description of Artificial Sequence: Synthetic oligonucleotide
  Sense strand starting at position 1092 of SEQ ID NO: 1562772
ucaggucaccguuaucaga

SEQ ID NO: 1771682 - RNA, 19 nt, Artificial Sequence
  Description of Artificial Sequence: Synthetic oligonucleotide
  Antisense strand to SEQ ID NO: 1771681
ucugauaacggugaccuga

SEQ ID NO: 1771683 - RNA, 19 nt, Artificial Sequence
  Description of Artificial Sequence: Synthetic oligonucleotide
  Sense strand starting at position 1155 of SEQ ID NO: 1562772
gucacugaugccuaacuuu

SEQ ID NO: 1771684 - RNA, 19 nt, Artificial Sequence
  Description of Artificial Sequence: Synthetic oligonucleotide
  Antisense strand to SEQ ID NO: 1771683
aaaguuaggcaucagugac

SEQ ID NO: 1771685 - RNA, 19 nt, Artificial Sequence
  Description of Artificial Sequence: Synthetic oligonucleotide
  Sense strand starting at position 1179 of SEQ ID NO: 1562772
acaguauauguuuagcuga

SEQ ID NO: 1771686 - RNA, 19 nt, Artificial Sequence
  Description of Artificial Sequence: Synthetic oligonucleotide
  Antisense strand to SEQ ID NO: 1771685
ucagcuaaacauauacugu

SEQ ID NO: 1771687 - RNA, 19 nt, Artificial Sequence
  Description of Artificial Sequence: Synthetic oligonucleotide
  Sense strand starting at position 1181 of SEQ ID NO: 1562772
aguauauguuuagcugaag

SEQ ID NO: 1771688 - RNA, 19 nt, Artificial Sequence
  Description of Artificial Sequence: Synthetic oligonucleotide
  Antisense strand to SEQ ID NO: 1771687
cuucagcuaaacauauacu

SEQ ID NO: 1771689 - RNA, 19 nt, Artificial Sequence
  Description of Artificial Sequence: Synthetic oligonucleotide
  Sense strand starting at position 1298 of SEQ ID NO: 1562772
uggugaagguggucucaga

SEQ ID NO: 1771690 - RNA, 19 nt, Artificial Sequence
  Description of Artificial Sequence: Synthetic oligonucleotide
  Antisense strand to SEQ ID NO: 1771689
ucugagaccaccuucacca

SEQ ID NO: 1771691 - RNA, 19 nt, Artificial Sequence
  Description of Artificial Sequence: Synthetic oligonucleotide
  Sense strand starting at position 1306 of SEQ ID NO: 1562772
guggucucagaguauguga

SEQ ID NO: 1771692 - RNA, 19 nt, Artificial Sequence
  Description of Artificial Sequence: Synthetic oligonucleotide
  Antisense strand to SEQ ID NO: 1771691
ucacauacucugagaccac

SEQ ID NO: 1771693 - RNA, 19 nt, Artificial Sequence
  Description of Artificial Sequence: Synthetic oligonucleotide
  Sense strand starting at position 1308 of SEQ ID NO: 1562772
ggucucagaguaugugaca

SEQ ID NO: 1771694 - RNA, 19 nt, Artificial Sequence
  Description of Artificial Sequence: Synthetic oligonucleotide
  Antisense strand to SEQ ID NO: 1771693
ugucacauacucugagacc

SEQ ID NO: 1771695 - RNA, 19 nt, Artificial Sequence
  Description of Artificial Sequence: Synthetic oligonucleotide
  Sense strand starting at position 2069 of SEQ ID NO: 1562772
ggaguagagagcugggaua

SEQ ID NO: 1771696 - RNA, 19 nt, Artificial Sequence
  Description of Artificial Sequence: Synthetic oligonucleotide
  Antisense strand to SEQ ID NO: 1771695
uaucccagcucucuacucc

SEQ ID NO: 1771697 - RNA, 19 nt, Artificial Sequence
  Description of Artificial Sequence: Synthetic oligonucleotide
  Sense strand starting at position 2104 of SEQ ID NO: 1562772
augcaauucguagaguuau

SEQ ID NO: 1771698 - RNA, 19 nt, Artificial Sequence
  Description of Artificial Sequence: Synthetic oligonucleotide
  Antisense strand to SEQ ID NO: 1771697
auaacucuacgaauugcau

SEQ ID NO: 1771699 - RNA, 19 nt, Artificial Sequence
  Description of Artificial Sequence: Synthetic oligonucleotide
  Sense strand starting at position 2253 of SEQ ID NO: 1562772
aagagaagcuuucugauug

SEQ ID NO: 1771700 - RNA, 19 nt, Artificial Sequence
  Description of Artificial Sequence: Synthetic oligonucleotide
  Antisense strand to SEQ ID NO: 1771699
caaucagaaagcuucucuu

SEQ ID NO: 1771701 - RNA, 19 nt, Artificial Sequence
  Description of Artificial Sequence: Synthetic oligonucleotide
  Sense strand starting at position 2257 of SEQ ID NO: 1562772
gaagcuuucugauugguca

SEQ ID NO: 1771702 - RNA, 19 nt, Artificial Sequence
  Description of Artificial Sequence: Synthetic oligonucleotide
  Antisense strand to SEQ ID NO: 1771701
ugaccaaucagaaagcuuc

SEQ ID NO: 1771703 - RNA, 19 nt, Artificial Sequence
  Description of Artificial Sequence: Synthetic oligonucleotide
  Sense strand starting at position 2261 of SEQ ID NO: 1562772
cuuucugauuggucagagu

SEQ ID NO: 1771704 - RNA, 19 nt, Artificial Sequence
  Description of Artificial Sequence: Synthetic oligonucleotide
  Antisense strand to SEQ ID NO: 1771703
acucugaccaaucagaaag

SEQ ID NO: 1771705 - RNA, 19 nt, Artificial Sequence
  Description of Artificial Sequence: Synthetic oligonucleotide
  Sense strand starting at position 2290 of SEQ ID NO: 1562772
ccaucuucgggaggaauag

SEQ ID NO: 1771706 - RNA, 19 nt, Artificial Sequence
  Description of Artificial Sequence: Synthetic oligonucleotide
  Antisense strand to SEQ ID NO: 1771705
cuauuccucccgaagaugg

SEQ ID NO: 1771707 - RNA, 19 nt, Artificial Sequence
  Description of Artificial Sequence: Synthetic oligonucleotide
  Sense strand starting at position 2495 of SEQ ID NO: 1562772
uauuaaagugcauggagaa

SEQ ID NO: 1771708 - RNA, 19 nt, Artificial Sequence
  Description of Artificial Sequence: Synthetic oligonucleotide
  Antisense strand to SEQ ID NO: 1771707
uucuccaugcacuuuaaua

SEQ ID NO: 1771709 - RNA, 19 nt, Artificial Sequence
  Description of Artificial Sequence: Synthetic oligonucleotide
  Sense strand starting at position 2565 of SEQ ID NO: 1562772
agauguaaugagcguuaaa

SEQ ID NO: 1771710 - RNA, 19 nt, Artificial Sequence
  Description of Artificial Sequence: Synthetic oligonucleotide
  Antisense strand to SEQ ID NO: 1771709
uuuaacgcucauuacaucu

SEQ ID NO: 1771711 - RNA, 19 nt, Artificial Sequence
  Description of Artificial Sequence: Synthetic oligonucleotide
  Sense strand starting at position 2897 of SEQ ID NO: 1562772
ggugguuguggagauggaa

SEQ ID NO: 1771712 - RNA, 19 nt, Artificial Sequence
  Description of Artificial Sequence: Synthetic oligonucleotide
  Antisense strand to SEQ ID NO: 1771711
uuccaucuccacaaccacc

SEQ ID NO: 1771713 - RNA, 19 nt, Artificial Sequence
  Description of Artificial Sequence: Synthetic oligonucleotide
  Sense strand starting at position 2926 of SEQ ID NO: 1562772
guaugagugccugggagau

SEQ ID NO: 1771714 - RNA, 19 nt, Artificial Sequence
  Description of Artificial Sequence: Synthetic oligonucleotide
  Antisense strand to SEQ ID NO: 1771713
aucucccaggcacucauac

SEQ ID NO: 1771715 - RNA, 19 nt, Artificial Sequence
  Description of Artificial Sequence: Synthetic oligonucleotide
  Sense strand starting at position 3068 of SEQ ID NO: 1562772
ugggauucugauggcugau

SEQ ID NO: 1771716 - RNA, 19 nt, Artificial Sequence
  Description of Artificial Sequence: Synthetic oligonucleotide
  Antisense strand to SEQ ID NO: 1771715
aucagccaucagaauccca

SEQ ID NO: 1771717 - RNA, 19 nt, Artificial Sequence
  Description of Artificial Sequence: Synthetic oligonucleotide
  Sense strand starting at position 3231 of SEQ ID NO: 1562772
cuaugaauggcugaugguu

SEQ ID NO: 1771718 - RNA, 19 nt, Artificial Sequence
  Description of Artificial Sequence: Synthetic oligonucleotide
  Antisense strand to SEQ ID NO: 1771717
aaccaucagccauucauag

SEQ ID NO: 1771719 - RNA, 19 nt, Artificial Sequence
  Description of Artificial Sequence: Synthetic oligonucleotide
  Sense strand starting at position 3269 of SEQ ID NO: 1562772
aaaugcaaguugucugaga

SEQ ID NO: 1771720 - RNA, 19 nt, Artificial Sequence
  Description of Artificial Sequence: Synthetic oligonucleotide
  Antisense strand to SEQ ID NO: 1771719
ucucagacaacuugcauuu

SEQ ID NO: 1771721 - RNA, 19 nt, Artificial Sequence
  Description of Artificial Sequence: Synthetic oligonucleotide
  Sense strand starting at position 3270 of SEQ ID NO: 1562772
aaugcaaguugucugagau

SEQ ID NO: 1771722 - RNA, 19 nt, Artificial Sequence
  Description of Artificial Sequence: Synthetic oligonucleotide
  Antisense strand to SEQ ID NO: 1771721
aucucagacaacuugcauu

SEQ ID NO: 1771723 - RNA, 19 nt, Artificial Sequence
  Description of Artificial Sequence: Synthetic oligonucleotide
  Sense strand starting at position 3282 of SEQ ID NO: 1562772
cugagauguucuuuccuug

SEQ ID NO: 1771724 - RNA, 19 nt, Artificial Sequence
  Description of Artificial Sequence: Synthetic oligonucleotide
  Antisense strand to SEQ ID NO: 1771723
caaggaaagaacaucucag

SEQ ID NO: 1771725 - RNA, 19 nt, Artificial Sequence
  Description of Artificial Sequence: Synthetic oligonucleotide
  Sense strand starting at position 3285 of SEQ ID NO: 1562772
agauguucuuuccuuggga

SEQ ID NO: 1771726 - RNA, 19 nt, Artificial Sequence
  Description of Artificial Sequence: Synthetic oligonucleotide
  Antisense strand to SEQ ID NO: 1771725
ucccaaggaaagaacaucu

SEQ ID NO: 1771727 - RNA, 19 nt, Artificial Sequence
  Description of Artificial Sequence: Synthetic oligonucleotide
  Sense strand starting at position 3286 of SEQ ID NO: 1562772
gauguucuuuccuugggau

SEQ ID NO: 1771728 - RNA, 19 nt, Artificial Sequence
  Description of Artificial Sequence: Synthetic oligonucleotide
  Antisense strand to SEQ ID NO: 1771727
aucccaaggaaagaacauc

SEQ ID NO: 1771729 - RNA, 19 nt, Artificial Sequence
  Description of Artificial Sequence: Synthetic oligonucleotide
  Sense strand starting at position 3287 of SEQ ID NO: 1562772
auguucuuuccuugggauu

SEQ ID NO: 1771730 - RNA, 19 nt, Artificial Sequence
  Description of Artificial Sequence: Synthetic oligonucleotide
  Antisense strand to SEQ ID NO: 1771729
aaucccaaggaaagaacau

SEQ ID NO: 1771731 - RNA, 19 nt, Artificial Sequence
  Description of Artificial Sequence: Synthetic oligonucleotide
  Sense strand starting at position 3390 of SEQ ID NO: 1562772
cucagacauccaggucuga

SEQ ID NO: 1771732 - RNA, 19 nt, Artificial Sequence
  Description of Artificial Sequence: Synthetic oligonucleotide
  Antisense strand to SEQ ID NO: 1771731
ucagaccuggaugucugag

SEQ ID NO: 1771733 - RNA, 19 nt, Artificial Sequence
  Description of Artificial Sequence: Synthetic oligonucleotide
  Sense strand starting at position 3399 of SEQ ID NO: 1562772
ccaggucugagugagcaaa

SEQ ID NO: 1771734 - RNA, 19 nt, Artificial Sequence
  Description of Artificial Sequence: Synthetic oligonucleotide
  Antisense strand to SEQ ID NO: 1771733
uuugcucacucagaccugg

SEQ ID NO: 1771735 - RNA, 19 nt, Artificial Sequence
  Description of Artificial Sequence: Synthetic oligonucleotide
  Sense strand starting at position 161 of SEQ ID NO: 1562773
cucagaaguccgugcagga

SEQ ID NO: 1771736 - RNA, 19 nt, Artificial Sequence
  Description of Artificial Sequence: Synthetic oligonucleotide
  Antisense strand to SEQ ID NO: 1771735
uccugcacggacuucugag

SEQ ID NO: 1771737 - RNA, 19 nt, Artificial Sequence
  Description of Artificial Sequence: Synthetic oligonucleotide
  Sense strand starting at position 637 of SEQ ID NO: 1562773
agugaaacucugugaaacu

SEQ ID NO: 1771738 - RNA, 19 nt, Artificial Sequence
  Description of Artificial Sequence: Synthetic oligonucleotide
  Antisense strand to SEQ ID NO: 1771737
aguuucacagaguuucacu

SEQ ID NO: 1771739 - RNA, 19 nt, Artificial Sequence
  Description of Artificial Sequence: Synthetic oligonucleotide
  Sense strand starting at position 638 of SEQ ID NO: 1562773
gugaaacucugugaaacuu

SEQ ID NO: 1771740 - RNA, 19 nt, Artificial Sequence
  Description of Artificial Sequence: Synthetic oligonucleotide
  Antisense strand to SEQ ID NO: 1771739
aaguuucacagaguuucac

SEQ ID NO: 1771741 - RNA, 19 nt, Artificial Sequence
  Description of Artificial Sequence: Synthetic oligonucleotide
  Sense strand starting at position 690 of SEQ ID NO: 1562773
aaacucaggucccagagau

SEQ ID NO: 1771742 - RNA, 19 nt, Artificial Sequence
  Description of Artificial Sequence: Synthetic oligonucleotide
  Antisense strand to SEQ ID NO: 1771741
aucucugggaccugaguuu

SEQ ID NO: 1771743 - RNA, 19 nt, Artificial Sequence
  Description of Artificial Sequence: Synthetic oligonucleotide
  Sense strand starting at position 709 of SEQ ID NO: 1562773
gcacguguccgcucgauca

SEQ ID NO: 1771744 - RNA, 19 nt, Artificial Sequence
  Description of Artificial Sequence: Synthetic oligonucleotide
  Antisense strand to SEQ ID NO: 1771743
ugaucgagcggacacgugc

SEQ ID NO: 1771745 - RNA, 19 nt, Artificial Sequence
  Description of Artificial Sequence: Synthetic oligonucleotide
  Sense strand starting at position 719 of SEQ ID NO: 1562773
gcucgaucagcuuagagga

SEQ ID NO: 1771746 - RNA, 19 nt, Artificial Sequence
  Description of Artificial Sequence: Synthetic oligonucleotide
  Antisense strand to SEQ ID NO: 1771745
uccucuaagcugaucgagc

SEQ ID NO: 1771747 - RNA, 19 nt, Artificial Sequence
  Description of Artificial Sequence: Synthetic oligonucleotide
  Sense strand starting at position 763 of SEQ ID NO: 1562773
uagcuugggccuuagaauc

SEQ ID NO: 1771748 - RNA, 19 nt, Artificial Sequence
  Description of Artificial Sequence: Synthetic oligonucleotide
  Antisense strand to SEQ ID NO: 1771747
gauucuaaggcccaagcua

SEQ ID NO: 1771749 - RNA, 19 nt, Artificial Sequence
  Description of Artificial Sequence: Synthetic oligonucleotide
  Sense strand starting at position 908 of SEQ ID NO: 1562773
augauuaucgccugugggu

SEQ ID NO: 1771750 - RNA, 19 nt, Artificial Sequence
  Description of Artificial Sequence: Synthetic oligonucleotide
  Antisense strand to SEQ ID NO: 1771749
acccacaggcgauaaucau

SEQ ID NO: 1771751 - RNA, 19 nt, Artificial Sequence
  Description of Artificial Sequence: Synthetic oligonucleotide
  Sense strand starting at position 910 of SEQ ID NO: 1562773
gauuaucgccuguggguau

SEQ ID NO: 1771752 - RNA, 19 nt, Artificial Sequence
  Description of Artificial Sequence: Synthetic oligonucleotide
  Antisense strand to SEQ ID NO: 1771751
auacccacaggcgauaauc

SEQ ID NO: 1771753 - RNA, 19 nt, Artificial Sequence
  Description of Artificial Sequence: Synthetic oligonucleotide
  Sense strand starting at position 1097 of SEQ ID NO: 1562773
gcacuugcacccuggauaa

SEQ ID NO: 1771754 - RNA, 19 nt, Artificial Sequence
  Description of Artificial Sequence: Synthetic oligonucleotide
  Antisense strand to SEQ ID NO: 1771753
uuauccagggugcaagugc

SEQ ID NO: 1771755 - RNA, 19 nt, Artificial Sequence
  Description of Artificial Sequence: Synthetic oligonucleotide
  Sense strand starting at position 1107 of SEQ ID NO: 1562773
ccuggauaagcuugugucu

SEQ ID NO: 1771756 - RNA, 19 nt, Artificial Sequence
  Description of Artificial Sequence: Synthetic oligonucleotide
  Antisense strand to SEQ ID NO: 1771755
agacacaagcuuauccagg

SEQ ID NO: 1771757 - RNA, 19 nt, Artificial Sequence
  Description of Artificial Sequence: Synthetic oligonucleotide
  Sense strand starting at position 1427 of SEQ ID NO: 1562773
cuuggugccaaauguaagu

SEQ ID NO: 1771758 - RNA, 19 nt, Artificial Sequence
  Description of Artificial Sequence: Synthetic oligonucleotide
  Antisense strand to SEQ ID NO: 1771757
acuuacauuuggcaccaag

SEQ ID NO: 1771759 - RNA, 19 nt, Artificial Sequence
  Description of Artificial Sequence: Synthetic oligonucleotide
  Sense strand starting at position 1531 of SEQ ID NO: 1562773
uugacacuuuaguuaaagu

SEQ ID NO: 1771760 - RNA, 19 nt, Artificial Sequence
  Description of Artificial Sequence: Synthetic oligonucleotide
  Antisense strand to SEQ ID NO: 1771759
acuuuaacuaaagugucaa

SEQ ID NO: 1771761 - RNA, 19 nt, Artificial Sequence
  Description of Artificial Sequence: Synthetic oligonucleotide
  Sense strand starting at position 1541 of SEQ ID NO: 1562773
aguuaaagucagugucugu

SEQ ID NO: 1771762 - RNA, 19 nt, Artificial Sequence
  Description of Artificial Sequence: Synthetic oligonucleotide
  Antisense strand to SEQ ID NO: 1771761
acagacacugacuuuaacu

SEQ ID NO: 1771763 - RNA, 19 nt, Artificial Sequence
  Description of Artificial Sequence: Synthetic oligonucleotide
  Sense strand starting at position 2490 of SEQ ID NO: 1562773
agggaggugugguuagaga

SEQ ID NO: 1771764 - RNA, 19 nt, Artificial Sequence
  Description of Artificial Sequence: Synthetic oligonucleotide
  Antisense strand to SEQ ID NO: 1771763
ucucuaaccacaccucccu

SEQ ID NO: 1771765 - RNA, 19 nt, Artificial Sequence
  Description of Artificial Sequence: Synthetic oligonucleotide
  Sense strand starting at position 2523 of SEQ ID NO: 1562773
uggguuuagccagaagcca

SEQ ID NO: 1771766 - RNA, 19 nt, Artificial Sequence
  Description of Artificial Sequence: Synthetic oligonucleotide
  Antisense strand to SEQ ID NO: 1771765
uggcuucuggcuaaaccca

SEQ ID NO: 1771767 - RNA, 19 nt, Artificial Sequence
  Description of Artificial Sequence: Synthetic oligonucleotide
  Sense strand starting at position 2558 of SEQ ID NO: 1562773
caggaaucaugagauaaga

SEQ ID NO: 1771768 - RNA, 19 nt, Artificial Sequence
  Description of Artificial Sequence: Synthetic oligonucleotide
  Antisense strand to SEQ ID NO: 1771767
ucuuaucucaugauuccug

SEQ ID NO: 1771769 - RNA, 19 nt, Artificial Sequence
  Description of Artificial Sequence: Synthetic oligonucleotide
  Sense strand starting at position 2659 of SEQ ID NO: 1562773
cagcuuccugaagguauaa

SEQ ID NO: 1771770 - RNA, 19 nt, Artificial Sequence
  Description of Artificial Sequence: Synthetic oligonucleotide
  Antisense strand to SEQ ID NO: 1771769
uuauaccuucaggaagcug

SEQ ID NO: 1771771 - RNA, 19 nt, Artificial Sequence
  Description of Artificial Sequence: Synthetic oligonucleotide
  Sense strand starting at position 2762 of SEQ ID NO: 1562773
uccgucaucucacauacuu

SEQ ID NO: 1771772 - RNA, 19 nt, Artificial Sequence
  Description of Artificial Sequence: Synthetic oligonucleotide
  Antisense strand to SEQ ID NO: 1771771
aaguaugugagaugacgga

SEQ ID NO: 1771773 - RNA, 19 nt, Artificial Sequence
  Description of Artificial Sequence: Synthetic oligonucleotide
  Sense strand starting at position 2854 of SEQ ID NO: 1562773
gacuccauguuguacgaua

SEQ ID NO: 1771774 - RNA, 19 nt, Artificial Sequence
  Description of Artificial Sequence: Synthetic oligonucleotide
  Antisense strand to SEQ ID NO: 1771773
uaucguacaacauggaguc

SEQ ID NO: 1771775 - RNA, 19 nt, Artificial Sequence
  Description of Artificial Sequence: Synthetic oligonucleotide
  Sense strand starting at position 2856 of SEQ ID NO: 1562773
cuccauguuguacgauaca

SEQ ID NO: 1771776 - RNA, 19 nt, Artificial Sequence
  Description of Artificial Sequence: Synthetic oligonucleotide
  Antisense strand to SEQ ID NO: 1771775
uguaucguacaacauggag

SEQ ID NO: 1771777 - RNA, 19 nt, Artificial Sequence
  Description of Artificial Sequence: Synthetic oligonucleotide
  Sense strand starting at position 2859 of SEQ ID NO: 1562773
cauguuguacgauacaucu

SEQ ID NO: 1771778 - RNA, 19 nt, Artificial Sequence
  Description of Artificial Sequence: Synthetic oligonucleotide
  Antisense strand to SEQ ID NO: 1771777
agauguaucguacaacaug

SEQ ID NO: 1771779 - RNA, 19 nt, Artificial Sequence
  Description of Artificial Sequence: Synthetic oligonucleotide
  Sense strand starting at position 2866 of SEQ ID NO: 1562773
uacgauacaucuccagagu

SEQ ID NO: 1771780 - RNA, 19 nt, Artificial Sequence
  Description of Artificial Sequence: Synthetic oligonucleotide
  Antisense strand to SEQ ID NO: 1771779
acucuggagauguaucgua

SEQ ID NO: 1771781 - RNA, 19 nt, Artificial Sequence
  Description of Artificial Sequence: Synthetic oligonucleotide
  Sense strand starting at position 2867 of SEQ ID NO: 1562773
acgauacaucuccagaguu

SEQ ID NO: 1771782 - RNA, 19 nt, Artificial Sequence
  Description of Artificial Sequence: Synthetic oligonucleotide
  Antisense strand to SEQ ID NO: 1771781
aacucuggagauguaucgu

SEQ ID NO: 1771783 - RNA, 19 nt, Artificial Sequence
  Description of Artificial Sequence: Synthetic oligonucleotide
  Sense strand starting at position 2930 of SEQ ID NO: 1562773
cggugagugcaucauguca

SEQ ID NO: 1771784 - RNA, 19 nt, Artificial Sequence
  Description of Artificial Sequence: Synthetic oligonucleotide
  Antisense strand to SEQ ID NO: 1771783
ugacaugaugcacucaccg

SEQ ID NO: 1771785 - RNA, 19 nt, Artificial Sequence
  Description of Artificial Sequence: Synthetic oligonucleotide
  Sense strand starting at position 2932 of SEQ ID NO: 1562773
gugagugcaucaugucaug

SEQ ID NO: 1771786 - RNA, 19 nt, Artificial Sequence
  Description of Artificial Sequence: Synthetic oligonucleotide
  Antisense strand to SEQ ID NO: 1771785
caugacaugaugcacucac

SEQ ID NO: 1771787 - RNA, 19 nt, Artificial Sequence
  Description of Artificial Sequence: Synthetic oligonucleotide
  Sense strand starting at position 3020 of SEQ ID NO: 1562773
gugcuuugguguugaggga

SEQ ID NO: 1771788 - RNA, 19 nt, Artificial Sequence
  Description of Artificial Sequence: Synthetic oligonucleotide
  Antisense strand to SEQ ID NO: 1771787
ucccucaacaccaaagcac

SEQ ID NO: 1771789 - RNA, 19 nt, Artificial Sequence
  Description of Artificial Sequence: Synthetic oligonucleotide
  Sense strand starting at position 3209 of SEQ ID NO: 1562773
ugagguugguguugggaga

SEQ ID NO: 1771790 - RNA, 19 nt, Artificial Sequence
  Description of Artificial Sequence: Synthetic oligonucleotide
  Antisense strand to SEQ ID NO: 1771789
ucucccaacaccaaccuca

SEQ ID NO: 1771791 - RNA, 19 nt, Artificial Sequence
  Description of Artificial Sequence: Synthetic oligonucleotide
  Sense strand starting at position 3210 of SEQ ID NO: 1562773
gagguugguguugggagau

SEQ ID NO: 1771792 - RNA, 19 nt, Artificial Sequence
  Description of Artificial Sequence: Synthetic oligonucleotide
  Antisense strand to SEQ ID NO: 1771791
aucucccaacaccaaccuc

SEQ ID NO: 1771793 - RNA, 19 nt, Artificial Sequence
  Description of Artificial Sequence: Synthetic oligonucleotide
  Sense strand starting at position 3211 of SEQ ID NO: 1562773
agguugguguugggagaua

SEQ ID NO: 1771794 - RNA, 19 nt, Artificial Sequence
  Description of Artificial Sequence: Synthetic oligonucleotide
  Antisense strand to SEQ ID NO: 1771793
uaucucccaacaccaaccu

SEQ ID NO: 1771795 - RNA, 19 nt, Artificial Sequence
  Description of Artificial Sequence: Synthetic oligonucleotide
  Sense strand starting at position 3212 of SEQ ID NO: 1562773
gguugguguugggagauaa

SEQ ID NO: 1771796 - RNA, 19 nt, Artificial Sequence
  Description of Artificial Sequence: Synthetic oligonucleotide
  Antisense strand to SEQ ID NO: 1771795
uuaucucccaacaccaacc

SEQ ID NO: 1771797 - RNA, 19 nt, Artificial Sequence
  Description of Artificial Sequence: Synthetic oligonucleotide
  Sense strand starting at position 3216 of SEQ ID NO: 1562773
gguguugggagauaaugca

SEQ ID NO: 1771798 - RNA, 19 nt, Artificial Sequence
  Description of Artificial Sequence: Synthetic oligonucleotide
  Antisense strand to SEQ ID NO: 1771797
ugcauuaucucccaacacc

SEQ ID NO: 1771799 - RNA, 19 nt, Artificial Sequence
  Description of Artificial Sequence: Synthetic oligonucleotide
  Sense strand starting at position 3223 of SEQ ID NO: 1562773
ggagauaaugcaugucagu

SEQ ID NO: 1771800 - RNA, 19 nt, Artificial Sequence
  Description of Artificial Sequence: Synthetic oligonucleotide
  Antisense strand to SEQ ID NO: 1771799
acugacaugcauuaucucc

SEQ ID NO: 1771801 - RNA, 19 nt, Artificial Sequence
  Description of Artificial Sequence: Synthetic oligonucleotide
  Sense strand starting at position 3226 of SEQ ID NO: 1562773
gauaaugcaugucaguguu

SEQ ID NO: 1771802 - RNA, 19 nt, Artificial Sequence
  Description of Artificial Sequence: Synthetic oligonucleotide
  Antisense strand to SEQ ID NO: 1771801
aacacugacaugcauuauc

SEQ ID NO: 1771803 - RNA, 19 nt, Artificial Sequence
  Description of Artificial Sequence: Synthetic oligonucleotide
  Sense strand starting at position 3229 of SEQ ID NO: 1562773
aaugcaugucaguguuguu

SEQ ID NO: 1771804 - RNA, 19 nt, Artificial Sequence
  Description of Artificial Sequence: Synthetic oligonucleotide
  Antisense strand to SEQ ID NO: 1771803
aacaacacugacaugcauu

SEQ ID NO: 1771805 - RNA, 19 nt, Artificial Sequence
  Description of Artificial Sequence: Synthetic oligonucleotide
  Sense strand starting at position 3230 of SEQ ID NO: 1562773
augcaugucaguguuguuu

SEQ ID NO: 1771806 - RNA, 19 nt, Artificial Sequence
  Description of Artificial Sequence: Synthetic oligonucleotide
  Antisense strand to SEQ ID NO: 1771805
aaacaacacugacaugcau

SEQ ID NO: 1771807 - RNA, 19 nt, Artificial Sequence
  Description of Artificial Sequence: Synthetic oligonucleotide
  Sense strand starting at position 3730 of SEQ ID NO: 1562773
ggcgcaaucuuagcucaug

SEQ ID NO: 1771808 - RNA, 19 nt, Artificial Sequence
  Description of Artificial Sequence: Synthetic oligonucleotide
  Antisense strand to SEQ ID NO: 1771807
caugagcuaagauugcgcc

SEQ ID NO: 1771809 - RNA, 19 nt, Artificial Sequence
  Description of Artificial Sequence: Synthetic oligonucleotide
  Sense strand starting at position 3733 of SEQ ID NO: 1562773
gcaaucuuagcucauggca

SEQ ID NO: 1771810 - RNA, 19 nt, Artificial Sequence
  Description of Artificial Sequence: Synthetic oligonucleotide
  Antisense strand to SEQ ID NO: 1771809
ugccaugagcuaagauugc

SEQ ID NO: 1771811 - RNA, 19 nt, Artificial Sequence
  Description of Artificial Sequence: Synthetic oligonucleotide
  Sense strand starting at position 153 of SEQ ID NO: 1562774
gcaacagaucaagacuguu

SEQ ID NO: 1771812 - RNA, 19 nt, Artificial Sequence
  Description of Artificial Sequence: Synthetic oligonucleotide
  Antisense strand to SEQ ID NO: 1771811
aacagucuugaucuguugc

SEQ ID NO: 1771813 - RNA, 19 nt, Artificial Sequence
  Description of Artificial Sequence: Synthetic oligonucleotide
  Sense strand starting at position 266 of SEQ ID NO: 1562774
acuaauaaugcugagcuaa

SEQ ID NO: 1771814 - RNA, 19 nt, Artificial Sequence
  Description of Artificial Sequence: Synthetic oligonucleotide
  Antisense strand to SEQ ID NO: 1771813
uuagcucagcauuauuagu

SEQ ID NO: 1771815 - RNA, 19 nt, Artificial Sequence
  Description of Artificial Sequence: Synthetic oligonucleotide
  Sense strand starting at position 305 of SEQ ID NO: 1562774
ugguuacagcuuugauuau

SEQ ID NO: 1771816 - RNA, 19 nt, Artificial Sequence
  Description of Artificial Sequence: Synthetic oligonucleotide
  Antisense strand to SEQ ID NO: 1771815
auaaucaaagcuguaacca

SEQ ID NO: 1771817 - RNA, 19 nt, Artificial Sequence
  Description of Artificial Sequence: Synthetic oligonucleotide
  Sense strand starting at position 357 of SEQ ID NO: 1562774
aguggaauugcccaguuua

SEQ ID NO: 1771818 - RNA, 19 nt, Artificial Sequence
  Description of Artificial Sequence: Synthetic oligonucleotide
  Antisense strand to SEQ ID NO: 1771817
uaaacugggcaauuccacu

SEQ ID NO: 1771819 - RNA, 19 nt, Artificial Sequence
  Description of Artificial Sequence: Synthetic oligonucleotide
  Sense strand starting at position 951 of SEQ ID NO: 1562774
gccuguuccaaugacugga

SEQ ID NO: 1771820 - RNA, 19 nt, Artificial Sequence
  Description of Artificial Sequence: Synthetic oligonucleotide
  Antisense strand to SEQ ID NO: 1771819
uccagucauuggaacaggc

SEQ ID NO: 1771821 - RNA, 19 nt, Artificial Sequence
  Description of Artificial Sequence: Synthetic oligonucleotide
  Sense strand starting at position 1023 of SEQ ID NO: 1562774
aagcauuuaugugcaaguu

SEQ ID NO: 1771822 - RNA, 19 nt, Artificial Sequence
  Description of Artificial Sequence: Synthetic oligonucleotide
  Antisense strand to SEQ ID NO: 1771821
aacuugcacauaaaugcuu

SEQ ID NO: 1771823 - RNA, 19 nt, Artificial Sequence
  Description of Artificial Sequence: Synthetic oligonucleotide
  Sense strand starting at position 1239 of SEQ ID NO: 1562774
ggacuaggacuaggugauu

SEQ ID NO: 1771824 - RNA, 19 nt, Artificial Sequence
  Description of Artificial Sequence: Synthetic oligonucleotide
  Antisense strand to SEQ ID NO: 1771823
aaucaccuaguccuagucc

SEQ ID NO: 1771825 - RNA, 19 nt, Artificial Sequence
  Description of Artificial Sequence: Synthetic oligonucleotide
  Sense strand starting at position 1260 of SEQ ID NO: 1562774
ggcacugacccuggugaaa

SEQ ID NO: 1771826 - RNA, 19 nt, Artificial Sequence
  Description of Artificial Sequence: Synthetic oligonucleotide
  Antisense strand to SEQ ID NO: 1771825
uuucaccagggucagugcc

SEQ ID NO: 1771827 - RNA, 19 nt, Artificial Sequence
  Description of Artificial Sequence: Synthetic oligonucleotide
  Sense strand starting at position 1419 of SEQ ID NO: 1562774
ggguuaaccuuccuccuca

SEQ ID NO: 1771828 - RNA, 19 nt, Artificial Sequence
  Description of Artificial Sequence: Synthetic oligonucleotide
  Antisense strand to SEQ ID NO: 1771827
ugaggaggaagguuaaccc

SEQ ID NO: 1771829 - RNA, 19 nt, Artificial Sequence
  Description of Artificial Sequence: Synthetic oligonucleotide
  Sense strand starting at position 2348 of SEQ ID NO: 1562774
gucauaaauguggagucua

SEQ ID NO: 1771830 - RNA, 19 nt, Artificial Sequence
  Description of Artificial Sequence: Synthetic oligonucleotide
  Antisense strand to SEQ ID NO: 1771829
uagacuccacauuuaugac

SEQ ID NO: 1771831 - RNA, 19 nt, Artificial Sequence
  Description of Artificial Sequence: Synthetic oligonucleotide
  Sense strand starting at position 2417 of SEQ ID NO: 1562774
gagaguuccucugcagcau

SEQ ID NO: 1771832 - RNA, 19 nt, Artificial Sequence
  Description of Artificial Sequence: Synthetic oligonucleotide
  Antisense strand to SEQ ID NO: 1771831
augcugcagaggaacucuc

SEQ ID NO: 1771833 - RNA, 19 nt, Artificial Sequence
  Description of Artificial Sequence: Synthetic oligonucleotide
  Sense strand starting at position 2430 of SEQ ID NO: 1562774
cagcaugaagcuuaugaga

SEQ ID NO: 1771834 - RNA, 19 nt, Artificial Sequence
  Description of Artificial Sequence: Synthetic oligonucleotide
  Antisense strand to SEQ ID NO: 1771833
ucucauaagcuucaugcug

SEQ ID NO: 1771835 - RNA, 19 nt, Artificial Sequence
  Description of Artificial Sequence: Synthetic oligonucleotide
  Sense strand starting at position 2455 of SEQ ID NO: 1562774
gaaaccauguguuugcuaa

SEQ ID NO: 1771836 - RNA, 19 nt, Artificial Sequence
  Description of Artificial Sequence: Synthetic oligonucleotide
  Antisense strand to SEQ ID NO: 1771835
uuagcaaacacaugguuuc

SEQ ID NO: 1771837 - RNA, 19 nt, Artificial Sequence
  Description of Artificial Sequence: Synthetic oligonucleotide
  Sense strand starting at position 2456 of SEQ ID NO: 1562774
aaaccauguguuugcuaag

SEQ ID NO: 1771838 - RNA, 19 nt, Artificial Sequence
  Description of Artificial Sequence: Synthetic oligonucleotide
  Antisense strand to SEQ ID NO: 1771837
cuuagcaaacacaugguuu

SEQ ID NO: 1771839 - RNA, 19 nt, Artificial Sequence
  Description of Artificial Sequence: Synthetic oligonucleotide
  Sense strand starting at position 2474 of SEQ ID NO: 1562774
gcacucaguggguguugaa

SEQ ID NO: 1771840 - RNA, 19 nt, Artificial Sequence
  Description of Artificial Sequence: Synthetic oligonucleotide
  Antisense strand to SEQ ID NO: 1771839
uucaacacccacugagugc

SEQ ID NO: 1771841 - RNA, 19 nt, Artificial Sequence
  Description of Artificial Sequence: Synthetic oligonucleotide
  Sense strand starting at position 2481 of SEQ ID NO: 1562774
guggguguugaauaaauuc

SEQ ID NO: 1771842 - RNA, 19 nt, Artificial Sequence
  Description of Artificial Sequence: Synthetic oligonucleotide
  Antisense strand to SEQ ID NO: 1771841
gaauuuauucaacacccac

SEQ ID NO: 1771843 - RNA, 19 nt, Artificial Sequence
  Description of Artificial Sequence: Synthetic oligonucleotide
  Sense strand starting at position 2516 of SEQ ID NO: 1562774
cuucucuuacuuugggauu

SEQ ID NO: 1771844 - RNA, 19 nt, Artificial Sequence
  Description of Artificial Sequence: Synthetic oligonucleotide
  Antisense strand to SEQ ID NO: 1771843
aaucccaaaguaagagaag

SEQ ID NO: 1771845 - RNA, 19 nt, Artificial Sequence
  Description of Artificial Sequence: Synthetic oligonucleotide
  Sense strand starting at position 2606 of SEQ ID NO: 1562774
agaugaaugcaggguccaa

SEQ ID NO: 1771846 - RNA, 19 nt, Artificial Sequence
  Description of Artificial Sequence: Synthetic oligonucleotide
  Antisense strand to SEQ ID NO: 1771845
uuggacccugcauucaucu

SEQ ID NO: 1771847 - RNA, 19 nt, Artificial Sequence
  Description of Artificial Sequence: Synthetic oligonucleotide
  Sense strand starting at position 2787 of SEQ ID NO: 1562774
acuauaauaugggaauaug

SEQ ID NO: 1771848 - RNA, 19 nt, Artificial Sequence
  Description of Artificial Sequence: Synthetic oligonucleotide
  Antisense strand to SEQ ID NO: 1771847
cauauucccauauuauagu

SEQ ID NO: 1771849 - RNA, 19 nt, Artificial Sequence
  Description of Artificial Sequence: Synthetic oligonucleotide
  Sense strand starting at position 2851 of SEQ ID NO: 1562774
gcacuaauccugggagcua

SEQ ID NO: 1771850 - RNA, 19 nt, Artificial Sequence
  Description of Artificial Sequence: Synthetic oligonucleotide
  Antisense strand to SEQ ID NO: 1771849
uagcucccaggauuagugc

SEQ ID NO: 1771851 - RNA, 19 nt, Artificial Sequence
  Description of Artificial Sequence: Synthetic oligonucleotide
  Sense strand starting at position 3116 of SEQ ID NO: 1562774
gacuaaaucugguugaaua

SEQ ID NO: 1771852 - RNA, 19 nt, Artificial Sequence
  Description of Artificial Sequence: Synthetic oligonucleotide
  Antisense strand to SEQ ID NO: 1771851
uauucaaccagauuuaguc

SEQ ID NO: 1771853 - RNA, 19 nt, Artificial Sequence
  Description of Artificial Sequence: Synthetic oligonucleotide
  Sense strand starting at position 3468 of SEQ ID NO: 1562774
cugggaggcuccuuugaga

SEQ ID NO: 1771854 - RNA, 19 nt, Artificial Sequence
  Description of Artificial Sequence: Synthetic oligonucleotide
  Antisense strand to SEQ ID NO: 1771853
ucucaaaggagccucccag

SEQ ID NO: 1771855 - RNA, 19 nt, Artificial Sequence
  Description of Artificial Sequence: Synthetic oligonucleotide
  Sense strand starting at position 3479 of SEQ ID NO: 1562774
cuuugagaauugcuugguu

SEQ ID NO: 1771856 - RNA, 19 nt, Artificial Sequence
  Description of Artificial Sequence: Synthetic oligonucleotide
  Antisense strand to SEQ ID NO: 1771855
aaccaagcaauucucaaag

SEQ ID NO: 1771857 - RNA, 19 nt, Artificial Sequence
  Description of Artificial Sequence: Synthetic oligonucleotide
  Sense strand starting at position 3505 of SEQ ID NO: 1562774
ugugucagauacuccuuaa

SEQ ID NO: 1771858 - RNA, 19 nt, Artificial Sequence
  Description of Artificial Sequence: Synthetic oligonucleotide
  Antisense strand to SEQ ID NO: 1771857
uuaaggaguaucugacaca

SEQ ID NO: 1771859 - RNA, 19 nt, Artificial Sequence
  Description of Artificial Sequence: Synthetic oligonucleotide
  Sense strand starting at position 3528 of SEQ ID NO: 1562774
cuugauacauuuggugaca

SEQ ID NO: 1771860 - RNA, 19 nt, Artificial Sequence
  Description of Artificial Sequence: Synthetic oligonucleotide
  Antisense strand to SEQ ID NO: 1771859
ugucaccaaauguaucaag

SEQ ID NO: 1771861 - RNA, 19 nt, Artificial Sequence
  Description of Artificial Sequence: Synthetic oligonucleotide
  Sense strand starting at position 3530 of SEQ ID NO: 1562774
ugauacauuuggugacaau

SEQ ID NO: 1771862 - RNA, 19 nt, Artificial Sequence
  Description of Artificial Sequence: Synthetic oligonucleotide
  Antisense strand to SEQ ID NO: 1771861
auugucaccaaauguauca

SEQ ID NO: 1771863 - RNA, 19 nt, Artificial Sequence
  Description of Artificial Sequence: Synthetic oligonucleotide
  Sense strand starting at position 3580 of SEQ ID NO: 1562774
agacaaauagccugagacu

SEQ ID NO: 1771864 - RNA, 19 nt, Artificial Sequence
  Description of Artificial Sequence: Synthetic oligonucleotide
  Antisense strand to SEQ ID NO: 1771863
agucucaggcuauuugucu

SEQ ID NO: 1771865 - RNA, 19 nt, Artificial Sequence
  Description of Artificial Sequence: Synthetic oligonucleotide
  Sense strand starting at position 3609 of SEQ ID NO: 1562774
gauaaaguugaugguuguu

SEQ ID NO: 1771866 - RNA, 19 nt, Artificial Sequence
  Description of Artificial Sequence: Synthetic oligonucleotide
  Antisense strand to SEQ ID NO: 1771865
aacaaccaucaacuuuauc

SEQ ID NO: 1771867 - RNA, 19 nt, Artificial Sequence
  Description of Artificial Sequence: Synthetic oligonucleotide
  Sense strand starting at position 3628 of SEQ ID NO: 1562774
gggagacaguggucuacua

SEQ ID NO: 1771868 - RNA, 19 nt, Artificial Sequence
  Description of Artificial Sequence: Synthetic oligonucleotide
  Antisense strand to SEQ ID NO: 1771867
uaguagaccacugucuccc

SEQ ID NO: 1771869 - RNA, 19 nt, Artificial Sequence
  Description of Artificial Sequence: Synthetic oligonucleotide
  Sense strand starting at position 3630 of SEQ ID NO: 1562774
gagacaguggucuacuaug

SEQ ID NO: 1771870 - RNA, 19 nt, Artificial Sequence
  Description of Artificial Sequence: Synthetic oligonucleotide
  Antisense strand to SEQ ID NO: 1771869
cauaguagaccacugucuc

SEQ ID NO: 1771871 - RNA, 19 nt, Artificial Sequence
  Description of Artificial Sequence: Synthetic oligonucleotide
  Sense strand starting at position 3686 of SEQ ID NO: 1562774
cugauuguggauuaucuuu

SEQ ID NO: 1771872 - RNA, 19 nt, Artificial Sequence
  Description of Artificial Sequence: Synthetic oligonucleotide
  Antisense strand to SEQ ID NO: 1771871
aaagauaauccacaaucag

SEQ ID NO: 1771873 - RNA, 19 nt, Artificial Sequence
  Description of Artificial Sequence: Synthetic oligonucleotide
  Sense strand starting at position 3703 of SEQ ID NO: 1562774
uuucaagaguguuugugga

SEQ ID NO: 1771874 - RNA, 19 nt, Artificial Sequence
  Description of Artificial Sequence: Synthetic oligonucleotide
  Antisense strand to SEQ ID NO: 1771873
uccacaaacacucuugaaa

SEQ ID NO: 1771875 - RNA, 19 nt, Artificial Sequence
  Description of Artificial Sequence: Synthetic oligonucleotide
  Sense strand starting at position 3705 of SEQ ID NO: 1562774
ucaagaguguuuguggagu

SEQ ID NO: 1771876 - RNA, 19 nt, Artificial Sequence
  Description of Artificial Sequence: Synthetic oligonucleotide
  Antisense strand to SEQ ID NO: 1771875
acuccacaaacacucuuga

SEQ ID NO: 1771877 - RNA, 19 nt, Artificial Sequence
  Description of Artificial Sequence: Synthetic oligonucleotide
  Sense strand starting at position 3744 of SEQ ID NO: 1562774
gagaaugccucucuuugga

SEQ ID NO: 1771878 - RNA, 19 nt, Artificial Sequence
  Description of Artificial Sequence: Synthetic oligonucleotide
  Antisense strand to SEQ ID NO: 1771877
uccaaagagaggcauucuc

SEQ ID NO: 1771879 - RNA, 19 nt, Artificial Sequence
  Description of Artificial Sequence: Synthetic oligonucleotide
  Sense strand starting at position 3770 of SEQ ID NO: 1562774
acagauauaugcuuacugu

SEQ ID NO: 1771880 - RNA, 19 nt, Artificial Sequence
  Description of Artificial Sequence: Synthetic oligonucleotide
  Antisense strand to SEQ ID NO: 1771879
acaguaagcauauaucugu

SEQ ID NO: 1771881 - RNA, 19 nt, Artificial Sequence
  Description of Artificial Sequence: Synthetic oligonucleotide
  Sense strand starting at position 3846 of SEQ ID NO: 1562774
uuugcaucaccuuguggaa

SEQ ID NO: 1771882 - RNA, 19 nt, Artificial Sequence
  Description of Artificial Sequence: Synthetic oligonucleotide
  Antisense strand to SEQ ID NO: 1771881
uuccacaaggugaugcaaa

SEQ ID NO: 1771883 - RNA, 19 nt, Artificial Sequence
  Description of Artificial Sequence: Synthetic oligonucleotide
  Sense strand starting at position 3879 of SEQ ID NO: 1562774
ugcugauaccuuggcaacu

SEQ ID NO: 1771884 - RNA, 19 nt, Artificial Sequence
  Description of Artificial Sequence: Synthetic oligonucleotide
  Antisense strand to SEQ ID NO: 1771883
aguugccaagguaucagca

SEQ ID NO: 1771885 - RNA, 19 nt, Artificial Sequence
  Description of Artificial Sequence: Synthetic oligonucleotide
  Sense strand starting at position 3913 of SEQ ID NO: 1562774
aacagauuauucguugucu

SEQ ID NO: 1771886 - RNA, 19 nt, Artificial Sequence
  Description of Artificial Sequence: Synthetic oligonucleotide
  Antisense strand to SEQ ID NO: 1771885
agacaacgaauaaucuguu

SEQ ID NO: 1771887 - RNA, 19 nt, Artificial Sequence
  Description of Artificial Sequence: Synthetic oligonucleotide
  Sense strand starting at position 3914 of SEQ ID NO: 1562774
acagauuauucguugucuc

SEQ ID NO: 1771888 - RNA, 19 nt, Artificial Sequence
  Description of Artificial Sequence: Synthetic oligonucleotide
  Antisense strand to SEQ ID NO: 1771887
gagacaacgaauaaucugu

SEQ ID NO: 1771889 - RNA, 19 nt, Artificial Sequence
  Description of Artificial Sequence: Synthetic oligonucleotide
  Sense strand starting at position 3917 of SEQ ID NO: 1562774
gauuauucguugucucuga

SEQ ID NO: 1771890 - RNA, 19 nt, Artificial Sequence
  Description of Artificial Sequence: Synthetic oligonucleotide
  Antisense strand to SEQ ID NO: 1771889
ucagagacaacgaauaauc

SEQ ID NO: 1771891 - RNA, 19 nt, Artificial Sequence
  Description of Artificial Sequence: Synthetic oligonucleotide
  Sense strand starting at position 253 of SEQ ID NO: 1562775
ccuggaauuccguacacuu

SEQ ID NO: 1771892 - RNA, 19 nt, Artificial Sequence
  Description of Artificial Sequence: Synthetic oligonucleotide
  Antisense strand to SEQ ID NO: 1771891
aaguguacggaauuccagg

SEQ ID NO: 1771893 - RNA, 19 nt, Artificial Sequence
  Description of Artificial Sequence: Synthetic oligonucleotide
  Sense strand starting at position 285 of SEQ ID NO: 1562775
gcagcuuugcuagacaguu

SEQ ID NO: 1771894 - RNA, 19 nt, Artificial Sequence
  Description of Artificial Sequence: Synthetic oligonucleotide
  Antisense strand to SEQ ID NO: 1771893
aacugucuagcaaagcugc

SEQ ID NO: 1771895 - RNA, 19 nt, Artificial Sequence
  Description of Artificial Sequence: Synthetic oligonucleotide
  Sense strand starting at position 293 of SEQ ID NO: 1562775
gcuagacaguucccuaacu

SEQ ID NO: 1771896 - RNA, 19 nt, Artificial Sequence
  Description of Artificial Sequence: Synthetic oligonucleotide
  Antisense strand to SEQ ID NO: 1771895
aguuagggaacugucuagc

SEQ ID NO: 1771897 - RNA, 19 nt, Artificial Sequence
  Description of Artificial Sequence: Synthetic oligonucleotide
  Sense strand starting at position 336 of SEQ ID NO: 1562775
ggguuaggucucuggauau

SEQ ID NO: 1771898 - RNA, 19 nt, Artificial Sequence
  Description of Artificial Sequence: Synthetic oligonucleotide
  Antisense strand to SEQ ID NO: 1771897
auauccagagaccuaaccc

SEQ ID NO: 1771899 - RNA, 19 nt, Artificial Sequence
  Description of Artificial Sequence: Synthetic oligonucleotide
  Sense strand starting at position 509 of SEQ ID NO: 1562775
ggaccugcuuugcccaaua

SEQ ID NO: 1771900 - RNA, 19 nt, Artificial Sequence
  Description of Artificial Sequence: Synthetic oligonucleotide
  Antisense strand to SEQ ID NO: 1771899
uauugggcaaagcaggucc

SEQ ID NO: 1771901 - RNA, 19 nt, Artificial Sequence
  Description of Artificial Sequence: Synthetic oligonucleotide
  Sense strand starting at position 511 of SEQ ID NO: 1562775
accugcuuugcccaauagu

SEQ ID NO: 1771902 - RNA, 19 nt, Artificial Sequence
  Description of Artificial Sequence: Synthetic oligonucleotide
  Antisense strand to SEQ ID NO: 1771901
acuauugggcaaagcaggu

SEQ ID NO: 1771903 - RNA, 19 nt, Artificial Sequence
  Description of Artificial Sequence: Synthetic oligonucleotide
  Sense strand starting at position 528 of SEQ ID NO: 1562775
guggaagucacaggacauu

SEQ ID NO: 1771904 - RNA, 19 nt, Artificial Sequence
  Description of Artificial Sequence: Synthetic oligonucleotide
  Antisense strand to SEQ ID NO: 1771903
aauguccugugacuuccac

SEQ ID NO: 1771905 - RNA, 19 nt, Artificial Sequence
  Description of Artificial Sequence: Synthetic oligonucleotide
  Sense strand starting at position 619 of SEQ ID NO: 1562775
uucgguaaauccuccauaa

SEQ ID NO: 1771906 - RNA, 19 nt, Artificial Sequence
  Description of Artificial Sequence: Synthetic oligonucleotide
  Antisense strand to SEQ ID NO: 1771905
uuauggaggauuuaccgaa

SEQ ID NO: 1771907 - RNA, 19 nt, Artificial Sequence
  Description of Artificial Sequence: Synthetic oligonucleotide
  Sense strand starting at position 648 of SEQ ID NO: 1562775
ggagaaauaucccuuuguu

SEQ ID NO: 1771908 - RNA, 19 nt, Artificial Sequence
  Description of Artificial Sequence: Synthetic oligonucleotide
  Antisense strand to SEQ ID NO: 1771907
aacaaagggauauuucucc

SEQ ID NO: 1771909 - RNA, 19 nt, Artificial Sequence
  Description of Artificial Sequence: Synthetic oligonucleotide
  Sense strand starting at position 680 of SEQ ID NO: 1562775
cucagauacugagcauuau

SEQ ID NO: 1771910 - RNA, 19 nt, Artificial Sequence
  Description of Artificial Sequence: Synthetic oligonucleotide
  Antisense strand to SEQ ID NO: 1771909
auaaugcucaguaucugag

SEQ ID NO: 1771911 - RNA, 19 nt, Artificial Sequence
  Description of Artificial Sequence: Synthetic oligonucleotide
  Sense strand starting at position 681 of SEQ ID NO: 1562775
ucagauacugagcauuauu

SEQ ID NO: 1771912 - RNA, 19 nt, Artificial Sequence
  Description of Artificial Sequence: Synthetic oligonucleotide
  Antisense strand to SEQ ID NO: 1771911
aauaaugcucaguaucuga

SEQ ID NO: 1771913 - RNA, 19 nt, Artificial Sequence
  Description of Artificial Sequence: Synthetic oligonucleotide
  Sense strand starting at position 1571 of SEQ ID NO: 1562775
ccgcgauaucugugcccaa

SEQ ID NO: 1771914 - RNA, 19 nt, Artificial Sequence
  Description of Artificial Sequence: Synthetic oligonucleotide
  Antisense strand to SEQ ID NO: 1771913
uugggcacagauaucgcgg

SEQ ID NO: 1771915 - RNA, 19 nt, Artificial Sequence
  Description of Artificial Sequence: Synthetic oligonucleotide
  Sense strand starting at position 2020 of SEQ ID NO: 1562775
ggaggaguuuagucuggga

SEQ ID NO: 1771916 - RNA, 19 nt, Artificial Sequence
  Description of Artificial Sequence: Synthetic oligonucleotide
  Antisense strand to SEQ ID NO: 1771915
ucccagacuaaacuccucc

SEQ ID NO: 1771917 - RNA, 19 nt, Artificial Sequence
  Description of Artificial Sequence: Synthetic oligonucleotide
  Sense strand starting at position 2382 of SEQ ID NO: 1562775
ugggucacuggacgugaaa

SEQ ID NO: 1771918 - RNA, 19 nt, Artificial Sequence
  Description of Artificial Sequence: Synthetic oligonucleotide
  Antisense strand to SEQ ID NO: 1771917
uuucacguccagugaccca

SEQ ID NO: 1771919 - RNA, 19 nt, Artificial Sequence
  Description of Artificial Sequence: Synthetic oligonucleotide
  Sense strand starting at position 2384 of SEQ ID NO: 1562775
ggucacuggacgugaaauc

SEQ ID NO: 1771920 - RNA, 19 nt, Artificial Sequence
  Description of Artificial Sequence: Synthetic oligonucleotide
  Antisense strand to SEQ ID NO: 1771919
gauuucacguccagugacc

SEQ ID NO: 1771921 - RNA, 19 nt, Artificial Sequence
  Description of Artificial Sequence: Synthetic oligonucleotide
  Sense strand starting at position 2782 of SEQ ID NO: 1562775
caacuuaccuggucuguga

SEQ ID NO: 1771922 - RNA, 19 nt, Artificial Sequence
  Description of Artificial Sequence: Synthetic oligonucleotide
  Antisense strand to SEQ ID NO: 1771921
ucacagaccagguaaguug

SEQ ID NO: 1771923 - RNA, 19 nt, Artificial Sequence
  Description of Artificial Sequence: Synthetic oligonucleotide
  Sense strand starting at position 2784 of SEQ ID NO: 1562775
acuuaccuggucugugaga

SEQ ID NO: 1771924 - RNA, 19 nt, Artificial Sequence
  Description of Artificial Sequence: Synthetic oligonucleotide
  Antisense strand to SEQ ID NO: 1771923
ucucacagaccagguaagu

SEQ ID NO: 1771925 - RNA, 19 nt, Artificial Sequence
  Description of Artificial Sequence: Synthetic oligonucleotide
  Sense strand starting at position 2786 of SEQ ID NO: 1562775
uuaccuggucugugagacu

SEQ ID NO: 1771926 - RNA, 19 nt, Artificial Sequence
  Description of Artificial Sequence: Synthetic oligonucleotide
  Antisense strand to SEQ ID NO: 1771925
agucucacagaccagguaa

SEQ ID NO: 1771927 - RNA, 19 nt, Artificial Sequence
  Description of Artificial Sequence: Synthetic oligonucleotide
  Sense strand starting at position 2818 of SEQ ID NO: 1562775
accuaagagagucguuacu

SEQ ID NO: 1771928 - RNA, 19 nt, Artificial Sequence
  Description of Artificial Sequence: Synthetic oligonucleotide
  Antisense strand to SEQ ID NO: 1771927
aguaacgacucucuuaggu

SEQ ID NO: 1771929 - RNA, 19 nt, Artificial Sequence
  Description of Artificial Sequence: Synthetic oligonucleotide
  Sense strand starting at position 2820 of SEQ ID NO: 1562775
cuaagagagucguuacuuc

SEQ ID NO: 1771930 - RNA, 19 nt, Artificial Sequence
  Description of Artificial Sequence: Synthetic oligonucleotide
  Antisense strand to SEQ ID NO: 1771929
gaaguaacgacucucuuag

SEQ ID NO: 1771931 - RNA, 19 nt, Artificial Sequence
  Description of Artificial Sequence: Synthetic oligonucleotide
  Sense strand starting at position 2862 of SEQ ID NO: 1562775
ggaagcugucgccagcgaa

SEQ ID NO: 1771932 - RNA, 19 nt, Artificial Sequence
  Description of Artificial Sequence: Synthetic oligonucleotide
  Antisense strand to SEQ ID NO: 1771931
uucgcuggcgacagcuucc

SEQ ID NO: 1771933 - RNA, 19 nt, Artificial Sequence
  Description of Artificial Sequence: Synthetic oligonucleotide
  Sense strand starting at position 2865 of SEQ ID NO: 1562775
agcugucgccagcgaauua

SEQ ID NO: 1771934 - RNA, 19 nt, Artificial Sequence
  Description of Artificial Sequence: Synthetic oligonucleotide
  Antisense strand to SEQ ID NO: 1771933
uaauucgcuggcgacagcu

SEQ ID NO: 1771935 - RNA, 19 nt, Artificial Sequence
  Description of Artificial Sequence: Synthetic oligonucleotide
  Sense strand starting at position 2890 of SEQ ID NO: 1562775
ucaugagucuccuucuuag

SEQ ID NO: 1771936 - RNA, 19 nt, Artificial Sequence
  Description of Artificial Sequence: Synthetic oligonucleotide
  Antisense strand to SEQ ID NO: 1771935
cuaagaaggagacucauga

SEQ ID NO: 1771937 - RNA, 19 nt, Artificial Sequence
  Description of Artificial Sequence: Synthetic oligonucleotide
  Sense strand starting at position 3366 of SEQ ID NO: 1562775
agucuaaauagauguagag

SEQ ID NO: 1771938 - RNA, 19 nt, Artificial Sequence
  Description of Artificial Sequence: Synthetic oligonucleotide
  Antisense strand to SEQ ID NO: 1771937
cucuacaucuauuuagacu

SEQ ID NO: 1771939 - RNA, 19 nt, Artificial Sequence
  Description of Artificial Sequence: Synthetic oligonucleotide
  Sense strand starting at position 3375 of SEQ ID NO: 1562775
agauguagaggauguaacu

SEQ ID NO: 1771940 - RNA, 19 nt, Artificial Sequence
  Description of Artificial Sequence: Synthetic oligonucleotide
  Antisense strand to SEQ ID NO: 1771939
aguuacauccucuacaucu

SEQ ID NO: 1771941 - RNA, 19 nt, Artificial Sequence
  Description of Artificial Sequence: Synthetic oligonucleotide
  Sense strand starting at position 3381 of SEQ ID NO: 1562775
agaggauguaacuguuacu

SEQ ID NO: 1771942 - RNA, 19 nt, Artificial Sequence
  Description of Artificial Sequence: Synthetic oligonucleotide
  Antisense strand to SEQ ID NO: 1771941
aguaacaguuacauccucu

SEQ ID NO: 1771943 - RNA, 19 nt, Artificial Sequence
  Description of Artificial Sequence: Synthetic oligonucleotide
  Sense strand starting at position 3384 of SEQ ID NO: 1562775
ggauguaacuguuacuuaa

SEQ ID NO: 1771944 - RNA, 19 nt, Artificial Sequence
  Description of Artificial Sequence: Synthetic oligonucleotide
  Antisense strand to SEQ ID NO: 1771943
uuaaguaacaguuacaucc

SEQ ID NO: 1771945 - RNA, 19 nt, Artificial Sequence
  Description of Artificial Sequence: Synthetic oligonucleotide
  Sense strand starting at position 3426 of SEQ ID NO: 1562775
cuucuaagauguguucuag

SEQ ID NO: 1771946 - RNA, 19 nt, Artificial Sequence
  Description of Artificial Sequence: Synthetic oligonucleotide
  Antisense strand to SEQ ID NO: 1771945
cuagaacacaucuuagaag

SEQ ID NO: 1771947 - RNA, 19 nt, Artificial Sequence
  Description of Artificial Sequence: Synthetic oligonucleotide
  Sense strand starting at position 3430 of SEQ ID NO: 1562775
uaagauguguucuaggauc

SEQ ID NO: 1771948 - RNA, 19 nt, Artificial Sequence
  Description of Artificial Sequence: Synthetic oligonucleotide
  Antisense strand to SEQ ID NO: 1771947
gauccuagaacacaucuua

SEQ ID NO: 1771949 - RNA, 19 nt, Artificial Sequence
  Description of Artificial Sequence: Synthetic oligonucleotide
  Sense strand starting at position 3503 of SEQ ID NO: 1562775
cccagaggcuugguucuaa

SEQ ID NO: 1771950 - RNA, 19 nt, Artificial Sequence
  Description of Artificial Sequence: Synthetic oligonucleotide
  Antisense strand to SEQ ID NO: 1771949
uuagaaccaagccucuggg

SEQ ID NO: 1771951 - RNA, 19 nt, Artificial Sequence
  Description of Artificial Sequence: Synthetic oligonucleotide
  Sense strand starting at position 3507 of SEQ ID NO: 1562775
gaggcuugguucuaacaau

SEQ ID NO: 1771952 - RNA, 19 nt, Artificial Sequence
  Description of Artificial Sequence: Synthetic oligonucleotide
  Antisense strand to SEQ ID NO: 1771951
auuguuagaaccaagccuc

SEQ ID NO: 1771953 - RNA, 19 nt, Artificial Sequence
  Description of Artificial Sequence: Synthetic oligonucleotide
  Sense strand starting at position 3557 of SEQ ID NO: 1562775
ggaugucacuuacaagauu

SEQ ID NO: 1771954 - RNA, 19 nt, Artificial Sequence
  Description of Artificial Sequence: Synthetic oligonucleotide
  Antisense strand to SEQ ID NO: 1771953
aaucuuguaagugacaucc

SEQ ID NO: 1771955 - RNA, 19 nt, Artificial Sequence
  Description of Artificial Sequence: Synthetic oligonucleotide
  Sense strand starting at position 3625 of SEQ ID NO: 1562775
gcuccuagcucuuagggaa

SEQ ID NO: 1771956 - RNA, 19 nt, Artificial Sequence
  Description of Artificial Sequence: Synthetic oligonucleotide
  Antisense strand to SEQ ID NO: 1771955
uucccuaagagcuaggagc

SEQ ID NO: 1771957 - RNA, 19 nt, Artificial Sequence
  Description of Artificial Sequence: Synthetic oligonucleotide
  Sense strand starting at position 3721 of SEQ ID NO: 1562775
uugccauuauuaguacaua

SEQ ID NO: 1771958 - RNA, 19 nt, Artificial Sequence
  Description of Artificial Sequence: Synthetic oligonucleotide
  Antisense strand to SEQ ID NO: 1771957
uauguacuaauaauggcaa

SEQ ID NO: 1771959 - RNA, 19 nt, Artificial Sequence
  Description of Artificial Sequence: Synthetic oligonucleotide
  Sense strand starting at position 3814 of SEQ ID NO: 1562775
uccuaauuaguugauguau

SEQ ID NO: 1771960 - RNA, 19 nt, Artificial Sequence
  Description of Artificial Sequence: Synthetic oligonucleotide
  Antisense strand to SEQ ID NO: 1771959
auacaucaacuaauuagga

SEQ ID NO: 1771961 - RNA, 19 nt, Artificial Sequence
  Description of Artificial Sequence: Synthetic oligonucleotide
  Sense strand starting at position 3822 of SEQ ID NO: 1562775
aguugauguaucugugaac

SEQ ID NO: 1771962 - RNA, 19 nt, Artificial Sequence
  Description of Artificial Sequence: Synthetic oligonucleotide
  Antisense strand to SEQ ID NO: 1771961
guucacagauacaucaacu

SEQ ID NO: 1771963 - RNA, 19 nt, Artificial Sequence
  Description of Artificial Sequence: Synthetic oligonucleotide
  Sense strand starting at position 3823 of SEQ ID NO: 1562775
guugauguaucugugaaca

SEQ ID NO: 1771964 - RNA, 19 nt, Artificial Sequence
  Description of Artificial Sequence: Synthetic oligonucleotide
  Antisense strand to SEQ ID NO: 1771963
uguucacagauacaucaac

SEQ ID NO: 1771965 - RNA, 19 nt, Artificial Sequence
  Description of Artificial Sequence: Synthetic oligonucleotide
  Sense strand starting at position 3825 of SEQ ID NO: 1562775
ugauguaucugugaacaaa

SEQ ID NO: 1771966 - RNA, 19 nt, Artificial Sequence
  Description of Artificial Sequence: Synthetic oligonucleotide
  Antisense strand to SEQ ID NO: 1771965
uuuguucacagauacauca

SEQ ID NO: 1771967 - RNA, 19 nt, Artificial Sequence
  Description of Artificial Sequence: Synthetic oligonucleotide
  Sense strand starting at position 3828 of SEQ ID NO: 1562775
uguaucugugaacaaauau

SEQ ID NO: 1771968 - RNA, 19 nt, Artificial Sequence
  Description of Artificial Sequence: Synthetic oligonucleotide
  Antisense strand to SEQ ID NO: 1771967
auauuuguucacagauaca

SEQ ID NO: 1771969 - RNA, 19 nt, Artificial Sequence
  Description of Artificial Sequence: Synthetic oligonucleotide
  Sense strand starting at position 3835 of SEQ ID NO: 1562775
gugaacaaauauugcuuau

SEQ ID NO: 1771970 - RNA, 19 nt, Artificial Sequence
  Description of Artificial Sequence: Synthetic oligonucleotide
  Antisense strand to SEQ ID NO: 1771969
auaagcaauauuuguucac

SEQ ID NO: 1771971 - RNA, 19 nt, Artificial Sequence
  Description of Artificial Sequence: Synthetic oligonucleotide
  Sense strand starting at position 690 of SEQ ID NO: 1562776
uggaguacugaggguucaa

SEQ ID NO: 1771972 - RNA, 19 nt, Artificial Sequence
  Description of Artificial Sequence: Synthetic oligonucleotide
  Antisense strand to SEQ ID NO: 1771971
uugaacccucaguacucca

SEQ ID NO: 1771973 - RNA, 19 nt, Artificial Sequence
  Description of Artificial Sequence: Synthetic oligonucleotide
  Sense strand starting at position 893 of SEQ ID NO: 1562776
agucgauucugaggucuca

SEQ ID NO: 1771974 - RNA, 19 nt, Artificial Sequence
  Description of Artificial Sequence: Synthetic oligonucleotide
  Antisense strand to SEQ ID NO: 1771973
ugagaccucagaaucgacu

SEQ ID NO: 1771975 - RNA, 19 nt, Artificial Sequence
  Description of Artificial Sequence: Synthetic oligonucleotide
  Sense strand starting at position 1070 of SEQ ID NO: 1562776
ucuuccuuguuccacgaau

SEQ ID NO: 1771976 - RNA, 19 nt, Artificial Sequence
  Description of Artificial Sequence: Synthetic oligonucleotide
  Antisense strand to SEQ ID NO: 1771975
auucguggaacaaggaaga

SEQ ID NO: 1771977 - RNA, 19 nt, Artificial Sequence
  Description of Artificial Sequence: Synthetic oligonucleotide
  Sense strand starting at position 1081 of SEQ ID NO: 1562776
ccacgaaugcccuguggau

SEQ ID NO: 1771978 - RNA, 19 nt, Artificial Sequence
  Description of Artificial Sequence: Synthetic oligonucleotide
  Antisense strand to SEQ ID NO: 1771977
auccacagggcauucgugg

SEQ ID NO: 1771979 - RNA, 19 nt, Artificial Sequence
  Description of Artificial Sequence: Synthetic oligonucleotide
  Sense strand starting at position 1299 of SEQ ID NO: 1562776
cucagugaguccucccuuu

SEQ ID NO: 1771980 - RNA, 19 nt, Artificial Sequence
  Description of Artificial Sequence: Synthetic oligonucleotide
  Antisense strand to SEQ ID NO: 1771979
aaagggaggacucacugag

SEQ ID NO: 1771981 - RNA, 19 nt, Artificial Sequence
  Description of Artificial Sequence: Synthetic oligonucleotide
  Sense strand starting at position 1527 of SEQ ID NO: 1562776
gcacguucuccgaguguuu

SEQ ID NO: 1771982 - RNA, 19 nt, Artificial Sequence
  Description of Artificial Sequence: Synthetic oligonucleotide
  Antisense strand to SEQ ID NO: 1771981
aaacacucggagaacgugc

SEQ ID NO: 1771983 - RNA, 19 nt, Artificial Sequence
  Description of Artificial Sequence: Synthetic oligonucleotide
  Sense strand starting at position 1536 of SEQ ID NO: 1562776
ccgaguguuuccuuggcag

SEQ ID NO: 1771984 - RNA, 19 nt, Artificial Sequence
  Description of Artificial Sequence: Synthetic oligonucleotide
  Antisense strand to SEQ ID NO: 1771983
cugccaaggaaacacucgg

SEQ ID NO: 1771985 - RNA, 19 nt, Artificial Sequence
  Description of Artificial Sequence: Synthetic oligonucleotide
  Sense strand starting at position 1538 of SEQ ID NO: 1562776
gaguguuuccuuggcaggu

SEQ ID NO: 1771986 - RNA, 19 nt, Artificial Sequence
  Description of Artificial Sequence: Synthetic oligonucleotide
  Antisense strand to SEQ ID NO: 1771985
accugccaaggaaacacuc

SEQ ID NO: 1771987 - RNA, 19 nt, Artificial Sequence
  Description of Artificial Sequence: Synthetic oligonucleotide
  Sense strand starting at position 1548 of SEQ ID NO: 1562776
uuggcaggugucuacacaa

SEQ ID NO: 1771988 - RNA, 19 nt, Artificial Sequence
  Description of Artificial Sequence: Synthetic oligonucleotide
  Antisense strand to SEQ ID NO: 1771987
uuguguagacaccugccaa

SEQ ID NO: 1771989 - RNA, 19 nt, Artificial Sequence
  Description of Artificial Sequence: Synthetic oligonucleotide
  Sense strand starting at position 1639 of SEQ ID NO: 1562776
cgggcugcccuagauucua

SEQ ID NO: 1771990 - RNA, 19 nt, Artificial Sequence
  Description of Artificial Sequence: Synthetic oligonucleotide
  Antisense strand to SEQ ID NO: 1771989
uagaaucuagggcagcccg

SEQ ID NO: 1771991 - RNA, 19 nt, Artificial Sequence
  Description of Artificial Sequence: Synthetic oligonucleotide
  Sense strand starting at position 1873 of SEQ ID NO: 1562776
ccuuaucugccacagugua

SEQ ID NO: 1771992 - RNA, 19 nt, Artificial Sequence
  Description of Artificial Sequence: Synthetic oligonucleotide
  Antisense strand to SEQ ID NO: 1771991
uacacuguggcagauaagg

SEQ ID NO: 1771993 - RNA, 19 nt, Artificial Sequence
  Description of Artificial Sequence: Synthetic oligonucleotide
  Sense strand starting at position 1907 of SEQ ID NO: 1562776
gcaggagcuuaccugagaa

SEQ ID NO: 1771994 - RNA, 19 nt, Artificial Sequence
  Description of Artificial Sequence: Synthetic oligonucleotide
  Antisense strand to SEQ ID NO: 1771993
uucucagguaagcuccugc

SEQ ID NO: 1771995 - RNA, 19 nt, Artificial Sequence
  Description of Artificial Sequence: Synthetic oligonucleotide
  Sense strand starting at position 2261 of SEQ ID NO: 1562776
gccagacacuuguggaguu

SEQ ID NO: 1771996 - RNA, 19 nt, Artificial Sequence
  Description of Artificial Sequence: Synthetic oligonucleotide
  Antisense strand to SEQ ID NO: 1771995
aacuccacaagugucuggc

SEQ ID NO: 1771997 - RNA, 19 nt, Artificial Sequence
  Description of Artificial Sequence: Synthetic oligonucleotide
  Sense strand starting at position 2273 of SEQ ID NO: 1562776
uggaguuucuagguuucca

SEQ ID NO: 1771998 - RNA, 19 nt, Artificial Sequence
  Description of Artificial Sequence: Synthetic oligonucleotide
  Antisense strand to SEQ ID NO: 1771997
uggaaaccuagaaacucca

SEQ ID NO: 1771999 - RNA, 19 nt, Artificial Sequence
  Description of Artificial Sequence: Synthetic oligonucleotide
  Sense strand starting at position 2278 of SEQ ID NO: 1562776
uuucuagguuuccaaagga

SEQ ID NO: 1772000 - RNA, 19 nt, Artificial Sequence
  Description of Artificial Sequence: Synthetic oligonucleotide
  Antisense strand to SEQ ID NO: 1771999
uccuuuggaaaccuagaaa

SEQ ID NO: 1772001 - RNA, 19 nt, Artificial Sequence
  Description of Artificial Sequence: Synthetic oligonucleotide
  Sense strand starting at position 2713 of SEQ ID NO: 1562776
agccguucugugucaucuu

SEQ ID NO: 1772002 - RNA, 19 nt, Artificial Sequence
  Description of Artificial Sequence: Synthetic oligonucleotide
  Antisense strand to SEQ ID NO: 1772001
aagaugacacagaacggcu

SEQ ID NO: 1772003 - RNA, 19 nt, Artificial Sequence
  Description of Artificial Sequence: Synthetic oligonucleotide
  Sense strand starting at position 2716 of SEQ ID NO: 1562776
cguucugugucaucuucuu

SEQ ID NO: 1772004 - RNA, 19 nt, Artificial Sequence
  Description of Artificial Sequence: Synthetic oligonucleotide
  Antisense strand to SEQ ID NO: 1772003
aagaagaugacacagaacg

SEQ ID NO: 1772005 - RNA, 19 nt, Artificial Sequence
  Description of Artificial Sequence: Synthetic oligonucleotide
  Sense strand starting at position 2745 of SEQ ID NO: 1562776
ucaaaugcauaggaaaguu

SEQ ID NO: 1772006 - RNA, 19 nt, Artificial Sequence
  Description of Artificial Sequence: Synthetic oligonucleotide
  Antisense strand to SEQ ID NO: 1772005
aacuuuccuaugcauuuga

SEQ ID NO: 1772007 - RNA, 19 nt, Artificial Sequence
  Description of Artificial Sequence: Synthetic oligonucleotide
  Sense strand starting at position 2755 of SEQ ID NO: 1562776
aggaaaguuucugggcaga

SEQ ID NO: 1772008 - RNA, 19 nt, Artificial Sequence
  Description of Artificial Sequence: Synthetic oligonucleotide
  Antisense strand to SEQ ID NO: 1772007
ucugcccagaaacuuuccu

SEQ ID NO: 1772009 - RNA, 19 nt, Artificial Sequence
  Description of Artificial Sequence: Synthetic oligonucleotide
  Sense strand starting at position 2757 of SEQ ID NO: 1562776
gaaaguuucugggcagaag

SEQ ID NO: 1772010 - RNA, 19 nt, Artificial Sequence
  Description of Artificial Sequence: Synthetic oligonucleotide
  Antisense strand to SEQ ID NO: 1772009
cuucugcccagaaacuuuc

SEQ ID NO: 1772011 - RNA, 19 nt, Artificial Sequence
  Description of Artificial Sequence: Synthetic oligonucleotide
  Sense strand starting at position 3035 of SEQ ID NO: 1562776
ggguguucugccuggaaua

SEQ ID NO: 1772012 - RNA, 19 nt, Artificial Sequence
  Description of Artificial Sequence: Synthetic oligonucleotide
  Antisense strand to SEQ ID NO: 1772011
uauuccaggcagaacaccc

SEQ ID NO: 1772013 - RNA, 19 nt, Artificial Sequence
  Description of Artificial Sequence: Synthetic oligonucleotide
  Sense strand starting at position 3036 of SEQ ID NO: 1562776
gguguucugccuggaauac

SEQ ID NO: 1772014 - RNA, 19 nt, Artificial Sequence
  Description of Artificial Sequence: Synthetic oligonucleotide
  Antisense strand to SEQ ID NO: 1772013
guauuccaggcagaacacc

SEQ ID NO: 1772015 - RNA, 19 nt, Artificial Sequence
  Description of Artificial Sequence: Synthetic oligonucleotide
  Sense strand starting at position 3141 of SEQ ID NO: 1562776
gagggagcuugagaaacaa

SEQ ID NO: 1772016 - RNA, 19 nt, Artificial Sequence
  Description of Artificial Sequence: Synthetic oligonucleotide
  Antisense strand to SEQ ID NO: 1772015
uuguuucucaagcucccuc

SEQ ID NO: 1772017 - RNA, 19 nt, Artificial Sequence
  Description of Artificial Sequence: Synthetic oligonucleotide
  Sense strand starting at position 3199 of SEQ ID NO: 1562776
gcugcugugaccgugaagu

SEQ ID NO: 1772018 - RNA, 19 nt, Artificial Sequence
  Description of Artificial Sequence: Synthetic oligonucleotide
  Antisense strand to SEQ ID NO: 1772017
acuucacggucacagcagc

SEQ ID NO: 1772019 - RNA, 19 nt, Artificial Sequence
  Description of Artificial Sequence: Synthetic oligonucleotide
  Sense strand starting at position 3636 of SEQ ID NO: 1562776
ccagcaggaucauugggaa

SEQ ID NO: 1772020 - RNA, 19 nt, Artificial Sequence
  Description of Artificial Sequence: Synthetic oligonucleotide
  Antisense strand to SEQ ID NO: 1772019
uucccaaugauccugcugg

SEQ ID NO: 1772021 - RNA, 19 nt, Artificial Sequence
  Description of Artificial Sequence: Synthetic oligonucleotide
  Sense strand starting at position 3640 of SEQ ID NO: 1562776
caggaucauugggaaagga

SEQ ID NO: 1772022 - RNA, 19 nt, Artificial Sequence
  Description of Artificial Sequence: Synthetic oligonucleotide
  Antisense strand to SEQ ID NO: 1772021
uccuuucccaaugauccug

SEQ ID NO: 1772023 - RNA, 19 nt, Artificial Sequence
  Description of Artificial Sequence: Synthetic oligonucleotide
  Sense strand starting at position 3796 of SEQ ID NO: 1562776
gccaguagucggugaucuc

SEQ ID NO: 1772024 - RNA, 19 nt, Artificial Sequence
  Description of Artificial Sequence: Synthetic oligonucleotide
  Antisense strand to SEQ ID NO: 1772023
gagaucaccgacuacuggc

SEQ ID NO: 1772025 - RNA, 19 nt, Artificial Sequence
  Description of Artificial Sequence: Synthetic oligonucleotide
  Sense strand starting at position 3806 of SEQ ID NO: 1562776
ggugaucucguguagggac

SEQ ID NO: 1772026 - RNA, 19 nt, Artificial Sequence
  Description of Artificial Sequence: Synthetic oligonucleotide
  Antisense strand to SEQ ID NO: 1772025
gucccuacacgagaucacc

SEQ ID NO: 1772027 - RNA, 19 nt, Artificial Sequence
  Description of Artificial Sequence: Synthetic oligonucleotide
  Sense strand starting at position 854 of SEQ ID NO: 1562777
agggcauagagcugggauu

SEQ ID NO: 1772028 - RNA, 19 nt, Artificial Sequence
  Description of Artificial Sequence: Synthetic oligonucleotide
  Antisense strand to SEQ ID NO: 1772027
aaucccagcucuaugcccu

SEQ ID NO: 1772029 - RNA, 19 nt, Artificial Sequence
  Description of Artificial Sequence: Synthetic oligonucleotide
  Sense strand starting at position 1058 of SEQ ID NO: 1562777
cagugcuugucucuugcua

SEQ ID NO: 1772030 - RNA, 19 nt, Artificial Sequence
  Description of Artificial Sequence: Synthetic oligonucleotide
  Antisense strand to SEQ ID NO: 1772029
uagcaagagacaagcacug

SEQ ID NO: 1772031 - RNA, 19 nt, Artificial Sequence
  Description of Artificial Sequence: Synthetic oligonucleotide
  Sense strand starting at position 1059 of SEQ ID NO: 1562777
agugcuugucucuugcuau

SEQ ID NO: 1772032 - RNA, 19 nt, Artificial Sequence
  Description of Artificial Sequence: Synthetic oligonucleotide
  Antisense strand to SEQ ID NO: 1772031
auagcaagagacaagcacu

SEQ ID NO: 1772033 - RNA, 19 nt, Artificial Sequence
  Description of Artificial Sequence: Synthetic oligonucleotide
  Sense strand starting at position 1060 of SEQ ID NO: 1562777
gugcuugucucuugcuauu

SEQ ID NO: 1772034 - RNA, 19 nt, Artificial Sequence
  Description of Artificial Sequence: Synthetic oligonucleotide
  Antisense strand to SEQ ID NO: 1772033
aauagcaagagacaagcac

SEQ ID NO: 1772035 - RNA, 19 nt, Artificial Sequence
  Description of Artificial Sequence: Synthetic oligonucleotide
  Sense strand starting at position 1062 of SEQ ID NO: 1562777
gcuugucucuugcuauuua

SEQ ID NO: 1772036 - RNA, 19 nt, Artificial Sequence
  Description of Artificial Sequence: Synthetic oligonucleotide
  Antisense strand to SEQ ID NO: 1772035
uaaauagcaagagacaagc

SEQ ID NO: 1772037 - RNA, 19 nt, Artificial Sequence
  Description of Artificial Sequence: Synthetic oligonucleotide
  Sense strand starting at position 1283 of SEQ ID NO: 1562777
cggagaugcuucugaccug

SEQ ID NO: 1772038 - RNA, 19 nt, Artificial Sequence
  Description of Artificial Sequence: Synthetic oligonucleotide
  Antisense strand to SEQ ID NO: 1772037
caggucagaagcaucuccg

SEQ ID NO: 1772039 - RNA, 19 nt, Artificial Sequence
  Description of Artificial Sequence: Synthetic oligonucleotide
  Sense strand starting at position 1812 of SEQ ID NO: 1562777
cugagucagagcugaaagu

SEQ ID NO: 1772040 - RNA, 19 nt, Artificial Sequence
  Description of Artificial Sequence: Synthetic oligonucleotide
  Antisense strand to SEQ ID NO: 1772039
acuuucagcucugacucag

SEQ ID NO: 1772041 - RNA, 19 nt, Artificial Sequence
  Description of Artificial Sequence: Synthetic oligonucleotide
  Sense strand starting at position 1821 of SEQ ID NO: 1562777
agcugaaagucuucucugu

SEQ ID NO: 1772042 - RNA, 19 nt, Artificial Sequence
  Description of Artificial Sequence: Synthetic oligonucleotide
  Antisense strand to SEQ ID NO: 1772041
acagagaagacuuucagcu

SEQ ID NO: 1772043 - RNA, 19 nt, Artificial Sequence
  Description of Artificial Sequence: Synthetic oligonucleotide
  Sense strand starting at position 1823 of SEQ ID NO: 1562777
cugaaagucuucucuguga

SEQ ID NO: 1772044 - RNA, 19 nt, Artificial Sequence
  Description of Artificial Sequence: Synthetic oligonucleotide
  Antisense strand to SEQ ID NO: 1772043
ucacagagaagacuuucag

SEQ ID NO: 1772045 - RNA, 19 nt, Artificial Sequence
  Description of Artificial Sequence: Synthetic oligonucleotide
  Sense strand starting at position 1825 of SEQ ID NO: 1562777
gaaagucuucucugugacu

SEQ ID NO: 1772046 - RNA, 19 nt, Artificial Sequence
  Description of Artificial Sequence: Synthetic oligonucleotide
  Antisense strand to SEQ ID NO: 1772045
agucacagagaagacuuuc

SEQ ID NO: 1772047 - RNA, 19 nt, Artificial Sequence
  Description of Artificial Sequence: Synthetic oligonucleotide
  Sense strand starting at position 2086 of SEQ ID NO: 1562777
agacgaggcuuaugagaaa

SEQ ID NO: 1772048 - RNA, 19 nt, Artificial Sequence
  Description of Artificial Sequence: Synthetic oligonucleotide
  Antisense strand to SEQ ID NO: 1772047
uuucucauaagccucgucu

SEQ ID NO: 1772049 - RNA, 19 nt, Artificial Sequence
  Description of Artificial Sequence: Synthetic oligonucleotide
  Sense strand starting at position 2105 of SEQ ID NO: 1562777
gccugaaacuccucaagca

SEQ ID NO: 1772050 - RNA, 19 nt, Artificial Sequence
  Description of Artificial Sequence: Synthetic oligonucleotide
  Antisense strand to SEQ ID NO: 1772049
ugcuugaggaguuucaggc

SEQ ID NO: 1772051 - RNA, 19 nt, Artificial Sequence
  Description of Artificial Sequence: Synthetic oligonucleotide
  Sense strand starting at position 2430 of SEQ ID NO: 1562777
acaccaucuuuccgagacu

SEQ ID NO: 1772052 - RNA, 19 nt, Artificial Sequence
  Description of Artificial Sequence: Synthetic oligonucleotide
  Antisense strand to SEQ ID NO: 1772051
agucucggaaagauggugu

SEQ ID NO: 1772053 - RNA, 19 nt, Artificial Sequence
  Description of Artificial Sequence: Synthetic oligonucleotide
  Sense strand starting at position 2477 of SEQ ID NO: 1562777
ccuuacuccguuuagcauu

SEQ ID NO: 1772054 - RNA, 19 nt, Artificial Sequence
  Description of Artificial Sequence: Synthetic oligonucleotide
  Antisense strand to SEQ ID NO: 1772053
aaugcuaaacggaguaagg

SEQ ID NO: 1772055 - RNA, 19 nt, Artificial Sequence
  Description of Artificial Sequence: Synthetic oligonucleotide
  Sense strand starting at position 2533 of SEQ ID NO: 1562777
gcaugugguaggugucuau

SEQ ID NO: 1772056 - RNA, 19 nt, Artificial Sequence
  Description of Artificial Sequence: Synthetic oligonucleotide
  Antisense strand to SEQ ID NO: 1772055
auagacaccuaccacaugc

SEQ ID NO: 1772057 - RNA, 19 nt, Artificial Sequence
  Description of Artificial Sequence: Synthetic oligonucleotide
  Sense strand starting at position 2536 of SEQ ID NO: 1562777
ugugguaggugucuauauu

SEQ ID NO: 1772058 - RNA, 19 nt, Artificial Sequence
  Description of Artificial Sequence: Synthetic oligonucleotide
  Antisense strand to SEQ ID NO: 1772057
aauauagacaccuaccaca

SEQ ID NO: 1772059 - RNA, 19 nt, Artificial Sequence
  Description of Artificial Sequence: Synthetic oligonucleotide
  Sense strand starting at position 2537 of SEQ ID NO: 1562777
gugguaggugucuauauuc

SEQ ID NO: 1772060 - RNA, 19 nt, Artificial Sequence
  Description of Artificial Sequence: Synthetic oligonucleotide
  Antisense strand to SEQ ID NO: 1772059
gaauauagacaccuaccac

SEQ ID NO: 1772061 - RNA, 19 nt, Artificial Sequence
  Description of Artificial Sequence: Synthetic oligonucleotide
  Sense strand starting at position 2895 of SEQ ID NO: 1562777
acaugugagcuuugucuuu

SEQ ID NO: 1772062 - RNA, 19 nt, Artificial Sequence
  Description of Artificial Sequence: Synthetic oligonucleotide
  Antisense strand to SEQ ID NO: 1772061
aaagacaaagcucacaugu

SEQ ID NO: 1772063 - RNA, 19 nt, Artificial Sequence
  Description of Artificial Sequence: Synthetic oligonucleotide
  Sense strand starting at position 2955 of SEQ ID NO: 1562777
ucaaacaugugguugcaaa

SEQ ID NO: 1772064 - RNA, 19 nt, Artificial Sequence
  Description of Artificial Sequence: Synthetic oligonucleotide
  Antisense strand to SEQ ID NO: 1772063
uuugcaaccacauguuuga

SEQ ID NO: 1772065 - RNA, 19 nt, Artificial Sequence
  Description of Artificial Sequence: Synthetic oligonucleotide
  Sense strand starting at position 2956 of SEQ ID NO: 1562777
caaacaugugguugcaaag

SEQ ID NO: 1772066 - RNA, 19 nt, Artificial Sequence
  Description of Artificial Sequence: Synthetic oligonucleotide
  Antisense strand to SEQ ID NO: 1772065
cuuugcaaccacauguuug

SEQ ID NO: 1772067 - RNA, 19 nt, Artificial Sequence
  Description of Artificial Sequence: Synthetic oligonucleotide
  Sense strand starting at position 3071 of SEQ ID NO: 1562777
gcuuccaaauccuggguau

SEQ ID NO: 1772068 - RNA, 19 nt, Artificial Sequence
  Description of Artificial Sequence: Synthetic oligonucleotide
  Antisense strand to SEQ ID NO: 1772067
auacccaggauuuggaagc

SEQ ID NO: 1772069 - RNA, 19 nt, Artificial Sequence
  Description of Artificial Sequence: Synthetic oligonucleotide
  Sense strand starting at position 3072 of SEQ ID NO: 1562777
cuuccaaauccuggguauu

SEQ ID NO: 1772070 - RNA, 19 nt, Artificial Sequence
  Description of Artificial Sequence: Synthetic oligonucleotide
  Antisense strand to SEQ ID NO: 1772069
aauacccaggauuuggaag

SEQ ID NO: 1772071 - RNA, 19 nt, Artificial Sequence
  Description of Artificial Sequence: Synthetic oligonucleotide
  Sense strand starting at position 3073 of SEQ ID NO: 1562777
uuccaaauccuggguauug

SEQ ID NO: 1772072 - RNA, 19 nt, Artificial Sequence
  Description of Artificial Sequence: Synthetic oligonucleotide
  Antisense strand to SEQ ID NO: 1772071
caauacccaggauuuggaa

SEQ ID NO: 1772073 - RNA, 19 nt, Artificial Sequence
  Description of Artificial Sequence: Synthetic oligonucleotide
  Sense strand starting at position 3074 of SEQ ID NO: 1562777
uccaaauccuggguauugu

SEQ ID NO: 1772074 - RNA, 19 nt, Artificial Sequence
  Description of Artificial Sequence: Synthetic oligonucleotide
  Antisense strand to SEQ ID NO: 1772073
acaauacccaggauuugga

SEQ ID NO: 1772075 - RNA, 19 nt, Artificial Sequence
  Description of Artificial Sequence: Synthetic oligonucleotide
  Sense strand starting at position 3504 of SEQ ID NO: 1562777
ccauaaagauguuugagcu

SEQ ID NO: 1772076 - RNA, 19 nt, Artificial Sequence
  Description of Artificial Sequence: Synthetic oligonucleotide
  Antisense strand to SEQ ID NO: 1772075
agcucaaacaucuuuaugg

SEQ ID NO: 1772077 - RNA, 19 nt, Artificial Sequence
  Description of Artificial Sequence: Synthetic oligonucleotide
  Sense strand starting at position 3514 of SEQ ID NO: 1562777
guuugagcuccuuaucuag

SEQ ID NO: 1772078 - RNA, 19 nt, Artificial Sequence
  Description of Artificial Sequence: Synthetic oligonucleotide
  Antisense strand to SEQ ID NO: 1772077
cuagauaaggagcucaaac

SEQ ID NO: 1772079 - RNA, 19 nt, Artificial Sequence
  Description of Artificial Sequence: Synthetic oligonucleotide
  Sense strand starting at position 3521 of SEQ ID NO: 1562777
cuccuuaucuaguccaguu

SEQ ID NO: 1772080 - RNA, 19 nt, Artificial Sequence
  Description of Artificial Sequence: Synthetic oligonucleotide
  Antisense strand to SEQ ID NO: 1772079
aacuggacuagauaaggag

SEQ ID NO: 1772081 - RNA, 19 nt, Artificial Sequence
  Description of Artificial Sequence: Synthetic oligonucleotide
  Sense strand starting at position 3523 of SEQ ID NO: 1562777
ccuuaucuaguccaguuau

SEQ ID NO: 1772082 - RNA, 19 nt, Artificial Sequence
  Description of Artificial Sequence: Synthetic oligonucleotide
  Antisense strand to SEQ ID NO: 1772081
auaacuggacuagauaagg

SEQ ID NO: 1772083 - RNA, 19 nt, Artificial Sequence
  Description of Artificial Sequence: Synthetic oligonucleotide
  Sense strand starting at position 3710 of SEQ ID NO: 1562777
ugccuagucccauguccua

SEQ ID NO: 1772084 - RNA, 19 nt, Artificial Sequence
  Description of Artificial Sequence: Synthetic oligonucleotide
  Antisense strand to SEQ ID NO: 1772083
uaggacaugggacuaggca

SEQ ID NO: 1772085 - RNA, 19 nt, Artificial Sequence
  Description of Artificial Sequence: Synthetic oligonucleotide
  Sense strand starting at position 180 of SEQ ID NO: 1562778
acaucuuuccaaggaaguu

SEQ ID NO: 1772086 - RNA, 19 nt, Artificial Sequence
  Description of Artificial Sequence: Synthetic oligonucleotide
  Antisense strand to SEQ ID NO: 1772085
aacuuccuuggaaagaugu

SEQ ID NO: 1772087 - RNA, 19 nt, Artificial Sequence
  Description of Artificial Sequence: Synthetic oligonucleotide
  Sense strand starting at position 241 of SEQ ID NO: 1562778
uucugucuuggaggagaua

SEQ ID NO: 1772088 - RNA, 19 nt, Artificial Sequence
  Description of Artificial Sequence: Synthetic oligonucleotide
  Antisense strand to SEQ ID NO: 1772087
uaucuccuccaagacagaa

SEQ ID NO: 1772089 - RNA, 19 nt, Artificial Sequence
  Description of Artificial Sequence: Synthetic oligonucleotide
  Sense strand starting at position 545 of SEQ ID NO: 1562778
acaggugcagcuuguuaaa

SEQ ID NO: 1772090 - RNA, 19 nt, Artificial Sequence
  Description of Artificial Sequence: Synthetic oligonucleotide
  Antisense strand to SEQ ID NO: 1772089
uuuaacaagcugcaccugu

SEQ ID NO: 1772091 - RNA, 19 nt, Artificial Sequence
  Description of Artificial Sequence: Synthetic oligonucleotide
  Sense strand starting at position 547 of SEQ ID NO: 1562778
aggugcagcuuguuaaaua

SEQ ID NO: 1772092 - RNA, 19 nt, Artificial Sequence
  Description of Artificial Sequence: Synthetic oligonucleotide
  Antisense strand to SEQ ID NO: 1772091
uauuuaacaagcugcaccu

SEQ ID NO: 1772093 - RNA, 19 nt, Artificial Sequence
  Description of Artificial Sequence: Synthetic oligonucleotide
  Sense strand starting at position 806 of SEQ ID NO: 1562778
uaggguuccuggccacauu

SEQ ID NO: 1772094 - RNA, 19 nt, Artificial Sequence
  Description of Artificial Sequence: Synthetic oligonucleotide
  Antisense strand to SEQ ID NO: 1772093
aauguggccaggaacccua

SEQ ID NO: 1772095 - RNA, 19 nt, Artificial Sequence
  Description of Artificial Sequence: Synthetic oligonucleotide
  Sense strand starting at position 807 of SEQ ID NO: 1562778
aggguuccuggccacauua

SEQ ID NO: 1772096 - RNA, 19 nt, Artificial Sequence
  Description of Artificial Sequence: Synthetic oligonucleotide
  Antisense strand to SEQ ID NO: 1772095
uaauguggccaggaacccu

SEQ ID NO: 1772097 - RNA, 19 nt, Artificial Sequence
  Description of Artificial Sequence: Synthetic oligonucleotide
  Sense strand starting at position 809 of SEQ ID NO: 1562778
gguuccuggccacauuaua

SEQ ID NO: 1772098 - RNA, 19 nt, Artificial Sequence
  Description of Artificial Sequence: Synthetic oligonucleotide
  Antisense strand to SEQ ID NO: 1772097
uauaauguggccaggaacc

SEQ ID NO: 1772099 - RNA, 19 nt, Artificial Sequence
  Description of Artificial Sequence: Synthetic oligonucleotide
  Sense strand starting at position 845 of SEQ ID NO: 1562778
cucccauugucugcauuua

SEQ ID NO: 1772100 - RNA, 19 nt, Artificial Sequence
  Description of Artificial Sequence: Synthetic oligonucleotide
  Antisense strand to SEQ ID NO: 1772099
uaaaugcagacaaugggag

SEQ ID NO: 1772101 - RNA, 19 nt, Artificial Sequence
  Description of Artificial Sequence: Synthetic oligonucleotide
  Sense strand starting at position 939 of SEQ ID NO: 1562778
agagcaaguccaggauucu

SEQ ID NO: 1772102 - RNA, 19 nt, Artificial Sequence
  Description of Artificial Sequence: Synthetic oligonucleotide
  Antisense strand to SEQ ID NO: 1772101
agaauccuggacuugcucu

SEQ ID NO: 1772103 - RNA, 19 nt, Artificial Sequence
  Description of Artificial Sequence: Synthetic oligonucleotide
  Sense strand starting at position 940 of SEQ ID NO: 1562778
gagcaaguccaggauucua

SEQ ID NO: 1772104 - RNA, 19 nt, Artificial Sequence
  Description of Artificial Sequence: Synthetic oligonucleotide
  Antisense strand to SEQ ID NO: 1772103
uagaauccuggacuugcuc

SEQ ID NO: 1772105 - RNA, 19 nt, Artificial Sequence
  Description of Artificial Sequence: Synthetic oligonucleotide
  Sense strand starting at position 948 of SEQ ID NO: 1562778
ccaggauucuaaguugauc

SEQ ID NO: 1772106 - RNA, 19 nt, Artificial Sequence
  Description of Artificial Sequence: Synthetic oligonucleotide
  Antisense strand to SEQ ID NO: 1772105
gaucaacuuagaauccugg

SEQ ID NO: 1772107 - RNA, 19 nt, Artificial Sequence
  Description of Artificial Sequence: Synthetic oligonucleotide
  Sense strand starting at position 957 of SEQ ID NO: 1562778
uaaguugauccugguguca

SEQ ID NO: 1772108 - RNA, 19 nt, Artificial Sequence
  Description of Artificial Sequence: Synthetic oligonucleotide
  Antisense strand to SEQ ID NO: 1772107
ugacaccaggaucaacuua

SEQ ID NO: 1772109 - RNA, 19 nt, Artificial Sequence
  Description of Artificial Sequence: Synthetic oligonucleotide
  Sense strand starting at position 1089 of SEQ ID NO: 1562778
cacggaguccuguagagac

SEQ ID NO: 1772110 - RNA, 19 nt, Artificial Sequence
  Description of Artificial Sequence: Synthetic oligonucleotide
  Antisense strand to SEQ ID NO: 1772109
gucucuacaggacuccgug

SEQ ID NO: 1772111 - RNA, 19 nt, Artificial Sequence
  Description of Artificial Sequence: Synthetic oligonucleotide
  Sense strand starting at position 1183 of SEQ ID NO: 1562778
agggcagaagaaugucuau

SEQ ID NO: 1772112 - RNA, 19 nt, Artificial Sequence
  Description of Artificial Sequence: Synthetic oligonucleotide
  Antisense strand to SEQ ID NO: 1772111
auagacauucuucugcccu

SEQ ID NO: 1772113 - RNA, 19 nt, Artificial Sequence
  Description of Artificial Sequence: Synthetic oligonucleotide
  Sense strand starting at position 1186 of SEQ ID NO: 1562778
gcagaagaaugucuauacu

SEQ ID NO: 1772114 - RNA, 19 nt, Artificial Sequence
  Description of Artificial Sequence: Synthetic oligonucleotide
  Antisense strand to SEQ ID NO: 1772113
aguauagacauucuucugc

SEQ ID NO: 1772115 - RNA, 19 nt, Artificial Sequence
  Description of Artificial Sequence: Synthetic oligonucleotide
  Sense strand starting at position 1334 of SEQ ID NO: 1562778
aaacucaguucuuugaggu

SEQ ID NO: 1772116 - RNA, 19 nt, Artificial Sequence
  Description of Artificial Sequence: Synthetic oligonucleotide
  Antisense strand to SEQ ID NO: 1772115
accucaaagaacugaguuu

SEQ ID NO: 1772117 - RNA, 19 nt, Artificial Sequence
  Description of Artificial Sequence: Synthetic oligonucleotide
  Sense strand starting at position 1340 of SEQ ID NO: 1562778
aguucuuugagguggcauu

SEQ ID NO: 1772118 - RNA, 19 nt, Artificial Sequence
  Description of Artificial Sequence: Synthetic oligonucleotide
  Antisense strand to SEQ ID NO: 1772117
aaugccaccucaaagaacu

SEQ ID NO: 1772119 - RNA, 19 nt, Artificial Sequence
  Description of Artificial Sequence: Synthetic oligonucleotide
  Sense strand starting at position 1550 of SEQ ID NO: 1562778
acagcuggguccucugaua

SEQ ID NO: 1772120 - RNA, 19 nt, Artificial Sequence
  Description of Artificial Sequence: Synthetic oligonucleotide
  Antisense strand to SEQ ID NO: 1772119
uaucagaggacccagcugu

SEQ ID NO: 1772121 - RNA, 19 nt, Artificial Sequence
  Description of Artificial Sequence: Synthetic oligonucleotide
  Sense strand starting at position 1994 of SEQ ID NO: 1562778
ucaaccugcugagaauuua

SEQ ID NO: 1772122 - RNA, 19 nt, Artificial Sequence
  Description of Artificial Sequence: Synthetic oligonucleotide
  Antisense strand to SEQ ID NO: 1772121
uaaauucucagcagguuga

SEQ ID NO: 1772123 - RNA, 19 nt, Artificial Sequence
  Description of Artificial Sequence: Synthetic oligonucleotide
  Sense strand starting at position 2168 of SEQ ID NO: 1562778
gaaggaggcugucugucua

SEQ ID NO: 1772124 - RNA, 19 nt, Artificial Sequence
  Description of Artificial Sequence: Synthetic oligonucleotide
  Antisense strand to SEQ ID NO: 1772123
uagacagacagccuccuuc

SEQ ID NO: 1772125 - RNA, 19 nt, Artificial Sequence
  Description of Artificial Sequence: Synthetic oligonucleotide
  Sense strand starting at position 2309 of SEQ ID NO: 1562778
cugaguucuugcccugauc

SEQ ID NO: 1772126 - RNA, 19 nt, Artificial Sequence
  Description of Artificial Sequence: Synthetic oligonucleotide
  Antisense strand to SEQ ID NO: 1772125
gaucagggcaagaacucag

SEQ ID NO: 1772127 - RNA, 19 nt, Artificial Sequence
  Description of Artificial Sequence: Synthetic oligonucleotide
  Sense strand starting at position 2311 of SEQ ID NO: 1562778
gaguucuugcccugauccu

SEQ ID NO: 1772128 - RNA, 19 nt, Artificial Sequence
  Description of Artificial Sequence: Synthetic oligonucleotide
  Antisense strand to SEQ ID NO: 1772127
aggaucagggcaagaacuc

SEQ ID NO: 1772129 - RNA, 19 nt, Artificial Sequence
  Description of Artificial Sequence: Synthetic oligonucleotide
  Sense strand starting at position 2659 of SEQ ID NO: 1562778
cugagaaggucuccugugu

SEQ ID NO: 1772130 - RNA, 19 nt, Artificial Sequence
  Description of Artificial Sequence: Synthetic oligonucleotide
  Antisense strand to SEQ ID NO: 1772129
acacaggagaccuucucag

SEQ ID NO: 1772131 - RNA, 19 nt, Artificial Sequence
  Description of Artificial Sequence: Synthetic oligonucleotide
  Sense strand starting at position 2799 of SEQ ID NO: 1562778
aggccugagaauugcuaca

SEQ ID NO: 1772132 - RNA, 19 nt, Artificial Sequence
  Description of Artificial Sequence: Synthetic oligonucleotide
  Antisense strand to SEQ ID NO: 1772131
uguagcaauucucaggccu

SEQ ID NO: 1772133 - RNA, 19 nt, Artificial Sequence
  Description of Artificial Sequence: Synthetic oligonucleotide
  Sense strand starting at position 2856 of SEQ ID NO: 1562778
acgggaguguuuguugaau

SEQ ID NO: 1772134 - RNA, 19 nt, Artificial Sequence
  Description of Artificial Sequence: Synthetic oligonucleotide
  Antisense strand to SEQ ID NO: 1772133
auucaacaaacacucccgu

SEQ ID NO: 1772135 - RNA, 19 nt, Artificial Sequence
  Description of Artificial Sequence: Synthetic oligonucleotide
  Sense strand starting at position 2857 of SEQ ID NO: 1562778
cgggaguguuuguugaaug

SEQ ID NO: 1772136 - RNA, 19 nt, Artificial Sequence
  Description of Artificial Sequence: Synthetic oligonucleotide
  Antisense strand to SEQ ID NO: 1772135
cauucaacaaacacucccg

SEQ ID NO: 1772137 - RNA, 19 nt, Artificial Sequence
  Description of Artificial Sequence: Synthetic oligonucleotide
  Sense strand starting at position 2983 of SEQ ID NO: 1562778
gcagaaaguguucagaguu

SEQ ID NO: 1772138 - RNA, 19 nt, Artificial Sequence
  Description of Artificial Sequence: Synthetic oligonucleotide
  Antisense strand to SEQ ID NO: 1772137
aacucugaacacuuucugc

SEQ ID NO: 1772139 - RNA, 19 nt, Artificial Sequence
  Description of Artificial Sequence: Synthetic oligonucleotide
  Sense strand starting at position 3152 of SEQ ID NO: 1562778
agcaucucugcuggaauuu

SEQ ID NO: 1772140 - RNA, 19 nt, Artificial Sequence
  Description of Artificial Sequence: Synthetic oligonucleotide
  Antisense strand to SEQ ID NO: 1772139
aaauuccagcagagaugcu

SEQ ID NO: 1772141 - RNA, 19 nt, Artificial Sequence
  Description of Artificial Sequence: Synthetic oligonucleotide
  Sense strand starting at position 3208 of SEQ ID NO: 1562778
guagaaaggucuuuggaca

SEQ ID NO: 1772142 - RNA, 19 nt, Artificial Sequence
  Description of Artificial Sequence: Synthetic oligonucleotide
  Antisense strand to SEQ ID NO: 1772141
uguccaaagaccuuucuac

SEQ ID NO: 1772143 - RNA, 19 nt, Artificial Sequence
  Description of Artificial Sequence: Synthetic oligonucleotide
  Sense strand starting at position 3216 of SEQ ID NO: 1562778
gucuuuggacagcgauagu

SEQ ID NO: 1772144 - RNA, 19 nt, Artificial Sequence
  Description of Artificial Sequence: Synthetic oligonucleotide
  Antisense strand to SEQ ID NO: 1772143
acuaucgcuguccaaagac

SEQ ID NO: 1772145 - RNA, 19 nt, Artificial Sequence
  Description of Artificial Sequence: Synthetic oligonucleotide
  Sense strand starting at position 3270 of SEQ ID NO: 1562778
uggugauggaugugaugau

SEQ ID NO: 1772146 - RNA, 19 nt, Artificial Sequence
  Description of Artificial Sequence: Synthetic oligonucleotide
  Antisense strand to SEQ ID NO: 1772145
aucaucacauccaucacca

SEQ ID NO: 1772147 - RNA, 19 nt, Artificial Sequence
  Description of Artificial Sequence: Synthetic oligonucleotide
  Sense strand starting at position 3282 of SEQ ID NO: 1562778
ugaugauguauguaacugu

SEQ ID NO: 1772148 - RNA, 19 nt, Artificial Sequence
  Description of Artificial Sequence: Synthetic oligonucleotide
  Antisense strand to SEQ ID NO: 1772147
acaguuacauacaucauca

SEQ ID NO: 1772149 - RNA, 19 nt, Artificial Sequence
  Description of Artificial Sequence: Synthetic oligonucleotide
  Sense strand starting at position 3285 of SEQ ID NO: 1562778
ugauguauguaacugugau

SEQ ID NO: 1772150 - RNA, 19 nt, Artificial Sequence
  Description of Artificial Sequence: Synthetic oligonucleotide
  Antisense strand to SEQ ID NO: 1772149
aucacaguuacauacauca

SEQ ID NO: 1772151 - RNA, 19 nt, Artificial Sequence
  Description of Artificial Sequence: Synthetic oligonucleotide
  Sense strand starting at position 3286 of SEQ ID NO: 1562778
gauguauguaacugugaug

SEQ ID NO: 1772152 - RNA, 19 nt, Artificial Sequence
  Description of Artificial Sequence: Synthetic oligonucleotide
  Antisense strand to SEQ ID NO: 1772151
caucacaguuacauacauc

SEQ ID NO: 1772153 - RNA, 19 nt, Artificial Sequence
  Description of Artificial Sequence: Synthetic oligonucleotide
  Sense strand starting at position 3371 of SEQ ID NO: 1562778
aggugaugaugauaccaau

SEQ ID NO: 1772154 - RNA, 19 nt, Artificial Sequence
  Description of Artificial Sequence: Synthetic oligonucleotide
  Antisense strand to SEQ ID NO: 1772153
auugguaucaucaucaccu

SEQ ID NO: 1772155 - RNA, 19 nt, Artificial Sequence
  Description of Artificial Sequence: Synthetic oligonucleotide
  Sense strand starting at position 3374 of SEQ ID NO: 1562778
ugaugaugauaccaauacu

SEQ ID NO: 1772156 - RNA, 19 nt, Artificial Sequence
  Description of Artificial Sequence: Synthetic oligonucleotide
  Antisense strand to SEQ ID NO: 1772155
aguauugguaucaucauca

SEQ ID NO: 1772157 - RNA, 19 nt, Artificial Sequence
  Description of Artificial Sequence: Synthetic oligonucleotide
  Sense strand starting at position 3401 of SEQ ID NO: 1562778
uguugugucaaugaaagag

SEQ ID NO: 1772158 - RNA, 19 nt, Artificial Sequence
  Description of Artificial Sequence: Synthetic oligonucleotide
  Antisense strand to SEQ ID NO: 1772157
cucuuucauugacacaaca

SEQ ID NO: 1772159 - RNA, 19 nt, Artificial Sequence
  Description of Artificial Sequence: Synthetic oligonucleotide
  Sense strand starting at position 3409 of SEQ ID NO: 1562778
caaugaaagagguaguguu

SEQ ID NO: 1772160 - RNA, 19 nt, Artificial Sequence
  Description of Artificial Sequence: Synthetic oligonucleotide
  Antisense strand to SEQ ID NO: 1772159
aacacuaccucuuucauug

SEQ ID NO: 1772161 - RNA, 19 nt, Artificial Sequence
  Description of Artificial Sequence: Synthetic oligonucleotide
  Sense strand starting at position 3470 of SEQ ID NO: 1562778
gguggugaugcucagguua

SEQ ID NO: 1772162 - RNA, 19 nt, Artificial Sequence
  Description of Artificial Sequence: Synthetic oligonucleotide
  Antisense strand to SEQ ID NO: 1772161
uaaccugagcaucaccacc

SEQ ID NO: 1772163 - RNA, 19 nt, Artificial Sequence
  Description of Artificial Sequence: Synthetic oligonucleotide
  Sense strand starting at position 3495 of SEQ ID NO: 1562778
aaaggaagauucgaacuca

SEQ ID NO: 1772164 - RNA, 19 nt, Artificial Sequence
  Description of Artificial Sequence: Synthetic oligonucleotide
  Antisense strand to SEQ ID NO: 1772163
ugaguucgaaucuuccuuu

SEQ ID NO: 1772165 - RNA, 19 nt, Artificial Sequence
  Description of Artificial Sequence: Synthetic oligonucleotide
  Sense strand starting at position 317 of SEQ ID NO: 1562779
gcagacugaacuuggcuua

SEQ ID NO: 1772166 - RNA, 19 nt, Artificial Sequence
  Description of Artificial Sequence: Synthetic oligonucleotide
  Antisense strand to SEQ ID NO: 1772165
uaagccaaguucagucugc

SEQ ID NO: 1772167 - RNA, 19 nt, Artificial Sequence
  Description of Artificial Sequence: Synthetic oligonucleotide
  Sense strand starting at position 320 of SEQ ID NO: 1562779
gacugaacuuggcuuauga

SEQ ID NO: 1772168 - RNA, 19 nt, Artificial Sequence
  Description of Artificial Sequence: Synthetic oligonucleotide
  Antisense strand to SEQ ID NO: 1772167
ucauaagccaaguucaguc

SEQ ID NO: 1772169 - RNA, 19 nt, Artificial Sequence
  Description of Artificial Sequence: Synthetic oligonucleotide
  Sense strand starting at position 330 of SEQ ID NO: 1562779
ggcuuaugaggaggagacu

SEQ ID NO: 1772170 - RNA, 19 nt, Artificial Sequence
  Description of Artificial Sequence: Synthetic oligonucleotide
  Antisense strand to SEQ ID NO: 1772169
agucuccuccucauaagcc

SEQ ID NO: 1772171 - RNA, 19 nt, Artificial Sequence
  Description of Artificial Sequence: Synthetic oligonucleotide
  Sense strand starting at position 429 of SEQ ID NO: 1562779
gggacauuauccuccucuu

SEQ ID NO: 1772172 - RNA, 19 nt, Artificial Sequence
  Description of Artificial Sequence: Synthetic oligonucleotide
  Antisense strand to SEQ ID NO: 1772171
aagaggaggauaauguccc

SEQ ID NO: 1772173 - RNA, 19 nt, Artificial Sequence
  Description of Artificial Sequence: Synthetic oligonucleotide
  Sense strand starting at position 465 of SEQ ID NO: 1562779
uuucuuaucuguccaguua

SEQ ID NO: 1772174 - RNA, 19 nt, Artificial Sequence
  Description of Artificial Sequence: Synthetic oligonucleotide
  Antisense strand to SEQ ID NO: 1772173
uaacuggacagauaagaaa

SEQ ID NO: 1772175 - RNA, 19 nt, Artificial Sequence
  Description of Artificial Sequence: Synthetic oligonucleotide
  Sense strand starting at position 466 of SEQ ID NO: 1562779
uucuuaucuguccaguuau

SEQ ID NO: 1772176 - RNA, 19 nt, Artificial Sequence
  Description of Artificial Sequence: Synthetic oligonucleotide
  Antisense strand to SEQ ID NO: 1772175
auaacuggacagauaagaa

SEQ ID NO: 1772177 - RNA, 19 nt, Artificial Sequence
  Description of Artificial Sequence: Synthetic oligonucleotide
  Sense strand starting at position 514 of SEQ ID NO: 1562779
agagaaugccuaugacauu

SEQ ID NO: 1772178 - RNA, 19 nt, Artificial Sequence
  Description of Artificial Sequence: Synthetic oligonucleotide
  Antisense strand to SEQ ID NO: 1772177
aaugucauaggcauucucu

SEQ ID NO: 1772179 - RNA, 19 nt, Artificial Sequence
  Description of Artificial Sequence: Synthetic oligonucleotide
  Sense strand starting at position 520 of SEQ ID NO: 1562779
ugccuaugacauugucaau

SEQ ID NO: 1772180 - RNA, 19 nt, Artificial Sequence
  Description of Artificial Sequence: Synthetic oligonucleotide
  Antisense strand to SEQ ID NO: 1772179
auugacaaugucauaggca

SEQ ID NO: 1772181 - RNA, 19 nt, Artificial Sequence
  Description of Artificial Sequence: Synthetic oligonucleotide
  Sense strand starting at position 526 of SEQ ID NO: 1562779
ugacauugucaaugcugaa

SEQ ID NO: 1772182 - RNA, 19 nt, Artificial Sequence
  Description of Artificial Sequence: Synthetic oligonucleotide
  Antisense strand to SEQ ID NO: 1772181
uucagcauugacaauguca

SEQ ID NO: 1772183 - RNA, 19 nt, Artificial Sequence
  Description of Artificial Sequence: Synthetic oligonucleotide
  Sense strand starting at position 530 of SEQ ID NO: 1562779
auugucaaugcugaauaaa

SEQ ID NO: 1772184 - RNA, 19 nt, Artificial Sequence
  Description of Artificial Sequence: Synthetic oligonucleotide
  Antisense strand to SEQ ID NO: 1772183
uuuauucagcauugacaau

SEQ ID NO: 1772185 - RNA, 19 nt, Artificial Sequence
  Description of Artificial Sequence: Synthetic oligonucleotide
  Sense strand starting at position 658 of SEQ ID NO: 1562779
guuagauugaaagguauau

SEQ ID NO: 1772186 - RNA, 19 nt, Artificial Sequence
  Description of Artificial Sequence: Synthetic oligonucleotide
  Antisense strand to SEQ ID NO: 1772185
auauaccuuucaaucuaac

SEQ ID NO: 1772187 - RNA, 19 nt, Artificial Sequence
  Description of Artificial Sequence: Synthetic oligonucleotide
  Sense strand starting at position 713 of SEQ ID NO: 1562779
uuuagaguccucuauccag

SEQ ID NO: 1772188 - RNA, 19 nt, Artificial Sequence
  Description of Artificial Sequence: Synthetic oligonucleotide
  Antisense strand to SEQ ID NO: 1772187
cuggauagaggacucuaaa

SEQ ID NO: 1772189 - RNA, 19 nt, Artificial Sequence
  Description of Artificial Sequence: Synthetic oligonucleotide
  Sense strand starting at position 716 of SEQ ID NO: 1562779
agaguccucuauccaguua

SEQ ID NO: 1772190 - RNA, 19 nt, Artificial Sequence
  Description of Artificial Sequence: Synthetic oligonucleotide
  Antisense strand to SEQ ID NO: 1772189
uaacuggauagaggacucu

SEQ ID NO: 1772191 - RNA, 19 nt, Artificial Sequence
  Description of Artificial Sequence: Synthetic oligonucleotide
  Sense strand starting at position 731 of SEQ ID NO: 1562779
guuaauauggacggagaag

SEQ ID NO: 1772192 - RNA, 19 nt, Artificial Sequence
  Description of Artificial Sequence: Synthetic oligonucleotide
  Antisense strand to SEQ ID NO: 1772191
cuucuccguccauauuaac

SEQ ID NO: 1772193 - RNA, 19 nt, Artificial Sequence
  Description of Artificial Sequence: Synthetic oligonucleotide
  Sense strand starting at position 1999 of SEQ ID NO: 1562779
aucuguccuugccuggaau

SEQ ID NO: 1772194 - RNA, 19 nt, Artificial Sequence
  Description of Artificial Sequence: Synthetic oligonucleotide
  Antisense strand to SEQ ID NO: 1772193
auuccaggcaaggacagau

SEQ ID NO: 1772195 - RNA, 19 nt, Artificial Sequence
  Description of Artificial Sequence: Synthetic oligonucleotide
  Sense strand starting at position 2000 of SEQ ID NO: 1562779
ucuguccuugccuggaauu

SEQ ID NO: 1772196 - RNA, 19 nt, Artificial Sequence
  Description of Artificial Sequence: Synthetic oligonucleotide
  Antisense strand to SEQ ID NO: 1772195
aauuccaggcaaggacaga

SEQ ID NO: 1772197 - RNA, 19 nt, Artificial Sequence
  Description of Artificial Sequence: Synthetic oligonucleotide
  Sense strand starting at position 2001 of SEQ ID NO: 1562779
cuguccuugccuggaauuu

SEQ ID NO: 1772198 - RNA, 19 nt, Artificial Sequence
  Description of Artificial Sequence: Synthetic oligonucleotide
  Antisense strand to SEQ ID NO: 1772197
aaauuccaggcaaggacag

SEQ ID NO: 1772199 - RNA, 19 nt, Artificial Sequence
  Description of Artificial Sequence: Synthetic oligonucleotide
  Sense strand starting at position 2024 of SEQ ID NO: 1562779
ccaaauuacuguguaacca

SEQ ID NO: 1772200 - RNA, 19 nt, Artificial Sequence
  Description of Artificial Sequence: Synthetic oligonucleotide
  Antisense strand to SEQ ID NO: 1772199
ugguuacacaguaauuugg

SEQ ID NO: 1772201 - RNA, 19 nt, Artificial Sequence
  Description of Artificial Sequence: Synthetic oligonucleotide
  Sense strand starting at position 2264 of SEQ ID NO: 1562779
cauguuuacucagccagga

SEQ ID NO: 1772202 - RNA, 19 nt, Artificial Sequence
  Description of Artificial Sequence: Synthetic oligonucleotide
  Antisense strand to SEQ ID NO: 1772201
uccuggcugaguaaacaug

SEQ ID NO: 1772203 - RNA, 19 nt, Artificial Sequence
  Description of Artificial Sequence: Synthetic oligonucleotide
  Sense strand starting at position 2266 of SEQ ID NO: 1562779
uguuuacucagccaggaga

SEQ ID NO: 1772204 - RNA, 19 nt, Artificial Sequence
  Description of Artificial Sequence: Synthetic oligonucleotide
  Antisense strand to SEQ ID NO: 1772203
ucuccuggcugaguaaaca

SEQ ID NO: 1772205 - RNA, 19 nt, Artificial Sequence
  Description of Artificial Sequence: Synthetic oligonucleotide
  Sense strand starting at position 2562 of SEQ ID NO: 1562779
agagacugugaauguaaau

SEQ ID NO: 1772206 - RNA, 19 nt, Artificial Sequence
  Description of Artificial Sequence: Synthetic oligonucleotide
  Antisense strand to SEQ ID NO: 1772205
auuuacauucacagucucu

SEQ ID NO: 1772207 - RNA, 19 nt, Artificial Sequence
  Description of Artificial Sequence: Synthetic oligonucleotide
  Sense strand starting at position 2571 of SEQ ID NO: 1562779
gaauguaaauuuggauguu

SEQ ID NO: 1772208 - RNA, 19 nt, Artificial Sequence
  Description of Artificial Sequence: Synthetic oligonucleotide
  Antisense strand to SEQ ID NO: 1772207
aacauccaaauuuacauuc

SEQ ID NO: 1772209 - RNA, 19 nt, Artificial Sequence
  Description of Artificial Sequence: Synthetic oligonucleotide
  Sense strand starting at position 2577 of SEQ ID NO: 1562779
aaauuuggauguuagaauc

SEQ ID NO: 1772210 - RNA, 19 nt, Artificial Sequence
  Description of Artificial Sequence: Synthetic oligonucleotide
  Antisense strand to SEQ ID NO: 1772209
gauucuaacauccaaauuu

SEQ ID NO: 1772211 - RNA, 19 nt, Artificial Sequence
  Description of Artificial Sequence: Synthetic oligonucleotide
  Sense strand starting at position 2646 of SEQ ID NO: 1562779
ggucuccacucccugagaa

SEQ ID NO: 1772212 - RNA, 19 nt, Artificial Sequence
  Description of Artificial Sequence: Synthetic oligonucleotide
  Antisense strand to SEQ ID NO: 1772211
uucucagggaguggagacc

SEQ ID NO: 1772213 - RNA, 19 nt, Artificial Sequence
  Description of Artificial Sequence: Synthetic oligonucleotide
  Sense strand starting at position 2748 of SEQ ID NO: 1562779
gugucaggcugucugauuu

SEQ ID NO: 1772214 - RNA, 19 nt, Artificial Sequence
  Description of Artificial Sequence: Synthetic oligonucleotide
  Antisense strand to SEQ ID NO: 1772213
aaaucagacagccugacac

SEQ ID NO: 1772215 - RNA, 19 nt, Artificial Sequence
  Description of Artificial Sequence: Synthetic oligonucleotide
  Sense strand starting at position 2752 of SEQ ID NO: 1562779
caggcugucugauuuaguu

SEQ ID NO: 1772216 - RNA, 19 nt, Artificial Sequence
  Description of Artificial Sequence: Synthetic oligonucleotide
  Antisense strand to SEQ ID NO: 1772215
aacuaaaucagacagccug

SEQ ID NO: 1772217 - RNA, 19 nt, Artificial Sequence
  Description of Artificial Sequence: Synthetic oligonucleotide
  Sense strand starting at position 2776 of SEQ ID NO: 1562779
gggaauaggcucugcugua

SEQ ID NO: 1772218 - RNA, 19 nt, Artificial Sequence
  Description of Artificial Sequence: Synthetic oligonucleotide
  Antisense strand to SEQ ID NO: 1772217
uacagcagagccuauuccc

SEQ ID NO: 1772219 - RNA, 19 nt, Artificial Sequence
  Description of Artificial Sequence: Synthetic oligonucleotide
  Sense strand starting at position 2798 of SEQ ID NO: 1562779
gcaaguaaacccuauaguc

SEQ ID NO: 1772220 - RNA, 19 nt, Artificial Sequence
  Description of Artificial Sequence: Synthetic oligonucleotide
  Antisense strand to SEQ ID NO: 1772219
gacuauaggguuuacuugc

SEQ ID NO: 1772221 - RNA, 19 nt, Artificial Sequence
  Description of Artificial Sequence: Synthetic oligonucleotide
  Sense strand starting at position 2807 of SEQ ID NO: 1562779
cccuauagucuugggagca

SEQ ID NO: 1772222 - RNA, 19 nt, Artificial Sequence
  Description of Artificial Sequence: Synthetic oligonucleotide
  Antisense strand to SEQ ID NO: 1772221
ugcucccaagacuauaggg

SEQ ID NO: 1772223 - RNA, 19 nt, Artificial Sequence
  Description of Artificial Sequence: Synthetic oligonucleotide
  Sense strand starting at position 2812 of SEQ ID NO: 1562779
uagucuugggagcauaaua

SEQ ID NO: 1772224 - RNA, 19 nt, Artificial Sequence
  Description of Artificial Sequence: Synthetic oligonucleotide
  Antisense strand to SEQ ID NO: 1772223
uauuaugcucccaagacua

SEQ ID NO: 1772225 - RNA, 19 nt, Artificial Sequence
  Description of Artificial Sequence: Synthetic oligonucleotide
  Sense strand starting at position 3030 of SEQ ID NO: 1562779
uggugcuuugcuguaccua

SEQ ID NO: 1772226 - RNA, 19 nt, Artificial Sequence
  Description of Artificial Sequence: Synthetic oligonucleotide
  Antisense strand to SEQ ID NO: 1772225
uagguacagcaaagcacca

SEQ ID NO: 1772227 - RNA, 19 nt, Artificial Sequence
  Description of Artificial Sequence: Synthetic oligonucleotide
  Sense strand starting at position 3064 of SEQ ID NO: 1562779
gguuuaaguccugcgugca

SEQ ID NO: 1772228 - RNA, 19 nt, Artificial Sequence
  Description of Artificial Sequence: Synthetic oligonucleotide
  Antisense strand to SEQ ID NO: 1772227
ugcacgcaggacuuaaacc

SEQ ID NO: 1772229 - RNA, 19 nt, Artificial Sequence
  Description of Artificial Sequence: Synthetic oligonucleotide
  Sense strand starting at position 3246 of SEQ ID NO: 1562779
augagucagaaguggaagu

SEQ ID NO: 1772230 - RNA, 19 nt, Artificial Sequence
  Description of Artificial Sequence: Synthetic oligonucleotide
  Antisense strand to SEQ ID NO: 1772229
acuuccacuucugacucau

SEQ ID NO: 1772231 - RNA, 19 nt, Artificial Sequence
  Description of Artificial Sequence: Synthetic oligonucleotide
  Sense strand starting at position 3256 of SEQ ID NO: 1562779
aguggaagugguugauaga

SEQ ID NO: 1772232 - RNA, 19 nt, Artificial Sequence
  Description of Artificial Sequence: Synthetic oligonucleotide
  Antisense strand to SEQ ID NO: 1772231
ucuaucaaccacuuccacu

SEQ ID NO: 1772233 - RNA, 19 nt, Artificial Sequence
  Description of Artificial Sequence: Synthetic oligonucleotide
  Sense strand starting at position 3468 of SEQ ID NO: 1562779
ggacaagguuccuuacacu

SEQ ID NO: 1772234 - RNA, 19 nt, Artificial Sequence
  Description of Artificial Sequence: Synthetic oligonucleotide
  Antisense strand to SEQ ID NO: 1772233
aguguaaggaaccuugucc

SEQ ID NO: 1772235 - RNA, 19 nt, Artificial Sequence
  Description of Artificial Sequence: Synthetic oligonucleotide
  Sense strand starting at position 3502 of SEQ ID NO: 1562779
ucugauggguacuugagau

SEQ ID NO: 1772236 - RNA, 19 nt, Artificial Sequence
  Description of Artificial Sequence: Synthetic oligonucleotide
  Antisense strand to SEQ ID NO: 1772235
aucucaaguacccaucaga

SEQ ID NO: 1772237 - RNA, 19 nt, Artificial Sequence
  Description of Artificial Sequence: Synthetic oligonucleotide
  Sense strand starting at position 3512 of SEQ ID NO: 1562779
acuugagaugcuuggucaa

SEQ ID NO: 1772238 - RNA, 19 nt, Artificial Sequence
  Description of Artificial Sequence: Synthetic oligonucleotide
  Antisense strand to SEQ ID NO: 1772237
uugaccaagcaucucaagu

SEQ ID NO: 1772239 - RNA, 19 nt, Artificial Sequence
  Description of Artificial Sequence: Synthetic oligonucleotide
  Sense strand starting at position 3514 of SEQ ID NO: 1562779
uugagaugcuuggucaaga

SEQ ID NO: 1772240 - RNA, 19 nt, Artificial Sequence
  Description of Artificial Sequence: Synthetic oligonucleotide
  Antisense strand to SEQ ID NO: 1772239
ucuugaccaagcaucucaa

SEQ ID NO: 1772241 - RNA, 19 nt, Artificial Sequence
  Description of Artificial Sequence: Synthetic oligonucleotide
  Sense strand starting at position 3515 of SEQ ID NO: 1562779
ugagaugcuuggucaagag

SEQ ID NO: 1772242 - RNA, 19 nt, Artificial Sequence
  Description of Artificial Sequence: Synthetic oligonucleotide
  Antisense strand to SEQ ID NO: 1772241
cucuugaccaagcaucuca

SEQ ID NO: 1772243 - RNA, 19 nt, Artificial Sequence
  Description of Artificial Sequence: Synthetic oligonucleotide
  Sense strand starting at position 3626 of SEQ ID NO: 1562779
gugugcucaccguuucacu

SEQ ID NO: 1772244 - RNA, 19 nt, Artificial Sequence
  Description of Artificial Sequence: Synthetic oligonucleotide
  Antisense strand to SEQ ID NO: 1772243
agugaaacggugagcacac

SEQ ID NO: 1772245 - RNA, 19 nt, Artificial Sequence
  Description of Artificial Sequence: Synthetic oligonucleotide
  Sense strand starting at position 22 of SEQ ID NO: 1562780
cuguaauucuggucccuau

SEQ ID NO: 1772246 - RNA, 19 nt, Artificial Sequence
  Description of Artificial Sequence: Synthetic oligonucleotide
  Antisense strand to SEQ ID NO: 1772245
auagggaccagaauuacag

SEQ ID NO: 1772247 - RNA, 19 nt, Artificial Sequence
  Description of Artificial Sequence: Synthetic oligonucleotide
  Sense strand starting at position 100 of SEQ ID NO: 1562780
auaugcacugcuugaagaa

SEQ ID NO: 1772248 - RNA, 19 nt, Artificial Sequence
  Description of Artificial Sequence: Synthetic oligonucleotide
  Antisense strand to SEQ ID NO: 1772247
uucuucaagcagugcauau

SEQ ID NO: 1772249 - RNA, 19 nt, Artificial Sequence
  Description of Artificial Sequence: Synthetic oligonucleotide
  Sense strand starting at position 112 of SEQ ID NO: 1562780
ugaagaaugcuugagcuuc

SEQ ID NO: 1772250 - RNA, 19 nt, Artificial Sequence
  Description of Artificial Sequence: Synthetic oligonucleotide
  Antisense strand to SEQ ID NO: 1772249
gaagcucaagcauucuuca

SEQ ID NO: 1772251 - RNA, 19 nt, Artificial Sequence
  Description of Artificial Sequence: Synthetic oligonucleotide
  Sense strand starting at position 181 of SEQ ID NO: 1562780
gcaagaucaucaccugagu

SEQ ID NO: 1772252 - RNA, 19 nt, Artificial Sequence
  Description of Artificial Sequence: Synthetic oligonucleotide
  Antisense strand to SEQ ID NO: 1772251
acucaggugaugaucuugc

SEQ ID NO: 1772253 - RNA, 19 nt, Artificial Sequence
  Description of Artificial Sequence: Synthetic oligonucleotide
  Sense strand starting at position 218 of SEQ ID NO: 1562780
ugcuguuguguccauuaag

SEQ ID NO: 1772254 - RNA, 19 nt, Artificial Sequence
  Description of Artificial Sequence: Synthetic oligonucleotide
  Antisense strand to SEQ ID NO: 1772253
cuuaauggacacaacagca

SEQ ID NO: 1772255 - RNA, 19 nt, Artificial Sequence
  Description of Artificial Sequence: Synthetic oligonucleotide
  Sense strand starting at position 221 of SEQ ID NO: 1562780
uguuguguccauuaagaca

SEQ ID NO: 1772256 - RNA, 19 nt, Artificial Sequence
  Description of Artificial Sequence: Synthetic oligonucleotide
  Antisense strand to SEQ ID NO: 1772255
ugucuuaauggacacaaca

SEQ ID NO: 1772257 - RNA, 19 nt, Artificial Sequence
  Description of Artificial Sequence: Synthetic oligonucleotide
  Sense strand starting at position 569 of SEQ ID NO: 1562780
cugggauuacaccguacuu

SEQ ID NO: 1772258 - RNA, 19 nt, Artificial Sequence
  Description of Artificial Sequence: Synthetic oligonucleotide
  Antisense strand to SEQ ID NO: 1772257
aaguacgguguaaucccag

SEQ ID NO: 1772259 - RNA, 19 nt, Artificial Sequence
  Description of Artificial Sequence: Synthetic oligonucleotide
  Sense strand starting at position 619 of SEQ ID NO: 1562780
gguggcauuuguucuaagu

SEQ ID NO: 1772260 - RNA, 19 nt, Artificial Sequence
  Description of Artificial Sequence: Synthetic oligonucleotide
  Antisense strand to SEQ ID NO: 1772259
acuuagaacaaaugccacc

SEQ ID NO: 1772261 - RNA, 19 nt, Artificial Sequence
  Description of Artificial Sequence: Synthetic oligonucleotide
  Sense strand starting at position 627 of SEQ ID NO: 1562780
uuguucuaaguggguaaga

SEQ ID NO: 1772262 - RNA, 19 nt, Artificial Sequence
  Description of Artificial Sequence: Synthetic oligonucleotide
  Antisense strand to SEQ ID NO: 1772261
ucuuacccacuuagaacaa

SEQ ID NO: 1772263 - RNA, 19 nt, Artificial Sequence
  Description of Artificial Sequence: Synthetic oligonucleotide
  Sense strand starting at position 628 of SEQ ID NO: 1562780
uguucuaaguggguaagaa

SEQ ID NO: 1772264 - RNA, 19 nt, Artificial Sequence
  Description of Artificial Sequence: Synthetic oligonucleotide
  Antisense strand to SEQ ID NO: 1772263
uucuuacccacuuagaaca

SEQ ID NO: 1772265 - RNA, 19 nt, Artificial Sequence
  Description of Artificial Sequence: Synthetic oligonucleotide
  Sense strand starting at position 629 of SEQ ID NO: 1562780
guucuaaguggguaagaaa

SEQ ID NO: 1772266 - RNA, 19 nt, Artificial Sequence
  Description of Artificial Sequence: Synthetic oligonucleotide
  Antisense strand to SEQ ID NO: 1772265
uuucuuacccacuuagaac

SEQ ID NO: 1772267 - RNA, 19 nt, Artificial Sequence
  Description of Artificial Sequence: Synthetic oligonucleotide
  Sense strand starting at position 713 of SEQ ID NO: 1562780
agaagcuauuuggacauau

SEQ ID NO: 1772268 - RNA, 19 nt, Artificial Sequence
  Description of Artificial Sequence: Synthetic oligonucleotide
  Antisense strand to SEQ ID NO: 1772267
auauguccaaauagcuucu

SEQ ID NO: 1772269 - RNA, 19 nt, Artificial Sequence
  Description of Artificial Sequence: Synthetic oligonucleotide
  Sense strand starting at position 754 of SEQ ID NO: 1562780
gcauaauacaggcagugaa

SEQ ID NO: 1772270 - RNA, 19 nt, Artificial Sequence
  Description of Artificial Sequence: Synthetic oligonucleotide
  Antisense strand to SEQ ID NO: 1772269
uucacugccuguauuaugc

SEQ ID NO: 1772271 - RNA, 19 nt, Artificial Sequence
  Description of Artificial Sequence: Synthetic oligonucleotide
  Sense strand starting at position 841 of SEQ ID NO: 1562780
aaagcugagcauuguuuau

SEQ ID NO: 1772272 - RNA, 19 nt, Artificial Sequence
  Description of Artificial Sequence: Synthetic oligonucleotide
  Antisense strand to SEQ ID NO: 1772271
auaaacaaugcucagcuuu

SEQ ID NO: 1772273 - RNA, 19 nt, Artificial Sequence
  Description of Artificial Sequence: Synthetic oligonucleotide
  Sense strand starting at position 843 of SEQ ID NO: 1562780
agcugagcauuguuuauac

SEQ ID NO: 1772274 - RNA, 19 nt, Artificial Sequence
  Description of Artificial Sequence: Synthetic oligonucleotide
  Antisense strand to SEQ ID NO: 1772273
guauaaacaaugcucagcu

SEQ ID NO: 1772275 - RNA, 19 nt, Artificial Sequence
  Description of Artificial Sequence: Synthetic oligonucleotide
  Sense strand starting at position 845 of SEQ ID NO: 1562780
cugagcauuguuuauacau

SEQ ID NO: 1772276 - RNA, 19 nt, Artificial Sequence
  Description of Artificial Sequence: Synthetic oligonucleotide
  Antisense strand to SEQ ID NO: 1772275
auguauaaacaaugcucag

SEQ ID NO: 1772277 - RNA, 19 nt, Artificial Sequence
  Description of Artificial Sequence: Synthetic oligonucleotide
  Sense strand starting at position 927 of SEQ ID NO: 1562780
gucccacuucuagacugua

SEQ ID NO: 1772278 - RNA, 19 nt, Artificial Sequence
  Description of Artificial Sequence: Synthetic oligonucleotide
  Antisense strand to SEQ ID NO: 1772277
uacagucuagaagugggac

SEQ ID NO: 1772279 - RNA, 19 nt, Artificial Sequence
  Description of Artificial Sequence: Synthetic oligonucleotide
  Sense strand starting at position 981 of SEQ ID NO: 1562780
cauaguggucaacagcaua

SEQ ID NO: 1772280 - RNA, 19 nt, Artificial Sequence
  Description of Artificial Sequence: Synthetic oligonucleotide
  Antisense strand to SEQ ID NO: 1772279
uaugcuguugaccacuaug

SEQ ID NO: 1772281 - RNA, 19 nt, Artificial Sequence
  Description of Artificial Sequence: Synthetic oligonucleotide
  Sense strand starting at position 984 of SEQ ID NO: 1562780
aguggucaacagcauagau

SEQ ID NO: 1772282 - RNA, 19 nt, Artificial Sequence
  Description of Artificial Sequence: Synthetic oligonucleotide
  Antisense strand to SEQ ID NO: 1772281
aucuaugcuguugaccacu

SEQ ID NO: 1772283 - RNA, 19 nt, Artificial Sequence
  Description of Artificial Sequence: Synthetic oligonucleotide
  Sense strand starting at position 986 of SEQ ID NO: 1562780
uggucaacagcauagauau

SEQ ID NO: 1772284 - RNA, 19 nt, Artificial Sequence
  Description of Artificial Sequence: Synthetic oligonucleotide
  Antisense strand to SEQ ID NO: 1772283
auaucuaugcuguugacca

SEQ ID NO: 1772285 - RNA, 19 nt, Artificial Sequence
  Description of Artificial Sequence: Synthetic oligonucleotide
  Sense strand starting at position 1021 of SEQ ID NO: 1562780
cuccaagucuuguuaucuu

SEQ ID NO: 1772286 - RNA, 19 nt, Artificial Sequence
  Description of Artificial Sequence: Synthetic oligonucleotide
  Antisense strand to SEQ ID NO: 1772285
aagauaacaagacuuggag

SEQ ID NO: 1772287 - RNA, 19 nt, Artificial Sequence
  Description of Artificial Sequence: Synthetic oligonucleotide
  Sense strand starting at position 1040 of SEQ ID NO: 1562780
gggcgagguacugaacuaa

SEQ ID NO: 1772288 - RNA, 19 nt, Artificial Sequence
  Description of Artificial Sequence: Synthetic oligonucleotide
  Antisense strand to SEQ ID NO: 1772287
uuaguucaguaccucgccc

SEQ ID NO: 1772289 - RNA, 19 nt, Artificial Sequence
  Description of Artificial Sequence: Synthetic oligonucleotide
  Sense strand starting at position 1100 of SEQ ID NO: 1562780
acacguauuccacgggacu

SEQ ID NO: 1772290 - RNA, 19 nt, Artificial Sequence
  Description of Artificial Sequence: Synthetic oligonucleotide
  Antisense strand to SEQ ID NO: 1772289
agucccguggaauacgugu

SEQ ID NO: 1772291 - RNA, 19 nt, Artificial Sequence
  Description of Artificial Sequence: Synthetic oligonucleotide
  Sense strand starting at position 1149 of SEQ ID NO: 1562780
ggcuaugaguacuuuccua

SEQ ID NO: 1772292 - RNA, 19 nt, Artificial Sequence
  Description of Artificial Sequence: Synthetic oligonucleotide
  Antisense strand to SEQ ID NO: 1772291
uaggaaaguacucauagcc

SEQ ID NO: 1772293 - RNA, 19 nt, Artificial Sequence
  Description of Artificial Sequence: Synthetic oligonucleotide
  Sense strand starting at position 1172 of SEQ ID NO: 1562780
accguaagugccugauaaa

SEQ ID NO: 1772294 - RNA, 19 nt, Artificial Sequence
  Description of Artificial Sequence: Synthetic oligonucleotide
  Antisense strand to SEQ ID NO: 1772293
uuuaucaggcacuuacggu

SEQ ID NO: 1772295 - RNA, 19 nt, Artificial Sequence
  Description of Artificial Sequence: Synthetic oligonucleotide
  Sense strand starting at position 1173 of SEQ ID NO: 1562780
ccguaagugccugauaaau

SEQ ID NO: 1772296 - RNA, 19 nt, Artificial Sequence
  Description of Artificial Sequence: Synthetic oligonucleotide
  Antisense strand to SEQ ID NO: 1772295
auuuaucaggcacuuacgg

SEQ ID NO: 1772297 - RNA, 19 nt, Artificial Sequence
  Description of Artificial Sequence: Synthetic oligonucleotide
  Sense strand starting at position 1213 of SEQ ID NO: 1562780
ucuugugucccuuauaccu

SEQ ID NO: 1772298 - RNA, 19 nt, Artificial Sequence
  Description of Artificial Sequence: Synthetic oligonucleotide
  Antisense strand to SEQ ID NO: 1772297
agguauaagggacacaaga

SEQ ID NO: 1772299 - RNA, 19 nt, Artificial Sequence
  Description of Artificial Sequence: Synthetic oligonucleotide
  Sense strand starting at position 1267 of SEQ ID NO: 1562780
gguuuaugaagcugagaca

SEQ ID NO: 1772300 - RNA, 19 nt, Artificial Sequence
  Description of Artificial Sequence: Synthetic oligonucleotide
  Antisense strand to SEQ ID NO: 1772299
ugucucagcuucauaaacc

SEQ ID NO: 1772301 - RNA, 19 nt, Artificial Sequence
  Description of Artificial Sequence: Synthetic oligonucleotide
  Sense strand starting at position 1383 of SEQ ID NO: 1562780
aggcauugcuguccuggaa

SEQ ID NO: 1772302 - RNA, 19 nt, Artificial Sequence
  Description of Artificial Sequence: Synthetic oligonucleotide
  Antisense strand to SEQ ID NO: 1772301
uuccaggacagcaaugccu

SEQ ID NO: 1772303 - RNA, 19 nt, Artificial Sequence
  Description of Artificial Sequence: Synthetic oligonucleotide
  Sense strand starting at position 1392 of SEQ ID NO: 1562780
uguccuggaagacguuauu

SEQ ID NO: 1772304 - RNA, 19 nt, Artificial Sequence
  Description of Artificial Sequence: Synthetic oligonucleotide
  Antisense strand to SEQ ID NO: 1772303
aauaacgucuuccaggaca

SEQ ID NO: 1772305 - RNA, 19 nt, Artificial Sequence
  Description of Artificial Sequence: Synthetic oligonucleotide
  Sense strand starting at position 1395 of SEQ ID NO: 1562780
ccuggaagacguuauugag

SEQ ID NO: 1772306 - RNA, 19 nt, Artificial Sequence
  Description of Artificial Sequence: Synthetic oligonucleotide
  Antisense strand to SEQ ID NO: 1772305
cucaauaacgucuuccagg

SEQ ID NO: 1772307 - RNA, 19 nt, Artificial Sequence
  Description of Artificial Sequence: Synthetic oligonucleotide
  Sense strand starting at position 1547 of SEQ ID NO: 1562780
gguuccagagauggcuaua

SEQ ID NO: 1772308 - RNA, 19 nt, Artificial Sequence
  Description of Artificial Sequence: Synthetic oligonucleotide
  Antisense strand to SEQ ID NO: 1772307
uauagccaucucuggaacc

SEQ ID NO: 1772309 - RNA, 19 nt, Artificial Sequence
  Description of Artificial Sequence: Synthetic oligonucleotide
  Sense strand starting at position 1639 of SEQ ID NO: 1562780
uucucugguguccaugauu

SEQ ID NO: 1772310 - RNA, 19 nt, Artificial Sequence
  Description of Artificial Sequence: Synthetic oligonucleotide
  Antisense strand to SEQ ID NO: 1772309
aaucauggacaccagagaa

SEQ ID NO: 1772311 - RNA, 19 nt, Artificial Sequence
  Description of Artificial Sequence: Synthetic oligonucleotide
  Sense strand starting at position 1653 of SEQ ID NO: 1562780
ugauuuaugcuuugucacu

SEQ ID NO: 1772312 - RNA, 19 nt, Artificial Sequence
  Description of Artificial Sequence: Synthetic oligonucleotide
  Antisense strand to SEQ ID NO: 1772311
agugacaaagcauaaauca

SEQ ID NO: 1772313 - RNA, 19 nt, Artificial Sequence
  Description of Artificial Sequence: Synthetic oligonucleotide
  Sense strand starting at position 1654 of SEQ ID NO: 1562780
gauuuaugcuuugucacug

SEQ ID NO: 1772314 - RNA, 19 nt, Artificial Sequence
  Description of Artificial Sequence: Synthetic oligonucleotide
  Antisense strand to SEQ ID NO: 1772313
cagugacaaagcauaaauc

SEQ ID NO: 1772315 - RNA, 19 nt, Artificial Sequence
  Description of Artificial Sequence: Synthetic oligonucleotide
  Sense strand starting at position 1659 of SEQ ID NO: 1562780
augcuuugucacugggaga

SEQ ID NO: 1772316 - RNA, 19 nt, Artificial Sequence
  Description of Artificial Sequence: Synthetic oligonucleotide
  Antisense strand to SEQ ID NO: 1772315
ucucccagugacaaagcau

SEQ ID NO: 1772317 - RNA, 19 nt, Artificial Sequence
  Description of Artificial Sequence: Synthetic oligonucleotide
  Sense strand starting at position 1660 of SEQ ID NO: 1562780
ugcuuugucacugggagaa

SEQ ID NO: 1772318 - RNA, 19 nt, Artificial Sequence
  Description of Artificial Sequence: Synthetic oligonucleotide
  Antisense strand to SEQ ID NO: 1772317
uucucccagugacaaagca

SEQ ID NO: 1772319 - RNA, 19 nt, Artificial Sequence
  Description of Artificial Sequence: Synthetic oligonucleotide
  Sense strand starting at position 1966 of SEQ ID NO: 1562780
acgccaaugacucgggaga

SEQ ID NO: 1772320 - RNA, 19 nt, Artificial Sequence
  Description of Artificial Sequence: Synthetic oligonucleotide
  Antisense strand to SEQ ID NO: 1772319
ucucccgagucauuggcgu

SEQ ID NO: 1772321 - RNA, 19 nt, Artificial Sequence
  Description of Artificial Sequence: Synthetic oligonucleotide
  Sense strand starting at position 2002 of SEQ ID NO: 1562780
auaaauuuagcgcacgagu

SEQ ID NO: 1772322 - RNA, 19 nt, Artificial Sequence
  Description of Artificial Sequence: Synthetic oligonucleotide
  Antisense strand to SEQ ID NO: 1772321
acucgugcgcuaaauuuau

SEQ ID NO: 1772323 - RNA, 19 nt, Artificial Sequence
  Description of Artificial Sequence: Synthetic oligonucleotide
  Sense strand starting at position 3012 of SEQ ID NO: 1562780
gcgcaaauugccuugguua

SEQ ID NO: 1772324 - RNA, 19 nt, Artificial Sequence
  Description of Artificial Sequence: Synthetic oligonucleotide
  Antisense strand to SEQ ID NO: 1772323
uaaccaaggcaauuugcgc

SEQ ID NO: 1772325 - RNA, 19 nt, Artificial Sequence
  Description of Artificial Sequence: Synthetic oligonucleotide
  Sense strand starting at position 27 of SEQ ID NO: 1562781
ccaggaagcuggugacauu

SEQ ID NO: 1772326 - RNA, 19 nt, Artificial Sequence
  Description of Artificial Sequence: Synthetic oligonucleotide
  Antisense strand to SEQ ID NO: 1772325
aaugucaccagcuuccugg

SEQ ID NO: 1772327 - RNA, 19 nt, Artificial Sequence
  Description of Artificial Sequence: Synthetic oligonucleotide
  Sense strand starting at position 92 of SEQ ID NO: 1562781
gaagaacugucacuguauu

SEQ ID NO: 1772328 - RNA, 19 nt, Artificial Sequence
  Description of Artificial Sequence: Synthetic oligonucleotide
  Antisense strand to SEQ ID NO: 1772327
aauacagugacaguucuuc

SEQ ID NO: 1772329 - RNA, 19 nt, Artificial Sequence
  Description of Artificial Sequence: Synthetic oligonucleotide
  Sense strand starting at position 103 of SEQ ID NO: 1562781
acuguauucccguuugugu

SEQ ID NO: 1772330 - RNA, 19 nt, Artificial Sequence
  Description of Artificial Sequence: Synthetic oligonucleotide
  Antisense strand to SEQ ID NO: 1772329
acacaaacgggaauacagu

SEQ ID NO: 1772331 - RNA, 19 nt, Artificial Sequence
  Description of Artificial Sequence: Synthetic oligonucleotide
  Sense strand starting at position 132 of SEQ ID NO: 1562781
uuuagaaccguaugaaugu

SEQ ID NO: 1772332 - RNA, 19 nt, Artificial Sequence
  Description of Artificial Sequence: Synthetic oligonucleotide
  Antisense strand to SEQ ID NO: 1772331
acauucauacgguucuaaa

SEQ ID NO: 1772333 - RNA, 19 nt, Artificial Sequence
  Description of Artificial Sequence: Synthetic oligonucleotide
  Sense strand starting at position 133 of SEQ ID NO: 1562781
uuagaaccguaugaaugua

SEQ ID NO: 1772334 - RNA, 19 nt, Artificial Sequence
  Description of Artificial Sequence: Synthetic oligonucleotide
  Antisense strand to SEQ ID NO: 1772333
uacauucauacgguucuaa

SEQ ID NO: 1772335 - RNA, 19 nt, Artificial Sequence
  Description of Artificial Sequence: Synthetic oligonucleotide
  Sense strand starting at position 145 of SEQ ID NO: 1562781
gaauguauuaccuguggga

SEQ ID NO: 1772336 - RNA, 19 nt, Artificial Sequence
  Description of Artificial Sequence: Synthetic oligonucleotide
  Antisense strand to SEQ ID NO: 1772335
ucccacagguaauacauuc

SEQ ID NO: 1772337 - RNA, 19 nt, Artificial Sequence
  Description of Artificial Sequence: Synthetic oligonucleotide
  Sense strand starting at position 147 of SEQ ID NO: 1562781
auguauuaccugugggaaa

SEQ ID NO: 1772338 - RNA, 19 nt, Artificial Sequence
  Description of Artificial Sequence: Synthetic oligonucleotide
  Antisense strand to SEQ ID NO: 1772337
uuucccacagguaauacau

SEQ ID NO: 1772339 - RNA, 19 nt, Artificial Sequence
  Description of Artificial Sequence: Synthetic oligonucleotide
  Sense strand starting at position 546 of SEQ ID NO: 1562781
ccgaaagucugagaacacu

SEQ ID NO: 1772340 - RNA, 19 nt, Artificial Sequence
  Description of Artificial Sequence: Synthetic oligonucleotide
  Antisense strand to SEQ ID NO: 1772339
aguguucucagacuuucgg

SEQ ID NO: 1772341 - RNA, 19 nt, Artificial Sequence
  Description of Artificial Sequence: Synthetic oligonucleotide
  Sense strand starting at position 684 of SEQ ID NO: 1562781
ggguuuguaaacuguaaag

SEQ ID NO: 1772342 - RNA, 19 nt, Artificial Sequence
  Description of Artificial Sequence: Synthetic oligonucleotide
  Antisense strand to SEQ ID NO: 1772341
cuuuacaguuuacaaaccc

SEQ ID NO: 1772343 - RNA, 19 nt, Artificial Sequence
  Description of Artificial Sequence: Synthetic oligonucleotide
  Sense strand starting at position 704 of SEQ ID NO: 1562781
gcagaagccuuucuuucuu

SEQ ID NO: 1772344 - RNA, 19 nt, Artificial Sequence
  Description of Artificial Sequence: Synthetic oligonucleotide
  Antisense strand to SEQ ID NO: 1772343
aagaaagaaaggcuucugc

SEQ ID NO: 1772345 - RNA, 19 nt, Artificial Sequence
  Description of Artificial Sequence: Synthetic oligonucleotide
  Sense strand starting at position 836 of SEQ ID NO: 1562781
ucucgaauagcugggacuu

SEQ ID NO: 1772346 - RNA, 19 nt, Artificial Sequence
  Description of Artificial Sequence: Synthetic oligonucleotide
  Antisense strand to SEQ ID NO: 1772345
aagucccagcuauucgaga

SEQ ID NO: 1772347 - RNA, 19 nt, Artificial Sequence
  Description of Artificial Sequence: Synthetic oligonucleotide
  Sense strand starting at position 838 of SEQ ID NO: 1562781
ucgaauagcugggacuuga

SEQ ID NO: 1772348 - RNA, 19 nt, Artificial Sequence
  Description of Artificial Sequence: Synthetic oligonucleotide
  Antisense strand to SEQ ID NO: 1772347
ucaagucccagcuauucga

SEQ ID NO: 1772349 - RNA, 19 nt, Artificial Sequence
  Description of Artificial Sequence: Synthetic oligonucleotide
  Sense strand starting at position 1015 of SEQ ID NO: 1562781
ucuugaagggcaugacuua

SEQ ID NO: 1772350 - RNA, 19 nt, Artificial Sequence
  Description of Artificial Sequence: Synthetic oligonucleotide
  Antisense strand to SEQ ID NO: 1772349
uaagucaugcccuucaaga

SEQ ID NO: 1772351 - RNA, 19 nt, Artificial Sequence
  Description of Artificial Sequence: Synthetic oligonucleotide
  Sense strand starting at position 1285 of SEQ ID NO: 1562781
cauccaguccuguggcuua

SEQ ID NO: 1772352 - RNA, 19 nt, Artificial Sequence
  Description of Artificial Sequence: Synthetic oligonucleotide
  Antisense strand to SEQ ID NO: 1772351
uaagccacaggacuggaug

SEQ ID NO: 1772353 - RNA, 19 nt, Artificial Sequence
  Description of Artificial Sequence: Synthetic oligonucleotide
  Sense strand starting at position 1533 of SEQ ID NO: 1562781
ccgcaauaacaauggguua

SEQ ID NO: 1772354 - RNA, 19 nt, Artificial Sequence
  Description of Artificial Sequence: Synthetic oligonucleotide
  Antisense strand to SEQ ID NO: 1772353
uaacccauuguuauugcgg

SEQ ID NO: 1772355 - RNA, 19 nt, Artificial Sequence
  Description of Artificial Sequence: Synthetic oligonucleotide
  Sense strand starting at position 1975 of SEQ ID NO: 1562781
ggcuguucuuucugguuga

SEQ ID NO: 1772356 - RNA, 19 nt, Artificial Sequence
  Description of Artificial Sequence: Synthetic oligonucleotide
  Antisense strand to SEQ ID NO: 1772355
ucaaccagaaagaacagcc

SEQ ID NO: 1772357 - RNA, 19 nt, Artificial Sequence
  Description of Artificial Sequence: Synthetic oligonucleotide
  Sense strand starting at position 1976 of SEQ ID NO: 1562781
gcuguucuuucugguugaa

SEQ ID NO: 1772358 - RNA, 19 nt, Artificial Sequence
  Description of Artificial Sequence: Synthetic oligonucleotide
  Antisense strand to SEQ ID NO: 1772357
uucaaccagaaagaacagc

SEQ ID NO: 1772359 - RNA, 19 nt, Artificial Sequence
  Description of Artificial Sequence: Synthetic oligonucleotide
  Sense strand starting at position 1979 of SEQ ID NO: 1562781
guucuuucugguugaaauu

SEQ ID NO: 1772360 - RNA, 19 nt, Artificial Sequence
  Description of Artificial Sequence: Synthetic oligonucleotide
  Antisense strand to SEQ ID NO: 1772359
aauuucaaccagaaagaac

SEQ ID NO: 1772361 - RNA, 19 nt, Artificial Sequence
  Description of Artificial Sequence: Synthetic oligonucleotide
  Sense strand starting at position 2052 of SEQ ID NO: 1562781
aaggcugccuguuccaaga

SEQ ID NO: 1772362 - RNA, 19 nt, Artificial Sequence
  Description of Artificial Sequence: Synthetic oligonucleotide
  Antisense strand to SEQ ID NO: 1772361
ucuuggaacaggcagccuu

SEQ ID NO: 1772363 - RNA, 19 nt, Artificial Sequence
  Description of Artificial Sequence: Synthetic oligonucleotide
  Sense strand starting at position 2222 of SEQ ID NO: 1562781
auaaauaucuaacgacuga

SEQ ID NO: 1772364 - RNA, 19 nt, Artificial Sequence
  Description of Artificial Sequence: Synthetic oligonucleotide
  Antisense strand to SEQ ID NO: 1772363
ucagucguuagauauuuau

SEQ ID NO: 1772365 - RNA, 19 nt, Artificial Sequence
  Description of Artificial Sequence: Synthetic oligonucleotide
  Sense strand starting at position 2280 of SEQ ID NO: 1562781
gucuaacugggucauguga

SEQ ID NO: 1772366 - RNA, 19 nt, Artificial Sequence
  Description of Artificial Sequence: Synthetic oligonucleotide
  Antisense strand to SEQ ID NO: 1772365
ucacaugacccaguuagac

SEQ ID NO: 1772367 - RNA, 19 nt, Artificial Sequence
  Description of Artificial Sequence: Synthetic oligonucleotide
  Sense strand starting at position 2282 of SEQ ID NO: 1562781
cuaacugggucaugugaca

SEQ ID NO: 1772368 - RNA, 19 nt, Artificial Sequence
  Description of Artificial Sequence: Synthetic oligonucleotide
  Antisense strand to SEQ ID NO: 1772367
ugucacaugacccaguuag

SEQ ID NO: 1772369 - RNA, 19 nt, Artificial Sequence
  Description of Artificial Sequence: Synthetic oligonucleotide
  Sense strand starting at position 2331 of SEQ ID NO: 1562781
acgguagucagggagaacu

SEQ ID NO: 1772370 - RNA, 19 nt, Artificial Sequence
  Description of Artificial Sequence: Synthetic oligonucleotide
  Antisense strand to SEQ ID NO: 1772369
aguucucccugacuaccgu

SEQ ID NO: 1772371 - RNA, 19 nt, Artificial Sequence
  Description of Artificial Sequence: Synthetic oligonucleotide
  Sense strand starting at position 2341 of SEQ ID NO: 1562781
gggagaacuucccagcgga

SEQ ID NO: 1772372 - RNA, 19 nt, Artificial Sequence
  Description of Artificial Sequence: Synthetic oligonucleotide
  Antisense strand to SEQ ID NO: 1772371
uccgcugggaaguucuccc

SEQ ID NO: 1772373 - RNA, 19 nt, Artificial Sequence
  Description of Artificial Sequence: Synthetic oligonucleotide
  Sense strand starting at position 2531 of SEQ ID NO: 1562781
ggaggauguccuggccuca

SEQ ID NO: 1772374 - RNA, 19 nt, Artificial Sequence
  Description of Artificial Sequence: Synthetic oligonucleotide
  Antisense strand to SEQ ID NO: 1772373
ugaggccaggacauccucc

SEQ ID NO: 1772375 - RNA, 19 nt, Artificial Sequence
  Description of Artificial Sequence: Synthetic oligonucleotide
  Sense strand starting at position 2880 of SEQ ID NO: 1562781
ccagaugugucucaacaca

SEQ ID NO: 1772376 - RNA, 19 nt, Artificial Sequence
  Description of Artificial Sequence: Synthetic oligonucleotide
  Antisense strand to SEQ ID NO: 1772375
uguguugagacacaucugg

SEQ ID NO: 1772377 - RNA, 19 nt, Artificial Sequence
  Description of Artificial Sequence: Synthetic oligonucleotide
  Sense strand starting at position 2915 of SEQ ID NO: 1562781
uggagggcggucuguaaau

SEQ ID NO: 1772378 - RNA, 19 nt, Artificial Sequence
  Description of Artificial Sequence: Synthetic oligonucleotide
  Antisense strand to SEQ ID NO: 1772377
auuuacagaccgcccucca

SEQ ID NO: 1772379 - RNA, 19 nt, Artificial Sequence
  Description of Artificial Sequence: Synthetic oligonucleotide
  Sense strand starting at position 2916 of SEQ ID NO: 1562781
ggagggcggucuguaaaua

SEQ ID NO: 1772380 - RNA, 19 nt, Artificial Sequence
  Description of Artificial Sequence: Synthetic oligonucleotide
  Antisense strand to SEQ ID NO: 1772379
uauuuacagaccgcccucc

SEQ ID NO: 1772381 - RNA, 19 nt, Artificial Sequence
  Description of Artificial Sequence: Synthetic oligonucleotide
  Sense strand starting at position 2917 of SEQ ID NO: 1562781
gagggcggucuguaaauaa

SEQ ID NO: 1772382 - RNA, 19 nt, Artificial Sequence
  Description of Artificial Sequence: Synthetic oligonucleotide
  Antisense strand to SEQ ID NO: 1772381
uuauuuacagaccgcccuc

SEQ ID NO: 1772383 - RNA, 19 nt, Artificial Sequence
  Description of Artificial Sequence: Synthetic oligonucleotide
  Sense strand starting at position 2921 of SEQ ID NO: 1562781
gcggucuguaaauaauuga

SEQ ID NO: 1772384 - RNA, 19 nt, Artificial Sequence
  Description of Artificial Sequence: Synthetic oligonucleotide
  Antisense strand to SEQ ID NO: 1772383
ucaauuauuuacagaccgc

SEQ ID NO: 1772385 - RNA, 19 nt, Artificial Sequence
  Description of Artificial Sequence: Synthetic oligonucleotide
  Sense strand starting at position 3295 of SEQ ID NO: 1562781
gcaccuaugucuuuaggaa

SEQ ID NO: 1772386 - RNA, 19 nt, Artificial Sequence
  Description of Artificial Sequence: Synthetic oligonucleotide
  Antisense strand to SEQ ID NO: 1772385
uuccuaaagacauaggugc

SEQ ID NO: 1772387 - RNA, 19 nt, Artificial Sequence
  Description of Artificial Sequence: Synthetic oligonucleotide
  Sense strand starting at position 3299 of SEQ ID NO: 1562781
cuaugucuuuaggaaccaa

SEQ ID NO: 1772388 - RNA, 19 nt, Artificial Sequence
  Description of Artificial Sequence: Synthetic oligonucleotide
  Antisense strand to SEQ ID NO: 1772387
uugguuccuaaagacauag

SEQ ID NO: 1772389 - RNA, 19 nt, Artificial Sequence
  Description of Artificial Sequence: Synthetic oligonucleotide
  Sense strand starting at position 3662 of SEQ ID NO: 1562781
ucacuacaugcauaguauu

SEQ ID NO: 1772390 - RNA, 19 nt, Artificial Sequence
  Description of Artificial Sequence: Synthetic oligonucleotide
  Antisense strand to SEQ ID NO: 1772389
aauacuaugcauguaguga

SEQ ID NO: 1772391 - RNA, 19 nt, Artificial Sequence
  Description of Artificial Sequence: Synthetic oligonucleotide
  Sense strand starting at position 3760 of SEQ ID NO: 1562781
gcaggaccugugugcaauu

SEQ ID NO: 1772392 - RNA, 19 nt, Artificial Sequence
  Description of Artificial Sequence: Synthetic oligonucleotide
  Antisense strand to SEQ ID NO: 1772391
aauugcacacagguccugc

SEQ ID NO: 1772393 - RNA, 19 nt, Artificial Sequence
  Description of Artificial Sequence: Synthetic oligonucleotide
  Sense strand starting at position 3801 of SEQ ID NO: 1562781
gguuaggagcggugaaaug

SEQ ID NO: 1772394 - RNA, 19 nt, Artificial Sequence
  Description of Artificial Sequence: Synthetic oligonucleotide
  Antisense strand to SEQ ID NO: 1772393
cauuucaccgcuccuaacc

SEQ ID NO: 1772395 - RNA, 19 nt, Artificial Sequence
  Description of Artificial Sequence: Synthetic oligonucleotide
  Sense strand starting at position 3825 of SEQ ID NO: 1562781
cggcgugugucuugaagcu

SEQ ID NO: 1772396 - RNA, 19 nt, Artificial Sequence
  Description of Artificial Sequence: Synthetic oligonucleotide
  Antisense strand to SEQ ID NO: 1772395
agcuucaagacacacgccg

SEQ ID NO: 1772397 - RNA, 19 nt, Artificial Sequence
  Description of Artificial Sequence: Synthetic oligonucleotide
  Sense strand starting at position 3827 of SEQ ID NO: 1562781
gcgugugucuugaagcugu

SEQ ID NO: 1772398 - RNA, 19 nt, Artificial Sequence
  Description of Artificial Sequence: Synthetic oligonucleotide
  Antisense strand to SEQ ID NO: 1772397
acagcuucaagacacacgc

SEQ ID NO: 1772399 - RNA, 19 nt, Artificial Sequence
  Description of Artificial Sequence: Synthetic oligonucleotide
  Sense strand starting at position 3866 of SEQ ID NO: 1562781
cgggcuuugugacacacaa

SEQ ID NO: 1772400 - RNA, 19 nt, Artificial Sequence
  Description of Artificial Sequence: Synthetic oligonucleotide
  Antisense strand to SEQ ID NO: 1772399
uugugugucacaaagcccg

SEQ ID NO: 1772401 - RNA, 19 nt, Artificial Sequence
  Description of Artificial Sequence: Synthetic oligonucleotide
  Sense strand starting at position 3893 of SEQ ID NO: 1562781
ggaauuguuggauguuaug

SEQ ID NO: 1772402 - RNA, 19 nt, Artificial Sequence
  Description of Artificial Sequence: Synthetic oligonucleotide
  Antisense strand to SEQ ID NO: 1772401
cauaacauccaacaauucc

SEQ ID NO: 1772403 - RNA, 19 nt, Artificial Sequence
  Description of Artificial Sequence: Synthetic oligonucleotide
  Sense strand starting at position 39 of SEQ ID NO: 1562782
ugcucaacacccugaugaa

SEQ ID NO: 1772404 - RNA, 19 nt, Artificial Sequence
  Description of Artificial Sequence: Synthetic oligonucleotide
  Antisense strand to SEQ ID NO: 1772403
uucaucaggguguugagca

SEQ ID NO: 1772405 - RNA, 19 nt, Artificial Sequence
  Description of Artificial Sequence: Synthetic oligonucleotide
  Sense strand starting at position 51 of SEQ ID NO: 1562782
ugaugaagucaguaucauc

SEQ ID NO: 1772406 - RNA, 19 nt, Artificial Sequence
  Description of Artificial Sequence: Synthetic oligonucleotide
  Antisense strand to SEQ ID NO: 1772405
gaugauacugacuucauca

SEQ ID NO: 1772407 - RNA, 19 nt, Artificial Sequence
  Description of Artificial Sequence: Synthetic oligonucleotide
  Sense strand starting at position 54 of SEQ ID NO: 1562782
ugaagucaguaucaucaua

SEQ ID NO: 1772408 - RNA, 19 nt, Artificial Sequence
  Description of Artificial Sequence: Synthetic oligonucleotide
  Antisense strand to SEQ ID NO: 1772407
uaugaugauacugacuuca

SEQ ID NO: 1772409 - RNA, 19 nt, Artificial Sequence
  Description of Artificial Sequence: Synthetic oligonucleotide
  Sense strand starting at position 70 of SEQ ID NO: 1562782
auaccuauucuccaguuga

SEQ ID NO: 1772410 - RNA, 19 nt, Artificial Sequence
  Description of Artificial Sequence: Synthetic oligonucleotide
  Antisense strand to SEQ ID NO: 1772409
ucaacuggagaauagguau

SEQ ID NO: 1772411 - RNA, 19 nt, Artificial Sequence
  Description of Artificial Sequence: Synthetic oligonucleotide
  Sense strand starting at position 269 of SEQ ID NO: 1562782
ccuccuucgucagcuauuu

SEQ ID NO: 1772412 - RNA, 19 nt, Artificial Sequence
  Description of Artificial Sequence: Synthetic oligonucleotide
  Antisense strand to SEQ ID NO: 1772411
aaauagcugacgaaggagg

SEQ ID NO: 1772413 - RNA, 19 nt, Artificial Sequence
  Description of Artificial Sequence: Synthetic oligonucleotide
  Sense strand starting at position 277 of SEQ ID NO: 1562782
gucagcuauuuccgccaua

SEQ ID NO: 1772414 - RNA, 19 nt, Artificial Sequence
  Description of Artificial Sequence: Synthetic oligonucleotide
  Antisense strand to SEQ ID NO: 1772413
uauggcggaaauagcugac

SEQ ID NO: 1772415 - RNA, 19 nt, Artificial Sequence
  Description of Artificial Sequence: Synthetic oligonucleotide
  Sense strand starting at position 278 of SEQ ID NO: 1562782
ucagcuauuuccgccauau

SEQ ID NO: 1772416 - RNA, 19 nt, Artificial Sequence
  Description of Artificial Sequence: Synthetic oligonucleotide
  Antisense strand to SEQ ID NO: 1772415
auauggcggaaauagcuga

SEQ ID NO: 1772417 - RNA, 19 nt, Artificial Sequence
  Description of Artificial Sequence: Synthetic oligonucleotide
  Sense strand starting at position 280 of SEQ ID NO: 1562782
agcuauuuccgccauauuc

SEQ ID NO: 1772418 - RNA, 19 nt, Artificial Sequence
  Description of Artificial Sequence: Synthetic oligonucleotide
  Antisense strand to SEQ ID NO: 1772417
gaauauggcggaaauagcu

SEQ ID NO: 1772419 - RNA, 19 nt, Artificial Sequence
  Description of Artificial Sequence: Synthetic oligonucleotide
  Sense strand starting at position 345 of SEQ ID NO: 1562782
aagguaaagugagucuuua

SEQ ID NO: 1772420 - RNA, 19 nt, Artificial Sequence
  Description of Artificial Sequence: Synthetic oligonucleotide
  Antisense strand to SEQ ID NO: 1772419
uaaagacucacuuuaccuu

SEQ ID NO: 1772421 - RNA, 19 nt, Artificial Sequence
  Description of Artificial Sequence: Synthetic oligonucleotide
  Sense strand starting at position 608 of SEQ ID NO: 1562782
cccuccucccagugagaau

SEQ ID NO: 1772422 - RNA, 19 nt, Artificial Sequence
  Description of Artificial Sequence: Synthetic oligonucleotide
  Antisense strand to SEQ ID NO: 1772421
auucucacugggaggaggg

SEQ ID NO: 1772423 - RNA, 19 nt, Artificial Sequence
  Description of Artificial Sequence: Synthetic oligonucleotide
  Sense strand starting at position 666 of SEQ ID NO: 1562782
ugggauaugggucaguuca

SEQ ID NO: 1772424 - RNA, 19 nt, Artificial Sequence
  Description of Artificial Sequence: Synthetic oligonucleotide
  Antisense strand to SEQ ID NO: 1772423
ugaacugacccauauccca

SEQ ID NO: 1772425 - RNA, 19 nt, Artificial Sequence
  Description of Artificial Sequence: Synthetic oligonucleotide
  Sense strand starting at position 668 of SEQ ID NO: 1562782
ggauaugggucaguucagu

SEQ ID NO: 1772426 - RNA, 19 nt, Artificial Sequence
  Description of Artificial Sequence: Synthetic oligonucleotide
  Antisense strand to SEQ ID NO: 1772425
acugaacugacccauaucc

SEQ ID NO: 1772427 - RNA, 19 nt, Artificial Sequence
  Description of Artificial Sequence: Synthetic oligonucleotide
  Sense strand starting at position 674 of SEQ ID NO: 1562782
gggucaguucaguggccaa

SEQ ID NO: 1772428 - RNA, 19 nt, Artificial Sequence
  Description of Artificial Sequence: Synthetic oligonucleotide
  Antisense strand to SEQ ID NO: 1772427
uuggccacugaacugaccc

SEQ ID NO: 1772429 - RNA, 19 nt, Artificial Sequence
  Description of Artificial Sequence: Synthetic oligonucleotide
  Sense strand starting at position 1128 of SEQ ID NO: 1562782
ggacauuuggcagguugca

SEQ ID NO: 1772430 - RNA, 19 nt, Artificial Sequence
  Description of Artificial Sequence: Synthetic oligonucleotide
  Antisense strand to SEQ ID NO: 1772429
ugcaaccugccaaaugucc

SEQ ID NO: 1772431 - RNA, 19 nt, Artificial Sequence
  Description of Artificial Sequence: Synthetic oligonucleotide
  Sense strand starting at position 1149 of SEQ ID NO: 1562782
ggaaguucucccugcggga

SEQ ID NO: 1772432 - RNA, 19 nt, Artificial Sequence
  Description of Artificial Sequence: Synthetic oligonucleotide
  Antisense strand to SEQ ID NO: 1772431
ucccgcagggagaacuucc

SEQ ID NO: 1772433 - RNA, 19 nt, Artificial Sequence
  Description of Artificial Sequence: Synthetic oligonucleotide
  Sense strand starting at position 1245 of SEQ ID NO: 1562782
cugugucuaucacugugaa

SEQ ID NO: 1772434 - RNA, 19 nt, Artificial Sequence
  Description of Artificial Sequence: Synthetic oligonucleotide
  Antisense strand to SEQ ID NO: 1772433
uucacagugauagacacag

SEQ ID NO: 1772435 - RNA, 19 nt, Artificial Sequence
  Description of Artificial Sequence: Synthetic oligonucleotide
  Sense strand starting at position 1246 of SEQ ID NO: 1562782
ugugucuaucacugugaac

SEQ ID NO: 1772436 - RNA, 19 nt, Artificial Sequence
  Description of Artificial Sequence: Synthetic oligonucleotide
  Antisense strand to SEQ ID NO: 1772435
guucacagugauagacaca

SEQ ID NO: 1772437 - RNA, 19 nt, Artificial Sequence
  Description of Artificial Sequence: Synthetic oligonucleotide
  Sense strand starting at position 1248 of SEQ ID NO: 1562782
ugucuaucacugugaacgu

SEQ ID NO: 1772438 - RNA, 19 nt, Artificial Sequence
  Description of Artificial Sequence: Synthetic oligonucleotide
  Antisense strand to SEQ ID NO: 1772437
acguucacagugauagaca

SEQ ID NO: 1772439 - RNA, 19 nt, Artificial Sequence
  Description of Artificial Sequence: Synthetic oligonucleotide
  Sense strand starting at position 1306 of SEQ ID NO: 1562782
ggucguguggcgccaagua

SEQ ID NO: 1772440 - RNA, 19 nt, Artificial Sequence
  Description of Artificial Sequence: Synthetic oligonucleotide
  Antisense strand to SEQ ID NO: 1772439
uacuuggcgccacacgacc

SEQ ID NO: 1772441 - RNA, 19 nt, Artificial Sequence
  Description of Artificial Sequence: Synthetic oligonucleotide
  Sense strand starting at position 1342 of SEQ ID NO: 1562782
aagugagauuucguucuuc

SEQ ID NO: 1772442 - RNA, 19 nt, Artificial Sequence
  Description of Artificial Sequence: Synthetic oligonucleotide
  Antisense strand to SEQ ID NO: 1772441
gaagaacgaaaucucacuu

SEQ ID NO: 1772443 - RNA, 19 nt, Artificial Sequence
  Description of Artificial Sequence: Synthetic oligonucleotide
  Sense strand starting at position 3106 of SEQ ID NO: 1562782
cucguacucucccaaagua

SEQ ID NO: 1772444 - RNA, 19 nt, Artificial Sequence
  Description of Artificial Sequence: Synthetic oligonucleotide
  Antisense strand to SEQ ID NO: 1772443
uacuuugggagaguacgag

SEQ ID NO: 1772445 - RNA, 19 nt, Artificial Sequence
  Description of Artificial Sequence: Synthetic oligonucleotide
  Sense strand starting at position 3642 of SEQ ID NO: 1562782
ccucgaggaugucagcaua

SEQ ID NO: 1772446 - RNA, 19 nt, Artificial Sequence
  Description of Artificial Sequence: Synthetic oligonucleotide
  Antisense strand to SEQ ID NO: 1772445
uaugcugacauccucgagg

SEQ ID NO: 1772447 - RNA, 19 nt, Artificial Sequence
  Description of Artificial Sequence: Synthetic oligonucleotide
  Sense strand starting at position 3645 of SEQ ID NO: 1562782
cgaggaugucagcauaaga

SEQ ID NO: 1772448 - RNA, 19 nt, Artificial Sequence
  Description of Artificial Sequence: Synthetic oligonucleotide
  Antisense strand to SEQ ID NO: 1772447
ucuuaugcugacauccucg

SEQ ID NO: 1772449 - RNA, 19 nt, Artificial Sequence
  Description of Artificial Sequence: Synthetic oligonucleotide
  Sense strand starting at position 3703 of SEQ ID NO: 1562782
gugggcucucccuacucaa

SEQ ID NO: 1772450 - RNA, 19 nt, Artificial Sequence
  Description of Artificial Sequence: Synthetic oligonucleotide
  Antisense strand to SEQ ID NO: 1772449
uugaguagggagagcccac

SEQ ID NO: 1772451 - RNA, 19 nt, Artificial Sequence
  Description of Artificial Sequence: Synthetic oligonucleotide
  Sense strand starting at position 3734 of SEQ ID NO: 1562782
ccaacuccucaguguggua

SEQ ID NO: 1772452 - RNA, 19 nt, Artificial Sequence
  Description of Artificial Sequence: Synthetic oligonucleotide
  Antisense strand to SEQ ID NO: 1772451
uaccacacugaggaguugg

SEQ ID NO: 1772453 - RNA, 19 nt, Artificial Sequence
  Description of Artificial Sequence: Synthetic oligonucleotide
  Sense strand starting at position 3736 of SEQ ID NO: 1562782
aacuccucagugugguaua

SEQ ID NO: 1772454 - RNA, 19 nt, Artificial Sequence
  Description of Artificial Sequence: Synthetic oligonucleotide
  Antisense strand to SEQ ID NO: 1772453
uauaccacacugaggaguu

SEQ ID NO: 1772455 - RNA, 19 nt, Artificial Sequence
  Description of Artificial Sequence: Synthetic oligonucleotide
  Sense strand starting at position 3940 of SEQ ID NO: 1562782
agugccacuuccuugagaa

SEQ ID NO: 1772456 - RNA, 19 nt, Artificial Sequence
  Description of Artificial Sequence: Synthetic oligonucleotide
  Antisense strand to SEQ ID NO: 1772455
uucucaaggaaguggcacu

SEQ ID NO: 1772457 - RNA, 19 nt, Artificial Sequence
  Description of Artificial Sequence: Synthetic oligonucleotide
  Sense strand starting at position 3941 of SEQ ID NO: 1562782
gugccacuuccuugagaag

SEQ ID NO: 1772458 - RNA, 19 nt, Artificial Sequence
  Description of Artificial Sequence: Synthetic oligonucleotide
  Antisense strand to SEQ ID NO: 1772457
cuucucaaggaaguggcac

SEQ ID NO: 1772459 - RNA, 19 nt, Artificial Sequence
  Description of Artificial Sequence: Synthetic oligonucleotide
  Sense strand starting at position 44 of SEQ ID NO: 1562783
ggcugccagacuuagugaa

SEQ ID NO: 1772460 - RNA, 19 nt, Artificial Sequence
  Description of Artificial Sequence: Synthetic oligonucleotide
  Antisense strand to SEQ ID NO: 1772459
uucacuaagucuggcagcc

SEQ ID NO: 1772461 - RNA, 19 nt, Artificial Sequence
  Description of Artificial Sequence: Synthetic oligonucleotide
  Sense strand starting at position 46 of SEQ ID NO: 1562783
cugccagacuuagugaaca

SEQ ID NO: 1772462 - RNA, 19 nt, Artificial Sequence
  Description of Artificial Sequence: Synthetic oligonucleotide
  Antisense strand to SEQ ID NO: 1772461
uguucacuaagucuggcag

SEQ ID NO: 1772463 - RNA, 19 nt, Artificial Sequence
  Description of Artificial Sequence: Synthetic oligonucleotide
  Sense strand starting at position 48 of SEQ ID NO: 1562783
gccagacuuagugaacagu

SEQ ID NO: 1772464 - RNA, 19 nt, Artificial Sequence
  Description of Artificial Sequence: Synthetic oligonucleotide
  Antisense strand to SEQ ID NO: 1772463
acuguucacuaagucuggc

SEQ ID NO: 1772465 - RNA, 19 nt, Artificial Sequence
  Description of Artificial Sequence: Synthetic oligonucleotide
  Sense strand starting at position 99 of SEQ ID NO: 1562783
ggcagaauuugagauacug

SEQ ID NO: 1772466 - RNA, 19 nt, Artificial Sequence
  Description of Artificial Sequence: Synthetic oligonucleotide
  Antisense strand to SEQ ID NO: 1772465
caguaucucaaauucugcc

SEQ ID NO: 1772467 - RNA, 19 nt, Artificial Sequence
  Description of Artificial Sequence: Synthetic oligonucleotide
  Sense strand starting at position 371 of SEQ ID NO: 1562783
caggcagaugcuugggaau

SEQ ID NO: 1772468 - RNA, 19 nt, Artificial Sequence
  Description of Artificial Sequence: Synthetic oligonucleotide
  Antisense strand to SEQ ID NO: 1772467
auucccaagcaucugccug

SEQ ID NO: 1772469 - RNA, 19 nt, Artificial Sequence
  Description of Artificial Sequence: Synthetic oligonucleotide
  Sense strand starting at position 629 of SEQ ID NO: 1562783
ggucucauccuauggaggu

SEQ ID NO: 1772470 - RNA, 19 nt, Artificial Sequence
  Description of Artificial Sequence: Synthetic oligonucleotide
  Antisense strand to SEQ ID NO: 1772469
accuccauaggaugagacc

SEQ ID NO: 1772471 - RNA, 19 nt, Artificial Sequence
  Description of Artificial Sequence: Synthetic oligonucleotide
  Sense strand starting at position 647 of SEQ ID NO: 1562783
ugagggaugcucggugaga

SEQ ID NO: 1772472 - RNA, 19 nt, Artificial Sequence
  Description of Artificial Sequence: Synthetic oligonucleotide
  Antisense strand to SEQ ID NO: 1772471
ucucaccgagcaucccuca

SEQ ID NO: 1772473 - RNA, 19 nt, Artificial Sequence
  Description of Artificial Sequence: Synthetic oligonucleotide
  Sense strand starting at position 648 of SEQ ID NO: 1562783
gagggaugcucggugagag

SEQ ID NO: 1772474 - RNA, 19 nt, Artificial Sequence
  Description of Artificial Sequence: Synthetic oligonucleotide
  Antisense strand to SEQ ID NO: 1772473
cucucaccgagcaucccuc

SEQ ID NO: 1772475 - RNA, 19 nt, Artificial Sequence
  Description of Artificial Sequence: Synthetic oligonucleotide
  Sense strand starting at position 649 of SEQ ID NO: 1562783
agggaugcucggugagaga

SEQ ID NO: 1772476 - RNA, 19 nt, Artificial Sequence
  Description of Artificial Sequence: Synthetic oligonucleotide
  Antisense strand to SEQ ID NO: 1772475
ucucucaccgagcaucccu

SEQ ID NO: 1772477 - RNA, 19 nt, Artificial Sequence
  Description of Artificial Sequence: Synthetic oligonucleotide
  Sense strand starting at position 650 of SEQ ID NO: 1562783
gggaugcucggugagagaa

SEQ ID NO: 1772478 - RNA, 19 nt, Artificial Sequence
  Description of Artificial Sequence: Synthetic oligonucleotide
  Antisense strand to SEQ ID NO: 1772477
uucucucaccgagcauccc

SEQ ID NO: 1772479 - RNA, 19 nt, Artificial Sequence
  Description of Artificial Sequence: Synthetic oligonucleotide
  Sense strand starting at position 730 of SEQ ID NO: 1562783
gagcucuucccuggaugga

SEQ ID NO: 1772480 - RNA, 19 nt, Artificial Sequence
  Description of Artificial Sequence: Synthetic oligonucleotide
  Antisense strand to SEQ ID NO: 1772479
uccauccagggaagagcuc

SEQ ID NO: 1772481 - RNA, 19 nt, Artificial Sequence
  Description of Artificial Sequence: Synthetic oligonucleotide
  Sense strand starting at position 779 of SEQ ID NO: 1562783
gucagauggaccugaguuc

SEQ ID NO: 1772482 - RNA, 19 nt, Artificial Sequence
  Description of Artificial Sequence: Synthetic oligonucleotide
  Antisense strand to SEQ ID NO: 1772481
gaacucagguccaucugac

SEQ ID NO: 1772483 - RNA, 19 nt, Artificial Sequence
  Description of Artificial Sequence: Synthetic oligonucleotide
  Sense strand starting at position 805 of SEQ ID NO: 1562783
gcuucugacucuuccugaa

SEQ ID NO: 1772484 - RNA, 19 nt, Artificial Sequence
  Description of Artificial Sequence: Synthetic oligonucleotide
  Antisense strand to SEQ ID NO: 1772483
uucaggaagagucagaagc

SEQ ID NO: 1772485 - RNA, 19 nt, Artificial Sequence
  Description of Artificial Sequence: Synthetic oligonucleotide
  Sense strand starting at position 807 of SEQ ID NO: 1562783
uucugacucuuccugaaug

SEQ ID NO: 1772486 - RNA, 19 nt, Artificial Sequence
  Description of Artificial Sequence: Synthetic oligonucleotide
  Antisense strand to SEQ ID NO: 1772485
cauucaggaagagucagaa

SEQ ID NO: 1772487 - RNA, 19 nt, Artificial Sequence
  Description of Artificial Sequence: Synthetic oligonucleotide
  Sense strand starting at position 812 of SEQ ID NO: 1562783
acucuuccugaauguguga

SEQ ID NO: 1772488 - RNA, 19 nt, Artificial Sequence
  Description of Artificial Sequence: Synthetic oligonucleotide
  Antisense strand to SEQ ID NO: 1772487
ucacacauucaggaagagu

SEQ ID NO: 1772489 - RNA, 19 nt, Artificial Sequence
  Description of Artificial Sequence: Synthetic oligonucleotide
  Sense strand starting at position 827 of SEQ ID NO: 1562783
gugaccuuaggcuaaugau

SEQ ID NO: 1772490 - RNA, 19 nt, Artificial Sequence
  Description of Artificial Sequence: Synthetic oligonucleotide
  Antisense strand to SEQ ID NO: 1772489
aucauuagccuaaggucac

SEQ ID NO: 1772491 - RNA, 19 nt, Artificial Sequence
  Description of Artificial Sequence: Synthetic oligonucleotide
  Sense strand starting at position 907 of SEQ ID NO: 1562783
gaggaugucugaguggcaa

SEQ ID NO: 1772492 - RNA, 19 nt, Artificial Sequence
  Description of Artificial Sequence: Synthetic oligonucleotide
  Antisense strand to SEQ ID NO: 1772491
uugccacucagacauccuc

SEQ ID NO: 1772493 - RNA, 19 nt, Artificial Sequence
  Description of Artificial Sequence: Synthetic oligonucleotide
  Sense strand starting at position 909 of SEQ ID NO: 1562783
ggaugucugaguggcaacu

SEQ ID NO: 1772494 - RNA, 19 nt, Artificial Sequence
  Description of Artificial Sequence: Synthetic oligonucleotide
  Antisense strand to SEQ ID NO: 1772493
aguugccacucagacaucc

SEQ ID NO: 1772495 - RNA, 19 nt, Artificial Sequence
  Description of Artificial Sequence: Synthetic oligonucleotide
  Sense strand starting at position 933 of SEQ ID NO: 1562783
agcacagggcucgaagaau

SEQ ID NO: 1772496 - RNA, 19 nt, Artificial Sequence
  Description of Artificial Sequence: Synthetic oligonucleotide
  Antisense strand to SEQ ID NO: 1772495
auucuucgagcccugugcu

SEQ ID NO: 1772497 - RNA, 19 nt, Artificial Sequence
  Description of Artificial Sequence: Synthetic oligonucleotide
  Sense strand starting at position 944 of SEQ ID NO: 1562783
cgaagaaugucccucugag

SEQ ID NO: 1772498 - RNA, 19 nt, Artificial Sequence
  Description of Artificial Sequence: Synthetic oligonucleotide
  Antisense strand to SEQ ID NO: 1772497
cucagagggacauucuucg

SEQ ID NO: 1772499 - RNA, 19 nt, Artificial Sequence
  Description of Artificial Sequence: Synthetic oligonucleotide
  Sense strand starting at position 1042 of SEQ ID NO: 1562783
gucacuaucucacuggaca

SEQ ID NO: 1772500 - RNA, 19 nt, Artificial Sequence
  Description of Artificial Sequence: Synthetic oligonucleotide
  Antisense strand to SEQ ID NO: 1772499
uguccagugagauagugac

SEQ ID NO: 1772501 - RNA, 19 nt, Artificial Sequence
  Description of Artificial Sequence: Synthetic oligonucleotide
  Sense strand starting at position 1094 of SEQ ID NO: 1562783
ugcgacucuacagagagau

SEQ ID NO: 1772502 - RNA, 19 nt, Artificial Sequence
  Description of Artificial Sequence: Synthetic oligonucleotide
  Antisense strand to SEQ ID NO: 1772501
aucucucuguagagucgca

SEQ ID NO: 1772503 - RNA, 19 nt, Artificial Sequence
  Description of Artificial Sequence: Synthetic oligonucleotide
  Sense strand starting at position 1213 of SEQ ID NO: 1562783
ucguguuacagaugaggaa

SEQ ID NO: 1772504 - RNA, 19 nt, Artificial Sequence
  Description of Artificial Sequence: Synthetic oligonucleotide
  Antisense strand to SEQ ID NO: 1772503
uuccucaucuguaacacga

SEQ ID NO: 1772505 - RNA, 19 nt, Artificial Sequence
  Description of Artificial Sequence: Synthetic oligonucleotide
  Sense strand starting at position 1297 of SEQ ID NO: 1562783
cagggugggugcucagaaa

SEQ ID NO: 1772506 - RNA, 19 nt, Artificial Sequence
  Description of Artificial Sequence: Synthetic oligonucleotide
  Antisense strand to SEQ ID NO: 1772505
uuucugagcacccacccug

SEQ ID NO: 1772507 - RNA, 19 nt, Artificial Sequence
  Description of Artificial Sequence: Synthetic oligonucleotide
  Sense strand starting at position 1663 of SEQ ID NO: 1562783
ccuccaguuccucggaaau

SEQ ID NO: 1772508 - RNA, 19 nt, Artificial Sequence
  Description of Artificial Sequence: Synthetic oligonucleotide
  Antisense strand to SEQ ID NO: 1772507
auuuccgaggaacuggagg

SEQ ID NO: 1772509 - RNA, 19 nt, Artificial Sequence
  Description of Artificial Sequence: Synthetic oligonucleotide
  Sense strand starting at position 2365 of SEQ ID NO: 1562783
cccgcauguguuucgucau

SEQ ID NO: 1772510 - RNA, 19 nt, Artificial Sequence
  Description of Artificial Sequence: Synthetic oligonucleotide
  Antisense strand to SEQ ID NO: 1772509
augacgaaacacaugcggg

SEQ ID NO: 1772511 - RNA, 19 nt, Artificial Sequence
  Description of Artificial Sequence: Synthetic oligonucleotide
  Sense strand starting at position 2439 of SEQ ID NO: 1562783
gguucuuucccucaccuga

SEQ ID NO: 1772512 - RNA, 19 nt, Artificial Sequence
  Description of Artificial Sequence: Synthetic oligonucleotide
  Antisense strand to SEQ ID NO: 1772511
ucaggugagggaaagaacc

SEQ ID NO: 1772513 - RNA, 19 nt, Artificial Sequence
  Description of Artificial Sequence: Synthetic oligonucleotide
  Sense strand starting at position 2450 of SEQ ID NO: 1562783
ucaccugaguucuuggaga

SEQ ID NO: 1772514 - RNA, 19 nt, Artificial Sequence
  Description of Artificial Sequence: Synthetic oligonucleotide
  Antisense strand to SEQ ID NO: 1772513
ucuccaagaacucagguga

SEQ ID NO: 1772515 - RNA, 19 nt, Artificial Sequence
  Description of Artificial Sequence: Synthetic oligonucleotide
  Sense strand starting at position 2452 of SEQ ID NO: 1562783
accugaguucuuggagaac

SEQ ID NO: 1772516 - RNA, 19 nt, Artificial Sequence
  Description of Artificial Sequence: Synthetic oligonucleotide
  Antisense strand to SEQ ID NO: 1772515
guucuccaagaacucaggu

SEQ ID NO: 1772517 - RNA, 19 nt, Artificial Sequence
  Description of Artificial Sequence: Synthetic oligonucleotide
  Sense strand starting at position 2458 of SEQ ID NO: 1562783
guucuuggagaacgacaua

SEQ ID NO: 1772518 - RNA, 19 nt, Artificial Sequence
  Description of Artificial Sequence: Synthetic oligonucleotide
  Antisense strand to SEQ ID NO: 1772517
uaugucguucuccaagaac

SEQ ID NO: 1772519 - RNA, 19 nt, Artificial Sequence
  Description of Artificial Sequence: Synthetic oligonucleotide
  Sense strand starting at position 2500 of SEQ ID NO: 1562783
accuguaugccagacacuu

SEQ ID NO: 1772520 - RNA, 19 nt, Artificial Sequence
  Description of Artificial Sequence: Synthetic oligonucleotide
  Antisense strand to SEQ ID NO: 1772519
aagugucuggcauacaggu

SEQ ID NO: 1772521 - RNA, 19 nt, Artificial Sequence
  Description of Artificial Sequence: Synthetic oligonucleotide
  Sense strand starting at position 2511 of SEQ ID NO: 1562783
agacacuuuguguauaugu

SEQ ID NO: 1772522 - RNA, 19 nt, Artificial Sequence
  Description of Artificial Sequence: Synthetic oligonucleotide
  Antisense strand to SEQ ID NO: 1772521
acauauacacaaagugucu

SEQ ID NO: 1772523 - RNA, 19 nt, Artificial Sequence
  Description of Artificial Sequence: Synthetic oligonucleotide
  Sense strand starting at position 2699 of SEQ ID NO: 1562783
gggaaagacuucuaaggag

SEQ ID NO: 1772524 - RNA, 19 nt, Artificial Sequence
  Description of Artificial Sequence: Synthetic oligonucleotide
  Antisense strand to SEQ ID NO: 1772523
cuccuuagaagucuuuccc

SEQ ID NO: 1772525 - RNA, 19 nt, Artificial Sequence
  Description of Artificial Sequence: Synthetic oligonucleotide
  Sense strand starting at position 3094 of SEQ ID NO: 1562783
gggagaaguuucccuguua

SEQ ID NO: 1772526 - RNA, 19 nt, Artificial Sequence
  Description of Artificial Sequence: Synthetic oligonucleotide
  Antisense strand to SEQ ID NO: 1772525
uaacagggaaacuucuccc

SEQ ID NO: 1772527 - RNA, 19 nt, Artificial Sequence
  Description of Artificial Sequence: Synthetic oligonucleotide
  Sense strand starting at position 3095 of SEQ ID NO: 1562783
ggagaaguuucccuguuac

SEQ ID NO: 1772528 - RNA, 19 nt, Artificial Sequence
  Description of Artificial Sequence: Synthetic oligonucleotide
  Antisense strand to SEQ ID NO: 1772527
guaacagggaaacuucucc

SEQ ID NO: 1772529 - RNA, 19 nt, Artificial Sequence
  Description of Artificial Sequence: Synthetic oligonucleotide
  Sense strand starting at position 3214 of SEQ ID NO: 1562783
ugagcaacuuccucucuga

SEQ ID NO: 1772530 - RNA, 19 nt, Artificial Sequence
  Description of Artificial Sequence: Synthetic oligonucleotide
  Antisense strand to SEQ ID NO: 1772529
ucagagaggaaguugcuca

SEQ ID NO: 1772531 - RNA, 19 nt, Artificial Sequence
  Description of Artificial Sequence: Synthetic oligonucleotide
  Sense strand starting at position 3217 of SEQ ID NO: 1562783
gcaacuuccucucugagau

SEQ ID NO: 1772532 - RNA, 19 nt, Artificial Sequence
  Description of Artificial Sequence: Synthetic oligonucleotide
  Antisense strand to SEQ ID NO: 1772531
aucucagagaggaaguugc

SEQ ID NO: 1772533 - RNA, 19 nt, Artificial Sequence
  Description of Artificial Sequence: Synthetic oligonucleotide
  Sense strand starting at position 3231 of SEQ ID NO: 1562783
gagauuggcuuucucucuu

SEQ ID NO: 1772534 - RNA, 19 nt, Artificial Sequence
  Description of Artificial Sequence: Synthetic oligonucleotide
  Antisense strand to SEQ ID NO: 1772533
aagagagaaagccaaucuc

SEQ ID NO: 1772535 - RNA, 19 nt, Artificial Sequence
  Description of Artificial Sequence: Synthetic oligonucleotide
  Sense strand starting at position 3281 of SEQ ID NO: 1562783
agagcauugcugugaagau

SEQ ID NO: 1772536 - RNA, 19 nt, Artificial Sequence
  Description of Artificial Sequence: Synthetic oligonucleotide
  Antisense strand to SEQ ID NO: 1772535
aucuucacagcaaugcucu

SEQ ID NO: 1772537 - RNA, 19 nt, Artificial Sequence
  Description of Artificial Sequence: Synthetic oligonucleotide
  Sense strand starting at position 3291 of SEQ ID NO: 1562783
ugugaagauuaaguuauga

SEQ ID NO: 1772538 - RNA, 19 nt, Artificial Sequence
  Description of Artificial Sequence: Synthetic oligonucleotide
  Antisense strand to SEQ ID NO: 1772537
ucauaacuuaaucuucaca

SEQ ID NO: 1772539 - RNA, 19 nt, Artificial Sequence
  Description of Artificial Sequence: Synthetic oligonucleotide
  Sense strand starting at position 397 of SEQ ID NO: 1562784
ggaagagguuggagcugau

SEQ ID NO: 1772540 - RNA, 19 nt, Artificial Sequence
  Description of Artificial Sequence: Synthetic oligonucleotide
  Antisense strand to SEQ ID NO: 1772539
aucagcuccaaccucuucc

SEQ ID NO: 1772541 - RNA, 19 nt, Artificial Sequence
  Description of Artificial Sequence: Synthetic oligonucleotide
  Sense strand starting at position 501 of SEQ ID NO: 1562784
guaccugucucuccagaga

SEQ ID NO: 1772542 - RNA, 19 nt, Artificial Sequence
  Description of Artificial Sequence: Synthetic oligonucleotide
  Antisense strand to SEQ ID NO: 1772541
ucucuggagagacagguac

SEQ ID NO: 1772543 - RNA, 19 nt, Artificial Sequence
  Description of Artificial Sequence: Synthetic oligonucleotide
  Sense strand starting at position 769 of SEQ ID NO: 1562784
ggacucaucucccuccaga

SEQ ID NO: 1772544 - RNA, 19 nt, Artificial Sequence
  Description of Artificial Sequence: Synthetic oligonucleotide
  Antisense strand to SEQ ID NO: 1772543
ucuggagggagaugagucc

SEQ ID NO: 1772545 - RNA, 19 nt, Artificial Sequence
  Description of Artificial Sequence: Synthetic oligonucleotide
  Sense strand starting at position 1357 of SEQ ID NO: 1562784
uugagaaucgugggccguu

SEQ ID NO: 1772546 - RNA, 19 nt, Artificial Sequence
  Description of Artificial Sequence: Synthetic oligonucleotide
  Antisense strand to SEQ ID NO: 1772545
aacggcccacgauucucaa

SEQ ID NO: 1772547 - RNA, 19 nt, Artificial Sequence
  Description of Artificial Sequence: Synthetic oligonucleotide
  Sense strand starting at position 1369 of SEQ ID NO: 1562784
ggccguuccugagugcaua

SEQ ID NO: 1772548 - RNA, 19 nt, Artificial Sequence
  Description of Artificial Sequence: Synthetic oligonucleotide
  Antisense strand to SEQ ID NO: 1772547
uaugcacucaggaacggcc

SEQ ID NO: 1772549 - RNA, 19 nt, Artificial Sequence
  Description of Artificial Sequence: Synthetic oligonucleotide
  Sense strand starting at position 1370 of SEQ ID NO: 1562784
gccguuccugagugcauau

SEQ ID NO: 1772550 - RNA, 19 nt, Artificial Sequence
  Description of Artificial Sequence: Synthetic oligonucleotide
  Antisense strand to SEQ ID NO: 1772549
auaugcacucaggaacggc

SEQ ID NO: 1772551 - RNA, 19 nt, Artificial Sequence
  Description of Artificial Sequence: Synthetic oligonucleotide
  Sense strand starting at position 1416 of SEQ ID NO: 1562784
aggaacaauggguguaacu

SEQ ID NO: 1772552 - RNA, 19 nt, Artificial Sequence
  Description of Artificial Sequence: Synthetic oligonucleotide
  Antisense strand to SEQ ID NO: 1772551
aguuacacccauuguuccu

SEQ ID NO: 1772553 - RNA, 19 nt, Artificial Sequence
  Description of Artificial Sequence: Synthetic oligonucleotide
  Sense strand starting at position 1449 of SEQ ID NO: 1562784
guugucaccucccuuauaa

SEQ ID NO: 1772554 - RNA, 19 nt, Artificial Sequence
  Description of Artificial Sequence: Synthetic oligonucleotide
  Antisense strand to SEQ ID NO: 1772553
uuauaagggaggugacaac

SEQ ID NO: 1772555 - RNA, 19 nt, Artificial Sequence
  Description of Artificial Sequence: Synthetic oligonucleotide
  Sense strand starting at position 1509 of SEQ ID NO: 1562784
gcgucugugcaggaacaaa

SEQ ID NO: 1772556 - RNA, 19 nt, Artificial Sequence
  Description of Artificial Sequence: Synthetic oligonucleotide
  Antisense strand to SEQ ID NO: 1772555
uuuguuccugcacagacgc

SEQ ID NO: 1772557 - RNA, 19 nt, Artificial Sequence
  Description of Artificial Sequence: Synthetic oligonucleotide
  Sense strand starting at position 1553 of SEQ ID NO: 1562784
ggguccuccuccucugauu

SEQ ID NO: 1772558 - RNA, 19 nt, Artificial Sequence
  Description of Artificial Sequence: Synthetic oligonucleotide
  Antisense strand to SEQ ID NO: 1772557
aaucagaggaggaggaccc

SEQ ID NO: 1772559 - RNA, 19 nt, Artificial Sequence
  Description of Artificial Sequence: Synthetic oligonucleotide
  Sense strand starting at position 1598 of SEQ ID NO: 1562784
aguggagcuccgcaaaguu

SEQ ID NO: 1772560 - RNA, 19 nt, Artificial Sequence
  Description of Artificial Sequence: Synthetic oligonucleotide
  Antisense strand to SEQ ID NO: 1772559
aacuuugcggagcuccacu

SEQ ID NO: 1772561 - RNA, 19 nt, Artificial Sequence
  Description of Artificial Sequence: Synthetic oligonucleotide
  Sense strand starting at position 2207 of SEQ ID NO: 1562784
ugccuucccuccgcagaaa

SEQ ID NO: 1772562 - RNA, 19 nt, Artificial Sequence
  Description of Artificial Sequence: Synthetic oligonucleotide
  Antisense strand to SEQ ID NO: 1772561
uuucugcggagggaaggca

SEQ ID NO: 1772563 - RNA, 19 nt, Artificial Sequence
  Description of Artificial Sequence: Synthetic oligonucleotide
  Sense strand starting at position 2340 of SEQ ID NO: 1562784
ggcgauuccugcuauuguc

SEQ ID NO: 1772564 - RNA, 19 nt, Artificial Sequence
  Description of Artificial Sequence: Synthetic oligonucleotide
  Antisense strand to SEQ ID NO: 1772563
gacaauagcaggaaucgcc

SEQ ID NO: 1772565 - RNA, 19 nt, Artificial Sequence
  Description of Artificial Sequence: Synthetic oligonucleotide
  Sense strand starting at position 2348 of SEQ ID NO: 1562784
cugcuauuguccucaucuu

SEQ ID NO: 1772566 - RNA, 19 nt, Artificial Sequence
  Description of Artificial Sequence: Synthetic oligonucleotide
  Antisense strand to SEQ ID NO: 1772565
aagaugaggacaauagcag

SEQ ID NO: 1772567 - RNA, 19 nt, Artificial Sequence
  Description of Artificial Sequence: Synthetic oligonucleotide
  Sense strand starting at position 2430 of SEQ ID NO: 1562784
cccaccuccgucuguuaau

SEQ ID NO: 1772568 - RNA, 19 nt, Artificial Sequence
  Description of Artificial Sequence: Synthetic oligonucleotide
  Antisense strand to SEQ ID NO: 1772567
auuaacagacggagguggg

SEQ ID NO: 1772569 - RNA, 19 nt, Artificial Sequence
  Description of Artificial Sequence: Synthetic oligonucleotide
  Sense strand starting at position 2431 of SEQ ID NO: 1562784
ccaccuccgucuguuaauu

SEQ ID NO: 1772570 - RNA, 19 nt, Artificial Sequence
  Description of Artificial Sequence: Synthetic oligonucleotide
  Antisense strand to SEQ ID NO: 1772569
aauuaacagacggaggugg

SEQ ID NO: 1772571 - RNA, 19 nt, Artificial Sequence
  Description of Artificial Sequence: Synthetic oligonucleotide
  Sense strand starting at position 2441 of SEQ ID NO: 1562784
cuguuaauuugguugucca

SEQ ID NO: 1772572 - RNA, 19 nt, Artificial Sequence
  Description of Artificial Sequence: Synthetic oligonucleotide
  Antisense strand to SEQ ID NO: 1772571
uggacaaccaaauuaacag

SEQ ID NO: 1772573 - RNA, 19 nt, Artificial Sequence
  Description of Artificial Sequence: Synthetic oligonucleotide
  Sense strand starting at position 2442 of SEQ ID NO: 1562784
uguuaauuugguuguccac

SEQ ID NO: 1772574 - RNA, 19 nt, Artificial Sequence
  Description of Artificial Sequence: Synthetic oligonucleotide
  Antisense strand to SEQ ID NO: 1772573
guggacaaccaaauuaaca

SEQ ID NO: 1772575 - RNA, 19 nt, Artificial Sequence
  Description of Artificial Sequence: Synthetic oligonucleotide
  Sense strand starting at position 2483 of SEQ ID NO: 1562784
gcagguggacaaugguaau

SEQ ID NO: 1772576 - RNA, 19 nt, Artificial Sequence
  Description of Artificial Sequence: Synthetic oligonucleotide
  Antisense strand to SEQ ID NO: 1772575
auuaccauuguccaccugc

SEQ ID NO: 1772577 - RNA, 19 nt, Artificial Sequence
  Description of Artificial Sequence: Synthetic oligonucleotide
  Sense strand starting at position 2674 of SEQ ID NO: 1562784
ugguguuacuaggauguua

SEQ ID NO: 1772578 - RNA, 19 nt, Artificial Sequence
  Description of Artificial Sequence: Synthetic oligonucleotide
  Antisense strand to SEQ ID NO: 1772577
uaacauccuaguaacacca

SEQ ID NO: 1772579 - RNA, 19 nt, Artificial Sequence
  Description of Artificial Sequence: Synthetic oligonucleotide
  Sense strand starting at position 2676 of SEQ ID NO: 1562784
guguuacuaggauguuaaa

SEQ ID NO: 1772580 - RNA, 19 nt, Artificial Sequence
  Description of Artificial Sequence: Synthetic oligonucleotide
  Antisense strand to SEQ ID NO: 1772579
uuuaacauccuaguaacac

SEQ ID NO: 1772581 - RNA, 19 nt, Artificial Sequence
  Description of Artificial Sequence: Synthetic oligonucleotide
  Sense strand starting at position 2822 of SEQ ID NO: 1562784
gauauaagucucugcgucu

SEQ ID NO: 1772582 - RNA, 19 nt, Artificial Sequence
  Description of Artificial Sequence: Synthetic oligonucleotide
  Antisense strand to SEQ ID NO: 1772581
agacgcagagacuuauauc

SEQ ID NO: 1772583 - RNA, 19 nt, Artificial Sequence
  Description of Artificial Sequence: Synthetic oligonucleotide
  Sense strand starting at position 2825 of SEQ ID NO: 1562784
auaagucucugcgucugaa

SEQ ID NO: 1772584 - RNA, 19 nt, Artificial Sequence
  Description of Artificial Sequence: Synthetic oligonucleotide
  Antisense strand to SEQ ID NO: 1772583
uucagacgcagagacuuau

SEQ ID NO: 1772585 - RNA, 19 nt, Artificial Sequence
  Description of Artificial Sequence: Synthetic oligonucleotide
  Sense strand starting at position 2828 of SEQ ID NO: 1562784
agucucugcgucugaaaga

SEQ ID NO: 1772586 - RNA, 19 nt, Artificial Sequence
  Description of Artificial Sequence: Synthetic oligonucleotide
  Antisense strand to SEQ ID NO: 1772585
ucuuucagacgcagagacu

SEQ ID NO: 1772587 - RNA, 19 nt, Artificial Sequence
  Description of Artificial Sequence: Synthetic oligonucleotide
  Sense strand starting at position 3606 of SEQ ID NO: 1562784
ccaggcauucccgggugaa

SEQ ID NO: 1772588 - RNA, 19 nt, Artificial Sequence
  Description of Artificial Sequence: Synthetic oligonucleotide
  Antisense strand to SEQ ID NO: 1772587
uucacccgggaaugccugg

SEQ ID NO: 1772589 - RNA, 19 nt, Artificial Sequence
  Description of Artificial Sequence: Synthetic oligonucleotide
  Sense strand starting at position 3607 of SEQ ID NO: 1562784
caggcauucccgggugaau

SEQ ID NO: 1772590 - RNA, 19 nt, Artificial Sequence
  Description of Artificial Sequence: Synthetic oligonucleotide
  Antisense strand to SEQ ID NO: 1772589
auucacccgggaaugccug

SEQ ID NO: 1772591 - RNA, 19 nt, Artificial Sequence
  Description of Artificial Sequence: Synthetic oligonucleotide
  Sense strand starting at position 3609 of SEQ ID NO: 1562784
ggcauucccgggugaauca

SEQ ID NO: 1772592 - RNA, 19 nt, Artificial Sequence
  Description of Artificial Sequence: Synthetic oligonucleotide
  Antisense strand to SEQ ID NO: 1772591
ugauucacccgggaaugcc

SEQ ID NO: 1772593 - RNA, 19 nt, Artificial Sequence
  Description of Artificial Sequence: Synthetic oligonucleotide
  Sense strand starting at position 3630 of SEQ ID NO: 1562784
cuccgaugugcacacgaau

SEQ ID NO: 1772594 - RNA, 19 nt, Artificial Sequence
  Description of Artificial Sequence: Synthetic oligonucleotide
  Antisense strand to SEQ ID NO: 1772593
auucgugugcacaucggag

SEQ ID NO: 1772595 - RNA, 19 nt, Artificial Sequence
  Description of Artificial Sequence: Synthetic oligonucleotide
  Sense strand starting at position 3657 of SEQ ID NO: 1562784
gaucguguuuaacuguaaa

SEQ ID NO: 1772596 - RNA, 19 nt, Artificial Sequence
  Description of Artificial Sequence: Synthetic oligonucleotide
  Antisense strand to SEQ ID NO: 1772595
uuuacaguuaaacacgauc

SEQ ID NO: 1772597 - RNA, 19 nt, Artificial Sequence
  Description of Artificial Sequence: Synthetic oligonucleotide
  Sense strand starting at position 3660 of SEQ ID NO: 1562784
cguguuuaacuguaaaguu

SEQ ID NO: 1772598 - RNA, 19 nt, Artificial Sequence
  Description of Artificial Sequence: Synthetic oligonucleotide
  Antisense strand to SEQ ID NO: 1772597
aacuuuacaguuaaacacg

SEQ ID NO: 1772599 - RNA, 19 nt, Artificial Sequence
  Description of Artificial Sequence: Synthetic oligonucleotide
  Sense strand starting at position 3763 of SEQ ID NO: 1562784
uaaauaacuugcuugaggu

SEQ ID NO: 1772600 - RNA, 19 nt, Artificial Sequence
  Description of Artificial Sequence: Synthetic oligonucleotide
  Antisense strand to SEQ ID NO: 1772599
accucaagcaaguuauuua

SEQ ID NO: 1772601 - RNA, 19 nt, Artificial Sequence
  Description of Artificial Sequence: Synthetic oligonucleotide
  Sense strand starting at position 3764 of SEQ ID NO: 1562784
aaauaacuugcuugagguc

SEQ ID NO: 1772602 - RNA, 19 nt, Artificial Sequence
  Description of Artificial Sequence: Synthetic oligonucleotide
  Antisense strand to SEQ ID NO: 1772601
gaccucaagcaaguuauuu

SEQ ID NO: 1772603 - RNA, 19 nt, Artificial Sequence
  Description of Artificial Sequence: Synthetic oligonucleotide
  Sense strand starting at position 3822 of SEQ ID NO: 1562784
cacggucuaccaugaaauc

SEQ ID NO: 1772604 - RNA, 19 nt, Artificial Sequence
  Description of Artificial Sequence: Synthetic oligonucleotide
  Antisense strand to SEQ ID NO: 1772603
gauuucaugguagaccgug

SEQ ID NO: 1772605 - RNA, 19 nt, Artificial Sequence
  Description of Artificial Sequence: Synthetic oligonucleotide
  Sense strand starting at position 3823 of SEQ ID NO: 1562784
acggucuaccaugaaauca

SEQ ID NO: 1772606 - RNA, 19 nt, Artificial Sequence
  Description of Artificial Sequence: Synthetic oligonucleotide
  Antisense strand to SEQ ID NO: 1772605
ugauuucaugguagaccgu

SEQ ID NO: 1772607 - RNA, 19 nt, Artificial Sequence
  Description of Artificial Sequence: Synthetic oligonucleotide
  Sense strand starting at position 3909 of SEQ ID NO: 1562784
gguggacgcucauuuguca

SEQ ID NO: 1772608 - RNA, 19 nt, Artificial Sequence
  Description of Artificial Sequence: Synthetic oligonucleotide
  Antisense strand to SEQ ID NO: 1772607
ugacaaaugagcguccacc

SEQ ID NO: 1772609 - RNA, 19 nt, Artificial Sequence
  Description of Artificial Sequence: Synthetic oligonucleotide
  Sense strand starting at position 3914 of SEQ ID NO: 1562784
acgcucauuugucagagac

SEQ ID NO: 1772610 - RNA, 19 nt, Artificial Sequence
  Description of Artificial Sequence: Synthetic oligonucleotide
  Antisense strand to SEQ ID NO: 1772609
gucucugacaaaugagcgu

SEQ ID NO: 1772611 - RNA, 19 nt, Artificial Sequence
  Description of Artificial Sequence: Synthetic oligonucleotide
  Sense strand starting at position 3916 of SEQ ID NO: 1562784
gcucauuugucagagacuc

SEQ ID NO: 1772612 - RNA, 19 nt, Artificial Sequence
  Description of Artificial Sequence: Synthetic oligonucleotide
  Antisense strand to SEQ ID NO: 1772611
gagucucugacaaaugagc

SEQ ID NO: 1772613 - RNA, 19 nt, Artificial Sequence
  Description of Artificial Sequence: Synthetic oligonucleotide
  Sense strand starting at position 148 of SEQ ID NO: 1562785
caucgcugauauggagaua

SEQ ID NO: 1772614 - RNA, 19 nt, Artificial Sequence
  Description of Artificial Sequence: Synthetic oligonucleotide
  Antisense strand to SEQ ID NO: 1772613
uaucuccauaucagcgaug

SEQ ID NO: 1772615 - RNA, 19 nt, Artificial Sequence
  Description of Artificial Sequence: Synthetic oligonucleotide
  Sense strand starting at position 181 of SEQ ID NO: 1562785
caaagucagcauuguguca

SEQ ID NO: 1772616 - RNA, 19 nt, Artificial Sequence
  Description of Artificial Sequence: Synthetic oligonucleotide
  Antisense strand to SEQ ID NO: 1772615
ugacacaaugcugacuuug

SEQ ID NO: 1772617 - RNA, 19 nt, Artificial Sequence
  Description of Artificial Sequence: Synthetic oligonucleotide
  Sense strand starting at position 186 of SEQ ID NO: 1562785
ucagcauugugucaggauu

SEQ ID NO: 1772618 - RNA, 19 nt, Artificial Sequence
  Description of Artificial Sequence: Synthetic oligonucleotide
  Antisense strand to SEQ ID NO: 1772617
aauccugacacaaugcuga

SEQ ID NO: 1772619 - RNA, 19 nt, Artificial Sequence
  Description of Artificial Sequence: Synthetic oligonucleotide
  Sense strand starting at position 188 of SEQ ID NO: 1562785
agcauugugucaggauuaa

SEQ ID NO: 1772620 - RNA, 19 nt, Artificial Sequence
  Description of Artificial Sequence: Synthetic oligonucleotide
  Antisense strand to SEQ ID NO: 1772619
uuaauccugacacaaugcu

SEQ ID NO: 1772621 - RNA, 19 nt, Artificial Sequence
  Description of Artificial Sequence: Synthetic oligonucleotide
  Sense strand starting at position 250 of SEQ ID NO: 1562785
guaaaugcuaggugccauu

SEQ ID NO: 1772622 - RNA, 19 nt, Artificial Sequence
  Description of Artificial Sequence: Synthetic oligonucleotide
  Antisense strand to SEQ ID NO: 1772621
aauggcaccuagcauuuac

SEQ ID NO: 1772623 - RNA, 19 nt, Artificial Sequence
  Description of Artificial Sequence: Synthetic oligonucleotide
  Sense strand starting at position 278 of SEQ ID NO: 1562785
cacuguucuucugggaaug

SEQ ID NO: 1772624 - RNA, 19 nt, Artificial Sequence
  Description of Artificial Sequence: Synthetic oligonucleotide
  Antisense strand to SEQ ID NO: 1772623
cauucccagaagaacagug

SEQ ID NO: 1772625 - RNA, 19 nt, Artificial Sequence
  Description of Artificial Sequence: Synthetic oligonucleotide
  Sense strand starting at position 535 of SEQ ID NO: 1562785
aaugaauguuugcagaaug

SEQ ID NO: 1772626 - RNA, 19 nt, Artificial Sequence
  Description of Artificial Sequence: Synthetic oligonucleotide
  Antisense strand to SEQ ID NO: 1772625
cauucugcaaacauucauu

SEQ ID NO: 1772627 - RNA, 19 nt, Artificial Sequence
  Description of Artificial Sequence: Synthetic oligonucleotide
  Sense strand starting at position 626 of SEQ ID NO: 1562785
cuugucaaccauugaaguu

SEQ ID NO: 1772628 - RNA, 19 nt, Artificial Sequence
  Description of Artificial Sequence: Synthetic oligonucleotide
  Antisense strand to SEQ ID NO: 1772627
aacuucaaugguugacaag

SEQ ID NO: 1772629 - RNA, 19 nt, Artificial Sequence
  Description of Artificial Sequence: Synthetic oligonucleotide
  Sense strand starting at position 882 of SEQ ID NO: 1562785
gcacuuguucucugggacu

SEQ ID NO: 1772630 - RNA, 19 nt, Artificial Sequence
  Description of Artificial Sequence: Synthetic oligonucleotide
  Antisense strand to SEQ ID NO: 1772629
agucccagagaacaagugc

SEQ ID NO: 1772631 - RNA, 19 nt, Artificial Sequence
  Description of Artificial Sequence: Synthetic oligonucleotide
  Sense strand starting at position 884 of SEQ ID NO: 1562785
acuuguucucugggacuca

SEQ ID NO: 1772632 - RNA, 19 nt, Artificial Sequence
  Description of Artificial Sequence: Synthetic oligonucleotide
  Antisense strand to SEQ ID NO: 1772631
ugagucccagagaacaagu

SEQ ID NO: 1772633 - RNA, 19 nt, Artificial Sequence
  Description of Artificial Sequence: Synthetic oligonucleotide
  Sense strand starting at position 939 of SEQ ID NO: 1562785
ggcugacauuccguacuca

SEQ ID NO: 1772634 - RNA, 19 nt, Artificial Sequence
  Description of Artificial Sequence: Synthetic oligonucleotide
  Antisense strand to SEQ ID NO: 1772633
ugaguacggaaugucagcc

SEQ ID NO: 1772635 - RNA, 19 nt, Artificial Sequence
  Description of Artificial Sequence: Synthetic oligonucleotide
  Sense strand starting at position 943 of SEQ ID NO: 1562785
gacauuccguacucagcaa

SEQ ID NO: 1772636 - RNA, 19 nt, Artificial Sequence
  Description of Artificial Sequence: Synthetic oligonucleotide
  Antisense strand to SEQ ID NO: 1772635
uugcugaguacggaauguc

SEQ ID NO: 1772637 - RNA, 19 nt, Artificial Sequence
  Description of Artificial Sequence: Synthetic oligonucleotide
  Sense strand starting at position 1017 of SEQ ID NO: 1562785
cugacaaugugguaugaag

SEQ ID NO: 1772638 - RNA, 19 nt, Artificial Sequence
  Description of Artificial Sequence: Synthetic oligonucleotide
  Antisense strand to SEQ ID NO: 1772637
cuucauaccacauugucag

SEQ ID NO: 1772639 - RNA, 19 nt, Artificial Sequence
  Description of Artificial Sequence: Synthetic oligonucleotide
  Sense strand starting at position 1019 of SEQ ID NO: 1562785
gacaaugugguaugaaguc

SEQ ID NO: 1772640 - RNA, 19 nt, Artificial Sequence
  Description of Artificial Sequence: Synthetic oligonucleotide
  Antisense strand to SEQ ID NO: 1772639
gacuucauaccacauuguc

SEQ ID NO: 1772641 - RNA, 19 nt, Artificial Sequence
  Description of Artificial Sequence: Synthetic oligonucleotide
  Sense strand starting at position 1120 of SEQ ID NO: 1562785
gcuucagucugggcaugau

SEQ ID NO: 1772642 - RNA, 19 nt, Artificial Sequence
  Description of Artificial Sequence: Synthetic oligonucleotide
  Antisense strand to SEQ ID NO: 1772641
aucaugcccagacugaagc

SEQ ID NO: 1772643 - RNA, 19 nt, Artificial Sequence
  Description of Artificial Sequence: Synthetic oligonucleotide
  Sense strand starting at position 1137 of SEQ ID NO: 1562785
auccaucaguaauggauua

SEQ ID NO: 1772644 - RNA, 19 nt, Artificial Sequence
  Description of Artificial Sequence: Synthetic oligonucleotide
  Antisense strand to SEQ ID NO: 1772643
uaauccauuacugauggau

SEQ ID NO: 1772645 - RNA, 19 nt, Artificial Sequence
  Description of Artificial Sequence: Synthetic oligonucleotide
  Sense strand starting at position 1237 of SEQ ID NO: 1562785
ccagcagauccaugacuua

SEQ ID NO: 1772646 - RNA, 19 nt, Artificial Sequence
  Description of Artificial Sequence: Synthetic oligonucleotide
  Antisense strand to SEQ ID NO: 1772645
uaagucauggaucugcugg

SEQ ID NO: 1772647 - RNA, 19 nt, Artificial Sequence
  Description of Artificial Sequence: Synthetic oligonucleotide
  Sense strand starting at position 1240 of SEQ ID NO: 1562785
gcagauccaugacuuaaag

SEQ ID NO: 1772648 - RNA, 19 nt, Artificial Sequence
  Description of Artificial Sequence: Synthetic oligonucleotide
  Antisense strand to SEQ ID NO: 1772647
cuuuaagucauggaucugc

SEQ ID NO: 1772649 - RNA, 19 nt, Artificial Sequence
  Description of Artificial Sequence: Synthetic oligonucleotide
  Sense strand starting at position 2482 of SEQ ID NO: 1562785
cgggauguguacuuuguca

SEQ ID NO: 1772650 - RNA, 19 nt, Artificial Sequence
  Description of Artificial Sequence: Synthetic oligonucleotide
  Antisense strand to SEQ ID NO: 1772649
ugacaaaguacacaucccg

SEQ ID NO: 1772651 - RNA, 19 nt, Artificial Sequence
  Description of Artificial Sequence: Synthetic oligonucleotide
  Sense strand starting at position 2538 of SEQ ID NO: 1562785
ggcugacuucugggaacuu

SEQ ID NO: 1772652 - RNA, 19 nt, Artificial Sequence
  Description of Artificial Sequence: Synthetic oligonucleotide
  Antisense strand to SEQ ID NO: 1772651
aaguucccagaagucagcc

SEQ ID NO: 1772653 - RNA, 19 nt, Artificial Sequence
  Description of Artificial Sequence: Synthetic oligonucleotide
  Sense strand starting at position 2549 of SEQ ID NO: 1562785
gggaacuuccuccgcagaa

SEQ ID NO: 1772654 - RNA, 19 nt, Artificial Sequence
  Description of Artificial Sequence: Synthetic oligonucleotide
  Antisense strand to SEQ ID NO: 1772653
uucugcggaggaaguuccc

SEQ ID NO: 1772655 - RNA, 19 nt, Artificial Sequence
  Description of Artificial Sequence: Synthetic oligonucleotide
  Sense strand starting at position 2662 of SEQ ID NO: 1562785
cagaguguugcgccuccau

SEQ ID NO: 1772656 - RNA, 19 nt, Artificial Sequence
  Description of Artificial Sequence: Synthetic oligonucleotide
  Antisense strand to SEQ ID NO: 1772655
auggaggcgcaacacucug

SEQ ID NO: 1772657 - RNA, 19 nt, Artificial Sequence
  Description of Artificial Sequence: Synthetic oligonucleotide
  Sense strand starting at position 2771 of SEQ ID NO: 1562785
gcgugucauccugaugaag

SEQ ID NO: 1772658 - RNA, 19 nt, Artificial Sequence
  Description of Artificial Sequence: Synthetic oligonucleotide
  Antisense strand to SEQ ID NO: 1772657
cuucaucaggaugacacgc

SEQ ID NO: 1772659 - RNA, 19 nt, Artificial Sequence
  Description of Artificial Sequence: Synthetic oligonucleotide
  Sense strand starting at position 2813 of SEQ ID NO: 1562785
gugugcuaguuguggcuga

SEQ ID NO: 1772660 - RNA, 19 nt, Artificial Sequence
  Description of Artificial Sequence: Synthetic oligonucleotide
  Antisense strand to SEQ ID NO: 1772659
ucagccacaacuagcacac

SEQ ID NO: 1772661 - RNA, 19 nt, Artificial Sequence
  Description of Artificial Sequence: Synthetic oligonucleotide
  Sense strand starting at position 2817 of SEQ ID NO: 1562785
gcuaguuguggcugauaca

SEQ ID NO: 1772662 - RNA, 19 nt, Artificial Sequence
  Description of Artificial Sequence: Synthetic oligonucleotide
  Antisense strand to SEQ ID NO: 1772661
uguaucagccacaacuagc

SEQ ID NO: 1772663 - RNA, 19 nt, Artificial Sequence
  Description of Artificial Sequence: Synthetic oligonucleotide
  Sense strand starting at position 3065 of SEQ ID NO: 1562785
uugugucccgagugucaca

SEQ ID NO: 1772664 - RNA, 19 nt, Artificial Sequence
  Description of Artificial Sequence: Synthetic oligonucleotide
  Antisense strand to SEQ ID NO: 1772663
ugugacacucgggacacaa

SEQ ID NO: 1772665 - RNA, 19 nt, Artificial Sequence
  Description of Artificial Sequence: Synthetic oligonucleotide
  Sense strand starting at position 3075 of SEQ ID NO: 1562785
agugucacauccucaaaga

SEQ ID NO: 1772666 - RNA, 19 nt, Artificial Sequence
  Description of Artificial Sequence: Synthetic oligonucleotide
  Antisense strand to SEQ ID NO: 1772665
ucuuugaggaugugacacu

SEQ ID NO: 1772667 - RNA, 19 nt, Artificial Sequence
  Description of Artificial Sequence: Synthetic oligonucleotide
  Sense strand starting at position 3076 of SEQ ID NO: 1562785
gugucacauccucaaagaa

SEQ ID NO: 1772668 - RNA, 19 nt, Artificial Sequence
  Description of Artificial Sequence: Synthetic oligonucleotide
  Antisense strand to SEQ ID NO: 1772667
uucuuugaggaugugacac

SEQ ID NO: 1772669 - RNA, 19 nt, Artificial Sequence
  Description of Artificial Sequence: Synthetic oligonucleotide
  Sense strand starting at position 3629 of SEQ ID NO: 1562785
ggcugcauaaacgaagaau

SEQ ID NO: 1772670 - RNA, 19 nt, Artificial Sequence
  Description of Artificial Sequence: Synthetic oligonucleotide
  Antisense strand to SEQ ID NO: 1772669
auucuucguuuaugcagcc

SEQ ID NO: 1772671 - RNA, 19 nt, Artificial Sequence
  Description of Artificial Sequence: Synthetic oligonucleotide
  Sense strand starting at position 3907 of SEQ ID NO: 1562785
guguauuucucuucuccag

SEQ ID NO: 1772672 - RNA, 19 nt, Artificial Sequence
  Description of Artificial Sequence: Synthetic oligonucleotide
  Antisense strand to SEQ ID NO: 1772671
cuggagaagagaaauacac

SEQ ID NO: 1772673 - RNA, 19 nt, Artificial Sequence
  Description of Artificial Sequence: Synthetic oligonucleotide
  Sense strand starting at position 3931 of SEQ ID NO: 1562785
cugcaucccugucuguaaa

SEQ ID NO: 1772674 - RNA, 19 nt, Artificial Sequence
  Description of Artificial Sequence: Synthetic oligonucleotide
  Antisense strand to SEQ ID NO: 1772673
uuuacagacagggaugcag

SEQ ID NO: 1772675 - RNA, 19 nt, Artificial Sequence
  Description of Artificial Sequence: Synthetic oligonucleotide
  Sense strand starting at position 3933 of SEQ ID NO: 1562785
gcaucccugucuguaaagu

SEQ ID NO: 1772676 - RNA, 19 nt, Artificial Sequence
  Description of Artificial Sequence: Synthetic oligonucleotide
  Antisense strand to SEQ ID NO: 1772675
acuuuacagacagggaugc

SEQ ID NO: 1772677 - RNA, 19 nt, Artificial Sequence
  Description of Artificial Sequence: Synthetic oligonucleotide
  Sense strand starting at position 94 of SEQ ID NO: 1562786
augaccuggcagugucaua

SEQ ID NO: 1772678 - RNA, 19 nt, Artificial Sequence
  Description of Artificial Sequence: Synthetic oligonucleotide
  Antisense strand to SEQ ID NO: 1772677
uaugacacugccaggucau

SEQ ID NO: 1772679 - RNA, 19 nt, Artificial Sequence
  Description of Artificial Sequence: Synthetic oligonucleotide
  Sense strand starting at position 101 of SEQ ID NO: 1562786
ggcagugucauaugguaaa

SEQ ID NO: 1772680 - RNA, 19 nt, Artificial Sequence
  Description of Artificial Sequence: Synthetic oligonucleotide
  Antisense strand to SEQ ID NO: 1772679
uuuaccauaugacacugcc

SEQ ID NO: 1772681 - RNA, 19 nt, Artificial Sequence
  Description of Artificial Sequence: Synthetic oligonucleotide
  Sense strand starting at position 144 of SEQ ID NO: 1562786
gaaagcuggucucucgauu

SEQ ID NO: 1772682 - RNA, 19 nt, Artificial Sequence
  Description of Artificial Sequence: Synthetic oligonucleotide
  Antisense strand to SEQ ID NO: 1772681
aaucgagagaccagcuuuc

SEQ ID NO: 1772683 - RNA, 19 nt, Artificial Sequence
  Description of Artificial Sequence: Synthetic oligonucleotide
  Sense strand starting at position 209 of SEQ ID NO: 1562786
gagccagcuccagaagguu

SEQ ID NO: 1772684 - RNA, 19 nt, Artificial Sequence
  Description of Artificial Sequence: Synthetic oligonucleotide
  Antisense strand to SEQ ID NO: 1772683
aaccuucuggagcuggcuc

SEQ ID NO: 1772685 - RNA, 19 nt, Artificial Sequence
  Description of Artificial Sequence: Synthetic oligonucleotide
  Sense strand starting at position 621 of SEQ ID NO: 1562786
gcguguguucaggcucaga

SEQ ID NO: 1772686 - RNA, 19 nt, Artificial Sequence
  Description of Artificial Sequence: Synthetic oligonucleotide
  Antisense strand to SEQ ID NO: 1772685
ucugagccugaacacacgc

SEQ ID NO: 1772687 - RNA, 19 nt, Artificial Sequence
  Description of Artificial Sequence: Synthetic oligonucleotide
  Sense strand starting at position 666 of SEQ ID NO: 1562786
ccaaguaaucccugcauga

SEQ ID NO: 1772688 - RNA, 19 nt, Artificial Sequence
  Description of Artificial Sequence: Synthetic oligonucleotide
  Antisense strand to SEQ ID NO: 1772687
ucaugcagggauuacuugg

SEQ ID NO: 1772689 - RNA, 19 nt, Artificial Sequence
  Description of Artificial Sequence: Synthetic oligonucleotide
  Sense strand starting at position 806 of SEQ ID NO: 1562786
ggcauauggaguugauuaa

SEQ ID NO: 1772690 - RNA, 19 nt, Artificial Sequence
  Description of Artificial Sequence: Synthetic oligonucleotide
  Antisense strand to SEQ ID NO: 1772689
uuaaucaacuccauaugcc

SEQ ID NO: 1772691 - RNA, 19 nt, Artificial Sequence
  Description of Artificial Sequence: Synthetic oligonucleotide
  Sense strand starting at position 915 of SEQ ID NO: 1562786
gaugaaauacguuaggcga

SEQ ID NO: 1772692 - RNA, 19 nt, Artificial Sequence
  Description of Artificial Sequence: Synthetic oligonucleotide
  Antisense strand to SEQ ID NO: 1772691
ucgccuaacguauuucauc

SEQ ID NO: 1772693 - RNA, 19 nt, Artificial Sequence
  Description of Artificial Sequence: Synthetic oligonucleotide
  Sense strand starting at position 994 of SEQ ID NO: 1562786
ugucgaguuguugggacuu

SEQ ID NO: 1772694 - RNA, 19 nt, Artificial Sequence
  Description of Artificial Sequence: Synthetic oligonucleotide
  Antisense strand to SEQ ID NO: 1772693
aagucccaacaacucgaca

SEQ ID NO: 1772695 - RNA, 19 nt, Artificial Sequence
  Description of Artificial Sequence: Synthetic oligonucleotide
  Sense strand starting at position 1040 of SEQ ID NO: 1562786
cagcacugugucuagauga

SEQ ID NO: 1772696 - RNA, 19 nt, Artificial Sequence
  Description of Artificial Sequence: Synthetic oligonucleotide
  Antisense strand to SEQ ID NO: 1772695
ucaucuagacacagugcug

SEQ ID NO: 1772697 - RNA, 19 nt, Artificial Sequence
  Description of Artificial Sequence: Synthetic oligonucleotide
  Sense strand starting at position 1059 of SEQ ID NO: 1562786
uggcgagggcucaguaagu

SEQ ID NO: 1772698 - RNA, 19 nt, Artificial Sequence
  Description of Artificial Sequence: Synthetic oligonucleotide
  Antisense strand to SEQ ID NO: 1772697
acuuacugagcccucgcca

SEQ ID NO: 1772699 - RNA, 19 nt, Artificial Sequence
  Description of Artificial Sequence: Synthetic oligonucleotide
  Sense strand starting at position 1200 of SEQ ID NO: 1562786
cgaguuagcugucucugau

SEQ ID NO: 1772700 - RNA, 19 nt, Artificial Sequence
  Description of Artificial Sequence: Synthetic oligonucleotide
  Antisense strand to SEQ ID NO: 1772699
aucagagacagcuaacucg

SEQ ID NO: 1772701 - RNA, 19 nt, Artificial Sequence
  Description of Artificial Sequence: Synthetic oligonucleotide
  Sense strand starting at position 1206 of SEQ ID NO: 1562786
agcugucucugaucuguuu

SEQ ID NO: 1772702 - RNA, 19 nt, Artificial Sequence
  Description of Artificial Sequence: Synthetic oligonucleotide
  Antisense strand to SEQ ID NO: 1772701
aaacagaucagagacagcu

SEQ ID NO: 1772703 - RNA, 19 nt, Artificial Sequence
  Description of Artificial Sequence: Synthetic oligonucleotide
  Sense strand starting at position 1215 of SEQ ID NO: 1562786
ugaucuguuuccucaaagc

SEQ ID NO: 1772704 - RNA, 19 nt, Artificial Sequence
  Description of Artificial Sequence: Synthetic oligonucleotide
  Antisense strand to SEQ ID NO: 1772703
gcuuugaggaaacagauca

SEQ ID NO: 1772705 - RNA, 19 nt, Artificial Sequence
  Description of Artificial Sequence: Synthetic oligonucleotide
  Sense strand starting at position 1277 of SEQ ID NO: 1562786
gaugaaugacaauguguac

SEQ ID NO: 1772706 - RNA, 19 nt, Artificial Sequence
  Description of Artificial Sequence: Synthetic oligonucleotide
  Antisense strand to SEQ ID NO: 1772705
guacacauugucauucauc

SEQ ID NO: 1772707 - RNA, 19 nt, Artificial Sequence
  Description of Artificial Sequence: Synthetic oligonucleotide
  Sense strand starting at position 1280 of SEQ ID NO: 1562786
gaaugacaauguguacaga

SEQ ID NO: 1772708 - RNA, 19 nt, Artificial Sequence
  Description of Artificial Sequence: Synthetic oligonucleotide
  Antisense strand to SEQ ID NO: 1772707
ucuguacacauugucauuc

SEQ ID NO: 1772709 - RNA, 19 nt, Artificial Sequence
  Description of Artificial Sequence: Synthetic oligonucleotide
  Sense strand starting at position 1321 of SEQ ID NO: 1562786
acaugagacugucuacaca

SEQ ID NO: 1772710 - RNA, 19 nt, Artificial Sequence
  Description of Artificial Sequence: Synthetic oligonucleotide
  Antisense strand to SEQ ID NO: 1772709
uguguagacagucucaugu

SEQ ID NO: 1772711 - RNA, 19 nt, Artificial Sequence
  Description of Artificial Sequence: Synthetic oligonucleotide
  Sense strand starting at position 1383 of SEQ ID NO: 1562786
cuuugauaugcaugagcac

SEQ ID NO: 1772712 - RNA, 19 nt, Artificial Sequence
  Description of Artificial Sequence: Synthetic oligonucleotide
  Antisense strand to SEQ ID NO: 1772711
gugcucaugcauaucaaag

SEQ ID NO: 1772713 - RNA, 19 nt, Artificial Sequence
  Description of Artificial Sequence: Synthetic oligonucleotide
  Sense strand starting at position 1384 of SEQ ID NO: 1562786
uuugauaugcaugagcacu

SEQ ID NO: 1772714 - RNA, 19 nt, Artificial Sequence
  Description of Artificial Sequence: Synthetic oligonucleotide
  Antisense strand to SEQ ID NO: 1772713
agugcucaugcauaucaaa

SEQ ID NO: 1772715 - RNA, 19 nt, Artificial Sequence
  Description of Artificial Sequence: Synthetic oligonucleotide
  Sense strand starting at position 1392 of SEQ ID NO: 1562786
gcaugagcacuguaggaaa

SEQ ID NO: 1772716 - RNA, 19 nt, Artificial Sequence
  Description of Artificial Sequence: Synthetic oligonucleotide
  Antisense strand to SEQ ID NO: 1772715
uuuccuacagugcucaugc

SEQ ID NO: 1772717 - RNA, 19 nt, Artificial Sequence
  Description of Artificial Sequence: Synthetic oligonucleotide
  Sense strand starting at position 1621 of SEQ ID NO: 1562786
ugcggucauccuugaagca

SEQ ID NO: 1772718 - RNA, 19 nt, Artificial Sequence
  Description of Artificial Sequence: Synthetic oligonucleotide
  Antisense strand to SEQ ID NO: 1772717
ugcuucaaggaugaccgca

SEQ ID NO: 1772719 - RNA, 19 nt, Artificial Sequence
  Description of Artificial Sequence: Synthetic oligonucleotide
  Sense strand starting at position 1739 of SEQ ID NO: 1562786
ccagaaauuugcgagggcu

SEQ ID NO: 1772720 - RNA, 19 nt, Artificial Sequence
  Description of Artificial Sequence: Synthetic oligonucleotide
  Antisense strand to SEQ ID NO: 1772719
agcccucgcaaauuucugg

SEQ ID NO: 1772721 - RNA, 19 nt, Artificial Sequence
  Description of Artificial Sequence: Synthetic oligonucleotide
  Sense strand starting at position 1747 of SEQ ID NO: 1562786
uugcgagggcucugagaug

SEQ ID NO: 1772722 - RNA, 19 nt, Artificial Sequence
  Description of Artificial Sequence: Synthetic oligonucleotide
  Antisense strand to SEQ ID NO: 1772721
caucucagagcccucgcaa

SEQ ID NO: 1772723 - RNA, 19 nt, Artificial Sequence
  Description of Artificial Sequence: Synthetic oligonucleotide
  Sense strand starting at position 2221 of SEQ ID NO: 1562786
agggacuucuccuucuauu

SEQ ID NO: 1772724 - RNA, 19 nt, Artificial Sequence
  Description of Artificial Sequence: Synthetic oligonucleotide
  Antisense strand to SEQ ID NO: 1772723
aauagaaggagaagucccu

SEQ ID NO: 1772725 - RNA, 19 nt, Artificial Sequence
  Description of Artificial Sequence: Synthetic oligonucleotide
  Sense strand starting at position 2302 of SEQ ID NO: 1562786
caggcuuugguagggaaga

SEQ ID NO: 1772726 - RNA, 19 nt, Artificial Sequence
  Description of Artificial Sequence: Synthetic oligonucleotide
  Antisense strand to SEQ ID NO: 1772725
ucuucccuaccaaagccug

SEQ ID NO: 1772727 - RNA, 19 nt, Artificial Sequence
  Description of Artificial Sequence: Synthetic oligonucleotide
  Sense strand starting at position 2594 of SEQ ID NO: 1562786
ggcacuaaucccgacacuu

SEQ ID NO: 1772728 - RNA, 19 nt, Artificial Sequence
  Description of Artificial Sequence: Synthetic oligonucleotide
  Antisense strand to SEQ ID NO: 1772727
aagugucgggauuagugcc

SEQ ID NO: 1772729 - RNA, 19 nt, Artificial Sequence
  Description of Artificial Sequence: Synthetic oligonucleotide
  Sense strand starting at position 2694 of SEQ ID NO: 1562786
gccacuagcugagucaaau

SEQ ID NO: 1772730 - RNA, 19 nt, Artificial Sequence
  Description of Artificial Sequence: Synthetic oligonucleotide
  Antisense strand to SEQ ID NO: 1772729
auuugacucagcuaguggc

SEQ ID NO: 1772731 - RNA, 19 nt, Artificial Sequence
  Description of Artificial Sequence: Synthetic oligonucleotide
  Sense strand starting at position 2700 of SEQ ID NO: 1562786
agcugagucaaaugcagaa

SEQ ID NO: 1772732 - RNA, 19 nt, Artificial Sequence
  Description of Artificial Sequence: Synthetic oligonucleotide
  Antisense strand to SEQ ID NO: 1772731
uucugcauuugacucagcu

SEQ ID NO: 1772733 - RNA, 19 nt, Artificial Sequence
  Description of Artificial Sequence: Synthetic oligonucleotide
  Sense strand starting at position 2917 of SEQ ID NO: 1562786
aggcuucaucggugagggu

SEQ ID NO: 1772734 - RNA, 19 nt, Artificial Sequence
  Description of Artificial Sequence: Synthetic oligonucleotide
  Antisense strand to SEQ ID NO: 1772733
acccucaccgaugaagccu

SEQ ID NO: 1772735 - RNA, 19 nt, Artificial Sequence
  Description of Artificial Sequence: Synthetic oligonucleotide
  Sense strand starting at position 3045 of SEQ ID NO: 1562786
ucugcagagucgcuuugaa

SEQ ID NO: 1772736 - RNA, 19 nt, Artificial Sequence
  Description of Artificial Sequence: Synthetic oligonucleotide
  Antisense strand to SEQ ID NO: 1772735
uucaaagcgacucugcaga

SEQ ID NO: 1772737 - RNA, 19 nt, Artificial Sequence
  Description of Artificial Sequence: Synthetic oligonucleotide
  Sense strand starting at position 3059 of SEQ ID NO: 1562786
uugaaauuccugccgcguu

SEQ ID NO: 1772738 - RNA, 19 nt, Artificial Sequence
  Description of Artificial Sequence: Synthetic oligonucleotide
  Antisense strand to SEQ ID NO: 1772737
aacgcggcaggaauuucaa

SEQ ID NO: 1772739 - RNA, 19 nt, Artificial Sequence
  Description of Artificial Sequence: Synthetic oligonucleotide
  Sense strand starting at position 3127 of SEQ ID NO: 1562786
uaagcaaagcgcugugauu

SEQ ID NO: 1772740 - RNA, 19 nt, Artificial Sequence
  Description of Artificial Sequence: Synthetic oligonucleotide
  Antisense strand to SEQ ID NO: 1772739
aaucacagcgcuuugcuua

SEQ ID NO: 1772741 - RNA, 19 nt, Artificial Sequence
  Description of Artificial Sequence: Synthetic oligonucleotide
  Sense strand starting at position 3129 of SEQ ID NO: 1562786
agcaaagcgcugugauuau

SEQ ID NO: 1772742 - RNA, 19 nt, Artificial Sequence
  Description of Artificial Sequence: Synthetic oligonucleotide
  Antisense strand to SEQ ID NO: 1772741
auaaucacagcgcuuugcu

SEQ ID NO: 1772743 - RNA, 19 nt, Artificial Sequence
  Description of Artificial Sequence: Synthetic oligonucleotide
  Sense strand starting at position 3136 of SEQ ID NO: 1562786
cgcugugauuauuccugga

SEQ ID NO: 1772744 - RNA, 19 nt, Artificial Sequence
  Description of Artificial Sequence: Synthetic oligonucleotide
  Antisense strand to SEQ ID NO: 1772743
uccaggaauaaucacagcg

SEQ ID NO: 1772745 - RNA, 19 nt, Artificial Sequence
  Description of Artificial Sequence: Synthetic oligonucleotide
  Sense strand starting at position 3138 of SEQ ID NO: 1562786
cugugauuauuccuggaua

SEQ ID NO: 1772746 - RNA, 19 nt, Artificial Sequence
  Description of Artificial Sequence: Synthetic oligonucleotide
  Antisense strand to SEQ ID NO: 1772745
uauccaggaauaaucacag

SEQ ID NO: 1772747 - RNA, 19 nt, Artificial Sequence
  Description of Artificial Sequence: Synthetic oligonucleotide
  Sense strand starting at position 3140 of SEQ ID NO: 1562786
gugauuauuccuggauaaa

SEQ ID NO: 1772748 - RNA, 19 nt, Artificial Sequence
  Description of Artificial Sequence: Synthetic oligonucleotide
  Antisense strand to SEQ ID NO: 1772747
uuuauccaggaauaaucac

SEQ ID NO: 1772749 - RNA, 19 nt, Artificial Sequence
  Description of Artificial Sequence: Synthetic oligonucleotide
  Sense strand starting at position 3809 of SEQ ID NO: 1562786
guaccugcccaagagaaau

SEQ ID NO: 1772750 - RNA, 19 nt, Artificial Sequence
  Description of Artificial Sequence: Synthetic oligonucleotide
  Antisense strand to SEQ ID NO: 1772749
auuucucuugggcagguac

SEQ ID NO: 1772751 - RNA, 19 nt, Artificial Sequence
  Description of Artificial Sequence: Synthetic oligonucleotide
  Sense strand starting at position 3865 of SEQ ID NO: 1562786
acagcaucuuuauucguaa

SEQ ID NO: 1772752 - RNA, 19 nt, Artificial Sequence
  Description of Artificial Sequence: Synthetic oligonucleotide
  Antisense strand to SEQ ID NO: 1772751
uuacgaauaaagaugcugu

SEQ ID NO: 1772753 - RNA, 19 nt, Artificial Sequence
  Description of Artificial Sequence: Synthetic oligonucleotide
  Sense strand starting at position 3969 of SEQ ID NO: 1562786
aaacuuguccugcagagca

SEQ ID NO: 1772754 - RNA, 19 nt, Artificial Sequence
  Description of Artificial Sequence: Synthetic oligonucleotide
  Antisense strand to SEQ ID NO: 1772753
ugcucugcaggacaaguuu

SEQ ID NO: 1772755 - RNA, 19 nt, Artificial Sequence
  Description of Artificial Sequence: Synthetic oligonucleotide
  Sense strand starting at position 3971 of SEQ ID NO: 1562786
acuuguccugcagagcaaa

SEQ ID NO: 1772756 - RNA, 19 nt, Artificial Sequence
  Description of Artificial Sequence: Synthetic oligonucleotide
  Antisense strand to SEQ ID NO: 1772755
uuugcucugcaggacaagu

SEQ ID NO: 1772757 - RNA, 19 nt, Artificial Sequence
  Description of Artificial Sequence: Synthetic oligonucleotide
  Sense strand starting at position 39 of SEQ ID NO: 1562787
ccaugcuuugcacacagua

SEQ ID NO: 1772758 - RNA, 19 nt, Artificial Sequence
  Description of Artificial Sequence: Synthetic oligonucleotide
  Antisense strand to SEQ ID NO: 1772757
uacugugugcaaagcaugg

SEQ ID NO: 1772759 - RNA, 19 nt, Artificial Sequence
  Description of Artificial Sequence: Synthetic oligonucleotide
  Sense strand starting at position 498 of SEQ ID NO: 1562787
guggaaaccucuccuaucu

SEQ ID NO: 1772760 - RNA, 19 nt, Artificial Sequence
  Description of Artificial Sequence: Synthetic oligonucleotide
  Antisense strand to SEQ ID NO: 1772759
agauaggagagguuuccac

SEQ ID NO: 1772761 - RNA, 19 nt, Artificial Sequence
  Description of Artificial Sequence: Synthetic oligonucleotide
  Sense strand starting at position 537 of SEQ ID NO: 1562787
ggauaaccauuccagugua

SEQ ID NO: 1772762 - RNA, 19 nt, Artificial Sequence
  Description of Artificial Sequence: Synthetic oligonucleotide
  Antisense strand to SEQ ID NO: 1772761
uacacuggaaugguuaucc

SEQ ID NO: 1772763 - RNA, 19 nt, Artificial Sequence
  Description of Artificial Sequence: Synthetic oligonucleotide
  Sense strand starting at position 545 of SEQ ID NO: 1562787
auuccaguguaucccuaau

SEQ ID NO: 1772764 - RNA, 19 nt, Artificial Sequence
  Description of Artificial Sequence: Synthetic oligonucleotide
  Antisense strand to SEQ ID NO: 1772763
auuagggauacacuggaau

SEQ ID NO: 1772765 - RNA, 19 nt, Artificial Sequence
  Description of Artificial Sequence: Synthetic oligonucleotide
  Sense strand starting at position 547 of SEQ ID NO: 1562787
uccaguguaucccuaauaa

SEQ ID NO: 1772766 - RNA, 19 nt, Artificial Sequence
  Description of Artificial Sequence: Synthetic oligonucleotide
  Antisense strand to SEQ ID NO: 1772765
uuauuagggauacacugga

SEQ ID NO: 1772767 - RNA, 19 nt, Artificial Sequence
  Description of Artificial Sequence: Synthetic oligonucleotide
  Sense strand starting at position 623 of SEQ ID NO: 1562787
gggcucugaguccaaguua

SEQ ID NO: 1772768 - RNA, 19 nt, Artificial Sequence
  Description of Artificial Sequence: Synthetic oligonucleotide
  Antisense strand to SEQ ID NO: 1772767
uaacuuggacucagagccc

SEQ ID NO: 1772769 - RNA, 19 nt, Artificial Sequence
  Description of Artificial Sequence: Synthetic oligonucleotide
  Sense strand starting at position 638 of SEQ ID NO: 1562787
guuacaaacucagcuguuu

SEQ ID NO: 1772770 - RNA, 19 nt, Artificial Sequence
  Description of Artificial Sequence: Synthetic oligonucleotide
  Antisense strand to SEQ ID NO: 1772769
aaacagcugaguuuguaac

SEQ ID NO: 1772771 - RNA, 19 nt, Artificial Sequence
  Description of Artificial Sequence: Synthetic oligonucleotide
  Sense strand starting at position 687 of SEQ ID NO: 1562787
gggccaguucugcacccau

SEQ ID NO: 1772772 - RNA, 19 nt, Artificial Sequence
  Description of Artificial Sequence: Synthetic oligonucleotide
  Antisense strand to SEQ ID NO: 1772771
augggugcagaacuggccc

SEQ ID NO: 1772773 - RNA, 19 nt, Artificial Sequence
  Description of Artificial Sequence: Synthetic oligonucleotide
  Sense strand starting at position 704 of SEQ ID NO: 1562787
aucaaaguucucugcaugu

SEQ ID NO: 1772774 - RNA, 19 nt, Artificial Sequence
  Description of Artificial Sequence: Synthetic oligonucleotide
  Antisense strand to SEQ ID NO: 1772773
acaugcagagaacuuugau

SEQ ID NO: 1772775 - RNA, 19 nt, Artificial Sequence
  Description of Artificial Sequence: Synthetic oligonucleotide
  Sense strand starting at position 708 of SEQ ID NO: 1562787
aaguucucugcaugugcua

SEQ ID NO: 1772776 - RNA, 19 nt, Artificial Sequence
  Description of Artificial Sequence: Synthetic oligonucleotide
  Antisense strand to SEQ ID NO: 1772775
uagcacaugcagagaacuu

SEQ ID NO: 1772777 - RNA, 19 nt, Artificial Sequence
  Description of Artificial Sequence: Synthetic oligonucleotide
  Sense strand starting at position 719 of SEQ ID NO: 1562787
augugcuacugucucgaau

SEQ ID NO: 1772778 - RNA, 19 nt, Artificial Sequence
  Description of Artificial Sequence: Synthetic oligonucleotide
  Antisense strand to SEQ ID NO: 1772777
auucgagacaguagcacau

SEQ ID NO: 1772779 - RNA, 19 nt, Artificial Sequence
  Description of Artificial Sequence: Synthetic oligonucleotide
  Sense strand starting at position 722 of SEQ ID NO: 1562787
ugcuacugucucgaauguu

SEQ ID NO: 1772780 - RNA, 19 nt, Artificial Sequence
  Description of Artificial Sequence: Synthetic oligonucleotide
  Antisense strand to SEQ ID NO: 1772779
aacauucgagacaguagca

SEQ ID NO: 1772781 - RNA, 19 nt, Artificial Sequence
  Description of Artificial Sequence: Synthetic oligonucleotide
  Sense strand starting at position 725 of SEQ ID NO: 1562787
uacugucucgaauguugga

SEQ ID NO: 1772782 - RNA, 19 nt, Artificial Sequence
  Description of Artificial Sequence: Synthetic oligonucleotide
  Antisense strand to SEQ ID NO: 1772781
uccaacauucgagacagua

SEQ ID NO: 1772783 - RNA, 19 nt, Artificial Sequence
  Description of Artificial Sequence: Synthetic oligonucleotide
  Sense strand starting at position 749 of SEQ ID NO: 1562787
gcaccacugugaucccauu

SEQ ID NO: 1772784 - RNA, 19 nt, Artificial Sequence
  Description of Artificial Sequence: Synthetic oligonucleotide
  Antisense strand to SEQ ID NO: 1772783
aaugggaucacaguggugc

SEQ ID NO: 1772785 - RNA, 19 nt, Artificial Sequence
  Description of Artificial Sequence: Synthetic oligonucleotide
  Sense strand starting at position 953 of SEQ ID NO: 1562787
gagagcuuggccgagacaa

SEQ ID NO: 1772786 - RNA, 19 nt, Artificial Sequence
  Description of Artificial Sequence: Synthetic oligonucleotide
  Antisense strand to SEQ ID NO: 1772785
uugucucggccaagcucuc

SEQ ID NO: 1772787 - RNA, 19 nt, Artificial Sequence
  Description of Artificial Sequence: Synthetic oligonucleotide
  Sense strand starting at position 955 of SEQ ID NO: 1562787
gagcuuggccgagacaauc

SEQ ID NO: 1772788 - RNA, 19 nt, Artificial Sequence
  Description of Artificial Sequence: Synthetic oligonucleotide
  Antisense strand to SEQ ID NO: 1772787
gauugucucggccaagcuc

SEQ ID NO: 1772789 - RNA, 19 nt, Artificial Sequence
  Description of Artificial Sequence: Synthetic oligonucleotide
  Sense strand starting at position 1009 of SEQ ID NO: 1562787
cucuguccuccugaguuau

SEQ ID NO: 1772790 - RNA, 19 nt, Artificial Sequence
  Description of Artificial Sequence: Synthetic oligonucleotide
  Antisense strand to SEQ ID NO: 1772789
auaacucaggaggacagag

SEQ ID NO: 1772791 - RNA, 19 nt, Artificial Sequence
  Description of Artificial Sequence: Synthetic oligonucleotide
  Sense strand starting at position 1011 of SEQ ID NO: 1562787
cuguccuccugaguuauuu

SEQ ID NO: 1772792 - RNA, 19 nt, Artificial Sequence
  Description of Artificial Sequence: Synthetic oligonucleotide
  Antisense strand to SEQ ID NO: 1772791
aaauaacucaggaggacag

SEQ ID NO: 1772793 - RNA, 19 nt, Artificial Sequence
  Description of Artificial Sequence: Synthetic oligonucleotide
  Sense strand starting at position 1015 of SEQ ID NO: 1562787
ccuccugaguuauuugguu

SEQ ID NO: 1772794 - RNA, 19 nt, Artificial Sequence
  Description of Artificial Sequence: Synthetic oligonucleotide
  Antisense strand to SEQ ID NO: 1772793
aaccaaauaacucaggagg

SEQ ID NO: 1772795 - RNA, 19 nt, Artificial Sequence
  Description of Artificial Sequence: Synthetic oligonucleotide
  Sense strand starting at position 1021 of SEQ ID NO: 1562787
gaguuauuugguugcacca

SEQ ID NO: 1772796 - RNA, 19 nt, Artificial Sequence
  Description of Artificial Sequence: Synthetic oligonucleotide
  Antisense strand to SEQ ID NO: 1772795
uggugcaaccaaauaacuc

SEQ ID NO: 1772797 - RNA, 19 nt, Artificial Sequence
  Description of Artificial Sequence: Synthetic oligonucleotide
  Sense strand starting at position 1028 of SEQ ID NO: 1562787
uugguugcaccauggagau

SEQ ID NO: 1772798 - RNA, 19 nt, Artificial Sequence
  Description of Artificial Sequence: Synthetic oligonucleotide
  Antisense strand to SEQ ID NO: 1772797
aucuccauggugcaaccaa

SEQ ID NO: 1772799 - RNA, 19 nt, Artificial Sequence
  Description of Artificial Sequence: Synthetic oligonucleotide
  Sense strand starting at position 1378 of SEQ ID NO: 1562787
ucacuuauuucguaccggu

SEQ ID NO: 1772800 - RNA, 19 nt, Artificial Sequence
  Description of Artificial Sequence: Synthetic oligonucleotide
  Antisense strand to SEQ ID NO: 1772799
accgguacgaaauaaguga

SEQ ID NO: 1772801 - RNA, 19 nt, Artificial Sequence
  Description of Artificial Sequence: Synthetic oligonucleotide
  Sense strand starting at position 1382 of SEQ ID NO: 1562787
uuauuucguaccgguguga

SEQ ID NO: 1772802 - RNA, 19 nt, Artificial Sequence
  Description of Artificial Sequence: Synthetic oligonucleotide
  Antisense strand to SEQ ID NO: 1772801
ucacaccgguacgaaauaa

SEQ ID NO: 1772803 - RNA, 19 nt, Artificial Sequence
  Description of Artificial Sequence: Synthetic oligonucleotide
  Sense strand starting at position 1744 of SEQ ID NO: 1562787
cccauucuucugugacuag

SEQ ID NO: 1772804 - RNA, 19 nt, Artificial Sequence
  Description of Artificial Sequence: Synthetic oligonucleotide
  Antisense strand to SEQ ID NO: 1772803
cuagucacagaagaauggg

SEQ ID NO: 1772805 - RNA, 19 nt, Artificial Sequence
  Description of Artificial Sequence: Synthetic oligonucleotide
  Sense strand starting at position 2241 of SEQ ID NO: 1562787
gucuuacagccuugugcau

SEQ ID NO: 1772806 - RNA, 19 nt, Artificial Sequence
  Description of Artificial Sequence: Synthetic oligonucleotide
  Antisense strand to SEQ ID NO: 1772805
augcacaaggcuguaagac

SEQ ID NO: 1772807 - RNA, 19 nt, Artificial Sequence
  Description of Artificial Sequence: Synthetic oligonucleotide
  Sense strand starting at position 2304 of SEQ ID NO: 1562787
agagacacucccugugaga

SEQ ID NO: 1772808 - RNA, 19 nt, Artificial Sequence
  Description of Artificial Sequence: Synthetic oligonucleotide
  Antisense strand to SEQ ID NO: 1772807
ucucacagggagugucucu

SEQ ID NO: 1772809 - RNA, 19 nt, Artificial Sequence
  Description of Artificial Sequence: Synthetic oligonucleotide
  Sense strand starting at position 2306 of SEQ ID NO: 1562787
agacacucccugugagauc

SEQ ID NO: 1772810 - RNA, 19 nt, Artificial Sequence
  Description of Artificial Sequence: Synthetic oligonucleotide
  Antisense strand to SEQ ID NO: 1772809
gaucucacagggagugucu

SEQ ID NO: 1772811 - RNA, 19 nt, Artificial Sequence
  Description of Artificial Sequence: Synthetic oligonucleotide
  Sense strand starting at position 2384 of SEQ ID NO: 1562787
agcagaugcuuggcacaau

SEQ ID NO: 1772812 - RNA, 19 nt, Artificial Sequence
  Description of Artificial Sequence: Synthetic oligonucleotide
  Antisense strand to SEQ ID NO: 1772811
auugugccaagcaucugcu

SEQ ID NO: 1772813 - RNA, 19 nt, Artificial Sequence
  Description of Artificial Sequence: Synthetic oligonucleotide
  Sense strand starting at position 2387 of SEQ ID NO: 1562787
agaugcuuggcacaauaca

SEQ ID NO: 1772814 - RNA, 19 nt, Artificial Sequence
  Description of Artificial Sequence: Synthetic oligonucleotide
  Antisense strand to SEQ ID NO: 1772813
uguauugugccaagcaucu

SEQ ID NO: 1772815 - RNA, 19 nt, Artificial Sequence
  Description of Artificial Sequence: Synthetic oligonucleotide
  Sense strand starting at position 2756 of SEQ ID NO: 1562787
ccaugacugucuggacaca

SEQ ID NO: 1772816 - RNA, 19 nt, Artificial Sequence
  Description of Artificial Sequence: Synthetic oligonucleotide
  Antisense strand to SEQ ID NO: 1772815
uguguccagacagucaugg

SEQ ID NO: 1772817 - RNA, 19 nt, Artificial Sequence
  Description of Artificial Sequence: Synthetic oligonucleotide
  Sense strand starting at position 2898 of SEQ ID NO: 1562787
gcuucuggguggcauuuaa

SEQ ID NO: 1772818 - RNA, 19 nt, Artificial Sequence
  Description of Artificial Sequence: Synthetic oligonucleotide
  Antisense strand to SEQ ID NO: 1772817
uuaaaugccacccagaagc

SEQ ID NO: 1772819 - RNA, 19 nt, Artificial Sequence
  Description of Artificial Sequence: Synthetic oligonucleotide
  Sense strand starting at position 3013 of SEQ ID NO: 1562787
auuccuuucgguggacaga

SEQ ID NO: 1772820 - RNA, 19 nt, Artificial Sequence
  Description of Artificial Sequence: Synthetic oligonucleotide
  Antisense strand to SEQ ID NO: 1772819
ucuguccaccgaaaggaau

SEQ ID NO: 1772821 - RNA, 19 nt, Artificial Sequence
  Description of Artificial Sequence: Synthetic oligonucleotide
  Sense strand starting at position 3494 of SEQ ID NO: 1562787
cgcuucucagcugugugau

SEQ ID NO: 1772822 - RNA, 19 nt, Artificial Sequence
  Description of Artificial Sequence: Synthetic oligonucleotide
  Antisense strand to SEQ ID NO: 1772821
aucacacagcugagaagcg

SEQ ID NO: 1772823 - RNA, 19 nt, Artificial Sequence
  Description of Artificial Sequence: Synthetic oligonucleotide
  Sense strand starting at position 3495 of SEQ ID NO: 1562787
gcuucucagcugugugauc

SEQ ID NO: 1772824 - RNA, 19 nt, Artificial Sequence
  Description of Artificial Sequence: Synthetic oligonucleotide
  Antisense strand to SEQ ID NO: 1772823
gaucacacagcugagaagc

SEQ ID NO: 1772825 - RNA, 19 nt, Artificial Sequence
  Description of Artificial Sequence: Synthetic oligonucleotide
  Sense strand starting at position 3506 of SEQ ID NO: 1562787
gugugauccugggcauguu

SEQ ID NO: 1772826 - RNA, 19 nt, Artificial Sequence
  Description of Artificial Sequence: Synthetic oligonucleotide
  Antisense strand to SEQ ID NO: 1772825
aacaugcccaggaucacac

SEQ ID NO: 1772827 - RNA, 19 nt, Artificial Sequence
  Description of Artificial Sequence: Synthetic oligonucleotide
  Sense strand starting at position 3619 of SEQ ID NO: 1562787
aaaguauggguccgccaau

SEQ ID NO: 1772828 - RNA, 19 nt, Artificial Sequence
  Description of Artificial Sequence: Synthetic oligonucleotide
  Antisense strand to SEQ ID NO: 1772827
auuggcggacccauacuuu

SEQ ID NO: 1772829 - RNA, 19 nt, Artificial Sequence
  Description of Artificial Sequence: Synthetic oligonucleotide
  Sense strand starting at position 3638 of SEQ ID NO: 1562787
gacauuuacuccuugcgau

SEQ ID NO: 1772830 - RNA, 19 nt, Artificial Sequence
  Description of Artificial Sequence: Synthetic oligonucleotide
  Antisense strand to SEQ ID NO: 1772829
aucgcaaggaguaaauguc

SEQ ID NO: 1772831 - RNA, 19 nt, Artificial Sequence
  Description of Artificial Sequence: Synthetic oligonucleotide
  Sense strand starting at position 3639 of SEQ ID NO: 1562787
acauuuacuccuugcgauc

SEQ ID NO: 1772832 - RNA, 19 nt, Artificial Sequence
  Description of Artificial Sequence: Synthetic oligonucleotide
  Antisense strand to SEQ ID NO: 1772831
gaucgcaaggaguaaaugu

SEQ ID NO: 1772833 - RNA, 19 nt, Artificial Sequence
  Description of Artificial Sequence: Synthetic oligonucleotide
  Sense strand starting at position 3812 of SEQ ID NO: 1562787
gggucuuugccucagcaac

SEQ ID NO: 1772834 - RNA, 19 nt, Artificial Sequence
  Description of Artificial Sequence: Synthetic oligonucleotide
  Antisense strand to SEQ ID NO: 1772833
guugcugaggcaaagaccc

SEQ ID NO: 1772835 - RNA, 19 nt, Artificial Sequence
  Description of Artificial Sequence: Synthetic oligonucleotide
  Sense strand starting at position 3961 of SEQ ID NO: 1562787
ugguguuauggccaaacac

SEQ ID NO: 1772836 - RNA, 19 nt, Artificial Sequence
  Description of Artificial Sequence: Synthetic oligonucleotide
  Antisense strand to SEQ ID NO: 1772835
guguuuggccauaacacca

SEQ ID NO: 1772837 - RNA, 19 nt, Artificial Sequence
  Description of Artificial Sequence: Synthetic oligonucleotide
  Sense strand starting at position 63 of SEQ ID NO: 1562788
aggcuuagcuauggagaca

SEQ ID NO: 1772838 - RNA, 19 nt, Artificial Sequence
  Description of Artificial Sequence: Synthetic oligonucleotide
  Antisense strand to SEQ ID NO: 1772837
ugucuccauagcuaagccu

SEQ ID NO: 1772839 - RNA, 19 nt, Artificial Sequence
  Description of Artificial Sequence: Synthetic oligonucleotide
  Sense strand starting at position 134 of SEQ ID NO: 1562788
cugcccugccuccaugaaa

SEQ ID NO: 1772840 - RNA, 19 nt, Artificial Sequence
  Description of Artificial Sequence: Synthetic oligonucleotide
  Antisense strand to SEQ ID NO: 1772839
uuucauggaggcagggcag

SEQ ID NO: 1772841 - RNA, 19 nt, Artificial Sequence
  Description of Artificial Sequence: Synthetic oligonucleotide
  Sense strand starting at position 314 of SEQ ID NO: 1562788
ccucuugggcuauggguaa

SEQ ID NO: 1772842 - RNA, 19 nt, Artificial Sequence
  Description of Artificial Sequence: Synthetic oligonucleotide
  Antisense strand to SEQ ID NO: 1772841
uuacccauagcccaagagg

SEQ ID NO: 1772843 - RNA, 19 nt, Artificial Sequence
  Description of Artificial Sequence: Synthetic oligonucleotide
  Sense strand starting at position 416 of SEQ ID NO: 1562788
gugggaugugccuacuuac

SEQ ID NO: 1772844 - RNA, 19 nt, Artificial Sequence
  Description of Artificial Sequence: Synthetic oligonucleotide
  Antisense strand to SEQ ID NO: 1772843
guaaguaggcacaucccac

SEQ ID NO: 1772845 - RNA, 19 nt, Artificial Sequence
  Description of Artificial Sequence: Synthetic oligonucleotide
  Sense strand starting at position 419 of SEQ ID NO: 1562788
ggaugugccuacuuacaau

SEQ ID NO: 1772846 - RNA, 19 nt, Artificial Sequence
  Description of Artificial Sequence: Synthetic oligonucleotide
  Antisense strand to SEQ ID NO: 1772845
auuguaaguaggcacaucc

SEQ ID NO: 1772847 - RNA, 19 nt, Artificial Sequence
  Description of Artificial Sequence: Synthetic oligonucleotide
  Sense strand starting at position 2072 of SEQ ID NO: 1562788
gucagugucuggguugaag

SEQ ID NO: 1772848 - RNA, 19 nt, Artificial Sequence
  Description of Artificial Sequence: Synthetic oligonucleotide
  Antisense strand to SEQ ID NO: 1772847
cuucaacccagacacugac

SEQ ID NO: 1772849 - RNA, 19 nt, Artificial Sequence
  Description of Artificial Sequence: Synthetic oligonucleotide
  Sense strand starting at position 2084 of SEQ ID NO: 1562788
guugaagcagaaugguuua

SEQ ID NO: 1772850 - RNA, 19 nt, Artificial Sequence
  Description of Artificial Sequence: Synthetic oligonucleotide
  Antisense strand to SEQ ID NO: 1772849
uaaaccauucugcuucaac

SEQ ID NO: 1772851 - RNA, 19 nt, Artificial Sequence
  Description of Artificial Sequence: Synthetic oligonucleotide
  Sense strand starting at position 2091 of SEQ ID NO: 1562788
cagaaugguuuagagaaau

SEQ ID NO: 1772852 - RNA, 19 nt, Artificial Sequence
  Description of Artificial Sequence: Synthetic oligonucleotide
  Antisense strand to SEQ ID NO: 1772851
auuucucuaaaccauucug

SEQ ID NO: 1772853 - RNA, 19 nt, Artificial Sequence
  Description of Artificial Sequence: Synthetic oligonucleotide
  Sense strand starting at position 2190 of SEQ ID NO: 1562788
gucucugagcucuggacga

SEQ ID NO: 1772854 - RNA, 19 nt, Artificial Sequence
  Description of Artificial Sequence: Synthetic oligonucleotide
  Antisense strand to SEQ ID NO: 1772853
ucguccagagcucagagac

SEQ ID NO: 1772855 - RNA, 19 nt, Artificial Sequence
  Description of Artificial Sequence: Synthetic oligonucleotide
  Sense strand starting at position 2332 of SEQ ID NO: 1562788
agcagugaucucugcuaca

SEQ ID NO: 1772856 - RNA, 19 nt, Artificial Sequence
  Description of Artificial Sequence: Synthetic oligonucleotide
  Antisense strand to SEQ ID NO: 1772855
uguagcagagaucacugcu

SEQ ID NO: 1772857 - RNA, 19 nt, Artificial Sequence
  Description of Artificial Sequence: Synthetic oligonucleotide
  Sense strand starting at position 2335 of SEQ ID NO: 1562788
agugaucucugcuacacag

SEQ ID NO: 1772858 - RNA, 19 nt, Artificial Sequence
  Description of Artificial Sequence: Synthetic oligonucleotide
  Antisense strand to SEQ ID NO: 1772857
cuguguagcagagaucacu

SEQ ID NO: 1772859 - RNA, 19 nt, Artificial Sequence
  Description of Artificial Sequence: Synthetic oligonucleotide
  Sense strand starting at position 2337 of SEQ ID NO: 1562788
ugaucucugcuacacagau

SEQ ID NO: 1772860 - RNA, 19 nt, Artificial Sequence
  Description of Artificial Sequence: Synthetic oligonucleotide
  Antisense strand to SEQ ID NO: 1772859
aucuguguagcagagauca

SEQ ID NO: 1772861 - RNA, 19 nt, Artificial Sequence
  Description of Artificial Sequence: Synthetic oligonucleotide
  Sense strand starting at position 2407 of SEQ ID NO: 1562788
aggcgaagucaggacuuaa

SEQ ID NO: 1772862 - RNA, 19 nt, Artificial Sequence
  Description of Artificial Sequence: Synthetic oligonucleotide
  Antisense strand to SEQ ID NO: 1772861
uuaaguccugacuucgccu

SEQ ID NO: 1772863 - RNA, 19 nt, Artificial Sequence
  Description of Artificial Sequence: Synthetic oligonucleotide
  Sense strand starting at position 2481 of SEQ ID NO: 1562788
gugggagcguccucacauu

SEQ ID NO: 1772864 - RNA, 19 nt, Artificial Sequence
  Description of Artificial Sequence: Synthetic oligonucleotide
  Antisense strand to SEQ ID NO: 1772863
aaugugaggacgcucccac

SEQ ID NO: 1772865 - RNA, 19 nt, Artificial Sequence
  Description of Artificial Sequence: Synthetic oligonucleotide
  Sense strand starting at position 2550 of SEQ ID NO: 1562788
aggugauccuaaucacaag

SEQ ID NO: 1772866 - RNA, 19 nt, Artificial Sequence
  Description of Artificial Sequence: Synthetic oligonucleotide
  Antisense strand to SEQ ID NO: 1772865
cuugugauuaggaucaccu

SEQ ID NO: 1772867 - RNA, 19 nt, Artificial Sequence
  Description of Artificial Sequence: Synthetic oligonucleotide
  Sense strand starting at position 2559 of SEQ ID NO: 1562788
uaaucacaagugugugcua

SEQ ID NO: 1772868 - RNA, 19 nt, Artificial Sequence
  Description of Artificial Sequence: Synthetic oligonucleotide
  Antisense strand to SEQ ID NO: 1772867
uagcacacacuugugauua

SEQ ID NO: 1772869 - RNA, 19 nt, Artificial Sequence
  Description of Artificial Sequence: Synthetic oligonucleotide
  Sense strand starting at position 2649 of SEQ ID NO: 1562788
gcacaaagcugguuaguga

SEQ ID NO: 1772870 - RNA, 19 nt, Artificial Sequence
  Description of Artificial Sequence: Synthetic oligonucleotide
  Antisense strand to SEQ ID NO: 1772869
ucacuaaccagcuuugugc

SEQ ID NO: 1772871 - RNA, 19 nt, Artificial Sequence
  Description of Artificial Sequence: Synthetic oligonucleotide
  Sense strand starting at position 2656 of SEQ ID NO: 1562788
gcugguuagugaccuugga

SEQ ID NO: 1772872 - RNA, 19 nt, Artificial Sequence
  Description of Artificial Sequence: Synthetic oligonucleotide
  Antisense strand to SEQ ID NO: 1772871
uccaaggucacuaaccagc

SEQ ID NO: 1772873 - RNA, 19 nt, Artificial Sequence
  Description of Artificial Sequence: Synthetic oligonucleotide
  Sense strand starting at position 2799 of SEQ ID NO: 1562788
auuuguuugcuuugugguu

SEQ ID NO: 1772874 - RNA, 19 nt, Artificial Sequence
  Description of Artificial Sequence: Synthetic oligonucleotide
  Antisense strand to SEQ ID NO: 1772873
aaccacaaagcaaacaaau

SEQ ID NO: 1772875 - RNA, 19 nt, Artificial Sequence
  Description of Artificial Sequence: Synthetic oligonucleotide
  Sense strand starting at position 2825 of SEQ ID NO: 1562788
guugaacacgcauauuaug

SEQ ID NO: 1772876 - RNA, 19 nt, Artificial Sequence
  Description of Artificial Sequence: Synthetic oligonucleotide
  Antisense strand to SEQ ID NO: 1772875
cauaauaugcguguucaac

SEQ ID NO: 1772877 - RNA, 19 nt, Artificial Sequence
  Description of Artificial Sequence: Synthetic oligonucleotide
  Sense strand starting at position 2889 of SEQ ID NO: 1562788
gaggucuucccaugaguga

SEQ ID NO: 1772878 - RNA, 19 nt, Artificial Sequence
  Description of Artificial Sequence: Synthetic oligonucleotide
  Antisense strand to SEQ ID NO: 1772877
ucacucaugggaagaccuc

SEQ ID NO: 1772879 - RNA, 19 nt, Artificial Sequence
  Description of Artificial Sequence: Synthetic oligonucleotide
  Sense strand starting at position 2892 of SEQ ID NO: 1562788
gucuucccaugagugagau

SEQ ID NO: 1772880 - RNA, 19 nt, Artificial Sequence
  Description of Artificial Sequence: Synthetic oligonucleotide
  Antisense strand to SEQ ID NO: 1772879
aucucacucaugggaagac

SEQ ID NO: 1772881 - RNA, 19 nt, Artificial Sequence
  Description of Artificial Sequence: Synthetic oligonucleotide
  Sense strand starting at position 2902 of SEQ ID NO: 1562788
gagugagaucucgagcuau

SEQ ID NO: 1772882 - RNA, 19 nt, Artificial Sequence
  Description of Artificial Sequence: Synthetic oligonucleotide
  Antisense strand to SEQ ID NO: 1772881
auagcucgagaucucacuc

SEQ ID NO: 1772883 - RNA, 19 nt, Artificial Sequence
  Description of Artificial Sequence: Synthetic oligonucleotide
  Sense strand starting at position 2913 of SEQ ID NO: 1562788
cgagcuaugccacaugcuu

SEQ ID NO: 1772884 - RNA, 19 nt, Artificial Sequence
  Description of Artificial Sequence: Synthetic oligonucleotide
  Antisense strand to SEQ ID NO: 1772883
aagcauguggcauagcucg

SEQ ID NO: 1772885 - RNA, 19 nt, Artificial Sequence
  Description of Artificial Sequence: Synthetic oligonucleotide
  Sense strand starting at position 2921 of SEQ ID NO: 1562788
gccacaugcuucuuguguu

SEQ ID NO: 1772886 - RNA, 19 nt, Artificial Sequence
  Description of Artificial Sequence: Synthetic oligonucleotide
  Antisense strand to SEQ ID NO: 1772885
aacacaagaagcauguggc

SEQ ID NO: 1772887 - RNA, 19 nt, Artificial Sequence
  Description of Artificial Sequence: Synthetic oligonucleotide
  Sense strand starting at position 3062 of SEQ ID NO: 1562788
gggaccuccucucucauua

SEQ ID NO: 1772888 - RNA, 19 nt, Artificial Sequence
  Description of Artificial Sequence: Synthetic oligonucleotide
  Antisense strand to SEQ ID NO: 1772887
uaaugagagaggagguccc

SEQ ID NO: 1772889 - RNA, 19 nt, Artificial Sequence
  Description of Artificial Sequence: Synthetic oligonucleotide
  Sense strand starting at position 3111 of SEQ ID NO: 1562788
aaggaaugaucguuaucuc

SEQ ID NO: 1772890 - RNA, 19 nt, Artificial Sequence
  Description of Artificial Sequence: Synthetic oligonucleotide
  Antisense strand to SEQ ID NO: 1772889
gagauaacgaucauuccuu

SEQ ID NO: 1772891 - RNA, 19 nt, Artificial Sequence
  Description of Artificial Sequence: Synthetic oligonucleotide
  Sense strand starting at position 3114 of SEQ ID NO: 1562788
gaaugaucguuaucucccu

SEQ ID NO: 1772892 - RNA, 19 nt, Artificial Sequence
  Description of Artificial Sequence: Synthetic oligonucleotide
  Antisense strand to SEQ ID NO: 1772891
agggagauaacgaucauuc

SEQ ID NO: 1772893 - RNA, 19 nt, Artificial Sequence
  Description of Artificial Sequence: Synthetic oligonucleotide
  Sense strand starting at position 3123 of SEQ ID NO: 1562788
uuaucucccucauggagau

SEQ ID NO: 1772894 - RNA, 19 nt, Artificial Sequence
  Description of Artificial Sequence: Synthetic oligonucleotide
  Antisense strand to SEQ ID NO: 1772893
aucuccaugagggagauaa

SEQ ID NO: 1772895 - RNA, 19 nt, Artificial Sequence
  Description of Artificial Sequence: Synthetic oligonucleotide
  Sense strand starting at position 3156 of SEQ ID NO: 1562788
cagagaggucgccagacuu

SEQ ID NO: 1772896 - RNA, 19 nt, Artificial Sequence
  Description of Artificial Sequence: Synthetic oligonucleotide
  Antisense strand to SEQ ID NO: 1772895
aagucuggcgaccucucug

SEQ ID NO: 1772897 - RNA, 19 nt, Artificial Sequence
  Description of Artificial Sequence: Synthetic oligonucleotide
  Sense strand starting at position 3166 of SEQ ID NO: 1562788
gccagacuugccuacgauc

SEQ ID NO: 1772898 - RNA, 19 nt, Artificial Sequence
  Description of Artificial Sequence: Synthetic oligonucleotide
  Antisense strand to SEQ ID NO: 1772897
gaucguaggcaagucuggc

SEQ ID NO: 1772899 - RNA, 19 nt, Artificial Sequence
  Description of Artificial Sequence: Synthetic oligonucleotide
  Sense strand starting at position 3585 of SEQ ID NO: 1562788
guaaguugcuguucucgau

SEQ ID NO: 1772900 - RNA, 19 nt, Artificial Sequence
  Description of Artificial Sequence: Synthetic oligonucleotide
  Antisense strand to SEQ ID NO: 1772899
aucgagaacagcaacuuac

SEQ ID NO: 1772901 - RNA, 19 nt, Artificial Sequence
  Description of Artificial Sequence: Synthetic oligonucleotide
  Sense strand starting at position 3822 of SEQ ID NO: 1562788
gcucgauggugcuaacaga

SEQ ID NO: 1772902 - RNA, 19 nt, Artificial Sequence
  Description of Artificial Sequence: Synthetic oligonucleotide
  Antisense strand to SEQ ID NO: 1772901
ucuguuagcaccaucgagc

SEQ ID NO: 1772903 - RNA, 19 nt, Artificial Sequence
  Description of Artificial Sequence: Synthetic oligonucleotide
  Sense strand starting at position 3866 of SEQ ID NO: 1562788
cugucuagacacgguuaga

SEQ ID NO: 1772904 - RNA, 19 nt, Artificial Sequence
  Description of Artificial Sequence: Synthetic oligonucleotide
  Antisense strand to SEQ ID NO: 1772903
ucuaaccgugucuagacag

SEQ ID NO: 1772905 - RNA, 19 nt, Artificial Sequence
  Description of Artificial Sequence: Synthetic oligonucleotide
  Sense strand starting at position 3875 of SEQ ID NO: 1562788
cacgguuagagguagaaug

SEQ ID NO: 1772906 - RNA, 19 nt, Artificial Sequence
  Description of Artificial Sequence: Synthetic oligonucleotide
  Antisense strand to SEQ ID NO: 1772905
cauucuaccucuaaccgug

SEQ ID NO: 1772907 - RNA, 19 nt, Artificial Sequence
  Description of Artificial Sequence: Synthetic oligonucleotide
  Sense strand starting at position 3895 of SEQ ID NO: 1562788
agggacagauaugaagaau

SEQ ID NO: 1772908 - RNA, 19 nt, Artificial Sequence
  Description of Artificial Sequence: Synthetic oligonucleotide
  Antisense strand to SEQ ID NO: 1772907
auucuucauaucugucccu

SEQ ID NO: 1772909 - RNA, 19 nt, Artificial Sequence
  Description of Artificial Sequence: Synthetic oligonucleotide
  Sense strand starting at position 3906 of SEQ ID NO: 1562788
ugaagaaucugagaauugg

SEQ ID NO: 1772910 - RNA, 19 nt, Artificial Sequence
  Description of Artificial Sequence: Synthetic oligonucleotide
  Antisense strand to SEQ ID NO: 1772909
ccaauucucagauucuuca

SEQ ID NO: 1772911 - RNA, 19 nt, Artificial Sequence
  Description of Artificial Sequence: Synthetic oligonucleotide
  Sense strand starting at position 3912 of SEQ ID NO: 1562788
aucugagaauuggagaauu

SEQ ID NO: 1772912 - RNA, 19 nt, Artificial Sequence
  Description of Artificial Sequence: Synthetic oligonucleotide
  Antisense strand to SEQ ID NO: 1772911
aauucuccaauucucagau

SEQ ID NO: 1772913 - RNA, 19 nt, Artificial Sequence
  Description of Artificial Sequence: Synthetic oligonucleotide
  Sense strand starting at position 3948 of SEQ ID NO: 1562788
caaccagaguucuaaggcu

SEQ ID NO: 1772914 - RNA, 19 nt, Artificial Sequence
  Description of Artificial Sequence: Synthetic oligonucleotide
  Antisense strand to SEQ ID NO: 1772913
agccuuagaacucugguug

SEQ ID NO: 1772915 - RNA, 19 nt, Artificial Sequence
  Description of Artificial Sequence: Synthetic oligonucleotide
  Sense strand starting at position 3956 of SEQ ID NO: 1562788
guucuaaggcuccagaauc

SEQ ID NO: 1772916 - RNA, 19 nt, Artificial Sequence
  Description of Artificial Sequence: Synthetic oligonucleotide
  Antisense strand to SEQ ID NO: 1772915
gauucuggagccuuagaac

SEQ ID NO: 1772917 - RNA, 19 nt, Artificial Sequence
  Description of Artificial Sequence: Synthetic oligonucleotide
  Sense strand starting at position 2430 of SEQ ID NO: 1562789
acggaaggauccuggguaa

SEQ ID NO: 1772918 - RNA, 19 nt, Artificial Sequence
  Description of Artificial Sequence: Synthetic oligonucleotide
  Antisense strand to SEQ ID NO: 1772917
uuacccaggauccuuccgu

SEQ ID NO: 1772919 - RNA, 19 nt, Artificial Sequence
  Description of Artificial Sequence: Synthetic oligonucleotide
  Sense strand starting at position 2433 of SEQ ID NO: 1562789
gaaggauccuggguaaccu

SEQ ID NO: 1772920 - RNA, 19 nt, Artificial Sequence
  Description of Artificial Sequence: Synthetic oligonucleotide
  Antisense strand to SEQ ID NO: 1772919
agguuacccaggauccuuc

SEQ ID NO: 1772921 - RNA, 19 nt, Artificial Sequence
  Description of Artificial Sequence: Synthetic oligonucleotide
  Sense strand starting at position 2638 of SEQ ID NO: 1562789
gacuguuaucucgggagcu

SEQ ID NO: 1772922 - RNA, 19 nt, Artificial Sequence
  Description of Artificial Sequence: Synthetic oligonucleotide
  Antisense strand to SEQ ID NO: 1772921
agcucccgagauaacaguc

SEQ ID NO: 1772923 - RNA, 19 nt, Artificial Sequence
  Description of Artificial Sequence: Synthetic oligonucleotide
  Sense strand starting at position 2639 of SEQ ID NO: 1562789
acuguuaucucgggagcug

SEQ ID NO: 1772924 - RNA, 19 nt, Artificial Sequence
  Description of Artificial Sequence: Synthetic oligonucleotide
  Antisense strand to SEQ ID NO: 1772923
cagcucccgagauaacagu

SEQ ID NO: 1772925 - RNA, 19 nt, Artificial Sequence
  Description of Artificial Sequence: Synthetic oligonucleotide
  Sense strand starting at position 2640 of SEQ ID NO: 1562789
cuguuaucucgggagcugu

SEQ ID NO: 1772926 - RNA, 19 nt, Artificial Sequence
  Description of Artificial Sequence: Synthetic oligonucleotide
  Antisense strand to SEQ ID NO: 1772925
acagcucccgagauaacag

SEQ ID NO: 1772927 - RNA, 19 nt, Artificial Sequence
  Description of Artificial Sequence: Synthetic oligonucleotide
  Sense strand starting at position 3724 of SEQ ID NO: 1562789
agucauugucacuguccca

SEQ ID NO: 1772928 - RNA, 19 nt, Artificial Sequence
  Description of Artificial Sequence: Synthetic oligonucleotide
  Antisense strand to SEQ ID NO: 1772927
ugggacagugacaaugacu

SEQ ID NO: 1772929 - RNA, 19 nt, Artificial Sequence
  Description of Artificial Sequence: Synthetic oligonucleotide
  Sense strand starting at position 3789 of SEQ ID NO: 1562789
augguucagggcugcaaua

SEQ ID NO: 1772930 - RNA, 19 nt, Artificial Sequence
  Description of Artificial Sequence: Synthetic oligonucleotide
  Antisense strand to SEQ ID NO: 1772929
uauugcagcccugaaccau

SEQ ID NO: 1772931 - RNA, 19 nt, Artificial Sequence
  Description of Artificial Sequence: Synthetic oligonucleotide
  Sense strand starting at position 3791 of SEQ ID NO: 1562789
gguucagggcugcaauaga

SEQ ID NO: 1772932 - RNA, 19 nt, Artificial Sequence
  Description of Artificial Sequence: Synthetic oligonucleotide
  Antisense strand to SEQ ID NO: 1772931
ucuauugcagcccugaacc

SEQ ID NO: 1772933 - RNA, 19 nt, Artificial Sequence
  Description of Artificial Sequence: Synthetic oligonucleotide
  Sense strand starting at position 299 of SEQ ID NO: 1562790
gcaauauagcgcgacccuu

SEQ ID NO: 1772934 - RNA, 19 nt, Artificial Sequence
  Description of Artificial Sequence: Synthetic oligonucleotide
  Antisense strand to SEQ ID NO: 1772933
aagggucgcgcuauauugc

SEQ ID NO: 1772935 - RNA, 19 nt, Artificial Sequence
  Description of Artificial Sequence: Synthetic oligonucleotide
  Sense strand starting at position 309 of SEQ ID NO: 1562790
gcgacccuuucucuacaaa

SEQ ID NO: 1772936 - RNA, 19 nt, Artificial Sequence
  Description of Artificial Sequence: Synthetic oligonucleotide
  Antisense strand to SEQ ID NO: 1772935
uuuguagagaaagggucgc

SEQ ID NO: 1772937 - RNA, 19 nt, Artificial Sequence
  Description of Artificial Sequence: Synthetic oligonucleotide
  Sense strand starting at position 841 of SEQ ID NO: 1562790
uuuguacuguucgaaguuu

SEQ ID NO: 1772938 - RNA, 19 nt, Artificial Sequence
  Description of Artificial Sequence: Synthetic oligonucleotide
  Antisense strand to SEQ ID NO: 1772937
aaacuucgaacaguacaaa

SEQ ID NO: 1772939 - RNA, 19 nt, Artificial Sequence
  Description of Artificial Sequence: Synthetic oligonucleotide
  Sense strand starting at position 876 of SEQ ID NO: 1562790
ggaagcuuaaugugccaca

SEQ ID NO: 1772940 - RNA, 19 nt, Artificial Sequence
  Description of Artificial Sequence: Synthetic oligonucleotide
  Antisense strand to SEQ ID NO: 1772939
uguggcacauuaagcuucc

SEQ ID NO: 1772941 - RNA, 19 nt, Artificial Sequence
  Description of Artificial Sequence: Synthetic oligonucleotide
  Sense strand starting at position 930 of SEQ ID NO: 1562790
ugaagugauggauggcaga

SEQ ID NO: 1772942 - RNA, 19 nt, Artificial Sequence
  Description of Artificial Sequence: Synthetic oligonucleotide
  Antisense strand to SEQ ID NO: 1772941
ucugccauccaucacuuca

SEQ ID NO: 1772943 - RNA, 19 nt, Artificial Sequence
  Description of Artificial Sequence: Synthetic oligonucleotide
  Sense strand starting at position 969 of SEQ ID NO: 1562790
acuuucaguucgguacgau

SEQ ID NO: 1772944 - RNA, 19 nt, Artificial Sequence
  Description of Artificial Sequence: Synthetic oligonucleotide
  Antisense strand to SEQ ID NO: 1772943
aucguaccgaacugaaagu

SEQ ID NO: 1772945 - RNA, 19 nt, Artificial Sequence
  Description of Artificial Sequence: Synthetic oligonucleotide
  Sense strand starting at position 970 of SEQ ID NO: 1562790
cuuucaguucgguacgauu

SEQ ID NO: 1772946 - RNA, 19 nt, Artificial Sequence
  Description of Artificial Sequence: Synthetic oligonucleotide
  Antisense strand to SEQ ID NO: 1772945
aaucguaccgaacugaaag

SEQ ID NO: 1772947 - RNA, 19 nt, Artificial Sequence
  Description of Artificial Sequence: Synthetic oligonucleotide
  Sense strand starting at position 995 of SEQ ID NO: 1562790
aguagauacccucagccuu

SEQ ID NO: 1772948 - RNA, 19 nt, Artificial Sequence
  Description of Artificial Sequence: Synthetic oligonucleotide
  Antisense strand to SEQ ID NO: 1772947
aaggcugaggguaucuacu

SEQ ID NO: 1772949 - RNA, 19 nt, Artificial Sequence
  Description of Artificial Sequence: Synthetic oligonucleotide
  Sense strand starting at position 1052 of SEQ ID NO: 1562790
acucaauccuuggcagcau

SEQ ID NO: 1772950 - RNA, 19 nt, Artificial Sequence
  Description of Artificial Sequence: Synthetic oligonucleotide
  Antisense strand to SEQ ID NO: 1772949
augcugccaaggauugagu

SEQ ID NO: 1772951 - RNA, 19 nt, Artificial Sequence
  Description of Artificial Sequence: Synthetic oligonucleotide
  Sense strand starting at position 1157 of SEQ ID NO: 1562790
aagggugcgcucuggaaga

SEQ ID NO: 1772952 - RNA, 19 nt, Artificial Sequence
  Description of Artificial Sequence: Synthetic oligonucleotide
  Antisense strand to SEQ ID NO: 1772951
ucuuccagagcgcacccuu

SEQ ID NO: 1772953 - RNA, 19 nt, Artificial Sequence
  Description of Artificial Sequence: Synthetic oligonucleotide
  Sense strand starting at position 1159 of SEQ ID NO: 1562790
gggugcgcucuggaagaau

SEQ ID NO: 1772954 - RNA, 19 nt, Artificial Sequence
  Description of Artificial Sequence: Synthetic oligonucleotide
  Antisense strand to SEQ ID NO: 1772953
auucuuccagagcgcaccc

SEQ ID NO: 1772955 - RNA, 19 nt, Artificial Sequence
  Description of Artificial Sequence: Synthetic oligonucleotide
  Sense strand starting at position 1170 of SEQ ID NO: 1562790
ggaagaaucucccagggag

SEQ ID NO: 1772956 - RNA, 19 nt, Artificial Sequence
  Description of Artificial Sequence: Synthetic oligonucleotide
  Antisense strand to SEQ ID NO: 1772955
cucccugggagauucuucc

SEQ ID NO: 1772957 - RNA, 19 nt, Artificial Sequence
  Description of Artificial Sequence: Synthetic oligonucleotide
  Sense strand starting at position 2209 of SEQ ID NO: 1562790
gagcgaauuugccgagagu

SEQ ID NO: 1772958 - RNA, 19 nt, Artificial Sequence
  Description of Artificial Sequence: Synthetic oligonucleotide
  Antisense strand to SEQ ID NO: 1772957
acucucggcaaauucgcuc

SEQ ID NO: 1772959 - RNA, 19 nt, Artificial Sequence
  Description of Artificial Sequence: Synthetic oligonucleotide
  Sense strand starting at position 2210 of SEQ ID NO: 1562790
agcgaauuugccgagaguc

SEQ ID NO: 1772960 - RNA, 19 nt, Artificial Sequence
  Description of Artificial Sequence: Synthetic oligonucleotide
  Antisense strand to SEQ ID NO: 1772959
gacucucggcaaauucgcu

SEQ ID NO: 1772961 - RNA, 19 nt, Artificial Sequence
  Description of Artificial Sequence: Synthetic oligonucleotide
  Sense strand starting at position 2234 of SEQ ID NO: 1562790
gucugaauccauugacucu

SEQ ID NO: 1772962 - RNA, 19 nt, Artificial Sequence
  Description of Artificial Sequence: Synthetic oligonucleotide
  Antisense strand to SEQ ID NO: 1772961
agagucaauggauucagac

SEQ ID NO: 1772963 - RNA, 19 nt, Artificial Sequence
  Description of Artificial Sequence: Synthetic oligonucleotide
  Sense strand starting at position 2813 of SEQ ID NO: 1562790
uugugugcccguuccuuua

SEQ ID NO: 1772964 - RNA, 19 nt, Artificial Sequence
  Description of Artificial Sequence: Synthetic oligonucleotide
  Antisense strand to SEQ ID NO: 1772963
uaaaggaacgggcacacaa

SEQ ID NO: 1772965 - RNA, 19 nt, Artificial Sequence
  Description of Artificial Sequence: Synthetic oligonucleotide
  Sense strand starting at position 2820 of SEQ ID NO: 1562790
cccguuccuuuacugagau

SEQ ID NO: 1772966 - RNA, 19 nt, Artificial Sequence
  Description of Artificial Sequence: Synthetic oligonucleotide
  Antisense strand to SEQ ID NO: 1772965
aucucaguaaaggaacggg

SEQ ID NO: 1772967 - RNA, 19 nt, Artificial Sequence
  Description of Artificial Sequence: Synthetic oligonucleotide
  Sense strand starting at position 2821 of SEQ ID NO: 1562790
ccguuccuuuacugagauu

SEQ ID NO: 1772968 - RNA, 19 nt, Artificial Sequence
  Description of Artificial Sequence: Synthetic oligonucleotide
  Antisense strand to SEQ ID NO: 1772967
aaucucaguaaaggaacgg

SEQ ID NO: 1772969 - RNA, 19 nt, Artificial Sequence
  Description of Artificial Sequence: Synthetic oligonucleotide
  Sense strand starting at position 2947 of SEQ ID NO: 1562790
aggcguauccguaauggcu

SEQ ID NO: 1772970 - RNA, 19 nt, Artificial Sequence
  Description of Artificial Sequence: Synthetic oligonucleotide
  Antisense strand to SEQ ID NO: 1772969
agccauuacggauacgccu

SEQ ID NO: 1772971 - RNA, 19 nt, Artificial Sequence
  Description of Artificial Sequence: Synthetic oligonucleotide
  Sense strand starting at position 2987 of SEQ ID NO: 1562790
agagccuccugaugggaua

SEQ ID NO: 1772972 - RNA, 19 nt, Artificial Sequence
  Description of Artificial Sequence: Synthetic oligonucleotide
  Antisense strand to SEQ ID NO: 1772971
uaucccaucaggaggcucu

SEQ ID NO: 1772973 - RNA, 19 nt, Artificial Sequence
  Description of Artificial Sequence: Synthetic oligonucleotide
  Sense strand starting at position 2988 of SEQ ID NO: 1562790
gagccuccugaugggauaa

SEQ ID NO: 1772974 - RNA, 19 nt, Artificial Sequence
  Description of Artificial Sequence: Synthetic oligonucleotide
  Antisense strand to SEQ ID NO: 1772973
uuaucccaucaggaggcuc

SEQ ID NO: 1772975 - RNA, 19 nt, Artificial Sequence
  Description of Artificial Sequence: Synthetic oligonucleotide
  Sense strand starting at position 3069 of SEQ ID NO: 1562790
ggaggauguggcuggagau

SEQ ID NO: 1772976 - RNA, 19 nt, Artificial Sequence
  Description of Artificial Sequence: Synthetic oligonucleotide
  Antisense strand to SEQ ID NO: 1772975
aucuccagccacauccucc

SEQ ID NO: 1772977 - RNA, 19 nt, Artificial Sequence
  Description of Artificial Sequence: Synthetic oligonucleotide
  Sense strand starting at position 3082 of SEQ ID NO: 1562790
ggagauggcucaugguuaa

SEQ ID NO: 1772978 - RNA, 19 nt, Artificial Sequence
  Description of Artificial Sequence: Synthetic oligonucleotide
  Antisense strand to SEQ ID NO: 1772977
uuaaccaugagccaucucc

SEQ ID NO: 1772979 - RNA, 19 nt, Artificial Sequence
  Description of Artificial Sequence: Synthetic oligonucleotide
  Sense strand starting at position 3468 of SEQ ID NO: 1562790
gagaauugcuguccuggcu

SEQ ID NO: 1772980 - RNA, 19 nt, Artificial Sequence
  Description of Artificial Sequence: Synthetic oligonucleotide
  Antisense strand to SEQ ID NO: 1772979
agccaggacagcaauucuc

SEQ ID NO: 1772981 - RNA, 19 nt, Artificial Sequence
  Description of Artificial Sequence: Synthetic oligonucleotide
  Sense strand starting at position 3552 of SEQ ID NO: 1562790
agagguuccaaaugggagu

SEQ ID NO: 1772982 - RNA, 19 nt, Artificial Sequence
  Description of Artificial Sequence: Synthetic oligonucleotide
  Antisense strand to SEQ ID NO: 1772981
acucccauuuggaaccucu

SEQ ID NO: 1772983 - RNA, 19 nt, Artificial Sequence
  Description of Artificial Sequence: Synthetic oligonucleotide
  Sense strand starting at position 3570 of SEQ ID NO: 1562790
ugggcuuccuccuagaaag

SEQ ID NO: 1772984 - RNA, 19 nt, Artificial Sequence
  Description of Artificial Sequence: Synthetic oligonucleotide
  Antisense strand to SEQ ID NO: 1772983
cuuucuaggaggaagccca

SEQ ID NO: 1772985 - RNA, 19 nt, Artificial Sequence
  Description of Artificial Sequence: Synthetic oligonucleotide
  Sense strand starting at position 3624 of SEQ ID NO: 1562790
ggaggacuuugggauuaag

SEQ ID NO: 1772986 - RNA, 19 nt, Artificial Sequence
  Description of Artificial Sequence: Synthetic oligonucleotide
  Antisense strand to SEQ ID NO: 1772985
cuuaaucccaaaguccucc

SEQ ID NO: 1772987 - RNA, 19 nt, Artificial Sequence
  Description of Artificial Sequence: Synthetic oligonucleotide
  Sense strand starting at position 3811 of SEQ ID NO: 1562790
ggcagaugccaauauggua

SEQ ID NO: 1772988 - RNA, 19 nt, Artificial Sequence
  Description of Artificial Sequence: Synthetic oligonucleotide
  Antisense strand to SEQ ID NO: 1772987
uaccauauuggcaucugcc

SEQ ID NO: 1772989 - RNA, 19 nt, Artificial Sequence
  Description of Artificial Sequence: Synthetic oligonucleotide
  Sense strand starting at position 3905 of SEQ ID NO: 1562790
cuagaaaccugggaaggaa

SEQ ID NO: 1772990 - RNA, 19 nt, Artificial Sequence
  Description of Artificial Sequence: Synthetic oligonucleotide
  Antisense strand to SEQ ID NO: 1772989
uuccuucccagguuucuag

SEQ ID NO: 1772991 - RNA, 19 nt, Artificial Sequence
  Description of Artificial Sequence: Synthetic oligonucleotide
  Sense strand starting at position 3933 of SEQ ID NO: 1562790
ccaguauaagcccagugau

SEQ ID NO: 1772992 - RNA, 19 nt, Artificial Sequence
  Description of Artificial Sequence: Synthetic oligonucleotide
  Antisense strand to SEQ ID NO: 1772991
aucacugggcuuauacugg

SEQ ID NO: 1772993 - RNA, 19 nt, Artificial Sequence
  Description of Artificial Sequence: Synthetic oligonucleotide
  Sense strand starting at position 3936 of SEQ ID NO: 1562790
guauaagcccagugaugug

SEQ ID NO: 1772994 - RNA, 19 nt, Artificial Sequence
  Description of Artificial Sequence: Synthetic oligonucleotide
  Antisense strand to SEQ ID NO: 1772993
cacaucacugggcuuauac

SEQ ID NO: 1772995 - RNA, 19 nt, Artificial Sequence
  Description of Artificial Sequence: Synthetic oligonucleotide
  Sense strand starting at position 3941 of SEQ ID NO: 1562790
agcccagugaugugugaag

SEQ ID NO: 1772996 - RNA, 19 nt, Artificial Sequence
  Description of Artificial Sequence: Synthetic oligonucleotide
  Antisense strand to SEQ ID NO: 1772995
cuucacacaucacugggcu

SEQ ID NO: 1772997 - RNA, 19 nt, Artificial Sequence
  Description of Artificial Sequence: Synthetic oligonucleotide
  Sense strand starting at position 3943 of SEQ ID NO: 1562790
cccagugaugugugaagaa

SEQ ID NO: 1772998 - RNA, 19 nt, Artificial Sequence
  Description of Artificial Sequence: Synthetic oligonucleotide
  Antisense strand to SEQ ID NO: 1772997
uucuucacacaucacuggg

SEQ ID NO: 1772999 - RNA, 19 nt, Artificial Sequence
  Description of Artificial Sequence: Synthetic oligonucleotide
  Sense strand starting at position 59 of SEQ ID NO: 1562791
agaaaugaaucagaccgaa

SEQ ID NO: 1773000 - RNA, 19 nt, Artificial Sequence
  Description of Artificial Sequence: Synthetic oligonucleotide
  Antisense strand to SEQ ID NO: 1772999
uucggucugauucauuucu

SEQ ID NO: 1773001 - RNA, 19 nt, Artificial Sequence
  Description of Artificial Sequence: Synthetic oligonucleotide
  Sense strand starting at position 83 of SEQ ID NO: 1562791
uuagcauucccaggguaaa

SEQ ID NO: 1773002 - RNA, 19 nt, Artificial Sequence
  Description of Artificial Sequence: Synthetic oligonucleotide
  Antisense strand to SEQ ID NO: 1773001
uuuacccugggaaugcuaa

SEQ ID NO: 1773003 - RNA, 19 nt, Artificial Sequence
  Description of Artificial Sequence: Synthetic oligonucleotide
  Sense strand starting at position 84 of SEQ ID NO: 1562791
uagcauucccaggguaaau

SEQ ID NO: 1773004 - RNA, 19 nt, Artificial Sequence
  Description of Artificial Sequence: Synthetic oligonucleotide
  Antisense strand to SEQ ID NO: 1773003
auuuacccugggaaugcua

SEQ ID NO: 1773005 - RNA, 19 nt, Artificial Sequence
  Description of Artificial Sequence: Synthetic oligonucleotide
  Sense strand starting at position 95 of SEQ ID NO: 1562791
ggguaaaugaggugucuag

SEQ ID NO: 1773006 - RNA, 19 nt, Artificial Sequence
  Description of Artificial Sequence: Synthetic oligonucleotide
  Antisense strand to SEQ ID NO: 1773005
cuagacaccucauuuaccc

SEQ ID NO: 1773007 - RNA, 19 nt, Artificial Sequence
  Description of Artificial Sequence: Synthetic oligonucleotide
  Sense strand starting at position 99 of SEQ ID NO: 1562791
aaaugaggugucuagcacu

SEQ ID NO: 1773008 - RNA, 19 nt, Artificial Sequence
  Description of Artificial Sequence: Synthetic oligonucleotide
  Antisense strand to SEQ ID NO: 1773007
agugcuagacaccucauuu

SEQ ID NO: 1773009 - RNA, 19 nt, Artificial Sequence
  Description of Artificial Sequence: Synthetic oligonucleotide
  Sense strand starting at position 106 of SEQ ID NO: 1562791
gugucuagcacucgaugaa

SEQ ID NO: 1773010 - RNA, 19 nt, Artificial Sequence
  Description of Artificial Sequence: Synthetic oligonucleotide
  Antisense strand to SEQ ID NO: 1773009
uucaucgagugcuagacac

SEQ ID NO: 1773011 - RNA, 19 nt, Artificial Sequence
  Description of Artificial Sequence: Synthetic oligonucleotide
  Sense strand starting at position 173 of SEQ ID NO: 1562791
ccuauaugcggguauguua

SEQ ID NO: 1773012 - RNA, 19 nt, Artificial Sequence
  Description of Artificial Sequence: Synthetic oligonucleotide
  Antisense strand to SEQ ID NO: 1773011
uaacauacccgcauauagg

SEQ ID NO: 1773013 - RNA, 19 nt, Artificial Sequence
  Description of Artificial Sequence: Synthetic oligonucleotide
  Sense strand starting at position 181 of SEQ ID NO: 1562791
cggguauguuaccuacagu

SEQ ID NO: 1773014 - RNA, 19 nt, Artificial Sequence
  Description of Artificial Sequence: Synthetic oligonucleotide
  Antisense strand to SEQ ID NO: 1773013
acuguagguaacauacccg

SEQ ID NO: 1773015 - RNA, 19 nt, Artificial Sequence
  Description of Artificial Sequence: Synthetic oligonucleotide
  Sense strand starting at position 182 of SEQ ID NO: 1562791
ggguauguuaccuacagua

SEQ ID NO: 1773016 - RNA, 19 nt, Artificial Sequence
  Description of Artificial Sequence: Synthetic oligonucleotide
  Antisense strand to SEQ ID NO: 1773015
uacuguagguaacauaccc

SEQ ID NO: 1773017 - RNA, 19 nt, Artificial Sequence
  Description of Artificial Sequence: Synthetic oligonucleotide
  Sense strand starting at position 184 of SEQ ID NO: 1562791
guauguuaccuacaguaua

SEQ ID NO: 1773018 - RNA, 19 nt, Artificial Sequence
  Description of Artificial Sequence: Synthetic oligonucleotide
  Antisense strand to SEQ ID NO: 1773017
uauacuguagguaacauac

SEQ ID NO: 1773019 - RNA, 19 nt, Artificial Sequence
  Description of Artificial Sequence: Synthetic oligonucleotide
  Sense strand starting at position 234 of SEQ ID NO: 1562791
guuauccugucuuuacaga

SEQ ID NO: 1773020 - RNA, 19 nt, Artificial Sequence
  Description of Artificial Sequence: Synthetic oligonucleotide
  Antisense strand to SEQ ID NO: 1773019
ucuguaaagacaggauaac

SEQ ID NO: 1773021 - RNA, 19 nt, Artificial Sequence
  Description of Artificial Sequence: Synthetic oligonucleotide
  Sense strand starting at position 235 of SEQ ID NO: 1562791
uuauccugucuuuacagau

SEQ ID NO: 1773022 - RNA, 19 nt, Artificial Sequence
  Description of Artificial Sequence: Synthetic oligonucleotide
  Antisense strand to SEQ ID NO: 1773021
aucuguaaagacaggauaa

SEQ ID NO: 1773023 - RNA, 19 nt, Artificial Sequence
  Description of Artificial Sequence: Synthetic oligonucleotide
  Sense strand starting at position 401 of SEQ ID NO: 1562791
ccaacaucagucugugacu

SEQ ID NO: 1773024 - RNA, 19 nt, Artificial Sequence
  Description of Artificial Sequence: Synthetic oligonucleotide
  Antisense strand to SEQ ID NO: 1773023
agucacagacugauguugg

SEQ ID NO: 1773025 - RNA, 19 nt, Artificial Sequence
  Description of Artificial Sequence: Synthetic oligonucleotide
  Sense strand starting at position 412 of SEQ ID NO: 1562791
cugugacuuuggguggaga

SEQ ID NO: 1773026 - RNA, 19 nt, Artificial Sequence
  Description of Artificial Sequence: Synthetic oligonucleotide
  Antisense strand to SEQ ID NO: 1773025
ucuccacccaaagucacag

SEQ ID NO: 1773027 - RNA, 19 nt, Artificial Sequence
  Description of Artificial Sequence: Synthetic oligonucleotide
  Sense strand starting at position 413 of SEQ ID NO: 1562791
ugugacuuuggguggagaa

SEQ ID NO: 1773028 - RNA, 19 nt, Artificial Sequence
  Description of Artificial Sequence: Synthetic oligonucleotide
  Antisense strand to SEQ ID NO: 1773027
uucuccacccaaagucaca

SEQ ID NO: 1773029 - RNA, 19 nt, Artificial Sequence
  Description of Artificial Sequence: Synthetic oligonucleotide
  Sense strand starting at position 414 of SEQ ID NO: 1562791
gugacuuuggguggagaac

SEQ ID NO: 1773030 - RNA, 19 nt, Artificial Sequence
  Description of Artificial Sequence: Synthetic oligonucleotide
  Antisense strand to SEQ ID NO: 1773029
guucuccacccaaagucac

SEQ ID NO: 1773031 - RNA, 19 nt, Artificial Sequence
  Description of Artificial Sequence: Synthetic oligonucleotide
  Sense strand starting at position 673 of SEQ ID NO: 1562791
gagugaccugucuaaggug

SEQ ID NO: 1773032 - RNA, 19 nt, Artificial Sequence
  Description of Artificial Sequence: Synthetic oligonucleotide
  Antisense strand to SEQ ID NO: 1773031
caccuuagacaggucacuc

SEQ ID NO: 1773033 - RNA, 19 nt, Artificial Sequence
  Description of Artificial Sequence: Synthetic oligonucleotide
  Sense strand starting at position 801 of SEQ ID NO: 1562791
gcgccaucaccugagucau

SEQ ID NO: 1773034 - RNA, 19 nt, Artificial Sequence
  Description of Artificial Sequence: Synthetic oligonucleotide
  Antisense strand to SEQ ID NO: 1773033
augacucaggugauggcgc

SEQ ID NO: 1773035 - RNA, 19 nt, Artificial Sequence
  Description of Artificial Sequence: Synthetic oligonucleotide
  Sense strand starting at position 807 of SEQ ID NO: 1562791
ucaccugagucauagggaa

SEQ ID NO: 1773036 - RNA, 19 nt, Artificial Sequence
  Description of Artificial Sequence: Synthetic oligonucleotide
  Antisense strand to SEQ ID NO: 1773035
uucccuaugacucagguga

SEQ ID NO: 1773037 - RNA, 19 nt, Artificial Sequence
  Description of Artificial Sequence: Synthetic oligonucleotide
  Sense strand starting at position 809 of SEQ ID NO: 1562791
accugagucauagggaagu

SEQ ID NO: 1773038 - RNA, 19 nt, Artificial Sequence
  Description of Artificial Sequence: Synthetic oligonucleotide
  Antisense strand to SEQ ID NO: 1773037
acuucccuaugacucaggu

SEQ ID NO: 1773039 - RNA, 19 nt, Artificial Sequence
  Description of Artificial Sequence: Synthetic oligonucleotide
  Sense strand starting at position 946 of SEQ ID NO: 1562791
aaguuauaauguccgccaa

SEQ ID NO: 1773040 - RNA, 19 nt, Artificial Sequence
  Description of Artificial Sequence: Synthetic oligonucleotide
  Antisense strand to SEQ ID NO: 1773039
uuggcggacauuauaacuu

SEQ ID NO: 1773041 - RNA, 19 nt, Artificial Sequence
  Description of Artificial Sequence: Synthetic oligonucleotide
  Sense strand starting at position 1160 of SEQ ID NO: 1562791
gggcguauagccucuugua

SEQ ID NO: 1773042 - RNA, 19 nt, Artificial Sequence
  Description of Artificial Sequence: Synthetic oligonucleotide
  Antisense strand to SEQ ID NO: 1773041
uacaagaggcuauacgccc

SEQ ID NO: 1773043 - RNA, 19 nt, Artificial Sequence
  Description of Artificial Sequence: Synthetic oligonucleotide
  Sense strand starting at position 1161 of SEQ ID NO: 1562791
ggcguauagccucuuguag

SEQ ID NO: 1773044 - RNA, 19 nt, Artificial Sequence
  Description of Artificial Sequence: Synthetic oligonucleotide
  Antisense strand to SEQ ID NO: 1773043
cuacaagaggcuauacgcc

SEQ ID NO: 1773045 - RNA, 19 nt, Artificial Sequence
  Description of Artificial Sequence: Synthetic oligonucleotide
  Sense strand starting at position 2415 of SEQ ID NO: 1562791
cucagcuacagcgguaaua

SEQ ID NO: 1773046 - RNA, 19 nt, Artificial Sequence
  Description of Artificial Sequence: Synthetic oligonucleotide
  Antisense strand to SEQ ID NO: 1773045
uauuaccgcuguagcugag

SEQ ID NO: 1773047 - RNA, 19 nt, Artificial Sequence
  Description of Artificial Sequence: Synthetic oligonucleotide
  Sense strand starting at position 2417 of SEQ ID NO: 1562791
cagcuacagcgguaauaau

SEQ ID NO: 1773048 - RNA, 19 nt, Artificial Sequence
  Description of Artificial Sequence: Synthetic oligonucleotide
  Antisense strand to SEQ ID NO: 1773047
auuauuaccgcuguagcug

SEQ ID NO: 1773049 - RNA, 19 nt, Artificial Sequence
  Description of Artificial Sequence: Synthetic oligonucleotide
  Sense strand starting at position 2472 of SEQ ID NO: 1562791
gcucaucguaaugguuaaa

SEQ ID NO: 1773050 - RNA, 19 nt, Artificial Sequence
  Description of Artificial Sequence: Synthetic oligonucleotide
  Antisense strand to SEQ ID NO: 1773049
uuuaaccauuacgaugagc

SEQ ID NO: 1773051 - RNA, 19 nt, Artificial Sequence
  Description of Artificial Sequence: Synthetic oligonucleotide
  Sense strand starting at position 2598 of SEQ ID NO: 1562791
ggugauaauagcugcuacu

SEQ ID NO: 1773052 - RNA, 19 nt, Artificial Sequence
  Description of Artificial Sequence: Synthetic oligonucleotide
  Antisense strand to SEQ ID NO: 1773051
aguagcagcuauuaucacc

SEQ ID NO: 1773053 - RNA, 19 nt, Artificial Sequence
  Description of Artificial Sequence: Synthetic oligonucleotide
  Sense strand starting at position 2622 of SEQ ID NO: 1562791
gagcgcuugcacuaaauaa

SEQ ID NO: 1773054 - RNA, 19 nt, Artificial Sequence
  Description of Artificial Sequence: Synthetic oligonucleotide
  Antisense strand to SEQ ID NO: 1773053
uuauuuagugcaagcgcuc

SEQ ID NO: 1773055 - RNA, 19 nt, Artificial Sequence
  Description of Artificial Sequence: Synthetic oligonucleotide
  Sense strand starting at position 2980 of SEQ ID NO: 1562791
guaggaguucagcaaaugu

SEQ ID NO: 1773056 - RNA, 19 nt, Artificial Sequence
  Description of Artificial Sequence: Synthetic oligonucleotide
  Antisense strand to SEQ ID NO: 1773055
acauuugcugaacuccuac

SEQ ID NO: 1773057 - RNA, 19 nt, Artificial Sequence
  Description of Artificial Sequence: Synthetic oligonucleotide
  Sense strand starting at position 3081 of SEQ ID NO: 1562791
ggcaacuuuccugaucugu

SEQ ID NO: 1773058 - RNA, 19 nt, Artificial Sequence
  Description of Artificial Sequence: Synthetic oligonucleotide
  Antisense strand to SEQ ID NO: 1773057
acagaucaggaaaguugcc

SEQ ID NO: 1773059 - RNA, 19 nt, Artificial Sequence
  Description of Artificial Sequence: Synthetic oligonucleotide
  Sense strand starting at position 3089 of SEQ ID NO: 1562791
uccugaucugucugaggcu

SEQ ID NO: 1773060 - RNA, 19 nt, Artificial Sequence
  Description of Artificial Sequence: Synthetic oligonucleotide
  Antisense strand to SEQ ID NO: 1773059
agccucagacagaucagga

SEQ ID NO: 1773061 - RNA, 19 nt, Artificial Sequence
  Description of Artificial Sequence: Synthetic oligonucleotide
  Sense strand starting at position 3111 of SEQ ID NO: 1562791
ccguuugcagaauaggaau

SEQ ID NO: 1773062 - RNA, 19 nt, Artificial Sequence
  Description of Artificial Sequence: Synthetic oligonucleotide
  Antisense strand to SEQ ID NO: 1773061
auuccuauucugcaaacgg

SEQ ID NO: 1773063 - RNA, 19 nt, Artificial Sequence
  Description of Artificial Sequence: Synthetic oligonucleotide
  Sense strand starting at position 3113 of SEQ ID NO: 1562791
guuugcagaauaggaauaa

SEQ ID NO: 1773064 - RNA, 19 nt, Artificial Sequence
  Description of Artificial Sequence: Synthetic oligonucleotide
  Antisense strand to SEQ ID NO: 1773063
uuauuccuauucugcaaac

SEQ ID NO: 1773065 - RNA, 19 nt, Artificial Sequence
  Description of Artificial Sequence: Synthetic oligonucleotide
  Sense strand starting at position 3114 of SEQ ID NO: 1562791
uuugcagaauaggaauaau

SEQ ID NO: 1773066 - RNA, 19 nt, Artificial Sequence
  Description of Artificial Sequence: Synthetic oligonucleotide
  Antisense strand to SEQ ID NO: 1773065
auuauuccuauucugcaaa

SEQ ID NO: 1773067 - RNA, 19 nt, Artificial Sequence
  Description of Artificial Sequence: Synthetic oligonucleotide
  Sense strand starting at position 3141 of SEQ ID NO: 1562791
uucagaggauucgaugaga

SEQ ID NO: 1773068 - RNA, 19 nt, Artificial Sequence
  Description of Artificial Sequence: Synthetic oligonucleotide
  Antisense strand to SEQ ID NO: 1773067
ucucaucgaauccucugaa

SEQ ID NO: 1773069 - RNA, 19 nt, Artificial Sequence
  Description of Artificial Sequence: Synthetic oligonucleotide
  Sense strand starting at position 3146 of SEQ ID NO: 1562791
aggauucgaugagauagaa

SEQ ID NO: 1773070 - RNA, 19 nt, Artificial Sequence
  Description of Artificial Sequence: Synthetic oligonucleotide
  Antisense strand to SEQ ID NO: 1773069
uucuaucucaucgaauccu

SEQ ID NO: 1773071 - RNA, 19 nt, Artificial Sequence
  Description of Artificial Sequence: Synthetic oligonucleotide
  Sense strand starting at position 3179 of SEQ ID NO: 1562791
caacgcaacguccagaaau

SEQ ID NO: 1773072 - RNA, 19 nt, Artificial Sequence
  Description of Artificial Sequence: Synthetic oligonucleotide
  Antisense strand to SEQ ID NO: 1773071
auuucuggacguugcguug

SEQ ID NO: 1773073 - RNA, 19 nt, Artificial Sequence
  Description of Artificial Sequence: Synthetic oligonucleotide
  Sense strand starting at position 3192 of SEQ ID NO: 1562791
agaaauggaugagacagua

SEQ ID NO: 1773074 - RNA, 19 nt, Artificial Sequence
  Description of Artificial Sequence: Synthetic oligonucleotide
  Antisense strand to SEQ ID NO: 1773073
uacugucucauccauuucu

SEQ ID NO: 1773075 - RNA, 19 nt, Artificial Sequence
  Description of Artificial Sequence: Synthetic oligonucleotide
  Sense strand starting at position 3813 of SEQ ID NO: 1562791
ugugucauucccgaguuca

SEQ ID NO: 1773076 - RNA, 19 nt, Artificial Sequence
  Description of Artificial Sequence: Synthetic oligonucleotide
  Antisense strand to SEQ ID NO: 1773075
ugaacucgggaaugacaca

SEQ ID NO: 1773077 - RNA, 19 nt, Artificial Sequence
  Description of Artificial Sequence: Synthetic oligonucleotide
  Sense strand starting at position 3842 of SEQ ID NO: 1562791
gggccucuuauuggaacuu

SEQ ID NO: 1773078 - RNA, 19 nt, Artificial Sequence
  Description of Artificial Sequence: Synthetic oligonucleotide
  Antisense strand to SEQ ID NO: 1773077
aaguuccaauaagaggccc

SEQ ID NO: 1773079 - RNA, 19 nt, Artificial Sequence
  Description of Artificial Sequence: Synthetic oligonucleotide
  Sense strand starting at position 114 of SEQ ID NO: 1562792
ucagaauagugacuugcau

SEQ ID NO: 1773080 - RNA, 19 nt, Artificial Sequence
  Description of Artificial Sequence: Synthetic oligonucleotide
  Antisense strand to SEQ ID NO: 1773079
augcaagucacuauucuga

SEQ ID NO: 1773081 - RNA, 19 nt, Artificial Sequence
  Description of Artificial Sequence: Synthetic oligonucleotide
  Sense strand starting at position 122 of SEQ ID NO: 1562792
gugacuugcauauaguaag

SEQ ID NO: 1773082 - RNA, 19 nt, Artificial Sequence
  Description of Artificial Sequence: Synthetic oligonucleotide
  Antisense strand to SEQ ID NO: 1773081
cuuacuauaugcaagucac

SEQ ID NO: 1773083 - RNA, 19 nt, Artificial Sequence
  Description of Artificial Sequence: Synthetic oligonucleotide
  Sense strand starting at position 143 of SEQ ID NO: 1562792
cucaauaaagguugccaau

SEQ ID NO: 1773084 - RNA, 19 nt, Artificial Sequence
  Description of Artificial Sequence: Synthetic oligonucleotide
  Antisense strand to SEQ ID NO: 1773083
auuggcaaccuuuauugag

SEQ ID NO: 1773085 - RNA, 19 nt, Artificial Sequence
  Description of Artificial Sequence: Synthetic oligonucleotide
  Sense strand starting at position 182 of SEQ ID NO: 1562792
ggcucugauuugccugagu

SEQ ID NO: 1773086 - RNA, 19 nt, Artificial Sequence
  Description of Artificial Sequence: Synthetic oligonucleotide
  Antisense strand to SEQ ID NO: 1773085
acucaggcaaaucagagcc

SEQ ID NO: 1773087 - RNA, 19 nt, Artificial Sequence
  Description of Artificial Sequence: Synthetic oligonucleotide
  Sense strand starting at position 184 of SEQ ID NO: 1562792
cucugauuugccugaguuu

SEQ ID NO: 1773088 - RNA, 19 nt, Artificial Sequence
  Description of Artificial Sequence: Synthetic oligonucleotide
  Antisense strand to SEQ ID NO: 1773087
aaacucaggcaaaucagag

SEQ ID NO: 1773089 - RNA, 19 nt, Artificial Sequence
  Description of Artificial Sequence: Synthetic oligonucleotide
  Sense strand starting at position 255 of SEQ ID NO: 1562792
ugcugcugucaucauuaca

SEQ ID NO: 1773090 - RNA, 19 nt, Artificial Sequence
  Description of Artificial Sequence: Synthetic oligonucleotide
  Antisense strand to SEQ ID NO: 1773089
uguaaugaugacagcagca

SEQ ID NO: 1773091 - RNA, 19 nt, Artificial Sequence
  Description of Artificial Sequence: Synthetic oligonucleotide
  Sense strand starting at position 258 of SEQ ID NO: 1562792
ugcugucaucauuacaaga

SEQ ID NO: 1773092 - RNA, 19 nt, Artificial Sequence
  Description of Artificial Sequence: Synthetic oligonucleotide
  Antisense strand to SEQ ID NO: 1773091
ucuuguaaugaugacagca

SEQ ID NO: 1773093 - RNA, 19 nt, Artificial Sequence
  Description of Artificial Sequence: Synthetic oligonucleotide
  Sense strand starting at position 280 of SEQ ID NO: 1562792
guaauaagcuuucuuuaga

SEQ ID NO: 1773094 - RNA, 19 nt, Artificial Sequence
  Description of Artificial Sequence: Synthetic oligonucleotide
  Antisense strand to SEQ ID NO: 1773093
ucuaaagaaagcuuauuac

SEQ ID NO: 1773095 - RNA, 19 nt, Artificial Sequence
  Description of Artificial Sequence: Synthetic oligonucleotide
  Sense strand starting at position 293 of SEQ ID NO: 1562792
uuuagagaauucuuacgaa

SEQ ID NO: 1773096 - RNA, 19 nt, Artificial Sequence
  Description of Artificial Sequence: Synthetic oligonucleotide
  Antisense strand to SEQ ID NO: 1773095
uucguaagaauucucuaaa

SEQ ID NO: 1773097 - RNA, 19 nt, Artificial Sequence
  Description of Artificial Sequence: Synthetic oligonucleotide
  Sense strand starting at position 303 of SEQ ID NO: 1562792
ucuuacgaagauugagaua

SEQ ID NO: 1773098 - RNA, 19 nt, Artificial Sequence
  Description of Artificial Sequence: Synthetic oligonucleotide
  Antisense strand to SEQ ID NO: 1773097
uaucucaaucuucguaaga

SEQ ID NO: 1773099 - RNA, 19 nt, Artificial Sequence
  Description of Artificial Sequence: Synthetic oligonucleotide
  Sense strand starting at position 306 of SEQ ID NO: 1562792
uacgaagauugagauaaga

SEQ ID NO: 1773100 - RNA, 19 nt, Artificial Sequence
  Description of Artificial Sequence: Synthetic oligonucleotide
  Antisense strand to SEQ ID NO: 1773099
ucuuaucucaaucuucgua

SEQ ID NO: 1773101 - RNA, 19 nt, Artificial Sequence
  Description of Artificial Sequence: Synthetic oligonucleotide
  Sense strand starting at position 395 of SEQ ID NO: 1562792
ccacaugauuauucucguu

SEQ ID NO: 1773102 - RNA, 19 nt, Artificial Sequence
  Description of Artificial Sequence: Synthetic oligonucleotide
  Antisense strand to SEQ ID NO: 1773101
aacgagaauaaucaugugg

SEQ ID NO: 1773103 - RNA, 19 nt, Artificial Sequence
  Description of Artificial Sequence: Synthetic oligonucleotide
  Sense strand starting at position 422 of SEQ ID NO: 1562792
cagaaaguuugagcuauuc

SEQ ID NO: 1773104 - RNA, 19 nt, Artificial Sequence
  Description of Artificial Sequence: Synthetic oligonucleotide
  Antisense strand to SEQ ID NO: 1773103
gaauagcucaaacuuucug

SEQ ID NO: 1773105 - RNA, 19 nt, Artificial Sequence
  Description of Artificial Sequence: Synthetic oligonucleotide
  Sense strand starting at position 917 of SEQ ID NO: 1562792
guugucaucacgccuguga

SEQ ID NO: 1773106 - RNA, 19 nt, Artificial Sequence
  Description of Artificial Sequence: Synthetic oligonucleotide
  Antisense strand to SEQ ID NO: 1773105
ucacaggcgugaugacaac

SEQ ID NO: 1773107 - RNA, 19 nt, Artificial Sequence
  Description of Artificial Sequence: Synthetic oligonucleotide
  Sense strand starting at position 1184 of SEQ ID NO: 1562792
ccuguaaucccaggaacau

SEQ ID NO: 1773108 - RNA, 19 nt, Artificial Sequence
  Description of Artificial Sequence: Synthetic oligonucleotide
  Antisense strand to SEQ ID NO: 1773107
auguuccugggauuacagg

SEQ ID NO: 1773109 - RNA, 19 nt, Artificial Sequence
  Description of Artificial Sequence: Synthetic oligonucleotide
  Sense strand starting at position 1480 of SEQ ID NO: 1562792
acgaaagaauaauacauga

SEQ ID NO: 1773110 - RNA, 19 nt, Artificial Sequence
  Description of Artificial Sequence: Synthetic oligonucleotide
  Antisense strand to SEQ ID NO: 1773109
ucauguauuauucuuucgu

SEQ ID NO: 1773111 - RNA, 19 nt, Artificial Sequence
  Description of Artificial Sequence: Synthetic oligonucleotide
  Sense strand starting at position 1504 of SEQ ID NO: 1562792
gugaguguacuggaagaua

SEQ ID NO: 1773112 - RNA, 19 nt, Artificial Sequence
  Description of Artificial Sequence: Synthetic oligonucleotide
  Antisense strand to SEQ ID NO: 1773111
uaucuuccaguacacucac

SEQ ID NO: 1773113 - RNA, 19 nt, Artificial Sequence
  Description of Artificial Sequence: Synthetic oligonucleotide
  Sense strand starting at position 1516 of SEQ ID NO: 1562792
gaagauaaugcacgugaac

SEQ ID NO: 1773114 - RNA, 19 nt, Artificial Sequence
  Description of Artificial Sequence: Synthetic oligonucleotide
  Antisense strand to SEQ ID NO: 1773113
guucacgugcauuaucuuc

SEQ ID NO: 1773115 - RNA, 19 nt, Artificial Sequence
  Description of Artificial Sequence: Synthetic oligonucleotide
  Sense strand starting at position 1519 of SEQ ID NO: 1562792
gauaaugcacgugaacguu

SEQ ID NO: 1773116 - RNA, 19 nt, Artificial Sequence
  Description of Artificial Sequence: Synthetic oligonucleotide
  Antisense strand to SEQ ID NO: 1773115
aacguucacgugcauuauc

SEQ ID NO: 1773117 - RNA, 19 nt, Artificial Sequence
  Description of Artificial Sequence: Synthetic oligonucleotide
  Sense strand starting at position 1791 of SEQ ID NO: 1562792
guuuaacuaccucaguuua

SEQ ID NO: 1773118 - RNA, 19 nt, Artificial Sequence
  Description of Artificial Sequence: Synthetic oligonucleotide
  Antisense strand to SEQ ID NO: 1773117
uaaacugagguaguuaaac

SEQ ID NO: 1773119 - RNA, 19 nt, Artificial Sequence
  Description of Artificial Sequence: Synthetic oligonucleotide
  Sense strand starting at position 2134 of SEQ ID NO: 1562792
gguuaugggaauuguaguu

SEQ ID NO: 1773120 - RNA, 19 nt, Artificial Sequence
  Description of Artificial Sequence: Synthetic oligonucleotide
  Antisense strand to SEQ ID NO: 1773119
aacuacaauucccauaacc

SEQ ID NO: 1773121 - RNA, 19 nt, Artificial Sequence
  Description of Artificial Sequence: Synthetic oligonucleotide
  Sense strand starting at position 2264 of SEQ ID NO: 1562792
ggauguuauucuucccuaa

SEQ ID NO: 1773122 - RNA, 19 nt, Artificial Sequence
  Description of Artificial Sequence: Synthetic oligonucleotide
  Antisense strand to SEQ ID NO: 1773121
uuagggaagaauaacaucc

SEQ ID NO: 1773123 - RNA, 19 nt, Artificial Sequence
  Description of Artificial Sequence: Synthetic oligonucleotide
  Sense strand starting at position 2282 of SEQ ID NO: 1562792
aacgguuauugagcaccua

SEQ ID NO: 1773124 - RNA, 19 nt, Artificial Sequence
  Description of Artificial Sequence: Synthetic oligonucleotide
  Antisense strand to SEQ ID NO: 1773123
uaggugcucaauaaccguu

SEQ ID NO: 1773125 - RNA, 19 nt, Artificial Sequence
  Description of Artificial Sequence: Synthetic oligonucleotide
  Sense strand starting at position 2283 of SEQ ID NO: 1562792
acgguuauugagcaccuau

SEQ ID NO: 1773126 - RNA, 19 nt, Artificial Sequence
  Description of Artificial Sequence: Synthetic oligonucleotide
  Antisense strand to SEQ ID NO: 1773125
auaggugcucaauaaccgu

SEQ ID NO: 1773127 - RNA, 19 nt, Artificial Sequence
  Description of Artificial Sequence: Synthetic oligonucleotide
  Sense strand starting at position 2323 of SEQ ID NO: 1562792
caggaauaaccucguacuc

SEQ ID NO: 1773128 - RNA, 19 nt, Artificial Sequence
  Description of Artificial Sequence: Synthetic oligonucleotide
  Antisense strand to SEQ ID NO: 1773127
gaguacgagguuauuccug

SEQ ID NO: 1773129 - RNA, 19 nt, Artificial Sequence
  Description of Artificial Sequence: Synthetic oligonucleotide
  Sense strand starting at position 2338 of SEQ ID NO: 1562792
acucucccggguuagauau

SEQ ID NO: 1773130 - RNA, 19 nt, Artificial Sequence
  Description of Artificial Sequence: Synthetic oligonucleotide
  Antisense strand to SEQ ID NO: 1773129
auaucuaacccgggagagu

SEQ ID NO: 1773131 - RNA, 19 nt, Artificial Sequence
  Description of Artificial Sequence: Synthetic oligonucleotide
  Sense strand starting at position 2390 of SEQ ID NO: 1562792
gggacucauuuccaacuca

SEQ ID NO: 1773132 - RNA, 19 nt, Artificial Sequence
  Description of Artificial Sequence: Synthetic oligonucleotide
  Antisense strand to SEQ ID NO: 1773131
ugaguuggaaaugaguccc

SEQ ID NO: 1773133 - RNA, 19 nt, Artificial Sequence
  Description of Artificial Sequence: Synthetic oligonucleotide
  Sense strand starting at position 2457 of SEQ ID NO: 1562792
acuggaauacucugugugu

SEQ ID NO: 1773134 - RNA, 19 nt, Artificial Sequence
  Description of Artificial Sequence: Synthetic oligonucleotide
  Antisense strand to SEQ ID NO: 1773133
acacacagaguauuccagu

SEQ ID NO: 1773135 - RNA, 19 nt, Artificial Sequence
  Description of Artificial Sequence: Synthetic oligonucleotide
  Sense strand starting at position 2792 of SEQ ID NO: 1562792
ccggcugaaacuggaauau

SEQ ID NO: 1773136 - RNA, 19 nt, Artificial Sequence
  Description of Artificial Sequence: Synthetic oligonucleotide
  Antisense strand to SEQ ID NO: 1773135
auauuccaguuucagccgg

SEQ ID NO: 1773137 - RNA, 19 nt, Artificial Sequence
  Description of Artificial Sequence: Synthetic oligonucleotide
  Sense strand starting at position 2816 of SEQ ID NO: 1562792
uucucaauacuguaaaugu

SEQ ID NO: 1773138 - RNA, 19 nt, Artificial Sequence
  Description of Artificial Sequence: Synthetic oligonucleotide
  Antisense strand to SEQ ID NO: 1773137
acauuuacaguauugagaa

SEQ ID NO: 1773139 - RNA, 19 nt, Artificial Sequence
  Description of Artificial Sequence: Synthetic oligonucleotide
  Sense strand starting at position 3010 of SEQ ID NO: 1562792
ccuaucaccguuugaaaga

SEQ ID NO: 1773140 - RNA, 19 nt, Artificial Sequence
  Description of Artificial Sequence: Synthetic oligonucleotide
  Antisense strand to SEQ ID NO: 1773139
ucuuucaaacggugauagg

SEQ ID NO: 1773141 - RNA, 19 nt, Artificial Sequence
  Description of Artificial Sequence: Synthetic oligonucleotide
  Sense strand starting at position 3064 of SEQ ID NO: 1562792
ggcacuuuccaagaucaca

SEQ ID NO: 1773142 - RNA, 19 nt, Artificial Sequence
  Description of Artificial Sequence: Synthetic oligonucleotide
  Antisense strand to SEQ ID NO: 1773141
ugugaucuuggaaagugcc

SEQ ID NO: 1773143 - RNA, 19 nt, Artificial Sequence
  Description of Artificial Sequence: Synthetic oligonucleotide
  Sense strand starting at position 3128 of SEQ ID NO: 1562792
ugccgugucccagugaauu

SEQ ID NO: 1773144 - RNA, 19 nt, Artificial Sequence
  Description of Artificial Sequence: Synthetic oligonucleotide
  Antisense strand to SEQ ID NO: 1773143
aauucacugggacacggca

SEQ ID NO: 1773145 - RNA, 19 nt, Artificial Sequence
  Description of Artificial Sequence: Synthetic oligonucleotide
  Sense strand starting at position 3130 of SEQ ID NO: 1562792
ccgugucccagugaauuaa

SEQ ID NO: 1773146 - RNA, 19 nt, Artificial Sequence
  Description of Artificial Sequence: Synthetic oligonucleotide
  Antisense strand to SEQ ID NO: 1773145
uuaauucacugggacacgg

SEQ ID NO: 1773147 - RNA, 19 nt, Artificial Sequence
  Description of Artificial Sequence: Synthetic oligonucleotide
  Sense strand starting at position 3163 of SEQ ID NO: 1562792
gcaauauguggaggcugaa

SEQ ID NO: 1773148 - RNA, 19 nt, Artificial Sequence
  Description of Artificial Sequence: Synthetic oligonucleotide
  Antisense strand to SEQ ID NO: 1773147
uucagccuccacauauugc

SEQ ID NO: 1773149 - RNA, 19 nt, Artificial Sequence
  Description of Artificial Sequence: Synthetic oligonucleotide
  Sense strand starting at position 3282 of SEQ ID NO: 1562792
guauccaugcugucaacgu

SEQ ID NO: 1773150 - RNA, 19 nt, Artificial Sequence
  Description of Artificial Sequence: Synthetic oligonucleotide
  Antisense strand to SEQ ID NO: 1773149
acguugacagcauggauac

SEQ ID NO: 1773151 - RNA, 19 nt, Artificial Sequence
  Description of Artificial Sequence: Synthetic oligonucleotide
  Sense strand starting at position 3540 of SEQ ID NO: 1562792
acacacaggugaucuuuaa

SEQ ID NO: 1773152 - RNA, 19 nt, Artificial Sequence
  Description of Artificial Sequence: Synthetic oligonucleotide
  Antisense strand to SEQ ID NO: 1773151
uuaaagaucaccugugugu

SEQ ID NO: 1773153 - RNA, 19 nt, Artificial Sequence
  Description of Artificial Sequence: Synthetic oligonucleotide
  Sense strand starting at position 3698 of SEQ ID NO: 1562792
aacuauuagcuggguguga

SEQ ID NO: 1773154 - RNA, 19 nt, Artificial Sequence
  Description of Artificial Sequence: Synthetic oligonucleotide
  Antisense strand to SEQ ID NO: 1773153
ucacacccagcuaauaguu

SEQ ID NO: 1773155 - RNA, 19 nt, Artificial Sequence
  Description of Artificial Sequence: Synthetic oligonucleotide
  Sense strand starting at position 3699 of SEQ ID NO: 1562792
acuauuagcugggugugau

SEQ ID NO: 1773156 - RNA, 19 nt, Artificial Sequence
  Description of Artificial Sequence: Synthetic oligonucleotide
  Antisense strand to SEQ ID NO: 1773155
aucacacccagcuaauagu

SEQ ID NO: 1773157 - RNA, 19 nt, Artificial Sequence
  Description of Artificial Sequence: Synthetic oligonucleotide
  Sense strand starting at position 3981 of SEQ ID NO: 1562792
ucaagcuugguaugcaaua

SEQ ID NO: 1773158 - RNA, 19 nt, Artificial Sequence
  Description of Artificial Sequence: Synthetic oligonucleotide
  Antisense strand to SEQ ID NO: 1773157
uauugcauaccaagcuuga

SEQ ID NO: 1773159 - RNA, 19 nt, Artificial Sequence
  Description of Artificial Sequence: Synthetic oligonucleotide
  Sense strand starting at position 11 of SEQ ID NO: 1562793
ucuuccugguauggaauua

SEQ ID NO: 1773160 - RNA, 19 nt, Artificial Sequence
  Description of Artificial Sequence: Synthetic oligonucleotide
  Antisense strand to SEQ ID NO: 1773159
uaauuccauaccaggaaga

SEQ ID NO: 1773161 - RNA, 19 nt, Artificial Sequence
  Description of Artificial Sequence: Synthetic oligonucleotide
  Sense strand starting at position 31 of SEQ ID NO: 1562793
cagggacaggcucgauaaa

SEQ ID NO: 1773162 - RNA, 19 nt, Artificial Sequence
  Description of Artificial Sequence: Synthetic oligonucleotide
  Antisense strand to SEQ ID NO: 1773161
uuuaucgagccugucccug

SEQ ID NO: 1773163 - RNA, 19 nt, Artificial Sequence
  Description of Artificial Sequence: Synthetic oligonucleotide
  Sense strand starting at position 40 of SEQ ID NO: 1562793
gcucgauaaauguguucuc

SEQ ID NO: 1773164 - RNA, 19 nt, Artificial Sequence
  Description of Artificial Sequence: Synthetic oligonucleotide
  Antisense strand to SEQ ID NO: 1773163
gagaacacauuuaucgagc

SEQ ID NO: 1773165 - RNA, 19 nt, Artificial Sequence
  Description of Artificial Sequence: Synthetic oligonucleotide
  Sense strand starting at position 43 of SEQ ID NO: 1562793
cgauaaauguguucuccac

SEQ ID NO: 1773166 - RNA, 19 nt, Artificial Sequence
  Description of Artificial Sequence: Synthetic oligonucleotide
  Antisense strand to SEQ ID NO: 1773165
guggagaacacauuuaucg

SEQ ID NO: 1773167 - RNA, 19 nt, Artificial Sequence
  Description of Artificial Sequence: Synthetic oligonucleotide
  Sense strand starting at position 45 of SEQ ID NO: 1562793
auaaauguguucuccacaa

SEQ ID NO: 1773168 - RNA, 19 nt, Artificial Sequence
  Description of Artificial Sequence: Synthetic oligonucleotide
  Antisense strand to SEQ ID NO: 1773167
uuguggagaacacauuuau

SEQ ID NO: 1773169 - RNA, 19 nt, Artificial Sequence
  Description of Artificial Sequence: Synthetic oligonucleotide
  Sense strand starting at position 49 of SEQ ID NO: 1562793
auguguucuccacaagcaa

SEQ ID NO: 1773170 - RNA, 19 nt, Artificial Sequence
  Description of Artificial Sequence: Synthetic oligonucleotide
  Antisense strand to SEQ ID NO: 1773169
uugcuuguggagaacacau

SEQ ID NO: 1773171 - RNA, 19 nt, Artificial Sequence
  Description of Artificial Sequence: Synthetic oligonucleotide
  Sense strand starting at position 103 of SEQ ID NO: 1562793
cuaagagaugugugaaauc

SEQ ID NO: 1773172 - RNA, 19 nt, Artificial Sequence
  Description of Artificial Sequence: Synthetic oligonucleotide
  Antisense strand to SEQ ID NO: 1773171
gauuucacacaucucuuag

SEQ ID NO: 1773173 - RNA, 19 nt, Artificial Sequence
  Description of Artificial Sequence: Synthetic oligonucleotide
  Sense strand starting at position 170 of SEQ ID NO: 1562793
aagcgugccagugaguaau

SEQ ID NO: 1773174 - RNA, 19 nt, Artificial Sequence
  Description of Artificial Sequence: Synthetic oligonucleotide
  Antisense strand to SEQ ID NO: 1773173
auuacucacuggcacgcuu

SEQ ID NO: 1773175 - RNA, 19 nt, Artificial Sequence
  Description of Artificial Sequence: Synthetic oligonucleotide
  Sense strand starting at position 173 of SEQ ID NO: 1562793
cgugccagugaguaauuca

SEQ ID NO: 1773176 - RNA, 19 nt, Artificial Sequence
  Description of Artificial Sequence: Synthetic oligonucleotide
  Antisense strand to SEQ ID NO: 1773175
ugaauuacucacuggcacg

SEQ ID NO: 1773177 - RNA, 19 nt, Artificial Sequence
  Description of Artificial Sequence: Synthetic oligonucleotide
  Sense strand starting at position 198 of SEQ ID NO: 1562793
ucacccauuugugagggau

SEQ ID NO: 1773178 - RNA, 19 nt, Artificial Sequence
  Description of Artificial Sequence: Synthetic oligonucleotide
  Antisense strand to SEQ ID NO: 1773177
aucccucacaaauggguga

SEQ ID NO: 1773179 - RNA, 19 nt, Artificial Sequence
  Description of Artificial Sequence: Synthetic oligonucleotide
  Sense strand starting at position 326 of SEQ ID NO: 1562793
aaauuaacccgaggugacu

SEQ ID NO: 1773180 - RNA, 19 nt, Artificial Sequence
  Description of Artificial Sequence: Synthetic oligonucleotide
  Antisense strand to SEQ ID NO: 1773179
agucaccucggguuaauuu

SEQ ID NO: 1773181 - RNA, 19 nt, Artificial Sequence
  Description of Artificial Sequence: Synthetic oligonucleotide
  Sense strand starting at position 378 of SEQ ID NO: 1562793
acaccugugucagagaaga

SEQ ID NO: 1773182 - RNA, 19 nt, Artificial Sequence
  Description of Artificial Sequence: Synthetic oligonucleotide
  Antisense strand to SEQ ID NO: 1773181
ucuucucugacacaggugu

SEQ ID NO: 1773183 - RNA, 19 nt, Artificial Sequence
  Description of Artificial Sequence: Synthetic oligonucleotide
  Sense strand starting at position 576 of SEQ ID NO: 1562793
gcucccucaggagaucauu

SEQ ID NO: 1773184 - RNA, 19 nt, Artificial Sequence
  Description of Artificial Sequence: Synthetic oligonucleotide
  Antisense strand to SEQ ID NO: 1773183
aaugaucuccugagggagc

SEQ ID NO: 1773185 - RNA, 19 nt, Artificial Sequence
  Description of Artificial Sequence: Synthetic oligonucleotide
  Sense strand starting at position 726 of SEQ ID NO: 1562793
auggauucagugugcaaga

SEQ ID NO: 1773186 - RNA, 19 nt, Artificial Sequence
  Description of Artificial Sequence: Synthetic oligonucleotide
  Antisense strand to SEQ ID NO: 1773185
ucuugcacacugaauccau

SEQ ID NO: 1773187 - RNA, 19 nt, Artificial Sequence
  Description of Artificial Sequence: Synthetic oligonucleotide
  Sense strand starting at position 728 of SEQ ID NO: 1562793
ggauucagugugcaagaga

SEQ ID NO: 1773188 - RNA, 19 nt, Artificial Sequence
  Description of Artificial Sequence: Synthetic oligonucleotide
  Antisense strand to SEQ ID NO: 1773187
ucucuugcacacugaaucc

SEQ ID NO: 1773189 - RNA, 19 nt, Artificial Sequence
  Description of Artificial Sequence: Synthetic oligonucleotide
  Sense strand starting at position 746 of SEQ ID NO: 1562793
acaaucuguucccuccgaa

SEQ ID NO: 1773190 - RNA, 19 nt, Artificial Sequence
  Description of Artificial Sequence: Synthetic oligonucleotide
  Antisense strand to SEQ ID NO: 1773189
uucggagggaacagauugu

SEQ ID NO: 1773191 - RNA, 19 nt, Artificial Sequence
  Description of Artificial Sequence: Synthetic oligonucleotide
  Sense strand starting at position 798 of SEQ ID NO: 1562793
agcucacagguuuaauaaa

SEQ ID NO: 1773192 - RNA, 19 nt, Artificial Sequence
  Description of Artificial Sequence: Synthetic oligonucleotide
  Antisense strand to SEQ ID NO: 1773191
uuuauuaaaccugugagcu

SEQ ID NO: 1773193 - RNA, 19 nt, Artificial Sequence
  Description of Artificial Sequence: Synthetic oligonucleotide
  Sense strand starting at position 828 of SEQ ID NO: 1562793
caaggacaggcuuguacaa

SEQ ID NO: 1773194 - RNA, 19 nt, Artificial Sequence
  Description of Artificial Sequence: Synthetic oligonucleotide
  Antisense strand to SEQ ID NO: 1773193
uuguacaagccuguccuug

SEQ ID NO: 1773195 - RNA, 19 nt, Artificial Sequence
  Description of Artificial Sequence: Synthetic oligonucleotide
  Sense strand starting at position 845 of SEQ ID NO: 1562793
aacugagguuccuuaagag

SEQ ID NO: 1773196 - RNA, 19 nt, Artificial Sequence
  Description of Artificial Sequence: Synthetic oligonucleotide
  Antisense strand to SEQ ID NO: 1773195
cucuuaaggaaccucaguu

SEQ ID NO: 1773197 - RNA, 19 nt, Artificial Sequence
  Description of Artificial Sequence: Synthetic oligonucleotide
  Sense strand starting at position 851 of SEQ ID NO: 1562793
gguuccuuaagaggaacau

SEQ ID NO: 1773198 - RNA, 19 nt, Artificial Sequence
  Description of Artificial Sequence: Synthetic oligonucleotide
  Antisense strand to SEQ ID NO: 1773197
auguuccucuuaaggaacc

SEQ ID NO: 1773199 - RNA, 19 nt, Artificial Sequence
  Description of Artificial Sequence: Synthetic oligonucleotide
  Sense strand starting at position 957 of SEQ ID NO: 1562793
uuacaagaaugucuggaua

SEQ ID NO: 1773200 - RNA, 19 nt, Artificial Sequence
  Description of Artificial Sequence: Synthetic oligonucleotide
  Antisense strand to SEQ ID NO: 1773199
uauccagacauucuuguaa

SEQ ID NO: 1773201 - RNA, 19 nt, Artificial Sequence
  Description of Artificial Sequence: Synthetic oligonucleotide
  Sense strand starting at position 960 of SEQ ID NO: 1562793
caagaaugucuggauagcu

SEQ ID NO: 1773202 - RNA, 19 nt, Artificial Sequence
  Description of Artificial Sequence: Synthetic oligonucleotide
  Antisense strand to SEQ ID NO: 1773201
agcuauccagacauucuug

SEQ ID NO: 1773203 - RNA, 19 nt, Artificial Sequence
  Description of Artificial Sequence: Synthetic oligonucleotide
  Sense strand starting at position 1122 of SEQ ID NO: 1562793
gcaggacugucugcaagaa

SEQ ID NO: 1773204 - RNA, 19 nt, Artificial Sequence
  Description of Artificial Sequence: Synthetic oligonucleotide
  Antisense strand to SEQ ID NO: 1773203
uucuugcagacaguccugc

SEQ ID NO: 1773205 - RNA, 19 nt, Artificial Sequence
  Description of Artificial Sequence: Synthetic oligonucleotide
  Sense strand starting at position 1291 of SEQ ID NO: 1562793
cgugguguuaaccagaaac

SEQ ID NO: 1773206 - RNA, 19 nt, Artificial Sequence
  Description of Artificial Sequence: Synthetic oligonucleotide
  Antisense strand to SEQ ID NO: 1773205
guuucugguuaacaccacg

SEQ ID NO: 1773207 - RNA, 19 nt, Artificial Sequence
  Description of Artificial Sequence: Synthetic oligonucleotide
  Sense strand starting at position 1293 of SEQ ID NO: 1562793
ugguguuaaccagaaacuc

SEQ ID NO: 1773208 - RNA, 19 nt, Artificial Sequence
  Description of Artificial Sequence: Synthetic oligonucleotide
  Antisense strand to SEQ ID NO: 1773207
gaguuucugguuaacacca

SEQ ID NO: 1773209 - RNA, 19 nt, Artificial Sequence
  Description of Artificial Sequence: Synthetic oligonucleotide
  Sense strand starting at position 1489 of SEQ ID NO: 1562793
gccacagguucggagaacu

SEQ ID NO: 1773210 - RNA, 19 nt, Artificial Sequence
  Description of Artificial Sequence: Synthetic oligonucleotide
  Antisense strand to SEQ ID NO: 1773209
aguucuccgaaccuguggc

SEQ ID NO: 1773211 - RNA, 19 nt, Artificial Sequence
  Description of Artificial Sequence: Synthetic oligonucleotide
  Sense strand starting at position 1503 of SEQ ID NO: 1562793
gaacuuguccggcgcuaca

SEQ ID NO: 1773212 - RNA, 19 nt, Artificial Sequence
  Description of Artificial Sequence: Synthetic oligonucleotide
  Antisense strand to SEQ ID NO: 1773211
uguagcgccggacaaguuc

SEQ ID NO: 1773213 - RNA, 19 nt, Artificial Sequence
  Description of Artificial Sequence: Synthetic oligonucleotide
  Sense strand starting at position 3039 of SEQ ID NO: 1562793
acagccgucgugagaagua

SEQ ID NO: 1773214 - RNA, 19 nt, Artificial Sequence
  Description of Artificial Sequence: Synthetic oligonucleotide
  Antisense strand to SEQ ID NO: 1773213
uacuucucacgacggcugu

SEQ ID NO: 1773215 - RNA, 19 nt, Artificial Sequence
  Description of Artificial Sequence: Synthetic oligonucleotide
  Sense strand starting at position 3046 of SEQ ID NO: 1562793
ucgugagaaguaggaaguu

SEQ ID NO: 1773216 - RNA, 19 nt, Artificial Sequence
  Description of Artificial Sequence: Synthetic oligonucleotide
  Antisense strand to SEQ ID NO: 1773215
aacuuccuacuucucacga

SEQ ID NO: 1773217 - RNA, 19 nt, Artificial Sequence
  Description of Artificial Sequence: Synthetic oligonucleotide
  Sense strand starting at position 3150 of SEQ ID NO: 1562793
gacggcaucuuucugggau

SEQ ID NO: 1773218 - RNA, 19 nt, Artificial Sequence
  Description of Artificial Sequence: Synthetic oligonucleotide
  Antisense strand to SEQ ID NO: 1773217
aucccagaaagaugccguc

SEQ ID NO: 1773219 - RNA, 19 nt, Artificial Sequence
  Description of Artificial Sequence: Synthetic oligonucleotide
  Sense strand starting at position 3151 of SEQ ID NO: 1562793
acggcaucuuucugggauc

SEQ ID NO: 1773220 - RNA, 19 nt, Artificial Sequence
  Description of Artificial Sequence: Synthetic oligonucleotide
  Antisense strand to SEQ ID NO: 1773219
gaucccagaaagaugccgu

SEQ ID NO: 1773221 - RNA, 19 nt, Artificial Sequence
  Description of Artificial Sequence: Synthetic oligonucleotide
  Sense strand starting at position 3154 of SEQ ID NO: 1562793
gcaucuuucugggaucggu

SEQ ID NO: 1773222 - RNA, 19 nt, Artificial Sequence
  Description of Artificial Sequence: Synthetic oligonucleotide
  Antisense strand to SEQ ID NO: 1773221
accgaucccagaaagaugc

SEQ ID NO: 1773223 - RNA, 19 nt, Artificial Sequence
  Description of Artificial Sequence: Synthetic oligonucleotide
  Sense strand starting at position 3163 of SEQ ID NO: 1562793
ugggaucgguauccaagaa

SEQ ID NO: 1773224 - RNA, 19 nt, Artificial Sequence
  Description of Artificial Sequence: Synthetic oligonucleotide
  Antisense strand to SEQ ID NO: 1773223
uucuuggauaccgauccca

SEQ ID NO: 1773225 - RNA, 19 nt, Artificial Sequence
  Description of Artificial Sequence: Synthetic oligonucleotide
  Sense strand starting at position 3167 of SEQ ID NO: 1562793
aucgguauccaagaauccu

SEQ ID NO: 1773226 - RNA, 19 nt, Artificial Sequence
  Description of Artificial Sequence: Synthetic oligonucleotide
  Antisense strand to SEQ ID NO: 1773225
aggauucuuggauaccgau

SEQ ID NO: 1773227 - RNA, 19 nt, Artificial Sequence
  Description of Artificial Sequence: Synthetic oligonucleotide
  Sense strand starting at position 3195 of SEQ ID NO: 1562793
uuccucuuccucugaggaa

SEQ ID NO: 1773228 - RNA, 19 nt, Artificial Sequence
  Description of Artificial Sequence: Synthetic oligonucleotide
  Antisense strand to SEQ ID NO: 1773227
uuccucagaggaagaggaa

SEQ ID NO: 1773229 - RNA, 19 nt, Artificial Sequence
  Description of Artificial Sequence: Synthetic oligonucleotide
  Sense strand starting at position 3196 of SEQ ID NO: 1562793
uccucuuccucugaggaaa

SEQ ID NO: 1773230 - RNA, 19 nt, Artificial Sequence
  Description of Artificial Sequence: Synthetic oligonucleotide
  Antisense strand to SEQ ID NO: 1773229
uuuccucagaggaagagga

SEQ ID NO: 1773231 - RNA, 19 nt, Artificial Sequence
  Description of Artificial Sequence: Synthetic oligonucleotide
  Sense strand starting at position 3297 of SEQ ID NO: 1562793
uuucccucuuggcauaaga

SEQ ID NO: 1773232 - RNA, 19 nt, Artificial Sequence
  Description of Artificial Sequence: Synthetic oligonucleotide
  Antisense strand to SEQ ID NO: 1773231
ucuuaugccaagagggaaa

SEQ ID NO: 1773233 - RNA, 19 nt, Artificial Sequence
  Description of Artificial Sequence: Synthetic oligonucleotide
  Sense strand starting at position 3322 of SEQ ID NO: 1562793
cgcgcaacaucccuugaau

SEQ ID NO: 1773234 - RNA, 19 nt, Artificial Sequence
  Description of Artificial Sequence: Synthetic oligonucleotide
  Antisense strand to SEQ ID NO: 1773233
auucaagggauguugcgcg

SEQ ID NO: 1773235 - RNA, 19 nt, Artificial Sequence
  Description of Artificial Sequence: Synthetic oligonucleotide
  Sense strand starting at position 3461 of SEQ ID NO: 1562793
ggaggaugcccucgagaga

SEQ ID NO: 1773236 - RNA, 19 nt, Artificial Sequence
  Description of Artificial Sequence: Synthetic oligonucleotide
  Antisense strand to SEQ ID NO: 1773235
ucucucgagggcauccucc

SEQ ID NO: 1773237 - RNA, 19 nt, Artificial Sequence
  Description of Artificial Sequence: Synthetic oligonucleotide
  Sense strand starting at position 3972 of SEQ ID NO: 1562793
ccuccagccucgugaaaca

SEQ ID NO: 1773238 - RNA, 19 nt, Artificial Sequence
  Description of Artificial Sequence: Synthetic oligonucleotide
  Antisense strand to SEQ ID NO: 1773237
uguuucacgaggcuggagg

SEQ ID NO: 1773239 - RNA, 19 nt, Artificial Sequence
  Description of Artificial Sequence: Synthetic oligonucleotide
  Sense strand starting at position 8 of SEQ ID NO: 1562794
ggcauuaacagaggugcaa

SEQ ID NO: 1773240 - RNA, 19 nt, Artificial Sequence
  Description of Artificial Sequence: Synthetic oligonucleotide
  Antisense strand to SEQ ID NO: 1773239
uugcaccucuguuaaugcc

SEQ ID NO: 1773241 - RNA, 19 nt, Artificial Sequence
  Description of Artificial Sequence: Synthetic oligonucleotide
  Sense strand starting at position 12 of SEQ ID NO: 1562794
uuaacagaggugcaacauu

SEQ ID NO: 1773242 - RNA, 19 nt, Artificial Sequence
  Description of Artificial Sequence: Synthetic oligonucleotide
  Antisense strand to SEQ ID NO: 1773241
aauguugcaccucuguuaa

SEQ ID NO: 1773243 - RNA, 19 nt, Artificial Sequence
  Description of Artificial Sequence: Synthetic oligonucleotide
  Sense strand starting at position 194 of SEQ ID NO: 1562794
gaggcaucuugggcaggaa

SEQ ID NO: 1773244 - RNA, 19 nt, Artificial Sequence
  Description of Artificial Sequence: Synthetic oligonucleotide
  Antisense strand to SEQ ID NO: 1773243
uuccugcccaagaugccuc

SEQ ID NO: 1773245 - RNA, 19 nt, Artificial Sequence
  Description of Artificial Sequence: Synthetic oligonucleotide
  Sense strand starting at position 263 of SEQ ID NO: 1562794
gggcaucuuucuguccaga

SEQ ID NO: 1773246 - RNA, 19 nt, Artificial Sequence
  Description of Artificial Sequence: Synthetic oligonucleotide
  Antisense strand to SEQ ID NO: 1773245
ucuggacagaaagaugccc

SEQ ID NO: 1773247 - RNA, 19 nt, Artificial Sequence
  Description of Artificial Sequence: Synthetic oligonucleotide
  Sense strand starting at position 273 of SEQ ID NO: 1562794
cuguccagagcucaucaau

SEQ ID NO: 1773248 - RNA, 19 nt, Artificial Sequence
  Description of Artificial Sequence: Synthetic oligonucleotide
  Antisense strand to SEQ ID NO: 1773247
auugaugagcucuggacag

SEQ ID NO: 1773249 - RNA, 19 nt, Artificial Sequence
  Description of Artificial Sequence: Synthetic oligonucleotide
  Sense strand starting at position 407 of SEQ ID NO: 1562794
ggcggagucccugugccua

SEQ ID NO: 1773250 - RNA, 19 nt, Artificial Sequence
  Description of Artificial Sequence: Synthetic oligonucleotide
  Antisense strand to SEQ ID NO: 1773249
uaggcacagggacuccgcc

SEQ ID NO: 1773251 - RNA, 19 nt, Artificial Sequence
  Description of Artificial Sequence: Synthetic oligonucleotide
  Sense strand starting at position 427 of SEQ ID NO: 1562794
guagcagagcgguagucau

SEQ ID NO: 1773252 - RNA, 19 nt, Artificial Sequence
  Description of Artificial Sequence: Synthetic oligonucleotide
  Antisense strand to SEQ ID NO: 1773251
augacuaccgcucugcuac

SEQ ID NO: 1773253 - RNA, 19 nt, Artificial Sequence
  Description of Artificial Sequence: Synthetic oligonucleotide
  Sense strand starting at position 431 of SEQ ID NO: 1562794
cagagcgguagucauugaa

SEQ ID NO: 1773254 - RNA, 19 nt, Artificial Sequence
  Description of Artificial Sequence: Synthetic oligonucleotide
  Antisense strand to SEQ ID NO: 1773253
uucaaugacuaccgcucug

SEQ ID NO: 1773255 - RNA, 19 nt, Artificial Sequence
  Description of Artificial Sequence: Synthetic oligonucleotide
  Sense strand starting at position 434 of SEQ ID NO: 1562794
agcgguagucauugaaaca

SEQ ID NO: 1773256 - RNA, 19 nt, Artificial Sequence
  Description of Artificial Sequence: Synthetic oligonucleotide
  Antisense strand to SEQ ID NO: 1773255
uguuucaaugacuaccgcu

SEQ ID NO: 1773257 - RNA, 19 nt, Artificial Sequence
  Description of Artificial Sequence: Synthetic oligonucleotide
  Sense strand starting at position 435 of SEQ ID NO: 1562794
gcgguagucauugaaacag

SEQ ID NO: 1773258 - RNA, 19 nt, Artificial Sequence
  Description of Artificial Sequence: Synthetic oligonucleotide
  Antisense strand to SEQ ID NO: 1773257
cuguuucaaugacuaccgc

SEQ ID NO: 1773259 - RNA, 19 nt, Artificial Sequence
  Description of Artificial Sequence: Synthetic oligonucleotide
  Sense strand starting at position 486 of SEQ ID NO: 1562794
cagugagcgauagguacaa

SEQ ID NO: 1773260 - RNA, 19 nt, Artificial Sequence
  Description of Artificial Sequence: Synthetic oligonucleotide
  Antisense strand to SEQ ID NO: 1773259
uuguaccuaucgcucacug

SEQ ID NO: 1773261 - RNA, 19 nt, Artificial Sequence
  Description of Artificial Sequence: Synthetic oligonucleotide
  Sense strand starting at position 638 of SEQ ID NO: 1562794
gggcauuucuucuacacag

SEQ ID NO: 1773262 - RNA, 19 nt, Artificial Sequence
  Description of Artificial Sequence: Synthetic oligonucleotide
  Antisense strand to SEQ ID NO: 1773261
cuguguagaagaaaugccc

SEQ ID NO: 1773263 - RNA, 19 nt, Artificial Sequence
  Description of Artificial Sequence: Synthetic oligonucleotide
  Sense strand starting at position 654 of SEQ ID NO: 1562794
cagcaaagagcguaugcua

SEQ ID NO: 1773264 - RNA, 19 nt, Artificial Sequence
  Description of Artificial Sequence: Synthetic oligonucleotide
  Antisense strand to SEQ ID NO: 1773263
uagcauacgcucuuugcug

SEQ ID NO: 1773265 - RNA, 19 nt, Artificial Sequence
  Description of Artificial Sequence: Synthetic oligonucleotide
  Sense strand starting at position 700 of SEQ ID NO: 1562794
gcuggcggauucuuaaaga

SEQ ID NO: 1773266 - RNA, 19 nt, Artificial Sequence
  Description of Artificial Sequence: Synthetic oligonucleotide
  Antisense strand to SEQ ID NO: 1773265
ucuuuaagaauccgccagc

SEQ ID NO: 1773267 - RNA, 19 nt, Artificial Sequence
  Description of Artificial Sequence: Synthetic oligonucleotide
  Sense strand starting at position 838 of SEQ ID NO: 1562794
agcccuauuagaggcagaa

SEQ ID NO: 1773268 - RNA, 19 nt, Artificial Sequence
  Description of Artificial Sequence: Synthetic oligonucleotide
  Antisense strand to SEQ ID NO: 1773267
uucugccucuaauagggcu

SEQ ID NO: 1773269 - RNA, 19 nt, Artificial Sequence
  Description of Artificial Sequence: Synthetic oligonucleotide
  Sense strand starting at position 840 of SEQ ID NO: 1562794
cccuauuagaggcagaagu

SEQ ID NO: 1773270 - RNA, 19 nt, Artificial Sequence
  Description of Artificial Sequence: Synthetic oligonucleotide
  Antisense strand to SEQ ID NO: 1773269
acuucugccucuaauaggg

SEQ ID NO: 1773271 - RNA, 19 nt, Artificial Sequence
  Description of Artificial Sequence: Synthetic oligonucleotide
  Sense strand starting at position 897 of SEQ ID NO: 1562794
acuuguagguucuccgcaa

SEQ ID NO: 1773272 - RNA, 19 nt, Artificial Sequence
  Description of Artificial Sequence: Synthetic oligonucleotide
  Antisense strand to SEQ ID NO: 1773271
uugcggagaaccuacaagu

SEQ ID NO: 1773273 - RNA, 19 nt, Artificial Sequence
  Description of Artificial Sequence: Synthetic oligonucleotide
  Sense strand starting at position 901 of SEQ ID NO: 1562794
guagguucuccgcaacucu

SEQ ID NO: 1773274 - RNA, 19 nt, Artificial Sequence
  Description of Artificial Sequence: Synthetic oligonucleotide
  Antisense strand to SEQ ID NO: 1773273
agaguugcggagaaccuac

SEQ ID NO: 1773275 - RNA, 19 nt, Artificial Sequence
  Description of Artificial Sequence: Synthetic oligonucleotide
  Sense strand starting at position 1161 of SEQ ID NO: 1562794
ucccguuugaaguaauuga

SEQ ID NO: 1773276 - RNA, 19 nt, Artificial Sequence
  Description of Artificial Sequence: Synthetic oligonucleotide
  Antisense strand to SEQ ID NO: 1773275
ucaauuacuucaaacggga

SEQ ID NO: 1773277 - RNA, 19 nt, Artificial Sequence
  Description of Artificial Sequence: Synthetic oligonucleotide
  Sense strand starting at position 1165 of SEQ ID NO: 1562794
guuugaaguaauugaggag

SEQ ID NO: 1773278 - RNA, 19 nt, Artificial Sequence
  Description of Artificial Sequence: Synthetic oligonucleotide
  Antisense strand to SEQ ID NO: 1773277
cuccucaauuacuucaaac

SEQ ID NO: 1773279 - RNA, 19 nt, Artificial Sequence
  Description of Artificial Sequence: Synthetic oligonucleotide
  Sense strand starting at position 1168 of SEQ ID NO: 1562794
ugaaguaauugaggagaug

SEQ ID NO: 1773280 - RNA, 19 nt, Artificial Sequence
  Description of Artificial Sequence: Synthetic oligonucleotide
  Antisense strand to SEQ ID NO: 1773279
caucuccucaauuacuuca

SEQ ID NO: 1773281 - RNA, 19 nt, Artificial Sequence
  Description of Artificial Sequence: Synthetic oligonucleotide
  Sense strand starting at position 1259 of SEQ ID NO: 1562794
uccagcauguuggugagau

SEQ ID NO: 1773282 - RNA, 19 nt, Artificial Sequence
  Description of Artificial Sequence: Synthetic oligonucleotide
  Antisense strand to SEQ ID NO: 1773281
aucucaccaacaugcugga

SEQ ID NO: 1773283 - RNA, 19 nt, Artificial Sequence
  Description of Artificial Sequence: Synthetic oligonucleotide
  Sense strand starting at position 1338 of SEQ ID NO: 1562794
gggaggucagggugucaau

SEQ ID NO: 1773284 - RNA, 19 nt, Artificial Sequence
  Description of Artificial Sequence: Synthetic oligonucleotide
  Antisense strand to SEQ ID NO: 1773283
auugacacccugaccuccc

SEQ ID NO: 1773285 - RNA, 19 nt, Artificial Sequence
  Description of Artificial Sequence: Synthetic oligonucleotide
  Sense strand starting at position 1350 of SEQ ID NO: 1562794
ugucaauaacgucauccau

SEQ ID NO: 1773286 - RNA, 19 nt, Artificial Sequence
  Description of Artificial Sequence: Synthetic oligonucleotide
  Antisense strand to SEQ ID NO: 1773285
auggaugacguuauugaca

SEQ ID NO: 1773287 - RNA, 19 nt, Artificial Sequence
  Description of Artificial Sequence: Synthetic oligonucleotide
  Sense strand starting at position 1358 of SEQ ID NO: 1562794
acgucauccaucugggcau

SEQ ID NO: 1773288 - RNA, 19 nt, Artificial Sequence
  Description of Artificial Sequence: Synthetic oligonucleotide
  Antisense strand to SEQ ID NO: 1773287
augcccagauggaugacgu

SEQ ID NO: 1773289 - RNA, 19 nt, Artificial Sequence
  Description of Artificial Sequence: Synthetic oligonucleotide
  Sense strand starting at position 2429 of SEQ ID NO: 1562794
gcucuuucugugguuguca

SEQ ID NO: 1773290 - RNA, 19 nt, Artificial Sequence
  Description of Artificial Sequence: Synthetic oligonucleotide
  Antisense strand to SEQ ID NO: 1773289
ugacaaccacagaaagagc

SEQ ID NO: 1773291 - RNA, 19 nt, Artificial Sequence
  Description of Artificial Sequence: Synthetic oligonucleotide
  Sense strand starting at position 2437 of SEQ ID NO: 1562794
ugugguugucauuggguuu

SEQ ID NO: 1773292 - RNA, 19 nt, Artificial Sequence
  Description of Artificial Sequence: Synthetic oligonucleotide
  Antisense strand to SEQ ID NO: 1773291
aaacccaaugacaaccaca

SEQ ID NO: 1773293 - RNA, 19 nt, Artificial Sequence
  Description of Artificial Sequence: Synthetic oligonucleotide
  Sense strand starting at position 2438 of SEQ ID NO: 1562794
gugguugucauuggguuua

SEQ ID NO: 1773294 - RNA, 19 nt, Artificial Sequence
  Description of Artificial Sequence: Synthetic oligonucleotide
  Antisense strand to SEQ ID NO: 1773293
uaaacccaaugacaaccac

SEQ ID NO: 1773295 - RNA, 19 nt, Artificial Sequence
  Description of Artificial Sequence: Synthetic oligonucleotide
  Sense strand starting at position 2440 of SEQ ID NO: 1562794
gguugucauuggguuuauu

SEQ ID NO: 1773296 - RNA, 19 nt, Artificial Sequence
  Description of Artificial Sequence: Synthetic oligonucleotide
  Antisense strand to SEQ ID NO: 1773295
aauaaacccaaugacaacc

SEQ ID NO: 1773297 - RNA, 19 nt, Artificial Sequence
  Description of Artificial Sequence: Synthetic oligonucleotide
  Sense strand starting at position 2778 of SEQ ID NO: 1562794
ggcccuuauugugauuuga

SEQ ID NO: 1773298 - RNA, 19 nt, Artificial Sequence
  Description of Artificial Sequence: Synthetic oligonucleotide
  Antisense strand to SEQ ID NO: 1773297
ucaaaucacaauaagggcc

SEQ ID NO: 1773299 - RNA, 19 nt, Artificial Sequence
  Description of Artificial Sequence: Synthetic oligonucleotide
  Sense strand starting at position 2895 of SEQ ID NO: 1562794
auauauguaacguagagau

SEQ ID NO: 1773300 - RNA, 19 nt, Artificial Sequence
  Description of Artificial Sequence: Synthetic oligonucleotide
  Antisense strand to SEQ ID NO: 1773299
aucucuacguuacauauau

SEQ ID NO: 1773301 - RNA, 19 nt, Artificial Sequence
  Description of Artificial Sequence: Synthetic oligonucleotide
  Sense strand starting at position 2899 of SEQ ID NO: 1562794
auguaacguagagauagua

SEQ ID NO: 1773302 - RNA, 19 nt, Artificial Sequence
  Description of Artificial Sequence: Synthetic oligonucleotide
  Antisense strand to SEQ ID NO: 1773301
uacuaucucuacguuacau

SEQ ID NO: 1773303 - RNA, 19 nt, Artificial Sequence
  Description of Artificial Sequence: Synthetic oligonucleotide
  Sense strand starting at position 3059 of SEQ ID NO: 1562794
aguuauugccuguggucca

SEQ ID NO: 1773304 - RNA, 19 nt, Artificial Sequence
  Description of Artificial Sequence: Synthetic oligonucleotide
  Antisense strand to SEQ ID NO: 1773303
uggaccacaggcaauaacu

SEQ ID NO: 1773305 - RNA, 19 nt, Artificial Sequence
  Description of Artificial Sequence: Synthetic oligonucleotide
  Sense strand starting at position 3066 of SEQ ID NO: 1562794
gccugugguccauggaacu

SEQ ID NO: 1773306 - RNA, 19 nt, Artificial Sequence
  Description of Artificial Sequence: Synthetic oligonucleotide
  Antisense strand to SEQ ID NO: 1773305
aguuccauggaccacaggc

SEQ ID NO: 1773307 - RNA, 19 nt, Artificial Sequence
  Description of Artificial Sequence: Synthetic oligonucleotide
  Sense strand starting at position 3082 of SEQ ID NO: 1562794
acuccuguaccgcaaagua

SEQ ID NO: 1773308 - RNA, 19 nt, Artificial Sequence
  Description of Artificial Sequence: Synthetic oligonucleotide
  Antisense strand to SEQ ID NO: 1773307
uacuuugcgguacaggagu

SEQ ID NO: 1773309 - RNA, 19 nt, Artificial Sequence
  Description of Artificial Sequence: Synthetic oligonucleotide
  Sense strand starting at position 3222 of SEQ ID NO: 1562794
agugaagauaccuggcuga

SEQ ID NO: 1773310 - RNA, 19 nt, Artificial Sequence
  Description of Artificial Sequence: Synthetic oligonucleotide
  Antisense strand to SEQ ID NO: 1773309
ucagccagguaucuucacu

SEQ ID NO: 1773311 - RNA, 19 nt, Artificial Sequence
  Description of Artificial Sequence: Synthetic oligonucleotide
  Sense strand starting at position 3225 of SEQ ID NO: 1562794
gaagauaccuggcugauau

SEQ ID NO: 1773312 - RNA, 19 nt, Artificial Sequence
  Description of Artificial Sequence: Synthetic oligonucleotide
  Antisense strand to SEQ ID NO: 1773311
auaucagccagguaucuuc

SEQ ID NO: 1773313 - RNA, 19 nt, Artificial Sequence
  Description of Artificial Sequence: Synthetic oligonucleotide
  Sense strand starting at position 3319 of SEQ ID NO: 1562794
guggaaggugaucgaauua

SEQ ID NO: 1773314 - RNA, 19 nt, Artificial Sequence
  Description of Artificial Sequence: Synthetic oligonucleotide
  Antisense strand to SEQ ID NO: 1773313
uaauucgaucaccuuccac

SEQ ID NO: 1773315 - RNA, 19 nt, Artificial Sequence
  Description of Artificial Sequence: Synthetic oligonucleotide
  Sense strand starting at position 3328 of SEQ ID NO: 1562794
gaucgaauuaugugggcag

SEQ ID NO: 1773316 - RNA, 19 nt, Artificial Sequence
  Description of Artificial Sequence: Synthetic oligonucleotide
  Antisense strand to SEQ ID NO: 1773315
cugcccacauaauucgauc

SEQ ID NO: 1773317 - RNA, 19 nt, Artificial Sequence
  Description of Artificial Sequence: Synthetic oligonucleotide
  Sense strand starting at position 3353 of SEQ ID NO: 1562794
ucugcacucuucuugugau

SEQ ID NO: 1773318 - RNA, 19 nt, Artificial Sequence
  Description of Artificial Sequence: Synthetic oligonucleotide
  Antisense strand to SEQ ID NO: 1773317
aucacaagaagagugcaga

SEQ ID NO: 1773319 - RNA, 19 nt, Artificial Sequence
  Description of Artificial Sequence: Synthetic oligonucleotide
  Sense strand starting at position 78 of SEQ ID NO: 1562795
ucaccuaacugccgagaaa

SEQ ID NO: 1773320 - RNA, 19 nt, Artificial Sequence
  Description of Artificial Sequence: Synthetic oligonucleotide
  Antisense strand to SEQ ID NO: 1773319
uuucucggcaguuagguga

SEQ ID NO: 1773321 - RNA, 19 nt, Artificial Sequence
  Description of Artificial Sequence: Synthetic oligonucleotide
  Sense strand starting at position 101 of SEQ ID NO: 1562795
ggcagccgucugagugaau

SEQ ID NO: 1773322 - RNA, 19 nt, Artificial Sequence
  Description of Artificial Sequence: Synthetic oligonucleotide
  Antisense strand to SEQ ID NO: 1773321
auucacucagacggcugcc

SEQ ID NO: 1773323 - RNA, 19 nt, Artificial Sequence
  Description of Artificial Sequence: Synthetic oligonucleotide
  Sense strand starting at position 108 of SEQ ID NO: 1562795
gucugagugaaugagaagu

SEQ ID NO: 1773324 - RNA, 19 nt, Artificial Sequence
  Description of Artificial Sequence: Synthetic oligonucleotide
  Antisense strand to SEQ ID NO: 1773323
acuucucauucacucagac

SEQ ID NO: 1773325 - RNA, 19 nt, Artificial Sequence
  Description of Artificial Sequence: Synthetic oligonucleotide
  Sense strand starting at position 284 of SEQ ID NO: 1562795
gagucaagguauuacagau

SEQ ID NO: 1773326 - RNA, 19 nt, Artificial Sequence
  Description of Artificial Sequence: Synthetic oligonucleotide
  Antisense strand to SEQ ID NO: 1773325
aucuguaauaccuugacuc

SEQ ID NO: 1773327 - RNA, 19 nt, Artificial Sequence
  Description of Artificial Sequence: Synthetic oligonucleotide
  Sense strand starting at position 290 of SEQ ID NO: 1562795
agguauuacagaugacgag

SEQ ID NO: 1773328 - RNA, 19 nt, Artificial Sequence
  Description of Artificial Sequence: Synthetic oligonucleotide
  Antisense strand to SEQ ID NO: 1773327
cucgucaucuguaauaccu

SEQ ID NO: 1773329 - RNA, 19 nt, Artificial Sequence
  Description of Artificial Sequence: Synthetic oligonucleotide
  Sense strand starting at position 318 of SEQ ID NO: 1562795
gguuuaguuuaagaggcua

SEQ ID NO: 1773330 - RNA, 19 nt, Artificial Sequence
  Description of Artificial Sequence: Synthetic oligonucleotide
  Antisense strand to SEQ ID NO: 1773329
uagccucuuaaacuaaacc

SEQ ID NO: 1773331 - RNA, 19 nt, Artificial Sequence
  Description of Artificial Sequence: Synthetic oligonucleotide
  Sense strand starting at position 395 of SEQ ID NO: 1562795
ggaagugagucacccagaa

SEQ ID NO: 1773332 - RNA, 19 nt, Artificial Sequence
  Description of Artificial Sequence: Synthetic oligonucleotide
  Antisense strand to SEQ ID NO: 1773331
uucugggugacucacuucc

SEQ ID NO: 1773333 - RNA, 19 nt, Artificial Sequence
  Description of Artificial Sequence: Synthetic oligonucleotide
  Sense strand starting at position 793 of SEQ ID NO: 1562795
cuaugugguccugggaaag

SEQ ID NO: 1773334 - RNA, 19 nt, Artificial Sequence
  Description of Artificial Sequence: Synthetic oligonucleotide
  Antisense strand to SEQ ID NO: 1773333
cuuucccaggaccacauag

SEQ ID NO: 1773335 - RNA, 19 nt, Artificial Sequence
  Description of Artificial Sequence: Synthetic oligonucleotide
  Sense strand starting at position 846 of SEQ ID NO: 1562795
acgugaagguucuagaaga

SEQ ID NO: 1773336 - RNA, 19 nt, Artificial Sequence
  Description of Artificial Sequence: Synthetic oligonucleotide
  Antisense strand to SEQ ID NO: 1773335
ucuucuagaaccuucacgu

SEQ ID NO: 1773337 - RNA, 19 nt, Artificial Sequence
  Description of Artificial Sequence: Synthetic oligonucleotide
  Sense strand starting at position 882 of SEQ ID NO: 1562795
ugcagauuggcuugggaau

SEQ ID NO: 1773338 - RNA, 19 nt, Artificial Sequence
  Description of Artificial Sequence: Synthetic oligonucleotide
  Antisense strand to SEQ ID NO: 1773337
auucccaagccaaucugca

SEQ ID NO: 1773339 - RNA, 19 nt, Artificial Sequence
  Description of Artificial Sequence: Synthetic oligonucleotide
  Sense strand starting at position 883 of SEQ ID NO: 1562795
gcagauuggcuugggaauu

SEQ ID NO: 1773340 - RNA, 19 nt, Artificial Sequence
  Description of Artificial Sequence: Synthetic oligonucleotide
  Antisense strand to SEQ ID NO: 1773339
aauucccaagccaaucugc

SEQ ID NO: 1773341 - RNA, 19 nt, Artificial Sequence
  Description of Artificial Sequence: Synthetic oligonucleotide
  Sense strand starting at position 1140 of SEQ ID NO: 1562795
ggagaauagcccugcaguc

SEQ ID NO: 1773342 - RNA, 19 nt, Artificial Sequence
  Description of Artificial Sequence: Synthetic oligonucleotide
  Antisense strand to SEQ ID NO: 1773341
gacugcagggcuauucucc

SEQ ID NO: 1773343 - RNA, 19 nt, Artificial Sequence
  Description of Artificial Sequence: Synthetic oligonucleotide
  Sense strand starting at position 1182 of SEQ ID NO: 1562795
gguuaacaagauugagcaa

SEQ ID NO: 1773344 - RNA, 19 nt, Artificial Sequence
  Description of Artificial Sequence: Synthetic oligonucleotide
  Antisense strand to SEQ ID NO: 1773343
uugcucaaucuuguuaacc

SEQ ID NO: 1773345 - RNA, 19 nt, Artificial Sequence
  Description of Artificial Sequence: Synthetic oligonucleotide
  Sense strand starting at position 1234 of SEQ ID NO: 1562795
gugggugggcaagaguuaa

SEQ ID NO: 1773346 - RNA, 19 nt, Artificial Sequence
  Description of Artificial Sequence: Synthetic oligonucleotide
  Antisense strand to SEQ ID NO: 1773345
uuaacucuugcccacccac

SEQ ID NO: 1773347 - RNA, 19 nt, Artificial Sequence
  Description of Artificial Sequence: Synthetic oligonucleotide
  Sense strand starting at position 1242 of SEQ ID NO: 1562795
gcaagaguuaacugguuug

SEQ ID NO: 1773348 - RNA, 19 nt, Artificial Sequence
  Description of Artificial Sequence: Synthetic oligonucleotide
  Antisense strand to SEQ ID NO: 1773347
caaaccaguuaacucuugc

SEQ ID NO: 1773349 - RNA, 19 nt, Artificial Sequence
  Description of Artificial Sequence: Synthetic oligonucleotide
  Sense strand starting at position 1245 of SEQ ID NO: 1562795
agaguuaacugguuugagu

SEQ ID NO: 1773350 - RNA, 19 nt, Artificial Sequence
  Description of Artificial Sequence: Synthetic oligonucleotide
  Antisense strand to SEQ ID NO: 1773349
acucaaaccaguuaacucu

SEQ ID NO: 1773351 - RNA, 19 nt, Artificial Sequence
  Description of Artificial Sequence: Synthetic oligonucleotide
  Sense strand starting at position 1264 of SEQ ID NO: 1562795
gguuucuucugccagaaac

SEQ ID NO: 1773352 - RNA, 19 nt, Artificial Sequence
  Description of Artificial Sequence: Synthetic oligonucleotide
  Antisense strand to SEQ ID NO: 1773351
guuucuggcagaagaaacc

SEQ ID NO: 1773353 - RNA, 19 nt, Artificial Sequence
  Description of Artificial Sequence: Synthetic oligonucleotide
  Sense strand starting at position 1307 of SEQ ID NO: 1562795
ggaagauucucaccucccu

SEQ ID NO: 1773354 - RNA, 19 nt, Artificial Sequence
  Description of Artificial Sequence: Synthetic oligonucleotide
  Antisense strand to SEQ ID NO: 1773353
agggaggugagaaucuucc

SEQ ID NO: 1773355 - RNA, 19 nt, Artificial Sequence
  Description of Artificial Sequence: Synthetic oligonucleotide
  Sense strand starting at position 1467 of SEQ ID NO: 1562795
cagcguucucuggagcaga

SEQ ID NO: 1773356 - RNA, 19 nt, Artificial Sequence
  Description of Artificial Sequence: Synthetic oligonucleotide
  Antisense strand to SEQ ID NO: 1773355
ucugcuccagagaacgcug

SEQ ID NO: 1773357 - RNA, 19 nt, Artificial Sequence
  Description of Artificial Sequence: Synthetic oligonucleotide
  Sense strand starting at position 1468 of SEQ ID NO: 1562795
agcguucucuggagcagag

SEQ ID NO: 1773358 - RNA, 19 nt, Artificial Sequence
  Description of Artificial Sequence: Synthetic oligonucleotide
  Antisense strand to SEQ ID NO: 1773357
cucugcuccagagaacgcu

SEQ ID NO: 1773359 - RNA, 19 nt, Artificial Sequence
  Description of Artificial Sequence: Synthetic oligonucleotide
  Sense strand starting at position 1611 of SEQ ID NO: 1562795
cacgcucacuucucagaga

SEQ ID NO: 1773360 - RNA, 19 nt, Artificial Sequence
  Description of Artificial Sequence: Synthetic oligonucleotide
  Antisense strand to SEQ ID NO: 1773359
ucucugagaagugagcgug

SEQ ID NO: 1773361 - RNA, 19 nt, Artificial Sequence
  Description of Artificial Sequence: Synthetic oligonucleotide
  Sense strand starting at position 1614 of SEQ ID NO: 1562795
gcucacuucucagagagcu

SEQ ID NO: 1773362 - RNA, 19 nt, Artificial Sequence
  Description of Artificial Sequence: Synthetic oligonucleotide
  Antisense strand to SEQ ID NO: 1773361
agcucucugagaagugagc

SEQ ID NO: 1773363 - RNA, 19 nt, Artificial Sequence
  Description of Artificial Sequence: Synthetic oligonucleotide
  Sense strand starting at position 1650 of SEQ ID NO: 1562795
ggcagaaauaacugugcuu

SEQ ID NO: 1773364 - RNA, 19 nt, Artificial Sequence
  Description of Artificial Sequence: Synthetic oligonucleotide
  Antisense strand to SEQ ID NO: 1773363
aagcacaguuauuucugcc

SEQ ID NO: 1773365 - RNA, 19 nt, Artificial Sequence
  Description of Artificial Sequence: Synthetic oligonucleotide
  Sense strand starting at position 1805 of SEQ ID NO: 1562795
gcuagaaucugcucccgau

SEQ ID NO: 1773366 - RNA, 19 nt, Artificial Sequence
  Description of Artificial Sequence: Synthetic oligonucleotide
  Antisense strand to SEQ ID NO: 1773365
aucgggagcagauucuagc

SEQ ID NO: 1773367 - RNA, 19 nt, Artificial Sequence
  Description of Artificial Sequence: Synthetic oligonucleotide
  Sense strand starting at position 1892 of SEQ ID NO: 1562795
ucacacaagccaugauuga

SEQ ID NO: 1773368 - RNA, 19 nt, Artificial Sequence
  Description of Artificial Sequence: Synthetic oligonucleotide
  Antisense strand to SEQ ID NO: 1773367
ucaaucauggcuuguguga

SEQ ID NO: 1773369 - RNA, 19 nt, Artificial Sequence
  Description of Artificial Sequence: Synthetic oligonucleotide
  Sense strand starting at position 2076 of SEQ ID NO: 1562795
gggcggaguccguggaauu

SEQ ID NO: 1773370 - RNA, 19 nt, Artificial Sequence
  Description of Artificial Sequence: Synthetic oligonucleotide
  Antisense strand to SEQ ID NO: 1773369
aauuccacggacuccgccc

SEQ ID NO: 1773371 - RNA, 19 nt, Artificial Sequence
  Description of Artificial Sequence: Synthetic oligonucleotide
  Sense strand starting at position 2077 of SEQ ID NO: 1562795
ggcggaguccguggaauuu

SEQ ID NO: 1773372 - RNA, 19 nt, Artificial Sequence
  Description of Artificial Sequence: Synthetic oligonucleotide
  Antisense strand to SEQ ID NO: 1773371
aaauuccacggacuccgcc

SEQ ID NO: 1773373 - RNA, 19 nt, Artificial Sequence
  Description of Artificial Sequence: Synthetic oligonucleotide
  Sense strand starting at position 2265 of SEQ ID NO: 1562795
auaguuugaugaugagcua

SEQ ID NO: 1773374 - RNA, 19 nt, Artificial Sequence
  Description of Artificial Sequence: Synthetic oligonucleotide
  Antisense strand to SEQ ID NO: 1773373
uagcucaucaucaaacuau

SEQ ID NO: 1773375 - RNA, 19 nt, Artificial Sequence
  Description of Artificial Sequence: Synthetic oligonucleotide
  Sense strand starting at position 2682 of SEQ ID NO: 1562795
gagugucaagcuuaggaga

SEQ ID NO: 1773376 - RNA, 19 nt, Artificial Sequence
  Description of Artificial Sequence: Synthetic oligonucleotide
  Antisense strand to SEQ ID NO: 1773375
ucuccuaagcuugacacuc

SEQ ID NO: 1773377 - RNA, 19 nt, Artificial Sequence
  Description of Artificial Sequence: Synthetic oligonucleotide
  Sense strand starting at position 2684 of SEQ ID NO: 1562795
gugucaagcuuaggagaug

SEQ ID NO: 1773378 - RNA, 19 nt, Artificial Sequence
  Description of Artificial Sequence: Synthetic oligonucleotide
  Antisense strand to SEQ ID NO: 1773377
caucuccuaagcuugacac

SEQ ID NO: 1773379 - RNA, 19 nt, Artificial Sequence
  Description of Artificial Sequence: Synthetic oligonucleotide
  Sense strand starting at position 3135 of SEQ ID NO: 1562795
cugaguguucagcagguau

SEQ ID NO: 1773380 - RNA, 19 nt, Artificial Sequence
  Description of Artificial Sequence: Synthetic oligonucleotide
  Antisense strand to SEQ ID NO: 1773379
auaccugcugaacacucag

SEQ ID NO: 1773381 - RNA, 19 nt, Artificial Sequence
  Description of Artificial Sequence: Synthetic oligonucleotide
  Sense strand starting at position 3247 of SEQ ID NO: 1562795
gguggaaucugaccacaac

SEQ ID NO: 1773382 - RNA, 19 nt, Artificial Sequence
  Description of Artificial Sequence: Synthetic oligonucleotide
  Antisense strand to SEQ ID NO: 1773381
guuguggucagauuccacc

SEQ ID NO: 1773383 - RNA, 19 nt, Artificial Sequence
  Description of Artificial Sequence: Synthetic oligonucleotide
  Sense strand starting at position 3515 of SEQ ID NO: 1562795
ccgagaucagucuauugca

SEQ ID NO: 1773384 - RNA, 19 nt, Artificial Sequence
  Description of Artificial Sequence: Synthetic oligonucleotide
  Antisense strand to SEQ ID NO: 1773383
ugcaauagacugaucucgg

SEQ ID NO: 1773385 - RNA, 19 nt, Artificial Sequence
  Description of Artificial Sequence: Synthetic oligonucleotide
  Sense strand starting at position 3701 of SEQ ID NO: 1562795
cggagaagugccuggcuuu

SEQ ID NO: 1773386 - RNA, 19 nt, Artificial Sequence
  Description of Artificial Sequence: Synthetic oligonucleotide
  Antisense strand to SEQ ID NO: 1773385
aaagccaggcacuucuccg

SEQ ID NO: 1773387 - RNA, 19 nt, Artificial Sequence
  Description of Artificial Sequence: Synthetic oligonucleotide
  Sense strand starting at position 3702 of SEQ ID NO: 1562795
ggagaagugccuggcuuuc

SEQ ID NO: 1773388 - RNA, 19 nt, Artificial Sequence
  Description of Artificial Sequence: Synthetic oligonucleotide
  Antisense strand to SEQ ID NO: 1773387
gaaagccaggcacuucucc

SEQ ID NO: 1773389 - RNA, 19 nt, Artificial Sequence
  Description of Artificial Sequence: Synthetic oligonucleotide
  Sense strand starting at position 3855 of SEQ ID NO: 1562795
gggcuuggacauuguugua

SEQ ID NO: 1773390 - RNA, 19 nt, Artificial Sequence
  Description of Artificial Sequence: Synthetic oligonucleotide
  Antisense strand to SEQ ID NO: 1773389
uacaacaauguccaagccc

SEQ ID NO: 1773391 - RNA, 19 nt, Artificial Sequence
  Description of Artificial Sequence: Synthetic oligonucleotide
  Sense strand starting at position 3860 of SEQ ID NO: 1562795
uggacauuguuguauggga

SEQ ID NO: 1773392 - RNA, 19 nt, Artificial Sequence
  Description of Artificial Sequence: Synthetic oligonucleotide
  Antisense strand to SEQ ID NO: 1773391
ucccauacaacaaugucca

SEQ ID NO: 1773393 - RNA, 19 nt, Artificial Sequence
  Description of Artificial Sequence: Synthetic oligonucleotide
  Sense strand starting at position 3939 of SEQ ID NO: 1562795
ggaagaucacuguggcaga

SEQ ID NO: 1773394 - RNA, 19 nt, Artificial Sequence
  Description of Artificial Sequence: Synthetic oligonucleotide
  Antisense strand to SEQ ID NO: 1773393
ucugccacagugaucuucc

SEQ ID NO: 1773395 - RNA, 19 nt, Artificial Sequence
  Description of Artificial Sequence: Synthetic oligonucleotide
  Sense strand starting at position 3942 of SEQ ID NO: 1562795
agaucacuguggcagagaa

SEQ ID NO: 1773396 - RNA, 19 nt, Artificial Sequence
  Description of Artificial Sequence: Synthetic oligonucleotide
  Antisense strand to SEQ ID NO: 1773395
uucucugccacagugaucu

SEQ ID NO: 1773397 - RNA, 19 nt, Artificial Sequence
  Description of Artificial Sequence: Synthetic oligonucleotide
  Sense strand starting at position 3944 of SEQ ID NO: 1562795
aucacuguggcagagaauu

SEQ ID NO: 1773398 - RNA, 19 nt, Artificial Sequence
  Description of Artificial Sequence: Synthetic oligonucleotide
  Antisense strand to SEQ ID NO: 1773397
aauucucugccacagugau

SEQ ID NO: 1773399 - RNA, 19 nt, Artificial Sequence
  Description of Artificial Sequence: Synthetic oligonucleotide
  Sense strand starting at position 1 of SEQ ID NO: 1562796
cccacaauuuggugguaau

SEQ ID NO: 1773400 - RNA, 19 nt, Artificial Sequence
  Description of Artificial Sequence: Synthetic oligonucleotide
  Antisense strand to SEQ ID NO: 1773399
auuaccaccaaauuguggg

SEQ ID NO: 1773401 - RNA, 19 nt, Artificial Sequence
  Description of Artificial Sequence: Synthetic oligonucleotide
  Sense strand starting at position 120 of SEQ ID NO: 1562796
cggucagugacuuggccaa

SEQ ID NO: 1773402 - RNA, 19 nt, Artificial Sequence
  Description of Artificial Sequence: Synthetic oligonucleotide
  Antisense strand to SEQ ID NO: 1773401
uuggccaagucacugaccg

SEQ ID NO: 1773403 - RNA, 19 nt, Artificial Sequence
  Description of Artificial Sequence: Synthetic oligonucleotide
  Sense strand starting at position 145 of SEQ ID NO: 1562796
acaguaaagcuguggcaga

SEQ ID NO: 1773404 - RNA, 19 nt, Artificial Sequence
  Description of Artificial Sequence: Synthetic oligonucleotide
  Antisense strand to SEQ ID NO: 1773403
ucugccacagcuuuacugu

SEQ ID NO: 1773405 - RNA, 19 nt, Artificial Sequence
  Description of Artificial Sequence: Synthetic oligonucleotide
  Sense strand starting at position 158 of SEQ ID NO: 1562796
ggcagagucugguguagaa

SEQ ID NO: 1773406 - RNA, 19 nt, Artificial Sequence
  Description of Artificial Sequence: Synthetic oligonucleotide
  Antisense strand to SEQ ID NO: 1773405
uucuacaccagacucugcc

SEQ ID NO: 1773407 - RNA, 19 nt, Artificial Sequence
  Description of Artificial Sequence: Synthetic oligonucleotide
  Sense strand starting at position 160 of SEQ ID NO: 1562796
cagagucugguguagaauc

SEQ ID NO: 1773408 - RNA, 19 nt, Artificial Sequence
  Description of Artificial Sequence: Synthetic oligonucleotide
  Antisense strand to SEQ ID NO: 1773407
gauucuacaccagacucug

SEQ ID NO: 1773409 - RNA, 19 nt, Artificial Sequence
  Description of Artificial Sequence: Synthetic oligonucleotide
  Sense strand starting at position 162 of SEQ ID NO: 1562796
gagucugguguagaaucaa

SEQ ID NO: 1773410 - RNA, 19 nt, Artificial Sequence
  Description of Artificial Sequence: Synthetic oligonucleotide
  Antisense strand to SEQ ID NO: 1773409
uugauucuacaccagacuc

SEQ ID NO: 1773411 - RNA, 19 nt, Artificial Sequence
  Description of Artificial Sequence: Synthetic oligonucleotide
  Sense strand starting at position 240 of SEQ ID NO: 1562796
ugggcaauuugcucuccaa

SEQ ID NO: 1773412 - RNA, 19 nt, Artificial Sequence
  Description of Artificial Sequence: Synthetic oligonucleotide
  Antisense strand to SEQ ID NO: 1773411
uuggagagcaaauugccca

SEQ ID NO: 1773413 - RNA, 19 nt, Artificial Sequence
  Description of Artificial Sequence: Synthetic oligonucleotide
  Sense strand starting at position 1347 of SEQ ID NO: 1562796
gaggucaaguccguaguga

SEQ ID NO: 1773414 - RNA, 19 nt, Artificial Sequence
  Description of Artificial Sequence: Synthetic oligonucleotide
  Antisense strand to SEQ ID NO: 1773413
ucacuacggacuugaccuc

SEQ ID NO: 1773415 - RNA, 19 nt, Artificial Sequence
  Description of Artificial Sequence: Synthetic oligonucleotide
  Sense strand starting at position 1349 of SEQ ID NO: 1562796
ggucaaguccguagugagu

SEQ ID NO: 1773416 - RNA, 19 nt, Artificial Sequence
  Description of Artificial Sequence: Synthetic oligonucleotide
  Antisense strand to SEQ ID NO: 1773415
acucacuacggacuugacc

SEQ ID NO: 1773417 - RNA, 19 nt, Artificial Sequence
  Description of Artificial Sequence: Synthetic oligonucleotide
  Sense strand starting at position 1351 of SEQ ID NO: 1562796
ucaaguccguagugaguua

SEQ ID NO: 1773418 - RNA, 19 nt, Artificial Sequence
  Description of Artificial Sequence: Synthetic oligonucleotide
  Antisense strand to SEQ ID NO: 1773417
uaacucacuacggacuuga

SEQ ID NO: 1773419 - RNA, 19 nt, Artificial Sequence
  Description of Artificial Sequence: Synthetic oligonucleotide
  Sense strand starting at position 1356 of SEQ ID NO: 1562796
uccguagugaguuaugauu

SEQ ID NO: 1773420 - RNA, 19 nt, Artificial Sequence
  Description of Artificial Sequence: Synthetic oligonucleotide
  Antisense strand to SEQ ID NO: 1773419
aaucauaacucacuacgga

SEQ ID NO: 1773421 - RNA, 19 nt, Artificial Sequence
  Description of Artificial Sequence: Synthetic oligonucleotide
  Sense strand starting at position 1752 of SEQ ID NO: 1562796
acuucuuugcugcacagau

SEQ ID NO: 1773422 - RNA, 19 nt, Artificial Sequence
  Description of Artificial Sequence: Synthetic oligonucleotide
  Antisense strand to SEQ ID NO: 1773421
aucugugcagcaaagaagu

SEQ ID NO: 1773423 - RNA, 19 nt, Artificial Sequence
  Description of Artificial Sequence: Synthetic oligonucleotide
  Sense strand starting at position 1941 of SEQ ID NO: 1562796
ggucucaacucguggucaa

SEQ ID NO: 1773424 - RNA, 19 nt, Artificial Sequence
  Description of Artificial Sequence: Synthetic oligonucleotide
  Antisense strand to SEQ ID NO: 1773423
uugaccacgaguugagacc

SEQ ID NO: 1773425 - RNA, 19 nt, Artificial Sequence
  Description of Artificial Sequence: Synthetic oligonucleotide
  Sense strand starting at position 1942 of SEQ ID NO: 1562796
gucucaacucguggucaag

SEQ ID NO: 1773426 - RNA, 19 nt, Artificial Sequence
  Description of Artificial Sequence: Synthetic oligonucleotide
  Antisense strand to SEQ ID NO: 1773425
cuugaccacgaguugagac

SEQ ID NO: 1773427 - RNA, 19 nt, Artificial Sequence
  Description of Artificial Sequence: Synthetic oligonucleotide
  Sense strand starting at position 1953 of SEQ ID NO: 1562796
uggucaagcuuauauccua

SEQ ID NO: 1773428 - RNA, 19 nt, Artificial Sequence
  Description of Artificial Sequence: Synthetic oligonucleotide
  Antisense strand to SEQ ID NO: 1773427
uaggauauaagcuugacca

SEQ ID NO: 1773429 - RNA, 19 nt, Artificial Sequence
  Description of Artificial Sequence: Synthetic oligonucleotide
  Sense strand starting at position 2071 of SEQ ID NO: 1562796
gcagaagacuccucagcca

SEQ ID NO: 1773430 - RNA, 19 nt, Artificial Sequence
  Description of Artificial Sequence: Synthetic oligonucleotide
  Antisense strand to SEQ ID NO: 1773429
uggcugaggagucuucugc

SEQ ID NO: 1773431 - RNA, 19 nt, Artificial Sequence
  Description of Artificial Sequence: Synthetic oligonucleotide
  Sense strand starting at position 2252 of SEQ ID NO: 1562796
ccagcuuccuugccuguaa

SEQ ID NO: 1773432 - RNA, 19 nt, Artificial Sequence
  Description of Artificial Sequence: Synthetic oligonucleotide
  Antisense strand to SEQ ID NO: 1773431
uuacaggcaaggaagcugg

SEQ ID NO: 1773433 - RNA, 19 nt, Artificial Sequence
  Description of Artificial Sequence: Synthetic oligonucleotide
  Sense strand starting at position 2651 of SEQ ID NO: 1562796
gucagagagcauuauguuu

SEQ ID NO: 1773434 - RNA, 19 nt, Artificial Sequence
  Description of Artificial Sequence: Synthetic oligonucleotide
  Antisense strand to SEQ ID NO: 1773433
aaacauaaugcucucugac

SEQ ID NO: 1773435 - RNA, 19 nt, Artificial Sequence
  Description of Artificial Sequence: Synthetic oligonucleotide
  Sense strand starting at position 2686 of SEQ ID NO: 1562796
uauuauuuaucugaucgga

SEQ ID NO: 1773436 - RNA, 19 nt, Artificial Sequence
  Description of Artificial Sequence: Synthetic oligonucleotide
  Antisense strand to SEQ ID NO: 1773435
uccgaucagauaaauaaua

SEQ ID NO: 1773437 - RNA, 19 nt, Artificial Sequence
  Description of Artificial Sequence: Synthetic oligonucleotide
  Sense strand starting at position 2700 of SEQ ID NO: 1562796
ucggacauguagguuucaa

SEQ ID NO: 1773438 - RNA, 19 nt, Artificial Sequence
  Description of Artificial Sequence: Synthetic oligonucleotide
  Antisense strand to SEQ ID NO: 1773437
uugaaaccuacauguccga

SEQ ID NO: 1773439 - RNA, 19 nt, Artificial Sequence
  Description of Artificial Sequence: Synthetic oligonucleotide
  Sense strand starting at position 3143 of SEQ ID NO: 1562796
gcucuugacuucuguuacu

SEQ ID NO: 1773440 - RNA, 19 nt, Artificial Sequence
  Description of Artificial Sequence: Synthetic oligonucleotide
  Antisense strand to SEQ ID NO: 1773439
aguaacagaagucaagagc

SEQ ID NO: 1773441 - RNA, 19 nt, Artificial Sequence
  Description of Artificial Sequence: Synthetic oligonucleotide
  Sense strand starting at position 3146 of SEQ ID NO: 1562796
cuugacuucuguuacuuau

SEQ ID NO: 1773442 - RNA, 19 nt, Artificial Sequence
  Description of Artificial Sequence: Synthetic oligonucleotide
  Antisense strand to SEQ ID NO: 1773441
auaaguaacagaagucaag

SEQ ID NO: 1773443 - RNA, 19 nt, Artificial Sequence
  Description of Artificial Sequence: Synthetic oligonucleotide
  Sense strand starting at position 3148 of SEQ ID NO: 1562796
ugacuucuguuacuuaugu

SEQ ID NO: 1773444 - RNA, 19 nt, Artificial Sequence
  Description of Artificial Sequence: Synthetic oligonucleotide
  Antisense strand to SEQ ID NO: 1773443
acauaaguaacagaaguca

SEQ ID NO: 1773445 - RNA, 19 nt, Artificial Sequence
  Description of Artificial Sequence: Synthetic oligonucleotide
  Sense strand starting at position 3152 of SEQ ID NO: 1562796
uucuguuacuuauguaacu

SEQ ID NO: 1773446 - RNA, 19 nt, Artificial Sequence
  Description of Artificial Sequence: Synthetic oligonucleotide
  Antisense strand to SEQ ID NO: 1773445
aguuacauaaguaacagaa

SEQ ID NO: 1773447 - RNA, 19 nt, Artificial Sequence
  Description of Artificial Sequence: Synthetic oligonucleotide
  Sense strand starting at position 3169 of SEQ ID NO: 1562796
cuggcaugcuuacuauaga

SEQ ID NO: 1773448 - RNA, 19 nt, Artificial Sequence
  Description of Artificial Sequence: Synthetic oligonucleotide
  Antisense strand to SEQ ID NO: 1773447
ucuauaguaagcaugccag

SEQ ID NO: 1773449 - RNA, 19 nt, Artificial Sequence
  Description of Artificial Sequence: Synthetic oligonucleotide
  Sense strand starting at position 3172 of SEQ ID NO: 1562796
gcaugcuuacuauagacaa

SEQ ID NO: 1773450 - RNA, 19 nt, Artificial Sequence
  Description of Artificial Sequence: Synthetic oligonucleotide
  Antisense strand to SEQ ID NO: 1773449
uugucuauaguaagcaugc

SEQ ID NO: 1773451 - RNA, 19 nt, Artificial Sequence
  Description of Artificial Sequence: Synthetic oligonucleotide
  Sense strand starting at position 3386 of SEQ ID NO: 1562796
auacuuuaaugccugcgaa

SEQ ID NO: 1773452 - RNA, 19 nt, Artificial Sequence
  Description of Artificial Sequence: Synthetic oligonucleotide
  Antisense strand to SEQ ID NO: 1773451
uucgcaggcauuaaaguau

SEQ ID NO: 1773453 - RNA, 19 nt, Artificial Sequence
  Description of Artificial Sequence: Synthetic oligonucleotide
  Sense strand starting at position 3389 of SEQ ID NO: 1562796
cuuuaaugccugcgaaaua

SEQ ID NO: 1773454 - RNA, 19 nt, Artificial Sequence
  Description of Artificial Sequence: Synthetic oligonucleotide
  Antisense strand to SEQ ID NO: 1773453
uauuucgcaggcauuaaag

SEQ ID NO: 1773455 - RNA, 19 nt, Artificial Sequence
  Description of Artificial Sequence: Synthetic oligonucleotide
  Sense strand starting at position 3390 of SEQ ID NO: 1562796
uuuaaugccugcgaaauag

SEQ ID NO: 1773456 - RNA, 19 nt, Artificial Sequence
  Description of Artificial Sequence: Synthetic oligonucleotide
  Antisense strand to SEQ ID NO: 1773455
cuauuucgcaggcauuaaa

SEQ ID NO: 1773457 - RNA, 19 nt, Artificial Sequence
  Description of Artificial Sequence: Synthetic oligonucleotide
  Sense strand starting at position 3399 of SEQ ID NO: 1562796
ugcgaaauagucuaccuuu

SEQ ID NO: 1773458 - RNA, 19 nt, Artificial Sequence
  Description of Artificial Sequence: Synthetic oligonucleotide
  Antisense strand to SEQ ID NO: 1773457
aaagguagacuauuucgca

SEQ ID NO: 1773459 - RNA, 19 nt, Artificial Sequence
  Description of Artificial Sequence: Synthetic oligonucleotide
  Sense strand starting at position 3528 of SEQ ID NO: 1562796
gcugcaucgugacaacuua

SEQ ID NO: 1773460 - RNA, 19 nt, Artificial Sequence
  Description of Artificial Sequence: Synthetic oligonucleotide
  Antisense strand to SEQ ID NO: 1773459
uaaguugucacgaugcagc

SEQ ID NO: 1773461 - RNA, 19 nt, Artificial Sequence
  Description of Artificial Sequence: Synthetic oligonucleotide
  Sense strand starting at position 3540 of SEQ ID NO: 1562796
caacuuauguagggcagau

SEQ ID NO: 1773462 - RNA, 19 nt, Artificial Sequence
  Description of Artificial Sequence: Synthetic oligonucleotide
  Antisense strand to SEQ ID NO: 1773461
aucugcccuacauaaguug

SEQ ID NO: 1773463 - RNA, 19 nt, Artificial Sequence
  Description of Artificial Sequence: Synthetic oligonucleotide
  Sense strand starting at position 3755 of SEQ ID NO: 1562796
aggagugacuuccuccuuu

SEQ ID NO: 1773464 - RNA, 19 nt, Artificial Sequence
  Description of Artificial Sequence: Synthetic oligonucleotide
  Antisense strand to SEQ ID NO: 1773463
aaaggaggaagucacuccu

SEQ ID NO: 1773465 - RNA, 19 nt, Artificial Sequence
  Description of Artificial Sequence: Synthetic oligonucleotide
  Sense strand starting at position 3808 of SEQ ID NO: 1562796
cucccaaaggcaugguaaa

SEQ ID NO: 1773466 - RNA, 19 nt, Artificial Sequence
  Description of Artificial Sequence: Synthetic oligonucleotide
  Antisense strand to SEQ ID NO: 1773465
uuuaccaugccuuugggag

SEQ ID NO: 1773467 - RNA, 19 nt, Artificial Sequence
  Description of Artificial Sequence: Synthetic oligonucleotide
  Sense strand starting at position 3853 of SEQ ID NO: 1562796
aggcuuucucccuggaaac

SEQ ID NO: 1773468 - RNA, 19 nt, Artificial Sequence
  Description of Artificial Sequence: Synthetic oligonucleotide
  Antisense strand to SEQ ID NO: 1773467
guuuccagggagaaagccu

SEQ ID NO: 1773469 - RNA, 19 nt, Artificial Sequence
  Description of Artificial Sequence: Synthetic oligonucleotide
  Sense strand starting at position 3854 of SEQ ID NO: 1562796
ggcuuucucccuggaaacu

SEQ ID NO: 1773470 - RNA, 19 nt, Artificial Sequence
  Description of Artificial Sequence: Synthetic oligonucleotide
  Antisense strand to SEQ ID NO: 1773469
aguuuccagggagaaagcc

SEQ ID NO: 1773471 - RNA, 19 nt, Artificial Sequence
  Description of Artificial Sequence: Synthetic oligonucleotide
  Sense strand starting at position 3855 of SEQ ID NO: 1562796
gcuuucucccuggaaacua

SEQ ID NO: 1773472 - RNA, 19 nt, Artificial Sequence
  Description of Artificial Sequence: Synthetic oligonucleotide
  Antisense strand to SEQ ID NO: 1773471
uaguuuccagggagaaagc

SEQ ID NO: 1773473 - RNA, 19 nt, Artificial Sequence
  Description of Artificial Sequence: Synthetic oligonucleotide
  Sense strand starting at position 43 of SEQ ID NO: 1562797
ccauguuuccagugcagaa

SEQ ID NO: 1773474 - RNA, 19 nt, Artificial Sequence
  Description of Artificial Sequence: Synthetic oligonucleotide
  Antisense strand to SEQ ID NO: 1773473
uucugcacuggaaacaugg

SEQ ID NO: 1773475 - RNA, 19 nt, Artificial Sequence
  Description of Artificial Sequence: Synthetic oligonucleotide
  Sense strand starting at position 293 of SEQ ID NO: 1562797
ucucuucugggaugacgua

SEQ ID NO: 1773476 - RNA, 19 nt, Artificial Sequence
  Description of Artificial Sequence: Synthetic oligonucleotide
  Antisense strand to SEQ ID NO: 1773475
uacgucaucccagaagaga

SEQ ID NO: 1773477 - RNA, 19 nt, Artificial Sequence
  Description of Artificial Sequence: Synthetic oligonucleotide
  Sense strand starting at position 603 of SEQ ID NO: 1562797
gggaggaguccucgguuga

SEQ ID NO: 1773478 - RNA, 19 nt, Artificial Sequence
  Description of Artificial Sequence: Synthetic oligonucleotide
  Antisense strand to SEQ ID NO: 1773477
ucaaccgaggacuccuccc

SEQ ID NO: 1773479 - RNA, 19 nt, Artificial Sequence
  Description of Artificial Sequence: Synthetic oligonucleotide
  Sense strand starting at position 604 of SEQ ID NO: 1562797
ggaggaguccucgguugac

SEQ ID NO: 1773480 - RNA, 19 nt, Artificial Sequence
  Description of Artificial Sequence: Synthetic oligonucleotide
  Antisense strand to SEQ ID NO: 1773479
gucaaccgaggacuccucc

SEQ ID NO: 1773481 - RNA, 19 nt, Artificial Sequence
  Description of Artificial Sequence: Synthetic oligonucleotide
  Sense strand starting at position 839 of SEQ ID NO: 1562797
augccuucucccgacucau

SEQ ID NO: 1773482 - RNA, 19 nt, Artificial Sequence
  Description of Artificial Sequence: Synthetic oligonucleotide
  Antisense strand to SEQ ID NO: 1773481
augagucgggagaaggcau

SEQ ID NO: 1773483 - RNA, 19 nt, Artificial Sequence
  Description of Artificial Sequence: Synthetic oligonucleotide
  Sense strand starting at position 1015 of SEQ ID NO: 1562797
gggagcugucccgacaugu

SEQ ID NO: 1773484 - RNA, 19 nt, Artificial Sequence
  Description of Artificial Sequence: Synthetic oligonucleotide
  Antisense strand to SEQ ID NO: 1773483
acaugucgggacagcuccc

SEQ ID NO: 1773485 - RNA, 19 nt, Artificial Sequence
  Description of Artificial Sequence: Synthetic oligonucleotide
  Sense strand starting at position 1488 of SEQ ID NO: 1562797
gagagugaaucugggagaa

SEQ ID NO: 1773486 - RNA, 19 nt, Artificial Sequence
  Description of Artificial Sequence: Synthetic oligonucleotide
  Antisense strand to SEQ ID NO: 1773485
uucucccagauucacucuc

SEQ ID NO: 1773487 - RNA, 19 nt, Artificial Sequence
  Description of Artificial Sequence: Synthetic oligonucleotide
  Sense strand starting at position 1490 of SEQ ID NO: 1562797
gagugaaucugggagaaag

SEQ ID NO: 1773488 - RNA, 19 nt, Artificial Sequence
  Description of Artificial Sequence: Synthetic oligonucleotide
  Antisense strand to SEQ ID NO: 1773487
cuuucucccagauucacuc

SEQ ID NO: 1773489 - RNA, 19 nt, Artificial Sequence
  Description of Artificial Sequence: Synthetic oligonucleotide
  Sense strand starting at position 1948 of SEQ ID NO: 1562797
uguguuguaagacagaaac

SEQ ID NO: 1773490 - RNA, 19 nt, Artificial Sequence
  Description of Artificial Sequence: Synthetic oligonucleotide
  Antisense strand to SEQ ID NO: 1773489
guuucugucuuacaacaca

SEQ ID NO: 1773491 - RNA, 19 nt, Artificial Sequence
  Description of Artificial Sequence: Synthetic oligonucleotide
  Sense strand starting at position 1967 of SEQ ID NO: 1562797
agcuauauuuagccgggau

SEQ ID NO: 1773492 - RNA, 19 nt, Artificial Sequence
  Description of Artificial Sequence: Synthetic oligonucleotide
  Antisense strand to SEQ ID NO: 1773491
aucccggcuaaauauagcu

SEQ ID NO: 1773493 - RNA, 19 nt, Artificial Sequence
  Description of Artificial Sequence: Synthetic oligonucleotide
  Sense strand starting at position 1968 of SEQ ID NO: 1562797
gcuauauuuagccgggauc

SEQ ID NO: 1773494 - RNA, 19 nt, Artificial Sequence
  Description of Artificial Sequence: Synthetic oligonucleotide
  Antisense strand to SEQ ID NO: 1773493
gaucccggcuaaauauagc

SEQ ID NO: 1773495 - RNA, 19 nt, Artificial Sequence
  Description of Artificial Sequence: Synthetic oligonucleotide
  Sense strand starting at position 1993 of SEQ ID NO: 1562797
ccaggaaguuguuugaggu

SEQ ID NO: 1773496 - RNA, 19 nt, Artificial Sequence
  Description of Artificial Sequence: Synthetic oligonucleotide
  Antisense strand to SEQ ID NO: 1773495
accucaaacaacuuccugg

SEQ ID NO: 1773497 - RNA, 19 nt, Artificial Sequence
  Description of Artificial Sequence: Synthetic oligonucleotide
  Sense strand starting at position 1996 of SEQ ID NO: 1562797
ggaaguuguuugaggugca

SEQ ID NO: 1773498 - RNA, 19 nt, Artificial Sequence
  Description of Artificial Sequence: Synthetic oligonucleotide
  Antisense strand to SEQ ID NO: 1773497
ugcaccucaaacaacuucc

SEQ ID NO: 1773499 - RNA, 19 nt, Artificial Sequence
  Description of Artificial Sequence: Synthetic oligonucleotide
  Sense strand starting at position 1999 of SEQ ID NO: 1562797
aguuguuugaggugcauca

SEQ ID NO: 1773500 - RNA, 19 nt, Artificial Sequence
  Description of Artificial Sequence: Synthetic oligonucleotide
  Antisense strand to SEQ ID NO: 1773499
ugaugcaccucaaacaacu

SEQ ID NO: 1773501 - RNA, 19 nt, Artificial Sequence
  Description of Artificial Sequence: Synthetic oligonucleotide
  Sense strand starting at position 2001 of SEQ ID NO: 1562797
uuguuugaggugcaucaua

SEQ ID NO: 1773502 - RNA, 19 nt, Artificial Sequence
  Description of Artificial Sequence: Synthetic oligonucleotide
  Antisense strand to SEQ ID NO: 1773501
uaugaugcaccucaaacaa

SEQ ID NO: 1773503 - RNA, 19 nt, Artificial Sequence
  Description of Artificial Sequence: Synthetic oligonucleotide
  Sense strand starting at position 2006 of SEQ ID NO: 1562797
ugaggugcaucauaggaaa

SEQ ID NO: 1773504 - RNA, 19 nt, Artificial Sequence
  Description of Artificial Sequence: Synthetic oligonucleotide
  Antisense strand to SEQ ID NO: 1773503
uuuccuaugaugcaccuca

SEQ ID NO: 1773505 - RNA, 19 nt, Artificial Sequence
  Description of Artificial Sequence: Synthetic oligonucleotide
  Sense strand starting at position 2008 of SEQ ID NO: 1562797
aggugcaucauaggaaauu

SEQ ID NO: 1773506 - RNA, 19 nt, Artificial Sequence
  Description of Artificial Sequence: Synthetic oligonucleotide
  Antisense strand to SEQ ID NO: 1773505
aauuuccuaugaugcaccu

SEQ ID NO: 1773507 - RNA, 19 nt, Artificial Sequence
  Description of Artificial Sequence: Synthetic oligonucleotide
  Sense strand starting at position 2009 of SEQ ID NO: 1562797
ggugcaucauaggaaauua

SEQ ID NO: 1773508 - RNA, 19 nt, Artificial Sequence
  Description of Artificial Sequence: Synthetic oligonucleotide
  Antisense strand to SEQ ID NO: 1773507
uaauuuccuaugaugcacc

SEQ ID NO: 1773509 - RNA, 19 nt, Artificial Sequence
  Description of Artificial Sequence: Synthetic oligonucleotide
  Sense strand starting at position 2017 of SEQ ID NO: 1562797
auaggaaauuaugaaugga

SEQ ID NO: 1773510 - RNA, 19 nt, Artificial Sequence
  Description of Artificial Sequence: Synthetic oligonucleotide
  Antisense strand to SEQ ID NO: 1773509
uccauucauaauuuccuau

SEQ ID NO: 1773511 - RNA, 19 nt, Artificial Sequence
  Description of Artificial Sequence: Synthetic oligonucleotide
  Sense strand starting at position 2167 of SEQ ID NO: 1562797
cuggcuugucccgggaguu

SEQ ID NO: 1773512 - RNA, 19 nt, Artificial Sequence
  Description of Artificial Sequence: Synthetic oligonucleotide
  Antisense strand to SEQ ID NO: 1773511
aacucccgggacaagccag

SEQ ID NO: 1773513 - RNA, 19 nt, Artificial Sequence
  Description of Artificial Sequence: Synthetic oligonucleotide
  Sense strand starting at position 2169 of SEQ ID NO: 1562797
ggcuugucccgggaguugu

SEQ ID NO: 1773514 - RNA, 19 nt, Artificial Sequence
  Description of Artificial Sequence: Synthetic oligonucleotide
  Antisense strand to SEQ ID NO: 1773513
acaacucccgggacaagcc

SEQ ID NO: 1773515 - RNA, 19 nt, Artificial Sequence
  Description of Artificial Sequence: Synthetic oligonucleotide
  Sense strand starting at position 2177 of SEQ ID NO: 1562797
ccgggaguugucugaagau

SEQ ID NO: 1773516 - RNA, 19 nt, Artificial Sequence
  Description of Artificial Sequence: Synthetic oligonucleotide
  Antisense strand to SEQ ID NO: 1773515
aucuucagacaacucccgg

SEQ ID NO: 1773517 - RNA, 19 nt, Artificial Sequence
  Description of Artificial Sequence: Synthetic oligonucleotide
  Sense strand starting at position 2180 of SEQ ID NO: 1562797
ggaguugucugaagauggg

SEQ ID NO: 1773518 - RNA, 19 nt, Artificial Sequence
  Description of Artificial Sequence: Synthetic oligonucleotide
  Antisense strand to SEQ ID NO: 1773517
cccaucuucagacaacucc

SEQ ID NO: 1773519 - RNA, 19 nt, Artificial Sequence
  Description of Artificial Sequence: Synthetic oligonucleotide
  Sense strand starting at position 2421 of SEQ ID NO: 1562797
uggacuuuagacggucaua

SEQ ID NO: 1773520 - RNA, 19 nt, Artificial Sequence
  Description of Artificial Sequence: Synthetic oligonucleotide
  Antisense strand to SEQ ID NO: 1773519
uaugaccgucuaaagucca

SEQ ID NO: 1773521 - RNA, 19 nt, Artificial Sequence
  Description of Artificial Sequence: Synthetic oligonucleotide
  Sense strand starting at position 2476 of SEQ ID NO: 1562797
gagguagccuccuccaauc

SEQ ID NO: 1773522 - RNA, 19 nt, Artificial Sequence
  Description of Artificial Sequence: Synthetic oligonucleotide
  Antisense strand to SEQ ID NO: 1773521
gauuggaggaggcuaccuc

SEQ ID NO: 1773523 - RNA, 19 nt, Artificial Sequence
  Description of Artificial Sequence: Synthetic oligonucleotide
  Sense strand starting at position 2730 of SEQ ID NO: 1562797
gagagaggcuuggcgaaau

SEQ ID NO: 1773524 - RNA, 19 nt, Artificial Sequence
  Description of Artificial Sequence: Synthetic oligonucleotide
  Antisense strand to SEQ ID NO: 1773523
auuucgccaagccucucuc

SEQ ID NO: 1773525 - RNA, 19 nt, Artificial Sequence
  Description of Artificial Sequence: Synthetic oligonucleotide
  Sense strand starting at position 2890 of SEQ ID NO: 1562797
gcucuaaggcagugucaca

SEQ ID NO: 1773526 - RNA, 19 nt, Artificial Sequence
  Description of Artificial Sequence: Synthetic oligonucleotide
  Antisense strand to SEQ ID NO: 1773525
ugugacacugccuuagagc

SEQ ID NO: 1773527 - RNA, 19 nt, Artificial Sequence
  Description of Artificial Sequence: Synthetic oligonucleotide
  Sense strand starting at position 2929 of SEQ ID NO: 1562797
ccaggcgauuugugaauga

SEQ ID NO: 1773528 - RNA, 19 nt, Artificial Sequence
  Description of Artificial Sequence: Synthetic oligonucleotide
  Antisense strand to SEQ ID NO: 1773527
ucauucacaaaucgccugg

SEQ ID NO: 1773529 - RNA, 19 nt, Artificial Sequence
  Description of Artificial Sequence: Synthetic oligonucleotide
  Sense strand starting at position 3037 of SEQ ID NO: 1562797
cccuaugagaugcgggaau

SEQ ID NO: 1773530 - RNA, 19 nt, Artificial Sequence
  Description of Artificial Sequence: Synthetic oligonucleotide
  Antisense strand to SEQ ID NO: 1773529
auucccgcaucucauaggg

SEQ ID NO: 1773531 - RNA, 19 nt, Artificial Sequence
  Description of Artificial Sequence: Synthetic oligonucleotide
  Sense strand starting at position 3180 of SEQ ID NO: 1562797
accugagaucaaggugugu

SEQ ID NO: 1773532 - RNA, 19 nt, Artificial Sequence
  Description of Artificial Sequence: Synthetic oligonucleotide
  Antisense strand to SEQ ID NO: 1773531
acacaccuugaucucaggu

SEQ ID NO: 1773533 - RNA, 19 nt, Artificial Sequence
  Description of Artificial Sequence: Synthetic oligonucleotide
  Sense strand starting at position 3182 of SEQ ID NO: 1562797
cugagaucaagguguguga

SEQ ID NO: 1773534 - RNA, 19 nt, Artificial Sequence
  Description of Artificial Sequence: Synthetic oligonucleotide
  Antisense strand to SEQ ID NO: 1773533
ucacacaccuugaucucag

SEQ ID NO: 1773535 - RNA, 19 nt, Artificial Sequence
  Description of Artificial Sequence: Synthetic oligonucleotide
  Sense strand starting at position 3184 of SEQ ID NO: 1562797
gagaucaaggugugugagu

SEQ ID NO: 1773536 - RNA, 19 nt, Artificial Sequence
  Description of Artificial Sequence: Synthetic oligonucleotide
  Antisense strand to SEQ ID NO: 1773535
acucacacaccuugaucuc

SEQ ID NO: 1773537 - RNA, 19 nt, Artificial Sequence
  Description of Artificial Sequence: Synthetic oligonucleotide
  Sense strand starting at position 3185 of SEQ ID NO: 1562797
agaucaaggugugugaguu

SEQ ID NO: 1773538 - RNA, 19 nt, Artificial Sequence
  Description of Artificial Sequence: Synthetic oligonucleotide
  Antisense strand to SEQ ID NO: 1773537
aacucacacaccuugaucu

SEQ ID NO: 1773539 - RNA, 19 nt, Artificial Sequence
  Description of Artificial Sequence: Synthetic oligonucleotide
  Sense strand starting at position 3431 of SEQ ID NO: 1562797
ucggaugugaggugauaaa

SEQ ID NO: 1773540 - RNA, 19 nt, Artificial Sequence
  Description of Artificial Sequence: Synthetic oligonucleotide
  Antisense strand to SEQ ID NO: 1773539
uuuaucaccucacauccga

SEQ ID NO: 1773541 - RNA, 19 nt, Artificial Sequence
  Description of Artificial Sequence: Synthetic oligonucleotide
  Sense strand starting at position 3518 of SEQ ID NO: 1562797
uugucucuucuuugaggga

SEQ ID NO: 1773542 - RNA, 19 nt, Artificial Sequence
  Description of Artificial Sequence: Synthetic oligonucleotide
  Antisense strand to SEQ ID NO: 1773541
ucccucaaagaagagacaa

SEQ ID NO: 1773543 - RNA, 19 nt, Artificial Sequence
  Description of Artificial Sequence: Synthetic oligonucleotide
  Sense strand starting at position 3555 of SEQ ID NO: 1562797
ggcacuuacugcuccuaua

SEQ ID NO: 1773544 - RNA, 19 nt, Artificial Sequence
  Description of Artificial Sequence: Synthetic oligonucleotide
  Antisense strand to SEQ ID NO: 1773543
uauaggagcaguaagugcc

SEQ ID NO: 1773545 - RNA, 19 nt, Artificial Sequence
  Description of Artificial Sequence: Synthetic oligonucleotide
  Sense strand starting at position 3720 of SEQ ID NO: 1562797
gcacgugagcucuggacca

SEQ ID NO: 1773546 - RNA, 19 nt, Artificial Sequence
  Description of Artificial Sequence: Synthetic oligonucleotide
  Antisense strand to SEQ ID NO: 1773545
ugguccagagcucacgugc

SEQ ID NO: 1773547 - RNA, 19 nt, Artificial Sequence
  Description of Artificial Sequence: Synthetic oligonucleotide
  Sense strand starting at position 3722 of SEQ ID NO: 1562797
acgugagcucuggaccagu

SEQ ID NO: 1773548 - RNA, 19 nt, Artificial Sequence
  Description of Artificial Sequence: Synthetic oligonucleotide
  Antisense strand to SEQ ID NO: 1773547
acugguccagagcucacgu

SEQ ID NO: 1773549 - RNA, 19 nt, Artificial Sequence
  Description of Artificial Sequence: Synthetic oligonucleotide
  Sense strand starting at position 3866 of SEQ ID NO: 1562797
cggccugagucucucauua

SEQ ID NO: 1773550 - RNA, 19 nt, Artificial Sequence
  Description of Artificial Sequence: Synthetic oligonucleotide
  Antisense strand to SEQ ID NO: 1773549
uaaugagagacucaggccg

SEQ ID NO: 1773551 - RNA, 19 nt, Artificial Sequence
  Description of Artificial Sequence: Synthetic oligonucleotide
  Sense strand starting at position 3877 of SEQ ID NO: 1562797
ucucauuaggcucaagagu

SEQ ID NO: 1773552 - RNA, 19 nt, Artificial Sequence
  Description of Artificial Sequence: Synthetic oligonucleotide
  Antisense strand to SEQ ID NO: 1773551
acucuugagccuaaugaga

SEQ ID NO: 1773553 - RNA, 19 nt, Artificial Sequence
  Description of Artificial Sequence: Synthetic oligonucleotide
  Sense strand starting at position 15 of SEQ ID NO: 1562798
cugccucuccaaggguaaa

SEQ ID NO: 1773554 - RNA, 19 nt, Artificial Sequence
  Description of Artificial Sequence: Synthetic oligonucleotide
  Antisense strand to SEQ ID NO: 1773553
uuuacccuuggagaggcag

SEQ ID NO: 1773555 - RNA, 19 nt, Artificial Sequence
  Description of Artificial Sequence: Synthetic oligonucleotide
  Sense strand starting at position 79 of SEQ ID NO: 1562798
cugccuucccaggauuaag

SEQ ID NO: 1773556 - RNA, 19 nt, Artificial Sequence
  Description of Artificial Sequence: Synthetic oligonucleotide
  Antisense strand to SEQ ID NO: 1773555
cuuaauccugggaaggcag

SEQ ID NO: 1773557 - RNA, 19 nt, Artificial Sequence
  Description of Artificial Sequence: Synthetic oligonucleotide
  Sense strand starting at position 189 of SEQ ID NO: 1562798
uccauuggcucuuuagaaa

SEQ ID NO: 1773558 - RNA, 19 nt, Artificial Sequence
  Description of Artificial Sequence: Synthetic oligonucleotide
  Antisense strand to SEQ ID NO: 1773557
uuucuaaagagccaaugga

SEQ ID NO: 1773559 - RNA, 19 nt, Artificial Sequence
  Description of Artificial Sequence: Synthetic oligonucleotide
  Sense strand starting at position 384 of SEQ ID NO: 1562798
auauguuaacucuguugaa

SEQ ID NO: 1773560 - RNA, 19 nt, Artificial Sequence
  Description of Artificial Sequence: Synthetic oligonucleotide
  Antisense strand to SEQ ID NO: 1773559
uucaacagaguuaacauau

SEQ ID NO: 1773561 - RNA, 19 nt, Artificial Sequence
  Description of Artificial Sequence: Synthetic oligonucleotide
  Sense strand starting at position 487 of SEQ ID NO: 1562798
uugguagagucagcauuga

SEQ ID NO: 1773562 - RNA, 19 nt, Artificial Sequence
  Description of Artificial Sequence: Synthetic oligonucleotide
  Antisense strand to SEQ ID NO: 1773561
ucaaugcugacucuaccaa

SEQ ID NO: 1773563 - RNA, 19 nt, Artificial Sequence
  Description of Artificial Sequence: Synthetic oligonucleotide
  Sense strand starting at position 638 of SEQ ID NO: 1562798
gcaagaucugggcacugga

SEQ ID NO: 1773564 - RNA, 19 nt, Artificial Sequence
  Description of Artificial Sequence: Synthetic oligonucleotide
  Antisense strand to SEQ ID NO: 1773563
uccagugcccagaucuugc

SEQ ID NO: 1773565 - RNA, 19 nt, Artificial Sequence
  Description of Artificial Sequence: Synthetic oligonucleotide
  Sense strand starting at position 854 of SEQ ID NO: 1562798
caaagaaagccagguuaga

SEQ ID NO: 1773566 - RNA, 19 nt, Artificial Sequence
  Description of Artificial Sequence: Synthetic oligonucleotide
  Antisense strand to SEQ ID NO: 1773565
ucuaaccuggcuuucuuug

SEQ ID NO: 1773567 - RNA, 19 nt, Artificial Sequence
  Description of Artificial Sequence: Synthetic oligonucleotide
  Sense strand starting at position 863 of SEQ ID NO: 1562798
ccagguuagagguagaguu

SEQ ID NO: 1773568 - RNA, 19 nt, Artificial Sequence
  Description of Artificial Sequence: Synthetic oligonucleotide
  Antisense strand to SEQ ID NO: 1773567
aacucuaccucuaaccugg

SEQ ID NO: 1773569 - RNA, 19 nt, Artificial Sequence
  Description of Artificial Sequence: Synthetic oligonucleotide
  Sense strand starting at position 871 of SEQ ID NO: 1562798
gagguagaguuuccacauc

SEQ ID NO: 1773570 - RNA, 19 nt, Artificial Sequence
  Description of Artificial Sequence: Synthetic oligonucleotide
  Antisense strand to SEQ ID NO: 1773569
gauguggaaacucuaccuc

SEQ ID NO: 1773571 - RNA, 19 nt, Artificial Sequence
  Description of Artificial Sequence: Synthetic oligonucleotide
  Sense strand starting at position 1085 of SEQ ID NO: 1562798
ugugccugccauuaagaga

SEQ ID NO: 1773572 - RNA, 19 nt, Artificial Sequence
  Description of Artificial Sequence: Synthetic oligonucleotide
  Antisense strand to SEQ ID NO: 1773571
ucucuuaauggcaggcaca

SEQ ID NO: 1773573 - RNA, 19 nt, Artificial Sequence
  Description of Artificial Sequence: Synthetic oligonucleotide
  Sense strand starting at position 1231 of SEQ ID NO: 1562798
gcagguaagacaugugaga

SEQ ID NO: 1773574 - RNA, 19 nt, Artificial Sequence
  Description of Artificial Sequence: Synthetic oligonucleotide
  Antisense strand to SEQ ID NO: 1773573
ucucacaugucuuaccugc

SEQ ID NO: 1773575 - RNA, 19 nt, Artificial Sequence
  Description of Artificial Sequence: Synthetic oligonucleotide
  Sense strand starting at position 1339 of SEQ ID NO: 1562798
cagguuugucugggauaga

SEQ ID NO: 1773576 - RNA, 19 nt, Artificial Sequence
  Description of Artificial Sequence: Synthetic oligonucleotide
  Antisense strand to SEQ ID NO: 1773575
ucuaucccagacaaaccug

SEQ ID NO: 1773577 - RNA, 19 nt, Artificial Sequence
  Description of Artificial Sequence: Synthetic oligonucleotide
  Sense strand starting at position 1364 of SEQ ID NO: 1562798
gcuggagcucccuaagaag

SEQ ID NO: 1773578 - RNA, 19 nt, Artificial Sequence
  Description of Artificial Sequence: Synthetic oligonucleotide
  Antisense strand to SEQ ID NO: 1773577
cuucuuagggagcuccagc

SEQ ID NO: 1773579 - RNA, 19 nt, Artificial Sequence
  Description of Artificial Sequence: Synthetic oligonucleotide
  Sense strand starting at position 1380 of SEQ ID NO: 1562798
aaguuccuucuggguauau

SEQ ID NO: 1773580 - RNA, 19 nt, Artificial Sequence
  Description of Artificial Sequence: Synthetic oligonucleotide
  Antisense strand to SEQ ID NO: 1773579
auauacccagaaggaacuu

SEQ ID NO: 1773581 - RNA, 19 nt, Artificial Sequence
  Description of Artificial Sequence: Synthetic oligonucleotide
  Sense strand starting at position 1445 of SEQ ID NO: 1562798
ccgauucuccuuggguaua

SEQ ID NO: 1773582 - RNA, 19 nt, Artificial Sequence
  Description of Artificial Sequence: Synthetic oligonucleotide
  Antisense strand to SEQ ID NO: 1773581
uauacccaaggagaaucgg

SEQ ID NO: 1773583 - RNA, 19 nt, Artificial Sequence
  Description of Artificial Sequence: Synthetic oligonucleotide
  Sense strand starting at position 2218 of SEQ ID NO: 1562798
caggauagagugugaacau

SEQ ID NO: 1773584 - RNA, 19 nt, Artificial Sequence
  Description of Artificial Sequence: Synthetic oligonucleotide
  Antisense strand to SEQ ID NO: 1773583
auguucacacucuauccug

SEQ ID NO: 1773585 - RNA, 19 nt, Artificial Sequence
  Description of Artificial Sequence: Synthetic oligonucleotide
  Sense strand starting at position 2278 of SEQ ID NO: 1562798
gacaguaauucugcuugga

SEQ ID NO: 1773586 - RNA, 19 nt, Artificial Sequence
  Description of Artificial Sequence: Synthetic oligonucleotide
  Antisense strand to SEQ ID NO: 1773585
uccaagcagaauuacuguc

SEQ ID NO: 1773587 - RNA, 19 nt, Artificial Sequence
  Description of Artificial Sequence: Synthetic oligonucleotide
  Sense strand starting at position 2280 of SEQ ID NO: 1562798
caguaauucugcuuggagg

SEQ ID NO: 1773588 - RNA, 19 nt, Artificial Sequence
  Description of Artificial Sequence: Synthetic oligonucleotide
  Antisense strand to SEQ ID NO: 1773587
ccuccaagcagaauuacug

SEQ ID NO: 1773589 - RNA, 19 nt, Artificial Sequence
  Description of Artificial Sequence: Synthetic oligonucleotide
  Sense strand starting at position 2471 of SEQ ID NO: 1562798
gccucaagagcugaccaau

SEQ ID NO: 1773590 - RNA, 19 nt, Artificial Sequence
  Description of Artificial Sequence: Synthetic oligonucleotide
  Antisense strand to SEQ ID NO: 1773589
auuggucagcucuugaggc

SEQ ID NO: 1773591 - RNA, 19 nt, Artificial Sequence
  Description of Artificial Sequence: Synthetic oligonucleotide
  Sense strand starting at position 2520 of SEQ ID NO: 1562798
cuguguugcaaauaaggaa

SEQ ID NO: 1773592 - RNA, 19 nt, Artificial Sequence
  Description of Artificial Sequence: Synthetic oligonucleotide
  Antisense strand to SEQ ID NO: 1773591
uuccuuauuugcaacacag

SEQ ID NO: 1773593 - RNA, 19 nt, Artificial Sequence
  Description of Artificial Sequence: Synthetic oligonucleotide
  Sense strand starting at position 2604 of SEQ ID NO: 1562798
uuauuucucugagacagga

SEQ ID NO: 1773594 - RNA, 19 nt, Artificial Sequence
  Description of Artificial Sequence: Synthetic oligonucleotide
  Antisense strand to SEQ ID NO: 1773593
uccugucucagagaaauaa

SEQ ID NO: 1773595 - RNA, 19 nt, Artificial Sequence
  Description of Artificial Sequence: Synthetic oligonucleotide
  Sense strand starting at position 2914 of SEQ ID NO: 1562798
cuacuuguccugugauaac

SEQ ID NO: 1773596 - RNA, 19 nt, Artificial Sequence
  Description of Artificial Sequence: Synthetic oligonucleotide
  Antisense strand to SEQ ID NO: 1773595
guuaucacaggacaaguag

SEQ ID NO: 1773597 - RNA, 19 nt, Artificial Sequence
  Description of Artificial Sequence: Synthetic oligonucleotide
  Sense strand starting at position 2993 of SEQ ID NO: 1562798
gauugauaagccuagguau

SEQ ID NO: 1773598 - RNA, 19 nt, Artificial Sequence
  Description of Artificial Sequence: Synthetic oligonucleotide
  Antisense strand to SEQ ID NO: 1773597
auaccuaggcuuaucaauc

SEQ ID NO: 1773599 - RNA, 19 nt, Artificial Sequence
  Description of Artificial Sequence: Synthetic oligonucleotide
  Sense strand starting at position 2995 of SEQ ID NO: 1562798
uugauaagccuagguaucu

SEQ ID NO: 1773600 - RNA, 19 nt, Artificial Sequence
  Description of Artificial Sequence: Synthetic oligonucleotide
  Antisense strand to SEQ ID NO: 1773599
agauaccuaggcuuaucaa

SEQ ID NO: 1773601 - RNA, 19 nt, Artificial Sequence
  Description of Artificial Sequence: Synthetic oligonucleotide
  Sense strand starting at position 3000 of SEQ ID NO: 1562798
aagccuagguaucuggaau

SEQ ID NO: 1773602 - RNA, 19 nt, Artificial Sequence
  Description of Artificial Sequence: Synthetic oligonucleotide
  Antisense strand to SEQ ID NO: 1773601
auuccagauaccuaggcuu

SEQ ID NO: 1773603 - RNA, 19 nt, Artificial Sequence
  Description of Artificial Sequence: Synthetic oligonucleotide
  Sense strand starting at position 3042 of SEQ ID NO: 1562798
aguugugacgaugaccaaa

SEQ ID NO: 1773604 - RNA, 19 nt, Artificial Sequence
  Description of Artificial Sequence: Synthetic oligonucleotide
  Antisense strand to SEQ ID NO: 1773603
uuuggucaucgucacaacu

SEQ ID NO: 1773605 - RNA, 19 nt, Artificial Sequence
  Description of Artificial Sequence: Synthetic oligonucleotide
  Sense strand starting at position 3150 of SEQ ID NO: 1562798
agaucucacuacuggauuu

SEQ ID NO: 1773606 - RNA, 19 nt, Artificial Sequence
  Description of Artificial Sequence: Synthetic oligonucleotide
  Antisense strand to SEQ ID NO: 1773605
aaauccaguagugagaucu

SEQ ID NO: 1773607 - RNA, 19 nt, Artificial Sequence
  Description of Artificial Sequence: Synthetic oligonucleotide
  Sense strand starting at position 3215 of SEQ ID NO: 1562798
auuguaaagagccagaagu

SEQ ID NO: 1773608 - RNA, 19 nt, Artificial Sequence
  Description of Artificial Sequence: Synthetic oligonucleotide
  Antisense strand to SEQ ID NO: 1773607
acuucuggcucuuuacaau

SEQ ID NO: 1773609 - RNA, 19 nt, Artificial Sequence
  Description of Artificial Sequence: Synthetic oligonucleotide
  Sense strand starting at position 3271 of SEQ ID NO: 1562798
aggaaagucugauaaagau

SEQ ID NO: 1773610 - RNA, 19 nt, Artificial Sequence
  Description of Artificial Sequence: Synthetic oligonucleotide
  Antisense strand to SEQ ID NO: 1773609
aucuuuaucagacuuuccu

SEQ ID NO: 1773611 - RNA, 19 nt, Artificial Sequence
  Description of Artificial Sequence: Synthetic oligonucleotide
  Sense strand starting at position 3277 of SEQ ID NO: 1562798
gucugauaaagaugguaga

SEQ ID NO: 1773612 - RNA, 19 nt, Artificial Sequence
  Description of Artificial Sequence: Synthetic oligonucleotide
  Antisense strand to SEQ ID NO: 1773611
ucuaccaucuuuaucagac

SEQ ID NO: 1773613 - RNA, 19 nt, Artificial Sequence
  Description of Artificial Sequence: Synthetic oligonucleotide
  Sense strand starting at position 3342 of SEQ ID NO: 1562798
gacaacaaugcaugugaua

SEQ ID NO: 1773614 - RNA, 19 nt, Artificial Sequence
  Description of Artificial Sequence: Synthetic oligonucleotide
  Antisense strand to SEQ ID NO: 1773613
uaucacaugcauuguuguc

SEQ ID NO: 1773615 - RNA, 19 nt, Artificial Sequence
  Description of Artificial Sequence: Synthetic oligonucleotide
  Sense strand starting at position 3427 of SEQ ID NO: 1562798
cuguguuaagugcuuagca

SEQ ID NO: 1773616 - RNA, 19 nt, Artificial Sequence
  Description of Artificial Sequence: Synthetic oligonucleotide
  Antisense strand to SEQ ID NO: 1773615
ugcuaagcacuuaacacag

SEQ ID NO: 1773617 - RNA, 19 nt, Artificial Sequence
  Description of Artificial Sequence: Synthetic oligonucleotide
  Sense strand starting at position 3459 of SEQ ID NO: 1562798
auguuuaaauugccaguaa

SEQ ID NO: 1773618 - RNA, 19 nt, Artificial Sequence
  Description of Artificial Sequence: Synthetic oligonucleotide
  Antisense strand to SEQ ID NO: 1773617
uuacuggcaauuuaaacau

SEQ ID NO: 1773619 - RNA, 19 nt, Artificial Sequence
  Description of Artificial Sequence: Synthetic oligonucleotide
  Sense strand starting at position 3481 of SEQ ID NO: 1562798
gaggaaacgucaucagccu

SEQ ID NO: 1773620 - RNA, 19 nt, Artificial Sequence
  Description of Artificial Sequence: Synthetic oligonucleotide
  Antisense strand to SEQ ID NO: 1773619
aggcugaugacguuuccuc

SEQ ID NO: 1773621 - RNA, 19 nt, Artificial Sequence
  Description of Artificial Sequence: Synthetic oligonucleotide
  Sense strand starting at position 3530 of SEQ ID NO: 1562798
ggguuaugucacuauucuc

SEQ ID NO: 1773622 - RNA, 19 nt, Artificial Sequence
  Description of Artificial Sequence: Synthetic oligonucleotide
  Antisense strand to SEQ ID NO: 1773621
gagaauagugacauaaccc

SEQ ID NO: 1773623 - RNA, 19 nt, Artificial Sequence
  Description of Artificial Sequence: Synthetic oligonucleotide
  Sense strand starting at position 3781 of SEQ ID NO: 1562798
uacauauggcucuagagca

SEQ ID NO: 1773624 - RNA, 19 nt, Artificial Sequence
  Description of Artificial Sequence: Synthetic oligonucleotide
  Antisense strand to SEQ ID NO: 1773623
ugcucuagagccauaugua

SEQ ID NO: 1773625 - RNA, 19 nt, Artificial Sequence
  Description of Artificial Sequence: Synthetic oligonucleotide
  Sense strand starting at position 3876 of SEQ ID NO: 1562798
ccacucaauugugucauua

SEQ ID NO: 1773626 - RNA, 19 nt, Artificial Sequence
  Description of Artificial Sequence: Synthetic oligonucleotide
  Antisense strand to SEQ ID NO: 1773625
uaaugacacaauugagugg

SEQ ID NO: 1773627 - RNA, 19 nt, Artificial Sequence
  Description of Artificial Sequence: Synthetic oligonucleotide
  Sense strand starting at position 3880 of SEQ ID NO: 1562798
ucaauugugucauuauagg

SEQ ID NO: 1773628 - RNA, 19 nt, Artificial Sequence
  Description of Artificial Sequence: Synthetic oligonucleotide
  Antisense strand to SEQ ID NO: 1773627
ccuauaaugacacaauuga

SEQ ID NO: 1773629 - RNA, 19 nt, Artificial Sequence
  Description of Artificial Sequence: Synthetic oligonucleotide
  Sense strand starting at position 3885 of SEQ ID NO: 1562798
ugugucauuauagggcaaa

SEQ ID NO: 1773630 - RNA, 19 nt, Artificial Sequence
  Description of Artificial Sequence: Synthetic oligonucleotide
  Antisense strand to SEQ ID NO: 1773629
uuugcccuauaaugacaca

SEQ ID NO: 1773631 - RNA, 19 nt, Artificial Sequence
  Description of Artificial Sequence: Synthetic oligonucleotide
  Sense strand starting at position 3931 of SEQ ID NO: 1562798
gggacauggcuauguucca

SEQ ID NO: 1773632 - RNA, 19 nt, Artificial Sequence
  Description of Artificial Sequence: Synthetic oligonucleotide
  Antisense strand to SEQ ID NO: 1773631
uggaacauagccauguccc

SEQ ID NO: 1773633 - RNA, 19 nt, Artificial Sequence
  Description of Artificial Sequence: Synthetic oligonucleotide
  Sense strand starting at position 34 of SEQ ID NO: 1562799
gaggcuuuaugccucuaga

SEQ ID NO: 1773634 - RNA, 19 nt, Artificial Sequence
  Description of Artificial Sequence: Synthetic oligonucleotide
  Antisense strand to SEQ ID NO: 1773633
ucuagaggcauaaagccuc

SEQ ID NO: 1773635 - RNA, 19 nt, Artificial Sequence
  Description of Artificial Sequence: Synthetic oligonucleotide
  Sense strand starting at position 37 of SEQ ID NO: 1562799
gcuuuaugccucuagacua

SEQ ID NO: 1773636 - RNA, 19 nt, Artificial Sequence
  Description of Artificial Sequence: Synthetic oligonucleotide
  Antisense strand to SEQ ID NO: 1773635
uagucuagaggcauaaagc

SEQ ID NO: 1773637 - RNA, 19 nt, Artificial Sequence
  Description of Artificial Sequence: Synthetic oligonucleotide
  Sense strand starting at position 42 of SEQ ID NO: 1562799
augccucuagacuauugua

SEQ ID NO: 1773638 - RNA, 19 nt, Artificial Sequence
  Description of Artificial Sequence: Synthetic oligonucleotide
  Antisense strand to SEQ ID NO: 1773637
uacaauagucuagaggcau

SEQ ID NO: 1773639 - RNA, 19 nt, Artificial Sequence
  Description of Artificial Sequence: Synthetic oligonucleotide
  Sense strand starting at position 452 of SEQ ID NO: 1562799
cuggaaaucauucgaguug

SEQ ID NO: 1773640 - RNA, 19 nt, Artificial Sequence
  Description of Artificial Sequence: Synthetic oligonucleotide
  Antisense strand to SEQ ID NO: 1773639
caacucgaaugauuuccag

SEQ ID NO: 1773641 - RNA, 19 nt, Artificial Sequence
  Description of Artificial Sequence: Synthetic oligonucleotide
  Sense strand starting at position 472 of SEQ ID NO: 1562799
aggacucuguaagcuuaaa

SEQ ID NO: 1773642 - RNA, 19 nt, Artificial Sequence
  Description of Artificial Sequence: Synthetic oligonucleotide
  Antisense strand to SEQ ID NO: 1773641
uuuaagcuuacagaguccu

SEQ ID NO: 1773643 - RNA, 19 nt, Artificial Sequence
  Description of Artificial Sequence: Synthetic oligonucleotide
  Sense strand starting at position 672 of SEQ ID NO: 1562799
ccuagcucucuccagaagu

SEQ ID NO: 1773644 - RNA, 19 nt, Artificial Sequence
  Description of Artificial Sequence: Synthetic oligonucleotide
  Antisense strand to SEQ ID NO: 1773643
acuucuggagagagcuagg

SEQ ID NO: 1773645 - RNA, 19 nt, Artificial Sequence
  Description of Artificial Sequence: Synthetic oligonucleotide
  Sense strand starting at position 680 of SEQ ID NO: 1562799
ucuccagaagucuguuauc

SEQ ID NO: 1773646 - RNA, 19 nt, Artificial Sequence
  Description of Artificial Sequence: Synthetic oligonucleotide
  Antisense strand to SEQ ID NO: 1773645
gauaacagacuucuggaga

SEQ ID NO: 1773647 - RNA, 19 nt, Artificial Sequence
  Description of Artificial Sequence: Synthetic oligonucleotide
  Sense strand starting at position 689 of SEQ ID NO: 1562799
gucuguuaucaccagugaa

SEQ ID NO: 1773648 - RNA, 19 nt, Artificial Sequence
  Description of Artificial Sequence: Synthetic oligonucleotide
  Antisense strand to SEQ ID NO: 1773647
uucacuggugauaacagac

SEQ ID NO: 1773649 - RNA, 19 nt, Artificial Sequence
  Description of Artificial Sequence: Synthetic oligonucleotide
  Sense strand starting at position 692 of SEQ ID NO: 1562799
uguuaucaccagugaagag

SEQ ID NO: 1773650 - RNA, 19 nt, Artificial Sequence
  Description of Artificial Sequence: Synthetic oligonucleotide
  Antisense strand to SEQ ID NO: 1773649
cucuucacuggugauaaca

SEQ ID NO: 1773651 - RNA, 19 nt, Artificial Sequence
  Description of Artificial Sequence: Synthetic oligonucleotide
  Sense strand starting at position 777 of SEQ ID NO: 1562799
ggaagugacuguccacaga

SEQ ID NO: 1773652 - RNA, 19 nt, Artificial Sequence
  Description of Artificial Sequence: Synthetic oligonucleotide
  Antisense strand to SEQ ID NO: 1773651
ucuguggacagucacuucc

SEQ ID NO: 1773653 - RNA, 19 nt, Artificial Sequence
  Description of Artificial Sequence: Synthetic oligonucleotide
  Sense strand starting at position 1078 of SEQ ID NO: 1562799
aggagguguuuggccgaau

SEQ ID NO: 1773654 - RNA, 19 nt, Artificial Sequence
  Description of Artificial Sequence: Synthetic oligonucleotide
  Antisense strand to SEQ ID NO: 1773653
auucggccaaacaccuccu

SEQ ID NO: 1773655 - RNA, 19 nt, Artificial Sequence
  Description of Artificial Sequence: Synthetic oligonucleotide
  Sense strand starting at position 1079 of SEQ ID NO: 1562799
ggagguguuuggccgaauc

SEQ ID NO: 1773656 - RNA, 19 nt, Artificial Sequence
  Description of Artificial Sequence: Synthetic oligonucleotide
  Antisense strand to SEQ ID NO: 1773655
gauucggccaaacaccucc

SEQ ID NO: 1773657 - RNA, 19 nt, Artificial Sequence
  Description of Artificial Sequence: Synthetic oligonucleotide
  Sense strand starting at position 1090 of SEQ ID NO: 1562799
gccgaaucccucuagucuu

SEQ ID NO: 1773658 - RNA, 19 nt, Artificial Sequence
  Description of Artificial Sequence: Synthetic oligonucleotide
  Antisense strand to SEQ ID NO: 1773657
aagacuagagggauucggc

SEQ ID NO: 1773659 - RNA, 19 nt, Artificial Sequence
  Description of Artificial Sequence: Synthetic oligonucleotide
  Sense strand starting at position 1097 of SEQ ID NO: 1562799
cccucuagucuuuagucua

SEQ ID NO: 1773660 - RNA, 19 nt, Artificial Sequence
  Description of Artificial Sequence: Synthetic oligonucleotide
  Antisense strand to SEQ ID NO: 1773659
uagacuaaagacuagaggg

SEQ ID NO: 1773661 - RNA, 19 nt, Artificial Sequence
  Description of Artificial Sequence: Synthetic oligonucleotide
  Sense strand starting at position 1102 of SEQ ID NO: 1562799
uagucuuuagucuagagag

SEQ ID NO: 1773662 - RNA, 19 nt, Artificial Sequence
  Description of Artificial Sequence: Synthetic oligonucleotide
  Antisense strand to SEQ ID NO: 1773661
cucucuagacuaaagacua

SEQ ID NO: 1773663 - RNA, 19 nt, Artificial Sequence
  Description of Artificial Sequence: Synthetic oligonucleotide
  Sense strand starting at position 2282 of SEQ ID NO: 1562799
uaaguucgacuacauugaa

SEQ ID NO: 1773664 - RNA, 19 nt, Artificial Sequence
  Description of Artificial Sequence: Synthetic oligonucleotide
  Antisense strand to SEQ ID NO: 1773663
uucaauguagucgaacuua

SEQ ID NO: 1773665 - RNA, 19 nt, Artificial Sequence
  Description of Artificial Sequence: Synthetic oligonucleotide
  Sense strand starting at position 2285 of SEQ ID NO: 1562799
guucgacuacauugaaaug

SEQ ID NO: 1773666 - RNA, 19 nt, Artificial Sequence
  Description of Artificial Sequence: Synthetic oligonucleotide
  Antisense strand to SEQ ID NO: 1773665
cauuucaauguagucgaac

SEQ ID NO: 1773667 - RNA, 19 nt, Artificial Sequence
  Description of Artificial Sequence: Synthetic oligonucleotide
  Sense strand starting at position 2297 of SEQ ID NO: 1562799
ugaaauggcuucgcucauu

SEQ ID NO: 1773668 - RNA, 19 nt, Artificial Sequence
  Description of Artificial Sequence: Synthetic oligonucleotide
  Antisense strand to SEQ ID NO: 1773667
aaugagcgaagccauuuca

SEQ ID NO: 1773669 - RNA, 19 nt, Artificial Sequence
  Description of Artificial Sequence: Synthetic oligonucleotide
  Sense strand starting at position 2364 of SEQ ID NO: 1562799
agcucuuuccaguaguguu

SEQ ID NO: 1773670 - RNA, 19 nt, Artificial Sequence
  Description of Artificial Sequence: Synthetic oligonucleotide
  Antisense strand to SEQ ID NO: 1773669
aacacuacuggaaagagcu

SEQ ID NO: 1773671 - RNA, 19 nt, Artificial Sequence
  Description of Artificial Sequence: Synthetic oligonucleotide
  Sense strand starting at position 2371 of SEQ ID NO: 1562799
uccaguaguguuuggaauc

SEQ ID NO: 1773672 - RNA, 19 nt, Artificial Sequence
  Description of Artificial Sequence: Synthetic oligonucleotide
  Antisense strand to SEQ ID NO: 1773671
gauuccaaacacuacugga

SEQ ID NO: 1773673 - RNA, 19 nt, Artificial Sequence
  Description of Artificial Sequence: Synthetic oligonucleotide
  Sense strand starting at position 2388 of SEQ ID NO: 1562799
ucaggaauauuacaaugga

SEQ ID NO: 1773674 - RNA, 19 nt, Artificial Sequence
  Description of Artificial Sequence: Synthetic oligonucleotide
  Antisense strand to SEQ ID NO: 1773673
uccauuguaauauuccuga

SEQ ID NO: 1773675 - RNA, 19 nt, Artificial Sequence
  Description of Artificial Sequence: Synthetic oligonucleotide
  Sense strand starting at position 2491 of SEQ ID NO: 1562799
cuaugaguaagcugacagu

SEQ ID NO: 1773676 - RNA, 19 nt, Artificial Sequence
  Description of Artificial Sequence: Synthetic oligonucleotide
  Antisense strand to SEQ ID NO: 1773675
acugucagcuuacucauag

SEQ ID NO: 1773677 - RNA, 19 nt, Artificial Sequence
  Description of Artificial Sequence: Synthetic oligonucleotide
  Sense strand starting at position 2497 of SEQ ID NO: 1562799
guaagcugacaguaaauaa

SEQ ID NO: 1773678 - RNA, 19 nt, Artificial Sequence
  Description of Artificial Sequence: Synthetic oligonucleotide
  Antisense strand to SEQ ID NO: 1773677
uuauuuacugucagcuuac

SEQ ID NO: 1773679 - RNA, 19 nt, Artificial Sequence
  Description of Artificial Sequence: Synthetic oligonucleotide
  Sense strand starting at position 2548 of SEQ ID NO: 1562799
ccagcauuccaggagcaga

SEQ ID NO: 1773680 - RNA, 19 nt, Artificial Sequence
  Description of Artificial Sequence: Synthetic oligonucleotide
  Antisense strand to SEQ ID NO: 1773679
ucugcuccuggaaugcugg

SEQ ID NO: 1773681 - RNA, 19 nt, Artificial Sequence
  Description of Artificial Sequence: Synthetic oligonucleotide
  Sense strand starting at position 2932 of SEQ ID NO: 1562799
uuagguuuggaaggagauu

SEQ ID NO: 1773682 - RNA, 19 nt, Artificial Sequence
  Description of Artificial Sequence: Synthetic oligonucleotide
  Antisense strand to SEQ ID NO: 1773681
aaucuccuuccaaaccuaa

SEQ ID NO: 1773683 - RNA, 19 nt, Artificial Sequence
  Description of Artificial Sequence: Synthetic oligonucleotide
  Sense strand starting at position 2952 of SEQ ID NO: 1562799
ggguccucugugugauuaa

SEQ ID NO: 1773684 - RNA, 19 nt, Artificial Sequence
  Description of Artificial Sequence: Synthetic oligonucleotide
  Antisense strand to SEQ ID NO: 1773683
uuaaucacacagaggaccc

SEQ ID NO: 1773685 - RNA, 19 nt, Artificial Sequence
  Description of Artificial Sequence: Synthetic oligonucleotide
  Sense strand starting at position 2955 of SEQ ID NO: 1562799
uccucugugugauuaagau

SEQ ID NO: 1773686 - RNA, 19 nt, Artificial Sequence
  Description of Artificial Sequence: Synthetic oligonucleotide
  Antisense strand to SEQ ID NO: 1773685
aucuuaaucacacagagga

SEQ ID NO: 1773687 - RNA, 19 nt, Artificial Sequence
  Description of Artificial Sequence: Synthetic oligonucleotide
  Sense strand starting at position 3057 of SEQ ID NO: 1562799
gucauuuccuuacaucaga

SEQ ID NO: 1773688 - RNA, 19 nt, Artificial Sequence
  Description of Artificial Sequence: Synthetic oligonucleotide
  Antisense strand to SEQ ID NO: 1773687
ucugauguaaggaaaugac

SEQ ID NO: 1773689 - RNA, 19 nt, Artificial Sequence
  Description of Artificial Sequence: Synthetic oligonucleotide
  Sense strand starting at position 3273 of SEQ ID NO: 1562799
ccggaugccggucagauuu

SEQ ID NO: 1773690 - RNA, 19 nt, Artificial Sequence
  Description of Artificial Sequence: Synthetic oligonucleotide
  Antisense strand to SEQ ID NO: 1773689
aaaucugaccggcauccgg

SEQ ID NO: 1773691 - RNA, 19 nt, Artificial Sequence
  Description of Artificial Sequence: Synthetic oligonucleotide
  Sense strand starting at position 3323 of SEQ ID NO: 1562799
uguccugagugugcacaaa

SEQ ID NO: 1773692 - RNA, 19 nt, Artificial Sequence
  Description of Artificial Sequence: Synthetic oligonucleotide
  Antisense strand to SEQ ID NO: 1773691
uuugugcacacucaggaca

SEQ ID NO: 1773693 - RNA, 19 nt, Artificial Sequence
  Description of Artificial Sequence: Synthetic oligonucleotide
  Sense strand starting at position 3361 of SEQ ID NO: 1562799
ugucccauuuccguuaauu

SEQ ID NO: 1773694 - RNA, 19 nt, Artificial Sequence
  Description of Artificial Sequence: Synthetic oligonucleotide
  Antisense strand to SEQ ID NO: 1773693
aauuaacggaaaugggaca

SEQ ID NO: 1773695 - RNA, 19 nt, Artificial Sequence
  Description of Artificial Sequence: Synthetic oligonucleotide
  Sense strand starting at position 3369 of SEQ ID NO: 1562799
uuccguuaauuccugggaa

SEQ ID NO: 1773696 - RNA, 19 nt, Artificial Sequence
  Description of Artificial Sequence: Synthetic oligonucleotide
  Antisense strand to SEQ ID NO: 1773695
uucccaggaauuaacggaa

SEQ ID NO: 1773697 - RNA, 19 nt, Artificial Sequence
  Description of Artificial Sequence: Synthetic oligonucleotide
  Sense strand starting at position 3371 of SEQ ID NO: 1562799
ccguuaauuccugggaacu

SEQ ID NO: 1773698 - RNA, 19 nt, Artificial Sequence
  Description of Artificial Sequence: Synthetic oligonucleotide
  Antisense strand to SEQ ID NO: 1773697
aguucccaggaauuaacgg

SEQ ID NO: 1773699 - RNA, 19 nt, Artificial Sequence
  Description of Artificial Sequence: Synthetic oligonucleotide
  Sense strand starting at position 3372 of SEQ ID NO: 1562799
cguuaauuccugggaacuc

SEQ ID NO: 1773700 - RNA, 19 nt, Artificial Sequence
  Description of Artificial Sequence: Synthetic oligonucleotide
  Antisense strand to SEQ ID NO: 1773699
gaguucccaggaauuaacg

SEQ ID NO: 1773701 - RNA, 19 nt, Artificial Sequence
  Description of Artificial Sequence: Synthetic oligonucleotide
  Sense strand starting at position 3437 of SEQ ID NO: 1562799
acacaagauuguguauuga

SEQ ID NO: 1773702 - RNA, 19 nt, Artificial Sequence
  Description of Artificial Sequence: Synthetic oligonucleotide
  Antisense strand to SEQ ID NO: 1773701
ucaauacacaaucuugugu

SEQ ID NO: 1773703 - RNA, 19 nt, Artificial Sequence
  Description of Artificial Sequence: Synthetic oligonucleotide
  Sense strand starting at position 3446 of SEQ ID NO: 1562799
uguguauugaauuaaagug

SEQ ID NO: 1773704 - RNA, 19 nt, Artificial Sequence
  Description of Artificial Sequence: Synthetic oligonucleotide
  Antisense strand to SEQ ID NO: 1773703
cacuuuaauucaauacaca

SEQ ID NO: 1773705 - RNA, 19 nt, Artificial Sequence
  Description of Artificial Sequence: Synthetic oligonucleotide
  Sense strand starting at position 3472 of SEQ ID NO: 1562799
uccagagacucuccugaca

SEQ ID NO: 1773706 - RNA, 19 nt, Artificial Sequence
  Description of Artificial Sequence: Synthetic oligonucleotide
  Antisense strand to SEQ ID NO: 1773705
ugucaggagagucucugga

SEQ ID NO: 1773707 - RNA, 19 nt, Artificial Sequence
  Description of Artificial Sequence: Synthetic oligonucleotide
  Sense strand starting at position 3815 of SEQ ID NO: 1562799
gggaauagcuuucuauaga

SEQ ID NO: 1773708 - RNA, 19 nt, Artificial Sequence
  Description of Artificial Sequence: Synthetic oligonucleotide
  Antisense strand to SEQ ID NO: 1773707
ucuauagaaagcuauuccc

SEQ ID NO: 1773709 - RNA, 19 nt, Artificial Sequence
  Description of Artificial Sequence: Synthetic oligonucleotide
  Sense strand starting at position 3836 of SEQ ID NO: 1562799
ugcuauagccaagagauau

SEQ ID NO: 1773710 - RNA, 19 nt, Artificial Sequence
  Description of Artificial Sequence: Synthetic oligonucleotide
  Antisense strand to SEQ ID NO: 1773709
auaucucuuggcuauagca

SEQ ID NO: 1773711 - RNA, 19 nt, Artificial Sequence
  Description of Artificial Sequence: Synthetic oligonucleotide
  Sense strand starting at position 3970 of SEQ ID NO: 1562799
cagguuaccuguccacagu

SEQ ID NO: 1773712 - RNA, 19 nt, Artificial Sequence
  Description of Artificial Sequence: Synthetic oligonucleotide
  Antisense strand to SEQ ID NO: 1773711
acuguggacagguaaccug

SEQ ID NO: 1773713 - RNA, 19 nt, Artificial Sequence
  Description of Artificial Sequence: Synthetic oligonucleotide
  Sense strand starting at position 49 of SEQ ID NO: 1562800
gcgucaucagguugaagaa

SEQ ID NO: 1773714 - RNA, 19 nt, Artificial Sequence
  Description of Artificial Sequence: Synthetic oligonucleotide
  Antisense strand to SEQ ID NO: 1773713
uucuucaaccugaugacgc

SEQ ID NO: 1773715 - RNA, 19 nt, Artificial Sequence
  Description of Artificial Sequence: Synthetic oligonucleotide
  Sense strand starting at position 58 of SEQ ID NO: 1562800
gguugaagaaguuguaguu

SEQ ID NO: 1773716 - RNA, 19 nt, Artificial Sequence
  Description of Artificial Sequence: Synthetic oligonucleotide
  Antisense strand to SEQ ID NO: 1773715
aacuacaacuucuucaacc

SEQ ID NO: 1773717 - RNA, 19 nt, Artificial Sequence
  Description of Artificial Sequence: Synthetic oligonucleotide
  Sense strand starting at position 71 of SEQ ID NO: 1562800
guaguugccggugaugaua

SEQ ID NO: 1773718 - RNA, 19 nt, Artificial Sequence
  Description of Artificial Sequence: Synthetic oligonucleotide
  Antisense strand to SEQ ID NO: 1773717
uaucaucaccggcaacuac

SEQ ID NO: 1773719 - RNA, 19 nt, Artificial Sequence
  Description of Artificial Sequence: Synthetic oligonucleotide
  Sense strand starting at position 382 of SEQ ID NO: 1562800
gcggcacagcgaucucaau

SEQ ID NO: 1773720 - RNA, 19 nt, Artificial Sequence
  Description of Artificial Sequence: Synthetic oligonucleotide
  Antisense strand to SEQ ID NO: 1773719
auugagaucgcugugccgc

SEQ ID NO: 1773721 - RNA, 19 nt, Artificial Sequence
  Description of Artificial Sequence: Synthetic oligonucleotide
  Sense strand starting at position 923 of SEQ ID NO: 1562800
gucacucaccacuggaaau

SEQ ID NO: 1773722 - RNA, 19 nt, Artificial Sequence
  Description of Artificial Sequence: Synthetic oligonucleotide
  Antisense strand to SEQ ID NO: 1773721
auuuccaguggugagugac

SEQ ID NO: 1773723 - RNA, 19 nt, Artificial Sequence
  Description of Artificial Sequence: Synthetic oligonucleotide
  Sense strand starting at position 997 of SEQ ID NO: 1562800
uguggacucagguaaggua

SEQ ID NO: 1773724 - RNA, 19 nt, Artificial Sequence
  Description of Artificial Sequence: Synthetic oligonucleotide
  Antisense strand to SEQ ID NO: 1773723
uaccuuaccugaguccaca

SEQ ID NO: 1773725 - RNA, 19 nt, Artificial Sequence
  Description of Artificial Sequence: Synthetic oligonucleotide
  Sense strand starting at position 1376 of SEQ ID NO: 1562800
cuagacuaccucugaguca

SEQ ID NO: 1773726 - RNA, 19 nt, Artificial Sequence
  Description of Artificial Sequence: Synthetic oligonucleotide
  Antisense strand to SEQ ID NO: 1773725
ugacucagagguagucuag

SEQ ID NO: 1773727 - RNA, 19 nt, Artificial Sequence
  Description of Artificial Sequence: Synthetic oligonucleotide
  Sense strand starting at position 1436 of SEQ ID NO: 1562800
ccuccaucccuaggucaga

SEQ ID NO: 1773728 - RNA, 19 nt, Artificial Sequence
  Description of Artificial Sequence: Synthetic oligonucleotide
  Antisense strand to SEQ ID NO: 1773727
ucugaccuagggauggagg

SEQ ID NO: 1773729 - RNA, 19 nt, Artificial Sequence
  Description of Artificial Sequence: Synthetic oligonucleotide
  Sense strand starting at position 1483 of SEQ ID NO: 1562800
caggucgggaccugucaaa

SEQ ID NO: 1773730 - RNA, 19 nt, Artificial Sequence
  Description of Artificial Sequence: Synthetic oligonucleotide
  Antisense strand to SEQ ID NO: 1773729
uuugacaggucccgaccug

SEQ ID NO: 1773731 - RNA, 19 nt, Artificial Sequence
  Description of Artificial Sequence: Synthetic oligonucleotide
  Sense strand starting at position 1513 of SEQ ID NO: 1562800
gggcuagaggccugcucaa

SEQ ID NO: 1773732 - RNA, 19 nt, Artificial Sequence
  Description of Artificial Sequence: Synthetic oligonucleotide
  Antisense strand to SEQ ID NO: 1773731
uugagcaggccucuagccc

SEQ ID NO: 1773733 - RNA, 19 nt, Artificial Sequence
  Description of Artificial Sequence: Synthetic oligonucleotide
  Sense strand starting at position 1876 of SEQ ID NO: 1562800
cugggauuugcguguagag

SEQ ID NO: 1773734 - RNA, 19 nt, Artificial Sequence
  Description of Artificial Sequence: Synthetic oligonucleotide
  Antisense strand to SEQ ID NO: 1773733
cucuacacgcaaaucccag

SEQ ID NO: 1773735 - RNA, 19 nt, Artificial Sequence
  Description of Artificial Sequence: Synthetic oligonucleotide
  Sense strand starting at position 1879 of SEQ ID NO: 1562800
ggauuugcguguagaggga

SEQ ID NO: 1773736 - RNA, 19 nt, Artificial Sequence
  Description of Artificial Sequence: Synthetic oligonucleotide
  Antisense strand to SEQ ID NO: 1773735
ucccucuacacgcaaaucc

SEQ ID NO: 1773737 - RNA, 19 nt, Artificial Sequence
  Description of Artificial Sequence: Synthetic oligonucleotide
  Sense strand starting at position 2724 of SEQ ID NO: 1562800
cgaguaucuggaggaggua

SEQ ID NO: 1773738 - RNA, 19 nt, Artificial Sequence
  Description of Artificial Sequence: Synthetic oligonucleotide
  Antisense strand to SEQ ID NO: 1773737
uaccuccuccagauacucg

SEQ ID NO: 1773739 - RNA, 19 nt, Artificial Sequence
  Description of Artificial Sequence: Synthetic oligonucleotide
  Sense strand starting at position 2955 of SEQ ID NO: 1562800
gguuucuacccgucagcga

SEQ ID NO: 1773740 - RNA, 19 nt, Artificial Sequence
  Description of Artificial Sequence: Synthetic oligonucleotide
  Antisense strand to SEQ ID NO: 1773739
ucgcugacggguagaaacc

SEQ ID NO: 1773741 - RNA, 19 nt, Artificial Sequence
  Description of Artificial Sequence: Synthetic oligonucleotide
  Sense strand starting at position 2979 of SEQ ID NO: 1562800
gaaugauugaguggguggu

SEQ ID NO: 1773742 - RNA, 19 nt, Artificial Sequence
  Description of Artificial Sequence: Synthetic oligonucleotide
  Antisense strand to SEQ ID NO: 1773741
accacccacucaaucauuc

SEQ ID NO: 1773743 - RNA, 19 nt, Artificial Sequence
  Description of Artificial Sequence: Synthetic oligonucleotide
  Sense strand starting at position 3029 of SEQ ID NO: 1562800
acuagaaagcauuauugcu

SEQ ID NO: 1773744 - RNA, 19 nt, Artificial Sequence
  Description of Artificial Sequence: Synthetic oligonucleotide
  Antisense strand to SEQ ID NO: 1773743
agcaauaaugcuuucuagu

SEQ ID NO: 1773745 - RNA, 19 nt, Artificial Sequence
  Description of Artificial Sequence: Synthetic oligonucleotide
  Sense strand starting at position 3055 of SEQ ID NO: 1562800
caguuauugcgagcaugcu

SEQ ID NO: 1773746 - RNA, 19 nt, Artificial Sequence
  Description of Artificial Sequence: Synthetic oligonucleotide
  Antisense strand to SEQ ID NO: 1773745
agcaugcucgcaauaacug

SEQ ID NO: 1773747 - RNA, 19 nt, Artificial Sequence
  Description of Artificial Sequence: Synthetic oligonucleotide
  Sense strand starting at position 3063 of SEQ ID NO: 1562800
gcgagcaugcuuguguguu

SEQ ID NO: 1773748 - RNA, 19 nt, Artificial Sequence
  Description of Artificial Sequence: Synthetic oligonucleotide
  Antisense strand to SEQ ID NO: 1773747
aacacacaagcaugcucgc

SEQ ID NO: 1773749 - RNA, 19 nt, Artificial Sequence
  Description of Artificial Sequence: Synthetic oligonucleotide
  Sense strand starting at position 3079 of SEQ ID NO: 1562800
guuugagaggucuggauca

SEQ ID NO: 1773750 - RNA, 19 nt, Artificial Sequence
  Description of Artificial Sequence: Synthetic oligonucleotide
  Antisense strand to SEQ ID NO: 1773749
ugauccagaccucucaaac

SEQ ID NO: 1773751 - RNA, 19 nt, Artificial Sequence
  Description of Artificial Sequence: Synthetic oligonucleotide
  Sense strand starting at position 3089 of SEQ ID NO: 1562800
ucuggaucacgaugucaga

SEQ ID NO: 1773752 - RNA, 19 nt, Artificial Sequence
  Description of Artificial Sequence: Synthetic oligonucleotide
  Antisense strand to SEQ ID NO: 1773751
ucugacaucgugauccaga

SEQ ID NO: 1773753 - RNA, 19 nt, Artificial Sequence
  Description of Artificial Sequence: Synthetic oligonucleotide
  Sense strand starting at position 3154 of SEQ ID NO: 1562800
ugcucuauccuguuagcga

SEQ ID NO: 1773754 - RNA, 19 nt, Artificial Sequence
  Description of Artificial Sequence: Synthetic oligonucleotide
  Antisense strand to SEQ ID NO: 1773753
ucgcuaacaggauagagca

SEQ ID NO: 1773755 - RNA, 19 nt, Artificial Sequence
  Description of Artificial Sequence: Synthetic oligonucleotide
  Sense strand starting at position 3161 of SEQ ID NO: 1562800
uccuguuagcgauuagugu

SEQ ID NO: 1773756 - RNA, 19 nt, Artificial Sequence
  Description of Artificial Sequence: Synthetic oligonucleotide
  Antisense strand to SEQ ID NO: 1773755
acacuaaucgcuaacagga

SEQ ID NO: 1773757 - RNA, 19 nt, Artificial Sequence
  Description of Artificial Sequence: Synthetic oligonucleotide
  Sense strand starting at position 3201 of SEQ ID NO: 1562800
ugucuagaccuguguuaag

SEQ ID NO: 1773758 - RNA, 19 nt, Artificial Sequence
  Description of Artificial Sequence: Synthetic oligonucleotide
  Antisense strand to SEQ ID NO: 1773757
cuuaacacaggucuagaca

SEQ ID NO: 1773759 - RNA, 19 nt, Artificial Sequence
  Description of Artificial Sequence: Synthetic oligonucleotide
  Sense strand starting at position 3218 of SEQ ID NO: 1562800
agcugucugcuccauauuu

SEQ ID NO: 1773760 - RNA, 19 nt, Artificial Sequence
  Description of Artificial Sequence: Synthetic oligonucleotide
  Antisense strand to SEQ ID NO: 1773759
aaauauggagcagacagcu

SEQ ID NO: 1773761 - RNA, 19 nt, Artificial Sequence
  Description of Artificial Sequence: Synthetic oligonucleotide
  Sense strand starting at position 3285 of SEQ ID NO: 1562800
cuuaaauguuucuugucuu

SEQ ID NO: 1773762 - RNA, 19 nt, Artificial Sequence
  Description of Artificial Sequence: Synthetic oligonucleotide
  Antisense strand to SEQ ID NO: 1773761
aagacaagaaacauuuaag

SEQ ID NO: 1773763 - RNA, 19 nt, Artificial Sequence
  Description of Artificial Sequence: Synthetic oligonucleotide
  Sense strand starting at position 3297 of SEQ ID NO: 1562800
uugucuugaucagcaguga

SEQ ID NO: 1773764 - RNA, 19 nt, Artificial Sequence
  Description of Artificial Sequence: Synthetic oligonucleotide
  Antisense strand to SEQ ID NO: 1773763
ucacugcugaucaagacaa

SEQ ID NO: 1773765 - RNA, 19 nt, Artificial Sequence
  Description of Artificial Sequence: Synthetic oligonucleotide
  Sense strand starting at position 3298 of SEQ ID NO: 1562800
ugucuugaucagcagugau

SEQ ID NO: 1773766 - RNA, 19 nt, Artificial Sequence
  Description of Artificial Sequence: Synthetic oligonucleotide
  Antisense strand to SEQ ID NO: 1773765
aucacugcugaucaagaca

SEQ ID NO: 1773767 - RNA, 19 nt, Artificial Sequence
  Description of Artificial Sequence: Synthetic oligonucleotide
  Sense strand starting at position 3308 of SEQ ID NO: 1562800
agcagugaucuccauucua

SEQ ID NO: 1773768 - RNA, 19 nt, Artificial Sequence
  Description of Artificial Sequence: Synthetic oligonucleotide
  Antisense strand to SEQ ID NO: 1773767
uagaauggagaucacugcu

SEQ ID NO: 1773769 - RNA, 19 nt, Artificial Sequence
  Description of Artificial Sequence: Synthetic oligonucleotide
  Sense strand starting at position 3438 of SEQ ID NO: 1562800
uccagucucuaaguguuga

SEQ ID NO: 1773770 - RNA, 19 nt, Artificial Sequence
  Description of Artificial Sequence: Synthetic oligonucleotide
  Antisense strand to SEQ ID NO: 1773769
ucaacacuuagagacugga

SEQ ID NO: 1773771 - RNA, 19 nt, Artificial Sequence
  Description of Artificial Sequence: Synthetic oligonucleotide
  Sense strand starting at position 3449 of SEQ ID NO: 1562800
aguguugaguuccucagga

SEQ ID NO: 1773772 - RNA, 19 nt, Artificial Sequence
  Description of Artificial Sequence: Synthetic oligonucleotide
  Antisense strand to SEQ ID NO: 1773771
uccugaggaacucaacacu

SEQ ID NO: 1773773 - RNA, 19 nt, Artificial Sequence
  Description of Artificial Sequence: Synthetic oligonucleotide
  Sense strand starting at position 3451 of SEQ ID NO: 1562800
uguugaguuccucaggaug

SEQ ID NO: 1773774 - RNA, 19 nt, Artificial Sequence
  Description of Artificial Sequence: Synthetic oligonucleotide
  Antisense strand to SEQ ID NO: 1773773
cauccugaggaacucaaca

SEQ ID NO: 1773775 - RNA, 19 nt, Artificial Sequence
  Description of Artificial Sequence: Synthetic oligonucleotide
  Sense strand starting at position 3528 of SEQ ID NO: 1562800
aaauauugccuguauuagg

SEQ ID NO: 1773776 - RNA, 19 nt, Artificial Sequence
  Description of Artificial Sequence: Synthetic oligonucleotide
  Antisense strand to SEQ ID NO: 1773775
ccuaauacaggcaauauuu

SEQ ID NO: 1773777 - RNA, 19 nt, Artificial Sequence
  Description of Artificial Sequence: Synthetic oligonucleotide
  Sense strand starting at position 3627 of SEQ ID NO: 1562800
gugggugucacgcaaacau

SEQ ID NO: 1773778 - RNA, 19 nt, Artificial Sequence
  Description of Artificial Sequence: Synthetic oligonucleotide
  Antisense strand to SEQ ID NO: 1773777
auguuugcgugacacccac

SEQ ID NO: 1773779 - RNA, 19 nt, Artificial Sequence
  Description of Artificial Sequence: Synthetic oligonucleotide
  Sense strand starting at position 3745 of SEQ ID NO: 1562800
gcuaaauguggcuauagug

SEQ ID NO: 1773780 - RNA, 19 nt, Artificial Sequence
  Description of Artificial Sequence: Synthetic oligonucleotide
  Antisense strand to SEQ ID NO: 1773779
cacuauagccacauuuagc

SEQ ID NO: 1773781 - RNA, 19 nt, Artificial Sequence
  Description of Artificial Sequence: Synthetic oligonucleotide
  Sense strand starting at position 3804 of SEQ ID NO: 1562800
caguuauaccaccggaaua

SEQ ID NO: 1773782 - RNA, 19 nt, Artificial Sequence
  Description of Artificial Sequence: Synthetic oligonucleotide
  Antisense strand to SEQ ID NO: 1773781
uauuccggugguauaacug

SEQ ID NO: 1773783 - RNA, 19 nt, Artificial Sequence
  Description of Artificial Sequence: Synthetic oligonucleotide
  Sense strand starting at position 3806 of SEQ ID NO: 1562800
guuauaccaccggaauauc

SEQ ID NO: 1773784 - RNA, 19 nt, Artificial Sequence
  Description of Artificial Sequence: Synthetic oligonucleotide
  Antisense strand to SEQ ID NO: 1773783
gauauuccggugguauaac

SEQ ID NO: 1773785 - RNA, 19 nt, Artificial Sequence
  Description of Artificial Sequence: Synthetic oligonucleotide
  Sense strand starting at position 3814 of SEQ ID NO: 1562800
accggaauaucacuugaau

SEQ ID NO: 1773786 - RNA, 19 nt, Artificial Sequence
  Description of Artificial Sequence: Synthetic oligonucleotide
  Antisense strand to SEQ ID NO: 1773785
auucaagugauauuccggu

SEQ ID NO: 1773787 - RNA, 19 nt, Artificial Sequence
  Description of Artificial Sequence: Synthetic oligonucleotide
  Sense strand starting at position 3875 of SEQ ID NO: 1562800
cuggccuggauuuguguaa

SEQ ID NO: 1773788 - RNA, 19 nt, Artificial Sequence
  Description of Artificial Sequence: Synthetic oligonucleotide
  Antisense strand to SEQ ID NO: 1773787
uuacacaaauccaggccag

SEQ ID NO: 1773789 - RNA, 19 nt, Artificial Sequence
  Description of Artificial Sequence: Synthetic oligonucleotide
  Sense strand starting at position 3933 of SEQ ID NO: 1562800
cguccaauucgugcuccaa

SEQ ID NO: 1773790 - RNA, 19 nt, Artificial Sequence
  Description of Artificial Sequence: Synthetic oligonucleotide
  Antisense strand to SEQ ID NO: 1773789
uuggagcacgaauuggacg

SEQ ID NO: 1773791 - RNA, 19 nt, Artificial Sequence
  Description of Artificial Sequence: Synthetic oligonucleotide
  Sense strand starting at position 3956 of SEQ ID NO: 1562800
cagcaagugugacucuuaa

SEQ ID NO: 1773792 - RNA, 19 nt, Artificial Sequence
  Description of Artificial Sequence: Synthetic oligonucleotide
  Antisense strand to SEQ ID NO: 1773791
uuaagagucacacuugcug

SEQ ID NO: 1773793 - RNA, 19 nt, Artificial Sequence
  Description of Artificial Sequence: Synthetic oligonucleotide
  Sense strand starting at position 166 of SEQ ID NO: 1562801
gagagcugguugucccuau

SEQ ID NO: 1773794 - RNA, 19 nt, Artificial Sequence
  Description of Artificial Sequence: Synthetic oligonucleotide
  Antisense strand to SEQ ID NO: 1773793
auagggacaaccagcucuc

SEQ ID NO: 1773795 - RNA, 19 nt, Artificial Sequence
  Description of Artificial Sequence: Synthetic oligonucleotide
  Sense strand starting at position 191 of SEQ ID NO: 1562801
cuguguccuucccagaaua

SEQ ID NO: 1773796 - RNA, 19 nt, Artificial Sequence
  Description of Artificial Sequence: Synthetic oligonucleotide
  Antisense strand to SEQ ID NO: 1773795
uauucugggaaggacacag

SEQ ID NO: 1773797 - RNA, 19 nt, Artificial Sequence
  Description of Artificial Sequence: Synthetic oligonucleotide
  Sense strand starting at position 193 of SEQ ID NO: 1562801
guguccuucccagaauauc

SEQ ID NO: 1773798 - RNA, 19 nt, Artificial Sequence
  Description of Artificial Sequence: Synthetic oligonucleotide
  Antisense strand to SEQ ID NO: 1773797
gauauucugggaaggacac

SEQ ID NO: 1773799 - RNA, 19 nt, Artificial Sequence
  Description of Artificial Sequence: Synthetic oligonucleotide
  Sense strand starting at position 307 of SEQ ID NO: 1562801
gccgcuugcauagugauga

SEQ ID NO: 1773800 - RNA, 19 nt, Artificial Sequence
  Description of Artificial Sequence: Synthetic oligonucleotide
  Antisense strand to SEQ ID NO: 1773799
ucaucacuaugcaagcggc

SEQ ID NO: 1773801 - RNA, 19 nt, Artificial Sequence
  Description of Artificial Sequence: Synthetic oligonucleotide
  Sense strand starting at position 720 of SEQ ID NO: 1562801
uccucuucugcagagacau

SEQ ID NO: 1773802 - RNA, 19 nt, Artificial Sequence
  Description of Artificial Sequence: Synthetic oligonucleotide
  Antisense strand to SEQ ID NO: 1773801
augucucugcagaagagga

SEQ ID NO: 1773803 - RNA, 19 nt, Artificial Sequence
  Description of Artificial Sequence: Synthetic oligonucleotide
  Sense strand starting at position 899 of SEQ ID NO: 1562801
ggagacguguccuuucuau

SEQ ID NO: 1773804 - RNA, 19 nt, Artificial Sequence
  Description of Artificial Sequence: Synthetic oligonucleotide
  Antisense strand to SEQ ID NO: 1773803
auagaaaggacacgucucc

SEQ ID NO: 1773805 - RNA, 19 nt, Artificial Sequence
  Description of Artificial Sequence: Synthetic oligonucleotide
  Sense strand starting at position 903 of SEQ ID NO: 1562801
acguguccuuucuauggga

SEQ ID NO: 1773806 - RNA, 19 nt, Artificial Sequence
  Description of Artificial Sequence: Synthetic oligonucleotide
  Antisense strand to SEQ ID NO: 1773805
ucccauagaaaggacacgu

SEQ ID NO: 1773807 - RNA, 19 nt, Artificial Sequence
  Description of Artificial Sequence: Synthetic oligonucleotide
  Sense strand starting at position 905 of SEQ ID NO: 1562801
guguccuuucuaugggaua

SEQ ID NO: 1773808 - RNA, 19 nt, Artificial Sequence
  Description of Artificial Sequence: Synthetic oligonucleotide
  Antisense strand to SEQ ID NO: 1773807
uaucccauagaaaggacac

SEQ ID NO: 1773809 - RNA, 19 nt, Artificial Sequence
  Description of Artificial Sequence: Synthetic oligonucleotide
  Sense strand starting at position 906 of SEQ ID NO: 1562801
uguccuuucuaugggauaa

SEQ ID NO: 1773810 - RNA, 19 nt, Artificial Sequence
  Description of Artificial Sequence: Synthetic oligonucleotide
  Antisense strand to SEQ ID NO: 1773809
uuaucccauagaaaggaca

SEQ ID NO: 1773811 - RNA, 19 nt, Artificial Sequence
  Description of Artificial Sequence: Synthetic oligonucleotide
  Sense strand starting at position 908 of SEQ ID NO: 1562801
uccuuucuaugggauaaac

SEQ ID NO: 1773812 - RNA, 19 nt, Artificial Sequence
  Description of Artificial Sequence: Synthetic oligonucleotide
  Antisense strand to SEQ ID NO: 1773811
guuuaucccauagaaagga

SEQ ID NO: 1773813 - RNA, 19 nt, Artificial Sequence
  Description of Artificial Sequence: Synthetic oligonucleotide
  Sense strand starting at position 1024 of SEQ ID NO: 1562801
gaaagugggucccaagaga

SEQ ID NO: 1773814 - RNA, 19 nt, Artificial Sequence
  Description of Artificial Sequence: Synthetic oligonucleotide
  Antisense strand to SEQ ID NO: 1773813
ucucuugggacccacuuuc

SEQ ID NO: 1773815 - RNA, 19 nt, Artificial Sequence
  Description of Artificial Sequence: Synthetic oligonucleotide
  Sense strand starting at position 1049 of SEQ ID NO: 1562801
uucuguuucucaucccuga

SEQ ID NO: 1773816 - RNA, 19 nt, Artificial Sequence
  Description of Artificial Sequence: Synthetic oligonucleotide
  Antisense strand to SEQ ID NO: 1773815
ucagggaugagaaacagaa

SEQ ID NO: 1773817 - RNA, 19 nt, Artificial Sequence
  Description of Artificial Sequence: Synthetic oligonucleotide
  Sense strand starting at position 1053 of SEQ ID NO: 1562801
guuucucaucccugacaca

SEQ ID NO: 1773818 - RNA, 19 nt, Artificial Sequence
  Description of Artificial Sequence: Synthetic oligonucleotide
  Antisense strand to SEQ ID NO: 1773817
ugugucagggaugagaaac

SEQ ID NO: 1773819 - RNA, 19 nt, Artificial Sequence
  Description of Artificial Sequence: Synthetic oligonucleotide
  Sense strand starting at position 1082 of SEQ ID NO: 1562801
ucaagaugcugauugcuuu

SEQ ID NO: 1773820 - RNA, 19 nt, Artificial Sequence
  Description of Artificial Sequence: Synthetic oligonucleotide
  Antisense strand to SEQ ID NO: 1773819
aaagcaaucagcaucuuga

SEQ ID NO: 1773821 - RNA, 19 nt, Artificial Sequence
  Description of Artificial Sequence: Synthetic oligonucleotide
  Sense strand starting at position 1088 of SEQ ID NO: 1562801
ugcugauugcuuuagcuuu

SEQ ID NO: 1773822 - RNA, 19 nt, Artificial Sequence
  Description of Artificial Sequence: Synthetic oligonucleotide
  Antisense strand to SEQ ID NO: 1773821
aaagcuaaagcaaucagca

SEQ ID NO: 1773823 - RNA, 19 nt, Artificial Sequence
  Description of Artificial Sequence: Synthetic oligonucleotide
  Sense strand starting at position 1136 of SEQ ID NO: 1562801
gcuauaaauuauugcugau

SEQ ID NO: 1773824 - RNA, 19 nt, Artificial Sequence
  Description of Artificial Sequence: Synthetic oligonucleotide
  Antisense strand to SEQ ID NO: 1773823
aucagcaauaauuuauagc

SEQ ID NO: 1773825 - RNA, 19 nt, Artificial Sequence
  Description of Artificial Sequence: Synthetic oligonucleotide
  Sense strand starting at position 1140 of SEQ ID NO: 1562801
uaaauuauugcugaugugu

SEQ ID NO: 1773826 - RNA, 19 nt, Artificial Sequence
  Description of Artificial Sequence: Synthetic oligonucleotide
  Antisense strand to SEQ ID NO: 1773825
acacaucagcaauaauuua

SEQ ID NO: 1773827 - RNA, 19 nt, Artificial Sequence
  Description of Artificial Sequence: Synthetic oligonucleotide
  Sense strand starting at position 1142 of SEQ ID NO: 1562801
aauuauugcugauguguua

SEQ ID NO: 1773828 - RNA, 19 nt, Artificial Sequence
  Description of Artificial Sequence: Synthetic oligonucleotide
  Antisense strand to SEQ ID NO: 1773827
uaacacaucagcaauaauu

SEQ ID NO: 1773829 - RNA, 19 nt, Artificial Sequence
  Description of Artificial Sequence: Synthetic oligonucleotide
  Sense strand starting at position 1485 of SEQ ID NO: 1562801
cggcuaauggugggagcua

SEQ ID NO: 1773830 - RNA, 19 nt, Artificial Sequence
  Description of Artificial Sequence: Synthetic oligonucleotide
  Antisense strand to SEQ ID NO: 1773829
uagcucccaccauuagccg

SEQ ID NO: 1773831 - RNA, 19 nt, Artificial Sequence
  Description of Artificial Sequence: Synthetic oligonucleotide
  Sense strand starting at position 1486 of SEQ ID NO: 1562801
ggcuaauggugggagcuaa

SEQ ID NO: 1773832 - RNA, 19 nt, Artificial Sequence
  Description of Artificial Sequence: Synthetic oligonucleotide
  Antisense strand to SEQ ID NO: 1773831
uuagcucccaccauuagcc

SEQ ID NO: 1773833 - RNA, 19 nt, Artificial Sequence
  Description of Artificial Sequence: Synthetic oligonucleotide
  Sense strand starting at position 1499 of SEQ ID NO: 1562801
agcuaaaccuggcaugaga

SEQ ID NO: 1773834 - RNA, 19 nt, Artificial Sequence
  Description of Artificial Sequence: Synthetic oligonucleotide
  Antisense strand to SEQ ID NO: 1773833
ucucaugccagguuuagcu

SEQ ID NO: 1773835 - RNA, 19 nt, Artificial Sequence
  Description of Artificial Sequence: Synthetic oligonucleotide
  Sense strand starting at position 1522 of SEQ ID NO: 1562801
aaugcuucccuccguguua

SEQ ID NO: 1773836 - RNA, 19 nt, Artificial Sequence
  Description of Artificial Sequence: Synthetic oligonucleotide
  Antisense strand to SEQ ID NO: 1773835
uaacacggagggaagcauu

SEQ ID NO: 1773837 - RNA, 19 nt, Artificial Sequence
  Description of Artificial Sequence: Synthetic oligonucleotide
  Sense strand starting at position 2461 of SEQ ID NO: 1562801
ccgacugugccaggugaga

SEQ ID NO: 1773838 - RNA, 19 nt, Artificial Sequence
  Description of Artificial Sequence: Synthetic oligonucleotide
  Antisense strand to SEQ ID NO: 1773837
ucucaccuggcacagucgg

SEQ ID NO: 1773839 - RNA, 19 nt, Artificial Sequence
  Description of Artificial Sequence: Synthetic oligonucleotide
  Sense strand starting at position 2572 of SEQ ID NO: 1562801
cuggguuucuuugaagucu

SEQ ID NO: 1773840 - RNA, 19 nt, Artificial Sequence
  Description of Artificial Sequence: Synthetic oligonucleotide
  Antisense strand to SEQ ID NO: 1773839
agacuucaaagaaacccag

SEQ ID NO: 1773841 - RNA, 19 nt, Artificial Sequence
  Description of Artificial Sequence: Synthetic oligonucleotide
  Sense strand starting at position 2792 of SEQ ID NO: 1562801
uguggaaggcacuauucua

SEQ ID NO: 1773842 - RNA, 19 nt, Artificial Sequence
  Description of Artificial Sequence: Synthetic oligonucleotide
  Antisense strand to SEQ ID NO: 1773841
uagaauagugccuuccaca

SEQ ID NO: 1773843 - RNA, 19 nt, Artificial Sequence
  Description of Artificial Sequence: Synthetic oligonucleotide
  Sense strand starting at position 3732 of SEQ ID NO: 1562801
agugaaugcuaucaccauc

SEQ ID NO: 1773844 - RNA, 19 nt, Artificial Sequence
  Description of Artificial Sequence: Synthetic oligonucleotide
  Antisense strand to SEQ ID NO: 1773843
gauggugauagcauucacu

SEQ ID NO: 1773845 - RNA, 19 nt, Artificial Sequence
  Description of Artificial Sequence: Synthetic oligonucleotide
  Sense strand starting at position 3855 of SEQ ID NO: 1562801
agggaaauaucugcuuguu

SEQ ID NO: 1773846 - RNA, 19 nt, Artificial Sequence
  Description of Artificial Sequence: Synthetic oligonucleotide
  Antisense strand to SEQ ID NO: 1773845
aacaagcagauauuucccu

SEQ ID NO: 1773847 - RNA, 19 nt, Artificial Sequence
  Description of Artificial Sequence: Synthetic oligonucleotide
  Sense strand starting at position 3857 of SEQ ID NO: 1562801
ggaaauaucugcuuguuag

SEQ ID NO: 1773848 - RNA, 19 nt, Artificial Sequence
  Description of Artificial Sequence: Synthetic oligonucleotide
  Antisense strand to SEQ ID NO: 1773847
cuaacaagcagauauuucc

SEQ ID NO: 1773849 - RNA, 19 nt, Artificial Sequence
  Description of Artificial Sequence: Synthetic oligonucleotide
  Sense strand starting at position 3858 of SEQ ID NO: 1562801
gaaauaucugcuuguuagu

SEQ ID NO: 1773850 - RNA, 19 nt, Artificial Sequence
  Description of Artificial Sequence: Synthetic oligonucleotide
  Antisense strand to SEQ ID NO: 1773849
acuaacaagcagauauuuc

SEQ ID NO: 1773851 - RNA, 19 nt, Artificial Sequence
  Description of Artificial Sequence: Synthetic oligonucleotide
  Sense strand starting at position 3860 of SEQ ID NO: 1562801
aauaucugcuuguuaguga

SEQ ID NO: 1773852 - RNA, 19 nt, Artificial Sequence
  Description of Artificial Sequence: Synthetic oligonucleotide
  Antisense strand to SEQ ID NO: 1773851
ucacuaacaagcagauauu

SEQ ID NO: 1773853 - RNA, 19 nt, Artificial Sequence
  Description of Artificial Sequence: Synthetic oligonucleotide
  Sense strand starting at position 3911 of SEQ ID NO: 1562801
auaagugaaucgucuugag

SEQ ID NO: 1773854 - RNA, 19 nt, Artificial Sequence
  Description of Artificial Sequence: Synthetic oligonucleotide
  Antisense strand to SEQ ID NO: 1773853
cucaagacgauucacuuau

SEQ ID NO: 1773855 - RNA, 19 nt, Artificial Sequence
  Description of Artificial Sequence: Synthetic oligonucleotide
  Sense strand starting at position 3914 of SEQ ID NO: 1562801
agugaaucgucuugaggag

SEQ ID NO: 1773856 - RNA, 19 nt, Artificial Sequence
  Description of Artificial Sequence: Synthetic oligonucleotide
  Antisense strand to SEQ ID NO: 1773855
cuccucaagacgauucacu

SEQ ID NO: 1773857 - RNA, 19 nt, Artificial Sequence
  Description of Artificial Sequence: Synthetic oligonucleotide
  Sense strand starting at position 3931 of SEQ ID NO: 1562801
agcugaguuugcugugaga

SEQ ID NO: 1773858 - RNA, 19 nt, Artificial Sequence
  Description of Artificial Sequence: Synthetic oligonucleotide
  Antisense strand to SEQ ID NO: 1773857
ucucacagcaaacucagcu

SEQ ID NO: 1773859 - RNA, 19 nt, Artificial Sequence
  Description of Artificial Sequence: Synthetic oligonucleotide
  Sense strand starting at position 3933 of SEQ ID NO: 1562801
cugaguuugcugugagagc

SEQ ID NO: 1773860 - RNA, 19 nt, Artificial Sequence
  Description of Artificial Sequence: Synthetic oligonucleotide
  Antisense strand to SEQ ID NO: 1773859
gcucucacagcaaacucag

SEQ ID NO: 1773861 - RNA, 19 nt, Artificial Sequence
  Description of Artificial Sequence: Synthetic oligonucleotide
  Sense strand starting at position 211 of SEQ ID NO: 1562802
gcaugaggucaguggauca

SEQ ID NO: 1773862 - RNA, 19 nt, Artificial Sequence
  Description of Artificial Sequence: Synthetic oligonucleotide
  Antisense strand to SEQ ID NO: 1773861
ugauccacugaccucaugc

SEQ ID NO: 1773863 - RNA, 19 nt, Artificial Sequence
  Description of Artificial Sequence: Synthetic oligonucleotide
  Sense strand starting at position 513 of SEQ ID NO: 1562802
ggccacuuaugucaugauu

SEQ ID NO: 1773864 - RNA, 19 nt, Artificial Sequence
  Description of Artificial Sequence: Synthetic oligonucleotide
  Antisense strand to SEQ ID NO: 1773863
aaucaugacauaaguggcc

SEQ ID NO: 1773865 - RNA, 19 nt, Artificial Sequence
  Description of Artificial Sequence: Synthetic oligonucleotide
  Sense strand starting at position 515 of SEQ ID NO: 1562802
ccacuuaugucaugauucu

SEQ ID NO: 1773866 - RNA, 19 nt, Artificial Sequence
  Description of Artificial Sequence: Synthetic oligonucleotide
  Antisense strand to SEQ ID NO: 1773865
agaaucaugacauaagugg

SEQ ID NO: 1773867 - RNA, 19 nt, Artificial Sequence
  Description of Artificial Sequence: Synthetic oligonucleotide
  Sense strand starting at position 586 of SEQ ID NO: 1562802
ugcagcuucuggcaaggau

SEQ ID NO: 1773868 - RNA, 19 nt, Artificial Sequence
  Description of Artificial Sequence: Synthetic oligonucleotide
  Antisense strand to SEQ ID NO: 1773867
auccuugccagaagcugca

SEQ ID NO: 1773869 - RNA, 19 nt, Artificial Sequence
  Description of Artificial Sequence: Synthetic oligonucleotide
  Sense strand starting at position 1072 of SEQ ID NO: 1562802
gaucccuggcuuugggaaa

SEQ ID NO: 1773870 - RNA, 19 nt, Artificial Sequence
  Description of Artificial Sequence: Synthetic oligonucleotide
  Antisense strand to SEQ ID NO: 1773869
uuucccaaagccagggauc

SEQ ID NO: 1773871 - RNA, 19 nt, Artificial Sequence
  Description of Artificial Sequence: Synthetic oligonucleotide
  Sense strand starting at position 1808 of SEQ ID NO: 1562802
gcgggcaccucugugauga

SEQ ID NO: 1773872 - RNA, 19 nt, Artificial Sequence
  Description of Artificial Sequence: Synthetic oligonucleotide
  Antisense strand to SEQ ID NO: 1773871
ucaucacagaggugcccgc

SEQ ID NO: 1773873 - RNA, 19 nt, Artificial Sequence
  Description of Artificial Sequence: Synthetic oligonucleotide
  Sense strand starting at position 1812 of SEQ ID NO: 1562802
gcaccucugugaugaccau

SEQ ID NO: 1773874 - RNA, 19 nt, Artificial Sequence
  Description of Artificial Sequence: Synthetic oligonucleotide
  Antisense strand to SEQ ID NO: 1773873
auggucaucacagaggugc

SEQ ID NO: 1773875 - RNA, 19 nt, Artificial Sequence
  Description of Artificial Sequence: Synthetic oligonucleotide
  Sense strand starting at position 1995 of SEQ ID NO: 1562802
gagugcuguuacgaagcuu

SEQ ID NO: 1773876 - RNA, 19 nt, Artificial Sequence
  Description of Artificial Sequence: Synthetic oligonucleotide
  Antisense strand to SEQ ID NO: 1773875
aagcuucguaacagcacuc

SEQ ID NO: 1773877 - RNA, 19 nt, Artificial Sequence
  Description of Artificial Sequence: Synthetic oligonucleotide
  Sense strand starting at position 2047 of SEQ ID NO: 1562802
cugggacuguugcacgaaa

SEQ ID NO: 1773878 - RNA, 19 nt, Artificial Sequence
  Description of Artificial Sequence: Synthetic oligonucleotide
  Antisense strand to SEQ ID NO: 1773877
uuucgugcaacagucccag

SEQ ID NO: 1773879 - RNA, 19 nt, Artificial Sequence
  Description of Artificial Sequence: Synthetic oligonucleotide
  Sense strand starting at position 2166 of SEQ ID NO: 1562802
ccagaucagcccuaagacu

SEQ ID NO: 1773880 - RNA, 19 nt, Artificial Sequence
  Description of Artificial Sequence: Synthetic oligonucleotide
  Antisense strand to SEQ ID NO: 1773879
agucuuagggcugaucugg

SEQ ID NO: 1773881 - RNA, 19 nt, Artificial Sequence
  Description of Artificial Sequence: Synthetic oligonucleotide
  Sense strand starting at position 2253 of SEQ ID NO: 1562802
gcuugaguguucgggacac

SEQ ID NO: 1773882 - RNA, 19 nt, Artificial Sequence
  Description of Artificial Sequence: Synthetic oligonucleotide
  Antisense strand to SEQ ID NO: 1773881
gugucccgaacacucaagc

SEQ ID NO: 1773883 - RNA, 19 nt, Artificial Sequence
  Description of Artificial Sequence: Synthetic oligonucleotide
  Sense strand starting at position 2255 of SEQ ID NO: 1562802
uugaguguucgggacacag

SEQ ID NO: 1773884 - RNA, 19 nt, Artificial Sequence
  Description of Artificial Sequence: Synthetic oligonucleotide
  Antisense strand to SEQ ID NO: 1773883
cugugucccgaacacucaa

SEQ ID NO: 1773885 - RNA, 19 nt, Artificial Sequence
  Description of Artificial Sequence: Synthetic oligonucleotide
  Sense strand starting at position 2317 of SEQ ID NO: 1562802
ucccgaaguuccugauucu

SEQ ID NO: 1773886 - RNA, 19 nt, Artificial Sequence
  Description of Artificial Sequence: Synthetic oligonucleotide
  Antisense strand to SEQ ID NO: 1773885
agaaucaggaacuucggga

SEQ ID NO: 1773887 - RNA, 19 nt, Artificial Sequence
  Description of Artificial Sequence: Synthetic oligonucleotide
  Sense strand starting at position 2590 of SEQ ID NO: 1562802
gaaggacuguucugcagag

SEQ ID NO: 1773888 - RNA, 19 nt, Artificial Sequence
  Description of Artificial Sequence: Synthetic oligonucleotide
  Antisense strand to SEQ ID NO: 1773887
cucugcagaacaguccuuc

SEQ ID NO: 1773889 - RNA, 19 nt, Artificial Sequence
  Description of Artificial Sequence: Synthetic oligonucleotide
  Sense strand starting at position 2695 of SEQ ID NO: 1562802
gggucuggucccugagcca

SEQ ID NO: 1773890 - RNA, 19 nt, Artificial Sequence
  Description of Artificial Sequence: Synthetic oligonucleotide
  Antisense strand to SEQ ID NO: 1773889
uggcucagggaccagaccc

SEQ ID NO: 1773891 - RNA, 19 nt, Artificial Sequence
  Description of Artificial Sequence: Synthetic oligonucleotide
  Sense strand starting at position 2903 of SEQ ID NO: 1562802
gggaaaggucucugggacu

SEQ ID NO: 1773892 - RNA, 19 nt, Artificial Sequence
  Description of Artificial Sequence: Synthetic oligonucleotide
  Antisense strand to SEQ ID NO: 1773891
agucccagagaccuuuccc

SEQ ID NO: 1773893 - RNA, 19 nt, Artificial Sequence
  Description of Artificial Sequence: Synthetic oligonucleotide
  Sense strand starting at position 3525 of SEQ ID NO: 1562802
gcgauccucuuaccucaau

SEQ ID NO: 1773894 - RNA, 19 nt, Artificial Sequence
  Description of Artificial Sequence: Synthetic oligonucleotide
  Antisense strand to SEQ ID NO: 1773893
auugagguaagaggaucgc

SEQ ID NO: 1773895 - RNA, 19 nt, Artificial Sequence
  Description of Artificial Sequence: Synthetic oligonucleotide
  Sense strand starting at position 3695 of SEQ ID NO: 1562802
acaggagcuuccucuuuaa

SEQ ID NO: 1773896 - RNA, 19 nt, Artificial Sequence
  Description of Artificial Sequence: Synthetic oligonucleotide
  Antisense strand to SEQ ID NO: 1773895
uuaaagaggaagcuccugu

SEQ ID NO: 1773897 - RNA, 19 nt, Artificial Sequence
  Description of Artificial Sequence: Synthetic oligonucleotide
  Sense strand starting at position 3698 of SEQ ID NO: 1562802
ggagcuuccucuuuaagcu

SEQ ID NO: 1773898 - RNA, 19 nt, Artificial Sequence
  Description of Artificial Sequence: Synthetic oligonucleotide
  Antisense strand to SEQ ID NO: 1773897
agcuuaaagaggaagcucc

SEQ ID NO: 1773899 - RNA, 19 nt, Artificial Sequence
  Description of Artificial Sequence: Synthetic oligonucleotide
  Sense strand starting at position 3707 of SEQ ID NO: 1562802
ucuuuaagcuccuagaggu

SEQ ID NO: 1773900 - RNA, 19 nt, Artificial Sequence
  Description of Artificial Sequence: Synthetic oligonucleotide
  Antisense strand to SEQ ID NO: 1773899
accucuaggagcuuaaaga

SEQ ID NO: 1773901 - RNA, 19 nt, Artificial Sequence
  Description of Artificial Sequence: Synthetic oligonucleotide
  Sense strand starting at position 3792 of SEQ ID NO: 1562802
ccuaauauaucucugaggu

SEQ ID NO: 1773902 - RNA, 19 nt, Artificial Sequence
  Description of Artificial Sequence: Synthetic oligonucleotide
  Antisense strand to SEQ ID NO: 1773901
accucagagauauauuagg

SEQ ID NO: 1773903 - RNA, 19 nt, Artificial Sequence
  Description of Artificial Sequence: Synthetic oligonucleotide
  Sense strand starting at position 3793 of SEQ ID NO: 1562802
cuaauauaucucugagguu

SEQ ID NO: 1773904 - RNA, 19 nt, Artificial Sequence
  Description of Artificial Sequence: Synthetic oligonucleotide
  Antisense strand to SEQ ID NO: 1773903
aaccucagagauauauuag

SEQ ID NO: 1773905 - RNA, 19 nt, Artificial Sequence
  Description of Artificial Sequence: Synthetic oligonucleotide
  Sense strand starting at position 3827 of SEQ ID NO: 1562802
cuagcuauguauugaauau

SEQ ID NO: 1773906 - RNA, 19 nt, Artificial Sequence
  Description of Artificial Sequence: Synthetic oligonucleotide
  Antisense strand to SEQ ID NO: 1773905
auauucaauacauagcuag

SEQ ID NO: 1773907 - RNA, 19 nt, Artificial Sequence
  Description of Artificial Sequence: Synthetic oligonucleotide
  Sense strand starting at position 3864 of SEQ ID NO: 1562802
aguacaugccauuguuauc

SEQ ID NO: 1773908 - RNA, 19 nt, Artificial Sequence
  Description of Artificial Sequence: Synthetic oligonucleotide
  Antisense strand to SEQ ID NO: 1773907
gauaacaauggcauguacu

SEQ ID NO: 1773909 - RNA, 19 nt, Artificial Sequence
  Description of Artificial Sequence: Synthetic oligonucleotide
  Sense strand starting at position 14 of SEQ ID NO: 1562803
uuuaaauaaucucuggguu

SEQ ID NO: 1773910 - RNA, 19 nt, Artificial Sequence
  Description of Artificial Sequence: Synthetic oligonucleotide
  Antisense strand to SEQ ID NO: 1773909
aacccagagauuauuuaaa

SEQ ID NO: 1773911 - RNA, 19 nt, Artificial Sequence
  Description of Artificial Sequence: Synthetic oligonucleotide
  Sense strand starting at position 15 of SEQ ID NO: 1562803
uuaaauaaucucuggguua

SEQ ID NO: 1773912 - RNA, 19 nt, Artificial Sequence
  Description of Artificial Sequence: Synthetic oligonucleotide
  Antisense strand to SEQ ID NO: 1773911
uaacccagagauuauuuaa

SEQ ID NO: 1773913 - RNA, 19 nt, Artificial Sequence
  Description of Artificial Sequence: Synthetic oligonucleotide
  Sense strand starting at position 52 of SEQ ID NO: 1562803
auguacguacuauguaaau

SEQ ID NO: 1773914 - RNA, 19 nt, Artificial Sequence
  Description of Artificial Sequence: Synthetic oligonucleotide
  Antisense strand to SEQ ID NO: 1773913
auuuacauaguacguacau

SEQ ID NO: 1773915 - RNA, 19 nt, Artificial Sequence
  Description of Artificial Sequence: Synthetic oligonucleotide
  Sense strand starting at position 54 of SEQ ID NO: 1562803
guacguacuauguaaauag

SEQ ID NO: 1773916 - RNA, 19 nt, Artificial Sequence
  Description of Artificial Sequence: Synthetic oligonucleotide
  Antisense strand to SEQ ID NO: 1773915
cuauuuacauaguacguac

SEQ ID NO: 1773917 - RNA, 19 nt, Artificial Sequence
  Description of Artificial Sequence: Synthetic oligonucleotide
  Sense strand starting at position 98 of SEQ ID NO: 1562803
aggaauaaagucuauacgu

SEQ ID NO: 1773918 - RNA, 19 nt, Artificial Sequence
  Description of Artificial Sequence: Synthetic oligonucleotide
  Antisense strand to SEQ ID NO: 1773917
acguauagacuuuauuccu

SEQ ID NO: 1773919 - RNA, 19 nt, Artificial Sequence
  Description of Artificial Sequence: Synthetic oligonucleotide
  Sense strand starting at position 100 of SEQ ID NO: 1562803
gaauaaagucuauacguau

SEQ ID NO: 1773920 - RNA, 19 nt, Artificial Sequence
  Description of Artificial Sequence: Synthetic oligonucleotide
  Antisense strand to SEQ ID NO: 1773919
auacguauagacuuuauuc

SEQ ID NO: 1773921 - RNA, 19 nt, Artificial Sequence
  Description of Artificial Sequence: Synthetic oligonucleotide
  Sense strand starting at position 177 of SEQ ID NO: 1562803
ugaaucaacagaugcguaa

SEQ ID NO: 1773922 - RNA, 19 nt, Artificial Sequence
  Description of Artificial Sequence: Synthetic oligonucleotide
  Antisense strand to SEQ ID NO: 1773921
uuacgcaucuguugauuca

SEQ ID NO: 1773923 - RNA, 19 nt, Artificial Sequence
  Description of Artificial Sequence: Synthetic oligonucleotide
  Sense strand starting at position 190 of SEQ ID NO: 1562803
gcguaacccagugauacag

SEQ ID NO: 1773924 - RNA, 19 nt, Artificial Sequence
  Description of Artificial Sequence: Synthetic oligonucleotide
  Antisense strand to SEQ ID NO: 1773923
cuguaucacuggguuacgc

SEQ ID NO: 1773925 - RNA, 19 nt, Artificial Sequence
  Description of Artificial Sequence: Synthetic oligonucleotide
  Sense strand starting at position 216 of SEQ ID NO: 1562803
acuguauuauuccucugua

SEQ ID NO: 1773926 - RNA, 19 nt, Artificial Sequence
  Description of Artificial Sequence: Synthetic oligonucleotide
  Antisense strand to SEQ ID NO: 1773925
uacagaggaauaauacagu

SEQ ID NO: 1773927 - RNA, 19 nt, Artificial Sequence
  Description of Artificial Sequence: Synthetic oligonucleotide
  Sense strand starting at position 217 of SEQ ID NO: 1562803
cuguauuauuccucuguag

SEQ ID NO: 1773928 - RNA, 19 nt, Artificial Sequence
  Description of Artificial Sequence: Synthetic oligonucleotide
  Antisense strand to SEQ ID NO: 1773927
cuacagaggaauaauacag

SEQ ID NO: 1773929 - RNA, 19 nt, Artificial Sequence
  Description of Artificial Sequence: Synthetic oligonucleotide
  Sense strand starting at position 519 of SEQ ID NO: 1562803
cuacaacuccugggucaaa

SEQ ID NO: 1773930 - RNA, 19 nt, Artificial Sequence
  Description of Artificial Sequence: Synthetic oligonucleotide
  Antisense strand to SEQ ID NO: 1773929
uuugacccaggaguuguag

SEQ ID NO: 1773931 - RNA, 19 nt, Artificial Sequence
  Description of Artificial Sequence: Synthetic oligonucleotide
  Sense strand starting at position 649 of SEQ ID NO: 1562803
guggcucaagaauaucuuu

SEQ ID NO: 1773932 - RNA, 19 nt, Artificial Sequence
  Description of Artificial Sequence: Synthetic oligonucleotide
  Antisense strand to SEQ ID NO: 1773931
aaagauauucuugagccac

SEQ ID NO: 1773933 - RNA, 19 nt, Artificial Sequence
  Description of Artificial Sequence: Synthetic oligonucleotide
  Sense strand starting at position 682 of SEQ ID NO: 1562803
cuuuaacucggucacagaa

SEQ ID NO: 1773934 - RNA, 19 nt, Artificial Sequence
  Description of Artificial Sequence: Synthetic oligonucleotide
  Antisense strand to SEQ ID NO: 1773933
uucugugaccgaguuaaag

SEQ ID NO: 1773935 - RNA, 19 nt, Artificial Sequence
  Description of Artificial Sequence: Synthetic oligonucleotide
  Sense strand starting at position 769 of SEQ ID NO: 1562803
gagguugccaacuggagau

SEQ ID NO: 1773936 - RNA, 19 nt, Artificial Sequence
  Description of Artificial Sequence: Synthetic oligonucleotide
  Antisense strand to SEQ ID NO: 1773935
aucuccaguuggcaaccuc

SEQ ID NO: 1773937 - RNA, 19 nt, Artificial Sequence
  Description of Artificial Sequence: Synthetic oligonucleotide
  Sense strand starting at position 835 of SEQ ID NO: 1562803
gaaagcagaugucuagaca

SEQ ID NO: 1773938 - RNA, 19 nt, Artificial Sequence
  Description of Artificial Sequence: Synthetic oligonucleotide
  Antisense strand to SEQ ID NO: 1773937
ugucuagacaucugcuuuc

SEQ ID NO: 1773939 - RNA, 19 nt, Artificial Sequence
  Description of Artificial Sequence: Synthetic oligonucleotide
  Sense strand starting at position 846 of SEQ ID NO: 1562803
ucuagacauccaggccaau

SEQ ID NO: 1773940 - RNA, 19 nt, Artificial Sequence
  Description of Artificial Sequence: Synthetic oligonucleotide
  Antisense strand to SEQ ID NO: 1773939
auuggccuggaugucuaga

SEQ ID NO: 1773941 - RNA, 19 nt, Artificial Sequence
  Description of Artificial Sequence: Synthetic oligonucleotide
  Sense strand starting at position 1295 of SEQ ID NO: 1562803
gcggcagucccacauggau

SEQ ID NO: 1773942 - RNA, 19 nt, Artificial Sequence
  Description of Artificial Sequence: Synthetic oligonucleotide
  Antisense strand to SEQ ID NO: 1773941
auccaugugggacugccgc

SEQ ID NO: 1773943 - RNA, 19 nt, Artificial Sequence
  Description of Artificial Sequence: Synthetic oligonucleotide
  Sense strand starting at position 1730 of SEQ ID NO: 1562803
cagagcuuggcgugaggaa

SEQ ID NO: 1773944 - RNA, 19 nt, Artificial Sequence
  Description of Artificial Sequence: Synthetic oligonucleotide
  Antisense strand to SEQ ID NO: 1773943
uuccucacgccaagcucug

SEQ ID NO: 1773945 - RNA, 19 nt, Artificial Sequence
  Description of Artificial Sequence: Synthetic oligonucleotide
  Sense strand starting at position 2081 of SEQ ID NO: 1562803
uucucauuggcuggacaga

SEQ ID NO: 1773946 - RNA, 19 nt, Artificial Sequence
  Description of Artificial Sequence: Synthetic oligonucleotide
  Antisense strand to SEQ ID NO: 1773945
ucuguccagccaaugagaa

SEQ ID NO: 1773947 - RNA, 19 nt, Artificial Sequence
  Description of Artificial Sequence: Synthetic oligonucleotide
  Sense strand starting at position 2156 of SEQ ID NO: 1562803
ucacgugugccggcugauu

SEQ ID NO: 1773948 - RNA, 19 nt, Artificial Sequence
  Description of Artificial Sequence: Synthetic oligonucleotide
  Antisense strand to SEQ ID NO: 1773947
aaucagccggcacacguga

SEQ ID NO: 1773949 - RNA, 19 nt, Artificial Sequence
  Description of Artificial Sequence: Synthetic oligonucleotide
  Sense strand starting at position 2320 of SEQ ID NO: 1562803
gguuccuagcccuauuaga

SEQ ID NO: 1773950 - RNA, 19 nt, Artificial Sequence
  Description of Artificial Sequence: Synthetic oligonucleotide
  Antisense strand to SEQ ID NO: 1773949
ucuaauagggcuaggaacc

SEQ ID NO: 1773951 - RNA, 19 nt, Artificial Sequence
  Description of Artificial Sequence: Synthetic oligonucleotide
  Sense strand starting at position 2327 of SEQ ID NO: 1562803
agcccuauuagaggucuga

SEQ ID NO: 1773952 - RNA, 19 nt, Artificial Sequence
  Description of Artificial Sequence: Synthetic oligonucleotide
  Antisense strand to SEQ ID NO: 1773951
ucagaccucuaauagggcu

SEQ ID NO: 1773953 - RNA, 19 nt, Artificial Sequence
  Description of Artificial Sequence: Synthetic oligonucleotide
  Sense strand starting at position 2331 of SEQ ID NO: 1562803
cuauuagaggucugaacac

SEQ ID NO: 1773954 - RNA, 19 nt, Artificial Sequence
  Description of Artificial Sequence: Synthetic oligonucleotide
  Antisense strand to SEQ ID NO: 1773953
guguucagaccucuaauag

SEQ ID NO: 1773955 - RNA, 19 nt, Artificial Sequence
  Description of Artificial Sequence: Synthetic oligonucleotide
  Sense strand starting at position 2508 of SEQ ID NO: 1562803
gcagucaggagaugugguu

SEQ ID NO: 1773956 - RNA, 19 nt, Artificial Sequence
  Description of Artificial Sequence: Synthetic oligonucleotide
  Antisense strand to SEQ ID NO: 1773955
aaccacaucuccugacugc

SEQ ID NO: 1773957 - RNA, 19 nt, Artificial Sequence
  Description of Artificial Sequence: Synthetic oligonucleotide
  Sense strand starting at position 2980 of SEQ ID NO: 1562803
ucuguuggcguggcuuaaa

SEQ ID NO: 1773958 - RNA, 19 nt, Artificial Sequence
  Description of Artificial Sequence: Synthetic oligonucleotide
  Antisense strand to SEQ ID NO: 1773957
uuuaagccacgccaacaga

SEQ ID NO: 1773959 - RNA, 19 nt, Artificial Sequence
  Description of Artificial Sequence: Synthetic oligonucleotide
  Sense strand starting at position 3054 of SEQ ID NO: 1562803
gaaguuguggucgagcaau

SEQ ID NO: 1773960 - RNA, 19 nt, Artificial Sequence
  Description of Artificial Sequence: Synthetic oligonucleotide
  Antisense strand to SEQ ID NO: 1773959
auugcucgaccacaacuuc

SEQ ID NO: 1773961 - RNA, 19 nt, Artificial Sequence
  Description of Artificial Sequence: Synthetic oligonucleotide
  Sense strand starting at position 3056 of SEQ ID NO: 1562803
aguuguggucgagcaaugu

SEQ ID NO: 1773962 - RNA, 19 nt, Artificial Sequence
  Description of Artificial Sequence: Synthetic oligonucleotide
  Antisense strand to SEQ ID NO: 1773961
acauugcucgaccacaacu

SEQ ID NO: 1773963 - RNA, 19 nt, Artificial Sequence
  Description of Artificial Sequence: Synthetic oligonucleotide
  Sense strand starting at position 3205 of SEQ ID NO: 1562803
gaaagaaaucugggugcug

SEQ ID NO: 1773964 - RNA, 19 nt, Artificial Sequence
  Description of Artificial Sequence: Synthetic oligonucleotide
  Antisense strand to SEQ ID NO: 1773963
cagcacccagauuucuuuc

SEQ ID NO: 1773965 - RNA, 19 nt, Artificial Sequence
  Description of Artificial Sequence: Synthetic oligonucleotide
  Sense strand starting at position 3206 of SEQ ID NO: 1562803
aaagaaaucugggugcugu

SEQ ID NO: 1773966 - RNA, 19 nt, Artificial Sequence
  Description of Artificial Sequence: Synthetic oligonucleotide
  Antisense strand to SEQ ID NO: 1773965
acagcacccagauuucuuu

SEQ ID NO: 1773967 - RNA, 19 nt, Artificial Sequence
  Description of Artificial Sequence: Synthetic oligonucleotide
  Sense strand starting at position 3392 of SEQ ID NO: 1562803
gcaaguuuauauguacaau

SEQ ID NO: 1773968 - RNA, 19 nt, Artificial Sequence
  Description of Artificial Sequence: Synthetic oligonucleotide
  Antisense strand to SEQ ID NO: 1773967
auuguacauauaaacuugc

SEQ ID NO: 1773969 - RNA, 19 nt, Artificial Sequence
  Description of Artificial Sequence: Synthetic oligonucleotide
  Sense strand starting at position 3433 of SEQ ID NO: 1562803
ucuauaagugugcauacuu

SEQ ID NO: 1773970 - RNA, 19 nt, Artificial Sequence
  Description of Artificial Sequence: Synthetic oligonucleotide
  Antisense strand to SEQ ID NO: 1773969
aaguaugcacacuuauaga

SEQ ID NO: 1773971 - RNA, 19 nt, Artificial Sequence
  Description of Artificial Sequence: Synthetic oligonucleotide
  Sense strand starting at position 3479 of SEQ ID NO: 1562803
gagucucugucugucauga

SEQ ID NO: 1773972 - RNA, 19 nt, Artificial Sequence
  Description of Artificial Sequence: Synthetic oligonucleotide
  Antisense strand to SEQ ID NO: 1773971
ucaugacagacagagacuc

SEQ ID NO: 1773973 - RNA, 19 nt, Artificial Sequence
  Description of Artificial Sequence: Synthetic oligonucleotide
  Sense strand starting at position 3492 of SEQ ID NO: 1562803
ucaugaucuuguccuauua

SEQ ID NO: 1773974 - RNA, 19 nt, Artificial Sequence
  Description of Artificial Sequence: Synthetic oligonucleotide
  Antisense strand to SEQ ID NO: 1773973
uaauaggacaagaucauga

SEQ ID NO: 1773975 - RNA, 19 nt, Artificial Sequence
  Description of Artificial Sequence: Synthetic oligonucleotide
  Sense strand starting at position 3511 of SEQ ID NO: 1562803
gcaguuuguuuauuagaug

SEQ ID NO: 1773976 - RNA, 19 nt, Artificial Sequence
  Description of Artificial Sequence: Synthetic oligonucleotide
  Antisense strand to SEQ ID NO: 1773975
caucuaauaaacaaacugc

SEQ ID NO: 1773977 - RNA, 19 nt, Artificial Sequence
  Description of Artificial Sequence: Synthetic oligonucleotide
  Sense strand starting at position 3661 of SEQ ID NO: 1562803
uagagaagacuguggucaa

SEQ ID NO: 1773978 - RNA, 19 nt, Artificial Sequence
  Description of Artificial Sequence: Synthetic oligonucleotide
  Antisense strand to SEQ ID NO: 1773977
uugaccacagucuucucua

SEQ ID NO: 1773979 - RNA, 19 nt, Artificial Sequence
  Description of Artificial Sequence: Synthetic oligonucleotide
  Sense strand starting at position 3664 of SEQ ID NO: 1562803
agaagacuguggucaaggu

SEQ ID NO: 1773980 - RNA, 19 nt, Artificial Sequence
  Description of Artificial Sequence: Synthetic oligonucleotide
  Antisense strand to SEQ ID NO: 1773979
accuugaccacagucuucu

SEQ ID NO: 1773981 - RNA, 19 nt, Artificial Sequence
  Description of Artificial Sequence: Synthetic oligonucleotide
  Sense strand starting at position 3665 of SEQ ID NO: 1562803
gaagacuguggucaagguu

SEQ ID NO: 1773982 - RNA, 19 nt, Artificial Sequence
  Description of Artificial Sequence: Synthetic oligonucleotide
  Antisense strand to SEQ ID NO: 1773981
aaccuugaccacagucuuc

SEQ ID NO: 1773983 - RNA, 19 nt, Artificial Sequence
  Description of Artificial Sequence: Synthetic oligonucleotide
  Sense strand starting at position 3668 of SEQ ID NO: 1562803
gacuguggucaagguuaug

SEQ ID NO: 1773984 - RNA, 19 nt, Artificial Sequence
  Description of Artificial Sequence: Synthetic oligonucleotide
  Antisense strand to SEQ ID NO: 1773983
cauaaccuugaccacaguc

SEQ ID NO: 1773985 - RNA, 19 nt, Artificial Sequence
  Description of Artificial Sequence: Synthetic oligonucleotide
  Sense strand starting at position 3836 of SEQ ID NO: 1562803
acaucuuuccaccagguca

SEQ ID NO: 1773986 - RNA, 19 nt, Artificial Sequence
  Description of Artificial Sequence: Synthetic oligonucleotide
  Antisense strand to SEQ ID NO: 1773985
ugaccugguggaaagaugu

SEQ ID NO: 1773987 - RNA, 19 nt, Artificial Sequence
  Description of Artificial Sequence: Synthetic oligonucleotide
  Sense strand starting at position 3964 of SEQ ID NO: 1562803
ggaagucucccuggagaag

SEQ ID NO: 1773988 - RNA, 19 nt, Artificial Sequence
  Description of Artificial Sequence: Synthetic oligonucleotide
  Antisense strand to SEQ ID NO: 1773987
cuucuccagggagacuucc

SEQ ID NO: 1773989 - RNA, 19 nt, Artificial Sequence
  Description of Artificial Sequence: Synthetic oligonucleotide
  Sense strand starting at position 428 of SEQ ID NO: 1562804
uuuacuuucuccgcugcaa

SEQ ID NO: 1773990 - RNA, 19 nt, Artificial Sequence
  Description of Artificial Sequence: Synthetic oligonucleotide
  Antisense strand to SEQ ID NO: 1773989
uugcagcggagaaaguaaa

SEQ ID NO: 1773991 - RNA, 19 nt, Artificial Sequence
  Description of Artificial Sequence: Synthetic oligonucleotide
  Sense strand starting at position 753 of SEQ ID NO: 1562804
cccugaacgucuucucaaa

SEQ ID NO: 1773992 - RNA, 19 nt, Artificial Sequence
  Description of Artificial Sequence: Synthetic oligonucleotide
  Antisense strand to SEQ ID NO: 1773991
uuugagaagacguucaggg

SEQ ID NO: 1773993 - RNA, 19 nt, Artificial Sequence
  Description of Artificial Sequence: Synthetic oligonucleotide
  Sense strand starting at position 755 of SEQ ID NO: 1562804
cugaacgucuucucaaauc

SEQ ID NO: 1773994 - RNA, 19 nt, Artificial Sequence
  Description of Artificial Sequence: Synthetic oligonucleotide
  Antisense strand to SEQ ID NO: 1773993
gauuugagaagacguucag

SEQ ID NO: 1773995 - RNA, 19 nt, Artificial Sequence
  Description of Artificial Sequence: Synthetic oligonucleotide
  Sense strand starting at position 1091 of SEQ ID NO: 1562804
gccuuuggguguuccacua

SEQ ID NO: 1773996 - RNA, 19 nt, Artificial Sequence
  Description of Artificial Sequence: Synthetic oligonucleotide
  Antisense strand to SEQ ID NO: 1773995
uaguggaacacccaaaggc

SEQ ID NO: 1773997 - RNA, 19 nt, Artificial Sequence
  Description of Artificial Sequence: Synthetic oligonucleotide
  Sense strand starting at position 1098 of SEQ ID NO: 1562804
gguguuccacuacaauuga

SEQ ID NO: 1773998 - RNA, 19 nt, Artificial Sequence
  Description of Artificial Sequence: Synthetic oligonucleotide
  Antisense strand to SEQ ID NO: 1773997
ucaauuguaguggaacacc

SEQ ID NO: 1773999 - RNA, 19 nt, Artificial Sequence
  Description of Artificial Sequence: Synthetic oligonucleotide
  Sense strand starting at position 1109 of SEQ ID NO: 1562804
acaauugaguuguaaagau

SEQ ID NO: 1774000 - RNA, 19 nt, Artificial Sequence
  Description of Artificial Sequence: Synthetic oligonucleotide
  Antisense strand to SEQ ID NO: 1773999
aucuuuacaacucaauugu

SEQ ID NO: 1774001 - RNA, 19 nt, Artificial Sequence
  Description of Artificial Sequence: Synthetic oligonucleotide
  Sense strand starting at position 2518 of SEQ ID NO: 1562804
cccaguuaucgcucggcga

SEQ ID NO: 1774002 - RNA, 19 nt, Artificial Sequence
  Description of Artificial Sequence: Synthetic oligonucleotide
  Antisense strand to SEQ ID NO: 1774001
ucgccgagcgauaacuggg

SEQ ID NO: 1774003 - RNA, 19 nt, Artificial Sequence
  Description of Artificial Sequence: Synthetic oligonucleotide
  Sense strand starting at position 2520 of SEQ ID NO: 1562804
caguuaucgcucggcgacu

SEQ ID NO: 1774004 - RNA, 19 nt, Artificial Sequence
  Description of Artificial Sequence: Synthetic oligonucleotide
  Antisense strand to SEQ ID NO: 1774003
agucgccgagcgauaacug

SEQ ID NO: 1774005 - RNA, 19 nt, Artificial Sequence
  Description of Artificial Sequence: Synthetic oligonucleotide
  Sense strand starting at position 2918 of SEQ ID NO: 1562804
gcuauuuaauuguucugau

SEQ ID NO: 1774006 - RNA, 19 nt, Artificial Sequence
  Description of Artificial Sequence: Synthetic oligonucleotide
  Antisense strand to SEQ ID NO: 1774005
aucagaacaauuaaauagc

SEQ ID NO: 1774007 - RNA, 19 nt, Artificial Sequence
  Description of Artificial Sequence: Synthetic oligonucleotide
  Sense strand starting at position 2993 of SEQ ID NO: 1562804
uagacuagguuccaagaau

SEQ ID NO: 1774008 - RNA, 19 nt, Artificial Sequence
  Description of Artificial Sequence: Synthetic oligonucleotide
  Antisense strand to SEQ ID NO: 1774007
auucuuggaaccuagucua

SEQ ID NO: 1774009 - RNA, 19 nt, Artificial Sequence
  Description of Artificial Sequence: Synthetic oligonucleotide
  Sense strand starting at position 3197 of SEQ ID NO: 1562804
uuaaguaagccucgaggaa

SEQ ID NO: 1774010 - RNA, 19 nt, Artificial Sequence
  Description of Artificial Sequence: Synthetic oligonucleotide
  Antisense strand to SEQ ID NO: 1774009
uuccucgaggcuuacuuaa

SEQ ID NO: 1774011 - RNA, 19 nt, Artificial Sequence
  Description of Artificial Sequence: Synthetic oligonucleotide
  Sense strand starting at position 3291 of SEQ ID NO: 1562804
gcaagucgcuaccaacaaa

SEQ ID NO: 1774012 - RNA, 19 nt, Artificial Sequence
  Description of Artificial Sequence: Synthetic oligonucleotide
  Antisense strand to SEQ ID NO: 1774011
uuuguugguagcgacuugc

SEQ ID NO: 1774013 - RNA, 19 nt, Artificial Sequence
  Description of Artificial Sequence: Synthetic oligonucleotide
  Sense strand starting at position 3563 of SEQ ID NO: 1562804
cccauauggucugguuagu

SEQ ID NO: 1774014 - RNA, 19 nt, Artificial Sequence
  Description of Artificial Sequence: Synthetic oligonucleotide
  Antisense strand to SEQ ID NO: 1774013
acuaaccagaccauauggg

SEQ ID NO: 1774015 - RNA, 19 nt, Artificial Sequence
  Description of Artificial Sequence: Synthetic oligonucleotide
  Sense strand starting at position 3630 of SEQ ID NO: 1562804
ccgguagauucuuaggcca

SEQ ID NO: 1774016 - RNA, 19 nt, Artificial Sequence
  Description of Artificial Sequence: Synthetic oligonucleotide
  Antisense strand to SEQ ID NO: 1774015
uggccuaagaaucuaccgg

SEQ ID NO: 1774017 - RNA, 19 nt, Artificial Sequence
  Description of Artificial Sequence: Synthetic oligonucleotide
  Sense strand starting at position 3907 of SEQ ID NO: 1562804
cuuuaaguguagccucauu

SEQ ID NO: 1774018 - RNA, 19 nt, Artificial Sequence
  Description of Artificial Sequence: Synthetic oligonucleotide
  Antisense strand to SEQ ID NO: 1774017
aaugaggcuacacuuaaag

SEQ ID NO: 1774019 - RNA, 19 nt, Artificial Sequence
  Description of Artificial Sequence: Synthetic oligonucleotide
  Sense strand starting at position 3912 of SEQ ID NO: 1562804
aguguagccucauucuaca

SEQ ID NO: 1774020 - RNA, 19 nt, Artificial Sequence
  Description of Artificial Sequence: Synthetic oligonucleotide
  Antisense strand to SEQ ID NO: 1774019
uguagaaugaggcuacacu

SEQ ID NO: 1774021 - RNA, 19 nt, Artificial Sequence
  Description of Artificial Sequence: Synthetic oligonucleotide
  Sense strand starting at position 3917 of SEQ ID NO: 1562804
agccucauucuacauguua

SEQ ID NO: 1774022 - RNA, 19 nt, Artificial Sequence
  Description of Artificial Sequence: Synthetic oligonucleotide
  Antisense strand to SEQ ID NO: 1774021
uaacauguagaaugaggcu

SEQ ID NO: 1774023 - RNA, 19 nt, Artificial Sequence
  Description of Artificial Sequence: Synthetic oligonucleotide
  Sense strand starting at position 3937 of SEQ ID NO: 1562804
uggauaaccuuugaacucu

SEQ ID NO: 1774024 - RNA, 19 nt, Artificial Sequence
  Description of Artificial Sequence: Synthetic oligonucleotide
  Antisense strand to SEQ ID NO: 1774023
agaguucaaagguuaucca

SEQ ID NO: 1774025 - RNA, 19 nt, Artificial Sequence
  Description of Artificial Sequence: Synthetic oligonucleotide
  Sense strand starting at position 3943 of SEQ ID NO: 1562804
accuuugaacucugagaac

SEQ ID NO: 1774026 - RNA, 19 nt, Artificial Sequence
  Description of Artificial Sequence: Synthetic oligonucleotide
  Antisense strand to SEQ ID NO: 1774025
guucucagaguucaaaggu

SEQ ID NO: 1774027 - RNA, 19 nt, Artificial Sequence
  Description of Artificial Sequence: Synthetic oligonucleotide
  Sense strand starting at position 3952 of SEQ ID NO: 1562804
cucugagaacuugaaugcu

SEQ ID NO: 1774028 - RNA, 19 nt, Artificial Sequence
  Description of Artificial Sequence: Synthetic oligonucleotide
  Antisense strand to SEQ ID NO: 1774027
agcauucaaguucucagag

SEQ ID NO: 1774029 - RNA, 19 nt, Artificial Sequence
  Description of Artificial Sequence: Synthetic oligonucleotide
  Sense strand starting at position 3955 of SEQ ID NO: 1562804
ugagaacuugaaugcugua

SEQ ID NO: 1774030 - RNA, 19 nt, Artificial Sequence
  Description of Artificial Sequence: Synthetic oligonucleotide
  Antisense strand to SEQ ID NO: 1774029
uacagcauucaaguucuca

SEQ ID NO: 1774031 - RNA, 19 nt, Artificial Sequence
  Description of Artificial Sequence: Synthetic oligonucleotide
  Sense strand starting at position 3960 of SEQ ID NO: 1562804
acuugaaugcuguaaacac

SEQ ID NO: 1774032 - RNA, 19 nt, Artificial Sequence
  Description of Artificial Sequence: Synthetic oligonucleotide
  Antisense strand to SEQ ID NO: 1774031
guguuuacagcauucaagu

SEQ ID NO: 1774033 - RNA, 19 nt, Artificial Sequence
  Description of Artificial Sequence: Synthetic oligonucleotide
  Sense strand starting at position 3975 of SEQ ID NO: 1562804
acacaauagcacugacagu

SEQ ID NO: 1774034 - RNA, 19 nt, Artificial Sequence
  Description of Artificial Sequence: Synthetic oligonucleotide
  Antisense strand to SEQ ID NO: 1774033
acugucagugcuauugugu

SEQ ID NO: 1774035 - RNA, 19 nt, Artificial Sequence
  Description of Artificial Sequence: Synthetic oligonucleotide
  Sense strand starting at position 32 of SEQ ID NO: 1562805
ugauaaaugucccuggaaa

SEQ ID NO: 1774036 - RNA, 19 nt, Artificial Sequence
  Description of Artificial Sequence: Synthetic oligonucleotide
  Antisense strand to SEQ ID NO: 1774035
uuuccagggacauuuauca

SEQ ID NO: 1774037 - RNA, 19 nt, Artificial Sequence
  Description of Artificial Sequence: Synthetic oligonucleotide
  Sense strand starting at position 301 of SEQ ID NO: 1562805
agagauguguggcucagca

SEQ ID NO: 1774038 - RNA, 19 nt, Artificial Sequence
  Description of Artificial Sequence: Synthetic oligonucleotide
  Antisense strand to SEQ ID NO: 1774037
ugcugagccacacaucucu

SEQ ID NO: 1774039 - RNA, 19 nt, Artificial Sequence
  Description of Artificial Sequence: Synthetic oligonucleotide
  Sense strand starting at position 303 of SEQ ID NO: 1562805
agauguguggcucagcaua

SEQ ID NO: 1774040 - RNA, 19 nt, Artificial Sequence
  Description of Artificial Sequence: Synthetic oligonucleotide
  Antisense strand to SEQ ID NO: 1774039
uaugcugagccacacaucu

SEQ ID NO: 1774041 - RNA, 19 nt, Artificial Sequence
  Description of Artificial Sequence: Synthetic oligonucleotide
  Sense strand starting at position 342 of SEQ ID NO: 1562805
ggccucuugccaugagaau

SEQ ID NO: 1774042 - RNA, 19 nt, Artificial Sequence
  Description of Artificial Sequence: Synthetic oligonucleotide
  Antisense strand to SEQ ID NO: 1774041
auucucauggcaagaggcc

SEQ ID NO: 1774043 - RNA, 19 nt, Artificial Sequence
  Description of Artificial Sequence: Synthetic oligonucleotide
  Sense strand starting at position 343 of SEQ ID NO: 1562805
gccucuugccaugagaaug

SEQ ID NO: 1774044 - RNA, 19 nt, Artificial Sequence
  Description of Artificial Sequence: Synthetic oligonucleotide
  Antisense strand to SEQ ID NO: 1774043
cauucucauggcaagaggc

SEQ ID NO: 1774045 - RNA, 19 nt, Artificial Sequence
  Description of Artificial Sequence: Synthetic oligonucleotide
  Sense strand starting at position 348 of SEQ ID NO: 1562805
uugccaugagaaugagcuu

SEQ ID NO: 1774046 - RNA, 19 nt, Artificial Sequence
  Description of Artificial Sequence: Synthetic oligonucleotide
  Antisense strand to SEQ ID NO: 1774045
aagcucauucucauggcaa

SEQ ID NO: 1774047 - RNA, 19 nt, Artificial Sequence
  Description of Artificial Sequence: Synthetic oligonucleotide
  Sense strand starting at position 354 of SEQ ID NO: 1562805
ugagaaugagcuuggaagu

SEQ ID NO: 1774048 - RNA, 19 nt, Artificial Sequence
  Description of Artificial Sequence: Synthetic oligonucleotide
  Antisense strand to SEQ ID NO: 1774047
acuuccaagcucauucuca

SEQ ID NO: 1774049 - RNA, 19 nt, Artificial Sequence
  Description of Artificial Sequence: Synthetic oligonucleotide
  Sense strand starting at position 424 of SEQ ID NO: 1562805
gcuugaauguguccucaga

SEQ ID NO: 1774050 - RNA, 19 nt, Artificial Sequence
  Description of Artificial Sequence: Synthetic oligonucleotide
  Antisense strand to SEQ ID NO: 1774049
ucugaggacacauucaagc

SEQ ID NO: 1774051 - RNA, 19 nt, Artificial Sequence
  Description of Artificial Sequence: Synthetic oligonucleotide
  Sense strand starting at position 426 of SEQ ID NO: 1562805
uugaauguguccucagauc

SEQ ID NO: 1774052 - RNA, 19 nt, Artificial Sequence
  Description of Artificial Sequence: Synthetic oligonucleotide
  Antisense strand to SEQ ID NO: 1774051
gaucugaggacacauucaa

SEQ ID NO: 1774053 - RNA, 19 nt, Artificial Sequence
  Description of Artificial Sequence: Synthetic oligonucleotide
  Sense strand starting at position 809 of SEQ ID NO: 1562805
gcaguacuuggucagugaa

SEQ ID NO: 1774054 - RNA, 19 nt, Artificial Sequence
  Description of Artificial Sequence: Synthetic oligonucleotide
  Antisense strand to SEQ ID NO: 1774053
uucacugaccaaguacugc

SEQ ID NO: 1774055 - RNA, 19 nt, Artificial Sequence
  Description of Artificial Sequence: Synthetic oligonucleotide
  Sense strand starting at position 811 of SEQ ID NO: 1562805
aguacuuggucagugaaua

SEQ ID NO: 1774056 - RNA, 19 nt, Artificial Sequence
  Description of Artificial Sequence: Synthetic oligonucleotide
  Antisense strand to SEQ ID NO: 1774055
uauucacugaccaaguacu

SEQ ID NO: 1774057 - RNA, 19 nt, Artificial Sequence
  Description of Artificial Sequence: Synthetic oligonucleotide
  Sense strand starting at position 812 of SEQ ID NO: 1562805
guacuuggucagugaauaa

SEQ ID NO: 1774058 - RNA, 19 nt, Artificial Sequence
  Description of Artificial Sequence: Synthetic oligonucleotide
  Antisense strand to SEQ ID NO: 1774057
uuauucacugaccaaguac

SEQ ID NO: 1774059 - RNA, 19 nt, Artificial Sequence
  Description of Artificial Sequence: Synthetic oligonucleotide
  Sense strand starting at position 894 of SEQ ID NO: 1562805
aagcuaugcugaccagaag

SEQ ID NO: 1774060 - RNA, 19 nt, Artificial Sequence
  Description of Artificial Sequence: Synthetic oligonucleotide
  Antisense strand to SEQ ID NO: 1774059
cuucuggucagcauagcuu

SEQ ID NO: 1774061 - RNA, 19 nt, Artificial Sequence
  Description of Artificial Sequence: Synthetic oligonucleotide
  Sense strand starting at position 1089 of SEQ ID NO: 1562805
gguggugugacaggguuau

SEQ ID NO: 1774062 - RNA, 19 nt, Artificial Sequence
  Description of Artificial Sequence: Synthetic oligonucleotide
  Antisense strand to SEQ ID NO: 1774061
auaacccugucacaccacc

SEQ ID NO: 1774063 - RNA, 19 nt, Artificial Sequence
  Description of Artificial Sequence: Synthetic oligonucleotide
  Sense strand starting at position 1093 of SEQ ID NO: 1562805
gugugacaggguuauuguu

SEQ ID NO: 1774064 - RNA, 19 nt, Artificial Sequence
  Description of Artificial Sequence: Synthetic oligonucleotide
  Antisense strand to SEQ ID NO: 1774063
aacaauaacccugucacac

SEQ ID NO: 1774065 - RNA, 19 nt, Artificial Sequence
  Description of Artificial Sequence: Synthetic oligonucleotide
  Sense strand starting at position 1095 of SEQ ID NO: 1562805
gugacaggguuauuguuca

SEQ ID NO: 1774066 - RNA, 19 nt, Artificial Sequence
  Description of Artificial Sequence: Synthetic oligonucleotide
  Antisense strand to SEQ ID NO: 1774065
ugaacaauaacccugucac

SEQ ID NO: 1774067 - RNA, 19 nt, Artificial Sequence
  Description of Artificial Sequence: Synthetic oligonucleotide
  Sense strand starting at position 1185 of SEQ ID NO: 1562805
guugcucauuuggcgauaa

SEQ ID NO: 1774068 - RNA, 19 nt, Artificial Sequence
  Description of Artificial Sequence: Synthetic oligonucleotide
  Antisense strand to SEQ ID NO: 1774067
uuaucgccaaaugagcaac

SEQ ID NO: 1774069 - RNA, 19 nt, Artificial Sequence
  Description of Artificial Sequence: Synthetic oligonucleotide
  Sense strand starting at position 1706 of SEQ ID NO: 1562805
gucuguuggccugaguuaa

SEQ ID NO: 1774070 - RNA, 19 nt, Artificial Sequence
  Description of Artificial Sequence: Synthetic oligonucleotide
  Antisense strand to SEQ ID NO: 1774069
uuaacucaggccaacagac

SEQ ID NO: 1774071 - RNA, 19 nt, Artificial Sequence
  Description of Artificial Sequence: Synthetic oligonucleotide
  Sense strand starting at position 1891 of SEQ ID NO: 1562805
agucuauugggccaguaaa

SEQ ID NO: 1774072 - RNA, 19 nt, Artificial Sequence
  Description of Artificial Sequence: Synthetic oligonucleotide
  Antisense strand to SEQ ID NO: 1774071
uuuacuggcccaauagacu

SEQ ID NO: 1774073 - RNA, 19 nt, Artificial Sequence
  Description of Artificial Sequence: Synthetic oligonucleotide
  Sense strand starting at position 1910 of SEQ ID NO: 1562805
uguccaaguccacaaugau

SEQ ID NO: 1774074 - RNA, 19 nt, Artificial Sequence
  Description of Artificial Sequence: Synthetic oligonucleotide
  Antisense strand to SEQ ID NO: 1774073
aucauuguggacuuggaca

SEQ ID NO: 1774075 - RNA, 19 nt, Artificial Sequence
  Description of Artificial Sequence: Synthetic oligonucleotide
  Sense strand starting at position 2147 of SEQ ID NO: 1562805
agguauuccugccuuaaau

SEQ ID NO: 1774076 - RNA, 19 nt, Artificial Sequence
  Description of Artificial Sequence: Synthetic oligonucleotide
  Antisense strand to SEQ ID NO: 1774075
auuuaaggcaggaauaccu

SEQ ID NO: 1774077 - RNA, 19 nt, Artificial Sequence
  Description of Artificial Sequence: Synthetic oligonucleotide
  Sense strand starting at position 2149 of SEQ ID NO: 1562805
guauuccugccuuaaauug

SEQ ID NO: 1774078 - RNA, 19 nt, Artificial Sequence
  Description of Artificial Sequence: Synthetic oligonucleotide
  Antisense strand to SEQ ID NO: 1774077
caauuuaaggcaggaauac

SEQ ID NO: 1774079 - RNA, 19 nt, Artificial Sequence
  Description of Artificial Sequence: Synthetic oligonucleotide
  Sense strand starting at position 2157 of SEQ ID NO: 1562805
gccuuaaauugggcaauca

SEQ ID NO: 1774080 - RNA, 19 nt, Artificial Sequence
  Description of Artificial Sequence: Synthetic oligonucleotide
  Antisense strand to SEQ ID NO: 1774079
ugauugcccaauuuaaggc

SEQ ID NO: 1774081 - RNA, 19 nt, Artificial Sequence
  Description of Artificial Sequence: Synthetic oligonucleotide
  Sense strand starting at position 2186 of SEQ ID NO: 1562805
uuuccaacuuguucucagu

SEQ ID NO: 1774082 - RNA, 19 nt, Artificial Sequence
  Description of Artificial Sequence: Synthetic oligonucleotide
  Antisense strand to SEQ ID NO: 1774081
acugagaacaaguuggaaa

SEQ ID NO: 1774083 - RNA, 19 nt, Artificial Sequence
  Description of Artificial Sequence: Synthetic oligonucleotide
  Sense strand starting at position 2188 of SEQ ID NO: 1562805
uccaacuuguucucaguua

SEQ ID NO: 1774084 - RNA, 19 nt, Artificial Sequence
  Description of Artificial Sequence: Synthetic oligonucleotide
  Antisense strand to SEQ ID NO: 1774083
uaacugagaacaaguugga

SEQ ID NO: 1774085 - RNA, 19 nt, Artificial Sequence
  Description of Artificial Sequence: Synthetic oligonucleotide
  Sense strand starting at position 2209 of SEQ ID NO: 1562805
aguaaauucugggcaccuu

SEQ ID NO: 1774086 - RNA, 19 nt, Artificial Sequence
  Description of Artificial Sequence: Synthetic oligonucleotide
  Antisense strand to SEQ ID NO: 1774085
aaggugcccagaauuuacu

SEQ ID NO: 1774087 - RNA, 19 nt, Artificial Sequence
  Description of Artificial Sequence: Synthetic oligonucleotide
  Sense strand starting at position 2226 of SEQ ID NO: 1562805
uucccuucucgugaauaga

SEQ ID NO: 1774088 - RNA, 19 nt, Artificial Sequence
  Description of Artificial Sequence: Synthetic oligonucleotide
  Antisense strand to SEQ ID NO: 1774087
ucuauucacgagaagggaa

SEQ ID NO: 1774089 - RNA, 19 nt, Artificial Sequence
  Description of Artificial Sequence: Synthetic oligonucleotide
  Sense strand starting at position 2229 of SEQ ID NO: 1562805
ccuucucgugaauagaaag

SEQ ID NO: 1774090 - RNA, 19 nt, Artificial Sequence
  Description of Artificial Sequence: Synthetic oligonucleotide
  Antisense strand to SEQ ID NO: 1774089
cuuucuauucacgagaagg

SEQ ID NO: 1774091 - RNA, 19 nt, Artificial Sequence
  Description of Artificial Sequence: Synthetic oligonucleotide
  Sense strand starting at position 2275 of SEQ ID NO: 1562805
gugcacugugcuguaaguu

SEQ ID NO: 1774092 - RNA, 19 nt, Artificial Sequence
  Description of Artificial Sequence: Synthetic oligonucleotide
  Antisense strand to SEQ ID NO: 1774091
aacuuacagcacagugcac

SEQ ID NO: 1774093 - RNA, 19 nt, Artificial Sequence
  Description of Artificial Sequence: Synthetic oligonucleotide
  Sense strand starting at position 2283 of SEQ ID NO: 1562805
ugcuguaaguucuuuaaau

SEQ ID NO: 1774094 - RNA, 19 nt, Artificial Sequence
  Description of Artificial Sequence: Synthetic oligonucleotide
  Antisense strand to SEQ ID NO: 1774093
auuuaaagaacuuacagca

SEQ ID NO: 1774095 - RNA, 19 nt, Artificial Sequence
  Description of Artificial Sequence: Synthetic oligonucleotide
  Sense strand starting at position 2284 of SEQ ID NO: 1562805
gcuguaaguucuuuaaaua

SEQ ID NO: 1774096 - RNA, 19 nt, Artificial Sequence
  Description of Artificial Sequence: Synthetic oligonucleotide
  Antisense strand to SEQ ID NO: 1774095
uauuuaaagaacuuacagc

SEQ ID NO: 1774097 - RNA, 19 nt, Artificial Sequence
  Description of Artificial Sequence: Synthetic oligonucleotide
  Sense strand starting at position 2295 of SEQ ID NO: 1562805
uuuaaauaacuucggguua

SEQ ID NO: 1774098 - RNA, 19 nt, Artificial Sequence
  Description of Artificial Sequence: Synthetic oligonucleotide
  Antisense strand to SEQ ID NO: 1774097
uaacccgaaguuauuuaaa

SEQ ID NO: 1774099 - RNA, 19 nt, Artificial Sequence
  Description of Artificial Sequence: Synthetic oligonucleotide
  Sense strand starting at position 2380 of SEQ ID NO: 1562805
aggauagaguauuauuuag

SEQ ID NO: 1774100 - RNA, 19 nt, Artificial Sequence
  Description of Artificial Sequence: Synthetic oligonucleotide
  Antisense strand to SEQ ID NO: 1774099
cuaaauaauacucuauccu

SEQ ID NO: 1774101 - RNA, 19 nt, Artificial Sequence
  Description of Artificial Sequence: Synthetic oligonucleotide
  Sense strand starting at position 2795 of SEQ ID NO: 1562805
ugcauauuaguaggugaga

SEQ ID NO: 1774102 - RNA, 19 nt, Artificial Sequence
  Description of Artificial Sequence: Synthetic oligonucleotide
  Antisense strand to SEQ ID NO: 1774101
ucucaccuacuaauaugca

SEQ ID NO: 1774103 - RNA, 19 nt, Artificial Sequence
  Description of Artificial Sequence: Synthetic oligonucleotide
  Sense strand starting at position 2796 of SEQ ID NO: 1562805
gcauauuaguaggugagag

SEQ ID NO: 1774104 - RNA, 19 nt, Artificial Sequence
  Description of Artificial Sequence: Synthetic oligonucleotide
  Antisense strand to SEQ ID NO: 1774103
cucucaccuacuaauaugc

SEQ ID NO: 1774105 - RNA, 19 nt, Artificial Sequence
  Description of Artificial Sequence: Synthetic oligonucleotide
  Sense strand starting at position 2797 of SEQ ID NO: 1562805
cauauuaguaggugagaga

SEQ ID NO: 1774106 - RNA, 19 nt, Artificial Sequence
  Description of Artificial Sequence: Synthetic oligonucleotide
  Antisense strand to SEQ ID NO: 1774105
ucucucaccuacuaauaug

SEQ ID NO: 1774107 - RNA, 19 nt, Artificial Sequence
  Description of Artificial Sequence: Synthetic oligonucleotide
  Sense strand starting at position 2837 of SEQ ID NO: 1562805
acuguaugaguccaacucu

SEQ ID NO: 1774108 - RNA, 19 nt, Artificial Sequence
  Description of Artificial Sequence: Synthetic oligonucleotide
  Antisense strand to SEQ ID NO: 1774107
agaguuggacucauacagu

SEQ ID NO: 1774109 - RNA, 19 nt, Artificial Sequence
  Description of Artificial Sequence: Synthetic oligonucleotide
  Sense strand starting at position 2930 of SEQ ID NO: 1562805
gaaugaguggugcacagaa

SEQ ID NO: 1774110 - RNA, 19 nt, Artificial Sequence
  Description of Artificial Sequence: Synthetic oligonucleotide
  Antisense strand to SEQ ID NO: 1774109
uucugugcaccacucauuc

SEQ ID NO: 1774111 - RNA, 19 nt, Artificial Sequence
  Description of Artificial Sequence: Synthetic oligonucleotide
  Sense strand starting at position 2987 of SEQ ID NO: 1562805
guggguauauguccuuauu

SEQ ID NO: 1774112 - RNA, 19 nt, Artificial Sequence
  Description of Artificial Sequence: Synthetic oligonucleotide
  Antisense strand to SEQ ID NO: 1774111
aauaaggacauauacccac

SEQ ID NO: 1774113 - RNA, 19 nt, Artificial Sequence
  Description of Artificial Sequence: Synthetic oligonucleotide
  Sense strand starting at position 3790 of SEQ ID NO: 1562805
ugcacaagggcucacaaau

SEQ ID NO: 1774114 - RNA, 19 nt, Artificial Sequence
  Description of Artificial Sequence: Synthetic oligonucleotide
  Antisense strand to SEQ ID NO: 1774113
auuugugagcccuugugca

SEQ ID NO: 1774115 - RNA, 19 nt, Artificial Sequence
  Description of Artificial Sequence: Synthetic oligonucleotide
  Sense strand starting at position 229 of SEQ ID NO: 1562806
gggaaacccugguuccgaa

SEQ ID NO: 1774116 - RNA, 19 nt, Artificial Sequence
  Description of Artificial Sequence: Synthetic oligonucleotide
  Antisense strand to SEQ ID NO: 1774115
uucggaaccaggguuuccc

SEQ ID NO: 1774117 - RNA, 19 nt, Artificial Sequence
  Description of Artificial Sequence: Synthetic oligonucleotide
  Sense strand starting at position 726 of SEQ ID NO: 1562806
ggaugcugaggugauucua

SEQ ID NO: 1774118 - RNA, 19 nt, Artificial Sequence
  Description of Artificial Sequence: Synthetic oligonucleotide
  Antisense strand to SEQ ID NO: 1774117
uagaaucaccucagcaucc

SEQ ID NO: 1774119 - RNA, 19 nt, Artificial Sequence
  Description of Artificial Sequence: Synthetic oligonucleotide
  Sense strand starting at position 734 of SEQ ID NO: 1562806
aggugauucuagucucaaa

SEQ ID NO: 1774120 - RNA, 19 nt, Artificial Sequence
  Description of Artificial Sequence: Synthetic oligonucleotide
  Antisense strand to SEQ ID NO: 1774119
uuugagacuagaaucaccu

SEQ ID NO: 1774121 - RNA, 19 nt, Artificial Sequence
  Description of Artificial Sequence: Synthetic oligonucleotide
  Sense strand starting at position 787 of SEQ ID NO: 1562806
accucaagauucgcacaua

SEQ ID NO: 1774122 - RNA, 19 nt, Artificial Sequence
  Description of Artificial Sequence: Synthetic oligonucleotide
  Antisense strand to SEQ ID NO: 1774121
uaugugcgaaucuugaggu

SEQ ID NO: 1774123 - RNA, 19 nt, Artificial Sequence
  Description of Artificial Sequence: Synthetic oligonucleotide
  Sense strand starting at position 790 of SEQ ID NO: 1562806
ucaagauucgcacauauua

SEQ ID NO: 1774124 - RNA, 19 nt, Artificial Sequence
  Description of Artificial Sequence: Synthetic oligonucleotide
  Antisense strand to SEQ ID NO: 1774123
uaauaugugcgaaucuuga

SEQ ID NO: 1774125 - RNA, 19 nt, Artificial Sequence
  Description of Artificial Sequence: Synthetic oligonucleotide
  Sense strand starting at position 816 of SEQ ID NO: 1562806
aaggaaaguucucugcucu

SEQ ID NO: 1774126 - RNA, 19 nt, Artificial Sequence
  Description of Artificial Sequence: Synthetic oligonucleotide
  Antisense strand to SEQ ID NO: 1774125
agagcagagaacuuuccuu

SEQ ID NO: 1774127 - RNA, 19 nt, Artificial Sequence
  Description of Artificial Sequence: Synthetic oligonucleotide
  Sense strand starting at position 817 of SEQ ID NO: 1562806
aggaaaguucucugcucug

SEQ ID NO: 1774128 - RNA, 19 nt, Artificial Sequence
  Description of Artificial Sequence: Synthetic oligonucleotide
  Antisense strand to SEQ ID NO: 1774127
cagagcagagaacuuuccu

SEQ ID NO: 1774129 - RNA, 19 nt, Artificial Sequence
  Description of Artificial Sequence: Synthetic oligonucleotide
  Sense strand starting at position 836 of SEQ ID NO: 1562806
ggcaucugugccuugccaa

SEQ ID NO: 1774130 - RNA, 19 nt, Artificial Sequence
  Description of Artificial Sequence: Synthetic oligonucleotide
  Antisense strand to SEQ ID NO: 1774129
uuggcaaggcacagaugcc

SEQ ID NO: 1774131 - RNA, 19 nt, Artificial Sequence
  Description of Artificial Sequence: Synthetic oligonucleotide
  Sense strand starting at position 1110 of SEQ ID NO: 1562806
acaggauucucuuaugaac

SEQ ID NO: 1774132 - RNA, 19 nt, Artificial Sequence
  Description of Artificial Sequence: Synthetic oligonucleotide
  Antisense strand to SEQ ID NO: 1774131
guucauaagagaauccugu

SEQ ID NO: 1774133 - RNA, 19 nt, Artificial Sequence
  Description of Artificial Sequence: Synthetic oligonucleotide
  Sense strand starting at position 1201 of SEQ ID NO: 1562806
uucugauuguguccuauga

SEQ ID NO: 1774134 - RNA, 19 nt, Artificial Sequence
  Description of Artificial Sequence: Synthetic oligonucleotide
  Antisense strand to SEQ ID NO: 1774133
ucauaggacacaaucagaa

SEQ ID NO: 1774135 - RNA, 19 nt, Artificial Sequence
  Description of Artificial Sequence: Synthetic oligonucleotide
  Sense strand starting at position 1239 of SEQ ID NO: 1562806
cagaguuuccggcagaagu

SEQ ID NO: 1774136 - RNA, 19 nt, Artificial Sequence
  Description of Artificial Sequence: Synthetic oligonucleotide
  Antisense strand to SEQ ID NO: 1774135
acuucugccggaaacucug

SEQ ID NO: 1774137 - RNA, 19 nt, Artificial Sequence
  Description of Artificial Sequence: Synthetic oligonucleotide
  Sense strand starting at position 1376 of SEQ ID NO: 1562806
acugauuuguuccagaccu

SEQ ID NO: 1774138 - RNA, 19 nt, Artificial Sequence
  Description of Artificial Sequence: Synthetic oligonucleotide
  Antisense strand to SEQ ID NO: 1774137
aggucuggaacaaaucagu

SEQ ID NO: 1774139 - RNA, 19 nt, Artificial Sequence
  Description of Artificial Sequence: Synthetic oligonucleotide
  Sense strand starting at position 1637 of SEQ ID NO: 1562806
ggcuguugccaggaggaau

SEQ ID NO: 1774140 - RNA, 19 nt, Artificial Sequence
  Description of Artificial Sequence: Synthetic oligonucleotide
  Antisense strand to SEQ ID NO: 1774139
auuccuccuggcaacagcc

SEQ ID NO: 1774141 - RNA, 19 nt, Artificial Sequence
  Description of Artificial Sequence: Synthetic oligonucleotide
  Sense strand starting at position 1890 of SEQ ID NO: 1562806
aauggaaaucucugagagc

SEQ ID NO: 1774142 - RNA, 19 nt, Artificial Sequence
  Description of Artificial Sequence: Synthetic oligonucleotide
  Antisense strand to SEQ ID NO: 1774141
gcucucagagauuuccauu

SEQ ID NO: 1774143 - RNA, 19 nt, Artificial Sequence
  Description of Artificial Sequence: Synthetic oligonucleotide
  Sense strand starting at position 1893 of SEQ ID NO: 1562806
ggaaaucucugagagccaa

SEQ ID NO: 1774144 - RNA, 19 nt, Artificial Sequence
  Description of Artificial Sequence: Synthetic oligonucleotide
  Antisense strand to SEQ ID NO: 1774143
uuggcucucagagauuucc

SEQ ID NO: 1774145 - RNA, 19 nt, Artificial Sequence
  Description of Artificial Sequence: Synthetic oligonucleotide
  Sense strand starting at position 1923 of SEQ ID NO: 1562806
gucagaggcgucugauuug

SEQ ID NO: 1774146 - RNA, 19 nt, Artificial Sequence
  Description of Artificial Sequence: Synthetic oligonucleotide
  Antisense strand to SEQ ID NO: 1774145
caaaucagacgccucugac

SEQ ID NO: 1774147 - RNA, 19 nt, Artificial Sequence
  Description of Artificial Sequence: Synthetic oligonucleotide
  Sense strand starting at position 1933 of SEQ ID NO: 1562806
ucugauuugguguguauug

SEQ ID NO: 1774148 - RNA, 19 nt, Artificial Sequence
  Description of Artificial Sequence: Synthetic oligonucleotide
  Antisense strand to SEQ ID NO: 1774147
caauacacaccaaaucaga

SEQ ID NO: 1774149 - RNA, 19 nt, Artificial Sequence
  Description of Artificial Sequence: Synthetic oligonucleotide
  Sense strand starting at position 2224 of SEQ ID NO: 1562806
gcgcuacauccagggauga

SEQ ID NO: 1774150 - RNA, 19 nt, Artificial Sequence
  Description of Artificial Sequence: Synthetic oligonucleotide
  Antisense strand to SEQ ID NO: 1774149
ucaucccuggauguagcgc

SEQ ID NO: 1774151 - RNA, 19 nt, Artificial Sequence
  Description of Artificial Sequence: Synthetic oligonucleotide
  Sense strand starting at position 2246 of SEQ ID NO: 1562806
gggagaaucugagaccgaa

SEQ ID NO: 1774152 - RNA, 19 nt, Artificial Sequence
  Description of Artificial Sequence: Synthetic oligonucleotide
  Antisense strand to SEQ ID NO: 1774151
uucggucucagauucuccc

SEQ ID NO: 1774153 - RNA, 19 nt, Artificial Sequence
  Description of Artificial Sequence: Synthetic oligonucleotide
  Sense strand starting at position 2374 of SEQ ID NO: 1562806
ccugucuagcuaugacuua

SEQ ID NO: 1774154 - RNA, 19 nt, Artificial Sequence
  Description of Artificial Sequence: Synthetic oligonucleotide
  Antisense strand to SEQ ID NO: 1774153
uaagucauagcuagacagg

SEQ ID NO: 1774155 - RNA, 19 nt, Artificial Sequence
  Description of Artificial Sequence: Synthetic oligonucleotide
  Sense strand starting at position 2414 of SEQ ID NO: 1562806
aagggucccugcuuaauca

SEQ ID NO: 1774156 - RNA, 19 nt, Artificial Sequence
  Description of Artificial Sequence: Synthetic oligonucleotide
  Antisense strand to SEQ ID NO: 1774155
ugauuaagcagggacccuu

SEQ ID NO: 1774157 - RNA, 19 nt, Artificial Sequence
  Description of Artificial Sequence: Synthetic oligonucleotide
  Sense strand starting at position 2509 of SEQ ID NO: 1562806
agaacuuuccaacgagacu

SEQ ID NO: 1774158 - RNA, 19 nt, Artificial Sequence
  Description of Artificial Sequence: Synthetic oligonucleotide
  Antisense strand to SEQ ID NO: 1774157
agucucguuggaaaguucu

SEQ ID NO: 1774159 - RNA, 19 nt, Artificial Sequence
  Description of Artificial Sequence: Synthetic oligonucleotide
  Sense strand starting at position 2562 of SEQ ID NO: 1562806
ucagcaguguguccaucau

SEQ ID NO: 1774160 - RNA, 19 nt, Artificial Sequence
  Description of Artificial Sequence: Synthetic oligonucleotide
  Antisense strand to SEQ ID NO: 1774159
augauggacacacugcuga

SEQ ID NO: 1774161 - RNA, 19 nt, Artificial Sequence
  Description of Artificial Sequence: Synthetic oligonucleotide
  Sense strand starting at position 3159 of SEQ ID NO: 1562806
ccaggaagcgcguuuguca

SEQ ID NO: 1774162 - RNA, 19 nt, Artificial Sequence
  Description of Artificial Sequence: Synthetic oligonucleotide
  Antisense strand to SEQ ID NO: 1774161
ugacaaacgcgcuuccugg

SEQ ID NO: 1774163 - RNA, 19 nt, Artificial Sequence
  Description of Artificial Sequence: Synthetic oligonucleotide
  Sense strand starting at position 3206 of SEQ ID NO: 1562806
accaguaucucuguaggaa

SEQ ID NO: 1774164 - RNA, 19 nt, Artificial Sequence
  Description of Artificial Sequence: Synthetic oligonucleotide
  Antisense strand to SEQ ID NO: 1774163
uuccuacagagauacuggu

SEQ ID NO: 1774165 - RNA, 19 nt, Artificial Sequence
  Description of Artificial Sequence: Synthetic oligonucleotide
  Sense strand starting at position 3207 of SEQ ID NO: 1562806
ccaguaucucuguaggaac

SEQ ID NO: 1774166 - RNA, 19 nt, Artificial Sequence
  Description of Artificial Sequence: Synthetic oligonucleotide
  Antisense strand to SEQ ID NO: 1774165
guuccuacagagauacugg

SEQ ID NO: 1774167 - RNA, 19 nt, Artificial Sequence
  Description of Artificial Sequence: Synthetic oligonucleotide
  Sense strand starting at position 3338 of SEQ ID NO: 1562806
acgacaccauccgugaaua

SEQ ID NO: 1774168 - RNA, 19 nt, Artificial Sequence
  Description of Artificial Sequence: Synthetic oligonucleotide
  Antisense strand to SEQ ID NO: 1774167
uauucacggauggugucgu

SEQ ID NO: 1774169 - RNA, 19 nt, Artificial Sequence
  Description of Artificial Sequence: Synthetic oligonucleotide
  Sense strand starting at position 3340 of SEQ ID NO: 1562806
gacaccauccgugaauaca

SEQ ID NO: 1774170 - RNA, 19 nt, Artificial Sequence
  Description of Artificial Sequence: Synthetic oligonucleotide
  Antisense strand to SEQ ID NO: 1774169
uguauucacggaugguguc

SEQ ID NO: 1774171 - RNA, 19 nt, Artificial Sequence
  Description of Artificial Sequence: Synthetic oligonucleotide
  Sense strand starting at position 3418 of SEQ ID NO: 1562806
cugagauugagaggucugu

SEQ ID NO: 1774172 - RNA, 19 nt, Artificial Sequence
  Description of Artificial Sequence: Synthetic oligonucleotide
  Antisense strand to SEQ ID NO: 1774171
acagaccucucaaucucag

SEQ ID NO: 1774173 - RNA, 19 nt, Artificial Sequence
  Description of Artificial Sequence: Synthetic oligonucleotide
  Sense strand starting at position 3422 of SEQ ID NO: 1562806
gauugagaggucuguucuc

SEQ ID NO: 1774174 - RNA, 19 nt, Artificial Sequence
  Description of Artificial Sequence: Synthetic oligonucleotide
  Antisense strand to SEQ ID NO: 1774173
gagaacagaccucucaauc

SEQ ID NO: 1774175 - RNA, 19 nt, Artificial Sequence
  Description of Artificial Sequence: Synthetic oligonucleotide
  Sense strand starting at position 3445 of SEQ ID NO: 1562806
ucaagagccucugggauuu

SEQ ID NO: 1774176 - RNA, 19 nt, Artificial Sequence
  Description of Artificial Sequence: Synthetic oligonucleotide
  Antisense strand to SEQ ID NO: 1774175
aaaucccagaggcucuuga

SEQ ID NO: 1774177 - RNA, 19 nt, Artificial Sequence
  Description of Artificial Sequence: Synthetic oligonucleotide
  Sense strand starting at position 3542 of SEQ ID NO: 1562806
gcccuagcccucuguuaac

SEQ ID NO: 1774178 - RNA, 19 nt, Artificial Sequence
  Description of Artificial Sequence: Synthetic oligonucleotide
  Antisense strand to SEQ ID NO: 1774177
guuaacagagggcuagggc

SEQ ID NO: 1774179 - RNA, 19 nt, Artificial Sequence
  Description of Artificial Sequence: Synthetic oligonucleotide
  Sense strand starting at position 3554 of SEQ ID NO: 1562806
uguuaacuaggucagcaaa

SEQ ID NO: 1774180 - RNA, 19 nt, Artificial Sequence
  Description of Artificial Sequence: Synthetic oligonucleotide
  Antisense strand to SEQ ID NO: 1774179
uuugcugaccuaguuaaca

SEQ ID NO: 1774181 - RNA, 19 nt, Artificial Sequence
  Description of Artificial Sequence: Synthetic oligonucleotide
  Sense strand starting at position 3634 of SEQ ID NO: 1562806
aaucaaaccucugugguga

SEQ ID NO: 1774182 - RNA, 19 nt, Artificial Sequence
  Description of Artificial Sequence: Synthetic oligonucleotide
  Antisense strand to SEQ ID NO: 1774181
ucaccacagagguuugauu

SEQ ID NO: 1774183 - RNA, 19 nt, Artificial Sequence
  Description of Artificial Sequence: Synthetic oligonucleotide
  Sense strand starting at position 3635 of SEQ ID NO: 1562806
aucaaaccucuguggugaa

SEQ ID NO: 1774184 - RNA, 19 nt, Artificial Sequence
  Description of Artificial Sequence: Synthetic oligonucleotide
  Antisense strand to SEQ ID NO: 1774183
uucaccacagagguuugau

SEQ ID NO: 1774185 - RNA, 19 nt, Artificial Sequence
  Description of Artificial Sequence: Synthetic oligonucleotide
  Sense strand starting at position 3669 of SEQ ID NO: 1562806
cugggaugaaucuguaggu

SEQ ID NO: 1774186 - RNA, 19 nt, Artificial Sequence
  Description of Artificial Sequence: Synthetic oligonucleotide
  Antisense strand to SEQ ID NO: 1774185
accuacagauucaucccag

SEQ ID NO: 1774187 - RNA, 19 nt, Artificial Sequence
  Description of Artificial Sequence: Synthetic oligonucleotide
  Sense strand starting at position 3673 of SEQ ID NO: 1562806
gaugaaucuguagguguuu

SEQ ID NO: 1774188 - RNA, 19 nt, Artificial Sequence
  Description of Artificial Sequence: Synthetic oligonucleotide
  Antisense strand to SEQ ID NO: 1774187
aaacaccuacagauucauc

SEQ ID NO: 1774189 - RNA, 19 nt, Artificial Sequence
  Description of Artificial Sequence: Synthetic oligonucleotide
  Sense strand starting at position 3674 of SEQ ID NO: 1562806
augaaucuguagguguuua

SEQ ID NO: 1774190 - RNA, 19 nt, Artificial Sequence
  Description of Artificial Sequence: Synthetic oligonucleotide
  Antisense strand to SEQ ID NO: 1774189
uaaacaccuacagauucau

SEQ ID NO: 1774191 - RNA, 19 nt, Artificial Sequence
  Description of Artificial Sequence: Synthetic oligonucleotide
  Sense strand starting at position 3678 of SEQ ID NO: 1562806
aucuguagguguuuacuga

SEQ ID NO: 1774192 - RNA, 19 nt, Artificial Sequence
  Description of Artificial Sequence: Synthetic oligonucleotide
  Antisense strand to SEQ ID NO: 1774191
ucaguaaacaccuacagau

SEQ ID NO: 1774193 - RNA, 19 nt, Artificial Sequence
  Description of Artificial Sequence: Synthetic oligonucleotide
  Sense strand starting at position 3762 of SEQ ID NO: 1562806
gauugugacaccugggaga

SEQ ID NO: 1774194 - RNA, 19 nt, Artificial Sequence
  Description of Artificial Sequence: Synthetic oligonucleotide
  Antisense strand to SEQ ID NO: 1774193
ucucccaggugucacaauc

SEQ ID NO: 1774195 - RNA, 19 nt, Artificial Sequence
  Description of Artificial Sequence: Synthetic oligonucleotide
  Sense strand starting at position 312 of SEQ ID NO: 1562807
ucccaucugucucccagau

SEQ ID NO: 1774196 - RNA, 19 nt, Artificial Sequence
  Description of Artificial Sequence: Synthetic oligonucleotide
  Antisense strand to SEQ ID NO: 1774195
aucugggagacagauggga

SEQ ID NO: 1774197 - RNA, 19 nt, Artificial Sequence
  Description of Artificial Sequence: Synthetic oligonucleotide
  Sense strand starting at position 314 of SEQ ID NO: 1562807
ccaucugucucccagaugu

SEQ ID NO: 1774198 - RNA, 19 nt, Artificial Sequence
  Description of Artificial Sequence: Synthetic oligonucleotide
  Antisense strand to SEQ ID NO: 1774197
acaucugggagacagaugg

SEQ ID NO: 1774199 - RNA, 19 nt, Artificial Sequence
  Description of Artificial Sequence: Synthetic oligonucleotide
  Sense strand starting at position 794 of SEQ ID NO: 1562807
aagucauacggcuaucaaa

SEQ ID NO: 1774200 - RNA, 19 nt, Artificial Sequence
  Description of Artificial Sequence: Synthetic oligonucleotide
  Antisense strand to SEQ ID NO: 1774199
uuugauagccguaugacuu

SEQ ID NO: 1774201 - RNA, 19 nt, Artificial Sequence
  Description of Artificial Sequence: Synthetic oligonucleotide
  Sense strand starting at position 1216 of SEQ ID NO: 1562807
gcagaaggcucacuagagu

SEQ ID NO: 1774202 - RNA, 19 nt, Artificial Sequence
  Description of Artificial Sequence: Synthetic oligonucleotide
  Antisense strand to SEQ ID NO: 1774201
acucuagugagccuucugc

SEQ ID NO: 1774203 - RNA, 19 nt, Artificial Sequence
  Description of Artificial Sequence: Synthetic oligonucleotide
  Sense strand starting at position 1296 of SEQ ID NO: 1562807
gcaagacccuggcucuaau

SEQ ID NO: 1774204 - RNA, 19 nt, Artificial Sequence
  Description of Artificial Sequence: Synthetic oligonucleotide
  Antisense strand to SEQ ID NO: 1774203
auuagagccagggucuugc

SEQ ID NO: 1774205 - RNA, 19 nt, Artificial Sequence
  Description of Artificial Sequence: Synthetic oligonucleotide
  Sense strand starting at position 1367 of SEQ ID NO: 1562807
acccaauguuguuuguagu

SEQ ID NO: 1774206 - RNA, 19 nt, Artificial Sequence
  Description of Artificial Sequence: Synthetic oligonucleotide
  Antisense strand to SEQ ID NO: 1774205
acuacaaacaacauugggu

SEQ ID NO: 1774207 - RNA, 19 nt, Artificial Sequence
  Description of Artificial Sequence: Synthetic oligonucleotide
  Sense strand starting at position 1368 of SEQ ID NO: 1562807
cccaauguuguuuguagua

SEQ ID NO: 1774208 - RNA, 19 nt, Artificial Sequence
  Description of Artificial Sequence: Synthetic oligonucleotide
  Antisense strand to SEQ ID NO: 1774207
uacuacaaacaacauuggg

SEQ ID NO: 1774209 - RNA, 19 nt, Artificial Sequence
  Description of Artificial Sequence: Synthetic oligonucleotide
  Sense strand starting at position 1370 of SEQ ID NO: 1562807
caauguuguuuguaguaga

SEQ ID NO: 1774210 - RNA, 19 nt, Artificial Sequence
  Description of Artificial Sequence: Synthetic oligonucleotide
  Antisense strand to SEQ ID NO: 1774209
ucuacuacaaacaacauug

SEQ ID NO: 1774211 - RNA, 19 nt, Artificial Sequence
  Description of Artificial Sequence: Synthetic oligonucleotide
  Sense strand starting at position 1373 of SEQ ID NO: 1562807
uguuguuuguaguagaagu

SEQ ID NO: 1774212 - RNA, 19 nt, Artificial Sequence
  Description of Artificial Sequence: Synthetic oligonucleotide
  Antisense strand to SEQ ID NO: 1774211
acuucuacuacaaacaaca

SEQ ID NO: 1774213 - RNA, 19 nt, Artificial Sequence
  Description of Artificial Sequence: Synthetic oligonucleotide
  Sense strand starting at position 1375 of SEQ ID NO: 1562807
uuguuuguaguagaaguca

SEQ ID NO: 1774214 - RNA, 19 nt, Artificial Sequence
  Description of Artificial Sequence: Synthetic oligonucleotide
  Antisense strand to SEQ ID NO: 1774213
ugacuucuacuacaaacaa

SEQ ID NO: 1774215 - RNA, 19 nt, Artificial Sequence
  Description of Artificial Sequence: Synthetic oligonucleotide
  Sense strand starting at position 1430 of SEQ ID NO: 1562807
gguagcuaauccugccaga

SEQ ID NO: 1774216 - RNA, 19 nt, Artificial Sequence
  Description of Artificial Sequence: Synthetic oligonucleotide
  Antisense strand to SEQ ID NO: 1774215
ucuggcaggauuagcuacc

SEQ ID NO: 1774217 - RNA, 19 nt, Artificial Sequence
  Description of Artificial Sequence: Synthetic oligonucleotide
  Sense strand starting at position 1458 of SEQ ID NO: 1562807
cugccugucugaugccaaa

SEQ ID NO: 1774218 - RNA, 19 nt, Artificial Sequence
  Description of Artificial Sequence: Synthetic oligonucleotide
  Antisense strand to SEQ ID NO: 1774217
uuuggcaucagacaggcag

SEQ ID NO: 1774219 - RNA, 19 nt, Artificial Sequence
  Description of Artificial Sequence: Synthetic oligonucleotide
  Sense strand starting at position 1547 of SEQ ID NO: 1562807
ccgagauaguucuaaauuc

SEQ ID NO: 1774220 - RNA, 19 nt, Artificial Sequence
  Description of Artificial Sequence: Synthetic oligonucleotide
  Antisense strand to SEQ ID NO: 1774219
gaauuuagaacuaucucgg

SEQ ID NO: 1774221 - RNA, 19 nt, Artificial Sequence
  Description of Artificial Sequence: Synthetic oligonucleotide
  Sense strand starting at position 1587 of SEQ ID NO: 1562807
uuuccuguggauugggaaa

SEQ ID NO: 1774222 - RNA, 19 nt, Artificial Sequence
  Description of Artificial Sequence: Synthetic oligonucleotide
  Antisense strand to SEQ ID NO: 1774221
uuucccaauccacaggaaa

SEQ ID NO: 1774223 - RNA, 19 nt, Artificial Sequence
  Description of Artificial Sequence: Synthetic oligonucleotide
  Sense strand starting at position 1678 of SEQ ID NO: 1562807
ugaugcuuccaggagcaau

SEQ ID NO: 1774224 - RNA, 19 nt, Artificial Sequence
  Description of Artificial Sequence: Synthetic oligonucleotide
  Antisense strand to SEQ ID NO: 1774223
auugcuccuggaagcauca

SEQ ID NO: 1774225 - RNA, 19 nt, Artificial Sequence
  Description of Artificial Sequence: Synthetic oligonucleotide
  Sense strand starting at position 2160 of SEQ ID NO: 1562807
gguguugucgguugccgua

SEQ ID NO: 1774226 - RNA, 19 nt, Artificial Sequence
  Description of Artificial Sequence: Synthetic oligonucleotide
  Antisense strand to SEQ ID NO: 1774225
uacggcaaccgacaacacc

SEQ ID NO: 1774227 - RNA, 19 nt, Artificial Sequence
  Description of Artificial Sequence: Synthetic oligonucleotide
  Sense strand starting at position 2166 of SEQ ID NO: 1562807
gucgguugccguagaaacu

SEQ ID NO: 1774228 - RNA, 19 nt, Artificial Sequence
  Description of Artificial Sequence: Synthetic oligonucleotide
  Antisense strand to SEQ ID NO: 1774227
aguuucuacggcaaccgac

SEQ ID NO: 1774229 - RNA, 19 nt, Artificial Sequence
  Description of Artificial Sequence: Synthetic oligonucleotide
  Sense strand starting at position 2434 of SEQ ID NO: 1562807
gcucucaguucucuugcau

SEQ ID NO: 1774230 - RNA, 19 nt, Artificial Sequence
  Description of Artificial Sequence: Synthetic oligonucleotide
  Antisense strand to SEQ ID NO: 1774229
augcaagagaacugagagc

SEQ ID NO: 1774231 - RNA, 19 nt, Artificial Sequence
  Description of Artificial Sequence: Synthetic oligonucleotide
  Sense strand starting at position 2502 of SEQ ID NO: 1562807
aucuuugucugcuuguuga

SEQ ID NO: 1774232 - RNA, 19 nt, Artificial Sequence
  Description of Artificial Sequence: Synthetic oligonucleotide
  Antisense strand to SEQ ID NO: 1774231
ucaacaagcagacaaagau

SEQ ID NO: 1774233 - RNA, 19 nt, Artificial Sequence
  Description of Artificial Sequence: Synthetic oligonucleotide
  Sense strand starting at position 2547 of SEQ ID NO: 1562807
agaagucacuuauuccuga

SEQ ID NO: 1774234 - RNA, 19 nt, Artificial Sequence
  Description of Artificial Sequence: Synthetic oligonucleotide
  Antisense strand to SEQ ID NO: 1774233
ucaggaauaagugacuucu

SEQ ID NO: 1774235 - RNA, 19 nt, Artificial Sequence
  Description of Artificial Sequence: Synthetic oligonucleotide
  Sense strand starting at position 2551 of SEQ ID NO: 1562807
gucacuuauuccugaagcu

SEQ ID NO: 1774236 - RNA, 19 nt, Artificial Sequence
  Description of Artificial Sequence: Synthetic oligonucleotide
  Antisense strand to SEQ ID NO: 1774235
agcuucaggaauaagugac

SEQ ID NO: 1774237 - RNA, 19 nt, Artificial Sequence
  Description of Artificial Sequence: Synthetic oligonucleotide
  Sense strand starting at position 2802 of SEQ ID NO: 1562807
gaggcuggauccugcuuua

SEQ ID NO: 1774238 - RNA, 19 nt, Artificial Sequence
  Description of Artificial Sequence: Synthetic oligonucleotide
  Antisense strand to SEQ ID NO: 1774237
uaaagcaggauccagccuc

SEQ ID NO: 1774239 - RNA, 19 nt, Artificial Sequence
  Description of Artificial Sequence: Synthetic oligonucleotide
  Sense strand starting at position 2805 of SEQ ID NO: 1562807
gcuggauccugcuuuagug

SEQ ID NO: 1774240 - RNA, 19 nt, Artificial Sequence
  Description of Artificial Sequence: Synthetic oligonucleotide
  Antisense strand to SEQ ID NO: 1774239
cacuaaagcaggauccagc

SEQ ID NO: 1774241 - RNA, 19 nt, Artificial Sequence
  Description of Artificial Sequence: Synthetic oligonucleotide
  Sense strand starting at position 2821 of SEQ ID NO: 1562807
guggaagugucccuuuaac

SEQ ID NO: 1774242 - RNA, 19 nt, Artificial Sequence
  Description of Artificial Sequence: Synthetic oligonucleotide
  Antisense strand to SEQ ID NO: 1774241
guuaaagggacacuuccac

SEQ ID NO: 1774243 - RNA, 19 nt, Artificial Sequence
  Description of Artificial Sequence: Synthetic oligonucleotide
  Sense strand starting at position 2993 of SEQ ID NO: 1562807
cggagaaguaugugaugac

SEQ ID NO: 1774244 - RNA, 19 nt, Artificial Sequence
  Description of Artificial Sequence: Synthetic oligonucleotide
  Antisense strand to SEQ ID NO: 1774243
gucaucacauacuucuccg

SEQ ID NO: 1774245 - RNA, 19 nt, Artificial Sequence
  Description of Artificial Sequence: Synthetic oligonucleotide
  Sense strand starting at position 2996 of SEQ ID NO: 1562807
agaaguaugugaugaccag

SEQ ID NO: 1774246 - RNA, 19 nt, Artificial Sequence
  Description of Artificial Sequence: Synthetic oligonucleotide
  Antisense strand to SEQ ID NO: 1774245
cuggucaucacauacuucu

SEQ ID NO: 1774247 - RNA, 19 nt, Artificial Sequence
  Description of Artificial Sequence: Synthetic oligonucleotide
  Sense strand starting at position 3053 of SEQ ID NO: 1562807
uugggaucgucgucuaugu

SEQ ID NO: 1774248 - RNA, 19 nt, Artificial Sequence
  Description of Artificial Sequence: Synthetic oligonucleotide
  Antisense strand to SEQ ID NO: 1774247
acauagacgacgaucccaa

SEQ ID NO: 1774249 - RNA, 19 nt, Artificial Sequence
  Description of Artificial Sequence: Synthetic oligonucleotide
  Sense strand starting at position 3057 of SEQ ID NO: 1562807
gaucgucgucuauguggua

SEQ ID NO: 1774250 - RNA, 19 nt, Artificial Sequence
  Description of Artificial Sequence: Synthetic oligonucleotide
  Antisense strand to SEQ ID NO: 1774249
uaccacauagacgacgauc

SEQ ID NO: 1774251 - RNA, 19 nt, Artificial Sequence
  Description of Artificial Sequence: Synthetic oligonucleotide
  Sense strand starting at position 3062 of SEQ ID NO: 1562807
ucgucuaugugguagggua

SEQ ID NO: 1774252 - RNA, 19 nt, Artificial Sequence
  Description of Artificial Sequence: Synthetic oligonucleotide
  Antisense strand to SEQ ID NO: 1774251
uacccuaccacauagacga

SEQ ID NO: 1774253 - RNA, 19 nt, Artificial Sequence
  Description of Artificial Sequence: Synthetic oligonucleotide
  Sense strand starting at position 3063 of SEQ ID NO: 1562807
cgucuaugugguaggguaa

SEQ ID NO: 1774254 - RNA, 19 nt, Artificial Sequence
  Description of Artificial Sequence: Synthetic oligonucleotide
  Antisense strand to SEQ ID NO: 1774253
uuacccuaccacauagacg

SEQ ID NO: 1774255 - RNA, 19 nt, Artificial Sequence
  Description of Artificial Sequence: Synthetic oligonucleotide
  Sense strand starting at position 3242 of SEQ ID NO: 1562807
aagaacaagcuguguguuu

SEQ ID NO: 1774256 - RNA, 19 nt, Artificial Sequence
  Description of Artificial Sequence: Synthetic oligonucleotide
  Antisense strand to SEQ ID NO: 1774255
aaacacacagcuuguucuu

SEQ ID NO: 1774257 - RNA, 19 nt, Artificial Sequence
  Description of Artificial Sequence: Synthetic oligonucleotide
  Sense strand starting at position 3244 of SEQ ID NO: 1562807
gaacaagcuguguguuugu

SEQ ID NO: 1774258 - RNA, 19 nt, Artificial Sequence
  Description of Artificial Sequence: Synthetic oligonucleotide
  Antisense strand to SEQ ID NO: 1774257
acaaacacacagcuuguuc

SEQ ID NO: 1774259 - RNA, 19 nt, Artificial Sequence
  Description of Artificial Sequence: Synthetic oligonucleotide
  Sense strand starting at position 3316 of SEQ ID NO: 1562807
ggcacaagacauuguccuu

SEQ ID NO: 1774260 - RNA, 19 nt, Artificial Sequence
  Description of Artificial Sequence: Synthetic oligonucleotide
  Antisense strand to SEQ ID NO: 1774259
aaggacaaugucuugugcc

SEQ ID NO: 1774261 - RNA, 19 nt, Artificial Sequence
  Description of Artificial Sequence: Synthetic oligonucleotide
  Sense strand starting at position 3330 of SEQ ID NO: 1562807
uccuuaacaucugugagag

SEQ ID NO: 1774262 - RNA, 19 nt, Artificial Sequence
  Description of Artificial Sequence: Synthetic oligonucleotide
  Antisense strand to SEQ ID NO: 1774261
cucucacagauguuaagga

SEQ ID NO: 1774263 - RNA, 19 nt, Artificial Sequence
  Description of Artificial Sequence: Synthetic oligonucleotide
  Sense strand starting at position 3438 of SEQ ID NO: 1562807
gugggugcuggcuagugaa

SEQ ID NO: 1774264 - RNA, 19 nt, Artificial Sequence
  Description of Artificial Sequence: Synthetic oligonucleotide
  Antisense strand to SEQ ID NO: 1774263
uucacuagccagcacccac

SEQ ID NO: 1774265 - RNA, 19 nt, Artificial Sequence
  Description of Artificial Sequence: Synthetic oligonucleotide
  Sense strand starting at position 3451 of SEQ ID NO: 1562807
agugaaggugauugucuga

SEQ ID NO: 1774266 - RNA, 19 nt, Artificial Sequence
  Description of Artificial Sequence: Synthetic oligonucleotide
  Antisense strand to SEQ ID NO: 1774265
ucagacaaucaccuucacu

SEQ ID NO: 1774267 - RNA, 19 nt, Artificial Sequence
  Description of Artificial Sequence: Synthetic oligonucleotide
  Sense strand starting at position 3456 of SEQ ID NO: 1562807
aggugauugucugagggca

SEQ ID NO: 1774268 - RNA, 19 nt, Artificial Sequence
  Description of Artificial Sequence: Synthetic oligonucleotide
  Antisense strand to SEQ ID NO: 1774267
ugcccucagacaaucaccu

SEQ ID NO: 1774269 - RNA, 19 nt, Artificial Sequence
  Description of Artificial Sequence: Synthetic oligonucleotide
  Sense strand starting at position 3458 of SEQ ID NO: 1562807
gugauugucugagggcacu

SEQ ID NO: 1774270 - RNA, 19 nt, Artificial Sequence
  Description of Artificial Sequence: Synthetic oligonucleotide
  Antisense strand to SEQ ID NO: 1774269
agugcccucagacaaucac

SEQ ID NO: 1774271 - RNA, 19 nt, Artificial Sequence
  Description of Artificial Sequence: Synthetic oligonucleotide
  Sense strand starting at position 3739 of SEQ ID NO: 1562807
ggguuuccgugacucagau

SEQ ID NO: 1774272 - RNA, 19 nt, Artificial Sequence
  Description of Artificial Sequence: Synthetic oligonucleotide
  Antisense strand to SEQ ID NO: 1774271
aucugagucacggaaaccc

SEQ ID NO: 1774273 - RNA, 19 nt, Artificial Sequence
  Description of Artificial Sequence: Synthetic oligonucleotide
  Sense strand starting at position 3968 of SEQ ID NO: 1562807
acaggacuuucagggaugu

SEQ ID NO: 1774274 - RNA, 19 nt, Artificial Sequence
  Description of Artificial Sequence: Synthetic oligonucleotide
  Antisense strand to SEQ ID NO: 1774273
acaucccugaaaguccugu

SEQ ID NO: 1774275 - RNA, 19 nt, Artificial Sequence
  Description of Artificial Sequence: Synthetic oligonucleotide
  Sense strand starting at position 309 of SEQ ID NO: 1562808
cccagagggucucuuuaga

SEQ ID NO: 1774276 - RNA, 19 nt, Artificial Sequence
  Description of Artificial Sequence: Synthetic oligonucleotide
  Antisense strand to SEQ ID NO: 1774275
ucuaaagagacccucuggg

SEQ ID NO: 1774277 - RNA, 19 nt, Artificial Sequence
  Description of Artificial Sequence: Synthetic oligonucleotide
  Sense strand starting at position 316 of SEQ ID NO: 1562808
ggucucuuuagaggacauu

SEQ ID NO: 1774278 - RNA, 19 nt, Artificial Sequence
  Description of Artificial Sequence: Synthetic oligonucleotide
  Antisense strand to SEQ ID NO: 1774277
aauguccucuaaagagacc

SEQ ID NO: 1774279 - RNA, 19 nt, Artificial Sequence
  Description of Artificial Sequence: Synthetic oligonucleotide
  Sense strand starting at position 394 of SEQ ID NO: 1562808
uccaauccauaggugauau

SEQ ID NO: 1774280 - RNA, 19 nt, Artificial Sequence
  Description of Artificial Sequence: Synthetic oligonucleotide
  Antisense strand to SEQ ID NO: 1774279
auaucaccuauggauugga

SEQ ID NO: 1774281 - RNA, 19 nt, Artificial Sequence
  Description of Artificial Sequence: Synthetic oligonucleotide
  Sense strand starting at position 405 of SEQ ID NO: 1562808
ggugauaugcucugugcgu

SEQ ID NO: 1774282 - RNA, 19 nt, Artificial Sequence
  Description of Artificial Sequence: Synthetic oligonucleotide
  Antisense strand to SEQ ID NO: 1774281
acgcacagagcauaucacc

SEQ ID NO: 1774283 - RNA, 19 nt, Artificial Sequence
  Description of Artificial Sequence: Synthetic oligonucleotide
  Sense strand starting at position 548 of SEQ ID NO: 1562808
agagguggucucugaggau

SEQ ID NO: 1774284 - RNA, 19 nt, Artificial Sequence
  Description of Artificial Sequence: Synthetic oligonucleotide
  Antisense strand to SEQ ID NO: 1774283
auccucagagaccaccucu

SEQ ID NO: 1774285 - RNA, 19 nt, Artificial Sequence
  Description of Artificial Sequence: Synthetic oligonucleotide
  Sense strand starting at position 634 of SEQ ID NO: 1562808
gacugagaucugugccucu

SEQ ID NO: 1774286 - RNA, 19 nt, Artificial Sequence
  Description of Artificial Sequence: Synthetic oligonucleotide
  Antisense strand to SEQ ID NO: 1774285
agaggcacagaucucaguc

SEQ ID NO: 1774287 - RNA, 19 nt, Artificial Sequence
  Description of Artificial Sequence: Synthetic oligonucleotide
  Sense strand starting at position 678 of SEQ ID NO: 1562808
ucugcuguuugccacagau

SEQ ID NO: 1774288 - RNA, 19 nt, Artificial Sequence
  Description of Artificial Sequence: Synthetic oligonucleotide
  Antisense strand to SEQ ID NO: 1774287
aucuguggcaaacagcaga

SEQ ID NO: 1774289 - RNA, 19 nt, Artificial Sequence
  Description of Artificial Sequence: Synthetic oligonucleotide
  Sense strand starting at position 727 of SEQ ID NO: 1562808
ggcugaugagccuggcaga

SEQ ID NO: 1774290 - RNA, 19 nt, Artificial Sequence
  Description of Artificial Sequence: Synthetic oligonucleotide
  Antisense strand to SEQ ID NO: 1774289
ucugccaggcucaucagcc

SEQ ID NO: 1774291 - RNA, 19 nt, Artificial Sequence
  Description of Artificial Sequence: Synthetic oligonucleotide
  Sense strand starting at position 1076 of SEQ ID NO: 1562808
guggcaugcccaggugauu

SEQ ID NO: 1774292 - RNA, 19 nt, Artificial Sequence
  Description of Artificial Sequence: Synthetic oligonucleotide
  Antisense strand to SEQ ID NO: 1774291
aaucaccugggcaugccac

SEQ ID NO: 1774293 - RNA, 19 nt, Artificial Sequence
  Description of Artificial Sequence: Synthetic oligonucleotide
  Sense strand starting at position 1124 of SEQ ID NO: 1562808
ggguugggaucuggguuua

SEQ ID NO: 1774294 - RNA, 19 nt, Artificial Sequence
  Description of Artificial Sequence: Synthetic oligonucleotide
  Antisense strand to SEQ ID NO: 1774293
uaaacccagaucccaaccc

SEQ ID NO: 1774295 - RNA, 19 nt, Artificial Sequence
  Description of Artificial Sequence: Synthetic oligonucleotide
  Sense strand starting at position 1129 of SEQ ID NO: 1562808
gggaucuggguuuagugua

SEQ ID NO: 1774296 - RNA, 19 nt, Artificial Sequence
  Description of Artificial Sequence: Synthetic oligonucleotide
  Antisense strand to SEQ ID NO: 1774295
uacacuaaacccagauccc

SEQ ID NO: 1774297 - RNA, 19 nt, Artificial Sequence
  Description of Artificial Sequence: Synthetic oligonucleotide
  Sense strand starting at position 1179 of SEQ ID NO: 1562808
gaccgaguguugugaugca

SEQ ID NO: 1774298 - RNA, 19 nt, Artificial Sequence
  Description of Artificial Sequence: Synthetic oligonucleotide
  Antisense strand to SEQ ID NO: 1774297
ugcaucacaacacucgguc

SEQ ID NO: 1774299 - RNA, 19 nt, Artificial Sequence
  Description of Artificial Sequence: Synthetic oligonucleotide
  Sense strand starting at position 1184 of SEQ ID NO: 1562808
aguguugugaugcacagau

SEQ ID NO: 1774300 - RNA, 19 nt, Artificial Sequence
  Description of Artificial Sequence: Synthetic oligonucleotide
  Antisense strand to SEQ ID NO: 1774299
aucugugcaucacaacacu

SEQ ID NO: 1774301 - RNA, 19 nt, Artificial Sequence
  Description of Artificial Sequence: Synthetic oligonucleotide
  Sense strand starting at position 1240 of SEQ ID NO: 1562808
uggagaacuggugaugcau

SEQ ID NO: 1774302 - RNA, 19 nt, Artificial Sequence
  Description of Artificial Sequence: Synthetic oligonucleotide
  Antisense strand to SEQ ID NO: 1774301
augcaucaccaguucucca

SEQ ID NO: 1774303 - RNA, 19 nt, Artificial Sequence
  Description of Artificial Sequence: Synthetic oligonucleotide
  Sense strand starting at position 1397 of SEQ ID NO: 1562808
acaagaugauuugaccuca

SEQ ID NO: 1774304 - RNA, 19 nt, Artificial Sequence
  Description of Artificial Sequence: Synthetic oligonucleotide
  Antisense strand to SEQ ID NO: 1774303
ugaggucaaaucaucuugu

SEQ ID NO: 1774305 - RNA, 19 nt, Artificial Sequence
  Description of Artificial Sequence: Synthetic oligonucleotide
  Sense strand starting at position 1453 of SEQ ID NO: 1562808
gccugaauuugggcucuua

SEQ ID NO: 1774306 - RNA, 19 nt, Artificial Sequence
  Description of Artificial Sequence: Synthetic oligonucleotide
  Antisense strand to SEQ ID NO: 1774305
uaagagcccaaauucaggc

SEQ ID NO: 1774307 - RNA, 19 nt, Artificial Sequence
  Description of Artificial Sequence: Synthetic oligonucleotide
  Sense strand starting at position 2139 of SEQ ID NO: 1562808
ucgguuuggccugaucaca

SEQ ID NO: 1774308 - RNA, 19 nt, Artificial Sequence
  Description of Artificial Sequence: Synthetic oligonucleotide
  Antisense strand to SEQ ID NO: 1774307
ugugaucaggccaaaccga

SEQ ID NO: 1774309 - RNA, 19 nt, Artificial Sequence
  Description of Artificial Sequence: Synthetic oligonucleotide
  Sense strand starting at position 2147 of SEQ ID NO: 1562808
gccugaucacacuggagga

SEQ ID NO: 1774310 - RNA, 19 nt, Artificial Sequence
  Description of Artificial Sequence: Synthetic oligonucleotide
  Antisense strand to SEQ ID NO: 1774309
uccuccagugugaucaggc

SEQ ID NO: 1774311 - RNA, 19 nt, Artificial Sequence
  Description of Artificial Sequence: Synthetic oligonucleotide
  Sense strand starting at position 2298 of SEQ ID NO: 1562808
gucgcuuugaccgugcaaa

SEQ ID NO: 1774312 - RNA, 19 nt, Artificial Sequence
  Description of Artificial Sequence: Synthetic oligonucleotide
  Antisense strand to SEQ ID NO: 1774311
uuugcacggucaaagcgac

SEQ ID NO: 1774313 - RNA, 19 nt, Artificial Sequence
  Description of Artificial Sequence: Synthetic oligonucleotide
  Sense strand starting at position 2299 of SEQ ID NO: 1562808
ucgcuuugaccgugcaaag

SEQ ID NO: 1774314 - RNA, 19 nt, Artificial Sequence
  Description of Artificial Sequence: Synthetic oligonucleotide
  Antisense strand to SEQ ID NO: 1774313
cuuugcacggucaaagcga

SEQ ID NO: 1774315 - RNA, 19 nt, Artificial Sequence
  Description of Artificial Sequence: Synthetic oligonucleotide
  Sense strand starting at position 2351 of SEQ ID NO: 1562808
gugugccaguguuagguau

SEQ ID NO: 1774316 - RNA, 19 nt, Artificial Sequence
  Description of Artificial Sequence: Synthetic oligonucleotide
  Antisense strand to SEQ ID NO: 1774315
auaccuaacacuggcacac

SEQ ID NO: 1774317 - RNA, 19 nt, Artificial Sequence
  Description of Artificial Sequence: Synthetic oligonucleotide
  Sense strand starting at position 2384 of SEQ ID NO: 1562808
uuagaaauaugcccugcau

SEQ ID NO: 1774318 - RNA, 19 nt, Artificial Sequence
  Description of Artificial Sequence: Synthetic oligonucleotide
  Antisense strand to SEQ ID NO: 1774317
augcagggcauauuucuaa

SEQ ID NO: 1774319 - RNA, 19 nt, Artificial Sequence
  Description of Artificial Sequence: Synthetic oligonucleotide
  Sense strand starting at position 2757 of SEQ ID NO: 1562808
uggcaguugugguguagga

SEQ ID NO: 1774320 - RNA, 19 nt, Artificial Sequence
  Description of Artificial Sequence: Synthetic oligonucleotide
  Antisense strand to SEQ ID NO: 1774319
uccuacaccacaacugcca

SEQ ID NO: 1774321 - RNA, 19 nt, Artificial Sequence
  Description of Artificial Sequence: Synthetic oligonucleotide
  Sense strand starting at position 2883 of SEQ ID NO: 1562808
gacgaagagucagguuaac

SEQ ID NO: 1774322 - RNA, 19 nt, Artificial Sequence
  Description of Artificial Sequence: Synthetic oligonucleotide
  Antisense strand to SEQ ID NO: 1774321
guuaaccugacucuucguc

SEQ ID NO: 1774323 - RNA, 19 nt, Artificial Sequence
  Description of Artificial Sequence: Synthetic oligonucleotide
  Sense strand starting at position 2889 of SEQ ID NO: 1562808
gagucagguuaaccguuaa

SEQ ID NO: 1774324 - RNA, 19 nt, Artificial Sequence
  Description of Artificial Sequence: Synthetic oligonucleotide
  Antisense strand to SEQ ID NO: 1774323
uuaacgguuaaccugacuc

SEQ ID NO: 1774325 - RNA, 19 nt, Artificial Sequence
  Description of Artificial Sequence: Synthetic oligonucleotide
  Sense strand starting at position 3177 of SEQ ID NO: 1562808
gaacguuugaggcacugau

SEQ ID NO: 1774326 - RNA, 19 nt, Artificial Sequence
  Description of Artificial Sequence: Synthetic oligonucleotide
  Antisense strand to SEQ ID NO: 1774325
aucagugccucaaacguuc

SEQ ID NO: 1774327 - RNA, 19 nt, Artificial Sequence
  Description of Artificial Sequence: Synthetic oligonucleotide
  Sense strand starting at position 3205 of SEQ ID NO: 1562808
ccacuucucuaagcaagga

SEQ ID NO: 1774328 - RNA, 19 nt, Artificial Sequence
  Description of Artificial Sequence: Synthetic oligonucleotide
  Antisense strand to SEQ ID NO: 1774327
uccuugcuuagagaagugg

SEQ ID NO: 1774329 - RNA, 19 nt, Artificial Sequence
  Description of Artificial Sequence: Synthetic oligonucleotide
  Sense strand starting at position 3224 of SEQ ID NO: 1562808
gcacguguuuagccuguga

SEQ ID NO: 1774330 - RNA, 19 nt, Artificial Sequence
  Description of Artificial Sequence: Synthetic oligonucleotide
  Antisense strand to SEQ ID NO: 1774329
ucacaggcuaaacacgugc

SEQ ID NO: 1774331 - RNA, 19 nt, Artificial Sequence
  Description of Artificial Sequence: Synthetic oligonucleotide
  Sense strand starting at position 3228 of SEQ ID NO: 1562808
guguuuagccugugaggac

SEQ ID NO: 1774332 - RNA, 19 nt, Artificial Sequence
  Description of Artificial Sequence: Synthetic oligonucleotide
  Antisense strand to SEQ ID NO: 1774331
guccucacaggcuaaacac

SEQ ID NO: 1774333 - RNA, 19 nt, Artificial Sequence
  Description of Artificial Sequence: Synthetic oligonucleotide
  Sense strand starting at position 3229 of SEQ ID NO: 1562808
uguuuagccugugaggacu

SEQ ID NO: 1774334 - RNA, 19 nt, Artificial Sequence
  Description of Artificial Sequence: Synthetic oligonucleotide
  Antisense strand to SEQ ID NO: 1774333
aguccucacaggcuaaaca

SEQ ID NO: 1774335 - RNA, 19 nt, Artificial Sequence
  Description of Artificial Sequence: Synthetic oligonucleotide
  Sense strand starting at position 3273 of SEQ ID NO: 1562808
agcacuguccgagggcaua

SEQ ID NO: 1774336 - RNA, 19 nt, Artificial Sequence
  Description of Artificial Sequence: Synthetic oligonucleotide
  Antisense strand to SEQ ID NO: 1774335
uaugcccucggacagugcu

SEQ ID NO: 1774337 - RNA, 19 nt, Artificial Sequence
  Description of Artificial Sequence: Synthetic oligonucleotide
  Sense strand starting at position 3360 of SEQ ID NO: 1562808
ugcuaauuacccuaugaag

SEQ ID NO: 1774338 - RNA, 19 nt, Artificial Sequence
  Description of Artificial Sequence: Synthetic oligonucleotide
  Antisense strand to SEQ ID NO: 1774337
cuucauaggguaauuagca

SEQ ID NO: 1774339 - RNA, 19 nt, Artificial Sequence
  Description of Artificial Sequence: Synthetic oligonucleotide
  Sense strand starting at position 3654 of SEQ ID NO: 1562808
cagguuuccucccuggcaa

SEQ ID NO: 1774340 - RNA, 19 nt, Artificial Sequence
  Description of Artificial Sequence: Synthetic oligonucleotide
  Antisense strand to SEQ ID NO: 1774339
uugccagggaggaaaccug

SEQ ID NO: 1774341 - RNA, 19 nt, Artificial Sequence
  Description of Artificial Sequence: Synthetic oligonucleotide
  Sense strand starting at position 3655 of SEQ ID NO: 1562808
agguuuccucccuggcaaa

SEQ ID NO: 1774342 - RNA, 19 nt, Artificial Sequence
  Description of Artificial Sequence: Synthetic oligonucleotide
  Antisense strand to SEQ ID NO: 1774341
uuugccagggaggaaaccu

SEQ ID NO: 1774343 - RNA, 19 nt, Artificial Sequence
  Description of Artificial Sequence: Synthetic oligonucleotide
  Sense strand starting at position 3930 of SEQ ID NO: 1562808
ccucaaaugugagaauacu

SEQ ID NO: 1774344 - RNA, 19 nt, Artificial Sequence
  Description of Artificial Sequence: Synthetic oligonucleotide
  Antisense strand to SEQ ID NO: 1774343
aguauucucacauuugagg

SEQ ID NO: 1774345 - RNA, 19 nt, Artificial Sequence
  Description of Artificial Sequence: Synthetic oligonucleotide
  Sense strand starting at position 42 of SEQ ID NO: 1562809
agagauggauaauaaccaa

SEQ ID NO: 1774346 - RNA, 19 nt, Artificial Sequence
  Description of Artificial Sequence: Synthetic oligonucleotide
  Antisense strand to SEQ ID NO: 1774345
uugguuauuauccaucucu

SEQ ID NO: 1774347 - RNA, 19 nt, Artificial Sequence
  Description of Artificial Sequence: Synthetic oligonucleotide
  Sense strand starting at position 64 of SEQ ID NO: 1562809
cugugugccucaggaacaa

SEQ ID NO: 1774348 - RNA, 19 nt, Artificial Sequence
  Description of Artificial Sequence: Synthetic oligonucleotide
  Antisense strand to SEQ ID NO: 1774347
uuguuccugaggcacacag

SEQ ID NO: 1774349 - RNA, 19 nt, Artificial Sequence
  Description of Artificial Sequence: Synthetic oligonucleotide
  Sense strand starting at position 84 of SEQ ID NO: 1562809
ugaagaugguaagagguau

SEQ ID NO: 1774350 - RNA, 19 nt, Artificial Sequence
  Description of Artificial Sequence: Synthetic oligonucleotide
  Antisense strand to SEQ ID NO: 1774349
auaccucuuaccaucuuca

SEQ ID NO: 1774351 - RNA, 19 nt, Artificial Sequence
  Description of Artificial Sequence: Synthetic oligonucleotide
  Sense strand starting at position 146 of SEQ ID NO: 1562809
aggccucagucacaagaaa

SEQ ID NO: 1774352 - RNA, 19 nt, Artificial Sequence
  Description of Artificial Sequence: Synthetic oligonucleotide
  Antisense strand to SEQ ID NO: 1774351
uuucuugugacugaggccu

SEQ ID NO: 1774353 - RNA, 19 nt, Artificial Sequence
  Description of Artificial Sequence: Synthetic oligonucleotide
  Sense strand starting at position 712 of SEQ ID NO: 1562809
ggagacaguuuaugugaaa

SEQ ID NO: 1774354 - RNA, 19 nt, Artificial Sequence
  Description of Artificial Sequence: Synthetic oligonucleotide
  Antisense strand to SEQ ID NO: 1774353
uuucacauaaacugucucc

SEQ ID NO: 1774355 - RNA, 19 nt, Artificial Sequence
  Description of Artificial Sequence: Synthetic oligonucleotide
  Sense strand starting at position 715 of SEQ ID NO: 1562809
gacaguuuaugugaaagga

SEQ ID NO: 1774356 - RNA, 19 nt, Artificial Sequence
  Description of Artificial Sequence: Synthetic oligonucleotide
  Antisense strand to SEQ ID NO: 1774355
uccuuucacauaaacuguc

SEQ ID NO: 1774357 - RNA, 19 nt, Artificial Sequence
  Description of Artificial Sequence: Synthetic oligonucleotide
  Sense strand starting at position 756 of SEQ ID NO: 1562809
cacguuguugccugauguu

SEQ ID NO: 1774358 - RNA, 19 nt, Artificial Sequence
  Description of Artificial Sequence: Synthetic oligonucleotide
  Antisense strand to SEQ ID NO: 1774357
aacaucaggcaacaacgug

SEQ ID NO: 1774359 - RNA, 19 nt, Artificial Sequence
  Description of Artificial Sequence: Synthetic oligonucleotide
  Sense strand starting at position 765 of SEQ ID NO: 1562809
gccugauguuuggagcaau

SEQ ID NO: 1774360 - RNA, 19 nt, Artificial Sequence
  Description of Artificial Sequence: Synthetic oligonucleotide
  Antisense strand to SEQ ID NO: 1774359
auugcuccaaacaucaggc

SEQ ID NO: 1774361 - RNA, 19 nt, Artificial Sequence
  Description of Artificial Sequence: Synthetic oligonucleotide
  Sense strand starting at position 831 of SEQ ID NO: 1562809
cuguguccuccauaccgau

SEQ ID NO: 1774362 - RNA, 19 nt, Artificial Sequence
  Description of Artificial Sequence: Synthetic oligonucleotide
  Antisense strand to SEQ ID NO: 1774361
aucgguauggaggacacag

SEQ ID NO: 1774363 - RNA, 19 nt, Artificial Sequence
  Description of Artificial Sequence: Synthetic oligonucleotide
  Sense strand starting at position 894 of SEQ ID NO: 1562809
gugguuguguuucuuucaa

SEQ ID NO: 1774364 - RNA, 19 nt, Artificial Sequence
  Description of Artificial Sequence: Synthetic oligonucleotide
  Antisense strand to SEQ ID NO: 1774363
uugaaagaaacacaaccac

SEQ ID NO: 1774365 - RNA, 19 nt, Artificial Sequence
  Description of Artificial Sequence: Synthetic oligonucleotide
  Sense strand starting at position 931 of SEQ ID NO: 1562809
gagggacauuuccacauac

SEQ ID NO: 1774366 - RNA, 19 nt, Artificial Sequence
  Description of Artificial Sequence: Synthetic oligonucleotide
  Antisense strand to SEQ ID NO: 1774365
guauguggaaaugucccuc

SEQ ID NO: 1774367 - RNA, 19 nt, Artificial Sequence
  Description of Artificial Sequence: Synthetic oligonucleotide
  Sense strand starting at position 991 of SEQ ID NO: 1562809
agugcaggaucucauuuaa

SEQ ID NO: 1774368 - RNA, 19 nt, Artificial Sequence
  Description of Artificial Sequence: Synthetic oligonucleotide
  Antisense strand to SEQ ID NO: 1774367
uuaaaugagauccugcacu

SEQ ID NO: 1774369 - RNA, 19 nt, Artificial Sequence
  Description of Artificial Sequence: Synthetic oligonucleotide
  Sense strand starting at position 1026 of SEQ ID NO: 1562809
ggaggugagugcaaggaau

SEQ ID NO: 1774370 - RNA, 19 nt, Artificial Sequence
  Description of Artificial Sequence: Synthetic oligonucleotide
  Antisense strand to SEQ ID NO: 1774369
auuccuugcacucaccucc

SEQ ID NO: 1774371 - RNA, 19 nt, Artificial Sequence
  Description of Artificial Sequence: Synthetic oligonucleotide
  Sense strand starting at position 1383 of SEQ ID NO: 1562809
ccaaucauccugcaaguga

SEQ ID NO: 1774372 - RNA, 19 nt, Artificial Sequence
  Description of Artificial Sequence: Synthetic oligonucleotide
  Antisense strand to SEQ ID NO: 1774371
ucacuugcaggaugauugg

SEQ ID NO: 1774373 - RNA, 19 nt, Artificial Sequence
  Description of Artificial Sequence: Synthetic oligonucleotide
  Sense strand starting at position 2156 of SEQ ID NO: 1562809
cugcguugucccuuccagu

SEQ ID NO: 1774374 - RNA, 19 nt, Artificial Sequence
  Description of Artificial Sequence: Synthetic oligonucleotide
  Antisense strand to SEQ ID NO: 1774373
acuggaagggacaacgcag

SEQ ID NO: 1774375 - RNA, 19 nt, Artificial Sequence
  Description of Artificial Sequence: Synthetic oligonucleotide
  Sense strand starting at position 2159 of SEQ ID NO: 1562809
cguugucccuuccagugaa

SEQ ID NO: 1774376 - RNA, 19 nt, Artificial Sequence
  Description of Artificial Sequence: Synthetic oligonucleotide
  Antisense strand to SEQ ID NO: 1774375
uucacuggaagggacaacg

SEQ ID NO: 1774377 - RNA, 19 nt, Artificial Sequence
  Description of Artificial Sequence: Synthetic oligonucleotide
  Sense strand starting at position 2433 of SEQ ID NO: 1562809
uggcuuucuuacugacuga

SEQ ID NO: 1774378 - RNA, 19 nt, Artificial Sequence
  Description of Artificial Sequence: Synthetic oligonucleotide
  Antisense strand to SEQ ID NO: 1774377
ucagucaguaagaaagcca

SEQ ID NO: 1774379 - RNA, 19 nt, Artificial Sequence
  Description of Artificial Sequence: Synthetic oligonucleotide
  Sense strand starting at position 2530 of SEQ ID NO: 1562809
uugagaaugcuccggcuau

SEQ ID NO: 1774380 - RNA, 19 nt, Artificial Sequence
  Description of Artificial Sequence: Synthetic oligonucleotide
  Antisense strand to SEQ ID NO: 1774379
auagccggagcauucucaa

SEQ ID NO: 1774381 - RNA, 19 nt, Artificial Sequence
  Description of Artificial Sequence: Synthetic oligonucleotide
  Sense strand starting at position 2531 of SEQ ID NO: 1562809
ugagaaugcuccggcuaug

SEQ ID NO: 1774382 - RNA, 19 nt, Artificial Sequence
  Description of Artificial Sequence: Synthetic oligonucleotide
  Antisense strand to SEQ ID NO: 1774381
cauagccggagcauucuca

SEQ ID NO: 1774383 - RNA, 19 nt, Artificial Sequence
  Description of Artificial Sequence: Synthetic oligonucleotide
  Sense strand starting at position 2534 of SEQ ID NO: 1562809
gaaugcuccggcuaugaaa

SEQ ID NO: 1774384 - RNA, 19 nt, Artificial Sequence
  Description of Artificial Sequence: Synthetic oligonucleotide
  Antisense strand to SEQ ID NO: 1774383
uuucauagccggagcauuc

SEQ ID NO: 1774385 - RNA, 19 nt, Artificial Sequence
  Description of Artificial Sequence: Synthetic oligonucleotide
  Sense strand starting at position 2559 of SEQ ID NO: 1562809
gggucugucucaggacaca

SEQ ID NO: 1774386 - RNA, 19 nt, Artificial Sequence
  Description of Artificial Sequence: Synthetic oligonucleotide
  Antisense strand to SEQ ID NO: 1774385
uguguccugagacagaccc

SEQ ID NO: 1774387 - RNA, 19 nt, Artificial Sequence
  Description of Artificial Sequence: Synthetic oligonucleotide
  Sense strand starting at position 2636 of SEQ ID NO: 1562809
aggagcauuuacuaucuca

SEQ ID NO: 1774388 - RNA, 19 nt, Artificial Sequence
  Description of Artificial Sequence: Synthetic oligonucleotide
  Antisense strand to SEQ ID NO: 1774387
ugagauaguaaaugcuccu

SEQ ID NO: 1774389 - RNA, 19 nt, Artificial Sequence
  Description of Artificial Sequence: Synthetic oligonucleotide
  Sense strand starting at position 2650 of SEQ ID NO: 1562809
ucucaagaccuuugggcau

SEQ ID NO: 1774390 - RNA, 19 nt, Artificial Sequence
  Description of Artificial Sequence: Synthetic oligonucleotide
  Antisense strand to SEQ ID NO: 1774389
augcccaaaggucuugaga

SEQ ID NO: 1774391 - RNA, 19 nt, Artificial Sequence
  Description of Artificial Sequence: Synthetic oligonucleotide
  Sense strand starting at position 2808 of SEQ ID NO: 1562809
ggccaaauuuccuuggugu

SEQ ID NO: 1774392 - RNA, 19 nt, Artificial Sequence
  Description of Artificial Sequence: Synthetic oligonucleotide
  Antisense strand to SEQ ID NO: 1774391
acaccaaggaaauuuggcc

SEQ ID NO: 1774393 - RNA, 19 nt, Artificial Sequence
  Description of Artificial Sequence: Synthetic oligonucleotide
  Sense strand starting at position 2809 of SEQ ID NO: 1562809
gccaaauuuccuuggugug

SEQ ID NO: 1774394 - RNA, 19 nt, Artificial Sequence
  Description of Artificial Sequence: Synthetic oligonucleotide
  Antisense strand to SEQ ID NO: 1774393
cacaccaaggaaauuuggc

SEQ ID NO: 1774395 - RNA, 19 nt, Artificial Sequence
  Description of Artificial Sequence: Synthetic oligonucleotide
  Sense strand starting at position 2831 of SEQ ID NO: 1562809
ccuggcauucugugauugu

SEQ ID NO: 1774396 - RNA, 19 nt, Artificial Sequence
  Description of Artificial Sequence: Synthetic oligonucleotide
  Antisense strand to SEQ ID NO: 1774395
acaaucacagaaugccagg

SEQ ID NO: 1774397 - RNA, 19 nt, Artificial Sequence
  Description of Artificial Sequence: Synthetic oligonucleotide
  Sense strand starting at position 2885 of SEQ ID NO: 1562809
gcccaauuacacugggagu

SEQ ID NO: 1774398 - RNA, 19 nt, Artificial Sequence
  Description of Artificial Sequence: Synthetic oligonucleotide
  Antisense strand to SEQ ID NO: 1774397
acucccaguguaauugggc

SEQ ID NO: 1774399 - RNA, 19 nt, Artificial Sequence
  Description of Artificial Sequence: Synthetic oligonucleotide
  Sense strand starting at position 2887 of SEQ ID NO: 1562809
ccaauuacacugggaguca

SEQ ID NO: 1774400 - RNA, 19 nt, Artificial Sequence
  Description of Artificial Sequence: Synthetic oligonucleotide
  Antisense strand to SEQ ID NO: 1774399
ugacucccaguguaauugg

SEQ ID NO: 1774401 - RNA, 19 nt, Artificial Sequence
  Description of Artificial Sequence: Synthetic oligonucleotide
  Sense strand starting at position 2888 of SEQ ID NO: 1562809
caauuacacugggagucau

SEQ ID NO: 1774402 - RNA, 19 nt, Artificial Sequence
  Description of Artificial Sequence: Synthetic oligonucleotide
  Antisense strand to SEQ ID NO: 1774401
augacucccaguguaauug

SEQ ID NO: 1774403 - RNA, 19 nt, Artificial Sequence
  Description of Artificial Sequence: Synthetic oligonucleotide
  Sense strand starting at position 2938 of SEQ ID NO: 1562809
acgguaauguuuaacgugu

SEQ ID NO: 1774404 - RNA, 19 nt, Artificial Sequence
  Description of Artificial Sequence: Synthetic oligonucleotide
  Antisense strand to SEQ ID NO: 1774403
acacguuaaacauuaccgu

SEQ ID NO: 1774405 - RNA, 19 nt, Artificial Sequence
  Description of Artificial Sequence: Synthetic oligonucleotide
  Sense strand starting at position 2939 of SEQ ID NO: 1562809
cgguaauguuuaacguguu

SEQ ID NO: 1774406 - RNA, 19 nt, Artificial Sequence
  Description of Artificial Sequence: Synthetic oligonucleotide
  Antisense strand to SEQ ID NO: 1774405
aacacguuaaacauuaccg

SEQ ID NO: 1774407 - RNA, 19 nt, Artificial Sequence
  Description of Artificial Sequence: Synthetic oligonucleotide
  Sense strand starting at position 3370 of SEQ ID NO: 1562809
gggucuguucugugccaga

SEQ ID NO: 1774408 - RNA, 19 nt, Artificial Sequence
  Description of Artificial Sequence: Synthetic oligonucleotide
  Antisense strand to SEQ ID NO: 1774407
ucuggcacagaacagaccc

SEQ ID NO: 1774409 - RNA, 19 nt, Artificial Sequence
  Description of Artificial Sequence: Synthetic oligonucleotide
  Sense strand starting at position 3405 of SEQ ID NO: 1562809
ggagguguacuuggacaga

SEQ ID NO: 1774410 - RNA, 19 nt, Artificial Sequence
  Description of Artificial Sequence: Synthetic oligonucleotide
  Antisense strand to SEQ ID NO: 1774409
ucuguccaaguacaccucc

SEQ ID NO: 1774411 - RNA, 19 nt, Artificial Sequence
  Description of Artificial Sequence: Synthetic oligonucleotide
  Sense strand starting at position 3564 of SEQ ID NO: 1562809
gagagagcaugucauuuau

SEQ ID NO: 1774412 - RNA, 19 nt, Artificial Sequence
  Description of Artificial Sequence: Synthetic oligonucleotide
  Antisense strand to SEQ ID NO: 1774411
auaaaugacaugcucucuc

SEQ ID NO: 1774413 - RNA, 19 nt, Artificial Sequence
  Description of Artificial Sequence: Synthetic oligonucleotide
  Sense strand starting at position 3689 of SEQ ID NO: 1562809
gagggugaaucucauugac

SEQ ID NO: 1774414 - RNA, 19 nt, Artificial Sequence
  Description of Artificial Sequence: Synthetic oligonucleotide
  Antisense strand to SEQ ID NO: 1774413
gucaaugagauucacccuc

SEQ ID NO: 1774415 - RNA, 19 nt, Artificial Sequence
  Description of Artificial Sequence: Synthetic oligonucleotide
  Sense strand starting at position 3691 of SEQ ID NO: 1562809
gggugaaucucauugacac

SEQ ID NO: 1774416 - RNA, 19 nt, Artificial Sequence
  Description of Artificial Sequence: Synthetic oligonucleotide
  Antisense strand to SEQ ID NO: 1774415
gugucaaugagauucaccc

SEQ ID NO: 1774417 - RNA, 19 nt, Artificial Sequence
  Description of Artificial Sequence: Synthetic oligonucleotide
  Sense strand starting at position 3692 of SEQ ID NO: 1562809
ggugaaucucauugacacc

SEQ ID NO: 1774418 - RNA, 19 nt, Artificial Sequence
  Description of Artificial Sequence: Synthetic oligonucleotide
  Antisense strand to SEQ ID NO: 1774417
ggugucaaugagauucacc

SEQ ID NO: 1774419 - RNA, 19 nt, Artificial Sequence
  Description of Artificial Sequence: Synthetic oligonucleotide
  Sense strand starting at position 3765 of SEQ ID NO: 1562809
caucuauguggagggcaua

SEQ ID NO: 1774420 - RNA, 19 nt, Artificial Sequence
  Description of Artificial Sequence: Synthetic oligonucleotide
  Antisense strand to SEQ ID NO: 1774419
uaugcccuccacauagaug

SEQ ID NO: 1774421 - RNA, 19 nt, Artificial Sequence
  Description of Artificial Sequence: Synthetic oligonucleotide
  Sense strand starting at position 3832 of SEQ ID NO: 1562809
gcacaacuauguccaguua

SEQ ID NO: 1774422 - RNA, 19 nt, Artificial Sequence
  Description of Artificial Sequence: Synthetic oligonucleotide
  Antisense strand to SEQ ID NO: 1774421
uaacuggacauaguugugc

SEQ ID NO: 1774423 - RNA, 19 nt, Artificial Sequence
  Description of Artificial Sequence: Synthetic oligonucleotide
  Sense strand starting at position 3865 of SEQ ID NO: 1562809
ggugauugcccaugcauug

SEQ ID NO: 1774424 - RNA, 19 nt, Artificial Sequence
  Description of Artificial Sequence: Synthetic oligonucleotide
  Antisense strand to SEQ ID NO: 1774423
caaugcaugggcaaucacc

SEQ ID NO: 1774425 - RNA, 19 nt, Artificial Sequence
  Description of Artificial Sequence: Synthetic oligonucleotide
  Sense strand starting at position 136 of SEQ ID NO: 1562810
ccuaguucccagugguaga

SEQ ID NO: 1774426 - RNA, 19 nt, Artificial Sequence
  Description of Artificial Sequence: Synthetic oligonucleotide
  Antisense strand to SEQ ID NO: 1774425
ucuaccacugggaacuagg

SEQ ID NO: 1774427 - RNA, 19 nt, Artificial Sequence
  Description of Artificial Sequence: Synthetic oligonucleotide
  Sense strand starting at position 137 of SEQ ID NO: 1562810
cuaguucccagugguagau

SEQ ID NO: 1774428 - RNA, 19 nt, Artificial Sequence
  Description of Artificial Sequence: Synthetic oligonucleotide
  Antisense strand to SEQ ID NO: 1774427
aucuaccacugggaacuag

SEQ ID NO: 1774429 - RNA, 19 nt, Artificial Sequence
  Description of Artificial Sequence: Synthetic oligonucleotide
  Sense strand starting at position 143 of SEQ ID NO: 1562810
cccagugguagaugggaau

SEQ ID NO: 1774430 - RNA, 19 nt, Artificial Sequence
  Description of Artificial Sequence: Synthetic oligonucleotide
  Antisense strand to SEQ ID NO: 1774429
auucccaucuaccacuggg

SEQ ID NO: 1774431 - RNA, 19 nt, Artificial Sequence
  Description of Artificial Sequence: Synthetic oligonucleotide
  Sense strand starting at position 368 of SEQ ID NO: 1562810
gugcuuucugcagggcuau

SEQ ID NO: 1774432 - RNA, 19 nt, Artificial Sequence
  Description of Artificial Sequence: Synthetic oligonucleotide
  Antisense strand to SEQ ID NO: 1774431
auagcccugcagaaagcac

SEQ ID NO: 1774433 - RNA, 19 nt, Artificial Sequence
  Description of Artificial Sequence: Synthetic oligonucleotide
  Sense strand starting at position 733 of SEQ ID NO: 1562810
ccuguucucaugggacuga

SEQ ID NO: 1774434 - RNA, 19 nt, Artificial Sequence
  Description of Artificial Sequence: Synthetic oligonucleotide
  Antisense strand to SEQ ID NO: 1774433
ucagucccaugagaacagg

SEQ ID NO: 1774435 - RNA, 19 nt, Artificial Sequence
  Description of Artificial Sequence: Synthetic oligonucleotide
  Sense strand starting at position 774 of SEQ ID NO: 1562810
gaacgagagucccuugguu

SEQ ID NO: 1774436 - RNA, 19 nt, Artificial Sequence
  Description of Artificial Sequence: Synthetic oligonucleotide
  Antisense strand to SEQ ID NO: 1774435
aaccaagggacucucguuc

SEQ ID NO: 1774437 - RNA, 19 nt, Artificial Sequence
  Description of Artificial Sequence: Synthetic oligonucleotide
  Sense strand starting at position 776 of SEQ ID NO: 1562810
acgagagucccuugguucu

SEQ ID NO: 1774438 - RNA, 19 nt, Artificial Sequence
  Description of Artificial Sequence: Synthetic oligonucleotide
  Antisense strand to SEQ ID NO: 1774437
agaaccaagggacucucgu

SEQ ID NO: 1774439 - RNA, 19 nt, Artificial Sequence
  Description of Artificial Sequence: Synthetic oligonucleotide
  Sense strand starting at position 1120 of SEQ ID NO: 1562810
gguccuuguuccgcguuua

SEQ ID NO: 1774440 - RNA, 19 nt, Artificial Sequence
  Description of Artificial Sequence: Synthetic oligonucleotide
  Antisense strand to SEQ ID NO: 1774439
uaaacgcggaacaaggacc

SEQ ID NO: 1774441 - RNA, 19 nt, Artificial Sequence
  Description of Artificial Sequence: Synthetic oligonucleotide
  Sense strand starting at position 1374 of SEQ ID NO: 1562810
gccuguucccaccgaguca

SEQ ID NO: 1774442 - RNA, 19 nt, Artificial Sequence
  Description of Artificial Sequence: Synthetic oligonucleotide
  Antisense strand to SEQ ID NO: 1774441
ugacucggugggaacaggc

SEQ ID NO: 1774443 - RNA, 19 nt, Artificial Sequence
  Description of Artificial Sequence: Synthetic oligonucleotide
  Sense strand starting at position 2160 of SEQ ID NO: 1562810
guaggugucauuggcucau

SEQ ID NO: 1774444 - RNA, 19 nt, Artificial Sequence
  Description of Artificial Sequence: Synthetic oligonucleotide
  Antisense strand to SEQ ID NO: 1774443
augagccaaugacaccuac

SEQ ID NO: 1774445 - RNA, 19 nt, Artificial Sequence
  Description of Artificial Sequence: Synthetic oligonucleotide
  Sense strand starting at position 2162 of SEQ ID NO: 1562810
aggugucauuggcucauuu

SEQ ID NO: 1774446 - RNA, 19 nt, Artificial Sequence
  Description of Artificial Sequence: Synthetic oligonucleotide
  Antisense strand to SEQ ID NO: 1774445
aaaugagccaaugacaccu

SEQ ID NO: 1774447 - RNA, 19 nt, Artificial Sequence
  Description of Artificial Sequence: Synthetic oligonucleotide
  Sense strand starting at position 2198 of SEQ ID NO: 1562810
gcccucuucuuucgaccua

SEQ ID NO: 1774448 - RNA, 19 nt, Artificial Sequence
  Description of Artificial Sequence: Synthetic oligonucleotide
  Antisense strand to SEQ ID NO: 1774447
uaggucgaaagaagagggc

SEQ ID NO: 1774449 - RNA, 19 nt, Artificial Sequence
  Description of Artificial Sequence: Synthetic oligonucleotide
  Sense strand starting at position 2248 of SEQ ID NO: 1562810
cguggcuuuaaaugacauu

SEQ ID NO: 1774450 - RNA, 19 nt, Artificial Sequence
  Description of Artificial Sequence: Synthetic oligonucleotide
  Antisense strand to SEQ ID NO: 1774449
aaugucauuuaaagccacg

SEQ ID NO: 1774451 - RNA, 19 nt, Artificial Sequence
  Description of Artificial Sequence: Synthetic oligonucleotide
  Sense strand starting at position 2251 of SEQ ID NO: 1562810
ggcuuuaaaugacauuuau

SEQ ID NO: 1774452 - RNA, 19 nt, Artificial Sequence
  Description of Artificial Sequence: Synthetic oligonucleotide
  Antisense strand to SEQ ID NO: 1774451
auaaaugucauuuaaagcc

SEQ ID NO: 1774453 - RNA, 19 nt, Artificial Sequence
  Description of Artificial Sequence: Synthetic oligonucleotide
  Sense strand starting at position 2287 of SEQ ID NO: 1562810
guuuguauuuccggagcga

SEQ ID NO: 1774454 - RNA, 19 nt, Artificial Sequence
  Description of Artificial Sequence: Synthetic oligonucleotide
  Antisense strand to SEQ ID NO: 1774453
ucgcuccggaaauacaaac

SEQ ID NO: 1774455 - RNA, 19 nt, Artificial Sequence
  Description of Artificial Sequence: Synthetic oligonucleotide
  Sense strand starting at position 2288 of SEQ ID NO: 1562810
uuuguauuuccggagcgaa

SEQ ID NO: 1774456 - RNA, 19 nt, Artificial Sequence
  Description of Artificial Sequence: Synthetic oligonucleotide
  Antisense strand to SEQ ID NO: 1774455
uucgcuccggaaauacaaa

SEQ ID NO: 1774457 - RNA, 19 nt, Artificial Sequence
  Description of Artificial Sequence: Synthetic oligonucleotide
  Sense strand starting at position 2302 of SEQ ID NO: 1562810
gcgaacagcuucucugagu

SEQ ID NO: 1774458 - RNA, 19 nt, Artificial Sequence
  Description of Artificial Sequence: Synthetic oligonucleotide
  Antisense strand to SEQ ID NO: 1774457
acucagagaagcuguucgc

SEQ ID NO: 1774459 - RNA, 19 nt, Artificial Sequence
  Description of Artificial Sequence: Synthetic oligonucleotide
  Sense strand starting at position 2303 of SEQ ID NO: 1562810
cgaacagcuucucugaguu

SEQ ID NO: 1774460 - RNA, 19 nt, Artificial Sequence
  Description of Artificial Sequence: Synthetic oligonucleotide
  Antisense strand to SEQ ID NO: 1774459
aacucagagaagcuguucg

SEQ ID NO: 1774461 - RNA, 19 nt, Artificial Sequence
  Description of Artificial Sequence: Synthetic oligonucleotide
  Sense strand starting at position 2313 of SEQ ID NO: 1562810
cucugaguuccagacucau

SEQ ID NO: 1774462 - RNA, 19 nt, Artificial Sequence
  Description of Artificial Sequence: Synthetic oligonucleotide
  Antisense strand to SEQ ID NO: 1774461
augagucuggaacucagag

SEQ ID NO: 1774463 - RNA, 19 nt, Artificial Sequence
  Description of Artificial Sequence: Synthetic oligonucleotide
  Sense strand starting at position 2533 of SEQ ID NO: 1562810
ccaggucuccugcauagga

SEQ ID NO: 1774464 - RNA, 19 nt, Artificial Sequence
  Description of Artificial Sequence: Synthetic oligonucleotide
  Antisense strand to SEQ ID NO: 1774463
uccuaugcaggagaccugg

SEQ ID NO: 1774465 - RNA, 19 nt, Artificial Sequence
  Description of Artificial Sequence: Synthetic oligonucleotide
  Sense strand starting at position 2595 of SEQ ID NO: 1562810
aucagcuuacccggacaau

SEQ ID NO: 1774466 - RNA, 19 nt, Artificial Sequence
  Description of Artificial Sequence: Synthetic oligonucleotide
  Antisense strand to SEQ ID NO: 1774465
auuguccggguaagcugau

SEQ ID NO: 1774467 - RNA, 19 nt, Artificial Sequence
  Description of Artificial Sequence: Synthetic oligonucleotide
  Sense strand starting at position 2888 of SEQ ID NO: 1562810
agagacauuuccugaccac

SEQ ID NO: 1774468 - RNA, 19 nt, Artificial Sequence
  Description of Artificial Sequence: Synthetic oligonucleotide
  Antisense strand to SEQ ID NO: 1774467
guggucaggaaaugucucu

SEQ ID NO: 1774469 - RNA, 19 nt, Artificial Sequence
  Description of Artificial Sequence: Synthetic oligonucleotide
  Sense strand starting at position 3314 of SEQ ID NO: 1562810
guaugugagugcugguuau

SEQ ID NO: 1774470 - RNA, 19 nt, Artificial Sequence
  Description of Artificial Sequence: Synthetic oligonucleotide
  Antisense strand to SEQ ID NO: 1774469
auaaccagcacucacauac

SEQ ID NO: 1774471 - RNA, 19 nt, Artificial Sequence
  Description of Artificial Sequence: Synthetic oligonucleotide
  Sense strand starting at position 3324 of SEQ ID NO: 1562810
gcugguuauugucugucuu

SEQ ID NO: 1774472 - RNA, 19 nt, Artificial Sequence
  Description of Artificial Sequence: Synthetic oligonucleotide
  Antisense strand to SEQ ID NO: 1774471
aagacagacaauaaccagc

SEQ ID NO: 1774473 - RNA, 19 nt, Artificial Sequence
  Description of Artificial Sequence: Synthetic oligonucleotide
  Sense strand starting at position 3666 of SEQ ID NO: 1562810
uggaguagugcuuggcaca

SEQ ID NO: 1774474 - RNA, 19 nt, Artificial Sequence
  Description of Artificial Sequence: Synthetic oligonucleotide
  Antisense strand to SEQ ID NO: 1774473
ugugccaagcacuacucca

SEQ ID NO: 1774475 - RNA, 19 nt, Artificial Sequence
  Description of Artificial Sequence: Synthetic oligonucleotide
  Sense strand starting at position 3667 of SEQ ID NO: 1562810
ggaguagugcuuggcacau

SEQ ID NO: 1774476 - RNA, 19 nt, Artificial Sequence
  Description of Artificial Sequence: Synthetic oligonucleotide
  Antisense strand to SEQ ID NO: 1774475
augugccaagcacuacucc

SEQ ID NO: 1774477 - RNA, 19 nt, Artificial Sequence
  Description of Artificial Sequence: Synthetic oligonucleotide
  Sense strand starting at position 3698 of SEQ ID NO: 1562810
guaaauacauguugaagga

SEQ ID NO: 1774478 - RNA, 19 nt, Artificial Sequence
  Description of Artificial Sequence: Synthetic oligonucleotide
  Antisense strand to SEQ ID NO: 1774477
uccuucaacauguauuuac

SEQ ID NO: 1774479 - RNA, 19 nt, Artificial Sequence
  Description of Artificial Sequence: Synthetic oligonucleotide
  Sense strand starting at position 3739 of SEQ ID NO: 1562810
aggugaaggugacuuucua

SEQ ID NO: 1774480 - RNA, 19 nt, Artificial Sequence
  Description of Artificial Sequence: Synthetic oligonucleotide
  Antisense strand to SEQ ID NO: 1774479
uagaaagucaccuucaccu

SEQ ID NO: 1774481 - RNA, 19 nt, Artificial Sequence
  Description of Artificial Sequence: Synthetic oligonucleotide
  Sense strand starting at position 3743 of SEQ ID NO: 1562810
gaaggugacuuucuaaauu

SEQ ID NO: 1774482 - RNA, 19 nt, Artificial Sequence
  Description of Artificial Sequence: Synthetic oligonucleotide
  Antisense strand to SEQ ID NO: 1774481
aauuuagaaagucaccuuc

SEQ ID NO: 1774483 - RNA, 19 nt, Artificial Sequence
  Description of Artificial Sequence: Synthetic oligonucleotide
  Sense strand starting at position 3793 of SEQ ID NO: 1562810
gguauccaggucugaauga

SEQ ID NO: 1774484 - RNA, 19 nt, Artificial Sequence
  Description of Artificial Sequence: Synthetic oligonucleotide
  Antisense strand to SEQ ID NO: 1774483
ucauucagaccuggauacc

SEQ ID NO: 1774485 - RNA, 19 nt, Artificial Sequence
  Description of Artificial Sequence: Synthetic oligonucleotide
  Sense strand starting at position 3794 of SEQ ID NO: 1562810
guauccaggucugaaugau

SEQ ID NO: 1774486 - RNA, 19 nt, Artificial Sequence
  Description of Artificial Sequence: Synthetic oligonucleotide
  Antisense strand to SEQ ID NO: 1774485
aucauucagaccuggauac

SEQ ID NO: 1774487 - RNA, 19 nt, Artificial Sequence
  Description of Artificial Sequence: Synthetic oligonucleotide
  Sense strand starting at position 3804 of SEQ ID NO: 1562810
cugaaugauuccuggccca

SEQ ID NO: 1774488 - RNA, 19 nt, Artificial Sequence
  Description of Artificial Sequence: Synthetic oligonucleotide
  Antisense strand to SEQ ID NO: 1774487
ugggccaggaaucauucag

SEQ ID NO: 1774489 - RNA, 19 nt, Artificial Sequence
  Description of Artificial Sequence: Synthetic oligonucleotide
  Sense strand starting at position 3934 of SEQ ID NO: 1562810
gguggauguugcuguucau

SEQ ID NO: 1774490 - RNA, 19 nt, Artificial Sequence
  Description of Artificial Sequence: Synthetic oligonucleotide
  Antisense strand to SEQ ID NO: 1774489
augaacagcaacauccacc

SEQ ID NO: 1774491 - RNA, 19 nt, Artificial Sequence
  Description of Artificial Sequence: Synthetic oligonucleotide
  Sense strand starting at position 3958 of SEQ ID NO: 1562810
gcuuuccuuugcucaugau

SEQ ID NO: 1774492 - RNA, 19 nt, Artificial Sequence
  Description of Artificial Sequence: Synthetic oligonucleotide
  Antisense strand to SEQ ID NO: 1774491
aucaugagcaaaggaaagc

SEQ ID NO: 1774493 - RNA, 19 nt, Artificial Sequence
  Description of Artificial Sequence: Synthetic oligonucleotide
  Sense strand starting at position 3973 of SEQ ID NO: 1562810
ugauguucccacugccuga

SEQ ID NO: 1774494 - RNA, 19 nt, Artificial Sequence
  Description of Artificial Sequence: Synthetic oligonucleotide
  Antisense strand to SEQ ID NO: 1774493
ucaggcagugggaacauca

SEQ ID NO: 1774495 - RNA, 19 nt, Artificial Sequence
  Description of Artificial Sequence: Synthetic oligonucleotide
  Sense strand starting at position 114 of SEQ ID NO: 1562811
aggaaucacuacugacaca

SEQ ID NO: 1774496 - RNA, 19 nt, Artificial Sequence
  Description of Artificial Sequence: Synthetic oligonucleotide
  Antisense strand to SEQ ID NO: 1774495
ugugucaguagugauuccu

SEQ ID NO: 1774497 - RNA, 19 nt, Artificial Sequence
  Description of Artificial Sequence: Synthetic oligonucleotide
  Sense strand starting at position 246 of SEQ ID NO: 1562811
ccaggaucguaugcuaaca

SEQ ID NO: 1774498 - RNA, 19 nt, Artificial Sequence
  Description of Artificial Sequence: Synthetic oligonucleotide
  Antisense strand to SEQ ID NO: 1774497
uguuagcauacgauccugg

SEQ ID NO: 1774499 - RNA, 19 nt, Artificial Sequence
  Description of Artificial Sequence: Synthetic oligonucleotide
  Sense strand starting at position 248 of SEQ ID NO: 1562811
aggaucguaugcuaacaga

SEQ ID NO: 1774500 - RNA, 19 nt, Artificial Sequence
  Description of Artificial Sequence: Synthetic oligonucleotide
  Antisense strand to SEQ ID NO: 1774499
ucuguuagcauacgauccu

SEQ ID NO: 1774501 - RNA, 19 nt, Artificial Sequence
  Description of Artificial Sequence: Synthetic oligonucleotide
  Sense strand starting at position 251 of SEQ ID NO: 1562811
aucguaugcuaacagauga

SEQ ID NO: 1774502 - RNA, 19 nt, Artificial Sequence
  Description of Artificial Sequence: Synthetic oligonucleotide
  Antisense strand to SEQ ID NO: 1774501
ucaucuguuagcauacgau

SEQ ID NO: 1774503 - RNA, 19 nt, Artificial Sequence
  Description of Artificial Sequence: Synthetic oligonucleotide
  Sense strand starting at position 295 of SEQ ID NO: 1562811
cccugaauguuucccaaag

SEQ ID NO: 1774504 - RNA, 19 nt, Artificial Sequence
  Description of Artificial Sequence: Synthetic oligonucleotide
  Antisense strand to SEQ ID NO: 1774503
cuuugggaaacauucaggg

SEQ ID NO: 1774505 - RNA, 19 nt, Artificial Sequence
  Description of Artificial Sequence: Synthetic oligonucleotide
  Sense strand starting at position 352 of SEQ ID NO: 1562811
gaaguugccugaguccuga

SEQ ID NO: 1774506 - RNA, 19 nt, Artificial Sequence
  Description of Artificial Sequence: Synthetic oligonucleotide
  Antisense strand to SEQ ID NO: 1774505
ucaggacucaggcaacuuc

SEQ ID NO: 1774507 - RNA, 19 nt, Artificial Sequence
  Description of Artificial Sequence: Synthetic oligonucleotide
  Sense strand starting at position 356 of SEQ ID NO: 1562811
uugccugaguccugaagga

SEQ ID NO: 1774508 - RNA, 19 nt, Artificial Sequence
  Description of Artificial Sequence: Synthetic oligonucleotide
  Antisense strand to SEQ ID NO: 1774507
uccuucaggacucaggcaa

SEQ ID NO: 1774509 - RNA, 19 nt, Artificial Sequence
  Description of Artificial Sequence: Synthetic oligonucleotide
  Sense strand starting at position 667 of SEQ ID NO: 1562811
ccuugauugcccuggcuaa

SEQ ID NO: 1774510 - RNA, 19 nt, Artificial Sequence
  Description of Artificial Sequence: Synthetic oligonucleotide
  Antisense strand to SEQ ID NO: 1774509
uuagccagggcaaucaagg

SEQ ID NO: 1774511 - RNA, 19 nt, Artificial Sequence
  Description of Artificial Sequence: Synthetic oligonucleotide
  Sense strand starting at position 684 of SEQ ID NO: 1562811
aagucagagcgcuguuaug

SEQ ID NO: 1774512 - RNA, 19 nt, Artificial Sequence
  Description of Artificial Sequence: Synthetic oligonucleotide
  Antisense strand to SEQ ID NO: 1774511
cauaacagcgcucugacuu

SEQ ID NO: 1774513 - RNA, 19 nt, Artificial Sequence
  Description of Artificial Sequence: Synthetic oligonucleotide
  Sense strand starting at position 686 of SEQ ID NO: 1562811
gucagagcgcuguuaugua

SEQ ID NO: 1774514 - RNA, 19 nt, Artificial Sequence
  Description of Artificial Sequence: Synthetic oligonucleotide
  Antisense strand to SEQ ID NO: 1774513
uacauaacagcgcucugac

SEQ ID NO: 1774515 - RNA, 19 nt, Artificial Sequence
  Description of Artificial Sequence: Synthetic oligonucleotide
  Sense strand starting at position 717 of SEQ ID NO: 1562811
agugacuucucccucacau

SEQ ID NO: 1774516 - RNA, 19 nt, Artificial Sequence
  Description of Artificial Sequence: Synthetic oligonucleotide
  Antisense strand to SEQ ID NO: 1774515
augugagggagaagucacu

SEQ ID NO: 1774517 - RNA, 19 nt, Artificial Sequence
  Description of Artificial Sequence: Synthetic oligonucleotide
  Sense strand starting at position 756 of SEQ ID NO: 1562811
ugcauuuacuucuguggau

SEQ ID NO: 1774518 - RNA, 19 nt, Artificial Sequence
  Description of Artificial Sequence: Synthetic oligonucleotide
  Antisense strand to SEQ ID NO: 1774517
auccacagaaguaaaugca

SEQ ID NO: 1774519 - RNA, 19 nt, Artificial Sequence
  Description of Artificial Sequence: Synthetic oligonucleotide
  Sense strand starting at position 757 of SEQ ID NO: 1562811
gcauuuacuucuguggauc

SEQ ID NO: 1774520 - RNA, 19 nt, Artificial Sequence
  Description of Artificial Sequence: Synthetic oligonucleotide
  Antisense strand to SEQ ID NO: 1774519
gauccacagaaguaaaugc

SEQ ID NO: 1774521 - RNA, 19 nt, Artificial Sequence
  Description of Artificial Sequence: Synthetic oligonucleotide
  Sense strand starting at position 791 of SEQ ID NO: 1562811
guccgcugcugagcuauaa

SEQ ID NO: 1774522 - RNA, 19 nt, Artificial Sequence
  Description of Artificial Sequence: Synthetic oligonucleotide
  Antisense strand to SEQ ID NO: 1774521
uuauagcucagcagcggac

SEQ ID NO: 1774523 - RNA, 19 nt, Artificial Sequence
  Description of Artificial Sequence: Synthetic oligonucleotide
  Sense strand starting at position 903 of SEQ ID NO: 1562811
gugauucaaugggaaguua

SEQ ID NO: 1774524 - RNA, 19 nt, Artificial Sequence
  Description of Artificial Sequence: Synthetic oligonucleotide
  Antisense strand to SEQ ID NO: 1774523
uaacuucccauugaaucac

SEQ ID NO: 1774525 - RNA, 19 nt, Artificial Sequence
  Description of Artificial Sequence: Synthetic oligonucleotide
  Sense strand starting at position 917 of SEQ ID NO: 1562811
aguuaaacuucucagugcu

SEQ ID NO: 1774526 - RNA, 19 nt, Artificial Sequence
  Description of Artificial Sequence: Synthetic oligonucleotide
  Antisense strand to SEQ ID NO: 1774525
agcacugagaaguuuaacu

SEQ ID NO: 1774527 - RNA, 19 nt, Artificial Sequence
  Description of Artificial Sequence: Synthetic oligonucleotide
  Sense strand starting at position 991 of SEQ ID NO: 1562811
ggcccuacuuuguaauguu

SEQ ID NO: 1774528 - RNA, 19 nt, Artificial Sequence
  Description of Artificial Sequence: Synthetic oligonucleotide
  Antisense strand to SEQ ID NO: 1774527
aacauuacaaaguagggcc

SEQ ID NO: 1774529 - RNA, 19 nt, Artificial Sequence
  Description of Artificial Sequence: Synthetic oligonucleotide
  Sense strand starting at position 1224 of SEQ ID NO: 1562811
ccuaguucccagugguaga

SEQ ID NO: 1774530 - RNA, 19 nt, Artificial Sequence
  Description of Artificial Sequence: Synthetic oligonucleotide
  Antisense strand to SEQ ID NO: 1774529
ucuaccacugggaacuagg

SEQ ID NO: 1774531 - RNA, 19 nt, Artificial Sequence
  Description of Artificial Sequence: Synthetic oligonucleotide
  Sense strand starting at position 1225 of SEQ ID NO: 1562811
cuaguucccagugguagau

SEQ ID NO: 1774532 - RNA, 19 nt, Artificial Sequence
  Description of Artificial Sequence: Synthetic oligonucleotide
  Antisense strand to SEQ ID NO: 1774531
aucuaccacugggaacuag

SEQ ID NO: 1774533 - RNA, 19 nt, Artificial Sequence
  Description of Artificial Sequence: Synthetic oligonucleotide
  Sense strand starting at position 1231 of SEQ ID NO: 1562811
cccagugguagaugggaau

SEQ ID NO: 1774534 - RNA, 19 nt, Artificial Sequence
  Description of Artificial Sequence: Synthetic oligonucleotide
  Antisense strand to SEQ ID NO: 1774533
auucccaucuaccacuggg

SEQ ID NO: 1774535 - RNA, 19 nt, Artificial Sequence
  Description of Artificial Sequence: Synthetic oligonucleotide
  Sense strand starting at position 1456 of SEQ ID NO: 1562811
gugcuuucugcagggcuau

SEQ ID NO: 1774536 - RNA, 19 nt, Artificial Sequence
  Description of Artificial Sequence: Synthetic oligonucleotide
  Antisense strand to SEQ ID NO: 1774535
auagcccugcagaaagcac

SEQ ID NO: 1774537 - RNA, 19 nt, Artificial Sequence
  Description of Artificial Sequence: Synthetic oligonucleotide
  Sense strand starting at position 1821 of SEQ ID NO: 1562811
ccuguucucaugggacuga

SEQ ID NO: 1774538 - RNA, 19 nt, Artificial Sequence
  Description of Artificial Sequence: Synthetic oligonucleotide
  Antisense strand to SEQ ID NO: 1774537
ucagucccaugagaacagg

SEQ ID NO: 1774539 - RNA, 19 nt, Artificial Sequence
  Description of Artificial Sequence: Synthetic oligonucleotide
  Sense strand starting at position 1862 of SEQ ID NO: 1562811
gaacgagagucccuugguu

SEQ ID NO: 1774540 - RNA, 19 nt, Artificial Sequence
  Description of Artificial Sequence: Synthetic oligonucleotide
  Antisense strand to SEQ ID NO: 1774539
aaccaagggacucucguuc

SEQ ID NO: 1774541 - RNA, 19 nt, Artificial Sequence
  Description of Artificial Sequence: Synthetic oligonucleotide
  Sense strand starting at position 1864 of SEQ ID NO: 1562811
acgagagucccuugguucu

SEQ ID NO: 1774542 - RNA, 19 nt, Artificial Sequence
  Description of Artificial Sequence: Synthetic oligonucleotide
  Antisense strand to SEQ ID NO: 1774541
agaaccaagggacucucgu

SEQ ID NO: 1774543 - RNA, 19 nt, Artificial Sequence
  Description of Artificial Sequence: Synthetic oligonucleotide
  Sense strand starting at position 2208 of SEQ ID NO: 1562811
gguccuuguuccgcguuua

SEQ ID NO: 1774544 - RNA, 19 nt, Artificial Sequence
  Description of Artificial Sequence: Synthetic oligonucleotide
  Antisense strand to SEQ ID NO: 1774543
uaaacgcggaacaaggacc

SEQ ID NO: 1774545 - RNA, 19 nt, Artificial Sequence
  Description of Artificial Sequence: Synthetic oligonucleotide
  Sense strand starting at position 2462 of SEQ ID NO: 1562811
gccuguucccaccgaguca

SEQ ID NO: 1774546 - RNA, 19 nt, Artificial Sequence
  Description of Artificial Sequence: Synthetic oligonucleotide
  Antisense strand to SEQ ID NO: 1774545
ugacucggugggaacaggc

SEQ ID NO: 1774547 - RNA, 19 nt, Artificial Sequence
  Description of Artificial Sequence: Synthetic oligonucleotide
  Sense strand starting at position 3248 of SEQ ID NO: 1562811
guaggugucauuggcucau

SEQ ID NO: 1774548 - RNA, 19 nt, Artificial Sequence
  Description of Artificial Sequence: Synthetic oligonucleotide
  Antisense strand to SEQ ID NO: 1774547
augagccaaugacaccuac

SEQ ID NO: 1774549 - RNA, 19 nt, Artificial Sequence
  Description of Artificial Sequence: Synthetic oligonucleotide
  Sense strand starting at position 3250 of SEQ ID NO: 1562811
aggugucauuggcucauuu

SEQ ID NO: 1774550 - RNA, 19 nt, Artificial Sequence
  Description of Artificial Sequence: Synthetic oligonucleotide
  Antisense strand to SEQ ID NO: 1774549
aaaugagccaaugacaccu

SEQ ID NO: 1774551 - RNA, 19 nt, Artificial Sequence
  Description of Artificial Sequence: Synthetic oligonucleotide
  Sense strand starting at position 3286 of SEQ ID NO: 1562811
gcccucuucuuucgaccua

SEQ ID NO: 1774552 - RNA, 19 nt, Artificial Sequence
  Description of Artificial Sequence: Synthetic oligonucleotide
  Antisense strand to SEQ ID NO: 1774551
uaggucgaaagaagagggc

SEQ ID NO: 1774553 - RNA, 19 nt, Artificial Sequence
  Description of Artificial Sequence: Synthetic oligonucleotide
  Sense strand starting at position 3336 of SEQ ID NO: 1562811
cguggcuuuaaaugacauu

SEQ ID NO: 1774554 - RNA, 19 nt, Artificial Sequence
  Description of Artificial Sequence: Synthetic oligonucleotide
  Antisense strand to SEQ ID NO: 1774553
aaugucauuuaaagccacg

SEQ ID NO: 1774555 - RNA, 19 nt, Artificial Sequence
  Description of Artificial Sequence: Synthetic oligonucleotide
  Sense strand starting at position 3339 of SEQ ID NO: 1562811
ggcuuuaaaugacauuuau

SEQ ID NO: 1774556 - RNA, 19 nt, Artificial Sequence
  Description of Artificial Sequence: Synthetic oligonucleotide
  Antisense strand to SEQ ID NO: 1774555
auaaaugucauuuaaagcc

SEQ ID NO: 1774557 - RNA, 19 nt, Artificial Sequence
  Description of Artificial Sequence: Synthetic oligonucleotide
  Sense strand starting at position 3375 of SEQ ID NO: 1562811
guuuguauuuccggagcga

SEQ ID NO: 1774558 - RNA, 19 nt, Artificial Sequence
  Description of Artificial Sequence: Synthetic oligonucleotide
  Antisense strand to SEQ ID NO: 1774557
ucgcuccggaaauacaaac

SEQ ID NO: 1774559 - RNA, 19 nt, Artificial Sequence
  Description of Artificial Sequence: Synthetic oligonucleotide
  Sense strand starting at position 3376 of SEQ ID NO: 1562811
uuuguauuuccggagcgaa

SEQ ID NO: 1774560 - RNA, 19 nt, Artificial Sequence
  Description of Artificial Sequence: Synthetic oligonucleotide
  Antisense strand to SEQ ID NO: 1774559
uucgcuccggaaauacaaa

SEQ ID NO: 1774561 - RNA, 19 nt, Artificial Sequence
  Description of Artificial Sequence: Synthetic oligonucleotide
  Sense strand starting at position 3390 of SEQ ID NO: 1562811
gcgaacagcuucucugagu

SEQ ID NO: 1774562 - RNA, 19 nt, Artificial Sequence
  Description of Artificial Sequence: Synthetic oligonucleotide
  Antisense strand to SEQ ID NO: 1774561
acucagagaagcuguucgc

SEQ ID NO: 1774563 - RNA, 19 nt, Artificial Sequence
  Description of Artificial Sequence: Synthetic oligonucleotide
  Sense strand starting at position 3391 of SEQ ID NO: 1562811
cgaacagcuucucugaguu

SEQ ID NO: 1774564 - RNA, 19 nt, Artificial Sequence
  Description of Artificial Sequence: Synthetic oligonucleotide
  Antisense strand to SEQ ID NO: 1774563
aacucagagaagcuguucg

SEQ ID NO: 1774565 - RNA, 19 nt, Artificial Sequence
  Description of Artificial Sequence: Synthetic oligonucleotide
  Sense strand starting at position 3401 of SEQ ID NO: 1562811
cucugaguuccagacucau

SEQ ID NO: 1774566 - RNA, 19 nt, Artificial Sequence
  Description of Artificial Sequence: Synthetic oligonucleotide
  Antisense strand to SEQ ID NO: 1774565
augagucuggaacucagag

SEQ ID NO: 1774567 - RNA, 19 nt, Artificial Sequence
  Description of Artificial Sequence: Synthetic oligonucleotide
  Sense strand starting at position 3621 of SEQ ID NO: 1562811
ccaggucuccugcauagga

SEQ ID NO: 1774568 - RNA, 19 nt, Artificial Sequence
  Description of Artificial Sequence: Synthetic oligonucleotide
  Antisense strand to SEQ ID NO: 1774567
uccuaugcaggagaccugg

SEQ ID NO: 1774569 - RNA, 19 nt, Artificial Sequence
  Description of Artificial Sequence: Synthetic oligonucleotide
  Sense strand starting at position 3683 of SEQ ID NO: 1562811
aucagcuuacccggacaau

SEQ ID NO: 1774570 - RNA, 19 nt, Artificial Sequence
  Description of Artificial Sequence: Synthetic oligonucleotide
  Antisense strand to SEQ ID NO: 1774569
auuguccggguaagcugau

SEQ ID NO: 1774571 - RNA, 19 nt, Artificial Sequence
  Description of Artificial Sequence: Synthetic oligonucleotide
  Sense strand starting at position 3976 of SEQ ID NO: 1562811
agagacauuuccugaccac

SEQ ID NO: 1774572 - RNA, 19 nt, Artificial Sequence
  Description of Artificial Sequence: Synthetic oligonucleotide
  Antisense strand to SEQ ID NO: 1774571
guggucaggaaaugucucu

SEQ ID NO: 1774573 - RNA, 19 nt, Artificial Sequence
  Description of Artificial Sequence: Synthetic oligonucleotide
  Sense strand starting at position 114 of SEQ ID NO: 1562812
aguagaaucucagucuaca

SEQ ID NO: 1774574 - RNA, 19 nt, Artificial Sequence
  Description of Artificial Sequence: Synthetic oligonucleotide
  Antisense strand to SEQ ID NO: 1774573
uguagacugagauucuacu

SEQ ID NO: 1774575 - RNA, 19 nt, Artificial Sequence
  Description of Artificial Sequence: Synthetic oligonucleotide
  Sense strand starting at position 228 of SEQ ID NO: 1562812
caauguggcugcucaaaua

SEQ ID NO: 1774576 - RNA, 19 nt, Artificial Sequence
  Description of Artificial Sequence: Synthetic oligonucleotide
  Antisense strand to SEQ ID NO: 1774575
uauuugagcagccacauug

SEQ ID NO: 1774577 - RNA, 19 nt, Artificial Sequence
  Description of Artificial Sequence: Synthetic oligonucleotide
  Sense strand starting at position 398 of SEQ ID NO: 1562812
gcuaguuugcucuaauaaa

SEQ ID NO: 1774578 - RNA, 19 nt, Artificial Sequence
  Description of Artificial Sequence: Synthetic oligonucleotide
  Antisense strand to SEQ ID NO: 1774577
uuuauuagagcaaacuagc

SEQ ID NO: 1774579 - RNA, 19 nt, Artificial Sequence
  Description of Artificial Sequence: Synthetic oligonucleotide
  Sense strand starting at position 481 of SEQ ID NO: 1562812
ggcggaucacgagaucaau

SEQ ID NO: 1774580 - RNA, 19 nt, Artificial Sequence
  Description of Artificial Sequence: Synthetic oligonucleotide
  Antisense strand to SEQ ID NO: 1774579
auugaucucgugauccgcc

SEQ ID NO: 1774581 - RNA, 19 nt, Artificial Sequence
  Description of Artificial Sequence: Synthetic oligonucleotide
  Sense strand starting at position 766 of SEQ ID NO: 1562812
gagggagucuacgugugau

SEQ ID NO: 1774582 - RNA, 19 nt, Artificial Sequence
  Description of Artificial Sequence: Synthetic oligonucleotide
  Antisense strand to SEQ ID NO: 1774581
aucacacguagacucccuc

SEQ ID NO: 1774583 - RNA, 19 nt, Artificial Sequence
  Description of Artificial Sequence: Synthetic oligonucleotide
  Sense strand starting at position 769 of SEQ ID NO: 1562812
ggagucuacgugugauucu

SEQ ID NO: 1774584 - RNA, 19 nt, Artificial Sequence
  Description of Artificial Sequence: Synthetic oligonucleotide
  Antisense strand to SEQ ID NO: 1774583
agaaucacacguagacucc

SEQ ID NO: 1774585 - RNA, 19 nt, Artificial Sequence
  Description of Artificial Sequence: Synthetic oligonucleotide
  Sense strand starting at position 776 of SEQ ID NO: 1562812
acgugugauucugcaagaa

SEQ ID NO: 1774586 - RNA, 19 nt, Artificial Sequence
  Description of Artificial Sequence: Synthetic oligonucleotide
  Antisense strand to SEQ ID NO: 1774585
uucuugcagaaucacacgu

SEQ ID NO: 1774587 - RNA, 19 nt, Artificial Sequence
  Description of Artificial Sequence: Synthetic oligonucleotide
  Sense strand starting at position 797 of SEQ ID NO: 1562812
ccauuaaggcugcauacau

SEQ ID NO: 1774588 - RNA, 19 nt, Artificial Sequence
  Description of Artificial Sequence: Synthetic oligonucleotide
  Antisense strand to SEQ ID NO: 1774587
auguaugcagccuuaaugg

SEQ ID NO: 1774589 - RNA, 19 nt, Artificial Sequence
  Description of Artificial Sequence: Synthetic oligonucleotide
  Sense strand starting at position 824 of SEQ ID NO: 1562812
cuaaaucauuaacaggagu

SEQ ID NO: 1774590 - RNA, 19 nt, Artificial Sequence
  Description of Artificial Sequence: Synthetic oligonucleotide
  Antisense strand to SEQ ID NO: 1774589
acuccuguuaaugauuuag

SEQ ID NO: 1774591 - RNA, 19 nt, Artificial Sequence
  Description of Artificial Sequence: Synthetic oligonucleotide
  Sense strand starting at position 868 of SEQ ID NO: 1562812
gggagcauuuaugcuggua

SEQ ID NO: 1774592 - RNA, 19 nt, Artificial Sequence
  Description of Artificial Sequence: Synthetic oligonucleotide
  Antisense strand to SEQ ID NO: 1774591
uaccagcauaaaugcuccc

SEQ ID NO: 1774593 - RNA, 19 nt, Artificial Sequence
  Description of Artificial Sequence: Synthetic oligonucleotide
  Sense strand starting at position 870 of SEQ ID NO: 1562812
gagcauuuaugcugguaaa

SEQ ID NO: 1774594 - RNA, 19 nt, Artificial Sequence
  Description of Artificial Sequence: Synthetic oligonucleotide
  Antisense strand to SEQ ID NO: 1774593
uuuaccagcauaaaugcuc

SEQ ID NO: 1774595 - RNA, 19 nt, Artificial Sequence
  Description of Artificial Sequence: Synthetic oligonucleotide
  Sense strand starting at position 934 of SEQ ID NO: 1562812
cuaaacggaucuuuaacaa

SEQ ID NO: 1774596 - RNA, 19 nt, Artificial Sequence
  Description of Artificial Sequence: Synthetic oligonucleotide
  Antisense strand to SEQ ID NO: 1774595
uuguuaaagauccguuuag

SEQ ID NO: 1774597 - RNA, 19 nt, Artificial Sequence
  Description of Artificial Sequence: Synthetic oligonucleotide
  Sense strand starting at position 938 of SEQ ID NO: 1562812
acggaucuuuaacaaauca

SEQ ID NO: 1774598 - RNA, 19 nt, Artificial Sequence
  Description of Artificial Sequence: Synthetic oligonucleotide
  Antisense strand to SEQ ID NO: 1774597
ugauuuguuaaagauccgu

SEQ ID NO: 1774599 - RNA, 19 nt, Artificial Sequence
  Description of Artificial Sequence: Synthetic oligonucleotide
  Sense strand starting at position 959 of SEQ ID NO: 1562812
agaguaauguuaguuuauc

SEQ ID NO: 1774600 - RNA, 19 nt, Artificial Sequence
  Description of Artificial Sequence: Synthetic oligonucleotide
  Antisense strand to SEQ ID NO: 1774599
gauaaacuaacauuacucu

SEQ ID NO: 1774601 - RNA, 19 nt, Artificial Sequence
  Description of Artificial Sequence: Synthetic oligonucleotide
  Sense strand starting at position 960 of SEQ ID NO: 1562812
gaguaauguuaguuuaucc

SEQ ID NO: 1774602 - RNA, 19 nt, Artificial Sequence
  Description of Artificial Sequence: Synthetic oligonucleotide
  Antisense strand to SEQ ID NO: 1774601
ggauaaacuaacauuacuc

SEQ ID NO: 1774603 - RNA, 19 nt, Artificial Sequence
  Description of Artificial Sequence: Synthetic oligonucleotide
  Sense strand starting at position 967 of SEQ ID NO: 1562812
guuaguuuauccuuccuga

SEQ ID NO: 1774604 - RNA, 19 nt, Artificial Sequence
  Description of Artificial Sequence: Synthetic oligonucleotide
  Antisense strand to SEQ ID NO: 1774603
ucaggaaggauaaacuaac

SEQ ID NO: 1774605 - RNA, 19 nt, Artificial Sequence
  Description of Artificial Sequence: Synthetic oligonucleotide
  Sense strand starting at position 990 of SEQ ID NO: 1562812
ccagcaguacgauauuaaa

SEQ ID NO: 1774606 - RNA, 19 nt, Artificial Sequence
  Description of Artificial Sequence: Synthetic oligonucleotide
  Antisense strand to SEQ ID NO: 1774605
uuuaauaucguacugcugg

SEQ ID NO: 1774607 - RNA, 19 nt, Artificial Sequence
  Description of Artificial Sequence: Synthetic oligonucleotide
  Sense strand starting at position 1050 of SEQ ID NO: 1562812
caacacuggcgucaguaau

SEQ ID NO: 1774608 - RNA, 19 nt, Artificial Sequence
  Description of Artificial Sequence: Synthetic oligonucleotide
  Antisense strand to SEQ ID NO: 1774607
auuacugacgccaguguug

SEQ ID NO: 1774609 - RNA, 19 nt, Artificial Sequence
  Description of Artificial Sequence: Synthetic oligonucleotide
  Sense strand starting at position 1056 of SEQ ID NO: 1562812
uggcgucaguaauccauuu

SEQ ID NO: 1774610 - RNA, 19 nt, Artificial Sequence
  Description of Artificial Sequence: Synthetic oligonucleotide
  Antisense strand to SEQ ID NO: 1774609
aaauggauuacugacgcca

SEQ ID NO: 1774611 - RNA, 19 nt, Artificial Sequence
  Description of Artificial Sequence: Synthetic oligonucleotide
  Sense strand starting at position 1111 of SEQ ID NO: 1562812
gaggauauuuaaugaaagc

SEQ ID NO: 1774612 - RNA, 19 nt, Artificial Sequence
  Description of Artificial Sequence: Synthetic oligonucleotide
  Antisense strand to SEQ ID NO: 1774611
gcuuucauuaaauauccuc

SEQ ID NO: 1774613 - RNA, 19 nt, Artificial Sequence
  Description of Artificial Sequence: Synthetic oligonucleotide
  Sense strand starting at position 1162 of SEQ ID NO: 1562812
acgauuauuucgguguucu

SEQ ID NO: 1774614 - RNA, 19 nt, Artificial Sequence
  Description of Artificial Sequence: Synthetic oligonucleotide
  Antisense strand to SEQ ID NO: 1774613
agaacaccgaaauaaucgu

SEQ ID NO: 1774615 - RNA, 19 nt, Artificial Sequence
  Description of Artificial Sequence: Synthetic oligonucleotide
  Sense strand starting at position 1163 of SEQ ID NO: 1562812
cgauuauuucgguguucug

SEQ ID NO: 1774616 - RNA, 19 nt, Artificial Sequence
  Description of Artificial Sequence: Synthetic oligonucleotide
  Antisense strand to SEQ ID NO: 1774615
cagaacaccgaaauaaucg

SEQ ID NO: 1774617 - RNA, 19 nt, Artificial Sequence
  Description of Artificial Sequence: Synthetic oligonucleotide
  Sense strand starting at position 1236 of SEQ ID NO: 1562812
ccgacaagcaucugaugga

SEQ ID NO: 1774618 - RNA, 19 nt, Artificial Sequence
  Description of Artificial Sequence: Synthetic oligonucleotide
  Antisense strand to SEQ ID NO: 1774617
uccaucagaugcuugucgg

SEQ ID NO: 1774619 - RNA, 19 nt, Artificial Sequence
  Description of Artificial Sequence: Synthetic oligonucleotide
  Sense strand starting at position 1290 of SEQ ID NO: 1562812
ccaugauacuagcaaauug

SEQ ID NO: 1774620 - RNA, 19 nt, Artificial Sequence
  Description of Artificial Sequence: Synthetic oligonucleotide
  Antisense strand to SEQ ID NO: 1774619
caauuugcuaguaucaugg

SEQ ID NO: 1774621 - RNA, 19 nt, Artificial Sequence
  Description of Artificial Sequence: Synthetic oligonucleotide
  Sense strand starting at position 1664 of SEQ ID NO: 1562812
cgccgauguacgagagguu

SEQ ID NO: 1774622 - RNA, 19 nt, Artificial Sequence
  Description of Artificial Sequence: Synthetic oligonucleotide
  Antisense strand to SEQ ID NO: 1774621
aaccucucguacaucggcg

SEQ ID NO: 1774623 - RNA, 19 nt, Artificial Sequence
  Description of Artificial Sequence: Synthetic oligonucleotide
  Sense strand starting at position 2157 of SEQ ID NO: 1562812
cgugcauucgcggugcauu

SEQ ID NO: 1774624 - RNA, 19 nt, Artificial Sequence
  Description of Artificial Sequence: Synthetic oligonucleotide
  Antisense strand to SEQ ID NO: 1774623
aaugcaccgcgaaugcacg

SEQ ID NO: 1774625 - RNA, 19 nt, Artificial Sequence
  Description of Artificial Sequence: Synthetic oligonucleotide
  Sense strand starting at position 2232 of SEQ ID NO: 1562812
ggcagaacucaugggcuga

SEQ ID NO: 1774626 - RNA, 19 nt, Artificial Sequence
  Description of Artificial Sequence: Synthetic oligonucleotide
  Antisense strand to SEQ ID NO: 1774625
ucagcccaugaguucugcc

SEQ ID NO: 1774627 - RNA, 19 nt, Artificial Sequence
  Description of Artificial Sequence: Synthetic oligonucleotide
  Sense strand starting at position 2233 of SEQ ID NO: 1562812
gcagaacucaugggcugaa

SEQ ID NO: 1774628 - RNA, 19 nt, Artificial Sequence
  Description of Artificial Sequence: Synthetic oligonucleotide
  Antisense strand to SEQ ID NO: 1774627
uucagcccaugaguucugc

SEQ ID NO: 1774629 - RNA, 19 nt, Artificial Sequence
  Description of Artificial Sequence: Synthetic oligonucleotide
  Sense strand starting at position 2365 of SEQ ID NO: 1562812
agcucaggccucugcgaau

SEQ ID NO: 1774630 - RNA, 19 nt, Artificial Sequence
  Description of Artificial Sequence: Synthetic oligonucleotide
  Antisense strand to SEQ ID NO: 1774629
auucgcagaggccugagcu

SEQ ID NO: 1774631 - RNA, 19 nt, Artificial Sequence
  Description of Artificial Sequence: Synthetic oligonucleotide
  Sense strand starting at position 2462 of SEQ ID NO: 1562812
auauuugcauacugagaaa

SEQ ID NO: 1774632 - RNA, 19 nt, Artificial Sequence
  Description of Artificial Sequence: Synthetic oligonucleotide
  Antisense strand to SEQ ID NO: 1774631
uuucucaguaugcaaauau

SEQ ID NO: 1774633 - RNA, 19 nt, Artificial Sequence
  Description of Artificial Sequence: Synthetic oligonucleotide
  Sense strand starting at position 2546 of SEQ ID NO: 1562812
gauguuuguugagcacacu

SEQ ID NO: 1774634 - RNA, 19 nt, Artificial Sequence
  Description of Artificial Sequence: Synthetic oligonucleotide
  Antisense strand to SEQ ID NO: 1774633
agugugcucaacaaacauc

SEQ ID NO: 1774635 - RNA, 19 nt, Artificial Sequence
  Description of Artificial Sequence: Synthetic oligonucleotide
  Sense strand starting at position 2616 of SEQ ID NO: 1562812
acagacaaauacguguaau

SEQ ID NO: 1774636 - RNA, 19 nt, Artificial Sequence
  Description of Artificial Sequence: Synthetic oligonucleotide
  Antisense strand to SEQ ID NO: 1774635
auuacacguauuugucugu

SEQ ID NO: 1774637 - RNA, 19 nt, Artificial Sequence
  Description of Artificial Sequence: Synthetic oligonucleotide
  Sense strand starting at position 2619 of SEQ ID NO: 1562812
gacaaauacguguaaugcu

SEQ ID NO: 1774638 - RNA, 19 nt, Artificial Sequence
  Description of Artificial Sequence: Synthetic oligonucleotide
  Antisense strand to SEQ ID NO: 1774637
agcauuacacguauuuguc

SEQ ID NO: 1774639 - RNA, 19 nt, Artificial Sequence
  Description of Artificial Sequence: Synthetic oligonucleotide
  Sense strand starting at position 2626 of SEQ ID NO: 1562812
acguguaaugcucaaguug

SEQ ID NO: 1774640 - RNA, 19 nt, Artificial Sequence
  Description of Artificial Sequence: Synthetic oligonucleotide
  Antisense strand to SEQ ID NO: 1774639
caacuugagcauuacacgu

SEQ ID NO: 1774641 - RNA, 19 nt, Artificial Sequence
  Description of Artificial Sequence: Synthetic oligonucleotide
  Sense strand starting at position 2642 of SEQ ID NO: 1562812
uugugauaaguacgaugaa

SEQ ID NO: 1774642 - RNA, 19 nt, Artificial Sequence
  Description of Artificial Sequence: Synthetic oligonucleotide
  Antisense strand to SEQ ID NO: 1774641
uucaucguacuuaucacaa

SEQ ID NO: 1774643 - RNA, 19 nt, Artificial Sequence
  Description of Artificial Sequence: Synthetic oligonucleotide
  Sense strand starting at position 3055 of SEQ ID NO: 1562812
gaccgagauugguacagau

SEQ ID NO: 1774644 - RNA, 19 nt, Artificial Sequence
  Description of Artificial Sequence: Synthetic oligonucleotide
  Antisense strand to SEQ ID NO: 1774643
aucuguaccaaucucgguc

SEQ ID NO: 1774645 - RNA, 19 nt, Artificial Sequence
  Description of Artificial Sequence: Synthetic oligonucleotide
  Sense strand starting at position 3302 of SEQ ID NO: 1562812
ugccauguuuggagggaga

SEQ ID NO: 1774646 - RNA, 19 nt, Artificial Sequence
  Description of Artificial Sequence: Synthetic oligonucleotide
  Antisense strand to SEQ ID NO: 1774645
ucucccuccaaacauggca

SEQ ID NO: 1774647 - RNA, 19 nt, Artificial Sequence
  Description of Artificial Sequence: Synthetic oligonucleotide
  Sense strand starting at position 3411 of SEQ ID NO: 1562812
auuagucaaucucaaagga

SEQ ID NO: 1774648 - RNA, 19 nt, Artificial Sequence
  Description of Artificial Sequence: Synthetic oligonucleotide
  Antisense strand to SEQ ID NO: 1774647
uccuuugagauugacuaau

SEQ ID NO: 1774649 - RNA, 19 nt, Artificial Sequence
  Description of Artificial Sequence: Synthetic oligonucleotide
  Sense strand starting at position 3706 of SEQ ID NO: 1562812
ccuaauucuugaguuaaug

SEQ ID NO: 1774650 - RNA, 19 nt, Artificial Sequence
  Description of Artificial Sequence: Synthetic oligonucleotide
  Antisense strand to SEQ ID NO: 1774649
cauuaacucaagaauuagg

SEQ ID NO: 1774651 - RNA, 19 nt, Artificial Sequence
  Description of Artificial Sequence: Synthetic oligonucleotide
  Sense strand starting at position 3880 of SEQ ID NO: 1562812
ggccaagauaaauggagua

SEQ ID NO: 1774652 - RNA, 19 nt, Artificial Sequence
  Description of Artificial Sequence: Synthetic oligonucleotide
  Antisense strand to SEQ ID NO: 1774651
uacuccauuuaucuuggcc

SEQ ID NO: 1774653 - RNA, 19 nt, Artificial Sequence
  Description of Artificial Sequence: Synthetic oligonucleotide
  Sense strand starting at position 18 of SEQ ID NO: 1562813
ccuggugccuccgaauguu

SEQ ID NO: 1774654 - RNA, 19 nt, Artificial Sequence
  Description of Artificial Sequence: Synthetic oligonucleotide
  Antisense strand to SEQ ID NO: 1774653
aacauucggaggcaccagg

SEQ ID NO: 1774655 - RNA, 19 nt, Artificial Sequence
  Description of Artificial Sequence: Synthetic oligonucleotide
  Sense strand starting at position 21 of SEQ ID NO: 1562813
ggugccuccgaauguucaa

SEQ ID NO: 1774656 - RNA, 19 nt, Artificial Sequence
  Description of Artificial Sequence: Synthetic oligonucleotide
  Antisense strand to SEQ ID NO: 1774655
uugaacauucggaggcacc

SEQ ID NO: 1774657 - RNA, 19 nt, Artificial Sequence
  Description of Artificial Sequence: Synthetic oligonucleotide
  Sense strand starting at position 48 of SEQ ID NO: 1562813
gggaaaguuggucagaggu

SEQ ID NO: 1774658 - RNA, 19 nt, Artificial Sequence
  Description of Artificial Sequence: Synthetic oligonucleotide
  Antisense strand to SEQ ID NO: 1774657
accucugaccaacuuuccc

SEQ ID NO: 1774659 - RNA, 19 nt, Artificial Sequence
  Description of Artificial Sequence: Synthetic oligonucleotide
  Sense strand starting at position 50 of SEQ ID NO: 1562813
gaaaguuggucagaggugu

SEQ ID NO: 1774660 - RNA, 19 nt, Artificial Sequence
  Description of Artificial Sequence: Synthetic oligonucleotide
  Antisense strand to SEQ ID NO: 1774659
acaccucugaccaacuuuc

SEQ ID NO: 1774661 - RNA, 19 nt, Artificial Sequence
  Description of Artificial Sequence: Synthetic oligonucleotide
  Sense strand starting at position 54 of SEQ ID NO: 1562813
guuggucagagguguuuau

SEQ ID NO: 1774662 - RNA, 19 nt, Artificial Sequence
  Description of Artificial Sequence: Synthetic oligonucleotide
  Antisense strand to SEQ ID NO: 1774661
auaaacaccucugaccaac

SEQ ID NO: 1774663 - RNA, 19 nt, Artificial Sequence
  Description of Artificial Sequence: Synthetic oligonucleotide
  Sense strand starting at position 58 of SEQ ID NO: 1562813
gucagagguguuuauugca

SEQ ID NO: 1774664 - RNA, 19 nt, Artificial Sequence
  Description of Artificial Sequence: Synthetic oligonucleotide
  Antisense strand to SEQ ID NO: 1774663
ugcaauaaacaccucugac

SEQ ID NO: 1774665 - RNA, 19 nt, Artificial Sequence
  Description of Artificial Sequence: Synthetic oligonucleotide
  Sense strand starting at position 61 of SEQ ID NO: 1562813
agagguguuuauugcauca

SEQ ID NO: 1774666 - RNA, 19 nt, Artificial Sequence
  Description of Artificial Sequence: Synthetic oligonucleotide
  Antisense strand to SEQ ID NO: 1774665
ugaugcaauaaacaccucu

SEQ ID NO: 1774667 - RNA, 19 nt, Artificial Sequence
  Description of Artificial Sequence: Synthetic oligonucleotide
  Sense strand starting at position 63 of SEQ ID NO: 1562813
agguguuuauugcaucauu

SEQ ID NO: 1774668 - RNA, 19 nt, Artificial Sequence
  Description of Artificial Sequence: Synthetic oligonucleotide
  Antisense strand to SEQ ID NO: 1774667
aaugaugcaauaaacaccu

SEQ ID NO: 1774669 - RNA, 19 nt, Artificial Sequence
  Description of Artificial Sequence: Synthetic oligonucleotide
  Sense strand starting at position 74 of SEQ ID NO: 1562813
gcaucauuauuuggaacaa

SEQ ID NO: 1774670 - RNA, 19 nt, Artificial Sequence
  Description of Artificial Sequence: Synthetic oligonucleotide
  Antisense strand to SEQ ID NO: 1774669
uuguuccaaauaaugaugc

SEQ ID NO: 1774671 - RNA, 19 nt, Artificial Sequence
  Description of Artificial Sequence: Synthetic oligonucleotide
  Sense strand starting at position 258 of SEQ ID NO: 1562813
ugcccucagcccugcuaaa

SEQ ID NO: 1774672 - RNA, 19 nt, Artificial Sequence
  Description of Artificial Sequence: Synthetic oligonucleotide
  Antisense strand to SEQ ID NO: 1774671
uuuagcagggcugagggca

SEQ ID NO: 1774673 - RNA, 19 nt, Artificial Sequence
  Description of Artificial Sequence: Synthetic oligonucleotide
  Sense strand starting at position 336 of SEQ ID NO: 1562813
acuucugucucuugggauc

SEQ ID NO: 1774674 - RNA, 19 nt, Artificial Sequence
  Description of Artificial Sequence: Synthetic oligonucleotide
  Antisense strand to SEQ ID NO: 1774673
gaucccaagagacagaagu

SEQ ID NO: 1774675 - RNA, 19 nt, Artificial Sequence
  Description of Artificial Sequence: Synthetic oligonucleotide
  Sense strand starting at position 794 of SEQ ID NO: 1562813
cagaucugugcuggcauga

SEQ ID NO: 1774676 - RNA, 19 nt, Artificial Sequence
  Description of Artificial Sequence: Synthetic oligonucleotide
  Antisense strand to SEQ ID NO: 1774675
ucaugccagcacagaucug

SEQ ID NO: 1774677 - RNA, 19 nt, Artificial Sequence
  Description of Artificial Sequence: Synthetic oligonucleotide
  Sense strand starting at position 804 of SEQ ID NO: 1562813
cuggcaugauggcuagaau

SEQ ID NO: 1774678 - RNA, 19 nt, Artificial Sequence
  Description of Artificial Sequence: Synthetic oligonucleotide
  Antisense strand to SEQ ID NO: 1774677
auucuagccaucaugccag

SEQ ID NO: 1774679 - RNA, 19 nt, Artificial Sequence
  Description of Artificial Sequence: Synthetic oligonucleotide
  Sense strand starting at position 805 of SEQ ID NO: 1562813
uggcaugauggcuagaaug

SEQ ID NO: 1774680 - RNA, 19 nt, Artificial Sequence
  Description of Artificial Sequence: Synthetic oligonucleotide
  Antisense strand to SEQ ID NO: 1774679
cauucuagccaucaugcca

SEQ ID NO: 1774681 - RNA, 19 nt, Artificial Sequence
  Description of Artificial Sequence: Synthetic oligonucleotide
  Sense strand starting at position 807 of SEQ ID NO: 1562813
gcaugauggcuagaaugac

SEQ ID NO: 1774682 - RNA, 19 nt, Artificial Sequence
  Description of Artificial Sequence: Synthetic oligonucleotide
  Antisense strand to SEQ ID NO: 1774681
gucauucuagccaucaugc

SEQ ID NO: 1774683 - RNA, 19 nt, Artificial Sequence
  Description of Artificial Sequence: Synthetic oligonucleotide
  Sense strand starting at position 829 of SEQ ID NO: 1562813
ccuacagcuucugauggaa

SEQ ID NO: 1774684 - RNA, 19 nt, Artificial Sequence
  Description of Artificial Sequence: Synthetic oligonucleotide
  Antisense strand to SEQ ID NO: 1774683
uuccaucagaagcuguagg

SEQ ID NO: 1774685 - RNA, 19 nt, Artificial Sequence
  Description of Artificial Sequence: Synthetic oligonucleotide
  Sense strand starting at position 1420 of SEQ ID NO: 1562813
cagugaaucucaggugggu

SEQ ID NO: 1774686 - RNA, 19 nt, Artificial Sequence
  Description of Artificial Sequence: Synthetic oligonucleotide
  Antisense strand to SEQ ID NO: 1774685
acccaccugagauucacug

SEQ ID NO: 1774687 - RNA, 19 nt, Artificial Sequence
  Description of Artificial Sequence: Synthetic oligonucleotide
  Sense strand starting at position 1432 of SEQ ID NO: 1562813
ggugggugcucagacguuu

SEQ ID NO: 1774688 - RNA, 19 nt, Artificial Sequence
  Description of Artificial Sequence: Synthetic oligonucleotide
  Antisense strand to SEQ ID NO: 1774687
aaacgucugagcacccacc

SEQ ID NO: 1774689 - RNA, 19 nt, Artificial Sequence
  Description of Artificial Sequence: Synthetic oligonucleotide
  Sense strand starting at position 1589 of SEQ ID NO: 1562813
aacggcgucugcuuggaaa

SEQ ID NO: 1774690 - RNA, 19 nt, Artificial Sequence
  Description of Artificial Sequence: Synthetic oligonucleotide
  Antisense strand to SEQ ID NO: 1774689
uuuccaagcagacgccguu

SEQ ID NO: 1774691 - RNA, 19 nt, Artificial Sequence
  Description of Artificial Sequence: Synthetic oligonucleotide
  Sense strand starting at position 1591 of SEQ ID NO: 1562813
cggcgucugcuuggaaagu

SEQ ID NO: 1774692 - RNA, 19 nt, Artificial Sequence
  Description of Artificial Sequence: Synthetic oligonucleotide
  Antisense strand to SEQ ID NO: 1774691
acuuuccaagcagacgccg

SEQ ID NO: 1774693 - RNA, 19 nt, Artificial Sequence
  Description of Artificial Sequence: Synthetic oligonucleotide
  Sense strand starting at position 1592 of SEQ ID NO: 1562813
ggcgucugcuuggaaaguu

SEQ ID NO: 1774694 - RNA, 19 nt, Artificial Sequence
  Description of Artificial Sequence: Synthetic oligonucleotide
  Antisense strand to SEQ ID NO: 1774693
aacuuuccaagcagacgcc

SEQ ID NO: 1774695 - RNA, 19 nt, Artificial Sequence
  Description of Artificial Sequence: Synthetic oligonucleotide
  Sense strand starting at position 2317 of SEQ ID NO: 1562813
ggguaaaccaugggaagua

SEQ ID NO: 1774696 - RNA, 19 nt, Artificial Sequence
  Description of Artificial Sequence: Synthetic oligonucleotide
  Antisense strand to SEQ ID NO: 1774695
uacuucccaugguuuaccc

SEQ ID NO: 1774697 - RNA, 19 nt, Artificial Sequence
  Description of Artificial Sequence: Synthetic oligonucleotide
  Sense strand starting at position 2318 of SEQ ID NO: 1562813
gguaaaccaugggaaguau

SEQ ID NO: 1774698 - RNA, 19 nt, Artificial Sequence
  Description of Artificial Sequence: Synthetic oligonucleotide
  Antisense strand to SEQ ID NO: 1774697
auacuucccaugguuuacc

SEQ ID NO: 1774699 - RNA, 19 nt, Artificial Sequence
  Description of Artificial Sequence: Synthetic oligonucleotide
  Sense strand starting at position 2702 of SEQ ID NO: 1562813
ggugcaggguccuugaagu

SEQ ID NO: 1774700 - RNA, 19 nt, Artificial Sequence
  Description of Artificial Sequence: Synthetic oligonucleotide
  Antisense strand to SEQ ID NO: 1774699
acuucaaggacccugcacc

SEQ ID NO: 1774701 - RNA, 19 nt, Artificial Sequence
  Description of Artificial Sequence: Synthetic oligonucleotide
  Sense strand starting at position 2853 of SEQ ID NO: 1562813
gagcauugcucccuggaac

SEQ ID NO: 1774702 - RNA, 19 nt, Artificial Sequence
  Description of Artificial Sequence: Synthetic oligonucleotide
  Antisense strand to SEQ ID NO: 1774701
guuccagggagcaaugcuc

SEQ ID NO: 1774703 - RNA, 19 nt, Artificial Sequence
  Description of Artificial Sequence: Synthetic oligonucleotide
  Sense strand starting at position 2854 of SEQ ID NO: 1562813
agcauugcucccuggaaca

SEQ ID NO: 1774704 - RNA, 19 nt, Artificial Sequence
  Description of Artificial Sequence: Synthetic oligonucleotide
  Antisense strand to SEQ ID NO: 1774703
uguuccagggagcaaugcu

SEQ ID NO: 1774705 - RNA, 19 nt, Artificial Sequence
  Description of Artificial Sequence: Synthetic oligonucleotide
  Sense strand starting at position 3024 of SEQ ID NO: 1562813
uuuauauaucggcaaccaa

SEQ ID NO: 1774706 - RNA, 19 nt, Artificial Sequence
  Description of Artificial Sequence: Synthetic oligonucleotide
  Antisense strand to SEQ ID NO: 1774705
uugguugccgauauauaaa

SEQ ID NO: 1774707 - RNA, 19 nt, Artificial Sequence
  Description of Artificial Sequence: Synthetic oligonucleotide
  Sense strand starting at position 3322 of SEQ ID NO: 1562813
ugcagaguuaauggagcuu

SEQ ID NO: 1774708 - RNA, 19 nt, Artificial Sequence
  Description of Artificial Sequence: Synthetic oligonucleotide
  Antisense strand to SEQ ID NO: 1774707
aagcuccauuaacucugca

SEQ ID NO: 1774709 - RNA, 19 nt, Artificial Sequence
  Description of Artificial Sequence: Synthetic oligonucleotide
  Sense strand starting at position 3782 of SEQ ID NO: 1562813
agugaucacugaggaguuu

SEQ ID NO: 1774710 - RNA, 19 nt, Artificial Sequence
  Description of Artificial Sequence: Synthetic oligonucleotide
  Antisense strand to SEQ ID NO: 1774709
aaacuccucagugaucacu

SEQ ID NO: 1774711 - RNA, 19 nt, Artificial Sequence
  Description of Artificial Sequence: Synthetic oligonucleotide
  Sense strand starting at position 434 of SEQ ID NO: 1562814
gcugguguccacugcaaau

SEQ ID NO: 1774712 - RNA, 19 nt, Artificial Sequence
  Description of Artificial Sequence: Synthetic oligonucleotide
  Antisense strand to SEQ ID NO: 1774711
auuugcaguggacaccagc

SEQ ID NO: 1774713 - RNA, 19 nt, Artificial Sequence
  Description of Artificial Sequence: Synthetic oligonucleotide
  Sense strand starting at position 766 of SEQ ID NO: 1562814
gugggacuguauccagaaa

SEQ ID NO: 1774714 - RNA, 19 nt, Artificial Sequence
  Description of Artificial Sequence: Synthetic oligonucleotide
  Antisense strand to SEQ ID NO: 1774713
uuucuggauacagucccac

SEQ ID NO: 1774715 - RNA, 19 nt, Artificial Sequence
  Description of Artificial Sequence: Synthetic oligonucleotide
  Sense strand starting at position 1048 of SEQ ID NO: 1562814
gucggaagacucgggagau

SEQ ID NO: 1774716 - RNA, 19 nt, Artificial Sequence
  Description of Artificial Sequence: Synthetic oligonucleotide
  Antisense strand to SEQ ID NO: 1774715
aucucccgagucuuccgac

SEQ ID NO: 1774717 - RNA, 19 nt, Artificial Sequence
  Description of Artificial Sequence: Synthetic oligonucleotide
  Sense strand starting at position 1049 of SEQ ID NO: 1562814
ucggaagacucgggagaug

SEQ ID NO: 1774718 - RNA, 19 nt, Artificial Sequence
  Description of Artificial Sequence: Synthetic oligonucleotide
  Antisense strand to SEQ ID NO: 1774717
caucucccgagucuuccga

SEQ ID NO: 1774719 - RNA, 19 nt, Artificial Sequence
  Description of Artificial Sequence: Synthetic oligonucleotide
  Sense strand starting at position 1198 of SEQ ID NO: 1562814
ggcgugagaccuggaggau

SEQ ID NO: 1774720 - RNA, 19 nt, Artificial Sequence
  Description of Artificial Sequence: Synthetic oligonucleotide
  Antisense strand to SEQ ID NO: 1774719
auccuccaggucucacgcc

SEQ ID NO: 1774721 - RNA, 19 nt, Artificial Sequence
  Description of Artificial Sequence: Synthetic oligonucleotide
  Sense strand starting at position 1233 of SEQ ID NO: 1562814
agucguguucccugaccag

SEQ ID NO: 1774722 - RNA, 19 nt, Artificial Sequence
  Description of Artificial Sequence: Synthetic oligonucleotide
  Antisense strand to SEQ ID NO: 1774721
cuggucagggaacacgacu

SEQ ID NO: 1774723 - RNA, 19 nt, Artificial Sequence
  Description of Artificial Sequence: Synthetic oligonucleotide
  Sense strand starting at position 1326 of SEQ ID NO: 1562814
ggagucgucucccaaggag

SEQ ID NO: 1774724 - RNA, 19 nt, Artificial Sequence
  Description of Artificial Sequence: Synthetic oligonucleotide
  Antisense strand to SEQ ID NO: 1774723
cuccuugggagacgacucc

SEQ ID NO: 1774725 - RNA, 19 nt, Artificial Sequence
  Description of Artificial Sequence: Synthetic oligonucleotide
  Sense strand starting at position 1329 of SEQ ID NO: 1562814
gucgucucccaaggagaga

SEQ ID NO: 1774726 - RNA, 19 nt, Artificial Sequence
  Description of Artificial Sequence: Synthetic oligonucleotide
  Antisense strand to SEQ ID NO: 1774725
ucucuccuugggagacgac

SEQ ID NO: 1774727 - RNA, 19 nt, Artificial Sequence
  Description of Artificial Sequence: Synthetic oligonucleotide
  Sense strand starting at position 2864 of SEQ ID NO: 1562814
ugggcauuguccucccaua

SEQ ID NO: 1774728 - RNA, 19 nt, Artificial Sequence
  Description of Artificial Sequence: Synthetic oligonucleotide
  Antisense strand to SEQ ID NO: 1774727
uaugggaggacaaugccca

SEQ ID NO: 1774729 - RNA, 19 nt, Artificial Sequence
  Description of Artificial Sequence: Synthetic oligonucleotide
  Sense strand starting at position 2960 of SEQ ID NO: 1562814
ggaucucagaagggauguu

SEQ ID NO: 1774730 - RNA, 19 nt, Artificial Sequence
  Description of Artificial Sequence: Synthetic oligonucleotide
  Antisense strand to SEQ ID NO: 1774729
aacaucccuucugagaucc

SEQ ID NO: 1774731 - RNA, 19 nt, Artificial Sequence
  Description of Artificial Sequence: Synthetic oligonucleotide
  Sense strand starting at position 3039 of SEQ ID NO: 1562814
gcccuccugccaugaauca

SEQ ID NO: 1774732 - RNA, 19 nt, Artificial Sequence
  Description of Artificial Sequence: Synthetic oligonucleotide
  Antisense strand to SEQ ID NO: 1774731
ugauucauggcaggagggc

SEQ ID NO: 1774733 - RNA, 19 nt, Artificial Sequence
  Description of Artificial Sequence: Synthetic oligonucleotide
  Sense strand starting at position 3562 of SEQ ID NO: 1562814
gugcacauucccuggguua

SEQ ID NO: 1774734 - RNA, 19 nt, Artificial Sequence
  Description of Artificial Sequence: Synthetic oligonucleotide
  Antisense strand to SEQ ID NO: 1774733
uaacccagggaaugugcac

SEQ ID NO: 1774735 - RNA, 19 nt, Artificial Sequence
  Description of Artificial Sequence: Synthetic oligonucleotide
  Sense strand starting at position 3563 of SEQ ID NO: 1562814
ugcacauucccuggguuaa

SEQ ID NO: 1774736 - RNA, 19 nt, Artificial Sequence
  Description of Artificial Sequence: Synthetic oligonucleotide
  Antisense strand to SEQ ID NO: 1774735
uuaacccagggaaugugca

SEQ ID NO: 1774737 - RNA, 19 nt, Artificial Sequence
  Description of Artificial Sequence: Synthetic oligonucleotide
  Sense strand starting at position 3575 of SEQ ID NO: 1562814
ggguuaaaguggccucuuu

SEQ ID NO: 1774738 - RNA, 19 nt, Artificial Sequence
  Description of Artificial Sequence: Synthetic oligonucleotide
  Antisense strand to SEQ ID NO: 1774737
aaagaggccacuuuaaccc

SEQ ID NO: 1774739 - RNA, 19 nt, Artificial Sequence
  Description of Artificial Sequence: Synthetic oligonucleotide
  Sense strand starting at position 3663 of SEQ ID NO: 1562814
acccuugcuccuugagaca

SEQ ID NO: 1774740 - RNA, 19 nt, Artificial Sequence
  Description of Artificial Sequence: Synthetic oligonucleotide
  Antisense strand to SEQ ID NO: 1774739
ugucucaaggagcaagggu

SEQ ID NO: 1774741 - RNA, 19 nt, Artificial Sequence
  Description of Artificial Sequence: Synthetic oligonucleotide
  Sense strand starting at position 151 of SEQ ID NO: 1562815
aacuuaugucccuguugga

SEQ ID NO: 1774742 - RNA, 19 nt, Artificial Sequence
  Description of Artificial Sequence: Synthetic oligonucleotide
  Antisense strand to SEQ ID NO: 1774741
uccaacagggacauaaguu

SEQ ID NO: 1774743 - RNA, 19 nt, Artificial Sequence
  Description of Artificial Sequence: Synthetic oligonucleotide
  Sense strand starting at position 154 of SEQ ID NO: 1562815
uuaugucccuguuggaaug

SEQ ID NO: 1774744 - RNA, 19 nt, Artificial Sequence
  Description of Artificial Sequence: Synthetic oligonucleotide
  Antisense strand to SEQ ID NO: 1774743
cauuccaacagggacauaa

SEQ ID NO: 1774745 - RNA, 19 nt, Artificial Sequence
  Description of Artificial Sequence: Synthetic oligonucleotide
  Sense strand starting at position 193 of SEQ ID NO: 1562815
gccauugucccuuacaagu

SEQ ID NO: 1774746 - RNA, 19 nt, Artificial Sequence
  Description of Artificial Sequence: Synthetic oligonucleotide
  Antisense strand to SEQ ID NO: 1774745
acuuguaagggacaauggc

SEQ ID NO: 1774747 - RNA, 19 nt, Artificial Sequence
  Description of Artificial Sequence: Synthetic oligonucleotide
  Sense strand starting at position 294 of SEQ ID NO: 1562815
cauggcaguugcucagaaa

SEQ ID NO: 1774748 - RNA, 19 nt, Artificial Sequence
  Description of Artificial Sequence: Synthetic oligonucleotide
  Antisense strand to SEQ ID NO: 1774747
uuucugagcaacugccaug

SEQ ID NO: 1774749 - RNA, 19 nt, Artificial Sequence
  Description of Artificial Sequence: Synthetic oligonucleotide
  Sense strand starting at position 295 of SEQ ID NO: 1562815
auggcaguugcucagaaau

SEQ ID NO: 1774750 - RNA, 19 nt, Artificial Sequence
  Description of Artificial Sequence: Synthetic oligonucleotide
  Antisense strand to SEQ ID NO: 1774749
auuucugagcaacugccau

SEQ ID NO: 1774751 - RNA, 19 nt, Artificial Sequence
  Description of Artificial Sequence: Synthetic oligonucleotide
  Sense strand starting at position 297 of SEQ ID NO: 1562815
ggcaguugcucagaaaugu

SEQ ID NO: 1774752 - RNA, 19 nt, Artificial Sequence
  Description of Artificial Sequence: Synthetic oligonucleotide
  Antisense strand to SEQ ID NO: 1774751
acauuucugagcaacugcc

SEQ ID NO: 1774753 - RNA, 19 nt, Artificial Sequence
  Description of Artificial Sequence: Synthetic oligonucleotide
  Sense strand starting at position 468 of SEQ ID NO: 1562815
gcagcugccagggauuaga

SEQ ID NO: 1774754 - RNA, 19 nt, Artificial Sequence
  Description of Artificial Sequence: Synthetic oligonucleotide
  Antisense strand to SEQ ID NO: 1774753
ucuaaucccuggcagcugc

SEQ ID NO: 1774755 - RNA, 19 nt, Artificial Sequence
  Description of Artificial Sequence: Synthetic oligonucleotide
  Sense strand starting at position 481 of SEQ ID NO: 1562815
auuagaucuuucugggagu

SEQ ID NO: 1774756 - RNA, 19 nt, Artificial Sequence
  Description of Artificial Sequence: Synthetic oligonucleotide
  Antisense strand to SEQ ID NO: 1774755
acucccagaaagaucuaau

SEQ ID NO: 1774757 - RNA, 19 nt, Artificial Sequence
  Description of Artificial Sequence: Synthetic oligonucleotide
  Sense strand starting at position 483 of SEQ ID NO: 1562815
uagaucuuucugggaguga

SEQ ID NO: 1774758 - RNA, 19 nt, Artificial Sequence
  Description of Artificial Sequence: Synthetic oligonucleotide
  Antisense strand to SEQ ID NO: 1774757
ucacucccagaaagaucua

SEQ ID NO: 1774759 - RNA, 19 nt, Artificial Sequence
  Description of Artificial Sequence: Synthetic oligonucleotide
  Sense strand starting at position 484 of SEQ ID NO: 1562815
agaucuuucugggagugau

SEQ ID NO: 1774760 - RNA, 19 nt, Artificial Sequence
  Description of Artificial Sequence: Synthetic oligonucleotide
  Antisense strand to SEQ ID NO: 1774759
aucacucccagaaagaucu

SEQ ID NO: 1774761 - RNA, 19 nt, Artificial Sequence
  Description of Artificial Sequence: Synthetic oligonucleotide
  Sense strand starting at position 492 of SEQ ID NO: 1562815
cugggagugaucugaggac

SEQ ID NO: 1774762 - RNA, 19 nt, Artificial Sequence
  Description of Artificial Sequence: Synthetic oligonucleotide
  Antisense strand to SEQ ID NO: 1774761
guccucagaucacucccag

SEQ ID NO: 1774763 - RNA, 19 nt, Artificial Sequence
  Description of Artificial Sequence: Synthetic oligonucleotide
  Sense strand starting at position 602 of SEQ ID NO: 1562815
ccugcaauguguuggaaua

SEQ ID NO: 1774764 - RNA, 19 nt, Artificial Sequence
  Description of Artificial Sequence: Synthetic oligonucleotide
  Antisense strand to SEQ ID NO: 1774763
uauuccaacacauugcagg

SEQ ID NO: 1774765 - RNA, 19 nt, Artificial Sequence
  Description of Artificial Sequence: Synthetic oligonucleotide
  Sense strand starting at position 603 of SEQ ID NO: 1562815
cugcaauguguuggaauaa

SEQ ID NO: 1774766 - RNA, 19 nt, Artificial Sequence
  Description of Artificial Sequence: Synthetic oligonucleotide
  Antisense strand to SEQ ID NO: 1774765
uuauuccaacacauugcag

SEQ ID NO: 1774767 - RNA, 19 nt, Artificial Sequence
  Description of Artificial Sequence: Synthetic oligonucleotide
  Sense strand starting at position 604 of SEQ ID NO: 1562815
ugcaauguguuggaauaag

SEQ ID NO: 1774768 - RNA, 19 nt, Artificial Sequence
  Description of Artificial Sequence: Synthetic oligonucleotide
  Antisense strand to SEQ ID NO: 1774767
cuuauuccaacacauugca

SEQ ID NO: 1774769 - RNA, 19 nt, Artificial Sequence
  Description of Artificial Sequence: Synthetic oligonucleotide
  Sense strand starting at position 624 of SEQ ID NO: 1562815
gagaguugauaccaaggaa

SEQ ID NO: 1774770 - RNA, 19 nt, Artificial Sequence
  Description of Artificial Sequence: Synthetic oligonucleotide
  Antisense strand to SEQ ID NO: 1774769
uuccuugguaucaacucuc

SEQ ID NO: 1774771 - RNA, 19 nt, Artificial Sequence
  Description of Artificial Sequence: Synthetic oligonucleotide
  Sense strand starting at position 1274 of SEQ ID NO: 1562815
aagagagucuggccuguuu

SEQ ID NO: 1774772 - RNA, 19 nt, Artificial Sequence
  Description of Artificial Sequence: Synthetic oligonucleotide
  Antisense strand to SEQ ID NO: 1774771
aaacaggccagacucucuu

SEQ ID NO: 1774773 - RNA, 19 nt, Artificial Sequence
  Description of Artificial Sequence: Synthetic oligonucleotide
  Sense strand starting at position 1276 of SEQ ID NO: 1562815
gagagucuggccuguuugu

SEQ ID NO: 1774774 - RNA, 19 nt, Artificial Sequence
  Description of Artificial Sequence: Synthetic oligonucleotide
  Antisense strand to SEQ ID NO: 1774773
acaaacaggccagacucuc

SEQ ID NO: 1774775 - RNA, 19 nt, Artificial Sequence
  Description of Artificial Sequence: Synthetic oligonucleotide
  Sense strand starting at position 1418 of SEQ ID NO: 1562815
ucuggcguccacugaaaga

SEQ ID NO: 1774776 - RNA, 19 nt, Artificial Sequence
  Description of Artificial Sequence: Synthetic oligonucleotide
  Antisense strand to SEQ ID NO: 1774775
ucuuucaguggacgccaga

SEQ ID NO: 1774777 - RNA, 19 nt, Artificial Sequence
  Description of Artificial Sequence: Synthetic oligonucleotide
  Sense strand starting at position 2254 of SEQ ID NO: 1562815
ggcuguuuccucugggcga

SEQ ID NO: 1774778 - RNA, 19 nt, Artificial Sequence
  Description of Artificial Sequence: Synthetic oligonucleotide
  Antisense strand to SEQ ID NO: 1774777
ucgcccagaggaaacagcc

SEQ ID NO: 1774779 - RNA, 19 nt, Artificial Sequence
  Description of Artificial Sequence: Synthetic oligonucleotide
  Sense strand starting at position 2256 of SEQ ID NO: 1562815
cuguuuccucugggcgaga

SEQ ID NO: 1774780 - RNA, 19 nt, Artificial Sequence
  Description of Artificial Sequence: Synthetic oligonucleotide
  Antisense strand to SEQ ID NO: 1774779
ucucgcccagaggaaacag

SEQ ID NO: 1774781 - RNA, 19 nt, Artificial Sequence
  Description of Artificial Sequence: Synthetic oligonucleotide
  Sense strand starting at position 3247 of SEQ ID NO: 1562815
acagcaccuggcuaaauau

SEQ ID NO: 1774782 - RNA, 19 nt, Artificial Sequence
  Description of Artificial Sequence: Synthetic oligonucleotide
  Antisense strand to SEQ ID NO: 1774781
auauuuagccaggugcugu

SEQ ID NO: 1774783 - RNA, 19 nt, Artificial Sequence
  Description of Artificial Sequence: Synthetic oligonucleotide
  Sense strand starting at position 3256 of SEQ ID NO: 1562815
ggcuaaauauuggcuaaag

SEQ ID NO: 1774784 - RNA, 19 nt, Artificial Sequence
  Description of Artificial Sequence: Synthetic oligonucleotide
  Antisense strand to SEQ ID NO: 1774783
cuuuagccaauauuuagcc

SEQ ID NO: 1774785 - RNA, 19 nt, Artificial Sequence
  Description of Artificial Sequence: Synthetic oligonucleotide
  Sense strand starting at position 3257 of SEQ ID NO: 1562815
gcuaaauauuggcuaaaga

SEQ ID NO: 1774786 - RNA, 19 nt, Artificial Sequence
  Description of Artificial Sequence: Synthetic oligonucleotide
  Antisense strand to SEQ ID NO: 1774785
ucuuuagccaauauuuagc

SEQ ID NO: 1774787 - RNA, 19 nt, Artificial Sequence
  Description of Artificial Sequence: Synthetic oligonucleotide
  Sense strand starting at position 3324 of SEQ ID NO: 1562815
aaaguuaugugcccuaaga

SEQ ID NO: 1774788 - RNA, 19 nt, Artificial Sequence
  Description of Artificial Sequence: Synthetic oligonucleotide
  Antisense strand to SEQ ID NO: 1774787
ucuuagggcacauaacuuu

SEQ ID NO: 1774789 - RNA, 19 nt, Artificial Sequence
  Description of Artificial Sequence: Synthetic oligonucleotide
  Sense strand starting at position 3326 of SEQ ID NO: 1562815
aguuaugugcccuaagauu

SEQ ID NO: 1774790 - RNA, 19 nt, Artificial Sequence
  Description of Artificial Sequence: Synthetic oligonucleotide
  Antisense strand to SEQ ID NO: 1774789
aaucuuagggcacauaacu

SEQ ID NO: 1774791 - RNA, 19 nt, Artificial Sequence
  Description of Artificial Sequence: Synthetic oligonucleotide
  Sense strand starting at position 3344 of SEQ ID NO: 1562815
uucuuuaugucuuaguucu

SEQ ID NO: 1774792 - RNA, 19 nt, Artificial Sequence
  Description of Artificial Sequence: Synthetic oligonucleotide
  Antisense strand to SEQ ID NO: 1774791
agaacuaagacauaaagaa

SEQ ID NO: 1774793 - RNA, 19 nt, Artificial Sequence
  Description of Artificial Sequence: Synthetic oligonucleotide
  Sense strand starting at position 3350 of SEQ ID NO: 1562815
augucuuaguucugcggaa

SEQ ID NO: 1774794 - RNA, 19 nt, Artificial Sequence
  Description of Artificial Sequence: Synthetic oligonucleotide
  Antisense strand to SEQ ID NO: 1774793
uuccgcagaacuaagacau

SEQ ID NO: 1774795 - RNA, 19 nt, Artificial Sequence
  Description of Artificial Sequence: Synthetic oligonucleotide
  Sense strand starting at position 3351 of SEQ ID NO: 1562815
ugucuuaguucugcggaaa

SEQ ID NO: 1774796 - RNA, 19 nt, Artificial Sequence
  Description of Artificial Sequence: Synthetic oligonucleotide
  Antisense strand to SEQ ID NO: 1774795
uuuccgcagaacuaagaca

SEQ ID NO: 1774797 - RNA, 19 nt, Artificial Sequence
  Description of Artificial Sequence: Synthetic oligonucleotide
  Sense strand starting at position 3414 of SEQ ID NO: 1562815
gacagaacuugcucuguug

SEQ ID NO: 1774798 - RNA, 19 nt, Artificial Sequence
  Description of Artificial Sequence: Synthetic oligonucleotide
  Antisense strand to SEQ ID NO: 1774797
caacagagcaaguucuguc

SEQ ID NO: 1774799 - RNA, 19 nt, Artificial Sequence
  Description of Artificial Sequence: Synthetic oligonucleotide
  Sense strand starting at position 3719 of SEQ ID NO: 1562815
aaggcacuugagugacaaa

SEQ ID NO: 1774800 - RNA, 19 nt, Artificial Sequence
  Description of Artificial Sequence: Synthetic oligonucleotide
  Antisense strand to SEQ ID NO: 1774799
uuugucacucaagugccuu

SEQ ID NO: 1774801 - RNA, 19 nt, Artificial Sequence
  Description of Artificial Sequence: Synthetic oligonucleotide
  Sense strand starting at position 3848 of SEQ ID NO: 1562815
ggugucccaucacaauuua

SEQ ID NO: 1774802 - RNA, 19 nt, Artificial Sequence
  Description of Artificial Sequence: Synthetic oligonucleotide
  Antisense strand to SEQ ID NO: 1774801
uaaauugugaugggacacc

SEQ ID NO: 1774803 - RNA, 19 nt, Artificial Sequence
  Description of Artificial Sequence: Synthetic oligonucleotide
  Sense strand starting at position 112 of SEQ ID NO: 1562816
ccgugauccucccugauga

SEQ ID NO: 1774804 - RNA, 19 nt, Artificial Sequence
  Description of Artificial Sequence: Synthetic oligonucleotide
  Antisense strand to SEQ ID NO: 1774803
ucaucagggaggaucacgg

SEQ ID NO: 1774805 - RNA, 19 nt, Artificial Sequence
  Description of Artificial Sequence: Synthetic oligonucleotide
  Sense strand starting at position 113 of SEQ ID NO: 1562816
cgugauccucccugaugau

SEQ ID NO: 1774806 - RNA, 19 nt, Artificial Sequence
  Description of Artificial Sequence: Synthetic oligonucleotide
  Antisense strand to SEQ ID NO: 1774805
aucaucagggaggaucacg

SEQ ID NO: 1774807 - RNA, 19 nt, Artificial Sequence
  Description of Artificial Sequence: Synthetic oligonucleotide
  Sense strand starting at position 114 of SEQ ID NO: 1562816
gugauccucccugaugaug

SEQ ID NO: 1774808 - RNA, 19 nt, Artificial Sequence
  Description of Artificial Sequence: Synthetic oligonucleotide
  Antisense strand to SEQ ID NO: 1774807
caucaucagggaggaucac

SEQ ID NO: 1774809 - RNA, 19 nt, Artificial Sequence
  Description of Artificial Sequence: Synthetic oligonucleotide
  Sense strand starting at position 291 of SEQ ID NO: 1562816
cagagaauucuagggcaug

SEQ ID NO: 1774810 - RNA, 19 nt, Artificial Sequence
  Description of Artificial Sequence: Synthetic oligonucleotide
  Antisense strand to SEQ ID NO: 1774809
caugcccuagaauucucug

SEQ ID NO: 1774811 - RNA, 19 nt, Artificial Sequence
  Description of Artificial Sequence: Synthetic oligonucleotide
  Sense strand starting at position 340 of SEQ ID NO: 1562816
agacaaucccuucgcucaa

SEQ ID NO: 1774812 - RNA, 19 nt, Artificial Sequence
  Description of Artificial Sequence: Synthetic oligonucleotide
  Antisense strand to SEQ ID NO: 1774811
uugagcgaagggauugucu

SEQ ID NO: 1774813 - RNA, 19 nt, Artificial Sequence
  Description of Artificial Sequence: Synthetic oligonucleotide
  Sense strand starting at position 425 of SEQ ID NO: 1562816
aggaguugaugucaauuug

SEQ ID NO: 1774814 - RNA, 19 nt, Artificial Sequence
  Description of Artificial Sequence: Synthetic oligonucleotide
  Antisense strand to SEQ ID NO: 1774813
caaauugacaucaacuccu

SEQ ID NO: 1774815 - RNA, 19 nt, Artificial Sequence
  Description of Artificial Sequence: Synthetic oligonucleotide
  Sense strand starting at position 829 of SEQ ID NO: 1562816
ggcagaaacguugauucuu

SEQ ID NO: 1774816 - RNA, 19 nt, Artificial Sequence
  Description of Artificial Sequence: Synthetic oligonucleotide
  Antisense strand to SEQ ID NO: 1774815
aagaaucaacguuucugcc

SEQ ID NO: 1774817 - RNA, 19 nt, Artificial Sequence
  Description of Artificial Sequence: Synthetic oligonucleotide
  Sense strand starting at position 831 of SEQ ID NO: 1562816
cagaaacguugauucuuaa

SEQ ID NO: 1774818 - RNA, 19 nt, Artificial Sequence
  Description of Artificial Sequence: Synthetic oligonucleotide
  Antisense strand to SEQ ID NO: 1774817
uuaagaaucaacguuucug

SEQ ID NO: 1774819 - RNA, 19 nt, Artificial Sequence
  Description of Artificial Sequence: Synthetic oligonucleotide
  Sense strand starting at position 897 of SEQ ID NO: 1562816
ccaagagaagaguguauca

SEQ ID NO: 1774820 - RNA, 19 nt, Artificial Sequence
  Description of Artificial Sequence: Synthetic oligonucleotide
  Antisense strand to SEQ ID NO: 1774819
ugauacacucuucucuugg

SEQ ID NO: 1774821 - RNA, 19 nt, Artificial Sequence
  Description of Artificial Sequence: Synthetic oligonucleotide
  Sense strand starting at position 908 of SEQ ID NO: 1562816
guguaucaccuuugggaua

SEQ ID NO: 1774822 - RNA, 19 nt, Artificial Sequence
  Description of Artificial Sequence: Synthetic oligonucleotide
  Antisense strand to SEQ ID NO: 1774821
uaucccaaaggugauacac

SEQ ID NO: 1774823 - RNA, 19 nt, Artificial Sequence
  Description of Artificial Sequence: Synthetic oligonucleotide
  Sense strand starting at position 942 of SEQ ID NO: 1562816
augagcuucuauguacaaa

SEQ ID NO: 1774824 - RNA, 19 nt, Artificial Sequence
  Description of Artificial Sequence: Synthetic oligonucleotide
  Antisense strand to SEQ ID NO: 1774823
uuuguacauagaagcucau

SEQ ID NO: 1774825 - RNA, 19 nt, Artificial Sequence
  Description of Artificial Sequence: Synthetic oligonucleotide
  Sense strand starting at position 1013 of SEQ ID NO: 1562816
ucuggaaucccuuguggua

SEQ ID NO: 1774826 - RNA, 19 nt, Artificial Sequence
  Description of Artificial Sequence: Synthetic oligonucleotide
  Antisense strand to SEQ ID NO: 1774825
uaccacaagggauuccaga

SEQ ID NO: 1774827 - RNA, 19 nt, Artificial Sequence
  Description of Artificial Sequence: Synthetic oligonucleotide
  Sense strand starting at position 1036 of SEQ ID NO: 1562816
gcaggauauacuugcagac

SEQ ID NO: 1774828 - RNA, 19 nt, Artificial Sequence
  Description of Artificial Sequence: Synthetic oligonucleotide
  Antisense strand to SEQ ID NO: 1774827
gucugcaaguauauccugc

SEQ ID NO: 1774829 - RNA, 19 nt, Artificial Sequence
  Description of Artificial Sequence: Synthetic oligonucleotide
  Sense strand starting at position 1093 of SEQ ID NO: 1562816
caucgaaggucacuaauga

SEQ ID NO: 1774830 - RNA, 19 nt, Artificial Sequence
  Description of Artificial Sequence: Synthetic oligonucleotide
  Antisense strand to SEQ ID NO: 1774829
ucauuagugaccuucgaug

SEQ ID NO: 1774831 - RNA, 19 nt, Artificial Sequence
  Description of Artificial Sequence: Synthetic oligonucleotide
  Sense strand starting at position 1200 of SEQ ID NO: 1562816
caguauaugccaggaacca

SEQ ID NO: 1774832 - RNA, 19 nt, Artificial Sequence
  Description of Artificial Sequence: Synthetic oligonucleotide
  Antisense strand to SEQ ID NO: 1774831
ugguuccuggcauauacug

SEQ ID NO: 1774833 - RNA, 19 nt, Artificial Sequence
  Description of Artificial Sequence: Synthetic oligonucleotide
  Sense strand starting at position 1201 of SEQ ID NO: 1562816
aguauaugccaggaaccau

SEQ ID NO: 1774834 - RNA, 19 nt, Artificial Sequence
  Description of Artificial Sequence: Synthetic oligonucleotide
  Antisense strand to SEQ ID NO: 1774833
augguuccuggcauauacu

SEQ ID NO: 1774835 - RNA, 19 nt, Artificial Sequence
  Description of Artificial Sequence: Synthetic oligonucleotide
  Sense strand starting at position 1269 of SEQ ID NO: 1562816
ggauauagauauuaggaua

SEQ ID NO: 1774836 - RNA, 19 nt, Artificial Sequence
  Description of Artificial Sequence: Synthetic oligonucleotide
  Antisense strand to SEQ ID NO: 1774835
uauccuaauaucuauaucc

SEQ ID NO: 1774837 - RNA, 19 nt, Artificial Sequence
  Description of Artificial Sequence: Synthetic oligonucleotide
  Sense strand starting at position 1325 of SEQ ID NO: 1562816
gagguugaguacuuuccca

SEQ ID NO: 1774838 - RNA, 19 nt, Artificial Sequence
  Description of Artificial Sequence: Synthetic oligonucleotide
  Antisense strand to SEQ ID NO: 1774837
ugggaaaguacucaaccuc

SEQ ID NO: 1774839 - RNA, 19 nt, Artificial Sequence
  Description of Artificial Sequence: Synthetic oligonucleotide
  Sense strand starting at position 1398 of SEQ ID NO: 1562816
ccuugaagagcaugucuua

SEQ ID NO: 1774840 - RNA, 19 nt, Artificial Sequence
  Description of Artificial Sequence: Synthetic oligonucleotide
  Antisense strand to SEQ ID NO: 1774839
uaagacaugcucuucaagg

SEQ ID NO: 1774841 - RNA, 19 nt, Artificial Sequence
  Description of Artificial Sequence: Synthetic oligonucleotide
  Sense strand starting at position 1437 of SEQ ID NO: 1562816
uuuaaugagcugugacucu

SEQ ID NO: 1774842 - RNA, 19 nt, Artificial Sequence
  Description of Artificial Sequence: Synthetic oligonucleotide
  Antisense strand to SEQ ID NO: 1774841
agagucacagcucauuaaa

SEQ ID NO: 1774843 - RNA, 19 nt, Artificial Sequence
  Description of Artificial Sequence: Synthetic oligonucleotide
  Sense strand starting at position 1487 of SEQ ID NO: 1562816
guccucauccuguaagaga

SEQ ID NO: 1774844 - RNA, 19 nt, Artificial Sequence
  Description of Artificial Sequence: Synthetic oligonucleotide
  Antisense strand to SEQ ID NO: 1774843
ucucuuacaggaugaggac

SEQ ID NO: 1774845 - RNA, 19 nt, Artificial Sequence
  Description of Artificial Sequence: Synthetic oligonucleotide
  Sense strand starting at position 1500 of SEQ ID NO: 1562816
aagagagguggcuguacaa

SEQ ID NO: 1774846 - RNA, 19 nt, Artificial Sequence
  Description of Artificial Sequence: Synthetic oligonucleotide
  Antisense strand to SEQ ID NO: 1774845
uuguacagccaccucucuu

SEQ ID NO: 1774847 - RNA, 19 nt, Artificial Sequence
  Description of Artificial Sequence: Synthetic oligonucleotide
  Sense strand starting at position 1535 of SEQ ID NO: 1562816
uguuaacucugacugucua

SEQ ID NO: 1774848 - RNA, 19 nt, Artificial Sequence
  Description of Artificial Sequence: Synthetic oligonucleotide
  Antisense strand to SEQ ID NO: 1774847
uagacagucagaguuaaca

SEQ ID NO: 1774849 - RNA, 19 nt, Artificial Sequence
  Description of Artificial Sequence: Synthetic oligonucleotide
  Sense strand starting at position 1536 of SEQ ID NO: 1562816
guuaacucugacugucuau

SEQ ID NO: 1774850 - RNA, 19 nt, Artificial Sequence
  Description of Artificial Sequence: Synthetic oligonucleotide
  Antisense strand to SEQ ID NO: 1774849
auagacagucagaguuaac

SEQ ID NO: 1774851 - RNA, 19 nt, Artificial Sequence
  Description of Artificial Sequence: Synthetic oligonucleotide
  Sense strand starting at position 1581 of SEQ ID NO: 1562816
cugagcauccuagguuuga

SEQ ID NO: 1774852 - RNA, 19 nt, Artificial Sequence
  Description of Artificial Sequence: Synthetic oligonucleotide
  Antisense strand to SEQ ID NO: 1774851
ucaaaccuaggaugcucag

SEQ ID NO: 1774853 - RNA, 19 nt, Artificial Sequence
  Description of Artificial Sequence: Synthetic oligonucleotide
  Sense strand starting at position 1582 of SEQ ID NO: 1562816
ugagcauccuagguuugau

SEQ ID NO: 1774854 - RNA, 19 nt, Artificial Sequence
  Description of Artificial Sequence: Synthetic oligonucleotide
  Antisense strand to SEQ ID NO: 1774853
aucaaaccuaggaugcuca

SEQ ID NO: 1774855 - RNA, 19 nt, Artificial Sequence
  Description of Artificial Sequence: Synthetic oligonucleotide
  Sense strand starting at position 1621 of SEQ ID NO: 1562816
cugacaucagccugaaaug

SEQ ID NO: 1774856 - RNA, 19 nt, Artificial Sequence
  Description of Artificial Sequence: Synthetic oligonucleotide
  Antisense strand to SEQ ID NO: 1774855
cauuucaggcugaugucag

SEQ ID NO: 1774857 - RNA, 19 nt, Artificial Sequence
  Description of Artificial Sequence: Synthetic oligonucleotide
  Sense strand starting at position 1766 of SEQ ID NO: 1562816
gcugaacacccuugaucuu

SEQ ID NO: 1774858 - RNA, 19 nt, Artificial Sequence
  Description of Artificial Sequence: Synthetic oligonucleotide
  Antisense strand to SEQ ID NO: 1774857
aagaucaaggguguucagc

SEQ ID NO: 1774859 - RNA, 19 nt, Artificial Sequence
  Description of Artificial Sequence: Synthetic oligonucleotide
  Sense strand starting at position 2038 of SEQ ID NO: 1562816
ugacaaagaucgcucaaug

SEQ ID NO: 1774860 - RNA, 19 nt, Artificial Sequence
  Description of Artificial Sequence: Synthetic oligonucleotide
  Antisense strand to SEQ ID NO: 1774859
cauugagcgaucuuuguca

SEQ ID NO: 1774861 - RNA, 19 nt, Artificial Sequence
  Description of Artificial Sequence: Synthetic oligonucleotide
  Sense strand starting at position 2209 of SEQ ID NO: 1562816
gugguugugcguguggaaa

SEQ ID NO: 1774862 - RNA, 19 nt, Artificial Sequence
  Description of Artificial Sequence: Synthetic oligonucleotide
  Antisense strand to SEQ ID NO: 1774861
uuuccacacgcacaaccac

SEQ ID NO: 1774863 - RNA, 19 nt, Artificial Sequence
  Description of Artificial Sequence: Synthetic oligonucleotide
  Sense strand starting at position 2588 of SEQ ID NO: 1562816
uugacauacuccuuugaga

SEQ ID NO: 1774864 - RNA, 19 nt, Artificial Sequence
  Description of Artificial Sequence: Synthetic oligonucleotide
  Antisense strand to SEQ ID NO: 1774863
ucucaaaggaguaugucaa

SEQ ID NO: 1774865 - RNA, 19 nt, Artificial Sequence
  Description of Artificial Sequence: Synthetic oligonucleotide
  Sense strand starting at position 2639 of SEQ ID NO: 1562816
guguaaguuccuguugcau

SEQ ID NO: 1774866 - RNA, 19 nt, Artificial Sequence
  Description of Artificial Sequence: Synthetic oligonucleotide
  Antisense strand to SEQ ID NO: 1774865
augcaacaggaacuuacac

SEQ ID NO: 1774867 - RNA, 19 nt, Artificial Sequence
  Description of Artificial Sequence: Synthetic oligonucleotide
  Sense strand starting at position 3069 of SEQ ID NO: 1562816
ggaggaugauuagccuuau

SEQ ID NO: 1774868 - RNA, 19 nt, Artificial Sequence
  Description of Artificial Sequence: Synthetic oligonucleotide
  Antisense strand to SEQ ID NO: 1774867
auaaggcuaaucauccucc

SEQ ID NO: 1774869 - RNA, 19 nt, Artificial Sequence
  Description of Artificial Sequence: Synthetic oligonucleotide
  Sense strand starting at position 3070 of SEQ ID NO: 1562816
gaggaugauuagccuuauc

SEQ ID NO: 1774870 - RNA, 19 nt, Artificial Sequence
  Description of Artificial Sequence: Synthetic oligonucleotide
  Antisense strand to SEQ ID NO: 1774869
gauaaggcuaaucauccuc

SEQ ID NO: 1774871 - RNA, 19 nt, Artificial Sequence
  Description of Artificial Sequence: Synthetic oligonucleotide
  Sense strand starting at position 3742 of SEQ ID NO: 1562816
ucccucucacagugauaga

SEQ ID NO: 1774872 - RNA, 19 nt, Artificial Sequence
  Description of Artificial Sequence: Synthetic oligonucleotide
  Antisense strand to SEQ ID NO: 1774871
ucuaucacugugagaggga

SEQ ID NO: 1774873 - RNA, 19 nt, Artificial Sequence
  Description of Artificial Sequence: Synthetic oligonucleotide
  Sense strand starting at position 3782 of SEQ ID NO: 1562816
cugcuacaugcugaggaua

SEQ ID NO: 1774874 - RNA, 19 nt, Artificial Sequence
  Description of Artificial Sequence: Synthetic oligonucleotide
  Antisense strand to SEQ ID NO: 1774873
uauccucagcauguagcag

SEQ ID NO: 1774875 - RNA, 19 nt, Artificial Sequence
  Description of Artificial Sequence: Synthetic oligonucleotide
  Sense strand starting at position 3854 of SEQ ID NO: 1562816
ggagauaacuaagaggaau

SEQ ID NO: 1774876 - RNA, 19 nt, Artificial Sequence
  Description of Artificial Sequence: Synthetic oligonucleotide
  Antisense strand to SEQ ID NO: 1774875
auuccucuuaguuaucucc

SEQ ID NO: 1774877 - RNA, 19 nt, Artificial Sequence
  Description of Artificial Sequence: Synthetic oligonucleotide
  Sense strand starting at position 3894 of SEQ ID NO: 1562816
uagugcuaugaucaaggua

SEQ ID NO: 1774878 - RNA, 19 nt, Artificial Sequence
  Description of Artificial Sequence: Synthetic oligonucleotide
  Antisense strand to SEQ ID NO: 1774877
uaccuugaucauagcacua

SEQ ID NO: 1774879 - RNA, 19 nt, Artificial Sequence
  Description of Artificial Sequence: Synthetic oligonucleotide
  Sense strand starting at position 3935 of SEQ ID NO: 1562816
ugcauaagacuauacaguu

SEQ ID NO: 1774880 - RNA, 19 nt, Artificial Sequence
  Description of Artificial Sequence: Synthetic oligonucleotide
  Antisense strand to SEQ ID NO: 1774879
aacuguauagucuuaugca

SEQ ID NO: 1774881 - RNA, 19 nt, Artificial Sequence
  Description of Artificial Sequence: Synthetic oligonucleotide
  Sense strand starting at position 3963 of SEQ ID NO: 1562816
gcugcuuggcaagauuaca

SEQ ID NO: 1774882 - RNA, 19 nt, Artificial Sequence
  Description of Artificial Sequence: Synthetic oligonucleotide
  Antisense strand to SEQ ID NO: 1774881
uguaaucuugccaagcagc

SEQ ID NO: 1774883 - RNA, 19 nt, Artificial Sequence
  Description of Artificial Sequence: Synthetic oligonucleotide
  Sense strand starting at position 240 of SEQ ID NO: 1562817
uggcaucugcuugaauacu

SEQ ID NO: 1774884 - RNA, 19 nt, Artificial Sequence
  Description of Artificial Sequence: Synthetic oligonucleotide
  Antisense strand to SEQ ID NO: 1774883
aguauucaagcagaugcca

SEQ ID NO: 1774885 - RNA, 19 nt, Artificial Sequence
  Description of Artificial Sequence: Synthetic oligonucleotide
  Sense strand starting at position 250 of SEQ ID NO: 1562817
uugaauacuccugggagug

SEQ ID NO: 1774886 - RNA, 19 nt, Artificial Sequence
  Description of Artificial Sequence: Synthetic oligonucleotide
  Antisense strand to SEQ ID NO: 1774885
cacucccaggaguauucaa

SEQ ID NO: 1774887 - RNA, 19 nt, Artificial Sequence
  Description of Artificial Sequence: Synthetic oligonucleotide
  Sense strand starting at position 267 of SEQ ID NO: 1562817
uggugagcucacuaccuaa

SEQ ID NO: 1774888 - RNA, 19 nt, Artificial Sequence
  Description of Artificial Sequence: Synthetic oligonucleotide
  Antisense strand to SEQ ID NO: 1774887
uuagguagugagcucacca

SEQ ID NO: 1774889 - RNA, 19 nt, Artificial Sequence
  Description of Artificial Sequence: Synthetic oligonucleotide
  Sense strand starting at position 388 of SEQ ID NO: 1562817
cugagucugccucacaaga

SEQ ID NO: 1774890 - RNA, 19 nt, Artificial Sequence
  Description of Artificial Sequence: Synthetic oligonucleotide
  Antisense strand to SEQ ID NO: 1774889
ucuugugaggcagacucag

SEQ ID NO: 1774891 - RNA, 19 nt, Artificial Sequence
  Description of Artificial Sequence: Synthetic oligonucleotide
  Sense strand starting at position 433 of SEQ ID NO: 1562817
ucuuguccagacugaacau

SEQ ID NO: 1774892 - RNA, 19 nt, Artificial Sequence
  Description of Artificial Sequence: Synthetic oligonucleotide
  Antisense strand to SEQ ID NO: 1774891
auguucagucuggacaaga

SEQ ID NO: 1774893 - RNA, 19 nt, Artificial Sequence
  Description of Artificial Sequence: Synthetic oligonucleotide
  Sense strand starting at position 573 of SEQ ID NO: 1562817
caaagagaacgcuauagca

SEQ ID NO: 1774894 - RNA, 19 nt, Artificial Sequence
  Description of Artificial Sequence: Synthetic oligonucleotide
  Antisense strand to SEQ ID NO: 1774893
ugcuauagcguucucuuug

SEQ ID NO: 1774895 - RNA, 19 nt, Artificial Sequence
  Description of Artificial Sequence: Synthetic oligonucleotide
  Sense strand starting at position 575 of SEQ ID NO: 1562817
aagagaacgcuauagcaaa

SEQ ID NO: 1774896 - RNA, 19 nt, Artificial Sequence
  Description of Artificial Sequence: Synthetic oligonucleotide
  Antisense strand to SEQ ID NO: 1774895
uuugcuauagcguucucuu

SEQ ID NO: 1774897 - RNA, 19 nt, Artificial Sequence
  Description of Artificial Sequence: Synthetic oligonucleotide
  Sense strand starting at position 729 of SEQ ID NO: 1562817
uugguaaaucugggcuuaa

SEQ ID NO: 1774898 - RNA, 19 nt, Artificial Sequence
  Description of Artificial Sequence: Synthetic oligonucleotide
  Antisense strand to SEQ ID NO: 1774897
uuaagcccagauuuaccaa

SEQ ID NO: 1774899 - RNA, 19 nt, Artificial Sequence
  Description of Artificial Sequence: Synthetic oligonucleotide
  Sense strand starting at position 730 of SEQ ID NO: 1562817
ugguaaaucugggcuuaag

SEQ ID NO: 1774900 - RNA, 19 nt, Artificial Sequence
  Description of Artificial Sequence: Synthetic oligonucleotide
  Antisense strand to SEQ ID NO: 1774899
cuuaagcccagauuuacca

SEQ ID NO: 1774901 - RNA, 19 nt, Artificial Sequence
  Description of Artificial Sequence: Synthetic oligonucleotide
  Sense strand starting at position 783 of SEQ ID NO: 1562817
ggagaacucuggcuccuca

SEQ ID NO: 1774902 - RNA, 19 nt, Artificial Sequence
  Description of Artificial Sequence: Synthetic oligonucleotide
  Antisense strand to SEQ ID NO: 1774901
ugaggagccagaguucucc

SEQ ID NO: 1774903 - RNA, 19 nt, Artificial Sequence
  Description of Artificial Sequence: Synthetic oligonucleotide
  Sense strand starting at position 1658 of SEQ ID NO: 1562817
ccauuucuacccugugagu

SEQ ID NO: 1774904 - RNA, 19 nt, Artificial Sequence
  Description of Artificial Sequence: Synthetic oligonucleotide
  Antisense strand to SEQ ID NO: 1774903
acucacaggguagaaaugg

SEQ ID NO: 1774905 - RNA, 19 nt, Artificial Sequence
  Description of Artificial Sequence: Synthetic oligonucleotide
  Sense strand starting at position 1677 of SEQ ID NO: 1562817
gccucagaggcaggaauau

SEQ ID NO: 1774906 - RNA, 19 nt, Artificial Sequence
  Description of Artificial Sequence: Synthetic oligonucleotide
  Antisense strand to SEQ ID NO: 1774905
auauuccugccucugaggc

SEQ ID NO: 1774907 - RNA, 19 nt, Artificial Sequence
  Description of Artificial Sequence: Synthetic oligonucleotide
  Sense strand starting at position 1911 of SEQ ID NO: 1562817
auggcuaagaacuggucua

SEQ ID NO: 1774908 - RNA, 19 nt, Artificial Sequence
  Description of Artificial Sequence: Synthetic oligonucleotide
  Antisense strand to SEQ ID NO: 1774907
uagaccaguucuuagccau

SEQ ID NO: 1774909 - RNA, 19 nt, Artificial Sequence
  Description of Artificial Sequence: Synthetic oligonucleotide
  Sense strand starting at position 1912 of SEQ ID NO: 1562817
uggcuaagaacuggucuaa

SEQ ID NO: 1774910 - RNA, 19 nt, Artificial Sequence
  Description of Artificial Sequence: Synthetic oligonucleotide
  Antisense strand to SEQ ID NO: 1774909
uuagaccaguucuuagcca

SEQ ID NO: 1774911 - RNA, 19 nt, Artificial Sequence
  Description of Artificial Sequence: Synthetic oligonucleotide
  Sense strand starting at position 1990 of SEQ ID NO: 1562817
ccaacaugcucuuugauug

SEQ ID NO: 1774912 - RNA, 19 nt, Artificial Sequence
  Description of Artificial Sequence: Synthetic oligonucleotide
  Antisense strand to SEQ ID NO: 1774911
caaucaaagagcauguugg

SEQ ID NO: 1774913 - RNA, 19 nt, Artificial Sequence
  Description of Artificial Sequence: Synthetic oligonucleotide
  Sense strand starting at position 1997 of SEQ ID NO: 1562817
gcucuuugauuguuuauuu

SEQ ID NO: 1774914 - RNA, 19 nt, Artificial Sequence
  Description of Artificial Sequence: Synthetic oligonucleotide
  Antisense strand to SEQ ID NO: 1774913
aaauaaacaaucaaagagc

SEQ ID NO: 1774915 - RNA, 19 nt, Artificial Sequence
  Description of Artificial Sequence: Synthetic oligonucleotide
  Sense strand starting at position 2208 of SEQ ID NO: 1562817
cucuauauucguuauauuc

SEQ ID NO: 1774916 - RNA, 19 nt, Artificial Sequence
  Description of Artificial Sequence: Synthetic oligonucleotide
  Antisense strand to SEQ ID NO: 1774915
gaauauaacgaauauagag

SEQ ID NO: 1774917 - RNA, 19 nt, Artificial Sequence
  Description of Artificial Sequence: Synthetic oligonucleotide
  Sense strand starting at position 2249 of SEQ ID NO: 1562817
auggauggcuugccaaauu

SEQ ID NO: 1774918 - RNA, 19 nt, Artificial Sequence
  Description of Artificial Sequence: Synthetic oligonucleotide
  Antisense strand to SEQ ID NO: 1774917
aauuuggcaagccauccau

SEQ ID NO: 1774919 - RNA, 19 nt, Artificial Sequence
  Description of Artificial Sequence: Synthetic oligonucleotide
  Sense strand starting at position 2291 of SEQ ID NO: 1562817
uuaauauugugauccagga

SEQ ID NO: 1774920 - RNA, 19 nt, Artificial Sequence
  Description of Artificial Sequence: Synthetic oligonucleotide
  Antisense strand to SEQ ID NO: 1774919
uccuggaucacaauauuaa

SEQ ID NO: 1774921 - RNA, 19 nt, Artificial Sequence
  Description of Artificial Sequence: Synthetic oligonucleotide
  Sense strand starting at position 2381 of SEQ ID NO: 1562817
ccucaaaugucacuaugag

SEQ ID NO: 1774922 - RNA, 19 nt, Artificial Sequence
  Description of Artificial Sequence: Synthetic oligonucleotide
  Antisense strand to SEQ ID NO: 1774921
cucauagugacauuugagg

SEQ ID NO: 1774923 - RNA, 19 nt, Artificial Sequence
  Description of Artificial Sequence: Synthetic oligonucleotide
  Sense strand starting at position 2773 of SEQ ID NO: 1562817
acugaaugugguggauaca

SEQ ID NO: 1774924 - RNA, 19 nt, Artificial Sequence
  Description of Artificial Sequence: Synthetic oligonucleotide
  Antisense strand to SEQ ID NO: 1774923
uguauccaccacauucagu

SEQ ID NO: 1774925 - RNA, 19 nt, Artificial Sequence
  Description of Artificial Sequence: Synthetic oligonucleotide
  Sense strand starting at position 2774 of SEQ ID NO: 1562817
cugaaugugguggauacau

SEQ ID NO: 1774926 - RNA, 19 nt, Artificial Sequence
  Description of Artificial Sequence: Synthetic oligonucleotide
  Antisense strand to SEQ ID NO: 1774925
auguauccaccacauucag

SEQ ID NO: 1774927 - RNA, 19 nt, Artificial Sequence
  Description of Artificial Sequence: Synthetic oligonucleotide
  Sense strand starting at position 2830 of SEQ ID NO: 1562817
aggaguuuaacagagcagu

SEQ ID NO: 1774928 - RNA, 19 nt, Artificial Sequence
  Description of Artificial Sequence: Synthetic oligonucleotide
  Antisense strand to SEQ ID NO: 1774927
acugcucuguuaaacuccu

SEQ ID NO: 1774929 - RNA, 19 nt, Artificial Sequence
  Description of Artificial Sequence: Synthetic oligonucleotide
  Sense strand starting at position 2836 of SEQ ID NO: 1562817
uuaacagagcagugaauga

SEQ ID NO: 1774930 - RNA, 19 nt, Artificial Sequence
  Description of Artificial Sequence: Synthetic oligonucleotide
  Antisense strand to SEQ ID NO: 1774929
ucauucacugcucuguuaa

SEQ ID NO: 1774931 - RNA, 19 nt, Artificial Sequence
  Description of Artificial Sequence: Synthetic oligonucleotide
  Sense strand starting at position 2843 of SEQ ID NO: 1562817
agcagugaaugauuugcga

SEQ ID NO: 1774932 - RNA, 19 nt, Artificial Sequence
  Description of Artificial Sequence: Synthetic oligonucleotide
  Antisense strand to SEQ ID NO: 1774931
ucgcaaaucauucacugcu

SEQ ID NO: 1774933 - RNA, 19 nt, Artificial Sequence
  Description of Artificial Sequence: Synthetic oligonucleotide
  Sense strand starting at position 2996 of SEQ ID NO: 1562817
uggcaucugguuuaucuga

SEQ ID NO: 1774934 - RNA, 19 nt, Artificial Sequence
  Description of Artificial Sequence: Synthetic oligonucleotide
  Antisense strand to SEQ ID NO: 1774933
ucagauaaaccagaugcca

SEQ ID NO: 1774935 - RNA, 19 nt, Artificial Sequence
  Description of Artificial Sequence: Synthetic oligonucleotide
  Sense strand starting at position 3004 of SEQ ID NO: 1562817
gguuuaucugaacaugguu

SEQ ID NO: 1774936 - RNA, 19 nt, Artificial Sequence
  Description of Artificial Sequence: Synthetic oligonucleotide
  Antisense strand to SEQ ID NO: 1774935
aaccauguucagauaaacc

SEQ ID NO: 1774937 - RNA, 19 nt, Artificial Sequence
  Description of Artificial Sequence: Synthetic oligonucleotide
  Sense strand starting at position 3185 of SEQ ID NO: 1562817
aacaguaagugcucaauag

SEQ ID NO: 1774938 - RNA, 19 nt, Artificial Sequence
  Description of Artificial Sequence: Synthetic oligonucleotide
  Antisense strand to SEQ ID NO: 1774937
cuauugagcacuuacuguu

SEQ ID NO: 1774939 - RNA, 19 nt, Artificial Sequence
  Description of Artificial Sequence: Synthetic oligonucleotide
  Sense strand starting at position 3215 of SEQ ID NO: 1562817
gauauaagguauccauggu

SEQ ID NO: 1774940 - RNA, 19 nt, Artificial Sequence
  Description of Artificial Sequence: Synthetic oligonucleotide
  Antisense strand to SEQ ID NO: 1774939
accauggauaccuuauauc

SEQ ID NO: 1774941 - RNA, 19 nt, Artificial Sequence
  Description of Artificial Sequence: Synthetic oligonucleotide
  Sense strand starting at position 3267 of SEQ ID NO: 1562817
gagauaccucagugggauc

SEQ ID NO: 1774942 - RNA, 19 nt, Artificial Sequence
  Description of Artificial Sequence: Synthetic oligonucleotide
  Antisense strand to SEQ ID NO: 1774941
gaucccacugagguaucuc

SEQ ID NO: 1774943 - RNA, 19 nt, Artificial Sequence
  Description of Artificial Sequence: Synthetic oligonucleotide
  Sense strand starting at position 3311 of SEQ ID NO: 1562817
aggcuuuggaagggugaga

SEQ ID NO: 1774944 - RNA, 19 nt, Artificial Sequence
  Description of Artificial Sequence: Synthetic oligonucleotide
  Antisense strand to SEQ ID NO: 1774943
ucucacccuuccaaagccu

SEQ ID NO: 1774945 - RNA, 19 nt, Artificial Sequence
  Description of Artificial Sequence: Synthetic oligonucleotide
  Sense strand starting at position 3355 of SEQ ID NO: 1562817
aaggccuuugagggaucaa

SEQ ID NO: 1774946 - RNA, 19 nt, Artificial Sequence
  Description of Artificial Sequence: Synthetic oligonucleotide
  Antisense strand to SEQ ID NO: 1774945
uugaucccucaaaggccuu

SEQ ID NO: 1774947 - RNA, 19 nt, Artificial Sequence
  Description of Artificial Sequence: Synthetic oligonucleotide
  Sense strand starting at position 3373 of SEQ ID NO: 1562817
auaggaguuuguucagagg

SEQ ID NO: 1774948 - RNA, 19 nt, Artificial Sequence
  Description of Artificial Sequence: Synthetic oligonucleotide
  Antisense strand to SEQ ID NO: 1774947
ccucugaacaaacuccuau

SEQ ID NO: 1774949 - RNA, 19 nt, Artificial Sequence
  Description of Artificial Sequence: Synthetic oligonucleotide
  Sense strand starting at position 3402 of SEQ ID NO: 1562817
ccuggaugugaacguauga

SEQ ID NO: 1774950 - RNA, 19 nt, Artificial Sequence
  Description of Artificial Sequence: Synthetic oligonucleotide
  Antisense strand to SEQ ID NO: 1774949
ucauacguucacauccagg

SEQ ID NO: 1774951 - RNA, 19 nt, Artificial Sequence
  Description of Artificial Sequence: Synthetic oligonucleotide
  Sense strand starting at position 3435 of SEQ ID NO: 1562817
gaguguucuaagcagaggu

SEQ ID NO: 1774952 - RNA, 19 nt, Artificial Sequence
  Description of Artificial Sequence: Synthetic oligonucleotide
  Antisense strand to SEQ ID NO: 1774951
accucugcuuagaacacuc

SEQ ID NO: 1774953 - RNA, 19 nt, Artificial Sequence
  Description of Artificial Sequence: Synthetic oligonucleotide
  Sense strand starting at position 3775 of SEQ ID NO: 1562817
gggagggaugugugaccua

SEQ ID NO: 1774954 - RNA, 19 nt, Artificial Sequence
  Description of Artificial Sequence: Synthetic oligonucleotide
  Antisense strand to SEQ ID NO: 1774953
uaggucacacaucccuccc

SEQ ID NO: 1774955 - RNA, 19 nt, Artificial Sequence
  Description of Artificial Sequence: Synthetic oligonucleotide
  Sense strand starting at position 3778 of SEQ ID NO: 1562817
agggaugugugaccuaaug

SEQ ID NO: 1774956 - RNA, 19 nt, Artificial Sequence
  Description of Artificial Sequence: Synthetic oligonucleotide
  Antisense strand to SEQ ID NO: 1774955
cauuaggucacacaucccu

SEQ ID NO: 1774957 - RNA, 19 nt, Artificial Sequence
  Description of Artificial Sequence: Synthetic oligonucleotide
  Sense strand starting at position 3780 of SEQ ID NO: 1562817
ggaugugugaccuaauguu

SEQ ID NO: 1774958 - RNA, 19 nt, Artificial Sequence
  Description of Artificial Sequence: Synthetic oligonucleotide
  Antisense strand to SEQ ID NO: 1774957
aacauuaggucacacaucc

SEQ ID NO: 1774959 - RNA, 19 nt, Artificial Sequence
  Description of Artificial Sequence: Synthetic oligonucleotide
  Sense strand starting at position 3845 of SEQ ID NO: 1562817
ggcuaaaggcuuuggaaug

SEQ ID NO: 1774960 - RNA, 19 nt, Artificial Sequence
  Description of Artificial Sequence: Synthetic oligonucleotide
  Antisense strand to SEQ ID NO: 1774959
cauuccaaagccuuuagcc

SEQ ID NO: 1774961 - RNA, 19 nt, Artificial Sequence
  Description of Artificial Sequence: Synthetic oligonucleotide
  Sense strand starting at position 3983 of SEQ ID NO: 1562817
cuuaaauaucauuguaagg

SEQ ID NO: 1774962 - RNA, 19 nt, Artificial Sequence
  Description of Artificial Sequence: Synthetic oligonucleotide
  Antisense strand to SEQ ID NO: 1774961
ccuuacaaugauauuuaag

SEQ ID NO: 1774963 - RNA, 19 nt, Artificial Sequence
  Description of Artificial Sequence: Synthetic oligonucleotide
  Sense strand starting at position 46 of SEQ ID NO: 1562818
ugcaaacucuggucuccua

SEQ ID NO: 1774964 - RNA, 19 nt, Artificial Sequence
  Description of Artificial Sequence: Synthetic oligonucleotide
  Antisense strand to SEQ ID NO: 1774963
uaggagaccagaguuugca

SEQ ID NO: 1774965 - RNA, 19 nt, Artificial Sequence
  Description of Artificial Sequence: Synthetic oligonucleotide
  Sense strand starting at position 120 of SEQ ID NO: 1562818
cagagaauucuagggcaug

SEQ ID NO: 1774966 - RNA, 19 nt, Artificial Sequence
  Description of Artificial Sequence: Synthetic oligonucleotide
  Antisense strand to SEQ ID NO: 1774965
caugcccuagaauucucug

SEQ ID NO: 1774967 - RNA, 19 nt, Artificial Sequence
  Description of Artificial Sequence: Synthetic oligonucleotide
  Sense strand starting at position 169 of SEQ ID NO: 1562818
agacaaucccuucgcucaa

SEQ ID NO: 1774968 - RNA, 19 nt, Artificial Sequence
  Description of Artificial Sequence: Synthetic oligonucleotide
  Antisense strand to SEQ ID NO: 1774967
uugagcgaagggauugucu

SEQ ID NO: 1774969 - RNA, 19 nt, Artificial Sequence
  Description of Artificial Sequence: Synthetic oligonucleotide
  Sense strand starting at position 254 of SEQ ID NO: 1562818
aggaguugaugucaauuug

SEQ ID NO: 1774970 - RNA, 19 nt, Artificial Sequence
  Description of Artificial Sequence: Synthetic oligonucleotide
  Antisense strand to SEQ ID NO: 1774969
caaauugacaucaacuccu

SEQ ID NO: 1774971 - RNA, 19 nt, Artificial Sequence
  Description of Artificial Sequence: Synthetic oligonucleotide
  Sense strand starting at position 658 of SEQ ID NO: 1562818
ggcagaaacguugauucuu

SEQ ID NO: 1774972 - RNA, 19 nt, Artificial Sequence
  Description of Artificial Sequence: Synthetic oligonucleotide
  Antisense strand to SEQ ID NO: 1774971
aagaaucaacguuucugcc

SEQ ID NO: 1774973 - RNA, 19 nt, Artificial Sequence
  Description of Artificial Sequence: Synthetic oligonucleotide
  Sense strand starting at position 660 of SEQ ID NO: 1562818
cagaaacguugauucuuaa

SEQ ID NO: 1774974 - RNA, 19 nt, Artificial Sequence
  Description of Artificial Sequence: Synthetic oligonucleotide
  Antisense strand to SEQ ID NO: 1774973
uuaagaaucaacguuucug

SEQ ID NO: 1774975 - RNA, 19 nt, Artificial Sequence
  Description of Artificial Sequence: Synthetic oligonucleotide
  Sense strand starting at position 726 of SEQ ID NO: 1562818
ccaagagaagaguguauca

SEQ ID NO: 1774976 - RNA, 19 nt, Artificial Sequence
  Description of Artificial Sequence: Synthetic oligonucleotide
  Antisense strand to SEQ ID NO: 1774975
ugauacacucuucucuugg

SEQ ID NO: 1774977 - RNA, 19 nt, Artificial Sequence
  Description of Artificial Sequence: Synthetic oligonucleotide
  Sense strand starting at position 737 of SEQ ID NO: 1562818
guguaucaccuuugggaua

SEQ ID NO: 1774978 - RNA, 19 nt, Artificial Sequence
  Description of Artificial Sequence: Synthetic oligonucleotide
  Antisense strand to SEQ ID NO: 1774977
uaucccaaaggugauacac

SEQ ID NO: 1774979 - RNA, 19 nt, Artificial Sequence
  Description of Artificial Sequence: Synthetic oligonucleotide
  Sense strand starting at position 771 of SEQ ID NO: 1562818
augagcuucuauguacaaa

SEQ ID NO: 1774980 - RNA, 19 nt, Artificial Sequence
  Description of Artificial Sequence: Synthetic oligonucleotide
  Antisense strand to SEQ ID NO: 1774979
uuuguacauagaagcucau

SEQ ID NO: 1774981 - RNA, 19 nt, Artificial Sequence
  Description of Artificial Sequence: Synthetic oligonucleotide
  Sense strand starting at position 842 of SEQ ID NO: 1562818
ucuggaaucccuuguggua

SEQ ID NO: 1774982 - RNA, 19 nt, Artificial Sequence
  Description of Artificial Sequence: Synthetic oligonucleotide
  Antisense strand to SEQ ID NO: 1774981
uaccacaagggauuccaga

SEQ ID NO: 1774983 - RNA, 19 nt, Artificial Sequence
  Description of Artificial Sequence: Synthetic oligonucleotide
  Sense strand starting at position 865 of SEQ ID NO: 1562818
gcaggauauacuugcagac

SEQ ID NO: 1774984 - RNA, 19 nt, Artificial Sequence
  Description of Artificial Sequence: Synthetic oligonucleotide
  Antisense strand to SEQ ID NO: 1774983
gucugcaaguauauccugc

SEQ ID NO: 1774985 - RNA, 19 nt, Artificial Sequence
  Description of Artificial Sequence: Synthetic oligonucleotide
  Sense strand starting at position 922 of SEQ ID NO: 1562818
caucgaaggucacuaauga

SEQ ID NO: 1774986 - RNA, 19 nt, Artificial Sequence
  Description of Artificial Sequence: Synthetic oligonucleotide
  Antisense strand to SEQ ID NO: 1774985
ucauuagugaccuucgaug

SEQ ID NO: 1774987 - RNA, 19 nt, Artificial Sequence
  Description of Artificial Sequence: Synthetic oligonucleotide
  Sense strand starting at position 1029 of SEQ ID NO: 1562818
caguauaugccaggaacca

SEQ ID NO: 1774988 - RNA, 19 nt, Artificial Sequence
  Description of Artificial Sequence: Synthetic oligonucleotide
  Antisense strand to SEQ ID NO: 1774987
ugguuccuggcauauacug

SEQ ID NO: 1774989 - RNA, 19 nt, Artificial Sequence
  Description of Artificial Sequence: Synthetic oligonucleotide
  Sense strand starting at position 1030 of SEQ ID NO: 1562818
aguauaugccaggaaccau

SEQ ID NO: 1774990 - RNA, 19 nt, Artificial Sequence
  Description of Artificial Sequence: Synthetic oligonucleotide
  Antisense strand to SEQ ID NO: 1774989
augguuccuggcauauacu

SEQ ID NO: 1774991 - RNA, 19 nt, Artificial Sequence
  Description of Artificial Sequence: Synthetic oligonucleotide
  Sense strand starting at position 1098 of SEQ ID NO: 1562818
ggauauagauauuaggaua

SEQ ID NO: 1774992 - RNA, 19 nt, Artificial Sequence
  Description of Artificial Sequence: Synthetic oligonucleotide
  Antisense strand to SEQ ID NO: 1774991
uauccuaauaucuauaucc

SEQ ID NO: 1774993 - RNA, 19 nt, Artificial Sequence
  Description of Artificial Sequence: Synthetic oligonucleotide
  Sense strand starting at position 1154 of SEQ ID NO: 1562818
gagguugaguacuuuccca

SEQ ID NO: 1774994 - RNA, 19 nt, Artificial Sequence
  Description of Artificial Sequence: Synthetic oligonucleotide
  Antisense strand to SEQ ID NO: 1774993
ugggaaaguacucaaccuc

SEQ ID NO: 1774995 - RNA, 19 nt, Artificial Sequence
  Description of Artificial Sequence: Synthetic oligonucleotide
  Sense strand starting at position 1227 of SEQ ID NO: 1562818
ccuugaagagcaugucuua

SEQ ID NO: 1774996 - RNA, 19 nt, Artificial Sequence
  Description of Artificial Sequence: Synthetic oligonucleotide
  Antisense strand to SEQ ID NO: 1774995
uaagacaugcucuucaagg

SEQ ID NO: 1774997 - RNA, 19 nt, Artificial Sequence
  Description of Artificial Sequence: Synthetic oligonucleotide
  Sense strand starting at position 1266 of SEQ ID NO: 1562818
uuuaaugagcugugacucu

SEQ ID NO: 1774998 - RNA, 19 nt, Artificial Sequence
  Description of Artificial Sequence: Synthetic oligonucleotide
  Antisense strand to SEQ ID NO: 1774997
agagucacagcucauuaaa

SEQ ID NO: 1774999 - RNA, 19 nt, Artificial Sequence
  Description of Artificial Sequence: Synthetic oligonucleotide
  Sense strand starting at position 1316 of SEQ ID NO: 1562818
guccucauccuguaagaga

SEQ ID NO: 1775000 - RNA, 19 nt, Artificial Sequence
  Description of Artificial Sequence: Synthetic oligonucleotide
  Antisense strand to SEQ ID NO: 1774999
ucucuuacaggaugaggac

SEQ ID NO: 1775001 - RNA, 19 nt, Artificial Sequence
  Description of Artificial Sequence: Synthetic oligonucleotide
  Sense strand starting at position 1329 of SEQ ID NO: 1562818
aagagagguggcuguacaa

SEQ ID NO: 1775002 - RNA, 19 nt, Artificial Sequence
  Description of Artificial Sequence: Synthetic oligonucleotide
  Antisense strand to SEQ ID NO: 1775001
uuguacagccaccucucuu

SEQ ID NO: 1775003 - RNA, 19 nt, Artificial Sequence
  Description of Artificial Sequence: Synthetic oligonucleotide
  Sense strand starting at position 1364 of SEQ ID NO: 1562818
uguuaacucugacugucua

SEQ ID NO: 1775004 - RNA, 19 nt, Artificial Sequence
  Description of Artificial Sequence: Synthetic oligonucleotide
  Antisense strand to SEQ ID NO: 1775003
uagacagucagaguuaaca

SEQ ID NO: 1775005 - RNA, 19 nt, Artificial Sequence
  Description of Artificial Sequence: Synthetic oligonucleotide
  Sense strand starting at position 1365 of SEQ ID NO: 1562818
guuaacucugacugucuau

SEQ ID NO: 1775006 - RNA, 19 nt, Artificial Sequence
  Description of Artificial Sequence: Synthetic oligonucleotide
  Antisense strand to SEQ ID NO: 1775005
auagacagucagaguuaac

SEQ ID NO: 1775007 - RNA, 19 nt, Artificial Sequence
  Description of Artificial Sequence: Synthetic oligonucleotide
  Sense strand starting at position 1410 of SEQ ID NO: 1562818
cugagcauccuagguuuga

SEQ ID NO: 1775008 - RNA, 19 nt, Artificial Sequence
  Description of Artificial Sequence: Synthetic oligonucleotide
  Antisense strand to SEQ ID NO: 1775007
ucaaaccuaggaugcucag

SEQ ID NO: 1775009 - RNA, 19 nt, Artificial Sequence
  Description of Artificial Sequence: Synthetic oligonucleotide
  Sense strand starting at position 1411 of SEQ ID NO: 1562818
ugagcauccuagguuugau

SEQ ID NO: 1775010 - RNA, 19 nt, Artificial Sequence
  Description of Artificial Sequence: Synthetic oligonucleotide
  Antisense strand to SEQ ID NO: 1775009
aucaaaccuaggaugcuca

SEQ ID NO: 1775011 - RNA, 19 nt, Artificial Sequence
  Description of Artificial Sequence: Synthetic oligonucleotide
  Sense strand starting at position 1450 of SEQ ID NO: 1562818
cugacaucagccugaaaug

SEQ ID NO: 1775012 - RNA, 19 nt, Artificial Sequence
  Description of Artificial Sequence: Synthetic oligonucleotide
  Antisense strand to SEQ ID NO: 1775011
cauuucaggcugaugucag

SEQ ID NO: 1775013 - RNA, 19 nt, Artificial Sequence
  Description of Artificial Sequence: Synthetic oligonucleotide
  Sense strand starting at position 1595 of SEQ ID NO: 1562818
gcugaacacccuugaucuu

SEQ ID NO: 1775014 - RNA, 19 nt, Artificial Sequence
  Description of Artificial Sequence: Synthetic oligonucleotide
  Antisense strand to SEQ ID NO: 1775013
aagaucaaggguguucagc

SEQ ID NO: 1775015 - RNA, 19 nt, Artificial Sequence
  Description of Artificial Sequence: Synthetic oligonucleotide
  Sense strand starting at position 1867 of SEQ ID NO: 1562818
ugacaaagaucgcucaaug

SEQ ID NO: 1775016 - RNA, 19 nt, Artificial Sequence
  Description of Artificial Sequence: Synthetic oligonucleotide
  Antisense strand to SEQ ID NO: 1775015
cauugagcgaucuuuguca

SEQ ID NO: 1775017 - RNA, 19 nt, Artificial Sequence
  Description of Artificial Sequence: Synthetic oligonucleotide
  Sense strand starting at position 2038 of SEQ ID NO: 1562818
gugguugugcguguggaaa

SEQ ID NO: 1775018 - RNA, 19 nt, Artificial Sequence
  Description of Artificial Sequence: Synthetic oligonucleotide
  Antisense strand to SEQ ID NO: 1775017
uuuccacacgcacaaccac

SEQ ID NO: 1775019 - RNA, 19 nt, Artificial Sequence
  Description of Artificial Sequence: Synthetic oligonucleotide
  Sense strand starting at position 2417 of SEQ ID NO: 1562818
uugacauacuccuuugaga

SEQ ID NO: 1775020 - RNA, 19 nt, Artificial Sequence
  Description of Artificial Sequence: Synthetic oligonucleotide
  Antisense strand to SEQ ID NO: 1775019
ucucaaaggaguaugucaa

SEQ ID NO: 1775021 - RNA, 19 nt, Artificial Sequence
  Description of Artificial Sequence: Synthetic oligonucleotide
  Sense strand starting at position 2468 of SEQ ID NO: 1562818
guguaaguuccuguugcau

SEQ ID NO: 1775022 - RNA, 19 nt, Artificial Sequence
  Description of Artificial Sequence: Synthetic oligonucleotide
  Antisense strand to SEQ ID NO: 1775021
augcaacaggaacuuacac

SEQ ID NO: 1775023 - RNA, 19 nt, Artificial Sequence
  Description of Artificial Sequence: Synthetic oligonucleotide
  Sense strand starting at position 2898 of SEQ ID NO: 1562818
ggaggaugauuagccuuau

SEQ ID NO: 1775024 - RNA, 19 nt, Artificial Sequence
  Description of Artificial Sequence: Synthetic oligonucleotide
  Antisense strand to SEQ ID NO: 1775023
auaaggcuaaucauccucc

SEQ ID NO: 1775025 - RNA, 19 nt, Artificial Sequence
  Description of Artificial Sequence: Synthetic oligonucleotide
  Sense strand starting at position 2899 of SEQ ID NO: 1562818
gaggaugauuagccuuauc

SEQ ID NO: 1775026 - RNA, 19 nt, Artificial Sequence
  Description of Artificial Sequence: Synthetic oligonucleotide
  Antisense strand to SEQ ID NO: 1775025
gauaaggcuaaucauccuc

SEQ ID NO: 1775027 - RNA, 19 nt, Artificial Sequence
  Description of Artificial Sequence: Synthetic oligonucleotide
  Sense strand starting at position 3571 of SEQ ID NO: 1562818
ucccucucacagugauaga

SEQ ID NO: 1775028 - RNA, 19 nt, Artificial Sequence
  Description of Artificial Sequence: Synthetic oligonucleotide
  Antisense strand to SEQ ID NO: 1775027
ucuaucacugugagaggga

SEQ ID NO: 1775029 - RNA, 19 nt, Artificial Sequence
  Description of Artificial Sequence: Synthetic oligonucleotide
  Sense strand starting at position 3611 of SEQ ID NO: 1562818
cugcuacaugcugaggaua

SEQ ID NO: 1775030 - RNA, 19 nt, Artificial Sequence
  Description of Artificial Sequence: Synthetic oligonucleotide
  Antisense strand to SEQ ID NO: 1775029
uauccucagcauguagcag

SEQ ID NO: 1775031 - RNA, 19 nt, Artificial Sequence
  Description of Artificial Sequence: Synthetic oligonucleotide
  Sense strand starting at position 3683 of SEQ ID NO: 1562818
ggagauaacuaagaggaau

SEQ ID NO: 1775032 - RNA, 19 nt, Artificial Sequence
  Description of Artificial Sequence: Synthetic oligonucleotide
  Antisense strand to SEQ ID NO: 1775031
auuccucuuaguuaucucc

SEQ ID NO: 1775033 - RNA, 19 nt, Artificial Sequence
  Description of Artificial Sequence: Synthetic oligonucleotide
  Sense strand starting at position 3723 of SEQ ID NO: 1562818
uagugcuaugaucaaggua

SEQ ID NO: 1775034 - RNA, 19 nt, Artificial Sequence
  Description of Artificial Sequence: Synthetic oligonucleotide
  Antisense strand to SEQ ID NO: 1775033
uaccuugaucauagcacua

SEQ ID NO: 1775035 - RNA, 19 nt, Artificial Sequence
  Description of Artificial Sequence: Synthetic oligonucleotide
  Sense strand starting at position 3764 of SEQ ID NO: 1562818
ugcauaagacuauacaguu

SEQ ID NO: 1775036 - RNA, 19 nt, Artificial Sequence
  Description of Artificial Sequence: Synthetic oligonucleotide
  Antisense strand to SEQ ID NO: 1775035
aacuguauagucuuaugca

SEQ ID NO: 1775037 - RNA, 19 nt, Artificial Sequence
  Description of Artificial Sequence: Synthetic oligonucleotide
  Sense strand starting at position 3792 of SEQ ID NO: 1562818
gcugcuuggcaagauuaca

SEQ ID NO: 1775038 - RNA, 19 nt, Artificial Sequence
  Description of Artificial Sequence: Synthetic oligonucleotide
  Antisense strand to SEQ ID NO: 1775037
uguaaucuugccaagcagc

SEQ ID NO: 1775039 - RNA, 19 nt, Artificial Sequence
  Description of Artificial Sequence: Synthetic oligonucleotide
  Sense strand starting at position 3861 of SEQ ID NO: 1562818
agcugugggagaugagauu

SEQ ID NO: 1775040 - RNA, 19 nt, Artificial Sequence
  Description of Artificial Sequence: Synthetic oligonucleotide
  Antisense strand to SEQ ID NO: 1775039
aaucucaucucccacagcu

SEQ ID NO: 1775041 - RNA, 19 nt, Artificial Sequence
  Description of Artificial Sequence: Synthetic oligonucleotide
  Sense strand starting at position 3917 of SEQ ID NO: 1562818
ugcacuggauuugucagua

SEQ ID NO: 1775042 - RNA, 19 nt, Artificial Sequence
  Description of Artificial Sequence: Synthetic oligonucleotide
  Antisense strand to SEQ ID NO: 1775041
uacugacaaauccagugca

SEQ ID NO: 1775043 - RNA, 19 nt, Artificial Sequence
  Description of Artificial Sequence: Synthetic oligonucleotide
  Sense strand starting at position 39 of SEQ ID NO: 1562819
ggaggagcuuuccugguua

SEQ ID NO: 1775044 - RNA, 19 nt, Artificial Sequence
  Description of Artificial Sequence: Synthetic oligonucleotide
  Antisense strand to SEQ ID NO: 1775043
uaaccaggaaagcuccucc

SEQ ID NO: 1775045 - RNA, 19 nt, Artificial Sequence
  Description of Artificial Sequence: Synthetic oligonucleotide
  Sense strand starting at position 41 of SEQ ID NO: 1562819
aggagcuuuccugguuagu

SEQ ID NO: 1775046 - RNA, 19 nt, Artificial Sequence
  Description of Artificial Sequence: Synthetic oligonucleotide
  Antisense strand to SEQ ID NO: 1775045
acuaaccaggaaagcuccu

SEQ ID NO: 1775047 - RNA, 19 nt, Artificial Sequence
  Description of Artificial Sequence: Synthetic oligonucleotide
  Sense strand starting at position 43 of SEQ ID NO: 1562819
gagcuuuccugguuaguua

SEQ ID NO: 1775048 - RNA, 19 nt, Artificial Sequence
  Description of Artificial Sequence: Synthetic oligonucleotide
  Antisense strand to SEQ ID NO: 1775047
uaacuaaccaggaaagcuc

SEQ ID NO: 1775049 - RNA, 19 nt, Artificial Sequence
  Description of Artificial Sequence: Synthetic oligonucleotide
  Sense strand starting at position 146 of SEQ ID NO: 1562819
ggccauaucguugugcaca

SEQ ID NO: 1775050 - RNA, 19 nt, Artificial Sequence
  Description of Artificial Sequence: Synthetic oligonucleotide
  Antisense strand to SEQ ID NO: 1775049
ugugcacaacgauauggcc

SEQ ID NO: 1775051 - RNA, 19 nt, Artificial Sequence
  Description of Artificial Sequence: Synthetic oligonucleotide
  Sense strand starting at position 147 of SEQ ID NO: 1562819
gccauaucguugugcacaa

SEQ ID NO: 1775052 - RNA, 19 nt, Artificial Sequence
  Description of Artificial Sequence: Synthetic oligonucleotide
  Antisense strand to SEQ ID NO: 1775051
uugugcacaacgauauggc

SEQ ID NO: 1775053 - RNA, 19 nt, Artificial Sequence
  Description of Artificial Sequence: Synthetic oligonucleotide
  Sense strand starting at position 151 of SEQ ID NO: 1562819
uaucguugugcacaaguua

SEQ ID NO: 1775054 - RNA, 19 nt, Artificial Sequence
  Description of Artificial Sequence: Synthetic oligonucleotide
  Antisense strand to SEQ ID NO: 1775053
uaacuugugcacaacgaua

SEQ ID NO: 1775055 - RNA, 19 nt, Artificial Sequence
  Description of Artificial Sequence: Synthetic oligonucleotide
  Sense strand starting at position 438 of SEQ ID NO: 1562819
gcuggauuauaggcauuau

SEQ ID NO: 1775056 - RNA, 19 nt, Artificial Sequence
  Description of Artificial Sequence: Synthetic oligonucleotide
  Antisense strand to SEQ ID NO: 1775055
auaaugccuauaauccagc

SEQ ID NO: 1775057 - RNA, 19 nt, Artificial Sequence
  Description of Artificial Sequence: Synthetic oligonucleotide
  Sense strand starting at position 541 of SEQ ID NO: 1562819
augagagaauuaugugaau

SEQ ID NO: 1775058 - RNA, 19 nt, Artificial Sequence
  Description of Artificial Sequence: Synthetic oligonucleotide
  Antisense strand to SEQ ID NO: 1775057
auucacauaauucucucau

SEQ ID NO: 1775059 - RNA, 19 nt, Artificial Sequence
  Description of Artificial Sequence: Synthetic oligonucleotide
  Sense strand starting at position 595 of SEQ ID NO: 1562819
uaggguaagcagugaauga

SEQ ID NO: 1775060 - RNA, 19 nt, Artificial Sequence
  Description of Artificial Sequence: Synthetic oligonucleotide
  Antisense strand to SEQ ID NO: 1775059
ucauucacugcuuacccua

SEQ ID NO: 1775061 - RNA, 19 nt, Artificial Sequence
  Description of Artificial Sequence: Synthetic oligonucleotide
  Sense strand starting at position 599 of SEQ ID NO: 1562819
guaagcagugaaugaauau

SEQ ID NO: 1775062 - RNA, 19 nt, Artificial Sequence
  Description of Artificial Sequence: Synthetic oligonucleotide
  Antisense strand to SEQ ID NO: 1775061
auauucauucacugcuuac

SEQ ID NO: 1775063 - RNA, 19 nt, Artificial Sequence
  Description of Artificial Sequence: Synthetic oligonucleotide
  Sense strand starting at position 606 of SEQ ID NO: 1562819
gugaaugaauauuaugaug

SEQ ID NO: 1775064 - RNA, 19 nt, Artificial Sequence
  Description of Artificial Sequence: Synthetic oligonucleotide
  Antisense strand to SEQ ID NO: 1775063
caucauaauauucauucac

SEQ ID NO: 1775065 - RNA, 19 nt, Artificial Sequence
  Description of Artificial Sequence: Synthetic oligonucleotide
  Sense strand starting at position 611 of SEQ ID NO: 1562819
ugaauauuaugaugacgau

SEQ ID NO: 1775066 - RNA, 19 nt, Artificial Sequence
  Description of Artificial Sequence: Synthetic oligonucleotide
  Antisense strand to SEQ ID NO: 1775065
aucgucaucauaauauuca

SEQ ID NO: 1775067 - RNA, 19 nt, Artificial Sequence
  Description of Artificial Sequence: Synthetic oligonucleotide
  Sense strand starting at position 655 of SEQ ID NO: 1562819
uuuaauaucccugagucug

SEQ ID NO: 1775068 - RNA, 19 nt, Artificial Sequence
  Description of Artificial Sequence: Synthetic oligonucleotide
  Antisense strand to SEQ ID NO: 1775067
cagacucagggauauuaaa

SEQ ID NO: 1775069 - RNA, 19 nt, Artificial Sequence
  Description of Artificial Sequence: Synthetic oligonucleotide
  Sense strand starting at position 697 of SEQ ID NO: 1562819
guauuaaccucacaaggug

SEQ ID NO: 1775070 - RNA, 19 nt, Artificial Sequence
  Description of Artificial Sequence: Synthetic oligonucleotide
  Antisense strand to SEQ ID NO: 1775069
caccuugugagguuaauac

SEQ ID NO: 1775071 - RNA, 19 nt, Artificial Sequence
  Description of Artificial Sequence: Synthetic oligonucleotide
  Sense strand starting at position 711 of SEQ ID NO: 1562819
agguggugugaaggugaaa

SEQ ID NO: 1775072 - RNA, 19 nt, Artificial Sequence
  Description of Artificial Sequence: Synthetic oligonucleotide
  Antisense strand to SEQ ID NO: 1775071
uuucaccuucacaccaccu

SEQ ID NO: 1775073 - RNA, 19 nt, Artificial Sequence
  Description of Artificial Sequence: Synthetic oligonucleotide
  Sense strand starting at position 740 of SEQ ID NO: 1562819
gaucucaagugcuagcuua

SEQ ID NO: 1775074 - RNA, 19 nt, Artificial Sequence
  Description of Artificial Sequence: Synthetic oligonucleotide
  Antisense strand to SEQ ID NO: 1775073
uaagcuagcacuugagauc

SEQ ID NO: 1775075 - RNA, 19 nt, Artificial Sequence
  Description of Artificial Sequence: Synthetic oligonucleotide
  Sense strand starting at position 903 of SEQ ID NO: 1562819
gggugaaccugggaggauu

SEQ ID NO: 1775076 - RNA, 19 nt, Artificial Sequence
  Description of Artificial Sequence: Synthetic oligonucleotide
  Antisense strand to SEQ ID NO: 1775075
aauccucccagguucaccc

SEQ ID NO: 1775077 - RNA, 19 nt, Artificial Sequence
  Description of Artificial Sequence: Synthetic oligonucleotide
  Sense strand starting at position 1542 of SEQ ID NO: 1562819
ugauguaguuucucgacag

SEQ ID NO: 1775078 - RNA, 19 nt, Artificial Sequence
  Description of Artificial Sequence: Synthetic oligonucleotide
  Antisense strand to SEQ ID NO: 1775077
cugucgagaaacuacauca

SEQ ID NO: 1775079 - RNA, 19 nt, Artificial Sequence
  Description of Artificial Sequence: Synthetic oligonucleotide
  Sense strand starting at position 2137 of SEQ ID NO: 1562819
gagggacucaugcguuuac

SEQ ID NO: 1775080 - RNA, 19 nt, Artificial Sequence
  Description of Artificial Sequence: Synthetic oligonucleotide
  Antisense strand to SEQ ID NO: 1775079
guaaacgcaugagucccuc

SEQ ID NO: 1775081 - RNA, 19 nt, Artificial Sequence
  Description of Artificial Sequence: Synthetic oligonucleotide
  Sense strand starting at position 2141 of SEQ ID NO: 1562819
gacucaugcguuuacuuaa

SEQ ID NO: 1775082 - RNA, 19 nt, Artificial Sequence
  Description of Artificial Sequence: Synthetic oligonucleotide
  Antisense strand to SEQ ID NO: 1775081
uuaaguaaacgcaugaguc

SEQ ID NO: 1775083 - RNA, 19 nt, Artificial Sequence
  Description of Artificial Sequence: Synthetic oligonucleotide
  Sense strand starting at position 2144 of SEQ ID NO: 1562819
ucaugcguuuacuuaaaca

SEQ ID NO: 1775084 - RNA, 19 nt, Artificial Sequence
  Description of Artificial Sequence: Synthetic oligonucleotide
  Antisense strand to SEQ ID NO: 1775083
uguuuaaguaaacgcauga

SEQ ID NO: 1775085 - RNA, 19 nt, Artificial Sequence
  Description of Artificial Sequence: Synthetic oligonucleotide
  Sense strand starting at position 2200 of SEQ ID NO: 1562819
guggguccucaacagauau

SEQ ID NO: 1775086 - RNA, 19 nt, Artificial Sequence
  Description of Artificial Sequence: Synthetic oligonucleotide
  Antisense strand to SEQ ID NO: 1775085
auaucuguugaggacccac

SEQ ID NO: 1775087 - RNA, 19 nt, Artificial Sequence
  Description of Artificial Sequence: Synthetic oligonucleotide
  Sense strand starting at position 2688 of SEQ ID NO: 1562819
guugccaguucccaacuau

SEQ ID NO: 1775088 - RNA, 19 nt, Artificial Sequence
  Description of Artificial Sequence: Synthetic oligonucleotide
  Antisense strand to SEQ ID NO: 1775087
auaguugggaacuggcaac

SEQ ID NO: 1775089 - RNA, 19 nt, Artificial Sequence
  Description of Artificial Sequence: Synthetic oligonucleotide
  Sense strand starting at position 2775 of SEQ ID NO: 1562819
agaucuuuaugcuauugaa

SEQ ID NO: 1775090 - RNA, 19 nt, Artificial Sequence
  Description of Artificial Sequence: Synthetic oligonucleotide
  Antisense strand to SEQ ID NO: 1775089
uucaauagcauaaagaucu

SEQ ID NO: 1775091 - RNA, 19 nt, Artificial Sequence
  Description of Artificial Sequence: Synthetic oligonucleotide
  Sense strand starting at position 2790 of SEQ ID NO: 1562819
ugaacaaagccuugaaugu

SEQ ID NO: 1775092 - RNA, 19 nt, Artificial Sequence
  Description of Artificial Sequence: Synthetic oligonucleotide
  Antisense strand to SEQ ID NO: 1775091
acauucaaggcuuuguuca

SEQ ID NO: 1775093 - RNA, 19 nt, Artificial Sequence
  Description of Artificial Sequence: Synthetic oligonucleotide
  Sense strand starting at position 2852 of SEQ ID NO: 1562819
auggauagcugcucagaga

SEQ ID NO: 1775094 - RNA, 19 nt, Artificial Sequence
  Description of Artificial Sequence: Synthetic oligonucleotide
  Antisense strand to SEQ ID NO: 1775093
ucucugagcagcuauccau

SEQ ID NO: 1775095 - RNA, 19 nt, Artificial Sequence
  Description of Artificial Sequence: Synthetic oligonucleotide
  Sense strand starting at position 2853 of SEQ ID NO: 1562819
uggauagcugcucagagau

SEQ ID NO: 1775096 - RNA, 19 nt, Artificial Sequence
  Description of Artificial Sequence: Synthetic oligonucleotide
  Antisense strand to SEQ ID NO: 1775095
aucucugagcagcuaucca

SEQ ID NO: 1775097 - RNA, 19 nt, Artificial Sequence
  Description of Artificial Sequence: Synthetic oligonucleotide
  Sense strand starting at position 2855 of SEQ ID NO: 1562819
gauagcugcucagagauug

SEQ ID NO: 1775098 - RNA, 19 nt, Artificial Sequence
  Description of Artificial Sequence: Synthetic oligonucleotide
  Antisense strand to SEQ ID NO: 1775097
caaucucugagcagcuauc

SEQ ID NO: 1775099 - RNA, 19 nt, Artificial Sequence
  Description of Artificial Sequence: Synthetic oligonucleotide
  Sense strand starting at position 2860 of SEQ ID NO: 1562819
cugcucagagauugaguga

SEQ ID NO: 1775100 - RNA, 19 nt, Artificial Sequence
  Description of Artificial Sequence: Synthetic oligonucleotide
  Antisense strand to SEQ ID NO: 1775099
ucacucaaucucugagcag

SEQ ID NO: 1775101 - RNA, 19 nt, Artificial Sequence
  Description of Artificial Sequence: Synthetic oligonucleotide
  Sense strand starting at position 2869 of SEQ ID NO: 1562819
gauugagugacaggugguu

SEQ ID NO: 1775102 - RNA, 19 nt, Artificial Sequence
  Description of Artificial Sequence: Synthetic oligonucleotide
  Antisense strand to SEQ ID NO: 1775101
aaccaccugucacucaauc

SEQ ID NO: 1775103 - RNA, 19 nt, Artificial Sequence
  Description of Artificial Sequence: Synthetic oligonucleotide
  Sense strand starting at position 2878 of SEQ ID NO: 1562819
acaggugguuagugacaga

SEQ ID NO: 1775104 - RNA, 19 nt, Artificial Sequence
  Description of Artificial Sequence: Synthetic oligonucleotide
  Antisense strand to SEQ ID NO: 1775103
ucugucacuaaccaccugu

SEQ ID NO: 1775105 - RNA, 19 nt, Artificial Sequence
  Description of Artificial Sequence: Synthetic oligonucleotide
  Sense strand starting at position 2881 of SEQ ID NO: 1562819
ggugguuagugacagaaug

SEQ ID NO: 1775106 - RNA, 19 nt, Artificial Sequence
  Description of Artificial Sequence: Synthetic oligonucleotide
  Antisense strand to SEQ ID NO: 1775105
cauucugucacuaaccacc

SEQ ID NO: 1775107 - RNA, 19 nt, Artificial Sequence
  Description of Artificial Sequence: Synthetic oligonucleotide
  Sense strand starting at position 3106 of SEQ ID NO: 1562819
guggugggcgcuuauaguu

SEQ ID NO: 1775108 - RNA, 19 nt, Artificial Sequence
  Description of Artificial Sequence: Synthetic oligonucleotide
  Antisense strand to SEQ ID NO: 1775107
aacuauaagcgcccaccac

SEQ ID NO: 1775109 - RNA, 19 nt, Artificial Sequence
  Description of Artificial Sequence: Synthetic oligonucleotide
  Sense strand starting at position 3608 of SEQ ID NO: 1562819
gguuaagacgcauagagag

SEQ ID NO: 1775110 - RNA, 19 nt, Artificial Sequence
  Description of Artificial Sequence: Synthetic oligonucleotide
  Antisense strand to SEQ ID NO: 1775109
cucucuaugcgucuuaacc

SEQ ID NO: 1775111 - RNA, 19 nt, Artificial Sequence
  Description of Artificial Sequence: Synthetic oligonucleotide
  Sense strand starting at position 3722 of SEQ ID NO: 1562819
agcagaaucucuggaagcu

SEQ ID NO: 1775112 - RNA, 19 nt, Artificial Sequence
  Description of Artificial Sequence: Synthetic oligonucleotide
  Antisense strand to SEQ ID NO: 1775111
agcuuccagagauucugcu

SEQ ID NO: 1775113 - RNA, 19 nt, Artificial Sequence
  Description of Artificial Sequence: Synthetic oligonucleotide
  Sense strand starting at position 3754 of SEQ ID NO: 1562819
gcugguauuaccugacuga

SEQ ID NO: 1775114 - RNA, 19 nt, Artificial Sequence
  Description of Artificial Sequence: Synthetic oligonucleotide
  Antisense strand to SEQ ID NO: 1775113
ucagucagguaauaccagc

SEQ ID NO: 1775115 - RNA, 19 nt, Artificial Sequence
  Description of Artificial Sequence: Synthetic oligonucleotide
  Sense strand starting at position 3757 of SEQ ID NO: 1562819
gguauuaccugacugagcu

SEQ ID NO: 1775116 - RNA, 19 nt, Artificial Sequence
  Description of Artificial Sequence: Synthetic oligonucleotide
  Antisense strand to SEQ ID NO: 1775115
agcucagucagguaauacc

SEQ ID NO: 1775117 - RNA, 19 nt, Artificial Sequence
  Description of Artificial Sequence: Synthetic oligonucleotide
  Sense strand starting at position 3818 of SEQ ID NO: 1562819
cgagccaauccuuaugcau

SEQ ID NO: 1775118 - RNA, 19 nt, Artificial Sequence
  Description of Artificial Sequence: Synthetic oligonucleotide
  Antisense strand to SEQ ID NO: 1775117
augcauaaggauuggcucg

SEQ ID NO: 1775119 - RNA, 19 nt, Artificial Sequence
  Description of Artificial Sequence: Synthetic oligonucleotide
  Sense strand starting at position 3930 of SEQ ID NO: 1562819
ggaggugccuuugagaaac

SEQ ID NO: 1775120 - RNA, 19 nt, Artificial Sequence
  Description of Artificial Sequence: Synthetic oligonucleotide
  Antisense strand to SEQ ID NO: 1775119
guuucucaaaggcaccucc

SEQ ID NO: 1775121 - RNA, 19 nt, Artificial Sequence
  Description of Artificial Sequence: Synthetic oligonucleotide
  Sense strand starting at position 267 of SEQ ID NO: 1562820
ugggcuuugcucugagaac

SEQ ID NO: 1775122 - RNA, 19 nt, Artificial Sequence
  Description of Artificial Sequence: Synthetic oligonucleotide
  Antisense strand to SEQ ID NO: 1775121
guucucagagcaaagccca

SEQ ID NO: 1775123 - RNA, 19 nt, Artificial Sequence
  Description of Artificial Sequence: Synthetic oligonucleotide
  Sense strand starting at position 430 of SEQ ID NO: 1562820
ugagccaucugucuuggaa

SEQ ID NO: 1775124 - RNA, 19 nt, Artificial Sequence
  Description of Artificial Sequence: Synthetic oligonucleotide
  Antisense strand to SEQ ID NO: 1775123
uuccaagacagauggcuca

SEQ ID NO: 1775125 - RNA, 19 nt, Artificial Sequence
  Description of Artificial Sequence: Synthetic oligonucleotide
  Sense strand starting at position 433 of SEQ ID NO: 1562820
gccaucugucuuggaagga

SEQ ID NO: 1775126 - RNA, 19 nt, Artificial Sequence
  Description of Artificial Sequence: Synthetic oligonucleotide
  Antisense strand to SEQ ID NO: 1775125
uccuuccaagacagauggc

SEQ ID NO: 1775127 - RNA, 19 nt, Artificial Sequence
  Description of Artificial Sequence: Synthetic oligonucleotide
  Sense strand starting at position 496 of SEQ ID NO: 1562820
guugucugcagagauuacu

SEQ ID NO: 1775128 - RNA, 19 nt, Artificial Sequence
  Description of Artificial Sequence: Synthetic oligonucleotide
  Antisense strand to SEQ ID NO: 1775127
aguaaucucugcagacaac

SEQ ID NO: 1775129 - RNA, 19 nt, Artificial Sequence
  Description of Artificial Sequence: Synthetic oligonucleotide
  Sense strand starting at position 502 of SEQ ID NO: 1562820
ugcagagauuacucuguga

SEQ ID NO: 1775130 - RNA, 19 nt, Artificial Sequence
  Description of Artificial Sequence: Synthetic oligonucleotide
  Antisense strand to SEQ ID NO: 1775129
ucacagaguaaucucugca

SEQ ID NO: 1775131 - RNA, 19 nt, Artificial Sequence
  Description of Artificial Sequence: Synthetic oligonucleotide
  Sense strand starting at position 504 of SEQ ID NO: 1562820
cagagauuacucugugagc

SEQ ID NO: 1775132 - RNA, 19 nt, Artificial Sequence
  Description of Artificial Sequence: Synthetic oligonucleotide
  Antisense strand to SEQ ID NO: 1775131
gcucacagaguaaucucug

SEQ ID NO: 1775133 - RNA, 19 nt, Artificial Sequence
  Description of Artificial Sequence: Synthetic oligonucleotide
  Sense strand starting at position 646 of SEQ ID NO: 1562820
gagaucucugguuggaaac

SEQ ID NO: 1775134 - RNA, 19 nt, Artificial Sequence
  Description of Artificial Sequence: Synthetic oligonucleotide
  Antisense strand to SEQ ID NO: 1775133
guuuccaaccagagaucuc

SEQ ID NO: 1775135 - RNA, 19 nt, Artificial Sequence
  Description of Artificial Sequence: Synthetic oligonucleotide
  Sense strand starting at position 647 of SEQ ID NO: 1562820
agaucucugguuggaaacu

SEQ ID NO: 1775136 - RNA, 19 nt, Artificial Sequence
  Description of Artificial Sequence: Synthetic oligonucleotide
  Antisense strand to SEQ ID NO: 1775135
aguuuccaaccagagaucu

SEQ ID NO: 1775137 - RNA, 19 nt, Artificial Sequence
  Description of Artificial Sequence: Synthetic oligonucleotide
  Sense strand starting at position 656 of SEQ ID NO: 1562820
guuggaaacuguguacuga

SEQ ID NO: 1775138 - RNA, 19 nt, Artificial Sequence
  Description of Artificial Sequence: Synthetic oligonucleotide
  Antisense strand to SEQ ID NO: 1775137
ucaguacacaguuuccaac

SEQ ID NO: 1775139 - RNA, 19 nt, Artificial Sequence
  Description of Artificial Sequence: Synthetic oligonucleotide
  Sense strand starting at position 657 of SEQ ID NO: 1562820
uuggaaacuguguacugau

SEQ ID NO: 1775140 - RNA, 19 nt, Artificial Sequence
  Description of Artificial Sequence: Synthetic oligonucleotide
  Antisense strand to SEQ ID NO: 1775139
aucaguacacaguuuccaa

SEQ ID NO: 1775141 - RNA, 19 nt, Artificial Sequence
  Description of Artificial Sequence: Synthetic oligonucleotide
  Sense strand starting at position 670 of SEQ ID NO: 1562820
acugauucuugggcauauc

SEQ ID NO: 1775142 - RNA, 19 nt, Artificial Sequence
  Description of Artificial Sequence: Synthetic oligonucleotide
  Antisense strand to SEQ ID NO: 1775141
gauaugcccaagaaucagu

SEQ ID NO: 1775143 - RNA, 19 nt, Artificial Sequence
  Description of Artificial Sequence: Synthetic oligonucleotide
  Sense strand starting at position 679 of SEQ ID NO: 1562820
ugggcauaucuguggguga

SEQ ID NO: 1775144 - RNA, 19 nt, Artificial Sequence
  Description of Artificial Sequence: Synthetic oligonucleotide
  Antisense strand to SEQ ID NO: 1775143
ucacccacagauaugccca

SEQ ID NO: 1775145 - RNA, 19 nt, Artificial Sequence
  Description of Artificial Sequence: Synthetic oligonucleotide
  Sense strand starting at position 681 of SEQ ID NO: 1562820
ggcauaucugugggugacu

SEQ ID NO: 1775146 - RNA, 19 nt, Artificial Sequence
  Description of Artificial Sequence: Synthetic oligonucleotide
  Antisense strand to SEQ ID NO: 1775145
agucacccacagauaugcc

SEQ ID NO: 1775147 - RNA, 19 nt, Artificial Sequence
  Description of Artificial Sequence: Synthetic oligonucleotide
  Sense strand starting at position 779 of SEQ ID NO: 1562820
cuugauugguaucuucuga

SEQ ID NO: 1775148 - RNA, 19 nt, Artificial Sequence
  Description of Artificial Sequence: Synthetic oligonucleotide
  Antisense strand to SEQ ID NO: 1775147
ucagaagauaccaaucaag

SEQ ID NO: 1775149 - RNA, 19 nt, Artificial Sequence
  Description of Artificial Sequence: Synthetic oligonucleotide
  Sense strand starting at position 802 of SEQ ID NO: 1562820
gggcuucuugagugaagca

SEQ ID NO: 1775150 - RNA, 19 nt, Artificial Sequence
  Description of Artificial Sequence: Synthetic oligonucleotide
  Antisense strand to SEQ ID NO: 1775149
ugcuucacucaagaagccc

SEQ ID NO: 1775151 - RNA, 19 nt, Artificial Sequence
  Description of Artificial Sequence: Synthetic oligonucleotide
  Sense strand starting at position 824 of SEQ ID NO: 1562820
acagaaacugucuguugga

SEQ ID NO: 1775152 - RNA, 19 nt, Artificial Sequence
  Description of Artificial Sequence: Synthetic oligonucleotide
  Antisense strand to SEQ ID NO: 1775151
uccaacagacaguuucugu

SEQ ID NO: 1775153 - RNA, 19 nt, Artificial Sequence
  Description of Artificial Sequence: Synthetic oligonucleotide
  Sense strand starting at position 977 of SEQ ID NO: 1562820
cccucauggcucugugaag

SEQ ID NO: 1775154 - RNA, 19 nt, Artificial Sequence
  Description of Artificial Sequence: Synthetic oligonucleotide
  Antisense strand to SEQ ID NO: 1775153
cuucacagagccaugaggg

SEQ ID NO: 1775155 - RNA, 19 nt, Artificial Sequence
  Description of Artificial Sequence: Synthetic oligonucleotide
  Sense strand starting at position 1046 of SEQ ID NO: 1562820
ucaucauccaagugggagu

SEQ ID NO: 1775156 - RNA, 19 nt, Artificial Sequence
  Description of Artificial Sequence: Synthetic oligonucleotide
  Antisense strand to SEQ ID NO: 1775155
acucccacuuggaugauga

SEQ ID NO: 1775157 - RNA, 19 nt, Artificial Sequence
  Description of Artificial Sequence: Synthetic oligonucleotide
  Sense strand starting at position 1353 of SEQ ID NO: 1562820
ugauaaaguuucccaagca

SEQ ID NO: 1775158 - RNA, 19 nt, Artificial Sequence
  Description of Artificial Sequence: Synthetic oligonucleotide
  Antisense strand to SEQ ID NO: 1775157
ugcuugggaaacuuuauca

SEQ ID NO: 1775159 - RNA, 19 nt, Artificial Sequence
  Description of Artificial Sequence: Synthetic oligonucleotide
  Sense strand starting at position 2009 of SEQ ID NO: 1562820
gagagagcagcuuggcuua

SEQ ID NO: 1775160 - RNA, 19 nt, Artificial Sequence
  Description of Artificial Sequence: Synthetic oligonucleotide
  Antisense strand to SEQ ID NO: 1775159
uaagccaagcugcucucuc

SEQ ID NO: 1775161 - RNA, 19 nt, Artificial Sequence
  Description of Artificial Sequence: Synthetic oligonucleotide
  Sense strand starting at position 2072 of SEQ ID NO: 1562820
agaggaaacugugcacaua

SEQ ID NO: 1775162 - RNA, 19 nt, Artificial Sequence
  Description of Artificial Sequence: Synthetic oligonucleotide
  Antisense strand to SEQ ID NO: 1775161
uaugugcacaguuuccucu

SEQ ID NO: 1775163 - RNA, 19 nt, Artificial Sequence
  Description of Artificial Sequence: Synthetic oligonucleotide
  Sense strand starting at position 2082 of SEQ ID NO: 1562820
gugcacauagcuugggaau

SEQ ID NO: 1775164 - RNA, 19 nt, Artificial Sequence
  Description of Artificial Sequence: Synthetic oligonucleotide
  Antisense strand to SEQ ID NO: 1775163
auucccaagcuaugugcac

SEQ ID NO: 1775165 - RNA, 19 nt, Artificial Sequence
  Description of Artificial Sequence: Synthetic oligonucleotide
  Sense strand starting at position 2334 of SEQ ID NO: 1562820
ugggaucugccuggaccaa

SEQ ID NO: 1775166 - RNA, 19 nt, Artificial Sequence
  Description of Artificial Sequence: Synthetic oligonucleotide
  Antisense strand to SEQ ID NO: 1775165
uugguccaggcagauccca

SEQ ID NO: 1775167 - RNA, 19 nt, Artificial Sequence
  Description of Artificial Sequence: Synthetic oligonucleotide
  Sense strand starting at position 2352 of SEQ ID NO: 1562820
agcucacagagguguuauu

SEQ ID NO: 1775168 - RNA, 19 nt, Artificial Sequence
  Description of Artificial Sequence: Synthetic oligonucleotide
  Antisense strand to SEQ ID NO: 1775167
aauaacaccucugugagcu

SEQ ID NO: 1775169 - RNA, 19 nt, Artificial Sequence
  Description of Artificial Sequence: Synthetic oligonucleotide
  Sense strand starting at position 2381 of SEQ ID NO: 1562820
cucugaggucccugagguu

SEQ ID NO: 1775170 - RNA, 19 nt, Artificial Sequence
  Description of Artificial Sequence: Synthetic oligonucleotide
  Antisense strand to SEQ ID NO: 1775169
aaccucagggaccucagag

SEQ ID NO: 1775171 - RNA, 19 nt, Artificial Sequence
  Description of Artificial Sequence: Synthetic oligonucleotide
  Sense strand starting at position 2393 of SEQ ID NO: 1562820
ugagguuuggccugggacu

SEQ ID NO: 1775172 - RNA, 19 nt, Artificial Sequence
  Description of Artificial Sequence: Synthetic oligonucleotide
  Antisense strand to SEQ ID NO: 1775171
agucccaggccaaaccuca

SEQ ID NO: 1775173 - RNA, 19 nt, Artificial Sequence
  Description of Artificial Sequence: Synthetic oligonucleotide
  Sense strand starting at position 2406 of SEQ ID NO: 1562820
gggacucuuugagacaaau

SEQ ID NO: 1775174 - RNA, 19 nt, Artificial Sequence
  Description of Artificial Sequence: Synthetic oligonucleotide
  Antisense strand to SEQ ID NO: 1775173
auuugucucaaagaguccc

SEQ ID NO: 1775175 - RNA, 19 nt, Artificial Sequence
  Description of Artificial Sequence: Synthetic oligonucleotide
  Sense strand starting at position 2419 of SEQ ID NO: 1562820
acaaauaucugagcaugau

SEQ ID NO: 1775176 - RNA, 19 nt, Artificial Sequence
  Description of Artificial Sequence: Synthetic oligonucleotide
  Antisense strand to SEQ ID NO: 1775175
aucaugcucagauauuugu

SEQ ID NO: 1775177 - RNA, 19 nt, Artificial Sequence
  Description of Artificial Sequence: Synthetic oligonucleotide
  Sense strand starting at position 2593 of SEQ ID NO: 1562820
cgggcagaucccuacaugu

SEQ ID NO: 1775178 - RNA, 19 nt, Artificial Sequence
  Description of Artificial Sequence: Synthetic oligonucleotide
  Antisense strand to SEQ ID NO: 1775177
acauguagggaucugcccg

SEQ ID NO: 1775179 - RNA, 19 nt, Artificial Sequence
  Description of Artificial Sequence: Synthetic oligonucleotide
  Sense strand starting at position 2595 of SEQ ID NO: 1562820
ggcagaucccuacaugugu

SEQ ID NO: 1775180 - RNA, 19 nt, Artificial Sequence
  Description of Artificial Sequence: Synthetic oligonucleotide
  Antisense strand to SEQ ID NO: 1775179
acacauguagggaucugcc

SEQ ID NO: 1775181 - RNA, 19 nt, Artificial Sequence
  Description of Artificial Sequence: Synthetic oligonucleotide
  Sense strand starting at position 2602 of SEQ ID NO: 1562820
cccuacauguguccucuau

SEQ ID NO: 1775182 - RNA, 19 nt, Artificial Sequence
  Description of Artificial Sequence: Synthetic oligonucleotide
  Antisense strand to SEQ ID NO: 1775181
auagaggacacauguaggg

SEQ ID NO: 1775183 - RNA, 19 nt, Artificial Sequence
  Description of Artificial Sequence: Synthetic oligonucleotide
  Sense strand starting at position 2604 of SEQ ID NO: 1562820
cuacauguguccucuaucu

SEQ ID NO: 1775184 - RNA, 19 nt, Artificial Sequence
  Description of Artificial Sequence: Synthetic oligonucleotide
  Antisense strand to SEQ ID NO: 1775183
agauagaggacacauguag

SEQ ID NO: 1775185 - RNA, 19 nt, Artificial Sequence
  Description of Artificial Sequence: Synthetic oligonucleotide
  Sense strand starting at position 2606 of SEQ ID NO: 1562820
acauguguccucuaucuug

SEQ ID NO: 1775186 - RNA, 19 nt, Artificial Sequence
  Description of Artificial Sequence: Synthetic oligonucleotide
  Antisense strand to SEQ ID NO: 1775185
caagauagaggacacaugu

SEQ ID NO: 1775187 - RNA, 19 nt, Artificial Sequence
  Description of Artificial Sequence: Synthetic oligonucleotide
  Sense strand starting at position 2735 of SEQ ID NO: 1562820
gggauaaagucccuguccu

SEQ ID NO: 1775188 - RNA, 19 nt, Artificial Sequence
  Description of Artificial Sequence: Synthetic oligonucleotide
  Antisense strand to SEQ ID NO: 1775187
aggacagggacuuuauccc

SEQ ID NO: 1775189 - RNA, 19 nt, Artificial Sequence
  Description of Artificial Sequence: Synthetic oligonucleotide
  Sense strand starting at position 2736 of SEQ ID NO: 1562820
ggauaaagucccuguccuc

SEQ ID NO: 1775190 - RNA, 19 nt, Artificial Sequence
  Description of Artificial Sequence: Synthetic oligonucleotide
  Antisense strand to SEQ ID NO: 1775189
gaggacagggacuuuaucc

SEQ ID NO: 1775191 - RNA, 19 nt, Artificial Sequence
  Description of Artificial Sequence: Synthetic oligonucleotide
  Sense strand starting at position 2745 of SEQ ID NO: 1562820
cccuguccucaugaagauu

SEQ ID NO: 1775192 - RNA, 19 nt, Artificial Sequence
  Description of Artificial Sequence: Synthetic oligonucleotide
  Antisense strand to SEQ ID NO: 1775191
aaucuucaugaggacaggg

SEQ ID NO: 1775193 - RNA, 19 nt, Artificial Sequence
  Description of Artificial Sequence: Synthetic oligonucleotide
  Sense strand starting at position 2991 of SEQ ID NO: 1562820
cauuccuggcuguggaaau

SEQ ID NO: 1775194 - RNA, 19 nt, Artificial Sequence
  Description of Artificial Sequence: Synthetic oligonucleotide
  Antisense strand to SEQ ID NO: 1775193
auuuccacagccaggaaug

SEQ ID NO: 1775195 - RNA, 19 nt, Artificial Sequence
  Description of Artificial Sequence: Synthetic oligonucleotide
  Sense strand starting at position 3004 of SEQ ID NO: 1562820
ggaaaucgccagugcaaag

SEQ ID NO: 1775196 - RNA, 19 nt, Artificial Sequence
  Description of Artificial Sequence: Synthetic oligonucleotide
  Antisense strand to SEQ ID NO: 1775195
cuuugcacuggcgauuucc

SEQ ID NO: 1775197 - RNA, 19 nt, Artificial Sequence
  Description of Artificial Sequence: Synthetic oligonucleotide
  Sense strand starting at position 3034 of SEQ ID NO: 1562820
ggaagugugcagggugauu

SEQ ID NO: 1775198 - RNA, 19 nt, Artificial Sequence
  Description of Artificial Sequence: Synthetic oligonucleotide
  Antisense strand to SEQ ID NO: 1775197
aaucacccugcacacuucc

SEQ ID NO: 1775199 - RNA, 19 nt, Artificial Sequence
  Description of Artificial Sequence: Synthetic oligonucleotide
  Sense strand starting at position 3825 of SEQ ID NO: 1562820
gaggaagcaugcuuagaaa

SEQ ID NO: 1775200 - RNA, 19 nt, Artificial Sequence
  Description of Artificial Sequence: Synthetic oligonucleotide
  Antisense strand to SEQ ID NO: 1775199
uuucuaagcaugcuuccuc

SEQ ID NO: 1775201 - RNA, 19 nt, Artificial Sequence
  Description of Artificial Sequence: Synthetic oligonucleotide
  Sense strand starting at position 14 of SEQ ID NO: 1562821
cagagcaucccaugugacu

SEQ ID NO: 1775202 - RNA, 19 nt, Artificial Sequence
  Description of Artificial Sequence: Synthetic oligonucleotide
  Antisense strand to SEQ ID NO: 1775201
agucacaugggaugcucug

SEQ ID NO: 1775203 - RNA, 19 nt, Artificial Sequence
  Description of Artificial Sequence: Synthetic oligonucleotide
  Sense strand starting at position 119 of SEQ ID NO: 1562821
cccuuauguccaggagcca

SEQ ID NO: 1775204 - RNA, 19 nt, Artificial Sequence
  Description of Artificial Sequence: Synthetic oligonucleotide
  Antisense strand to SEQ ID NO: 1775203
uggcuccuggacauaaggg

SEQ ID NO: 1775205 - RNA, 19 nt, Artificial Sequence
  Description of Artificial Sequence: Synthetic oligonucleotide
  Sense strand starting at position 323 of SEQ ID NO: 1562821
ggaaaugaccaccguggaa

SEQ ID NO: 1775206 - RNA, 19 nt, Artificial Sequence
  Description of Artificial Sequence: Synthetic oligonucleotide
  Antisense strand to SEQ ID NO: 1775205
uuccacgguggucauuucc

SEQ ID NO: 1775207 - RNA, 19 nt, Artificial Sequence
  Description of Artificial Sequence: Synthetic oligonucleotide
  Sense strand starting at position 336 of SEQ ID NO: 1562821
guggaaguuaucuguuggu

SEQ ID NO: 1775208 - RNA, 19 nt, Artificial Sequence
  Description of Artificial Sequence: Synthetic oligonucleotide
  Antisense strand to SEQ ID NO: 1775207
accaacagauaacuuccac

SEQ ID NO: 1775209 - RNA, 19 nt, Artificial Sequence
  Description of Artificial Sequence: Synthetic oligonucleotide
  Sense strand starting at position 380 of SEQ ID NO: 1562821
ggagcuucucuaggacaag

SEQ ID NO: 1775210 - RNA, 19 nt, Artificial Sequence
  Description of Artificial Sequence: Synthetic oligonucleotide
  Antisense strand to SEQ ID NO: 1775209
cuuguccuagagaagcucc

SEQ ID NO: 1775211 - RNA, 19 nt, Artificial Sequence
  Description of Artificial Sequence: Synthetic oligonucleotide
  Sense strand starting at position 381 of SEQ ID NO: 1562821
gagcuucucuaggacaaga

SEQ ID NO: 1775212 - RNA, 19 nt, Artificial Sequence
  Description of Artificial Sequence: Synthetic oligonucleotide
  Antisense strand to SEQ ID NO: 1775211
ucuuguccuagagaagcuc

SEQ ID NO: 1775213 - RNA, 19 nt, Artificial Sequence
  Description of Artificial Sequence: Synthetic oligonucleotide
  Sense strand starting at position 452 of SEQ ID NO: 1562821
ucagcugcugcaugaguaa

SEQ ID NO: 1775214 - RNA, 19 nt, Artificial Sequence
  Description of Artificial Sequence: Synthetic oligonucleotide
  Antisense strand to SEQ ID NO: 1775213
uuacucaugcagcagcuga

SEQ ID NO: 1775215 - RNA, 19 nt, Artificial Sequence
  Description of Artificial Sequence: Synthetic oligonucleotide
  Sense strand starting at position 532 of SEQ ID NO: 1562821
ggaagucacucagcuaaua

SEQ ID NO: 1775216 - RNA, 19 nt, Artificial Sequence
  Description of Artificial Sequence: Synthetic oligonucleotide
  Antisense strand to SEQ ID NO: 1775215
uauuagcugagugacuucc

SEQ ID NO: 1775217 - RNA, 19 nt, Artificial Sequence
  Description of Artificial Sequence: Synthetic oligonucleotide
  Sense strand starting at position 573 of SEQ ID NO: 1562821
accucauguucucugcauu

SEQ ID NO: 1775218 - RNA, 19 nt, Artificial Sequence
  Description of Artificial Sequence: Synthetic oligonucleotide
  Antisense strand to SEQ ID NO: 1775217
aaugcagagaacaugaggu

SEQ ID NO: 1775219 - RNA, 19 nt, Artificial Sequence
  Description of Artificial Sequence: Synthetic oligonucleotide
  Sense strand starting at position 574 of SEQ ID NO: 1562821
ccucauguucucugcauuu

SEQ ID NO: 1775220 - RNA, 19 nt, Artificial Sequence
  Description of Artificial Sequence: Synthetic oligonucleotide
  Antisense strand to SEQ ID NO: 1775219
aaaugcagagaacaugagg

SEQ ID NO: 1775221 - RNA, 19 nt, Artificial Sequence
  Description of Artificial Sequence: Synthetic oligonucleotide
  Sense strand starting at position 622 of SEQ ID NO: 1562821
ugagaauucucaugauguc

SEQ ID NO: 1775222 - RNA, 19 nt, Artificial Sequence
  Description of Artificial Sequence: Synthetic oligonucleotide
  Antisense strand to SEQ ID NO: 1775221
gacaucaugagaauucuca

SEQ ID NO: 1775223 - RNA, 19 nt, Artificial Sequence
  Description of Artificial Sequence: Synthetic oligonucleotide
  Sense strand starting at position 632 of SEQ ID NO: 1562821
caugaugucacaggucgua

SEQ ID NO: 1775224 - RNA, 19 nt, Artificial Sequence
  Description of Artificial Sequence: Synthetic oligonucleotide
  Antisense strand to SEQ ID NO: 1775223
uacgaccugugacaucaug

SEQ ID NO: 1775225 - RNA, 19 nt, Artificial Sequence
  Description of Artificial Sequence: Synthetic oligonucleotide
  Sense strand starting at position 635 of SEQ ID NO: 1562821
gaugucacaggucguacaa

SEQ ID NO: 1775226 - RNA, 19 nt, Artificial Sequence
  Description of Artificial Sequence: Synthetic oligonucleotide
  Antisense strand to SEQ ID NO: 1775225
uuguacgaccugugacauc

SEQ ID NO: 1775227 - RNA, 19 nt, Artificial Sequence
  Description of Artificial Sequence: Synthetic oligonucleotide
  Sense strand starting at position 645 of SEQ ID NO: 1562821
gucguacaaucaccuagaa

SEQ ID NO: 1775228 - RNA, 19 nt, Artificial Sequence
  Description of Artificial Sequence: Synthetic oligonucleotide
  Antisense strand to SEQ ID NO: 1775227
uucuaggugauuguacgac

SEQ ID NO: 1775229 - RNA, 19 nt, Artificial Sequence
  Description of Artificial Sequence: Synthetic oligonucleotide
  Sense strand starting at position 729 of SEQ ID NO: 1562821
gugcucaaucaaugaaggu

SEQ ID NO: 1775230 - RNA, 19 nt, Artificial Sequence
  Description of Artificial Sequence: Synthetic oligonucleotide
  Antisense strand to SEQ ID NO: 1775229
accuucauugauugagcac

SEQ ID NO: 1775231 - RNA, 19 nt, Artificial Sequence
  Description of Artificial Sequence: Synthetic oligonucleotide
  Sense strand starting at position 744 of SEQ ID NO: 1562821
aggugcaagacugguauaa

SEQ ID NO: 1775232 - RNA, 19 nt, Artificial Sequence
  Description of Artificial Sequence: Synthetic oligonucleotide
  Antisense strand to SEQ ID NO: 1775231
uuauaccagucuugcaccu

SEQ ID NO: 1775233 - RNA, 19 nt, Artificial Sequence
  Description of Artificial Sequence: Synthetic oligonucleotide
  Sense strand starting at position 746 of SEQ ID NO: 1562821
gugcaagacugguauaaau

SEQ ID NO: 1775234 - RNA, 19 nt, Artificial Sequence
  Description of Artificial Sequence: Synthetic oligonucleotide
  Antisense strand to SEQ ID NO: 1775233
auuuauaccagucuugcac

SEQ ID NO: 1775235 - RNA, 19 nt, Artificial Sequence
  Description of Artificial Sequence: Synthetic oligonucleotide
  Sense strand starting at position 784 of SEQ ID NO: 1562821
agugaauccuaacugccau

SEQ ID NO: 1775236 - RNA, 19 nt, Artificial Sequence
  Description of Artificial Sequence: Synthetic oligonucleotide
  Antisense strand to SEQ ID NO: 1775235
auggcaguuaggauucacu

SEQ ID NO: 1775237 - RNA, 19 nt, Artificial Sequence
  Description of Artificial Sequence: Synthetic oligonucleotide
  Sense strand starting at position 821 of SEQ ID NO: 1562821
cagggaacuugaguuugua

SEQ ID NO: 1775238 - RNA, 19 nt, Artificial Sequence
  Description of Artificial Sequence: Synthetic oligonucleotide
  Antisense strand to SEQ ID NO: 1775237
uacaaacucaaguucccug

SEQ ID NO: 1775239 - RNA, 19 nt, Artificial Sequence
  Description of Artificial Sequence: Synthetic oligonucleotide
  Sense strand starting at position 825 of SEQ ID NO: 1562821
gaacuugaguuuguaaggu

SEQ ID NO: 1775240 - RNA, 19 nt, Artificial Sequence
  Description of Artificial Sequence: Synthetic oligonucleotide
  Antisense strand to SEQ ID NO: 1775239
accuuacaaacucaaguuc

SEQ ID NO: 1775241 - RNA, 19 nt, Artificial Sequence
  Description of Artificial Sequence: Synthetic oligonucleotide
  Sense strand starting at position 834 of SEQ ID NO: 1562821
uuuguaaggucucagacau

SEQ ID NO: 1775242 - RNA, 19 nt, Artificial Sequence
  Description of Artificial Sequence: Synthetic oligonucleotide
  Antisense strand to SEQ ID NO: 1775241
augucugagaccuuacaaa

SEQ ID NO: 1775243 - RNA, 19 nt, Artificial Sequence
  Description of Artificial Sequence: Synthetic oligonucleotide
  Sense strand starting at position 840 of SEQ ID NO: 1562821
aggucucagacaugacaug

SEQ ID NO: 1775244 - RNA, 19 nt, Artificial Sequence
  Description of Artificial Sequence: Synthetic oligonucleotide
  Antisense strand to SEQ ID NO: 1775243
caugucaugucugagaccu

SEQ ID NO: 1775245 - RNA, 19 nt, Artificial Sequence
  Description of Artificial Sequence: Synthetic oligonucleotide
  Sense strand starting at position 885 of SEQ ID NO: 1562821
ggaacaagaucuggauaaa

SEQ ID NO: 1775246 - RNA, 19 nt, Artificial Sequence
  Description of Artificial Sequence: Synthetic oligonucleotide
  Antisense strand to SEQ ID NO: 1775245
uuuauccagaucuuguucc

SEQ ID NO: 1775247 - RNA, 19 nt, Artificial Sequence
  Description of Artificial Sequence: Synthetic oligonucleotide
  Sense strand starting at position 952 of SEQ ID NO: 1562821
acaggugacucacccagaa

SEQ ID NO: 1775248 - RNA, 19 nt, Artificial Sequence
  Description of Artificial Sequence: Synthetic oligonucleotide
  Antisense strand to SEQ ID NO: 1775247
uucugggugagucaccugu

SEQ ID NO: 1775249 - RNA, 19 nt, Artificial Sequence
  Description of Artificial Sequence: Synthetic oligonucleotide
  Sense strand starting at position 956 of SEQ ID NO: 1562821
gugacucacccagaaguua

SEQ ID NO: 1775250 - RNA, 19 nt, Artificial Sequence
  Description of Artificial Sequence: Synthetic oligonucleotide
  Antisense strand to SEQ ID NO: 1775249
uaacuucugggugagucac

SEQ ID NO: 1775251 - RNA, 19 nt, Artificial Sequence
  Description of Artificial Sequence: Synthetic oligonucleotide
  Sense strand starting at position 1350 of SEQ ID NO: 1562821
gccuuauaccaaggcguga

SEQ ID NO: 1775252 - RNA, 19 nt, Artificial Sequence
  Description of Artificial Sequence: Synthetic oligonucleotide
  Antisense strand to SEQ ID NO: 1775251
ucacgccuugguauaaggc

SEQ ID NO: 1775253 - RNA, 19 nt, Artificial Sequence
  Description of Artificial Sequence: Synthetic oligonucleotide
  Sense strand starting at position 2097 of SEQ ID NO: 1562821
cugucugccgaagaugauu

SEQ ID NO: 1775254 - RNA, 19 nt, Artificial Sequence
  Description of Artificial Sequence: Synthetic oligonucleotide
  Antisense strand to SEQ ID NO: 1775253
aaucaucuucggcagacag

SEQ ID NO: 1775255 - RNA, 19 nt, Artificial Sequence
  Description of Artificial Sequence: Synthetic oligonucleotide
  Sense strand starting at position 2105 of SEQ ID NO: 1562821
cgaagaugauuggcugcaa

SEQ ID NO: 1775256 - RNA, 19 nt, Artificial Sequence
  Description of Artificial Sequence: Synthetic oligonucleotide
  Antisense strand to SEQ ID NO: 1775255
uugcagccaaucaucuucg

SEQ ID NO: 1775257 - RNA, 19 nt, Artificial Sequence
  Description of Artificial Sequence: Synthetic oligonucleotide
  Sense strand starting at position 2106 of SEQ ID NO: 1562821
gaagaugauuggcugcaaa

SEQ ID NO: 1775258 - RNA, 19 nt, Artificial Sequence
  Description of Artificial Sequence: Synthetic oligonucleotide
  Antisense strand to SEQ ID NO: 1775257
uuugcagccaaucaucuuc

SEQ ID NO: 1775259 - RNA, 19 nt, Artificial Sequence
  Description of Artificial Sequence: Synthetic oligonucleotide
  Sense strand starting at position 2165 of SEQ ID NO: 1562821
ggaacaauuuggcgcgaaa

SEQ ID NO: 1775260 - RNA, 19 nt, Artificial Sequence
  Description of Artificial Sequence: Synthetic oligonucleotide
  Antisense strand to SEQ ID NO: 1775259
uuucgcgccaaauuguucc

SEQ ID NO: 1775261 - RNA, 19 nt, Artificial Sequence
  Description of Artificial Sequence: Synthetic oligonucleotide
  Sense strand starting at position 2167 of SEQ ID NO: 1562821
aacaauuuggcgcgaaacu

SEQ ID NO: 1775262 - RNA, 19 nt, Artificial Sequence
  Description of Artificial Sequence: Synthetic oligonucleotide
  Antisense strand to SEQ ID NO: 1775261
aguuucgcgccaaauuguu

SEQ ID NO: 1775263 - RNA, 19 nt, Artificial Sequence
  Description of Artificial Sequence: Synthetic oligonucleotide
  Sense strand starting at position 2179 of SEQ ID NO: 1562821
cgaaacuucuggcugggaa

SEQ ID NO: 1775264 - RNA, 19 nt, Artificial Sequence
  Description of Artificial Sequence: Synthetic oligonucleotide
  Antisense strand to SEQ ID NO: 1775263
uucccagccagaaguuucg

SEQ ID NO: 1775265 - RNA, 19 nt, Artificial Sequence
  Description of Artificial Sequence: Synthetic oligonucleotide
  Sense strand starting at position 2180 of SEQ ID NO: 1562821
gaaacuucuggcugggaag

SEQ ID NO: 1775266 - RNA, 19 nt, Artificial Sequence
  Description of Artificial Sequence: Synthetic oligonucleotide
  Antisense strand to SEQ ID NO: 1775265
cuucccagccagaaguuuc

SEQ ID NO: 1775267 - RNA, 19 nt, Artificial Sequence
  Description of Artificial Sequence: Synthetic oligonucleotide
  Sense strand starting at position 2428 of SEQ ID NO: 1562821
accacagguguacgugauu

SEQ ID NO: 1775268 - RNA, 19 nt, Artificial Sequence
  Description of Artificial Sequence: Synthetic oligonucleotide
  Antisense strand to SEQ ID NO: 1775267
aaucacguacaccuguggu

SEQ ID NO: 1775269 - RNA, 19 nt, Artificial Sequence
  Description of Artificial Sequence: Synthetic oligonucleotide
  Sense strand starting at position 2701 of SEQ ID NO: 1562821
gacugugcccuguggagua

SEQ ID NO: 1775270 - RNA, 19 nt, Artificial Sequence
  Description of Artificial Sequence: Synthetic oligonucleotide
  Antisense strand to SEQ ID NO: 1775269
uacuccacagggcacaguc

SEQ ID NO: 1775271 - RNA, 19 nt, Artificial Sequence
  Description of Artificial Sequence: Synthetic oligonucleotide
  Sense strand starting at position 2714 of SEQ ID NO: 1562821
ggaguauucgcuucccggu

SEQ ID NO: 1775272 - RNA, 19 nt, Artificial Sequence
  Description of Artificial Sequence: Synthetic oligonucleotide
  Antisense strand to SEQ ID NO: 1775271
accgggaagcgaauacucc

SEQ ID NO: 1775273 - RNA, 19 nt, Artificial Sequence
  Description of Artificial Sequence: Synthetic oligonucleotide
  Sense strand starting at position 3167 of SEQ ID NO: 1562821
gccucauucuguuuaacag

SEQ ID NO: 1775274 - RNA, 19 nt, Artificial Sequence
  Description of Artificial Sequence: Synthetic oligonucleotide
  Antisense strand to SEQ ID NO: 1775273
cuguuaaacagaaugaggc

SEQ ID NO: 1775275 - RNA, 19 nt, Artificial Sequence
  Description of Artificial Sequence: Synthetic oligonucleotide
  Sense strand starting at position 3197 of SEQ ID NO: 1562821
ucuguaguauggugacaaa

SEQ ID NO: 1775276 - RNA, 19 nt, Artificial Sequence
  Description of Artificial Sequence: Synthetic oligonucleotide
  Antisense strand to SEQ ID NO: 1775275
uuugucaccauacuacaga

SEQ ID NO: 1775277 - RNA, 19 nt, Artificial Sequence
  Description of Artificial Sequence: Synthetic oligonucleotide
  Sense strand starting at position 3200 of SEQ ID NO: 1562821
guaguauggugacaaagac

SEQ ID NO: 1775278 - RNA, 19 nt, Artificial Sequence
  Description of Artificial Sequence: Synthetic oligonucleotide
  Antisense strand to SEQ ID NO: 1775277
gucuuugucaccauacuac

SEQ ID NO: 1775279 - RNA, 19 nt, Artificial Sequence
  Description of Artificial Sequence: Synthetic oligonucleotide
  Sense strand starting at position 3857 of SEQ ID NO: 1562821
gagcgagacucaucucuaa

SEQ ID NO: 1775280 - RNA, 19 nt, Artificial Sequence
  Description of Artificial Sequence: Synthetic oligonucleotide
  Antisense strand to SEQ ID NO: 1775279
uuagagaugagucucgcuc

SEQ ID NO: 1775281 - RNA, 19 nt, Artificial Sequence
  Description of Artificial Sequence: Synthetic oligonucleotide
  Sense strand starting at position 28 of SEQ ID NO: 1562822
aguuucuaccacugucuaa

SEQ ID NO: 1775282 - RNA, 19 nt, Artificial Sequence
  Description of Artificial Sequence: Synthetic oligonucleotide
  Antisense strand to SEQ ID NO: 1775281
uuagacagugguagaaacu

SEQ ID NO: 1775283 - RNA, 19 nt, Artificial Sequence
  Description of Artificial Sequence: Synthetic oligonucleotide
  Sense strand starting at position 117 of SEQ ID NO: 1562822
gugagcuagcagugagaau

SEQ ID NO: 1775284 - RNA, 19 nt, Artificial Sequence
  Description of Artificial Sequence: Synthetic oligonucleotide
  Antisense strand to SEQ ID NO: 1775283
auucucacugcuagcucac

SEQ ID NO: 1775285 - RNA, 19 nt, Artificial Sequence
  Description of Artificial Sequence: Synthetic oligonucleotide
  Sense strand starting at position 118 of SEQ ID NO: 1562822
ugagcuagcagugagaaua

SEQ ID NO: 1775286 - RNA, 19 nt, Artificial Sequence
  Description of Artificial Sequence: Synthetic oligonucleotide
  Antisense strand to SEQ ID NO: 1775285
uauucucacugcuagcuca

SEQ ID NO: 1775287 - RNA, 19 nt, Artificial Sequence
  Description of Artificial Sequence: Synthetic oligonucleotide
  Sense strand starting at position 128 of SEQ ID NO: 1562822
gugagaauauaaggaugaa

SEQ ID NO: 1775288 - RNA, 19 nt, Artificial Sequence
  Description of Artificial Sequence: Synthetic oligonucleotide
  Antisense strand to SEQ ID NO: 1775287
uucauccuuauauucucac

SEQ ID NO: 1775289 - RNA, 19 nt, Artificial Sequence
  Description of Artificial Sequence: Synthetic oligonucleotide
  Sense strand starting at position 238 of SEQ ID NO: 1562822
cagggacucuaggcauauu

SEQ ID NO: 1775290 - RNA, 19 nt, Artificial Sequence
  Description of Artificial Sequence: Synthetic oligonucleotide
  Antisense strand to SEQ ID NO: 1775289
aauaugccuagagucccug

SEQ ID NO: 1775291 - RNA, 19 nt, Artificial Sequence
  Description of Artificial Sequence: Synthetic oligonucleotide
  Sense strand starting at position 306 of SEQ ID NO: 1562822
ggcucaauuccuuggcaca

SEQ ID NO: 1775292 - RNA, 19 nt, Artificial Sequence
  Description of Artificial Sequence: Synthetic oligonucleotide
  Antisense strand to SEQ ID NO: 1775291
ugugccaaggaauugagcc

SEQ ID NO: 1775293 - RNA, 19 nt, Artificial Sequence
  Description of Artificial Sequence: Synthetic oligonucleotide
  Sense strand starting at position 307 of SEQ ID NO: 1562822
gcucaauuccuuggcacaa

SEQ ID NO: 1775294 - RNA, 19 nt, Artificial Sequence
  Description of Artificial Sequence: Synthetic oligonucleotide
  Antisense strand to SEQ ID NO: 1775293
uugugccaaggaauugagc

SEQ ID NO: 1775295 - RNA, 19 nt, Artificial Sequence
  Description of Artificial Sequence: Synthetic oligonucleotide
  Sense strand starting at position 431 of SEQ ID NO: 1562822
cgcaguaaaugcucauguu

SEQ ID NO: 1775296 - RNA, 19 nt, Artificial Sequence
  Description of Artificial Sequence: Synthetic oligonucleotide
  Antisense strand to SEQ ID NO: 1775295
aacaugagcauuuacugcg

SEQ ID NO: 1775297 - RNA, 19 nt, Artificial Sequence
  Description of Artificial Sequence: Synthetic oligonucleotide
  Sense strand starting at position 432 of SEQ ID NO: 1562822
gcaguaaaugcucauguuu

SEQ ID NO: 1775298 - RNA, 19 nt, Artificial Sequence
  Description of Artificial Sequence: Synthetic oligonucleotide
  Antisense strand to SEQ ID NO: 1775297
aaacaugagcauuuacugc

SEQ ID NO: 1775299 - RNA, 19 nt, Artificial Sequence
  Description of Artificial Sequence: Synthetic oligonucleotide
  Sense strand starting at position 465 of SEQ ID NO: 1562822
uuggaaugguggcuauuca

SEQ ID NO: 1775300 - RNA, 19 nt, Artificial Sequence
  Description of Artificial Sequence: Synthetic oligonucleotide
  Antisense strand to SEQ ID NO: 1775299
ugaauagccaccauuccaa

SEQ ID NO: 1775301 - RNA, 19 nt, Artificial Sequence
  Description of Artificial Sequence: Synthetic oligonucleotide
  Sense strand starting at position 492 of SEQ ID NO: 1562822
cuugucuuucuaggacuca

SEQ ID NO: 1775302 - RNA, 19 nt, Artificial Sequence
  Description of Artificial Sequence: Synthetic oligonucleotide
  Antisense strand to SEQ ID NO: 1775301
ugaguccuagaaagacaag

SEQ ID NO: 1775303 - RNA, 19 nt, Artificial Sequence
  Description of Artificial Sequence: Synthetic oligonucleotide
  Sense strand starting at position 493 of SEQ ID NO: 1562822
uugucuuucuaggacucaa

SEQ ID NO: 1775304 - RNA, 19 nt, Artificial Sequence
  Description of Artificial Sequence: Synthetic oligonucleotide
  Antisense strand to SEQ ID NO: 1775303
uugaguccuagaaagacaa

SEQ ID NO: 1775305 - RNA, 19 nt, Artificial Sequence
  Description of Artificial Sequence: Synthetic oligonucleotide
  Sense strand starting at position 614 of SEQ ID NO: 1562822
cgcugugacgguuccuuua

SEQ ID NO: 1775306 - RNA, 19 nt, Artificial Sequence
  Description of Artificial Sequence: Synthetic oligonucleotide
  Antisense strand to SEQ ID NO: 1775305
uaaaggaaccgucacagcg

SEQ ID NO: 1775307 - RNA, 19 nt, Artificial Sequence
  Description of Artificial Sequence: Synthetic oligonucleotide
  Sense strand starting at position 686 of SEQ ID NO: 1562822
cgccaauaagcucaguuaa

SEQ ID NO: 1775308 - RNA, 19 nt, Artificial Sequence
  Description of Artificial Sequence: Synthetic oligonucleotide
  Antisense strand to SEQ ID NO: 1775307
uuaacugagcuuauuggcg

SEQ ID NO: 1775309 - RNA, 19 nt, Artificial Sequence
  Description of Artificial Sequence: Synthetic oligonucleotide
  Sense strand starting at position 2015 of SEQ ID NO: 1562822
acaggcuugugggaaauga

SEQ ID NO: 1775310 - RNA, 19 nt, Artificial Sequence
  Description of Artificial Sequence: Synthetic oligonucleotide
  Antisense strand to SEQ ID NO: 1775309
ucauuucccacaagccugu

SEQ ID NO: 1775311 - RNA, 19 nt, Artificial Sequence
  Description of Artificial Sequence: Synthetic oligonucleotide
  Sense strand starting at position 2019 of SEQ ID NO: 1562822
gcuugugggaaaugaaguu

SEQ ID NO: 1775312 - RNA, 19 nt, Artificial Sequence
  Description of Artificial Sequence: Synthetic oligonucleotide
  Antisense strand to SEQ ID NO: 1775311
aacuucauuucccacaagc

SEQ ID NO: 1775313 - RNA, 19 nt, Artificial Sequence
  Description of Artificial Sequence: Synthetic oligonucleotide
  Sense strand starting at position 2181 of SEQ ID NO: 1562822
ggccuuaucuagucccuga

SEQ ID NO: 1775314 - RNA, 19 nt, Artificial Sequence
  Description of Artificial Sequence: Synthetic oligonucleotide
  Antisense strand to SEQ ID NO: 1775313
ucagggacuagauaaggcc

SEQ ID NO: 1775315 - RNA, 19 nt, Artificial Sequence
  Description of Artificial Sequence: Synthetic oligonucleotide
  Sense strand starting at position 2184 of SEQ ID NO: 1562822
cuuaucuagucccugagau

SEQ ID NO: 1775316 - RNA, 19 nt, Artificial Sequence
  Description of Artificial Sequence: Synthetic oligonucleotide
  Antisense strand to SEQ ID NO: 1775315
aucucagggacuagauaag

SEQ ID NO: 1775317 - RNA, 19 nt, Artificial Sequence
  Description of Artificial Sequence: Synthetic oligonucleotide
  Sense strand starting at position 2185 of SEQ ID NO: 1562822
uuaucuagucccugagauc

SEQ ID NO: 1775318 - RNA, 19 nt, Artificial Sequence
  Description of Artificial Sequence: Synthetic oligonucleotide
  Antisense strand to SEQ ID NO: 1775317
gaucucagggacuagauaa

SEQ ID NO: 1775319 - RNA, 19 nt, Artificial Sequence
  Description of Artificial Sequence: Synthetic oligonucleotide
  Sense strand starting at position 2230 of SEQ ID NO: 1562822
gcugccagcuaucuauagu

SEQ ID NO: 1775320 - RNA, 19 nt, Artificial Sequence
  Description of Artificial Sequence: Synthetic oligonucleotide
  Antisense strand to SEQ ID NO: 1775319
acuauagauagcuggcagc

SEQ ID NO: 1775321 - RNA, 19 nt, Artificial Sequence
  Description of Artificial Sequence: Synthetic oligonucleotide
  Sense strand starting at position 2233 of SEQ ID NO: 1562822
gccagcuaucuauaguaau

SEQ ID NO: 1775322 - RNA, 19 nt, Artificial Sequence
  Description of Artificial Sequence: Synthetic oligonucleotide
  Antisense strand to SEQ ID NO: 1775321
auuacuauagauagcuggc

SEQ ID NO: 1775323 - RNA, 19 nt, Artificial Sequence
  Description of Artificial Sequence: Synthetic oligonucleotide
  Sense strand starting at position 2245 of SEQ ID NO: 1562822
uaguaaugcuagggagaga

SEQ ID NO: 1775324 - RNA, 19 nt, Artificial Sequence
  Description of Artificial Sequence: Synthetic oligonucleotide
  Antisense strand to SEQ ID NO: 1775323
ucucucccuagcauuacua

SEQ ID NO: 1775325 - RNA, 19 nt, Artificial Sequence
  Description of Artificial Sequence: Synthetic oligonucleotide
  Sense strand starting at position 2273 of SEQ ID NO: 1562822
uaucaaauaugugugggua

SEQ ID NO: 1775326 - RNA, 19 nt, Artificial Sequence
  Description of Artificial Sequence: Synthetic oligonucleotide
  Antisense strand to SEQ ID NO: 1775325
uacccacacauauuugaua

SEQ ID NO: 1775327 - RNA, 19 nt, Artificial Sequence
  Description of Artificial Sequence: Synthetic oligonucleotide
  Sense strand starting at position 2277 of SEQ ID NO: 1562822
aaauauguguggguaccua

SEQ ID NO: 1775328 - RNA, 19 nt, Artificial Sequence
  Description of Artificial Sequence: Synthetic oligonucleotide
  Antisense strand to SEQ ID NO: 1775327
uagguacccacacauauuu

SEQ ID NO: 1775329 - RNA, 19 nt, Artificial Sequence
  Description of Artificial Sequence: Synthetic oligonucleotide
  Sense strand starting at position 2566 of SEQ ID NO: 1562822
aaacgaauuugauagguga

SEQ ID NO: 1775330 - RNA, 19 nt, Artificial Sequence
  Description of Artificial Sequence: Synthetic oligonucleotide
  Antisense strand to SEQ ID NO: 1775329
ucaccuaucaaauucguuu

SEQ ID NO: 1775331 - RNA, 19 nt, Artificial Sequence
  Description of Artificial Sequence: Synthetic oligonucleotide
  Sense strand starting at position 2722 of SEQ ID NO: 1562822
gagcccaaguggucaauaa

SEQ ID NO: 1775332 - RNA, 19 nt, Artificial Sequence
  Description of Artificial Sequence: Synthetic oligonucleotide
  Antisense strand to SEQ ID NO: 1775331
uuauugaccacuugggcuc

SEQ ID NO: 1775333 - RNA, 19 nt, Artificial Sequence
  Description of Artificial Sequence: Synthetic oligonucleotide
  Sense strand starting at position 2924 of SEQ ID NO: 1562822
ggccucucuugccaacaga

SEQ ID NO: 1775334 - RNA, 19 nt, Artificial Sequence
  Description of Artificial Sequence: Synthetic oligonucleotide
  Antisense strand to SEQ ID NO: 1775333
ucuguuggcaagagaggcc

SEQ ID NO: 1775335 - RNA, 19 nt, Artificial Sequence
  Description of Artificial Sequence: Synthetic oligonucleotide
  Sense strand starting at position 2927 of SEQ ID NO: 1562822
cucucuugccaacagaguu

SEQ ID NO: 1775336 - RNA, 19 nt, Artificial Sequence
  Description of Artificial Sequence: Synthetic oligonucleotide
  Antisense strand to SEQ ID NO: 1775335
aacucuguuggcaagagag

SEQ ID NO: 1775337 - RNA, 19 nt, Artificial Sequence
  Description of Artificial Sequence: Synthetic oligonucleotide
  Sense strand starting at position 2940 of SEQ ID NO: 1562822
agaguuucaugucuugugu

SEQ ID NO: 1775338 - RNA, 19 nt, Artificial Sequence
  Description of Artificial Sequence: Synthetic oligonucleotide
  Antisense strand to SEQ ID NO: 1775337
acacaagacaugaaacucu

SEQ ID NO: 1775339 - RNA, 19 nt, Artificial Sequence
  Description of Artificial Sequence: Synthetic oligonucleotide
  Sense strand starting at position 2948 of SEQ ID NO: 1562822
augucuuguguugauguga

SEQ ID NO: 1775340 - RNA, 19 nt, Artificial Sequence
  Description of Artificial Sequence: Synthetic oligonucleotide
  Antisense strand to SEQ ID NO: 1775339
ucacaucaacacaagacau

SEQ ID NO: 1775341 - RNA, 19 nt, Artificial Sequence
  Description of Artificial Sequence: Synthetic oligonucleotide
  Sense strand starting at position 2963 of SEQ ID NO: 1562822
gugagagcuguucauguuu

SEQ ID NO: 1775342 - RNA, 19 nt, Artificial Sequence
  Description of Artificial Sequence: Synthetic oligonucleotide
  Antisense strand to SEQ ID NO: 1775341
aaacaugaacagcucucac

SEQ ID NO: 1775343 - RNA, 19 nt, Artificial Sequence
  Description of Artificial Sequence: Synthetic oligonucleotide
  Sense strand starting at position 3560 of SEQ ID NO: 1562822
cucuaucuagagugaucau

SEQ ID NO: 1775344 - RNA, 19 nt, Artificial Sequence
  Description of Artificial Sequence: Synthetic oligonucleotide
  Antisense strand to SEQ ID NO: 1775343
augaucacucuagauagag

SEQ ID NO: 1775345 - RNA, 19 nt, Artificial Sequence
  Description of Artificial Sequence: Synthetic oligonucleotide
  Sense strand starting at position 39 of SEQ ID NO: 1562823
cucaauucucccggaagca

SEQ ID NO: 1775346 - RNA, 19 nt, Artificial Sequence
  Description of Artificial Sequence: Synthetic oligonucleotide
  Antisense strand to SEQ ID NO: 1775345
ugcuuccgggagaauugag

SEQ ID NO: 1775347 - RNA, 19 nt, Artificial Sequence
  Description of Artificial Sequence: Synthetic oligonucleotide
  Sense strand starting at position 40 of SEQ ID NO: 1562823
ucaauucucccggaagcaa

SEQ ID NO: 1775348 - RNA, 19 nt, Artificial Sequence
  Description of Artificial Sequence: Synthetic oligonucleotide
  Antisense strand to SEQ ID NO: 1775347
uugcuuccgggagaauuga

SEQ ID NO: 1775349 - RNA, 19 nt, Artificial Sequence
  Description of Artificial Sequence: Synthetic oligonucleotide
  Sense strand starting at position 58 of SEQ ID NO: 1562823
aaauaaagcugaguuauga

SEQ ID NO: 1775350 - RNA, 19 nt, Artificial Sequence
  Description of Artificial Sequence: Synthetic oligonucleotide
  Antisense strand to SEQ ID NO: 1775349
ucauaacucagcuuuauuu

SEQ ID NO: 1775351 - RNA, 19 nt, Artificial Sequence
  Description of Artificial Sequence: Synthetic oligonucleotide
  Sense strand starting at position 247 of SEQ ID NO: 1562823
ugggauaucucucaaguuu

SEQ ID NO: 1775352 - RNA, 19 nt, Artificial Sequence
  Description of Artificial Sequence: Synthetic oligonucleotide
  Antisense strand to SEQ ID NO: 1775351
aaacuugagagauauccca

SEQ ID NO: 1775353 - RNA, 19 nt, Artificial Sequence
  Description of Artificial Sequence: Synthetic oligonucleotide
  Sense strand starting at position 325 of SEQ ID NO: 1562823
ccagaaauaucccaaggcu

SEQ ID NO: 1775354 - RNA, 19 nt, Artificial Sequence
  Description of Artificial Sequence: Synthetic oligonucleotide
  Antisense strand to SEQ ID NO: 1775353
agccuugggauauuucugg

SEQ ID NO: 1775355 - RNA, 19 nt, Artificial Sequence
  Description of Artificial Sequence: Synthetic oligonucleotide
  Sense strand starting at position 399 of SEQ ID NO: 1562823
cugaaagguuucccagcau

SEQ ID NO: 1775356 - RNA, 19 nt, Artificial Sequence
  Description of Artificial Sequence: Synthetic oligonucleotide
  Antisense strand to SEQ ID NO: 1775355
augcugggaaaccuuucag

SEQ ID NO: 1775357 - RNA, 19 nt, Artificial Sequence
  Description of Artificial Sequence: Synthetic oligonucleotide
  Sense strand starting at position 470 of SEQ ID NO: 1562823
ccauccaguuagucaucaa

SEQ ID NO: 1775358 - RNA, 19 nt, Artificial Sequence
  Description of Artificial Sequence: Synthetic oligonucleotide
  Antisense strand to SEQ ID NO: 1775357
uugaugacuaacuggaugg

SEQ ID NO: 1775359 - RNA, 19 nt, Artificial Sequence
  Description of Artificial Sequence: Synthetic oligonucleotide
  Sense strand starting at position 473 of SEQ ID NO: 1562823
uccaguuagucaucaagaa

SEQ ID NO: 1775360 - RNA, 19 nt, Artificial Sequence
  Description of Artificial Sequence: Synthetic oligonucleotide
  Antisense strand to SEQ ID NO: 1775359
uucuugaugacuaacugga

SEQ ID NO: 1775361 - RNA, 19 nt, Artificial Sequence
  Description of Artificial Sequence: Synthetic oligonucleotide
  Sense strand starting at position 474 of SEQ ID NO: 1562823
ccaguuagucaucaagaau

SEQ ID NO: 1775362 - RNA, 19 nt, Artificial Sequence
  Description of Artificial Sequence: Synthetic oligonucleotide
  Antisense strand to SEQ ID NO: 1775361
auucuugaugacuaacugg

SEQ ID NO: 1775363 - RNA, 19 nt, Artificial Sequence
  Description of Artificial Sequence: Synthetic oligonucleotide
  Sense strand starting at position 477 of SEQ ID NO: 1562823
guuagucaucaagaauugu

SEQ ID NO: 1775364 - RNA, 19 nt, Artificial Sequence
  Description of Artificial Sequence: Synthetic oligonucleotide
  Antisense strand to SEQ ID NO: 1775363
acaauucuugaugacuaac

SEQ ID NO: 1775365 - RNA, 19 nt, Artificial Sequence
  Description of Artificial Sequence: Synthetic oligonucleotide
  Sense strand starting at position 483 of SEQ ID NO: 1562823
caucaagaauugucuacgu

SEQ ID NO: 1775366 - RNA, 19 nt, Artificial Sequence
  Description of Artificial Sequence: Synthetic oligonucleotide
  Antisense strand to SEQ ID NO: 1775365
acguagacaauucuugaug

SEQ ID NO: 1775367 - RNA, 19 nt, Artificial Sequence
  Description of Artificial Sequence: Synthetic oligonucleotide
  Sense strand starting at position 485 of SEQ ID NO: 1562823
ucaagaauugucuacguuc

SEQ ID NO: 1775368 - RNA, 19 nt, Artificial Sequence
  Description of Artificial Sequence: Synthetic oligonucleotide
  Antisense strand to SEQ ID NO: 1775367
gaacguagacaauucuuga

SEQ ID NO: 1775369 - RNA, 19 nt, Artificial Sequence
  Description of Artificial Sequence: Synthetic oligonucleotide
  Sense strand starting at position 534 of SEQ ID NO: 1562823
aguuucuaccacugucuaa

SEQ ID NO: 1775370 - RNA, 19 nt, Artificial Sequence
  Description of Artificial Sequence: Synthetic oligonucleotide
  Antisense strand to SEQ ID NO: 1775369
uuagacagugguagaaacu

SEQ ID NO: 1775371 - RNA, 19 nt, Artificial Sequence
  Description of Artificial Sequence: Synthetic oligonucleotide
  Sense strand starting at position 623 of SEQ ID NO: 1562823
gugagcuagcagugagaau

SEQ ID NO: 1775372 - RNA, 19 nt, Artificial Sequence
  Description of Artificial Sequence: Synthetic oligonucleotide
  Antisense strand to SEQ ID NO: 1775371
auucucacugcuagcucac

SEQ ID NO: 1775373 - RNA, 19 nt, Artificial Sequence
  Description of Artificial Sequence: Synthetic oligonucleotide
  Sense strand starting at position 624 of SEQ ID NO: 1562823
ugagcuagcagugagaaua

SEQ ID NO: 1775374 - RNA, 19 nt, Artificial Sequence
  Description of Artificial Sequence: Synthetic oligonucleotide
  Antisense strand to SEQ ID NO: 1775373
uauucucacugcuagcuca

SEQ ID NO: 1775375 - RNA, 19 nt, Artificial Sequence
  Description of Artificial Sequence: Synthetic oligonucleotide
  Sense strand starting at position 634 of SEQ ID NO: 1562823
gugagaauauaaggaugaa

SEQ ID NO: 1775376 - RNA, 19 nt, Artificial Sequence
  Description of Artificial Sequence: Synthetic oligonucleotide
  Antisense strand to SEQ ID NO: 1775375
uucauccuuauauucucac

SEQ ID NO: 1775377 - RNA, 19 nt, Artificial Sequence
  Description of Artificial Sequence: Synthetic oligonucleotide
  Sense strand starting at position 744 of SEQ ID NO: 1562823
cagggacucuaggcauauu

SEQ ID NO: 1775378 - RNA, 19 nt, Artificial Sequence
  Description of Artificial Sequence: Synthetic oligonucleotide
  Antisense strand to SEQ ID NO: 1775377
aauaugccuagagucccug

SEQ ID NO: 1775379 - RNA, 19 nt, Artificial Sequence
  Description of Artificial Sequence: Synthetic oligonucleotide
  Sense strand starting at position 812 of SEQ ID NO: 1562823
ggcucaauuccuuggcaca

SEQ ID NO: 1775380 - RNA, 19 nt, Artificial Sequence
  Description of Artificial Sequence: Synthetic oligonucleotide
  Antisense strand to SEQ ID NO: 1775379
ugugccaaggaauugagcc

SEQ ID NO: 1775381 - RNA, 19 nt, Artificial Sequence
  Description of Artificial Sequence: Synthetic oligonucleotide
  Sense strand starting at position 813 of SEQ ID NO: 1562823
gcucaauuccuuggcacaa

SEQ ID NO: 1775382 - RNA, 19 nt, Artificial Sequence
  Description of Artificial Sequence: Synthetic oligonucleotide
  Antisense strand to SEQ ID NO: 1775381
uugugccaaggaauugagc

SEQ ID NO: 1775383 - RNA, 19 nt, Artificial Sequence
  Description of Artificial Sequence: Synthetic oligonucleotide
  Sense strand starting at position 937 of SEQ ID NO: 1562823
cgcaguaaaugcucauguu

SEQ ID NO: 1775384 - RNA, 19 nt, Artificial Sequence
  Description of Artificial Sequence: Synthetic oligonucleotide
  Antisense strand to SEQ ID NO: 1775383
aacaugagcauuuacugcg

SEQ ID NO: 1775385 - RNA, 19 nt, Artificial Sequence
  Description of Artificial Sequence: Synthetic oligonucleotide
  Sense strand starting at position 938 of SEQ ID NO: 1562823
gcaguaaaugcucauguuu

SEQ ID NO: 1775386 - RNA, 19 nt, Artificial Sequence
  Description of Artificial Sequence: Synthetic oligonucleotide
  Antisense strand to SEQ ID NO: 1775385
aaacaugagcauuuacugc

SEQ ID NO: 1775387 - RNA, 19 nt, Artificial Sequence
  Description of Artificial Sequence: Synthetic oligonucleotide
  Sense strand starting at position 971 of SEQ ID NO: 1562823
uuggaaugguggcuauuca

SEQ ID NO: 1775388 - RNA, 19 nt, Artificial Sequence
  Description of Artificial Sequence: Synthetic oligonucleotide
  Antisense strand to SEQ ID NO: 1775387
ugaauagccaccauuccaa

SEQ ID NO: 1775389 - RNA, 19 nt, Artificial Sequence
  Description of Artificial Sequence: Synthetic oligonucleotide
  Sense strand starting at position 998 of SEQ ID NO: 1562823
cuugucuuucuaggacuca

SEQ ID NO: 1775390 - RNA, 19 nt, Artificial Sequence
  Description of Artificial Sequence: Synthetic oligonucleotide
  Antisense strand to SEQ ID NO: 1775389
ugaguccuagaaagacaag

SEQ ID NO: 1775391 - RNA, 19 nt, Artificial Sequence
  Description of Artificial Sequence: Synthetic oligonucleotide
  Sense strand starting at position 1120 of SEQ ID NO: 1562823
cgcugugacgguuccuuua

SEQ ID NO: 1775392 - RNA, 19 nt, Artificial Sequence
  Description of Artificial Sequence: Synthetic oligonucleotide
  Antisense strand to SEQ ID NO: 1775391
uaaaggaaccgucacagcg

SEQ ID NO: 1775393 - RNA, 19 nt, Artificial Sequence
  Description of Artificial Sequence: Synthetic oligonucleotide
  Sense strand starting at position 1192 of SEQ ID NO: 1562823
cgccaauaagcucaguuaa

SEQ ID NO: 1775394 - RNA, 19 nt, Artificial Sequence
  Description of Artificial Sequence: Synthetic oligonucleotide
  Antisense strand to SEQ ID NO: 1775393
uuaacugagcuuauuggcg

SEQ ID NO: 1775395 - RNA, 19 nt, Artificial Sequence
  Description of Artificial Sequence: Synthetic oligonucleotide
  Sense strand starting at position 2521 of SEQ ID NO: 1562823
acaggcuugugggaaauga

SEQ ID NO: 1775396 - RNA, 19 nt, Artificial Sequence
  Description of Artificial Sequence: Synthetic oligonucleotide
  Antisense strand to SEQ ID NO: 1775395
ucauuucccacaagccugu

SEQ ID NO: 1775397 - RNA, 19 nt, Artificial Sequence
  Description of Artificial Sequence: Synthetic oligonucleotide
  Sense strand starting at position 2525 of SEQ ID NO: 1562823
gcuugugggaaaugaaguu

SEQ ID NO: 1775398 - RNA, 19 nt, Artificial Sequence
  Description of Artificial Sequence: Synthetic oligonucleotide
  Antisense strand to SEQ ID NO: 1775397
aacuucauuucccacaagc

SEQ ID NO: 1775399 - RNA, 19 nt, Artificial Sequence
  Description of Artificial Sequence: Synthetic oligonucleotide
  Sense strand starting at position 2687 of SEQ ID NO: 1562823
ggccuuaucuagucccuga

SEQ ID NO: 1775400 - RNA, 19 nt, Artificial Sequence
  Description of Artificial Sequence: Synthetic oligonucleotide
  Antisense strand to SEQ ID NO: 1775399
ucagggacuagauaaggcc

SEQ ID NO: 1775401 - RNA, 19 nt, Artificial Sequence
  Description of Artificial Sequence: Synthetic oligonucleotide
  Sense strand starting at position 2690 of SEQ ID NO: 1562823
cuuaucuagucccugagau

SEQ ID NO: 1775402 - RNA, 19 nt, Artificial Sequence
  Description of Artificial Sequence: Synthetic oligonucleotide
  Antisense strand to SEQ ID NO: 1775401
aucucagggacuagauaag

SEQ ID NO: 1775403 - RNA, 19 nt, Artificial Sequence
  Description of Artificial Sequence: Synthetic oligonucleotide
  Sense strand starting at position 2691 of SEQ ID NO: 1562823
uuaucuagucccugagauc

SEQ ID NO: 1775404 - RNA, 19 nt, Artificial Sequence
  Description of Artificial Sequence: Synthetic oligonucleotide
  Antisense strand to SEQ ID NO: 1775403
gaucucagggacuagauaa

SEQ ID NO: 1775405 - RNA, 19 nt, Artificial Sequence
  Description of Artificial Sequence: Synthetic oligonucleotide
  Sense strand starting at position 2736 of SEQ ID NO: 1562823
gcugccagcuaucuauagu

SEQ ID NO: 1775406 - RNA, 19 nt, Artificial Sequence
  Description of Artificial Sequence: Synthetic oligonucleotide
  Antisense strand to SEQ ID NO: 1775405
acuauagauagcuggcagc

SEQ ID NO: 1775407 - RNA, 19 nt, Artificial Sequence
  Description of Artificial Sequence: Synthetic oligonucleotide
  Sense strand starting at position 2739 of SEQ ID NO: 1562823
gccagcuaucuauaguaau

SEQ ID NO: 1775408 - RNA, 19 nt, Artificial Sequence
  Description of Artificial Sequence: Synthetic oligonucleotide
  Antisense strand to SEQ ID NO: 1775407
auuacuauagauagcuggc

SEQ ID NO: 1775409 - RNA, 19 nt, Artificial Sequence
  Description of Artificial Sequence: Synthetic oligonucleotide
  Sense strand starting at position 2779 of SEQ ID NO: 1562823
uaucaaauaugugugggua

SEQ ID NO: 1775410 - RNA, 19 nt, Artificial Sequence
  Description of Artificial Sequence: Synthetic oligonucleotide
  Antisense strand to SEQ ID NO: 1775409
uacccacacauauuugaua

SEQ ID NO: 1775411 - RNA, 19 nt, Artificial Sequence
  Description of Artificial Sequence: Synthetic oligonucleotide
  Sense strand starting at position 2783 of SEQ ID NO: 1562823
aaauauguguggguaccua

SEQ ID NO: 1775412 - RNA, 19 nt, Artificial Sequence
  Description of Artificial Sequence: Synthetic oligonucleotide
  Antisense strand to SEQ ID NO: 1775411
uagguacccacacauauuu

SEQ ID NO: 1775413 - RNA, 19 nt, Artificial Sequence
  Description of Artificial Sequence: Synthetic oligonucleotide
  Sense strand starting at position 3072 of SEQ ID NO: 1562823
aaacgaauuugauagguga

SEQ ID NO: 1775414 - RNA, 19 nt, Artificial Sequence
  Description of Artificial Sequence: Synthetic oligonucleotide
  Antisense strand to SEQ ID NO: 1775413
ucaccuaucaaauucguuu

SEQ ID NO: 1775415 - RNA, 19 nt, Artificial Sequence
  Description of Artificial Sequence: Synthetic oligonucleotide
  Sense strand starting at position 3228 of SEQ ID NO: 1562823
gagcccaaguggucaauaa

SEQ ID NO: 1775416 - RNA, 19 nt, Artificial Sequence
  Description of Artificial Sequence: Synthetic oligonucleotide
  Antisense strand to SEQ ID NO: 1775415
uuauugaccacuugggcuc

SEQ ID NO: 1775417 - RNA, 19 nt, Artificial Sequence
  Description of Artificial Sequence: Synthetic oligonucleotide
  Sense strand starting at position 3433 of SEQ ID NO: 1562823
cucucuugccaacagaguu

SEQ ID NO: 1775418 - RNA, 19 nt, Artificial Sequence
  Description of Artificial Sequence: Synthetic oligonucleotide
  Antisense strand to SEQ ID NO: 1775417
aacucuguuggcaagagag

SEQ ID NO: 1775419 - RNA, 19 nt, Artificial Sequence
  Description of Artificial Sequence: Synthetic oligonucleotide
  Sense strand starting at position 3446 of SEQ ID NO: 1562823
agaguuucaugucuugugu

SEQ ID NO: 1775420 - RNA, 19 nt, Artificial Sequence
  Description of Artificial Sequence: Synthetic oligonucleotide
  Antisense strand to SEQ ID NO: 1775419
acacaagacaugaaacucu

SEQ ID NO: 1775421 - RNA, 19 nt, Artificial Sequence
  Description of Artificial Sequence: Synthetic oligonucleotide
  Sense strand starting at position 3454 of SEQ ID NO: 1562823
augucuuguguugauguga

SEQ ID NO: 1775422 - RNA, 19 nt, Artificial Sequence
  Description of Artificial Sequence: Synthetic oligonucleotide
  Antisense strand to SEQ ID NO: 1775421
ucacaucaacacaagacau

SEQ ID NO: 1775423 - RNA, 19 nt, Artificial Sequence
  Description of Artificial Sequence: Synthetic oligonucleotide
  Sense strand starting at position 3469 of SEQ ID NO: 1562823
gugagagcuguucauguuu

SEQ ID NO: 1775424 - RNA, 19 nt, Artificial Sequence
  Description of Artificial Sequence: Synthetic oligonucleotide
  Antisense strand to SEQ ID NO: 1775423
aaacaugaacagcucucac

SEQ ID NO: 1775425 - RNA, 19 nt, Artificial Sequence
  Description of Artificial Sequence: Synthetic oligonucleotide
  Sense strand starting at position 31 of SEQ ID NO: 1562824
uguucuuagucuuccucau

SEQ ID NO: 1775426 - RNA, 19 nt, Artificial Sequence
  Description of Artificial Sequence: Synthetic oligonucleotide
  Antisense strand to SEQ ID NO: 1775425
augaggaagacuaagaaca

SEQ ID NO: 1775427 - RNA, 19 nt, Artificial Sequence
  Description of Artificial Sequence: Synthetic oligonucleotide
  Sense strand starting at position 181 of SEQ ID NO: 1562824
cuuauucucccacaagugu

SEQ ID NO: 1775428 - RNA, 19 nt, Artificial Sequence
  Description of Artificial Sequence: Synthetic oligonucleotide
  Antisense strand to SEQ ID NO: 1775427
acacuugugggagaauaag

SEQ ID NO: 1775429 - RNA, 19 nt, Artificial Sequence
  Description of Artificial Sequence: Synthetic oligonucleotide
  Sense strand starting at position 214 of SEQ ID NO: 1562824
gagacuauaugacaugaua

SEQ ID NO: 1775430 - RNA, 19 nt, Artificial Sequence
  Description of Artificial Sequence: Synthetic oligonucleotide
  Antisense strand to SEQ ID NO: 1775429
uaucaugucauauagucuc

SEQ ID NO: 1775431 - RNA, 19 nt, Artificial Sequence
  Description of Artificial Sequence: Synthetic oligonucleotide
  Sense strand starting at position 416 of SEQ ID NO: 1562824
ggcguagugacgcaugcau

SEQ ID NO: 1775432 - RNA, 19 nt, Artificial Sequence
  Description of Artificial Sequence: Synthetic oligonucleotide
  Antisense strand to SEQ ID NO: 1775431
augcaugcgucacuacgcc

SEQ ID NO: 1775433 - RNA, 19 nt, Artificial Sequence
  Description of Artificial Sequence: Synthetic oligonucleotide
  Sense strand starting at position 420 of SEQ ID NO: 1562824
uagugacgcaugcauguaa

SEQ ID NO: 1775434 - RNA, 19 nt, Artificial Sequence
  Description of Artificial Sequence: Synthetic oligonucleotide
  Antisense strand to SEQ ID NO: 1775433
uuacaugcaugcgucacua

SEQ ID NO: 1775435 - RNA, 19 nt, Artificial Sequence
  Description of Artificial Sequence: Synthetic oligonucleotide
  Sense strand starting at position 724 of SEQ ID NO: 1562824
ccgggaccguuucuacaaa

SEQ ID NO: 1775436 - RNA, 19 nt, Artificial Sequence
  Description of Artificial Sequence: Synthetic oligonucleotide
  Antisense strand to SEQ ID NO: 1775435
uuuguagaaacggucccgg

SEQ ID NO: 1775437 - RNA, 19 nt, Artificial Sequence
  Description of Artificial Sequence: Synthetic oligonucleotide
  Sense strand starting at position 811 of SEQ ID NO: 1562824
ucccaugaauuggagagaa

SEQ ID NO: 1775438 - RNA, 19 nt, Artificial Sequence
  Description of Artificial Sequence: Synthetic oligonucleotide
  Antisense strand to SEQ ID NO: 1775437
uucucuccaauucauggga

SEQ ID NO: 1775439 - RNA, 19 nt, Artificial Sequence
  Description of Artificial Sequence: Synthetic oligonucleotide
  Sense strand starting at position 837 of SEQ ID NO: 1562824
cucccaaagucuucuugga

SEQ ID NO: 1775440 - RNA, 19 nt, Artificial Sequence
  Description of Artificial Sequence: Synthetic oligonucleotide
  Antisense strand to SEQ ID NO: 1775439
uccaagaagacuuugggag

SEQ ID NO: 1775441 - RNA, 19 nt, Artificial Sequence
  Description of Artificial Sequence: Synthetic oligonucleotide
  Sense strand starting at position 839 of SEQ ID NO: 1562824
cccaaagucuucuuggaug

SEQ ID NO: 1775442 - RNA, 19 nt, Artificial Sequence
  Description of Artificial Sequence: Synthetic oligonucleotide
  Antisense strand to SEQ ID NO: 1775441
cauccaagaagacuuuggg

SEQ ID NO: 1775443 - RNA, 19 nt, Artificial Sequence
  Description of Artificial Sequence: Synthetic oligonucleotide
  Sense strand starting at position 1011 of SEQ ID NO: 1562824
agagaaauuagccgagcgu

SEQ ID NO: 1775444 - RNA, 19 nt, Artificial Sequence
  Description of Artificial Sequence: Synthetic oligonucleotide
  Antisense strand to SEQ ID NO: 1775443
acgcucggcuaauuucucu

SEQ ID NO: 1775445 - RNA, 19 nt, Artificial Sequence
  Description of Artificial Sequence: Synthetic oligonucleotide
  Sense strand starting at position 1510 of SEQ ID NO: 1562824
gaaggugugucccugagac

SEQ ID NO: 1775446 - RNA, 19 nt, Artificial Sequence
  Description of Artificial Sequence: Synthetic oligonucleotide
  Antisense strand to SEQ ID NO: 1775445
gucucagggacacaccuuc

SEQ ID NO: 1775447 - RNA, 19 nt, Artificial Sequence
  Description of Artificial Sequence: Synthetic oligonucleotide
  Sense strand starting at position 1741 of SEQ ID NO: 1562824
gccgcguuugcugagggaa

SEQ ID NO: 1775448 - RNA, 19 nt, Artificial Sequence
  Description of Artificial Sequence: Synthetic oligonucleotide
  Antisense strand to SEQ ID NO: 1775447
uucccucagcaaacgcggc

SEQ ID NO: 1775449 - RNA, 19 nt, Artificial Sequence
  Description of Artificial Sequence: Synthetic oligonucleotide
  Sense strand starting at position 1742 of SEQ ID NO: 1562824
ccgcguuugcugagggaaa

SEQ ID NO: 1775450 - RNA, 19 nt, Artificial Sequence
  Description of Artificial Sequence: Synthetic oligonucleotide
  Antisense strand to SEQ ID NO: 1775449
uuucccucagcaaacgcgg

SEQ ID NO: 1775451 - RNA, 19 nt, Artificial Sequence
  Description of Artificial Sequence: Synthetic oligonucleotide
  Sense strand starting at position 1743 of SEQ ID NO: 1562824
cgcguuugcugagggaaau

SEQ ID NO: 1775452 - RNA, 19 nt, Artificial Sequence
  Description of Artificial Sequence: Synthetic oligonucleotide
  Antisense strand to SEQ ID NO: 1775451
auuucccucagcaaacgcg

SEQ ID NO: 1775453 - RNA, 19 nt, Artificial Sequence
  Description of Artificial Sequence: Synthetic oligonucleotide
  Sense strand starting at position 1744 of SEQ ID NO: 1562824
gcguuugcugagggaaaug

SEQ ID NO: 1775454 - RNA, 19 nt, Artificial Sequence
  Description of Artificial Sequence: Synthetic oligonucleotide
  Antisense strand to SEQ ID NO: 1775453
cauuucccucagcaaacgc

SEQ ID NO: 1775455 - RNA, 19 nt, Artificial Sequence
  Description of Artificial Sequence: Synthetic oligonucleotide
  Sense strand starting at position 2003 of SEQ ID NO: 1562824
gcacucuuucccgcgcaga

SEQ ID NO: 1775456 - RNA, 19 nt, Artificial Sequence
  Description of Artificial Sequence: Synthetic oligonucleotide
  Antisense strand to SEQ ID NO: 1775455
ucugcgcgggaaagagugc

SEQ ID NO: 1775457 - RNA, 19 nt, Artificial Sequence
  Description of Artificial Sequence: Synthetic oligonucleotide
  Sense strand starting at position 2131 of SEQ ID NO: 1562824
ggacgcaagugcucuggau

SEQ ID NO: 1775458 - RNA, 19 nt, Artificial Sequence
  Description of Artificial Sequence: Synthetic oligonucleotide
  Antisense strand to SEQ ID NO: 1775457
auccagagcacuugcgucc

SEQ ID NO: 1775459 - RNA, 19 nt, Artificial Sequence
  Description of Artificial Sequence: Synthetic oligonucleotide
  Sense strand starting at position 2143 of SEQ ID NO: 1562824
ucuggaucgugucuagcua

SEQ ID NO: 1775460 - RNA, 19 nt, Artificial Sequence
  Description of Artificial Sequence: Synthetic oligonucleotide
  Antisense strand to SEQ ID NO: 1775459
uagcuagacacgauccaga

SEQ ID NO: 1775461 - RNA, 19 nt, Artificial Sequence
  Description of Artificial Sequence: Synthetic oligonucleotide
  Sense strand starting at position 2144 of SEQ ID NO: 1562824
cuggaucgugucuagcuaa

SEQ ID NO: 1775462 - RNA, 19 nt, Artificial Sequence
  Description of Artificial Sequence: Synthetic oligonucleotide
  Antisense strand to SEQ ID NO: 1775461
uuagcuagacacgauccag

SEQ ID NO: 1775463 - RNA, 19 nt, Artificial Sequence
  Description of Artificial Sequence: Synthetic oligonucleotide
  Sense strand starting at position 2169 of SEQ ID NO: 1562824
agcgguuugugcuuagaac

SEQ ID NO: 1775464 - RNA, 19 nt, Artificial Sequence
  Description of Artificial Sequence: Synthetic oligonucleotide
  Antisense strand to SEQ ID NO: 1775463
guucuaagcacaaaccgcu

SEQ ID NO: 1775465 - RNA, 19 nt, Artificial Sequence
  Description of Artificial Sequence: Synthetic oligonucleotide
  Sense strand starting at position 2269 of SEQ ID NO: 1562824
ggaagcuauuucuacuguu

SEQ ID NO: 1775466 - RNA, 19 nt, Artificial Sequence
  Description of Artificial Sequence: Synthetic oligonucleotide
  Antisense strand to SEQ ID NO: 1775465
aacaguagaaauagcuucc

SEQ ID NO: 1775467 - RNA, 19 nt, Artificial Sequence
  Description of Artificial Sequence: Synthetic oligonucleotide
  Sense strand starting at position 3165 of SEQ ID NO: 1562824
ucaggauuagcuuggagac

SEQ ID NO: 1775468 - RNA, 19 nt, Artificial Sequence
  Description of Artificial Sequence: Synthetic oligonucleotide
  Antisense strand to SEQ ID NO: 1775467
gucuccaagcuaauccuga

SEQ ID NO: 1775469 - RNA, 19 nt, Artificial Sequence
  Description of Artificial Sequence: Synthetic oligonucleotide
  Sense strand starting at position 3166 of SEQ ID NO: 1562824
caggauuagcuuggagaca

SEQ ID NO: 1775470 - RNA, 19 nt, Artificial Sequence
  Description of Artificial Sequence: Synthetic oligonucleotide
  Antisense strand to SEQ ID NO: 1775469
ugucuccaagcuaauccug

SEQ ID NO: 1775471 - RNA, 19 nt, Artificial Sequence
  Description of Artificial Sequence: Synthetic oligonucleotide
  Sense strand starting at position 3191 of SEQ ID NO: 1562824
gauagaaccucaguggacu

SEQ ID NO: 1775472 - RNA, 19 nt, Artificial Sequence
  Description of Artificial Sequence: Synthetic oligonucleotide
  Antisense strand to SEQ ID NO: 1775471
aguccacugagguucuauc

SEQ ID NO: 1775473 - RNA, 19 nt, Artificial Sequence
  Description of Artificial Sequence: Synthetic oligonucleotide
  Sense strand starting at position 3230 of SEQ ID NO: 1562824
gcagguguuucggagagga

SEQ ID NO: 1775474 - RNA, 19 nt, Artificial Sequence
  Description of Artificial Sequence: Synthetic oligonucleotide
  Antisense strand to SEQ ID NO: 1775473
uccucuccgaaacaccugc

SEQ ID NO: 1775475 - RNA, 19 nt, Artificial Sequence
  Description of Artificial Sequence: Synthetic oligonucleotide
  Sense strand starting at position 3232 of SEQ ID NO: 1562824
agguguuucggagaggaca

SEQ ID NO: 1775476 - RNA, 19 nt, Artificial Sequence
  Description of Artificial Sequence: Synthetic oligonucleotide
  Antisense strand to SEQ ID NO: 1775475
uguccucuccgaaacaccu

SEQ ID NO: 1775477 - RNA, 19 nt, Artificial Sequence
  Description of Artificial Sequence: Synthetic oligonucleotide
  Sense strand starting at position 217 of SEQ ID NO: 1562825
cgcggugauggagauaaga

SEQ ID NO: 1775478 - RNA, 19 nt, Artificial Sequence
  Description of Artificial Sequence: Synthetic oligonucleotide
  Antisense strand to SEQ ID NO: 1775477
ucuuaucuccaucaccgcg

SEQ ID NO: 1775479 - RNA, 19 nt, Artificial Sequence
  Description of Artificial Sequence: Synthetic oligonucleotide
  Sense strand starting at position 321 of SEQ ID NO: 1562825
gcugcuuccgcaggaagaa

SEQ ID NO: 1775480 - RNA, 19 nt, Artificial Sequence
  Description of Artificial Sequence: Synthetic oligonucleotide
  Antisense strand to SEQ ID NO: 1775479
uucuuccugcggaagcagc

SEQ ID NO: 1775481 - RNA, 19 nt, Artificial Sequence
  Description of Artificial Sequence: Synthetic oligonucleotide
  Sense strand starting at position 512 of SEQ ID NO: 1562825
ccaggaggucucgacuauc

SEQ ID NO: 1775482 - RNA, 19 nt, Artificial Sequence
  Description of Artificial Sequence: Synthetic oligonucleotide
  Antisense strand to SEQ ID NO: 1775481
gauagucgagaccuccugg

SEQ ID NO: 1775483 - RNA, 19 nt, Artificial Sequence
  Description of Artificial Sequence: Synthetic oligonucleotide
  Sense strand starting at position 518 of SEQ ID NO: 1562825
ggucucgacuaucuccaaa

SEQ ID NO: 1775484 - RNA, 19 nt, Artificial Sequence
  Description of Artificial Sequence: Synthetic oligonucleotide
  Antisense strand to SEQ ID NO: 1775483
uuuggagauagucgagacc

SEQ ID NO: 1775485 - RNA, 19 nt, Artificial Sequence
  Description of Artificial Sequence: Synthetic oligonucleotide
  Sense strand starting at position 520 of SEQ ID NO: 1562825
ucucgacuaucuccaaaga

SEQ ID NO: 1775486 - RNA, 19 nt, Artificial Sequence
  Description of Artificial Sequence: Synthetic oligonucleotide
  Antisense strand to SEQ ID NO: 1775485
ucuuuggagauagucgaga

SEQ ID NO: 1775487 - RNA, 19 nt, Artificial Sequence
  Description of Artificial Sequence: Synthetic oligonucleotide
  Sense strand starting at position 744 of SEQ ID NO: 1562825
agacaugccucuugucaca

SEQ ID NO: 1775488 - RNA, 19 nt, Artificial Sequence
  Description of Artificial Sequence: Synthetic oligonucleotide
  Antisense strand to SEQ ID NO: 1775487
ugugacaagaggcaugucu

SEQ ID NO: 1775489 - RNA, 19 nt, Artificial Sequence
  Description of Artificial Sequence: Synthetic oligonucleotide
  Sense strand starting at position 1402 of SEQ ID NO: 1562825
gaggaucccugauuaggca

SEQ ID NO: 1775490 - RNA, 19 nt, Artificial Sequence
  Description of Artificial Sequence: Synthetic oligonucleotide
  Antisense strand to SEQ ID NO: 1775489
ugccuaaucagggauccuc

SEQ ID NO: 1775491 - RNA, 19 nt, Artificial Sequence
  Description of Artificial Sequence: Synthetic oligonucleotide
  Sense strand starting at position 1411 of SEQ ID NO: 1562825
ugauuaggcagguauugag

SEQ ID NO: 1775492 - RNA, 19 nt, Artificial Sequence
  Description of Artificial Sequence: Synthetic oligonucleotide
  Antisense strand to SEQ ID NO: 1775491
cucaauaccugccuaauca

SEQ ID NO: 1775493 - RNA, 19 nt, Artificial Sequence
  Description of Artificial Sequence: Synthetic oligonucleotide
  Sense strand starting at position 1468 of SEQ ID NO: 1562825
uagaaaggccucugagaac

SEQ ID NO: 1775494 - RNA, 19 nt, Artificial Sequence
  Description of Artificial Sequence: Synthetic oligonucleotide
  Antisense strand to SEQ ID NO: 1775493
guucucagaggccuuucua

SEQ ID NO: 1775495 - RNA, 19 nt, Artificial Sequence
  Description of Artificial Sequence: Synthetic oligonucleotide
  Sense strand starting at position 1616 of SEQ ID NO: 1562825
caaugaagacaucguguag

SEQ ID NO: 1775496 - RNA, 19 nt, Artificial Sequence
  Description of Artificial Sequence: Synthetic oligonucleotide
  Antisense strand to SEQ ID NO: 1775495
cuacacgaugucuucauug

SEQ ID NO: 1775497 - RNA, 19 nt, Artificial Sequence
  Description of Artificial Sequence: Synthetic oligonucleotide
  Sense strand starting at position 1620 of SEQ ID NO: 1562825
gaagacaucguguagcugu

SEQ ID NO: 1775498 - RNA, 19 nt, Artificial Sequence
  Description of Artificial Sequence: Synthetic oligonucleotide
  Antisense strand to SEQ ID NO: 1775497
acagcuacacgaugucuuc

SEQ ID NO: 1775499 - RNA, 19 nt, Artificial Sequence
  Description of Artificial Sequence: Synthetic oligonucleotide
  Sense strand starting at position 2294 of SEQ ID NO: 1562825
acagguuuccuccgggaug

SEQ ID NO: 1775500 - RNA, 19 nt, Artificial Sequence
  Description of Artificial Sequence: Synthetic oligonucleotide
  Antisense strand to SEQ ID NO: 1775499
caucccggaggaaaccugu

SEQ ID NO: 1775501 - RNA, 19 nt, Artificial Sequence
  Description of Artificial Sequence: Synthetic oligonucleotide
  Sense strand starting at position 2305 of SEQ ID NO: 1562825
ccgggaugcucucccauau

SEQ ID NO: 1775502 - RNA, 19 nt, Artificial Sequence
  Description of Artificial Sequence: Synthetic oligonucleotide
  Antisense strand to SEQ ID NO: 1775501
auaugggagagcaucccgg

SEQ ID NO: 1775503 - RNA, 19 nt, Artificial Sequence
  Description of Artificial Sequence: Synthetic oligonucleotide
  Sense strand starting at position 2349 of SEQ ID NO: 1562825
ccacuaggcugaguucuau

SEQ ID NO: 1775504 - RNA, 19 nt, Artificial Sequence
  Description of Artificial Sequence: Synthetic oligonucleotide
  Antisense strand to SEQ ID NO: 1775503
auagaacucagccuagugg

SEQ ID NO: 1775505 - RNA, 19 nt, Artificial Sequence
  Description of Artificial Sequence: Synthetic oligonucleotide
  Sense strand starting at position 2358 of SEQ ID NO: 1562825
ugaguucuaucuggacuuc

SEQ ID NO: 1775506 - RNA, 19 nt, Artificial Sequence
  Description of Artificial Sequence: Synthetic oligonucleotide
  Antisense strand to SEQ ID NO: 1775505
gaaguccagauagaacuca

SEQ ID NO: 1775507 - RNA, 19 nt, Artificial Sequence
  Description of Artificial Sequence: Synthetic oligonucleotide
  Sense strand starting at position 2401 of SEQ ID NO: 1562825
ggaagccuuccgugauaac

SEQ ID NO: 1775508 - RNA, 19 nt, Artificial Sequence
  Description of Artificial Sequence: Synthetic oligonucleotide
  Antisense strand to SEQ ID NO: 1775507
guuaucacggaaggcuucc

SEQ ID NO: 1775509 - RNA, 19 nt, Artificial Sequence
  Description of Artificial Sequence: Synthetic oligonucleotide
  Sense strand starting at position 2440 of SEQ ID NO: 1562825
cacaguuguucgcucaguu

SEQ ID NO: 1775510 - RNA, 19 nt, Artificial Sequence
  Description of Artificial Sequence: Synthetic oligonucleotide
  Antisense strand to SEQ ID NO: 1775509
aacugagcgaacaacugug

SEQ ID NO: 1775511 - RNA, 19 nt, Artificial Sequence
  Description of Artificial Sequence: Synthetic oligonucleotide
  Sense strand starting at position 2496 of SEQ ID NO: 1562825
caguuuauagcugaagaca

SEQ ID NO: 1775512 - RNA, 19 nt, Artificial Sequence
  Description of Artificial Sequence: Synthetic oligonucleotide
  Antisense strand to SEQ ID NO: 1775511
ugucuucagcuauaaacug

SEQ ID NO: 1775513 - RNA, 19 nt, Artificial Sequence
  Description of Artificial Sequence: Synthetic oligonucleotide
  Sense strand starting at position 2582 of SEQ ID NO: 1562825
ggucucuguuccucaucua

SEQ ID NO: 1775514 - RNA, 19 nt, Artificial Sequence
  Description of Artificial Sequence: Synthetic oligonucleotide
  Antisense strand to SEQ ID NO: 1775513
uagaugaggaacagagacc

SEQ ID NO: 1775515 - RNA, 19 nt, Artificial Sequence
  Description of Artificial Sequence: Synthetic oligonucleotide
  Sense strand starting at position 2585 of SEQ ID NO: 1562825
cucuguuccucaucuaguu

SEQ ID NO: 1775516 - RNA, 19 nt, Artificial Sequence
  Description of Artificial Sequence: Synthetic oligonucleotide
  Antisense strand to SEQ ID NO: 1775515
aacuagaugaggaacagag

SEQ ID NO: 1775517 - RNA, 19 nt, Artificial Sequence
  Description of Artificial Sequence: Synthetic oligonucleotide
  Sense strand starting at position 2859 of SEQ ID NO: 1562825
ugagcuggcucccaaguua

SEQ ID NO: 1775518 - RNA, 19 nt, Artificial Sequence
  Description of Artificial Sequence: Synthetic oligonucleotide
  Antisense strand to SEQ ID NO: 1775517
uaacuugggagccagcuca

SEQ ID NO: 1775519 - RNA, 19 nt, Artificial Sequence
  Description of Artificial Sequence: Synthetic oligonucleotide
  Sense strand starting at position 3026 of SEQ ID NO: 1562825
cccuucuggucuuuacaca

SEQ ID NO: 1775520 - RNA, 19 nt, Artificial Sequence
  Description of Artificial Sequence: Synthetic oligonucleotide
  Antisense strand to SEQ ID NO: 1775519
uguguaaagaccagaaggg

SEQ ID NO: 1775521 - RNA, 19 nt, Artificial Sequence
  Description of Artificial Sequence: Synthetic oligonucleotide
  Sense strand starting at position 3070 of SEQ ID NO: 1562825
cccugaccacguuauuaac

SEQ ID NO: 1775522 - RNA, 19 nt, Artificial Sequence
  Description of Artificial Sequence: Synthetic oligonucleotide
  Antisense strand to SEQ ID NO: 1775521
guuaauaacguggucaggg

SEQ ID NO: 1775523 - RNA, 19 nt, Artificial Sequence
  Description of Artificial Sequence: Synthetic oligonucleotide
  Sense strand starting at position 3072 of SEQ ID NO: 1562825
cugaccacguuauuaacau

SEQ ID NO: 1775524 - RNA, 19 nt, Artificial Sequence
  Description of Artificial Sequence: Synthetic oligonucleotide
  Antisense strand to SEQ ID NO: 1775523
auguuaauaacguggucag

SEQ ID NO: 1775525 - RNA, 19 nt, Artificial Sequence
  Description of Artificial Sequence: Synthetic oligonucleotide
  Sense strand starting at position 3073 of SEQ ID NO: 1562825
ugaccacguuauuaacauu

SEQ ID NO: 1775526 - RNA, 19 nt, Artificial Sequence
  Description of Artificial Sequence: Synthetic oligonucleotide
  Antisense strand to SEQ ID NO: 1775525
aauguuaauaacgugguca

SEQ ID NO: 1775527 - RNA, 19 nt, Artificial Sequence
  Description of Artificial Sequence: Synthetic oligonucleotide
  Sense strand starting at position 3076 of SEQ ID NO: 1562825
ccacguuauuaacauugca

SEQ ID NO: 1775528 - RNA, 19 nt, Artificial Sequence
  Description of Artificial Sequence: Synthetic oligonucleotide
  Antisense strand to SEQ ID NO: 1775527
ugcaauguuaauaacgugg

SEQ ID NO: 1775529 - RNA, 19 nt, Artificial Sequence
  Description of Artificial Sequence: Synthetic oligonucleotide
  Sense strand starting at position 3176 of SEQ ID NO: 1562825
uuccaacauucuguauguu

SEQ ID NO: 1775530 - RNA, 19 nt, Artificial Sequence
  Description of Artificial Sequence: Synthetic oligonucleotide
  Antisense strand to SEQ ID NO: 1775529
aacauacagaauguuggaa

SEQ ID NO: 1775531 - RNA, 19 nt, Artificial Sequence
  Description of Artificial Sequence: Synthetic oligonucleotide
  Sense strand starting at position 3186 of SEQ ID NO: 1562825
cuguauguuuaacuaaguu

SEQ ID NO: 1775532 - RNA, 19 nt, Artificial Sequence
  Description of Artificial Sequence: Synthetic oligonucleotide
  Antisense strand to SEQ ID NO: 1775531
aacuuaguuaaacauacag

SEQ ID NO: 1775533 - RNA, 19 nt, Artificial Sequence
  Description of Artificial Sequence: Synthetic oligonucleotide
  Sense strand starting at position 3204 of SEQ ID NO: 1562825
uucuguccuccucaugaga

SEQ ID NO: 1775534 - RNA, 19 nt, Artificial Sequence
  Description of Artificial Sequence: Synthetic oligonucleotide
  Antisense strand to SEQ ID NO: 1775533
ucucaugaggaggacagaa

SEQ ID NO: 1775535 - RNA, 19 nt, Artificial Sequence
  Description of Artificial Sequence: Synthetic oligonucleotide
  Sense strand starting at position 3206 of SEQ ID NO: 1562825
cuguccuccucaugagaau

SEQ ID NO: 1775536 - RNA, 19 nt, Artificial Sequence
  Description of Artificial Sequence: Synthetic oligonucleotide
  Antisense strand to SEQ ID NO: 1775535
auucucaugaggaggacag

SEQ ID NO: 1775537 - RNA, 19 nt, Artificial Sequence
  Description of Artificial Sequence: Synthetic oligonucleotide
  Sense strand starting at position 3207 of SEQ ID NO: 1562825
uguccuccucaugagaaua

SEQ ID NO: 1775538 - RNA, 19 nt, Artificial Sequence
  Description of Artificial Sequence: Synthetic oligonucleotide
  Antisense strand to SEQ ID NO: 1775537
uauucucaugaggaggaca

SEQ ID NO: 1775539 - RNA, 19 nt, Artificial Sequence
  Description of Artificial Sequence: Synthetic oligonucleotide
  Sense strand starting at position 3462 of SEQ ID NO: 1562825
aggccauauucucagaaug

SEQ ID NO: 1775540 - RNA, 19 nt, Artificial Sequence
  Description of Artificial Sequence: Synthetic oligonucleotide
  Antisense strand to SEQ ID NO: 1775539
cauucugagaauauggccu

SEQ ID NO: 1775541 - RNA, 19 nt, Artificial Sequence
  Description of Artificial Sequence: Synthetic oligonucleotide
  Sense strand starting at position 3464 of SEQ ID NO: 1562825
gccauauucucagaauggu

SEQ ID NO: 1775542 - RNA, 19 nt, Artificial Sequence
  Description of Artificial Sequence: Synthetic oligonucleotide
  Antisense strand to SEQ ID NO: 1775541
accauucugagaauauggc

SEQ ID NO: 1775543 - RNA, 19 nt, Artificial Sequence
  Description of Artificial Sequence: Synthetic oligonucleotide
  Sense strand starting at position 3467 of SEQ ID NO: 1562825
auauucucagaauggugau

SEQ ID NO: 1775544 - RNA, 19 nt, Artificial Sequence
  Description of Artificial Sequence: Synthetic oligonucleotide
  Antisense strand to SEQ ID NO: 1775543
aucaccauucugagaauau

SEQ ID NO: 1775545 - RNA, 19 nt, Artificial Sequence
  Description of Artificial Sequence: Synthetic oligonucleotide
  Sense strand starting at position 3470 of SEQ ID NO: 1562825
uucucagaauggugaugau

SEQ ID NO: 1775546 - RNA, 19 nt, Artificial Sequence
  Description of Artificial Sequence: Synthetic oligonucleotide
  Antisense strand to SEQ ID NO: 1775545
aucaucaccauucugagaa

SEQ ID NO: 1775547 - RNA, 19 nt, Artificial Sequence
  Description of Artificial Sequence: Synthetic oligonucleotide
  Sense strand starting at position 3867 of SEQ ID NO: 1562825
gcuguaugacucuaggaaa

SEQ ID NO: 1775548 - RNA, 19 nt, Artificial Sequence
  Description of Artificial Sequence: Synthetic oligonucleotide
  Antisense strand to SEQ ID NO: 1775547
uuuccuagagucauacagc

SEQ ID NO: 1775549 - RNA, 19 nt, Artificial Sequence
  Description of Artificial Sequence: Synthetic oligonucleotide
  Sense strand starting at position 3870 of SEQ ID NO: 1562825
guaugacucuaggaaaguu

SEQ ID NO: 1775550 - RNA, 19 nt, Artificial Sequence
  Description of Artificial Sequence: Synthetic oligonucleotide
  Antisense strand to SEQ ID NO: 1775549
aacuuuccuagagucauac

SEQ ID NO: 1775551 - RNA, 19 nt, Artificial Sequence
  Description of Artificial Sequence: Synthetic oligonucleotide
  Sense strand starting at position 3917 of SEQ ID NO: 1562825
aaauaugacuuggugacga

SEQ ID NO: 1775552 - RNA, 19 nt, Artificial Sequence
  Description of Artificial Sequence: Synthetic oligonucleotide
  Antisense strand to SEQ ID NO: 1775551
ucgucaccaagucauauuu

SEQ ID NO: 1775553 - RNA, 19 nt, Artificial Sequence
  Description of Artificial Sequence: Synthetic oligonucleotide
  Sense strand starting at position 3919 of SEQ ID NO: 1562825
auaugacuuggugacgauu

SEQ ID NO: 1775554 - RNA, 19 nt, Artificial Sequence
  Description of Artificial Sequence: Synthetic oligonucleotide
  Antisense strand to SEQ ID NO: 1775553
aaucgucaccaagucauau

SEQ ID NO: 1775555 - RNA, 19 nt, Artificial Sequence
  Description of Artificial Sequence: Synthetic oligonucleotide
  Sense strand starting at position 3922 of SEQ ID NO: 1562825
ugacuuggugacgauuaca

SEQ ID NO: 1775556 - RNA, 19 nt, Artificial Sequence
  Description of Artificial Sequence: Synthetic oligonucleotide
  Antisense strand to SEQ ID NO: 1775555
uguaaucgucaccaaguca

SEQ ID NO: 1775557 - RNA, 19 nt, Artificial Sequence
  Description of Artificial Sequence: Synthetic oligonucleotide
  Sense strand starting at position 164 of SEQ ID NO: 1562826
cgcggugauggagauaaga

SEQ ID NO: 1775558 - RNA, 19 nt, Artificial Sequence
  Description of Artificial Sequence: Synthetic oligonucleotide
  Antisense strand to SEQ ID NO: 1775557
ucuuaucuccaucaccgcg

SEQ ID NO: 1775559 - RNA, 19 nt, Artificial Sequence
  Description of Artificial Sequence: Synthetic oligonucleotide
  Sense strand starting at position 268 of SEQ ID NO: 1562826
gcugcuuccgcaggaagaa

SEQ ID NO: 1775560 - RNA, 19 nt, Artificial Sequence
  Description of Artificial Sequence: Synthetic oligonucleotide
  Antisense strand to SEQ ID NO: 1775559
uucuuccugcggaagcagc

SEQ ID NO: 1775561 - RNA, 19 nt, Artificial Sequence
  Description of Artificial Sequence: Synthetic oligonucleotide
  Sense strand starting at position 459 of SEQ ID NO: 1562826
ccaggaggucucgacuauc

SEQ ID NO: 1775562 - RNA, 19 nt, Artificial Sequence
  Description of Artificial Sequence: Synthetic oligonucleotide
  Antisense strand to SEQ ID NO: 1775561
gauagucgagaccuccugg

SEQ ID NO: 1775563 - RNA, 19 nt, Artificial Sequence
  Description of Artificial Sequence: Synthetic oligonucleotide
  Sense strand starting at position 465 of SEQ ID NO: 1562826
ggucucgacuaucuccaaa

SEQ ID NO: 1775564 - RNA, 19 nt, Artificial Sequence
  Description of Artificial Sequence: Synthetic oligonucleotide
  Antisense strand to SEQ ID NO: 1775563
uuuggagauagucgagacc

SEQ ID NO: 1775565 - RNA, 19 nt, Artificial Sequence
  Description of Artificial Sequence: Synthetic oligonucleotide
  Sense strand starting at position 467 of SEQ ID NO: 1562826
ucucgacuaucuccaaaga

SEQ ID NO: 1775566 - RNA, 19 nt, Artificial Sequence
  Description of Artificial Sequence: Synthetic oligonucleotide
  Antisense strand to SEQ ID NO: 1775565
ucuuuggagauagucgaga

SEQ ID NO: 1775567 - RNA, 19 nt, Artificial Sequence
  Description of Artificial Sequence: Synthetic oligonucleotide
  Sense strand starting at position 691 of SEQ ID NO: 1562826
agacaugccucuugucaca

SEQ ID NO: 1775568 - RNA, 19 nt, Artificial Sequence
  Description of Artificial Sequence: Synthetic oligonucleotide
  Antisense strand to SEQ ID NO: 1775567
ugugacaagaggcaugucu

SEQ ID NO: 1775569 - RNA, 19 nt, Artificial Sequence
  Description of Artificial Sequence: Synthetic oligonucleotide
  Sense strand starting at position 1349 of SEQ ID NO: 1562826
gaggaucccugauuaggca

SEQ ID NO: 1775570 - RNA, 19 nt, Artificial Sequence
  Description of Artificial Sequence: Synthetic oligonucleotide
  Antisense strand to SEQ ID NO: 1775569
ugccuaaucagggauccuc

SEQ ID NO: 1775571 - RNA, 19 nt, Artificial Sequence
  Description of Artificial Sequence: Synthetic oligonucleotide
  Sense strand starting at position 1358 of SEQ ID NO: 1562826
ugauuaggcagguauugag

SEQ ID NO: 1775572 - RNA, 19 nt, Artificial Sequence
  Description of Artificial Sequence: Synthetic oligonucleotide
  Antisense strand to SEQ ID NO: 1775571
cucaauaccugccuaauca

SEQ ID NO: 1775573 - RNA, 19 nt, Artificial Sequence
  Description of Artificial Sequence: Synthetic oligonucleotide
  Sense strand starting at position 1415 of SEQ ID NO: 1562826
uagaaaggccucugagaac

SEQ ID NO: 1775574 - RNA, 19 nt, Artificial Sequence
  Description of Artificial Sequence: Synthetic oligonucleotide
  Antisense strand to SEQ ID NO: 1775573
guucucagaggccuuucua

SEQ ID NO: 1775575 - RNA, 19 nt, Artificial Sequence
  Description of Artificial Sequence: Synthetic oligonucleotide
  Sense strand starting at position 1563 of SEQ ID NO: 1562826
caaugaagacaucguguag

SEQ ID NO: 1775576 - RNA, 19 nt, Artificial Sequence
  Description of Artificial Sequence: Synthetic oligonucleotide
  Antisense strand to SEQ ID NO: 1775575
cuacacgaugucuucauug

SEQ ID NO: 1775577 - RNA, 19 nt, Artificial Sequence
  Description of Artificial Sequence: Synthetic oligonucleotide
  Sense strand starting at position 1567 of SEQ ID NO: 1562826
gaagacaucguguagcugu

SEQ ID NO: 1775578 - RNA, 19 nt, Artificial Sequence
  Description of Artificial Sequence: Synthetic oligonucleotide
  Antisense strand to SEQ ID NO: 1775577
acagcuacacgaugucuuc

SEQ ID NO: 1775579 - RNA, 19 nt, Artificial Sequence
  Description of Artificial Sequence: Synthetic oligonucleotide
  Sense strand starting at position 2241 of SEQ ID NO: 1562826
acagguuuccuccgggaug

SEQ ID NO: 1775580 - RNA, 19 nt, Artificial Sequence
  Description of Artificial Sequence: Synthetic oligonucleotide
  Antisense strand to SEQ ID NO: 1775579
caucccggaggaaaccugu

SEQ ID NO: 1775581 - RNA, 19 nt, Artificial Sequence
  Description of Artificial Sequence: Synthetic oligonucleotide
  Sense strand starting at position 2252 of SEQ ID NO: 1562826
ccgggaugcucucccauau

SEQ ID NO: 1775582 - RNA, 19 nt, Artificial Sequence
  Description of Artificial Sequence: Synthetic oligonucleotide
  Antisense strand to SEQ ID NO: 1775581
auaugggagagcaucccgg

SEQ ID NO: 1775583 - RNA, 19 nt, Artificial Sequence
  Description of Artificial Sequence: Synthetic oligonucleotide
  Sense strand starting at position 2296 of SEQ ID NO: 1562826
ccacuaggcugaguucuau

SEQ ID NO: 1775584 - RNA, 19 nt, Artificial Sequence
  Description of Artificial Sequence: Synthetic oligonucleotide
  Antisense strand to SEQ ID NO: 1775583
auagaacucagccuagugg

SEQ ID NO: 1775585 - RNA, 19 nt, Artificial Sequence
  Description of Artificial Sequence: Synthetic oligonucleotide
  Sense strand starting at position 2305 of SEQ ID NO: 1562826
ugaguucuaucuggacuuc

SEQ ID NO: 1775586 - RNA, 19 nt, Artificial Sequence
  Description of Artificial Sequence: Synthetic oligonucleotide
  Antisense strand to SEQ ID NO: 1775585
gaaguccagauagaacuca

SEQ ID NO: 1775587 - RNA, 19 nt, Artificial Sequence
  Description of Artificial Sequence: Synthetic oligonucleotide
  Sense strand starting at position 2348 of SEQ ID NO: 1562826
ggaagccuuccgugauaac

SEQ ID NO: 1775588 - RNA, 19 nt, Artificial Sequence
  Description of Artificial Sequence: Synthetic oligonucleotide
  Antisense strand to SEQ ID NO: 1775587
guuaucacggaaggcuucc

SEQ ID NO: 1775589 - RNA, 19 nt, Artificial Sequence
  Description of Artificial Sequence: Synthetic oligonucleotide
  Sense strand starting at position 2387 of SEQ ID NO: 1562826
cacaguuguucgcucaguu

SEQ ID NO: 1775590 - RNA, 19 nt, Artificial Sequence
  Description of Artificial Sequence: Synthetic oligonucleotide
  Antisense strand to SEQ ID NO: 1775589
aacugagcgaacaacugug

SEQ ID NO: 1775591 - RNA, 19 nt, Artificial Sequence
  Description of Artificial Sequence: Synthetic oligonucleotide
  Sense strand starting at position 2443 of SEQ ID NO: 1562826
caguuuauagcugaagaca

SEQ ID NO: 1775592 - RNA, 19 nt, Artificial Sequence
  Description of Artificial Sequence: Synthetic oligonucleotide
  Antisense strand to SEQ ID NO: 1775591
ugucuucagcuauaaacug

SEQ ID NO: 1775593 - RNA, 19 nt, Artificial Sequence
  Description of Artificial Sequence: Synthetic oligonucleotide
  Sense strand starting at position 2529 of SEQ ID NO: 1562826
ggucucuguuccucaucua

SEQ ID NO: 1775594 - RNA, 19 nt, Artificial Sequence
  Description of Artificial Sequence: Synthetic oligonucleotide
  Antisense strand to SEQ ID NO: 1775593
uagaugaggaacagagacc

SEQ ID NO: 1775595 - RNA, 19 nt, Artificial Sequence
  Description of Artificial Sequence: Synthetic oligonucleotide
  Sense strand starting at position 2532 of SEQ ID NO: 1562826
cucuguuccucaucuaguu

SEQ ID NO: 1775596 - RNA, 19 nt, Artificial Sequence
  Description of Artificial Sequence: Synthetic oligonucleotide
  Antisense strand to SEQ ID NO: 1775595
aacuagaugaggaacagag

SEQ ID NO: 1775597 - RNA, 19 nt, Artificial Sequence
  Description of Artificial Sequence: Synthetic oligonucleotide
  Sense strand starting at position 2806 of SEQ ID NO: 1562826
ugagcuggcucccaaguua

SEQ ID NO: 1775598 - RNA, 19 nt, Artificial Sequence
  Description of Artificial Sequence: Synthetic oligonucleotide
  Antisense strand to SEQ ID NO: 1775597
uaacuugggagccagcuca

SEQ ID NO: 1775599 - RNA, 19 nt, Artificial Sequence
  Description of Artificial Sequence: Synthetic oligonucleotide
  Sense strand starting at position 2973 of SEQ ID NO: 1562826
cccuucuggucuuuacaca

SEQ ID NO: 1775600 - RNA, 19 nt, Artificial Sequence
  Description of Artificial Sequence: Synthetic oligonucleotide
  Antisense strand to SEQ ID NO: 1775599
uguguaaagaccagaaggg

SEQ ID NO: 1775601 - RNA, 19 nt, Artificial Sequence
  Description of Artificial Sequence: Synthetic oligonucleotide
  Sense strand starting at position 3017 of SEQ ID NO: 1562826
cccugaccacguuauuaac

SEQ ID NO: 1775602 - RNA, 19 nt, Artificial Sequence
  Description of Artificial Sequence: Synthetic oligonucleotide
  Antisense strand to SEQ ID NO: 1775601
guuaauaacguggucaggg

SEQ ID NO: 1775603 - RNA, 19 nt, Artificial Sequence
  Description of Artificial Sequence: Synthetic oligonucleotide
  Sense strand starting at position 3019 of SEQ ID NO: 1562826
cugaccacguuauuaacau

SEQ ID NO: 1775604 - RNA, 19 nt, Artificial Sequence
  Description of Artificial Sequence: Synthetic oligonucleotide
  Antisense strand to SEQ ID NO: 1775603
auguuaauaacguggucag

SEQ ID NO: 1775605 - RNA, 19 nt, Artificial Sequence
  Description of Artificial Sequence: Synthetic oligonucleotide
  Sense strand starting at position 3020 of SEQ ID NO: 1562826
ugaccacguuauuaacauu

SEQ ID NO: 1775606 - RNA, 19 nt, Artificial Sequence
  Description of Artificial Sequence: Synthetic oligonucleotide
  Antisense strand to SEQ ID NO: 1775605
aauguuaauaacgugguca

SEQ ID NO: 1775607 - RNA, 19 nt, Artificial Sequence
  Description of Artificial Sequence: Synthetic oligonucleotide
  Sense strand starting at position 3023 of SEQ ID NO: 1562826
ccacguuauuaacauugca

SEQ ID NO: 1775608 - RNA, 19 nt, Artificial Sequence
  Description of Artificial Sequence: Synthetic oligonucleotide
  Antisense strand to SEQ ID NO: 1775607
ugcaauguuaauaacgugg

SEQ ID NO: 1775609 - RNA, 19 nt, Artificial Sequence
  Description of Artificial Sequence: Synthetic oligonucleotide
  Sense strand starting at position 3123 of SEQ ID NO: 1562826
uuccaacauucuguauguu

SEQ ID NO: 1775610 - RNA, 19 nt, Artificial Sequence
  Description of Artificial Sequence: Synthetic oligonucleotide
  Antisense strand to SEQ ID NO: 1775609
aacauacagaauguuggaa

SEQ ID NO: 1775611 - RNA, 19 nt, Artificial Sequence
  Description of Artificial Sequence: Synthetic oligonucleotide
  Sense strand starting at position 3133 of SEQ ID NO: 1562826
cuguauguuuaacuaaguu

SEQ ID NO: 1775612 - RNA, 19 nt, Artificial Sequence
  Description of Artificial Sequence: Synthetic oligonucleotide
  Antisense strand to SEQ ID NO: 1775611
aacuuaguuaaacauacag

SEQ ID NO: 1775613 - RNA, 19 nt, Artificial Sequence
  Description of Artificial Sequence: Synthetic oligonucleotide
  Sense strand starting at position 3151 of SEQ ID NO: 1562826
uucuguccuccucaugaga

SEQ ID NO: 1775614 - RNA, 19 nt, Artificial Sequence
  Description of Artificial Sequence: Synthetic oligonucleotide
  Antisense strand to SEQ ID NO: 1775613
ucucaugaggaggacagaa

SEQ ID NO: 1775615 - RNA, 19 nt, Artificial Sequence
  Description of Artificial Sequence: Synthetic oligonucleotide
  Sense strand starting at position 3153 of SEQ ID NO: 1562826
cuguccuccucaugagaau

SEQ ID NO: 1775616 - RNA, 19 nt, Artificial Sequence
  Description of Artificial Sequence: Synthetic oligonucleotide
  Antisense strand to SEQ ID NO: 1775615
auucucaugaggaggacag

SEQ ID NO: 1775617 - RNA, 19 nt, Artificial Sequence
  Description of Artificial Sequence: Synthetic oligonucleotide
  Sense strand starting at position 3154 of SEQ ID NO: 1562826
uguccuccucaugagaaua

SEQ ID NO: 1775618 - RNA, 19 nt, Artificial Sequence
  Description of Artificial Sequence: Synthetic oligonucleotide
  Antisense strand to SEQ ID NO: 1775617
uauucucaugaggaggaca

SEQ ID NO: 1775619 - RNA, 19 nt, Artificial Sequence
  Description of Artificial Sequence: Synthetic oligonucleotide
  Sense strand starting at position 3409 of SEQ ID NO: 1562826
aggccauauucucagaaug

SEQ ID NO: 1775620 - RNA, 19 nt, Artificial Sequence
  Description of Artificial Sequence: Synthetic oligonucleotide
  Antisense strand to SEQ ID NO: 1775619
cauucugagaauauggccu

SEQ ID NO: 1775621 - RNA, 19 nt, Artificial Sequence
  Description of Artificial Sequence: Synthetic oligonucleotide
  Sense strand starting at position 3411 of SEQ ID NO: 1562826
gccauauucucagaauggu

SEQ ID NO: 1775622 - RNA, 19 nt, Artificial Sequence
  Description of Artificial Sequence: Synthetic oligonucleotide
  Antisense strand to SEQ ID NO: 1775621
accauucugagaauauggc

SEQ ID NO: 1775623 - RNA, 19 nt, Artificial Sequence
  Description of Artificial Sequence: Synthetic oligonucleotide
  Sense strand starting at position 3414 of SEQ ID NO: 1562826
auauucucagaauggugau

SEQ ID NO: 1775624 - RNA, 19 nt, Artificial Sequence
  Description of Artificial Sequence: Synthetic oligonucleotide
  Antisense strand to SEQ ID NO: 1775623
aucaccauucugagaauau

SEQ ID NO: 1775625 - RNA, 19 nt, Artificial Sequence
  Description of Artificial Sequence: Synthetic oligonucleotide
  Sense strand starting at position 3417 of SEQ ID NO: 1562826
uucucagaauggugaugau

SEQ ID NO: 1775626 - RNA, 19 nt, Artificial Sequence
  Description of Artificial Sequence: Synthetic oligonucleotide
  Antisense strand to SEQ ID NO: 1775625
aucaucaccauucugagaa

SEQ ID NO: 1775627 - RNA, 19 nt, Artificial Sequence
  Description of Artificial Sequence: Synthetic oligonucleotide
  Sense strand starting at position 3814 of SEQ ID NO: 1562826
gcuguaugacucuaggaaa

SEQ ID NO: 1775628 - RNA, 19 nt, Artificial Sequence
  Description of Artificial Sequence: Synthetic oligonucleotide
  Antisense strand to SEQ ID NO: 1775627
uuuccuagagucauacagc

SEQ ID NO: 1775629 - RNA, 19 nt, Artificial Sequence
  Description of Artificial Sequence: Synthetic oligonucleotide
  Sense strand starting at position 3817 of SEQ ID NO: 1562826
guaugacucuaggaaaguu

SEQ ID NO: 1775630 - RNA, 19 nt, Artificial Sequence
  Description of Artificial Sequence: Synthetic oligonucleotide
  Antisense strand to SEQ ID NO: 1775629
aacuuuccuagagucauac

SEQ ID NO: 1775631 - RNA, 19 nt, Artificial Sequence
  Description of Artificial Sequence: Synthetic oligonucleotide
  Sense strand starting at position 3864 of SEQ ID NO: 1562826
aaauaugacuuggugacga

SEQ ID NO: 1775632 - RNA, 19 nt, Artificial Sequence
  Description of Artificial Sequence: Synthetic oligonucleotide
  Antisense strand to SEQ ID NO: 1775631
ucgucaccaagucauauuu

SEQ ID NO: 1775633 - RNA, 19 nt, Artificial Sequence
  Description of Artificial Sequence: Synthetic oligonucleotide
  Sense strand starting at position 3866 of SEQ ID NO: 1562826
auaugacuuggugacgauu

SEQ ID NO: 1775634 - RNA, 19 nt, Artificial Sequence
  Description of Artificial Sequence: Synthetic oligonucleotide
  Antisense strand to SEQ ID NO: 1775633
aaucgucaccaagucauau

SEQ ID NO: 1775635 - RNA, 19 nt, Artificial Sequence
  Description of Artificial Sequence: Synthetic oligonucleotide
  Sense strand starting at position 3869 of SEQ ID NO: 1562826
ugacuuggugacgauuaca

SEQ ID NO: 1775636 - RNA, 19 nt, Artificial Sequence
  Description of Artificial Sequence: Synthetic oligonucleotide
  Antisense strand to SEQ ID NO: 1775635
uguaaucgucaccaaguca

SEQ ID NO: 1775637 - RNA, 19 nt, Artificial Sequence
  Description of Artificial Sequence: Synthetic oligonucleotide
  Sense strand starting at position 2028 of SEQ ID NO: 1562827
gagucaacucgcgguacca

SEQ ID NO: 1775638 - RNA, 19 nt, Artificial Sequence
  Description of Artificial Sequence: Synthetic oligonucleotide
  Antisense strand to SEQ ID NO: 1775637
ugguaccgcgaguugacuc

SEQ ID NO: 1775639 - RNA, 19 nt, Artificial Sequence
  Description of Artificial Sequence: Synthetic oligonucleotide
  Sense strand starting at position 2205 of SEQ ID NO: 1562827
uaacaugcgccuugggaaa

SEQ ID NO: 1775640 - RNA, 19 nt, Artificial Sequence
  Description of Artificial Sequence: Synthetic oligonucleotide
  Antisense strand to SEQ ID NO: 1775639
uuucccaaggcgcauguua

SEQ ID NO: 1775641 - RNA, 19 nt, Artificial Sequence
  Description of Artificial Sequence: Synthetic oligonucleotide
  Sense strand starting at position 3084 of SEQ ID NO: 1562827
gaggucuaucucuggcuuu

SEQ ID NO: 1775642 - RNA, 19 nt, Artificial Sequence
  Description of Artificial Sequence: Synthetic oligonucleotide
  Antisense strand to SEQ ID NO: 1775641
aaagccagagauagaccuc

SEQ ID NO: 1775643 - RNA, 19 nt, Artificial Sequence
  Description of Artificial Sequence: Synthetic oligonucleotide
  Sense strand starting at position 3085 of SEQ ID NO: 1562827
aggucuaucucuggcuuua

SEQ ID NO: 1775644 - RNA, 19 nt, Artificial Sequence
  Description of Artificial Sequence: Synthetic oligonucleotide
  Antisense strand to SEQ ID NO: 1775643
uaaagccagagauagaccu

SEQ ID NO: 1775645 - RNA, 19 nt, Artificial Sequence
  Description of Artificial Sequence: Synthetic oligonucleotide
  Sense strand starting at position 3087 of SEQ ID NO: 1562827
gucuaucucuggcuuuaua

SEQ ID NO: 1775646 - RNA, 19 nt, Artificial Sequence
  Description of Artificial Sequence: Synthetic oligonucleotide
  Antisense strand to SEQ ID NO: 1775645
uauaaagccagagauagac

SEQ ID NO: 1775647 - RNA, 19 nt, Artificial Sequence
  Description of Artificial Sequence: Synthetic oligonucleotide
  Sense strand starting at position 3265 of SEQ ID NO: 1562827
ggcuauugugaauaaauca

SEQ ID NO: 1775648 - RNA, 19 nt, Artificial Sequence
  Description of Artificial Sequence: Synthetic oligonucleotide
  Antisense strand to SEQ ID NO: 1775647
ugauuuauucacaauagcc

SEQ ID NO: 1775649 - RNA, 19 nt, Artificial Sequence
  Description of Artificial Sequence: Synthetic oligonucleotide
  Sense strand starting at position 3272 of SEQ ID NO: 1562827
gugaauaaaucacucugua

SEQ ID NO: 1775650 - RNA, 19 nt, Artificial Sequence
  Description of Artificial Sequence: Synthetic oligonucleotide
  Antisense strand to SEQ ID NO: 1775649
uacagagugauuuauucac

SEQ ID NO: 1775651 - RNA, 19 nt, Artificial Sequence
  Description of Artificial Sequence: Synthetic oligonucleotide
  Sense strand starting at position 3346 of SEQ ID NO: 1562827
ucaguuuauggcuguggaa

SEQ ID NO: 1775652 - RNA, 19 nt, Artificial Sequence
  Description of Artificial Sequence: Synthetic oligonucleotide
  Antisense strand to SEQ ID NO: 1775651
uuccacagccauaaacuga

SEQ ID NO: 1775653 - RNA, 19 nt, Artificial Sequence
  Description of Artificial Sequence: Synthetic oligonucleotide
  Sense strand starting at position 3348 of SEQ ID NO: 1562827
aguuuauggcuguggaaug

SEQ ID NO: 1775654 - RNA, 19 nt, Artificial Sequence
  Description of Artificial Sequence: Synthetic oligonucleotide
  Antisense strand to SEQ ID NO: 1775653
cauuccacagccauaaacu

SEQ ID NO: 1775655 - RNA, 19 nt, Artificial Sequence
  Description of Artificial Sequence: Synthetic oligonucleotide
  Sense strand starting at position 3363 of SEQ ID NO: 1562827
aauggagaugcuuguauau

SEQ ID NO: 1775656 - RNA, 19 nt, Artificial Sequence
  Description of Artificial Sequence: Synthetic oligonucleotide
  Antisense strand to SEQ ID NO: 1775655
auauacaagcaucuccauu

SEQ ID NO: 1775657 - RNA, 19 nt, Artificial Sequence
  Description of Artificial Sequence: Synthetic oligonucleotide
  Sense strand starting at position 3365 of SEQ ID NO: 1562827
uggagaugcuuguauauuc

SEQ ID NO: 1775658 - RNA, 19 nt, Artificial Sequence
  Description of Artificial Sequence: Synthetic oligonucleotide
  Antisense strand to SEQ ID NO: 1775657
gaauauacaagcaucucca

SEQ ID NO: 1775659 - RNA, 19 nt, Artificial Sequence
  Description of Artificial Sequence: Synthetic oligonucleotide
  Sense strand starting at position 3370 of SEQ ID NO: 1562827
augcuuguauauucucauu

SEQ ID NO: 1775660 - RNA, 19 nt, Artificial Sequence
  Description of Artificial Sequence: Synthetic oligonucleotide
  Antisense strand to SEQ ID NO: 1775659
aaugagaauauacaagcau

SEQ ID NO: 1775661 - RNA, 19 nt, Artificial Sequence
  Description of Artificial Sequence: Synthetic oligonucleotide
  Sense strand starting at position 3372 of SEQ ID NO: 1562827
gcuuguauauucucauucu

SEQ ID NO: 1775662 - RNA, 19 nt, Artificial Sequence
  Description of Artificial Sequence: Synthetic oligonucleotide
  Antisense strand to SEQ ID NO: 1775661
agaaugagaauauacaagc

SEQ ID NO: 1775663 - RNA, 19 nt, Artificial Sequence
  Description of Artificial Sequence: Synthetic oligonucleotide
  Sense strand starting at position 3799 of SEQ ID NO: 1562827
cccuguugcucccaguuua

SEQ ID NO: 1775664 - RNA, 19 nt, Artificial Sequence
  Description of Artificial Sequence: Synthetic oligonucleotide
  Antisense strand to SEQ ID NO: 1775663
uaaacugggagcaacaggg

SEQ ID NO: 1775665 - RNA, 19 nt, Artificial Sequence
  Description of Artificial Sequence: Synthetic oligonucleotide
  Sense strand starting at position 3812 of SEQ ID NO: 1562827
aguuuauaccaccauggua

SEQ ID NO: 1775666 - RNA, 19 nt, Artificial Sequence
  Description of Artificial Sequence: Synthetic oligonucleotide
  Antisense strand to SEQ ID NO: 1775665
uaccauggugguauaaacu

SEQ ID NO: 1775667 - RNA, 19 nt, Artificial Sequence
  Description of Artificial Sequence: Synthetic oligonucleotide
  Sense strand starting at position 327 of SEQ ID NO: 1562828
uuagaaugggucugagcca

SEQ ID NO: 1775668 - RNA, 19 nt, Artificial Sequence
  Description of Artificial Sequence: Synthetic oligonucleotide
  Antisense strand to SEQ ID NO: 1775667
uggcucagacccauucuaa

SEQ ID NO: 1775669 - RNA, 19 nt, Artificial Sequence
  Description of Artificial Sequence: Synthetic oligonucleotide
  Sense strand starting at position 551 of SEQ ID NO: 1562828
agccuuugcucaugccauu

SEQ ID NO: 1775670 - RNA, 19 nt, Artificial Sequence
  Description of Artificial Sequence: Synthetic oligonucleotide
  Antisense strand to SEQ ID NO: 1775669
aauggcaugagcaaaggcu

SEQ ID NO: 1775671 - RNA, 19 nt, Artificial Sequence
  Description of Artificial Sequence: Synthetic oligonucleotide
  Sense strand starting at position 618 of SEQ ID NO: 1562828
ggcagcuuccugucgucau

SEQ ID NO: 1775672 - RNA, 19 nt, Artificial Sequence
  Description of Artificial Sequence: Synthetic oligonucleotide
  Antisense strand to SEQ ID NO: 1775671
augacgacaggaagcugcc

SEQ ID NO: 1775673 - RNA, 19 nt, Artificial Sequence
  Description of Artificial Sequence: Synthetic oligonucleotide
  Sense strand starting at position 628 of SEQ ID NO: 1562828
ugucgucaucucuuccagu

SEQ ID NO: 1775674 - RNA, 19 nt, Artificial Sequence
  Description of Artificial Sequence: Synthetic oligonucleotide
  Antisense strand to SEQ ID NO: 1775673
acuggaagagaugacgaca

SEQ ID NO: 1775675 - RNA, 19 nt, Artificial Sequence
  Description of Artificial Sequence: Synthetic oligonucleotide
  Sense strand starting at position 629 of SEQ ID NO: 1562828
gucgucaucucuuccagua

SEQ ID NO: 1775676 - RNA, 19 nt, Artificial Sequence
  Description of Artificial Sequence: Synthetic oligonucleotide
  Antisense strand to SEQ ID NO: 1775675
uacuggaagagaugacgac

SEQ ID NO: 1775677 - RNA, 19 nt, Artificial Sequence
  Description of Artificial Sequence: Synthetic oligonucleotide
  Sense strand starting at position 631 of SEQ ID NO: 1562828
cgucaucucuuccaguaac

SEQ ID NO: 1775678 - RNA, 19 nt, Artificial Sequence
  Description of Artificial Sequence: Synthetic oligonucleotide
  Antisense strand to SEQ ID NO: 1775677
guuacuggaagagaugacg

SEQ ID NO: 1775679 - RNA, 19 nt, Artificial Sequence
  Description of Artificial Sequence: Synthetic oligonucleotide
  Sense strand starting at position 793 of SEQ ID NO: 1562828
gcuccaugucuggaucuuu

SEQ ID NO: 1775680 - RNA, 19 nt, Artificial Sequence
  Description of Artificial Sequence: Synthetic oligonucleotide
  Antisense strand to SEQ ID NO: 1775679
aaagauccagacauggagc

SEQ ID NO: 1775681 - RNA, 19 nt, Artificial Sequence
  Description of Artificial Sequence: Synthetic oligonucleotide
  Sense strand starting at position 878 of SEQ ID NO: 1562828
acuggugugucccaggaau

SEQ ID NO: 1775682 - RNA, 19 nt, Artificial Sequence
  Description of Artificial Sequence: Synthetic oligonucleotide
  Antisense strand to SEQ ID NO: 1775681
auuccugggacacaccagu

SEQ ID NO: 1775683 - RNA, 19 nt, Artificial Sequence
  Description of Artificial Sequence: Synthetic oligonucleotide
  Sense strand starting at position 880 of SEQ ID NO: 1562828
uggugugucccaggaauga

SEQ ID NO: 1775684 - RNA, 19 nt, Artificial Sequence
  Description of Artificial Sequence: Synthetic oligonucleotide
  Antisense strand to SEQ ID NO: 1775683
ucauuccugggacacacca

SEQ ID NO: 1775685 - RNA, 19 nt, Artificial Sequence
  Description of Artificial Sequence: Synthetic oligonucleotide
  Sense strand starting at position 928 of SEQ ID NO: 1562828
gguagugugucugcccaca

SEQ ID NO: 1775686 - RNA, 19 nt, Artificial Sequence
  Description of Artificial Sequence: Synthetic oligonucleotide
  Antisense strand to SEQ ID NO: 1775685
ugugggcagacacacuacc

SEQ ID NO: 1775687 - RNA, 19 nt, Artificial Sequence
  Description of Artificial Sequence: Synthetic oligonucleotide
  Sense strand starting at position 2436 of SEQ ID NO: 1562828
gcaagucccguucugugua

SEQ ID NO: 1775688 - RNA, 19 nt, Artificial Sequence
  Description of Artificial Sequence: Synthetic oligonucleotide
  Antisense strand to SEQ ID NO: 1775687
uacacagaacgggacuugc

SEQ ID NO: 1775689 - RNA, 19 nt, Artificial Sequence
  Description of Artificial Sequence: Synthetic oligonucleotide
  Sense strand starting at position 2594 of SEQ ID NO: 1562828
cgggauuucgcauaggcau

SEQ ID NO: 1775690 - RNA, 19 nt, Artificial Sequence
  Description of Artificial Sequence: Synthetic oligonucleotide
  Antisense strand to SEQ ID NO: 1775689
augccuaugcgaaaucccg

SEQ ID NO: 1775691 - RNA, 19 nt, Artificial Sequence
  Description of Artificial Sequence: Synthetic oligonucleotide
  Sense strand starting at position 3114 of SEQ ID NO: 1562828
ggaugcgcuaccuauucua

SEQ ID NO: 1775692 - RNA, 19 nt, Artificial Sequence
  Description of Artificial Sequence: Synthetic oligonucleotide
  Antisense strand to SEQ ID NO: 1775691
uagaauagguagcgcaucc

SEQ ID NO: 1775693 - RNA, 19 nt, Artificial Sequence
  Description of Artificial Sequence: Synthetic oligonucleotide
  Sense strand starting at position 3117 of SEQ ID NO: 1562828
ugcgcuaccuauucuauau

SEQ ID NO: 1775694 - RNA, 19 nt, Artificial Sequence
  Description of Artificial Sequence: Synthetic oligonucleotide
  Antisense strand to SEQ ID NO: 1775693
auauagaauagguagcgca

SEQ ID NO: 1775695 - RNA, 19 nt, Artificial Sequence
  Description of Artificial Sequence: Synthetic oligonucleotide
  Sense strand starting at position 3129 of SEQ ID NO: 1562828
ucuauaucccagcgaaugu

SEQ ID NO: 1775696 - RNA, 19 nt, Artificial Sequence
  Description of Artificial Sequence: Synthetic oligonucleotide
  Antisense strand to SEQ ID NO: 1775695
acauucgcugggauauaga

SEQ ID NO: 1775697 - RNA, 19 nt, Artificial Sequence
  Description of Artificial Sequence: Synthetic oligonucleotide
  Sense strand starting at position 3138 of SEQ ID NO: 1562828
cagcgaaugugcuccagaa

SEQ ID NO: 1775698 - RNA, 19 nt, Artificial Sequence
  Description of Artificial Sequence: Synthetic oligonucleotide
  Antisense strand to SEQ ID NO: 1775697
uucuggagcacauucgcug

SEQ ID NO: 1775699 - RNA, 19 nt, Artificial Sequence
  Description of Artificial Sequence: Synthetic oligonucleotide
  Sense strand starting at position 3140 of SEQ ID NO: 1562828
gcgaaugugcuccagaaua

SEQ ID NO: 1775700 - RNA, 19 nt, Artificial Sequence
  Description of Artificial Sequence: Synthetic oligonucleotide
  Antisense strand to SEQ ID NO: 1775699
uauucuggagcacauucgc

SEQ ID NO: 1775701 - RNA, 19 nt, Artificial Sequence
  Description of Artificial Sequence: Synthetic oligonucleotide
  Sense strand starting at position 3142 of SEQ ID NO: 1562828
gaaugugcuccagaauagu

SEQ ID NO: 1775702 - RNA, 19 nt, Artificial Sequence
  Description of Artificial Sequence: Synthetic oligonucleotide
  Antisense strand to SEQ ID NO: 1775701
acuauucuggagcacauuc

SEQ ID NO: 1775703 - RNA, 19 nt, Artificial Sequence
  Description of Artificial Sequence: Synthetic oligonucleotide
  Sense strand starting at position 3161 of SEQ ID NO: 1562828
cccagaggccuuugcugaa

SEQ ID NO: 1775704 - RNA, 19 nt, Artificial Sequence
  Description of Artificial Sequence: Synthetic oligonucleotide
  Antisense strand to SEQ ID NO: 1775703
uucagcaaaggccucuggg

SEQ ID NO: 1775705 - RNA, 19 nt, Artificial Sequence
  Description of Artificial Sequence: Synthetic oligonucleotide
  Sense strand starting at position 3165 of SEQ ID NO: 1562828
gaggccuuugcugaaccau

SEQ ID NO: 1775706 - RNA, 19 nt, Artificial Sequence
  Description of Artificial Sequence: Synthetic oligonucleotide
  Antisense strand to SEQ ID NO: 1775705
augguucagcaaaggccuc

SEQ ID NO: 1775707 - RNA, 19 nt, Artificial Sequence
  Description of Artificial Sequence: Synthetic oligonucleotide
  Sense strand starting at position 3253 of SEQ ID NO: 1562828
gaggcagagugauccuacu

SEQ ID NO: 1775708 - RNA, 19 nt, Artificial Sequence
  Description of Artificial Sequence: Synthetic oligonucleotide
  Antisense strand to SEQ ID NO: 1775707
aguaggaucacucugccuc

SEQ ID NO: 1775709 - RNA, 19 nt, Artificial Sequence
  Description of Artificial Sequence: Synthetic oligonucleotide
  Sense strand starting at position 3465 of SEQ ID NO: 1562828
gcuuuaagagauugauugu

SEQ ID NO: 1775710 - RNA, 19 nt, Artificial Sequence
  Description of Artificial Sequence: Synthetic oligonucleotide
  Antisense strand to SEQ ID NO: 1775709
acaaucaaucucuuaaagc

SEQ ID NO: 1775711 - RNA, 19 nt, Artificial Sequence
  Description of Artificial Sequence: Synthetic oligonucleotide
  Sense strand starting at position 3471 of SEQ ID NO: 1562828
agagauugauuguaaaucu

SEQ ID NO: 1775712 - RNA, 19 nt, Artificial Sequence
  Description of Artificial Sequence: Synthetic oligonucleotide
  Antisense strand to SEQ ID NO: 1775711
agauuuacaaucaaucucu

SEQ ID NO: 1775713 - RNA, 19 nt, Artificial Sequence
  Description of Artificial Sequence: Synthetic oligonucleotide
  Sense strand starting at position 3619 of SEQ ID NO: 1562828
aaauuugaauuucguguca

SEQ ID NO: 1775714 - RNA, 19 nt, Artificial Sequence
  Description of Artificial Sequence: Synthetic oligonucleotide
  Antisense strand to SEQ ID NO: 1775713
ugacacgaaauucaaauuu

SEQ ID NO: 1775715 - RNA, 19 nt, Artificial Sequence
  Description of Artificial Sequence: Synthetic oligonucleotide
  Sense strand starting at position 3621 of SEQ ID NO: 1562828
auuugaauuucgugucauu

SEQ ID NO: 1775716 - RNA, 19 nt, Artificial Sequence
  Description of Artificial Sequence: Synthetic oligonucleotide
  Antisense strand to SEQ ID NO: 1775715
aaugacacgaaauucaaau

SEQ ID NO: 1775717 - RNA, 19 nt, Artificial Sequence
  Description of Artificial Sequence: Synthetic oligonucleotide
  Sense strand starting at position 3681 of SEQ ID NO: 1562828
uugaaaguguaagauccau

SEQ ID NO: 1775718 - RNA, 19 nt, Artificial Sequence
  Description of Artificial Sequence: Synthetic oligonucleotide
  Antisense strand to SEQ ID NO: 1775717
auggaucuuacacuuucaa

SEQ ID NO: 1775719 - RNA, 19 nt, Artificial Sequence
  Description of Artificial Sequence: Synthetic oligonucleotide
  Sense strand starting at position 9 of SEQ ID NO: 1562829
gaagucucaugauuguaag

SEQ ID NO: 1775720 - RNA, 19 nt, Artificial Sequence
  Description of Artificial Sequence: Synthetic oligonucleotide
  Antisense strand to SEQ ID NO: 1775719
cuuacaaucaugagacuuc

SEQ ID NO: 1775721 - RNA, 19 nt, Artificial Sequence
  Description of Artificial Sequence: Synthetic oligonucleotide
  Sense strand starting at position 10 of SEQ ID NO: 1562829
aagucucaugauuguaaga

SEQ ID NO: 1775722 - RNA, 19 nt, Artificial Sequence
  Description of Artificial Sequence: Synthetic oligonucleotide
  Antisense strand to SEQ ID NO: 1775721
ucuuacaaucaugagacuu

SEQ ID NO: 1775723 - RNA, 19 nt, Artificial Sequence
  Description of Artificial Sequence: Synthetic oligonucleotide
  Sense strand starting at position 112 of SEQ ID NO: 1562829
ccugccauggcuuaagaga

SEQ ID NO: 1775724 - RNA, 19 nt, Artificial Sequence
  Description of Artificial Sequence: Synthetic oligonucleotide
  Antisense strand to SEQ ID NO: 1775723
ucucuuaagccauggcagg

SEQ ID NO: 1775725 - RNA, 19 nt, Artificial Sequence
  Description of Artificial Sequence: Synthetic oligonucleotide
  Sense strand starting at position 164 of SEQ ID NO: 1562829
cagaaccaucagugcuaga

SEQ ID NO: 1775726 - RNA, 19 nt, Artificial Sequence
  Description of Artificial Sequence: Synthetic oligonucleotide
  Antisense strand to SEQ ID NO: 1775725
ucuagcacugaugguucug

SEQ ID NO: 1775727 - RNA, 19 nt, Artificial Sequence
  Description of Artificial Sequence: Synthetic oligonucleotide
  Sense strand starting at position 169 of SEQ ID NO: 1562829
ccaucagugcuagacacaa

SEQ ID NO: 1775728 - RNA, 19 nt, Artificial Sequence
  Description of Artificial Sequence: Synthetic oligonucleotide
  Antisense strand to SEQ ID NO: 1775727
uugugucuagcacugaugg

SEQ ID NO: 1775729 - RNA, 19 nt, Artificial Sequence
  Description of Artificial Sequence: Synthetic oligonucleotide
  Sense strand starting at position 411 of SEQ ID NO: 1562829
cacacaugauucccgggaa

SEQ ID NO: 1775730 - RNA, 19 nt, Artificial Sequence
  Description of Artificial Sequence: Synthetic oligonucleotide
  Antisense strand to SEQ ID NO: 1775729
uucccgggaaucaugugug

SEQ ID NO: 1775731 - RNA, 19 nt, Artificial Sequence
  Description of Artificial Sequence: Synthetic oligonucleotide
  Sense strand starting at position 414 of SEQ ID NO: 1562829
acaugauucccgggaagca

SEQ ID NO: 1775732 - RNA, 19 nt, Artificial Sequence
  Description of Artificial Sequence: Synthetic oligonucleotide
  Antisense strand to SEQ ID NO: 1775731
ugcuucccgggaaucaugu

SEQ ID NO: 1775733 - RNA, 19 nt, Artificial Sequence
  Description of Artificial Sequence: Synthetic oligonucleotide
  Sense strand starting at position 415 of SEQ ID NO: 1562829
caugauucccgggaagcaa

SEQ ID NO: 1775734 - RNA, 19 nt, Artificial Sequence
  Description of Artificial Sequence: Synthetic oligonucleotide
  Antisense strand to SEQ ID NO: 1775733
uugcuucccgggaaucaug

SEQ ID NO: 1775735 - RNA, 19 nt, Artificial Sequence
  Description of Artificial Sequence: Synthetic oligonucleotide
  Sense strand starting at position 499 of SEQ ID NO: 1562829
ccaggaacaugaucucgaa

SEQ ID NO: 1775736 - RNA, 19 nt, Artificial Sequence
  Description of Artificial Sequence: Synthetic oligonucleotide
  Antisense strand to SEQ ID NO: 1775735
uucgagaucauguuccugg

SEQ ID NO: 1775737 - RNA, 19 nt, Artificial Sequence
  Description of Artificial Sequence: Synthetic oligonucleotide
  Sense strand starting at position 646 of SEQ ID NO: 1562829
guacucacucaugaaaguc

SEQ ID NO: 1775738 - RNA, 19 nt, Artificial Sequence
  Description of Artificial Sequence: Synthetic oligonucleotide
  Antisense strand to SEQ ID NO: 1775737
gacuuucaugagugaguac

SEQ ID NO: 1775739 - RNA, 19 nt, Artificial Sequence
  Description of Artificial Sequence: Synthetic oligonucleotide
  Sense strand starting at position 756 of SEQ ID NO: 1562829
auuaaagcucgugaaagaa

SEQ ID NO: 1775740 - RNA, 19 nt, Artificial Sequence
  Description of Artificial Sequence: Synthetic oligonucleotide
  Antisense strand to SEQ ID NO: 1775739
uucuuucacgagcuuuaau

SEQ ID NO: 1775741 - RNA, 19 nt, Artificial Sequence
  Description of Artificial Sequence: Synthetic oligonucleotide
  Sense strand starting at position 765 of SEQ ID NO: 1562829
cgugaaagaacauaacgua

SEQ ID NO: 1775742 - RNA, 19 nt, Artificial Sequence
  Description of Artificial Sequence: Synthetic oligonucleotide
  Antisense strand to SEQ ID NO: 1775741
uacguuauguucuuucacg

SEQ ID NO: 1775743 - RNA, 19 nt, Artificial Sequence
  Description of Artificial Sequence: Synthetic oligonucleotide
  Sense strand starting at position 1111 of SEQ ID NO: 1562829
ccagcuacugaguauggaa

SEQ ID NO: 1775744 - RNA, 19 nt, Artificial Sequence
  Description of Artificial Sequence: Synthetic oligonucleotide
  Antisense strand to SEQ ID NO: 1775743
uuccauacucaguagcugg

SEQ ID NO: 1775745 - RNA, 19 nt, Artificial Sequence
  Description of Artificial Sequence: Synthetic oligonucleotide
  Sense strand starting at position 1306 of SEQ ID NO: 1562829
ugaaacuuugaacgcucaa

SEQ ID NO: 1775746 - RNA, 19 nt, Artificial Sequence
  Description of Artificial Sequence: Synthetic oligonucleotide
  Antisense strand to SEQ ID NO: 1775745
uugagcguucaaaguuuca

SEQ ID NO: 1775747 - RNA, 19 nt, Artificial Sequence
  Description of Artificial Sequence: Synthetic oligonucleotide
  Sense strand starting at position 1313 of SEQ ID NO: 1562829
uugaacgcucaauauguaa

SEQ ID NO: 1775748 - RNA, 19 nt, Artificial Sequence
  Description of Artificial Sequence: Synthetic oligonucleotide
  Antisense strand to SEQ ID NO: 1775747
uuacauauugagcguucaa

SEQ ID NO: 1775749 - RNA, 19 nt, Artificial Sequence
  Description of Artificial Sequence: Synthetic oligonucleotide
  Sense strand starting at position 1422 of SEQ ID NO: 1562829
cugauuucuuaugcuaggu

SEQ ID NO: 1775750 - RNA, 19 nt, Artificial Sequence
  Description of Artificial Sequence: Synthetic oligonucleotide
  Antisense strand to SEQ ID NO: 1775749
accuagcauaagaaaucag

SEQ ID NO: 1775751 - RNA, 19 nt, Artificial Sequence
  Description of Artificial Sequence: Synthetic oligonucleotide
  Sense strand starting at position 1566 of SEQ ID NO: 1562829
guagaucauauauggugaa

SEQ ID NO: 1775752 - RNA, 19 nt, Artificial Sequence
  Description of Artificial Sequence: Synthetic oligonucleotide
  Antisense strand to SEQ ID NO: 1775751
uucaccauauaugaucuac

SEQ ID NO: 1775753 - RNA, 19 nt, Artificial Sequence
  Description of Artificial Sequence: Synthetic oligonucleotide
  Sense strand starting at position 1884 of SEQ ID NO: 1562829
ggacaugagcuggguucau

SEQ ID NO: 1775754 - RNA, 19 nt, Artificial Sequence
  Description of Artificial Sequence: Synthetic oligonucleotide
  Antisense strand to SEQ ID NO: 1775753
augaacccagcucaugucc

SEQ ID NO: 1775755 - RNA, 19 nt, Artificial Sequence
  Description of Artificial Sequence: Synthetic oligonucleotide
  Sense strand starting at position 2025 of SEQ ID NO: 1562829
guuagcauuucucugucua

SEQ ID NO: 1775756 - RNA, 19 nt, Artificial Sequence
  Description of Artificial Sequence: Synthetic oligonucleotide
  Antisense strand to SEQ ID NO: 1775755
uagacagagaaaugcuaac

SEQ ID NO: 1775757 - RNA, 19 nt, Artificial Sequence
  Description of Artificial Sequence: Synthetic oligonucleotide
  Sense strand starting at position 2026 of SEQ ID NO: 1562829
uuagcauuucucugucuac

SEQ ID NO: 1775758 - RNA, 19 nt, Artificial Sequence
  Description of Artificial Sequence: Synthetic oligonucleotide
  Antisense strand to SEQ ID NO: 1775757
guagacagagaaaugcuaa

SEQ ID NO: 1775759 - RNA, 19 nt, Artificial Sequence
  Description of Artificial Sequence: Synthetic oligonucleotide
  Sense strand starting at position 2099 of SEQ ID NO: 1562829
gucauccauccauaagugu

SEQ ID NO: 1775760 - RNA, 19 nt, Artificial Sequence
  Description of Artificial Sequence: Synthetic oligonucleotide
  Antisense strand to SEQ ID NO: 1775759
acacuuauggauggaugac

SEQ ID NO: 1775761 - RNA, 19 nt, Artificial Sequence
  Description of Artificial Sequence: Synthetic oligonucleotide
  Sense strand starting at position 2308 of SEQ ID NO: 1562829
gaucuaagucacuauuggu

SEQ ID NO: 1775762 - RNA, 19 nt, Artificial Sequence
  Description of Artificial Sequence: Synthetic oligonucleotide
  Antisense strand to SEQ ID NO: 1775761
accaauagugacuuagauc

SEQ ID NO: 1775763 - RNA, 19 nt, Artificial Sequence
  Description of Artificial Sequence: Synthetic oligonucleotide
  Sense strand starting at position 2376 of SEQ ID NO: 1562829
cugagucucucagcauaaa

SEQ ID NO: 1775764 - RNA, 19 nt, Artificial Sequence
  Description of Artificial Sequence: Synthetic oligonucleotide
  Antisense strand to SEQ ID NO: 1775763
uuuaugcugagagacucag

SEQ ID NO: 1775765 - RNA, 19 nt, Artificial Sequence
  Description of Artificial Sequence: Synthetic oligonucleotide
  Sense strand starting at position 2377 of SEQ ID NO: 1562829
ugagucucucagcauaaau

SEQ ID NO: 1775766 - RNA, 19 nt, Artificial Sequence
  Description of Artificial Sequence: Synthetic oligonucleotide
  Antisense strand to SEQ ID NO: 1775765
auuuaugcugagagacuca

SEQ ID NO: 1775767 - RNA, 19 nt, Artificial Sequence
  Description of Artificial Sequence: Synthetic oligonucleotide
  Sense strand starting at position 2379 of SEQ ID NO: 1562829
agucucucagcauaaaugu

SEQ ID NO: 1775768 - RNA, 19 nt, Artificial Sequence
  Description of Artificial Sequence: Synthetic oligonucleotide
  Antisense strand to SEQ ID NO: 1775767
acauuuaugcugagagacu

SEQ ID NO: 1775769 - RNA, 19 nt, Artificial Sequence
  Description of Artificial Sequence: Synthetic oligonucleotide
  Sense strand starting at position 2450 of SEQ ID NO: 1562829
gagugacucguacagauca

SEQ ID NO: 1775770 - RNA, 19 nt, Artificial Sequence
  Description of Artificial Sequence: Synthetic oligonucleotide
  Antisense strand to SEQ ID NO: 1775769
ugaucuguacgagucacuc

SEQ ID NO: 1775771 - RNA, 19 nt, Artificial Sequence
  Description of Artificial Sequence: Synthetic oligonucleotide
  Sense strand starting at position 2452 of SEQ ID NO: 1562829
gugacucguacagaucaaa

SEQ ID NO: 1775772 - RNA, 19 nt, Artificial Sequence
  Description of Artificial Sequence: Synthetic oligonucleotide
  Antisense strand to SEQ ID NO: 1775771
uuugaucuguacgagucac

SEQ ID NO: 1775773 - RNA, 19 nt, Artificial Sequence
  Description of Artificial Sequence: Synthetic oligonucleotide
  Sense strand starting at position 2506 of SEQ ID NO: 1562829
cccggauuaaacggagaca

SEQ ID NO: 1775774 - RNA, 19 nt, Artificial Sequence
  Description of Artificial Sequence: Synthetic oligonucleotide
  Antisense strand to SEQ ID NO: 1775773
ugucuccguuuaauccggg

SEQ ID NO: 1775775 - RNA, 19 nt, Artificial Sequence
  Description of Artificial Sequence: Synthetic oligonucleotide
  Sense strand starting at position 2522 of SEQ ID NO: 1562829
acaucaggccaauggauua

SEQ ID NO: 1775776 - RNA, 19 nt, Artificial Sequence
  Description of Artificial Sequence: Synthetic oligonucleotide
  Antisense strand to SEQ ID NO: 1775775
uaauccauuggccugaugu

SEQ ID NO: 1775777 - RNA, 19 nt, Artificial Sequence
  Description of Artificial Sequence: Synthetic oligonucleotide
  Sense strand starting at position 2623 of SEQ ID NO: 1562829
ccgggaagucgguacaaau

SEQ ID NO: 1775778 - RNA, 19 nt, Artificial Sequence
  Description of Artificial Sequence: Synthetic oligonucleotide
  Antisense strand to SEQ ID NO: 1775777
auuuguaccgacuucccgg

SEQ ID NO: 1775779 - RNA, 19 nt, Artificial Sequence
  Description of Artificial Sequence: Synthetic oligonucleotide
  Sense strand starting at position 2902 of SEQ ID NO: 1562829
aaaguucgagagugucaaa

SEQ ID NO: 1775780 - RNA, 19 nt, Artificial Sequence
  Description of Artificial Sequence: Synthetic oligonucleotide
  Antisense strand to SEQ ID NO: 1775779
uuugacacucucgaacuuu

SEQ ID NO: 1775781 - RNA, 19 nt, Artificial Sequence
  Description of Artificial Sequence: Synthetic oligonucleotide
  Sense strand starting at position 2917 of SEQ ID NO: 1562829
caaaguuggcagggauuaa

SEQ ID NO: 1775782 - RNA, 19 nt, Artificial Sequence
  Description of Artificial Sequence: Synthetic oligonucleotide
  Antisense strand to SEQ ID NO: 1775781
uuaaucccugccaacuuug

SEQ ID NO: 1775783 - RNA, 19 nt, Artificial Sequence
  Description of Artificial Sequence: Synthetic oligonucleotide
  Sense strand starting at position 3013 of SEQ ID NO: 1562829
cgaauugaacagcaguaaa

SEQ ID NO: 1775784 - RNA, 19 nt, Artificial Sequence
  Description of Artificial Sequence: Synthetic oligonucleotide
  Antisense strand to SEQ ID NO: 1775783
uuuacugcuguucaauucg

SEQ ID NO: 1775785 - RNA, 19 nt, Artificial Sequence
  Description of Artificial Sequence: Synthetic oligonucleotide
  Sense strand starting at position 3024 of SEQ ID NO: 1562829
gcaguaaaugacgauaucu

SEQ ID NO: 1775786 - RNA, 19 nt, Artificial Sequence
  Description of Artificial Sequence: Synthetic oligonucleotide
  Antisense strand to SEQ ID NO: 1775785
agauaucgucauuuacugc

SEQ ID NO: 1775787 - RNA, 19 nt, Artificial Sequence
  Description of Artificial Sequence: Synthetic oligonucleotide
  Sense strand starting at position 3045 of SEQ ID NO: 1562829
gccuuccaccuauggaaau

SEQ ID NO: 1775788 - RNA, 19 nt, Artificial Sequence
  Description of Artificial Sequence: Synthetic oligonucleotide
  Antisense strand to SEQ ID NO: 1775787
auuuccauagguggaaggc

SEQ ID NO: 1775789 - RNA, 19 nt, Artificial Sequence
  Description of Artificial Sequence: Synthetic oligonucleotide
  Sense strand starting at position 3057 of SEQ ID NO: 1562829
uggaaauguccgcacaccu

SEQ ID NO: 1775790 - RNA, 19 nt, Artificial Sequence
  Description of Artificial Sequence: Synthetic oligonucleotide
  Antisense strand to SEQ ID NO: 1775789
aggugugcggacauuucca

SEQ ID NO: 1775791 - RNA, 19 nt, Artificial Sequence
  Description of Artificial Sequence: Synthetic oligonucleotide
  Sense strand starting at position 3125 of SEQ ID NO: 1562829
gcguguacuccugcaccca

SEQ ID NO: 1775792 - RNA, 19 nt, Artificial Sequence
  Description of Artificial Sequence: Synthetic oligonucleotide
  Antisense strand to SEQ ID NO: 1775791
ugggugcaggaguacacgc

SEQ ID NO: 1775793 - RNA, 19 nt, Artificial Sequence
  Description of Artificial Sequence: Synthetic oligonucleotide
  Sense strand starting at position 3738 of SEQ ID NO: 1562829
aaggcuacugcugagaaau

SEQ ID NO: 1775794 - RNA, 19 nt, Artificial Sequence
  Description of Artificial Sequence: Synthetic oligonucleotide
  Antisense strand to SEQ ID NO: 1775793
auuucucagcaguagccuu

SEQ ID NO: 1775795 - RNA, 19 nt, Artificial Sequence
  Description of Artificial Sequence: Synthetic oligonucleotide
  Sense strand starting at position 3852 of SEQ ID NO: 1562829
acuggacuuugcuuuaaag

SEQ ID NO: 1775796 - RNA, 19 nt, Artificial Sequence
  Description of Artificial Sequence: Synthetic oligonucleotide
  Antisense strand to SEQ ID NO: 1775795
cuuuaaagcaaaguccagu

SEQ ID NO: 1775797 - RNA, 19 nt, Artificial Sequence
  Description of Artificial Sequence: Synthetic oligonucleotide
  Sense strand starting at position 3854 of SEQ ID NO: 1562829
uggacuuugcuuuaaagau

SEQ ID NO: 1775798 - RNA, 19 nt, Artificial Sequence
  Description of Artificial Sequence: Synthetic oligonucleotide
  Antisense strand to SEQ ID NO: 1775797
aucuuuaaagcaaagucca

SEQ ID NO: 1775799 - RNA, 19 nt, Artificial Sequence
  Description of Artificial Sequence: Synthetic oligonucleotide
  Sense strand starting at position 222 of SEQ ID NO: 1562830
gggauauacacaugugacu

SEQ ID NO: 1775800 - RNA, 19 nt, Artificial Sequence
  Description of Artificial Sequence: Synthetic oligonucleotide
  Antisense strand to SEQ ID NO: 1775799
agucacauguguauauccc

SEQ ID NO: 1775801 - RNA, 19 nt, Artificial Sequence
  Description of Artificial Sequence: Synthetic oligonucleotide
  Sense strand starting at position 233 of SEQ ID NO: 1562830
augugacucugguuaguac

SEQ ID NO: 1775802 - RNA, 19 nt, Artificial Sequence
  Description of Artificial Sequence: Synthetic oligonucleotide
  Antisense strand to SEQ ID NO: 1775801
guacuaaccagagucacau

SEQ ID NO: 1775803 - RNA, 19 nt, Artificial Sequence
  Description of Artificial Sequence: Synthetic oligonucleotide
  Sense strand starting at position 234 of SEQ ID NO: 1562830
ugugacucugguuaguaca

SEQ ID NO: 1775804 - RNA, 19 nt, Artificial Sequence
  Description of Artificial Sequence: Synthetic oligonucleotide
  Antisense strand to SEQ ID NO: 1775803
uguacuaaccagagucaca

SEQ ID NO: 1775805 - RNA, 19 nt, Artificial Sequence
  Description of Artificial Sequence: Synthetic oligonucleotide
  Sense strand starting at position 236 of SEQ ID NO: 1562830
ugacucugguuaguacaua

SEQ ID NO: 1775806 - RNA, 19 nt, Artificial Sequence
  Description of Artificial Sequence: Synthetic oligonucleotide
  Antisense strand to SEQ ID NO: 1775805
uauguacuaaccagaguca

SEQ ID NO: 1775807 - RNA, 19 nt, Artificial Sequence
  Description of Artificial Sequence: Synthetic oligonucleotide
  Sense strand starting at position 258 of SEQ ID NO: 1562830
agccaugaaguccacaaau

SEQ ID NO: 1775808 - RNA, 19 nt, Artificial Sequence
  Description of Artificial Sequence: Synthetic oligonucleotide
  Antisense strand to SEQ ID NO: 1775807
auuuguggacuucauggcu

SEQ ID NO: 1775809 - RNA, 19 nt, Artificial Sequence
  Description of Artificial Sequence: Synthetic oligonucleotide
  Sense strand starting at position 260 of SEQ ID NO: 1562830
ccaugaaguccacaaaugu

SEQ ID NO: 1775810 - RNA, 19 nt, Artificial Sequence
  Description of Artificial Sequence: Synthetic oligonucleotide
  Antisense strand to SEQ ID NO: 1775809
acauuuguggacuucaugg

SEQ ID NO: 1775811 - RNA, 19 nt, Artificial Sequence
  Description of Artificial Sequence: Synthetic oligonucleotide
  Sense strand starting at position 380 of SEQ ID NO: 1562830
cuguuccgagagugaugau

SEQ ID NO: 1775812 - RNA, 19 nt, Artificial Sequence
  Description of Artificial Sequence: Synthetic oligonucleotide
  Antisense strand to SEQ ID NO: 1775811
aucaucacucucggaacag

SEQ ID NO: 1775813 - RNA, 19 nt, Artificial Sequence
  Description of Artificial Sequence: Synthetic oligonucleotide
  Sense strand starting at position 475 of SEQ ID NO: 1562830
guagcuuguaggcauuuau

SEQ ID NO: 1775814 - RNA, 19 nt, Artificial Sequence
  Description of Artificial Sequence: Synthetic oligonucleotide
  Antisense strand to SEQ ID NO: 1775813
auaaaugccuacaagcuac

SEQ ID NO: 1775815 - RNA, 19 nt, Artificial Sequence
  Description of Artificial Sequence: Synthetic oligonucleotide
  Sense strand starting at position 563 of SEQ ID NO: 1562830
augucacccugauugauua

SEQ ID NO: 1775816 - RNA, 19 nt, Artificial Sequence
  Description of Artificial Sequence: Synthetic oligonucleotide
  Antisense strand to SEQ ID NO: 1775815
uaaucaaucagggugacau

SEQ ID NO: 1775817 - RNA, 19 nt, Artificial Sequence
  Description of Artificial Sequence: Synthetic oligonucleotide
  Sense strand starting at position 594 of SEQ ID NO: 1562830
gccaucuuagcucauuaga

SEQ ID NO: 1775818 - RNA, 19 nt, Artificial Sequence
  Description of Artificial Sequence: Synthetic oligonucleotide
  Antisense strand to SEQ ID NO: 1775817
ucuaaugagcuaagauggc

SEQ ID NO: 1775819 - RNA, 19 nt, Artificial Sequence
  Description of Artificial Sequence: Synthetic oligonucleotide
  Sense strand starting at position 707 of SEQ ID NO: 1562830
guguuugggccauauccca

SEQ ID NO: 1775820 - RNA, 19 nt, Artificial Sequence
  Description of Artificial Sequence: Synthetic oligonucleotide
  Antisense strand to SEQ ID NO: 1775819
ugggauauggcccaaacac

SEQ ID NO: 1775821 - RNA, 19 nt, Artificial Sequence
  Description of Artificial Sequence: Synthetic oligonucleotide
  Sense strand starting at position 893 of SEQ ID NO: 1562830
cuaaauaguugaucacagu

SEQ ID NO: 1775822 - RNA, 19 nt, Artificial Sequence
  Description of Artificial Sequence: Synthetic oligonucleotide
  Antisense strand to SEQ ID NO: 1775821
acugugaucaacuauuuag

SEQ ID NO: 1775823 - RNA, 19 nt, Artificial Sequence
  Description of Artificial Sequence: Synthetic oligonucleotide
  Sense strand starting at position 899 of SEQ ID NO: 1562830
aguugaucacagugccaga

SEQ ID NO: 1775824 - RNA, 19 nt, Artificial Sequence
  Description of Artificial Sequence: Synthetic oligonucleotide
  Antisense strand to SEQ ID NO: 1775823
ucuggcacugugaucaacu

SEQ ID NO: 1775825 - RNA, 19 nt, Artificial Sequence
  Description of Artificial Sequence: Synthetic oligonucleotide
  Sense strand starting at position 1489 of SEQ ID NO: 1562830
ggugggugucgugcgauga

SEQ ID NO: 1775826 - RNA, 19 nt, Artificial Sequence
  Description of Artificial Sequence: Synthetic oligonucleotide
  Antisense strand to SEQ ID NO: 1775825
ucaucgcacgacacccacc

SEQ ID NO: 1775827 - RNA, 19 nt, Artificial Sequence
  Description of Artificial Sequence: Synthetic oligonucleotide
  Sense strand starting at position 1502 of SEQ ID NO: 1562830
cgaugaucgagacacggau

SEQ ID NO: 1775828 - RNA, 19 nt, Artificial Sequence
  Description of Artificial Sequence: Synthetic oligonucleotide
  Antisense strand to SEQ ID NO: 1775827
auccgugucucgaucaucg

SEQ ID NO: 1775829 - RNA, 19 nt, Artificial Sequence
  Description of Artificial Sequence: Synthetic oligonucleotide
  Sense strand starting at position 1837 of SEQ ID NO: 1562830
cugcgaucccgcccaguua

SEQ ID NO: 1775830 - RNA, 19 nt, Artificial Sequence
  Description of Artificial Sequence: Synthetic oligonucleotide
  Antisense strand to SEQ ID NO: 1775829
uaacugggcgggaucgcag

SEQ ID NO: 1775831 - RNA, 19 nt, Artificial Sequence
  Description of Artificial Sequence: Synthetic oligonucleotide
  Sense strand starting at position 2353 of SEQ ID NO: 1562830
gaaggaaccaaguguugga

SEQ ID NO: 1775832 - RNA, 19 nt, Artificial Sequence
  Description of Artificial Sequence: Synthetic oligonucleotide
  Antisense strand to SEQ ID NO: 1775831
uccaacacuugguuccuuc

SEQ ID NO: 1775833 - RNA, 19 nt, Artificial Sequence
  Description of Artificial Sequence: Synthetic oligonucleotide
  Sense strand starting at position 2357 of SEQ ID NO: 1562830
gaaccaaguguuggauacu

SEQ ID NO: 1775834 - RNA, 19 nt, Artificial Sequence
  Description of Artificial Sequence: Synthetic oligonucleotide
  Antisense strand to SEQ ID NO: 1775833
aguauccaacacuugguuc

SEQ ID NO: 1775835 - RNA, 19 nt, Artificial Sequence
  Description of Artificial Sequence: Synthetic oligonucleotide
  Sense strand starting at position 2375 of SEQ ID NO: 1562830
ugagcaagucgcguaacau

SEQ ID NO: 1775836 - RNA, 19 nt, Artificial Sequence
  Description of Artificial Sequence: Synthetic oligonucleotide
  Antisense strand to SEQ ID NO: 1775835
auguuacgcgacuugcuca

SEQ ID NO: 1775837 - RNA, 19 nt, Artificial Sequence
  Description of Artificial Sequence: Synthetic oligonucleotide
  Sense strand starting at position 2390 of SEQ ID NO: 1562830
acaucugaguagucgugaa

SEQ ID NO: 1775838 - RNA, 19 nt, Artificial Sequence
  Description of Artificial Sequence: Synthetic oligonucleotide
  Antisense strand to SEQ ID NO: 1775837
uucacgacuacucagaugu

SEQ ID NO: 1775839 - RNA, 19 nt, Artificial Sequence
  Description of Artificial Sequence: Synthetic oligonucleotide
  Sense strand starting at position 2394 of SEQ ID NO: 1562830
cugaguagucgugaaauug

SEQ ID NO: 1775840 - RNA, 19 nt, Artificial Sequence
  Description of Artificial Sequence: Synthetic oligonucleotide
  Antisense strand to SEQ ID NO: 1775839
caauuucacgacuacucag

SEQ ID NO: 1775841 - RNA, 19 nt, Artificial Sequence
  Description of Artificial Sequence: Synthetic oligonucleotide
  Sense strand starting at position 2439 of SEQ ID NO: 1562830
cguugucuuacagauugaa

SEQ ID NO: 1775842 - RNA, 19 nt, Artificial Sequence
  Description of Artificial Sequence: Synthetic oligonucleotide
  Antisense strand to SEQ ID NO: 1775841
uucaaucuguaagacaacg

SEQ ID NO: 1775843 - RNA, 19 nt, Artificial Sequence
  Description of Artificial Sequence: Synthetic oligonucleotide
  Sense strand starting at position 2476 of SEQ ID NO: 1562830
uucuuacuguuacuaugau

SEQ ID NO: 1775844 - RNA, 19 nt, Artificial Sequence
  Description of Artificial Sequence: Synthetic oligonucleotide
  Antisense strand to SEQ ID NO: 1775843
aucauaguaacaguaagaa

SEQ ID NO: 1775845 - RNA, 19 nt, Artificial Sequence
  Description of Artificial Sequence: Synthetic oligonucleotide
  Sense strand starting at position 2677 of SEQ ID NO: 1562830
cguggagcuggacagaaau

SEQ ID NO: 1775846 - RNA, 19 nt, Artificial Sequence
  Description of Artificial Sequence: Synthetic oligonucleotide
  Antisense strand to SEQ ID NO: 1775845
auuucuguccagcuccacg

SEQ ID NO: 1775847 - RNA, 19 nt, Artificial Sequence
  Description of Artificial Sequence: Synthetic oligonucleotide
  Sense strand starting at position 2728 of SEQ ID NO: 1562830
cgggauggauuugaccaaa

SEQ ID NO: 1775848 - RNA, 19 nt, Artificial Sequence
  Description of Artificial Sequence: Synthetic oligonucleotide
  Antisense strand to SEQ ID NO: 1775847
uuuggucaaauccaucccg

SEQ ID NO: 1775849 - RNA, 19 nt, Artificial Sequence
  Description of Artificial Sequence: Synthetic oligonucleotide
  Sense strand starting at position 2753 of SEQ ID NO: 1562830
ucagcaucugcucaguaua

SEQ ID NO: 1775850 - RNA, 19 nt, Artificial Sequence
  Description of Artificial Sequence: Synthetic oligonucleotide
  Antisense strand to SEQ ID NO: 1775849
uauacugagcagaugcuga

SEQ ID NO: 1775851 - RNA, 19 nt, Artificial Sequence
  Description of Artificial Sequence: Synthetic oligonucleotide
  Sense strand starting at position 2756 of SEQ ID NO: 1562830
gcaucugcucaguauaauu

SEQ ID NO: 1775852 - RNA, 19 nt, Artificial Sequence
  Description of Artificial Sequence: Synthetic oligonucleotide
  Antisense strand to SEQ ID NO: 1775851
aauuauacugagcagaugc

SEQ ID NO: 1775853 - RNA, 19 nt, Artificial Sequence
  Description of Artificial Sequence: Synthetic oligonucleotide
  Sense strand starting at position 2827 of SEQ ID NO: 1562830
gaucauuggccucaguauu

SEQ ID NO: 1775854 - RNA, 19 nt, Artificial Sequence
  Description of Artificial Sequence: Synthetic oligonucleotide
  Antisense strand to SEQ ID NO: 1775853
aauacugaggccaaugauc

SEQ ID NO: 1775855 - RNA, 19 nt, Artificial Sequence
  Description of Artificial Sequence: Synthetic oligonucleotide
  Sense strand starting at position 2838 of SEQ ID NO: 1562830
ucaguauuaucuccaucug

SEQ ID NO: 1775856 - RNA, 19 nt, Artificial Sequence
  Description of Artificial Sequence: Synthetic oligonucleotide
  Antisense strand to SEQ ID NO: 1775855
cagauggagauaauacuga

SEQ ID NO: 1775857 - RNA, 19 nt, Artificial Sequence
  Description of Artificial Sequence: Synthetic oligonucleotide
  Sense strand starting at position 3054 of SEQ ID NO: 1562830
agaggcaaucucugcucau

SEQ ID NO: 1775858 - RNA, 19 nt, Artificial Sequence
  Description of Artificial Sequence: Synthetic oligonucleotide
  Antisense strand to SEQ ID NO: 1775857
augagcagagauugccucu

SEQ ID NO: 1775859 - RNA, 19 nt, Artificial Sequence
  Description of Artificial Sequence: Synthetic oligonucleotide
  Sense strand starting at position 3174 of SEQ ID NO: 1562830
uuuacugagcucugacaau

SEQ ID NO: 1775860 - RNA, 19 nt, Artificial Sequence
  Description of Artificial Sequence: Synthetic oligonucleotide
  Antisense strand to SEQ ID NO: 1775859
auugucagagcucaguaaa

SEQ ID NO: 1775861 - RNA, 19 nt, Artificial Sequence
  Description of Artificial Sequence: Synthetic oligonucleotide
  Sense strand starting at position 3180 of SEQ ID NO: 1562830
gagcucugacaaugugacu

SEQ ID NO: 1775862 - RNA, 19 nt, Artificial Sequence
  Description of Artificial Sequence: Synthetic oligonucleotide
  Antisense strand to SEQ ID NO: 1775861
agucacauugucagagcuc

SEQ ID NO: 1775863 - RNA, 19 nt, Artificial Sequence
  Description of Artificial Sequence: Synthetic oligonucleotide
  Sense strand starting at position 3278 of SEQ ID NO: 1562830
uaaguaacuugcuugugga

SEQ ID NO: 1775864 - RNA, 19 nt, Artificial Sequence
  Description of Artificial Sequence: Synthetic oligonucleotide
  Antisense strand to SEQ ID NO: 1775863
uccacaagcaaguuacuua

SEQ ID NO: 1775865 - RNA, 19 nt, Artificial Sequence
  Description of Artificial Sequence: Synthetic oligonucleotide
  Sense strand starting at position 3279 of SEQ ID NO: 1562830
aaguaacuugcuuguggaa

SEQ ID NO: 1775866 - RNA, 19 nt, Artificial Sequence
  Description of Artificial Sequence: Synthetic oligonucleotide
  Antisense strand to SEQ ID NO: 1775865
uuccacaagcaaguuacuu

SEQ ID NO: 1775867 - RNA, 19 nt, Artificial Sequence
  Description of Artificial Sequence: Synthetic oligonucleotide
  Sense strand starting at position 3297 of SEQ ID NO: 1562830
agcuuaugcagcgagauaa

SEQ ID NO: 1775868 - RNA, 19 nt, Artificial Sequence
  Description of Artificial Sequence: Synthetic oligonucleotide
  Antisense strand to SEQ ID NO: 1775867
uuaucucgcugcauaagcu

SEQ ID NO: 1775869 - RNA, 19 nt, Artificial Sequence
  Description of Artificial Sequence: Synthetic oligonucleotide
  Sense strand starting at position 3305 of SEQ ID NO: 1562830
cagcgagauaagugguaaa

SEQ ID NO: 1775870 - RNA, 19 nt, Artificial Sequence
  Description of Artificial Sequence: Synthetic oligonucleotide
  Antisense strand to SEQ ID NO: 1775869
uuuaccacuuaucucgcug

SEQ ID NO: 1775871 - RNA, 19 nt, Artificial Sequence
  Description of Artificial Sequence: Synthetic oligonucleotide
  Sense strand starting at position 3417 of SEQ ID NO: 1562830
gguccagaaucucuaauaa

SEQ ID NO: 1775872 - RNA, 19 nt, Artificial Sequence
  Description of Artificial Sequence: Synthetic oligonucleotide
  Antisense strand to SEQ ID NO: 1775871
uuauuagagauucuggacc

SEQ ID NO: 1775873 - RNA, 19 nt, Artificial Sequence
  Description of Artificial Sequence: Synthetic oligonucleotide
  Sense strand starting at position 3895 of SEQ ID NO: 1562830
gcuuuaaacuaaguugaga

SEQ ID NO: 1775874 - RNA, 19 nt, Artificial Sequence
  Description of Artificial Sequence: Synthetic oligonucleotide
  Antisense strand to SEQ ID NO: 1775873
ucucaacuuaguuuaaagc

SEQ ID NO: 1775875 - RNA, 19 nt, Artificial Sequence
  Description of Artificial Sequence: Synthetic oligonucleotide
  Sense strand starting at position 3980 of SEQ ID NO: 1562830
gggaaauucuuccuccuuu

SEQ ID NO: 1775876 - RNA, 19 nt, Artificial Sequence
  Description of Artificial Sequence: Synthetic oligonucleotide
  Antisense strand to SEQ ID NO: 1775875
aaaggaggaagaauuuccc

SEQ ID NO: 1775877 - RNA, 19 nt, Artificial Sequence
  Description of Artificial Sequence: Synthetic oligonucleotide
  Sense strand starting at position 3981 of SEQ ID NO: 1562830
ggaaauucuuccuccuuug

SEQ ID NO: 1775878 - RNA, 19 nt, Artificial Sequence
  Description of Artificial Sequence: Synthetic oligonucleotide
  Antisense strand to SEQ ID NO: 1775877
caaaggaggaagaauuucc

SEQ ID NO: 1775879 - RNA, 19 nt, Artificial Sequence
  Description of Artificial Sequence: Synthetic oligonucleotide
  Sense strand starting at position 14 of SEQ ID NO: 1562831
gcgccuaagacauggagaa

SEQ ID NO: 1775880 - RNA, 19 nt, Artificial Sequence
  Description of Artificial Sequence: Synthetic oligonucleotide
  Antisense strand to SEQ ID NO: 1775879
uucuccaugucuuaggcgc

SEQ ID NO: 1775881 - RNA, 19 nt, Artificial Sequence
  Description of Artificial Sequence: Synthetic oligonucleotide
  Sense strand starting at position 197 of SEQ ID NO: 1562831
uuccaaugcccaggucuaa

SEQ ID NO: 1775882 - RNA, 19 nt, Artificial Sequence
  Description of Artificial Sequence: Synthetic oligonucleotide
  Antisense strand to SEQ ID NO: 1775881
uuagaccugggcauuggaa

SEQ ID NO: 1775883 - RNA, 19 nt, Artificial Sequence
  Description of Artificial Sequence: Synthetic oligonucleotide
  Sense strand starting at position 276 of SEQ ID NO: 1562831
uugugcuuccauuaguaug

SEQ ID NO: 1775884 - RNA, 19 nt, Artificial Sequence
  Description of Artificial Sequence: Synthetic oligonucleotide
  Antisense strand to SEQ ID NO: 1775883
cauacuaauggaagcacaa

SEQ ID NO: 1775885 - RNA, 19 nt, Artificial Sequence
  Description of Artificial Sequence: Synthetic oligonucleotide
  Sense strand starting at position 283 of SEQ ID NO: 1562831
uccauuaguauggguguca

SEQ ID NO: 1775886 - RNA, 19 nt, Artificial Sequence
  Description of Artificial Sequence: Synthetic oligonucleotide
  Antisense strand to SEQ ID NO: 1775885
ugacacccauacuaaugga

SEQ ID NO: 1775887 - RNA, 19 nt, Artificial Sequence
  Description of Artificial Sequence: Synthetic oligonucleotide
  Sense strand starting at position 458 of SEQ ID NO: 1562831
auggaauccugaggcaauc

SEQ ID NO: 1775888 - RNA, 19 nt, Artificial Sequence
  Description of Artificial Sequence: Synthetic oligonucleotide
  Antisense strand to SEQ ID NO: 1775887
gauugccucaggauuccau

SEQ ID NO: 1775889 - RNA, 19 nt, Artificial Sequence
  Description of Artificial Sequence: Synthetic oligonucleotide
  Sense strand starting at position 511 of SEQ ID NO: 1562831
gugcaaaucuggaggugga

SEQ ID NO: 1775890 - RNA, 19 nt, Artificial Sequence
  Description of Artificial Sequence: Synthetic oligonucleotide
  Antisense strand to SEQ ID NO: 1775889
uccaccuccagauuugcac

SEQ ID NO: 1775891 - RNA, 19 nt, Artificial Sequence
  Description of Artificial Sequence: Synthetic oligonucleotide
  Sense strand starting at position 512 of SEQ ID NO: 1562831
ugcaaaucuggagguggaa

SEQ ID NO: 1775892 - RNA, 19 nt, Artificial Sequence
  Description of Artificial Sequence: Synthetic oligonucleotide
  Antisense strand to SEQ ID NO: 1775891
uuccaccuccagauuugca

SEQ ID NO: 1775893 - RNA, 19 nt, Artificial Sequence
  Description of Artificial Sequence: Synthetic oligonucleotide
  Sense strand starting at position 786 of SEQ ID NO: 1562831
augagaaccucauugggca

SEQ ID NO: 1775894 - RNA, 19 nt, Artificial Sequence
  Description of Artificial Sequence: Synthetic oligonucleotide
  Antisense strand to SEQ ID NO: 1775893
ugcccaaugagguucucau

SEQ ID NO: 1775895 - RNA, 19 nt, Artificial Sequence
  Description of Artificial Sequence: Synthetic oligonucleotide
  Sense strand starting at position 843 of SEQ ID NO: 1562831
cccgguuggugucuaucaa

SEQ ID NO: 1775896 - RNA, 19 nt, Artificial Sequence
  Description of Artificial Sequence: Synthetic oligonucleotide
  Antisense strand to SEQ ID NO: 1775895
uugauagacaccaaccggg

SEQ ID NO: 1775897 - RNA, 19 nt, Artificial Sequence
  Description of Artificial Sequence: Synthetic oligonucleotide
  Sense strand starting at position 844 of SEQ ID NO: 1562831
ccgguuggugucuaucaau

SEQ ID NO: 1775898 - RNA, 19 nt, Artificial Sequence
  Description of Artificial Sequence: Synthetic oligonucleotide
  Antisense strand to SEQ ID NO: 1775897
auugauagacaccaaccgg

SEQ ID NO: 1775899 - RNA, 19 nt, Artificial Sequence
  Description of Artificial Sequence: Synthetic oligonucleotide
  Sense strand starting at position 861 of SEQ ID NO: 1562831
aucggauccuaggagucuu

SEQ ID NO: 1775900 - RNA, 19 nt, Artificial Sequence
  Description of Artificial Sequence: Synthetic oligonucleotide
  Antisense strand to SEQ ID NO: 1775899
aagacuccuaggauccgau

SEQ ID NO: 1775901 - RNA, 19 nt, Artificial Sequence
  Description of Artificial Sequence: Synthetic oligonucleotide
  Sense strand starting at position 869 of SEQ ID NO: 1562831
cuaggagucuucccaacau

SEQ ID NO: 1775902 - RNA, 19 nt, Artificial Sequence
  Description of Artificial Sequence: Synthetic oligonucleotide
  Antisense strand to SEQ ID NO: 1775901
auguugggaagacuccuag

SEQ ID NO: 1775903 - RNA, 19 nt, Artificial Sequence
  Description of Artificial Sequence: Synthetic oligonucleotide
  Sense strand starting at position 1074 of SEQ ID NO: 1562831
ugcuacuguccggagacaa

SEQ ID NO: 1775904 - RNA, 19 nt, Artificial Sequence
  Description of Artificial Sequence: Synthetic oligonucleotide
  Antisense strand to SEQ ID NO: 1775903
uugucuccggacaguagca

SEQ ID NO: 1775905 - RNA, 19 nt, Artificial Sequence
  Description of Artificial Sequence: Synthetic oligonucleotide
  Sense strand starting at position 1201 of SEQ ID NO: 1562831
agaagaguuuaggguagga

SEQ ID NO: 1775906 - RNA, 19 nt, Artificial Sequence
  Description of Artificial Sequence: Synthetic oligonucleotide
  Antisense strand to SEQ ID NO: 1775905
uccuacccuaaacucuucu

SEQ ID NO: 1775907 - RNA, 19 nt, Artificial Sequence
  Description of Artificial Sequence: Synthetic oligonucleotide
  Sense strand starting at position 1282 of SEQ ID NO: 1562831
cagcgauccucggcggaaa

SEQ ID NO: 1775908 - RNA, 19 nt, Artificial Sequence
  Description of Artificial Sequence: Synthetic oligonucleotide
  Antisense strand to SEQ ID NO: 1775907
uuuccgccgaggaucgcug

SEQ ID NO: 1775909 - RNA, 19 nt, Artificial Sequence
  Description of Artificial Sequence: Synthetic oligonucleotide
  Sense strand starting at position 1283 of SEQ ID NO: 1562831
agcgauccucggcggaaau

SEQ ID NO: 1775910 - RNA, 19 nt, Artificial Sequence
  Description of Artificial Sequence: Synthetic oligonucleotide
  Antisense strand to SEQ ID NO: 1775909
auuuccgccgaggaucgcu

SEQ ID NO: 1775911 - RNA, 19 nt, Artificial Sequence
  Description of Artificial Sequence: Synthetic oligonucleotide
  Sense strand starting at position 1294 of SEQ ID NO: 1562831
gcggaaaucagcgcuuugu

SEQ ID NO: 1775912 - RNA, 19 nt, Artificial Sequence
  Description of Artificial Sequence: Synthetic oligonucleotide
  Antisense strand to SEQ ID NO: 1775911
acaaagcgcugauuuccgc

SEQ ID NO: 1775913 - RNA, 19 nt, Artificial Sequence
  Description of Artificial Sequence: Synthetic oligonucleotide
  Sense strand starting at position 1496 of SEQ ID NO: 1562831
ccgggcuucguguuacuga

SEQ ID NO: 1775914 - RNA, 19 nt, Artificial Sequence
  Description of Artificial Sequence: Synthetic oligonucleotide
  Antisense strand to SEQ ID NO: 1775913
ucaguaacacgaagcccgg

SEQ ID NO: 1775915 - RNA, 19 nt, Artificial Sequence
  Description of Artificial Sequence: Synthetic oligonucleotide
  Sense strand starting at position 2298 of SEQ ID NO: 1562831
gcuccuaaugaccgcaaau

SEQ ID NO: 1775916 - RNA, 19 nt, Artificial Sequence
  Description of Artificial Sequence: Synthetic oligonucleotide
  Antisense strand to SEQ ID NO: 1775915
auuugcggucauuaggagc

SEQ ID NO: 1775917 - RNA, 19 nt, Artificial Sequence
  Description of Artificial Sequence: Synthetic oligonucleotide
  Sense strand starting at position 2623 of SEQ ID NO: 1562831
gugugguggugguuugagu

SEQ ID NO: 1775918 - RNA, 19 nt, Artificial Sequence
  Description of Artificial Sequence: Synthetic oligonucleotide
  Antisense strand to SEQ ID NO: 1775917
acucaaaccaccaccacac

SEQ ID NO: 1775919 - RNA, 19 nt, Artificial Sequence
  Description of Artificial Sequence: Synthetic oligonucleotide
  Sense strand starting at position 2637 of SEQ ID NO: 1562831
ugaguuccuaugggaagga

SEQ ID NO: 1775920 - RNA, 19 nt, Artificial Sequence
  Description of Artificial Sequence: Synthetic oligonucleotide
  Antisense strand to SEQ ID NO: 1775919
uccuucccauaggaacuca

SEQ ID NO: 1775921 - RNA, 19 nt, Artificial Sequence
  Description of Artificial Sequence: Synthetic oligonucleotide
  Sense strand starting at position 2893 of SEQ ID NO: 1562831
gcaauaguuagcuggagug

SEQ ID NO: 1775922 - RNA, 19 nt, Artificial Sequence
  Description of Artificial Sequence: Synthetic oligonucleotide
  Antisense strand to SEQ ID NO: 1775921
cacuccagcuaacuauugc

SEQ ID NO: 1775923 - RNA, 19 nt, Artificial Sequence
  Description of Artificial Sequence: Synthetic oligonucleotide
  Sense strand starting at position 2937 of SEQ ID NO: 1562831
ggaacagggucuuagucau

SEQ ID NO: 1775924 - RNA, 19 nt, Artificial Sequence
  Description of Artificial Sequence: Synthetic oligonucleotide
  Antisense strand to SEQ ID NO: 1775923
augacuaagacccuguucc

SEQ ID NO: 1775925 - RNA, 19 nt, Artificial Sequence
  Description of Artificial Sequence: Synthetic oligonucleotide
  Sense strand starting at position 2983 of SEQ ID NO: 1562831
guggaaagaucaggcauuu

SEQ ID NO: 1775926 - RNA, 19 nt, Artificial Sequence
  Description of Artificial Sequence: Synthetic oligonucleotide
  Antisense strand to SEQ ID NO: 1775925
aaaugccugaucuuuccac

SEQ ID NO: 1775927 - RNA, 19 nt, Artificial Sequence
  Description of Artificial Sequence: Synthetic oligonucleotide
  Sense strand starting at position 3078 of SEQ ID NO: 1562831
cucaguuuccacgacuuaa

SEQ ID NO: 1775928 - RNA, 19 nt, Artificial Sequence
  Description of Artificial Sequence: Synthetic oligonucleotide
  Antisense strand to SEQ ID NO: 1775927
uuaagucguggaaacugag

SEQ ID NO: 1775929 - RNA, 19 nt, Artificial Sequence
  Description of Artificial Sequence: Synthetic oligonucleotide
  Sense strand starting at position 3100 of SEQ ID NO: 1562831
uggagauaauaccugcuuu

SEQ ID NO: 1775930 - RNA, 19 nt, Artificial Sequence
  Description of Artificial Sequence: Synthetic oligonucleotide
  Antisense strand to SEQ ID NO: 1775929
aaagcagguauuaucucca

SEQ ID NO: 1775931 - RNA, 19 nt, Artificial Sequence
  Description of Artificial Sequence: Synthetic oligonucleotide
  Sense strand starting at position 3120 of SEQ ID NO: 1562831
caagguggcugagaggauu

SEQ ID NO: 1775932 - RNA, 19 nt, Artificial Sequence
  Description of Artificial Sequence: Synthetic oligonucleotide
  Antisense strand to SEQ ID NO: 1775931
aauccucucagccaccuug

SEQ ID NO: 1775933 - RNA, 19 nt, Artificial Sequence
  Description of Artificial Sequence: Synthetic oligonucleotide
  Sense strand starting at position 3143 of SEQ ID NO: 1562831
uguaaagugccuuacccuu

SEQ ID NO: 1775934 - RNA, 19 nt, Artificial Sequence
  Description of Artificial Sequence: Synthetic oligonucleotide
  Antisense strand to SEQ ID NO: 1775933
aaggguaaggcacuuuaca

SEQ ID NO: 1775935 - RNA, 19 nt, Artificial Sequence
  Description of Artificial Sequence: Synthetic oligonucleotide
  Sense strand starting at position 3150 of SEQ ID NO: 1562831
ugccuuacccuuuaguuau

SEQ ID NO: 1775936 - RNA, 19 nt, Artificial Sequence
  Description of Artificial Sequence: Synthetic oligonucleotide
  Antisense strand to SEQ ID NO: 1775935
auaacuaaaggguaaggca

SEQ ID NO: 1775937 - RNA, 19 nt, Artificial Sequence
  Description of Artificial Sequence: Synthetic oligonucleotide
  Sense strand starting at position 3190 of SEQ ID NO: 1562831
ccugguacuugguaaacau

SEQ ID NO: 1775938 - RNA, 19 nt, Artificial Sequence
  Description of Artificial Sequence: Synthetic oligonucleotide
  Antisense strand to SEQ ID NO: 1775937
auguuuaccaaguaccagg

SEQ ID NO: 1775939 - RNA, 19 nt, Artificial Sequence
  Description of Artificial Sequence: Synthetic oligonucleotide
  Sense strand starting at position 3199 of SEQ ID NO: 1562831
ugguaaacaugaugaaaug

SEQ ID NO: 1775940 - RNA, 19 nt, Artificial Sequence
  Description of Artificial Sequence: Synthetic oligonucleotide
  Antisense strand to SEQ ID NO: 1775939
cauuucaucauguuuacca

SEQ ID NO: 1775941 - RNA, 19 nt, Artificial Sequence
  Description of Artificial Sequence: Synthetic oligonucleotide
  Sense strand starting at position 3239 of SEQ ID NO: 1562831
gauugucaucugggccauu

SEQ ID NO: 1775942 - RNA, 19 nt, Artificial Sequence
  Description of Artificial Sequence: Synthetic oligonucleotide
  Antisense strand to SEQ ID NO: 1775941
aauggcccagaugacaauc

SEQ ID NO: 1775943 - RNA, 19 nt, Artificial Sequence
  Description of Artificial Sequence: Synthetic oligonucleotide
  Sense strand starting at position 3249 of SEQ ID NO: 1562831
ugggccauucuggguaaau

SEQ ID NO: 1775944 - RNA, 19 nt, Artificial Sequence
  Description of Artificial Sequence: Synthetic oligonucleotide
  Antisense strand to SEQ ID NO: 1775943
auuuacccagaauggccca

SEQ ID NO: 1775945 - RNA, 19 nt, Artificial Sequence
  Description of Artificial Sequence: Synthetic oligonucleotide
  Sense strand starting at position 3250 of SEQ ID NO: 1562831
gggccauucuggguaaauu

SEQ ID NO: 1775946 - RNA, 19 nt, Artificial Sequence
  Description of Artificial Sequence: Synthetic oligonucleotide
  Antisense strand to SEQ ID NO: 1775945
aauuuacccagaauggccc

SEQ ID NO: 1775947 - RNA, 19 nt, Artificial Sequence
  Description of Artificial Sequence: Synthetic oligonucleotide
  Sense strand starting at position 3251 of SEQ ID NO: 1562831
ggccauucuggguaaauua

SEQ ID NO: 1775948 - RNA, 19 nt, Artificial Sequence
  Description of Artificial Sequence: Synthetic oligonucleotide
  Antisense strand to SEQ ID NO: 1775947
uaauuuacccagaauggcc

SEQ ID NO: 1775949 - RNA, 19 nt, Artificial Sequence
  Description of Artificial Sequence: Synthetic oligonucleotide
  Sense strand starting at position 3281 of SEQ ID NO: 1562831
ggccgacuuagggaauucu

SEQ ID NO: 1775950 - RNA, 19 nt, Artificial Sequence
  Description of Artificial Sequence: Synthetic oligonucleotide
  Antisense strand to SEQ ID NO: 1775949
agaauucccuaagucggcc

SEQ ID NO: 1775951 - RNA, 19 nt, Artificial Sequence
  Description of Artificial Sequence: Synthetic oligonucleotide
  Sense strand starting at position 3317 of SEQ ID NO: 1562831
ugagucccaguccagaaua

SEQ ID NO: 1775952 - RNA, 19 nt, Artificial Sequence
  Description of Artificial Sequence: Synthetic oligonucleotide
  Antisense strand to SEQ ID NO: 1775951
uauucuggacugggacuca

SEQ ID NO: 1775953 - RNA, 19 nt, Artificial Sequence
  Description of Artificial Sequence: Synthetic oligonucleotide
  Sense strand starting at position 3403 of SEQ ID NO: 1562831
ccgccaucuuggcucagua

SEQ ID NO: 1775954 - RNA, 19 nt, Artificial Sequence
  Description of Artificial Sequence: Synthetic oligonucleotide
  Antisense strand to SEQ ID NO: 1775953
uacugagccaagauggcgg

SEQ ID NO: 1775955 - RNA, 19 nt, Artificial Sequence
  Description of Artificial Sequence: Synthetic oligonucleotide
  Sense strand starting at position 3404 of SEQ ID NO: 1562831
cgccaucuuggcucaguau

SEQ ID NO: 1775956 - RNA, 19 nt, Artificial Sequence
  Description of Artificial Sequence: Synthetic oligonucleotide
  Antisense strand to SEQ ID NO: 1775955
auacugagccaagauggcg

SEQ ID NO: 1775957 - RNA, 19 nt, Artificial Sequence
  Description of Artificial Sequence: Synthetic oligonucleotide
  Sense strand starting at position 3405 of SEQ ID NO: 1562831
gccaucuuggcucaguaua

SEQ ID NO: 1775958 - RNA, 19 nt, Artificial Sequence
  Description of Artificial Sequence: Synthetic oligonucleotide
  Antisense strand to SEQ ID NO: 1775957
uauacugagccaagauggc

SEQ ID NO: 1775959 - RNA, 19 nt, Artificial Sequence
  Description of Artificial Sequence: Synthetic oligonucleotide
  Sense strand starting at position 196 of SEQ ID NO: 1562832
guaugacuuaauggcaaga

SEQ ID NO: 1775960 - RNA, 19 nt, Artificial Sequence
  Description of Artificial Sequence: Synthetic oligonucleotide
  Antisense strand to SEQ ID NO: 1775959
ucuugccauuaagucauac

SEQ ID NO: 1775961 - RNA, 19 nt, Artificial Sequence
  Description of Artificial Sequence: Synthetic oligonucleotide
  Sense strand starting at position 241 of SEQ ID NO: 1562832
augcccauucuggaaacau

SEQ ID NO: 1775962 - RNA, 19 nt, Artificial Sequence
  Description of Artificial Sequence: Synthetic oligonucleotide
  Antisense strand to SEQ ID NO: 1775961
auguuuccagaaugggcau

SEQ ID NO: 1775963 - RNA, 19 nt, Artificial Sequence
  Description of Artificial Sequence: Synthetic oligonucleotide
  Sense strand starting at position 368 of SEQ ID NO: 1562832
aauggagauuaggauauua

SEQ ID NO: 1775964 - RNA, 19 nt, Artificial Sequence
  Description of Artificial Sequence: Synthetic oligonucleotide
  Antisense strand to SEQ ID NO: 1775963
uaauauccuaaucuccauu

SEQ ID NO: 1775965 - RNA, 19 nt, Artificial Sequence
  Description of Artificial Sequence: Synthetic oligonucleotide
  Sense strand starting at position 417 of SEQ ID NO: 1562832
uugagaacugugcacguaa

SEQ ID NO: 1775966 - RNA, 19 nt, Artificial Sequence
  Description of Artificial Sequence: Synthetic oligonucleotide
  Antisense strand to SEQ ID NO: 1775965
uuacgugcacaguucucaa

SEQ ID NO: 1775967 - RNA, 19 nt, Artificial Sequence
  Description of Artificial Sequence: Synthetic oligonucleotide
  Sense strand starting at position 431 of SEQ ID NO: 1562832
cguaaugaacgguaauaga

SEQ ID NO: 1775968 - RNA, 19 nt, Artificial Sequence
  Description of Artificial Sequence: Synthetic oligonucleotide
  Antisense strand to SEQ ID NO: 1775967
ucuauuaccguucauuacg

SEQ ID NO: 1775969 - RNA, 19 nt, Artificial Sequence
  Description of Artificial Sequence: Synthetic oligonucleotide
  Sense strand starting at position 465 of SEQ ID NO: 1562832
gugaucuaggaggguugaa

SEQ ID NO: 1775970 - RNA, 19 nt, Artificial Sequence
  Description of Artificial Sequence: Synthetic oligonucleotide
  Antisense strand to SEQ ID NO: 1775969
uucaacccuccuagaucac

SEQ ID NO: 1775971 - RNA, 19 nt, Artificial Sequence
  Description of Artificial Sequence: Synthetic oligonucleotide
  Sense strand starting at position 625 of SEQ ID NO: 1562832
uggcauaagcacuaaauga

SEQ ID NO: 1775972 - RNA, 19 nt, Artificial Sequence
  Description of Artificial Sequence: Synthetic oligonucleotide
  Antisense strand to SEQ ID NO: 1775971
ucauuuagugcuuaugcca

SEQ ID NO: 1775973 - RNA, 19 nt, Artificial Sequence
  Description of Artificial Sequence: Synthetic oligonucleotide
  Sense strand starting at position 632 of SEQ ID NO: 1562832
agcacuaaaugaguuuaau

SEQ ID NO: 1775974 - RNA, 19 nt, Artificial Sequence
  Description of Artificial Sequence: Synthetic oligonucleotide
  Antisense strand to SEQ ID NO: 1775973
auuaaacucauuuagugcu

SEQ ID NO: 1775975 - RNA, 19 nt, Artificial Sequence
  Description of Artificial Sequence: Synthetic oligonucleotide
  Sense strand starting at position 642 of SEQ ID NO: 1562832
gaguuuaauguaugugaau

SEQ ID NO: 1775976 - RNA, 19 nt, Artificial Sequence
  Description of Artificial Sequence: Synthetic oligonucleotide
  Antisense strand to SEQ ID NO: 1775975
auucacauacauuaaacuc

SEQ ID NO: 1775977 - RNA, 19 nt, Artificial Sequence
  Description of Artificial Sequence: Synthetic oligonucleotide
  Sense strand starting at position 651 of SEQ ID NO: 1562832
guaugugaauauguuuaga

SEQ ID NO: 1775978 - RNA, 19 nt, Artificial Sequence
  Description of Artificial Sequence: Synthetic oligonucleotide
  Antisense strand to SEQ ID NO: 1775977
ucuaaacauauucacauac

SEQ ID NO: 1775979 - RNA, 19 nt, Artificial Sequence
  Description of Artificial Sequence: Synthetic oligonucleotide
  Sense strand starting at position 653 of SEQ ID NO: 1562832
augugaauauguuuagaac

SEQ ID NO: 1775980 - RNA, 19 nt, Artificial Sequence
  Description of Artificial Sequence: Synthetic oligonucleotide
  Antisense strand to SEQ ID NO: 1775979
guucuaaacauauucacau

SEQ ID NO: 1775981 - RNA, 19 nt, Artificial Sequence
  Description of Artificial Sequence: Synthetic oligonucleotide
  Sense strand starting at position 691 of SEQ ID NO: 1562832
gcacucuaucaacagcaga

SEQ ID NO: 1775982 - RNA, 19 nt, Artificial Sequence
  Description of Artificial Sequence: Synthetic oligonucleotide
  Antisense strand to SEQ ID NO: 1775981
ucugcuguugauagagugc

SEQ ID NO: 1775983 - RNA, 19 nt, Artificial Sequence
  Description of Artificial Sequence: Synthetic oligonucleotide
  Sense strand starting at position 733 of SEQ ID NO: 1562832
guuuguaaaugcucaauaa

SEQ ID NO: 1775984 - RNA, 19 nt, Artificial Sequence
  Description of Artificial Sequence: Synthetic oligonucleotide
  Antisense strand to SEQ ID NO: 1775983
uuauugagcauuuacaaac

SEQ ID NO: 1775985 - RNA, 19 nt, Artificial Sequence
  Description of Artificial Sequence: Synthetic oligonucleotide
  Sense strand starting at position 810 of SEQ ID NO: 1562832
acaagcauaucuguaaagu

SEQ ID NO: 1775986 - RNA, 19 nt, Artificial Sequence
  Description of Artificial Sequence: Synthetic oligonucleotide
  Antisense strand to SEQ ID NO: 1775985
acuuuacagauaugcuugu

SEQ ID NO: 1775987 - RNA, 19 nt, Artificial Sequence
  Description of Artificial Sequence: Synthetic oligonucleotide
  Sense strand starting at position 811 of SEQ ID NO: 1562832
caagcauaucuguaaagug

SEQ ID NO: 1775988 - RNA, 19 nt, Artificial Sequence
  Description of Artificial Sequence: Synthetic oligonucleotide
  Antisense strand to SEQ ID NO: 1775987
cacuuuacagauaugcuug

SEQ ID NO: 1775989 - RNA, 19 nt, Artificial Sequence
  Description of Artificial Sequence: Synthetic oligonucleotide
  Sense strand starting at position 890 of SEQ ID NO: 1562832
acaguaaaugcuuauugca

SEQ ID NO: 1775990 - RNA, 19 nt, Artificial Sequence
  Description of Artificial Sequence: Synthetic oligonucleotide
  Antisense strand to SEQ ID NO: 1775989
ugcaauaagcauuuacugu

SEQ ID NO: 1775991 - RNA, 19 nt, Artificial Sequence
  Description of Artificial Sequence: Synthetic oligonucleotide
  Sense strand starting at position 898 of SEQ ID NO: 1562832
ugcuuauugcauuauauug

SEQ ID NO: 1775992 - RNA, 19 nt, Artificial Sequence
  Description of Artificial Sequence: Synthetic oligonucleotide
  Antisense strand to SEQ ID NO: 1775991
caauauaaugcaauaagca

SEQ ID NO: 1775993 - RNA, 19 nt, Artificial Sequence
  Description of Artificial Sequence: Synthetic oligonucleotide
  Sense strand starting at position 1096 of SEQ ID NO: 1562832
cugccucuggaaugaguua

SEQ ID NO: 1775994 - RNA, 19 nt, Artificial Sequence
  Description of Artificial Sequence: Synthetic oligonucleotide
  Antisense strand to SEQ ID NO: 1775993
uaacucauuccagaggcag

SEQ ID NO: 1775995 - RNA, 19 nt, Artificial Sequence
  Description of Artificial Sequence: Synthetic oligonucleotide
  Sense strand starting at position 1209 of SEQ ID NO: 1562832
augcguaacggagagaauu

SEQ ID NO: 1775996 - RNA, 19 nt, Artificial Sequence
  Description of Artificial Sequence: Synthetic oligonucleotide
  Antisense strand to SEQ ID NO: 1775995
aauucucuccguuacgcau

SEQ ID NO: 1775997 - RNA, 19 nt, Artificial Sequence
  Description of Artificial Sequence: Synthetic oligonucleotide
  Sense strand starting at position 1234 of SEQ ID NO: 1562832
cgucccuauguggaagaaa

SEQ ID NO: 1775998 - RNA, 19 nt, Artificial Sequence
  Description of Artificial Sequence: Synthetic oligonucleotide
  Antisense strand to SEQ ID NO: 1775997
uuucuuccacauagggacg

SEQ ID NO: 1775999 - RNA, 19 nt, Artificial Sequence
  Description of Artificial Sequence: Synthetic oligonucleotide
  Sense strand starting at position 1427 of SEQ ID NO: 1562832
aagagaucccucggcccua

SEQ ID NO: 1776000 - RNA, 19 nt, Artificial Sequence
  Description of Artificial Sequence: Synthetic oligonucleotide
  Antisense strand to SEQ ID NO: 1775999
uagggccgagggaucucuu

SEQ ID NO: 1776001 - RNA, 19 nt, Artificial Sequence
  Description of Artificial Sequence: Synthetic oligonucleotide
  Sense strand starting at position 1469 of SEQ ID NO: 1562832
aacagaaguguuugaugcu

SEQ ID NO: 1776002 - RNA, 19 nt, Artificial Sequence
  Description of Artificial Sequence: Synthetic oligonucleotide
  Antisense strand to SEQ ID NO: 1776001
agcaucaaacacuucuguu

SEQ ID NO: 1776003 - RNA, 19 nt, Artificial Sequence
  Description of Artificial Sequence: Synthetic oligonucleotide
  Sense strand starting at position 2571 of SEQ ID NO: 1562832
cggaaaugucugcacaucu

SEQ ID NO: 1776004 - RNA, 19 nt, Artificial Sequence
  Description of Artificial Sequence: Synthetic oligonucleotide
  Antisense strand to SEQ ID NO: 1776003
agaugugcagacauuuccg

SEQ ID NO: 1776005 - RNA, 19 nt, Artificial Sequence
  Description of Artificial Sequence: Synthetic oligonucleotide
  Sense strand starting at position 2701 of SEQ ID NO: 1562832
ggccgugucucuauggaag

SEQ ID NO: 1776006 - RNA, 19 nt, Artificial Sequence
  Description of Artificial Sequence: Synthetic oligonucleotide
  Antisense strand to SEQ ID NO: 1776005
cuuccauagagacacggcc

SEQ ID NO: 1776007 - RNA, 19 nt, Artificial Sequence
  Description of Artificial Sequence: Synthetic oligonucleotide
  Sense strand starting at position 2925 of SEQ ID NO: 1562832
ugggcaauugcagaauagu

SEQ ID NO: 1776008 - RNA, 19 nt, Artificial Sequence
  Description of Artificial Sequence: Synthetic oligonucleotide
  Antisense strand to SEQ ID NO: 1776007
acuauucugcaauugccca

SEQ ID NO: 1776009 - RNA, 19 nt, Artificial Sequence
  Description of Artificial Sequence: Synthetic oligonucleotide
  Sense strand starting at position 2940 of SEQ ID NO: 1562832
uagucaggcuaucugauaa

SEQ ID NO: 1776010 - RNA, 19 nt, Artificial Sequence
  Description of Artificial Sequence: Synthetic oligonucleotide
  Antisense strand to SEQ ID NO: 1776009
uuaucagauagccugacua

SEQ ID NO: 1776011 - RNA, 19 nt, Artificial Sequence
  Description of Artificial Sequence: Synthetic oligonucleotide
  Sense strand starting at position 3064 of SEQ ID NO: 1562832
agugcuuucgcagcugagu

SEQ ID NO: 1776012 - RNA, 19 nt, Artificial Sequence
  Description of Artificial Sequence: Synthetic oligonucleotide
  Antisense strand to SEQ ID NO: 1776011
acucagcugcgaaagcacu

SEQ ID NO: 1776013 - RNA, 19 nt, Artificial Sequence
  Description of Artificial Sequence: Synthetic oligonucleotide
  Sense strand starting at position 3175 of SEQ ID NO: 1562832
ccaagaagugcugggaucu

SEQ ID NO: 1776014 - RNA, 19 nt, Artificial Sequence
  Description of Artificial Sequence: Synthetic oligonucleotide
  Antisense strand to SEQ ID NO: 1776013
agaucccagcacuucuugg

SEQ ID NO: 1776015 - RNA, 19 nt, Artificial Sequence
  Description of Artificial Sequence: Synthetic oligonucleotide
  Sense strand starting at position 3210 of SEQ ID NO: 1562832
ggaucugucuggcuugaga

SEQ ID NO: 1776016 - RNA, 19 nt, Artificial Sequence
  Description of Artificial Sequence: Synthetic oligonucleotide
  Antisense strand to SEQ ID NO: 1776015
ucucaagccagacagaucc

SEQ ID NO: 1776017 - RNA, 19 nt, Artificial Sequence
  Description of Artificial Sequence: Synthetic oligonucleotide
  Sense strand starting at position 3212 of SEQ ID NO: 1562832
aucugucuggcuugagaau

SEQ ID NO: 1776018 - RNA, 19 nt, Artificial Sequence
  Description of Artificial Sequence: Synthetic oligonucleotide
  Antisense strand to SEQ ID NO: 1776017
auucucaagccagacagau

SEQ ID NO: 1776019 - RNA, 19 nt, Artificial Sequence
  Description of Artificial Sequence: Synthetic oligonucleotide
  Sense strand starting at position 3213 of SEQ ID NO: 1562832
ucugucuggcuugagaaua

SEQ ID NO: 1776020 - RNA, 19 nt, Artificial Sequence
  Description of Artificial Sequence: Synthetic oligonucleotide
  Antisense strand to SEQ ID NO: 1776019
uauucucaagccagacaga

SEQ ID NO: 1776021 - RNA, 19 nt, Artificial Sequence
  Description of Artificial Sequence: Synthetic oligonucleotide
  Sense strand starting at position 3603 of SEQ ID NO: 1562832
uggagagaggcauaguagu

SEQ ID NO: 1776022 - RNA, 19 nt, Artificial Sequence
  Description of Artificial Sequence: Synthetic oligonucleotide
  Antisense strand to SEQ ID NO: 1776021
acuacuaugccucucucca

SEQ ID NO: 1776023 - RNA, 19 nt, Artificial Sequence
  Description of Artificial Sequence: Synthetic oligonucleotide
  Sense strand starting at position 3609 of SEQ ID NO: 1562832
gaggcauaguaguuucuaa

SEQ ID NO: 1776024 - RNA, 19 nt, Artificial Sequence
  Description of Artificial Sequence: Synthetic oligonucleotide
  Antisense strand to SEQ ID NO: 1776023
uuagaaacuacuaugccuc

SEQ ID NO: 1776025 - RNA, 19 nt, Artificial Sequence
  Description of Artificial Sequence: Synthetic oligonucleotide
  Sense strand starting at position 3671 of SEQ ID NO: 1562832
ucugucuuacucugaaaug

SEQ ID NO: 1776026 - RNA, 19 nt, Artificial Sequence
  Description of Artificial Sequence: Synthetic oligonucleotide
  Antisense strand to SEQ ID NO: 1776025
cauuucagaguaagacaga

SEQ ID NO: 1776027 - RNA, 19 nt, Artificial Sequence
  Description of Artificial Sequence: Synthetic oligonucleotide
  Sense strand starting at position 3765 of SEQ ID NO: 1562832
uggcauuuccaucggcaua

SEQ ID NO: 1776028 - RNA, 19 nt, Artificial Sequence
  Description of Artificial Sequence: Synthetic oligonucleotide
  Antisense strand to SEQ ID NO: 1776027
uaugccgauggaaaugcca

SEQ ID NO: 1776029 - RNA, 19 nt, Artificial Sequence
  Description of Artificial Sequence: Synthetic oligonucleotide
  Sense strand starting at position 3813 of SEQ ID NO: 1562832
uuucuuguucuauggaaug

SEQ ID NO: 1776030 - RNA, 19 nt, Artificial Sequence
  Description of Artificial Sequence: Synthetic oligonucleotide
  Antisense strand to SEQ ID NO: 1776029
cauuccauagaacaagaaa

SEQ ID NO: 1776031 - RNA, 19 nt, Artificial Sequence
  Description of Artificial Sequence: Synthetic oligonucleotide
  Sense strand starting at position 3818 of SEQ ID NO: 1562832
uguucuauggaauguuauu

SEQ ID NO: 1776032 - RNA, 19 nt, Artificial Sequence
  Description of Artificial Sequence: Synthetic oligonucleotide
  Antisense strand to SEQ ID NO: 1776031
aauaacauuccauagaaca

SEQ ID NO: 1776033 - RNA, 19 nt, Artificial Sequence
  Description of Artificial Sequence: Synthetic oligonucleotide
  Sense strand starting at position 3916 of SEQ ID NO: 1562832
agggucuuaucuuuacuua

SEQ ID NO: 1776034 - RNA, 19 nt, Artificial Sequence
  Description of Artificial Sequence: Synthetic oligonucleotide
  Antisense strand to SEQ ID NO: 1776033
uaaguaaagauaagacccu

SEQ ID NO: 1776035 - RNA, 19 nt, Artificial Sequence
  Description of Artificial Sequence: Synthetic oligonucleotide
  Sense strand starting at position 3917 of SEQ ID NO: 1562832
gggucuuaucuuuacuuag

SEQ ID NO: 1776036 - RNA, 19 nt, Artificial Sequence
  Description of Artificial Sequence: Synthetic oligonucleotide
  Antisense strand to SEQ ID NO: 1776035
cuaaguaaagauaagaccc

SEQ ID NO: 1776037 - RNA, 19 nt, Artificial Sequence
  Description of Artificial Sequence: Synthetic oligonucleotide
  Sense strand starting at position 3919 of SEQ ID NO: 1562832
gucuuaucuuuacuuagac

SEQ ID NO: 1776038 - RNA, 19 nt, Artificial Sequence
  Description of Artificial Sequence: Synthetic oligonucleotide
  Antisense strand to SEQ ID NO: 1776037
gucuaaguaaagauaagac

SEQ ID NO: 1776039 - RNA, 19 nt, Artificial Sequence
  Description of Artificial Sequence: Synthetic oligonucleotide
  Sense strand starting at position 89 of SEQ ID NO: 1562833
ccgcccucucacugaguua

SEQ ID NO: 1776040 - RNA, 19 nt, Artificial Sequence
  Description of Artificial Sequence: Synthetic oligonucleotide
  Antisense strand to SEQ ID NO: 1776039
uaacucagugagagggcgg

SEQ ID NO: 1776041 - RNA, 19 nt, Artificial Sequence
  Description of Artificial Sequence: Synthetic oligonucleotide
  Sense strand starting at position 100 of SEQ ID NO: 1562833
cugaguuaacaaugagacu

SEQ ID NO: 1776042 - RNA, 19 nt, Artificial Sequence
  Description of Artificial Sequence: Synthetic oligonucleotide
  Antisense strand to SEQ ID NO: 1776041
agucucauuguuaacucag

SEQ ID NO: 1776043 - RNA, 19 nt, Artificial Sequence
  Description of Artificial Sequence: Synthetic oligonucleotide
  Sense strand starting at position 146 of SEQ ID NO: 1562833
ugaggagggccuugcuuua

SEQ ID NO: 1776044 - RNA, 19 nt, Artificial Sequence
  Description of Artificial Sequence: Synthetic oligonucleotide
  Antisense strand to SEQ ID NO: 1776043
uaaagcaaggcccuccuca

SEQ ID NO: 1776045 - RNA, 19 nt, Artificial Sequence
  Description of Artificial Sequence: Synthetic oligonucleotide
  Sense strand starting at position 272 of SEQ ID NO: 1562833
cauugcucuucuggaagga

SEQ ID NO: 1776046 - RNA, 19 nt, Artificial Sequence
  Description of Artificial Sequence: Synthetic oligonucleotide
  Antisense strand to SEQ ID NO: 1776045
uccuuccagaagagcaaug

SEQ ID NO: 1776047 - RNA, 19 nt, Artificial Sequence
  Description of Artificial Sequence: Synthetic oligonucleotide
  Sense strand starting at position 344 of SEQ ID NO: 1562833
cgagauguggcuggagacu

SEQ ID NO: 1776048 - RNA, 19 nt, Artificial Sequence
  Description of Artificial Sequence: Synthetic oligonucleotide
  Antisense strand to SEQ ID NO: 1776047
agucuccagccacaucucg

SEQ ID NO: 1776049 - RNA, 19 nt, Artificial Sequence
  Description of Artificial Sequence: Synthetic oligonucleotide
  Sense strand starting at position 515 of SEQ ID NO: 1562833
ccaauuuccucagggaacu

SEQ ID NO: 1776050 - RNA, 19 nt, Artificial Sequence
  Description of Artificial Sequence: Synthetic oligonucleotide
  Antisense strand to SEQ ID NO: 1776049
aguucccugaggaaauugg

SEQ ID NO: 1776051 - RNA, 19 nt, Artificial Sequence
  Description of Artificial Sequence: Synthetic oligonucleotide
  Sense strand starting at position 605 of SEQ ID NO: 1562833
cgguaugaccaagaacucu

SEQ ID NO: 1776052 - RNA, 19 nt, Artificial Sequence
  Description of Artificial Sequence: Synthetic oligonucleotide
  Antisense strand to SEQ ID NO: 1776051
agaguucuuggucauaccg

SEQ ID NO: 1776053 - RNA, 19 nt, Artificial Sequence
  Description of Artificial Sequence: Synthetic oligonucleotide
  Sense strand starting at position 947 of SEQ ID NO: 1562833
cuucguacgccauagaaug

SEQ ID NO: 1776054 - RNA, 19 nt, Artificial Sequence
  Description of Artificial Sequence: Synthetic oligonucleotide
  Antisense strand to SEQ ID NO: 1776053
cauucuauggcguacgaag

SEQ ID NO: 1776055 - RNA, 19 nt, Artificial Sequence
  Description of Artificial Sequence: Synthetic oligonucleotide
  Sense strand starting at position 1599 of SEQ ID NO: 1562833
cgcgauguacugcgaggaa

SEQ ID NO: 1776056 - RNA, 19 nt, Artificial Sequence
  Description of Artificial Sequence: Synthetic oligonucleotide
  Antisense strand to SEQ ID NO: 1776055
uuccucgcaguacaucgcg

SEQ ID NO: 1776057 - RNA, 19 nt, Artificial Sequence
  Description of Artificial Sequence: Synthetic oligonucleotide
  Sense strand starting at position 2182 of SEQ ID NO: 1562833
ccacuuggcggcuagaaau

SEQ ID NO: 1776058 - RNA, 19 nt, Artificial Sequence
  Description of Artificial Sequence: Synthetic oligonucleotide
  Antisense strand to SEQ ID NO: 1776057
auuucuagccgccaagugg

SEQ ID NO: 1776059 - RNA, 19 nt, Artificial Sequence
  Description of Artificial Sequence: Synthetic oligonucleotide
  Sense strand starting at position 2223 of SEQ ID NO: 1562833
gggucuuucuuaguccuuu

SEQ ID NO: 1776060 - RNA, 19 nt, Artificial Sequence
  Description of Artificial Sequence: Synthetic oligonucleotide
  Antisense strand to SEQ ID NO: 1776059
aaaggacuaagaaagaccc

SEQ ID NO: 1776061 - RNA, 19 nt, Artificial Sequence
  Description of Artificial Sequence: Synthetic oligonucleotide
  Sense strand starting at position 2241 of SEQ ID NO: 1562833
ucacuaagucaccgauguu

SEQ ID NO: 1776062 - RNA, 19 nt, Artificial Sequence
  Description of Artificial Sequence: Synthetic oligonucleotide
  Antisense strand to SEQ ID NO: 1776061
aacaucggugacuuaguga

SEQ ID NO: 1776063 - RNA, 19 nt, Artificial Sequence
  Description of Artificial Sequence: Synthetic oligonucleotide
  Sense strand starting at position 2244 of SEQ ID NO: 1562833
cuaagucaccgauguuagu

SEQ ID NO: 1776064 - RNA, 19 nt, Artificial Sequence
  Description of Artificial Sequence: Synthetic oligonucleotide
  Antisense strand to SEQ ID NO: 1776063
acuaacaucggugacuuag

SEQ ID NO: 1776065 - RNA, 19 nt, Artificial Sequence
  Description of Artificial Sequence: Synthetic oligonucleotide
  Sense strand starting at position 2296 of SEQ ID NO: 1562833
ggcggugaacccggaagau

SEQ ID NO: 1776066 - RNA, 19 nt, Artificial Sequence
  Description of Artificial Sequence: Synthetic oligonucleotide
  Antisense strand to SEQ ID NO: 1776065
aucuuccggguucaccgcc

SEQ ID NO: 1776067 - RNA, 19 nt, Artificial Sequence
  Description of Artificial Sequence: Synthetic oligonucleotide
  Sense strand starting at position 2427 of SEQ ID NO: 1562833
gagcuuguguguuugagau

SEQ ID NO: 1776068 - RNA, 19 nt, Artificial Sequence
  Description of Artificial Sequence: Synthetic oligonucleotide
  Antisense strand to SEQ ID NO: 1776067
aucucaaacacacaagcuc

SEQ ID NO: 1776069 - RNA, 19 nt, Artificial Sequence
  Description of Artificial Sequence: Synthetic oligonucleotide
  Sense strand starting at position 2702 of SEQ ID NO: 1562833
uggugaauuucuuaaaugu

SEQ ID NO: 1776070 - RNA, 19 nt, Artificial Sequence
  Description of Artificial Sequence: Synthetic oligonucleotide
  Antisense strand to SEQ ID NO: 1776069
acauuuaagaaauucacca

SEQ ID NO: 1776071 - RNA, 19 nt, Artificial Sequence
  Description of Artificial Sequence: Synthetic oligonucleotide
  Sense strand starting at position 2913 of SEQ ID NO: 1562833
uggucucugauaggugcaa

SEQ ID NO: 1776072 - RNA, 19 nt, Artificial Sequence
  Description of Artificial Sequence: Synthetic oligonucleotide
  Antisense strand to SEQ ID NO: 1776071
uugcaccuaucagagacca

SEQ ID NO: 1776073 - RNA, 19 nt, Artificial Sequence
  Description of Artificial Sequence: Synthetic oligonucleotide
  Sense strand starting at position 2914 of SEQ ID NO: 1562833
ggucucugauaggugcaau

SEQ ID NO: 1776074 - RNA, 19 nt, Artificial Sequence
  Description of Artificial Sequence: Synthetic oligonucleotide
  Antisense strand to SEQ ID NO: 1776073
auugcaccuaucagagacc

SEQ ID NO: 1776075 - RNA, 19 nt, Artificial Sequence
  Description of Artificial Sequence: Synthetic oligonucleotide
  Sense strand starting at position 2915 of SEQ ID NO: 1562833
gucucugauaggugcaauc

SEQ ID NO: 1776076 - RNA, 19 nt, Artificial Sequence
  Description of Artificial Sequence: Synthetic oligonucleotide
  Antisense strand to SEQ ID NO: 1776075
gauugcaccuaucagagac

SEQ ID NO: 1776077 - RNA, 19 nt, Artificial Sequence
  Description of Artificial Sequence: Synthetic oligonucleotide
  Sense strand starting at position 2917 of SEQ ID NO: 1562833
cucugauaggugcaaucca

SEQ ID NO: 1776078 - RNA, 19 nt, Artificial Sequence
  Description of Artificial Sequence: Synthetic oligonucleotide
  Antisense strand to SEQ ID NO: 1776077
uggauugcaccuaucagag

SEQ ID NO: 1776079 - RNA, 19 nt, Artificial Sequence
  Description of Artificial Sequence: Synthetic oligonucleotide
  Sense strand starting at position 2924 of SEQ ID NO: 1562833
aggugcaauccauauacca

SEQ ID NO: 1776080 - RNA, 19 nt, Artificial Sequence
  Description of Artificial Sequence: Synthetic oligonucleotide
  Antisense strand to SEQ ID NO: 1776079
ugguauauggauugcaccu

SEQ ID NO: 1776081 - RNA, 19 nt, Artificial Sequence
  Description of Artificial Sequence: Synthetic oligonucleotide
  Sense strand starting at position 2947 of SEQ ID NO: 1562833
cagugaaggccaugugaua

SEQ ID NO: 1776082 - RNA, 19 nt, Artificial Sequence
  Description of Artificial Sequence: Synthetic oligonucleotide
  Antisense strand to SEQ ID NO: 1776081
uaucacauggccuucacug

SEQ ID NO: 1776083 - RNA, 19 nt, Artificial Sequence
  Description of Artificial Sequence: Synthetic oligonucleotide
  Sense strand starting at position 3043 of SEQ ID NO: 1562833
acaaauagccuauggguau

SEQ ID NO: 1776084 - RNA, 19 nt, Artificial Sequence
  Description of Artificial Sequence: Synthetic oligonucleotide
  Antisense strand to SEQ ID NO: 1776083
auacccauaggcuauuugu

SEQ ID NO: 1776085 - RNA, 19 nt, Artificial Sequence
  Description of Artificial Sequence: Synthetic oligonucleotide
  Sense strand starting at position 3044 of SEQ ID NO: 1562833
caaauagccuauggguauu

SEQ ID NO: 1776086 - RNA, 19 nt, Artificial Sequence
  Description of Artificial Sequence: Synthetic oligonucleotide
  Antisense strand to SEQ ID NO: 1776085
aauacccauaggcuauuug

SEQ ID NO: 1776087 - RNA, 19 nt, Artificial Sequence
  Description of Artificial Sequence: Synthetic oligonucleotide
  Sense strand starting at position 3212 of SEQ ID NO: 1562833
aguguccacugcucuguaa

SEQ ID NO: 1776088 - RNA, 19 nt, Artificial Sequence
  Description of Artificial Sequence: Synthetic oligonucleotide
  Antisense strand to SEQ ID NO: 1776087
uuacagagcaguggacacu

SEQ ID NO: 1776089 - RNA, 19 nt, Artificial Sequence
  Description of Artificial Sequence: Synthetic oligonucleotide
  Sense strand starting at position 3214 of SEQ ID NO: 1562833
uguccacugcucuguaaag

SEQ ID NO: 1776090 - RNA, 19 nt, Artificial Sequence
  Description of Artificial Sequence: Synthetic oligonucleotide
  Antisense strand to SEQ ID NO: 1776089
cuuuacagagcaguggaca

SEQ ID NO: 1776091 - RNA, 19 nt, Artificial Sequence
  Description of Artificial Sequence: Synthetic oligonucleotide
  Sense strand starting at position 3215 of SEQ ID NO: 1562833
guccacugcucuguaaagu

SEQ ID NO: 1776092 - RNA, 19 nt, Artificial Sequence
  Description of Artificial Sequence: Synthetic oligonucleotide
  Antisense strand to SEQ ID NO: 1776091
acuuuacagagcaguggac

SEQ ID NO: 1776093 - RNA, 19 nt, Artificial Sequence
  Description of Artificial Sequence: Synthetic oligonucleotide
  Sense strand starting at position 3223 of SEQ ID NO: 1562833
cucuguaaaguccaaaugu

SEQ ID NO: 1776094 - RNA, 19 nt, Artificial Sequence
  Description of Artificial Sequence: Synthetic oligonucleotide
  Antisense strand to SEQ ID NO: 1776093
acauuuggacuuuacagag

SEQ ID NO: 1776095 - RNA, 19 nt, Artificial Sequence
  Description of Artificial Sequence: Synthetic oligonucleotide
  Sense strand starting at position 3327 of SEQ ID NO: 1562833
ugaacuaccgccuagucua

SEQ ID NO: 1776096 - RNA, 19 nt, Artificial Sequence
  Description of Artificial Sequence: Synthetic oligonucleotide
  Antisense strand to SEQ ID NO: 1776095
uagacuaggcgguaguuca

SEQ ID NO: 1776097 - RNA, 19 nt, Artificial Sequence
  Description of Artificial Sequence: Synthetic oligonucleotide
  Sense strand starting at position 3376 of SEQ ID NO: 1562833
cugugacuucccuauggug

SEQ ID NO: 1776098 - RNA, 19 nt, Artificial Sequence
  Description of Artificial Sequence: Synthetic oligonucleotide
  Antisense strand to SEQ ID NO: 1776097
caccauagggaagucacag

SEQ ID NO: 1776099 - RNA, 19 nt, Artificial Sequence
  Description of Artificial Sequence: Synthetic oligonucleotide
  Sense strand starting at position 3378 of SEQ ID NO: 1562833
gugacuucccuauggugga

SEQ ID NO: 1776100 - RNA, 19 nt, Artificial Sequence
  Description of Artificial Sequence: Synthetic oligonucleotide
  Antisense strand to SEQ ID NO: 1776099
uccaccauagggaagucac

SEQ ID NO: 1776101 - RNA, 19 nt, Artificial Sequence
  Description of Artificial Sequence: Synthetic oligonucleotide
  Sense strand starting at position 3412 of SEQ ID NO: 1562833
ggaggagucuguuuccagc

SEQ ID NO: 1776102 - RNA, 19 nt, Artificial Sequence
  Description of Artificial Sequence: Synthetic oligonucleotide
  Antisense strand to SEQ ID NO: 1776101
gcuggaaacagacuccucc

SEQ ID NO: 1776103 - RNA, 19 nt, Artificial Sequence
  Description of Artificial Sequence: Synthetic oligonucleotide
  Sense strand starting at position 3455 of SEQ ID NO: 1562833
cucccugugcccuaugaaa

SEQ ID NO: 1776104 - RNA, 19 nt, Artificial Sequence
  Description of Artificial Sequence: Synthetic oligonucleotide
  Antisense strand to SEQ ID NO: 1776103
uuucauagggcacagggag

SEQ ID NO: 1776105 - RNA, 19 nt, Artificial Sequence
  Description of Artificial Sequence: Synthetic oligonucleotide
  Sense strand starting at position 3467 of SEQ ID NO: 1562833
uaugaaagcugagcagaau

SEQ ID NO: 1776106 - RNA, 19 nt, Artificial Sequence
  Description of Artificial Sequence: Synthetic oligonucleotide
  Antisense strand to SEQ ID NO: 1776105
auucugcucagcuuucaua

SEQ ID NO: 1776107 - RNA, 19 nt, Artificial Sequence
  Description of Artificial Sequence: Synthetic oligonucleotide
  Sense strand starting at position 3476 of SEQ ID NO: 1562833
ugagcagaauuacauaagu

SEQ ID NO: 1776108 - RNA, 19 nt, Artificial Sequence
  Description of Artificial Sequence: Synthetic oligonucleotide
  Antisense strand to SEQ ID NO: 1776107
acuuauguaauucugcuca

SEQ ID NO: 1776109 - RNA, 19 nt, Artificial Sequence
  Description of Artificial Sequence: Synthetic oligonucleotide
  Sense strand starting at position 3609 of SEQ ID NO: 1562833
cugccaaucucagguuguu

SEQ ID NO: 1776110 - RNA, 19 nt, Artificial Sequence
  Description of Artificial Sequence: Synthetic oligonucleotide
  Antisense strand to SEQ ID NO: 1776109
aacaaccugagauuggcag

SEQ ID NO: 1776111 - RNA, 19 nt, Artificial Sequence
  Description of Artificial Sequence: Synthetic oligonucleotide
  Sense strand starting at position 3615 of SEQ ID NO: 1562833
aucucagguuguuaccaua

SEQ ID NO: 1776112 - RNA, 19 nt, Artificial Sequence
  Description of Artificial Sequence: Synthetic oligonucleotide
  Antisense strand to SEQ ID NO: 1776111
uaugguaacaaccugagau

SEQ ID NO: 1776113 - RNA, 19 nt, Artificial Sequence
  Description of Artificial Sequence: Synthetic oligonucleotide
  Sense strand starting at position 3618 of SEQ ID NO: 1562833
ucagguuguuaccauaaca

SEQ ID NO: 1776114 - RNA, 19 nt, Artificial Sequence
  Description of Artificial Sequence: Synthetic oligonucleotide
  Antisense strand to SEQ ID NO: 1776113
uguuaugguaacaaccuga

SEQ ID NO: 1776115 - RNA, 19 nt, Artificial Sequence
  Description of Artificial Sequence: Synthetic oligonucleotide
  Sense strand starting at position 3938 of SEQ ID NO: 1562833
auauccuuaguuuguaaga

SEQ ID NO: 1776116 - RNA, 19 nt, Artificial Sequence
  Description of Artificial Sequence: Synthetic oligonucleotide
  Antisense strand to SEQ ID NO: 1776115
ucuuacaaacuaaggauau

SEQ ID NO: 1776117 - RNA, 19 nt, Artificial Sequence
  Description of Artificial Sequence: Synthetic oligonucleotide
  Sense strand starting at position 3940 of SEQ ID NO: 1562833
auccuuaguuuguaagaga

SEQ ID NO: 1776118 - RNA, 19 nt, Artificial Sequence
  Description of Artificial Sequence: Synthetic oligonucleotide
  Antisense strand to SEQ ID NO: 1776117
ucucuuacaaacuaaggau

SEQ ID NO: 1776119 - RNA, 19 nt, Artificial Sequence
  Description of Artificial Sequence: Synthetic oligonucleotide
  Sense strand starting at position 355 of SEQ ID NO: 1562834
gguaguaucccaggccaag

SEQ ID NO: 1776120 - RNA, 19 nt, Artificial Sequence
  Description of Artificial Sequence: Synthetic oligonucleotide
  Antisense strand to SEQ ID NO: 1776119
cuuggccugggauacuacc

SEQ ID NO: 1776121 - RNA, 19 nt, Artificial Sequence
  Description of Artificial Sequence: Synthetic oligonucleotide
  Sense strand starting at position 1039 of SEQ ID NO: 1562834
cuaccuugcuccugacgaa

SEQ ID NO: 1776122 - RNA, 19 nt, Artificial Sequence
  Description of Artificial Sequence: Synthetic oligonucleotide
  Antisense strand to SEQ ID NO: 1776121
uucgucaggagcaagguag

SEQ ID NO: 1776123 - RNA, 19 nt, Artificial Sequence
  Description of Artificial Sequence: Synthetic oligonucleotide
  Sense strand starting at position 1310 of SEQ ID NO: 1562834
agguacucaccguguaguu

SEQ ID NO: 1776124 - RNA, 19 nt, Artificial Sequence
  Description of Artificial Sequence: Synthetic oligonucleotide
  Antisense strand to SEQ ID NO: 1776123
aacuacacggugaguaccu

SEQ ID NO: 1776125 - RNA, 19 nt, Artificial Sequence
  Description of Artificial Sequence: Synthetic oligonucleotide
  Sense strand starting at position 1786 of SEQ ID NO: 1562834
gccagugccagcuagaaga

SEQ ID NO: 1776126 - RNA, 19 nt, Artificial Sequence
  Description of Artificial Sequence: Synthetic oligonucleotide
  Antisense strand to SEQ ID NO: 1776125
ucuucuagcuggcacuggc

SEQ ID NO: 1776127 - RNA, 19 nt, Artificial Sequence
  Description of Artificial Sequence: Synthetic oligonucleotide
  Sense strand starting at position 2020 of SEQ ID NO: 1562834
gggaguuaaugugucagca

SEQ ID NO: 1776128 - RNA, 19 nt, Artificial Sequence
  Description of Artificial Sequence: Synthetic oligonucleotide
  Antisense strand to SEQ ID NO: 1776127
ugcugacacauuaacuccc

SEQ ID NO: 1776129 - RNA, 19 nt, Artificial Sequence
  Description of Artificial Sequence: Synthetic oligonucleotide
  Sense strand starting at position 2022 of SEQ ID NO: 1562834
gaguuaaugugucagcaca

SEQ ID NO: 1776130 - RNA, 19 nt, Artificial Sequence
  Description of Artificial Sequence: Synthetic oligonucleotide
  Antisense strand to SEQ ID NO: 1776129
ugugcugacacauuaacuc

SEQ ID NO: 1776131 - RNA, 19 nt, Artificial Sequence
  Description of Artificial Sequence: Synthetic oligonucleotide
  Sense strand starting at position 2310 of SEQ ID NO: 1562834
gcaggagcuuguuaagaaa

SEQ ID NO: 1776132 - RNA, 19 nt, Artificial Sequence
  Description of Artificial Sequence: Synthetic oligonucleotide
  Antisense strand to SEQ ID NO: 1776131
uuucuuaacaagcuccugc

SEQ ID NO: 1776133 - RNA, 19 nt, Artificial Sequence
  Description of Artificial Sequence: Synthetic oligonucleotide
  Sense strand starting at position 2327 of SEQ ID NO: 1562834
aaagaugauucugaggacu

SEQ ID NO: 1776134 - RNA, 19 nt, Artificial Sequence
  Description of Artificial Sequence: Synthetic oligonucleotide
  Antisense strand to SEQ ID NO: 1776133
aguccucagaaucaucuuu

SEQ ID NO: 1776135 - RNA, 19 nt, Artificial Sequence
  Description of Artificial Sequence: Synthetic oligonucleotide
  Sense strand starting at position 2329 of SEQ ID NO: 1562834
agaugauucugaggacuug

SEQ ID NO: 1776136 - RNA, 19 nt, Artificial Sequence
  Description of Artificial Sequence: Synthetic oligonucleotide
  Antisense strand to SEQ ID NO: 1776135
caaguccucagaaucaucu

SEQ ID NO: 1776137 - RNA, 19 nt, Artificial Sequence
  Description of Artificial Sequence: Synthetic oligonucleotide
  Sense strand starting at position 395 of SEQ ID NO: 1562835
ccuccaugugggugauaau

SEQ ID NO: 1776138 - RNA, 19 nt, Artificial Sequence
  Description of Artificial Sequence: Synthetic oligonucleotide
  Antisense strand to SEQ ID NO: 1776137
auuaucacccacauggagg

SEQ ID NO: 1776139 - RNA, 19 nt, Artificial Sequence
  Description of Artificial Sequence: Synthetic oligonucleotide
  Sense strand starting at position 652 of SEQ ID NO: 1562835
ugaacaucuuauucgaagu

SEQ ID NO: 1776140 - RNA, 19 nt, Artificial Sequence
  Description of Artificial Sequence: Synthetic oligonucleotide
  Antisense strand to SEQ ID NO: 1776139
acuucgaauaagauguuca

SEQ ID NO: 1776141 - RNA, 19 nt, Artificial Sequence
  Description of Artificial Sequence: Synthetic oligonucleotide
  Sense strand starting at position 767 of SEQ ID NO: 1562835
ugaucccugcucugaaauu

SEQ ID NO: 1776142 - RNA, 19 nt, Artificial Sequence
  Description of Artificial Sequence: Synthetic oligonucleotide
  Antisense strand to SEQ ID NO: 1776141
aauuucagagcagggauca

SEQ ID NO: 1776143 - RNA, 19 nt, Artificial Sequence
  Description of Artificial Sequence: Synthetic oligonucleotide
  Sense strand starting at position 842 of SEQ ID NO: 1562835
ggauuuaucuugcugcauc

SEQ ID NO: 1776144 - RNA, 19 nt, Artificial Sequence
  Description of Artificial Sequence: Synthetic oligonucleotide
  Antisense strand to SEQ ID NO: 1776143
gaugcagcaagauaaaucc

SEQ ID NO: 1776145 - RNA, 19 nt, Artificial Sequence
  Description of Artificial Sequence: Synthetic oligonucleotide
  Sense strand starting at position 944 of SEQ ID NO: 1562835
gccagcagacaaugaguua

SEQ ID NO: 1776146 - RNA, 19 nt, Artificial Sequence
  Description of Artificial Sequence: Synthetic oligonucleotide
  Antisense strand to SEQ ID NO: 1776145
uaacucauugucugcuggc

SEQ ID NO: 1776147 - RNA, 19 nt, Artificial Sequence
  Description of Artificial Sequence: Synthetic oligonucleotide
  Sense strand starting at position 995 of SEQ ID NO: 1562835
ccagaaguuguaugauugu

SEQ ID NO: 1776148 - RNA, 19 nt, Artificial Sequence
  Description of Artificial Sequence: Synthetic oligonucleotide
  Antisense strand to SEQ ID NO: 1776147
acaaucauacaacuucugg

SEQ ID NO: 1776149 - RNA, 19 nt, Artificial Sequence
  Description of Artificial Sequence: Synthetic oligonucleotide
  Sense strand starting at position 1018 of SEQ ID NO: 1562835
ugacuuacaguguauccaa

SEQ ID NO: 1776150 - RNA, 19 nt, Artificial Sequence
  Description of Artificial Sequence: Synthetic oligonucleotide
  Antisense strand to SEQ ID NO: 1776149
uuggauacacuguaaguca

SEQ ID NO: 1776151 - RNA, 19 nt, Artificial Sequence
  Description of Artificial Sequence: Synthetic oligonucleotide
  Sense strand starting at position 1026 of SEQ ID NO: 1562835
aguguauccaaguagugau

SEQ ID NO: 1776152 - RNA, 19 nt, Artificial Sequence
  Description of Artificial Sequence: Synthetic oligonucleotide
  Antisense strand to SEQ ID NO: 1776151
aucacuacuuggauacacu

SEQ ID NO: 1776153 - RNA, 19 nt, Artificial Sequence
  Description of Artificial Sequence: Synthetic oligonucleotide
  Sense strand starting at position 1154 of SEQ ID NO: 1562835
guugguauuaaaggcaaau

SEQ ID NO: 1776154 - RNA, 19 nt, Artificial Sequence
  Description of Artificial Sequence: Synthetic oligonucleotide
  Antisense strand to SEQ ID NO: 1776153
auuugccuuuaauaccaac

SEQ ID NO: 1776155 - RNA, 19 nt, Artificial Sequence
  Description of Artificial Sequence: Synthetic oligonucleotide
  Sense strand starting at position 1304 of SEQ ID NO: 1562835
gccuuagaguaucucagga

SEQ ID NO: 1776156 - RNA, 19 nt, Artificial Sequence
  Description of Artificial Sequence: Synthetic oligonucleotide
  Antisense strand to SEQ ID NO: 1776155
uccugagauacucuaaggc

SEQ ID NO: 1776157 - RNA, 19 nt, Artificial Sequence
  Description of Artificial Sequence: Synthetic oligonucleotide
  Sense strand starting at position 1366 of SEQ ID NO: 1562835
agagguuucucuuccuaag

SEQ ID NO: 1776158 - RNA, 19 nt, Artificial Sequence
  Description of Artificial Sequence: Synthetic oligonucleotide
  Antisense strand to SEQ ID NO: 1776157
cuuaggaagagaaaccucu

SEQ ID NO: 1776159 - RNA, 19 nt, Artificial Sequence
  Description of Artificial Sequence: Synthetic oligonucleotide
  Sense strand starting at position 1368 of SEQ ID NO: 1562835
agguuucucuuccuaagaa

SEQ ID NO: 1776160 - RNA, 19 nt, Artificial Sequence
  Description of Artificial Sequence: Synthetic oligonucleotide
  Antisense strand to SEQ ID NO: 1776159
uucuuaggaagagaaaccu

SEQ ID NO: 1776161 - RNA, 19 nt, Artificial Sequence
  Description of Artificial Sequence: Synthetic oligonucleotide
  Sense strand starting at position 1418 of SEQ ID NO: 1562835
gugguucuuccucacaaua

SEQ ID NO: 1776162 - RNA, 19 nt, Artificial Sequence
  Description of Artificial Sequence: Synthetic oligonucleotide
  Antisense strand to SEQ ID NO: 1776161
uauugugaggaagaaccac

SEQ ID NO: 1776163 - RNA, 19 nt, Artificial Sequence
  Description of Artificial Sequence: Synthetic oligonucleotide
  Sense strand starting at position 1618 of SEQ ID NO: 1562835
uuuagugauugagcucuaa

SEQ ID NO: 1776164 - RNA, 19 nt, Artificial Sequence
  Description of Artificial Sequence: Synthetic oligonucleotide
  Antisense strand to SEQ ID NO: 1776163
uuagagcucaaucacuaaa

SEQ ID NO: 1776165 - RNA, 19 nt, Artificial Sequence
  Description of Artificial Sequence: Synthetic oligonucleotide
  Sense strand starting at position 1622 of SEQ ID NO: 1562835
gugauugagcucuaaacuu

SEQ ID NO: 1776166 - RNA, 19 nt, Artificial Sequence
  Description of Artificial Sequence: Synthetic oligonucleotide
  Antisense strand to SEQ ID NO: 1776165
aaguuuagagcucaaucac

SEQ ID NO: 1776167 - RNA, 19 nt, Artificial Sequence
  Description of Artificial Sequence: Synthetic oligonucleotide
  Sense strand starting at position 1629 of SEQ ID NO: 1562835
agcucuaaacuuggaaagu

SEQ ID NO: 1776168 - RNA, 19 nt, Artificial Sequence
  Description of Artificial Sequence: Synthetic oligonucleotide
  Antisense strand to SEQ ID NO: 1776167
acuuuccaaguuuagagcu

SEQ ID NO: 1776169 - RNA, 19 nt, Artificial Sequence
  Description of Artificial Sequence: Synthetic oligonucleotide
  Sense strand starting at position 1710 of SEQ ID NO: 1562835
auggcauacucggugaaca

SEQ ID NO: 1776170 - RNA, 19 nt, Artificial Sequence
  Description of Artificial Sequence: Synthetic oligonucleotide
  Antisense strand to SEQ ID NO: 1776169
uguucaccgaguaugccau

SEQ ID NO: 1776171 - RNA, 19 nt, Artificial Sequence
  Description of Artificial Sequence: Synthetic oligonucleotide
  Sense strand starting at position 1712 of SEQ ID NO: 1562835
ggcauacucggugaacaca

SEQ ID NO: 1776172 - RNA, 19 nt, Artificial Sequence
  Description of Artificial Sequence: Synthetic oligonucleotide
  Antisense strand to SEQ ID NO: 1776171
uguguucaccgaguaugcc

SEQ ID NO: 1776173 - RNA, 19 nt, Artificial Sequence
  Description of Artificial Sequence: Synthetic oligonucleotide
  Sense strand starting at position 1879 of SEQ ID NO: 1562835
gggucaguuggguauucca

SEQ ID NO: 1776174 - RNA, 19 nt, Artificial Sequence
  Description of Artificial Sequence: Synthetic oligonucleotide
  Antisense strand to SEQ ID NO: 1776173
uggaauacccaacugaccc

SEQ ID NO: 1776175 - RNA, 19 nt, Artificial Sequence
  Description of Artificial Sequence: Synthetic oligonucleotide
  Sense strand starting at position 1942 of SEQ ID NO: 1562835
aaggauguagugugaaaga

SEQ ID NO: 1776176 - RNA, 19 nt, Artificial Sequence
  Description of Artificial Sequence: Synthetic oligonucleotide
  Antisense strand to SEQ ID NO: 1776175
ucuuucacacuacauccuu

SEQ ID NO: 1776177 - RNA, 19 nt, Artificial Sequence
  Description of Artificial Sequence: Synthetic oligonucleotide
  Sense strand starting at position 1993 of SEQ ID NO: 1562835
gcagaaguggccugauaca

SEQ ID NO: 1776178 - RNA, 19 nt, Artificial Sequence
  Description of Artificial Sequence: Synthetic oligonucleotide
  Antisense strand to SEQ ID NO: 1776177
uguaucaggccacuucugc

SEQ ID NO: 1776179 - RNA, 19 nt, Artificial Sequence
  Description of Artificial Sequence: Synthetic oligonucleotide
  Sense strand starting at position 2062 of SEQ ID NO: 1562835
cuugcagggcgauaacaau

SEQ ID NO: 1776180 - RNA, 19 nt, Artificial Sequence
  Description of Artificial Sequence: Synthetic oligonucleotide
  Antisense strand to SEQ ID NO: 1776179
auuguuaucgcccugcaag

SEQ ID NO: 1776181 - RNA, 19 nt, Artificial Sequence
  Description of Artificial Sequence: Synthetic oligonucleotide
  Sense strand starting at position 2220 of SEQ ID NO: 1562835
augcucuacgcuuaacaaa

SEQ ID NO: 1776182 - RNA, 19 nt, Artificial Sequence
  Description of Artificial Sequence: Synthetic oligonucleotide
  Antisense strand to SEQ ID NO: 1776181
uuuguuaagcguagagcau

SEQ ID NO: 1776183 - RNA, 19 nt, Artificial Sequence
  Description of Artificial Sequence: Synthetic oligonucleotide
  Sense strand starting at position 2239 of SEQ ID NO: 1562835
uguuuaccaccauaaguau

SEQ ID NO: 1776184 - RNA, 19 nt, Artificial Sequence
  Description of Artificial Sequence: Synthetic oligonucleotide
  Antisense strand to SEQ ID NO: 1776183
auacuuauggugguaaaca

SEQ ID NO: 1776185 - RNA, 19 nt, Artificial Sequence
  Description of Artificial Sequence: Synthetic oligonucleotide
  Sense strand starting at position 2481 of SEQ ID NO: 1562835
gggagacugauggguguuu

SEQ ID NO: 1776186 - RNA, 19 nt, Artificial Sequence
  Description of Artificial Sequence: Synthetic oligonucleotide
  Antisense strand to SEQ ID NO: 1776185
aaacacccaucagucuccc

SEQ ID NO: 1776187 - RNA, 19 nt, Artificial Sequence
  Description of Artificial Sequence: Synthetic oligonucleotide
  Sense strand starting at position 2483 of SEQ ID NO: 1562835
gagacugauggguguuucu

SEQ ID NO: 1776188 - RNA, 19 nt, Artificial Sequence
  Description of Artificial Sequence: Synthetic oligonucleotide
  Antisense strand to SEQ ID NO: 1776187
agaaacacccaucagucuc

SEQ ID NO: 1776189 - RNA, 19 nt, Artificial Sequence
  Description of Artificial Sequence: Synthetic oligonucleotide
  Sense strand starting at position 2490 of SEQ ID NO: 1562835
auggguguuucucuuauuu

SEQ ID NO: 1776190 - RNA, 19 nt, Artificial Sequence
  Description of Artificial Sequence: Synthetic oligonucleotide
  Antisense strand to SEQ ID NO: 1776189
aaauaagagaaacacccau

SEQ ID NO: 1776191 - RNA, 19 nt, Artificial Sequence
  Description of Artificial Sequence: Synthetic oligonucleotide
  Sense strand starting at position 2515 of SEQ ID NO: 1562835
uggcaauacugcuuaauga

SEQ ID NO: 1776192 - RNA, 19 nt, Artificial Sequence
  Description of Artificial Sequence: Synthetic oligonucleotide
  Antisense strand to SEQ ID NO: 1776191
ucauuaagcaguauugcca

SEQ ID NO: 1776193 - RNA, 19 nt, Artificial Sequence
  Description of Artificial Sequence: Synthetic oligonucleotide
  Sense strand starting at position 2516 of SEQ ID NO: 1562835
ggcaauacugcuuaaugaa

SEQ ID NO: 1776194 - RNA, 19 nt, Artificial Sequence
  Description of Artificial Sequence: Synthetic oligonucleotide
  Antisense strand to SEQ ID NO: 1776193
uucauuaagcaguauugcc

SEQ ID NO: 1776195 - RNA, 19 nt, Artificial Sequence
  Description of Artificial Sequence: Synthetic oligonucleotide
  Sense strand starting at position 2590 of SEQ ID NO: 1562835
ggcucaugccuacauguaa

SEQ ID NO: 1776196 - RNA, 19 nt, Artificial Sequence
  Description of Artificial Sequence: Synthetic oligonucleotide
  Antisense strand to SEQ ID NO: 1776195
uuacauguaggcaugagcc

SEQ ID NO: 1776197 - RNA, 19 nt, Artificial Sequence
  Description of Artificial Sequence: Synthetic oligonucleotide
  Sense strand starting at position 2920 of SEQ ID NO: 1562835
aaaccuaaacgguguuaca

SEQ ID NO: 1776198 - RNA, 19 nt, Artificial Sequence
  Description of Artificial Sequence: Synthetic oligonucleotide
  Antisense strand to SEQ ID NO: 1776197
uguaacaccguuuagguuu

SEQ ID NO: 1776199 - RNA, 19 nt, Artificial Sequence
  Description of Artificial Sequence: Synthetic oligonucleotide
  Sense strand starting at position 3136 of SEQ ID NO: 1562835
aggaaagccuccuuacaua

SEQ ID NO: 1776200 - RNA, 19 nt, Artificial Sequence
  Description of Artificial Sequence: Synthetic oligonucleotide
  Antisense strand to SEQ ID NO: 1776199
uauguaaggaggcuuuccu

SEQ ID NO: 1776201 - RNA, 19 nt, Artificial Sequence
  Description of Artificial Sequence: Synthetic oligonucleotide
  Sense strand starting at position 3260 of SEQ ID NO: 1562835
uagggaggcguccaagaau

SEQ ID NO: 1776202 - RNA, 19 nt, Artificial Sequence
  Description of Artificial Sequence: Synthetic oligonucleotide
  Antisense strand to SEQ ID NO: 1776201
auucuuggacgccucccua

SEQ ID NO: 1776203 - RNA, 19 nt, Artificial Sequence
  Description of Artificial Sequence: Synthetic oligonucleotide
  Sense strand starting at position 3271 of SEQ ID NO: 1562835
ccaagaaucgcagaaccau

SEQ ID NO: 1776204 - RNA, 19 nt, Artificial Sequence
  Description of Artificial Sequence: Synthetic oligonucleotide
  Antisense strand to SEQ ID NO: 1776203
augguucugcgauucuugg

SEQ ID NO: 1776205 - RNA, 19 nt, Artificial Sequence
  Description of Artificial Sequence: Synthetic oligonucleotide
  Sense strand starting at position 3417 of SEQ ID NO: 1562835
uuaaaugucugggccaacu

SEQ ID NO: 1776206 - RNA, 19 nt, Artificial Sequence
  Description of Artificial Sequence: Synthetic oligonucleotide
  Antisense strand to SEQ ID NO: 1776205
aguuggcccagacauuuaa

SEQ ID NO: 1776207 - RNA, 19 nt, Artificial Sequence
  Description of Artificial Sequence: Synthetic oligonucleotide
  Sense strand starting at position 3519 of SEQ ID NO: 1562835
ggcuguguccuugccugua

SEQ ID NO: 1776208 - RNA, 19 nt, Artificial Sequence
  Description of Artificial Sequence: Synthetic oligonucleotide
  Antisense strand to SEQ ID NO: 1776207
uacaggcaaggacacagcc

SEQ ID NO: 1776209 - RNA, 19 nt, Artificial Sequence
  Description of Artificial Sequence: Synthetic oligonucleotide
  Sense strand starting at position 3580 of SEQ ID NO: 1562835
aguuacucuuccucaagua

SEQ ID NO: 1776210 - RNA, 19 nt, Artificial Sequence
  Description of Artificial Sequence: Synthetic oligonucleotide
  Antisense strand to SEQ ID NO: 1776209
uacuugaggaagaguaacu

SEQ ID NO: 1776211 - RNA, 19 nt, Artificial Sequence
  Description of Artificial Sequence: Synthetic oligonucleotide
  Sense strand starting at position 3590 of SEQ ID NO: 1562835
ccucaaguaccgugaauuu

SEQ ID NO: 1776212 - RNA, 19 nt, Artificial Sequence
  Description of Artificial Sequence: Synthetic oligonucleotide
  Antisense strand to SEQ ID NO: 1776211
aaauucacgguacuugagg

SEQ ID NO: 1776213 - RNA, 19 nt, Artificial Sequence
  Description of Artificial Sequence: Synthetic oligonucleotide
  Sense strand starting at position 3791 of SEQ ID NO: 1562835
guuuauaaguuccuggaga

SEQ ID NO: 1776214 - RNA, 19 nt, Artificial Sequence
  Description of Artificial Sequence: Synthetic oligonucleotide
  Antisense strand to SEQ ID NO: 1776213
ucuccaggaacuuauaaac

SEQ ID NO: 1776215 - RNA, 19 nt, Artificial Sequence
  Description of Artificial Sequence: Synthetic oligonucleotide
  Sense strand starting at position 3793 of SEQ ID NO: 1562835
uuauaaguuccuggagaga

SEQ ID NO: 1776216 - RNA, 19 nt, Artificial Sequence
  Description of Artificial Sequence: Synthetic oligonucleotide
  Antisense strand to SEQ ID NO: 1776215
ucucuccaggaacuuauaa

SEQ ID NO: 1776217 - RNA, 19 nt, Artificial Sequence
  Description of Artificial Sequence: Synthetic oligonucleotide
  Sense strand starting at position 55 of SEQ ID NO: 1562836
cccuuuauaggcugagauu

SEQ ID NO: 1776218 - RNA, 19 nt, Artificial Sequence
  Description of Artificial Sequence: Synthetic oligonucleotide
  Antisense strand to SEQ ID NO: 1776217
aaucucagccuauaaaggg

SEQ ID NO: 1776219 - RNA, 19 nt, Artificial Sequence
  Description of Artificial Sequence: Synthetic oligonucleotide
  Sense strand starting at position 56 of SEQ ID NO: 1562836
ccuuuauaggcugagauuc

SEQ ID NO: 1776220 - RNA, 19 nt, Artificial Sequence
  Description of Artificial Sequence: Synthetic oligonucleotide
  Antisense strand to SEQ ID NO: 1776219
gaaucucagccuauaaagg

SEQ ID NO: 1776221 - RNA, 19 nt, Artificial Sequence
  Description of Artificial Sequence: Synthetic oligonucleotide
  Sense strand starting at position 343 of SEQ ID NO: 1562836
gcaguaauggauugcuucu

SEQ ID NO: 1776222 - RNA, 19 nt, Artificial Sequence
  Description of Artificial Sequence: Synthetic oligonucleotide
  Antisense strand to SEQ ID NO: 1776221
agaagcaauccauuacugc

SEQ ID NO: 1776223 - RNA, 19 nt, Artificial Sequence
  Description of Artificial Sequence: Synthetic oligonucleotide
  Sense strand starting at position 349 of SEQ ID NO: 1562836
auggauugcuucuuucuaa

SEQ ID NO: 1776224 - RNA, 19 nt, Artificial Sequence
  Description of Artificial Sequence: Synthetic oligonucleotide
  Antisense strand to SEQ ID NO: 1776223
uuagaaagaagcaauccau

SEQ ID NO: 1776225 - RNA, 19 nt, Artificial Sequence
  Description of Artificial Sequence: Synthetic oligonucleotide
  Sense strand starting at position 350 of SEQ ID NO: 1562836
uggauugcuucuuucuaaa

SEQ ID NO: 1776226 - RNA, 19 nt, Artificial Sequence
  Description of Artificial Sequence: Synthetic oligonucleotide
  Antisense strand to SEQ ID NO: 1776225
uuuagaaagaagcaaucca

SEQ ID NO: 1776227 - RNA, 19 nt, Artificial Sequence
  Description of Artificial Sequence: Synthetic oligonucleotide
  Sense strand starting at position 398 of SEQ ID NO: 1562836
cccuuugguucgcuaugaa

SEQ ID NO: 1776228 - RNA, 19 nt, Artificial Sequence
  Description of Artificial Sequence: Synthetic oligonucleotide
  Antisense strand to SEQ ID NO: 1776227
uucauagcgaaccaaaggg

SEQ ID NO: 1776229 - RNA, 19 nt, Artificial Sequence
  Description of Artificial Sequence: Synthetic oligonucleotide
  Sense strand starting at position 602 of SEQ ID NO: 1562836
aggucuaacuucuuacuga

SEQ ID NO: 1776230 - RNA, 19 nt, Artificial Sequence
  Description of Artificial Sequence: Synthetic oligonucleotide
  Antisense strand to SEQ ID NO: 1776229
ucaguaagaaguuagaccu

SEQ ID NO: 1776231 - RNA, 19 nt, Artificial Sequence
  Description of Artificial Sequence: Synthetic oligonucleotide
  Sense strand starting at position 641 of SEQ ID NO: 1562836
ggcuucggcuugauguaga

SEQ ID NO: 1776232 - RNA, 19 nt, Artificial Sequence
  Description of Artificial Sequence: Synthetic oligonucleotide
  Antisense strand to SEQ ID NO: 1776231
ucuacaucaagccgaagcc

SEQ ID NO: 1776233 - RNA, 19 nt, Artificial Sequence
  Description of Artificial Sequence: Synthetic oligonucleotide
  Sense strand starting at position 646 of SEQ ID NO: 1562836
cggcuugauguagaaagga

SEQ ID NO: 1776234 - RNA, 19 nt, Artificial Sequence
  Description of Artificial Sequence: Synthetic oligonucleotide
  Antisense strand to SEQ ID NO: 1776233
uccuuucuacaucaagccg

SEQ ID NO: 1776235 - RNA, 19 nt, Artificial Sequence
  Description of Artificial Sequence: Synthetic oligonucleotide
  Sense strand starting at position 697 of SEQ ID NO: 1562836
ggacauuccagacgucuua

SEQ ID NO: 1776236 - RNA, 19 nt, Artificial Sequence
  Description of Artificial Sequence: Synthetic oligonucleotide
  Antisense strand to SEQ ID NO: 1776235
uaagacgucuggaaugucc

SEQ ID NO: 1776237 - RNA, 19 nt, Artificial Sequence
  Description of Artificial Sequence: Synthetic oligonucleotide
  Sense strand starting at position 707 of SEQ ID NO: 1562836
gacgucuuaugaguuuaaa

SEQ ID NO: 1776238 - RNA, 19 nt, Artificial Sequence
  Description of Artificial Sequence: Synthetic oligonucleotide
  Antisense strand to SEQ ID NO: 1776237
uuuaaacucauaagacguc

SEQ ID NO: 1776239 - RNA, 19 nt, Artificial Sequence
  Description of Artificial Sequence: Synthetic oligonucleotide
  Sense strand starting at position 776 of SEQ ID NO: 1562836
ugauguauuccacauuccu

SEQ ID NO: 1776240 - RNA, 19 nt, Artificial Sequence
  Description of Artificial Sequence: Synthetic oligonucleotide
  Antisense strand to SEQ ID NO: 1776239
aggaauguggaauacauca

SEQ ID NO: 1776241 - RNA, 19 nt, Artificial Sequence
  Description of Artificial Sequence: Synthetic oligonucleotide
  Sense strand starting at position 857 of SEQ ID NO: 1562836
uucguuaugcugcauaaca

SEQ ID NO: 1776242 - RNA, 19 nt, Artificial Sequence
  Description of Artificial Sequence: Synthetic oligonucleotide
  Antisense strand to SEQ ID NO: 1776241
uguuaugcagcauaacgaa

SEQ ID NO: 1776243 - RNA, 19 nt, Artificial Sequence
  Description of Artificial Sequence: Synthetic oligonucleotide
  Sense strand starting at position 993 of SEQ ID NO: 1562836
ggccaagcacugugucaaa

SEQ ID NO: 1776244 - RNA, 19 nt, Artificial Sequence
  Description of Artificial Sequence: Synthetic oligonucleotide
  Antisense strand to SEQ ID NO: 1776243
uuugacacagugcuuggcc

SEQ ID NO: 1776245 - RNA, 19 nt, Artificial Sequence
  Description of Artificial Sequence: Synthetic oligonucleotide
  Sense strand starting at position 1047 of SEQ ID NO: 1562836
caaacaaccguaugcgauu

SEQ ID NO: 1776246 - RNA, 19 nt, Artificial Sequence
  Description of Artificial Sequence: Synthetic oligonucleotide
  Antisense strand to SEQ ID NO: 1776245
aaucgcauacgguuguuug

SEQ ID NO: 1776247 - RNA, 19 nt, Artificial Sequence
  Description of Artificial Sequence: Synthetic oligonucleotide
  Sense strand starting at position 1065 of SEQ ID NO: 1562836
uggugcuauuauccucauu

SEQ ID NO: 1776248 - RNA, 19 nt, Artificial Sequence
  Description of Artificial Sequence: Synthetic oligonucleotide
  Antisense strand to SEQ ID NO: 1776247
aaugaggauaauagcacca

SEQ ID NO: 1776249 - RNA, 19 nt, Artificial Sequence
  Description of Artificial Sequence: Synthetic oligonucleotide
  Sense strand starting at position 1224 of SEQ ID NO: 1562836
gacagacgcuuucuuagga

SEQ ID NO: 1776250 - RNA, 19 nt, Artificial Sequence
  Description of Artificial Sequence: Synthetic oligonucleotide
  Antisense strand to SEQ ID NO: 1776249
uccuaagaaagcgucuguc

SEQ ID NO: 1776251 - RNA, 19 nt, Artificial Sequence
  Description of Artificial Sequence: Synthetic oligonucleotide
  Sense strand starting at position 1231 of SEQ ID NO: 1562836
gcuuucuuaggagguaaag

SEQ ID NO: 1776252 - RNA, 19 nt, Artificial Sequence
  Description of Artificial Sequence: Synthetic oligonucleotide
  Antisense strand to SEQ ID NO: 1776251
cuuuaccuccuaagaaagc

SEQ ID NO: 1776253 - RNA, 19 nt, Artificial Sequence
  Description of Artificial Sequence: Synthetic oligonucleotide
  Sense strand starting at position 1233 of SEQ ID NO: 1562836
uuucuuaggagguaaaguu

SEQ ID NO: 1776254 - RNA, 19 nt, Artificial Sequence
  Description of Artificial Sequence: Synthetic oligonucleotide
  Antisense strand to SEQ ID NO: 1776253
aacuuuaccuccuaagaaa

SEQ ID NO: 1776255 - RNA, 19 nt, Artificial Sequence
  Description of Artificial Sequence: Synthetic oligonucleotide
  Sense strand starting at position 1241 of SEQ ID NO: 1562836
gagguaaaguucuuggcca

SEQ ID NO: 1776256 - RNA, 19 nt, Artificial Sequence
  Description of Artificial Sequence: Synthetic oligonucleotide
  Antisense strand to SEQ ID NO: 1776255
uggccaagaacuuuaccuc

SEQ ID NO: 1776257 - RNA, 19 nt, Artificial Sequence
  Description of Artificial Sequence: Synthetic oligonucleotide
  Sense strand starting at position 1243 of SEQ ID NO: 1562836
gguaaaguucuuggccauc

SEQ ID NO: 1776258 - RNA, 19 nt, Artificial Sequence
  Description of Artificial Sequence: Synthetic oligonucleotide
  Antisense strand to SEQ ID NO: 1776257
gauggccaagaacuuuacc

SEQ ID NO: 1776259 - RNA, 19 nt, Artificial Sequence
  Description of Artificial Sequence: Synthetic oligonucleotide
  Sense strand starting at position 1249 of SEQ ID NO: 1562836
guucuuggccaucaaguuu

SEQ ID NO: 1776260 - RNA, 19 nt, Artificial Sequence
  Description of Artificial Sequence: Synthetic oligonucleotide
  Antisense strand to SEQ ID NO: 1776259
aaacuugauggccaagaac

SEQ ID NO: 1776261 - RNA, 19 nt, Artificial Sequence
  Description of Artificial Sequence: Synthetic oligonucleotide
  Sense strand starting at position 1376 of SEQ ID NO: 1562836
ccugaaggucugcacaaga

SEQ ID NO: 1776262 - RNA, 19 nt, Artificial Sequence
  Description of Artificial Sequence: Synthetic oligonucleotide
  Antisense strand to SEQ ID NO: 1776261
ucuugugcagaccuucagg

SEQ ID NO: 1776263 - RNA, 19 nt, Artificial Sequence
  Description of Artificial Sequence: Synthetic oligonucleotide
  Sense strand starting at position 2027 of SEQ ID NO: 1562836
aagacuguccgcuggagaa

SEQ ID NO: 1776264 - RNA, 19 nt, Artificial Sequence
  Description of Artificial Sequence: Synthetic oligonucleotide
  Antisense strand to SEQ ID NO: 1776263
uucuccagcggacagucuu

SEQ ID NO: 1776265 - RNA, 19 nt, Artificial Sequence
  Description of Artificial Sequence: Synthetic oligonucleotide
  Sense strand starting at position 2029 of SEQ ID NO: 1562836
gacuguccgcuggagaagu

SEQ ID NO: 1776266 - RNA, 19 nt, Artificial Sequence
  Description of Artificial Sequence: Synthetic oligonucleotide
  Antisense strand to SEQ ID NO: 1776265
acuucuccagcggacaguc

SEQ ID NO: 1776267 - RNA, 19 nt, Artificial Sequence
  Description of Artificial Sequence: Synthetic oligonucleotide
  Sense strand starting at position 2084 of SEQ ID NO: 1562836
ucgugaucggcggacuaaa

SEQ ID NO: 1776268 - RNA, 19 nt, Artificial Sequence
  Description of Artificial Sequence: Synthetic oligonucleotide
  Antisense strand to SEQ ID NO: 1776267
uuuaguccgccgaucacga

SEQ ID NO: 1776269 - RNA, 19 nt, Artificial Sequence
  Description of Artificial Sequence: Synthetic oligonucleotide
  Sense strand starting at position 2148 of SEQ ID NO: 1562836
ccugacuuccugugacuga

SEQ ID NO: 1776270 - RNA, 19 nt, Artificial Sequence
  Description of Artificial Sequence: Synthetic oligonucleotide
  Antisense strand to SEQ ID NO: 1776269
ucagucacaggaagucagg

SEQ ID NO: 1776271 - RNA, 19 nt, Artificial Sequence
  Description of Artificial Sequence: Synthetic oligonucleotide
  Sense strand starting at position 2199 of SEQ ID NO: 1562836
ugaccucaucucugaggaa

SEQ ID NO: 1776272 - RNA, 19 nt, Artificial Sequence
  Description of Artificial Sequence: Synthetic oligonucleotide
  Antisense strand to SEQ ID NO: 1776271
uuccucagagaugagguca

SEQ ID NO: 1776273 - RNA, 19 nt, Artificial Sequence
  Description of Artificial Sequence: Synthetic oligonucleotide
  Sense strand starting at position 2367 of SEQ ID NO: 1562836
ugcccaggcgcgaguaauu

SEQ ID NO: 1776274 - RNA, 19 nt, Artificial Sequence
  Description of Artificial Sequence: Synthetic oligonucleotide
  Antisense strand to SEQ ID NO: 1776273
aauuacucgcgccugggca

SEQ ID NO: 1776275 - RNA, 19 nt, Artificial Sequence
  Description of Artificial Sequence: Synthetic oligonucleotide
  Sense strand starting at position 2663 of SEQ ID NO: 1562836
gcgcucugggcuuagaaga

SEQ ID NO: 1776276 - RNA, 19 nt, Artificial Sequence
  Description of Artificial Sequence: Synthetic oligonucleotide
  Antisense strand to SEQ ID NO: 1776275
ucuucuaagcccagagcgc

SEQ ID NO: 1776277 - RNA, 19 nt, Artificial Sequence
  Description of Artificial Sequence: Synthetic oligonucleotide
  Sense strand starting at position 2747 of SEQ ID NO: 1562836
gaggauuccacgggaugac

SEQ ID NO: 1776278 - RNA, 19 nt, Artificial Sequence
  Description of Artificial Sequence: Synthetic oligonucleotide
  Antisense strand to SEQ ID NO: 1776277
gucaucccguggaauccuc

SEQ ID NO: 1776279 - RNA, 19 nt, Artificial Sequence
  Description of Artificial Sequence: Synthetic oligonucleotide
  Sense strand starting at position 2768 of SEQ ID NO: 1562836
ccgacaacucuuggaauuc

SEQ ID NO: 1776280 - RNA, 19 nt, Artificial Sequence
  Description of Artificial Sequence: Synthetic oligonucleotide
  Antisense strand to SEQ ID NO: 1776279
gaauuccaagaguugucgg

SEQ ID NO: 1776281 - RNA, 19 nt, Artificial Sequence
  Description of Artificial Sequence: Synthetic oligonucleotide
  Sense strand starting at position 2809 of SEQ ID NO: 1562836
cacccauucguguagugaa

SEQ ID NO: 1776282 - RNA, 19 nt, Artificial Sequence
  Description of Artificial Sequence: Synthetic oligonucleotide
  Antisense strand to SEQ ID NO: 1776281
uucacuacacgaaugggug

SEQ ID NO: 1776283 - RNA, 19 nt, Artificial Sequence
  Description of Artificial Sequence: Synthetic oligonucleotide
  Sense strand starting at position 3027 of SEQ ID NO: 1562836
uauguauuaugagugaagu

SEQ ID NO: 1776284 - RNA, 19 nt, Artificial Sequence
  Description of Artificial Sequence: Synthetic oligonucleotide
  Antisense strand to SEQ ID NO: 1776283
acuucacucauaauacaua

SEQ ID NO: 1776285 - RNA, 19 nt, Artificial Sequence
  Description of Artificial Sequence: Synthetic oligonucleotide
  Sense strand starting at position 3028 of SEQ ID NO: 1562836
auguauuaugagugaaguc

SEQ ID NO: 1776286 - RNA, 19 nt, Artificial Sequence
  Description of Artificial Sequence: Synthetic oligonucleotide
  Antisense strand to SEQ ID NO: 1776285
gacuucacucauaauacau

SEQ ID NO: 1776287 - RNA, 19 nt, Artificial Sequence
  Description of Artificial Sequence: Synthetic oligonucleotide
  Sense strand starting at position 3385 of SEQ ID NO: 1562836
gguaaauucucacuaugac

SEQ ID NO: 1776288 - RNA, 19 nt, Artificial Sequence
  Description of Artificial Sequence: Synthetic oligonucleotide
  Antisense strand to SEQ ID NO: 1776287
gucauagugagaauuuacc

SEQ ID NO: 1776289 - RNA, 19 nt, Artificial Sequence
  Description of Artificial Sequence: Synthetic oligonucleotide
  Sense strand starting at position 3499 of SEQ ID NO: 1562836
caaaguggccuuggguauu

SEQ ID NO: 1776290 - RNA, 19 nt, Artificial Sequence
  Description of Artificial Sequence: Synthetic oligonucleotide
  Antisense strand to SEQ ID NO: 1776289
aauacccaaggccacuuug

SEQ ID NO: 1776291 - RNA, 19 nt, Artificial Sequence
  Description of Artificial Sequence: Synthetic oligonucleotide
  Sense strand starting at position 3585 of SEQ ID NO: 1562836
gugggcucuuagucacaca

SEQ ID NO: 1776292 - RNA, 19 nt, Artificial Sequence
  Description of Artificial Sequence: Synthetic oligonucleotide
  Antisense strand to SEQ ID NO: 1776291
ugugugacuaagagcccac

SEQ ID NO: 1776293 - RNA, 19 nt, Artificial Sequence
  Description of Artificial Sequence: Synthetic oligonucleotide
  Sense strand starting at position 3690 of SEQ ID NO: 1562836
ggguaagcuagaugagaua

SEQ ID NO: 1776294 - RNA, 19 nt, Artificial Sequence
  Description of Artificial Sequence: Synthetic oligonucleotide
  Antisense strand to SEQ ID NO: 1776293
uaucucaucuagcuuaccc

SEQ ID NO: 1776295 - RNA, 19 nt, Artificial Sequence
  Description of Artificial Sequence: Synthetic oligonucleotide
  Sense strand starting at position 3785 of SEQ ID NO: 1562836
cgguaucccaggugacuaa

SEQ ID NO: 1776296 - RNA, 19 nt, Artificial Sequence
  Description of Artificial Sequence: Synthetic oligonucleotide
  Antisense strand to SEQ ID NO: 1776295
uuagucaccugggauaccg

SEQ ID NO: 1776297 - RNA, 19 nt, Artificial Sequence
  Description of Artificial Sequence: Synthetic oligonucleotide
  Sense strand starting at position 295 of SEQ ID NO: 1562837
agggaaaucccucggacau

SEQ ID NO: 1776298 - RNA, 19 nt, Artificial Sequence
  Description of Artificial Sequence: Synthetic oligonucleotide
  Antisense strand to SEQ ID NO: 1776297
auguccgagggauuucccu

SEQ ID NO: 1776299 - RNA, 19 nt, Artificial Sequence
  Description of Artificial Sequence: Synthetic oligonucleotide
  Sense strand starting at position 296 of SEQ ID NO: 1562837
gggaaaucccucggacauc

SEQ ID NO: 1776300 - RNA, 19 nt, Artificial Sequence
  Description of Artificial Sequence: Synthetic oligonucleotide
  Antisense strand to SEQ ID NO: 1776299
gauguccgagggauuuccc

SEQ ID NO: 1776301 - RNA, 19 nt, Artificial Sequence
  Description of Artificial Sequence: Synthetic oligonucleotide
  Sense strand starting at position 394 of SEQ ID NO: 1562837
ggaggaggucccugagguu

SEQ ID NO: 1776302 - RNA, 19 nt, Artificial Sequence
  Description of Artificial Sequence: Synthetic oligonucleotide
  Antisense strand to SEQ ID NO: 1776301
aaccucagggaccuccucc

SEQ ID NO: 1776303 - RNA, 19 nt, Artificial Sequence
  Description of Artificial Sequence: Synthetic oligonucleotide
  Sense strand starting at position 989 of SEQ ID NO: 1562837
cacagcugugcugaaugua

SEQ ID NO: 1776304 - RNA, 19 nt, Artificial Sequence
  Description of Artificial Sequence: Synthetic oligonucleotide
  Antisense strand to SEQ ID NO: 1776303
uacauucagcacagcugug

SEQ ID NO: 1776305 - RNA, 19 nt, Artificial Sequence
  Description of Artificial Sequence: Synthetic oligonucleotide
  Sense strand starting at position 1020 of SEQ ID NO: 1562837
accaguucuuuaucuggaa

SEQ ID NO: 1776306 - RNA, 19 nt, Artificial Sequence
  Description of Artificial Sequence: Synthetic oligonucleotide
  Antisense strand to SEQ ID NO: 1776305
uuccagauaaagaacuggu

SEQ ID NO: 1776307 - RNA, 19 nt, Artificial Sequence
  Description of Artificial Sequence: Synthetic oligonucleotide
  Sense strand starting at position 1021 of SEQ ID NO: 1562837
ccaguucuuuaucuggaau

SEQ ID NO: 1776308 - RNA, 19 nt, Artificial Sequence
  Description of Artificial Sequence: Synthetic oligonucleotide
  Antisense strand to SEQ ID NO: 1776307
auuccagauaaagaacugg

SEQ ID NO: 1776309 - RNA, 19 nt, Artificial Sequence
  Description of Artificial Sequence: Synthetic oligonucleotide
  Sense strand starting at position 1076 of SEQ ID NO: 1562837
ucaauaaguuguuuccaag

SEQ ID NO: 1776310 - RNA, 19 nt, Artificial Sequence
  Description of Artificial Sequence: Synthetic oligonucleotide
  Antisense strand to SEQ ID NO: 1776309
cuuggaaacaacuuauuga

SEQ ID NO: 1776311 - RNA, 19 nt, Artificial Sequence
  Description of Artificial Sequence: Synthetic oligonucleotide
  Sense strand starting at position 1082 of SEQ ID NO: 1562837
aguuguuuccaagaaauau

SEQ ID NO: 1776312 - RNA, 19 nt, Artificial Sequence
  Description of Artificial Sequence: Synthetic oligonucleotide
  Antisense strand to SEQ ID NO: 1776311
auauuucuuggaaacaacu

SEQ ID NO: 1776313 - RNA, 19 nt, Artificial Sequence
  Description of Artificial Sequence: Synthetic oligonucleotide
  Sense strand starting at position 1219 of SEQ ID NO: 1562837
cuggguucagggugagauu

SEQ ID NO: 1776314 - RNA, 19 nt, Artificial Sequence
  Description of Artificial Sequence: Synthetic oligonucleotide
  Antisense strand to SEQ ID NO: 1776313
aaucucacccugaacccag

SEQ ID NO: 1776315 - RNA, 19 nt, Artificial Sequence
  Description of Artificial Sequence: Synthetic oligonucleotide
  Sense strand starting at position 1333 of SEQ ID NO: 1562837
gggacucaagcacguuaaa

SEQ ID NO: 1776316 - RNA, 19 nt, Artificial Sequence
  Description of Artificial Sequence: Synthetic oligonucleotide
  Antisense strand to SEQ ID NO: 1776315
uuuaacgugcuugaguccc

SEQ ID NO: 1776317 - RNA, 19 nt, Artificial Sequence
  Description of Artificial Sequence: Synthetic oligonucleotide
  Sense strand starting at position 1344 of SEQ ID NO: 1562837
acguuaaacugcuccaauu

SEQ ID NO: 1776318 - RNA, 19 nt, Artificial Sequence
  Description of Artificial Sequence: Synthetic oligonucleotide
  Antisense strand to SEQ ID NO: 1776317
aauuggagcaguuuaacgu

SEQ ID NO: 1776319 - RNA, 19 nt, Artificial Sequence
  Description of Artificial Sequence: Synthetic oligonucleotide
  Sense strand starting at position 1357 of SEQ ID NO: 1562837
ccaauugguagcuaaacga

SEQ ID NO: 1776320 - RNA, 19 nt, Artificial Sequence
  Description of Artificial Sequence: Synthetic oligonucleotide
  Antisense strand to SEQ ID NO: 1776319
ucguuuagcuaccaauugg

SEQ ID NO: 1776321 - RNA, 19 nt, Artificial Sequence
  Description of Artificial Sequence: Synthetic oligonucleotide
  Sense strand starting at position 1406 of SEQ ID NO: 1562837
cuuaaugucugagcacuua

SEQ ID NO: 1776322 - RNA, 19 nt, Artificial Sequence
  Description of Artificial Sequence: Synthetic oligonucleotide
  Antisense strand to SEQ ID NO: 1776321
uaagugcucagacauuaag

SEQ ID NO: 1776323 - RNA, 19 nt, Artificial Sequence
  Description of Artificial Sequence: Synthetic oligonucleotide
  Sense strand starting at position 1471 of SEQ ID NO: 1562837
gacuuccagcaagaaguau

SEQ ID NO: 1776324 - RNA, 19 nt, Artificial Sequence
  Description of Artificial Sequence: Synthetic oligonucleotide
  Antisense strand to SEQ ID NO: 1776323
auacuucuugcuggaaguc

SEQ ID NO: 1776325 - RNA, 19 nt, Artificial Sequence
  Description of Artificial Sequence: Synthetic oligonucleotide
  Sense strand starting at position 1539 of SEQ ID NO: 1562837
gagagcugcuuccugaaua

SEQ ID NO: 1776326 - RNA, 19 nt, Artificial Sequence
  Description of Artificial Sequence: Synthetic oligonucleotide
  Antisense strand to SEQ ID NO: 1776325
uauucaggaagcagcucuc

SEQ ID NO: 1776327 - RNA, 19 nt, Artificial Sequence
  Description of Artificial Sequence: Synthetic oligonucleotide
  Sense strand starting at position 1576 of SEQ ID NO: 1562837
ggguggaucguagaaaugu

SEQ ID NO: 1776328 - RNA, 19 nt, Artificial Sequence
  Description of Artificial Sequence: Synthetic oligonucleotide
  Antisense strand to SEQ ID NO: 1776327
acauuucuacgauccaccc

SEQ ID NO: 1776329 - RNA, 19 nt, Artificial Sequence
  Description of Artificial Sequence: Synthetic oligonucleotide
  Sense strand starting at position 1577 of SEQ ID NO: 1562837
gguggaucguagaaauguu

SEQ ID NO: 1776330 - RNA, 19 nt, Artificial Sequence
  Description of Artificial Sequence: Synthetic oligonucleotide
  Antisense strand to SEQ ID NO: 1776329
aacauuucuacgauccacc

SEQ ID NO: 1776331 - RNA, 19 nt, Artificial Sequence
  Description of Artificial Sequence: Synthetic oligonucleotide
  Sense strand starting at position 1584 of SEQ ID NO: 1562837
cguagaaauguuucguguu

SEQ ID NO: 1776332 - RNA, 19 nt, Artificial Sequence
  Description of Artificial Sequence: Synthetic oligonucleotide
  Antisense strand to SEQ ID NO: 1776331
aacacgaaacauuucuacg

SEQ ID NO: 1776333 - RNA, 19 nt, Artificial Sequence
  Description of Artificial Sequence: Synthetic oligonucleotide
  Sense strand starting at position 1701 of SEQ ID NO: 1562837
aaagaagcgucccuaagaa

SEQ ID NO: 1776334 - RNA, 19 nt, Artificial Sequence
  Description of Artificial Sequence: Synthetic oligonucleotide
  Antisense strand to SEQ ID NO: 1776333
uucuuagggacgcuucuuu

SEQ ID NO: 1776335 - RNA, 19 nt, Artificial Sequence
  Description of Artificial Sequence: Synthetic oligonucleotide
  Sense strand starting at position 1756 of SEQ ID NO: 1562837
guuucugaaacguaacugu

SEQ ID NO: 1776336 - RNA, 19 nt, Artificial Sequence
  Description of Artificial Sequence: Synthetic oligonucleotide
  Antisense strand to SEQ ID NO: 1776335
acaguuacguuucagaaac

SEQ ID NO: 1776337 - RNA, 19 nt, Artificial Sequence
  Description of Artificial Sequence: Synthetic oligonucleotide
  Sense strand starting at position 1759 of SEQ ID NO: 1562837
ucugaaacguaacuguuua

SEQ ID NO: 1776338 - RNA, 19 nt, Artificial Sequence
  Description of Artificial Sequence: Synthetic oligonucleotide
  Antisense strand to SEQ ID NO: 1776337
uaaacaguuacguuucaga

SEQ ID NO: 1776339 - RNA, 19 nt, Artificial Sequence
  Description of Artificial Sequence: Synthetic oligonucleotide
  Sense strand starting at position 1777 of SEQ ID NO: 1562837
acucgaaggucuucuacau

SEQ ID NO: 1776340 - RNA, 19 nt, Artificial Sequence
  Description of Artificial Sequence: Synthetic oligonucleotide
  Antisense strand to SEQ ID NO: 1776339
auguagaagaccuucgagu

SEQ ID NO: 1776341 - RNA, 19 nt, Artificial Sequence
  Description of Artificial Sequence: Synthetic oligonucleotide
  Sense strand starting at position 2055 of SEQ ID NO: 1562837
guucuuugugcacauugua

SEQ ID NO: 1776342 - RNA, 19 nt, Artificial Sequence
  Description of Artificial Sequence: Synthetic oligonucleotide
  Antisense strand to SEQ ID NO: 1776341
uacaaugugcacaaagaac

SEQ ID NO: 1776343 - RNA, 19 nt, Artificial Sequence
  Description of Artificial Sequence: Synthetic oligonucleotide
  Sense strand starting at position 2137 of SEQ ID NO: 1562837
ugagcaaagucaucagguu

SEQ ID NO: 1776344 - RNA, 19 nt, Artificial Sequence
  Description of Artificial Sequence: Synthetic oligonucleotide
  Antisense strand to SEQ ID NO: 1776343
aaccugaugacuuugcuca

SEQ ID NO: 1776345 - RNA, 19 nt, Artificial Sequence
  Description of Artificial Sequence: Synthetic oligonucleotide
  Sense strand starting at position 2138 of SEQ ID NO: 1562837
gagcaaagucaucagguuc

SEQ ID NO: 1776346 - RNA, 19 nt, Artificial Sequence
  Description of Artificial Sequence: Synthetic oligonucleotide
  Antisense strand to SEQ ID NO: 1776345
gaaccugaugacuuugcuc

SEQ ID NO: 1776347 - RNA, 19 nt, Artificial Sequence
  Description of Artificial Sequence: Synthetic oligonucleotide
  Sense strand starting at position 2163 of SEQ ID NO: 1562837
augggauguucuguugucu

SEQ ID NO: 1776348 - RNA, 19 nt, Artificial Sequence
  Description of Artificial Sequence: Synthetic oligonucleotide
  Antisense strand to SEQ ID NO: 1776347
agacaacagaacaucccau

SEQ ID NO: 1776349 - RNA, 19 nt, Artificial Sequence
  Description of Artificial Sequence: Synthetic oligonucleotide
  Sense strand starting at position 2322 of SEQ ID NO: 1562837
agugucaaguacgcauaaa

SEQ ID NO: 1776350 - RNA, 19 nt, Artificial Sequence
  Description of Artificial Sequence: Synthetic oligonucleotide
  Antisense strand to SEQ ID NO: 1776349
uuuaugcguacuugacacu

SEQ ID NO: 1776351 - RNA, 19 nt, Artificial Sequence
  Description of Artificial Sequence: Synthetic oligonucleotide
  Sense strand starting at position 2323 of SEQ ID NO: 1562837
gugucaaguacgcauaaau

SEQ ID NO: 1776352 - RNA, 19 nt, Artificial Sequence
  Description of Artificial Sequence: Synthetic oligonucleotide
  Antisense strand to SEQ ID NO: 1776351
auuuaugcguacuugacac

SEQ ID NO: 1776353 - RNA, 19 nt, Artificial Sequence
  Description of Artificial Sequence: Synthetic oligonucleotide
  Sense strand starting at position 2468 of SEQ ID NO: 1562837
gccaauguucuguugucuu

SEQ ID NO: 1776354 - RNA, 19 nt, Artificial Sequence
  Description of Artificial Sequence: Synthetic oligonucleotide
  Antisense strand to SEQ ID NO: 1776353
aagacaacagaacauuggc

SEQ ID NO: 1776355 - RNA, 19 nt, Artificial Sequence
  Description of Artificial Sequence: Synthetic oligonucleotide
  Sense strand starting at position 2497 of SEQ ID NO: 1562837
aagcaaggaugagaaauaa

SEQ ID NO: 1776356 - RNA, 19 nt, Artificial Sequence
  Description of Artificial Sequence: Synthetic oligonucleotide
  Antisense strand to SEQ ID NO: 1776355
uuauuucucauccuugcuu

SEQ ID NO: 1776357 - RNA, 19 nt, Artificial Sequence
  Description of Artificial Sequence: Synthetic oligonucleotide
  Sense strand starting at position 2595 of SEQ ID NO: 1562837
agcgauaaacgggauuagu

SEQ ID NO: 1776358 - RNA, 19 nt, Artificial Sequence
  Description of Artificial Sequence: Synthetic oligonucleotide
  Antisense strand to SEQ ID NO: 1776357
acuaaucccguuuaucgcu

SEQ ID NO: 1776359 - RNA, 19 nt, Artificial Sequence
  Description of Artificial Sequence: Synthetic oligonucleotide
  Sense strand starting at position 2808 of SEQ ID NO: 1562837
caaguuucuguuggcaaca

SEQ ID NO: 1776360 - RNA, 19 nt, Artificial Sequence
  Description of Artificial Sequence: Synthetic oligonucleotide
  Antisense strand to SEQ ID NO: 1776359
uguugccaacagaaacuug

SEQ ID NO: 1776361 - RNA, 19 nt, Artificial Sequence
  Description of Artificial Sequence: Synthetic oligonucleotide
  Sense strand starting at position 2976 of SEQ ID NO: 1562837
ccuauaggcuguuuacauu

SEQ ID NO: 1776362 - RNA, 19 nt, Artificial Sequence
  Description of Artificial Sequence: Synthetic oligonucleotide
  Antisense strand to SEQ ID NO: 1776361
aauguaaacagccuauagg

SEQ ID NO: 1776363 - RNA, 19 nt, Artificial Sequence
  Description of Artificial Sequence: Synthetic oligonucleotide
  Sense strand starting at position 3024 of SEQ ID NO: 1562837
acaaauuaguguguuauac

SEQ ID NO: 1776364 - RNA, 19 nt, Artificial Sequence
  Description of Artificial Sequence: Synthetic oligonucleotide
  Antisense strand to SEQ ID NO: 1776363
guauaacacacuaauuugu

SEQ ID NO: 1776365 - RNA, 19 nt, Artificial Sequence
  Description of Artificial Sequence: Synthetic oligonucleotide
  Sense strand starting at position 3033 of SEQ ID NO: 1562837
uguguuauacagugauaug

SEQ ID NO: 1776366 - RNA, 19 nt, Artificial Sequence
  Description of Artificial Sequence: Synthetic oligonucleotide
  Antisense strand to SEQ ID NO: 1776365
cauaucacuguauaacaca

SEQ ID NO: 1776367 - RNA, 19 nt, Artificial Sequence
  Description of Artificial Sequence: Synthetic oligonucleotide
  Sense strand starting at position 3034 of SEQ ID NO: 1562837
guguuauacagugauaugg

SEQ ID NO: 1776368 - RNA, 19 nt, Artificial Sequence
  Description of Artificial Sequence: Synthetic oligonucleotide
  Antisense strand to SEQ ID NO: 1776367
ccauaucacuguauaacac

SEQ ID NO: 1776369 - RNA, 19 nt, Artificial Sequence
  Description of Artificial Sequence: Synthetic oligonucleotide
  Sense strand starting at position 3198 of SEQ ID NO: 1562837
augagaucugauggucuuu

SEQ ID NO: 1776370 - RNA, 19 nt, Artificial Sequence
  Description of Artificial Sequence: Synthetic oligonucleotide
  Antisense strand to SEQ ID NO: 1776369
aaagaccaucagaucucau

SEQ ID NO: 1776371 - RNA, 19 nt, Artificial Sequence
  Description of Artificial Sequence: Synthetic oligonucleotide
  Sense strand starting at position 3455 of SEQ ID NO: 1562837
gauuuccucuaugagggaa

SEQ ID NO: 1776372 - RNA, 19 nt, Artificial Sequence
  Description of Artificial Sequence: Synthetic oligonucleotide
  Antisense strand to SEQ ID NO: 1776371
uucccucauagaggaaauc

SEQ ID NO: 1776373 - RNA, 19 nt, Artificial Sequence
  Description of Artificial Sequence: Synthetic oligonucleotide
  Sense strand starting at position 3867 of SEQ ID NO: 1562837
cugaguucugucugagcag

SEQ ID NO: 1776374 - RNA, 19 nt, Artificial Sequence
  Description of Artificial Sequence: Synthetic oligonucleotide
  Antisense strand to SEQ ID NO: 1776373
cugcucagacagaacucag

SEQ ID NO: 1776375 - RNA, 19 nt, Artificial Sequence
  Description of Artificial Sequence: Synthetic oligonucleotide
  Sense strand starting at position 3870 of SEQ ID NO: 1562837
aguucugucugagcaguga

SEQ ID NO: 1776376 - RNA, 19 nt, Artificial Sequence
  Description of Artificial Sequence: Synthetic oligonucleotide
  Antisense strand to SEQ ID NO: 1776375
ucacugcucagacagaacu

SEQ ID NO: 1776377 - RNA, 19 nt, Artificial Sequence
  Description of Artificial Sequence: Synthetic oligonucleotide
  Sense strand starting at position 59 of SEQ ID NO: 1562838
cacgcuguuaucuggagga

SEQ ID NO: 1776378 - RNA, 19 nt, Artificial Sequence
  Description of Artificial Sequence: Synthetic oligonucleotide
  Antisense strand to SEQ ID NO: 1776377
uccuccagauaacagcgug

SEQ ID NO: 1776379 - RNA, 19 nt, Artificial Sequence
  Description of Artificial Sequence: Synthetic oligonucleotide
  Sense strand starting at position 61 of SEQ ID NO: 1562838
cgcuguuaucuggaggaga

SEQ ID NO: 1776380 - RNA, 19 nt, Artificial Sequence
  Description of Artificial Sequence: Synthetic oligonucleotide
  Antisense strand to SEQ ID NO: 1776379
ucuccuccagauaacagcg

SEQ ID NO: 1776381 - RNA, 19 nt, Artificial Sequence
  Description of Artificial Sequence: Synthetic oligonucleotide
  Sense strand starting at position 62 of SEQ ID NO: 1562838
gcuguuaucuggaggagag

SEQ ID NO: 1776382 - RNA, 19 nt, Artificial Sequence
  Description of Artificial Sequence: Synthetic oligonucleotide
  Antisense strand to SEQ ID NO: 1776381
cucuccuccagauaacagc

SEQ ID NO: 1776383 - RNA, 19 nt, Artificial Sequence
  Description of Artificial Sequence: Synthetic oligonucleotide
  Sense strand starting at position 63 of SEQ ID NO: 1562838
cuguuaucuggaggagaga

SEQ ID NO: 1776384 - RNA, 19 nt, Artificial Sequence
  Description of Artificial Sequence: Synthetic oligonucleotide
  Antisense strand to SEQ ID NO: 1776383
ucucuccuccagauaacag

SEQ ID NO: 1776385 - RNA, 19 nt, Artificial Sequence
  Description of Artificial Sequence: Synthetic oligonucleotide
  Sense strand starting at position 156 of SEQ ID NO: 1562838
gugcgugcagucuuccaga

SEQ ID NO: 1776386 - RNA, 19 nt, Artificial Sequence
  Description of Artificial Sequence: Synthetic oligonucleotide
  Antisense strand to SEQ ID NO: 1776385
ucuggaagacugcacgcac

SEQ ID NO: 1776387 - RNA, 19 nt, Artificial Sequence
  Description of Artificial Sequence: Synthetic oligonucleotide
  Sense strand starting at position 242 of SEQ ID NO: 1562838
auuuccagaucuggaagaa

SEQ ID NO: 1776388 - RNA, 19 nt, Artificial Sequence
  Description of Artificial Sequence: Synthetic oligonucleotide
  Antisense strand to SEQ ID NO: 1776387
uucuuccagaucuggaaau

SEQ ID NO: 1776389 - RNA, 19 nt, Artificial Sequence
  Description of Artificial Sequence: Synthetic oligonucleotide
  Sense strand starting at position 421 of SEQ ID NO: 1562838
gucaguaucaaaggucacu

SEQ ID NO: 1776390 - RNA, 19 nt, Artificial Sequence
  Description of Artificial Sequence: Synthetic oligonucleotide
  Antisense strand to SEQ ID NO: 1776389
agugaccuuugauacugac

SEQ ID NO: 1776391 - RNA, 19 nt, Artificial Sequence
  Description of Artificial Sequence: Synthetic oligonucleotide
  Sense strand starting at position 872 of SEQ ID NO: 1562838
agggaaaucccucggacau

SEQ ID NO: 1776392 - RNA, 19 nt, Artificial Sequence
  Description of Artificial Sequence: Synthetic oligonucleotide
  Antisense strand to SEQ ID NO: 1776391
auguccgagggauuucccu

SEQ ID NO: 1776393 - RNA, 19 nt, Artificial Sequence
  Description of Artificial Sequence: Synthetic oligonucleotide
  Sense strand starting at position 873 of SEQ ID NO: 1562838
gggaaaucccucggacauc

SEQ ID NO: 1776394 - RNA, 19 nt, Artificial Sequence
  Description of Artificial Sequence: Synthetic oligonucleotide
  Antisense strand to SEQ ID NO: 1776393
gauguccgagggauuuccc

SEQ ID NO: 1776395 - RNA, 19 nt, Artificial Sequence
  Description of Artificial Sequence: Synthetic oligonucleotide
  Sense strand starting at position 971 of SEQ ID NO: 1562838
ggaggaggucccugagguu

SEQ ID NO: 1776396 - RNA, 19 nt, Artificial Sequence
  Description of Artificial Sequence: Synthetic oligonucleotide
  Antisense strand to SEQ ID NO: 1776395
aaccucagggaccuccucc

SEQ ID NO: 1776397 - RNA, 19 nt, Artificial Sequence
  Description of Artificial Sequence: Synthetic oligonucleotide
  Sense strand starting at position 1566 of SEQ ID NO: 1562838
cacagcugugcugaaugua

SEQ ID NO: 1776398 - RNA, 19 nt, Artificial Sequence
  Description of Artificial Sequence: Synthetic oligonucleotide
  Antisense strand to SEQ ID NO: 1776397
uacauucagcacagcugug

SEQ ID NO: 1776399 - RNA, 19 nt, Artificial Sequence
  Description of Artificial Sequence: Synthetic oligonucleotide
  Sense strand starting at position 1597 of SEQ ID NO: 1562838
accaguucuuuaucuggaa

SEQ ID NO: 1776400 - RNA, 19 nt, Artificial Sequence
  Description of Artificial Sequence: Synthetic oligonucleotide
  Antisense strand to SEQ ID NO: 1776399
uuccagauaaagaacuggu

SEQ ID NO: 1776401 - RNA, 19 nt, Artificial Sequence
  Description of Artificial Sequence: Synthetic oligonucleotide
  Sense strand starting at position 1598 of SEQ ID NO: 1562838
ccaguucuuuaucuggaau

SEQ ID NO: 1776402 - RNA, 19 nt, Artificial Sequence
  Description of Artificial Sequence: Synthetic oligonucleotide
  Antisense strand to SEQ ID NO: 1776401
auuccagauaaagaacugg

SEQ ID NO: 1776403 - RNA, 19 nt, Artificial Sequence
  Description of Artificial Sequence: Synthetic oligonucleotide
  Sense strand starting at position 1653 of SEQ ID NO: 1562838
ucaauaaguuguuuccaag

SEQ ID NO: 1776404 - RNA, 19 nt, Artificial Sequence
  Description of Artificial Sequence: Synthetic oligonucleotide
  Antisense strand to SEQ ID NO: 1776403
cuuggaaacaacuuauuga

SEQ ID NO: 1776405 - RNA, 19 nt, Artificial Sequence
  Description of Artificial Sequence: Synthetic oligonucleotide
  Sense strand starting at position 1659 of SEQ ID NO: 1562838
aguuguuuccaagaaauau

SEQ ID NO: 1776406 - RNA, 19 nt, Artificial Sequence
  Description of Artificial Sequence: Synthetic oligonucleotide
  Antisense strand to SEQ ID NO: 1776405
auauuucuuggaaacaacu

SEQ ID NO: 1776407 - RNA, 19 nt, Artificial Sequence
  Description of Artificial Sequence: Synthetic oligonucleotide
  Sense strand starting at position 1796 of SEQ ID NO: 1562838
cuggguucagggugagauu

SEQ ID NO: 1776408 - RNA, 19 nt, Artificial Sequence
  Description of Artificial Sequence: Synthetic oligonucleotide
  Antisense strand to SEQ ID NO: 1776407
aaucucacccugaacccag

SEQ ID NO: 1776409 - RNA, 19 nt, Artificial Sequence
  Description of Artificial Sequence: Synthetic oligonucleotide
  Sense strand starting at position 1910 of SEQ ID NO: 1562838
gggacucaagcacguuaaa

SEQ ID NO: 1776410 - RNA, 19 nt, Artificial Sequence
  Description of Artificial Sequence: Synthetic oligonucleotide
  Antisense strand to SEQ ID NO: 1776409
uuuaacgugcuugaguccc

SEQ ID NO: 1776411 - RNA, 19 nt, Artificial Sequence
  Description of Artificial Sequence: Synthetic oligonucleotide
  Sense strand starting at position 1934 of SEQ ID NO: 1562838
ccaauugguagcuaaacga

SEQ ID NO: 1776412 - RNA, 19 nt, Artificial Sequence
  Description of Artificial Sequence: Synthetic oligonucleotide
  Antisense strand to SEQ ID NO: 1776411
ucguuuagcuaccaauugg

SEQ ID NO: 1776413 - RNA, 19 nt, Artificial Sequence
  Description of Artificial Sequence: Synthetic oligonucleotide
  Sense strand starting at position 1983 of SEQ ID NO: 1562838
cuuaaugucugagcacuua

SEQ ID NO: 1776414 - RNA, 19 nt, Artificial Sequence
  Description of Artificial Sequence: Synthetic oligonucleotide
  Antisense strand to SEQ ID NO: 1776413
uaagugcucagacauuaag

SEQ ID NO: 1776415 - RNA, 19 nt, Artificial Sequence
  Description of Artificial Sequence: Synthetic oligonucleotide
  Sense strand starting at position 2048 of SEQ ID NO: 1562838
gacuuccagcaagaaguau

SEQ ID NO: 1776416 - RNA, 19 nt, Artificial Sequence
  Description of Artificial Sequence: Synthetic oligonucleotide
  Antisense strand to SEQ ID NO: 1776415
auacuucuugcuggaaguc

SEQ ID NO: 1776417 - RNA, 19 nt, Artificial Sequence
  Description of Artificial Sequence: Synthetic oligonucleotide
  Sense strand starting at position 2116 of SEQ ID NO: 1562838
gagagcugcuuccugaaua

SEQ ID NO: 1776418 - RNA, 19 nt, Artificial Sequence
  Description of Artificial Sequence: Synthetic oligonucleotide
  Antisense strand to SEQ ID NO: 1776417
uauucaggaagcagcucuc

SEQ ID NO: 1776419 - RNA, 19 nt, Artificial Sequence
  Description of Artificial Sequence: Synthetic oligonucleotide
  Sense strand starting at position 2153 of SEQ ID NO: 1562838
ggguggaucguagaaaugu

SEQ ID NO: 1776420 - RNA, 19 nt, Artificial Sequence
  Description of Artificial Sequence: Synthetic oligonucleotide
  Antisense strand to SEQ ID NO: 1776419
acauuucuacgauccaccc

SEQ ID NO: 1776421 - RNA, 19 nt, Artificial Sequence
  Description of Artificial Sequence: Synthetic oligonucleotide
  Sense strand starting at position 2154 of SEQ ID NO: 1562838
gguggaucguagaaauguu

SEQ ID NO: 1776422 - RNA, 19 nt, Artificial Sequence
  Description of Artificial Sequence: Synthetic oligonucleotide
  Antisense strand to SEQ ID NO: 1776421
aacauuucuacgauccacc

SEQ ID NO: 1776423 - RNA, 19 nt, Artificial Sequence
  Description of Artificial Sequence: Synthetic oligonucleotide
  Sense strand starting at position 2161 of SEQ ID NO: 1562838
cguagaaauguuucguguu

SEQ ID NO: 1776424 - RNA, 19 nt, Artificial Sequence
  Description of Artificial Sequence: Synthetic oligonucleotide
  Antisense strand to SEQ ID NO: 1776423
aacacgaaacauuucuacg

SEQ ID NO: 1776425 - RNA, 19 nt, Artificial Sequence
  Description of Artificial Sequence: Synthetic oligonucleotide
  Sense strand starting at position 2278 of SEQ ID NO: 1562838
aaagaagcgucccuaagaa

SEQ ID NO: 1776426 - RNA, 19 nt, Artificial Sequence
  Description of Artificial Sequence: Synthetic oligonucleotide
  Antisense strand to SEQ ID NO: 1776425
uucuuagggacgcuucuuu

SEQ ID NO: 1776427 - RNA, 19 nt, Artificial Sequence
  Description of Artificial Sequence: Synthetic oligonucleotide
  Sense strand starting at position 2333 of SEQ ID NO: 1562838
guuucugaaacguaacugu

SEQ ID NO: 1776428 - RNA, 19 nt, Artificial Sequence
  Description of Artificial Sequence: Synthetic oligonucleotide
  Antisense strand to SEQ ID NO: 1776427
acaguuacguuucagaaac

SEQ ID NO: 1776429 - RNA, 19 nt, Artificial Sequence
  Description of Artificial Sequence: Synthetic oligonucleotide
  Sense strand starting at position 2336 of SEQ ID NO: 1562838
ucugaaacguaacuguuua

SEQ ID NO: 1776430 - RNA, 19 nt, Artificial Sequence
  Description of Artificial Sequence: Synthetic oligonucleotide
  Antisense strand to SEQ ID NO: 1776429
uaaacaguuacguuucaga

SEQ ID NO: 1776431 - RNA, 19 nt, Artificial Sequence
  Description of Artificial Sequence: Synthetic oligonucleotide
  Sense strand starting at position 2354 of SEQ ID NO: 1562838
acucgaaggucuucuacau

SEQ ID NO: 1776432 - RNA, 19 nt, Artificial Sequence
  Description of Artificial Sequence: Synthetic oligonucleotide
  Antisense strand to SEQ ID NO: 1776431
auguagaagaccuucgagu

SEQ ID NO: 1776433 - RNA, 19 nt, Artificial Sequence
  Description of Artificial Sequence: Synthetic oligonucleotide
  Sense strand starting at position 2714 of SEQ ID NO: 1562838
ugagcaaagucaucagguu

SEQ ID NO: 1776434 - RNA, 19 nt, Artificial Sequence
  Description of Artificial Sequence: Synthetic oligonucleotide
  Antisense strand to SEQ ID NO: 1776433
aaccugaugacuuugcuca

SEQ ID NO: 1776435 - RNA, 19 nt, Artificial Sequence
  Description of Artificial Sequence: Synthetic oligonucleotide
  Sense strand starting at position 2715 of SEQ ID NO: 1562838
gagcaaagucaucagguuc

SEQ ID NO: 1776436 - RNA, 19 nt, Artificial Sequence
  Description of Artificial Sequence: Synthetic oligonucleotide
  Antisense strand to SEQ ID NO: 1776435
gaaccugaugacuuugcuc

SEQ ID NO: 1776437 - RNA, 19 nt, Artificial Sequence
  Description of Artificial Sequence: Synthetic oligonucleotide
  Sense strand starting at position 2900 of SEQ ID NO: 1562838
gugucaaguacgcauaaau

SEQ ID NO: 1776438 - RNA, 19 nt, Artificial Sequence
  Description of Artificial Sequence: Synthetic oligonucleotide
  Antisense strand to SEQ ID NO: 1776437
auuuaugcguacuugacac

SEQ ID NO: 1776439 - RNA, 19 nt, Artificial Sequence
  Description of Artificial Sequence: Synthetic oligonucleotide
  Sense strand starting at position 3045 of SEQ ID NO: 1562838
gccaauguucuguugucuu

SEQ ID NO: 1776440 - RNA, 19 nt, Artificial Sequence
  Description of Artificial Sequence: Synthetic oligonucleotide
  Antisense strand to SEQ ID NO: 1776439
aagacaacagaacauuggc

SEQ ID NO: 1776441 - RNA, 19 nt, Artificial Sequence
  Description of Artificial Sequence: Synthetic oligonucleotide
  Sense strand starting at position 3074 of SEQ ID NO: 1562838
aagcaaggaugagaaauaa

SEQ ID NO: 1776442 - RNA, 19 nt, Artificial Sequence
  Description of Artificial Sequence: Synthetic oligonucleotide
  Antisense strand to SEQ ID NO: 1776441
uuauuucucauccuugcuu

SEQ ID NO: 1776443 - RNA, 19 nt, Artificial Sequence
  Description of Artificial Sequence: Synthetic oligonucleotide
  Sense strand starting at position 3172 of SEQ ID NO: 1562838
agcgauaaacgggauuagu

SEQ ID NO: 1776444 - RNA, 19 nt, Artificial Sequence
  Description of Artificial Sequence: Synthetic oligonucleotide
  Antisense strand to SEQ ID NO: 1776443
acuaaucccguuuaucgcu

SEQ ID NO: 1776445 - RNA, 19 nt, Artificial Sequence
  Description of Artificial Sequence: Synthetic oligonucleotide
  Sense strand starting at position 3385 of SEQ ID NO: 1562838
caaguuucuguuggcaaca

SEQ ID NO: 1776446 - RNA, 19 nt, Artificial Sequence
  Description of Artificial Sequence: Synthetic oligonucleotide
  Antisense strand to SEQ ID NO: 1776445
uguugccaacagaaacuug

SEQ ID NO: 1776447 - RNA, 19 nt, Artificial Sequence
  Description of Artificial Sequence: Synthetic oligonucleotide
  Sense strand starting at position 3553 of SEQ ID NO: 1562838
ccuauaggcuguuuacauu

SEQ ID NO: 1776448 - RNA, 19 nt, Artificial Sequence
  Description of Artificial Sequence: Synthetic oligonucleotide
  Antisense strand to SEQ ID NO: 1776447
aauguaaacagccuauagg

SEQ ID NO: 1776449 - RNA, 19 nt, Artificial Sequence
  Description of Artificial Sequence: Synthetic oligonucleotide
  Sense strand starting at position 3601 of SEQ ID NO: 1562838
acaaauuaguguguuauac

SEQ ID NO: 1776450 - RNA, 19 nt, Artificial Sequence
  Description of Artificial Sequence: Synthetic oligonucleotide
  Antisense strand to SEQ ID NO: 1776449
guauaacacacuaauuugu

SEQ ID NO: 1776451 - RNA, 19 nt, Artificial Sequence
  Description of Artificial Sequence: Synthetic oligonucleotide
  Sense strand starting at position 3610 of SEQ ID NO: 1562838
uguguuauacagugauaug

SEQ ID NO: 1776452 - RNA, 19 nt, Artificial Sequence
  Description of Artificial Sequence: Synthetic oligonucleotide
  Antisense strand to SEQ ID NO: 1776451
cauaucacuguauaacaca

SEQ ID NO: 1776453 - RNA, 19 nt, Artificial Sequence
  Description of Artificial Sequence: Synthetic oligonucleotide
  Sense strand starting at position 3611 of SEQ ID NO: 1562838
guguuauacagugauaugg

SEQ ID NO: 1776454 - RNA, 19 nt, Artificial Sequence
  Description of Artificial Sequence: Synthetic oligonucleotide
  Antisense strand to SEQ ID NO: 1776453
ccauaucacuguauaacac

SEQ ID NO: 1776455 - RNA, 19 nt, Artificial Sequence
  Description of Artificial Sequence: Synthetic oligonucleotide
  Sense strand starting at position 3775 of SEQ ID NO: 1562838
augagaucugauggucuuu

SEQ ID NO: 1776456 - RNA, 19 nt, Artificial Sequence
  Description of Artificial Sequence: Synthetic oligonucleotide
  Antisense strand to SEQ ID NO: 1776455
aaagaccaucagaucucau

SEQ ID NO: 1776457 - RNA, 19 nt, Artificial Sequence
  Description of Artificial Sequence: Synthetic oligonucleotide
  Sense strand starting at position 28 of SEQ ID NO: 1562839
gcgaaaggcugggcucauu

SEQ ID NO: 1776458 - RNA, 19 nt, Artificial Sequence
  Description of Artificial Sequence: Synthetic oligonucleotide
  Antisense strand to SEQ ID NO: 1776457
aaugagcccagccuuucgc

SEQ ID NO: 1776459 - RNA, 19 nt, Artificial Sequence
  Description of Artificial Sequence: Synthetic oligonucleotide
  Sense strand starting at position 74 of SEQ ID NO: 1562839
guuggucuaguggguauaa

SEQ ID NO: 1776460 - RNA, 19 nt, Artificial Sequence
  Description of Artificial Sequence: Synthetic oligonucleotide
  Antisense strand to SEQ ID NO: 1776459
uuauacccacuagaccaac

SEQ ID NO: 1776461 - RNA, 19 nt, Artificial Sequence
  Description of Artificial Sequence: Synthetic oligonucleotide
  Sense strand starting at position 75 of SEQ ID NO: 1562839
uuggucuaguggguauaau

SEQ ID NO: 1776462 - RNA, 19 nt, Artificial Sequence
  Description of Artificial Sequence: Synthetic oligonucleotide
  Antisense strand to SEQ ID NO: 1776461
auuauacccacuagaccaa

SEQ ID NO: 1776463 - RNA, 19 nt, Artificial Sequence
  Description of Artificial Sequence: Synthetic oligonucleotide
  Sense strand starting at position 76 of SEQ ID NO: 1562839
uggucuaguggguauaauu

SEQ ID NO: 1776464 - RNA, 19 nt, Artificial Sequence
  Description of Artificial Sequence: Synthetic oligonucleotide
  Antisense strand to SEQ ID NO: 1776463
aauuauacccacuagacca

SEQ ID NO: 1776465 - RNA, 19 nt, Artificial Sequence
  Description of Artificial Sequence: Synthetic oligonucleotide
  Sense strand starting at position 239 of SEQ ID NO: 1562839
agggauaucuucucccuca

SEQ ID NO: 1776466 - RNA, 19 nt, Artificial Sequence
  Description of Artificial Sequence: Synthetic oligonucleotide
  Antisense strand to SEQ ID NO: 1776465
ugagggagaagauaucccu

SEQ ID NO: 1776467 - RNA, 19 nt, Artificial Sequence
  Description of Artificial Sequence: Synthetic oligonucleotide
  Sense strand starting at position 240 of SEQ ID NO: 1562839
gggauaucuucucccucaa

SEQ ID NO: 1776468 - RNA, 19 nt, Artificial Sequence
  Description of Artificial Sequence: Synthetic oligonucleotide
  Antisense strand to SEQ ID NO: 1776467
uugagggagaagauauccc

SEQ ID NO: 1776469 - RNA, 19 nt, Artificial Sequence
  Description of Artificial Sequence: Synthetic oligonucleotide
  Sense strand starting at position 314 of SEQ ID NO: 1562839
guagcuucgucccauccau

SEQ ID NO: 1776470 - RNA, 19 nt, Artificial Sequence
  Description of Artificial Sequence: Synthetic oligonucleotide
  Antisense strand to SEQ ID NO: 1776469
auggaugggacgaagcuac

SEQ ID NO: 1776471 - RNA, 19 nt, Artificial Sequence
  Description of Artificial Sequence: Synthetic oligonucleotide
  Sense strand starting at position 459 of SEQ ID NO: 1562839
cugcguguuugcagaguga

SEQ ID NO: 1776472 - RNA, 19 nt, Artificial Sequence
  Description of Artificial Sequence: Synthetic oligonucleotide
  Antisense strand to SEQ ID NO: 1776471
ucacucugcaaacacgcag

SEQ ID NO: 1776473 - RNA, 19 nt, Artificial Sequence
  Description of Artificial Sequence: Synthetic oligonucleotide
  Sense strand starting at position 461 of SEQ ID NO: 1562839
gcguguuugcagagugaca

SEQ ID NO: 1776474 - RNA, 19 nt, Artificial Sequence
  Description of Artificial Sequence: Synthetic oligonucleotide
  Antisense strand to SEQ ID NO: 1776473
ugucacucugcaaacacgc

SEQ ID NO: 1776475 - RNA, 19 nt, Artificial Sequence
  Description of Artificial Sequence: Synthetic oligonucleotide
  Sense strand starting at position 463 of SEQ ID NO: 1562839
guguuugcagagugacaga

SEQ ID NO: 1776476 - RNA, 19 nt, Artificial Sequence
  Description of Artificial Sequence: Synthetic oligonucleotide
  Antisense strand to SEQ ID NO: 1776475
ucugucacucugcaaacac

SEQ ID NO: 1776477 - RNA, 19 nt, Artificial Sequence
  Description of Artificial Sequence: Synthetic oligonucleotide
  Sense strand starting at position 563 of SEQ ID NO: 1562839
aggugacaguguuucuagu

SEQ ID NO: 1776478 - RNA, 19 nt, Artificial Sequence
  Description of Artificial Sequence: Synthetic oligonucleotide
  Antisense strand to SEQ ID NO: 1776477
acuagaaacacugucaccu

SEQ ID NO: 1776479 - RNA, 19 nt, Artificial Sequence
  Description of Artificial Sequence: Synthetic oligonucleotide
  Sense strand starting at position 565 of SEQ ID NO: 1562839
gugacaguguuucuaguga

SEQ ID NO: 1776480 - RNA, 19 nt, Artificial Sequence
  Description of Artificial Sequence: Synthetic oligonucleotide
  Antisense strand to SEQ ID NO: 1776479
ucacuagaaacacugucac

SEQ ID NO: 1776481 - RNA, 19 nt, Artificial Sequence
  Description of Artificial Sequence: Synthetic oligonucleotide
  Sense strand starting at position 569 of SEQ ID NO: 1562839
caguguuucuagugagccu

SEQ ID NO: 1776482 - RNA, 19 nt, Artificial Sequence
  Description of Artificial Sequence: Synthetic oligonucleotide
  Antisense strand to SEQ ID NO: 1776481
aggcucacuagaaacacug

SEQ ID NO: 1776483 - RNA, 19 nt, Artificial Sequence
  Description of Artificial Sequence: Synthetic oligonucleotide
  Sense strand starting at position 646 of SEQ ID NO: 1562839
cugcacucccauuagagau

SEQ ID NO: 1776484 - RNA, 19 nt, Artificial Sequence
  Description of Artificial Sequence: Synthetic oligonucleotide
  Antisense strand to SEQ ID NO: 1776483
aucucuaaugggagugcag

SEQ ID NO: 1776485 - RNA, 19 nt, Artificial Sequence
  Description of Artificial Sequence: Synthetic oligonucleotide
  Sense strand starting at position 661 of SEQ ID NO: 1562839
agauggagugggugagauu

SEQ ID NO: 1776486 - RNA, 19 nt, Artificial Sequence
  Description of Artificial Sequence: Synthetic oligonucleotide
  Antisense strand to SEQ ID NO: 1776485
aaucucacccacuccaucu

SEQ ID NO: 1776487 - RNA, 19 nt, Artificial Sequence
  Description of Artificial Sequence: Synthetic oligonucleotide
  Sense strand starting at position 670 of SEQ ID NO: 1562839
gggugagauucugaggcau

SEQ ID NO: 1776488 - RNA, 19 nt, Artificial Sequence
  Description of Artificial Sequence: Synthetic oligonucleotide
  Antisense strand to SEQ ID NO: 1776487
augccucagaaucucaccc

SEQ ID NO: 1776489 - RNA, 19 nt, Artificial Sequence
  Description of Artificial Sequence: Synthetic oligonucleotide
  Sense strand starting at position 674 of SEQ ID NO: 1562839
gagauucugaggcauggca

SEQ ID NO: 1776490 - RNA, 19 nt, Artificial Sequence
  Description of Artificial Sequence: Synthetic oligonucleotide
  Antisense strand to SEQ ID NO: 1776489
ugccaugccucagaaucuc

SEQ ID NO: 1776491 - RNA, 19 nt, Artificial Sequence
  Description of Artificial Sequence: Synthetic oligonucleotide
  Sense strand starting at position 984 of SEQ ID NO: 1562839
gagacuccugccugucaca

SEQ ID NO: 1776492 - RNA, 19 nt, Artificial Sequence
  Description of Artificial Sequence: Synthetic oligonucleotide
  Antisense strand to SEQ ID NO: 1776491
ugugacaggcaggagucuc

SEQ ID NO: 1776493 - RNA, 19 nt, Artificial Sequence
  Description of Artificial Sequence: Synthetic oligonucleotide
  Sense strand starting at position 1367 of SEQ ID NO: 1562839
gggacaucuccaggcuuag

SEQ ID NO: 1776494 - RNA, 19 nt, Artificial Sequence
  Description of Artificial Sequence: Synthetic oligonucleotide
  Antisense strand to SEQ ID NO: 1776493
cuaagccuggagauguccc

SEQ ID NO: 1776495 - RNA, 19 nt, Artificial Sequence
  Description of Artificial Sequence: Synthetic oligonucleotide
  Sense strand starting at position 1508 of SEQ ID NO: 1562839
ucggcuuugucccugcgau

SEQ ID NO: 1776496 - RNA, 19 nt, Artificial Sequence
  Description of Artificial Sequence: Synthetic oligonucleotide
  Antisense strand to SEQ ID NO: 1776495
aucgcagggacaaagccga

SEQ ID NO: 1776497 - RNA, 19 nt, Artificial Sequence
  Description of Artificial Sequence: Synthetic oligonucleotide
  Sense strand starting at position 1509 of SEQ ID NO: 1562839
cggcuuugucccugcgaug

SEQ ID NO: 1776498 - RNA, 19 nt, Artificial Sequence
  Description of Artificial Sequence: Synthetic oligonucleotide
  Antisense strand to SEQ ID NO: 1776497
caucgcagggacaaagccg

SEQ ID NO: 1776499 - RNA, 19 nt, Artificial Sequence
  Description of Artificial Sequence: Synthetic oligonucleotide
  Sense strand starting at position 1512 of SEQ ID NO: 1562839
cuuugucccugcgaugaau

SEQ ID NO: 1776500 - RNA, 19 nt, Artificial Sequence
  Description of Artificial Sequence: Synthetic oligonucleotide
  Antisense strand to SEQ ID NO: 1776499
auucaucgcagggacaaag

SEQ ID NO: 1776501 - RNA, 19 nt, Artificial Sequence
  Description of Artificial Sequence: Synthetic oligonucleotide
  Sense strand starting at position 1704 of SEQ ID NO: 1562839
cugcaagcucgcugucuau

SEQ ID NO: 1776502 - RNA, 19 nt, Artificial Sequence
  Description of Artificial Sequence: Synthetic oligonucleotide
  Antisense strand to SEQ ID NO: 1776501
auagacagcgagcuugcag

SEQ ID NO: 1776503 - RNA, 19 nt, Artificial Sequence
  Description of Artificial Sequence: Synthetic oligonucleotide
  Sense strand starting at position 1706 of SEQ ID NO: 1562839
gcaagcucgcugucuauca

SEQ ID NO: 1776504 - RNA, 19 nt, Artificial Sequence
  Description of Artificial Sequence: Synthetic oligonucleotide
  Antisense strand to SEQ ID NO: 1776503
ugauagacagcgagcuugc

SEQ ID NO: 1776505 - RNA, 19 nt, Artificial Sequence
  Description of Artificial Sequence: Synthetic oligonucleotide
  Sense strand starting at position 2266 of SEQ ID NO: 1562839
cguccaaagucuuagacuu

SEQ ID NO: 1776506 - RNA, 19 nt, Artificial Sequence
  Description of Artificial Sequence: Synthetic oligonucleotide
  Antisense strand to SEQ ID NO: 1776505
aagucuaagacuuuggacg

SEQ ID NO: 1776507 - RNA, 19 nt, Artificial Sequence
  Description of Artificial Sequence: Synthetic oligonucleotide
  Sense strand starting at position 2273 of SEQ ID NO: 1562839
agucuuagacuuggcuaga

SEQ ID NO: 1776508 - RNA, 19 nt, Artificial Sequence
  Description of Artificial Sequence: Synthetic oligonucleotide
  Antisense strand to SEQ ID NO: 1776507
ucuagccaagucuaagacu

SEQ ID NO: 1776509 - RNA, 19 nt, Artificial Sequence
  Description of Artificial Sequence: Synthetic oligonucleotide
  Sense strand starting at position 2274 of SEQ ID NO: 1562839
gucuuagacuuggcuagag

SEQ ID NO: 1776510 - RNA, 19 nt, Artificial Sequence
  Description of Artificial Sequence: Synthetic oligonucleotide
  Antisense strand to SEQ ID NO: 1776509
cucuagccaagucuaagac

SEQ ID NO: 1776511 - RNA, 19 nt, Artificial Sequence
  Description of Artificial Sequence: Synthetic oligonucleotide
  Sense strand starting at position 2286 of SEQ ID NO: 1562839
gcuagagucugagaggagu

SEQ ID NO: 1776512 - RNA, 19 nt, Artificial Sequence
  Description of Artificial Sequence: Synthetic oligonucleotide
  Antisense strand to SEQ ID NO: 1776511
acuccucucagacucuagc

SEQ ID NO: 1776513 - RNA, 19 nt, Artificial Sequence
  Description of Artificial Sequence: Synthetic oligonucleotide
  Sense strand starting at position 2437 of SEQ ID NO: 1562839
aacggauccuucuagaaga

SEQ ID NO: 1776514 - RNA, 19 nt, Artificial Sequence
  Description of Artificial Sequence: Synthetic oligonucleotide
  Antisense strand to SEQ ID NO: 1776513
ucuucuagaaggauccguu

SEQ ID NO: 1776515 - RNA, 19 nt, Artificial Sequence
  Description of Artificial Sequence: Synthetic oligonucleotide
  Sense strand starting at position 2447 of SEQ ID NO: 1562839
ucuagaagaugacacaaua

SEQ ID NO: 1776516 - RNA, 19 nt, Artificial Sequence
  Description of Artificial Sequence: Synthetic oligonucleotide
  Antisense strand to SEQ ID NO: 1776515
uauugugucaucuucuaga

SEQ ID NO: 1776517 - RNA, 19 nt, Artificial Sequence
  Description of Artificial Sequence: Synthetic oligonucleotide
  Sense strand starting at position 2829 of SEQ ID NO: 1562839
gaaagugaggcauauggca

SEQ ID NO: 1776518 - RNA, 19 nt, Artificial Sequence
  Description of Artificial Sequence: Synthetic oligonucleotide
  Antisense strand to SEQ ID NO: 1776517
ugccauaugccucacuuuc

SEQ ID NO: 1776519 - RNA, 19 nt, Artificial Sequence
  Description of Artificial Sequence: Synthetic oligonucleotide
  Sense strand starting at position 2869 of SEQ ID NO: 1562839
uugggauagaccgaaguuu

SEQ ID NO: 1776520 - RNA, 19 nt, Artificial Sequence
  Description of Artificial Sequence: Synthetic oligonucleotide
  Antisense strand to SEQ ID NO: 1776519
aaacuucggucuaucccaa

SEQ ID NO: 1776521 - RNA, 19 nt, Artificial Sequence
  Description of Artificial Sequence: Synthetic oligonucleotide
  Sense strand starting at position 2985 of SEQ ID NO: 1562839
ugggaaggaugcugucaga

SEQ ID NO: 1776522 - RNA, 19 nt, Artificial Sequence
  Description of Artificial Sequence: Synthetic oligonucleotide
  Antisense strand to SEQ ID NO: 1776521
ucugacagcauccuuccca

SEQ ID NO: 1776523 - RNA, 19 nt, Artificial Sequence
  Description of Artificial Sequence: Synthetic oligonucleotide
  Sense strand starting at position 2988 of SEQ ID NO: 1562839
gaaggaugcugucagaagg

SEQ ID NO: 1776524 - RNA, 19 nt, Artificial Sequence
  Description of Artificial Sequence: Synthetic oligonucleotide
  Antisense strand to SEQ ID NO: 1776523
ccuucugacagcauccuuc

SEQ ID NO: 1776525 - RNA, 19 nt, Artificial Sequence
  Description of Artificial Sequence: Synthetic oligonucleotide
  Sense strand starting at position 3012 of SEQ ID NO: 1562839
ggaggugucugaguggagu

SEQ ID NO: 1776526 - RNA, 19 nt, Artificial Sequence
  Description of Artificial Sequence: Synthetic oligonucleotide
  Antisense strand to SEQ ID NO: 1776525
acuccacucagacaccucc

SEQ ID NO: 1776527 - RNA, 19 nt, Artificial Sequence
  Description of Artificial Sequence: Synthetic oligonucleotide
  Sense strand starting at position 3775 of SEQ ID NO: 1562839
cuacacuguucguaaucuu

SEQ ID NO: 1776528 - RNA, 19 nt, Artificial Sequence
  Description of Artificial Sequence: Synthetic oligonucleotide
  Antisense strand to SEQ ID NO: 1776527
aagauuacgaacaguguag

SEQ ID NO: 1776529 - RNA, 19 nt, Artificial Sequence
  Description of Artificial Sequence: Synthetic oligonucleotide
  Sense strand starting at position 345 of SEQ ID NO: 1562840
uuguauuccagcgagucga

SEQ ID NO: 1776530 - RNA, 19 nt, Artificial Sequence
  Description of Artificial Sequence: Synthetic oligonucleotide
  Antisense strand to SEQ ID NO: 1776529
ucgacucgcuggaauacaa

SEQ ID NO: 1776531 - RNA, 19 nt, Artificial Sequence
  Description of Artificial Sequence: Synthetic oligonucleotide
  Sense strand starting at position 504 of SEQ ID NO: 1562840
gcaccugaacuguggaagu

SEQ ID NO: 1776532 - RNA, 19 nt, Artificial Sequence
  Description of Artificial Sequence: Synthetic oligonucleotide
  Antisense strand to SEQ ID NO: 1776531
acuuccacaguucaggugc

SEQ ID NO: 1776533 - RNA, 19 nt, Artificial Sequence
  Description of Artificial Sequence: Synthetic oligonucleotide
  Sense strand starting at position 939 of SEQ ID NO: 1562840
gccuuaaaguggguguuca

SEQ ID NO: 1776534 - RNA, 19 nt, Artificial Sequence
  Description of Artificial Sequence: Synthetic oligonucleotide
  Antisense strand to SEQ ID NO: 1776533
ugaacacccacuuuaaggc

SEQ ID NO: 1776535 - RNA, 19 nt, Artificial Sequence
  Description of Artificial Sequence: Synthetic oligonucleotide
  Sense strand starting at position 947 of SEQ ID NO: 1562840
guggguguucaugcucagu

SEQ ID NO: 1776536 - RNA, 19 nt, Artificial Sequence
  Description of Artificial Sequence: Synthetic oligonucleotide
  Antisense strand to SEQ ID NO: 1776535
acugagcaugaacacccac

SEQ ID NO: 1776537 - RNA, 19 nt, Artificial Sequence
  Description of Artificial Sequence: Synthetic oligonucleotide
  Sense strand starting at position 960 of SEQ ID NO: 1562840
cucaguccggucucguuaa

SEQ ID NO: 1776538 - RNA, 19 nt, Artificial Sequence
  Description of Artificial Sequence: Synthetic oligonucleotide
  Antisense strand to SEQ ID NO: 1776537
uuaacgagaccggacugag

SEQ ID NO: 1776539 - RNA, 19 nt, Artificial Sequence
  Description of Artificial Sequence: Synthetic oligonucleotide
  Sense strand starting at position 1891 of SEQ ID NO: 1562840
gccguugggugucugaguu

SEQ ID NO: 1776540 - RNA, 19 nt, Artificial Sequence
  Description of Artificial Sequence: Synthetic oligonucleotide
  Antisense strand to SEQ ID NO: 1776539
aacucagacacccaacggc

SEQ ID NO: 1776541 - RNA, 19 nt, Artificial Sequence
  Description of Artificial Sequence: Synthetic oligonucleotide
  Sense strand starting at position 2682 of SEQ ID NO: 1562840
acggaaagucgcuaagugu

SEQ ID NO: 1776542 - RNA, 19 nt, Artificial Sequence
  Description of Artificial Sequence: Synthetic oligonucleotide
  Antisense strand to SEQ ID NO: 1776541
acacuuagcgacuuuccgu

SEQ ID NO: 1776543 - RNA, 19 nt, Artificial Sequence
  Description of Artificial Sequence: Synthetic oligonucleotide
  Sense strand starting at position 2685 of SEQ ID NO: 1562840
gaaagucgcuaagugucua

SEQ ID NO: 1776544 - RNA, 19 nt, Artificial Sequence
  Description of Artificial Sequence: Synthetic oligonucleotide
  Antisense strand to SEQ ID NO: 1776543
uagacacuuagcgacuuuc

SEQ ID NO: 1776545 - RNA, 19 nt, Artificial Sequence
  Description of Artificial Sequence: Synthetic oligonucleotide
  Sense strand starting at position 2810 of SEQ ID NO: 1562840
uaggguucuccucgagaga

SEQ ID NO: 1776546 - RNA, 19 nt, Artificial Sequence
  Description of Artificial Sequence: Synthetic oligonucleotide
  Antisense strand to SEQ ID NO: 1776545
ucucucgaggagaacccua

SEQ ID NO: 1776547 - RNA, 19 nt, Artificial Sequence
  Description of Artificial Sequence: Synthetic oligonucleotide
  Sense strand starting at position 2811 of SEQ ID NO: 1562840
aggguucuccucgagagac

SEQ ID NO: 1776548 - RNA, 19 nt, Artificial Sequence
  Description of Artificial Sequence: Synthetic oligonucleotide
  Antisense strand to SEQ ID NO: 1776547
gucucucgaggagaacccu

SEQ ID NO: 1776549 - RNA, 19 nt, Artificial Sequence
  Description of Artificial Sequence: Synthetic oligonucleotide
  Sense strand starting at position 3152 of SEQ ID NO: 1562840
auggaauugggcugugaua

SEQ ID NO: 1776550 - RNA, 19 nt, Artificial Sequence
  Description of Artificial Sequence: Synthetic oligonucleotide
  Antisense strand to SEQ ID NO: 1776549
uaucacagcccaauuccau

SEQ ID NO: 1776551 - RNA, 19 nt, Artificial Sequence
  Description of Artificial Sequence: Synthetic oligonucleotide
  Sense strand starting at position 3154 of SEQ ID NO: 1562840
ggaauugggcugugauacu

SEQ ID NO: 1776552 - RNA, 19 nt, Artificial Sequence
  Description of Artificial Sequence: Synthetic oligonucleotide
  Antisense strand to SEQ ID NO: 1776551
aguaucacagcccaauucc

SEQ ID NO: 1776553 - RNA, 19 nt, Artificial Sequence
  Description of Artificial Sequence: Synthetic oligonucleotide
  Sense strand starting at position 3198 of SEQ ID NO: 1562840
cugcccugcucuuuaugaa

SEQ ID NO: 1776554 - RNA, 19 nt, Artificial Sequence
  Description of Artificial Sequence: Synthetic oligonucleotide
  Antisense strand to SEQ ID NO: 1776553
uucauaaagagcagggcag

SEQ ID NO: 1776555 - RNA, 19 nt, Artificial Sequence
  Description of Artificial Sequence: Synthetic oligonucleotide
  Sense strand starting at position 3199 of SEQ ID NO: 1562840
ugcccugcucuuuaugaaa

SEQ ID NO: 1776556 - RNA, 19 nt, Artificial Sequence
  Description of Artificial Sequence: Synthetic oligonucleotide
  Antisense strand to SEQ ID NO: 1776555
uuucauaaagagcagggca

SEQ ID NO: 1776557 - RNA, 19 nt, Artificial Sequence
  Description of Artificial Sequence: Synthetic oligonucleotide
  Sense strand starting at position 3273 of SEQ ID NO: 1562840
gcugaaaucuaucuugcaa

SEQ ID NO: 1776558 - RNA, 19 nt, Artificial Sequence
  Description of Artificial Sequence: Synthetic oligonucleotide
  Antisense strand to SEQ ID NO: 1776557
uugcaagauagauuucagc

SEQ ID NO: 1776559 - RNA, 19 nt, Artificial Sequence
  Description of Artificial Sequence: Synthetic oligonucleotide
  Sense strand starting at position 3288 of SEQ ID NO: 1562840
gcaauuagaaguuggaagu

SEQ ID NO: 1776560 - RNA, 19 nt, Artificial Sequence
  Description of Artificial Sequence: Synthetic oligonucleotide
  Antisense strand to SEQ ID NO: 1776559
acuuccaacuucuaauugc

SEQ ID NO: 1776561 - RNA, 19 nt, Artificial Sequence
  Description of Artificial Sequence: Synthetic oligonucleotide
  Sense strand starting at position 3289 of SEQ ID NO: 1562840
caauuagaaguuggaaguu

SEQ ID NO: 1776562 - RNA, 19 nt, Artificial Sequence
  Description of Artificial Sequence: Synthetic oligonucleotide
  Antisense strand to SEQ ID NO: 1776561
aacuuccaacuucuaauug

SEQ ID NO: 1776563 - RNA, 19 nt, Artificial Sequence
  Description of Artificial Sequence: Synthetic oligonucleotide
  Sense strand starting at position 3298 of SEQ ID NO: 1562840
guuggaaguuagaggugau

SEQ ID NO: 1776564 - RNA, 19 nt, Artificial Sequence
  Description of Artificial Sequence: Synthetic oligonucleotide
  Antisense strand to SEQ ID NO: 1776563
aucaccucuaacuuccaac

SEQ ID NO: 1776565 - RNA, 19 nt, Artificial Sequence
  Description of Artificial Sequence: Synthetic oligonucleotide
  Sense strand starting at position 3317 of SEQ ID NO: 1562840
ggaggauagagguguuuau

SEQ ID NO: 1776566 - RNA, 19 nt, Artificial Sequence
  Description of Artificial Sequence: Synthetic oligonucleotide
  Antisense strand to SEQ ID NO: 1776565
auaaacaccucuauccucc

SEQ ID NO: 1776567 - RNA, 19 nt, Artificial Sequence
  Description of Artificial Sequence: Synthetic oligonucleotide
  Sense strand starting at position 3321 of SEQ ID NO: 1562840
gauagagguguuuauucug

SEQ ID NO: 1776568 - RNA, 19 nt, Artificial Sequence
  Description of Artificial Sequence: Synthetic oligonucleotide
  Antisense strand to SEQ ID NO: 1776567
cagaauaaacaccucuauc

SEQ ID NO: 1776569 - RNA, 19 nt, Artificial Sequence
  Description of Artificial Sequence: Synthetic oligonucleotide
  Sense strand starting at position 3403 of SEQ ID NO: 1562840
guguguuccucccuaaagu

SEQ ID NO: 1776570 - RNA, 19 nt, Artificial Sequence
  Description of Artificial Sequence: Synthetic oligonucleotide
  Antisense strand to SEQ ID NO: 1776569
acuuuagggaggaacacac

SEQ ID NO: 1776571 - RNA, 19 nt, Artificial Sequence
  Description of Artificial Sequence: Synthetic oligonucleotide
  Sense strand starting at position 3404 of SEQ ID NO: 1562840
uguguuccucccuaaagug

SEQ ID NO: 1776572 - RNA, 19 nt, Artificial Sequence
  Description of Artificial Sequence: Synthetic oligonucleotide
  Antisense strand to SEQ ID NO: 1776571
cacuuuagggaggaacaca

SEQ ID NO: 1776573 - RNA, 19 nt, Artificial Sequence
  Description of Artificial Sequence: Synthetic oligonucleotide
  Sense strand starting at position 3499 of SEQ ID NO: 1562840
uucgcauucuuaggagaag

SEQ ID NO: 1776574 - RNA, 19 nt, Artificial Sequence
  Description of Artificial Sequence: Synthetic oligonucleotide
  Antisense strand to SEQ ID NO: 1776573
cuucuccuaagaaugcgaa

SEQ ID NO: 1776575 - RNA, 19 nt, Artificial Sequence
  Description of Artificial Sequence: Synthetic oligonucleotide
  Sense strand starting at position 3546 of SEQ ID NO: 1562840
cccugauaucgcuauuaaa

SEQ ID NO: 1776576 - RNA, 19 nt, Artificial Sequence
  Description of Artificial Sequence: Synthetic oligonucleotide
  Antisense strand to SEQ ID NO: 1776575
uuuaauagcgauaucaggg

SEQ ID NO: 1776577 - RNA, 19 nt, Artificial Sequence
  Description of Artificial Sequence: Synthetic oligonucleotide
  Sense strand starting at position 3549 of SEQ ID NO: 1562840
ugauaucgcuauuaaaucu

SEQ ID NO: 1776578 - RNA, 19 nt, Artificial Sequence
  Description of Artificial Sequence: Synthetic oligonucleotide
  Antisense strand to SEQ ID NO: 1776577
agauuuaauagcgauauca

SEQ ID NO: 1776579 - RNA, 19 nt, Artificial Sequence
  Description of Artificial Sequence: Synthetic oligonucleotide
  Sense strand starting at position 3576 of SEQ ID NO: 1562840
uuaagcgugguguaugaaa

SEQ ID NO: 1776580 - RNA, 19 nt, Artificial Sequence
  Description of Artificial Sequence: Synthetic oligonucleotide
  Antisense strand to SEQ ID NO: 1776579
uuucauacaccacgcuuaa

SEQ ID NO: 1776581 - RNA, 19 nt, Artificial Sequence
  Description of Artificial Sequence: Synthetic oligonucleotide
  Sense strand starting at position 3619 of SEQ ID NO: 1562840
aaguguuuaucgcccgagu

SEQ ID NO: 1776582 - RNA, 19 nt, Artificial Sequence
  Description of Artificial Sequence: Synthetic oligonucleotide
  Antisense strand to SEQ ID NO: 1776581
acucgggcgauaaacacuu

SEQ ID NO: 1776583 - RNA, 19 nt, Artificial Sequence
  Description of Artificial Sequence: Synthetic oligonucleotide
  Sense strand starting at position 3620 of SEQ ID NO: 1562840
aguguuuaucgcccgaguc

SEQ ID NO: 1776584 - RNA, 19 nt, Artificial Sequence
  Description of Artificial Sequence: Synthetic oligonucleotide
  Antisense strand to SEQ ID NO: 1776583
gacucgggcgauaaacacu

SEQ ID NO: 1776585 - RNA, 19 nt, Artificial Sequence
  Description of Artificial Sequence: Synthetic oligonucleotide
  Sense strand starting at position 3621 of SEQ ID NO: 1562840
guguuuaucgcccgagucu

SEQ ID NO: 1776586 - RNA, 19 nt, Artificial Sequence
  Description of Artificial Sequence: Synthetic oligonucleotide
  Antisense strand to SEQ ID NO: 1776585
agacucgggcgauaaacac

SEQ ID NO: 1776587 - RNA, 19 nt, Artificial Sequence
  Description of Artificial Sequence: Synthetic oligonucleotide
  Sense strand starting at position 3636 of SEQ ID NO: 1562840
gucugucuagcguuugcua

SEQ ID NO: 1776588 - RNA, 19 nt, Artificial Sequence
  Description of Artificial Sequence: Synthetic oligonucleotide
  Antisense strand to SEQ ID NO: 1776587
uagcaaacgcuagacagac

SEQ ID NO: 1776589 - RNA, 19 nt, Artificial Sequence
  Description of Artificial Sequence: Synthetic oligonucleotide
  Sense strand starting at position 3637 of SEQ ID NO: 1562840
ucugucuagcguuugcuaa

SEQ ID NO: 1776590 - RNA, 19 nt, Artificial Sequence
  Description of Artificial Sequence: Synthetic oligonucleotide
  Antisense strand to SEQ ID NO: 1776589
uuagcaaacgcuagacaga

SEQ ID NO: 1776591 - RNA, 19 nt, Artificial Sequence
  Description of Artificial Sequence: Synthetic oligonucleotide
  Sense strand starting at position 3638 of SEQ ID NO: 1562840
cugucuagcguuugcuaaa

SEQ ID NO: 1776592 - RNA, 19 nt, Artificial Sequence
  Description of Artificial Sequence: Synthetic oligonucleotide
  Antisense strand to SEQ ID NO: 1776591
uuuagcaaacgcuagacag

SEQ ID NO: 1776593 - RNA, 19 nt, Artificial Sequence
  Description of Artificial Sequence: Synthetic oligonucleotide
  Sense strand starting at position 3639 of SEQ ID NO: 1562840
ugucuagcguuugcuaaau

SEQ ID NO: 1776594 - RNA, 19 nt, Artificial Sequence
  Description of Artificial Sequence: Synthetic oligonucleotide
  Antisense strand to SEQ ID NO: 1776593
auuuagcaaacgcuagaca

SEQ ID NO: 1776595 - RNA, 19 nt, Artificial Sequence
  Description of Artificial Sequence: Synthetic oligonucleotide
  Sense strand starting at position 3645 of SEQ ID NO: 1562840
gcguuugcuaaauuacgca

SEQ ID NO: 1776596 - RNA, 19 nt, Artificial Sequence
  Description of Artificial Sequence: Synthetic oligonucleotide
  Antisense strand to SEQ ID NO: 1776595
ugcguaauuuagcaaacgc

SEQ ID NO: 1776597 - RNA, 19 nt, Artificial Sequence
  Description of Artificial Sequence: Synthetic oligonucleotide
  Sense strand starting at position 3649 of SEQ ID NO: 1562840
uugcuaaauuacgcaugaa

SEQ ID NO: 1776598 - RNA, 19 nt, Artificial Sequence
  Description of Artificial Sequence: Synthetic oligonucleotide
  Antisense strand to SEQ ID NO: 1776597
uucaugcguaauuuagcaa

SEQ ID NO: 1776599 - RNA, 19 nt, Artificial Sequence
  Description of Artificial Sequence: Synthetic oligonucleotide
  Sense strand starting at position 3652 of SEQ ID NO: 1562840
cuaaauuacgcaugaaauc

SEQ ID NO: 1776600 - RNA, 19 nt, Artificial Sequence
  Description of Artificial Sequence: Synthetic oligonucleotide
  Antisense strand to SEQ ID NO: 1776599
gauuucaugcguaauuuag

SEQ ID NO: 1776601 - RNA, 19 nt, Artificial Sequence
  Description of Artificial Sequence: Synthetic oligonucleotide
  Sense strand starting at position 3777 of SEQ ID NO: 1562840
gucguacgcgcagauucau

SEQ ID NO: 1776602 - RNA, 19 nt, Artificial Sequence
  Description of Artificial Sequence: Synthetic oligonucleotide
  Antisense strand to SEQ ID NO: 1776601
augaaucugcgcguacgac

SEQ ID NO: 1776603 - RNA, 19 nt, Artificial Sequence
  Description of Artificial Sequence: Synthetic oligonucleotide
  Sense strand starting at position 3824 of SEQ ID NO: 1562840
agugcuaaguaugccagaa

SEQ ID NO: 1776604 - RNA, 19 nt, Artificial Sequence
  Description of Artificial Sequence: Synthetic oligonucleotide
  Antisense strand to SEQ ID NO: 1776603
uucuggcauacuuagcacu

SEQ ID NO: 1776605 - RNA, 19 nt, Artificial Sequence
  Description of Artificial Sequence: Synthetic oligonucleotide
  Sense strand starting at position 3828 of SEQ ID NO: 1562840
cuaaguaugccagaaccga

SEQ ID NO: 1776606 - RNA, 19 nt, Artificial Sequence
  Description of Artificial Sequence: Synthetic oligonucleotide
  Antisense strand to SEQ ID NO: 1776605
ucgguucuggcauacuuag

SEQ ID NO: 1776607 - RNA, 19 nt, Artificial Sequence
  Description of Artificial Sequence: Synthetic oligonucleotide
  Sense strand starting at position 3887 of SEQ ID NO: 1562840
gcggcagaauuccuaagaa

SEQ ID NO: 1776608 - RNA, 19 nt, Artificial Sequence
  Description of Artificial Sequence: Synthetic oligonucleotide
  Antisense strand to SEQ ID NO: 1776607
uucuuaggaauucugccgc

SEQ ID NO: 1776609 - RNA, 19 nt, Artificial Sequence
  Description of Artificial Sequence: Synthetic oligonucleotide
  Sense strand starting at position 7 of SEQ ID NO: 1562841
auggucuuccaagauuauc

SEQ ID NO: 1776610 - RNA, 19 nt, Artificial Sequence
  Description of Artificial Sequence: Synthetic oligonucleotide
  Antisense strand to SEQ ID NO: 1776609
gauaaucuuggaagaccau

SEQ ID NO: 1776611 - RNA, 19 nt, Artificial Sequence
  Description of Artificial Sequence: Synthetic oligonucleotide
  Sense strand starting at position 191 of SEQ ID NO: 1562841
gcuaucaacuagcugaaua

SEQ ID NO: 1776612 - RNA, 19 nt, Artificial Sequence
  Description of Artificial Sequence: Synthetic oligonucleotide
  Antisense strand to SEQ ID NO: 1776611
uauucagcuaguugauagc

SEQ ID NO: 1776613 - RNA, 19 nt, Artificial Sequence
  Description of Artificial Sequence: Synthetic oligonucleotide
  Sense strand starting at position 245 of SEQ ID NO: 1562841
gggucaucauacuuaagug

SEQ ID NO: 1776614 - RNA, 19 nt, Artificial Sequence
  Description of Artificial Sequence: Synthetic oligonucleotide
  Antisense strand to SEQ ID NO: 1776613
cacuuaaguaugaugaccc

SEQ ID NO: 1776615 - RNA, 19 nt, Artificial Sequence
  Description of Artificial Sequence: Synthetic oligonucleotide
  Sense strand starting at position 246 of SEQ ID NO: 1562841
ggucaucauacuuaagugu

SEQ ID NO: 1776616 - RNA, 19 nt, Artificial Sequence
  Description of Artificial Sequence: Synthetic oligonucleotide
  Antisense strand to SEQ ID NO: 1776615
acacuuaaguaugaugacc

SEQ ID NO: 1776617 - RNA, 19 nt, Artificial Sequence
  Description of Artificial Sequence: Synthetic oligonucleotide
  Sense strand starting at position 713 of SEQ ID NO: 1562841
uguugucuucuccaucaaa

SEQ ID NO: 1776618 - RNA, 19 nt, Artificial Sequence
  Description of Artificial Sequence: Synthetic oligonucleotide
  Antisense strand to SEQ ID NO: 1776617
uuugauggagaagacaaca

SEQ ID NO: 1776619 - RNA, 19 nt, Artificial Sequence
  Description of Artificial Sequence: Synthetic oligonucleotide
  Sense strand starting at position 838 of SEQ ID NO: 1562841
cagguacuagaauguuaga

SEQ ID NO: 1776620 - RNA, 19 nt, Artificial Sequence
  Description of Artificial Sequence: Synthetic oligonucleotide
  Antisense strand to SEQ ID NO: 1776619
ucuaacauucuaguaccug

SEQ ID NO: 1776621 - RNA, 19 nt, Artificial Sequence
  Description of Artificial Sequence: Synthetic oligonucleotide
  Sense strand starting at position 878 of SEQ ID NO: 1562841
guaacaggugaauguauua

SEQ ID NO: 1776622 - RNA, 19 nt, Artificial Sequence
  Description of Artificial Sequence: Synthetic oligonucleotide
  Antisense strand to SEQ ID NO: 1776621
uaauacauucaccuguuac

SEQ ID NO: 1776623 - RNA, 19 nt, Artificial Sequence
  Description of Artificial Sequence: Synthetic oligonucleotide
  Sense strand starting at position 972 of SEQ ID NO: 1562841
ccauguuggagugauuaga

SEQ ID NO: 1776624 - RNA, 19 nt, Artificial Sequence
  Description of Artificial Sequence: Synthetic oligonucleotide
  Antisense strand to SEQ ID NO: 1776623
ucuaaucacuccaacaugg

SEQ ID NO: 1776625 - RNA, 19 nt, Artificial Sequence
  Description of Artificial Sequence: Synthetic oligonucleotide
  Sense strand starting at position 1014 of SEQ ID NO: 1562841
ccaugaacacuguauguuu

SEQ ID NO: 1776626 - RNA, 19 nt, Artificial Sequence
  Description of Artificial Sequence: Synthetic oligonucleotide
  Antisense strand to SEQ ID NO: 1776625
aaacauacaguguucaugg

SEQ ID NO: 1776627 - RNA, 19 nt, Artificial Sequence
  Description of Artificial Sequence: Synthetic oligonucleotide
  Sense strand starting at position 1122 of SEQ ID NO: 1562841
agcaaucugccaggaagau

SEQ ID NO: 1776628 - RNA, 19 nt, Artificial Sequence
  Description of Artificial Sequence: Synthetic oligonucleotide
  Antisense strand to SEQ ID NO: 1776627
aucuuccuggcagauugcu

SEQ ID NO: 1776629 - RNA, 19 nt, Artificial Sequence
  Description of Artificial Sequence: Synthetic oligonucleotide
  Sense strand starting at position 1123 of SEQ ID NO: 1562841
gcaaucugccaggaagaua

SEQ ID NO: 1776630 - RNA, 19 nt, Artificial Sequence
  Description of Artificial Sequence: Synthetic oligonucleotide
  Antisense strand to SEQ ID NO: 1776629
uaucuuccuggcagauugc

SEQ ID NO: 1776631 - RNA, 19 nt, Artificial Sequence
  Description of Artificial Sequence: Synthetic oligonucleotide
  Sense strand starting at position 1174 of SEQ ID NO: 1562841
cuugaaaguugucauuuaa

SEQ ID NO: 1776632 - RNA, 19 nt, Artificial Sequence
  Description of Artificial Sequence: Synthetic oligonucleotide
  Antisense strand to SEQ ID NO: 1776631
uuaaaugacaacuuucaag

SEQ ID NO: 1776633 - RNA, 19 nt, Artificial Sequence
  Description of Artificial Sequence: Synthetic oligonucleotide
  Sense strand starting at position 1248 of SEQ ID NO: 1562841
ggacguugucacuacagag

SEQ ID NO: 1776634 - RNA, 19 nt, Artificial Sequence
  Description of Artificial Sequence: Synthetic oligonucleotide
  Antisense strand to SEQ ID NO: 1776633
cucuguagugacaacgucc

SEQ ID NO: 1776635 - RNA, 19 nt, Artificial Sequence
  Description of Artificial Sequence: Synthetic oligonucleotide
  Sense strand starting at position 1304 of SEQ ID NO: 1562841
gauccaauagagcaguauu

SEQ ID NO: 1776636 - RNA, 19 nt, Artificial Sequence
  Description of Artificial Sequence: Synthetic oligonucleotide
  Antisense strand to SEQ ID NO: 1776635
aauacugcucuauuggauc

SEQ ID NO: 1776637 - RNA, 19 nt, Artificial Sequence
  Description of Artificial Sequence: Synthetic oligonucleotide
  Sense strand starting at position 1321 of SEQ ID NO: 1562841
uuuguuggauuccuauaaa

SEQ ID NO: 1776638 - RNA, 19 nt, Artificial Sequence
  Description of Artificial Sequence: Synthetic oligonucleotide
  Antisense strand to SEQ ID NO: 1776637
uuuauaggaauccaacaaa

SEQ ID NO: 1776639 - RNA, 19 nt, Artificial Sequence
  Description of Artificial Sequence: Synthetic oligonucleotide
  Sense strand starting at position 1431 of SEQ ID NO: 1562841
cuggauuagcaacaaguau

SEQ ID NO: 1776640 - RNA, 19 nt, Artificial Sequence
  Description of Artificial Sequence: Synthetic oligonucleotide
  Antisense strand to SEQ ID NO: 1776639
auacuuguugcuaauccag

SEQ ID NO: 1776641 - RNA, 19 nt, Artificial Sequence
  Description of Artificial Sequence: Synthetic oligonucleotide
  Sense strand starting at position 1477 of SEQ ID NO: 1562841
agcucaagauauccaguga

SEQ ID NO: 1776642 - RNA, 19 nt, Artificial Sequence
  Description of Artificial Sequence: Synthetic oligonucleotide
  Antisense strand to SEQ ID NO: 1776641
ucacuggauaucuugagcu

SEQ ID NO: 1776643 - RNA, 19 nt, Artificial Sequence
  Description of Artificial Sequence: Synthetic oligonucleotide
  Sense strand starting at position 1551 of SEQ ID NO: 1562841
ggaaacgauuuccauauaa

SEQ ID NO: 1776644 - RNA, 19 nt, Artificial Sequence
  Description of Artificial Sequence: Synthetic oligonucleotide
  Antisense strand to SEQ ID NO: 1776643
uuauauggaaaucguuucc

SEQ ID NO: 1776645 - RNA, 19 nt, Artificial Sequence
  Description of Artificial Sequence: Synthetic oligonucleotide
  Sense strand starting at position 1568 of SEQ ID NO: 1562841
aauaucaaggaacgaguua

SEQ ID NO: 1776646 - RNA, 19 nt, Artificial Sequence
  Description of Artificial Sequence: Synthetic oligonucleotide
  Antisense strand to SEQ ID NO: 1776645
uaacucguuccuugauauu

SEQ ID NO: 1776647 - RNA, 19 nt, Artificial Sequence
  Description of Artificial Sequence: Synthetic oligonucleotide
  Sense strand starting at position 1580 of SEQ ID NO: 1562841
cgaguuacugguuaccuca

SEQ ID NO: 1776648 - RNA, 19 nt, Artificial Sequence
  Description of Artificial Sequence: Synthetic oligonucleotide
  Antisense strand to SEQ ID NO: 1776647
ugagguaaccaguaacucg

SEQ ID NO: 1776649 - RNA, 19 nt, Artificial Sequence
  Description of Artificial Sequence: Synthetic oligonucleotide
  Sense strand starting at position 1605 of SEQ ID NO: 1562841
ccuagaggauacuuacgaa

SEQ ID NO: 1776650 - RNA, 19 nt, Artificial Sequence
  Description of Artificial Sequence: Synthetic oligonucleotide
  Antisense strand to SEQ ID NO: 1776649
uucguaaguauccucuagg

SEQ ID NO: 1776651 - RNA, 19 nt, Artificial Sequence
  Description of Artificial Sequence: Synthetic oligonucleotide
  Sense strand starting at position 1608 of SEQ ID NO: 1562841
agaggauacuuacgaauuu

SEQ ID NO: 1776652 - RNA, 19 nt, Artificial Sequence
  Description of Artificial Sequence: Synthetic oligonucleotide
  Antisense strand to SEQ ID NO: 1776651
aaauucguaaguauccucu

SEQ ID NO: 1776653 - RNA, 19 nt, Artificial Sequence
  Description of Artificial Sequence: Synthetic oligonucleotide
  Sense strand starting at position 1617 of SEQ ID NO: 1562841
uuacgaauuugugugcaga

SEQ ID NO: 1776654 - RNA, 19 nt, Artificial Sequence
  Description of Artificial Sequence: Synthetic oligonucleotide
  Antisense strand to SEQ ID NO: 1776653
ucugcacacaaauucguaa

SEQ ID NO: 1776655 - RNA, 19 nt, Artificial Sequence
  Description of Artificial Sequence: Synthetic oligonucleotide
  Sense strand starting at position 1618 of SEQ ID NO: 1562841
uacgaauuugugugcagau

SEQ ID NO: 1776656 - RNA, 19 nt, Artificial Sequence
  Description of Artificial Sequence: Synthetic oligonucleotide
  Antisense strand to SEQ ID NO: 1776655
aucugcacacaaauucgua

SEQ ID NO: 1776657 - RNA, 19 nt, Artificial Sequence
  Description of Artificial Sequence: Synthetic oligonucleotide
  Sense strand starting at position 1619 of SEQ ID NO: 1562841
acgaauuugugugcagaua

SEQ ID NO: 1776658 - RNA, 19 nt, Artificial Sequence
  Description of Artificial Sequence: Synthetic oligonucleotide
  Antisense strand to SEQ ID NO: 1776657
uaucugcacacaaauucgu

SEQ ID NO: 1776659 - RNA, 19 nt, Artificial Sequence
  Description of Artificial Sequence: Synthetic oligonucleotide
  Sense strand starting at position 1715 of SEQ ID NO: 1562841
acccgcuaacugggaaaua

SEQ ID NO: 1776660 - RNA, 19 nt, Artificial Sequence
  Description of Artificial Sequence: Synthetic oligonucleotide
  Antisense strand to SEQ ID NO: 1776659
uauuucccaguuagcgggu

SEQ ID NO: 1776661 - RNA, 19 nt, Artificial Sequence
  Description of Artificial Sequence: Synthetic oligonucleotide
  Sense strand starting at position 1758 of SEQ ID NO: 1562841
ccaggauucuguccaguaa

SEQ ID NO: 1776662 - RNA, 19 nt, Artificial Sequence
  Description of Artificial Sequence: Synthetic oligonucleotide
  Antisense strand to SEQ ID NO: 1776661
uuacuggacagaauccugg

SEQ ID NO: 1776663 - RNA, 19 nt, Artificial Sequence
  Description of Artificial Sequence: Synthetic oligonucleotide
  Sense strand starting at position 1759 of SEQ ID NO: 1562841
caggauucuguccaguaaa

SEQ ID NO: 1776664 - RNA, 19 nt, Artificial Sequence
  Description of Artificial Sequence: Synthetic oligonucleotide
  Antisense strand to SEQ ID NO: 1776663
uuuacuggacagaauccug

SEQ ID NO: 1776665 - RNA, 19 nt, Artificial Sequence
  Description of Artificial Sequence: Synthetic oligonucleotide
  Sense strand starting at position 1762 of SEQ ID NO: 1562841
gauucuguccaguaaagcu

SEQ ID NO: 1776666 - RNA, 19 nt, Artificial Sequence
  Description of Artificial Sequence: Synthetic oligonucleotide
  Antisense strand to SEQ ID NO: 1776665
agcuuuacuggacagaauc

SEQ ID NO: 1776667 - RNA, 19 nt, Artificial Sequence
  Description of Artificial Sequence: Synthetic oligonucleotide
  Sense strand starting at position 1928 of SEQ ID NO: 1562841
gucauaaaucuguagcuuu

SEQ ID NO: 1776668 - RNA, 19 nt, Artificial Sequence
  Description of Artificial Sequence: Synthetic oligonucleotide
  Antisense strand to SEQ ID NO: 1776667
aaagcuacagauuuaugac

SEQ ID NO: 1776669 - RNA, 19 nt, Artificial Sequence
  Description of Artificial Sequence: Synthetic oligonucleotide
  Sense strand starting at position 2016 of SEQ ID NO: 1562841
aggagaugguccuugagug

SEQ ID NO: 1776670 - RNA, 19 nt, Artificial Sequence
  Description of Artificial Sequence: Synthetic oligonucleotide
  Antisense strand to SEQ ID NO: 1776669
cacucaaggaccaucuccu

SEQ ID NO: 1776671 - RNA, 19 nt, Artificial Sequence
  Description of Artificial Sequence: Synthetic oligonucleotide
  Sense strand starting at position 2028 of SEQ ID NO: 1562841
uugagugggugguuuauga

SEQ ID NO: 1776672 - RNA, 19 nt, Artificial Sequence
  Description of Artificial Sequence: Synthetic oligonucleotide
  Antisense strand to SEQ ID NO: 1776671
ucauaaaccacccacucaa

SEQ ID NO: 1776673 - RNA, 19 nt, Artificial Sequence
  Description of Artificial Sequence: Synthetic oligonucleotide
  Sense strand starting at position 2088 of SEQ ID NO: 1562841
gaaauuuccugucaggaaa

SEQ ID NO: 1776674 - RNA, 19 nt, Artificial Sequence
  Description of Artificial Sequence: Synthetic oligonucleotide
  Antisense strand to SEQ ID NO: 1776673
uuuccugacaggaaauuuc

SEQ ID NO: 1776675 - RNA, 19 nt, Artificial Sequence
  Description of Artificial Sequence: Synthetic oligonucleotide
  Sense strand starting at position 2168 of SEQ ID NO: 1562841
acgugaugccaggauucuu

SEQ ID NO: 1776676 - RNA, 19 nt, Artificial Sequence
  Description of Artificial Sequence: Synthetic oligonucleotide
  Antisense strand to SEQ ID NO: 1776675
aagaauccuggcaucacgu

SEQ ID NO: 1776677 - RNA, 19 nt, Artificial Sequence
  Description of Artificial Sequence: Synthetic oligonucleotide
  Sense strand starting at position 2173 of SEQ ID NO: 1562841
augccaggauucuuaaaca

SEQ ID NO: 1776678 - RNA, 19 nt, Artificial Sequence
  Description of Artificial Sequence: Synthetic oligonucleotide
  Antisense strand to SEQ ID NO: 1776677
uguuuaagaauccuggcau

SEQ ID NO: 1776679 - RNA, 19 nt, Artificial Sequence
  Description of Artificial Sequence: Synthetic oligonucleotide
  Sense strand starting at position 2211 of SEQ ID NO: 1562841
agaugucgacggaguguua

SEQ ID NO: 1776680 - RNA, 19 nt, Artificial Sequence
  Description of Artificial Sequence: Synthetic oligonucleotide
  Antisense strand to SEQ ID NO: 1776679
uaacacuccgucgacaucu

SEQ ID NO: 1776681 - RNA, 19 nt, Artificial Sequence
  Description of Artificial Sequence: Synthetic oligonucleotide
  Sense strand starting at position 2224 of SEQ ID NO: 1562841
guguuauauggcgcaaguu

SEQ ID NO: 1776682 - RNA, 19 nt, Artificial Sequence
  Description of Artificial Sequence: Synthetic oligonucleotide
  Antisense strand to SEQ ID NO: 1776681
aacuugcgccauauaacac

SEQ ID NO: 1776683 - RNA, 19 nt, Artificial Sequence
  Description of Artificial Sequence: Synthetic oligonucleotide
  Sense strand starting at position 2321 of SEQ ID NO: 1562841
cagggugguggucagauua

SEQ ID NO: 1776684 - RNA, 19 nt, Artificial Sequence
  Description of Artificial Sequence: Synthetic oligonucleotide
  Antisense strand to SEQ ID NO: 1776683
uaaucugaccaccacccug

SEQ ID NO: 1776685 - RNA, 19 nt, Artificial Sequence
  Description of Artificial Sequence: Synthetic oligonucleotide
  Sense strand starting at position 2331 of SEQ ID NO: 1562841
gucagauuaccucacacuu

SEQ ID NO: 1776686 - RNA, 19 nt, Artificial Sequence
  Description of Artificial Sequence: Synthetic oligonucleotide
  Antisense strand to SEQ ID NO: 1776685
aagugugagguaaucugac

SEQ ID NO: 1776687 - RNA, 19 nt, Artificial Sequence
  Description of Artificial Sequence: Synthetic oligonucleotide
  Sense strand starting at position 2701 of SEQ ID NO: 1562841
gcuaguugagauggugaca

SEQ ID NO: 1776688 - RNA, 19 nt, Artificial Sequence
  Description of Artificial Sequence: Synthetic oligonucleotide
  Antisense strand to SEQ ID NO: 1776687
ugucaccaucucaacuagc

SEQ ID NO: 1776689 - RNA, 19 nt, Artificial Sequence
  Description of Artificial Sequence: Synthetic oligonucleotide
  Sense strand starting at position 24 of SEQ ID NO: 1562842
agaaguuaucuuggccaua

SEQ ID NO: 1776690 - RNA, 19 nt, Artificial Sequence
  Description of Artificial Sequence: Synthetic oligonucleotide
  Antisense strand to SEQ ID NO: 1776689
uauggccaagauaacuucu

SEQ ID NO: 1776691 - RNA, 19 nt, Artificial Sequence
  Description of Artificial Sequence: Synthetic oligonucleotide
  Sense strand starting at position 25 of SEQ ID NO: 1562842
gaaguuaucuuggccauaa

SEQ ID NO: 1776692 - RNA, 19 nt, Artificial Sequence
  Description of Artificial Sequence: Synthetic oligonucleotide
  Antisense strand to SEQ ID NO: 1776691
uuauggccaagauaacuuc

SEQ ID NO: 1776693 - RNA, 19 nt, Artificial Sequence
  Description of Artificial Sequence: Synthetic oligonucleotide
  Sense strand starting at position 204 of SEQ ID NO: 1562842
agcccaguuuccucagaag

SEQ ID NO: 1776694 - RNA, 19 nt, Artificial Sequence
  Description of Artificial Sequence: Synthetic oligonucleotide
  Antisense strand to SEQ ID NO: 1776693
cuucugaggaaacugggcu

SEQ ID NO: 1776695 - RNA, 19 nt, Artificial Sequence
  Description of Artificial Sequence: Synthetic oligonucleotide
  Sense strand starting at position 232 of SEQ ID NO: 1562842
agugguuguggaggugaca

SEQ ID NO: 1776696 - RNA, 19 nt, Artificial Sequence
  Description of Artificial Sequence: Synthetic oligonucleotide
  Antisense strand to SEQ ID NO: 1776695
ugucaccuccacaaccacu

SEQ ID NO: 1776697 - RNA, 19 nt, Artificial Sequence
  Description of Artificial Sequence: Synthetic oligonucleotide
  Sense strand starting at position 317 of SEQ ID NO: 1562842
uggacuagguccuuaacua

SEQ ID NO: 1776698 - RNA, 19 nt, Artificial Sequence
  Description of Artificial Sequence: Synthetic oligonucleotide
  Antisense strand to SEQ ID NO: 1776697
uaguuaaggaccuagucca

SEQ ID NO: 1776699 - RNA, 19 nt, Artificial Sequence
  Description of Artificial Sequence: Synthetic oligonucleotide
  Sense strand starting at position 345 of SEQ ID NO: 1562842
uguugccaucuguaagaug

SEQ ID NO: 1776700 - RNA, 19 nt, Artificial Sequence
  Description of Artificial Sequence: Synthetic oligonucleotide
  Antisense strand to SEQ ID NO: 1776699
caucuuacagauggcaaca

SEQ ID NO: 1776701 - RNA, 19 nt, Artificial Sequence
  Description of Artificial Sequence: Synthetic oligonucleotide
  Sense strand starting at position 363 of SEQ ID NO: 1562842
ggagacuaaucgucacuac

SEQ ID NO: 1776702 - RNA, 19 nt, Artificial Sequence
  Description of Artificial Sequence: Synthetic oligonucleotide
  Antisense strand to SEQ ID NO: 1776701
guagugacgauuagucucc

SEQ ID NO: 1776703 - RNA, 19 nt, Artificial Sequence
  Description of Artificial Sequence: Synthetic oligonucleotide
  Sense strand starting at position 449 of SEQ ID NO: 1562842
acgcguuaagugcuaugua

SEQ ID NO: 1776704 - RNA, 19 nt, Artificial Sequence
  Description of Artificial Sequence: Synthetic oligonucleotide
  Antisense strand to SEQ ID NO: 1776703
uacauagcacuuaacgcgu

SEQ ID NO: 1776705 - RNA, 19 nt, Artificial Sequence
  Description of Artificial Sequence: Synthetic oligonucleotide
  Sense strand starting at position 461 of SEQ ID NO: 1562842
cuauguaaauggccacuua

SEQ ID NO: 1776706 - RNA, 19 nt, Artificial Sequence
  Description of Artificial Sequence: Synthetic oligonucleotide
  Antisense strand to SEQ ID NO: 1776705
uaaguggccauuuacauag

SEQ ID NO: 1776707 - RNA, 19 nt, Artificial Sequence
  Description of Artificial Sequence: Synthetic oligonucleotide
  Sense strand starting at position 519 of SEQ ID NO: 1562842
aguacuaucgauuaucuuu

SEQ ID NO: 1776708 - RNA, 19 nt, Artificial Sequence
  Description of Artificial Sequence: Synthetic oligonucleotide
  Antisense strand to SEQ ID NO: 1776707
aaagauaaucgauaguacu

SEQ ID NO: 1776709 - RNA, 19 nt, Artificial Sequence
  Description of Artificial Sequence: Synthetic oligonucleotide
  Sense strand starting at position 566 of SEQ ID NO: 1562842
acuggagaaucucaacaaa

SEQ ID NO: 1776710 - RNA, 19 nt, Artificial Sequence
  Description of Artificial Sequence: Synthetic oligonucleotide
  Antisense strand to SEQ ID NO: 1776709
uuuguugagauucuccagu

SEQ ID NO: 1776711 - RNA, 19 nt, Artificial Sequence
  Description of Artificial Sequence: Synthetic oligonucleotide
  Sense strand starting at position 799 of SEQ ID NO: 1562842
gcgcguguucuaccgaaga

SEQ ID NO: 1776712 - RNA, 19 nt, Artificial Sequence
  Description of Artificial Sequence: Synthetic oligonucleotide
  Antisense strand to SEQ ID NO: 1776711
ucuucgguagaacacgcgc

SEQ ID NO: 1776713 - RNA, 19 nt, Artificial Sequence
  Description of Artificial Sequence: Synthetic oligonucleotide
  Sense strand starting at position 801 of SEQ ID NO: 1562842
gcguguucuaccgaagaga

SEQ ID NO: 1776714 - RNA, 19 nt, Artificial Sequence
  Description of Artificial Sequence: Synthetic oligonucleotide
  Antisense strand to SEQ ID NO: 1776713
ucucuucgguagaacacgc

SEQ ID NO: 1776715 - RNA, 19 nt, Artificial Sequence
  Description of Artificial Sequence: Synthetic oligonucleotide
  Sense strand starting at position 826 of SEQ ID NO: 1562842
gagcaagugcuccagguaa

SEQ ID NO: 1776716 - RNA, 19 nt, Artificial Sequence
  Description of Artificial Sequence: Synthetic oligonucleotide
  Antisense strand to SEQ ID NO: 1776715
uuaccuggagcacuugcuc

SEQ ID NO: 1776717 - RNA, 19 nt, Artificial Sequence
  Description of Artificial Sequence: Synthetic oligonucleotide
  Sense strand starting at position 828 of SEQ ID NO: 1562842
gcaagugcuccagguaaca

SEQ ID NO: 1776718 - RNA, 19 nt, Artificial Sequence
  Description of Artificial Sequence: Synthetic oligonucleotide
  Antisense strand to SEQ ID NO: 1776717
uguuaccuggagcacuugc

SEQ ID NO: 1776719 - RNA, 19 nt, Artificial Sequence
  Description of Artificial Sequence: Synthetic oligonucleotide
  Sense strand starting at position 1378 of SEQ ID NO: 1562842
gcuuuagaaagaugggcuu

SEQ ID NO: 1776720 - RNA, 19 nt, Artificial Sequence
  Description of Artificial Sequence: Synthetic oligonucleotide
  Antisense strand to SEQ ID NO: 1776719
aagcccaucuuucuaaagc

SEQ ID NO: 1776721 - RNA, 19 nt, Artificial Sequence
  Description of Artificial Sequence: Synthetic oligonucleotide
  Sense strand starting at position 1426 of SEQ ID NO: 1562842
ggcgcagcgcguucugaaa

SEQ ID NO: 1776722 - RNA, 19 nt, Artificial Sequence
  Description of Artificial Sequence: Synthetic oligonucleotide
  Antisense strand to SEQ ID NO: 1776721
uuucagaacgcgcugcgcc

SEQ ID NO: 1776723 - RNA, 19 nt, Artificial Sequence
  Description of Artificial Sequence: Synthetic oligonucleotide
  Sense strand starting at position 2341 of SEQ ID NO: 1562842
uuccaagaguucuuaugag

SEQ ID NO: 1776724 - RNA, 19 nt, Artificial Sequence
  Description of Artificial Sequence: Synthetic oligonucleotide
  Antisense strand to SEQ ID NO: 1776723
cucauaagaacucuuggaa

SEQ ID NO: 1776725 - RNA, 19 nt, Artificial Sequence
  Description of Artificial Sequence: Synthetic oligonucleotide
  Sense strand starting at position 2350 of SEQ ID NO: 1562842
uucuuaugaguggguguga

SEQ ID NO: 1776726 - RNA, 19 nt, Artificial Sequence
  Description of Artificial Sequence: Synthetic oligonucleotide
  Antisense strand to SEQ ID NO: 1776725
ucacacccacucauaagaa

SEQ ID NO: 1776727 - RNA, 19 nt, Artificial Sequence
  Description of Artificial Sequence: Synthetic oligonucleotide
  Sense strand starting at position 2351 of SEQ ID NO: 1562842
ucuuaugagugggugugaa

SEQ ID NO: 1776728 - RNA, 19 nt, Artificial Sequence
  Description of Artificial Sequence: Synthetic oligonucleotide
  Antisense strand to SEQ ID NO: 1776727
uucacacccacucauaaga

SEQ ID NO: 1776729 - RNA, 19 nt, Artificial Sequence
  Description of Artificial Sequence: Synthetic oligonucleotide
  Sense strand starting at position 2355 of SEQ ID NO: 1562842
augagugggugugaaauuu

SEQ ID NO: 1776730 - RNA, 19 nt, Artificial Sequence
  Description of Artificial Sequence: Synthetic oligonucleotide
  Antisense strand to SEQ ID NO: 1776729
aaauuucacacccacucau

SEQ ID NO: 1776731 - RNA, 19 nt, Artificial Sequence
  Description of Artificial Sequence: Synthetic oligonucleotide
  Sense strand starting at position 2463 of SEQ ID NO: 1562842
aacucacuuggucacgauu

SEQ ID NO: 1776732 - RNA, 19 nt, Artificial Sequence
  Description of Artificial Sequence: Synthetic oligonucleotide
  Antisense strand to SEQ ID NO: 1776731
aaucgugaccaagugaguu

SEQ ID NO: 1776733 - RNA, 19 nt, Artificial Sequence
  Description of Artificial Sequence: Synthetic oligonucleotide
  Sense strand starting at position 2494 of SEQ ID NO: 1562842
gguguauugccugacucag

SEQ ID NO: 1776734 - RNA, 19 nt, Artificial Sequence
  Description of Artificial Sequence: Synthetic oligonucleotide
  Antisense strand to SEQ ID NO: 1776733
cugagucaggcaauacacc

SEQ ID NO: 1776735 - RNA, 19 nt, Artificial Sequence
  Description of Artificial Sequence: Synthetic oligonucleotide
  Sense strand starting at position 2518 of SEQ ID NO: 1562842
uaacgcuuuguccaagguu

SEQ ID NO: 1776736 - RNA, 19 nt, Artificial Sequence
  Description of Artificial Sequence: Synthetic oligonucleotide
  Antisense strand to SEQ ID NO: 1776735
aaccuuggacaaagcguua

SEQ ID NO: 1776737 - RNA, 19 nt, Artificial Sequence
  Description of Artificial Sequence: Synthetic oligonucleotide
  Sense strand starting at position 2705 of SEQ ID NO: 1562842
gagauuucuuugugggaag

SEQ ID NO: 1776738 - RNA, 19 nt, Artificial Sequence
  Description of Artificial Sequence: Synthetic oligonucleotide
  Antisense strand to SEQ ID NO: 1776737
cuucccacaaagaaaucuc

SEQ ID NO: 1776739 - RNA, 19 nt, Artificial Sequence
  Description of Artificial Sequence: Synthetic oligonucleotide
  Sense strand starting at position 2767 of SEQ ID NO: 1562842
ucaaguuaucaagguaaua

SEQ ID NO: 1776740 - RNA, 19 nt, Artificial Sequence
  Description of Artificial Sequence: Synthetic oligonucleotide
  Antisense strand to SEQ ID NO: 1776739
uauuaccuugauaacuuga

SEQ ID NO: 1776741 - RNA, 19 nt, Artificial Sequence
  Description of Artificial Sequence: Synthetic oligonucleotide
  Sense strand starting at position 2841 of SEQ ID NO: 1562842
gaugucagauuauuggcau

SEQ ID NO: 1776742 - RNA, 19 nt, Artificial Sequence
  Description of Artificial Sequence: Synthetic oligonucleotide
  Antisense strand to SEQ ID NO: 1776741
augccaauaaucugacauc

SEQ ID NO: 1776743 - RNA, 19 nt, Artificial Sequence
  Description of Artificial Sequence: Synthetic oligonucleotide
  Sense strand starting at position 2844 of SEQ ID NO: 1562842
gucagauuauuggcauaaa

SEQ ID NO: 1776744 - RNA, 19 nt, Artificial Sequence
  Description of Artificial Sequence: Synthetic oligonucleotide
  Antisense strand to SEQ ID NO: 1776743
uuuaugccaauaaucugac

SEQ ID NO: 1776745 - RNA, 19 nt, Artificial Sequence
  Description of Artificial Sequence: Synthetic oligonucleotide
  Sense strand starting at position 2847 of SEQ ID NO: 1562842
agauuauuggcauaaaguu

SEQ ID NO: 1776746 - RNA, 19 nt, Artificial Sequence
  Description of Artificial Sequence: Synthetic oligonucleotide
  Antisense strand to SEQ ID NO: 1776745
aacuuuaugccaauaaucu

SEQ ID NO: 1776747 - RNA, 19 nt, Artificial Sequence
  Description of Artificial Sequence: Synthetic oligonucleotide
  Sense strand starting at position 2895 of SEQ ID NO: 1562842
acgucuguaugguccauaa

SEQ ID NO: 1776748 - RNA, 19 nt, Artificial Sequence
  Description of Artificial Sequence: Synthetic oligonucleotide
  Antisense strand to SEQ ID NO: 1776747
uuauggaccauacagacgu

SEQ ID NO: 1776749 - RNA, 19 nt, Artificial Sequence
  Description of Artificial Sequence: Synthetic oligonucleotide
  Sense strand starting at position 2897 of SEQ ID NO: 1562842
gucuguaugguccauaaug

SEQ ID NO: 1776750 - RNA, 19 nt, Artificial Sequence
  Description of Artificial Sequence: Synthetic oligonucleotide
  Antisense strand to SEQ ID NO: 1776749
cauuauggaccauacagac

SEQ ID NO: 1776751 - RNA, 19 nt, Artificial Sequence
  Description of Artificial Sequence: Synthetic oligonucleotide
  Sense strand starting at position 2899 of SEQ ID NO: 1562842
cuguaugguccauaaugau

SEQ ID NO: 1776752 - RNA, 19 nt, Artificial Sequence
  Description of Artificial Sequence: Synthetic oligonucleotide
  Antisense strand to SEQ ID NO: 1776751
aucauuauggaccauacag

SEQ ID NO: 1776753 - RNA, 19 nt, Artificial Sequence
  Description of Artificial Sequence: Synthetic oligonucleotide
  Sense strand starting at position 2966 of SEQ ID NO: 1562842
uuuccuugaucagucuaua

SEQ ID NO: 1776754 - RNA, 19 nt, Artificial Sequence
  Description of Artificial Sequence: Synthetic oligonucleotide
  Antisense strand to SEQ ID NO: 1776753
uauagacugaucaaggaaa

SEQ ID NO: 1776755 - RNA, 19 nt, Artificial Sequence
  Description of Artificial Sequence: Synthetic oligonucleotide
  Sense strand starting at position 3351 of SEQ ID NO: 1562842
uuacuauuccagugguuuc

SEQ ID NO: 1776756 - RNA, 19 nt, Artificial Sequence
  Description of Artificial Sequence: Synthetic oligonucleotide
  Antisense strand to SEQ ID NO: 1776755
gaaaccacuggaauaguaa

SEQ ID NO: 1776757 - RNA, 19 nt, Artificial Sequence
  Description of Artificial Sequence: Synthetic oligonucleotide
  Sense strand starting at position 3740 of SEQ ID NO: 1562842
cuaggucagaucugucagu

SEQ ID NO: 1776758 - RNA, 19 nt, Artificial Sequence
  Description of Artificial Sequence: Synthetic oligonucleotide
  Antisense strand to SEQ ID NO: 1776757
acugacagaucugaccuag

SEQ ID NO: 1776759 - RNA, 19 nt, Artificial Sequence
  Description of Artificial Sequence: Synthetic oligonucleotide
  Sense strand starting at position 3745 of SEQ ID NO: 1562842
ucagaucugucagucugau

SEQ ID NO: 1776760 - RNA, 19 nt, Artificial Sequence
  Description of Artificial Sequence: Synthetic oligonucleotide
  Antisense strand to SEQ ID NO: 1776759
aucagacugacagaucuga

SEQ ID NO: 1776761 - RNA, 19 nt, Artificial Sequence
  Description of Artificial Sequence: Synthetic oligonucleotide
  Sense strand starting at position 3807 of SEQ ID NO: 1562842
uaguucuugcugugggaag

SEQ ID NO: 1776762 - RNA, 19 nt, Artificial Sequence
  Description of Artificial Sequence: Synthetic oligonucleotide
  Antisense strand to SEQ ID NO: 1776761
cuucccacagcaagaacua

SEQ ID NO: 1776763 - RNA, 19 nt, Artificial Sequence
  Description of Artificial Sequence: Synthetic oligonucleotide
  Sense strand starting at position 3936 of SEQ ID NO: 1562842
gugggagauuagcuuggaa

SEQ ID NO: 1776764 - RNA, 19 nt, Artificial Sequence
  Description of Artificial Sequence: Synthetic oligonucleotide
  Antisense strand to SEQ ID NO: 1776763
uuccaagcuaaucucccac

SEQ ID NO: 1776765 - RNA, 19 nt, Artificial Sequence
  Description of Artificial Sequence: Synthetic oligonucleotide
  Sense strand starting at position 3938 of SEQ ID NO: 1562842
gggagauuagcuuggaaac

SEQ ID NO: 1776766 - RNA, 19 nt, Artificial Sequence
  Description of Artificial Sequence: Synthetic oligonucleotide
  Antisense strand to SEQ ID NO: 1776765
guuuccaagcuaaucuccc

SEQ ID NO: 1776767 - RNA, 19 nt, Artificial Sequence
  Description of Artificial Sequence: Synthetic oligonucleotide
  Sense strand starting at position 3940 of SEQ ID NO: 1562842
gagauuagcuuggaaacaa

SEQ ID NO: 1776768 - RNA, 19 nt, Artificial Sequence
  Description of Artificial Sequence: Synthetic oligonucleotide
  Antisense strand to SEQ ID NO: 1776767
uuguuuccaagcuaaucuc

SEQ ID NO: 1776769 - RNA, 19 nt, Artificial Sequence
  Description of Artificial Sequence: Synthetic oligonucleotide
  Sense strand starting at position 246 of SEQ ID NO: 1562843
cuuagugucaccugaggua

SEQ ID NO: 1776770 - RNA, 19 nt, Artificial Sequence
  Description of Artificial Sequence: Synthetic oligonucleotide
  Antisense strand to SEQ ID NO: 1776769
uaccucaggugacacuaag

SEQ ID NO: 1776771 - RNA, 19 nt, Artificial Sequence
  Description of Artificial Sequence: Synthetic oligonucleotide
  Sense strand starting at position 274 of SEQ ID NO: 1562843
agaaguuaucuuggccaua

SEQ ID NO: 1776772 - RNA, 19 nt, Artificial Sequence
  Description of Artificial Sequence: Synthetic oligonucleotide
  Antisense strand to SEQ ID NO: 1776771
uauggccaagauaacuucu

SEQ ID NO: 1776773 - RNA, 19 nt, Artificial Sequence
  Description of Artificial Sequence: Synthetic oligonucleotide
  Sense strand starting at position 275 of SEQ ID NO: 1562843
gaaguuaucuuggccauaa

SEQ ID NO: 1776774 - RNA, 19 nt, Artificial Sequence
  Description of Artificial Sequence: Synthetic oligonucleotide
  Antisense strand to SEQ ID NO: 1776773
uuauggccaagauaacuuc

SEQ ID NO: 1776775 - RNA, 19 nt, Artificial Sequence
  Description of Artificial Sequence: Synthetic oligonucleotide
  Sense strand starting at position 454 of SEQ ID NO: 1562843
agcccaguuuccucagaag

SEQ ID NO: 1776776 - RNA, 19 nt, Artificial Sequence
  Description of Artificial Sequence: Synthetic oligonucleotide
  Antisense strand to SEQ ID NO: 1776775
cuucugaggaaacugggcu

SEQ ID NO: 1776777 - RNA, 19 nt, Artificial Sequence
  Description of Artificial Sequence: Synthetic oligonucleotide
  Sense strand starting at position 482 of SEQ ID NO: 1562843
agugguuguggaggugaca

SEQ ID NO: 1776778 - RNA, 19 nt, Artificial Sequence
  Description of Artificial Sequence: Synthetic oligonucleotide
  Antisense strand to SEQ ID NO: 1776777
ugucaccuccacaaccacu

SEQ ID NO: 1776779 - RNA, 19 nt, Artificial Sequence
  Description of Artificial Sequence: Synthetic oligonucleotide
  Sense strand starting at position 567 of SEQ ID NO: 1562843
uggacuagguccuuaacua

SEQ ID NO: 1776780 - RNA, 19 nt, Artificial Sequence
  Description of Artificial Sequence: Synthetic oligonucleotide
  Antisense strand to SEQ ID NO: 1776779
uaguuaaggaccuagucca

SEQ ID NO: 1776781 - RNA, 19 nt, Artificial Sequence
  Description of Artificial Sequence: Synthetic oligonucleotide
  Sense strand starting at position 595 of SEQ ID NO: 1562843
uguugccaucuguaagaug

SEQ ID NO: 1776782 - RNA, 19 nt, Artificial Sequence
  Description of Artificial Sequence: Synthetic oligonucleotide
  Antisense strand to SEQ ID NO: 1776781
caucuuacagauggcaaca

SEQ ID NO: 1776783 - RNA, 19 nt, Artificial Sequence
  Description of Artificial Sequence: Synthetic oligonucleotide
  Sense strand starting at position 613 of SEQ ID NO: 1562843
ggagacuaaucgucacuac

SEQ ID NO: 1776784 - RNA, 19 nt, Artificial Sequence
  Description of Artificial Sequence: Synthetic oligonucleotide
  Antisense strand to SEQ ID NO: 1776783
guagugacgauuagucucc

SEQ ID NO: 1776785 - RNA, 19 nt, Artificial Sequence
  Description of Artificial Sequence: Synthetic oligonucleotide
  Sense strand starting at position 648 of SEQ ID NO: 1562843
aggguuaaguggcagaaca

SEQ ID NO: 1776786 - RNA, 19 nt, Artificial Sequence
  Description of Artificial Sequence: Synthetic oligonucleotide
  Antisense strand to SEQ ID NO: 1776785
uguucugccacuuaacccu

SEQ ID NO: 1776787 - RNA, 19 nt, Artificial Sequence
  Description of Artificial Sequence: Synthetic oligonucleotide
  Sense strand starting at position 699 of SEQ ID NO: 1562843
acgcguuaagugcuaugua

SEQ ID NO: 1776788 - RNA, 19 nt, Artificial Sequence
  Description of Artificial Sequence: Synthetic oligonucleotide
  Antisense strand to SEQ ID NO: 1776787
uacauagcacuuaacgcgu

SEQ ID NO: 1776789 - RNA, 19 nt, Artificial Sequence
  Description of Artificial Sequence: Synthetic oligonucleotide
  Sense strand starting at position 702 of SEQ ID NO: 1562843
cguuaagugcuauguaaau

SEQ ID NO: 1776790 - RNA, 19 nt, Artificial Sequence
  Description of Artificial Sequence: Synthetic oligonucleotide
  Antisense strand to SEQ ID NO: 1776789
auuuacauagcacuuaacg

SEQ ID NO: 1776791 - RNA, 19 nt, Artificial Sequence
  Description of Artificial Sequence: Synthetic oligonucleotide
  Sense strand starting at position 711 of SEQ ID NO: 1562843
cuauguaaauggccacuua

SEQ ID NO: 1776792 - RNA, 19 nt, Artificial Sequence
  Description of Artificial Sequence: Synthetic oligonucleotide
  Antisense strand to SEQ ID NO: 1776791
uaaguggccauuuacauag

SEQ ID NO: 1776793 - RNA, 19 nt, Artificial Sequence
  Description of Artificial Sequence: Synthetic oligonucleotide
  Sense strand starting at position 769 of SEQ ID NO: 1562843
aguacuaucgauuaucuuu

SEQ ID NO: 1776794 - RNA, 19 nt, Artificial Sequence
  Description of Artificial Sequence: Synthetic oligonucleotide
  Antisense strand to SEQ ID NO: 1776793
aaagauaaucgauaguacu

SEQ ID NO: 1776795 - RNA, 19 nt, Artificial Sequence
  Description of Artificial Sequence: Synthetic oligonucleotide
  Sense strand starting at position 816 of SEQ ID NO: 1562843
acuggagaaucucaacaaa

SEQ ID NO: 1776796 - RNA, 19 nt, Artificial Sequence
  Description of Artificial Sequence: Synthetic oligonucleotide
  Antisense strand to SEQ ID NO: 1776795
uuuguugagauucuccagu

SEQ ID NO: 1776797 - RNA, 19 nt, Artificial Sequence
  Description of Artificial Sequence: Synthetic oligonucleotide
  Sense strand starting at position 1049 of SEQ ID NO: 1562843
gcgcguguucuaccgaaga

SEQ ID NO: 1776798 - RNA, 19 nt, Artificial Sequence
  Description of Artificial Sequence: Synthetic oligonucleotide
  Antisense strand to SEQ ID NO: 1776797
ucuucgguagaacacgcgc

SEQ ID NO: 1776799 - RNA, 19 nt, Artificial Sequence
  Description of Artificial Sequence: Synthetic oligonucleotide
  Sense strand starting at position 1051 of SEQ ID NO: 1562843
gcguguucuaccgaagaga

SEQ ID NO: 1776800 - RNA, 19 nt, Artificial Sequence
  Description of Artificial Sequence: Synthetic oligonucleotide
  Antisense strand to SEQ ID NO: 1776799
ucucuucgguagaacacgc

SEQ ID NO: 1776801 - RNA, 19 nt, Artificial Sequence
  Description of Artificial Sequence: Synthetic oligonucleotide
  Sense strand starting at position 1076 of SEQ ID NO: 1562843
gagcaagugcuccagguaa

SEQ ID NO: 1776802 - RNA, 19 nt, Artificial Sequence
  Description of Artificial Sequence: Synthetic oligonucleotide
  Antisense strand to SEQ ID NO: 1776801
uuaccuggagcacuugcuc

SEQ ID NO: 1776803 - RNA, 19 nt, Artificial Sequence
  Description of Artificial Sequence: Synthetic oligonucleotide
  Sense strand starting at position 1078 of SEQ ID NO: 1562843
gcaagugcuccagguaaca

SEQ ID NO: 1776804 - RNA, 19 nt, Artificial Sequence
  Description of Artificial Sequence: Synthetic oligonucleotide
  Antisense strand to SEQ ID NO: 1776803
uguuaccuggagcacuugc

SEQ ID NO: 1776805 - RNA, 19 nt, Artificial Sequence
  Description of Artificial Sequence: Synthetic oligonucleotide
  Sense strand starting at position 1628 of SEQ ID NO: 1562843
gcuuuagaaagaugggcuu

SEQ ID NO: 1776806 - RNA, 19 nt, Artificial Sequence
  Description of Artificial Sequence: Synthetic oligonucleotide
  Antisense strand to SEQ ID NO: 1776805
aagcccaucuuucuaaagc

SEQ ID NO: 1776807 - RNA, 19 nt, Artificial Sequence
  Description of Artificial Sequence: Synthetic oligonucleotide
  Sense strand starting at position 1676 of SEQ ID NO: 1562843
ggcgcagcgcguucugaaa

SEQ ID NO: 1776808 - RNA, 19 nt, Artificial Sequence
  Description of Artificial Sequence: Synthetic oligonucleotide
  Antisense strand to SEQ ID NO: 1776807
uuucagaacgcgcugcgcc

SEQ ID NO: 1776809 - RNA, 19 nt, Artificial Sequence
  Description of Artificial Sequence: Synthetic oligonucleotide
  Sense strand starting at position 2591 of SEQ ID NO: 1562843
uuccaagaguucuuaugag

SEQ ID NO: 1776810 - RNA, 19 nt, Artificial Sequence
  Description of Artificial Sequence: Synthetic oligonucleotide
  Antisense strand to SEQ ID NO: 1776809
cucauaagaacucuuggaa

SEQ ID NO: 1776811 - RNA, 19 nt, Artificial Sequence
  Description of Artificial Sequence: Synthetic oligonucleotide
  Sense strand starting at position 2600 of SEQ ID NO: 1562843
uucuuaugaguggguguga

SEQ ID NO: 1776812 - RNA, 19 nt, Artificial Sequence
  Description of Artificial Sequence: Synthetic oligonucleotide
  Antisense strand to SEQ ID NO: 1776811
ucacacccacucauaagaa

SEQ ID NO: 1776813 - RNA, 19 nt, Artificial Sequence
  Description of Artificial Sequence: Synthetic oligonucleotide
  Sense strand starting at position 2601 of SEQ ID NO: 1562843
ucuuaugagugggugugaa

SEQ ID NO: 1776814 - RNA, 19 nt, Artificial Sequence
  Description of Artificial Sequence: Synthetic oligonucleotide
  Antisense strand to SEQ ID NO: 1776813
uucacacccacucauaaga

SEQ ID NO: 1776815 - RNA, 19 nt, Artificial Sequence
  Description of Artificial Sequence: Synthetic oligonucleotide
  Sense strand starting at position 2605 of SEQ ID NO: 1562843
augagugggugugaaauuu

SEQ ID NO: 1776816 - RNA, 19 nt, Artificial Sequence
  Description of Artificial Sequence: Synthetic oligonucleotide
  Antisense strand to SEQ ID NO: 1776815
aaauuucacacccacucau

SEQ ID NO: 1776817 - RNA, 19 nt, Artificial Sequence
  Description of Artificial Sequence: Synthetic oligonucleotide
  Sense strand starting at position 2713 of SEQ ID NO: 1562843
aacucacuuggucacgauu

SEQ ID NO: 1776818 - RNA, 19 nt, Artificial Sequence
  Description of Artificial Sequence: Synthetic oligonucleotide
  Antisense strand to SEQ ID NO: 1776817
aaucgugaccaagugaguu

SEQ ID NO: 1776819 - RNA, 19 nt, Artificial Sequence
  Description of Artificial Sequence: Synthetic oligonucleotide
  Sense strand starting at position 2743 of SEQ ID NO: 1562843
ugguguauugccugacuca

SEQ ID NO: 1776820 - RNA, 19 nt, Artificial Sequence
  Description of Artificial Sequence: Synthetic oligonucleotide
  Antisense strand to SEQ ID NO: 1776819
ugagucaggcaauacacca

SEQ ID NO: 1776821 - RNA, 19 nt, Artificial Sequence
  Description of Artificial Sequence: Synthetic oligonucleotide
  Sense strand starting at position 2744 of SEQ ID NO: 1562843
gguguauugccugacucag

SEQ ID NO: 1776822 - RNA, 19 nt, Artificial Sequence
  Description of Artificial Sequence: Synthetic oligonucleotide
  Antisense strand to SEQ ID NO: 1776821
cugagucaggcaauacacc

SEQ ID NO: 1776823 - RNA, 19 nt, Artificial Sequence
  Description of Artificial Sequence: Synthetic oligonucleotide
  Sense strand starting at position 2764 of SEQ ID NO: 1562843
uugguaacgcuuuguccaa

SEQ ID NO: 1776824 - RNA, 19 nt, Artificial Sequence
  Description of Artificial Sequence: Synthetic oligonucleotide
  Antisense strand to SEQ ID NO: 1776823
uuggacaaagcguuaccaa

SEQ ID NO: 1776825 - RNA, 19 nt, Artificial Sequence
  Description of Artificial Sequence: Synthetic oligonucleotide
  Sense strand starting at position 2768 of SEQ ID NO: 1562843
uaacgcuuuguccaagguu

SEQ ID NO: 1776826 - RNA, 19 nt, Artificial Sequence
  Description of Artificial Sequence: Synthetic oligonucleotide
  Antisense strand to SEQ ID NO: 1776825
aaccuuggacaaagcguua

SEQ ID NO: 1776827 - RNA, 19 nt, Artificial Sequence
  Description of Artificial Sequence: Synthetic oligonucleotide
  Sense strand starting at position 2955 of SEQ ID NO: 1562843
gagauuucuuugugggaag

SEQ ID NO: 1776828 - RNA, 19 nt, Artificial Sequence
  Description of Artificial Sequence: Synthetic oligonucleotide
  Antisense strand to SEQ ID NO: 1776827
cuucccacaaagaaaucuc

SEQ ID NO: 1776829 - RNA, 19 nt, Artificial Sequence
  Description of Artificial Sequence: Synthetic oligonucleotide
  Sense strand starting at position 3017 of SEQ ID NO: 1562843
ucaaguuaucaagguaaua

SEQ ID NO: 1776830 - RNA, 19 nt, Artificial Sequence
  Description of Artificial Sequence: Synthetic oligonucleotide
  Antisense strand to SEQ ID NO: 1776829
uauuaccuugauaacuuga

SEQ ID NO: 1776831 - RNA, 19 nt, Artificial Sequence
  Description of Artificial Sequence: Synthetic oligonucleotide
  Sense strand starting at position 3091 of SEQ ID NO: 1562843
gaugucagauuauuggcau

SEQ ID NO: 1776832 - RNA, 19 nt, Artificial Sequence
  Description of Artificial Sequence: Synthetic oligonucleotide
  Antisense strand to SEQ ID NO: 1776831
augccaauaaucugacauc

SEQ ID NO: 1776833 - RNA, 19 nt, Artificial Sequence
  Description of Artificial Sequence: Synthetic oligonucleotide
  Sense strand starting at position 3094 of SEQ ID NO: 1562843
gucagauuauuggcauaaa

SEQ ID NO: 1776834 - RNA, 19 nt, Artificial Sequence
  Description of Artificial Sequence: Synthetic oligonucleotide
  Antisense strand to SEQ ID NO: 1776833
uuuaugccaauaaucugac

SEQ ID NO: 1776835 - RNA, 19 nt, Artificial Sequence
  Description of Artificial Sequence: Synthetic oligonucleotide
  Sense strand starting at position 3095 of SEQ ID NO: 1562843
ucagauuauuggcauaaag

SEQ ID NO: 1776836 - RNA, 19 nt, Artificial Sequence
  Description of Artificial Sequence: Synthetic oligonucleotide
  Antisense strand to SEQ ID NO: 1776835
cuuuaugccaauaaucuga

SEQ ID NO: 1776837 - RNA, 19 nt, Artificial Sequence
  Description of Artificial Sequence: Synthetic oligonucleotide
  Sense strand starting at position 3097 of SEQ ID NO: 1562843
agauuauuggcauaaaguu

SEQ ID NO: 1776838 - RNA, 19 nt, Artificial Sequence
  Description of Artificial Sequence: Synthetic oligonucleotide
  Antisense strand to SEQ ID NO: 1776837
aacuuuaugccaauaaucu

SEQ ID NO: 1776839 - RNA, 19 nt, Artificial Sequence
  Description of Artificial Sequence: Synthetic oligonucleotide
  Sense strand starting at position 3145 of SEQ ID NO: 1562843
acgucuguaugguccauaa

SEQ ID NO: 1776840 - RNA, 19 nt, Artificial Sequence
  Description of Artificial Sequence: Synthetic oligonucleotide
  Antisense strand to SEQ ID NO: 1776839
uuauggaccauacagacgu

SEQ ID NO: 1776841 - RNA, 19 nt, Artificial Sequence
  Description of Artificial Sequence: Synthetic oligonucleotide
  Sense strand starting at position 3147 of SEQ ID NO: 1562843
gucuguaugguccauaaug

SEQ ID NO: 1776842 - RNA, 19 nt, Artificial Sequence
  Description of Artificial Sequence: Synthetic oligonucleotide
  Antisense strand to SEQ ID NO: 1776841
cauuauggaccauacagac

SEQ ID NO: 1776843 - RNA, 19 nt, Artificial Sequence
  Description of Artificial Sequence: Synthetic oligonucleotide
  Sense strand starting at position 3149 of SEQ ID NO: 1562843
cuguaugguccauaaugau

SEQ ID NO: 1776844 - RNA, 19 nt, Artificial Sequence
  Description of Artificial Sequence: Synthetic oligonucleotide
  Antisense strand to SEQ ID NO: 1776843
aucauuauggaccauacag

SEQ ID NO: 1776845 - RNA, 19 nt, Artificial Sequence
  Description of Artificial Sequence: Synthetic oligonucleotide
  Sense strand starting at position 3216 of SEQ ID NO: 1562843
uuuccuugaucagucuaua

SEQ ID NO: 1776846 - RNA, 19 nt, Artificial Sequence
  Description of Artificial Sequence: Synthetic oligonucleotide
  Antisense strand to SEQ ID NO: 1776845
uauagacugaucaaggaaa

SEQ ID NO: 1776847 - RNA, 19 nt, Artificial Sequence
  Description of Artificial Sequence: Synthetic oligonucleotide
  Sense strand starting at position 3601 of SEQ ID NO: 1562843
uuacuauuccagugguuuc

SEQ ID NO: 1776848 - RNA, 19 nt, Artificial Sequence
  Description of Artificial Sequence: Synthetic oligonucleotide
  Antisense strand to SEQ ID NO: 1776847
gaaaccacuggaauaguaa

SEQ ID NO: 1776849 - RNA, 19 nt, Artificial Sequence
  Description of Artificial Sequence: Synthetic oligonucleotide
  Sense strand starting at position 506 of SEQ ID NO: 1562844
cuuccuucuccgugugaca

SEQ ID NO: 1776850 - RNA, 19 nt, Artificial Sequence
  Description of Artificial Sequence: Synthetic oligonucleotide
  Antisense strand to SEQ ID NO: 1776849
ugucacacggagaaggaag

SEQ ID NO: 1776851 - RNA, 19 nt, Artificial Sequence
  Description of Artificial Sequence: Synthetic oligonucleotide
  Sense strand starting at position 619 of SEQ ID NO: 1562844
ggaacucuugcaugggaag

SEQ ID NO: 1776852 - RNA, 19 nt, Artificial Sequence
  Description of Artificial Sequence: Synthetic oligonucleotide
  Antisense strand to SEQ ID NO: 1776851
cuucccaugcaagaguucc

SEQ ID NO: 1776853 - RNA, 19 nt, Artificial Sequence
  Description of Artificial Sequence: Synthetic oligonucleotide
  Sense strand starting at position 818 of SEQ ID NO: 1562844
gcagaaacauguccugaug

SEQ ID NO: 1776854 - RNA, 19 nt, Artificial Sequence
  Description of Artificial Sequence: Synthetic oligonucleotide
  Antisense strand to SEQ ID NO: 1776853
caucaggacauguuucugc

SEQ ID NO: 1776855 - RNA, 19 nt, Artificial Sequence
  Description of Artificial Sequence: Synthetic oligonucleotide
  Sense strand starting at position 821 of SEQ ID NO: 1562844
gaaacauguccugaugccu

SEQ ID NO: 1776856 - RNA, 19 nt, Artificial Sequence
  Description of Artificial Sequence: Synthetic oligonucleotide
  Antisense strand to SEQ ID NO: 1776855
aggcaucaggacauguuuc

SEQ ID NO: 1776857 - RNA, 19 nt, Artificial Sequence
  Description of Artificial Sequence: Synthetic oligonucleotide
  Sense strand starting at position 1033 of SEQ ID NO: 1562844
gugagacccuguggucaga

SEQ ID NO: 1776858 - RNA, 19 nt, Artificial Sequence
  Description of Artificial Sequence: Synthetic oligonucleotide
  Antisense strand to SEQ ID NO: 1776857
ucugaccacagggucucac

SEQ ID NO: 1776859 - RNA, 19 nt, Artificial Sequence
  Description of Artificial Sequence: Synthetic oligonucleotide
  Sense strand starting at position 1140 of SEQ ID NO: 1562844
gguaucaauguguaacucu

SEQ ID NO: 1776860 - RNA, 19 nt, Artificial Sequence
  Description of Artificial Sequence: Synthetic oligonucleotide
  Antisense strand to SEQ ID NO: 1776859
agaguuacacauugauacc

SEQ ID NO: 1776861 - RNA, 19 nt, Artificial Sequence
  Description of Artificial Sequence: Synthetic oligonucleotide
  Sense strand starting at position 1147 of SEQ ID NO: 1562844
auguguaacucucaagaca

SEQ ID NO: 1776862 - RNA, 19 nt, Artificial Sequence
  Description of Artificial Sequence: Synthetic oligonucleotide
  Antisense strand to SEQ ID NO: 1776861
ugucuugagaguuacacau

SEQ ID NO: 1776863 - RNA, 19 nt, Artificial Sequence
  Description of Artificial Sequence: Synthetic oligonucleotide
  Sense strand starting at position 1196 of SEQ ID NO: 1562844
cccagugaaagauguggaa

SEQ ID NO: 1776864 - RNA, 19 nt, Artificial Sequence
  Description of Artificial Sequence: Synthetic oligonucleotide
  Antisense strand to SEQ ID NO: 1776863
uuccacaucuuucacuggg

SEQ ID NO: 1776865 - RNA, 19 nt, Artificial Sequence
  Description of Artificial Sequence: Synthetic oligonucleotide
  Sense strand starting at position 1199 of SEQ ID NO: 1562844
agugaaagauguggaaauc

SEQ ID NO: 1776866 - RNA, 19 nt, Artificial Sequence
  Description of Artificial Sequence: Synthetic oligonucleotide
  Antisense strand to SEQ ID NO: 1776865
gauuuccacaucuuucacu

SEQ ID NO: 1776867 - RNA, 19 nt, Artificial Sequence
  Description of Artificial Sequence: Synthetic oligonucleotide
  Sense strand starting at position 1243 of SEQ ID NO: 1562844
ugucccuauuucuguugaa

SEQ ID NO: 1776868 - RNA, 19 nt, Artificial Sequence
  Description of Artificial Sequence: Synthetic oligonucleotide
  Antisense strand to SEQ ID NO: 1776867
uucaacagaaauagggaca

SEQ ID NO: 1776869 - RNA, 19 nt, Artificial Sequence
  Description of Artificial Sequence: Synthetic oligonucleotide
  Sense strand starting at position 1275 of SEQ ID NO: 1562844
auguaucuuuccuagaaug

SEQ ID NO: 1776870 - RNA, 19 nt, Artificial Sequence
  Description of Artificial Sequence: Synthetic oligonucleotide
  Antisense strand to SEQ ID NO: 1776869
cauucuaggaaagauacau

SEQ ID NO: 1776871 - RNA, 19 nt, Artificial Sequence
  Description of Artificial Sequence: Synthetic oligonucleotide
  Sense strand starting at position 1277 of SEQ ID NO: 1562844
guaucuuuccuagaaugua

SEQ ID NO: 1776872 - RNA, 19 nt, Artificial Sequence
  Description of Artificial Sequence: Synthetic oligonucleotide
  Antisense strand to SEQ ID NO: 1776871
uacauucuaggaaagauac

SEQ ID NO: 1776873 - RNA, 19 nt, Artificial Sequence
  Description of Artificial Sequence: Synthetic oligonucleotide
  Sense strand starting at position 1280 of SEQ ID NO: 1562844
ucuuuccuagaauguaagu

SEQ ID NO: 1776874 - RNA, 19 nt, Artificial Sequence
  Description of Artificial Sequence: Synthetic oligonucleotide
  Antisense strand to SEQ ID NO: 1776873
acuuacauucuaggaaaga

SEQ ID NO: 1776875 - RNA, 19 nt, Artificial Sequence
  Description of Artificial Sequence: Synthetic oligonucleotide
  Sense strand starting at position 1314 of SEQ ID NO: 1562844
cuguauuaauugcaguuau

SEQ ID NO: 1776876 - RNA, 19 nt, Artificial Sequence
  Description of Artificial Sequence: Synthetic oligonucleotide
  Antisense strand to SEQ ID NO: 1776875
auaacugcaauuaauacag

SEQ ID NO: 1776877 - RNA, 19 nt, Artificial Sequence
  Description of Artificial Sequence: Synthetic oligonucleotide
  Sense strand starting at position 1325 of SEQ ID NO: 1562844
gcaguuauuuaaugucacu

SEQ ID NO: 1776878 - RNA, 19 nt, Artificial Sequence
  Description of Artificial Sequence: Synthetic oligonucleotide
  Antisense strand to SEQ ID NO: 1776877
agugacauuaaauaacugc

SEQ ID NO: 1776879 - RNA, 19 nt, Artificial Sequence
  Description of Artificial Sequence: Synthetic oligonucleotide
  Sense strand starting at position 1347 of SEQ ID NO: 1562844
gccagaugacauugcuacu

SEQ ID NO: 1776880 - RNA, 19 nt, Artificial Sequence
  Description of Artificial Sequence: Synthetic oligonucleotide
  Antisense strand to SEQ ID NO: 1776879
aguagcaaugucaucuggc

SEQ ID NO: 1776881 - RNA, 19 nt, Artificial Sequence
  Description of Artificial Sequence: Synthetic oligonucleotide
  Sense strand starting at position 1996 of SEQ ID NO: 1562844
gcucuugaccuuugacuca

SEQ ID NO: 1776882 - RNA, 19 nt, Artificial Sequence
  Description of Artificial Sequence: Synthetic oligonucleotide
  Antisense strand to SEQ ID NO: 1776881
ugagucaaaggucaagagc

SEQ ID NO: 1776883 - RNA, 19 nt, Artificial Sequence
  Description of Artificial Sequence: Synthetic oligonucleotide
  Sense strand starting at position 2050 of SEQ ID NO: 1562844
ucagauccgugcuguccaa

SEQ ID NO: 1776884 - RNA, 19 nt, Artificial Sequence
  Description of Artificial Sequence: Synthetic oligonucleotide
  Antisense strand to SEQ ID NO: 1776883
uuggacagcacggaucuga

SEQ ID NO: 1776885 - RNA, 19 nt, Artificial Sequence
  Description of Artificial Sequence: Synthetic oligonucleotide
  Sense strand starting at position 2100 of SEQ ID NO: 1562844
cacaguggcuagucugaaa

SEQ ID NO: 1776886 - RNA, 19 nt, Artificial Sequence
  Description of Artificial Sequence: Synthetic oligonucleotide
  Antisense strand to SEQ ID NO: 1776885
uuucagacuagccacugug

SEQ ID NO: 1776887 - RNA, 19 nt, Artificial Sequence
  Description of Artificial Sequence: Synthetic oligonucleotide
  Sense strand starting at position 2119 of SEQ ID NO: 1562844
ccugacaugcucuaagugu

SEQ ID NO: 1776888 - RNA, 19 nt, Artificial Sequence
  Description of Artificial Sequence: Synthetic oligonucleotide
  Antisense strand to SEQ ID NO: 1776887
acacuuagagcaugucagg

SEQ ID NO: 1776889 - RNA, 19 nt, Artificial Sequence
  Description of Artificial Sequence: Synthetic oligonucleotide
  Sense strand starting at position 2178 of SEQ ID NO: 1562844
uguaaagugucucaucaau

SEQ ID NO: 1776890 - RNA, 19 nt, Artificial Sequence
  Description of Artificial Sequence: Synthetic oligonucleotide
  Antisense strand to SEQ ID NO: 1776889
auugaugagacacuuuaca

SEQ ID NO: 1776891 - RNA, 19 nt, Artificial Sequence
  Description of Artificial Sequence: Synthetic oligonucleotide
  Sense strand starting at position 2223 of SEQ ID NO: 1562844
ggacaucauguaugugaga

SEQ ID NO: 1776892 - RNA, 19 nt, Artificial Sequence
  Description of Artificial Sequence: Synthetic oligonucleotide
  Antisense strand to SEQ ID NO: 1776891
ucucacauacaugaugucc

SEQ ID NO: 1776893 - RNA, 19 nt, Artificial Sequence
  Description of Artificial Sequence: Synthetic oligonucleotide
  Sense strand starting at position 2225 of SEQ ID NO: 1562844
acaucauguaugugagaga

SEQ ID NO: 1776894 - RNA, 19 nt, Artificial Sequence
  Description of Artificial Sequence: Synthetic oligonucleotide
  Antisense strand to SEQ ID NO: 1776893
ucucucacauacaugaugu

SEQ ID NO: 1776895 - RNA, 19 nt, Artificial Sequence
  Description of Artificial Sequence: Synthetic oligonucleotide
  Sense strand starting at position 2228 of SEQ ID NO: 1562844
ucauguaugugagagaguu

SEQ ID NO: 1776896 - RNA, 19 nt, Artificial Sequence
  Description of Artificial Sequence: Synthetic oligonucleotide
  Antisense strand to SEQ ID NO: 1776895
aacucucucacauacauga

SEQ ID NO: 1776897 - RNA, 19 nt, Artificial Sequence
  Description of Artificial Sequence: Synthetic oligonucleotide
  Sense strand starting at position 2230 of SEQ ID NO: 1562844
auguaugugagagaguuaa

SEQ ID NO: 1776898 - RNA, 19 nt, Artificial Sequence
  Description of Artificial Sequence: Synthetic oligonucleotide
  Antisense strand to SEQ ID NO: 1776897
uuaacucucucacauacau

SEQ ID NO: 1776899 - RNA, 19 nt, Artificial Sequence
  Description of Artificial Sequence: Synthetic oligonucleotide
  Sense strand starting at position 2240 of SEQ ID NO: 1562844
gagaguuaaacgcgccgau

SEQ ID NO: 1776900 - RNA, 19 nt, Artificial Sequence
  Description of Artificial Sequence: Synthetic oligonucleotide
  Antisense strand to SEQ ID NO: 1776899
aucggcgcguuuaacucuc

SEQ ID NO: 1776901 - RNA, 19 nt, Artificial Sequence
  Description of Artificial Sequence: Synthetic oligonucleotide
  Sense strand starting at position 2244 of SEQ ID NO: 1562844
guuaaacgcgccgaugaaa

SEQ ID NO: 1776902 - RNA, 19 nt, Artificial Sequence
  Description of Artificial Sequence: Synthetic oligonucleotide
  Antisense strand to SEQ ID NO: 1776901
uuucaucggcgcguuuaac

SEQ ID NO: 1776903 - RNA, 19 nt, Artificial Sequence
  Description of Artificial Sequence: Synthetic oligonucleotide
  Sense strand starting at position 3381 of SEQ ID NO: 1562844
ggcguagaguuaguuuacu

SEQ ID NO: 1776904 - RNA, 19 nt, Artificial Sequence
  Description of Artificial Sequence: Synthetic oligonucleotide
  Antisense strand to SEQ ID NO: 1776903
aguaaacuaacucuacgcc

SEQ ID NO: 1776905 - RNA, 19 nt, Artificial Sequence
  Description of Artificial Sequence: Synthetic oligonucleotide
  Sense strand starting at position 3441 of SEQ ID NO: 1562844
ugguaccacuucuuaguua

SEQ ID NO: 1776906 - RNA, 19 nt, Artificial Sequence
  Description of Artificial Sequence: Synthetic oligonucleotide
  Antisense strand to SEQ ID NO: 1776905
uaacuaagaagugguacca

SEQ ID NO: 1776907 - RNA, 19 nt, Artificial Sequence
  Description of Artificial Sequence: Synthetic oligonucleotide
  Sense strand starting at position 3448 of SEQ ID NO: 1562844
acuucuuaguuacgucuaa

SEQ ID NO: 1776908 - RNA, 19 nt, Artificial Sequence
  Description of Artificial Sequence: Synthetic oligonucleotide
  Antisense strand to SEQ ID NO: 1776907
uuagacguaacuaagaagu

SEQ ID NO: 1776909 - RNA, 19 nt, Artificial Sequence
  Description of Artificial Sequence: Synthetic oligonucleotide
  Sense strand starting at position 3452 of SEQ ID NO: 1562844
cuuaguuacgucuaaguca

SEQ ID NO: 1776910 - RNA, 19 nt, Artificial Sequence
  Description of Artificial Sequence: Synthetic oligonucleotide
  Antisense strand to SEQ ID NO: 1776909
ugacuuagacguaacuaag

SEQ ID NO: 1776911 - RNA, 19 nt, Artificial Sequence
  Description of Artificial Sequence: Synthetic oligonucleotide
  Sense strand starting at position 3459 of SEQ ID NO: 1562844
acgucuaagucaugauuua

SEQ ID NO: 1776912 - RNA, 19 nt, Artificial Sequence
  Description of Artificial Sequence: Synthetic oligonucleotide
  Antisense strand to SEQ ID NO: 1776911
uaaaucaugacuuagacgu

SEQ ID NO: 1776913 - RNA, 19 nt, Artificial Sequence
  Description of Artificial Sequence: Synthetic oligonucleotide
  Sense strand starting at position 92 of SEQ ID NO: 1562845
caauccaggucuuccgaaa

SEQ ID NO: 1776914 - RNA, 19 nt, Artificial Sequence
  Description of Artificial Sequence: Synthetic oligonucleotide
  Antisense strand to SEQ ID NO: 1776913
uuucggaagaccuggauug

SEQ ID NO: 1776915 - RNA, 19 nt, Artificial Sequence
  Description of Artificial Sequence: Synthetic oligonucleotide
  Sense strand starting at position 170 of SEQ ID NO: 1562845
cgauuaagccuccgugacu

SEQ ID NO: 1776916 - RNA, 19 nt, Artificial Sequence
  Description of Artificial Sequence: Synthetic oligonucleotide
  Antisense strand to SEQ ID NO: 1776915
agucacggaggcuuaaucg

SEQ ID NO: 1776917 - RNA, 19 nt, Artificial Sequence
  Description of Artificial Sequence: Synthetic oligonucleotide
  Sense strand starting at position 177 of SEQ ID NO: 1562845
gccuccgugacuggauuau

SEQ ID NO: 1776918 - RNA, 19 nt, Artificial Sequence
  Description of Artificial Sequence: Synthetic oligonucleotide
  Antisense strand to SEQ ID NO: 1776917
auaauccagucacggaggc

SEQ ID NO: 1776919 - RNA, 19 nt, Artificial Sequence
  Description of Artificial Sequence: Synthetic oligonucleotide
  Sense strand starting at position 206 of SEQ ID NO: 1562845
cuagccaucgcccaauuaa

SEQ ID NO: 1776920 - RNA, 19 nt, Artificial Sequence
  Description of Artificial Sequence: Synthetic oligonucleotide
  Antisense strand to SEQ ID NO: 1776919
uuaauugggcgauggcuag

SEQ ID NO: 1776921 - RNA, 19 nt, Artificial Sequence
  Description of Artificial Sequence: Synthetic oligonucleotide
  Sense strand starting at position 270 of SEQ ID NO: 1562845
cgaaauccaucuccagaaa

SEQ ID NO: 1776922 - RNA, 19 nt, Artificial Sequence
  Description of Artificial Sequence: Synthetic oligonucleotide
  Antisense strand to SEQ ID NO: 1776921
uuucuggagauggauuucg

SEQ ID NO: 1776923 - RNA, 19 nt, Artificial Sequence
  Description of Artificial Sequence: Synthetic oligonucleotide
  Sense strand starting at position 358 of SEQ ID NO: 1562845
gcaguuuaucaugcguggu

SEQ ID NO: 1776924 - RNA, 19 nt, Artificial Sequence
  Description of Artificial Sequence: Synthetic oligonucleotide
  Antisense strand to SEQ ID NO: 1776923
accacgcaugauaaacugc

SEQ ID NO: 1776925 - RNA, 19 nt, Artificial Sequence
  Description of Artificial Sequence: Synthetic oligonucleotide
  Sense strand starting at position 359 of SEQ ID NO: 1562845
caguuuaucaugcgugguu

SEQ ID NO: 1776926 - RNA, 19 nt, Artificial Sequence
  Description of Artificial Sequence: Synthetic oligonucleotide
  Antisense strand to SEQ ID NO: 1776925
aaccacgcaugauaaacug

SEQ ID NO: 1776927 - RNA, 19 nt, Artificial Sequence
  Description of Artificial Sequence: Synthetic oligonucleotide
  Sense strand starting at position 438 of SEQ ID NO: 1562845
gcucaaacgcauugagguu

SEQ ID NO: 1776928 - RNA, 19 nt, Artificial Sequence
  Description of Artificial Sequence: Synthetic oligonucleotide
  Antisense strand to SEQ ID NO: 1776927
aaccucaaugcguuugagc

SEQ ID NO: 1776929 - RNA, 19 nt, Artificial Sequence
  Description of Artificial Sequence: Synthetic oligonucleotide
  Sense strand starting at position 496 of SEQ ID NO: 1562845
cccaaauagucucuuagag

SEQ ID NO: 1776930 - RNA, 19 nt, Artificial Sequence
  Description of Artificial Sequence: Synthetic oligonucleotide
  Antisense strand to SEQ ID NO: 1776929
cucuaagagacuauuuggg

SEQ ID NO: 1776931 - RNA, 19 nt, Artificial Sequence
  Description of Artificial Sequence: Synthetic oligonucleotide
  Sense strand starting at position 591 of SEQ ID NO: 1562845
gugccagguuucucaccaa

SEQ ID NO: 1776932 - RNA, 19 nt, Artificial Sequence
  Description of Artificial Sequence: Synthetic oligonucleotide
  Antisense strand to SEQ ID NO: 1776931
uuggugagaaaccuggcac

SEQ ID NO: 1776933 - RNA, 19 nt, Artificial Sequence
  Description of Artificial Sequence: Synthetic oligonucleotide
  Sense strand starting at position 594 of SEQ ID NO: 1562845
ccagguuucucaccaaguu

SEQ ID NO: 1776934 - RNA, 19 nt, Artificial Sequence
  Description of Artificial Sequence: Synthetic oligonucleotide
  Antisense strand to SEQ ID NO: 1776933
aacuuggugagaaaccugg

SEQ ID NO: 1776935 - RNA, 19 nt, Artificial Sequence
  Description of Artificial Sequence: Synthetic oligonucleotide
  Sense strand starting at position 644 of SEQ ID NO: 1562845
cagucagauuauugacagu

SEQ ID NO: 1776936 - RNA, 19 nt, Artificial Sequence
  Description of Artificial Sequence: Synthetic oligonucleotide
  Antisense strand to SEQ ID NO: 1776935
acugucaauaaucugacug

SEQ ID NO: 1776937 - RNA, 19 nt, Artificial Sequence
  Description of Artificial Sequence: Synthetic oligonucleotide
  Sense strand starting at position 699 of SEQ ID NO: 1562845
gcagaucccugcuaacaag

SEQ ID NO: 1776938 - RNA, 19 nt, Artificial Sequence
  Description of Artificial Sequence: Synthetic oligonucleotide
  Antisense strand to SEQ ID NO: 1776937
cuuguuagcagggaucugc

SEQ ID NO: 1776939 - RNA, 19 nt, Artificial Sequence
  Description of Artificial Sequence: Synthetic oligonucleotide
  Sense strand starting at position 1081 of SEQ ID NO: 1562845
gcacaucagugcucugaau

SEQ ID NO: 1776940 - RNA, 19 nt, Artificial Sequence
  Description of Artificial Sequence: Synthetic oligonucleotide
  Antisense strand to SEQ ID NO: 1776939
auucagagcacugaugugc

SEQ ID NO: 1776941 - RNA, 19 nt, Artificial Sequence
  Description of Artificial Sequence: Synthetic oligonucleotide
  Sense strand starting at position 1083 of SEQ ID NO: 1562845
acaucagugcucugaauga

SEQ ID NO: 1776942 - RNA, 19 nt, Artificial Sequence
  Description of Artificial Sequence: Synthetic oligonucleotide
  Antisense strand to SEQ ID NO: 1776941
ucauucagagcacugaugu

SEQ ID NO: 1776943 - RNA, 19 nt, Artificial Sequence
  Description of Artificial Sequence: Synthetic oligonucleotide
  Sense strand starting at position 1151 of SEQ ID NO: 1562845
cccguaacaugucccagaa

SEQ ID NO: 1776944 - RNA, 19 nt, Artificial Sequence
  Description of Artificial Sequence: Synthetic oligonucleotide
  Antisense strand to SEQ ID NO: 1776943
uucugggacauguuacggg

SEQ ID NO: 1776945 - RNA, 19 nt, Artificial Sequence
  Description of Artificial Sequence: Synthetic oligonucleotide
  Sense strand starting at position 1153 of SEQ ID NO: 1562845
cguaacaugucccagaaca

SEQ ID NO: 1776946 - RNA, 19 nt, Artificial Sequence
  Description of Artificial Sequence: Synthetic oligonucleotide
  Antisense strand to SEQ ID NO: 1776945
uguucugggacauguuacg

SEQ ID NO: 1776947 - RNA, 19 nt, Artificial Sequence
  Description of Artificial Sequence: Synthetic oligonucleotide
  Sense strand starting at position 1202 of SEQ ID NO: 1562845
uugggcauuccaugaucaa

SEQ ID NO: 1776948 - RNA, 19 nt, Artificial Sequence
  Description of Artificial Sequence: Synthetic oligonucleotide
  Antisense strand to SEQ ID NO: 1776947
uugaucauggaaugcccaa

SEQ ID NO: 1776949 - RNA, 19 nt, Artificial Sequence
  Description of Artificial Sequence: Synthetic oligonucleotide
  Sense strand starting at position 1203 of SEQ ID NO: 1562845
ugggcauuccaugaucaac

SEQ ID NO: 1776950 - RNA, 19 nt, Artificial Sequence
  Description of Artificial Sequence: Synthetic oligonucleotide
  Antisense strand to SEQ ID NO: 1776949
guugaucauggaaugccca

SEQ ID NO: 1776951 - RNA, 19 nt, Artificial Sequence
  Description of Artificial Sequence: Synthetic oligonucleotide
  Sense strand starting at position 1205 of SEQ ID NO: 1562845
ggcauuccaugaucaacau

SEQ ID NO: 1776952 - RNA, 19 nt, Artificial Sequence
  Description of Artificial Sequence: Synthetic oligonucleotide
  Antisense strand to SEQ ID NO: 1776951
auguugaucauggaaugcc

SEQ ID NO: 1776953 - RNA, 19 nt, Artificial Sequence
  Description of Artificial Sequence: Synthetic oligonucleotide
  Sense strand starting at position 1288 of SEQ ID NO: 1562845
aggaauaaauauguguuga

SEQ ID NO: 1776954 - RNA, 19 nt, Artificial Sequence
  Description of Artificial Sequence: Synthetic oligonucleotide
  Antisense strand to SEQ ID NO: 1776953
ucaacacauauuuauuccu

SEQ ID NO: 1776955 - RNA, 19 nt, Artificial Sequence
  Description of Artificial Sequence: Synthetic oligonucleotide
  Sense strand starting at position 1289 of SEQ ID NO: 1562845
ggaauaaauauguguugag

SEQ ID NO: 1776956 - RNA, 19 nt, Artificial Sequence
  Description of Artificial Sequence: Synthetic oligonucleotide
  Antisense strand to SEQ ID NO: 1776955
cucaacacauauuuauucc

SEQ ID NO: 1776957 - RNA, 19 nt, Artificial Sequence
  Description of Artificial Sequence: Synthetic oligonucleotide
  Sense strand starting at position 1290 of SEQ ID NO: 1562845
gaauaaauauguguugagu

SEQ ID NO: 1776958 - RNA, 19 nt, Artificial Sequence
  Description of Artificial Sequence: Synthetic oligonucleotide
  Antisense strand to SEQ ID NO: 1776957
acucaacacauauuuauuc

SEQ ID NO: 1776959 - RNA, 19 nt, Artificial Sequence
  Description of Artificial Sequence: Synthetic oligonucleotide
  Sense strand starting at position 1379 of SEQ ID NO: 1562845
ugaaguuuccagcaauacc

SEQ ID NO: 1776960 - RNA, 19 nt, Artificial Sequence
  Description of Artificial Sequence: Synthetic oligonucleotide
  Antisense strand to SEQ ID NO: 1776959
gguauugcuggaaacuuca

SEQ ID NO: 1776961 - RNA, 19 nt, Artificial Sequence
  Description of Artificial Sequence: Synthetic oligonucleotide
  Sense strand starting at position 1501 of SEQ ID NO: 1562845
cugcuauuguuaccacuau

SEQ ID NO: 1776962 - RNA, 19 nt, Artificial Sequence
  Description of Artificial Sequence: Synthetic oligonucleotide
  Antisense strand to SEQ ID NO: 1776961
auagugguaacaauagcag

SEQ ID NO: 1776963 - RNA, 19 nt, Artificial Sequence
  Description of Artificial Sequence: Synthetic oligonucleotide
  Sense strand starting at position 2785 of SEQ ID NO: 1562845
gcgcgacacccaguguaaa

SEQ ID NO: 1776964 - RNA, 19 nt, Artificial Sequence
  Description of Artificial Sequence: Synthetic oligonucleotide
  Antisense strand to SEQ ID NO: 1776963
uuuacacugggugucgcgc

SEQ ID NO: 1776965 - RNA, 19 nt, Artificial Sequence
  Description of Artificial Sequence: Synthetic oligonucleotide
  Sense strand starting at position 3160 of SEQ ID NO: 1562845
guugaaugaguguaugcca

SEQ ID NO: 1776966 - RNA, 19 nt, Artificial Sequence
  Description of Artificial Sequence: Synthetic oligonucleotide
  Antisense strand to SEQ ID NO: 1776965
uggcauacacucauucaac

SEQ ID NO: 1776967 - RNA, 19 nt, Artificial Sequence
  Description of Artificial Sequence: Synthetic oligonucleotide
  Sense strand starting at position 3165 of SEQ ID NO: 1562845
augaguguaugccaggaga

SEQ ID NO: 1776968 - RNA, 19 nt, Artificial Sequence
  Description of Artificial Sequence: Synthetic oligonucleotide
  Antisense strand to SEQ ID NO: 1776967
ucuccuggcauacacucau

SEQ ID NO: 1776969 - RNA, 19 nt, Artificial Sequence
  Description of Artificial Sequence: Synthetic oligonucleotide
  Sense strand starting at position 3167 of SEQ ID NO: 1562845
gaguguaugccaggagaga

SEQ ID NO: 1776970 - RNA, 19 nt, Artificial Sequence
  Description of Artificial Sequence: Synthetic oligonucleotide
  Antisense strand to SEQ ID NO: 1776969
ucucuccuggcauacacuc

SEQ ID NO: 1776971 - RNA, 19 nt, Artificial Sequence
  Description of Artificial Sequence: Synthetic oligonucleotide
  Sense strand starting at position 3328 of SEQ ID NO: 1562845
cgggaagagccuuggauag

SEQ ID NO: 1776972 - RNA, 19 nt, Artificial Sequence
  Description of Artificial Sequence: Synthetic oligonucleotide
  Antisense strand to SEQ ID NO: 1776971
cuauccaaggcucuucccg

SEQ ID NO: 1776973 - RNA, 19 nt, Artificial Sequence
  Description of Artificial Sequence: Synthetic oligonucleotide
  Sense strand starting at position 3392 of SEQ ID NO: 1562845
cugugacuuggucacguuu

SEQ ID NO: 1776974 - RNA, 19 nt, Artificial Sequence
  Description of Artificial Sequence: Synthetic oligonucleotide
  Antisense strand to SEQ ID NO: 1776973
aaacgugaccaagucacag

SEQ ID NO: 1776975 - RNA, 19 nt, Artificial Sequence
  Description of Artificial Sequence: Synthetic oligonucleotide
  Sense strand starting at position 3394 of SEQ ID NO: 1562845
gugacuuggucacguuuau

SEQ ID NO: 1776976 - RNA, 19 nt, Artificial Sequence
  Description of Artificial Sequence: Synthetic oligonucleotide
  Antisense strand to SEQ ID NO: 1776975
auaaacgugaccaagucac

SEQ ID NO: 1776977 - RNA, 19 nt, Artificial Sequence
  Description of Artificial Sequence: Synthetic oligonucleotide
  Sense strand starting at position 3560 of SEQ ID NO: 1562845
cugcuuccuugucuuuaga

SEQ ID NO: 1776978 - RNA, 19 nt, Artificial Sequence
  Description of Artificial Sequence: Synthetic oligonucleotide
  Antisense strand to SEQ ID NO: 1776977
ucuaaagacaaggaagcag

SEQ ID NO: 1776979 - RNA, 19 nt, Artificial Sequence
  Description of Artificial Sequence: Synthetic oligonucleotide
  Sense strand starting at position 3715 of SEQ ID NO: 1562845
gacucagugucucagcaga

SEQ ID NO: 1776980 - RNA, 19 nt, Artificial Sequence
  Description of Artificial Sequence: Synthetic oligonucleotide
  Antisense strand to SEQ ID NO: 1776979
ucugcugagacacugaguc

SEQ ID NO: 1776981 - RNA, 19 nt, Artificial Sequence
  Description of Artificial Sequence: Synthetic oligonucleotide
  Sense strand starting at position 3771 of SEQ ID NO: 1562845
ggcuguggccucuggagau

SEQ ID NO: 1776982 - RNA, 19 nt, Artificial Sequence
  Description of Artificial Sequence: Synthetic oligonucleotide
  Antisense strand to SEQ ID NO: 1776981
aucuccagaggccacagcc

SEQ ID NO: 1776983 - RNA, 19 nt, Artificial Sequence
  Description of Artificial Sequence: Synthetic oligonucleotide
  Sense strand starting at position 3835 of SEQ ID NO: 1562845
agcagagguuccugugaca

SEQ ID NO: 1776984 - RNA, 19 nt, Artificial Sequence
  Description of Artificial Sequence: Synthetic oligonucleotide
  Antisense strand to SEQ ID NO: 1776983
ugucacaggaaccucugcu

SEQ ID NO: 1776985 - RNA, 19 nt, Artificial Sequence
  Description of Artificial Sequence: Synthetic oligonucleotide
  Sense strand starting at position 3942 of SEQ ID NO: 1562845
guacacauuuauugagcau

SEQ ID NO: 1776986 - RNA, 19 nt, Artificial Sequence
  Description of Artificial Sequence: Synthetic oligonucleotide
  Antisense strand to SEQ ID NO: 1776985
augcucaauaaauguguac

SEQ ID NO: 1776987 - RNA, 19 nt, Artificial Sequence
  Description of Artificial Sequence: Synthetic oligonucleotide
  Sense strand starting at position 322 of SEQ ID NO: 1562846
aaaggucugugggccauaa

SEQ ID NO: 1776988 - RNA, 19 nt, Artificial Sequence
  Description of Artificial Sequence: Synthetic oligonucleotide
  Antisense strand to SEQ ID NO: 1776987
uuauggcccacagaccuuu

SEQ ID NO: 1776989 - RNA, 19 nt, Artificial Sequence
  Description of Artificial Sequence: Synthetic oligonucleotide
  Sense strand starting at position 326 of SEQ ID NO: 1562846
gucugugggccauaaagga

SEQ ID NO: 1776990 - RNA, 19 nt, Artificial Sequence
  Description of Artificial Sequence: Synthetic oligonucleotide
  Antisense strand to SEQ ID NO: 1776989
uccuuuauggcccacagac

SEQ ID NO: 1776991 - RNA, 19 nt, Artificial Sequence
  Description of Artificial Sequence: Synthetic oligonucleotide
  Sense strand starting at position 390 of SEQ ID NO: 1562846
gugccugugugauucagaa

SEQ ID NO: 1776992 - RNA, 19 nt, Artificial Sequence
  Description of Artificial Sequence: Synthetic oligonucleotide
  Antisense strand to SEQ ID NO: 1776991
uucugaaucacacaggcac

SEQ ID NO: 1776993 - RNA, 19 nt, Artificial Sequence
  Description of Artificial Sequence: Synthetic oligonucleotide
  Sense strand starting at position 410 of SEQ ID NO: 1562846
ccgggaucacuguagguga

SEQ ID NO: 1776994 - RNA, 19 nt, Artificial Sequence
  Description of Artificial Sequence: Synthetic oligonucleotide
  Antisense strand to SEQ ID NO: 1776993
ucaccuacagugaucccgg

SEQ ID NO: 1776995 - RNA, 19 nt, Artificial Sequence
  Description of Artificial Sequence: Synthetic oligonucleotide
  Sense strand starting at position 470 of SEQ ID NO: 1562846
aggcucaugucagaaggau

SEQ ID NO: 1776996 - RNA, 19 nt, Artificial Sequence
  Description of Artificial Sequence: Synthetic oligonucleotide
  Antisense strand to SEQ ID NO: 1776995
auccuucugacaugagccu

SEQ ID NO: 1776997 - RNA, 19 nt, Artificial Sequence
  Description of Artificial Sequence: Synthetic oligonucleotide
  Sense strand starting at position 619 of SEQ ID NO: 1562846
gacacuaggcuuugaggau

SEQ ID NO: 1776998 - RNA, 19 nt, Artificial Sequence
  Description of Artificial Sequence: Synthetic oligonucleotide
  Antisense strand to SEQ ID NO: 1776997
auccucaaagccuaguguc

SEQ ID NO: 1776999 - RNA, 19 nt, Artificial Sequence
  Description of Artificial Sequence: Synthetic oligonucleotide
  Sense strand starting at position 620 of SEQ ID NO: 1562846
acacuaggcuuugaggauu

SEQ ID NO: 1777000 - RNA, 19 nt, Artificial Sequence
  Description of Artificial Sequence: Synthetic oligonucleotide
  Antisense strand to SEQ ID NO: 1776999
aauccucaaagccuagugu

SEQ ID NO: 1777001 - RNA, 19 nt, Artificial Sequence
  Description of Artificial Sequence: Synthetic oligonucleotide
  Sense strand starting at position 1098 of SEQ ID NO: 1562846
uugccaacugguuguuaaa

SEQ ID NO: 1777002 - RNA, 19 nt, Artificial Sequence
  Description of Artificial Sequence: Synthetic oligonucleotide
  Antisense strand to SEQ ID NO: 1777001
uuuaacaaccaguuggcaa

SEQ ID NO: 1777003 - RNA, 19 nt, Artificial Sequence
  Description of Artificial Sequence: Synthetic oligonucleotide
  Sense strand starting at position 1100 of SEQ ID NO: 1562846
gccaacugguuguuaaaua

SEQ ID NO: 1777004 - RNA, 19 nt, Artificial Sequence
  Description of Artificial Sequence: Synthetic oligonucleotide
  Antisense strand to SEQ ID NO: 1777003
uauuuaacaaccaguuggc

SEQ ID NO: 1777005 - RNA, 19 nt, Artificial Sequence
  Description of Artificial Sequence: Synthetic oligonucleotide
  Sense strand starting at position 1283 of SEQ ID NO: 1562846
ggguguguccuccagcaac

SEQ ID NO: 1777006 - RNA, 19 nt, Artificial Sequence
  Description of Artificial Sequence: Synthetic oligonucleotide
  Antisense strand to SEQ ID NO: 1777005
guugcuggaggacacaccc

SEQ ID NO: 1777007 - RNA, 19 nt, Artificial Sequence
  Description of Artificial Sequence: Synthetic oligonucleotide
  Sense strand starting at position 1312 of SEQ ID NO: 1562846
gcucucuccugucuuagua

SEQ ID NO: 1777008 - RNA, 19 nt, Artificial Sequence
  Description of Artificial Sequence: Synthetic oligonucleotide
  Antisense strand to SEQ ID NO: 1777007
uacuaagacaggagagagc

SEQ ID NO: 1777009 - RNA, 19 nt, Artificial Sequence
  Description of Artificial Sequence: Synthetic oligonucleotide
  Sense strand starting at position 1316 of SEQ ID NO: 1562846
ucuccugucuuaguaaguu

SEQ ID NO: 1777010 - RNA, 19 nt, Artificial Sequence
  Description of Artificial Sequence: Synthetic oligonucleotide
  Antisense strand to SEQ ID NO: 1777009
aacuuacuaagacaggaga

SEQ ID NO: 1777011 - RNA, 19 nt, Artificial Sequence
  Description of Artificial Sequence: Synthetic oligonucleotide
  Sense strand starting at position 1328 of SEQ ID NO: 1562846
guaaguuucuggccuacuc

SEQ ID NO: 1777012 - RNA, 19 nt, Artificial Sequence
  Description of Artificial Sequence: Synthetic oligonucleotide
  Antisense strand to SEQ ID NO: 1777011
gaguaggccagaaacuuac

SEQ ID NO: 1777013 - RNA, 19 nt, Artificial Sequence
  Description of Artificial Sequence: Synthetic oligonucleotide
  Sense strand starting at position 1340 of SEQ ID NO: 1562846
ccuacuccucaggguuauu

SEQ ID NO: 1777014 - RNA, 19 nt, Artificial Sequence
  Description of Artificial Sequence: Synthetic oligonucleotide
  Antisense strand to SEQ ID NO: 1777013
aauaacccugaggaguagg

SEQ ID NO: 1777015 - RNA, 19 nt, Artificial Sequence
  Description of Artificial Sequence: Synthetic oligonucleotide
  Sense strand starting at position 1416 of SEQ ID NO: 1562846
ggacaauguuaguuccuuu

SEQ ID NO: 1777016 - RNA, 19 nt, Artificial Sequence
  Description of Artificial Sequence: Synthetic oligonucleotide
  Antisense strand to SEQ ID NO: 1777015
aaaggaacuaacauugucc

SEQ ID NO: 1777017 - RNA, 19 nt, Artificial Sequence
  Description of Artificial Sequence: Synthetic oligonucleotide
  Sense strand starting at position 1444 of SEQ ID NO: 1562846
acaaguuauuggcuagugu

SEQ ID NO: 1777018 - RNA, 19 nt, Artificial Sequence
  Description of Artificial Sequence: Synthetic oligonucleotide
  Antisense strand to SEQ ID NO: 1777017
acacuagccaauaacuugu

SEQ ID NO: 1777019 - RNA, 19 nt, Artificial Sequence
  Description of Artificial Sequence: Synthetic oligonucleotide
  Sense strand starting at position 2309 of SEQ ID NO: 1562846
gaaggauagcguugcgaga

SEQ ID NO: 1777020 - RNA, 19 nt, Artificial Sequence
  Description of Artificial Sequence: Synthetic oligonucleotide
  Antisense strand to SEQ ID NO: 1777019
ucucgcaacgcuauccuuc

SEQ ID NO: 1777021 - RNA, 19 nt, Artificial Sequence
  Description of Artificial Sequence: Synthetic oligonucleotide
  Sense strand starting at position 2575 of SEQ ID NO: 1562846
ggcgggaucgaguacugua

SEQ ID NO: 1777022 - RNA, 19 nt, Artificial Sequence
  Description of Artificial Sequence: Synthetic oligonucleotide
  Antisense strand to SEQ ID NO: 1777021
uacaguacucgaucccgcc

SEQ ID NO: 1777023 - RNA, 19 nt, Artificial Sequence
  Description of Artificial Sequence: Synthetic oligonucleotide
  Sense strand starting at position 2580 of SEQ ID NO: 1562846
gaucgaguacuguaacuuc

SEQ ID NO: 1777024 - RNA, 19 nt, Artificial Sequence
  Description of Artificial Sequence: Synthetic oligonucleotide
  Antisense strand to SEQ ID NO: 1777023
gaaguuacaguacucgauc

SEQ ID NO: 1777025 - RNA, 19 nt, Artificial Sequence
  Description of Artificial Sequence: Synthetic oligonucleotide
  Sense strand starting at position 2634 of SEQ ID NO: 1562846
cuuggaguccucggaaacu

SEQ ID NO: 1777026 - RNA, 19 nt, Artificial Sequence
  Description of Artificial Sequence: Synthetic oligonucleotide
  Antisense strand to SEQ ID NO: 1777025
aguuuccgaggacuccaag

SEQ ID NO: 1777027 - RNA, 19 nt, Artificial Sequence
  Description of Artificial Sequence: Synthetic oligonucleotide
  Sense strand starting at position 2705 of SEQ ID NO: 1562846
gccggcuuuccagagggaa

SEQ ID NO: 1777028 - RNA, 19 nt, Artificial Sequence
  Description of Artificial Sequence: Synthetic oligonucleotide
  Antisense strand to SEQ ID NO: 1777027
uucccucuggaaagccggc

SEQ ID NO: 1777029 - RNA, 19 nt, Artificial Sequence
  Description of Artificial Sequence: Synthetic oligonucleotide
  Sense strand starting at position 2707 of SEQ ID NO: 1562846
cggcuuuccagagggaauc

SEQ ID NO: 1777030 - RNA, 19 nt, Artificial Sequence
  Description of Artificial Sequence: Synthetic oligonucleotide
  Antisense strand to SEQ ID NO: 1777029
gauucccucuggaaagccg

SEQ ID NO: 1777031 - RNA, 19 nt, Artificial Sequence
  Description of Artificial Sequence: Synthetic oligonucleotide
  Sense strand starting at position 2758 of SEQ ID NO: 1562846
gcuggcuugcuguaaacaa

SEQ ID NO: 1777032 - RNA, 19 nt, Artificial Sequence
  Description of Artificial Sequence: Synthetic oligonucleotide
  Antisense strand to SEQ ID NO: 1777031
uuguuuacagcaagccagc

SEQ ID NO: 1777033 - RNA, 19 nt, Artificial Sequence
  Description of Artificial Sequence: Synthetic oligonucleotide
  Sense strand starting at position 3073 of SEQ ID NO: 1562846
ggcgccucuuucuuugaca

SEQ ID NO: 1777034 - RNA, 19 nt, Artificial Sequence
  Description of Artificial Sequence: Synthetic oligonucleotide
  Antisense strand to SEQ ID NO: 1777033
ugucaaagaaagaggcgcc

SEQ ID NO: 1777035 - RNA, 19 nt, Artificial Sequence
  Description of Artificial Sequence: Synthetic oligonucleotide
  Sense strand starting at position 3074 of SEQ ID NO: 1562846
gcgccucuuucuuugacau

SEQ ID NO: 1777036 - RNA, 19 nt, Artificial Sequence
  Description of Artificial Sequence: Synthetic oligonucleotide
  Antisense strand to SEQ ID NO: 1777035
augucaaagaaagaggcgc

SEQ ID NO: 1777037 - RNA, 19 nt, Artificial Sequence
  Description of Artificial Sequence: Synthetic oligonucleotide
  Sense strand starting at position 3075 of SEQ ID NO: 1562846
cgccucuuucuuugacaua

SEQ ID NO: 1777038 - RNA, 19 nt, Artificial Sequence
  Description of Artificial Sequence: Synthetic oligonucleotide
  Antisense strand to SEQ ID NO: 1777037
uaugucaaagaaagaggcg

SEQ ID NO: 1777039 - RNA, 19 nt, Artificial Sequence
  Description of Artificial Sequence: Synthetic oligonucleotide
  Sense strand starting at position 3146 of SEQ ID NO: 1562846
cuggcuucgccgaguaugu

SEQ ID NO: 1777040 - RNA, 19 nt, Artificial Sequence
  Description of Artificial Sequence: Synthetic oligonucleotide
  Antisense strand to SEQ ID NO: 1777039
acauacucggcgaagccag

SEQ ID NO: 1777041 - RNA, 19 nt, Artificial Sequence
  Description of Artificial Sequence: Synthetic oligonucleotide
  Sense strand starting at position 3248 of SEQ ID NO: 1562846
gguggauguuccguguguu

SEQ ID NO: 1777042 - RNA, 19 nt, Artificial Sequence
  Description of Artificial Sequence: Synthetic oligonucleotide
  Antisense strand to SEQ ID NO: 1777041
aacacacggaacauccacc

SEQ ID NO: 1777043 - RNA, 19 nt, Artificial Sequence
  Description of Artificial Sequence: Synthetic oligonucleotide
  Sense strand starting at position 3279 of SEQ ID NO: 1562846
cguaucagugcucaauggu

SEQ ID NO: 1777044 - RNA, 19 nt, Artificial Sequence
  Description of Artificial Sequence: Synthetic oligonucleotide
  Antisense strand to SEQ ID NO: 1777043
accauugagcacugauacg

SEQ ID NO: 1777045 - RNA, 19 nt, Artificial Sequence
  Description of Artificial Sequence: Synthetic oligonucleotide
  Sense strand starting at position 3414 of SEQ ID NO: 1562846
gcuggagaaccuugaaucu

SEQ ID NO: 1777046 - RNA, 19 nt, Artificial Sequence
  Description of Artificial Sequence: Synthetic oligonucleotide
  Antisense strand to SEQ ID NO: 1777045
agauucaagguucuccagc

SEQ ID NO: 1777047 - RNA, 19 nt, Artificial Sequence
  Description of Artificial Sequence: Synthetic oligonucleotide
  Sense strand starting at position 3423 of SEQ ID NO: 1562846
ccuugaaucuaagagguuc

SEQ ID NO: 1777048 - RNA, 19 nt, Artificial Sequence
  Description of Artificial Sequence: Synthetic oligonucleotide
  Antisense strand to SEQ ID NO: 1777047
gaaccucuuagauucaagg

SEQ ID NO: 1777049 - RNA, 19 nt, Artificial Sequence
  Description of Artificial Sequence: Synthetic oligonucleotide
  Sense strand starting at position 3623 of SEQ ID NO: 1562846
gccucagucuuuccaucga

SEQ ID NO: 1777050 - RNA, 19 nt, Artificial Sequence
  Description of Artificial Sequence: Synthetic oligonucleotide
  Antisense strand to SEQ ID NO: 1777049
ucgauggaaagacugaggc

SEQ ID NO: 1777051 - RNA, 19 nt, Artificial Sequence
  Description of Artificial Sequence: Synthetic oligonucleotide
  Sense strand starting at position 3699 of SEQ ID NO: 1562846
ccaagaauguguccucaua

SEQ ID NO: 1777052 - RNA, 19 nt, Artificial Sequence
  Description of Artificial Sequence: Synthetic oligonucleotide
  Antisense strand to SEQ ID NO: 1777051
uaugaggacacauucuugg

SEQ ID NO: 1777053 - RNA, 19 nt, Artificial Sequence
  Description of Artificial Sequence: Synthetic oligonucleotide
  Sense strand starting at position 3701 of SEQ ID NO: 1562846
aagaauguguccucauagc

SEQ ID NO: 1777054 - RNA, 19 nt, Artificial Sequence
  Description of Artificial Sequence: Synthetic oligonucleotide
  Antisense strand to SEQ ID NO: 1777053
gcuaugaggacacauucuu

SEQ ID NO: 1777055 - RNA, 19 nt, Artificial Sequence
  Description of Artificial Sequence: Synthetic oligonucleotide
  Sense strand starting at position 3710 of SEQ ID NO: 1562846
uccucauagccaugugcua

SEQ ID NO: 1777056 - RNA, 19 nt, Artificial Sequence
  Description of Artificial Sequence: Synthetic oligonucleotide
  Antisense strand to SEQ ID NO: 1777055
uagcacauggcuaugagga

SEQ ID NO: 1777057 - RNA, 19 nt, Artificial Sequence
  Description of Artificial Sequence: Synthetic oligonucleotide
  Sense strand starting at position 3741 of SEQ ID NO: 1562846
gcaucugugugagcagaag

SEQ ID NO: 1777058 - RNA, 19 nt, Artificial Sequence
  Description of Artificial Sequence: Synthetic oligonucleotide
  Antisense strand to SEQ ID NO: 1777057
cuucugcucacacagaugc

SEQ ID NO: 1777059 - RNA, 19 nt, Artificial Sequence
  Description of Artificial Sequence: Synthetic oligonucleotide
  Sense strand starting at position 3753 of SEQ ID NO: 1562846
gcagaagucacuggugaca

SEQ ID NO: 1777060 - RNA, 19 nt, Artificial Sequence
  Description of Artificial Sequence: Synthetic oligonucleotide
  Antisense strand to SEQ ID NO: 1777059
ugucaccagugacuucugc

SEQ ID NO: 1777061 - RNA, 19 nt, Artificial Sequence
  Description of Artificial Sequence: Synthetic oligonucleotide
  Sense strand starting at position 3806 of SEQ ID NO: 1562846
ccacauguacuaggauaua

SEQ ID NO: 1777062 - RNA, 19 nt, Artificial Sequence
  Description of Artificial Sequence: Synthetic oligonucleotide
  Antisense strand to SEQ ID NO: 1777061
uauauccuaguacaugugg

SEQ ID NO: 1777063 - RNA, 19 nt, Artificial Sequence
  Description of Artificial Sequence: Synthetic oligonucleotide
  Sense strand starting at position 3854 of SEQ ID NO: 1562846
uuugcauugcuguacagaa

SEQ ID NO: 1777064 - RNA, 19 nt, Artificial Sequence
  Description of Artificial Sequence: Synthetic oligonucleotide
  Antisense strand to SEQ ID NO: 1777063
uucuguacagcaaugcaaa

SEQ ID NO: 1777065 - RNA, 19 nt, Artificial Sequence
  Description of Artificial Sequence: Synthetic oligonucleotide
  Sense strand starting at position 3916 of SEQ ID NO: 1562846
cgcagaaacccuuauagac

SEQ ID NO: 1777066 - RNA, 19 nt, Artificial Sequence
  Description of Artificial Sequence: Synthetic oligonucleotide
  Antisense strand to SEQ ID NO: 1777065
gucuauaaggguuucugcg

SEQ ID NO: 1777067 - RNA, 19 nt, Artificial Sequence
  Description of Artificial Sequence: Synthetic oligonucleotide
  Sense strand starting at position 430 of SEQ ID NO: 1562847
aaaggucugugggccauaa

SEQ ID NO: 1777068 - RNA, 19 nt, Artificial Sequence
  Description of Artificial Sequence: Synthetic oligonucleotide
  Antisense strand to SEQ ID NO: 1777067
uuauggcccacagaccuuu

SEQ ID NO: 1777069 - RNA, 19 nt, Artificial Sequence
  Description of Artificial Sequence: Synthetic oligonucleotide
  Sense strand starting at position 434 of SEQ ID NO: 1562847
gucugugggccauaaagga

SEQ ID NO: 1777070 - RNA, 19 nt, Artificial Sequence
  Description of Artificial Sequence: Synthetic oligonucleotide
  Antisense strand to SEQ ID NO: 1777069
uccuuuauggcccacagac

SEQ ID NO: 1777071 - RNA, 19 nt, Artificial Sequence
  Description of Artificial Sequence: Synthetic oligonucleotide
  Sense strand starting at position 498 of SEQ ID NO: 1562847
gugccugugugauucagaa

SEQ ID NO: 1777072 - RNA, 19 nt, Artificial Sequence
  Description of Artificial Sequence: Synthetic oligonucleotide
  Antisense strand to SEQ ID NO: 1777071
uucugaaucacacaggcac

SEQ ID NO: 1777073 - RNA, 19 nt, Artificial Sequence
  Description of Artificial Sequence: Synthetic oligonucleotide
  Sense strand starting at position 518 of SEQ ID NO: 1562847
ccgggaucacuguagguga

SEQ ID NO: 1777074 - RNA, 19 nt, Artificial Sequence
  Description of Artificial Sequence: Synthetic oligonucleotide
  Antisense strand to SEQ ID NO: 1777073
ucaccuacagugaucccgg

SEQ ID NO: 1777075 - RNA, 19 nt, Artificial Sequence
  Description of Artificial Sequence: Synthetic oligonucleotide
  Sense strand starting at position 578 of SEQ ID NO: 1562847
aggcucaugucagaaggau

SEQ ID NO: 1777076 - RNA, 19 nt, Artificial Sequence
  Description of Artificial Sequence: Synthetic oligonucleotide
  Antisense strand to SEQ ID NO: 1777075
auccuucugacaugagccu

SEQ ID NO: 1777077 - RNA, 19 nt, Artificial Sequence
  Description of Artificial Sequence: Synthetic oligonucleotide
  Sense strand starting at position 727 of SEQ ID NO: 1562847
gacacuaggcuuugaggau

SEQ ID NO: 1777078 - RNA, 19 nt, Artificial Sequence
  Description of Artificial Sequence: Synthetic oligonucleotide
  Antisense strand to SEQ ID NO: 1777077
auccucaaagccuaguguc

SEQ ID NO: 1777079 - RNA, 19 nt, Artificial Sequence
  Description of Artificial Sequence: Synthetic oligonucleotide
  Sense strand starting at position 728 of SEQ ID NO: 1562847
acacuaggcuuugaggauu

SEQ ID NO: 1777080 - RNA, 19 nt, Artificial Sequence
  Description of Artificial Sequence: Synthetic oligonucleotide
  Antisense strand to SEQ ID NO: 1777079
aauccucaaagccuagugu

SEQ ID NO: 1777081 - RNA, 19 nt, Artificial Sequence
  Description of Artificial Sequence: Synthetic oligonucleotide
  Sense strand starting at position 1206 of SEQ ID NO: 1562847
uugccaacugguuguuaaa

SEQ ID NO: 1777082 - RNA, 19 nt, Artificial Sequence
  Description of Artificial Sequence: Synthetic oligonucleotide
  Antisense strand to SEQ ID NO: 1777081
uuuaacaaccaguuggcaa

SEQ ID NO: 1777083 - RNA, 19 nt, Artificial Sequence
  Description of Artificial Sequence: Synthetic oligonucleotide
  Sense strand starting at position 1208 of SEQ ID NO: 1562847
gccaacugguuguuaaaua

SEQ ID NO: 1777084 - RNA, 19 nt, Artificial Sequence
  Description of Artificial Sequence: Synthetic oligonucleotide
  Antisense strand to SEQ ID NO: 1777083
uauuuaacaaccaguuggc

SEQ ID NO: 1777085 - RNA, 19 nt, Artificial Sequence
  Description of Artificial Sequence: Synthetic oligonucleotide
  Sense strand starting at position 1391 of SEQ ID NO: 1562847
ggguguguccuccagcaac

SEQ ID NO: 1777086 - RNA, 19 nt, Artificial Sequence
  Description of Artificial Sequence: Synthetic oligonucleotide
  Antisense strand to SEQ ID NO: 1777085
guugcuggaggacacaccc

SEQ ID NO: 1777087 - RNA, 19 nt, Artificial Sequence
  Description of Artificial Sequence: Synthetic oligonucleotide
  Sense strand starting at position 1420 of SEQ ID NO: 1562847
gcucucuccugucuuagua

SEQ ID NO: 1777088 - RNA, 19 nt, Artificial Sequence
  Description of Artificial Sequence: Synthetic oligonucleotide
  Antisense strand to SEQ ID NO: 1777087
uacuaagacaggagagagc

SEQ ID NO: 1777089 - RNA, 19 nt, Artificial Sequence
  Description of Artificial Sequence: Synthetic oligonucleotide
  Sense strand starting at position 1424 of SEQ ID NO: 1562847
ucuccugucuuaguaaguu

SEQ ID NO: 1777090 - RNA, 19 nt, Artificial Sequence
  Description of Artificial Sequence: Synthetic oligonucleotide
  Antisense strand to SEQ ID NO: 1777089
aacuuacuaagacaggaga

SEQ ID NO: 1777091 - RNA, 19 nt, Artificial Sequence
  Description of Artificial Sequence: Synthetic oligonucleotide
  Sense strand starting at position 1436 of SEQ ID NO: 1562847
guaaguuucuggccuacuc

SEQ ID NO: 1777092 - RNA, 19 nt, Artificial Sequence
  Description of Artificial Sequence: Synthetic oligonucleotide
  Antisense strand to SEQ ID NO: 1777091
gaguaggccagaaacuuac

SEQ ID NO: 1777093 - RNA, 19 nt, Artificial Sequence
  Description of Artificial Sequence: Synthetic oligonucleotide
  Sense strand starting at position 1448 of SEQ ID NO: 1562847
ccuacuccucaggguuauu

SEQ ID NO: 1777094 - RNA, 19 nt, Artificial Sequence
  Description of Artificial Sequence: Synthetic oligonucleotide
  Antisense strand to SEQ ID NO: 1777093
aauaacccugaggaguagg

SEQ ID NO: 1777095 - RNA, 19 nt, Artificial Sequence
  Description of Artificial Sequence: Synthetic oligonucleotide
  Sense strand starting at position 1524 of SEQ ID NO: 1562847
ggacaauguuaguuccuuu

SEQ ID NO: 1777096 - RNA, 19 nt, Artificial Sequence
  Description of Artificial Sequence: Synthetic oligonucleotide
  Antisense strand to SEQ ID NO: 1777095
aaaggaacuaacauugucc

SEQ ID NO: 1777097 - RNA, 19 nt, Artificial Sequence
  Description of Artificial Sequence: Synthetic oligonucleotide
  Sense strand starting at position 1552 of SEQ ID NO: 1562847
acaaguuauuggcuagugu

SEQ ID NO: 1777098 - RNA, 19 nt, Artificial Sequence
  Description of Artificial Sequence: Synthetic oligonucleotide
  Antisense strand to SEQ ID NO: 1777097
acacuagccaauaacuugu

SEQ ID NO: 1777099 - RNA, 19 nt, Artificial Sequence
  Description of Artificial Sequence: Synthetic oligonucleotide
  Sense strand starting at position 2417 of SEQ ID NO: 1562847
gaaggauagcguugcgaga

SEQ ID NO: 1777100 - RNA, 19 nt, Artificial Sequence
  Description of Artificial Sequence: Synthetic oligonucleotide
  Antisense strand to SEQ ID NO: 1777099
ucucgcaacgcuauccuuc

SEQ ID NO: 1777101 - RNA, 19 nt, Artificial Sequence
  Description of Artificial Sequence: Synthetic oligonucleotide
  Sense strand starting at position 2683 of SEQ ID NO: 1562847
ggcgggaucgaguacugua

SEQ ID NO: 1777102 - RNA, 19 nt, Artificial Sequence
  Description of Artificial Sequence: Synthetic oligonucleotide
  Antisense strand to SEQ ID NO: 1777101
uacaguacucgaucccgcc

SEQ ID NO: 1777103 - RNA, 19 nt, Artificial Sequence
  Description of Artificial Sequence: Synthetic oligonucleotide
  Sense strand starting at position 2688 of SEQ ID NO: 1562847
gaucgaguacuguaacuuc

SEQ ID NO: 1777104 - RNA, 19 nt, Artificial Sequence
  Description of Artificial Sequence: Synthetic oligonucleotide
  Antisense strand to SEQ ID NO: 1777103
gaaguuacaguacucgauc

SEQ ID NO: 1777105 - RNA, 19 nt, Artificial Sequence
  Description of Artificial Sequence: Synthetic oligonucleotide
  Sense strand starting at position 2742 of SEQ ID NO: 1562847
cuuggaguccucggaaacu

SEQ ID NO: 1777106 - RNA, 19 nt, Artificial Sequence
  Description of Artificial Sequence: Synthetic oligonucleotide
  Antisense strand to SEQ ID NO: 1777105
aguuuccgaggacuccaag

SEQ ID NO: 1777107 - RNA, 19 nt, Artificial Sequence
  Description of Artificial Sequence: Synthetic oligonucleotide
  Sense strand starting at position 2813 of SEQ ID NO: 1562847
gccggcuuuccagagggaa

SEQ ID NO: 1777108 - RNA, 19 nt, Artificial Sequence
  Description of Artificial Sequence: Synthetic oligonucleotide
  Antisense strand to SEQ ID NO: 1777107
uucccucuggaaagccggc

SEQ ID NO: 1777109 - RNA, 19 nt, Artificial Sequence
  Description of Artificial Sequence: Synthetic oligonucleotide
  Sense strand starting at position 2815 of SEQ ID NO: 1562847
cggcuuuccagagggaauc

SEQ ID NO: 1777110 - RNA, 19 nt, Artificial Sequence
  Description of Artificial Sequence: Synthetic oligonucleotide
  Antisense strand to SEQ ID NO: 1777109
gauucccucuggaaagccg

SEQ ID NO: 1777111 - RNA, 19 nt, Artificial Sequence
  Description of Artificial Sequence: Synthetic oligonucleotide
  Sense strand starting at position 2866 of SEQ ID NO: 1562847
gcuggcuugcuguaaacaa

SEQ ID NO: 1777112 - RNA, 19 nt, Artificial Sequence
  Description of Artificial Sequence: Synthetic oligonucleotide
  Antisense strand to SEQ ID NO: 1777111
uuguuuacagcaagccagc

SEQ ID NO: 1777113 - RNA, 19 nt, Artificial Sequence
  Description of Artificial Sequence: Synthetic oligonucleotide
  Sense strand starting at position 3181 of SEQ ID NO: 1562847
ggcgccucuuucuuugaca

SEQ ID NO: 1777114 - RNA, 19 nt, Artificial Sequence
  Description of Artificial Sequence: Synthetic oligonucleotide
  Antisense strand to SEQ ID NO: 1777113
ugucaaagaaagaggcgcc

SEQ ID NO: 1777115 - RNA, 19 nt, Artificial Sequence
  Description of Artificial Sequence: Synthetic oligonucleotide
  Sense strand starting at position 3182 of SEQ ID NO: 1562847
gcgccucuuucuuugacau

SEQ ID NO: 1777116 - RNA, 19 nt, Artificial Sequence
  Description of Artificial Sequence: Synthetic oligonucleotide
  Antisense strand to SEQ ID NO: 1777115
augucaaagaaagaggcgc

SEQ ID NO: 1777117 - RNA, 19 nt, Artificial Sequence
  Description of Artificial Sequence: Synthetic oligonucleotide
  Sense strand starting at position 3183 of SEQ ID NO: 1562847
cgccucuuucuuugacaua

SEQ ID NO: 1777118 - RNA, 19 nt, Artificial Sequence
  Description of Artificial Sequence: Synthetic oligonucleotide
  Antisense strand to SEQ ID NO: 1777117
uaugucaaagaaagaggcg

SEQ ID NO: 1777119 - RNA, 19 nt, Artificial Sequence
  Description of Artificial Sequence: Synthetic oligonucleotide
  Sense strand starting at position 3254 of SEQ ID NO: 1562847
cuggcuucgccgaguaugu

SEQ ID NO: 1777120 - RNA, 19 nt, Artificial Sequence
  Description of Artificial Sequence: Synthetic oligonucleotide
  Antisense strand to SEQ ID NO: 1777119
acauacucggcgaagccag

SEQ ID NO: 1777121 - RNA, 19 nt, Artificial Sequence
  Description of Artificial Sequence: Synthetic oligonucleotide
  Sense strand starting at position 3356 of SEQ ID NO: 1562847
gguggauguuccguguguu

SEQ ID NO: 1777122 - RNA, 19 nt, Artificial Sequence
  Description of Artificial Sequence: Synthetic oligonucleotide
  Antisense strand to SEQ ID NO: 1777121
aacacacggaacauccacc

SEQ ID NO: 1777123 - RNA, 19 nt, Artificial Sequence
  Description of Artificial Sequence: Synthetic oligonucleotide
  Sense strand starting at position 3387 of SEQ ID NO: 1562847
cguaucagugcucaauggu

SEQ ID NO: 1777124 - RNA, 19 nt, Artificial Sequence
  Description of Artificial Sequence: Synthetic oligonucleotide
  Antisense strand to SEQ ID NO: 1777123
accauugagcacugauacg

SEQ ID NO: 1777125 - RNA, 19 nt, Artificial Sequence
  Description of Artificial Sequence: Synthetic oligonucleotide
  Sense strand starting at position 3522 of SEQ ID NO: 1562847
gcuggagaaccuugaaucu

SEQ ID NO: 1777126 - RNA, 19 nt, Artificial Sequence
  Description of Artificial Sequence: Synthetic oligonucleotide
  Antisense strand to SEQ ID NO: 1777125
agauucaagguucuccagc

SEQ ID NO: 1777127 - RNA, 19 nt, Artificial Sequence
  Description of Artificial Sequence: Synthetic oligonucleotide
  Sense strand starting at position 3531 of SEQ ID NO: 1562847
ccuugaaucuaagagguuc

SEQ ID NO: 1777128 - RNA, 19 nt, Artificial Sequence
  Description of Artificial Sequence: Synthetic oligonucleotide
  Antisense strand to SEQ ID NO: 1777127
gaaccucuuagauucaagg

SEQ ID NO: 1777129 - RNA, 19 nt, Artificial Sequence
  Description of Artificial Sequence: Synthetic oligonucleotide
  Sense strand starting at position 3731 of SEQ ID NO: 1562847
gccucagucuuuccaucga

SEQ ID NO: 1777130 - RNA, 19 nt, Artificial Sequence
  Description of Artificial Sequence: Synthetic oligonucleotide
  Antisense strand to SEQ ID NO: 1777129
ucgauggaaagacugaggc

SEQ ID NO: 1777131 - RNA, 19 nt, Artificial Sequence
  Description of Artificial Sequence: Synthetic oligonucleotide
  Sense strand starting at position 3807 of SEQ ID NO: 1562847
ccaagaauguguccucaua

SEQ ID NO: 1777132 - RNA, 19 nt, Artificial Sequence
  Description of Artificial Sequence: Synthetic oligonucleotide
  Antisense strand to SEQ ID NO: 1777131
uaugaggacacauucuugg

SEQ ID NO: 1777133 - RNA, 19 nt, Artificial Sequence
  Description of Artificial Sequence: Synthetic oligonucleotide
  Sense strand starting at position 3809 of SEQ ID NO: 1562847
aagaauguguccucauagc

SEQ ID NO: 1777134 - RNA, 19 nt, Artificial Sequence
  Description of Artificial Sequence: Synthetic oligonucleotide
  Antisense strand to SEQ ID NO: 1777133
gcuaugaggacacauucuu

SEQ ID NO: 1777135 - RNA, 19 nt, Artificial Sequence
  Description of Artificial Sequence: Synthetic oligonucleotide
  Sense strand starting at position 3818 of SEQ ID NO: 1562847
uccucauagccaugugcua

SEQ ID NO: 1777136 - RNA, 19 nt, Artificial Sequence
  Description of Artificial Sequence: Synthetic oligonucleotide
  Antisense strand to SEQ ID NO: 1777135
uagcacauggcuaugagga

SEQ ID NO: 1777137 - RNA, 19 nt, Artificial Sequence
  Description of Artificial Sequence: Synthetic oligonucleotide
  Sense strand starting at position 3849 of SEQ ID NO: 1562847
gcaucugugugagcagaag

SEQ ID NO: 1777138 - RNA, 19 nt, Artificial Sequence
  Description of Artificial Sequence: Synthetic oligonucleotide
  Antisense strand to SEQ ID NO: 1777137
cuucugcucacacagaugc

SEQ ID NO: 1777139 - RNA, 19 nt, Artificial Sequence
  Description of Artificial Sequence: Synthetic oligonucleotide
  Sense strand starting at position 3861 of SEQ ID NO: 1562847
gcagaagucacuggugaca

SEQ ID NO: 1777140 - RNA, 19 nt, Artificial Sequence
  Description of Artificial Sequence: Synthetic oligonucleotide
  Antisense strand to SEQ ID NO: 1777139
ugucaccagugacuucugc

SEQ ID NO: 1777141 - RNA, 19 nt, Artificial Sequence
  Description of Artificial Sequence: Synthetic oligonucleotide
  Sense strand starting at position 3863 of SEQ ID NO: 1562847
agaagucacuggugacaug

SEQ ID NO: 1777142 - RNA, 19 nt, Artificial Sequence
  Description of Artificial Sequence: Synthetic oligonucleotide
  Antisense strand to SEQ ID NO: 1777141
caugucaccagugacuucu

SEQ ID NO: 1777143 - RNA, 19 nt, Artificial Sequence
  Description of Artificial Sequence: Synthetic oligonucleotide
  Sense strand starting at position 3914 of SEQ ID NO: 1562847
ccacauguacuaggauaua

SEQ ID NO: 1777144 - RNA, 19 nt, Artificial Sequence
  Description of Artificial Sequence: Synthetic oligonucleotide
  Antisense strand to SEQ ID NO: 1777143
uauauccuaguacaugugg

SEQ ID NO: 1777145 - RNA, 19 nt, Artificial Sequence
  Description of Artificial Sequence: Synthetic oligonucleotide
  Sense strand starting at position 3962 of SEQ ID NO: 1562847
uuugcauugcuguacagaa

SEQ ID NO: 1777146 - RNA, 19 nt, Artificial Sequence
  Description of Artificial Sequence: Synthetic oligonucleotide
  Antisense strand to SEQ ID NO: 1777145
uucuguacagcaaugcaaa

SEQ ID NO: 1777147 - RNA, 19 nt, Artificial Sequence
  Description of Artificial Sequence: Synthetic oligonucleotide
  Sense strand starting at position 333 of SEQ ID NO: 1562848
cgggaaguguuccucuuua

SEQ ID NO: 1777148 - RNA, 19 nt, Artificial Sequence
  Description of Artificial Sequence: Synthetic oligonucleotide
  Antisense strand to SEQ ID NO: 1777147
uaaagaggaacacuucccg

SEQ ID NO: 1777149 - RNA, 19 nt, Artificial Sequence
  Description of Artificial Sequence: Synthetic oligonucleotide
  Sense strand starting at position 362 of SEQ ID NO: 1562848
ucaggugugccuugggauu

SEQ ID NO: 1777150 - RNA, 19 nt, Artificial Sequence
  Description of Artificial Sequence: Synthetic oligonucleotide
  Antisense strand to SEQ ID NO: 1777149
aaucccaaggcacaccuga

SEQ ID NO: 1777151 - RNA, 19 nt, Artificial Sequence
  Description of Artificial Sequence: Synthetic oligonucleotide
  Sense strand starting at position 399 of SEQ ID NO: 1562848
accaaacuguuagauuaga

SEQ ID NO: 1777152 - RNA, 19 nt, Artificial Sequence
  Description of Artificial Sequence: Synthetic oligonucleotide
  Antisense strand to SEQ ID NO: 1777151
ucuaaucuaacaguuuggu

SEQ ID NO: 1777153 - RNA, 19 nt, Artificial Sequence
  Description of Artificial Sequence: Synthetic oligonucleotide
  Sense strand starting at position 644 of SEQ ID NO: 1562848
gaauuaguuuaacccagga

SEQ ID NO: 1777154 - RNA, 19 nt, Artificial Sequence
  Description of Artificial Sequence: Synthetic oligonucleotide
  Antisense strand to SEQ ID NO: 1777153
uccuggguuaaacuaauuc

SEQ ID NO: 1777155 - RNA, 19 nt, Artificial Sequence
  Description of Artificial Sequence: Synthetic oligonucleotide
  Sense strand starting at position 798 of SEQ ID NO: 1562848
ucgagagugccagauggaa

SEQ ID NO: 1777156 - RNA, 19 nt, Artificial Sequence
  Description of Artificial Sequence: Synthetic oligonucleotide
  Antisense strand to SEQ ID NO: 1777155
uuccaucuggcacucucga

SEQ ID NO: 1777157 - RNA, 19 nt, Artificial Sequence
  Description of Artificial Sequence: Synthetic oligonucleotide
  Sense strand starting at position 800 of SEQ ID NO: 1562848
gagagugccagauggaaau

SEQ ID NO: 1777158 - RNA, 19 nt, Artificial Sequence
  Description of Artificial Sequence: Synthetic oligonucleotide
  Antisense strand to SEQ ID NO: 1777157
auuuccaucuggcacucuc

SEQ ID NO: 1777159 - RNA, 19 nt, Artificial Sequence
  Description of Artificial Sequence: Synthetic oligonucleotide
  Sense strand starting at position 875 of SEQ ID NO: 1562848
gaggaagggucauggagaa

SEQ ID NO: 1777160 - RNA, 19 nt, Artificial Sequence
  Description of Artificial Sequence: Synthetic oligonucleotide
  Antisense strand to SEQ ID NO: 1777159
uucuccaugacccuuccuc

SEQ ID NO: 1777161 - RNA, 19 nt, Artificial Sequence
  Description of Artificial Sequence: Synthetic oligonucleotide
  Sense strand starting at position 941 of SEQ ID NO: 1562848
ggagaauacuuacuucuug

SEQ ID NO: 1777162 - RNA, 19 nt, Artificial Sequence
  Description of Artificial Sequence: Synthetic oligonucleotide
  Antisense strand to SEQ ID NO: 1777161
caagaaguaaguauucucc

SEQ ID NO: 1777163 - RNA, 19 nt, Artificial Sequence
  Description of Artificial Sequence: Synthetic oligonucleotide
  Sense strand starting at position 1048 of SEQ ID NO: 1562848
cugagaaacuuuguaggcu

SEQ ID NO: 1777164 - RNA, 19 nt, Artificial Sequence
  Description of Artificial Sequence: Synthetic oligonucleotide
  Antisense strand to SEQ ID NO: 1777163
agccuacaaaguuucucag

SEQ ID NO: 1777165 - RNA, 19 nt, Artificial Sequence
  Description of Artificial Sequence: Synthetic oligonucleotide
  Sense strand starting at position 1052 of SEQ ID NO: 1562848
gaaacuuuguaggcuguua

SEQ ID NO: 1777166 - RNA, 19 nt, Artificial Sequence
  Description of Artificial Sequence: Synthetic oligonucleotide
  Antisense strand to SEQ ID NO: 1777165
uaacagccuacaaaguuuc

SEQ ID NO: 1777167 - RNA, 19 nt, Artificial Sequence
  Description of Artificial Sequence: Synthetic oligonucleotide
  Sense strand starting at position 1054 of SEQ ID NO: 1562848
aacuuuguaggcuguuaau

SEQ ID NO: 1777168 - RNA, 19 nt, Artificial Sequence
  Description of Artificial Sequence: Synthetic oligonucleotide
  Antisense strand to SEQ ID NO: 1777167
auuaacagccuacaaaguu

SEQ ID NO: 1777169 - RNA, 19 nt, Artificial Sequence
  Description of Artificial Sequence: Synthetic oligonucleotide
  Sense strand starting at position 1089 of SEQ ID NO: 1562848
ccagcauucuugcuuuguu

SEQ ID NO: 1777170 - RNA, 19 nt, Artificial Sequence
  Description of Artificial Sequence: Synthetic oligonucleotide
  Antisense strand to SEQ ID NO: 1777169
aacaaagcaagaaugcugg

SEQ ID NO: 1777171 - RNA, 19 nt, Artificial Sequence
  Description of Artificial Sequence: Synthetic oligonucleotide
  Sense strand starting at position 1098 of SEQ ID NO: 1562848
uugcuuuguucucuacaca

SEQ ID NO: 1777172 - RNA, 19 nt, Artificial Sequence
  Description of Artificial Sequence: Synthetic oligonucleotide
  Antisense strand to SEQ ID NO: 1777171
uguguagagaacaaagcaa

SEQ ID NO: 1777173 - RNA, 19 nt, Artificial Sequence
  Description of Artificial Sequence: Synthetic oligonucleotide
  Sense strand starting at position 1099 of SEQ ID NO: 1562848
ugcuuuguucucuacacau

SEQ ID NO: 1777174 - RNA, 19 nt, Artificial Sequence
  Description of Artificial Sequence: Synthetic oligonucleotide
  Antisense strand to SEQ ID NO: 1777173
auguguagagaacaaagca

SEQ ID NO: 1777175 - RNA, 19 nt, Artificial Sequence
  Description of Artificial Sequence: Synthetic oligonucleotide
  Sense strand starting at position 1239 of SEQ ID NO: 1562848
uucccagaagccugaaaga

SEQ ID NO: 1777176 - RNA, 19 nt, Artificial Sequence
  Description of Artificial Sequence: Synthetic oligonucleotide
  Antisense strand to SEQ ID NO: 1777175
ucuuucaggcuucugggaa

SEQ ID NO: 1777177 - RNA, 19 nt, Artificial Sequence
  Description of Artificial Sequence: Synthetic oligonucleotide
  Sense strand starting at position 1256 of SEQ ID NO: 1562848
gauacaagaguauguauaa

SEQ ID NO: 1777178 - RNA, 19 nt, Artificial Sequence
  Description of Artificial Sequence: Synthetic oligonucleotide
  Antisense strand to SEQ ID NO: 1777177
uuauacauacucuuguauc

SEQ ID NO: 1777179 - RNA, 19 nt, Artificial Sequence
  Description of Artificial Sequence: Synthetic oligonucleotide
  Sense strand starting at position 1736 of SEQ ID NO: 1562848
ucgccagggugcucagauu

SEQ ID NO: 1777180 - RNA, 19 nt, Artificial Sequence
  Description of Artificial Sequence: Synthetic oligonucleotide
  Antisense strand to SEQ ID NO: 1777179
aaucugagcacccuggcga

SEQ ID NO: 1777181 - RNA, 19 nt, Artificial Sequence
  Description of Artificial Sequence: Synthetic oligonucleotide
  Sense strand starting at position 1778 of SEQ ID NO: 1562848
gauggcucaucccugagau

SEQ ID NO: 1777182 - RNA, 19 nt, Artificial Sequence
  Description of Artificial Sequence: Synthetic oligonucleotide
  Antisense strand to SEQ ID NO: 1777181
aucucagggaugagccauc

SEQ ID NO: 1777183 - RNA, 19 nt, Artificial Sequence
  Description of Artificial Sequence: Synthetic oligonucleotide
  Sense strand starting at position 1779 of SEQ ID NO: 1562848
auggcucaucccugagaua

SEQ ID NO: 1777184 - RNA, 19 nt, Artificial Sequence
  Description of Artificial Sequence: Synthetic oligonucleotide
  Antisense strand to SEQ ID NO: 1777183
uaucucagggaugagccau

SEQ ID NO: 1777185 - RNA, 19 nt, Artificial Sequence
  Description of Artificial Sequence: Synthetic oligonucleotide
  Sense strand starting at position 1780 of SEQ ID NO: 1562848
uggcucaucccugagauau

SEQ ID NO: 1777186 - RNA, 19 nt, Artificial Sequence
  Description of Artificial Sequence: Synthetic oligonucleotide
  Antisense strand to SEQ ID NO: 1777185
auaucucagggaugagcca

SEQ ID NO: 1777187 - RNA, 19 nt, Artificial Sequence
  Description of Artificial Sequence: Synthetic oligonucleotide
  Sense strand starting at position 2412 of SEQ ID NO: 1562848
gcauucguucgaguccgaa

SEQ ID NO: 1777188 - RNA, 19 nt, Artificial Sequence
  Description of Artificial Sequence: Synthetic oligonucleotide
  Antisense strand to SEQ ID NO: 1777187
uucggacucgaacgaaugc

SEQ ID NO: 1777189 - RNA, 19 nt, Artificial Sequence
  Description of Artificial Sequence: Synthetic oligonucleotide
  Sense strand starting at position 2479 of SEQ ID NO: 1562848
gcccaauagcgcguguuga

SEQ ID NO: 1777190 - RNA, 19 nt, Artificial Sequence
  Description of Artificial Sequence: Synthetic oligonucleotide
  Antisense strand to SEQ ID NO: 1777189
ucaacacgcgcuauugggc

SEQ ID NO: 1777191 - RNA, 19 nt, Artificial Sequence
  Description of Artificial Sequence: Synthetic oligonucleotide
  Sense strand starting at position 2490 of SEQ ID NO: 1562848
cguguugaugaaugacgga

SEQ ID NO: 1777192 - RNA, 19 nt, Artificial Sequence
  Description of Artificial Sequence: Synthetic oligonucleotide
  Antisense strand to SEQ ID NO: 1777191
uccgucauucaucaacacg

SEQ ID NO: 1777193 - RNA, 19 nt, Artificial Sequence
  Description of Artificial Sequence: Synthetic oligonucleotide
  Sense strand starting at position 2503 of SEQ ID NO: 1562848
gacggaagcuaguuaauaa

SEQ ID NO: 1777194 - RNA, 19 nt, Artificial Sequence
  Description of Artificial Sequence: Synthetic oligonucleotide
  Antisense strand to SEQ ID NO: 1777193
uuauuaacuagcuuccguc

SEQ ID NO: 1777195 - RNA, 19 nt, Artificial Sequence
  Description of Artificial Sequence: Synthetic oligonucleotide
  Sense strand starting at position 2513 of SEQ ID NO: 1562848
aguuaauaagucggacuca

SEQ ID NO: 1777196 - RNA, 19 nt, Artificial Sequence
  Description of Artificial Sequence: Synthetic oligonucleotide
  Antisense strand to SEQ ID NO: 1777195
ugaguccgacuuauuaacu

SEQ ID NO: 1777197 - RNA, 19 nt, Artificial Sequence
  Description of Artificial Sequence: Synthetic oligonucleotide
  Sense strand starting at position 3399 of SEQ ID NO: 1562848
ucugcaucgcccgagaagu

SEQ ID NO: 1777198 - RNA, 19 nt, Artificial Sequence
  Description of Artificial Sequence: Synthetic oligonucleotide
  Antisense strand to SEQ ID NO: 1777197
acuucucgggcgaugcaga

SEQ ID NO: 1777199 - RNA, 19 nt, Artificial Sequence
  Description of Artificial Sequence: Synthetic oligonucleotide
  Sense strand starting at position 3400 of SEQ ID NO: 1562848
cugcaucgcccgagaagug

SEQ ID NO: 1777200 - RNA, 19 nt, Artificial Sequence
  Description of Artificial Sequence: Synthetic oligonucleotide
  Antisense strand to SEQ ID NO: 1777199
cacuucucgggcgaugcag

SEQ ID NO: 1777201 - RNA, 19 nt, Artificial Sequence
  Description of Artificial Sequence: Synthetic oligonucleotide
  Sense strand starting at position 3410 of SEQ ID NO: 1562848
cgagaagugcucagacggu

SEQ ID NO: 1777202 - RNA, 19 nt, Artificial Sequence
  Description of Artificial Sequence: Synthetic oligonucleotide
  Antisense strand to SEQ ID NO: 1777201
accgucugagcacuucucg

SEQ ID NO: 1777203 - RNA, 19 nt, Artificial Sequence
  Description of Artificial Sequence: Synthetic oligonucleotide
  Sense strand starting at position 3436 of SEQ ID NO: 1562848
gugaaaccgggaugaaauc

SEQ ID NO: 1777204 - RNA, 19 nt, Artificial Sequence
  Description of Artificial Sequence: Synthetic oligonucleotide
  Antisense strand to SEQ ID NO: 1777203
gauuucaucccgguuucac

SEQ ID NO: 1777205 - RNA, 19 nt, Artificial Sequence
  Description of Artificial Sequence: Synthetic oligonucleotide
  Sense strand starting at position 3478 of SEQ ID NO: 1562848
ggaugaagauccgaaaucu

SEQ ID NO: 1777206 - RNA, 19 nt, Artificial Sequence
  Description of Artificial Sequence: Synthetic oligonucleotide
  Antisense strand to SEQ ID NO: 1777205
agauuucggaucuucaucc

SEQ ID NO: 1777207 - RNA, 19 nt, Artificial Sequence
  Description of Artificial Sequence: Synthetic oligonucleotide
  Sense strand starting at position 3552 of SEQ ID NO: 1562848
aauuguggucccuaaauag

SEQ ID NO: 1777208 - RNA, 19 nt, Artificial Sequence
  Description of Artificial Sequence: Synthetic oligonucleotide
  Antisense strand to SEQ ID NO: 1777207
cuauuuagggaccacaauu

SEQ ID NO: 1777209 - RNA, 19 nt, Artificial Sequence
  Description of Artificial Sequence: Synthetic oligonucleotide
  Sense strand starting at position 3594 of SEQ ID NO: 1562848
ccgcgaaggauccacgauu

SEQ ID NO: 1777210 - RNA, 19 nt, Artificial Sequence
  Description of Artificial Sequence: Synthetic oligonucleotide
  Antisense strand to SEQ ID NO: 1777209
aaucguggauccuucgcgg

SEQ ID NO: 1777211 - RNA, 19 nt, Artificial Sequence
  Description of Artificial Sequence: Synthetic oligonucleotide
  Sense strand starting at position 3609 of SEQ ID NO: 1562848
gauuaaugcugagcuggga

SEQ ID NO: 1777212 - RNA, 19 nt, Artificial Sequence
  Description of Artificial Sequence: Synthetic oligonucleotide
  Antisense strand to SEQ ID NO: 1777211
ucccagcucagcauuaauc

SEQ ID NO: 1777213 - RNA, 19 nt, Artificial Sequence
  Description of Artificial Sequence: Synthetic oligonucleotide
  Sense strand starting at position 3683 of SEQ ID NO: 1562848
gcuucuuagcucuguggca

SEQ ID NO: 1777214 - RNA, 19 nt, Artificial Sequence
  Description of Artificial Sequence: Synthetic oligonucleotide
  Antisense strand to SEQ ID NO: 1777213
ugccacagagcuaagaagc

SEQ ID NO: 1777215 - RNA, 19 nt, Artificial Sequence
  Description of Artificial Sequence: Synthetic oligonucleotide
  Sense strand starting at position 3776 of SEQ ID NO: 1562848
guaaucaguuucgucauag

SEQ ID NO: 1777216 - RNA, 19 nt, Artificial Sequence
  Description of Artificial Sequence: Synthetic oligonucleotide
  Antisense strand to SEQ ID NO: 1777215
cuaugacgaaacugauuac

SEQ ID NO: 1777217 - RNA, 19 nt, Artificial Sequence
  Description of Artificial Sequence: Synthetic oligonucleotide
  Sense strand starting at position 3777 of SEQ ID NO: 1562848
uaaucaguuucgucauagu

SEQ ID NO: 1777218 - RNA, 19 nt, Artificial Sequence
  Description of Artificial Sequence: Synthetic oligonucleotide
  Antisense strand to SEQ ID NO: 1777217
acuaugacgaaacugauua

SEQ ID NO: 1777219 - RNA, 19 nt, Artificial Sequence
  Description of Artificial Sequence: Synthetic oligonucleotide
  Sense strand starting at position 3788 of SEQ ID NO: 1562848
gucauaguucugccuuguu

SEQ ID NO: 1777220 - RNA, 19 nt, Artificial Sequence
  Description of Artificial Sequence: Synthetic oligonucleotide
  Antisense strand to SEQ ID NO: 1777219
aacaaggcagaacuaugac

SEQ ID NO: 1777221 - RNA, 19 nt, Artificial Sequence
  Description of Artificial Sequence: Synthetic oligonucleotide
  Sense strand starting at position 3892 of SEQ ID NO: 1562848
agcacuguagcacagaaau

SEQ ID NO: 1777222 - RNA, 19 nt, Artificial Sequence
  Description of Artificial Sequence: Synthetic oligonucleotide
  Antisense strand to SEQ ID NO: 1777221
auuucugugcuacagugcu

SEQ ID NO: 1777223 - RNA, 19 nt, Artificial Sequence
  Description of Artificial Sequence: Synthetic oligonucleotide
  Sense strand starting at position 3939 of SEQ ID NO: 1562848
gccugauucuggccugucu

SEQ ID NO: 1777224 - RNA, 19 nt, Artificial Sequence
  Description of Artificial Sequence: Synthetic oligonucleotide
  Antisense strand to SEQ ID NO: 1777223
agacaggccagaaucaggc

SEQ ID NO: 1777225 - RNA, 19 nt, Artificial Sequence
  Description of Artificial Sequence: Synthetic oligonucleotide
  Sense strand starting at position 3941 of SEQ ID NO: 1562848
cugauucuggccugucuga

SEQ ID NO: 1777226 - RNA, 19 nt, Artificial Sequence
  Description of Artificial Sequence: Synthetic oligonucleotide
  Antisense strand to SEQ ID NO: 1777225
ucagacaggccagaaucag

SEQ ID NO: 1777227 - RNA, 19 nt, Artificial Sequence
  Description of Artificial Sequence: Synthetic oligonucleotide
  Sense strand starting at position 18 of SEQ ID NO: 1562849
ugcuaaagugccugccaua

SEQ ID NO: 1777228 - RNA, 19 nt, Artificial Sequence
  Description of Artificial Sequence: Synthetic oligonucleotide
  Antisense strand to SEQ ID NO: 1777227
uauggcaggcacuuuagca

SEQ ID NO: 1777229 - RNA, 19 nt, Artificial Sequence
  Description of Artificial Sequence: Synthetic oligonucleotide
  Sense strand starting at position 97 of SEQ ID NO: 1562849
cugcuauugcuccagcaaa

SEQ ID NO: 1777230 - RNA, 19 nt, Artificial Sequence
  Description of Artificial Sequence: Synthetic oligonucleotide
  Antisense strand to SEQ ID NO: 1777229
uuugcuggagcaauagcag

SEQ ID NO: 1777231 - RNA, 19 nt, Artificial Sequence
  Description of Artificial Sequence: Synthetic oligonucleotide
  Sense strand starting at position 622 of SEQ ID NO: 1562849
gguacacuguccuacaaac

SEQ ID NO: 1777232 - RNA, 19 nt, Artificial Sequence
  Description of Artificial Sequence: Synthetic oligonucleotide
  Antisense strand to SEQ ID NO: 1777231
guuuguaggacaguguacc

SEQ ID NO: 1777233 - RNA, 19 nt, Artificial Sequence
  Description of Artificial Sequence: Synthetic oligonucleotide
  Sense strand starting at position 695 of SEQ ID NO: 1562849
gggacuuuaucacaugcaa

SEQ ID NO: 1777234 - RNA, 19 nt, Artificial Sequence
  Description of Artificial Sequence: Synthetic oligonucleotide
  Antisense strand to SEQ ID NO: 1777233
uugcaugugauaaaguccc

SEQ ID NO: 1777235 - RNA, 19 nt, Artificial Sequence
  Description of Artificial Sequence: Synthetic oligonucleotide
  Sense strand starting at position 1040 of SEQ ID NO: 1562849
cucccuuuccgagauguaa

SEQ ID NO: 1777236 - RNA, 19 nt, Artificial Sequence
  Description of Artificial Sequence: Synthetic oligonucleotide
  Antisense strand to SEQ ID NO: 1777235
uuacaucucggaaagggag

SEQ ID NO: 1777237 - RNA, 19 nt, Artificial Sequence
  Description of Artificial Sequence: Synthetic oligonucleotide
  Sense strand starting at position 1112 of SEQ ID NO: 1562849
cugagucacuguuaccauu

SEQ ID NO: 1777238 - RNA, 19 nt, Artificial Sequence
  Description of Artificial Sequence: Synthetic oligonucleotide
  Antisense strand to SEQ ID NO: 1777237
aaugguaacagugacucag

SEQ ID NO: 1777239 - RNA, 19 nt, Artificial Sequence
  Description of Artificial Sequence: Synthetic oligonucleotide
  Sense strand starting at position 1127 of SEQ ID NO: 1562849
cauugcuuauugguuagau

SEQ ID NO: 1777240 - RNA, 19 nt, Artificial Sequence
  Description of Artificial Sequence: Synthetic oligonucleotide
  Antisense strand to SEQ ID NO: 1777239
aucuaaccaauaagcaaug

SEQ ID NO: 1777241 - RNA, 19 nt, Artificial Sequence
  Description of Artificial Sequence: Synthetic oligonucleotide
  Sense strand starting at position 1139 of SEQ ID NO: 1562849
guuagauuuccuggucuug

SEQ ID NO: 1777242 - RNA, 19 nt, Artificial Sequence
  Description of Artificial Sequence: Synthetic oligonucleotide
  Antisense strand to SEQ ID NO: 1777241
caagaccaggaaaucuaac

SEQ ID NO: 1777243 - RNA, 19 nt, Artificial Sequence
  Description of Artificial Sequence: Synthetic oligonucleotide
  Sense strand starting at position 1150 of SEQ ID NO: 1562849
uggucuuggucccaggagu

SEQ ID NO: 1777244 - RNA, 19 nt, Artificial Sequence
  Description of Artificial Sequence: Synthetic oligonucleotide
  Antisense strand to SEQ ID NO: 1777243
acuccugggaccaagacca

SEQ ID NO: 1777245 - RNA, 19 nt, Artificial Sequence
  Description of Artificial Sequence: Synthetic oligonucleotide
  Sense strand starting at position 1251 of SEQ ID NO: 1562849
agggcuuucugcgcuuuau

SEQ ID NO: 1777246 - RNA, 19 nt, Artificial Sequence
  Description of Artificial Sequence: Synthetic oligonucleotide
  Antisense strand to SEQ ID NO: 1777245
auaaagcgcagaaagcccu

SEQ ID NO: 1777247 - RNA, 19 nt, Artificial Sequence
  Description of Artificial Sequence: Synthetic oligonucleotide
  Sense strand starting at position 1313 of SEQ ID NO: 1562849
guguguaucucguuuguuu

SEQ ID NO: 1777248 - RNA, 19 nt, Artificial Sequence
  Description of Artificial Sequence: Synthetic oligonucleotide
  Antisense strand to SEQ ID NO: 1777247
aaacaaacgagauacacac

SEQ ID NO: 1777249 - RNA, 19 nt, Artificial Sequence
  Description of Artificial Sequence: Synthetic oligonucleotide
  Sense strand starting at position 2058 of SEQ ID NO: 1562849
gcuugugaccucgggcuua

SEQ ID NO: 1777250 - RNA, 19 nt, Artificial Sequence
  Description of Artificial Sequence: Synthetic oligonucleotide
  Antisense strand to SEQ ID NO: 1777249
uaagcccgaggucacaagc

SEQ ID NO: 1777251 - RNA, 19 nt, Artificial Sequence
  Description of Artificial Sequence: Synthetic oligonucleotide
  Sense strand starting at position 2070 of SEQ ID NO: 1562849
gggcuuauccagcaucucu

SEQ ID NO: 1777252 - RNA, 19 nt, Artificial Sequence
  Description of Artificial Sequence: Synthetic oligonucleotide
  Antisense strand to SEQ ID NO: 1777251
agagaugcuggauaagccc

SEQ ID NO: 1777253 - RNA, 19 nt, Artificial Sequence
  Description of Artificial Sequence: Synthetic oligonucleotide
  Sense strand starting at position 2190 of SEQ ID NO: 1562849
gcccaaggguucgagaaca

SEQ ID NO: 1777254 - RNA, 19 nt, Artificial Sequence
  Description of Artificial Sequence: Synthetic oligonucleotide
  Antisense strand to SEQ ID NO: 1777253
uguucucgaacccuugggc

SEQ ID NO: 1777255 - RNA, 19 nt, Artificial Sequence
  Description of Artificial Sequence: Synthetic oligonucleotide
  Sense strand starting at position 2303 of SEQ ID NO: 1562849
cuaggaugguuccgaggau

SEQ ID NO: 1777256 - RNA, 19 nt, Artificial Sequence
  Description of Artificial Sequence: Synthetic oligonucleotide
  Antisense strand to SEQ ID NO: 1777255
auccucggaaccauccuag

SEQ ID NO: 1777257 - RNA, 19 nt, Artificial Sequence
  Description of Artificial Sequence: Synthetic oligonucleotide
  Sense strand starting at position 2304 of SEQ ID NO: 1562849
uaggaugguuccgaggauu

SEQ ID NO: 1777258 - RNA, 19 nt, Artificial Sequence
  Description of Artificial Sequence: Synthetic oligonucleotide
  Antisense strand to SEQ ID NO: 1777257
aauccucggaaccauccua

SEQ ID NO: 1777259 - RNA, 19 nt, Artificial Sequence
  Description of Artificial Sequence: Synthetic oligonucleotide
  Sense strand starting at position 2307 of SEQ ID NO: 1562849
gaugguuccgaggauuaau

SEQ ID NO: 1777260 - RNA, 19 nt, Artificial Sequence
  Description of Artificial Sequence: Synthetic oligonucleotide
  Antisense strand to SEQ ID NO: 1777259
auuaauccucggaaccauc

SEQ ID NO: 1777261 - RNA, 19 nt, Artificial Sequence
  Description of Artificial Sequence: Synthetic oligonucleotide
  Sense strand starting at position 2310 of SEQ ID NO: 1562849
gguuccgaggauuaauuau

SEQ ID NO: 1777262 - RNA, 19 nt, Artificial Sequence
  Description of Artificial Sequence: Synthetic oligonucleotide
  Antisense strand to SEQ ID NO: 1777261
auaauuaauccucggaacc

SEQ ID NO: 1777263 - RNA, 19 nt, Artificial Sequence
  Description of Artificial Sequence: Synthetic oligonucleotide
  Sense strand starting at position 2316 of SEQ ID NO: 1562849
gaggauuaauuauaacagu

SEQ ID NO: 1777264 - RNA, 19 nt, Artificial Sequence
  Description of Artificial Sequence: Synthetic oligonucleotide
  Antisense strand to SEQ ID NO: 1777263
acuguuauaauuaauccuc

SEQ ID NO: 1777265 - RNA, 19 nt, Artificial Sequence
  Description of Artificial Sequence: Synthetic oligonucleotide
  Sense strand starting at position 22 of SEQ ID NO: 1562850
uuagguaguccauaauauu

SEQ ID NO: 1777266 - RNA, 19 nt, Artificial Sequence
  Description of Artificial Sequence: Synthetic oligonucleotide
  Antisense strand to SEQ ID NO: 1777265
aauauuauggacuaccuaa

SEQ ID NO: 1777267 - RNA, 19 nt, Artificial Sequence
  Description of Artificial Sequence: Synthetic oligonucleotide
  Sense strand starting at position 81 of SEQ ID NO: 1562850
uggccuaugagcugagaaa

SEQ ID NO: 1777268 - RNA, 19 nt, Artificial Sequence
  Description of Artificial Sequence: Synthetic oligonucleotide
  Antisense strand to SEQ ID NO: 1777267
uuucucagcucauaggcca

SEQ ID NO: 1777269 - RNA, 19 nt, Artificial Sequence
  Description of Artificial Sequence: Synthetic oligonucleotide
  Sense strand starting at position 82 of SEQ ID NO: 1562850
ggccuaugagcugagaaac

SEQ ID NO: 1777270 - RNA, 19 nt, Artificial Sequence
  Description of Artificial Sequence: Synthetic oligonucleotide
  Antisense strand to SEQ ID NO: 1777269
guuucucagcucauaggcc

SEQ ID NO: 1777271 - RNA, 19 nt, Artificial Sequence
  Description of Artificial Sequence: Synthetic oligonucleotide
  Sense strand starting at position 112 of SEQ ID NO: 1562850
uauggcuggucauuaacga

SEQ ID NO: 1777272 - RNA, 19 nt, Artificial Sequence
  Description of Artificial Sequence: Synthetic oligonucleotide
  Antisense strand to SEQ ID NO: 1777271
ucguuaaugaccagccaua

SEQ ID NO: 1777273 - RNA, 19 nt, Artificial Sequence
  Description of Artificial Sequence: Synthetic oligonucleotide
  Sense strand starting at position 163 of SEQ ID NO: 1562850
gaaguucucugagucaccu

SEQ ID NO: 1777274 - RNA, 19 nt, Artificial Sequence
  Description of Artificial Sequence: Synthetic oligonucleotide
  Antisense strand to SEQ ID NO: 1777273
aggugacucagagaacuuc

SEQ ID NO: 1777275 - RNA, 19 nt, Artificial Sequence
  Description of Artificial Sequence: Synthetic oligonucleotide
  Sense strand starting at position 651 of SEQ ID NO: 1562850
agucauaggcccuauaaag

SEQ ID NO: 1777276 - RNA, 19 nt, Artificial Sequence
  Description of Artificial Sequence: Synthetic oligonucleotide
  Antisense strand to SEQ ID NO: 1777275
cuuuauagggccuaugacu

SEQ ID NO: 1777277 - RNA, 19 nt, Artificial Sequence
  Description of Artificial Sequence: Synthetic oligonucleotide
  Sense strand starting at position 668 of SEQ ID NO: 1562850
agggaagacuuucugcaug

SEQ ID NO: 1777278 - RNA, 19 nt, Artificial Sequence
  Description of Artificial Sequence: Synthetic oligonucleotide
  Antisense strand to SEQ ID NO: 1777277
caugcagaaagucuucccu

SEQ ID NO: 1777279 - RNA, 19 nt, Artificial Sequence
  Description of Artificial Sequence: Synthetic oligonucleotide
  Sense strand starting at position 689 of SEQ ID NO: 1562850
aucaaugucuccuguccua

SEQ ID NO: 1777280 - RNA, 19 nt, Artificial Sequence
  Description of Artificial Sequence: Synthetic oligonucleotide
  Antisense strand to SEQ ID NO: 1777279
uaggacaggagacauugau

SEQ ID NO: 1777281 - RNA, 19 nt, Artificial Sequence
  Description of Artificial Sequence: Synthetic oligonucleotide
  Sense strand starting at position 1058 of SEQ ID NO: 1562850
gucuauuaauguggccaaa

SEQ ID NO: 1777282 - RNA, 19 nt, Artificial Sequence
  Description of Artificial Sequence: Synthetic oligonucleotide
  Antisense strand to SEQ ID NO: 1777281
uuuggccacauuaauagac

SEQ ID NO: 1777283 - RNA, 19 nt, Artificial Sequence
  Description of Artificial Sequence: Synthetic oligonucleotide
  Sense strand starting at position 1124 of SEQ ID NO: 1562850
ccuacaguaucaucuuaug

SEQ ID NO: 1777284 - RNA, 19 nt, Artificial Sequence
  Description of Artificial Sequence: Synthetic oligonucleotide
  Antisense strand to SEQ ID NO: 1777283
cauaagaugauacuguagg

SEQ ID NO: 1777285 - RNA, 19 nt, Artificial Sequence
  Description of Artificial Sequence: Synthetic oligonucleotide
  Sense strand starting at position 1127 of SEQ ID NO: 1562850
acaguaucaucuuaugggu

SEQ ID NO: 1777286 - RNA, 19 nt, Artificial Sequence
  Description of Artificial Sequence: Synthetic oligonucleotide
  Antisense strand to SEQ ID NO: 1777285
acccauaagaugauacugu

SEQ ID NO: 1777287 - RNA, 19 nt, Artificial Sequence
  Description of Artificial Sequence: Synthetic oligonucleotide
  Sense strand starting at position 1135 of SEQ ID NO: 1562850
aucuuauggguccggaaau

SEQ ID NO: 1777288 - RNA, 19 nt, Artificial Sequence
  Description of Artificial Sequence: Synthetic oligonucleotide
  Antisense strand to SEQ ID NO: 1777287
auuuccggacccauaagau

SEQ ID NO: 1777289 - RNA, 19 nt, Artificial Sequence
  Description of Artificial Sequence: Synthetic oligonucleotide
  Sense strand starting at position 1136 of SEQ ID NO: 1562850
ucuuauggguccggaaaug

SEQ ID NO: 1777290 - RNA, 19 nt, Artificial Sequence
  Description of Artificial Sequence: Synthetic oligonucleotide
  Antisense strand to SEQ ID NO: 1777289
cauuuccggacccauaaga

SEQ ID NO: 1777291 - RNA, 19 nt, Artificial Sequence
  Description of Artificial Sequence: Synthetic oligonucleotide
  Sense strand starting at position 1146 of SEQ ID NO: 1562850
ccggaaaugccauacauca

SEQ ID NO: 1777292 - RNA, 19 nt, Artificial Sequence
  Description of Artificial Sequence: Synthetic oligonucleotide
  Antisense strand to SEQ ID NO: 1777291
ugauguauggcauuuccgg

SEQ ID NO: 1777293 - RNA, 19 nt, Artificial Sequence
  Description of Artificial Sequence: Synthetic oligonucleotide
  Sense strand starting at position 1378 of SEQ ID NO: 1562850
uccaguauccggcaacgau

SEQ ID NO: 1777294 - RNA, 19 nt, Artificial Sequence
  Description of Artificial Sequence: Synthetic oligonucleotide
  Antisense strand to SEQ ID NO: 1777293
aucguugccggauacugga

SEQ ID NO: 1777295 - RNA, 19 nt, Artificial Sequence
  Description of Artificial Sequence: Synthetic oligonucleotide
  Sense strand starting at position 1442 of SEQ ID NO: 1562850
cccgggaguucgugggaau

SEQ ID NO: 1777296 - RNA, 19 nt, Artificial Sequence
  Description of Artificial Sequence: Synthetic oligonucleotide
  Antisense strand to SEQ ID NO: 1777295
auucccacgaacucccggg

SEQ ID NO: 1777297 - RNA, 19 nt, Artificial Sequence
  Description of Artificial Sequence: Synthetic oligonucleotide
  Sense strand starting at position 1443 of SEQ ID NO: 1562850
ccgggaguucgugggaaua

SEQ ID NO: 1777298 - RNA, 19 nt, Artificial Sequence
  Description of Artificial Sequence: Synthetic oligonucleotide
  Antisense strand to SEQ ID NO: 1777297
uauucccacgaacucccgg

SEQ ID NO: 1777299 - RNA, 19 nt, Artificial Sequence
  Description of Artificial Sequence: Synthetic oligonucleotide
  Sense strand starting at position 1444 of SEQ ID NO: 1562850
cgggaguucgugggaauaa

SEQ ID NO: 1777300 - RNA, 19 nt, Artificial Sequence
  Description of Artificial Sequence: Synthetic oligonucleotide
  Antisense strand to SEQ ID NO: 1777299
uuauucccacgaacucccg

SEQ ID NO: 1777301 - RNA, 19 nt, Artificial Sequence
  Description of Artificial Sequence: Synthetic oligonucleotide
  Sense strand starting at position 1445 of SEQ ID NO: 1562850
gggaguucgugggaauaac

SEQ ID NO: 1777302 - RNA, 19 nt, Artificial Sequence
  Description of Artificial Sequence: Synthetic oligonucleotide
  Antisense strand to SEQ ID NO: 1777301
guuauucccacgaacuccc

SEQ ID NO: 1777303 - RNA, 19 nt, Artificial Sequence
  Description of Artificial Sequence: Synthetic oligonucleotide
  Sense strand starting at position 2296 of SEQ ID NO: 1562850
ucuguaacccugggcaaga

SEQ ID NO: 1777304 - RNA, 19 nt, Artificial Sequence
  Description of Artificial Sequence: Synthetic oligonucleotide
  Antisense strand to SEQ ID NO: 1777303
ucuugcccaggguuacaga

SEQ ID NO: 1777305 - RNA, 19 nt, Artificial Sequence
  Description of Artificial Sequence: Synthetic oligonucleotide
  Sense strand starting at position 2344 of SEQ ID NO: 1562850
gaacaauagugguaucuuc

SEQ ID NO: 1777306 - RNA, 19 nt, Artificial Sequence
  Description of Artificial Sequence: Synthetic oligonucleotide
  Antisense strand to SEQ ID NO: 1777305
gaagauaccacuauuguuc

SEQ ID NO: 1777307 - RNA, 19 nt, Artificial Sequence
  Description of Artificial Sequence: Synthetic oligonucleotide
  Sense strand starting at position 2655 of SEQ ID NO: 1562850
agaugagguuucugccauu

SEQ ID NO: 1777308 - RNA, 19 nt, Artificial Sequence
  Description of Artificial Sequence: Synthetic oligonucleotide
  Antisense strand to SEQ ID NO: 1777307
aauggcagaaaccucaucu

SEQ ID NO: 1777309 - RNA, 19 nt, Artificial Sequence
  Description of Artificial Sequence: Synthetic oligonucleotide
  Sense strand starting at position 2759 of SEQ ID NO: 1562850
ccgcauccgguccagaaua

SEQ ID NO: 1777310 - RNA, 19 nt, Artificial Sequence
  Description of Artificial Sequence: Synthetic oligonucleotide
  Antisense strand to SEQ ID NO: 1777309
uauucuggaccggaugcgg

SEQ ID NO: 1777311 - RNA, 19 nt, Artificial Sequence
  Description of Artificial Sequence: Synthetic oligonucleotide
  Sense strand starting at position 3012 of SEQ ID NO: 1562850
gaaaucuauuccugcgucu

SEQ ID NO: 1777312 - RNA, 19 nt, Artificial Sequence
  Description of Artificial Sequence: Synthetic oligonucleotide
  Antisense strand to SEQ ID NO: 1777311
agacgcaggaauagauuuc

SEQ ID NO: 1777313 - RNA, 19 nt, Artificial Sequence
  Description of Artificial Sequence: Synthetic oligonucleotide
  Sense strand starting at position 3014 of SEQ ID NO: 1562850
aaucuauuccugcgucugu

SEQ ID NO: 1777314 - RNA, 19 nt, Artificial Sequence
  Description of Artificial Sequence: Synthetic oligonucleotide
  Antisense strand to SEQ ID NO: 1777313
acagacgcaggaauagauu

SEQ ID NO: 1777315 - RNA, 19 nt, Artificial Sequence
  Description of Artificial Sequence: Synthetic oligonucleotide
  Sense strand starting at position 3019 of SEQ ID NO: 1562850
auuccugcgucuguuguaa

SEQ ID NO: 1777316 - RNA, 19 nt, Artificial Sequence
  Description of Artificial Sequence: Synthetic oligonucleotide
  Antisense strand to SEQ ID NO: 1777315
uuacaacagacgcaggaau

SEQ ID NO: 1777317 - RNA, 19 nt, Artificial Sequence
  Description of Artificial Sequence: Synthetic oligonucleotide
  Sense strand starting at position 3021 of SEQ ID NO: 1562850
uccugcgucuguuguaaag

SEQ ID NO: 1777318 - RNA, 19 nt, Artificial Sequence
  Description of Artificial Sequence: Synthetic oligonucleotide
  Antisense strand to SEQ ID NO: 1777317
cuuuacaacagacgcagga

SEQ ID NO: 1777319 - RNA, 19 nt, Artificial Sequence
  Description of Artificial Sequence: Synthetic oligonucleotide
  Sense strand starting at position 3023 of SEQ ID NO: 1562850
cugcgucuguuguaaaguu

SEQ ID NO: 1777320 - RNA, 19 nt, Artificial Sequence
  Description of Artificial Sequence: Synthetic oligonucleotide
  Antisense strand to SEQ ID NO: 1777319
aacuuuacaacagacgcag

SEQ ID NO: 1777321 - RNA, 19 nt, Artificial Sequence
  Description of Artificial Sequence: Synthetic oligonucleotide
  Sense strand starting at position 3118 of SEQ ID NO: 1562850
agauaaggaucuugucuug

SEQ ID NO: 1777322 - RNA, 19 nt, Artificial Sequence
  Description of Artificial Sequence: Synthetic oligonucleotide
  Antisense strand to SEQ ID NO: 1777321
caagacaagauccuuaucu

SEQ ID NO: 1777323 - RNA, 19 nt, Artificial Sequence
  Description of Artificial Sequence: Synthetic oligonucleotide
  Sense strand starting at position 3125 of SEQ ID NO: 1562850
gaucuugucuuguucguca

SEQ ID NO: 1777324 - RNA, 19 nt, Artificial Sequence
  Description of Artificial Sequence: Synthetic oligonucleotide
  Antisense strand to SEQ ID NO: 1777323
ugacgaacaagacaagauc

SEQ ID NO: 1777325 - RNA, 19 nt, Artificial Sequence
  Description of Artificial Sequence: Synthetic oligonucleotide
  Sense strand starting at position 3130 of SEQ ID NO: 1562850
ugucuuguucgucacuguu

SEQ ID NO: 1777326 - RNA, 19 nt, Artificial Sequence
  Description of Artificial Sequence: Synthetic oligonucleotide
  Antisense strand to SEQ ID NO: 1777325
aacagugacgaacaagaca

SEQ ID NO: 1777327 - RNA, 19 nt, Artificial Sequence
  Description of Artificial Sequence: Synthetic oligonucleotide
  Sense strand starting at position 3158 of SEQ ID NO: 1562850
ccuagaacugugcagguua

SEQ ID NO: 1777328 - RNA, 19 nt, Artificial Sequence
  Description of Artificial Sequence: Synthetic oligonucleotide
  Antisense strand to SEQ ID NO: 1777327
uaaccugcacaguucuagg

SEQ ID NO: 1777329 - RNA, 19 nt, Artificial Sequence
  Description of Artificial Sequence: Synthetic oligonucleotide
  Sense strand starting at position 3185 of SEQ ID NO: 1562850
gcagucgaauuucuugauu

SEQ ID NO: 1777330 - RNA, 19 nt, Artificial Sequence
  Description of Artificial Sequence: Synthetic oligonucleotide
  Antisense strand to SEQ ID NO: 1777329
aaucaagaaauucgacugc

SEQ ID NO: 1777331 - RNA, 19 nt, Artificial Sequence
  Description of Artificial Sequence: Synthetic oligonucleotide
  Sense strand starting at position 3187 of SEQ ID NO: 1562850
agucgaauuucuugauuaa

SEQ ID NO: 1777332 - RNA, 19 nt, Artificial Sequence
  Description of Artificial Sequence: Synthetic oligonucleotide
  Antisense strand to SEQ ID NO: 1777331
uuaaucaagaaauucgacu

SEQ ID NO: 1777333 - RNA, 19 nt, Artificial Sequence
  Description of Artificial Sequence: Synthetic oligonucleotide
  Sense strand starting at position 3616 of SEQ ID NO: 1562850
cagaauaaauugcguguau

SEQ ID NO: 1777334 - RNA, 19 nt, Artificial Sequence
  Description of Artificial Sequence: Synthetic oligonucleotide
  Antisense strand to SEQ ID NO: 1777333
auacacgcaauuuauucug

SEQ ID NO: 1777335 - RNA, 19 nt, Artificial Sequence
  Description of Artificial Sequence: Synthetic oligonucleotide
  Sense strand starting at position 3617 of SEQ ID NO: 1562850
agaauaaauugcguguauu

SEQ ID NO: 1777336 - RNA, 19 nt, Artificial Sequence
  Description of Artificial Sequence: Synthetic oligonucleotide
  Antisense strand to SEQ ID NO: 1777335
aauacacgcaauuuauucu

SEQ ID NO: 1777337 - RNA, 19 nt, Artificial Sequence
  Description of Artificial Sequence: Synthetic oligonucleotide
  Sense strand starting at position 3618 of SEQ ID NO: 1562850
gaauaaauugcguguauua

SEQ ID NO: 1777338 - RNA, 19 nt, Artificial Sequence
  Description of Artificial Sequence: Synthetic oligonucleotide
  Antisense strand to SEQ ID NO: 1777337
uaauacacgcaauuuauuc

SEQ ID NO: 1777339 - RNA, 19 nt, Artificial Sequence
  Description of Artificial Sequence: Synthetic oligonucleotide
  Sense strand starting at position 106 of SEQ ID NO: 1562851
aucucuaccucacguuaga

SEQ ID NO: 1777340 - RNA, 19 nt, Artificial Sequence
  Description of Artificial Sequence: Synthetic oligonucleotide
  Antisense strand to SEQ ID NO: 1777339
ucuaacgugagguagagau

SEQ ID NO: 1777341 - RNA, 19 nt, Artificial Sequence
  Description of Artificial Sequence: Synthetic oligonucleotide
  Sense strand starting at position 117 of SEQ ID NO: 1562851
acguuagacucaucuacag

SEQ ID NO: 1777342 - RNA, 19 nt, Artificial Sequence
  Description of Artificial Sequence: Synthetic oligonucleotide
  Antisense strand to SEQ ID NO: 1777341
cuguagaugagucuaacgu

SEQ ID NO: 1777343 - RNA, 19 nt, Artificial Sequence
  Description of Artificial Sequence: Synthetic oligonucleotide
  Sense strand starting at position 132 of SEQ ID NO: 1562851
acagauuugucucaguucu

SEQ ID NO: 1777344 - RNA, 19 nt, Artificial Sequence
  Description of Artificial Sequence: Synthetic oligonucleotide
  Antisense strand to SEQ ID NO: 1777343
agaacugagacaaaucugu

SEQ ID NO: 1777345 - RNA, 19 nt, Artificial Sequence
  Description of Artificial Sequence: Synthetic oligonucleotide
  Sense strand starting at position 235 of SEQ ID NO: 1562851
gcaguuaaauauuugcuca

SEQ ID NO: 1777346 - RNA, 19 nt, Artificial Sequence
  Description of Artificial Sequence: Synthetic oligonucleotide
  Antisense strand to SEQ ID NO: 1777345
ugagcaaauauuuaacugc

SEQ ID NO: 1777347 - RNA, 19 nt, Artificial Sequence
  Description of Artificial Sequence: Synthetic oligonucleotide
  Sense strand starting at position 284 of SEQ ID NO: 1562851
auagcagccuuguauauaa

SEQ ID NO: 1777348 - RNA, 19 nt, Artificial Sequence
  Description of Artificial Sequence: Synthetic oligonucleotide
  Antisense strand to SEQ ID NO: 1777347
uuauauacaaggcugcuau

SEQ ID NO: 1777349 - RNA, 19 nt, Artificial Sequence
  Description of Artificial Sequence: Synthetic oligonucleotide
  Sense strand starting at position 395 of SEQ ID NO: 1562851
cagacaguguaguuagaau

SEQ ID NO: 1777350 - RNA, 19 nt, Artificial Sequence
  Description of Artificial Sequence: Synthetic oligonucleotide
  Antisense strand to SEQ ID NO: 1777349
auucuaacuacacugucug

SEQ ID NO: 1777351 - RNA, 19 nt, Artificial Sequence
  Description of Artificial Sequence: Synthetic oligonucleotide
  Sense strand starting at position 465 of SEQ ID NO: 1562851
cacgguuacucaucaguca

SEQ ID NO: 1777352 - RNA, 19 nt, Artificial Sequence
  Description of Artificial Sequence: Synthetic oligonucleotide
  Antisense strand to SEQ ID NO: 1777351
ugacugaugaguaaccgug

SEQ ID NO: 1777353 - RNA, 19 nt, Artificial Sequence
  Description of Artificial Sequence: Synthetic oligonucleotide
  Sense strand starting at position 468 of SEQ ID NO: 1562851
gguuacucaucagucacuu

SEQ ID NO: 1777354 - RNA, 19 nt, Artificial Sequence
  Description of Artificial Sequence: Synthetic oligonucleotide
  Antisense strand to SEQ ID NO: 1777353
aagugacugaugaguaacc

SEQ ID NO: 1777355 - RNA, 19 nt, Artificial Sequence
  Description of Artificial Sequence: Synthetic oligonucleotide
  Sense strand starting at position 583 of SEQ ID NO: 1562851
gggacuucccaaggagucu

SEQ ID NO: 1777356 - RNA, 19 nt, Artificial Sequence
  Description of Artificial Sequence: Synthetic oligonucleotide
  Antisense strand to SEQ ID NO: 1777355
agacuccuugggaaguccc

SEQ ID NO: 1777357 - RNA, 19 nt, Artificial Sequence
  Description of Artificial Sequence: Synthetic oligonucleotide
  Sense strand starting at position 681 of SEQ ID NO: 1562851
ugcugagucucaguuugaa

SEQ ID NO: 1777358 - RNA, 19 nt, Artificial Sequence
  Description of Artificial Sequence: Synthetic oligonucleotide
  Antisense strand to SEQ ID NO: 1777357
uucaaacugagacucagca

SEQ ID NO: 1777359 - RNA, 19 nt, Artificial Sequence
  Description of Artificial Sequence: Synthetic oligonucleotide
  Sense strand starting at position 684 of SEQ ID NO: 1562851
ugagucucaguuugaaaca

SEQ ID NO: 1777360 - RNA, 19 nt, Artificial Sequence
  Description of Artificial Sequence: Synthetic oligonucleotide
  Antisense strand to SEQ ID NO: 1777359
uguuucaaacugagacuca

SEQ ID NO: 1777361 - RNA, 19 nt, Artificial Sequence
  Description of Artificial Sequence: Synthetic oligonucleotide
  Sense strand starting at position 798 of SEQ ID NO: 1562851
gugcguggaguggagaaua

SEQ ID NO: 1777362 - RNA, 19 nt, Artificial Sequence
  Description of Artificial Sequence: Synthetic oligonucleotide
  Antisense strand to SEQ ID NO: 1777361
uauucuccacuccacgcac

SEQ ID NO: 1777363 - RNA, 19 nt, Artificial Sequence
  Description of Artificial Sequence: Synthetic oligonucleotide
  Sense strand starting at position 865 of SEQ ID NO: 1562851
gcucguaacggcagagcua

SEQ ID NO: 1777364 - RNA, 19 nt, Artificial Sequence
  Description of Artificial Sequence: Synthetic oligonucleotide
  Antisense strand to SEQ ID NO: 1777363
uagcucugccguuacgagc

SEQ ID NO: 1777365 - RNA, 19 nt, Artificial Sequence
  Description of Artificial Sequence: Synthetic oligonucleotide
  Sense strand starting at position 1274 of SEQ ID NO: 1562851
gccagaaacuuccacggga

SEQ ID NO: 1777366 - RNA, 19 nt, Artificial Sequence
  Description of Artificial Sequence: Synthetic oligonucleotide
  Antisense strand to SEQ ID NO: 1777365
ucccguggaaguuucuggc

SEQ ID NO: 1777367 - RNA, 19 nt, Artificial Sequence
  Description of Artificial Sequence: Synthetic oligonucleotide
  Sense strand starting at position 1769 of SEQ ID NO: 1562851
gcugcuucucccgagagga

SEQ ID NO: 1777368 - RNA, 19 nt, Artificial Sequence
  Description of Artificial Sequence: Synthetic oligonucleotide
  Antisense strand to SEQ ID NO: 1777367
uccucucgggagaagcagc

SEQ ID NO: 1777369 - RNA, 19 nt, Artificial Sequence
  Description of Artificial Sequence: Synthetic oligonucleotide
  Sense strand starting at position 2052 of SEQ ID NO: 1562851
ccuugaugggcagacguau

SEQ ID NO: 1777370 - RNA, 19 nt, Artificial Sequence
  Description of Artificial Sequence: Synthetic oligonucleotide
  Antisense strand to SEQ ID NO: 1777369
auacgucugcccaucaagg

SEQ ID NO: 1777371 - RNA, 19 nt, Artificial Sequence
  Description of Artificial Sequence: Synthetic oligonucleotide
  Sense strand starting at position 2064 of SEQ ID NO: 1562851
gacguauuggccuguggaa

SEQ ID NO: 1777372 - RNA, 19 nt, Artificial Sequence
  Description of Artificial Sequence: Synthetic oligonucleotide
  Antisense strand to SEQ ID NO: 1777371
uuccacaggccaauacguc

SEQ ID NO: 1777373 - RNA, 19 nt, Artificial Sequence
  Description of Artificial Sequence: Synthetic oligonucleotide
  Sense strand starting at position 2066 of SEQ ID NO: 1562851
cguauuggccuguggaaag

SEQ ID NO: 1777374 - RNA, 19 nt, Artificial Sequence
  Description of Artificial Sequence: Synthetic oligonucleotide
  Antisense strand to SEQ ID NO: 1777373
cuuuccacaggccaauacg

SEQ ID NO: 1777375 - RNA, 19 nt, Artificial Sequence
  Description of Artificial Sequence: Synthetic oligonucleotide
  Sense strand starting at position 2510 of SEQ ID NO: 1562851
gugagcgucuugaguucga

SEQ ID NO: 1777376 - RNA, 19 nt, Artificial Sequence
  Description of Artificial Sequence: Synthetic oligonucleotide
  Antisense strand to SEQ ID NO: 1777375
ucgaacucaagacgcucac

SEQ ID NO: 1777377 - RNA, 19 nt, Artificial Sequence
  Description of Artificial Sequence: Synthetic oligonucleotide
  Sense strand starting at position 2534 of SEQ ID NO: 1562851
gacccugccucuuuaggau

SEQ ID NO: 1777378 - RNA, 19 nt, Artificial Sequence
  Description of Artificial Sequence: Synthetic oligonucleotide
  Antisense strand to SEQ ID NO: 1777377
auccuaaagaggcaggguc

SEQ ID NO: 1777379 - RNA, 19 nt, Artificial Sequence
  Description of Artificial Sequence: Synthetic oligonucleotide
  Sense strand starting at position 2642 of SEQ ID NO: 1562851
gucauuaacucgcauacau

SEQ ID NO: 1777380 - RNA, 19 nt, Artificial Sequence
  Description of Artificial Sequence: Synthetic oligonucleotide
  Antisense strand to SEQ ID NO: 1777379
auguaugcgaguuaaugac

SEQ ID NO: 1777381 - RNA, 19 nt, Artificial Sequence
  Description of Artificial Sequence: Synthetic oligonucleotide
  Sense strand starting at position 2665 of SEQ ID NO: 1562851
ucagguacuuguuacaaau

SEQ ID NO: 1777382 - RNA, 19 nt, Artificial Sequence
  Description of Artificial Sequence: Synthetic oligonucleotide
  Antisense strand to SEQ ID NO: 1777381
auuuguaacaaguaccuga

SEQ ID NO: 1777383 - RNA, 19 nt, Artificial Sequence
  Description of Artificial Sequence: Synthetic oligonucleotide
  Sense strand starting at position 2698 of SEQ ID NO: 1562851
guuacuguccacuacaaga

SEQ ID NO: 1777384 - RNA, 19 nt, Artificial Sequence
  Description of Artificial Sequence: Synthetic oligonucleotide
  Antisense strand to SEQ ID NO: 1777383
ucuuguaguggacaguaac

SEQ ID NO: 1777385 - RNA, 19 nt, Artificial Sequence
  Description of Artificial Sequence: Synthetic oligonucleotide
  Sense strand starting at position 2889 of SEQ ID NO: 1562851
agcuguuucugacuuguau

SEQ ID NO: 1777386 - RNA, 19 nt, Artificial Sequence
  Description of Artificial Sequence: Synthetic oligonucleotide
  Antisense strand to SEQ ID NO: 1777385
auacaagucagaaacagcu

SEQ ID NO: 1777387 - RNA, 19 nt, Artificial Sequence
  Description of Artificial Sequence: Synthetic oligonucleotide
  Sense strand starting at position 2893 of SEQ ID NO: 1562851
guuucugacuuguauacau

SEQ ID NO: 1777388 - RNA, 19 nt, Artificial Sequence
  Description of Artificial Sequence: Synthetic oligonucleotide
  Antisense strand to SEQ ID NO: 1777387
auguauacaagucagaaac

SEQ ID NO: 1777389 - RNA, 19 nt, Artificial Sequence
  Description of Artificial Sequence: Synthetic oligonucleotide
  Sense strand starting at position 2978 of SEQ ID NO: 1562851
cuauaucuaugagggcaaa

SEQ ID NO: 1777390 - RNA, 19 nt, Artificial Sequence
  Description of Artificial Sequence: Synthetic oligonucleotide
  Antisense strand to SEQ ID NO: 1777389
uuugcccucauagauauag

SEQ ID NO: 1777391 - RNA, 19 nt, Artificial Sequence
  Description of Artificial Sequence: Synthetic oligonucleotide
  Sense strand starting at position 2990 of SEQ ID NO: 1562851
gggcaaauuucucaucauu

SEQ ID NO: 1777392 - RNA, 19 nt, Artificial Sequence
  Description of Artificial Sequence: Synthetic oligonucleotide
  Antisense strand to SEQ ID NO: 1777391
aaugaugagaaauuugccc

SEQ ID NO: 1777393 - RNA, 19 nt, Artificial Sequence
  Description of Artificial Sequence: Synthetic oligonucleotide
  Sense strand starting at position 3009 of SEQ ID NO: 1562851
acucuuucuuacuggaaug

SEQ ID NO: 1777394 - RNA, 19 nt, Artificial Sequence
  Description of Artificial Sequence: Synthetic oligonucleotide
  Antisense strand to SEQ ID NO: 1777393
cauuccaguaagaaagagu

SEQ ID NO: 1777395 - RNA, 19 nt, Artificial Sequence
  Description of Artificial Sequence: Synthetic oligonucleotide
  Sense strand starting at position 3019 of SEQ ID NO: 1562851
acuggaaugugcuugcuau

SEQ ID NO: 1777396 - RNA, 19 nt, Artificial Sequence
  Description of Artificial Sequence: Synthetic oligonucleotide
  Antisense strand to SEQ ID NO: 1777395
auagcaagcacauuccagu

SEQ ID NO: 1777397 - RNA, 19 nt, Artificial Sequence
  Description of Artificial Sequence: Synthetic oligonucleotide
  Sense strand starting at position 3020 of SEQ ID NO: 1562851
cuggaaugugcuugcuauc

SEQ ID NO: 1777398 - RNA, 19 nt, Artificial Sequence
  Description of Artificial Sequence: Synthetic oligonucleotide
  Antisense strand to SEQ ID NO: 1777397
gauagcaagcacauuccag

SEQ ID NO: 1777399 - RNA, 19 nt, Artificial Sequence
  Description of Artificial Sequence: Synthetic oligonucleotide
  Sense strand starting at position 3023 of SEQ ID NO: 1562851
gaaugugcuugcuaucaug

SEQ ID NO: 1777400 - RNA, 19 nt, Artificial Sequence
  Description of Artificial Sequence: Synthetic oligonucleotide
  Antisense strand to SEQ ID NO: 1777399
caugauagcaagcacauuc

SEQ ID NO: 1777401 - RNA, 19 nt, Artificial Sequence
  Description of Artificial Sequence: Synthetic oligonucleotide
  Sense strand starting at position 3029 of SEQ ID NO: 1562851
gcuugcuaucaugacuauu

SEQ ID NO: 1777402 - RNA, 19 nt, Artificial Sequence
  Description of Artificial Sequence: Synthetic oligonucleotide
  Antisense strand to SEQ ID NO: 1777401
aauagucaugauagcaagc

SEQ ID NO: 1777403 - RNA, 19 nt, Artificial Sequence
  Description of Artificial Sequence: Synthetic oligonucleotide
  Sense strand starting at position 3112 of SEQ ID NO: 1562851
uuugcaacucugugacaaa

SEQ ID NO: 1777404 - RNA, 19 nt, Artificial Sequence
  Description of Artificial Sequence: Synthetic oligonucleotide
  Antisense strand to SEQ ID NO: 1777403
uuugucacagaguugcaaa

SEQ ID NO: 1777405 - RNA, 19 nt, Artificial Sequence
  Description of Artificial Sequence: Synthetic oligonucleotide
  Sense strand starting at position 3113 of SEQ ID NO: 1562851
uugcaacucugugacaaau

SEQ ID NO: 1777406 - RNA, 19 nt, Artificial Sequence
  Description of Artificial Sequence: Synthetic oligonucleotide
  Antisense strand to SEQ ID NO: 1777405
auuugucacagaguugcaa

SEQ ID NO: 1777407 - RNA, 19 nt, Artificial Sequence
  Description of Artificial Sequence: Synthetic oligonucleotide
  Sense strand starting at position 3115 of SEQ ID NO: 1562851
gcaacucugugacaaauua

SEQ ID NO: 1777408 - RNA, 19 nt, Artificial Sequence
  Description of Artificial Sequence: Synthetic oligonucleotide
  Antisense strand to SEQ ID NO: 1777407
uaauuugucacagaguugc

SEQ ID NO: 1777409 - RNA, 19 nt, Artificial Sequence
  Description of Artificial Sequence: Synthetic oligonucleotide
  Sense strand starting at position 3157 of SEQ ID NO: 1562851
cuucccaguugauaagaaa

SEQ ID NO: 1777410 - RNA, 19 nt, Artificial Sequence
  Description of Artificial Sequence: Synthetic oligonucleotide
  Antisense strand to SEQ ID NO: 1777409
uuucuuaucaacugggaag

SEQ ID NO: 1777411 - RNA, 19 nt, Artificial Sequence
  Description of Artificial Sequence: Synthetic oligonucleotide
  Sense strand starting at position 3652 of SEQ ID NO: 1562851
gcucaauauuggucagguu

SEQ ID NO: 1777412 - RNA, 19 nt, Artificial Sequence
  Description of Artificial Sequence: Synthetic oligonucleotide
  Antisense strand to SEQ ID NO: 1777411
aaccugaccaauauugagc

SEQ ID NO: 1777413 - RNA, 19 nt, Artificial Sequence
  Description of Artificial Sequence: Synthetic oligonucleotide
  Sense strand starting at position 3653 of SEQ ID NO: 1562851
cucaauauuggucagguuu

SEQ ID NO: 1777414 - RNA, 19 nt, Artificial Sequence
  Description of Artificial Sequence: Synthetic oligonucleotide
  Antisense strand to SEQ ID NO: 1777413
aaaccugaccaauauugag

SEQ ID NO: 1777415 - RNA, 19 nt, Artificial Sequence
  Description of Artificial Sequence: Synthetic oligonucleotide
  Sense strand starting at position 3655 of SEQ ID NO: 1562851
caauauuggucagguuuau

SEQ ID NO: 1777416 - RNA, 19 nt, Artificial Sequence
  Description of Artificial Sequence: Synthetic oligonucleotide
  Antisense strand to SEQ ID NO: 1777415
auaaaccugaccaauauug

SEQ ID NO: 1777417 - RNA, 19 nt, Artificial Sequence
  Description of Artificial Sequence: Synthetic oligonucleotide
  Sense strand starting at position 3659 of SEQ ID NO: 1562851
auuggucagguuuauagau

SEQ ID NO: 1777418 - RNA, 19 nt, Artificial Sequence
  Description of Artificial Sequence: Synthetic oligonucleotide
  Antisense strand to SEQ ID NO: 1777417
aucuauaaaccugaccaau

SEQ ID NO: 1777419 - RNA, 19 nt, Artificial Sequence
  Description of Artificial Sequence: Synthetic oligonucleotide
  Sense strand starting at position 12 of SEQ ID NO: 1562852
guuugugaaacauggaaau

SEQ ID NO: 1777420 - RNA, 19 nt, Artificial Sequence
  Description of Artificial Sequence: Synthetic oligonucleotide
  Antisense strand to SEQ ID NO: 1777419
auuuccauguuucacaaac

SEQ ID NO: 1777421 - RNA, 19 nt, Artificial Sequence
  Description of Artificial Sequence: Synthetic oligonucleotide
  Sense strand starting at position 23 of SEQ ID NO: 1562852
auggaaauuccaugaguuu

SEQ ID NO: 1777422 - RNA, 19 nt, Artificial Sequence
  Description of Artificial Sequence: Synthetic oligonucleotide
  Antisense strand to SEQ ID NO: 1777421
aaacucauggaauuuccau

SEQ ID NO: 1777423 - RNA, 19 nt, Artificial Sequence
  Description of Artificial Sequence: Synthetic oligonucleotide
  Sense strand starting at position 260 of SEQ ID NO: 1562852
auggguaggucgucaacga

SEQ ID NO: 1777424 - RNA, 19 nt, Artificial Sequence
  Description of Artificial Sequence: Synthetic oligonucleotide
  Antisense strand to SEQ ID NO: 1777423
ucguugacgaccuacccau

SEQ ID NO: 1777425 - RNA, 19 nt, Artificial Sequence
  Description of Artificial Sequence: Synthetic oligonucleotide
  Sense strand starting at position 305 of SEQ ID NO: 1562852
gaugcugaauccuaggaaa

SEQ ID NO: 1777426 - RNA, 19 nt, Artificial Sequence
  Description of Artificial Sequence: Synthetic oligonucleotide
  Antisense strand to SEQ ID NO: 1777425
uuuccuaggauucagcauc

SEQ ID NO: 1777427 - RNA, 19 nt, Artificial Sequence
  Description of Artificial Sequence: Synthetic oligonucleotide
  Sense strand starting at position 307 of SEQ ID NO: 1562852
ugcugaauccuaggaaaga

SEQ ID NO: 1777428 - RNA, 19 nt, Artificial Sequence
  Description of Artificial Sequence: Synthetic oligonucleotide
  Antisense strand to SEQ ID NO: 1777427
ucuuuccuaggauucagca

SEQ ID NO: 1777429 - RNA, 19 nt, Artificial Sequence
  Description of Artificial Sequence: Synthetic oligonucleotide
  Sense strand starting at position 308 of SEQ ID NO: 1562852
gcugaauccuaggaaagau

SEQ ID NO: 1777430 - RNA, 19 nt, Artificial Sequence
  Description of Artificial Sequence: Synthetic oligonucleotide
  Antisense strand to SEQ ID NO: 1777429
aucuuuccuaggauucagc

SEQ ID NO: 1777431 - RNA, 19 nt, Artificial Sequence
  Description of Artificial Sequence: Synthetic oligonucleotide
  Sense strand starting at position 393 of SEQ ID NO: 1562852
guacucauccaagguuaca

SEQ ID NO: 1777432 - RNA, 19 nt, Artificial Sequence
  Description of Artificial Sequence: Synthetic oligonucleotide
  Antisense strand to SEQ ID NO: 1777431
uguaaccuuggaugaguac

SEQ ID NO: 1777433 - RNA, 19 nt, Artificial Sequence
  Description of Artificial Sequence: Synthetic oligonucleotide
  Sense strand starting at position 721 of SEQ ID NO: 1562852
ucauccauagccuaagagu

SEQ ID NO: 1777434 - RNA, 19 nt, Artificial Sequence
  Description of Artificial Sequence: Synthetic oligonucleotide
  Antisense strand to SEQ ID NO: 1777433
acucuuaggcuauggauga

SEQ ID NO: 1777435 - RNA, 19 nt, Artificial Sequence
  Description of Artificial Sequence: Synthetic oligonucleotide
  Sense strand starting at position 844 of SEQ ID NO: 1562852
ccauuauccuuguuggagu

SEQ ID NO: 1777436 - RNA, 19 nt, Artificial Sequence
  Description of Artificial Sequence: Synthetic oligonucleotide
  Antisense strand to SEQ ID NO: 1777435
acuccaacaaggauaaugg

SEQ ID NO: 1777437 - RNA, 19 nt, Artificial Sequence
  Description of Artificial Sequence: Synthetic oligonucleotide
  Sense strand starting at position 1145 of SEQ ID NO: 1562852
ucuccucuccugggagaga

SEQ ID NO: 1777438 - RNA, 19 nt, Artificial Sequence
  Description of Artificial Sequence: Synthetic oligonucleotide
  Antisense strand to SEQ ID NO: 1777437
ucucucccaggagaggaga

SEQ ID NO: 1777439 - RNA, 19 nt, Artificial Sequence
  Description of Artificial Sequence: Synthetic oligonucleotide
  Sense strand starting at position 1156 of SEQ ID NO: 1562852
gggagagagcuccauguca

SEQ ID NO: 1777440 - RNA, 19 nt, Artificial Sequence
  Description of Artificial Sequence: Synthetic oligonucleotide
  Antisense strand to SEQ ID NO: 1777439
ugacauggagcucucuccc

SEQ ID NO: 1777441 - RNA, 19 nt, Artificial Sequence
  Description of Artificial Sequence: Synthetic oligonucleotide
  Sense strand starting at position 1158 of SEQ ID NO: 1562852
gagagagcuccaugucaaa

SEQ ID NO: 1777442 - RNA, 19 nt, Artificial Sequence
  Description of Artificial Sequence: Synthetic oligonucleotide
  Antisense strand to SEQ ID NO: 1777441
uuugacauggagcucucuc

SEQ ID NO: 1777443 - RNA, 19 nt, Artificial Sequence
  Description of Artificial Sequence: Synthetic oligonucleotide
  Sense strand starting at position 1205 of SEQ ID NO: 1562852
gccacugggaccugugaau

SEQ ID NO: 1777444 - RNA, 19 nt, Artificial Sequence
  Description of Artificial Sequence: Synthetic oligonucleotide
  Antisense strand to SEQ ID NO: 1777443
auucacaggucccaguggc

SEQ ID NO: 1777445 - RNA, 19 nt, Artificial Sequence
  Description of Artificial Sequence: Synthetic oligonucleotide
  Sense strand starting at position 1475 of SEQ ID NO: 1562852
gcagaaauuacugguaguu

SEQ ID NO: 1777446 - RNA, 19 nt, Artificial Sequence
  Description of Artificial Sequence: Synthetic oligonucleotide
  Antisense strand to SEQ ID NO: 1777445
aacuaccaguaauuucugc

SEQ ID NO: 1777447 - RNA, 19 nt, Artificial Sequence
  Description of Artificial Sequence: Synthetic oligonucleotide
  Sense strand starting at position 1477 of SEQ ID NO: 1562852
agaaauuacugguaguuga

SEQ ID NO: 1777448 - RNA, 19 nt, Artificial Sequence
  Description of Artificial Sequence: Synthetic oligonucleotide
  Antisense strand to SEQ ID NO: 1777447
ucaacuaccaguaauuucu

SEQ ID NO: 1777449 - RNA, 19 nt, Artificial Sequence
  Description of Artificial Sequence: Synthetic oligonucleotide
  Sense strand starting at position 1481 of SEQ ID NO: 1562852
auuacugguaguugaggaa

SEQ ID NO: 1777450 - RNA, 19 nt, Artificial Sequence
  Description of Artificial Sequence: Synthetic oligonucleotide
  Antisense strand to SEQ ID NO: 1777449
uuccucaacuaccaguaau

SEQ ID NO: 1777451 - RNA, 19 nt, Artificial Sequence
  Description of Artificial Sequence: Synthetic oligonucleotide
  Sense strand starting at position 1513 of SEQ ID NO: 1562852
gacgucugcgggcaaagau

SEQ ID NO: 1777452 - RNA, 19 nt, Artificial Sequence
  Description of Artificial Sequence: Synthetic oligonucleotide
  Antisense strand to SEQ ID NO: 1777451
aucuuugcccgcagacguc

SEQ ID NO: 1777453 - RNA, 19 nt, Artificial Sequence
  Description of Artificial Sequence: Synthetic oligonucleotide
  Sense strand starting at position 1595 of SEQ ID NO: 1562852
gccugaggagagugauucu

SEQ ID NO: 1777454 - RNA, 19 nt, Artificial Sequence
  Description of Artificial Sequence: Synthetic oligonucleotide
  Antisense strand to SEQ ID NO: 1777453
agaaucacucuccucaggc

SEQ ID NO: 1777455 - RNA, 19 nt, Artificial Sequence
  Description of Artificial Sequence: Synthetic oligonucleotide
  Sense strand starting at position 1598 of SEQ ID NO: 1562852
ugaggagagugauucuuac

SEQ ID NO: 1777456 - RNA, 19 nt, Artificial Sequence
  Description of Artificial Sequence: Synthetic oligonucleotide
  Antisense strand to SEQ ID NO: 1777455
guaagaaucacucuccuca

SEQ ID NO: 1777457 - RNA, 19 nt, Artificial Sequence
  Description of Artificial Sequence: Synthetic oligonucleotide
  Sense strand starting at position 1608 of SEQ ID NO: 1562852
gauucuuacgaauguccau

SEQ ID NO: 1777458 - RNA, 19 nt, Artificial Sequence
  Description of Artificial Sequence: Synthetic oligonucleotide
  Antisense strand to SEQ ID NO: 1777457
auggacauucguaagaauc

SEQ ID NO: 1777459 - RNA, 19 nt, Artificial Sequence
  Description of Artificial Sequence: Synthetic oligonucleotide
  Sense strand starting at position 1854 of SEQ ID NO: 1562852
auaguaccuucugcaaaga

SEQ ID NO: 1777460 - RNA, 19 nt, Artificial Sequence
  Description of Artificial Sequence: Synthetic oligonucleotide
  Antisense strand to SEQ ID NO: 1777459
ucuuugcagaagguacuau

SEQ ID NO: 1777461 - RNA, 19 nt, Artificial Sequence
  Description of Artificial Sequence: Synthetic oligonucleotide
  Sense strand starting at position 2064 of SEQ ID NO: 1562852
agcugagucgaccagucau

SEQ ID NO: 1777462 - RNA, 19 nt, Artificial Sequence
  Description of Artificial Sequence: Synthetic oligonucleotide
  Antisense strand to SEQ ID NO: 1777461
augacuggucgacucagcu

SEQ ID NO: 1777463 - RNA, 19 nt, Artificial Sequence
  Description of Artificial Sequence: Synthetic oligonucleotide
  Sense strand starting at position 2070 of SEQ ID NO: 1562852
gucgaccagucauuucuaa

SEQ ID NO: 1777464 - RNA, 19 nt, Artificial Sequence
  Description of Artificial Sequence: Synthetic oligonucleotide
  Antisense strand to SEQ ID NO: 1777463
uuagaaaugacuggucgac

SEQ ID NO: 1777465 - RNA, 19 nt, Artificial Sequence
  Description of Artificial Sequence: Synthetic oligonucleotide
  Sense strand starting at position 2214 of SEQ ID NO: 1562852
gcacaugcucucucgucau

SEQ ID NO: 1777466 - RNA, 19 nt, Artificial Sequence
  Description of Artificial Sequence: Synthetic oligonucleotide
  Antisense strand to SEQ ID NO: 1777465
augacgagagagcaugugc

SEQ ID NO: 1777467 - RNA, 19 nt, Artificial Sequence
  Description of Artificial Sequence: Synthetic oligonucleotide
  Sense strand starting at position 2377 of SEQ ID NO: 1562852
uggugcgucgugguaaaca

SEQ ID NO: 1777468 - RNA, 19 nt, Artificial Sequence
  Description of Artificial Sequence: Synthetic oligonucleotide
  Antisense strand to SEQ ID NO: 1777467
uguuuaccacgacgcacca

SEQ ID NO: 1777469 - RNA, 19 nt, Artificial Sequence
  Description of Artificial Sequence: Synthetic oligonucleotide
  Sense strand starting at position 2471 of SEQ ID NO: 1562852
acuuaauguucccuaugag

SEQ ID NO: 1777470 - RNA, 19 nt, Artificial Sequence
  Description of Artificial Sequence: Synthetic oligonucleotide
  Antisense strand to SEQ ID NO: 1777469
cucauagggaacauuaagu

SEQ ID NO: 1777471 - RNA, 19 nt, Artificial Sequence
  Description of Artificial Sequence: Synthetic oligonucleotide
  Sense strand starting at position 2472 of SEQ ID NO: 1562852
cuuaauguucccuaugagg

SEQ ID NO: 1777472 - RNA, 19 nt, Artificial Sequence
  Description of Artificial Sequence: Synthetic oligonucleotide
  Antisense strand to SEQ ID NO: 1777471
ccucauagggaacauuaag

SEQ ID NO: 1777473 - RNA, 19 nt, Artificial Sequence
  Description of Artificial Sequence: Synthetic oligonucleotide
  Sense strand starting at position 2474 of SEQ ID NO: 1562852
uaauguucccuaugaggua

SEQ ID NO: 1777474 - RNA, 19 nt, Artificial Sequence
  Description of Artificial Sequence: Synthetic oligonucleotide
  Antisense strand to SEQ ID NO: 1777473
uaccucauagggaacauua

SEQ ID NO: 1777475 - RNA, 19 nt, Artificial Sequence
  Description of Artificial Sequence: Synthetic oligonucleotide
  Sense strand starting at position 2929 of SEQ ID NO: 1562852
ggguagugguugucuguga

SEQ ID NO: 1777476 - RNA, 19 nt, Artificial Sequence
  Description of Artificial Sequence: Synthetic oligonucleotide
  Antisense strand to SEQ ID NO: 1777475
ucacagacaaccacuaccc

SEQ ID NO: 1777477 - RNA, 19 nt, Artificial Sequence
  Description of Artificial Sequence: Synthetic oligonucleotide
  Sense strand starting at position 2930 of SEQ ID NO: 1562852
gguagugguugucugugau

SEQ ID NO: 1777478 - RNA, 19 nt, Artificial Sequence
  Description of Artificial Sequence: Synthetic oligonucleotide
  Antisense strand to SEQ ID NO: 1777477
aucacagacaaccacuacc

SEQ ID NO: 1777479 - RNA, 19 nt, Artificial Sequence
  Description of Artificial Sequence: Synthetic oligonucleotide
  Sense strand starting at position 3036 of SEQ ID NO: 1562852
uagccuaggcgauaagaga

SEQ ID NO: 1777480 - RNA, 19 nt, Artificial Sequence
  Description of Artificial Sequence: Synthetic oligonucleotide
  Antisense strand to SEQ ID NO: 1777479
ucucuuaucgccuaggcua

SEQ ID NO: 1777481 - RNA, 19 nt, Artificial Sequence
  Description of Artificial Sequence: Synthetic oligonucleotide
  Sense strand starting at position 3085 of SEQ ID NO: 1562852
gugcuuuguccacugccua

SEQ ID NO: 1777482 - RNA, 19 nt, Artificial Sequence
  Description of Artificial Sequence: Synthetic oligonucleotide
  Antisense strand to SEQ ID NO: 1777481
uaggcaguggacaaagcac

SEQ ID NO: 1777483 - RNA, 19 nt, Artificial Sequence
  Description of Artificial Sequence: Synthetic oligonucleotide
  Sense strand starting at position 3254 of SEQ ID NO: 1562852
caauaauugcuauguggug

SEQ ID NO: 1777484 - RNA, 19 nt, Artificial Sequence
  Description of Artificial Sequence: Synthetic oligonucleotide
  Antisense strand to SEQ ID NO: 1777483
caccacauagcaauuauug

SEQ ID NO: 1777485 - RNA, 19 nt, Artificial Sequence
  Description of Artificial Sequence: Synthetic oligonucleotide
  Sense strand starting at position 3286 of SEQ ID NO: 1562852
cccagagcucaucgagcaa

SEQ ID NO: 1777486 - RNA, 19 nt, Artificial Sequence
  Description of Artificial Sequence: Synthetic oligonucleotide
  Antisense strand to SEQ ID NO: 1777485
uugcucgaugagcucuggg

SEQ ID NO: 1777487 - RNA, 19 nt, Artificial Sequence
  Description of Artificial Sequence: Synthetic oligonucleotide
  Sense strand starting at position 3290 of SEQ ID NO: 1562852
gagcucaucgagcaauauu

SEQ ID NO: 1777488 - RNA, 19 nt, Artificial Sequence
  Description of Artificial Sequence: Synthetic oligonucleotide
  Antisense strand to SEQ ID NO: 1777487
aauauugcucgaugagcuc

SEQ ID NO: 1777489 - RNA, 19 nt, Artificial Sequence
  Description of Artificial Sequence: Synthetic oligonucleotide
  Sense strand starting at position 3378 of SEQ ID NO: 1562852
agggaaggcugcuuagaaa

SEQ ID NO: 1777490 - RNA, 19 nt, Artificial Sequence
  Description of Artificial Sequence: Synthetic oligonucleotide
  Antisense strand to SEQ ID NO: 1777489
uuucuaagcagccuucccu

SEQ ID NO: 1777491 - RNA, 19 nt, Artificial Sequence
  Description of Artificial Sequence: Synthetic oligonucleotide
  Sense strand starting at position 3781 of SEQ ID NO: 1562852
gagaguggcaugggacauu

SEQ ID NO: 1777492 - RNA, 19 nt, Artificial Sequence
  Description of Artificial Sequence: Synthetic oligonucleotide
  Antisense strand to SEQ ID NO: 1777491
aaugucccaugccacucuc

SEQ ID NO: 1777493 - RNA, 19 nt, Artificial Sequence
  Description of Artificial Sequence: Synthetic oligonucleotide
  Sense strand starting at position 3853 of SEQ ID NO: 1562852
cagguugugcuagaucauu

SEQ ID NO: 1777494 - RNA, 19 nt, Artificial Sequence
  Description of Artificial Sequence: Synthetic oligonucleotide
  Antisense strand to SEQ ID NO: 1777493
aaugaucuagcacaaccug

SEQ ID NO: 1777495 - RNA, 19 nt, Artificial Sequence
  Description of Artificial Sequence: Synthetic oligonucleotide
  Sense strand starting at position 3861 of SEQ ID NO: 1562852
gcuagaucauuugacauug

SEQ ID NO: 1777496 - RNA, 19 nt, Artificial Sequence
  Description of Artificial Sequence: Synthetic oligonucleotide
  Antisense strand to SEQ ID NO: 1777495
caaugucaaaugaucuagc

SEQ ID NO: 1777497 - RNA, 19 nt, Artificial Sequence
  Description of Artificial Sequence: Synthetic oligonucleotide
  Sense strand starting at position 3971 of SEQ ID NO: 1562852
guuggucugaagugguaga

SEQ ID NO: 1777498 - RNA, 19 nt, Artificial Sequence
  Description of Artificial Sequence: Synthetic oligonucleotide
  Antisense strand to SEQ ID NO: 1777497
ucuaccacuucagaccaac

SEQ ID NO: 1777499 - RNA, 19 nt, Artificial Sequence
  Description of Artificial Sequence: Synthetic oligonucleotide
  Sense strand starting at position 89 of SEQ ID NO: 1562853
ggaacuacguucucauaag

SEQ ID NO: 1777500 - RNA, 19 nt, Artificial Sequence
  Description of Artificial Sequence: Synthetic oligonucleotide
  Antisense strand to SEQ ID NO: 1777499
cuuaugagaacguaguucc

SEQ ID NO: 1777501 - RNA, 19 nt, Artificial Sequence
  Description of Artificial Sequence: Synthetic oligonucleotide
  Sense strand starting at position 101 of SEQ ID NO: 1562853
ucauaagcccaguguaagu

SEQ ID NO: 1777502 - RNA, 19 nt, Artificial Sequence
  Description of Artificial Sequence: Synthetic oligonucleotide
  Antisense strand to SEQ ID NO: 1777501
acuuacacugggcuuauga

SEQ ID NO: 1777503 - RNA, 19 nt, Artificial Sequence
  Description of Artificial Sequence: Synthetic oligonucleotide
  Sense strand starting at position 106 of SEQ ID NO: 1562853
agcccaguguaaguugaaa

SEQ ID NO: 1777504 - RNA, 19 nt, Artificial Sequence
  Description of Artificial Sequence: Synthetic oligonucleotide
  Antisense strand to SEQ ID NO: 1777503
uuucaacuuacacugggcu

SEQ ID NO: 1777505 - RNA, 19 nt, Artificial Sequence
  Description of Artificial Sequence: Synthetic oligonucleotide
  Sense strand starting at position 545 of SEQ ID NO: 1562853
ggcggaucaccguaaguca

SEQ ID NO: 1777506 - RNA, 19 nt, Artificial Sequence
  Description of Artificial Sequence: Synthetic oligonucleotide
  Antisense strand to SEQ ID NO: 1777505
ugacuuacggugauccgcc

SEQ ID NO: 1777507 - RNA, 19 nt, Artificial Sequence
  Description of Artificial Sequence: Synthetic oligonucleotide
  Sense strand starting at position 973 of SEQ ID NO: 1562853
ucguuaagucgggaccauu

SEQ ID NO: 1777508 - RNA, 19 nt, Artificial Sequence
  Description of Artificial Sequence: Synthetic oligonucleotide
  Antisense strand to SEQ ID NO: 1777507
aauggucccgacuuaacga

SEQ ID NO: 1777509 - RNA, 19 nt, Artificial Sequence
  Description of Artificial Sequence: Synthetic oligonucleotide
  Sense strand starting at position 1156 of SEQ ID NO: 1562853
guaauauggaguuacugua

SEQ ID NO: 1777510 - RNA, 19 nt, Artificial Sequence
  Description of Artificial Sequence: Synthetic oligonucleotide
  Antisense strand to SEQ ID NO: 1777509
uacaguaacuccauauuac

SEQ ID NO: 1777511 - RNA, 19 nt, Artificial Sequence
  Description of Artificial Sequence: Synthetic oligonucleotide
  Sense strand starting at position 1203 of SEQ ID NO: 1562853
gcugauauccaucaguuag

SEQ ID NO: 1777512 - RNA, 19 nt, Artificial Sequence
  Description of Artificial Sequence: Synthetic oligonucleotide
  Antisense strand to SEQ ID NO: 1777511
cuaacugauggauaucagc

SEQ ID NO: 1777513 - RNA, 19 nt, Artificial Sequence
  Description of Artificial Sequence: Synthetic oligonucleotide
  Sense strand starting at position 1222 of SEQ ID NO: 1562853
ggccucugugcuugaggga

SEQ ID NO: 1777514 - RNA, 19 nt, Artificial Sequence
  Description of Artificial Sequence: Synthetic oligonucleotide
  Antisense strand to SEQ ID NO: 1777513
ucccucaagcacagaggcc

SEQ ID NO: 1777515 - RNA, 19 nt, Artificial Sequence
  Description of Artificial Sequence: Synthetic oligonucleotide
  Sense strand starting at position 1273 of SEQ ID NO: 1562853
gagaaaugauucccguaug

SEQ ID NO: 1777516 - RNA, 19 nt, Artificial Sequence
  Description of Artificial Sequence: Synthetic oligonucleotide
  Antisense strand to SEQ ID NO: 1777515
cauacgggaaucauuucuc

SEQ ID NO: 1777517 - RNA, 19 nt, Artificial Sequence
  Description of Artificial Sequence: Synthetic oligonucleotide
  Sense strand starting at position 1487 of SEQ ID NO: 1562853
agaucuggucugcguguau

SEQ ID NO: 1777518 - RNA, 19 nt, Artificial Sequence
  Description of Artificial Sequence: Synthetic oligonucleotide
  Antisense strand to SEQ ID NO: 1777517
auacacgcagaccagaucu

SEQ ID NO: 1777519 - RNA, 19 nt, Artificial Sequence
  Description of Artificial Sequence: Synthetic oligonucleotide
  Sense strand starting at position 1500 of SEQ ID NO: 1562853
guguaucagcuguaugugu

SEQ ID NO: 1777520 - RNA, 19 nt, Artificial Sequence
  Description of Artificial Sequence: Synthetic oligonucleotide
  Antisense strand to SEQ ID NO: 1777519
acacauacagcugauacac

SEQ ID NO: 1777521 - RNA, 19 nt, Artificial Sequence
  Description of Artificial Sequence: Synthetic oligonucleotide
  Sense strand starting at position 1644 of SEQ ID NO: 1562853
ccaucacuucccggagcuu

SEQ ID NO: 1777522 - RNA, 19 nt, Artificial Sequence
  Description of Artificial Sequence: Synthetic oligonucleotide
  Antisense strand to SEQ ID NO: 1777521
aagcuccgggaagugaugg

SEQ ID NO: 1777523 - RNA, 19 nt, Artificial Sequence
  Description of Artificial Sequence: Synthetic oligonucleotide
  Sense strand starting at position 1684 of SEQ ID NO: 1562853
gaaacaacgugucuuggau

SEQ ID NO: 1777524 - RNA, 19 nt, Artificial Sequence
  Description of Artificial Sequence: Synthetic oligonucleotide
  Antisense strand to SEQ ID NO: 1777523
auccaagacacguuguuuc

SEQ ID NO: 1777525 - RNA, 19 nt, Artificial Sequence
  Description of Artificial Sequence: Synthetic oligonucleotide
  Sense strand starting at position 1690 of SEQ ID NO: 1562853
acgugucuuggaugucaga

SEQ ID NO: 1777526 - RNA, 19 nt, Artificial Sequence
  Description of Artificial Sequence: Synthetic oligonucleotide
  Antisense strand to SEQ ID NO: 1777525
ucugacauccaagacacgu

SEQ ID NO: 1777527 - RNA, 19 nt, Artificial Sequence
  Description of Artificial Sequence: Synthetic oligonucleotide
  Sense strand starting at position 1793 of SEQ ID NO: 1562853
ggcuuaaggucaccaagaa

SEQ ID NO: 1777528 - RNA, 19 nt, Artificial Sequence
  Description of Artificial Sequence: Synthetic oligonucleotide
  Antisense strand to SEQ ID NO: 1777527
uucuuggugaccuuaagcc

SEQ ID NO: 1777529 - RNA, 19 nt, Artificial Sequence
  Description of Artificial Sequence: Synthetic oligonucleotide
  Sense strand starting at position 1973 of SEQ ID NO: 1562853
guccgaagcguuccaguga

SEQ ID NO: 1777530 - RNA, 19 nt, Artificial Sequence
  Description of Artificial Sequence: Synthetic oligonucleotide
  Antisense strand to SEQ ID NO: 1777529
ucacuggaacgcuucggac

SEQ ID NO: 1777531 - RNA, 19 nt, Artificial Sequence
  Description of Artificial Sequence: Synthetic oligonucleotide
  Sense strand starting at position 2299 of SEQ ID NO: 1562853
augagagacugcucugaag

SEQ ID NO: 1777532 - RNA, 19 nt, Artificial Sequence
  Description of Artificial Sequence: Synthetic oligonucleotide
  Antisense strand to SEQ ID NO: 1777531
cuucagagcagucucucau

SEQ ID NO: 1777533 - RNA, 19 nt, Artificial Sequence
  Description of Artificial Sequence: Synthetic oligonucleotide
  Sense strand starting at position 2347 of SEQ ID NO: 1562853
auggaagucugggauuaau

SEQ ID NO: 1777534 - RNA, 19 nt, Artificial Sequence
  Description of Artificial Sequence: Synthetic oligonucleotide
  Antisense strand to SEQ ID NO: 1777533
auuaaucccagacuuccau

SEQ ID NO: 1777535 - RNA, 19 nt, Artificial Sequence
  Description of Artificial Sequence: Synthetic oligonucleotide
  Sense strand starting at position 2350 of SEQ ID NO: 1562853
gaagucugggauuaaucgu

SEQ ID NO: 1777536 - RNA, 19 nt, Artificial Sequence
  Description of Artificial Sequence: Synthetic oligonucleotide
  Antisense strand to SEQ ID NO: 1777535
acgauuaaucccagacuuc

SEQ ID NO: 1777537 - RNA, 19 nt, Artificial Sequence
  Description of Artificial Sequence: Synthetic oligonucleotide
  Sense strand starting at position 2356 of SEQ ID NO: 1562853
ugggauuaaucgucucuac

SEQ ID NO: 1777538 - RNA, 19 nt, Artificial Sequence
  Description of Artificial Sequence: Synthetic oligonucleotide
  Antisense strand to SEQ ID NO: 1777537
guagagacgauuaauccca

SEQ ID NO: 1777539 - RNA, 19 nt, Artificial Sequence
  Description of Artificial Sequence: Synthetic oligonucleotide
  Sense strand starting at position 2359 of SEQ ID NO: 1562853
gauuaaucgucucuacaag

SEQ ID NO: 1777540 - RNA, 19 nt, Artificial Sequence
  Description of Artificial Sequence: Synthetic oligonucleotide
  Antisense strand to SEQ ID NO: 1777539
cuuguagagacgauuaauc

SEQ ID NO: 1777541 - RNA, 19 nt, Artificial Sequence
  Description of Artificial Sequence: Synthetic oligonucleotide
  Sense strand starting at position 2529 of SEQ ID NO: 1562853
gugccaaaugcuuuguucu

SEQ ID NO: 1777542 - RNA, 19 nt, Artificial Sequence
  Description of Artificial Sequence: Synthetic oligonucleotide
  Antisense strand to SEQ ID NO: 1777541
agaacaaagcauuuggcac

SEQ ID NO: 1777543 - RNA, 19 nt, Artificial Sequence
  Description of Artificial Sequence: Synthetic oligonucleotide
  Sense strand starting at position 2560 of SEQ ID NO: 1562853
ggcagaaaggugugauauu

SEQ ID NO: 1777544 - RNA, 19 nt, Artificial Sequence
  Description of Artificial Sequence: Synthetic oligonucleotide
  Antisense strand to SEQ ID NO: 1777543
aauaucacaccuuucugcc

SEQ ID NO: 1777545 - RNA, 19 nt, Artificial Sequence
  Description of Artificial Sequence: Synthetic oligonucleotide
  Sense strand starting at position 2561 of SEQ ID NO: 1562853
gcagaaaggugugauauuu

SEQ ID NO: 1777546 - RNA, 19 nt, Artificial Sequence
  Description of Artificial Sequence: Synthetic oligonucleotide
  Antisense strand to SEQ ID NO: 1777545
aaauaucacaccuuucugc

SEQ ID NO: 1777547 - RNA, 19 nt, Artificial Sequence
  Description of Artificial Sequence: Synthetic oligonucleotide
  Sense strand starting at position 2625 of SEQ ID NO: 1562853
aauauagguuagcaagaga

SEQ ID NO: 1777548 - RNA, 19 nt, Artificial Sequence
  Description of Artificial Sequence: Synthetic oligonucleotide
  Antisense strand to SEQ ID NO: 1777547
ucucuugcuaaccuauauu

SEQ ID NO: 1777549 - RNA, 19 nt, Artificial Sequence
  Description of Artificial Sequence: Synthetic oligonucleotide
  Sense strand starting at position 2734 of SEQ ID NO: 1562853
uaugucucgguuugaugaa

SEQ ID NO: 1777550 - RNA, 19 nt, Artificial Sequence
  Description of Artificial Sequence: Synthetic oligonucleotide
  Antisense strand to SEQ ID NO: 1777549
uucaucaaaccgagacaua

SEQ ID NO: 1777551 - RNA, 19 nt, Artificial Sequence
  Description of Artificial Sequence: Synthetic oligonucleotide
  Sense strand starting at position 3043 of SEQ ID NO: 1562853
aauggacaacuguguauaa

SEQ ID NO: 1777552 - RNA, 19 nt, Artificial Sequence
  Description of Artificial Sequence: Synthetic oligonucleotide
  Antisense strand to SEQ ID NO: 1777551
uuauacacaguuguccauu

SEQ ID NO: 1777553 - RNA, 19 nt, Artificial Sequence
  Description of Artificial Sequence: Synthetic oligonucleotide
  Sense strand starting at position 3044 of SEQ ID NO: 1562853
auggacaacuguguauaaa

SEQ ID NO: 1777554 - RNA, 19 nt, Artificial Sequence
  Description of Artificial Sequence: Synthetic oligonucleotide
  Antisense strand to SEQ ID NO: 1777553
uuuauacacaguuguccau

SEQ ID NO: 1777555 - RNA, 19 nt, Artificial Sequence
  Description of Artificial Sequence: Synthetic oligonucleotide
  Sense strand starting at position 3053 of SEQ ID NO: 1562853
uguguauaaacgcgauuag

SEQ ID NO: 1777556 - RNA, 19 nt, Artificial Sequence
  Description of Artificial Sequence: Synthetic oligonucleotide
  Antisense strand to SEQ ID NO: 1777555
cuaaucgcguuuauacaca

SEQ ID NO: 1777557 - RNA, 19 nt, Artificial Sequence
  Description of Artificial Sequence: Synthetic oligonucleotide
  Sense strand starting at position 3054 of SEQ ID NO: 1562853
guguauaaacgcgauuaga

SEQ ID NO: 1777558 - RNA, 19 nt, Artificial Sequence
  Description of Artificial Sequence: Synthetic oligonucleotide
  Antisense strand to SEQ ID NO: 1777557
ucuaaucgcguuuauacac

SEQ ID NO: 1777559 - RNA, 19 nt, Artificial Sequence
  Description of Artificial Sequence: Synthetic oligonucleotide
  Sense strand starting at position 3057 of SEQ ID NO: 1562853
uauaaacgcgauuagacaa

SEQ ID NO: 1777560 - RNA, 19 nt, Artificial Sequence
  Description of Artificial Sequence: Synthetic oligonucleotide
  Antisense strand to SEQ ID NO: 1777559
uugucuaaucgcguuuaua

SEQ ID NO: 1777561 - RNA, 19 nt, Artificial Sequence
  Description of Artificial Sequence: Synthetic oligonucleotide
  Sense strand starting at position 3092 of SEQ ID NO: 1562853
guuaauagcugagugugga

SEQ ID NO: 1777562 - RNA, 19 nt, Artificial Sequence
  Description of Artificial Sequence: Synthetic oligonucleotide
  Antisense strand to SEQ ID NO: 1777561
uccacacucagcuauuaac

SEQ ID NO: 1777563 - RNA, 19 nt, Artificial Sequence
  Description of Artificial Sequence: Synthetic oligonucleotide
  Sense strand starting at position 3093 of SEQ ID NO: 1562853
uuaauagcugaguguggaa

SEQ ID NO: 1777564 - RNA, 19 nt, Artificial Sequence
  Description of Artificial Sequence: Synthetic oligonucleotide
  Antisense strand to SEQ ID NO: 1777563
uuccacacucagcuauuaa

SEQ ID NO: 1777565 - RNA, 19 nt, Artificial Sequence
  Description of Artificial Sequence: Synthetic oligonucleotide
  Sense strand starting at position 3205 of SEQ ID NO: 1562853
agagucuuaugaccuagua

SEQ ID NO: 1777566 - RNA, 19 nt, Artificial Sequence
  Description of Artificial Sequence: Synthetic oligonucleotide
  Antisense strand to SEQ ID NO: 1777565
uacuaggucauaagacucu

SEQ ID NO: 1777567 - RNA, 19 nt, Artificial Sequence
  Description of Artificial Sequence: Synthetic oligonucleotide
  Sense strand starting at position 3217 of SEQ ID NO: 1562853
ccuaguaucaggcaaggua

SEQ ID NO: 1777568 - RNA, 19 nt, Artificial Sequence
  Description of Artificial Sequence: Synthetic oligonucleotide
  Antisense strand to SEQ ID NO: 1777567
uaccuugccugauacuagg

SEQ ID NO: 1777569 - RNA, 19 nt, Artificial Sequence
  Description of Artificial Sequence: Synthetic oligonucleotide
  Sense strand starting at position 3281 of SEQ ID NO: 1562853
ggauguuuccaguaauauu

SEQ ID NO: 1777570 - RNA, 19 nt, Artificial Sequence
  Description of Artificial Sequence: Synthetic oligonucleotide
  Antisense strand to SEQ ID NO: 1777569
aauauuacuggaaacaucc

SEQ ID NO: 1777571 - RNA, 19 nt, Artificial Sequence
  Description of Artificial Sequence: Synthetic oligonucleotide
  Sense strand starting at position 3616 of SEQ ID NO: 1562853
auuuguaguugcuauaacu

SEQ ID NO: 1777572 - RNA, 19 nt, Artificial Sequence
  Description of Artificial Sequence: Synthetic oligonucleotide
  Antisense strand to SEQ ID NO: 1777571
aguuauagcaacuacaaau

SEQ ID NO: 1777573 - RNA, 19 nt, Artificial Sequence
  Description of Artificial Sequence: Synthetic oligonucleotide
  Sense strand starting at position 3719 of SEQ ID NO: 1562853
gagagauacuuugcuucug

SEQ ID NO: 1777574 - RNA, 19 nt, Artificial Sequence
  Description of Artificial Sequence: Synthetic oligonucleotide
  Antisense strand to SEQ ID NO: 1777573
cagaagcaaaguaucucuc

SEQ ID NO: 1777575 - RNA, 19 nt, Artificial Sequence
  Description of Artificial Sequence: Synthetic oligonucleotide
  Sense strand starting at position 3720 of SEQ ID NO: 1562853
agagauacuuugcuucuga

SEQ ID NO: 1777576 - RNA, 19 nt, Artificial Sequence
  Description of Artificial Sequence: Synthetic oligonucleotide
  Antisense strand to SEQ ID NO: 1777575
ucagaagcaaaguaucucu

SEQ ID NO: 1777577 - RNA, 19 nt, Artificial Sequence
  Description of Artificial Sequence: Synthetic oligonucleotide
  Sense strand starting at position 3721 of SEQ ID NO: 1562853
gagauacuuugcuucugag

SEQ ID NO: 1777578 - RNA, 19 nt, Artificial Sequence
  Description of Artificial Sequence: Synthetic oligonucleotide
  Antisense strand to SEQ ID NO: 1777577
cucagaagcaaaguaucuc

SEQ ID NO: 1777579 - RNA, 19 nt, Artificial Sequence
  Description of Artificial Sequence: Synthetic oligonucleotide
  Sense strand starting at position 327 of SEQ ID NO: 1562854
gcaugaagaucuuccacca

SEQ ID NO: 1777580 - RNA, 19 nt, Artificial Sequence
  Description of Artificial Sequence: Synthetic oligonucleotide
  Antisense strand to SEQ ID NO: 1777579
ugguggaagaucuucaugc

SEQ ID NO: 1777581 - RNA, 19 nt, Artificial Sequence
  Description of Artificial Sequence: Synthetic oligonucleotide
  Sense strand starting at position 512 of SEQ ID NO: 1562854
cagugcuguggccagauuu

SEQ ID NO: 1777582 - RNA, 19 nt, Artificial Sequence
  Description of Artificial Sequence: Synthetic oligonucleotide
  Antisense strand to SEQ ID NO: 1777581
aaaucuggccacagcacug

SEQ ID NO: 1777583 - RNA, 19 nt, Artificial Sequence
  Description of Artificial Sequence: Synthetic oligonucleotide
  Sense strand starting at position 685 of SEQ ID NO: 1562854
gugauauuccggugguaua

SEQ ID NO: 1777584 - RNA, 19 nt, Artificial Sequence
  Description of Artificial Sequence: Synthetic oligonucleotide
  Antisense strand to SEQ ID NO: 1777583
uauaccaccggaauaucac

SEQ ID NO: 1777585 - RNA, 19 nt, Artificial Sequence
  Description of Artificial Sequence: Synthetic oligonucleotide
  Sense strand starting at position 686 of SEQ ID NO: 1562854
ugauauuccggugguauaa

SEQ ID NO: 1777586 - RNA, 19 nt, Artificial Sequence
  Description of Artificial Sequence: Synthetic oligonucleotide
  Antisense strand to SEQ ID NO: 1777585
uuauaccaccggaauauca

SEQ ID NO: 1777587 - RNA, 19 nt, Artificial Sequence
  Description of Artificial Sequence: Synthetic oligonucleotide
  Sense strand starting at position 698 of SEQ ID NO: 1562854
gguauaacugauggaauuc

SEQ ID NO: 1777588 - RNA, 19 nt, Artificial Sequence
  Description of Artificial Sequence: Synthetic oligonucleotide
  Antisense strand to SEQ ID NO: 1777587
gaauuccaucaguuauacc

SEQ ID NO: 1777589 - RNA, 19 nt, Artificial Sequence
  Description of Artificial Sequence: Synthetic oligonucleotide
  Sense strand starting at position 716 of SEQ ID NO: 1562854
cauggaugaacugaguguu

SEQ ID NO: 1777590 - RNA, 19 nt, Artificial Sequence
  Description of Artificial Sequence: Synthetic oligonucleotide
  Antisense strand to SEQ ID NO: 1777589
aacacucaguucauccaug

SEQ ID NO: 1777591 - RNA, 19 nt, Artificial Sequence
  Description of Artificial Sequence: Synthetic oligonucleotide
  Sense strand starting at position 719 of SEQ ID NO: 1562854
ggaugaacugaguguuaag

SEQ ID NO: 1777592 - RNA, 19 nt, Artificial Sequence
  Description of Artificial Sequence: Synthetic oligonucleotide
  Antisense strand to SEQ ID NO: 1777591
cuuaacacucaguucaucc

SEQ ID NO: 1777593 - RNA, 19 nt, Artificial Sequence
  Description of Artificial Sequence: Synthetic oligonucleotide
  Sense strand starting at position 778 of SEQ ID NO: 1562854
guugaacagcggugucauu

SEQ ID NO: 1777594 - RNA, 19 nt, Artificial Sequence
  Description of Artificial Sequence: Synthetic oligonucleotide
  Antisense strand to SEQ ID NO: 1777593
aaugacaccgcuguucaac

SEQ ID NO: 1777595 - RNA, 19 nt, Artificial Sequence
  Description of Artificial Sequence: Synthetic oligonucleotide
  Sense strand starting at position 859 of SEQ ID NO: 1562854
aaaugagauguuugcguga

SEQ ID NO: 1777596 - RNA, 19 nt, Artificial Sequence
  Description of Artificial Sequence: Synthetic oligonucleotide
  Antisense strand to SEQ ID NO: 1777595
ucacgcaaacaucucauuu

SEQ ID NO: 1777597 - RNA, 19 nt, Artificial Sequence
  Description of Artificial Sequence: Synthetic oligonucleotide
  Sense strand starting at position 862 of SEQ ID NO: 1562854
ugagauguuugcgugacac

SEQ ID NO: 1777598 - RNA, 19 nt, Artificial Sequence
  Description of Artificial Sequence: Synthetic oligonucleotide
  Antisense strand to SEQ ID NO: 1777597
gugucacgcaaacaucuca

SEQ ID NO: 1777599 - RNA, 19 nt, Artificial Sequence
  Description of Artificial Sequence: Synthetic oligonucleotide
  Sense strand starting at position 880 of SEQ ID NO: 1562854
cccacuagaugucaagaga

SEQ ID NO: 1777600 - RNA, 19 nt, Artificial Sequence
  Description of Artificial Sequence: Synthetic oligonucleotide
  Antisense strand to SEQ ID NO: 1777599
ucucuugacaucuaguggg

SEQ ID NO: 1777601 - RNA, 19 nt, Artificial Sequence
  Description of Artificial Sequence: Synthetic oligonucleotide
  Sense strand starting at position 896 of SEQ ID NO: 1562854
agagcagcuggauauguaa

SEQ ID NO: 1777602 - RNA, 19 nt, Artificial Sequence
  Description of Artificial Sequence: Synthetic oligonucleotide
  Antisense strand to SEQ ID NO: 1777601
uuacauauccagcugcucu

SEQ ID NO: 1777603 - RNA, 19 nt, Artificial Sequence
  Description of Artificial Sequence: Synthetic oligonucleotide
  Sense strand starting at position 912 of SEQ ID NO: 1562854
uaaaguagauuuggaggaa

SEQ ID NO: 1777604 - RNA, 19 nt, Artificial Sequence
  Description of Artificial Sequence: Synthetic oligonucleotide
  Antisense strand to SEQ ID NO: 1777603
uuccuccaaaucuacuuua

SEQ ID NO: 1777605 - RNA, 19 nt, Artificial Sequence
  Description of Artificial Sequence: Synthetic oligonucleotide
  Sense strand starting at position 950 of SEQ ID NO: 1562854
agaucugguaguuguccua

SEQ ID NO: 1777606 - RNA, 19 nt, Artificial Sequence
  Description of Artificial Sequence: Synthetic oligonucleotide
  Antisense strand to SEQ ID NO: 1777605
uaggacaacuaccagaucu

SEQ ID NO: 1777607 - RNA, 19 nt, Artificial Sequence
  Description of Artificial Sequence: Synthetic oligonucleotide
  Sense strand starting at position 953 of SEQ ID NO: 1562854
ucugguaguuguccuaaua

SEQ ID NO: 1777608 - RNA, 19 nt, Artificial Sequence
  Description of Artificial Sequence: Synthetic oligonucleotide
  Antisense strand to SEQ ID NO: 1777607
uauuaggacaacuaccaga

SEQ ID NO: 1777609 - RNA, 19 nt, Artificial Sequence
  Description of Artificial Sequence: Synthetic oligonucleotide
  Sense strand starting at position 1013 of SEQ ID NO: 1562854
guaaaugcaucagaagaug

SEQ ID NO: 1777610 - RNA, 19 nt, Artificial Sequence
  Description of Artificial Sequence: Synthetic oligonucleotide
  Antisense strand to SEQ ID NO: 1777609
caucuucugaugcauuuac

SEQ ID NO: 1777611 - RNA, 19 nt, Artificial Sequence
  Description of Artificial Sequence: Synthetic oligonucleotide
  Sense strand starting at position 1162 of SEQ ID NO: 1562854
ugacuuaugucccuuggau

SEQ ID NO: 1777612 - RNA, 19 nt, Artificial Sequence
  Description of Artificial Sequence: Synthetic oligonucleotide
  Antisense strand to SEQ ID NO: 1777611
auccaagggacauaaguca

SEQ ID NO: 1777613 - RNA, 19 nt, Artificial Sequence
  Description of Artificial Sequence: Synthetic oligonucleotide
  Sense strand starting at position 1171 of SEQ ID NO: 1562854
ucccuuggauuugguagaa

SEQ ID NO: 1777614 - RNA, 19 nt, Artificial Sequence
  Description of Artificial Sequence: Synthetic oligonucleotide
  Antisense strand to SEQ ID NO: 1777613
uucuaccaaauccaaggga

SEQ ID NO: 1777615 - RNA, 19 nt, Artificial Sequence
  Description of Artificial Sequence: Synthetic oligonucleotide
  Sense strand starting at position 1188 of SEQ ID NO: 1562854
aauggagaucacugcugau

SEQ ID NO: 1777616 - RNA, 19 nt, Artificial Sequence
  Description of Artificial Sequence: Synthetic oligonucleotide
  Antisense strand to SEQ ID NO: 1777615
aucagcagugaucuccauu

SEQ ID NO: 1777617 - RNA, 19 nt, Artificial Sequence
  Description of Artificial Sequence: Synthetic oligonucleotide
  Sense strand starting at position 1303 of SEQ ID NO: 1562854
ucuagacagggcugucaaa

SEQ ID NO: 1777618 - RNA, 19 nt, Artificial Sequence
  Description of Artificial Sequence: Synthetic oligonucleotide
  Antisense strand to SEQ ID NO: 1777617
uuugacagcccugucuaga

SEQ ID NO: 1777619 - RNA, 19 nt, Artificial Sequence
  Description of Artificial Sequence: Synthetic oligonucleotide
  Sense strand starting at position 1312 of SEQ ID NO: 1562854
ggcugucaaacauggaaga

SEQ ID NO: 1777620 - RNA, 19 nt, Artificial Sequence
  Description of Artificial Sequence: Synthetic oligonucleotide
  Antisense strand to SEQ ID NO: 1777619
ucuuccauguuugacagcc

SEQ ID NO: 1777621 - RNA, 19 nt, Artificial Sequence
  Description of Artificial Sequence: Synthetic oligonucleotide
  Sense strand starting at position 1313 of SEQ ID NO: 1562854
gcugucaaacauggaagaa

SEQ ID NO: 1777622 - RNA, 19 nt, Artificial Sequence
  Description of Artificial Sequence: Synthetic oligonucleotide
  Antisense strand to SEQ ID NO: 1777621
uucuuccauguuugacagc

SEQ ID NO: 1777623 - RNA, 19 nt, Artificial Sequence
  Description of Artificial Sequence: Synthetic oligonucleotide
  Sense strand starting at position 1347 of SEQ ID NO: 1562854
aggauagagcauggcaaua

SEQ ID NO: 1777624 - RNA, 19 nt, Artificial Sequence
  Description of Artificial Sequence: Synthetic oligonucleotide
  Antisense strand to SEQ ID NO: 1777623
uauugccaugcucuauccu

SEQ ID NO: 1777625 - RNA, 19 nt, Artificial Sequence
  Description of Artificial Sequence: Synthetic oligonucleotide
  Sense strand starting at position 1357 of SEQ ID NO: 1562854
auggcaauagcuugaaauu

SEQ ID NO: 1777626 - RNA, 19 nt, Artificial Sequence
  Description of Artificial Sequence: Synthetic oligonucleotide
  Antisense strand to SEQ ID NO: 1777625
aauuucaagcuauugccau

SEQ ID NO: 1777627 - RNA, 19 nt, Artificial Sequence
  Description of Artificial Sequence: Synthetic oligonucleotide
  Sense strand starting at position 1358 of SEQ ID NO: 1562854
uggcaauagcuugaaauug

SEQ ID NO: 1777628 - RNA, 19 nt, Artificial Sequence
  Description of Artificial Sequence: Synthetic oligonucleotide
  Antisense strand to SEQ ID NO: 1777627
caauuucaagcuauugcca

SEQ ID NO: 1777629 - RNA, 19 nt, Artificial Sequence
  Description of Artificial Sequence: Synthetic oligonucleotide
  Sense strand starting at position 1433 of SEQ ID NO: 1562854
acacaagcaugcucgcaau

SEQ ID NO: 1777630 - RNA, 19 nt, Artificial Sequence
  Description of Artificial Sequence: Synthetic oligonucleotide
  Antisense strand to SEQ ID NO: 1777629
auugcgagcaugcuugugu

SEQ ID NO: 1777631 - RNA, 19 nt, Artificial Sequence
  Description of Artificial Sequence: Synthetic oligonucleotide
  Sense strand starting at position 1445 of SEQ ID NO: 1562854
ucgcaauaacugcaauaaa

SEQ ID NO: 1777632 - RNA, 19 nt, Artificial Sequence
  Description of Artificial Sequence: Synthetic oligonucleotide
  Antisense strand to SEQ ID NO: 1777631
uuuauugcaguuauugcga

SEQ ID NO: 1777633 - RNA, 19 nt, Artificial Sequence
  Description of Artificial Sequence: Synthetic oligonucleotide
  Sense strand starting at position 1480 of SEQ ID NO: 1562854
agucuauuccacuacguua

SEQ ID NO: 1777634 - RNA, 19 nt, Artificial Sequence
  Description of Artificial Sequence: Synthetic oligonucleotide
  Antisense strand to SEQ ID NO: 1777633
uaacguaguggaauagacu

SEQ ID NO: 1777635 - RNA, 19 nt, Artificial Sequence
  Description of Artificial Sequence: Synthetic oligonucleotide
  Sense strand starting at position 1482 of SEQ ID NO: 1562854
ucuauuccacuacguuaga

SEQ ID NO: 1777636 - RNA, 19 nt, Artificial Sequence
  Description of Artificial Sequence: Synthetic oligonucleotide
  Antisense strand to SEQ ID NO: 1777635
ucuaacguaguggaauaga

SEQ ID NO: 1777637 - RNA, 19 nt, Artificial Sequence
  Description of Artificial Sequence: Synthetic oligonucleotide
  Sense strand starting at position 1485 of SEQ ID NO: 1562854
auuccacuacguuagagaa

SEQ ID NO: 1777638 - RNA, 19 nt, Artificial Sequence
  Description of Artificial Sequence: Synthetic oligonucleotide
  Antisense strand to SEQ ID NO: 1777637
uucucuaacguaguggaau

SEQ ID NO: 1777639 - RNA, 19 nt, Artificial Sequence
  Description of Artificial Sequence: Synthetic oligonucleotide
  Sense strand starting at position 1561 of SEQ ID NO: 1562854
augacagguccacgcuaau

SEQ ID NO: 1777640 - RNA, 19 nt, Artificial Sequence
  Description of Artificial Sequence: Synthetic oligonucleotide
  Antisense strand to SEQ ID NO: 1777639
auuagcguggaccugucau

SEQ ID NO: 1777641 - RNA, 19 nt, Artificial Sequence
  Description of Artificial Sequence: Synthetic oligonucleotide
  Sense strand starting at position 2071 of SEQ ID NO: 1562854
gggagcucaccggaagagu

SEQ ID NO: 1777642 - RNA, 19 nt, Artificial Sequence
  Description of Artificial Sequence: Synthetic oligonucleotide
  Antisense strand to SEQ ID NO: 1777641
acucuuccggugagcuccc

SEQ ID NO: 1777643 - RNA, 19 nt, Artificial Sequence
  Description of Artificial Sequence: Synthetic oligonucleotide
  Sense strand starting at position 2799 of SEQ ID NO: 1562854
gaaggugugcggugaucca

SEQ ID NO: 1777644 - RNA, 19 nt, Artificial Sequence
  Description of Artificial Sequence: Synthetic oligonucleotide
  Antisense strand to SEQ ID NO: 1777643
uggaucaccgcacaccuuc

SEQ ID NO: 1777645 - RNA, 19 nt, Artificial Sequence
  Description of Artificial Sequence: Synthetic oligonucleotide
  Sense strand starting at position 2809 of SEQ ID NO: 1562854
ggugauccauuucccguaa

SEQ ID NO: 1777646 - RNA, 19 nt, Artificial Sequence
  Description of Artificial Sequence: Synthetic oligonucleotide
  Antisense strand to SEQ ID NO: 1777645
uuacgggaaauggaucacc

SEQ ID NO: 1777647 - RNA, 19 nt, Artificial Sequence
  Description of Artificial Sequence: Synthetic oligonucleotide
  Sense strand starting at position 2919 of SEQ ID NO: 1562854
cgggcugagaccuggaaga

SEQ ID NO: 1777648 - RNA, 19 nt, Artificial Sequence
  Description of Artificial Sequence: Synthetic oligonucleotide
  Antisense strand to SEQ ID NO: 1777647
ucuuccaggucucagcccg

SEQ ID NO: 1777649 - RNA, 19 nt, Artificial Sequence
  Description of Artificial Sequence: Synthetic oligonucleotide
  Sense strand starting at position 3116 of SEQ ID NO: 1562854
cugacucagagguagucua

SEQ ID NO: 1777650 - RNA, 19 nt, Artificial Sequence
  Description of Artificial Sequence: Synthetic oligonucleotide
  Antisense strand to SEQ ID NO: 1777649
uagacuaccucugagucag

SEQ ID NO: 1777651 - RNA, 19 nt, Artificial Sequence
  Description of Artificial Sequence: Synthetic oligonucleotide
  Sense strand starting at position 3124 of SEQ ID NO: 1562854
gagguagucuagucugcaa

SEQ ID NO: 1777652 - RNA, 19 nt, Artificial Sequence
  Description of Artificial Sequence: Synthetic oligonucleotide
  Antisense strand to SEQ ID NO: 1777651
uugcagacuagacuaccuc

SEQ ID NO: 1777653 - RNA, 19 nt, Artificial Sequence
  Description of Artificial Sequence: Synthetic oligonucleotide
  Sense strand starting at position 3567 of SEQ ID NO: 1562854
uuuauuuccaguggugagu

SEQ ID NO: 1777654 - RNA, 19 nt, Artificial Sequence
  Description of Artificial Sequence: Synthetic oligonucleotide
  Antisense strand to SEQ ID NO: 1777653
acucaccacuggaaauaaa

SEQ ID NO: 1777655 - RNA, 19 nt, Artificial Sequence
  Description of Artificial Sequence: Synthetic oligonucleotide
  Sense strand starting at position 3649 of SEQ ID NO: 1562854
ggaggacuuuccgagggaa

SEQ ID NO: 1777656 - RNA, 19 nt, Artificial Sequence
  Description of Artificial Sequence: Synthetic oligonucleotide
  Antisense strand to SEQ ID NO: 1777655
uucccucggaaaguccucc

SEQ ID NO: 1777657 - RNA, 19 nt, Artificial Sequence
  Description of Artificial Sequence: Synthetic oligonucleotide
  Sense strand starting at position 3652 of SEQ ID NO: 1562854
ggacuuuccgagggaagca

SEQ ID NO: 1777658 - RNA, 19 nt, Artificial Sequence
  Description of Artificial Sequence: Synthetic oligonucleotide
  Antisense strand to SEQ ID NO: 1777657
ugcuucccucggaaagucc

SEQ ID NO: 1777659 - RNA, 19 nt, Artificial Sequence
  Description of Artificial Sequence: Synthetic oligonucleotide
  Sense strand starting at position 302 of SEQ ID NO: 1562855
agauaagaccuucgaggua

SEQ ID NO: 1777660 - RNA, 19 nt, Artificial Sequence
  Description of Artificial Sequence: Synthetic oligonucleotide
  Antisense strand to SEQ ID NO: 1777659
uaccucgaaggucuuaucu

SEQ ID NO: 1777661 - RNA, 19 nt, Artificial Sequence
  Description of Artificial Sequence: Synthetic oligonucleotide
  Sense strand starting at position 348 of SEQ ID NO: 1562855
ggcucaaggccucaugaaa

SEQ ID NO: 1777662 - RNA, 19 nt, Artificial Sequence
  Description of Artificial Sequence: Synthetic oligonucleotide
  Antisense strand to SEQ ID NO: 1777661
uuucaugaggccuugagcc

SEQ ID NO: 1777663 - RNA, 19 nt, Artificial Sequence
  Description of Artificial Sequence: Synthetic oligonucleotide
  Sense strand starting at position 1148 of SEQ ID NO: 1562855
ccuggugcucaauagggau

SEQ ID NO: 1777664 - RNA, 19 nt, Artificial Sequence
  Description of Artificial Sequence: Synthetic oligonucleotide
  Antisense strand to SEQ ID NO: 1777663
aucccuauugagcaccagg

SEQ ID NO: 1777665 - RNA, 19 nt, Artificial Sequence
  Description of Artificial Sequence: Synthetic oligonucleotide
  Sense strand starting at position 1154 of SEQ ID NO: 1562855
gcucaauagggaugagcua

SEQ ID NO: 1777666 - RNA, 19 nt, Artificial Sequence
  Description of Artificial Sequence: Synthetic oligonucleotide
  Antisense strand to SEQ ID NO: 1777665
uagcucaucccuauugagc

SEQ ID NO: 1777667 - RNA, 19 nt, Artificial Sequence
  Description of Artificial Sequence: Synthetic oligonucleotide
  Sense strand starting at position 1181 of SEQ ID NO: 1562855
ugauacagcagcgaucaaa

SEQ ID NO: 1777668 - RNA, 19 nt, Artificial Sequence
  Description of Artificial Sequence: Synthetic oligonucleotide
  Antisense strand to SEQ ID NO: 1777667
uuugaucgcugcuguauca

SEQ ID NO: 1777669 - RNA, 19 nt, Artificial Sequence
  Description of Artificial Sequence: Synthetic oligonucleotide
  Sense strand starting at position 1326 of SEQ ID NO: 1562855
gucagacagcaaugaggua

SEQ ID NO: 1777670 - RNA, 19 nt, Artificial Sequence
  Description of Artificial Sequence: Synthetic oligonucleotide
  Antisense strand to SEQ ID NO: 1777669
uaccucauugcugucugac

SEQ ID NO: 1777671 - RNA, 19 nt, Artificial Sequence
  Description of Artificial Sequence: Synthetic oligonucleotide
  Sense strand starting at position 1391 of SEQ ID NO: 1562855
cccugauuagcggaagaac

SEQ ID NO: 1777672 - RNA, 19 nt, Artificial Sequence
  Description of Artificial Sequence: Synthetic oligonucleotide
  Antisense strand to SEQ ID NO: 1777671
guucuuccgcuaaucaggg

SEQ ID NO: 1777673 - RNA, 19 nt, Artificial Sequence
  Description of Artificial Sequence: Synthetic oligonucleotide
  Sense strand starting at position 1410 of SEQ ID NO: 1562855
aagccagauucugugaauu

SEQ ID NO: 1777674 - RNA, 19 nt, Artificial Sequence
  Description of Artificial Sequence: Synthetic oligonucleotide
  Antisense strand to SEQ ID NO: 1777673
aauucacagaaucuggcuu

SEQ ID NO: 1777675 - RNA, 19 nt, Artificial Sequence
  Description of Artificial Sequence: Synthetic oligonucleotide
  Sense strand starting at position 1443 of SEQ ID NO: 1562855
gauggaaagucauugcuga

SEQ ID NO: 1777676 - RNA, 19 nt, Artificial Sequence
  Description of Artificial Sequence: Synthetic oligonucleotide
  Antisense strand to SEQ ID NO: 1777675
ucagcaaugacuuuccauc

SEQ ID NO: 1777677 - RNA, 19 nt, Artificial Sequence
  Description of Artificial Sequence: Synthetic oligonucleotide
  Sense strand starting at position 1444 of SEQ ID NO: 1562855
auggaaagucauugcugau

SEQ ID NO: 1777678 - RNA, 19 nt, Artificial Sequence
  Description of Artificial Sequence: Synthetic oligonucleotide
  Antisense strand to SEQ ID NO: 1777677
aucagcaaugacuuuccau

SEQ ID NO: 1777679 - RNA, 19 nt, Artificial Sequence
  Description of Artificial Sequence: Synthetic oligonucleotide
  Sense strand starting at position 1450 of SEQ ID NO: 1562855
agucauugcugaucaccau

SEQ ID NO: 1777680 - RNA, 19 nt, Artificial Sequence
  Description of Artificial Sequence: Synthetic oligonucleotide
  Antisense strand to SEQ ID NO: 1777679
auggugaucagcaaugacu

SEQ ID NO: 1777681 - RNA, 19 nt, Artificial Sequence
  Description of Artificial Sequence: Synthetic oligonucleotide
  Sense strand starting at position 1456 of SEQ ID NO: 1562855
ugcugaucaccaugugaag

SEQ ID NO: 1777682 - RNA, 19 nt, Artificial Sequence
  Description of Artificial Sequence: Synthetic oligonucleotide
  Antisense strand to SEQ ID NO: 1777681
cuucacauggugaucagca

SEQ ID NO: 1777683 - RNA, 19 nt, Artificial Sequence
  Description of Artificial Sequence: Synthetic oligonucleotide
  Sense strand starting at position 1585 of SEQ ID NO: 1562855
cucauuugugucugagggu

SEQ ID NO: 1777684 - RNA, 19 nt, Artificial Sequence
  Description of Artificial Sequence: Synthetic oligonucleotide
  Antisense strand to SEQ ID NO: 1777683
acccucagacacaaaugag

SEQ ID NO: 1777685 - RNA, 19 nt, Artificial Sequence
  Description of Artificial Sequence: Synthetic oligonucleotide
  Sense strand starting at position 1686 of SEQ ID NO: 1562855
cucucauguugaucaggga

SEQ ID NO: 1777686 - RNA, 19 nt, Artificial Sequence
  Description of Artificial Sequence: Synthetic oligonucleotide
  Antisense strand to SEQ ID NO: 1777685
ucccugaucaacaugagag

SEQ ID NO: 1777687 - RNA, 19 nt, Artificial Sequence
  Description of Artificial Sequence: Synthetic oligonucleotide
  Sense strand starting at position 2089 of SEQ ID NO: 1562855
ccagguuugcaggaaucca

SEQ ID NO: 1777688 - RNA, 19 nt, Artificial Sequence
  Description of Artificial Sequence: Synthetic oligonucleotide
  Antisense strand to SEQ ID NO: 1777687
uggauuccugcaaaccugg

SEQ ID NO: 1777689 - RNA, 19 nt, Artificial Sequence
  Description of Artificial Sequence: Synthetic oligonucleotide
  Sense strand starting at position 2136 of SEQ ID NO: 1562855
gccucaguuggguaucaga

SEQ ID NO: 1777690 - RNA, 19 nt, Artificial Sequence
  Description of Artificial Sequence: Synthetic oligonucleotide
  Antisense strand to SEQ ID NO: 1777689
ucugauacccaacugaggc

SEQ ID NO: 1777691 - RNA, 19 nt, Artificial Sequence
  Description of Artificial Sequence: Synthetic oligonucleotide
  Sense strand starting at position 2196 of SEQ ID NO: 1562855
ucuugugaccuugaggagu

SEQ ID NO: 1777692 - RNA, 19 nt, Artificial Sequence
  Description of Artificial Sequence: Synthetic oligonucleotide
  Antisense strand to SEQ ID NO: 1777691
acuccucaaggucacaaga

SEQ ID NO: 1777693 - RNA, 19 nt, Artificial Sequence
  Description of Artificial Sequence: Synthetic oligonucleotide
  Sense strand starting at position 2315 of SEQ ID NO: 1562855
gugaucucuuaggcccaga

SEQ ID NO: 1777694 - RNA, 19 nt, Artificial Sequence
  Description of Artificial Sequence: Synthetic oligonucleotide
  Antisense strand to SEQ ID NO: 1777693
ucugggccuaagagaucac

SEQ ID NO: 1777695 - RNA, 19 nt, Artificial Sequence
  Description of Artificial Sequence: Synthetic oligonucleotide
  Sense strand starting at position 2318 of SEQ ID NO: 1562855
aucucuuaggcccagagua

SEQ ID NO: 1777696 - RNA, 19 nt, Artificial Sequence
  Description of Artificial Sequence: Synthetic oligonucleotide
  Antisense strand to SEQ ID NO: 1777695
uacucugggccuaagagau

SEQ ID NO: 1777697 - RNA, 19 nt, Artificial Sequence
  Description of Artificial Sequence: Synthetic oligonucleotide
  Sense strand starting at position 2320 of SEQ ID NO: 1562855
cucuuaggcccagaguaaa

SEQ ID NO: 1777698 - RNA, 19 nt, Artificial Sequence
  Description of Artificial Sequence: Synthetic oligonucleotide
  Antisense strand to SEQ ID NO: 1777697
uuuacucugggccuaagag

SEQ ID NO: 1777699 - RNA, 19 nt, Artificial Sequence
  Description of Artificial Sequence: Synthetic oligonucleotide
  Sense strand starting at position 2425 of SEQ ID NO: 1562855
gggauauccuuuccucauc

SEQ ID NO: 1777700 - RNA, 19 nt, Artificial Sequence
  Description of Artificial Sequence: Synthetic oligonucleotide
  Antisense strand to SEQ ID NO: 1777699
gaugaggaaaggauauccc

SEQ ID NO: 1777701 - RNA, 19 nt, Artificial Sequence
  Description of Artificial Sequence: Synthetic oligonucleotide
  Sense strand starting at position 2532 of SEQ ID NO: 1562855
ucacccugugcucaggaua

SEQ ID NO: 1777702 - RNA, 19 nt, Artificial Sequence
  Description of Artificial Sequence: Synthetic oligonucleotide
  Antisense strand to SEQ ID NO: 1777701
uauccugagcacaggguga

SEQ ID NO: 1777703 - RNA, 19 nt, Artificial Sequence
  Description of Artificial Sequence: Synthetic oligonucleotide
  Sense strand starting at position 2535 of SEQ ID NO: 1562855
cccugugcucaggauaaag

SEQ ID NO: 1777704 - RNA, 19 nt, Artificial Sequence
  Description of Artificial Sequence: Synthetic oligonucleotide
  Antisense strand to SEQ ID NO: 1777703
cuuuauccugagcacaggg

SEQ ID NO: 1777705 - RNA, 19 nt, Artificial Sequence
  Description of Artificial Sequence: Synthetic oligonucleotide
  Sense strand starting at position 2655 of SEQ ID NO: 1562855
uuucuagaauguucuaaga

SEQ ID NO: 1777706 - RNA, 19 nt, Artificial Sequence
  Description of Artificial Sequence: Synthetic oligonucleotide
  Antisense strand to SEQ ID NO: 1777705
ucuuagaacauucuagaaa

SEQ ID NO: 1777707 - RNA, 19 nt, Artificial Sequence
  Description of Artificial Sequence: Synthetic oligonucleotide
  Sense strand starting at position 2870 of SEQ ID NO: 1562855
ucucacauuuguuuguuua

SEQ ID NO: 1777708 - RNA, 19 nt, Artificial Sequence
  Description of Artificial Sequence: Synthetic oligonucleotide
  Antisense strand to SEQ ID NO: 1777707
uaaacaaacaaaugugaga

SEQ ID NO: 1777709 - RNA, 19 nt, Artificial Sequence
  Description of Artificial Sequence: Synthetic oligonucleotide
  Sense strand starting at position 2871 of SEQ ID NO: 1562855
cucacauuuguuuguuuau

SEQ ID NO: 1777710 - RNA, 19 nt, Artificial Sequence
  Description of Artificial Sequence: Synthetic oligonucleotide
  Antisense strand to SEQ ID NO: 1777709
auaaacaaacaaaugugag

SEQ ID NO: 1777711 - RNA, 19 nt, Artificial Sequence
  Description of Artificial Sequence: Synthetic oligonucleotide
  Sense strand starting at position 2936 of SEQ ID NO: 1562855
auugcaagugcucaaccaa

SEQ ID NO: 1777712 - RNA, 19 nt, Artificial Sequence
  Description of Artificial Sequence: Synthetic oligonucleotide
  Antisense strand to SEQ ID NO: 1777711
uugguugagcacuugcaau

SEQ ID NO: 1777713 - RNA, 19 nt, Artificial Sequence
  Description of Artificial Sequence: Synthetic oligonucleotide
  Sense strand starting at position 3013 of SEQ ID NO: 1562855
guauuugauucugaaggga

SEQ ID NO: 1777714 - RNA, 19 nt, Artificial Sequence
  Description of Artificial Sequence: Synthetic oligonucleotide
  Antisense strand to SEQ ID NO: 1777713
ucccuucagaaucaaauac

SEQ ID NO: 1777715 - RNA, 19 nt, Artificial Sequence
  Description of Artificial Sequence: Synthetic oligonucleotide
  Sense strand starting at position 3016 of SEQ ID NO: 1562855
uuugauucugaagggacuu

SEQ ID NO: 1777716 - RNA, 19 nt, Artificial Sequence
  Description of Artificial Sequence: Synthetic oligonucleotide
  Antisense strand to SEQ ID NO: 1777715
aagucccuucagaaucaaa

SEQ ID NO: 1777717 - RNA, 19 nt, Artificial Sequence
  Description of Artificial Sequence: Synthetic oligonucleotide
  Sense strand starting at position 3360 of SEQ ID NO: 1562855
agucaaaucugaguucuca

SEQ ID NO: 1777718 - RNA, 19 nt, Artificial Sequence
  Description of Artificial Sequence: Synthetic oligonucleotide
  Antisense strand to SEQ ID NO: 1777717
ugagaacucagauuugacu

SEQ ID NO: 1777719 - RNA, 19 nt, Artificial Sequence
  Description of Artificial Sequence: Synthetic oligonucleotide
  Sense strand starting at position 3368 of SEQ ID NO: 1562855
cugaguucucaguguaaag

SEQ ID NO: 1777720 - RNA, 19 nt, Artificial Sequence
  Description of Artificial Sequence: Synthetic oligonucleotide
  Antisense strand to SEQ ID NO: 1777719
cuuuacacugagaacucag

SEQ ID NO: 1777721 - RNA, 19 nt, Artificial Sequence
  Description of Artificial Sequence: Synthetic oligonucleotide
  Sense strand starting at position 3370 of SEQ ID NO: 1562855
gaguucucaguguaaagug

SEQ ID NO: 1777722 - RNA, 19 nt, Artificial Sequence
  Description of Artificial Sequence: Synthetic oligonucleotide
  Antisense strand to SEQ ID NO: 1777721
cacuuuacacugagaacuc

SEQ ID NO: 1777723 - RNA, 19 nt, Artificial Sequence
  Description of Artificial Sequence: Synthetic oligonucleotide
  Sense strand starting at position 3388 of SEQ ID NO: 1562855
gggugucagaacugauuau

SEQ ID NO: 1777724 - RNA, 19 nt, Artificial Sequence
  Description of Artificial Sequence: Synthetic oligonucleotide
  Antisense strand to SEQ ID NO: 1777723
auaaucaguucugacaccc

SEQ ID NO: 1777725 - RNA, 19 nt, Artificial Sequence
  Description of Artificial Sequence: Synthetic oligonucleotide
  Sense strand starting at position 3397 of SEQ ID NO: 1562855
aacugauuaugggaacaga

SEQ ID NO: 1777726 - RNA, 19 nt, Artificial Sequence
  Description of Artificial Sequence: Synthetic oligonucleotide
  Antisense strand to SEQ ID NO: 1777725
ucuguucccauaaucaguu

SEQ ID NO: 1777727 - RNA, 19 nt, Artificial Sequence
  Description of Artificial Sequence: Synthetic oligonucleotide
  Sense strand starting at position 3653 of SEQ ID NO: 1562855
aaucgugagcugugaaaga

SEQ ID NO: 1777728 - RNA, 19 nt, Artificial Sequence
  Description of Artificial Sequence: Synthetic oligonucleotide
  Antisense strand to SEQ ID NO: 1777727
ucuuucacagcucacgauu

SEQ ID NO: 1777729 - RNA, 19 nt, Artificial Sequence
  Description of Artificial Sequence: Synthetic oligonucleotide
  Sense strand starting at position 3867 of SEQ ID NO: 1562855
aggacauuggccuacaguu

SEQ ID NO: 1777730 - RNA, 19 nt, Artificial Sequence
  Description of Artificial Sequence: Synthetic oligonucleotide
  Antisense strand to SEQ ID NO: 1777729
aacuguaggccaauguccu

SEQ ID NO: 1777731 - RNA, 19 nt, Artificial Sequence
  Description of Artificial Sequence: Synthetic oligonucleotide
  Sense strand starting at position 3876 of SEQ ID NO: 1562855
gccuacaguuggucaggaa

SEQ ID NO: 1777732 - RNA, 19 nt, Artificial Sequence
  Description of Artificial Sequence: Synthetic oligonucleotide
  Antisense strand to SEQ ID NO: 1777731
uuccugaccaacuguaggc

SEQ ID NO: 1777733 - RNA, 19 nt, Artificial Sequence
  Description of Artificial Sequence: Synthetic oligonucleotide
  Sense strand starting at position 3941 of SEQ ID NO: 1562855
auuuguaggugauugugua

SEQ ID NO: 1777734 - RNA, 19 nt, Artificial Sequence
  Description of Artificial Sequence: Synthetic oligonucleotide
  Antisense strand to SEQ ID NO: 1777733
uacacaaucaccuacaaau

SEQ ID NO: 1777735 - RNA, 19 nt, Artificial Sequence
  Description of Artificial Sequence: Synthetic oligonucleotide
  Sense strand starting at position 3975 of SEQ ID NO: 1562855
auaugccuauaguuggaaa

SEQ ID NO: 1777736 - RNA, 19 nt, Artificial Sequence
  Description of Artificial Sequence: Synthetic oligonucleotide
  Antisense strand to SEQ ID NO: 1777735
uuuccaacuauaggcauau

SEQ ID NO: 1777737 - RNA, 19 nt, Artificial Sequence
  Description of Artificial Sequence: Synthetic oligonucleotide
  Sense strand starting at position 3977 of SEQ ID NO: 1562855
augccuauaguuggaaaca

SEQ ID NO: 1777738 - RNA, 19 nt, Artificial Sequence
  Description of Artificial Sequence: Synthetic oligonucleotide
  Antisense strand to SEQ ID NO: 1777737
uguuuccaacuauaggcau

SEQ ID NO: 1777739 - RNA, 19 nt, Artificial Sequence
  Description of Artificial Sequence: Synthetic oligonucleotide
  Sense strand starting at position 20 of SEQ ID NO: 1562856
guggcacagguuugaguaa

SEQ ID NO: 1777740 - RNA, 19 nt, Artificial Sequence
  Description of Artificial Sequence: Synthetic oligonucleotide
  Antisense strand to SEQ ID NO: 1777739
uuacucaaaccugugccac

SEQ ID NO: 1777741 - RNA, 19 nt, Artificial Sequence
  Description of Artificial Sequence: Synthetic oligonucleotide
  Sense strand starting at position 31 of SEQ ID NO: 1562856
uugaguaacuggccagcua

SEQ ID NO: 1777742 - RNA, 19 nt, Artificial Sequence
  Description of Artificial Sequence: Synthetic oligonucleotide
  Antisense strand to SEQ ID NO: 1777741
uagcuggccaguuacucaa

SEQ ID NO: 1777743 - RNA, 19 nt, Artificial Sequence
  Description of Artificial Sequence: Synthetic oligonucleotide
  Sense strand starting at position 46 of SEQ ID NO: 1562856
gcuacagaucacugaucuu

SEQ ID NO: 1777744 - RNA, 19 nt, Artificial Sequence
  Description of Artificial Sequence: Synthetic oligonucleotide
  Antisense strand to SEQ ID NO: 1777743
aagaucagugaucuguagc

SEQ ID NO: 1777745 - RNA, 19 nt, Artificial Sequence
  Description of Artificial Sequence: Synthetic oligonucleotide
  Sense strand starting at position 175 of SEQ ID NO: 1562856
uugggacuuucuucccaaa

SEQ ID NO: 1777746 - RNA, 19 nt, Artificial Sequence
  Description of Artificial Sequence: Synthetic oligonucleotide
  Antisense strand to SEQ ID NO: 1777745
uuugggaagaaagucccaa

SEQ ID NO: 1777747 - RNA, 19 nt, Artificial Sequence
  Description of Artificial Sequence: Synthetic oligonucleotide
  Sense strand starting at position 235 of SEQ ID NO: 1562856
agagcuggauccucagagu

SEQ ID NO: 1777748 - RNA, 19 nt, Artificial Sequence
  Description of Artificial Sequence: Synthetic oligonucleotide
  Antisense strand to SEQ ID NO: 1777747
acucugaggauccagcucu

SEQ ID NO: 1777749 - RNA, 19 nt, Artificial Sequence
  Description of Artificial Sequence: Synthetic oligonucleotide
  Sense strand starting at position 263 of SEQ ID NO: 1562856
uggguucugucuucuacuu

SEQ ID NO: 1777750 - RNA, 19 nt, Artificial Sequence
  Description of Artificial Sequence: Synthetic oligonucleotide
  Antisense strand to SEQ ID NO: 1777749
aaguagaagacagaaccca

SEQ ID NO: 1777751 - RNA, 19 nt, Artificial Sequence
  Description of Artificial Sequence: Synthetic oligonucleotide
  Sense strand starting at position 364 of SEQ ID NO: 1562856
gguucuggguacuccuaga

SEQ ID NO: 1777752 - RNA, 19 nt, Artificial Sequence
  Description of Artificial Sequence: Synthetic oligonucleotide
  Antisense strand to SEQ ID NO: 1777751
ucuaggaguacccagaacc

SEQ ID NO: 1777753 - RNA, 19 nt, Artificial Sequence
  Description of Artificial Sequence: Synthetic oligonucleotide
  Sense strand starting at position 369 of SEQ ID NO: 1562856
uggguacuccuagaaguau

SEQ ID NO: 1777754 - RNA, 19 nt, Artificial Sequence
  Description of Artificial Sequence: Synthetic oligonucleotide
  Antisense strand to SEQ ID NO: 1777753
auacuucuaggaguaccca

SEQ ID NO: 1777755 - RNA, 19 nt, Artificial Sequence
  Description of Artificial Sequence: Synthetic oligonucleotide
  Sense strand starting at position 383 of SEQ ID NO: 1562856
aguauucugccaggcaaac

SEQ ID NO: 1777756 - RNA, 19 nt, Artificial Sequence
  Description of Artificial Sequence: Synthetic oligonucleotide
  Antisense strand to SEQ ID NO: 1777755
guuugccuggcagaauacu

SEQ ID NO: 1777757 - RNA, 19 nt, Artificial Sequence
  Description of Artificial Sequence: Synthetic oligonucleotide
  Sense strand starting at position 559 of SEQ ID NO: 1562856
aguuucuccuucucuagua

SEQ ID NO: 1777758 - RNA, 19 nt, Artificial Sequence
  Description of Artificial Sequence: Synthetic oligonucleotide
  Antisense strand to SEQ ID NO: 1777757
uacuagagaaggagaaacu

SEQ ID NO: 1777759 - RNA, 19 nt, Artificial Sequence
  Description of Artificial Sequence: Synthetic oligonucleotide
  Sense strand starting at position 560 of SEQ ID NO: 1562856
guuucuccuucucuaguau

SEQ ID NO: 1777760 - RNA, 19 nt, Artificial Sequence
  Description of Artificial Sequence: Synthetic oligonucleotide
  Antisense strand to SEQ ID NO: 1777759
auacuagagaaggagaaac

SEQ ID NO: 1777761 - RNA, 19 nt, Artificial Sequence
  Description of Artificial Sequence: Synthetic oligonucleotide
  Sense strand starting at position 590 of SEQ ID NO: 1562856
aaguucuggucaguagcaa

SEQ ID NO: 1777762 - RNA, 19 nt, Artificial Sequence
  Description of Artificial Sequence: Synthetic oligonucleotide
  Antisense strand to SEQ ID NO: 1777761
uugcuacugaccagaacuu

SEQ ID NO: 1777763 - RNA, 19 nt, Artificial Sequence
  Description of Artificial Sequence: Synthetic oligonucleotide
  Sense strand starting at position 744 of SEQ ID NO: 1562856
ggcagcagcuaauauuuaa

SEQ ID NO: 1777764 - RNA, 19 nt, Artificial Sequence
  Description of Artificial Sequence: Synthetic oligonucleotide
  Antisense strand to SEQ ID NO: 1777763
uuaaauauuagcugcugcc

SEQ ID NO: 1777765 - RNA, 19 nt, Artificial Sequence
  Description of Artificial Sequence: Synthetic oligonucleotide
  Sense strand starting at position 763 of SEQ ID NO: 1562856
ugaguuaaauaugcaucaa

SEQ ID NO: 1777766 - RNA, 19 nt, Artificial Sequence
  Description of Artificial Sequence: Synthetic oligonucleotide
  Antisense strand to SEQ ID NO: 1777765
uugaugcauauuuaacuca

SEQ ID NO: 1777767 - RNA, 19 nt, Artificial Sequence
  Description of Artificial Sequence: Synthetic oligonucleotide
  Sense strand starting at position 1320 of SEQ ID NO: 1562856
gggcaucuauaauuacacu

SEQ ID NO: 1777768 - RNA, 19 nt, Artificial Sequence
  Description of Artificial Sequence: Synthetic oligonucleotide
  Antisense strand to SEQ ID NO: 1777767
aguguaauuauagaugccc

SEQ ID NO: 1777769 - RNA, 19 nt, Artificial Sequence
  Description of Artificial Sequence: Synthetic oligonucleotide
  Sense strand starting at position 1354 of SEQ ID NO: 1562856
uuggguucuggguacaaca

SEQ ID NO: 1777770 - RNA, 19 nt, Artificial Sequence
  Description of Artificial Sequence: Synthetic oligonucleotide
  Antisense strand to SEQ ID NO: 1777769
uguuguacccagaacccaa

SEQ ID NO: 1777771 - RNA, 19 nt, Artificial Sequence
  Description of Artificial Sequence: Synthetic oligonucleotide
  Sense strand starting at position 1471 of SEQ ID NO: 1562856
gccaauugcgaaggacaaa

SEQ ID NO: 1777772 - RNA, 19 nt, Artificial Sequence
  Description of Artificial Sequence: Synthetic oligonucleotide
  Antisense strand to SEQ ID NO: 1777771
uuuguccuucgcaauuggc

SEQ ID NO: 1777773 - RNA, 19 nt, Artificial Sequence
  Description of Artificial Sequence: Synthetic oligonucleotide
  Sense strand starting at position 1502 of SEQ ID NO: 1562856
uccgauagcacguacgaau

SEQ ID NO: 1777774 - RNA, 19 nt, Artificial Sequence
  Description of Artificial Sequence: Synthetic oligonucleotide
  Antisense strand to SEQ ID NO: 1777773
auucguacgugcuaucgga

SEQ ID NO: 1777775 - RNA, 19 nt, Artificial Sequence
  Description of Artificial Sequence: Synthetic oligonucleotide
  Sense strand starting at position 1782 of SEQ ID NO: 1562856
cguucaugucccgacugaa

SEQ ID NO: 1777776 - RNA, 19 nt, Artificial Sequence
  Description of Artificial Sequence: Synthetic oligonucleotide
  Antisense strand to SEQ ID NO: 1777775
uucagucgggacaugaacg

SEQ ID NO: 1777777 - RNA, 19 nt, Artificial Sequence
  Description of Artificial Sequence: Synthetic oligonucleotide
  Sense strand starting at position 1816 of SEQ ID NO: 1562856
ggugcuggcgguagaagua

SEQ ID NO: 1777778 - RNA, 19 nt, Artificial Sequence
  Description of Artificial Sequence: Synthetic oligonucleotide
  Antisense strand to SEQ ID NO: 1777777
uacuucuaccgccagcacc

SEQ ID NO: 1777779 - RNA, 19 nt, Artificial Sequence
  Description of Artificial Sequence: Synthetic oligonucleotide
  Sense strand starting at position 1979 of SEQ ID NO: 1562856
ggaggaugacucugaggcu

SEQ ID NO: 1777780 - RNA, 19 nt, Artificial Sequence
  Description of Artificial Sequence: Synthetic oligonucleotide
  Antisense strand to SEQ ID NO: 1777779
agccucagagucauccucc

SEQ ID NO: 1777781 - RNA, 19 nt, Artificial Sequence
  Description of Artificial Sequence: Synthetic oligonucleotide
  Sense strand starting at position 2756 of SEQ ID NO: 1562856
ugagauggcccagagucua

SEQ ID NO: 1777782 - RNA, 19 nt, Artificial Sequence
  Description of Artificial Sequence: Synthetic oligonucleotide
  Antisense strand to SEQ ID NO: 1777781
uagacucugggccaucuca

SEQ ID NO: 1777783 - RNA, 19 nt, Artificial Sequence
  Description of Artificial Sequence: Synthetic oligonucleotide
  Sense strand starting at position 2768 of SEQ ID NO: 1562856
gagucuaggucaccugaca

SEQ ID NO: 1777784 - RNA, 19 nt, Artificial Sequence
  Description of Artificial Sequence: Synthetic oligonucleotide
  Antisense strand to SEQ ID NO: 1777783
ugucaggugaccuagacuc

SEQ ID NO: 1777785 - RNA, 19 nt, Artificial Sequence
  Description of Artificial Sequence: Synthetic oligonucleotide
  Sense strand starting at position 3089 of SEQ ID NO: 1562856
acaguuaagguuuguauaa

SEQ ID NO: 1777786 - RNA, 19 nt, Artificial Sequence
  Description of Artificial Sequence: Synthetic oligonucleotide
  Antisense strand to SEQ ID NO: 1777785
uuauacaaaccuuaacugu

SEQ ID NO: 1777787 - RNA, 19 nt, Artificial Sequence
  Description of Artificial Sequence: Synthetic oligonucleotide
  Sense strand starting at position 3090 of SEQ ID NO: 1562856
caguuaagguuuguauaaa

SEQ ID NO: 1777788 - RNA, 19 nt, Artificial Sequence
  Description of Artificial Sequence: Synthetic oligonucleotide
  Antisense strand to SEQ ID NO: 1777787
uuuauacaaaccuuaacug

SEQ ID NO: 1777789 - RNA, 19 nt, Artificial Sequence
  Description of Artificial Sequence: Synthetic oligonucleotide
  Sense strand starting at position 3098 of SEQ ID NO: 1562856
guuuguauaaaguguccuu

SEQ ID NO: 1777790 - RNA, 19 nt, Artificial Sequence
  Description of Artificial Sequence: Synthetic oligonucleotide
  Antisense strand to SEQ ID NO: 1777789
aaggacacuuuauacaaac

SEQ ID NO: 1777791 - RNA, 19 nt, Artificial Sequence
  Description of Artificial Sequence: Synthetic oligonucleotide
  Sense strand starting at position 3101 of SEQ ID NO: 1562856
uguauaaaguguccuuaga

SEQ ID NO: 1777792 - RNA, 19 nt, Artificial Sequence
  Description of Artificial Sequence: Synthetic oligonucleotide
  Antisense strand to SEQ ID NO: 1777791
ucuaaggacacuuuauaca

SEQ ID NO: 1777793 - RNA, 19 nt, Artificial Sequence
  Description of Artificial Sequence: Synthetic oligonucleotide
  Sense strand starting at position 3103 of SEQ ID NO: 1562856
uauaaaguguccuuagaug

SEQ ID NO: 1777794 - RNA, 19 nt, Artificial Sequence
  Description of Artificial Sequence: Synthetic oligonucleotide
  Antisense strand to SEQ ID NO: 1777793
caucuaaggacacuuuaua

SEQ ID NO: 1777795 - RNA, 19 nt, Artificial Sequence
  Description of Artificial Sequence: Synthetic oligonucleotide
  Sense strand starting at position 3111 of SEQ ID NO: 1562856
guccuuagauguccuuagu

SEQ ID NO: 1777796 - RNA, 19 nt, Artificial Sequence
  Description of Artificial Sequence: Synthetic oligonucleotide
  Antisense strand to SEQ ID NO: 1777795
acuaaggacaucuaaggac

SEQ ID NO: 1777797 - RNA, 19 nt, Artificial Sequence
  Description of Artificial Sequence: Synthetic oligonucleotide
  Sense strand starting at position 3114 of SEQ ID NO: 1562856
cuuagauguccuuaguagc

SEQ ID NO: 1777798 - RNA, 19 nt, Artificial Sequence
  Description of Artificial Sequence: Synthetic oligonucleotide
  Antisense strand to SEQ ID NO: 1777797
gcuacuaaggacaucuaag

SEQ ID NO: 1777799 - RNA, 19 nt, Artificial Sequence
  Description of Artificial Sequence: Synthetic oligonucleotide
  Sense strand starting at position 3134 of SEQ ID NO: 1562856
acuguucucuaguucucua

SEQ ID NO: 1777800 - RNA, 19 nt, Artificial Sequence
  Description of Artificial Sequence: Synthetic oligonucleotide
  Antisense strand to SEQ ID NO: 1777799
uagagaacuagagaacagu

SEQ ID NO: 1777801 - RNA, 19 nt, Artificial Sequence
  Description of Artificial Sequence: Synthetic oligonucleotide
  Sense strand starting at position 3138 of SEQ ID NO: 1562856
uucucuaguucucuaggua

SEQ ID NO: 1777802 - RNA, 19 nt, Artificial Sequence
  Description of Artificial Sequence: Synthetic oligonucleotide
  Antisense strand to SEQ ID NO: 1777801
uaccuagagaacuagagaa

SEQ ID NO: 1777803 - RNA, 19 nt, Artificial Sequence
  Description of Artificial Sequence: Synthetic oligonucleotide
  Sense strand starting at position 3139 of SEQ ID NO: 1562856
ucucuaguucucuagguac

SEQ ID NO: 1777804 - RNA, 19 nt, Artificial Sequence
  Description of Artificial Sequence: Synthetic oligonucleotide
  Antisense strand to SEQ ID NO: 1777803
guaccuagagaacuagaga

SEQ ID NO: 1777805 - RNA, 19 nt, Artificial Sequence
  Description of Artificial Sequence: Synthetic oligonucleotide
  Sense strand starting at position 3141 of SEQ ID NO: 1562856
ucuaguucucuagguacau

SEQ ID NO: 1777806 - RNA, 19 nt, Artificial Sequence
  Description of Artificial Sequence: Synthetic oligonucleotide
  Antisense strand to SEQ ID NO: 1777805
auguaccuagagaacuaga

SEQ ID NO: 1777807 - RNA, 19 nt, Artificial Sequence
  Description of Artificial Sequence: Synthetic oligonucleotide
  Sense strand starting at position 3142 of SEQ ID NO: 1562856
cuaguucucuagguacauu

SEQ ID NO: 1777808 - RNA, 19 nt, Artificial Sequence
  Description of Artificial Sequence: Synthetic oligonucleotide
  Antisense strand to SEQ ID NO: 1777807
aauguaccuagagaacuag

SEQ ID NO: 1777809 - RNA, 19 nt, Artificial Sequence
  Description of Artificial Sequence: Synthetic oligonucleotide
  Sense strand starting at position 3186 of SEQ ID NO: 1562856
cagugagauuguguugaua

SEQ ID NO: 1777810 - RNA, 19 nt, Artificial Sequence
  Description of Artificial Sequence: Synthetic oligonucleotide
  Antisense strand to SEQ ID NO: 1777809
uaucaacacaaucucacug

SEQ ID NO: 1777811 - RNA, 19 nt, Artificial Sequence
  Description of Artificial Sequence: Synthetic oligonucleotide
  Sense strand starting at position 3189 of SEQ ID NO: 1562856
ugagauuguguugauauac

SEQ ID NO: 1777812 - RNA, 19 nt, Artificial Sequence
  Description of Artificial Sequence: Synthetic oligonucleotide
  Antisense strand to SEQ ID NO: 1777811
guauaucaacacaaucuca

SEQ ID NO: 1777813 - RNA, 19 nt, Artificial Sequence
  Description of Artificial Sequence: Synthetic oligonucleotide
  Sense strand starting at position 3365 of SEQ ID NO: 1562856
auggcuaaugcuuguauuu

SEQ ID NO: 1777814 - RNA, 19 nt, Artificial Sequence
  Description of Artificial Sequence: Synthetic oligonucleotide
  Antisense strand to SEQ ID NO: 1777813
aaauacaagcauuagccau

SEQ ID NO: 1777815 - RNA, 19 nt, Artificial Sequence
  Description of Artificial Sequence: Synthetic oligonucleotide
  Sense strand starting at position 3643 of SEQ ID NO: 1562856
guaugauucuaaccuugug

SEQ ID NO: 1777816 - RNA, 19 nt, Artificial Sequence
  Description of Artificial Sequence: Synthetic oligonucleotide
  Antisense strand to SEQ ID NO: 1777815
cacaagguuagaaucauac

SEQ ID NO: 1777817 - RNA, 19 nt, Artificial Sequence
  Description of Artificial Sequence: Synthetic oligonucleotide
  Sense strand starting at position 3646 of SEQ ID NO: 1562856
ugauucuaaccuuguguau

SEQ ID NO: 1777818 - RNA, 19 nt, Artificial Sequence
  Description of Artificial Sequence: Synthetic oligonucleotide
  Antisense strand to SEQ ID NO: 1777817
auacacaagguuagaauca

SEQ ID NO: 1777819 - RNA, 19 nt, Artificial Sequence
  Description of Artificial Sequence: Synthetic oligonucleotide
  Sense strand starting at position 89 of SEQ ID NO: 1562857
guuggagauucucaacuau

SEQ ID NO: 1777820 - RNA, 19 nt, Artificial Sequence
  Description of Artificial Sequence: Synthetic oligonucleotide
  Antisense strand to SEQ ID NO: 1777819
auaguugagaaucuccaac

SEQ ID NO: 1777821 - RNA, 19 nt, Artificial Sequence
  Description of Artificial Sequence: Synthetic oligonucleotide
  Sense strand starting at position 100 of SEQ ID NO: 1562857
ucaacuauugucgaucaca

SEQ ID NO: 1777822 - RNA, 19 nt, Artificial Sequence
  Description of Artificial Sequence: Synthetic oligonucleotide
  Antisense strand to SEQ ID NO: 1777821
ugugaucgacaauaguuga

SEQ ID NO: 1777823 - RNA, 19 nt, Artificial Sequence
  Description of Artificial Sequence: Synthetic oligonucleotide
  Sense strand starting at position 103 of SEQ ID NO: 1562857
acuauugucgaucacagau

SEQ ID NO: 1777824 - RNA, 19 nt, Artificial Sequence
  Description of Artificial Sequence: Synthetic oligonucleotide
  Antisense strand to SEQ ID NO: 1777823
aucugugaucgacaauagu

SEQ ID NO: 1777825 - RNA, 19 nt, Artificial Sequence
  Description of Artificial Sequence: Synthetic oligonucleotide
  Sense strand starting at position 178 of SEQ ID NO: 1562857
uacagacaguuucgugaga

SEQ ID NO: 1777826 - RNA, 19 nt, Artificial Sequence
  Description of Artificial Sequence: Synthetic oligonucleotide
  Antisense strand to SEQ ID NO: 1777825
ucucacgaaacugucugua

SEQ ID NO: 1777827 - RNA, 19 nt, Artificial Sequence
  Description of Artificial Sequence: Synthetic oligonucleotide
  Sense strand starting at position 180 of SEQ ID NO: 1562857
cagacaguuucgugagaca

SEQ ID NO: 1777828 - RNA, 19 nt, Artificial Sequence
  Description of Artificial Sequence: Synthetic oligonucleotide
  Antisense strand to SEQ ID NO: 1777827
ugucucacgaaacugucug

SEQ ID NO: 1777829 - RNA, 19 nt, Artificial Sequence
  Description of Artificial Sequence: Synthetic oligonucleotide
  Sense strand starting at position 183 of SEQ ID NO: 1562857
acaguuucgugagacauca

SEQ ID NO: 1777830 - RNA, 19 nt, Artificial Sequence
  Description of Artificial Sequence: Synthetic oligonucleotide
  Antisense strand to SEQ ID NO: 1777829
ugaugucucacgaaacugu

SEQ ID NO: 1777831 - RNA, 19 nt, Artificial Sequence
  Description of Artificial Sequence: Synthetic oligonucleotide
  Sense strand starting at position 191 of SEQ ID NO: 1562857
gugagacaucauggaacuc

SEQ ID NO: 1777832 - RNA, 19 nt, Artificial Sequence
  Description of Artificial Sequence: Synthetic oligonucleotide
  Antisense strand to SEQ ID NO: 1777831
gaguuccaugaugucucac

SEQ ID NO: 1777833 - RNA, 19 nt, Artificial Sequence
  Description of Artificial Sequence: Synthetic oligonucleotide
  Sense strand starting at position 274 of SEQ ID NO: 1562857
gagggcaaguguuggucaa

SEQ ID NO: 1777834 - RNA, 19 nt, Artificial Sequence
  Description of Artificial Sequence: Synthetic oligonucleotide
  Antisense strand to SEQ ID NO: 1777833
uugaccaacacuugcccuc

SEQ ID NO: 1777835 - RNA, 19 nt, Artificial Sequence
  Description of Artificial Sequence: Synthetic oligonucleotide
  Sense strand starting at position 329 of SEQ ID NO: 1562857
gcgcaaucuagcugacuca

SEQ ID NO: 1777836 - RNA, 19 nt, Artificial Sequence
  Description of Artificial Sequence: Synthetic oligonucleotide
  Antisense strand to SEQ ID NO: 1777835
ugagucagcuagauugcgc

SEQ ID NO: 1777837 - RNA, 19 nt, Artificial Sequence
  Description of Artificial Sequence: Synthetic oligonucleotide
  Sense strand starting at position 456 of SEQ ID NO: 1562857
gcaacaacugacuguagua

SEQ ID NO: 1777838 - RNA, 19 nt, Artificial Sequence
  Description of Artificial Sequence: Synthetic oligonucleotide
  Antisense strand to SEQ ID NO: 1777837
uacuacagucaguuguugc

SEQ ID NO: 1777839 - RNA, 19 nt, Artificial Sequence
  Description of Artificial Sequence: Synthetic oligonucleotide
  Sense strand starting at position 477 of SEQ ID NO: 1562857
gguucccucuaggaagaaa

SEQ ID NO: 1777840 - RNA, 19 nt, Artificial Sequence
  Description of Artificial Sequence: Synthetic oligonucleotide
  Antisense strand to SEQ ID NO: 1777839
uuucuuccuagagggaacc

SEQ ID NO: 1777841 - RNA, 19 nt, Artificial Sequence
  Description of Artificial Sequence: Synthetic oligonucleotide
  Sense strand starting at position 809 of SEQ ID NO: 1562857
gaaguacagccguaaagaa

SEQ ID NO: 1777842 - RNA, 19 nt, Artificial Sequence
  Description of Artificial Sequence: Synthetic oligonucleotide
  Antisense strand to SEQ ID NO: 1777841
uucuuuacggcuguacuuc

SEQ ID NO: 1777843 - RNA, 19 nt, Artificial Sequence
  Description of Artificial Sequence: Synthetic oligonucleotide
  Sense strand starting at position 2247 of SEQ ID NO: 1562857
ccugcgaguguguucggaa

SEQ ID NO: 1777844 - RNA, 19 nt, Artificial Sequence
  Description of Artificial Sequence: Synthetic oligonucleotide
  Antisense strand to SEQ ID NO: 1777843
uuccgaacacacucgcagg

SEQ ID NO: 1777845 - RNA, 19 nt, Artificial Sequence
  Description of Artificial Sequence: Synthetic oligonucleotide
  Sense strand starting at position 2248 of SEQ ID NO: 1562857
cugcgaguguguucggaau

SEQ ID NO: 1777846 - RNA, 19 nt, Artificial Sequence
  Description of Artificial Sequence: Synthetic oligonucleotide
  Antisense strand to SEQ ID NO: 1777845
auuccgaacacacucgcag

SEQ ID NO: 1777847 - RNA, 19 nt, Artificial Sequence
  Description of Artificial Sequence: Synthetic oligonucleotide
  Sense strand starting at position 2249 of SEQ ID NO: 1562857
ugcgaguguguucggaaua

SEQ ID NO: 1777848 - RNA, 19 nt, Artificial Sequence
  Description of Artificial Sequence: Synthetic oligonucleotide
  Antisense strand to SEQ ID NO: 1777847
uauuccgaacacacucgca

SEQ ID NO: 1777849 - RNA, 19 nt, Artificial Sequence
  Description of Artificial Sequence: Synthetic oligonucleotide
  Sense strand starting at position 2251 of SEQ ID NO: 1562857
cgaguguguucggaauaag

SEQ ID NO: 1777850 - RNA, 19 nt, Artificial Sequence
  Description of Artificial Sequence: Synthetic oligonucleotide
  Antisense strand to SEQ ID NO: 1777849
cuuauuccgaacacacucg

SEQ ID NO: 1777851 - RNA, 19 nt, Artificial Sequence
  Description of Artificial Sequence: Synthetic oligonucleotide
  Sense strand starting at position 2254 of SEQ ID NO: 1562857
guguguucggaauaagaaa

SEQ ID NO: 1777852 - RNA, 19 nt, Artificial Sequence
  Description of Artificial Sequence: Synthetic oligonucleotide
  Antisense strand to SEQ ID NO: 1777851
uuucuuauuccgaacacac

SEQ ID NO: 1777853 - RNA, 19 nt, Artificial Sequence
  Description of Artificial Sequence: Synthetic oligonucleotide
  Sense strand starting at position 2299 of SEQ ID NO: 1562857
ggagaaaccugaugggaau

SEQ ID NO: 1777854 - RNA, 19 nt, Artificial Sequence
  Description of Artificial Sequence: Synthetic oligonucleotide
  Antisense strand to SEQ ID NO: 1777853
auucccaucagguuucucc

SEQ ID NO: 1777855 - RNA, 19 nt, Artificial Sequence
  Description of Artificial Sequence: Synthetic oligonucleotide
  Sense strand starting at position 2345 of SEQ ID NO: 1562857
aauggaagauugcagucau

SEQ ID NO: 1777856 - RNA, 19 nt, Artificial Sequence
  Description of Artificial Sequence: Synthetic oligonucleotide
  Antisense strand to SEQ ID NO: 1777855
augacugcaaucuuccauu

SEQ ID NO: 1777857 - RNA, 19 nt, Artificial Sequence
  Description of Artificial Sequence: Synthetic oligonucleotide
  Sense strand starting at position 2352 of SEQ ID NO: 1562857
gauugcagucauuaggaug

SEQ ID NO: 1777858 - RNA, 19 nt, Artificial Sequence
  Description of Artificial Sequence: Synthetic oligonucleotide
  Antisense strand to SEQ ID NO: 1777857
cauccuaaugacugcaauc

SEQ ID NO: 1777859 - RNA, 19 nt, Artificial Sequence
  Description of Artificial Sequence: Synthetic oligonucleotide
  Sense strand starting at position 2373 of SEQ ID NO: 1562857
gggaucccuguaugagaca

SEQ ID NO: 1777860 - RNA, 19 nt, Artificial Sequence
  Description of Artificial Sequence: Synthetic oligonucleotide
  Antisense strand to SEQ ID NO: 1777859
ugucucauacagggauccc

SEQ ID NO: 1777861 - RNA, 19 nt, Artificial Sequence
  Description of Artificial Sequence: Synthetic oligonucleotide
  Sense strand starting at position 2394 of SEQ ID NO: 1562857
acacgaggcuuuccaaaua

SEQ ID NO: 1777862 - RNA, 19 nt, Artificial Sequence
  Description of Artificial Sequence: Synthetic oligonucleotide
  Antisense strand to SEQ ID NO: 1777861
uauuuggaaagccucgugu

SEQ ID NO: 1777863 - RNA, 19 nt, Artificial Sequence
  Description of Artificial Sequence: Synthetic oligonucleotide
  Sense strand starting at position 2545 of SEQ ID NO: 1562857
gagguacaguguucuccua

SEQ ID NO: 1777864 - RNA, 19 nt, Artificial Sequence
  Description of Artificial Sequence: Synthetic oligonucleotide
  Antisense strand to SEQ ID NO: 1777863
uaggagaacacuguaccuc

SEQ ID NO: 1777865 - RNA, 19 nt, Artificial Sequence
  Description of Artificial Sequence: Synthetic oligonucleotide
  Sense strand starting at position 2547 of SEQ ID NO: 1562857
gguacaguguucuccuaac

SEQ ID NO: 1777866 - RNA, 19 nt, Artificial Sequence
  Description of Artificial Sequence: Synthetic oligonucleotide
  Antisense strand to SEQ ID NO: 1777865
guuaggagaacacuguacc

SEQ ID NO: 1777867 - RNA, 19 nt, Artificial Sequence
  Description of Artificial Sequence: Synthetic oligonucleotide
  Sense strand starting at position 2857 of SEQ ID NO: 1562857
ggagaaagcugggcugagu

SEQ ID NO: 1777868 - RNA, 19 nt, Artificial Sequence
  Description of Artificial Sequence: Synthetic oligonucleotide
  Antisense strand to SEQ ID NO: 1777867
acucagcccagcuuucucc

SEQ ID NO: 1777869 - RNA, 19 nt, Artificial Sequence
  Description of Artificial Sequence: Synthetic oligonucleotide
  Sense strand starting at position 3012 of SEQ ID NO: 1562857
gcaguuugcuggucgaaug

SEQ ID NO: 1777870 - RNA, 19 nt, Artificial Sequence
  Description of Artificial Sequence: Synthetic oligonucleotide
  Antisense strand to SEQ ID NO: 1777869
cauucgaccagcaaacugc

SEQ ID NO: 1777871 - RNA, 19 nt, Artificial Sequence
  Description of Artificial Sequence: Synthetic oligonucleotide
  Sense strand starting at position 3013 of SEQ ID NO: 1562857
caguuugcuggucgaauga

SEQ ID NO: 1777872 - RNA, 19 nt, Artificial Sequence
  Description of Artificial Sequence: Synthetic oligonucleotide
  Antisense strand to SEQ ID NO: 1777871
ucauucgaccagcaaacug

SEQ ID NO: 1777873 - RNA, 19 nt, Artificial Sequence
  Description of Artificial Sequence: Synthetic oligonucleotide
  Sense strand starting at position 3309 of SEQ ID NO: 1562857
ccuucucucuuacagggaa

SEQ ID NO: 1777874 - RNA, 19 nt, Artificial Sequence
  Description of Artificial Sequence: Synthetic oligonucleotide
  Antisense strand to SEQ ID NO: 1777873
uucccuguaagagagaagg

SEQ ID NO: 1777875 - RNA, 19 nt, Artificial Sequence
  Description of Artificial Sequence: Synthetic oligonucleotide
  Sense strand starting at position 3331 of SEQ ID NO: 1562857
augagaugcuuucugagua

SEQ ID NO: 1777876 - RNA, 19 nt, Artificial Sequence
  Description of Artificial Sequence: Synthetic oligonucleotide
  Antisense strand to SEQ ID NO: 1777875
uacucagaaagcaucucau

SEQ ID NO: 1777877 - RNA, 19 nt, Artificial Sequence
  Description of Artificial Sequence: Synthetic oligonucleotide
  Sense strand starting at position 3332 of SEQ ID NO: 1562857
ugagaugcuuucugaguac

SEQ ID NO: 1777878 - RNA, 19 nt, Artificial Sequence
  Description of Artificial Sequence: Synthetic oligonucleotide
  Antisense strand to SEQ ID NO: 1777877
guacucagaaagcaucuca

SEQ ID NO: 1777879 - RNA, 19 nt, Artificial Sequence
  Description of Artificial Sequence: Synthetic oligonucleotide
  Sense strand starting at position 3335 of SEQ ID NO: 1562857
gaugcuuucugaguaccaa

SEQ ID NO: 1777880 - RNA, 19 nt, Artificial Sequence
  Description of Artificial Sequence: Synthetic oligonucleotide
  Antisense strand to SEQ ID NO: 1777879
uugguacucagaaagcauc

SEQ ID NO: 1777881 - RNA, 19 nt, Artificial Sequence
  Description of Artificial Sequence: Synthetic oligonucleotide
  Sense strand starting at position 3336 of SEQ ID NO: 1562857
augcuuucugaguaccaaa

SEQ ID NO: 1777882 - RNA, 19 nt, Artificial Sequence
  Description of Artificial Sequence: Synthetic oligonucleotide
  Antisense strand to SEQ ID NO: 1777881
uuugguacucagaaagcau

SEQ ID NO: 1777883 - RNA, 19 nt, Artificial Sequence
  Description of Artificial Sequence: Synthetic oligonucleotide
  Sense strand starting at position 3413 of SEQ ID NO: 1562857
cugcaacggcugugacauu

SEQ ID NO: 1777884 - RNA, 19 nt, Artificial Sequence
  Description of Artificial Sequence: Synthetic oligonucleotide
  Antisense strand to SEQ ID NO: 1777883
aaugucacagccguugcag

SEQ ID NO: 1777885 - RNA, 19 nt, Artificial Sequence
  Description of Artificial Sequence: Synthetic oligonucleotide
  Sense strand starting at position 3422 of SEQ ID NO: 1562857
cugugacauuuggcucuuu

SEQ ID NO: 1777886 - RNA, 19 nt, Artificial Sequence
  Description of Artificial Sequence: Synthetic oligonucleotide
  Antisense strand to SEQ ID NO: 1777885
aaagagccaaaugucacag

SEQ ID NO: 1777887 - RNA, 19 nt, Artificial Sequence
  Description of Artificial Sequence: Synthetic oligonucleotide
  Sense strand starting at position 3423 of SEQ ID NO: 1562857
ugugacauuuggcucuuua

SEQ ID NO: 1777888 - RNA, 19 nt, Artificial Sequence
  Description of Artificial Sequence: Synthetic oligonucleotide
  Antisense strand to SEQ ID NO: 1777887
uaaagagccaaaugucaca

SEQ ID NO: 1777889 - RNA, 19 nt, Artificial Sequence
  Description of Artificial Sequence: Synthetic oligonucleotide
  Sense strand starting at position 3762 of SEQ ID NO: 1562857
cugagacgcccuugagagu

SEQ ID NO: 1777890 - RNA, 19 nt, Artificial Sequence
  Description of Artificial Sequence: Synthetic oligonucleotide
  Antisense strand to SEQ ID NO: 1777889
acucucaagggcgucucag

SEQ ID NO: 1777891 - RNA, 19 nt, Artificial Sequence
  Description of Artificial Sequence: Synthetic oligonucleotide
  Sense strand starting at position 3771 of SEQ ID NO: 1562857
ccuugagaguuuguagacu

SEQ ID NO: 1777892 - RNA, 19 nt, Artificial Sequence
  Description of Artificial Sequence: Synthetic oligonucleotide
  Antisense strand to SEQ ID NO: 1777891
agucuacaaacucucaagg

SEQ ID NO: 1777893 - RNA, 19 nt, Artificial Sequence
  Description of Artificial Sequence: Synthetic oligonucleotide
  Sense strand starting at position 3813 of SEQ ID NO: 1562857
ccaggcaguuaucucaaca

SEQ ID NO: 1777894 - RNA, 19 nt, Artificial Sequence
  Description of Artificial Sequence: Synthetic oligonucleotide
  Antisense strand to SEQ ID NO: 1777893
uguugagauaacugccugg

SEQ ID NO: 1777895 - RNA, 19 nt, Artificial Sequence
  Description of Artificial Sequence: Synthetic oligonucleotide
  Sense strand starting at position 3902 of SEQ ID NO: 1562857
aggaaagaccucugccagu

SEQ ID NO: 1777896 - RNA, 19 nt, Artificial Sequence
  Description of Artificial Sequence: Synthetic oligonucleotide
  Antisense strand to SEQ ID NO: 1777895
acuggcagaggucuuuccu

SEQ ID NO: 1777897 - RNA, 19 nt, Artificial Sequence
  Description of Artificial Sequence: Synthetic oligonucleotide
  Sense strand starting at position 3971 of SEQ ID NO: 1562857
cccucagagcugggaaauu

SEQ ID NO: 1777898 - RNA, 19 nt, Artificial Sequence
  Description of Artificial Sequence: Synthetic oligonucleotide
  Antisense strand to SEQ ID NO: 1777897
aauuucccagcucugaggg

SEQ ID NO: 1777899 - RNA, 19 nt, Artificial Sequence
  Description of Artificial Sequence: Synthetic oligonucleotide
  Sense strand starting at position 626 of SEQ ID NO: 1562858
gcuggaagcugaucuuauc

SEQ ID NO: 1777900 - RNA, 19 nt, Artificial Sequence
  Description of Artificial Sequence: Synthetic oligonucleotide
  Antisense strand to SEQ ID NO: 1777899
gauaagaucagcuuccagc

SEQ ID NO: 1777901 - RNA, 19 nt, Artificial Sequence
  Description of Artificial Sequence: Synthetic oligonucleotide
  Sense strand starting at position 703 of SEQ ID NO: 1562858
uucucuagucuacaaaguu

SEQ ID NO: 1777902 - RNA, 19 nt, Artificial Sequence
  Description of Artificial Sequence: Synthetic oligonucleotide
  Antisense strand to SEQ ID NO: 1777901
aacuuuguagacuagagaa

SEQ ID NO: 1777903 - RNA, 19 nt, Artificial Sequence
  Description of Artificial Sequence: Synthetic oligonucleotide
  Sense strand starting at position 729 of SEQ ID NO: 1562858
uuuacuaugugguccugua

SEQ ID NO: 1777904 - RNA, 19 nt, Artificial Sequence
  Description of Artificial Sequence: Synthetic oligonucleotide
  Antisense strand to SEQ ID NO: 1777903
uacaggaccacauaguaaa

SEQ ID NO: 1777905 - RNA, 19 nt, Artificial Sequence
  Description of Artificial Sequence: Synthetic oligonucleotide
  Sense strand starting at position 890 of SEQ ID NO: 1562858
acuagauaaauggguuugu

SEQ ID NO: 1777906 - RNA, 19 nt, Artificial Sequence
  Description of Artificial Sequence: Synthetic oligonucleotide
  Antisense strand to SEQ ID NO: 1777905
acaaacccauuuaucuagu

SEQ ID NO: 1777907 - RNA, 19 nt, Artificial Sequence
  Description of Artificial Sequence: Synthetic oligonucleotide
  Sense strand starting at position 891 of SEQ ID NO: 1562858
cuagauaaauggguuuguu

SEQ ID NO: 1777908 - RNA, 19 nt, Artificial Sequence
  Description of Artificial Sequence: Synthetic oligonucleotide
  Antisense strand to SEQ ID NO: 1777907
aacaaacccauuuaucuag

SEQ ID NO: 1777909 - RNA, 19 nt, Artificial Sequence
  Description of Artificial Sequence: Synthetic oligonucleotide
  Sense strand starting at position 894 of SEQ ID NO: 1562858
gauaaauggguuuguucug

SEQ ID NO: 1777910 - RNA, 19 nt, Artificial Sequence
  Description of Artificial Sequence: Synthetic oligonucleotide
  Antisense strand to SEQ ID NO: 1777909
cagaacaaacccauuuauc

SEQ ID NO: 1777911 - RNA, 19 nt, Artificial Sequence
  Description of Artificial Sequence: Synthetic oligonucleotide
  Sense strand starting at position 906 of SEQ ID NO: 1562858
uguucugaggauuaaaugu

SEQ ID NO: 1777912 - RNA, 19 nt, Artificial Sequence
  Description of Artificial Sequence: Synthetic oligonucleotide
  Antisense strand to SEQ ID NO: 1777911
acauuuaauccucagaaca

SEQ ID NO: 1777913 - RNA, 19 nt, Artificial Sequence
  Description of Artificial Sequence: Synthetic oligonucleotide
  Sense strand starting at position 913 of SEQ ID NO: 1562858
aggauuaaaugugcaaaug

SEQ ID NO: 1777914 - RNA, 19 nt, Artificial Sequence
  Description of Artificial Sequence: Synthetic oligonucleotide
  Antisense strand to SEQ ID NO: 1777913
cauuugcacauuuaauccu

SEQ ID NO: 1777915 - RNA, 19 nt, Artificial Sequence
  Description of Artificial Sequence: Synthetic oligonucleotide
  Sense strand starting at position 914 of SEQ ID NO: 1562858
ggauuaaaugugcaaaugu

SEQ ID NO: 1777916 - RNA, 19 nt, Artificial Sequence
  Description of Artificial Sequence: Synthetic oligonucleotide
  Antisense strand to SEQ ID NO: 1777915
acauuugcacauuuaaucc

SEQ ID NO: 1777917 - RNA, 19 nt, Artificial Sequence
  Description of Artificial Sequence: Synthetic oligonucleotide
  Sense strand starting at position 922 of SEQ ID NO: 1562858
ugugcaaaugucuagcacu

SEQ ID NO: 1777918 - RNA, 19 nt, Artificial Sequence
  Description of Artificial Sequence: Synthetic oligonucleotide
  Antisense strand to SEQ ID NO: 1777917
agugcuagacauuugcaca

SEQ ID NO: 1777919 - RNA, 19 nt, Artificial Sequence
  Description of Artificial Sequence: Synthetic oligonucleotide
  Sense strand starting at position 970 of SEQ ID NO: 1562858
aucaucauguuggaaacua

SEQ ID NO: 1777920 - RNA, 19 nt, Artificial Sequence
  Description of Artificial Sequence: Synthetic oligonucleotide
  Antisense strand to SEQ ID NO: 1777919
uaguuuccaacaugaugau

SEQ ID NO: 1777921 - RNA, 19 nt, Artificial Sequence
  Description of Artificial Sequence: Synthetic oligonucleotide
  Sense strand starting at position 986 of SEQ ID NO: 1562858
cuauguggaaaguaaguau

SEQ ID NO: 1777922 - RNA, 19 nt, Artificial Sequence
  Description of Artificial Sequence: Synthetic oligonucleotide
  Antisense strand to SEQ ID NO: 1777921
auacuuacuuuccacauag

SEQ ID NO: 1777923 - RNA, 19 nt, Artificial Sequence
  Description of Artificial Sequence: Synthetic oligonucleotide
  Sense strand starting at position 997 of SEQ ID NO: 1562858
guaaguaugagauguuaua

SEQ ID NO: 1777924 - RNA, 19 nt, Artificial Sequence
  Description of Artificial Sequence: Synthetic oligonucleotide
  Antisense strand to SEQ ID NO: 1777923
uauaacaucucauacuuac

SEQ ID NO: 1777925 - RNA, 19 nt, Artificial Sequence
  Description of Artificial Sequence: Synthetic oligonucleotide
  Sense strand starting at position 1102 of SEQ ID NO: 1562858
cuucuaauaccuggguaca

SEQ ID NO: 1777926 - RNA, 19 nt, Artificial Sequence
  Description of Artificial Sequence: Synthetic oligonucleotide
  Antisense strand to SEQ ID NO: 1777925
uguacccagguauuagaag

SEQ ID NO: 1777927 - RNA, 19 nt, Artificial Sequence
  Description of Artificial Sequence: Synthetic oligonucleotide
  Sense strand starting at position 1103 of SEQ ID NO: 1562858
uucuaauaccuggguacau

SEQ ID NO: 1777928 - RNA, 19 nt, Artificial Sequence
  Description of Artificial Sequence: Synthetic oligonucleotide
  Antisense strand to SEQ ID NO: 1777927
auguacccagguauuagaa

SEQ ID NO: 1777929 - RNA, 19 nt, Artificial Sequence
  Description of Artificial Sequence: Synthetic oligonucleotide
  Sense strand starting at position 1104 of SEQ ID NO: 1562858
ucuaauaccuggguacaua

SEQ ID NO: 1777930 - RNA, 19 nt, Artificial Sequence
  Description of Artificial Sequence: Synthetic oligonucleotide
  Antisense strand to SEQ ID NO: 1777929
uauguacccagguauuaga

SEQ ID NO: 1777931 - RNA, 19 nt, Artificial Sequence
  Description of Artificial Sequence: Synthetic oligonucleotide
  Sense strand starting at position 1365 of SEQ ID NO: 1562858
cccauaagaugauauaaag

SEQ ID NO: 1777932 - RNA, 19 nt, Artificial Sequence
  Description of Artificial Sequence: Synthetic oligonucleotide
  Antisense strand to SEQ ID NO: 1777931
cuuuauaucaucuuauggg

SEQ ID NO: 1777933 - RNA, 19 nt, Artificial Sequence
  Description of Artificial Sequence: Synthetic oligonucleotide
  Sense strand starting at position 2438 of SEQ ID NO: 1562858
cgaauauucuucuuuggca

SEQ ID NO: 1777934 - RNA, 19 nt, Artificial Sequence
  Description of Artificial Sequence: Synthetic oligonucleotide
  Antisense strand to SEQ ID NO: 1777933
ugccaaagaagaauauucg

SEQ ID NO: 1777935 - RNA, 19 nt, Artificial Sequence
  Description of Artificial Sequence: Synthetic oligonucleotide
  Sense strand starting at position 2450 of SEQ ID NO: 1562858
uuuggcaguuaaucacaua

SEQ ID NO: 1777936 - RNA, 19 nt, Artificial Sequence
  Description of Artificial Sequence: Synthetic oligonucleotide
  Antisense strand to SEQ ID NO: 1777935
uaugugauuaacugccaaa

SEQ ID NO: 1777937 - RNA, 19 nt, Artificial Sequence
  Description of Artificial Sequence: Synthetic oligonucleotide
  Sense strand starting at position 2896 of SEQ ID NO: 1562858
gguuauaccuaccucguga

SEQ ID NO: 1777938 - RNA, 19 nt, Artificial Sequence
  Description of Artificial Sequence: Synthetic oligonucleotide
  Antisense strand to SEQ ID NO: 1777937
ucacgagguagguauaacc

SEQ ID NO: 1777939 - RNA, 19 nt, Artificial Sequence
  Description of Artificial Sequence: Synthetic oligonucleotide
  Sense strand starting at position 2964 of SEQ ID NO: 1562858
ccuggcauccuaugaaauu

SEQ ID NO: 1777940 - RNA, 19 nt, Artificial Sequence
  Description of Artificial Sequence: Synthetic oligonucleotide
  Antisense strand to SEQ ID NO: 1777939
aauuucauaggaugccagg

SEQ ID NO: 1777941 - RNA, 19 nt, Artificial Sequence
  Description of Artificial Sequence: Synthetic oligonucleotide
  Sense strand starting at position 2973 of SEQ ID NO: 1562858
cuaugaaauugcugaauuu

SEQ ID NO: 1777942 - RNA, 19 nt, Artificial Sequence
  Description of Artificial Sequence: Synthetic oligonucleotide
  Antisense strand to SEQ ID NO: 1777941
aaauucagcaauuucauag

SEQ ID NO: 1777943 - RNA, 19 nt, Artificial Sequence
  Description of Artificial Sequence: Synthetic oligonucleotide
  Sense strand starting at position 3062 of SEQ ID NO: 1562858
uuuauuuagugucaucaag

SEQ ID NO: 1777944 - RNA, 19 nt, Artificial Sequence
  Description of Artificial Sequence: Synthetic oligonucleotide
  Antisense strand to SEQ ID NO: 1777943
cuugaugacacuaaauaaa

SEQ ID NO: 1777945 - RNA, 19 nt, Artificial Sequence
  Description of Artificial Sequence: Synthetic oligonucleotide
  Sense strand starting at position 3069 of SEQ ID NO: 1562858
agugucaucaaggguucua

SEQ ID NO: 1777946 - RNA, 19 nt, Artificial Sequence
  Description of Artificial Sequence: Synthetic oligonucleotide
  Antisense strand to SEQ ID NO: 1777945
uagaacccuugaugacacu

SEQ ID NO: 1777947 - RNA, 19 nt, Artificial Sequence
  Description of Artificial Sequence: Synthetic oligonucleotide
  Sense strand starting at position 3078 of SEQ ID NO: 1562858
aaggguucuaacgggugua

SEQ ID NO: 1777948 - RNA, 19 nt, Artificial Sequence
  Description of Artificial Sequence: Synthetic oligonucleotide
  Antisense strand to SEQ ID NO: 1777947
uacacccguuagaacccuu

SEQ ID NO: 1777949 - RNA, 19 nt, Artificial Sequence
  Description of Artificial Sequence: Synthetic oligonucleotide
  Sense strand starting at position 3111 of SEQ ID NO: 1562858
accuuucuguacuuagaua

SEQ ID NO: 1777950 - RNA, 19 nt, Artificial Sequence
  Description of Artificial Sequence: Synthetic oligonucleotide
  Antisense strand to SEQ ID NO: 1777949
uaucuaaguacagaaaggu

SEQ ID NO: 1777951 - RNA, 19 nt, Artificial Sequence
  Description of Artificial Sequence: Synthetic oligonucleotide
  Sense strand starting at position 3149 of SEQ ID NO: 1562858
agcucuuaguagucaaaua

SEQ ID NO: 1777952 - RNA, 19 nt, Artificial Sequence
  Description of Artificial Sequence: Synthetic oligonucleotide
  Antisense strand to SEQ ID NO: 1777951
uauuugacuacuaagagcu

SEQ ID NO: 1777953 - RNA, 19 nt, Artificial Sequence
  Description of Artificial Sequence: Synthetic oligonucleotide
  Sense strand starting at position 3168 of SEQ ID NO: 1562858
gggacaauuuacuguguuu

SEQ ID NO: 1777954 - RNA, 19 nt, Artificial Sequence
  Description of Artificial Sequence: Synthetic oligonucleotide
  Antisense strand to SEQ ID NO: 1777953
aaacacaguaaauuguccc

SEQ ID NO: 1777955 - RNA, 19 nt, Artificial Sequence
  Description of Artificial Sequence: Synthetic oligonucleotide
  Sense strand starting at position 3560 of SEQ ID NO: 1562858
aggugaagauacugagaga

SEQ ID NO: 1777956 - RNA, 19 nt, Artificial Sequence
  Description of Artificial Sequence: Synthetic oligonucleotide
  Antisense strand to SEQ ID NO: 1777955
ucucucaguaucuucaccu

SEQ ID NO: 1777957 - RNA, 19 nt, Artificial Sequence
  Description of Artificial Sequence: Synthetic oligonucleotide
  Sense strand starting at position 3563 of SEQ ID NO: 1562858
ugaagauacugagagauau

SEQ ID NO: 1777958 - RNA, 19 nt, Artificial Sequence
  Description of Artificial Sequence: Synthetic oligonucleotide
  Antisense strand to SEQ ID NO: 1777957
auaucucucaguaucuuca

SEQ ID NO: 1777959 - RNA, 19 nt, Artificial Sequence
  Description of Artificial Sequence: Synthetic oligonucleotide
  Sense strand starting at position 3586 of SEQ ID NO: 1562858
gagccacucgcugacuaua

SEQ ID NO: 1777960 - RNA, 19 nt, Artificial Sequence
  Description of Artificial Sequence: Synthetic oligonucleotide
  Antisense strand to SEQ ID NO: 1777959
uauagucagcgaguggcuc

SEQ ID NO: 1777961 - RNA, 19 nt, Artificial Sequence
  Description of Artificial Sequence: Synthetic oligonucleotide
  Sense strand starting at position 3588 of SEQ ID NO: 1562858
gccacucgcugacuauaau

SEQ ID NO: 1777962 - RNA, 19 nt, Artificial Sequence
  Description of Artificial Sequence: Synthetic oligonucleotide
  Antisense strand to SEQ ID NO: 1777961
auuauagucagcgaguggc

SEQ ID NO: 1777963 - RNA, 19 nt, Artificial Sequence
  Description of Artificial Sequence: Synthetic oligonucleotide
  Sense strand starting at position 3709 of SEQ ID NO: 1562858
agccucaggaaaugugaau

SEQ ID NO: 1777964 - RNA, 19 nt, Artificial Sequence
  Description of Artificial Sequence: Synthetic oligonucleotide
  Antisense strand to SEQ ID NO: 1777963
auucacauuuccugaggcu

SEQ ID NO: 1777965 - RNA, 19 nt, Artificial Sequence
  Description of Artificial Sequence: Synthetic oligonucleotide
  Sense strand starting at position 3726 of SEQ ID NO: 1562858
auuacaguuccggaguacu

SEQ ID NO: 1777966 - RNA, 19 nt, Artificial Sequence
  Description of Artificial Sequence: Synthetic oligonucleotide
  Antisense strand to SEQ ID NO: 1777965
aguacuccggaacuguaau

SEQ ID NO: 1777967 - RNA, 19 nt, Artificial Sequence
  Description of Artificial Sequence: Synthetic oligonucleotide
  Sense strand starting at position 3736 of SEQ ID NO: 1562858
cggaguacucagcagacau

SEQ ID NO: 1777968 - RNA, 19 nt, Artificial Sequence
  Description of Artificial Sequence: Synthetic oligonucleotide
  Antisense strand to SEQ ID NO: 1777967
augucugcugaguacuccg

SEQ ID NO: 1777969 - RNA, 19 nt, Artificial Sequence
  Description of Artificial Sequence: Synthetic oligonucleotide
  Sense strand starting at position 3748 of SEQ ID NO: 1562858
cagacauuguugcuguaac

SEQ ID NO: 1777970 - RNA, 19 nt, Artificial Sequence
  Description of Artificial Sequence: Synthetic oligonucleotide
  Antisense strand to SEQ ID NO: 1777969
guuacagcaacaaugucug

SEQ ID NO: 1777971 - RNA, 19 nt, Artificial Sequence
  Description of Artificial Sequence: Synthetic oligonucleotide
  Sense strand starting at position 3759 of SEQ ID NO: 1562858
gcuguaacgguauauuaau

SEQ ID NO: 1777972 - RNA, 19 nt, Artificial Sequence
  Description of Artificial Sequence: Synthetic oligonucleotide
  Antisense strand to SEQ ID NO: 1777971
auuaauauaccguuacagc

SEQ ID NO: 1777973 - RNA, 19 nt, Artificial Sequence
  Description of Artificial Sequence: Synthetic oligonucleotide
  Sense strand starting at position 3766 of SEQ ID NO: 1562858
cgguauauuaauggaauaa

SEQ ID NO: 1777974 - RNA, 19 nt, Artificial Sequence
  Description of Artificial Sequence: Synthetic oligonucleotide
  Antisense strand to SEQ ID NO: 1777973
uuauuccauuaauauaccg

SEQ ID NO: 1777975 - RNA, 19 nt, Artificial Sequence
  Description of Artificial Sequence: Synthetic oligonucleotide
  Sense strand starting at position 3786 of SEQ ID NO: 1562858
ucuaguucuucugcacgga

SEQ ID NO: 1777976 - RNA, 19 nt, Artificial Sequence
  Description of Artificial Sequence: Synthetic oligonucleotide
  Antisense strand to SEQ ID NO: 1777975
uccgugcagaagaacuaga

SEQ ID NO: 1777977 - RNA, 19 nt, Artificial Sequence
  Description of Artificial Sequence: Synthetic oligonucleotide
  Sense strand starting at position 3923 of SEQ ID NO: 1562858
cugauugcucagggcagua

SEQ ID NO: 1777978 - RNA, 19 nt, Artificial Sequence
  Description of Artificial Sequence: Synthetic oligonucleotide
  Antisense strand to SEQ ID NO: 1777977
uacugcccugagcaaucag

SEQ ID NO: 1777979 - RNA, 19 nt, Artificial Sequence
  Description of Artificial Sequence: Synthetic oligonucleotide
  Sense strand starting at position 272 of SEQ ID NO: 1562859
uuauguaauguuuguugca

SEQ ID NO: 1777980 - RNA, 19 nt, Artificial Sequence
  Description of Artificial Sequence: Synthetic oligonucleotide
  Antisense strand to SEQ ID NO: 1777979
ugcaacaaacauuacauaa

SEQ ID NO: 1777981 - RNA, 19 nt, Artificial Sequence
  Description of Artificial Sequence: Synthetic oligonucleotide
  Sense strand starting at position 273 of SEQ ID NO: 1562859
uauguaauguuuguugcaa

SEQ ID NO: 1777982 - RNA, 19 nt, Artificial Sequence
  Description of Artificial Sequence: Synthetic oligonucleotide
  Antisense strand to SEQ ID NO: 1777981
uugcaacaaacauuacaua

SEQ ID NO: 1777983 - RNA, 19 nt, Artificial Sequence
  Description of Artificial Sequence: Synthetic oligonucleotide
  Sense strand starting at position 274 of SEQ ID NO: 1562859
auguaauguuuguugcaau

SEQ ID NO: 1777984 - RNA, 19 nt, Artificial Sequence
  Description of Artificial Sequence: Synthetic oligonucleotide
  Antisense strand to SEQ ID NO: 1777983
auugcaacaaacauuacau

SEQ ID NO: 1777985 - RNA, 19 nt, Artificial Sequence
  Description of Artificial Sequence: Synthetic oligonucleotide
  Sense strand starting at position 329 of SEQ ID NO: 1562859
uauaguugagacuguuaca

SEQ ID NO: 1777986 - RNA, 19 nt, Artificial Sequence
  Description of Artificial Sequence: Synthetic oligonucleotide
  Antisense strand to SEQ ID NO: 1777985
uguaacagucucaacuaua

SEQ ID NO: 1777987 - RNA, 19 nt, Artificial Sequence
  Description of Artificial Sequence: Synthetic oligonucleotide
  Sense strand starting at position 379 of SEQ ID NO: 1562859
accucuuacugcucgguua

SEQ ID NO: 1777988 - RNA, 19 nt, Artificial Sequence
  Description of Artificial Sequence: Synthetic oligonucleotide
  Antisense strand to SEQ ID NO: 1777987
uaaccgagcaguaagaggu

SEQ ID NO: 1777989 - RNA, 19 nt, Artificial Sequence
  Description of Artificial Sequence: Synthetic oligonucleotide
  Sense strand starting at position 481 of SEQ ID NO: 1562859
gacuguaguugagacacau

SEQ ID NO: 1777990 - RNA, 19 nt, Artificial Sequence
  Description of Artificial Sequence: Synthetic oligonucleotide
  Antisense strand to SEQ ID NO: 1777989
augugucucaacuacaguc

SEQ ID NO: 1777991 - RNA, 19 nt, Artificial Sequence
  Description of Artificial Sequence: Synthetic oligonucleotide
  Sense strand starting at position 566 of SEQ ID NO: 1562859
aggcgugcacaggauuaaa

SEQ ID NO: 1777992 - RNA, 19 nt, Artificial Sequence
  Description of Artificial Sequence: Synthetic oligonucleotide
  Antisense strand to SEQ ID NO: 1777991
uuuaauccugugcacgccu

SEQ ID NO: 1777993 - RNA, 19 nt, Artificial Sequence
  Description of Artificial Sequence: Synthetic oligonucleotide
  Sense strand starting at position 652 of SEQ ID NO: 1562859
caggguaaguuuccgguga

SEQ ID NO: 1777994 - RNA, 19 nt, Artificial Sequence
  Description of Artificial Sequence: Synthetic oligonucleotide
  Antisense strand to SEQ ID NO: 1777993
ucaccggaaacuuacccug

SEQ ID NO: 1777995 - RNA, 19 nt, Artificial Sequence
  Description of Artificial Sequence: Synthetic oligonucleotide
  Sense strand starting at position 656 of SEQ ID NO: 1562859
guaaguuuccggugaagaa

SEQ ID NO: 1777996 - RNA, 19 nt, Artificial Sequence
  Description of Artificial Sequence: Synthetic oligonucleotide
  Antisense strand to SEQ ID NO: 1777995
uucuucaccggaaacuuac

SEQ ID NO: 1777997 - RNA, 19 nt, Artificial Sequence
  Description of Artificial Sequence: Synthetic oligonucleotide
  Sense strand starting at position 657 of SEQ ID NO: 1562859
uaaguuuccggugaagaac

SEQ ID NO: 1777998 - RNA, 19 nt, Artificial Sequence
  Description of Artificial Sequence: Synthetic oligonucleotide
  Antisense strand to SEQ ID NO: 1777997
guucuucaccggaaacuua

SEQ ID NO: 1777999 - RNA, 19 nt, Artificial Sequence
  Description of Artificial Sequence: Synthetic oligonucleotide
  Sense strand starting at position 690 of SEQ ID NO: 1562859
agaggauccucugagccua

SEQ ID NO: 1778000 - RNA, 19 nt, Artificial Sequence
  Description of Artificial Sequence: Synthetic oligonucleotide
  Antisense strand to SEQ ID NO: 1777999
uaggcucagaggauccucu

SEQ ID NO: 1778001 - RNA, 19 nt, Artificial Sequence
  Description of Artificial Sequence: Synthetic oligonucleotide
  Sense strand starting at position 771 of SEQ ID NO: 1562859
cggcuaggucuugagcaaa

SEQ ID NO: 1778002 - RNA, 19 nt, Artificial Sequence
  Description of Artificial Sequence: Synthetic oligonucleotide
  Antisense strand to SEQ ID NO: 1778001
uuugcucaagaccuagccg

SEQ ID NO: 1778003 - RNA, 19 nt, Artificial Sequence
  Description of Artificial Sequence: Synthetic oligonucleotide
  Sense strand starting at position 774 of SEQ ID NO: 1562859
cuaggucuugagcaaacga

SEQ ID NO: 1778004 - RNA, 19 nt, Artificial Sequence
  Description of Artificial Sequence: Synthetic oligonucleotide
  Antisense strand to SEQ ID NO: 1778003
ucguuugcucaagaccuag

SEQ ID NO: 1778005 - RNA, 19 nt, Artificial Sequence
  Description of Artificial Sequence: Synthetic oligonucleotide
  Sense strand starting at position 908 of SEQ ID NO: 1562859
aagccuaauuuguggucau

SEQ ID NO: 1778006 - RNA, 19 nt, Artificial Sequence
  Description of Artificial Sequence: Synthetic oligonucleotide
  Antisense strand to SEQ ID NO: 1778005
augaccacaaauuaggcuu

SEQ ID NO: 1778007 - RNA, 19 nt, Artificial Sequence
  Description of Artificial Sequence: Synthetic oligonucleotide
  Sense strand starting at position 1072 of SEQ ID NO: 1562859
cagagagaaucuggcagaa

SEQ ID NO: 1778008 - RNA, 19 nt, Artificial Sequence
  Description of Artificial Sequence: Synthetic oligonucleotide
  Antisense strand to SEQ ID NO: 1778007
uucugccagauucucucug

SEQ ID NO: 1778009 - RNA, 19 nt, Artificial Sequence
  Description of Artificial Sequence: Synthetic oligonucleotide
  Sense strand starting at position 1074 of SEQ ID NO: 1562859
gagagaaucuggcagaauu

SEQ ID NO: 1778010 - RNA, 19 nt, Artificial Sequence
  Description of Artificial Sequence: Synthetic oligonucleotide
  Antisense strand to SEQ ID NO: 1778009
aauucugccagauucucuc

SEQ ID NO: 1778011 - RNA, 19 nt, Artificial Sequence
  Description of Artificial Sequence: Synthetic oligonucleotide
  Sense strand starting at position 1316 of SEQ ID NO: 1562859
gacccuuucuggugacuga

SEQ ID NO: 1778012 - RNA, 19 nt, Artificial Sequence
  Description of Artificial Sequence: Synthetic oligonucleotide
  Antisense strand to SEQ ID NO: 1778011
ucagucaccagaaaggguc

SEQ ID NO: 1778013 - RNA, 19 nt, Artificial Sequence
  Description of Artificial Sequence: Synthetic oligonucleotide
  Sense strand starting at position 1701 of SEQ ID NO: 1562859
cugugaagucugcagcguu

SEQ ID NO: 1778014 - RNA, 19 nt, Artificial Sequence
  Description of Artificial Sequence: Synthetic oligonucleotide
  Antisense strand to SEQ ID NO: 1778013
aacgcugcagacuucacag

SEQ ID NO: 1778015 - RNA, 19 nt, Artificial Sequence
  Description of Artificial Sequence: Synthetic oligonucleotide
  Sense strand starting at position 1704 of SEQ ID NO: 1562859
ugaagucugcagcguucaa

SEQ ID NO: 1778016 - RNA, 19 nt, Artificial Sequence
  Description of Artificial Sequence: Synthetic oligonucleotide
  Antisense strand to SEQ ID NO: 1778015
uugaacgcugcagacuuca

SEQ ID NO: 1778017 - RNA, 19 nt, Artificial Sequence
  Description of Artificial Sequence: Synthetic oligonucleotide
  Sense strand starting at position 1744 of SEQ ID NO: 1562859
gagacaggucccugggaau

SEQ ID NO: 1778018 - RNA, 19 nt, Artificial Sequence
  Description of Artificial Sequence: Synthetic oligonucleotide
  Antisense strand to SEQ ID NO: 1778017
auucccagggaccugucuc

SEQ ID NO: 1778019 - RNA, 19 nt, Artificial Sequence
  Description of Artificial Sequence: Synthetic oligonucleotide
  Sense strand starting at position 1794 of SEQ ID NO: 1562859
gauguucuggagcgagaga

SEQ ID NO: 1778020 - RNA, 19 nt, Artificial Sequence
  Description of Artificial Sequence: Synthetic oligonucleotide
  Antisense strand to SEQ ID NO: 1778019
ucucucgcuccagaacauc

SEQ ID NO: 1778021 - RNA, 19 nt, Artificial Sequence
  Description of Artificial Sequence: Synthetic oligonucleotide
  Sense strand starting at position 2266 of SEQ ID NO: 1562859
gguaacugugcagagggau

SEQ ID NO: 1778022 - RNA, 19 nt, Artificial Sequence
  Description of Artificial Sequence: Synthetic oligonucleotide
  Antisense strand to SEQ ID NO: 1778021
aucccucugcacaguuacc

SEQ ID NO: 1778023 - RNA, 19 nt, Artificial Sequence
  Description of Artificial Sequence: Synthetic oligonucleotide
  Sense strand starting at position 2404 of SEQ ID NO: 1562859
uaauguguuuaccaaaggu

SEQ ID NO: 1778024 - RNA, 19 nt, Artificial Sequence
  Description of Artificial Sequence: Synthetic oligonucleotide
  Antisense strand to SEQ ID NO: 1778023
accuuugguaaacacauua

SEQ ID NO: 1778025 - RNA, 19 nt, Artificial Sequence
  Description of Artificial Sequence: Synthetic oligonucleotide
  Sense strand starting at position 2408 of SEQ ID NO: 1562859
guguuuaccaaagguaggu

SEQ ID NO: 1778026 - RNA, 19 nt, Artificial Sequence
  Description of Artificial Sequence: Synthetic oligonucleotide
  Antisense strand to SEQ ID NO: 1778025
accuaccuuugguaaacac

SEQ ID NO: 1778027 - RNA, 19 nt, Artificial Sequence
  Description of Artificial Sequence: Synthetic oligonucleotide
  Sense strand starting at position 2971 of SEQ ID NO: 1562859
ccagauaaaugugaugauc

SEQ ID NO: 1778028 - RNA, 19 nt, Artificial Sequence
  Description of Artificial Sequence: Synthetic oligonucleotide
  Antisense strand to SEQ ID NO: 1778027
gaucaucacauuuaucugg

SEQ ID NO: 1778029 - RNA, 19 nt, Artificial Sequence
  Description of Artificial Sequence: Synthetic oligonucleotide
  Sense strand starting at position 3066 of SEQ ID NO: 1562859
gggcauuugaacugccagu

SEQ ID NO: 1778030 - RNA, 19 nt, Artificial Sequence
  Description of Artificial Sequence: Synthetic oligonucleotide
  Antisense strand to SEQ ID NO: 1778029
acuggcaguucaaaugccc

SEQ ID NO: 1778031 - RNA, 19 nt, Artificial Sequence
  Description of Artificial Sequence: Synthetic oligonucleotide
  Sense strand starting at position 3073 of SEQ ID NO: 1562859
ugaacugccagugguauga

SEQ ID NO: 1778032 - RNA, 19 nt, Artificial Sequence
  Description of Artificial Sequence: Synthetic oligonucleotide
  Antisense strand to SEQ ID NO: 1778031
ucauaccacuggcaguuca

SEQ ID NO: 1778033 - RNA, 19 nt, Artificial Sequence
  Description of Artificial Sequence: Synthetic oligonucleotide
  Sense strand starting at position 3155 of SEQ ID NO: 1562859
acggcaucaugagauccau

SEQ ID NO: 1778034 - RNA, 19 nt, Artificial Sequence
  Description of Artificial Sequence: Synthetic oligonucleotide
  Antisense strand to SEQ ID NO: 1778033
auggaucucaugaugccgu

SEQ ID NO: 1778035 - RNA, 19 nt, Artificial Sequence
  Description of Artificial Sequence: Synthetic oligonucleotide
  Sense strand starting at position 3354 of SEQ ID NO: 1562859
cccaguguuauugacuguu

SEQ ID NO: 1778036 - RNA, 19 nt, Artificial Sequence
  Description of Artificial Sequence: Synthetic oligonucleotide
  Antisense strand to SEQ ID NO: 1778035
aacagucaauaacacuggg

SEQ ID NO: 1778037 - RNA, 19 nt, Artificial Sequence
  Description of Artificial Sequence: Synthetic oligonucleotide
  Sense strand starting at position 3356 of SEQ ID NO: 1562859
caguguuauugacuguuga

SEQ ID NO: 1778038 - RNA, 19 nt, Artificial Sequence
  Description of Artificial Sequence: Synthetic oligonucleotide
  Antisense strand to SEQ ID NO: 1778037
ucaacagucaauaacacug

SEQ ID NO: 1778039 - RNA, 19 nt, Artificial Sequence
  Description of Artificial Sequence: Synthetic oligonucleotide
  Sense strand starting at position 3357 of SEQ ID NO: 1562859
aguguuauugacuguugau

SEQ ID NO: 1778040 - RNA, 19 nt, Artificial Sequence
  Description of Artificial Sequence: Synthetic oligonucleotide
  Antisense strand to SEQ ID NO: 1778039
aucaacagucaauaacacu

SEQ ID NO: 1778041 - RNA, 19 nt, Artificial Sequence
  Description of Artificial Sequence: Synthetic oligonucleotide
  Sense strand starting at position 3370 of SEQ ID NO: 1562859
guugauccaucacagugau

SEQ ID NO: 1778042 - RNA, 19 nt, Artificial Sequence
  Description of Artificial Sequence: Synthetic oligonucleotide
  Antisense strand to SEQ ID NO: 1778041
aucacugugauggaucaac

SEQ ID NO: 1778043 - RNA, 19 nt, Artificial Sequence
  Description of Artificial Sequence: Synthetic oligonucleotide
  Sense strand starting at position 3383 of SEQ ID NO: 1562859
agugauacaugcucacaua

SEQ ID NO: 1778044 - RNA, 19 nt, Artificial Sequence
  Description of Artificial Sequence: Synthetic oligonucleotide
  Antisense strand to SEQ ID NO: 1778043
uaugugagcauguaucacu

SEQ ID NO: 1778045 - RNA, 19 nt, Artificial Sequence
  Description of Artificial Sequence: Synthetic oligonucleotide
  Sense strand starting at position 3384 of SEQ ID NO: 1562859
gugauacaugcucacauau

SEQ ID NO: 1778046 - RNA, 19 nt, Artificial Sequence
  Description of Artificial Sequence: Synthetic oligonucleotide
  Antisense strand to SEQ ID NO: 1778045
auaugugagcauguaucac

SEQ ID NO: 1778047 - RNA, 19 nt, Artificial Sequence
  Description of Artificial Sequence: Synthetic oligonucleotide
  Sense strand starting at position 3451 of SEQ ID NO: 1562859
ggaguagcagguugucuaa

SEQ ID NO: 1778048 - RNA, 19 nt, Artificial Sequence
  Description of Artificial Sequence: Synthetic oligonucleotide
  Antisense strand to SEQ ID NO: 1778047
uuagacaaccugcuacucc

SEQ ID NO: 1778049 - RNA, 19 nt, Artificial Sequence
  Description of Artificial Sequence: Synthetic oligonucleotide
  Sense strand starting at position 3473 of SEQ ID NO: 1562859
ccuugaugccauggugaua

SEQ ID NO: 1778050 - RNA, 19 nt, Artificial Sequence
  Description of Artificial Sequence: Synthetic oligonucleotide
  Antisense strand to SEQ ID NO: 1778049
uaucaccauggcaucaagg

SEQ ID NO: 1778051 - RNA, 19 nt, Artificial Sequence
  Description of Artificial Sequence: Synthetic oligonucleotide
  Sense strand starting at position 3485 of SEQ ID NO: 1562859
ggugauagaccucguguca

SEQ ID NO: 1778052 - RNA, 19 nt, Artificial Sequence
  Description of Artificial Sequence: Synthetic oligonucleotide
  Antisense strand to SEQ ID NO: 1778051
ugacacgaggucuaucacc

SEQ ID NO: 1778053 - RNA, 19 nt, Artificial Sequence
  Description of Artificial Sequence: Synthetic oligonucleotide
  Sense strand starting at position 3498 of SEQ ID NO: 1562859
gugucaaugccucagggua

SEQ ID NO: 1778054 - RNA, 19 nt, Artificial Sequence
  Description of Artificial Sequence: Synthetic oligonucleotide
  Antisense strand to SEQ ID NO: 1778053
uacccugaggcauugacac

SEQ ID NO: 1778055 - RNA, 19 nt, Artificial Sequence
  Description of Artificial Sequence: Synthetic oligonucleotide
  Sense strand starting at position 3552 of SEQ ID NO: 1562859
cuacaagucucauuacgac

SEQ ID NO: 1778056 - RNA, 19 nt, Artificial Sequence
  Description of Artificial Sequence: Synthetic oligonucleotide
  Antisense strand to SEQ ID NO: 1778055
gucguaaugagacuuguag

SEQ ID NO: 1778057 - RNA, 19 nt, Artificial Sequence
  Description of Artificial Sequence: Synthetic oligonucleotide
  Sense strand starting at position 3858 of SEQ ID NO: 1562859
ggacggaugggugagcaua

SEQ ID NO: 1778058 - RNA, 19 nt, Artificial Sequence
  Description of Artificial Sequence: Synthetic oligonucleotide
  Antisense strand to SEQ ID NO: 1778057
uaugcucacccauccgucc

SEQ ID NO: 1778059 - RNA, 19 nt, Artificial Sequence
  Description of Artificial Sequence: Synthetic oligonucleotide
  Sense strand starting at position 731 of SEQ ID NO: 1562860
gcaugaucaguuugguuuc

SEQ ID NO: 1778060 - RNA, 19 nt, Artificial Sequence
  Description of Artificial Sequence: Synthetic oligonucleotide
  Antisense strand to SEQ ID NO: 1778059
gaaaccaaacugaucaugc

SEQ ID NO: 1778061 - RNA, 19 nt, Artificial Sequence
  Description of Artificial Sequence: Synthetic oligonucleotide
  Sense strand starting at position 793 of SEQ ID NO: 1562860
aacaaauacugcgugcuua

SEQ ID NO: 1778062 - RNA, 19 nt, Artificial Sequence
  Description of Artificial Sequence: Synthetic oligonucleotide
  Antisense strand to SEQ ID NO: 1778061
uaagcacgcaguauuuguu

SEQ ID NO: 1778063 - RNA, 19 nt, Artificial Sequence
  Description of Artificial Sequence: Synthetic oligonucleotide
  Sense strand starting at position 804 of SEQ ID NO: 1562860
cgugcuuacucuguaccaa

SEQ ID NO: 1778064 - RNA, 19 nt, Artificial Sequence
  Description of Artificial Sequence: Synthetic oligonucleotide
  Antisense strand to SEQ ID NO: 1778063
uugguacagaguaagcacg

SEQ ID NO: 1778065 - RNA, 19 nt, Artificial Sequence
  Description of Artificial Sequence: Synthetic oligonucleotide
  Sense strand starting at position 805 of SEQ ID NO: 1562860
gugcuuacucuguaccaag

SEQ ID NO: 1778066 - RNA, 19 nt, Artificial Sequence
  Description of Artificial Sequence: Synthetic oligonucleotide
  Antisense strand to SEQ ID NO: 1778065
cuugguacagaguaagcac

SEQ ID NO: 1778067 - RNA, 19 nt, Artificial Sequence
  Description of Artificial Sequence: Synthetic oligonucleotide
  Sense strand starting at position 823 of SEQ ID NO: 1562860
gcaucaggacuagauguuu

SEQ ID NO: 1778068 - RNA, 19 nt, Artificial Sequence
  Description of Artificial Sequence: Synthetic oligonucleotide
  Antisense strand to SEQ ID NO: 1778067
aaacaucuaguccugaugc

SEQ ID NO: 1778069 - RNA, 19 nt, Artificial Sequence
  Description of Artificial Sequence: Synthetic oligonucleotide
  Sense strand starting at position 828 of SEQ ID NO: 1562860
aggacuagauguuuaccau

SEQ ID NO: 1778070 - RNA, 19 nt, Artificial Sequence
  Description of Artificial Sequence: Synthetic oligonucleotide
  Antisense strand to SEQ ID NO: 1778069
augguaaacaucuaguccu

SEQ ID NO: 1778071 - RNA, 19 nt, Artificial Sequence
  Description of Artificial Sequence: Synthetic oligonucleotide
  Sense strand starting at position 834 of SEQ ID NO: 1562860
agauguuuaccaugcuuua

SEQ ID NO: 1778072 - RNA, 19 nt, Artificial Sequence
  Description of Artificial Sequence: Synthetic oligonucleotide
  Antisense strand to SEQ ID NO: 1778071
uaaagcaugguaaacaucu

SEQ ID NO: 1778073 - RNA, 19 nt, Artificial Sequence
  Description of Artificial Sequence: Synthetic oligonucleotide
  Sense strand starting at position 837 of SEQ ID NO: 1562860
uguuuaccaugcuuuauuu

SEQ ID NO: 1778074 - RNA, 19 nt, Artificial Sequence
  Description of Artificial Sequence: Synthetic oligonucleotide
  Antisense strand to SEQ ID NO: 1778073
aaauaaagcaugguaaaca

SEQ ID NO: 1778075 - RNA, 19 nt, Artificial Sequence
  Description of Artificial Sequence: Synthetic oligonucleotide
  Sense strand starting at position 964 of SEQ ID NO: 1562860
gcguuaaagcgagcacuga

SEQ ID NO: 1778076 - RNA, 19 nt, Artificial Sequence
  Description of Artificial Sequence: Synthetic oligonucleotide
  Antisense strand to SEQ ID NO: 1778075
ucagugcucgcuuuaacgc

SEQ ID NO: 1778077 - RNA, 19 nt, Artificial Sequence
  Description of Artificial Sequence: Synthetic oligonucleotide
  Sense strand starting at position 1075 of SEQ ID NO: 1562860
gcuccacuggaaggauuaa

SEQ ID NO: 1778078 - RNA, 19 nt, Artificial Sequence
  Description of Artificial Sequence: Synthetic oligonucleotide
  Antisense strand to SEQ ID NO: 1778077
uuaauccuuccaguggagc

SEQ ID NO: 1778079 - RNA, 19 nt, Artificial Sequence
  Description of Artificial Sequence: Synthetic oligonucleotide
  Sense strand starting at position 1102 of SEQ ID NO: 1562860
guuacagugcuuuacaaau

SEQ ID NO: 1778080 - RNA, 19 nt, Artificial Sequence
  Description of Artificial Sequence: Synthetic oligonucleotide
  Antisense strand to SEQ ID NO: 1778079
auuuguaaagcacuguaac

SEQ ID NO: 1778081 - RNA, 19 nt, Artificial Sequence
  Description of Artificial Sequence: Synthetic oligonucleotide
  Sense strand starting at position 1173 of SEQ ID NO: 1562860
uuagaacuuucccuagaug

SEQ ID NO: 1778082 - RNA, 19 nt, Artificial Sequence
  Description of Artificial Sequence: Synthetic oligonucleotide
  Antisense strand to SEQ ID NO: 1778081
caucuagggaaaguucuaa

SEQ ID NO: 1778083 - RNA, 19 nt, Artificial Sequence
  Description of Artificial Sequence: Synthetic oligonucleotide
  Sense strand starting at position 1301 of SEQ ID NO: 1562860
ccgugagucgcgcucacuu

SEQ ID NO: 1778084 - RNA, 19 nt, Artificial Sequence
  Description of Artificial Sequence: Synthetic oligonucleotide
  Antisense strand to SEQ ID NO: 1778083
aagugagcgcgacucacgg

SEQ ID NO: 1778085 - RNA, 19 nt, Artificial Sequence
  Description of Artificial Sequence: Synthetic oligonucleotide
  Sense strand starting at position 1459 of SEQ ID NO: 1562860
aggagagguugauccgaau

SEQ ID NO: 1778086 - RNA, 19 nt, Artificial Sequence
  Description of Artificial Sequence: Synthetic oligonucleotide
  Antisense strand to SEQ ID NO: 1778085
auucggaucaaccucuccu

SEQ ID NO: 1778087 - RNA, 19 nt, Artificial Sequence
  Description of Artificial Sequence: Synthetic oligonucleotide
  Sense strand starting at position 1494 of SEQ ID NO: 1562860
aucguagauuucguaugaa

SEQ ID NO: 1778088 - RNA, 19 nt, Artificial Sequence
  Description of Artificial Sequence: Synthetic oligonucleotide
  Antisense strand to SEQ ID NO: 1778087
uucauacgaaaucuacgau

SEQ ID NO: 1778089 - RNA, 19 nt, Artificial Sequence
  Description of Artificial Sequence: Synthetic oligonucleotide
  Sense strand starting at position 1681 of SEQ ID NO: 1562860
auccuaagguuuccugagu

SEQ ID NO: 1778090 - RNA, 19 nt, Artificial Sequence
  Description of Artificial Sequence: Synthetic oligonucleotide
  Antisense strand to SEQ ID NO: 1778089
acucaggaaaccuuaggau

SEQ ID NO: 1778091 - RNA, 19 nt, Artificial Sequence
  Description of Artificial Sequence: Synthetic oligonucleotide
  Sense strand starting at position 1682 of SEQ ID NO: 1562860
uccuaagguuuccugaguu

SEQ ID NO: 1778092 - RNA, 19 nt, Artificial Sequence
  Description of Artificial Sequence: Synthetic oligonucleotide
  Antisense strand to SEQ ID NO: 1778091
aacucaggaaaccuuagga

SEQ ID NO: 1778093 - RNA, 19 nt, Artificial Sequence
  Description of Artificial Sequence: Synthetic oligonucleotide
  Sense strand starting at position 1686 of SEQ ID NO: 1562860
aagguuuccugaguucuaa

SEQ ID NO: 1778094 - RNA, 19 nt, Artificial Sequence
  Description of Artificial Sequence: Synthetic oligonucleotide
  Antisense strand to SEQ ID NO: 1778093
uuagaacucaggaaaccuu

SEQ ID NO: 1778095 - RNA, 19 nt, Artificial Sequence
  Description of Artificial Sequence: Synthetic oligonucleotide
  Sense strand starting at position 2071 of SEQ ID NO: 1562860
cccugugucgaagaaggaa

SEQ ID NO: 1778096 - RNA, 19 nt, Artificial Sequence
  Description of Artificial Sequence: Synthetic oligonucleotide
  Antisense strand to SEQ ID NO: 1778095
uuccuucuucgacacaggg

SEQ ID NO: 1778097 - RNA, 19 nt, Artificial Sequence
  Description of Artificial Sequence: Synthetic oligonucleotide
  Sense strand starting at position 2089 of SEQ ID NO: 1562860
acguacuuuggcguucuua

SEQ ID NO: 1778098 - RNA, 19 nt, Artificial Sequence
  Description of Artificial Sequence: Synthetic oligonucleotide
  Antisense strand to SEQ ID NO: 1778097
uaagaacgccaaaguacgu

SEQ ID NO: 1778099 - RNA, 19 nt, Artificial Sequence
  Description of Artificial Sequence: Synthetic oligonucleotide
  Sense strand starting at position 2090 of SEQ ID NO: 1562860
cguacuuuggcguucuuau

SEQ ID NO: 1778100 - RNA, 19 nt, Artificial Sequence
  Description of Artificial Sequence: Synthetic oligonucleotide
  Antisense strand to SEQ ID NO: 1778099
auaagaacgccaaaguacg

SEQ ID NO: 1778101 - RNA, 19 nt, Artificial Sequence
  Description of Artificial Sequence: Synthetic oligonucleotide
  Sense strand starting at position 2105 of SEQ ID NO: 1562860
uuaugagcugccuaguaca

SEQ ID NO: 1778102 - RNA, 19 nt, Artificial Sequence
  Description of Artificial Sequence: Synthetic oligonucleotide
  Antisense strand to SEQ ID NO: 1778101
uguacuaggcagcucauaa

SEQ ID NO: 1778103 - RNA, 19 nt, Artificial Sequence
  Description of Artificial Sequence: Synthetic oligonucleotide
  Sense strand starting at position 2121 of SEQ ID NO: 1562860
acaaauuauuggcagaaac

SEQ ID NO: 1778104 - RNA, 19 nt, Artificial Sequence
  Description of Artificial Sequence: Synthetic oligonucleotide
  Antisense strand to SEQ ID NO: 1778103
guuucugccaauaauuugu

SEQ ID NO: 1778105 - RNA, 19 nt, Artificial Sequence
  Description of Artificial Sequence: Synthetic oligonucleotide
  Sense strand starting at position 2181 of SEQ ID NO: 1562860
agcggcuuauggcuguaau

SEQ ID NO: 1778106 - RNA, 19 nt, Artificial Sequence
  Description of Artificial Sequence: Synthetic oligonucleotide
  Antisense strand to SEQ ID NO: 1778105
auuacagccauaagccgcu

SEQ ID NO: 1778107 - RNA, 19 nt, Artificial Sequence
  Description of Artificial Sequence: Synthetic oligonucleotide
  Sense strand starting at position 2393 of SEQ ID NO: 1562860
acaguaaguugagaucaug

SEQ ID NO: 1778108 - RNA, 19 nt, Artificial Sequence
  Description of Artificial Sequence: Synthetic oligonucleotide
  Antisense strand to SEQ ID NO: 1778107
caugaucucaacuuacugu

SEQ ID NO: 1778109 - RNA, 19 nt, Artificial Sequence
  Description of Artificial Sequence: Synthetic oligonucleotide
  Sense strand starting at position 2577 of SEQ ID NO: 1562860
agugaaccgucucuacuaa

SEQ ID NO: 1778110 - RNA, 19 nt, Artificial Sequence
  Description of Artificial Sequence: Synthetic oligonucleotide
  Antisense strand to SEQ ID NO: 1778109
uuaguagagacgguucacu

SEQ ID NO: 1778111 - RNA, 19 nt, Artificial Sequence
  Description of Artificial Sequence: Synthetic oligonucleotide
  Sense strand starting at position 3054 of SEQ ID NO: 1562860
aguggaaacucggucucaa

SEQ ID NO: 1778112 - RNA, 19 nt, Artificial Sequence
  Description of Artificial Sequence: Synthetic oligonucleotide
  Antisense strand to SEQ ID NO: 1778111
uugagaccgaguuuccacu

SEQ ID NO: 1778113 - RNA, 19 nt, Artificial Sequence
  Description of Artificial Sequence: Synthetic oligonucleotide
  Sense strand starting at position 3102 of SEQ ID NO: 1562860
caguuaaggccuggcucau

SEQ ID NO: 1778114 - RNA, 19 nt, Artificial Sequence
  Description of Artificial Sequence: Synthetic oligonucleotide
  Antisense strand to SEQ ID NO: 1778113
augagccaggccuuaacug

SEQ ID NO: 1778115 - RNA, 19 nt, Artificial Sequence
  Description of Artificial Sequence: Synthetic oligonucleotide
  Sense strand starting at position 3108 of SEQ ID NO: 1562860
aggccuggcucauuauaau

SEQ ID NO: 1778116 - RNA, 19 nt, Artificial Sequence
  Description of Artificial Sequence: Synthetic oligonucleotide
  Antisense strand to SEQ ID NO: 1778115
auuauaaugagccaggccu

SEQ ID NO: 1778117 - RNA, 19 nt, Artificial Sequence
  Description of Artificial Sequence: Synthetic oligonucleotide
  Sense strand starting at position 3135 of SEQ ID NO: 1562860
gucccugccugcucagaua

SEQ ID NO: 1778118 - RNA, 19 nt, Artificial Sequence
  Description of Artificial Sequence: Synthetic oligonucleotide
  Antisense strand to SEQ ID NO: 1778117
uaucugagcaggcagggac

SEQ ID NO: 1778119 - RNA, 19 nt, Artificial Sequence
  Description of Artificial Sequence: Synthetic oligonucleotide
  Sense strand starting at position 3138 of SEQ ID NO: 1562860
ccugccugcucagauauuu

SEQ ID NO: 1778120 - RNA, 19 nt, Artificial Sequence
  Description of Artificial Sequence: Synthetic oligonucleotide
  Antisense strand to SEQ ID NO: 1778119
aaauaucugagcaggcagg

SEQ ID NO: 1778121 - RNA, 19 nt, Artificial Sequence
  Description of Artificial Sequence: Synthetic oligonucleotide
  Sense strand starting at position 3219 of SEQ ID NO: 1562860
cacugauccuaagauggga

SEQ ID NO: 1778122 - RNA, 19 nt, Artificial Sequence
  Description of Artificial Sequence: Synthetic oligonucleotide
  Antisense strand to SEQ ID NO: 1778121
ucccaucuuaggaucagug

SEQ ID NO: 1778123 - RNA, 19 nt, Artificial Sequence
  Description of Artificial Sequence: Synthetic oligonucleotide
  Sense strand starting at position 3283 of SEQ ID NO: 1562860
aaggcauguugagugguua

SEQ ID NO: 1778124 - RNA, 19 nt, Artificial Sequence
  Description of Artificial Sequence: Synthetic oligonucleotide
  Antisense strand to SEQ ID NO: 1778123
uaaccacucaacaugccuu

SEQ ID NO: 1778125 - RNA, 19 nt, Artificial Sequence
  Description of Artificial Sequence: Synthetic oligonucleotide
  Sense strand starting at position 3284 of SEQ ID NO: 1562860
aggcauguugagugguuaa

SEQ ID NO: 1778126 - RNA, 19 nt, Artificial Sequence
  Description of Artificial Sequence: Synthetic oligonucleotide
  Antisense strand to SEQ ID NO: 1778125
uuaaccacucaacaugccu

SEQ ID NO: 1778127 - RNA, 19 nt, Artificial Sequence
  Description of Artificial Sequence: Synthetic oligonucleotide
  Sense strand starting at position 3454 of SEQ ID NO: 1562860
agaggauggguuuguuuaa

SEQ ID NO: 1778128 - RNA, 19 nt, Artificial Sequence
  Description of Artificial Sequence: Synthetic oligonucleotide
  Antisense strand to SEQ ID NO: 1778127
uuaaacaaacccauccucu

SEQ ID NO: 1778129 - RNA, 19 nt, Artificial Sequence
  Description of Artificial Sequence: Synthetic oligonucleotide
  Sense strand starting at position 3455 of SEQ ID NO: 1562860
gaggauggguuuguuuaaa

SEQ ID NO: 1778130 - RNA, 19 nt, Artificial Sequence
  Description of Artificial Sequence: Synthetic oligonucleotide
  Antisense strand to SEQ ID NO: 1778129
uuuaaacaaacccauccuc

SEQ ID NO: 1778131 - RNA, 19 nt, Artificial Sequence
  Description of Artificial Sequence: Synthetic oligonucleotide
  Sense strand starting at position 3922 of SEQ ID NO: 1562860
gaaugucaucaaggugagu

SEQ ID NO: 1778132 - RNA, 19 nt, Artificial Sequence
  Description of Artificial Sequence: Synthetic oligonucleotide
  Antisense strand to SEQ ID NO: 1778131
acucaccuugaugacauuc

SEQ ID NO: 1778133 - RNA, 19 nt, Artificial Sequence
  Description of Artificial Sequence: Synthetic oligonucleotide
  Sense strand starting at position 3976 of SEQ ID NO: 1562860
ccaugauugucucugucac

SEQ ID NO: 1778134 - RNA, 19 nt, Artificial Sequence
  Description of Artificial Sequence: Synthetic oligonucleotide
  Antisense strand to SEQ ID NO: 1778133
gugacagagacaaucaugg

SEQ ID NO: 1778135 - RNA, 19 nt, Artificial Sequence
  Description of Artificial Sequence: Synthetic oligonucleotide
  Sense strand starting at position 3978 of SEQ ID NO: 1562860
augauugucucugucacuu

SEQ ID NO: 1778136 - RNA, 19 nt, Artificial Sequence
  Description of Artificial Sequence: Synthetic oligonucleotide
  Antisense strand to SEQ ID NO: 1778135
aagugacagagacaaucau

SEQ ID NO: 1778137 - RNA, 19 nt, Artificial Sequence
  Description of Artificial Sequence: Synthetic oligonucleotide
  Sense strand starting at position 3982 of SEQ ID NO: 1562860
uugucucugucacuuguua

SEQ ID NO: 1778138 - RNA, 19 nt, Artificial Sequence
  Description of Artificial Sequence: Synthetic oligonucleotide
  Antisense strand to SEQ ID NO: 1778137
uaacaagugacagagacaa

SEQ ID NO: 1778139 - RNA, 19 nt, Artificial Sequence
  Description of Artificial Sequence: Synthetic oligonucleotide
  Sense strand starting at position 168 of SEQ ID NO: 1562861
ucaccaacauggugaaauu

SEQ ID NO: 1778140 - RNA, 19 nt, Artificial Sequence
  Description of Artificial Sequence: Synthetic oligonucleotide
  Antisense strand to SEQ ID NO: 1778139
aauuucaccauguugguga

SEQ ID NO: 1778141 - RNA, 19 nt, Artificial Sequence
  Description of Artificial Sequence: Synthetic oligonucleotide
  Sense strand starting at position 664 of SEQ ID NO: 1562861
ugagauacauccugauuac

SEQ ID NO: 1778142 - RNA, 19 nt, Artificial Sequence
  Description of Artificial Sequence: Synthetic oligonucleotide
  Antisense strand to SEQ ID NO: 1778141
guaaucaggauguaucuca

SEQ ID NO: 1778143 - RNA, 19 nt, Artificial Sequence
  Description of Artificial Sequence: Synthetic oligonucleotide
  Sense strand starting at position 697 of SEQ ID NO: 1562861
ugaggaacccgaggcuuaa

SEQ ID NO: 1778144 - RNA, 19 nt, Artificial Sequence
  Description of Artificial Sequence: Synthetic oligonucleotide
  Antisense strand to SEQ ID NO: 1778143
uuaagccucggguuccuca

SEQ ID NO: 1778145 - RNA, 19 nt, Artificial Sequence
  Description of Artificial Sequence: Synthetic oligonucleotide
  Sense strand starting at position 711 of SEQ ID NO: 1562861
cuuaaagaguccugagguc

SEQ ID NO: 1778146 - RNA, 19 nt, Artificial Sequence
  Description of Artificial Sequence: Synthetic oligonucleotide
  Antisense strand to SEQ ID NO: 1778145
gaccucaggacucuuuaag

SEQ ID NO: 1778147 - RNA, 19 nt, Artificial Sequence
  Description of Artificial Sequence: Synthetic oligonucleotide
  Sense strand starting at position 735 of SEQ ID NO: 1562861
accuacaaagucugaguua

SEQ ID NO: 1778148 - RNA, 19 nt, Artificial Sequence
  Description of Artificial Sequence: Synthetic oligonucleotide
  Antisense strand to SEQ ID NO: 1778147
uaacucagacuuuguaggu

SEQ ID NO: 1778149 - RNA, 19 nt, Artificial Sequence
  Description of Artificial Sequence: Synthetic oligonucleotide
  Sense strand starting at position 738 of SEQ ID NO: 1562861
uacaaagucugaguuagau

SEQ ID NO: 1778150 - RNA, 19 nt, Artificial Sequence
  Description of Artificial Sequence: Synthetic oligonucleotide
  Antisense strand to SEQ ID NO: 1778149
aucuaacucagacuuugua

SEQ ID NO: 1778151 - RNA, 19 nt, Artificial Sequence
  Description of Artificial Sequence: Synthetic oligonucleotide
  Sense strand starting at position 746 of SEQ ID NO: 1562861
cugaguuagaucuguuagu

SEQ ID NO: 1778152 - RNA, 19 nt, Artificial Sequence
  Description of Artificial Sequence: Synthetic oligonucleotide
  Antisense strand to SEQ ID NO: 1778151
acuaacagaucuaacucag

SEQ ID NO: 1778153 - RNA, 19 nt, Artificial Sequence
  Description of Artificial Sequence: Synthetic oligonucleotide
  Sense strand starting at position 747 of SEQ ID NO: 1562861
ugaguuagaucuguuagug

SEQ ID NO: 1778154 - RNA, 19 nt, Artificial Sequence
  Description of Artificial Sequence: Synthetic oligonucleotide
  Antisense strand to SEQ ID NO: 1778153
cacuaacagaucuaacuca

SEQ ID NO: 1778155 - RNA, 19 nt, Artificial Sequence
  Description of Artificial Sequence: Synthetic oligonucleotide
  Sense strand starting at position 755 of SEQ ID NO: 1562861
aucuguuagugccaggcaa

SEQ ID NO: 1778156 - RNA, 19 nt, Artificial Sequence
  Description of Artificial Sequence: Synthetic oligonucleotide
  Antisense strand to SEQ ID NO: 1778155
uugccuggcacuaacagau

SEQ ID NO: 1778157 - RNA, 19 nt, Artificial Sequence
  Description of Artificial Sequence: Synthetic oligonucleotide
  Sense strand starting at position 793 of SEQ ID NO: 1562861
gugucagcuuuaucccuaa

SEQ ID NO: 1778158 - RNA, 19 nt, Artificial Sequence
  Description of Artificial Sequence: Synthetic oligonucleotide
  Antisense strand to SEQ ID NO: 1778157
uuagggauaaagcugacac

SEQ ID NO: 1778159 - RNA, 19 nt, Artificial Sequence
  Description of Artificial Sequence: Synthetic oligonucleotide
  Sense strand starting at position 808 of SEQ ID NO: 1562861
cuaauuauugggcagucua

SEQ ID NO: 1778160 - RNA, 19 nt, Artificial Sequence
  Description of Artificial Sequence: Synthetic oligonucleotide
  Antisense strand to SEQ ID NO: 1778159
uagacugcccaauaauuag

SEQ ID NO: 1778161 - RNA, 19 nt, Artificial Sequence
  Description of Artificial Sequence: Synthetic oligonucleotide
  Sense strand starting at position 874 of SEQ ID NO: 1562861
acugcucugugcuguaaca

SEQ ID NO: 1778162 - RNA, 19 nt, Artificial Sequence
  Description of Artificial Sequence: Synthetic oligonucleotide
  Antisense strand to SEQ ID NO: 1778161
uguuacagcacagagcagu

SEQ ID NO: 1778163 - RNA, 19 nt, Artificial Sequence
  Description of Artificial Sequence: Synthetic oligonucleotide
  Sense strand starting at position 875 of SEQ ID NO: 1562861
cugcucugugcuguaacau

SEQ ID NO: 1778164 - RNA, 19 nt, Artificial Sequence
  Description of Artificial Sequence: Synthetic oligonucleotide
  Antisense strand to SEQ ID NO: 1778163
auguuacagcacagagcag

SEQ ID NO: 1778165 - RNA, 19 nt, Artificial Sequence
  Description of Artificial Sequence: Synthetic oligonucleotide
  Sense strand starting at position 884 of SEQ ID NO: 1562861
gcuguaacaucucauggca

SEQ ID NO: 1778166 - RNA, 19 nt, Artificial Sequence
  Description of Artificial Sequence: Synthetic oligonucleotide
  Antisense strand to SEQ ID NO: 1778165
ugccaugagauguuacagc

SEQ ID NO: 1778167 - RNA, 19 nt, Artificial Sequence
  Description of Artificial Sequence: Synthetic oligonucleotide
  Sense strand starting at position 948 of SEQ ID NO: 1562861
gagggaugguugcuuccuu

SEQ ID NO: 1778168 - RNA, 19 nt, Artificial Sequence
  Description of Artificial Sequence: Synthetic oligonucleotide
  Antisense strand to SEQ ID NO: 1778167
aaggaagcaaccaucccuc

SEQ ID NO: 1778169 - RNA, 19 nt, Artificial Sequence
  Description of Artificial Sequence: Synthetic oligonucleotide
  Sense strand starting at position 995 of SEQ ID NO: 1562861
ggccucacuucuuugguaa

SEQ ID NO: 1778170 - RNA, 19 nt, Artificial Sequence
  Description of Artificial Sequence: Synthetic oligonucleotide
  Antisense strand to SEQ ID NO: 1778169
uuaccaaagaagugaggcc

SEQ ID NO: 1778171 - RNA, 19 nt, Artificial Sequence
  Description of Artificial Sequence: Synthetic oligonucleotide
  Sense strand starting at position 996 of SEQ ID NO: 1562861
gccucacuucuuugguaaa

SEQ ID NO: 1778172 - RNA, 19 nt, Artificial Sequence
  Description of Artificial Sequence: Synthetic oligonucleotide
  Antisense strand to SEQ ID NO: 1778171
uuuaccaaagaagugaggc

SEQ ID NO: 1778173 - RNA, 19 nt, Artificial Sequence
  Description of Artificial Sequence: Synthetic oligonucleotide
  Sense strand starting at position 1006 of SEQ ID NO: 1562861
uuugguaaauauuccuuga

SEQ ID NO: 1778174 - RNA, 19 nt, Artificial Sequence
  Description of Artificial Sequence: Synthetic oligonucleotide
  Antisense strand to SEQ ID NO: 1778173
ucaaggaauauuuaccaaa

SEQ ID NO: 1778175 - RNA, 19 nt, Artificial Sequence
  Description of Artificial Sequence: Synthetic oligonucleotide
  Sense strand starting at position 1009 of SEQ ID NO: 1562861
gguaaauauuccuugacca

SEQ ID NO: 1778176 - RNA, 19 nt, Artificial Sequence
  Description of Artificial Sequence: Synthetic oligonucleotide
  Antisense strand to SEQ ID NO: 1778175
uggucaaggaauauuuacc

SEQ ID NO: 1778177 - RNA, 19 nt, Artificial Sequence
  Description of Artificial Sequence: Synthetic oligonucleotide
  Sense strand starting at position 1078 of SEQ ID NO: 1562861
augagaucauggucuagug

SEQ ID NO: 1778178 - RNA, 19 nt, Artificial Sequence
  Description of Artificial Sequence: Synthetic oligonucleotide
  Antisense strand to SEQ ID NO: 1778177
cacuagaccaugaucucau

SEQ ID NO: 1778179 - RNA, 19 nt, Artificial Sequence
  Description of Artificial Sequence: Synthetic oligonucleotide
  Sense strand starting at position 1121 of SEQ ID NO: 1562861
auaacugugcagggucaua

SEQ ID NO: 1778180 - RNA, 19 nt, Artificial Sequence
  Description of Artificial Sequence: Synthetic oligonucleotide
  Antisense strand to SEQ ID NO: 1778179
uaugacccugcacaguuau

SEQ ID NO: 1778181 - RNA, 19 nt, Artificial Sequence
  Description of Artificial Sequence: Synthetic oligonucleotide
  Sense strand starting at position 1552 of SEQ ID NO: 1562861
cccaguggguguuaaauca

SEQ ID NO: 1778182 - RNA, 19 nt, Artificial Sequence
  Description of Artificial Sequence: Synthetic oligonucleotide
  Antisense strand to SEQ ID NO: 1778181
ugauuuaacacccacuggg

SEQ ID NO: 1778183 - RNA, 19 nt, Artificial Sequence
  Description of Artificial Sequence: Synthetic oligonucleotide
  Sense strand starting at position 1559 of SEQ ID NO: 1562861
gguguuaaaucacaagcua

SEQ ID NO: 1778184 - RNA, 19 nt, Artificial Sequence
  Description of Artificial Sequence: Synthetic oligonucleotide
  Antisense strand to SEQ ID NO: 1778183
uagcuugugauuuaacacc

SEQ ID NO: 1778185 - RNA, 19 nt, Artificial Sequence
  Description of Artificial Sequence: Synthetic oligonucleotide
  Sense strand starting at position 2141 of SEQ ID NO: 1562861
gacggaagucaggguucua

SEQ ID NO: 1778186 - RNA, 19 nt, Artificial Sequence
  Description of Artificial Sequence: Synthetic oligonucleotide
  Antisense strand to SEQ ID NO: 1778185
uagaacccugacuuccguc

SEQ ID NO: 1778187 - RNA, 19 nt, Artificial Sequence
  Description of Artificial Sequence: Synthetic oligonucleotide
  Sense strand starting at position 2211 of SEQ ID NO: 1562861
caggauccaccucgguaaa

SEQ ID NO: 1778188 - RNA, 19 nt, Artificial Sequence
  Description of Artificial Sequence: Synthetic oligonucleotide
  Antisense strand to SEQ ID NO: 1778187
uuuaccgagguggauccug

SEQ ID NO: 1778189 - RNA, 19 nt, Artificial Sequence
  Description of Artificial Sequence: Synthetic oligonucleotide
  Sense strand starting at position 2918 of SEQ ID NO: 1562861
gguuucuuaaucuguguau

SEQ ID NO: 1778190 - RNA, 19 nt, Artificial Sequence
  Description of Artificial Sequence: Synthetic oligonucleotide
  Antisense strand to SEQ ID NO: 1778189
auacacagauuaagaaacc

SEQ ID NO: 1778191 - RNA, 19 nt, Artificial Sequence
  Description of Artificial Sequence: Synthetic oligonucleotide
  Sense strand starting at position 2919 of SEQ ID NO: 1562861
guuucuuaaucuguguauc

SEQ ID NO: 1778192 - RNA, 19 nt, Artificial Sequence
  Description of Artificial Sequence: Synthetic oligonucleotide
  Antisense strand to SEQ ID NO: 1778191
gauacacagauuaagaaac

SEQ ID NO: 1778193 - RNA, 19 nt, Artificial Sequence
  Description of Artificial Sequence: Synthetic oligonucleotide
  Sense strand starting at position 2929 of SEQ ID NO: 1562861
cuguguaucgccagcggau

SEQ ID NO: 1778194 - RNA, 19 nt, Artificial Sequence
  Description of Artificial Sequence: Synthetic oligonucleotide
  Antisense strand to SEQ ID NO: 1778193
auccgcuggcgauacacag

SEQ ID NO: 1778195 - RNA, 19 nt, Artificial Sequence
  Description of Artificial Sequence: Synthetic oligonucleotide
  Sense strand starting at position 3035 of SEQ ID NO: 1562861
uuuagaaucuguggccacu

SEQ ID NO: 1778196 - RNA, 19 nt, Artificial Sequence
  Description of Artificial Sequence: Synthetic oligonucleotide
  Antisense strand to SEQ ID NO: 1778195
aguggccacagauucuaaa

SEQ ID NO: 1778197 - RNA, 19 nt, Artificial Sequence
  Description of Artificial Sequence: Synthetic oligonucleotide
  Sense strand starting at position 3155 of SEQ ID NO: 1562861
gagggcuguuaucuuuguu

SEQ ID NO: 1778198 - RNA, 19 nt, Artificial Sequence
  Description of Artificial Sequence: Synthetic oligonucleotide
  Antisense strand to SEQ ID NO: 1778197
aacaaagauaacagcccuc

SEQ ID NO: 1778199 - RNA, 19 nt, Artificial Sequence
  Description of Artificial Sequence: Synthetic oligonucleotide
  Sense strand starting at position 3244 of SEQ ID NO: 1562861
aaagguggaucagaaguuu

SEQ ID NO: 1778200 - RNA, 19 nt, Artificial Sequence
  Description of Artificial Sequence: Synthetic oligonucleotide
  Antisense strand to SEQ ID NO: 1778199
aaacuucugauccaccuuu

SEQ ID NO: 1778201 - RNA, 19 nt, Artificial Sequence
  Description of Artificial Sequence: Synthetic oligonucleotide
  Sense strand starting at position 3253 of SEQ ID NO: 1562861
ucagaaguuuaggucaaga

SEQ ID NO: 1778202 - RNA, 19 nt, Artificial Sequence
  Description of Artificial Sequence: Synthetic oligonucleotide
  Antisense strand to SEQ ID NO: 1778201
ucuugaccuaaacuucuga

SEQ ID NO: 1778203 - RNA, 19 nt, Artificial Sequence
  Description of Artificial Sequence: Synthetic oligonucleotide
  Sense strand starting at position 3255 of SEQ ID NO: 1562861
agaaguuuaggucaagagu

SEQ ID NO: 1778204 - RNA, 19 nt, Artificial Sequence
  Description of Artificial Sequence: Synthetic oligonucleotide
  Antisense strand to SEQ ID NO: 1778203
acucuugaccuaaacuucu

SEQ ID NO: 1778205 - RNA, 19 nt, Artificial Sequence
  Description of Artificial Sequence: Synthetic oligonucleotide
  Sense strand starting at position 3497 of SEQ ID NO: 1562861
gacuguaaguuuggccuau

SEQ ID NO: 1778206 - RNA, 19 nt, Artificial Sequence
  Description of Artificial Sequence: Synthetic oligonucleotide
  Antisense strand to SEQ ID NO: 1778205
auaggccaaacuuacaguc

SEQ ID NO: 1778207 - RNA, 19 nt, Artificial Sequence
  Description of Artificial Sequence: Synthetic oligonucleotide
  Sense strand starting at position 3563 of SEQ ID NO: 1562861
ucgguuaggucagaucacu

SEQ ID NO: 1778208 - RNA, 19 nt, Artificial Sequence
  Description of Artificial Sequence: Synthetic oligonucleotide
  Antisense strand to SEQ ID NO: 1778207
agugaucugaccuaaccga

SEQ ID NO: 1778209 - RNA, 19 nt, Artificial Sequence
  Description of Artificial Sequence: Synthetic oligonucleotide
  Sense strand starting at position 3705 of SEQ ID NO: 1562861
augccagguuuaucaccau

SEQ ID NO: 1778210 - RNA, 19 nt, Artificial Sequence
  Description of Artificial Sequence: Synthetic oligonucleotide
  Antisense strand to SEQ ID NO: 1778209
auggugauaaaccuggcau

SEQ ID NO: 1778211 - RNA, 19 nt, Artificial Sequence
  Description of Artificial Sequence: Synthetic oligonucleotide
  Sense strand starting at position 3818 of SEQ ID NO: 1562861
cuuugacuucucugccuga

SEQ ID NO: 1778212 - RNA, 19 nt, Artificial Sequence
  Description of Artificial Sequence: Synthetic oligonucleotide
  Antisense strand to SEQ ID NO: 1778211
ucaggcagagaagucaaag

SEQ ID NO: 1778213 - RNA, 19 nt, Artificial Sequence
  Description of Artificial Sequence: Synthetic oligonucleotide
  Sense strand starting at position 3819 of SEQ ID NO: 1562861
uuugacuucucugccugaa

SEQ ID NO: 1778214 - RNA, 19 nt, Artificial Sequence
  Description of Artificial Sequence: Synthetic oligonucleotide
  Antisense strand to SEQ ID NO: 1778213
uucaggcagagaagucaaa

SEQ ID NO: 1778215 - RNA, 19 nt, Artificial Sequence
  Description of Artificial Sequence: Synthetic oligonucleotide
  Sense strand starting at position 423 of SEQ ID NO: 1562862
ugagauacauccugauuac

SEQ ID NO: 1778216 - RNA, 19 nt, Artificial Sequence
  Description of Artificial Sequence: Synthetic oligonucleotide
  Antisense strand to SEQ ID NO: 1778215
guaaucaggauguaucuca

SEQ ID NO: 1778217 - RNA, 19 nt, Artificial Sequence
  Description of Artificial Sequence: Synthetic oligonucleotide
  Sense strand starting at position 456 of SEQ ID NO: 1562862
ugaggaacccgaggcuuaa

SEQ ID NO: 1778218 - RNA, 19 nt, Artificial Sequence
  Description of Artificial Sequence: Synthetic oligonucleotide
  Antisense strand to SEQ ID NO: 1778217
uuaagccucggguuccuca

SEQ ID NO: 1778219 - RNA, 19 nt, Artificial Sequence
  Description of Artificial Sequence: Synthetic oligonucleotide
  Sense strand starting at position 470 of SEQ ID NO: 1562862
cuuaaagaguccugagguc

SEQ ID NO: 1778220 - RNA, 19 nt, Artificial Sequence
  Description of Artificial Sequence: Synthetic oligonucleotide
  Antisense strand to SEQ ID NO: 1778219
gaccucaggacucuuuaag

SEQ ID NO: 1778221 - RNA, 19 nt, Artificial Sequence
  Description of Artificial Sequence: Synthetic oligonucleotide
  Sense strand starting at position 494 of SEQ ID NO: 1562862
accuacaaagucugaguua

SEQ ID NO: 1778222 - RNA, 19 nt, Artificial Sequence
  Description of Artificial Sequence: Synthetic oligonucleotide
  Antisense strand to SEQ ID NO: 1778221
uaacucagacuuuguaggu

SEQ ID NO: 1778223 - RNA, 19 nt, Artificial Sequence
  Description of Artificial Sequence: Synthetic oligonucleotide
  Sense strand starting at position 497 of SEQ ID NO: 1562862
uacaaagucugaguuagau

SEQ ID NO: 1778224 - RNA, 19 nt, Artificial Sequence
  Description of Artificial Sequence: Synthetic oligonucleotide
  Antisense strand to SEQ ID NO: 1778223
aucuaacucagacuuugua

SEQ ID NO: 1778225 - RNA, 19 nt, Artificial Sequence
  Description of Artificial Sequence: Synthetic oligonucleotide
  Sense strand starting at position 505 of SEQ ID NO: 1562862
cugaguuagaucuguuagu

SEQ ID NO: 1778226 - RNA, 19 nt, Artificial Sequence
  Description of Artificial Sequence: Synthetic oligonucleotide
  Antisense strand to SEQ ID NO: 1778225
acuaacagaucuaacucag

SEQ ID NO: 1778227 - RNA, 19 nt, Artificial Sequence
  Description of Artificial Sequence: Synthetic oligonucleotide
  Sense strand starting at position 506 of SEQ ID NO: 1562862
ugaguuagaucuguuagug

SEQ ID NO: 1778228 - RNA, 19 nt, Artificial Sequence
  Description of Artificial Sequence: Synthetic oligonucleotide
  Antisense strand to SEQ ID NO: 1778227
cacuaacagaucuaacuca

SEQ ID NO: 1778229 - RNA, 19 nt, Artificial Sequence
  Description of Artificial Sequence: Synthetic oligonucleotide
  Sense strand starting at position 514 of SEQ ID NO: 1562862
aucuguuagugccaggcaa

SEQ ID NO: 1778230 - RNA, 19 nt, Artificial Sequence
  Description of Artificial Sequence: Synthetic oligonucleotide
  Antisense strand to SEQ ID NO: 1778229
uugccuggcacuaacagau

SEQ ID NO: 1778231 - RNA, 19 nt, Artificial Sequence
  Description of Artificial Sequence: Synthetic oligonucleotide
  Sense strand starting at position 552 of SEQ ID NO: 1562862
gugucagcuuuaucccuaa

SEQ ID NO: 1778232 - RNA, 19 nt, Artificial Sequence
  Description of Artificial Sequence: Synthetic oligonucleotide
  Antisense strand to SEQ ID NO: 1778231
uuagggauaaagcugacac

SEQ ID NO: 1778233 - RNA, 19 nt, Artificial Sequence
  Description of Artificial Sequence: Synthetic oligonucleotide
  Sense strand starting at position 567 of SEQ ID NO: 1562862
cuaauuauugggcagucua

SEQ ID NO: 1778234 - RNA, 19 nt, Artificial Sequence
  Description of Artificial Sequence: Synthetic oligonucleotide
  Antisense strand to SEQ ID NO: 1778233
uagacugcccaauaauuag

SEQ ID NO: 1778235 - RNA, 19 nt, Artificial Sequence
  Description of Artificial Sequence: Synthetic oligonucleotide
  Sense strand starting at position 633 of SEQ ID NO: 1562862
acugcucugugcuguaaca

SEQ ID NO: 1778236 - RNA, 19 nt, Artificial Sequence
  Description of Artificial Sequence: Synthetic oligonucleotide
  Antisense strand to SEQ ID NO: 1778235
uguuacagcacagagcagu

SEQ ID NO: 1778237 - RNA, 19 nt, Artificial Sequence
  Description of Artificial Sequence: Synthetic oligonucleotide
  Sense strand starting at position 634 of SEQ ID NO: 1562862
cugcucugugcuguaacau

SEQ ID NO: 1778238 - RNA, 19 nt, Artificial Sequence
  Description of Artificial Sequence: Synthetic oligonucleotide
  Antisense strand to SEQ ID NO: 1778237
auguuacagcacagagcag

SEQ ID NO: 1778239 - RNA, 19 nt, Artificial Sequence
  Description of Artificial Sequence: Synthetic oligonucleotide
  Sense strand starting at position 643 of SEQ ID NO: 1562862
gcuguaacaucucauggca

SEQ ID NO: 1778240 - RNA, 19 nt, Artificial Sequence
  Description of Artificial Sequence: Synthetic oligonucleotide
  Antisense strand to SEQ ID NO: 1778239
ugccaugagauguuacagc

SEQ ID NO: 1778241 - RNA, 19 nt, Artificial Sequence
  Description of Artificial Sequence: Synthetic oligonucleotide
  Sense strand starting at position 707 of SEQ ID NO: 1562862
gagggaugguugcuuccuu

SEQ ID NO: 1778242 - RNA, 19 nt, Artificial Sequence
  Description of Artificial Sequence: Synthetic oligonucleotide
  Antisense strand to SEQ ID NO: 1778241
aaggaagcaaccaucccuc

SEQ ID NO: 1778243 - RNA, 19 nt, Artificial Sequence
  Description of Artificial Sequence: Synthetic oligonucleotide
  Sense strand starting at position 754 of SEQ ID NO: 1562862
ggccucacuucuuugguaa

SEQ ID NO: 1778244 - RNA, 19 nt, Artificial Sequence
  Description of Artificial Sequence: Synthetic oligonucleotide
  Antisense strand to SEQ ID NO: 1778243
uuaccaaagaagugaggcc

SEQ ID NO: 1778245 - RNA, 19 nt, Artificial Sequence
  Description of Artificial Sequence: Synthetic oligonucleotide
  Sense strand starting at position 755 of SEQ ID NO: 1562862
gccucacuucuuugguaaa

SEQ ID NO: 1778246 - RNA, 19 nt, Artificial Sequence
  Description of Artificial Sequence: Synthetic oligonucleotide
  Antisense strand to SEQ ID NO: 1778245
uuuaccaaagaagugaggc

SEQ ID NO: 1778247 - RNA, 19 nt, Artificial Sequence
  Description of Artificial Sequence: Synthetic oligonucleotide
  Sense strand starting at position 765 of SEQ ID NO: 1562862
uuugguaaauauuccuuga

SEQ ID NO: 1778248 - RNA, 19 nt, Artificial Sequence
  Description of Artificial Sequence: Synthetic oligonucleotide
  Antisense strand to SEQ ID NO: 1778247
ucaaggaauauuuaccaaa

SEQ ID NO: 1778249 - RNA, 19 nt, Artificial Sequence
  Description of Artificial Sequence: Synthetic oligonucleotide
  Sense strand starting at position 768 of SEQ ID NO: 1562862
gguaaauauuccuugacca

SEQ ID NO: 1778250 - RNA, 19 nt, Artificial Sequence
  Description of Artificial Sequence: Synthetic oligonucleotide
  Antisense strand to SEQ ID NO: 1778249
uggucaaggaauauuuacc

SEQ ID NO: 1778251 - RNA, 19 nt, Artificial Sequence
  Description of Artificial Sequence: Synthetic oligonucleotide
  Sense strand starting at position 837 of SEQ ID NO: 1562862
augagaucauggucuagug

SEQ ID NO: 1778252 - RNA, 19 nt, Artificial Sequence
  Description of Artificial Sequence: Synthetic oligonucleotide
  Antisense strand to SEQ ID NO: 1778251
cacuagaccaugaucucau

SEQ ID NO: 1778253 - RNA, 19 nt, Artificial Sequence
  Description of Artificial Sequence: Synthetic oligonucleotide
  Sense strand starting at position 880 of SEQ ID NO: 1562862
auaacugugcagggucaua

SEQ ID NO: 1778254 - RNA, 19 nt, Artificial Sequence
  Description of Artificial Sequence: Synthetic oligonucleotide
  Antisense strand to SEQ ID NO: 1778253
uaugacccugcacaguuau

SEQ ID NO: 1778255 - RNA, 19 nt, Artificial Sequence
  Description of Artificial Sequence: Synthetic oligonucleotide
  Sense strand starting at position 1311 of SEQ ID NO: 1562862
cccaguggguguuaaauca

SEQ ID NO: 1778256 - RNA, 19 nt, Artificial Sequence
  Description of Artificial Sequence: Synthetic oligonucleotide
  Antisense strand to SEQ ID NO: 1778255
ugauuuaacacccacuggg

SEQ ID NO: 1778257 - RNA, 19 nt, Artificial Sequence
  Description of Artificial Sequence: Synthetic oligonucleotide
  Sense strand starting at position 1318 of SEQ ID NO: 1562862
gguguuaaaucacaagcua

SEQ ID NO: 1778258 - RNA, 19 nt, Artificial Sequence
  Description of Artificial Sequence: Synthetic oligonucleotide
  Antisense strand to SEQ ID NO: 1778257
uagcuugugauuuaacacc

SEQ ID NO: 1778259 - RNA, 19 nt, Artificial Sequence
  Description of Artificial Sequence: Synthetic oligonucleotide
  Sense strand starting at position 1900 of SEQ ID NO: 1562862
gacggaagucaggguucua

SEQ ID NO: 1778260 - RNA, 19 nt, Artificial Sequence
  Description of Artificial Sequence: Synthetic oligonucleotide
  Antisense strand to SEQ ID NO: 1778259
uagaacccugacuuccguc

SEQ ID NO: 1778261 - RNA, 19 nt, Artificial Sequence
  Description of Artificial Sequence: Synthetic oligonucleotide
  Sense strand starting at position 1970 of SEQ ID NO: 1562862
caggauccaccucgguaaa

SEQ ID NO: 1778262 - RNA, 19 nt, Artificial Sequence
  Description of Artificial Sequence: Synthetic oligonucleotide
  Antisense strand to SEQ ID NO: 1778261
uuuaccgagguggauccug

SEQ ID NO: 1778263 - RNA, 19 nt, Artificial Sequence
  Description of Artificial Sequence: Synthetic oligonucleotide
  Sense strand starting at position 2677 of SEQ ID NO: 1562862
gguuucuuaaucuguguau

SEQ ID NO: 1778264 - RNA, 19 nt, Artificial Sequence
  Description of Artificial Sequence: Synthetic oligonucleotide
  Antisense strand to SEQ ID NO: 1778263
auacacagauuaagaaacc

SEQ ID NO: 1778265 - RNA, 19 nt, Artificial Sequence
  Description of Artificial Sequence: Synthetic oligonucleotide
  Sense strand starting at position 2678 of SEQ ID NO: 1562862
guuucuuaaucuguguauc

SEQ ID NO: 1778266 - RNA, 19 nt, Artificial Sequence
  Description of Artificial Sequence: Synthetic oligonucleotide
  Antisense strand to SEQ ID NO: 1778265
gauacacagauuaagaaac

SEQ ID NO: 1778267 - RNA, 19 nt, Artificial Sequence
  Description of Artificial Sequence: Synthetic oligonucleotide
  Sense strand starting at position 2688 of SEQ ID NO: 1562862
cuguguaucgccagcggau

SEQ ID NO: 1778268 - RNA, 19 nt, Artificial Sequence
  Description of Artificial Sequence: Synthetic oligonucleotide
  Antisense strand to SEQ ID NO: 1778267
auccgcuggcgauacacag

SEQ ID NO: 1778269 - RNA, 19 nt, Artificial Sequence
  Description of Artificial Sequence: Synthetic oligonucleotide
  Sense strand starting at position 2794 of SEQ ID NO: 1562862
uuuagaaucuguggccacu

SEQ ID NO: 1778270 - RNA, 19 nt, Artificial Sequence
  Description of Artificial Sequence: Synthetic oligonucleotide
  Antisense strand to SEQ ID NO: 1778269
aguggccacagauucuaaa

SEQ ID NO: 1778271 - RNA, 19 nt, Artificial Sequence
  Description of Artificial Sequence: Synthetic oligonucleotide
  Sense strand starting at position 2914 of SEQ ID NO: 1562862
gagggcuguuaucuuuguu

SEQ ID NO: 1778272 - RNA, 19 nt, Artificial Sequence
  Description of Artificial Sequence: Synthetic oligonucleotide
  Antisense strand to SEQ ID NO: 1778271
aacaaagauaacagcccuc

SEQ ID NO: 1778273 - RNA, 19 nt, Artificial Sequence
  Description of Artificial Sequence: Synthetic oligonucleotide
  Sense strand starting at position 3003 of SEQ ID NO: 1562862
aaagguggaucagaaguuu

SEQ ID NO: 1778274 - RNA, 19 nt, Artificial Sequence
  Description of Artificial Sequence: Synthetic oligonucleotide
  Antisense strand to SEQ ID NO: 1778273
aaacuucugauccaccuuu

SEQ ID NO: 1778275 - RNA, 19 nt, Artificial Sequence
  Description of Artificial Sequence: Synthetic oligonucleotide
  Sense strand starting at position 3012 of SEQ ID NO: 1562862
ucagaaguuuaggucaaga

SEQ ID NO: 1778276 - RNA, 19 nt, Artificial Sequence
  Description of Artificial Sequence: Synthetic oligonucleotide
  Antisense strand to SEQ ID NO: 1778275
ucuugaccuaaacuucuga

SEQ ID NO: 1778277 - RNA, 19 nt, Artificial Sequence
  Description of Artificial Sequence: Synthetic oligonucleotide
  Sense strand starting at position 3014 of SEQ ID NO: 1562862
agaaguuuaggucaagagu

SEQ ID NO: 1778278 - RNA, 19 nt, Artificial Sequence
  Description of Artificial Sequence: Synthetic oligonucleotide
  Antisense strand to SEQ ID NO: 1778277
acucuugaccuaaacuucu

SEQ ID NO: 1778279 - RNA, 19 nt, Artificial Sequence
  Description of Artificial Sequence: Synthetic oligonucleotide
  Sense strand starting at position 3256 of SEQ ID NO: 1562862
gacuguaaguuuggccuau

SEQ ID NO: 1778280 - RNA, 19 nt, Artificial Sequence
  Description of Artificial Sequence: Synthetic oligonucleotide
  Antisense strand to SEQ ID NO: 1778279
auaggccaaacuuacaguc

SEQ ID NO: 1778281 - RNA, 19 nt, Artificial Sequence
  Description of Artificial Sequence: Synthetic oligonucleotide
  Sense strand starting at position 3322 of SEQ ID NO: 1562862
ucgguuaggucagaucacu

SEQ ID NO: 1778282 - RNA, 19 nt, Artificial Sequence
  Description of Artificial Sequence: Synthetic oligonucleotide
  Antisense strand to SEQ ID NO: 1778281
agugaucugaccuaaccga

SEQ ID NO: 1778283 - RNA, 19 nt, Artificial Sequence
  Description of Artificial Sequence: Synthetic oligonucleotide
  Sense strand starting at position 3464 of SEQ ID NO: 1562862
augccagguuuaucaccau

SEQ ID NO: 1778284 - RNA, 19 nt, Artificial Sequence
  Description of Artificial Sequence: Synthetic oligonucleotide
  Antisense strand to SEQ ID NO: 1778283
auggugauaaaccuggcau

SEQ ID NO: 1778285 - RNA, 19 nt, Artificial Sequence
  Description of Artificial Sequence: Synthetic oligonucleotide
  Sense strand starting at position 3577 of SEQ ID NO: 1562862
cuuugacuucucugccuga

SEQ ID NO: 1778286 - RNA, 19 nt, Artificial Sequence
  Description of Artificial Sequence: Synthetic oligonucleotide
  Antisense strand to SEQ ID NO: 1778285
ucaggcagagaagucaaag

SEQ ID NO: 1778287 - RNA, 19 nt, Artificial Sequence
  Description of Artificial Sequence: Synthetic oligonucleotide
  Sense strand starting at position 3578 of SEQ ID NO: 1562862
uuugacuucucugccugaa

SEQ ID NO: 1778288 - RNA, 19 nt, Artificial Sequence
  Description of Artificial Sequence: Synthetic oligonucleotide
  Antisense strand to SEQ ID NO: 1778287
uucaggcagagaagucaaa

SEQ ID NO: 1778289 - RNA, 19 nt, Artificial Sequence
  Description of Artificial Sequence: Synthetic oligonucleotide
  Sense strand starting at position 3791 of SEQ ID NO: 1562862
gugguugccuccuguuaug

SEQ ID NO: 1778290 - RNA, 19 nt, Artificial Sequence
  Description of Artificial Sequence: Synthetic oligonucleotide
  Antisense strand to SEQ ID NO: 1778289
cauaacaggaggcaaccac

SEQ ID NO: 1778291 - RNA, 19 nt, Artificial Sequence
  Description of Artificial Sequence: Synthetic oligonucleotide
  Sense strand starting at position 42 of SEQ ID NO: 1562863
cagggaacacagugaguau

SEQ ID NO: 1778292 - RNA, 19 nt, Artificial Sequence
  Description of Artificial Sequence: Synthetic oligonucleotide
  Antisense strand to SEQ ID NO: 1778291
auacucacuguguucccug

SEQ ID NO: 1778293 - RNA, 19 nt, Artificial Sequence
  Description of Artificial Sequence: Synthetic oligonucleotide
  Sense strand starting at position 473 of SEQ ID NO: 1562863
gagagaagggcucgcucua

SEQ ID NO: 1778294 - RNA, 19 nt, Artificial Sequence
  Description of Artificial Sequence: Synthetic oligonucleotide
  Antisense strand to SEQ ID NO: 1778293
uagagcgagcccuucucuc

SEQ ID NO: 1778295 - RNA, 19 nt, Artificial Sequence
  Description of Artificial Sequence: Synthetic oligonucleotide
  Sense strand starting at position 480 of SEQ ID NO: 1562863
gggcucgcucuaggagaaa

SEQ ID NO: 1778296 - RNA, 19 nt, Artificial Sequence
  Description of Artificial Sequence: Synthetic oligonucleotide
  Antisense strand to SEQ ID NO: 1778295
uuucuccuagagcgagccc

SEQ ID NO: 1778297 - RNA, 19 nt, Artificial Sequence
  Description of Artificial Sequence: Synthetic oligonucleotide
  Sense strand starting at position 888 of SEQ ID NO: 1562863
cugugcgguggguaucaau

SEQ ID NO: 1778298 - RNA, 19 nt, Artificial Sequence
  Description of Artificial Sequence: Synthetic oligonucleotide
  Antisense strand to SEQ ID NO: 1778297
auugauacccaccgcacag

SEQ ID NO: 1778299 - RNA, 19 nt, Artificial Sequence
  Description of Artificial Sequence: Synthetic oligonucleotide
  Sense strand starting at position 927 of SEQ ID NO: 1562863
cguugagucacagagucua

SEQ ID NO: 1778300 - RNA, 19 nt, Artificial Sequence
  Description of Artificial Sequence: Synthetic oligonucleotide
  Antisense strand to SEQ ID NO: 1778299
uagacucugugacucaacg

SEQ ID NO: 1778301 - RNA, 19 nt, Artificial Sequence
  Description of Artificial Sequence: Synthetic oligonucleotide
  Sense strand starting at position 935 of SEQ ID NO: 1562863
cacagagucuagguuacuu

SEQ ID NO: 1778302 - RNA, 19 nt, Artificial Sequence
  Description of Artificial Sequence: Synthetic oligonucleotide
  Antisense strand to SEQ ID NO: 1778301
aaguaaccuagacucugug

SEQ ID NO: 1778303 - RNA, 19 nt, Artificial Sequence
  Description of Artificial Sequence: Synthetic oligonucleotide
  Sense strand starting at position 945 of SEQ ID NO: 1562863
agguuacuugcccaagguu

SEQ ID NO: 1778304 - RNA, 19 nt, Artificial Sequence
  Description of Artificial Sequence: Synthetic oligonucleotide
  Antisense strand to SEQ ID NO: 1778303
aaccuugggcaaguaaccu

SEQ ID NO: 1778305 - RNA, 19 nt, Artificial Sequence
  Description of Artificial Sequence: Synthetic oligonucleotide
  Sense strand starting at position 948 of SEQ ID NO: 1562863
uuacuugcccaagguuaga

SEQ ID NO: 1778306 - RNA, 19 nt, Artificial Sequence
  Description of Artificial Sequence: Synthetic oligonucleotide
  Antisense strand to SEQ ID NO: 1778305
ucuaaccuugggcaaguaa

SEQ ID NO: 1778307 - RNA, 19 nt, Artificial Sequence
  Description of Artificial Sequence: Synthetic oligonucleotide
  Sense strand starting at position 1261 of SEQ ID NO: 1562863
ccugaugaugcccagcauu

SEQ ID NO: 1778308 - RNA, 19 nt, Artificial Sequence
  Description of Artificial Sequence: Synthetic oligonucleotide
  Antisense strand to SEQ ID NO: 1778307
aaugcugggcaucaucagg

SEQ ID NO: 1778309 - RNA, 19 nt, Artificial Sequence
  Description of Artificial Sequence: Synthetic oligonucleotide
  Sense strand starting at position 1287 of SEQ ID NO: 1562863
cuccuucccucggucuaau

SEQ ID NO: 1778310 - RNA, 19 nt, Artificial Sequence
  Description of Artificial Sequence: Synthetic oligonucleotide
  Antisense strand to SEQ ID NO: 1778309
auuagaccgagggaaggag

SEQ ID NO: 1778311 - RNA, 19 nt, Artificial Sequence
  Description of Artificial Sequence: Synthetic oligonucleotide
  Sense strand starting at position 1402 of SEQ ID NO: 1562863
auuuauuuaucuggccaga

SEQ ID NO: 1778312 - RNA, 19 nt, Artificial Sequence
  Description of Artificial Sequence: Synthetic oligonucleotide
  Antisense strand to SEQ ID NO: 1778311
ucuggccagauaaauaaau

SEQ ID NO: 1778313 - RNA, 19 nt, Artificial Sequence
  Description of Artificial Sequence: Synthetic oligonucleotide
  Sense strand starting at position 1475 of SEQ ID NO: 1562863
cccaauaaaugucuaggga

SEQ ID NO: 1778314 - RNA, 19 nt, Artificial Sequence
  Description of Artificial Sequence: Synthetic oligonucleotide
  Antisense strand to SEQ ID NO: 1778313
ucccuagacauuuauuggg

SEQ ID NO: 1778315 - RNA, 19 nt, Artificial Sequence
  Description of Artificial Sequence: Synthetic oligonucleotide
  Sense strand starting at position 2116 of SEQ ID NO: 1562863
cccugaucucuccgugacu

SEQ ID NO: 1778316 - RNA, 19 nt, Artificial Sequence
  Description of Artificial Sequence: Synthetic oligonucleotide
  Antisense strand to SEQ ID NO: 1778315
agucacggagagaucaggg

SEQ ID NO: 1778317 - RNA, 19 nt, Artificial Sequence
  Description of Artificial Sequence: Synthetic oligonucleotide
  Sense strand starting at position 2224 of SEQ ID NO: 1562863
uauggaguuacucgugaau

SEQ ID NO: 1778318 - RNA, 19 nt, Artificial Sequence
  Description of Artificial Sequence: Synthetic oligonucleotide
  Antisense strand to SEQ ID NO: 1778317
auucacgaguaacuccaua

SEQ ID NO: 1778319 - RNA, 19 nt, Artificial Sequence
  Description of Artificial Sequence: Synthetic oligonucleotide
  Sense strand starting at position 2233 of SEQ ID NO: 1562863
acucgugaauggcccaaau

SEQ ID NO: 1778320 - RNA, 19 nt, Artificial Sequence
  Description of Artificial Sequence: Synthetic oligonucleotide
  Antisense strand to SEQ ID NO: 1778319
auuugggccauucacgagu

SEQ ID NO: 1778321 - RNA, 19 nt, Artificial Sequence
  Description of Artificial Sequence: Synthetic oligonucleotide
  Sense strand starting at position 2243 of SEQ ID NO: 1562863
ggcccaaauuuccuguacu

SEQ ID NO: 1778322 - RNA, 19 nt, Artificial Sequence
  Description of Artificial Sequence: Synthetic oligonucleotide
  Antisense strand to SEQ ID NO: 1778321
aguacaggaaauuugggcc

SEQ ID NO: 1778323 - RNA, 19 nt, Artificial Sequence
  Description of Artificial Sequence: Synthetic oligonucleotide
  Sense strand starting at position 2493 of SEQ ID NO: 1562863
ugaccagacugcuugaacu

SEQ ID NO: 1778324 - RNA, 19 nt, Artificial Sequence
  Description of Artificial Sequence: Synthetic oligonucleotide
  Antisense strand to SEQ ID NO: 1778323
aguucaagcagucugguca

SEQ ID NO: 1778325 - RNA, 19 nt, Artificial Sequence
  Description of Artificial Sequence: Synthetic oligonucleotide
  Sense strand starting at position 2589 of SEQ ID NO: 1562863
acuuuagaugcugauguca

SEQ ID NO: 1778326 - RNA, 19 nt, Artificial Sequence
  Description of Artificial Sequence: Synthetic oligonucleotide
  Antisense strand to SEQ ID NO: 1778325
ugacaucagcaucuaaagu

SEQ ID NO: 1778327 - RNA, 19 nt, Artificial Sequence
  Description of Artificial Sequence: Synthetic oligonucleotide
  Sense strand starting at position 2670 of SEQ ID NO: 1562863
acagcuguguggucccaga

SEQ ID NO: 1778328 - RNA, 19 nt, Artificial Sequence
  Description of Artificial Sequence: Synthetic oligonucleotide
  Antisense strand to SEQ ID NO: 1778327
ucugggaccacacagcugu

SEQ ID NO: 1778329 - RNA, 19 nt, Artificial Sequence
  Description of Artificial Sequence: Synthetic oligonucleotide
  Sense strand starting at position 2771 of SEQ ID NO: 1562863
ucuggaacuuuggcauaca

SEQ ID NO: 1778330 - RNA, 19 nt, Artificial Sequence
  Description of Artificial Sequence: Synthetic oligonucleotide
  Antisense strand to SEQ ID NO: 1778329
uguaugccaaaguuccaga

SEQ ID NO: 1778331 - RNA, 19 nt, Artificial Sequence
  Description of Artificial Sequence: Synthetic oligonucleotide
  Sense strand starting at position 2837 of SEQ ID NO: 1562863
cggaguuucugauccgaua

SEQ ID NO: 1778332 - RNA, 19 nt, Artificial Sequence
  Description of Artificial Sequence: Synthetic oligonucleotide
  Antisense strand to SEQ ID NO: 1778331
uaucggaucagaaacuccg

SEQ ID NO: 1778333 - RNA, 19 nt, Artificial Sequence
  Description of Artificial Sequence: Synthetic oligonucleotide
  Sense strand starting at position 2855 of SEQ ID NO: 1562863
agagguuucugaguggauu

SEQ ID NO: 1778334 - RNA, 19 nt, Artificial Sequence
  Description of Artificial Sequence: Synthetic oligonucleotide
  Antisense strand to SEQ ID NO: 1778333
aauccacucagaaaccucu

SEQ ID NO: 1778335 - RNA, 19 nt, Artificial Sequence
  Description of Artificial Sequence: Synthetic oligonucleotide
  Sense strand starting at position 2928 of SEQ ID NO: 1562863
ccuugacagcugugauugu

SEQ ID NO: 1778336 - RNA, 19 nt, Artificial Sequence
  Description of Artificial Sequence: Synthetic oligonucleotide
  Antisense strand to SEQ ID NO: 1778335
acaaucacagcugucaagg

SEQ ID NO: 1778337 - RNA, 19 nt, Artificial Sequence
  Description of Artificial Sequence: Synthetic oligonucleotide
  Sense strand starting at position 2938 of SEQ ID NO: 1562863
ugugauugugaggaaguua

SEQ ID NO: 1778338 - RNA, 19 nt, Artificial Sequence
  Description of Artificial Sequence: Synthetic oligonucleotide
  Antisense strand to SEQ ID NO: 1778337
uaacuuccucacaaucaca

SEQ ID NO: 1778339 - RNA, 19 nt, Artificial Sequence
  Description of Artificial Sequence: Synthetic oligonucleotide
  Sense strand starting at position 2946 of SEQ ID NO: 1562863
ugaggaaguuaauuaugua

SEQ ID NO: 1778340 - RNA, 19 nt, Artificial Sequence
  Description of Artificial Sequence: Synthetic oligonucleotide
  Antisense strand to SEQ ID NO: 1778339
uacauaauuaacuuccuca

SEQ ID NO: 1778341 - RNA, 19 nt, Artificial Sequence
  Description of Artificial Sequence: Synthetic oligonucleotide
  Sense strand starting at position 2960 of SEQ ID NO: 1562863
auguaaaguuugucuaaca

SEQ ID NO: 1778342 - RNA, 19 nt, Artificial Sequence
  Description of Artificial Sequence: Synthetic oligonucleotide
  Antisense strand to SEQ ID NO: 1778341
uguuagacaaacuuuacau

SEQ ID NO: 1778343 - RNA, 19 nt, Artificial Sequence
  Description of Artificial Sequence: Synthetic oligonucleotide
  Sense strand starting at position 2961 of SEQ ID NO: 1562863
uguaaaguuugucuaacau

SEQ ID NO: 1778344 - RNA, 19 nt, Artificial Sequence
  Description of Artificial Sequence: Synthetic oligonucleotide
  Antisense strand to SEQ ID NO: 1778343
auguuagacaaacuuuaca

SEQ ID NO: 1778345 - RNA, 19 nt, Artificial Sequence
  Description of Artificial Sequence: Synthetic oligonucleotide
  Sense strand starting at position 3046 of SEQ ID NO: 1562863
guggaaugaguguauaaua

SEQ ID NO: 1778346 - RNA, 19 nt, Artificial Sequence
  Description of Artificial Sequence: Synthetic oligonucleotide
  Antisense strand to SEQ ID NO: 1778345
uauuauacacucauuccac

SEQ ID NO: 1778347 - RNA, 19 nt, Artificial Sequence
  Description of Artificial Sequence: Synthetic oligonucleotide
  Sense strand starting at position 3097 of SEQ ID NO: 1562863
gaaagauugcagugaaaca

SEQ ID NO: 1778348 - RNA, 19 nt, Artificial Sequence
  Description of Artificial Sequence: Synthetic oligonucleotide
  Antisense strand to SEQ ID NO: 1778347
uguuucacugcaaucuuuc

SEQ ID NO: 1778349 - RNA, 19 nt, Artificial Sequence
  Description of Artificial Sequence: Synthetic oligonucleotide
  Sense strand starting at position 3140 of SEQ ID NO: 1562863
cuuggauuguaugccagaa

SEQ ID NO: 1778350 - RNA, 19 nt, Artificial Sequence
  Description of Artificial Sequence: Synthetic oligonucleotide
  Antisense strand to SEQ ID NO: 1778349
uucuggcauacaauccaag

SEQ ID NO: 1778351 - RNA, 19 nt, Artificial Sequence
  Description of Artificial Sequence: Synthetic oligonucleotide
  Sense strand starting at position 3144 of SEQ ID NO: 1562863
gauuguaugccagaauccu

SEQ ID NO: 1778352 - RNA, 19 nt, Artificial Sequence
  Description of Artificial Sequence: Synthetic oligonucleotide
  Antisense strand to SEQ ID NO: 1778351
aggauucuggcauacaauc

SEQ ID NO: 1778353 - RNA, 19 nt, Artificial Sequence
  Description of Artificial Sequence: Synthetic oligonucleotide
  Sense strand starting at position 3345 of SEQ ID NO: 1562863
guacccugacucugaguuu

SEQ ID NO: 1778354 - RNA, 19 nt, Artificial Sequence
  Description of Artificial Sequence: Synthetic oligonucleotide
  Antisense strand to SEQ ID NO: 1778353
aaacucagagucaggguac

SEQ ID NO: 1778355 - RNA, 19 nt, Artificial Sequence
  Description of Artificial Sequence: Synthetic oligonucleotide
  Sense strand starting at position 3419 of SEQ ID NO: 1562863
agcuccucugcuugggaaa

SEQ ID NO: 1778356 - RNA, 19 nt, Artificial Sequence
  Description of Artificial Sequence: Synthetic oligonucleotide
  Antisense strand to SEQ ID NO: 1778355
uuucccaagcagaggagcu

SEQ ID NO: 1778357 - RNA, 19 nt, Artificial Sequence
  Description of Artificial Sequence: Synthetic oligonucleotide
  Sense strand starting at position 3420 of SEQ ID NO: 1562863
gcuccucugcuugggaaau

SEQ ID NO: 1778358 - RNA, 19 nt, Artificial Sequence
  Description of Artificial Sequence: Synthetic oligonucleotide
  Antisense strand to SEQ ID NO: 1778357
auuucccaagcagaggagc

SEQ ID NO: 1778359 - RNA, 19 nt, Artificial Sequence
  Description of Artificial Sequence: Synthetic oligonucleotide
  Sense strand starting at position 3430 of SEQ ID NO: 1562863
uugggaaaucuauguggga

SEQ ID NO: 1778360 - RNA, 19 nt, Artificial Sequence
  Description of Artificial Sequence: Synthetic oligonucleotide
  Antisense strand to SEQ ID NO: 1778359
ucccacauagauuucccaa

SEQ ID NO: 1778361 - RNA, 19 nt, Artificial Sequence
  Description of Artificial Sequence: Synthetic oligonucleotide
  Sense strand starting at position 3432 of SEQ ID NO: 1562863
gggaaaucuaugugggauc

SEQ ID NO: 1778362 - RNA, 19 nt, Artificial Sequence
  Description of Artificial Sequence: Synthetic oligonucleotide
  Antisense strand to SEQ ID NO: 1778361
gaucccacauagauuuccc

SEQ ID NO: 1778363 - RNA, 19 nt, Artificial Sequence
  Description of Artificial Sequence: Synthetic oligonucleotide
  Sense strand starting at position 3434 of SEQ ID NO: 1562863
gaaaucuaugugggauccu

SEQ ID NO: 1778364 - RNA, 19 nt, Artificial Sequence
  Description of Artificial Sequence: Synthetic oligonucleotide
  Antisense strand to SEQ ID NO: 1778363
aggaucccacauagauuuc

SEQ ID NO: 1778365 - RNA, 19 nt, Artificial Sequence
  Description of Artificial Sequence: Synthetic oligonucleotide
  Sense strand starting at position 3443 of SEQ ID NO: 1562863
gugggauccugagaggaag

SEQ ID NO: 1778366 - RNA, 19 nt, Artificial Sequence
  Description of Artificial Sequence: Synthetic oligonucleotide
  Antisense strand to SEQ ID NO: 1778365
cuuccucucaggaucccac

SEQ ID NO: 1778367 - RNA, 19 nt, Artificial Sequence
  Description of Artificial Sequence: Synthetic oligonucleotide
  Sense strand starting at position 3757 of SEQ ID NO: 1562863
gcuggaaguuacccuuaaa

SEQ ID NO: 1778368 - RNA, 19 nt, Artificial Sequence
  Description of Artificial Sequence: Synthetic oligonucleotide
  Antisense strand to SEQ ID NO: 1778367
uuuaaggguaacuuccagc

SEQ ID NO: 1778369 - RNA, 19 nt, Artificial Sequence
  Description of Artificial Sequence: Synthetic oligonucleotide
  Sense strand starting at position 3796 of SEQ ID NO: 1562863
uucuguggcccagagcaau

SEQ ID NO: 1778370 - RNA, 19 nt, Artificial Sequence
  Description of Artificial Sequence: Synthetic oligonucleotide
  Antisense strand to SEQ ID NO: 1778369
auugcucugggccacagaa

SEQ ID NO: 1778371 - RNA, 19 nt, Artificial Sequence
  Description of Artificial Sequence: Synthetic oligonucleotide
  Sense strand starting at position 73 of SEQ ID NO: 1562864
cauccucagccuugugagu

SEQ ID NO: 1778372 - RNA, 19 nt, Artificial Sequence
  Description of Artificial Sequence: Synthetic oligonucleotide
  Antisense strand to SEQ ID NO: 1778371
acucacaaggcugaggaug

SEQ ID NO: 1778373 - RNA, 19 nt, Artificial Sequence
  Description of Artificial Sequence: Synthetic oligonucleotide
  Sense strand starting at position 105 of SEQ ID NO: 1562864
gcugcuugcccaggauuua

SEQ ID NO: 1778374 - RNA, 19 nt, Artificial Sequence
  Description of Artificial Sequence: Synthetic oligonucleotide
  Antisense strand to SEQ ID NO: 1778373
uaaauccugggcaagcagc

SEQ ID NO: 1778375 - RNA, 19 nt, Artificial Sequence
  Description of Artificial Sequence: Synthetic oligonucleotide
  Sense strand starting at position 292 of SEQ ID NO: 1562864
ccuuccuuguggucuggaa

SEQ ID NO: 1778376 - RNA, 19 nt, Artificial Sequence
  Description of Artificial Sequence: Synthetic oligonucleotide
  Antisense strand to SEQ ID NO: 1778375
uuccagaccacaaggaagg

SEQ ID NO: 1778377 - RNA, 19 nt, Artificial Sequence
  Description of Artificial Sequence: Synthetic oligonucleotide
  Sense strand starting at position 294 of SEQ ID NO: 1562864
uuccuuguggucuggaagu

SEQ ID NO: 1778378 - RNA, 19 nt, Artificial Sequence
  Description of Artificial Sequence: Synthetic oligonucleotide
  Antisense strand to SEQ ID NO: 1778377
acuuccagaccacaaggaa

SEQ ID NO: 1778379 - RNA, 19 nt, Artificial Sequence
  Description of Artificial Sequence: Synthetic oligonucleotide
  Sense strand starting at position 296 of SEQ ID NO: 1562864
ccuuguggucuggaaguca

SEQ ID NO: 1778380 - RNA, 19 nt, Artificial Sequence
  Description of Artificial Sequence: Synthetic oligonucleotide
  Antisense strand to SEQ ID NO: 1778379
ugacuuccagaccacaagg

SEQ ID NO: 1778381 - RNA, 19 nt, Artificial Sequence
  Description of Artificial Sequence: Synthetic oligonucleotide
  Sense strand starting at position 329 of SEQ ID NO: 1562864
uagugaaugugucccggau

SEQ ID NO: 1778382 - RNA, 19 nt, Artificial Sequence
  Description of Artificial Sequence: Synthetic oligonucleotide
  Antisense strand to SEQ ID NO: 1778381
auccgggacacauucacua

SEQ ID NO: 1778383 - RNA, 19 nt, Artificial Sequence
  Description of Artificial Sequence: Synthetic oligonucleotide
  Sense strand starting at position 333 of SEQ ID NO: 1562864
gaaugugucccggauguuu

SEQ ID NO: 1778384 - RNA, 19 nt, Artificial Sequence
  Description of Artificial Sequence: Synthetic oligonucleotide
  Antisense strand to SEQ ID NO: 1778383
aaacauccgggacacauuc

SEQ ID NO: 1778385 - RNA, 19 nt, Artificial Sequence
  Description of Artificial Sequence: Synthetic oligonucleotide
  Sense strand starting at position 860 of SEQ ID NO: 1562864
gacauuuaaugagguccua

SEQ ID NO: 1778386 - RNA, 19 nt, Artificial Sequence
  Description of Artificial Sequence: Synthetic oligonucleotide
  Antisense strand to SEQ ID NO: 1778385
uaggaccucauuaaauguc

SEQ ID NO: 1778387 - RNA, 19 nt, Artificial Sequence
  Description of Artificial Sequence: Synthetic oligonucleotide
  Sense strand starting at position 927 of SEQ ID NO: 1562864
acaaguggacacuguuaua

SEQ ID NO: 1778388 - RNA, 19 nt, Artificial Sequence
  Description of Artificial Sequence: Synthetic oligonucleotide
  Antisense strand to SEQ ID NO: 1778387
uauaacaguguccacuugu

SEQ ID NO: 1778389 - RNA, 19 nt, Artificial Sequence
  Description of Artificial Sequence: Synthetic oligonucleotide
  Sense strand starting at position 932 of SEQ ID NO: 1562864
uggacacuguuauaccuau

SEQ ID NO: 1778390 - RNA, 19 nt, Artificial Sequence
  Description of Artificial Sequence: Synthetic oligonucleotide
  Antisense strand to SEQ ID NO: 1778389
auagguauaacagugucca

SEQ ID NO: 1778391 - RNA, 19 nt, Artificial Sequence
  Description of Artificial Sequence: Synthetic oligonucleotide
  Sense strand starting at position 1062 of SEQ ID NO: 1562864
ccgcguucccuaucgaaau

SEQ ID NO: 1778392 - RNA, 19 nt, Artificial Sequence
  Description of Artificial Sequence: Synthetic oligonucleotide
  Antisense strand to SEQ ID NO: 1778391
auuucgauagggaacgcgg

SEQ ID NO: 1778393 - RNA, 19 nt, Artificial Sequence
  Description of Artificial Sequence: Synthetic oligonucleotide
  Sense strand starting at position 2378 of SEQ ID NO: 1562864
ccacaagcucggucgcaau

SEQ ID NO: 1778394 - RNA, 19 nt, Artificial Sequence
  Description of Artificial Sequence: Synthetic oligonucleotide
  Antisense strand to SEQ ID NO: 1778393
auugcgaccgagcuugugg

SEQ ID NO: 1778395 - RNA, 19 nt, Artificial Sequence
  Description of Artificial Sequence: Synthetic oligonucleotide
  Sense strand starting at position 2407 of SEQ ID NO: 1562864
cguggacaggcucacaaua

SEQ ID NO: 1778396 - RNA, 19 nt, Artificial Sequence
  Description of Artificial Sequence: Synthetic oligonucleotide
  Antisense strand to SEQ ID NO: 1778395
uauugugagccuguccacg

SEQ ID NO: 1778397 - RNA, 19 nt, Artificial Sequence
  Description of Artificial Sequence: Synthetic oligonucleotide
  Sense strand starting at position 2653 of SEQ ID NO: 1562864
ccuccaaccuucugaagga

SEQ ID NO: 1778398 - RNA, 19 nt, Artificial Sequence
  Description of Artificial Sequence: Synthetic oligonucleotide
  Antisense strand to SEQ ID NO: 1778397
uccuucagaagguuggagg

SEQ ID NO: 1778399 - RNA, 19 nt, Artificial Sequence
  Description of Artificial Sequence: Synthetic oligonucleotide
  Sense strand starting at position 2702 of SEQ ID NO: 1562864
agaaucuuccugugaucuc

SEQ ID NO: 1778400 - RNA, 19 nt, Artificial Sequence
  Description of Artificial Sequence: Synthetic oligonucleotide
  Antisense strand to SEQ ID NO: 1778399
gagaucacaggaagauucu

SEQ ID NO: 1778401 - RNA, 19 nt, Artificial Sequence
  Description of Artificial Sequence: Synthetic oligonucleotide
  Sense strand starting at position 2705 of SEQ ID NO: 1562864
aucuuccugugaucucaga

SEQ ID NO: 1778402 - RNA, 19 nt, Artificial Sequence
  Description of Artificial Sequence: Synthetic oligonucleotide
  Antisense strand to SEQ ID NO: 1778401
ucugagaucacaggaagau

SEQ ID NO: 1778403 - RNA, 19 nt, Artificial Sequence
  Description of Artificial Sequence: Synthetic oligonucleotide
  Sense strand starting at position 2712 of SEQ ID NO: 1562864
ugugaucucagaggaugau

SEQ ID NO: 1778404 - RNA, 19 nt, Artificial Sequence
  Description of Artificial Sequence: Synthetic oligonucleotide
  Antisense strand to SEQ ID NO: 1778403
aucauccucugagaucaca

SEQ ID NO: 1778405 - RNA, 19 nt, Artificial Sequence
  Description of Artificial Sequence: Synthetic oligonucleotide
  Sense strand starting at position 2718 of SEQ ID NO: 1562864
cucagaggaugauggaaau

SEQ ID NO: 1778406 - RNA, 19 nt, Artificial Sequence
  Description of Artificial Sequence: Synthetic oligonucleotide
  Antisense strand to SEQ ID NO: 1778405
auuuccaucauccucugag

SEQ ID NO: 1778407 - RNA, 19 nt, Artificial Sequence
  Description of Artificial Sequence: Synthetic oligonucleotide
  Sense strand starting at position 2730 of SEQ ID NO: 1562864
uggaaauucucuccucuga

SEQ ID NO: 1778408 - RNA, 19 nt, Artificial Sequence
  Description of Artificial Sequence: Synthetic oligonucleotide
  Antisense strand to SEQ ID NO: 1778407
ucagaggagagaauuucca

SEQ ID NO: 1778409 - RNA, 19 nt, Artificial Sequence
  Description of Artificial Sequence: Synthetic oligonucleotide
  Sense strand starting at position 3033 of SEQ ID NO: 1562864
gaggucuuuccugaccaau

SEQ ID NO: 1778410 - RNA, 19 nt, Artificial Sequence
  Description of Artificial Sequence: Synthetic oligonucleotide
  Antisense strand to SEQ ID NO: 1778409
auuggucaggaaagaccuc

SEQ ID NO: 1778411 - RNA, 19 nt, Artificial Sequence
  Description of Artificial Sequence: Synthetic oligonucleotide
  Sense strand starting at position 3035 of SEQ ID NO: 1562864
ggucuuuccugaccaauac

SEQ ID NO: 1778412 - RNA, 19 nt, Artificial Sequence
  Description of Artificial Sequence: Synthetic oligonucleotide
  Antisense strand to SEQ ID NO: 1778411
guauuggucaggaaagacc

SEQ ID NO: 1778413 - RNA, 19 nt, Artificial Sequence
  Description of Artificial Sequence: Synthetic oligonucleotide
  Sense strand starting at position 3077 of SEQ ID NO: 1562864
uugggagggcugugguuau

SEQ ID NO: 1778414 - RNA, 19 nt, Artificial Sequence
  Description of Artificial Sequence: Synthetic oligonucleotide
  Antisense strand to SEQ ID NO: 1778413
auaaccacagcccucccaa

SEQ ID NO: 1778415 - RNA, 19 nt, Artificial Sequence
  Description of Artificial Sequence: Synthetic oligonucleotide
  Sense strand starting at position 3182 of SEQ ID NO: 1562864
ugugguuucgaguguacuu

SEQ ID NO: 1778416 - RNA, 19 nt, Artificial Sequence
  Description of Artificial Sequence: Synthetic oligonucleotide
  Antisense strand to SEQ ID NO: 1778415
aaguacacucgaaaccaca

SEQ ID NO: 1778417 - RNA, 19 nt, Artificial Sequence
  Description of Artificial Sequence: Synthetic oligonucleotide
  Sense strand starting at position 3226 of SEQ ID NO: 1562864
accggaauguuucccagga

SEQ ID NO: 1778418 - RNA, 19 nt, Artificial Sequence
  Description of Artificial Sequence: Synthetic oligonucleotide
  Antisense strand to SEQ ID NO: 1778417
uccugggaaacauuccggu

SEQ ID NO: 1778419 - RNA, 19 nt, Artificial Sequence
  Description of Artificial Sequence: Synthetic oligonucleotide
  Sense strand starting at position 3227 of SEQ ID NO: 1562864
ccggaauguuucccaggaa

SEQ ID NO: 1778420 - RNA, 19 nt, Artificial Sequence
  Description of Artificial Sequence: Synthetic oligonucleotide
  Antisense strand to SEQ ID NO: 1778419
uuccugggaaacauuccgg

SEQ ID NO: 1778421 - RNA, 19 nt, Artificial Sequence
  Description of Artificial Sequence: Synthetic oligonucleotide
  Sense strand starting at position 3228 of SEQ ID NO: 1562864
cggaauguuucccaggaag

SEQ ID NO: 1778422 - RNA, 19 nt, Artificial Sequence
  Description of Artificial Sequence: Synthetic oligonucleotide
  Antisense strand to SEQ ID NO: 1778421
cuuccugggaaacauuccg

SEQ ID NO: 1778423 - RNA, 19 nt, Artificial Sequence
  Description of Artificial Sequence: Synthetic oligonucleotide
  Sense strand starting at position 3326 of SEQ ID NO: 1562864
ccacacauguuaggaugau

SEQ ID NO: 1778424 - RNA, 19 nt, Artificial Sequence
  Description of Artificial Sequence: Synthetic oligonucleotide
  Antisense strand to SEQ ID NO: 1778423
aucauccuaacaugugugg

SEQ ID NO: 1778425 - RNA, 19 nt, Artificial Sequence
  Description of Artificial Sequence: Synthetic oligonucleotide
  Sense strand starting at position 3385 of SEQ ID NO: 1562864
auccauaccugaguuguga

SEQ ID NO: 1778426 - RNA, 19 nt, Artificial Sequence
  Description of Artificial Sequence: Synthetic oligonucleotide
  Antisense strand to SEQ ID NO: 1778425
ucacaacucagguauggau

SEQ ID NO: 1778427 - RNA, 19 nt, Artificial Sequence
  Description of Artificial Sequence: Synthetic oligonucleotide
  Sense strand starting at position 3463 of SEQ ID NO: 1562864
ggaugugugcuggugcuca

SEQ ID NO: 1778428 - RNA, 19 nt, Artificial Sequence
  Description of Artificial Sequence: Synthetic oligonucleotide
  Antisense strand to SEQ ID NO: 1778427
ugagcaccagcacacaucc

SEQ ID NO: 1778429 - RNA, 19 nt, Artificial Sequence
  Description of Artificial Sequence: Synthetic oligonucleotide
  Sense strand starting at position 3528 of SEQ ID NO: 1562864
gaagcaucucauggacaga

SEQ ID NO: 1778430 - RNA, 19 nt, Artificial Sequence
  Description of Artificial Sequence: Synthetic oligonucleotide
  Antisense strand to SEQ ID NO: 1778429
ucuguccaugagaugcuuc

SEQ ID NO: 1778431 - RNA, 19 nt, Artificial Sequence
  Description of Artificial Sequence: Synthetic oligonucleotide
  Sense strand starting at position 3579 of SEQ ID NO: 1562864
agcgguaggcccugcuaaa

SEQ ID NO: 1778432 - RNA, 19 nt, Artificial Sequence
  Description of Artificial Sequence: Synthetic oligonucleotide
  Antisense strand to SEQ ID NO: 1778431
uuuagcagggccuaccgcu

SEQ ID NO: 1778433 - RNA, 19 nt, Artificial Sequence
  Description of Artificial Sequence: Synthetic oligonucleotide
  Sense strand starting at position 3639 of SEQ ID NO: 1562864
acacgugugccgugaagac

SEQ ID NO: 1778434 - RNA, 19 nt, Artificial Sequence
  Description of Artificial Sequence: Synthetic oligonucleotide
  Antisense strand to SEQ ID NO: 1778433
gucuucacggcacacgugu

SEQ ID NO: 1778435 - RNA, 19 nt, Artificial Sequence
  Description of Artificial Sequence: Synthetic oligonucleotide
  Sense strand starting at position 3681 of SEQ ID NO: 1562864
aggagaaacugucauagga

SEQ ID NO: 1778436 - RNA, 19 nt, Artificial Sequence
  Description of Artificial Sequence: Synthetic oligonucleotide
  Antisense strand to SEQ ID NO: 1778435
uccuaugacaguuucuccu

SEQ ID NO: 1778437 - RNA, 19 nt, Artificial Sequence
  Description of Artificial Sequence: Synthetic oligonucleotide
  Sense strand starting at position 3683 of SEQ ID NO: 1562864
gagaaacugucauaggaag

SEQ ID NO: 1778438 - RNA, 19 nt, Artificial Sequence
  Description of Artificial Sequence: Synthetic oligonucleotide
  Antisense strand to SEQ ID NO: 1778437
cuuccuaugacaguuucuc

SEQ ID NO: 1778439 - RNA, 19 nt, Artificial Sequence
  Description of Artificial Sequence: Synthetic oligonucleotide
  Sense strand starting at position 3849 of SEQ ID NO: 1562864
gagucaaauuguguuuaaa

SEQ ID NO: 1778440 - RNA, 19 nt, Artificial Sequence
  Description of Artificial Sequence: Synthetic oligonucleotide
  Antisense strand to SEQ ID NO: 1778439
uuuaaacacaauuugacuc

SEQ ID NO: 1778441 - RNA, 19 nt, Artificial Sequence
  Description of Artificial Sequence: Synthetic oligonucleotide
  Sense strand starting at position 3851 of SEQ ID NO: 1562864
gucaaauuguguuuaaacu

SEQ ID NO: 1778442 - RNA, 19 nt, Artificial Sequence
  Description of Artificial Sequence: Synthetic oligonucleotide
  Antisense strand to SEQ ID NO: 1778441
aguuuaaacacaauuugac

SEQ ID NO: 1778443 - RNA, 19 nt, Artificial Sequence
  Description of Artificial Sequence: Synthetic oligonucleotide
  Sense strand starting at position 3852 of SEQ ID NO: 1562864
ucaaauuguguuuaaacug

SEQ ID NO: 1778444 - RNA, 19 nt, Artificial Sequence
  Description of Artificial Sequence: Synthetic oligonucleotide
  Antisense strand to SEQ ID NO: 1778443
caguuuaaacacaauuuga

SEQ ID NO: 1778445 - RNA, 19 nt, Artificial Sequence
  Description of Artificial Sequence: Synthetic oligonucleotide
  Sense strand starting at position 3860 of SEQ ID NO: 1562864
uguuuaaacuggucuguug

SEQ ID NO: 1778446 - RNA, 19 nt, Artificial Sequence
  Description of Artificial Sequence: Synthetic oligonucleotide
  Antisense strand to SEQ ID NO: 1778445
caacagaccaguuuaaaca

SEQ ID NO: 1778447 - RNA, 19 nt, Artificial Sequence
  Description of Artificial Sequence: Synthetic oligonucleotide
  Sense strand starting at position 3862 of SEQ ID NO: 1562864
uuuaaacuggucuguugau

SEQ ID NO: 1778448 - RNA, 19 nt, Artificial Sequence
  Description of Artificial Sequence: Synthetic oligonucleotide
  Antisense strand to SEQ ID NO: 1778447
aucaacagaccaguuuaaa

SEQ ID NO: 1778449 - RNA, 19 nt, Artificial Sequence
  Description of Artificial Sequence: Synthetic oligonucleotide
  Sense strand starting at position 3871 of SEQ ID NO: 1562864
gucuguugaucuccuagaa

SEQ ID NO: 1778450 - RNA, 19 nt, Artificial Sequence
  Description of Artificial Sequence: Synthetic oligonucleotide
  Antisense strand to SEQ ID NO: 1778449
uucuaggagaucaacagac

SEQ ID NO: 1778451 - RNA, 19 nt, Artificial Sequence
  Description of Artificial Sequence: Synthetic oligonucleotide
  Sense strand starting at position 132 of SEQ ID NO: 1562865
aaaguuguagcauggaaga

SEQ ID NO: 1778452 - RNA, 19 nt, Artificial Sequence
  Description of Artificial Sequence: Synthetic oligonucleotide
  Antisense strand to SEQ ID NO: 1778451
ucuuccaugcuacaacuuu

SEQ ID NO: 1778453 - RNA, 19 nt, Artificial Sequence
  Description of Artificial Sequence: Synthetic oligonucleotide
  Sense strand starting at position 310 of SEQ ID NO: 1562865
ggagucuuaugucuagcua

SEQ ID NO: 1778454 - RNA, 19 nt, Artificial Sequence
  Description of Artificial Sequence: Synthetic oligonucleotide
  Antisense strand to SEQ ID NO: 1778453
uagcuagacauaagacucc

SEQ ID NO: 1778455 - RNA, 19 nt, Artificial Sequence
  Description of Artificial Sequence: Synthetic oligonucleotide
  Sense strand starting at position 311 of SEQ ID NO: 1562865
gagucuuaugucuagcuac

SEQ ID NO: 1778456 - RNA, 19 nt, Artificial Sequence
  Description of Artificial Sequence: Synthetic oligonucleotide
  Antisense strand to SEQ ID NO: 1778455
guagcuagacauaagacuc

SEQ ID NO: 1778457 - RNA, 19 nt, Artificial Sequence
  Description of Artificial Sequence: Synthetic oligonucleotide
  Sense strand starting at position 323 of SEQ ID NO: 1562865
uagcuacuguuaugaagaa

SEQ ID NO: 1778458 - RNA, 19 nt, Artificial Sequence
  Description of Artificial Sequence: Synthetic oligonucleotide
  Antisense strand to SEQ ID NO: 1778457
uucuucauaacaguagcua

SEQ ID NO: 1778459 - RNA, 19 nt, Artificial Sequence
  Description of Artificial Sequence: Synthetic oligonucleotide
  Sense strand starting at position 352 of SEQ ID NO: 1562865
gcggaaggaucucuugaag

SEQ ID NO: 1778460 - RNA, 19 nt, Artificial Sequence
  Description of Artificial Sequence: Synthetic oligonucleotide
  Antisense strand to SEQ ID NO: 1778459
cuucaagagauccuuccgc

SEQ ID NO: 1778461 - RNA, 19 nt, Artificial Sequence
  Description of Artificial Sequence: Synthetic oligonucleotide
  Sense strand starting at position 385 of SEQ ID NO: 1562865
ccaacuuggucucuacgaa

SEQ ID NO: 1778462 - RNA, 19 nt, Artificial Sequence
  Description of Artificial Sequence: Synthetic oligonucleotide
  Antisense strand to SEQ ID NO: 1778461
uucguagagaccaaguugg

SEQ ID NO: 1778463 - RNA, 19 nt, Artificial Sequence
  Description of Artificial Sequence: Synthetic oligonucleotide
  Sense strand starting at position 386 of SEQ ID NO: 1562865
caacuuggucucuacgaaa

SEQ ID NO: 1778464 - RNA, 19 nt, Artificial Sequence
  Description of Artificial Sequence: Synthetic oligonucleotide
  Antisense strand to SEQ ID NO: 1778463
uuucguagagaccaaguug

SEQ ID NO: 1778465 - RNA, 19 nt, Artificial Sequence
  Description of Artificial Sequence: Synthetic oligonucleotide
  Sense strand starting at position 413 of SEQ ID NO: 1562865
ggacauagauuagaugaau

SEQ ID NO: 1778466 - RNA, 19 nt, Artificial Sequence
  Description of Artificial Sequence: Synthetic oligonucleotide
  Antisense strand to SEQ ID NO: 1778465
auucaucuaaucuaugucc

SEQ ID NO: 1778467 - RNA, 19 nt, Artificial Sequence
  Description of Artificial Sequence: Synthetic oligonucleotide
  Sense strand starting at position 649 of SEQ ID NO: 1562865
agacaugauuucuagguau

SEQ ID NO: 1778468 - RNA, 19 nt, Artificial Sequence
  Description of Artificial Sequence: Synthetic oligonucleotide
  Antisense strand to SEQ ID NO: 1778467
auaccuagaaaucaugucu

SEQ ID NO: 1778469 - RNA, 19 nt, Artificial Sequence
  Description of Artificial Sequence: Synthetic oligonucleotide
  Sense strand starting at position 686 of SEQ ID NO: 1562865
acugaaagucuagguaaac

SEQ ID NO: 1778470 - RNA, 19 nt, Artificial Sequence
  Description of Artificial Sequence: Synthetic oligonucleotide
  Antisense strand to SEQ ID NO: 1778469
guuuaccuagacuuucagu

SEQ ID NO: 1778471 - RNA, 19 nt, Artificial Sequence
  Description of Artificial Sequence: Synthetic oligonucleotide
  Sense strand starting at position 687 of SEQ ID NO: 1562865
cugaaagucuagguaaacu

SEQ ID NO: 1778472 - RNA, 19 nt, Artificial Sequence
  Description of Artificial Sequence: Synthetic oligonucleotide
  Antisense strand to SEQ ID NO: 1778471
aguuuaccuagacuuucag

SEQ ID NO: 1778473 - RNA, 19 nt, Artificial Sequence
  Description of Artificial Sequence: Synthetic oligonucleotide
  Sense strand starting at position 719 of SEQ ID NO: 1562865
auuugugccugauauaguu

SEQ ID NO: 1778474 - RNA, 19 nt, Artificial Sequence
  Description of Artificial Sequence: Synthetic oligonucleotide
  Antisense strand to SEQ ID NO: 1778473
aacuauaucaggcacaaau

SEQ ID NO: 1778475 - RNA, 19 nt, Artificial Sequence
  Description of Artificial Sequence: Synthetic oligonucleotide
  Sense strand starting at position 820 of SEQ ID NO: 1562865
ggcuacacuuaauagugaa

SEQ ID NO: 1778476 - RNA, 19 nt, Artificial Sequence
  Description of Artificial Sequence: Synthetic oligonucleotide
  Antisense strand to SEQ ID NO: 1778475
uucacuauuaaguguagcc

SEQ ID NO: 1778477 - RNA, 19 nt, Artificial Sequence
  Description of Artificial Sequence: Synthetic oligonucleotide
  Sense strand starting at position 833 of SEQ ID NO: 1562865
agugaagugccuuguugga

SEQ ID NO: 1778478 - RNA, 19 nt, Artificial Sequence
  Description of Artificial Sequence: Synthetic oligonucleotide
  Antisense strand to SEQ ID NO: 1778477
uccaacaaggcacuucacu

SEQ ID NO: 1778479 - RNA, 19 nt, Artificial Sequence
  Description of Artificial Sequence: Synthetic oligonucleotide
  Sense strand starting at position 838 of SEQ ID NO: 1562865
agugccuuguuggaggaaa

SEQ ID NO: 1778480 - RNA, 19 nt, Artificial Sequence
  Description of Artificial Sequence: Synthetic oligonucleotide
  Antisense strand to SEQ ID NO: 1778479
uuuccuccaacaaggcacu

SEQ ID NO: 1778481 - RNA, 19 nt, Artificial Sequence
  Description of Artificial Sequence: Synthetic oligonucleotide
  Sense strand starting at position 895 of SEQ ID NO: 1562865
ucuccaagcugguucuuaa

SEQ ID NO: 1778482 - RNA, 19 nt, Artificial Sequence
  Description of Artificial Sequence: Synthetic oligonucleotide
  Antisense strand to SEQ ID NO: 1778481
uuaagaaccagcuuggaga

SEQ ID NO: 1778483 - RNA, 19 nt, Artificial Sequence
  Description of Artificial Sequence: Synthetic oligonucleotide
  Sense strand starting at position 899 of SEQ ID NO: 1562865
caagcugguucuuaaugga

SEQ ID NO: 1778484 - RNA, 19 nt, Artificial Sequence
  Description of Artificial Sequence: Synthetic oligonucleotide
  Antisense strand to SEQ ID NO: 1778483
uccauuaagaaccagcuug

SEQ ID NO: 1778485 - RNA, 19 nt, Artificial Sequence
  Description of Artificial Sequence: Synthetic oligonucleotide
  Sense strand starting at position 920 of SEQ ID NO: 1562865
cgagcaaaugggugaugaa

SEQ ID NO: 1778486 - RNA, 19 nt, Artificial Sequence
  Description of Artificial Sequence: Synthetic oligonucleotide
  Antisense strand to SEQ ID NO: 1778485
uucaucacccauuugcucg

SEQ ID NO: 1778487 - RNA, 19 nt, Artificial Sequence
  Description of Artificial Sequence: Synthetic oligonucleotide
  Sense strand starting at position 923 of SEQ ID NO: 1562865
gcaaaugggugaugaauaa

SEQ ID NO: 1778488 - RNA, 19 nt, Artificial Sequence
  Description of Artificial Sequence: Synthetic oligonucleotide
  Antisense strand to SEQ ID NO: 1778487
uuauucaucacccauuugc

SEQ ID NO: 1778489 - RNA, 19 nt, Artificial Sequence
  Description of Artificial Sequence: Synthetic oligonucleotide
  Sense strand starting at position 970 of SEQ ID NO: 1562865
agguaaugcgcccaagaga

SEQ ID NO: 1778490 - RNA, 19 nt, Artificial Sequence
  Description of Artificial Sequence: Synthetic oligonucleotide
  Antisense strand to SEQ ID NO: 1778489
ucucuugggcgcauuaccu

SEQ ID NO: 1778491 - RNA, 19 nt, Artificial Sequence
  Description of Artificial Sequence: Synthetic oligonucleotide
  Sense strand starting at position 1014 of SEQ ID NO: 1562865
agaggaagcucgagaggaa

SEQ ID NO: 1778492 - RNA, 19 nt, Artificial Sequence
  Description of Artificial Sequence: Synthetic oligonucleotide
  Antisense strand to SEQ ID NO: 1778491
uuccucucgagcuuccucu

SEQ ID NO: 1778493 - RNA, 19 nt, Artificial Sequence
  Description of Artificial Sequence: Synthetic oligonucleotide
  Sense strand starting at position 1027 of SEQ ID NO: 1562865
gaggaaucgcuaggaagga

SEQ ID NO: 1778494 - RNA, 19 nt, Artificial Sequence
  Description of Artificial Sequence: Synthetic oligonucleotide
  Antisense strand to SEQ ID NO: 1778493
uccuuccuagcgauuccuc

SEQ ID NO: 1778495 - RNA, 19 nt, Artificial Sequence
  Description of Artificial Sequence: Synthetic oligonucleotide
  Sense strand starting at position 2105 of SEQ ID NO: 1562865
acgcgucuuccaggauguu

SEQ ID NO: 1778496 - RNA, 19 nt, Artificial Sequence
  Description of Artificial Sequence: Synthetic oligonucleotide
  Antisense strand to SEQ ID NO: 1778495
aacauccuggaagacgcgu

SEQ ID NO: 1778497 - RNA, 19 nt, Artificial Sequence
  Description of Artificial Sequence: Synthetic oligonucleotide
  Sense strand starting at position 2149 of SEQ ID NO: 1562865
cggcgaugcgcgaggaguu

SEQ ID NO: 1778498 - RNA, 19 nt, Artificial Sequence
  Description of Artificial Sequence: Synthetic oligonucleotide
  Antisense strand to SEQ ID NO: 1778497
aacuccucgcgcaucgccg

SEQ ID NO: 1778499 - RNA, 19 nt, Artificial Sequence
  Description of Artificial Sequence: Synthetic oligonucleotide
  Sense strand starting at position 2160 of SEQ ID NO: 1562865
gaggaguuccggcgaggaa

SEQ ID NO: 1778500 - RNA, 19 nt, Artificial Sequence
  Description of Artificial Sequence: Synthetic oligonucleotide
  Antisense strand to SEQ ID NO: 1778499
uuccucgccggaacuccuc

SEQ ID NO: 1778501 - RNA, 19 nt, Artificial Sequence
  Description of Artificial Sequence: Synthetic oligonucleotide
  Sense strand starting at position 2259 of SEQ ID NO: 1562865
ucgggaaucgugugaggug

SEQ ID NO: 1778502 - RNA, 19 nt, Artificial Sequence
  Description of Artificial Sequence: Synthetic oligonucleotide
  Antisense strand to SEQ ID NO: 1778501
caccucacacgauucccga

SEQ ID NO: 1778503 - RNA, 19 nt, Artificial Sequence
  Description of Artificial Sequence: Synthetic oligonucleotide
  Sense strand starting at position 2963 of SEQ ID NO: 1562865
ccucgagcgccuucuuaua

SEQ ID NO: 1778504 - RNA, 19 nt, Artificial Sequence
  Description of Artificial Sequence: Synthetic oligonucleotide
  Antisense strand to SEQ ID NO: 1778503
uauaagaaggcgcucgagg

SEQ ID NO: 1778505 - RNA, 19 nt, Artificial Sequence
  Description of Artificial Sequence: Synthetic oligonucleotide
  Sense strand starting at position 2965 of SEQ ID NO: 1562865
ucgagcgccuucuuauaaa

SEQ ID NO: 1778506 - RNA, 19 nt, Artificial Sequence
  Description of Artificial Sequence: Synthetic oligonucleotide
  Antisense strand to SEQ ID NO: 1778505
uuuauaagaaggcgcucga

SEQ ID NO: 1778507 - RNA, 19 nt, Artificial Sequence
  Description of Artificial Sequence: Synthetic oligonucleotide
  Sense strand starting at position 3021 of SEQ ID NO: 1562865
ucucccuaguccguuuauu

SEQ ID NO: 1778508 - RNA, 19 nt, Artificial Sequence
  Description of Artificial Sequence: Synthetic oligonucleotide
  Antisense strand to SEQ ID NO: 1778507
aauaaacggacuagggaga

SEQ ID NO: 1778509 - RNA, 19 nt, Artificial Sequence
  Description of Artificial Sequence: Synthetic oligonucleotide
  Sense strand starting at position 3029 of SEQ ID NO: 1562865
guccguuuauuaccagaaa

SEQ ID NO: 1778510 - RNA, 19 nt, Artificial Sequence
  Description of Artificial Sequence: Synthetic oligonucleotide
  Antisense strand to SEQ ID NO: 1778509
uuucugguaauaaacggac

SEQ ID NO: 1778511 - RNA, 19 nt, Artificial Sequence
  Description of Artificial Sequence: Synthetic oligonucleotide
  Sense strand starting at position 3030 of SEQ ID NO: 1562865
uccguuuauuaccagaaag

SEQ ID NO: 1778512 - RNA, 19 nt, Artificial Sequence
  Description of Artificial Sequence: Synthetic oligonucleotide
  Antisense strand to SEQ ID NO: 1778511
cuuucugguaauaaacgga

SEQ ID NO: 1778513 - RNA, 19 nt, Artificial Sequence
  Description of Artificial Sequence: Synthetic oligonucleotide
  Sense strand starting at position 3068 of SEQ ID NO: 1562865
gcgagaggcuucuuggaug

SEQ ID NO: 1778514 - RNA, 19 nt, Artificial Sequence
  Description of Artificial Sequence: Synthetic oligonucleotide
  Antisense strand to SEQ ID NO: 1778513
cauccaagaagccucucgc

SEQ ID NO: 1778515 - RNA, 19 nt, Artificial Sequence
  Description of Artificial Sequence: Synthetic oligonucleotide
  Sense strand starting at position 3080 of SEQ ID NO: 1562865
uuggaugucgcguaggaaa

SEQ ID NO: 1778516 - RNA, 19 nt, Artificial Sequence
  Description of Artificial Sequence: Synthetic oligonucleotide
  Antisense strand to SEQ ID NO: 1778515
uuuccuacgcgacauccaa

SEQ ID NO: 1778517 - RNA, 19 nt, Artificial Sequence
  Description of Artificial Sequence: Synthetic oligonucleotide
  Sense strand starting at position 3082 of SEQ ID NO: 1562865
ggaugucgcguaggaaaga

SEQ ID NO: 1778518 - RNA, 19 nt, Artificial Sequence
  Description of Artificial Sequence: Synthetic oligonucleotide
  Antisense strand to SEQ ID NO: 1778517
ucuuuccuacgcgacaucc

SEQ ID NO: 1778519 - RNA, 19 nt, Artificial Sequence
  Description of Artificial Sequence: Synthetic oligonucleotide
  Sense strand starting at position 3106 of SEQ ID NO: 1562865
gggcgaguccacggacuaa

SEQ ID NO: 1778520 - RNA, 19 nt, Artificial Sequence
  Description of Artificial Sequence: Synthetic oligonucleotide
  Antisense strand to SEQ ID NO: 1778519
uuaguccguggacucgccc

SEQ ID NO: 1778521 - RNA, 19 nt, Artificial Sequence
  Description of Artificial Sequence: Synthetic oligonucleotide
  Sense strand starting at position 3132 of SEQ ID NO: 1562865
gcaaguguauuagagaagu

SEQ ID NO: 1778522 - RNA, 19 nt, Artificial Sequence
  Description of Artificial Sequence: Synthetic oligonucleotide
  Antisense strand to SEQ ID NO: 1778521
acuucucuaauacacuugc

SEQ ID NO: 1778523 - RNA, 19 nt, Artificial Sequence
  Description of Artificial Sequence: Synthetic oligonucleotide
  Sense strand starting at position 3555 of SEQ ID NO: 1562865
caggguuaaucacuuaguu

SEQ ID NO: 1778524 - RNA, 19 nt, Artificial Sequence
  Description of Artificial Sequence: Synthetic oligonucleotide
  Antisense strand to SEQ ID NO: 1778523
aacuaagugauuaacccug

SEQ ID NO: 1778525 - RNA, 19 nt, Artificial Sequence
  Description of Artificial Sequence: Synthetic oligonucleotide
  Sense strand starting at position 3677 of SEQ ID NO: 1562865
ggcguauacguacaaguca

SEQ ID NO: 1778526 - RNA, 19 nt, Artificial Sequence
  Description of Artificial Sequence: Synthetic oligonucleotide
  Antisense strand to SEQ ID NO: 1778525
ugacuuguacguauacgcc

SEQ ID NO: 1778527 - RNA, 19 nt, Artificial Sequence
  Description of Artificial Sequence: Synthetic oligonucleotide
  Sense strand starting at position 3729 of SEQ ID NO: 1562865
gccugacacaaggauuguu

SEQ ID NO: 1778528 - RNA, 19 nt, Artificial Sequence
  Description of Artificial Sequence: Synthetic oligonucleotide
  Antisense strand to SEQ ID NO: 1778527
aacaauccuugugucaggc

SEQ ID NO: 1778529 - RNA, 19 nt, Artificial Sequence
  Description of Artificial Sequence: Synthetic oligonucleotide
  Sense strand starting at position 3755 of SEQ ID NO: 1562865
guuuacugacuuuggcaaa

SEQ ID NO: 1778530 - RNA, 19 nt, Artificial Sequence
  Description of Artificial Sequence: Synthetic oligonucleotide
  Antisense strand to SEQ ID NO: 1778529
uuugccaaagucaguaaac

SEQ ID NO: 1778531 - RNA, 19 nt, Artificial Sequence
  Description of Artificial Sequence: Synthetic oligonucleotide
  Sense strand starting at position 40 of SEQ ID NO: 1562866
guaagaagucaccaacggu

SEQ ID NO: 1778532 - RNA, 19 nt, Artificial Sequence
  Description of Artificial Sequence: Synthetic oligonucleotide
  Antisense strand to SEQ ID NO: 1778531
accguuggugacuucuuac

SEQ ID NO: 1778533 - RNA, 19 nt, Artificial Sequence
  Description of Artificial Sequence: Synthetic oligonucleotide
  Sense strand starting at position 53 of SEQ ID NO: 1562866
aacggucacguuugcuauu

SEQ ID NO: 1778534 - RNA, 19 nt, Artificial Sequence
  Description of Artificial Sequence: Synthetic oligonucleotide
  Antisense strand to SEQ ID NO: 1778533
aauagcaaacgugaccguu

SEQ ID NO: 1778535 - RNA, 19 nt, Artificial Sequence
  Description of Artificial Sequence: Synthetic oligonucleotide
  Sense strand starting at position 55 of SEQ ID NO: 1562866
cggucacguuugcuauuua

SEQ ID NO: 1778536 - RNA, 19 nt, Artificial Sequence
  Description of Artificial Sequence: Synthetic oligonucleotide
  Antisense strand to SEQ ID NO: 1778535
uaaauagcaaacgugaccg

SEQ ID NO: 1778537 - RNA, 19 nt, Artificial Sequence
  Description of Artificial Sequence: Synthetic oligonucleotide
  Sense strand starting at position 59 of SEQ ID NO: 1562866
cacguuugcuauuuaagau

SEQ ID NO: 1778538 - RNA, 19 nt, Artificial Sequence
  Description of Artificial Sequence: Synthetic oligonucleotide
  Antisense strand to SEQ ID NO: 1778537
aucuuaaauagcaaacgug

SEQ ID NO: 1778539 - RNA, 19 nt, Artificial Sequence
  Description of Artificial Sequence: Synthetic oligonucleotide
  Sense strand starting at position 641 of SEQ ID NO: 1562866
gcagguguccugucuguca

SEQ ID NO: 1778540 - RNA, 19 nt, Artificial Sequence
  Description of Artificial Sequence: Synthetic oligonucleotide
  Antisense strand to SEQ ID NO: 1778539
ugacagacaggacaccugc

SEQ ID NO: 1778541 - RNA, 19 nt, Artificial Sequence
  Description of Artificial Sequence: Synthetic oligonucleotide
  Sense strand starting at position 643 of SEQ ID NO: 1562866
agguguccugucugucauu

SEQ ID NO: 1778542 - RNA, 19 nt, Artificial Sequence
  Description of Artificial Sequence: Synthetic oligonucleotide
  Antisense strand to SEQ ID NO: 1778541
aaugacagacaggacaccu

SEQ ID NO: 1778543 - RNA, 19 nt, Artificial Sequence
  Description of Artificial Sequence: Synthetic oligonucleotide
  Sense strand starting at position 644 of SEQ ID NO: 1562866
gguguccugucugucauua

SEQ ID NO: 1778544 - RNA, 19 nt, Artificial Sequence
  Description of Artificial Sequence: Synthetic oligonucleotide
  Antisense strand to SEQ ID NO: 1778543
uaaugacagacaggacacc

SEQ ID NO: 1778545 - RNA, 19 nt, Artificial Sequence
  Description of Artificial Sequence: Synthetic oligonucleotide
  Sense strand starting at position 648 of SEQ ID NO: 1562866
uccugucugucauuagauc

SEQ ID NO: 1778546 - RNA, 19 nt, Artificial Sequence
  Description of Artificial Sequence: Synthetic oligonucleotide
  Antisense strand to SEQ ID NO: 1778545
gaucuaaugacagacagga

SEQ ID NO: 1778547 - RNA, 19 nt, Artificial Sequence
  Description of Artificial Sequence: Synthetic oligonucleotide
  Sense strand starting at position 656 of SEQ ID NO: 1562866
gucauuagaucagugagcu

SEQ ID NO: 1778548 - RNA, 19 nt, Artificial Sequence
  Description of Artificial Sequence: Synthetic oligonucleotide
  Antisense strand to SEQ ID NO: 1778547
agcucacugaucuaaugac

SEQ ID NO: 1778549 - RNA, 19 nt, Artificial Sequence
  Description of Artificial Sequence: Synthetic oligonucleotide
  Sense strand starting at position 657 of SEQ ID NO: 1562866
ucauuagaucagugagcug

SEQ ID NO: 1778550 - RNA, 19 nt, Artificial Sequence
  Description of Artificial Sequence: Synthetic oligonucleotide
  Antisense strand to SEQ ID NO: 1778549
cagcucacugaucuaauga

SEQ ID NO: 1778551 - RNA, 19 nt, Artificial Sequence
  Description of Artificial Sequence: Synthetic oligonucleotide
  Sense strand starting at position 766 of SEQ ID NO: 1562866
uugggcaaguuauauuuaa

SEQ ID NO: 1778552 - RNA, 19 nt, Artificial Sequence
  Description of Artificial Sequence: Synthetic oligonucleotide
  Antisense strand to SEQ ID NO: 1778551
uuaaauauaacuugcccaa

SEQ ID NO: 1778553 - RNA, 19 nt, Artificial Sequence
  Description of Artificial Sequence: Synthetic oligonucleotide
  Sense strand starting at position 958 of SEQ ID NO: 1562866
aaaguuguagcauggaaga

SEQ ID NO: 1778554 - RNA, 19 nt, Artificial Sequence
  Description of Artificial Sequence: Synthetic oligonucleotide
  Antisense strand to SEQ ID NO: 1778553
ucuuccaugcuacaacuuu

SEQ ID NO: 1778555 - RNA, 19 nt, Artificial Sequence
  Description of Artificial Sequence: Synthetic oligonucleotide
  Sense strand starting at position 1136 of SEQ ID NO: 1562866
ggagucuuaugucuagcua

SEQ ID NO: 1778556 - RNA, 19 nt, Artificial Sequence
  Description of Artificial Sequence: Synthetic oligonucleotide
  Antisense strand to SEQ ID NO: 1778555
uagcuagacauaagacucc

SEQ ID NO: 1778557 - RNA, 19 nt, Artificial Sequence
  Description of Artificial Sequence: Synthetic oligonucleotide
  Sense strand starting at position 1137 of SEQ ID NO: 1562866
gagucuuaugucuagcuac

SEQ ID NO: 1778558 - RNA, 19 nt, Artificial Sequence
  Description of Artificial Sequence: Synthetic oligonucleotide
  Antisense strand to SEQ ID NO: 1778557
guagcuagacauaagacuc

SEQ ID NO: 1778559 - RNA, 19 nt, Artificial Sequence
  Description of Artificial Sequence: Synthetic oligonucleotide
  Sense strand starting at position 1178 of SEQ ID NO: 1562866
gcggaaggaucucuugaag

SEQ ID NO: 1778560 - RNA, 19 nt, Artificial Sequence
  Description of Artificial Sequence: Synthetic oligonucleotide
  Antisense strand to SEQ ID NO: 1778559
cuucaagagauccuuccgc

SEQ ID NO: 1778561 - RNA, 19 nt, Artificial Sequence
  Description of Artificial Sequence: Synthetic oligonucleotide
  Sense strand starting at position 1211 of SEQ ID NO: 1562866
ccaacuuggucucuacgaa

SEQ ID NO: 1778562 - RNA, 19 nt, Artificial Sequence
  Description of Artificial Sequence: Synthetic oligonucleotide
  Antisense strand to SEQ ID NO: 1778561
uucguagagaccaaguugg

SEQ ID NO: 1778563 - RNA, 19 nt, Artificial Sequence
  Description of Artificial Sequence: Synthetic oligonucleotide
  Sense strand starting at position 1212 of SEQ ID NO: 1562866
caacuuggucucuacgaaa

SEQ ID NO: 1778564 - RNA, 19 nt, Artificial Sequence
  Description of Artificial Sequence: Synthetic oligonucleotide
  Antisense strand to SEQ ID NO: 1778563
uuucguagagaccaaguug

SEQ ID NO: 1778565 - RNA, 19 nt, Artificial Sequence
  Description of Artificial Sequence: Synthetic oligonucleotide
  Sense strand starting at position 1239 of SEQ ID NO: 1562866
ggacauagauuagaugaau

SEQ ID NO: 1778566 - RNA, 19 nt, Artificial Sequence
  Description of Artificial Sequence: Synthetic oligonucleotide
  Antisense strand to SEQ ID NO: 1778565
auucaucuaaucuaugucc

SEQ ID NO: 1778567 - RNA, 19 nt, Artificial Sequence
  Description of Artificial Sequence: Synthetic oligonucleotide
  Sense strand starting at position 1475 of SEQ ID NO: 1562866
agacaugauuucuagguau

SEQ ID NO: 1778568 - RNA, 19 nt, Artificial Sequence
  Description of Artificial Sequence: Synthetic oligonucleotide
  Antisense strand to SEQ ID NO: 1778567
auaccuagaaaucaugucu

SEQ ID NO: 1778569 - RNA, 19 nt, Artificial Sequence
  Description of Artificial Sequence: Synthetic oligonucleotide
  Sense strand starting at position 1512 of SEQ ID NO: 1562866
acugaaagucuagguaaac

SEQ ID NO: 1778570 - RNA, 19 nt, Artificial Sequence
  Description of Artificial Sequence: Synthetic oligonucleotide
  Antisense strand to SEQ ID NO: 1778569
guuuaccuagacuuucagu

SEQ ID NO: 1778571 - RNA, 19 nt, Artificial Sequence
  Description of Artificial Sequence: Synthetic oligonucleotide
  Sense strand starting at position 1513 of SEQ ID NO: 1562866
cugaaagucuagguaaacu

SEQ ID NO: 1778572 - RNA, 19 nt, Artificial Sequence
  Description of Artificial Sequence: Synthetic oligonucleotide
  Antisense strand to SEQ ID NO: 1778571
aguuuaccuagacuuucag

SEQ ID NO: 1778573 - RNA, 19 nt, Artificial Sequence
  Description of Artificial Sequence: Synthetic oligonucleotide
  Sense strand starting at position 1545 of SEQ ID NO: 1562866
auuugugccugauauaguu

SEQ ID NO: 1778574 - RNA, 19 nt, Artificial Sequence
  Description of Artificial Sequence: Synthetic oligonucleotide
  Antisense strand to SEQ ID NO: 1778573
aacuauaucaggcacaaau

SEQ ID NO: 1778575 - RNA, 19 nt, Artificial Sequence
  Description of Artificial Sequence: Synthetic oligonucleotide
  Sense strand starting at position 1646 of SEQ ID NO: 1562866
ggcuacacuuaauagugaa

SEQ ID NO: 1778576 - RNA, 19 nt, Artificial Sequence
  Description of Artificial Sequence: Synthetic oligonucleotide
  Antisense strand to SEQ ID NO: 1778575
uucacuauuaaguguagcc

SEQ ID NO: 1778577 - RNA, 19 nt, Artificial Sequence
  Description of Artificial Sequence: Synthetic oligonucleotide
  Sense strand starting at position 1659 of SEQ ID NO: 1562866
agugaagugccuuguugga

SEQ ID NO: 1778578 - RNA, 19 nt, Artificial Sequence
  Description of Artificial Sequence: Synthetic oligonucleotide
  Antisense strand to SEQ ID NO: 1778577
uccaacaaggcacuucacu

SEQ ID NO: 1778579 - RNA, 19 nt, Artificial Sequence
  Description of Artificial Sequence: Synthetic oligonucleotide
  Sense strand starting at position 1721 of SEQ ID NO: 1562866
ucuccaagcugguucuuaa

SEQ ID NO: 1778580 - RNA, 19 nt, Artificial Sequence
  Description of Artificial Sequence: Synthetic oligonucleotide
  Antisense strand to SEQ ID NO: 1778579
uuaagaaccagcuuggaga

SEQ ID NO: 1778581 - RNA, 19 nt, Artificial Sequence
  Description of Artificial Sequence: Synthetic oligonucleotide
  Sense strand starting at position 1746 of SEQ ID NO: 1562866
cgagcaaaugggugaugaa

SEQ ID NO: 1778582 - RNA, 19 nt, Artificial Sequence
  Description of Artificial Sequence: Synthetic oligonucleotide
  Antisense strand to SEQ ID NO: 1778581
uucaucacccauuugcucg

SEQ ID NO: 1778583 - RNA, 19 nt, Artificial Sequence
  Description of Artificial Sequence: Synthetic oligonucleotide
  Sense strand starting at position 1796 of SEQ ID NO: 1562866
agguaaugcgcccaagaga

SEQ ID NO: 1778584 - RNA, 19 nt, Artificial Sequence
  Description of Artificial Sequence: Synthetic oligonucleotide
  Antisense strand to SEQ ID NO: 1778583
ucucuugggcgcauuaccu

SEQ ID NO: 1778585 - RNA, 19 nt, Artificial Sequence
  Description of Artificial Sequence: Synthetic oligonucleotide
  Sense strand starting at position 1840 of SEQ ID NO: 1562866
agaggaagcucgagaggaa

SEQ ID NO: 1778586 - RNA, 19 nt, Artificial Sequence
  Description of Artificial Sequence: Synthetic oligonucleotide
  Antisense strand to SEQ ID NO: 1778585
uuccucucgagcuuccucu

SEQ ID NO: 1778587 - RNA, 19 nt, Artificial Sequence
  Description of Artificial Sequence: Synthetic oligonucleotide
  Sense strand starting at position 1853 of SEQ ID NO: 1562866
gaggaaucgcuaggaagga

SEQ ID NO: 1778588 - RNA, 19 nt, Artificial Sequence
  Description of Artificial Sequence: Synthetic oligonucleotide
  Antisense strand to SEQ ID NO: 1778587
uccuuccuagcgauuccuc

SEQ ID NO: 1778589 - RNA, 19 nt, Artificial Sequence
  Description of Artificial Sequence: Synthetic oligonucleotide
  Sense strand starting at position 2975 of SEQ ID NO: 1562866
cggcgaugcgcgaggaguu

SEQ ID NO: 1778590 - RNA, 19 nt, Artificial Sequence
  Description of Artificial Sequence: Synthetic oligonucleotide
  Antisense strand to SEQ ID NO: 1778589
aacuccucgcgcaucgccg

SEQ ID NO: 1778591 - RNA, 19 nt, Artificial Sequence
  Description of Artificial Sequence: Synthetic oligonucleotide
  Sense strand starting at position 2986 of SEQ ID NO: 1562866
gaggaguuccggcgaggaa

SEQ ID NO: 1778592 - RNA, 19 nt, Artificial Sequence
  Description of Artificial Sequence: Synthetic oligonucleotide
  Antisense strand to SEQ ID NO: 1778591
uuccucgccggaacuccuc

SEQ ID NO: 1778593 - RNA, 19 nt, Artificial Sequence
  Description of Artificial Sequence: Synthetic oligonucleotide
  Sense strand starting at position 3085 of SEQ ID NO: 1562866
ucgggaaucgugugaggug

SEQ ID NO: 1778594 - RNA, 19 nt, Artificial Sequence
  Description of Artificial Sequence: Synthetic oligonucleotide
  Antisense strand to SEQ ID NO: 1778593
caccucacacgauucccga

SEQ ID NO: 1778595 - RNA, 19 nt, Artificial Sequence
  Description of Artificial Sequence: Synthetic oligonucleotide
  Sense strand starting at position 3789 of SEQ ID NO: 1562866
ccucgagcgccuucuuaua

SEQ ID NO: 1778596 - RNA, 19 nt, Artificial Sequence
  Description of Artificial Sequence: Synthetic oligonucleotide
  Antisense strand to SEQ ID NO: 1778595
uauaagaaggcgcucgagg

SEQ ID NO: 1778597 - RNA, 19 nt, Artificial Sequence
  Description of Artificial Sequence: Synthetic oligonucleotide
  Sense strand starting at position 3791 of SEQ ID NO: 1562866
ucgagcgccuucuuauaaa

SEQ ID NO: 1778598 - RNA, 19 nt, Artificial Sequence
  Description of Artificial Sequence: Synthetic oligonucleotide
  Antisense strand to SEQ ID NO: 1778597
uuuauaagaaggcgcucga

SEQ ID NO: 1778599 - RNA, 19 nt, Artificial Sequence
  Description of Artificial Sequence: Synthetic oligonucleotide
  Sense strand starting at position 3847 of SEQ ID NO: 1562866
ucucccuaguccguuuauu

SEQ ID NO: 1778600 - RNA, 19 nt, Artificial Sequence
  Description of Artificial Sequence: Synthetic oligonucleotide
  Antisense strand to SEQ ID NO: 1778599
aauaaacggacuagggaga

SEQ ID NO: 1778601 - RNA, 19 nt, Artificial Sequence
  Description of Artificial Sequence: Synthetic oligonucleotide
  Sense strand starting at position 3855 of SEQ ID NO: 1562866
guccguuuauuaccagaaa

SEQ ID NO: 1778602 - RNA, 19 nt, Artificial Sequence
  Description of Artificial Sequence: Synthetic oligonucleotide
  Antisense strand to SEQ ID NO: 1778601
uuucugguaauaaacggac

SEQ ID NO: 1778603 - RNA, 19 nt, Artificial Sequence
  Description of Artificial Sequence: Synthetic oligonucleotide
  Sense strand starting at position 3894 of SEQ ID NO: 1562866
gcgagaggcuucuuggaug

SEQ ID NO: 1778604 - RNA, 19 nt, Artificial Sequence
  Description of Artificial Sequence: Synthetic oligonucleotide
  Antisense strand to SEQ ID NO: 1778603
cauccaagaagccucucgc

SEQ ID NO: 1778605 - RNA, 19 nt, Artificial Sequence
  Description of Artificial Sequence: Synthetic oligonucleotide
  Sense strand starting at position 3906 of SEQ ID NO: 1562866
uuggaugucgcguaggaaa

SEQ ID NO: 1778606 - RNA, 19 nt, Artificial Sequence
  Description of Artificial Sequence: Synthetic oligonucleotide
  Antisense strand to SEQ ID NO: 1778605
uuuccuacgcgacauccaa

SEQ ID NO: 1778607 - RNA, 19 nt, Artificial Sequence
  Description of Artificial Sequence: Synthetic oligonucleotide
  Sense strand starting at position 3908 of SEQ ID NO: 1562866
ggaugucgcguaggaaaga

SEQ ID NO: 1778608 - RNA, 19 nt, Artificial Sequence
  Description of Artificial Sequence: Synthetic oligonucleotide
  Antisense strand to SEQ ID NO: 1778607
ucuuuccuacgcgacaucc

SEQ ID NO: 1778609 - RNA, 19 nt, Artificial Sequence
  Description of Artificial Sequence: Synthetic oligonucleotide
  Sense strand starting at position 3932 of SEQ ID NO: 1562866
gggcgaguccacggacuaa

SEQ ID NO: 1778610 - RNA, 19 nt, Artificial Sequence
  Description of Artificial Sequence: Synthetic oligonucleotide
  Antisense strand to SEQ ID NO: 1778609
uuaguccguggacucgccc

SEQ ID NO: 1778611 - RNA, 19 nt, Artificial Sequence
  Description of Artificial Sequence: Synthetic oligonucleotide
  Sense strand starting at position 129 of SEQ ID NO: 1562867
ccaccugauccacguugua

SEQ ID NO: 1778612 - RNA, 19 nt, Artificial Sequence
  Description of Artificial Sequence: Synthetic oligonucleotide
  Antisense strand to SEQ ID NO: 1778611
uacaacguggaucaggugg

SEQ ID NO: 1778613 - RNA, 19 nt, Artificial Sequence
  Description of Artificial Sequence: Synthetic oligonucleotide
  Sense strand starting at position 195 of SEQ ID NO: 1562867
gcgccagaaucgugaacug

SEQ ID NO: 1778614 - RNA, 19 nt, Artificial Sequence
  Description of Artificial Sequence: Synthetic oligonucleotide
  Antisense strand to SEQ ID NO: 1778613
caguucacgauucuggcgc

SEQ ID NO: 1778615 - RNA, 19 nt, Artificial Sequence
  Description of Artificial Sequence: Synthetic oligonucleotide
  Sense strand starting at position 360 of SEQ ID NO: 1562867
ugcugagguccucgaagaa

SEQ ID NO: 1778616 - RNA, 19 nt, Artificial Sequence
  Description of Artificial Sequence: Synthetic oligonucleotide
  Antisense strand to SEQ ID NO: 1778615
uucuucgaggaccucagca

SEQ ID NO: 1778617 - RNA, 19 nt, Artificial Sequence
  Description of Artificial Sequence: Synthetic oligonucleotide
  Sense strand starting at position 799 of SEQ ID NO: 1562867
gggagucugagccacgauu

SEQ ID NO: 1778618 - RNA, 19 nt, Artificial Sequence
  Description of Artificial Sequence: Synthetic oligonucleotide
  Antisense strand to SEQ ID NO: 1778617
aaucguggcucagacuccc

SEQ ID NO: 1778619 - RNA, 19 nt, Artificial Sequence
  Description of Artificial Sequence: Synthetic oligonucleotide
  Sense strand starting at position 871 of SEQ ID NO: 1562867
uaccgaauaugcgguguua

SEQ ID NO: 1778620 - RNA, 19 nt, Artificial Sequence
  Description of Artificial Sequence: Synthetic oligonucleotide
  Antisense strand to SEQ ID NO: 1778619
uaacaccgcauauucggua

SEQ ID NO: 1778621 - RNA, 19 nt, Artificial Sequence
  Description of Artificial Sequence: Synthetic oligonucleotide
  Sense strand starting at position 1198 of SEQ ID NO: 1562867
ggagcauccgaguuagcgu

SEQ ID NO: 1778622 - RNA, 19 nt, Artificial Sequence
  Description of Artificial Sequence: Synthetic oligonucleotide
  Antisense strand to SEQ ID NO: 1778621
acgcuaacucggaugcucc

SEQ ID NO: 1778623 - RNA, 19 nt, Artificial Sequence
  Description of Artificial Sequence: Synthetic oligonucleotide
  Sense strand starting at position 2160 of SEQ ID NO: 1562867
guauacccauucuggaaua

SEQ ID NO: 1778624 - RNA, 19 nt, Artificial Sequence
  Description of Artificial Sequence: Synthetic oligonucleotide
  Antisense strand to SEQ ID NO: 1778623
uauuccagaauggguauac

SEQ ID NO: 1778625 - RNA, 19 nt, Artificial Sequence
  Description of Artificial Sequence: Synthetic oligonucleotide
  Sense strand starting at position 2441 of SEQ ID NO: 1562867
ugagacccaucucgacaaa

SEQ ID NO: 1778626 - RNA, 19 nt, Artificial Sequence
  Description of Artificial Sequence: Synthetic oligonucleotide
  Antisense strand to SEQ ID NO: 1778625
uuugucgagaugggucuca

SEQ ID NO: 1778627 - RNA, 19 nt, Artificial Sequence
  Description of Artificial Sequence: Synthetic oligonucleotide
  Sense strand starting at position 2536 of SEQ ID NO: 1562867
aucuguugagucugggagu

SEQ ID NO: 1778628 - RNA, 19 nt, Artificial Sequence
  Description of Artificial Sequence: Synthetic oligonucleotide
  Antisense strand to SEQ ID NO: 1778627
acucccagacucaacagau

SEQ ID NO: 1778629 - RNA, 19 nt, Artificial Sequence
  Description of Artificial Sequence: Synthetic oligonucleotide
  Sense strand starting at position 2537 of SEQ ID NO: 1562867
ucuguugagucugggaguu

SEQ ID NO: 1778630 - RNA, 19 nt, Artificial Sequence
  Description of Artificial Sequence: Synthetic oligonucleotide
  Antisense strand to SEQ ID NO: 1778629
aacucccagacucaacaga

SEQ ID NO: 1778631 - RNA, 19 nt, Artificial Sequence
  Description of Artificial Sequence: Synthetic oligonucleotide
  Sense strand starting at position 2909 of SEQ ID NO: 1562867
cgugagaggucaugaucga

SEQ ID NO: 1778632 - RNA, 19 nt, Artificial Sequence
  Description of Artificial Sequence: Synthetic oligonucleotide
  Antisense strand to SEQ ID NO: 1778631
ucgaucaugaccucucacg

SEQ ID NO: 1778633 - RNA, 19 nt, Artificial Sequence
  Description of Artificial Sequence: Synthetic oligonucleotide
  Sense strand starting at position 2910 of SEQ ID NO: 1562867
gugagaggucaugaucgau

SEQ ID NO: 1778634 - RNA, 19 nt, Artificial Sequence
  Description of Artificial Sequence: Synthetic oligonucleotide
  Antisense strand to SEQ ID NO: 1778633
aucgaucaugaccucucac

SEQ ID NO: 1778635 - RNA, 19 nt, Artificial Sequence
  Description of Artificial Sequence: Synthetic oligonucleotide
  Sense strand starting at position 3271 of SEQ ID NO: 1562867
cagcuaaagcuguguucuu

SEQ ID NO: 1778636 - RNA, 19 nt, Artificial Sequence
  Description of Artificial Sequence: Synthetic oligonucleotide
  Antisense strand to SEQ ID NO: 1778635
aagaacacagcuuuagcug

SEQ ID NO: 1778637 - RNA, 19 nt, Artificial Sequence
  Description of Artificial Sequence: Synthetic oligonucleotide
  Sense strand starting at position 3273 of SEQ ID NO: 1562867
gcuaaagcuguguucuugu

SEQ ID NO: 1778638 - RNA, 19 nt, Artificial Sequence
  Description of Artificial Sequence: Synthetic oligonucleotide
  Antisense strand to SEQ ID NO: 1778637
acaagaacacagcuuuagc

SEQ ID NO: 1778639 - RNA, 19 nt, Artificial Sequence
  Description of Artificial Sequence: Synthetic oligonucleotide
  Sense strand starting at position 3362 of SEQ ID NO: 1562867
uaguuacaguaagaauagu

SEQ ID NO: 1778640 - RNA, 19 nt, Artificial Sequence
  Description of Artificial Sequence: Synthetic oligonucleotide
  Antisense strand to SEQ ID NO: 1778639
acuauucuuacuguaacua

SEQ ID NO: 1778641 - RNA, 19 nt, Artificial Sequence
  Description of Artificial Sequence: Synthetic oligonucleotide
  Sense strand starting at position 3423 of SEQ ID NO: 1562867
aucauuaguguagacauua

SEQ ID NO: 1778642 - RNA, 19 nt, Artificial Sequence
  Description of Artificial Sequence: Synthetic oligonucleotide
  Antisense strand to SEQ ID NO: 1778641
uaaugucuacacuaaugau

SEQ ID NO: 1778643 - RNA, 19 nt, Artificial Sequence
  Description of Artificial Sequence: Synthetic oligonucleotide
  Sense strand starting at position 3428 of SEQ ID NO: 1562867
uaguguagacauuagucau

SEQ ID NO: 1778644 - RNA, 19 nt, Artificial Sequence
  Description of Artificial Sequence: Synthetic oligonucleotide
  Antisense strand to SEQ ID NO: 1778643
augacuaaugucuacacua

SEQ ID NO: 1778645 - RNA, 19 nt, Artificial Sequence
  Description of Artificial Sequence: Synthetic oligonucleotide
  Sense strand starting at position 3565 of SEQ ID NO: 1562867
gucugucacgcccauauaa

SEQ ID NO: 1778646 - RNA, 19 nt, Artificial Sequence
  Description of Artificial Sequence: Synthetic oligonucleotide
  Antisense strand to SEQ ID NO: 1778645
uuauaugggcgugacagac

SEQ ID NO: 1778647 - RNA, 19 nt, Artificial Sequence
  Description of Artificial Sequence: Synthetic oligonucleotide
  Sense strand starting at position 3662 of SEQ ID NO: 1562867
gcagucuccuuucuuugaa

SEQ ID NO: 1778648 - RNA, 19 nt, Artificial Sequence
  Description of Artificial Sequence: Synthetic oligonucleotide
  Antisense strand to SEQ ID NO: 1778647
uucaaagaaaggagacugc

SEQ ID NO: 1778649 - RNA, 19 nt, Artificial Sequence
  Description of Artificial Sequence: Synthetic oligonucleotide
  Sense strand starting at position 3665 of SEQ ID NO: 1562867
gucuccuuucuuugaagga

SEQ ID NO: 1778650 - RNA, 19 nt, Artificial Sequence
  Description of Artificial Sequence: Synthetic oligonucleotide
  Antisense strand to SEQ ID NO: 1778649
uccuucaaagaaaggagac

SEQ ID NO: 1778651 - RNA, 19 nt, Artificial Sequence
  Description of Artificial Sequence: Synthetic oligonucleotide
  Sense strand starting at position 3669 of SEQ ID NO: 1562867
ccuuucuuugaaggaguca

SEQ ID NO: 1778652 - RNA, 19 nt, Artificial Sequence
  Description of Artificial Sequence: Synthetic oligonucleotide
  Antisense strand to SEQ ID NO: 1778651
ugacuccuucaaagaaagg

SEQ ID NO: 1778653 - RNA, 19 nt, Artificial Sequence
  Description of Artificial Sequence: Synthetic oligonucleotide
  Sense strand starting at position 3893 of SEQ ID NO: 1562867
ugaucuuucuuagaaaugc

SEQ ID NO: 1778654 - RNA, 19 nt, Artificial Sequence
  Description of Artificial Sequence: Synthetic oligonucleotide
  Antisense strand to SEQ ID NO: 1778653
gcauuucuaagaaagauca

SEQ ID NO: 1778655 - RNA, 19 nt, Artificial Sequence
  Description of Artificial Sequence: Synthetic oligonucleotide
  Sense strand starting at position 95 of SEQ ID NO: 1562868
uauaaaugggagcgaguuu

SEQ ID NO: 1778656 - RNA, 19 nt, Artificial Sequence
  Description of Artificial Sequence: Synthetic oligonucleotide
  Antisense strand to SEQ ID NO: 1778655
aaacucgcucccauuuaua

SEQ ID NO: 1778657 - RNA, 19 nt, Artificial Sequence
  Description of Artificial Sequence: Synthetic oligonucleotide
  Sense strand starting at position 96 of SEQ ID NO: 1562868
auaaaugggagcgaguuua

SEQ ID NO: 1778658 - RNA, 19 nt, Artificial Sequence
  Description of Artificial Sequence: Synthetic oligonucleotide
  Antisense strand to SEQ ID NO: 1778657
uaaacucgcucccauuuau

SEQ ID NO: 1778659 - RNA, 19 nt, Artificial Sequence
  Description of Artificial Sequence: Synthetic oligonucleotide
  Sense strand starting at position 15 of SEQ ID NO: 1562869
agaggucauguccgcagau

SEQ ID NO: 1778660 - RNA, 19 nt, Artificial Sequence
  Description of Artificial Sequence: Synthetic oligonucleotide
  Antisense strand to SEQ ID NO: 1778659
aucugcggacaugaccucu

SEQ ID NO: 1778661 - RNA, 19 nt, Artificial Sequence
  Description of Artificial Sequence: Synthetic oligonucleotide
  Sense strand starting at position 17 of SEQ ID NO: 1562869
aggucauguccgcagauca

SEQ ID NO: 1778662 - RNA, 19 nt, Artificial Sequence
  Description of Artificial Sequence: Synthetic oligonucleotide
  Antisense strand to SEQ ID NO: 1778661
ugaucugcggacaugaccu

SEQ ID NO: 1778663 - RNA, 19 nt, Artificial Sequence
  Description of Artificial Sequence: Synthetic oligonucleotide
  Sense strand starting at position 138 of SEQ ID NO: 1562869
ggcaguguccgccaaccau

SEQ ID NO: 1778664 - RNA, 19 nt, Artificial Sequence
  Description of Artificial Sequence: Synthetic oligonucleotide
  Antisense strand to SEQ ID NO: 1778663
augguuggcggacacugcc

SEQ ID NO: 1778665 - RNA, 19 nt, Artificial Sequence
  Description of Artificial Sequence: Synthetic oligonucleotide
  Sense strand starting at position 221 of SEQ ID NO: 1562869
cuuccauaccuguaguaag

SEQ ID NO: 1778666 - RNA, 19 nt, Artificial Sequence
  Description of Artificial Sequence: Synthetic oligonucleotide
  Antisense strand to SEQ ID NO: 1778665
cuuacuacagguauggaag

SEQ ID NO: 1778667 - RNA, 19 nt, Artificial Sequence
  Description of Artificial Sequence: Synthetic oligonucleotide
  Sense strand starting at position 224 of SEQ ID NO: 1562869
ccauaccuguaguaagaga

SEQ ID NO: 1778668 - RNA, 19 nt, Artificial Sequence
  Description of Artificial Sequence: Synthetic oligonucleotide
  Antisense strand to SEQ ID NO: 1778667
ucucuuacuacagguaugg

SEQ ID NO: 1778669 - RNA, 19 nt, Artificial Sequence
  Description of Artificial Sequence: Synthetic oligonucleotide
  Sense strand starting at position 1689 of SEQ ID NO: 1562869
ugaggcuuccgcagagguu

SEQ ID NO: 1778670 - RNA, 19 nt, Artificial Sequence
  Description of Artificial Sequence: Synthetic oligonucleotide
  Antisense strand to SEQ ID NO: 1778669
aaccucugcggaagccuca

SEQ ID NO: 1778671 - RNA, 19 nt, Artificial Sequence
  Description of Artificial Sequence: Synthetic oligonucleotide
  Sense strand starting at position 1690 of SEQ ID NO: 1562869
gaggcuuccgcagagguuu

SEQ ID NO: 1778672 - RNA, 19 nt, Artificial Sequence
  Description of Artificial Sequence: Synthetic oligonucleotide
  Antisense strand to SEQ ID NO: 1778671
aaaccucugcggaagccuc

SEQ ID NO: 1778673 - RNA, 19 nt, Artificial Sequence
  Description of Artificial Sequence: Synthetic oligonucleotide
  Sense strand starting at position 1704 of SEQ ID NO: 1562869
gguuuaccugucugugcau

SEQ ID NO: 1778674 - RNA, 19 nt, Artificial Sequence
  Description of Artificial Sequence: Synthetic oligonucleotide
  Antisense strand to SEQ ID NO: 1778673
augcacagacagguaaacc

SEQ ID NO: 1778675 - RNA, 19 nt, Artificial Sequence
  Description of Artificial Sequence: Synthetic oligonucleotide
  Sense strand starting at position 2141 of SEQ ID NO: 1562869
gacgaaaguugaugguuac

SEQ ID NO: 1778676 - RNA, 19 nt, Artificial Sequence
  Description of Artificial Sequence: Synthetic oligonucleotide
  Antisense strand to SEQ ID NO: 1778675
guaaccaucaacuuucguc

SEQ ID NO: 1778677 - RNA, 19 nt, Artificial Sequence
  Description of Artificial Sequence: Synthetic oligonucleotide
  Sense strand starting at position 2142 of SEQ ID NO: 1562869
acgaaaguugaugguuacu

SEQ ID NO: 1778678 - RNA, 19 nt, Artificial Sequence
  Description of Artificial Sequence: Synthetic oligonucleotide
  Antisense strand to SEQ ID NO: 1778677
aguaaccaucaacuuucgu

SEQ ID NO: 1778679 - RNA, 19 nt, Artificial Sequence
  Description of Artificial Sequence: Synthetic oligonucleotide
  Sense strand starting at position 2144 of SEQ ID NO: 1562869
gaaaguugaugguuacuac

SEQ ID NO: 1778680 - RNA, 19 nt, Artificial Sequence
  Description of Artificial Sequence: Synthetic oligonucleotide
  Antisense strand to SEQ ID NO: 1778679
guaguaaccaucaacuuuc

SEQ ID NO: 1778681 - RNA, 19 nt, Artificial Sequence
  Description of Artificial Sequence: Synthetic oligonucleotide
  Sense strand starting at position 2147 of SEQ ID NO: 1562869
aguugaugguuacuacaaa

SEQ ID NO: 1778682 - RNA, 19 nt, Artificial Sequence
  Description of Artificial Sequence: Synthetic oligonucleotide
  Antisense strand to SEQ ID NO: 1778681
uuuguaguaaccaucaacu

SEQ ID NO: 1778683 - RNA, 19 nt, Artificial Sequence
  Description of Artificial Sequence: Synthetic oligonucleotide
  Sense strand starting at position 2148 of SEQ ID NO: 1562869
guugaugguuacuacaaau

SEQ ID NO: 1778684 - RNA, 19 nt, Artificial Sequence
  Description of Artificial Sequence: Synthetic oligonucleotide
  Antisense strand to SEQ ID NO: 1778683
auuuguaguaaccaucaac

SEQ ID NO: 1778685 - RNA, 19 nt, Artificial Sequence
  Description of Artificial Sequence: Synthetic oligonucleotide
  Sense strand starting at position 2197 of SEQ ID NO: 1562869
uuggguuucuguccagacu

SEQ ID NO: 1778686 - RNA, 19 nt, Artificial Sequence
  Description of Artificial Sequence: Synthetic oligonucleotide
  Antisense strand to SEQ ID NO: 1778685
agucuggacagaaacccaa

SEQ ID NO: 1778687 - RNA, 19 nt, Artificial Sequence
  Description of Artificial Sequence: Synthetic oligonucleotide
  Sense strand starting at position 2198 of SEQ ID NO: 1562869
uggguuucuguccagacuu

SEQ ID NO: 1778688 - RNA, 19 nt, Artificial Sequence
  Description of Artificial Sequence: Synthetic oligonucleotide
  Antisense strand to SEQ ID NO: 1778687
aagucuggacagaaaccca

SEQ ID NO: 1778689 - RNA, 19 nt, Artificial Sequence
  Description of Artificial Sequence: Synthetic oligonucleotide
  Sense strand starting at position 2236 of SEQ ID NO: 1562869
gcagacuccucuuagcuca

SEQ ID NO: 1778690 - RNA, 19 nt, Artificial Sequence
  Description of Artificial Sequence: Synthetic oligonucleotide
  Antisense strand to SEQ ID NO: 1778689
ugagcuaagaggagucugc

SEQ ID NO: 1778691 - RNA, 19 nt, Artificial Sequence
  Description of Artificial Sequence: Synthetic oligonucleotide
  Sense strand starting at position 2292 of SEQ ID NO: 1562869
uccugaucuuugcuuguga

SEQ ID NO: 1778692 - RNA, 19 nt, Artificial Sequence
  Description of Artificial Sequence: Synthetic oligonucleotide
  Antisense strand to SEQ ID NO: 1778691
ucacaagcaaagaucagga

SEQ ID NO: 1778693 - RNA, 19 nt, Artificial Sequence
  Description of Artificial Sequence: Synthetic oligonucleotide
  Sense strand starting at position 2294 of SEQ ID NO: 1562869
cugaucuuugcuugugaca

SEQ ID NO: 1778694 - RNA, 19 nt, Artificial Sequence
  Description of Artificial Sequence: Synthetic oligonucleotide
  Antisense strand to SEQ ID NO: 1778693
ugucacaagcaaagaucag

SEQ ID NO: 1778695 - RNA, 19 nt, Artificial Sequence
  Description of Artificial Sequence: Synthetic oligonucleotide
  Sense strand starting at position 2297 of SEQ ID NO: 1562869
aucuuugcuugugacaaga

SEQ ID NO: 1778696 - RNA, 19 nt, Artificial Sequence
  Description of Artificial Sequence: Synthetic oligonucleotide
  Antisense strand to SEQ ID NO: 1778695
ucuugucacaagcaaagau

SEQ ID NO: 1778697 - RNA, 19 nt, Artificial Sequence
  Description of Artificial Sequence: Synthetic oligonucleotide
  Sense strand starting at position 2299 of SEQ ID NO: 1562869
cuuugcuugugacaagaua

SEQ ID NO: 1778698 - RNA, 19 nt, Artificial Sequence
  Description of Artificial Sequence: Synthetic oligonucleotide
  Antisense strand to SEQ ID NO: 1778697
uaucuugucacaagcaaag

SEQ ID NO: 1778699 - RNA, 19 nt, Artificial Sequence
  Description of Artificial Sequence: Synthetic oligonucleotide
  Sense strand starting at position 2312 of SEQ ID NO: 1562869
aagauaaccuguguaggga

SEQ ID NO: 1778700 - RNA, 19 nt, Artificial Sequence
  Description of Artificial Sequence: Synthetic oligonucleotide
  Antisense strand to SEQ ID NO: 1778699
ucccuacacagguuaucuu

SEQ ID NO: 1778701 - RNA, 19 nt, Artificial Sequence
  Description of Artificial Sequence: Synthetic oligonucleotide
  Sense strand starting at position 2329 of SEQ ID NO: 1562869
gacugcuuccuacgugaag

SEQ ID NO: 1778702 - RNA, 19 nt, Artificial Sequence
  Description of Artificial Sequence: Synthetic oligonucleotide
  Antisense strand to SEQ ID NO: 1778701
cuucacguaggaagcaguc

SEQ ID NO: 1778703 - RNA, 19 nt, Artificial Sequence
  Description of Artificial Sequence: Synthetic oligonucleotide
  Sense strand starting at position 2330 of SEQ ID NO: 1562869
acugcuuccuacgugaagu

SEQ ID NO: 1778704 - RNA, 19 nt, Artificial Sequence
  Description of Artificial Sequence: Synthetic oligonucleotide
  Antisense strand to SEQ ID NO: 1778703
acuucacguaggaagcagu

SEQ ID NO: 1778705 - RNA, 19 nt, Artificial Sequence
  Description of Artificial Sequence: Synthetic oligonucleotide
  Sense strand starting at position 2368 of SEQ ID NO: 1562869
auuggaagguccuagaaau

SEQ ID NO: 1778706 - RNA, 19 nt, Artificial Sequence
  Description of Artificial Sequence: Synthetic oligonucleotide
  Antisense strand to SEQ ID NO: 1778705
auuucuaggaccuuccaau

SEQ ID NO: 1778707 - RNA, 19 nt, Artificial Sequence
  Description of Artificial Sequence: Synthetic oligonucleotide
  Sense strand starting at position 2421 of SEQ ID NO: 1562869
ggcaucuuugcuggugacu

SEQ ID NO: 1778708 - RNA, 19 nt, Artificial Sequence
  Description of Artificial Sequence: Synthetic oligonucleotide
  Antisense strand to SEQ ID NO: 1778707
agucaccagcaaagaugcc

SEQ ID NO: 1778709 - RNA, 19 nt, Artificial Sequence
  Description of Artificial Sequence: Synthetic oligonucleotide
  Sense strand starting at position 2454 of SEQ ID NO: 1562869
ucaggcacuugucuuugaa

SEQ ID NO: 1778710 - RNA, 19 nt, Artificial Sequence
  Description of Artificial Sequence: Synthetic oligonucleotide
  Antisense strand to SEQ ID NO: 1778709
uucaaagacaagugccuga

SEQ ID NO: 1778711 - RNA, 19 nt, Artificial Sequence
  Description of Artificial Sequence: Synthetic oligonucleotide
  Sense strand starting at position 2456 of SEQ ID NO: 1562869
aggcacuugucuuugaaug

SEQ ID NO: 1778712 - RNA, 19 nt, Artificial Sequence
  Description of Artificial Sequence: Synthetic oligonucleotide
  Antisense strand to SEQ ID NO: 1778711
cauucaaagacaagugccu

SEQ ID NO: 1778713 - RNA, 19 nt, Artificial Sequence
  Description of Artificial Sequence: Synthetic oligonucleotide
  Sense strand starting at position 2474 of SEQ ID NO: 1562869
gguggucuuaccugcaauu

SEQ ID NO: 1778714 - RNA, 19 nt, Artificial Sequence
  Description of Artificial Sequence: Synthetic oligonucleotide
  Antisense strand to SEQ ID NO: 1778713
aauugcagguaagaccacc

SEQ ID NO: 1778715 - RNA, 19 nt, Artificial Sequence
  Description of Artificial Sequence: Synthetic oligonucleotide
  Sense strand starting at position 2530 of SEQ ID NO: 1562869
uggucuaucucauauguau

SEQ ID NO: 1778716 - RNA, 19 nt, Artificial Sequence
  Description of Artificial Sequence: Synthetic oligonucleotide
  Antisense strand to SEQ ID NO: 1778715
auacauaugagauagacca

SEQ ID NO: 1778717 - RNA, 19 nt, Artificial Sequence
  Description of Artificial Sequence: Synthetic oligonucleotide
  Sense strand starting at position 2549 of SEQ ID NO: 1562869
gacggugacccucaaacuu

SEQ ID NO: 1778718 - RNA, 19 nt, Artificial Sequence
  Description of Artificial Sequence: Synthetic oligonucleotide
  Antisense strand to SEQ ID NO: 1778717
aaguuugagggucaccguc

SEQ ID NO: 1778719 - RNA, 19 nt, Artificial Sequence
  Description of Artificial Sequence: Synthetic oligonucleotide
  Sense strand starting at position 2628 of SEQ ID NO: 1562869
cuggacaacugagaaauga

SEQ ID NO: 1778720 - RNA, 19 nt, Artificial Sequence
  Description of Artificial Sequence: Synthetic oligonucleotide
  Antisense strand to SEQ ID NO: 1778719
ucauuucucaguuguccag

SEQ ID NO: 1778721 - RNA, 19 nt, Artificial Sequence
  Description of Artificial Sequence: Synthetic oligonucleotide
  Sense strand starting at position 2704 of SEQ ID NO: 1562869
guuucacuguguguauguu

SEQ ID NO: 1778722 - RNA, 19 nt, Artificial Sequence
  Description of Artificial Sequence: Synthetic oligonucleotide
  Antisense strand to SEQ ID NO: 1778721
aacauacacacagugaaac

SEQ ID NO: 1778723 - RNA, 19 nt, Artificial Sequence
  Description of Artificial Sequence: Synthetic oligonucleotide
  Sense strand starting at position 2714 of SEQ ID NO: 1562869
guguauguuucaccgauuc

SEQ ID NO: 1778724 - RNA, 19 nt, Artificial Sequence
  Description of Artificial Sequence: Synthetic oligonucleotide
  Antisense strand to SEQ ID NO: 1778723
gaaucggugaaacauacac

SEQ ID NO: 1778725 - RNA, 19 nt, Artificial Sequence
  Description of Artificial Sequence: Synthetic oligonucleotide
  Sense strand starting at position 2767 of SEQ ID NO: 1562869
ggagguuuauuagaaacac

SEQ ID NO: 1778726 - RNA, 19 nt, Artificial Sequence
  Description of Artificial Sequence: Synthetic oligonucleotide
  Antisense strand to SEQ ID NO: 1778725
guguuucuaauaaaccucc

SEQ ID NO: 1778727 - RNA, 19 nt, Artificial Sequence
  Description of Artificial Sequence: Synthetic oligonucleotide
  Sense strand starting at position 3108 of SEQ ID NO: 1562869
caguaagucagagguggaa

SEQ ID NO: 1778728 - RNA, 19 nt, Artificial Sequence
  Description of Artificial Sequence: Synthetic oligonucleotide
  Antisense strand to SEQ ID NO: 1778727
uuccaccucugacuuacug

SEQ ID NO: 1778729 - RNA, 19 nt, Artificial Sequence
  Description of Artificial Sequence: Synthetic oligonucleotide
  Sense strand starting at position 3110 of SEQ ID NO: 1562869
guaagucagagguggaauc

SEQ ID NO: 1778730 - RNA, 19 nt, Artificial Sequence
  Description of Artificial Sequence: Synthetic oligonucleotide
  Antisense strand to SEQ ID NO: 1778729
gauuccaccucugacuuac

SEQ ID NO: 1778731 - RNA, 19 nt, Artificial Sequence
  Description of Artificial Sequence: Synthetic oligonucleotide
  Sense strand starting at position 3734 of SEQ ID NO: 1562869
guaugaggauuacaggcau

SEQ ID NO: 1778732 - RNA, 19 nt, Artificial Sequence
  Description of Artificial Sequence: Synthetic oligonucleotide
  Antisense strand to SEQ ID NO: 1778731
augccuguaauccucauac

SEQ ID NO: 1778733 - RNA, 19 nt, Artificial Sequence
  Description of Artificial Sequence: Synthetic oligonucleotide
  Sense strand starting at position 3841 of SEQ ID NO: 1562869
cagugauguggagggaaca

SEQ ID NO: 1778734 - RNA, 19 nt, Artificial Sequence
  Description of Artificial Sequence: Synthetic oligonucleotide
  Antisense strand to SEQ ID NO: 1778733
uguucccuccacaucacug

SEQ ID NO: 1778735 - RNA, 19 nt, Artificial Sequence
  Description of Artificial Sequence: Synthetic oligonucleotide
  Sense strand starting at position 3842 of SEQ ID NO: 1562869
agugauguggagggaacau

SEQ ID NO: 1778736 - RNA, 19 nt, Artificial Sequence
  Description of Artificial Sequence: Synthetic oligonucleotide
  Antisense strand to SEQ ID NO: 1778735
auguucccuccacaucacu

SEQ ID NO: 1778737 - RNA, 19 nt, Artificial Sequence
  Description of Artificial Sequence: Synthetic oligonucleotide
  Sense strand starting at position 3873 of SEQ ID NO: 1562869
gagucagacccacgaaaga

SEQ ID NO: 1778738 - RNA, 19 nt, Artificial Sequence
  Description of Artificial Sequence: Synthetic oligonucleotide
  Antisense strand to SEQ ID NO: 1778737
ucuuucgugggucugacuc

SEQ ID NO: 1778739 - RNA, 19 nt, Artificial Sequence
  Description of Artificial Sequence: Synthetic oligonucleotide
  Sense strand starting at position 169 of SEQ ID NO: 1562870
gugggugacuugaagggau

SEQ ID NO: 1778740 - RNA, 19 nt, Artificial Sequence
  Description of Artificial Sequence: Synthetic oligonucleotide
  Antisense strand to SEQ ID NO: 1778739
aucccuucaagucacccac

SEQ ID NO: 1778741 - RNA, 19 nt, Artificial Sequence
  Description of Artificial Sequence: Synthetic oligonucleotide
  Sense strand starting at position 172 of SEQ ID NO: 1562870
ggugacuugaagggauacu

SEQ ID NO: 1778742 - RNA, 19 nt, Artificial Sequence
  Description of Artificial Sequence: Synthetic oligonucleotide
  Antisense strand to SEQ ID NO: 1778741
aguaucccuucaagucacc

SEQ ID NO: 1778743 - RNA, 19 nt, Artificial Sequence
  Description of Artificial Sequence: Synthetic oligonucleotide
  Sense strand starting at position 182 of SEQ ID NO: 1562870
agggauacuguuggcugaa

SEQ ID NO: 1778744 - RNA, 19 nt, Artificial Sequence
  Description of Artificial Sequence: Synthetic oligonucleotide
  Antisense strand to SEQ ID NO: 1778743
uucagccaacaguaucccu

SEQ ID NO: 1778745 - RNA, 19 nt, Artificial Sequence
  Description of Artificial Sequence: Synthetic oligonucleotide
  Sense strand starting at position 183 of SEQ ID NO: 1562870
gggauacuguuggcugaau

SEQ ID NO: 1778746 - RNA, 19 nt, Artificial Sequence
  Description of Artificial Sequence: Synthetic oligonucleotide
  Antisense strand to SEQ ID NO: 1778745
auucagccaacaguauccc

SEQ ID NO: 1778747 - RNA, 19 nt, Artificial Sequence
  Description of Artificial Sequence: Synthetic oligonucleotide
  Sense strand starting at position 185 of SEQ ID NO: 1562870
gauacuguuggcugaauga

SEQ ID NO: 1778748 - RNA, 19 nt, Artificial Sequence
  Description of Artificial Sequence: Synthetic oligonucleotide
  Antisense strand to SEQ ID NO: 1778747
ucauucagccaacaguauc

SEQ ID NO: 1778749 - RNA, 19 nt, Artificial Sequence
  Description of Artificial Sequence: Synthetic oligonucleotide
  Sense strand starting at position 194 of SEQ ID NO: 1562870
ggcugaaugaagugaguga

SEQ ID NO: 1778750 - RNA, 19 nt, Artificial Sequence
  Description of Artificial Sequence: Synthetic oligonucleotide
  Antisense strand to SEQ ID NO: 1778749
ucacucacuucauucagcc

SEQ ID NO: 1778751 - RNA, 19 nt, Artificial Sequence
  Description of Artificial Sequence: Synthetic oligonucleotide
  Sense strand starting at position 456 of SEQ ID NO: 1562870
ggcauagacugaucugagu

SEQ ID NO: 1778752 - RNA, 19 nt, Artificial Sequence
  Description of Artificial Sequence: Synthetic oligonucleotide
  Antisense strand to SEQ ID NO: 1778751
acucagaucagucuaugcc

SEQ ID NO: 1778753 - RNA, 19 nt, Artificial Sequence
  Description of Artificial Sequence: Synthetic oligonucleotide
  Sense strand starting at position 469 of SEQ ID NO: 1562870
cugaguucucaaggcuuaa

SEQ ID NO: 1778754 - RNA, 19 nt, Artificial Sequence
  Description of Artificial Sequence: Synthetic oligonucleotide
  Antisense strand to SEQ ID NO: 1778753
uuaagccuugagaacucag

SEQ ID NO: 1778755 - RNA, 19 nt, Artificial Sequence
  Description of Artificial Sequence: Synthetic oligonucleotide
  Sense strand starting at position 473 of SEQ ID NO: 1562870
guucucaaggcuuaaacca

SEQ ID NO: 1778756 - RNA, 19 nt, Artificial Sequence
  Description of Artificial Sequence: Synthetic oligonucleotide
  Antisense strand to SEQ ID NO: 1778755
ugguuuaagccuugagaac

SEQ ID NO: 1778757 - RNA, 19 nt, Artificial Sequence
  Description of Artificial Sequence: Synthetic oligonucleotide
  Sense strand starting at position 584 of SEQ ID NO: 1562870
aguguuagcucucucacca

SEQ ID NO: 1778758 - RNA, 19 nt, Artificial Sequence
  Description of Artificial Sequence: Synthetic oligonucleotide
  Antisense strand to SEQ ID NO: 1778757
uggugagagagcuaacacu

SEQ ID NO: 1778759 - RNA, 19 nt, Artificial Sequence
  Description of Artificial Sequence: Synthetic oligonucleotide
  Sense strand starting at position 623 of SEQ ID NO: 1562870
ccgugcugggucuggaaua

SEQ ID NO: 1778760 - RNA, 19 nt, Artificial Sequence
  Description of Artificial Sequence: Synthetic oligonucleotide
  Antisense strand to SEQ ID NO: 1778759
uauuccagacccagcacgg

SEQ ID NO: 1778761 - RNA, 19 nt, Artificial Sequence
  Description of Artificial Sequence: Synthetic oligonucleotide
  Sense strand starting at position 703 of SEQ ID NO: 1562870
ggccaagaaccguguccaa

SEQ ID NO: 1778762 - RNA, 19 nt, Artificial Sequence
  Description of Artificial Sequence: Synthetic oligonucleotide
  Antisense strand to SEQ ID NO: 1778761
uuggacacgguucuuggcc

SEQ ID NO: 1778763 - RNA, 19 nt, Artificial Sequence
  Description of Artificial Sequence: Synthetic oligonucleotide
  Sense strand starting at position 716 of SEQ ID NO: 1562870
guccaauacaucugugagu

SEQ ID NO: 1778764 - RNA, 19 nt, Artificial Sequence
  Description of Artificial Sequence: Synthetic oligonucleotide
  Antisense strand to SEQ ID NO: 1778763
acucacagauguauuggac

SEQ ID NO: 1778765 - RNA, 19 nt, Artificial Sequence
  Description of Artificial Sequence: Synthetic oligonucleotide
  Sense strand starting at position 823 of SEQ ID NO: 1562870
cuaagaguguggguccuaa

SEQ ID NO: 1778766 - RNA, 19 nt, Artificial Sequence
  Description of Artificial Sequence: Synthetic oligonucleotide
  Antisense strand to SEQ ID NO: 1778765
uuaggacccacacucuuag

SEQ ID NO: 1778767 - RNA, 19 nt, Artificial Sequence
  Description of Artificial Sequence: Synthetic oligonucleotide
  Sense strand starting at position 852 of SEQ ID NO: 1562870
aggugacucucucccucaa

SEQ ID NO: 1778768 - RNA, 19 nt, Artificial Sequence
  Description of Artificial Sequence: Synthetic oligonucleotide
  Antisense strand to SEQ ID NO: 1778767
uugagggagagagucaccu

SEQ ID NO: 1778769 - RNA, 19 nt, Artificial Sequence
  Description of Artificial Sequence: Synthetic oligonucleotide
  Sense strand starting at position 882 of SEQ ID NO: 1562870
caaugauguuagcucccga

SEQ ID NO: 1778770 - RNA, 19 nt, Artificial Sequence
  Description of Artificial Sequence: Synthetic oligonucleotide
  Antisense strand to SEQ ID NO: 1778769
ucgggagcuaacaucauug

SEQ ID NO: 1778771 - RNA, 19 nt, Artificial Sequence
  Description of Artificial Sequence: Synthetic oligonucleotide
  Sense strand starting at position 1039 of SEQ ID NO: 1562870
agaggucauguccgcagau

SEQ ID NO: 1778772 - RNA, 19 nt, Artificial Sequence
  Description of Artificial Sequence: Synthetic oligonucleotide
  Antisense strand to SEQ ID NO: 1778771
aucugcggacaugaccucu

SEQ ID NO: 1778773 - RNA, 19 nt, Artificial Sequence
  Description of Artificial Sequence: Synthetic oligonucleotide
  Sense strand starting at position 1041 of SEQ ID NO: 1562870
aggucauguccgcagauca

SEQ ID NO: 1778774 - RNA, 19 nt, Artificial Sequence
  Description of Artificial Sequence: Synthetic oligonucleotide
  Antisense strand to SEQ ID NO: 1778773
ugaucugcggacaugaccu

SEQ ID NO: 1778775 - RNA, 19 nt, Artificial Sequence
  Description of Artificial Sequence: Synthetic oligonucleotide
  Sense strand starting at position 1162 of SEQ ID NO: 1562870
ggcaguguccgccaaccau

SEQ ID NO: 1778776 - RNA, 19 nt, Artificial Sequence
  Description of Artificial Sequence: Synthetic oligonucleotide
  Antisense strand to SEQ ID NO: 1778775
augguuggcggacacugcc

SEQ ID NO: 1778777 - RNA, 19 nt, Artificial Sequence
  Description of Artificial Sequence: Synthetic oligonucleotide
  Sense strand starting at position 1245 of SEQ ID NO: 1562870
cuuccauaccuguaguaag

SEQ ID NO: 1778778 - RNA, 19 nt, Artificial Sequence
  Description of Artificial Sequence: Synthetic oligonucleotide
  Antisense strand to SEQ ID NO: 1778777
cuuacuacagguauggaag

SEQ ID NO: 1778779 - RNA, 19 nt, Artificial Sequence
  Description of Artificial Sequence: Synthetic oligonucleotide
  Sense strand starting at position 2713 of SEQ ID NO: 1562870
ugaggcuuccgcagagguu

SEQ ID NO: 1778780 - RNA, 19 nt, Artificial Sequence
  Description of Artificial Sequence: Synthetic oligonucleotide
  Antisense strand to SEQ ID NO: 1778779
aaccucugcggaagccuca

SEQ ID NO: 1778781 - RNA, 19 nt, Artificial Sequence
  Description of Artificial Sequence: Synthetic oligonucleotide
  Sense strand starting at position 2714 of SEQ ID NO: 1562870
gaggcuuccgcagagguuu

SEQ ID NO: 1778782 - RNA, 19 nt, Artificial Sequence
  Description of Artificial Sequence: Synthetic oligonucleotide
  Antisense strand to SEQ ID NO: 1778781
aaaccucugcggaagccuc

SEQ ID NO: 1778783 - RNA, 19 nt, Artificial Sequence
  Description of Artificial Sequence: Synthetic oligonucleotide
  Sense strand starting at position 3166 of SEQ ID NO: 1562870
acgaaaguugaugguuacu

SEQ ID NO: 1778784 - RNA, 19 nt, Artificial Sequence
  Description of Artificial Sequence: Synthetic oligonucleotide
  Antisense strand to SEQ ID NO: 1778783
aguaaccaucaacuuucgu

SEQ ID NO: 1778785 - RNA, 19 nt, Artificial Sequence
  Description of Artificial Sequence: Synthetic oligonucleotide
  Sense strand starting at position 3168 of SEQ ID NO: 1562870
gaaaguugaugguuacuac

SEQ ID NO: 1778786 - RNA, 19 nt, Artificial Sequence
  Description of Artificial Sequence: Synthetic oligonucleotide
  Antisense strand to SEQ ID NO: 1778785
guaguaaccaucaacuuuc

SEQ ID NO: 1778787 - RNA, 19 nt, Artificial Sequence
  Description of Artificial Sequence: Synthetic oligonucleotide
  Sense strand starting at position 3171 of SEQ ID NO: 1562870
aguugaugguuacuacaaa

SEQ ID NO: 1778788 - RNA, 19 nt, Artificial Sequence
  Description of Artificial Sequence: Synthetic oligonucleotide
  Antisense strand to SEQ ID NO: 1778787
uuuguaguaaccaucaacu

SEQ ID NO: 1778789 - RNA, 19 nt, Artificial Sequence
  Description of Artificial Sequence: Synthetic oligonucleotide
  Sense strand starting at position 3221 of SEQ ID NO: 1562870
uuggguuucuguccagacu

SEQ ID NO: 1778790 - RNA, 19 nt, Artificial Sequence
  Description of Artificial Sequence: Synthetic oligonucleotide
  Antisense strand to SEQ ID NO: 1778789
agucuggacagaaacccaa

SEQ ID NO: 1778791 - RNA, 19 nt, Artificial Sequence
  Description of Artificial Sequence: Synthetic oligonucleotide
  Sense strand starting at position 3222 of SEQ ID NO: 1562870
uggguuucuguccagacuu

SEQ ID NO: 1778792 - RNA, 19 nt, Artificial Sequence
  Description of Artificial Sequence: Synthetic oligonucleotide
  Antisense strand to SEQ ID NO: 1778791
aagucuggacagaaaccca

SEQ ID NO: 1778793 - RNA, 19 nt, Artificial Sequence
  Description of Artificial Sequence: Synthetic oligonucleotide
  Sense strand starting at position 3316 of SEQ ID NO: 1562870
uccugaucuuugcuuguga

SEQ ID NO: 1778794 - RNA, 19 nt, Artificial Sequence
  Description of Artificial Sequence: Synthetic oligonucleotide
  Antisense strand to SEQ ID NO: 1778793
ucacaagcaaagaucagga

SEQ ID NO: 1778795 - RNA, 19 nt, Artificial Sequence
  Description of Artificial Sequence: Synthetic oligonucleotide
  Sense strand starting at position 3318 of SEQ ID NO: 1562870
cugaucuuugcuugugaca

SEQ ID NO: 1778796 - RNA, 19 nt, Artificial Sequence
  Description of Artificial Sequence: Synthetic oligonucleotide
  Antisense strand to SEQ ID NO: 1778795
ugucacaagcaaagaucag

SEQ ID NO: 1778797 - RNA, 19 nt, Artificial Sequence
  Description of Artificial Sequence: Synthetic oligonucleotide
  Sense strand starting at position 3336 of SEQ ID NO: 1562870
aagauaaccuguguaggga

SEQ ID NO: 1778798 - RNA, 19 nt, Artificial Sequence
  Description of Artificial Sequence: Synthetic oligonucleotide
  Antisense strand to SEQ ID NO: 1778797
ucccuacacagguuaucuu

SEQ ID NO: 1778799 - RNA, 19 nt, Artificial Sequence
  Description of Artificial Sequence: Synthetic oligonucleotide
  Sense strand starting at position 3353 of SEQ ID NO: 1562870
gacugcuuccuacgugaag

SEQ ID NO: 1778800 - RNA, 19 nt, Artificial Sequence
  Description of Artificial Sequence: Synthetic oligonucleotide
  Antisense strand to SEQ ID NO: 1778799
cuucacguaggaagcaguc

SEQ ID NO: 1778801 - RNA, 19 nt, Artificial Sequence
  Description of Artificial Sequence: Synthetic oligonucleotide
  Sense strand starting at position 3354 of SEQ ID NO: 1562870
acugcuuccuacgugaagu

SEQ ID NO: 1778802 - RNA, 19 nt, Artificial Sequence
  Description of Artificial Sequence: Synthetic oligonucleotide
  Antisense strand to SEQ ID NO: 1778801
acuucacguaggaagcagu

SEQ ID NO: 1778803 - RNA, 19 nt, Artificial Sequence
  Description of Artificial Sequence: Synthetic oligonucleotide
  Sense strand starting at position 3392 of SEQ ID NO: 1562870
auuggaagguccuagaaau

SEQ ID NO: 1778804 - RNA, 19 nt, Artificial Sequence
  Description of Artificial Sequence: Synthetic oligonucleotide
  Antisense strand to SEQ ID NO: 1778803
auuucuaggaccuuccaau

SEQ ID NO: 1778805 - RNA, 19 nt, Artificial Sequence
  Description of Artificial Sequence: Synthetic oligonucleotide
  Sense strand starting at position 3445 of SEQ ID NO: 1562870
ggcaucuuugcuggugacu

SEQ ID NO: 1778806 - RNA, 19 nt, Artificial Sequence
  Description of Artificial Sequence: Synthetic oligonucleotide
  Antisense strand to SEQ ID NO: 1778805
agucaccagcaaagaugcc

SEQ ID NO: 1778807 - RNA, 19 nt, Artificial Sequence
  Description of Artificial Sequence: Synthetic oligonucleotide
  Sense strand starting at position 3478 of SEQ ID NO: 1562870
ucaggcacuugucuuugaa

SEQ ID NO: 1778808 - RNA, 19 nt, Artificial Sequence
  Description of Artificial Sequence: Synthetic oligonucleotide
  Antisense strand to SEQ ID NO: 1778807
uucaaagacaagugccuga

SEQ ID NO: 1778809 - RNA, 19 nt, Artificial Sequence
  Description of Artificial Sequence: Synthetic oligonucleotide
  Sense strand starting at position 3480 of SEQ ID NO: 1562870
aggcacuugucuuugaaug

SEQ ID NO: 1778810 - RNA, 19 nt, Artificial Sequence
  Description of Artificial Sequence: Synthetic oligonucleotide
  Antisense strand to SEQ ID NO: 1778809
cauucaaagacaagugccu

SEQ ID NO: 1778811 - RNA, 19 nt, Artificial Sequence
  Description of Artificial Sequence: Synthetic oligonucleotide
  Sense strand starting at position 3498 of SEQ ID NO: 1562870
gguggucuuaccugcaauu

SEQ ID NO: 1778812 - RNA, 19 nt, Artificial Sequence
  Description of Artificial Sequence: Synthetic oligonucleotide
  Antisense strand to SEQ ID NO: 1778811
aauugcagguaagaccacc

SEQ ID NO: 1778813 - RNA, 19 nt, Artificial Sequence
  Description of Artificial Sequence: Synthetic oligonucleotide
  Sense strand starting at position 3573 of SEQ ID NO: 1562870
gacggugacccucaaacuu

SEQ ID NO: 1778814 - RNA, 19 nt, Artificial Sequence
  Description of Artificial Sequence: Synthetic oligonucleotide
  Antisense strand to SEQ ID NO: 1778813
aaguuugagggucaccguc

SEQ ID NO: 1778815 - RNA, 19 nt, Artificial Sequence
  Description of Artificial Sequence: Synthetic oligonucleotide
  Sense strand starting at position 3652 of SEQ ID NO: 1562870
cuggacaacugagaaauga

SEQ ID NO: 1778816 - RNA, 19 nt, Artificial Sequence
  Description of Artificial Sequence: Synthetic oligonucleotide
  Antisense strand to SEQ ID NO: 1778815
ucauuucucaguuguccag

SEQ ID NO: 1778817 - RNA, 19 nt, Artificial Sequence
  Description of Artificial Sequence: Synthetic oligonucleotide
  Sense strand starting at position 3791 of SEQ ID NO: 1562870
ggagguuuauuagaaacac

SEQ ID NO: 1778818 - RNA, 19 nt, Artificial Sequence
  Description of Artificial Sequence: Synthetic oligonucleotide
  Antisense strand to SEQ ID NO: 1778817
guguuucuaauaaaccucc

SEQ ID NO: 1778819 - RNA, 19 nt, Artificial Sequence
  Description of Artificial Sequence: Synthetic oligonucleotide
  Sense strand starting at position 117 of SEQ ID NO: 1562871
ucagucucuugaguaggua

SEQ ID NO: 1778820 - RNA, 19 nt, Artificial Sequence
  Description of Artificial Sequence: Synthetic oligonucleotide
  Antisense strand to SEQ ID NO: 1778819
uaccuacucaagagacuga

SEQ ID NO: 1778821 - RNA, 19 nt, Artificial Sequence
  Description of Artificial Sequence: Synthetic oligonucleotide
  Sense strand starting at position 373 of SEQ ID NO: 1562871
gagaaagucucugaugaag

SEQ ID NO: 1778822 - RNA, 19 nt, Artificial Sequence
  Description of Artificial Sequence: Synthetic oligonucleotide
  Antisense strand to SEQ ID NO: 1778821
cuucaucagagacuuucuc

SEQ ID NO: 1778823 - RNA, 19 nt, Artificial Sequence
  Description of Artificial Sequence: Synthetic oligonucleotide
  Sense strand starting at position 558 of SEQ ID NO: 1562871
aaauauguggaguaaagcu

SEQ ID NO: 1778824 - RNA, 19 nt, Artificial Sequence
  Description of Artificial Sequence: Synthetic oligonucleotide
  Antisense strand to SEQ ID NO: 1778823
agcuuuacuccacauauuu

SEQ ID NO: 1778825 - RNA, 19 nt, Artificial Sequence
  Description of Artificial Sequence: Synthetic oligonucleotide
  Sense strand starting at position 640 of SEQ ID NO: 1562871
uaagcaauccagggagucu

SEQ ID NO: 1778826 - RNA, 19 nt, Artificial Sequence
  Description of Artificial Sequence: Synthetic oligonucleotide
  Antisense strand to SEQ ID NO: 1778825
agacucccuggauugcuua

SEQ ID NO: 1778827 - RNA, 19 nt, Artificial Sequence
  Description of Artificial Sequence: Synthetic oligonucleotide
  Sense strand starting at position 704 of SEQ ID NO: 1562871
gcaggagcccuguguagaa

SEQ ID NO: 1778828 - RNA, 19 nt, Artificial Sequence
  Description of Artificial Sequence: Synthetic oligonucleotide
  Antisense strand to SEQ ID NO: 1778827
uucuacacagggcuccugc

SEQ ID NO: 1778829 - RNA, 19 nt, Artificial Sequence
  Description of Artificial Sequence: Synthetic oligonucleotide
  Sense strand starting at position 711 of SEQ ID NO: 1562871
cccuguguagaauguuuau

SEQ ID NO: 1778830 - RNA, 19 nt, Artificial Sequence
  Description of Artificial Sequence: Synthetic oligonucleotide
  Antisense strand to SEQ ID NO: 1778829
auaaacauucuacacaggg

SEQ ID NO: 1778831 - RNA, 19 nt, Artificial Sequence
  Description of Artificial Sequence: Synthetic oligonucleotide
  Sense strand starting at position 1264 of SEQ ID NO: 1562871
gugguccugcccuaggaau

SEQ ID NO: 1778832 - RNA, 19 nt, Artificial Sequence
  Description of Artificial Sequence: Synthetic oligonucleotide
  Antisense strand to SEQ ID NO: 1778831
auuccuagggcaggaccac

SEQ ID NO: 1778833 - RNA, 19 nt, Artificial Sequence
  Description of Artificial Sequence: Synthetic oligonucleotide
  Sense strand starting at position 1355 of SEQ ID NO: 1562871
uuucuuguguuguuuaauc

SEQ ID NO: 1778834 - RNA, 19 nt, Artificial Sequence
  Description of Artificial Sequence: Synthetic oligonucleotide
  Antisense strand to SEQ ID NO: 1778833
gauuaaacaacacaagaaa

SEQ ID NO: 1778835 - RNA, 19 nt, Artificial Sequence
  Description of Artificial Sequence: Synthetic oligonucleotide
  Sense strand starting at position 1357 of SEQ ID NO: 1562871
ucuuguguuguuuaaucca

SEQ ID NO: 1778836 - RNA, 19 nt, Artificial Sequence
  Description of Artificial Sequence: Synthetic oligonucleotide
  Antisense strand to SEQ ID NO: 1778835
uggauuaaacaacacaaga

SEQ ID NO: 1778837 - RNA, 19 nt, Artificial Sequence
  Description of Artificial Sequence: Synthetic oligonucleotide
  Sense strand starting at position 1360 of SEQ ID NO: 1562871
uguguuguuuaauccauac

SEQ ID NO: 1778838 - RNA, 19 nt, Artificial Sequence
  Description of Artificial Sequence: Synthetic oligonucleotide
  Antisense strand to SEQ ID NO: 1778837
guauggauuaaacaacaca

SEQ ID NO: 1778839 - RNA, 19 nt, Artificial Sequence
  Description of Artificial Sequence: Synthetic oligonucleotide
  Sense strand starting at position 1364 of SEQ ID NO: 1562871
uuguuuaauccauaccagu

SEQ ID NO: 1778840 - RNA, 19 nt, Artificial Sequence
  Description of Artificial Sequence: Synthetic oligonucleotide
  Antisense strand to SEQ ID NO: 1778839
acugguauggauuaaacaa

SEQ ID NO: 1778841 - RNA, 19 nt, Artificial Sequence
  Description of Artificial Sequence: Synthetic oligonucleotide
  Sense strand starting at position 1406 of SEQ ID NO: 1562871
auaagagaguucuuuauac

SEQ ID NO: 1778842 - RNA, 19 nt, Artificial Sequence
  Description of Artificial Sequence: Synthetic oligonucleotide
  Antisense strand to SEQ ID NO: 1778841
guauaaagaacucucuuau

SEQ ID NO: 1778843 - RNA, 19 nt, Artificial Sequence
  Description of Artificial Sequence: Synthetic oligonucleotide
  Sense strand starting at position 1479 of SEQ ID NO: 1562871
gagggucaauagcuugaau

SEQ ID NO: 1778844 - RNA, 19 nt, Artificial Sequence
  Description of Artificial Sequence: Synthetic oligonucleotide
  Antisense strand to SEQ ID NO: 1778843
auucaagcuauugacccuc

SEQ ID NO: 1778845 - RNA, 19 nt, Artificial Sequence
  Description of Artificial Sequence: Synthetic oligonucleotide
  Sense strand starting at position 1482 of SEQ ID NO: 1562871
ggucaauagcuugaaugca

SEQ ID NO: 1778846 - RNA, 19 nt, Artificial Sequence
  Description of Artificial Sequence: Synthetic oligonucleotide
  Antisense strand to SEQ ID NO: 1778845
ugcauucaagcuauugacc

SEQ ID NO: 1778847 - RNA, 19 nt, Artificial Sequence
  Description of Artificial Sequence: Synthetic oligonucleotide
  Sense strand starting at position 1513 of SEQ ID NO: 1562871
cuuuguucuaaggagagca

SEQ ID NO: 1778848 - RNA, 19 nt, Artificial Sequence
  Description of Artificial Sequence: Synthetic oligonucleotide
  Antisense strand to SEQ ID NO: 1778847
ugcucuccuuagaacaaag

SEQ ID NO: 1778849 - RNA, 19 nt, Artificial Sequence
  Description of Artificial Sequence: Synthetic oligonucleotide
  Sense strand starting at position 1515 of SEQ ID NO: 1562871
uuguucuaaggagagcaua

SEQ ID NO: 1778850 - RNA, 19 nt, Artificial Sequence
  Description of Artificial Sequence: Synthetic oligonucleotide
  Antisense strand to SEQ ID NO: 1778849
uaugcucuccuuagaacaa

SEQ ID NO: 1778851 - RNA, 19 nt, Artificial Sequence
  Description of Artificial Sequence: Synthetic oligonucleotide
  Sense strand starting at position 1543 of SEQ ID NO: 1562871
ccauccaucuucuuaggga

SEQ ID NO: 1778852 - RNA, 19 nt, Artificial Sequence
  Description of Artificial Sequence: Synthetic oligonucleotide
  Antisense strand to SEQ ID NO: 1778851
ucccuaagaagauggaugg

SEQ ID NO: 1778853 - RNA, 19 nt, Artificial Sequence
  Description of Artificial Sequence: Synthetic oligonucleotide
  Sense strand starting at position 1652 of SEQ ID NO: 1562871
gaaacacugugcuuuguga

SEQ ID NO: 1778854 - RNA, 19 nt, Artificial Sequence
  Description of Artificial Sequence: Synthetic oligonucleotide
  Antisense strand to SEQ ID NO: 1778853
ucacaaagcacaguguuuc

SEQ ID NO: 1778855 - RNA, 19 nt, Artificial Sequence
  Description of Artificial Sequence: Synthetic oligonucleotide
  Sense strand starting at position 1654 of SEQ ID NO: 1562871
aacacugugcuuugugaag

SEQ ID NO: 1778856 - RNA, 19 nt, Artificial Sequence
  Description of Artificial Sequence: Synthetic oligonucleotide
  Antisense strand to SEQ ID NO: 1778855
cuucacaaagcacaguguu

SEQ ID NO: 1778857 - RNA, 19 nt, Artificial Sequence
  Description of Artificial Sequence: Synthetic oligonucleotide
  Sense strand starting at position 1746 of SEQ ID NO: 1562871
aggguucccgagagcuguu

SEQ ID NO: 1778858 - RNA, 19 nt, Artificial Sequence
  Description of Artificial Sequence: Synthetic oligonucleotide
  Antisense strand to SEQ ID NO: 1778857
aacagcucucgggaacccu

SEQ ID NO: 1778859 - RNA, 19 nt, Artificial Sequence
  Description of Artificial Sequence: Synthetic oligonucleotide
  Sense strand starting at position 1782 of SEQ ID NO: 1562871
gccacacucccugggaauu

SEQ ID NO: 1778860 - RNA, 19 nt, Artificial Sequence
  Description of Artificial Sequence: Synthetic oligonucleotide
  Antisense strand to SEQ ID NO: 1778859
aauucccagggaguguggc

SEQ ID NO: 1778861 - RNA, 19 nt, Artificial Sequence
  Description of Artificial Sequence: Synthetic oligonucleotide
  Sense strand starting at position 2013 of SEQ ID NO: 1562871
cugggcugccugggauaau

SEQ ID NO: 1778862 - RNA, 19 nt, Artificial Sequence
  Description of Artificial Sequence: Synthetic oligonucleotide
  Antisense strand to SEQ ID NO: 1778861
auuaucccaggcagcccag

SEQ ID NO: 1778863 - RNA, 19 nt, Artificial Sequence
  Description of Artificial Sequence: Synthetic oligonucleotide
  Sense strand starting at position 2175 of SEQ ID NO: 1562871
cuguaucgguuucuuacaa

SEQ ID NO: 1778864 - RNA, 19 nt, Artificial Sequence
  Description of Artificial Sequence: Synthetic oligonucleotide
  Antisense strand to SEQ ID NO: 1778863
uuguaagaaaccgauacag

SEQ ID NO: 1778865 - RNA, 19 nt, Artificial Sequence
  Description of Artificial Sequence: Synthetic oligonucleotide
  Sense strand starting at position 2227 of SEQ ID NO: 1562871
agagauuuguugcaagcca

SEQ ID NO: 1778866 - RNA, 19 nt, Artificial Sequence
  Description of Artificial Sequence: Synthetic oligonucleotide
  Antisense strand to SEQ ID NO: 1778865
uggcuugcaacaaaucucu

SEQ ID NO: 1778867 - RNA, 19 nt, Artificial Sequence
  Description of Artificial Sequence: Synthetic oligonucleotide
  Sense strand starting at position 2254 of SEQ ID NO: 1562871
gcuggugcuucccuagaca

SEQ ID NO: 1778868 - RNA, 19 nt, Artificial Sequence
  Description of Artificial Sequence: Synthetic oligonucleotide
  Antisense strand to SEQ ID NO: 1778867
ugucuagggaagcaccagc

SEQ ID NO: 1778869 - RNA, 19 nt, Artificial Sequence
  Description of Artificial Sequence: Synthetic oligonucleotide
  Sense strand starting at position 2262 of SEQ ID NO: 1562871
uucccuagacacugaguua

SEQ ID NO: 1778870 - RNA, 19 nt, Artificial Sequence
  Description of Artificial Sequence: Synthetic oligonucleotide
  Antisense strand to SEQ ID NO: 1778869
uaacucagugucuagggaa

SEQ ID NO: 1778871 - RNA, 19 nt, Artificial Sequence
  Description of Artificial Sequence: Synthetic oligonucleotide
  Sense strand starting at position 2358 of SEQ ID NO: 1562871
gagguuugccuuuggacca

SEQ ID NO: 1778872 - RNA, 19 nt, Artificial Sequence
  Description of Artificial Sequence: Synthetic oligonucleotide
  Antisense strand to SEQ ID NO: 1778871
ugguccaaaggcaaaccuc

SEQ ID NO: 1778873 - RNA, 19 nt, Artificial Sequence
  Description of Artificial Sequence: Synthetic oligonucleotide
  Sense strand starting at position 2430 of SEQ ID NO: 1562871
aggguuaaaugcucguaga

SEQ ID NO: 1778874 - RNA, 19 nt, Artificial Sequence
  Description of Artificial Sequence: Synthetic oligonucleotide
  Antisense strand to SEQ ID NO: 1778873
ucuacgagcauuuaacccu

SEQ ID NO: 1778875 - RNA, 19 nt, Artificial Sequence
  Description of Artificial Sequence: Synthetic oligonucleotide
  Sense strand starting at position 2431 of SEQ ID NO: 1562871
ggguuaaaugcucguagau

SEQ ID NO: 1778876 - RNA, 19 nt, Artificial Sequence
  Description of Artificial Sequence: Synthetic oligonucleotide
  Antisense strand to SEQ ID NO: 1778875
aucuacgagcauuuaaccc

SEQ ID NO: 1778877 - RNA, 19 nt, Artificial Sequence
  Description of Artificial Sequence: Synthetic oligonucleotide
  Sense strand starting at position 2887 of SEQ ID NO: 1562871
gccaaccuguguuuguaua

SEQ ID NO: 1778878 - RNA, 19 nt, Artificial Sequence
  Description of Artificial Sequence: Synthetic oligonucleotide
  Antisense strand to SEQ ID NO: 1778877
uauacaaacacagguuggc

SEQ ID NO: 1778879 - RNA, 19 nt, Artificial Sequence
  Description of Artificial Sequence: Synthetic oligonucleotide
  Sense strand starting at position 2888 of SEQ ID NO: 1562871
ccaaccuguguuuguauau

SEQ ID NO: 1778880 - RNA, 19 nt, Artificial Sequence
  Description of Artificial Sequence: Synthetic oligonucleotide
  Antisense strand to SEQ ID NO: 1778879
auauacaaacacagguugg

SEQ ID NO: 1778881 - RNA, 19 nt, Artificial Sequence
  Description of Artificial Sequence: Synthetic oligonucleotide
  Sense strand starting at position 3034 of SEQ ID NO: 1562871
cugcgaaagugacuaucaa

SEQ ID NO: 1778882 - RNA, 19 nt, Artificial Sequence
  Description of Artificial Sequence: Synthetic oligonucleotide
  Antisense strand to SEQ ID NO: 1778881
uugauagucacuuucgcag

SEQ ID NO: 1778883 - RNA, 19 nt, Artificial Sequence
  Description of Artificial Sequence: Synthetic oligonucleotide
  Sense strand starting at position 3035 of SEQ ID NO: 1562871
ugcgaaagugacuaucaau

SEQ ID NO: 1778884 - RNA, 19 nt, Artificial Sequence
  Description of Artificial Sequence: Synthetic oligonucleotide
  Antisense strand to SEQ ID NO: 1778883
auugauagucacuuucgca

SEQ ID NO: 1778885 - RNA, 19 nt, Artificial Sequence
  Description of Artificial Sequence: Synthetic oligonucleotide
  Sense strand starting at position 3062 of SEQ ID NO: 1562871
cuuacuuuagucgaguguu

SEQ ID NO: 1778886 - RNA, 19 nt, Artificial Sequence
  Description of Artificial Sequence: Synthetic oligonucleotide
  Antisense strand to SEQ ID NO: 1778885
aacacucgacuaaaguaag

SEQ ID NO: 1778887 - RNA, 19 nt, Artificial Sequence
  Description of Artificial Sequence: Synthetic oligonucleotide
  Sense strand starting at position 3137 of SEQ ID NO: 1562871
ccucuaagaguugguucua

SEQ ID NO: 1778888 - RNA, 19 nt, Artificial Sequence
  Description of Artificial Sequence: Synthetic oligonucleotide
  Antisense strand to SEQ ID NO: 1778887
uagaaccaacucuuagagg

SEQ ID NO: 1778889 - RNA, 19 nt, Artificial Sequence
  Description of Artificial Sequence: Synthetic oligonucleotide
  Sense strand starting at position 3138 of SEQ ID NO: 1562871
cucuaagaguugguucuau

SEQ ID NO: 1778890 - RNA, 19 nt, Artificial Sequence
  Description of Artificial Sequence: Synthetic oligonucleotide
  Antisense strand to SEQ ID NO: 1778889
auagaaccaacucuuagag

SEQ ID NO: 1778891 - RNA, 19 nt, Artificial Sequence
  Description of Artificial Sequence: Synthetic oligonucleotide
  Sense strand starting at position 3281 of SEQ ID NO: 1562871
ugcuuccacugacuuagaa

SEQ ID NO: 1778892 - RNA, 19 nt, Artificial Sequence
  Description of Artificial Sequence: Synthetic oligonucleotide
  Antisense strand to SEQ ID NO: 1778891
uucuaagucaguggaagca

SEQ ID NO: 1778893 - RNA, 19 nt, Artificial Sequence
  Description of Artificial Sequence: Synthetic oligonucleotide
  Sense strand starting at position 3293 of SEQ ID NO: 1562871
cuuagaaaucuuugauuga

SEQ ID NO: 1778894 - RNA, 19 nt, Artificial Sequence
  Description of Artificial Sequence: Synthetic oligonucleotide
  Antisense strand to SEQ ID NO: 1778893
ucaaucaaagauuucuaag

SEQ ID NO: 1778895 - RNA, 19 nt, Artificial Sequence
  Description of Artificial Sequence: Synthetic oligonucleotide
  Sense strand starting at position 3482 of SEQ ID NO: 1562871
agagaaggcuuuccugaau

SEQ ID NO: 1778896 - RNA, 19 nt, Artificial Sequence
  Description of Artificial Sequence: Synthetic oligonucleotide
  Antisense strand to SEQ ID NO: 1778895
auucaggaaagccuucucu

SEQ ID NO: 1778897 - RNA, 19 nt, Artificial Sequence
  Description of Artificial Sequence: Synthetic oligonucleotide
  Sense strand starting at position 3618 of SEQ ID NO: 1562871
uggugugccagugaagaca

SEQ ID NO: 1778898 - RNA, 19 nt, Artificial Sequence
  Description of Artificial Sequence: Synthetic oligonucleotide
  Antisense strand to SEQ ID NO: 1778897
ugucuucacuggcacacca

SEQ ID NO: 1778899 - RNA, 19 nt, Artificial Sequence
  Description of Artificial Sequence: Synthetic oligonucleotide
  Sense strand starting at position 117 of SEQ ID NO: 1562872
uagggucuccgacauggua

SEQ ID NO: 1778900 - RNA, 19 nt, Artificial Sequence
  Description of Artificial Sequence: Synthetic oligonucleotide
  Antisense strand to SEQ ID NO: 1778899
uaccaugucggagacccua

SEQ ID NO: 1778901 - RNA, 19 nt, Artificial Sequence
  Description of Artificial Sequence: Synthetic oligonucleotide
  Sense strand starting at position 393 of SEQ ID NO: 1562872
accugagguucccuacaaa

SEQ ID NO: 1778902 - RNA, 19 nt, Artificial Sequence
  Description of Artificial Sequence: Synthetic oligonucleotide
  Antisense strand to SEQ ID NO: 1778901
uuuguagggaaccucaggu

SEQ ID NO: 1778903 - RNA, 19 nt, Artificial Sequence
  Description of Artificial Sequence: Synthetic oligonucleotide
  Sense strand starting at position 396 of SEQ ID NO: 1562872
ugagguucccuacaaaggu

SEQ ID NO: 1778904 - RNA, 19 nt, Artificial Sequence
  Description of Artificial Sequence: Synthetic oligonucleotide
  Antisense strand to SEQ ID NO: 1778903
accuuuguagggaaccuca

SEQ ID NO: 1778905 - RNA, 19 nt, Artificial Sequence
  Description of Artificial Sequence: Synthetic oligonucleotide
  Sense strand starting at position 411 of SEQ ID NO: 1562872
aggugacauuccuccacaa

SEQ ID NO: 1778906 - RNA, 19 nt, Artificial Sequence
  Description of Artificial Sequence: Synthetic oligonucleotide
  Antisense strand to SEQ ID NO: 1778905
uuguggaggaaugucaccu

SEQ ID NO: 1778907 - RNA, 19 nt, Artificial Sequence
  Description of Artificial Sequence: Synthetic oligonucleotide
  Sense strand starting at position 607 of SEQ ID NO: 1562872
auuuaaauuucgcguaaag

SEQ ID NO: 1778908 - RNA, 19 nt, Artificial Sequence
  Description of Artificial Sequence: Synthetic oligonucleotide
  Antisense strand to SEQ ID NO: 1778907
cuuuacgcgaaauuuaaau

SEQ ID NO: 1778909 - RNA, 19 nt, Artificial Sequence
  Description of Artificial Sequence: Synthetic oligonucleotide
  Sense strand starting at position 702 of SEQ ID NO: 1562872
acacacuuuggacgaaauu

SEQ ID NO: 1778910 - RNA, 19 nt, Artificial Sequence
  Description of Artificial Sequence: Synthetic oligonucleotide
  Antisense strand to SEQ ID NO: 1778909
aauuucguccaaagugugu

SEQ ID NO: 1778911 - RNA, 19 nt, Artificial Sequence
  Description of Artificial Sequence: Synthetic oligonucleotide
  Sense strand starting at position 723 of SEQ ID NO: 1562872
cuugcaaguuuccuuaaag

SEQ ID NO: 1778912 - RNA, 19 nt, Artificial Sequence
  Description of Artificial Sequence: Synthetic oligonucleotide
  Antisense strand to SEQ ID NO: 1778911
cuuuaaggaaacuugcaag

SEQ ID NO: 1778913 - RNA, 19 nt, Artificial Sequence
  Description of Artificial Sequence: Synthetic oligonucleotide
  Sense strand starting at position 724 of SEQ ID NO: 1562872
uugcaaguuuccuuaaagg

SEQ ID NO: 1778914 - RNA, 19 nt, Artificial Sequence
  Description of Artificial Sequence: Synthetic oligonucleotide
  Antisense strand to SEQ ID NO: 1778913
ccuuuaaggaaacuugcaa

SEQ ID NO: 1778915 - RNA, 19 nt, Artificial Sequence
  Description of Artificial Sequence: Synthetic oligonucleotide
  Sense strand starting at position 886 of SEQ ID NO: 1562872
uucgaaguccucuggaaug

SEQ ID NO: 1778916 - RNA, 19 nt, Artificial Sequence
  Description of Artificial Sequence: Synthetic oligonucleotide
  Antisense strand to SEQ ID NO: 1778915
cauuccagaggacuucgaa

SEQ ID NO: 1778917 - RNA, 19 nt, Artificial Sequence
  Description of Artificial Sequence: Synthetic oligonucleotide
  Sense strand starting at position 888 of SEQ ID NO: 1562872
cgaaguccucuggaaugga

SEQ ID NO: 1778918 - RNA, 19 nt, Artificial Sequence
  Description of Artificial Sequence: Synthetic oligonucleotide
  Antisense strand to SEQ ID NO: 1778917
uccauuccagaggacuucg

SEQ ID NO: 1778919 - RNA, 19 nt, Artificial Sequence
  Description of Artificial Sequence: Synthetic oligonucleotide
  Sense strand starting at position 915 of SEQ ID NO: 1562872
uuaugaagccauuagcaua

SEQ ID NO: 1778920 - RNA, 19 nt, Artificial Sequence
  Description of Artificial Sequence: Synthetic oligonucleotide
  Antisense strand to SEQ ID NO: 1778919
uaugcuaauggcuucauaa

SEQ ID NO: 1778921 - RNA, 19 nt, Artificial Sequence
  Description of Artificial Sequence: Synthetic oligonucleotide
  Sense strand starting at position 935 of SEQ ID NO: 1562872
ccaguaagcaggcaaaguu

SEQ ID NO: 1778922 - RNA, 19 nt, Artificial Sequence
  Description of Artificial Sequence: Synthetic oligonucleotide
  Antisense strand to SEQ ID NO: 1778921
aacuuugccugcuuacugg

SEQ ID NO: 1778923 - RNA, 19 nt, Artificial Sequence
  Description of Artificial Sequence: Synthetic oligonucleotide
  Sense strand starting at position 981 of SEQ ID NO: 1562872
agugcugauuucuaaagga

SEQ ID NO: 1778924 - RNA, 19 nt, Artificial Sequence
  Description of Artificial Sequence: Synthetic oligonucleotide
  Antisense strand to SEQ ID NO: 1778923
uccuuuagaaaucagcacu

SEQ ID NO: 1778925 - RNA, 19 nt, Artificial Sequence
  Description of Artificial Sequence: Synthetic oligonucleotide
  Sense strand starting at position 1014 of SEQ ID NO: 1562872
auucguguuaggugaaauu

SEQ ID NO: 1778926 - RNA, 19 nt, Artificial Sequence
  Description of Artificial Sequence: Synthetic oligonucleotide
  Antisense strand to SEQ ID NO: 1778925
aauuucaccuaacacgaau

SEQ ID NO: 1778927 - RNA, 19 nt, Artificial Sequence
  Description of Artificial Sequence: Synthetic oligonucleotide
  Sense strand starting at position 1050 of SEQ ID NO: 1562872
uuaaguccacaagguuaaa

SEQ ID NO: 1778928 - RNA, 19 nt, Artificial Sequence
  Description of Artificial Sequence: Synthetic oligonucleotide
  Antisense strand to SEQ ID NO: 1778927
uuuaaccuuguggacuuaa

SEQ ID NO: 1778929 - RNA, 19 nt, Artificial Sequence
  Description of Artificial Sequence: Synthetic oligonucleotide
  Sense strand starting at position 1173 of SEQ ID NO: 1562872
ucaggaauugcaggcaaga

SEQ ID NO: 1778930 - RNA, 19 nt, Artificial Sequence
  Description of Artificial Sequence: Synthetic oligonucleotide
  Antisense strand to SEQ ID NO: 1778929
ucuugccugcaauuccuga

SEQ ID NO: 1778931 - RNA, 19 nt, Artificial Sequence
  Description of Artificial Sequence: Synthetic oligonucleotide
  Sense strand starting at position 1201 of SEQ ID NO: 1562872
guuugcaagucuuccauuu

SEQ ID NO: 1778932 - RNA, 19 nt, Artificial Sequence
  Description of Artificial Sequence: Synthetic oligonucleotide
  Antisense strand to SEQ ID NO: 1778931
aaauggaagacuugcaaac

SEQ ID NO: 1778933 - RNA, 19 nt, Artificial Sequence
  Description of Artificial Sequence: Synthetic oligonucleotide
  Sense strand starting at position 1407 of SEQ ID NO: 1562872
gggcaaaucagcgacucua

SEQ ID NO: 1778934 - RNA, 19 nt, Artificial Sequence
  Description of Artificial Sequence: Synthetic oligonucleotide
  Antisense strand to SEQ ID NO: 1778933
uagagucgcugauuugccc

SEQ ID NO: 1778935 - RNA, 19 nt, Artificial Sequence
  Description of Artificial Sequence: Synthetic oligonucleotide
  Sense strand starting at position 1559 of SEQ ID NO: 1562872
agguuaauuagacggacaa

SEQ ID NO: 1778936 - RNA, 19 nt, Artificial Sequence
  Description of Artificial Sequence: Synthetic oligonucleotide
  Antisense strand to SEQ ID NO: 1778935
uuguccgucuaauuaaccu

SEQ ID NO: 1778937 - RNA, 19 nt, Artificial Sequence
  Description of Artificial Sequence: Synthetic oligonucleotide
  Sense strand starting at position 1560 of SEQ ID NO: 1562872
gguuaauuagacggacaag

SEQ ID NO: 1778938 - RNA, 19 nt, Artificial Sequence
  Description of Artificial Sequence: Synthetic oligonucleotide
  Antisense strand to SEQ ID NO: 1778937
cuuguccgucuaauuaacc

SEQ ID NO: 1778939 - RNA, 19 nt, Artificial Sequence
  Description of Artificial Sequence: Synthetic oligonucleotide
  Sense strand starting at position 1561 of SEQ ID NO: 1562872
guuaauuagacggacaagu

SEQ ID NO: 1778940 - RNA, 19 nt, Artificial Sequence
  Description of Artificial Sequence: Synthetic oligonucleotide
  Antisense strand to SEQ ID NO: 1778939
acuuguccgucuaauuaac

SEQ ID NO: 1778941 - RNA, 19 nt, Artificial Sequence
  Description of Artificial Sequence: Synthetic oligonucleotide
  Sense strand starting at position 2296 of SEQ ID NO: 1562872
caaagaugcccuugagagc

SEQ ID NO: 1778942 - RNA, 19 nt, Artificial Sequence
  Description of Artificial Sequence: Synthetic oligonucleotide
  Antisense strand to SEQ ID NO: 1778941
gcucucaagggcaucuuug

SEQ ID NO: 1778943 - RNA, 19 nt, Artificial Sequence
  Description of Artificial Sequence: Synthetic oligonucleotide
  Sense strand starting at position 2354 of SEQ ID NO: 1562872
cggugauuccaggaaaucg

SEQ ID NO: 1778944 - RNA, 19 nt, Artificial Sequence
  Description of Artificial Sequence: Synthetic oligonucleotide
  Antisense strand to SEQ ID NO: 1778943
cgauuuccuggaaucaccg

SEQ ID NO: 1778945 - RNA, 19 nt, Artificial Sequence
  Description of Artificial Sequence: Synthetic oligonucleotide
  Sense strand starting at position 2594 of SEQ ID NO: 1562872
aggcauaaccaguaaguua

SEQ ID NO: 1778946 - RNA, 19 nt, Artificial Sequence
  Description of Artificial Sequence: Synthetic oligonucleotide
  Antisense strand to SEQ ID NO: 1778945
uaacuuacugguuaugccu

SEQ ID NO: 1778947 - RNA, 19 nt, Artificial Sequence
  Description of Artificial Sequence: Synthetic oligonucleotide
  Sense strand starting at position 2623 of SEQ ID NO: 1562872
uuacaagguuuauuacaga

SEQ ID NO: 1778948 - RNA, 19 nt, Artificial Sequence
  Description of Artificial Sequence: Synthetic oligonucleotide
  Antisense strand to SEQ ID NO: 1778947
ucuguaauaaaccuuguaa

SEQ ID NO: 1778949 - RNA, 19 nt, Artificial Sequence
  Description of Artificial Sequence: Synthetic oligonucleotide
  Sense strand starting at position 2681 of SEQ ID NO: 1562872
auucguguuaagugaaauu

SEQ ID NO: 1778950 - RNA, 19 nt, Artificial Sequence
  Description of Artificial Sequence: Synthetic oligonucleotide
  Antisense strand to SEQ ID NO: 1778949
aauuucacuuaacacgaau

SEQ ID NO: 1778951 - RNA, 19 nt, Artificial Sequence
  Description of Artificial Sequence: Synthetic oligonucleotide
  Sense strand starting at position 2717 of SEQ ID NO: 1562872
uuaggucuacaagguuaaa

SEQ ID NO: 1778952 - RNA, 19 nt, Artificial Sequence
  Description of Artificial Sequence: Synthetic oligonucleotide
  Antisense strand to SEQ ID NO: 1778951
uuuaaccuuguagaccuaa

SEQ ID NO: 1778953 - RNA, 19 nt, Artificial Sequence
  Description of Artificial Sequence: Synthetic oligonucleotide
  Sense strand starting at position 2785 of SEQ ID NO: 1562872
agguaaauacagcaaguuu

SEQ ID NO: 1778954 - RNA, 19 nt, Artificial Sequence
  Description of Artificial Sequence: Synthetic oligonucleotide
  Antisense strand to SEQ ID NO: 1778953
aaacuugcuguauuuaccu

SEQ ID NO: 1778955 - RNA, 19 nt, Artificial Sequence
  Description of Artificial Sequence: Synthetic oligonucleotide
  Sense strand starting at position 2856 of SEQ ID NO: 1562872
caccgaaaucuccguggga

SEQ ID NO: 1778956 - RNA, 19 nt, Artificial Sequence
  Description of Artificial Sequence: Synthetic oligonucleotide
  Antisense strand to SEQ ID NO: 1778955
ucccacggagauuucggug

SEQ ID NO: 1778957 - RNA, 19 nt, Artificial Sequence
  Description of Artificial Sequence: Synthetic oligonucleotide
  Sense strand starting at position 2857 of SEQ ID NO: 1562872
accgaaaucuccgugggau

SEQ ID NO: 1778958 - RNA, 19 nt, Artificial Sequence
  Description of Artificial Sequence: Synthetic oligonucleotide
  Antisense strand to SEQ ID NO: 1778957
aucccacggagauuucggu

SEQ ID NO: 1778959 - RNA, 19 nt, Artificial Sequence
  Description of Artificial Sequence: Synthetic oligonucleotide
  Sense strand starting at position 2858 of SEQ ID NO: 1562872
ccgaaaucuccgugggaug

SEQ ID NO: 1778960 - RNA, 19 nt, Artificial Sequence
  Description of Artificial Sequence: Synthetic oligonucleotide
  Antisense strand to SEQ ID NO: 1778959
caucccacggagauuucgg

SEQ ID NO: 1778961 - RNA, 19 nt, Artificial Sequence
  Description of Artificial Sequence: Synthetic oligonucleotide
  Sense strand starting at position 2998 of SEQ ID NO: 1562872
caucauucgggucagaaac

SEQ ID NO: 1778962 - RNA, 19 nt, Artificial Sequence
  Description of Artificial Sequence: Synthetic oligonucleotide
  Antisense strand to SEQ ID NO: 1778961
guuucugacccgaaugaug

SEQ ID NO: 1778963 - RNA, 19 nt, Artificial Sequence
  Description of Artificial Sequence: Synthetic oligonucleotide
  Sense strand starting at position 3033 of SEQ ID NO: 1562872
acuucuccgucucuuagau

SEQ ID NO: 1778964 - RNA, 19 nt, Artificial Sequence
  Description of Artificial Sequence: Synthetic oligonucleotide
  Antisense strand to SEQ ID NO: 1778963
aucuaagagacggagaagu

SEQ ID NO: 1778965 - RNA, 19 nt, Artificial Sequence
  Description of Artificial Sequence: Synthetic oligonucleotide
  Sense strand starting at position 3078 of SEQ ID NO: 1562872
gauggcuguacccguagaa

SEQ ID NO: 1778966 - RNA, 19 nt, Artificial Sequence
  Description of Artificial Sequence: Synthetic oligonucleotide
  Antisense strand to SEQ ID NO: 1778965
uucuacggguacagccauc

SEQ ID NO: 1778967 - RNA, 19 nt, Artificial Sequence
  Description of Artificial Sequence: Synthetic oligonucleotide
  Sense strand starting at position 3082 of SEQ ID NO: 1562872
gcuguacccguagaauaca

SEQ ID NO: 1778968 - RNA, 19 nt, Artificial Sequence
  Description of Artificial Sequence: Synthetic oligonucleotide
  Antisense strand to SEQ ID NO: 1778967
uguauucuacggguacagc

SEQ ID NO: 1778969 - RNA, 19 nt, Artificial Sequence
  Description of Artificial Sequence: Synthetic oligonucleotide
  Sense strand starting at position 3346 of SEQ ID NO: 1562872
cuucgcucugccuuaugua

SEQ ID NO: 1778970 - RNA, 19 nt, Artificial Sequence
  Description of Artificial Sequence: Synthetic oligonucleotide
  Antisense strand to SEQ ID NO: 1778969
uacauaaggcagagcgaag

SEQ ID NO: 1778971 - RNA, 19 nt, Artificial Sequence
  Description of Artificial Sequence: Synthetic oligonucleotide
  Sense strand starting at position 3663 of SEQ ID NO: 1562872
cuuaacaauugaguuagau

SEQ ID NO: 1778972 - RNA, 19 nt, Artificial Sequence
  Description of Artificial Sequence: Synthetic oligonucleotide
  Antisense strand to SEQ ID NO: 1778971
aucuaacucaauuguuaag

SEQ ID NO: 1778973 - RNA, 19 nt, Artificial Sequence
  Description of Artificial Sequence: Synthetic oligonucleotide
  Sense strand starting at position 3773 of SEQ ID NO: 1562872
gguccuagcgauagagugu

SEQ ID NO: 1778974 - RNA, 19 nt, Artificial Sequence
  Description of Artificial Sequence: Synthetic oligonucleotide
  Antisense strand to SEQ ID NO: 1778973
acacucuaucgcuaggacc

SEQ ID NO: 1778975 - RNA, 19 nt, Artificial Sequence
  Description of Artificial Sequence: Synthetic oligonucleotide
  Sense strand starting at position 3980 of SEQ ID NO: 1562872
agagaaccaugcucugcaa

SEQ ID NO: 1778976 - RNA, 19 nt, Artificial Sequence
  Description of Artificial Sequence: Synthetic oligonucleotide
  Antisense strand to SEQ ID NO: 1778975
uugcagagcaugguucucu

SEQ ID NO: 1778977 - RNA, 19 nt, Artificial Sequence
  Description of Artificial Sequence: Synthetic oligonucleotide
  Sense strand starting at position 3983 of SEQ ID NO: 1562872
gaaccaugcucugcaaggu

SEQ ID NO: 1778978 - RNA, 19 nt, Artificial Sequence
  Description of Artificial Sequence: Synthetic oligonucleotide
  Antisense strand to SEQ ID NO: 1778977
accuugcagagcaugguuc

SEQ ID NO: 1778979 - RNA, 19 nt, Artificial Sequence
  Description of Artificial Sequence: Synthetic oligonucleotide
  Sense strand starting at position 61 of SEQ ID NO: 1562873
cugagagcuugcucuaaca

SEQ ID NO: 1778980 - RNA, 19 nt, Artificial Sequence
  Description of Artificial Sequence: Synthetic oligonucleotide
  Antisense strand to SEQ ID NO: 1778979
uguuagagcaagcucucag

SEQ ID NO: 1778981 - RNA, 19 nt, Artificial Sequence
  Description of Artificial Sequence: Synthetic oligonucleotide
  Sense strand starting at position 134 of SEQ ID NO: 1562873
ggcccagugcucugucaag

SEQ ID NO: 1778982 - RNA, 19 nt, Artificial Sequence
  Description of Artificial Sequence: Synthetic oligonucleotide
  Antisense strand to SEQ ID NO: 1778981
cuugacagagcacugggcc

SEQ ID NO: 1778983 - RNA, 19 nt, Artificial Sequence
  Description of Artificial Sequence: Synthetic oligonucleotide
  Sense strand starting at position 149 of SEQ ID NO: 1562873
caaguuagucuugguucca

SEQ ID NO: 1778984 - RNA, 19 nt, Artificial Sequence
  Description of Artificial Sequence: Synthetic oligonucleotide
  Antisense strand to SEQ ID NO: 1778983
uggaaccaagacuaacuug

SEQ ID NO: 1778985 - RNA, 19 nt, Artificial Sequence
  Description of Artificial Sequence: Synthetic oligonucleotide
  Sense strand starting at position 340 of SEQ ID NO: 1562873
ggcuaaucgggucaguaca

SEQ ID NO: 1778986 - RNA, 19 nt, Artificial Sequence
  Description of Artificial Sequence: Synthetic oligonucleotide
  Antisense strand to SEQ ID NO: 1778985
uguacugacccgauuagcc

SEQ ID NO: 1778987 - RNA, 19 nt, Artificial Sequence
  Description of Artificial Sequence: Synthetic oligonucleotide
  Sense strand starting at position 666 of SEQ ID NO: 1562873
uuacaagacuuaugaaaga

SEQ ID NO: 1778988 - RNA, 19 nt, Artificial Sequence
  Description of Artificial Sequence: Synthetic oligonucleotide
  Antisense strand to SEQ ID NO: 1778987
ucuuucauaagucuuguaa

SEQ ID NO: 1778989 - RNA, 19 nt, Artificial Sequence
  Description of Artificial Sequence: Synthetic oligonucleotide
  Sense strand starting at position 712 of SEQ ID NO: 1562873
gccaaaggucaugguaaga

SEQ ID NO: 1778990 - RNA, 19 nt, Artificial Sequence
  Description of Artificial Sequence: Synthetic oligonucleotide
  Antisense strand to SEQ ID NO: 1778989
ucuuaccaugaccuuuggc

SEQ ID NO: 1778991 - RNA, 19 nt, Artificial Sequence
  Description of Artificial Sequence: Synthetic oligonucleotide
  Sense strand starting at position 930 of SEQ ID NO: 1562873
cugauagccucucauagaa

SEQ ID NO: 1778992 - RNA, 19 nt, Artificial Sequence
  Description of Artificial Sequence: Synthetic oligonucleotide
  Antisense strand to SEQ ID NO: 1778991
uucuaugagaggcuaucag

SEQ ID NO: 1778993 - RNA, 19 nt, Artificial Sequence
  Description of Artificial Sequence: Synthetic oligonucleotide
  Sense strand starting at position 1039 of SEQ ID NO: 1562873
gccuuucccuggcucaaau

SEQ ID NO: 1778994 - RNA, 19 nt, Artificial Sequence
  Description of Artificial Sequence: Synthetic oligonucleotide
  Antisense strand to SEQ ID NO: 1778993
auuugagccagggaaaggc

SEQ ID NO: 1778995 - RNA, 19 nt, Artificial Sequence
  Description of Artificial Sequence: Synthetic oligonucleotide
  Sense strand starting at position 1262 of SEQ ID NO: 1562873
gauccaagucccugagcau

SEQ ID NO: 1778996 - RNA, 19 nt, Artificial Sequence
  Description of Artificial Sequence: Synthetic oligonucleotide
  Antisense strand to SEQ ID NO: 1778995
augcucagggacuuggauc

SEQ ID NO: 1778997 - RNA, 19 nt, Artificial Sequence
  Description of Artificial Sequence: Synthetic oligonucleotide
  Sense strand starting at position 1320 of SEQ ID NO: 1562873
uaggguuuacuuuguaaag

SEQ ID NO: 1778998 - RNA, 19 nt, Artificial Sequence
  Description of Artificial Sequence: Synthetic oligonucleotide
  Antisense strand to SEQ ID NO: 1778997
cuuuacaaaguaaacccua

SEQ ID NO: 1778999 - RNA, 19 nt, Artificial Sequence
  Description of Artificial Sequence: Synthetic oligonucleotide
  Sense strand starting at position 1338 of SEQ ID NO: 1562873
gccaaaucuugauugccgu

SEQ ID NO: 1779000 - RNA, 19 nt, Artificial Sequence
  Description of Artificial Sequence: Synthetic oligonucleotide
  Antisense strand to SEQ ID NO: 1778999
acggcaaucaagauuuggc

SEQ ID NO: 1779001 - RNA, 19 nt, Artificial Sequence
  Description of Artificial Sequence: Synthetic oligonucleotide
  Sense strand starting at position 1412 of SEQ ID NO: 1562873
gagcuagguuccugggaga

SEQ ID NO: 1779002 - RNA, 19 nt, Artificial Sequence
  Description of Artificial Sequence: Synthetic oligonucleotide
  Antisense strand to SEQ ID NO: 1779001
ucucccaggaaccuagcuc

SEQ ID NO: 1779003 - RNA, 19 nt, Artificial Sequence
  Description of Artificial Sequence: Synthetic oligonucleotide
  Sense strand starting at position 1415 of SEQ ID NO: 1562873
cuagguuccugggagauau

SEQ ID NO: 1779004 - RNA, 19 nt, Artificial Sequence
  Description of Artificial Sequence: Synthetic oligonucleotide
  Antisense strand to SEQ ID NO: 1779003
auaucucccaggaaccuag

SEQ ID NO: 1779005 - RNA, 19 nt, Artificial Sequence
  Description of Artificial Sequence: Synthetic oligonucleotide
  Sense strand starting at position 1441 of SEQ ID NO: 1562873
ccaggcugccugggaauaa

SEQ ID NO: 1779006 - RNA, 19 nt, Artificial Sequence
  Description of Artificial Sequence: Synthetic oligonucleotide
  Antisense strand to SEQ ID NO: 1779005
uuauucccaggcagccugg

SEQ ID NO: 1779007 - RNA, 19 nt, Artificial Sequence
  Description of Artificial Sequence: Synthetic oligonucleotide
  Sense strand starting at position 1451 of SEQ ID NO: 1562873
ugggaauaacccuguccaa

SEQ ID NO: 1779008 - RNA, 19 nt, Artificial Sequence
  Description of Artificial Sequence: Synthetic oligonucleotide
  Antisense strand to SEQ ID NO: 1779007
uuggacaggguuauuccca

SEQ ID NO: 1779009 - RNA, 19 nt, Artificial Sequence
  Description of Artificial Sequence: Synthetic oligonucleotide
  Sense strand starting at position 1555 of SEQ ID NO: 1562873
aggguugcuggcugauaca

SEQ ID NO: 1779010 - RNA, 19 nt, Artificial Sequence
  Description of Artificial Sequence: Synthetic oligonucleotide
  Antisense strand to SEQ ID NO: 1779009
uguaucagccagcaacccu

SEQ ID NO: 1779011 - RNA, 19 nt, Artificial Sequence
  Description of Artificial Sequence: Synthetic oligonucleotide
  Sense strand starting at position 1749 of SEQ ID NO: 1562873
acugcugugcccuaauauc

SEQ ID NO: 1779012 - RNA, 19 nt, Artificial Sequence
  Description of Artificial Sequence: Synthetic oligonucleotide
  Antisense strand to SEQ ID NO: 1779011
gauauuagggcacagcagu

SEQ ID NO: 1779013 - RNA, 19 nt, Artificial Sequence
  Description of Artificial Sequence: Synthetic oligonucleotide
  Sense strand starting at position 2012 of SEQ ID NO: 1562873
gugugcugugugcuugaua

SEQ ID NO: 1779014 - RNA, 19 nt, Artificial Sequence
  Description of Artificial Sequence: Synthetic oligonucleotide
  Antisense strand to SEQ ID NO: 1779013
uaucaagcacacagcacac

SEQ ID NO: 1779015 - RNA, 19 nt, Artificial Sequence
  Description of Artificial Sequence: Synthetic oligonucleotide
  Sense strand starting at position 2013 of SEQ ID NO: 1562873
ugugcugugugcuugauaa

SEQ ID NO: 1779016 - RNA, 19 nt, Artificial Sequence
  Description of Artificial Sequence: Synthetic oligonucleotide
  Antisense strand to SEQ ID NO: 1779015
uuaucaagcacacagcaca

SEQ ID NO: 1779017 - RNA, 19 nt, Artificial Sequence
  Description of Artificial Sequence: Synthetic oligonucleotide
  Sense strand starting at position 2023 of SEQ ID NO: 1562873
gcuugauaagcuggauuag

SEQ ID NO: 1779018 - RNA, 19 nt, Artificial Sequence
  Description of Artificial Sequence: Synthetic oligonucleotide
  Antisense strand to SEQ ID NO: 1779017
cuaauccagcuuaucaagc

SEQ ID NO: 1779019 - RNA, 19 nt, Artificial Sequence
  Description of Artificial Sequence: Synthetic oligonucleotide
  Sense strand starting at position 2117 of SEQ ID NO: 1562873
gccugaacguggucucauu

SEQ ID NO: 1779020 - RNA, 19 nt, Artificial Sequence
  Description of Artificial Sequence: Synthetic oligonucleotide
  Antisense strand to SEQ ID NO: 1779019
aaugagaccacguucaggc

SEQ ID NO: 1779021 - RNA, 19 nt, Artificial Sequence
  Description of Artificial Sequence: Synthetic oligonucleotide
  Sense strand starting at position 2128 of SEQ ID NO: 1562873
gucucauuucucugaggcu

SEQ ID NO: 1779022 - RNA, 19 nt, Artificial Sequence
  Description of Artificial Sequence: Synthetic oligonucleotide
  Antisense strand to SEQ ID NO: 1779021
agccucagagaaaugagac

SEQ ID NO: 1779023 - RNA, 19 nt, Artificial Sequence
  Description of Artificial Sequence: Synthetic oligonucleotide
  Sense strand starting at position 2231 of SEQ ID NO: 1562873
gcacauuuguguccugaau

SEQ ID NO: 1779024 - RNA, 19 nt, Artificial Sequence
  Description of Artificial Sequence: Synthetic oligonucleotide
  Antisense strand to SEQ ID NO: 1779023
auucaggacacaaaugugc

SEQ ID NO: 1779025 - RNA, 19 nt, Artificial Sequence
  Description of Artificial Sequence: Synthetic oligonucleotide
  Sense strand starting at position 2233 of SEQ ID NO: 1562873
acauuuguguccugaauug

SEQ ID NO: 1779026 - RNA, 19 nt, Artificial Sequence
  Description of Artificial Sequence: Synthetic oligonucleotide
  Antisense strand to SEQ ID NO: 1779025
caauucaggacacaaaugu

SEQ ID NO: 1779027 - RNA, 19 nt, Artificial Sequence
  Description of Artificial Sequence: Synthetic oligonucleotide
  Sense strand starting at position 2336 of SEQ ID NO: 1562873
cugggacaggccuguaauc

SEQ ID NO: 1779028 - RNA, 19 nt, Artificial Sequence
  Description of Artificial Sequence: Synthetic oligonucleotide
  Antisense strand to SEQ ID NO: 1779027
gauuacaggccugucccag

SEQ ID NO: 1779029 - RNA, 19 nt, Artificial Sequence
  Description of Artificial Sequence: Synthetic oligonucleotide
  Sense strand starting at position 2338 of SEQ ID NO: 1562873
gggacaggccuguaaucuc

SEQ ID NO: 1779030 - RNA, 19 nt, Artificial Sequence
  Description of Artificial Sequence: Synthetic oligonucleotide
  Antisense strand to SEQ ID NO: 1779029
gagauuacaggccuguccc

SEQ ID NO: 1779031 - RNA, 19 nt, Artificial Sequence
  Description of Artificial Sequence: Synthetic oligonucleotide
  Sense strand starting at position 2406 of SEQ ID NO: 1562873
gguugauuguccucagcgu

SEQ ID NO: 1779032 - RNA, 19 nt, Artificial Sequence
  Description of Artificial Sequence: Synthetic oligonucleotide
  Antisense strand to SEQ ID NO: 1779031
acgcugaggacaaucaacc

SEQ ID NO: 1779033 - RNA, 19 nt, Artificial Sequence
  Description of Artificial Sequence: Synthetic oligonucleotide
  Sense strand starting at position 2480 of SEQ ID NO: 1562873
cacagaggguucuggugaa

SEQ ID NO: 1779034 - RNA, 19 nt, Artificial Sequence
  Description of Artificial Sequence: Synthetic oligonucleotide
  Antisense strand to SEQ ID NO: 1779033
uucaccagaacccucugug

SEQ ID NO: 1779035 - RNA, 19 nt, Artificial Sequence
  Description of Artificial Sequence: Synthetic oligonucleotide
  Sense strand starting at position 2483 of SEQ ID NO: 1562873
agaggguucuggugaaagg

SEQ ID NO: 1779036 - RNA, 19 nt, Artificial Sequence
  Description of Artificial Sequence: Synthetic oligonucleotide
  Antisense strand to SEQ ID NO: 1779035
ccuuucaccagaacccucu

SEQ ID NO: 1779037 - RNA, 19 nt, Artificial Sequence
  Description of Artificial Sequence: Synthetic oligonucleotide
  Sense strand starting at position 2510 of SEQ ID NO: 1562873
ggguaugggugcucugaga

SEQ ID NO: 1779038 - RNA, 19 nt, Artificial Sequence
  Description of Artificial Sequence: Synthetic oligonucleotide
  Antisense strand to SEQ ID NO: 1779037
ucucagagcacccauaccc

SEQ ID NO: 1779039 - RNA, 19 nt, Artificial Sequence
  Description of Artificial Sequence: Synthetic oligonucleotide
  Sense strand starting at position 2853 of SEQ ID NO: 1562873
gagcaucucugaccuggaa

SEQ ID NO: 1779040 - RNA, 19 nt, Artificial Sequence
  Description of Artificial Sequence: Synthetic oligonucleotide
  Antisense strand to SEQ ID NO: 1779039
uuccaggucagagaugcuc

SEQ ID NO: 1779041 - RNA, 19 nt, Artificial Sequence
  Description of Artificial Sequence: Synthetic oligonucleotide
  Sense strand starting at position 2941 of SEQ ID NO: 1562873
uccuaauccugacagugau

SEQ ID NO: 1779042 - RNA, 19 nt, Artificial Sequence
  Description of Artificial Sequence: Synthetic oligonucleotide
  Antisense strand to SEQ ID NO: 1779041
aucacugucaggauuagga

SEQ ID NO: 1779043 - RNA, 19 nt, Artificial Sequence
  Description of Artificial Sequence: Synthetic oligonucleotide
  Sense strand starting at position 2947 of SEQ ID NO: 1562873
uccugacagugaucucacu

SEQ ID NO: 1779044 - RNA, 19 nt, Artificial Sequence
  Description of Artificial Sequence: Synthetic oligonucleotide
  Antisense strand to SEQ ID NO: 1779043
agugagaucacugucagga

SEQ ID NO: 1779045 - RNA, 19 nt, Artificial Sequence
  Description of Artificial Sequence: Synthetic oligonucleotide
  Sense strand starting at position 3088 of SEQ ID NO: 1562873
aguggcuuccuggaaacuu

SEQ ID NO: 1779046 - RNA, 19 nt, Artificial Sequence
  Description of Artificial Sequence: Synthetic oligonucleotide
  Antisense strand to SEQ ID NO: 1779045
aaguuuccaggaagccacu

SEQ ID NO: 1779047 - RNA, 19 nt, Artificial Sequence
  Description of Artificial Sequence: Synthetic oligonucleotide
  Sense strand starting at position 3206 of SEQ ID NO: 1562873
gcccauaugguccaggcua

SEQ ID NO: 1779048 - RNA, 19 nt, Artificial Sequence
  Description of Artificial Sequence: Synthetic oligonucleotide
  Antisense strand to SEQ ID NO: 1779047
uagccuggaccauaugggc

SEQ ID NO: 1779049 - RNA, 19 nt, Artificial Sequence
  Description of Artificial Sequence: Synthetic oligonucleotide
  Sense strand starting at position 3289 of SEQ ID NO: 1562873
gagaaagggccguguucuu

SEQ ID NO: 1779050 - RNA, 19 nt, Artificial Sequence
  Description of Artificial Sequence: Synthetic oligonucleotide
  Antisense strand to SEQ ID NO: 1779049
aagaacacggcccuuucuc

SEQ ID NO: 1779051 - RNA, 19 nt, Artificial Sequence
  Description of Artificial Sequence: Synthetic oligonucleotide
  Sense strand starting at position 3495 of SEQ ID NO: 1562873
ggugaugagcggugagauc

SEQ ID NO: 1779052 - RNA, 19 nt, Artificial Sequence
  Description of Artificial Sequence: Synthetic oligonucleotide
  Antisense strand to SEQ ID NO: 1779051
gaucucaccgcucaucacc

SEQ ID NO: 1779053 - RNA, 19 nt, Artificial Sequence
  Description of Artificial Sequence: Synthetic oligonucleotide
  Sense strand starting at position 3504 of SEQ ID NO: 1562873
cggugagaucgcagagagu

SEQ ID NO: 1779054 - RNA, 19 nt, Artificial Sequence
  Description of Artificial Sequence: Synthetic oligonucleotide
  Antisense strand to SEQ ID NO: 1779053
acucucugcgaucucaccg

SEQ ID NO: 1779055 - RNA, 19 nt, Artificial Sequence
  Description of Artificial Sequence: Synthetic oligonucleotide
  Sense strand starting at position 3519 of SEQ ID NO: 1562873
gagucagggucucccugaa

SEQ ID NO: 1779056 - RNA, 19 nt, Artificial Sequence
  Description of Artificial Sequence: Synthetic oligonucleotide
  Antisense strand to SEQ ID NO: 1779055
uucagggagacccugacuc

SEQ ID NO: 1779057 - RNA, 19 nt, Artificial Sequence
  Description of Artificial Sequence: Synthetic oligonucleotide
  Sense strand starting at position 3981 of SEQ ID NO: 1562873
cugcgauucuggucuuaag

SEQ ID NO: 1779058 - RNA, 19 nt, Artificial Sequence
  Description of Artificial Sequence: Synthetic oligonucleotide
  Antisense strand to SEQ ID NO: 1779057
cuuaagaccagaaucgcag

SEQ ID NO: 1779059 - RNA, 19 nt, Artificial Sequence
  Description of Artificial Sequence: Synthetic oligonucleotide
  Sense strand starting at position 6 of SEQ ID NO: 1562874
cuuagcuccucaggguuaa

SEQ ID NO: 1779060 - RNA, 19 nt, Artificial Sequence
  Description of Artificial Sequence: Synthetic oligonucleotide
  Antisense strand to SEQ ID NO: 1779059
uuaacccugaggagcuaag

SEQ ID NO: 1779061 - RNA, 19 nt, Artificial Sequence
  Description of Artificial Sequence: Synthetic oligonucleotide
  Sense strand starting at position 16 of SEQ ID NO: 1562874
caggguuaaggcuggaaua

SEQ ID NO: 1779062 - RNA, 19 nt, Artificial Sequence
  Description of Artificial Sequence: Synthetic oligonucleotide
  Antisense strand to SEQ ID NO: 1779061
uauuccagccuuaacccug

SEQ ID NO: 1779063 - RNA, 19 nt, Artificial Sequence
  Description of Artificial Sequence: Synthetic oligonucleotide
  Sense strand starting at position 17 of SEQ ID NO: 1562874
aggguuaaggcuggaauaa

SEQ ID NO: 1779064 - RNA, 19 nt, Artificial Sequence
  Description of Artificial Sequence: Synthetic oligonucleotide
  Antisense strand to SEQ ID NO: 1779063
uuauuccagccuuaacccu

SEQ ID NO: 1779065 - RNA, 19 nt, Artificial Sequence
  Description of Artificial Sequence: Synthetic oligonucleotide
  Sense strand starting at position 29 of SEQ ID NO: 1562874
ggaauaacauagcgacuca

SEQ ID NO: 1779066 - RNA, 19 nt, Artificial Sequence
  Description of Artificial Sequence: Synthetic oligonucleotide
  Antisense strand to SEQ ID NO: 1779065
ugagucgcuauguuauucc

SEQ ID NO: 1779067 - RNA, 19 nt, Artificial Sequence
  Description of Artificial Sequence: Synthetic oligonucleotide
  Sense strand starting at position 115 of SEQ ID NO: 1562874
cccauaguucucugagacu

SEQ ID NO: 1779068 - RNA, 19 nt, Artificial Sequence
  Description of Artificial Sequence: Synthetic oligonucleotide
  Antisense strand to SEQ ID NO: 1779067
agucucagagaacuauggg

SEQ ID NO: 1779069 - RNA, 19 nt, Artificial Sequence
  Description of Artificial Sequence: Synthetic oligonucleotide
  Sense strand starting at position 146 of SEQ ID NO: 1562874
gggcccaggugcuuacaua

SEQ ID NO: 1779070 - RNA, 19 nt, Artificial Sequence
  Description of Artificial Sequence: Synthetic oligonucleotide
  Antisense strand to SEQ ID NO: 1779069
uauguaagcaccugggccc

SEQ ID NO: 1779071 - RNA, 19 nt, Artificial Sequence
  Description of Artificial Sequence: Synthetic oligonucleotide
  Sense strand starting at position 180 of SEQ ID NO: 1562874
gcugguguccugcaugaga

SEQ ID NO: 1779072 - RNA, 19 nt, Artificial Sequence
  Description of Artificial Sequence: Synthetic oligonucleotide
  Antisense strand to SEQ ID NO: 1779071
ucucaugcaggacaccagc

SEQ ID NO: 1779073 - RNA, 19 nt, Artificial Sequence
  Description of Artificial Sequence: Synthetic oligonucleotide
  Sense strand starting at position 182 of SEQ ID NO: 1562874
ugguguccugcaugagauc

SEQ ID NO: 1779074 - RNA, 19 nt, Artificial Sequence
  Description of Artificial Sequence: Synthetic oligonucleotide
  Antisense strand to SEQ ID NO: 1779073
gaucucaugcaggacacca

SEQ ID NO: 1779075 - RNA, 19 nt, Artificial Sequence
  Description of Artificial Sequence: Synthetic oligonucleotide
  Sense strand starting at position 193 of SEQ ID NO: 1562874
augagaucugucugcuucu

SEQ ID NO: 1779076 - RNA, 19 nt, Artificial Sequence
  Description of Artificial Sequence: Synthetic oligonucleotide
  Antisense strand to SEQ ID NO: 1779075
agaagcagacagaucucau

SEQ ID NO: 1779077 - RNA, 19 nt, Artificial Sequence
  Description of Artificial Sequence: Synthetic oligonucleotide
  Sense strand starting at position 230 of SEQ ID NO: 1562874
cgcgguacucuuucgagca

SEQ ID NO: 1779078 - RNA, 19 nt, Artificial Sequence
  Description of Artificial Sequence: Synthetic oligonucleotide
  Antisense strand to SEQ ID NO: 1779077
ugcucgaaagaguaccgcg

SEQ ID NO: 1779079 - RNA, 19 nt, Artificial Sequence
  Description of Artificial Sequence: Synthetic oligonucleotide
  Sense strand starting at position 408 of SEQ ID NO: 1562874
ccagacuuuguguagugga

SEQ ID NO: 1779080 - RNA, 19 nt, Artificial Sequence
  Description of Artificial Sequence: Synthetic oligonucleotide
  Antisense strand to SEQ ID NO: 1779079
uccacuacacaaagucugg

SEQ ID NO: 1779081 - RNA, 19 nt, Artificial Sequence
  Description of Artificial Sequence: Synthetic oligonucleotide
  Sense strand starting at position 553 of SEQ ID NO: 1562874
ggcugcgauuuaccaagua

SEQ ID NO: 1779082 - RNA, 19 nt, Artificial Sequence
  Description of Artificial Sequence: Synthetic oligonucleotide
  Antisense strand to SEQ ID NO: 1779081
uacuugguaaaucgcagcc

SEQ ID NO: 1779083 - RNA, 19 nt, Artificial Sequence
  Description of Artificial Sequence: Synthetic oligonucleotide
  Sense strand starting at position 565 of SEQ ID NO: 1562874
ccaaguaggucuuugagca

SEQ ID NO: 1779084 - RNA, 19 nt, Artificial Sequence
  Description of Artificial Sequence: Synthetic oligonucleotide
  Antisense strand to SEQ ID NO: 1779083
ugcucaaagaccuacuugg

SEQ ID NO: 1779085 - RNA, 19 nt, Artificial Sequence
  Description of Artificial Sequence: Synthetic oligonucleotide
  Sense strand starting at position 566 of SEQ ID NO: 1562874
caaguaggucuuugagcaa

SEQ ID NO: 1779086 - RNA, 19 nt, Artificial Sequence
  Description of Artificial Sequence: Synthetic oligonucleotide
  Antisense strand to SEQ ID NO: 1779085
uugcucaaagaccuacuug

SEQ ID NO: 1779087 - RNA, 19 nt, Artificial Sequence
  Description of Artificial Sequence: Synthetic oligonucleotide
  Sense strand starting at position 885 of SEQ ID NO: 1562874
ccacuuuccugacagguaa

SEQ ID NO: 1779088 - RNA, 19 nt, Artificial Sequence
  Description of Artificial Sequence: Synthetic oligonucleotide
  Antisense strand to SEQ ID NO: 1779087
uuaccugucaggaaagugg

SEQ ID NO: 1779089 - RNA, 19 nt, Artificial Sequence
  Description of Artificial Sequence: Synthetic oligonucleotide
  Sense strand starting at position 903 of SEQ ID NO: 1562874
aaccaagucucaggagaag

SEQ ID NO: 1779090 - RNA, 19 nt, Artificial Sequence
  Description of Artificial Sequence: Synthetic oligonucleotide
  Antisense strand to SEQ ID NO: 1779089
cuucuccugagacuugguu

SEQ ID NO: 1779091 - RNA, 19 nt, Artificial Sequence
  Description of Artificial Sequence: Synthetic oligonucleotide
  Sense strand starting at position 1432 of SEQ ID NO: 1562874
ggcuguagaugacgucaua

SEQ ID NO: 1779092 - RNA, 19 nt, Artificial Sequence
  Description of Artificial Sequence: Synthetic oligonucleotide
  Antisense strand to SEQ ID NO: 1779091
uaugacgucaucuacagcc

SEQ ID NO: 1779093 - RNA, 19 nt, Artificial Sequence
  Description of Artificial Sequence: Synthetic oligonucleotide
  Sense strand starting at position 1484 of SEQ ID NO: 1562874
cugugcaugcugugugauu

SEQ ID NO: 1779094 - RNA, 19 nt, Artificial Sequence
  Description of Artificial Sequence: Synthetic oligonucleotide
  Antisense strand to SEQ ID NO: 1779093
aaucacacagcaugcacag

SEQ ID NO: 1779095 - RNA, 19 nt, Artificial Sequence
  Description of Artificial Sequence: Synthetic oligonucleotide
  Sense strand starting at position 1486 of SEQ ID NO: 1562874
gugcaugcugugugauugu

SEQ ID NO: 1779096 - RNA, 19 nt, Artificial Sequence
  Description of Artificial Sequence: Synthetic oligonucleotide
  Antisense strand to SEQ ID NO: 1779095
acaaucacacagcaugcac

SEQ ID NO: 1779097 - RNA, 19 nt, Artificial Sequence
  Description of Artificial Sequence: Synthetic oligonucleotide
  Sense strand starting at position 1702 of SEQ ID NO: 1562874
cuggaagccuuccagggau

SEQ ID NO: 1779098 - RNA, 19 nt, Artificial Sequence
  Description of Artificial Sequence: Synthetic oligonucleotide
  Antisense strand to SEQ ID NO: 1779097
aucccuggaaggcuuccag

SEQ ID NO: 1779099 - RNA, 19 nt, Artificial Sequence
  Description of Artificial Sequence: Synthetic oligonucleotide
  Sense strand starting at position 1725 of SEQ ID NO: 1562874
cuucucuaccuguggagau

SEQ ID NO: 1779100 - RNA, 19 nt, Artificial Sequence
  Description of Artificial Sequence: Synthetic oligonucleotide
  Antisense strand to SEQ ID NO: 1779099
aucuccacagguagagaag

SEQ ID NO: 1779101 - RNA, 19 nt, Artificial Sequence
  Description of Artificial Sequence: Synthetic oligonucleotide
  Sense strand starting at position 2101 of SEQ ID NO: 1562874
gcaggccuucugggaacau

SEQ ID NO: 1779102 - RNA, 19 nt, Artificial Sequence
  Description of Artificial Sequence: Synthetic oligonucleotide
  Antisense strand to SEQ ID NO: 1779101
auguucccagaaggccugc

SEQ ID NO: 1779103 - RNA, 19 nt, Artificial Sequence
  Description of Artificial Sequence: Synthetic oligonucleotide
  Sense strand starting at position 2199 of SEQ ID NO: 1562874
cgaauucguucuucgaggu

SEQ ID NO: 1779104 - RNA, 19 nt, Artificial Sequence
  Description of Artificial Sequence: Synthetic oligonucleotide
  Antisense strand to SEQ ID NO: 1779103
accucgaagaacgaauucg

SEQ ID NO: 1779105 - RNA, 19 nt, Artificial Sequence
  Description of Artificial Sequence: Synthetic oligonucleotide
  Sense strand starting at position 2474 of SEQ ID NO: 1562874
ggacaucugugagcggaaa

SEQ ID NO: 1779106 - RNA, 19 nt, Artificial Sequence
  Description of Artificial Sequence: Synthetic oligonucleotide
  Antisense strand to SEQ ID NO: 1779105
uuuccgcucacagaugucc

SEQ ID NO: 1779107 - RNA, 19 nt, Artificial Sequence
  Description of Artificial Sequence: Synthetic oligonucleotide
  Sense strand starting at position 2640 of SEQ ID NO: 1562874
ggccuugucuuuguaggca

SEQ ID NO: 1779108 - RNA, 19 nt, Artificial Sequence
  Description of Artificial Sequence: Synthetic oligonucleotide
  Antisense strand to SEQ ID NO: 1779107
ugccuacaaagacaaggcc

SEQ ID NO: 1779109 - RNA, 19 nt, Artificial Sequence
  Description of Artificial Sequence: Synthetic oligonucleotide
  Sense strand starting at position 2880 of SEQ ID NO: 1562874
agaugaaggucugauucca

SEQ ID NO: 1779110 - RNA, 19 nt, Artificial Sequence
  Description of Artificial Sequence: Synthetic oligonucleotide
  Antisense strand to SEQ ID NO: 1779109
uggaaucagaccuucaucu

SEQ ID NO: 1779111 - RNA, 19 nt, Artificial Sequence
  Description of Artificial Sequence: Synthetic oligonucleotide
  Sense strand starting at position 2885 of SEQ ID NO: 1562874
aaggucugauuccaaguau

SEQ ID NO: 1779112 - RNA, 19 nt, Artificial Sequence
  Description of Artificial Sequence: Synthetic oligonucleotide
  Antisense strand to SEQ ID NO: 1779111
auacuuggaaucagaccuu

SEQ ID NO: 1779113 - RNA, 19 nt, Artificial Sequence
  Description of Artificial Sequence: Synthetic oligonucleotide
  Sense strand starting at position 3019 of SEQ ID NO: 1562874
ucugaaagauagcgaucuu

SEQ ID NO: 1779114 - RNA, 19 nt, Artificial Sequence
  Description of Artificial Sequence: Synthetic oligonucleotide
  Antisense strand to SEQ ID NO: 1779113
aagaucgcuaucuuucaga

SEQ ID NO: 1779115 - RNA, 19 nt, Artificial Sequence
  Description of Artificial Sequence: Synthetic oligonucleotide
  Sense strand starting at position 3020 of SEQ ID NO: 1562874
cugaaagauagcgaucuua

SEQ ID NO: 1779116 - RNA, 19 nt, Artificial Sequence
  Description of Artificial Sequence: Synthetic oligonucleotide
  Antisense strand to SEQ ID NO: 1779115
uaagaucgcuaucuuucag

SEQ ID NO: 1779117 - RNA, 19 nt, Artificial Sequence
  Description of Artificial Sequence: Synthetic oligonucleotide
  Sense strand starting at position 3513 of SEQ ID NO: 1562874
gucugaggaucacguagua

SEQ ID NO: 1779118 - RNA, 19 nt, Artificial Sequence
  Description of Artificial Sequence: Synthetic oligonucleotide
  Antisense strand to SEQ ID NO: 1779117
uacuacgugauccucagac

SEQ ID NO: 1779119 - RNA, 19 nt, Artificial Sequence
  Description of Artificial Sequence: Synthetic oligonucleotide
  Sense strand starting at position 3656 of SEQ ID NO: 1562874
ucuggauucucauccugag

SEQ ID NO: 1779120 - RNA, 19 nt, Artificial Sequence
  Description of Artificial Sequence: Synthetic oligonucleotide
  Antisense strand to SEQ ID NO: 1779119
cucaggaugagaauccaga

SEQ ID NO: 1779121 - RNA, 19 nt, Artificial Sequence
  Description of Artificial Sequence: Synthetic oligonucleotide
  Sense strand starting at position 3659 of SEQ ID NO: 1562874
ggauucucauccugagaau

SEQ ID NO: 1779122 - RNA, 19 nt, Artificial Sequence
  Description of Artificial Sequence: Synthetic oligonucleotide
  Antisense strand to SEQ ID NO: 1779121
auucucaggaugagaaucc

SEQ ID NO: 1779123 - RNA, 19 nt, Artificial Sequence
  Description of Artificial Sequence: Synthetic oligonucleotide
  Sense strand starting at position 3662 of SEQ ID NO: 1562874
uucucauccugagaauguc

SEQ ID NO: 1779124 - RNA, 19 nt, Artificial Sequence
  Description of Artificial Sequence: Synthetic oligonucleotide
  Antisense strand to SEQ ID NO: 1779123
gacauucucaggaugagaa

SEQ ID NO: 1779125 - RNA, 19 nt, Artificial Sequence
  Description of Artificial Sequence: Synthetic oligonucleotide
  Sense strand starting at position 3686 of SEQ ID NO: 1562874
cgcugaaguccucaucucu

SEQ ID NO: 1779126 - RNA, 19 nt, Artificial Sequence
  Description of Artificial Sequence: Synthetic oligonucleotide
  Antisense strand to SEQ ID NO: 1779125
agagaugaggacuucagcg

SEQ ID NO: 1779127 - RNA, 19 nt, Artificial Sequence
  Description of Artificial Sequence: Synthetic oligonucleotide
  Sense strand starting at position 65 of SEQ ID NO: 1562875
aggccauagucucaugcau

SEQ ID NO: 1779128 - RNA, 19 nt, Artificial Sequence
  Description of Artificial Sequence: Synthetic oligonucleotide
  Antisense strand to SEQ ID NO: 1779127
augcaugagacuauggccu

SEQ ID NO: 1779129 - RNA, 19 nt, Artificial Sequence
  Description of Artificial Sequence: Synthetic oligonucleotide
  Sense strand starting at position 159 of SEQ ID NO: 1562875
ggcacuaguggaugucaca

SEQ ID NO: 1779130 - RNA, 19 nt, Artificial Sequence
  Description of Artificial Sequence: Synthetic oligonucleotide
  Antisense strand to SEQ ID NO: 1779129
ugugacauccacuagugcc

SEQ ID NO: 1779131 - RNA, 19 nt, Artificial Sequence
  Description of Artificial Sequence: Synthetic oligonucleotide
  Sense strand starting at position 225 of SEQ ID NO: 1562875
auaauugaucuuuggacau

SEQ ID NO: 1779132 - RNA, 19 nt, Artificial Sequence
  Description of Artificial Sequence: Synthetic oligonucleotide
  Antisense strand to SEQ ID NO: 1779131
auguccaaagaucaauuau

SEQ ID NO: 1779133 - RNA, 19 nt, Artificial Sequence
  Description of Artificial Sequence: Synthetic oligonucleotide
  Sense strand starting at position 227 of SEQ ID NO: 1562875
aauugaucuuuggacaugu

SEQ ID NO: 1779134 - RNA, 19 nt, Artificial Sequence
  Description of Artificial Sequence: Synthetic oligonucleotide
  Antisense strand to SEQ ID NO: 1779133
acauguccaaagaucaauu

SEQ ID NO: 1779135 - RNA, 19 nt, Artificial Sequence
  Description of Artificial Sequence: Synthetic oligonucleotide
  Sense strand starting at position 231 of SEQ ID NO: 1562875
gaucuuuggacaugugggu

SEQ ID NO: 1779136 - RNA, 19 nt, Artificial Sequence
  Description of Artificial Sequence: Synthetic oligonucleotide
  Antisense strand to SEQ ID NO: 1779135
acccacauguccaaagauc

SEQ ID NO: 1779137 - RNA, 19 nt, Artificial Sequence
  Description of Artificial Sequence: Synthetic oligonucleotide
  Sense strand starting at position 281 of SEQ ID NO: 1562875
ggugaucacugggaauaca

SEQ ID NO: 1779138 - RNA, 19 nt, Artificial Sequence
  Description of Artificial Sequence: Synthetic oligonucleotide
  Antisense strand to SEQ ID NO: 1779137
uguauucccagugaucacc

SEQ ID NO: 1779139 - RNA, 19 nt, Artificial Sequence
  Description of Artificial Sequence: Synthetic oligonucleotide
  Sense strand starting at position 478 of SEQ ID NO: 1562875
agccauuaguccuggacac

SEQ ID NO: 1779140 - RNA, 19 nt, Artificial Sequence
  Description of Artificial Sequence: Synthetic oligonucleotide
  Antisense strand to SEQ ID NO: 1779139
guguccaggacuaauggcu

SEQ ID NO: 1779141 - RNA, 19 nt, Artificial Sequence
  Description of Artificial Sequence: Synthetic oligonucleotide
  Sense strand starting at position 479 of SEQ ID NO: 1562875
gccauuaguccuggacacu

SEQ ID NO: 1779142 - RNA, 19 nt, Artificial Sequence
  Description of Artificial Sequence: Synthetic oligonucleotide
  Antisense strand to SEQ ID NO: 1779141
aguguccaggacuaauggc

SEQ ID NO: 1779143 - RNA, 19 nt, Artificial Sequence
  Description of Artificial Sequence: Synthetic oligonucleotide
  Sense strand starting at position 510 of SEQ ID NO: 1562875
guuggcagucuuuggaaau

SEQ ID NO: 1779144 - RNA, 19 nt, Artificial Sequence
  Description of Artificial Sequence: Synthetic oligonucleotide
  Antisense strand to SEQ ID NO: 1779143
auuuccaaagacugccaac

SEQ ID NO: 1779145 - RNA, 19 nt, Artificial Sequence
  Description of Artificial Sequence: Synthetic oligonucleotide
  Sense strand starting at position 511 of SEQ ID NO: 1562875
uuggcagucuuuggaaaug

SEQ ID NO: 1779146 - RNA, 19 nt, Artificial Sequence
  Description of Artificial Sequence: Synthetic oligonucleotide
  Antisense strand to SEQ ID NO: 1779145
cauuuccaaagacugccaa

SEQ ID NO: 1779147 - RNA, 19 nt, Artificial Sequence
  Description of Artificial Sequence: Synthetic oligonucleotide
  Sense strand starting at position 911 of SEQ ID NO: 1562875
gugccacuccucugugaag

SEQ ID NO: 1779148 - RNA, 19 nt, Artificial Sequence
  Description of Artificial Sequence: Synthetic oligonucleotide
  Antisense strand to SEQ ID NO: 1779147
cuucacagaggaguggcac

SEQ ID NO: 1779149 - RNA, 19 nt, Artificial Sequence
  Description of Artificial Sequence: Synthetic oligonucleotide
  Sense strand starting at position 999 of SEQ ID NO: 1562875
ggguguucaggcugucagu

SEQ ID NO: 1779150 - RNA, 19 nt, Artificial Sequence
  Description of Artificial Sequence: Synthetic oligonucleotide
  Antisense strand to SEQ ID NO: 1779149
acugacagccugaacaccc

SEQ ID NO: 1779151 - RNA, 19 nt, Artificial Sequence
  Description of Artificial Sequence: Synthetic oligonucleotide
  Sense strand starting at position 1409 of SEQ ID NO: 1562875
agccaaugcccucagacaa

SEQ ID NO: 1779152 - RNA, 19 nt, Artificial Sequence
  Description of Artificial Sequence: Synthetic oligonucleotide
  Antisense strand to SEQ ID NO: 1779151
uugucugagggcauuggcu

SEQ ID NO: 1779153 - RNA, 19 nt, Artificial Sequence
  Description of Artificial Sequence: Synthetic oligonucleotide
  Sense strand starting at position 1545 of SEQ ID NO: 1562875
cacagauguuaaggacuau

SEQ ID NO: 1779154 - RNA, 19 nt, Artificial Sequence
  Description of Artificial Sequence: Synthetic oligonucleotide
  Antisense strand to SEQ ID NO: 1779153
auaguccuuaacaucugug

SEQ ID NO: 1779155 - RNA, 19 nt, Artificial Sequence
  Description of Artificial Sequence: Synthetic oligonucleotide
  Sense strand starting at position 1551 of SEQ ID NO: 1562875
uguuaaggacuaugucaug

SEQ ID NO: 1779156 - RNA, 19 nt, Artificial Sequence
  Description of Artificial Sequence: Synthetic oligonucleotide
  Antisense strand to SEQ ID NO: 1779155
caugacauaguccuuaaca

SEQ ID NO: 1779157 - RNA, 19 nt, Artificial Sequence
  Description of Artificial Sequence: Synthetic oligonucleotide
  Sense strand starting at position 1645 of SEQ ID NO: 1562875
cuugcucuccugucuugua

SEQ ID NO: 1779158 - RNA, 19 nt, Artificial Sequence
  Description of Artificial Sequence: Synthetic oligonucleotide
  Antisense strand to SEQ ID NO: 1779157
uacaagacaggagagcaag

SEQ ID NO: 1779159 - RNA, 19 nt, Artificial Sequence
  Description of Artificial Sequence: Synthetic oligonucleotide
  Sense strand starting at position 2041 of SEQ ID NO: 1562875
caggccaguugcuguuaaa

SEQ ID NO: 1779160 - RNA, 19 nt, Artificial Sequence
  Description of Artificial Sequence: Synthetic oligonucleotide
  Antisense strand to SEQ ID NO: 1779159
uuuaacagcaacuggccug

SEQ ID NO: 1779161 - RNA, 19 nt, Artificial Sequence
  Description of Artificial Sequence: Synthetic oligonucleotide
  Sense strand starting at position 2258 of SEQ ID NO: 1562875
acggacagcuguuaucagu

SEQ ID NO: 1779162 - RNA, 19 nt, Artificial Sequence
  Description of Artificial Sequence: Synthetic oligonucleotide
  Antisense strand to SEQ ID NO: 1779161
acugauaacagcuguccgu

SEQ ID NO: 1779163 - RNA, 19 nt, Artificial Sequence
  Description of Artificial Sequence: Synthetic oligonucleotide
  Sense strand starting at position 2267 of SEQ ID NO: 1562875
uguuaucagugcugugaga

SEQ ID NO: 1779164 - RNA, 19 nt, Artificial Sequence
  Description of Artificial Sequence: Synthetic oligonucleotide
  Antisense strand to SEQ ID NO: 1779163
ucucacagcacugauaaca

SEQ ID NO: 1779165 - RNA, 19 nt, Artificial Sequence
  Description of Artificial Sequence: Synthetic oligonucleotide
  Sense strand starting at position 2327 of SEQ ID NO: 1562875
gaggaaagcuuccggaaga

SEQ ID NO: 1779166 - RNA, 19 nt, Artificial Sequence
  Description of Artificial Sequence: Synthetic oligonucleotide
  Antisense strand to SEQ ID NO: 1779165
ucuuccggaagcuuuccuc

SEQ ID NO: 1779167 - RNA, 19 nt, Artificial Sequence
  Description of Artificial Sequence: Synthetic oligonucleotide
  Sense strand starting at position 2328 of SEQ ID NO: 1562875
aggaaagcuuccggaagaa

SEQ ID NO: 1779168 - RNA, 19 nt, Artificial Sequence
  Description of Artificial Sequence: Synthetic oligonucleotide
  Antisense strand to SEQ ID NO: 1779167
uucuuccggaagcuuuccu

SEQ ID NO: 1779169 - RNA, 19 nt, Artificial Sequence
  Description of Artificial Sequence: Synthetic oligonucleotide
  Sense strand starting at position 2343 of SEQ ID NO: 1562875
agaagugaccucuaagcug

SEQ ID NO: 1779170 - RNA, 19 nt, Artificial Sequence
  Description of Artificial Sequence: Synthetic oligonucleotide
  Antisense strand to SEQ ID NO: 1779169
cagcuuagaggucacuucu

SEQ ID NO: 1779171 - RNA, 19 nt, Artificial Sequence
  Description of Artificial Sequence: Synthetic oligonucleotide
  Sense strand starting at position 2357 of SEQ ID NO: 1562875
agcugacccuugcagauuu

SEQ ID NO: 1779172 - RNA, 19 nt, Artificial Sequence
  Description of Artificial Sequence: Synthetic oligonucleotide
  Antisense strand to SEQ ID NO: 1779171
aaaucugcaagggucagcu

SEQ ID NO: 1779173 - RNA, 19 nt, Artificial Sequence
  Description of Artificial Sequence: Synthetic oligonucleotide
  Sense strand starting at position 2559 of SEQ ID NO: 1562875
aacacaaguccuggaguca

SEQ ID NO: 1779174 - RNA, 19 nt, Artificial Sequence
  Description of Artificial Sequence: Synthetic oligonucleotide
  Antisense strand to SEQ ID NO: 1779173
ugacuccaggacuuguguu

SEQ ID NO: 1779175 - RNA, 19 nt, Artificial Sequence
  Description of Artificial Sequence: Synthetic oligonucleotide
  Sense strand starting at position 2568 of SEQ ID NO: 1562875
ccuggagucaggcguguuu

SEQ ID NO: 1779176 - RNA, 19 nt, Artificial Sequence
  Description of Artificial Sequence: Synthetic oligonucleotide
  Antisense strand to SEQ ID NO: 1779175
aaacacgccugacuccagg

SEQ ID NO: 1779177 - RNA, 19 nt, Artificial Sequence
  Description of Artificial Sequence: Synthetic oligonucleotide
  Sense strand starting at position 2577 of SEQ ID NO: 1562875
aggcguguuucccagucca

SEQ ID NO: 1779178 - RNA, 19 nt, Artificial Sequence
  Description of Artificial Sequence: Synthetic oligonucleotide
  Antisense strand to SEQ ID NO: 1779177
uggacugggaaacacgccu

SEQ ID NO: 1779179 - RNA, 19 nt, Artificial Sequence
  Description of Artificial Sequence: Synthetic oligonucleotide
  Sense strand starting at position 2580 of SEQ ID NO: 1562875
cguguuucccaguccacga

SEQ ID NO: 1779180 - RNA, 19 nt, Artificial Sequence
  Description of Artificial Sequence: Synthetic oligonucleotide
  Antisense strand to SEQ ID NO: 1779179
ucguggacugggaaacacg

SEQ ID NO: 1779181 - RNA, 19 nt, Artificial Sequence
  Description of Artificial Sequence: Synthetic oligonucleotide
  Sense strand starting at position 2684 of SEQ ID NO: 1562875
aguuuauccucucaggcga

SEQ ID NO: 1779182 - RNA, 19 nt, Artificial Sequence
  Description of Artificial Sequence: Synthetic oligonucleotide
  Antisense strand to SEQ ID NO: 1779181
ucgccugagaggauaaacu

SEQ ID NO: 1779183 - RNA, 19 nt, Artificial Sequence
  Description of Artificial Sequence: Synthetic oligonucleotide
  Sense strand starting at position 2786 of SEQ ID NO: 1562875
cgcuaauugccguggcaga

SEQ ID NO: 1779184 - RNA, 19 nt, Artificial Sequence
  Description of Artificial Sequence: Synthetic oligonucleotide
  Antisense strand to SEQ ID NO: 1779183
ucugccacggcaauuagcg

SEQ ID NO: 1779185 - RNA, 19 nt, Artificial Sequence
  Description of Artificial Sequence: Synthetic oligonucleotide
  Sense strand starting at position 3446 of SEQ ID NO: 1562875
acauuuguggucugcaauc

SEQ ID NO: 1779186 - RNA, 19 nt, Artificial Sequence
  Description of Artificial Sequence: Synthetic oligonucleotide
  Antisense strand to SEQ ID NO: 1779185
gauugcagaccacaaaugu

SEQ ID NO: 1779187 - RNA, 19 nt, Artificial Sequence
  Description of Artificial Sequence: Synthetic oligonucleotide
  Sense strand starting at position 3452 of SEQ ID NO: 1562875
guggucugcaaucagguua

SEQ ID NO: 1779188 - RNA, 19 nt, Artificial Sequence
  Description of Artificial Sequence: Synthetic oligonucleotide
  Antisense strand to SEQ ID NO: 1779187
uaaccugauugcagaccac

SEQ ID NO: 1779189 - RNA, 19 nt, Artificial Sequence
  Description of Artificial Sequence: Synthetic oligonucleotide
  Sense strand starting at position 3471 of SEQ ID NO: 1562875
aaagacauagugugccauu

SEQ ID NO: 1779190 - RNA, 19 nt, Artificial Sequence
  Description of Artificial Sequence: Synthetic oligonucleotide
  Antisense strand to SEQ ID NO: 1779189
aauggcacacuaugucuuu

SEQ ID NO: 1779191 - RNA, 19 nt, Artificial Sequence
  Description of Artificial Sequence: Synthetic oligonucleotide
  Sense strand starting at position 3474 of SEQ ID NO: 1562875
gacauagugugccauuugu

SEQ ID NO: 1779192 - RNA, 19 nt, Artificial Sequence
  Description of Artificial Sequence: Synthetic oligonucleotide
  Antisense strand to SEQ ID NO: 1779191
acaaauggcacacuauguc

SEQ ID NO: 1779193 - RNA, 19 nt, Artificial Sequence
  Description of Artificial Sequence: Synthetic oligonucleotide
  Sense strand starting at position 3481 of SEQ ID NO: 1562875
ugugccauuugucaucaga

SEQ ID NO: 1779194 - RNA, 19 nt, Artificial Sequence
  Description of Artificial Sequence: Synthetic oligonucleotide
  Antisense strand to SEQ ID NO: 1779193
ucugaugacaaauggcaca

SEQ ID NO: 1779195 - RNA, 19 nt, Artificial Sequence
  Description of Artificial Sequence: Synthetic oligonucleotide
  Sense strand starting at position 3509 of SEQ ID NO: 1562875
gccugacucuggcaggauu

SEQ ID NO: 1779196 - RNA, 19 nt, Artificial Sequence
  Description of Artificial Sequence: Synthetic oligonucleotide
  Antisense strand to SEQ ID NO: 1779195
aauccugccagagucaggc

SEQ ID NO: 1779197 - RNA, 19 nt, Artificial Sequence
  Description of Artificial Sequence: Synthetic oligonucleotide
  Sense strand starting at position 3529 of SEQ ID NO: 1562875
gcuaccacuagcugugaga

SEQ ID NO: 1779198 - RNA, 19 nt, Artificial Sequence
  Description of Artificial Sequence: Synthetic oligonucleotide
  Antisense strand to SEQ ID NO: 1779197
ucucacagcuagugguagc

SEQ ID NO: 1779199 - RNA, 19 nt, Artificial Sequence
  Description of Artificial Sequence: Synthetic oligonucleotide
  Sense strand starting at position 3562 of SEQ ID NO: 1562875
uuauuagagccagggucuu

SEQ ID NO: 1779200 - RNA, 19 nt, Artificial Sequence
  Description of Artificial Sequence: Synthetic oligonucleotide
  Antisense strand to SEQ ID NO: 1779199
aagacccuggcucuaauaa

SEQ ID NO: 1779201 - RNA, 19 nt, Artificial Sequence
  Description of Artificial Sequence: Synthetic oligonucleotide
  Sense strand starting at position 3787 of SEQ ID NO: 1562875
aaagauuugcguugccuua

SEQ ID NO: 1779202 - RNA, 19 nt, Artificial Sequence
  Description of Artificial Sequence: Synthetic oligonucleotide
  Antisense strand to SEQ ID NO: 1779201
uaaggcaacgcaaaucuuu

SEQ ID NO: 1779203 - RNA, 19 nt, Artificial Sequence
  Description of Artificial Sequence: Synthetic oligonucleotide
  Sense strand starting at position 3810 of SEQ ID NO: 1562875
cgauguucuuaucugucau

SEQ ID NO: 1779204 - RNA, 19 nt, Artificial Sequence
  Description of Artificial Sequence: Synthetic oligonucleotide
  Antisense strand to SEQ ID NO: 1779203
augacagauaagaacaucg

SEQ ID NO: 1779205 - RNA, 19 nt, Artificial Sequence
  Description of Artificial Sequence: Synthetic oligonucleotide
  Sense strand starting at position 3812 of SEQ ID NO: 1562875
auguucuuaucugucauau

SEQ ID NO: 1779206 - RNA, 19 nt, Artificial Sequence
  Description of Artificial Sequence: Synthetic oligonucleotide
  Antisense strand to SEQ ID NO: 1779205
auaugacagauaagaacau

SEQ ID NO: 1779207 - RNA, 19 nt, Artificial Sequence
  Description of Artificial Sequence: Synthetic oligonucleotide
  Sense strand starting at position 87 of SEQ ID NO: 1562876
aggccauagucucaugcau

SEQ ID NO: 1779208 - RNA, 19 nt, Artificial Sequence
  Description of Artificial Sequence: Synthetic oligonucleotide
  Antisense strand to SEQ ID NO: 1779207
augcaugagacuauggccu

SEQ ID NO: 1779209 - RNA, 19 nt, Artificial Sequence
  Description of Artificial Sequence: Synthetic oligonucleotide
  Sense strand starting at position 181 of SEQ ID NO: 1562876
ggcacuaguggaugucaca

SEQ ID NO: 1779210 - RNA, 19 nt, Artificial Sequence
  Description of Artificial Sequence: Synthetic oligonucleotide
  Antisense strand to SEQ ID NO: 1779209
ugugacauccacuagugcc

SEQ ID NO: 1779211 - RNA, 19 nt, Artificial Sequence
  Description of Artificial Sequence: Synthetic oligonucleotide
  Sense strand starting at position 247 of SEQ ID NO: 1562876
auaauugaucuuuggacau

SEQ ID NO: 1779212 - RNA, 19 nt, Artificial Sequence
  Description of Artificial Sequence: Synthetic oligonucleotide
  Antisense strand to SEQ ID NO: 1779211
auguccaaagaucaauuau

SEQ ID NO: 1779213 - RNA, 19 nt, Artificial Sequence
  Description of Artificial Sequence: Synthetic oligonucleotide
  Sense strand starting at position 249 of SEQ ID NO: 1562876
aauugaucuuuggacaugu

SEQ ID NO: 1779214 - RNA, 19 nt, Artificial Sequence
  Description of Artificial Sequence: Synthetic oligonucleotide
  Antisense strand to SEQ ID NO: 1779213
acauguccaaagaucaauu

SEQ ID NO: 1779215 - RNA, 19 nt, Artificial Sequence
  Description of Artificial Sequence: Synthetic oligonucleotide
  Sense strand starting at position 253 of SEQ ID NO: 1562876
gaucuuuggacaugugggu

SEQ ID NO: 1779216 - RNA, 19 nt, Artificial Sequence
  Description of Artificial Sequence: Synthetic oligonucleotide
  Antisense strand to SEQ ID NO: 1779215
acccacauguccaaagauc

SEQ ID NO: 1779217 - RNA, 19 nt, Artificial Sequence
  Description of Artificial Sequence: Synthetic oligonucleotide
  Sense strand starting at position 303 of SEQ ID NO: 1562876
ggugaucacugggaauaca

SEQ ID NO: 1779218 - RNA, 19 nt, Artificial Sequence
  Description of Artificial Sequence: Synthetic oligonucleotide
  Antisense strand to SEQ ID NO: 1779217
uguauucccagugaucacc

SEQ ID NO: 1779219 - RNA, 19 nt, Artificial Sequence
  Description of Artificial Sequence: Synthetic oligonucleotide
  Sense strand starting at position 500 of SEQ ID NO: 1562876
agccauuaguccuggacac

SEQ ID NO: 1779220 - RNA, 19 nt, Artificial Sequence
  Description of Artificial Sequence: Synthetic oligonucleotide
  Antisense strand to SEQ ID NO: 1779219
guguccaggacuaauggcu

SEQ ID NO: 1779221 - RNA, 19 nt, Artificial Sequence
  Description of Artificial Sequence: Synthetic oligonucleotide
  Sense strand starting at position 501 of SEQ ID NO: 1562876
gccauuaguccuggacacu

SEQ ID NO: 1779222 - RNA, 19 nt, Artificial Sequence
  Description of Artificial Sequence: Synthetic oligonucleotide
  Antisense strand to SEQ ID NO: 1779221
aguguccaggacuaauggc

SEQ ID NO: 1779223 - RNA, 19 nt, Artificial Sequence
  Description of Artificial Sequence: Synthetic oligonucleotide
  Sense strand starting at position 532 of SEQ ID NO: 1562876
guuggcagucuuuggaaau

SEQ ID NO: 1779224 - RNA, 19 nt, Artificial Sequence
  Description of Artificial Sequence: Synthetic oligonucleotide
  Antisense strand to SEQ ID NO: 1779223
auuuccaaagacugccaac

SEQ ID NO: 1779225 - RNA, 19 nt, Artificial Sequence
  Description of Artificial Sequence: Synthetic oligonucleotide
  Sense strand starting at position 533 of SEQ ID NO: 1562876
uuggcagucuuuggaaaug

SEQ ID NO: 1779226 - RNA, 19 nt, Artificial Sequence
  Description of Artificial Sequence: Synthetic oligonucleotide
  Antisense strand to SEQ ID NO: 1779225
cauuuccaaagacugccaa

SEQ ID NO: 1779227 - RNA, 19 nt, Artificial Sequence
  Description of Artificial Sequence: Synthetic oligonucleotide
  Sense strand starting at position 933 of SEQ ID NO: 1562876
gugccacuccucugugaag

SEQ ID NO: 1779228 - RNA, 19 nt, Artificial Sequence
  Description of Artificial Sequence: Synthetic oligonucleotide
  Antisense strand to SEQ ID NO: 1779227
cuucacagaggaguggcac

SEQ ID NO: 1779229 - RNA, 19 nt, Artificial Sequence
  Description of Artificial Sequence: Synthetic oligonucleotide
  Sense strand starting at position 1021 of SEQ ID NO: 1562876
ggguguucaggcugucagu

SEQ ID NO: 1779230 - RNA, 19 nt, Artificial Sequence
  Description of Artificial Sequence: Synthetic oligonucleotide
  Antisense strand to SEQ ID NO: 1779229
acugacagccugaacaccc

SEQ ID NO: 1779231 - RNA, 19 nt, Artificial Sequence
  Description of Artificial Sequence: Synthetic oligonucleotide
  Sense strand starting at position 1431 of SEQ ID NO: 1562876
agccaaugcccucagacaa

SEQ ID NO: 1779232 - RNA, 19 nt, Artificial Sequence
  Description of Artificial Sequence: Synthetic oligonucleotide
  Antisense strand to SEQ ID NO: 1779231
uugucugagggcauuggcu

SEQ ID NO: 1779233 - RNA, 19 nt, Artificial Sequence
  Description of Artificial Sequence: Synthetic oligonucleotide
  Sense strand starting at position 1567 of SEQ ID NO: 1562876
cacagauguuaaggacuau

SEQ ID NO: 1779234 - RNA, 19 nt, Artificial Sequence
  Description of Artificial Sequence: Synthetic oligonucleotide
  Antisense strand to SEQ ID NO: 1779233
auaguccuuaacaucugug

SEQ ID NO: 1779235 - RNA, 19 nt, Artificial Sequence
  Description of Artificial Sequence: Synthetic oligonucleotide
  Sense strand starting at position 1573 of SEQ ID NO: 1562876
uguuaaggacuaugucaug

SEQ ID NO: 1779236 - RNA, 19 nt, Artificial Sequence
  Description of Artificial Sequence: Synthetic oligonucleotide
  Antisense strand to SEQ ID NO: 1779235
caugacauaguccuuaaca

SEQ ID NO: 1779237 - RNA, 19 nt, Artificial Sequence
  Description of Artificial Sequence: Synthetic oligonucleotide
  Sense strand starting at position 1667 of SEQ ID NO: 1562876
cuugcucuccugucuugua

SEQ ID NO: 1779238 - RNA, 19 nt, Artificial Sequence
  Description of Artificial Sequence: Synthetic oligonucleotide
  Antisense strand to SEQ ID NO: 1779237
uacaagacaggagagcaag

SEQ ID NO: 1779239 - RNA, 19 nt, Artificial Sequence
  Description of Artificial Sequence: Synthetic oligonucleotide
  Sense strand starting at position 2063 of SEQ ID NO: 1562876
caggccaguugcuguuaaa

SEQ ID NO: 1779240 - RNA, 19 nt, Artificial Sequence
  Description of Artificial Sequence: Synthetic oligonucleotide
  Antisense strand to SEQ ID NO: 1779239
uuuaacagcaacuggccug

SEQ ID NO: 1779241 - RNA, 19 nt, Artificial Sequence
  Description of Artificial Sequence: Synthetic oligonucleotide
  Sense strand starting at position 2280 of SEQ ID NO: 1562876
acggacagcuguuaucagu

SEQ ID NO: 1779242 - RNA, 19 nt, Artificial Sequence
  Description of Artificial Sequence: Synthetic oligonucleotide
  Antisense strand to SEQ ID NO: 1779241
acugauaacagcuguccgu

SEQ ID NO: 1779243 - RNA, 19 nt, Artificial Sequence
  Description of Artificial Sequence: Synthetic oligonucleotide
  Sense strand starting at position 2289 of SEQ ID NO: 1562876
uguuaucagugcugugaga

SEQ ID NO: 1779244 - RNA, 19 nt, Artificial Sequence
  Description of Artificial Sequence: Synthetic oligonucleotide
  Antisense strand to SEQ ID NO: 1779243
ucucacagcacugauaaca

SEQ ID NO: 1779245 - RNA, 19 nt, Artificial Sequence
  Description of Artificial Sequence: Synthetic oligonucleotide
  Sense strand starting at position 2349 of SEQ ID NO: 1562876
gaggaaagcuuccggaaga

SEQ ID NO: 1779246 - RNA, 19 nt, Artificial Sequence
  Description of Artificial Sequence: Synthetic oligonucleotide
  Antisense strand to SEQ ID NO: 1779245
ucuuccggaagcuuuccuc

SEQ ID NO: 1779247 - RNA, 19 nt, Artificial Sequence
  Description of Artificial Sequence: Synthetic oligonucleotide
  Sense strand starting at position 2350 of SEQ ID NO: 1562876
aggaaagcuuccggaagaa

SEQ ID NO: 1779248 - RNA, 19 nt, Artificial Sequence
  Description of Artificial Sequence: Synthetic oligonucleotide
  Antisense strand to SEQ ID NO: 1779247
uucuuccggaagcuuuccu

SEQ ID NO: 1779249 - RNA, 19 nt, Artificial Sequence
  Description of Artificial Sequence: Synthetic oligonucleotide
  Sense strand starting at position 2365 of SEQ ID NO: 1562876
agaagugaccucuaagcug

SEQ ID NO: 1779250 - RNA, 19 nt, Artificial Sequence
  Description of Artificial Sequence: Synthetic oligonucleotide
  Antisense strand to SEQ ID NO: 1779249
cagcuuagaggucacuucu

SEQ ID NO: 1779251 - RNA, 19 nt, Artificial Sequence
  Description of Artificial Sequence: Synthetic oligonucleotide
  Sense strand starting at position 2379 of SEQ ID NO: 1562876
agcugacccuugcagauuu

SEQ ID NO: 1779252 - RNA, 19 nt, Artificial Sequence
  Description of Artificial Sequence: Synthetic oligonucleotide
  Antisense strand to SEQ ID NO: 1779251
aaaucugcaagggucagcu

SEQ ID NO: 1779253 - RNA, 19 nt, Artificial Sequence
  Description of Artificial Sequence: Synthetic oligonucleotide
  Sense strand starting at position 2581 of SEQ ID NO: 1562876
aacacaaguccuggaguca

SEQ ID NO: 1779254 - RNA, 19 nt, Artificial Sequence
  Description of Artificial Sequence: Synthetic oligonucleotide
  Antisense strand to SEQ ID NO: 1779253
ugacuccaggacuuguguu

SEQ ID NO: 1779255 - RNA, 19 nt, Artificial Sequence
  Description of Artificial Sequence: Synthetic oligonucleotide
  Sense strand starting at position 2590 of SEQ ID NO: 1562876
ccuggagucaggcguguuu

SEQ ID NO: 1779256 - RNA, 19 nt, Artificial Sequence
  Description of Artificial Sequence: Synthetic oligonucleotide
  Antisense strand to SEQ ID NO: 1779255
aaacacgccugacuccagg

SEQ ID NO: 1779257 - RNA, 19 nt, Artificial Sequence
  Description of Artificial Sequence: Synthetic oligonucleotide
  Sense strand starting at position 2599 of SEQ ID NO: 1562876
aggcguguuucccagucca

SEQ ID NO: 1779258 - RNA, 19 nt, Artificial Sequence
  Description of Artificial Sequence: Synthetic oligonucleotide
  Antisense strand to SEQ ID NO: 1779257
uggacugggaaacacgccu

SEQ ID NO: 1779259 - RNA, 19 nt, Artificial Sequence
  Description of Artificial Sequence: Synthetic oligonucleotide
  Sense strand starting at position 2602 of SEQ ID NO: 1562876
cguguuucccaguccacga

SEQ ID NO: 1779260 - RNA, 19 nt, Artificial Sequence
  Description of Artificial Sequence: Synthetic oligonucleotide
  Antisense strand to SEQ ID NO: 1779259
ucguggacugggaaacacg

SEQ ID NO: 1779261 - RNA, 19 nt, Artificial Sequence
  Description of Artificial Sequence: Synthetic oligonucleotide
  Sense strand starting at position 2706 of SEQ ID NO: 1562876
aguuuauccucucaggcga

SEQ ID NO: 1779262 - RNA, 19 nt, Artificial Sequence
  Description of Artificial Sequence: Synthetic oligonucleotide
  Antisense strand to SEQ ID NO: 1779261
ucgccugagaggauaaacu

SEQ ID NO: 1779263 - RNA, 19 nt, Artificial Sequence
  Description of Artificial Sequence: Synthetic oligonucleotide
  Sense strand starting at position 2808 of SEQ ID NO: 1562876
cgcuaauugccguggcaga

SEQ ID NO: 1779264 - RNA, 19 nt, Artificial Sequence
  Description of Artificial Sequence: Synthetic oligonucleotide
  Antisense strand to SEQ ID NO: 1779263
ucugccacggcaauuagcg

SEQ ID NO: 1779265 - RNA, 19 nt, Artificial Sequence
  Description of Artificial Sequence: Synthetic oligonucleotide
  Sense strand starting at position 3468 of SEQ ID NO: 1562876
acauuuguggucugcaauc

SEQ ID NO: 1779266 - RNA, 19 nt, Artificial Sequence
  Description of Artificial Sequence: Synthetic oligonucleotide
  Antisense strand to SEQ ID NO: 1779265
gauugcagaccacaaaugu

SEQ ID NO: 1779267 - RNA, 19 nt, Artificial Sequence
  Description of Artificial Sequence: Synthetic oligonucleotide
  Sense strand starting at position 3474 of SEQ ID NO: 1562876
guggucugcaaucagguua

SEQ ID NO: 1779268 - RNA, 19 nt, Artificial Sequence
  Description of Artificial Sequence: Synthetic oligonucleotide
  Antisense strand to SEQ ID NO: 1779267
uaaccugauugcagaccac

SEQ ID NO: 1779269 - RNA, 19 nt, Artificial Sequence
  Description of Artificial Sequence: Synthetic oligonucleotide
  Sense strand starting at position 3493 of SEQ ID NO: 1562876
aaagacauagugugccauu

SEQ ID NO: 1779270 - RNA, 19 nt, Artificial Sequence
  Description of Artificial Sequence: Synthetic oligonucleotide
  Antisense strand to SEQ ID NO: 1779269
aauggcacacuaugucuuu

SEQ ID NO: 1779271 - RNA, 19 nt, Artificial Sequence
  Description of Artificial Sequence: Synthetic oligonucleotide
  Sense strand starting at position 3496 of SEQ ID NO: 1562876
gacauagugugccauuugu

SEQ ID NO: 1779272 - RNA, 19 nt, Artificial Sequence
  Description of Artificial Sequence: Synthetic oligonucleotide
  Antisense strand to SEQ ID NO: 1779271
acaaauggcacacuauguc

SEQ ID NO: 1779273 - RNA, 19 nt, Artificial Sequence
  Description of Artificial Sequence: Synthetic oligonucleotide
  Sense strand starting at position 3503 of SEQ ID NO: 1562876
ugugccauuugucaucaga

SEQ ID NO: 1779274 - RNA, 19 nt, Artificial Sequence
  Description of Artificial Sequence: Synthetic oligonucleotide
  Antisense strand to SEQ ID NO: 1779273
ucugaugacaaauggcaca

SEQ ID NO: 1779275 - RNA, 19 nt, Artificial Sequence
  Description of Artificial Sequence: Synthetic oligonucleotide
  Sense strand starting at position 3531 of SEQ ID NO: 1562876
gccugacucuggcaggauu

SEQ ID NO: 1779276 - RNA, 19 nt, Artificial Sequence
  Description of Artificial Sequence: Synthetic oligonucleotide
  Antisense strand to SEQ ID NO: 1779275
aauccugccagagucaggc

SEQ ID NO: 1779277 - RNA, 19 nt, Artificial Sequence
  Description of Artificial Sequence: Synthetic oligonucleotide
  Sense strand starting at position 3551 of SEQ ID NO: 1562876
gcuaccacuagcugugaga

SEQ ID NO: 1779278 - RNA, 19 nt, Artificial Sequence
  Description of Artificial Sequence: Synthetic oligonucleotide
  Antisense strand to SEQ ID NO: 1779277
ucucacagcuagugguagc

SEQ ID NO: 1779279 - RNA, 19 nt, Artificial Sequence
  Description of Artificial Sequence: Synthetic oligonucleotide
  Sense strand starting at position 3584 of SEQ ID NO: 1562876
uuauuagagccagggucuu

SEQ ID NO: 1779280 - RNA, 19 nt, Artificial Sequence
  Description of Artificial Sequence: Synthetic oligonucleotide
  Antisense strand to SEQ ID NO: 1779279
aagacccuggcucuaauaa

SEQ ID NO: 1779281 - RNA, 19 nt, Artificial Sequence
  Description of Artificial Sequence: Synthetic oligonucleotide
  Sense strand starting at position 3809 of SEQ ID NO: 1562876
aaagauuugcguugccuua

SEQ ID NO: 1779282 - RNA, 19 nt, Artificial Sequence
  Description of Artificial Sequence: Synthetic oligonucleotide
  Antisense strand to SEQ ID NO: 1779281
uaaggcaacgcaaaucuuu

SEQ ID NO: 1779283 - RNA, 19 nt, Artificial Sequence
  Description of Artificial Sequence: Synthetic oligonucleotide
  Sense strand starting at position 3832 of SEQ ID NO: 1562876
cgauguucuuaucugucau

SEQ ID NO: 1779284 - RNA, 19 nt, Artificial Sequence
  Description of Artificial Sequence: Synthetic oligonucleotide
  Antisense strand to SEQ ID NO: 1779283
augacagauaagaacaucg

SEQ ID NO: 1779285 - RNA, 19 nt, Artificial Sequence
  Description of Artificial Sequence: Synthetic oligonucleotide
  Sense strand starting at position 3834 of SEQ ID NO: 1562876
auguucuuaucugucauau

SEQ ID NO: 1779286 - RNA, 19 nt, Artificial Sequence
  Description of Artificial Sequence: Synthetic oligonucleotide
  Antisense strand to SEQ ID NO: 1779285
auaugacagauaagaacau

SEQ ID NO: 1779287 - RNA, 19 nt, Artificial Sequence
  Description of Artificial Sequence: Synthetic oligonucleotide
  Sense strand starting at position 16 of SEQ ID NO: 1562877
ucaaaugaguuguuauucu

SEQ ID NO: 1779288 - RNA, 19 nt, Artificial Sequence
  Description of Artificial Sequence: Synthetic oligonucleotide
  Antisense strand to SEQ ID NO: 1779287
agaauaacaacucauuuga

SEQ ID NO: 1779289 - RNA, 19 nt, Artificial Sequence
  Description of Artificial Sequence: Synthetic oligonucleotide
  Sense strand starting at position 23 of SEQ ID NO: 1562877
aguuguuauucuucuccca

SEQ ID NO: 1779290 - RNA, 19 nt, Artificial Sequence
  Description of Artificial Sequence: Synthetic oligonucleotide
  Antisense strand to SEQ ID NO: 1779289
ugggagaagaauaacaacu

SEQ ID NO: 1779291 - RNA, 19 nt, Artificial Sequence
  Description of Artificial Sequence: Synthetic oligonucleotide
  Sense strand starting at position 75 of SEQ ID NO: 1562877
aucuacuucucuguguuau

SEQ ID NO: 1779292 - RNA, 19 nt, Artificial Sequence
  Description of Artificial Sequence: Synthetic oligonucleotide
  Antisense strand to SEQ ID NO: 1779291
auaacacagagaaguagau

SEQ ID NO: 1779293 - RNA, 19 nt, Artificial Sequence
  Description of Artificial Sequence: Synthetic oligonucleotide
  Sense strand starting at position 77 of SEQ ID NO: 1562877
cuacuucucuguguuaugu

SEQ ID NO: 1779294 - RNA, 19 nt, Artificial Sequence
  Description of Artificial Sequence: Synthetic oligonucleotide
  Antisense strand to SEQ ID NO: 1779293
acauaacacagagaaguag

SEQ ID NO: 1779295 - RNA, 19 nt, Artificial Sequence
  Description of Artificial Sequence: Synthetic oligonucleotide
  Sense strand starting at position 87 of SEQ ID NO: 1562877
guguuauguuacuuuccca

SEQ ID NO: 1779296 - RNA, 19 nt, Artificial Sequence
  Description of Artificial Sequence: Synthetic oligonucleotide
  Antisense strand to SEQ ID NO: 1779295
ugggaaaguaacauaacac

SEQ ID NO: 1779297 - RNA, 19 nt, Artificial Sequence
  Description of Artificial Sequence: Synthetic oligonucleotide
  Sense strand starting at position 90 of SEQ ID NO: 1562877
uuauguuacuuucccaagu

SEQ ID NO: 1779298 - RNA, 19 nt, Artificial Sequence
  Description of Artificial Sequence: Synthetic oligonucleotide
  Antisense strand to SEQ ID NO: 1779297
acuugggaaaguaacauaa

SEQ ID NO: 1779299 - RNA, 19 nt, Artificial Sequence
  Description of Artificial Sequence: Synthetic oligonucleotide
  Sense strand starting at position 92 of SEQ ID NO: 1562877
auguuacuuucccaaguaa

SEQ ID NO: 1779300 - RNA, 19 nt, Artificial Sequence
  Description of Artificial Sequence: Synthetic oligonucleotide
  Antisense strand to SEQ ID NO: 1779299
uuacuugggaaaguaacau

SEQ ID NO: 1779301 - RNA, 19 nt, Artificial Sequence
  Description of Artificial Sequence: Synthetic oligonucleotide
  Sense strand starting at position 130 of SEQ ID NO: 1562877
ggccacuuucuuuaaagcu

SEQ ID NO: 1779302 - RNA, 19 nt, Artificial Sequence
  Description of Artificial Sequence: Synthetic oligonucleotide
  Antisense strand to SEQ ID NO: 1779301
agcuuuaaagaaaguggcc

SEQ ID NO: 1779303 - RNA, 19 nt, Artificial Sequence
  Description of Artificial Sequence: Synthetic oligonucleotide
  Sense strand starting at position 147 of SEQ ID NO: 1562877
cuuuaagucuauugucaaa

SEQ ID NO: 1779304 - RNA, 19 nt, Artificial Sequence
  Description of Artificial Sequence: Synthetic oligonucleotide
  Antisense strand to SEQ ID NO: 1779303
uuugacaauagacuuaaag

SEQ ID NO: 1779305 - RNA, 19 nt, Artificial Sequence
  Description of Artificial Sequence: Synthetic oligonucleotide
  Sense strand starting at position 253 of SEQ ID NO: 1562877
aguuuaaguccacacaagu

SEQ ID NO: 1779306 - RNA, 19 nt, Artificial Sequence
  Description of Artificial Sequence: Synthetic oligonucleotide
  Antisense strand to SEQ ID NO: 1779305
acuuguguggacuuaaacu

SEQ ID NO: 1779307 - RNA, 19 nt, Artificial Sequence
  Description of Artificial Sequence: Synthetic oligonucleotide
  Sense strand starting at position 376 of SEQ ID NO: 1562877
gacaacaucuugggcaaga

SEQ ID NO: 1779308 - RNA, 19 nt, Artificial Sequence
  Description of Artificial Sequence: Synthetic oligonucleotide
  Antisense strand to SEQ ID NO: 1779307
ucuugcccaagauguuguc

SEQ ID NO: 1779309 - RNA, 19 nt, Artificial Sequence
  Description of Artificial Sequence: Synthetic oligonucleotide
  Sense strand starting at position 578 of SEQ ID NO: 1562877
uugagcugguuuccugauu

SEQ ID NO: 1779310 - RNA, 19 nt, Artificial Sequence
  Description of Artificial Sequence: Synthetic oligonucleotide
  Antisense strand to SEQ ID NO: 1779309
aaucaggaaaccagcucaa

SEQ ID NO: 1779311 - RNA, 19 nt, Artificial Sequence
  Description of Artificial Sequence: Synthetic oligonucleotide
  Sense strand starting at position 579 of SEQ ID NO: 1562877
ugagcugguuuccugauuu

SEQ ID NO: 1779312 - RNA, 19 nt, Artificial Sequence
  Description of Artificial Sequence: Synthetic oligonucleotide
  Antisense strand to SEQ ID NO: 1779311
aaaucaggaaaccagcuca

SEQ ID NO: 1779313 - RNA, 19 nt, Artificial Sequence
  Description of Artificial Sequence: Synthetic oligonucleotide
  Sense strand starting at position 613 of SEQ ID NO: 1562877
ggcaguauuugguaaacag

SEQ ID NO: 1779314 - RNA, 19 nt, Artificial Sequence
  Description of Artificial Sequence: Synthetic oligonucleotide
  Antisense strand to SEQ ID NO: 1779313
cuguuuaccaaauacugcc

SEQ ID NO: 1779315 - RNA, 19 nt, Artificial Sequence
  Description of Artificial Sequence: Synthetic oligonucleotide
  Sense strand starting at position 792 of SEQ ID NO: 1562877
gguccuguuauacgucaaa

SEQ ID NO: 1779316 - RNA, 19 nt, Artificial Sequence
  Description of Artificial Sequence: Synthetic oligonucleotide
  Antisense strand to SEQ ID NO: 1779315
uuugacguauaacaggacc

SEQ ID NO: 1779317 - RNA, 19 nt, Artificial Sequence
  Description of Artificial Sequence: Synthetic oligonucleotide
  Sense strand starting at position 904 of SEQ ID NO: 1562877
gccgaaacccaaugaauca

SEQ ID NO: 1779318 - RNA, 19 nt, Artificial Sequence
  Description of Artificial Sequence: Synthetic oligonucleotide
  Antisense strand to SEQ ID NO: 1779317
ugauucauuggguuucggc

SEQ ID NO: 1779319 - RNA, 19 nt, Artificial Sequence
  Description of Artificial Sequence: Synthetic oligonucleotide
  Sense strand starting at position 989 of SEQ ID NO: 1562877
gcuugaaagcccuagagga

SEQ ID NO: 1779320 - RNA, 19 nt, Artificial Sequence
  Description of Artificial Sequence: Synthetic oligonucleotide
  Antisense strand to SEQ ID NO: 1779319
uccucuagggcuuucaagc

SEQ ID NO: 1779321 - RNA, 19 nt, Artificial Sequence
  Description of Artificial Sequence: Synthetic oligonucleotide
  Sense strand starting at position 2069 of SEQ ID NO: 1562877
ccgauugggccagaugagu

SEQ ID NO: 1779322 - RNA, 19 nt, Artificial Sequence
  Description of Artificial Sequence: Synthetic oligonucleotide
  Antisense strand to SEQ ID NO: 1779321
acucaucuggcccaaucgg

SEQ ID NO: 1779323 - RNA, 19 nt, Artificial Sequence
  Description of Artificial Sequence: Synthetic oligonucleotide
  Sense strand starting at position 2199 of SEQ ID NO: 1562877
gcagauuacucucccaaag

SEQ ID NO: 1779324 - RNA, 19 nt, Artificial Sequence
  Description of Artificial Sequence: Synthetic oligonucleotide
  Antisense strand to SEQ ID NO: 1779323
cuuugggagaguaaucugc

SEQ ID NO: 1779325 - RNA, 19 nt, Artificial Sequence
  Description of Artificial Sequence: Synthetic oligonucleotide
  Sense strand starting at position 2268 of SEQ ID NO: 1562877
gcgguuucgucggcaucca

SEQ ID NO: 1779326 - RNA, 19 nt, Artificial Sequence
  Description of Artificial Sequence: Synthetic oligonucleotide
  Antisense strand to SEQ ID NO: 1779325
uggaugccgacgaaaccgc

SEQ ID NO: 1779327 - RNA, 19 nt, Artificial Sequence
  Description of Artificial Sequence: Synthetic oligonucleotide
  Sense strand starting at position 2389 of SEQ ID NO: 1562877
aagcuaaugucguuaggag

SEQ ID NO: 1779328 - RNA, 19 nt, Artificial Sequence
  Description of Artificial Sequence: Synthetic oligonucleotide
  Antisense strand to SEQ ID NO: 1779327
cuccuaacgacauuagcuu

SEQ ID NO: 1779329 - RNA, 19 nt, Artificial Sequence
  Description of Artificial Sequence: Synthetic oligonucleotide
  Sense strand starting at position 2440 of SEQ ID NO: 1562877
cguggacccgcuuaguuua

SEQ ID NO: 1779330 - RNA, 19 nt, Artificial Sequence
  Description of Artificial Sequence: Synthetic oligonucleotide
  Antisense strand to SEQ ID NO: 1779329
uaaacuaagcggguccacg

SEQ ID NO: 1779331 - RNA, 19 nt, Artificial Sequence
  Description of Artificial Sequence: Synthetic oligonucleotide
  Sense strand starting at position 2564 of SEQ ID NO: 1562877
ccuugcaugauaggguauu

SEQ ID NO: 1779332 - RNA, 19 nt, Artificial Sequence
  Description of Artificial Sequence: Synthetic oligonucleotide
  Antisense strand to SEQ ID NO: 1779331
aauacccuaucaugcaagg

SEQ ID NO: 1779333 - RNA, 19 nt, Artificial Sequence
  Description of Artificial Sequence: Synthetic oligonucleotide
  Sense strand starting at position 2565 of SEQ ID NO: 1562877
cuugcaugauaggguauua

SEQ ID NO: 1779334 - RNA, 19 nt, Artificial Sequence
  Description of Artificial Sequence: Synthetic oligonucleotide
  Antisense strand to SEQ ID NO: 1779333
uaauacccuaucaugcaag

SEQ ID NO: 1779335 - RNA, 19 nt, Artificial Sequence
  Description of Artificial Sequence: Synthetic oligonucleotide
  Sense strand starting at position 2587 of SEQ ID NO: 1562877
ccguucugcagagggaaau

SEQ ID NO: 1779336 - RNA, 19 nt, Artificial Sequence
  Description of Artificial Sequence: Synthetic oligonucleotide
  Antisense strand to SEQ ID NO: 1779335
auuucccucugcagaacgg

SEQ ID NO: 1779337 - RNA, 19 nt, Artificial Sequence
  Description of Artificial Sequence: Synthetic oligonucleotide
  Sense strand starting at position 2588 of SEQ ID NO: 1562877
cguucugcagagggaaaua

SEQ ID NO: 1779338 - RNA, 19 nt, Artificial Sequence
  Description of Artificial Sequence: Synthetic oligonucleotide
  Antisense strand to SEQ ID NO: 1779337
uauuucccucugcagaacg

SEQ ID NO: 1779339 - RNA, 19 nt, Artificial Sequence
  Description of Artificial Sequence: Synthetic oligonucleotide
  Sense strand starting at position 2599 of SEQ ID NO: 1562877
gggaaauacucuugaagga

SEQ ID NO: 1779340 - RNA, 19 nt, Artificial Sequence
  Description of Artificial Sequence: Synthetic oligonucleotide
  Antisense strand to SEQ ID NO: 1779339
uccuucaagaguauuuccc

SEQ ID NO: 1779341 - RNA, 19 nt, Artificial Sequence
  Description of Artificial Sequence: Synthetic oligonucleotide
  Sense strand starting at position 2801 of SEQ ID NO: 1562877
ccuugagaauaauaaugau

SEQ ID NO: 1779342 - RNA, 19 nt, Artificial Sequence
  Description of Artificial Sequence: Synthetic oligonucleotide
  Antisense strand to SEQ ID NO: 1779341
aucauuauuauucucaagg

SEQ ID NO: 1779343 - RNA, 19 nt, Artificial Sequence
  Description of Artificial Sequence: Synthetic oligonucleotide
  Sense strand starting at position 2810 of SEQ ID NO: 1562877
uaauaaugaugacugugua

SEQ ID NO: 1779344 - RNA, 19 nt, Artificial Sequence
  Description of Artificial Sequence: Synthetic oligonucleotide
  Antisense strand to SEQ ID NO: 1779343
uacacagucaucauuauua

SEQ ID NO: 1779345 - RNA, 19 nt, Artificial Sequence
  Description of Artificial Sequence: Synthetic oligonucleotide
  Sense strand starting at position 2813 of SEQ ID NO: 1562877
uaaugaugacuguguagca

SEQ ID NO: 1779346 - RNA, 19 nt, Artificial Sequence
  Description of Artificial Sequence: Synthetic oligonucleotide
  Antisense strand to SEQ ID NO: 1779345
ugcuacacagucaucauua

SEQ ID NO: 1779347 - RNA, 19 nt, Artificial Sequence
  Description of Artificial Sequence: Synthetic oligonucleotide
  Sense strand starting at position 2823 of SEQ ID NO: 1562877
uguguagcacuaugggaaa

SEQ ID NO: 1779348 - RNA, 19 nt, Artificial Sequence
  Description of Artificial Sequence: Synthetic oligonucleotide
  Antisense strand to SEQ ID NO: 1779347
uuucccauagugcuacaca

SEQ ID NO: 1779349 - RNA, 19 nt, Artificial Sequence
  Description of Artificial Sequence: Synthetic oligonucleotide
  Sense strand starting at position 3105 of SEQ ID NO: 1562877
aaagaaaucuagugguugu

SEQ ID NO: 1779350 - RNA, 19 nt, Artificial Sequence
  Description of Artificial Sequence: Synthetic oligonucleotide
  Antisense strand to SEQ ID NO: 1779349
acaaccacuagauuucuuu

SEQ ID NO: 1779351 - RNA, 19 nt, Artificial Sequence
  Description of Artificial Sequence: Synthetic oligonucleotide
  Sense strand starting at position 3108 of SEQ ID NO: 1562877
gaaaucuagugguuguuua

SEQ ID NO: 1779352 - RNA, 19 nt, Artificial Sequence
  Description of Artificial Sequence: Synthetic oligonucleotide
  Antisense strand to SEQ ID NO: 1779351
uaaacaaccacuagauuuc

SEQ ID NO: 1779353 - RNA, 19 nt, Artificial Sequence
  Description of Artificial Sequence: Synthetic oligonucleotide
  Sense strand starting at position 3115 of SEQ ID NO: 1562877
agugguuguuuacuuucua

SEQ ID NO: 1779354 - RNA, 19 nt, Artificial Sequence
  Description of Artificial Sequence: Synthetic oligonucleotide
  Antisense strand to SEQ ID NO: 1779353
uagaaaguaaacaaccacu

SEQ ID NO: 1779355 - RNA, 19 nt, Artificial Sequence
  Description of Artificial Sequence: Synthetic oligonucleotide
  Sense strand starting at position 3119 of SEQ ID NO: 1562877
guuguuuacuuucuagacu

SEQ ID NO: 1779356 - RNA, 19 nt, Artificial Sequence
  Description of Artificial Sequence: Synthetic oligonucleotide
  Antisense strand to SEQ ID NO: 1779355
agucuagaaaguaaacaac

SEQ ID NO: 1779357 - RNA, 19 nt, Artificial Sequence
  Description of Artificial Sequence: Synthetic oligonucleotide
  Sense strand starting at position 3132 of SEQ ID NO: 1562877
uagacugcucuguggcauu

SEQ ID NO: 1779358 - RNA, 19 nt, Artificial Sequence
  Description of Artificial Sequence: Synthetic oligonucleotide
  Antisense strand to SEQ ID NO: 1779357
aaugccacagagcagucua

SEQ ID NO: 1779359 - RNA, 19 nt, Artificial Sequence
  Description of Artificial Sequence: Synthetic oligonucleotide
  Sense strand starting at position 3143 of SEQ ID NO: 1562877
guggcauuguccuuaugac

SEQ ID NO: 1779360 - RNA, 19 nt, Artificial Sequence
  Description of Artificial Sequence: Synthetic oligonucleotide
  Antisense strand to SEQ ID NO: 1779359
gucauaaggacaaugccac

SEQ ID NO: 1779361 - RNA, 19 nt, Artificial Sequence
  Description of Artificial Sequence: Synthetic oligonucleotide
  Sense strand starting at position 3530 of SEQ ID NO: 1562877
ccucauucuccaggacuga

SEQ ID NO: 1779362 - RNA, 19 nt, Artificial Sequence
  Description of Artificial Sequence: Synthetic oligonucleotide
  Antisense strand to SEQ ID NO: 1779361
ucaguccuggagaaugagg

SEQ ID NO: 1779363 - RNA, 19 nt, Artificial Sequence
  Description of Artificial Sequence: Synthetic oligonucleotide
  Sense strand starting at position 3583 of SEQ ID NO: 1562877
guggaccauuuguauagau

SEQ ID NO: 1779364 - RNA, 19 nt, Artificial Sequence
  Description of Artificial Sequence: Synthetic oligonucleotide
  Antisense strand to SEQ ID NO: 1779363
aucuauacaaaugguccac

SEQ ID NO: 1779365 - RNA, 19 nt, Artificial Sequence
  Description of Artificial Sequence: Synthetic oligonucleotide
  Sense strand starting at position 3637 of SEQ ID NO: 1562877
uggguaaguuccgcuuaca

SEQ ID NO: 1779366 - RNA, 19 nt, Artificial Sequence
  Description of Artificial Sequence: Synthetic oligonucleotide
  Antisense strand to SEQ ID NO: 1779365
uguaagcggaacuuaccca

SEQ ID NO: 1779367 - RNA, 19 nt, Artificial Sequence
  Description of Artificial Sequence: Synthetic oligonucleotide
  Sense strand starting at position 4 of SEQ ID NO: 1562878
guaacaauugacugucucu

SEQ ID NO: 1779368 - RNA, 19 nt, Artificial Sequence
  Description of Artificial Sequence: Synthetic oligonucleotide
  Antisense strand to SEQ ID NO: 1779367
agagacagucaauuguuac

SEQ ID NO: 1779369 - RNA, 19 nt, Artificial Sequence
  Description of Artificial Sequence: Synthetic oligonucleotide
  Sense strand starting at position 95 of SEQ ID NO: 1562878
cucuuuguacuugagguaa

SEQ ID NO: 1779370 - RNA, 19 nt, Artificial Sequence
  Description of Artificial Sequence: Synthetic oligonucleotide
  Antisense strand to SEQ ID NO: 1779369
uuaccucaaguacaaagag

SEQ ID NO: 1779371 - RNA, 19 nt, Artificial Sequence
  Description of Artificial Sequence: Synthetic oligonucleotide
  Sense strand starting at position 172 of SEQ ID NO: 1562878
aguguuugaaagugaaaca

SEQ ID NO: 1779372 - RNA, 19 nt, Artificial Sequence
  Description of Artificial Sequence: Synthetic oligonucleotide
  Antisense strand to SEQ ID NO: 1779371
uguuucacuuucaaacacu

SEQ ID NO: 1779373 - RNA, 19 nt, Artificial Sequence
  Description of Artificial Sequence: Synthetic oligonucleotide
  Sense strand starting at position 198 of SEQ ID NO: 1562878
acggacucaucaguagaaa

SEQ ID NO: 1779374 - RNA, 19 nt, Artificial Sequence
  Description of Artificial Sequence: Synthetic oligonucleotide
  Antisense strand to SEQ ID NO: 1779373
uuucuacugaugaguccgu

SEQ ID NO: 1779375 - RNA, 19 nt, Artificial Sequence
  Description of Artificial Sequence: Synthetic oligonucleotide
  Sense strand starting at position 225 of SEQ ID NO: 1562878
acucuuagcuaagugauau

SEQ ID NO: 1779376 - RNA, 19 nt, Artificial Sequence
  Description of Artificial Sequence: Synthetic oligonucleotide
  Antisense strand to SEQ ID NO: 1779375
auaucacuuagcuaagagu

SEQ ID NO: 1779377 - RNA, 19 nt, Artificial Sequence
  Description of Artificial Sequence: Synthetic oligonucleotide
  Sense strand starting at position 255 of SEQ ID NO: 1562878
uaauaaugcgaagaaagca

SEQ ID NO: 1779378 - RNA, 19 nt, Artificial Sequence
  Description of Artificial Sequence: Synthetic oligonucleotide
  Antisense strand to SEQ ID NO: 1779377
ugcuuucuucgcauuauua

SEQ ID NO: 1779379 - RNA, 19 nt, Artificial Sequence
  Description of Artificial Sequence: Synthetic oligonucleotide
  Sense strand starting at position 267 of SEQ ID NO: 1562878
gaaagcagauuacuguaau

SEQ ID NO: 1779380 - RNA, 19 nt, Artificial Sequence
  Description of Artificial Sequence: Synthetic oligonucleotide
  Antisense strand to SEQ ID NO: 1779379
auuacaguaaucugcuuuc

SEQ ID NO: 1779381 - RNA, 19 nt, Artificial Sequence
  Description of Artificial Sequence: Synthetic oligonucleotide
  Sense strand starting at position 377 of SEQ ID NO: 1562878
ccaauuccuuugguaaagu

SEQ ID NO: 1779382 - RNA, 19 nt, Artificial Sequence
  Description of Artificial Sequence: Synthetic oligonucleotide
  Antisense strand to SEQ ID NO: 1779381
acuuuaccaaaggaauugg

SEQ ID NO: 1779383 - RNA, 19 nt, Artificial Sequence
  Description of Artificial Sequence: Synthetic oligonucleotide
  Sense strand starting at position 459 of SEQ ID NO: 1562878
gcauuaugccaccaaauga

SEQ ID NO: 1779384 - RNA, 19 nt, Artificial Sequence
  Description of Artificial Sequence: Synthetic oligonucleotide
  Antisense strand to SEQ ID NO: 1779383
ucauuugguggcauaaugc

SEQ ID NO: 1779385 - RNA, 19 nt, Artificial Sequence
  Description of Artificial Sequence: Synthetic oligonucleotide
  Sense strand starting at position 734 of SEQ ID NO: 1562878
aacugaugggcccgauuaa

SEQ ID NO: 1779386 - RNA, 19 nt, Artificial Sequence
  Description of Artificial Sequence: Synthetic oligonucleotide
  Antisense strand to SEQ ID NO: 1779385
uuaaucgggcccaucaguu

SEQ ID NO: 1779387 - RNA, 19 nt, Artificial Sequence
  Description of Artificial Sequence: Synthetic oligonucleotide
  Sense strand starting at position 745 of SEQ ID NO: 1562878
ccgauuaaggucggacaga

SEQ ID NO: 1779388 - RNA, 19 nt, Artificial Sequence
  Description of Artificial Sequence: Synthetic oligonucleotide
  Antisense strand to SEQ ID NO: 1779387
ucuguccgaccuuaaucgg

SEQ ID NO: 1779389 - RNA, 19 nt, Artificial Sequence
  Description of Artificial Sequence: Synthetic oligonucleotide
  Sense strand starting at position 940 of SEQ ID NO: 1562878
ggcaaucaguaauccagua

SEQ ID NO: 1779390 - RNA, 19 nt, Artificial Sequence
  Description of Artificial Sequence: Synthetic oligonucleotide
  Antisense strand to SEQ ID NO: 1779389
uacuggauuacugauugcc

SEQ ID NO: 1779391 - RNA, 19 nt, Artificial Sequence
  Description of Artificial Sequence: Synthetic oligonucleotide
  Sense strand starting at position 945 of SEQ ID NO: 1562878
ucaguaauccaguaaguau

SEQ ID NO: 1779392 - RNA, 19 nt, Artificial Sequence
  Description of Artificial Sequence: Synthetic oligonucleotide
  Antisense strand to SEQ ID NO: 1779391
auacuuacuggauuacuga

SEQ ID NO: 1779393 - RNA, 19 nt, Artificial Sequence
  Description of Artificial Sequence: Synthetic oligonucleotide
  Sense strand starting at position 948 of SEQ ID NO: 1562878
guaauccaguaaguauaau

SEQ ID NO: 1779394 - RNA, 19 nt, Artificial Sequence
  Description of Artificial Sequence: Synthetic oligonucleotide
  Antisense strand to SEQ ID NO: 1779393
auuauacuuacuggauuac

SEQ ID NO: 1779395 - RNA, 19 nt, Artificial Sequence
  Description of Artificial Sequence: Synthetic oligonucleotide
  Sense strand starting at position 973 of SEQ ID NO: 1562878
agugaugggucacuuaagu

SEQ ID NO: 1779396 - RNA, 19 nt, Artificial Sequence
  Description of Artificial Sequence: Synthetic oligonucleotide
  Antisense strand to SEQ ID NO: 1779395
acuuaagugacccaucacu

SEQ ID NO: 1779397 - RNA, 19 nt, Artificial Sequence
  Description of Artificial Sequence: Synthetic oligonucleotide
  Sense strand starting at position 1086 of SEQ ID NO: 1562878
acaauugaauacguacaua

SEQ ID NO: 1779398 - RNA, 19 nt, Artificial Sequence
  Description of Artificial Sequence: Synthetic oligonucleotide
  Antisense strand to SEQ ID NO: 1779397
uauguacguauucaauugu

SEQ ID NO: 1779399 - RNA, 19 nt, Artificial Sequence
  Description of Artificial Sequence: Synthetic oligonucleotide
  Sense strand starting at position 1100 of SEQ ID NO: 1562878
acauaaggcugcucaguua

SEQ ID NO: 1779400 - RNA, 19 nt, Artificial Sequence
  Description of Artificial Sequence: Synthetic oligonucleotide
  Antisense strand to SEQ ID NO: 1779399
uaacugagcagccuuaugu

SEQ ID NO: 1779401 - RNA, 19 nt, Artificial Sequence
  Description of Artificial Sequence: Synthetic oligonucleotide
  Sense strand starting at position 1290 of SEQ ID NO: 1562878
aucagagacucugcaguaa

SEQ ID NO: 1779402 - RNA, 19 nt, Artificial Sequence
  Description of Artificial Sequence: Synthetic oligonucleotide
  Antisense strand to SEQ ID NO: 1779401
uuacugcagagucucugau

SEQ ID NO: 1779403 - RNA, 19 nt, Artificial Sequence
  Description of Artificial Sequence: Synthetic oligonucleotide
  Sense strand starting at position 1384 of SEQ ID NO: 1562878
guagauuagauuuggcugu

SEQ ID NO: 1779404 - RNA, 19 nt, Artificial Sequence
  Description of Artificial Sequence: Synthetic oligonucleotide
  Antisense strand to SEQ ID NO: 1779403
acagccaaaucuaaucuac

SEQ ID NO: 1779405 - RNA, 19 nt, Artificial Sequence
  Description of Artificial Sequence: Synthetic oligonucleotide
  Sense strand starting at position 1431 of SEQ ID NO: 1562878
acauuaacgccuuaaagua

SEQ ID NO: 1779406 - RNA, 19 nt, Artificial Sequence
  Description of Artificial Sequence: Synthetic oligonucleotide
  Antisense strand to SEQ ID NO: 1779405
uacuuuaaggcguuaaugu

SEQ ID NO: 1779407 - RNA, 19 nt, Artificial Sequence
  Description of Artificial Sequence: Synthetic oligonucleotide
  Sense strand starting at position 1488 of SEQ ID NO: 1562878
ucauuuagcuacucgguaa

SEQ ID NO: 1779408 - RNA, 19 nt, Artificial Sequence
  Description of Artificial Sequence: Synthetic oligonucleotide
  Antisense strand to SEQ ID NO: 1779407
uuaccgaguagcuaaauga

SEQ ID NO: 1779409 - RNA, 19 nt, Artificial Sequence
  Description of Artificial Sequence: Synthetic oligonucleotide
  Sense strand starting at position 1491 of SEQ ID NO: 1562878
uuuagcuacucgguaagaa

SEQ ID NO: 1779410 - RNA, 19 nt, Artificial Sequence
  Description of Artificial Sequence: Synthetic oligonucleotide
  Antisense strand to SEQ ID NO: 1779409
uucuuaccgaguagcuaaa

SEQ ID NO: 1779411 - RNA, 19 nt, Artificial Sequence
  Description of Artificial Sequence: Synthetic oligonucleotide
  Sense strand starting at position 1492 of SEQ ID NO: 1562878
uuagcuacucgguaagaaa

SEQ ID NO: 1779412 - RNA, 19 nt, Artificial Sequence
  Description of Artificial Sequence: Synthetic oligonucleotide
  Antisense strand to SEQ ID NO: 1779411
uuucuuaccgaguagcuaa

SEQ ID NO: 1779413 - RNA, 19 nt, Artificial Sequence
  Description of Artificial Sequence: Synthetic oligonucleotide
  Sense strand starting at position 1646 of SEQ ID NO: 1562878
uuuguuuaagccgaaaucu

SEQ ID NO: 1779414 - RNA, 19 nt, Artificial Sequence
  Description of Artificial Sequence: Synthetic oligonucleotide
  Antisense strand to SEQ ID NO: 1779413
agauuucggcuuaaacaaa

SEQ ID NO: 1779415 - RNA, 19 nt, Artificial Sequence
  Description of Artificial Sequence: Synthetic oligonucleotide
  Sense strand starting at position 1655 of SEQ ID NO: 1562878
gccgaaaucuauucuccaa

SEQ ID NO: 1779416 - RNA, 19 nt, Artificial Sequence
  Description of Artificial Sequence: Synthetic oligonucleotide
  Antisense strand to SEQ ID NO: 1779415
uuggagaauagauuucggc

SEQ ID NO: 1779417 - RNA, 19 nt, Artificial Sequence
  Description of Artificial Sequence: Synthetic oligonucleotide
  Sense strand starting at position 1657 of SEQ ID NO: 1562878
cgaaaucuauucuccaaga

SEQ ID NO: 1779418 - RNA, 19 nt, Artificial Sequence
  Description of Artificial Sequence: Synthetic oligonucleotide
  Antisense strand to SEQ ID NO: 1779417
ucuuggagaauagauuucg

SEQ ID NO: 1779419 - RNA, 19 nt, Artificial Sequence
  Description of Artificial Sequence: Synthetic oligonucleotide
  Sense strand starting at position 1821 of SEQ ID NO: 1562878
aucagucacucagugagaa

SEQ ID NO: 1779420 - RNA, 19 nt, Artificial Sequence
  Description of Artificial Sequence: Synthetic oligonucleotide
  Antisense strand to SEQ ID NO: 1779419
uucucacugagugacugau

SEQ ID NO: 1779421 - RNA, 19 nt, Artificial Sequence
  Description of Artificial Sequence: Synthetic oligonucleotide
  Sense strand starting at position 1822 of SEQ ID NO: 1562878
ucagucacucagugagaaa

SEQ ID NO: 1779422 - RNA, 19 nt, Artificial Sequence
  Description of Artificial Sequence: Synthetic oligonucleotide
  Antisense strand to SEQ ID NO: 1779421
uuucucacugagugacuga

SEQ ID NO: 1779423 - RNA, 19 nt, Artificial Sequence
  Description of Artificial Sequence: Synthetic oligonucleotide
  Sense strand starting at position 2052 of SEQ ID NO: 1562878
gagauaaggucauucccau

SEQ ID NO: 1779424 - RNA, 19 nt, Artificial Sequence
  Description of Artificial Sequence: Synthetic oligonucleotide
  Antisense strand to SEQ ID NO: 1779423
augggaaugaccuuaucuc

SEQ ID NO: 1779425 - RNA, 19 nt, Artificial Sequence
  Description of Artificial Sequence: Synthetic oligonucleotide
  Sense strand starting at position 2058 of SEQ ID NO: 1562878
aggucauucccauacacug

SEQ ID NO: 1779426 - RNA, 19 nt, Artificial Sequence
  Description of Artificial Sequence: Synthetic oligonucleotide
  Antisense strand to SEQ ID NO: 1779425
caguguaugggaaugaccu

SEQ ID NO: 1779427 - RNA, 19 nt, Artificial Sequence
  Description of Artificial Sequence: Synthetic oligonucleotide
  Sense strand starting at position 2076 of SEQ ID NO: 1562878
gcugcauucgcuguacagu

SEQ ID NO: 1779428 - RNA, 19 nt, Artificial Sequence
  Description of Artificial Sequence: Synthetic oligonucleotide
  Antisense strand to SEQ ID NO: 1779427
acuguacagcgaaugcagc

SEQ ID NO: 1779429 - RNA, 19 nt, Artificial Sequence
  Description of Artificial Sequence: Synthetic oligonucleotide
  Sense strand starting at position 2611 of SEQ ID NO: 1562878
acgcaacugugauuacaug

SEQ ID NO: 1779430 - RNA, 19 nt, Artificial Sequence
  Description of Artificial Sequence: Synthetic oligonucleotide
  Antisense strand to SEQ ID NO: 1779429
cauguaaucacaguugcgu

SEQ ID NO: 1779431 - RNA, 19 nt, Artificial Sequence
  Description of Artificial Sequence: Synthetic oligonucleotide
  Sense strand starting at position 2617 of SEQ ID NO: 1562878
cugugauuacauggaaaua

SEQ ID NO: 1779432 - RNA, 19 nt, Artificial Sequence
  Description of Artificial Sequence: Synthetic oligonucleotide
  Antisense strand to SEQ ID NO: 1779431
uauuuccauguaaucacag

SEQ ID NO: 1779433 - RNA, 19 nt, Artificial Sequence
  Description of Artificial Sequence: Synthetic oligonucleotide
  Sense strand starting at position 2723 of SEQ ID NO: 1562878
aaugcuugugccuacaaga

SEQ ID NO: 1779434 - RNA, 19 nt, Artificial Sequence
  Description of Artificial Sequence: Synthetic oligonucleotide
  Antisense strand to SEQ ID NO: 1779433
ucuuguaggcacaagcauu

SEQ ID NO: 1779435 - RNA, 19 nt, Artificial Sequence
  Description of Artificial Sequence: Synthetic oligonucleotide
  Sense strand starting at position 2740 of SEQ ID NO: 1562878
gaauacaugcuguacgauu

SEQ ID NO: 1779436 - RNA, 19 nt, Artificial Sequence
  Description of Artificial Sequence: Synthetic oligonucleotide
  Antisense strand to SEQ ID NO: 1779435
aaucguacagcauguauuc

SEQ ID NO: 1779437 - RNA, 19 nt, Artificial Sequence
  Description of Artificial Sequence: Synthetic oligonucleotide
  Sense strand starting at position 3094 of SEQ ID NO: 1562878
ggugcccuccuagaagaua

SEQ ID NO: 1779438 - RNA, 19 nt, Artificial Sequence
  Description of Artificial Sequence: Synthetic oligonucleotide
  Antisense strand to SEQ ID NO: 1779437
uaucuucuaggagggcacc

SEQ ID NO: 1779439 - RNA, 19 nt, Artificial Sequence
  Description of Artificial Sequence: Synthetic oligonucleotide
  Sense strand starting at position 3145 of SEQ ID NO: 1562878
ccaggaucuaagugguaau

SEQ ID NO: 1779440 - RNA, 19 nt, Artificial Sequence
  Description of Artificial Sequence: Synthetic oligonucleotide
  Antisense strand to SEQ ID NO: 1779439
auuaccacuuagauccugg

SEQ ID NO: 1779441 - RNA, 19 nt, Artificial Sequence
  Description of Artificial Sequence: Synthetic oligonucleotide
  Sense strand starting at position 3294 of SEQ ID NO: 1562878
acuauuuaccaguguucuu

SEQ ID NO: 1779442 - RNA, 19 nt, Artificial Sequence
  Description of Artificial Sequence: Synthetic oligonucleotide
  Antisense strand to SEQ ID NO: 1779441
aagaacacugguaaauagu

SEQ ID NO: 1779443 - RNA, 19 nt, Artificial Sequence
  Description of Artificial Sequence: Synthetic oligonucleotide
  Sense strand starting at position 3595 of SEQ ID NO: 1562878
uuuagaaauuccuuaggcu

SEQ ID NO: 1779444 - RNA, 19 nt, Artificial Sequence
  Description of Artificial Sequence: Synthetic oligonucleotide
  Antisense strand to SEQ ID NO: 1779443
agccuaaggaauuucuaaa

SEQ ID NO: 1779445 - RNA, 19 nt, Artificial Sequence
  Description of Artificial Sequence: Synthetic oligonucleotide
  Sense strand starting at position 3596 of SEQ ID NO: 1562878
uuagaaauuccuuaggcug

SEQ ID NO: 1779446 - RNA, 19 nt, Artificial Sequence
  Description of Artificial Sequence: Synthetic oligonucleotide
  Antisense strand to SEQ ID NO: 1779445
cagccuaaggaauuucuaa

SEQ ID NO: 1779447 - RNA, 19 nt, Artificial Sequence
  Description of Artificial Sequence: Synthetic oligonucleotide
  Sense strand starting at position 79 of SEQ ID NO: 1562879
ggcugugucaucuccguau

SEQ ID NO: 1779448 - RNA, 19 nt, Artificial Sequence
  Description of Artificial Sequence: Synthetic oligonucleotide
  Antisense strand to SEQ ID NO: 1779447
auacggagaugacacagcc

SEQ ID NO: 1779449 - RNA, 19 nt, Artificial Sequence
  Description of Artificial Sequence: Synthetic oligonucleotide
  Sense strand starting at position 110 of SEQ ID NO: 1562879
gcaugagguagaugcucaa

SEQ ID NO: 1779450 - RNA, 19 nt, Artificial Sequence
  Description of Artificial Sequence: Synthetic oligonucleotide
  Antisense strand to SEQ ID NO: 1779449
uugagcaucuaccucaugc

SEQ ID NO: 1779451 - RNA, 19 nt, Artificial Sequence
  Description of Artificial Sequence: Synthetic oligonucleotide
  Sense strand starting at position 113 of SEQ ID NO: 1562879
ugagguagaugcucaaaug

SEQ ID NO: 1779452 - RNA, 19 nt, Artificial Sequence
  Description of Artificial Sequence: Synthetic oligonucleotide
  Antisense strand to SEQ ID NO: 1779451
cauuugagcaucuaccuca

SEQ ID NO: 1779453 - RNA, 19 nt, Artificial Sequence
  Description of Artificial Sequence: Synthetic oligonucleotide
  Sense strand starting at position 125 of SEQ ID NO: 1562879
ucaaaugagucugcacagu

SEQ ID NO: 1779454 - RNA, 19 nt, Artificial Sequence
  Description of Artificial Sequence: Synthetic oligonucleotide
  Antisense strand to SEQ ID NO: 1779453
acugugcagacucauuuga

SEQ ID NO: 1779455 - RNA, 19 nt, Artificial Sequence
  Description of Artificial Sequence: Synthetic oligonucleotide
  Sense strand starting at position 261 of SEQ ID NO: 1562879
ugcagugugccuucucuca

SEQ ID NO: 1779456 - RNA, 19 nt, Artificial Sequence
  Description of Artificial Sequence: Synthetic oligonucleotide
  Antisense strand to SEQ ID NO: 1779455
ugagagaaggcacacugca

SEQ ID NO: 1779457 - RNA, 19 nt, Artificial Sequence
  Description of Artificial Sequence: Synthetic oligonucleotide
  Sense strand starting at position 784 of SEQ ID NO: 1562879
augacauuacugugacucu

SEQ ID NO: 1779458 - RNA, 19 nt, Artificial Sequence
  Description of Artificial Sequence: Synthetic oligonucleotide
  Antisense strand to SEQ ID NO: 1779457
agagucacaguaaugucau

SEQ ID NO: 1779459 - RNA, 19 nt, Artificial Sequence
  Description of Artificial Sequence: Synthetic oligonucleotide
  Sense strand starting at position 801 of SEQ ID NO: 1562879
cuaccauggugguuggaau

SEQ ID NO: 1779460 - RNA, 19 nt, Artificial Sequence
  Description of Artificial Sequence: Synthetic oligonucleotide
  Antisense strand to SEQ ID NO: 1779459
auuccaaccaccaugguag

SEQ ID NO: 1779461 - RNA, 19 nt, Artificial Sequence
  Description of Artificial Sequence: Synthetic oligonucleotide
  Sense strand starting at position 812 of SEQ ID NO: 1562879
guuggaaugucuucuggaa

SEQ ID NO: 1779462 - RNA, 19 nt, Artificial Sequence
  Description of Artificial Sequence: Synthetic oligonucleotide
  Antisense strand to SEQ ID NO: 1779461
uuccagaagacauuccaac

SEQ ID NO: 1779463 - RNA, 19 nt, Artificial Sequence
  Description of Artificial Sequence: Synthetic oligonucleotide
  Sense strand starting at position 970 of SEQ ID NO: 1562879
guuaaucaccugugucuac

SEQ ID NO: 1779464 - RNA, 19 nt, Artificial Sequence
  Description of Artificial Sequence: Synthetic oligonucleotide
  Antisense strand to SEQ ID NO: 1779463
guagacacaggugauuaac

SEQ ID NO: 1779465 - RNA, 19 nt, Artificial Sequence
  Description of Artificial Sequence: Synthetic oligonucleotide
  Sense strand starting at position 1160 of SEQ ID NO: 1562879
guguuuaaacugcauguga

SEQ ID NO: 1779466 - RNA, 19 nt, Artificial Sequence
  Description of Artificial Sequence: Synthetic oligonucleotide
  Antisense strand to SEQ ID NO: 1779465
ucacaugcaguuuaaacac

SEQ ID NO: 1779467 - RNA, 19 nt, Artificial Sequence
  Description of Artificial Sequence: Synthetic oligonucleotide
  Sense strand starting at position 1520 of SEQ ID NO: 1562879
agaacaagugcucacugau

SEQ ID NO: 1779468 - RNA, 19 nt, Artificial Sequence
  Description of Artificial Sequence: Synthetic oligonucleotide
  Antisense strand to SEQ ID NO: 1779467
aucagugagcacuuguucu

SEQ ID NO: 1779469 - RNA, 19 nt, Artificial Sequence
  Description of Artificial Sequence: Synthetic oligonucleotide
  Sense strand starting at position 1605 of SEQ ID NO: 1562879
gaugcaguguuauuccaac

SEQ ID NO: 1779470 - RNA, 19 nt, Artificial Sequence
  Description of Artificial Sequence: Synthetic oligonucleotide
  Antisense strand to SEQ ID NO: 1779469
guuggaauaacacugcauc

SEQ ID NO: 1779471 - RNA, 19 nt, Artificial Sequence
  Description of Artificial Sequence: Synthetic oligonucleotide
  Sense strand starting at position 1611 of SEQ ID NO: 1562879
guguuauuccaacauaauc

SEQ ID NO: 1779472 - RNA, 19 nt, Artificial Sequence
  Description of Artificial Sequence: Synthetic oligonucleotide
  Antisense strand to SEQ ID NO: 1779471
gauuauguuggaauaacac

SEQ ID NO: 1779473 - RNA, 19 nt, Artificial Sequence
  Description of Artificial Sequence: Synthetic oligonucleotide
  Sense strand starting at position 1865 of SEQ ID NO: 1562879
cccucugaugccugaaauu

SEQ ID NO: 1779474 - RNA, 19 nt, Artificial Sequence
  Description of Artificial Sequence: Synthetic oligonucleotide
  Antisense strand to SEQ ID NO: 1779473
aauuucaggcaucagaggg

SEQ ID NO: 1779475 - RNA, 19 nt, Artificial Sequence
  Description of Artificial Sequence: Synthetic oligonucleotide
  Sense strand starting at position 1993 of SEQ ID NO: 1562879
ugggacagcucucccuuaa

SEQ ID NO: 1779476 - RNA, 19 nt, Artificial Sequence
  Description of Artificial Sequence: Synthetic oligonucleotide
  Antisense strand to SEQ ID NO: 1779475
uuaagggagagcuguccca

SEQ ID NO: 1779477 - RNA, 19 nt, Artificial Sequence
  Description of Artificial Sequence: Synthetic oligonucleotide
  Sense strand starting at position 2205 of SEQ ID NO: 1562879
agaggaaugcuccaggcca

SEQ ID NO: 1779478 - RNA, 19 nt, Artificial Sequence
  Description of Artificial Sequence: Synthetic oligonucleotide
  Antisense strand to SEQ ID NO: 1779477
uggccuggagcauuccucu

SEQ ID NO: 1779479 - RNA, 19 nt, Artificial Sequence
  Description of Artificial Sequence: Synthetic oligonucleotide
  Sense strand starting at position 2258 of SEQ ID NO: 1562879
gacaaagaguauuauugac

SEQ ID NO: 1779480 - RNA, 19 nt, Artificial Sequence
  Description of Artificial Sequence: Synthetic oligonucleotide
  Antisense strand to SEQ ID NO: 1779479
gucaauaauacucuuuguc

SEQ ID NO: 1779481 - RNA, 19 nt, Artificial Sequence
  Description of Artificial Sequence: Synthetic oligonucleotide
  Sense strand starting at position 2273 of SEQ ID NO: 1562879
ugacaacaugcaugaguca

SEQ ID NO: 1779482 - RNA, 19 nt, Artificial Sequence
  Description of Artificial Sequence: Synthetic oligonucleotide
  Antisense strand to SEQ ID NO: 1779481
ugacucaugcauguuguca

SEQ ID NO: 1779483 - RNA, 19 nt, Artificial Sequence
  Description of Artificial Sequence: Synthetic oligonucleotide
  Sense strand starting at position 2466 of SEQ ID NO: 1562879
acagucugaugaguggaau

SEQ ID NO: 1779484 - RNA, 19 nt, Artificial Sequence
  Description of Artificial Sequence: Synthetic oligonucleotide
  Antisense strand to SEQ ID NO: 1779483
auuccacucaucagacugu

SEQ ID NO: 1779485 - RNA, 19 nt, Artificial Sequence
  Description of Artificial Sequence: Synthetic oligonucleotide
  Sense strand starting at position 2467 of SEQ ID NO: 1562879
cagucugaugaguggaauc

SEQ ID NO: 1779486 - RNA, 19 nt, Artificial Sequence
  Description of Artificial Sequence: Synthetic oligonucleotide
  Antisense strand to SEQ ID NO: 1779485
gauuccacucaucagacug

SEQ ID NO: 1779487 - RNA, 19 nt, Artificial Sequence
  Description of Artificial Sequence: Synthetic oligonucleotide
  Sense strand starting at position 2469 of SEQ ID NO: 1562879
gucugaugaguggaauccu

SEQ ID NO: 1779488 - RNA, 19 nt, Artificial Sequence
  Description of Artificial Sequence: Synthetic oligonucleotide
  Antisense strand to SEQ ID NO: 1779487
aggauuccacucaucagac

SEQ ID NO: 1779489 - RNA, 19 nt, Artificial Sequence
  Description of Artificial Sequence: Synthetic oligonucleotide
  Sense strand starting at position 2581 of SEQ ID NO: 1562879
ucuagaaggucucugaaau

SEQ ID NO: 1779490 - RNA, 19 nt, Artificial Sequence
  Description of Artificial Sequence: Synthetic oligonucleotide
  Antisense strand to SEQ ID NO: 1779489
auuucagagaccuucuaga

SEQ ID NO: 1779491 - RNA, 19 nt, Artificial Sequence
  Description of Artificial Sequence: Synthetic oligonucleotide
  Sense strand starting at position 2582 of SEQ ID NO: 1562879
cuagaaggucucugaaauc

SEQ ID NO: 1779492 - RNA, 19 nt, Artificial Sequence
  Description of Artificial Sequence: Synthetic oligonucleotide
  Antisense strand to SEQ ID NO: 1779491
gauuucagagaccuucuag

SEQ ID NO: 1779493 - RNA, 19 nt, Artificial Sequence
  Description of Artificial Sequence: Synthetic oligonucleotide
  Sense strand starting at position 2697 of SEQ ID NO: 1562879
gacacugcucauggguaaa

SEQ ID NO: 1779494 - RNA, 19 nt, Artificial Sequence
  Description of Artificial Sequence: Synthetic oligonucleotide
  Antisense strand to SEQ ID NO: 1779493
uuuacccaugagcaguguc

SEQ ID NO: 1779495 - RNA, 19 nt, Artificial Sequence
  Description of Artificial Sequence: Synthetic oligonucleotide
  Sense strand starting at position 2735 of SEQ ID NO: 1562879
acagguugcacggaucaaa

SEQ ID NO: 1779496 - RNA, 19 nt, Artificial Sequence
  Description of Artificial Sequence: Synthetic oligonucleotide
  Antisense strand to SEQ ID NO: 1779495
uuugauccgugcaaccugu

SEQ ID NO: 1779497 - RNA, 19 nt, Artificial Sequence
  Description of Artificial Sequence: Synthetic oligonucleotide
  Sense strand starting at position 2805 of SEQ ID NO: 1562879
aagcauuggccagggagaa

SEQ ID NO: 1779498 - RNA, 19 nt, Artificial Sequence
  Description of Artificial Sequence: Synthetic oligonucleotide
  Antisense strand to SEQ ID NO: 1779497
uucucccuggccaaugcuu

SEQ ID NO: 1779499 - RNA, 19 nt, Artificial Sequence
  Description of Artificial Sequence: Synthetic oligonucleotide
  Sense strand starting at position 3019 of SEQ ID NO: 1562879
gcugauguuucagugggaa

SEQ ID NO: 1779500 - RNA, 19 nt, Artificial Sequence
  Description of Artificial Sequence: Synthetic oligonucleotide
  Antisense strand to SEQ ID NO: 1779499
uucccacugaaacaucagc

SEQ ID NO: 1779501 - RNA, 19 nt, Artificial Sequence
  Description of Artificial Sequence: Synthetic oligonucleotide
  Sense strand starting at position 3033 of SEQ ID NO: 1562879
gggaauucuucagcaggag

SEQ ID NO: 1779502 - RNA, 19 nt, Artificial Sequence
  Description of Artificial Sequence: Synthetic oligonucleotide
  Antisense strand to SEQ ID NO: 1779501
cuccugcugaagaauuccc

SEQ ID NO: 1779503 - RNA, 19 nt, Artificial Sequence
  Description of Artificial Sequence: Synthetic oligonucleotide
  Sense strand starting at position 3075 of SEQ ID NO: 1562879
agaggaaccugugugacaa

SEQ ID NO: 1779504 - RNA, 19 nt, Artificial Sequence
  Description of Artificial Sequence: Synthetic oligonucleotide
  Antisense strand to SEQ ID NO: 1779503
uugucacacagguuccucu

SEQ ID NO: 1779505 - RNA, 19 nt, Artificial Sequence
  Description of Artificial Sequence: Synthetic oligonucleotide
  Sense strand starting at position 3076 of SEQ ID NO: 1562879
gaggaaccugugugacaaa

SEQ ID NO: 1779506 - RNA, 19 nt, Artificial Sequence
  Description of Artificial Sequence: Synthetic oligonucleotide
  Antisense strand to SEQ ID NO: 1779505
uuugucacacagguuccuc

SEQ ID NO: 1779507 - RNA, 19 nt, Artificial Sequence
  Description of Artificial Sequence: Synthetic oligonucleotide
  Sense strand starting at position 3252 of SEQ ID NO: 1562879
agugacuucugcuccauuu

SEQ ID NO: 1779508 - RNA, 19 nt, Artificial Sequence
  Description of Artificial Sequence: Synthetic oligonucleotide
  Antisense strand to SEQ ID NO: 1779507
aaauggagcagaagucacu

SEQ ID NO: 1779509 - RNA, 19 nt, Artificial Sequence
  Description of Artificial Sequence: Synthetic oligonucleotide
  Sense strand starting at position 3286 of SEQ ID NO: 1562879
aaaguagaauguccugaua

SEQ ID NO: 1779510 - RNA, 19 nt, Artificial Sequence
  Description of Artificial Sequence: Synthetic oligonucleotide
  Antisense strand to SEQ ID NO: 1779509
uaucaggacauucuacuuu

SEQ ID NO: 1779511 - RNA, 19 nt, Artificial Sequence
  Description of Artificial Sequence: Synthetic oligonucleotide
  Sense strand starting at position 3316 of SEQ ID NO: 1562879
uaagaaugcuagguaagca

SEQ ID NO: 1779512 - RNA, 19 nt, Artificial Sequence
  Description of Artificial Sequence: Synthetic oligonucleotide
  Antisense strand to SEQ ID NO: 1779511
ugcuuaccuagcauucuua

SEQ ID NO: 1779513 - RNA, 19 nt, Artificial Sequence
  Description of Artificial Sequence: Synthetic oligonucleotide
  Sense strand starting at position 3360 of SEQ ID NO: 1562879
agaagcgcuaucuagaagu

SEQ ID NO: 1779514 - RNA, 19 nt, Artificial Sequence
  Description of Artificial Sequence: Synthetic oligonucleotide
  Antisense strand to SEQ ID NO: 1779513
acuucuagauagcgcuucu

SEQ ID NO: 1779515 - RNA, 19 nt, Artificial Sequence
  Description of Artificial Sequence: Synthetic oligonucleotide
  Sense strand starting at position 3362 of SEQ ID NO: 1562879
aagcgcuaucuagaaguga

SEQ ID NO: 1779516 - RNA, 19 nt, Artificial Sequence
  Description of Artificial Sequence: Synthetic oligonucleotide
  Antisense strand to SEQ ID NO: 1779515
ucacuucuagauagcgcuu

SEQ ID NO: 1779517 - RNA, 19 nt, Artificial Sequence
  Description of Artificial Sequence: Synthetic oligonucleotide
  Sense strand starting at position 3410 of SEQ ID NO: 1562879
auaaauaugugccuuugaa

SEQ ID NO: 1779518 - RNA, 19 nt, Artificial Sequence
  Description of Artificial Sequence: Synthetic oligonucleotide
  Antisense strand to SEQ ID NO: 1779517
uucaaaggcacauauuuau

SEQ ID NO: 1779519 - RNA, 19 nt, Artificial Sequence
  Description of Artificial Sequence: Synthetic oligonucleotide
  Sense strand starting at position 3460 of SEQ ID NO: 1562879
gcacaugacuaucuauagu

SEQ ID NO: 1779520 - RNA, 19 nt, Artificial Sequence
  Description of Artificial Sequence: Synthetic oligonucleotide
  Antisense strand to SEQ ID NO: 1779519
acuauagauagucaugugc

SEQ ID NO: 1779521 - RNA, 19 nt, Artificial Sequence
  Description of Artificial Sequence: Synthetic oligonucleotide
  Sense strand starting at position 3737 of SEQ ID NO: 1562879
gccaaagcacucuacugua

SEQ ID NO: 1779522 - RNA, 19 nt, Artificial Sequence
  Description of Artificial Sequence: Synthetic oligonucleotide
  Antisense strand to SEQ ID NO: 1779521
uacaguagagugcuuuggc

SEQ ID NO: 1779523 - RNA, 19 nt, Artificial Sequence
  Description of Artificial Sequence: Synthetic oligonucleotide
  Sense strand starting at position 3742 of SEQ ID NO: 1562879
agcacucuacuguagagaa

SEQ ID NO: 1779524 - RNA, 19 nt, Artificial Sequence
  Description of Artificial Sequence: Synthetic oligonucleotide
  Antisense strand to SEQ ID NO: 1779523
uucucuacaguagagugcu

SEQ ID NO: 1779525 - RNA, 19 nt, Artificial Sequence
  Description of Artificial Sequence: Synthetic oligonucleotide
  Sense strand starting at position 3781 of SEQ ID NO: 1562879
gugacaaacugauaaauga

SEQ ID NO: 1779526 - RNA, 19 nt, Artificial Sequence
  Description of Artificial Sequence: Synthetic oligonucleotide
  Antisense strand to SEQ ID NO: 1779525
ucauuuaucaguuugucac

SEQ ID NO: 1779527 - RNA, 19 nt, Artificial Sequence
  Description of Artificial Sequence: Synthetic oligonucleotide
  Sense strand starting at position 410 of SEQ ID NO: 1562880
gcuggaaugucccuuuccu

SEQ ID NO: 1779528 - RNA, 19 nt, Artificial Sequence
  Description of Artificial Sequence: Synthetic oligonucleotide
  Antisense strand to SEQ ID NO: 1779527
aggaaagggacauuccagc

SEQ ID NO: 1779529 - RNA, 19 nt, Artificial Sequence
  Description of Artificial Sequence: Synthetic oligonucleotide
  Sense strand starting at position 485 of SEQ ID NO: 1562880
ccggaaccaugagagauaa

SEQ ID NO: 1779530 - RNA, 19 nt, Artificial Sequence
  Description of Artificial Sequence: Synthetic oligonucleotide
  Antisense strand to SEQ ID NO: 1779529
uuaucucucaugguuccgg

SEQ ID NO: 1779531 - RNA, 19 nt, Artificial Sequence
  Description of Artificial Sequence: Synthetic oligonucleotide
  Sense strand starting at position 496 of SEQ ID NO: 1562880
agagauaaaugucugcugu

SEQ ID NO: 1779532 - RNA, 19 nt, Artificial Sequence
  Description of Artificial Sequence: Synthetic oligonucleotide
  Antisense strand to SEQ ID NO: 1779531
acagcagacauuuaucucu

SEQ ID NO: 1779533 - RNA, 19 nt, Artificial Sequence
  Description of Artificial Sequence: Synthetic oligonucleotide
  Sense strand starting at position 497 of SEQ ID NO: 1562880
gagauaaaugucugcuguu

SEQ ID NO: 1779534 - RNA, 19 nt, Artificial Sequence
  Description of Artificial Sequence: Synthetic oligonucleotide
  Antisense strand to SEQ ID NO: 1779533
aacagcagacauuuaucuc

SEQ ID NO: 1779535 - RNA, 19 nt, Artificial Sequence
  Description of Artificial Sequence: Synthetic oligonucleotide
  Sense strand starting at position 503 of SEQ ID NO: 1562880
aaugucugcuguuugaaac

SEQ ID NO: 1779536 - RNA, 19 nt, Artificial Sequence
  Description of Artificial Sequence: Synthetic oligonucleotide
  Antisense strand to SEQ ID NO: 1779535
guuucaaacagcagacauu

SEQ ID NO: 1779537 - RNA, 19 nt, Artificial Sequence
  Description of Artificial Sequence: Synthetic oligonucleotide
  Sense strand starting at position 504 of SEQ ID NO: 1562880
augucugcuguuugaaacu

SEQ ID NO: 1779538 - RNA, 19 nt, Artificial Sequence
  Description of Artificial Sequence: Synthetic oligonucleotide
  Antisense strand to SEQ ID NO: 1779537
aguuucaaacagcagacau

SEQ ID NO: 1779539 - RNA, 19 nt, Artificial Sequence
  Description of Artificial Sequence: Synthetic oligonucleotide
  Sense strand starting at position 513 of SEQ ID NO: 1562880
guuugaaacugccuaguuu

SEQ ID NO: 1779540 - RNA, 19 nt, Artificial Sequence
  Description of Artificial Sequence: Synthetic oligonucleotide
  Antisense strand to SEQ ID NO: 1779539
aaacuaggcaguuucaaac

SEQ ID NO: 1779541 - RNA, 19 nt, Artificial Sequence
  Description of Artificial Sequence: Synthetic oligonucleotide
  Sense strand starting at position 534 of SEQ ID NO: 1562880
gguacuugguugcuacaaa

SEQ ID NO: 1779542 - RNA, 19 nt, Artificial Sequence
  Description of Artificial Sequence: Synthetic oligonucleotide
  Antisense strand to SEQ ID NO: 1779541
uuuguagcaaccaaguacc

SEQ ID NO: 1779543 - RNA, 19 nt, Artificial Sequence
  Description of Artificial Sequence: Synthetic oligonucleotide
  Sense strand starting at position 563 of SEQ ID NO: 1562880
acacguggugucuggacau

SEQ ID NO: 1779544 - RNA, 19 nt, Artificial Sequence
  Description of Artificial Sequence: Synthetic oligonucleotide
  Antisense strand to SEQ ID NO: 1779543
auguccagacaccacgugu

SEQ ID NO: 1779545 - RNA, 19 nt, Artificial Sequence
  Description of Artificial Sequence: Synthetic oligonucleotide
  Sense strand starting at position 799 of SEQ ID NO: 1562880
caaggcaucugggagauuu

SEQ ID NO: 1779546 - RNA, 19 nt, Artificial Sequence
  Description of Artificial Sequence: Synthetic oligonucleotide
  Antisense strand to SEQ ID NO: 1779545
aaaucucccagaugccuug

SEQ ID NO: 1779547 - RNA, 19 nt, Artificial Sequence
  Description of Artificial Sequence: Synthetic oligonucleotide
  Sense strand starting at position 975 of SEQ ID NO: 1562880
gaggaaguucucggcucca

SEQ ID NO: 1779548 - RNA, 19 nt, Artificial Sequence
  Description of Artificial Sequence: Synthetic oligonucleotide
  Antisense strand to SEQ ID NO: 1779547
uggagccgagaacuuccuc

SEQ ID NO: 1779549 - RNA, 19 nt, Artificial Sequence
  Description of Artificial Sequence: Synthetic oligonucleotide
  Sense strand starting at position 1113 of SEQ ID NO: 1562880
cccacagguccugaucuaa

SEQ ID NO: 1779550 - RNA, 19 nt, Artificial Sequence
  Description of Artificial Sequence: Synthetic oligonucleotide
  Antisense strand to SEQ ID NO: 1779549
uuagaucaggaccuguggg

SEQ ID NO: 1779551 - RNA, 19 nt, Artificial Sequence
  Description of Artificial Sequence: Synthetic oligonucleotide
  Sense strand starting at position 1449 of SEQ ID NO: 1562880
aggcgcugcuugugacauu

SEQ ID NO: 1779552 - RNA, 19 nt, Artificial Sequence
  Description of Artificial Sequence: Synthetic oligonucleotide
  Antisense strand to SEQ ID NO: 1779551
aaugucacaagcagcgccu

SEQ ID NO: 1779553 - RNA, 19 nt, Artificial Sequence
  Description of Artificial Sequence: Synthetic oligonucleotide
  Sense strand starting at position 2559 of SEQ ID NO: 1562880
gggcgaugacuuugcagaa

SEQ ID NO: 1779554 - RNA, 19 nt, Artificial Sequence
  Description of Artificial Sequence: Synthetic oligonucleotide
  Antisense strand to SEQ ID NO: 1779553
uucugcaaagucaucgccc

SEQ ID NO: 1779555 - RNA, 19 nt, Artificial Sequence
  Description of Artificial Sequence: Synthetic oligonucleotide
  Sense strand starting at position 2560 of SEQ ID NO: 1562880
ggcgaugacuuugcagaaa

SEQ ID NO: 1779556 - RNA, 19 nt, Artificial Sequence
  Description of Artificial Sequence: Synthetic oligonucleotide
  Antisense strand to SEQ ID NO: 1779555
uuucugcaaagucaucgcc

SEQ ID NO: 1779557 - RNA, 19 nt, Artificial Sequence
  Description of Artificial Sequence: Synthetic oligonucleotide
  Sense strand starting at position 2607 of SEQ ID NO: 1562880
ugaguaaugaccggucccu

SEQ ID NO: 1779558 - RNA, 19 nt, Artificial Sequence
  Description of Artificial Sequence: Synthetic oligonucleotide
  Antisense strand to SEQ ID NO: 1779557
agggaccggucauuacuca

SEQ ID NO: 1779559 - RNA, 19 nt, Artificial Sequence
  Description of Artificial Sequence: Synthetic oligonucleotide
  Sense strand starting at position 3351 of SEQ ID NO: 1562880
aagauuuagugugauugga

SEQ ID NO: 1779560 - RNA, 19 nt, Artificial Sequence
  Description of Artificial Sequence: Synthetic oligonucleotide
  Antisense strand to SEQ ID NO: 1779559
uccaaucacacuaaaucuu

SEQ ID NO: 1779561 - RNA, 19 nt, Artificial Sequence
  Description of Artificial Sequence: Synthetic oligonucleotide
  Sense strand starting at position 3355 of SEQ ID NO: 1562880
uuuagugugauuggaguuu

SEQ ID NO: 1779562 - RNA, 19 nt, Artificial Sequence
  Description of Artificial Sequence: Synthetic oligonucleotide
  Antisense strand to SEQ ID NO: 1779561
aaacuccaaucacacuaaa

SEQ ID NO: 1779563 - RNA, 19 nt, Artificial Sequence
  Description of Artificial Sequence: Synthetic oligonucleotide
  Sense strand starting at position 3431 of SEQ ID NO: 1562880
ggccacugcugugagcaaa

SEQ ID NO: 1779564 - RNA, 19 nt, Artificial Sequence
  Description of Artificial Sequence: Synthetic oligonucleotide
  Antisense strand to SEQ ID NO: 1779563
uuugcucacagcaguggcc

SEQ ID NO: 1779565 - RNA, 19 nt, Artificial Sequence
  Description of Artificial Sequence: Synthetic oligonucleotide
  Sense strand starting at position 3487 of SEQ ID NO: 1562880
augugucugcuuugagcuu

SEQ ID NO: 1779566 - RNA, 19 nt, Artificial Sequence
  Description of Artificial Sequence: Synthetic oligonucleotide
  Antisense strand to SEQ ID NO: 1779565
aagcucaaagcagacacau

SEQ ID NO: 1779567 - RNA, 19 nt, Artificial Sequence
  Description of Artificial Sequence: Synthetic oligonucleotide
  Sense strand starting at position 3522 of SEQ ID NO: 1562880
uuuaaagauccuugcaugu

SEQ ID NO: 1779568 - RNA, 19 nt, Artificial Sequence
  Description of Artificial Sequence: Synthetic oligonucleotide
  Antisense strand to SEQ ID NO: 1779567
acaugcaaggaucuuuaaa

SEQ ID NO: 1779569 - RNA, 19 nt, Artificial Sequence
  Description of Artificial Sequence: Synthetic oligonucleotide
  Sense strand starting at position 3679 of SEQ ID NO: 1562880
auaaaucagcccuggcaga

SEQ ID NO: 1779570 - RNA, 19 nt, Artificial Sequence
  Description of Artificial Sequence: Synthetic oligonucleotide
  Antisense strand to SEQ ID NO: 1779569
ucugccagggcugauuuau

SEQ ID NO: 1779571 - RNA, 19 nt, Artificial Sequence
  Description of Artificial Sequence: Synthetic oligonucleotide
  Sense strand starting at position 242 of SEQ ID NO: 1562881
ggccaaaugugaucuucug

SEQ ID NO: 1779572 - RNA, 19 nt, Artificial Sequence
  Description of Artificial Sequence: Synthetic oligonucleotide
  Antisense strand to SEQ ID NO: 1779571
cagaagaucacauuuggcc

SEQ ID NO: 1779573 - RNA, 19 nt, Artificial Sequence
  Description of Artificial Sequence: Synthetic oligonucleotide
  Sense strand starting at position 279 of SEQ ID NO: 1562881
uguugacauuuggaagaug

SEQ ID NO: 1779574 - RNA, 19 nt, Artificial Sequence
  Description of Artificial Sequence: Synthetic oligonucleotide
  Antisense strand to SEQ ID NO: 1779573
caucuuccaaaugucaaca

SEQ ID NO: 1779575 - RNA, 19 nt, Artificial Sequence
  Description of Artificial Sequence: Synthetic oligonucleotide
  Sense strand starting at position 287 of SEQ ID NO: 1562881
uuuggaagaugugccuaau

SEQ ID NO: 1779576 - RNA, 19 nt, Artificial Sequence
  Description of Artificial Sequence: Synthetic oligonucleotide
  Antisense strand to SEQ ID NO: 1779575
auuaggcacaucuuccaaa

SEQ ID NO: 1779577 - RNA, 19 nt, Artificial Sequence
  Description of Artificial Sequence: Synthetic oligonucleotide
  Sense strand starting at position 321 of SEQ ID NO: 1562881
uuugcaaaugacuagcaua

SEQ ID NO: 1779578 - RNA, 19 nt, Artificial Sequence
  Description of Artificial Sequence: Synthetic oligonucleotide
  Antisense strand to SEQ ID NO: 1779577
uaugcuagucauuugcaaa

SEQ ID NO: 1779579 - RNA, 19 nt, Artificial Sequence
  Description of Artificial Sequence: Synthetic oligonucleotide
  Sense strand starting at position 797 of SEQ ID NO: 1562881
gggacugugccucauauuc

SEQ ID NO: 1779580 - RNA, 19 nt, Artificial Sequence
  Description of Artificial Sequence: Synthetic oligonucleotide
  Antisense strand to SEQ ID NO: 1779579
gaauaugaggcacaguccc

SEQ ID NO: 1779581 - RNA, 19 nt, Artificial Sequence
  Description of Artificial Sequence: Synthetic oligonucleotide
  Sense strand starting at position 841 of SEQ ID NO: 1562881
augagaacaugcucaaggu

SEQ ID NO: 1779582 - RNA, 19 nt, Artificial Sequence
  Description of Artificial Sequence: Synthetic oligonucleotide
  Antisense strand to SEQ ID NO: 1779581
accuugagcauguucucau

SEQ ID NO: 1779583 - RNA, 19 nt, Artificial Sequence
  Description of Artificial Sequence: Synthetic oligonucleotide
  Sense strand starting at position 845 of SEQ ID NO: 1562881
gaacaugcucaaggucaua

SEQ ID NO: 1779584 - RNA, 19 nt, Artificial Sequence
  Description of Artificial Sequence: Synthetic oligonucleotide
  Antisense strand to SEQ ID NO: 1779583
uaugaccuugagcauguuc

SEQ ID NO: 1779585 - RNA, 19 nt, Artificial Sequence
  Description of Artificial Sequence: Synthetic oligonucleotide
  Sense strand starting at position 936 of SEQ ID NO: 1562881
uguacauaauguccucaga

SEQ ID NO: 1779586 - RNA, 19 nt, Artificial Sequence
  Description of Artificial Sequence: Synthetic oligonucleotide
  Antisense strand to SEQ ID NO: 1779585
ucugaggacauuauguaca

SEQ ID NO: 1779587 - RNA, 19 nt, Artificial Sequence
  Description of Artificial Sequence: Synthetic oligonucleotide
  Sense strand starting at position 963 of SEQ ID NO: 1562881
acaaucaaucucugguguu

SEQ ID NO: 1779588 - RNA, 19 nt, Artificial Sequence
  Description of Artificial Sequence: Synthetic oligonucleotide
  Antisense strand to SEQ ID NO: 1779587
aacaccagagauugauugu

SEQ ID NO: 1779589 - RNA, 19 nt, Artificial Sequence
  Description of Artificial Sequence: Synthetic oligonucleotide
  Sense strand starting at position 1033 of SEQ ID NO: 1562881
aguggcauccacuaagagu

SEQ ID NO: 1779590 - RNA, 19 nt, Artificial Sequence
  Description of Artificial Sequence: Synthetic oligonucleotide
  Antisense strand to SEQ ID NO: 1779589
acucuuaguggaugccacu

SEQ ID NO: 1779591 - RNA, 19 nt, Artificial Sequence
  Description of Artificial Sequence: Synthetic oligonucleotide
  Sense strand starting at position 1076 of SEQ ID NO: 1562881
gaucuucuccuuugguaga

SEQ ID NO: 1779592 - RNA, 19 nt, Artificial Sequence
  Description of Artificial Sequence: Synthetic oligonucleotide
  Antisense strand to SEQ ID NO: 1779591
ucuaccaaaggagaagauc

SEQ ID NO: 1779593 - RNA, 19 nt, Artificial Sequence
  Description of Artificial Sequence: Synthetic oligonucleotide
  Sense strand starting at position 1394 of SEQ ID NO: 1562881
cacuauguugugcagagua

SEQ ID NO: 1779594 - RNA, 19 nt, Artificial Sequence
  Description of Artificial Sequence: Synthetic oligonucleotide
  Antisense strand to SEQ ID NO: 1779593
uacucugcacaacauagug

SEQ ID NO: 1779595 - RNA, 19 nt, Artificial Sequence
  Description of Artificial Sequence: Synthetic oligonucleotide
  Sense strand starting at position 1732 of SEQ ID NO: 1562881
gcuagaaauuuggacuucu

SEQ ID NO: 1779596 - RNA, 19 nt, Artificial Sequence
  Description of Artificial Sequence: Synthetic oligonucleotide
  Antisense strand to SEQ ID NO: 1779595
agaaguccaaauuucuagc

SEQ ID NO: 1779597 - RNA, 19 nt, Artificial Sequence
  Description of Artificial Sequence: Synthetic oligonucleotide
  Sense strand starting at position 1741 of SEQ ID NO: 1562881
uuggacuucugaguacaac

SEQ ID NO: 1779598 - RNA, 19 nt, Artificial Sequence
  Description of Artificial Sequence: Synthetic oligonucleotide
  Antisense strand to SEQ ID NO: 1779597
guuguacucagaaguccaa

SEQ ID NO: 1779599 - RNA, 19 nt, Artificial Sequence
  Description of Artificial Sequence: Synthetic oligonucleotide
  Sense strand starting at position 2110 of SEQ ID NO: 1562881
ggucauaagacuuguagac

SEQ ID NO: 1779600 - RNA, 19 nt, Artificial Sequence
  Description of Artificial Sequence: Synthetic oligonucleotide
  Antisense strand to SEQ ID NO: 1779599
gucuacaagucuuaugacc

SEQ ID NO: 1779601 - RNA, 19 nt, Artificial Sequence
  Description of Artificial Sequence: Synthetic oligonucleotide
  Sense strand starting at position 2180 of SEQ ID NO: 1562881
gaugaaaccguuuguuaaa

SEQ ID NO: 1779602 - RNA, 19 nt, Artificial Sequence
  Description of Artificial Sequence: Synthetic oligonucleotide
  Antisense strand to SEQ ID NO: 1779601
uuuaacaaacgguuucauc

SEQ ID NO: 1779603 - RNA, 19 nt, Artificial Sequence
  Description of Artificial Sequence: Synthetic oligonucleotide
  Sense strand starting at position 2181 of SEQ ID NO: 1562881
augaaaccguuuguuaaag

SEQ ID NO: 1779604 - RNA, 19 nt, Artificial Sequence
  Description of Artificial Sequence: Synthetic oligonucleotide
  Antisense strand to SEQ ID NO: 1779603
cuuuaacaaacgguuucau

SEQ ID NO: 1779605 - RNA, 19 nt, Artificial Sequence
  Description of Artificial Sequence: Synthetic oligonucleotide
  Sense strand starting at position 2413 of SEQ ID NO: 1562881
cgaguaaagcaagagguua

SEQ ID NO: 1779606 - RNA, 19 nt, Artificial Sequence
  Description of Artificial Sequence: Synthetic oligonucleotide
  Antisense strand to SEQ ID NO: 1779605
uaaccucuugcuuuacucg

SEQ ID NO: 1779607 - RNA, 19 nt, Artificial Sequence
  Description of Artificial Sequence: Synthetic oligonucleotide
  Sense strand starting at position 2415 of SEQ ID NO: 1562881
aguaaagcaagagguuaau

SEQ ID NO: 1779608 - RNA, 19 nt, Artificial Sequence
  Description of Artificial Sequence: Synthetic oligonucleotide
  Antisense strand to SEQ ID NO: 1779607
auuaaccucuugcuuuacu

SEQ ID NO: 1779609 - RNA, 19 nt, Artificial Sequence
  Description of Artificial Sequence: Synthetic oligonucleotide
  Sense strand starting at position 2421 of SEQ ID NO: 1562881
gcaagagguuaauuaaaca

SEQ ID NO: 1779610 - RNA, 19 nt, Artificial Sequence
  Description of Artificial Sequence: Synthetic oligonucleotide
  Antisense strand to SEQ ID NO: 1779609
uguuuaauuaaccucuugc

SEQ ID NO: 1779611 - RNA, 19 nt, Artificial Sequence
  Description of Artificial Sequence: Synthetic oligonucleotide
  Sense strand starting at position 2616 of SEQ ID NO: 1562881
caaugaacgugccuuauuu

SEQ ID NO: 1779612 - RNA, 19 nt, Artificial Sequence
  Description of Artificial Sequence: Synthetic oligonucleotide
  Antisense strand to SEQ ID NO: 1779611
aaauaaggcacguucauug

SEQ ID NO: 1779613 - RNA, 19 nt, Artificial Sequence
  Description of Artificial Sequence: Synthetic oligonucleotide
  Sense strand starting at position 2645 of SEQ ID NO: 1562881
guggaaagcacuugaugaa

SEQ ID NO: 1779614 - RNA, 19 nt, Artificial Sequence
  Description of Artificial Sequence: Synthetic oligonucleotide
  Antisense strand to SEQ ID NO: 1779613
uucaucaagugcuuuccac

SEQ ID NO: 1779615 - RNA, 19 nt, Artificial Sequence
  Description of Artificial Sequence: Synthetic oligonucleotide
  Sense strand starting at position 2781 of SEQ ID NO: 1562881
ggaguccaccugcaaauua

SEQ ID NO: 1779616 - RNA, 19 nt, Artificial Sequence
  Description of Artificial Sequence: Synthetic oligonucleotide
  Antisense strand to SEQ ID NO: 1779615
uaauuugcagguggacucc

SEQ ID NO: 1779617 - RNA, 19 nt, Artificial Sequence
  Description of Artificial Sequence: Synthetic oligonucleotide
  Sense strand starting at position 2836 of SEQ ID NO: 1562881
gugagcuuucauuaaggag

SEQ ID NO: 1779618 - RNA, 19 nt, Artificial Sequence
  Description of Artificial Sequence: Synthetic oligonucleotide
  Antisense strand to SEQ ID NO: 1779617
cuccuuaaugaaagcucac

SEQ ID NO: 1779619 - RNA, 19 nt, Artificial Sequence
  Description of Artificial Sequence: Synthetic oligonucleotide
  Sense strand starting at position 2878 of SEQ ID NO: 1562881
cccagacuugcuugauuaa

SEQ ID NO: 1779620 - RNA, 19 nt, Artificial Sequence
  Description of Artificial Sequence: Synthetic oligonucleotide
  Antisense strand to SEQ ID NO: 1779619
uuaaucaagcaagucuggg

SEQ ID NO: 1779621 - RNA, 19 nt, Artificial Sequence
  Description of Artificial Sequence: Synthetic oligonucleotide
  Sense strand starting at position 2879 of SEQ ID NO: 1562881
ccagacuugcuugauuaaa

SEQ ID NO: 1779622 - RNA, 19 nt, Artificial Sequence
  Description of Artificial Sequence: Synthetic oligonucleotide
  Antisense strand to SEQ ID NO: 1779621
uuuaaucaagcaagucugg

SEQ ID NO: 1779623 - RNA, 19 nt, Artificial Sequence
  Description of Artificial Sequence: Synthetic oligonucleotide
  Sense strand starting at position 2881 of SEQ ID NO: 1562881
agacuugcuugauuaaaca

SEQ ID NO: 1779624 - RNA, 19 nt, Artificial Sequence
  Description of Artificial Sequence: Synthetic oligonucleotide
  Antisense strand to SEQ ID NO: 1779623
uguuuaaucaagcaagucu

SEQ ID NO: 1779625 - RNA, 19 nt, Artificial Sequence
  Description of Artificial Sequence: Synthetic oligonucleotide
  Sense strand starting at position 2928 of SEQ ID NO: 1562881
uggguucuccacugaugua

SEQ ID NO: 1779626 - RNA, 19 nt, Artificial Sequence
  Description of Artificial Sequence: Synthetic oligonucleotide
  Antisense strand to SEQ ID NO: 1779625
uacaucaguggagaaccca

SEQ ID NO: 1779627 - RNA, 19 nt, Artificial Sequence
  Description of Artificial Sequence: Synthetic oligonucleotide
  Sense strand starting at position 3004 of SEQ ID NO: 1562881
cuaaguugauggucugauc

SEQ ID NO: 1779628 - RNA, 19 nt, Artificial Sequence
  Description of Artificial Sequence: Synthetic oligonucleotide
  Antisense strand to SEQ ID NO: 1779627
gaucagaccaucaacuuag

SEQ ID NO: 1779629 - RNA, 19 nt, Artificial Sequence
  Description of Artificial Sequence: Synthetic oligonucleotide
  Sense strand starting at position 3018 of SEQ ID NO: 1562881
ugaucaugacaguguugaa

SEQ ID NO: 1779630 - RNA, 19 nt, Artificial Sequence
  Description of Artificial Sequence: Synthetic oligonucleotide
  Antisense strand to SEQ ID NO: 1779629
uucaacacugucaugauca

SEQ ID NO: 1779631 - RNA, 19 nt, Artificial Sequence
  Description of Artificial Sequence: Synthetic oligonucleotide
  Sense strand starting at position 3028 of SEQ ID NO: 1562881
aguguugaaacauggguuu

SEQ ID NO: 1779632 - RNA, 19 nt, Artificial Sequence
  Description of Artificial Sequence: Synthetic oligonucleotide
  Antisense strand to SEQ ID NO: 1779631
aaacccauguuucaacacu

SEQ ID NO: 1779633 - RNA, 19 nt, Artificial Sequence
  Description of Artificial Sequence: Synthetic oligonucleotide
  Sense strand starting at position 3030 of SEQ ID NO: 1562881
uguugaaacauggguuucu

SEQ ID NO: 1779634 - RNA, 19 nt, Artificial Sequence
  Description of Artificial Sequence: Synthetic oligonucleotide
  Antisense strand to SEQ ID NO: 1779633
agaaacccauguuucaaca

SEQ ID NO: 1779635 - RNA, 19 nt, Artificial Sequence
  Description of Artificial Sequence: Synthetic oligonucleotide
  Sense strand starting at position 3524 of SEQ ID NO: 1562881
gagaguguggcccagggau

SEQ ID NO: 1779636 - RNA, 19 nt, Artificial Sequence
  Description of Artificial Sequence: Synthetic oligonucleotide
  Antisense strand to SEQ ID NO: 1779635
aucccugggccacacucuc

SEQ ID NO: 1779637 - RNA, 19 nt, Artificial Sequence
  Description of Artificial Sequence: Synthetic oligonucleotide
  Sense strand starting at position 3526 of SEQ ID NO: 1562881
gaguguggcccagggauaa

SEQ ID NO: 1779638 - RNA, 19 nt, Artificial Sequence
  Description of Artificial Sequence: Synthetic oligonucleotide
  Antisense strand to SEQ ID NO: 1779637
uuaucccugggccacacuc

SEQ ID NO: 1779639 - RNA, 19 nt, Artificial Sequence
  Description of Artificial Sequence: Synthetic oligonucleotide
  Sense strand starting at position 3815 of SEQ ID NO: 1562881
gagagauacuaguugugug

SEQ ID NO: 1779640 - RNA, 19 nt, Artificial Sequence
  Description of Artificial Sequence: Synthetic oligonucleotide
  Antisense strand to SEQ ID NO: 1779639
cacacaacuaguaucucuc

SEQ ID NO: 1779641 - RNA, 19 nt, Artificial Sequence
  Description of Artificial Sequence: Synthetic oligonucleotide
  Sense strand starting at position 3816 of SEQ ID NO: 1562881
agagauacuaguuguguga

SEQ ID NO: 1779642 - RNA, 19 nt, Artificial Sequence
  Description of Artificial Sequence: Synthetic oligonucleotide
  Antisense strand to SEQ ID NO: 1779641
ucacacaacuaguaucucu

SEQ ID NO: 1779643 - RNA, 19 nt, Artificial Sequence
  Description of Artificial Sequence: Synthetic oligonucleotide
  Sense strand starting at position 3819 of SEQ ID NO: 1562881
gauacuaguugugugagac

SEQ ID NO: 1779644 - RNA, 19 nt, Artificial Sequence
  Description of Artificial Sequence: Synthetic oligonucleotide
  Antisense strand to SEQ ID NO: 1779643
gucucacacaacuaguauc

SEQ ID NO: 1779645 - RNA, 19 nt, Artificial Sequence
  Description of Artificial Sequence: Synthetic oligonucleotide
  Sense strand starting at position 3820 of SEQ ID NO: 1562881
auacuaguugugugagaca

SEQ ID NO: 1779646 - RNA, 19 nt, Artificial Sequence
  Description of Artificial Sequence: Synthetic oligonucleotide
  Antisense strand to SEQ ID NO: 1779645
ugucucacacaacuaguau

SEQ ID NO: 1779647 - RNA, 19 nt, Artificial Sequence
  Description of Artificial Sequence: Synthetic oligonucleotide
  Sense strand starting at position 3825 of SEQ ID NO: 1562881
aguugugugagacagaaua

SEQ ID NO: 1779648 - RNA, 19 nt, Artificial Sequence
  Description of Artificial Sequence: Synthetic oligonucleotide
  Antisense strand to SEQ ID NO: 1779647
uauucugucucacacaacu

SEQ ID NO: 1779649 - RNA, 19 nt, Artificial Sequence
  Description of Artificial Sequence: Synthetic oligonucleotide
  Sense strand starting at position 3897 of SEQ ID NO: 1562881
uguaaacgugacgauaaca

SEQ ID NO: 1779650 - RNA, 19 nt, Artificial Sequence
  Description of Artificial Sequence: Synthetic oligonucleotide
  Antisense strand to SEQ ID NO: 1779649
uguuaucgucacguuuaca

SEQ ID NO: 1779651 - RNA, 19 nt, Artificial Sequence
  Description of Artificial Sequence: Synthetic oligonucleotide
  Sense strand starting at position 29 of SEQ ID NO: 1562882
caggaugcucucugggaaa

SEQ ID NO: 1779652 - RNA, 19 nt, Artificial Sequence
  Description of Artificial Sequence: Synthetic oligonucleotide
  Antisense strand to SEQ ID NO: 1779651
uuucccagagagcauccug

SEQ ID NO: 1779653 - RNA, 19 nt, Artificial Sequence
  Description of Artificial Sequence: Synthetic oligonucleotide
  Sense strand starting at position 31 of SEQ ID NO: 1562882
ggaugcucucugggaaaug

SEQ ID NO: 1779654 - RNA, 19 nt, Artificial Sequence
  Description of Artificial Sequence: Synthetic oligonucleotide
  Antisense strand to SEQ ID NO: 1779653
cauuucccagagagcaucc

SEQ ID NO: 1779655 - RNA, 19 nt, Artificial Sequence
  Description of Artificial Sequence: Synthetic oligonucleotide
  Sense strand starting at position 41 of SEQ ID NO: 1562882
ugggaaaugucgcuggagu

SEQ ID NO: 1779656 - RNA, 19 nt, Artificial Sequence
  Description of Artificial Sequence: Synthetic oligonucleotide
  Antisense strand to SEQ ID NO: 1779655
acuccagcgacauuuccca

SEQ ID NO: 1779657 - RNA, 19 nt, Artificial Sequence
  Description of Artificial Sequence: Synthetic oligonucleotide
  Sense strand starting at position 42 of SEQ ID NO: 1562882
gggaaaugucgcuggagug

SEQ ID NO: 1779658 - RNA, 19 nt, Artificial Sequence
  Description of Artificial Sequence: Synthetic oligonucleotide
  Antisense strand to SEQ ID NO: 1779657
cacuccagcgacauuuccc

SEQ ID NO: 1779659 - RNA, 19 nt, Artificial Sequence
  Description of Artificial Sequence: Synthetic oligonucleotide
  Sense strand starting at position 43 of SEQ ID NO: 1562882
ggaaaugucgcuggaguga

SEQ ID NO: 1779660 - RNA, 19 nt, Artificial Sequence
  Description of Artificial Sequence: Synthetic oligonucleotide
  Antisense strand to SEQ ID NO: 1779659
ucacuccagcgacauuucc

SEQ ID NO: 1779661 - RNA, 19 nt, Artificial Sequence
  Description of Artificial Sequence: Synthetic oligonucleotide
  Sense strand starting at position 179 of SEQ ID NO: 1562882
accacugacuucgaauaag

SEQ ID NO: 1779662 - RNA, 19 nt, Artificial Sequence
  Description of Artificial Sequence: Synthetic oligonucleotide
  Antisense strand to SEQ ID NO: 1779661
cuuauucgaagucaguggu

SEQ ID NO: 1779663 - RNA, 19 nt, Artificial Sequence
  Description of Artificial Sequence: Synthetic oligonucleotide
  Sense strand starting at position 253 of SEQ ID NO: 1562882
ucugguaccuugguuagaa

SEQ ID NO: 1779664 - RNA, 19 nt, Artificial Sequence
  Description of Artificial Sequence: Synthetic oligonucleotide
  Antisense strand to SEQ ID NO: 1779663
uucuaaccaagguaccaga

SEQ ID NO: 1779665 - RNA, 19 nt, Artificial Sequence
  Description of Artificial Sequence: Synthetic oligonucleotide
  Sense strand starting at position 254 of SEQ ID NO: 1562882
cugguaccuugguuagaaa

SEQ ID NO: 1779666 - RNA, 19 nt, Artificial Sequence
  Description of Artificial Sequence: Synthetic oligonucleotide
  Antisense strand to SEQ ID NO: 1779665
uuucuaaccaagguaccag

SEQ ID NO: 1779667 - RNA, 19 nt, Artificial Sequence
  Description of Artificial Sequence: Synthetic oligonucleotide
  Sense strand starting at position 421 of SEQ ID NO: 1562882
aaggucuauugucccugaa

SEQ ID NO: 1779668 - RNA, 19 nt, Artificial Sequence
  Description of Artificial Sequence: Synthetic oligonucleotide
  Antisense strand to SEQ ID NO: 1779667
uucagggacaauagaccuu

SEQ ID NO: 1779669 - RNA, 19 nt, Artificial Sequence
  Description of Artificial Sequence: Synthetic oligonucleotide
  Sense strand starting at position 423 of SEQ ID NO: 1562882
ggucuauugucccugaaga

SEQ ID NO: 1779670 - RNA, 19 nt, Artificial Sequence
  Description of Artificial Sequence: Synthetic oligonucleotide
  Antisense strand to SEQ ID NO: 1779669
ucuucagggacaauagacc

SEQ ID NO: 1779671 - RNA, 19 nt, Artificial Sequence
  Description of Artificial Sequence: Synthetic oligonucleotide
  Sense strand starting at position 424 of SEQ ID NO: 1562882
gucuauugucccugaagag

SEQ ID NO: 1779672 - RNA, 19 nt, Artificial Sequence
  Description of Artificial Sequence: Synthetic oligonucleotide
  Antisense strand to SEQ ID NO: 1779671
cucuucagggacaauagac

SEQ ID NO: 1779673 - RNA, 19 nt, Artificial Sequence
  Description of Artificial Sequence: Synthetic oligonucleotide
  Sense strand starting at position 436 of SEQ ID NO: 1562882
ugaagagccucauauaaug

SEQ ID NO: 1779674 - RNA, 19 nt, Artificial Sequence
  Description of Artificial Sequence: Synthetic oligonucleotide
  Antisense strand to SEQ ID NO: 1779673
cauuauaugaggcucuuca

SEQ ID NO: 1779675 - RNA, 19 nt, Artificial Sequence
  Description of Artificial Sequence: Synthetic oligonucleotide
  Sense strand starting at position 446 of SEQ ID NO: 1562882
cauauaaugugagcuaaga

SEQ ID NO: 1779676 - RNA, 19 nt, Artificial Sequence
  Description of Artificial Sequence: Synthetic oligonucleotide
  Antisense strand to SEQ ID NO: 1779675
ucuuagcucacauuauaug

SEQ ID NO: 1779677 - RNA, 19 nt, Artificial Sequence
  Description of Artificial Sequence: Synthetic oligonucleotide
  Sense strand starting at position 459 of SEQ ID NO: 1562882
cuaagagaugcccagcauu

SEQ ID NO: 1779678 - RNA, 19 nt, Artificial Sequence
  Description of Artificial Sequence: Synthetic oligonucleotide
  Antisense strand to SEQ ID NO: 1779677
aaugcugggcaucucuuag

SEQ ID NO: 1779679 - RNA, 19 nt, Artificial Sequence
  Description of Artificial Sequence: Synthetic oligonucleotide
  Sense strand starting at position 505 of SEQ ID NO: 1562882
ucugguuucuccucuagaa

SEQ ID NO: 1779680 - RNA, 19 nt, Artificial Sequence
  Description of Artificial Sequence: Synthetic oligonucleotide
  Antisense strand to SEQ ID NO: 1779679
uucuagaggagaaaccaga

SEQ ID NO: 1779681 - RNA, 19 nt, Artificial Sequence
  Description of Artificial Sequence: Synthetic oligonucleotide
  Sense strand starting at position 507 of SEQ ID NO: 1562882
ugguuucuccucuagaaau

SEQ ID NO: 1779682 - RNA, 19 nt, Artificial Sequence
  Description of Artificial Sequence: Synthetic oligonucleotide
  Antisense strand to SEQ ID NO: 1779681
auuucuagaggagaaacca

SEQ ID NO: 1779683 - RNA, 19 nt, Artificial Sequence
  Description of Artificial Sequence: Synthetic oligonucleotide
  Sense strand starting at position 591 of SEQ ID NO: 1562882
ggagcuccuccaggaaaca

SEQ ID NO: 1779684 - RNA, 19 nt, Artificial Sequence
  Description of Artificial Sequence: Synthetic oligonucleotide
  Antisense strand to SEQ ID NO: 1779683
uguuuccuggaggagcucc

SEQ ID NO: 1779685 - RNA, 19 nt, Artificial Sequence
  Description of Artificial Sequence: Synthetic oligonucleotide
  Sense strand starting at position 644 of SEQ ID NO: 1562882
cgucccucuccuuaaggau

SEQ ID NO: 1779686 - RNA, 19 nt, Artificial Sequence
  Description of Artificial Sequence: Synthetic oligonucleotide
  Antisense strand to SEQ ID NO: 1779685
auccuuaaggagagggacg

SEQ ID NO: 1779687 - RNA, 19 nt, Artificial Sequence
  Description of Artificial Sequence: Synthetic oligonucleotide
  Sense strand starting at position 686 of SEQ ID NO: 1562882
augugcauucuuuauucca

SEQ ID NO: 1779688 - RNA, 19 nt, Artificial Sequence
  Description of Artificial Sequence: Synthetic oligonucleotide
  Antisense strand to SEQ ID NO: 1779687
uggaauaaagaaugcacau

SEQ ID NO: 1779689 - RNA, 19 nt, Artificial Sequence
  Description of Artificial Sequence: Synthetic oligonucleotide
  Sense strand starting at position 688 of SEQ ID NO: 1562882
gugcauucuuuauuccaca

SEQ ID NO: 1779690 - RNA, 19 nt, Artificial Sequence
  Description of Artificial Sequence: Synthetic oligonucleotide
  Antisense strand to SEQ ID NO: 1779689
uguggaauaaagaaugcac

SEQ ID NO: 1779691 - RNA, 19 nt, Artificial Sequence
  Description of Artificial Sequence: Synthetic oligonucleotide
  Sense strand starting at position 728 of SEQ ID NO: 1562882
ccaggaguuugcuugguau

SEQ ID NO: 1779692 - RNA, 19 nt, Artificial Sequence
  Description of Artificial Sequence: Synthetic oligonucleotide
  Antisense strand to SEQ ID NO: 1779691
auaccaagcaaacuccugg

SEQ ID NO: 1779693 - RNA, 19 nt, Artificial Sequence
  Description of Artificial Sequence: Synthetic oligonucleotide
  Sense strand starting at position 730 of SEQ ID NO: 1562882
aggaguuugcuugguauca

SEQ ID NO: 1779694 - RNA, 19 nt, Artificial Sequence
  Description of Artificial Sequence: Synthetic oligonucleotide
  Antisense strand to SEQ ID NO: 1779693
ugauaccaagcaaacuccu

SEQ ID NO: 1779695 - RNA, 19 nt, Artificial Sequence
  Description of Artificial Sequence: Synthetic oligonucleotide
  Sense strand starting at position 731 of SEQ ID NO: 1562882
ggaguuugcuugguaucag

SEQ ID NO: 1779696 - RNA, 19 nt, Artificial Sequence
  Description of Artificial Sequence: Synthetic oligonucleotide
  Antisense strand to SEQ ID NO: 1779695
cugauaccaagcaaacucc

SEQ ID NO: 1779697 - RNA, 19 nt, Artificial Sequence
  Description of Artificial Sequence: Synthetic oligonucleotide
  Sense strand starting at position 760 of SEQ ID NO: 1562882
gaaugugaauaacugucau

SEQ ID NO: 1779698 - RNA, 19 nt, Artificial Sequence
  Description of Artificial Sequence: Synthetic oligonucleotide
  Antisense strand to SEQ ID NO: 1779697
augacaguuauucacauuc

SEQ ID NO: 1779699 - RNA, 19 nt, Artificial Sequence
  Description of Artificial Sequence: Synthetic oligonucleotide
  Sense strand starting at position 961 of SEQ ID NO: 1562882
ggaggauagcacugagcaa

SEQ ID NO: 1779700 - RNA, 19 nt, Artificial Sequence
  Description of Artificial Sequence: Synthetic oligonucleotide
  Antisense strand to SEQ ID NO: 1779699
uugcucagugcuauccucc

SEQ ID NO: 1779701 - RNA, 19 nt, Artificial Sequence
  Description of Artificial Sequence: Synthetic oligonucleotide
  Sense strand starting at position 983 of SEQ ID NO: 1562882
acguuaaggagcugggaua

SEQ ID NO: 1779702 - RNA, 19 nt, Artificial Sequence
  Description of Artificial Sequence: Synthetic oligonucleotide
  Antisense strand to SEQ ID NO: 1779701
uaucccagcuccuuaacgu

SEQ ID NO: 1779703 - RNA, 19 nt, Artificial Sequence
  Description of Artificial Sequence: Synthetic oligonucleotide
  Sense strand starting at position 994 of SEQ ID NO: 1562882
cugggauagucccugggau

SEQ ID NO: 1779704 - RNA, 19 nt, Artificial Sequence
  Description of Artificial Sequence: Synthetic oligonucleotide
  Antisense strand to SEQ ID NO: 1779703
aucccagggacuaucccag

SEQ ID NO: 1779705 - RNA, 19 nt, Artificial Sequence
  Description of Artificial Sequence: Synthetic oligonucleotide
  Sense strand starting at position 995 of SEQ ID NO: 1562882
ugggauagucccugggaug

SEQ ID NO: 1779706 - RNA, 19 nt, Artificial Sequence
  Description of Artificial Sequence: Synthetic oligonucleotide
  Antisense strand to SEQ ID NO: 1779705
caucccagggacuauccca

SEQ ID NO: 1779707 - RNA, 19 nt, Artificial Sequence
  Description of Artificial Sequence: Synthetic oligonucleotide
  Sense strand starting at position 1647 of SEQ ID NO: 1562882
gcagcaugugccugagaau

SEQ ID NO: 1779708 - RNA, 19 nt, Artificial Sequence
  Description of Artificial Sequence: Synthetic oligonucleotide
  Antisense strand to SEQ ID NO: 1779707
auucucaggcacaugcugc

SEQ ID NO: 1779709 - RNA, 19 nt, Artificial Sequence
  Description of Artificial Sequence: Synthetic oligonucleotide
  Sense strand starting at position 1648 of SEQ ID NO: 1562882
cagcaugugccugagaaug

SEQ ID NO: 1779710 - RNA, 19 nt, Artificial Sequence
  Description of Artificial Sequence: Synthetic oligonucleotide
  Antisense strand to SEQ ID NO: 1779709
cauucucaggcacaugcug

SEQ ID NO: 1779711 - RNA, 19 nt, Artificial Sequence
  Description of Artificial Sequence: Synthetic oligonucleotide
  Sense strand starting at position 1656 of SEQ ID NO: 1562882
gccugagaauguuccaaau

SEQ ID NO: 1779712 - RNA, 19 nt, Artificial Sequence
  Description of Artificial Sequence: Synthetic oligonucleotide
  Antisense strand to SEQ ID NO: 1779711
auuuggaacauucucaggc

SEQ ID NO: 1779713 - RNA, 19 nt, Artificial Sequence
  Description of Artificial Sequence: Synthetic oligonucleotide
  Sense strand starting at position 1676 of SEQ ID NO: 1562882
ccauucuucugggcccaau

SEQ ID NO: 1779714 - RNA, 19 nt, Artificial Sequence
  Description of Artificial Sequence: Synthetic oligonucleotide
  Antisense strand to SEQ ID NO: 1779713
auugggcccagaagaaugg

SEQ ID NO: 1779715 - RNA, 19 nt, Artificial Sequence
  Description of Artificial Sequence: Synthetic oligonucleotide
  Sense strand starting at position 1848 of SEQ ID NO: 1562882
caggguccauucuugcaaa

SEQ ID NO: 1779716 - RNA, 19 nt, Artificial Sequence
  Description of Artificial Sequence: Synthetic oligonucleotide
  Antisense strand to SEQ ID NO: 1779715
uuugcaagaauggacccug

SEQ ID NO: 1779717 - RNA, 19 nt, Artificial Sequence
  Description of Artificial Sequence: Synthetic oligonucleotide
  Sense strand starting at position 2147 of SEQ ID NO: 1562882
gguguuuccagcgauagcu

SEQ ID NO: 1779718 - RNA, 19 nt, Artificial Sequence
  Description of Artificial Sequence: Synthetic oligonucleotide
  Antisense strand to SEQ ID NO: 1779717
agcuaucgcuggaaacacc

SEQ ID NO: 1779719 - RNA, 19 nt, Artificial Sequence
  Description of Artificial Sequence: Synthetic oligonucleotide
  Sense strand starting at position 2156 of SEQ ID NO: 1562882
agcgauagcuccuugcuga

SEQ ID NO: 1779720 - RNA, 19 nt, Artificial Sequence
  Description of Artificial Sequence: Synthetic oligonucleotide
  Antisense strand to SEQ ID NO: 1779719
ucagcaaggagcuaucgcu

SEQ ID NO: 1779721 - RNA, 19 nt, Artificial Sequence
  Description of Artificial Sequence: Synthetic oligonucleotide
  Sense strand starting at position 2802 of SEQ ID NO: 1562882
cuggguuccucgucgguaa

SEQ ID NO: 1779722 - RNA, 19 nt, Artificial Sequence
  Description of Artificial Sequence: Synthetic oligonucleotide
  Antisense strand to SEQ ID NO: 1779721
uuaccgacgaggaacccag

SEQ ID NO: 1779723 - RNA, 19 nt, Artificial Sequence
  Description of Artificial Sequence: Synthetic oligonucleotide
  Sense strand starting at position 2803 of SEQ ID NO: 1562882
uggguuccucgucgguaaa

SEQ ID NO: 1779724 - RNA, 19 nt, Artificial Sequence
  Description of Artificial Sequence: Synthetic oligonucleotide
  Antisense strand to SEQ ID NO: 1779723
uuuaccgacgaggaaccca

SEQ ID NO: 1779725 - RNA, 19 nt, Artificial Sequence
  Description of Artificial Sequence: Synthetic oligonucleotide
  Sense strand starting at position 2977 of SEQ ID NO: 1562882
ggagguguugcucgauuaa

SEQ ID NO: 1779726 - RNA, 19 nt, Artificial Sequence
  Description of Artificial Sequence: Synthetic oligonucleotide
  Antisense strand to SEQ ID NO: 1779725
uuaaucgagcaacaccucc

SEQ ID NO: 1779727 - RNA, 19 nt, Artificial Sequence
  Description of Artificial Sequence: Synthetic oligonucleotide
  Sense strand starting at position 3726 of SEQ ID NO: 1562882
aaggaaaugugauuagcuu

SEQ ID NO: 1779728 - RNA, 19 nt, Artificial Sequence
  Description of Artificial Sequence: Synthetic oligonucleotide
  Antisense strand to SEQ ID NO: 1779727
aagcuaaucacauuuccuu

SEQ ID NO: 1779729 - RNA, 19 nt, Artificial Sequence
  Description of Artificial Sequence: Synthetic oligonucleotide
  Sense strand starting at position 3727 of SEQ ID NO: 1562882
aggaaaugugauuagcuuu

SEQ ID NO: 1779730 - RNA, 19 nt, Artificial Sequence
  Description of Artificial Sequence: Synthetic oligonucleotide
  Antisense strand to SEQ ID NO: 1779729
aaagcuaaucacauuuccu

SEQ ID NO: 1779731 - RNA, 19 nt, Artificial Sequence
  Description of Artificial Sequence: Synthetic oligonucleotide
  Sense strand starting at position 82 of SEQ ID NO: 1562883
uccagaggugacuguaaug

SEQ ID NO: 1779732 - RNA, 19 nt, Artificial Sequence
  Description of Artificial Sequence: Synthetic oligonucleotide
  Antisense strand to SEQ ID NO: 1779731
cauuacagucaccucugga

SEQ ID NO: 1779733 - RNA, 19 nt, Artificial Sequence
  Description of Artificial Sequence: Synthetic oligonucleotide
  Sense strand starting at position 92 of SEQ ID NO: 1562883
acuguaaugguggguccau

SEQ ID NO: 1779734 - RNA, 19 nt, Artificial Sequence
  Description of Artificial Sequence: Synthetic oligonucleotide
  Antisense strand to SEQ ID NO: 1779733
auggacccaccauuacagu

SEQ ID NO: 1779735 - RNA, 19 nt, Artificial Sequence
  Description of Artificial Sequence: Synthetic oligonucleotide
  Sense strand starting at position 176 of SEQ ID NO: 1562883
ugagcuugcggagauaaug

SEQ ID NO: 1779736 - RNA, 19 nt, Artificial Sequence
  Description of Artificial Sequence: Synthetic oligonucleotide
  Antisense strand to SEQ ID NO: 1779735
cauuaucuccgcaagcuca

SEQ ID NO: 1779737 - RNA, 19 nt, Artificial Sequence
  Description of Artificial Sequence: Synthetic oligonucleotide
  Sense strand starting at position 272 of SEQ ID NO: 1562883
cuuuguauucuuugcuaga

SEQ ID NO: 1779738 - RNA, 19 nt, Artificial Sequence
  Description of Artificial Sequence: Synthetic oligonucleotide
  Antisense strand to SEQ ID NO: 1779737
ucuagcaaagaauacaaag

SEQ ID NO: 1779739 - RNA, 19 nt, Artificial Sequence
  Description of Artificial Sequence: Synthetic oligonucleotide
  Sense strand starting at position 273 of SEQ ID NO: 1562883
uuuguauucuuugcuagau

SEQ ID NO: 1779740 - RNA, 19 nt, Artificial Sequence
  Description of Artificial Sequence: Synthetic oligonucleotide
  Antisense strand to SEQ ID NO: 1779739
aucuagcaaagaauacaaa

SEQ ID NO: 1779741 - RNA, 19 nt, Artificial Sequence
  Description of Artificial Sequence: Synthetic oligonucleotide
  Sense strand starting at position 274 of SEQ ID NO: 1562883
uuguauucuuugcuagauu

SEQ ID NO: 1779742 - RNA, 19 nt, Artificial Sequence
  Description of Artificial Sequence: Synthetic oligonucleotide
  Antisense strand to SEQ ID NO: 1779741
aaucuagcaaagaauacaa

SEQ ID NO: 1779743 - RNA, 19 nt, Artificial Sequence
  Description of Artificial Sequence: Synthetic oligonucleotide
  Sense strand starting at position 283 of SEQ ID NO: 1562883
uugcuagauuucgcuguaa

SEQ ID NO: 1779744 - RNA, 19 nt, Artificial Sequence
  Description of Artificial Sequence: Synthetic oligonucleotide
  Antisense strand to SEQ ID NO: 1779743
uuacagcgaaaucuagcaa

SEQ ID NO: 1779745 - RNA, 19 nt, Artificial Sequence
  Description of Artificial Sequence: Synthetic oligonucleotide
  Sense strand starting at position 285 of SEQ ID NO: 1562883
gcuagauuucgcuguaaac

SEQ ID NO: 1779746 - RNA, 19 nt, Artificial Sequence
  Description of Artificial Sequence: Synthetic oligonucleotide
  Antisense strand to SEQ ID NO: 1779745
guuuacagcgaaaucuagc

SEQ ID NO: 1779747 - RNA, 19 nt, Artificial Sequence
  Description of Artificial Sequence: Synthetic oligonucleotide
  Sense strand starting at position 1190 of SEQ ID NO: 1562883
cccacaguucgucacaguu

SEQ ID NO: 1779748 - RNA, 19 nt, Artificial Sequence
  Description of Artificial Sequence: Synthetic oligonucleotide
  Antisense strand to SEQ ID NO: 1779747
aacugugacgaacuguggg

SEQ ID NO: 1779749 - RNA, 19 nt, Artificial Sequence
  Description of Artificial Sequence: Synthetic oligonucleotide
  Sense strand starting at position 1277 of SEQ ID NO: 1562883
ugaagcucauucucagaca

SEQ ID NO: 1779750 - RNA, 19 nt, Artificial Sequence
  Description of Artificial Sequence: Synthetic oligonucleotide
  Antisense strand to SEQ ID NO: 1779749
ugucugagaaugagcuuca

SEQ ID NO: 1779751 - RNA, 19 nt, Artificial Sequence
  Description of Artificial Sequence: Synthetic oligonucleotide
  Sense strand starting at position 1695 of SEQ ID NO: 1562883
gcauguugccaaggcaaau

SEQ ID NO: 1779752 - RNA, 19 nt, Artificial Sequence
  Description of Artificial Sequence: Synthetic oligonucleotide
  Antisense strand to SEQ ID NO: 1779751
auuugccuuggcaacaugc

SEQ ID NO: 1779753 - RNA, 19 nt, Artificial Sequence
  Description of Artificial Sequence: Synthetic oligonucleotide
  Sense strand starting at position 1836 of SEQ ID NO: 1562883
cucaauuccugugccuaga

SEQ ID NO: 1779754 - RNA, 19 nt, Artificial Sequence
  Description of Artificial Sequence: Synthetic oligonucleotide
  Antisense strand to SEQ ID NO: 1779753
ucuaggcacaggaauugag

SEQ ID NO: 1779755 - RNA, 19 nt, Artificial Sequence
  Description of Artificial Sequence: Synthetic oligonucleotide
  Sense strand starting at position 2019 of SEQ ID NO: 1562883
accggaauucuuggugcau

SEQ ID NO: 1779756 - RNA, 19 nt, Artificial Sequence
  Description of Artificial Sequence: Synthetic oligonucleotide
  Antisense strand to SEQ ID NO: 1779755
augcaccaagaauuccggu

SEQ ID NO: 1779757 - RNA, 19 nt, Artificial Sequence
  Description of Artificial Sequence: Synthetic oligonucleotide
  Sense strand starting at position 2020 of SEQ ID NO: 1562883
ccggaauucuuggugcauu

SEQ ID NO: 1779758 - RNA, 19 nt, Artificial Sequence
  Description of Artificial Sequence: Synthetic oligonucleotide
  Antisense strand to SEQ ID NO: 1779757
aaugcaccaagaauuccgg

SEQ ID NO: 1779759 - RNA, 19 nt, Artificial Sequence
  Description of Artificial Sequence: Synthetic oligonucleotide
  Sense strand starting at position 2028 of SEQ ID NO: 1562883
cuuggugcauuugaauuaa

SEQ ID NO: 1779760 - RNA, 19 nt, Artificial Sequence
  Description of Artificial Sequence: Synthetic oligonucleotide
  Antisense strand to SEQ ID NO: 1779759
uuaauucaaaugcaccaag

SEQ ID NO: 1779761 - RNA, 19 nt, Artificial Sequence
  Description of Artificial Sequence: Synthetic oligonucleotide
  Sense strand starting at position 2152 of SEQ ID NO: 1562883
uguucuuccuauuccgaga

SEQ ID NO: 1779762 - RNA, 19 nt, Artificial Sequence
  Description of Artificial Sequence: Synthetic oligonucleotide
  Antisense strand to SEQ ID NO: 1779761
ucucggaauaggaagaaca

SEQ ID NO: 1779763 - RNA, 19 nt, Artificial Sequence
  Description of Artificial Sequence: Synthetic oligonucleotide
  Sense strand starting at position 2157 of SEQ ID NO: 1562883
uuccuauuccgagagcgua

SEQ ID NO: 1779764 - RNA, 19 nt, Artificial Sequence
  Description of Artificial Sequence: Synthetic oligonucleotide
  Antisense strand to SEQ ID NO: 1779763
uacgcucucggaauaggaa

SEQ ID NO: 1779765 - RNA, 19 nt, Artificial Sequence
  Description of Artificial Sequence: Synthetic oligonucleotide
  Sense strand starting at position 2195 of SEQ ID NO: 1562883
ugcaauagcccagaacauu

SEQ ID NO: 1779766 - RNA, 19 nt, Artificial Sequence
  Description of Artificial Sequence: Synthetic oligonucleotide
  Antisense strand to SEQ ID NO: 1779765
aauguucugggcuauugca

SEQ ID NO: 1779767 - RNA, 19 nt, Artificial Sequence
  Description of Artificial Sequence: Synthetic oligonucleotide
  Sense strand starting at position 2221 of SEQ ID NO: 1562883
cuugccauucuaugaaaga

SEQ ID NO: 1779768 - RNA, 19 nt, Artificial Sequence
  Description of Artificial Sequence: Synthetic oligonucleotide
  Antisense strand to SEQ ID NO: 1779767
ucuuucauagaauggcaag

SEQ ID NO: 1779769 - RNA, 19 nt, Artificial Sequence
  Description of Artificial Sequence: Synthetic oligonucleotide
  Sense strand starting at position 2480 of SEQ ID NO: 1562883
gcgucacuugcgucuauaa

SEQ ID NO: 1779770 - RNA, 19 nt, Artificial Sequence
  Description of Artificial Sequence: Synthetic oligonucleotide
  Antisense strand to SEQ ID NO: 1779769
uuauagacgcaagugacgc

SEQ ID NO: 1779771 - RNA, 19 nt, Artificial Sequence
  Description of Artificial Sequence: Synthetic oligonucleotide
  Sense strand starting at position 2481 of SEQ ID NO: 1562883
cgucacuugcgucuauaau

SEQ ID NO: 1779772 - RNA, 19 nt, Artificial Sequence
  Description of Artificial Sequence: Synthetic oligonucleotide
  Antisense strand to SEQ ID NO: 1779771
auuauagacgcaagugacg

SEQ ID NO: 1779773 - RNA, 19 nt, Artificial Sequence
  Description of Artificial Sequence: Synthetic oligonucleotide
  Sense strand starting at position 2482 of SEQ ID NO: 1562883
gucacuugcgucuauaauc

SEQ ID NO: 1779774 - RNA, 19 nt, Artificial Sequence
  Description of Artificial Sequence: Synthetic oligonucleotide
  Antisense strand to SEQ ID NO: 1779773
gauuauagacgcaagugac

SEQ ID NO: 1779775 - RNA, 19 nt, Artificial Sequence
  Description of Artificial Sequence: Synthetic oligonucleotide
  Sense strand starting at position 2489 of SEQ ID NO: 1562883
gcgucuauaaucguugcaa

SEQ ID NO: 1779776 - RNA, 19 nt, Artificial Sequence
  Description of Artificial Sequence: Synthetic oligonucleotide
  Antisense strand to SEQ ID NO: 1779775
uugcaacgauuauagacgc

SEQ ID NO: 1779777 - RNA, 19 nt, Artificial Sequence
  Description of Artificial Sequence: Synthetic oligonucleotide
  Sense strand starting at position 2523 of SEQ ID NO: 1562883
cgaaaugauuucuggugag

SEQ ID NO: 1779778 - RNA, 19 nt, Artificial Sequence
  Description of Artificial Sequence: Synthetic oligonucleotide
  Antisense strand to SEQ ID NO: 1779777
cucaccagaaaucauuucg

SEQ ID NO: 1779779 - RNA, 19 nt, Artificial Sequence
  Description of Artificial Sequence: Synthetic oligonucleotide
  Sense strand starting at position 2526 of SEQ ID NO: 1562883
aaugauuucuggugagggu

SEQ ID NO: 1779780 - RNA, 19 nt, Artificial Sequence
  Description of Artificial Sequence: Synthetic oligonucleotide
  Antisense strand to SEQ ID NO: 1779779
acccucaccagaaaucauu

SEQ ID NO: 1779781 - RNA, 19 nt, Artificial Sequence
  Description of Artificial Sequence: Synthetic oligonucleotide
  Sense strand starting at position 2544 of SEQ ID NO: 1562883
ugcugaugacugcauggaa

SEQ ID NO: 1779782 - RNA, 19 nt, Artificial Sequence
  Description of Artificial Sequence: Synthetic oligonucleotide
  Antisense strand to SEQ ID NO: 1779781
uuccaugcagucaucagca

SEQ ID NO: 1779783 - RNA, 19 nt, Artificial Sequence
  Description of Artificial Sequence: Synthetic oligonucleotide
  Sense strand starting at position 2584 of SEQ ID NO: 1562883
ggugacagccacuaaucau

SEQ ID NO: 1779784 - RNA, 19 nt, Artificial Sequence
  Description of Artificial Sequence: Synthetic oligonucleotide
  Antisense strand to SEQ ID NO: 1779783
augauuaguggcugucacc

SEQ ID NO: 1779785 - RNA, 19 nt, Artificial Sequence
  Description of Artificial Sequence: Synthetic oligonucleotide
  Sense strand starting at position 2656 of SEQ ID NO: 1562883
caguguaaggcuugagaga

SEQ ID NO: 1779786 - RNA, 19 nt, Artificial Sequence
  Description of Artificial Sequence: Synthetic oligonucleotide
  Antisense strand to SEQ ID NO: 1779785
ucucucaagccuuacacug

SEQ ID NO: 1779787 - RNA, 19 nt, Artificial Sequence
  Description of Artificial Sequence: Synthetic oligonucleotide
  Sense strand starting at position 2657 of SEQ ID NO: 1562883
aguguaaggcuugagagaa

SEQ ID NO: 1779788 - RNA, 19 nt, Artificial Sequence
  Description of Artificial Sequence: Synthetic oligonucleotide
  Antisense strand to SEQ ID NO: 1779787
uucucucaagccuuacacu

SEQ ID NO: 1779789 - RNA, 19 nt, Artificial Sequence
  Description of Artificial Sequence: Synthetic oligonucleotide
  Sense strand starting at position 2658 of SEQ ID NO: 1562883
guguaaggcuugagagaag

SEQ ID NO: 1779790 - RNA, 19 nt, Artificial Sequence
  Description of Artificial Sequence: Synthetic oligonucleotide
  Antisense strand to SEQ ID NO: 1779789
cuucucucaagccuuacac

SEQ ID NO: 1779791 - RNA, 19 nt, Artificial Sequence
  Description of Artificial Sequence: Synthetic oligonucleotide
  Sense strand starting at position 2679 of SEQ ID NO: 1562883
ugaccuauccgccaggaga

SEQ ID NO: 1779792 - RNA, 19 nt, Artificial Sequence
  Description of Artificial Sequence: Synthetic oligonucleotide
  Antisense strand to SEQ ID NO: 1779791
ucuccuggcggauagguca

SEQ ID NO: 1779793 - RNA, 19 nt, Artificial Sequence
  Description of Artificial Sequence: Synthetic oligonucleotide
  Sense strand starting at position 2770 of SEQ ID NO: 1562883
acaggcaucccugggagaa

SEQ ID NO: 1779794 - RNA, 19 nt, Artificial Sequence
  Description of Artificial Sequence: Synthetic oligonucleotide
  Antisense strand to SEQ ID NO: 1779793
uucucccagggaugccugu

SEQ ID NO: 1779795 - RNA, 19 nt, Artificial Sequence
  Description of Artificial Sequence: Synthetic oligonucleotide
  Sense strand starting at position 2771 of SEQ ID NO: 1562883
caggcaucccugggagaaa

SEQ ID NO: 1779796 - RNA, 19 nt, Artificial Sequence
  Description of Artificial Sequence: Synthetic oligonucleotide
  Antisense strand to SEQ ID NO: 1779795
uuucucccagggaugccug

SEQ ID NO: 1779797 - RNA, 19 nt, Artificial Sequence
  Description of Artificial Sequence: Synthetic oligonucleotide
  Sense strand starting at position 2866 of SEQ ID NO: 1562883
agaggcaaaucugucauau

SEQ ID NO: 1779798 - RNA, 19 nt, Artificial Sequence
  Description of Artificial Sequence: Synthetic oligonucleotide
  Antisense strand to SEQ ID NO: 1779797
auaugacagauuugccucu

SEQ ID NO: 1779799 - RNA, 19 nt, Artificial Sequence
  Description of Artificial Sequence: Synthetic oligonucleotide
  Sense strand starting at position 2914 of SEQ ID NO: 1562883
auacaagagucccagggaa

SEQ ID NO: 1779800 - RNA, 19 nt, Artificial Sequence
  Description of Artificial Sequence: Synthetic oligonucleotide
  Antisense strand to SEQ ID NO: 1779799
uucccugggacucuuguau

SEQ ID NO: 1779801 - RNA, 19 nt, Artificial Sequence
  Description of Artificial Sequence: Synthetic oligonucleotide
  Sense strand starting at position 2963 of SEQ ID NO: 1562883
acacuaaucccuggaggca

SEQ ID NO: 1779802 - RNA, 19 nt, Artificial Sequence
  Description of Artificial Sequence: Synthetic oligonucleotide
  Antisense strand to SEQ ID NO: 1779801
ugccuccagggauuagugu

SEQ ID NO: 1779803 - RNA, 19 nt, Artificial Sequence
  Description of Artificial Sequence: Synthetic oligonucleotide
  Sense strand starting at position 3196 of SEQ ID NO: 1562883
cagaauguaucucccagga

SEQ ID NO: 1779804 - RNA, 19 nt, Artificial Sequence
  Description of Artificial Sequence: Synthetic oligonucleotide
  Antisense strand to SEQ ID NO: 1779803
uccugggagauacauucug

SEQ ID NO: 1779805 - RNA, 19 nt, Artificial Sequence
  Description of Artificial Sequence: Synthetic oligonucleotide
  Sense strand starting at position 3344 of SEQ ID NO: 1562883
augggaucucugcaauucu

SEQ ID NO: 1779806 - RNA, 19 nt, Artificial Sequence
  Description of Artificial Sequence: Synthetic oligonucleotide
  Antisense strand to SEQ ID NO: 1779805
agaauugcagagaucccau

SEQ ID NO: 1779807 - RNA, 19 nt, Artificial Sequence
  Description of Artificial Sequence: Synthetic oligonucleotide
  Sense strand starting at position 3486 of SEQ ID NO: 1562883
agcgucacugcucauggaa

SEQ ID NO: 1779808 - RNA, 19 nt, Artificial Sequence
  Description of Artificial Sequence: Synthetic oligonucleotide
  Antisense strand to SEQ ID NO: 1779807
uuccaugagcagugacgcu

SEQ ID NO: 1779809 - RNA, 19 nt, Artificial Sequence
  Description of Artificial Sequence: Synthetic oligonucleotide
  Sense strand starting at position 3489 of SEQ ID NO: 1562883
gucacugcucauggaauga

SEQ ID NO: 1779810 - RNA, 19 nt, Artificial Sequence
  Description of Artificial Sequence: Synthetic oligonucleotide
  Antisense strand to SEQ ID NO: 1779809
ucauuccaugagcagugac

SEQ ID NO: 1779811 - RNA, 19 nt, Artificial Sequence
  Description of Artificial Sequence: Synthetic oligonucleotide
  Sense strand starting at position 1 of SEQ ID NO: 1562884
cuuggugcauuugaauuaa

SEQ ID NO: 1779812 - RNA, 19 nt, Artificial Sequence
  Description of Artificial Sequence: Synthetic oligonucleotide
  Antisense strand to SEQ ID NO: 1779811
uuaauucaaaugcaccaag

SEQ ID NO: 1779813 - RNA, 19 nt, Artificial Sequence
  Description of Artificial Sequence: Synthetic oligonucleotide
  Sense strand starting at position 125 of SEQ ID NO: 1562884
uguucuuccuauuccgaga

SEQ ID NO: 1779814 - RNA, 19 nt, Artificial Sequence
  Description of Artificial Sequence: Synthetic oligonucleotide
  Antisense strand to SEQ ID NO: 1779813
ucucggaauaggaagaaca

SEQ ID NO: 1779815 - RNA, 19 nt, Artificial Sequence
  Description of Artificial Sequence: Synthetic oligonucleotide
  Sense strand starting at position 130 of SEQ ID NO: 1562884
uuccuauuccgagagcgua

SEQ ID NO: 1779816 - RNA, 19 nt, Artificial Sequence
  Description of Artificial Sequence: Synthetic oligonucleotide
  Antisense strand to SEQ ID NO: 1779815
uacgcucucggaauaggaa

SEQ ID NO: 1779817 - RNA, 19 nt, Artificial Sequence
  Description of Artificial Sequence: Synthetic oligonucleotide
  Sense strand starting at position 168 of SEQ ID NO: 1562884
ugcaauagcccagaacauu

SEQ ID NO: 1779818 - RNA, 19 nt, Artificial Sequence
  Description of Artificial Sequence: Synthetic oligonucleotide
  Antisense strand to SEQ ID NO: 1779817
aauguucugggcuauugca

SEQ ID NO: 1779819 - RNA, 19 nt, Artificial Sequence
  Description of Artificial Sequence: Synthetic oligonucleotide
  Sense strand starting at position 194 of SEQ ID NO: 1562884
cuugccauucuaugaaaga

SEQ ID NO: 1779820 - RNA, 19 nt, Artificial Sequence
  Description of Artificial Sequence: Synthetic oligonucleotide
  Antisense strand to SEQ ID NO: 1779819
ucuuucauagaauggcaag

SEQ ID NO: 1779821 - RNA, 19 nt, Artificial Sequence
  Description of Artificial Sequence: Synthetic oligonucleotide
  Sense strand starting at position 453 of SEQ ID NO: 1562884
gcgucacuugcgucuauaa

SEQ ID NO: 1779822 - RNA, 19 nt, Artificial Sequence
  Description of Artificial Sequence: Synthetic oligonucleotide
  Antisense strand to SEQ ID NO: 1779821
uuauagacgcaagugacgc

SEQ ID NO: 1779823 - RNA, 19 nt, Artificial Sequence
  Description of Artificial Sequence: Synthetic oligonucleotide
  Sense strand starting at position 454 of SEQ ID NO: 1562884
cgucacuugcgucuauaau

SEQ ID NO: 1779824 - RNA, 19 nt, Artificial Sequence
  Description of Artificial Sequence: Synthetic oligonucleotide
  Antisense strand to SEQ ID NO: 1779823
auuauagacgcaagugacg

SEQ ID NO: 1779825 - RNA, 19 nt, Artificial Sequence
  Description of Artificial Sequence: Synthetic oligonucleotide
  Sense strand starting at position 455 of SEQ ID NO: 1562884
gucacuugcgucuauaauc

SEQ ID NO: 1779826 - RNA, 19 nt, Artificial Sequence
  Description of Artificial Sequence: Synthetic oligonucleotide
  Antisense strand to SEQ ID NO: 1779825
gauuauagacgcaagugac

SEQ ID NO: 1779827 - RNA, 19 nt, Artificial Sequence
  Description of Artificial Sequence: Synthetic oligonucleotide
  Sense strand starting at position 462 of SEQ ID NO: 1562884
gcgucuauaaucguugcaa

SEQ ID NO: 1779828 - RNA, 19 nt, Artificial Sequence
  Description of Artificial Sequence: Synthetic oligonucleotide
  Antisense strand to SEQ ID NO: 1779827
uugcaacgauuauagacgc

SEQ ID NO: 1779829 - RNA, 19 nt, Artificial Sequence
  Description of Artificial Sequence: Synthetic oligonucleotide
  Sense strand starting at position 496 of SEQ ID NO: 1562884
cgaaaugauuucuggugag

SEQ ID NO: 1779830 - RNA, 19 nt, Artificial Sequence
  Description of Artificial Sequence: Synthetic oligonucleotide
  Antisense strand to SEQ ID NO: 1779829
cucaccagaaaucauuucg

SEQ ID NO: 1779831 - RNA, 19 nt, Artificial Sequence
  Description of Artificial Sequence: Synthetic oligonucleotide
  Sense strand starting at position 499 of SEQ ID NO: 1562884
aaugauuucuggugagggu

SEQ ID NO: 1779832 - RNA, 19 nt, Artificial Sequence
  Description of Artificial Sequence: Synthetic oligonucleotide
  Antisense strand to SEQ ID NO: 1779831
acccucaccagaaaucauu

SEQ ID NO: 1779833 - RNA, 19 nt, Artificial Sequence
  Description of Artificial Sequence: Synthetic oligonucleotide
  Sense strand starting at position 517 of SEQ ID NO: 1562884
ugcugaugacugcauggaa

SEQ ID NO: 1779834 - RNA, 19 nt, Artificial Sequence
  Description of Artificial Sequence: Synthetic oligonucleotide
  Antisense strand to SEQ ID NO: 1779833
uuccaugcagucaucagca

SEQ ID NO: 1779835 - RNA, 19 nt, Artificial Sequence
  Description of Artificial Sequence: Synthetic oligonucleotide
  Sense strand starting at position 557 of SEQ ID NO: 1562884
ggugacagccacuaaucau

SEQ ID NO: 1779836 - RNA, 19 nt, Artificial Sequence
  Description of Artificial Sequence: Synthetic oligonucleotide
  Antisense strand to SEQ ID NO: 1779835
augauuaguggcugucacc

SEQ ID NO: 1779837 - RNA, 19 nt, Artificial Sequence
  Description of Artificial Sequence: Synthetic oligonucleotide
  Sense strand starting at position 629 of SEQ ID NO: 1562884
caguguaaggcuugagaga

SEQ ID NO: 1779838 - RNA, 19 nt, Artificial Sequence
  Description of Artificial Sequence: Synthetic oligonucleotide
  Antisense strand to SEQ ID NO: 1779837
ucucucaagccuuacacug

SEQ ID NO: 1779839 - RNA, 19 nt, Artificial Sequence
  Description of Artificial Sequence: Synthetic oligonucleotide
  Sense strand starting at position 630 of SEQ ID NO: 1562884
aguguaaggcuugagagaa

SEQ ID NO: 1779840 - RNA, 19 nt, Artificial Sequence
  Description of Artificial Sequence: Synthetic oligonucleotide
  Antisense strand to SEQ ID NO: 1779839
uucucucaagccuuacacu

SEQ ID NO: 1779841 - RNA, 19 nt, Artificial Sequence
  Description of Artificial Sequence: Synthetic oligonucleotide
  Sense strand starting at position 631 of SEQ ID NO: 1562884
guguaaggcuugagagaag

SEQ ID NO: 1779842 - RNA, 19 nt, Artificial Sequence
  Description of Artificial Sequence: Synthetic oligonucleotide
  Antisense strand to SEQ ID NO: 1779841
cuucucucaagccuuacac

SEQ ID NO: 1779843 - RNA, 19 nt, Artificial Sequence
  Description of Artificial Sequence: Synthetic oligonucleotide
  Sense strand starting at position 652 of SEQ ID NO: 1562884
ugaccuauccgccaggaga

SEQ ID NO: 1779844 - RNA, 19 nt, Artificial Sequence
  Description of Artificial Sequence: Synthetic oligonucleotide
  Antisense strand to SEQ ID NO: 1779843
ucuccuggcggauagguca

SEQ ID NO: 1779845 - RNA, 19 nt, Artificial Sequence
  Description of Artificial Sequence: Synthetic oligonucleotide
  Sense strand starting at position 743 of SEQ ID NO: 1562884
acaggcaucccugggagaa

SEQ ID NO: 1779846 - RNA, 19 nt, Artificial Sequence
  Description of Artificial Sequence: Synthetic oligonucleotide
  Antisense strand to SEQ ID NO: 1779845
uucucccagggaugccugu

SEQ ID NO: 1779847 - RNA, 19 nt, Artificial Sequence
  Description of Artificial Sequence: Synthetic oligonucleotide
  Sense strand starting at position 744 of SEQ ID NO: 1562884
caggcaucccugggagaaa

SEQ ID NO: 1779848 - RNA, 19 nt, Artificial Sequence
  Description of Artificial Sequence: Synthetic oligonucleotide
  Antisense strand to SEQ ID NO: 1779847
uuucucccagggaugccug

SEQ ID NO: 1779849 - RNA, 19 nt, Artificial Sequence
  Description of Artificial Sequence: Synthetic oligonucleotide
  Sense strand starting at position 839 of SEQ ID NO: 1562884
agaggcaaaucugucauau

SEQ ID NO: 1779850 - RNA, 19 nt, Artificial Sequence
  Description of Artificial Sequence: Synthetic oligonucleotide
  Antisense strand to SEQ ID NO: 1779849
auaugacagauuugccucu

SEQ ID NO: 1779851 - RNA, 19 nt, Artificial Sequence
  Description of Artificial Sequence: Synthetic oligonucleotide
  Sense strand starting at position 887 of SEQ ID NO: 1562884
auacaagagucccagggaa

SEQ ID NO: 1779852 - RNA, 19 nt, Artificial Sequence
  Description of Artificial Sequence: Synthetic oligonucleotide
  Antisense strand to SEQ ID NO: 1779851
uucccugggacucuuguau

SEQ ID NO: 1779853 - RNA, 19 nt, Artificial Sequence
  Description of Artificial Sequence: Synthetic oligonucleotide
  Sense strand starting at position 936 of SEQ ID NO: 1562884
acacuaaucccuggaggca

SEQ ID NO: 1779854 - RNA, 19 nt, Artificial Sequence
  Description of Artificial Sequence: Synthetic oligonucleotide
  Antisense strand to SEQ ID NO: 1779853
ugccuccagggauuagugu

SEQ ID NO: 1779855 - RNA, 19 nt, Artificial Sequence
  Description of Artificial Sequence: Synthetic oligonucleotide
  Sense strand starting at position 1169 of SEQ ID NO: 1562884
cagaauguaucucccagga

SEQ ID NO: 1779856 - RNA, 19 nt, Artificial Sequence
  Description of Artificial Sequence: Synthetic oligonucleotide
  Antisense strand to SEQ ID NO: 1779855
uccugggagauacauucug

SEQ ID NO: 1779857 - RNA, 19 nt, Artificial Sequence
  Description of Artificial Sequence: Synthetic oligonucleotide
  Sense strand starting at position 1317 of SEQ ID NO: 1562884
augggaucucugcaauucu

SEQ ID NO: 1779858 - RNA, 19 nt, Artificial Sequence
  Description of Artificial Sequence: Synthetic oligonucleotide
  Antisense strand to SEQ ID NO: 1779857
agaauugcagagaucccau

SEQ ID NO: 1779859 - RNA, 19 nt, Artificial Sequence
  Description of Artificial Sequence: Synthetic oligonucleotide
  Sense strand starting at position 1459 of SEQ ID NO: 1562884
agcgucacugcucauggaa

SEQ ID NO: 1779860 - RNA, 19 nt, Artificial Sequence
  Description of Artificial Sequence: Synthetic oligonucleotide
  Antisense strand to SEQ ID NO: 1779859
uuccaugagcagugacgcu

SEQ ID NO: 1779861 - RNA, 19 nt, Artificial Sequence
  Description of Artificial Sequence: Synthetic oligonucleotide
  Sense strand starting at position 1462 of SEQ ID NO: 1562884
gucacugcucauggaauga

SEQ ID NO: 1779862 - RNA, 19 nt, Artificial Sequence
  Description of Artificial Sequence: Synthetic oligonucleotide
  Antisense strand to SEQ ID NO: 1779861
ucauuccaugagcagugac

SEQ ID NO: 1779863 - RNA, 19 nt, Artificial Sequence
  Description of Artificial Sequence: Synthetic oligonucleotide
  Sense strand starting at position 2337 of SEQ ID NO: 1562884
uguuguuaagcuucugcca

SEQ ID NO: 1779864 - RNA, 19 nt, Artificial Sequence
  Description of Artificial Sequence: Synthetic oligonucleotide
  Antisense strand to SEQ ID NO: 1779863
uggcagaagcuuaacaaca

SEQ ID NO: 1779865 - RNA, 19 nt, Artificial Sequence
  Description of Artificial Sequence: Synthetic oligonucleotide
  Sense strand starting at position 2340 of SEQ ID NO: 1562884
uguuaagcuucugccaaga

SEQ ID NO: 1779866 - RNA, 19 nt, Artificial Sequence
  Description of Artificial Sequence: Synthetic oligonucleotide
  Antisense strand to SEQ ID NO: 1779865
ucuuggcagaagcuuaaca

SEQ ID NO: 1779867 - RNA, 19 nt, Artificial Sequence
  Description of Artificial Sequence: Synthetic oligonucleotide
  Sense strand starting at position 2392 of SEQ ID NO: 1562884
ugggaauugucccuaccca

SEQ ID NO: 1779868 - RNA, 19 nt, Artificial Sequence
  Description of Artificial Sequence: Synthetic oligonucleotide
  Antisense strand to SEQ ID NO: 1779867
uggguagggacaauuccca

SEQ ID NO: 1779869 - RNA, 19 nt, Artificial Sequence
  Description of Artificial Sequence: Synthetic oligonucleotide
  Sense strand starting at position 2393 of SEQ ID NO: 1562884
gggaauugucccuacccac

SEQ ID NO: 1779870 - RNA, 19 nt, Artificial Sequence
  Description of Artificial Sequence: Synthetic oligonucleotide
  Antisense strand to SEQ ID NO: 1779869
guggguagggacaauuccc

SEQ ID NO: 1779871 - RNA, 19 nt, Artificial Sequence
  Description of Artificial Sequence: Synthetic oligonucleotide
  Sense strand starting at position 2638 of SEQ ID NO: 1562884
cggcuucaucccgaggacu

SEQ ID NO: 1779872 - RNA, 19 nt, Artificial Sequence
  Description of Artificial Sequence: Synthetic oligonucleotide
  Antisense strand to SEQ ID NO: 1779871
aguccucgggaugaagccg

SEQ ID NO: 1779873 - RNA, 19 nt, Artificial Sequence
  Description of Artificial Sequence: Synthetic oligonucleotide
  Sense strand starting at position 3063 of SEQ ID NO: 1562884
agggcuuugagcugugaug

SEQ ID NO: 1779874 - RNA, 19 nt, Artificial Sequence
  Description of Artificial Sequence: Synthetic oligonucleotide
  Antisense strand to SEQ ID NO: 1779873
caucacagcucaaagcccu

SEQ ID NO: 1779875 - RNA, 19 nt, Artificial Sequence
  Description of Artificial Sequence: Synthetic oligonucleotide
  Sense strand starting at position 3075 of SEQ ID NO: 1562884
ugugaugucacagauguug

SEQ ID NO: 1779876 - RNA, 19 nt, Artificial Sequence
  Description of Artificial Sequence: Synthetic oligonucleotide
  Antisense strand to SEQ ID NO: 1779875
caacaucugugacaucaca

SEQ ID NO: 1779877 - RNA, 19 nt, Artificial Sequence
  Description of Artificial Sequence: Synthetic oligonucleotide
  Sense strand starting at position 3174 of SEQ ID NO: 1562884
acagauuucugagaugcuc

SEQ ID NO: 1779878 - RNA, 19 nt, Artificial Sequence
  Description of Artificial Sequence: Synthetic oligonucleotide
  Antisense strand to SEQ ID NO: 1779877
gagcaucucagaaaucugu

SEQ ID NO: 1779879 - RNA, 19 nt, Artificial Sequence
  Description of Artificial Sequence: Synthetic oligonucleotide
  Sense strand starting at position 3639 of SEQ ID NO: 1562884
ggguguguggguugagaug

SEQ ID NO: 1779880 - RNA, 19 nt, Artificial Sequence
  Description of Artificial Sequence: Synthetic oligonucleotide
  Antisense strand to SEQ ID NO: 1779879
caucucaacccacacaccc

SEQ ID NO: 1779881 - RNA, 19 nt, Artificial Sequence
  Description of Artificial Sequence: Synthetic oligonucleotide
  Sense strand starting at position 3777 of SEQ ID NO: 1562884
agagcuuuguccuccagga

SEQ ID NO: 1779882 - RNA, 19 nt, Artificial Sequence
  Description of Artificial Sequence: Synthetic oligonucleotide
  Antisense strand to SEQ ID NO: 1779881
uccuggaggacaaagcucu

SEQ ID NO: 1779883 - RNA, 19 nt, Artificial Sequence
  Description of Artificial Sequence: Synthetic oligonucleotide
  Sense strand starting at position 3779 of SEQ ID NO: 1562884
agcuuuguccuccaggagu

SEQ ID NO: 1779884 - RNA, 19 nt, Artificial Sequence
  Description of Artificial Sequence: Synthetic oligonucleotide
  Antisense strand to SEQ ID NO: 1779883
acuccuggaggacaaagcu

SEQ ID NO: 1779885 - RNA, 19 nt, Artificial Sequence
  Description of Artificial Sequence: Synthetic oligonucleotide
  Sense strand starting at position 3792 of SEQ ID NO: 1562884
aggaguuuguggucaagga

SEQ ID NO: 1779886 - RNA, 19 nt, Artificial Sequence
  Description of Artificial Sequence: Synthetic oligonucleotide
  Antisense strand to SEQ ID NO: 1779885
uccuugaccacaaacuccu

SEQ ID NO: 1779887 - RNA, 19 nt, Artificial Sequence
  Description of Artificial Sequence: Synthetic oligonucleotide
  Sense strand starting at position 3793 of SEQ ID NO: 1562884
ggaguuuguggucaaggag

SEQ ID NO: 1779888 - RNA, 19 nt, Artificial Sequence
  Description of Artificial Sequence: Synthetic oligonucleotide
  Antisense strand to SEQ ID NO: 1779887
cuccuugaccacaaacucc

SEQ ID NO: 1779889 - RNA, 19 nt, Artificial Sequence
  Description of Artificial Sequence: Synthetic oligonucleotide
  Sense strand starting at position 3796 of SEQ ID NO: 1562884
guuuguggucaaggagaac

SEQ ID NO: 1779890 - RNA, 19 nt, Artificial Sequence
  Description of Artificial Sequence: Synthetic oligonucleotide
  Antisense strand to SEQ ID NO: 1779889
guucuccuugaccacaaac

SEQ ID NO: 1779891 - RNA, 19 nt, Artificial Sequence
  Description of Artificial Sequence: Synthetic oligonucleotide
  Sense strand starting at position 119 of SEQ ID NO: 1562885
gcaguuauauuugagaaca

SEQ ID NO: 1779892 - RNA, 19 nt, Artificial Sequence
  Description of Artificial Sequence: Synthetic oligonucleotide
  Antisense strand to SEQ ID NO: 1779891
uguucucaaauauaacugc

SEQ ID NO: 1779893 - RNA, 19 nt, Artificial Sequence
  Description of Artificial Sequence: Synthetic oligonucleotide
  Sense strand starting at position 121 of SEQ ID NO: 1562885
aguuauauuugagaacaag

SEQ ID NO: 1779894 - RNA, 19 nt, Artificial Sequence
  Description of Artificial Sequence: Synthetic oligonucleotide
  Antisense strand to SEQ ID NO: 1779893
cuuguucucaaauauaacu

SEQ ID NO: 1779895 - RNA, 19 nt, Artificial Sequence
  Description of Artificial Sequence: Synthetic oligonucleotide
  Sense strand starting at position 139 of SEQ ID NO: 1562885
gugagaaaggucggagaau

SEQ ID NO: 1779896 - RNA, 19 nt, Artificial Sequence
  Description of Artificial Sequence: Synthetic oligonucleotide
  Antisense strand to SEQ ID NO: 1779895
auucuccgaccuuucucac

SEQ ID NO: 1779897 - RNA, 19 nt, Artificial Sequence
  Description of Artificial Sequence: Synthetic oligonucleotide
  Sense strand starting at position 140 of SEQ ID NO: 1562885
ugagaaaggucggagaauc

SEQ ID NO: 1779898 - RNA, 19 nt, Artificial Sequence
  Description of Artificial Sequence: Synthetic oligonucleotide
  Antisense strand to SEQ ID NO: 1779897
gauucuccgaccuuucuca

SEQ ID NO: 1779899 - RNA, 19 nt, Artificial Sequence
  Description of Artificial Sequence: Synthetic oligonucleotide
  Sense strand starting at position 619 of SEQ ID NO: 1562885
uccuguuccuucucgaaga

SEQ ID NO: 1779900 - RNA, 19 nt, Artificial Sequence
  Description of Artificial Sequence: Synthetic oligonucleotide
  Antisense strand to SEQ ID NO: 1779899
ucuucgagaaggaacagga

SEQ ID NO: 1779901 - RNA, 19 nt, Artificial Sequence
  Description of Artificial Sequence: Synthetic oligonucleotide
  Sense strand starting at position 621 of SEQ ID NO: 1562885
cuguuccuucucgaagacu

SEQ ID NO: 1779902 - RNA, 19 nt, Artificial Sequence
  Description of Artificial Sequence: Synthetic oligonucleotide
  Antisense strand to SEQ ID NO: 1779901
agucuucgagaaggaacag

SEQ ID NO: 1779903 - RNA, 19 nt, Artificial Sequence
  Description of Artificial Sequence: Synthetic oligonucleotide
  Sense strand starting at position 858 of SEQ ID NO: 1562885
uugguaaacgacugcugaa

SEQ ID NO: 1779904 - RNA, 19 nt, Artificial Sequence
  Description of Artificial Sequence: Synthetic oligonucleotide
  Antisense strand to SEQ ID NO: 1779903
uucagcagucguuuaccaa

SEQ ID NO: 1779905 - RNA, 19 nt, Artificial Sequence
  Description of Artificial Sequence: Synthetic oligonucleotide
  Sense strand starting at position 897 of SEQ ID NO: 1562885
ccagaagguucugcaccau

SEQ ID NO: 1779906 - RNA, 19 nt, Artificial Sequence
  Description of Artificial Sequence: Synthetic oligonucleotide
  Antisense strand to SEQ ID NO: 1779905
auggugcagaaccuucugg

SEQ ID NO: 1779907 - RNA, 19 nt, Artificial Sequence
  Description of Artificial Sequence: Synthetic oligonucleotide
  Sense strand starting at position 973 of SEQ ID NO: 1562885
acaguugaguccuacccaa

SEQ ID NO: 1779908 - RNA, 19 nt, Artificial Sequence
  Description of Artificial Sequence: Synthetic oligonucleotide
  Antisense strand to SEQ ID NO: 1779907
uuggguaggacucaacugu

SEQ ID NO: 1779909 - RNA, 19 nt, Artificial Sequence
  Description of Artificial Sequence: Synthetic oligonucleotide
  Sense strand starting at position 1122 of SEQ ID NO: 1562885
gugggauguuaagcuguaa

SEQ ID NO: 1779910 - RNA, 19 nt, Artificial Sequence
  Description of Artificial Sequence: Synthetic oligonucleotide
  Antisense strand to SEQ ID NO: 1779909
uuacagcuuaacaucccac

SEQ ID NO: 1779911 - RNA, 19 nt, Artificial Sequence
  Description of Artificial Sequence: Synthetic oligonucleotide
  Sense strand starting at position 1181 of SEQ ID NO: 1562885
uccagacauugccaaagau

SEQ ID NO: 1779912 - RNA, 19 nt, Artificial Sequence
  Description of Artificial Sequence: Synthetic oligonucleotide
  Antisense strand to SEQ ID NO: 1779911
aucuuuggcaaugucugga

SEQ ID NO: 1779913 - RNA, 19 nt, Artificial Sequence
  Description of Artificial Sequence: Synthetic oligonucleotide
  Sense strand starting at position 1230 of SEQ ID NO: 1562885
gacaauggcugacuuugaa

SEQ ID NO: 1779914 - RNA, 19 nt, Artificial Sequence
  Description of Artificial Sequence: Synthetic oligonucleotide
  Antisense strand to SEQ ID NO: 1779913
uucaaagucagccauuguc

SEQ ID NO: 1779915 - RNA, 19 nt, Artificial Sequence
  Description of Artificial Sequence: Synthetic oligonucleotide
  Sense strand starting at position 1609 of SEQ ID NO: 1562885
gucacuuacuggucagcau

SEQ ID NO: 1779916 - RNA, 19 nt, Artificial Sequence
  Description of Artificial Sequence: Synthetic oligonucleotide
  Antisense strand to SEQ ID NO: 1779915
augcugaccaguaagugac

SEQ ID NO: 1779917 - RNA, 19 nt, Artificial Sequence
  Description of Artificial Sequence: Synthetic oligonucleotide
  Sense strand starting at position 1703 of SEQ ID NO: 1562885
gcuagcuuugugcacguau

SEQ ID NO: 1779918 - RNA, 19 nt, Artificial Sequence
  Description of Artificial Sequence: Synthetic oligonucleotide
  Antisense strand to SEQ ID NO: 1779917
auacgugcacaaagcuagc

SEQ ID NO: 1779919 - RNA, 19 nt, Artificial Sequence
  Description of Artificial Sequence: Synthetic oligonucleotide
  Sense strand starting at position 2021 of SEQ ID NO: 1562885
ucacgaggucuuuauugga

SEQ ID NO: 1779920 - RNA, 19 nt, Artificial Sequence
  Description of Artificial Sequence: Synthetic oligonucleotide
  Antisense strand to SEQ ID NO: 1779919
uccaauaaagaccucguga

SEQ ID NO: 1779921 - RNA, 19 nt, Artificial Sequence
  Description of Artificial Sequence: Synthetic oligonucleotide
  Sense strand starting at position 2024 of SEQ ID NO: 1562885
cgaggucuuuauuggaaua

SEQ ID NO: 1779922 - RNA, 19 nt, Artificial Sequence
  Description of Artificial Sequence: Synthetic oligonucleotide
  Antisense strand to SEQ ID NO: 1779921
uauuccaauaaagaccucg

SEQ ID NO: 1779923 - RNA, 19 nt, Artificial Sequence
  Description of Artificial Sequence: Synthetic oligonucleotide
  Sense strand starting at position 2026 of SEQ ID NO: 1562885
aggucuuuauuggaauaaa

SEQ ID NO: 1779924 - RNA, 19 nt, Artificial Sequence
  Description of Artificial Sequence: Synthetic oligonucleotide
  Antisense strand to SEQ ID NO: 1779923
uuuauuccaauaaagaccu

SEQ ID NO: 1779925 - RNA, 19 nt, Artificial Sequence
  Description of Artificial Sequence: Synthetic oligonucleotide
  Sense strand starting at position 2313 of SEQ ID NO: 1562885
gcucuuugucaccaagaca

SEQ ID NO: 1779926 - RNA, 19 nt, Artificial Sequence
  Description of Artificial Sequence: Synthetic oligonucleotide
  Antisense strand to SEQ ID NO: 1779925
ugucuuggugacaaagagc

SEQ ID NO: 1779927 - RNA, 19 nt, Artificial Sequence
  Description of Artificial Sequence: Synthetic oligonucleotide
  Sense strand starting at position 2361 of SEQ ID NO: 1562885
gggcucggugcuugcauaa

SEQ ID NO: 1779928 - RNA, 19 nt, Artificial Sequence
  Description of Artificial Sequence: Synthetic oligonucleotide
  Antisense strand to SEQ ID NO: 1779927
uuaugcaagcaccgagccc

SEQ ID NO: 1779929 - RNA, 19 nt, Artificial Sequence
  Description of Artificial Sequence: Synthetic oligonucleotide
  Sense strand starting at position 2428 of SEQ ID NO: 1562885
gcugguguggguugagaga

SEQ ID NO: 1779930 - RNA, 19 nt, Artificial Sequence
  Description of Artificial Sequence: Synthetic oligonucleotide
  Antisense strand to SEQ ID NO: 1779929
ucucucaacccacaccagc

SEQ ID NO: 1779931 - RNA, 19 nt, Artificial Sequence
  Description of Artificial Sequence: Synthetic oligonucleotide
  Sense strand starting at position 2437 of SEQ ID NO: 1562885
gguugagagacacgucaca

SEQ ID NO: 1779932 - RNA, 19 nt, Artificial Sequence
  Description of Artificial Sequence: Synthetic oligonucleotide
  Antisense strand to SEQ ID NO: 1779931
ugugacgugucucucaacc

SEQ ID NO: 1779933 - RNA, 19 nt, Artificial Sequence
  Description of Artificial Sequence: Synthetic oligonucleotide
  Sense strand starting at position 2444 of SEQ ID NO: 1562885
agacacgucacauggagaa

SEQ ID NO: 1779934 - RNA, 19 nt, Artificial Sequence
  Description of Artificial Sequence: Synthetic oligonucleotide
  Antisense strand to SEQ ID NO: 1779933
uucuccaugugacgugucu

SEQ ID NO: 1779935 - RNA, 19 nt, Artificial Sequence
  Description of Artificial Sequence: Synthetic oligonucleotide
  Sense strand starting at position 2647 of SEQ ID NO: 1562885
gaggaagggucccagaauu

SEQ ID NO: 1779936 - RNA, 19 nt, Artificial Sequence
  Description of Artificial Sequence: Synthetic oligonucleotide
  Antisense strand to SEQ ID NO: 1779935
aauucugggacccuuccuc

SEQ ID NO: 1779937 - RNA, 19 nt, Artificial Sequence
  Description of Artificial Sequence: Synthetic oligonucleotide
  Sense strand starting at position 2770 of SEQ ID NO: 1562885
ugaauucugccuuggaacu

SEQ ID NO: 1779938 - RNA, 19 nt, Artificial Sequence
  Description of Artificial Sequence: Synthetic oligonucleotide
  Antisense strand to SEQ ID NO: 1779937
aguuccaaggcagaauuca

SEQ ID NO: 1779939 - RNA, 19 nt, Artificial Sequence
  Description of Artificial Sequence: Synthetic oligonucleotide
  Sense strand starting at position 2829 of SEQ ID NO: 1562885
gacucaaacugauggugaa

SEQ ID NO: 1779940 - RNA, 19 nt, Artificial Sequence
  Description of Artificial Sequence: Synthetic oligonucleotide
  Antisense strand to SEQ ID NO: 1779939
uucaccaucaguuugaguc

SEQ ID NO: 1779941 - RNA, 19 nt, Artificial Sequence
  Description of Artificial Sequence: Synthetic oligonucleotide
  Sense strand starting at position 2830 of SEQ ID NO: 1562885
acucaaacugauggugaau

SEQ ID NO: 1779942 - RNA, 19 nt, Artificial Sequence
  Description of Artificial Sequence: Synthetic oligonucleotide
  Antisense strand to SEQ ID NO: 1779941
auucaccaucaguuugagu

SEQ ID NO: 1779943 - RNA, 19 nt, Artificial Sequence
  Description of Artificial Sequence: Synthetic oligonucleotide
  Sense strand starting at position 3047 of SEQ ID NO: 1562885
ucuguagucugcuaugugu

SEQ ID NO: 1779944 - RNA, 19 nt, Artificial Sequence
  Description of Artificial Sequence: Synthetic oligonucleotide
  Antisense strand to SEQ ID NO: 1779943
acacauagcagacuacaga

SEQ ID NO: 1779945 - RNA, 19 nt, Artificial Sequence
  Description of Artificial Sequence: Synthetic oligonucleotide
  Sense strand starting at position 3144 of SEQ ID NO: 1562885
acauccuuugcuggaaaca

SEQ ID NO: 1779946 - RNA, 19 nt, Artificial Sequence
  Description of Artificial Sequence: Synthetic oligonucleotide
  Antisense strand to SEQ ID NO: 1779945
uguuuccagcaaaggaugu

SEQ ID NO: 1779947 - RNA, 19 nt, Artificial Sequence
  Description of Artificial Sequence: Synthetic oligonucleotide
  Sense strand starting at position 3154 of SEQ ID NO: 1562885
cuggaaacaucgccuuuaa

SEQ ID NO: 1779948 - RNA, 19 nt, Artificial Sequence
  Description of Artificial Sequence: Synthetic oligonucleotide
  Antisense strand to SEQ ID NO: 1779947
uuaaaggcgauguuuccag

SEQ ID NO: 1779949 - RNA, 19 nt, Artificial Sequence
  Description of Artificial Sequence: Synthetic oligonucleotide
  Sense strand starting at position 3171 of SEQ ID NO: 1562885
aagggucccuguugugaaa

SEQ ID NO: 1779950 - RNA, 19 nt, Artificial Sequence
  Description of Artificial Sequence: Synthetic oligonucleotide
  Antisense strand to SEQ ID NO: 1779949
uuucacaacagggacccuu

SEQ ID NO: 1779951 - RNA, 19 nt, Artificial Sequence
  Description of Artificial Sequence: Synthetic oligonucleotide
  Sense strand starting at position 3173 of SEQ ID NO: 1562885
gggucccuguugugaaaca

SEQ ID NO: 1779952 - RNA, 19 nt, Artificial Sequence
  Description of Artificial Sequence: Synthetic oligonucleotide
  Antisense strand to SEQ ID NO: 1779951
uguuucacaacagggaccc

SEQ ID NO: 1779953 - RNA, 19 nt, Artificial Sequence
  Description of Artificial Sequence: Synthetic oligonucleotide
  Sense strand starting at position 3274 of SEQ ID NO: 1562885
ugaggauaggcauggguuu

SEQ ID NO: 1779954 - RNA, 19 nt, Artificial Sequence
  Description of Artificial Sequence: Synthetic oligonucleotide
  Antisense strand to SEQ ID NO: 1779953
aaacccaugccuauccuca

SEQ ID NO: 1779955 - RNA, 19 nt, Artificial Sequence
  Description of Artificial Sequence: Synthetic oligonucleotide
  Sense strand starting at position 3275 of SEQ ID NO: 1562885
gaggauaggcauggguuua

SEQ ID NO: 1779956 - RNA, 19 nt, Artificial Sequence
  Description of Artificial Sequence: Synthetic oligonucleotide
  Antisense strand to SEQ ID NO: 1779955
uaaacccaugccuauccuc

SEQ ID NO: 1779957 - RNA, 19 nt, Artificial Sequence
  Description of Artificial Sequence: Synthetic oligonucleotide
  Sense strand starting at position 3286 of SEQ ID NO: 1562885
uggguuuacugguuuacua

SEQ ID NO: 1779958 - RNA, 19 nt, Artificial Sequence
  Description of Artificial Sequence: Synthetic oligonucleotide
  Antisense strand to SEQ ID NO: 1779957
uaguaaaccaguaaaccca

SEQ ID NO: 1779959 - RNA, 19 nt, Artificial Sequence
  Description of Artificial Sequence: Synthetic oligonucleotide
  Sense strand starting at position 3288 of SEQ ID NO: 1562885
gguuuacugguuuacuaga

SEQ ID NO: 1779960 - RNA, 19 nt, Artificial Sequence
  Description of Artificial Sequence: Synthetic oligonucleotide
  Antisense strand to SEQ ID NO: 1779959
ucuaguaaaccaguaaacc

SEQ ID NO: 1779961 - RNA, 19 nt, Artificial Sequence
  Description of Artificial Sequence: Synthetic oligonucleotide
  Sense strand starting at position 3926 of SEQ ID NO: 1562885
cacugcaucccgcaagaga

SEQ ID NO: 1779962 - RNA, 19 nt, Artificial Sequence
  Description of Artificial Sequence: Synthetic oligonucleotide
  Antisense strand to SEQ ID NO: 1779961
ucucuugcgggaugcagug

SEQ ID NO: 1779963 - RNA, 19 nt, Artificial Sequence
  Description of Artificial Sequence: Synthetic oligonucleotide
  Sense strand starting at position 11 of SEQ ID NO: 1562886
gguggauacguggaauggu

SEQ ID NO: 1779964 - RNA, 19 nt, Artificial Sequence
  Description of Artificial Sequence: Synthetic oligonucleotide
  Antisense strand to SEQ ID NO: 1779963
accauuccacguauccacc

SEQ ID NO: 1779965 - RNA, 19 nt, Artificial Sequence
  Description of Artificial Sequence: Synthetic oligonucleotide
  Sense strand starting at position 285 of SEQ ID NO: 1562886
ucaaucagacauugaggua

SEQ ID NO: 1779966 - RNA, 19 nt, Artificial Sequence
  Description of Artificial Sequence: Synthetic oligonucleotide
  Antisense strand to SEQ ID NO: 1779965
uaccucaaugucugauuga

SEQ ID NO: 1779967 - RNA, 19 nt, Artificial Sequence
  Description of Artificial Sequence: Synthetic oligonucleotide
  Sense strand starting at position 754 of SEQ ID NO: 1562886
gcggcaacuccucaguaga

SEQ ID NO: 1779968 - RNA, 19 nt, Artificial Sequence
  Description of Artificial Sequence: Synthetic oligonucleotide
  Antisense strand to SEQ ID NO: 1779967
ucuacugaggaguugccgc

SEQ ID NO: 1779969 - RNA, 19 nt, Artificial Sequence
  Description of Artificial Sequence: Synthetic oligonucleotide
  Sense strand starting at position 757 of SEQ ID NO: 1562886
gcaacuccucaguagaaca

SEQ ID NO: 1779970 - RNA, 19 nt, Artificial Sequence
  Description of Artificial Sequence: Synthetic oligonucleotide
  Antisense strand to SEQ ID NO: 1779969
uguucuacugaggaguugc

SEQ ID NO: 1779971 - RNA, 19 nt, Artificial Sequence
  Description of Artificial Sequence: Synthetic oligonucleotide
  Sense strand starting at position 1170 of SEQ ID NO: 1562886
gguggaugccgugaaagug

SEQ ID NO: 1779972 - RNA, 19 nt, Artificial Sequence
  Description of Artificial Sequence: Synthetic oligonucleotide
  Antisense strand to SEQ ID NO: 1779971
cacuuucacggcauccacc

SEQ ID NO: 1779973 - RNA, 19 nt, Artificial Sequence
  Description of Artificial Sequence: Synthetic oligonucleotide
  Sense strand starting at position 1992 of SEQ ID NO: 1562886
uggugaguuucccuagcaa

SEQ ID NO: 1779974 - RNA, 19 nt, Artificial Sequence
  Description of Artificial Sequence: Synthetic oligonucleotide
  Antisense strand to SEQ ID NO: 1779973
uugcuagggaaacucacca

SEQ ID NO: 1779975 - RNA, 19 nt, Artificial Sequence
  Description of Artificial Sequence: Synthetic oligonucleotide
  Sense strand starting at position 2051 of SEQ ID NO: 1562886
gcagaaaguggcuaaauca

SEQ ID NO: 1779976 - RNA, 19 nt, Artificial Sequence
  Description of Artificial Sequence: Synthetic oligonucleotide
  Antisense strand to SEQ ID NO: 1779975
ugauuuagccacuuucugc

SEQ ID NO: 1779977 - RNA, 19 nt, Artificial Sequence
  Description of Artificial Sequence: Synthetic oligonucleotide
  Sense strand starting at position 2060 of SEQ ID NO: 1562886
ggcuaaaucaggugggaug

SEQ ID NO: 1779978 - RNA, 19 nt, Artificial Sequence
  Description of Artificial Sequence: Synthetic oligonucleotide
  Antisense strand to SEQ ID NO: 1779977
caucccaccugauuuagcc

SEQ ID NO: 1779979 - RNA, 19 nt, Artificial Sequence
  Description of Artificial Sequence: Synthetic oligonucleotide
  Sense strand starting at position 2080 of SEQ ID NO: 1562886
agguguaaggaguguguga

SEQ ID NO: 1779980 - RNA, 19 nt, Artificial Sequence
  Description of Artificial Sequence: Synthetic oligonucleotide
  Antisense strand to SEQ ID NO: 1779979
ucacacacuccuuacaccu

SEQ ID NO: 1779981 - RNA, 19 nt, Artificial Sequence
  Description of Artificial Sequence: Synthetic oligonucleotide
  Sense strand starting at position 2082 of SEQ ID NO: 1562886
guguaaggagugugugaga

SEQ ID NO: 1779982 - RNA, 19 nt, Artificial Sequence
  Description of Artificial Sequence: Synthetic oligonucleotide
  Antisense strand to SEQ ID NO: 1779981
ucucacacacuccuuacac

SEQ ID NO: 1779983 - RNA, 19 nt, Artificial Sequence
  Description of Artificial Sequence: Synthetic oligonucleotide
  Sense strand starting at position 2093 of SEQ ID NO: 1562886
gugugagagcaggaaagua

SEQ ID NO: 1779984 - RNA, 19 nt, Artificial Sequence
  Description of Artificial Sequence: Synthetic oligonucleotide
  Antisense strand to SEQ ID NO: 1779983
uacuuuccugcucucacac

SEQ ID NO: 1779985 - RNA, 19 nt, Artificial Sequence
  Description of Artificial Sequence: Synthetic oligonucleotide
  Sense strand starting at position 2106 of SEQ ID NO: 1562886
aaaguagggucguuuacaa

SEQ ID NO: 1779986 - RNA, 19 nt, Artificial Sequence
  Description of Artificial Sequence: Synthetic oligonucleotide
  Antisense strand to SEQ ID NO: 1779985
uuguaaacgacccuacuuu

SEQ ID NO: 1779987 - RNA, 19 nt, Artificial Sequence
  Description of Artificial Sequence: Synthetic oligonucleotide
  Sense strand starting at position 2113 of SEQ ID NO: 1562886
ggucguuuacaagaaguua

SEQ ID NO: 1779988 - RNA, 19 nt, Artificial Sequence
  Description of Artificial Sequence: Synthetic oligonucleotide
  Antisense strand to SEQ ID NO: 1779987
uaacuucuuguaaacgacc

SEQ ID NO: 1779989 - RNA, 19 nt, Artificial Sequence
  Description of Artificial Sequence: Synthetic oligonucleotide
  Sense strand starting at position 2175 of SEQ ID NO: 1562886
uauggagucauuggugaug

SEQ ID NO: 1779990 - RNA, 19 nt, Artificial Sequence
  Description of Artificial Sequence: Synthetic oligonucleotide
  Antisense strand to SEQ ID NO: 1779989
caucaccaaugacuccaua

SEQ ID NO: 1779991 - RNA, 19 nt, Artificial Sequence
  Description of Artificial Sequence: Synthetic oligonucleotide
  Sense strand starting at position 2225 of SEQ ID NO: 1562886
acuggaaacuuccuuguga

SEQ ID NO: 1779992 - RNA, 19 nt, Artificial Sequence
  Description of Artificial Sequence: Synthetic oligonucleotide
  Antisense strand to SEQ ID NO: 1779991
ucacaaggaaguuuccagu

SEQ ID NO: 1779993 - RNA, 19 nt, Artificial Sequence
  Description of Artificial Sequence: Synthetic oligonucleotide
  Sense strand starting at position 2226 of SEQ ID NO: 1562886
cuggaaacuuccuugugag

SEQ ID NO: 1779994 - RNA, 19 nt, Artificial Sequence
  Description of Artificial Sequence: Synthetic oligonucleotide
  Antisense strand to SEQ ID NO: 1779993
cucacaaggaaguuuccag

SEQ ID NO: 1779995 - RNA, 19 nt, Artificial Sequence
  Description of Artificial Sequence: Synthetic oligonucleotide
  Sense strand starting at position 2227 of SEQ ID NO: 1562886
uggaaacuuccuugugagg

SEQ ID NO: 1779996 - RNA, 19 nt, Artificial Sequence
  Description of Artificial Sequence: Synthetic oligonucleotide
  Antisense strand to SEQ ID NO: 1779995
ccucacaaggaaguuucca

SEQ ID NO: 1779997 - RNA, 19 nt, Artificial Sequence
  Description of Artificial Sequence: Synthetic oligonucleotide
  Sense strand starting at position 2901 of SEQ ID NO: 1562886
aguggaucugcagagguga

SEQ ID NO: 1779998 - RNA, 19 nt, Artificial Sequence
  Description of Artificial Sequence: Synthetic oligonucleotide
  Antisense strand to SEQ ID NO: 1779997
ucaccucugcagauccacu

SEQ ID NO: 1779999 - RNA, 19 nt, Artificial Sequence
  Description of Artificial Sequence: Synthetic oligonucleotide
  Sense strand starting at position 2998 of SEQ ID NO: 1562886
guauucuuccaagaguccu

SEQ ID NO: 1780000 - RNA, 19 nt, Artificial Sequence
  Description of Artificial Sequence: Synthetic oligonucleotide
  Antisense strand to SEQ ID NO: 1779999
aggacucuuggaagaauac

SEQ ID NO: 1780001 - RNA, 19 nt, Artificial Sequence
  Description of Artificial Sequence: Synthetic oligonucleotide
  Sense strand starting at position 3039 of SEQ ID NO: 1562886
cuuccaacagcuugagaau

SEQ ID NO: 1780002 - RNA, 19 nt, Artificial Sequence
  Description of Artificial Sequence: Synthetic oligonucleotide
  Antisense strand to SEQ ID NO: 1780001
auucucaagcuguuggaag

SEQ ID NO: 1780003 - RNA, 19 nt, Artificial Sequence
  Description of Artificial Sequence: Synthetic oligonucleotide
  Sense strand starting at position 3061 of SEQ ID NO: 1562886
acagcuuccuauguuagau

SEQ ID NO: 1780004 - RNA, 19 nt, Artificial Sequence
  Description of Artificial Sequence: Synthetic oligonucleotide
  Antisense strand to SEQ ID NO: 1780003
aucuaacauaggaagcugu

SEQ ID NO: 1780005 - RNA, 19 nt, Artificial Sequence
  Description of Artificial Sequence: Synthetic oligonucleotide
  Sense strand starting at position 3105 of SEQ ID NO: 1562886
agacucuaaucaucggcaa

SEQ ID NO: 1780006 - RNA, 19 nt, Artificial Sequence
  Description of Artificial Sequence: Synthetic oligonucleotide
  Antisense strand to SEQ ID NO: 1780005
uugccgaugauuagagucu

SEQ ID NO: 1780007 - RNA, 19 nt, Artificial Sequence
  Description of Artificial Sequence: Synthetic oligonucleotide
  Sense strand starting at position 3109 of SEQ ID NO: 1562886
ucuaaucaucggcaacuga

SEQ ID NO: 1780008 - RNA, 19 nt, Artificial Sequence
  Description of Artificial Sequence: Synthetic oligonucleotide
  Antisense strand to SEQ ID NO: 1780007
ucaguugccgaugauuaga

SEQ ID NO: 1780009 - RNA, 19 nt, Artificial Sequence
  Description of Artificial Sequence: Synthetic oligonucleotide
  Sense strand starting at position 3132 of SEQ ID NO: 1562886
caauuaacuucggauuugu

SEQ ID NO: 1780010 - RNA, 19 nt, Artificial Sequence
  Description of Artificial Sequence: Synthetic oligonucleotide
  Antisense strand to SEQ ID NO: 1780009
acaaauccgaaguuaauug

SEQ ID NO: 1780011 - RNA, 19 nt, Artificial Sequence
  Description of Artificial Sequence: Synthetic oligonucleotide
  Sense strand starting at position 3142 of SEQ ID NO: 1562886
cggauuuguuaccagaaac

SEQ ID NO: 1780012 - RNA, 19 nt, Artificial Sequence
  Description of Artificial Sequence: Synthetic oligonucleotide
  Antisense strand to SEQ ID NO: 1780011
guuucugguaacaaauccg

SEQ ID NO: 1780013 - RNA, 19 nt, Artificial Sequence
  Description of Artificial Sequence: Synthetic oligonucleotide
  Sense strand starting at position 3234 of SEQ ID NO: 1562886
ggaccuaguaacuguuaga

SEQ ID NO: 1780014 - RNA, 19 nt, Artificial Sequence
  Description of Artificial Sequence: Synthetic oligonucleotide
  Antisense strand to SEQ ID NO: 1780013
ucuaacaguuacuaggucc

SEQ ID NO: 1780015 - RNA, 19 nt, Artificial Sequence
  Description of Artificial Sequence: Synthetic oligonucleotide
  Sense strand starting at position 3244 of SEQ ID NO: 1562886
acuguuagagaauggaguu

SEQ ID NO: 1780016 - RNA, 19 nt, Artificial Sequence
  Description of Artificial Sequence: Synthetic oligonucleotide
  Antisense strand to SEQ ID NO: 1780015
aacuccauucucuaacagu

SEQ ID NO: 1780017 - RNA, 19 nt, Artificial Sequence
  Description of Artificial Sequence: Synthetic oligonucleotide
  Sense strand starting at position 3257 of SEQ ID NO: 1562886
ggaguucuaauagaucgua

SEQ ID NO: 1780018 - RNA, 19 nt, Artificial Sequence
  Description of Artificial Sequence: Synthetic oligonucleotide
  Antisense strand to SEQ ID NO: 1780017
uacgaucuauuagaacucc

SEQ ID NO: 1780019 - RNA, 19 nt, Artificial Sequence
  Description of Artificial Sequence: Synthetic oligonucleotide
  Sense strand starting at position 3265 of SEQ ID NO: 1562886
aauagaucguagccuguga

SEQ ID NO: 1780020 - RNA, 19 nt, Artificial Sequence
  Description of Artificial Sequence: Synthetic oligonucleotide
  Antisense strand to SEQ ID NO: 1780019
ucacaggcuacgaucuauu

SEQ ID NO: 1780021 - RNA, 19 nt, Artificial Sequence
  Description of Artificial Sequence: Synthetic oligonucleotide
  Sense strand starting at position 3368 of SEQ ID NO: 1562886
acgagcacagguuaucuaa

SEQ ID NO: 1780022 - RNA, 19 nt, Artificial Sequence
  Description of Artificial Sequence: Synthetic oligonucleotide
  Antisense strand to SEQ ID NO: 1780021
uuagauaaccugugcucgu

SEQ ID NO: 1780023 - RNA, 19 nt, Artificial Sequence
  Description of Artificial Sequence: Synthetic oligonucleotide
  Sense strand starting at position 3401 of SEQ ID NO: 1562886
gcuuguuaucaucacacca

SEQ ID NO: 1780024 - RNA, 19 nt, Artificial Sequence
  Description of Artificial Sequence: Synthetic oligonucleotide
  Antisense strand to SEQ ID NO: 1780023
uggugugaugauaacaagc

SEQ ID NO: 1780025 - RNA, 19 nt, Artificial Sequence
  Description of Artificial Sequence: Synthetic oligonucleotide
  Sense strand starting at position 3467 of SEQ ID NO: 1562886
gcucaagguaugugcagaa

SEQ ID NO: 1780026 - RNA, 19 nt, Artificial Sequence
  Description of Artificial Sequence: Synthetic oligonucleotide
  Antisense strand to SEQ ID NO: 1780025
uucugcacauaccuugagc

SEQ ID NO: 1780027 - RNA, 19 nt, Artificial Sequence
  Description of Artificial Sequence: Synthetic oligonucleotide
  Sense strand starting at position 3471 of SEQ ID NO: 1562886
aagguaugugcagaauaca

SEQ ID NO: 1780028 - RNA, 19 nt, Artificial Sequence
  Description of Artificial Sequence: Synthetic oligonucleotide
  Antisense strand to SEQ ID NO: 1780027
uguauucugcacauaccuu

SEQ ID NO: 1780029 - RNA, 19 nt, Artificial Sequence
  Description of Artificial Sequence: Synthetic oligonucleotide
  Sense strand starting at position 3488 of SEQ ID NO: 1562886
cagggaguucucugauagc

SEQ ID NO: 1780030 - RNA, 19 nt, Artificial Sequence
  Description of Artificial Sequence: Synthetic oligonucleotide
  Antisense strand to SEQ ID NO: 1780029
gcuaucagagaacucccug

SEQ ID NO: 1780031 - RNA, 19 nt, Artificial Sequence
  Description of Artificial Sequence: Synthetic oligonucleotide
  Sense strand starting at position 3498 of SEQ ID NO: 1562886
ucugauagcccucaaagcu

SEQ ID NO: 1780032 - RNA, 19 nt, Artificial Sequence
  Description of Artificial Sequence: Synthetic oligonucleotide
  Antisense strand to SEQ ID NO: 1780031
agcuuugagggcuaucaga

SEQ ID NO: 1780033 - RNA, 19 nt, Artificial Sequence
  Description of Artificial Sequence: Synthetic oligonucleotide
  Sense strand starting at position 3548 of SEQ ID NO: 1562886
guaagaaucagaugcgaaa

SEQ ID NO: 1780034 - RNA, 19 nt, Artificial Sequence
  Description of Artificial Sequence: Synthetic oligonucleotide
  Antisense strand to SEQ ID NO: 1780033
uuucgcaucugauucuuac

SEQ ID NO: 1780035 - RNA, 19 nt, Artificial Sequence
  Description of Artificial Sequence: Synthetic oligonucleotide
  Sense strand starting at position 3560 of SEQ ID NO: 1562886
ugcgaaaucuaauccugua

SEQ ID NO: 1780036 - RNA, 19 nt, Artificial Sequence
  Description of Artificial Sequence: Synthetic oligonucleotide
  Antisense strand to SEQ ID NO: 1780035
uacaggauuagauuucgca

SEQ ID NO: 1780037 - RNA, 19 nt, Artificial Sequence
  Description of Artificial Sequence: Synthetic oligonucleotide
  Sense strand starting at position 3565 of SEQ ID NO: 1562886
aaucuaauccuguauggug

SEQ ID NO: 1780038 - RNA, 19 nt, Artificial Sequence
  Description of Artificial Sequence: Synthetic oligonucleotide
  Antisense strand to SEQ ID NO: 1780037
caccauacaggauuagauu

SEQ ID NO: 1780039 - RNA, 19 nt, Artificial Sequence
  Description of Artificial Sequence: Synthetic oligonucleotide
  Sense strand starting at position 3765 of SEQ ID NO: 1562886
agagacacggugugaaaua

SEQ ID NO: 1780040 - RNA, 19 nt, Artificial Sequence
  Description of Artificial Sequence: Synthetic oligonucleotide
  Antisense strand to SEQ ID NO: 1780039
uauuucacaccgugucucu

SEQ ID NO: 1780041 - RNA, 19 nt, Artificial Sequence
  Description of Artificial Sequence: Synthetic oligonucleotide
  Sense strand starting at position 3775 of SEQ ID NO: 1562886
ugugaaauauaccugugca

SEQ ID NO: 1780042 - RNA, 19 nt, Artificial Sequence
  Description of Artificial Sequence: Synthetic oligonucleotide
  Antisense strand to SEQ ID NO: 1780041
ugcacagguauauuucaca

SEQ ID NO: 1780043 - RNA, 19 nt, Artificial Sequence
  Description of Artificial Sequence: Synthetic oligonucleotide
  Sense strand starting at position 86 of SEQ ID NO: 1562887
acagcucuggcagauguaa

SEQ ID NO: 1780044 - RNA, 19 nt, Artificial Sequence
  Description of Artificial Sequence: Synthetic oligonucleotide
  Antisense strand to SEQ ID NO: 1780043
uuacaucugccagagcugu

SEQ ID NO: 1780045 - RNA, 19 nt, Artificial Sequence
  Description of Artificial Sequence: Synthetic oligonucleotide
  Sense strand starting at position 213 of SEQ ID NO: 1562887
gacagcuugugccgguuaa

SEQ ID NO: 1780046 - RNA, 19 nt, Artificial Sequence
  Description of Artificial Sequence: Synthetic oligonucleotide
  Antisense strand to SEQ ID NO: 1780045
uuaaccggcacaagcuguc

SEQ ID NO: 1780047 - RNA, 19 nt, Artificial Sequence
  Description of Artificial Sequence: Synthetic oligonucleotide
  Sense strand starting at position 217 of SEQ ID NO: 1562887
gcuugugccgguuaagaug

SEQ ID NO: 1780048 - RNA, 19 nt, Artificial Sequence
  Description of Artificial Sequence: Synthetic oligonucleotide
  Antisense strand to SEQ ID NO: 1780047
caucuuaaccggcacaagc

SEQ ID NO: 1780049 - RNA, 19 nt, Artificial Sequence
  Description of Artificial Sequence: Synthetic oligonucleotide
  Sense strand starting at position 225 of SEQ ID NO: 1562887
cgguuaagaugauacacau

SEQ ID NO: 1780050 - RNA, 19 nt, Artificial Sequence
  Description of Artificial Sequence: Synthetic oligonucleotide
  Antisense strand to SEQ ID NO: 1780049
auguguaucaucuuaaccg

SEQ ID NO: 1780051 - RNA, 19 nt, Artificial Sequence
  Description of Artificial Sequence: Synthetic oligonucleotide
  Sense strand starting at position 247 of SEQ ID NO: 1562887
ggaagaucuugccgcagau

SEQ ID NO: 1780052 - RNA, 19 nt, Artificial Sequence
  Description of Artificial Sequence: Synthetic oligonucleotide
  Antisense strand to SEQ ID NO: 1780051
aucugcggcaagaucuucc

SEQ ID NO: 1780053 - RNA, 19 nt, Artificial Sequence
  Description of Artificial Sequence: Synthetic oligonucleotide
  Sense strand starting at position 316 of SEQ ID NO: 1562887
ggucuucagagauggguag

SEQ ID NO: 1780054 - RNA, 19 nt, Artificial Sequence
  Description of Artificial Sequence: Synthetic oligonucleotide
  Antisense strand to SEQ ID NO: 1780053
cuacccaucucugaagacc

SEQ ID NO: 1780055 - RNA, 19 nt, Artificial Sequence
  Description of Artificial Sequence: Synthetic oligonucleotide
  Sense strand starting at position 428 of SEQ ID NO: 1562887
ggcaucagugaacaccuua

SEQ ID NO: 1780056 - RNA, 19 nt, Artificial Sequence
  Description of Artificial Sequence: Synthetic oligonucleotide
  Antisense strand to SEQ ID NO: 1780055
uaagguguucacugaugcc

SEQ ID NO: 1780057 - RNA, 19 nt, Artificial Sequence
  Description of Artificial Sequence: Synthetic oligonucleotide
  Sense strand starting at position 847 of SEQ ID NO: 1562887
ccaggaucuguacguugga

SEQ ID NO: 1780058 - RNA, 19 nt, Artificial Sequence
  Description of Artificial Sequence: Synthetic oligonucleotide
  Antisense strand to SEQ ID NO: 1780057
uccaacguacagauccugg

SEQ ID NO: 1780059 - RNA, 19 nt, Artificial Sequence
  Description of Artificial Sequence: Synthetic oligonucleotide
  Sense strand starting at position 860 of SEQ ID NO: 1562887
guuggacuguuugaugacu

SEQ ID NO: 1780060 - RNA, 19 nt, Artificial Sequence
  Description of Artificial Sequence: Synthetic oligonucleotide
  Antisense strand to SEQ ID NO: 1780059
agucaucaaacaguccaac

SEQ ID NO: 1780061 - RNA, 19 nt, Artificial Sequence
  Description of Artificial Sequence: Synthetic oligonucleotide
  Sense strand starting at position 871 of SEQ ID NO: 1562887
ugaugacuuccuggcagau

SEQ ID NO: 1780062 - RNA, 19 nt, Artificial Sequence
  Description of Artificial Sequence: Synthetic oligonucleotide
  Antisense strand to SEQ ID NO: 1780061
aucugccaggaagucauca

SEQ ID NO: 1780063 - RNA, 19 nt, Artificial Sequence
  Description of Artificial Sequence: Synthetic oligonucleotide
  Sense strand starting at position 883 of SEQ ID NO: 1562887
ggcagaucucgauaaccga

SEQ ID NO: 1780064 - RNA, 19 nt, Artificial Sequence
  Description of Artificial Sequence: Synthetic oligonucleotide
  Antisense strand to SEQ ID NO: 1780063
ucgguuaucgagaucugcc

SEQ ID NO: 1780065 - RNA, 19 nt, Artificial Sequence
  Description of Artificial Sequence: Synthetic oligonucleotide
  Sense strand starting at position 925 of SEQ ID NO: 1562887
ccgucaugaguucgggaaa

SEQ ID NO: 1780066 - RNA, 19 nt, Artificial Sequence
  Description of Artificial Sequence: Synthetic oligonucleotide
  Antisense strand to SEQ ID NO: 1780065
uuucccgaacucaugacgg

SEQ ID NO: 1780067 - RNA, 19 nt, Artificial Sequence
  Description of Artificial Sequence: Synthetic oligonucleotide
  Sense strand starting at position 926 of SEQ ID NO: 1562887
cgucaugaguucgggaaag

SEQ ID NO: 1780068 - RNA, 19 nt, Artificial Sequence
  Description of Artificial Sequence: Synthetic oligonucleotide
  Antisense strand to SEQ ID NO: 1780067
cuuucccgaacucaugacg

SEQ ID NO: 1780069 - RNA, 19 nt, Artificial Sequence
  Description of Artificial Sequence: Synthetic oligonucleotide
  Sense strand starting at position 928 of SEQ ID NO: 1562887
ucaugaguucgggaaagcu

SEQ ID NO: 1780070 - RNA, 19 nt, Artificial Sequence
  Description of Artificial Sequence: Synthetic oligonucleotide
  Antisense strand to SEQ ID NO: 1780069
agcuuucccgaacucauga

SEQ ID NO: 1780071 - RNA, 19 nt, Artificial Sequence
  Description of Artificial Sequence: Synthetic oligonucleotide
  Sense strand starting at position 1000 of SEQ ID NO: 1562887
auaccuuggagcugauagu

SEQ ID NO: 1780072 - RNA, 19 nt, Artificial Sequence
  Description of Artificial Sequence: Synthetic oligonucleotide
  Antisense strand to SEQ ID NO: 1780071
acuaucagcuccaagguau

SEQ ID NO: 1780073 - RNA, 19 nt, Artificial Sequence
  Description of Artificial Sequence: Synthetic oligonucleotide
  Sense strand starting at position 1504 of SEQ ID NO: 1562887
ggaucagacugucuagacu

SEQ ID NO: 1780074 - RNA, 19 nt, Artificial Sequence
  Description of Artificial Sequence: Synthetic oligonucleotide
  Antisense strand to SEQ ID NO: 1780073
agucuagacagucugaucc

SEQ ID NO: 1780075 - RNA, 19 nt, Artificial Sequence
  Description of Artificial Sequence: Synthetic oligonucleotide
  Sense strand starting at position 483 of SEQ ID NO: 1562888
gucaaaggucggcguggau

SEQ ID NO: 1780076 - RNA, 19 nt, Artificial Sequence
  Description of Artificial Sequence: Synthetic oligonucleotide
  Antisense strand to SEQ ID NO: 1780075
auccacgccgaccuuugac

SEQ ID NO: 1780077 - RNA, 19 nt, Artificial Sequence
  Description of Artificial Sequence: Synthetic oligonucleotide
  Sense strand starting at position 650 of SEQ ID NO: 1562888
gcuuguucucggguuccca

SEQ ID NO: 1780078 - RNA, 19 nt, Artificial Sequence
  Description of Artificial Sequence: Synthetic oligonucleotide
  Antisense strand to SEQ ID NO: 1780077
ugggaacccgagaacaagc

SEQ ID NO: 1780079 - RNA, 19 nt, Artificial Sequence
  Description of Artificial Sequence: Synthetic oligonucleotide
  Sense strand starting at position 759 of SEQ ID NO: 1562888
gcuguugccuucccuuaga

SEQ ID NO: 1780080 - RNA, 19 nt, Artificial Sequence
  Description of Artificial Sequence: Synthetic oligonucleotide
  Antisense strand to SEQ ID NO: 1780079
ucuaagggaaggcaacagc

SEQ ID NO: 1780081 - RNA, 19 nt, Artificial Sequence
  Description of Artificial Sequence: Synthetic oligonucleotide
  Sense strand starting at position 899 of SEQ ID NO: 1562888
gggcgaagguaaugaauga

SEQ ID NO: 1780082 - RNA, 19 nt, Artificial Sequence
  Description of Artificial Sequence: Synthetic oligonucleotide
  Antisense strand to SEQ ID NO: 1780081
ucauucauuaccuucgccc

SEQ ID NO: 1780083 - RNA, 19 nt, Artificial Sequence
  Description of Artificial Sequence: Synthetic oligonucleotide
  Sense strand starting at position 1887 of SEQ ID NO: 1562888
gugugugcgcgcaaaguau

SEQ ID NO: 1780084 - RNA, 19 nt, Artificial Sequence
  Description of Artificial Sequence: Synthetic oligonucleotide
  Antisense strand to SEQ ID NO: 1780083
auacuuugcgcgcacacac

SEQ ID NO: 1780085 - RNA, 19 nt, Artificial Sequence
  Description of Artificial Sequence: Synthetic oligonucleotide
  Sense strand starting at position 1896 of SEQ ID NO: 1562888
cgcaaaguaucucuaucua

SEQ ID NO: 1780086 - RNA, 19 nt, Artificial Sequence
  Description of Artificial Sequence: Synthetic oligonucleotide
  Antisense strand to SEQ ID NO: 1780085
uagauagagauacuuugcg

SEQ ID NO: 1780087 - RNA, 19 nt, Artificial Sequence
  Description of Artificial Sequence: Synthetic oligonucleotide
  Sense strand starting at position 1904 of SEQ ID NO: 1562888
aucucuaucuagggaauga

SEQ ID NO: 1780088 - RNA, 19 nt, Artificial Sequence
  Description of Artificial Sequence: Synthetic oligonucleotide
  Antisense strand to SEQ ID NO: 1780087
ucauucccuagauagagau

SEQ ID NO: 1780089 - RNA, 19 nt, Artificial Sequence
  Description of Artificial Sequence: Synthetic oligonucleotide
  Sense strand starting at position 2039 of SEQ ID NO: 1562888
agcuguuccggccuuuaua

SEQ ID NO: 1780090 - RNA, 19 nt, Artificial Sequence
  Description of Artificial Sequence: Synthetic oligonucleotide
  Antisense strand to SEQ ID NO: 1780089
uauaaaggccggaacagcu

SEQ ID NO: 1780091 - RNA, 19 nt, Artificial Sequence
  Description of Artificial Sequence: Synthetic oligonucleotide
  Sense strand starting at position 2040 of SEQ ID NO: 1562888
gcuguuccggccuuuauaa

SEQ ID NO: 1780092 - RNA, 19 nt, Artificial Sequence
  Description of Artificial Sequence: Synthetic oligonucleotide
  Antisense strand to SEQ ID NO: 1780091
uuauaaaggccggaacagc

SEQ ID NO: 1780093 - RNA, 19 nt, Artificial Sequence
  Description of Artificial Sequence: Synthetic oligonucleotide
  Sense strand starting at position 2518 of SEQ ID NO: 1562888
gggcuauuguaaggacuca

SEQ ID NO: 1780094 - RNA, 19 nt, Artificial Sequence
  Description of Artificial Sequence: Synthetic oligonucleotide
  Antisense strand to SEQ ID NO: 1780093
ugaguccuuacaauagccc

SEQ ID NO: 1780095 - RNA, 19 nt, Artificial Sequence
  Description of Artificial Sequence: Synthetic oligonucleotide
  Sense strand starting at position 2523 of SEQ ID NO: 1562888
auuguaaggacucaguguu

SEQ ID NO: 1780096 - RNA, 19 nt, Artificial Sequence
  Description of Artificial Sequence: Synthetic oligonucleotide
  Antisense strand to SEQ ID NO: 1780095
aacacugaguccuuacaau

SEQ ID NO: 1780097 - RNA, 19 nt, Artificial Sequence
  Description of Artificial Sequence: Synthetic oligonucleotide
  Sense strand starting at position 2535 of SEQ ID NO: 1562888
caguguuagcaagggaaga

SEQ ID NO: 1780098 - RNA, 19 nt, Artificial Sequence
  Description of Artificial Sequence: Synthetic oligonucleotide
  Antisense strand to SEQ ID NO: 1780097
ucuucccuugcuaacacug

SEQ ID NO: 1780099 - RNA, 19 nt, Artificial Sequence
  Description of Artificial Sequence: Synthetic oligonucleotide
  Sense strand starting at position 2656 of SEQ ID NO: 1562888
gccagcguuggcugaauuu

SEQ ID NO: 1780100 - RNA, 19 nt, Artificial Sequence
  Description of Artificial Sequence: Synthetic oligonucleotide
  Antisense strand to SEQ ID NO: 1780099
aaauucagccaacgcuggc

SEQ ID NO: 1780101 - RNA, 19 nt, Artificial Sequence
  Description of Artificial Sequence: Synthetic oligonucleotide
  Sense strand starting at position 2740 of SEQ ID NO: 1562888
acaugaucuucccgucagu

SEQ ID NO: 1780102 - RNA, 19 nt, Artificial Sequence
  Description of Artificial Sequence: Synthetic oligonucleotide
  Antisense strand to SEQ ID NO: 1780101
acugacgggaagaucaugu

SEQ ID NO: 1780103 - RNA, 19 nt, Artificial Sequence
  Description of Artificial Sequence: Synthetic oligonucleotide
  Sense strand starting at position 3005 of SEQ ID NO: 1562888
gcuugcacugucucuguua

SEQ ID NO: 1780104 - RNA, 19 nt, Artificial Sequence
  Description of Artificial Sequence: Synthetic oligonucleotide
  Antisense strand to SEQ ID NO: 1780103
uaacagagacagugcaagc

SEQ ID NO: 1780105 - RNA, 19 nt, Artificial Sequence
  Description of Artificial Sequence: Synthetic oligonucleotide
  Sense strand starting at position 3006 of SEQ ID NO: 1562888
cuugcacugucucuguuau

SEQ ID NO: 1780106 - RNA, 19 nt, Artificial Sequence
  Description of Artificial Sequence: Synthetic oligonucleotide
  Antisense strand to SEQ ID NO: 1780105
auaacagagacagugcaag

SEQ ID NO: 1780107 - RNA, 19 nt, Artificial Sequence
  Description of Artificial Sequence: Synthetic oligonucleotide
  Sense strand starting at position 3048 of SEQ ID NO: 1562888
gccugcuucucacagagga

SEQ ID NO: 1780108 - RNA, 19 nt, Artificial Sequence
  Description of Artificial Sequence: Synthetic oligonucleotide
  Antisense strand to SEQ ID NO: 1780107
uccucugugagaagcaggc

SEQ ID NO: 1780109 - RNA, 19 nt, Artificial Sequence
  Description of Artificial Sequence: Synthetic oligonucleotide
  Sense strand starting at position 3099 of SEQ ID NO: 1562888
cauagacugucuucuugga

SEQ ID NO: 1780110 - RNA, 19 nt, Artificial Sequence
  Description of Artificial Sequence: Synthetic oligonucleotide
  Antisense strand to SEQ ID NO: 1780109
uccaagaagacagucuaug

SEQ ID NO: 1780111 - RNA, 19 nt, Artificial Sequence
  Description of Artificial Sequence: Synthetic oligonucleotide
  Sense strand starting at position 3145 of SEQ ID NO: 1562888
ggacaucucagguggucuu

SEQ ID NO: 1780112 - RNA, 19 nt, Artificial Sequence
  Description of Artificial Sequence: Synthetic oligonucleotide
  Antisense strand to SEQ ID NO: 1780111
aagaccaccugagaugucc

SEQ ID NO: 1780113 - RNA, 19 nt, Artificial Sequence
  Description of Artificial Sequence: Synthetic oligonucleotide
  Sense strand starting at position 3281 of SEQ ID NO: 1562888
uggacaagugucugcagga

SEQ ID NO: 1780114 - RNA, 19 nt, Artificial Sequence
  Description of Artificial Sequence: Synthetic oligonucleotide
  Antisense strand to SEQ ID NO: 1780113
uccugcagacacuugucca

SEQ ID NO: 1780115 - RNA, 19 nt, Artificial Sequence
  Description of Artificial Sequence: Synthetic oligonucleotide
  Sense strand starting at position 3282 of SEQ ID NO: 1562888
ggacaagugucugcaggaa

SEQ ID NO: 1780116 - RNA, 19 nt, Artificial Sequence
  Description of Artificial Sequence: Synthetic oligonucleotide
  Antisense strand to SEQ ID NO: 1780115
uuccugcagacacuugucc

SEQ ID NO: 1780117 - RNA, 19 nt, Artificial Sequence
  Description of Artificial Sequence: Synthetic oligonucleotide
  Sense strand starting at position 3323 of SEQ ID NO: 1562888
ucgguuuccuccuuuauaa

SEQ ID NO: 1780118 - RNA, 19 nt, Artificial Sequence
  Description of Artificial Sequence: Synthetic oligonucleotide
  Antisense strand to SEQ ID NO: 1780117
uuauaaaggaggaaaccga

SEQ ID NO: 1780119 - RNA, 19 nt, Artificial Sequence
  Description of Artificial Sequence: Synthetic oligonucleotide
  Sense strand starting at position 3576 of SEQ ID NO: 1562888
uggugauggaaauguuugu

SEQ ID NO: 1780120 - RNA, 19 nt, Artificial Sequence
  Description of Artificial Sequence: Synthetic oligonucleotide
  Antisense strand to SEQ ID NO: 1780119
acaaacauuuccaucacca

SEQ ID NO: 1780121 - RNA, 19 nt, Artificial Sequence
  Description of Artificial Sequence: Synthetic oligonucleotide
  Sense strand starting at position 3612 of SEQ ID NO: 1562888
augggcuuauggguguaua

SEQ ID NO: 1780122 - RNA, 19 nt, Artificial Sequence
  Description of Artificial Sequence: Synthetic oligonucleotide
  Antisense strand to SEQ ID NO: 1780121
uauacacccauaagcccau

SEQ ID NO: 1780123 - RNA, 19 nt, Artificial Sequence
  Description of Artificial Sequence: Synthetic oligonucleotide
  Sense strand starting at position 3615 of SEQ ID NO: 1562888
ggcuuauggguguauacgu

SEQ ID NO: 1780124 - RNA, 19 nt, Artificial Sequence
  Description of Artificial Sequence: Synthetic oligonucleotide
  Antisense strand to SEQ ID NO: 1780123
acguauacacccauaagcc

SEQ ID NO: 1780125 - RNA, 19 nt, Artificial Sequence
  Description of Artificial Sequence: Synthetic oligonucleotide
  Sense strand starting at position 3623 of SEQ ID NO: 1562888
gguguauacguacaucaca

SEQ ID NO: 1780126 - RNA, 19 nt, Artificial Sequence
  Description of Artificial Sequence: Synthetic oligonucleotide
  Antisense strand to SEQ ID NO: 1780125
ugugauguacguauacacc

SEQ ID NO: 1780127 - RNA, 19 nt, Artificial Sequence
  Description of Artificial Sequence: Synthetic oligonucleotide
  Sense strand starting at position 3670 of SEQ ID NO: 1562888
agugcaguuguagagaauu

SEQ ID NO: 1780128 - RNA, 19 nt, Artificial Sequence
  Description of Artificial Sequence: Synthetic oligonucleotide
  Antisense strand to SEQ ID NO: 1780127
aauucucuacaacugcacu

SEQ ID NO: 1780129 - RNA, 19 nt, Artificial Sequence
  Description of Artificial Sequence: Synthetic oligonucleotide
  Sense strand starting at position 3915 of SEQ ID NO: 1562888
acagauaaauuaggagaca

SEQ ID NO: 1780130 - RNA, 19 nt, Artificial Sequence
  Description of Artificial Sequence: Synthetic oligonucleotide
  Antisense strand to SEQ ID NO: 1780129
ugucuccuaauuuaucugu

SEQ ID NO: 1780131 - RNA, 19 nt, Artificial Sequence
  Description of Artificial Sequence: Synthetic oligonucleotide
  Sense strand starting at position 102 of SEQ ID NO: 1562889
ccuggauucuuggaaucuu

SEQ ID NO: 1780132 - RNA, 19 nt, Artificial Sequence
  Description of Artificial Sequence: Synthetic oligonucleotide
  Antisense strand to SEQ ID NO: 1780131
aagauuccaagaauccagg

SEQ ID NO: 1780133 - RNA, 19 nt, Artificial Sequence
  Description of Artificial Sequence: Synthetic oligonucleotide
  Sense strand starting at position 110 of SEQ ID NO: 1562889
cuuggaaucuugucacaau

SEQ ID NO: 1780134 - RNA, 19 nt, Artificial Sequence
  Description of Artificial Sequence: Synthetic oligonucleotide
  Antisense strand to SEQ ID NO: 1780133
auugugacaagauuccaag

SEQ ID NO: 1780135 - RNA, 19 nt, Artificial Sequence
  Description of Artificial Sequence: Synthetic oligonucleotide
  Sense strand starting at position 111 of SEQ ID NO: 1562889
uuggaaucuugucacaauc

SEQ ID NO: 1780136 - RNA, 19 nt, Artificial Sequence
  Description of Artificial Sequence: Synthetic oligonucleotide
  Antisense strand to SEQ ID NO: 1780135
gauugugacaagauuccaa

SEQ ID NO: 1780137 - RNA, 19 nt, Artificial Sequence
  Description of Artificial Sequence: Synthetic oligonucleotide
  Sense strand starting at position 113 of SEQ ID NO: 1562889
ggaaucuugucacaaucua

SEQ ID NO: 1780138 - RNA, 19 nt, Artificial Sequence
  Description of Artificial Sequence: Synthetic oligonucleotide
  Antisense strand to SEQ ID NO: 1780137
uagauugugacaagauucc

SEQ ID NO: 1780139 - RNA, 19 nt, Artificial Sequence
  Description of Artificial Sequence: Synthetic oligonucleotide
  Sense strand starting at position 181 of SEQ ID NO: 1562889
ggguuacugggaggcauaa

SEQ ID NO: 1780140 - RNA, 19 nt, Artificial Sequence
  Description of Artificial Sequence: Synthetic oligonucleotide
  Antisense strand to SEQ ID NO: 1780139
uuaugccucccaguaaccc

SEQ ID NO: 1780141 - RNA, 19 nt, Artificial Sequence
  Description of Artificial Sequence: Synthetic oligonucleotide
  Sense strand starting at position 183 of SEQ ID NO: 1562889
guuacugggaggcauaauu

SEQ ID NO: 1780142 - RNA, 19 nt, Artificial Sequence
  Description of Artificial Sequence: Synthetic oligonucleotide
  Antisense strand to SEQ ID NO: 1780141
aauuaugccucccaguaac

SEQ ID NO: 1780143 - RNA, 19 nt, Artificial Sequence
  Description of Artificial Sequence: Synthetic oligonucleotide
  Sense strand starting at position 193 of SEQ ID NO: 1562889
ggcauaauugcacagagca

SEQ ID NO: 1780144 - RNA, 19 nt, Artificial Sequence
  Description of Artificial Sequence: Synthetic oligonucleotide
  Antisense strand to SEQ ID NO: 1780143
ugcucugugcaauuaugcc

SEQ ID NO: 1780145 - RNA, 19 nt, Artificial Sequence
  Description of Artificial Sequence: Synthetic oligonucleotide
  Sense strand starting at position 220 of SEQ ID NO: 1562889
agcagauaaugggagcuua

SEQ ID NO: 1780146 - RNA, 19 nt, Artificial Sequence
  Description of Artificial Sequence: Synthetic oligonucleotide
  Antisense strand to SEQ ID NO: 1780145
uaagcucccauuaucugcu

SEQ ID NO: 1780147 - RNA, 19 nt, Artificial Sequence
  Description of Artificial Sequence: Synthetic oligonucleotide
  Sense strand starting at position 231 of SEQ ID NO: 1562889
ggagcuuaaugaguuguca

SEQ ID NO: 1780148 - RNA, 19 nt, Artificial Sequence
  Description of Artificial Sequence: Synthetic oligonucleotide
  Antisense strand to SEQ ID NO: 1780147
ugacaacucauuaagcucc

SEQ ID NO: 1780149 - RNA, 19 nt, Artificial Sequence
  Description of Artificial Sequence: Synthetic oligonucleotide
  Sense strand starting at position 235 of SEQ ID NO: 1562889
cuuaaugaguugucacugu

SEQ ID NO: 1780150 - RNA, 19 nt, Artificial Sequence
  Description of Artificial Sequence: Synthetic oligonucleotide
  Antisense strand to SEQ ID NO: 1780149
acagugacaacucauuaag

SEQ ID NO: 1780151 - RNA, 19 nt, Artificial Sequence
  Description of Artificial Sequence: Synthetic oligonucleotide
  Sense strand starting at position 239 of SEQ ID NO: 1562889
augaguugucacugucauc

SEQ ID NO: 1780152 - RNA, 19 nt, Artificial Sequence
  Description of Artificial Sequence: Synthetic oligonucleotide
  Antisense strand to SEQ ID NO: 1780151
gaugacagugacaacucau

SEQ ID NO: 1780153 - RNA, 19 nt, Artificial Sequence
  Description of Artificial Sequence: Synthetic oligonucleotide
  Sense strand starting at position 258 of SEQ ID NO: 1562889
aucauuaauucuuuccgga

SEQ ID NO: 1780154 - RNA, 19 nt, Artificial Sequence
  Description of Artificial Sequence: Synthetic oligonucleotide
  Antisense strand to SEQ ID NO: 1780153
uccggaaagaauuaaugau

SEQ ID NO: 1780155 - RNA, 19 nt, Artificial Sequence
  Description of Artificial Sequence: Synthetic oligonucleotide
  Sense strand starting at position 366 of SEQ ID NO: 1562889
gcugccugcccaugaaaga

SEQ ID NO: 1780156 - RNA, 19 nt, Artificial Sequence
  Description of Artificial Sequence: Synthetic oligonucleotide
  Antisense strand to SEQ ID NO: 1780155
ucuuucaugggcaggcagc

SEQ ID NO: 1780157 - RNA, 19 nt, Artificial Sequence
  Description of Artificial Sequence: Synthetic oligonucleotide
  Sense strand starting at position 383 of SEQ ID NO: 1562889
gagugcgugacuuugcauu

SEQ ID NO: 1780158 - RNA, 19 nt, Artificial Sequence
  Description of Artificial Sequence: Synthetic oligonucleotide
  Antisense strand to SEQ ID NO: 1780157
aaugcaaagucacgcacuc

SEQ ID NO: 1780159 - RNA, 19 nt, Artificial Sequence
  Description of Artificial Sequence: Synthetic oligonucleotide
  Sense strand starting at position 385 of SEQ ID NO: 1562889
gugcgugacuuugcauuau

SEQ ID NO: 1780160 - RNA, 19 nt, Artificial Sequence
  Description of Artificial Sequence: Synthetic oligonucleotide
  Antisense strand to SEQ ID NO: 1780159
auaaugcaaagucacgcac

SEQ ID NO: 1780161 - RNA, 19 nt, Artificial Sequence
  Description of Artificial Sequence: Synthetic oligonucleotide
  Sense strand starting at position 587 of SEQ ID NO: 1562889
ggcucuucuugguauggga

SEQ ID NO: 1780162 - RNA, 19 nt, Artificial Sequence
  Description of Artificial Sequence: Synthetic oligonucleotide
  Antisense strand to SEQ ID NO: 1780161
ucccauaccaagaagagcc

SEQ ID NO: 1780163 - RNA, 19 nt, Artificial Sequence
  Description of Artificial Sequence: Synthetic oligonucleotide
  Sense strand starting at position 703 of SEQ ID NO: 1562889
ugaagaagcugucccaaga

SEQ ID NO: 1780164 - RNA, 19 nt, Artificial Sequence
  Description of Artificial Sequence: Synthetic oligonucleotide
  Antisense strand to SEQ ID NO: 1780163
ucuugggacagcuucuuca

SEQ ID NO: 1780165 - RNA, 19 nt, Artificial Sequence
  Description of Artificial Sequence: Synthetic oligonucleotide
  Sense strand starting at position 1078 of SEQ ID NO: 1562889
cugagagucgcaggccuua

SEQ ID NO: 1780166 - RNA, 19 nt, Artificial Sequence
  Description of Artificial Sequence: Synthetic oligonucleotide
  Antisense strand to SEQ ID NO: 1780165
uaaggccugcgacucucag

SEQ ID NO: 1780167 - RNA, 19 nt, Artificial Sequence
  Description of Artificial Sequence: Synthetic oligonucleotide
  Sense strand starting at position 1089 of SEQ ID NO: 1562889
aggccuuauuuagaucgaa

SEQ ID NO: 1780168 - RNA, 19 nt, Artificial Sequence
  Description of Artificial Sequence: Synthetic oligonucleotide
  Antisense strand to SEQ ID NO: 1780167
uucgaucuaaauaaggccu

SEQ ID NO: 1780169 - RNA, 19 nt, Artificial Sequence
  Description of Artificial Sequence: Synthetic oligonucleotide
  Sense strand starting at position 1393 of SEQ ID NO: 1562889
uucugccauucuuugggaa

SEQ ID NO: 1780170 - RNA, 19 nt, Artificial Sequence
  Description of Artificial Sequence: Synthetic oligonucleotide
  Antisense strand to SEQ ID NO: 1780169
uucccaaagaauggcagaa

SEQ ID NO: 1780171 - RNA, 19 nt, Artificial Sequence
  Description of Artificial Sequence: Synthetic oligonucleotide
  Sense strand starting at position 1397 of SEQ ID NO: 1562889
gccauucuuugggaacucu

SEQ ID NO: 1780172 - RNA, 19 nt, Artificial Sequence
  Description of Artificial Sequence: Synthetic oligonucleotide
  Antisense strand to SEQ ID NO: 1780171
agaguucccaaagaauggc

SEQ ID NO: 1780173 - RNA, 19 nt, Artificial Sequence
  Description of Artificial Sequence: Synthetic oligonucleotide
  Sense strand starting at position 1405 of SEQ ID NO: 1562889
uugggaacucugcacuaau

SEQ ID NO: 1780174 - RNA, 19 nt, Artificial Sequence
  Description of Artificial Sequence: Synthetic oligonucleotide
  Antisense strand to SEQ ID NO: 1780173
auuagugcagaguucccaa

SEQ ID NO: 1780175 - RNA, 19 nt, Artificial Sequence
  Description of Artificial Sequence: Synthetic oligonucleotide
  Sense strand starting at position 1408 of SEQ ID NO: 1562889
ggaacucugcacuaaucca

SEQ ID NO: 1780176 - RNA, 19 nt, Artificial Sequence
  Description of Artificial Sequence: Synthetic oligonucleotide
  Antisense strand to SEQ ID NO: 1780175
uggauuagugcagaguucc

SEQ ID NO: 1780177 - RNA, 19 nt, Artificial Sequence
  Description of Artificial Sequence: Synthetic oligonucleotide
  Sense strand starting at position 1521 of SEQ ID NO: 1562889
ucuccucuguccugucuaa

SEQ ID NO: 1780178 - RNA, 19 nt, Artificial Sequence
  Description of Artificial Sequence: Synthetic oligonucleotide
  Antisense strand to SEQ ID NO: 1780177
uuagacaggacagaggaga

SEQ ID NO: 1780179 - RNA, 19 nt, Artificial Sequence
  Description of Artificial Sequence: Synthetic oligonucleotide
  Sense strand starting at position 1534 of SEQ ID NO: 1562889
gucuaauccugguagccca

SEQ ID NO: 1780180 - RNA, 19 nt, Artificial Sequence
  Description of Artificial Sequence: Synthetic oligonucleotide
  Antisense strand to SEQ ID NO: 1780179
ugggcuaccaggauuagac

SEQ ID NO: 1780181 - RNA, 19 nt, Artificial Sequence
  Description of Artificial Sequence: Synthetic oligonucleotide
  Sense strand starting at position 1735 of SEQ ID NO: 1562889
uguucuuugcacuaauagu

SEQ ID NO: 1780182 - RNA, 19 nt, Artificial Sequence
  Description of Artificial Sequence: Synthetic oligonucleotide
  Antisense strand to SEQ ID NO: 1780181
acuauuagugcaaagaaca

SEQ ID NO: 1780183 - RNA, 19 nt, Artificial Sequence
  Description of Artificial Sequence: Synthetic oligonucleotide
  Sense strand starting at position 1745 of SEQ ID NO: 1562889
acuaauaguuacugauugu

SEQ ID NO: 1780184 - RNA, 19 nt, Artificial Sequence
  Description of Artificial Sequence: Synthetic oligonucleotide
  Antisense strand to SEQ ID NO: 1780183
acaaucaguaacuauuagu

SEQ ID NO: 1780185 - RNA, 19 nt, Artificial Sequence
  Description of Artificial Sequence: Synthetic oligonucleotide
  Sense strand starting at position 1876 of SEQ ID NO: 1562889
uaggaagaguugucacaga

SEQ ID NO: 1780186 - RNA, 19 nt, Artificial Sequence
  Description of Artificial Sequence: Synthetic oligonucleotide
  Antisense strand to SEQ ID NO: 1780185
ucugugacaacucuuccua

SEQ ID NO: 1780187 - RNA, 19 nt, Artificial Sequence
  Description of Artificial Sequence: Synthetic oligonucleotide
  Sense strand starting at position 1892 of SEQ ID NO: 1562889
agaagaggcuccucaaugu

SEQ ID NO: 1780188 - RNA, 19 nt, Artificial Sequence
  Description of Artificial Sequence: Synthetic oligonucleotide
  Antisense strand to SEQ ID NO: 1780187
acauugaggagccucuucu

SEQ ID NO: 1780189 - RNA, 19 nt, Artificial Sequence
  Description of Artificial Sequence: Synthetic oligonucleotide
  Sense strand starting at position 1942 of SEQ ID NO: 1562889
uuacgaggcccaugauaaa

SEQ ID NO: 1780190 - RNA, 19 nt, Artificial Sequence
  Description of Artificial Sequence: Synthetic oligonucleotide
  Antisense strand to SEQ ID NO: 1780189
uuuaucaugggccucguaa

SEQ ID NO: 1780191 - RNA, 19 nt, Artificial Sequence
  Description of Artificial Sequence: Synthetic oligonucleotide
  Sense strand starting at position 2199 of SEQ ID NO: 1562889
ucacucuuucccggaagaa

SEQ ID NO: 1780192 - RNA, 19 nt, Artificial Sequence
  Description of Artificial Sequence: Synthetic oligonucleotide
  Antisense strand to SEQ ID NO: 1780191
uucuuccgggaaagaguga

SEQ ID NO: 1780193 - RNA, 19 nt, Artificial Sequence
  Description of Artificial Sequence: Synthetic oligonucleotide
  Sense strand starting at position 2341 of SEQ ID NO: 1562889
ccugccgucugcugaaaga

SEQ ID NO: 1780194 - RNA, 19 nt, Artificial Sequence
  Description of Artificial Sequence: Synthetic oligonucleotide
  Antisense strand to SEQ ID NO: 1780193
ucuuucagcagacggcagg

SEQ ID NO: 1780195 - RNA, 19 nt, Artificial Sequence
  Description of Artificial Sequence: Synthetic oligonucleotide
  Sense strand starting at position 2354 of SEQ ID NO: 1562889
gaaagauuaguccgagcac

SEQ ID NO: 1780196 - RNA, 19 nt, Artificial Sequence
  Description of Artificial Sequence: Synthetic oligonucleotide
  Antisense strand to SEQ ID NO: 1780195
gugcucggacuaaucuuuc

SEQ ID NO: 1780197 - RNA, 19 nt, Artificial Sequence
  Description of Artificial Sequence: Synthetic oligonucleotide
  Sense strand starting at position 2580 of SEQ ID NO: 1562889
guggccauguguucaagaa

SEQ ID NO: 1780198 - RNA, 19 nt, Artificial Sequence
  Description of Artificial Sequence: Synthetic oligonucleotide
  Antisense strand to SEQ ID NO: 1780197
uucuugaacacauggccac

SEQ ID NO: 1780199 - RNA, 19 nt, Artificial Sequence
  Description of Artificial Sequence: Synthetic oligonucleotide
  Sense strand starting at position 2592 of SEQ ID NO: 1562889
ucaagaaugcugugacuaa

SEQ ID NO: 1780200 - RNA, 19 nt, Artificial Sequence
  Description of Artificial Sequence: Synthetic oligonucleotide
  Antisense strand to SEQ ID NO: 1780199
uuagucacagcauucuuga

SEQ ID NO: 1780201 - RNA, 19 nt, Artificial Sequence
  Description of Artificial Sequence: Synthetic oligonucleotide
  Sense strand starting at position 2604 of SEQ ID NO: 1562889
ugacuaaagugaggagaaa

SEQ ID NO: 1780202 - RNA, 19 nt, Artificial Sequence
  Description of Artificial Sequence: Synthetic oligonucleotide
  Antisense strand to SEQ ID NO: 1780201
uuucuccucacuuuaguca

SEQ ID NO: 1780203 - RNA, 19 nt, Artificial Sequence
  Description of Artificial Sequence: Synthetic oligonucleotide
  Sense strand starting at position 2854 of SEQ ID NO: 1562889
aaugaaggcuuaugugaag

SEQ ID NO: 1780204 - RNA, 19 nt, Artificial Sequence
  Description of Artificial Sequence: Synthetic oligonucleotide
  Antisense strand to SEQ ID NO: 1780203
cuucacauaagccuucauu

SEQ ID NO: 1780205 - RNA, 19 nt, Artificial Sequence
  Description of Artificial Sequence: Synthetic oligonucleotide
  Sense strand starting at position 2953 of SEQ ID NO: 1562889
aggagucacagauggguaa

SEQ ID NO: 1780206 - RNA, 19 nt, Artificial Sequence
  Description of Artificial Sequence: Synthetic oligonucleotide
  Antisense strand to SEQ ID NO: 1780205
uuacccaucugugacuccu

SEQ ID NO: 1780207 - RNA, 19 nt, Artificial Sequence
  Description of Artificial Sequence: Synthetic oligonucleotide
  Sense strand starting at position 2957 of SEQ ID NO: 1562889
gucacagauggguaagguu

SEQ ID NO: 1780208 - RNA, 19 nt, Artificial Sequence
  Description of Artificial Sequence: Synthetic oligonucleotide
  Antisense strand to SEQ ID NO: 1780207
aaccuuacccaucugugac

SEQ ID NO: 1780209 - RNA, 19 nt, Artificial Sequence
  Description of Artificial Sequence: Synthetic oligonucleotide
  Sense strand starting at position 3734 of SEQ ID NO: 1562889
cggcuccuccguggucaaa

SEQ ID NO: 1780210 - RNA, 19 nt, Artificial Sequence
  Description of Artificial Sequence: Synthetic oligonucleotide
  Antisense strand to SEQ ID NO: 1780209
uuugaccacggaggagccg

SEQ ID NO: 1780211 - RNA, 19 nt, Artificial Sequence
  Description of Artificial Sequence: Synthetic oligonucleotide
  Sense strand starting at position 12 of SEQ ID NO: 1562890
aggauuuaauaucaaugac

SEQ ID NO: 1780212 - RNA, 19 nt, Artificial Sequence
  Description of Artificial Sequence: Synthetic oligonucleotide
  Antisense strand to SEQ ID NO: 1780211
gucauugauauuaaauccu

SEQ ID NO: 1780213 - RNA, 19 nt, Artificial Sequence
  Description of Artificial Sequence: Synthetic oligonucleotide
  Sense strand starting at position 85 of SEQ ID NO: 1562890
aguauacugacugggcuau

SEQ ID NO: 1780214 - RNA, 19 nt, Artificial Sequence
  Description of Artificial Sequence: Synthetic oligonucleotide
  Antisense strand to SEQ ID NO: 1780213
auagcccagucaguauacu

SEQ ID NO: 1780215 - RNA, 19 nt, Artificial Sequence
  Description of Artificial Sequence: Synthetic oligonucleotide
  Sense strand starting at position 86 of SEQ ID NO: 1562890
guauacugacugggcuauu

SEQ ID NO: 1780216 - RNA, 19 nt, Artificial Sequence
  Description of Artificial Sequence: Synthetic oligonucleotide
  Antisense strand to SEQ ID NO: 1780215
aauagcccagucaguauac

SEQ ID NO: 1780217 - RNA, 19 nt, Artificial Sequence
  Description of Artificial Sequence: Synthetic oligonucleotide
  Sense strand starting at position 87 of SEQ ID NO: 1562890
uauacugacugggcuauua

SEQ ID NO: 1780218 - RNA, 19 nt, Artificial Sequence
  Description of Artificial Sequence: Synthetic oligonucleotide
  Antisense strand to SEQ ID NO: 1780217
uaauagcccagucaguaua

SEQ ID NO: 1780219 - RNA, 19 nt, Artificial Sequence
  Description of Artificial Sequence: Synthetic oligonucleotide
  Sense strand starting at position 220 of SEQ ID NO: 1562890
cugaacucgcaagaugaca

SEQ ID NO: 1780220 - RNA, 19 nt, Artificial Sequence
  Description of Artificial Sequence: Synthetic oligonucleotide
  Antisense strand to SEQ ID NO: 1780219
ugucaucuugcgaguucag

SEQ ID NO: 1780221 - RNA, 19 nt, Artificial Sequence
  Description of Artificial Sequence: Synthetic oligonucleotide
  Sense strand starting at position 228 of SEQ ID NO: 1562890
gcaagaugacagcagugaa

SEQ ID NO: 1780222 - RNA, 19 nt, Artificial Sequence
  Description of Artificial Sequence: Synthetic oligonucleotide
  Antisense strand to SEQ ID NO: 1780221
uucacugcugucaucuugc

SEQ ID NO: 1780223 - RNA, 19 nt, Artificial Sequence
  Description of Artificial Sequence: Synthetic oligonucleotide
  Sense strand starting at position 299 of SEQ ID NO: 1562890
aucacucugccagagaguu

SEQ ID NO: 1780224 - RNA, 19 nt, Artificial Sequence
  Description of Artificial Sequence: Synthetic oligonucleotide
  Antisense strand to SEQ ID NO: 1780223
aacucucuggcagagugau

SEQ ID NO: 1780225 - RNA, 19 nt, Artificial Sequence
  Description of Artificial Sequence: Synthetic oligonucleotide
  Sense strand starting at position 309 of SEQ ID NO: 1562890
cagagaguugcuggcagaa

SEQ ID NO: 1780226 - RNA, 19 nt, Artificial Sequence
  Description of Artificial Sequence: Synthetic oligonucleotide
  Antisense strand to SEQ ID NO: 1780225
uucugccagcaacucucug

SEQ ID NO: 1780227 - RNA, 19 nt, Artificial Sequence
  Description of Artificial Sequence: Synthetic oligonucleotide
  Sense strand starting at position 381 of SEQ ID NO: 1562890
gaggacugucccuacuugu

SEQ ID NO: 1780228 - RNA, 19 nt, Artificial Sequence
  Description of Artificial Sequence: Synthetic oligonucleotide
  Antisense strand to SEQ ID NO: 1780227
acaaguagggacaguccuc

SEQ ID NO: 1780229 - RNA, 19 nt, Artificial Sequence
  Description of Artificial Sequence: Synthetic oligonucleotide
  Sense strand starting at position 391 of SEQ ID NO: 1562890
ccuacuugugagggcugaa

SEQ ID NO: 1780230 - RNA, 19 nt, Artificial Sequence
  Description of Artificial Sequence: Synthetic oligonucleotide
  Antisense strand to SEQ ID NO: 1780229
uucagcccucacaaguagg

SEQ ID NO: 1780231 - RNA, 19 nt, Artificial Sequence
  Description of Artificial Sequence: Synthetic oligonucleotide
  Sense strand starting at position 394 of SEQ ID NO: 1562890
acuugugagggcugaaaca

SEQ ID NO: 1780232 - RNA, 19 nt, Artificial Sequence
  Description of Artificial Sequence: Synthetic oligonucleotide
  Antisense strand to SEQ ID NO: 1780231
uguuucagcccucacaagu

SEQ ID NO: 1780233 - RNA, 19 nt, Artificial Sequence
  Description of Artificial Sequence: Synthetic oligonucleotide
  Sense strand starting at position 698 of SEQ ID NO: 1562890
ucagucucuuuacuugaga

SEQ ID NO: 1780234 - RNA, 19 nt, Artificial Sequence
  Description of Artificial Sequence: Synthetic oligonucleotide
  Antisense strand to SEQ ID NO: 1780233
ucucaaguaaagagacuga

SEQ ID NO: 1780235 - RNA, 19 nt, Artificial Sequence
  Description of Artificial Sequence: Synthetic oligonucleotide
  Sense strand starting at position 701 of SEQ ID NO: 1562890
gucucuuuacuugagaaau

SEQ ID NO: 1780236 - RNA, 19 nt, Artificial Sequence
  Description of Artificial Sequence: Synthetic oligonucleotide
  Antisense strand to SEQ ID NO: 1780235
auuucucaaguaaagagac

SEQ ID NO: 1780237 - RNA, 19 nt, Artificial Sequence
  Description of Artificial Sequence: Synthetic oligonucleotide
  Sense strand starting at position 740 of SEQ ID NO: 1562890
cagaguaauuuggaaacca

SEQ ID NO: 1780238 - RNA, 19 nt, Artificial Sequence
  Description of Artificial Sequence: Synthetic oligonucleotide
  Antisense strand to SEQ ID NO: 1780237
ugguuuccaaauuacucug

SEQ ID NO: 1780239 - RNA, 19 nt, Artificial Sequence
  Description of Artificial Sequence: Synthetic oligonucleotide
  Sense strand starting at position 783 of SEQ ID NO: 1562890
ucauuaaguucucuguaac

SEQ ID NO: 1780240 - RNA, 19 nt, Artificial Sequence
  Description of Artificial Sequence: Synthetic oligonucleotide
  Antisense strand to SEQ ID NO: 1780239
guuacagagaacuuaauga

SEQ ID NO: 1780241 - RNA, 19 nt, Artificial Sequence
  Description of Artificial Sequence: Synthetic oligonucleotide
  Sense strand starting at position 786 of SEQ ID NO: 1562890
uuaaguucucuguaacaug

SEQ ID NO: 1780242 - RNA, 19 nt, Artificial Sequence
  Description of Artificial Sequence: Synthetic oligonucleotide
  Antisense strand to SEQ ID NO: 1780241
cauguuacagagaacuuaa

SEQ ID NO: 1780243 - RNA, 19 nt, Artificial Sequence
  Description of Artificial Sequence: Synthetic oligonucleotide
  Sense strand starting at position 807 of SEQ ID NO: 1562890
ggacucuggcuacaacuua

SEQ ID NO: 1780244 - RNA, 19 nt, Artificial Sequence
  Description of Artificial Sequence: Synthetic oligonucleotide
  Antisense strand to SEQ ID NO: 1780243
uaaguuguagccagagucc

SEQ ID NO: 1780245 - RNA, 19 nt, Artificial Sequence
  Description of Artificial Sequence: Synthetic oligonucleotide
  Sense strand starting at position 909 of SEQ ID NO: 1562890
ggcagagaugcuuggaggu

SEQ ID NO: 1780246 - RNA, 19 nt, Artificial Sequence
  Description of Artificial Sequence: Synthetic oligonucleotide
  Antisense strand to SEQ ID NO: 1780245
accuccaagcaucucugcc

SEQ ID NO: 1780247 - RNA, 19 nt, Artificial Sequence
  Description of Artificial Sequence: Synthetic oligonucleotide
  Sense strand starting at position 916 of SEQ ID NO: 1562890
augcuuggagguuauguaa

SEQ ID NO: 1780248 - RNA, 19 nt, Artificial Sequence
  Description of Artificial Sequence: Synthetic oligonucleotide
  Antisense strand to SEQ ID NO: 1780247
uuacauaaccuccaagcau

SEQ ID NO: 1780249 - RNA, 19 nt, Artificial Sequence
  Description of Artificial Sequence: Synthetic oligonucleotide
  Sense strand starting at position 923 of SEQ ID NO: 1562890
gagguuauguaacugaaca

SEQ ID NO: 1780250 - RNA, 19 nt, Artificial Sequence
  Description of Artificial Sequence: Synthetic oligonucleotide
  Antisense strand to SEQ ID NO: 1780249
uguucaguuacauaaccuc

SEQ ID NO: 1780251 - RNA, 19 nt, Artificial Sequence
  Description of Artificial Sequence: Synthetic oligonucleotide
  Sense strand starting at position 942 of SEQ ID NO: 1562890
cgauuacacagcugugaag

SEQ ID NO: 1780252 - RNA, 19 nt, Artificial Sequence
  Description of Artificial Sequence: Synthetic oligonucleotide
  Antisense strand to SEQ ID NO: 1780251
cuucacagcuguguaaucg

SEQ ID NO: 1780253 - RNA, 19 nt, Artificial Sequence
  Description of Artificial Sequence: Synthetic oligonucleotide
  Sense strand starting at position 1123 of SEQ ID NO: 1562890
cgcccaacucccuaaguua

SEQ ID NO: 1780254 - RNA, 19 nt, Artificial Sequence
  Description of Artificial Sequence: Synthetic oligonucleotide
  Antisense strand to SEQ ID NO: 1780253
uaacuuagggaguugggcg

SEQ ID NO: 1780255 - RNA, 19 nt, Artificial Sequence
  Description of Artificial Sequence: Synthetic oligonucleotide
  Sense strand starting at position 2527 of SEQ ID NO: 1562890
ggucuagaccaguaguucu

SEQ ID NO: 1780256 - RNA, 19 nt, Artificial Sequence
  Description of Artificial Sequence: Synthetic oligonucleotide
  Antisense strand to SEQ ID NO: 1780255
agaacuacuggucuagacc

SEQ ID NO: 1780257 - RNA, 19 nt, Artificial Sequence
  Description of Artificial Sequence: Synthetic oligonucleotide
  Sense strand starting at position 2649 of SEQ ID NO: 1562890
uuugaaaucaccgaugugu

SEQ ID NO: 1780258 - RNA, 19 nt, Artificial Sequence
  Description of Artificial Sequence: Synthetic oligonucleotide
  Antisense strand to SEQ ID NO: 1780257
acacaucggugauuucaaa

SEQ ID NO: 1780259 - RNA, 19 nt, Artificial Sequence
  Description of Artificial Sequence: Synthetic oligonucleotide
  Sense strand starting at position 2651 of SEQ ID NO: 1562890
ugaaaucaccgauguguag

SEQ ID NO: 1780260 - RNA, 19 nt, Artificial Sequence
  Description of Artificial Sequence: Synthetic oligonucleotide
  Antisense strand to SEQ ID NO: 1780259
cuacacaucggugauuuca

SEQ ID NO: 1780261 - RNA, 19 nt, Artificial Sequence
  Description of Artificial Sequence: Synthetic oligonucleotide
  Sense strand starting at position 2660 of SEQ ID NO: 1562890
cgauguguagcaggacaga

SEQ ID NO: 1780262 - RNA, 19 nt, Artificial Sequence
  Description of Artificial Sequence: Synthetic oligonucleotide
  Antisense strand to SEQ ID NO: 1780261
ucuguccugcuacacaucg

SEQ ID NO: 1780263 - RNA, 19 nt, Artificial Sequence
  Description of Artificial Sequence: Synthetic oligonucleotide
  Sense strand starting at position 2670 of SEQ ID NO: 1562890
caggacagauccucaugua

SEQ ID NO: 1780264 - RNA, 19 nt, Artificial Sequence
  Description of Artificial Sequence: Synthetic oligonucleotide
  Antisense strand to SEQ ID NO: 1780263
uacaugaggaucuguccug

SEQ ID NO: 1780265 - RNA, 19 nt, Artificial Sequence
  Description of Artificial Sequence: Synthetic oligonucleotide
  Sense strand starting at position 2735 of SEQ ID NO: 1562890
gguuuaauuccagggauuc

SEQ ID NO: 1780266 - RNA, 19 nt, Artificial Sequence
  Description of Artificial Sequence: Synthetic oligonucleotide
  Antisense strand to SEQ ID NO: 1780265
gaaucccuggaauuaaacc

SEQ ID NO: 1780267 - RNA, 19 nt, Artificial Sequence
  Description of Artificial Sequence: Synthetic oligonucleotide
  Sense strand starting at position 2736 of SEQ ID NO: 1562890
guuuaauuccagggauucu

SEQ ID NO: 1780268 - RNA, 19 nt, Artificial Sequence
  Description of Artificial Sequence: Synthetic oligonucleotide
  Antisense strand to SEQ ID NO: 1780267
agaaucccuggaauuaaac

SEQ ID NO: 1780269 - RNA, 19 nt, Artificial Sequence
  Description of Artificial Sequence: Synthetic oligonucleotide
  Sense strand starting at position 2747 of SEQ ID NO: 1562890
gggauucuaccgugagcua

SEQ ID NO: 1780270 - RNA, 19 nt, Artificial Sequence
  Description of Artificial Sequence: Synthetic oligonucleotide
  Antisense strand to SEQ ID NO: 1780269
uagcucacgguagaauccc

SEQ ID NO: 1780271 - RNA, 19 nt, Artificial Sequence
  Description of Artificial Sequence: Synthetic oligonucleotide
  Sense strand starting at position 2849 of SEQ ID NO: 1562890
uggccaauugcccagaaua

SEQ ID NO: 1780272 - RNA, 19 nt, Artificial Sequence
  Description of Artificial Sequence: Synthetic oligonucleotide
  Antisense strand to SEQ ID NO: 1780271
uauucugggcaauuggcca

SEQ ID NO: 1780273 - RNA, 19 nt, Artificial Sequence
  Description of Artificial Sequence: Synthetic oligonucleotide
  Sense strand starting at position 2851 of SEQ ID NO: 1562890
gccaauugcccagaauagu

SEQ ID NO: 1780274 - RNA, 19 nt, Artificial Sequence
  Description of Artificial Sequence: Synthetic oligonucleotide
  Antisense strand to SEQ ID NO: 1780273
acuauucugggcaauuggc

SEQ ID NO: 1780275 - RNA, 19 nt, Artificial Sequence
  Description of Artificial Sequence: Synthetic oligonucleotide
  Sense strand starting at position 2911 of SEQ ID NO: 1562890
gaggccuugugaucuggaa

SEQ ID NO: 1780276 - RNA, 19 nt, Artificial Sequence
  Description of Artificial Sequence: Synthetic oligonucleotide
  Antisense strand to SEQ ID NO: 1780275
uuccagaucacaaggccuc

SEQ ID NO: 1780277 - RNA, 19 nt, Artificial Sequence
  Description of Artificial Sequence: Synthetic oligonucleotide
  Sense strand starting at position 2915 of SEQ ID NO: 1562890
ccuugugaucuggaagcaa

SEQ ID NO: 1780278 - RNA, 19 nt, Artificial Sequence
  Description of Artificial Sequence: Synthetic oligonucleotide
  Antisense strand to SEQ ID NO: 1780277
uugcuuccagaucacaagg

SEQ ID NO: 1780279 - RNA, 19 nt, Artificial Sequence
  Description of Artificial Sequence: Synthetic oligonucleotide
  Sense strand starting at position 3066 of SEQ ID NO: 1562890
gcuccaacgacuugggaaa

SEQ ID NO: 1780280 - RNA, 19 nt, Artificial Sequence
  Description of Artificial Sequence: Synthetic oligonucleotide
  Antisense strand to SEQ ID NO: 1780279
uuucccaagucguuggagc

SEQ ID NO: 1780281 - RNA, 19 nt, Artificial Sequence
  Description of Artificial Sequence: Synthetic oligonucleotide
  Sense strand starting at position 3158 of SEQ ID NO: 1562890
ggccuuugcauagauaguc

SEQ ID NO: 1780282 - RNA, 19 nt, Artificial Sequence
  Description of Artificial Sequence: Synthetic oligonucleotide
  Antisense strand to SEQ ID NO: 1780281
gacuaucuaugcaaaggcc

SEQ ID NO: 1780283 - RNA, 19 nt, Artificial Sequence
  Description of Artificial Sequence: Synthetic oligonucleotide
  Sense strand starting at position 3175 of SEQ ID NO: 1562890
ucuccuuggccugaauguu

SEQ ID NO: 1780284 - RNA, 19 nt, Artificial Sequence
  Description of Artificial Sequence: Synthetic oligonucleotide
  Antisense strand to SEQ ID NO: 1780283
aacauucaggccaaggaga

SEQ ID NO: 1780285 - RNA, 19 nt, Artificial Sequence
  Description of Artificial Sequence: Synthetic oligonucleotide
  Sense strand starting at position 3657 of SEQ ID NO: 1562890
auaccaugagucuagguua

SEQ ID NO: 1780286 - RNA, 19 nt, Artificial Sequence
  Description of Artificial Sequence: Synthetic oligonucleotide
  Antisense strand to SEQ ID NO: 1780285
uaaccuagacucaugguau

SEQ ID NO: 1780287 - RNA, 19 nt, Artificial Sequence
  Description of Artificial Sequence: Synthetic oligonucleotide
  Sense strand starting at position 3660 of SEQ ID NO: 1562890
ccaugagucuagguuauau

SEQ ID NO: 1780288 - RNA, 19 nt, Artificial Sequence
  Description of Artificial Sequence: Synthetic oligonucleotide
  Antisense strand to SEQ ID NO: 1780287
auauaaccuagacucaugg

SEQ ID NO: 1780289 - RNA, 19 nt, Artificial Sequence
  Description of Artificial Sequence: Synthetic oligonucleotide
  Sense strand starting at position 3845 of SEQ ID NO: 1562890
uuccuaguugcugagacua

SEQ ID NO: 1780290 - RNA, 19 nt, Artificial Sequence
  Description of Artificial Sequence: Synthetic oligonucleotide
  Antisense strand to SEQ ID NO: 1780289
uagucucagcaacuaggaa

SEQ ID NO: 1780291 - RNA, 19 nt, Artificial Sequence
  Description of Artificial Sequence: Synthetic oligonucleotide
  Sense strand starting at position 52 of SEQ ID NO: 1562891
ucccuugagggugguauua

SEQ ID NO: 1780292 - RNA, 19 nt, Artificial Sequence
  Description of Artificial Sequence: Synthetic oligonucleotide
  Antisense strand to SEQ ID NO: 1780291
uaauaccacccucaaggga

SEQ ID NO: 1780293 - RNA, 19 nt, Artificial Sequence
  Description of Artificial Sequence: Synthetic oligonucleotide
  Sense strand starting at position 63 of SEQ ID NO: 1562891
ugguauuacccuggcugaa

SEQ ID NO: 1780294 - RNA, 19 nt, Artificial Sequence
  Description of Artificial Sequence: Synthetic oligonucleotide
  Antisense strand to SEQ ID NO: 1780293
uucagccaggguaauacca

SEQ ID NO: 1780295 - RNA, 19 nt, Artificial Sequence
  Description of Artificial Sequence: Synthetic oligonucleotide
  Sense strand starting at position 149 of SEQ ID NO: 1562891
ccucuauuauggucaaagc

SEQ ID NO: 1780296 - RNA, 19 nt, Artificial Sequence
  Description of Artificial Sequence: Synthetic oligonucleotide
  Antisense strand to SEQ ID NO: 1780295
gcuuugaccauaauagagg

SEQ ID NO: 1780297 - RNA, 19 nt, Artificial Sequence
  Description of Artificial Sequence: Synthetic oligonucleotide
  Sense strand starting at position 150 of SEQ ID NO: 1562891
cucuauuauggucaaagca

SEQ ID NO: 1780298 - RNA, 19 nt, Artificial Sequence
  Description of Artificial Sequence: Synthetic oligonucleotide
  Antisense strand to SEQ ID NO: 1780297
ugcuuugaccauaauagag

SEQ ID NO: 1780299 - RNA, 19 nt, Artificial Sequence
  Description of Artificial Sequence: Synthetic oligonucleotide
  Sense strand starting at position 311 of SEQ ID NO: 1562891
uucuguaucccucgauaga

SEQ ID NO: 1780300 - RNA, 19 nt, Artificial Sequence
  Description of Artificial Sequence: Synthetic oligonucleotide
  Antisense strand to SEQ ID NO: 1780299
ucuaucgagggauacagaa

SEQ ID NO: 1780301 - RNA, 19 nt, Artificial Sequence
  Description of Artificial Sequence: Synthetic oligonucleotide
  Sense strand starting at position 312 of SEQ ID NO: 1562891
ucuguaucccucgauagag

SEQ ID NO: 1780302 - RNA, 19 nt, Artificial Sequence
  Description of Artificial Sequence: Synthetic oligonucleotide
  Antisense strand to SEQ ID NO: 1780301
cucuaucgagggauacaga

SEQ ID NO: 1780303 - RNA, 19 nt, Artificial Sequence
  Description of Artificial Sequence: Synthetic oligonucleotide
  Sense strand starting at position 386 of SEQ ID NO: 1562891
acaagaucuuccucuggac

SEQ ID NO: 1780304 - RNA, 19 nt, Artificial Sequence
  Description of Artificial Sequence: Synthetic oligonucleotide
  Antisense strand to SEQ ID NO: 1780303
guccagaggaagaucuugu

SEQ ID NO: 1780305 - RNA, 19 nt, Artificial Sequence
  Description of Artificial Sequence: Synthetic oligonucleotide
  Sense strand starting at position 468 of SEQ ID NO: 1562891
cagguacguuuacuaauaa

SEQ ID NO: 1780306 - RNA, 19 nt, Artificial Sequence
  Description of Artificial Sequence: Synthetic oligonucleotide
  Antisense strand to SEQ ID NO: 1780305
uuauuaguaaacguaccug

SEQ ID NO: 1780307 - RNA, 19 nt, Artificial Sequence
  Description of Artificial Sequence: Synthetic oligonucleotide
  Sense strand starting at position 547 of SEQ ID NO: 1562891
agguauuaggcccaugcua

SEQ ID NO: 1780308 - RNA, 19 nt, Artificial Sequence
  Description of Artificial Sequence: Synthetic oligonucleotide
  Antisense strand to SEQ ID NO: 1780307
uagcaugggccuaauaccu

SEQ ID NO: 1780309 - RNA, 19 nt, Artificial Sequence
  Description of Artificial Sequence: Synthetic oligonucleotide
  Sense strand starting at position 560 of SEQ ID NO: 1562891
augcuaagucuuggaggua

SEQ ID NO: 1780310 - RNA, 19 nt, Artificial Sequence
  Description of Artificial Sequence: Synthetic oligonucleotide
  Antisense strand to SEQ ID NO: 1780309
uaccuccaagacuuagcau

SEQ ID NO: 1780311 - RNA, 19 nt, Artificial Sequence
  Description of Artificial Sequence: Synthetic oligonucleotide
  Sense strand starting at position 563 of SEQ ID NO: 1562891
cuaagucuuggagguauaa

SEQ ID NO: 1780312 - RNA, 19 nt, Artificial Sequence
  Description of Artificial Sequence: Synthetic oligonucleotide
  Antisense strand to SEQ ID NO: 1780311
uuauaccuccaagacuuag

SEQ ID NO: 1780313 - RNA, 19 nt, Artificial Sequence
  Description of Artificial Sequence: Synthetic oligonucleotide
  Sense strand starting at position 573 of SEQ ID NO: 1562891
gagguauaaagaugaguuu

SEQ ID NO: 1780314 - RNA, 19 nt, Artificial Sequence
  Description of Artificial Sequence: Synthetic oligonucleotide
  Antisense strand to SEQ ID NO: 1780313
aaacucaucuuuauaccuc

SEQ ID NO: 1780315 - RNA, 19 nt, Artificial Sequence
  Description of Artificial Sequence: Synthetic oligonucleotide
  Sense strand starting at position 738 of SEQ ID NO: 1562891
aggagaguucagcaauguu

SEQ ID NO: 1780316 - RNA, 19 nt, Artificial Sequence
  Description of Artificial Sequence: Synthetic oligonucleotide
  Antisense strand to SEQ ID NO: 1780315
aacauugcugaacucuccu

SEQ ID NO: 1780317 - RNA, 19 nt, Artificial Sequence
  Description of Artificial Sequence: Synthetic oligonucleotide
  Sense strand starting at position 784 of SEQ ID NO: 1562891
acugguauccaguagguaa

SEQ ID NO: 1780318 - RNA, 19 nt, Artificial Sequence
  Description of Artificial Sequence: Synthetic oligonucleotide
  Antisense strand to SEQ ID NO: 1780317
uuaccuacuggauaccagu

SEQ ID NO: 1780319 - RNA, 19 nt, Artificial Sequence
  Description of Artificial Sequence: Synthetic oligonucleotide
  Sense strand starting at position 861 of SEQ ID NO: 1562891
agacucaucuuuguugauu

SEQ ID NO: 1780320 - RNA, 19 nt, Artificial Sequence
  Description of Artificial Sequence: Synthetic oligonucleotide
  Antisense strand to SEQ ID NO: 1780319
aaucaacaaagaugagucu

SEQ ID NO: 1780321 - RNA, 19 nt, Artificial Sequence
  Description of Artificial Sequence: Synthetic oligonucleotide
  Sense strand starting at position 872 of SEQ ID NO: 1562891
uguugauucuggcucugaa

SEQ ID NO: 1780322 - RNA, 19 nt, Artificial Sequence
  Description of Artificial Sequence: Synthetic oligonucleotide
  Antisense strand to SEQ ID NO: 1780321
uucagagccagaaucaaca

SEQ ID NO: 1780323 - RNA, 19 nt, Artificial Sequence
  Description of Artificial Sequence: Synthetic oligonucleotide
  Sense strand starting at position 1015 of SEQ ID NO: 1562891
gguuaagaacacuggcaau

SEQ ID NO: 1780324 - RNA, 19 nt, Artificial Sequence
  Description of Artificial Sequence: Synthetic oligonucleotide
  Antisense strand to SEQ ID NO: 1780323
auugccaguguucuuaacc

SEQ ID NO: 1780325 - RNA, 19 nt, Artificial Sequence
  Description of Artificial Sequence: Synthetic oligonucleotide
  Sense strand starting at position 1480 of SEQ ID NO: 1562891
aauguuaugccucgaagag

SEQ ID NO: 1780326 - RNA, 19 nt, Artificial Sequence
  Description of Artificial Sequence: Synthetic oligonucleotide
  Antisense strand to SEQ ID NO: 1780325
cucuucgaggcauaacauu

SEQ ID NO: 1780327 - RNA, 19 nt, Artificial Sequence
  Description of Artificial Sequence: Synthetic oligonucleotide
  Sense strand starting at position 1481 of SEQ ID NO: 1562891
auguuaugccucgaagaga

SEQ ID NO: 1780328 - RNA, 19 nt, Artificial Sequence
  Description of Artificial Sequence: Synthetic oligonucleotide
  Antisense strand to SEQ ID NO: 1780327
ucucuucgaggcauaacau

SEQ ID NO: 1780329 - RNA, 19 nt, Artificial Sequence
  Description of Artificial Sequence: Synthetic oligonucleotide
  Sense strand starting at position 1565 of SEQ ID NO: 1562891
aucacccuuucgguaaaua

SEQ ID NO: 1780330 - RNA, 19 nt, Artificial Sequence
  Description of Artificial Sequence: Synthetic oligonucleotide
  Antisense strand to SEQ ID NO: 1780329
uauuuaccgaaagggugau

SEQ ID NO: 1780331 - RNA, 19 nt, Artificial Sequence
  Description of Artificial Sequence: Synthetic oligonucleotide
  Sense strand starting at position 1566 of SEQ ID NO: 1562891
ucacccuuucgguaaauag

SEQ ID NO: 1780332 - RNA, 19 nt, Artificial Sequence
  Description of Artificial Sequence: Synthetic oligonucleotide
  Antisense strand to SEQ ID NO: 1780331
cuauuuaccgaaaggguga

SEQ ID NO: 1780333 - RNA, 19 nt, Artificial Sequence
  Description of Artificial Sequence: Synthetic oligonucleotide
  Sense strand starting at position 2017 of SEQ ID NO: 1562891
caaugagaugccuguacaa

SEQ ID NO: 1780334 - RNA, 19 nt, Artificial Sequence
  Description of Artificial Sequence: Synthetic oligonucleotide
  Antisense strand to SEQ ID NO: 1780333
uuguacaggcaucucauug

SEQ ID NO: 1780335 - RNA, 19 nt, Artificial Sequence
  Description of Artificial Sequence: Synthetic oligonucleotide
  Sense strand starting at position 2019 of SEQ ID NO: 1562891
augagaugccuguacaagu

SEQ ID NO: 1780336 - RNA, 19 nt, Artificial Sequence
  Description of Artificial Sequence: Synthetic oligonucleotide
  Antisense strand to SEQ ID NO: 1780335
acuuguacaggcaucucau

SEQ ID NO: 1780337 - RNA, 19 nt, Artificial Sequence
  Description of Artificial Sequence: Synthetic oligonucleotide
  Sense strand starting at position 2123 of SEQ ID NO: 1562891
cgcucacaaugguuacaaa

SEQ ID NO: 1780338 - RNA, 19 nt, Artificial Sequence
  Description of Artificial Sequence: Synthetic oligonucleotide
  Antisense strand to SEQ ID NO: 1780337
uuuguaaccauugugagcg

SEQ ID NO: 1780339 - RNA, 19 nt, Artificial Sequence
  Description of Artificial Sequence: Synthetic oligonucleotide
  Sense strand starting at position 2182 of SEQ ID NO: 1562891
cuguaaucacccugaugac

SEQ ID NO: 1780340 - RNA, 19 nt, Artificial Sequence
  Description of Artificial Sequence: Synthetic oligonucleotide
  Antisense strand to SEQ ID NO: 1780339
gucaucagggugauuacag

SEQ ID NO: 1780341 - RNA, 19 nt, Artificial Sequence
  Description of Artificial Sequence: Synthetic oligonucleotide
  Sense strand starting at position 2660 of SEQ ID NO: 1562891
cagugugaccaauauagug

SEQ ID NO: 1780342 - RNA, 19 nt, Artificial Sequence
  Description of Artificial Sequence: Synthetic oligonucleotide
  Antisense strand to SEQ ID NO: 1780341
cacuauauuggucacacug

SEQ ID NO: 1780343 - RNA, 19 nt, Artificial Sequence
  Description of Artificial Sequence: Synthetic oligonucleotide
  Sense strand starting at position 2662 of SEQ ID NO: 1562891
gugugaccaauauagugaa

SEQ ID NO: 1780344 - RNA, 19 nt, Artificial Sequence
  Description of Artificial Sequence: Synthetic oligonucleotide
  Antisense strand to SEQ ID NO: 1780343
uucacuauauuggucacac

SEQ ID NO: 1780345 - RNA, 19 nt, Artificial Sequence
  Description of Artificial Sequence: Synthetic oligonucleotide
  Sense strand starting at position 2919 of SEQ ID NO: 1562891
acauaaauucuguaagugu

SEQ ID NO: 1780346 - RNA, 19 nt, Artificial Sequence
  Description of Artificial Sequence: Synthetic oligonucleotide
  Antisense strand to SEQ ID NO: 1780345
acacuuacagaauuuaugu

SEQ ID NO: 1780347 - RNA, 19 nt, Artificial Sequence
  Description of Artificial Sequence: Synthetic oligonucleotide
  Sense strand starting at position 2930 of SEQ ID NO: 1562891
guaaguguuccucaaauaa

SEQ ID NO: 1780348 - RNA, 19 nt, Artificial Sequence
  Description of Artificial Sequence: Synthetic oligonucleotide
  Antisense strand to SEQ ID NO: 1780347
uuauuugaggaacacuuac

SEQ ID NO: 1780349 - RNA, 19 nt, Artificial Sequence
  Description of Artificial Sequence: Synthetic oligonucleotide
  Sense strand starting at position 2972 of SEQ ID NO: 1562891
gucacaucaccuugagaug

SEQ ID NO: 1780350 - RNA, 19 nt, Artificial Sequence
  Description of Artificial Sequence: Synthetic oligonucleotide
  Antisense strand to SEQ ID NO: 1780349
caucucaaggugaugugac

SEQ ID NO: 1780351 - RNA, 19 nt, Artificial Sequence
  Description of Artificial Sequence: Synthetic oligonucleotide
  Sense strand starting at position 3060 of SEQ ID NO: 1562891
uuccaaauuucguucgaag

SEQ ID NO: 1780352 - RNA, 19 nt, Artificial Sequence
  Description of Artificial Sequence: Synthetic oligonucleotide
  Antisense strand to SEQ ID NO: 1780351
cuucgaacgaaauuuggaa

SEQ ID NO: 1780353 - RNA, 19 nt, Artificial Sequence
  Description of Artificial Sequence: Synthetic oligonucleotide
  Sense strand starting at position 3071 of SEQ ID NO: 1562891
guucgaagaugaucucaaa

SEQ ID NO: 1780354 - RNA, 19 nt, Artificial Sequence
  Description of Artificial Sequence: Synthetic oligonucleotide
  Antisense strand to SEQ ID NO: 1780353
uuugagaucaucuucgaac

SEQ ID NO: 1780355 - RNA, 19 nt, Artificial Sequence
  Description of Artificial Sequence: Synthetic oligonucleotide
  Sense strand starting at position 3124 of SEQ ID NO: 1562891
gcccaaggacuuggucuua

SEQ ID NO: 1780356 - RNA, 19 nt, Artificial Sequence
  Description of Artificial Sequence: Synthetic oligonucleotide
  Antisense strand to SEQ ID NO: 1780355
uaagaccaaguccuugggc

SEQ ID NO: 1780357 - RNA, 19 nt, Artificial Sequence
  Description of Artificial Sequence: Synthetic oligonucleotide
  Sense strand starting at position 3195 of SEQ ID NO: 1562891
ugugacuugcacuaucuaa

SEQ ID NO: 1780358 - RNA, 19 nt, Artificial Sequence
  Description of Artificial Sequence: Synthetic oligonucleotide
  Antisense strand to SEQ ID NO: 1780357
uuagauagugcaagucaca

SEQ ID NO: 1780359 - RNA, 19 nt, Artificial Sequence
  Description of Artificial Sequence: Synthetic oligonucleotide
  Sense strand starting at position 3698 of SEQ ID NO: 1562891
ucguccugcacagauagaa

SEQ ID NO: 1780360 - RNA, 19 nt, Artificial Sequence
  Description of Artificial Sequence: Synthetic oligonucleotide
  Antisense strand to SEQ ID NO: 1780359
uucuaucugugcaggacga

SEQ ID NO: 1780361 - RNA, 19 nt, Artificial Sequence
  Description of Artificial Sequence: Synthetic oligonucleotide
  Sense strand starting at position 3713 of SEQ ID NO: 1562891
agaaccauguuugcagaaa

SEQ ID NO: 1780362 - RNA, 19 nt, Artificial Sequence
  Description of Artificial Sequence: Synthetic oligonucleotide
  Antisense strand to SEQ ID NO: 1780361
uuucugcaaacaugguucu

SEQ ID NO: 1780363 - RNA, 19 nt, Artificial Sequence
  Description of Artificial Sequence: Synthetic oligonucleotide
  Sense strand starting at position 3875 of SEQ ID NO: 1562891
gaaaguaagugaucgcuga

SEQ ID NO: 1780364 - RNA, 19 nt, Artificial Sequence
  Description of Artificial Sequence: Synthetic oligonucleotide
  Antisense strand to SEQ ID NO: 1780363
ucagcgaucacuuacuuuc

SEQ ID NO: 1780365 - RNA, 19 nt, Artificial Sequence
  Description of Artificial Sequence: Synthetic oligonucleotide
  Sense strand starting at position 3876 of SEQ ID NO: 1562891
aaaguaagugaucgcugaa

SEQ ID NO: 1780366 - RNA, 19 nt, Artificial Sequence
  Description of Artificial Sequence: Synthetic oligonucleotide
  Antisense strand to SEQ ID NO: 1780365
uucagcgaucacuuacuuu

SEQ ID NO: 1780367 - RNA, 19 nt, Artificial Sequence
  Description of Artificial Sequence: Synthetic oligonucleotide
  Sense strand starting at position 3908 of SEQ ID NO: 1562891
cuaagcugugcagaauaga

SEQ ID NO: 1780368 - RNA, 19 nt, Artificial Sequence
  Description of Artificial Sequence: Synthetic oligonucleotide
  Antisense strand to SEQ ID NO: 1780367
ucuauucugcacagcuuag

SEQ ID NO: 1780369 - RNA, 19 nt, Artificial Sequence
  Description of Artificial Sequence: Synthetic oligonucleotide
  Sense strand starting at position 3977 of SEQ ID NO: 1562891
cuaccuaacguauaguaga

SEQ ID NO: 1780370 - RNA, 19 nt, Artificial Sequence
  Description of Artificial Sequence: Synthetic oligonucleotide
  Antisense strand to SEQ ID NO: 1780369
ucuacuauacguuagguag

SEQ ID NO: 1780371 - RNA, 19 nt, Artificial Sequence
  Description of Artificial Sequence: Synthetic oligonucleotide
  Sense strand starting at position 93 of SEQ ID NO: 1562892
acuuguagccucuagauua

SEQ ID NO: 1780372 - RNA, 19 nt, Artificial Sequence
  Description of Artificial Sequence: Synthetic oligonucleotide
  Antisense strand to SEQ ID NO: 1780371
uaaucuagaggcuacaagu

SEQ ID NO: 1780373 - RNA, 19 nt, Artificial Sequence
  Description of Artificial Sequence: Synthetic oligonucleotide
  Sense strand starting at position 100 of SEQ ID NO: 1562892
gccucuagauuagcugaga

SEQ ID NO: 1780374 - RNA, 19 nt, Artificial Sequence
  Description of Artificial Sequence: Synthetic oligonucleotide
  Antisense strand to SEQ ID NO: 1780373
ucucagcuaaucuagaggc

SEQ ID NO: 1780375 - RNA, 19 nt, Artificial Sequence
  Description of Artificial Sequence: Synthetic oligonucleotide
  Sense strand starting at position 103 of SEQ ID NO: 1562892
ucuagauuagcugagacuu

SEQ ID NO: 1780376 - RNA, 19 nt, Artificial Sequence
  Description of Artificial Sequence: Synthetic oligonucleotide
  Antisense strand to SEQ ID NO: 1780375
aagucucagcuaaucuaga

SEQ ID NO: 1780377 - RNA, 19 nt, Artificial Sequence
  Description of Artificial Sequence: Synthetic oligonucleotide
  Sense strand starting at position 283 of SEQ ID NO: 1562892
uucuaauauguaugggaaa

SEQ ID NO: 1780378 - RNA, 19 nt, Artificial Sequence
  Description of Artificial Sequence: Synthetic oligonucleotide
  Antisense strand to SEQ ID NO: 1780377
uuucccauacauauuagaa

SEQ ID NO: 1780379 - RNA, 19 nt, Artificial Sequence
  Description of Artificial Sequence: Synthetic oligonucleotide
  Sense strand starting at position 493 of SEQ ID NO: 1562892
caggcugccuuccuggaaa

SEQ ID NO: 1780380 - RNA, 19 nt, Artificial Sequence
  Description of Artificial Sequence: Synthetic oligonucleotide
  Antisense strand to SEQ ID NO: 1780379
uuuccaggaaggcagccug

SEQ ID NO: 1780381 - RNA, 19 nt, Artificial Sequence
  Description of Artificial Sequence: Synthetic oligonucleotide
  Sense strand starting at position 496 of SEQ ID NO: 1562892
gcugccuuccuggaaauag

SEQ ID NO: 1780382 - RNA, 19 nt, Artificial Sequence
  Description of Artificial Sequence: Synthetic oligonucleotide
  Antisense strand to SEQ ID NO: 1780381
cuauuuccaggaaggcagc

SEQ ID NO: 1780383 - RNA, 19 nt, Artificial Sequence
  Description of Artificial Sequence: Synthetic oligonucleotide
  Sense strand starting at position 718 of SEQ ID NO: 1562892
cagccuuucugacuggaca

SEQ ID NO: 1780384 - RNA, 19 nt, Artificial Sequence
  Description of Artificial Sequence: Synthetic oligonucleotide
  Antisense strand to SEQ ID NO: 1780383
uguccagucagaaaggcug

SEQ ID NO: 1780385 - RNA, 19 nt, Artificial Sequence
  Description of Artificial Sequence: Synthetic oligonucleotide
  Sense strand starting at position 756 of SEQ ID NO: 1562892
caaguaguuccguaaacag

SEQ ID NO: 1780386 - RNA, 19 nt, Artificial Sequence
  Description of Artificial Sequence: Synthetic oligonucleotide
  Antisense strand to SEQ ID NO: 1780385
cuguuuacggaacuacuug

SEQ ID NO: 1780387 - RNA, 19 nt, Artificial Sequence
  Description of Artificial Sequence: Synthetic oligonucleotide
  Sense strand starting at position 802 of SEQ ID NO: 1562892
aagggcuugguuugugaua

SEQ ID NO: 1780388 - RNA, 19 nt, Artificial Sequence
  Description of Artificial Sequence: Synthetic oligonucleotide
  Antisense strand to SEQ ID NO: 1780387
uaucacaaaccaagcccuu

SEQ ID NO: 1780389 - RNA, 19 nt, Artificial Sequence
  Description of Artificial Sequence: Synthetic oligonucleotide
  Sense strand starting at position 803 of SEQ ID NO: 1562892
agggcuugguuugugauaa

SEQ ID NO: 1780390 - RNA, 19 nt, Artificial Sequence
  Description of Artificial Sequence: Synthetic oligonucleotide
  Antisense strand to SEQ ID NO: 1780389
uuaucacaaaccaagcccu

SEQ ID NO: 1780391 - RNA, 19 nt, Artificial Sequence
  Description of Artificial Sequence: Synthetic oligonucleotide
  Sense strand starting at position 847 of SEQ ID NO: 1562892
aagagugaaccuuggcaau

SEQ ID NO: 1780392 - RNA, 19 nt, Artificial Sequence
  Description of Artificial Sequence: Synthetic oligonucleotide
  Antisense strand to SEQ ID NO: 1780391
auugccaagguucacucuu

SEQ ID NO: 1780393 - RNA, 19 nt, Artificial Sequence
  Description of Artificial Sequence: Synthetic oligonucleotide
  Sense strand starting at position 887 of SEQ ID NO: 1562892
gcagauugugcauggaaau

SEQ ID NO: 1780394 - RNA, 19 nt, Artificial Sequence
  Description of Artificial Sequence: Synthetic oligonucleotide
  Antisense strand to SEQ ID NO: 1780393
auuuccaugcacaaucugc

SEQ ID NO: 1780395 - RNA, 19 nt, Artificial Sequence
  Description of Artificial Sequence: Synthetic oligonucleotide
  Sense strand starting at position 888 of SEQ ID NO: 1562892
cagauugugcauggaaaug

SEQ ID NO: 1780396 - RNA, 19 nt, Artificial Sequence
  Description of Artificial Sequence: Synthetic oligonucleotide
  Antisense strand to SEQ ID NO: 1780395
cauuuccaugcacaaucug

SEQ ID NO: 1780397 - RNA, 19 nt, Artificial Sequence
  Description of Artificial Sequence: Synthetic oligonucleotide
  Sense strand starting at position 899 of SEQ ID NO: 1562892
uggaaaugauuggagauau

SEQ ID NO: 1780398 - RNA, 19 nt, Artificial Sequence
  Description of Artificial Sequence: Synthetic oligonucleotide
  Antisense strand to SEQ ID NO: 1780397
auaucuccaaucauuucca

SEQ ID NO: 1780399 - RNA, 19 nt, Artificial Sequence
  Description of Artificial Sequence: Synthetic oligonucleotide
  Sense strand starting at position 1022 of SEQ ID NO: 1562892
gguuaagugaccuggccaa

SEQ ID NO: 1780400 - RNA, 19 nt, Artificial Sequence
  Description of Artificial Sequence: Synthetic oligonucleotide
  Antisense strand to SEQ ID NO: 1780399
uuggccaggucacuuaacc

SEQ ID NO: 1780401 - RNA, 19 nt, Artificial Sequence
  Description of Artificial Sequence: Synthetic oligonucleotide
  Sense strand starting at position 1059 of SEQ ID NO: 1562892
aguuaacucguauacauug

SEQ ID NO: 1780402 - RNA, 19 nt, Artificial Sequence
  Description of Artificial Sequence: Synthetic oligonucleotide
  Antisense strand to SEQ ID NO: 1780401
caauguauacgaguuaacu

SEQ ID NO: 1780403 - RNA, 19 nt, Artificial Sequence
  Description of Artificial Sequence: Synthetic oligonucleotide
  Sense strand starting at position 1064 of SEQ ID NO: 1562892
acucguauacauugauucu

SEQ ID NO: 1780404 - RNA, 19 nt, Artificial Sequence
  Description of Artificial Sequence: Synthetic oligonucleotide
  Antisense strand to SEQ ID NO: 1780403
agaaucaauguauacgagu

SEQ ID NO: 1780405 - RNA, 19 nt, Artificial Sequence
  Description of Artificial Sequence: Synthetic oligonucleotide
  Sense strand starting at position 1184 of SEQ ID NO: 1562892
gguagcuuugugucucgau

SEQ ID NO: 1780406 - RNA, 19 nt, Artificial Sequence
  Description of Artificial Sequence: Synthetic oligonucleotide
  Antisense strand to SEQ ID NO: 1780405
aucgagacacaaagcuacc

SEQ ID NO: 1780407 - RNA, 19 nt, Artificial Sequence
  Description of Artificial Sequence: Synthetic oligonucleotide
  Sense strand starting at position 2010 of SEQ ID NO: 1562892
cgugaauggccucaagaug

SEQ ID NO: 1780408 - RNA, 19 nt, Artificial Sequence
  Description of Artificial Sequence: Synthetic oligonucleotide
  Antisense strand to SEQ ID NO: 1780407
caucuugaggccauucacg

SEQ ID NO: 1780409 - RNA, 19 nt, Artificial Sequence
  Description of Artificial Sequence: Synthetic oligonucleotide
  Sense strand starting at position 2018 of SEQ ID NO: 1562892
gccucaagaugucucacau

SEQ ID NO: 1780410 - RNA, 19 nt, Artificial Sequence
  Description of Artificial Sequence: Synthetic oligonucleotide
  Antisense strand to SEQ ID NO: 1780409
augugagacaucuugaggc

SEQ ID NO: 1780411 - RNA, 19 nt, Artificial Sequence
  Description of Artificial Sequence: Synthetic oligonucleotide
  Sense strand starting at position 2522 of SEQ ID NO: 1562892
auccuauugugauugauua

SEQ ID NO: 1780412 - RNA, 19 nt, Artificial Sequence
  Description of Artificial Sequence: Synthetic oligonucleotide
  Antisense strand to SEQ ID NO: 1780411
uaaucaaucacaauaggau

SEQ ID NO: 1780413 - RNA, 19 nt, Artificial Sequence
  Description of Artificial Sequence: Synthetic oligonucleotide
  Sense strand starting at position 2523 of SEQ ID NO: 1562892
uccuauugugauugauuau

SEQ ID NO: 1780414 - RNA, 19 nt, Artificial Sequence
  Description of Artificial Sequence: Synthetic oligonucleotide
  Antisense strand to SEQ ID NO: 1780413
auaaucaaucacaauagga

SEQ ID NO: 1780415 - RNA, 19 nt, Artificial Sequence
  Description of Artificial Sequence: Synthetic oligonucleotide
  Sense strand starting at position 2532 of SEQ ID NO: 1562892
gauugauuauauguuugac

SEQ ID NO: 1780416 - RNA, 19 nt, Artificial Sequence
  Description of Artificial Sequence: Synthetic oligonucleotide
  Antisense strand to SEQ ID NO: 1780415
gucaaacauauaaucaauc

SEQ ID NO: 1780417 - RNA, 19 nt, Artificial Sequence
  Description of Artificial Sequence: Synthetic oligonucleotide
  Sense strand starting at position 2538 of SEQ ID NO: 1562892
uuauauguuugacuccuca

SEQ ID NO: 1780418 - RNA, 19 nt, Artificial Sequence
  Description of Artificial Sequence: Synthetic oligonucleotide
  Antisense strand to SEQ ID NO: 1780417
ugaggagucaaacauauaa

SEQ ID NO: 1780419 - RNA, 19 nt, Artificial Sequence
  Description of Artificial Sequence: Synthetic oligonucleotide
  Sense strand starting at position 2558 of SEQ ID NO: 1562892
cagacaagaucuccguuaa

SEQ ID NO: 1780420 - RNA, 19 nt, Artificial Sequence
  Description of Artificial Sequence: Synthetic oligonucleotide
  Antisense strand to SEQ ID NO: 1780419
uuaacggagaucuugucug

SEQ ID NO: 1780421 - RNA, 19 nt, Artificial Sequence
  Description of Artificial Sequence: Synthetic oligonucleotide
  Sense strand starting at position 2559 of SEQ ID NO: 1562892
agacaagaucuccguuaau

SEQ ID NO: 1780422 - RNA, 19 nt, Artificial Sequence
  Description of Artificial Sequence: Synthetic oligonucleotide
  Antisense strand to SEQ ID NO: 1780421
auuaacggagaucuugucu

SEQ ID NO: 1780423 - RNA, 19 nt, Artificial Sequence
  Description of Artificial Sequence: Synthetic oligonucleotide
  Sense strand starting at position 2682 of SEQ ID NO: 1562892
ccugccauccuagagcuua

SEQ ID NO: 1780424 - RNA, 19 nt, Artificial Sequence
  Description of Artificial Sequence: Synthetic oligonucleotide
  Antisense strand to SEQ ID NO: 1780423
uaagcucuaggauggcagg

SEQ ID NO: 1780425 - RNA, 19 nt, Artificial Sequence
  Description of Artificial Sequence: Synthetic oligonucleotide
  Sense strand starting at position 3058 of SEQ ID NO: 1562892
cugggaccugucuaugagu

SEQ ID NO: 1780426 - RNA, 19 nt, Artificial Sequence
  Description of Artificial Sequence: Synthetic oligonucleotide
  Antisense strand to SEQ ID NO: 1780425
acucauagacaggucccag

SEQ ID NO: 1780427 - RNA, 19 nt, Artificial Sequence
  Description of Artificial Sequence: Synthetic oligonucleotide
  Sense strand starting at position 3060 of SEQ ID NO: 1562892
gggaccugucuaugagucu

SEQ ID NO: 1780428 - RNA, 19 nt, Artificial Sequence
  Description of Artificial Sequence: Synthetic oligonucleotide
  Antisense strand to SEQ ID NO: 1780427
agacucauagacagguccc

SEQ ID NO: 1780429 - RNA, 19 nt, Artificial Sequence
  Description of Artificial Sequence: Synthetic oligonucleotide
  Sense strand starting at position 3069 of SEQ ID NO: 1562892
cuaugagucugagcuuaga

SEQ ID NO: 1780430 - RNA, 19 nt, Artificial Sequence
  Description of Artificial Sequence: Synthetic oligonucleotide
  Antisense strand to SEQ ID NO: 1780429
ucuaagcucagacucauag

SEQ ID NO: 1780431 - RNA, 19 nt, Artificial Sequence
  Description of Artificial Sequence: Synthetic oligonucleotide
  Sense strand starting at position 3175 of SEQ ID NO: 1562892
cuaggauuacguugagcaa

SEQ ID NO: 1780432 - RNA, 19 nt, Artificial Sequence
  Description of Artificial Sequence: Synthetic oligonucleotide
  Antisense strand to SEQ ID NO: 1780431
uugcucaacguaauccuag

SEQ ID NO: 1780433 - RNA, 19 nt, Artificial Sequence
  Description of Artificial Sequence: Synthetic oligonucleotide
  Sense strand starting at position 3176 of SEQ ID NO: 1562892
uaggauuacguugagcaau

SEQ ID NO: 1780434 - RNA, 19 nt, Artificial Sequence
  Description of Artificial Sequence: Synthetic oligonucleotide
  Antisense strand to SEQ ID NO: 1780433
auugcucaacguaauccua

SEQ ID NO: 1780435 - RNA, 19 nt, Artificial Sequence
  Description of Artificial Sequence: Synthetic oligonucleotide
  Sense strand starting at position 3178 of SEQ ID NO: 1562892
ggauuacguugagcaauac

SEQ ID NO: 1780436 - RNA, 19 nt, Artificial Sequence
  Description of Artificial Sequence: Synthetic oligonucleotide
  Antisense strand to SEQ ID NO: 1780435
guauugcucaacguaaucc

SEQ ID NO: 1780437 - RNA, 19 nt, Artificial Sequence
  Description of Artificial Sequence: Synthetic oligonucleotide
  Sense strand starting at position 3179 of SEQ ID NO: 1562892
gauuacguugagcaauaca

SEQ ID NO: 1780438 - RNA, 19 nt, Artificial Sequence
  Description of Artificial Sequence: Synthetic oligonucleotide
  Antisense strand to SEQ ID NO: 1780437
uguauugcucaacguaauc

SEQ ID NO: 1780439 - RNA, 19 nt, Artificial Sequence
  Description of Artificial Sequence: Synthetic oligonucleotide
  Sense strand starting at position 3259 of SEQ ID NO: 1562892
ccaggugucaagugaagaa

SEQ ID NO: 1780440 - RNA, 19 nt, Artificial Sequence
  Description of Artificial Sequence: Synthetic oligonucleotide
  Antisense strand to SEQ ID NO: 1780439
uucuucacuugacaccugg

SEQ ID NO: 1780441 - RNA, 19 nt, Artificial Sequence
  Description of Artificial Sequence: Synthetic oligonucleotide
  Sense strand starting at position 3694 of SEQ ID NO: 1562892
aucuguguuccauaaaugc

SEQ ID NO: 1780442 - RNA, 19 nt, Artificial Sequence
  Description of Artificial Sequence: Synthetic oligonucleotide
  Antisense strand to SEQ ID NO: 1780441
gcauuuauggaacacagau

SEQ ID NO: 1780443 - RNA, 19 nt, Artificial Sequence
  Description of Artificial Sequence: Synthetic oligonucleotide
  Sense strand starting at position 3836 of SEQ ID NO: 1562892
uuggacaguuaguccauua

SEQ ID NO: 1780444 - RNA, 19 nt, Artificial Sequence
  Description of Artificial Sequence: Synthetic oligonucleotide
  Antisense strand to SEQ ID NO: 1780443
uaauggacuaacuguccaa

SEQ ID NO: 1780445 - RNA, 19 nt, Artificial Sequence
  Description of Artificial Sequence: Synthetic oligonucleotide
  Sense strand starting at position 3927 of SEQ ID NO: 1562892
ugcacugagucacuuaauu

SEQ ID NO: 1780446 - RNA, 19 nt, Artificial Sequence
  Description of Artificial Sequence: Synthetic oligonucleotide
  Antisense strand to SEQ ID NO: 1780445
aauuaagugacucagugca

SEQ ID NO: 1780447 - RNA, 19 nt, Artificial Sequence
  Description of Artificial Sequence: Synthetic oligonucleotide
  Sense strand starting at position 3967 of SEQ ID NO: 1562892
ucuguaaagugggcuaaga

SEQ ID NO: 1780448 - RNA, 19 nt, Artificial Sequence
  Description of Artificial Sequence: Synthetic oligonucleotide
  Antisense strand to SEQ ID NO: 1780447
ucuuagcccacuuuacaga

SEQ ID NO: 1780449 - RNA, 19 nt, Artificial Sequence
  Description of Artificial Sequence: Synthetic oligonucleotide
  Sense strand starting at position 3969 of SEQ ID NO: 1562892
uguaaagugggcuaagaau

SEQ ID NO: 1780450 - RNA, 19 nt, Artificial Sequence
  Description of Artificial Sequence: Synthetic oligonucleotide
  Antisense strand to SEQ ID NO: 1780449
auucuuagcccacuuuaca

SEQ ID NO: 1780451 - RNA, 19 nt, Artificial Sequence
  Description of Artificial Sequence: Synthetic oligonucleotide
  Sense strand starting at position 329 of SEQ ID NO: 1562893
gcaagucagcuguugcuca

SEQ ID NO: 1780452 - RNA, 19 nt, Artificial Sequence
  Description of Artificial Sequence: Synthetic oligonucleotide
  Antisense strand to SEQ ID NO: 1780451
ugagcaacagcugacuugc

SEQ ID NO: 1780453 - RNA, 19 nt, Artificial Sequence
  Description of Artificial Sequence: Synthetic oligonucleotide
  Sense strand starting at position 358 of SEQ ID NO: 1562893
uuguauccaggugaaauca

SEQ ID NO: 1780454 - RNA, 19 nt, Artificial Sequence
  Description of Artificial Sequence: Synthetic oligonucleotide
  Antisense strand to SEQ ID NO: 1780453
ugauuucaccuggauacaa

SEQ ID NO: 1780455 - RNA, 19 nt, Artificial Sequence
  Description of Artificial Sequence: Synthetic oligonucleotide
  Sense strand starting at position 546 of SEQ ID NO: 1562893
cuaguaagguuccuccaga

SEQ ID NO: 1780456 - RNA, 19 nt, Artificial Sequence
  Description of Artificial Sequence: Synthetic oligonucleotide
  Antisense strand to SEQ ID NO: 1780455
ucuggaggaaccuuacuag

SEQ ID NO: 1780457 - RNA, 19 nt, Artificial Sequence
  Description of Artificial Sequence: Synthetic oligonucleotide
  Sense strand starting at position 547 of SEQ ID NO: 1562893
uaguaagguuccuccagac

SEQ ID NO: 1780458 - RNA, 19 nt, Artificial Sequence
  Description of Artificial Sequence: Synthetic oligonucleotide
  Antisense strand to SEQ ID NO: 1780457
gucuggaggaaccuuacua

SEQ ID NO: 1780459 - RNA, 19 nt, Artificial Sequence
  Description of Artificial Sequence: Synthetic oligonucleotide
  Sense strand starting at position 649 of SEQ ID NO: 1562893
cuucuuuguggucaacuuu

SEQ ID NO: 1780460 - RNA, 19 nt, Artificial Sequence
  Description of Artificial Sequence: Synthetic oligonucleotide
  Antisense strand to SEQ ID NO: 1780459
aaaguugaccacaaagaag

SEQ ID NO: 1780461 - RNA, 19 nt, Artificial Sequence
  Description of Artificial Sequence: Synthetic oligonucleotide
  Sense strand starting at position 655 of SEQ ID NO: 1562893
uguggucaacuuuagcuau

SEQ ID NO: 1780462 - RNA, 19 nt, Artificial Sequence
  Description of Artificial Sequence: Synthetic oligonucleotide
  Antisense strand to SEQ ID NO: 1780461
auagcuaaaguugaccaca

SEQ ID NO: 1780463 - RNA, 19 nt, Artificial Sequence
  Description of Artificial Sequence: Synthetic oligonucleotide
  Sense strand starting at position 705 of SEQ ID NO: 1562893
ccaaguuuacaaugcaaag

SEQ ID NO: 1780464 - RNA, 19 nt, Artificial Sequence
  Description of Artificial Sequence: Synthetic oligonucleotide
  Antisense strand to SEQ ID NO: 1780463
cuuugcauuguaaacuugg

SEQ ID NO: 1780465 - RNA, 19 nt, Artificial Sequence
  Description of Artificial Sequence: Synthetic oligonucleotide
  Sense strand starting at position 1141 of SEQ ID NO: 1562893
augucauuguaccuuggaa

SEQ ID NO: 1780466 - RNA, 19 nt, Artificial Sequence
  Description of Artificial Sequence: Synthetic oligonucleotide
  Antisense strand to SEQ ID NO: 1780465
uuccaagguacaaugacau

SEQ ID NO: 1780467 - RNA, 19 nt, Artificial Sequence
  Description of Artificial Sequence: Synthetic oligonucleotide
  Sense strand starting at position 1143 of SEQ ID NO: 1562893
gucauuguaccuuggaaca

SEQ ID NO: 1780468 - RNA, 19 nt, Artificial Sequence
  Description of Artificial Sequence: Synthetic oligonucleotide
  Antisense strand to SEQ ID NO: 1780467
uguuccaagguacaaugac

SEQ ID NO: 1780469 - RNA, 19 nt, Artificial Sequence
  Description of Artificial Sequence: Synthetic oligonucleotide
  Sense strand starting at position 1167 of SEQ ID NO: 1562893
caaauaauuggcuguggga

SEQ ID NO: 1780470 - RNA, 19 nt, Artificial Sequence
  Description of Artificial Sequence: Synthetic oligonucleotide
  Antisense strand to SEQ ID NO: 1780469
ucccacagccaauuauuug

SEQ ID NO: 1780471 - RNA, 19 nt, Artificial Sequence
  Description of Artificial Sequence: Synthetic oligonucleotide
  Sense strand starting at position 1169 of SEQ ID NO: 1562893
aauaauuggcugugggauc

SEQ ID NO: 1780472 - RNA, 19 nt, Artificial Sequence
  Description of Artificial Sequence: Synthetic oligonucleotide
  Antisense strand to SEQ ID NO: 1780471
gaucccacagccaauuauu

SEQ ID NO: 1780473 - RNA, 19 nt, Artificial Sequence
  Description of Artificial Sequence: Synthetic oligonucleotide
  Sense strand starting at position 1270 of SEQ ID NO: 1562893
ugaugaaagcgagguguaa

SEQ ID NO: 1780474 - RNA, 19 nt, Artificial Sequence
  Description of Artificial Sequence: Synthetic oligonucleotide
  Antisense strand to SEQ ID NO: 1780473
uuacaccucgcuuucauca

SEQ ID NO: 1780475 - RNA, 19 nt, Artificial Sequence
  Description of Artificial Sequence: Synthetic oligonucleotide
  Sense strand starting at position 2334 of SEQ ID NO: 1562893
ggaucuguaauguaaugua

SEQ ID NO: 1780476 - RNA, 19 nt, Artificial Sequence
  Description of Artificial Sequence: Synthetic oligonucleotide
  Antisense strand to SEQ ID NO: 1780475
uacauuacauuacagaucc

SEQ ID NO: 1780477 - RNA, 19 nt, Artificial Sequence
  Description of Artificial Sequence: Synthetic oligonucleotide
  Sense strand starting at position 2363 of SEQ ID NO: 1562893
ugacgcagagcugaucaaa

SEQ ID NO: 1780478 - RNA, 19 nt, Artificial Sequence
  Description of Artificial Sequence: Synthetic oligonucleotide
  Antisense strand to SEQ ID NO: 1780477
uuugaucagcucugcguca

SEQ ID NO: 1780479 - RNA, 19 nt, Artificial Sequence
  Description of Artificial Sequence: Synthetic oligonucleotide
  Sense strand starting at position 2366 of SEQ ID NO: 1562893
cgcagagcugaucaaacau

SEQ ID NO: 1780480 - RNA, 19 nt, Artificial Sequence
  Description of Artificial Sequence: Synthetic oligonucleotide
  Antisense strand to SEQ ID NO: 1780479
auguuugaucagcucugcg

SEQ ID NO: 1780481 - RNA, 19 nt, Artificial Sequence
  Description of Artificial Sequence: Synthetic oligonucleotide
  Sense strand starting at position 2387 of SEQ ID NO: 1562893
uggcaaccuuagucuugaa

SEQ ID NO: 1780482 - RNA, 19 nt, Artificial Sequence
  Description of Artificial Sequence: Synthetic oligonucleotide
  Antisense strand to SEQ ID NO: 1780481
uucaagacuaagguugcca

SEQ ID NO: 1780483 - RNA, 19 nt, Artificial Sequence
  Description of Artificial Sequence: Synthetic oligonucleotide
  Sense strand starting at position 2439 of SEQ ID NO: 1562893
uuugcuguaggguaaugaa

SEQ ID NO: 1780484 - RNA, 19 nt, Artificial Sequence
  Description of Artificial Sequence: Synthetic oligonucleotide
  Antisense strand to SEQ ID NO: 1780483
uucauuacccuacagcaaa

SEQ ID NO: 1780485 - RNA, 19 nt, Artificial Sequence
  Description of Artificial Sequence: Synthetic oligonucleotide
  Sense strand starting at position 2452 of SEQ ID NO: 1562893
aaugaauauugccugguga

SEQ ID NO: 1780486 - RNA, 19 nt, Artificial Sequence
  Description of Artificial Sequence: Synthetic oligonucleotide
  Antisense strand to SEQ ID NO: 1780485
ucaccaggcaauauucauu

SEQ ID NO: 1780487 - RNA, 19 nt, Artificial Sequence
  Description of Artificial Sequence: Synthetic oligonucleotide
  Sense strand starting at position 2453 of SEQ ID NO: 1562893
augaauauugccuggugag

SEQ ID NO: 1780488 - RNA, 19 nt, Artificial Sequence
  Description of Artificial Sequence: Synthetic oligonucleotide
  Antisense strand to SEQ ID NO: 1780487
cucaccaggcaauauucau

SEQ ID NO: 1780489 - RNA, 19 nt, Artificial Sequence
  Description of Artificial Sequence: Synthetic oligonucleotide
  Sense strand starting at position 2454 of SEQ ID NO: 1562893
ugaauauugccuggugagg

SEQ ID NO: 1780490 - RNA, 19 nt, Artificial Sequence
  Description of Artificial Sequence: Synthetic oligonucleotide
  Antisense strand to SEQ ID NO: 1780489
ccucaccaggcaauauuca

SEQ ID NO: 1780491 - RNA, 19 nt, Artificial Sequence
  Description of Artificial Sequence: Synthetic oligonucleotide
  Sense strand starting at position 2510 of SEQ ID NO: 1562893
ugagaauauguugguccca

SEQ ID NO: 1780492 - RNA, 19 nt, Artificial Sequence
  Description of Artificial Sequence: Synthetic oligonucleotide
  Antisense strand to SEQ ID NO: 1780491
ugggaccaacauauucuca

SEQ ID NO: 1780493 - RNA, 19 nt, Artificial Sequence
  Description of Artificial Sequence: Synthetic oligonucleotide
  Sense strand starting at position 2511 of SEQ ID NO: 1562893
gagaauauguuggucccaa

SEQ ID NO: 1780494 - RNA, 19 nt, Artificial Sequence
  Description of Artificial Sequence: Synthetic oligonucleotide
  Antisense strand to SEQ ID NO: 1780493
uugggaccaacauauucuc

SEQ ID NO: 1780495 - RNA, 19 nt, Artificial Sequence
  Description of Artificial Sequence: Synthetic oligonucleotide
  Sense strand starting at position 2512 of SEQ ID NO: 1562893
agaauauguuggucccaag

SEQ ID NO: 1780496 - RNA, 19 nt, Artificial Sequence
  Description of Artificial Sequence: Synthetic oligonucleotide
  Antisense strand to SEQ ID NO: 1780495
cuugggaccaacauauucu

SEQ ID NO: 1780497 - RNA, 19 nt, Artificial Sequence
  Description of Artificial Sequence: Synthetic oligonucleotide
  Sense strand starting at position 2647 of SEQ ID NO: 1562893
acguuaaaugcagauacca

SEQ ID NO: 1780498 - RNA, 19 nt, Artificial Sequence
  Description of Artificial Sequence: Synthetic oligonucleotide
  Antisense strand to SEQ ID NO: 1780497
ugguaucugcauuuaacgu

SEQ ID NO: 1780499 - RNA, 19 nt, Artificial Sequence
  Description of Artificial Sequence: Synthetic oligonucleotide
  Sense strand starting at position 2839 of SEQ ID NO: 1562893
ccucaaugccuugaacagu

SEQ ID NO: 1780500 - RNA, 19 nt, Artificial Sequence
  Description of Artificial Sequence: Synthetic oligonucleotide
  Antisense strand to SEQ ID NO: 1780499
acuguucaaggcauugagg

SEQ ID NO: 1780501 - RNA, 19 nt, Artificial Sequence
  Description of Artificial Sequence: Synthetic oligonucleotide
  Sense strand starting at position 2858 of SEQ ID NO: 1562893
gccugucaucuauagguag

SEQ ID NO: 1780502 - RNA, 19 nt, Artificial Sequence
  Description of Artificial Sequence: Synthetic oligonucleotide
  Antisense strand to SEQ ID NO: 1780501
cuaccuauagaugacaggc

SEQ ID NO: 1780503 - RNA, 19 nt, Artificial Sequence
  Description of Artificial Sequence: Synthetic oligonucleotide
  Sense strand starting at position 2862 of SEQ ID NO: 1562893
gucaucuauagguagucaa

SEQ ID NO: 1780504 - RNA, 19 nt, Artificial Sequence
  Description of Artificial Sequence: Synthetic oligonucleotide
  Antisense strand to SEQ ID NO: 1780503
uugacuaccuauagaugac

SEQ ID NO: 1780505 - RNA, 19 nt, Artificial Sequence
  Description of Artificial Sequence: Synthetic oligonucleotide
  Sense strand starting at position 3022 of SEQ ID NO: 1562893
agaagauggaugugugcau

SEQ ID NO: 1780506 - RNA, 19 nt, Artificial Sequence
  Description of Artificial Sequence: Synthetic oligonucleotide
  Antisense strand to SEQ ID NO: 1780505
augcacacauccaucuucu

SEQ ID NO: 1780507 - RNA, 19 nt, Artificial Sequence
  Description of Artificial Sequence: Synthetic oligonucleotide
  Sense strand starting at position 3060 of SEQ ID NO: 1562893
ggauguaugaugugagcag

SEQ ID NO: 1780508 - RNA, 19 nt, Artificial Sequence
  Description of Artificial Sequence: Synthetic oligonucleotide
  Antisense strand to SEQ ID NO: 1780507
cugcucacaucauacaucc

SEQ ID NO: 1780509 - RNA, 19 nt, Artificial Sequence
  Description of Artificial Sequence: Synthetic oligonucleotide
  Sense strand starting at position 3091 of SEQ ID NO: 1562893
ucuaauuucuaggagagca

SEQ ID NO: 1780510 - RNA, 19 nt, Artificial Sequence
  Description of Artificial Sequence: Synthetic oligonucleotide
  Antisense strand to SEQ ID NO: 1780509
ugcucuccuagaaauuaga

SEQ ID NO: 1780511 - RNA, 19 nt, Artificial Sequence
  Description of Artificial Sequence: Synthetic oligonucleotide
  Sense strand starting at position 3121 of SEQ ID NO: 1562893
gaagcuuuggagugaauuc

SEQ ID NO: 1780512 - RNA, 19 nt, Artificial Sequence
  Description of Artificial Sequence: Synthetic oligonucleotide
  Antisense strand to SEQ ID NO: 1780511
gaauucacuccaaagcuuc

SEQ ID NO: 1780513 - RNA, 19 nt, Artificial Sequence
  Description of Artificial Sequence: Synthetic oligonucleotide
  Sense strand starting at position 3290 of SEQ ID NO: 1562893
cucuguucccaguacuuua

SEQ ID NO: 1780514 - RNA, 19 nt, Artificial Sequence
  Description of Artificial Sequence: Synthetic oligonucleotide
  Antisense strand to SEQ ID NO: 1780513
uaaaguacugggaacagag

SEQ ID NO: 1780515 - RNA, 19 nt, Artificial Sequence
  Description of Artificial Sequence: Synthetic oligonucleotide
  Sense strand starting at position 3368 of SEQ ID NO: 1562893
guguaacuugcucauggaa

SEQ ID NO: 1780516 - RNA, 19 nt, Artificial Sequence
  Description of Artificial Sequence: Synthetic oligonucleotide
  Antisense strand to SEQ ID NO: 1780515
uuccaugagcaaguuacac

SEQ ID NO: 1780517 - RNA, 19 nt, Artificial Sequence
  Description of Artificial Sequence: Synthetic oligonucleotide
  Sense strand starting at position 3441 of SEQ ID NO: 1562893
aguagagcucaauacacau

SEQ ID NO: 1780518 - RNA, 19 nt, Artificial Sequence
  Description of Artificial Sequence: Synthetic oligonucleotide
  Antisense strand to SEQ ID NO: 1780517
auguguauugagcucuacu

SEQ ID NO: 1780519 - RNA, 19 nt, Artificial Sequence
  Description of Artificial Sequence: Synthetic oligonucleotide
  Sense strand starting at position 3511 of SEQ ID NO: 1562893
gugugaccucggcaauuua

SEQ ID NO: 1780520 - RNA, 19 nt, Artificial Sequence
  Description of Artificial Sequence: Synthetic oligonucleotide
  Antisense strand to SEQ ID NO: 1780519
uaaauugccgaggucacac

SEQ ID NO: 1780521 - RNA, 19 nt, Artificial Sequence
  Description of Artificial Sequence: Synthetic oligonucleotide
  Sense strand starting at position 3565 of SEQ ID NO: 1562893
gggauaacaguuuguccuu

SEQ ID NO: 1780522 - RNA, 19 nt, Artificial Sequence
  Description of Artificial Sequence: Synthetic oligonucleotide
  Antisense strand to SEQ ID NO: 1780521
aaggacaaacuguuauccc

SEQ ID NO: 1780523 - RNA, 19 nt, Artificial Sequence
  Description of Artificial Sequence: Synthetic oligonucleotide
  Sense strand starting at position 3566 of SEQ ID NO: 1562893
ggauaacaguuuguccuua

SEQ ID NO: 1780524 - RNA, 19 nt, Artificial Sequence
  Description of Artificial Sequence: Synthetic oligonucleotide
  Antisense strand to SEQ ID NO: 1780523
uaaggacaaacuguuaucc

SEQ ID NO: 1780525 - RNA, 19 nt, Artificial Sequence
  Description of Artificial Sequence: Synthetic oligonucleotide
  Sense strand starting at position 3611 of SEQ ID NO: 1562893
aguaauauugcgcauaaag

SEQ ID NO: 1780526 - RNA, 19 nt, Artificial Sequence
  Description of Artificial Sequence: Synthetic oligonucleotide
  Antisense strand to SEQ ID NO: 1780525
cuuuaugcgcaauauuacu

SEQ ID NO: 1780527 - RNA, 19 nt, Artificial Sequence
  Description of Artificial Sequence: Synthetic oligonucleotide
  Sense strand starting at position 3948 of SEQ ID NO: 1562893
cauaucaguccguauguaa

SEQ ID NO: 1780528 - RNA, 19 nt, Artificial Sequence
  Description of Artificial Sequence: Synthetic oligonucleotide
  Antisense strand to SEQ ID NO: 1780527
uuacauacggacugauaug

SEQ ID NO: 1780529 - RNA, 19 nt, Artificial Sequence
  Description of Artificial Sequence: Synthetic oligonucleotide
  Sense strand starting at position 3969 of SEQ ID NO: 1562893
acuguuuagcacuauuaug

SEQ ID NO: 1780530 - RNA, 19 nt, Artificial Sequence
  Description of Artificial Sequence: Synthetic oligonucleotide
  Antisense strand to SEQ ID NO: 1780529
cauaauagugcuaaacagu

SEQ ID NO: 1780531 - RNA, 19 nt, Artificial Sequence
  Description of Artificial Sequence: Synthetic oligonucleotide
  Sense strand starting at position 255 of SEQ ID NO: 1562894
gcaagucagcuguugcuca

SEQ ID NO: 1780532 - RNA, 19 nt, Artificial Sequence
  Description of Artificial Sequence: Synthetic oligonucleotide
  Antisense strand to SEQ ID NO: 1780531
ugagcaacagcugacuugc

SEQ ID NO: 1780533 - RNA, 19 nt, Artificial Sequence
  Description of Artificial Sequence: Synthetic oligonucleotide
  Sense strand starting at position 284 of SEQ ID NO: 1562894
uuguauccaggugaaauca

SEQ ID NO: 1780534 - RNA, 19 nt, Artificial Sequence
  Description of Artificial Sequence: Synthetic oligonucleotide
  Antisense strand to SEQ ID NO: 1780533
ugauuucaccuggauacaa

SEQ ID NO: 1780535 - RNA, 19 nt, Artificial Sequence
  Description of Artificial Sequence: Synthetic oligonucleotide
  Sense strand starting at position 472 of SEQ ID NO: 1562894
cuaguaagguuccuccaga

SEQ ID NO: 1780536 - RNA, 19 nt, Artificial Sequence
  Description of Artificial Sequence: Synthetic oligonucleotide
  Antisense strand to SEQ ID NO: 1780535
ucuggaggaaccuuacuag

SEQ ID NO: 1780537 - RNA, 19 nt, Artificial Sequence
  Description of Artificial Sequence: Synthetic oligonucleotide
  Sense strand starting at position 473 of SEQ ID NO: 1562894
uaguaagguuccuccagac

SEQ ID NO: 1780538 - RNA, 19 nt, Artificial Sequence
  Description of Artificial Sequence: Synthetic oligonucleotide
  Antisense strand to SEQ ID NO: 1780537
gucuggaggaaccuuacua

SEQ ID NO: 1780539 - RNA, 19 nt, Artificial Sequence
  Description of Artificial Sequence: Synthetic oligonucleotide
  Sense strand starting at position 575 of SEQ ID NO: 1562894
cuucuuuguggucaacuuu

SEQ ID NO: 1780540 - RNA, 19 nt, Artificial Sequence
  Description of Artificial Sequence: Synthetic oligonucleotide
  Antisense strand to SEQ ID NO: 1780539
aaaguugaccacaaagaag

SEQ ID NO: 1780541 - RNA, 19 nt, Artificial Sequence
  Description of Artificial Sequence: Synthetic oligonucleotide
  Sense strand starting at position 631 of SEQ ID NO: 1562894
ccaaguuuacaaugcaaag

SEQ ID NO: 1780542 - RNA, 19 nt, Artificial Sequence
  Description of Artificial Sequence: Synthetic oligonucleotide
  Antisense strand to SEQ ID NO: 1780541
cuuugcauuguaaacuugg

SEQ ID NO: 1780543 - RNA, 19 nt, Artificial Sequence
  Description of Artificial Sequence: Synthetic oligonucleotide
  Sense strand starting at position 1067 of SEQ ID NO: 1562894
augucauuguaccuuggaa

SEQ ID NO: 1780544 - RNA, 19 nt, Artificial Sequence
  Description of Artificial Sequence: Synthetic oligonucleotide
  Antisense strand to SEQ ID NO: 1780543
uuccaagguacaaugacau

SEQ ID NO: 1780545 - RNA, 19 nt, Artificial Sequence
  Description of Artificial Sequence: Synthetic oligonucleotide
  Sense strand starting at position 1069 of SEQ ID NO: 1562894
gucauuguaccuuggaaca

SEQ ID NO: 1780546 - RNA, 19 nt, Artificial Sequence
  Description of Artificial Sequence: Synthetic oligonucleotide
  Antisense strand to SEQ ID NO: 1780545
uguuccaagguacaaugac

SEQ ID NO: 1780547 - RNA, 19 nt, Artificial Sequence
  Description of Artificial Sequence: Synthetic oligonucleotide
  Sense strand starting at position 1093 of SEQ ID NO: 1562894
caaauaauuggcuguggga

SEQ ID NO: 1780548 - RNA, 19 nt, Artificial Sequence
  Description of Artificial Sequence: Synthetic oligonucleotide
  Antisense strand to SEQ ID NO: 1780547
ucccacagccaauuauuug

SEQ ID NO: 1780549 - RNA, 19 nt, Artificial Sequence
  Description of Artificial Sequence: Synthetic oligonucleotide
  Sense strand starting at position 1095 of SEQ ID NO: 1562894
aauaauuggcugugggauc

SEQ ID NO: 1780550 - RNA, 19 nt, Artificial Sequence
  Description of Artificial Sequence: Synthetic oligonucleotide
  Antisense strand to SEQ ID NO: 1780549
gaucccacagccaauuauu

SEQ ID NO: 1780551 - RNA, 19 nt, Artificial Sequence
  Description of Artificial Sequence: Synthetic oligonucleotide
  Sense strand starting at position 1196 of SEQ ID NO: 1562894
ugaugaaagcgagguguaa

SEQ ID NO: 1780552 - RNA, 19 nt, Artificial Sequence
  Description of Artificial Sequence: Synthetic oligonucleotide
  Antisense strand to SEQ ID NO: 1780551
uuacaccucgcuuucauca

SEQ ID NO: 1780553 - RNA, 19 nt, Artificial Sequence
  Description of Artificial Sequence: Synthetic oligonucleotide
  Sense strand starting at position 2260 of SEQ ID NO: 1562894
ggaucuguaauguaaugua

SEQ ID NO: 1780554 - RNA, 19 nt, Artificial Sequence
  Description of Artificial Sequence: Synthetic oligonucleotide
  Antisense strand to SEQ ID NO: 1780553
uacauuacauuacagaucc

SEQ ID NO: 1780555 - RNA, 19 nt, Artificial Sequence
  Description of Artificial Sequence: Synthetic oligonucleotide
  Sense strand starting at position 2289 of SEQ ID NO: 1562894
ugacgcagagcugaucaaa

SEQ ID NO: 1780556 - RNA, 19 nt, Artificial Sequence
  Description of Artificial Sequence: Synthetic oligonucleotide
  Antisense strand to SEQ ID NO: 1780555
uuugaucagcucugcguca

SEQ ID NO: 1780557 - RNA, 19 nt, Artificial Sequence
  Description of Artificial Sequence: Synthetic oligonucleotide
  Sense strand starting at position 2292 of SEQ ID NO: 1562894
cgcagagcugaucaaacau

SEQ ID NO: 1780558 - RNA, 19 nt, Artificial Sequence
  Description of Artificial Sequence: Synthetic oligonucleotide
  Antisense strand to SEQ ID NO: 1780557
auguuugaucagcucugcg

SEQ ID NO: 1780559 - RNA, 19 nt, Artificial Sequence
  Description of Artificial Sequence: Synthetic oligonucleotide
  Sense strand starting at position 2313 of SEQ ID NO: 1562894
uggcaaccuuagucuugaa

SEQ ID NO: 1780560 - RNA, 19 nt, Artificial Sequence
  Description of Artificial Sequence: Synthetic oligonucleotide
  Antisense strand to SEQ ID NO: 1780559
uucaagacuaagguugcca

SEQ ID NO: 1780561 - RNA, 19 nt, Artificial Sequence
  Description of Artificial Sequence: Synthetic oligonucleotide
  Sense strand starting at position 2365 of SEQ ID NO: 1562894
uuugcuguaggguaaugaa

SEQ ID NO: 1780562 - RNA, 19 nt, Artificial Sequence
  Description of Artificial Sequence: Synthetic oligonucleotide
  Antisense strand to SEQ ID NO: 1780561
uucauuacccuacagcaaa

SEQ ID NO: 1780563 - RNA, 19 nt, Artificial Sequence
  Description of Artificial Sequence: Synthetic oligonucleotide
  Sense strand starting at position 2378 of SEQ ID NO: 1562894
aaugaauauugccugguga

SEQ ID NO: 1780564 - RNA, 19 nt, Artificial Sequence
  Description of Artificial Sequence: Synthetic oligonucleotide
  Antisense strand to SEQ ID NO: 1780563
ucaccaggcaauauucauu

SEQ ID NO: 1780565 - RNA, 19 nt, Artificial Sequence
  Description of Artificial Sequence: Synthetic oligonucleotide
  Sense strand starting at position 2379 of SEQ ID NO: 1562894
augaauauugccuggugag

SEQ ID NO: 1780566 - RNA, 19 nt, Artificial Sequence
  Description of Artificial Sequence: Synthetic oligonucleotide
  Antisense strand to SEQ ID NO: 1780565
cucaccaggcaauauucau

SEQ ID NO: 1780567 - RNA, 19 nt, Artificial Sequence
  Description of Artificial Sequence: Synthetic oligonucleotide
  Sense strand starting at position 2380 of SEQ ID NO: 1562894
ugaauauugccuggugagg

SEQ ID NO: 1780568 - RNA, 19 nt, Artificial Sequence
  Description of Artificial Sequence: Synthetic oligonucleotide
  Antisense strand to SEQ ID NO: 1780567
ccucaccaggcaauauuca

SEQ ID NO: 1780569 - RNA, 19 nt, Artificial Sequence
  Description of Artificial Sequence: Synthetic oligonucleotide
  Sense strand starting at position 2436 of SEQ ID NO: 1562894
ugagaauauguugguccca

SEQ ID NO: 1780570 - RNA, 19 nt, Artificial Sequence
  Description of Artificial Sequence: Synthetic oligonucleotide
  Antisense strand to SEQ ID NO: 1780569
ugggaccaacauauucuca

SEQ ID NO: 1780571 - RNA, 19 nt, Artificial Sequence
  Description of Artificial Sequence: Synthetic oligonucleotide
  Sense strand starting at position 2437 of SEQ ID NO: 1562894
gagaauauguuggucccaa

SEQ ID NO: 1780572 - RNA, 19 nt, Artificial Sequence
  Description of Artificial Sequence: Synthetic oligonucleotide
  Antisense strand to SEQ ID NO: 1780571
uugggaccaacauauucuc

SEQ ID NO: 1780573 - RNA, 19 nt, Artificial Sequence
  Description of Artificial Sequence: Synthetic oligonucleotide
  Sense strand starting at position 2438 of SEQ ID NO: 1562894
agaauauguuggucccaag

SEQ ID NO: 1780574 - RNA, 19 nt, Artificial Sequence
  Description of Artificial Sequence: Synthetic oligonucleotide
  Antisense strand to SEQ ID NO: 1780573
cuugggaccaacauauucu

SEQ ID NO: 1780575 - RNA, 19 nt, Artificial Sequence
  Description of Artificial Sequence: Synthetic oligonucleotide
  Sense strand starting at position 2573 of SEQ ID NO: 1562894
acguuaaaugcagauacca

SEQ ID NO: 1780576 - RNA, 19 nt, Artificial Sequence
  Description of Artificial Sequence: Synthetic oligonucleotide
  Antisense strand to SEQ ID NO: 1780575
ugguaucugcauuuaacgu

SEQ ID NO: 1780577 - RNA, 19 nt, Artificial Sequence
  Description of Artificial Sequence: Synthetic oligonucleotide
  Sense strand starting at position 2765 of SEQ ID NO: 1562894
ccucaaugccuugaacagu

SEQ ID NO: 1780578 - RNA, 19 nt, Artificial Sequence
  Description of Artificial Sequence: Synthetic oligonucleotide
  Antisense strand to SEQ ID NO: 1780577
acuguucaaggcauugagg

SEQ ID NO: 1780579 - RNA, 19 nt, Artificial Sequence
  Description of Artificial Sequence: Synthetic oligonucleotide
  Sense strand starting at position 2784 of SEQ ID NO: 1562894
gccugucaucuauagguag

SEQ ID NO: 1780580 - RNA, 19 nt, Artificial Sequence
  Description of Artificial Sequence: Synthetic oligonucleotide
  Antisense strand to SEQ ID NO: 1780579
cuaccuauagaugacaggc

SEQ ID NO: 1780581 - RNA, 19 nt, Artificial Sequence
  Description of Artificial Sequence: Synthetic oligonucleotide
  Sense strand starting at position 2788 of SEQ ID NO: 1562894
gucaucuauagguagucaa

SEQ ID NO: 1780582 - RNA, 19 nt, Artificial Sequence
  Description of Artificial Sequence: Synthetic oligonucleotide
  Antisense strand to SEQ ID NO: 1780581
uugacuaccuauagaugac

SEQ ID NO: 1780583 - RNA, 19 nt, Artificial Sequence
  Description of Artificial Sequence: Synthetic oligonucleotide
  Sense strand starting at position 2948 of SEQ ID NO: 1562894
agaagauggaugugugcau

SEQ ID NO: 1780584 - RNA, 19 nt, Artificial Sequence
  Description of Artificial Sequence: Synthetic oligonucleotide
  Antisense strand to SEQ ID NO: 1780583
augcacacauccaucuucu

SEQ ID NO: 1780585 - RNA, 19 nt, Artificial Sequence
  Description of Artificial Sequence: Synthetic oligonucleotide
  Sense strand starting at position 2986 of SEQ ID NO: 1562894
ggauguaugaugugagcag

SEQ ID NO: 1780586 - RNA, 19 nt, Artificial Sequence
  Description of Artificial Sequence: Synthetic oligonucleotide
  Antisense strand to SEQ ID NO: 1780585
cugcucacaucauacaucc

SEQ ID NO: 1780587 - RNA, 19 nt, Artificial Sequence
  Description of Artificial Sequence: Synthetic oligonucleotide
  Sense strand starting at position 3017 of SEQ ID NO: 1562894
ucuaauuucuaggagagca

SEQ ID NO: 1780588 - RNA, 19 nt, Artificial Sequence
  Description of Artificial Sequence: Synthetic oligonucleotide
  Antisense strand to SEQ ID NO: 1780587
ugcucuccuagaaauuaga

SEQ ID NO: 1780589 - RNA, 19 nt, Artificial Sequence
  Description of Artificial Sequence: Synthetic oligonucleotide
  Sense strand starting at position 3047 of SEQ ID NO: 1562894
gaagcuuuggagugaauuc

SEQ ID NO: 1780590 - RNA, 19 nt, Artificial Sequence
  Description of Artificial Sequence: Synthetic oligonucleotide
  Antisense strand to SEQ ID NO: 1780589
gaauucacuccaaagcuuc

SEQ ID NO: 1780591 - RNA, 19 nt, Artificial Sequence
  Description of Artificial Sequence: Synthetic oligonucleotide
  Sense strand starting at position 3216 of SEQ ID NO: 1562894
cucuguucccaguacuuua

SEQ ID NO: 1780592 - RNA, 19 nt, Artificial Sequence
  Description of Artificial Sequence: Synthetic oligonucleotide
  Antisense strand to SEQ ID NO: 1780591
uaaaguacugggaacagag

SEQ ID NO: 1780593 - RNA, 19 nt, Artificial Sequence
  Description of Artificial Sequence: Synthetic oligonucleotide
  Sense strand starting at position 3294 of SEQ ID NO: 1562894
guguaacuugcucauggaa

SEQ ID NO: 1780594 - RNA, 19 nt, Artificial Sequence
  Description of Artificial Sequence: Synthetic oligonucleotide
  Antisense strand to SEQ ID NO: 1780593
uuccaugagcaaguuacac

SEQ ID NO: 1780595 - RNA, 19 nt, Artificial Sequence
  Description of Artificial Sequence: Synthetic oligonucleotide
  Sense strand starting at position 3367 of SEQ ID NO: 1562894
aguagagcucaauacacau

SEQ ID NO: 1780596 - RNA, 19 nt, Artificial Sequence
  Description of Artificial Sequence: Synthetic oligonucleotide
  Antisense strand to SEQ ID NO: 1780595
auguguauugagcucuacu

SEQ ID NO: 1780597 - RNA, 19 nt, Artificial Sequence
  Description of Artificial Sequence: Synthetic oligonucleotide
  Sense strand starting at position 3437 of SEQ ID NO: 1562894
gugugaccucggcaauuua

SEQ ID NO: 1780598 - RNA, 19 nt, Artificial Sequence
  Description of Artificial Sequence: Synthetic oligonucleotide
  Antisense strand to SEQ ID NO: 1780597
uaaauugccgaggucacac

SEQ ID NO: 1780599 - RNA, 19 nt, Artificial Sequence
  Description of Artificial Sequence: Synthetic oligonucleotide
  Sense strand starting at position 3491 of SEQ ID NO: 1562894
gggauaacaguuuguccuu

SEQ ID NO: 1780600 - RNA, 19 nt, Artificial Sequence
  Description of Artificial Sequence: Synthetic oligonucleotide
  Antisense strand to SEQ ID NO: 1780599
aaggacaaacuguuauccc

SEQ ID NO: 1780601 - RNA, 19 nt, Artificial Sequence
  Description of Artificial Sequence: Synthetic oligonucleotide
  Sense strand starting at position 3492 of SEQ ID NO: 1562894
ggauaacaguuuguccuua

SEQ ID NO: 1780602 - RNA, 19 nt, Artificial Sequence
  Description of Artificial Sequence: Synthetic oligonucleotide
  Antisense strand to SEQ ID NO: 1780601
uaaggacaaacuguuaucc

SEQ ID NO: 1780603 - RNA, 19 nt, Artificial Sequence
  Description of Artificial Sequence: Synthetic oligonucleotide
  Sense strand starting at position 3537 of SEQ ID NO: 1562894
aguaauauugcgcauaaag

SEQ ID NO: 1780604 - RNA, 19 nt, Artificial Sequence
  Description of Artificial Sequence: Synthetic oligonucleotide
  Antisense strand to SEQ ID NO: 1780603
cuuuaugcgcaauauuacu

SEQ ID NO: 1780605 - RNA, 19 nt, Artificial Sequence
  Description of Artificial Sequence: Synthetic oligonucleotide
  Sense strand starting at position 3874 of SEQ ID NO: 1562894
cauaucaguccguauguaa

SEQ ID NO: 1780606 - RNA, 19 nt, Artificial Sequence
  Description of Artificial Sequence: Synthetic oligonucleotide
  Antisense strand to SEQ ID NO: 1780605
uuacauacggacugauaug

SEQ ID NO: 1780607 - RNA, 19 nt, Artificial Sequence
  Description of Artificial Sequence: Synthetic oligonucleotide
  Sense strand starting at position 3895 of SEQ ID NO: 1562894
acuguuuagcacuauuaug

SEQ ID NO: 1780608 - RNA, 19 nt, Artificial Sequence
  Description of Artificial Sequence: Synthetic oligonucleotide
  Antisense strand to SEQ ID NO: 1780607
cauaauagugcuaaacagu

SEQ ID NO: 1780609 - RNA, 19 nt, Artificial Sequence
  Description of Artificial Sequence: Synthetic oligonucleotide
  Sense strand starting at position 3960 of SEQ ID NO: 1562894
ccucuaugucuacaaguac

SEQ ID NO: 1780610 - RNA, 19 nt, Artificial Sequence
  Description of Artificial Sequence: Synthetic oligonucleotide
  Antisense strand to SEQ ID NO: 1780609
guacuuguagacauagagg

SEQ ID NO: 1780611 - RNA, 19 nt, Artificial Sequence
  Description of Artificial Sequence: Synthetic oligonucleotide
  Sense strand starting at position 223 of SEQ ID NO: 1562895
aaucgcuuccaacgaguuu

SEQ ID NO: 1780612 - RNA, 19 nt, Artificial Sequence
  Description of Artificial Sequence: Synthetic oligonucleotide
  Antisense strand to SEQ ID NO: 1780611
aaacucguuggaagcgauu

SEQ ID NO: 1780613 - RNA, 19 nt, Artificial Sequence
  Description of Artificial Sequence: Synthetic oligonucleotide
  Sense strand starting at position 315 of SEQ ID NO: 1562895
gggagaaaucgccacguuc

SEQ ID NO: 1780614 - RNA, 19 nt, Artificial Sequence
  Description of Artificial Sequence: Synthetic oligonucleotide
  Antisense strand to SEQ ID NO: 1780613
gaacguggcgauuucuccc

SEQ ID NO: 1780615 - RNA, 19 nt, Artificial Sequence
  Description of Artificial Sequence: Synthetic oligonucleotide
  Sense strand starting at position 317 of SEQ ID NO: 1562895
gagaaaucgccacguucca

SEQ ID NO: 1780616 - RNA, 19 nt, Artificial Sequence
  Description of Artificial Sequence: Synthetic oligonucleotide
  Antisense strand to SEQ ID NO: 1780615
uggaacguggcgauuucuc

SEQ ID NO: 1780617 - RNA, 19 nt, Artificial Sequence
  Description of Artificial Sequence: Synthetic oligonucleotide
  Sense strand starting at position 447 of SEQ ID NO: 1562895
ggcucuuucuuuccaggaa

SEQ ID NO: 1780618 - RNA, 19 nt, Artificial Sequence
  Description of Artificial Sequence: Synthetic oligonucleotide
  Antisense strand to SEQ ID NO: 1780617
uuccuggaaagaaagagcc

SEQ ID NO: 1780619 - RNA, 19 nt, Artificial Sequence
  Description of Artificial Sequence: Synthetic oligonucleotide
  Sense strand starting at position 1047 of SEQ ID NO: 1562895
ucgagcaaagcucauaaau

SEQ ID NO: 1780620 - RNA, 19 nt, Artificial Sequence
  Description of Artificial Sequence: Synthetic oligonucleotide
  Antisense strand to SEQ ID NO: 1780619
auuuaugagcuuugcucga

SEQ ID NO: 1780621 - RNA, 19 nt, Artificial Sequence
  Description of Artificial Sequence: Synthetic oligonucleotide
  Sense strand starting at position 1304 of SEQ ID NO: 1562895
cccuacaucgcuuaagaga

SEQ ID NO: 1780622 - RNA, 19 nt, Artificial Sequence
  Description of Artificial Sequence: Synthetic oligonucleotide
  Antisense strand to SEQ ID NO: 1780621
ucucuuaagcgauguaggg

SEQ ID NO: 1780623 - RNA, 19 nt, Artificial Sequence
  Description of Artificial Sequence: Synthetic oligonucleotide
  Sense strand starting at position 2444 of SEQ ID NO: 1562895
uccgccucccucugauauu

SEQ ID NO: 1780624 - RNA, 19 nt, Artificial Sequence
  Description of Artificial Sequence: Synthetic oligonucleotide
  Antisense strand to SEQ ID NO: 1780623
aauaucagagggaggcgga

SEQ ID NO: 1780625 - RNA, 19 nt, Artificial Sequence
  Description of Artificial Sequence: Synthetic oligonucleotide
  Sense strand starting at position 2445 of SEQ ID NO: 1562895
ccgccucccucugauauuu

SEQ ID NO: 1780626 - RNA, 19 nt, Artificial Sequence
  Description of Artificial Sequence: Synthetic oligonucleotide
  Antisense strand to SEQ ID NO: 1780625
aaauaucagagggaggcgg

SEQ ID NO: 1780627 - RNA, 19 nt, Artificial Sequence
  Description of Artificial Sequence: Synthetic oligonucleotide
  Sense strand starting at position 2556 of SEQ ID NO: 1562895
ggccuccguguuguuuaaa

SEQ ID NO: 1780628 - RNA, 19 nt, Artificial Sequence
  Description of Artificial Sequence: Synthetic oligonucleotide
  Antisense strand to SEQ ID NO: 1780627
uuuaaacaacacggaggcc

SEQ ID NO: 1780629 - RNA, 19 nt, Artificial Sequence
  Description of Artificial Sequence: Synthetic oligonucleotide
  Sense strand starting at position 2595 of SEQ ID NO: 1562895
uggcucuuccuuuaaugau

SEQ ID NO: 1780630 - RNA, 19 nt, Artificial Sequence
  Description of Artificial Sequence: Synthetic oligonucleotide
  Antisense strand to SEQ ID NO: 1780629
aucauuaaaggaagagcca

SEQ ID NO: 1780631 - RNA, 19 nt, Artificial Sequence
  Description of Artificial Sequence: Synthetic oligonucleotide
  Sense strand starting at position 2625 of SEQ ID NO: 1562895
cgauuaaacucucaacaga

SEQ ID NO: 1780632 - RNA, 19 nt, Artificial Sequence
  Description of Artificial Sequence: Synthetic oligonucleotide
  Antisense strand to SEQ ID NO: 1780631
ucuguugagaguuuaaucg

SEQ ID NO: 1780633 - RNA, 19 nt, Artificial Sequence
  Description of Artificial Sequence: Synthetic oligonucleotide
  Sense strand starting at position 2638 of SEQ ID NO: 1562895
aacagaugucacuggacau

SEQ ID NO: 1780634 - RNA, 19 nt, Artificial Sequence
  Description of Artificial Sequence: Synthetic oligonucleotide
  Antisense strand to SEQ ID NO: 1780633
auguccagugacaucuguu

SEQ ID NO: 1780635 - RNA, 19 nt, Artificial Sequence
  Description of Artificial Sequence: Synthetic oligonucleotide
  Sense strand starting at position 2658 of SEQ ID NO: 1562895
uuaagacucuuguuaagag

SEQ ID NO: 1780636 - RNA, 19 nt, Artificial Sequence
  Description of Artificial Sequence: Synthetic oligonucleotide
  Antisense strand to SEQ ID NO: 1780635
cucuuaacaagagucuuaa

SEQ ID NO: 1780637 - RNA, 19 nt, Artificial Sequence
  Description of Artificial Sequence: Synthetic oligonucleotide
  Sense strand starting at position 2659 of SEQ ID NO: 1562895
uaagacucuuguuaagagu

SEQ ID NO: 1780638 - RNA, 19 nt, Artificial Sequence
  Description of Artificial Sequence: Synthetic oligonucleotide
  Antisense strand to SEQ ID NO: 1780637
acucuuaacaagagucuua

SEQ ID NO: 1780639 - RNA, 19 nt, Artificial Sequence
  Description of Artificial Sequence: Synthetic oligonucleotide
  Sense strand starting at position 2666 of SEQ ID NO: 1562895
cuuguuaagagucguaaac

SEQ ID NO: 1780640 - RNA, 19 nt, Artificial Sequence
  Description of Artificial Sequence: Synthetic oligonucleotide
  Antisense strand to SEQ ID NO: 1780639
guuuacgacucuuaacaag

SEQ ID NO: 1780641 - RNA, 19 nt, Artificial Sequence
  Description of Artificial Sequence: Synthetic oligonucleotide
  Sense strand starting at position 2768 of SEQ ID NO: 1562895
guuaaugucccagagucac

SEQ ID NO: 1780642 - RNA, 19 nt, Artificial Sequence
  Description of Artificial Sequence: Synthetic oligonucleotide
  Antisense strand to SEQ ID NO: 1780641
gugacucugggacauuaac

SEQ ID NO: 1780643 - RNA, 19 nt, Artificial Sequence
  Description of Artificial Sequence: Synthetic oligonucleotide
  Sense strand starting at position 2884 of SEQ ID NO: 1562895
gugcaaucauaugucaaag

SEQ ID NO: 1780644 - RNA, 19 nt, Artificial Sequence
  Description of Artificial Sequence: Synthetic oligonucleotide
  Antisense strand to SEQ ID NO: 1780643
cuuugacauaugauugcac

SEQ ID NO: 1780645 - RNA, 19 nt, Artificial Sequence
  Description of Artificial Sequence: Synthetic oligonucleotide
  Sense strand starting at position 3032 of SEQ ID NO: 1562895
gcagaaguuauuggaauuc

SEQ ID NO: 1780646 - RNA, 19 nt, Artificial Sequence
  Description of Artificial Sequence: Synthetic oligonucleotide
  Antisense strand to SEQ ID NO: 1780645
gaauuccaauaacuucugc

SEQ ID NO: 1780647 - RNA, 19 nt, Artificial Sequence
  Description of Artificial Sequence: Synthetic oligonucleotide
  Sense strand starting at position 3102 of SEQ ID NO: 1562895
guuguucugcucucuguua

SEQ ID NO: 1780648 - RNA, 19 nt, Artificial Sequence
  Description of Artificial Sequence: Synthetic oligonucleotide
  Antisense strand to SEQ ID NO: 1780647
uaacagagagcagaacaac

SEQ ID NO: 1780649 - RNA, 19 nt, Artificial Sequence
  Description of Artificial Sequence: Synthetic oligonucleotide
  Sense strand starting at position 3110 of SEQ ID NO: 1562895
gcucucuguuagggaauuu

SEQ ID NO: 1780650 - RNA, 19 nt, Artificial Sequence
  Description of Artificial Sequence: Synthetic oligonucleotide
  Antisense strand to SEQ ID NO: 1780649
aaauucccuaacagagagc

SEQ ID NO: 1780651 - RNA, 19 nt, Artificial Sequence
  Description of Artificial Sequence: Synthetic oligonucleotide
  Sense strand starting at position 3211 of SEQ ID NO: 1562895
gagugagacuuaggauaug

SEQ ID NO: 1780652 - RNA, 19 nt, Artificial Sequence
  Description of Artificial Sequence: Synthetic oligonucleotide
  Antisense strand to SEQ ID NO: 1780651
cauauccuaagucucacuc

SEQ ID NO: 1780653 - RNA, 19 nt, Artificial Sequence
  Description of Artificial Sequence: Synthetic oligonucleotide
  Sense strand starting at position 3223 of SEQ ID NO: 1562895
ggauaugaguaacuaugca

SEQ ID NO: 1780654 - RNA, 19 nt, Artificial Sequence
  Description of Artificial Sequence: Synthetic oligonucleotide
  Antisense strand to SEQ ID NO: 1780653
ugcauaguuacucauaucc

SEQ ID NO: 1780655 - RNA, 19 nt, Artificial Sequence
  Description of Artificial Sequence: Synthetic oligonucleotide
  Sense strand starting at position 3258 of SEQ ID NO: 1562895
guagaugacccuuacuuua

SEQ ID NO: 1780656 - RNA, 19 nt, Artificial Sequence
  Description of Artificial Sequence: Synthetic oligonucleotide
  Antisense strand to SEQ ID NO: 1780655
uaaaguaagggucaucuac

SEQ ID NO: 1780657 - RNA, 19 nt, Artificial Sequence
  Description of Artificial Sequence: Synthetic oligonucleotide
  Sense strand starting at position 3425 of SEQ ID NO: 1562895
caacauggucucgacuaaa

SEQ ID NO: 1780658 - RNA, 19 nt, Artificial Sequence
  Description of Artificial Sequence: Synthetic oligonucleotide
  Antisense strand to SEQ ID NO: 1780657
uuuagucgagaccauguug

SEQ ID NO: 1780659 - RNA, 19 nt, Artificial Sequence
  Description of Artificial Sequence: Synthetic oligonucleotide
  Sense strand starting at position 3657 of SEQ ID NO: 1562895
ccagcaucugccugaaucu

SEQ ID NO: 1780660 - RNA, 19 nt, Artificial Sequence
  Description of Artificial Sequence: Synthetic oligonucleotide
  Antisense strand to SEQ ID NO: 1780659
agauucaggcagaugcugg

SEQ ID NO: 1780661 - RNA, 19 nt, Artificial Sequence
  Description of Artificial Sequence: Synthetic oligonucleotide
  Sense strand starting at position 3672 of SEQ ID NO: 1562895
aucugugugggccgaagau

SEQ ID NO: 1780662 - RNA, 19 nt, Artificial Sequence
  Description of Artificial Sequence: Synthetic oligonucleotide
  Antisense strand to SEQ ID NO: 1780661
aucuucggcccacacagau

SEQ ID NO: 1780663 - RNA, 19 nt, Artificial Sequence
  Description of Artificial Sequence: Synthetic oligonucleotide
  Sense strand starting at position 3681 of SEQ ID NO: 1562895
ggccgaagaugaccugaau

SEQ ID NO: 1780664 - RNA, 19 nt, Artificial Sequence
  Description of Artificial Sequence: Synthetic oligonucleotide
  Antisense strand to SEQ ID NO: 1780663
auucaggucaucuucggcc

SEQ ID NO: 1780665 - RNA, 19 nt, Artificial Sequence
  Description of Artificial Sequence: Synthetic oligonucleotide
  Sense strand starting at position 3694 of SEQ ID NO: 1562895
cugaauaaccucuguugau

SEQ ID NO: 1780666 - RNA, 19 nt, Artificial Sequence
  Description of Artificial Sequence: Synthetic oligonucleotide
  Antisense strand to SEQ ID NO: 1780665
aucaacagagguuauucag

SEQ ID NO: 1780667 - RNA, 19 nt, Artificial Sequence
  Description of Artificial Sequence: Synthetic oligonucleotide
  Sense strand starting at position 3695 of SEQ ID NO: 1562895
ugaauaaccucuguugauu

SEQ ID NO: 1780668 - RNA, 19 nt, Artificial Sequence
  Description of Artificial Sequence: Synthetic oligonucleotide
  Antisense strand to SEQ ID NO: 1780667
aaucaacagagguuauuca

SEQ ID NO: 1780669 - RNA, 19 nt, Artificial Sequence
  Description of Artificial Sequence: Synthetic oligonucleotide
  Sense strand starting at position 3723 of SEQ ID NO: 1562895
agguuaaauauguggguua

SEQ ID NO: 1780670 - RNA, 19 nt, Artificial Sequence
  Description of Artificial Sequence: Synthetic oligonucleotide
  Antisense strand to SEQ ID NO: 1780669
uaacccacauauuuaaccu

SEQ ID NO: 1780671 - RNA, 19 nt, Artificial Sequence
  Description of Artificial Sequence: Synthetic oligonucleotide
  Sense strand starting at position 3728 of SEQ ID NO: 1562895
aaauauguggguuacggua

SEQ ID NO: 1780672 - RNA, 19 nt, Artificial Sequence
  Description of Artificial Sequence: Synthetic oligonucleotide
  Antisense strand to SEQ ID NO: 1780671
uaccguaacccacauauuu

SEQ ID NO: 1780673 - RNA, 19 nt, Artificial Sequence
  Description of Artificial Sequence: Synthetic oligonucleotide
  Sense strand starting at position 3733 of SEQ ID NO: 1562895
uguggguuacgguaaggau

SEQ ID NO: 1780674 - RNA, 19 nt, Artificial Sequence
  Description of Artificial Sequence: Synthetic oligonucleotide
  Antisense strand to SEQ ID NO: 1780673
auccuuaccguaacccaca

SEQ ID NO: 1780675 - RNA, 19 nt, Artificial Sequence
  Description of Artificial Sequence: Synthetic oligonucleotide
  Sense strand starting at position 3737 of SEQ ID NO: 1562895
gguuacgguaaggaucaua

SEQ ID NO: 1780676 - RNA, 19 nt, Artificial Sequence
  Description of Artificial Sequence: Synthetic oligonucleotide
  Antisense strand to SEQ ID NO: 1780675
uaugauccuuaccguaacc

SEQ ID NO: 1780677 - RNA, 19 nt, Artificial Sequence
  Description of Artificial Sequence: Synthetic oligonucleotide
  Sense strand starting at position 3742 of SEQ ID NO: 1562895
cgguaaggaucauauacau

SEQ ID NO: 1780678 - RNA, 19 nt, Artificial Sequence
  Description of Artificial Sequence: Synthetic oligonucleotide
  Antisense strand to SEQ ID NO: 1780677
auguauaugauccuuaccg

SEQ ID NO: 1780679 - RNA, 19 nt, Artificial Sequence
  Description of Artificial Sequence: Synthetic oligonucleotide
  Sense strand starting at position 3780 of SEQ ID NO: 1562895
aguuacuuacugugugagu

SEQ ID NO: 1780680 - RNA, 19 nt, Artificial Sequence
  Description of Artificial Sequence: Synthetic oligonucleotide
  Antisense strand to SEQ ID NO: 1780679
acucacacaguaaguaacu

SEQ ID NO: 1780681 - RNA, 19 nt, Artificial Sequence
  Description of Artificial Sequence: Synthetic oligonucleotide
  Sense strand starting at position 3791 of SEQ ID NO: 1562895
gugugagucucauucuguc

SEQ ID NO: 1780682 - RNA, 19 nt, Artificial Sequence
  Description of Artificial Sequence: Synthetic oligonucleotide
  Antisense strand to SEQ ID NO: 1780681
gacagaaugagacucacac

SEQ ID NO: 1780683 - RNA, 19 nt, Artificial Sequence
  Description of Artificial Sequence: Synthetic oligonucleotide
  Sense strand starting at position 3816 of SEQ ID NO: 1562895
gcuaaugugcaguggugaa

SEQ ID NO: 1780684 - RNA, 19 nt, Artificial Sequence
  Description of Artificial Sequence: Synthetic oligonucleotide
  Antisense strand to SEQ ID NO: 1780683
uucaccacugcacauuagc

SEQ ID NO: 1780685 - RNA, 19 nt, Artificial Sequence
  Description of Artificial Sequence: Synthetic oligonucleotide
  Sense strand starting at position 3820 of SEQ ID NO: 1562895
augugcaguggugaaauca

SEQ ID NO: 1780686 - RNA, 19 nt, Artificial Sequence
  Description of Artificial Sequence: Synthetic oligonucleotide
  Antisense strand to SEQ ID NO: 1780685
ugauuucaccacugcacau

SEQ ID NO: 1780687 - RNA, 19 nt, Artificial Sequence
  Description of Artificial Sequence: Synthetic oligonucleotide
  Sense strand starting at position 3962 of SEQ ID NO: 1562895
guuugaaguggucgugauu

SEQ ID NO: 1780688 - RNA, 19 nt, Artificial Sequence
  Description of Artificial Sequence: Synthetic oligonucleotide
  Antisense strand to SEQ ID NO: 1780687
aaucacgaccacuucaaac

SEQ ID NO: 1780689 - RNA, 19 nt, Artificial Sequence
  Description of Artificial Sequence: Synthetic oligonucleotide
  Sense strand starting at position 3971 of SEQ ID NO: 1562895
ggucgugauuccuuugguu

SEQ ID NO: 1780690 - RNA, 19 nt, Artificial Sequence
  Description of Artificial Sequence: Synthetic oligonucleotide
  Antisense strand to SEQ ID NO: 1780689
aaccaaaggaaucacgacc

SEQ ID NO: 1780691 - RNA, 19 nt, Artificial Sequence
  Description of Artificial Sequence: Synthetic oligonucleotide
  Sense strand starting at position 143 of SEQ ID NO: 1562896
gcgcauuugucccaagccu

SEQ ID NO: 1780692 - RNA, 19 nt, Artificial Sequence
  Description of Artificial Sequence: Synthetic oligonucleotide
  Antisense strand to SEQ ID NO: 1780691
aggcuugggacaaaugcgc

SEQ ID NO: 1780693 - RNA, 19 nt, Artificial Sequence
  Description of Artificial Sequence: Synthetic oligonucleotide
  Sense strand starting at position 471 of SEQ ID NO: 1562896
cccggagcuguccaaguuu

SEQ ID NO: 1780694 - RNA, 19 nt, Artificial Sequence
  Description of Artificial Sequence: Synthetic oligonucleotide
  Antisense strand to SEQ ID NO: 1780693
aaacuuggacagcuccggg

SEQ ID NO: 1780695 - RNA, 19 nt, Artificial Sequence
  Description of Artificial Sequence: Synthetic oligonucleotide
  Sense strand starting at position 830 of SEQ ID NO: 1562896
aucuguucguggugcugaa

SEQ ID NO: 1780696 - RNA, 19 nt, Artificial Sequence
  Description of Artificial Sequence: Synthetic oligonucleotide
  Antisense strand to SEQ ID NO: 1780695
uucagcaccacgaacagau

SEQ ID NO: 1780697 - RNA, 19 nt, Artificial Sequence
  Description of Artificial Sequence: Synthetic oligonucleotide
  Sense strand starting at position 870 of SEQ ID NO: 1562896
gcaacuaagucacaaugga

SEQ ID NO: 1780698 - RNA, 19 nt, Artificial Sequence
  Description of Artificial Sequence: Synthetic oligonucleotide
  Antisense strand to SEQ ID NO: 1780697
uccauugugacuuaguugc

SEQ ID NO: 1780699 - RNA, 19 nt, Artificial Sequence
  Description of Artificial Sequence: Synthetic oligonucleotide
  Sense strand starting at position 1051 of SEQ ID NO: 1562896
ggcgucagguuccaagaau

SEQ ID NO: 1780700 - RNA, 19 nt, Artificial Sequence
  Description of Artificial Sequence: Synthetic oligonucleotide
  Antisense strand to SEQ ID NO: 1780699
auucuuggaaccugacgcc

SEQ ID NO: 1780701 - RNA, 19 nt, Artificial Sequence
  Description of Artificial Sequence: Synthetic oligonucleotide
  Sense strand starting at position 1158 of SEQ ID NO: 1562896
aaucgcuuccaacgaguuu

SEQ ID NO: 1780702 - RNA, 19 nt, Artificial Sequence
  Description of Artificial Sequence: Synthetic oligonucleotide
  Antisense strand to SEQ ID NO: 1780701
aaacucguuggaagcgauu

SEQ ID NO: 1780703 - RNA, 19 nt, Artificial Sequence
  Description of Artificial Sequence: Synthetic oligonucleotide
  Sense strand starting at position 1250 of SEQ ID NO: 1562896
gggagaaaucgccacguuc

SEQ ID NO: 1780704 - RNA, 19 nt, Artificial Sequence
  Description of Artificial Sequence: Synthetic oligonucleotide
  Antisense strand to SEQ ID NO: 1780703
gaacguggcgauuucuccc

SEQ ID NO: 1780705 - RNA, 19 nt, Artificial Sequence
  Description of Artificial Sequence: Synthetic oligonucleotide
  Sense strand starting at position 1252 of SEQ ID NO: 1562896
gagaaaucgccacguucca

SEQ ID NO: 1780706 - RNA, 19 nt, Artificial Sequence
  Description of Artificial Sequence: Synthetic oligonucleotide
  Antisense strand to SEQ ID NO: 1780705
uggaacguggcgauuucuc

SEQ ID NO: 1780707 - RNA, 19 nt, Artificial Sequence
  Description of Artificial Sequence: Synthetic oligonucleotide
  Sense strand starting at position 1382 of SEQ ID NO: 1562896
ggcucuuucuuuccaggaa

SEQ ID NO: 1780708 - RNA, 19 nt, Artificial Sequence
  Description of Artificial Sequence: Synthetic oligonucleotide
  Antisense strand to SEQ ID NO: 1780707
uuccuggaaagaaagagcc

SEQ ID NO: 1780709 - RNA, 19 nt, Artificial Sequence
  Description of Artificial Sequence: Synthetic oligonucleotide
  Sense strand starting at position 1383 of SEQ ID NO: 1562896
gcucuuucuuuccaggaaa

SEQ ID NO: 1780710 - RNA, 19 nt, Artificial Sequence
  Description of Artificial Sequence: Synthetic oligonucleotide
  Antisense strand to SEQ ID NO: 1780709
uuuccuggaaagaaagagc

SEQ ID NO: 1780711 - RNA, 19 nt, Artificial Sequence
  Description of Artificial Sequence: Synthetic oligonucleotide
  Sense strand starting at position 1982 of SEQ ID NO: 1562896
ucgagcaaagcucauaaau

SEQ ID NO: 1780712 - RNA, 19 nt, Artificial Sequence
  Description of Artificial Sequence: Synthetic oligonucleotide
  Antisense strand to SEQ ID NO: 1780711
auuuaugagcuuugcucga

SEQ ID NO: 1780713 - RNA, 19 nt, Artificial Sequence
  Description of Artificial Sequence: Synthetic oligonucleotide
  Sense strand starting at position 2239 of SEQ ID NO: 1562896
cccuacaucgcuuaagaga

SEQ ID NO: 1780714 - RNA, 19 nt, Artificial Sequence
  Description of Artificial Sequence: Synthetic oligonucleotide
  Antisense strand to SEQ ID NO: 1780713
ucucuuaagcgauguaggg

SEQ ID NO: 1780715 - RNA, 19 nt, Artificial Sequence
  Description of Artificial Sequence: Synthetic oligonucleotide
  Sense strand starting at position 3319 of SEQ ID NO: 1562896
gcgaguccguguuuccauu

SEQ ID NO: 1780716 - RNA, 19 nt, Artificial Sequence
  Description of Artificial Sequence: Synthetic oligonucleotide
  Antisense strand to SEQ ID NO: 1780715
aauggaaacacggacucgc

SEQ ID NO: 1780717 - RNA, 19 nt, Artificial Sequence
  Description of Artificial Sequence: Synthetic oligonucleotide
  Sense strand starting at position 3379 of SEQ ID NO: 1562896
uccgccucccucugauauu

SEQ ID NO: 1780718 - RNA, 19 nt, Artificial Sequence
  Description of Artificial Sequence: Synthetic oligonucleotide
  Antisense strand to SEQ ID NO: 1780717
aauaucagagggaggcgga

SEQ ID NO: 1780719 - RNA, 19 nt, Artificial Sequence
  Description of Artificial Sequence: Synthetic oligonucleotide
  Sense strand starting at position 3380 of SEQ ID NO: 1562896
ccgccucccucugauauuu

SEQ ID NO: 1780720 - RNA, 19 nt, Artificial Sequence
  Description of Artificial Sequence: Synthetic oligonucleotide
  Antisense strand to SEQ ID NO: 1780719
aaauaucagagggaggcgg

SEQ ID NO: 1780721 - RNA, 19 nt, Artificial Sequence
  Description of Artificial Sequence: Synthetic oligonucleotide
  Sense strand starting at position 3490 of SEQ ID NO: 1562896
uggccuccguguuguuuaa

SEQ ID NO: 1780722 - RNA, 19 nt, Artificial Sequence
  Description of Artificial Sequence: Synthetic oligonucleotide
  Antisense strand to SEQ ID NO: 1780721
uuaaacaacacggaggcca

SEQ ID NO: 1780723 - RNA, 19 nt, Artificial Sequence
  Description of Artificial Sequence: Synthetic oligonucleotide
  Sense strand starting at position 3491 of SEQ ID NO: 1562896
ggccuccguguuguuuaaa

SEQ ID NO: 1780724 - RNA, 19 nt, Artificial Sequence
  Description of Artificial Sequence: Synthetic oligonucleotide
  Antisense strand to SEQ ID NO: 1780723
uuuaaacaacacggaggcc

SEQ ID NO: 1780725 - RNA, 19 nt, Artificial Sequence
  Description of Artificial Sequence: Synthetic oligonucleotide
  Sense strand starting at position 3492 of SEQ ID NO: 1562896
gccuccguguuguuuaaac

SEQ ID NO: 1780726 - RNA, 19 nt, Artificial Sequence
  Description of Artificial Sequence: Synthetic oligonucleotide
  Antisense strand to SEQ ID NO: 1780725
guuuaaacaacacggaggc

SEQ ID NO: 1780727 - RNA, 19 nt, Artificial Sequence
  Description of Artificial Sequence: Synthetic oligonucleotide
  Sense strand starting at position 3530 of SEQ ID NO: 1562896
uggcucuuccuuuaaugau

SEQ ID NO: 1780728 - RNA, 19 nt, Artificial Sequence
  Description of Artificial Sequence: Synthetic oligonucleotide
  Antisense strand to SEQ ID NO: 1780727
aucauuaaaggaagagcca

SEQ ID NO: 1780729 - RNA, 19 nt, Artificial Sequence
  Description of Artificial Sequence: Synthetic oligonucleotide
  Sense strand starting at position 3560 of SEQ ID NO: 1562896
cgauuaaacucucaacaga

SEQ ID NO: 1780730 - RNA, 19 nt, Artificial Sequence
  Description of Artificial Sequence: Synthetic oligonucleotide
  Antisense strand to SEQ ID NO: 1780729
ucuguugagaguuuaaucg

SEQ ID NO: 1780731 - RNA, 19 nt, Artificial Sequence
  Description of Artificial Sequence: Synthetic oligonucleotide
  Sense strand starting at position 3573 of SEQ ID NO: 1562896
aacagaugucacuggacau

SEQ ID NO: 1780732 - RNA, 19 nt, Artificial Sequence
  Description of Artificial Sequence: Synthetic oligonucleotide
  Antisense strand to SEQ ID NO: 1780731
auguccagugacaucuguu

SEQ ID NO: 1780733 - RNA, 19 nt, Artificial Sequence
  Description of Artificial Sequence: Synthetic oligonucleotide
  Sense strand starting at position 3593 of SEQ ID NO: 1562896
uuaagacucuuguuaagag

SEQ ID NO: 1780734 - RNA, 19 nt, Artificial Sequence
  Description of Artificial Sequence: Synthetic oligonucleotide
  Antisense strand to SEQ ID NO: 1780733
cucuuaacaagagucuuaa

SEQ ID NO: 1780735 - RNA, 19 nt, Artificial Sequence
  Description of Artificial Sequence: Synthetic oligonucleotide
  Sense strand starting at position 3594 of SEQ ID NO: 1562896
uaagacucuuguuaagagu

SEQ ID NO: 1780736 - RNA, 19 nt, Artificial Sequence
  Description of Artificial Sequence: Synthetic oligonucleotide
  Antisense strand to SEQ ID NO: 1780735
acucuuaacaagagucuua

SEQ ID NO: 1780737 - RNA, 19 nt, Artificial Sequence
  Description of Artificial Sequence: Synthetic oligonucleotide
  Sense strand starting at position 3601 of SEQ ID NO: 1562896
cuuguuaagagucguaaac

SEQ ID NO: 1780738 - RNA, 19 nt, Artificial Sequence
  Description of Artificial Sequence: Synthetic oligonucleotide
  Antisense strand to SEQ ID NO: 1780737
guuuacgacucuuaacaag

SEQ ID NO: 1780739 - RNA, 19 nt, Artificial Sequence
  Description of Artificial Sequence: Synthetic oligonucleotide
  Sense strand starting at position 3603 of SEQ ID NO: 1562896
uguuaagagucguaaacag

SEQ ID NO: 1780740 - RNA, 19 nt, Artificial Sequence
  Description of Artificial Sequence: Synthetic oligonucleotide
  Antisense strand to SEQ ID NO: 1780739
cuguuuacgacucuuaaca

SEQ ID NO: 1780741 - RNA, 19 nt, Artificial Sequence
  Description of Artificial Sequence: Synthetic oligonucleotide
  Sense strand starting at position 3701 of SEQ ID NO: 1562896
agguuaaugucccagaguc

SEQ ID NO: 1780742 - RNA, 19 nt, Artificial Sequence
  Description of Artificial Sequence: Synthetic oligonucleotide
  Antisense strand to SEQ ID NO: 1780741
gacucugggacauuaaccu

SEQ ID NO: 1780743 - RNA, 19 nt, Artificial Sequence
  Description of Artificial Sequence: Synthetic oligonucleotide
  Sense strand starting at position 3703 of SEQ ID NO: 1562896
guuaaugucccagagucac

SEQ ID NO: 1780744 - RNA, 19 nt, Artificial Sequence
  Description of Artificial Sequence: Synthetic oligonucleotide
  Antisense strand to SEQ ID NO: 1780743
gugacucugggacauuaac

SEQ ID NO: 1780745 - RNA, 19 nt, Artificial Sequence
  Description of Artificial Sequence: Synthetic oligonucleotide
  Sense strand starting at position 3819 of SEQ ID NO: 1562896
gugcaaucauaugucaaag

SEQ ID NO: 1780746 - RNA, 19 nt, Artificial Sequence
  Description of Artificial Sequence: Synthetic oligonucleotide
  Antisense strand to SEQ ID NO: 1780745
cuuugacauaugauugcac

SEQ ID NO: 1780747 - RNA, 19 nt, Artificial Sequence
  Description of Artificial Sequence: Synthetic oligonucleotide
  Sense strand starting at position 3821 of SEQ ID NO: 1562896
gcaaucauaugucaaagua

SEQ ID NO: 1780748 - RNA, 19 nt, Artificial Sequence
  Description of Artificial Sequence: Synthetic oligonucleotide
  Antisense strand to SEQ ID NO: 1780747
uacuuugacauaugauugc

SEQ ID NO: 1780749 - RNA, 19 nt, Artificial Sequence
  Description of Artificial Sequence: Synthetic oligonucleotide
  Sense strand starting at position 3966 of SEQ ID NO: 1562896
ggcagaaguuauuggaauu

SEQ ID NO: 1780750 - RNA, 19 nt, Artificial Sequence
  Description of Artificial Sequence: Synthetic oligonucleotide
  Antisense strand to SEQ ID NO: 1780749
aauuccaauaacuucugcc

SEQ ID NO: 1780751 - RNA, 19 nt, Artificial Sequence
  Description of Artificial Sequence: Synthetic oligonucleotide
  Sense strand starting at position 3967 of SEQ ID NO: 1562896
gcagaaguuauuggaauuc

SEQ ID NO: 1780752 - RNA, 19 nt, Artificial Sequence
  Description of Artificial Sequence: Synthetic oligonucleotide
  Antisense strand to SEQ ID NO: 1780751
gaauuccaauaacuucugc

SEQ ID NO: 1780753 - RNA, 19 nt, Artificial Sequence
  Description of Artificial Sequence: Synthetic oligonucleotide
  Sense strand starting at position 163 of SEQ ID NO: 1562897
gcaacuaagucacaaugga

SEQ ID NO: 1780754 - RNA, 19 nt, Artificial Sequence
  Description of Artificial Sequence: Synthetic oligonucleotide
  Antisense strand to SEQ ID NO: 1780753
uccauugugacuuaguugc

SEQ ID NO: 1780755 - RNA, 19 nt, Artificial Sequence
  Description of Artificial Sequence: Synthetic oligonucleotide
  Sense strand starting at position 451 of SEQ ID NO: 1562897
aaucgcuuccaacgaguuu

SEQ ID NO: 1780756 - RNA, 19 nt, Artificial Sequence
  Description of Artificial Sequence: Synthetic oligonucleotide
  Antisense strand to SEQ ID NO: 1780755
aaacucguuggaagcgauu

SEQ ID NO: 1780757 - RNA, 19 nt, Artificial Sequence
  Description of Artificial Sequence: Synthetic oligonucleotide
  Sense strand starting at position 543 of SEQ ID NO: 1562897
gggagaaaucgccacguuc

SEQ ID NO: 1780758 - RNA, 19 nt, Artificial Sequence
  Description of Artificial Sequence: Synthetic oligonucleotide
  Antisense strand to SEQ ID NO: 1780757
gaacguggcgauuucuccc

SEQ ID NO: 1780759 - RNA, 19 nt, Artificial Sequence
  Description of Artificial Sequence: Synthetic oligonucleotide
  Sense strand starting at position 545 of SEQ ID NO: 1562897
gagaaaucgccacguucca

SEQ ID NO: 1780760 - RNA, 19 nt, Artificial Sequence
  Description of Artificial Sequence: Synthetic oligonucleotide
  Antisense strand to SEQ ID NO: 1780759
uggaacguggcgauuucuc

SEQ ID NO: 1780761 - RNA, 19 nt, Artificial Sequence
  Description of Artificial Sequence: Synthetic oligonucleotide
  Sense strand starting at position 675 of SEQ ID NO: 1562897
ggcucuuucuuuccaggaa

SEQ ID NO: 1780762 - RNA, 19 nt, Artificial Sequence
  Description of Artificial Sequence: Synthetic oligonucleotide
  Antisense strand to SEQ ID NO: 1780761
uuccuggaaagaaagagcc

SEQ ID NO: 1780763 - RNA, 19 nt, Artificial Sequence
  Description of Artificial Sequence: Synthetic oligonucleotide
  Sense strand starting at position 676 of SEQ ID NO: 1562897
gcucuuucuuuccaggaaa

SEQ ID NO: 1780764 - RNA, 19 nt, Artificial Sequence
  Description of Artificial Sequence: Synthetic oligonucleotide
  Antisense strand to SEQ ID NO: 1780763
uuuccuggaaagaaagagc

SEQ ID NO: 1780765 - RNA, 19 nt, Artificial Sequence
  Description of Artificial Sequence: Synthetic oligonucleotide
  Sense strand starting at position 1275 of SEQ ID NO: 1562897
ucgagcaaagcucauaaau

SEQ ID NO: 1780766 - RNA, 19 nt, Artificial Sequence
  Description of Artificial Sequence: Synthetic oligonucleotide
  Antisense strand to SEQ ID NO: 1780765
auuuaugagcuuugcucga

SEQ ID NO: 1780767 - RNA, 19 nt, Artificial Sequence
  Description of Artificial Sequence: Synthetic oligonucleotide
  Sense strand starting at position 1532 of SEQ ID NO: 1562897
cccuacaucgcuuaagaga

SEQ ID NO: 1780768 - RNA, 19 nt, Artificial Sequence
  Description of Artificial Sequence: Synthetic oligonucleotide
  Antisense strand to SEQ ID NO: 1780767
ucucuuaagcgauguaggg

SEQ ID NO: 1780769 - RNA, 19 nt, Artificial Sequence
  Description of Artificial Sequence: Synthetic oligonucleotide
  Sense strand starting at position 2672 of SEQ ID NO: 1562897
uccgccucccucugauauu

SEQ ID NO: 1780770 - RNA, 19 nt, Artificial Sequence
  Description of Artificial Sequence: Synthetic oligonucleotide
  Antisense strand to SEQ ID NO: 1780769
aauaucagagggaggcgga

SEQ ID NO: 1780771 - RNA, 19 nt, Artificial Sequence
  Description of Artificial Sequence: Synthetic oligonucleotide
  Sense strand starting at position 2673 of SEQ ID NO: 1562897
ccgccucccucugauauuu

SEQ ID NO: 1780772 - RNA, 19 nt, Artificial Sequence
  Description of Artificial Sequence: Synthetic oligonucleotide
  Antisense strand to SEQ ID NO: 1780771
aaauaucagagggaggcgg

SEQ ID NO: 1780773 - RNA, 19 nt, Artificial Sequence
  Description of Artificial Sequence: Synthetic oligonucleotide
  Sense strand starting at position 2784 of SEQ ID NO: 1562897
ggccuccguguuguuuaaa

SEQ ID NO: 1780774 - RNA, 19 nt, Artificial Sequence
  Description of Artificial Sequence: Synthetic oligonucleotide
  Antisense strand to SEQ ID NO: 1780773
uuuaaacaacacggaggcc

SEQ ID NO: 1780775 - RNA, 19 nt, Artificial Sequence
  Description of Artificial Sequence: Synthetic oligonucleotide
  Sense strand starting at position 2785 of SEQ ID NO: 1562897
gccuccguguuguuuaaac

SEQ ID NO: 1780776 - RNA, 19 nt, Artificial Sequence
  Description of Artificial Sequence: Synthetic oligonucleotide
  Antisense strand to SEQ ID NO: 1780775
guuuaaacaacacggaggc

SEQ ID NO: 1780777 - RNA, 19 nt, Artificial Sequence
  Description of Artificial Sequence: Synthetic oligonucleotide
  Sense strand starting at position 2823 of SEQ ID NO: 1562897
uggcucuuccuuuaaugau

SEQ ID NO: 1780778 - RNA, 19 nt, Artificial Sequence
  Description of Artificial Sequence: Synthetic oligonucleotide
  Antisense strand to SEQ ID NO: 1780777
aucauuaaaggaagagcca

SEQ ID NO: 1780779 - RNA, 19 nt, Artificial Sequence
  Description of Artificial Sequence: Synthetic oligonucleotide
  Sense strand starting at position 2853 of SEQ ID NO: 1562897
cgauuaaacucucaacaga

SEQ ID NO: 1780780 - RNA, 19 nt, Artificial Sequence
  Description of Artificial Sequence: Synthetic oligonucleotide
  Antisense strand to SEQ ID NO: 1780779
ucuguugagaguuuaaucg

SEQ ID NO: 1780781 - RNA, 19 nt, Artificial Sequence
  Description of Artificial Sequence: Synthetic oligonucleotide
  Sense strand starting at position 2866 of SEQ ID NO: 1562897
aacagaugucacuggacau

SEQ ID NO: 1780782 - RNA, 19 nt, Artificial Sequence
  Description of Artificial Sequence: Synthetic oligonucleotide
  Antisense strand to SEQ ID NO: 1780781
auguccagugacaucuguu

SEQ ID NO: 1780783 - RNA, 19 nt, Artificial Sequence
  Description of Artificial Sequence: Synthetic oligonucleotide
  Sense strand starting at position 2886 of SEQ ID NO: 1562897
uuaagacucuuguuaagag

SEQ ID NO: 1780784 - RNA, 19 nt, Artificial Sequence
  Description of Artificial Sequence: Synthetic oligonucleotide
  Antisense strand to SEQ ID NO: 1780783
cucuuaacaagagucuuaa

SEQ ID NO: 1780785 - RNA, 19 nt, Artificial Sequence
  Description of Artificial Sequence: Synthetic oligonucleotide
  Sense strand starting at position 2887 of SEQ ID NO: 1562897
uaagacucuuguuaagagu

SEQ ID NO: 1780786 - RNA, 19 nt, Artificial Sequence
  Description of Artificial Sequence: Synthetic oligonucleotide
  Antisense strand to SEQ ID NO: 1780785
acucuuaacaagagucuua

SEQ ID NO: 1780787 - RNA, 19 nt, Artificial Sequence
  Description of Artificial Sequence: Synthetic oligonucleotide
  Sense strand starting at position 2894 of SEQ ID NO: 1562897
cuuguuaagagucguaaac

SEQ ID NO: 1780788 - RNA, 19 nt, Artificial Sequence
  Description of Artificial Sequence: Synthetic oligonucleotide
  Antisense strand to SEQ ID NO: 1780787
guuuacgacucuuaacaag

SEQ ID NO: 1780789 - RNA, 19 nt, Artificial Sequence
  Description of Artificial Sequence: Synthetic oligonucleotide
  Sense strand starting at position 2896 of SEQ ID NO: 1562897
uguuaagagucguaaacag

SEQ ID NO: 1780790 - RNA, 19 nt, Artificial Sequence
  Description of Artificial Sequence: Synthetic oligonucleotide
  Antisense strand to SEQ ID NO: 1780789
cuguuuacgacucuuaaca

SEQ ID NO: 1780791 - RNA, 19 nt, Artificial Sequence
  Description of Artificial Sequence: Synthetic oligonucleotide
  Sense strand starting at position 2996 of SEQ ID NO: 1562897
guuaaugucccagagucac

SEQ ID NO: 1780792 - RNA, 19 nt, Artificial Sequence
  Description of Artificial Sequence: Synthetic oligonucleotide
  Antisense strand to SEQ ID NO: 1780791
gugacucugggacauuaac

SEQ ID NO: 1780793 - RNA, 19 nt, Artificial Sequence
  Description of Artificial Sequence: Synthetic oligonucleotide
  Sense strand starting at position 3112 of SEQ ID NO: 1562897
gugcaaucauaugucaaag

SEQ ID NO: 1780794 - RNA, 19 nt, Artificial Sequence
  Description of Artificial Sequence: Synthetic oligonucleotide
  Antisense strand to SEQ ID NO: 1780793
cuuugacauaugauugcac

SEQ ID NO: 1780795 - RNA, 19 nt, Artificial Sequence
  Description of Artificial Sequence: Synthetic oligonucleotide
  Sense strand starting at position 3114 of SEQ ID NO: 1562897
gcaaucauaugucaaagua

SEQ ID NO: 1780796 - RNA, 19 nt, Artificial Sequence
  Description of Artificial Sequence: Synthetic oligonucleotide
  Antisense strand to SEQ ID NO: 1780795
uacuuugacauaugauugc

SEQ ID NO: 1780797 - RNA, 19 nt, Artificial Sequence
  Description of Artificial Sequence: Synthetic oligonucleotide
  Sense strand starting at position 3259 of SEQ ID NO: 1562897
ggcagaaguuauuggaauu

SEQ ID NO: 1780798 - RNA, 19 nt, Artificial Sequence
  Description of Artificial Sequence: Synthetic oligonucleotide
  Antisense strand to SEQ ID NO: 1780797
aauuccaauaacuucugcc

SEQ ID NO: 1780799 - RNA, 19 nt, Artificial Sequence
  Description of Artificial Sequence: Synthetic oligonucleotide
  Sense strand starting at position 3260 of SEQ ID NO: 1562897
gcagaaguuauuggaauuc

SEQ ID NO: 1780800 - RNA, 19 nt, Artificial Sequence
  Description of Artificial Sequence: Synthetic oligonucleotide
  Antisense strand to SEQ ID NO: 1780799
gaauuccaauaacuucugc

SEQ ID NO: 1780801 - RNA, 19 nt, Artificial Sequence
  Description of Artificial Sequence: Synthetic oligonucleotide
  Sense strand starting at position 3330 of SEQ ID NO: 1562897
guuguucugcucucuguua

SEQ ID NO: 1780802 - RNA, 19 nt, Artificial Sequence
  Description of Artificial Sequence: Synthetic oligonucleotide
  Antisense strand to SEQ ID NO: 1780801
uaacagagagcagaacaac

SEQ ID NO: 1780803 - RNA, 19 nt, Artificial Sequence
  Description of Artificial Sequence: Synthetic oligonucleotide
  Sense strand starting at position 3338 of SEQ ID NO: 1562897
gcucucuguuagggaauuu

SEQ ID NO: 1780804 - RNA, 19 nt, Artificial Sequence
  Description of Artificial Sequence: Synthetic oligonucleotide
  Antisense strand to SEQ ID NO: 1780803
aaauucccuaacagagagc

SEQ ID NO: 1780805 - RNA, 19 nt, Artificial Sequence
  Description of Artificial Sequence: Synthetic oligonucleotide
  Sense strand starting at position 3439 of SEQ ID NO: 1562897
gagugagacuuaggauaug

SEQ ID NO: 1780806 - RNA, 19 nt, Artificial Sequence
  Description of Artificial Sequence: Synthetic oligonucleotide
  Antisense strand to SEQ ID NO: 1780805
cauauccuaagucucacuc

SEQ ID NO: 1780807 - RNA, 19 nt, Artificial Sequence
  Description of Artificial Sequence: Synthetic oligonucleotide
  Sense strand starting at position 3451 of SEQ ID NO: 1562897
ggauaugaguaacuaugca

SEQ ID NO: 1780808 - RNA, 19 nt, Artificial Sequence
  Description of Artificial Sequence: Synthetic oligonucleotide
  Antisense strand to SEQ ID NO: 1780807
ugcauaguuacucauaucc

SEQ ID NO: 1780809 - RNA, 19 nt, Artificial Sequence
  Description of Artificial Sequence: Synthetic oligonucleotide
  Sense strand starting at position 3486 of SEQ ID NO: 1562897
guagaugacccuuacuuua

SEQ ID NO: 1780810 - RNA, 19 nt, Artificial Sequence
  Description of Artificial Sequence: Synthetic oligonucleotide
  Antisense strand to SEQ ID NO: 1780809
uaaaguaagggucaucuac

SEQ ID NO: 1780811 - RNA, 19 nt, Artificial Sequence
  Description of Artificial Sequence: Synthetic oligonucleotide
  Sense strand starting at position 3653 of SEQ ID NO: 1562897
caacauggucucgacuaaa

SEQ ID NO: 1780812 - RNA, 19 nt, Artificial Sequence
  Description of Artificial Sequence: Synthetic oligonucleotide
  Antisense strand to SEQ ID NO: 1780811
uuuagucgagaccauguug

SEQ ID NO: 1780813 - RNA, 19 nt, Artificial Sequence
  Description of Artificial Sequence: Synthetic oligonucleotide
  Sense strand starting at position 3885 of SEQ ID NO: 1562897
ccagcaucugccugaaucu

SEQ ID NO: 1780814 - RNA, 19 nt, Artificial Sequence
  Description of Artificial Sequence: Synthetic oligonucleotide
  Antisense strand to SEQ ID NO: 1780813
agauucaggcagaugcugg

SEQ ID NO: 1780815 - RNA, 19 nt, Artificial Sequence
  Description of Artificial Sequence: Synthetic oligonucleotide
  Sense strand starting at position 3900 of SEQ ID NO: 1562897
aucugugugggccgaagau

SEQ ID NO: 1780816 - RNA, 19 nt, Artificial Sequence
  Description of Artificial Sequence: Synthetic oligonucleotide
  Antisense strand to SEQ ID NO: 1780815
aucuucggcccacacagau

SEQ ID NO: 1780817 - RNA, 19 nt, Artificial Sequence
  Description of Artificial Sequence: Synthetic oligonucleotide
  Sense strand starting at position 3909 of SEQ ID NO: 1562897
ggccgaagaugaccugaau

SEQ ID NO: 1780818 - RNA, 19 nt, Artificial Sequence
  Description of Artificial Sequence: Synthetic oligonucleotide
  Antisense strand to SEQ ID NO: 1780817
auucaggucaucuucggcc

SEQ ID NO: 1780819 - RNA, 19 nt, Artificial Sequence
  Description of Artificial Sequence: Synthetic oligonucleotide
  Sense strand starting at position 3922 of SEQ ID NO: 1562897
cugaauaaccucuguugau

SEQ ID NO: 1780820 - RNA, 19 nt, Artificial Sequence
  Description of Artificial Sequence: Synthetic oligonucleotide
  Antisense strand to SEQ ID NO: 1780819
aucaacagagguuauucag

SEQ ID NO: 1780821 - RNA, 19 nt, Artificial Sequence
  Description of Artificial Sequence: Synthetic oligonucleotide
  Sense strand starting at position 3923 of SEQ ID NO: 1562897
ugaauaaccucuguugauu

SEQ ID NO: 1780822 - RNA, 19 nt, Artificial Sequence
  Description of Artificial Sequence: Synthetic oligonucleotide
  Antisense strand to SEQ ID NO: 1780821
aaucaacagagguuauuca

SEQ ID NO: 1780823 - RNA, 19 nt, Artificial Sequence
  Description of Artificial Sequence: Synthetic oligonucleotide
  Sense strand starting at position 3951 of SEQ ID NO: 1562897
agguuaaauauguggguua

SEQ ID NO: 1780824 - RNA, 19 nt, Artificial Sequence
  Description of Artificial Sequence: Synthetic oligonucleotide
  Antisense strand to SEQ ID NO: 1780823
uaacccacauauuuaaccu

SEQ ID NO: 1780825 - RNA, 19 nt, Artificial Sequence
  Description of Artificial Sequence: Synthetic oligonucleotide
  Sense strand starting at position 3956 of SEQ ID NO: 1562897
aaauauguggguuacggua

SEQ ID NO: 1780826 - RNA, 19 nt, Artificial Sequence
  Description of Artificial Sequence: Synthetic oligonucleotide
  Antisense strand to SEQ ID NO: 1780825
uaccguaacccacauauuu

SEQ ID NO: 1780827 - RNA, 19 nt, Artificial Sequence
  Description of Artificial Sequence: Synthetic oligonucleotide
  Sense strand starting at position 3961 of SEQ ID NO: 1562897
uguggguuacgguaaggau

SEQ ID NO: 1780828 - RNA, 19 nt, Artificial Sequence
  Description of Artificial Sequence: Synthetic oligonucleotide
  Antisense strand to SEQ ID NO: 1780827
auccuuaccguaacccaca

SEQ ID NO: 1780829 - RNA, 19 nt, Artificial Sequence
  Description of Artificial Sequence: Synthetic oligonucleotide
  Sense strand starting at position 3965 of SEQ ID NO: 1562897
gguuacgguaaggaucaua

SEQ ID NO: 1780830 - RNA, 19 nt, Artificial Sequence
  Description of Artificial Sequence: Synthetic oligonucleotide
  Antisense strand to SEQ ID NO: 1780829
uaugauccuuaccguaacc

SEQ ID NO: 1780831 - RNA, 19 nt, Artificial Sequence
  Description of Artificial Sequence: Synthetic oligonucleotide
  Sense strand starting at position 3970 of SEQ ID NO: 1562897
cgguaaggaucauauacau

SEQ ID NO: 1780832 - RNA, 19 nt, Artificial Sequence
  Description of Artificial Sequence: Synthetic oligonucleotide
  Antisense strand to SEQ ID NO: 1780831
auguauaugauccuuaccg

SEQ ID NO: 1780833 - RNA, 19 nt, Artificial Sequence
  Description of Artificial Sequence: Synthetic oligonucleotide
  Sense strand starting at position 462 of SEQ ID NO: 1562898
ggaugucauuucugaauaa

SEQ ID NO: 1780834 - RNA, 19 nt, Artificial Sequence
  Description of Artificial Sequence: Synthetic oligonucleotide
  Antisense strand to SEQ ID NO: 1780833
uuauucagaaaugacaucc

SEQ ID NO: 1780835 - RNA, 19 nt, Artificial Sequence
  Description of Artificial Sequence: Synthetic oligonucleotide
  Sense strand starting at position 463 of SEQ ID NO: 1562898
gaugucauuucugaauaag

SEQ ID NO: 1780836 - RNA, 19 nt, Artificial Sequence
  Description of Artificial Sequence: Synthetic oligonucleotide
  Antisense strand to SEQ ID NO: 1780835
cuuauucagaaaugacauc

SEQ ID NO: 1780837 - RNA, 19 nt, Artificial Sequence
  Description of Artificial Sequence: Synthetic oligonucleotide
  Sense strand starting at position 535 of SEQ ID NO: 1562898
agauuugcuucccuugcau

SEQ ID NO: 1780838 - RNA, 19 nt, Artificial Sequence
  Description of Artificial Sequence: Synthetic oligonucleotide
  Antisense strand to SEQ ID NO: 1780837
augcaagggaagcaaaucu

SEQ ID NO: 1780839 - RNA, 19 nt, Artificial Sequence
  Description of Artificial Sequence: Synthetic oligonucleotide
  Sense strand starting at position 688 of SEQ ID NO: 1562898
ggcaaaguguuacuaaaca

SEQ ID NO: 1780840 - RNA, 19 nt, Artificial Sequence
  Description of Artificial Sequence: Synthetic oligonucleotide
  Antisense strand to SEQ ID NO: 1780839
uguuuaguaacacuuugcc

SEQ ID NO: 1780841 - RNA, 19 nt, Artificial Sequence
  Description of Artificial Sequence: Synthetic oligonucleotide
  Sense strand starting at position 723 of SEQ ID NO: 1562898
gauggaaagcuguacacuu

SEQ ID NO: 1780842 - RNA, 19 nt, Artificial Sequence
  Description of Artificial Sequence: Synthetic oligonucleotide
  Antisense strand to SEQ ID NO: 1780841
aaguguacagcuuuccauc

SEQ ID NO: 1780843 - RNA, 19 nt, Artificial Sequence
  Description of Artificial Sequence: Synthetic oligonucleotide
  Sense strand starting at position 823 of SEQ ID NO: 1562898
ugguaagauccauaguuac

SEQ ID NO: 1780844 - RNA, 19 nt, Artificial Sequence
  Description of Artificial Sequence: Synthetic oligonucleotide
  Antisense strand to SEQ ID NO: 1780843
guaacuauggaucuuacca

SEQ ID NO: 1780845 - RNA, 19 nt, Artificial Sequence
  Description of Artificial Sequence: Synthetic oligonucleotide
  Sense strand starting at position 902 of SEQ ID NO: 1562898
ugccaucaccuguaaggaa

SEQ ID NO: 1780846 - RNA, 19 nt, Artificial Sequence
  Description of Artificial Sequence: Synthetic oligonucleotide
  Antisense strand to SEQ ID NO: 1780845
uuccuuacaggugauggca

SEQ ID NO: 1780847 - RNA, 19 nt, Artificial Sequence
  Description of Artificial Sequence: Synthetic oligonucleotide
  Sense strand starting at position 926 of SEQ ID NO: 1562898
uggagucaugcucacaagu

SEQ ID NO: 1780848 - RNA, 19 nt, Artificial Sequence
  Description of Artificial Sequence: Synthetic oligonucleotide
  Antisense strand to SEQ ID NO: 1780847
acuugugagcaugacucca

SEQ ID NO: 1780849 - RNA, 19 nt, Artificial Sequence
  Description of Artificial Sequence: Synthetic oligonucleotide
  Sense strand starting at position 983 of SEQ ID NO: 1562898
acuagucuccugggaaaua

SEQ ID NO: 1780850 - RNA, 19 nt, Artificial Sequence
  Description of Artificial Sequence: Synthetic oligonucleotide
  Antisense strand to SEQ ID NO: 1780849
uauuucccaggagacuagu

SEQ ID NO: 1780851 - RNA, 19 nt, Artificial Sequence
  Description of Artificial Sequence: Synthetic oligonucleotide
  Sense strand starting at position 1147 of SEQ ID NO: 1562898
augauaagccuguauaauu

SEQ ID NO: 1780852 - RNA, 19 nt, Artificial Sequence
  Description of Artificial Sequence: Synthetic oligonucleotide
  Antisense strand to SEQ ID NO: 1780851
aauuauacaggcuuaucau

SEQ ID NO: 1780853 - RNA, 19 nt, Artificial Sequence
  Description of Artificial Sequence: Synthetic oligonucleotide
  Sense strand starting at position 1157 of SEQ ID NO: 1562898
uguauaauugcuggcaaag

SEQ ID NO: 1780854 - RNA, 19 nt, Artificial Sequence
  Description of Artificial Sequence: Synthetic oligonucleotide
  Antisense strand to SEQ ID NO: 1780853
cuuugccagcaauuauaca

SEQ ID NO: 1780855 - RNA, 19 nt, Artificial Sequence
  Description of Artificial Sequence: Synthetic oligonucleotide
  Sense strand starting at position 1168 of SEQ ID NO: 1562898
uggcaaagugcuguguguu

SEQ ID NO: 1780856 - RNA, 19 nt, Artificial Sequence
  Description of Artificial Sequence: Synthetic oligonucleotide
  Antisense strand to SEQ ID NO: 1780855
aacacacagcacuuugcca

SEQ ID NO: 1780857 - RNA, 19 nt, Artificial Sequence
  Description of Artificial Sequence: Synthetic oligonucleotide
  Sense strand starting at position 1234 of SEQ ID NO: 1562898
gagauacagcguuaaaugu

SEQ ID NO: 1780858 - RNA, 19 nt, Artificial Sequence
  Description of Artificial Sequence: Synthetic oligonucleotide
  Antisense strand to SEQ ID NO: 1780857
acauuuaacgcuguaucuc

SEQ ID NO: 1780859 - RNA, 19 nt, Artificial Sequence
  Description of Artificial Sequence: Synthetic oligonucleotide
  Sense strand starting at position 2216 of SEQ ID NO: 1562898
cuugguaucuauuucugca

SEQ ID NO: 1780860 - RNA, 19 nt, Artificial Sequence
  Description of Artificial Sequence: Synthetic oligonucleotide
  Antisense strand to SEQ ID NO: 1780859
ugcagaaauagauaccaag

SEQ ID NO: 1780861 - RNA, 19 nt, Artificial Sequence
  Description of Artificial Sequence: Synthetic oligonucleotide
  Sense strand starting at position 2220 of SEQ ID NO: 1562898
guaucuauuucugcaagug

SEQ ID NO: 1780862 - RNA, 19 nt, Artificial Sequence
  Description of Artificial Sequence: Synthetic oligonucleotide
  Antisense strand to SEQ ID NO: 1780861
cacuugcagaaauagauac

SEQ ID NO: 1780863 - RNA, 19 nt, Artificial Sequence
  Description of Artificial Sequence: Synthetic oligonucleotide
  Sense strand starting at position 2236 of SEQ ID NO: 1562898
gugucuuugggcaguccga

SEQ ID NO: 1780864 - RNA, 19 nt, Artificial Sequence
  Description of Artificial Sequence: Synthetic oligonucleotide
  Antisense strand to SEQ ID NO: 1780863
ucggacugcccaaagacac

SEQ ID NO: 1780865 - RNA, 19 nt, Artificial Sequence
  Description of Artificial Sequence: Synthetic oligonucleotide
  Sense strand starting at position 2832 of SEQ ID NO: 1562898
gucguuguugagucuucua

SEQ ID NO: 1780866 - RNA, 19 nt, Artificial Sequence
  Description of Artificial Sequence: Synthetic oligonucleotide
  Antisense strand to SEQ ID NO: 1780865
uagaagacucaacaacgac

SEQ ID NO: 1780867 - RNA, 19 nt, Artificial Sequence
  Description of Artificial Sequence: Synthetic oligonucleotide
  Sense strand starting at position 3096 of SEQ ID NO: 1562898
gauuccuguaaucguagga

SEQ ID NO: 1780868 - RNA, 19 nt, Artificial Sequence
  Description of Artificial Sequence: Synthetic oligonucleotide
  Antisense strand to SEQ ID NO: 1780867
uccuacgauuacaggaauc

SEQ ID NO: 1780869 - RNA, 19 nt, Artificial Sequence
  Description of Artificial Sequence: Synthetic oligonucleotide
  Sense strand starting at position 3100 of SEQ ID NO: 1562898
ccuguaaucguaggaauga

SEQ ID NO: 1780870 - RNA, 19 nt, Artificial Sequence
  Description of Artificial Sequence: Synthetic oligonucleotide
  Antisense strand to SEQ ID NO: 1780869
ucauuccuacgauuacagg

SEQ ID NO: 1780871 - RNA, 19 nt, Artificial Sequence
  Description of Artificial Sequence: Synthetic oligonucleotide
  Sense strand starting at position 3126 of SEQ ID NO: 1562898
uuucucauuugauagauga

SEQ ID NO: 1780872 - RNA, 19 nt, Artificial Sequence
  Description of Artificial Sequence: Synthetic oligonucleotide
  Antisense strand to SEQ ID NO: 1780871
ucaucuaucaaaugagaaa

SEQ ID NO: 1780873 - RNA, 19 nt, Artificial Sequence
  Description of Artificial Sequence: Synthetic oligonucleotide
  Sense strand starting at position 3139 of SEQ ID NO: 1562898
agaugauaaagcugguaga

SEQ ID NO: 1780874 - RNA, 19 nt, Artificial Sequence
  Description of Artificial Sequence: Synthetic oligonucleotide
  Antisense strand to SEQ ID NO: 1780873
ucuaccagcuuuaucaucu

SEQ ID NO: 1780875 - RNA, 19 nt, Artificial Sequence
  Description of Artificial Sequence: Synthetic oligonucleotide
  Sense strand starting at position 3140 of SEQ ID NO: 1562898
gaugauaaagcugguagaa

SEQ ID NO: 1780876 - RNA, 19 nt, Artificial Sequence
  Description of Artificial Sequence: Synthetic oligonucleotide
  Antisense strand to SEQ ID NO: 1780875
uucuaccagcuuuaucauc

SEQ ID NO: 1780877 - RNA, 19 nt, Artificial Sequence
  Description of Artificial Sequence: Synthetic oligonucleotide
  Sense strand starting at position 3153 of SEQ ID NO: 1562898
guagaaaguaggugaaagu

SEQ ID NO: 1780878 - RNA, 19 nt, Artificial Sequence
  Description of Artificial Sequence: Synthetic oligonucleotide
  Antisense strand to SEQ ID NO: 1780877
acuuucaccuacuuucuac

SEQ ID NO: 1780879 - RNA, 19 nt, Artificial Sequence
  Description of Artificial Sequence: Synthetic oligonucleotide
  Sense strand starting at position 3180 of SEQ ID NO: 1562898
ucaagagugucaccgaagu

SEQ ID NO: 1780880 - RNA, 19 nt, Artificial Sequence
  Description of Artificial Sequence: Synthetic oligonucleotide
  Antisense strand to SEQ ID NO: 1780879
acuucggugacacucuuga

SEQ ID NO: 1780881 - RNA, 19 nt, Artificial Sequence
  Description of Artificial Sequence: Synthetic oligonucleotide
  Sense strand starting at position 3225 of SEQ ID NO: 1562898
accacucaguucuuguuua

SEQ ID NO: 1780882 - RNA, 19 nt, Artificial Sequence
  Description of Artificial Sequence: Synthetic oligonucleotide
  Antisense strand to SEQ ID NO: 1780881
uaaacaagaacugaguggu

SEQ ID NO: 1780883 - RNA, 19 nt, Artificial Sequence
  Description of Artificial Sequence: Synthetic oligonucleotide
  Sense strand starting at position 3230 of SEQ ID NO: 1562898
ucaguucuuguuuauguca

SEQ ID NO: 1780884 - RNA, 19 nt, Artificial Sequence
  Description of Artificial Sequence: Synthetic oligonucleotide
  Antisense strand to SEQ ID NO: 1780883
ugacauaaacaagaacuga

SEQ ID NO: 1780885 - RNA, 19 nt, Artificial Sequence
  Description of Artificial Sequence: Synthetic oligonucleotide
  Sense strand starting at position 3281 of SEQ ID NO: 1562898
gcaauuauuucuguuuguc

SEQ ID NO: 1780886 - RNA, 19 nt, Artificial Sequence
  Description of Artificial Sequence: Synthetic oligonucleotide
  Antisense strand to SEQ ID NO: 1780885
gacaaacagaaauaauugc

SEQ ID NO: 1780887 - RNA, 19 nt, Artificial Sequence
  Description of Artificial Sequence: Synthetic oligonucleotide
  Sense strand starting at position 3297 of SEQ ID NO: 1562898
gucagaaugcaguacgaau

SEQ ID NO: 1780888 - RNA, 19 nt, Artificial Sequence
  Description of Artificial Sequence: Synthetic oligonucleotide
  Antisense strand to SEQ ID NO: 1780887
auucguacugcauucugac

SEQ ID NO: 1780889 - RNA, 19 nt, Artificial Sequence
  Description of Artificial Sequence: Synthetic oligonucleotide
  Sense strand starting at position 3299 of SEQ ID NO: 1562898
cagaaugcaguacgaauau

SEQ ID NO: 1780890 - RNA, 19 nt, Artificial Sequence
  Description of Artificial Sequence: Synthetic oligonucleotide
  Antisense strand to SEQ ID NO: 1780889
auauucguacugcauucug

SEQ ID NO: 1780891 - RNA, 19 nt, Artificial Sequence
  Description of Artificial Sequence: Synthetic oligonucleotide
  Sense strand starting at position 3328 of SEQ ID NO: 1562898
acaauaaguugcuugucaa

SEQ ID NO: 1780892 - RNA, 19 nt, Artificial Sequence
  Description of Artificial Sequence: Synthetic oligonucleotide
  Antisense strand to SEQ ID NO: 1780891
uugacaagcaacuuauugu

SEQ ID NO: 1780893 - RNA, 19 nt, Artificial Sequence
  Description of Artificial Sequence: Synthetic oligonucleotide
  Sense strand starting at position 3331 of SEQ ID NO: 1562898
auaaguugcuugucaaaua

SEQ ID NO: 1780894 - RNA, 19 nt, Artificial Sequence
  Description of Artificial Sequence: Synthetic oligonucleotide
  Antisense strand to SEQ ID NO: 1780893
uauuugacaagcaacuuau

SEQ ID NO: 1780895 - RNA, 19 nt, Artificial Sequence
  Description of Artificial Sequence: Synthetic oligonucleotide
  Sense strand starting at position 3336 of SEQ ID NO: 1562898
uugcuugucaaauauggga

SEQ ID NO: 1780896 - RNA, 19 nt, Artificial Sequence
  Description of Artificial Sequence: Synthetic oligonucleotide
  Antisense strand to SEQ ID NO: 1780895
ucccauauuugacaagcaa

SEQ ID NO: 1780897 - RNA, 19 nt, Artificial Sequence
  Description of Artificial Sequence: Synthetic oligonucleotide
  Sense strand starting at position 3387 of SEQ ID NO: 1562898
ccuguuaggagcuaucuag

SEQ ID NO: 1780898 - RNA, 19 nt, Artificial Sequence
  Description of Artificial Sequence: Synthetic oligonucleotide
  Antisense strand to SEQ ID NO: 1780897
cuagauagcuccuaacagg

SEQ ID NO: 1780899 - RNA, 19 nt, Artificial Sequence
  Description of Artificial Sequence: Synthetic oligonucleotide
  Sense strand starting at position 3393 of SEQ ID NO: 1562898
aggagcuaucuagaaagcu

SEQ ID NO: 1780900 - RNA, 19 nt, Artificial Sequence
  Description of Artificial Sequence: Synthetic oligonucleotide
  Antisense strand to SEQ ID NO: 1780899
agcuuucuagauagcuccu

SEQ ID NO: 1780901 - RNA, 19 nt, Artificial Sequence
  Description of Artificial Sequence: Synthetic oligonucleotide
  Sense strand starting at position 3460 of SEQ ID NO: 1562898
agguguuauacucagaggu

SEQ ID NO: 1780902 - RNA, 19 nt, Artificial Sequence
  Description of Artificial Sequence: Synthetic oligonucleotide
  Antisense strand to SEQ ID NO: 1780901
accucugaguauaacaccu

SEQ ID NO: 1780903 - RNA, 19 nt, Artificial Sequence
  Description of Artificial Sequence: Synthetic oligonucleotide
  Sense strand starting at position 3485 of SEQ ID NO: 1562898
ucaaauguguacuuuguua

SEQ ID NO: 1780904 - RNA, 19 nt, Artificial Sequence
  Description of Artificial Sequence: Synthetic oligonucleotide
  Antisense strand to SEQ ID NO: 1780903
uaacaaaguacacauuuga

SEQ ID NO: 1780905 - RNA, 19 nt, Artificial Sequence
  Description of Artificial Sequence: Synthetic oligonucleotide
  Sense strand starting at position 3524 of SEQ ID NO: 1562898
uguagacauucucugucaa

SEQ ID NO: 1780906 - RNA, 19 nt, Artificial Sequence
  Description of Artificial Sequence: Synthetic oligonucleotide
  Antisense strand to SEQ ID NO: 1780905
uugacagagaaugucuaca

SEQ ID NO: 1780907 - RNA, 19 nt, Artificial Sequence
  Description of Artificial Sequence: Synthetic oligonucleotide
  Sense strand starting at position 3525 of SEQ ID NO: 1562898
guagacauucucugucaac

SEQ ID NO: 1780908 - RNA, 19 nt, Artificial Sequence
  Description of Artificial Sequence: Synthetic oligonucleotide
  Antisense strand to SEQ ID NO: 1780907
guugacagagaaugucuac

SEQ ID NO: 1780909 - RNA, 19 nt, Artificial Sequence
  Description of Artificial Sequence: Synthetic oligonucleotide
  Sense strand starting at position 3611 of SEQ ID NO: 1562898
aguuguuaugcguuguacu

SEQ ID NO: 1780910 - RNA, 19 nt, Artificial Sequence
  Description of Artificial Sequence: Synthetic oligonucleotide
  Antisense strand to SEQ ID NO: 1780909
aguacaacgcauaacaacu

SEQ ID NO: 1780911 - RNA, 19 nt, Artificial Sequence
  Description of Artificial Sequence: Synthetic oligonucleotide
  Sense strand starting at position 3623 of SEQ ID NO: 1562898
uuguacucucaggaagcuu

SEQ ID NO: 1780912 - RNA, 19 nt, Artificial Sequence
  Description of Artificial Sequence: Synthetic oligonucleotide
  Antisense strand to SEQ ID NO: 1780911
aagcuuccugagaguacaa

SEQ ID NO: 1780913 - RNA, 19 nt, Artificial Sequence
  Description of Artificial Sequence: Synthetic oligonucleotide
  Sense strand starting at position 46 of SEQ ID NO: 1562899
ugaguuacugaguggaaag

SEQ ID NO: 1780914 - RNA, 19 nt, Artificial Sequence
  Description of Artificial Sequence: Synthetic oligonucleotide
  Antisense strand to SEQ ID NO: 1780913
cuuuccacucaguaacuca

SEQ ID NO: 1780915 - RNA, 19 nt, Artificial Sequence
  Description of Artificial Sequence: Synthetic oligonucleotide
  Sense strand starting at position 88 of SEQ ID NO: 1562899
aggaccagcuucuuaaaga

SEQ ID NO: 1780916 - RNA, 19 nt, Artificial Sequence
  Description of Artificial Sequence: Synthetic oligonucleotide
  Antisense strand to SEQ ID NO: 1780915
ucuuuaagaagcugguccu

SEQ ID NO: 1780917 - RNA, 19 nt, Artificial Sequence
  Description of Artificial Sequence: Synthetic oligonucleotide
  Sense strand starting at position 208 of SEQ ID NO: 1562899
uagcuagcaugaguuugau

SEQ ID NO: 1780918 - RNA, 19 nt, Artificial Sequence
  Description of Artificial Sequence: Synthetic oligonucleotide
  Antisense strand to SEQ ID NO: 1780917
aucaaacucaugcuagcua

SEQ ID NO: 1780919 - RNA, 19 nt, Artificial Sequence
  Description of Artificial Sequence: Synthetic oligonucleotide
  Sense strand starting at position 268 of SEQ ID NO: 1562899
ugauaacagugcucauaca

SEQ ID NO: 1780920 - RNA, 19 nt, Artificial Sequence
  Description of Artificial Sequence: Synthetic oligonucleotide
  Antisense strand to SEQ ID NO: 1780919
uguaugagcacuguuauca

SEQ ID NO: 1780921 - RNA, 19 nt, Artificial Sequence
  Description of Artificial Sequence: Synthetic oligonucleotide
  Sense strand starting at position 334 of SEQ ID NO: 1562899
aguacuaccuuguauuuga

SEQ ID NO: 1780922 - RNA, 19 nt, Artificial Sequence
  Description of Artificial Sequence: Synthetic oligonucleotide
  Antisense strand to SEQ ID NO: 1780921
ucaaauacaagguaguacu

SEQ ID NO: 1780923 - RNA, 19 nt, Artificial Sequence
  Description of Artificial Sequence: Synthetic oligonucleotide
  Sense strand starting at position 341 of SEQ ID NO: 1562899
ccuuguauuugacagaaga

SEQ ID NO: 1780924 - RNA, 19 nt, Artificial Sequence
  Description of Artificial Sequence: Synthetic oligonucleotide
  Antisense strand to SEQ ID NO: 1780923
ucuucugucaaauacaagg

SEQ ID NO: 1780925 - RNA, 19 nt, Artificial Sequence
  Description of Artificial Sequence: Synthetic oligonucleotide
  Sense strand starting at position 405 of SEQ ID NO: 1562899
agugaaagcaagugauaca

SEQ ID NO: 1780926 - RNA, 19 nt, Artificial Sequence
  Description of Artificial Sequence: Synthetic oligonucleotide
  Antisense strand to SEQ ID NO: 1780925
uguaucacuugcuuucacu

SEQ ID NO: 1780927 - RNA, 19 nt, Artificial Sequence
  Description of Artificial Sequence: Synthetic oligonucleotide
  Sense strand starting at position 483 of SEQ ID NO: 1562899
ccucuuuagcuagaaguca

SEQ ID NO: 1780928 - RNA, 19 nt, Artificial Sequence
  Description of Artificial Sequence: Synthetic oligonucleotide
  Antisense strand to SEQ ID NO: 1780927
ugacuucuagcuaaagagg

SEQ ID NO: 1780929 - RNA, 19 nt, Artificial Sequence
  Description of Artificial Sequence: Synthetic oligonucleotide
  Sense strand starting at position 488 of SEQ ID NO: 1562899
uuagcuagaagucagguua

SEQ ID NO: 1780930 - RNA, 19 nt, Artificial Sequence
  Description of Artificial Sequence: Synthetic oligonucleotide
  Antisense strand to SEQ ID NO: 1780929
uaaccugacuucuagcuaa

SEQ ID NO: 1780931 - RNA, 19 nt, Artificial Sequence
  Description of Artificial Sequence: Synthetic oligonucleotide
  Sense strand starting at position 533 of SEQ ID NO: 1562899
cccgaaggugcaugauaaa

SEQ ID NO: 1780932 - RNA, 19 nt, Artificial Sequence
  Description of Artificial Sequence: Synthetic oligonucleotide
  Antisense strand to SEQ ID NO: 1780931
uuuaucaugcaccuucggg

SEQ ID NO: 1780933 - RNA, 19 nt, Artificial Sequence
  Description of Artificial Sequence: Synthetic oligonucleotide
  Sense strand starting at position 688 of SEQ ID NO: 1562899
ugucuuaucuugucggaaa

SEQ ID NO: 1780934 - RNA, 19 nt, Artificial Sequence
  Description of Artificial Sequence: Synthetic oligonucleotide
  Antisense strand to SEQ ID NO: 1780933
uuuccgacaagauaagaca

SEQ ID NO: 1780935 - RNA, 19 nt, Artificial Sequence
  Description of Artificial Sequence: Synthetic oligonucleotide
  Sense strand starting at position 856 of SEQ ID NO: 1562899
ugcuuuaugcuagaacuca

SEQ ID NO: 1780936 - RNA, 19 nt, Artificial Sequence
  Description of Artificial Sequence: Synthetic oligonucleotide
  Antisense strand to SEQ ID NO: 1780935
ugaguucuagcauaaagca

SEQ ID NO: 1780937 - RNA, 19 nt, Artificial Sequence
  Description of Artificial Sequence: Synthetic oligonucleotide
  Sense strand starting at position 1002 of SEQ ID NO: 1562899
ugucucuuuccagaucuca

SEQ ID NO: 1780938 - RNA, 19 nt, Artificial Sequence
  Description of Artificial Sequence: Synthetic oligonucleotide
  Antisense strand to SEQ ID NO: 1780937
ugagaucuggaaagagaca

SEQ ID NO: 1780939 - RNA, 19 nt, Artificial Sequence
  Description of Artificial Sequence: Synthetic oligonucleotide
  Sense strand starting at position 1060 of SEQ ID NO: 1562899
ugaggauugcucuggcaug

SEQ ID NO: 1780940 - RNA, 19 nt, Artificial Sequence
  Description of Artificial Sequence: Synthetic oligonucleotide
  Antisense strand to SEQ ID NO: 1780939
caugccagagcaauccuca

SEQ ID NO: 1780941 - RNA, 19 nt, Artificial Sequence
  Description of Artificial Sequence: Synthetic oligonucleotide
  Sense strand starting at position 1752 of SEQ ID NO: 1562899
cguuaccuucuccaaggau

SEQ ID NO: 1780942 - RNA, 19 nt, Artificial Sequence
  Description of Artificial Sequence: Synthetic oligonucleotide
  Antisense strand to SEQ ID NO: 1780941
auccuuggagaagguaacg

SEQ ID NO: 1780943 - RNA, 19 nt, Artificial Sequence
  Description of Artificial Sequence: Synthetic oligonucleotide
  Sense strand starting at position 1802 of SEQ ID NO: 1562899
gugacaggaccguguugaa

SEQ ID NO: 1780944 - RNA, 19 nt, Artificial Sequence
  Description of Artificial Sequence: Synthetic oligonucleotide
  Antisense strand to SEQ ID NO: 1780943
uucaacacgguccugucac

SEQ ID NO: 1780945 - RNA, 19 nt, Artificial Sequence
  Description of Artificial Sequence: Synthetic oligonucleotide
  Sense strand starting at position 2626 of SEQ ID NO: 1562899
ucucaaguugccuagcaua

SEQ ID NO: 1780946 - RNA, 19 nt, Artificial Sequence
  Description of Artificial Sequence: Synthetic oligonucleotide
  Antisense strand to SEQ ID NO: 1780945
uaugcuaggcaacuugaga

SEQ ID NO: 1780947 - RNA, 19 nt, Artificial Sequence
  Description of Artificial Sequence: Synthetic oligonucleotide
  Sense strand starting at position 2658 of SEQ ID NO: 1562899
uagugacucgaugguggua

SEQ ID NO: 1780948 - RNA, 19 nt, Artificial Sequence
  Description of Artificial Sequence: Synthetic oligonucleotide
  Antisense strand to SEQ ID NO: 1780947
uaccaccaucgagucacua

SEQ ID NO: 1780949 - RNA, 19 nt, Artificial Sequence
  Description of Artificial Sequence: Synthetic oligonucleotide
  Sense strand starting at position 2672 of SEQ ID NO: 1562899
ugguaacaaucuguuaacu

SEQ ID NO: 1780950 - RNA, 19 nt, Artificial Sequence
  Description of Artificial Sequence: Synthetic oligonucleotide
  Antisense strand to SEQ ID NO: 1780949
aguuaacagauuguuacca

SEQ ID NO: 1780951 - RNA, 19 nt, Artificial Sequence
  Description of Artificial Sequence: Synthetic oligonucleotide
  Sense strand starting at position 2677 of SEQ ID NO: 1562899
acaaucuguuaacuaugua

SEQ ID NO: 1780952 - RNA, 19 nt, Artificial Sequence
  Description of Artificial Sequence: Synthetic oligonucleotide
  Antisense strand to SEQ ID NO: 1780951
uacauaguuaacagauugu

SEQ ID NO: 1780953 - RNA, 19 nt, Artificial Sequence
  Description of Artificial Sequence: Synthetic oligonucleotide
  Sense strand starting at position 2680 of SEQ ID NO: 1562899
aucuguuaacuauguaaag

SEQ ID NO: 1780954 - RNA, 19 nt, Artificial Sequence
  Description of Artificial Sequence: Synthetic oligonucleotide
  Antisense strand to SEQ ID NO: 1780953
cuuuacauaguuaacagau

SEQ ID NO: 1780955 - RNA, 19 nt, Artificial Sequence
  Description of Artificial Sequence: Synthetic oligonucleotide
  Sense strand starting at position 2703 of SEQ ID NO: 1562899
gugcaucuggaguacuuga

SEQ ID NO: 1780956 - RNA, 19 nt, Artificial Sequence
  Description of Artificial Sequence: Synthetic oligonucleotide
  Antisense strand to SEQ ID NO: 1780955
ucaaguacuccagaugcac

SEQ ID NO: 1780957 - RNA, 19 nt, Artificial Sequence
  Description of Artificial Sequence: Synthetic oligonucleotide
  Sense strand starting at position 2753 of SEQ ID NO: 1562899
gcuauuagucugcuucguu

SEQ ID NO: 1780958 - RNA, 19 nt, Artificial Sequence
  Description of Artificial Sequence: Synthetic oligonucleotide
  Antisense strand to SEQ ID NO: 1780957
aacgaagcagacuaauagc

SEQ ID NO: 1780959 - RNA, 19 nt, Artificial Sequence
  Description of Artificial Sequence: Synthetic oligonucleotide
  Sense strand starting at position 2758 of SEQ ID NO: 1562899
uagucugcuucguugauuu

SEQ ID NO: 1780960 - RNA, 19 nt, Artificial Sequence
  Description of Artificial Sequence: Synthetic oligonucleotide
  Antisense strand to SEQ ID NO: 1780959
aaaucaacgaagcagacua

SEQ ID NO: 1780961 - RNA, 19 nt, Artificial Sequence
  Description of Artificial Sequence: Synthetic oligonucleotide
  Sense strand starting at position 2819 of SEQ ID NO: 1562899
uucuguccaggugaguaaa

SEQ ID NO: 1780962 - RNA, 19 nt, Artificial Sequence
  Description of Artificial Sequence: Synthetic oligonucleotide
  Antisense strand to SEQ ID NO: 1780961
uuuacucaccuggacagaa

SEQ ID NO: 1780963 - RNA, 19 nt, Artificial Sequence
  Description of Artificial Sequence: Synthetic oligonucleotide
  Sense strand starting at position 2851 of SEQ ID NO: 1562899
agguccuagguuugggaaa

SEQ ID NO: 1780964 - RNA, 19 nt, Artificial Sequence
  Description of Artificial Sequence: Synthetic oligonucleotide
  Antisense strand to SEQ ID NO: 1780963
uuucccaaaccuaggaccu

SEQ ID NO: 1780965 - RNA, 19 nt, Artificial Sequence
  Description of Artificial Sequence: Synthetic oligonucleotide
  Sense strand starting at position 2878 of SEQ ID NO: 1562899
ccguuucuucgacauuauu

SEQ ID NO: 1780966 - RNA, 19 nt, Artificial Sequence
  Description of Artificial Sequence: Synthetic oligonucleotide
  Antisense strand to SEQ ID NO: 1780965
aauaaugucgaagaaacgg

SEQ ID NO: 1780967 - RNA, 19 nt, Artificial Sequence
  Description of Artificial Sequence: Synthetic oligonucleotide
  Sense strand starting at position 2887 of SEQ ID NO: 1562899
cgacauuauuuccugugca

SEQ ID NO: 1780968 - RNA, 19 nt, Artificial Sequence
  Description of Artificial Sequence: Synthetic oligonucleotide
  Antisense strand to SEQ ID NO: 1780967
ugcacaggaaauaaugucg

SEQ ID NO: 1780969 - RNA, 19 nt, Artificial Sequence
  Description of Artificial Sequence: Synthetic oligonucleotide
  Sense strand starting at position 2979 of SEQ ID NO: 1562899
aggugauacccugaagcau

SEQ ID NO: 1780970 - RNA, 19 nt, Artificial Sequence
  Description of Artificial Sequence: Synthetic oligonucleotide
  Antisense strand to SEQ ID NO: 1780969
augcuucaggguaucaccu

SEQ ID NO: 1780971 - RNA, 19 nt, Artificial Sequence
  Description of Artificial Sequence: Synthetic oligonucleotide
  Sense strand starting at position 3015 of SEQ ID NO: 1562899
gaguucuucccgcaucauu

SEQ ID NO: 1780972 - RNA, 19 nt, Artificial Sequence
  Description of Artificial Sequence: Synthetic oligonucleotide
  Antisense strand to SEQ ID NO: 1780971
aaugaugcgggaagaacuc

SEQ ID NO: 1780973 - RNA, 19 nt, Artificial Sequence
  Description of Artificial Sequence: Synthetic oligonucleotide
  Sense strand starting at position 3100 of SEQ ID NO: 1562899
accaaagccuggguuugau

SEQ ID NO: 1780974 - RNA, 19 nt, Artificial Sequence
  Description of Artificial Sequence: Synthetic oligonucleotide
  Antisense strand to SEQ ID NO: 1780973
aucaaacccaggcuuuggu

SEQ ID NO: 1780975 - RNA, 19 nt, Artificial Sequence
  Description of Artificial Sequence: Synthetic oligonucleotide
  Sense strand starting at position 3116 of SEQ ID NO: 1562899
gauugaguccagggucuua

SEQ ID NO: 1780976 - RNA, 19 nt, Artificial Sequence
  Description of Artificial Sequence: Synthetic oligonucleotide
  Antisense strand to SEQ ID NO: 1780975
uaagacccuggacucaauc

SEQ ID NO: 1780977 - RNA, 19 nt, Artificial Sequence
  Description of Artificial Sequence: Synthetic oligonucleotide
  Sense strand starting at position 3174 of SEQ ID NO: 1562899
aagaguuuguugcuccaac

SEQ ID NO: 1780978 - RNA, 19 nt, Artificial Sequence
  Description of Artificial Sequence: Synthetic oligonucleotide
  Antisense strand to SEQ ID NO: 1780977
guuggagcaacaaacucuu

SEQ ID NO: 1780979 - RNA, 19 nt, Artificial Sequence
  Description of Artificial Sequence: Synthetic oligonucleotide
  Sense strand starting at position 3845 of SEQ ID NO: 1562899
caccauaccggucgagaau

SEQ ID NO: 1780980 - RNA, 19 nt, Artificial Sequence
  Description of Artificial Sequence: Synthetic oligonucleotide
  Antisense strand to SEQ ID NO: 1780979
auucucgaccgguauggug

SEQ ID NO: 1780981 - RNA, 19 nt, Artificial Sequence
  Description of Artificial Sequence: Synthetic oligonucleotide
  Sense strand starting at position 3854 of SEQ ID NO: 1562899
ggucgagaaugauucuuua

SEQ ID NO: 1780982 - RNA, 19 nt, Artificial Sequence
  Description of Artificial Sequence: Synthetic oligonucleotide
  Antisense strand to SEQ ID NO: 1780981
uaaagaaucauucucgacc

SEQ ID NO: 1780983 - RNA, 19 nt, Artificial Sequence
  Description of Artificial Sequence: Synthetic oligonucleotide
  Sense strand starting at position 3857 of SEQ ID NO: 1562899
cgagaaugauucuuuauug

SEQ ID NO: 1780984 - RNA, 19 nt, Artificial Sequence
  Description of Artificial Sequence: Synthetic oligonucleotide
  Antisense strand to SEQ ID NO: 1780983
caauaaagaaucauucucg

SEQ ID NO: 1780985 - RNA, 19 nt, Artificial Sequence
  Description of Artificial Sequence: Synthetic oligonucleotide
  Sense strand starting at position 3858 of SEQ ID NO: 1562899
gagaaugauucuuuauugu

SEQ ID NO: 1780986 - RNA, 19 nt, Artificial Sequence
  Description of Artificial Sequence: Synthetic oligonucleotide
  Antisense strand to SEQ ID NO: 1780985
acaauaaagaaucauucuc

SEQ ID NO: 1780987 - RNA, 19 nt, Artificial Sequence
  Description of Artificial Sequence: Synthetic oligonucleotide
  Sense strand starting at position 3963 of SEQ ID NO: 1562899
cgcgguuguacuucuguaa

SEQ ID NO: 1780988 - RNA, 19 nt, Artificial Sequence
  Description of Artificial Sequence: Synthetic oligonucleotide
  Antisense strand to SEQ ID NO: 1780987
uuacagaaguacaaccgcg

SEQ ID NO: 1780989 - RNA, 19 nt, Artificial Sequence
  Description of Artificial Sequence: Synthetic oligonucleotide
  Sense strand starting at position 3964 of SEQ ID NO: 1562899
gcgguuguacuucuguaau

SEQ ID NO: 1780990 - RNA, 19 nt, Artificial Sequence
  Description of Artificial Sequence: Synthetic oligonucleotide
  Antisense strand to SEQ ID NO: 1780989
auuacagaaguacaaccgc

SEQ ID NO: 1780991 - RNA, 19 nt, Artificial Sequence
  Description of Artificial Sequence: Synthetic oligonucleotide
  Sense strand starting at position 3970 of SEQ ID NO: 1562899
guacuucuguaaucccaac

SEQ ID NO: 1780992 - RNA, 19 nt, Artificial Sequence
  Description of Artificial Sequence: Synthetic oligonucleotide
  Antisense strand to SEQ ID NO: 1780991
guugggauuacagaaguac

SEQ ID NO: 1780993 - RNA, 19 nt, Artificial Sequence
  Description of Artificial Sequence: Synthetic oligonucleotide
  Sense strand starting at position 12 of SEQ ID NO: 1562900
ucgggauuccgcuagaaag

SEQ ID NO: 1780994 - RNA, 19 nt, Artificial Sequence
  Description of Artificial Sequence: Synthetic oligonucleotide
  Antisense strand to SEQ ID NO: 1780993
cuuucuagcggaaucccga

SEQ ID NO: 1780995 - RNA, 19 nt, Artificial Sequence
  Description of Artificial Sequence: Synthetic oligonucleotide
  Sense strand starting at position 44 of SEQ ID NO: 1562900
gcugacucuccuggcagaa

SEQ ID NO: 1780996 - RNA, 19 nt, Artificial Sequence
  Description of Artificial Sequence: Synthetic oligonucleotide
  Antisense strand to SEQ ID NO: 1780995
uucugccaggagagucagc

SEQ ID NO: 1780997 - RNA, 19 nt, Artificial Sequence
  Description of Artificial Sequence: Synthetic oligonucleotide
  Sense strand starting at position 181 of SEQ ID NO: 1562900
gaguuaagcagauguggga

SEQ ID NO: 1780998 - RNA, 19 nt, Artificial Sequence
  Description of Artificial Sequence: Synthetic oligonucleotide
  Antisense strand to SEQ ID NO: 1780997
ucccacaucugcuuaacuc

SEQ ID NO: 1780999 - RNA, 19 nt, Artificial Sequence
  Description of Artificial Sequence: Synthetic oligonucleotide
  Sense strand starting at position 185 of SEQ ID NO: 1562900
uaagcagaugugggaucaa

SEQ ID NO: 1781000 - RNA, 19 nt, Artificial Sequence
  Description of Artificial Sequence: Synthetic oligonucleotide
  Antisense strand to SEQ ID NO: 1780999
uugaucccacaucugcuua

SEQ ID NO: 1781001 - RNA, 19 nt, Artificial Sequence
  Description of Artificial Sequence: Synthetic oligonucleotide
  Sense strand starting at position 534 of SEQ ID NO: 1562900
agcuaugggacuuggguaa

SEQ ID NO: 1781002 - RNA, 19 nt, Artificial Sequence
  Description of Artificial Sequence: Synthetic oligonucleotide
  Antisense strand to SEQ ID NO: 1781001
uuacccaagucccauagcu

SEQ ID NO: 1781003 - RNA, 19 nt, Artificial Sequence
  Description of Artificial Sequence: Synthetic oligonucleotide
  Sense strand starting at position 597 of SEQ ID NO: 1562900
ugagcacccuuaucagagu

SEQ ID NO: 1781004 - RNA, 19 nt, Artificial Sequence
  Description of Artificial Sequence: Synthetic oligonucleotide
  Antisense strand to SEQ ID NO: 1781003
acucugauaagggugcuca

SEQ ID NO: 1781005 - RNA, 19 nt, Artificial Sequence
  Description of Artificial Sequence: Synthetic oligonucleotide
  Sense strand starting at position 699 of SEQ ID NO: 1562900
uuuauucgaucucugagau

SEQ ID NO: 1781006 - RNA, 19 nt, Artificial Sequence
  Description of Artificial Sequence: Synthetic oligonucleotide
  Antisense strand to SEQ ID NO: 1781005
aucucagagaucgaauaaa

SEQ ID NO: 1781007 - RNA, 19 nt, Artificial Sequence
  Description of Artificial Sequence: Synthetic oligonucleotide
  Sense strand starting at position 700 of SEQ ID NO: 1562900
uuauucgaucucugagauu

SEQ ID NO: 1781008 - RNA, 19 nt, Artificial Sequence
  Description of Artificial Sequence: Synthetic oligonucleotide
  Antisense strand to SEQ ID NO: 1781007
aaucucagagaucgaauaa

SEQ ID NO: 1781009 - RNA, 19 nt, Artificial Sequence
  Description of Artificial Sequence: Synthetic oligonucleotide
  Sense strand starting at position 703 of SEQ ID NO: 1562900
uucgaucucugagauuuga

SEQ ID NO: 1781010 - RNA, 19 nt, Artificial Sequence
  Description of Artificial Sequence: Synthetic oligonucleotide
  Antisense strand to SEQ ID NO: 1781009
ucaaaucucagagaucgaa

SEQ ID NO: 1781011 - RNA, 19 nt, Artificial Sequence
  Description of Artificial Sequence: Synthetic oligonucleotide
  Sense strand starting at position 747 of SEQ ID NO: 1562900
ucaggcaucuauguaguau

SEQ ID NO: 1781012 - RNA, 19 nt, Artificial Sequence
  Description of Artificial Sequence: Synthetic oligonucleotide
  Antisense strand to SEQ ID NO: 1781011
auacuacauagaugccuga

SEQ ID NO: 1781013 - RNA, 19 nt, Artificial Sequence
  Description of Artificial Sequence: Synthetic oligonucleotide
  Sense strand starting at position 759 of SEQ ID NO: 1562900
guaguaugauggccaccua

SEQ ID NO: 1781014 - RNA, 19 nt, Artificial Sequence
  Description of Artificial Sequence: Synthetic oligonucleotide
  Antisense strand to SEQ ID NO: 1781013
uagguggccaucauacuac

SEQ ID NO: 1781015 - RNA, 19 nt, Artificial Sequence
  Description of Artificial Sequence: Synthetic oligonucleotide
  Sense strand starting at position 781 of SEQ ID NO: 1562900
cagggagucuuccucuauu

SEQ ID NO: 1781016 - RNA, 19 nt, Artificial Sequence
  Description of Artificial Sequence: Synthetic oligonucleotide
  Antisense strand to SEQ ID NO: 1781015
aauagaggaagacucccug

SEQ ID NO: 1781017 - RNA, 19 nt, Artificial Sequence
  Description of Artificial Sequence: Synthetic oligonucleotide
  Sense strand starting at position 784 of SEQ ID NO: 1562900
ggagucuuccucuauuaaa

SEQ ID NO: 1781018 - RNA, 19 nt, Artificial Sequence
  Description of Artificial Sequence: Synthetic oligonucleotide
  Antisense strand to SEQ ID NO: 1781017
uuuaauagaggaagacucc

SEQ ID NO: 1781019 - RNA, 19 nt, Artificial Sequence
  Description of Artificial Sequence: Synthetic oligonucleotide
  Sense strand starting at position 827 of SEQ ID NO: 1562900
gcucgauuaccucucgguu

SEQ ID NO: 1781020 - RNA, 19 nt, Artificial Sequence
  Description of Artificial Sequence: Synthetic oligonucleotide
  Antisense strand to SEQ ID NO: 1781019
aaccgagagguaaucgagc

SEQ ID NO: 1781021 - RNA, 19 nt, Artificial Sequence
  Description of Artificial Sequence: Synthetic oligonucleotide
  Sense strand starting at position 839 of SEQ ID NO: 1562900
cucgguuuccacuauaaau

SEQ ID NO: 1781022 - RNA, 19 nt, Artificial Sequence
  Description of Artificial Sequence: Synthetic oligonucleotide
  Antisense strand to SEQ ID NO: 1781021
auuuauaguggaaaccgag

SEQ ID NO: 1781023 - RNA, 19 nt, Artificial Sequence
  Description of Artificial Sequence: Synthetic oligonucleotide
  Sense strand starting at position 841 of SEQ ID NO: 1562900
cgguuuccacuauaaauua

SEQ ID NO: 1781024 - RNA, 19 nt, Artificial Sequence
  Description of Artificial Sequence: Synthetic oligonucleotide
  Antisense strand to SEQ ID NO: 1781023
uaauuuauaguggaaaccg

SEQ ID NO: 1781025 - RNA, 19 nt, Artificial Sequence
  Description of Artificial Sequence: Synthetic oligonucleotide
  Sense strand starting at position 937 of SEQ ID NO: 1562900
gacgucaagucccuuacua

SEQ ID NO: 1781026 - RNA, 19 nt, Artificial Sequence
  Description of Artificial Sequence: Synthetic oligonucleotide
  Antisense strand to SEQ ID NO: 1781025
uaguaagggacuugacguc

SEQ ID NO: 1781027 - RNA, 19 nt, Artificial Sequence
  Description of Artificial Sequence: Synthetic oligonucleotide
  Sense strand starting at position 939 of SEQ ID NO: 1562900
cgucaagucccuuacuaag

SEQ ID NO: 1781028 - RNA, 19 nt, Artificial Sequence
  Description of Artificial Sequence: Synthetic oligonucleotide
  Antisense strand to SEQ ID NO: 1781027
cuuaguaagggacuugacg

SEQ ID NO: 1781029 - RNA, 19 nt, Artificial Sequence
  Description of Artificial Sequence: Synthetic oligonucleotide
  Sense strand starting at position 950 of SEQ ID NO: 1562900
uuacuaagugcugagcaua

SEQ ID NO: 1781030 - RNA, 19 nt, Artificial Sequence
  Description of Artificial Sequence: Synthetic oligonucleotide
  Antisense strand to SEQ ID NO: 1781029
uaugcucagcacuuaguaa

SEQ ID NO: 1781031 - RNA, 19 nt, Artificial Sequence
  Description of Artificial Sequence: Synthetic oligonucleotide
  Sense strand starting at position 955 of SEQ ID NO: 1562900
aagugcugagcauagagaa

SEQ ID NO: 1781032 - RNA, 19 nt, Artificial Sequence
  Description of Artificial Sequence: Synthetic oligonucleotide
  Antisense strand to SEQ ID NO: 1781031
uucucuaugcucagcacuu

SEQ ID NO: 1781033 - RNA, 19 nt, Artificial Sequence
  Description of Artificial Sequence: Synthetic oligonucleotide
  Sense strand starting at position 1053 of SEQ ID NO: 1562900
aaggaagggugucuacaau

SEQ ID NO: 1781034 - RNA, 19 nt, Artificial Sequence
  Description of Artificial Sequence: Synthetic oligonucleotide
  Antisense strand to SEQ ID NO: 1781033
auuguagacacccuuccuu

SEQ ID NO: 1781035 - RNA, 19 nt, Artificial Sequence
  Description of Artificial Sequence: Synthetic oligonucleotide
  Sense strand starting at position 1168 of SEQ ID NO: 1562900
ucuucuugucaccaaguca

SEQ ID NO: 1781036 - RNA, 19 nt, Artificial Sequence
  Description of Artificial Sequence: Synthetic oligonucleotide
  Antisense strand to SEQ ID NO: 1781035
ugacuuggugacaagaaga

SEQ ID NO: 1781037 - RNA, 19 nt, Artificial Sequence
  Description of Artificial Sequence: Synthetic oligonucleotide
  Sense strand starting at position 1212 of SEQ ID NO: 1562900
agcugugauuaucccuuua

SEQ ID NO: 1781038 - RNA, 19 nt, Artificial Sequence
  Description of Artificial Sequence: Synthetic oligonucleotide
  Antisense strand to SEQ ID NO: 1781037
uaaagggauaaucacagcu

SEQ ID NO: 1781039 - RNA, 19 nt, Artificial Sequence
  Description of Artificial Sequence: Synthetic oligonucleotide
  Sense strand starting at position 1656 of SEQ ID NO: 1562900
aggugauucuuacuaggua

SEQ ID NO: 1781040 - RNA, 19 nt, Artificial Sequence
  Description of Artificial Sequence: Synthetic oligonucleotide
  Antisense strand to SEQ ID NO: 1781039
uaccuaguaagaaucaccu

SEQ ID NO: 1781041 - RNA, 19 nt, Artificial Sequence
  Description of Artificial Sequence: Synthetic oligonucleotide
  Sense strand starting at position 1659 of SEQ ID NO: 1562900
ugauucuuacuagguacaa

SEQ ID NO: 1781042 - RNA, 19 nt, Artificial Sequence
  Description of Artificial Sequence: Synthetic oligonucleotide
  Antisense strand to SEQ ID NO: 1781041
uuguaccuaguaagaauca

SEQ ID NO: 1781043 - RNA, 19 nt, Artificial Sequence
  Description of Artificial Sequence: Synthetic oligonucleotide
  Sense strand starting at position 2193 of SEQ ID NO: 1562900
ggcucaguggacuauaaac

SEQ ID NO: 1781044 - RNA, 19 nt, Artificial Sequence
  Description of Artificial Sequence: Synthetic oligonucleotide
  Antisense strand to SEQ ID NO: 1781043
guuuauaguccacugagcc

SEQ ID NO: 1781045 - RNA, 19 nt, Artificial Sequence
  Description of Artificial Sequence: Synthetic oligonucleotide
  Sense strand starting at position 2361 of SEQ ID NO: 1562900
guguaagaucuggaucgug

SEQ ID NO: 1781046 - RNA, 19 nt, Artificial Sequence
  Description of Artificial Sequence: Synthetic oligonucleotide
  Antisense strand to SEQ ID NO: 1781045
cacgauccagaucuuacac

SEQ ID NO: 1781047 - RNA, 19 nt, Artificial Sequence
  Description of Artificial Sequence: Synthetic oligonucleotide
  Sense strand starting at position 2407 of SEQ ID NO: 1562900
gggaucuuugaacguccaa

SEQ ID NO: 1781048 - RNA, 19 nt, Artificial Sequence
  Description of Artificial Sequence: Synthetic oligonucleotide
  Antisense strand to SEQ ID NO: 1781047
uuggacguucaaagauccc

SEQ ID NO: 1781049 - RNA, 19 nt, Artificial Sequence
  Description of Artificial Sequence: Synthetic oligonucleotide
  Sense strand starting at position 2542 of SEQ ID NO: 1562900
ugagguaaaugcuuucuau

SEQ ID NO: 1781050 - RNA, 19 nt, Artificial Sequence
  Description of Artificial Sequence: Synthetic oligonucleotide
  Antisense strand to SEQ ID NO: 1781049
auagaaagcauuuaccuca

SEQ ID NO: 1781051 - RNA, 19 nt, Artificial Sequence
  Description of Artificial Sequence: Synthetic oligonucleotide
  Sense strand starting at position 2545 of SEQ ID NO: 1562900
gguaaaugcuuucuauggu

SEQ ID NO: 1781052 - RNA, 19 nt, Artificial Sequence
  Description of Artificial Sequence: Synthetic oligonucleotide
  Antisense strand to SEQ ID NO: 1781051
accauagaaagcauuuacc

SEQ ID NO: 1781053 - RNA, 19 nt, Artificial Sequence
  Description of Artificial Sequence: Synthetic oligonucleotide
  Sense strand starting at position 2555 of SEQ ID NO: 1562900
uucuaugguauauggugaa

SEQ ID NO: 1781054 - RNA, 19 nt, Artificial Sequence
  Description of Artificial Sequence: Synthetic oligonucleotide
  Antisense strand to SEQ ID NO: 1781053
uucaccauauaccauagaa

SEQ ID NO: 1781055 - RNA, 19 nt, Artificial Sequence
  Description of Artificial Sequence: Synthetic oligonucleotide
  Sense strand starting at position 2559 of SEQ ID NO: 1562900
augguauauggugaaaggu

SEQ ID NO: 1781056 - RNA, 19 nt, Artificial Sequence
  Description of Artificial Sequence: Synthetic oligonucleotide
  Antisense strand to SEQ ID NO: 1781055
accuuucaccauauaccau

SEQ ID NO: 1781057 - RNA, 19 nt, Artificial Sequence
  Description of Artificial Sequence: Synthetic oligonucleotide
  Sense strand starting at position 2568 of SEQ ID NO: 1562900
ggugaaagguuucucacac

SEQ ID NO: 1781058 - RNA, 19 nt, Artificial Sequence
  Description of Artificial Sequence: Synthetic oligonucleotide
  Antisense strand to SEQ ID NO: 1781057
gugugagaaaccuuucacc

SEQ ID NO: 1781059 - RNA, 19 nt, Artificial Sequence
  Description of Artificial Sequence: Synthetic oligonucleotide
  Sense strand starting at position 2654 of SEQ ID NO: 1562900
guaccugaggcucgggaaa

SEQ ID NO: 1781060 - RNA, 19 nt, Artificial Sequence
  Description of Artificial Sequence: Synthetic oligonucleotide
  Antisense strand to SEQ ID NO: 1781059
uuucccgagccucagguac

SEQ ID NO: 1781061 - RNA, 19 nt, Artificial Sequence
  Description of Artificial Sequence: Synthetic oligonucleotide
  Sense strand starting at position 2925 of SEQ ID NO: 1562900
uccuuagguggcuaauuga

SEQ ID NO: 1781062 - RNA, 19 nt, Artificial Sequence
  Description of Artificial Sequence: Synthetic oligonucleotide
  Antisense strand to SEQ ID NO: 1781061
ucaauuagccaccuaagga

SEQ ID NO: 1781063 - RNA, 19 nt, Artificial Sequence
  Description of Artificial Sequence: Synthetic oligonucleotide
  Sense strand starting at position 2958 of SEQ ID NO: 1562900
gcagaaugccgugacaaua

SEQ ID NO: 1781064 - RNA, 19 nt, Artificial Sequence
  Description of Artificial Sequence: Synthetic oligonucleotide
  Antisense strand to SEQ ID NO: 1781063
uauugucacggcauucugc

SEQ ID NO: 1781065 - RNA, 19 nt, Artificial Sequence
  Description of Artificial Sequence: Synthetic oligonucleotide
  Sense strand starting at position 3463 of SEQ ID NO: 1562900
gggagaucuugggugaguc

SEQ ID NO: 1781066 - RNA, 19 nt, Artificial Sequence
  Description of Artificial Sequence: Synthetic oligonucleotide
  Antisense strand to SEQ ID NO: 1781065
gacucacccaagaucuccc

SEQ ID NO: 1781067 - RNA, 19 nt, Artificial Sequence
  Description of Artificial Sequence: Synthetic oligonucleotide
  Sense strand starting at position 3634 of SEQ ID NO: 1562900
gagaucaggaguugguaua

SEQ ID NO: 1781068 - RNA, 19 nt, Artificial Sequence
  Description of Artificial Sequence: Synthetic oligonucleotide
  Antisense strand to SEQ ID NO: 1781067
uauaccaacuccugaucuc

SEQ ID NO: 1781069 - RNA, 19 nt, Artificial Sequence
  Description of Artificial Sequence: Synthetic oligonucleotide
  Sense strand starting at position 3635 of SEQ ID NO: 1562900
agaucaggaguugguauaa

SEQ ID NO: 1781070 - RNA, 19 nt, Artificial Sequence
  Description of Artificial Sequence: Synthetic oligonucleotide
  Antisense strand to SEQ ID NO: 1781069
uuauaccaacuccugaucu

SEQ ID NO: 1781071 - RNA, 19 nt, Artificial Sequence
  Description of Artificial Sequence: Synthetic oligonucleotide
  Sense strand starting at position 3890 of SEQ ID NO: 1562900
aggagaaacaggugugagu

SEQ ID NO: 1781072 - RNA, 19 nt, Artificial Sequence
  Description of Artificial Sequence: Synthetic oligonucleotide
  Antisense strand to SEQ ID NO: 1781071
acucacaccuguuucuccu

SEQ ID NO: 1781073 - RNA, 19 nt, Artificial Sequence
  Description of Artificial Sequence: Synthetic oligonucleotide
  Sense strand starting at position 5 of SEQ ID NO: 1562901
ucgcuuaacuucucugaag

SEQ ID NO: 1781074 - RNA, 19 nt, Artificial Sequence
  Description of Artificial Sequence: Synthetic oligonucleotide
  Antisense strand to SEQ ID NO: 1781073
cuucagagaaguuaagcga

SEQ ID NO: 1781075 - RNA, 19 nt, Artificial Sequence
  Description of Artificial Sequence: Synthetic oligonucleotide
  Sense strand starting at position 120 of SEQ ID NO: 1562901
uccgcaaacggucaauaaa

SEQ ID NO: 1781076 - RNA, 19 nt, Artificial Sequence
  Description of Artificial Sequence: Synthetic oligonucleotide
  Antisense strand to SEQ ID NO: 1781075
uuuauugaccguuugcgga

SEQ ID NO: 1781077 - RNA, 19 nt, Artificial Sequence
  Description of Artificial Sequence: Synthetic oligonucleotide
  Sense strand starting at position 233 of SEQ ID NO: 1562901
ggcggaugagcucauacga

SEQ ID NO: 1781078 - RNA, 19 nt, Artificial Sequence
  Description of Artificial Sequence: Synthetic oligonucleotide
  Antisense strand to SEQ ID NO: 1781077
ucguaugagcucauccgcc

SEQ ID NO: 1781079 - RNA, 19 nt, Artificial Sequence
  Description of Artificial Sequence: Synthetic oligonucleotide
  Sense strand starting at position 518 of SEQ ID NO: 1562901
ccggguuucggcaguaacu

SEQ ID NO: 1781080 - RNA, 19 nt, Artificial Sequence
  Description of Artificial Sequence: Synthetic oligonucleotide
  Antisense strand to SEQ ID NO: 1781079
aguuacugccgaaacccgg

SEQ ID NO: 1781081 - RNA, 19 nt, Artificial Sequence
  Description of Artificial Sequence: Synthetic oligonucleotide
  Sense strand starting at position 743 of SEQ ID NO: 1562901
gccguugucccagaaacag

SEQ ID NO: 1781082 - RNA, 19 nt, Artificial Sequence
  Description of Artificial Sequence: Synthetic oligonucleotide
  Antisense strand to SEQ ID NO: 1781081
cuguuucugggacaacggc

SEQ ID NO: 1781083 - RNA, 19 nt, Artificial Sequence
  Description of Artificial Sequence: Synthetic oligonucleotide
  Sense strand starting at position 1180 of SEQ ID NO: 1562901
ugacauuugucccuguguu

SEQ ID NO: 1781084 - RNA, 19 nt, Artificial Sequence
  Description of Artificial Sequence: Synthetic oligonucleotide
  Antisense strand to SEQ ID NO: 1781083
aacacagggacaaauguca

SEQ ID NO: 1781085 - RNA, 19 nt, Artificial Sequence
  Description of Artificial Sequence: Synthetic oligonucleotide
  Sense strand starting at position 1181 of SEQ ID NO: 1562901
gacauuugucccuguguug

SEQ ID NO: 1781086 - RNA, 19 nt, Artificial Sequence
  Description of Artificial Sequence: Synthetic oligonucleotide
  Antisense strand to SEQ ID NO: 1781085
caacacagggacaaauguc

SEQ ID NO: 1781087 - RNA, 19 nt, Artificial Sequence
  Description of Artificial Sequence: Synthetic oligonucleotide
  Sense strand starting at position 1184 of SEQ ID NO: 1562901
auuugucccuguguuguaa

SEQ ID NO: 1781088 - RNA, 19 nt, Artificial Sequence
  Description of Artificial Sequence: Synthetic oligonucleotide
  Antisense strand to SEQ ID NO: 1781087
uuacaacacagggacaaau

SEQ ID NO: 1781089 - RNA, 19 nt, Artificial Sequence
  Description of Artificial Sequence: Synthetic oligonucleotide
  Sense strand starting at position 1289 of SEQ ID NO: 1562901
gagaauucuccaggagccu

SEQ ID NO: 1781090 - RNA, 19 nt, Artificial Sequence
  Description of Artificial Sequence: Synthetic oligonucleotide
  Antisense strand to SEQ ID NO: 1781089
aggcuccuggagaauucuc

SEQ ID NO: 1781091 - RNA, 19 nt, Artificial Sequence
  Description of Artificial Sequence: Synthetic oligonucleotide
  Sense strand starting at position 1290 of SEQ ID NO: 1562901
agaauucuccaggagccuu

SEQ ID NO: 1781092 - RNA, 19 nt, Artificial Sequence
  Description of Artificial Sequence: Synthetic oligonucleotide
  Antisense strand to SEQ ID NO: 1781091
aaggcuccuggagaauucu

SEQ ID NO: 1781093 - RNA, 19 nt, Artificial Sequence
  Description of Artificial Sequence: Synthetic oligonucleotide
  Sense strand starting at position 1740 of SEQ ID NO: 1562901
ccuccagauccauaggcuu

SEQ ID NO: 1781094 - RNA, 19 nt, Artificial Sequence
  Description of Artificial Sequence: Synthetic oligonucleotide
  Antisense strand to SEQ ID NO: 1781093
aagccuauggaucuggagg

SEQ ID NO: 1781095 - RNA, 19 nt, Artificial Sequence
  Description of Artificial Sequence: Synthetic oligonucleotide
  Sense strand starting at position 1769 of SEQ ID NO: 1562901
cauguugcugacgaggaau

SEQ ID NO: 1781096 - RNA, 19 nt, Artificial Sequence
  Description of Artificial Sequence: Synthetic oligonucleotide
  Antisense strand to SEQ ID NO: 1781095
auuccucgucagcaacaug

SEQ ID NO: 1781097 - RNA, 19 nt, Artificial Sequence
  Description of Artificial Sequence: Synthetic oligonucleotide
  Sense strand starting at position 1823 of SEQ ID NO: 1562901
cgucuugcaggugauugaa

SEQ ID NO: 1781098 - RNA, 19 nt, Artificial Sequence
  Description of Artificial Sequence: Synthetic oligonucleotide
  Antisense strand to SEQ ID NO: 1781097
uucaaucaccugcaagacg

SEQ ID NO: 1781099 - RNA, 19 nt, Artificial Sequence
  Description of Artificial Sequence: Synthetic oligonucleotide
  Sense strand starting at position 1831 of SEQ ID NO: 1562901
aggugauugaacgaccagu

SEQ ID NO: 1781100 - RNA, 19 nt, Artificial Sequence
  Description of Artificial Sequence: Synthetic oligonucleotide
  Antisense strand to SEQ ID NO: 1781099
acuggucguucaaucaccu

SEQ ID NO: 1781101 - RNA, 19 nt, Artificial Sequence
  Description of Artificial Sequence: Synthetic oligonucleotide
  Sense strand starting at position 1837 of SEQ ID NO: 1562901
uugaacgaccaguguuuaa

SEQ ID NO: 1781102 - RNA, 19 nt, Artificial Sequence
  Description of Artificial Sequence: Synthetic oligonucleotide
  Antisense strand to SEQ ID NO: 1781101
uuaaacacuggucguucaa

SEQ ID NO: 1781103 - RNA, 19 nt, Artificial Sequence
  Description of Artificial Sequence: Synthetic oligonucleotide
  Sense strand starting at position 1944 of SEQ ID NO: 1562901
ucuuuagaacugggagcuu

SEQ ID NO: 1781104 - RNA, 19 nt, Artificial Sequence
  Description of Artificial Sequence: Synthetic oligonucleotide
  Antisense strand to SEQ ID NO: 1781103
aagcucccaguucuaaaga

SEQ ID NO: 1781105 - RNA, 19 nt, Artificial Sequence
  Description of Artificial Sequence: Synthetic oligonucleotide
  Sense strand starting at position 2150 of SEQ ID NO: 1562901
ucuguuuccauuuguguga

SEQ ID NO: 1781106 - RNA, 19 nt, Artificial Sequence
  Description of Artificial Sequence: Synthetic oligonucleotide
  Antisense strand to SEQ ID NO: 1781105
ucacacaaauggaaacaga

SEQ ID NO: 1781107 - RNA, 19 nt, Artificial Sequence
  Description of Artificial Sequence: Synthetic oligonucleotide
  Sense strand starting at position 2153 of SEQ ID NO: 1562901
guuuccauuugugugagua

SEQ ID NO: 1781108 - RNA, 19 nt, Artificial Sequence
  Description of Artificial Sequence: Synthetic oligonucleotide
  Antisense strand to SEQ ID NO: 1781107
uacucacacaaauggaaac

SEQ ID NO: 1781109 - RNA, 19 nt, Artificial Sequence
  Description of Artificial Sequence: Synthetic oligonucleotide
  Sense strand starting at position 2154 of SEQ ID NO: 1562901
uuuccauuugugugaguac

SEQ ID NO: 1781110 - RNA, 19 nt, Artificial Sequence
  Description of Artificial Sequence: Synthetic oligonucleotide
  Antisense strand to SEQ ID NO: 1781109
guacucacacaaauggaaa

SEQ ID NO: 1781111 - RNA, 19 nt, Artificial Sequence
  Description of Artificial Sequence: Synthetic oligonucleotide
  Sense strand starting at position 2431 of SEQ ID NO: 1562901
cucgcaauucugccucagu

SEQ ID NO: 1781112 - RNA, 19 nt, Artificial Sequence
  Description of Artificial Sequence: Synthetic oligonucleotide
  Antisense strand to SEQ ID NO: 1781111
acugaggcagaauugcgag

SEQ ID NO: 1781113 - RNA, 19 nt, Artificial Sequence
  Description of Artificial Sequence: Synthetic oligonucleotide
  Sense strand starting at position 2608 of SEQ ID NO: 1562901
gccucaguaaacugagaga

SEQ ID NO: 1781114 - RNA, 19 nt, Artificial Sequence
  Description of Artificial Sequence: Synthetic oligonucleotide
  Antisense strand to SEQ ID NO: 1781113
ucucucaguuuacugaggc

SEQ ID NO: 1781115 - RNA, 19 nt, Artificial Sequence
  Description of Artificial Sequence: Synthetic oligonucleotide
  Sense strand starting at position 2630 of SEQ ID NO: 1562901
agcagagugauucgucaag

SEQ ID NO: 1781116 - RNA, 19 nt, Artificial Sequence
  Description of Artificial Sequence: Synthetic oligonucleotide
  Antisense strand to SEQ ID NO: 1781115
cuugacgaaucacucugcu

SEQ ID NO: 1781117 - RNA, 19 nt, Artificial Sequence
  Description of Artificial Sequence: Synthetic oligonucleotide
  Sense strand starting at position 2632 of SEQ ID NO: 1562901
cagagugauucgucaagac

SEQ ID NO: 1781118 - RNA, 19 nt, Artificial Sequence
  Description of Artificial Sequence: Synthetic oligonucleotide
  Antisense strand to SEQ ID NO: 1781117
gucuugacgaaucacucug

SEQ ID NO: 1781119 - RNA, 19 nt, Artificial Sequence
  Description of Artificial Sequence: Synthetic oligonucleotide
  Sense strand starting at position 2644 of SEQ ID NO: 1562901
ucaagacuaccuugugaca

SEQ ID NO: 1781120 - RNA, 19 nt, Artificial Sequence
  Description of Artificial Sequence: Synthetic oligonucleotide
  Antisense strand to SEQ ID NO: 1781119
ugucacaagguagucuuga

SEQ ID NO: 1781121 - RNA, 19 nt, Artificial Sequence
  Description of Artificial Sequence: Synthetic oligonucleotide
  Sense strand starting at position 2919 of SEQ ID NO: 1562901
guaacuuggccagggucaa

SEQ ID NO: 1781122 - RNA, 19 nt, Artificial Sequence
  Description of Artificial Sequence: Synthetic oligonucleotide
  Antisense strand to SEQ ID NO: 1781121
uugacccuggccaaguuac

SEQ ID NO: 1781123 - RNA, 19 nt, Artificial Sequence
  Description of Artificial Sequence: Synthetic oligonucleotide
  Sense strand starting at position 2920 of SEQ ID NO: 1562901
uaacuuggccagggucaaa

SEQ ID NO: 1781124 - RNA, 19 nt, Artificial Sequence
  Description of Artificial Sequence: Synthetic oligonucleotide
  Antisense strand to SEQ ID NO: 1781123
uuugacccuggccaaguua

SEQ ID NO: 1781125 - RNA, 19 nt, Artificial Sequence
  Description of Artificial Sequence: Synthetic oligonucleotide
  Sense strand starting at position 2930 of SEQ ID NO: 1562901
agggucaaaucugucacau

SEQ ID NO: 1781126 - RNA, 19 nt, Artificial Sequence
  Description of Artificial Sequence: Synthetic oligonucleotide
  Antisense strand to SEQ ID NO: 1781125
augugacagauuugacccu

SEQ ID NO: 1781127 - RNA, 19 nt, Artificial Sequence
  Description of Artificial Sequence: Synthetic oligonucleotide
  Sense strand starting at position 3002 of SEQ ID NO: 1562901
gaaggaguaucuuuaguug

SEQ ID NO: 1781128 - RNA, 19 nt, Artificial Sequence
  Description of Artificial Sequence: Synthetic oligonucleotide
  Antisense strand to SEQ ID NO: 1781127
caacuaaagauacuccuuc

SEQ ID NO: 1781129 - RNA, 19 nt, Artificial Sequence
  Description of Artificial Sequence: Synthetic oligonucleotide
  Sense strand starting at position 3005 of SEQ ID NO: 1562901
ggaguaucuuuaguugaaa

SEQ ID NO: 1781130 - RNA, 19 nt, Artificial Sequence
  Description of Artificial Sequence: Synthetic oligonucleotide
  Antisense strand to SEQ ID NO: 1781129
uuucaacuaaagauacucc

SEQ ID NO: 1781131 - RNA, 19 nt, Artificial Sequence
  Description of Artificial Sequence: Synthetic oligonucleotide
  Sense strand starting at position 3063 of SEQ ID NO: 1562901
auuguaauagucuacccuu

SEQ ID NO: 1781132 - RNA, 19 nt, Artificial Sequence
  Description of Artificial Sequence: Synthetic oligonucleotide
  Antisense strand to SEQ ID NO: 1781131
aaggguagacuauuacaau

SEQ ID NO: 1781133 - RNA, 19 nt, Artificial Sequence
  Description of Artificial Sequence: Synthetic oligonucleotide
  Sense strand starting at position 3066 of SEQ ID NO: 1562901
guaauagucuacccuuucu

SEQ ID NO: 1781134 - RNA, 19 nt, Artificial Sequence
  Description of Artificial Sequence: Synthetic oligonucleotide
  Antisense strand to SEQ ID NO: 1781133
agaaaggguagacuauuac

SEQ ID NO: 1781135 - RNA, 19 nt, Artificial Sequence
  Description of Artificial Sequence: Synthetic oligonucleotide
  Sense strand starting at position 3313 of SEQ ID NO: 1562901
ucaagacuaccuugugacu

SEQ ID NO: 1781136 - RNA, 19 nt, Artificial Sequence
  Description of Artificial Sequence: Synthetic oligonucleotide
  Antisense strand to SEQ ID NO: 1781135
agucacaagguagucuuga

SEQ ID NO: 1781137 - RNA, 19 nt, Artificial Sequence
  Description of Artificial Sequence: Synthetic oligonucleotide
  Sense strand starting at position 3322 of SEQ ID NO: 1562901
ccuugugacucagucagau

SEQ ID NO: 1781138 - RNA, 19 nt, Artificial Sequence
  Description of Artificial Sequence: Synthetic oligonucleotide
  Antisense strand to SEQ ID NO: 1781137
aucugacugagucacaagg

SEQ ID NO: 1781139 - RNA, 19 nt, Artificial Sequence
  Description of Artificial Sequence: Synthetic oligonucleotide
  Sense strand starting at position 3381 of SEQ ID NO: 1562901
gcuguaauuuaaggaggaa

SEQ ID NO: 1781140 - RNA, 19 nt, Artificial Sequence
  Description of Artificial Sequence: Synthetic oligonucleotide
  Antisense strand to SEQ ID NO: 1781139
uuccuccuuaaauuacagc

SEQ ID NO: 1781141 - RNA, 19 nt, Artificial Sequence
  Description of Artificial Sequence: Synthetic oligonucleotide
  Sense strand starting at position 3869 of SEQ ID NO: 1562901
ucguccauuuaauaagaua

SEQ ID NO: 1781142 - RNA, 19 nt, Artificial Sequence
  Description of Artificial Sequence: Synthetic oligonucleotide
  Antisense strand to SEQ ID NO: 1781141
uaucuuauuaaauggacga

SEQ ID NO: 1781143 - RNA, 19 nt, Artificial Sequence
  Description of Artificial Sequence: Synthetic oligonucleotide
  Sense strand starting at position 3881 of SEQ ID NO: 1562901
uaagauagauugcuuuguu

SEQ ID NO: 1781144 - RNA, 19 nt, Artificial Sequence
  Description of Artificial Sequence: Synthetic oligonucleotide
  Antisense strand to SEQ ID NO: 1781143
aacaaagcaaucuaucuua

SEQ ID NO: 1781145 - RNA, 19 nt, Artificial Sequence
  Description of Artificial Sequence: Synthetic oligonucleotide
  Sense strand starting at position 3882 of SEQ ID NO: 1562901
aagauagauugcuuuguuu

SEQ ID NO: 1781146 - RNA, 19 nt, Artificial Sequence
  Description of Artificial Sequence: Synthetic oligonucleotide
  Antisense strand to SEQ ID NO: 1781145
aaacaaagcaaucuaucuu

SEQ ID NO: 1781147 - RNA, 19 nt, Artificial Sequence
  Description of Artificial Sequence: Synthetic oligonucleotide
  Sense strand starting at position 3954 of SEQ ID NO: 1562901
cuuggucuacccugugaau

SEQ ID NO: 1781148 - RNA, 19 nt, Artificial Sequence
  Description of Artificial Sequence: Synthetic oligonucleotide
  Antisense strand to SEQ ID NO: 1781147
auucacaggguagaccaag

SEQ ID NO: 1781149 - RNA, 19 nt, Artificial Sequence
  Description of Artificial Sequence: Synthetic oligonucleotide
  Sense strand starting at position 3956 of SEQ ID NO: 1562901
uggucuacccugugaauua

SEQ ID NO: 1781150 - RNA, 19 nt, Artificial Sequence
  Description of Artificial Sequence: Synthetic oligonucleotide
  Antisense strand to SEQ ID NO: 1781149
uaauucacaggguagacca

SEQ ID NO: 1781151 - RNA, 19 nt, Artificial Sequence
  Description of Artificial Sequence: Synthetic oligonucleotide
  Sense strand starting at position 3976 of SEQ ID NO: 1562901
acccuagagucuguaaauu

SEQ ID NO: 1781152 - RNA, 19 nt, Artificial Sequence
  Description of Artificial Sequence: Synthetic oligonucleotide
  Antisense strand to SEQ ID NO: 1781151
aauuuacagacucuagggu

SEQ ID NO: 1781153 - RNA, 19 nt, Artificial Sequence
  Description of Artificial Sequence: Synthetic oligonucleotide
  Sense strand starting at position 30 of SEQ ID NO: 1562902
ugaguaagagcucggcuuu

SEQ ID NO: 1781154 - RNA, 19 nt, Artificial Sequence
  Description of Artificial Sequence: Synthetic oligonucleotide
  Antisense strand to SEQ ID NO: 1781153
aaagccgagcucuuacuca

SEQ ID NO: 1781155 - RNA, 19 nt, Artificial Sequence
  Description of Artificial Sequence: Synthetic oligonucleotide
  Sense strand starting at position 497 of SEQ ID NO: 1562902
gcacgaucccgcucuugau

SEQ ID NO: 1781156 - RNA, 19 nt, Artificial Sequence
  Description of Artificial Sequence: Synthetic oligonucleotide
  Antisense strand to SEQ ID NO: 1781155
aucaagagcgggaucgugc

SEQ ID NO: 1781157 - RNA, 19 nt, Artificial Sequence
  Description of Artificial Sequence: Synthetic oligonucleotide
  Sense strand starting at position 2406 of SEQ ID NO: 1562902
uggagaugcuuccuccuca

SEQ ID NO: 1781158 - RNA, 19 nt, Artificial Sequence
  Description of Artificial Sequence: Synthetic oligonucleotide
  Antisense strand to SEQ ID NO: 1781157
ugaggaggaagcaucucca

SEQ ID NO: 1781159 - RNA, 19 nt, Artificial Sequence
  Description of Artificial Sequence: Synthetic oligonucleotide
  Sense strand starting at position 2587 of SEQ ID NO: 1562902
caccuugauugcugcgaca

SEQ ID NO: 1781160 - RNA, 19 nt, Artificial Sequence
  Description of Artificial Sequence: Synthetic oligonucleotide
  Antisense strand to SEQ ID NO: 1781159
ugucgcagcaaucaaggug

SEQ ID NO: 1781161 - RNA, 19 nt, Artificial Sequence
  Description of Artificial Sequence: Synthetic oligonucleotide
  Sense strand starting at position 2676 of SEQ ID NO: 1562902
cccugcucucuguacagaa

SEQ ID NO: 1781162 - RNA, 19 nt, Artificial Sequence
  Description of Artificial Sequence: Synthetic oligonucleotide
  Antisense strand to SEQ ID NO: 1781161
uucuguacagagagcaggg

SEQ ID NO: 1781163 - RNA, 19 nt, Artificial Sequence
  Description of Artificial Sequence: Synthetic oligonucleotide
  Sense strand starting at position 2686 of SEQ ID NO: 1562902
uguacagaagucugacuca

SEQ ID NO: 1781164 - RNA, 19 nt, Artificial Sequence
  Description of Artificial Sequence: Synthetic oligonucleotide
  Antisense strand to SEQ ID NO: 1781163
ugagucagacuucuguaca

SEQ ID NO: 1781165 - RNA, 19 nt, Artificial Sequence
  Description of Artificial Sequence: Synthetic oligonucleotide
  Sense strand starting at position 2706 of SEQ ID NO: 1562902
cugugugguuuggugcaaa

SEQ ID NO: 1781166 - RNA, 19 nt, Artificial Sequence
  Description of Artificial Sequence: Synthetic oligonucleotide
  Antisense strand to SEQ ID NO: 1781165
uuugcaccaaaccacacag

SEQ ID NO: 1781167 - RNA, 19 nt, Artificial Sequence
  Description of Artificial Sequence: Synthetic oligonucleotide
  Sense strand starting at position 2811 of SEQ ID NO: 1562902
gggcuaguggguugagagu

SEQ ID NO: 1781168 - RNA, 19 nt, Artificial Sequence
  Description of Artificial Sequence: Synthetic oligonucleotide
  Antisense strand to SEQ ID NO: 1781167
acucucaacccacuagccc

SEQ ID NO: 1781169 - RNA, 19 nt, Artificial Sequence
  Description of Artificial Sequence: Synthetic oligonucleotide
  Sense strand starting at position 2894 of SEQ ID NO: 1562902
gggucuaaauauuguggca

SEQ ID NO: 1781170 - RNA, 19 nt, Artificial Sequence
  Description of Artificial Sequence: Synthetic oligonucleotide
  Antisense strand to SEQ ID NO: 1781169
ugccacaauauuuagaccc

SEQ ID NO: 1781171 - RNA, 19 nt, Artificial Sequence
  Description of Artificial Sequence: Synthetic oligonucleotide
  Sense strand starting at position 2896 of SEQ ID NO: 1562902
gucuaaauauuguggcaga

SEQ ID NO: 1781172 - RNA, 19 nt, Artificial Sequence
  Description of Artificial Sequence: Synthetic oligonucleotide
  Antisense strand to SEQ ID NO: 1781171
ucugccacaauauuuagac

SEQ ID NO: 1781173 - RNA, 19 nt, Artificial Sequence
  Description of Artificial Sequence: Synthetic oligonucleotide
  Sense strand starting at position 2899 of SEQ ID NO: 1562902
uaaauauuguggcagacau

SEQ ID NO: 1781174 - RNA, 19 nt, Artificial Sequence
  Description of Artificial Sequence: Synthetic oligonucleotide
  Antisense strand to SEQ ID NO: 1781173
augucugccacaauauuua

SEQ ID NO: 1781175 - RNA, 19 nt, Artificial Sequence
  Description of Artificial Sequence: Synthetic oligonucleotide
  Sense strand starting at position 3203 of SEQ ID NO: 1562902
ucccuuggguccugaggau

SEQ ID NO: 1781176 - RNA, 19 nt, Artificial Sequence
  Description of Artificial Sequence: Synthetic oligonucleotide
  Antisense strand to SEQ ID NO: 1781175
auccucaggacccaaggga

SEQ ID NO: 1781177 - RNA, 19 nt, Artificial Sequence
  Description of Artificial Sequence: Synthetic oligonucleotide
  Sense strand starting at position 3290 of SEQ ID NO: 1562902
ccaguucucucccgcagua

SEQ ID NO: 1781178 - RNA, 19 nt, Artificial Sequence
  Description of Artificial Sequence: Synthetic oligonucleotide
  Antisense strand to SEQ ID NO: 1781177
uacugcgggagagaacugg

SEQ ID NO: 1781179 - RNA, 19 nt, Artificial Sequence
  Description of Artificial Sequence: Synthetic oligonucleotide
  Sense strand starting at position 3640 of SEQ ID NO: 1562902
aggcuagucuuccuugagu

SEQ ID NO: 1781180 - RNA, 19 nt, Artificial Sequence
  Description of Artificial Sequence: Synthetic oligonucleotide
  Antisense strand to SEQ ID NO: 1781179
acucaaggaagacuagccu

SEQ ID NO: 1781181 - RNA, 19 nt, Artificial Sequence
  Description of Artificial Sequence: Synthetic oligonucleotide
  Sense strand starting at position 3642 of SEQ ID NO: 1562902
gcuagucuuccuugagucu

SEQ ID NO: 1781182 - RNA, 19 nt, Artificial Sequence
  Description of Artificial Sequence: Synthetic oligonucleotide
  Antisense strand to SEQ ID NO: 1781181
agacucaaggaagacuagc

SEQ ID NO: 1781183 - RNA, 19 nt, Artificial Sequence
  Description of Artificial Sequence: Synthetic oligonucleotide
  Sense strand starting at position 3649 of SEQ ID NO: 1562902
uuccuugagucugacaugu

SEQ ID NO: 1781184 - RNA, 19 nt, Artificial Sequence
  Description of Artificial Sequence: Synthetic oligonucleotide
  Antisense strand to SEQ ID NO: 1781183
acaugucagacucaaggaa

SEQ ID NO: 1781185 - RNA, 19 nt, Artificial Sequence
  Description of Artificial Sequence: Synthetic oligonucleotide
  Sense strand starting at position 3651 of SEQ ID NO: 1562902
ccuugagucugacauguca

SEQ ID NO: 1781186 - RNA, 19 nt, Artificial Sequence
  Description of Artificial Sequence: Synthetic oligonucleotide
  Antisense strand to SEQ ID NO: 1781185
ugacaugucagacucaagg

SEQ ID NO: 1781187 - RNA, 19 nt, Artificial Sequence
  Description of Artificial Sequence: Synthetic oligonucleotide
  Sense strand starting at position 3676 of SEQ ID NO: 1562902
aggccagucuucccugagu

SEQ ID NO: 1781188 - RNA, 19 nt, Artificial Sequence
  Description of Artificial Sequence: Synthetic oligonucleotide
  Antisense strand to SEQ ID NO: 1781187
acucagggaagacuggccu

SEQ ID NO: 1781189 - RNA, 19 nt, Artificial Sequence
  Description of Artificial Sequence: Synthetic oligonucleotide
  Sense strand starting at position 3678 of SEQ ID NO: 1562902
gccagucuucccugaguca

SEQ ID NO: 1781190 - RNA, 19 nt, Artificial Sequence
  Description of Artificial Sequence: Synthetic oligonucleotide
  Antisense strand to SEQ ID NO: 1781189
ugacucagggaagacuggc

SEQ ID NO: 1781191 - RNA, 19 nt, Artificial Sequence
  Description of Artificial Sequence: Synthetic oligonucleotide
  Sense strand starting at position 3679 of SEQ ID NO: 1562902
ccagucuucccugagucau

SEQ ID NO: 1781192 - RNA, 19 nt, Artificial Sequence
  Description of Artificial Sequence: Synthetic oligonucleotide
  Antisense strand to SEQ ID NO: 1781191
augacucagggaagacugg

SEQ ID NO: 1781193 - RNA, 19 nt, Artificial Sequence
  Description of Artificial Sequence: Synthetic oligonucleotide
  Sense strand starting at position 3689 of SEQ ID NO: 1562902
cugagucauccuggccgua

SEQ ID NO: 1781194 - RNA, 19 nt, Artificial Sequence
  Description of Artificial Sequence: Synthetic oligonucleotide
  Antisense strand to SEQ ID NO: 1781193
uacggccaggaugacucag

SEQ ID NO: 1781195 - RNA, 19 nt, Artificial Sequence
  Description of Artificial Sequence: Synthetic oligonucleotide
  Sense strand starting at position 3691 of SEQ ID NO: 1562902
gagucauccuggccguaga

SEQ ID NO: 1781196 - RNA, 19 nt, Artificial Sequence
  Description of Artificial Sequence: Synthetic oligonucleotide
  Antisense strand to SEQ ID NO: 1781195
ucuacggccaggaugacuc

SEQ ID NO: 1781197 - RNA, 19 nt, Artificial Sequence
  Description of Artificial Sequence: Synthetic oligonucleotide
  Sense strand starting at position 3692 of SEQ ID NO: 1562902
agucauccuggccguagaa

SEQ ID NO: 1781198 - RNA, 19 nt, Artificial Sequence
  Description of Artificial Sequence: Synthetic oligonucleotide
  Antisense strand to SEQ ID NO: 1781197
uucuacggccaggaugacu

SEQ ID NO: 1781199 - RNA, 19 nt, Artificial Sequence
  Description of Artificial Sequence: Synthetic oligonucleotide
  Sense strand starting at position 3694 of SEQ ID NO: 1562902
ucauccuggccguagaaga

SEQ ID NO: 1781200 - RNA, 19 nt, Artificial Sequence
  Description of Artificial Sequence: Synthetic oligonucleotide
  Antisense strand to SEQ ID NO: 1781199
ucuucuacggccaggauga

SEQ ID NO: 1781201 - RNA, 19 nt, Artificial Sequence
  Description of Artificial Sequence: Synthetic oligonucleotide
  Sense strand starting at position 3768 of SEQ ID NO: 1562902
cucugaaacccucaagugu

SEQ ID NO: 1781202 - RNA, 19 nt, Artificial Sequence
  Description of Artificial Sequence: Synthetic oligonucleotide
  Antisense strand to SEQ ID NO: 1781201
acacuugaggguuucagag

SEQ ID NO: 1781203 - RNA, 19 nt, Artificial Sequence
  Description of Artificial Sequence: Synthetic oligonucleotide
  Sense strand starting at position 3777 of SEQ ID NO: 1562902
ccucaagugucccuuaacu

SEQ ID NO: 1781204 - RNA, 19 nt, Artificial Sequence
  Description of Artificial Sequence: Synthetic oligonucleotide
  Antisense strand to SEQ ID NO: 1781203
aguuaagggacacuugagg

SEQ ID NO: 1781205 - RNA, 19 nt, Artificial Sequence
  Description of Artificial Sequence: Synthetic oligonucleotide
  Sense strand starting at position 3877 of SEQ ID NO: 1562902
uggagauuccuccaggccu

SEQ ID NO: 1781206 - RNA, 19 nt, Artificial Sequence
  Description of Artificial Sequence: Synthetic oligonucleotide
  Antisense strand to SEQ ID NO: 1781205
aggccuggaggaaucucca

SEQ ID NO: 1781207 - RNA, 19 nt, Artificial Sequence
  Description of Artificial Sequence: Synthetic oligonucleotide
  Sense strand starting at position 3913 of SEQ ID NO: 1562902
cacacaggccucggugaaa

SEQ ID NO: 1781208 - RNA, 19 nt, Artificial Sequence
  Description of Artificial Sequence: Synthetic oligonucleotide
  Antisense strand to SEQ ID NO: 1781207
uuucaccgaggccugugug

SEQ ID NO: 1781209 - RNA, 19 nt, Artificial Sequence
  Description of Artificial Sequence: Synthetic oligonucleotide
  Sense strand starting at position 153 of SEQ ID NO: 1562903
cggcccugugaauaggaaa

SEQ ID NO: 1781210 - RNA, 19 nt, Artificial Sequence
  Description of Artificial Sequence: Synthetic oligonucleotide
  Antisense strand to SEQ ID NO: 1781209
uuuccuauucacagggccg

SEQ ID NO: 1781211 - RNA, 19 nt, Artificial Sequence
  Description of Artificial Sequence: Synthetic oligonucleotide
  Sense strand starting at position 156 of SEQ ID NO: 1562903
cccugugaauaggaaacaa

SEQ ID NO: 1781212 - RNA, 19 nt, Artificial Sequence
  Description of Artificial Sequence: Synthetic oligonucleotide
  Antisense strand to SEQ ID NO: 1781211
uuguuuccuauucacaggg

SEQ ID NO: 1781213 - RNA, 19 nt, Artificial Sequence
  Description of Artificial Sequence: Synthetic oligonucleotide
  Sense strand starting at position 206 of SEQ ID NO: 1562903
acaccuuugucaggacaug

SEQ ID NO: 1781214 - RNA, 19 nt, Artificial Sequence
  Description of Artificial Sequence: Synthetic oligonucleotide
  Antisense strand to SEQ ID NO: 1781213
cauguccugacaaaggugu

SEQ ID NO: 1781215 - RNA, 19 nt, Artificial Sequence
  Description of Artificial Sequence: Synthetic oligonucleotide
  Sense strand starting at position 332 of SEQ ID NO: 1562903
aacugaagucgaugaauga

SEQ ID NO: 1781216 - RNA, 19 nt, Artificial Sequence
  Description of Artificial Sequence: Synthetic oligonucleotide
  Antisense strand to SEQ ID NO: 1781215
ucauucaucgacuucaguu

SEQ ID NO: 1781217 - RNA, 19 nt, Artificial Sequence
  Description of Artificial Sequence: Synthetic oligonucleotide
  Sense strand starting at position 393 of SEQ ID NO: 1562903
gcaagauuguugugcguga

SEQ ID NO: 1781218 - RNA, 19 nt, Artificial Sequence
  Description of Artificial Sequence: Synthetic oligonucleotide
  Antisense strand to SEQ ID NO: 1781217
ucacgcacaacaaucuugc

SEQ ID NO: 1781219 - RNA, 19 nt, Artificial Sequence
  Description of Artificial Sequence: Synthetic oligonucleotide
  Sense strand starting at position 447 of SEQ ID NO: 1562903
ggaggauacgugugcaggu

SEQ ID NO: 1781220 - RNA, 19 nt, Artificial Sequence
  Description of Artificial Sequence: Synthetic oligonucleotide
  Antisense strand to SEQ ID NO: 1781219
accugcacacguauccucc

SEQ ID NO: 1781221 - RNA, 19 nt, Artificial Sequence
  Description of Artificial Sequence: Synthetic oligonucleotide
  Sense strand starting at position 491 of SEQ ID NO: 1562903
cguguauaggugcgaggau

SEQ ID NO: 1781222 - RNA, 19 nt, Artificial Sequence
  Description of Artificial Sequence: Synthetic oligonucleotide
  Antisense strand to SEQ ID NO: 1781221
auccucgcaccuauacacg

SEQ ID NO: 1781223 - RNA, 19 nt, Artificial Sequence
  Description of Artificial Sequence: Synthetic oligonucleotide
  Sense strand starting at position 549 of SEQ ID NO: 1562903
uguaggugugaguguguua

SEQ ID NO: 1781224 - RNA, 19 nt, Artificial Sequence
  Description of Artificial Sequence: Synthetic oligonucleotide
  Antisense strand to SEQ ID NO: 1781223
uaacacacucacaccuaca

SEQ ID NO: 1781225 - RNA, 19 nt, Artificial Sequence
  Description of Artificial Sequence: Synthetic oligonucleotide
  Sense strand starting at position 554 of SEQ ID NO: 1562903
gugugaguguguuaugcgu

SEQ ID NO: 1781226 - RNA, 19 nt, Artificial Sequence
  Description of Artificial Sequence: Synthetic oligonucleotide
  Antisense strand to SEQ ID NO: 1781225
acgcauaacacacucacac

SEQ ID NO: 1781227 - RNA, 19 nt, Artificial Sequence
  Description of Artificial Sequence: Synthetic oligonucleotide
  Sense strand starting at position 556 of SEQ ID NO: 1562903
gugaguguguuaugcguau

SEQ ID NO: 1781228 - RNA, 19 nt, Artificial Sequence
  Description of Artificial Sequence: Synthetic oligonucleotide
  Antisense strand to SEQ ID NO: 1781227
auacgcauaacacacucac

SEQ ID NO: 1781229 - RNA, 19 nt, Artificial Sequence
  Description of Artificial Sequence: Synthetic oligonucleotide
  Sense strand starting at position 558 of SEQ ID NO: 1562903
gaguguguuaugcguauag

SEQ ID NO: 1781230 - RNA, 19 nt, Artificial Sequence
  Description of Artificial Sequence: Synthetic oligonucleotide
  Antisense strand to SEQ ID NO: 1781229
cuauacgcauaacacacuc

SEQ ID NO: 1781231 - RNA, 19 nt, Artificial Sequence
  Description of Artificial Sequence: Synthetic oligonucleotide
  Sense strand starting at position 560 of SEQ ID NO: 1562903
guguguuaugcguauaggu

SEQ ID NO: 1781232 - RNA, 19 nt, Artificial Sequence
  Description of Artificial Sequence: Synthetic oligonucleotide
  Antisense strand to SEQ ID NO: 1781231
accuauacgcauaacacac

SEQ ID NO: 1781233 - RNA, 19 nt, Artificial Sequence
  Description of Artificial Sequence: Synthetic oligonucleotide
  Sense strand starting at position 584 of SEQ ID NO: 1562903
gugcguaggugugagguua

SEQ ID NO: 1781234 - RNA, 19 nt, Artificial Sequence
  Description of Artificial Sequence: Synthetic oligonucleotide
  Antisense strand to SEQ ID NO: 1781233
uaaccucacaccuacgcac

SEQ ID NO: 1781235 - RNA, 19 nt, Artificial Sequence
  Description of Artificial Sequence: Synthetic oligonucleotide
  Sense strand starting at position 585 of SEQ ID NO: 1562903
ugcguaggugugagguuau

SEQ ID NO: 1781236 - RNA, 19 nt, Artificial Sequence
  Description of Artificial Sequence: Synthetic oligonucleotide
  Antisense strand to SEQ ID NO: 1781235
auaaccucacaccuacgca

SEQ ID NO: 1781237 - RNA, 19 nt, Artificial Sequence
  Description of Artificial Sequence: Synthetic oligonucleotide
  Sense strand starting at position 971 of SEQ ID NO: 1562903
gccagcucugccggaguau

SEQ ID NO: 1781238 - RNA, 19 nt, Artificial Sequence
  Description of Artificial Sequence: Synthetic oligonucleotide
  Antisense strand to SEQ ID NO: 1781237
auacuccggcagagcuggc

SEQ ID NO: 1781239 - RNA, 19 nt, Artificial Sequence
  Description of Artificial Sequence: Synthetic oligonucleotide
  Sense strand starting at position 972 of SEQ ID NO: 1562903
ccagcucugccggaguaua

SEQ ID NO: 1781240 - RNA, 19 nt, Artificial Sequence
  Description of Artificial Sequence: Synthetic oligonucleotide
  Antisense strand to SEQ ID NO: 1781239
uauacuccggcagagcugg

SEQ ID NO: 1781241 - RNA, 19 nt, Artificial Sequence
  Description of Artificial Sequence: Synthetic oligonucleotide
  Sense strand starting at position 980 of SEQ ID NO: 1562903
gccggaguauauguagcuu

SEQ ID NO: 1781242 - RNA, 19 nt, Artificial Sequence
  Description of Artificial Sequence: Synthetic oligonucleotide
  Antisense strand to SEQ ID NO: 1781241
aagcuacauauacuccggc

SEQ ID NO: 1781243 - RNA, 19 nt, Artificial Sequence
  Description of Artificial Sequence: Synthetic oligonucleotide
  Sense strand starting at position 984 of SEQ ID NO: 1562903
gaguauauguagcuuugca

SEQ ID NO: 1781244 - RNA, 19 nt, Artificial Sequence
  Description of Artificial Sequence: Synthetic oligonucleotide
  Antisense strand to SEQ ID NO: 1781243
ugcaaagcuacauauacuc

SEQ ID NO: 1781245 - RNA, 19 nt, Artificial Sequence
  Description of Artificial Sequence: Synthetic oligonucleotide
  Sense strand starting at position 1083 of SEQ ID NO: 1562903
cuugaagccucagcagaaa

SEQ ID NO: 1781246 - RNA, 19 nt, Artificial Sequence
  Description of Artificial Sequence: Synthetic oligonucleotide
  Antisense strand to SEQ ID NO: 1781245
uuucugcugaggcuucaag

SEQ ID NO: 1781247 - RNA, 19 nt, Artificial Sequence
  Description of Artificial Sequence: Synthetic oligonucleotide
  Sense strand starting at position 1263 of SEQ ID NO: 1562903
cugcauuccugagcuagaa

SEQ ID NO: 1781248 - RNA, 19 nt, Artificial Sequence
  Description of Artificial Sequence: Synthetic oligonucleotide
  Antisense strand to SEQ ID NO: 1781247
uucuagcucaggaaugcag

SEQ ID NO: 1781249 - RNA, 19 nt, Artificial Sequence
  Description of Artificial Sequence: Synthetic oligonucleotide
  Sense strand starting at position 1425 of SEQ ID NO: 1562903
ggaaccuccucucagacaa

SEQ ID NO: 1781250 - RNA, 19 nt, Artificial Sequence
  Description of Artificial Sequence: Synthetic oligonucleotide
  Antisense strand to SEQ ID NO: 1781249
uugucugagaggagguucc

SEQ ID NO: 1781251 - RNA, 19 nt, Artificial Sequence
  Description of Artificial Sequence: Synthetic oligonucleotide
  Sense strand starting at position 1711 of SEQ ID NO: 1562903
gagauaagauguggaggaa

SEQ ID NO: 1781252 - RNA, 19 nt, Artificial Sequence
  Description of Artificial Sequence: Synthetic oligonucleotide
  Antisense strand to SEQ ID NO: 1781251
uuccuccacaucuuaucuc

SEQ ID NO: 1781253 - RNA, 19 nt, Artificial Sequence
  Description of Artificial Sequence: Synthetic oligonucleotide
  Sense strand starting at position 1914 of SEQ ID NO: 1562903
gggcgccucccugagaagu

SEQ ID NO: 1781254 - RNA, 19 nt, Artificial Sequence
  Description of Artificial Sequence: Synthetic oligonucleotide
  Antisense strand to SEQ ID NO: 1781253
acuucucagggaggcgccc

SEQ ID NO: 1781255 - RNA, 19 nt, Artificial Sequence
  Description of Artificial Sequence: Synthetic oligonucleotide
  Sense strand starting at position 2519 of SEQ ID NO: 1562903
augcgaaauccuugauccu

SEQ ID NO: 1781256 - RNA, 19 nt, Artificial Sequence
  Description of Artificial Sequence: Synthetic oligonucleotide
  Antisense strand to SEQ ID NO: 1781255
aggaucaaggauuucgcau

SEQ ID NO: 1781257 - RNA, 19 nt, Artificial Sequence
  Description of Artificial Sequence: Synthetic oligonucleotide
  Sense strand starting at position 2520 of SEQ ID NO: 1562903
ugcgaaauccuugauccuu

SEQ ID NO: 1781258 - RNA, 19 nt, Artificial Sequence
  Description of Artificial Sequence: Synthetic oligonucleotide
  Antisense strand to SEQ ID NO: 1781257
aaggaucaaggauuucgca

SEQ ID NO: 1781259 - RNA, 19 nt, Artificial Sequence
  Description of Artificial Sequence: Synthetic oligonucleotide
  Sense strand starting at position 3002 of SEQ ID NO: 1562903
gugaguuggcccuagaagu

SEQ ID NO: 1781260 - RNA, 19 nt, Artificial Sequence
  Description of Artificial Sequence: Synthetic oligonucleotide
  Antisense strand to SEQ ID NO: 1781259
acuucuagggccaacucac

SEQ ID NO: 1781261 - RNA, 19 nt, Artificial Sequence
  Description of Artificial Sequence: Synthetic oligonucleotide
  Sense strand starting at position 3067 of SEQ ID NO: 1562903
gcuucucaccacugagauc

SEQ ID NO: 1781262 - RNA, 19 nt, Artificial Sequence
  Description of Artificial Sequence: Synthetic oligonucleotide
  Antisense strand to SEQ ID NO: 1781261
gaucucaguggugagaagc

SEQ ID NO: 1781263 - RNA, 19 nt, Artificial Sequence
  Description of Artificial Sequence: Synthetic oligonucleotide
  Sense strand starting at position 3078 of SEQ ID NO: 1562903
cugagaucuuuguuucuaa

SEQ ID NO: 1781264 - RNA, 19 nt, Artificial Sequence
  Description of Artificial Sequence: Synthetic oligonucleotide
  Antisense strand to SEQ ID NO: 1781263
uuagaaacaaagaucucag

SEQ ID NO: 1781265 - RNA, 19 nt, Artificial Sequence
  Description of Artificial Sequence: Synthetic oligonucleotide
  Sense strand starting at position 3079 of SEQ ID NO: 1562903
ugagaucuuuguuucuaaa

SEQ ID NO: 1781266 - RNA, 19 nt, Artificial Sequence
  Description of Artificial Sequence: Synthetic oligonucleotide
  Antisense strand to SEQ ID NO: 1781265
uuuagaaacaaagaucuca

SEQ ID NO: 1781267 - RNA, 19 nt, Artificial Sequence
  Description of Artificial Sequence: Synthetic oligonucleotide
  Sense strand starting at position 3554 of SEQ ID NO: 1562903
gcagauaccuuauacaaag

SEQ ID NO: 1781268 - RNA, 19 nt, Artificial Sequence
  Description of Artificial Sequence: Synthetic oligonucleotide
  Antisense strand to SEQ ID NO: 1781267
cuuuguauaagguaucugc

SEQ ID NO: 1781269 - RNA, 19 nt, Artificial Sequence
  Description of Artificial Sequence: Synthetic oligonucleotide
  Sense strand starting at position 3582 of SEQ ID NO: 1562903
auauucuccuguccagaca

SEQ ID NO: 1781270 - RNA, 19 nt, Artificial Sequence
  Description of Artificial Sequence: Synthetic oligonucleotide
  Antisense strand to SEQ ID NO: 1781269
ugucuggacaggagaauau

SEQ ID NO: 1781271 - RNA, 19 nt, Artificial Sequence
  Description of Artificial Sequence: Synthetic oligonucleotide
  Sense strand starting at position 3616 of SEQ ID NO: 1562903
cucaaauagugucaucaua

SEQ ID NO: 1781272 - RNA, 19 nt, Artificial Sequence
  Description of Artificial Sequence: Synthetic oligonucleotide
  Antisense strand to SEQ ID NO: 1781271
uaugaugacacuauuugag

SEQ ID NO: 1781273 - RNA, 19 nt, Artificial Sequence
  Description of Artificial Sequence: Synthetic oligonucleotide
  Sense strand starting at position 3624 of SEQ ID NO: 1562903
gugucaucauaacacugau

SEQ ID NO: 1781274 - RNA, 19 nt, Artificial Sequence
  Description of Artificial Sequence: Synthetic oligonucleotide
  Antisense strand to SEQ ID NO: 1781273
aucaguguuaugaugacac

SEQ ID NO: 1781275 - RNA, 19 nt, Artificial Sequence
  Description of Artificial Sequence: Synthetic oligonucleotide
  Sense strand starting at position 3630 of SEQ ID NO: 1562903
ucauaacacugaugagaaa

SEQ ID NO: 1781276 - RNA, 19 nt, Artificial Sequence
  Description of Artificial Sequence: Synthetic oligonucleotide
  Antisense strand to SEQ ID NO: 1781275
uuucucaucaguguuauga

SEQ ID NO: 1781277 - RNA, 19 nt, Artificial Sequence
  Description of Artificial Sequence: Synthetic oligonucleotide
  Sense strand starting at position 3711 of SEQ ID NO: 1562903
auggguguucucugaguac

SEQ ID NO: 1781278 - RNA, 19 nt, Artificial Sequence
  Description of Artificial Sequence: Synthetic oligonucleotide
  Antisense strand to SEQ ID NO: 1781277
guacucagagaacacccau

SEQ ID NO: 1781279 - RNA, 19 nt, Artificial Sequence
  Description of Artificial Sequence: Synthetic oligonucleotide
  Sense strand starting at position 3715 of SEQ ID NO: 1562903
guguucucugaguacccua

SEQ ID NO: 1781280 - RNA, 19 nt, Artificial Sequence
  Description of Artificial Sequence: Synthetic oligonucleotide
  Antisense strand to SEQ ID NO: 1781279
uaggguacucagagaacac

SEQ ID NO: 1781281 - RNA, 19 nt, Artificial Sequence
  Description of Artificial Sequence: Synthetic oligonucleotide
  Sense strand starting at position 3766 of SEQ ID NO: 1562903
ggcucacuggugugucuaa

SEQ ID NO: 1781282 - RNA, 19 nt, Artificial Sequence
  Description of Artificial Sequence: Synthetic oligonucleotide
  Antisense strand to SEQ ID NO: 1781281
uuagacacaccagugagcc

SEQ ID NO: 1781283 - RNA, 19 nt, Artificial Sequence
  Description of Artificial Sequence: Synthetic oligonucleotide
  Sense strand starting at position 3767 of SEQ ID NO: 1562903
gcucacuggugugucuaaa

SEQ ID NO: 1781284 - RNA, 19 nt, Artificial Sequence
  Description of Artificial Sequence: Synthetic oligonucleotide
  Antisense strand to SEQ ID NO: 1781283
uuuagacacaccagugagc

SEQ ID NO: 1781285 - RNA, 19 nt, Artificial Sequence
  Description of Artificial Sequence: Synthetic oligonucleotide
  Sense strand starting at position 3912 of SEQ ID NO: 1562903
uggaguaauuagguaaaua

SEQ ID NO: 1781286 - RNA, 19 nt, Artificial Sequence
  Description of Artificial Sequence: Synthetic oligonucleotide
  Antisense strand to SEQ ID NO: 1781285
uauuuaccuaauuacucca

SEQ ID NO: 1781287 - RNA, 19 nt, Artificial Sequence
  Description of Artificial Sequence: Synthetic oligonucleotide
  Sense strand starting at position 181 of SEQ ID NO: 1562904
ugaacacuuguuugauaca

SEQ ID NO: 1781288 - RNA, 19 nt, Artificial Sequence
  Description of Artificial Sequence: Synthetic oligonucleotide
  Antisense strand to SEQ ID NO: 1781287
uguaucaaacaaguguuca

SEQ ID NO: 1781289 - RNA, 19 nt, Artificial Sequence
  Description of Artificial Sequence: Synthetic oligonucleotide
  Sense strand starting at position 202 of SEQ ID NO: 1562904
guauaaacgacuuggaaga

SEQ ID NO: 1781290 - RNA, 19 nt, Artificial Sequence
  Description of Artificial Sequence: Synthetic oligonucleotide
  Antisense strand to SEQ ID NO: 1781289
ucuuccaagucguuuauac

SEQ ID NO: 1781291 - RNA, 19 nt, Artificial Sequence
  Description of Artificial Sequence: Synthetic oligonucleotide
  Sense strand starting at position 376 of SEQ ID NO: 1562904
accuauuacaugcgaggga

SEQ ID NO: 1781292 - RNA, 19 nt, Artificial Sequence
  Description of Artificial Sequence: Synthetic oligonucleotide
  Antisense strand to SEQ ID NO: 1781291
ucccucgcauguaauaggu

SEQ ID NO: 1781293 - RNA, 19 nt, Artificial Sequence
  Description of Artificial Sequence: Synthetic oligonucleotide
  Sense strand starting at position 381 of SEQ ID NO: 1562904
uuacaugcgagggacuauu

SEQ ID NO: 1781294 - RNA, 19 nt, Artificial Sequence
  Description of Artificial Sequence: Synthetic oligonucleotide
  Antisense strand to SEQ ID NO: 1781293
aauagucccucgcauguaa

SEQ ID NO: 1781295 - RNA, 19 nt, Artificial Sequence
  Description of Artificial Sequence: Synthetic oligonucleotide
  Sense strand starting at position 410 of SEQ ID NO: 1562904
gggauaugagagugagcaa

SEQ ID NO: 1781296 - RNA, 19 nt, Artificial Sequence
  Description of Artificial Sequence: Synthetic oligonucleotide
  Antisense strand to SEQ ID NO: 1781295
uugcucacucucauauccc

SEQ ID NO: 1781297 - RNA, 19 nt, Artificial Sequence
  Description of Artificial Sequence: Synthetic oligonucleotide
  Sense strand starting at position 633 of SEQ ID NO: 1562904
ccuggaagaaggugaguua

SEQ ID NO: 1781298 - RNA, 19 nt, Artificial Sequence
  Description of Artificial Sequence: Synthetic oligonucleotide
  Antisense strand to SEQ ID NO: 1781297
uaacucaccuucuuccagg

SEQ ID NO: 1781299 - RNA, 19 nt, Artificial Sequence
  Description of Artificial Sequence: Synthetic oligonucleotide
  Sense strand starting at position 714 of SEQ ID NO: 1562904
gaacuuauucuagaguagc

SEQ ID NO: 1781300 - RNA, 19 nt, Artificial Sequence
  Description of Artificial Sequence: Synthetic oligonucleotide
  Antisense strand to SEQ ID NO: 1781299
gcuacucuagaauaaguuc

SEQ ID NO: 1781301 - RNA, 19 nt, Artificial Sequence
  Description of Artificial Sequence: Synthetic oligonucleotide
  Sense strand starting at position 717 of SEQ ID NO: 1562904
cuuauucuagaguagcaga

SEQ ID NO: 1781302 - RNA, 19 nt, Artificial Sequence
  Description of Artificial Sequence: Synthetic oligonucleotide
  Antisense strand to SEQ ID NO: 1781301
ucugcuacucuagaauaag

SEQ ID NO: 1781303 - RNA, 19 nt, Artificial Sequence
  Description of Artificial Sequence: Synthetic oligonucleotide
  Sense strand starting at position 747 of SEQ ID NO: 1562904
gaagcuugcgaagauggaa

SEQ ID NO: 1781304 - RNA, 19 nt, Artificial Sequence
  Description of Artificial Sequence: Synthetic oligonucleotide
  Antisense strand to SEQ ID NO: 1781303
uuccaucuucgcaagcuuc

SEQ ID NO: 1781305 - RNA, 19 nt, Artificial Sequence
  Description of Artificial Sequence: Synthetic oligonucleotide
  Sense strand starting at position 867 of SEQ ID NO: 1562904
gagucuuugggagguauua

SEQ ID NO: 1781306 - RNA, 19 nt, Artificial Sequence
  Description of Artificial Sequence: Synthetic oligonucleotide
  Antisense strand to SEQ ID NO: 1781305
uaauaccucccaaagacuc

SEQ ID NO: 1781307 - RNA, 19 nt, Artificial Sequence
  Description of Artificial Sequence: Synthetic oligonucleotide
  Sense strand starting at position 869 of SEQ ID NO: 1562904
gucuuugggagguauuaag

SEQ ID NO: 1781308 - RNA, 19 nt, Artificial Sequence
  Description of Artificial Sequence: Synthetic oligonucleotide
  Antisense strand to SEQ ID NO: 1781307
cuuaauaccucccaaagac

SEQ ID NO: 1781309 - RNA, 19 nt, Artificial Sequence
  Description of Artificial Sequence: Synthetic oligonucleotide
  Sense strand starting at position 894 of SEQ ID NO: 1562904
agaagugcaucagugacuu

SEQ ID NO: 1781310 - RNA, 19 nt, Artificial Sequence
  Description of Artificial Sequence: Synthetic oligonucleotide
  Antisense strand to SEQ ID NO: 1781309
aagucacugaugcacuucu

SEQ ID NO: 1781311 - RNA, 19 nt, Artificial Sequence
  Description of Artificial Sequence: Synthetic oligonucleotide
  Sense strand starting at position 1095 of SEQ ID NO: 1562904
gcaagcagauuuccguaau

SEQ ID NO: 1781312 - RNA, 19 nt, Artificial Sequence
  Description of Artificial Sequence: Synthetic oligonucleotide
  Antisense strand to SEQ ID NO: 1781311
auuacggaaaucugcuugc

SEQ ID NO: 1781313 - RNA, 19 nt, Artificial Sequence
  Description of Artificial Sequence: Synthetic oligonucleotide
  Sense strand starting at position 1120 of SEQ ID NO: 1562904
aguccuugccaguaggaaa

SEQ ID NO: 1781314 - RNA, 19 nt, Artificial Sequence
  Description of Artificial Sequence: Synthetic oligonucleotide
  Antisense strand to SEQ ID NO: 1781313
uuuccuacuggcaaggacu

SEQ ID NO: 1781315 - RNA, 19 nt, Artificial Sequence
  Description of Artificial Sequence: Synthetic oligonucleotide
  Sense strand starting at position 2228 of SEQ ID NO: 1562904
cuacgcuuuccggugaguu

SEQ ID NO: 1781316 - RNA, 19 nt, Artificial Sequence
  Description of Artificial Sequence: Synthetic oligonucleotide
  Antisense strand to SEQ ID NO: 1781315
aacucaccggaaagcguag

SEQ ID NO: 1781317 - RNA, 19 nt, Artificial Sequence
  Description of Artificial Sequence: Synthetic oligonucleotide
  Sense strand starting at position 2816 of SEQ ID NO: 1562904
cuaugaauacaguggagua

SEQ ID NO: 1781318 - RNA, 19 nt, Artificial Sequence
  Description of Artificial Sequence: Synthetic oligonucleotide
  Antisense strand to SEQ ID NO: 1781317
uacuccacuguauucauag

SEQ ID NO: 1781319 - RNA, 19 nt, Artificial Sequence
  Description of Artificial Sequence: Synthetic oligonucleotide
  Sense strand starting at position 2854 of SEQ ID NO: 1562904
caagacaagggcugucuua

SEQ ID NO: 1781320 - RNA, 19 nt, Artificial Sequence
  Description of Artificial Sequence: Synthetic oligonucleotide
  Antisense strand to SEQ ID NO: 1781319
uaagacagcccuugucuug

SEQ ID NO: 1781321 - RNA, 19 nt, Artificial Sequence
  Description of Artificial Sequence: Synthetic oligonucleotide
  Sense strand starting at position 2983 of SEQ ID NO: 1562904
ggcagauguggccagaaca

SEQ ID NO: 1781322 - RNA, 19 nt, Artificial Sequence
  Description of Artificial Sequence: Synthetic oligonucleotide
  Antisense strand to SEQ ID NO: 1781321
uguucuggccacaucugcc

SEQ ID NO: 1781323 - RNA, 19 nt, Artificial Sequence
  Description of Artificial Sequence: Synthetic oligonucleotide
  Sense strand starting at position 3035 of SEQ ID NO: 1562904
acuggauuacuaggccaua

SEQ ID NO: 1781324 - RNA, 19 nt, Artificial Sequence
  Description of Artificial Sequence: Synthetic oligonucleotide
  Antisense strand to SEQ ID NO: 1781323
uauggccuaguaauccagu

SEQ ID NO: 1781325 - RNA, 19 nt, Artificial Sequence
  Description of Artificial Sequence: Synthetic oligonucleotide
  Sense strand starting at position 3038 of SEQ ID NO: 1562904
ggauuacuaggccauagua

SEQ ID NO: 1781326 - RNA, 19 nt, Artificial Sequence
  Description of Artificial Sequence: Synthetic oligonucleotide
  Antisense strand to SEQ ID NO: 1781325
uacuauggccuaguaaucc

SEQ ID NO: 1781327 - RNA, 19 nt, Artificial Sequence
  Description of Artificial Sequence: Synthetic oligonucleotide
  Sense strand starting at position 3040 of SEQ ID NO: 1562904
auuacuaggccauaguaaa

SEQ ID NO: 1781328 - RNA, 19 nt, Artificial Sequence
  Description of Artificial Sequence: Synthetic oligonucleotide
  Antisense strand to SEQ ID NO: 1781327
uuuacuauggccuaguaau

SEQ ID NO: 1781329 - RNA, 19 nt, Artificial Sequence
  Description of Artificial Sequence: Synthetic oligonucleotide
  Sense strand starting at position 3133 of SEQ ID NO: 1562904
uguauaaacaucuggugua

SEQ ID NO: 1781330 - RNA, 19 nt, Artificial Sequence
  Description of Artificial Sequence: Synthetic oligonucleotide
  Antisense strand to SEQ ID NO: 1781329
uacaccagauguuuauaca

SEQ ID NO: 1781331 - RNA, 19 nt, Artificial Sequence
  Description of Artificial Sequence: Synthetic oligonucleotide
  Sense strand starting at position 3138 of SEQ ID NO: 1562904
aaacaucugguguaucuga

SEQ ID NO: 1781332 - RNA, 19 nt, Artificial Sequence
  Description of Artificial Sequence: Synthetic oligonucleotide
  Antisense strand to SEQ ID NO: 1781331
ucagauacaccagauguuu

SEQ ID NO: 1781333 - RNA, 19 nt, Artificial Sequence
  Description of Artificial Sequence: Synthetic oligonucleotide
  Sense strand starting at position 3149 of SEQ ID NO: 1562904
guaucugauaguggaauac

SEQ ID NO: 1781334 - RNA, 19 nt, Artificial Sequence
  Description of Artificial Sequence: Synthetic oligonucleotide
  Antisense strand to SEQ ID NO: 1781333
guauuccacuaucagauac

SEQ ID NO: 1781335 - RNA, 19 nt, Artificial Sequence
  Description of Artificial Sequence: Synthetic oligonucleotide
  Sense strand starting at position 3159 of SEQ ID NO: 1562904
guggaauacaucuguggag

SEQ ID NO: 1781336 - RNA, 19 nt, Artificial Sequence
  Description of Artificial Sequence: Synthetic oligonucleotide
  Antisense strand to SEQ ID NO: 1781335
cuccacagauguauuccac

SEQ ID NO: 1781337 - RNA, 19 nt, Artificial Sequence
  Description of Artificial Sequence: Synthetic oligonucleotide
  Sense strand starting at position 3160 of SEQ ID NO: 1562904
uggaauacaucuguggagu

SEQ ID NO: 1781338 - RNA, 19 nt, Artificial Sequence
  Description of Artificial Sequence: Synthetic oligonucleotide
  Antisense strand to SEQ ID NO: 1781337
acuccacagauguauucca

SEQ ID NO: 1781339 - RNA, 19 nt, Artificial Sequence
  Description of Artificial Sequence: Synthetic oligonucleotide
  Sense strand starting at position 3161 of SEQ ID NO: 1562904
ggaauacaucuguggaguu

SEQ ID NO: 1781340 - RNA, 19 nt, Artificial Sequence
  Description of Artificial Sequence: Synthetic oligonucleotide
  Antisense strand to SEQ ID NO: 1781339
aacuccacagauguauucc

SEQ ID NO: 1781341 - RNA, 19 nt, Artificial Sequence
  Description of Artificial Sequence: Synthetic oligonucleotide
  Sense strand starting at position 3371 of SEQ ID NO: 1562904
ucuuucuugcaagaguuga

SEQ ID NO: 1781342 - RNA, 19 nt, Artificial Sequence
  Description of Artificial Sequence: Synthetic oligonucleotide
  Antisense strand to SEQ ID NO: 1781341
ucaacucuugcaagaaaga

SEQ ID NO: 1781343 - RNA, 19 nt, Artificial Sequence
  Description of Artificial Sequence: Synthetic oligonucleotide
  Sense strand starting at position 3442 of SEQ ID NO: 1562904
gugcuaaguaauggagaua

SEQ ID NO: 1781344 - RNA, 19 nt, Artificial Sequence
  Description of Artificial Sequence: Synthetic oligonucleotide
  Antisense strand to SEQ ID NO: 1781343
uaucuccauuacuuagcac

SEQ ID NO: 1781345 - RNA, 19 nt, Artificial Sequence
  Description of Artificial Sequence: Synthetic oligonucleotide
  Sense strand starting at position 3665 of SEQ ID NO: 1562904
gcagaccaucuuuaugaca

SEQ ID NO: 1781346 - RNA, 19 nt, Artificial Sequence
  Description of Artificial Sequence: Synthetic oligonucleotide
  Antisense strand to SEQ ID NO: 1781345
ugucauaaagauggucugc

SEQ ID NO: 1781347 - RNA, 19 nt, Artificial Sequence
  Description of Artificial Sequence: Synthetic oligonucleotide
  Sense strand starting at position 3746 of SEQ ID NO: 1562904
uuaagagauugaguacuau

SEQ ID NO: 1781348 - RNA, 19 nt, Artificial Sequence
  Description of Artificial Sequence: Synthetic oligonucleotide
  Antisense strand to SEQ ID NO: 1781347
auaguacucaaucucuuaa

SEQ ID NO: 1781349 - RNA, 19 nt, Artificial Sequence
  Description of Artificial Sequence: Synthetic oligonucleotide
  Sense strand starting at position 3765 of SEQ ID NO: 1562904
aaaucuguaugcuuaggga

SEQ ID NO: 1781350 - RNA, 19 nt, Artificial Sequence
  Description of Artificial Sequence: Synthetic oligonucleotide
  Antisense strand to SEQ ID NO: 1781349
ucccuaagcauacagauuu

SEQ ID NO: 1781351 - RNA, 19 nt, Artificial Sequence
  Description of Artificial Sequence: Synthetic oligonucleotide
  Sense strand starting at position 3778 of SEQ ID NO: 1562904
uagggaguguucuuuaaag

SEQ ID NO: 1781352 - RNA, 19 nt, Artificial Sequence
  Description of Artificial Sequence: Synthetic oligonucleotide
  Antisense strand to SEQ ID NO: 1781351
cuuuaaagaacacucccua

SEQ ID NO: 1781353 - RNA, 19 nt, Artificial Sequence
  Description of Artificial Sequence: Synthetic oligonucleotide
  Sense strand starting at position 3780 of SEQ ID NO: 1562904
gggaguguucuuuaaaguc

SEQ ID NO: 1781354 - RNA, 19 nt, Artificial Sequence
  Description of Artificial Sequence: Synthetic oligonucleotide
  Antisense strand to SEQ ID NO: 1781353
gacuuuaaagaacacuccc

SEQ ID NO: 1781355 - RNA, 19 nt, Artificial Sequence
  Description of Artificial Sequence: Synthetic oligonucleotide
  Sense strand starting at position 3823 of SEQ ID NO: 1562904
ugccaaauuuaugugguau

SEQ ID NO: 1781356 - RNA, 19 nt, Artificial Sequence
  Description of Artificial Sequence: Synthetic oligonucleotide
  Antisense strand to SEQ ID NO: 1781355
auaccacauaaauuuggca

SEQ ID NO: 1781357 - RNA, 19 nt, Artificial Sequence
  Description of Artificial Sequence: Synthetic oligonucleotide
  Sense strand starting at position 3827 of SEQ ID NO: 1562904
aaauuuaugugguauggag

SEQ ID NO: 1781358 - RNA, 19 nt, Artificial Sequence
  Description of Artificial Sequence: Synthetic oligonucleotide
  Antisense strand to SEQ ID NO: 1781357
cuccauaccacauaaauuu

SEQ ID NO: 1781359 - RNA, 19 nt, Artificial Sequence
  Description of Artificial Sequence: Synthetic oligonucleotide
  Sense strand starting at position 3835 of SEQ ID NO: 1562904
gugguauggagucauugua

SEQ ID NO: 1781360 - RNA, 19 nt, Artificial Sequence
  Description of Artificial Sequence: Synthetic oligonucleotide
  Antisense strand to SEQ ID NO: 1781359
uacaaugacuccauaccac

SEQ ID NO: 1781361 - RNA, 19 nt, Artificial Sequence
  Description of Artificial Sequence: Synthetic oligonucleotide
  Sense strand starting at position 3843 of SEQ ID NO: 1562904
gagucauuguauguuauaa

SEQ ID NO: 1781362 - RNA, 19 nt, Artificial Sequence
  Description of Artificial Sequence: Synthetic oligonucleotide
  Antisense strand to SEQ ID NO: 1781361
uuauaacauacaaugacuc

SEQ ID NO: 1781363 - RNA, 19 nt, Artificial Sequence
  Description of Artificial Sequence: Synthetic oligonucleotide
  Sense strand starting at position 3902 of SEQ ID NO: 1562904
uuaaacguugcagauaaau

SEQ ID NO: 1781364 - RNA, 19 nt, Artificial Sequence
  Description of Artificial Sequence: Synthetic oligonucleotide
  Antisense strand to SEQ ID NO: 1781363
auuuaucugcaacguuuaa

SEQ ID NO: 1781365 - RNA, 19 nt, Artificial Sequence
  Description of Artificial Sequence: Synthetic oligonucleotide
  Sense strand starting at position 3926 of SEQ ID NO: 1562904
guugacaugcuuuaucauu

SEQ ID NO: 1781366 - RNA, 19 nt, Artificial Sequence
  Description of Artificial Sequence: Synthetic oligonucleotide
  Antisense strand to SEQ ID NO: 1781365
aaugauaaagcaugucaac

SEQ ID NO: 1781367 - RNA, 19 nt, Artificial Sequence
  Description of Artificial Sequence: Synthetic oligonucleotide
  Sense strand starting at position 26 of SEQ ID NO: 1562905
acugcuuuccaagaguuag

SEQ ID NO: 1781368 - RNA, 19 nt, Artificial Sequence
  Description of Artificial Sequence: Synthetic oligonucleotide
  Antisense strand to SEQ ID NO: 1781367
cuaacucuuggaaagcagu

SEQ ID NO: 1781369 - RNA, 19 nt, Artificial Sequence
  Description of Artificial Sequence: Synthetic oligonucleotide
  Sense strand starting at position 273 of SEQ ID NO: 1562905
ugaacacuuguuugauaca

SEQ ID NO: 1781370 - RNA, 19 nt, Artificial Sequence
  Description of Artificial Sequence: Synthetic oligonucleotide
  Antisense strand to SEQ ID NO: 1781369
uguaucaaacaaguguuca

SEQ ID NO: 1781371 - RNA, 19 nt, Artificial Sequence
  Description of Artificial Sequence: Synthetic oligonucleotide
  Sense strand starting at position 294 of SEQ ID NO: 1562905
guauaaacgacuuggaaga

SEQ ID NO: 1781372 - RNA, 19 nt, Artificial Sequence
  Description of Artificial Sequence: Synthetic oligonucleotide
  Antisense strand to SEQ ID NO: 1781371
ucuuccaagucguuuauac

SEQ ID NO: 1781373 - RNA, 19 nt, Artificial Sequence
  Description of Artificial Sequence: Synthetic oligonucleotide
  Sense strand starting at position 468 of SEQ ID NO: 1562905
accuauuacaugcgaggga

SEQ ID NO: 1781374 - RNA, 19 nt, Artificial Sequence
  Description of Artificial Sequence: Synthetic oligonucleotide
  Antisense strand to SEQ ID NO: 1781373
ucccucgcauguaauaggu

SEQ ID NO: 1781375 - RNA, 19 nt, Artificial Sequence
  Description of Artificial Sequence: Synthetic oligonucleotide
  Sense strand starting at position 473 of SEQ ID NO: 1562905
uuacaugcgagggacuauu

SEQ ID NO: 1781376 - RNA, 19 nt, Artificial Sequence
  Description of Artificial Sequence: Synthetic oligonucleotide
  Antisense strand to SEQ ID NO: 1781375
aauagucccucgcauguaa

SEQ ID NO: 1781377 - RNA, 19 nt, Artificial Sequence
  Description of Artificial Sequence: Synthetic oligonucleotide
  Sense strand starting at position 502 of SEQ ID NO: 1562905
gggauaugagagugagcaa

SEQ ID NO: 1781378 - RNA, 19 nt, Artificial Sequence
  Description of Artificial Sequence: Synthetic oligonucleotide
  Antisense strand to SEQ ID NO: 1781377
uugcucacucucauauccc

SEQ ID NO: 1781379 - RNA, 19 nt, Artificial Sequence
  Description of Artificial Sequence: Synthetic oligonucleotide
  Sense strand starting at position 725 of SEQ ID NO: 1562905
ccuggaagaaggugaguua

SEQ ID NO: 1781380 - RNA, 19 nt, Artificial Sequence
  Description of Artificial Sequence: Synthetic oligonucleotide
  Antisense strand to SEQ ID NO: 1781379
uaacucaccuucuuccagg

SEQ ID NO: 1781381 - RNA, 19 nt, Artificial Sequence
  Description of Artificial Sequence: Synthetic oligonucleotide
  Sense strand starting at position 806 of SEQ ID NO: 1562905
gaacuuauucuagaguagc

SEQ ID NO: 1781382 - RNA, 19 nt, Artificial Sequence
  Description of Artificial Sequence: Synthetic oligonucleotide
  Antisense strand to SEQ ID NO: 1781381
gcuacucuagaauaaguuc

SEQ ID NO: 1781383 - RNA, 19 nt, Artificial Sequence
  Description of Artificial Sequence: Synthetic oligonucleotide
  Sense strand starting at position 809 of SEQ ID NO: 1562905
cuuauucuagaguagcaga

SEQ ID NO: 1781384 - RNA, 19 nt, Artificial Sequence
  Description of Artificial Sequence: Synthetic oligonucleotide
  Antisense strand to SEQ ID NO: 1781383
ucugcuacucuagaauaag

SEQ ID NO: 1781385 - RNA, 19 nt, Artificial Sequence
  Description of Artificial Sequence: Synthetic oligonucleotide
  Sense strand starting at position 839 of SEQ ID NO: 1562905
gaagcuugcgaagauggaa

SEQ ID NO: 1781386 - RNA, 19 nt, Artificial Sequence
  Description of Artificial Sequence: Synthetic oligonucleotide
  Antisense strand to SEQ ID NO: 1781385
uuccaucuucgcaagcuuc

SEQ ID NO: 1781387 - RNA, 19 nt, Artificial Sequence
  Description of Artificial Sequence: Synthetic oligonucleotide
  Sense strand starting at position 959 of SEQ ID NO: 1562905
gagucuuugggagguauua

SEQ ID NO: 1781388 - RNA, 19 nt, Artificial Sequence
  Description of Artificial Sequence: Synthetic oligonucleotide
  Antisense strand to SEQ ID NO: 1781387
uaauaccucccaaagacuc

SEQ ID NO: 1781389 - RNA, 19 nt, Artificial Sequence
  Description of Artificial Sequence: Synthetic oligonucleotide
  Sense strand starting at position 961 of SEQ ID NO: 1562905
gucuuugggagguauuaag

SEQ ID NO: 1781390 - RNA, 19 nt, Artificial Sequence
  Description of Artificial Sequence: Synthetic oligonucleotide
  Antisense strand to SEQ ID NO: 1781389
cuuaauaccucccaaagac

SEQ ID NO: 1781391 - RNA, 19 nt, Artificial Sequence
  Description of Artificial Sequence: Synthetic oligonucleotide
  Sense strand starting at position 986 of SEQ ID NO: 1562905
agaagugcaucagugacuu

SEQ ID NO: 1781392 - RNA, 19 nt, Artificial Sequence
  Description of Artificial Sequence: Synthetic oligonucleotide
  Antisense strand to SEQ ID NO: 1781391
aagucacugaugcacuucu

SEQ ID NO: 1781393 - RNA, 19 nt, Artificial Sequence
  Description of Artificial Sequence: Synthetic oligonucleotide
  Sense strand starting at position 1187 of SEQ ID NO: 1562905
gcaagcagauuuccguaau

SEQ ID NO: 1781394 - RNA, 19 nt, Artificial Sequence
  Description of Artificial Sequence: Synthetic oligonucleotide
  Antisense strand to SEQ ID NO: 1781393
auuacggaaaucugcuugc

SEQ ID NO: 1781395 - RNA, 19 nt, Artificial Sequence
  Description of Artificial Sequence: Synthetic oligonucleotide
  Sense strand starting at position 1212 of SEQ ID NO: 1562905
aguccuugccaguaggaaa

SEQ ID NO: 1781396 - RNA, 19 nt, Artificial Sequence
  Description of Artificial Sequence: Synthetic oligonucleotide
  Antisense strand to SEQ ID NO: 1781395
uuuccuacuggcaaggacu

SEQ ID NO: 1781397 - RNA, 19 nt, Artificial Sequence
  Description of Artificial Sequence: Synthetic oligonucleotide
  Sense strand starting at position 2320 of SEQ ID NO: 1562905
cuacgcuuuccggugaguu

SEQ ID NO: 1781398 - RNA, 19 nt, Artificial Sequence
  Description of Artificial Sequence: Synthetic oligonucleotide
  Antisense strand to SEQ ID NO: 1781397
aacucaccggaaagcguag

SEQ ID NO: 1781399 - RNA, 19 nt, Artificial Sequence
  Description of Artificial Sequence: Synthetic oligonucleotide
  Sense strand starting at position 2340 of SEQ ID NO: 1562905
uccaguugguucuuuggaa

SEQ ID NO: 1781400 - RNA, 19 nt, Artificial Sequence
  Description of Artificial Sequence: Synthetic oligonucleotide
  Antisense strand to SEQ ID NO: 1781399
uuccaaagaaccaacugga

SEQ ID NO: 1781401 - RNA, 19 nt, Artificial Sequence
  Description of Artificial Sequence: Synthetic oligonucleotide
  Sense strand starting at position 2908 of SEQ ID NO: 1562905
cuaugaauacaguggagua

SEQ ID NO: 1781402 - RNA, 19 nt, Artificial Sequence
  Description of Artificial Sequence: Synthetic oligonucleotide
  Antisense strand to SEQ ID NO: 1781401
uacuccacuguauucauag

SEQ ID NO: 1781403 - RNA, 19 nt, Artificial Sequence
  Description of Artificial Sequence: Synthetic oligonucleotide
  Sense strand starting at position 2946 of SEQ ID NO: 1562905
caagacaagggcugucuua

SEQ ID NO: 1781404 - RNA, 19 nt, Artificial Sequence
  Description of Artificial Sequence: Synthetic oligonucleotide
  Antisense strand to SEQ ID NO: 1781403
uaagacagcccuugucuug

SEQ ID NO: 1781405 - RNA, 19 nt, Artificial Sequence
  Description of Artificial Sequence: Synthetic oligonucleotide
  Sense strand starting at position 3075 of SEQ ID NO: 1562905
ggcagauguggccagaaca

SEQ ID NO: 1781406 - RNA, 19 nt, Artificial Sequence
  Description of Artificial Sequence: Synthetic oligonucleotide
  Antisense strand to SEQ ID NO: 1781405
uguucuggccacaucugcc

SEQ ID NO: 1781407 - RNA, 19 nt, Artificial Sequence
  Description of Artificial Sequence: Synthetic oligonucleotide
  Sense strand starting at position 3127 of SEQ ID NO: 1562905
acuggauuacuaggccaua

SEQ ID NO: 1781408 - RNA, 19 nt, Artificial Sequence
  Description of Artificial Sequence: Synthetic oligonucleotide
  Antisense strand to SEQ ID NO: 1781407
uauggccuaguaauccagu

SEQ ID NO: 1781409 - RNA, 19 nt, Artificial Sequence
  Description of Artificial Sequence: Synthetic oligonucleotide
  Sense strand starting at position 3130 of SEQ ID NO: 1562905
ggauuacuaggccauagua

SEQ ID NO: 1781410 - RNA, 19 nt, Artificial Sequence
  Description of Artificial Sequence: Synthetic oligonucleotide
  Antisense strand to SEQ ID NO: 1781409
uacuauggccuaguaaucc

SEQ ID NO: 1781411 - RNA, 19 nt, Artificial Sequence
  Description of Artificial Sequence: Synthetic oligonucleotide
  Sense strand starting at position 3132 of SEQ ID NO: 1562905
auuacuaggccauaguaaa

SEQ ID NO: 1781412 - RNA, 19 nt, Artificial Sequence
  Description of Artificial Sequence: Synthetic oligonucleotide
  Antisense strand to SEQ ID NO: 1781411
uuuacuauggccuaguaau

SEQ ID NO: 1781413 - RNA, 19 nt, Artificial Sequence
  Description of Artificial Sequence: Synthetic oligonucleotide
  Sense strand starting at position 3225 of SEQ ID NO: 1562905
uguauaaacaucuggugua

SEQ ID NO: 1781414 - RNA, 19 nt, Artificial Sequence
  Description of Artificial Sequence: Synthetic oligonucleotide
  Antisense strand to SEQ ID NO: 1781413
uacaccagauguuuauaca

SEQ ID NO: 1781415 - RNA, 19 nt, Artificial Sequence
  Description of Artificial Sequence: Synthetic oligonucleotide
  Sense strand starting at position 3230 of SEQ ID NO: 1562905
aaacaucugguguaucuga

SEQ ID NO: 1781416 - RNA, 19 nt, Artificial Sequence
  Description of Artificial Sequence: Synthetic oligonucleotide
  Antisense strand to SEQ ID NO: 1781415
ucagauacaccagauguuu

SEQ ID NO: 1781417 - RNA, 19 nt, Artificial Sequence
  Description of Artificial Sequence: Synthetic oligonucleotide
  Sense strand starting at position 3241 of SEQ ID NO: 1562905
guaucugauaguggaauac

SEQ ID NO: 1781418 - RNA, 19 nt, Artificial Sequence
  Description of Artificial Sequence: Synthetic oligonucleotide
  Antisense strand to SEQ ID NO: 1781417
guauuccacuaucagauac

SEQ ID NO: 1781419 - RNA, 19 nt, Artificial Sequence
  Description of Artificial Sequence: Synthetic oligonucleotide
  Sense strand starting at position 3251 of SEQ ID NO: 1562905
guggaauacaucuguggag

SEQ ID NO: 1781420 - RNA, 19 nt, Artificial Sequence
  Description of Artificial Sequence: Synthetic oligonucleotide
  Antisense strand to SEQ ID NO: 1781419
cuccacagauguauuccac

SEQ ID NO: 1781421 - RNA, 19 nt, Artificial Sequence
  Description of Artificial Sequence: Synthetic oligonucleotide
  Sense strand starting at position 3252 of SEQ ID NO: 1562905
uggaauacaucuguggagu

SEQ ID NO: 1781422 - RNA, 19 nt, Artificial Sequence
  Description of Artificial Sequence: Synthetic oligonucleotide
  Antisense strand to SEQ ID NO: 1781421
acuccacagauguauucca

SEQ ID NO: 1781423 - RNA, 19 nt, Artificial Sequence
  Description of Artificial Sequence: Synthetic oligonucleotide
  Sense strand starting at position 3253 of SEQ ID NO: 1562905
ggaauacaucuguggaguu

SEQ ID NO: 1781424 - RNA, 19 nt, Artificial Sequence
  Description of Artificial Sequence: Synthetic oligonucleotide
  Antisense strand to SEQ ID NO: 1781423
aacuccacagauguauucc

SEQ ID NO: 1781425 - RNA, 19 nt, Artificial Sequence
  Description of Artificial Sequence: Synthetic oligonucleotide
  Sense strand starting at position 3463 of SEQ ID NO: 1562905
ucuuucuugcaagaguuga

SEQ ID NO: 1781426 - RNA, 19 nt, Artificial Sequence
  Description of Artificial Sequence: Synthetic oligonucleotide
  Antisense strand to SEQ ID NO: 1781425
ucaacucuugcaagaaaga

SEQ ID NO: 1781427 - RNA, 19 nt, Artificial Sequence
  Description of Artificial Sequence: Synthetic oligonucleotide
  Sense strand starting at position 3534 of SEQ ID NO: 1562905
gugcuaaguaauggagaua

SEQ ID NO: 1781428 - RNA, 19 nt, Artificial Sequence
  Description of Artificial Sequence: Synthetic oligonucleotide
  Antisense strand to SEQ ID NO: 1781427
uaucuccauuacuuagcac

SEQ ID NO: 1781429 - RNA, 19 nt, Artificial Sequence
  Description of Artificial Sequence: Synthetic oligonucleotide
  Sense strand starting at position 3757 of SEQ ID NO: 1562905
gcagaccaucuuuaugaca

SEQ ID NO: 1781430 - RNA, 19 nt, Artificial Sequence
  Description of Artificial Sequence: Synthetic oligonucleotide
  Antisense strand to SEQ ID NO: 1781429
ugucauaaagauggucugc

SEQ ID NO: 1781431 - RNA, 19 nt, Artificial Sequence
  Description of Artificial Sequence: Synthetic oligonucleotide
  Sense strand starting at position 3838 of SEQ ID NO: 1562905
uuaagagauugaguacuau

SEQ ID NO: 1781432 - RNA, 19 nt, Artificial Sequence
  Description of Artificial Sequence: Synthetic oligonucleotide
  Antisense strand to SEQ ID NO: 1781431
auaguacucaaucucuuaa

SEQ ID NO: 1781433 - RNA, 19 nt, Artificial Sequence
  Description of Artificial Sequence: Synthetic oligonucleotide
  Sense strand starting at position 3857 of SEQ ID NO: 1562905
aaaucuguaugcuuaggga

SEQ ID NO: 1781434 - RNA, 19 nt, Artificial Sequence
  Description of Artificial Sequence: Synthetic oligonucleotide
  Antisense strand to SEQ ID NO: 1781433
ucccuaagcauacagauuu

SEQ ID NO: 1781435 - RNA, 19 nt, Artificial Sequence
  Description of Artificial Sequence: Synthetic oligonucleotide
  Sense strand starting at position 3870 of SEQ ID NO: 1562905
uagggaguguucuuuaaag

SEQ ID NO: 1781436 - RNA, 19 nt, Artificial Sequence
  Description of Artificial Sequence: Synthetic oligonucleotide
  Antisense strand to SEQ ID NO: 1781435
cuuuaaagaacacucccua

SEQ ID NO: 1781437 - RNA, 19 nt, Artificial Sequence
  Description of Artificial Sequence: Synthetic oligonucleotide
  Sense strand starting at position 3872 of SEQ ID NO: 1562905
gggaguguucuuuaaaguc

SEQ ID NO: 1781438 - RNA, 19 nt, Artificial Sequence
  Description of Artificial Sequence: Synthetic oligonucleotide
  Antisense strand to SEQ ID NO: 1781437
gacuuuaaagaacacuccc

SEQ ID NO: 1781439 - RNA, 19 nt, Artificial Sequence
  Description of Artificial Sequence: Synthetic oligonucleotide
  Sense strand starting at position 3915 of SEQ ID NO: 1562905
ugccaaauuuaugugguau

SEQ ID NO: 1781440 - RNA, 19 nt, Artificial Sequence
  Description of Artificial Sequence: Synthetic oligonucleotide
  Antisense strand to SEQ ID NO: 1781439
auaccacauaaauuuggca

SEQ ID NO: 1781441 - RNA, 19 nt, Artificial Sequence
  Description of Artificial Sequence: Synthetic oligonucleotide
  Sense strand starting at position 3919 of SEQ ID NO: 1562905
aaauuuaugugguauggag

SEQ ID NO: 1781442 - RNA, 19 nt, Artificial Sequence
  Description of Artificial Sequence: Synthetic oligonucleotide
  Antisense strand to SEQ ID NO: 1781441
cuccauaccacauaaauuu

SEQ ID NO: 1781443 - RNA, 19 nt, Artificial Sequence
  Description of Artificial Sequence: Synthetic oligonucleotide
  Sense strand starting at position 3927 of SEQ ID NO: 1562905
gugguauggagucauugua

SEQ ID NO: 1781444 - RNA, 19 nt, Artificial Sequence
  Description of Artificial Sequence: Synthetic oligonucleotide
  Antisense strand to SEQ ID NO: 1781443
uacaaugacuccauaccac

SEQ ID NO: 1781445 - RNA, 19 nt, Artificial Sequence
  Description of Artificial Sequence: Synthetic oligonucleotide
  Sense strand starting at position 3935 of SEQ ID NO: 1562905
gagucauuguauguuauaa

SEQ ID NO: 1781446 - RNA, 19 nt, Artificial Sequence
  Description of Artificial Sequence: Synthetic oligonucleotide
  Antisense strand to SEQ ID NO: 1781445
uuauaacauacaaugacuc

SEQ ID NO: 1781447 - RNA, 19 nt, Artificial Sequence
  Description of Artificial Sequence: Synthetic oligonucleotide
  Sense strand starting at position 44 of SEQ ID NO: 1562906
gaagaagugucacaaugac

SEQ ID NO: 1781448 - RNA, 19 nt, Artificial Sequence
  Description of Artificial Sequence: Synthetic oligonucleotide
  Antisense strand to SEQ ID NO: 1781447
gucauugugacacuucuuc

SEQ ID NO: 1781449 - RNA, 19 nt, Artificial Sequence
  Description of Artificial Sequence: Synthetic oligonucleotide
  Sense strand starting at position 160 of SEQ ID NO: 1562906
gagguaccuuaacaguuau

SEQ ID NO: 1781450 - RNA, 19 nt, Artificial Sequence
  Description of Artificial Sequence: Synthetic oligonucleotide
  Antisense strand to SEQ ID NO: 1781449
auaacuguuaagguaccuc

SEQ ID NO: 1781451 - RNA, 19 nt, Artificial Sequence
  Description of Artificial Sequence: Synthetic oligonucleotide
  Sense strand starting at position 365 of SEQ ID NO: 1562906
aguagaaagcugugugcca

SEQ ID NO: 1781452 - RNA, 19 nt, Artificial Sequence
  Description of Artificial Sequence: Synthetic oligonucleotide
  Antisense strand to SEQ ID NO: 1781451
uggcacacagcuuucuacu

SEQ ID NO: 1781453 - RNA, 19 nt, Artificial Sequence
  Description of Artificial Sequence: Synthetic oligonucleotide
  Sense strand starting at position 372 of SEQ ID NO: 1562906
agcugugugccagggcaua

SEQ ID NO: 1781454 - RNA, 19 nt, Artificial Sequence
  Description of Artificial Sequence: Synthetic oligonucleotide
  Antisense strand to SEQ ID NO: 1781453
uaugcccuggcacacagcu

SEQ ID NO: 1781455 - RNA, 19 nt, Artificial Sequence
  Description of Artificial Sequence: Synthetic oligonucleotide
  Sense strand starting at position 686 of SEQ ID NO: 1562906
cugagcugugaggguuaaa

SEQ ID NO: 1781456 - RNA, 19 nt, Artificial Sequence
  Description of Artificial Sequence: Synthetic oligonucleotide
  Antisense strand to SEQ ID NO: 1781455
uuuaacccucacagcucag

SEQ ID NO: 1781457 - RNA, 19 nt, Artificial Sequence
  Description of Artificial Sequence: Synthetic oligonucleotide
  Sense strand starting at position 714 of SEQ ID NO: 1562906
guguauugagcuugaagca

SEQ ID NO: 1781458 - RNA, 19 nt, Artificial Sequence
  Description of Artificial Sequence: Synthetic oligonucleotide
  Antisense strand to SEQ ID NO: 1781457
ugcuucaagcucaauacac

SEQ ID NO: 1781459 - RNA, 19 nt, Artificial Sequence
  Description of Artificial Sequence: Synthetic oligonucleotide
  Sense strand starting at position 836 of SEQ ID NO: 1562906
gcauuuacauauugauaga

SEQ ID NO: 1781460 - RNA, 19 nt, Artificial Sequence
  Description of Artificial Sequence: Synthetic oligonucleotide
  Antisense strand to SEQ ID NO: 1781459
ucuaucaauauguaaaugc

SEQ ID NO: 1781461 - RNA, 19 nt, Artificial Sequence
  Description of Artificial Sequence: Synthetic oligonucleotide
  Sense strand starting at position 849 of SEQ ID NO: 1562906
gauagaaauuccgcgguuu

SEQ ID NO: 1781462 - RNA, 19 nt, Artificial Sequence
  Description of Artificial Sequence: Synthetic oligonucleotide
  Antisense strand to SEQ ID NO: 1781461
aaaccgcggaauuucuauc

SEQ ID NO: 1781463 - RNA, 19 nt, Artificial Sequence
  Description of Artificial Sequence: Synthetic oligonucleotide
  Sense strand starting at position 945 of SEQ ID NO: 1562906
aaaguagguuauuaaagga

SEQ ID NO: 1781464 - RNA, 19 nt, Artificial Sequence
  Description of Artificial Sequence: Synthetic oligonucleotide
  Antisense strand to SEQ ID NO: 1781463
uccuuuaauaaccuacuuu

SEQ ID NO: 1781465 - RNA, 19 nt, Artificial Sequence
  Description of Artificial Sequence: Synthetic oligonucleotide
  Sense strand starting at position 1335 of SEQ ID NO: 1562906
gcucaaauauaagcugaau

SEQ ID NO: 1781466 - RNA, 19 nt, Artificial Sequence
  Description of Artificial Sequence: Synthetic oligonucleotide
  Antisense strand to SEQ ID NO: 1781465
auucagcuuauauuugagc

SEQ ID NO: 1781467 - RNA, 19 nt, Artificial Sequence
  Description of Artificial Sequence: Synthetic oligonucleotide
  Sense strand starting at position 1430 of SEQ ID NO: 1562906
ugcuaaucugaagauguaa

SEQ ID NO: 1781468 - RNA, 19 nt, Artificial Sequence
  Description of Artificial Sequence: Synthetic oligonucleotide
  Antisense strand to SEQ ID NO: 1781467
uuacaucuucagauuagca

SEQ ID NO: 1781469 - RNA, 19 nt, Artificial Sequence
  Description of Artificial Sequence: Synthetic oligonucleotide
  Sense strand starting at position 1441 of SEQ ID NO: 1562906
agauguaacuuagacaaag

SEQ ID NO: 1781470 - RNA, 19 nt, Artificial Sequence
  Description of Artificial Sequence: Synthetic oligonucleotide
  Antisense strand to SEQ ID NO: 1781469
cuuugucuaaguuacaucu

SEQ ID NO: 1781471 - RNA, 19 nt, Artificial Sequence
  Description of Artificial Sequence: Synthetic oligonucleotide
  Sense strand starting at position 1484 of SEQ ID NO: 1562906
gaaauccagccuuggaaug

SEQ ID NO: 1781472 - RNA, 19 nt, Artificial Sequence
  Description of Artificial Sequence: Synthetic oligonucleotide
  Antisense strand to SEQ ID NO: 1781471
cauuccaaggcuggauuuc

SEQ ID NO: 1781473 - RNA, 19 nt, Artificial Sequence
  Description of Artificial Sequence: Synthetic oligonucleotide
  Sense strand starting at position 1496 of SEQ ID NO: 1562906
uggaaugugcugugaaccu

SEQ ID NO: 1781474 - RNA, 19 nt, Artificial Sequence
  Description of Artificial Sequence: Synthetic oligonucleotide
  Antisense strand to SEQ ID NO: 1781473
agguucacagcacauucca

SEQ ID NO: 1781475 - RNA, 19 nt, Artificial Sequence
  Description of Artificial Sequence: Synthetic oligonucleotide
  Sense strand starting at position 1566 of SEQ ID NO: 1562906
uuaccuaguuguuugguaa

SEQ ID NO: 1781476 - RNA, 19 nt, Artificial Sequence
  Description of Artificial Sequence: Synthetic oligonucleotide
  Antisense strand to SEQ ID NO: 1781475
uuaccaaacaacuagguaa

SEQ ID NO: 1781477 - RNA, 19 nt, Artificial Sequence
  Description of Artificial Sequence: Synthetic oligonucleotide
  Sense strand starting at position 1567 of SEQ ID NO: 1562906
uaccuaguuguuugguaag

SEQ ID NO: 1781478 - RNA, 19 nt, Artificial Sequence
  Description of Artificial Sequence: Synthetic oligonucleotide
  Antisense strand to SEQ ID NO: 1781477
cuuaccaaacaacuaggua

SEQ ID NO: 1781479 - RNA, 19 nt, Artificial Sequence
  Description of Artificial Sequence: Synthetic oligonucleotide
  Sense strand starting at position 1569 of SEQ ID NO: 1562906
ccuaguuguuugguaagca

SEQ ID NO: 1781480 - RNA, 19 nt, Artificial Sequence
  Description of Artificial Sequence: Synthetic oligonucleotide
  Antisense strand to SEQ ID NO: 1781479
ugcuuaccaaacaacuagg

SEQ ID NO: 1781481 - RNA, 19 nt, Artificial Sequence
  Description of Artificial Sequence: Synthetic oligonucleotide
  Sense strand starting at position 1573 of SEQ ID NO: 1562906
guuguuugguaagcacaca

SEQ ID NO: 1781482 - RNA, 19 nt, Artificial Sequence
  Description of Artificial Sequence: Synthetic oligonucleotide
  Antisense strand to SEQ ID NO: 1781481
ugugugcuuaccaaacaac

SEQ ID NO: 1781483 - RNA, 19 nt, Artificial Sequence
  Description of Artificial Sequence: Synthetic oligonucleotide
  Sense strand starting at position 1596 of SEQ ID NO: 1562906
acucacuuaucuggucaca

SEQ ID NO: 1781484 - RNA, 19 nt, Artificial Sequence
  Description of Artificial Sequence: Synthetic oligonucleotide
  Antisense strand to SEQ ID NO: 1781483
ugugaccagauaagugagu

SEQ ID NO: 1781485 - RNA, 19 nt, Artificial Sequence
  Description of Artificial Sequence: Synthetic oligonucleotide
  Sense strand starting at position 1598 of SEQ ID NO: 1562906
ucacuuaucuggucacaua

SEQ ID NO: 1781486 - RNA, 19 nt, Artificial Sequence
  Description of Artificial Sequence: Synthetic oligonucleotide
  Antisense strand to SEQ ID NO: 1781485
uaugugaccagauaaguga

SEQ ID NO: 1781487 - RNA, 19 nt, Artificial Sequence
  Description of Artificial Sequence: Synthetic oligonucleotide
  Sense strand starting at position 1601 of SEQ ID NO: 1562906
cuuaucuggucacauauuu

SEQ ID NO: 1781488 - RNA, 19 nt, Artificial Sequence
  Description of Artificial Sequence: Synthetic oligonucleotide
  Antisense strand to SEQ ID NO: 1781487
aaauaugugaccagauaag

SEQ ID NO: 1781489 - RNA, 19 nt, Artificial Sequence
  Description of Artificial Sequence: Synthetic oligonucleotide
  Sense strand starting at position 1635 of SEQ ID NO: 1562906
uagucagauccugauacga

SEQ ID NO: 1781490 - RNA, 19 nt, Artificial Sequence
  Description of Artificial Sequence: Synthetic oligonucleotide
  Antisense strand to SEQ ID NO: 1781489
ucguaucaggaucugacua

SEQ ID NO: 1781491 - RNA, 19 nt, Artificial Sequence
  Description of Artificial Sequence: Synthetic oligonucleotide
  Sense strand starting at position 1637 of SEQ ID NO: 1562906
gucagauccugauacgaac

SEQ ID NO: 1781492 - RNA, 19 nt, Artificial Sequence
  Description of Artificial Sequence: Synthetic oligonucleotide
  Antisense strand to SEQ ID NO: 1781491
guucguaucaggaucugac

SEQ ID NO: 1781493 - RNA, 19 nt, Artificial Sequence
  Description of Artificial Sequence: Synthetic oligonucleotide
  Sense strand starting at position 2465 of SEQ ID NO: 1562906
ucuuuccucacguggaaga

SEQ ID NO: 1781494 - RNA, 19 nt, Artificial Sequence
  Description of Artificial Sequence: Synthetic oligonucleotide
  Antisense strand to SEQ ID NO: 1781493
ucuuccacgugaggaaaga

SEQ ID NO: 1781495 - RNA, 19 nt, Artificial Sequence
  Description of Artificial Sequence: Synthetic oligonucleotide
  Sense strand starting at position 2486 of SEQ ID NO: 1562906
ggaauugcucucugcucuu

SEQ ID NO: 1781496 - RNA, 19 nt, Artificial Sequence
  Description of Artificial Sequence: Synthetic oligonucleotide
  Antisense strand to SEQ ID NO: 1781495
aagagcagagagcaauucc

SEQ ID NO: 1781497 - RNA, 19 nt, Artificial Sequence
  Description of Artificial Sequence: Synthetic oligonucleotide
  Sense strand starting at position 2604 of SEQ ID NO: 1562906
cugguuacaacaugaguga

SEQ ID NO: 1781498 - RNA, 19 nt, Artificial Sequence
  Description of Artificial Sequence: Synthetic oligonucleotide
  Antisense strand to SEQ ID NO: 1781497
ucacucauguuguaaccag

SEQ ID NO: 1781499 - RNA, 19 nt, Artificial Sequence
  Description of Artificial Sequence: Synthetic oligonucleotide
  Sense strand starting at position 2786 of SEQ ID NO: 1562906
cuauguauuuauugagaug

SEQ ID NO: 1781500 - RNA, 19 nt, Artificial Sequence
  Description of Artificial Sequence: Synthetic oligonucleotide
  Antisense strand to SEQ ID NO: 1781499
caucucaauaaauacauag

SEQ ID NO: 1781501 - RNA, 19 nt, Artificial Sequence
  Description of Artificial Sequence: Synthetic oligonucleotide
  Sense strand starting at position 2979 of SEQ ID NO: 1562906
ugauauuggccaggcugau

SEQ ID NO: 1781502 - RNA, 19 nt, Artificial Sequence
  Description of Artificial Sequence: Synthetic oligonucleotide
  Antisense strand to SEQ ID NO: 1781501
aucagccuggccaauauca

SEQ ID NO: 1781503 - RNA, 19 nt, Artificial Sequence
  Description of Artificial Sequence: Synthetic oligonucleotide
  Sense strand starting at position 3108 of SEQ ID NO: 1562906
ggaaguagggagugcuuau

SEQ ID NO: 1781504 - RNA, 19 nt, Artificial Sequence
  Description of Artificial Sequence: Synthetic oligonucleotide
  Antisense strand to SEQ ID NO: 1781503
auaagcacucccuacuucc

SEQ ID NO: 1781505 - RNA, 19 nt, Artificial Sequence
  Description of Artificial Sequence: Synthetic oligonucleotide
  Sense strand starting at position 3157 of SEQ ID NO: 1562906
ggaagugaguucuugcuga

SEQ ID NO: 1781506 - RNA, 19 nt, Artificial Sequence
  Description of Artificial Sequence: Synthetic oligonucleotide
  Antisense strand to SEQ ID NO: 1781505
ucagcaagaacucacuucc

SEQ ID NO: 1781507 - RNA, 19 nt, Artificial Sequence
  Description of Artificial Sequence: Synthetic oligonucleotide
  Sense strand starting at position 3161 of SEQ ID NO: 1562906
gugaguucuugcugauuuc

SEQ ID NO: 1781508 - RNA, 19 nt, Artificial Sequence
  Description of Artificial Sequence: Synthetic oligonucleotide
  Antisense strand to SEQ ID NO: 1781507
gaaaucagcaagaacucac

SEQ ID NO: 1781509 - RNA, 19 nt, Artificial Sequence
  Description of Artificial Sequence: Synthetic oligonucleotide
  Sense strand starting at position 3174 of SEQ ID NO: 1562906
gauuucucuuccuggauga

SEQ ID NO: 1781510 - RNA, 19 nt, Artificial Sequence
  Description of Artificial Sequence: Synthetic oligonucleotide
  Antisense strand to SEQ ID NO: 1781509
ucauccaggaagagaaauc

SEQ ID NO: 1781511 - RNA, 19 nt, Artificial Sequence
  Description of Artificial Sequence: Synthetic oligonucleotide
  Sense strand starting at position 3248 of SEQ ID NO: 1562906
cggaauucaggguaugcaa

SEQ ID NO: 1781512 - RNA, 19 nt, Artificial Sequence
  Description of Artificial Sequence: Synthetic oligonucleotide
  Antisense strand to SEQ ID NO: 1781511
uugcauacccugaauuccg

SEQ ID NO: 1781513 - RNA, 19 nt, Artificial Sequence
  Description of Artificial Sequence: Synthetic oligonucleotide
  Sense strand starting at position 3372 of SEQ ID NO: 1562906
cguaaucucucaucuugua

SEQ ID NO: 1781514 - RNA, 19 nt, Artificial Sequence
  Description of Artificial Sequence: Synthetic oligonucleotide
  Antisense strand to SEQ ID NO: 1781513
uacaagaugagagauuacg

SEQ ID NO: 1781515 - RNA, 19 nt, Artificial Sequence
  Description of Artificial Sequence: Synthetic oligonucleotide
  Sense strand starting at position 3506 of SEQ ID NO: 1562906
ccaagacuaguuuggccua

SEQ ID NO: 1781516 - RNA, 19 nt, Artificial Sequence
  Description of Artificial Sequence: Synthetic oligonucleotide
  Antisense strand to SEQ ID NO: 1781515
uaggccaaacuagucuugg

SEQ ID NO: 1781517 - RNA, 19 nt, Artificial Sequence
  Description of Artificial Sequence: Synthetic oligonucleotide
  Sense strand starting at position 3561 of SEQ ID NO: 1562906
agcaagguguggucgguua

SEQ ID NO: 1781518 - RNA, 19 nt, Artificial Sequence
  Description of Artificial Sequence: Synthetic oligonucleotide
  Antisense strand to SEQ ID NO: 1781517
uaaccgaccacaccuugcu

SEQ ID NO: 1781519 - RNA, 19 nt, Artificial Sequence
  Description of Artificial Sequence: Synthetic oligonucleotide
  Sense strand starting at position 3643 of SEQ ID NO: 1562906
gggugacuauaguaaguua

SEQ ID NO: 1781520 - RNA, 19 nt, Artificial Sequence
  Description of Artificial Sequence: Synthetic oligonucleotide
  Antisense strand to SEQ ID NO: 1781519
uaacuuacuauagucaccc

SEQ ID NO: 1781521 - RNA, 19 nt, Artificial Sequence
  Description of Artificial Sequence: Synthetic oligonucleotide
  Sense strand starting at position 3698 of SEQ ID NO: 1562906
uguggagucauagaacugu

SEQ ID NO: 1781522 - RNA, 19 nt, Artificial Sequence
  Description of Artificial Sequence: Synthetic oligonucleotide
  Antisense strand to SEQ ID NO: 1781521
acaguucuaugacuccaca

SEQ ID NO: 1781523 - RNA, 19 nt, Artificial Sequence
  Description of Artificial Sequence: Synthetic oligonucleotide
  Sense strand starting at position 3811 of SEQ ID NO: 1562906
gggaucauccuugguuugu

SEQ ID NO: 1781524 - RNA, 19 nt, Artificial Sequence
  Description of Artificial Sequence: Synthetic oligonucleotide
  Antisense strand to SEQ ID NO: 1781523
acaaaccaaggaugauccc

SEQ ID NO: 1781525 - RNA, 19 nt, Artificial Sequence
  Description of Artificial Sequence: Synthetic oligonucleotide
  Sense strand starting at position 3812 of SEQ ID NO: 1562906
ggaucauccuugguuuguu

SEQ ID NO: 1781526 - RNA, 19 nt, Artificial Sequence
  Description of Artificial Sequence: Synthetic oligonucleotide
  Antisense strand to SEQ ID NO: 1781525
aacaaaccaaggaugaucc

SEQ ID NO: 1781527 - RNA, 19 nt, Artificial Sequence
  Description of Artificial Sequence: Synthetic oligonucleotide
  Sense strand starting at position 8 of SEQ ID NO: 1562907
caugcaaagucaccugaga

SEQ ID NO: 1781528 - RNA, 19 nt, Artificial Sequence
  Description of Artificial Sequence: Synthetic oligonucleotide
  Antisense strand to SEQ ID NO: 1781527
ucucaggugacuuugcaug

SEQ ID NO: 1781529 - RNA, 19 nt, Artificial Sequence
  Description of Artificial Sequence: Synthetic oligonucleotide
  Sense strand starting at position 34 of SEQ ID NO: 1562907
ccuagagaaucauagaccu

SEQ ID NO: 1781530 - RNA, 19 nt, Artificial Sequence
  Description of Artificial Sequence: Synthetic oligonucleotide
  Antisense strand to SEQ ID NO: 1781529
aggucuaugauucucuagg

SEQ ID NO: 1781531 - RNA, 19 nt, Artificial Sequence
  Description of Artificial Sequence: Synthetic oligonucleotide
  Sense strand starting at position 42 of SEQ ID NO: 1562907
aucauagaccugggcauau

SEQ ID NO: 1781532 - RNA, 19 nt, Artificial Sequence
  Description of Artificial Sequence: Synthetic oligonucleotide
  Antisense strand to SEQ ID NO: 1781531
auaugcccaggucuaugau

SEQ ID NO: 1781533 - RNA, 19 nt, Artificial Sequence
  Description of Artificial Sequence: Synthetic oligonucleotide
  Sense strand starting at position 68 of SEQ ID NO: 1562907
agccauauugacuagccaa

SEQ ID NO: 1781534 - RNA, 19 nt, Artificial Sequence
  Description of Artificial Sequence: Synthetic oligonucleotide
  Antisense strand to SEQ ID NO: 1781533
uuggcuagucaauauggcu

SEQ ID NO: 1781535 - RNA, 19 nt, Artificial Sequence
  Description of Artificial Sequence: Synthetic oligonucleotide
  Sense strand starting at position 217 of SEQ ID NO: 1562907
guaagagggacgugcuuau

SEQ ID NO: 1781536 - RNA, 19 nt, Artificial Sequence
  Description of Artificial Sequence: Synthetic oligonucleotide
  Antisense strand to SEQ ID NO: 1781535
auaagcacgucccucuuac

SEQ ID NO: 1781537 - RNA, 19 nt, Artificial Sequence
  Description of Artificial Sequence: Synthetic oligonucleotide
  Sense strand starting at position 224 of SEQ ID NO: 1562907
ggacgugcuuaucccuaaa

SEQ ID NO: 1781538 - RNA, 19 nt, Artificial Sequence
  Description of Artificial Sequence: Synthetic oligonucleotide
  Antisense strand to SEQ ID NO: 1781537
uuuagggauaagcacgucc

SEQ ID NO: 1781539 - RNA, 19 nt, Artificial Sequence
  Description of Artificial Sequence: Synthetic oligonucleotide
  Sense strand starting at position 277 of SEQ ID NO: 1562907
gcaauuccuuuagcuggau

SEQ ID NO: 1781540 - RNA, 19 nt, Artificial Sequence
  Description of Artificial Sequence: Synthetic oligonucleotide
  Antisense strand to SEQ ID NO: 1781539
auccagcuaaaggaauugc

SEQ ID NO: 1781541 - RNA, 19 nt, Artificial Sequence
  Description of Artificial Sequence: Synthetic oligonucleotide
  Sense strand starting at position 280 of SEQ ID NO: 1562907
auuccuuuagcuggauuaa

SEQ ID NO: 1781542 - RNA, 19 nt, Artificial Sequence
  Description of Artificial Sequence: Synthetic oligonucleotide
  Antisense strand to SEQ ID NO: 1781541
uuaauccagcuaaaggaau

SEQ ID NO: 1781543 - RNA, 19 nt, Artificial Sequence
  Description of Artificial Sequence: Synthetic oligonucleotide
  Sense strand starting at position 281 of SEQ ID NO: 1562907
uuccuuuagcuggauuaau

SEQ ID NO: 1781544 - RNA, 19 nt, Artificial Sequence
  Description of Artificial Sequence: Synthetic oligonucleotide
  Antisense strand to SEQ ID NO: 1781543
auuaauccagcuaaaggaa

SEQ ID NO: 1781545 - RNA, 19 nt, Artificial Sequence
  Description of Artificial Sequence: Synthetic oligonucleotide
  Sense strand starting at position 300 of SEQ ID NO: 1562907
uuugcauucuccgaucuga

SEQ ID NO: 1781546 - RNA, 19 nt, Artificial Sequence
  Description of Artificial Sequence: Synthetic oligonucleotide
  Antisense strand to SEQ ID NO: 1781545
ucagaucggagaaugcaaa

SEQ ID NO: 1781547 - RNA, 19 nt, Artificial Sequence
  Description of Artificial Sequence: Synthetic oligonucleotide
  Sense strand starting at position 313 of SEQ ID NO: 1562907
aucugagggccaugguuaa

SEQ ID NO: 1781548 - RNA, 19 nt, Artificial Sequence
  Description of Artificial Sequence: Synthetic oligonucleotide
  Antisense strand to SEQ ID NO: 1781547
uuaaccauggcccucagau

SEQ ID NO: 1781549 - RNA, 19 nt, Artificial Sequence
  Description of Artificial Sequence: Synthetic oligonucleotide
  Sense strand starting at position 320 of SEQ ID NO: 1562907
ggccaugguuaauaauaaa

SEQ ID NO: 1781550 - RNA, 19 nt, Artificial Sequence
  Description of Artificial Sequence: Synthetic oligonucleotide
  Antisense strand to SEQ ID NO: 1781549
uuuauuauuaaccauggcc

SEQ ID NO: 1781551 - RNA, 19 nt, Artificial Sequence
  Description of Artificial Sequence: Synthetic oligonucleotide
  Sense strand starting at position 453 of SEQ ID NO: 1562907
auuccuuccuguuacaguu

SEQ ID NO: 1781552 - RNA, 19 nt, Artificial Sequence
  Description of Artificial Sequence: Synthetic oligonucleotide
  Antisense strand to SEQ ID NO: 1781551
aacuguaacaggaaggaau

SEQ ID NO: 1781553 - RNA, 19 nt, Artificial Sequence
  Description of Artificial Sequence: Synthetic oligonucleotide
  Sense strand starting at position 531 of SEQ ID NO: 1562907
gaaaucacggcuugcacaa

SEQ ID NO: 1781554 - RNA, 19 nt, Artificial Sequence
  Description of Artificial Sequence: Synthetic oligonucleotide
  Antisense strand to SEQ ID NO: 1781553
uugugcaagccgugauuuc

SEQ ID NO: 1781555 - RNA, 19 nt, Artificial Sequence
  Description of Artificial Sequence: Synthetic oligonucleotide
  Sense strand starting at position 552 of SEQ ID NO: 1562907
ugugcaauuuaggaacaaa

SEQ ID NO: 1781556 - RNA, 19 nt, Artificial Sequence
  Description of Artificial Sequence: Synthetic oligonucleotide
  Antisense strand to SEQ ID NO: 1781555
uuuguuccuaaauugcaca

SEQ ID NO: 1781557 - RNA, 19 nt, Artificial Sequence
  Description of Artificial Sequence: Synthetic oligonucleotide
  Sense strand starting at position 608 of SEQ ID NO: 1562907
uuucgauacaugugaugug

SEQ ID NO: 1781558 - RNA, 19 nt, Artificial Sequence
  Description of Artificial Sequence: Synthetic oligonucleotide
  Antisense strand to SEQ ID NO: 1781557
cacaucacauguaucgaaa

SEQ ID NO: 1781559 - RNA, 19 nt, Artificial Sequence
  Description of Artificial Sequence: Synthetic oligonucleotide
  Sense strand starting at position 613 of SEQ ID NO: 1562907
auacaugugaugugugcua

SEQ ID NO: 1781560 - RNA, 19 nt, Artificial Sequence
  Description of Artificial Sequence: Synthetic oligonucleotide
  Antisense strand to SEQ ID NO: 1781559
uagcacacaucacauguau

SEQ ID NO: 1781561 - RNA, 19 nt, Artificial Sequence
  Description of Artificial Sequence: Synthetic oligonucleotide
  Sense strand starting at position 653 of SEQ ID NO: 1562907
cguggacccucuuaucaga

SEQ ID NO: 1781562 - RNA, 19 nt, Artificial Sequence
  Description of Artificial Sequence: Synthetic oligonucleotide
  Antisense strand to SEQ ID NO: 1781561
ucugauaagaggguccacg

SEQ ID NO: 1781563 - RNA, 19 nt, Artificial Sequence
  Description of Artificial Sequence: Synthetic oligonucleotide
  Sense strand starting at position 679 of SEQ ID NO: 1562907
guccuagaguccuuccgaa

SEQ ID NO: 1781564 - RNA, 19 nt, Artificial Sequence
  Description of Artificial Sequence: Synthetic oligonucleotide
  Antisense strand to SEQ ID NO: 1781563
uucggaaggacucuaggac

SEQ ID NO: 1781565 - RNA, 19 nt, Artificial Sequence
  Description of Artificial Sequence: Synthetic oligonucleotide
  Sense strand starting at position 728 of SEQ ID NO: 1562907
cuuuaaguguuucuggcaa

SEQ ID NO: 1781566 - RNA, 19 nt, Artificial Sequence
  Description of Artificial Sequence: Synthetic oligonucleotide
  Antisense strand to SEQ ID NO: 1781565
uugccagaaacacuuaaag

SEQ ID NO: 1781567 - RNA, 19 nt, Artificial Sequence
  Description of Artificial Sequence: Synthetic oligonucleotide
  Sense strand starting at position 846 of SEQ ID NO: 1562907
guuucugggaucuguggua

SEQ ID NO: 1781568 - RNA, 19 nt, Artificial Sequence
  Description of Artificial Sequence: Synthetic oligonucleotide
  Antisense strand to SEQ ID NO: 1781567
uaccacagaucccagaaac

SEQ ID NO: 1781569 - RNA, 19 nt, Artificial Sequence
  Description of Artificial Sequence: Synthetic oligonucleotide
  Sense strand starting at position 851 of SEQ ID NO: 1562907
ugggaucugugguacagua

SEQ ID NO: 1781570 - RNA, 19 nt, Artificial Sequence
  Description of Artificial Sequence: Synthetic oligonucleotide
  Antisense strand to SEQ ID NO: 1781569
uacuguaccacagauccca

SEQ ID NO: 1781571 - RNA, 19 nt, Artificial Sequence
  Description of Artificial Sequence: Synthetic oligonucleotide
  Sense strand starting at position 934 of SEQ ID NO: 1562907
agaaucagcugcucuguga

SEQ ID NO: 1781572 - RNA, 19 nt, Artificial Sequence
  Description of Artificial Sequence: Synthetic oligonucleotide
  Antisense strand to SEQ ID NO: 1781571
ucacagagcagcugauucu

SEQ ID NO: 1781573 - RNA, 19 nt, Artificial Sequence
  Description of Artificial Sequence: Synthetic oligonucleotide
  Sense strand starting at position 937 of SEQ ID NO: 1562907
aucagcugcucugugaaau

SEQ ID NO: 1781574 - RNA, 19 nt, Artificial Sequence
  Description of Artificial Sequence: Synthetic oligonucleotide
  Antisense strand to SEQ ID NO: 1781573
auuucacagagcagcugau

SEQ ID NO: 1781575 - RNA, 19 nt, Artificial Sequence
  Description of Artificial Sequence: Synthetic oligonucleotide
  Sense strand starting at position 938 of SEQ ID NO: 1562907
ucagcugcucugugaaauu

SEQ ID NO: 1781576 - RNA, 19 nt, Artificial Sequence
  Description of Artificial Sequence: Synthetic oligonucleotide
  Antisense strand to SEQ ID NO: 1781575
aauuucacagagcagcuga

SEQ ID NO: 1781577 - RNA, 19 nt, Artificial Sequence
  Description of Artificial Sequence: Synthetic oligonucleotide
  Sense strand starting at position 947 of SEQ ID NO: 1562907
cugugaaauuagcuguuau

SEQ ID NO: 1781578 - RNA, 19 nt, Artificial Sequence
  Description of Artificial Sequence: Synthetic oligonucleotide
  Antisense strand to SEQ ID NO: 1781577
auaacagcuaauuucacag

SEQ ID NO: 1781579 - RNA, 19 nt, Artificial Sequence
  Description of Artificial Sequence: Synthetic oligonucleotide
  Sense strand starting at position 948 of SEQ ID NO: 1562907
ugugaaauuagcuguuaug

SEQ ID NO: 1781580 - RNA, 19 nt, Artificial Sequence
  Description of Artificial Sequence: Synthetic oligonucleotide
  Antisense strand to SEQ ID NO: 1781579
cauaacagcuaauuucaca

SEQ ID NO: 1781581 - RNA, 19 nt, Artificial Sequence
  Description of Artificial Sequence: Synthetic oligonucleotide
  Sense strand starting at position 951 of SEQ ID NO: 1562907
gaaauuagcuguuauguug

SEQ ID NO: 1781582 - RNA, 19 nt, Artificial Sequence
  Description of Artificial Sequence: Synthetic oligonucleotide
  Antisense strand to SEQ ID NO: 1781581
caacauaacagcuaauuuc

SEQ ID NO: 1781583 - RNA, 19 nt, Artificial Sequence
  Description of Artificial Sequence: Synthetic oligonucleotide
  Sense strand starting at position 1065 of SEQ ID NO: 1562907
ggugauggacaccgugaaa

SEQ ID NO: 1781584 - RNA, 19 nt, Artificial Sequence
  Description of Artificial Sequence: Synthetic oligonucleotide
  Antisense strand to SEQ ID NO: 1781583
uuucacgguguccaucacc

SEQ ID NO: 1781585 - RNA, 19 nt, Artificial Sequence
  Description of Artificial Sequence: Synthetic oligonucleotide
  Sense strand starting at position 1319 of SEQ ID NO: 1562907
ccuucugguccguguugau

SEQ ID NO: 1781586 - RNA, 19 nt, Artificial Sequence
  Description of Artificial Sequence: Synthetic oligonucleotide
  Antisense strand to SEQ ID NO: 1781585
aucaacacggaccagaagg

SEQ ID NO: 1781587 - RNA, 19 nt, Artificial Sequence
  Description of Artificial Sequence: Synthetic oligonucleotide
  Sense strand starting at position 1349 of SEQ ID NO: 1562907
ggaugacgcaggcguuuau

SEQ ID NO: 1781588 - RNA, 19 nt, Artificial Sequence
  Description of Artificial Sequence: Synthetic oligonucleotide
  Antisense strand to SEQ ID NO: 1781587
auaaacgccugcgucaucc

SEQ ID NO: 1781589 - RNA, 19 nt, Artificial Sequence
  Description of Artificial Sequence: Synthetic oligonucleotide
  Sense strand starting at position 1358 of SEQ ID NO: 1562907
aggcguuuaucugacagga

SEQ ID NO: 1781590 - RNA, 19 nt, Artificial Sequence
  Description of Artificial Sequence: Synthetic oligonucleotide
  Antisense strand to SEQ ID NO: 1781589
uccugucagauaaacgccu

SEQ ID NO: 1781591 - RNA, 19 nt, Artificial Sequence
  Description of Artificial Sequence: Synthetic oligonucleotide
  Sense strand starting at position 1360 of SEQ ID NO: 1562907
gcguuuaucugacaggaca

SEQ ID NO: 1781592 - RNA, 19 nt, Artificial Sequence
  Description of Artificial Sequence: Synthetic oligonucleotide
  Antisense strand to SEQ ID NO: 1781591
uguccugucagauaaacgc

SEQ ID NO: 1781593 - RNA, 19 nt, Artificial Sequence
  Description of Artificial Sequence: Synthetic oligonucleotide
  Sense strand starting at position 2387 of SEQ ID NO: 1562907
gucugacucucgguuucuu

SEQ ID NO: 1781594 - RNA, 19 nt, Artificial Sequence
  Description of Artificial Sequence: Synthetic oligonucleotide
  Antisense strand to SEQ ID NO: 1781593
aagaaaccgagagucagac

SEQ ID NO: 1781595 - RNA, 19 nt, Artificial Sequence
  Description of Artificial Sequence: Synthetic oligonucleotide
  Sense strand starting at position 2522 of SEQ ID NO: 1562907
auggcuugaccucaaguga

SEQ ID NO: 1781596 - RNA, 19 nt, Artificial Sequence
  Description of Artificial Sequence: Synthetic oligonucleotide
  Antisense strand to SEQ ID NO: 1781595
ucacuugaggucaagccau

SEQ ID NO: 1781597 - RNA, 19 nt, Artificial Sequence
  Description of Artificial Sequence: Synthetic oligonucleotide
  Sense strand starting at position 2639 of SEQ ID NO: 1562907
ggacuugauugauggauug

SEQ ID NO: 1781598 - RNA, 19 nt, Artificial Sequence
  Description of Artificial Sequence: Synthetic oligonucleotide
  Antisense strand to SEQ ID NO: 1781597
caauccaucaaucaagucc

SEQ ID NO: 1781599 - RNA, 19 nt, Artificial Sequence
  Description of Artificial Sequence: Synthetic oligonucleotide
  Sense strand starting at position 2861 of SEQ ID NO: 1562907
ucaaacucguggucuuaau

SEQ ID NO: 1781600 - RNA, 19 nt, Artificial Sequence
  Description of Artificial Sequence: Synthetic oligonucleotide
  Antisense strand to SEQ ID NO: 1781599
auuaagaccacgaguuuga

SEQ ID NO: 1781601 - RNA, 19 nt, Artificial Sequence
  Description of Artificial Sequence: Synthetic oligonucleotide
  Sense strand starting at position 3347 of SEQ ID NO: 1562907
caaaguccugucugagaca

SEQ ID NO: 1781602 - RNA, 19 nt, Artificial Sequence
  Description of Artificial Sequence: Synthetic oligonucleotide
  Antisense strand to SEQ ID NO: 1781601
ugucucagacaggacuuug

SEQ ID NO: 1781603 - RNA, 19 nt, Artificial Sequence
  Description of Artificial Sequence: Synthetic oligonucleotide
  Sense strand starting at position 3348 of SEQ ID NO: 1562907
aaaguccugucugagacaa

SEQ ID NO: 1781604 - RNA, 19 nt, Artificial Sequence
  Description of Artificial Sequence: Synthetic oligonucleotide
  Antisense strand to SEQ ID NO: 1781603
uugucucagacaggacuuu

SEQ ID NO: 1781605 - RNA, 19 nt, Artificial Sequence
  Description of Artificial Sequence: Synthetic oligonucleotide
  Sense strand starting at position 3350 of SEQ ID NO: 1562907
aguccugucugagacaaag

SEQ ID NO: 1781606 - RNA, 19 nt, Artificial Sequence
  Description of Artificial Sequence: Synthetic oligonucleotide
  Antisense strand to SEQ ID NO: 1781605
cuuugucucagacaggacu

SEQ ID NO: 1781607 - RNA, 19 nt, Artificial Sequence
  Description of Artificial Sequence: Synthetic oligonucleotide
  Sense strand starting at position 86 of SEQ ID NO: 1562908
gguguggaaucgguaguuu

SEQ ID NO: 1781608 - RNA, 19 nt, Artificial Sequence
  Description of Artificial Sequence: Synthetic oligonucleotide
  Antisense strand to SEQ ID NO: 1781607
aaacuaccgauuccacacc

SEQ ID NO: 1781609 - RNA, 19 nt, Artificial Sequence
  Description of Artificial Sequence: Synthetic oligonucleotide
  Sense strand starting at position 97 of SEQ ID NO: 1562908
gguaguuucggaugccaua

SEQ ID NO: 1781610 - RNA, 19 nt, Artificial Sequence
  Description of Artificial Sequence: Synthetic oligonucleotide
  Antisense strand to SEQ ID NO: 1781609
uauggcauccgaaacuacc

SEQ ID NO: 1781611 - RNA, 19 nt, Artificial Sequence
  Description of Artificial Sequence: Synthetic oligonucleotide
  Sense strand starting at position 130 of SEQ ID NO: 1562908
gugagauguucugugggca

SEQ ID NO: 1781612 - RNA, 19 nt, Artificial Sequence
  Description of Artificial Sequence: Synthetic oligonucleotide
  Antisense strand to SEQ ID NO: 1781611
ugcccacagaacaucucac

SEQ ID NO: 1781613 - RNA, 19 nt, Artificial Sequence
  Description of Artificial Sequence: Synthetic oligonucleotide
  Sense strand starting at position 151 of SEQ ID NO: 1562908
ggucauguucccggcaaca

SEQ ID NO: 1781614 - RNA, 19 nt, Artificial Sequence
  Description of Artificial Sequence: Synthetic oligonucleotide
  Antisense strand to SEQ ID NO: 1781613
uguugccgggaacaugacc

SEQ ID NO: 1781615 - RNA, 19 nt, Artificial Sequence
  Description of Artificial Sequence: Synthetic oligonucleotide
  Sense strand starting at position 153 of SEQ ID NO: 1562908
ucauguucccggcaacaga

SEQ ID NO: 1781616 - RNA, 19 nt, Artificial Sequence
  Description of Artificial Sequence: Synthetic oligonucleotide
  Antisense strand to SEQ ID NO: 1781615
ucuguugccgggaacauga

SEQ ID NO: 1781617 - RNA, 19 nt, Artificial Sequence
  Description of Artificial Sequence: Synthetic oligonucleotide
  Sense strand starting at position 470 of SEQ ID NO: 1562908
ggagucugccuccagaguu

SEQ ID NO: 1781618 - RNA, 19 nt, Artificial Sequence
  Description of Artificial Sequence: Synthetic oligonucleotide
  Antisense strand to SEQ ID NO: 1781617
aacucuggaggcagacucc

SEQ ID NO: 1781619 - RNA, 19 nt, Artificial Sequence
  Description of Artificial Sequence: Synthetic oligonucleotide
  Sense strand starting at position 521 of SEQ ID NO: 1562908
uuaugaauguguguaugau

SEQ ID NO: 1781620 - RNA, 19 nt, Artificial Sequence
  Description of Artificial Sequence: Synthetic oligonucleotide
  Antisense strand to SEQ ID NO: 1781619
aucauacacacauucauaa

SEQ ID NO: 1781621 - RNA, 19 nt, Artificial Sequence
  Description of Artificial Sequence: Synthetic oligonucleotide
  Sense strand starting at position 522 of SEQ ID NO: 1562908
uaugaauguguguaugaug

SEQ ID NO: 1781622 - RNA, 19 nt, Artificial Sequence
  Description of Artificial Sequence: Synthetic oligonucleotide
  Antisense strand to SEQ ID NO: 1781621
caucauacacacauucaua

SEQ ID NO: 1781623 - RNA, 19 nt, Artificial Sequence
  Description of Artificial Sequence: Synthetic oligonucleotide
  Sense strand starting at position 668 of SEQ ID NO: 1562908
cugauagugcaagaaauuc

SEQ ID NO: 1781624 - RNA, 19 nt, Artificial Sequence
  Description of Artificial Sequence: Synthetic oligonucleotide
  Antisense strand to SEQ ID NO: 1781623
gaauuucuugcacuaucag

SEQ ID NO: 1781625 - RNA, 19 nt, Artificial Sequence
  Description of Artificial Sequence: Synthetic oligonucleotide
  Sense strand starting at position 879 of SEQ ID NO: 1562908
aggccuuucgucucagcau

SEQ ID NO: 1781626 - RNA, 19 nt, Artificial Sequence
  Description of Artificial Sequence: Synthetic oligonucleotide
  Antisense strand to SEQ ID NO: 1781625
augcugagacgaaaggccu

SEQ ID NO: 1781627 - RNA, 19 nt, Artificial Sequence
  Description of Artificial Sequence: Synthetic oligonucleotide
  Sense strand starting at position 926 of SEQ ID NO: 1562908
aagccuccuccuggguaau

SEQ ID NO: 1781628 - RNA, 19 nt, Artificial Sequence
  Description of Artificial Sequence: Synthetic oligonucleotide
  Antisense strand to SEQ ID NO: 1781627
auuacccaggaggaggcuu

SEQ ID NO: 1781629 - RNA, 19 nt, Artificial Sequence
  Description of Artificial Sequence: Synthetic oligonucleotide
  Sense strand starting at position 1014 of SEQ ID NO: 1562908
gacucccagguuugaauaa

SEQ ID NO: 1781630 - RNA, 19 nt, Artificial Sequence
  Description of Artificial Sequence: Synthetic oligonucleotide
  Antisense strand to SEQ ID NO: 1781629
uuauucaaaccugggaguc

SEQ ID NO: 1781631 - RNA, 19 nt, Artificial Sequence
  Description of Artificial Sequence: Synthetic oligonucleotide
  Sense strand starting at position 1473 of SEQ ID NO: 1562908
gcagucucaugagcacaga

SEQ ID NO: 1781632 - RNA, 19 nt, Artificial Sequence
  Description of Artificial Sequence: Synthetic oligonucleotide
  Antisense strand to SEQ ID NO: 1781631
ucugugcucaugagacugc

SEQ ID NO: 1781633 - RNA, 19 nt, Artificial Sequence
  Description of Artificial Sequence: Synthetic oligonucleotide
  Sense strand starting at position 1913 of SEQ ID NO: 1562908
gggugaucuugggcuugua

SEQ ID NO: 1781634 - RNA, 19 nt, Artificial Sequence
  Description of Artificial Sequence: Synthetic oligonucleotide
  Antisense strand to SEQ ID NO: 1781633
uacaagcccaagaucaccc

SEQ ID NO: 1781635 - RNA, 19 nt, Artificial Sequence
  Description of Artificial Sequence: Synthetic oligonucleotide
  Sense strand starting at position 1923 of SEQ ID NO: 1562908
gggcuuguaaccgaaucca

SEQ ID NO: 1781636 - RNA, 19 nt, Artificial Sequence
  Description of Artificial Sequence: Synthetic oligonucleotide
  Antisense strand to SEQ ID NO: 1781635
uggauucgguuacaagccc

SEQ ID NO: 1781637 - RNA, 19 nt, Artificial Sequence
  Description of Artificial Sequence: Synthetic oligonucleotide
  Sense strand starting at position 1956 of SEQ ID NO: 1562908
cgcugauuggcugaggagu

SEQ ID NO: 1781638 - RNA, 19 nt, Artificial Sequence
  Description of Artificial Sequence: Synthetic oligonucleotide
  Antisense strand to SEQ ID NO: 1781637
acuccucagccaaucagcg

SEQ ID NO: 1781639 - RNA, 19 nt, Artificial Sequence
  Description of Artificial Sequence: Synthetic oligonucleotide
  Sense strand starting at position 2344 of SEQ ID NO: 1562908
aaguccugguucuuagaaa

SEQ ID NO: 1781640 - RNA, 19 nt, Artificial Sequence
  Description of Artificial Sequence: Synthetic oligonucleotide
  Antisense strand to SEQ ID NO: 1781639
uuucuaagaaccaggacuu

SEQ ID NO: 1781641 - RNA, 19 nt, Artificial Sequence
  Description of Artificial Sequence: Synthetic oligonucleotide
  Sense strand starting at position 2514 of SEQ ID NO: 1562908
ugcucuggauuugaaagaa

SEQ ID NO: 1781642 - RNA, 19 nt, Artificial Sequence
  Description of Artificial Sequence: Synthetic oligonucleotide
  Antisense strand to SEQ ID NO: 1781641
uucuuucaaauccagagca

SEQ ID NO: 1781643 - RNA, 19 nt, Artificial Sequence
  Description of Artificial Sequence: Synthetic oligonucleotide
  Sense strand starting at position 2530 of SEQ ID NO: 1562908
gaacuauggucccuagagu

SEQ ID NO: 1781644 - RNA, 19 nt, Artificial Sequence
  Description of Artificial Sequence: Synthetic oligonucleotide
  Antisense strand to SEQ ID NO: 1781643
acucuagggaccauaguuc

SEQ ID NO: 1781645 - RNA, 19 nt, Artificial Sequence
  Description of Artificial Sequence: Synthetic oligonucleotide
  Sense strand starting at position 2531 of SEQ ID NO: 1562908
aacuauggucccuagagug

SEQ ID NO: 1781646 - RNA, 19 nt, Artificial Sequence
  Description of Artificial Sequence: Synthetic oligonucleotide
  Antisense strand to SEQ ID NO: 1781645
cacucuagggaccauaguu

SEQ ID NO: 1781647 - RNA, 19 nt, Artificial Sequence
  Description of Artificial Sequence: Synthetic oligonucleotide
  Sense strand starting at position 2619 of SEQ ID NO: 1562908
caucaugugugccucauga

SEQ ID NO: 1781648 - RNA, 19 nt, Artificial Sequence
  Description of Artificial Sequence: Synthetic oligonucleotide
  Antisense strand to SEQ ID NO: 1781647
ucaugaggcacacaugaug

SEQ ID NO: 1781649 - RNA, 19 nt, Artificial Sequence
  Description of Artificial Sequence: Synthetic oligonucleotide
  Sense strand starting at position 2621 of SEQ ID NO: 1562908
ucaugugugccucaugaga

SEQ ID NO: 1781650 - RNA, 19 nt, Artificial Sequence
  Description of Artificial Sequence: Synthetic oligonucleotide
  Antisense strand to SEQ ID NO: 1781649
ucucaugaggcacacauga

SEQ ID NO: 1781651 - RNA, 19 nt, Artificial Sequence
  Description of Artificial Sequence: Synthetic oligonucleotide
  Sense strand starting at position 2662 of SEQ ID NO: 1562908
gggcuauacccagguauug

SEQ ID NO: 1781652 - RNA, 19 nt, Artificial Sequence
  Description of Artificial Sequence: Synthetic oligonucleotide
  Antisense strand to SEQ ID NO: 1781651
caauaccuggguauagccc

SEQ ID NO: 1781653 - RNA, 19 nt, Artificial Sequence
  Description of Artificial Sequence: Synthetic oligonucleotide
  Sense strand starting at position 2672 of SEQ ID NO: 1562908
cagguauuguuccuggauc

SEQ ID NO: 1781654 - RNA, 19 nt, Artificial Sequence
  Description of Artificial Sequence: Synthetic oligonucleotide
  Antisense strand to SEQ ID NO: 1781653
gauccaggaacaauaccug

SEQ ID NO: 1781655 - RNA, 19 nt, Artificial Sequence
  Description of Artificial Sequence: Synthetic oligonucleotide
  Sense strand starting at position 2868 of SEQ ID NO: 1562908
gacagugacuugucugucu

SEQ ID NO: 1781656 - RNA, 19 nt, Artificial Sequence
  Description of Artificial Sequence: Synthetic oligonucleotide
  Antisense strand to SEQ ID NO: 1781655
agacagacaagucacuguc

SEQ ID NO: 1781657 - RNA, 19 nt, Artificial Sequence
  Description of Artificial Sequence: Synthetic oligonucleotide
  Sense strand starting at position 2870 of SEQ ID NO: 1562908
cagugacuugucugucuuc

SEQ ID NO: 1781658 - RNA, 19 nt, Artificial Sequence
  Description of Artificial Sequence: Synthetic oligonucleotide
  Antisense strand to SEQ ID NO: 1781657
gaagacagacaagucacug

SEQ ID NO: 1781659 - RNA, 19 nt, Artificial Sequence
  Description of Artificial Sequence: Synthetic oligonucleotide
  Sense strand starting at position 3095 of SEQ ID NO: 1562908
gcaucauagcugggaacaa

SEQ ID NO: 1781660 - RNA, 19 nt, Artificial Sequence
  Description of Artificial Sequence: Synthetic oligonucleotide
  Antisense strand to SEQ ID NO: 1781659
uuguucccagcuaugaugc

SEQ ID NO: 1781661 - RNA, 19 nt, Artificial Sequence
  Description of Artificial Sequence: Synthetic oligonucleotide
  Sense strand starting at position 3162 of SEQ ID NO: 1562908
cuugccagagguugagaaa

SEQ ID NO: 1781662 - RNA, 19 nt, Artificial Sequence
  Description of Artificial Sequence: Synthetic oligonucleotide
  Antisense strand to SEQ ID NO: 1781661
uuucucaaccucuggcaag

SEQ ID NO: 1781663 - RNA, 19 nt, Artificial Sequence
  Description of Artificial Sequence: Synthetic oligonucleotide
  Sense strand starting at position 3259 of SEQ ID NO: 1562908
gugaguccuucugugaaga

SEQ ID NO: 1781664 - RNA, 19 nt, Artificial Sequence
  Description of Artificial Sequence: Synthetic oligonucleotide
  Antisense strand to SEQ ID NO: 1781663
ucuucacagaaggacucac

SEQ ID NO: 1781665 - RNA, 19 nt, Artificial Sequence
  Description of Artificial Sequence: Synthetic oligonucleotide
  Sense strand starting at position 3260 of SEQ ID NO: 1562908
ugaguccuucugugaagag

SEQ ID NO: 1781666 - RNA, 19 nt, Artificial Sequence
  Description of Artificial Sequence: Synthetic oligonucleotide
  Antisense strand to SEQ ID NO: 1781665
cucuucacagaaggacuca

SEQ ID NO: 1781667 - RNA, 19 nt, Artificial Sequence
  Description of Artificial Sequence: Synthetic oligonucleotide
  Sense strand starting at position 3302 of SEQ ID NO: 1562908
ugcugagacuuccucccau

SEQ ID NO: 1781668 - RNA, 19 nt, Artificial Sequence
  Description of Artificial Sequence: Synthetic oligonucleotide
  Antisense strand to SEQ ID NO: 1781667
augggaggaagucucagca

SEQ ID NO: 1781669 - RNA, 19 nt, Artificial Sequence
  Description of Artificial Sequence: Synthetic oligonucleotide
  Sense strand starting at position 3416 of SEQ ID NO: 1562908
ccaagcuuucgaggucaga

SEQ ID NO: 1781670 - RNA, 19 nt, Artificial Sequence
  Description of Artificial Sequence: Synthetic oligonucleotide
  Antisense strand to SEQ ID NO: 1781669
ucugaccucgaaagcuugg

SEQ ID NO: 1781671 - RNA, 19 nt, Artificial Sequence
  Description of Artificial Sequence: Synthetic oligonucleotide
  Sense strand starting at position 3459 of SEQ ID NO: 1562908
agacccuaggcuuggaaau

SEQ ID NO: 1781672 - RNA, 19 nt, Artificial Sequence
  Description of Artificial Sequence: Synthetic oligonucleotide
  Antisense strand to SEQ ID NO: 1781671
auuuccaagccuagggucu

SEQ ID NO: 1781673 - RNA, 19 nt, Artificial Sequence
  Description of Artificial Sequence: Synthetic oligonucleotide
  Sense strand starting at position 3507 of SEQ ID NO: 1562908
ucuguaucaugggcauaau

SEQ ID NO: 1781674 - RNA, 19 nt, Artificial Sequence
  Description of Artificial Sequence: Synthetic oligonucleotide
  Antisense strand to SEQ ID NO: 1781673
auuaugcccaugauacaga

SEQ ID NO: 1781675 - RNA, 19 nt, Artificial Sequence
  Description of Artificial Sequence: Synthetic oligonucleotide
  Sense strand starting at position 3541 of SEQ ID NO: 1562908
acaggauguuggguaagau

SEQ ID NO: 1781676 - RNA, 19 nt, Artificial Sequence
  Description of Artificial Sequence: Synthetic oligonucleotide
  Antisense strand to SEQ ID NO: 1781675
aucuuacccaacauccugu

SEQ ID NO: 1781677 - RNA, 19 nt, Artificial Sequence
  Description of Artificial Sequence: Synthetic oligonucleotide
  Sense strand starting at position 3663 of SEQ ID NO: 1562908
ggccacagcaucugugaua

SEQ ID NO: 1781678 - RNA, 19 nt, Artificial Sequence
  Description of Artificial Sequence: Synthetic oligonucleotide
  Antisense strand to SEQ ID NO: 1781677
uaucacagaugcuguggcc

SEQ ID NO: 1781679 - RNA, 19 nt, Artificial Sequence
  Description of Artificial Sequence: Synthetic oligonucleotide
  Sense strand starting at position 3664 of SEQ ID NO: 1562908
gccacagcaucugugauau

SEQ ID NO: 1781680 - RNA, 19 nt, Artificial Sequence
  Description of Artificial Sequence: Synthetic oligonucleotide
  Antisense strand to SEQ ID NO: 1781679
auaucacagaugcuguggc

SEQ ID NO: 1781681 - RNA, 19 nt, Artificial Sequence
  Description of Artificial Sequence: Synthetic oligonucleotide
  Sense strand starting at position 3798 of SEQ ID NO: 1562908
ugagaaguacaguggaguu

SEQ ID NO: 1781682 - RNA, 19 nt, Artificial Sequence
  Description of Artificial Sequence: Synthetic oligonucleotide
  Antisense strand to SEQ ID NO: 1781681
aacuccacuguacuucuca

SEQ ID NO: 1781683 - RNA, 19 nt, Artificial Sequence
  Description of Artificial Sequence: Synthetic oligonucleotide
  Sense strand starting at position 3885 of SEQ ID NO: 1562908
gagggugucacugagcuuu

SEQ ID NO: 1781684 - RNA, 19 nt, Artificial Sequence
  Description of Artificial Sequence: Synthetic oligonucleotide
  Antisense strand to SEQ ID NO: 1781683
aaagcucagugacacccuc

SEQ ID NO: 1781685 - RNA, 19 nt, Artificial Sequence
  Description of Artificial Sequence: Synthetic oligonucleotide
  Sense strand starting at position 3896 of SEQ ID NO: 1562908
ugagcuuucuguccagacu

SEQ ID NO: 1781686 - RNA, 19 nt, Artificial Sequence
  Description of Artificial Sequence: Synthetic oligonucleotide
  Antisense strand to SEQ ID NO: 1781685
agucuggacagaaagcuca

SEQ ID NO: 1781687 - RNA, 19 nt, Artificial Sequence
  Description of Artificial Sequence: Synthetic oligonucleotide
  Sense strand starting at position 71 of SEQ ID NO: 1562909
ugaggugcugaguaagcaa

SEQ ID NO: 1781688 - RNA, 19 nt, Artificial Sequence
  Description of Artificial Sequence: Synthetic oligonucleotide
  Antisense strand to SEQ ID NO: 1781687
uugcuuacucagcaccuca

SEQ ID NO: 1781689 - RNA, 19 nt, Artificial Sequence
  Description of Artificial Sequence: Synthetic oligonucleotide
  Sense strand starting at position 101 of SEQ ID NO: 1562909
uaugucauuccagggaaag

SEQ ID NO: 1781690 - RNA, 19 nt, Artificial Sequence
  Description of Artificial Sequence: Synthetic oligonucleotide
  Antisense strand to SEQ ID NO: 1781689
cuuucccuggaaugacaua

SEQ ID NO: 1781691 - RNA, 19 nt, Artificial Sequence
  Description of Artificial Sequence: Synthetic oligonucleotide
  Sense strand starting at position 103 of SEQ ID NO: 1562909
ugucauuccagggaaaggu

SEQ ID NO: 1781692 - RNA, 19 nt, Artificial Sequence
  Description of Artificial Sequence: Synthetic oligonucleotide
  Antisense strand to SEQ ID NO: 1781691
accuuucccuggaaugaca

SEQ ID NO: 1781693 - RNA, 19 nt, Artificial Sequence
  Description of Artificial Sequence: Synthetic oligonucleotide
  Sense strand starting at position 295 of SEQ ID NO: 1562909
caaagugaaguuuguaaca

SEQ ID NO: 1781694 - RNA, 19 nt, Artificial Sequence
  Description of Artificial Sequence: Synthetic oligonucleotide
  Antisense strand to SEQ ID NO: 1781693
uguuacaaacuucacuuug

SEQ ID NO: 1781695 - RNA, 19 nt, Artificial Sequence
  Description of Artificial Sequence: Synthetic oligonucleotide
  Sense strand starting at position 369 of SEQ ID NO: 1562909
cccaauagaugucugcaga

SEQ ID NO: 1781696 - RNA, 19 nt, Artificial Sequence
  Description of Artificial Sequence: Synthetic oligonucleotide
  Antisense strand to SEQ ID NO: 1781695
ucugcagacaucuauuggg

SEQ ID NO: 1781697 - RNA, 19 nt, Artificial Sequence
  Description of Artificial Sequence: Synthetic oligonucleotide
  Sense strand starting at position 370 of SEQ ID NO: 1562909
ccaauagaugucugcagac

SEQ ID NO: 1781698 - RNA, 19 nt, Artificial Sequence
  Description of Artificial Sequence: Synthetic oligonucleotide
  Antisense strand to SEQ ID NO: 1781697
gucugcagacaucuauugg

SEQ ID NO: 1781699 - RNA, 19 nt, Artificial Sequence
  Description of Artificial Sequence: Synthetic oligonucleotide
  Sense strand starting at position 372 of SEQ ID NO: 1562909
aauagaugucugcagacac

SEQ ID NO: 1781700 - RNA, 19 nt, Artificial Sequence
  Description of Artificial Sequence: Synthetic oligonucleotide
  Antisense strand to SEQ ID NO: 1781699
gugucugcagacaucuauu

SEQ ID NO: 1781701 - RNA, 19 nt, Artificial Sequence
  Description of Artificial Sequence: Synthetic oligonucleotide
  Sense strand starting at position 453 of SEQ ID NO: 1562909
guaucucuuagugauguca

SEQ ID NO: 1781702 - RNA, 19 nt, Artificial Sequence
  Description of Artificial Sequence: Synthetic oligonucleotide
  Antisense strand to SEQ ID NO: 1781701
ugacaucacuaagagauac

SEQ ID NO: 1781703 - RNA, 19 nt, Artificial Sequence
  Description of Artificial Sequence: Synthetic oligonucleotide
  Sense strand starting at position 551 of SEQ ID NO: 1562909
uguccuaaacaguagcaaa

SEQ ID NO: 1781704 - RNA, 19 nt, Artificial Sequence
  Description of Artificial Sequence: Synthetic oligonucleotide
  Antisense strand to SEQ ID NO: 1781703
uuugcuacuguuuaggaca

SEQ ID NO: 1781705 - RNA, 19 nt, Artificial Sequence
  Description of Artificial Sequence: Synthetic oligonucleotide
  Sense strand starting at position 663 of SEQ ID NO: 1562909
ucucaugugaagugagaau

SEQ ID NO: 1781706 - RNA, 19 nt, Artificial Sequence
  Description of Artificial Sequence: Synthetic oligonucleotide
  Antisense strand to SEQ ID NO: 1781705
auucucacuucacaugaga

SEQ ID NO: 1781707 - RNA, 19 nt, Artificial Sequence
  Description of Artificial Sequence: Synthetic oligonucleotide
  Sense strand starting at position 674 of SEQ ID NO: 1562909
gugagaauaucauuggcca

SEQ ID NO: 1781708 - RNA, 19 nt, Artificial Sequence
  Description of Artificial Sequence: Synthetic oligonucleotide
  Antisense strand to SEQ ID NO: 1781707
uggccaaugauauucucac

SEQ ID NO: 1781709 - RNA, 19 nt, Artificial Sequence
  Description of Artificial Sequence: Synthetic oligonucleotide
  Sense strand starting at position 675 of SEQ ID NO: 1562909
ugagaauaucauuggccac

SEQ ID NO: 1781710 - RNA, 19 nt, Artificial Sequence
  Description of Artificial Sequence: Synthetic oligonucleotide
  Antisense strand to SEQ ID NO: 1781709
guggccaaugauauucuca

SEQ ID NO: 1781711 - RNA, 19 nt, Artificial Sequence
  Description of Artificial Sequence: Synthetic oligonucleotide
  Sense strand starting at position 713 of SEQ ID NO: 1562909
aucagacaguccguaaaua

SEQ ID NO: 1781712 - RNA, 19 nt, Artificial Sequence
  Description of Artificial Sequence: Synthetic oligonucleotide
  Antisense strand to SEQ ID NO: 1781711
uauuuacggacugucugau

SEQ ID NO: 1781713 - RNA, 19 nt, Artificial Sequence
  Description of Artificial Sequence: Synthetic oligonucleotide
  Sense strand starting at position 714 of SEQ ID NO: 1562909
ucagacaguccguaaauau

SEQ ID NO: 1781714 - RNA, 19 nt, Artificial Sequence
  Description of Artificial Sequence: Synthetic oligonucleotide
  Antisense strand to SEQ ID NO: 1781713
auauuuacggacugucuga

SEQ ID NO: 1781715 - RNA, 19 nt, Artificial Sequence
  Description of Artificial Sequence: Synthetic oligonucleotide
  Sense strand starting at position 949 of SEQ ID NO: 1562909
gggccauacugguuauaaa

SEQ ID NO: 1781716 - RNA, 19 nt, Artificial Sequence
  Description of Artificial Sequence: Synthetic oligonucleotide
  Antisense strand to SEQ ID NO: 1781715
uuuauaaccaguauggccc

SEQ ID NO: 1781717 - RNA, 19 nt, Artificial Sequence
  Description of Artificial Sequence: Synthetic oligonucleotide
  Sense strand starting at position 950 of SEQ ID NO: 1562909
ggccauacugguuauaaag

SEQ ID NO: 1781718 - RNA, 19 nt, Artificial Sequence
  Description of Artificial Sequence: Synthetic oligonucleotide
  Antisense strand to SEQ ID NO: 1781717
cuuuauaaccaguauggcc

SEQ ID NO: 1781719 - RNA, 19 nt, Artificial Sequence
  Description of Artificial Sequence: Synthetic oligonucleotide
  Sense strand starting at position 1383 of SEQ ID NO: 1562909
uuccaagucaucuguggga

SEQ ID NO: 1781720 - RNA, 19 nt, Artificial Sequence
  Description of Artificial Sequence: Synthetic oligonucleotide
  Antisense strand to SEQ ID NO: 1781719
ucccacagaugacuuggaa

SEQ ID NO: 1781721 - RNA, 19 nt, Artificial Sequence
  Description of Artificial Sequence: Synthetic oligonucleotide
  Sense strand starting at position 1601 of SEQ ID NO: 1562909
ggaaucaagugagcacuua

SEQ ID NO: 1781722 - RNA, 19 nt, Artificial Sequence
  Description of Artificial Sequence: Synthetic oligonucleotide
  Antisense strand to SEQ ID NO: 1781721
uaagugcucacuugauucc

SEQ ID NO: 1781723 - RNA, 19 nt, Artificial Sequence
  Description of Artificial Sequence: Synthetic oligonucleotide
  Sense strand starting at position 1694 of SEQ ID NO: 1562909
auggauugacucgggaagu

SEQ ID NO: 1781724 - RNA, 19 nt, Artificial Sequence
  Description of Artificial Sequence: Synthetic oligonucleotide
  Antisense strand to SEQ ID NO: 1781723
acuucccgagucaauccau

SEQ ID NO: 1781725 - RNA, 19 nt, Artificial Sequence
  Description of Artificial Sequence: Synthetic oligonucleotide
  Sense strand starting at position 1756 of SEQ ID NO: 1562909
ggagaaacucagggucgaa

SEQ ID NO: 1781726 - RNA, 19 nt, Artificial Sequence
  Description of Artificial Sequence: Synthetic oligonucleotide
  Antisense strand to SEQ ID NO: 1781725
uucgacccugaguuucucc

SEQ ID NO: 1781727 - RNA, 19 nt, Artificial Sequence
  Description of Artificial Sequence: Synthetic oligonucleotide
  Sense strand starting at position 1794 of SEQ ID NO: 1562909
acaaguucgagaugagaca

SEQ ID NO: 1781728 - RNA, 19 nt, Artificial Sequence
  Description of Artificial Sequence: Synthetic oligonucleotide
  Antisense strand to SEQ ID NO: 1781727
ugucucaucucgaacuugu

SEQ ID NO: 1781729 - RNA, 19 nt, Artificial Sequence
  Description of Artificial Sequence: Synthetic oligonucleotide
  Sense strand starting at position 2531 of SEQ ID NO: 1562909
acgggauguuaaguuacau

SEQ ID NO: 1781730 - RNA, 19 nt, Artificial Sequence
  Description of Artificial Sequence: Synthetic oligonucleotide
  Antisense strand to SEQ ID NO: 1781729
auguaacuuaacaucccgu

SEQ ID NO: 1781731 - RNA, 19 nt, Artificial Sequence
  Description of Artificial Sequence: Synthetic oligonucleotide
  Sense strand starting at position 3056 of SEQ ID NO: 1562909
ggaaauaccuuagcacuuu

SEQ ID NO: 1781732 - RNA, 19 nt, Artificial Sequence
  Description of Artificial Sequence: Synthetic oligonucleotide
  Antisense strand to SEQ ID NO: 1781731
aaagugcuaagguauuucc

SEQ ID NO: 1781733 - RNA, 19 nt, Artificial Sequence
  Description of Artificial Sequence: Synthetic oligonucleotide
  Sense strand starting at position 3088 of SEQ ID NO: 1562909
ggcaaaugaucucugugaa

SEQ ID NO: 1781734 - RNA, 19 nt, Artificial Sequence
  Description of Artificial Sequence: Synthetic oligonucleotide
  Antisense strand to SEQ ID NO: 1781733
uucacagagaucauuugcc

SEQ ID NO: 1781735 - RNA, 19 nt, Artificial Sequence
  Description of Artificial Sequence: Synthetic oligonucleotide
  Sense strand starting at position 3089 of SEQ ID NO: 1562909
gcaaaugaucucugugaac

SEQ ID NO: 1781736 - RNA, 19 nt, Artificial Sequence
  Description of Artificial Sequence: Synthetic oligonucleotide
  Antisense strand to SEQ ID NO: 1781735
guucacagagaucauuugc

SEQ ID NO: 1781737 - RNA, 19 nt, Artificial Sequence
  Description of Artificial Sequence: Synthetic oligonucleotide
  Sense strand starting at position 3138 of SEQ ID NO: 1562909
guaauacaagauuguugua

SEQ ID NO: 1781738 - RNA, 19 nt, Artificial Sequence
  Description of Artificial Sequence: Synthetic oligonucleotide
  Antisense strand to SEQ ID NO: 1781737
uacaacaaucuuguauuac

SEQ ID NO: 1781739 - RNA, 19 nt, Artificial Sequence
  Description of Artificial Sequence: Synthetic oligonucleotide
  Sense strand starting at position 3214 of SEQ ID NO: 1562909
aguuguuaggguuaauaau

SEQ ID NO: 1781740 - RNA, 19 nt, Artificial Sequence
  Description of Artificial Sequence: Synthetic oligonucleotide
  Antisense strand to SEQ ID NO: 1781739
auuauuaacccuaacaacu

SEQ ID NO: 1781741 - RNA, 19 nt, Artificial Sequence
  Description of Artificial Sequence: Synthetic oligonucleotide
  Sense strand starting at position 3224 of SEQ ID NO: 1562909
guuaauaaugccgauaaug

SEQ ID NO: 1781742 - RNA, 19 nt, Artificial Sequence
  Description of Artificial Sequence: Synthetic oligonucleotide
  Antisense strand to SEQ ID NO: 1781741
cauuaucggcauuauuaac

SEQ ID NO: 1781743 - RNA, 19 nt, Artificial Sequence
  Description of Artificial Sequence: Synthetic oligonucleotide
  Sense strand starting at position 3268 of SEQ ID NO: 1562909
acuagacuuuagucacaca

SEQ ID NO: 1781744 - RNA, 19 nt, Artificial Sequence
  Description of Artificial Sequence: Synthetic oligonucleotide
  Antisense strand to SEQ ID NO: 1781743
ugugugacuaaagucuagu

SEQ ID NO: 1781745 - RNA, 19 nt, Artificial Sequence
  Description of Artificial Sequence: Synthetic oligonucleotide
  Sense strand starting at position 3400 of SEQ ID NO: 1562909
cuccauuuacgugggaagu

SEQ ID NO: 1781746 - RNA, 19 nt, Artificial Sequence
  Description of Artificial Sequence: Synthetic oligonucleotide
  Antisense strand to SEQ ID NO: 1781745
acuucccacguaaauggag

SEQ ID NO: 1781747 - RNA, 19 nt, Artificial Sequence
  Description of Artificial Sequence: Synthetic oligonucleotide
  Sense strand starting at position 3406 of SEQ ID NO: 1562909
uuacgugggaaguauaguu

SEQ ID NO: 1781748 - RNA, 19 nt, Artificial Sequence
  Description of Artificial Sequence: Synthetic oligonucleotide
  Antisense strand to SEQ ID NO: 1781747
aacuauacuucccacguaa

SEQ ID NO: 1781749 - RNA, 19 nt, Artificial Sequence
  Description of Artificial Sequence: Synthetic oligonucleotide
  Sense strand starting at position 3425 of SEQ ID NO: 1562909
gcgggugucauucuuguga

SEQ ID NO: 1781750 - RNA, 19 nt, Artificial Sequence
  Description of Artificial Sequence: Synthetic oligonucleotide
  Antisense strand to SEQ ID NO: 1781749
ucacaagaaugacacccgc

SEQ ID NO: 1781751 - RNA, 19 nt, Artificial Sequence
  Description of Artificial Sequence: Synthetic oligonucleotide
  Sense strand starting at position 3753 of SEQ ID NO: 1562909
guguguuuccuccuuaguc

SEQ ID NO: 1781752 - RNA, 19 nt, Artificial Sequence
  Description of Artificial Sequence: Synthetic oligonucleotide
  Antisense strand to SEQ ID NO: 1781751
gacuaaggaggaaacacac

SEQ ID NO: 1781753 - RNA, 19 nt, Artificial Sequence
  Description of Artificial Sequence: Synthetic oligonucleotide
  Sense strand starting at position 3779 of SEQ ID NO: 1562909
agauauuagugccuagaca

SEQ ID NO: 1781754 - RNA, 19 nt, Artificial Sequence
  Description of Artificial Sequence: Synthetic oligonucleotide
  Antisense strand to SEQ ID NO: 1781753
ugucuaggcacuaauaucu

SEQ ID NO: 1781755 - RNA, 19 nt, Artificial Sequence
  Description of Artificial Sequence: Synthetic oligonucleotide
  Sense strand starting at position 3780 of SEQ ID NO: 1562909
gauauuagugccuagacag

SEQ ID NO: 1781756 - RNA, 19 nt, Artificial Sequence
  Description of Artificial Sequence: Synthetic oligonucleotide
  Antisense strand to SEQ ID NO: 1781755
cugucuaggcacuaauauc

SEQ ID NO: 1781757 - RNA, 19 nt, Artificial Sequence
  Description of Artificial Sequence: Synthetic oligonucleotide
  Sense strand starting at position 3868 of SEQ ID NO: 1562909
cuaauaucuguacagagcu

SEQ ID NO: 1781758 - RNA, 19 nt, Artificial Sequence
  Description of Artificial Sequence: Synthetic oligonucleotide
  Antisense strand to SEQ ID NO: 1781757
agcucuguacagauauuag

SEQ ID NO: 1781759 - RNA, 19 nt, Artificial Sequence
  Description of Artificial Sequence: Synthetic oligonucleotide
  Sense strand starting at position 3876 of SEQ ID NO: 1562909
uguacagagcuuuaccagu

SEQ ID NO: 1781760 - RNA, 19 nt, Artificial Sequence
  Description of Artificial Sequence: Synthetic oligonucleotide
  Antisense strand to SEQ ID NO: 1781759
acugguaaagcucuguaca

SEQ ID NO: 1781761 - RNA, 19 nt, Artificial Sequence
  Description of Artificial Sequence: Synthetic oligonucleotide
  Sense strand starting at position 3944 of SEQ ID NO: 1562909
ugaggaaauuguuccuuaa

SEQ ID NO: 1781762 - RNA, 19 nt, Artificial Sequence
  Description of Artificial Sequence: Synthetic oligonucleotide
  Antisense strand to SEQ ID NO: 1781761
uuaaggaacaauuuccuca

SEQ ID NO: 1781763 - RNA, 19 nt, Artificial Sequence
  Description of Artificial Sequence: Synthetic oligonucleotide
  Sense strand starting at position 3946 of SEQ ID NO: 1562909
aggaaauuguuccuuaaag

SEQ ID NO: 1781764 - RNA, 19 nt, Artificial Sequence
  Description of Artificial Sequence: Synthetic oligonucleotide
  Antisense strand to SEQ ID NO: 1781763
cuuuaaggaacaauuuccu

SEQ ID NO: 1781765 - RNA, 19 nt, Artificial Sequence
  Description of Artificial Sequence: Synthetic oligonucleotide
  Sense strand starting at position 3947 of SEQ ID NO: 1562909
ggaaauuguuccuuaaagu

SEQ ID NO: 1781766 - RNA, 19 nt, Artificial Sequence
  Description of Artificial Sequence: Synthetic oligonucleotide
  Antisense strand to SEQ ID NO: 1781765
acuuuaaggaacaauuucc

SEQ ID NO: 1781767 - RNA, 19 nt, Artificial Sequence
  Description of Artificial Sequence: Synthetic oligonucleotide
  Sense strand starting at position 26 of SEQ ID NO: 1562910
uaugucauuccagggaaag

SEQ ID NO: 1781768 - RNA, 19 nt, Artificial Sequence
  Description of Artificial Sequence: Synthetic oligonucleotide
  Antisense strand to SEQ ID NO: 1781767
cuuucccuggaaugacaua

SEQ ID NO: 1781769 - RNA, 19 nt, Artificial Sequence
  Description of Artificial Sequence: Synthetic oligonucleotide
  Sense strand starting at position 28 of SEQ ID NO: 1562910
ugucauuccagggaaaggu

SEQ ID NO: 1781770 - RNA, 19 nt, Artificial Sequence
  Description of Artificial Sequence: Synthetic oligonucleotide
  Antisense strand to SEQ ID NO: 1781769
accuuucccuggaaugaca

SEQ ID NO: 1781771 - RNA, 19 nt, Artificial Sequence
  Description of Artificial Sequence: Synthetic oligonucleotide
  Sense strand starting at position 220 of SEQ ID NO: 1562910
caaagugaaguuuguaaca

SEQ ID NO: 1781772 - RNA, 19 nt, Artificial Sequence
  Description of Artificial Sequence: Synthetic oligonucleotide
  Antisense strand to SEQ ID NO: 1781771
uguuacaaacuucacuuug

SEQ ID NO: 1781773 - RNA, 19 nt, Artificial Sequence
  Description of Artificial Sequence: Synthetic oligonucleotide
  Sense strand starting at position 294 of SEQ ID NO: 1562910
cccaauagaugucugcaga

SEQ ID NO: 1781774 - RNA, 19 nt, Artificial Sequence
  Description of Artificial Sequence: Synthetic oligonucleotide
  Antisense strand to SEQ ID NO: 1781773
ucugcagacaucuauuggg

SEQ ID NO: 1781775 - RNA, 19 nt, Artificial Sequence
  Description of Artificial Sequence: Synthetic oligonucleotide
  Sense strand starting at position 295 of SEQ ID NO: 1562910
ccaauagaugucugcagac

SEQ ID NO: 1781776 - RNA, 19 nt, Artificial Sequence
  Description of Artificial Sequence: Synthetic oligonucleotide
  Antisense strand to SEQ ID NO: 1781775
gucugcagacaucuauugg

SEQ ID NO: 1781777 - RNA, 19 nt, Artificial Sequence
  Description of Artificial Sequence: Synthetic oligonucleotide
  Sense strand starting at position 297 of SEQ ID NO: 1562910
aauagaugucugcagacac

SEQ ID NO: 1781778 - RNA, 19 nt, Artificial Sequence
  Description of Artificial Sequence: Synthetic oligonucleotide
  Antisense strand to SEQ ID NO: 1781777
gugucugcagacaucuauu

SEQ ID NO: 1781779 - RNA, 19 nt, Artificial Sequence
  Description of Artificial Sequence: Synthetic oligonucleotide
  Sense strand starting at position 378 of SEQ ID NO: 1562910
guaucucuuagugauguca

SEQ ID NO: 1781780 - RNA, 19 nt, Artificial Sequence
  Description of Artificial Sequence: Synthetic oligonucleotide
  Antisense strand to SEQ ID NO: 1781779
ugacaucacuaagagauac

SEQ ID NO: 1781781 - RNA, 19 nt, Artificial Sequence
  Description of Artificial Sequence: Synthetic oligonucleotide
  Sense strand starting at position 392 of SEQ ID NO: 1562910
ugucauucugcugaguaag

SEQ ID NO: 1781782 - RNA, 19 nt, Artificial Sequence
  Description of Artificial Sequence: Synthetic oligonucleotide
  Antisense strand to SEQ ID NO: 1781781
cuuacucagcagaaugaca

SEQ ID NO: 1781783 - RNA, 19 nt, Artificial Sequence
  Description of Artificial Sequence: Synthetic oligonucleotide
  Sense strand starting at position 476 of SEQ ID NO: 1562910
uguccuaaacaguagcaaa

SEQ ID NO: 1781784 - RNA, 19 nt, Artificial Sequence
  Description of Artificial Sequence: Synthetic oligonucleotide
  Antisense strand to SEQ ID NO: 1781783
uuugcuacuguuuaggaca

SEQ ID NO: 1781785 - RNA, 19 nt, Artificial Sequence
  Description of Artificial Sequence: Synthetic oligonucleotide
  Sense strand starting at position 588 of SEQ ID NO: 1562910
ucucaugugaagugagaau

SEQ ID NO: 1781786 - RNA, 19 nt, Artificial Sequence
  Description of Artificial Sequence: Synthetic oligonucleotide
  Antisense strand to SEQ ID NO: 1781785
auucucacuucacaugaga

SEQ ID NO: 1781787 - RNA, 19 nt, Artificial Sequence
  Description of Artificial Sequence: Synthetic oligonucleotide
  Sense strand starting at position 599 of SEQ ID NO: 1562910
gugagaauaucauuggcca

SEQ ID NO: 1781788 - RNA, 19 nt, Artificial Sequence
  Description of Artificial Sequence: Synthetic oligonucleotide
  Antisense strand to SEQ ID NO: 1781787
uggccaaugauauucucac

SEQ ID NO: 1781789 - RNA, 19 nt, Artificial Sequence
  Description of Artificial Sequence: Synthetic oligonucleotide
  Sense strand starting at position 600 of SEQ ID NO: 1562910
ugagaauaucauuggccac

SEQ ID NO: 1781790 - RNA, 19 nt, Artificial Sequence
  Description of Artificial Sequence: Synthetic oligonucleotide
  Antisense strand to SEQ ID NO: 1781789
guggccaaugauauucuca

SEQ ID NO: 1781791 - RNA, 19 nt, Artificial Sequence
  Description of Artificial Sequence: Synthetic oligonucleotide
  Sense strand starting at position 638 of SEQ ID NO: 1562910
aucagacaguccguaaaua

SEQ ID NO: 1781792 - RNA, 19 nt, Artificial Sequence
  Description of Artificial Sequence: Synthetic oligonucleotide
  Antisense strand to SEQ ID NO: 1781791
uauuuacggacugucugau

SEQ ID NO: 1781793 - RNA, 19 nt, Artificial Sequence
  Description of Artificial Sequence: Synthetic oligonucleotide
  Sense strand starting at position 639 of SEQ ID NO: 1562910
ucagacaguccguaaauau

SEQ ID NO: 1781794 - RNA, 19 nt, Artificial Sequence
  Description of Artificial Sequence: Synthetic oligonucleotide
  Antisense strand to SEQ ID NO: 1781793
auauuuacggacugucuga

SEQ ID NO: 1781795 - RNA, 19 nt, Artificial Sequence
  Description of Artificial Sequence: Synthetic oligonucleotide
  Sense strand starting at position 874 of SEQ ID NO: 1562910
gggccauacugguuauaaa

SEQ ID NO: 1781796 - RNA, 19 nt, Artificial Sequence
  Description of Artificial Sequence: Synthetic oligonucleotide
  Antisense strand to SEQ ID NO: 1781795
uuuauaaccaguauggccc

SEQ ID NO: 1781797 - RNA, 19 nt, Artificial Sequence
  Description of Artificial Sequence: Synthetic oligonucleotide
  Sense strand starting at position 875 of SEQ ID NO: 1562910
ggccauacugguuauaaag

SEQ ID NO: 1781798 - RNA, 19 nt, Artificial Sequence
  Description of Artificial Sequence: Synthetic oligonucleotide
  Antisense strand to SEQ ID NO: 1781797
cuuuauaaccaguauggcc

SEQ ID NO: 1781799 - RNA, 19 nt, Artificial Sequence
  Description of Artificial Sequence: Synthetic oligonucleotide
  Sense strand starting at position 1308 of SEQ ID NO: 1562910
uuccaagucaucuguggga

SEQ ID NO: 1781800 - RNA, 19 nt, Artificial Sequence
  Description of Artificial Sequence: Synthetic oligonucleotide
  Antisense strand to SEQ ID NO: 1781799
ucccacagaugacuuggaa

SEQ ID NO: 1781801 - RNA, 19 nt, Artificial Sequence
  Description of Artificial Sequence: Synthetic oligonucleotide
  Sense strand starting at position 1526 of SEQ ID NO: 1562910
ggaaucaagugagcacuua

SEQ ID NO: 1781802 - RNA, 19 nt, Artificial Sequence
  Description of Artificial Sequence: Synthetic oligonucleotide
  Antisense strand to SEQ ID NO: 1781801
uaagugcucacuugauucc

SEQ ID NO: 1781803 - RNA, 19 nt, Artificial Sequence
  Description of Artificial Sequence: Synthetic oligonucleotide
  Sense strand starting at position 1619 of SEQ ID NO: 1562910
auggauugacucgggaagu

SEQ ID NO: 1781804 - RNA, 19 nt, Artificial Sequence
  Description of Artificial Sequence: Synthetic oligonucleotide
  Antisense strand to SEQ ID NO: 1781803
acuucccgagucaauccau

SEQ ID NO: 1781805 - RNA, 19 nt, Artificial Sequence
  Description of Artificial Sequence: Synthetic oligonucleotide
  Sense strand starting at position 1681 of SEQ ID NO: 1562910
ggagaaacucagggucgaa

SEQ ID NO: 1781806 - RNA, 19 nt, Artificial Sequence
  Description of Artificial Sequence: Synthetic oligonucleotide
  Antisense strand to SEQ ID NO: 1781805
uucgacccugaguuucucc

SEQ ID NO: 1781807 - RNA, 19 nt, Artificial Sequence
  Description of Artificial Sequence: Synthetic oligonucleotide
  Sense strand starting at position 1719 of SEQ ID NO: 1562910
acaaguucgagaugagaca

SEQ ID NO: 1781808 - RNA, 19 nt, Artificial Sequence
  Description of Artificial Sequence: Synthetic oligonucleotide
  Antisense strand to SEQ ID NO: 1781807
ugucucaucucgaacuugu

SEQ ID NO: 1781809 - RNA, 19 nt, Artificial Sequence
  Description of Artificial Sequence: Synthetic oligonucleotide
  Sense strand starting at position 2456 of SEQ ID NO: 1562910
acgggauguuaaguuacau

SEQ ID NO: 1781810 - RNA, 19 nt, Artificial Sequence
  Description of Artificial Sequence: Synthetic oligonucleotide
  Antisense strand to SEQ ID NO: 1781809
auguaacuuaacaucccgu

SEQ ID NO: 1781811 - RNA, 19 nt, Artificial Sequence
  Description of Artificial Sequence: Synthetic oligonucleotide
  Sense strand starting at position 2981 of SEQ ID NO: 1562910
ggaaauaccuuagcacuuu

SEQ ID NO: 1781812 - RNA, 19 nt, Artificial Sequence
  Description of Artificial Sequence: Synthetic oligonucleotide
  Antisense strand to SEQ ID NO: 1781811
aaagugcuaagguauuucc

SEQ ID NO: 1781813 - RNA, 19 nt, Artificial Sequence
  Description of Artificial Sequence: Synthetic oligonucleotide
  Sense strand starting at position 3013 of SEQ ID NO: 1562910
ggcaaaugaucucugugaa

SEQ ID NO: 1781814 - RNA, 19 nt, Artificial Sequence
  Description of Artificial Sequence: Synthetic oligonucleotide
  Antisense strand to SEQ ID NO: 1781813
uucacagagaucauuugcc

SEQ ID NO: 1781815 - RNA, 19 nt, Artificial Sequence
  Description of Artificial Sequence: Synthetic oligonucleotide
  Sense strand starting at position 3014 of SEQ ID NO: 1562910
gcaaaugaucucugugaac

SEQ ID NO: 1781816 - RNA, 19 nt, Artificial Sequence
  Description of Artificial Sequence: Synthetic oligonucleotide
  Antisense strand to SEQ ID NO: 1781815
guucacagagaucauuugc

SEQ ID NO: 1781817 - RNA, 19 nt, Artificial Sequence
  Description of Artificial Sequence: Synthetic oligonucleotide
  Sense strand starting at position 3063 of SEQ ID NO: 1562910
guaauacaagauuguugua

SEQ ID NO: 1781818 - RNA, 19 nt, Artificial Sequence
  Description of Artificial Sequence: Synthetic oligonucleotide
  Antisense strand to SEQ ID NO: 1781817
uacaacaaucuuguauuac

SEQ ID NO: 1781819 - RNA, 19 nt, Artificial Sequence
  Description of Artificial Sequence: Synthetic oligonucleotide
  Sense strand starting at position 3139 of SEQ ID NO: 1562910
aguuguuaggguuaauaau

SEQ ID NO: 1781820 - RNA, 19 nt, Artificial Sequence
  Description of Artificial Sequence: Synthetic oligonucleotide
  Antisense strand to SEQ ID NO: 1781819
auuauuaacccuaacaacu

SEQ ID NO: 1781821 - RNA, 19 nt, Artificial Sequence
  Description of Artificial Sequence: Synthetic oligonucleotide
  Sense strand starting at position 3149 of SEQ ID NO: 1562910
guuaauaaugccgauaaug

SEQ ID NO: 1781822 - RNA, 19 nt, Artificial Sequence
  Description of Artificial Sequence: Synthetic oligonucleotide
  Antisense strand to SEQ ID NO: 1781821
cauuaucggcauuauuaac

SEQ ID NO: 1781823 - RNA, 19 nt, Artificial Sequence
  Description of Artificial Sequence: Synthetic oligonucleotide
  Sense strand starting at position 3193 of SEQ ID NO: 1562910
acuagacuuuagucacaca

SEQ ID NO: 1781824 - RNA, 19 nt, Artificial Sequence
  Description of Artificial Sequence: Synthetic oligonucleotide
  Antisense strand to SEQ ID NO: 1781823
ugugugacuaaagucuagu

SEQ ID NO: 1781825 - RNA, 19 nt, Artificial Sequence
  Description of Artificial Sequence: Synthetic oligonucleotide
  Sense strand starting at position 3325 of SEQ ID NO: 1562910
cuccauuuacgugggaagu

SEQ ID NO: 1781826 - RNA, 19 nt, Artificial Sequence
  Description of Artificial Sequence: Synthetic oligonucleotide
  Antisense strand to SEQ ID NO: 1781825
acuucccacguaaauggag

SEQ ID NO: 1781827 - RNA, 19 nt, Artificial Sequence
  Description of Artificial Sequence: Synthetic oligonucleotide
  Sense strand starting at position 3331 of SEQ ID NO: 1562910
uuacgugggaaguauaguu

SEQ ID NO: 1781828 - RNA, 19 nt, Artificial Sequence
  Description of Artificial Sequence: Synthetic oligonucleotide
  Antisense strand to SEQ ID NO: 1781827
aacuauacuucccacguaa

SEQ ID NO: 1781829 - RNA, 19 nt, Artificial Sequence
  Description of Artificial Sequence: Synthetic oligonucleotide
  Sense strand starting at position 3350 of SEQ ID NO: 1562910
gcgggugucauucuuguga

SEQ ID NO: 1781830 - RNA, 19 nt, Artificial Sequence
  Description of Artificial Sequence: Synthetic oligonucleotide
  Antisense strand to SEQ ID NO: 1781829
ucacaagaaugacacccgc

SEQ ID NO: 1781831 - RNA, 19 nt, Artificial Sequence
  Description of Artificial Sequence: Synthetic oligonucleotide
  Sense strand starting at position 3678 of SEQ ID NO: 1562910
guguguuuccuccuuaguc

SEQ ID NO: 1781832 - RNA, 19 nt, Artificial Sequence
  Description of Artificial Sequence: Synthetic oligonucleotide
  Antisense strand to SEQ ID NO: 1781831
gacuaaggaggaaacacac

SEQ ID NO: 1781833 - RNA, 19 nt, Artificial Sequence
  Description of Artificial Sequence: Synthetic oligonucleotide
  Sense strand starting at position 3704 of SEQ ID NO: 1562910
agauauuagugccuagaca

SEQ ID NO: 1781834 - RNA, 19 nt, Artificial Sequence
  Description of Artificial Sequence: Synthetic oligonucleotide
  Antisense strand to SEQ ID NO: 1781833
ugucuaggcacuaauaucu

SEQ ID NO: 1781835 - RNA, 19 nt, Artificial Sequence
  Description of Artificial Sequence: Synthetic oligonucleotide
  Sense strand starting at position 3705 of SEQ ID NO: 1562910
gauauuagugccuagacag

SEQ ID NO: 1781836 - RNA, 19 nt, Artificial Sequence
  Description of Artificial Sequence: Synthetic oligonucleotide
  Antisense strand to SEQ ID NO: 1781835
cugucuaggcacuaauauc

SEQ ID NO: 1781837 - RNA, 19 nt, Artificial Sequence
  Description of Artificial Sequence: Synthetic oligonucleotide
  Sense strand starting at position 3793 of SEQ ID NO: 1562910
cuaauaucuguacagagcu

SEQ ID NO: 1781838 - RNA, 19 nt, Artificial Sequence
  Description of Artificial Sequence: Synthetic oligonucleotide
  Antisense strand to SEQ ID NO: 1781837
agcucuguacagauauuag

SEQ ID NO: 1781839 - RNA, 19 nt, Artificial Sequence
  Description of Artificial Sequence: Synthetic oligonucleotide
  Sense strand starting at position 3801 of SEQ ID NO: 1562910
uguacagagcuuuaccagu

SEQ ID NO: 1781840 - RNA, 19 nt, Artificial Sequence
  Description of Artificial Sequence: Synthetic oligonucleotide
  Antisense strand to SEQ ID NO: 1781839
acugguaaagcucuguaca

SEQ ID NO: 1781841 - RNA, 19 nt, Artificial Sequence
  Description of Artificial Sequence: Synthetic oligonucleotide
  Sense strand starting at position 3869 of SEQ ID NO: 1562910
ugaggaaauuguuccuuaa

SEQ ID NO: 1781842 - RNA, 19 nt, Artificial Sequence
  Description of Artificial Sequence: Synthetic oligonucleotide
  Antisense strand to SEQ ID NO: 1781841
uuaaggaacaauuuccuca

SEQ ID NO: 1781843 - RNA, 19 nt, Artificial Sequence
  Description of Artificial Sequence: Synthetic oligonucleotide
  Sense strand starting at position 3871 of SEQ ID NO: 1562910
aggaaauuguuccuuaaag

SEQ ID NO: 1781844 - RNA, 19 nt, Artificial Sequence
  Description of Artificial Sequence: Synthetic oligonucleotide
  Antisense strand to SEQ ID NO: 1781843
cuuuaaggaacaauuuccu

SEQ ID NO: 1781845 - RNA, 19 nt, Artificial Sequence
  Description of Artificial Sequence: Synthetic oligonucleotide
  Sense strand starting at position 3872 of SEQ ID NO: 1562910
ggaaauuguuccuuaaagu

SEQ ID NO: 1781846 - RNA, 19 nt, Artificial Sequence
  Description of Artificial Sequence: Synthetic oligonucleotide
  Antisense strand to SEQ ID NO: 1781845
acuuuaaggaacaauuucc

SEQ ID NO: 1781847 - RNA, 19 nt, Artificial Sequence
  Description of Artificial Sequence: Synthetic oligonucleotide
  Sense strand starting at position 147 of SEQ ID NO: 1562911
cagggugugucccugaacu

SEQ ID NO: 1781848 - RNA, 19 nt, Artificial Sequence
  Description of Artificial Sequence: Synthetic oligonucleotide
  Antisense strand to SEQ ID NO: 1781847
aguucagggacacacccug

SEQ ID NO: 1781849 - RNA, 19 nt, Artificial Sequence
  Description of Artificial Sequence: Synthetic oligonucleotide
  Sense strand starting at position 149 of SEQ ID NO: 1562911
gggugugucccugaacuug

SEQ ID NO: 1781850 - RNA, 19 nt, Artificial Sequence
  Description of Artificial Sequence: Synthetic oligonucleotide
  Antisense strand to SEQ ID NO: 1781849
caaguucagggacacaccc

SEQ ID NO: 1781851 - RNA, 19 nt, Artificial Sequence
  Description of Artificial Sequence: Synthetic oligonucleotide
  Sense strand starting at position 1013 of SEQ ID NO: 1562911
gccgaagucagacauuaag

SEQ ID NO: 1781852 - RNA, 19 nt, Artificial Sequence
  Description of Artificial Sequence: Synthetic oligonucleotide
  Antisense strand to SEQ ID NO: 1781851
cuuaaugucugacuucggc

SEQ ID NO: 1781853 - RNA, 19 nt, Artificial Sequence
  Description of Artificial Sequence: Synthetic oligonucleotide
  Sense strand starting at position 2414 of SEQ ID NO: 1562911
acagcauugucugguaggu

SEQ ID NO: 1781854 - RNA, 19 nt, Artificial Sequence
  Description of Artificial Sequence: Synthetic oligonucleotide
  Antisense strand to SEQ ID NO: 1781853
accuaccagacaaugcugu

SEQ ID NO: 1781855 - RNA, 19 nt, Artificial Sequence
  Description of Artificial Sequence: Synthetic oligonucleotide
  Sense strand starting at position 2907 of SEQ ID NO: 1562911
gguucugguuucugggaca

SEQ ID NO: 1781856 - RNA, 19 nt, Artificial Sequence
  Description of Artificial Sequence: Synthetic oligonucleotide
  Antisense strand to SEQ ID NO: 1781855
ugucccagaaaccagaacc

SEQ ID NO: 1781857 - RNA, 19 nt, Artificial Sequence
  Description of Artificial Sequence: Synthetic oligonucleotide
  Sense strand starting at position 2910 of SEQ ID NO: 1562911
ucugguuucugggacagag

SEQ ID NO: 1781858 - RNA, 19 nt, Artificial Sequence
  Description of Artificial Sequence: Synthetic oligonucleotide
  Antisense strand to SEQ ID NO: 1781857
cucugucccagaaaccaga

SEQ ID NO: 1781859 - RNA, 19 nt, Artificial Sequence
  Description of Artificial Sequence: Synthetic oligonucleotide
  Sense strand starting at position 2966 of SEQ ID NO: 1562911
gccucagugcuccuagugu

SEQ ID NO: 1781860 - RNA, 19 nt, Artificial Sequence
  Description of Artificial Sequence: Synthetic oligonucleotide
  Antisense strand to SEQ ID NO: 1781859
acacuaggagcacugaggc

SEQ ID NO: 1781861 - RNA, 19 nt, Artificial Sequence
  Description of Artificial Sequence: Synthetic oligonucleotide
  Sense strand starting at position 3313 of SEQ ID NO: 1562911
aggccuuguuccuguccaa

SEQ ID NO: 1781862 - RNA, 19 nt, Artificial Sequence
  Description of Artificial Sequence: Synthetic oligonucleotide
  Antisense strand to SEQ ID NO: 1781861
uuggacaggaacaaggccu

SEQ ID NO: 1781863 - RNA, 19 nt, Artificial Sequence
  Description of Artificial Sequence: Synthetic oligonucleotide
  Sense strand starting at position 3493 of SEQ ID NO: 1562911
ugggaaggccacuguucua

SEQ ID NO: 1781864 - RNA, 19 nt, Artificial Sequence
  Description of Artificial Sequence: Synthetic oligonucleotide
  Antisense strand to SEQ ID NO: 1781863
uagaacaguggccuuccca

SEQ ID NO: 1781865 - RNA, 19 nt, Artificial Sequence
  Description of Artificial Sequence: Synthetic oligonucleotide
  Sense strand starting at position 3498 of SEQ ID NO: 1562911
aggccacuguucuagacua

SEQ ID NO: 1781866 - RNA, 19 nt, Artificial Sequence
  Description of Artificial Sequence: Synthetic oligonucleotide
  Antisense strand to SEQ ID NO: 1781865
uagucuagaacaguggccu

SEQ ID NO: 1781867 - RNA, 19 nt, Artificial Sequence
  Description of Artificial Sequence: Synthetic oligonucleotide
  Sense strand starting at position 3500 of SEQ ID NO: 1562911
gccacuguucuagacuaaa

SEQ ID NO: 1781868 - RNA, 19 nt, Artificial Sequence
  Description of Artificial Sequence: Synthetic oligonucleotide
  Antisense strand to SEQ ID NO: 1781867
uuuagucuagaacaguggc

SEQ ID NO: 1781869 - RNA, 19 nt, Artificial Sequence
  Description of Artificial Sequence: Synthetic oligonucleotide
  Sense strand starting at position 3712 of SEQ ID NO: 1562911
cuaaguucugcccagcaag

SEQ ID NO: 1781870 - RNA, 19 nt, Artificial Sequence
  Description of Artificial Sequence: Synthetic oligonucleotide
  Antisense strand to SEQ ID NO: 1781869
cuugcugggcagaacuuag

SEQ ID NO: 1781871 - RNA, 19 nt, Artificial Sequence
  Description of Artificial Sequence: Synthetic oligonucleotide
  Sense strand starting at position 77 of SEQ ID NO: 1562912
uuaauaggcuguucuuauu

SEQ ID NO: 1781872 - RNA, 19 nt, Artificial Sequence
  Description of Artificial Sequence: Synthetic oligonucleotide
  Antisense strand to SEQ ID NO: 1781871
aauaagaacagccuauuaa

SEQ ID NO: 1781873 - RNA, 19 nt, Artificial Sequence
  Description of Artificial Sequence: Synthetic oligonucleotide
  Sense strand starting at position 98 of SEQ ID NO: 1562912
gguuguuauguuuguggag

SEQ ID NO: 1781874 - RNA, 19 nt, Artificial Sequence
  Description of Artificial Sequence: Synthetic oligonucleotide
  Antisense strand to SEQ ID NO: 1781873
cuccacaaacauaacaacc

SEQ ID NO: 1781875 - RNA, 19 nt, Artificial Sequence
  Description of Artificial Sequence: Synthetic oligonucleotide
  Sense strand starting at position 100 of SEQ ID NO: 1562912
uuguuauguuuguggagca

SEQ ID NO: 1781876 - RNA, 19 nt, Artificial Sequence
  Description of Artificial Sequence: Synthetic oligonucleotide
  Antisense strand to SEQ ID NO: 1781875
ugcuccacaaacauaacaa

SEQ ID NO: 1781877 - RNA, 19 nt, Artificial Sequence
  Description of Artificial Sequence: Synthetic oligonucleotide
  Sense strand starting at position 101 of SEQ ID NO: 1562912
uguuauguuuguggagcaa

SEQ ID NO: 1781878 - RNA, 19 nt, Artificial Sequence
  Description of Artificial Sequence: Synthetic oligonucleotide
  Antisense strand to SEQ ID NO: 1781877
uugcuccacaaacauaaca

SEQ ID NO: 1781879 - RNA, 19 nt, Artificial Sequence
  Description of Artificial Sequence: Synthetic oligonucleotide
  Sense strand starting at position 1150 of SEQ ID NO: 1562912
cagcgagagucuuuagaag

SEQ ID NO: 1781880 - RNA, 19 nt, Artificial Sequence
  Description of Artificial Sequence: Synthetic oligonucleotide
  Antisense strand to SEQ ID NO: 1781879
cuucuaaagacucucgcug

SEQ ID NO: 1781881 - RNA, 19 nt, Artificial Sequence
  Description of Artificial Sequence: Synthetic oligonucleotide
  Sense strand starting at position 1246 of SEQ ID NO: 1562912
guggguagagcucauaaac

SEQ ID NO: 1781882 - RNA, 19 nt, Artificial Sequence
  Description of Artificial Sequence: Synthetic oligonucleotide
  Antisense strand to SEQ ID NO: 1781881
guuuaugagcucuacccac

SEQ ID NO: 1781883 - RNA, 19 nt, Artificial Sequence
  Description of Artificial Sequence: Synthetic oligonucleotide
  Sense strand starting at position 1425 of SEQ ID NO: 1562912
ugugcuugugugccuggaa

SEQ ID NO: 1781884 - RNA, 19 nt, Artificial Sequence
  Description of Artificial Sequence: Synthetic oligonucleotide
  Antisense strand to SEQ ID NO: 1781883
uuccaggcacacaagcaca

SEQ ID NO: 1781885 - RNA, 19 nt, Artificial Sequence
  Description of Artificial Sequence: Synthetic oligonucleotide
  Sense strand starting at position 1984 of SEQ ID NO: 1562912
agaagcagcucagggauaa

SEQ ID NO: 1781886 - RNA, 19 nt, Artificial Sequence
  Description of Artificial Sequence: Synthetic oligonucleotide
  Antisense strand to SEQ ID NO: 1781885
uuaucccugagcugcuucu

SEQ ID NO: 1781887 - RNA, 19 nt, Artificial Sequence
  Description of Artificial Sequence: Synthetic oligonucleotide
  Sense strand starting at position 2112 of SEQ ID NO: 1562912
gauucucauugcucgugga

SEQ ID NO: 1781888 - RNA, 19 nt, Artificial Sequence
  Description of Artificial Sequence: Synthetic oligonucleotide
  Antisense strand to SEQ ID NO: 1781887
uccacgagcaaugagaauc

SEQ ID NO: 1781889 - RNA, 19 nt, Artificial Sequence
  Description of Artificial Sequence: Synthetic oligonucleotide
  Sense strand starting at position 2115 of SEQ ID NO: 1562912
ucucauugcucguggagga

SEQ ID NO: 1781890 - RNA, 19 nt, Artificial Sequence
  Description of Artificial Sequence: Synthetic oligonucleotide
  Antisense strand to SEQ ID NO: 1781889
uccuccacgagcaaugaga

SEQ ID NO: 1781891 - RNA, 19 nt, Artificial Sequence
  Description of Artificial Sequence: Synthetic oligonucleotide
  Sense strand starting at position 2172 of SEQ ID NO: 1562912
ucgauuggauugcuccaaa

SEQ ID NO: 1781892 - RNA, 19 nt, Artificial Sequence
  Description of Artificial Sequence: Synthetic oligonucleotide
  Antisense strand to SEQ ID NO: 1781891
uuuggagcaauccaaucga

SEQ ID NO: 1781893 - RNA, 19 nt, Artificial Sequence
  Description of Artificial Sequence: Synthetic oligonucleotide
  Sense strand starting at position 2262 of SEQ ID NO: 1562912
gccagaauuggcggguuga

SEQ ID NO: 1781894 - RNA, 19 nt, Artificial Sequence
  Description of Artificial Sequence: Synthetic oligonucleotide
  Antisense strand to SEQ ID NO: 1781893
ucaacccgccaauucuggc

SEQ ID NO: 1781895 - RNA, 19 nt, Artificial Sequence
  Description of Artificial Sequence: Synthetic oligonucleotide
  Sense strand starting at position 2263 of SEQ ID NO: 1562912
ccagaauuggcggguugau

SEQ ID NO: 1781896 - RNA, 19 nt, Artificial Sequence
  Description of Artificial Sequence: Synthetic oligonucleotide
  Antisense strand to SEQ ID NO: 1781895
aucaacccgccaauucugg

SEQ ID NO: 1781897 - RNA, 19 nt, Artificial Sequence
  Description of Artificial Sequence: Synthetic oligonucleotide
  Sense strand starting at position 2273 of SEQ ID NO: 1562912
cggguugauagugauugca

SEQ ID NO: 1781898 - RNA, 19 nt, Artificial Sequence
  Description of Artificial Sequence: Synthetic oligonucleotide
  Antisense strand to SEQ ID NO: 1781897
ugcaaucacuaucaacccg

SEQ ID NO: 1781899 - RNA, 19 nt, Artificial Sequence
  Description of Artificial Sequence: Synthetic oligonucleotide
  Sense strand starting at position 2275 of SEQ ID NO: 1562912
gguugauagugauugcaac

SEQ ID NO: 1781900 - RNA, 19 nt, Artificial Sequence
  Description of Artificial Sequence: Synthetic oligonucleotide
  Antisense strand to SEQ ID NO: 1781899
guugcaaucacuaucaacc

SEQ ID NO: 1781901 - RNA, 19 nt, Artificial Sequence
  Description of Artificial Sequence: Synthetic oligonucleotide
  Sense strand starting at position 2276 of SEQ ID NO: 1562912
guugauagugauugcaaca

SEQ ID NO: 1781902 - RNA, 19 nt, Artificial Sequence
  Description of Artificial Sequence: Synthetic oligonucleotide
  Antisense strand to SEQ ID NO: 1781901
uguugcaaucacuaucaac

SEQ ID NO: 1781903 - RNA, 19 nt, Artificial Sequence
  Description of Artificial Sequence: Synthetic oligonucleotide
  Sense strand starting at position 2408 of SEQ ID NO: 1562912
uggccaucucuuugccuua

SEQ ID NO: 1781904 - RNA, 19 nt, Artificial Sequence
  Description of Artificial Sequence: Synthetic oligonucleotide
  Antisense strand to SEQ ID NO: 1781903
uaaggcaaagagauggcca

SEQ ID NO: 1781905 - RNA, 19 nt, Artificial Sequence
  Description of Artificial Sequence: Synthetic oligonucleotide
  Sense strand starting at position 2648 of SEQ ID NO: 1562912
aucgcuugauuccaaagaa

SEQ ID NO: 1781906 - RNA, 19 nt, Artificial Sequence
  Description of Artificial Sequence: Synthetic oligonucleotide
  Antisense strand to SEQ ID NO: 1781905
uucuuuggaaucaagcgau

SEQ ID NO: 1781907 - RNA, 19 nt, Artificial Sequence
  Description of Artificial Sequence: Synthetic oligonucleotide
  Sense strand starting at position 2783 of SEQ ID NO: 1562912
ggcuuuggacuuugccaaa

SEQ ID NO: 1781908 - RNA, 19 nt, Artificial Sequence
  Description of Artificial Sequence: Synthetic oligonucleotide
  Antisense strand to SEQ ID NO: 1781907
uuuggcaaaguccaaagcc

SEQ ID NO: 1781909 - RNA, 19 nt, Artificial Sequence
  Description of Artificial Sequence: Synthetic oligonucleotide
  Sense strand starting at position 2854 of SEQ ID NO: 1562912
gggucuaccugcuuggaga

SEQ ID NO: 1781910 - RNA, 19 nt, Artificial Sequence
  Description of Artificial Sequence: Synthetic oligonucleotide
  Antisense strand to SEQ ID NO: 1781909
ucuccaagcagguagaccc

SEQ ID NO: 1781911 - RNA, 19 nt, Artificial Sequence
  Description of Artificial Sequence: Synthetic oligonucleotide
  Sense strand starting at position 3584 of SEQ ID NO: 1562912
uaaccauugcguugacuuu

SEQ ID NO: 1781912 - RNA, 19 nt, Artificial Sequence
  Description of Artificial Sequence: Synthetic oligonucleotide
  Antisense strand to SEQ ID NO: 1781911
aaagucaacgcaaugguua

SEQ ID NO: 1781913 - RNA, 19 nt, Artificial Sequence
  Description of Artificial Sequence: Synthetic oligonucleotide
  Sense strand starting at position 80 of SEQ ID NO: 1562913
aggacugucuaaucccuaa

SEQ ID NO: 1781914 - RNA, 19 nt, Artificial Sequence
  Description of Artificial Sequence: Synthetic oligonucleotide
  Antisense strand to SEQ ID NO: 1781913
uuagggauuagacaguccu

SEQ ID NO: 1781915 - RNA, 19 nt, Artificial Sequence
  Description of Artificial Sequence: Synthetic oligonucleotide
  Sense strand starting at position 212 of SEQ ID NO: 1562913
gggcaaagaguccauuguu

SEQ ID NO: 1781916 - RNA, 19 nt, Artificial Sequence
  Description of Artificial Sequence: Synthetic oligonucleotide
  Antisense strand to SEQ ID NO: 1781915
aacaauggacucuuugccc

SEQ ID NO: 1781917 - RNA, 19 nt, Artificial Sequence
  Description of Artificial Sequence: Synthetic oligonucleotide
  Sense strand starting at position 215 of SEQ ID NO: 1562913
caaagaguccauuguuaag

SEQ ID NO: 1781918 - RNA, 19 nt, Artificial Sequence
  Description of Artificial Sequence: Synthetic oligonucleotide
  Antisense strand to SEQ ID NO: 1781917
cuuaacaauggacucuuug

SEQ ID NO: 1781919 - RNA, 19 nt, Artificial Sequence
  Description of Artificial Sequence: Synthetic oligonucleotide
  Sense strand starting at position 217 of SEQ ID NO: 1562913
aagaguccauuguuaagga

SEQ ID NO: 1781920 - RNA, 19 nt, Artificial Sequence
  Description of Artificial Sequence: Synthetic oligonucleotide
  Antisense strand to SEQ ID NO: 1781919
uccuuaacaauggacucuu

SEQ ID NO: 1781921 - RNA, 19 nt, Artificial Sequence
  Description of Artificial Sequence: Synthetic oligonucleotide
  Sense strand starting at position 218 of SEQ ID NO: 1562913
agaguccauuguuaaggaa

SEQ ID NO: 1781922 - RNA, 19 nt, Artificial Sequence
  Description of Artificial Sequence: Synthetic oligonucleotide
  Antisense strand to SEQ ID NO: 1781921
uuccuuaacaauggacucu

SEQ ID NO: 1781923 - RNA, 19 nt, Artificial Sequence
  Description of Artificial Sequence: Synthetic oligonucleotide
  Sense strand starting at position 280 of SEQ ID NO: 1562913
gggacgucugggugucaau

SEQ ID NO: 1781924 - RNA, 19 nt, Artificial Sequence
  Description of Artificial Sequence: Synthetic oligonucleotide
  Antisense strand to SEQ ID NO: 1781923
auugacacccagacguccc

SEQ ID NO: 1781925 - RNA, 19 nt, Artificial Sequence
  Description of Artificial Sequence: Synthetic oligonucleotide
  Sense strand starting at position 406 of SEQ ID NO: 1562913
aguuccagcuagugagaaa

SEQ ID NO: 1781926 - RNA, 19 nt, Artificial Sequence
  Description of Artificial Sequence: Synthetic oligonucleotide
  Antisense strand to SEQ ID NO: 1781925
uuucucacuagcuggaacu

SEQ ID NO: 1781927 - RNA, 19 nt, Artificial Sequence
  Description of Artificial Sequence: Synthetic oligonucleotide
  Sense strand starting at position 509 of SEQ ID NO: 1562913
gaaucucauuuccaggagu

SEQ ID NO: 1781928 - RNA, 19 nt, Artificial Sequence
  Description of Artificial Sequence: Synthetic oligonucleotide
  Antisense strand to SEQ ID NO: 1781927
acuccuggaaaugagauuc

SEQ ID NO: 1781929 - RNA, 19 nt, Artificial Sequence
  Description of Artificial Sequence: Synthetic oligonucleotide
  Sense strand starting at position 550 of SEQ ID NO: 1562913
gggccuaggucaguggaaa

SEQ ID NO: 1781930 - RNA, 19 nt, Artificial Sequence
  Description of Artificial Sequence: Synthetic oligonucleotide
  Antisense strand to SEQ ID NO: 1781929
uuuccacugaccuaggccc

SEQ ID NO: 1781931 - RNA, 19 nt, Artificial Sequence
  Description of Artificial Sequence: Synthetic oligonucleotide
  Sense strand starting at position 551 of SEQ ID NO: 1562913
ggccuaggucaguggaaac

SEQ ID NO: 1781932 - RNA, 19 nt, Artificial Sequence
  Description of Artificial Sequence: Synthetic oligonucleotide
  Antisense strand to SEQ ID NO: 1781931
guuuccacugaccuaggcc

SEQ ID NO: 1781933 - RNA, 19 nt, Artificial Sequence
  Description of Artificial Sequence: Synthetic oligonucleotide
  Sense strand starting at position 1120 of SEQ ID NO: 1562913
ugucuugagucccucaauc

SEQ ID NO: 1781934 - RNA, 19 nt, Artificial Sequence
  Description of Artificial Sequence: Synthetic oligonucleotide
  Antisense strand to SEQ ID NO: 1781933
gauugagggacucaagaca

SEQ ID NO: 1781935 - RNA, 19 nt, Artificial Sequence
  Description of Artificial Sequence: Synthetic oligonucleotide
  Sense strand starting at position 2239 of SEQ ID NO: 1562913
acugcauguccuggagaga

SEQ ID NO: 1781936 - RNA, 19 nt, Artificial Sequence
  Description of Artificial Sequence: Synthetic oligonucleotide
  Antisense strand to SEQ ID NO: 1781935
ucucuccaggacaugcagu

SEQ ID NO: 1781937 - RNA, 19 nt, Artificial Sequence
  Description of Artificial Sequence: Synthetic oligonucleotide
  Sense strand starting at position 2240 of SEQ ID NO: 1562913
cugcauguccuggagagaa

SEQ ID NO: 1781938 - RNA, 19 nt, Artificial Sequence
  Description of Artificial Sequence: Synthetic oligonucleotide
  Antisense strand to SEQ ID NO: 1781937
uucucuccaggacaugcag

SEQ ID NO: 1781939 - RNA, 19 nt, Artificial Sequence
  Description of Artificial Sequence: Synthetic oligonucleotide
  Sense strand starting at position 2322 of SEQ ID NO: 1562913
gugcccacuugauccuuaa

SEQ ID NO: 1781940 - RNA, 19 nt, Artificial Sequence
  Description of Artificial Sequence: Synthetic oligonucleotide
  Antisense strand to SEQ ID NO: 1781939
uuaaggaucaagugggcac

SEQ ID NO: 1781941 - RNA, 19 nt, Artificial Sequence
  Description of Artificial Sequence: Synthetic oligonucleotide
  Sense strand starting at position 2435 of SEQ ID NO: 1562913
gcaggcuuucuguaugauu

SEQ ID NO: 1781942 - RNA, 19 nt, Artificial Sequence
  Description of Artificial Sequence: Synthetic oligonucleotide
  Antisense strand to SEQ ID NO: 1781941
aaucauacagaaagccugc

SEQ ID NO: 1781943 - RNA, 19 nt, Artificial Sequence
  Description of Artificial Sequence: Synthetic oligonucleotide
  Sense strand starting at position 2605 of SEQ ID NO: 1562913
agcugaggccuggaugauu

SEQ ID NO: 1781944 - RNA, 19 nt, Artificial Sequence
  Description of Artificial Sequence: Synthetic oligonucleotide
  Antisense strand to SEQ ID NO: 1781943
aaucauccaggccucagcu

SEQ ID NO: 1781945 - RNA, 19 nt, Artificial Sequence
  Description of Artificial Sequence: Synthetic oligonucleotide
  Sense strand starting at position 2617 of SEQ ID NO: 1562913
gaugauuccuggucccuua

SEQ ID NO: 1781946 - RNA, 19 nt, Artificial Sequence
  Description of Artificial Sequence: Synthetic oligonucleotide
  Antisense strand to SEQ ID NO: 1781945
uaagggaccaggaaucauc

SEQ ID NO: 1781947 - RNA, 19 nt, Artificial Sequence
  Description of Artificial Sequence: Synthetic oligonucleotide
  Sense strand starting at position 2977 of SEQ ID NO: 1562913
ggcuuauuucucugucuca

SEQ ID NO: 1781948 - RNA, 19 nt, Artificial Sequence
  Description of Artificial Sequence: Synthetic oligonucleotide
  Antisense strand to SEQ ID NO: 1781947
ugagacagagaaauaagcc

SEQ ID NO: 1781949 - RNA, 19 nt, Artificial Sequence
  Description of Artificial Sequence: Synthetic oligonucleotide
  Sense strand starting at position 3053 of SEQ ID NO: 1562913
agagguauggcucguagaa

SEQ ID NO: 1781950 - RNA, 19 nt, Artificial Sequence
  Description of Artificial Sequence: Synthetic oligonucleotide
  Antisense strand to SEQ ID NO: 1781949
uucuacgagccauaccucu

SEQ ID NO: 1781951 - RNA, 19 nt, Artificial Sequence
  Description of Artificial Sequence: Synthetic oligonucleotide
  Sense strand starting at position 3191 of SEQ ID NO: 1562913
caccuuaagguguaggauu

SEQ ID NO: 1781952 - RNA, 19 nt, Artificial Sequence
  Description of Artificial Sequence: Synthetic oligonucleotide
  Antisense strand to SEQ ID NO: 1781951
aauccuacaccuuaaggug

SEQ ID NO: 1781953 - RNA, 19 nt, Artificial Sequence
  Description of Artificial Sequence: Synthetic oligonucleotide
  Sense strand starting at position 3199 of SEQ ID NO: 1562913
gguguaggauuucaacaga

SEQ ID NO: 1781954 - RNA, 19 nt, Artificial Sequence
  Description of Artificial Sequence: Synthetic oligonucleotide
  Antisense strand to SEQ ID NO: 1781953
ucuguugaaauccuacacc

SEQ ID NO: 1781955 - RNA, 19 nt, Artificial Sequence
  Description of Artificial Sequence: Synthetic oligonucleotide
  Sense strand starting at position 3233 of SEQ ID NO: 1562913
acacaaacauuuggauagu

SEQ ID NO: 1781956 - RNA, 19 nt, Artificial Sequence
  Description of Artificial Sequence: Synthetic oligonucleotide
  Antisense strand to SEQ ID NO: 1781955
acuauccaaauguuugugu

SEQ ID NO: 1781957 - RNA, 19 nt, Artificial Sequence
  Description of Artificial Sequence: Synthetic oligonucleotide
  Sense strand starting at position 3250 of SEQ ID NO: 1562913
guagcaugcccuuaggaga

SEQ ID NO: 1781958 - RNA, 19 nt, Artificial Sequence
  Description of Artificial Sequence: Synthetic oligonucleotide
  Antisense strand to SEQ ID NO: 1781957
ucuccuaagggcaugcuac

SEQ ID NO: 1781959 - RNA, 19 nt, Artificial Sequence
  Description of Artificial Sequence: Synthetic oligonucleotide
  Sense strand starting at position 3257 of SEQ ID NO: 1562913
gcccuuaggagaugccuaa

SEQ ID NO: 1781960 - RNA, 19 nt, Artificial Sequence
  Description of Artificial Sequence: Synthetic oligonucleotide
  Antisense strand to SEQ ID NO: 1781959
uuaggcaucuccuaagggc

SEQ ID NO: 1781961 - RNA, 19 nt, Artificial Sequence
  Description of Artificial Sequence: Synthetic oligonucleotide
  Sense strand starting at position 3341 of SEQ ID NO: 1562913
caaguuagaccuuggucca

SEQ ID NO: 1781962 - RNA, 19 nt, Artificial Sequence
  Description of Artificial Sequence: Synthetic oligonucleotide
  Antisense strand to SEQ ID NO: 1781961
uggaccaaggucuaacuug

SEQ ID NO: 1781963 - RNA, 19 nt, Artificial Sequence
  Description of Artificial Sequence: Synthetic oligonucleotide
  Sense strand starting at position 3457 of SEQ ID NO: 1562913
ugcagaguaugugagcuuu

SEQ ID NO: 1781964 - RNA, 19 nt, Artificial Sequence
  Description of Artificial Sequence: Synthetic oligonucleotide
  Antisense strand to SEQ ID NO: 1781963
aaagcucacauacucugca

SEQ ID NO: 1781965 - RNA, 19 nt, Artificial Sequence
  Description of Artificial Sequence: Synthetic oligonucleotide
  Sense strand starting at position 3520 of SEQ ID NO: 1562913
cagaaugacuggugguguu

SEQ ID NO: 1781966 - RNA, 19 nt, Artificial Sequence
  Description of Artificial Sequence: Synthetic oligonucleotide
  Antisense strand to SEQ ID NO: 1781965
aacaccaccagucauucug

SEQ ID NO: 1781967 - RNA, 19 nt, Artificial Sequence
  Description of Artificial Sequence: Synthetic oligonucleotide
  Sense strand starting at position 3549 of SEQ ID NO: 1562913
ugacauugcugucaggauu

SEQ ID NO: 1781968 - RNA, 19 nt, Artificial Sequence
  Description of Artificial Sequence: Synthetic oligonucleotide
  Antisense strand to SEQ ID NO: 1781967
aauccugacagcaauguca

SEQ ID NO: 1781969 - RNA, 19 nt, Artificial Sequence
  Description of Artificial Sequence: Synthetic oligonucleotide
  Sense strand starting at position 3557 of SEQ ID NO: 1562913
cugucaggauuccaaaugu

SEQ ID NO: 1781970 - RNA, 19 nt, Artificial Sequence
  Description of Artificial Sequence: Synthetic oligonucleotide
  Antisense strand to SEQ ID NO: 1781969
acauuuggaauccugacag

SEQ ID NO: 1781971 - RNA, 19 nt, Artificial Sequence
  Description of Artificial Sequence: Synthetic oligonucleotide
  Sense strand starting at position 3566 of SEQ ID NO: 1562913
uuccaaaugucaccugaga

SEQ ID NO: 1781972 - RNA, 19 nt, Artificial Sequence
  Description of Artificial Sequence: Synthetic oligonucleotide
  Antisense strand to SEQ ID NO: 1781971
ucucaggugacauuuggaa

SEQ ID NO: 1781973 - RNA, 19 nt, Artificial Sequence
  Description of Artificial Sequence: Synthetic oligonucleotide
  Sense strand starting at position 3695 of SEQ ID NO: 1562913
ccuuucucugggcaggaau

SEQ ID NO: 1781974 - RNA, 19 nt, Artificial Sequence
  Description of Artificial Sequence: Synthetic oligonucleotide
  Antisense strand to SEQ ID NO: 1781973
auuccugcccagagaaagg

SEQ ID NO: 1781975 - RNA, 19 nt, Artificial Sequence
  Description of Artificial Sequence: Synthetic oligonucleotide
  Sense strand starting at position 3739 of SEQ ID NO: 1562913
uagugaauaccugggcuga

SEQ ID NO: 1781976 - RNA, 19 nt, Artificial Sequence
  Description of Artificial Sequence: Synthetic oligonucleotide
  Antisense strand to SEQ ID NO: 1781975
ucagcccagguauucacua

SEQ ID NO: 1781977 - RNA, 19 nt, Artificial Sequence
  Description of Artificial Sequence: Synthetic oligonucleotide
  Sense strand starting at position 3741 of SEQ ID NO: 1562913
gugaauaccugggcugacu

SEQ ID NO: 1781978 - RNA, 19 nt, Artificial Sequence
  Description of Artificial Sequence: Synthetic oligonucleotide
  Antisense strand to SEQ ID NO: 1781977
agucagcccagguauucac

SEQ ID NO: 1781979 - RNA, 19 nt, Artificial Sequence
  Description of Artificial Sequence: Synthetic oligonucleotide
  Sense strand starting at position 3752 of SEQ ID NO: 1562913
ggcugacugccucaucaca

SEQ ID NO: 1781980 - RNA, 19 nt, Artificial Sequence
  Description of Artificial Sequence: Synthetic oligonucleotide
  Antisense strand to SEQ ID NO: 1781979
ugugaugaggcagucagcc

SEQ ID NO: 1781981 - RNA, 19 nt, Artificial Sequence
  Description of Artificial Sequence: Synthetic oligonucleotide
  Sense strand starting at position 3863 of SEQ ID NO: 1562913
ccaucuauuccugacgugu

SEQ ID NO: 1781982 - RNA, 19 nt, Artificial Sequence
  Description of Artificial Sequence: Synthetic oligonucleotide
  Antisense strand to SEQ ID NO: 1781981
acacgucaggaauagaugg

SEQ ID NO: 1781983 - RNA, 19 nt, Artificial Sequence
  Description of Artificial Sequence: Synthetic oligonucleotide
  Sense strand starting at position 209 of SEQ ID NO: 1562914
cuguuaucagucuguggga

SEQ ID NO: 1781984 - RNA, 19 nt, Artificial Sequence
  Description of Artificial Sequence: Synthetic oligonucleotide
  Antisense strand to SEQ ID NO: 1781983
ucccacagacugauaacag

SEQ ID NO: 1781985 - RNA, 19 nt, Artificial Sequence
  Description of Artificial Sequence: Synthetic oligonucleotide
  Sense strand starting at position 210 of SEQ ID NO: 1562914
uguuaucagucugugggaa

SEQ ID NO: 1781986 - RNA, 19 nt, Artificial Sequence
  Description of Artificial Sequence: Synthetic oligonucleotide
  Antisense strand to SEQ ID NO: 1781985
uucccacagacugauaaca

SEQ ID NO: 1781987 - RNA, 19 nt, Artificial Sequence
  Description of Artificial Sequence: Synthetic oligonucleotide
  Sense strand starting at position 211 of SEQ ID NO: 1562914
guuaucagucugugggaac

SEQ ID NO: 1781988 - RNA, 19 nt, Artificial Sequence
  Description of Artificial Sequence: Synthetic oligonucleotide
  Antisense strand to SEQ ID NO: 1781987
guucccacagacugauaac

SEQ ID NO: 1781989 - RNA, 19 nt, Artificial Sequence
  Description of Artificial Sequence: Synthetic oligonucleotide
  Sense strand starting at position 483 of SEQ ID NO: 1562914
gugucaggguguaugugaa

SEQ ID NO: 1781990 - RNA, 19 nt, Artificial Sequence
  Description of Artificial Sequence: Synthetic oligonucleotide
  Antisense strand to SEQ ID NO: 1781989
uucacauacacccugacac

SEQ ID NO: 1781991 - RNA, 19 nt, Artificial Sequence
  Description of Artificial Sequence: Synthetic oligonucleotide
  Sense strand starting at position 491 of SEQ ID NO: 1562914
guguaugugaagcaucuuu

SEQ ID NO: 1781992 - RNA, 19 nt, Artificial Sequence
  Description of Artificial Sequence: Synthetic oligonucleotide
  Antisense strand to SEQ ID NO: 1781991
aaagaugcuucacauacac

SEQ ID NO: 1781993 - RNA, 19 nt, Artificial Sequence
  Description of Artificial Sequence: Synthetic oligonucleotide
  Sense strand starting at position 659 of SEQ ID NO: 1562914
cagucacagugccuagaau

SEQ ID NO: 1781994 - RNA, 19 nt, Artificial Sequence
  Description of Artificial Sequence: Synthetic oligonucleotide
  Antisense strand to SEQ ID NO: 1781993
auucuaggcacugugacug

SEQ ID NO: 1781995 - RNA, 19 nt, Artificial Sequence
  Description of Artificial Sequence: Synthetic oligonucleotide
  Sense strand starting at position 660 of SEQ ID NO: 1562914
agucacagugccuagaaua

SEQ ID NO: 1781996 - RNA, 19 nt, Artificial Sequence
  Description of Artificial Sequence: Synthetic oligonucleotide
  Antisense strand to SEQ ID NO: 1781995
uauucuaggcacugugacu

SEQ ID NO: 1781997 - RNA, 19 nt, Artificial Sequence
  Description of Artificial Sequence: Synthetic oligonucleotide
  Sense strand starting at position 1069 of SEQ ID NO: 1562914
uggcgaagucagugaccaa

SEQ ID NO: 1781998 - RNA, 19 nt, Artificial Sequence
  Description of Artificial Sequence: Synthetic oligonucleotide
  Antisense strand to SEQ ID NO: 1781997
uuggucacugacuucgcca

SEQ ID NO: 1781999 - RNA, 19 nt, Artificial Sequence
  Description of Artificial Sequence: Synthetic oligonucleotide
  Sense strand starting at position 1072 of SEQ ID NO: 1562914
cgaagucagugaccaagaa

SEQ ID NO: 1782000 - RNA, 19 nt, Artificial Sequence
  Description of Artificial Sequence: Synthetic oligonucleotide
  Antisense strand to SEQ ID NO: 1781999
uucuuggucacugacuucg

SEQ ID NO: 1782001 - RNA, 19 nt, Artificial Sequence
  Description of Artificial Sequence: Synthetic oligonucleotide
  Sense strand starting at position 1085 of SEQ ID NO: 1562914
caagaaguugcguccguca

SEQ ID NO: 1782002 - RNA, 19 nt, Artificial Sequence
  Description of Artificial Sequence: Synthetic oligonucleotide
  Antisense strand to SEQ ID NO: 1782001
ugacggacgcaacuucuug

SEQ ID NO: 1782003 - RNA, 19 nt, Artificial Sequence
  Description of Artificial Sequence: Synthetic oligonucleotide
  Sense strand starting at position 1492 of SEQ ID NO: 1562914
cgaucccuccucugcaaau

SEQ ID NO: 1782004 - RNA, 19 nt, Artificial Sequence
  Description of Artificial Sequence: Synthetic oligonucleotide
  Antisense strand to SEQ ID NO: 1782003
auuugcagaggagggaucg

SEQ ID NO: 1782005 - RNA, 19 nt, Artificial Sequence
  Description of Artificial Sequence: Synthetic oligonucleotide
  Sense strand starting at position 1535 of SEQ ID NO: 1562914
cgguguucucaugggauua

SEQ ID NO: 1782006 - RNA, 19 nt, Artificial Sequence
  Description of Artificial Sequence: Synthetic oligonucleotide
  Antisense strand to SEQ ID NO: 1782005
uaaucccaugagaacaccg

SEQ ID NO: 1782007 - RNA, 19 nt, Artificial Sequence
  Description of Artificial Sequence: Synthetic oligonucleotide
  Sense strand starting at position 1536 of SEQ ID NO: 1562914
gguguucucaugggauuaa

SEQ ID NO: 1782008 - RNA, 19 nt, Artificial Sequence
  Description of Artificial Sequence: Synthetic oligonucleotide
  Antisense strand to SEQ ID NO: 1782007
uuaaucccaugagaacacc

SEQ ID NO: 1782009 - RNA, 19 nt, Artificial Sequence
  Description of Artificial Sequence: Synthetic oligonucleotide
  Sense strand starting at position 1612 of SEQ ID NO: 1562914
gggcucgauccgcuuucau

SEQ ID NO: 1782010 - RNA, 19 nt, Artificial Sequence
  Description of Artificial Sequence: Synthetic oligonucleotide
  Antisense strand to SEQ ID NO: 1782009
augaaagcggaucgagccc

SEQ ID NO: 1782011 - RNA, 19 nt, Artificial Sequence
  Description of Artificial Sequence: Synthetic oligonucleotide
  Sense strand starting at position 1885 of SEQ ID NO: 1562914
gggugaucgggacgaggaa

SEQ ID NO: 1782012 - RNA, 19 nt, Artificial Sequence
  Description of Artificial Sequence: Synthetic oligonucleotide
  Antisense strand to SEQ ID NO: 1782011
uuccucgucccgaucaccc

SEQ ID NO: 1782013 - RNA, 19 nt, Artificial Sequence
  Description of Artificial Sequence: Synthetic oligonucleotide
  Sense strand starting at position 2160 of SEQ ID NO: 1562914
uccgcaucgggucauagau

SEQ ID NO: 1782014 - RNA, 19 nt, Artificial Sequence
  Description of Artificial Sequence: Synthetic oligonucleotide
  Antisense strand to SEQ ID NO: 1782013
aucuaugacccgaugcgga

SEQ ID NO: 1782015 - RNA, 19 nt, Artificial Sequence
  Description of Artificial Sequence: Synthetic oligonucleotide
  Sense strand starting at position 2224 of SEQ ID NO: 1562914
ucugguagucugggcagau

SEQ ID NO: 1782016 - RNA, 19 nt, Artificial Sequence
  Description of Artificial Sequence: Synthetic oligonucleotide
  Antisense strand to SEQ ID NO: 1782015
aucugcccagacuaccaga

SEQ ID NO: 1782017 - RNA, 19 nt, Artificial Sequence
  Description of Artificial Sequence: Synthetic oligonucleotide
  Sense strand starting at position 2227 of SEQ ID NO: 1562914
gguagucugggcagauguu

SEQ ID NO: 1782018 - RNA, 19 nt, Artificial Sequence
  Description of Artificial Sequence: Synthetic oligonucleotide
  Antisense strand to SEQ ID NO: 1782017
aacaucugcccagacuacc

SEQ ID NO: 1782019 - RNA, 19 nt, Artificial Sequence
  Description of Artificial Sequence: Synthetic oligonucleotide
  Sense strand starting at position 2228 of SEQ ID NO: 1562914
guagucugggcagauguua

SEQ ID NO: 1782020 - RNA, 19 nt, Artificial Sequence
  Description of Artificial Sequence: Synthetic oligonucleotide
  Antisense strand to SEQ ID NO: 1782019
uaacaucugcccagacuac

SEQ ID NO: 1782021 - RNA, 19 nt, Artificial Sequence
  Description of Artificial Sequence: Synthetic oligonucleotide
  Sense strand starting at position 2236 of SEQ ID NO: 1562914
ggcagauguuauuccaguc

SEQ ID NO: 1782022 - RNA, 19 nt, Artificial Sequence
  Description of Artificial Sequence: Synthetic oligonucleotide
  Antisense strand to SEQ ID NO: 1782021
gacuggaauaacaucugcc

SEQ ID NO: 1782023 - RNA, 19 nt, Artificial Sequence
  Description of Artificial Sequence: Synthetic oligonucleotide
  Sense strand starting at position 2248 of SEQ ID NO: 1562914
uccaguccucauuacgcaa

SEQ ID NO: 1782024 - RNA, 19 nt, Artificial Sequence
  Description of Artificial Sequence: Synthetic oligonucleotide
  Antisense strand to SEQ ID NO: 1782023
uugcguaaugaggacugga

SEQ ID NO: 1782025 - RNA, 19 nt, Artificial Sequence
  Description of Artificial Sequence: Synthetic oligonucleotide
  Sense strand starting at position 2537 of SEQ ID NO: 1562914
auuggaaagugcuuuauaa

SEQ ID NO: 1782026 - RNA, 19 nt, Artificial Sequence
  Description of Artificial Sequence: Synthetic oligonucleotide
  Antisense strand to SEQ ID NO: 1782025
uuauaaagcacuuuccaau

SEQ ID NO: 1782027 - RNA, 19 nt, Artificial Sequence
  Description of Artificial Sequence: Synthetic oligonucleotide
  Sense strand starting at position 2539 of SEQ ID NO: 1562914
uggaaagugcuuuauaaac

SEQ ID NO: 1782028 - RNA, 19 nt, Artificial Sequence
  Description of Artificial Sequence: Synthetic oligonucleotide
  Antisense strand to SEQ ID NO: 1782027
guuuauaaagcacuuucca

SEQ ID NO: 1782029 - RNA, 19 nt, Artificial Sequence
  Description of Artificial Sequence: Synthetic oligonucleotide
  Sense strand starting at position 2564 of SEQ ID NO: 1562914
gcuccaagaacuuggguuu

SEQ ID NO: 1782030 - RNA, 19 nt, Artificial Sequence
  Description of Artificial Sequence: Synthetic oligonucleotide
  Antisense strand to SEQ ID NO: 1782029
aaacccaaguucuuggagc

SEQ ID NO: 1782031 - RNA, 19 nt, Artificial Sequence
  Description of Artificial Sequence: Synthetic oligonucleotide
  Sense strand starting at position 2567 of SEQ ID NO: 1562914
ccaagaacuuggguuugua

SEQ ID NO: 1782032 - RNA, 19 nt, Artificial Sequence
  Description of Artificial Sequence: Synthetic oligonucleotide
  Antisense strand to SEQ ID NO: 1782031
uacaaacccaaguucuugg

SEQ ID NO: 1782033 - RNA, 19 nt, Artificial Sequence
  Description of Artificial Sequence: Synthetic oligonucleotide
  Sense strand starting at position 2605 of SEQ ID NO: 1562914
cuccaauucuggcuccaga

SEQ ID NO: 1782034 - RNA, 19 nt, Artificial Sequence
  Description of Artificial Sequence: Synthetic oligonucleotide
  Antisense strand to SEQ ID NO: 1782033
ucuggagccagaauuggag

SEQ ID NO: 1782035 - RNA, 19 nt, Artificial Sequence
  Description of Artificial Sequence: Synthetic oligonucleotide
  Sense strand starting at position 2632 of SEQ ID NO: 1562914
gcuggugacccuggauaau

SEQ ID NO: 1782036 - RNA, 19 nt, Artificial Sequence
  Description of Artificial Sequence: Synthetic oligonucleotide
  Antisense strand to SEQ ID NO: 1782035
auuauccagggucaccagc

SEQ ID NO: 1782037 - RNA, 19 nt, Artificial Sequence
  Description of Artificial Sequence: Synthetic oligonucleotide
  Sense strand starting at position 2651 of SEQ ID NO: 1562914
uuaacugaucugugccuca

SEQ ID NO: 1782038 - RNA, 19 nt, Artificial Sequence
  Description of Artificial Sequence: Synthetic oligonucleotide
  Antisense strand to SEQ ID NO: 1782037
ugaggcacagaucaguuaa

SEQ ID NO: 1782039 - RNA, 19 nt, Artificial Sequence
  Description of Artificial Sequence: Synthetic oligonucleotide
  Sense strand starting at position 2718 of SEQ ID NO: 1562914
accgguaaggauuagaguu

SEQ ID NO: 1782040 - RNA, 19 nt, Artificial Sequence
  Description of Artificial Sequence: Synthetic oligonucleotide
  Antisense strand to SEQ ID NO: 1782039
aacucuaauccuuaccggu

SEQ ID NO: 1782041 - RNA, 19 nt, Artificial Sequence
  Description of Artificial Sequence: Synthetic oligonucleotide
  Sense strand starting at position 2741 of SEQ ID NO: 1562914
caaguaacguguuuggaau

SEQ ID NO: 1782042 - RNA, 19 nt, Artificial Sequence
  Description of Artificial Sequence: Synthetic oligonucleotide
  Antisense strand to SEQ ID NO: 1782041
auuccaaacacguuacuug

SEQ ID NO: 1782043 - RNA, 19 nt, Artificial Sequence
  Description of Artificial Sequence: Synthetic oligonucleotide
  Sense strand starting at position 2742 of SEQ ID NO: 1562914
aaguaacguguuuggaaua

SEQ ID NO: 1782044 - RNA, 19 nt, Artificial Sequence
  Description of Artificial Sequence: Synthetic oligonucleotide
  Antisense strand to SEQ ID NO: 1782043
uauuccaaacacguuacuu

SEQ ID NO: 1782045 - RNA, 19 nt, Artificial Sequence
  Description of Artificial Sequence: Synthetic oligonucleotide
  Sense strand starting at position 2832 of SEQ ID NO: 1562914
aauggcaaccgcuauguua

SEQ ID NO: 1782046 - RNA, 19 nt, Artificial Sequence
  Description of Artificial Sequence: Synthetic oligonucleotide
  Antisense strand to SEQ ID NO: 1782045
uaacauagcgguugccauu

SEQ ID NO: 1782047 - RNA, 19 nt, Artificial Sequence
  Description of Artificial Sequence: Synthetic oligonucleotide
  Sense strand starting at position 3157 of SEQ ID NO: 1562914
guguuacugcuuuaaucac

SEQ ID NO: 1782048 - RNA, 19 nt, Artificial Sequence
  Description of Artificial Sequence: Synthetic oligonucleotide
  Antisense strand to SEQ ID NO: 1782047
gugauuaaagcaguaacac

SEQ ID NO: 1782049 - RNA, 19 nt, Artificial Sequence
  Description of Artificial Sequence: Synthetic oligonucleotide
  Sense strand starting at position 3225 of SEQ ID NO: 1562914
uccaucugugccuggaaga

SEQ ID NO: 1782050 - RNA, 19 nt, Artificial Sequence
  Description of Artificial Sequence: Synthetic oligonucleotide
  Antisense strand to SEQ ID NO: 1782049
ucuuccaggcacagaugga

SEQ ID NO: 1782051 - RNA, 19 nt, Artificial Sequence
  Description of Artificial Sequence: Synthetic oligonucleotide
  Sense strand starting at position 3226 of SEQ ID NO: 1562914
ccaucugugccuggaagaa

SEQ ID NO: 1782052 - RNA, 19 nt, Artificial Sequence
  Description of Artificial Sequence: Synthetic oligonucleotide
  Antisense strand to SEQ ID NO: 1782051
uucuuccaggcacagaugg

SEQ ID NO: 1782053 - RNA, 19 nt, Artificial Sequence
  Description of Artificial Sequence: Synthetic oligonucleotide
  Sense strand starting at position 3457 of SEQ ID NO: 1562914
gggcuuugcugaucccaca

SEQ ID NO: 1782054 - RNA, 19 nt, Artificial Sequence
  Description of Artificial Sequence: Synthetic oligonucleotide
  Antisense strand to SEQ ID NO: 1782053
ugugggaucagcaaagccc

SEQ ID NO: 1782055 - RNA, 19 nt, Artificial Sequence
  Description of Artificial Sequence: Synthetic oligonucleotide
  Sense strand starting at position 3722 of SEQ ID NO: 1562914
gugugaguucaggaaggga

SEQ ID NO: 1782056 - RNA, 19 nt, Artificial Sequence
  Description of Artificial Sequence: Synthetic oligonucleotide
  Antisense strand to SEQ ID NO: 1782055
ucccuuccugaacucacac

SEQ ID NO: 1782057 - RNA, 19 nt, Artificial Sequence
  Description of Artificial Sequence: Synthetic oligonucleotide
  Sense strand starting at position 3755 of SEQ ID NO: 1562914
gggaguucagcagggacau

SEQ ID NO: 1782058 - RNA, 19 nt, Artificial Sequence
  Description of Artificial Sequence: Synthetic oligonucleotide
  Antisense strand to SEQ ID NO: 1782057
augucccugcugaacuccc

SEQ ID NO: 1782059 - RNA, 19 nt, Artificial Sequence
  Description of Artificial Sequence: Synthetic oligonucleotide
  Sense strand starting at position 3768 of SEQ ID NO: 1562914
ggacauguuccggagguuu

SEQ ID NO: 1782060 - RNA, 19 nt, Artificial Sequence
  Description of Artificial Sequence: Synthetic oligonucleotide
  Antisense strand to SEQ ID NO: 1782059
aaaccuccggaacaugucc

SEQ ID NO: 1782061 - RNA, 19 nt, Artificial Sequence
  Description of Artificial Sequence: Synthetic oligonucleotide
  Sense strand starting at position 3865 of SEQ ID NO: 1562914
gagggaagaguuugagcaa

SEQ ID NO: 1782062 - RNA, 19 nt, Artificial Sequence
  Description of Artificial Sequence: Synthetic oligonucleotide
  Antisense strand to SEQ ID NO: 1782061
uugcucaaacucuucccuc

SEQ ID NO: 1782063 - RNA, 19 nt, Artificial Sequence
  Description of Artificial Sequence: Synthetic oligonucleotide
  Sense strand starting at position 227 of SEQ ID NO: 1562915
cguggauggacuuagaagu

SEQ ID NO: 1782064 - RNA, 19 nt, Artificial Sequence
  Description of Artificial Sequence: Synthetic oligonucleotide
  Antisense strand to SEQ ID NO: 1782063
acuucuaaguccauccacg

SEQ ID NO: 1782065 - RNA, 19 nt, Artificial Sequence
  Description of Artificial Sequence: Synthetic oligonucleotide
  Sense strand starting at position 307 of SEQ ID NO: 1562915
acagucaguaguugaggaa

SEQ ID NO: 1782066 - RNA, 19 nt, Artificial Sequence
  Description of Artificial Sequence: Synthetic oligonucleotide
  Antisense strand to SEQ ID NO: 1782065
uuccucaacuacugacugu

SEQ ID NO: 1782067 - RNA, 19 nt, Artificial Sequence
  Description of Artificial Sequence: Synthetic oligonucleotide
  Sense strand starting at position 308 of SEQ ID NO: 1562915
cagucaguaguugaggaaa

SEQ ID NO: 1782068 - RNA, 19 nt, Artificial Sequence
  Description of Artificial Sequence: Synthetic oligonucleotide
  Antisense strand to SEQ ID NO: 1782067
uuuccucaacuacugacug

SEQ ID NO: 1782069 - RNA, 19 nt, Artificial Sequence
  Description of Artificial Sequence: Synthetic oligonucleotide
  Sense strand starting at position 331 of SEQ ID NO: 1562915
uacuaaugugugcccguua

SEQ ID NO: 1782070 - RNA, 19 nt, Artificial Sequence
  Description of Artificial Sequence: Synthetic oligonucleotide
  Antisense strand to SEQ ID NO: 1782069
uaacgggcacacauuagua

SEQ ID NO: 1782071 - RNA, 19 nt, Artificial Sequence
  Description of Artificial Sequence: Synthetic oligonucleotide
  Sense strand starting at position 334 of SEQ ID NO: 1562915
uaaugugugcccguuacga

SEQ ID NO: 1782072 - RNA, 19 nt, Artificial Sequence
  Description of Artificial Sequence: Synthetic oligonucleotide
  Antisense strand to SEQ ID NO: 1782071
ucguaacgggcacacauua

SEQ ID NO: 1782073 - RNA, 19 nt, Artificial Sequence
  Description of Artificial Sequence: Synthetic oligonucleotide
  Sense strand starting at position 379 of SEQ ID NO: 1562915
cgaauuaugaggugguggu

SEQ ID NO: 1782074 - RNA, 19 nt, Artificial Sequence
  Description of Artificial Sequence: Synthetic oligonucleotide
  Antisense strand to SEQ ID NO: 1782073
accaccaccucauaauucg

SEQ ID NO: 1782075 - RNA, 19 nt, Artificial Sequence
  Description of Artificial Sequence: Synthetic oligonucleotide
  Sense strand starting at position 398 of SEQ ID NO: 1562915
ggcaguuguaguugauaca

SEQ ID NO: 1782076 - RNA, 19 nt, Artificial Sequence
  Description of Artificial Sequence: Synthetic oligonucleotide
  Antisense strand to SEQ ID NO: 1782075
uguaucaacuacaacugcc

SEQ ID NO: 1782077 - RNA, 19 nt, Artificial Sequence
  Description of Artificial Sequence: Synthetic oligonucleotide
  Sense strand starting at position 399 of SEQ ID NO: 1562915
gcaguuguaguugauacaa

SEQ ID NO: 1782078 - RNA, 19 nt, Artificial Sequence
  Description of Artificial Sequence: Synthetic oligonucleotide
  Antisense strand to SEQ ID NO: 1782077
uuguaucaacuacaacugc

SEQ ID NO: 1782079 - RNA, 19 nt, Artificial Sequence
  Description of Artificial Sequence: Synthetic oligonucleotide
  Sense strand starting at position 410 of SEQ ID NO: 1562915
ugauacaaguguccaggau

SEQ ID NO: 1782080 - RNA, 19 nt, Artificial Sequence
  Description of Artificial Sequence: Synthetic oligonucleotide
  Antisense strand to SEQ ID NO: 1782079
auccuggacacuuguauca

SEQ ID NO: 1782081 - RNA, 19 nt, Artificial Sequence
  Description of Artificial Sequence: Synthetic oligonucleotide
  Sense strand starting at position 481 of SEQ ID NO: 1562915
aggcauacgggugguauua

SEQ ID NO: 1782082 - RNA, 19 nt, Artificial Sequence
  Description of Artificial Sequence: Synthetic oligonucleotide
  Antisense strand to SEQ ID NO: 1782081
uaauaccacccguaugccu

SEQ ID NO: 1782083 - RNA, 19 nt, Artificial Sequence
  Description of Artificial Sequence: Synthetic oligonucleotide
  Sense strand starting at position 901 of SEQ ID NO: 1562915
aacuuaauguguguuggga

SEQ ID NO: 1782084 - RNA, 19 nt, Artificial Sequence
  Description of Artificial Sequence: Synthetic oligonucleotide
  Antisense strand to SEQ ID NO: 1782083
ucccaacacacauuaaguu

SEQ ID NO: 1782085 - RNA, 19 nt, Artificial Sequence
  Description of Artificial Sequence: Synthetic oligonucleotide
  Sense strand starting at position 917 of SEQ ID NO: 1562915
ggaaacuauugggcaaagu

SEQ ID NO: 1782086 - RNA, 19 nt, Artificial Sequence
  Description of Artificial Sequence: Synthetic oligonucleotide
  Antisense strand to SEQ ID NO: 1782085
acuuugcccaauaguuucc

SEQ ID NO: 1782087 - RNA, 19 nt, Artificial Sequence
  Description of Artificial Sequence: Synthetic oligonucleotide
  Sense strand starting at position 1288 of SEQ ID NO: 1562915
ugaggcaucguguauauga

SEQ ID NO: 1782088 - RNA, 19 nt, Artificial Sequence
  Description of Artificial Sequence: Synthetic oligonucleotide
  Antisense strand to SEQ ID NO: 1782087
ucauauacacgaugccuca

SEQ ID NO: 1782089 - RNA, 19 nt, Artificial Sequence
  Description of Artificial Sequence: Synthetic oligonucleotide
  Sense strand starting at position 1290 of SEQ ID NO: 1562915
aggcaucguguauaugaaa

SEQ ID NO: 1782090 - RNA, 19 nt, Artificial Sequence
  Description of Artificial Sequence: Synthetic oligonucleotide
  Antisense strand to SEQ ID NO: 1782089
uuucauauacacgaugccu

SEQ ID NO: 1782091 - RNA, 19 nt, Artificial Sequence
  Description of Artificial Sequence: Synthetic oligonucleotide
  Sense strand starting at position 1427 of SEQ ID NO: 1562915
cuaaacuucgguugucuca

SEQ ID NO: 1782092 - RNA, 19 nt, Artificial Sequence
  Description of Artificial Sequence: Synthetic oligonucleotide
  Antisense strand to SEQ ID NO: 1782091
ugagacaaccgaaguuuag

SEQ ID NO: 1782093 - RNA, 19 nt, Artificial Sequence
  Description of Artificial Sequence: Synthetic oligonucleotide
  Sense strand starting at position 1438 of SEQ ID NO: 1562915
uugucucaacucuaagaug

SEQ ID NO: 1782094 - RNA, 19 nt, Artificial Sequence
  Description of Artificial Sequence: Synthetic oligonucleotide
  Antisense strand to SEQ ID NO: 1782093
caucuuagaguugagacaa

SEQ ID NO: 1782095 - RNA, 19 nt, Artificial Sequence
  Description of Artificial Sequence: Synthetic oligonucleotide
  Sense strand starting at position 1867 of SEQ ID NO: 1562915
augaguucguccagggaga

SEQ ID NO: 1782096 - RNA, 19 nt, Artificial Sequence
  Description of Artificial Sequence: Synthetic oligonucleotide
  Antisense strand to SEQ ID NO: 1782095
ucucccuggacgaacucau

SEQ ID NO: 1782097 - RNA, 19 nt, Artificial Sequence
  Description of Artificial Sequence: Synthetic oligonucleotide
  Sense strand starting at position 1868 of SEQ ID NO: 1562915
ugaguucguccagggagau

SEQ ID NO: 1782098 - RNA, 19 nt, Artificial Sequence
  Description of Artificial Sequence: Synthetic oligonucleotide
  Antisense strand to SEQ ID NO: 1782097
aucucccuggacgaacuca

SEQ ID NO: 1782099 - RNA, 19 nt, Artificial Sequence
  Description of Artificial Sequence: Synthetic oligonucleotide
  Sense strand starting at position 1869 of SEQ ID NO: 1562915
gaguucguccagggagaug

SEQ ID NO: 1782100 - RNA, 19 nt, Artificial Sequence
  Description of Artificial Sequence: Synthetic oligonucleotide
  Antisense strand to SEQ ID NO: 1782099
caucucccuggacgaacuc

SEQ ID NO: 1782101 - RNA, 19 nt, Artificial Sequence
  Description of Artificial Sequence: Synthetic oligonucleotide
  Sense strand starting at position 1881 of SEQ ID NO: 1562915
ggagauguccgccaucuug

SEQ ID NO: 1782102 - RNA, 19 nt, Artificial Sequence
  Description of Artificial Sequence: Synthetic oligonucleotide
  Antisense strand to SEQ ID NO: 1782101
caagauggcggacaucucc

SEQ ID NO: 1782103 - RNA, 19 nt, Artificial Sequence
  Description of Artificial Sequence: Synthetic oligonucleotide
  Sense strand starting at position 2072 of SEQ ID NO: 1562915
ugcucaucugcauacggaa

SEQ ID NO: 1782104 - RNA, 19 nt, Artificial Sequence
  Description of Artificial Sequence: Synthetic oligonucleotide
  Antisense strand to SEQ ID NO: 1782103
uuccguaugcagaugagca

SEQ ID NO: 1782105 - RNA, 19 nt, Artificial Sequence
  Description of Artificial Sequence: Synthetic oligonucleotide
  Sense strand starting at position 2085 of SEQ ID NO: 1562915
acggaaguucggcacauua

SEQ ID NO: 1782106 - RNA, 19 nt, Artificial Sequence
  Description of Artificial Sequence: Synthetic oligonucleotide
  Antisense strand to SEQ ID NO: 1782105
uaaugugccgaacuuccgu

SEQ ID NO: 1782107 - RNA, 19 nt, Artificial Sequence
  Description of Artificial Sequence: Synthetic oligonucleotide
  Sense strand starting at position 2087 of SEQ ID NO: 1562915
ggaaguucggcacauuaug

SEQ ID NO: 1782108 - RNA, 19 nt, Artificial Sequence
  Description of Artificial Sequence: Synthetic oligonucleotide
  Antisense strand to SEQ ID NO: 1782107
cauaaugugccgaacuucc

SEQ ID NO: 1782109 - RNA, 19 nt, Artificial Sequence
  Description of Artificial Sequence: Synthetic oligonucleotide
  Sense strand starting at position 2207 of SEQ ID NO: 1562915
agucaacuacgauagucau

SEQ ID NO: 1782110 - RNA, 19 nt, Artificial Sequence
  Description of Artificial Sequence: Synthetic oligonucleotide
  Antisense strand to SEQ ID NO: 1782109
augacuaucguaguugacu

SEQ ID NO: 1782111 - RNA, 19 nt, Artificial Sequence
  Description of Artificial Sequence: Synthetic oligonucleotide
  Sense strand starting at position 2622 of SEQ ID NO: 1562915
uaagguugcccacaguauu

SEQ ID NO: 1782112 - RNA, 19 nt, Artificial Sequence
  Description of Artificial Sequence: Synthetic oligonucleotide
  Antisense strand to SEQ ID NO: 1782111
aauacugugggcaaccuua

SEQ ID NO: 1782113 - RNA, 19 nt, Artificial Sequence
  Description of Artificial Sequence: Synthetic oligonucleotide
  Sense strand starting at position 2696 of SEQ ID NO: 1562915
cccaaacuucugcguauaa

SEQ ID NO: 1782114 - RNA, 19 nt, Artificial Sequence
  Description of Artificial Sequence: Synthetic oligonucleotide
  Antisense strand to SEQ ID NO: 1782113
uuauacgcagaaguuuggg

SEQ ID NO: 1782115 - RNA, 19 nt, Artificial Sequence
  Description of Artificial Sequence: Synthetic oligonucleotide
  Sense strand starting at position 2697 of SEQ ID NO: 1562915
ccaaacuucugcguauaac

SEQ ID NO: 1782116 - RNA, 19 nt, Artificial Sequence
  Description of Artificial Sequence: Synthetic oligonucleotide
  Antisense strand to SEQ ID NO: 1782115
guuauacgcagaaguuugg

SEQ ID NO: 1782117 - RNA, 19 nt, Artificial Sequence
  Description of Artificial Sequence: Synthetic oligonucleotide
  Sense strand starting at position 2769 of SEQ ID NO: 1562915
caguucgugacagcguuua

SEQ ID NO: 1782118 - RNA, 19 nt, Artificial Sequence
  Description of Artificial Sequence: Synthetic oligonucleotide
  Antisense strand to SEQ ID NO: 1782117
uaaacgcugucacgaacug

SEQ ID NO: 1782119 - RNA, 19 nt, Artificial Sequence
  Description of Artificial Sequence: Synthetic oligonucleotide
  Sense strand starting at position 2771 of SEQ ID NO: 1562915
guucgugacagcguuuaau

SEQ ID NO: 1782120 - RNA, 19 nt, Artificial Sequence
  Description of Artificial Sequence: Synthetic oligonucleotide
  Antisense strand to SEQ ID NO: 1782119
auuaaacgcugucacgaac

SEQ ID NO: 1782121 - RNA, 19 nt, Artificial Sequence
  Description of Artificial Sequence: Synthetic oligonucleotide
  Sense strand starting at position 2774 of SEQ ID NO: 1562915
cgugacagcguuuaauaug

SEQ ID NO: 1782122 - RNA, 19 nt, Artificial Sequence
  Description of Artificial Sequence: Synthetic oligonucleotide
  Antisense strand to SEQ ID NO: 1782121
cauauuaaacgcugucacg

SEQ ID NO: 1782123 - RNA, 19 nt, Artificial Sequence
  Description of Artificial Sequence: Synthetic oligonucleotide
  Sense strand starting at position 2815 of SEQ ID NO: 1562915
agggcguugggagaguuaa

SEQ ID NO: 1782124 - RNA, 19 nt, Artificial Sequence
  Description of Artificial Sequence: Synthetic oligonucleotide
  Antisense strand to SEQ ID NO: 1782123
uuaacucucccaacgcccu

SEQ ID NO: 1782125 - RNA, 19 nt, Artificial Sequence
  Description of Artificial Sequence: Synthetic oligonucleotide
  Sense strand starting at position 2852 of SEQ ID NO: 1562915
guguuaaauacagggaaug

SEQ ID NO: 1782126 - RNA, 19 nt, Artificial Sequence
  Description of Artificial Sequence: Synthetic oligonucleotide
  Antisense strand to SEQ ID NO: 1782125
cauucccuguauuuaacac

SEQ ID NO: 1782127 - RNA, 19 nt, Artificial Sequence
  Description of Artificial Sequence: Synthetic oligonucleotide
  Sense strand starting at position 2919 of SEQ ID NO: 1562915
guagguguucggcacauau

SEQ ID NO: 1782128 - RNA, 19 nt, Artificial Sequence
  Description of Artificial Sequence: Synthetic oligonucleotide
  Antisense strand to SEQ ID NO: 1782127
auaugugccgaacaccuac

SEQ ID NO: 1782129 - RNA, 19 nt, Artificial Sequence
  Description of Artificial Sequence: Synthetic oligonucleotide
  Sense strand starting at position 2921 of SEQ ID NO: 1562915
agguguucggcacauauuu

SEQ ID NO: 1782130 - RNA, 19 nt, Artificial Sequence
  Description of Artificial Sequence: Synthetic oligonucleotide
  Antisense strand to SEQ ID NO: 1782129
aaauaugugccgaacaccu

SEQ ID NO: 1782131 - RNA, 19 nt, Artificial Sequence
  Description of Artificial Sequence: Synthetic oligonucleotide
  Sense strand starting at position 3923 of SEQ ID NO: 1562915
cauuuagagcuguguugau

SEQ ID NO: 1782132 - RNA, 19 nt, Artificial Sequence
  Description of Artificial Sequence: Synthetic oligonucleotide
  Antisense strand to SEQ ID NO: 1782131
aucaacacagcucuaaaug

SEQ ID NO: 1782133 - RNA, 19 nt, Artificial Sequence
  Description of Artificial Sequence: Synthetic oligonucleotide
  Sense strand starting at position 3953 of SEQ ID NO: 1562915
uucguauagguaggugaua

SEQ ID NO: 1782134 - RNA, 19 nt, Artificial Sequence
  Description of Artificial Sequence: Synthetic oligonucleotide
  Antisense strand to SEQ ID NO: 1782133
uaucaccuaccuauacgaa

SEQ ID NO: 1782135 - RNA, 19 nt, Artificial Sequence
  Description of Artificial Sequence: Synthetic oligonucleotide
  Sense strand starting at position 3955 of SEQ ID NO: 1562915
cguauagguaggugauacu

SEQ ID NO: 1782136 - RNA, 19 nt, Artificial Sequence
  Description of Artificial Sequence: Synthetic oligonucleotide
  Antisense strand to SEQ ID NO: 1782135
aguaucaccuaccuauacg

SEQ ID NO: 1782137 - RNA, 19 nt, Artificial Sequence
  Description of Artificial Sequence: Synthetic oligonucleotide
  Sense strand starting at position 3964 of SEQ ID NO: 1562915
aggugauacugccugugaa

SEQ ID NO: 1782138 - RNA, 19 nt, Artificial Sequence
  Description of Artificial Sequence: Synthetic oligonucleotide
  Antisense strand to SEQ ID NO: 1782137
uucacaggcaguaucaccu

SEQ ID NO: 1782139 - RNA, 19 nt, Artificial Sequence
  Description of Artificial Sequence: Synthetic oligonucleotide
  Sense strand starting at position 3965 of SEQ ID NO: 1562915
ggugauacugccugugaau

SEQ ID NO: 1782140 - RNA, 19 nt, Artificial Sequence
  Description of Artificial Sequence: Synthetic oligonucleotide
  Antisense strand to SEQ ID NO: 1782139
auucacaggcaguaucacc

SEQ ID NO: 1782141 - RNA, 19 nt, Artificial Sequence
  Description of Artificial Sequence: Synthetic oligonucleotide
  Sense strand starting at position 3967 of SEQ ID NO: 1562915
ugauacugccugugaauuc

SEQ ID NO: 1782142 - RNA, 19 nt, Artificial Sequence
  Description of Artificial Sequence: Synthetic oligonucleotide
  Antisense strand to SEQ ID NO: 1782141
gaauucacaggcaguauca

SEQ ID NO: 1782143 - RNA, 19 nt, Artificial Sequence
  Description of Artificial Sequence: Synthetic oligonucleotide
  Sense strand starting at position 637 of SEQ ID NO: 1562916
uaaugaucuccacguugcu

SEQ ID NO: 1782144 - RNA, 19 nt, Artificial Sequence
  Description of Artificial Sequence: Synthetic oligonucleotide
  Antisense strand to SEQ ID NO: 1782143
agcaacguggagaucauua

SEQ ID NO: 1782145 - RNA, 19 nt, Artificial Sequence
  Description of Artificial Sequence: Synthetic oligonucleotide
  Sense strand starting at position 691 of SEQ ID NO: 1562916
gaucuaucagcuggcacau

SEQ ID NO: 1782146 - RNA, 19 nt, Artificial Sequence
  Description of Artificial Sequence: Synthetic oligonucleotide
  Antisense strand to SEQ ID NO: 1782145
augugccagcugauagauc

SEQ ID NO: 1782147 - RNA, 19 nt, Artificial Sequence
  Description of Artificial Sequence: Synthetic oligonucleotide
  Sense strand starting at position 872 of SEQ ID NO: 1562916
guagcaaucccacacguuu

SEQ ID NO: 1782148 - RNA, 19 nt, Artificial Sequence
  Description of Artificial Sequence: Synthetic oligonucleotide
  Antisense strand to SEQ ID NO: 1782147
aaacgugugggauugcuac

SEQ ID NO: 1782149 - RNA, 19 nt, Artificial Sequence
  Description of Artificial Sequence: Synthetic oligonucleotide
  Sense strand starting at position 1440 of SEQ ID NO: 1562916
acuacauacgucuagaacu

SEQ ID NO: 1782150 - RNA, 19 nt, Artificial Sequence
  Description of Artificial Sequence: Synthetic oligonucleotide
  Antisense strand to SEQ ID NO: 1782149
aguucuagacguauguagu

SEQ ID NO: 1782151 - RNA, 19 nt, Artificial Sequence
  Description of Artificial Sequence: Synthetic oligonucleotide
  Sense strand starting at position 1606 of SEQ ID NO: 1562916
uggaacauuugcugaagga

SEQ ID NO: 1782152 - RNA, 19 nt, Artificial Sequence
  Description of Artificial Sequence: Synthetic oligonucleotide
  Antisense strand to SEQ ID NO: 1782151
uccuucagcaaauguucca

SEQ ID NO: 1782153 - RNA, 19 nt, Artificial Sequence
  Description of Artificial Sequence: Synthetic oligonucleotide
  Sense strand starting at position 2045 of SEQ ID NO: 1562916
uggugugugcgcguuucua

SEQ ID NO: 1782154 - RNA, 19 nt, Artificial Sequence
  Description of Artificial Sequence: Synthetic oligonucleotide
  Antisense strand to SEQ ID NO: 1782153
uagaaacgcgcacacacca

SEQ ID NO: 1782155 - RNA, 19 nt, Artificial Sequence
  Description of Artificial Sequence: Synthetic oligonucleotide
  Sense strand starting at position 2046 of SEQ ID NO: 1562916
ggugugugcgcguuucuau

SEQ ID NO: 1782156 - RNA, 19 nt, Artificial Sequence
  Description of Artificial Sequence: Synthetic oligonucleotide
  Antisense strand to SEQ ID NO: 1782155
auagaaacgcgcacacacc

SEQ ID NO: 1782157 - RNA, 19 nt, Artificial Sequence
  Description of Artificial Sequence: Synthetic oligonucleotide
  Sense strand starting at position 2047 of SEQ ID NO: 1562916
gugugugcgcguuucuaua

SEQ ID NO: 1782158 - RNA, 19 nt, Artificial Sequence
  Description of Artificial Sequence: Synthetic oligonucleotide
  Antisense strand to SEQ ID NO: 1782157
uauagaaacgcgcacacac

SEQ ID NO: 1782159 - RNA, 19 nt, Artificial Sequence
  Description of Artificial Sequence: Synthetic oligonucleotide
  Sense strand starting at position 2109 of SEQ ID NO: 1562916
gcaguauuucugcguggca

SEQ ID NO: 1782160 - RNA, 19 nt, Artificial Sequence
  Description of Artificial Sequence: Synthetic oligonucleotide
  Antisense strand to SEQ ID NO: 1782159
ugccacgcagaaauacugc

SEQ ID NO: 1782161 - RNA, 19 nt, Artificial Sequence
  Description of Artificial Sequence: Synthetic oligonucleotide
  Sense strand starting at position 2172 of SEQ ID NO: 1562916
gcccacuucuauguggaga

SEQ ID NO: 1782162 - RNA, 19 nt, Artificial Sequence
  Description of Artificial Sequence: Synthetic oligonucleotide
  Antisense strand to SEQ ID NO: 1782161
ucuccacauagaagugggc

SEQ ID NO: 1782163 - RNA, 19 nt, Artificial Sequence
  Description of Artificial Sequence: Synthetic oligonucleotide
  Sense strand starting at position 2206 of SEQ ID NO: 1562916
agggucuuagggugaaauu

SEQ ID NO: 1782164 - RNA, 19 nt, Artificial Sequence
  Description of Artificial Sequence: Synthetic oligonucleotide
  Antisense strand to SEQ ID NO: 1782163
aauuucacccuaagacccu

SEQ ID NO: 1782165 - RNA, 19 nt, Artificial Sequence
  Description of Artificial Sequence: Synthetic oligonucleotide
  Sense strand starting at position 2234 of SEQ ID NO: 1562916
gcauaucacucagugggua

SEQ ID NO: 1782166 - RNA, 19 nt, Artificial Sequence
  Description of Artificial Sequence: Synthetic oligonucleotide
  Antisense strand to SEQ ID NO: 1782165
uacccacugagugauaugc

SEQ ID NO: 1782167 - RNA, 19 nt, Artificial Sequence
  Description of Artificial Sequence: Synthetic oligonucleotide
  Sense strand starting at position 2247 of SEQ ID NO: 1562916
uggguacuguugugaccau

SEQ ID NO: 1782168 - RNA, 19 nt, Artificial Sequence
  Description of Artificial Sequence: Synthetic oligonucleotide
  Antisense strand to SEQ ID NO: 1782167
auggucacaacaguaccca

SEQ ID NO: 1782169 - RNA, 19 nt, Artificial Sequence
  Description of Artificial Sequence: Synthetic oligonucleotide
  Sense strand starting at position 2259 of SEQ ID NO: 1562916
ugaccauggcuguguuaac

SEQ ID NO: 1782170 - RNA, 19 nt, Artificial Sequence
  Description of Artificial Sequence: Synthetic oligonucleotide
  Antisense strand to SEQ ID NO: 1782169
guuaacacagccaugguca

SEQ ID NO: 1782171 - RNA, 19 nt, Artificial Sequence
  Description of Artificial Sequence: Synthetic oligonucleotide
  Sense strand starting at position 2260 of SEQ ID NO: 1562916
gaccauggcuguguuaaca

SEQ ID NO: 1782172 - RNA, 19 nt, Artificial Sequence
  Description of Artificial Sequence: Synthetic oligonucleotide
  Antisense strand to SEQ ID NO: 1782171
uguuaacacagccaugguc

SEQ ID NO: 1782173 - RNA, 19 nt, Artificial Sequence
  Description of Artificial Sequence: Synthetic oligonucleotide
  Sense strand starting at position 2289 of SEQ ID NO: 1562916
aggagacuucccugccaca

SEQ ID NO: 1782174 - RNA, 19 nt, Artificial Sequence
  Description of Artificial Sequence: Synthetic oligonucleotide
  Antisense strand to SEQ ID NO: 1782173
uguggcagggaagucuccu

SEQ ID NO: 1782175 - RNA, 19 nt, Artificial Sequence
  Description of Artificial Sequence: Synthetic oligonucleotide
  Sense strand starting at position 2365 of SEQ ID NO: 1562916
ugggcacugucgcaauauu

SEQ ID NO: 1782176 - RNA, 19 nt, Artificial Sequence
  Description of Artificial Sequence: Synthetic oligonucleotide
  Antisense strand to SEQ ID NO: 1782175
aauauugcgacagugccca

SEQ ID NO: 1782177 - RNA, 19 nt, Artificial Sequence
  Description of Artificial Sequence: Synthetic oligonucleotide
  Sense strand starting at position 2392 of SEQ ID NO: 1562916
gcaucauucucuggcucga

SEQ ID NO: 1782178 - RNA, 19 nt, Artificial Sequence
  Description of Artificial Sequence: Synthetic oligonucleotide
  Antisense strand to SEQ ID NO: 1782177
ucgagccagagaaugaugc

SEQ ID NO: 1782179 - RNA, 19 nt, Artificial Sequence
  Description of Artificial Sequence: Synthetic oligonucleotide
  Sense strand starting at position 2476 of SEQ ID NO: 1562916
gggugugucauugcgucuu

SEQ ID NO: 1782180 - RNA, 19 nt, Artificial Sequence
  Description of Artificial Sequence: Synthetic oligonucleotide
  Antisense strand to SEQ ID NO: 1782179
aagacgcaaugacacaccc

SEQ ID NO: 1782181 - RNA, 19 nt, Artificial Sequence
  Description of Artificial Sequence: Synthetic oligonucleotide
  Sense strand starting at position 2490 of SEQ ID NO: 1562916
gucuuucccuccucagagu

SEQ ID NO: 1782182 - RNA, 19 nt, Artificial Sequence
  Description of Artificial Sequence: Synthetic oligonucleotide
  Antisense strand to SEQ ID NO: 1782181
acucugaggagggaaagac

SEQ ID NO: 1782183 - RNA, 19 nt, Artificial Sequence
  Description of Artificial Sequence: Synthetic oligonucleotide
  Sense strand starting at position 2614 of SEQ ID NO: 1562916
agaggucaguccguuaaag

SEQ ID NO: 1782184 - RNA, 19 nt, Artificial Sequence
  Description of Artificial Sequence: Synthetic oligonucleotide
  Antisense strand to SEQ ID NO: 1782183
cuuuaacggacugaccucu

SEQ ID NO: 1782185 - RNA, 19 nt, Artificial Sequence
  Description of Artificial Sequence: Synthetic oligonucleotide
  Sense strand starting at position 2616 of SEQ ID NO: 1562916
aggucaguccguuaaagca

SEQ ID NO: 1782186 - RNA, 19 nt, Artificial Sequence
  Description of Artificial Sequence: Synthetic oligonucleotide
  Antisense strand to SEQ ID NO: 1782185
ugcuuuaacggacugaccu

SEQ ID NO: 1782187 - RNA, 19 nt, Artificial Sequence
  Description of Artificial Sequence: Synthetic oligonucleotide
  Sense strand starting at position 2836 of SEQ ID NO: 1562916
ggccgucacugaccugaaa

SEQ ID NO: 1782188 - RNA, 19 nt, Artificial Sequence
  Description of Artificial Sequence: Synthetic oligonucleotide
  Antisense strand to SEQ ID NO: 1782187
uuucaggucagugacggcc

SEQ ID NO: 1782189 - RNA, 19 nt, Artificial Sequence
  Description of Artificial Sequence: Synthetic oligonucleotide
  Sense strand starting at position 2975 of SEQ ID NO: 1562916
agagaagaauggugguagu

SEQ ID NO: 1782190 - RNA, 19 nt, Artificial Sequence
  Description of Artificial Sequence: Synthetic oligonucleotide
  Antisense strand to SEQ ID NO: 1782189
acuaccaccauucuucucu

SEQ ID NO: 1782191 - RNA, 19 nt, Artificial Sequence
  Description of Artificial Sequence: Synthetic oligonucleotide
  Sense strand starting at position 2978 of SEQ ID NO: 1562916
gaagaauggugguaguuac

SEQ ID NO: 1782192 - RNA, 19 nt, Artificial Sequence
  Description of Artificial Sequence: Synthetic oligonucleotide
  Antisense strand to SEQ ID NO: 1782191
guaacuaccaccauucuuc

SEQ ID NO: 1782193 - RNA, 19 nt, Artificial Sequence
  Description of Artificial Sequence: Synthetic oligonucleotide
  Sense strand starting at position 2989 of SEQ ID NO: 1562916
guaguuacccucuguaacu

SEQ ID NO: 1782194 - RNA, 19 nt, Artificial Sequence
  Description of Artificial Sequence: Synthetic oligonucleotide
  Antisense strand to SEQ ID NO: 1782193
aguuacagaggguaacuac

SEQ ID NO: 1782195 - RNA, 19 nt, Artificial Sequence
  Description of Artificial Sequence: Synthetic oligonucleotide
  Sense strand starting at position 3018 of SEQ ID NO: 1562916
guaccugaccuguggcuua

SEQ ID NO: 1782196 - RNA, 19 nt, Artificial Sequence
  Description of Artificial Sequence: Synthetic oligonucleotide
  Antisense strand to SEQ ID NO: 1782195
uaagccacaggucagguac

SEQ ID NO: 1782197 - RNA, 19 nt, Artificial Sequence
  Description of Artificial Sequence: Synthetic oligonucleotide
  Sense strand starting at position 3147 of SEQ ID NO: 1562916
ggugcuacaccuugccaaa

SEQ ID NO: 1782198 - RNA, 19 nt, Artificial Sequence
  Description of Artificial Sequence: Synthetic oligonucleotide
  Antisense strand to SEQ ID NO: 1782197
uuuggcaagguguagcacc

SEQ ID NO: 1782199 - RNA, 19 nt, Artificial Sequence
  Description of Artificial Sequence: Synthetic oligonucleotide
  Sense strand starting at position 3190 of SEQ ID NO: 1562916
guaguuaacuccuaugcau

SEQ ID NO: 1782200 - RNA, 19 nt, Artificial Sequence
  Description of Artificial Sequence: Synthetic oligonucleotide
  Antisense strand to SEQ ID NO: 1782199
augcauaggaguuaacuac

SEQ ID NO: 1782201 - RNA, 19 nt, Artificial Sequence
  Description of Artificial Sequence: Synthetic oligonucleotide
  Sense strand starting at position 3226 of SEQ ID NO: 1562916
caacuuucccgaggaagac

SEQ ID NO: 1782202 - RNA, 19 nt, Artificial Sequence
  Description of Artificial Sequence: Synthetic oligonucleotide
  Antisense strand to SEQ ID NO: 1782201
gucuuccucgggaaaguug

SEQ ID NO: 1782203 - RNA, 19 nt, Artificial Sequence
  Description of Artificial Sequence: Synthetic oligonucleotide
  Sense strand starting at position 3274 of SEQ ID NO: 1562916
acuguuaugugcccucaca

SEQ ID NO: 1782204 - RNA, 19 nt, Artificial Sequence
  Description of Artificial Sequence: Synthetic oligonucleotide
  Antisense strand to SEQ ID NO: 1782203
ugugagggcacauaacagu

SEQ ID NO: 1782205 - RNA, 19 nt, Artificial Sequence
  Description of Artificial Sequence: Synthetic oligonucleotide
  Sense strand starting at position 3316 of SEQ ID NO: 1562916
acaagcuguagucaguuau

SEQ ID NO: 1782206 - RNA, 19 nt, Artificial Sequence
  Description of Artificial Sequence: Synthetic oligonucleotide
  Antisense strand to SEQ ID NO: 1782205
auaacugacuacagcuugu

SEQ ID NO: 1782207 - RNA, 19 nt, Artificial Sequence
  Description of Artificial Sequence: Synthetic oligonucleotide
  Sense strand starting at position 3327 of SEQ ID NO: 1562916
ucaguuauuugguguccca

SEQ ID NO: 1782208 - RNA, 19 nt, Artificial Sequence
  Description of Artificial Sequence: Synthetic oligonucleotide
  Antisense strand to SEQ ID NO: 1782207
ugggacaccaaauaacuga

SEQ ID NO: 1782209 - RNA, 19 nt, Artificial Sequence
  Description of Artificial Sequence: Synthetic oligonucleotide
  Sense strand starting at position 3387 of SEQ ID NO: 1562916
gccuguuucggcccacaau

SEQ ID NO: 1782210 - RNA, 19 nt, Artificial Sequence
  Description of Artificial Sequence: Synthetic oligonucleotide
  Antisense strand to SEQ ID NO: 1782209
auugugggccgaaacaggc

SEQ ID NO: 1782211 - RNA, 19 nt, Artificial Sequence
  Description of Artificial Sequence: Synthetic oligonucleotide
  Sense strand starting at position 3388 of SEQ ID NO: 1562916
ccuguuucggcccacaauu

SEQ ID NO: 1782212 - RNA, 19 nt, Artificial Sequence
  Description of Artificial Sequence: Synthetic oligonucleotide
  Antisense strand to SEQ ID NO: 1782211
aauugugggccgaaacagg

SEQ ID NO: 1782213 - RNA, 19 nt, Artificial Sequence
  Description of Artificial Sequence: Synthetic oligonucleotide
  Sense strand starting at position 3419 of SEQ ID NO: 1562916
ccugaaacaugaugaacaa

SEQ ID NO: 1782214 - RNA, 19 nt, Artificial Sequence
  Description of Artificial Sequence: Synthetic oligonucleotide
  Antisense strand to SEQ ID NO: 1782213
uuguucaucauguuucagg

SEQ ID NO: 1782215 - RNA, 19 nt, Artificial Sequence
  Description of Artificial Sequence: Synthetic oligonucleotide
  Sense strand starting at position 3981 of SEQ ID NO: 1562916
gguggucguaagugcuaua

SEQ ID NO: 1782216 - RNA, 19 nt, Artificial Sequence
  Description of Artificial Sequence: Synthetic oligonucleotide
  Antisense strand to SEQ ID NO: 1782215
uauagcacuuacgaccacc

SEQ ID NO: 1782217 - RNA, 19 nt, Artificial Sequence
  Description of Artificial Sequence: Synthetic oligonucleotide
  Sense strand starting at position 561 of SEQ ID NO: 1562917
ccaggcuuuggcuaaauga

SEQ ID NO: 1782218 - RNA, 19 nt, Artificial Sequence
  Description of Artificial Sequence: Synthetic oligonucleotide
  Antisense strand to SEQ ID NO: 1782217
ucauuuagccaaagccugg

SEQ ID NO: 1782219 - RNA, 19 nt, Artificial Sequence
  Description of Artificial Sequence: Synthetic oligonucleotide
  Sense strand starting at position 652 of SEQ ID NO: 1562917
gaaagagagugaugugaca

SEQ ID NO: 1782220 - RNA, 19 nt, Artificial Sequence
  Description of Artificial Sequence: Synthetic oligonucleotide
  Antisense strand to SEQ ID NO: 1782219
ugucacaucacucucuuuc

SEQ ID NO: 1782221 - RNA, 19 nt, Artificial Sequence
  Description of Artificial Sequence: Synthetic oligonucleotide
  Sense strand starting at position 755 of SEQ ID NO: 1562917
agagaaggcgcacaaauau

SEQ ID NO: 1782222 - RNA, 19 nt, Artificial Sequence
  Description of Artificial Sequence: Synthetic oligonucleotide
  Antisense strand to SEQ ID NO: 1782221
auauuugugcgccuucucu

SEQ ID NO: 1782223 - RNA, 19 nt, Artificial Sequence
  Description of Artificial Sequence: Synthetic oligonucleotide
  Sense strand starting at position 794 of SEQ ID NO: 1562917
ugaaccuccugacaguuaa

SEQ ID NO: 1782224 - RNA, 19 nt, Artificial Sequence
  Description of Artificial Sequence: Synthetic oligonucleotide
  Antisense strand to SEQ ID NO: 1782223
uuaacugucaggagguuca

SEQ ID NO: 1782225 - RNA, 19 nt, Artificial Sequence
  Description of Artificial Sequence: Synthetic oligonucleotide
  Sense strand starting at position 801 of SEQ ID NO: 1562917
ccugacaguuaauucugua

SEQ ID NO: 1782226 - RNA, 19 nt, Artificial Sequence
  Description of Artificial Sequence: Synthetic oligonucleotide
  Antisense strand to SEQ ID NO: 1782225
uacagaauuaacugucagg

SEQ ID NO: 1782227 - RNA, 19 nt, Artificial Sequence
  Description of Artificial Sequence: Synthetic oligonucleotide
  Sense strand starting at position 805 of SEQ ID NO: 1562917
acaguuaauucuguacuac

SEQ ID NO: 1782228 - RNA, 19 nt, Artificial Sequence
  Description of Artificial Sequence: Synthetic oligonucleotide
  Antisense strand to SEQ ID NO: 1782227
guaguacagaauuaacugu

SEQ ID NO: 1782229 - RNA, 19 nt, Artificial Sequence
  Description of Artificial Sequence: Synthetic oligonucleotide
  Sense strand starting at position 1250 of SEQ ID NO: 1562917
gucaguaacuugccugcaa

SEQ ID NO: 1782230 - RNA, 19 nt, Artificial Sequence
  Description of Artificial Sequence: Synthetic oligonucleotide
  Antisense strand to SEQ ID NO: 1782229
uugcaggcaaguuacugac

SEQ ID NO: 1782231 - RNA, 19 nt, Artificial Sequence
  Description of Artificial Sequence: Synthetic oligonucleotide
  Sense strand starting at position 1251 of SEQ ID NO: 1562917
ucaguaacuugccugcaau

SEQ ID NO: 1782232 - RNA, 19 nt, Artificial Sequence
  Description of Artificial Sequence: Synthetic oligonucleotide
  Antisense strand to SEQ ID NO: 1782231
auugcaggcaaguuacuga

SEQ ID NO: 1782233 - RNA, 19 nt, Artificial Sequence
  Description of Artificial Sequence: Synthetic oligonucleotide
  Sense strand starting at position 1543 of SEQ ID NO: 1562917
cguugagcuuccucucaaa

SEQ ID NO: 1782234 - RNA, 19 nt, Artificial Sequence
  Description of Artificial Sequence: Synthetic oligonucleotide
  Antisense strand to SEQ ID NO: 1782233
uuugagaggaagcucaacg

SEQ ID NO: 1782235 - RNA, 19 nt, Artificial Sequence
  Description of Artificial Sequence: Synthetic oligonucleotide
  Sense strand starting at position 2194 of SEQ ID NO: 1562917
cgugcaaucccgccugauu

SEQ ID NO: 1782236 - RNA, 19 nt, Artificial Sequence
  Description of Artificial Sequence: Synthetic oligonucleotide
  Antisense strand to SEQ ID NO: 1782235
aaucaggcgggauugcacg

SEQ ID NO: 1782237 - RNA, 19 nt, Artificial Sequence
  Description of Artificial Sequence: Synthetic oligonucleotide
  Sense strand starting at position 2196 of SEQ ID NO: 1562917
ugcaaucccgccugauuau

SEQ ID NO: 1782238 - RNA, 19 nt, Artificial Sequence
  Description of Artificial Sequence: Synthetic oligonucleotide
  Antisense strand to SEQ ID NO: 1782237
auaaucaggcgggauugca

SEQ ID NO: 1782239 - RNA, 19 nt, Artificial Sequence
  Description of Artificial Sequence: Synthetic oligonucleotide
  Sense strand starting at position 2352 of SEQ ID NO: 1562917
uuaaguguuccggagacaa

SEQ ID NO: 1782240 - RNA, 19 nt, Artificial Sequence
  Description of Artificial Sequence: Synthetic oligonucleotide
  Antisense strand to SEQ ID NO: 1782239
uugucuccggaacacuuaa

SEQ ID NO: 1782241 - RNA, 19 nt, Artificial Sequence
  Description of Artificial Sequence: Synthetic oligonucleotide
  Sense strand starting at position 2396 of SEQ ID NO: 1562917
ugggacuguucugagauga

SEQ ID NO: 1782242 - RNA, 19 nt, Artificial Sequence
  Description of Artificial Sequence: Synthetic oligonucleotide
  Antisense strand to SEQ ID NO: 1782241
ucaucucagaacaguccca

SEQ ID NO: 1782243 - RNA, 19 nt, Artificial Sequence
  Description of Artificial Sequence: Synthetic oligonucleotide
  Sense strand starting at position 2400 of SEQ ID NO: 1562917
acuguucugagaugaugga

SEQ ID NO: 1782244 - RNA, 19 nt, Artificial Sequence
  Description of Artificial Sequence: Synthetic oligonucleotide
  Antisense strand to SEQ ID NO: 1782243
uccaucaucucagaacagu

SEQ ID NO: 1782245 - RNA, 19 nt, Artificial Sequence
  Description of Artificial Sequence: Synthetic oligonucleotide
  Sense strand starting at position 2441 of SEQ ID NO: 1562917
gugguauaacauugacgua

SEQ ID NO: 1782246 - RNA, 19 nt, Artificial Sequence
  Description of Artificial Sequence: Synthetic oligonucleotide
  Antisense strand to SEQ ID NO: 1782245
uacgucaauguuauaccac

SEQ ID NO: 1782247 - RNA, 19 nt, Artificial Sequence
  Description of Artificial Sequence: Synthetic oligonucleotide
  Sense strand starting at position 2442 of SEQ ID NO: 1562917
ugguauaacauugacguau

SEQ ID NO: 1782248 - RNA, 19 nt, Artificial Sequence
  Description of Artificial Sequence: Synthetic oligonucleotide
  Antisense strand to SEQ ID NO: 1782247
auacgucaauguuauacca

SEQ ID NO: 1782249 - RNA, 19 nt, Artificial Sequence
  Description of Artificial Sequence: Synthetic oligonucleotide
  Sense strand starting at position 2456 of SEQ ID NO: 1562917
cguauauaauuguccaaac

SEQ ID NO: 1782250 - RNA, 19 nt, Artificial Sequence
  Description of Artificial Sequence: Synthetic oligonucleotide
  Antisense strand to SEQ ID NO: 1782249
guuuggacaauuauauacg

SEQ ID NO: 1782251 - RNA, 19 nt, Artificial Sequence
  Description of Artificial Sequence: Synthetic oligonucleotide
  Sense strand starting at position 2457 of SEQ ID NO: 1562917
guauauaauuguccaaacu

SEQ ID NO: 1782252 - RNA, 19 nt, Artificial Sequence
  Description of Artificial Sequence: Synthetic oligonucleotide
  Antisense strand to SEQ ID NO: 1782251
aguuuggacaauuauauac

SEQ ID NO: 1782253 - RNA, 19 nt, Artificial Sequence
  Description of Artificial Sequence: Synthetic oligonucleotide
  Sense strand starting at position 2474 of SEQ ID NO: 1562917
cuaauugaacucggcaaga

SEQ ID NO: 1782254 - RNA, 19 nt, Artificial Sequence
  Description of Artificial Sequence: Synthetic oligonucleotide
  Antisense strand to SEQ ID NO: 1782253
ucuugccgaguucaauuag

SEQ ID NO: 1782255 - RNA, 19 nt, Artificial Sequence
  Description of Artificial Sequence: Synthetic oligonucleotide
  Sense strand starting at position 2476 of SEQ ID NO: 1562917
aauugaacucggcaagauu

SEQ ID NO: 1782256 - RNA, 19 nt, Artificial Sequence
  Description of Artificial Sequence: Synthetic oligonucleotide
  Antisense strand to SEQ ID NO: 1782255
aaucuugccgaguucaauu

SEQ ID NO: 1782257 - RNA, 19 nt, Artificial Sequence
  Description of Artificial Sequence: Synthetic oligonucleotide
  Sense strand starting at position 2507 of SEQ ID NO: 1562917
uguagacauuauguuccaa

SEQ ID NO: 1782258 - RNA, 19 nt, Artificial Sequence
  Description of Artificial Sequence: Synthetic oligonucleotide
  Antisense strand to SEQ ID NO: 1782257
uuggaacauaaugucuaca

SEQ ID NO: 1782259 - RNA, 19 nt, Artificial Sequence
  Description of Artificial Sequence: Synthetic oligonucleotide
  Sense strand starting at position 2718 of SEQ ID NO: 1562917
acaccucaugucuaaacga

SEQ ID NO: 1782260 - RNA, 19 nt, Artificial Sequence
  Description of Artificial Sequence: Synthetic oligonucleotide
  Antisense strand to SEQ ID NO: 1782259
ucguuuagacaugaggugu

SEQ ID NO: 1782261 - RNA, 19 nt, Artificial Sequence
  Description of Artificial Sequence: Synthetic oligonucleotide
  Sense strand starting at position 2955 of SEQ ID NO: 1562917
acgugauagcaugggcuaa

SEQ ID NO: 1782262 - RNA, 19 nt, Artificial Sequence
  Description of Artificial Sequence: Synthetic oligonucleotide
  Antisense strand to SEQ ID NO: 1782261
uuagcccaugcuaucacgu

SEQ ID NO: 1782263 - RNA, 19 nt, Artificial Sequence
  Description of Artificial Sequence: Synthetic oligonucleotide
  Sense strand starting at position 2972 of SEQ ID NO: 1562917
aagagaauuugguagcuua

SEQ ID NO: 1782264 - RNA, 19 nt, Artificial Sequence
  Description of Artificial Sequence: Synthetic oligonucleotide
  Antisense strand to SEQ ID NO: 1782263
uaagcuaccaaauucucuu

SEQ ID NO: 1782265 - RNA, 19 nt, Artificial Sequence
  Description of Artificial Sequence: Synthetic oligonucleotide
  Sense strand starting at position 2980 of SEQ ID NO: 1562917
uugguagcuuacccaagau

SEQ ID NO: 1782266 - RNA, 19 nt, Artificial Sequence
  Description of Artificial Sequence: Synthetic oligonucleotide
  Antisense strand to SEQ ID NO: 1782265
aucuuggguaagcuaccaa

SEQ ID NO: 1782267 - RNA, 19 nt, Artificial Sequence
  Description of Artificial Sequence: Synthetic oligonucleotide
  Sense strand starting at position 3001 of SEQ ID NO: 1562917
cguguugacaagugguaga

SEQ ID NO: 1782268 - RNA, 19 nt, Artificial Sequence
  Description of Artificial Sequence: Synthetic oligonucleotide
  Antisense strand to SEQ ID NO: 1782267
ucuaccacuugucaacacg

SEQ ID NO: 1782269 - RNA, 19 nt, Artificial Sequence
  Description of Artificial Sequence: Synthetic oligonucleotide
  Sense strand starting at position 3067 of SEQ ID NO: 1562917
gguguagauguauacugua

SEQ ID NO: 1782270 - RNA, 19 nt, Artificial Sequence
  Description of Artificial Sequence: Synthetic oligonucleotide
  Antisense strand to SEQ ID NO: 1782269
uacaguauacaucuacacc

SEQ ID NO: 1782271 - RNA, 19 nt, Artificial Sequence
  Description of Artificial Sequence: Synthetic oligonucleotide
  Sense strand starting at position 3106 of SEQ ID NO: 1562917
guuuguuugagacggagga

SEQ ID NO: 1782272 - RNA, 19 nt, Artificial Sequence
  Description of Artificial Sequence: Synthetic oligonucleotide
  Antisense strand to SEQ ID NO: 1782271
uccuccgucucaaacaaac

SEQ ID NO: 1782273 - RNA, 19 nt, Artificial Sequence
  Description of Artificial Sequence: Synthetic oligonucleotide
  Sense strand starting at position 3107 of SEQ ID NO: 1562917
uuuguuugagacggaggau

SEQ ID NO: 1782274 - RNA, 19 nt, Artificial Sequence
  Description of Artificial Sequence: Synthetic oligonucleotide
  Antisense strand to SEQ ID NO: 1782273
auccuccgucucaaacaaa

SEQ ID NO: 1782275 - RNA, 19 nt, Artificial Sequence
  Description of Artificial Sequence: Synthetic oligonucleotide
  Sense strand starting at position 3476 of SEQ ID NO: 1562917
aauguauggugccuuaauu

SEQ ID NO: 1782276 - RNA, 19 nt, Artificial Sequence
  Description of Artificial Sequence: Synthetic oligonucleotide
  Antisense strand to SEQ ID NO: 1782275
aauuaaggcaccauacauu

SEQ ID NO: 1782277 - RNA, 19 nt, Artificial Sequence
  Description of Artificial Sequence: Synthetic oligonucleotide
  Sense strand starting at position 3484 of SEQ ID NO: 1562917
gugccuuaauuugcugauu

SEQ ID NO: 1782278 - RNA, 19 nt, Artificial Sequence
  Description of Artificial Sequence: Synthetic oligonucleotide
  Antisense strand to SEQ ID NO: 1782277
aaucagcaaauuaaggcac

SEQ ID NO: 1782279 - RNA, 19 nt, Artificial Sequence
  Description of Artificial Sequence: Synthetic oligonucleotide
  Sense strand starting at position 3486 of SEQ ID NO: 1562917
gccuuaauuugcugauuuc

SEQ ID NO: 1782280 - RNA, 19 nt, Artificial Sequence
  Description of Artificial Sequence: Synthetic oligonucleotide
  Antisense strand to SEQ ID NO: 1782279
gaaaucagcaaauuaaggc

SEQ ID NO: 1782281 - RNA, 19 nt, Artificial Sequence
  Description of Artificial Sequence: Synthetic oligonucleotide
  Sense strand starting at position 3513 of SEQ ID NO: 1562917
agugaucucucagugacac

SEQ ID NO: 1782282 - RNA, 19 nt, Artificial Sequence
  Description of Artificial Sequence: Synthetic oligonucleotide
  Antisense strand to SEQ ID NO: 1782281
gugucacugagagaucacu

SEQ ID NO: 1782283 - RNA, 19 nt, Artificial Sequence
  Description of Artificial Sequence: Synthetic oligonucleotide
  Sense strand starting at position 3514 of SEQ ID NO: 1562917
gugaucucucagugacacu

SEQ ID NO: 1782284 - RNA, 19 nt, Artificial Sequence
  Description of Artificial Sequence: Synthetic oligonucleotide
  Antisense strand to SEQ ID NO: 1782283
agugucacugagagaucac

SEQ ID NO: 1782285 - RNA, 19 nt, Artificial Sequence
  Description of Artificial Sequence: Synthetic oligonucleotide
  Sense strand starting at position 3588 of SEQ ID NO: 1562917
gugcuucuauaggauuuga

SEQ ID NO: 1782286 - RNA, 19 nt, Artificial Sequence
  Description of Artificial Sequence: Synthetic oligonucleotide
  Antisense strand to SEQ ID NO: 1782285
ucaaauccuauagaagcac

SEQ ID NO: 1782287 - RNA, 19 nt, Artificial Sequence
  Description of Artificial Sequence: Synthetic oligonucleotide
  Sense strand starting at position 3663 of SEQ ID NO: 1562917
acacauuccuaggaagcau

SEQ ID NO: 1782288 - RNA, 19 nt, Artificial Sequence
  Description of Artificial Sequence: Synthetic oligonucleotide
  Antisense strand to SEQ ID NO: 1782287
augcuuccuaggaaugugu

SEQ ID NO: 1782289 - RNA, 19 nt, Artificial Sequence
  Description of Artificial Sequence: Synthetic oligonucleotide
  Sense strand starting at position 3674 of SEQ ID NO: 1562917
ggaagcauugaguaaaggu

SEQ ID NO: 1782290 - RNA, 19 nt, Artificial Sequence
  Description of Artificial Sequence: Synthetic oligonucleotide
  Antisense strand to SEQ ID NO: 1782289
accuuuacucaaugcuucc

SEQ ID NO: 1782291 - RNA, 19 nt, Artificial Sequence
  Description of Artificial Sequence: Synthetic oligonucleotide
  Sense strand starting at position 3683 of SEQ ID NO: 1562917
gaguaaagguguuuaggga

SEQ ID NO: 1782292 - RNA, 19 nt, Artificial Sequence
  Description of Artificial Sequence: Synthetic oligonucleotide
  Antisense strand to SEQ ID NO: 1782291
ucccuaaacaccuuuacuc

SEQ ID NO: 1782293 - RNA, 19 nt, Artificial Sequence
  Description of Artificial Sequence: Synthetic oligonucleotide
  Sense strand starting at position 3684 of SEQ ID NO: 1562917
aguaaagguguuuagggau

SEQ ID NO: 1782294 - RNA, 19 nt, Artificial Sequence
  Description of Artificial Sequence: Synthetic oligonucleotide
  Antisense strand to SEQ ID NO: 1782293
aucccuaaacaccuuuacu

SEQ ID NO: 1782295 - RNA, 19 nt, Artificial Sequence
  Description of Artificial Sequence: Synthetic oligonucleotide
  Sense strand starting at position 3691 of SEQ ID NO: 1562917
guguuuagggauuaccauu

SEQ ID NO: 1782296 - RNA, 19 nt, Artificial Sequence
  Description of Artificial Sequence: Synthetic oligonucleotide
  Antisense strand to SEQ ID NO: 1782295
aaugguaaucccuaaacac

SEQ ID NO: 1782297 - RNA, 19 nt, Artificial Sequence
  Description of Artificial Sequence: Synthetic oligonucleotide
  Sense strand starting at position 444 of SEQ ID NO: 1562918
ccaggcuuuggcuaaauga

SEQ ID NO: 1782298 - RNA, 19 nt, Artificial Sequence
  Description of Artificial Sequence: Synthetic oligonucleotide
  Antisense strand to SEQ ID NO: 1782297
ucauuuagccaaagccugg

SEQ ID NO: 1782299 - RNA, 19 nt, Artificial Sequence
  Description of Artificial Sequence: Synthetic oligonucleotide
  Sense strand starting at position 535 of SEQ ID NO: 1562918
gaaagagagugaugugaca

SEQ ID NO: 1782300 - RNA, 19 nt, Artificial Sequence
  Description of Artificial Sequence: Synthetic oligonucleotide
  Antisense strand to SEQ ID NO: 1782299
ugucacaucacucucuuuc

SEQ ID NO: 1782301 - RNA, 19 nt, Artificial Sequence
  Description of Artificial Sequence: Synthetic oligonucleotide
  Sense strand starting at position 638 of SEQ ID NO: 1562918
agagaaggcgcacaaauau

SEQ ID NO: 1782302 - RNA, 19 nt, Artificial Sequence
  Description of Artificial Sequence: Synthetic oligonucleotide
  Antisense strand to SEQ ID NO: 1782301
auauuugugcgccuucucu

SEQ ID NO: 1782303 - RNA, 19 nt, Artificial Sequence
  Description of Artificial Sequence: Synthetic oligonucleotide
  Sense strand starting at position 684 of SEQ ID NO: 1562918
ccugacaguuaauucugua

SEQ ID NO: 1782304 - RNA, 19 nt, Artificial Sequence
  Description of Artificial Sequence: Synthetic oligonucleotide
  Antisense strand to SEQ ID NO: 1782303
uacagaauuaacugucagg

SEQ ID NO: 1782305 - RNA, 19 nt, Artificial Sequence
  Description of Artificial Sequence: Synthetic oligonucleotide
  Sense strand starting at position 688 of SEQ ID NO: 1562918
acaguuaauucuguacuac

SEQ ID NO: 1782306 - RNA, 19 nt, Artificial Sequence
  Description of Artificial Sequence: Synthetic oligonucleotide
  Antisense strand to SEQ ID NO: 1782305
guaguacagaauuaacugu

SEQ ID NO: 1782307 - RNA, 19 nt, Artificial Sequence
  Description of Artificial Sequence: Synthetic oligonucleotide
  Sense strand starting at position 1133 of SEQ ID NO: 1562918
gucaguaacuugccugcaa

SEQ ID NO: 1782308 - RNA, 19 nt, Artificial Sequence
  Description of Artificial Sequence: Synthetic oligonucleotide
  Antisense strand to SEQ ID NO: 1782307
uugcaggcaaguuacugac

SEQ ID NO: 1782309 - RNA, 19 nt, Artificial Sequence
  Description of Artificial Sequence: Synthetic oligonucleotide
  Sense strand starting at position 1134 of SEQ ID NO: 1562918
ucaguaacuugccugcaau

SEQ ID NO: 1782310 - RNA, 19 nt, Artificial Sequence
  Description of Artificial Sequence: Synthetic oligonucleotide
  Antisense strand to SEQ ID NO: 1782309
auugcaggcaaguuacuga

SEQ ID NO: 1782311 - RNA, 19 nt, Artificial Sequence
  Description of Artificial Sequence: Synthetic oligonucleotide
  Sense strand starting at position 1426 of SEQ ID NO: 1562918
cguugagcuuccucucaaa

SEQ ID NO: 1782312 - RNA, 19 nt, Artificial Sequence
  Description of Artificial Sequence: Synthetic oligonucleotide
  Antisense strand to SEQ ID NO: 1782311
uuugagaggaagcucaacg

SEQ ID NO: 1782313 - RNA, 19 nt, Artificial Sequence
  Description of Artificial Sequence: Synthetic oligonucleotide
  Sense strand starting at position 2077 of SEQ ID NO: 1562918
cgugcaaucccgccugauu

SEQ ID NO: 1782314 - RNA, 19 nt, Artificial Sequence
  Description of Artificial Sequence: Synthetic oligonucleotide
  Antisense strand to SEQ ID NO: 1782313
aaucaggcgggauugcacg

SEQ ID NO: 1782315 - RNA, 19 nt, Artificial Sequence
  Description of Artificial Sequence: Synthetic oligonucleotide
  Sense strand starting at position 2079 of SEQ ID NO: 1562918
ugcaaucccgccugauuau

SEQ ID NO: 1782316 - RNA, 19 nt, Artificial Sequence
  Description of Artificial Sequence: Synthetic oligonucleotide
  Antisense strand to SEQ ID NO: 1782315
auaaucaggcgggauugca

SEQ ID NO: 1782317 - RNA, 19 nt, Artificial Sequence
  Description of Artificial Sequence: Synthetic oligonucleotide
  Sense strand starting at position 2235 of SEQ ID NO: 1562918
uuaaguguuccggagacaa

SEQ ID NO: 1782318 - RNA, 19 nt, Artificial Sequence
  Description of Artificial Sequence: Synthetic oligonucleotide
  Antisense strand to SEQ ID NO: 1782317
uugucuccggaacacuuaa

SEQ ID NO: 1782319 - RNA, 19 nt, Artificial Sequence
  Description of Artificial Sequence: Synthetic oligonucleotide
  Sense strand starting at position 2279 of SEQ ID NO: 1562918
ugggacuguucugagauga

SEQ ID NO: 1782320 - RNA, 19 nt, Artificial Sequence
  Description of Artificial Sequence: Synthetic oligonucleotide
  Antisense strand to SEQ ID NO: 1782319
ucaucucagaacaguccca

SEQ ID NO: 1782321 - RNA, 19 nt, Artificial Sequence
  Description of Artificial Sequence: Synthetic oligonucleotide
  Sense strand starting at position 2283 of SEQ ID NO: 1562918
acuguucugagaugaugga

SEQ ID NO: 1782322 - RNA, 19 nt, Artificial Sequence
  Description of Artificial Sequence: Synthetic oligonucleotide
  Antisense strand to SEQ ID NO: 1782321
uccaucaucucagaacagu

SEQ ID NO: 1782323 - RNA, 19 nt, Artificial Sequence
  Description of Artificial Sequence: Synthetic oligonucleotide
  Sense strand starting at position 2324 of SEQ ID NO: 1562918
gugguauaacauugacgua

SEQ ID NO: 1782324 - RNA, 19 nt, Artificial Sequence
  Description of Artificial Sequence: Synthetic oligonucleotide
  Antisense strand to SEQ ID NO: 1782323
uacgucaauguuauaccac

SEQ ID NO: 1782325 - RNA, 19 nt, Artificial Sequence
  Description of Artificial Sequence: Synthetic oligonucleotide
  Sense strand starting at position 2325 of SEQ ID NO: 1562918
ugguauaacauugacguau

SEQ ID NO: 1782326 - RNA, 19 nt, Artificial Sequence
  Description of Artificial Sequence: Synthetic oligonucleotide
  Antisense strand to SEQ ID NO: 1782325
auacgucaauguuauacca

SEQ ID NO: 1782327 - RNA, 19 nt, Artificial Sequence
  Description of Artificial Sequence: Synthetic oligonucleotide
  Sense strand starting at position 2339 of SEQ ID NO: 1562918
cguauauaauuguccaaac

SEQ ID NO: 1782328 - RNA, 19 nt, Artificial Sequence
  Description of Artificial Sequence: Synthetic oligonucleotide
  Antisense strand to SEQ ID NO: 1782327
guuuggacaauuauauacg

SEQ ID NO: 1782329 - RNA, 19 nt, Artificial Sequence
  Description of Artificial Sequence: Synthetic oligonucleotide
  Sense strand starting at position 2340 of SEQ ID NO: 1562918
guauauaauuguccaaacu

SEQ ID NO: 1782330 - RNA, 19 nt, Artificial Sequence
  Description of Artificial Sequence: Synthetic oligonucleotide
  Antisense strand to SEQ ID NO: 1782329
aguuuggacaauuauauac

SEQ ID NO: 1782331 - RNA, 19 nt, Artificial Sequence
  Description of Artificial Sequence: Synthetic oligonucleotide
  Sense strand starting at position 2357 of SEQ ID NO: 1562918
cuaauugaacucggcaaga

SEQ ID NO: 1782332 - RNA, 19 nt, Artificial Sequence
  Description of Artificial Sequence: Synthetic oligonucleotide
  Antisense strand to SEQ ID NO: 1782331
ucuugccgaguucaauuag

SEQ ID NO: 1782333 - RNA, 19 nt, Artificial Sequence
  Description of Artificial Sequence: Synthetic oligonucleotide
  Sense strand starting at position 2359 of SEQ ID NO: 1562918
aauugaacucggcaagauu

SEQ ID NO: 1782334 - RNA, 19 nt, Artificial Sequence
  Description of Artificial Sequence: Synthetic oligonucleotide
  Antisense strand to SEQ ID NO: 1782333
aaucuugccgaguucaauu

SEQ ID NO: 1782335 - RNA, 19 nt, Artificial Sequence
  Description of Artificial Sequence: Synthetic oligonucleotide
  Sense strand starting at position 2390 of SEQ ID NO: 1562918
uguagacauuauguuccaa

SEQ ID NO: 1782336 - RNA, 19 nt, Artificial Sequence
  Description of Artificial Sequence: Synthetic oligonucleotide
  Antisense strand to SEQ ID NO: 1782335
uuggaacauaaugucuaca

SEQ ID NO: 1782337 - RNA, 19 nt, Artificial Sequence
  Description of Artificial Sequence: Synthetic oligonucleotide
  Sense strand starting at position 2601 of SEQ ID NO: 1562918
acaccucaugucuaaacga

SEQ ID NO: 1782338 - RNA, 19 nt, Artificial Sequence
  Description of Artificial Sequence: Synthetic oligonucleotide
  Antisense strand to SEQ ID NO: 1782337
ucguuuagacaugaggugu

SEQ ID NO: 1782339 - RNA, 19 nt, Artificial Sequence
  Description of Artificial Sequence: Synthetic oligonucleotide
  Sense strand starting at position 2838 of SEQ ID NO: 1562918
acgugauagcaugggcuaa

SEQ ID NO: 1782340 - RNA, 19 nt, Artificial Sequence
  Description of Artificial Sequence: Synthetic oligonucleotide
  Antisense strand to SEQ ID NO: 1782339
uuagcccaugcuaucacgu

SEQ ID NO: 1782341 - RNA, 19 nt, Artificial Sequence
  Description of Artificial Sequence: Synthetic oligonucleotide
  Sense strand starting at position 2855 of SEQ ID NO: 1562918
aagagaauuugguagcuua

SEQ ID NO: 1782342 - RNA, 19 nt, Artificial Sequence
  Description of Artificial Sequence: Synthetic oligonucleotide
  Antisense strand to SEQ ID NO: 1782341
uaagcuaccaaauucucuu

SEQ ID NO: 1782343 - RNA, 19 nt, Artificial Sequence
  Description of Artificial Sequence: Synthetic oligonucleotide
  Sense strand starting at position 2863 of SEQ ID NO: 1562918
uugguagcuuacccaagau

SEQ ID NO: 1782344 - RNA, 19 nt, Artificial Sequence
  Description of Artificial Sequence: Synthetic oligonucleotide
  Antisense strand to SEQ ID NO: 1782343
aucuuggguaagcuaccaa

SEQ ID NO: 1782345 - RNA, 19 nt, Artificial Sequence
  Description of Artificial Sequence: Synthetic oligonucleotide
  Sense strand starting at position 2884 of SEQ ID NO: 1562918
cguguugacaagugguaga

SEQ ID NO: 1782346 - RNA, 19 nt, Artificial Sequence
  Description of Artificial Sequence: Synthetic oligonucleotide
  Antisense strand to SEQ ID NO: 1782345
ucuaccacuugucaacacg

SEQ ID NO: 1782347 - RNA, 19 nt, Artificial Sequence
  Description of Artificial Sequence: Synthetic oligonucleotide
  Sense strand starting at position 2950 of SEQ ID NO: 1562918
gguguagauguauacugua

SEQ ID NO: 1782348 - RNA, 19 nt, Artificial Sequence
  Description of Artificial Sequence: Synthetic oligonucleotide
  Antisense strand to SEQ ID NO: 1782347
uacaguauacaucuacacc

SEQ ID NO: 1782349 - RNA, 19 nt, Artificial Sequence
  Description of Artificial Sequence: Synthetic oligonucleotide
  Sense strand starting at position 2989 of SEQ ID NO: 1562918
guuuguuugagacggagga

SEQ ID NO: 1782350 - RNA, 19 nt, Artificial Sequence
  Description of Artificial Sequence: Synthetic oligonucleotide
  Antisense strand to SEQ ID NO: 1782349
uccuccgucucaaacaaac

SEQ ID NO: 1782351 - RNA, 19 nt, Artificial Sequence
  Description of Artificial Sequence: Synthetic oligonucleotide
  Sense strand starting at position 2990 of SEQ ID NO: 1562918
uuuguuugagacggaggau

SEQ ID NO: 1782352 - RNA, 19 nt, Artificial Sequence
  Description of Artificial Sequence: Synthetic oligonucleotide
  Antisense strand to SEQ ID NO: 1782351
auccuccgucucaaacaaa

SEQ ID NO: 1782353 - RNA, 19 nt, Artificial Sequence
  Description of Artificial Sequence: Synthetic oligonucleotide
  Sense strand starting at position 3359 of SEQ ID NO: 1562918
aauguauggugccuuaauu

SEQ ID NO: 1782354 - RNA, 19 nt, Artificial Sequence
  Description of Artificial Sequence: Synthetic oligonucleotide
  Antisense strand to SEQ ID NO: 1782353
aauuaaggcaccauacauu

SEQ ID NO: 1782355 - RNA, 19 nt, Artificial Sequence
  Description of Artificial Sequence: Synthetic oligonucleotide
  Sense strand starting at position 3367 of SEQ ID NO: 1562918
gugccuuaauuugcugauu

SEQ ID NO: 1782356 - RNA, 19 nt, Artificial Sequence
  Description of Artificial Sequence: Synthetic oligonucleotide
  Antisense strand to SEQ ID NO: 1782355
aaucagcaaauuaaggcac

SEQ ID NO: 1782357 - RNA, 19 nt, Artificial Sequence
  Description of Artificial Sequence: Synthetic oligonucleotide
  Sense strand starting at position 3369 of SEQ ID NO: 1562918
gccuuaauuugcugauuuc

SEQ ID NO: 1782358 - RNA, 19 nt, Artificial Sequence
  Description of Artificial Sequence: Synthetic oligonucleotide
  Antisense strand to SEQ ID NO: 1782357
gaaaucagcaaauuaaggc

SEQ ID NO: 1782359 - RNA, 19 nt, Artificial Sequence
  Description of Artificial Sequence: Synthetic oligonucleotide
  Sense strand starting at position 3396 of SEQ ID NO: 1562918
agugaucucucagugacac

SEQ ID NO: 1782360 - RNA, 19 nt, Artificial Sequence
  Description of Artificial Sequence: Synthetic oligonucleotide
  Antisense strand to SEQ ID NO: 1782359
gugucacugagagaucacu

SEQ ID NO: 1782361 - RNA, 19 nt, Artificial Sequence
  Description of Artificial Sequence: Synthetic oligonucleotide
  Sense strand starting at position 3397 of SEQ ID NO: 1562918
gugaucucucagugacacu

SEQ ID NO: 1782362 - RNA, 19 nt, Artificial Sequence
  Description of Artificial Sequence: Synthetic oligonucleotide
  Antisense strand to SEQ ID NO: 1782361
agugucacugagagaucac

SEQ ID NO: 1782363 - RNA, 19 nt, Artificial Sequence
  Description of Artificial Sequence: Synthetic oligonucleotide
  Sense strand starting at position 3471 of SEQ ID NO: 1562918
gugcuucuauaggauuuga

SEQ ID NO: 1782364 - RNA, 19 nt, Artificial Sequence
  Description of Artificial Sequence: Synthetic oligonucleotide
  Antisense strand to SEQ ID NO: 1782363
ucaaauccuauagaagcac

SEQ ID NO: 1782365 - RNA, 19 nt, Artificial Sequence
  Description of Artificial Sequence: Synthetic oligonucleotide
  Sense strand starting at position 3546 of SEQ ID NO: 1562918
acacauuccuaggaagcau

SEQ ID NO: 1782366 - RNA, 19 nt, Artificial Sequence
  Description of Artificial Sequence: Synthetic oligonucleotide
  Antisense strand to SEQ ID NO: 1782365
augcuuccuaggaaugugu

SEQ ID NO: 1782367 - RNA, 19 nt, Artificial Sequence
  Description of Artificial Sequence: Synthetic oligonucleotide
  Sense strand starting at position 3557 of SEQ ID NO: 1562918
ggaagcauugaguaaaggu

SEQ ID NO: 1782368 - RNA, 19 nt, Artificial Sequence
  Description of Artificial Sequence: Synthetic oligonucleotide
  Antisense strand to SEQ ID NO: 1782367
accuuuacucaaugcuucc

SEQ ID NO: 1782369 - RNA, 19 nt, Artificial Sequence
  Description of Artificial Sequence: Synthetic oligonucleotide
  Sense strand starting at position 3566 of SEQ ID NO: 1562918
gaguaaagguguuuaggga

SEQ ID NO: 1782370 - RNA, 19 nt, Artificial Sequence
  Description of Artificial Sequence: Synthetic oligonucleotide
  Antisense strand to SEQ ID NO: 1782369
ucccuaaacaccuuuacuc

SEQ ID NO: 1782371 - RNA, 19 nt, Artificial Sequence
  Description of Artificial Sequence: Synthetic oligonucleotide
  Sense strand starting at position 3567 of SEQ ID NO: 1562918
aguaaagguguuuagggau

SEQ ID NO: 1782372 - RNA, 19 nt, Artificial Sequence
  Description of Artificial Sequence: Synthetic oligonucleotide
  Antisense strand to SEQ ID NO: 1782371
aucccuaaacaccuuuacu

SEQ ID NO: 1782373 - RNA, 19 nt, Artificial Sequence
  Description of Artificial Sequence: Synthetic oligonucleotide
  Sense strand starting at position 3574 of SEQ ID NO: 1562918
guguuuagggauuaccauu

SEQ ID NO: 1782374 - RNA, 19 nt, Artificial Sequence
  Description of Artificial Sequence: Synthetic oligonucleotide
  Antisense strand to SEQ ID NO: 1782373
aaugguaaucccuaaacac

SEQ ID NO: 1782375 - RNA, 19 nt, Artificial Sequence
  Description of Artificial Sequence: Synthetic oligonucleotide
  Sense strand starting at position 3940 of SEQ ID NO: 1562918
caccgugacuagccaauau

SEQ ID NO: 1782376 - RNA, 19 nt, Artificial Sequence
  Description of Artificial Sequence: Synthetic oligonucleotide
  Antisense strand to SEQ ID NO: 1782375
auauuggcuagucacggug

SEQ ID NO: 1782377 - RNA, 19 nt, Artificial Sequence
  Description of Artificial Sequence: Synthetic oligonucleotide
  Sense strand starting at position 1050 of SEQ ID NO: 1562919
ucgacaacguugcgaguua

SEQ ID NO: 1782378 - RNA, 19 nt, Artificial Sequence
  Description of Artificial Sequence: Synthetic oligonucleotide
  Antisense strand to SEQ ID NO: 1782377
uaacucgcaacguugucga

SEQ ID NO: 1782379 - RNA, 19 nt, Artificial Sequence
  Description of Artificial Sequence: Synthetic oligonucleotide
  Sense strand starting at position 1051 of SEQ ID NO: 1562919
cgacaacguugcgaguuaa

SEQ ID NO: 1782380 - RNA, 19 nt, Artificial Sequence
  Description of Artificial Sequence: Synthetic oligonucleotide
  Antisense strand to SEQ ID NO: 1782379
uuaacucgcaacguugucg

SEQ ID NO: 1782381 - RNA, 19 nt, Artificial Sequence
  Description of Artificial Sequence: Synthetic oligonucleotide
  Sense strand starting at position 1055 of SEQ ID NO: 1562919
aacguugcgaguuaaauca

SEQ ID NO: 1782382 - RNA, 19 nt, Artificial Sequence
  Description of Artificial Sequence: Synthetic oligonucleotide
  Antisense strand to SEQ ID NO: 1782381
ugauuuaacucgcaacguu

SEQ ID NO: 1782383 - RNA, 19 nt, Artificial Sequence
  Description of Artificial Sequence: Synthetic oligonucleotide
  Sense strand starting at position 1081 of SEQ ID NO: 1562919
acagucuauucguguucua

SEQ ID NO: 1782384 - RNA, 19 nt, Artificial Sequence
  Description of Artificial Sequence: Synthetic oligonucleotide
  Antisense strand to SEQ ID NO: 1782383
uagaacacgaauagacugu

SEQ ID NO: 1782385 - RNA, 19 nt, Artificial Sequence
  Description of Artificial Sequence: Synthetic oligonucleotide
  Sense strand starting at position 1084 of SEQ ID NO: 1562919
gucuauucguguucuagga

SEQ ID NO: 1782386 - RNA, 19 nt, Artificial Sequence
  Description of Artificial Sequence: Synthetic oligonucleotide
  Antisense strand to SEQ ID NO: 1782385
uccuagaacacgaauagac

SEQ ID NO: 1782387 - RNA, 19 nt, Artificial Sequence
  Description of Artificial Sequence: Synthetic oligonucleotide
  Sense strand starting at position 1086 of SEQ ID NO: 1562919
cuauucguguucuaggaag

SEQ ID NO: 1782388 - RNA, 19 nt, Artificial Sequence
  Description of Artificial Sequence: Synthetic oligonucleotide
  Antisense strand to SEQ ID NO: 1782387
cuuccuagaacacgaauag

SEQ ID NO: 1782389 - RNA, 19 nt, Artificial Sequence
  Description of Artificial Sequence: Synthetic oligonucleotide
  Sense strand starting at position 1088 of SEQ ID NO: 1562919
auucguguucuaggaagga

SEQ ID NO: 1782390 - RNA, 19 nt, Artificial Sequence
  Description of Artificial Sequence: Synthetic oligonucleotide
  Antisense strand to SEQ ID NO: 1782389
uccuuccuagaacacgaau

SEQ ID NO: 1782391 - RNA, 19 nt, Artificial Sequence
  Description of Artificial Sequence: Synthetic oligonucleotide
  Sense strand starting at position 1092 of SEQ ID NO: 1562919
guguucuaggaaggaaauu

SEQ ID NO: 1782392 - RNA, 19 nt, Artificial Sequence
  Description of Artificial Sequence: Synthetic oligonucleotide
  Antisense strand to SEQ ID NO: 1782391
aauuuccuuccuagaacac

SEQ ID NO: 1782393 - RNA, 19 nt, Artificial Sequence
  Description of Artificial Sequence: Synthetic oligonucleotide
  Sense strand starting at position 1111 of SEQ ID NO: 1562919
augauuugauuggaaauca

SEQ ID NO: 1782394 - RNA, 19 nt, Artificial Sequence
  Description of Artificial Sequence: Synthetic oligonucleotide
  Antisense strand to SEQ ID NO: 1782393
ugauuuccaaucaaaucau

SEQ ID NO: 1782395 - RNA, 19 nt, Artificial Sequence
  Description of Artificial Sequence: Synthetic oligonucleotide
  Sense strand starting at position 2019 of SEQ ID NO: 1562919
ggcagauaacuccggguuu

SEQ ID NO: 1782396 - RNA, 19 nt, Artificial Sequence
  Description of Artificial Sequence: Synthetic oligonucleotide
  Antisense strand to SEQ ID NO: 1782395
aaacccggaguuaucugcc

SEQ ID NO: 1782397 - RNA, 19 nt, Artificial Sequence
  Description of Artificial Sequence: Synthetic oligonucleotide
  Sense strand starting at position 2257 of SEQ ID NO: 1562919
agcaaaguaacgugacaga

SEQ ID NO: 1782398 - RNA, 19 nt, Artificial Sequence
  Description of Artificial Sequence: Synthetic oligonucleotide
  Antisense strand to SEQ ID NO: 1782397
ucugucacguuacuuugcu

SEQ ID NO: 1782399 - RNA, 19 nt, Artificial Sequence
  Description of Artificial Sequence: Synthetic oligonucleotide
  Sense strand starting at position 2280 of SEQ ID NO: 1562919
acgucaguccaaggaagaa

SEQ ID NO: 1782400 - RNA, 19 nt, Artificial Sequence
  Description of Artificial Sequence: Synthetic oligonucleotide
  Antisense strand to SEQ ID NO: 1782399
uucuuccuuggacugacgu

SEQ ID NO: 1782401 - RNA, 19 nt, Artificial Sequence
  Description of Artificial Sequence: Synthetic oligonucleotide
  Sense strand starting at position 2393 of SEQ ID NO: 1562919
gcgcaugccgacuguuaca

SEQ ID NO: 1782402 - RNA, 19 nt, Artificial Sequence
  Description of Artificial Sequence: Synthetic oligonucleotide
  Antisense strand to SEQ ID NO: 1782401
uguaacagucggcaugcgc

SEQ ID NO: 1782403 - RNA, 19 nt, Artificial Sequence
  Description of Artificial Sequence: Synthetic oligonucleotide
  Sense strand starting at position 2810 of SEQ ID NO: 1562919
gcgugcaaccugcauaagu

SEQ ID NO: 1782404 - RNA, 19 nt, Artificial Sequence
  Description of Artificial Sequence: Synthetic oligonucleotide
  Antisense strand to SEQ ID NO: 1782403
acuuaugcagguugcacgc

SEQ ID NO: 1782405 - RNA, 19 nt, Artificial Sequence
  Description of Artificial Sequence: Synthetic oligonucleotide
  Sense strand starting at position 2820 of SEQ ID NO: 1562919
ugcauaagucuuggaacca

SEQ ID NO: 1782406 - RNA, 19 nt, Artificial Sequence
  Description of Artificial Sequence: Synthetic oligonucleotide
  Antisense strand to SEQ ID NO: 1782405
ugguuccaagacuuaugca

SEQ ID NO: 1782407 - RNA, 19 nt, Artificial Sequence
  Description of Artificial Sequence: Synthetic oligonucleotide
  Sense strand starting at position 2821 of SEQ ID NO: 1562919
gcauaagucuuggaaccac

SEQ ID NO: 1782408 - RNA, 19 nt, Artificial Sequence
  Description of Artificial Sequence: Synthetic oligonucleotide
  Antisense strand to SEQ ID NO: 1782407
gugguuccaagacuuaugc

SEQ ID NO: 1782409 - RNA, 19 nt, Artificial Sequence
  Description of Artificial Sequence: Synthetic oligonucleotide
  Sense strand starting at position 2857 of SEQ ID NO: 1562919
ugguguucccggcaaacuu

SEQ ID NO: 1782410 - RNA, 19 nt, Artificial Sequence
  Description of Artificial Sequence: Synthetic oligonucleotide
  Antisense strand to SEQ ID NO: 1782409
aaguuugccgggaacacca

SEQ ID NO: 1782411 - RNA, 19 nt, Artificial Sequence
  Description of Artificial Sequence: Synthetic oligonucleotide
  Sense strand starting at position 3664 of SEQ ID NO: 1562919
augugcagauccugagaaa

SEQ ID NO: 1782412 - RNA, 19 nt, Artificial Sequence
  Description of Artificial Sequence: Synthetic oligonucleotide
  Antisense strand to SEQ ID NO: 1782411
uuucucaggaucugcacau

SEQ ID NO: 1782413 - RNA, 19 nt, Artificial Sequence
  Description of Artificial Sequence: Synthetic oligonucleotide
  Sense strand starting at position 3932 of SEQ ID NO: 1562919
agugaaaucuugccugaua

SEQ ID NO: 1782414 - RNA, 19 nt, Artificial Sequence
  Description of Artificial Sequence: Synthetic oligonucleotide
  Antisense strand to SEQ ID NO: 1782413
uaucaggcaagauuucacu

SEQ ID NO: 1782415 - RNA, 19 nt, Artificial Sequence
  Description of Artificial Sequence: Synthetic oligonucleotide
  Sense strand starting at position 3933 of SEQ ID NO: 1562919
gugaaaucuugccugauau

SEQ ID NO: 1782416 - RNA, 19 nt, Artificial Sequence
  Description of Artificial Sequence: Synthetic oligonucleotide
  Antisense strand to SEQ ID NO: 1782415
auaucaggcaagauuucac

SEQ ID NO: 1782417 - RNA, 19 nt, Artificial Sequence
  Description of Artificial Sequence: Synthetic oligonucleotide
  Sense strand starting at position 60 of SEQ ID NO: 1562920
aguuaaugucaucaaguuu

SEQ ID NO: 1782418 - RNA, 19 nt, Artificial Sequence
  Description of Artificial Sequence: Synthetic oligonucleotide
  Antisense strand to SEQ ID NO: 1782417
aaacuugaugacauuaacu

SEQ ID NO: 1782419 - RNA, 19 nt, Artificial Sequence
  Description of Artificial Sequence: Synthetic oligonucleotide
  Sense strand starting at position 151 of SEQ ID NO: 1562920
caaagugaauccuaggcca

SEQ ID NO: 1782420 - RNA, 19 nt, Artificial Sequence
  Description of Artificial Sequence: Synthetic oligonucleotide
  Antisense strand to SEQ ID NO: 1782419
uggccuaggauucacuuug

SEQ ID NO: 1782421 - RNA, 19 nt, Artificial Sequence
  Description of Artificial Sequence: Synthetic oligonucleotide
  Sense strand starting at position 503 of SEQ ID NO: 1562920
cguaucuaaccuugcauca

SEQ ID NO: 1782422 - RNA, 19 nt, Artificial Sequence
  Description of Artificial Sequence: Synthetic oligonucleotide
  Antisense strand to SEQ ID NO: 1782421
ugaugcaagguuagauacg

SEQ ID NO: 1782423 - RNA, 19 nt, Artificial Sequence
  Description of Artificial Sequence: Synthetic oligonucleotide
  Sense strand starting at position 536 of SEQ ID NO: 1562920
ccagauugcuggucuguag

SEQ ID NO: 1782424 - RNA, 19 nt, Artificial Sequence
  Description of Artificial Sequence: Synthetic oligonucleotide
  Antisense strand to SEQ ID NO: 1782423
cuacagaccagcaaucugg

SEQ ID NO: 1782425 - RNA, 19 nt, Artificial Sequence
  Description of Artificial Sequence: Synthetic oligonucleotide
  Sense strand starting at position 545 of SEQ ID NO: 1562920
uggucuguagugcaacaga

SEQ ID NO: 1782426 - RNA, 19 nt, Artificial Sequence
  Description of Artificial Sequence: Synthetic oligonucleotide
  Antisense strand to SEQ ID NO: 1782425
ucuguugcacuacagacca

SEQ ID NO: 1782427 - RNA, 19 nt, Artificial Sequence
  Description of Artificial Sequence: Synthetic oligonucleotide
  Sense strand starting at position 548 of SEQ ID NO: 1562920
ucuguagugcaacagaagu

SEQ ID NO: 1782428 - RNA, 19 nt, Artificial Sequence
  Description of Artificial Sequence: Synthetic oligonucleotide
  Antisense strand to SEQ ID NO: 1782427
acuucuguugcacuacaga

SEQ ID NO: 1782429 - RNA, 19 nt, Artificial Sequence
  Description of Artificial Sequence: Synthetic oligonucleotide
  Sense strand starting at position 550 of SEQ ID NO: 1562920
uguagugcaacagaaguaa

SEQ ID NO: 1782430 - RNA, 19 nt, Artificial Sequence
  Description of Artificial Sequence: Synthetic oligonucleotide
  Antisense strand to SEQ ID NO: 1782429
uuacuucuguugcacuaca

SEQ ID NO: 1782431 - RNA, 19 nt, Artificial Sequence
  Description of Artificial Sequence: Synthetic oligonucleotide
  Sense strand starting at position 619 of SEQ ID NO: 1562920
cuauuuaccuguggugaca

SEQ ID NO: 1782432 - RNA, 19 nt, Artificial Sequence
  Description of Artificial Sequence: Synthetic oligonucleotide
  Antisense strand to SEQ ID NO: 1782431
ugucaccacagguaaauag

SEQ ID NO: 1782433 - RNA, 19 nt, Artificial Sequence
  Description of Artificial Sequence: Synthetic oligonucleotide
  Sense strand starting at position 729 of SEQ ID NO: 1562920
ggaggaagugauuacgguu

SEQ ID NO: 1782434 - RNA, 19 nt, Artificial Sequence
  Description of Artificial Sequence: Synthetic oligonucleotide
  Antisense strand to SEQ ID NO: 1782433
aaccguaaucacuuccucc

SEQ ID NO: 1782435 - RNA, 19 nt, Artificial Sequence
  Description of Artificial Sequence: Synthetic oligonucleotide
  Sense strand starting at position 827 of SEQ ID NO: 1562920
caggguccuucccaggaaa

SEQ ID NO: 1782436 - RNA, 19 nt, Artificial Sequence
  Description of Artificial Sequence: Synthetic oligonucleotide
  Antisense strand to SEQ ID NO: 1782435
uuuccugggaaggacccug

SEQ ID NO: 1782437 - RNA, 19 nt, Artificial Sequence
  Description of Artificial Sequence: Synthetic oligonucleotide
  Sense strand starting at position 1015 of SEQ ID NO: 1562920
uggaaagaauccugacacu

SEQ ID NO: 1782438 - RNA, 19 nt, Artificial Sequence
  Description of Artificial Sequence: Synthetic oligonucleotide
  Antisense strand to SEQ ID NO: 1782437
agugucaggauucuuucca

SEQ ID NO: 1782439 - RNA, 19 nt, Artificial Sequence
  Description of Artificial Sequence: Synthetic oligonucleotide
  Sense strand starting at position 1338 of SEQ ID NO: 1562920
ggaaccguuccucaaaggu

SEQ ID NO: 1782440 - RNA, 19 nt, Artificial Sequence
  Description of Artificial Sequence: Synthetic oligonucleotide
  Antisense strand to SEQ ID NO: 1782439
accuuugaggaacgguucc

SEQ ID NO: 1782441 - RNA, 19 nt, Artificial Sequence
  Description of Artificial Sequence: Synthetic oligonucleotide
  Sense strand starting at position 1712 of SEQ ID NO: 1562920
ucgcaagaguccucggugu

SEQ ID NO: 1782442 - RNA, 19 nt, Artificial Sequence
  Description of Artificial Sequence: Synthetic oligonucleotide
  Antisense strand to SEQ ID NO: 1782441
acaccgaggacucuugcga

SEQ ID NO: 1782443 - RNA, 19 nt, Artificial Sequence
  Description of Artificial Sequence: Synthetic oligonucleotide
  Sense strand starting at position 1714 of SEQ ID NO: 1562920
gcaagaguccucggugugu

SEQ ID NO: 1782444 - RNA, 19 nt, Artificial Sequence
  Description of Artificial Sequence: Synthetic oligonucleotide
  Antisense strand to SEQ ID NO: 1782443
acacaccgaggacucuugc

SEQ ID NO: 1782445 - RNA, 19 nt, Artificial Sequence
  Description of Artificial Sequence: Synthetic oligonucleotide
  Sense strand starting at position 2597 of SEQ ID NO: 1562920
gcccuugaggcucagaagu

SEQ ID NO: 1782446 - RNA, 19 nt, Artificial Sequence
  Description of Artificial Sequence: Synthetic oligonucleotide
  Antisense strand to SEQ ID NO: 1782445
acuucugagccucaagggc

SEQ ID NO: 1782447 - RNA, 19 nt, Artificial Sequence
  Description of Artificial Sequence: Synthetic oligonucleotide
  Sense strand starting at position 2883 of SEQ ID NO: 1562920
ugacuuugugccuacgcaa

SEQ ID NO: 1782448 - RNA, 19 nt, Artificial Sequence
  Description of Artificial Sequence: Synthetic oligonucleotide
  Antisense strand to SEQ ID NO: 1782447
uugcguaggcacaaaguca

SEQ ID NO: 1782449 - RNA, 19 nt, Artificial Sequence
  Description of Artificial Sequence: Synthetic oligonucleotide
  Sense strand starting at position 3344 of SEQ ID NO: 1562920
ccuucucuugcacauguua

SEQ ID NO: 1782450 - RNA, 19 nt, Artificial Sequence
  Description of Artificial Sequence: Synthetic oligonucleotide
  Antisense strand to SEQ ID NO: 1782449
uaacaugugcaagagaagg

SEQ ID NO: 1782451 - RNA, 19 nt, Artificial Sequence
  Description of Artificial Sequence: Synthetic oligonucleotide
  Sense strand starting at position 3403 of SEQ ID NO: 1562920
gggugaccuguacacguaa

SEQ ID NO: 1782452 - RNA, 19 nt, Artificial Sequence
  Description of Artificial Sequence: Synthetic oligonucleotide
  Antisense strand to SEQ ID NO: 1782451
uuacguguacaggucaccc

SEQ ID NO: 1782453 - RNA, 19 nt, Artificial Sequence
  Description of Artificial Sequence: Synthetic oligonucleotide
  Sense strand starting at position 3405 of SEQ ID NO: 1562920
gugaccuguacacguaaua

SEQ ID NO: 1782454 - RNA, 19 nt, Artificial Sequence
  Description of Artificial Sequence: Synthetic oligonucleotide
  Antisense strand to SEQ ID NO: 1782453
uauuacguguacaggucac

SEQ ID NO: 1782455 - RNA, 19 nt, Artificial Sequence
  Description of Artificial Sequence: Synthetic oligonucleotide
  Sense strand starting at position 3417 of SEQ ID NO: 1562920
cguaauauccugcauaucu

SEQ ID NO: 1782456 - RNA, 19 nt, Artificial Sequence
  Description of Artificial Sequence: Synthetic oligonucleotide
  Antisense strand to SEQ ID NO: 1782455
agauaugcaggauauuacg

SEQ ID NO: 1782457 - RNA, 19 nt, Artificial Sequence
  Description of Artificial Sequence: Synthetic oligonucleotide
  Sense strand starting at position 3464 of SEQ ID NO: 1562920
gcuugucauccuguugugu

SEQ ID NO: 1782458 - RNA, 19 nt, Artificial Sequence
  Description of Artificial Sequence: Synthetic oligonucleotide
  Antisense strand to SEQ ID NO: 1782457
acacaacaggaugacaagc

SEQ ID NO: 1782459 - RNA, 19 nt, Artificial Sequence
  Description of Artificial Sequence: Synthetic oligonucleotide
  Sense strand starting at position 3465 of SEQ ID NO: 1562920
cuugucauccuguuguguu

SEQ ID NO: 1782460 - RNA, 19 nt, Artificial Sequence
  Description of Artificial Sequence: Synthetic oligonucleotide
  Antisense strand to SEQ ID NO: 1782459
aacacaacaggaugacaag

SEQ ID NO: 1782461 - RNA, 19 nt, Artificial Sequence
  Description of Artificial Sequence: Synthetic oligonucleotide
  Sense strand starting at position 3476 of SEQ ID NO: 1562920
guuguguuuggugagggaa

SEQ ID NO: 1782462 - RNA, 19 nt, Artificial Sequence
  Description of Artificial Sequence: Synthetic oligonucleotide
  Antisense strand to SEQ ID NO: 1782461
uucccucaccaaacacaac

SEQ ID NO: 1782463 - RNA, 19 nt, Artificial Sequence
  Description of Artificial Sequence: Synthetic oligonucleotide
  Sense strand starting at position 3528 of SEQ ID NO: 1562920
gcuacauccucaugaggac

SEQ ID NO: 1782464 - RNA, 19 nt, Artificial Sequence
  Description of Artificial Sequence: Synthetic oligonucleotide
  Antisense strand to SEQ ID NO: 1782463
guccucaugaggauguagc

SEQ ID NO: 1782465 - RNA, 19 nt, Artificial Sequence
  Description of Artificial Sequence: Synthetic oligonucleotide
  Sense strand starting at position 3610 of SEQ ID NO: 1562920
acaggugugugacccagau

SEQ ID NO: 1782466 - RNA, 19 nt, Artificial Sequence
  Description of Artificial Sequence: Synthetic oligonucleotide
  Antisense strand to SEQ ID NO: 1782465
aucugggucacacaccugu

SEQ ID NO: 1782467 - RNA, 19 nt, Artificial Sequence
  Description of Artificial Sequence: Synthetic oligonucleotide
  Sense strand starting at position 3638 of SEQ ID NO: 1562920
aggucaaccagguguugaa

SEQ ID NO: 1782468 - RNA, 19 nt, Artificial Sequence
  Description of Artificial Sequence: Synthetic oligonucleotide
  Antisense strand to SEQ ID NO: 1782467
uucaacaccugguugaccu

SEQ ID NO: 1782469 - RNA, 19 nt, Artificial Sequence
  Description of Artificial Sequence: Synthetic oligonucleotide
  Sense strand starting at position 3641 of SEQ ID NO: 1562920
ucaaccagguguugaaaga

SEQ ID NO: 1782470 - RNA, 19 nt, Artificial Sequence
  Description of Artificial Sequence: Synthetic oligonucleotide
  Antisense strand to SEQ ID NO: 1782469
ucuuucaacaccugguuga

SEQ ID NO: 1782471 - RNA, 19 nt, Artificial Sequence
  Description of Artificial Sequence: Synthetic oligonucleotide
  Sense strand starting at position 3663 of SEQ ID NO: 1562920
agugaacauucucaugaac

SEQ ID NO: 1782472 - RNA, 19 nt, Artificial Sequence
  Description of Artificial Sequence: Synthetic oligonucleotide
  Antisense strand to SEQ ID NO: 1782471
guucaugagaauguucacu

SEQ ID NO: 1782473 - RNA, 19 nt, Artificial Sequence
  Description of Artificial Sequence: Synthetic oligonucleotide
  Sense strand starting at position 3704 of SEQ ID NO: 1562920
ugugcagaguggucacgua

SEQ ID NO: 1782474 - RNA, 19 nt, Artificial Sequence
  Description of Artificial Sequence: Synthetic oligonucleotide
  Antisense strand to SEQ ID NO: 1782473
uacgugaccacucugcaca

SEQ ID NO: 1782475 - RNA, 19 nt, Artificial Sequence
  Description of Artificial Sequence: Synthetic oligonucleotide
  Sense strand starting at position 3735 of SEQ ID NO: 1562920
auaggaaagugauauucuu

SEQ ID NO: 1782476 - RNA, 19 nt, Artificial Sequence
  Description of Artificial Sequence: Synthetic oligonucleotide
  Antisense strand to SEQ ID NO: 1782475
aagaauaucacuuuccuau

SEQ ID NO: 1782477 - RNA, 19 nt, Artificial Sequence
  Description of Artificial Sequence: Synthetic oligonucleotide
  Sense strand starting at position 3800 of SEQ ID NO: 1562920
ucauccaugugucccagaa

SEQ ID NO: 1782478 - RNA, 19 nt, Artificial Sequence
  Description of Artificial Sequence: Synthetic oligonucleotide
  Antisense strand to SEQ ID NO: 1782477
uucugggacacauggauga

SEQ ID NO: 1782479 - RNA, 19 nt, Artificial Sequence
  Description of Artificial Sequence: Synthetic oligonucleotide
  Sense strand starting at position 3802 of SEQ ID NO: 1562920
auccaugugucccagaaau

SEQ ID NO: 1782480 - RNA, 19 nt, Artificial Sequence
  Description of Artificial Sequence: Synthetic oligonucleotide
  Antisense strand to SEQ ID NO: 1782479
auuucugggacacauggau

SEQ ID NO: 1782481 - RNA, 19 nt, Artificial Sequence
  Description of Artificial Sequence: Synthetic oligonucleotide
  Sense strand starting at position 3804 of SEQ ID NO: 1562920
ccaugugucccagaaauaa

SEQ ID NO: 1782482 - RNA, 19 nt, Artificial Sequence
  Description of Artificial Sequence: Synthetic oligonucleotide
  Antisense strand to SEQ ID NO: 1782481
uuauuucugggacacaugg

SEQ ID NO: 1782483 - RNA, 19 nt, Artificial Sequence
  Description of Artificial Sequence: Synthetic oligonucleotide
  Sense strand starting at position 3887 of SEQ ID NO: 1562920
ggacucuucucuugggagu

SEQ ID NO: 1782484 - RNA, 19 nt, Artificial Sequence
  Description of Artificial Sequence: Synthetic oligonucleotide
  Antisense strand to SEQ ID NO: 1782483
acucccaagagaagagucc

SEQ ID NO: 1782485 - RNA, 19 nt, Artificial Sequence
  Description of Artificial Sequence: Synthetic oligonucleotide
  Sense strand starting at position 3888 of SEQ ID NO: 1562920
gacucuucucuugggagua

SEQ ID NO: 1782486 - RNA, 19 nt, Artificial Sequence
  Description of Artificial Sequence: Synthetic oligonucleotide
  Antisense strand to SEQ ID NO: 1782485
uacucccaagagaagaguc

SEQ ID NO: 1782487 - RNA, 19 nt, Artificial Sequence
  Description of Artificial Sequence: Synthetic oligonucleotide
  Sense strand starting at position 3901 of SEQ ID NO: 1562920
ggaguauccuggccagaaa

SEQ ID NO: 1782488 - RNA, 19 nt, Artificial Sequence
  Description of Artificial Sequence: Synthetic oligonucleotide
  Antisense strand to SEQ ID NO: 1782487
uuucuggccaggauacucc

SEQ ID NO: 1782489 - RNA, 19 nt, Artificial Sequence
  Description of Artificial Sequence: Synthetic oligonucleotide
  Sense strand starting at position 3902 of SEQ ID NO: 1562920
gaguauccuggccagaaac

SEQ ID NO: 1782490 - RNA, 19 nt, Artificial Sequence
  Description of Artificial Sequence: Synthetic oligonucleotide
  Antisense strand to SEQ ID NO: 1782489
guuucuggccaggauacuc

SEQ ID NO: 1782491 - RNA, 19 nt, Artificial Sequence
  Description of Artificial Sequence: Synthetic oligonucleotide
  Sense strand starting at position 3949 of SEQ ID NO: 1562920
guagguuucuucugggaaa

SEQ ID NO: 1782492 - RNA, 19 nt, Artificial Sequence
  Description of Artificial Sequence: Synthetic oligonucleotide
  Antisense strand to SEQ ID NO: 1782491
uuucccagaagaaaccuac

SEQ ID NO: 1782493 - RNA, 19 nt, Artificial Sequence
  Description of Artificial Sequence: Synthetic oligonucleotide
  Sense strand starting at position 3950 of SEQ ID NO: 1562920
uagguuucuucugggaaac

SEQ ID NO: 1782494 - RNA, 19 nt, Artificial Sequence
  Description of Artificial Sequence: Synthetic oligonucleotide
  Antisense strand to SEQ ID NO: 1782493
guuucccagaagaaaccua

SEQ ID NO: 1782495 - RNA, 19 nt, Artificial Sequence
  Description of Artificial Sequence: Synthetic oligonucleotide
  Sense strand starting at position 3952 of SEQ ID NO: 1562920
gguuucuucugggaaacca

SEQ ID NO: 1782496 - RNA, 19 nt, Artificial Sequence
  Description of Artificial Sequence: Synthetic oligonucleotide
  Antisense strand to SEQ ID NO: 1782495
ugguuucccagaagaaacc

SEQ ID NO: 1782497 - RNA, 19 nt, Artificial Sequence
  Description of Artificial Sequence: Synthetic oligonucleotide
  Sense strand starting at position 233 of SEQ ID NO: 1562921
ucaguccuccaguggagau

SEQ ID NO: 1782498 - RNA, 19 nt, Artificial Sequence
  Description of Artificial Sequence: Synthetic oligonucleotide
  Antisense strand to SEQ ID NO: 1782497
aucuccacuggaggacuga

SEQ ID NO: 1782499 - RNA, 19 nt, Artificial Sequence
  Description of Artificial Sequence: Synthetic oligonucleotide
  Sense strand starting at position 235 of SEQ ID NO: 1562921
aguccuccaguggagauau

SEQ ID NO: 1782500 - RNA, 19 nt, Artificial Sequence
  Description of Artificial Sequence: Synthetic oligonucleotide
  Antisense strand to SEQ ID NO: 1782499
auaucuccacuggaggacu

SEQ ID NO: 1782501 - RNA, 19 nt, Artificial Sequence
  Description of Artificial Sequence: Synthetic oligonucleotide
  Sense strand starting at position 284 of SEQ ID NO: 1562921
gaaagcagcuuauagauga

SEQ ID NO: 1782502 - RNA, 19 nt, Artificial Sequence
  Description of Artificial Sequence: Synthetic oligonucleotide
  Antisense strand to SEQ ID NO: 1782501
ucaucuauaagcugcuuuc

SEQ ID NO: 1782503 - RNA, 19 nt, Artificial Sequence
  Description of Artificial Sequence: Synthetic oligonucleotide
  Sense strand starting at position 291 of SEQ ID NO: 1562921
gcuuauagaugacugggaa

SEQ ID NO: 1782504 - RNA, 19 nt, Artificial Sequence
  Description of Artificial Sequence: Synthetic oligonucleotide
  Antisense strand to SEQ ID NO: 1782503
uucccagucaucuauaagc

SEQ ID NO: 1782505 - RNA, 19 nt, Artificial Sequence
  Description of Artificial Sequence: Synthetic oligonucleotide
  Sense strand starting at position 295 of SEQ ID NO: 1562921
auagaugacugggaaauua

SEQ ID NO: 1782506 - RNA, 19 nt, Artificial Sequence
  Description of Artificial Sequence: Synthetic oligonucleotide
  Antisense strand to SEQ ID NO: 1782505
uaauuucccagucaucuau

SEQ ID NO: 1782507 - RNA, 19 nt, Artificial Sequence
  Description of Artificial Sequence: Synthetic oligonucleotide
  Sense strand starting at position 340 of SEQ ID NO: 1562921
aaagaaacguaugagaucu

SEQ ID NO: 1782508 - RNA, 19 nt, Artificial Sequence
  Description of Artificial Sequence: Synthetic oligonucleotide
  Antisense strand to SEQ ID NO: 1782507
agaucucauacguuucuuu

SEQ ID NO: 1782509 - RNA, 19 nt, Artificial Sequence
  Description of Artificial Sequence: Synthetic oligonucleotide
  Sense strand starting at position 346 of SEQ ID NO: 1562921
acguaugagaucugagaga

SEQ ID NO: 1782510 - RNA, 19 nt, Artificial Sequence
  Description of Artificial Sequence: Synthetic oligonucleotide
  Antisense strand to SEQ ID NO: 1782509
ucucucagaucucauacgu

SEQ ID NO: 1782511 - RNA, 19 nt, Artificial Sequence
  Description of Artificial Sequence: Synthetic oligonucleotide
  Sense strand starting at position 476 of SEQ ID NO: 1562921
uggucaacagugggacaua

SEQ ID NO: 1782512 - RNA, 19 nt, Artificial Sequence
  Description of Artificial Sequence: Synthetic oligonucleotide
  Antisense strand to SEQ ID NO: 1782511
uaugucccacuguugacca

SEQ ID NO: 1782513 - RNA, 19 nt, Artificial Sequence
  Description of Artificial Sequence: Synthetic oligonucleotide
  Sense strand starting at position 487 of SEQ ID NO: 1562921
gggacauacuguugagaag

SEQ ID NO: 1782514 - RNA, 19 nt, Artificial Sequence
  Description of Artificial Sequence: Synthetic oligonucleotide
  Antisense strand to SEQ ID NO: 1782513
cuucucaacaguauguccc

SEQ ID NO: 1782515 - RNA, 19 nt, Artificial Sequence
  Description of Artificial Sequence: Synthetic oligonucleotide
  Sense strand starting at position 865 of SEQ ID NO: 1562921
acaagaagucgcugggaac

SEQ ID NO: 1782516 - RNA, 19 nt, Artificial Sequence
  Description of Artificial Sequence: Synthetic oligonucleotide
  Antisense strand to SEQ ID NO: 1782515
guucccagcgacuucuugu

SEQ ID NO: 1782517 - RNA, 19 nt, Artificial Sequence
  Description of Artificial Sequence: Synthetic oligonucleotide
  Sense strand starting at position 967 of SEQ ID NO: 1562921
aguggucaacggugugaca

SEQ ID NO: 1782518 - RNA, 19 nt, Artificial Sequence
  Description of Artificial Sequence: Synthetic oligonucleotide
  Antisense strand to SEQ ID NO: 1782517
ugucacaccguugaccacu

SEQ ID NO: 1782519 - RNA, 19 nt, Artificial Sequence
  Description of Artificial Sequence: Synthetic oligonucleotide
  Sense strand starting at position 969 of SEQ ID NO: 1562921
uggucaacggugugacaua

SEQ ID NO: 1782520 - RNA, 19 nt, Artificial Sequence
  Description of Artificial Sequence: Synthetic oligonucleotide
  Antisense strand to SEQ ID NO: 1782519
uaugucacaccguugacca

SEQ ID NO: 1782521 - RNA, 19 nt, Artificial Sequence
  Description of Artificial Sequence: Synthetic oligonucleotide
  Sense strand starting at position 1015 of SEQ ID NO: 1562921
ucgaaauucugacuugagu

SEQ ID NO: 1782522 - RNA, 19 nt, Artificial Sequence
  Description of Artificial Sequence: Synthetic oligonucleotide
  Antisense strand to SEQ ID NO: 1782521
acucaagucagaauuucga

SEQ ID NO: 1782523 - RNA, 19 nt, Artificial Sequence
  Description of Artificial Sequence: Synthetic oligonucleotide
  Sense strand starting at position 1024 of SEQ ID NO: 1562921
ugacuugagugguuucaag

SEQ ID NO: 1782524 - RNA, 19 nt, Artificial Sequence
  Description of Artificial Sequence: Synthetic oligonucleotide
  Antisense strand to SEQ ID NO: 1782523
cuugaaaccacucaaguca

SEQ ID NO: 1782525 - RNA, 19 nt, Artificial Sequence
  Description of Artificial Sequence: Synthetic oligonucleotide
  Sense strand starting at position 1071 of SEQ ID NO: 1562921
gucucucacuuguucuuaa

SEQ ID NO: 1782526 - RNA, 19 nt, Artificial Sequence
  Description of Artificial Sequence: Synthetic oligonucleotide
  Antisense strand to SEQ ID NO: 1782525
uuaagaacaagugagagac

SEQ ID NO: 1782527 - RNA, 19 nt, Artificial Sequence
  Description of Artificial Sequence: Synthetic oligonucleotide
  Sense strand starting at position 1075 of SEQ ID NO: 1562921
cucacuuguucuuaagaga

SEQ ID NO: 1782528 - RNA, 19 nt, Artificial Sequence
  Description of Artificial Sequence: Synthetic oligonucleotide
  Antisense strand to SEQ ID NO: 1782527
ucucuuaagaacaagugag

SEQ ID NO: 1782529 - RNA, 19 nt, Artificial Sequence
  Description of Artificial Sequence: Synthetic oligonucleotide
  Sense strand starting at position 1078 of SEQ ID NO: 1562921
acuuguucuuaagagaaac

SEQ ID NO: 1782530 - RNA, 19 nt, Artificial Sequence
  Description of Artificial Sequence: Synthetic oligonucleotide
  Antisense strand to SEQ ID NO: 1782529
guuucucuuaagaacaagu

SEQ ID NO: 1782531 - RNA, 19 nt, Artificial Sequence
  Description of Artificial Sequence: Synthetic oligonucleotide
  Sense strand starting at position 1452 of SEQ ID NO: 1562921
cgaccugguuugcuuuaaa

SEQ ID NO: 1782532 - RNA, 19 nt, Artificial Sequence
  Description of Artificial Sequence: Synthetic oligonucleotide
  Antisense strand to SEQ ID NO: 1782531
uuuaaagcaaaccaggucg

SEQ ID NO: 1782533 - RNA, 19 nt, Artificial Sequence
  Description of Artificial Sequence: Synthetic oligonucleotide
  Sense strand starting at position 1455 of SEQ ID NO: 1562921
ccugguuugcuuuaaauua

SEQ ID NO: 1782534 - RNA, 19 nt, Artificial Sequence
  Description of Artificial Sequence: Synthetic oligonucleotide
  Antisense strand to SEQ ID NO: 1782533
uaauuuaaagcaaaccagg

SEQ ID NO: 1782535 - RNA, 19 nt, Artificial Sequence
  Description of Artificial Sequence: Synthetic oligonucleotide
  Sense strand starting at position 1486 of SEQ ID NO: 1562921
gcacguuugcaggcugaua

SEQ ID NO: 1782536 - RNA, 19 nt, Artificial Sequence
  Description of Artificial Sequence: Synthetic oligonucleotide
  Antisense strand to SEQ ID NO: 1782535
uaucagccugcaaacgugc

SEQ ID NO: 1782537 - RNA, 19 nt, Artificial Sequence
  Description of Artificial Sequence: Synthetic oligonucleotide
  Sense strand starting at position 1497 of SEQ ID NO: 1562921
ggcugauaggcaugaacca

SEQ ID NO: 1782538 - RNA, 19 nt, Artificial Sequence
  Description of Artificial Sequence: Synthetic oligonucleotide
  Antisense strand to SEQ ID NO: 1782537
ugguucaugccuaucagcc

SEQ ID NO: 1782539 - RNA, 19 nt, Artificial Sequence
  Description of Artificial Sequence: Synthetic oligonucleotide
  Sense strand starting at position 1566 of SEQ ID NO: 1562921
ggcgaaacucgcgaacaga

SEQ ID NO: 1782540 - RNA, 19 nt, Artificial Sequence
  Description of Artificial Sequence: Synthetic oligonucleotide
  Antisense strand to SEQ ID NO: 1782539
ucuguucgcgaguuucgcc

SEQ ID NO: 1782541 - RNA, 19 nt, Artificial Sequence
  Description of Artificial Sequence: Synthetic oligonucleotide
  Sense strand starting at position 1718 of SEQ ID NO: 1562921
gcagcuuccgggaggaagu

SEQ ID NO: 1782542 - RNA, 19 nt, Artificial Sequence
  Description of Artificial Sequence: Synthetic oligonucleotide
  Antisense strand to SEQ ID NO: 1782541
acuuccucccggaagcugc

SEQ ID NO: 1782543 - RNA, 19 nt, Artificial Sequence
  Description of Artificial Sequence: Synthetic oligonucleotide
  Sense strand starting at position 2017 of SEQ ID NO: 1562921
ugggaauugugguucgcua

SEQ ID NO: 1782544 - RNA, 19 nt, Artificial Sequence
  Description of Artificial Sequence: Synthetic oligonucleotide
  Antisense strand to SEQ ID NO: 1782543
uagcgaaccacaauuccca

SEQ ID NO: 1782545 - RNA, 19 nt, Artificial Sequence
  Description of Artificial Sequence: Synthetic oligonucleotide
  Sense strand starting at position 2222 of SEQ ID NO: 1562921
guucucaggucuuauuuau

SEQ ID NO: 1782546 - RNA, 19 nt, Artificial Sequence
  Description of Artificial Sequence: Synthetic oligonucleotide
  Antisense strand to SEQ ID NO: 1782545
auaaauaagaccugagaac

SEQ ID NO: 1782547 - RNA, 19 nt, Artificial Sequence
  Description of Artificial Sequence: Synthetic oligonucleotide
  Sense strand starting at position 2599 of SEQ ID NO: 1562921
cguggcagaugccuucaaa

SEQ ID NO: 1782548 - RNA, 19 nt, Artificial Sequence
  Description of Artificial Sequence: Synthetic oligonucleotide
  Antisense strand to SEQ ID NO: 1782547
uuugaaggcaucugccacg

SEQ ID NO: 1782549 - RNA, 19 nt, Artificial Sequence
  Description of Artificial Sequence: Synthetic oligonucleotide
  Sense strand starting at position 2825 of SEQ ID NO: 1562921
ggguaaucuugccuaggcu

SEQ ID NO: 1782550 - RNA, 19 nt, Artificial Sequence
  Description of Artificial Sequence: Synthetic oligonucleotide
  Antisense strand to SEQ ID NO: 1782549
agccuaggcaagauuaccc

SEQ ID NO: 1782551 - RNA, 19 nt, Artificial Sequence
  Description of Artificial Sequence: Synthetic oligonucleotide
  Sense strand starting at position 2856 of SEQ ID NO: 1562921
ugccauuuguaucccauga

SEQ ID NO: 1782552 - RNA, 19 nt, Artificial Sequence
  Description of Artificial Sequence: Synthetic oligonucleotide
  Antisense strand to SEQ ID NO: 1782551
ucaugggauacaaauggca

SEQ ID NO: 1782553 - RNA, 19 nt, Artificial Sequence
  Description of Artificial Sequence: Synthetic oligonucleotide
  Sense strand starting at position 2858 of SEQ ID NO: 1562921
ccauuuguaucccaugacu

SEQ ID NO: 1782554 - RNA, 19 nt, Artificial Sequence
  Description of Artificial Sequence: Synthetic oligonucleotide
  Antisense strand to SEQ ID NO: 1782553
agucaugggauacaaaugg

SEQ ID NO: 1782555 - RNA, 19 nt, Artificial Sequence
  Description of Artificial Sequence: Synthetic oligonucleotide
  Sense strand starting at position 2922 of SEQ ID NO: 1562921
gguaaccacugaucugaaa

SEQ ID NO: 1782556 - RNA, 19 nt, Artificial Sequence
  Description of Artificial Sequence: Synthetic oligonucleotide
  Antisense strand to SEQ ID NO: 1782555
uuucagaucagugguuacc

SEQ ID NO: 1782557 - RNA, 19 nt, Artificial Sequence
  Description of Artificial Sequence: Synthetic oligonucleotide
  Sense strand starting at position 3380 of SEQ ID NO: 1562921
cagagugacucugccuaaa

SEQ ID NO: 1782558 - RNA, 19 nt, Artificial Sequence
  Description of Artificial Sequence: Synthetic oligonucleotide
  Antisense strand to SEQ ID NO: 1782557
uuuaggcagagucacucug

SEQ ID NO: 1782559 - RNA, 19 nt, Artificial Sequence
  Description of Artificial Sequence: Synthetic oligonucleotide
  Sense strand starting at position 3409 of SEQ ID NO: 1562921
uaacaugucuggucaaagu

SEQ ID NO: 1782560 - RNA, 19 nt, Artificial Sequence
  Description of Artificial Sequence: Synthetic oligonucleotide
  Antisense strand to SEQ ID NO: 1782559
acuuugaccagacauguua

SEQ ID NO: 1782561 - RNA, 19 nt, Artificial Sequence
  Description of Artificial Sequence: Synthetic oligonucleotide
  Sense strand starting at position 3569 of SEQ ID NO: 1562921
gguagcugggauuauuaca

SEQ ID NO: 1782562 - RNA, 19 nt, Artificial Sequence
  Description of Artificial Sequence: Synthetic oligonucleotide
  Antisense strand to SEQ ID NO: 1782561
uguaauaaucccagcuacc

SEQ ID NO: 1782563 - RNA, 19 nt, Artificial Sequence
  Description of Artificial Sequence: Synthetic oligonucleotide
  Sense strand starting at position 3853 of SEQ ID NO: 1562921
gcuggcuucuuauucucua

SEQ ID NO: 1782564 - RNA, 19 nt, Artificial Sequence
  Description of Artificial Sequence: Synthetic oligonucleotide
  Antisense strand to SEQ ID NO: 1782563
uagagaauaagaagccagc

SEQ ID NO: 1782565 - RNA, 19 nt, Artificial Sequence
  Description of Artificial Sequence: Synthetic oligonucleotide
  Sense strand starting at position 3857 of SEQ ID NO: 1562921
gcuucuuauucucuagguu

SEQ ID NO: 1782566 - RNA, 19 nt, Artificial Sequence
  Description of Artificial Sequence: Synthetic oligonucleotide
  Antisense strand to SEQ ID NO: 1782565
aaccuagagaauaagaagc

SEQ ID NO: 1782567 - RNA, 19 nt, Artificial Sequence
  Description of Artificial Sequence: Synthetic oligonucleotide
  Sense strand starting at position 3858 of SEQ ID NO: 1562921
cuucuuauucucuagguuu

SEQ ID NO: 1782568 - RNA, 19 nt, Artificial Sequence
  Description of Artificial Sequence: Synthetic oligonucleotide
  Antisense strand to SEQ ID NO: 1782567
aaaccuagagaauaagaag

SEQ ID NO: 1782569 - RNA, 19 nt, Artificial Sequence
  Description of Artificial Sequence: Synthetic oligonucleotide
  Sense strand starting at position 3934 of SEQ ID NO: 1562921
ucccauaaagucugucaca

SEQ ID NO: 1782570 - RNA, 19 nt, Artificial Sequence
  Description of Artificial Sequence: Synthetic oligonucleotide
  Antisense strand to SEQ ID NO: 1782569
ugugacagacuuuauggga

SEQ ID NO: 1782571 - RNA, 19 nt, Artificial Sequence
  Description of Artificial Sequence: Synthetic oligonucleotide
  Sense strand starting at position 3935 of SEQ ID NO: 1562921
cccauaaagucugucacaa

SEQ ID NO: 1782572 - RNA, 19 nt, Artificial Sequence
  Description of Artificial Sequence: Synthetic oligonucleotide
  Antisense strand to SEQ ID NO: 1782571
uugugacagacuuuauggg

SEQ ID NO: 1782573 - RNA, 19 nt, Artificial Sequence
  Description of Artificial Sequence: Synthetic oligonucleotide
  Sense strand starting at position 3964 of SEQ ID NO: 1562921
uuuguaauccuguguaauu

SEQ ID NO: 1782574 - RNA, 19 nt, Artificial Sequence
  Description of Artificial Sequence: Synthetic oligonucleotide
  Antisense strand to SEQ ID NO: 1782573
aauuacacaggauuacaaa

SEQ ID NO: 1782575 - RNA, 19 nt, Artificial Sequence
  Description of Artificial Sequence: Synthetic oligonucleotide
  Sense strand starting at position 3965 of SEQ ID NO: 1562921
uuguaauccuguguaauuc

SEQ ID NO: 1782576 - RNA, 19 nt, Artificial Sequence
  Description of Artificial Sequence: Synthetic oligonucleotide
  Antisense strand to SEQ ID NO: 1782575
gaauuacacaggauuacaa

SEQ ID NO: 1782577 - RNA, 19 nt, Artificial Sequence
  Description of Artificial Sequence: Synthetic oligonucleotide
  Sense strand starting at position 111 of SEQ ID NO: 1562922
agauguaaauccuagauuu

SEQ ID NO: 1782578 - RNA, 19 nt, Artificial Sequence
  Description of Artificial Sequence: Synthetic oligonucleotide
  Antisense strand to SEQ ID NO: 1782577
aaaucuaggauuuacaucu

SEQ ID NO: 1782579 - RNA, 19 nt, Artificial Sequence
  Description of Artificial Sequence: Synthetic oligonucleotide
  Sense strand starting at position 193 of SEQ ID NO: 1562922
cauuucuaagcguacaguu

SEQ ID NO: 1782580 - RNA, 19 nt, Artificial Sequence
  Description of Artificial Sequence: Synthetic oligonucleotide
  Antisense strand to SEQ ID NO: 1782579
aacuguacgcuuagaaaug

SEQ ID NO: 1782581 - RNA, 19 nt, Artificial Sequence
  Description of Artificial Sequence: Synthetic oligonucleotide
  Sense strand starting at position 203 of SEQ ID NO: 1562922
cguacaguuccauggcauu

SEQ ID NO: 1782582 - RNA, 19 nt, Artificial Sequence
  Description of Artificial Sequence: Synthetic oligonucleotide
  Antisense strand to SEQ ID NO: 1782581
aaugccauggaacuguacg

SEQ ID NO: 1782583 - RNA, 19 nt, Artificial Sequence
  Description of Artificial Sequence: Synthetic oligonucleotide
  Sense strand starting at position 229 of SEQ ID NO: 1562922
gucacauugcugugcaaug

SEQ ID NO: 1782584 - RNA, 19 nt, Artificial Sequence
  Description of Artificial Sequence: Synthetic oligonucleotide
  Antisense strand to SEQ ID NO: 1782583
cauugcacagcaaugugac

SEQ ID NO: 1782585 - RNA, 19 nt, Artificial Sequence
  Description of Artificial Sequence: Synthetic oligonucleotide
  Sense strand starting at position 230 of SEQ ID NO: 1562922
ucacauugcugugcaauga

SEQ ID NO: 1782586 - RNA, 19 nt, Artificial Sequence
  Description of Artificial Sequence: Synthetic oligonucleotide
  Antisense strand to SEQ ID NO: 1782585
ucauugcacagcaauguga

SEQ ID NO: 1782587 - RNA, 19 nt, Artificial Sequence
  Description of Artificial Sequence: Synthetic oligonucleotide
  Sense strand starting at position 263 of SEQ ID NO: 1562922
aggccugacuuucuugaua

SEQ ID NO: 1782588 - RNA, 19 nt, Artificial Sequence
  Description of Artificial Sequence: Synthetic oligonucleotide
  Antisense strand to SEQ ID NO: 1782587
uaucaagaaagucaggccu

SEQ ID NO: 1782589 - RNA, 19 nt, Artificial Sequence
  Description of Artificial Sequence: Synthetic oligonucleotide
  Sense strand starting at position 265 of SEQ ID NO: 1562922
gccugacuuucuugauaga

SEQ ID NO: 1782590 - RNA, 19 nt, Artificial Sequence
  Description of Artificial Sequence: Synthetic oligonucleotide
  Antisense strand to SEQ ID NO: 1782589
ucuaucaagaaagucaggc

SEQ ID NO: 1782591 - RNA, 19 nt, Artificial Sequence
  Description of Artificial Sequence: Synthetic oligonucleotide
  Sense strand starting at position 268 of SEQ ID NO: 1562922
ugacuuucuugauagacug

SEQ ID NO: 1782592 - RNA, 19 nt, Artificial Sequence
  Description of Artificial Sequence: Synthetic oligonucleotide
  Antisense strand to SEQ ID NO: 1782591
cagucuaucaagaaaguca

SEQ ID NO: 1782593 - RNA, 19 nt, Artificial Sequence
  Description of Artificial Sequence: Synthetic oligonucleotide
  Sense strand starting at position 283 of SEQ ID NO: 1562922
acuguaagcucccuguagu

SEQ ID NO: 1782594 - RNA, 19 nt, Artificial Sequence
  Description of Artificial Sequence: Synthetic oligonucleotide
  Antisense strand to SEQ ID NO: 1782593
acuacagggagcuuacagu

SEQ ID NO: 1782595 - RNA, 19 nt, Artificial Sequence
  Description of Artificial Sequence: Synthetic oligonucleotide
  Sense strand starting at position 284 of SEQ ID NO: 1562922
cuguaagcucccuguaguc

SEQ ID NO: 1782596 - RNA, 19 nt, Artificial Sequence
  Description of Artificial Sequence: Synthetic oligonucleotide
  Antisense strand to SEQ ID NO: 1782595
gacuacagggagcuuacag

SEQ ID NO: 1782597 - RNA, 19 nt, Artificial Sequence
  Description of Artificial Sequence: Synthetic oligonucleotide
  Sense strand starting at position 335 of SEQ ID NO: 1562922
ggugguaagugugauggca

SEQ ID NO: 1782598 - RNA, 19 nt, Artificial Sequence
  Description of Artificial Sequence: Synthetic oligonucleotide
  Antisense strand to SEQ ID NO: 1782597
ugccaucacacuuaccacc

SEQ ID NO: 1782599 - RNA, 19 nt, Artificial Sequence
  Description of Artificial Sequence: Synthetic oligonucleotide
  Sense strand starting at position 337 of SEQ ID NO: 1562922
ugguaagugugauggcaga

SEQ ID NO: 1782600 - RNA, 19 nt, Artificial Sequence
  Description of Artificial Sequence: Synthetic oligonucleotide
  Antisense strand to SEQ ID NO: 1782599
ucugccaucacacuuacca

SEQ ID NO: 1782601 - RNA, 19 nt, Artificial Sequence
  Description of Artificial Sequence: Synthetic oligonucleotide
  Sense strand starting at position 450 of SEQ ID NO: 1562922
ggcuucaggucagauggua

SEQ ID NO: 1782602 - RNA, 19 nt, Artificial Sequence
  Description of Artificial Sequence: Synthetic oligonucleotide
  Antisense strand to SEQ ID NO: 1782601
uaccaucugaccugaagcc

SEQ ID NO: 1782603 - RNA, 19 nt, Artificial Sequence
  Description of Artificial Sequence: Synthetic oligonucleotide
  Sense strand starting at position 775 of SEQ ID NO: 1562922
ggguaucuuaaaggaauuc

SEQ ID NO: 1782604 - RNA, 19 nt, Artificial Sequence
  Description of Artificial Sequence: Synthetic oligonucleotide
  Antisense strand to SEQ ID NO: 1782603
gaauuccuuuaagauaccc

SEQ ID NO: 1782605 - RNA, 19 nt, Artificial Sequence
  Description of Artificial Sequence: Synthetic oligonucleotide
  Sense strand starting at position 808 of SEQ ID NO: 1562922
uguagagguucauggcuuu

SEQ ID NO: 1782606 - RNA, 19 nt, Artificial Sequence
  Description of Artificial Sequence: Synthetic oligonucleotide
  Antisense strand to SEQ ID NO: 1782605
aaagccaugaaccucuaca

SEQ ID NO: 1782607 - RNA, 19 nt, Artificial Sequence
  Description of Artificial Sequence: Synthetic oligonucleotide
  Sense strand starting at position 987 of SEQ ID NO: 1562922
gcccaaugccuuugguauu

SEQ ID NO: 1782608 - RNA, 19 nt, Artificial Sequence
  Description of Artificial Sequence: Synthetic oligonucleotide
  Antisense strand to SEQ ID NO: 1782607
aauaccaaaggcauugggc

SEQ ID NO: 1782609 - RNA, 19 nt, Artificial Sequence
  Description of Artificial Sequence: Synthetic oligonucleotide
  Sense strand starting at position 1031 of SEQ ID NO: 1562922
agcgaaauuugacaacaga

SEQ ID NO: 1782610 - RNA, 19 nt, Artificial Sequence
  Description of Artificial Sequence: Synthetic oligonucleotide
  Antisense strand to SEQ ID NO: 1782609
ucuguugucaaauuucgcu

SEQ ID NO: 1782611 - RNA, 19 nt, Artificial Sequence
  Description of Artificial Sequence: Synthetic oligonucleotide
  Sense strand starting at position 2210 of SEQ ID NO: 1562922
gaaagcaaucccuagguca

SEQ ID NO: 1782612 - RNA, 19 nt, Artificial Sequence
  Description of Artificial Sequence: Synthetic oligonucleotide
  Antisense strand to SEQ ID NO: 1782611
ugaccuagggauugcuuuc

SEQ ID NO: 1782613 - RNA, 19 nt, Artificial Sequence
  Description of Artificial Sequence: Synthetic oligonucleotide
  Sense strand starting at position 2224 of SEQ ID NO: 1562922
ggucacagcgcccagaaau

SEQ ID NO: 1782614 - RNA, 19 nt, Artificial Sequence
  Description of Artificial Sequence: Synthetic oligonucleotide
  Antisense strand to SEQ ID NO: 1782613
auuucugggcgcugugacc

SEQ ID NO: 1782615 - RNA, 19 nt, Artificial Sequence
  Description of Artificial Sequence: Synthetic oligonucleotide
  Sense strand starting at position 2256 of SEQ ID NO: 1562922
ccgucaauagcugguaagu

SEQ ID NO: 1782616 - RNA, 19 nt, Artificial Sequence
  Description of Artificial Sequence: Synthetic oligonucleotide
  Antisense strand to SEQ ID NO: 1782615
acuuaccagcuauugacgg

SEQ ID NO: 1782617 - RNA, 19 nt, Artificial Sequence
  Description of Artificial Sequence: Synthetic oligonucleotide
  Sense strand starting at position 2344 of SEQ ID NO: 1562922
ggcucauuaugaguuguuu

SEQ ID NO: 1782618 - RNA, 19 nt, Artificial Sequence
  Description of Artificial Sequence: Synthetic oligonucleotide
  Antisense strand to SEQ ID NO: 1782617
aaacaacucauaaugagcc

SEQ ID NO: 1782619 - RNA, 19 nt, Artificial Sequence
  Description of Artificial Sequence: Synthetic oligonucleotide
  Sense strand starting at position 2346 of SEQ ID NO: 1562922
cucauuaugaguuguuugu

SEQ ID NO: 1782620 - RNA, 19 nt, Artificial Sequence
  Description of Artificial Sequence: Synthetic oligonucleotide
  Antisense strand to SEQ ID NO: 1782619
acaaacaacucauaaugag

SEQ ID NO: 1782621 - RNA, 19 nt, Artificial Sequence
  Description of Artificial Sequence: Synthetic oligonucleotide
  Sense strand starting at position 2348 of SEQ ID NO: 1562922
cauuaugaguuguuuguuu

SEQ ID NO: 1782622 - RNA, 19 nt, Artificial Sequence
  Description of Artificial Sequence: Synthetic oligonucleotide
  Antisense strand to SEQ ID NO: 1782621
aaacaaacaacucauaaug

SEQ ID NO: 1782623 - RNA, 19 nt, Artificial Sequence
  Description of Artificial Sequence: Synthetic oligonucleotide
  Sense strand starting at position 2353 of SEQ ID NO: 1562922
ugaguuguuuguuuccaca

SEQ ID NO: 1782624 - RNA, 19 nt, Artificial Sequence
  Description of Artificial Sequence: Synthetic oligonucleotide
  Antisense strand to SEQ ID NO: 1782623
uguggaaacaaacaacuca

SEQ ID NO: 1782625 - RNA, 19 nt, Artificial Sequence
  Description of Artificial Sequence: Synthetic oligonucleotide
  Sense strand starting at position 2355 of SEQ ID NO: 1562922
aguuguuuguuuccacaaa

SEQ ID NO: 1782626 - RNA, 19 nt, Artificial Sequence
  Description of Artificial Sequence: Synthetic oligonucleotide
  Antisense strand to SEQ ID NO: 1782625
uuuguggaaacaaacaacu

SEQ ID NO: 1782627 - RNA, 19 nt, Artificial Sequence
  Description of Artificial Sequence: Synthetic oligonucleotide
  Sense strand starting at position 2356 of SEQ ID NO: 1562922
guuguuuguuuccacaaac

SEQ ID NO: 1782628 - RNA, 19 nt, Artificial Sequence
  Description of Artificial Sequence: Synthetic oligonucleotide
  Antisense strand to SEQ ID NO: 1782627
guuuguggaaacaaacaac

SEQ ID NO: 1782629 - RNA, 19 nt, Artificial Sequence
  Description of Artificial Sequence: Synthetic oligonucleotide
  Sense strand starting at position 2394 of SEQ ID NO: 1562922
uuccguucuggaggucaga

SEQ ID NO: 1782630 - RNA, 19 nt, Artificial Sequence
  Description of Artificial Sequence: Synthetic oligonucleotide
  Antisense strand to SEQ ID NO: 1782629
ucugaccuccagaacggaa

SEQ ID NO: 1782631 - RNA, 19 nt, Artificial Sequence
  Description of Artificial Sequence: Synthetic oligonucleotide
  Sense strand starting at position 2450 of SEQ ID NO: 1562922
gccagaaugcguuccuuuc

SEQ ID NO: 1782632 - RNA, 19 nt, Artificial Sequence
  Description of Artificial Sequence: Synthetic oligonucleotide
  Antisense strand to SEQ ID NO: 1782631
gaaaggaacgcauucuggc

SEQ ID NO: 1782633 - RNA, 19 nt, Artificial Sequence
  Description of Artificial Sequence: Synthetic oligonucleotide
  Sense strand starting at position 2456 of SEQ ID NO: 1562922
augcguuccuuucugagga

SEQ ID NO: 1782634 - RNA, 19 nt, Artificial Sequence
  Description of Artificial Sequence: Synthetic oligonucleotide
  Antisense strand to SEQ ID NO: 1782633
uccucagaaaggaacgcau

SEQ ID NO: 1782635 - RNA, 19 nt, Artificial Sequence
  Description of Artificial Sequence: Synthetic oligonucleotide
  Sense strand starting at position 2458 of SEQ ID NO: 1562922
gcguuccuuucugaggauu

SEQ ID NO: 1782636 - RNA, 19 nt, Artificial Sequence
  Description of Artificial Sequence: Synthetic oligonucleotide
  Antisense strand to SEQ ID NO: 1782635
aauccucagaaaggaacgc

SEQ ID NO: 1782637 - RNA, 19 nt, Artificial Sequence
  Description of Artificial Sequence: Synthetic oligonucleotide
  Sense strand starting at position 2460 of SEQ ID NO: 1562922
guuccuuucugaggauucu

SEQ ID NO: 1782638 - RNA, 19 nt, Artificial Sequence
  Description of Artificial Sequence: Synthetic oligonucleotide
  Antisense strand to SEQ ID NO: 1782637
agaauccucagaaaggaac

SEQ ID NO: 1782639 - RNA, 19 nt, Artificial Sequence
  Description of Artificial Sequence: Synthetic oligonucleotide
  Sense strand starting at position 2461 of SEQ ID NO: 1562922
uuccuuucugaggauucua

SEQ ID NO: 1782640 - RNA, 19 nt, Artificial Sequence
  Description of Artificial Sequence: Synthetic oligonucleotide
  Antisense strand to SEQ ID NO: 1782639
uagaauccucagaaaggaa

SEQ ID NO: 1782641 - RNA, 19 nt, Artificial Sequence
  Description of Artificial Sequence: Synthetic oligonucleotide
  Sense strand starting at position 3037 of SEQ ID NO: 1562922
ccgggucugccauguaauc

SEQ ID NO: 1782642 - RNA, 19 nt, Artificial Sequence
  Description of Artificial Sequence: Synthetic oligonucleotide
  Antisense strand to SEQ ID NO: 1782641
gauuacauggcagacccgg

SEQ ID NO: 1782643 - RNA, 19 nt, Artificial Sequence
  Description of Artificial Sequence: Synthetic oligonucleotide
  Sense strand starting at position 3039 of SEQ ID NO: 1562922
gggucugccauguaaucua

SEQ ID NO: 1782644 - RNA, 19 nt, Artificial Sequence
  Description of Artificial Sequence: Synthetic oligonucleotide
  Antisense strand to SEQ ID NO: 1782643
uagauuacauggcagaccc

SEQ ID NO: 1782645 - RNA, 19 nt, Artificial Sequence
  Description of Artificial Sequence: Synthetic oligonucleotide
  Sense strand starting at position 3259 of SEQ ID NO: 1562922
uuccuagugucugggaaca

SEQ ID NO: 1782646 - RNA, 19 nt, Artificial Sequence
  Description of Artificial Sequence: Synthetic oligonucleotide
  Antisense strand to SEQ ID NO: 1782645
uguucccagacacuaggaa

SEQ ID NO: 1782647 - RNA, 19 nt, Artificial Sequence
  Description of Artificial Sequence: Synthetic oligonucleotide
  Sense strand starting at position 3528 of SEQ ID NO: 1562922
gccguuggaaaguauaauu

SEQ ID NO: 1782648 - RNA, 19 nt, Artificial Sequence
  Description of Artificial Sequence: Synthetic oligonucleotide
  Antisense strand to SEQ ID NO: 1782647
aauuauacuuuccaacggc

SEQ ID NO: 1782649 - RNA, 19 nt, Artificial Sequence
  Description of Artificial Sequence: Synthetic oligonucleotide
  Sense strand starting at position 3614 of SEQ ID NO: 1562922
cuguguccuugccaggaau

SEQ ID NO: 1782650 - RNA, 19 nt, Artificial Sequence
  Description of Artificial Sequence: Synthetic oligonucleotide
  Antisense strand to SEQ ID NO: 1782649
auuccuggcaaggacacag

SEQ ID NO: 1782651 - RNA, 19 nt, Artificial Sequence
  Description of Artificial Sequence: Synthetic oligonucleotide
  Sense strand starting at position 3616 of SEQ ID NO: 1562922
guguccuugccaggaauga

SEQ ID NO: 1782652 - RNA, 19 nt, Artificial Sequence
  Description of Artificial Sequence: Synthetic oligonucleotide
  Antisense strand to SEQ ID NO: 1782651
ucauuccuggcaaggacac

SEQ ID NO: 1782653 - RNA, 19 nt, Artificial Sequence
  Description of Artificial Sequence: Synthetic oligonucleotide
  Sense strand starting at position 3617 of SEQ ID NO: 1562922
uguccuugccaggaaugaa

SEQ ID NO: 1782654 - RNA, 19 nt, Artificial Sequence
  Description of Artificial Sequence: Synthetic oligonucleotide
  Antisense strand to SEQ ID NO: 1782653
uucauuccuggcaaggaca

SEQ ID NO: 1782655 - RNA, 19 nt, Artificial Sequence
  Description of Artificial Sequence: Synthetic oligonucleotide
  Sense strand starting at position 3867 of SEQ ID NO: 1562922
ggcuacuucuuauaaacag

SEQ ID NO: 1782656 - RNA, 19 nt, Artificial Sequence
  Description of Artificial Sequence: Synthetic oligonucleotide
  Antisense strand to SEQ ID NO: 1782655
cuguuuauaagaaguagcc

SEQ ID NO: 1782657 - RNA, 19 nt, Artificial Sequence
  Description of Artificial Sequence: Synthetic oligonucleotide
  Sense strand starting at position 2214 of SEQ ID NO: 1562923
uacguuucccuuugaggua

SEQ ID NO: 1782658 - RNA, 19 nt, Artificial Sequence
  Description of Artificial Sequence: Synthetic oligonucleotide
  Antisense strand to SEQ ID NO: 1782657
uaccucaaagggaaacgua

SEQ ID NO: 1782659 - RNA, 19 nt, Artificial Sequence
  Description of Artificial Sequence: Synthetic oligonucleotide
  Sense strand starting at position 2215 of SEQ ID NO: 1562923
acguuucccuuugagguau

SEQ ID NO: 1782660 - RNA, 19 nt, Artificial Sequence
  Description of Artificial Sequence: Synthetic oligonucleotide
  Antisense strand to SEQ ID NO: 1782659
auaccucaaagggaaacgu

SEQ ID NO: 1782661 - RNA, 19 nt, Artificial Sequence
  Description of Artificial Sequence: Synthetic oligonucleotide
  Sense strand starting at position 2223 of SEQ ID NO: 1562923
cuuugagguauuggcuaaa

SEQ ID NO: 1782662 - RNA, 19 nt, Artificial Sequence
  Description of Artificial Sequence: Synthetic oligonucleotide
  Antisense strand to SEQ ID NO: 1782661
uuuagccaauaccucaaag

SEQ ID NO: 1782663 - RNA, 19 nt, Artificial Sequence
  Description of Artificial Sequence: Synthetic oligonucleotide
  Sense strand starting at position 2226 of SEQ ID NO: 1562923
ugagguauuggcuaaaguu

SEQ ID NO: 1782664 - RNA, 19 nt, Artificial Sequence
  Description of Artificial Sequence: Synthetic oligonucleotide
  Antisense strand to SEQ ID NO: 1782663
aacuuuagccaauaccuca

SEQ ID NO: 1782665 - RNA, 19 nt, Artificial Sequence
  Description of Artificial Sequence: Synthetic oligonucleotide
  Sense strand starting at position 2247 of SEQ ID NO: 1562923
gugcaagcauaguuaauuu

SEQ ID NO: 1782666 - RNA, 19 nt, Artificial Sequence
  Description of Artificial Sequence: Synthetic oligonucleotide
  Antisense strand to SEQ ID NO: 1782665
aaauuaacuaugcuugcac

SEQ ID NO: 1782667 - RNA, 19 nt, Artificial Sequence
  Description of Artificial Sequence: Synthetic oligonucleotide
  Sense strand starting at position 2298 of SEQ ID NO: 1562923
cgacgcagcauuugagaga

SEQ ID NO: 1782668 - RNA, 19 nt, Artificial Sequence
  Description of Artificial Sequence: Synthetic oligonucleotide
  Antisense strand to SEQ ID NO: 1782667
ucucucaaaugcugcgucg

SEQ ID NO: 1782669 - RNA, 19 nt, Artificial Sequence
  Description of Artificial Sequence: Synthetic oligonucleotide
  Sense strand starting at position 2566 of SEQ ID NO: 1562923
uuaaguaugugccuauuua

SEQ ID NO: 1782670 - RNA, 19 nt, Artificial Sequence
  Description of Artificial Sequence: Synthetic oligonucleotide
  Antisense strand to SEQ ID NO: 1782669
uaaauaggcacauacuuaa

SEQ ID NO: 1782671 - RNA, 19 nt, Artificial Sequence
  Description of Artificial Sequence: Synthetic oligonucleotide
  Sense strand starting at position 2581 of SEQ ID NO: 1562923
uuuaacaagugcuggaauu

SEQ ID NO: 1782672 - RNA, 19 nt, Artificial Sequence
  Description of Artificial Sequence: Synthetic oligonucleotide
  Antisense strand to SEQ ID NO: 1782671
aauuccagcacuuguuaaa

SEQ ID NO: 1782673 - RNA, 19 nt, Artificial Sequence
  Description of Artificial Sequence: Synthetic oligonucleotide
  Sense strand starting at position 2594 of SEQ ID NO: 1562923
ggaauuguuuaauuccauc

SEQ ID NO: 1782674 - RNA, 19 nt, Artificial Sequence
  Description of Artificial Sequence: Synthetic oligonucleotide
  Antisense strand to SEQ ID NO: 1782673
gauggaauuaaacaauucc

SEQ ID NO: 1782675 - RNA, 19 nt, Artificial Sequence
  Description of Artificial Sequence: Synthetic oligonucleotide
  Sense strand starting at position 2653 of SEQ ID NO: 1562923
gagcgagccguggguaaau

SEQ ID NO: 1782676 - RNA, 19 nt, Artificial Sequence
  Description of Artificial Sequence: Synthetic oligonucleotide
  Antisense strand to SEQ ID NO: 1782675
auuuacccacggcucgcuc

SEQ ID NO: 1782677 - RNA, 19 nt, Artificial Sequence
  Description of Artificial Sequence: Synthetic oligonucleotide
  Sense strand starting at position 2662 of SEQ ID NO: 1562923
guggguaaauguugggaaa

SEQ ID NO: 1782678 - RNA, 19 nt, Artificial Sequence
  Description of Artificial Sequence: Synthetic oligonucleotide
  Antisense strand to SEQ ID NO: 1782677
uuucccaacauuuacccac

SEQ ID NO: 1782679 - RNA, 19 nt, Artificial Sequence
  Description of Artificial Sequence: Synthetic oligonucleotide
  Sense strand starting at position 2715 of SEQ ID NO: 1562923
uccaguugucaguguauug

SEQ ID NO: 1782680 - RNA, 19 nt, Artificial Sequence
  Description of Artificial Sequence: Synthetic oligonucleotide
  Antisense strand to SEQ ID NO: 1782679
caauacacugacaacugga

SEQ ID NO: 1782681 - RNA, 19 nt, Artificial Sequence
  Description of Artificial Sequence: Synthetic oligonucleotide
  Sense strand starting at position 2724 of SEQ ID NO: 1562923
caguguauugcccaggauu

SEQ ID NO: 1782682 - RNA, 19 nt, Artificial Sequence
  Description of Artificial Sequence: Synthetic oligonucleotide
  Antisense strand to SEQ ID NO: 1782681
aauccugggcaauacacug

SEQ ID NO: 1782683 - RNA, 19 nt, Artificial Sequence
  Description of Artificial Sequence: Synthetic oligonucleotide
  Sense strand starting at position 2744 of SEQ ID NO: 1562923
accgaugcucucugcgaaa

SEQ ID NO: 1782684 - RNA, 19 nt, Artificial Sequence
  Description of Artificial Sequence: Synthetic oligonucleotide
  Antisense strand to SEQ ID NO: 1782683
uuucgcagagagcaucggu

SEQ ID NO: 1782685 - RNA, 19 nt, Artificial Sequence
  Description of Artificial Sequence: Synthetic oligonucleotide
  Sense strand starting at position 2775 of SEQ ID NO: 1562923
ggcucaaauauucgguauu

SEQ ID NO: 1782686 - RNA, 19 nt, Artificial Sequence
  Description of Artificial Sequence: Synthetic oligonucleotide
  Antisense strand to SEQ ID NO: 1782685
aauaccgaauauuugagcc

SEQ ID NO: 1782687 - RNA, 19 nt, Artificial Sequence
  Description of Artificial Sequence: Synthetic oligonucleotide
  Sense strand starting at position 2776 of SEQ ID NO: 1562923
gcucaaauauucgguauuu

SEQ ID NO: 1782688 - RNA, 19 nt, Artificial Sequence
  Description of Artificial Sequence: Synthetic oligonucleotide
  Antisense strand to SEQ ID NO: 1782687
aaauaccgaauauuugagc

SEQ ID NO: 1782689 - RNA, 19 nt, Artificial Sequence
  Description of Artificial Sequence: Synthetic oligonucleotide
  Sense strand starting at position 2813 of SEQ ID NO: 1562923
cuguuaggcuuugucggua

SEQ ID NO: 1782690 - RNA, 19 nt, Artificial Sequence
  Description of Artificial Sequence: Synthetic oligonucleotide
  Antisense strand to SEQ ID NO: 1782689
uaccgacaaagccuaacag

SEQ ID NO: 1782691 - RNA, 19 nt, Artificial Sequence
  Description of Artificial Sequence: Synthetic oligonucleotide
  Sense strand starting at position 2841 of SEQ ID NO: 1562923
agagacguugcaggagaaa

SEQ ID NO: 1782692 - RNA, 19 nt, Artificial Sequence
  Description of Artificial Sequence: Synthetic oligonucleotide
  Antisense strand to SEQ ID NO: 1782691
uuucuccugcaacgucucu

SEQ ID NO: 1782693 - RNA, 19 nt, Artificial Sequence
  Description of Artificial Sequence: Synthetic oligonucleotide
  Sense strand starting at position 3006 of SEQ ID NO: 1562923
gcagauuucuggcagguuc

SEQ ID NO: 1782694 - RNA, 19 nt, Artificial Sequence
  Description of Artificial Sequence: Synthetic oligonucleotide
  Antisense strand to SEQ ID NO: 1782693
gaaccugccagaaaucugc

SEQ ID NO: 1782695 - RNA, 19 nt, Artificial Sequence
  Description of Artificial Sequence: Synthetic oligonucleotide
  Sense strand starting at position 3016 of SEQ ID NO: 1562923
ggcagguuccguugaggga

SEQ ID NO: 1782696 - RNA, 19 nt, Artificial Sequence
  Description of Artificial Sequence: Synthetic oligonucleotide
  Antisense strand to SEQ ID NO: 1782695
ucccucaacggaaccugcc

SEQ ID NO: 1782697 - RNA, 19 nt, Artificial Sequence
  Description of Artificial Sequence: Synthetic oligonucleotide
  Sense strand starting at position 3017 of SEQ ID NO: 1562923
gcagguuccguugagggaa

SEQ ID NO: 1782698 - RNA, 19 nt, Artificial Sequence
  Description of Artificial Sequence: Synthetic oligonucleotide
  Antisense strand to SEQ ID NO: 1782697
uucccucaacggaaccugc

SEQ ID NO: 1782699 - RNA, 19 nt, Artificial Sequence
  Description of Artificial Sequence: Synthetic oligonucleotide
  Sense strand starting at position 3236 of SEQ ID NO: 1562923
ugcaacucugccugaucuu

SEQ ID NO: 1782700 - RNA, 19 nt, Artificial Sequence
  Description of Artificial Sequence: Synthetic oligonucleotide
  Antisense strand to SEQ ID NO: 1782699
aagaucaggcagaguugca

SEQ ID NO: 1782701 - RNA, 19 nt, Artificial Sequence
  Description of Artificial Sequence: Synthetic oligonucleotide
  Sense strand starting at position 3728 of SEQ ID NO: 1562923
cugcuucuauccuggagua

SEQ ID NO: 1782702 - RNA, 19 nt, Artificial Sequence
  Description of Artificial Sequence: Synthetic oligonucleotide
  Antisense strand to SEQ ID NO: 1782701
uacuccaggauagaagcag

SEQ ID NO: 1782703 - RNA, 19 nt, Artificial Sequence
  Description of Artificial Sequence: Synthetic oligonucleotide
  Sense strand starting at position 3730 of SEQ ID NO: 1562923
gcuucuauccuggaguacu

SEQ ID NO: 1782704 - RNA, 19 nt, Artificial Sequence
  Description of Artificial Sequence: Synthetic oligonucleotide
  Antisense strand to SEQ ID NO: 1782703
aguacuccaggauagaagc

SEQ ID NO: 1782705 - RNA, 19 nt, Artificial Sequence
  Description of Artificial Sequence: Synthetic oligonucleotide
  Sense strand starting at position 3740 of SEQ ID NO: 1562923
uggaguacuugcuguaggu

SEQ ID NO: 1782706 - RNA, 19 nt, Artificial Sequence
  Description of Artificial Sequence: Synthetic oligonucleotide
  Antisense strand to SEQ ID NO: 1782705
accuacagcaaguacucca

SEQ ID NO: 1782707 - RNA, 19 nt, Artificial Sequence
  Description of Artificial Sequence: Synthetic oligonucleotide
  Sense strand starting at position 3742 of SEQ ID NO: 1562923
gaguacuugcuguagguca

SEQ ID NO: 1782708 - RNA, 19 nt, Artificial Sequence
  Description of Artificial Sequence: Synthetic oligonucleotide
  Antisense strand to SEQ ID NO: 1782707
ugaccuacagcaaguacuc

SEQ ID NO: 1782709 - RNA, 19 nt, Artificial Sequence
  Description of Artificial Sequence: Synthetic oligonucleotide
  Sense strand starting at position 3754 of SEQ ID NO: 1562923
uaggucagcuugcuguaau

SEQ ID NO: 1782710 - RNA, 19 nt, Artificial Sequence
  Description of Artificial Sequence: Synthetic oligonucleotide
  Antisense strand to SEQ ID NO: 1782709
auuacagcaagcugaccua

SEQ ID NO: 1782711 - RNA, 19 nt, Artificial Sequence
  Description of Artificial Sequence: Synthetic oligonucleotide
  Sense strand starting at position 3755 of SEQ ID NO: 1562923
aggucagcuugcuguaauc

SEQ ID NO: 1782712 - RNA, 19 nt, Artificial Sequence
  Description of Artificial Sequence: Synthetic oligonucleotide
  Antisense strand to SEQ ID NO: 1782711
gauuacagcaagcugaccu

SEQ ID NO: 1782713 - RNA, 19 nt, Artificial Sequence
  Description of Artificial Sequence: Synthetic oligonucleotide
  Sense strand starting at position 3764 of SEQ ID NO: 1562923
ugcuguaaucagcaaagca

SEQ ID NO: 1782714 - RNA, 19 nt, Artificial Sequence
  Description of Artificial Sequence: Synthetic oligonucleotide
  Antisense strand to SEQ ID NO: 1782713
ugcuuugcugauuacagca

SEQ ID NO: 1782715 - RNA, 19 nt, Artificial Sequence
  Description of Artificial Sequence: Synthetic oligonucleotide
  Sense strand starting at position 42 of SEQ ID NO: 1562924
agugcaaucuuguugcuca

SEQ ID NO: 1782716 - RNA, 19 nt, Artificial Sequence
  Description of Artificial Sequence: Synthetic oligonucleotide
  Antisense strand to SEQ ID NO: 1782715
ugagcaacaagauugcacu

SEQ ID NO: 1782717 - RNA, 19 nt, Artificial Sequence
  Description of Artificial Sequence: Synthetic oligonucleotide
  Sense strand starting at position 45 of SEQ ID NO: 1562924
gcaaucuuguugcucacuu

SEQ ID NO: 1782718 - RNA, 19 nt, Artificial Sequence
  Description of Artificial Sequence: Synthetic oligonucleotide
  Antisense strand to SEQ ID NO: 1782717
aagugagcaacaagauugc

SEQ ID NO: 1782719 - RNA, 19 nt, Artificial Sequence
  Description of Artificial Sequence: Synthetic oligonucleotide
  Sense strand starting at position 183 of SEQ ID NO: 1562924
gggaaagguucugaaugua

SEQ ID NO: 1782720 - RNA, 19 nt, Artificial Sequence
  Description of Artificial Sequence: Synthetic oligonucleotide
  Antisense strand to SEQ ID NO: 1782719
uacauucagaaccuuuccc

SEQ ID NO: 1782721 - RNA, 19 nt, Artificial Sequence
  Description of Artificial Sequence: Synthetic oligonucleotide
  Sense strand starting at position 186 of SEQ ID NO: 1562924
aaagguucugaauguaauc

SEQ ID NO: 1782722 - RNA, 19 nt, Artificial Sequence
  Description of Artificial Sequence: Synthetic oligonucleotide
  Antisense strand to SEQ ID NO: 1782721
gauuacauucagaaccuuu

SEQ ID NO: 1782723 - RNA, 19 nt, Artificial Sequence
  Description of Artificial Sequence: Synthetic oligonucleotide
  Sense strand starting at position 195 of SEQ ID NO: 1562924
gaauguaaucguggcuuug

SEQ ID NO: 1782724 - RNA, 19 nt, Artificial Sequence
  Description of Artificial Sequence: Synthetic oligonucleotide
  Antisense strand to SEQ ID NO: 1782723
caaagccacgauuacauuc

SEQ ID NO: 1782725 - RNA, 19 nt, Artificial Sequence
  Description of Artificial Sequence: Synthetic oligonucleotide
  Sense strand starting at position 201 of SEQ ID NO: 1562924
aaucguggcuuuggcaaua

SEQ ID NO: 1782726 - RNA, 19 nt, Artificial Sequence
  Description of Artificial Sequence: Synthetic oligonucleotide
  Antisense strand to SEQ ID NO: 1782725
uauugccaaagccacgauu

SEQ ID NO: 1782727 - RNA, 19 nt, Artificial Sequence
  Description of Artificial Sequence: Synthetic oligonucleotide
  Sense strand starting at position 757 of SEQ ID NO: 1562924
aguguuagccaggaauggu

SEQ ID NO: 1782728 - RNA, 19 nt, Artificial Sequence
  Description of Artificial Sequence: Synthetic oligonucleotide
  Antisense strand to SEQ ID NO: 1782727
accauuccuggcuaacacu

SEQ ID NO: 1782729 - RNA, 19 nt, Artificial Sequence
  Description of Artificial Sequence: Synthetic oligonucleotide
  Sense strand starting at position 859 of SEQ ID NO: 1562924
aggguugacucucauacaa

SEQ ID NO: 1782730 - RNA, 19 nt, Artificial Sequence
  Description of Artificial Sequence: Synthetic oligonucleotide
  Antisense strand to SEQ ID NO: 1782729
uuguaugagagucaacccu

SEQ ID NO: 1782731 - RNA, 19 nt, Artificial Sequence
  Description of Artificial Sequence: Synthetic oligonucleotide
  Sense strand starting at position 861 of SEQ ID NO: 1562924
gguugacucucauacaaag

SEQ ID NO: 1782732 - RNA, 19 nt, Artificial Sequence
  Description of Artificial Sequence: Synthetic oligonucleotide
  Antisense strand to SEQ ID NO: 1782731
cuuuguaugagagucaacc

SEQ ID NO: 1782733 - RNA, 19 nt, Artificial Sequence
  Description of Artificial Sequence: Synthetic oligonucleotide
  Sense strand starting at position 886 of SEQ ID NO: 1562924
cgggaagugaaaugcucuu

SEQ ID NO: 1782734 - RNA, 19 nt, Artificial Sequence
  Description of Artificial Sequence: Synthetic oligonucleotide
  Antisense strand to SEQ ID NO: 1782733
aagagcauuucacuucccg

SEQ ID NO: 1782735 - RNA, 19 nt, Artificial Sequence
  Description of Artificial Sequence: Synthetic oligonucleotide
  Sense strand starting at position 945 of SEQ ID NO: 1562924
cuucgucuacugugaggga

SEQ ID NO: 1782736 - RNA, 19 nt, Artificial Sequence
  Description of Artificial Sequence: Synthetic oligonucleotide
  Antisense strand to SEQ ID NO: 1782735
ucccucacaguagacgaag

SEQ ID NO: 1782737 - RNA, 19 nt, Artificial Sequence
  Description of Artificial Sequence: Synthetic oligonucleotide
  Sense strand starting at position 1146 of SEQ ID NO: 1562924
ccacgcacgucugagagua

SEQ ID NO: 1782738 - RNA, 19 nt, Artificial Sequence
  Description of Artificial Sequence: Synthetic oligonucleotide
  Antisense strand to SEQ ID NO: 1782737
uacucucagacgugcgugg

SEQ ID NO: 1782739 - RNA, 19 nt, Artificial Sequence
  Description of Artificial Sequence: Synthetic oligonucleotide
  Sense strand starting at position 1148 of SEQ ID NO: 1562924
acgcacgucugagaguaau

SEQ ID NO: 1782740 - RNA, 19 nt, Artificial Sequence
  Description of Artificial Sequence: Synthetic oligonucleotide
  Antisense strand to SEQ ID NO: 1782739
auuacucucagacgugcgu

SEQ ID NO: 1782741 - RNA, 19 nt, Artificial Sequence
  Description of Artificial Sequence: Synthetic oligonucleotide
  Sense strand starting at position 1151 of SEQ ID NO: 1562924
cacgucugagaguaauaau

SEQ ID NO: 1782742 - RNA, 19 nt, Artificial Sequence
  Description of Artificial Sequence: Synthetic oligonucleotide
  Antisense strand to SEQ ID NO: 1782741
auuauuacucucagacgug

SEQ ID NO: 1782743 - RNA, 19 nt, Artificial Sequence
  Description of Artificial Sequence: Synthetic oligonucleotide
  Sense strand starting at position 1154 of SEQ ID NO: 1562924
gucugagaguaauaaucaa

SEQ ID NO: 1782744 - RNA, 19 nt, Artificial Sequence
  Description of Artificial Sequence: Synthetic oligonucleotide
  Antisense strand to SEQ ID NO: 1782743
uugauuauuacucucagac

SEQ ID NO: 1782745 - RNA, 19 nt, Artificial Sequence
  Description of Artificial Sequence: Synthetic oligonucleotide
  Sense strand starting at position 1197 of SEQ ID NO: 1562924
guauaauauuuacgaagca

SEQ ID NO: 1782746 - RNA, 19 nt, Artificial Sequence
  Description of Artificial Sequence: Synthetic oligonucleotide
  Antisense strand to SEQ ID NO: 1782745
ugcuucguaaauauuauac

SEQ ID NO: 1782747 - RNA, 19 nt, Artificial Sequence
  Description of Artificial Sequence: Synthetic oligonucleotide
  Sense strand starting at position 1237 of SEQ ID NO: 1562924
cgcaaauacugcugaggaa

SEQ ID NO: 1782748 - RNA, 19 nt, Artificial Sequence
  Description of Artificial Sequence: Synthetic oligonucleotide
  Antisense strand to SEQ ID NO: 1782747
uuccucagcaguauuugcg

SEQ ID NO: 1782749 - RNA, 19 nt, Artificial Sequence
  Description of Artificial Sequence: Synthetic oligonucleotide
  Sense strand starting at position 1289 of SEQ ID NO: 1562924
gugcaaaucucuggcucca

SEQ ID NO: 1782750 - RNA, 19 nt, Artificial Sequence
  Description of Artificial Sequence: Synthetic oligonucleotide
  Antisense strand to SEQ ID NO: 1782749
uggagccagagauuugcac

SEQ ID NO: 1782751 - RNA, 19 nt, Artificial Sequence
  Description of Artificial Sequence: Synthetic oligonucleotide
  Sense strand starting at position 1291 of SEQ ID NO: 1562924
gcaaaucucuggcuccaaa

SEQ ID NO: 1782752 - RNA, 19 nt, Artificial Sequence
  Description of Artificial Sequence: Synthetic oligonucleotide
  Antisense strand to SEQ ID NO: 1782751
uuuggagccagagauuugc

SEQ ID NO: 1782753 - RNA, 19 nt, Artificial Sequence
  Description of Artificial Sequence: Synthetic oligonucleotide
  Sense strand starting at position 1319 of SEQ ID NO: 1562924
caguguuuccugggcugaa

SEQ ID NO: 1782754 - RNA, 19 nt, Artificial Sequence
  Description of Artificial Sequence: Synthetic oligonucleotide
  Antisense strand to SEQ ID NO: 1782753
uucagcccaggaaacacug

SEQ ID NO: 1782755 - RNA, 19 nt, Artificial Sequence
  Description of Artificial Sequence: Synthetic oligonucleotide
  Sense strand starting at position 1320 of SEQ ID NO: 1562924
aguguuuccugggcugaac

SEQ ID NO: 1782756 - RNA, 19 nt, Artificial Sequence
  Description of Artificial Sequence: Synthetic oligonucleotide
  Antisense strand to SEQ ID NO: 1782755
guucagcccaggaaacacu

SEQ ID NO: 1782757 - RNA, 19 nt, Artificial Sequence
  Description of Artificial Sequence: Synthetic oligonucleotide
  Sense strand starting at position 1365 of SEQ ID NO: 1562924
ugugguuggucacaaguga

SEQ ID NO: 1782758 - RNA, 19 nt, Artificial Sequence
  Description of Artificial Sequence: Synthetic oligonucleotide
  Antisense strand to SEQ ID NO: 1782757
ucacuugugaccaaccaca

SEQ ID NO: 1782759 - RNA, 19 nt, Artificial Sequence
  Description of Artificial Sequence: Synthetic oligonucleotide
  Sense strand starting at position 1408 of SEQ ID NO: 1562924
acggucuugcagcgacauu

SEQ ID NO: 1782760 - RNA, 19 nt, Artificial Sequence
  Description of Artificial Sequence: Synthetic oligonucleotide
  Antisense strand to SEQ ID NO: 1782759
aaugucgcugcaagaccgu

SEQ ID NO: 1782761 - RNA, 19 nt, Artificial Sequence
  Description of Artificial Sequence: Synthetic oligonucleotide
  Sense strand starting at position 1409 of SEQ ID NO: 1562924
cggucuugcagcgacauuu

SEQ ID NO: 1782762 - RNA, 19 nt, Artificial Sequence
  Description of Artificial Sequence: Synthetic oligonucleotide
  Antisense strand to SEQ ID NO: 1782761
aaaugucgcugcaagaccg

SEQ ID NO: 1782763 - RNA, 19 nt, Artificial Sequence
  Description of Artificial Sequence: Synthetic oligonucleotide
  Sense strand starting at position 1653 of SEQ ID NO: 1562924
ccaaguggcgcacauuauu

SEQ ID NO: 1782764 - RNA, 19 nt, Artificial Sequence
  Description of Artificial Sequence: Synthetic oligonucleotide
  Antisense strand to SEQ ID NO: 1782763
aauaaugugcgccacuugg

SEQ ID NO: 1782765 - RNA, 19 nt, Artificial Sequence
  Description of Artificial Sequence: Synthetic oligonucleotide
  Sense strand starting at position 1770 of SEQ ID NO: 1562924
ggaaucagggcucgaacuu

SEQ ID NO: 1782766 - RNA, 19 nt, Artificial Sequence
  Description of Artificial Sequence: Synthetic oligonucleotide
  Antisense strand to SEQ ID NO: 1782765
aaguucgagcccugauucc

SEQ ID NO: 1782767 - RNA, 19 nt, Artificial Sequence
  Description of Artificial Sequence: Synthetic oligonucleotide
  Sense strand starting at position 1771 of SEQ ID NO: 1562924
gaaucagggcucgaacuua

SEQ ID NO: 1782768 - RNA, 19 nt, Artificial Sequence
  Description of Artificial Sequence: Synthetic oligonucleotide
  Antisense strand to SEQ ID NO: 1782767
uaaguucgagcccugauuc

SEQ ID NO: 1782769 - RNA, 19 nt, Artificial Sequence
  Description of Artificial Sequence: Synthetic oligonucleotide
  Sense strand starting at position 1842 of SEQ ID NO: 1562924
gagacaauggcucagcuaa

SEQ ID NO: 1782770 - RNA, 19 nt, Artificial Sequence
  Description of Artificial Sequence: Synthetic oligonucleotide
  Antisense strand to SEQ ID NO: 1782769
uuagcugagccauugucuc

SEQ ID NO: 1782771 - RNA, 19 nt, Artificial Sequence
  Description of Artificial Sequence: Synthetic oligonucleotide
  Sense strand starting at position 1916 of SEQ ID NO: 1562924
gcagccuggucugaccaau

SEQ ID NO: 1782772 - RNA, 19 nt, Artificial Sequence
  Description of Artificial Sequence: Synthetic oligonucleotide
  Antisense strand to SEQ ID NO: 1782771
auuggucagaccaggcugc

SEQ ID NO: 1782773 - RNA, 19 nt, Artificial Sequence
  Description of Artificial Sequence: Synthetic oligonucleotide
  Sense strand starting at position 1944 of SEQ ID NO: 1562924
ucaguccuuccagggcaaa

SEQ ID NO: 1782774 - RNA, 19 nt, Artificial Sequence
  Description of Artificial Sequence: Synthetic oligonucleotide
  Antisense strand to SEQ ID NO: 1782773
uuugcccuggaaggacuga

SEQ ID NO: 1782775 - RNA, 19 nt, Artificial Sequence
  Description of Artificial Sequence: Synthetic oligonucleotide
  Sense strand starting at position 2833 of SEQ ID NO: 1562924
gggugaauacgugauggcu

SEQ ID NO: 1782776 - RNA, 19 nt, Artificial Sequence
  Description of Artificial Sequence: Synthetic oligonucleotide
  Antisense strand to SEQ ID NO: 1782775
agccaucacguauucaccc

SEQ ID NO: 1782777 - RNA, 19 nt, Artificial Sequence
  Description of Artificial Sequence: Synthetic oligonucleotide
  Sense strand starting at position 3140 of SEQ ID NO: 1562924
uggguaaucucuggauuua

SEQ ID NO: 1782778 - RNA, 19 nt, Artificial Sequence
  Description of Artificial Sequence: Synthetic oligonucleotide
  Antisense strand to SEQ ID NO: 1782777
uaaauccagagauuaccca

SEQ ID NO: 1782779 - RNA, 19 nt, Artificial Sequence
  Description of Artificial Sequence: Synthetic oligonucleotide
  Sense strand starting at position 3251 of SEQ ID NO: 1562924
gucgguuucccagaacuuu

SEQ ID NO: 1782780 - RNA, 19 nt, Artificial Sequence
  Description of Artificial Sequence: Synthetic oligonucleotide
  Antisense strand to SEQ ID NO: 1782779
aaaguucugggaaaccgac

SEQ ID NO: 1782781 - RNA, 19 nt, Artificial Sequence
  Description of Artificial Sequence: Synthetic oligonucleotide
  Sense strand starting at position 3638 of SEQ ID NO: 1562924
ggaggauccuuuccuggua

SEQ ID NO: 1782782 - RNA, 19 nt, Artificial Sequence
  Description of Artificial Sequence: Synthetic oligonucleotide
  Antisense strand to SEQ ID NO: 1782781
uaccaggaaaggauccucc

SEQ ID NO: 1782783 - RNA, 19 nt, Artificial Sequence
  Description of Artificial Sequence: Synthetic oligonucleotide
  Sense strand starting at position 3639 of SEQ ID NO: 1562924
gaggauccuuuccugguaa

SEQ ID NO: 1782784 - RNA, 19 nt, Artificial Sequence
  Description of Artificial Sequence: Synthetic oligonucleotide
  Antisense strand to SEQ ID NO: 1782783
uuaccaggaaaggauccuc

SEQ ID NO: 1782785 - RNA, 19 nt, Artificial Sequence
  Description of Artificial Sequence: Synthetic oligonucleotide
  Sense strand starting at position 3728 of SEQ ID NO: 1562924
cgaggaaucucuuugaguc

SEQ ID NO: 1782786 - RNA, 19 nt, Artificial Sequence
  Description of Artificial Sequence: Synthetic oligonucleotide
  Antisense strand to SEQ ID NO: 1782785
gacucaaagagauuccucg

SEQ ID NO: 1782787 - RNA, 19 nt, Artificial Sequence
  Description of Artificial Sequence: Synthetic oligonucleotide
  Sense strand starting at position 3729 of SEQ ID NO: 1562924
gaggaaucucuuugagucu

SEQ ID NO: 1782788 - RNA, 19 nt, Artificial Sequence
  Description of Artificial Sequence: Synthetic oligonucleotide
  Antisense strand to SEQ ID NO: 1782787
agacucaaagagauuccuc

SEQ ID NO: 1782789 - RNA, 19 nt, Artificial Sequence
  Description of Artificial Sequence: Synthetic oligonucleotide
  Sense strand starting at position 3730 of SEQ ID NO: 1562924
aggaaucucuuugagucuu

SEQ ID NO: 1782790 - RNA, 19 nt, Artificial Sequence
  Description of Artificial Sequence: Synthetic oligonucleotide
  Antisense strand to SEQ ID NO: 1782789
aagacucaaagagauuccu

SEQ ID NO: 1782791 - RNA, 19 nt, Artificial Sequence
  Description of Artificial Sequence: Synthetic oligonucleotide
  Sense strand starting at position 3763 of SEQ ID NO: 1562924
cagucaggccugggaagua

SEQ ID NO: 1782792 - RNA, 19 nt, Artificial Sequence
  Description of Artificial Sequence: Synthetic oligonucleotide
  Antisense strand to SEQ ID NO: 1782791
uacuucccaggccugacug

SEQ ID NO: 1782793 - RNA, 19 nt, Artificial Sequence
  Description of Artificial Sequence: Synthetic oligonucleotide
  Sense strand starting at position 46 of SEQ ID NO: 1562925
ccaaguggcgcacauuauu

SEQ ID NO: 1782794 - RNA, 19 nt, Artificial Sequence
  Description of Artificial Sequence: Synthetic oligonucleotide
  Antisense strand to SEQ ID NO: 1782793
aauaaugugcgccacuugg

SEQ ID NO: 1782795 - RNA, 19 nt, Artificial Sequence
  Description of Artificial Sequence: Synthetic oligonucleotide
  Sense strand starting at position 163 of SEQ ID NO: 1562925
ggaaucagggcucgaacuu

SEQ ID NO: 1782796 - RNA, 19 nt, Artificial Sequence
  Description of Artificial Sequence: Synthetic oligonucleotide
  Antisense strand to SEQ ID NO: 1782795
aaguucgagcccugauucc

SEQ ID NO: 1782797 - RNA, 19 nt, Artificial Sequence
  Description of Artificial Sequence: Synthetic oligonucleotide
  Sense strand starting at position 164 of SEQ ID NO: 1562925
gaaucagggcucgaacuua

SEQ ID NO: 1782798 - RNA, 19 nt, Artificial Sequence
  Description of Artificial Sequence: Synthetic oligonucleotide
  Antisense strand to SEQ ID NO: 1782797
uaaguucgagcccugauuc

SEQ ID NO: 1782799 - RNA, 19 nt, Artificial Sequence
  Description of Artificial Sequence: Synthetic oligonucleotide
  Sense strand starting at position 235 of SEQ ID NO: 1562925
gagacaauggcucagcuaa

SEQ ID NO: 1782800 - RNA, 19 nt, Artificial Sequence
  Description of Artificial Sequence: Synthetic oligonucleotide
  Antisense strand to SEQ ID NO: 1782799
uuagcugagccauugucuc

SEQ ID NO: 1782801 - RNA, 19 nt, Artificial Sequence
  Description of Artificial Sequence: Synthetic oligonucleotide
  Sense strand starting at position 337 of SEQ ID NO: 1562925
ucaguccuuccagggcaaa

SEQ ID NO: 1782802 - RNA, 19 nt, Artificial Sequence
  Description of Artificial Sequence: Synthetic oligonucleotide
  Antisense strand to SEQ ID NO: 1782801
uuugcccuggaaggacuga

SEQ ID NO: 1782803 - RNA, 19 nt, Artificial Sequence
  Description of Artificial Sequence: Synthetic oligonucleotide
  Sense strand starting at position 1226 of SEQ ID NO: 1562925
gggugaauacgugauggcu

SEQ ID NO: 1782804 - RNA, 19 nt, Artificial Sequence
  Description of Artificial Sequence: Synthetic oligonucleotide
  Antisense strand to SEQ ID NO: 1782803
agccaucacguauucaccc

SEQ ID NO: 1782805 - RNA, 19 nt, Artificial Sequence
  Description of Artificial Sequence: Synthetic oligonucleotide
  Sense strand starting at position 1533 of SEQ ID NO: 1562925
uggguaaucucuggauuua

SEQ ID NO: 1782806 - RNA, 19 nt, Artificial Sequence
  Description of Artificial Sequence: Synthetic oligonucleotide
  Antisense strand to SEQ ID NO: 1782805
uaaauccagagauuaccca

SEQ ID NO: 1782807 - RNA, 19 nt, Artificial Sequence
  Description of Artificial Sequence: Synthetic oligonucleotide
  Sense strand starting at position 1644 of SEQ ID NO: 1562925
gucgguuucccagaacuuu

SEQ ID NO: 1782808 - RNA, 19 nt, Artificial Sequence
  Description of Artificial Sequence: Synthetic oligonucleotide
  Antisense strand to SEQ ID NO: 1782807
aaaguucugggaaaccgac

SEQ ID NO: 1782809 - RNA, 19 nt, Artificial Sequence
  Description of Artificial Sequence: Synthetic oligonucleotide
  Sense strand starting at position 2031 of SEQ ID NO: 1562925
ggaggauccuuuccuggua

SEQ ID NO: 1782810 - RNA, 19 nt, Artificial Sequence
  Description of Artificial Sequence: Synthetic oligonucleotide
  Antisense strand to SEQ ID NO: 1782809
uaccaggaaaggauccucc

SEQ ID NO: 1782811 - RNA, 19 nt, Artificial Sequence
  Description of Artificial Sequence: Synthetic oligonucleotide
  Sense strand starting at position 2032 of SEQ ID NO: 1562925
gaggauccuuuccugguaa

SEQ ID NO: 1782812 - RNA, 19 nt, Artificial Sequence
  Description of Artificial Sequence: Synthetic oligonucleotide
  Antisense strand to SEQ ID NO: 1782811
uuaccaggaaaggauccuc

SEQ ID NO: 1782813 - RNA, 19 nt, Artificial Sequence
  Description of Artificial Sequence: Synthetic oligonucleotide
  Sense strand starting at position 2121 of SEQ ID NO: 1562925
cgaggaaucucuuugaguc

SEQ ID NO: 1782814 - RNA, 19 nt, Artificial Sequence
  Description of Artificial Sequence: Synthetic oligonucleotide
  Antisense strand to SEQ ID NO: 1782813
gacucaaagagauuccucg

SEQ ID NO: 1782815 - RNA, 19 nt, Artificial Sequence
  Description of Artificial Sequence: Synthetic oligonucleotide
  Sense strand starting at position 2122 of SEQ ID NO: 1562925
gaggaaucucuuugagucu

SEQ ID NO: 1782816 - RNA, 19 nt, Artificial Sequence
  Description of Artificial Sequence: Synthetic oligonucleotide
  Antisense strand to SEQ ID NO: 1782815
agacucaaagagauuccuc

SEQ ID NO: 1782817 - RNA, 19 nt, Artificial Sequence
  Description of Artificial Sequence: Synthetic oligonucleotide
  Sense strand starting at position 2156 of SEQ ID NO: 1562925
cagucaggccugggaagua

SEQ ID NO: 1782818 - RNA, 19 nt, Artificial Sequence
  Description of Artificial Sequence: Synthetic oligonucleotide
  Antisense strand to SEQ ID NO: 1782817
uacuucccaggccugacug

SEQ ID NO: 1782819 - RNA, 19 nt, Artificial Sequence
  Description of Artificial Sequence: Synthetic oligonucleotide
  Sense strand starting at position 2403 of SEQ ID NO: 1562925
aaaggaagucauugcauug

SEQ ID NO: 1782820 - RNA, 19 nt, Artificial Sequence
  Description of Artificial Sequence: Synthetic oligonucleotide
  Antisense strand to SEQ ID NO: 1782819
caaugcaaugacuuccuuu

SEQ ID NO: 1782821 - RNA, 19 nt, Artificial Sequence
  Description of Artificial Sequence: Synthetic oligonucleotide
  Sense strand starting at position 2415 of SEQ ID NO: 1562925
ugcauugauccagauucga

SEQ ID NO: 1782822 - RNA, 19 nt, Artificial Sequence
  Description of Artificial Sequence: Synthetic oligonucleotide
  Antisense strand to SEQ ID NO: 1782821
ucgaaucuggaucaaugca

SEQ ID NO: 1782823 - RNA, 19 nt, Artificial Sequence
  Description of Artificial Sequence: Synthetic oligonucleotide
  Sense strand starting at position 2424 of SEQ ID NO: 1562925
ccagauucgaccugggauu

SEQ ID NO: 1782824 - RNA, 19 nt, Artificial Sequence
  Description of Artificial Sequence: Synthetic oligonucleotide
  Antisense strand to SEQ ID NO: 1782823
aaucccaggucgaaucugg

SEQ ID NO: 1782825 - RNA, 19 nt, Artificial Sequence
  Description of Artificial Sequence: Synthetic oligonucleotide
  Sense strand starting at position 2519 of SEQ ID NO: 1562925
ugaggcauucagcaaaggu

SEQ ID NO: 1782826 - RNA, 19 nt, Artificial Sequence
  Description of Artificial Sequence: Synthetic oligonucleotide
  Antisense strand to SEQ ID NO: 1782825
accuuugcugaaugccuca

SEQ ID NO: 1782827 - RNA, 19 nt, Artificial Sequence
  Description of Artificial Sequence: Synthetic oligonucleotide
  Sense strand starting at position 2529 of SEQ ID NO: 1562925
agcaaagguucguccuuga

SEQ ID NO: 1782828 - RNA, 19 nt, Artificial Sequence
  Description of Artificial Sequence: Synthetic oligonucleotide
  Antisense strand to SEQ ID NO: 1782827
ucaaggacgaaccuuugcu

SEQ ID NO: 1782829 - RNA, 19 nt, Artificial Sequence
  Description of Artificial Sequence: Synthetic oligonucleotide
  Sense strand starting at position 2532 of SEQ ID NO: 1562925
aaagguucguccuugagug

SEQ ID NO: 1782830 - RNA, 19 nt, Artificial Sequence
  Description of Artificial Sequence: Synthetic oligonucleotide
  Antisense strand to SEQ ID NO: 1782829
cacucaaggacgaaccuuu

SEQ ID NO: 1782831 - RNA, 19 nt, Artificial Sequence
  Description of Artificial Sequence: Synthetic oligonucleotide
  Sense strand starting at position 2554 of SEQ ID NO: 1562925
guggaugcucaaggacuua

SEQ ID NO: 1782832 - RNA, 19 nt, Artificial Sequence
  Description of Artificial Sequence: Synthetic oligonucleotide
  Antisense strand to SEQ ID NO: 1782831
uaaguccuugagcauccac

SEQ ID NO: 1782833 - RNA, 19 nt, Artificial Sequence
  Description of Artificial Sequence: Synthetic oligonucleotide
  Sense strand starting at position 2559 of SEQ ID NO: 1562925
ugcucaaggacuuacgauu

SEQ ID NO: 1782834 - RNA, 19 nt, Artificial Sequence
  Description of Artificial Sequence: Synthetic oligonucleotide
  Antisense strand to SEQ ID NO: 1782833
aaucguaaguccuugagca

SEQ ID NO: 1782835 - RNA, 19 nt, Artificial Sequence
  Description of Artificial Sequence: Synthetic oligonucleotide
  Sense strand starting at position 2648 of SEQ ID NO: 1562925
guagcuaauuaucucaaga

SEQ ID NO: 1782836 - RNA, 19 nt, Artificial Sequence
  Description of Artificial Sequence: Synthetic oligonucleotide
  Antisense strand to SEQ ID NO: 1782835
ucuugagauaauuagcuac

SEQ ID NO: 1782837 - RNA, 19 nt, Artificial Sequence
  Description of Artificial Sequence: Synthetic oligonucleotide
  Sense strand starting at position 2674 of SEQ ID NO: 1562925
caggcugguacugaaaguu

SEQ ID NO: 1782838 - RNA, 19 nt, Artificial Sequence
  Description of Artificial Sequence: Synthetic oligonucleotide
  Antisense strand to SEQ ID NO: 1782837
aacuuucaguaccagccug

SEQ ID NO: 1782839 - RNA, 19 nt, Artificial Sequence
  Description of Artificial Sequence: Synthetic oligonucleotide
  Sense strand starting at position 2829 of SEQ ID NO: 1562925
gcuuguccaguuugagaag

SEQ ID NO: 1782840 - RNA, 19 nt, Artificial Sequence
  Description of Artificial Sequence: Synthetic oligonucleotide
  Antisense strand to SEQ ID NO: 1782839
cuucucaaacuggacaagc

SEQ ID NO: 1782841 - RNA, 19 nt, Artificial Sequence
  Description of Artificial Sequence: Synthetic oligonucleotide
  Sense strand starting at position 2888 of SEQ ID NO: 1562925
auggauagugcgggauuga

SEQ ID NO: 1782842 - RNA, 19 nt, Artificial Sequence
  Description of Artificial Sequence: Synthetic oligonucleotide
  Antisense strand to SEQ ID NO: 1782841
ucaaucccgcacuauccau

SEQ ID NO: 1782843 - RNA, 19 nt, Artificial Sequence
  Description of Artificial Sequence: Synthetic oligonucleotide
  Sense strand starting at position 2889 of SEQ ID NO: 1562925
uggauagugcgggauugaa

SEQ ID NO: 1782844 - RNA, 19 nt, Artificial Sequence
  Description of Artificial Sequence: Synthetic oligonucleotide
  Antisense strand to SEQ ID NO: 1782843
uucaaucccgcacuaucca

SEQ ID NO: 1782845 - RNA, 19 nt, Artificial Sequence
  Description of Artificial Sequence: Synthetic oligonucleotide
  Sense strand starting at position 2947 of SEQ ID NO: 1562925
ucaucaucugauugcuguu

SEQ ID NO: 1782846 - RNA, 19 nt, Artificial Sequence
  Description of Artificial Sequence: Synthetic oligonucleotide
  Antisense strand to SEQ ID NO: 1782845
aacagcaaucagaugauga

SEQ ID NO: 1782847 - RNA, 19 nt, Artificial Sequence
  Description of Artificial Sequence: Synthetic oligonucleotide
  Sense strand starting at position 2974 of SEQ ID NO: 1562925
gagaucgaugcguggagaa

SEQ ID NO: 1782848 - RNA, 19 nt, Artificial Sequence
  Description of Artificial Sequence: Synthetic oligonucleotide
  Antisense strand to SEQ ID NO: 1782847
uucuccacgcaucgaucuc

SEQ ID NO: 1782849 - RNA, 19 nt, Artificial Sequence
  Description of Artificial Sequence: Synthetic oligonucleotide
  Sense strand starting at position 2976 of SEQ ID NO: 1562925
gaucgaugcguggagaaca

SEQ ID NO: 1782850 - RNA, 19 nt, Artificial Sequence
  Description of Artificial Sequence: Synthetic oligonucleotide
  Antisense strand to SEQ ID NO: 1782849
uguucuccacgcaucgauc

SEQ ID NO: 1782851 - RNA, 19 nt, Artificial Sequence
  Description of Artificial Sequence: Synthetic oligonucleotide
  Sense strand starting at position 3066 of SEQ ID NO: 1562925
gacagagcguggucaugaa

SEQ ID NO: 1782852 - RNA, 19 nt, Artificial Sequence
  Description of Artificial Sequence: Synthetic oligonucleotide
  Antisense strand to SEQ ID NO: 1782851
uucaugaccacgcucuguc

SEQ ID NO: 1782853 - RNA, 19 nt, Artificial Sequence
  Description of Artificial Sequence: Synthetic oligonucleotide
  Sense strand starting at position 3196 of SEQ ID NO: 1562925
cgaggcugguccuuuauuu

SEQ ID NO: 1782854 - RNA, 19 nt, Artificial Sequence
  Description of Artificial Sequence: Synthetic oligonucleotide
  Antisense strand to SEQ ID NO: 1782853
aaauaaaggaccagccucg

SEQ ID NO: 1782855 - RNA, 19 nt, Artificial Sequence
  Description of Artificial Sequence: Synthetic oligonucleotide
  Sense strand starting at position 3530 of SEQ ID NO: 1562925
ggcgauggguguuugaaag

SEQ ID NO: 1782856 - RNA, 19 nt, Artificial Sequence
  Description of Artificial Sequence: Synthetic oligonucleotide
  Antisense strand to SEQ ID NO: 1782855
cuuucaaacacccaucgcc

SEQ ID NO: 1782857 - RNA, 19 nt, Artificial Sequence
  Description of Artificial Sequence: Synthetic oligonucleotide
  Sense strand starting at position 3622 of SEQ ID NO: 1562925
augcuuacauggcugagau

SEQ ID NO: 1782858 - RNA, 19 nt, Artificial Sequence
  Description of Artificial Sequence: Synthetic oligonucleotide
  Antisense strand to SEQ ID NO: 1782857
aucucagccauguaagcau

SEQ ID NO: 1782859 - RNA, 19 nt, Artificial Sequence
  Description of Artificial Sequence: Synthetic oligonucleotide
  Sense strand starting at position 3623 of SEQ ID NO: 1562925
ugcuuacauggcugagaua

SEQ ID NO: 1782860 - RNA, 19 nt, Artificial Sequence
  Description of Artificial Sequence: Synthetic oligonucleotide
  Antisense strand to SEQ ID NO: 1782859
uaucucagccauguaagca

SEQ ID NO: 1782861 - RNA, 19 nt, Artificial Sequence
  Description of Artificial Sequence: Synthetic oligonucleotide
  Sense strand starting at position 3624 of SEQ ID NO: 1562925
gcuuacauggcugagauaa

SEQ ID NO: 1782862 - RNA, 19 nt, Artificial Sequence
  Description of Artificial Sequence: Synthetic oligonucleotide
  Antisense strand to SEQ ID NO: 1782861
uuaucucagccauguaagc

SEQ ID NO: 1782863 - RNA, 19 nt, Artificial Sequence
  Description of Artificial Sequence: Synthetic oligonucleotide
  Sense strand starting at position 3735 of SEQ ID NO: 1562925
ugaagacuagccugaguga

SEQ ID NO: 1782864 - RNA, 19 nt, Artificial Sequence
  Description of Artificial Sequence: Synthetic oligonucleotide
  Antisense strand to SEQ ID NO: 1782863
ucacucaggcuagucuuca

SEQ ID NO: 1782865 - RNA, 19 nt, Artificial Sequence
  Description of Artificial Sequence: Synthetic oligonucleotide
  Sense strand starting at position 3744 of SEQ ID NO: 1562925
gccugagugauauagcaag

SEQ ID NO: 1782866 - RNA, 19 nt, Artificial Sequence
  Description of Artificial Sequence: Synthetic oligonucleotide
  Antisense strand to SEQ ID NO: 1782865
cuugcuauaucacucaggc

SEQ ID NO: 1782867 - RNA, 19 nt, Artificial Sequence
  Description of Artificial Sequence: Synthetic oligonucleotide
  Sense strand starting at position 3807 of SEQ ID NO: 1562925
ucgaaauagcccugcaaga

SEQ ID NO: 1782868 - RNA, 19 nt, Artificial Sequence
  Description of Artificial Sequence: Synthetic oligonucleotide
  Antisense strand to SEQ ID NO: 1782867
ucuugcagggcuauuucga

SEQ ID NO: 1782869 - RNA, 19 nt, Artificial Sequence
  Description of Artificial Sequence: Synthetic oligonucleotide
  Sense strand starting at position 3890 of SEQ ID NO: 1562925
cagcgucuccaccaaugaa

SEQ ID NO: 1782870 - RNA, 19 nt, Artificial Sequence
  Description of Artificial Sequence: Synthetic oligonucleotide
  Antisense strand to SEQ ID NO: 1782869
uucauugguggagacgcug

SEQ ID NO: 1782871 - RNA, 19 nt, Artificial Sequence
  Description of Artificial Sequence: Synthetic oligonucleotide
  Sense strand starting at position 3955 of SEQ ID NO: 1562925
gcaagcagcuuauuuaaau

SEQ ID NO: 1782872 - RNA, 19 nt, Artificial Sequence
  Description of Artificial Sequence: Synthetic oligonucleotide
  Antisense strand to SEQ ID NO: 1782871
auuuaaauaagcugcuugc

SEQ ID NO: 1782873 - RNA, 19 nt, Artificial Sequence
  Description of Artificial Sequence: Synthetic oligonucleotide
  Sense strand starting at position 174 of SEQ ID NO: 1562926
uggcuucucugugcaacaa

SEQ ID NO: 1782874 - RNA, 19 nt, Artificial Sequence
  Description of Artificial Sequence: Synthetic oligonucleotide
  Antisense strand to SEQ ID NO: 1782873
uuguugcacagagaagcca

SEQ ID NO: 1782875 - RNA, 19 nt, Artificial Sequence
  Description of Artificial Sequence: Synthetic oligonucleotide
  Sense strand starting at position 185 of SEQ ID NO: 1562926
ugcaacaacuugucuugaa

SEQ ID NO: 1782876 - RNA, 19 nt, Artificial Sequence
  Description of Artificial Sequence: Synthetic oligonucleotide
  Antisense strand to SEQ ID NO: 1782875
uucaagacaaguuguugca

SEQ ID NO: 1782877 - RNA, 19 nt, Artificial Sequence
  Description of Artificial Sequence: Synthetic oligonucleotide
  Sense strand starting at position 186 of SEQ ID NO: 1562926
gcaacaacuugucuugaau

SEQ ID NO: 1782878 - RNA, 19 nt, Artificial Sequence
  Description of Artificial Sequence: Synthetic oligonucleotide
  Antisense strand to SEQ ID NO: 1782877
auucaagacaaguuguugc

SEQ ID NO: 1782879 - RNA, 19 nt, Artificial Sequence
  Description of Artificial Sequence: Synthetic oligonucleotide
  Sense strand starting at position 285 of SEQ ID NO: 1562926
uagggcugugccuacagaa

SEQ ID NO: 1782880 - RNA, 19 nt, Artificial Sequence
  Description of Artificial Sequence: Synthetic oligonucleotide
  Antisense strand to SEQ ID NO: 1782879
uucuguaggcacagcccua

SEQ ID NO: 1782881 - RNA, 19 nt, Artificial Sequence
  Description of Artificial Sequence: Synthetic oligonucleotide
  Sense strand starting at position 868 of SEQ ID NO: 1562926
cggugcuucucaucugaca

SEQ ID NO: 1782882 - RNA, 19 nt, Artificial Sequence
  Description of Artificial Sequence: Synthetic oligonucleotide
  Antisense strand to SEQ ID NO: 1782881
ugucagaugagaagcaccg

SEQ ID NO: 1782883 - RNA, 19 nt, Artificial Sequence
  Description of Artificial Sequence: Synthetic oligonucleotide
  Sense strand starting at position 943 of SEQ ID NO: 1562926
uguacagucucaccugaga

SEQ ID NO: 1782884 - RNA, 19 nt, Artificial Sequence
  Description of Artificial Sequence: Synthetic oligonucleotide
  Antisense strand to SEQ ID NO: 1782883
ucucaggugagacuguaca

SEQ ID NO: 1782885 - RNA, 19 nt, Artificial Sequence
  Description of Artificial Sequence: Synthetic oligonucleotide
  Sense strand starting at position 1028 of SEQ ID NO: 1562926
ggagauaaccgucaucucu

SEQ ID NO: 1782886 - RNA, 19 nt, Artificial Sequence
  Description of Artificial Sequence: Synthetic oligonucleotide
  Antisense strand to SEQ ID NO: 1782885
agagaugacgguuaucucc

SEQ ID NO: 1782887 - RNA, 19 nt, Artificial Sequence
  Description of Artificial Sequence: Synthetic oligonucleotide
  Sense strand starting at position 1183 of SEQ ID NO: 1562926
ccaacaguguucucagagu

SEQ ID NO: 1782888 - RNA, 19 nt, Artificial Sequence
  Description of Artificial Sequence: Synthetic oligonucleotide
  Antisense strand to SEQ ID NO: 1782887
acucugagaacacuguugg

SEQ ID NO: 1782889 - RNA, 19 nt, Artificial Sequence
  Description of Artificial Sequence: Synthetic oligonucleotide
  Sense strand starting at position 1269 of SEQ ID NO: 1562926
ccaggauucucuugucuca

SEQ ID NO: 1782890 - RNA, 19 nt, Artificial Sequence
  Description of Artificial Sequence: Synthetic oligonucleotide
  Antisense strand to SEQ ID NO: 1782889
ugagacaagagaauccugg

SEQ ID NO: 1782891 - RNA, 19 nt, Artificial Sequence
  Description of Artificial Sequence: Synthetic oligonucleotide
  Sense strand starting at position 1271 of SEQ ID NO: 1562926
aggauucucuugucucaac

SEQ ID NO: 1782892 - RNA, 19 nt, Artificial Sequence
  Description of Artificial Sequence: Synthetic oligonucleotide
  Antisense strand to SEQ ID NO: 1782891
guugagacaagagaauccu

SEQ ID NO: 1782893 - RNA, 19 nt, Artificial Sequence
  Description of Artificial Sequence: Synthetic oligonucleotide
  Sense strand starting at position 1272 of SEQ ID NO: 1562926
ggauucucuugucucaaca

SEQ ID NO: 1782894 - RNA, 19 nt, Artificial Sequence
  Description of Artificial Sequence: Synthetic oligonucleotide
  Antisense strand to SEQ ID NO: 1782893
uguugagacaagagaaucc

SEQ ID NO: 1782895 - RNA, 19 nt, Artificial Sequence
  Description of Artificial Sequence: Synthetic oligonucleotide
  Sense strand starting at position 1381 of SEQ ID NO: 1562926
guugguagacaucgacaaa

SEQ ID NO: 1782896 - RNA, 19 nt, Artificial Sequence
  Description of Artificial Sequence: Synthetic oligonucleotide
  Antisense strand to SEQ ID NO: 1782895
uuugucgaugucuaccaac

SEQ ID NO: 1782897 - RNA, 19 nt, Artificial Sequence
  Description of Artificial Sequence: Synthetic oligonucleotide
  Sense strand starting at position 2068 of SEQ ID NO: 1562926
ccugcucuccgugaagaca

SEQ ID NO: 1782898 - RNA, 19 nt, Artificial Sequence
  Description of Artificial Sequence: Synthetic oligonucleotide
  Antisense strand to SEQ ID NO: 1782897
ugucuucacggagagcagg

SEQ ID NO: 1782899 - RNA, 19 nt, Artificial Sequence
  Description of Artificial Sequence: Synthetic oligonucleotide
  Sense strand starting at position 2141 of SEQ ID NO: 1562926
gaaggagaauauugagugu

SEQ ID NO: 1782900 - RNA, 19 nt, Artificial Sequence
  Description of Artificial Sequence: Synthetic oligonucleotide
  Antisense strand to SEQ ID NO: 1782899
acacucaauauucuccuuc

SEQ ID NO: 1782901 - RNA, 19 nt, Artificial Sequence
  Description of Artificial Sequence: Synthetic oligonucleotide
  Sense strand starting at position 2145 of SEQ ID NO: 1562926
gagaauauugaguguucgu

SEQ ID NO: 1782902 - RNA, 19 nt, Artificial Sequence
  Description of Artificial Sequence: Synthetic oligonucleotide
  Antisense strand to SEQ ID NO: 1782901
acgaacacucaauauucuc

SEQ ID NO: 1782903 - RNA, 19 nt, Artificial Sequence
  Description of Artificial Sequence: Synthetic oligonucleotide
  Sense strand starting at position 2148 of SEQ ID NO: 1562926
aauauugaguguucguaau

SEQ ID NO: 1782904 - RNA, 19 nt, Artificial Sequence
  Description of Artificial Sequence: Synthetic oligonucleotide
  Antisense strand to SEQ ID NO: 1782903
auuacgaacacucaauauu

SEQ ID NO: 1782905 - RNA, 19 nt, Artificial Sequence
  Description of Artificial Sequence: Synthetic oligonucleotide
  Sense strand starting at position 2154 of SEQ ID NO: 1562926
gaguguucguaaugcaaag

SEQ ID NO: 1782906 - RNA, 19 nt, Artificial Sequence
  Description of Artificial Sequence: Synthetic oligonucleotide
  Antisense strand to SEQ ID NO: 1782905
cuuugcauuacgaacacuc

SEQ ID NO: 1782907 - RNA, 19 nt, Artificial Sequence
  Description of Artificial Sequence: Synthetic oligonucleotide
  Sense strand starting at position 2156 of SEQ ID NO: 1562926
guguucguaaugcaaagaa

SEQ ID NO: 1782908 - RNA, 19 nt, Artificial Sequence
  Description of Artificial Sequence: Synthetic oligonucleotide
  Antisense strand to SEQ ID NO: 1782907
uucuuugcauuacgaacac

SEQ ID NO: 1782909 - RNA, 19 nt, Artificial Sequence
  Description of Artificial Sequence: Synthetic oligonucleotide
  Sense strand starting at position 2234 of SEQ ID NO: 1562926
acagaaacaucacuacgua

SEQ ID NO: 1782910 - RNA, 19 nt, Artificial Sequence
  Description of Artificial Sequence: Synthetic oligonucleotide
  Antisense strand to SEQ ID NO: 1782909
uacguagugauguuucugu

SEQ ID NO: 1782911 - RNA, 19 nt, Artificial Sequence
  Description of Artificial Sequence: Synthetic oligonucleotide
  Sense strand starting at position 2898 of SEQ ID NO: 1562926
aagaaagauuccggacaca

SEQ ID NO: 1782912 - RNA, 19 nt, Artificial Sequence
  Description of Artificial Sequence: Synthetic oligonucleotide
  Antisense strand to SEQ ID NO: 1782911
uguguccggaaucuuucuu

SEQ ID NO: 1782913 - RNA, 19 nt, Artificial Sequence
  Description of Artificial Sequence: Synthetic oligonucleotide
  Sense strand starting at position 2925 of SEQ ID NO: 1562926
caaguuguaugguucguuu

SEQ ID NO: 1782914 - RNA, 19 nt, Artificial Sequence
  Description of Artificial Sequence: Synthetic oligonucleotide
  Antisense strand to SEQ ID NO: 1782913
aaacgaaccauacaacuug

SEQ ID NO: 1782915 - RNA, 19 nt, Artificial Sequence
  Description of Artificial Sequence: Synthetic oligonucleotide
  Sense strand starting at position 3006 of SEQ ID NO: 1562926
aguggagccuggugaguau

SEQ ID NO: 1782916 - RNA, 19 nt, Artificial Sequence
  Description of Artificial Sequence: Synthetic oligonucleotide
  Antisense strand to SEQ ID NO: 1782915
auacucaccaggcuccacu

SEQ ID NO: 1782917 - RNA, 19 nt, Artificial Sequence
  Description of Artificial Sequence: Synthetic oligonucleotide
  Sense strand starting at position 3120 of SEQ ID NO: 1562926
gcuagagaguggugauguu

SEQ ID NO: 1782918 - RNA, 19 nt, Artificial Sequence
  Description of Artificial Sequence: Synthetic oligonucleotide
  Antisense strand to SEQ ID NO: 1782917
aacaucaccacucucuagc

SEQ ID NO: 1782919 - RNA, 19 nt, Artificial Sequence
  Description of Artificial Sequence: Synthetic oligonucleotide
  Sense strand starting at position 3127 of SEQ ID NO: 1562926
aguggugauguuugcucaa

SEQ ID NO: 1782920 - RNA, 19 nt, Artificial Sequence
  Description of Artificial Sequence: Synthetic oligonucleotide
  Antisense strand to SEQ ID NO: 1782919
uugagcaaacaucaccacu

SEQ ID NO: 1782921 - RNA, 19 nt, Artificial Sequence
  Description of Artificial Sequence: Synthetic oligonucleotide
  Sense strand starting at position 3130 of SEQ ID NO: 1562926
ggugauguuugcucaaccu

SEQ ID NO: 1782922 - RNA, 19 nt, Artificial Sequence
  Description of Artificial Sequence: Synthetic oligonucleotide
  Antisense strand to SEQ ID NO: 1782921
agguugagcaaacaucacc

SEQ ID NO: 1782923 - RNA, 19 nt, Artificial Sequence
  Description of Artificial Sequence: Synthetic oligonucleotide
  Sense strand starting at position 3137 of SEQ ID NO: 1562926
uuugcucaaccuuguguau

SEQ ID NO: 1782924 - RNA, 19 nt, Artificial Sequence
  Description of Artificial Sequence: Synthetic oligonucleotide
  Antisense strand to SEQ ID NO: 1782923
auacacaagguugagcaaa

SEQ ID NO: 1782925 - RNA, 19 nt, Artificial Sequence
  Description of Artificial Sequence: Synthetic oligonucleotide
  Sense strand starting at position 3139 of SEQ ID NO: 1562926
ugcucaaccuuguguauag

SEQ ID NO: 1782926 - RNA, 19 nt, Artificial Sequence
  Description of Artificial Sequence: Synthetic oligonucleotide
  Antisense strand to SEQ ID NO: 1782925
cuauacacaagguugagca

SEQ ID NO: 1782927 - RNA, 19 nt, Artificial Sequence
  Description of Artificial Sequence: Synthetic oligonucleotide
  Sense strand starting at position 3140 of SEQ ID NO: 1562926
gcucaaccuuguguauaga

SEQ ID NO: 1782928 - RNA, 19 nt, Artificial Sequence
  Description of Artificial Sequence: Synthetic oligonucleotide
  Antisense strand to SEQ ID NO: 1782927
ucuauacacaagguugagc

SEQ ID NO: 1782929 - RNA, 19 nt, Artificial Sequence
  Description of Artificial Sequence: Synthetic oligonucleotide
  Sense strand starting at position 3425 of SEQ ID NO: 1562926
gaacaaggcuggccugaaa

SEQ ID NO: 1782930 - RNA, 19 nt, Artificial Sequence
  Description of Artificial Sequence: Synthetic oligonucleotide
  Antisense strand to SEQ ID NO: 1782929
uuucaggccagccuuguuc

SEQ ID NO: 1782931 - RNA, 19 nt, Artificial Sequence
  Description of Artificial Sequence: Synthetic oligonucleotide
  Sense strand starting at position 3450 of SEQ ID NO: 1562926
ggcuccaugugacaaucaa

SEQ ID NO: 1782932 - RNA, 19 nt, Artificial Sequence
  Description of Artificial Sequence: Synthetic oligonucleotide
  Antisense strand to SEQ ID NO: 1782931
uugauugucacauggagcc

SEQ ID NO: 1782933 - RNA, 19 nt, Artificial Sequence
  Description of Artificial Sequence: Synthetic oligonucleotide
  Sense strand starting at position 3493 of SEQ ID NO: 1562926
cucuguaaauccuaggaag

SEQ ID NO: 1782934 - RNA, 19 nt, Artificial Sequence
  Description of Artificial Sequence: Synthetic oligonucleotide
  Antisense strand to SEQ ID NO: 1782933
cuuccuaggauuuacagag

SEQ ID NO: 1782935 - RNA, 19 nt, Artificial Sequence
  Description of Artificial Sequence: Synthetic oligonucleotide
  Sense strand starting at position 3495 of SEQ ID NO: 1562926
cuguaaauccuaggaagca

SEQ ID NO: 1782936 - RNA, 19 nt, Artificial Sequence
  Description of Artificial Sequence: Synthetic oligonucleotide
  Antisense strand to SEQ ID NO: 1782935
ugcuuccuaggauuuacag

SEQ ID NO: 1782937 - RNA, 19 nt, Artificial Sequence
  Description of Artificial Sequence: Synthetic oligonucleotide
  Sense strand starting at position 3671 of SEQ ID NO: 1562926
ucucaugugucccugugaa

SEQ ID NO: 1782938 - RNA, 19 nt, Artificial Sequence
  Description of Artificial Sequence: Synthetic oligonucleotide
  Antisense strand to SEQ ID NO: 1782937
uucacagggacacaugaga

SEQ ID NO: 1782939 - RNA, 19 nt, Artificial Sequence
  Description of Artificial Sequence: Synthetic oligonucleotide
  Sense strand starting at position 3700 of SEQ ID NO: 1562926
accagcuuuguaugagcaa

SEQ ID NO: 1782940 - RNA, 19 nt, Artificial Sequence
  Description of Artificial Sequence: Synthetic oligonucleotide
  Antisense strand to SEQ ID NO: 1782939
uugcucauacaaagcuggu

SEQ ID NO: 1782941 - RNA, 19 nt, Artificial Sequence
  Description of Artificial Sequence: Synthetic oligonucleotide
  Sense strand starting at position 72 of SEQ ID NO: 1562927
uggcuucucugugcaacaa

SEQ ID NO: 1782942 - RNA, 19 nt, Artificial Sequence
  Description of Artificial Sequence: Synthetic oligonucleotide
  Antisense strand to SEQ ID NO: 1782941
uuguugcacagagaagcca

SEQ ID NO: 1782943 - RNA, 19 nt, Artificial Sequence
  Description of Artificial Sequence: Synthetic oligonucleotide
  Sense strand starting at position 83 of SEQ ID NO: 1562927
ugcaacaacuugucuugaa

SEQ ID NO: 1782944 - RNA, 19 nt, Artificial Sequence
  Description of Artificial Sequence: Synthetic oligonucleotide
  Antisense strand to SEQ ID NO: 1782943
uucaagacaaguuguugca

SEQ ID NO: 1782945 - RNA, 19 nt, Artificial Sequence
  Description of Artificial Sequence: Synthetic oligonucleotide
  Sense strand starting at position 84 of SEQ ID NO: 1562927
gcaacaacuugucuugaau

SEQ ID NO: 1782946 - RNA, 19 nt, Artificial Sequence
  Description of Artificial Sequence: Synthetic oligonucleotide
  Antisense strand to SEQ ID NO: 1782945
auucaagacaaguuguugc

SEQ ID NO: 1782947 - RNA, 19 nt, Artificial Sequence
  Description of Artificial Sequence: Synthetic oligonucleotide
  Sense strand starting at position 183 of SEQ ID NO: 1562927
uagggcugugccuacagaa

SEQ ID NO: 1782948 - RNA, 19 nt, Artificial Sequence
  Description of Artificial Sequence: Synthetic oligonucleotide
  Antisense strand to SEQ ID NO: 1782947
uucuguaggcacagcccua

SEQ ID NO: 1782949 - RNA, 19 nt, Artificial Sequence
  Description of Artificial Sequence: Synthetic oligonucleotide
  Sense strand starting at position 766 of SEQ ID NO: 1562927
cggugcuucucaucugaca

SEQ ID NO: 1782950 - RNA, 19 nt, Artificial Sequence
  Description of Artificial Sequence: Synthetic oligonucleotide
  Antisense strand to SEQ ID NO: 1782949
ugucagaugagaagcaccg

SEQ ID NO: 1782951 - RNA, 19 nt, Artificial Sequence
  Description of Artificial Sequence: Synthetic oligonucleotide
  Sense strand starting at position 841 of SEQ ID NO: 1562927
uguacagucucaccugaga

SEQ ID NO: 1782952 - RNA, 19 nt, Artificial Sequence
  Description of Artificial Sequence: Synthetic oligonucleotide
  Antisense strand to SEQ ID NO: 1782951
ucucaggugagacuguaca

SEQ ID NO: 1782953 - RNA, 19 nt, Artificial Sequence
  Description of Artificial Sequence: Synthetic oligonucleotide
  Sense strand starting at position 926 of SEQ ID NO: 1562927
ggagauaaccgucaucucu

SEQ ID NO: 1782954 - RNA, 19 nt, Artificial Sequence
  Description of Artificial Sequence: Synthetic oligonucleotide
  Antisense strand to SEQ ID NO: 1782953
agagaugacgguuaucucc

SEQ ID NO: 1782955 - RNA, 19 nt, Artificial Sequence
  Description of Artificial Sequence: Synthetic oligonucleotide
  Sense strand starting at position 1081 of SEQ ID NO: 1562927
ccaacaguguucucagagu

SEQ ID NO: 1782956 - RNA, 19 nt, Artificial Sequence
  Description of Artificial Sequence: Synthetic oligonucleotide
  Antisense strand to SEQ ID NO: 1782955
acucugagaacacuguugg

SEQ ID NO: 1782957 - RNA, 19 nt, Artificial Sequence
  Description of Artificial Sequence: Synthetic oligonucleotide
  Sense strand starting at position 1167 of SEQ ID NO: 1562927
ccaggauucucuugucuca

SEQ ID NO: 1782958 - RNA, 19 nt, Artificial Sequence
  Description of Artificial Sequence: Synthetic oligonucleotide
  Antisense strand to SEQ ID NO: 1782957
ugagacaagagaauccugg

SEQ ID NO: 1782959 - RNA, 19 nt, Artificial Sequence
  Description of Artificial Sequence: Synthetic oligonucleotide
  Sense strand starting at position 1169 of SEQ ID NO: 1562927
aggauucucuugucucaac

SEQ ID NO: 1782960 - RNA, 19 nt, Artificial Sequence
  Description of Artificial Sequence: Synthetic oligonucleotide
  Antisense strand to SEQ ID NO: 1782959
guugagacaagagaauccu

SEQ ID NO: 1782961 - RNA, 19 nt, Artificial Sequence
  Description of Artificial Sequence: Synthetic oligonucleotide
  Sense strand starting at position 1170 of SEQ ID NO: 1562927
ggauucucuugucucaaca

SEQ ID NO: 1782962 - RNA, 19 nt, Artificial Sequence
  Description of Artificial Sequence: Synthetic oligonucleotide
  Antisense strand to SEQ ID NO: 1782961
uguugagacaagagaaucc

SEQ ID NO: 1782963 - RNA, 19 nt, Artificial Sequence
  Description of Artificial Sequence: Synthetic oligonucleotide
  Sense strand starting at position 1279 of SEQ ID NO: 1562927
guugguagacaucgacaaa

SEQ ID NO: 1782964 - RNA, 19 nt, Artificial Sequence
  Description of Artificial Sequence: Synthetic oligonucleotide
  Antisense strand to SEQ ID NO: 1782963
uuugucgaugucuaccaac

SEQ ID NO: 1782965 - RNA, 19 nt, Artificial Sequence
  Description of Artificial Sequence: Synthetic oligonucleotide
  Sense strand starting at position 1966 of SEQ ID NO: 1562927
ccugcucuccgugaagaca

SEQ ID NO: 1782966 - RNA, 19 nt, Artificial Sequence
  Description of Artificial Sequence: Synthetic oligonucleotide
  Antisense strand to SEQ ID NO: 1782965
ugucuucacggagagcagg

SEQ ID NO: 1782967 - RNA, 19 nt, Artificial Sequence
  Description of Artificial Sequence: Synthetic oligonucleotide
  Sense strand starting at position 2039 of SEQ ID NO: 1562927
gaaggagaauauugagugu

SEQ ID NO: 1782968 - RNA, 19 nt, Artificial Sequence
  Description of Artificial Sequence: Synthetic oligonucleotide
  Antisense strand to SEQ ID NO: 1782967
acacucaauauucuccuuc

SEQ ID NO: 1782969 - RNA, 19 nt, Artificial Sequence
  Description of Artificial Sequence: Synthetic oligonucleotide
  Sense strand starting at position 2043 of SEQ ID NO: 1562927
gagaauauugaguguucgu

SEQ ID NO: 1782970 - RNA, 19 nt, Artificial Sequence
  Description of Artificial Sequence: Synthetic oligonucleotide
  Antisense strand to SEQ ID NO: 1782969
acgaacacucaauauucuc

SEQ ID NO: 1782971 - RNA, 19 nt, Artificial Sequence
  Description of Artificial Sequence: Synthetic oligonucleotide
  Sense strand starting at position 2046 of SEQ ID NO: 1562927
aauauugaguguucguaau

SEQ ID NO: 1782972 - RNA, 19 nt, Artificial Sequence
  Description of Artificial Sequence: Synthetic oligonucleotide
  Antisense strand to SEQ ID NO: 1782971
auuacgaacacucaauauu

SEQ ID NO: 1782973 - RNA, 19 nt, Artificial Sequence
  Description of Artificial Sequence: Synthetic oligonucleotide
  Sense strand starting at position 2052 of SEQ ID NO: 1562927
gaguguucguaaugcaaag

SEQ ID NO: 1782974 - RNA, 19 nt, Artificial Sequence
  Description of Artificial Sequence: Synthetic oligonucleotide
  Antisense strand to SEQ ID NO: 1782973
cuuugcauuacgaacacuc

SEQ ID NO: 1782975 - RNA, 19 nt, Artificial Sequence
  Description of Artificial Sequence: Synthetic oligonucleotide
  Sense strand starting at position 2054 of SEQ ID NO: 1562927
guguucguaaugcaaagaa

SEQ ID NO: 1782976 - RNA, 19 nt, Artificial Sequence
  Description of Artificial Sequence: Synthetic oligonucleotide
  Antisense strand to SEQ ID NO: 1782975
uucuuugcauuacgaacac

SEQ ID NO: 1782977 - RNA, 19 nt, Artificial Sequence
  Description of Artificial Sequence: Synthetic oligonucleotide
  Sense strand starting at position 2132 of SEQ ID NO: 1562927
acagaaacaucacuacgua

SEQ ID NO: 1782978 - RNA, 19 nt, Artificial Sequence
  Description of Artificial Sequence: Synthetic oligonucleotide
  Antisense strand to SEQ ID NO: 1782977
uacguagugauguuucugu

SEQ ID NO: 1782979 - RNA, 19 nt, Artificial Sequence
  Description of Artificial Sequence: Synthetic oligonucleotide
  Sense strand starting at position 2796 of SEQ ID NO: 1562927
aagaaagauuccggacaca

SEQ ID NO: 1782980 - RNA, 19 nt, Artificial Sequence
  Description of Artificial Sequence: Synthetic oligonucleotide
  Antisense strand to SEQ ID NO: 1782979
uguguccggaaucuuucuu

SEQ ID NO: 1782981 - RNA, 19 nt, Artificial Sequence
  Description of Artificial Sequence: Synthetic oligonucleotide
  Sense strand starting at position 2823 of SEQ ID NO: 1562927
caaguuguaugguucguuu

SEQ ID NO: 1782982 - RNA, 19 nt, Artificial Sequence
  Description of Artificial Sequence: Synthetic oligonucleotide
  Antisense strand to SEQ ID NO: 1782981
aaacgaaccauacaacuug

SEQ ID NO: 1782983 - RNA, 19 nt, Artificial Sequence
  Description of Artificial Sequence: Synthetic oligonucleotide
  Sense strand starting at position 2904 of SEQ ID NO: 1562927
aguggagccuggugaguau

SEQ ID NO: 1782984 - RNA, 19 nt, Artificial Sequence
  Description of Artificial Sequence: Synthetic oligonucleotide
  Antisense strand to SEQ ID NO: 1782983
auacucaccaggcuccacu

SEQ ID NO: 1782985 - RNA, 19 nt, Artificial Sequence
  Description of Artificial Sequence: Synthetic oligonucleotide
  Sense strand starting at position 3018 of SEQ ID NO: 1562927
gcuagagaguggugauguu

SEQ ID NO: 1782986 - RNA, 19 nt, Artificial Sequence
  Description of Artificial Sequence: Synthetic oligonucleotide
  Antisense strand to SEQ ID NO: 1782985
aacaucaccacucucuagc

SEQ ID NO: 1782987 - RNA, 19 nt, Artificial Sequence
  Description of Artificial Sequence: Synthetic oligonucleotide
  Sense strand starting at position 3025 of SEQ ID NO: 1562927
aguggugauguuugcucaa

SEQ ID NO: 1782988 - RNA, 19 nt, Artificial Sequence
  Description of Artificial Sequence: Synthetic oligonucleotide
  Antisense strand to SEQ ID NO: 1782987
uugagcaaacaucaccacu

SEQ ID NO: 1782989 - RNA, 19 nt, Artificial Sequence
  Description of Artificial Sequence: Synthetic oligonucleotide
  Sense strand starting at position 3028 of SEQ ID NO: 1562927
ggugauguuugcucaaccu

SEQ ID NO: 1782990 - RNA, 19 nt, Artificial Sequence
  Description of Artificial Sequence: Synthetic oligonucleotide
  Antisense strand to SEQ ID NO: 1782989
agguugagcaaacaucacc

SEQ ID NO: 1782991 - RNA, 19 nt, Artificial Sequence
  Description of Artificial Sequence: Synthetic oligonucleotide
  Sense strand starting at position 3035 of SEQ ID NO: 1562927
uuugcucaaccuuguguau

SEQ ID NO: 1782992 - RNA, 19 nt, Artificial Sequence
  Description of Artificial Sequence: Synthetic oligonucleotide
  Antisense strand to SEQ ID NO: 1782991
auacacaagguugagcaaa

SEQ ID NO: 1782993 - RNA, 19 nt, Artificial Sequence
  Description of Artificial Sequence: Synthetic oligonucleotide
  Sense strand starting at position 3037 of SEQ ID NO: 1562927
ugcucaaccuuguguauag

SEQ ID NO: 1782994 - RNA, 19 nt, Artificial Sequence
  Description of Artificial Sequence: Synthetic oligonucleotide
  Antisense strand to SEQ ID NO: 1782993
cuauacacaagguugagca

SEQ ID NO: 1782995 - RNA, 19 nt, Artificial Sequence
  Description of Artificial Sequence: Synthetic oligonucleotide
  Sense strand starting at position 3038 of SEQ ID NO: 1562927
gcucaaccuuguguauaga

SEQ ID NO: 1782996 - RNA, 19 nt, Artificial Sequence
  Description of Artificial Sequence: Synthetic oligonucleotide
  Antisense strand to SEQ ID NO: 1782995
ucuauacacaagguugagc

SEQ ID NO: 1782997 - RNA, 19 nt, Artificial Sequence
  Description of Artificial Sequence: Synthetic oligonucleotide
  Sense strand starting at position 3323 of SEQ ID NO: 1562927
gaacaaggcuggccugaaa

SEQ ID NO: 1782998 - RNA, 19 nt, Artificial Sequence
  Description of Artificial Sequence: Synthetic oligonucleotide
  Antisense strand to SEQ ID NO: 1782997
uuucaggccagccuuguuc

SEQ ID NO: 1782999 - RNA, 19 nt, Artificial Sequence
  Description of Artificial Sequence: Synthetic oligonucleotide
  Sense strand starting at position 3348 of SEQ ID NO: 1562927
ggcuccaugugacaaucaa

SEQ ID NO: 1783000 - RNA, 19 nt, Artificial Sequence
  Description of Artificial Sequence: Synthetic oligonucleotide
  Antisense strand to SEQ ID NO: 1782999
uugauugucacauggagcc

SEQ ID NO: 1783001 - RNA, 19 nt, Artificial Sequence
  Description of Artificial Sequence: Synthetic oligonucleotide
  Sense strand starting at position 3391 of SEQ ID NO: 1562927
cucuguaaauccuaggaag

SEQ ID NO: 1783002 - RNA, 19 nt, Artificial Sequence
  Description of Artificial Sequence: Synthetic oligonucleotide
  Antisense strand to SEQ ID NO: 1783001
cuuccuaggauuuacagag

SEQ ID NO: 1783003 - RNA, 19 nt, Artificial Sequence
  Description of Artificial Sequence: Synthetic oligonucleotide
  Sense strand starting at position 3393 of SEQ ID NO: 1562927
cuguaaauccuaggaagca

SEQ ID NO: 1783004 - RNA, 19 nt, Artificial Sequence
  Description of Artificial Sequence: Synthetic oligonucleotide
  Antisense strand to SEQ ID NO: 1783003
ugcuuccuaggauuuacag

SEQ ID NO: 1783005 - RNA, 19 nt, Artificial Sequence
  Description of Artificial Sequence: Synthetic oligonucleotide
  Sense strand starting at position 3569 of SEQ ID NO: 1562927
ucucaugugucccugugaa

SEQ ID NO: 1783006 - RNA, 19 nt, Artificial Sequence
  Description of Artificial Sequence: Synthetic oligonucleotide
  Antisense strand to SEQ ID NO: 1783005
uucacagggacacaugaga

SEQ ID NO: 1783007 - RNA, 19 nt, Artificial Sequence
  Description of Artificial Sequence: Synthetic oligonucleotide
  Sense strand starting at position 3598 of SEQ ID NO: 1562927
accagcuuuguaugagcaa

SEQ ID NO: 1783008 - RNA, 19 nt, Artificial Sequence
  Description of Artificial Sequence: Synthetic oligonucleotide
  Antisense strand to SEQ ID NO: 1783007
uugcucauacaaagcuggu

SEQ ID NO: 1783009 - RNA, 19 nt, Artificial Sequence
  Description of Artificial Sequence: Synthetic oligonucleotide
  Sense strand starting at position 103 of SEQ ID NO: 1562928
augggccucuucuugagaa

SEQ ID NO: 1783010 - RNA, 19 nt, Artificial Sequence
  Description of Artificial Sequence: Synthetic oligonucleotide
  Antisense strand to SEQ ID NO: 1783009
uucucaagaagaggcccau

SEQ ID NO: 1783011 - RNA, 19 nt, Artificial Sequence
  Description of Artificial Sequence: Synthetic oligonucleotide
  Sense strand starting at position 105 of SEQ ID NO: 1562928
gggccucuucuugagaaac

SEQ ID NO: 1783012 - RNA, 19 nt, Artificial Sequence
  Description of Artificial Sequence: Synthetic oligonucleotide
  Antisense strand to SEQ ID NO: 1783011
guuucucaagaagaggccc

SEQ ID NO: 1783013 - RNA, 19 nt, Artificial Sequence
  Description of Artificial Sequence: Synthetic oligonucleotide
  Sense strand starting at position 299 of SEQ ID NO: 1562928
ccacguaaggagugaaacu

SEQ ID NO: 1783014 - RNA, 19 nt, Artificial Sequence
  Description of Artificial Sequence: Synthetic oligonucleotide
  Antisense strand to SEQ ID NO: 1783013
aguuucacuccuuacgugg

SEQ ID NO: 1783015 - RNA, 19 nt, Artificial Sequence
  Description of Artificial Sequence: Synthetic oligonucleotide
  Sense strand starting at position 328 of SEQ ID NO: 1562928
ccugauuucuacugacaga

SEQ ID NO: 1783016 - RNA, 19 nt, Artificial Sequence
  Description of Artificial Sequence: Synthetic oligonucleotide
  Antisense strand to SEQ ID NO: 1783015
ucugucaguagaaaucagg

SEQ ID NO: 1783017 - RNA, 19 nt, Artificial Sequence
  Description of Artificial Sequence: Synthetic oligonucleotide
  Sense strand starting at position 341 of SEQ ID NO: 1562928
gacagaggcuuccuguaua

SEQ ID NO: 1783018 - RNA, 19 nt, Artificial Sequence
  Description of Artificial Sequence: Synthetic oligonucleotide
  Antisense strand to SEQ ID NO: 1783017
uauacaggaagccucuguc

SEQ ID NO: 1783019 - RNA, 19 nt, Artificial Sequence
  Description of Artificial Sequence: Synthetic oligonucleotide
  Sense strand starting at position 397 of SEQ ID NO: 1562928
agaaacaaucugugucauu

SEQ ID NO: 1783020 - RNA, 19 nt, Artificial Sequence
  Description of Artificial Sequence: Synthetic oligonucleotide
  Antisense strand to SEQ ID NO: 1783019
aaugacacagauuguuucu

SEQ ID NO: 1783021 - RNA, 19 nt, Artificial Sequence
  Description of Artificial Sequence: Synthetic oligonucleotide
  Sense strand starting at position 519 of SEQ ID NO: 1562928
gugggaaggaugugcagau

SEQ ID NO: 1783022 - RNA, 19 nt, Artificial Sequence
  Description of Artificial Sequence: Synthetic oligonucleotide
  Antisense strand to SEQ ID NO: 1783021
aucugcacauccuucccac

SEQ ID NO: 1783023 - RNA, 19 nt, Artificial Sequence
  Description of Artificial Sequence: Synthetic oligonucleotide
  Sense strand starting at position 606 of SEQ ID NO: 1562928
gugauaccuucuguggaca

SEQ ID NO: 1783024 - RNA, 19 nt, Artificial Sequence
  Description of Artificial Sequence: Synthetic oligonucleotide
  Antisense strand to SEQ ID NO: 1783023
uguccacagaagguaucac

SEQ ID NO: 1783025 - RNA, 19 nt, Artificial Sequence
  Description of Artificial Sequence: Synthetic oligonucleotide
  Sense strand starting at position 607 of SEQ ID NO: 1562928
ugauaccuucuguggacaa

SEQ ID NO: 1783026 - RNA, 19 nt, Artificial Sequence
  Description of Artificial Sequence: Synthetic oligonucleotide
  Antisense strand to SEQ ID NO: 1783025
uuguccacagaagguauca

SEQ ID NO: 1783027 - RNA, 19 nt, Artificial Sequence
  Description of Artificial Sequence: Synthetic oligonucleotide
  Sense strand starting at position 722 of SEQ ID NO: 1562928
gaggcccucuuuguuaauu

SEQ ID NO: 1783028 - RNA, 19 nt, Artificial Sequence
  Description of Artificial Sequence: Synthetic oligonucleotide
  Antisense strand to SEQ ID NO: 1783027
aauuaacaaagagggccuc

SEQ ID NO: 1783029 - RNA, 19 nt, Artificial Sequence
  Description of Artificial Sequence: Synthetic oligonucleotide
  Sense strand starting at position 723 of SEQ ID NO: 1562928
aggcccucuuuguuaauuu

SEQ ID NO: 1783030 - RNA, 19 nt, Artificial Sequence
  Description of Artificial Sequence: Synthetic oligonucleotide
  Antisense strand to SEQ ID NO: 1783029
aaauuaacaaagagggccu

SEQ ID NO: 1783031 - RNA, 19 nt, Artificial Sequence
  Description of Artificial Sequence: Synthetic oligonucleotide
  Sense strand starting at position 732 of SEQ ID NO: 1562928
uuguuaauuugggaaagua

SEQ ID NO: 1783032 - RNA, 19 nt, Artificial Sequence
  Description of Artificial Sequence: Synthetic oligonucleotide
  Antisense strand to SEQ ID NO: 1783031
uacuuucccaaauuaacaa

SEQ ID NO: 1783033 - RNA, 19 nt, Artificial Sequence
  Description of Artificial Sequence: Synthetic oligonucleotide
  Sense strand starting at position 776 of SEQ ID NO: 1562928
ggaagugucucuuucucua

SEQ ID NO: 1783034 - RNA, 19 nt, Artificial Sequence
  Description of Artificial Sequence: Synthetic oligonucleotide
  Antisense strand to SEQ ID NO: 1783033
uagagaaagagacacuucc

SEQ ID NO: 1783035 - RNA, 19 nt, Artificial Sequence
  Description of Artificial Sequence: Synthetic oligonucleotide
  Sense strand starting at position 815 of SEQ ID NO: 1562928
cuuccacuccagugagaaa

SEQ ID NO: 1783036 - RNA, 19 nt, Artificial Sequence
  Description of Artificial Sequence: Synthetic oligonucleotide
  Antisense strand to SEQ ID NO: 1783035
uuucucacuggaguggaag

SEQ ID NO: 1783037 - RNA, 19 nt, Artificial Sequence
  Description of Artificial Sequence: Synthetic oligonucleotide
  Sense strand starting at position 886 of SEQ ID NO: 1562928
ugcuucucugugcaagaua

SEQ ID NO: 1783038 - RNA, 19 nt, Artificial Sequence
  Description of Artificial Sequence: Synthetic oligonucleotide
  Antisense strand to SEQ ID NO: 1783037
uaucuugcacagagaagca

SEQ ID NO: 1783039 - RNA, 19 nt, Artificial Sequence
  Description of Artificial Sequence: Synthetic oligonucleotide
  Sense strand starting at position 889 of SEQ ID NO: 1562928
uucucugugcaagauauua

SEQ ID NO: 1783040 - RNA, 19 nt, Artificial Sequence
  Description of Artificial Sequence: Synthetic oligonucleotide
  Antisense strand to SEQ ID NO: 1783039
uaauaucuugcacagagaa

SEQ ID NO: 1783041 - RNA, 19 nt, Artificial Sequence
  Description of Artificial Sequence: Synthetic oligonucleotide
  Sense strand starting at position 1064 of SEQ ID NO: 1562928
acaaauagucaaggucaca

SEQ ID NO: 1783042 - RNA, 19 nt, Artificial Sequence
  Description of Artificial Sequence: Synthetic oligonucleotide
  Antisense strand to SEQ ID NO: 1783041
ugugaccuugacuauuugu

SEQ ID NO: 1783043 - RNA, 19 nt, Artificial Sequence
  Description of Artificial Sequence: Synthetic oligonucleotide
  Sense strand starting at position 1078 of SEQ ID NO: 1562928
ucacaaagacguuaaguga

SEQ ID NO: 1783044 - RNA, 19 nt, Artificial Sequence
  Description of Artificial Sequence: Synthetic oligonucleotide
  Antisense strand to SEQ ID NO: 1783043
ucacuuaacgucuuuguga

SEQ ID NO: 1783045 - RNA, 19 nt, Artificial Sequence
  Description of Artificial Sequence: Synthetic oligonucleotide
  Sense strand starting at position 1082 of SEQ ID NO: 1562928
aaagacguuaagugagaga

SEQ ID NO: 1783046 - RNA, 19 nt, Artificial Sequence
  Description of Artificial Sequence: Synthetic oligonucleotide
  Antisense strand to SEQ ID NO: 1783045
ucucucacuuaacgucuuu

SEQ ID NO: 1783047 - RNA, 19 nt, Artificial Sequence
  Description of Artificial Sequence: Synthetic oligonucleotide
  Sense strand starting at position 1242 of SEQ ID NO: 1562928
guugauuucugauaccaua

SEQ ID NO: 1783048 - RNA, 19 nt, Artificial Sequence
  Description of Artificial Sequence: Synthetic oligonucleotide
  Antisense strand to SEQ ID NO: 1783047
uaugguaucagaaaucaac

SEQ ID NO: 1783049 - RNA, 19 nt, Artificial Sequence
  Description of Artificial Sequence: Synthetic oligonucleotide
  Sense strand starting at position 1320 of SEQ ID NO: 1562928
gaagguaagucucuuucuu

SEQ ID NO: 1783050 - RNA, 19 nt, Artificial Sequence
  Description of Artificial Sequence: Synthetic oligonucleotide
  Antisense strand to SEQ ID NO: 1783049
aagaaagagacuuaccuuc

SEQ ID NO: 1783051 - RNA, 19 nt, Artificial Sequence
  Description of Artificial Sequence: Synthetic oligonucleotide
  Sense strand starting at position 1322 of SEQ ID NO: 1562928
agguaagucucuuucuuac

SEQ ID NO: 1783052 - RNA, 19 nt, Artificial Sequence
  Description of Artificial Sequence: Synthetic oligonucleotide
  Antisense strand to SEQ ID NO: 1783051
guaagaaagagacuuaccu

SEQ ID NO: 1783053 - RNA, 19 nt, Artificial Sequence
  Description of Artificial Sequence: Synthetic oligonucleotide
  Sense strand starting at position 1331 of SEQ ID NO: 1562928
ucuuucuuacugggaagaa

SEQ ID NO: 1783054 - RNA, 19 nt, Artificial Sequence
  Description of Artificial Sequence: Synthetic oligonucleotide
  Antisense strand to SEQ ID NO: 1783053
uucuucccaguaagaaaga

SEQ ID NO: 1783055 - RNA, 19 nt, Artificial Sequence
  Description of Artificial Sequence: Synthetic oligonucleotide
  Sense strand starting at position 1449 of SEQ ID NO: 1562928
acuccuccucaggauaagu

SEQ ID NO: 1783056 - RNA, 19 nt, Artificial Sequence
  Description of Artificial Sequence: Synthetic oligonucleotide
  Antisense strand to SEQ ID NO: 1783055
acuuauccugaggaggagu

SEQ ID NO: 1783057 - RNA, 19 nt, Artificial Sequence
  Description of Artificial Sequence: Synthetic oligonucleotide
  Sense strand starting at position 1515 of SEQ ID NO: 1562928
acggaugagcgcuaagaaa

SEQ ID NO: 1783058 - RNA, 19 nt, Artificial Sequence
  Description of Artificial Sequence: Synthetic oligonucleotide
  Antisense strand to SEQ ID NO: 1783057
uuucuuagcgcucauccgu

SEQ ID NO: 1783059 - RNA, 19 nt, Artificial Sequence
  Description of Artificial Sequence: Synthetic oligonucleotide
  Sense strand starting at position 1534 of SEQ ID NO: 1562928
gagcguacgccuccgauaa

SEQ ID NO: 1783060 - RNA, 19 nt, Artificial Sequence
  Description of Artificial Sequence: Synthetic oligonucleotide
  Antisense strand to SEQ ID NO: 1783059
uuaucggaggcguacgcuc

SEQ ID NO: 1783061 - RNA, 19 nt, Artificial Sequence
  Description of Artificial Sequence: Synthetic oligonucleotide
  Sense strand starting at position 1560 of SEQ ID NO: 1562928
cguccucuccgaggagaua

SEQ ID NO: 1783062 - RNA, 19 nt, Artificial Sequence
  Description of Artificial Sequence: Synthetic oligonucleotide
  Antisense strand to SEQ ID NO: 1783061
uaucuccucggagaggacg

SEQ ID NO: 1783063 - RNA, 19 nt, Artificial Sequence
  Description of Artificial Sequence: Synthetic oligonucleotide
  Sense strand starting at position 1561 of SEQ ID NO: 1562928
guccucuccgaggagauaa

SEQ ID NO: 1783064 - RNA, 19 nt, Artificial Sequence
  Description of Artificial Sequence: Synthetic oligonucleotide
  Antisense strand to SEQ ID NO: 1783063
uuaucuccucggagaggac

SEQ ID NO: 1783065 - RNA, 19 nt, Artificial Sequence
  Description of Artificial Sequence: Synthetic oligonucleotide
  Sense strand starting at position 1632 of SEQ ID NO: 1562928
ggagccaugacucggagaa

SEQ ID NO: 1783066 - RNA, 19 nt, Artificial Sequence
  Description of Artificial Sequence: Synthetic oligonucleotide
  Antisense strand to SEQ ID NO: 1783065
uucuccgagucauggcucc

SEQ ID NO: 1783067 - RNA, 19 nt, Artificial Sequence
  Description of Artificial Sequence: Synthetic oligonucleotide
  Sense strand starting at position 1633 of SEQ ID NO: 1562928
gagccaugacucggagaag

SEQ ID NO: 1783068 - RNA, 19 nt, Artificial Sequence
  Description of Artificial Sequence: Synthetic oligonucleotide
  Antisense strand to SEQ ID NO: 1783067
cuucuccgagucauggcuc

SEQ ID NO: 1783069 - RNA, 19 nt, Artificial Sequence
  Description of Artificial Sequence: Synthetic oligonucleotide
  Sense strand starting at position 2088 of SEQ ID NO: 1562928
agggaaggcucuuccugau

SEQ ID NO: 1783070 - RNA, 19 nt, Artificial Sequence
  Description of Artificial Sequence: Synthetic oligonucleotide
  Antisense strand to SEQ ID NO: 1783069
aucaggaagagccuucccu

SEQ ID NO: 1783071 - RNA, 19 nt, Artificial Sequence
  Description of Artificial Sequence: Synthetic oligonucleotide
  Sense strand starting at position 2319 of SEQ ID NO: 1562928
gagagaucuuauucuacug

SEQ ID NO: 1783072 - RNA, 19 nt, Artificial Sequence
  Description of Artificial Sequence: Synthetic oligonucleotide
  Antisense strand to SEQ ID NO: 1783071
caguagaauaagaucucuc

SEQ ID NO: 1783073 - RNA, 19 nt, Artificial Sequence
  Description of Artificial Sequence: Synthetic oligonucleotide
  Sense strand starting at position 2412 of SEQ ID NO: 1562928
ccuccaguugguuacagaa

SEQ ID NO: 1783074 - RNA, 19 nt, Artificial Sequence
  Description of Artificial Sequence: Synthetic oligonucleotide
  Antisense strand to SEQ ID NO: 1783073
uucuguaaccaacuggagg

SEQ ID NO: 1783075 - RNA, 19 nt, Artificial Sequence
  Description of Artificial Sequence: Synthetic oligonucleotide
  Sense strand starting at position 2477 of SEQ ID NO: 1562928
ugucucaucucuuuauuga

SEQ ID NO: 1783076 - RNA, 19 nt, Artificial Sequence
  Description of Artificial Sequence: Synthetic oligonucleotide
  Antisense strand to SEQ ID NO: 1783075
ucaauaaagagaugagaca

SEQ ID NO: 1783077 - RNA, 19 nt, Artificial Sequence
  Description of Artificial Sequence: Synthetic oligonucleotide
  Sense strand starting at position 2478 of SEQ ID NO: 1562928
gucucaucucuuuauugac

SEQ ID NO: 1783078 - RNA, 19 nt, Artificial Sequence
  Description of Artificial Sequence: Synthetic oligonucleotide
  Antisense strand to SEQ ID NO: 1783077
gucaauaaagagaugagac

SEQ ID NO: 1783079 - RNA, 19 nt, Artificial Sequence
  Description of Artificial Sequence: Synthetic oligonucleotide
  Sense strand starting at position 2610 of SEQ ID NO: 1562928
aagaaauguuuauccagug

SEQ ID NO: 1783080 - RNA, 19 nt, Artificial Sequence
  Description of Artificial Sequence: Synthetic oligonucleotide
  Antisense strand to SEQ ID NO: 1783079
cacuggauaaacauuucuu

SEQ ID NO: 1783081 - RNA, 19 nt, Artificial Sequence
  Description of Artificial Sequence: Synthetic oligonucleotide
  Sense strand starting at position 2615 of SEQ ID NO: 1562928
auguuuauccaguggaaga

SEQ ID NO: 1783082 - RNA, 19 nt, Artificial Sequence
  Description of Artificial Sequence: Synthetic oligonucleotide
  Antisense strand to SEQ ID NO: 1783081
ucuuccacuggauaaacau

SEQ ID NO: 1783083 - RNA, 19 nt, Artificial Sequence
  Description of Artificial Sequence: Synthetic oligonucleotide
  Sense strand starting at position 2616 of SEQ ID NO: 1562928
uguuuauccaguggaagaa

SEQ ID NO: 1783084 - RNA, 19 nt, Artificial Sequence
  Description of Artificial Sequence: Synthetic oligonucleotide
  Antisense strand to SEQ ID NO: 1783083
uucuuccacuggauaaaca

SEQ ID NO: 1783085 - RNA, 19 nt, Artificial Sequence
  Description of Artificial Sequence: Synthetic oligonucleotide
  Sense strand starting at position 2803 of SEQ ID NO: 1562928
gagacaucguuucugccaa

SEQ ID NO: 1783086 - RNA, 19 nt, Artificial Sequence
  Description of Artificial Sequence: Synthetic oligonucleotide
  Antisense strand to SEQ ID NO: 1783085
uuggcagaaacgaugucuc

SEQ ID NO: 1783087 - RNA, 19 nt, Artificial Sequence
  Description of Artificial Sequence: Synthetic oligonucleotide
  Sense strand starting at position 3503 of SEQ ID NO: 1562928
uuaugagaguugccaaauu

SEQ ID NO: 1783088 - RNA, 19 nt, Artificial Sequence
  Description of Artificial Sequence: Synthetic oligonucleotide
  Antisense strand to SEQ ID NO: 1783087
aauuuggcaacucucauaa

SEQ ID NO: 1783089 - RNA, 19 nt, Artificial Sequence
  Description of Artificial Sequence: Synthetic oligonucleotide
  Sense strand starting at position 16 of SEQ ID NO: 1562929
cagguaugcuccugaacuc

SEQ ID NO: 1783090 - RNA, 19 nt, Artificial Sequence
  Description of Artificial Sequence: Synthetic oligonucleotide
  Antisense strand to SEQ ID NO: 1783089
gaguucaggagcauaccug

SEQ ID NO: 1783091 - RNA, 19 nt, Artificial Sequence
  Description of Artificial Sequence: Synthetic oligonucleotide
  Sense strand starting at position 17 of SEQ ID NO: 1562929
agguaugcuccugaacucu

SEQ ID NO: 1783092 - RNA, 19 nt, Artificial Sequence
  Description of Artificial Sequence: Synthetic oligonucleotide
  Antisense strand to SEQ ID NO: 1783091
agaguucaggagcauaccu

SEQ ID NO: 1783093 - RNA, 19 nt, Artificial Sequence
  Description of Artificial Sequence: Synthetic oligonucleotide
  Sense strand starting at position 259 of SEQ ID NO: 1562929
gcaaauuucugaccagugu

SEQ ID NO: 1783094 - RNA, 19 nt, Artificial Sequence
  Description of Artificial Sequence: Synthetic oligonucleotide
  Antisense strand to SEQ ID NO: 1783093
acacuggucagaaauuugc

SEQ ID NO: 1783095 - RNA, 19 nt, Artificial Sequence
  Description of Artificial Sequence: Synthetic oligonucleotide
  Sense strand starting at position 548 of SEQ ID NO: 1562929
uggugauggccagacucua

SEQ ID NO: 1783096 - RNA, 19 nt, Artificial Sequence
  Description of Artificial Sequence: Synthetic oligonucleotide
  Antisense strand to SEQ ID NO: 1783095
uagagucuggccaucacca

SEQ ID NO: 1783097 - RNA, 19 nt, Artificial Sequence
  Description of Artificial Sequence: Synthetic oligonucleotide
  Sense strand starting at position 575 of SEQ ID NO: 1562929
gccacuucuugccuuagga

SEQ ID NO: 1783098 - RNA, 19 nt, Artificial Sequence
  Description of Artificial Sequence: Synthetic oligonucleotide
  Antisense strand to SEQ ID NO: 1783097
uccuaaggcaagaaguggc

SEQ ID NO: 1783099 - RNA, 19 nt, Artificial Sequence
  Description of Artificial Sequence: Synthetic oligonucleotide
  Sense strand starting at position 713 of SEQ ID NO: 1562929
ggaggaggcuugugagagu

SEQ ID NO: 1783100 - RNA, 19 nt, Artificial Sequence
  Description of Artificial Sequence: Synthetic oligonucleotide
  Antisense strand to SEQ ID NO: 1783099
acucucacaagccuccucc

SEQ ID NO: 1783101 - RNA, 19 nt, Artificial Sequence
  Description of Artificial Sequence: Synthetic oligonucleotide
  Sense strand starting at position 824 of SEQ ID NO: 1562929
gucaguucccgcuggaagu

SEQ ID NO: 1783102 - RNA, 19 nt, Artificial Sequence
  Description of Artificial Sequence: Synthetic oligonucleotide
  Antisense strand to SEQ ID NO: 1783101
acuuccagcgggaacugac

SEQ ID NO: 1783103 - RNA, 19 nt, Artificial Sequence
  Description of Artificial Sequence: Synthetic oligonucleotide
  Sense strand starting at position 910 of SEQ ID NO: 1562929
uggugagcugcccggaaua

SEQ ID NO: 1783104 - RNA, 19 nt, Artificial Sequence
  Description of Artificial Sequence: Synthetic oligonucleotide
  Antisense strand to SEQ ID NO: 1783103
uauuccgggcagcucacca

SEQ ID NO: 1783105 - RNA, 19 nt, Artificial Sequence
  Description of Artificial Sequence: Synthetic oligonucleotide
  Sense strand starting at position 1324 of SEQ ID NO: 1562929
gugugaaauuaugugcaca

SEQ ID NO: 1783106 - RNA, 19 nt, Artificial Sequence
  Description of Artificial Sequence: Synthetic oligonucleotide
  Antisense strand to SEQ ID NO: 1783105
ugugcacauaauuucacac

SEQ ID NO: 1783107 - RNA, 19 nt, Artificial Sequence
  Description of Artificial Sequence: Synthetic oligonucleotide
  Sense strand starting at position 1326 of SEQ ID NO: 1562929
gugaaauuaugugcacaaa

SEQ ID NO: 1783108 - RNA, 19 nt, Artificial Sequence
  Description of Artificial Sequence: Synthetic oligonucleotide
  Antisense strand to SEQ ID NO: 1783107
uuugugcacauaauuucac

SEQ ID NO: 1783109 - RNA, 19 nt, Artificial Sequence
  Description of Artificial Sequence: Synthetic oligonucleotide
  Sense strand starting at position 1428 of SEQ ID NO: 1562929
ggacucaagcgcucguguu

SEQ ID NO: 1783110 - RNA, 19 nt, Artificial Sequence
  Description of Artificial Sequence: Synthetic oligonucleotide
  Antisense strand to SEQ ID NO: 1783109
aacacgagcgcuugagucc

SEQ ID NO: 1783111 - RNA, 19 nt, Artificial Sequence
  Description of Artificial Sequence: Synthetic oligonucleotide
  Sense strand starting at position 2523 of SEQ ID NO: 1562929
gccugcucuuggguguuaa

SEQ ID NO: 1783112 - RNA, 19 nt, Artificial Sequence
  Description of Artificial Sequence: Synthetic oligonucleotide
  Antisense strand to SEQ ID NO: 1783111
uuaacacccaagagcaggc

SEQ ID NO: 1783113 - RNA, 19 nt, Artificial Sequence
  Description of Artificial Sequence: Synthetic oligonucleotide
  Sense strand starting at position 2524 of SEQ ID NO: 1562929
ccugcucuuggguguuaaa

SEQ ID NO: 1783114 - RNA, 19 nt, Artificial Sequence
  Description of Artificial Sequence: Synthetic oligonucleotide
  Antisense strand to SEQ ID NO: 1783113
uuuaacacccaagagcagg

SEQ ID NO: 1783115 - RNA, 19 nt, Artificial Sequence
  Description of Artificial Sequence: Synthetic oligonucleotide
  Sense strand starting at position 2527 of SEQ ID NO: 1562929
gcucuuggguguuaaacau

SEQ ID NO: 1783116 - RNA, 19 nt, Artificial Sequence
  Description of Artificial Sequence: Synthetic oligonucleotide
  Antisense strand to SEQ ID NO: 1783115
auguuuaacacccaagagc

SEQ ID NO: 1783117 - RNA, 19 nt, Artificial Sequence
  Description of Artificial Sequence: Synthetic oligonucleotide
  Sense strand starting at position 2639 of SEQ ID NO: 1562929
aggccuuccuccugacuga

SEQ ID NO: 1783118 - RNA, 19 nt, Artificial Sequence
  Description of Artificial Sequence: Synthetic oligonucleotide
  Antisense strand to SEQ ID NO: 1783117
ucagucaggaggaaggccu

SEQ ID NO: 1783119 - RNA, 19 nt, Artificial Sequence
  Description of Artificial Sequence: Synthetic oligonucleotide
  Sense strand starting at position 2751 of SEQ ID NO: 1562929
gaagguaucuaucugguca

SEQ ID NO: 1783120 - RNA, 19 nt, Artificial Sequence
  Description of Artificial Sequence: Synthetic oligonucleotide
  Antisense strand to SEQ ID NO: 1783119
ugaccagauagauaccuuc

SEQ ID NO: 1783121 - RNA, 19 nt, Artificial Sequence
  Description of Artificial Sequence: Synthetic oligonucleotide
  Sense strand starting at position 2753 of SEQ ID NO: 1562929
agguaucuaucuggucacu

SEQ ID NO: 1783122 - RNA, 19 nt, Artificial Sequence
  Description of Artificial Sequence: Synthetic oligonucleotide
  Antisense strand to SEQ ID NO: 1783121
agugaccagauagauaccu

SEQ ID NO: 1783123 - RNA, 19 nt, Artificial Sequence
  Description of Artificial Sequence: Synthetic oligonucleotide
  Sense strand starting at position 2759 of SEQ ID NO: 1562929
cuaucuggucacuggacaa

SEQ ID NO: 1783124 - RNA, 19 nt, Artificial Sequence
  Description of Artificial Sequence: Synthetic oligonucleotide
  Antisense strand to SEQ ID NO: 1783123
uuguccagugaccagauag

SEQ ID NO: 1783125 - RNA, 19 nt, Artificial Sequence
  Description of Artificial Sequence: Synthetic oligonucleotide
  Sense strand starting at position 2884 of SEQ ID NO: 1562929
gagccuagggcccaugaaa

SEQ ID NO: 1783126 - RNA, 19 nt, Artificial Sequence
  Description of Artificial Sequence: Synthetic oligonucleotide
  Antisense strand to SEQ ID NO: 1783125
uuucaugggcccuaggcuc

SEQ ID NO: 1783127 - RNA, 19 nt, Artificial Sequence
  Description of Artificial Sequence: Synthetic oligonucleotide
  Sense strand starting at position 2991 of SEQ ID NO: 1562929
uggccuuuagucugaugua

SEQ ID NO: 1783128 - RNA, 19 nt, Artificial Sequence
  Description of Artificial Sequence: Synthetic oligonucleotide
  Antisense strand to SEQ ID NO: 1783127
uacaucagacuaaaggcca

SEQ ID NO: 1783129 - RNA, 19 nt, Artificial Sequence
  Description of Artificial Sequence: Synthetic oligonucleotide
  Sense strand starting at position 2992 of SEQ ID NO: 1562929
ggccuuuagucugauguag

SEQ ID NO: 1783130 - RNA, 19 nt, Artificial Sequence
  Description of Artificial Sequence: Synthetic oligonucleotide
  Antisense strand to SEQ ID NO: 1783129
cuacaucagacuaaaggcc

SEQ ID NO: 1783131 - RNA, 19 nt, Artificial Sequence
  Description of Artificial Sequence: Synthetic oligonucleotide
  Sense strand starting at position 2996 of SEQ ID NO: 1562929
uuuagucugauguagucau

SEQ ID NO: 1783132 - RNA, 19 nt, Artificial Sequence
  Description of Artificial Sequence: Synthetic oligonucleotide
  Antisense strand to SEQ ID NO: 1783131
augacuacaucagacuaaa

SEQ ID NO: 1783133 - RNA, 19 nt, Artificial Sequence
  Description of Artificial Sequence: Synthetic oligonucleotide
  Sense strand starting at position 3026 of SEQ ID NO: 1562929
uuuaguauuuauggaggaa

SEQ ID NO: 1783134 - RNA, 19 nt, Artificial Sequence
  Description of Artificial Sequence: Synthetic oligonucleotide
  Antisense strand to SEQ ID NO: 1783133
uuccuccauaaauacuaaa

SEQ ID NO: 1783135 - RNA, 19 nt, Artificial Sequence
  Description of Artificial Sequence: Synthetic oligonucleotide
  Sense strand starting at position 3105 of SEQ ID NO: 1562929
cugucugucccaggacaaa

SEQ ID NO: 1783136 - RNA, 19 nt, Artificial Sequence
  Description of Artificial Sequence: Synthetic oligonucleotide
  Antisense strand to SEQ ID NO: 1783135
uuuguccugggacagacag

SEQ ID NO: 1783137 - RNA, 19 nt, Artificial Sequence
  Description of Artificial Sequence: Synthetic oligonucleotide
  Sense strand starting at position 3300 of SEQ ID NO: 1562929
gcaugccaguguuugacaa

SEQ ID NO: 1783138 - RNA, 19 nt, Artificial Sequence
  Description of Artificial Sequence: Synthetic oligonucleotide
  Antisense strand to SEQ ID NO: 1783137
uugucaaacacuggcaugc

SEQ ID NO: 1783139 - RNA, 19 nt, Artificial Sequence
  Description of Artificial Sequence: Synthetic oligonucleotide
  Sense strand starting at position 3301 of SEQ ID NO: 1562929
caugccaguguuugacaaa

SEQ ID NO: 1783140 - RNA, 19 nt, Artificial Sequence
  Description of Artificial Sequence: Synthetic oligonucleotide
  Antisense strand to SEQ ID NO: 1783139
uuugucaaacacuggcaug

SEQ ID NO: 1783141 - RNA, 19 nt, Artificial Sequence
  Description of Artificial Sequence: Synthetic oligonucleotide
  Sense strand starting at position 3302 of SEQ ID NO: 1562929
augccaguguuugacaaag

SEQ ID NO: 1783142 - RNA, 19 nt, Artificial Sequence
  Description of Artificial Sequence: Synthetic oligonucleotide
  Antisense strand to SEQ ID NO: 1783141
cuuugucaaacacuggcau

SEQ ID NO: 1783143 - RNA, 19 nt, Artificial Sequence
  Description of Artificial Sequence: Synthetic oligonucleotide
  Sense strand starting at position 3327 of SEQ ID NO: 1562929
uagacaccugcguguguaa

SEQ ID NO: 1783144 - RNA, 19 nt, Artificial Sequence
  Description of Artificial Sequence: Synthetic oligonucleotide
  Antisense strand to SEQ ID NO: 1783143
uuacacacgcaggugucua

SEQ ID NO: 1783145 - RNA, 19 nt, Artificial Sequence
  Description of Artificial Sequence: Synthetic oligonucleotide
  Sense strand starting at position 3336 of SEQ ID NO: 1562929
gcguguguaagucccaauu

SEQ ID NO: 1783146 - RNA, 19 nt, Artificial Sequence
  Description of Artificial Sequence: Synthetic oligonucleotide
  Antisense strand to SEQ ID NO: 1783145
aauugggacuuacacacgc

SEQ ID NO: 1783147 - RNA, 19 nt, Artificial Sequence
  Description of Artificial Sequence: Synthetic oligonucleotide
  Sense strand starting at position 3397 of SEQ ID NO: 1562929
gcugcaagggccugguauu

SEQ ID NO: 1783148 - RNA, 19 nt, Artificial Sequence
  Description of Artificial Sequence: Synthetic oligonucleotide
  Antisense strand to SEQ ID NO: 1783147
aauaccaggcccuugcagc

SEQ ID NO: 1783149 - RNA, 19 nt, Artificial Sequence
  Description of Artificial Sequence: Synthetic oligonucleotide
  Sense strand starting at position 3407 of SEQ ID NO: 1562929
ccugguauuccugacaaug

SEQ ID NO: 1783150 - RNA, 19 nt, Artificial Sequence
  Description of Artificial Sequence: Synthetic oligonucleotide
  Antisense strand to SEQ ID NO: 1783149
cauugucaggaauaccagg

SEQ ID NO: 1783151 - RNA, 19 nt, Artificial Sequence
  Description of Artificial Sequence: Synthetic oligonucleotide
  Sense strand starting at position 3409 of SEQ ID NO: 1562929
ugguauuccugacaaugau

SEQ ID NO: 1783152 - RNA, 19 nt, Artificial Sequence
  Description of Artificial Sequence: Synthetic oligonucleotide
  Antisense strand to SEQ ID NO: 1783151
aucauugucaggaauacca

SEQ ID NO: 1783153 - RNA, 19 nt, Artificial Sequence
  Description of Artificial Sequence: Synthetic oligonucleotide
  Sense strand starting at position 3442 of SEQ ID NO: 1562929
auugucucccuaggagaaa

SEQ ID NO: 1783154 - RNA, 19 nt, Artificial Sequence
  Description of Artificial Sequence: Synthetic oligonucleotide
  Antisense strand to SEQ ID NO: 1783153
uuucuccuagggagacaau

SEQ ID NO: 1783155 - RNA, 19 nt, Artificial Sequence
  Description of Artificial Sequence: Synthetic oligonucleotide
  Sense strand starting at position 3650 of SEQ ID NO: 1562929
uucaguguguugcucguau

SEQ ID NO: 1783156 - RNA, 19 nt, Artificial Sequence
  Description of Artificial Sequence: Synthetic oligonucleotide
  Antisense strand to SEQ ID NO: 1783155
auacgagcaacacacugaa

SEQ ID NO: 1783157 - RNA, 19 nt, Artificial Sequence
  Description of Artificial Sequence: Synthetic oligonucleotide
  Sense strand starting at position 3652 of SEQ ID NO: 1562929
caguguguugcucguauga

SEQ ID NO: 1783158 - RNA, 19 nt, Artificial Sequence
  Description of Artificial Sequence: Synthetic oligonucleotide
  Antisense strand to SEQ ID NO: 1783157
ucauacgagcaacacacug

SEQ ID NO: 1783159 - RNA, 19 nt, Artificial Sequence
  Description of Artificial Sequence: Synthetic oligonucleotide
  Sense strand starting at position 3662 of SEQ ID NO: 1562929
cucguaugaaacugugaac

SEQ ID NO: 1783160 - RNA, 19 nt, Artificial Sequence
  Description of Artificial Sequence: Synthetic oligonucleotide
  Antisense strand to SEQ ID NO: 1783159
guucacaguuucauacgag

SEQ ID NO: 1783161 - RNA, 19 nt, Artificial Sequence
  Description of Artificial Sequence: Synthetic oligonucleotide
  Sense strand starting at position 3668 of SEQ ID NO: 1562929
ugaaacugugaacgggaua

SEQ ID NO: 1783162 - RNA, 19 nt, Artificial Sequence
  Description of Artificial Sequence: Synthetic oligonucleotide
  Antisense strand to SEQ ID NO: 1783161
uaucccguucacaguuuca

SEQ ID NO: 1783163 - RNA, 19 nt, Artificial Sequence
  Description of Artificial Sequence: Synthetic oligonucleotide
  Sense strand starting at position 3669 of SEQ ID NO: 1562929
gaaacugugaacgggauau

SEQ ID NO: 1783164 - RNA, 19 nt, Artificial Sequence
  Description of Artificial Sequence: Synthetic oligonucleotide
  Antisense strand to SEQ ID NO: 1783163
auaucccguucacaguuuc

SEQ ID NO: 1783165 - RNA, 19 nt, Artificial Sequence
  Description of Artificial Sequence: Synthetic oligonucleotide
  Sense strand starting at position 3876 of SEQ ID NO: 1562929
ggauacuuccacuggcuca

SEQ ID NO: 1783166 - RNA, 19 nt, Artificial Sequence
  Description of Artificial Sequence: Synthetic oligonucleotide
  Antisense strand to SEQ ID NO: 1783165
ugagccaguggaaguaucc

SEQ ID NO: 1783167 - RNA, 19 nt, Artificial Sequence
  Description of Artificial Sequence: Synthetic oligonucleotide
  Sense strand starting at position 3916 of SEQ ID NO: 1562929
agcugaaagaauggauguu

SEQ ID NO: 1783168 - RNA, 19 nt, Artificial Sequence
  Description of Artificial Sequence: Synthetic oligonucleotide
  Antisense strand to SEQ ID NO: 1783167
aacauccauucuuucagcu

SEQ ID NO: 1783169 - RNA, 19 nt, Artificial Sequence
  Description of Artificial Sequence: Synthetic oligonucleotide
  Sense strand starting at position 72 of SEQ ID NO: 1562930
auaugaugaucgccaguuu

SEQ ID NO: 1783170 - RNA, 19 nt, Artificial Sequence
  Description of Artificial Sequence: Synthetic oligonucleotide
  Antisense strand to SEQ ID NO: 1783169
aaacuggcgaucaucauau

SEQ ID NO: 1783171 - RNA, 19 nt, Artificial Sequence
  Description of Artificial Sequence: Synthetic oligonucleotide
  Sense strand starting at position 118 of SEQ ID NO: 1562930
agcaaagugacuuguccag

SEQ ID NO: 1783172 - RNA, 19 nt, Artificial Sequence
  Description of Artificial Sequence: Synthetic oligonucleotide
  Antisense strand to SEQ ID NO: 1783171
cuggacaagucacuuugcu

SEQ ID NO: 1783173 - RNA, 19 nt, Artificial Sequence
  Description of Artificial Sequence: Synthetic oligonucleotide
  Sense strand starting at position 228 of SEQ ID NO: 1562930
cucagaaucccagacuguu

SEQ ID NO: 1783174 - RNA, 19 nt, Artificial Sequence
  Description of Artificial Sequence: Synthetic oligonucleotide
  Antisense strand to SEQ ID NO: 1783173
aacagucugggauucugag

SEQ ID NO: 1783175 - RNA, 19 nt, Artificial Sequence
  Description of Artificial Sequence: Synthetic oligonucleotide
  Sense strand starting at position 238 of SEQ ID NO: 1562930
cagacuguuuggcaggaaa

SEQ ID NO: 1783176 - RNA, 19 nt, Artificial Sequence
  Description of Artificial Sequence: Synthetic oligonucleotide
  Antisense strand to SEQ ID NO: 1783175
uuuccugccaaacagucug

SEQ ID NO: 1783177 - RNA, 19 nt, Artificial Sequence
  Description of Artificial Sequence: Synthetic oligonucleotide
  Sense strand starting at position 241 of SEQ ID NO: 1562930
acuguuuggcaggaaaggu

SEQ ID NO: 1783178 - RNA, 19 nt, Artificial Sequence
  Description of Artificial Sequence: Synthetic oligonucleotide
  Antisense strand to SEQ ID NO: 1783177
accuuuccugccaaacagu

SEQ ID NO: 1783179 - RNA, 19 nt, Artificial Sequence
  Description of Artificial Sequence: Synthetic oligonucleotide
  Sense strand starting at position 443 of SEQ ID NO: 1562930
ggugcucacaccugaaugu

SEQ ID NO: 1783180 - RNA, 19 nt, Artificial Sequence
  Description of Artificial Sequence: Synthetic oligonucleotide
  Antisense strand to SEQ ID NO: 1783179
acauucaggugugagcacc

SEQ ID NO: 1783181 - RNA, 19 nt, Artificial Sequence
  Description of Artificial Sequence: Synthetic oligonucleotide
  Sense strand starting at position 454 of SEQ ID NO: 1562930
cugaaugugcauuagaaug

SEQ ID NO: 1783182 - RNA, 19 nt, Artificial Sequence
  Description of Artificial Sequence: Synthetic oligonucleotide
  Antisense strand to SEQ ID NO: 1783181
cauucuaaugcacauucag

SEQ ID NO: 1783183 - RNA, 19 nt, Artificial Sequence
  Description of Artificial Sequence: Synthetic oligonucleotide
  Sense strand starting at position 459 of SEQ ID NO: 1562930
ugugcauuagaaugacgau

SEQ ID NO: 1783184 - RNA, 19 nt, Artificial Sequence
  Description of Artificial Sequence: Synthetic oligonucleotide
  Antisense strand to SEQ ID NO: 1783183
aucgucauucuaaugcaca

SEQ ID NO: 1783185 - RNA, 19 nt, Artificial Sequence
  Description of Artificial Sequence: Synthetic oligonucleotide
  Sense strand starting at position 552 of SEQ ID NO: 1562930
caagcacugucaucaagga

SEQ ID NO: 1783186 - RNA, 19 nt, Artificial Sequence
  Description of Artificial Sequence: Synthetic oligonucleotide
  Antisense strand to SEQ ID NO: 1783185
uccuugaugacagugcuug

SEQ ID NO: 1783187 - RNA, 19 nt, Artificial Sequence
  Description of Artificial Sequence: Synthetic oligonucleotide
  Sense strand starting at position 556 of SEQ ID NO: 1562930
cacugucaucaaggaggau

SEQ ID NO: 1783188 - RNA, 19 nt, Artificial Sequence
  Description of Artificial Sequence: Synthetic oligonucleotide
  Antisense strand to SEQ ID NO: 1783187
auccuccuugaugacagug

SEQ ID NO: 1783189 - RNA, 19 nt, Artificial Sequence
  Description of Artificial Sequence: Synthetic oligonucleotide
  Sense strand starting at position 777 of SEQ ID NO: 1562930
ggccucuguccacagaugu

SEQ ID NO: 1783190 - RNA, 19 nt, Artificial Sequence
  Description of Artificial Sequence: Synthetic oligonucleotide
  Antisense strand to SEQ ID NO: 1783189
acaucuguggacagaggcc

SEQ ID NO: 1783191 - RNA, 19 nt, Artificial Sequence
  Description of Artificial Sequence: Synthetic oligonucleotide
  Sense strand starting at position 867 of SEQ ID NO: 1562930
ucuugugaccuuuggacau

SEQ ID NO: 1783192 - RNA, 19 nt, Artificial Sequence
  Description of Artificial Sequence: Synthetic oligonucleotide
  Antisense strand to SEQ ID NO: 1783191
auguccaaaggucacaaga

SEQ ID NO: 1783193 - RNA, 19 nt, Artificial Sequence
  Description of Artificial Sequence: Synthetic oligonucleotide
  Sense strand starting at position 974 of SEQ ID NO: 1562930
uccaucugauuaggucaga

SEQ ID NO: 1783194 - RNA, 19 nt, Artificial Sequence
  Description of Artificial Sequence: Synthetic oligonucleotide
  Antisense strand to SEQ ID NO: 1783193
ucugaccuaaucagaugga

SEQ ID NO: 1783195 - RNA, 19 nt, Artificial Sequence
  Description of Artificial Sequence: Synthetic oligonucleotide
  Sense strand starting at position 1272 of SEQ ID NO: 1562930
aucuuuguuugcccuauua

SEQ ID NO: 1783196 - RNA, 19 nt, Artificial Sequence
  Description of Artificial Sequence: Synthetic oligonucleotide
  Antisense strand to SEQ ID NO: 1783195
uaauagggcaaacaaagau

SEQ ID NO: 1783197 - RNA, 19 nt, Artificial Sequence
  Description of Artificial Sequence: Synthetic oligonucleotide
  Sense strand starting at position 1395 of SEQ ID NO: 1562930
cgcggacaaacucagagau

SEQ ID NO: 1783198 - RNA, 19 nt, Artificial Sequence
  Description of Artificial Sequence: Synthetic oligonucleotide
  Antisense strand to SEQ ID NO: 1783197
aucucugaguuuguccgcg

SEQ ID NO: 1783199 - RNA, 19 nt, Artificial Sequence
  Description of Artificial Sequence: Synthetic oligonucleotide
  Sense strand starting at position 2205 of SEQ ID NO: 1562930
gacaaaucagacggucaga

SEQ ID NO: 1783200 - RNA, 19 nt, Artificial Sequence
  Description of Artificial Sequence: Synthetic oligonucleotide
  Antisense strand to SEQ ID NO: 1783199
ucugaccgucugauuuguc

SEQ ID NO: 1783201 - RNA, 19 nt, Artificial Sequence
  Description of Artificial Sequence: Synthetic oligonucleotide
  Sense strand starting at position 2438 of SEQ ID NO: 1562930
ucaguaaaguuugagaaga

SEQ ID NO: 1783202 - RNA, 19 nt, Artificial Sequence
  Description of Artificial Sequence: Synthetic oligonucleotide
  Antisense strand to SEQ ID NO: 1783201
ucuucucaaacuuuacuga

SEQ ID NO: 1783203 - RNA, 19 nt, Artificial Sequence
  Description of Artificial Sequence: Synthetic oligonucleotide
  Sense strand starting at position 2440 of SEQ ID NO: 1562930
aguaaaguuugagaagaac

SEQ ID NO: 1783204 - RNA, 19 nt, Artificial Sequence
  Description of Artificial Sequence: Synthetic oligonucleotide
  Antisense strand to SEQ ID NO: 1783203
guucuucucaaacuuuacu

SEQ ID NO: 1783205 - RNA, 19 nt, Artificial Sequence
  Description of Artificial Sequence: Synthetic oligonucleotide
  Sense strand starting at position 2562 of SEQ ID NO: 1562930
gccucacccuguuuaagua

SEQ ID NO: 1783206 - RNA, 19 nt, Artificial Sequence
  Description of Artificial Sequence: Synthetic oligonucleotide
  Antisense strand to SEQ ID NO: 1783205
uacuuaaacagggugaggc

SEQ ID NO: 1783207 - RNA, 19 nt, Artificial Sequence
  Description of Artificial Sequence: Synthetic oligonucleotide
  Sense strand starting at position 2629 of SEQ ID NO: 1562930
uggugucugucccaggaau

SEQ ID NO: 1783208 - RNA, 19 nt, Artificial Sequence
  Description of Artificial Sequence: Synthetic oligonucleotide
  Antisense strand to SEQ ID NO: 1783207
auuccugggacagacacca

SEQ ID NO: 1783209 - RNA, 19 nt, Artificial Sequence
  Description of Artificial Sequence: Synthetic oligonucleotide
  Sense strand starting at position 2662 of SEQ ID NO: 1562930
acagucagugccugguaga

SEQ ID NO: 1783210 - RNA, 19 nt, Artificial Sequence
  Description of Artificial Sequence: Synthetic oligonucleotide
  Antisense strand to SEQ ID NO: 1783209
ucuaccaggcacugacugu

SEQ ID NO: 1783211 - RNA, 19 nt, Artificial Sequence
  Description of Artificial Sequence: Synthetic oligonucleotide
  Sense strand starting at position 2663 of SEQ ID NO: 1562930
cagucagugccugguagaa

SEQ ID NO: 1783212 - RNA, 19 nt, Artificial Sequence
  Description of Artificial Sequence: Synthetic oligonucleotide
  Antisense strand to SEQ ID NO: 1783211
uucuaccaggcacugacug

SEQ ID NO: 1783213 - RNA, 19 nt, Artificial Sequence
  Description of Artificial Sequence: Synthetic oligonucleotide
  Sense strand starting at position 2683 of SEQ ID NO: 1562930
ccgcaaguccuguaccaga

SEQ ID NO: 1783214 - RNA, 19 nt, Artificial Sequence
  Description of Artificial Sequence: Synthetic oligonucleotide
  Antisense strand to SEQ ID NO: 1783213
ucugguacaggacuugcgg

SEQ ID NO: 1783215 - RNA, 19 nt, Artificial Sequence
  Description of Artificial Sequence: Synthetic oligonucleotide
  Sense strand starting at position 2787 of SEQ ID NO: 1562930
gugcaaauauuugugucca

SEQ ID NO: 1783216 - RNA, 19 nt, Artificial Sequence
  Description of Artificial Sequence: Synthetic oligonucleotide
  Antisense strand to SEQ ID NO: 1783215
uggacacaaauauuugcac

SEQ ID NO: 1783217 - RNA, 19 nt, Artificial Sequence
  Description of Artificial Sequence: Synthetic oligonucleotide
  Sense strand starting at position 2788 of SEQ ID NO: 1562930
ugcaaauauuuguguccau

SEQ ID NO: 1783218 - RNA, 19 nt, Artificial Sequence
  Description of Artificial Sequence: Synthetic oligonucleotide
  Antisense strand to SEQ ID NO: 1783217
auggacacaaauauuugca

SEQ ID NO: 1783219 - RNA, 19 nt, Artificial Sequence
  Description of Artificial Sequence: Synthetic oligonucleotide
  Sense strand starting at position 2838 of SEQ ID NO: 1562930
caucauugugcuuguuuga

SEQ ID NO: 1783220 - RNA, 19 nt, Artificial Sequence
  Description of Artificial Sequence: Synthetic oligonucleotide
  Antisense strand to SEQ ID NO: 1783219
ucaaacaagcacaaugaug

SEQ ID NO: 1783221 - RNA, 19 nt, Artificial Sequence
  Description of Artificial Sequence: Synthetic oligonucleotide
  Sense strand starting at position 2876 of SEQ ID NO: 1562930
cagaaacaguguugacaug

SEQ ID NO: 1783222 - RNA, 19 nt, Artificial Sequence
  Description of Artificial Sequence: Synthetic oligonucleotide
  Antisense strand to SEQ ID NO: 1783221
caugucaacacuguuucug

SEQ ID NO: 1783223 - RNA, 19 nt, Artificial Sequence
  Description of Artificial Sequence: Synthetic oligonucleotide
  Sense strand starting at position 3067 of SEQ ID NO: 1562930
uaaagugucuggguggcau

SEQ ID NO: 1783224 - RNA, 19 nt, Artificial Sequence
  Description of Artificial Sequence: Synthetic oligonucleotide
  Antisense strand to SEQ ID NO: 1783223
augccacccagacacuuua

SEQ ID NO: 1783225 - RNA, 19 nt, Artificial Sequence
  Description of Artificial Sequence: Synthetic oligonucleotide
  Sense strand starting at position 3386 of SEQ ID NO: 1562930
ccugauuucgagugguucu

SEQ ID NO: 1783226 - RNA, 19 nt, Artificial Sequence
  Description of Artificial Sequence: Synthetic oligonucleotide
  Antisense strand to SEQ ID NO: 1783225
agaaccacucgaaaucagg

SEQ ID NO: 1783227 - RNA, 19 nt, Artificial Sequence
  Description of Artificial Sequence: Synthetic oligonucleotide
  Sense strand starting at position 3393 of SEQ ID NO: 1562930
ucgagugguucuccugcuu

SEQ ID NO: 1783228 - RNA, 19 nt, Artificial Sequence
  Description of Artificial Sequence: Synthetic oligonucleotide
  Antisense strand to SEQ ID NO: 1783227
aagcaggagaaccacucga

SEQ ID NO: 1783229 - RNA, 19 nt, Artificial Sequence
  Description of Artificial Sequence: Synthetic oligonucleotide
  Sense strand starting at position 3729 of SEQ ID NO: 1562930
cauagaugccaucaaggua

SEQ ID NO: 1783230 - RNA, 19 nt, Artificial Sequence
  Description of Artificial Sequence: Synthetic oligonucleotide
  Antisense strand to SEQ ID NO: 1783229
uaccuugauggcaucuaug

SEQ ID NO: 1783231 - RNA, 19 nt, Artificial Sequence
  Description of Artificial Sequence: Synthetic oligonucleotide
  Sense strand starting at position 3824 of SEQ ID NO: 1562930
gcacuuaucuguucuccau

SEQ ID NO: 1783232 - RNA, 19 nt, Artificial Sequence
  Description of Artificial Sequence: Synthetic oligonucleotide
  Antisense strand to SEQ ID NO: 1783231
auggagaacagauaagugc

SEQ ID NO: 1783233 - RNA, 19 nt, Artificial Sequence
  Description of Artificial Sequence: Synthetic oligonucleotide
  Sense strand starting at position 3880 of SEQ ID NO: 1562930
gcagucauacaguauguua

SEQ ID NO: 1783234 - RNA, 19 nt, Artificial Sequence
  Description of Artificial Sequence: Synthetic oligonucleotide
  Antisense strand to SEQ ID NO: 1783233
uaacauacuguaugacugc

SEQ ID NO: 1783235 - RNA, 19 nt, Artificial Sequence
  Description of Artificial Sequence: Synthetic oligonucleotide
  Sense strand starting at position 3934 of SEQ ID NO: 1562930
ccugaagauucuuccaggu

SEQ ID NO: 1783236 - RNA, 19 nt, Artificial Sequence
  Description of Artificial Sequence: Synthetic oligonucleotide
  Antisense strand to SEQ ID NO: 1783235
accuggaagaaucuucagg

SEQ ID NO: 1783237 - RNA, 19 nt, Artificial Sequence
  Description of Artificial Sequence: Synthetic oligonucleotide
  Sense strand starting at position 3938 of SEQ ID NO: 1562930
aagauucuuccagguugcu

SEQ ID NO: 1783238 - RNA, 19 nt, Artificial Sequence
  Description of Artificial Sequence: Synthetic oligonucleotide
  Antisense strand to SEQ ID NO: 1783237
agcaaccuggaagaaucuu

SEQ ID NO: 1783239 - RNA, 19 nt, Artificial Sequence
  Description of Artificial Sequence: Synthetic oligonucleotide
  Sense strand starting at position 3950 of SEQ ID NO: 1562930
gguugcuuuguguuucagu

SEQ ID NO: 1783240 - RNA, 19 nt, Artificial Sequence
  Description of Artificial Sequence: Synthetic oligonucleotide
  Antisense strand to SEQ ID NO: 1783239
acugaaacacaaagcaacc

SEQ ID NO: 1783241 - RNA, 19 nt, Artificial Sequence
  Description of Artificial Sequence: Synthetic oligonucleotide
  Sense strand starting at position 3951 of SEQ ID NO: 1562930
guugcuuuguguuucagua

SEQ ID NO: 1783242 - RNA, 19 nt, Artificial Sequence
  Description of Artificial Sequence: Synthetic oligonucleotide
  Antisense strand to SEQ ID NO: 1783241
uacugaaacacaaagcaac

SEQ ID NO: 1783243 - RNA, 19 nt, Artificial Sequence
  Description of Artificial Sequence: Synthetic oligonucleotide
  Sense strand starting at position 3966 of SEQ ID NO: 1562930
aguaguuuguuccuugcua

SEQ ID NO: 1783244 - RNA, 19 nt, Artificial Sequence
  Description of Artificial Sequence: Synthetic oligonucleotide
  Antisense strand to SEQ ID NO: 1783243
uagcaaggaacaaacuacu

SEQ ID NO: 1783245 - RNA, 19 nt, Artificial Sequence
  Description of Artificial Sequence: Synthetic oligonucleotide
  Sense strand starting at position 3967 of SEQ ID NO: 1562930
guaguuuguuccuugcuau

SEQ ID NO: 1783246 - RNA, 19 nt, Artificial Sequence
  Description of Artificial Sequence: Synthetic oligonucleotide
  Antisense strand to SEQ ID NO: 1783245
auagcaaggaacaaacuac

SEQ ID NO: 1783247 - RNA, 19 nt, Artificial Sequence
  Description of Artificial Sequence: Synthetic oligonucleotide
  Sense strand starting at position 3970 of SEQ ID NO: 1562930
guuuguuccuugcuauugu

SEQ ID NO: 1783248 - RNA, 19 nt, Artificial Sequence
  Description of Artificial Sequence: Synthetic oligonucleotide
  Antisense strand to SEQ ID NO: 1783247
acaauagcaaggaacaaac

SEQ ID NO: 1783249 - RNA, 19 nt, Artificial Sequence
  Description of Artificial Sequence: Synthetic oligonucleotide
  Sense strand starting at position 30 of SEQ ID NO: 1562931
cagagaagcucuguaugac

SEQ ID NO: 1783250 - RNA, 19 nt, Artificial Sequence
  Description of Artificial Sequence: Synthetic oligonucleotide
  Antisense strand to SEQ ID NO: 1783249
gucauacagagcuucucug

SEQ ID NO: 1783251 - RNA, 19 nt, Artificial Sequence
  Description of Artificial Sequence: Synthetic oligonucleotide
  Sense strand starting at position 383 of SEQ ID NO: 1562931
agaagaauugcuggaggca

SEQ ID NO: 1783252 - RNA, 19 nt, Artificial Sequence
  Description of Artificial Sequence: Synthetic oligonucleotide
  Antisense strand to SEQ ID NO: 1783251
ugccuccagcaauucuucu

SEQ ID NO: 1783253 - RNA, 19 nt, Artificial Sequence
  Description of Artificial Sequence: Synthetic oligonucleotide
  Sense strand starting at position 822 of SEQ ID NO: 1562931
gcaccagcucccgguuauu

SEQ ID NO: 1783254 - RNA, 19 nt, Artificial Sequence
  Description of Artificial Sequence: Synthetic oligonucleotide
  Antisense strand to SEQ ID NO: 1783253
aauaaccgggagcuggugc

SEQ ID NO: 1783255 - RNA, 19 nt, Artificial Sequence
  Description of Artificial Sequence: Synthetic oligonucleotide
  Sense strand starting at position 832 of SEQ ID NO: 1562931
ccgguuauuuccuggauga

SEQ ID NO: 1783256 - RNA, 19 nt, Artificial Sequence
  Description of Artificial Sequence: Synthetic oligonucleotide
  Antisense strand to SEQ ID NO: 1783255
ucauccaggaaauaaccgg

SEQ ID NO: 1783257 - RNA, 19 nt, Artificial Sequence
  Description of Artificial Sequence: Synthetic oligonucleotide
  Sense strand starting at position 917 of SEQ ID NO: 1562931
caagcuuugguggauguga

SEQ ID NO: 1783258 - RNA, 19 nt, Artificial Sequence
  Description of Artificial Sequence: Synthetic oligonucleotide
  Antisense strand to SEQ ID NO: 1783257
ucacauccaccaaagcuug

SEQ ID NO: 1783259 - RNA, 19 nt, Artificial Sequence
  Description of Artificial Sequence: Synthetic oligonucleotide
  Sense strand starting at position 967 of SEQ ID NO: 1562931
auccuugcuugcucagaga

SEQ ID NO: 1783260 - RNA, 19 nt, Artificial Sequence
  Description of Artificial Sequence: Synthetic oligonucleotide
  Antisense strand to SEQ ID NO: 1783259
ucucugagcaagcaaggau

SEQ ID NO: 1783261 - RNA, 19 nt, Artificial Sequence
  Description of Artificial Sequence: Synthetic oligonucleotide
  Sense strand starting at position 989 of SEQ ID NO: 1562931
agccaaguuuauccugaau

SEQ ID NO: 1783262 - RNA, 19 nt, Artificial Sequence
  Description of Artificial Sequence: Synthetic oligonucleotide
  Antisense strand to SEQ ID NO: 1783261
auucaggauaaacuuggcu

SEQ ID NO: 1783263 - RNA, 19 nt, Artificial Sequence
  Description of Artificial Sequence: Synthetic oligonucleotide
  Sense strand starting at position 1302 of SEQ ID NO: 1562931
uguuauugcugcuacucua

SEQ ID NO: 1783264 - RNA, 19 nt, Artificial Sequence
  Description of Artificial Sequence: Synthetic oligonucleotide
  Antisense strand to SEQ ID NO: 1783263
uagaguagcagcaauaaca

SEQ ID NO: 1783265 - RNA, 19 nt, Artificial Sequence
  Description of Artificial Sequence: Synthetic oligonucleotide
  Sense strand starting at position 2278 of SEQ ID NO: 1562931
ggaagcauuccuggauccu

SEQ ID NO: 1783266 - RNA, 19 nt, Artificial Sequence
  Description of Artificial Sequence: Synthetic oligonucleotide
  Antisense strand to SEQ ID NO: 1783265
aggauccaggaaugcuucc

SEQ ID NO: 1783267 - RNA, 19 nt, Artificial Sequence
  Description of Artificial Sequence: Synthetic oligonucleotide
  Sense strand starting at position 2295 of SEQ ID NO: 1562931
cuccauuucugcuguguga

SEQ ID NO: 1783268 - RNA, 19 nt, Artificial Sequence
  Description of Artificial Sequence: Synthetic oligonucleotide
  Antisense strand to SEQ ID NO: 1783267
ucacacagcagaaauggag

SEQ ID NO: 1783269 - RNA, 19 nt, Artificial Sequence
  Description of Artificial Sequence: Synthetic oligonucleotide
  Sense strand starting at position 2612 of SEQ ID NO: 1562931
ugcccagguuuggcuuaaa

SEQ ID NO: 1783270 - RNA, 19 nt, Artificial Sequence
  Description of Artificial Sequence: Synthetic oligonucleotide
  Antisense strand to SEQ ID NO: 1783269
uuuaagccaaaccugggca

SEQ ID NO: 1783271 - RNA, 19 nt, Artificial Sequence
  Description of Artificial Sequence: Synthetic oligonucleotide
  Sense strand starting at position 2770 of SEQ ID NO: 1562931
cugagccaguuucuacaau

SEQ ID NO: 1783272 - RNA, 19 nt, Artificial Sequence
  Description of Artificial Sequence: Synthetic oligonucleotide
  Antisense strand to SEQ ID NO: 1783271
auuguagaaacuggcucag

SEQ ID NO: 1783273 - RNA, 19 nt, Artificial Sequence
  Description of Artificial Sequence: Synthetic oligonucleotide
  Sense strand starting at position 2819 of SEQ ID NO: 1562931
aaaugagauugugccaauc

SEQ ID NO: 1783274 - RNA, 19 nt, Artificial Sequence
  Description of Artificial Sequence: Synthetic oligonucleotide
  Antisense strand to SEQ ID NO: 1783273
gauuggcacaaucucauuu

SEQ ID NO: 1783275 - RNA, 19 nt, Artificial Sequence
  Description of Artificial Sequence: Synthetic oligonucleotide
  Sense strand starting at position 2821 of SEQ ID NO: 1562931
augagauugugccaaucaa

SEQ ID NO: 1783276 - RNA, 19 nt, Artificial Sequence
  Description of Artificial Sequence: Synthetic oligonucleotide
  Antisense strand to SEQ ID NO: 1783275
uugauuggcacaaucucau

SEQ ID NO: 1783277 - RNA, 19 nt, Artificial Sequence
  Description of Artificial Sequence: Synthetic oligonucleotide
  Sense strand starting at position 2952 of SEQ ID NO: 1562931
cagagaaucuggcuccugu

SEQ ID NO: 1783278 - RNA, 19 nt, Artificial Sequence
  Description of Artificial Sequence: Synthetic oligonucleotide
  Antisense strand to SEQ ID NO: 1783277
acaggagccagauucucug

SEQ ID NO: 1783279 - RNA, 19 nt, Artificial Sequence
  Description of Artificial Sequence: Synthetic oligonucleotide
  Sense strand starting at position 2962 of SEQ ID NO: 1562931
ggcuccugucugcaaggau

SEQ ID NO: 1783280 - RNA, 19 nt, Artificial Sequence
  Description of Artificial Sequence: Synthetic oligonucleotide
  Antisense strand to SEQ ID NO: 1783279
auccuugcagacaggagcc

SEQ ID NO: 1783281 - RNA, 19 nt, Artificial Sequence
  Description of Artificial Sequence: Synthetic oligonucleotide
  Sense strand starting at position 2993 of SEQ ID NO: 1562931
uaggauaugugaccuaagu

SEQ ID NO: 1783282 - RNA, 19 nt, Artificial Sequence
  Description of Artificial Sequence: Synthetic oligonucleotide
  Antisense strand to SEQ ID NO: 1783281
acuuaggucacauauccua

SEQ ID NO: 1783283 - RNA, 19 nt, Artificial Sequence
  Description of Artificial Sequence: Synthetic oligonucleotide
  Sense strand starting at position 3118 of SEQ ID NO: 1562931
cucguuuacuccucccaga

SEQ ID NO: 1783284 - RNA, 19 nt, Artificial Sequence
  Description of Artificial Sequence: Synthetic oligonucleotide
  Antisense strand to SEQ ID NO: 1783283
ucugggaggaguaaacgag

SEQ ID NO: 1783285 - RNA, 19 nt, Artificial Sequence
  Description of Artificial Sequence: Synthetic oligonucleotide
  Sense strand starting at position 3155 of SEQ ID NO: 1562931
gcuucuugcucccauuuga

SEQ ID NO: 1783286 - RNA, 19 nt, Artificial Sequence
  Description of Artificial Sequence: Synthetic oligonucleotide
  Antisense strand to SEQ ID NO: 1783285
ucaaaugggagcaagaagc

SEQ ID NO: 1783287 - RNA, 19 nt, Artificial Sequence
  Description of Artificial Sequence: Synthetic oligonucleotide
  Sense strand starting at position 3374 of SEQ ID NO: 1562931
ggaagaugcucacgauauu

SEQ ID NO: 1783288 - RNA, 19 nt, Artificial Sequence
  Description of Artificial Sequence: Synthetic oligonucleotide
  Antisense strand to SEQ ID NO: 1783287
aauaucgugagcaucuucc

SEQ ID NO: 1783289 - RNA, 19 nt, Artificial Sequence
  Description of Artificial Sequence: Synthetic oligonucleotide
  Sense strand starting at position 3375 of SEQ ID NO: 1562931
gaagaugcucacgauauua

SEQ ID NO: 1783290 - RNA, 19 nt, Artificial Sequence
  Description of Artificial Sequence: Synthetic oligonucleotide
  Antisense strand to SEQ ID NO: 1783289
uaauaucgugagcaucuuc

SEQ ID NO: 1783291 - RNA, 19 nt, Artificial Sequence
  Description of Artificial Sequence: Synthetic oligonucleotide
  Sense strand starting at position 3377 of SEQ ID NO: 1562931
agaugcucacgauauuaca

SEQ ID NO: 1783292 - RNA, 19 nt, Artificial Sequence
  Description of Artificial Sequence: Synthetic oligonucleotide
  Antisense strand to SEQ ID NO: 1783291
uguaauaucgugagcaucu

SEQ ID NO: 1783293 - RNA, 19 nt, Artificial Sequence
  Description of Artificial Sequence: Synthetic oligonucleotide
  Sense strand starting at position 3385 of SEQ ID NO: 1562931
acgauauuacaccgaguga

SEQ ID NO: 1783294 - RNA, 19 nt, Artificial Sequence
  Description of Artificial Sequence: Synthetic oligonucleotide
  Antisense strand to SEQ ID NO: 1783293
ucacucgguguaauaucgu

SEQ ID NO: 1783295 - RNA, 19 nt, Artificial Sequence
  Description of Artificial Sequence: Synthetic oligonucleotide
  Sense strand starting at position 3386 of SEQ ID NO: 1562931
cgauauuacaccgagugaa

SEQ ID NO: 1783296 - RNA, 19 nt, Artificial Sequence
  Description of Artificial Sequence: Synthetic oligonucleotide
  Antisense strand to SEQ ID NO: 1783295
uucacucgguguaauaucg

SEQ ID NO: 1783297 - RNA, 19 nt, Artificial Sequence
  Description of Artificial Sequence: Synthetic oligonucleotide
  Sense strand starting at position 121 of SEQ ID NO: 1562932
cacuguuaucugcccguuu

SEQ ID NO: 1783298 - RNA, 19 nt, Artificial Sequence
  Description of Artificial Sequence: Synthetic oligonucleotide
  Antisense strand to SEQ ID NO: 1783297
aaacgggcagauaacagug

SEQ ID NO: 1783299 - RNA, 19 nt, Artificial Sequence
  Description of Artificial Sequence: Synthetic oligonucleotide
  Sense strand starting at position 158 of SEQ ID NO: 1562932
ggaccugacuugcucaaga

SEQ ID NO: 1783300 - RNA, 19 nt, Artificial Sequence
  Description of Artificial Sequence: Synthetic oligonucleotide
  Antisense strand to SEQ ID NO: 1783299
ucuugagcaagucaggucc

SEQ ID NO: 1783301 - RNA, 19 nt, Artificial Sequence
  Description of Artificial Sequence: Synthetic oligonucleotide
  Sense strand starting at position 235 of SEQ ID NO: 1562932
ucuaaaucacggcagagau

SEQ ID NO: 1783302 - RNA, 19 nt, Artificial Sequence
  Description of Artificial Sequence: Synthetic oligonucleotide
  Antisense strand to SEQ ID NO: 1783301
aucucugccgugauuuaga

SEQ ID NO: 1783303 - RNA, 19 nt, Artificial Sequence
  Description of Artificial Sequence: Synthetic oligonucleotide
  Sense strand starting at position 288 of SEQ ID NO: 1562932
ggaggagaacacugcucuu

SEQ ID NO: 1783304 - RNA, 19 nt, Artificial Sequence
  Description of Artificial Sequence: Synthetic oligonucleotide
  Antisense strand to SEQ ID NO: 1783303
aagagcaguguucuccucc

SEQ ID NO: 1783305 - RNA, 19 nt, Artificial Sequence
  Description of Artificial Sequence: Synthetic oligonucleotide
  Sense strand starting at position 493 of SEQ ID NO: 1562932
ucguugggucagggagauu

SEQ ID NO: 1783306 - RNA, 19 nt, Artificial Sequence
  Description of Artificial Sequence: Synthetic oligonucleotide
  Antisense strand to SEQ ID NO: 1783305
aaucucccugacccaacga

SEQ ID NO: 1783307 - RNA, 19 nt, Artificial Sequence
  Description of Artificial Sequence: Synthetic oligonucleotide
  Sense strand starting at position 778 of SEQ ID NO: 1562932
uggagcaucuggcaagauu

SEQ ID NO: 1783308 - RNA, 19 nt, Artificial Sequence
  Description of Artificial Sequence: Synthetic oligonucleotide
  Antisense strand to SEQ ID NO: 1783307
aaucuugccagaugcucca

SEQ ID NO: 1783309 - RNA, 19 nt, Artificial Sequence
  Description of Artificial Sequence: Synthetic oligonucleotide
  Sense strand starting at position 985 of SEQ ID NO: 1562932
cggacuugcuccucaaaca

SEQ ID NO: 1783310 - RNA, 19 nt, Artificial Sequence
  Description of Artificial Sequence: Synthetic oligonucleotide
  Antisense strand to SEQ ID NO: 1783309
uguuugaggagcaaguccg

SEQ ID NO: 1783311 - RNA, 19 nt, Artificial Sequence
  Description of Artificial Sequence: Synthetic oligonucleotide
  Sense strand starting at position 986 of SEQ ID NO: 1562932
ggacuugcuccucaaacaa

SEQ ID NO: 1783312 - RNA, 19 nt, Artificial Sequence
  Description of Artificial Sequence: Synthetic oligonucleotide
  Antisense strand to SEQ ID NO: 1783311
uuguuugaggagcaagucc

SEQ ID NO: 1783313 - RNA, 19 nt, Artificial Sequence
  Description of Artificial Sequence: Synthetic oligonucleotide
  Sense strand starting at position 1031 of SEQ ID NO: 1562932
ccugcuugucugggaauga

SEQ ID NO: 1783314 - RNA, 19 nt, Artificial Sequence
  Description of Artificial Sequence: Synthetic oligonucleotide
  Antisense strand to SEQ ID NO: 1783313
ucauucccagacaagcagg

SEQ ID NO: 1783315 - RNA, 19 nt, Artificial Sequence
  Description of Artificial Sequence: Synthetic oligonucleotide
  Sense strand starting at position 1032 of SEQ ID NO: 1562932
cugcuugucugggaaugac

SEQ ID NO: 1783316 - RNA, 19 nt, Artificial Sequence
  Description of Artificial Sequence: Synthetic oligonucleotide
  Antisense strand to SEQ ID NO: 1783315
gucauucccagacaagcag

SEQ ID NO: 1783317 - RNA, 19 nt, Artificial Sequence
  Description of Artificial Sequence: Synthetic oligonucleotide
  Sense strand starting at position 1069 of SEQ ID NO: 1562932
uaaagaaugccucgcagcu

SEQ ID NO: 1783318 - RNA, 19 nt, Artificial Sequence
  Description of Artificial Sequence: Synthetic oligonucleotide
  Antisense strand to SEQ ID NO: 1783317
agcugcgaggcauucuuua

SEQ ID NO: 1783319 - RNA, 19 nt, Artificial Sequence
  Description of Artificial Sequence: Synthetic oligonucleotide
  Sense strand starting at position 1448 of SEQ ID NO: 1562932
gggcaaguucuuugcaaac

SEQ ID NO: 1783320 - RNA, 19 nt, Artificial Sequence
  Description of Artificial Sequence: Synthetic oligonucleotide
  Antisense strand to SEQ ID NO: 1783319
guuugcaaagaacuugccc

SEQ ID NO: 1783321 - RNA, 19 nt, Artificial Sequence
  Description of Artificial Sequence: Synthetic oligonucleotide
  Sense strand starting at position 1450 of SEQ ID NO: 1562932
gcaaguucuuugcaaacug

SEQ ID NO: 1783322 - RNA, 19 nt, Artificial Sequence
  Description of Artificial Sequence: Synthetic oligonucleotide
  Antisense strand to SEQ ID NO: 1783321
caguuugcaaagaacuugc

SEQ ID NO: 1783323 - RNA, 19 nt, Artificial Sequence
  Description of Artificial Sequence: Synthetic oligonucleotide
  Sense strand starting at position 2407 of SEQ ID NO: 1562932
cccaguucucaugaggacu

SEQ ID NO: 1783324 - RNA, 19 nt, Artificial Sequence
  Description of Artificial Sequence: Synthetic oligonucleotide
  Antisense strand to SEQ ID NO: 1783323
aguccucaugagaacuggg

SEQ ID NO: 1783325 - RNA, 19 nt, Artificial Sequence
  Description of Artificial Sequence: Synthetic oligonucleotide
  Sense strand starting at position 2409 of SEQ ID NO: 1562932
caguucucaugaggacuuu

SEQ ID NO: 1783326 - RNA, 19 nt, Artificial Sequence
  Description of Artificial Sequence: Synthetic oligonucleotide
  Antisense strand to SEQ ID NO: 1783325
aaaguccucaugagaacug

SEQ ID NO: 1783327 - RNA, 19 nt, Artificial Sequence
  Description of Artificial Sequence: Synthetic oligonucleotide
  Sense strand starting at position 2595 of SEQ ID NO: 1562932
ccaggucucuuggauggua

SEQ ID NO: 1783328 - RNA, 19 nt, Artificial Sequence
  Description of Artificial Sequence: Synthetic oligonucleotide
  Antisense strand to SEQ ID NO: 1783327
uaccauccaagagaccugg

SEQ ID NO: 1783329 - RNA, 19 nt, Artificial Sequence
  Description of Artificial Sequence: Synthetic oligonucleotide
  Sense strand starting at position 2597 of SEQ ID NO: 1562932
aggucucuuggaugguaaa

SEQ ID NO: 1783330 - RNA, 19 nt, Artificial Sequence
  Description of Artificial Sequence: Synthetic oligonucleotide
  Antisense strand to SEQ ID NO: 1783329
uuuaccauccaagagaccu

SEQ ID NO: 1783331 - RNA, 19 nt, Artificial Sequence
  Description of Artificial Sequence: Synthetic oligonucleotide
  Sense strand starting at position 2651 of SEQ ID NO: 1562932
gagugaucccagugaaggc

SEQ ID NO: 1783332 - RNA, 19 nt, Artificial Sequence
  Description of Artificial Sequence: Synthetic oligonucleotide
  Antisense strand to SEQ ID NO: 1783331
gccuucacugggaucacuc

SEQ ID NO: 1783333 - RNA, 19 nt, Artificial Sequence
  Description of Artificial Sequence: Synthetic oligonucleotide
  Sense strand starting at position 2740 of SEQ ID NO: 1562932
ugaacuacuuccgugaggu

SEQ ID NO: 1783334 - RNA, 19 nt, Artificial Sequence
  Description of Artificial Sequence: Synthetic oligonucleotide
  Antisense strand to SEQ ID NO: 1783333
accucacggaaguaguuca

SEQ ID NO: 1783335 - RNA, 19 nt, Artificial Sequence
  Description of Artificial Sequence: Synthetic oligonucleotide
  Sense strand starting at position 2741 of SEQ ID NO: 1562932
gaacuacuuccgugaggua

SEQ ID NO: 1783336 - RNA, 19 nt, Artificial Sequence
  Description of Artificial Sequence: Synthetic oligonucleotide
  Antisense strand to SEQ ID NO: 1783335
uaccucacggaaguaguuc

SEQ ID NO: 1783337 - RNA, 19 nt, Artificial Sequence
  Description of Artificial Sequence: Synthetic oligonucleotide
  Sense strand starting at position 2746 of SEQ ID NO: 1562932
acuuccgugagguagagau

SEQ ID NO: 1783338 - RNA, 19 nt, Artificial Sequence
  Description of Artificial Sequence: Synthetic oligonucleotide
  Antisense strand to SEQ ID NO: 1783337
aucucuaccucacggaagu

SEQ ID NO: 1783339 - RNA, 19 nt, Artificial Sequence
  Description of Artificial Sequence: Synthetic oligonucleotide
  Sense strand starting at position 2748 of SEQ ID NO: 1562932
uuccgugagguagagauua

SEQ ID NO: 1783340 - RNA, 19 nt, Artificial Sequence
  Description of Artificial Sequence: Synthetic oligonucleotide
  Antisense strand to SEQ ID NO: 1783339
uaaucucuaccucacggaa

SEQ ID NO: 1783341 - RNA, 19 nt, Artificial Sequence
  Description of Artificial Sequence: Synthetic oligonucleotide
  Sense strand starting at position 2750 of SEQ ID NO: 1562932
ccgugagguagagauuauu

SEQ ID NO: 1783342 - RNA, 19 nt, Artificial Sequence
  Description of Artificial Sequence: Synthetic oligonucleotide
  Antisense strand to SEQ ID NO: 1783341
aauaaucucuaccucacgg

SEQ ID NO: 1783343 - RNA, 19 nt, Artificial Sequence
  Description of Artificial Sequence: Synthetic oligonucleotide
  Sense strand starting at position 2756 of SEQ ID NO: 1562932
gguagagauuauucuucuc

SEQ ID NO: 1783344 - RNA, 19 nt, Artificial Sequence
  Description of Artificial Sequence: Synthetic oligonucleotide
  Antisense strand to SEQ ID NO: 1783343
gagaagaauaaucucuacc

SEQ ID NO: 1783345 - RNA, 19 nt, Artificial Sequence
  Description of Artificial Sequence: Synthetic oligonucleotide
  Sense strand starting at position 2799 of SEQ ID NO: 1562932
aggcucacagagugaaaua

SEQ ID NO: 1783346 - RNA, 19 nt, Artificial Sequence
  Description of Artificial Sequence: Synthetic oligonucleotide
  Antisense strand to SEQ ID NO: 1783345
uauuucacucugugagccu

SEQ ID NO: 1783347 - RNA, 19 nt, Artificial Sequence
  Description of Artificial Sequence: Synthetic oligonucleotide
  Sense strand starting at position 2834 of SEQ ID NO: 1562932
gccaacauugugcaaucaa

SEQ ID NO: 1783348 - RNA, 19 nt, Artificial Sequence
  Description of Artificial Sequence: Synthetic oligonucleotide
  Antisense strand to SEQ ID NO: 1783347
uugauugcacaauguuggc

SEQ ID NO: 1783349 - RNA, 19 nt, Artificial Sequence
  Description of Artificial Sequence: Synthetic oligonucleotide
  Sense strand starting at position 2926 of SEQ ID NO: 1562932
cugggauucccacaaggcu

SEQ ID NO: 1783350 - RNA, 19 nt, Artificial Sequence
  Description of Artificial Sequence: Synthetic oligonucleotide
  Antisense strand to SEQ ID NO: 1783349
agccuugugggaaucccag

SEQ ID NO: 1783351 - RNA, 19 nt, Artificial Sequence
  Description of Artificial Sequence: Synthetic oligonucleotide
  Sense strand starting at position 3348 of SEQ ID NO: 1562932
caugaagagucuuuguuua

SEQ ID NO: 1783352 - RNA, 19 nt, Artificial Sequence
  Description of Artificial Sequence: Synthetic oligonucleotide
  Antisense strand to SEQ ID NO: 1783351
uaaacaaagacucuucaug

SEQ ID NO: 1783353 - RNA, 19 nt, Artificial Sequence
  Description of Artificial Sequence: Synthetic oligonucleotide
  Sense strand starting at position 3350 of SEQ ID NO: 1562932
ugaagagucuuuguuuagu

SEQ ID NO: 1783354 - RNA, 19 nt, Artificial Sequence
  Description of Artificial Sequence: Synthetic oligonucleotide
  Antisense strand to SEQ ID NO: 1783353
acuaaacaaagacucuuca

SEQ ID NO: 1783355 - RNA, 19 nt, Artificial Sequence
  Description of Artificial Sequence: Synthetic oligonucleotide
  Sense strand starting at position 3355 of SEQ ID NO: 1562932
agucuuuguuuagugcaaa

SEQ ID NO: 1783356 - RNA, 19 nt, Artificial Sequence
  Description of Artificial Sequence: Synthetic oligonucleotide
  Antisense strand to SEQ ID NO: 1783355
uuugcacuaaacaaagacu

SEQ ID NO: 1783357 - RNA, 19 nt, Artificial Sequence
  Description of Artificial Sequence: Synthetic oligonucleotide
  Sense strand starting at position 3358 of SEQ ID NO: 1562932
cuuuguuuagugcaaauca

SEQ ID NO: 1783358 - RNA, 19 nt, Artificial Sequence
  Description of Artificial Sequence: Synthetic oligonucleotide
  Antisense strand to SEQ ID NO: 1783357
ugauuugcacuaaacaaag

SEQ ID NO: 1783359 - RNA, 19 nt, Artificial Sequence
  Description of Artificial Sequence: Synthetic oligonucleotide
  Sense strand starting at position 3375 of SEQ ID NO: 1562932
caaccagugucuccugagu

SEQ ID NO: 1783360 - RNA, 19 nt, Artificial Sequence
  Description of Artificial Sequence: Synthetic oligonucleotide
  Antisense strand to SEQ ID NO: 1783359
acucaggagacacugguug

SEQ ID NO: 1783361 - RNA, 19 nt, Artificial Sequence
  Description of Artificial Sequence: Synthetic oligonucleotide
  Sense strand starting at position 3395 of SEQ ID NO: 1562932
ccuccuguguuccagacau

SEQ ID NO: 1783362 - RNA, 19 nt, Artificial Sequence
  Description of Artificial Sequence: Synthetic oligonucleotide
  Antisense strand to SEQ ID NO: 1783361
augucuggaacacaggagg

SEQ ID NO: 1783363 - RNA, 19 nt, Artificial Sequence
  Description of Artificial Sequence: Synthetic oligonucleotide
  Sense strand starting at position 3397 of SEQ ID NO: 1562932
uccuguguuccagacauaa

SEQ ID NO: 1783364 - RNA, 19 nt, Artificial Sequence
  Description of Artificial Sequence: Synthetic oligonucleotide
  Antisense strand to SEQ ID NO: 1783363
uuaugucuggaacacagga

SEQ ID NO: 1783365 - RNA, 19 nt, Artificial Sequence
  Description of Artificial Sequence: Synthetic oligonucleotide
  Sense strand starting at position 3417 of SEQ ID NO: 1562932
uaccaucgucuuugggaga

SEQ ID NO: 1783366 - RNA, 19 nt, Artificial Sequence
  Description of Artificial Sequence: Synthetic oligonucleotide
  Antisense strand to SEQ ID NO: 1783365
ucucccaaagacgauggua

SEQ ID NO: 1783367 - RNA, 19 nt, Artificial Sequence
  Description of Artificial Sequence: Synthetic oligonucleotide
  Sense strand starting at position 3472 of SEQ ID NO: 1562932
gcgggauggaacgguucau

SEQ ID NO: 1783368 - RNA, 19 nt, Artificial Sequence
  Description of Artificial Sequence: Synthetic oligonucleotide
  Antisense strand to SEQ ID NO: 1783367
augaaccguuccaucccgc

SEQ ID NO: 1783369 - RNA, 19 nt, Artificial Sequence
  Description of Artificial Sequence: Synthetic oligonucleotide
  Sense strand starting at position 3518 of SEQ ID NO: 1562932
agcaacaggugcuuuauaa

SEQ ID NO: 1783370 - RNA, 19 nt, Artificial Sequence
  Description of Artificial Sequence: Synthetic oligonucleotide
  Antisense strand to SEQ ID NO: 1783369
uuauaaagcaccuguugcu

SEQ ID NO: 1783371 - RNA, 19 nt, Artificial Sequence
  Description of Artificial Sequence: Synthetic oligonucleotide
  Sense strand starting at position 3522 of SEQ ID NO: 1562932
acaggugcuuuauaaacua

SEQ ID NO: 1783372 - RNA, 19 nt, Artificial Sequence
  Description of Artificial Sequence: Synthetic oligonucleotide
  Antisense strand to SEQ ID NO: 1783371
uaguuuauaaagcaccugu

SEQ ID NO: 1783373 - RNA, 19 nt, Artificial Sequence
  Description of Artificial Sequence: Synthetic oligonucleotide
  Sense strand starting at position 3829 of SEQ ID NO: 1562932
gccucaaucuagugaguag

SEQ ID NO: 1783374 - RNA, 19 nt, Artificial Sequence
  Description of Artificial Sequence: Synthetic oligonucleotide
  Antisense strand to SEQ ID NO: 1783373
cuacucacuagauugaggc

SEQ ID NO: 1783375 - RNA, 19 nt, Artificial Sequence
  Description of Artificial Sequence: Synthetic oligonucleotide
  Sense strand starting at position 3836 of SEQ ID NO: 1562932
ucuagugaguagcugagau

SEQ ID NO: 1783376 - RNA, 19 nt, Artificial Sequence
  Description of Artificial Sequence: Synthetic oligonucleotide
  Antisense strand to SEQ ID NO: 1783375
aucucagcuacucacuaga

SEQ ID NO: 1783377 - RNA, 19 nt, Artificial Sequence
  Description of Artificial Sequence: Synthetic oligonucleotide
  Sense strand starting at position 121 of SEQ ID NO: 1562933
cacuguuaucugcccguuu

SEQ ID NO: 1783378 - RNA, 19 nt, Artificial Sequence
  Description of Artificial Sequence: Synthetic oligonucleotide
  Antisense strand to SEQ ID NO: 1783377
aaacgggcagauaacagug

SEQ ID NO: 1783379 - RNA, 19 nt, Artificial Sequence
  Description of Artificial Sequence: Synthetic oligonucleotide
  Sense strand starting at position 158 of SEQ ID NO: 1562933
ggaccugacuugcucaaga

SEQ ID NO: 1783380 - RNA, 19 nt, Artificial Sequence
  Description of Artificial Sequence: Synthetic oligonucleotide
  Antisense strand to SEQ ID NO: 1783379
ucuugagcaagucaggucc

SEQ ID NO: 1783381 - RNA, 19 nt, Artificial Sequence
  Description of Artificial Sequence: Synthetic oligonucleotide
  Sense strand starting at position 235 of SEQ ID NO: 1562933
ucuaaaucacggcagagau

SEQ ID NO: 1783382 - RNA, 19 nt, Artificial Sequence
  Description of Artificial Sequence: Synthetic oligonucleotide
  Antisense strand to SEQ ID NO: 1783381
aucucugccgugauuuaga

SEQ ID NO: 1783383 - RNA, 19 nt, Artificial Sequence
  Description of Artificial Sequence: Synthetic oligonucleotide
  Sense strand starting at position 288 of SEQ ID NO: 1562933
ggaggagaacacugcucuu

SEQ ID NO: 1783384 - RNA, 19 nt, Artificial Sequence
  Description of Artificial Sequence: Synthetic oligonucleotide
  Antisense strand to SEQ ID NO: 1783383
aagagcaguguucuccucc

SEQ ID NO: 1783385 - RNA, 19 nt, Artificial Sequence
  Description of Artificial Sequence: Synthetic oligonucleotide
  Sense strand starting at position 493 of SEQ ID NO: 1562933
ucguugggucagggagauu

SEQ ID NO: 1783386 - RNA, 19 nt, Artificial Sequence
  Description of Artificial Sequence: Synthetic oligonucleotide
  Antisense strand to SEQ ID NO: 1783385
aaucucccugacccaacga

SEQ ID NO: 1783387 - RNA, 19 nt, Artificial Sequence
  Description of Artificial Sequence: Synthetic oligonucleotide
  Sense strand starting at position 778 of SEQ ID NO: 1562933
uggagcaucuggcaagauu

SEQ ID NO: 1783388 - RNA, 19 nt, Artificial Sequence
  Description of Artificial Sequence: Synthetic oligonucleotide
  Antisense strand to SEQ ID NO: 1783387
aaucuugccagaugcucca

SEQ ID NO: 1783389 - RNA, 19 nt, Artificial Sequence
  Description of Artificial Sequence: Synthetic oligonucleotide
  Sense strand starting at position 985 of SEQ ID NO: 1562933
cggacuugcuccucaaaca

SEQ ID NO: 1783390 - RNA, 19 nt, Artificial Sequence
  Description of Artificial Sequence: Synthetic oligonucleotide
  Antisense strand to SEQ ID NO: 1783389
uguuugaggagcaaguccg

SEQ ID NO: 1783391 - RNA, 19 nt, Artificial Sequence
  Description of Artificial Sequence: Synthetic oligonucleotide
  Sense strand starting at position 986 of SEQ ID NO: 1562933
ggacuugcuccucaaacaa

SEQ ID NO: 1783392 - RNA, 19 nt, Artificial Sequence
  Description of Artificial Sequence: Synthetic oligonucleotide
  Antisense strand to SEQ ID NO: 1783391
uuguuugaggagcaagucc

SEQ ID NO: 1783393 - RNA, 19 nt, Artificial Sequence
  Description of Artificial Sequence: Synthetic oligonucleotide
  Sense strand starting at position 1031 of SEQ ID NO: 1562933
ccugcuugucugggaauga

SEQ ID NO: 1783394 - RNA, 19 nt, Artificial Sequence
  Description of Artificial Sequence: Synthetic oligonucleotide
  Antisense strand to SEQ ID NO: 1783393
ucauucccagacaagcagg

SEQ ID NO: 1783395 - RNA, 19 nt, Artificial Sequence
  Description of Artificial Sequence: Synthetic oligonucleotide
  Sense strand starting at position 1032 of SEQ ID NO: 1562933
cugcuugucugggaaugac

SEQ ID NO: 1783396 - RNA, 19 nt, Artificial Sequence
  Description of Artificial Sequence: Synthetic oligonucleotide
  Antisense strand to SEQ ID NO: 1783395
gucauucccagacaagcag

SEQ ID NO: 1783397 - RNA, 19 nt, Artificial Sequence
  Description of Artificial Sequence: Synthetic oligonucleotide
  Sense strand starting at position 1069 of SEQ ID NO: 1562933
uaaagaaugccucgcagcu

SEQ ID NO: 1783398 - RNA, 19 nt, Artificial Sequence
  Description of Artificial Sequence: Synthetic oligonucleotide
  Antisense strand to SEQ ID NO: 1783397
agcugcgaggcauucuuua

SEQ ID NO: 1783399 - RNA, 19 nt, Artificial Sequence
  Description of Artificial Sequence: Synthetic oligonucleotide
  Sense strand starting at position 1448 of SEQ ID NO: 1562933
gggcaaguucuuugcaaac

SEQ ID NO: 1783400 - RNA, 19 nt, Artificial Sequence
  Description of Artificial Sequence: Synthetic oligonucleotide
  Antisense strand to SEQ ID NO: 1783399
guuugcaaagaacuugccc

SEQ ID NO: 1783401 - RNA, 19 nt, Artificial Sequence
  Description of Artificial Sequence: Synthetic oligonucleotide
  Sense strand starting at position 1450 of SEQ ID NO: 1562933
gcaaguucuuugcaaacug

SEQ ID NO: 1783402 - RNA, 19 nt, Artificial Sequence
  Description of Artificial Sequence: Synthetic oligonucleotide
  Antisense strand to SEQ ID NO: 1783401
caguuugcaaagaacuugc

SEQ ID NO: 1783403 - RNA, 19 nt, Artificial Sequence
  Description of Artificial Sequence: Synthetic oligonucleotide
  Sense strand starting at position 2407 of SEQ ID NO: 1562933
cccaguucucaugaggacu

SEQ ID NO: 1783404 - RNA, 19 nt, Artificial Sequence
  Description of Artificial Sequence: Synthetic oligonucleotide
  Antisense strand to SEQ ID NO: 1783403
aguccucaugagaacuggg

SEQ ID NO: 1783405 - RNA, 19 nt, Artificial Sequence
  Description of Artificial Sequence: Synthetic oligonucleotide
  Sense strand starting at position 2409 of SEQ ID NO: 1562933
caguucucaugaggacuuu

SEQ ID NO: 1783406 - RNA, 19 nt, Artificial Sequence
  Description of Artificial Sequence: Synthetic oligonucleotide
  Antisense strand to SEQ ID NO: 1783405
aaaguccucaugagaacug

SEQ ID NO: 1783407 - RNA, 19 nt, Artificial Sequence
  Description of Artificial Sequence: Synthetic oligonucleotide
  Sense strand starting at position 2595 of SEQ ID NO: 1562933
ccaggucucuuggauggua

SEQ ID NO: 1783408 - RNA, 19 nt, Artificial Sequence
  Description of Artificial Sequence: Synthetic oligonucleotide
  Antisense strand to SEQ ID NO: 1783407
uaccauccaagagaccugg

SEQ ID NO: 1783409 - RNA, 19 nt, Artificial Sequence
  Description of Artificial Sequence: Synthetic oligonucleotide
  Sense strand starting at position 2597 of SEQ ID NO: 1562933
aggucucuuggaugguaaa

SEQ ID NO: 1783410 - RNA, 19 nt, Artificial Sequence
  Description of Artificial Sequence: Synthetic oligonucleotide
  Antisense strand to SEQ ID NO: 1783409
uuuaccauccaagagaccu

SEQ ID NO: 1783411 - RNA, 19 nt, Artificial Sequence
  Description of Artificial Sequence: Synthetic oligonucleotide
  Sense strand starting at position 2651 of SEQ ID NO: 1562933
gagugaucccagugaaggc

SEQ ID NO: 1783412 - RNA, 19 nt, Artificial Sequence
  Description of Artificial Sequence: Synthetic oligonucleotide
  Antisense strand to SEQ ID NO: 1783411
gccuucacugggaucacuc

SEQ ID NO: 1783413 - RNA, 19 nt, Artificial Sequence
  Description of Artificial Sequence: Synthetic oligonucleotide
  Sense strand starting at position 2740 of SEQ ID NO: 1562933
ugaacuacuuccgugaggu

SEQ ID NO: 1783414 - RNA, 19 nt, Artificial Sequence
  Description of Artificial Sequence: Synthetic oligonucleotide
  Antisense strand to SEQ ID NO: 1783413
accucacggaaguaguuca

SEQ ID NO: 1783415 - RNA, 19 nt, Artificial Sequence
  Description of Artificial Sequence: Synthetic oligonucleotide
  Sense strand starting at position 2741 of SEQ ID NO: 1562933
gaacuacuuccgugaggua

SEQ ID NO: 1783416 - RNA, 19 nt, Artificial Sequence
  Description of Artificial Sequence: Synthetic oligonucleotide
  Antisense strand to SEQ ID NO: 1783415
uaccucacggaaguaguuc

SEQ ID NO: 1783417 - RNA, 19 nt, Artificial Sequence
  Description of Artificial Sequence: Synthetic oligonucleotide
  Sense strand starting at position 2746 of SEQ ID NO: 1562933
acuuccgugagguagagau

SEQ ID NO: 1783418 - RNA, 19 nt, Artificial Sequence
  Description of Artificial Sequence: Synthetic oligonucleotide
  Antisense strand to SEQ ID NO: 1783417
aucucuaccucacggaagu

SEQ ID NO: 1783419 - RNA, 19 nt, Artificial Sequence
  Description of Artificial Sequence: Synthetic oligonucleotide
  Sense strand starting at position 2748 of SEQ ID NO: 1562933
uuccgugagguagagauua

SEQ ID NO: 1783420 - RNA, 19 nt, Artificial Sequence
  Description of Artificial Sequence: Synthetic oligonucleotide
  Antisense strand to SEQ ID NO: 1783419
uaaucucuaccucacggaa

SEQ ID NO: 1783421 - RNA, 19 nt, Artificial Sequence
  Description of Artificial Sequence: Synthetic oligonucleotide
  Sense strand starting at position 2750 of SEQ ID NO: 1562933
ccgugagguagagauuauu

SEQ ID NO: 1783422 - RNA, 19 nt, Artificial Sequence
  Description of Artificial Sequence: Synthetic oligonucleotide
  Antisense strand to SEQ ID NO: 1783421
aauaaucucuaccucacgg

SEQ ID NO: 1783423 - RNA, 19 nt, Artificial Sequence
  Description of Artificial Sequence: Synthetic oligonucleotide
  Sense strand starting at position 2756 of SEQ ID NO: 1562933
gguagagauuauucuucuc

SEQ ID NO: 1783424 - RNA, 19 nt, Artificial Sequence
  Description of Artificial Sequence: Synthetic oligonucleotide
  Antisense strand to SEQ ID NO: 1783423
gagaagaauaaucucuacc

SEQ ID NO: 1783425 - RNA, 19 nt, Artificial Sequence
  Description of Artificial Sequence: Synthetic oligonucleotide
  Sense strand starting at position 2799 of SEQ ID NO: 1562933
aggcucacagagugaaaua

SEQ ID NO: 1783426 - RNA, 19 nt, Artificial Sequence
  Description of Artificial Sequence: Synthetic oligonucleotide
  Antisense strand to SEQ ID NO: 1783425
uauuucacucugugagccu

SEQ ID NO: 1783427 - RNA, 19 nt, Artificial Sequence
  Description of Artificial Sequence: Synthetic oligonucleotide
  Sense strand starting at position 2834 of SEQ ID NO: 1562933
gccaacauugugcaaucaa

SEQ ID NO: 1783428 - RNA, 19 nt, Artificial Sequence
  Description of Artificial Sequence: Synthetic oligonucleotide
  Antisense strand to SEQ ID NO: 1783427
uugauugcacaauguuggc

SEQ ID NO: 1783429 - RNA, 19 nt, Artificial Sequence
  Description of Artificial Sequence: Synthetic oligonucleotide
  Sense strand starting at position 2926 of SEQ ID NO: 1562933
cugggauucccacaaggcu

SEQ ID NO: 1783430 - RNA, 19 nt, Artificial Sequence
  Description of Artificial Sequence: Synthetic oligonucleotide
  Antisense strand to SEQ ID NO: 1783429
agccuugugggaaucccag

SEQ ID NO: 1783431 - RNA, 19 nt, Artificial Sequence
  Description of Artificial Sequence: Synthetic oligonucleotide
  Sense strand starting at position 3348 of SEQ ID NO: 1562933
caugaagagucuuuguuua

SEQ ID NO: 1783432 - RNA, 19 nt, Artificial Sequence
  Description of Artificial Sequence: Synthetic oligonucleotide
  Antisense strand to SEQ ID NO: 1783431
uaaacaaagacucuucaug

SEQ ID NO: 1783433 - RNA, 19 nt, Artificial Sequence
  Description of Artificial Sequence: Synthetic oligonucleotide
  Sense strand starting at position 3350 of SEQ ID NO: 1562933
ugaagagucuuuguuuagu

SEQ ID NO: 1783434 - RNA, 19 nt, Artificial Sequence
  Description of Artificial Sequence: Synthetic oligonucleotide
  Antisense strand to SEQ ID NO: 1783433
acuaaacaaagacucuuca

SEQ ID NO: 1783435 - RNA, 19 nt, Artificial Sequence
  Description of Artificial Sequence: Synthetic oligonucleotide
  Sense strand starting at position 3355 of SEQ ID NO: 1562933
agucuuuguuuagugcaaa

SEQ ID NO: 1783436 - RNA, 19 nt, Artificial Sequence
  Description of Artificial Sequence: Synthetic oligonucleotide
  Antisense strand to SEQ ID NO: 1783435
uuugcacuaaacaaagacu

SEQ ID NO: 1783437 - RNA, 19 nt, Artificial Sequence
  Description of Artificial Sequence: Synthetic oligonucleotide
  Sense strand starting at position 3358 of SEQ ID NO: 1562933
cuuuguuuagugcaaauca

SEQ ID NO: 1783438 - RNA, 19 nt, Artificial Sequence
  Description of Artificial Sequence: Synthetic oligonucleotide
  Antisense strand to SEQ ID NO: 1783437
ugauuugcacuaaacaaag

SEQ ID NO: 1783439 - RNA, 19 nt, Artificial Sequence
  Description of Artificial Sequence: Synthetic oligonucleotide
  Sense strand starting at position 3375 of SEQ ID NO: 1562933
caaccagugucuccugagu

SEQ ID NO: 1783440 - RNA, 19 nt, Artificial Sequence
  Description of Artificial Sequence: Synthetic oligonucleotide
  Antisense strand to SEQ ID NO: 1783439
acucaggagacacugguug

SEQ ID NO: 1783441 - RNA, 19 nt, Artificial Sequence
  Description of Artificial Sequence: Synthetic oligonucleotide
  Sense strand starting at position 3395 of SEQ ID NO: 1562933
ccuccuguguuccagacau

SEQ ID NO: 1783442 - RNA, 19 nt, Artificial Sequence
  Description of Artificial Sequence: Synthetic oligonucleotide
  Antisense strand to SEQ ID NO: 1783441
augucuggaacacaggagg

SEQ ID NO: 1783443 - RNA, 19 nt, Artificial Sequence
  Description of Artificial Sequence: Synthetic oligonucleotide
  Sense strand starting at position 3397 of SEQ ID NO: 1562933
uccuguguuccagacauaa

SEQ ID NO: 1783444 - RNA, 19 nt, Artificial Sequence
  Description of Artificial Sequence: Synthetic oligonucleotide
  Antisense strand to SEQ ID NO: 1783443
uuaugucuggaacacagga

SEQ ID NO: 1783445 - RNA, 19 nt, Artificial Sequence
  Description of Artificial Sequence: Synthetic oligonucleotide
  Sense strand starting at position 3417 of SEQ ID NO: 1562933
uaccaucgucuuugggaga

SEQ ID NO: 1783446 - RNA, 19 nt, Artificial Sequence
  Description of Artificial Sequence: Synthetic oligonucleotide
  Antisense strand to SEQ ID NO: 1783445
ucucccaaagacgauggua

SEQ ID NO: 1783447 - RNA, 19 nt, Artificial Sequence
  Description of Artificial Sequence: Synthetic oligonucleotide
  Sense strand starting at position 3472 of SEQ ID NO: 1562933
gcgggauggaacgguucau

SEQ ID NO: 1783448 - RNA, 19 nt, Artificial Sequence
  Description of Artificial Sequence: Synthetic oligonucleotide
  Antisense strand to SEQ ID NO: 1783447
augaaccguuccaucccgc

SEQ ID NO: 1783449 - RNA, 19 nt, Artificial Sequence
  Description of Artificial Sequence: Synthetic oligonucleotide
  Sense strand starting at position 3518 of SEQ ID NO: 1562933
agcaacaggugcuuuauaa

SEQ ID NO: 1783450 - RNA, 19 nt, Artificial Sequence
  Description of Artificial Sequence: Synthetic oligonucleotide
  Antisense strand to SEQ ID NO: 1783449
uuauaaagcaccuguugcu

SEQ ID NO: 1783451 - RNA, 19 nt, Artificial Sequence
  Description of Artificial Sequence: Synthetic oligonucleotide
  Sense strand starting at position 3522 of SEQ ID NO: 1562933
acaggugcuuuauaaacua

SEQ ID NO: 1783452 - RNA, 19 nt, Artificial Sequence
  Description of Artificial Sequence: Synthetic oligonucleotide
  Antisense strand to SEQ ID NO: 1783451
uaguuuauaaagcaccugu

SEQ ID NO: 1783453 - RNA, 19 nt, Artificial Sequence
  Description of Artificial Sequence: Synthetic oligonucleotide
  Sense strand starting at position 3829 of SEQ ID NO: 1562933
gccucaaucuagugaguag

SEQ ID NO: 1783454 - RNA, 19 nt, Artificial Sequence
  Description of Artificial Sequence: Synthetic oligonucleotide
  Antisense strand to SEQ ID NO: 1783453
cuacucacuagauugaggc

SEQ ID NO: 1783455 - RNA, 19 nt, Artificial Sequence
  Description of Artificial Sequence: Synthetic oligonucleotide
  Sense strand starting at position 3836 of SEQ ID NO: 1562933
ucuagugaguagcugagau

SEQ ID NO: 1783456 - RNA, 19 nt, Artificial Sequence
  Description of Artificial Sequence: Synthetic oligonucleotide
  Antisense strand to SEQ ID NO: 1783455
aucucagcuacucacuaga

SEQ ID NO: 1783457 - RNA, 19 nt, Artificial Sequence
  Description of Artificial Sequence: Synthetic oligonucleotide
  Sense strand starting at position 48 of SEQ ID NO: 1562934
uggucuguccuggaugcaa

SEQ ID NO: 1783458 - RNA, 19 nt, Artificial Sequence
  Description of Artificial Sequence: Synthetic oligonucleotide
  Antisense strand to SEQ ID NO: 1783457
uugcauccaggacagacca

SEQ ID NO: 1783459 - RNA, 19 nt, Artificial Sequence
  Description of Artificial Sequence: Synthetic oligonucleotide
  Sense strand starting at position 88 of SEQ ID NO: 1562934
cgcugagguccugaaaccu

SEQ ID NO: 1783460 - RNA, 19 nt, Artificial Sequence
  Description of Artificial Sequence: Synthetic oligonucleotide
  Antisense strand to SEQ ID NO: 1783459
agguuucaggaccucagcg

SEQ ID NO: 1783461 - RNA, 19 nt, Artificial Sequence
  Description of Artificial Sequence: Synthetic oligonucleotide
  Sense strand starting at position 431 of SEQ ID NO: 1562934
cccauauguguuuggaaga

SEQ ID NO: 1783462 - RNA, 19 nt, Artificial Sequence
  Description of Artificial Sequence: Synthetic oligonucleotide
  Antisense strand to SEQ ID NO: 1783461
ucuuccaaacacauauggg

SEQ ID NO: 1783463 - RNA, 19 nt, Artificial Sequence
  Description of Artificial Sequence: Synthetic oligonucleotide
  Sense strand starting at position 436 of SEQ ID NO: 1562934
auguguuuggaagaagggu

SEQ ID NO: 1783464 - RNA, 19 nt, Artificial Sequence
  Description of Artificial Sequence: Synthetic oligonucleotide
  Antisense strand to SEQ ID NO: 1783463
acccuucuuccaaacacau

SEQ ID NO: 1783465 - RNA, 19 nt, Artificial Sequence
  Description of Artificial Sequence: Synthetic oligonucleotide
  Sense strand starting at position 726 of SEQ ID NO: 1562934
ugauguguugaugacguca

SEQ ID NO: 1783466 - RNA, 19 nt, Artificial Sequence
  Description of Artificial Sequence: Synthetic oligonucleotide
  Antisense strand to SEQ ID NO: 1783465
ugacgucaucaacacauca

SEQ ID NO: 1783467 - RNA, 19 nt, Artificial Sequence
  Description of Artificial Sequence: Synthetic oligonucleotide
  Sense strand starting at position 1249 of SEQ ID NO: 1562934
cagcuauaccaguggagaa

SEQ ID NO: 1783468 - RNA, 19 nt, Artificial Sequence
  Description of Artificial Sequence: Synthetic oligonucleotide
  Antisense strand to SEQ ID NO: 1783467
uucuccacugguauagcug

SEQ ID NO: 1783469 - RNA, 19 nt, Artificial Sequence
  Description of Artificial Sequence: Synthetic oligonucleotide
  Sense strand starting at position 1275 of SEQ ID NO: 1562934
cacagaguccgugaauggu

SEQ ID NO: 1783470 - RNA, 19 nt, Artificial Sequence
  Description of Artificial Sequence: Synthetic oligonucleotide
  Antisense strand to SEQ ID NO: 1783469
accauucacggacucugug

SEQ ID NO: 1783471 - RNA, 19 nt, Artificial Sequence
  Description of Artificial Sequence: Synthetic oligonucleotide
  Sense strand starting at position 1283 of SEQ ID NO: 1562934
ccgugaauggucuaaggac

SEQ ID NO: 1783472 - RNA, 19 nt, Artificial Sequence
  Description of Artificial Sequence: Synthetic oligonucleotide
  Antisense strand to SEQ ID NO: 1783471
guccuuagaccauucacgg

SEQ ID NO: 1783473 - RNA, 19 nt, Artificial Sequence
  Description of Artificial Sequence: Synthetic oligonucleotide
  Sense strand starting at position 1770 of SEQ ID NO: 1562934
ccaggagucuggguggaga

SEQ ID NO: 1783474 - RNA, 19 nt, Artificial Sequence
  Description of Artificial Sequence: Synthetic oligonucleotide
  Antisense strand to SEQ ID NO: 1783473
ucuccacccagacuccugg

SEQ ID NO: 1783475 - RNA, 19 nt, Artificial Sequence
  Description of Artificial Sequence: Synthetic oligonucleotide
  Sense strand starting at position 2010 of SEQ ID NO: 1562934
aaguccugucgggaaguga

SEQ ID NO: 1783476 - RNA, 19 nt, Artificial Sequence
  Description of Artificial Sequence: Synthetic oligonucleotide
  Antisense strand to SEQ ID NO: 1783475
ucacuucccgacaggacuu

SEQ ID NO: 1783477 - RNA, 19 nt, Artificial Sequence
  Description of Artificial Sequence: Synthetic oligonucleotide
  Sense strand starting at position 2180 of SEQ ID NO: 1562934
ccaucaggccaagacuauu

SEQ ID NO: 1783478 - RNA, 19 nt, Artificial Sequence
  Description of Artificial Sequence: Synthetic oligonucleotide
  Antisense strand to SEQ ID NO: 1783477
aauagucuuggccugaugg

SEQ ID NO: 1783479 - RNA, 19 nt, Artificial Sequence
  Description of Artificial Sequence: Synthetic oligonucleotide
  Sense strand starting at position 2424 of SEQ ID NO: 1562934
agccuugccagguagacau

SEQ ID NO: 1783480 - RNA, 19 nt, Artificial Sequence
  Description of Artificial Sequence: Synthetic oligonucleotide
  Antisense strand to SEQ ID NO: 1783479
augucuaccuggcaaggcu

SEQ ID NO: 1783481 - RNA, 19 nt, Artificial Sequence
  Description of Artificial Sequence: Synthetic oligonucleotide
  Sense strand starting at position 2470 of SEQ ID NO: 1562934
gcauaaagacguuagaugu

SEQ ID NO: 1783482 - RNA, 19 nt, Artificial Sequence
  Description of Artificial Sequence: Synthetic oligonucleotide
  Antisense strand to SEQ ID NO: 1783481
acaucuaacgucuuuaugc

SEQ ID NO: 1783483 - RNA, 19 nt, Artificial Sequence
  Description of Artificial Sequence: Synthetic oligonucleotide
  Sense strand starting at position 2553 of SEQ ID NO: 1562934
ggaucuagugccugguaga

SEQ ID NO: 1783484 - RNA, 19 nt, Artificial Sequence
  Description of Artificial Sequence: Synthetic oligonucleotide
  Antisense strand to SEQ ID NO: 1783483
ucuaccaggcacuagaucc

SEQ ID NO: 1783485 - RNA, 19 nt, Artificial Sequence
  Description of Artificial Sequence: Synthetic oligonucleotide
  Sense strand starting at position 2554 of SEQ ID NO: 1562934
gaucuagugccugguagaa

SEQ ID NO: 1783486 - RNA, 19 nt, Artificial Sequence
  Description of Artificial Sequence: Synthetic oligonucleotide
  Antisense strand to SEQ ID NO: 1783485
uucuaccaggcacuagauc

SEQ ID NO: 1783487 - RNA, 19 nt, Artificial Sequence
  Description of Artificial Sequence: Synthetic oligonucleotide
  Sense strand starting at position 2572 of SEQ ID NO: 1562934
aggaaauguuccgcauauu

SEQ ID NO: 1783488 - RNA, 19 nt, Artificial Sequence
  Description of Artificial Sequence: Synthetic oligonucleotide
  Antisense strand to SEQ ID NO: 1783487
aauaugcggaacauuuccu

SEQ ID NO: 1783489 - RNA, 19 nt, Artificial Sequence
  Description of Artificial Sequence: Synthetic oligonucleotide
  Sense strand starting at position 2573 of SEQ ID NO: 1562934
ggaaauguuccgcauauuc

SEQ ID NO: 1783490 - RNA, 19 nt, Artificial Sequence
  Description of Artificial Sequence: Synthetic oligonucleotide
  Antisense strand to SEQ ID NO: 1783489
gaauaugcggaacauuucc

SEQ ID NO: 1783491 - RNA, 19 nt, Artificial Sequence
  Description of Artificial Sequence: Synthetic oligonucleotide
  Sense strand starting at position 2580 of SEQ ID NO: 1562934
uuccgcauauucucagaca

SEQ ID NO: 1783492 - RNA, 19 nt, Artificial Sequence
  Description of Artificial Sequence: Synthetic oligonucleotide
  Antisense strand to SEQ ID NO: 1783491
ugucugagaauaugcggaa

SEQ ID NO: 1783493 - RNA, 19 nt, Artificial Sequence
  Description of Artificial Sequence: Synthetic oligonucleotide
  Sense strand starting at position 2631 of SEQ ID NO: 1562934
ccuguaacaugagcucaau

SEQ ID NO: 1783494 - RNA, 19 nt, Artificial Sequence
  Description of Artificial Sequence: Synthetic oligonucleotide
  Antisense strand to SEQ ID NO: 1783493
auugagcucauguuacagg

SEQ ID NO: 1783495 - RNA, 19 nt, Artificial Sequence
  Description of Artificial Sequence: Synthetic oligonucleotide
  Sense strand starting at position 2651 of SEQ ID NO: 1562934
agagguaaacugugcccua

SEQ ID NO: 1783496 - RNA, 19 nt, Artificial Sequence
  Description of Artificial Sequence: Synthetic oligonucleotide
  Antisense strand to SEQ ID NO: 1783495
uagggcacaguuuaccucu

SEQ ID NO: 1783497 - RNA, 19 nt, Artificial Sequence
  Description of Artificial Sequence: Synthetic oligonucleotide
  Sense strand starting at position 2652 of SEQ ID NO: 1562934
gagguaaacugugcccuau

SEQ ID NO: 1783498 - RNA, 19 nt, Artificial Sequence
  Description of Artificial Sequence: Synthetic oligonucleotide
  Antisense strand to SEQ ID NO: 1783497
auagggcacaguuuaccuc

SEQ ID NO: 1783499 - RNA, 19 nt, Artificial Sequence
  Description of Artificial Sequence: Synthetic oligonucleotide
  Sense strand starting at position 2654 of SEQ ID NO: 1562934
gguaaacugugcccuauag

SEQ ID NO: 1783500 - RNA, 19 nt, Artificial Sequence
  Description of Artificial Sequence: Synthetic oligonucleotide
  Antisense strand to SEQ ID NO: 1783499
cuauagggcacaguuuacc

SEQ ID NO: 1783501 - RNA, 19 nt, Artificial Sequence
  Description of Artificial Sequence: Synthetic oligonucleotide
  Sense strand starting at position 2852 of SEQ ID NO: 1562934
auacguagugaauaucuaa

SEQ ID NO: 1783502 - RNA, 19 nt, Artificial Sequence
  Description of Artificial Sequence: Synthetic oligonucleotide
  Antisense strand to SEQ ID NO: 1783501
uuagauauucacuacguau

SEQ ID NO: 1783503 - RNA, 19 nt, Artificial Sequence
  Description of Artificial Sequence: Synthetic oligonucleotide
  Sense strand starting at position 2855 of SEQ ID NO: 1562934
cguagugaauaucuaaucu

SEQ ID NO: 1783504 - RNA, 19 nt, Artificial Sequence
  Description of Artificial Sequence: Synthetic oligonucleotide
  Antisense strand to SEQ ID NO: 1783503
agauuagauauucacuacg

SEQ ID NO: 1783505 - RNA, 19 nt, Artificial Sequence
  Description of Artificial Sequence: Synthetic oligonucleotide
  Sense strand starting at position 2859 of SEQ ID NO: 1562934
gugaauaucuaaucugacc

SEQ ID NO: 1783506 - RNA, 19 nt, Artificial Sequence
  Description of Artificial Sequence: Synthetic oligonucleotide
  Antisense strand to SEQ ID NO: 1783505
ggucagauuagauauucac

SEQ ID NO: 1783507 - RNA, 19 nt, Artificial Sequence
  Description of Artificial Sequence: Synthetic oligonucleotide
  Sense strand starting at position 2925 of SEQ ID NO: 1562934
gggcacgaagauugucaau

SEQ ID NO: 1783508 - RNA, 19 nt, Artificial Sequence
  Description of Artificial Sequence: Synthetic oligonucleotide
  Antisense strand to SEQ ID NO: 1783507
auugacaaucuucgugccc

SEQ ID NO: 1783509 - RNA, 19 nt, Artificial Sequence
  Description of Artificial Sequence: Synthetic oligonucleotide
  Sense strand starting at position 3316 of SEQ ID NO: 1562934
uguugaauccuaggauguu

SEQ ID NO: 1783510 - RNA, 19 nt, Artificial Sequence
  Description of Artificial Sequence: Synthetic oligonucleotide
  Antisense strand to SEQ ID NO: 1783509
aacauccuaggauucaaca

SEQ ID NO: 1783511 - RNA, 19 nt, Artificial Sequence
  Description of Artificial Sequence: Synthetic oligonucleotide
  Sense strand starting at position 3328 of SEQ ID NO: 1562934
ggauguuagggcugggaca

SEQ ID NO: 1783512 - RNA, 19 nt, Artificial Sequence
  Description of Artificial Sequence: Synthetic oligonucleotide
  Antisense strand to SEQ ID NO: 1783511
ugucccagcccuaacaucc

SEQ ID NO: 1783513 - RNA, 19 nt, Artificial Sequence
  Description of Artificial Sequence: Synthetic oligonucleotide
  Sense strand starting at position 3355 of SEQ ID NO: 1562934
ggugaucggcuacaaacuu

SEQ ID NO: 1783514 - RNA, 19 nt, Artificial Sequence
  Description of Artificial Sequence: Synthetic oligonucleotide
  Antisense strand to SEQ ID NO: 1783513
aaguuuguagccgaucacc

SEQ ID NO: 1783515 - RNA, 19 nt, Artificial Sequence
  Description of Artificial Sequence: Synthetic oligonucleotide
  Sense strand starting at position 3413 of SEQ ID NO: 1562934
cagggugacuuacccaaau

SEQ ID NO: 1783516 - RNA, 19 nt, Artificial Sequence
  Description of Artificial Sequence: Synthetic oligonucleotide
  Antisense strand to SEQ ID NO: 1783515
auuuggguaagucacccug

SEQ ID NO: 1783517 - RNA, 19 nt, Artificial Sequence
  Description of Artificial Sequence: Synthetic oligonucleotide
  Sense strand starting at position 3498 of SEQ ID NO: 1562934
cggagaugugucugaacuc

SEQ ID NO: 1783518 - RNA, 19 nt, Artificial Sequence
  Description of Artificial Sequence: Synthetic oligonucleotide
  Antisense strand to SEQ ID NO: 1783517
gaguucagacacaucuccg

SEQ ID NO: 1783519 - RNA, 19 nt, Artificial Sequence
  Description of Artificial Sequence: Synthetic oligonucleotide
  Sense strand starting at position 3544 of SEQ ID NO: 1562934
gggcuuugucaucagagaa

SEQ ID NO: 1783520 - RNA, 19 nt, Artificial Sequence
  Description of Artificial Sequence: Synthetic oligonucleotide
  Antisense strand to SEQ ID NO: 1783519
uucucugaugacaaagccc

SEQ ID NO: 1783521 - RNA, 19 nt, Artificial Sequence
  Description of Artificial Sequence: Synthetic oligonucleotide
  Sense strand starting at position 3619 of SEQ ID NO: 1562934
gcaggagaaccuugaggau

SEQ ID NO: 1783522 - RNA, 19 nt, Artificial Sequence
  Description of Artificial Sequence: Synthetic oligonucleotide
  Antisense strand to SEQ ID NO: 1783521
auccucaagguucuccugc

SEQ ID NO: 1783523 - RNA, 19 nt, Artificial Sequence
  Description of Artificial Sequence: Synthetic oligonucleotide
  Sense strand starting at position 3679 of SEQ ID NO: 1562934
auuacacuuguuuguugaa

SEQ ID NO: 1783524 - RNA, 19 nt, Artificial Sequence
  Description of Artificial Sequence: Synthetic oligonucleotide
  Antisense strand to SEQ ID NO: 1783523
uucaacaaacaaguguaau

SEQ ID NO: 1783525 - RNA, 19 nt, Artificial Sequence
  Description of Artificial Sequence: Synthetic oligonucleotide
  Sense strand starting at position 3803 of SEQ ID NO: 1562934
cagagagauugggcaacuu

SEQ ID NO: 1783526 - RNA, 19 nt, Artificial Sequence
  Description of Artificial Sequence: Synthetic oligonucleotide
  Antisense strand to SEQ ID NO: 1783525
aaguugcccaaucucucug

SEQ ID NO: 1783527 - RNA, 19 nt, Artificial Sequence
  Description of Artificial Sequence: Synthetic oligonucleotide
  Sense strand starting at position 3812 of SEQ ID NO: 1562934
ugggcaacuugccuaagau

SEQ ID NO: 1783528 - RNA, 19 nt, Artificial Sequence
  Description of Artificial Sequence: Synthetic oligonucleotide
  Antisense strand to SEQ ID NO: 1783527
aucuuaggcaaguugccca

SEQ ID NO: 1783529 - RNA, 19 nt, Artificial Sequence
  Description of Artificial Sequence: Synthetic oligonucleotide
  Sense strand starting at position 3813 of SEQ ID NO: 1562934
gggcaacuugccuaagauc

SEQ ID NO: 1783530 - RNA, 19 nt, Artificial Sequence
  Description of Artificial Sequence: Synthetic oligonucleotide
  Antisense strand to SEQ ID NO: 1783529
gaucuuaggcaaguugccc

SEQ ID NO: 1783531 - RNA, 19 nt, Artificial Sequence
  Description of Artificial Sequence: Synthetic oligonucleotide
  Sense strand starting at position 3857 of SEQ ID NO: 1562934
ccgguucucugacuccaaa

SEQ ID NO: 1783532 - RNA, 19 nt, Artificial Sequence
  Description of Artificial Sequence: Synthetic oligonucleotide
  Antisense strand to SEQ ID NO: 1783531
uuuggagucagagaaccgg

SEQ ID NO: 1783533 - RNA, 19 nt, Artificial Sequence
  Description of Artificial Sequence: Synthetic oligonucleotide
  Sense strand starting at position 3937 of SEQ ID NO: 1562934
caccuacugugggugaauu

SEQ ID NO: 1783534 - RNA, 19 nt, Artificial Sequence
  Description of Artificial Sequence: Synthetic oligonucleotide
  Antisense strand to SEQ ID NO: 1783533
aauucacccacaguaggug

SEQ ID NO: 1783535 - RNA, 19 nt, Artificial Sequence
  Description of Artificial Sequence: Synthetic oligonucleotide
  Sense strand starting at position 3949 of SEQ ID NO: 1562934
gugaauucucaggagccca

SEQ ID NO: 1783536 - RNA, 19 nt, Artificial Sequence
  Description of Artificial Sequence: Synthetic oligonucleotide
  Antisense strand to SEQ ID NO: 1783535
ugggcuccugagaauucac

SEQ ID NO: 1783537 - RNA, 19 nt, Artificial Sequence
  Description of Artificial Sequence: Synthetic oligonucleotide
  Sense strand starting at position 24 of SEQ ID NO: 1562935
ggucaucuucuauauuggu

SEQ ID NO: 1783538 - RNA, 19 nt, Artificial Sequence
  Description of Artificial Sequence: Synthetic oligonucleotide
  Antisense strand to SEQ ID NO: 1783537
accaauauagaagaugacc

SEQ ID NO: 1783539 - RNA, 19 nt, Artificial Sequence
  Description of Artificial Sequence: Synthetic oligonucleotide
  Sense strand starting at position 80 of SEQ ID NO: 1562935
auuuguauucccugcugca

SEQ ID NO: 1783540 - RNA, 19 nt, Artificial Sequence
  Description of Artificial Sequence: Synthetic oligonucleotide
  Antisense strand to SEQ ID NO: 1783539
ugcagcagggaauacaaau

SEQ ID NO: 1783541 - RNA, 19 nt, Artificial Sequence
  Description of Artificial Sequence: Synthetic oligonucleotide
  Sense strand starting at position 122 of SEQ ID NO: 1562935
acacaagagagcugugagu

SEQ ID NO: 1783542 - RNA, 19 nt, Artificial Sequence
  Description of Artificial Sequence: Synthetic oligonucleotide
  Antisense strand to SEQ ID NO: 1783541
acucacagcucucuugugu

SEQ ID NO: 1783543 - RNA, 19 nt, Artificial Sequence
  Description of Artificial Sequence: Synthetic oligonucleotide
  Sense strand starting at position 124 of SEQ ID NO: 1562935
acaagagagcugugaguuu

SEQ ID NO: 1783544 - RNA, 19 nt, Artificial Sequence
  Description of Artificial Sequence: Synthetic oligonucleotide
  Antisense strand to SEQ ID NO: 1783543
aaacucacagcucucuugu

SEQ ID NO: 1783545 - RNA, 19 nt, Artificial Sequence
  Description of Artificial Sequence: Synthetic oligonucleotide
  Sense strand starting at position 325 of SEQ ID NO: 1562935
cucugagagguugaguaau

SEQ ID NO: 1783546 - RNA, 19 nt, Artificial Sequence
  Description of Artificial Sequence: Synthetic oligonucleotide
  Antisense strand to SEQ ID NO: 1783545
auuacucaaccucucagag

SEQ ID NO: 1783547 - RNA, 19 nt, Artificial Sequence
  Description of Artificial Sequence: Synthetic oligonucleotide
  Sense strand starting at position 366 of SEQ ID NO: 1562935
augacagaaucagaaugaa

SEQ ID NO: 1783548 - RNA, 19 nt, Artificial Sequence
  Description of Artificial Sequence: Synthetic oligonucleotide
  Antisense strand to SEQ ID NO: 1783547
uucauucugauucugucau

SEQ ID NO: 1783549 - RNA, 19 nt, Artificial Sequence
  Description of Artificial Sequence: Synthetic oligonucleotide
  Sense strand starting at position 449 of SEQ ID NO: 1562935
ugcccagugucaccauuaa

SEQ ID NO: 1783550 - RNA, 19 nt, Artificial Sequence
  Description of Artificial Sequence: Synthetic oligonucleotide
  Antisense strand to SEQ ID NO: 1783549
uuaauggugacacugggca

SEQ ID NO: 1783551 - RNA, 19 nt, Artificial Sequence
  Description of Artificial Sequence: Synthetic oligonucleotide
  Sense strand starting at position 505 of SEQ ID NO: 1562935
ccagcuccucaagguaaau

SEQ ID NO: 1783552 - RNA, 19 nt, Artificial Sequence
  Description of Artificial Sequence: Synthetic oligonucleotide
  Antisense strand to SEQ ID NO: 1783551
auuuaccuugaggagcugg

SEQ ID NO: 1783553 - RNA, 19 nt, Artificial Sequence
  Description of Artificial Sequence: Synthetic oligonucleotide
  Sense strand starting at position 516 of SEQ ID NO: 1562935
agguaaaucugacaaugga

SEQ ID NO: 1783554 - RNA, 19 nt, Artificial Sequence
  Description of Artificial Sequence: Synthetic oligonucleotide
  Antisense strand to SEQ ID NO: 1783553
uccauugucagauuuaccu

SEQ ID NO: 1783555 - RNA, 19 nt, Artificial Sequence
  Description of Artificial Sequence: Synthetic oligonucleotide
  Sense strand starting at position 555 of SEQ ID NO: 1562935
gcuuuacuucuaggcauga

SEQ ID NO: 1783556 - RNA, 19 nt, Artificial Sequence
  Description of Artificial Sequence: Synthetic oligonucleotide
  Antisense strand to SEQ ID NO: 1783555
ucaugccuagaaguaaagc

SEQ ID NO: 1783557 - RNA, 19 nt, Artificial Sequence
  Description of Artificial Sequence: Synthetic oligonucleotide
  Sense strand starting at position 560 of SEQ ID NO: 1562935
acuucuaggcaugagugua

SEQ ID NO: 1783558 - RNA, 19 nt, Artificial Sequence
  Description of Artificial Sequence: Synthetic oligonucleotide
  Antisense strand to SEQ ID NO: 1783557
uacacucaugccuagaagu

SEQ ID NO: 1783559 - RNA, 19 nt, Artificial Sequence
  Description of Artificial Sequence: Synthetic oligonucleotide
  Sense strand starting at position 626 of SEQ ID NO: 1562935
cguaaugacucucuaccuu

SEQ ID NO: 1783560 - RNA, 19 nt, Artificial Sequence
  Description of Artificial Sequence: Synthetic oligonucleotide
  Antisense strand to SEQ ID NO: 1783559
aagguagagagucauuacg

SEQ ID NO: 1783561 - RNA, 19 nt, Artificial Sequence
  Description of Artificial Sequence: Synthetic oligonucleotide
  Sense strand starting at position 780 of SEQ ID NO: 1562935
acccaugaguuuccaccua

SEQ ID NO: 1783562 - RNA, 19 nt, Artificial Sequence
  Description of Artificial Sequence: Synthetic oligonucleotide
  Antisense strand to SEQ ID NO: 1783561
uagguggaaacucaugggu

SEQ ID NO: 1783563 - RNA, 19 nt, Artificial Sequence
  Description of Artificial Sequence: Synthetic oligonucleotide
  Sense strand starting at position 916 of SEQ ID NO: 1562935
agugaaaccucagucucua

SEQ ID NO: 1783564 - RNA, 19 nt, Artificial Sequence
  Description of Artificial Sequence: Synthetic oligonucleotide
  Antisense strand to SEQ ID NO: 1783563
uagagacugagguuucacu

SEQ ID NO: 1783565 - RNA, 19 nt, Artificial Sequence
  Description of Artificial Sequence: Synthetic oligonucleotide
  Sense strand starting at position 1133 of SEQ ID NO: 1562935
ccucucugucaggaauaug

SEQ ID NO: 1783566 - RNA, 19 nt, Artificial Sequence
  Description of Artificial Sequence: Synthetic oligonucleotide
  Antisense strand to SEQ ID NO: 1783565
cauauuccugacagagagg

SEQ ID NO: 1783567 - RNA, 19 nt, Artificial Sequence
  Description of Artificial Sequence: Synthetic oligonucleotide
  Sense strand starting at position 1542 of SEQ ID NO: 1562935
ggcggaguccgguugucuu

SEQ ID NO: 1783568 - RNA, 19 nt, Artificial Sequence
  Description of Artificial Sequence: Synthetic oligonucleotide
  Antisense strand to SEQ ID NO: 1783567
aagacaaccggacuccgcc

SEQ ID NO: 1783569 - RNA, 19 nt, Artificial Sequence
  Description of Artificial Sequence: Synthetic oligonucleotide
  Sense strand starting at position 2029 of SEQ ID NO: 1562935
gccggagaucaccaugaca

SEQ ID NO: 1783570 - RNA, 19 nt, Artificial Sequence
  Description of Artificial Sequence: Synthetic oligonucleotide
  Antisense strand to SEQ ID NO: 1783569
ugucauggugaucuccggc

SEQ ID NO: 1783571 - RNA, 19 nt, Artificial Sequence
  Description of Artificial Sequence: Synthetic oligonucleotide
  Sense strand starting at position 2031 of SEQ ID NO: 1562935
cggagaucaccaugacaac

SEQ ID NO: 1783572 - RNA, 19 nt, Artificial Sequence
  Description of Artificial Sequence: Synthetic oligonucleotide
  Antisense strand to SEQ ID NO: 1783571
guugucauggugaucuccg

SEQ ID NO: 1783573 - RNA, 19 nt, Artificial Sequence
  Description of Artificial Sequence: Synthetic oligonucleotide
  Sense strand starting at position 2122 of SEQ ID NO: 1562935
gggcugaccguggagagau

SEQ ID NO: 1783574 - RNA, 19 nt, Artificial Sequence
  Description of Artificial Sequence: Synthetic oligonucleotide
  Antisense strand to SEQ ID NO: 1783573
aucucuccacggucagccc

SEQ ID NO: 1783575 - RNA, 19 nt, Artificial Sequence
  Description of Artificial Sequence: Synthetic oligonucleotide
  Sense strand starting at position 2197 of SEQ ID NO: 1562935
gagcuccugaugugguauu

SEQ ID NO: 1783576 - RNA, 19 nt, Artificial Sequence
  Description of Artificial Sequence: Synthetic oligonucleotide
  Antisense strand to SEQ ID NO: 1783575
aauaccacaucaggagcuc

SEQ ID NO: 1783577 - RNA, 19 nt, Artificial Sequence
  Description of Artificial Sequence: Synthetic oligonucleotide
  Sense strand starting at position 2209 of SEQ ID NO: 1562935
ugguauugauguuuaauug

SEQ ID NO: 1783578 - RNA, 19 nt, Artificial Sequence
  Description of Artificial Sequence: Synthetic oligonucleotide
  Antisense strand to SEQ ID NO: 1783577
caauuaaacaucaauacca

SEQ ID NO: 1783579 - RNA, 19 nt, Artificial Sequence
  Description of Artificial Sequence: Synthetic oligonucleotide
  Sense strand starting at position 2213 of SEQ ID NO: 1562935
auugauguuuaauuggagu

SEQ ID NO: 1783580 - RNA, 19 nt, Artificial Sequence
  Description of Artificial Sequence: Synthetic oligonucleotide
  Antisense strand to SEQ ID NO: 1783579
acuccaauuaaacaucaau

SEQ ID NO: 1783581 - RNA, 19 nt, Artificial Sequence
  Description of Artificial Sequence: Synthetic oligonucleotide
  Sense strand starting at position 2215 of SEQ ID NO: 1562935
ugauguuuaauuggaguca

SEQ ID NO: 1783582 - RNA, 19 nt, Artificial Sequence
  Description of Artificial Sequence: Synthetic oligonucleotide
  Antisense strand to SEQ ID NO: 1783581
ugacuccaauuaaacauca

SEQ ID NO: 1783583 - RNA, 19 nt, Artificial Sequence
  Description of Artificial Sequence: Synthetic oligonucleotide
  Sense strand starting at position 2276 of SEQ ID NO: 1562935
ugaccuuagucugcauagu

SEQ ID NO: 1783584 - RNA, 19 nt, Artificial Sequence
  Description of Artificial Sequence: Synthetic oligonucleotide
  Antisense strand to SEQ ID NO: 1783583
acuaugcagacuaagguca

SEQ ID NO: 1783585 - RNA, 19 nt, Artificial Sequence
  Description of Artificial Sequence: Synthetic oligonucleotide
  Sense strand starting at position 2277 of SEQ ID NO: 1562935
gaccuuagucugcauaguu

SEQ ID NO: 1783586 - RNA, 19 nt, Artificial Sequence
  Description of Artificial Sequence: Synthetic oligonucleotide
  Antisense strand to SEQ ID NO: 1783585
aacuaugcagacuaagguc

SEQ ID NO: 1783587 - RNA, 19 nt, Artificial Sequence
  Description of Artificial Sequence: Synthetic oligonucleotide
  Sense strand starting at position 2282 of SEQ ID NO: 1562935
uagucugcauaguucugaa

SEQ ID NO: 1783588 - RNA, 19 nt, Artificial Sequence
  Description of Artificial Sequence: Synthetic oligonucleotide
  Antisense strand to SEQ ID NO: 1783587
uucagaacuaugcagacua

SEQ ID NO: 1783589 - RNA, 19 nt, Artificial Sequence
  Description of Artificial Sequence: Synthetic oligonucleotide
  Sense strand starting at position 2333 of SEQ ID NO: 1562935
ucuagagcucacgguacaa

SEQ ID NO: 1783590 - RNA, 19 nt, Artificial Sequence
  Description of Artificial Sequence: Synthetic oligonucleotide
  Antisense strand to SEQ ID NO: 1783589
uuguaccgugagcucuaga

SEQ ID NO: 1783591 - RNA, 19 nt, Artificial Sequence
  Description of Artificial Sequence: Synthetic oligonucleotide
  Sense strand starting at position 2387 of SEQ ID NO: 1562935
gugauuuccucugaacuag

SEQ ID NO: 1783592 - RNA, 19 nt, Artificial Sequence
  Description of Artificial Sequence: Synthetic oligonucleotide
  Antisense strand to SEQ ID NO: 1783591
cuaguucagaggaaaucac

SEQ ID NO: 1783593 - RNA, 19 nt, Artificial Sequence
  Description of Artificial Sequence: Synthetic oligonucleotide
  Sense strand starting at position 2399 of SEQ ID NO: 1562935
gaacuaguuucgguuugga

SEQ ID NO: 1783594 - RNA, 19 nt, Artificial Sequence
  Description of Artificial Sequence: Synthetic oligonucleotide
  Antisense strand to SEQ ID NO: 1783593
uccaaaccgaaacuaguuc

SEQ ID NO: 1783595 - RNA, 19 nt, Artificial Sequence
  Description of Artificial Sequence: Synthetic oligonucleotide
  Sense strand starting at position 2402 of SEQ ID NO: 1562935
cuaguuucgguuuggaaag

SEQ ID NO: 1783596 - RNA, 19 nt, Artificial Sequence
  Description of Artificial Sequence: Synthetic oligonucleotide
  Antisense strand to SEQ ID NO: 1783595
cuuuccaaaccgaaacuag

SEQ ID NO: 1783597 - RNA, 19 nt, Artificial Sequence
  Description of Artificial Sequence: Synthetic oligonucleotide
  Sense strand starting at position 2412 of SEQ ID NO: 1562935
uuuggaaaguuagcuguuu

SEQ ID NO: 1783598 - RNA, 19 nt, Artificial Sequence
  Description of Artificial Sequence: Synthetic oligonucleotide
  Antisense strand to SEQ ID NO: 1783597
aaacagcuaacuuuccaaa

SEQ ID NO: 1783599 - RNA, 19 nt, Artificial Sequence
  Description of Artificial Sequence: Synthetic oligonucleotide
  Sense strand starting at position 2546 of SEQ ID NO: 1562935
gaagccuugguacacagau

SEQ ID NO: 1783600 - RNA, 19 nt, Artificial Sequence
  Description of Artificial Sequence: Synthetic oligonucleotide
  Antisense strand to SEQ ID NO: 1783599
aucuguguaccaaggcuuc

SEQ ID NO: 1783601 - RNA, 19 nt, Artificial Sequence
  Description of Artificial Sequence: Synthetic oligonucleotide
  Sense strand starting at position 2747 of SEQ ID NO: 1562935
acaccuggcucuguuuaau

SEQ ID NO: 1783602 - RNA, 19 nt, Artificial Sequence
  Description of Artificial Sequence: Synthetic oligonucleotide
  Antisense strand to SEQ ID NO: 1783601
auuaaacagagccaggugu

SEQ ID NO: 1783603 - RNA, 19 nt, Artificial Sequence
  Description of Artificial Sequence: Synthetic oligonucleotide
  Sense strand starting at position 2805 of SEQ ID NO: 1562935
gggugaacuuaggugaguu

SEQ ID NO: 1783604 - RNA, 19 nt, Artificial Sequence
  Description of Artificial Sequence: Synthetic oligonucleotide
  Antisense strand to SEQ ID NO: 1783603
aacucaccuaaguucaccc

SEQ ID NO: 1783605 - RNA, 19 nt, Artificial Sequence
  Description of Artificial Sequence: Synthetic oligonucleotide
  Sense strand starting at position 2965 of SEQ ID NO: 1562935
acugaaagcuuccugguau

SEQ ID NO: 1783606 - RNA, 19 nt, Artificial Sequence
  Description of Artificial Sequence: Synthetic oligonucleotide
  Antisense strand to SEQ ID NO: 1783605
auaccaggaagcuuucagu

SEQ ID NO: 1783607 - RNA, 19 nt, Artificial Sequence
  Description of Artificial Sequence: Synthetic oligonucleotide
  Sense strand starting at position 2977 of SEQ ID NO: 1562935
cugguauaugccuagcacu

SEQ ID NO: 1783608 - RNA, 19 nt, Artificial Sequence
  Description of Artificial Sequence: Synthetic oligonucleotide
  Antisense strand to SEQ ID NO: 1783607
agugcuaggcauauaccag

SEQ ID NO: 1783609 - RNA, 19 nt, Artificial Sequence
  Description of Artificial Sequence: Synthetic oligonucleotide
  Sense strand starting at position 3026 of SEQ ID NO: 1562935
guccacccucagggaaauu

SEQ ID NO: 1783610 - RNA, 19 nt, Artificial Sequence
  Description of Artificial Sequence: Synthetic oligonucleotide
  Antisense strand to SEQ ID NO: 1783609
aauuucccugaggguggac

SEQ ID NO: 1783611 - RNA, 19 nt, Artificial Sequence
  Description of Artificial Sequence: Synthetic oligonucleotide
  Sense strand starting at position 3543 of SEQ ID NO: 1562935
gggcucuuugccuagaucu

SEQ ID NO: 1783612 - RNA, 19 nt, Artificial Sequence
  Description of Artificial Sequence: Synthetic oligonucleotide
  Antisense strand to SEQ ID NO: 1783611
agaucuaggcaaagagccc

SEQ ID NO: 1783613 - RNA, 19 nt, Artificial Sequence
  Description of Artificial Sequence: Synthetic oligonucleotide
  Sense strand starting at position 3545 of SEQ ID NO: 1562935
gcucuuugccuagaucuag

SEQ ID NO: 1783614 - RNA, 19 nt, Artificial Sequence
  Description of Artificial Sequence: Synthetic oligonucleotide
  Antisense strand to SEQ ID NO: 1783613
cuagaucuaggcaaagagc

SEQ ID NO: 1783615 - RNA, 19 nt, Artificial Sequence
  Description of Artificial Sequence: Synthetic oligonucleotide
  Sense strand starting at position 3926 of SEQ ID NO: 1562935
uggcuugcugaaugcagaa

SEQ ID NO: 1783616 - RNA, 19 nt, Artificial Sequence
  Description of Artificial Sequence: Synthetic oligonucleotide
  Antisense strand to SEQ ID NO: 1783615
uucugcauucagcaagcca

SEQ ID NO: 1783617 - RNA, 19 nt, Artificial Sequence
  Description of Artificial Sequence: Synthetic oligonucleotide
  Sense strand starting at position 557 of SEQ ID NO: 1562936
ggcagaugaucuucacguu

SEQ ID NO: 1783618 - RNA, 19 nt, Artificial Sequence
  Description of Artificial Sequence: Synthetic oligonucleotide
  Antisense strand to SEQ ID NO: 1783617
aacgugaagaucaucugcc

SEQ ID NO: 1783619 - RNA, 19 nt, Artificial Sequence
  Description of Artificial Sequence: Synthetic oligonucleotide
  Sense strand starting at position 572 of SEQ ID NO: 1562936
cguugucaucagcaucaua

SEQ ID NO: 1783620 - RNA, 19 nt, Artificial Sequence
  Description of Artificial Sequence: Synthetic oligonucleotide
  Antisense strand to SEQ ID NO: 1783619
uaugaugcugaugacaacg

SEQ ID NO: 1783621 - RNA, 19 nt, Artificial Sequence
  Description of Artificial Sequence: Synthetic oligonucleotide
  Sense strand starting at position 575 of SEQ ID NO: 1562936
ugucaucagcaucauacuu

SEQ ID NO: 1783622 - RNA, 19 nt, Artificial Sequence
  Description of Artificial Sequence: Synthetic oligonucleotide
  Antisense strand to SEQ ID NO: 1783621
aaguaugaugcugaugaca

SEQ ID NO: 1783623 - RNA, 19 nt, Artificial Sequence
  Description of Artificial Sequence: Synthetic oligonucleotide
  Sense strand starting at position 681 of SEQ ID NO: 1562936
uauugucacugucugggaa

SEQ ID NO: 1783624 - RNA, 19 nt, Artificial Sequence
  Description of Artificial Sequence: Synthetic oligonucleotide
  Antisense strand to SEQ ID NO: 1783623
uucccagacagugacaaua

SEQ ID NO: 1783625 - RNA, 19 nt, Artificial Sequence
  Description of Artificial Sequence: Synthetic oligonucleotide
  Sense strand starting at position 684 of SEQ ID NO: 1562936
ugucacugucugggaagau

SEQ ID NO: 1783626 - RNA, 19 nt, Artificial Sequence
  Description of Artificial Sequence: Synthetic oligonucleotide
  Antisense strand to SEQ ID NO: 1783625
aucuucccagacagugaca

SEQ ID NO: 1783627 - RNA, 19 nt, Artificial Sequence
  Description of Artificial Sequence: Synthetic oligonucleotide
  Sense strand starting at position 789 of SEQ ID NO: 1562936
ugagauaugguaugcaauu

SEQ ID NO: 1783628 - RNA, 19 nt, Artificial Sequence
  Description of Artificial Sequence: Synthetic oligonucleotide
  Antisense strand to SEQ ID NO: 1783627
aauugcauaccauaucuca

SEQ ID NO: 1783629 - RNA, 19 nt, Artificial Sequence
  Description of Artificial Sequence: Synthetic oligonucleotide
  Sense strand starting at position 790 of SEQ ID NO: 1562936
gagauaugguaugcaauug

SEQ ID NO: 1783630 - RNA, 19 nt, Artificial Sequence
  Description of Artificial Sequence: Synthetic oligonucleotide
  Antisense strand to SEQ ID NO: 1783629
caauugcauaccauaucuc

SEQ ID NO: 1783631 - RNA, 19 nt, Artificial Sequence
  Description of Artificial Sequence: Synthetic oligonucleotide
  Sense strand starting at position 948 of SEQ ID NO: 1562936
aaaggcugugugcaacauu

SEQ ID NO: 1783632 - RNA, 19 nt, Artificial Sequence
  Description of Artificial Sequence: Synthetic oligonucleotide
  Antisense strand to SEQ ID NO: 1783631
aauguugcacacagccuuu

SEQ ID NO: 1783633 - RNA, 19 nt, Artificial Sequence
  Description of Artificial Sequence: Synthetic oligonucleotide
  Sense strand starting at position 951 of SEQ ID NO: 1562936
ggcugugugcaacauuaug

SEQ ID NO: 1783634 - RNA, 19 nt, Artificial Sequence
  Description of Artificial Sequence: Synthetic oligonucleotide
  Antisense strand to SEQ ID NO: 1783633
cauaauguugcacacagcc

SEQ ID NO: 1783635 - RNA, 19 nt, Artificial Sequence
  Description of Artificial Sequence: Synthetic oligonucleotide
  Sense strand starting at position 1065 of SEQ ID NO: 1562936
uagaaaugauaugaugaug

SEQ ID NO: 1783636 - RNA, 19 nt, Artificial Sequence
  Description of Artificial Sequence: Synthetic oligonucleotide
  Antisense strand to SEQ ID NO: 1783635
caucaucauaucauuucua

SEQ ID NO: 1783637 - RNA, 19 nt, Artificial Sequence
  Description of Artificial Sequence: Synthetic oligonucleotide
  Sense strand starting at position 1187 of SEQ ID NO: 1562936
agagcuacgacagaaguau

SEQ ID NO: 1783638 - RNA, 19 nt, Artificial Sequence
  Description of Artificial Sequence: Synthetic oligonucleotide
  Antisense strand to SEQ ID NO: 1783637
auacuucugucguagcucu

SEQ ID NO: 1783639 - RNA, 19 nt, Artificial Sequence
  Description of Artificial Sequence: Synthetic oligonucleotide
  Sense strand starting at position 1303 of SEQ ID NO: 1562936
cuuguuuauccagggagac

SEQ ID NO: 1783640 - RNA, 19 nt, Artificial Sequence
  Description of Artificial Sequence: Synthetic oligonucleotide
  Antisense strand to SEQ ID NO: 1783639
gucucccuggauaaacaag

SEQ ID NO: 1783641 - RNA, 19 nt, Artificial Sequence
  Description of Artificial Sequence: Synthetic oligonucleotide
  Sense strand starting at position 1336 of SEQ ID NO: 1562936
ggcagaugccuggaaagca

SEQ ID NO: 1783642 - RNA, 19 nt, Artificial Sequence
  Description of Artificial Sequence: Synthetic oligonucleotide
  Antisense strand to SEQ ID NO: 1783641
ugcuuuccaggcaucugcc

SEQ ID NO: 1783643 - RNA, 19 nt, Artificial Sequence
  Description of Artificial Sequence: Synthetic oligonucleotide
  Sense strand starting at position 1423 of SEQ ID NO: 1562936
auggcuccaugcuugaaga

SEQ ID NO: 1783644 - RNA, 19 nt, Artificial Sequence
  Description of Artificial Sequence: Synthetic oligonucleotide
  Antisense strand to SEQ ID NO: 1783643
ucuucaagcauggagccau

SEQ ID NO: 1783645 - RNA, 19 nt, Artificial Sequence
  Description of Artificial Sequence: Synthetic oligonucleotide
  Sense strand starting at position 1621 of SEQ ID NO: 1562936
uugccaucuaaguggguaa

SEQ ID NO: 1783646 - RNA, 19 nt, Artificial Sequence
  Description of Artificial Sequence: Synthetic oligonucleotide
  Antisense strand to SEQ ID NO: 1783645
uuacccacuuagauggcaa

SEQ ID NO: 1783647 - RNA, 19 nt, Artificial Sequence
  Description of Artificial Sequence: Synthetic oligonucleotide
  Sense strand starting at position 1633 of SEQ ID NO: 1562936
uggguaagcuaucuuucga

SEQ ID NO: 1783648 - RNA, 19 nt, Artificial Sequence
  Description of Artificial Sequence: Synthetic oligonucleotide
  Antisense strand to SEQ ID NO: 1783647
ucgaaagauagcuuaccca

SEQ ID NO: 1783649 - RNA, 19 nt, Artificial Sequence
  Description of Artificial Sequence: Synthetic oligonucleotide
  Sense strand starting at position 1640 of SEQ ID NO: 1562936
gcuaucuuucgauaaaugu

SEQ ID NO: 1783650 - RNA, 19 nt, Artificial Sequence
  Description of Artificial Sequence: Synthetic oligonucleotide
  Antisense strand to SEQ ID NO: 1783649
acauuuaucgaaagauagc

SEQ ID NO: 1783651 - RNA, 19 nt, Artificial Sequence
  Description of Artificial Sequence: Synthetic oligonucleotide
  Sense strand starting at position 2432 of SEQ ID NO: 1562936
cgaaauuucuucugaagaa

SEQ ID NO: 1783652 - RNA, 19 nt, Artificial Sequence
  Description of Artificial Sequence: Synthetic oligonucleotide
  Antisense strand to SEQ ID NO: 1783651
uucuucagaagaaauuucg

SEQ ID NO: 1783653 - RNA, 19 nt, Artificial Sequence
  Description of Artificial Sequence: Synthetic oligonucleotide
  Sense strand starting at position 2469 of SEQ ID NO: 1562936
gagugagcucaguggagga

SEQ ID NO: 1783654 - RNA, 19 nt, Artificial Sequence
  Description of Artificial Sequence: Synthetic oligonucleotide
  Antisense strand to SEQ ID NO: 1783653
uccuccacugagcucacuc

SEQ ID NO: 1783655 - RNA, 19 nt, Artificial Sequence
  Description of Artificial Sequence: Synthetic oligonucleotide
  Sense strand starting at position 2522 of SEQ ID NO: 1562936
gcuugugaaccucgaauau

SEQ ID NO: 1783656 - RNA, 19 nt, Artificial Sequence
  Description of Artificial Sequence: Synthetic oligonucleotide
  Antisense strand to SEQ ID NO: 1783655
auauucgagguucacaagc

SEQ ID NO: 1783657 - RNA, 19 nt, Artificial Sequence
  Description of Artificial Sequence: Synthetic oligonucleotide
  Sense strand starting at position 2526 of SEQ ID NO: 1562936
gugaaccucgaauauguga

SEQ ID NO: 1783658 - RNA, 19 nt, Artificial Sequence
  Description of Artificial Sequence: Synthetic oligonucleotide
  Antisense strand to SEQ ID NO: 1783657
ucacauauucgagguucac

SEQ ID NO: 1783659 - RNA, 19 nt, Artificial Sequence
  Description of Artificial Sequence: Synthetic oligonucleotide
  Sense strand starting at position 2615 of SEQ ID NO: 1562936
gaggucuugacaugugcca

SEQ ID NO: 1783660 - RNA, 19 nt, Artificial Sequence
  Description of Artificial Sequence: Synthetic oligonucleotide
  Antisense strand to SEQ ID NO: 1783659
uggcacaugucaagaccuc

SEQ ID NO: 1783661 - RNA, 19 nt, Artificial Sequence
  Description of Artificial Sequence: Synthetic oligonucleotide
  Sense strand starting at position 2617 of SEQ ID NO: 1562936
ggucuugacaugugccaaa

SEQ ID NO: 1783662 - RNA, 19 nt, Artificial Sequence
  Description of Artificial Sequence: Synthetic oligonucleotide
  Antisense strand to SEQ ID NO: 1783661
uuuggcacaugucaagacc

SEQ ID NO: 1783663 - RNA, 19 nt, Artificial Sequence
  Description of Artificial Sequence: Synthetic oligonucleotide
  Sense strand starting at position 2791 of SEQ ID NO: 1562936
ucuuucggguuucugaaua

SEQ ID NO: 1783664 - RNA, 19 nt, Artificial Sequence
  Description of Artificial Sequence: Synthetic oligonucleotide
  Antisense strand to SEQ ID NO: 1783663
uauucagaaacccgaaaga

SEQ ID NO: 1783665 - RNA, 19 nt, Artificial Sequence
  Description of Artificial Sequence: Synthetic oligonucleotide
  Sense strand starting at position 2838 of SEQ ID NO: 1562936
aaccuaucucagugagcag

SEQ ID NO: 1783666 - RNA, 19 nt, Artificial Sequence
  Description of Artificial Sequence: Synthetic oligonucleotide
  Antisense strand to SEQ ID NO: 1783665
cugcucacugagauagguu

SEQ ID NO: 1783667 - RNA, 19 nt, Artificial Sequence
  Description of Artificial Sequence: Synthetic oligonucleotide
  Sense strand starting at position 3100 of SEQ ID NO: 1562936
augugugaacccuaucuga

SEQ ID NO: 1783668 - RNA, 19 nt, Artificial Sequence
  Description of Artificial Sequence: Synthetic oligonucleotide
  Antisense strand to SEQ ID NO: 1783667
ucagauaggguucacacau

SEQ ID NO: 1783669 - RNA, 19 nt, Artificial Sequence
  Description of Artificial Sequence: Synthetic oligonucleotide
  Sense strand starting at position 3103 of SEQ ID NO: 1562936
ugugaacccuaucugagau

SEQ ID NO: 1783670 - RNA, 19 nt, Artificial Sequence
  Description of Artificial Sequence: Synthetic oligonucleotide
  Antisense strand to SEQ ID NO: 1783669
aucucagauaggguucaca

SEQ ID NO: 1783671 - RNA, 19 nt, Artificial Sequence
  Description of Artificial Sequence: Synthetic oligonucleotide
  Sense strand starting at position 3377 of SEQ ID NO: 1562936
ggaaucagauaugcaccua

SEQ ID NO: 1783672 - RNA, 19 nt, Artificial Sequence
  Description of Artificial Sequence: Synthetic oligonucleotide
  Antisense strand to SEQ ID NO: 1783671
uaggugcauaucugauucc

SEQ ID NO: 1783673 - RNA, 19 nt, Artificial Sequence
  Description of Artificial Sequence: Synthetic oligonucleotide
  Sense strand starting at position 3389 of SEQ ID NO: 1562936
gcaccuaucuuagugagga

SEQ ID NO: 1783674 - RNA, 19 nt, Artificial Sequence
  Description of Artificial Sequence: Synthetic oligonucleotide
  Antisense strand to SEQ ID NO: 1783673
uccucacuaagauaggugc

SEQ ID NO: 1783675 - RNA, 19 nt, Artificial Sequence
  Description of Artificial Sequence: Synthetic oligonucleotide
  Sense strand starting at position 3620 of SEQ ID NO: 1562936
ggagacauuuaggagguaa

SEQ ID NO: 1783676 - RNA, 19 nt, Artificial Sequence
  Description of Artificial Sequence: Synthetic oligonucleotide
  Antisense strand to SEQ ID NO: 1783675
uuaccuccuaaaugucucc

SEQ ID NO: 1783677 - RNA, 19 nt, Artificial Sequence
  Description of Artificial Sequence: Synthetic oligonucleotide
  Sense strand starting at position 3635 of SEQ ID NO: 1562936
guaagauugcuaggaccuu

SEQ ID NO: 1783678 - RNA, 19 nt, Artificial Sequence
  Description of Artificial Sequence: Synthetic oligonucleotide
  Antisense strand to SEQ ID NO: 1783677
aagguccuagcaaucuuac

SEQ ID NO: 1783679 - RNA, 19 nt, Artificial Sequence
  Description of Artificial Sequence: Synthetic oligonucleotide
  Sense strand starting at position 3653 of SEQ ID NO: 1562936
uggugauagcuuggacaug

SEQ ID NO: 1783680 - RNA, 19 nt, Artificial Sequence
  Description of Artificial Sequence: Synthetic oligonucleotide
  Antisense strand to SEQ ID NO: 1783679
cauguccaagcuaucacca

SEQ ID NO: 1783681 - RNA, 19 nt, Artificial Sequence
  Description of Artificial Sequence: Synthetic oligonucleotide
  Sense strand starting at position 3688 of SEQ ID NO: 1562936
gggugucuagcagauaaug

SEQ ID NO: 1783682 - RNA, 19 nt, Artificial Sequence
  Description of Artificial Sequence: Synthetic oligonucleotide
  Antisense strand to SEQ ID NO: 1783681
cauuaucugcuagacaccc

SEQ ID NO: 1783683 - RNA, 19 nt, Artificial Sequence
  Description of Artificial Sequence: Synthetic oligonucleotide
  Sense strand starting at position 3690 of SEQ ID NO: 1562936
gugucuagcagauaaugcu

SEQ ID NO: 1783684 - RNA, 19 nt, Artificial Sequence
  Description of Artificial Sequence: Synthetic oligonucleotide
  Antisense strand to SEQ ID NO: 1783683
agcauuaucugcuagacac

SEQ ID NO: 1783685 - RNA, 19 nt, Artificial Sequence
  Description of Artificial Sequence: Synthetic oligonucleotide
  Sense strand starting at position 3712 of SEQ ID NO: 1562936
agguuaccaccugggauau

SEQ ID NO: 1783686 - RNA, 19 nt, Artificial Sequence
  Description of Artificial Sequence: Synthetic oligonucleotide
  Antisense strand to SEQ ID NO: 1783685
auaucccaggugguaaccu

SEQ ID NO: 1783687 - RNA, 19 nt, Artificial Sequence
  Description of Artificial Sequence: Synthetic oligonucleotide
  Sense strand starting at position 3713 of SEQ ID NO: 1562936
gguuaccaccugggauauu

SEQ ID NO: 1783688 - RNA, 19 nt, Artificial Sequence
  Description of Artificial Sequence: Synthetic oligonucleotide
  Antisense strand to SEQ ID NO: 1783687
aauaucccaggugguaacc

SEQ ID NO: 1783689 - RNA, 19 nt, Artificial Sequence
  Description of Artificial Sequence: Synthetic oligonucleotide
  Sense strand starting at position 3754 of SEQ ID NO: 1562936
uuuguuucuuaggcagaac

SEQ ID NO: 1783690 - RNA, 19 nt, Artificial Sequence
  Description of Artificial Sequence: Synthetic oligonucleotide
  Antisense strand to SEQ ID NO: 1783689
guucugccuaagaaacaaa

SEQ ID NO: 1783691 - RNA, 19 nt, Artificial Sequence
  Description of Artificial Sequence: Synthetic oligonucleotide
  Sense strand starting at position 3810 of SEQ ID NO: 1562936
gccugacuuccucauacag

SEQ ID NO: 1783692 - RNA, 19 nt, Artificial Sequence
  Description of Artificial Sequence: Synthetic oligonucleotide
  Antisense strand to SEQ ID NO: 1783691
cuguaugaggaagucaggc

SEQ ID NO: 1783693 - RNA, 19 nt, Artificial Sequence
  Description of Artificial Sequence: Synthetic oligonucleotide
  Sense strand starting at position 3855 of SEQ ID NO: 1562936
ccacuuugaggcugagaga

SEQ ID NO: 1783694 - RNA, 19 nt, Artificial Sequence
  Description of Artificial Sequence: Synthetic oligonucleotide
  Antisense strand to SEQ ID NO: 1783693
ucucucagccucaaagugg

SEQ ID NO: 1783695 - RNA, 19 nt, Artificial Sequence
  Description of Artificial Sequence: Synthetic oligonucleotide
  Sense strand starting at position 3974 of SEQ ID NO: 1562936
aggucuuuaguccaaucua

SEQ ID NO: 1783696 - RNA, 19 nt, Artificial Sequence
  Description of Artificial Sequence: Synthetic oligonucleotide
  Antisense strand to SEQ ID NO: 1783695
uagauuggacuaaagaccu

SEQ ID NO: 1783697 - RNA, 19 nt, Artificial Sequence
  Description of Artificial Sequence: Synthetic oligonucleotide
  Sense strand starting at position 76 of SEQ ID NO: 1562937
uagguuuggugagaggaua

SEQ ID NO: 1783698 - RNA, 19 nt, Artificial Sequence
  Description of Artificial Sequence: Synthetic oligonucleotide
  Antisense strand to SEQ ID NO: 1783697
uauccucucaccaaaccua

SEQ ID NO: 1783699 - RNA, 19 nt, Artificial Sequence
  Description of Artificial Sequence: Synthetic oligonucleotide
  Sense strand starting at position 260 of SEQ ID NO: 1562937
gucacuuccugcucagaga

SEQ ID NO: 1783700 - RNA, 19 nt, Artificial Sequence
  Description of Artificial Sequence: Synthetic oligonucleotide
  Antisense strand to SEQ ID NO: 1783699
ucucugagcaggaagugac

SEQ ID NO: 1783701 - RNA, 19 nt, Artificial Sequence
  Description of Artificial Sequence: Synthetic oligonucleotide
  Sense strand starting at position 261 of SEQ ID NO: 1562937
ucacuuccugcucagagaa

SEQ ID NO: 1783702 - RNA, 19 nt, Artificial Sequence
  Description of Artificial Sequence: Synthetic oligonucleotide
  Antisense strand to SEQ ID NO: 1783701
uucucugagcaggaaguga

SEQ ID NO: 1783703 - RNA, 19 nt, Artificial Sequence
  Description of Artificial Sequence: Synthetic oligonucleotide
  Sense strand starting at position 263 of SEQ ID NO: 1562937
acuuccugcucagagaaga

SEQ ID NO: 1783704 - RNA, 19 nt, Artificial Sequence
  Description of Artificial Sequence: Synthetic oligonucleotide
  Antisense strand to SEQ ID NO: 1783703
ucuucucugagcaggaagu

SEQ ID NO: 1783705 - RNA, 19 nt, Artificial Sequence
  Description of Artificial Sequence: Synthetic oligonucleotide
  Sense strand starting at position 319 of SEQ ID NO: 1562937
gccugccaccgagguaauu

SEQ ID NO: 1783706 - RNA, 19 nt, Artificial Sequence
  Description of Artificial Sequence: Synthetic oligonucleotide
  Antisense strand to SEQ ID NO: 1783705
aauuaccucgguggcaggc

SEQ ID NO: 1783707 - RNA, 19 nt, Artificial Sequence
  Description of Artificial Sequence: Synthetic oligonucleotide
  Sense strand starting at position 537 of SEQ ID NO: 1562937
agagcugagucucucaaag

SEQ ID NO: 1783708 - RNA, 19 nt, Artificial Sequence
  Description of Artificial Sequence: Synthetic oligonucleotide
  Antisense strand to SEQ ID NO: 1783707
cuuugagagacucagcucu

SEQ ID NO: 1783709 - RNA, 19 nt, Artificial Sequence
  Description of Artificial Sequence: Synthetic oligonucleotide
  Sense strand starting at position 884 of SEQ ID NO: 1562937
agacauagguucucgcuau

SEQ ID NO: 1783710 - RNA, 19 nt, Artificial Sequence
  Description of Artificial Sequence: Synthetic oligonucleotide
  Antisense strand to SEQ ID NO: 1783709
auagcgagaaccuaugucu

SEQ ID NO: 1783711 - RNA, 19 nt, Artificial Sequence
  Description of Artificial Sequence: Synthetic oligonucleotide
  Sense strand starting at position 1053 of SEQ ID NO: 1562937
gccugaagucacugggauc

SEQ ID NO: 1783712 - RNA, 19 nt, Artificial Sequence
  Description of Artificial Sequence: Synthetic oligonucleotide
  Antisense strand to SEQ ID NO: 1783711
gaucccagugacuucaggc

SEQ ID NO: 1783713 - RNA, 19 nt, Artificial Sequence
  Description of Artificial Sequence: Synthetic oligonucleotide
  Sense strand starting at position 1056 of SEQ ID NO: 1562937
ugaagucacugggaucuga

SEQ ID NO: 1783714 - RNA, 19 nt, Artificial Sequence
  Description of Artificial Sequence: Synthetic oligonucleotide
  Antisense strand to SEQ ID NO: 1783713
ucagaucccagugacuuca

SEQ ID NO: 1783715 - RNA, 19 nt, Artificial Sequence
  Description of Artificial Sequence: Synthetic oligonucleotide
  Sense strand starting at position 1340 of SEQ ID NO: 1562937
ggccuccucccagaugaau

SEQ ID NO: 1783716 - RNA, 19 nt, Artificial Sequence
  Description of Artificial Sequence: Synthetic oligonucleotide
  Antisense strand to SEQ ID NO: 1783715
auucaucugggaggaggcc

SEQ ID NO: 1783717 - RNA, 19 nt, Artificial Sequence
  Description of Artificial Sequence: Synthetic oligonucleotide
  Sense strand starting at position 1351 of SEQ ID NO: 1562937
agaugaauaagcugagguu

SEQ ID NO: 1783718 - RNA, 19 nt, Artificial Sequence
  Description of Artificial Sequence: Synthetic oligonucleotide
  Antisense strand to SEQ ID NO: 1783717
aaccucagcuuauucaucu

SEQ ID NO: 1783719 - RNA, 19 nt, Artificial Sequence
  Description of Artificial Sequence: Synthetic oligonucleotide
  Sense strand starting at position 1865 of SEQ ID NO: 1562937
gagagugucgguggugaca

SEQ ID NO: 1783720 - RNA, 19 nt, Artificial Sequence
  Description of Artificial Sequence: Synthetic oligonucleotide
  Antisense strand to SEQ ID NO: 1783719
ugucaccaccgacacucuc

SEQ ID NO: 1783721 - RNA, 19 nt, Artificial Sequence
  Description of Artificial Sequence: Synthetic oligonucleotide
  Sense strand starting at position 2179 of SEQ ID NO: 1562937
cccagaggcuguucuccaa

SEQ ID NO: 1783722 - RNA, 19 nt, Artificial Sequence
  Description of Artificial Sequence: Synthetic oligonucleotide
  Antisense strand to SEQ ID NO: 1783721
uuggagaacagccucuggg

SEQ ID NO: 1783723 - RNA, 19 nt, Artificial Sequence
  Description of Artificial Sequence: Synthetic oligonucleotide
  Sense strand starting at position 2183 of SEQ ID NO: 1562937
gaggcuguucuccaagaac

SEQ ID NO: 1783724 - RNA, 19 nt, Artificial Sequence
  Description of Artificial Sequence: Synthetic oligonucleotide
  Antisense strand to SEQ ID NO: 1783723
guucuuggagaacagccuc

SEQ ID NO: 1783725 - RNA, 19 nt, Artificial Sequence
  Description of Artificial Sequence: Synthetic oligonucleotide
  Sense strand starting at position 2186 of SEQ ID NO: 1562937
gcuguucuccaagaacuug

SEQ ID NO: 1783726 - RNA, 19 nt, Artificial Sequence
  Description of Artificial Sequence: Synthetic oligonucleotide
  Antisense strand to SEQ ID NO: 1783725
caaguucuuggagaacagc

SEQ ID NO: 1783727 - RNA, 19 nt, Artificial Sequence
  Description of Artificial Sequence: Synthetic oligonucleotide
  Sense strand starting at position 2200 of SEQ ID NO: 1562937
acuugaggguuccaagaau

SEQ ID NO: 1783728 - RNA, 19 nt, Artificial Sequence
  Description of Artificial Sequence: Synthetic oligonucleotide
  Antisense strand to SEQ ID NO: 1783727
auucuuggaacccucaagu

SEQ ID NO: 1783729 - RNA, 19 nt, Artificial Sequence
  Description of Artificial Sequence: Synthetic oligonucleotide
  Sense strand starting at position 2289 of SEQ ID NO: 1562937
uggugaucccaggaugcaa

SEQ ID NO: 1783730 - RNA, 19 nt, Artificial Sequence
  Description of Artificial Sequence: Synthetic oligonucleotide
  Antisense strand to SEQ ID NO: 1783729
uugcauccugggaucacca

SEQ ID NO: 1783731 - RNA, 19 nt, Artificial Sequence
  Description of Artificial Sequence: Synthetic oligonucleotide
  Sense strand starting at position 2738 of SEQ ID NO: 1562937
gcccauuucccugaugcga

SEQ ID NO: 1783732 - RNA, 19 nt, Artificial Sequence
  Description of Artificial Sequence: Synthetic oligonucleotide
  Antisense strand to SEQ ID NO: 1783731
ucgcaucagggaaaugggc

SEQ ID NO: 1783733 - RNA, 19 nt, Artificial Sequence
  Description of Artificial Sequence: Synthetic oligonucleotide
  Sense strand starting at position 2740 of SEQ ID NO: 1562937
ccauuucccugaugcgaaa

SEQ ID NO: 1783734 - RNA, 19 nt, Artificial Sequence
  Description of Artificial Sequence: Synthetic oligonucleotide
  Antisense strand to SEQ ID NO: 1783733
uuucgcaucagggaaaugg

SEQ ID NO: 1783735 - RNA, 19 nt, Artificial Sequence
  Description of Artificial Sequence: Synthetic oligonucleotide
  Sense strand starting at position 2758 of SEQ ID NO: 1562937
aacugagggucugagaagu

SEQ ID NO: 1783736 - RNA, 19 nt, Artificial Sequence
  Description of Artificial Sequence: Synthetic oligonucleotide
  Antisense strand to SEQ ID NO: 1783735
acuucucagacccucaguu

SEQ ID NO: 1783737 - RNA, 19 nt, Artificial Sequence
  Description of Artificial Sequence: Synthetic oligonucleotide
  Sense strand starting at position 2858 of SEQ ID NO: 1562937
ugcuguuugaagggacaaa

SEQ ID NO: 1783738 - RNA, 19 nt, Artificial Sequence
  Description of Artificial Sequence: Synthetic oligonucleotide
  Antisense strand to SEQ ID NO: 1783737
uuugucccuucaaacagca

SEQ ID NO: 1783739 - RNA, 19 nt, Artificial Sequence
  Description of Artificial Sequence: Synthetic oligonucleotide
  Sense strand starting at position 2879 of SEQ ID NO: 1562937
cugaguucugcagcuugca

SEQ ID NO: 1783740 - RNA, 19 nt, Artificial Sequence
  Description of Artificial Sequence: Synthetic oligonucleotide
  Antisense strand to SEQ ID NO: 1783739
ugcaagcugcagaacucag

SEQ ID NO: 1783741 - RNA, 19 nt, Artificial Sequence
  Description of Artificial Sequence: Synthetic oligonucleotide
  Sense strand starting at position 2928 of SEQ ID NO: 1562937
cguggacucgggugaauau

SEQ ID NO: 1783742 - RNA, 19 nt, Artificial Sequence
  Description of Artificial Sequence: Synthetic oligonucleotide
  Antisense strand to SEQ ID NO: 1783741
auauucacccgaguccacg

SEQ ID NO: 1783743 - RNA, 19 nt, Artificial Sequence
  Description of Artificial Sequence: Synthetic oligonucleotide
  Sense strand starting at position 2929 of SEQ ID NO: 1562937
guggacucgggugaauauu

SEQ ID NO: 1783744 - RNA, 19 nt, Artificial Sequence
  Description of Artificial Sequence: Synthetic oligonucleotide
  Antisense strand to SEQ ID NO: 1783743
aauauucacccgaguccac

SEQ ID NO: 1783745 - RNA, 19 nt, Artificial Sequence
  Description of Artificial Sequence: Synthetic oligonucleotide
  Sense strand starting at position 3260 of SEQ ID NO: 1562937
gggcaagucaacuguuaaa

SEQ ID NO: 1783746 - RNA, 19 nt, Artificial Sequence
  Description of Artificial Sequence: Synthetic oligonucleotide
  Antisense strand to SEQ ID NO: 1783745
uuuaacaguugacuugccc

SEQ ID NO: 1783747 - RNA, 19 nt, Artificial Sequence
  Description of Artificial Sequence: Synthetic oligonucleotide
  Sense strand starting at position 3272 of SEQ ID NO: 1562937
uguuaaagcuaccagcaaa

SEQ ID NO: 1783748 - RNA, 19 nt, Artificial Sequence
  Description of Artificial Sequence: Synthetic oligonucleotide
  Antisense strand to SEQ ID NO: 1783747
uuugcugguagcuuuaaca

SEQ ID NO: 1783749 - RNA, 19 nt, Artificial Sequence
  Description of Artificial Sequence: Synthetic oligonucleotide
  Sense strand starting at position 3283 of SEQ ID NO: 1562937
ccagcaaaccggugucuuu

SEQ ID NO: 1783750 - RNA, 19 nt, Artificial Sequence
  Description of Artificial Sequence: Synthetic oligonucleotide
  Antisense strand to SEQ ID NO: 1783749
aaagacaccgguuugcugg

SEQ ID NO: 1783751 - RNA, 19 nt, Artificial Sequence
  Description of Artificial Sequence: Synthetic oligonucleotide
  Sense strand starting at position 3294 of SEQ ID NO: 1562937
gugucuuuccucugcacuu

SEQ ID NO: 1783752 - RNA, 19 nt, Artificial Sequence
  Description of Artificial Sequence: Synthetic oligonucleotide
  Antisense strand to SEQ ID NO: 1783751
aagugcagaggaaagacac

SEQ ID NO: 1783753 - RNA, 19 nt, Artificial Sequence
  Description of Artificial Sequence: Synthetic oligonucleotide
  Sense strand starting at position 3399 of SEQ ID NO: 1562937
aggacuuuguucuggauac

SEQ ID NO: 1783754 - RNA, 19 nt, Artificial Sequence
  Description of Artificial Sequence: Synthetic oligonucleotide
  Antisense strand to SEQ ID NO: 1783753
guauccagaacaaaguccu

SEQ ID NO: 1783755 - RNA, 19 nt, Artificial Sequence
  Description of Artificial Sequence: Synthetic oligonucleotide
  Sense strand starting at position 3400 of SEQ ID NO: 1562937
ggacuuuguucuggauacu

SEQ ID NO: 1783756 - RNA, 19 nt, Artificial Sequence
  Description of Artificial Sequence: Synthetic oligonucleotide
  Antisense strand to SEQ ID NO: 1783755
aguauccagaacaaagucc

SEQ ID NO: 1783757 - RNA, 19 nt, Artificial Sequence
  Description of Artificial Sequence: Synthetic oligonucleotide
  Sense strand starting at position 3401 of SEQ ID NO: 1562937
gacuuuguucuggauacuu

SEQ ID NO: 1783758 - RNA, 19 nt, Artificial Sequence
  Description of Artificial Sequence: Synthetic oligonucleotide
  Antisense strand to SEQ ID NO: 1783757
aaguauccagaacaaaguc

SEQ ID NO: 1783759 - RNA, 19 nt, Artificial Sequence
  Description of Artificial Sequence: Synthetic oligonucleotide
  Sense strand starting at position 3460 of SEQ ID NO: 1562937
gggcaaccucuguguuaau

SEQ ID NO: 1783760 - RNA, 19 nt, Artificial Sequence
  Description of Artificial Sequence: Synthetic oligonucleotide
  Antisense strand to SEQ ID NO: 1783759
auuaacacagagguugccc

SEQ ID NO: 1783761 - RNA, 19 nt, Artificial Sequence
  Description of Artificial Sequence: Synthetic oligonucleotide
  Sense strand starting at position 3461 of SEQ ID NO: 1562937
ggcaaccucuguguuaauu

SEQ ID NO: 1783762 - RNA, 19 nt, Artificial Sequence
  Description of Artificial Sequence: Synthetic oligonucleotide
  Antisense strand to SEQ ID NO: 1783761
aauuaacacagagguugcc

SEQ ID NO: 1783763 - RNA, 19 nt, Artificial Sequence
  Description of Artificial Sequence: Synthetic oligonucleotide
  Sense strand starting at position 3580 of SEQ ID NO: 1562937
aaguucugguguccuguua

SEQ ID NO: 1783764 - RNA, 19 nt, Artificial Sequence
  Description of Artificial Sequence: Synthetic oligonucleotide
  Antisense strand to SEQ ID NO: 1783763
uaacaggacaccagaacuu

SEQ ID NO: 1783765 - RNA, 19 nt, Artificial Sequence
  Description of Artificial Sequence: Synthetic oligonucleotide
  Sense strand starting at position 3623 of SEQ ID NO: 1562937
cucaaucucgugcauauuu

SEQ ID NO: 1783766 - RNA, 19 nt, Artificial Sequence
  Description of Artificial Sequence: Synthetic oligonucleotide
  Antisense strand to SEQ ID NO: 1783765
aaauaugcacgagauugag

SEQ ID NO: 1783767 - RNA, 19 nt, Artificial Sequence
  Description of Artificial Sequence: Synthetic oligonucleotide
  Sense strand starting at position 3699 of SEQ ID NO: 1562937
aagugauggaugugggaau

SEQ ID NO: 1783768 - RNA, 19 nt, Artificial Sequence
  Description of Artificial Sequence: Synthetic oligonucleotide
  Antisense strand to SEQ ID NO: 1783767
auucccacauccaucacuu

SEQ ID NO: 1783769 - RNA, 19 nt, Artificial Sequence
  Description of Artificial Sequence: Synthetic oligonucleotide
  Sense strand starting at position 3700 of SEQ ID NO: 1562937
agugauggaugugggaauu

SEQ ID NO: 1783770 - RNA, 19 nt, Artificial Sequence
  Description of Artificial Sequence: Synthetic oligonucleotide
  Antisense strand to SEQ ID NO: 1783769
aauucccacauccaucacu

SEQ ID NO: 1783771 - RNA, 19 nt, Artificial Sequence
  Description of Artificial Sequence: Synthetic oligonucleotide
  Sense strand starting at position 3734 of SEQ ID NO: 1562937
aucauuauacgguguauac

SEQ ID NO: 1783772 - RNA, 19 nt, Artificial Sequence
  Description of Artificial Sequence: Synthetic oligonucleotide
  Antisense strand to SEQ ID NO: 1783771
guauacaccguauaaugau

SEQ ID NO: 1783773 - RNA, 19 nt, Artificial Sequence
  Description of Artificial Sequence: Synthetic oligonucleotide
  Sense strand starting at position 3736 of SEQ ID NO: 1562937
cauuauacgguguauacau

SEQ ID NO: 1783774 - RNA, 19 nt, Artificial Sequence
  Description of Artificial Sequence: Synthetic oligonucleotide
  Antisense strand to SEQ ID NO: 1783773
auguauacaccguauaaug

SEQ ID NO: 1783775 - RNA, 19 nt, Artificial Sequence
  Description of Artificial Sequence: Synthetic oligonucleotide
  Sense strand starting at position 3744 of SEQ ID NO: 1562937
gguguauacaugcauugga

SEQ ID NO: 1783776 - RNA, 19 nt, Artificial Sequence
  Description of Artificial Sequence: Synthetic oligonucleotide
  Antisense strand to SEQ ID NO: 1783775
uccaaugcauguauacacc

SEQ ID NO: 1783777 - RNA, 19 nt, Artificial Sequence
  Description of Artificial Sequence: Synthetic oligonucleotide
  Sense strand starting at position 640 of SEQ ID NO: 1562938
gccucuagagcuggcuaaa

SEQ ID NO: 1783778 - RNA, 19 nt, Artificial Sequence
  Description of Artificial Sequence: Synthetic oligonucleotide
  Antisense strand to SEQ ID NO: 1783777
uuuagccagcucuagaggc

SEQ ID NO: 1783779 - RNA, 19 nt, Artificial Sequence
  Description of Artificial Sequence: Synthetic oligonucleotide
  Sense strand starting at position 697 of SEQ ID NO: 1562938
gccagaagccaggaucaua

SEQ ID NO: 1783780 - RNA, 19 nt, Artificial Sequence
  Description of Artificial Sequence: Synthetic oligonucleotide
  Antisense strand to SEQ ID NO: 1783779
uaugauccuggcuucuggc

SEQ ID NO: 1783781 - RNA, 19 nt, Artificial Sequence
  Description of Artificial Sequence: Synthetic oligonucleotide
  Sense strand starting at position 928 of SEQ ID NO: 1562938
gagcacuucccuugugaca

SEQ ID NO: 1783782 - RNA, 19 nt, Artificial Sequence
  Description of Artificial Sequence: Synthetic oligonucleotide
  Antisense strand to SEQ ID NO: 1783781
ugucacaagggaagugcuc

SEQ ID NO: 1783783 - RNA, 19 nt, Artificial Sequence
  Description of Artificial Sequence: Synthetic oligonucleotide
  Sense strand starting at position 947 of SEQ ID NO: 1562938
ggccacuucccuugugaca

SEQ ID NO: 1783784 - RNA, 19 nt, Artificial Sequence
  Description of Artificial Sequence: Synthetic oligonucleotide
  Antisense strand to SEQ ID NO: 1783783
ugucacaagggaaguggcc

SEQ ID NO: 1783785 - RNA, 19 nt, Artificial Sequence
  Description of Artificial Sequence: Synthetic oligonucleotide
  Sense strand starting at position 1035 of SEQ ID NO: 1562938
gagugagaaccucgacaac

SEQ ID NO: 1783786 - RNA, 19 nt, Artificial Sequence
  Description of Artificial Sequence: Synthetic oligonucleotide
  Antisense strand to SEQ ID NO: 1783785
guugucgagguucucacuc

SEQ ID NO: 1783787 - RNA, 19 nt, Artificial Sequence
  Description of Artificial Sequence: Synthetic oligonucleotide
  Sense strand starting at position 1117 of SEQ ID NO: 1562938
caggaaaccugccagagaa

SEQ ID NO: 1783788 - RNA, 19 nt, Artificial Sequence
  Description of Artificial Sequence: Synthetic oligonucleotide
  Antisense strand to SEQ ID NO: 1783787
uucucuggcagguuuccug

SEQ ID NO: 1783789 - RNA, 19 nt, Artificial Sequence
  Description of Artificial Sequence: Synthetic oligonucleotide
  Sense strand starting at position 1245 of SEQ ID NO: 1562938
cugggugucccauaaggaa

SEQ ID NO: 1783790 - RNA, 19 nt, Artificial Sequence
  Description of Artificial Sequence: Synthetic oligonucleotide
  Antisense strand to SEQ ID NO: 1783789
uuccuuaugggacacccag

SEQ ID NO: 1783791 - RNA, 19 nt, Artificial Sequence
  Description of Artificial Sequence: Synthetic oligonucleotide
  Sense strand starting at position 1492 of SEQ ID NO: 1562938
agggaugacuuguuuaccu

SEQ ID NO: 1783792 - RNA, 19 nt, Artificial Sequence
  Description of Artificial Sequence: Synthetic oligonucleotide
  Antisense strand to SEQ ID NO: 1783791
agguaaacaagucaucccu

SEQ ID NO: 1783793 - RNA, 19 nt, Artificial Sequence
  Description of Artificial Sequence: Synthetic oligonucleotide
  Sense strand starting at position 1494 of SEQ ID NO: 1562938
ggaugacuuguuuaccucu

SEQ ID NO: 1783794 - RNA, 19 nt, Artificial Sequence
  Description of Artificial Sequence: Synthetic oligonucleotide
  Antisense strand to SEQ ID NO: 1783793
agagguaaacaagucaucc

SEQ ID NO: 1783795 - RNA, 19 nt, Artificial Sequence
  Description of Artificial Sequence: Synthetic oligonucleotide
  Sense strand starting at position 1500 of SEQ ID NO: 1562938
cuuguuuaccucugagauc

SEQ ID NO: 1783796 - RNA, 19 nt, Artificial Sequence
  Description of Artificial Sequence: Synthetic oligonucleotide
  Antisense strand to SEQ ID NO: 1783795
gaucucagagguaaacaag

SEQ ID NO: 1783797 - RNA, 19 nt, Artificial Sequence
  Description of Artificial Sequence: Synthetic oligonucleotide
  Sense strand starting at position 1501 of SEQ ID NO: 1562938
uuguuuaccucugagaucu

SEQ ID NO: 1783798 - RNA, 19 nt, Artificial Sequence
  Description of Artificial Sequence: Synthetic oligonucleotide
  Antisense strand to SEQ ID NO: 1783797
agaucucagagguaaacaa

SEQ ID NO: 1783799 - RNA, 19 nt, Artificial Sequence
  Description of Artificial Sequence: Synthetic oligonucleotide
  Sense strand starting at position 1503 of SEQ ID NO: 1562938
guuuaccucugagaucuuu

SEQ ID NO: 1783800 - RNA, 19 nt, Artificial Sequence
  Description of Artificial Sequence: Synthetic oligonucleotide
  Antisense strand to SEQ ID NO: 1783799
aaagaucucagagguaaac

SEQ ID NO: 1783801 - RNA, 19 nt, Artificial Sequence
  Description of Artificial Sequence: Synthetic oligonucleotide
  Sense strand starting at position 2139 of SEQ ID NO: 1562938
ccgaucugcuccucuuaca

SEQ ID NO: 1783802 - RNA, 19 nt, Artificial Sequence
  Description of Artificial Sequence: Synthetic oligonucleotide
  Antisense strand to SEQ ID NO: 1783801
uguaagaggagcagaucgg

SEQ ID NO: 1783803 - RNA, 19 nt, Artificial Sequence
  Description of Artificial Sequence: Synthetic oligonucleotide
  Sense strand starting at position 2368 of SEQ ID NO: 1562938
cugguaacaucacauaguu

SEQ ID NO: 1783804 - RNA, 19 nt, Artificial Sequence
  Description of Artificial Sequence: Synthetic oligonucleotide
  Antisense strand to SEQ ID NO: 1783803
aacuaugugauguuaccag

SEQ ID NO: 1783805 - RNA, 19 nt, Artificial Sequence
  Description of Artificial Sequence: Synthetic oligonucleotide
  Sense strand starting at position 2370 of SEQ ID NO: 1562938
gguaacaucacauaguugu

SEQ ID NO: 1783806 - RNA, 19 nt, Artificial Sequence
  Description of Artificial Sequence: Synthetic oligonucleotide
  Antisense strand to SEQ ID NO: 1783805
acaacuaugugauguuacc

SEQ ID NO: 1783807 - RNA, 19 nt, Artificial Sequence
  Description of Artificial Sequence: Synthetic oligonucleotide
  Sense strand starting at position 2390 of SEQ ID NO: 1562938
agcuguuccucuuguuuga

SEQ ID NO: 1783808 - RNA, 19 nt, Artificial Sequence
  Description of Artificial Sequence: Synthetic oligonucleotide
  Antisense strand to SEQ ID NO: 1783807
ucaaacaagaggaacagcu

SEQ ID NO: 1783809 - RNA, 19 nt, Artificial Sequence
  Description of Artificial Sequence: Synthetic oligonucleotide
  Sense strand starting at position 2489 of SEQ ID NO: 1562938
cagacugaguaucguaaua

SEQ ID NO: 1783810 - RNA, 19 nt, Artificial Sequence
  Description of Artificial Sequence: Synthetic oligonucleotide
  Antisense strand to SEQ ID NO: 1783809
uauuacgauacucagucug

SEQ ID NO: 1783811 - RNA, 19 nt, Artificial Sequence
  Description of Artificial Sequence: Synthetic oligonucleotide
  Sense strand starting at position 2491 of SEQ ID NO: 1562938
gacugaguaucguaauaag

SEQ ID NO: 1783812 - RNA, 19 nt, Artificial Sequence
  Description of Artificial Sequence: Synthetic oligonucleotide
  Antisense strand to SEQ ID NO: 1783811
cuuauuacgauacucaguc

SEQ ID NO: 1783813 - RNA, 19 nt, Artificial Sequence
  Description of Artificial Sequence: Synthetic oligonucleotide
  Sense strand starting at position 2494 of SEQ ID NO: 1562938
ugaguaucguaauaagugu

SEQ ID NO: 1783814 - RNA, 19 nt, Artificial Sequence
  Description of Artificial Sequence: Synthetic oligonucleotide
  Antisense strand to SEQ ID NO: 1783813
acacuuauuacgauacuca

SEQ ID NO: 1783815 - RNA, 19 nt, Artificial Sequence
  Description of Artificial Sequence: Synthetic oligonucleotide
  Sense strand starting at position 2498 of SEQ ID NO: 1562938
uaucguaauaagugugagu

SEQ ID NO: 1783816 - RNA, 19 nt, Artificial Sequence
  Description of Artificial Sequence: Synthetic oligonucleotide
  Antisense strand to SEQ ID NO: 1783815
acucacacuuauuacgaua

SEQ ID NO: 1783817 - RNA, 19 nt, Artificial Sequence
  Description of Artificial Sequence: Synthetic oligonucleotide
  Sense strand starting at position 2500 of SEQ ID NO: 1562938
ucguaauaagugugaguuu

SEQ ID NO: 1783818 - RNA, 19 nt, Artificial Sequence
  Description of Artificial Sequence: Synthetic oligonucleotide
  Antisense strand to SEQ ID NO: 1783817
aaacucacacuuauuacga

SEQ ID NO: 1783819 - RNA, 19 nt, Artificial Sequence
  Description of Artificial Sequence: Synthetic oligonucleotide
  Sense strand starting at position 2511 of SEQ ID NO: 1562938
gugaguuucugguuggcgu

SEQ ID NO: 1783820 - RNA, 19 nt, Artificial Sequence
  Description of Artificial Sequence: Synthetic oligonucleotide
  Antisense strand to SEQ ID NO: 1783819
acgccaaccagaaacucac

SEQ ID NO: 1783821 - RNA, 19 nt, Artificial Sequence
  Description of Artificial Sequence: Synthetic oligonucleotide
  Sense strand starting at position 2663 of SEQ ID NO: 1562938
gaguucauccggugaggac

SEQ ID NO: 1783822 - RNA, 19 nt, Artificial Sequence
  Description of Artificial Sequence: Synthetic oligonucleotide
  Antisense strand to SEQ ID NO: 1783821
guccucaccggaugaacuc

SEQ ID NO: 1783823 - RNA, 19 nt, Artificial Sequence
  Description of Artificial Sequence: Synthetic oligonucleotide
  Sense strand starting at position 2743 of SEQ ID NO: 1562938
cgggaauucuggagugccu

SEQ ID NO: 1783824 - RNA, 19 nt, Artificial Sequence
  Description of Artificial Sequence: Synthetic oligonucleotide
  Antisense strand to SEQ ID NO: 1783823
aggcacuccagaauucccg

SEQ ID NO: 1783825 - RNA, 19 nt, Artificial Sequence
  Description of Artificial Sequence: Synthetic oligonucleotide
  Sense strand starting at position 2843 of SEQ ID NO: 1562938
gcucgugauucccacaggu

SEQ ID NO: 1783826 - RNA, 19 nt, Artificial Sequence
  Description of Artificial Sequence: Synthetic oligonucleotide
  Antisense strand to SEQ ID NO: 1783825
accugugggaaucacgagc

SEQ ID NO: 1783827 - RNA, 19 nt, Artificial Sequence
  Description of Artificial Sequence: Synthetic oligonucleotide
  Sense strand starting at position 3151 of SEQ ID NO: 1562938
gccucuacuucguggagga

SEQ ID NO: 1783828 - RNA, 19 nt, Artificial Sequence
  Description of Artificial Sequence: Synthetic oligonucleotide
  Antisense strand to SEQ ID NO: 1783827
uccuccacgaaguagaggc

SEQ ID NO: 1783829 - RNA, 19 nt, Artificial Sequence
  Description of Artificial Sequence: Synthetic oligonucleotide
  Sense strand starting at position 3443 of SEQ ID NO: 1562938
gggcucaggcggugagauu

SEQ ID NO: 1783830 - RNA, 19 nt, Artificial Sequence
  Description of Artificial Sequence: Synthetic oligonucleotide
  Antisense strand to SEQ ID NO: 1783829
aaucucaccgccugagccc

SEQ ID NO: 1783831 - RNA, 19 nt, Artificial Sequence
  Description of Artificial Sequence: Synthetic oligonucleotide
  Sense strand starting at position 3466 of SEQ ID NO: 1562938
ggaguauccaggcagguga

SEQ ID NO: 1783832 - RNA, 19 nt, Artificial Sequence
  Description of Artificial Sequence: Synthetic oligonucleotide
  Antisense strand to SEQ ID NO: 1783831
ucaccugccuggauacucc

SEQ ID NO: 1783833 - RNA, 19 nt, Artificial Sequence
  Description of Artificial Sequence: Synthetic oligonucleotide
  Sense strand starting at position 3504 of SEQ ID NO: 1562938
uaagaaagagguuggucau

SEQ ID NO: 1783834 - RNA, 19 nt, Artificial Sequence
  Description of Artificial Sequence: Synthetic oligonucleotide
  Antisense strand to SEQ ID NO: 1783833
augaccaaccucuuucuua

SEQ ID NO: 1783835 - RNA, 19 nt, Artificial Sequence
  Description of Artificial Sequence: Synthetic oligonucleotide
  Sense strand starting at position 3507 of SEQ ID NO: 1562938
gaaagagguuggucaucac

SEQ ID NO: 1783836 - RNA, 19 nt, Artificial Sequence
  Description of Artificial Sequence: Synthetic oligonucleotide
  Antisense strand to SEQ ID NO: 1783835
gugaugaccaaccucuuuc

SEQ ID NO: 1783837 - RNA, 19 nt, Artificial Sequence
  Description of Artificial Sequence: Synthetic oligonucleotide
  Sense strand starting at position 3510 of SEQ ID NO: 1562938
agagguuggucaucacuga

SEQ ID NO: 1783838 - RNA, 19 nt, Artificial Sequence
  Description of Artificial Sequence: Synthetic oligonucleotide
  Antisense strand to SEQ ID NO: 1783837
ucagugaugaccaaccucu

SEQ ID NO: 1783839 - RNA, 19 nt, Artificial Sequence
  Description of Artificial Sequence: Synthetic oligonucleotide
  Sense strand starting at position 3511 of SEQ ID NO: 1562938
gagguuggucaucacugau

SEQ ID NO: 1783840 - RNA, 19 nt, Artificial Sequence
  Description of Artificial Sequence: Synthetic oligonucleotide
  Antisense strand to SEQ ID NO: 1783839
aucagugaugaccaaccuc

SEQ ID NO: 1783841 - RNA, 19 nt, Artificial Sequence
  Description of Artificial Sequence: Synthetic oligonucleotide
  Sense strand starting at position 3526 of SEQ ID NO: 1562938
ugauuugacucgggauaac

SEQ ID NO: 1783842 - RNA, 19 nt, Artificial Sequence
  Description of Artificial Sequence: Synthetic oligonucleotide
  Antisense strand to SEQ ID NO: 1783841
guuaucccgagucaaauca

SEQ ID NO: 1783843 - RNA, 19 nt, Artificial Sequence
  Description of Artificial Sequence: Synthetic oligonucleotide
  Sense strand starting at position 3559 of SEQ ID NO: 1562938
ggcaguggcccuugucaca

SEQ ID NO: 1783844 - RNA, 19 nt, Artificial Sequence
  Description of Artificial Sequence: Synthetic oligonucleotide
  Antisense strand to SEQ ID NO: 1783843
ugugacaagggccacugcc

SEQ ID NO: 1783845 - RNA, 19 nt, Artificial Sequence
  Description of Artificial Sequence: Synthetic oligonucleotide
  Sense strand starting at position 3652 of SEQ ID NO: 1562938
ggccucugggcugggaaau

SEQ ID NO: 1783846 - RNA, 19 nt, Artificial Sequence
  Description of Artificial Sequence: Synthetic oligonucleotide
  Antisense strand to SEQ ID NO: 1783845
auuucccagcccagaggcc

SEQ ID NO: 1783847 - RNA, 19 nt, Artificial Sequence
  Description of Artificial Sequence: Synthetic oligonucleotide
  Sense strand starting at position 3653 of SEQ ID NO: 1562938
gccucugggcugggaaaua

SEQ ID NO: 1783848 - RNA, 19 nt, Artificial Sequence
  Description of Artificial Sequence: Synthetic oligonucleotide
  Antisense strand to SEQ ID NO: 1783847
uauuucccagcccagaggc

SEQ ID NO: 1783849 - RNA, 19 nt, Artificial Sequence
  Description of Artificial Sequence: Synthetic oligonucleotide
  Sense strand starting at position 3810 of SEQ ID NO: 1562938
gugugaguugugggaggca

SEQ ID NO: 1783850 - RNA, 19 nt, Artificial Sequence
  Description of Artificial Sequence: Synthetic oligonucleotide
  Antisense strand to SEQ ID NO: 1783849
ugccucccacaacucacac

SEQ ID NO: 1783851 - RNA, 19 nt, Artificial Sequence
  Description of Artificial Sequence: Synthetic oligonucleotide
  Sense strand starting at position 3811 of SEQ ID NO: 1562938
ugugaguugugggaggcaa

SEQ ID NO: 1783852 - RNA, 19 nt, Artificial Sequence
  Description of Artificial Sequence: Synthetic oligonucleotide
  Antisense strand to SEQ ID NO: 1783851
uugccucccacaacucaca

SEQ ID NO: 1783853 - RNA, 19 nt, Artificial Sequence
  Description of Artificial Sequence: Synthetic oligonucleotide
  Sense strand starting at position 101 of SEQ ID NO: 1562939
ggugaagauucaugaaagg

SEQ ID NO: 1783854 - RNA, 19 nt, Artificial Sequence
  Description of Artificial Sequence: Synthetic oligonucleotide
  Antisense strand to SEQ ID NO: 1783853
ccuuucaugaaucuucacc

SEQ ID NO: 1783855 - RNA, 19 nt, Artificial Sequence
  Description of Artificial Sequence: Synthetic oligonucleotide
  Sense strand starting at position 139 of SEQ ID NO: 1562939
ugggauuagucaccaacuu

SEQ ID NO: 1783856 - RNA, 19 nt, Artificial Sequence
  Description of Artificial Sequence: Synthetic oligonucleotide
  Antisense strand to SEQ ID NO: 1783855
aaguuggugacuaauccca

SEQ ID NO: 1783857 - RNA, 19 nt, Artificial Sequence
  Description of Artificial Sequence: Synthetic oligonucleotide
  Sense strand starting at position 174 of SEQ ID NO: 1562939
gcagccucagucugauuaa

SEQ ID NO: 1783858 - RNA, 19 nt, Artificial Sequence
  Description of Artificial Sequence: Synthetic oligonucleotide
  Antisense strand to SEQ ID NO: 1783857
uuaaucagacugaggcugc

SEQ ID NO: 1783859 - RNA, 19 nt, Artificial Sequence
  Description of Artificial Sequence: Synthetic oligonucleotide
  Sense strand starting at position 244 of SEQ ID NO: 1562939
gaguccuauuucugggaca

SEQ ID NO: 1783860 - RNA, 19 nt, Artificial Sequence
  Description of Artificial Sequence: Synthetic oligonucleotide
  Antisense strand to SEQ ID NO: 1783859
ugucccagaaauaggacuc

SEQ ID NO: 1783861 - RNA, 19 nt, Artificial Sequence
  Description of Artificial Sequence: Synthetic oligonucleotide
  Sense strand starting at position 245 of SEQ ID NO: 1562939
aguccuauuucugggacau

SEQ ID NO: 1783862 - RNA, 19 nt, Artificial Sequence
  Description of Artificial Sequence: Synthetic oligonucleotide
  Antisense strand to SEQ ID NO: 1783861
augucccagaaauaggacu

SEQ ID NO: 1783863 - RNA, 19 nt, Artificial Sequence
  Description of Artificial Sequence: Synthetic oligonucleotide
  Sense strand starting at position 247 of SEQ ID NO: 1562939
uccuauuucugggacauca

SEQ ID NO: 1783864 - RNA, 19 nt, Artificial Sequence
  Description of Artificial Sequence: Synthetic oligonucleotide
  Antisense strand to SEQ ID NO: 1783863
ugaugucccagaaauagga

SEQ ID NO: 1783865 - RNA, 19 nt, Artificial Sequence
  Description of Artificial Sequence: Synthetic oligonucleotide
  Sense strand starting at position 404 of SEQ ID NO: 1562939
augaguguccuguggagau

SEQ ID NO: 1783866 - RNA, 19 nt, Artificial Sequence
  Description of Artificial Sequence: Synthetic oligonucleotide
  Antisense strand to SEQ ID NO: 1783865
aucuccacaggacacucau

SEQ ID NO: 1783867 - RNA, 19 nt, Artificial Sequence
  Description of Artificial Sequence: Synthetic oligonucleotide
  Sense strand starting at position 408 of SEQ ID NO: 1562939
guguccuguggagauacaa

SEQ ID NO: 1783868 - RNA, 19 nt, Artificial Sequence
  Description of Artificial Sequence: Synthetic oligonucleotide
  Antisense strand to SEQ ID NO: 1783867
uuguaucuccacaggacac

SEQ ID NO: 1783869 - RNA, 19 nt, Artificial Sequence
  Description of Artificial Sequence: Synthetic oligonucleotide
  Sense strand starting at position 573 of SEQ ID NO: 1562939
uaggaaagcucugcguuua

SEQ ID NO: 1783870 - RNA, 19 nt, Artificial Sequence
  Description of Artificial Sequence: Synthetic oligonucleotide
  Antisense strand to SEQ ID NO: 1783869
uaaacgcagagcuuuccua

SEQ ID NO: 1783871 - RNA, 19 nt, Artificial Sequence
  Description of Artificial Sequence: Synthetic oligonucleotide
  Sense strand starting at position 574 of SEQ ID NO: 1562939
aggaaagcucugcguuuau

SEQ ID NO: 1783872 - RNA, 19 nt, Artificial Sequence
  Description of Artificial Sequence: Synthetic oligonucleotide
  Antisense strand to SEQ ID NO: 1783871
auaaacgcagagcuuuccu

SEQ ID NO: 1783873 - RNA, 19 nt, Artificial Sequence
  Description of Artificial Sequence: Synthetic oligonucleotide
  Sense strand starting at position 660 of SEQ ID NO: 1562939
ucaaucagaucugugcaca

SEQ ID NO: 1783874 - RNA, 19 nt, Artificial Sequence
  Description of Artificial Sequence: Synthetic oligonucleotide
  Antisense strand to SEQ ID NO: 1783873
ugugcacagaucugauuga

SEQ ID NO: 1783875 - RNA, 19 nt, Artificial Sequence
  Description of Artificial Sequence: Synthetic oligonucleotide
  Sense strand starting at position 727 of SEQ ID NO: 1562939
ggcagaaacugccucaucu

SEQ ID NO: 1783876 - RNA, 19 nt, Artificial Sequence
  Description of Artificial Sequence: Synthetic oligonucleotide
  Antisense strand to SEQ ID NO: 1783875
agaugaggcaguuucugcc

SEQ ID NO: 1783877 - RNA, 19 nt, Artificial Sequence
  Description of Artificial Sequence: Synthetic oligonucleotide
  Sense strand starting at position 736 of SEQ ID NO: 1562939
ugccucaucucuuugagca

SEQ ID NO: 1783878 - RNA, 19 nt, Artificial Sequence
  Description of Artificial Sequence: Synthetic oligonucleotide
  Antisense strand to SEQ ID NO: 1783877
ugcucaaagagaugaggca

SEQ ID NO: 1783879 - RNA, 19 nt, Artificial Sequence
  Description of Artificial Sequence: Synthetic oligonucleotide
  Sense strand starting at position 737 of SEQ ID NO: 1562939
gccucaucucuuugagcau

SEQ ID NO: 1783880 - RNA, 19 nt, Artificial Sequence
  Description of Artificial Sequence: Synthetic oligonucleotide
  Antisense strand to SEQ ID NO: 1783879
augcucaaagagaugaggc

SEQ ID NO: 1783881 - RNA, 19 nt, Artificial Sequence
  Description of Artificial Sequence: Synthetic oligonucleotide
  Sense strand starting at position 752 of SEQ ID NO: 1562939
gcaucaguuucuuccucau

SEQ ID NO: 1783882 - RNA, 19 nt, Artificial Sequence
  Description of Artificial Sequence: Synthetic oligonucleotide
  Antisense strand to SEQ ID NO: 1783881
augaggaagaaacugaugc

SEQ ID NO: 1783883 - RNA, 19 nt, Artificial Sequence
  Description of Artificial Sequence: Synthetic oligonucleotide
  Sense strand starting at position 786 of SEQ ID NO: 1562939
gauaccugcugugugaaga

SEQ ID NO: 1783884 - RNA, 19 nt, Artificial Sequence
  Description of Artificial Sequence: Synthetic oligonucleotide
  Antisense strand to SEQ ID NO: 1783883
ucuucacacagcagguauc

SEQ ID NO: 1783885 - RNA, 19 nt, Artificial Sequence
  Description of Artificial Sequence: Synthetic oligonucleotide
  Sense strand starting at position 787 of SEQ ID NO: 1562939
auaccugcugugugaagau

SEQ ID NO: 1783886 - RNA, 19 nt, Artificial Sequence
  Description of Artificial Sequence: Synthetic oligonucleotide
  Antisense strand to SEQ ID NO: 1783885
aucuucacacagcagguau

SEQ ID NO: 1783887 - RNA, 19 nt, Artificial Sequence
  Description of Artificial Sequence: Synthetic oligonucleotide
  Sense strand starting at position 811 of SEQ ID NO: 1562939
gacacaaugaugggucgaa

SEQ ID NO: 1783888 - RNA, 19 nt, Artificial Sequence
  Description of Artificial Sequence: Synthetic oligonucleotide
  Antisense strand to SEQ ID NO: 1783887
uucgacccaucauuguguc

SEQ ID NO: 1783889 - RNA, 19 nt, Artificial Sequence
  Description of Artificial Sequence: Synthetic oligonucleotide
  Sense strand starting at position 812 of SEQ ID NO: 1562939
acacaaugaugggucgaaa

SEQ ID NO: 1783890 - RNA, 19 nt, Artificial Sequence
  Description of Artificial Sequence: Synthetic oligonucleotide
  Antisense strand to SEQ ID NO: 1783889
uuucgacccaucauugugu

SEQ ID NO: 1783891 - RNA, 19 nt, Artificial Sequence
  Description of Artificial Sequence: Synthetic oligonucleotide
  Sense strand starting at position 891 of SEQ ID NO: 1562939
aauaguugugcucuugcuu

SEQ ID NO: 1783892 - RNA, 19 nt, Artificial Sequence
  Description of Artificial Sequence: Synthetic oligonucleotide
  Antisense strand to SEQ ID NO: 1783891
aagcaagagcacaacuauu

SEQ ID NO: 1783893 - RNA, 19 nt, Artificial Sequence
  Description of Artificial Sequence: Synthetic oligonucleotide
  Sense strand starting at position 892 of SEQ ID NO: 1562939
auaguugugcucuugcuua

SEQ ID NO: 1783894 - RNA, 19 nt, Artificial Sequence
  Description of Artificial Sequence: Synthetic oligonucleotide
  Antisense strand to SEQ ID NO: 1783893
uaagcaagagcacaacuau

SEQ ID NO: 1783895 - RNA, 19 nt, Artificial Sequence
  Description of Artificial Sequence: Synthetic oligonucleotide
  Sense strand starting at position 894 of SEQ ID NO: 1562939
aguugugcucuugcuuagu

SEQ ID NO: 1783896 - RNA, 19 nt, Artificial Sequence
  Description of Artificial Sequence: Synthetic oligonucleotide
  Antisense strand to SEQ ID NO: 1783895
acuaagcaagagcacaacu

SEQ ID NO: 1783897 - RNA, 19 nt, Artificial Sequence
  Description of Artificial Sequence: Synthetic oligonucleotide
  Sense strand starting at position 897 of SEQ ID NO: 1562939
ugugcucuugcuuaguaaa

SEQ ID NO: 1783898 - RNA, 19 nt, Artificial Sequence
  Description of Artificial Sequence: Synthetic oligonucleotide
  Antisense strand to SEQ ID NO: 1783897
uuuacuaagcaagagcaca

SEQ ID NO: 1783899 - RNA, 19 nt, Artificial Sequence
  Description of Artificial Sequence: Synthetic oligonucleotide
  Sense strand starting at position 1012 of SEQ ID NO: 1562939
auaaauuguaccggugaaa

SEQ ID NO: 1783900 - RNA, 19 nt, Artificial Sequence
  Description of Artificial Sequence: Synthetic oligonucleotide
  Antisense strand to SEQ ID NO: 1783899
uuucaccgguacaauuuau

SEQ ID NO: 1783901 - RNA, 19 nt, Artificial Sequence
  Description of Artificial Sequence: Synthetic oligonucleotide
  Sense strand starting at position 1034 of SEQ ID NO: 1562939
augaaauccuggcccaauu

SEQ ID NO: 1783902 - RNA, 19 nt, Artificial Sequence
  Description of Artificial Sequence: Synthetic oligonucleotide
  Antisense strand to SEQ ID NO: 1783901
aauugggccaggauuucau

SEQ ID NO: 1783903 - RNA, 19 nt, Artificial Sequence
  Description of Artificial Sequence: Synthetic oligonucleotide
  Sense strand starting at position 1086 of SEQ ID NO: 1562939
agguucgagucuuccagaa

SEQ ID NO: 1783904 - RNA, 19 nt, Artificial Sequence
  Description of Artificial Sequence: Synthetic oligonucleotide
  Antisense strand to SEQ ID NO: 1783903
uucuggaagacucgaaccu

SEQ ID NO: 1783905 - RNA, 19 nt, Artificial Sequence
  Description of Artificial Sequence: Synthetic oligonucleotide
  Sense strand starting at position 1090 of SEQ ID NO: 1562939
ucgagucuuccagaacaca

SEQ ID NO: 1783906 - RNA, 19 nt, Artificial Sequence
  Description of Artificial Sequence: Synthetic oligonucleotide
  Antisense strand to SEQ ID NO: 1783905
uguguucuggaagacucga

SEQ ID NO: 1783907 - RNA, 19 nt, Artificial Sequence
  Description of Artificial Sequence: Synthetic oligonucleotide
  Sense strand starting at position 1108 of SEQ ID NO: 1562939
augccuuggucacccagaa

SEQ ID NO: 1783908 - RNA, 19 nt, Artificial Sequence
  Description of Artificial Sequence: Synthetic oligonucleotide
  Antisense strand to SEQ ID NO: 1783907
uucugggugaccaaggcau

SEQ ID NO: 1783909 - RNA, 19 nt, Artificial Sequence
  Description of Artificial Sequence: Synthetic oligonucleotide
  Sense strand starting at position 2126 of SEQ ID NO: 1562939
gccucuagagcuggcuaaa

SEQ ID NO: 1783910 - RNA, 19 nt, Artificial Sequence
  Description of Artificial Sequence: Synthetic oligonucleotide
  Antisense strand to SEQ ID NO: 1783909
uuuagccagcucuagaggc

SEQ ID NO: 1783911 - RNA, 19 nt, Artificial Sequence
  Description of Artificial Sequence: Synthetic oligonucleotide
  Sense strand starting at position 2183 of SEQ ID NO: 1562939
gccagaagccaggaucaua

SEQ ID NO: 1783912 - RNA, 19 nt, Artificial Sequence
  Description of Artificial Sequence: Synthetic oligonucleotide
  Antisense strand to SEQ ID NO: 1783911
uaugauccuggcuucuggc

SEQ ID NO: 1783913 - RNA, 19 nt, Artificial Sequence
  Description of Artificial Sequence: Synthetic oligonucleotide
  Sense strand starting at position 2414 of SEQ ID NO: 1562939
gagcacuucccuugugaca

SEQ ID NO: 1783914 - RNA, 19 nt, Artificial Sequence
  Description of Artificial Sequence: Synthetic oligonucleotide
  Antisense strand to SEQ ID NO: 1783913
ugucacaagggaagugcuc

SEQ ID NO: 1783915 - RNA, 19 nt, Artificial Sequence
  Description of Artificial Sequence: Synthetic oligonucleotide
  Sense strand starting at position 2433 of SEQ ID NO: 1562939
ggccacuucccuugugaca

SEQ ID NO: 1783916 - RNA, 19 nt, Artificial Sequence
  Description of Artificial Sequence: Synthetic oligonucleotide
  Antisense strand to SEQ ID NO: 1783915
ugucacaagggaaguggcc

SEQ ID NO: 1783917 - RNA, 19 nt, Artificial Sequence
  Description of Artificial Sequence: Synthetic oligonucleotide
  Sense strand starting at position 2521 of SEQ ID NO: 1562939
gagugagaaccucgacaac

SEQ ID NO: 1783918 - RNA, 19 nt, Artificial Sequence
  Description of Artificial Sequence: Synthetic oligonucleotide
  Antisense strand to SEQ ID NO: 1783917
guugucgagguucucacuc

SEQ ID NO: 1783919 - RNA, 19 nt, Artificial Sequence
  Description of Artificial Sequence: Synthetic oligonucleotide
  Sense strand starting at position 2603 of SEQ ID NO: 1562939
caggaaaccugccagagaa

SEQ ID NO: 1783920 - RNA, 19 nt, Artificial Sequence
  Description of Artificial Sequence: Synthetic oligonucleotide
  Antisense strand to SEQ ID NO: 1783919
uucucuggcagguuuccug

SEQ ID NO: 1783921 - RNA, 19 nt, Artificial Sequence
  Description of Artificial Sequence: Synthetic oligonucleotide
  Sense strand starting at position 2731 of SEQ ID NO: 1562939
cugggugucccauaaggaa

SEQ ID NO: 1783922 - RNA, 19 nt, Artificial Sequence
  Description of Artificial Sequence: Synthetic oligonucleotide
  Antisense strand to SEQ ID NO: 1783921
uuccuuaugggacacccag

SEQ ID NO: 1783923 - RNA, 19 nt, Artificial Sequence
  Description of Artificial Sequence: Synthetic oligonucleotide
  Sense strand starting at position 2978 of SEQ ID NO: 1562939
agggaugacuuguuuaccu

SEQ ID NO: 1783924 - RNA, 19 nt, Artificial Sequence
  Description of Artificial Sequence: Synthetic oligonucleotide
  Antisense strand to SEQ ID NO: 1783923
agguaaacaagucaucccu

SEQ ID NO: 1783925 - RNA, 19 nt, Artificial Sequence
  Description of Artificial Sequence: Synthetic oligonucleotide
  Sense strand starting at position 2980 of SEQ ID NO: 1562939
ggaugacuuguuuaccucu

SEQ ID NO: 1783926 - RNA, 19 nt, Artificial Sequence
  Description of Artificial Sequence: Synthetic oligonucleotide
  Antisense strand to SEQ ID NO: 1783925
agagguaaacaagucaucc

SEQ ID NO: 1783927 - RNA, 19 nt, Artificial Sequence
  Description of Artificial Sequence: Synthetic oligonucleotide
  Sense strand starting at position 2986 of SEQ ID NO: 1562939
cuuguuuaccucugagauc

SEQ ID NO: 1783928 - RNA, 19 nt, Artificial Sequence
  Description of Artificial Sequence: Synthetic oligonucleotide
  Antisense strand to SEQ ID NO: 1783927
gaucucagagguaaacaag

SEQ ID NO: 1783929 - RNA, 19 nt, Artificial Sequence
  Description of Artificial Sequence: Synthetic oligonucleotide
  Sense strand starting at position 3625 of SEQ ID NO: 1562939
ccgaucugcuccucuuaca

SEQ ID NO: 1783930 - RNA, 19 nt, Artificial Sequence
  Description of Artificial Sequence: Synthetic oligonucleotide
  Antisense strand to SEQ ID NO: 1783929
uguaagaggagcagaucgg

SEQ ID NO: 1783931 - RNA, 19 nt, Artificial Sequence
  Description of Artificial Sequence: Synthetic oligonucleotide
  Sense strand starting at position 3856 of SEQ ID NO: 1562939
gguaacaucacauaguugu

SEQ ID NO: 1783932 - RNA, 19 nt, Artificial Sequence
  Description of Artificial Sequence: Synthetic oligonucleotide
  Antisense strand to SEQ ID NO: 1783931
acaacuaugugauguuacc

SEQ ID NO: 1783933 - RNA, 19 nt, Artificial Sequence
  Description of Artificial Sequence: Synthetic oligonucleotide
  Sense strand starting at position 100 of SEQ ID NO: 1562940
ucauguguuaucgcaagca

SEQ ID NO: 1783934 - RNA, 19 nt, Artificial Sequence
  Description of Artificial Sequence: Synthetic oligonucleotide
  Antisense strand to SEQ ID NO: 1783933
ugcuugcgauaacacauga

SEQ ID NO: 1783935 - RNA, 19 nt, Artificial Sequence
  Description of Artificial Sequence: Synthetic oligonucleotide
  Sense strand starting at position 104 of SEQ ID NO: 1562940
guguuaucgcaagcaucau

SEQ ID NO: 1783936 - RNA, 19 nt, Artificial Sequence
  Description of Artificial Sequence: Synthetic oligonucleotide
  Antisense strand to SEQ ID NO: 1783935
augaugcuugcgauaacac

SEQ ID NO: 1783937 - RNA, 19 nt, Artificial Sequence
  Description of Artificial Sequence: Synthetic oligonucleotide
  Sense strand starting at position 462 of SEQ ID NO: 1562940
caaagaagucuaugcugca

SEQ ID NO: 1783938 - RNA, 19 nt, Artificial Sequence
  Description of Artificial Sequence: Synthetic oligonucleotide
  Antisense strand to SEQ ID NO: 1783937
ugcagcauagacuucuuug

SEQ ID NO: 1783939 - RNA, 19 nt, Artificial Sequence
  Description of Artificial Sequence: Synthetic oligonucleotide
  Sense strand starting at position 668 of SEQ ID NO: 1562940
ugggauuagucaccaacuu

SEQ ID NO: 1783940 - RNA, 19 nt, Artificial Sequence
  Description of Artificial Sequence: Synthetic oligonucleotide
  Antisense strand to SEQ ID NO: 1783939
aaguuggugacuaauccca

SEQ ID NO: 1783941 - RNA, 19 nt, Artificial Sequence
  Description of Artificial Sequence: Synthetic oligonucleotide
  Sense strand starting at position 703 of SEQ ID NO: 1562940
gcagccucagucugauuaa

SEQ ID NO: 1783942 - RNA, 19 nt, Artificial Sequence
  Description of Artificial Sequence: Synthetic oligonucleotide
  Antisense strand to SEQ ID NO: 1783941
uuaaucagacugaggcugc

SEQ ID NO: 1783943 - RNA, 19 nt, Artificial Sequence
  Description of Artificial Sequence: Synthetic oligonucleotide
  Sense strand starting at position 773 of SEQ ID NO: 1562940
gaguccuauuucugggaca

SEQ ID NO: 1783944 - RNA, 19 nt, Artificial Sequence
  Description of Artificial Sequence: Synthetic oligonucleotide
  Antisense strand to SEQ ID NO: 1783943
ugucccagaaauaggacuc

SEQ ID NO: 1783945 - RNA, 19 nt, Artificial Sequence
  Description of Artificial Sequence: Synthetic oligonucleotide
  Sense strand starting at position 774 of SEQ ID NO: 1562940
aguccuauuucugggacau

SEQ ID NO: 1783946 - RNA, 19 nt, Artificial Sequence
  Description of Artificial Sequence: Synthetic oligonucleotide
  Antisense strand to SEQ ID NO: 1783945
augucccagaaauaggacu

SEQ ID NO: 1783947 - RNA, 19 nt, Artificial Sequence
  Description of Artificial Sequence: Synthetic oligonucleotide
  Sense strand starting at position 776 of SEQ ID NO: 1562940
uccuauuucugggacauca

SEQ ID NO: 1783948 - RNA, 19 nt, Artificial Sequence
  Description of Artificial Sequence: Synthetic oligonucleotide
  Antisense strand to SEQ ID NO: 1783947
ugaugucccagaaauagga

SEQ ID NO: 1783949 - RNA, 19 nt, Artificial Sequence
  Description of Artificial Sequence: Synthetic oligonucleotide
  Sense strand starting at position 933 of SEQ ID NO: 1562940
augaguguccuguggagau

SEQ ID NO: 1783950 - RNA, 19 nt, Artificial Sequence
  Description of Artificial Sequence: Synthetic oligonucleotide
  Antisense strand to SEQ ID NO: 1783949
aucuccacaggacacucau

SEQ ID NO: 1783951 - RNA, 19 nt, Artificial Sequence
  Description of Artificial Sequence: Synthetic oligonucleotide
  Sense strand starting at position 937 of SEQ ID NO: 1562940
guguccuguggagauacaa

SEQ ID NO: 1783952 - RNA, 19 nt, Artificial Sequence
  Description of Artificial Sequence: Synthetic oligonucleotide
  Antisense strand to SEQ ID NO: 1783951
uuguaucuccacaggacac

SEQ ID NO: 1783953 - RNA, 19 nt, Artificial Sequence
  Description of Artificial Sequence: Synthetic oligonucleotide
  Sense strand starting at position 1102 of SEQ ID NO: 1562940
uaggaaagcucugcguuua

SEQ ID NO: 1783954 - RNA, 19 nt, Artificial Sequence
  Description of Artificial Sequence: Synthetic oligonucleotide
  Antisense strand to SEQ ID NO: 1783953
uaaacgcagagcuuuccua

SEQ ID NO: 1783955 - RNA, 19 nt, Artificial Sequence
  Description of Artificial Sequence: Synthetic oligonucleotide
  Sense strand starting at position 1103 of SEQ ID NO: 1562940
aggaaagcucugcguuuau

SEQ ID NO: 1783956 - RNA, 19 nt, Artificial Sequence
  Description of Artificial Sequence: Synthetic oligonucleotide
  Antisense strand to SEQ ID NO: 1783955
auaaacgcagagcuuuccu

SEQ ID NO: 1783957 - RNA, 19 nt, Artificial Sequence
  Description of Artificial Sequence: Synthetic oligonucleotide
  Sense strand starting at position 1189 of SEQ ID NO: 1562940
ucaaucagaucugugcaca

SEQ ID NO: 1783958 - RNA, 19 nt, Artificial Sequence
  Description of Artificial Sequence: Synthetic oligonucleotide
  Antisense strand to SEQ ID NO: 1783957
ugugcacagaucugauuga

SEQ ID NO: 1783959 - RNA, 19 nt, Artificial Sequence
  Description of Artificial Sequence: Synthetic oligonucleotide
  Sense strand starting at position 1256 of SEQ ID NO: 1562940
ggcagaaacugccucaucu

SEQ ID NO: 1783960 - RNA, 19 nt, Artificial Sequence
  Description of Artificial Sequence: Synthetic oligonucleotide
  Antisense strand to SEQ ID NO: 1783959
agaugaggcaguuucugcc

SEQ ID NO: 1783961 - RNA, 19 nt, Artificial Sequence
  Description of Artificial Sequence: Synthetic oligonucleotide
  Sense strand starting at position 1265 of SEQ ID NO: 1562940
ugccucaucucuuugagca

SEQ ID NO: 1783962 - RNA, 19 nt, Artificial Sequence
  Description of Artificial Sequence: Synthetic oligonucleotide
  Antisense strand to SEQ ID NO: 1783961
ugcucaaagagaugaggca

SEQ ID NO: 1783963 - RNA, 19 nt, Artificial Sequence
  Description of Artificial Sequence: Synthetic oligonucleotide
  Sense strand starting at position 1266 of SEQ ID NO: 1562940
gccucaucucuuugagcau

SEQ ID NO: 1783964 - RNA, 19 nt, Artificial Sequence
  Description of Artificial Sequence: Synthetic oligonucleotide
  Antisense strand to SEQ ID NO: 1783963
augcucaaagagaugaggc

SEQ ID NO: 1783965 - RNA, 19 nt, Artificial Sequence
  Description of Artificial Sequence: Synthetic oligonucleotide
  Sense strand starting at position 1281 of SEQ ID NO: 1562940
gcaucaguuucuuccucau

SEQ ID NO: 1783966 - RNA, 19 nt, Artificial Sequence
  Description of Artificial Sequence: Synthetic oligonucleotide
  Antisense strand to SEQ ID NO: 1783965
augaggaagaaacugaugc

SEQ ID NO: 1783967 - RNA, 19 nt, Artificial Sequence
  Description of Artificial Sequence: Synthetic oligonucleotide
  Sense strand starting at position 1315 of SEQ ID NO: 1562940
gauaccugcugugugaaga

SEQ ID NO: 1783968 - RNA, 19 nt, Artificial Sequence
  Description of Artificial Sequence: Synthetic oligonucleotide
  Antisense strand to SEQ ID NO: 1783967
ucuucacacagcagguauc

SEQ ID NO: 1783969 - RNA, 19 nt, Artificial Sequence
  Description of Artificial Sequence: Synthetic oligonucleotide
  Sense strand starting at position 1316 of SEQ ID NO: 1562940
auaccugcugugugaagau

SEQ ID NO: 1783970 - RNA, 19 nt, Artificial Sequence
  Description of Artificial Sequence: Synthetic oligonucleotide
  Antisense strand to SEQ ID NO: 1783969
aucuucacacagcagguau

SEQ ID NO: 1783971 - RNA, 19 nt, Artificial Sequence
  Description of Artificial Sequence: Synthetic oligonucleotide
  Sense strand starting at position 1340 of SEQ ID NO: 1562940
gacacaaugaugggucgaa

SEQ ID NO: 1783972 - RNA, 19 nt, Artificial Sequence
  Description of Artificial Sequence: Synthetic oligonucleotide
  Antisense strand to SEQ ID NO: 1783971
uucgacccaucauuguguc

SEQ ID NO: 1783973 - RNA, 19 nt, Artificial Sequence
  Description of Artificial Sequence: Synthetic oligonucleotide
  Sense strand starting at position 1341 of SEQ ID NO: 1562940
acacaaugaugggucgaaa

SEQ ID NO: 1783974 - RNA, 19 nt, Artificial Sequence
  Description of Artificial Sequence: Synthetic oligonucleotide
  Antisense strand to SEQ ID NO: 1783973
uuucgacccaucauugugu

SEQ ID NO: 1783975 - RNA, 19 nt, Artificial Sequence
  Description of Artificial Sequence: Synthetic oligonucleotide
  Sense strand starting at position 1420 of SEQ ID NO: 1562940
aauaguugugcucuugcuu

SEQ ID NO: 1783976 - RNA, 19 nt, Artificial Sequence
  Description of Artificial Sequence: Synthetic oligonucleotide
  Antisense strand to SEQ ID NO: 1783975
aagcaagagcacaacuauu

SEQ ID NO: 1783977 - RNA, 19 nt, Artificial Sequence
  Description of Artificial Sequence: Synthetic oligonucleotide
  Sense strand starting at position 1421 of SEQ ID NO: 1562940
auaguugugcucuugcuua

SEQ ID NO: 1783978 - RNA, 19 nt, Artificial Sequence
  Description of Artificial Sequence: Synthetic oligonucleotide
  Antisense strand to SEQ ID NO: 1783977
uaagcaagagcacaacuau

SEQ ID NO: 1783979 - RNA, 19 nt, Artificial Sequence
  Description of Artificial Sequence: Synthetic oligonucleotide
  Sense strand starting at position 1423 of SEQ ID NO: 1562940
aguugugcucuugcuuagu

SEQ ID NO: 1783980 - RNA, 19 nt, Artificial Sequence
  Description of Artificial Sequence: Synthetic oligonucleotide
  Antisense strand to SEQ ID NO: 1783979
acuaagcaagagcacaacu

SEQ ID NO: 1783981 - RNA, 19 nt, Artificial Sequence
  Description of Artificial Sequence: Synthetic oligonucleotide
  Sense strand starting at position 1426 of SEQ ID NO: 1562940
ugugcucuugcuuaguaaa

SEQ ID NO: 1783982 - RNA, 19 nt, Artificial Sequence
  Description of Artificial Sequence: Synthetic oligonucleotide
  Antisense strand to SEQ ID NO: 1783981
uuuacuaagcaagagcaca

SEQ ID NO: 1783983 - RNA, 19 nt, Artificial Sequence
  Description of Artificial Sequence: Synthetic oligonucleotide
  Sense strand starting at position 1541 of SEQ ID NO: 1562940
auaaauuguaccggugaaa

SEQ ID NO: 1783984 - RNA, 19 nt, Artificial Sequence
  Description of Artificial Sequence: Synthetic oligonucleotide
  Antisense strand to SEQ ID NO: 1783983
uuucaccgguacaauuuau

SEQ ID NO: 1783985 - RNA, 19 nt, Artificial Sequence
  Description of Artificial Sequence: Synthetic oligonucleotide
  Sense strand starting at position 1563 of SEQ ID NO: 1562940
augaaauccuggcccaauu

SEQ ID NO: 1783986 - RNA, 19 nt, Artificial Sequence
  Description of Artificial Sequence: Synthetic oligonucleotide
  Antisense strand to SEQ ID NO: 1783985
aauugggccaggauuucau

SEQ ID NO: 1783987 - RNA, 19 nt, Artificial Sequence
  Description of Artificial Sequence: Synthetic oligonucleotide
  Sense strand starting at position 1615 of SEQ ID NO: 1562940
agguucgagucuuccagaa

SEQ ID NO: 1783988 - RNA, 19 nt, Artificial Sequence
  Description of Artificial Sequence: Synthetic oligonucleotide
  Antisense strand to SEQ ID NO: 1783987
uucuggaagacucgaaccu

SEQ ID NO: 1783989 - RNA, 19 nt, Artificial Sequence
  Description of Artificial Sequence: Synthetic oligonucleotide
  Sense strand starting at position 1619 of SEQ ID NO: 1562940
ucgagucuuccagaacaca

SEQ ID NO: 1783990 - RNA, 19 nt, Artificial Sequence
  Description of Artificial Sequence: Synthetic oligonucleotide
  Antisense strand to SEQ ID NO: 1783989
uguguucuggaagacucga

SEQ ID NO: 1783991 - RNA, 19 nt, Artificial Sequence
  Description of Artificial Sequence: Synthetic oligonucleotide
  Sense strand starting at position 1637 of SEQ ID NO: 1562940
augccuuggucacccagaa

SEQ ID NO: 1783992 - RNA, 19 nt, Artificial Sequence
  Description of Artificial Sequence: Synthetic oligonucleotide
  Antisense strand to SEQ ID NO: 1783991
uucugggugaccaaggcau

SEQ ID NO: 1783993 - RNA, 19 nt, Artificial Sequence
  Description of Artificial Sequence: Synthetic oligonucleotide
  Sense strand starting at position 2655 of SEQ ID NO: 1562940
gccucuagagcuggcuaaa

SEQ ID NO: 1783994 - RNA, 19 nt, Artificial Sequence
  Description of Artificial Sequence: Synthetic oligonucleotide
  Antisense strand to SEQ ID NO: 1783993
uuuagccagcucuagaggc

SEQ ID NO: 1783995 - RNA, 19 nt, Artificial Sequence
  Description of Artificial Sequence: Synthetic oligonucleotide
  Sense strand starting at position 2712 of SEQ ID NO: 1562940
gccagaagccaggaucaua

SEQ ID NO: 1783996 - RNA, 19 nt, Artificial Sequence
  Description of Artificial Sequence: Synthetic oligonucleotide
  Antisense strand to SEQ ID NO: 1783995
uaugauccuggcuucuggc

SEQ ID NO: 1783997 - RNA, 19 nt, Artificial Sequence
  Description of Artificial Sequence: Synthetic oligonucleotide
  Sense strand starting at position 2943 of SEQ ID NO: 1562940
gagcacuucccuugugaca

SEQ ID NO: 1783998 - RNA, 19 nt, Artificial Sequence
  Description of Artificial Sequence: Synthetic oligonucleotide
  Antisense strand to SEQ ID NO: 1783997
ugucacaagggaagugcuc

SEQ ID NO: 1783999 - RNA, 19 nt, Artificial Sequence
  Description of Artificial Sequence: Synthetic oligonucleotide
  Sense strand starting at position 2962 of SEQ ID NO: 1562940
ggccacuucccuugugaca

SEQ ID NO: 1784000 - RNA, 19 nt, Artificial Sequence
  Description of Artificial Sequence: Synthetic oligonucleotide
  Antisense strand to SEQ ID NO: 1783999
ugucacaagggaaguggcc

SEQ ID NO: 1784001 - RNA, 19 nt, Artificial Sequence
  Description of Artificial Sequence: Synthetic oligonucleotide
  Sense strand starting at position 3050 of SEQ ID NO: 1562940
gagugagaaccucgacaac

SEQ ID NO: 1784002 - RNA, 19 nt, Artificial Sequence
  Description of Artificial Sequence: Synthetic oligonucleotide
  Antisense strand to SEQ ID NO: 1784001
guugucgagguucucacuc

SEQ ID NO: 1784003 - RNA, 19 nt, Artificial Sequence
  Description of Artificial Sequence: Synthetic oligonucleotide
  Sense strand starting at position 3132 of SEQ ID NO: 1562940
caggaaaccugccagagaa

SEQ ID NO: 1784004 - RNA, 19 nt, Artificial Sequence
  Description of Artificial Sequence: Synthetic oligonucleotide
  Antisense strand to SEQ ID NO: 1784003
uucucuggcagguuuccug

SEQ ID NO: 1784005 - RNA, 19 nt, Artificial Sequence
  Description of Artificial Sequence: Synthetic oligonucleotide
  Sense strand starting at position 3260 of SEQ ID NO: 1562940
cugggugucccauaaggaa

SEQ ID NO: 1784006 - RNA, 19 nt, Artificial Sequence
  Description of Artificial Sequence: Synthetic oligonucleotide
  Antisense strand to SEQ ID NO: 1784005
uuccuuaugggacacccag

SEQ ID NO: 1784007 - RNA, 19 nt, Artificial Sequence
  Description of Artificial Sequence: Synthetic oligonucleotide
  Sense strand starting at position 3507 of SEQ ID NO: 1562940
agggaugacuuguuuaccu

SEQ ID NO: 1784008 - RNA, 19 nt, Artificial Sequence
  Description of Artificial Sequence: Synthetic oligonucleotide
  Antisense strand to SEQ ID NO: 1784007
agguaaacaagucaucccu

SEQ ID NO: 1784009 - RNA, 19 nt, Artificial Sequence
  Description of Artificial Sequence: Synthetic oligonucleotide
  Sense strand starting at position 3509 of SEQ ID NO: 1562940
ggaugacuuguuuaccucu

SEQ ID NO: 1784010 - RNA, 19 nt, Artificial Sequence
  Description of Artificial Sequence: Synthetic oligonucleotide
  Antisense strand to SEQ ID NO: 1784009
agagguaaacaagucaucc

SEQ ID NO: 1784011 - RNA, 19 nt, Artificial Sequence
  Description of Artificial Sequence: Synthetic oligonucleotide
  Sense strand starting at position 3515 of SEQ ID NO: 1562940
cuuguuuaccucugagauc

SEQ ID NO: 1784012 - RNA, 19 nt, Artificial Sequence
  Description of Artificial Sequence: Synthetic oligonucleotide
  Antisense strand to SEQ ID NO: 1784011
gaucucagagguaaacaag

SEQ ID NO: 1784013 - RNA, 19 nt, Artificial Sequence
  Description of Artificial Sequence: Synthetic oligonucleotide
  Sense strand starting at position 568 of SEQ ID NO: 1562941
accagagucggguguaaug

SEQ ID NO: 1784014 - RNA, 19 nt, Artificial Sequence
  Description of Artificial Sequence: Synthetic oligonucleotide
  Antisense strand to SEQ ID NO: 1784013
cauuacacccgacucuggu

SEQ ID NO: 1784015 - RNA, 19 nt, Artificial Sequence
  Description of Artificial Sequence: Synthetic oligonucleotide
  Sense strand starting at position 627 of SEQ ID NO: 1562941
ggcggaucgauugagcaca

SEQ ID NO: 1784016 - RNA, 19 nt, Artificial Sequence
  Description of Artificial Sequence: Synthetic oligonucleotide
  Antisense strand to SEQ ID NO: 1784015
ugugcucaaucgauccgcc

SEQ ID NO: 1784017 - RNA, 19 nt, Artificial Sequence
  Description of Artificial Sequence: Synthetic oligonucleotide
  Sense strand starting at position 912 of SEQ ID NO: 1562941
gcgggaagaucacuuuaga

SEQ ID NO: 1784018 - RNA, 19 nt, Artificial Sequence
  Description of Artificial Sequence: Synthetic oligonucleotide
  Antisense strand to SEQ ID NO: 1784017
ucuaaagugaucuucccgc

SEQ ID NO: 1784019 - RNA, 19 nt, Artificial Sequence
  Description of Artificial Sequence: Synthetic oligonucleotide
  Sense strand starting at position 1203 of SEQ ID NO: 1562941
gcaguucugagaugggaca

SEQ ID NO: 1784020 - RNA, 19 nt, Artificial Sequence
  Description of Artificial Sequence: Synthetic oligonucleotide
  Antisense strand to SEQ ID NO: 1784019
ugucccaucucagaacugc

SEQ ID NO: 1784021 - RNA, 19 nt, Artificial Sequence
  Description of Artificial Sequence: Synthetic oligonucleotide
  Sense strand starting at position 1216 of SEQ ID NO: 1562941
gggacaauuugaggguaaa

SEQ ID NO: 1784022 - RNA, 19 nt, Artificial Sequence
  Description of Artificial Sequence: Synthetic oligonucleotide
  Antisense strand to SEQ ID NO: 1784021
uuuacccucaaauuguccc

SEQ ID NO: 1784023 - RNA, 19 nt, Artificial Sequence
  Description of Artificial Sequence: Synthetic oligonucleotide
  Sense strand starting at position 1241 of SEQ ID NO: 1562941
uggugaagccuccagauag

SEQ ID NO: 1784024 - RNA, 19 nt, Artificial Sequence
  Description of Artificial Sequence: Synthetic oligonucleotide
  Antisense strand to SEQ ID NO: 1784023
cuaucuggaggcuucacca

SEQ ID NO: 1784025 - RNA, 19 nt, Artificial Sequence
  Description of Artificial Sequence: Synthetic oligonucleotide
  Sense strand starting at position 1470 of SEQ ID NO: 1562941
gucagagacuuucugaggu

SEQ ID NO: 1784026 - RNA, 19 nt, Artificial Sequence
  Description of Artificial Sequence: Synthetic oligonucleotide
  Antisense strand to SEQ ID NO: 1784025
accucagaaagucucugac

SEQ ID NO: 1784027 - RNA, 19 nt, Artificial Sequence
  Description of Artificial Sequence: Synthetic oligonucleotide
  Sense strand starting at position 1476 of SEQ ID NO: 1562941
gacuuucugaggugagaug

SEQ ID NO: 1784028 - RNA, 19 nt, Artificial Sequence
  Description of Artificial Sequence: Synthetic oligonucleotide
  Antisense strand to SEQ ID NO: 1784027
caucucaccucagaaaguc

SEQ ID NO: 1784029 - RNA, 19 nt, Artificial Sequence
  Description of Artificial Sequence: Synthetic oligonucleotide
  Sense strand starting at position 1685 of SEQ ID NO: 1562941
gguugacaacaaugcuaau

SEQ ID NO: 1784030 - RNA, 19 nt, Artificial Sequence
  Description of Artificial Sequence: Synthetic oligonucleotide
  Antisense strand to SEQ ID NO: 1784029
auuagcauuguugucaacc

SEQ ID NO: 1784031 - RNA, 19 nt, Artificial Sequence
  Description of Artificial Sequence: Synthetic oligonucleotide
  Sense strand starting at position 1736 of SEQ ID NO: 1562941
gcugcucuggcgagucaga

SEQ ID NO: 1784032 - RNA, 19 nt, Artificial Sequence
  Description of Artificial Sequence: Synthetic oligonucleotide
  Antisense strand to SEQ ID NO: 1784031
ucugacucgccagagcagc

SEQ ID NO: 1784033 - RNA, 19 nt, Artificial Sequence
  Description of Artificial Sequence: Synthetic oligonucleotide
  Sense strand starting at position 1745 of SEQ ID NO: 1562941
gcgagucagacgcccuuua

SEQ ID NO: 1784034 - RNA, 19 nt, Artificial Sequence
  Description of Artificial Sequence: Synthetic oligonucleotide
  Antisense strand to SEQ ID NO: 1784033
uaaagggcgucugacucgc

SEQ ID NO: 1784035 - RNA, 19 nt, Artificial Sequence
  Description of Artificial Sequence: Synthetic oligonucleotide
  Sense strand starting at position 2270 of SEQ ID NO: 1562941
cggccucucggguagagua

SEQ ID NO: 1784036 - RNA, 19 nt, Artificial Sequence
  Description of Artificial Sequence: Synthetic oligonucleotide
  Antisense strand to SEQ ID NO: 1784035
uacucuacccgagaggccg

SEQ ID NO: 1784037 - RNA, 19 nt, Artificial Sequence
  Description of Artificial Sequence: Synthetic oligonucleotide
  Sense strand starting at position 2494 of SEQ ID NO: 1562941
ucagcucuuccggaaaggu

SEQ ID NO: 1784038 - RNA, 19 nt, Artificial Sequence
  Description of Artificial Sequence: Synthetic oligonucleotide
  Antisense strand to SEQ ID NO: 1784037
accuuuccggaagagcuga

SEQ ID NO: 1784039 - RNA, 19 nt, Artificial Sequence
  Description of Artificial Sequence: Synthetic oligonucleotide
  Sense strand starting at position 2521 of SEQ ID NO: 1562941
cguaacuuuguugauaaca

SEQ ID NO: 1784040 - RNA, 19 nt, Artificial Sequence
  Description of Artificial Sequence: Synthetic oligonucleotide
  Antisense strand to SEQ ID NO: 1784039
uguuaucaacaaaguuacg

SEQ ID NO: 1784041 - RNA, 19 nt, Artificial Sequence
  Description of Artificial Sequence: Synthetic oligonucleotide
  Sense strand starting at position 2556 of SEQ ID NO: 1562941
gggucucuugggcaagaca

SEQ ID NO: 1784042 - RNA, 19 nt, Artificial Sequence
  Description of Artificial Sequence: Synthetic oligonucleotide
  Antisense strand to SEQ ID NO: 1784041
ugucuugcccaagagaccc

SEQ ID NO: 1784043 - RNA, 19 nt, Artificial Sequence
  Description of Artificial Sequence: Synthetic oligonucleotide
  Sense strand starting at position 2682 of SEQ ID NO: 1562941
gggaaauaguaacuaucgu

SEQ ID NO: 1784044 - RNA, 19 nt, Artificial Sequence
  Description of Artificial Sequence: Synthetic oligonucleotide
  Antisense strand to SEQ ID NO: 1784043
acgauaguuacuauuuccc

SEQ ID NO: 1784045 - RNA, 19 nt, Artificial Sequence
  Description of Artificial Sequence: Synthetic oligonucleotide
  Sense strand starting at position 2683 of SEQ ID NO: 1562941
ggaaauaguaacuaucgua

SEQ ID NO: 1784046 - RNA, 19 nt, Artificial Sequence
  Description of Artificial Sequence: Synthetic oligonucleotide
  Antisense strand to SEQ ID NO: 1784045
uacgauaguuacuauuucc

SEQ ID NO: 1784047 - RNA, 19 nt, Artificial Sequence
  Description of Artificial Sequence: Synthetic oligonucleotide
  Sense strand starting at position 2818 of SEQ ID NO: 1562941
gucuauaaugcaugaccuu

SEQ ID NO: 1784048 - RNA, 19 nt, Artificial Sequence
  Description of Artificial Sequence: Synthetic oligonucleotide
  Antisense strand to SEQ ID NO: 1784047
aaggucaugcauuauagac

SEQ ID NO: 1784049 - RNA, 19 nt, Artificial Sequence
  Description of Artificial Sequence: Synthetic oligonucleotide
  Sense strand starting at position 2827 of SEQ ID NO: 1562941
gcaugaccuuagucuaauc

SEQ ID NO: 1784050 - RNA, 19 nt, Artificial Sequence
  Description of Artificial Sequence: Synthetic oligonucleotide
  Antisense strand to SEQ ID NO: 1784049
gauuagacuaaggucaugc

SEQ ID NO: 1784051 - RNA, 19 nt, Artificial Sequence
  Description of Artificial Sequence: Synthetic oligonucleotide
  Sense strand starting at position 2889 of SEQ ID NO: 1562941
uguacccuuccggaaaugu

SEQ ID NO: 1784052 - RNA, 19 nt, Artificial Sequence
  Description of Artificial Sequence: Synthetic oligonucleotide
  Antisense strand to SEQ ID NO: 1784051
acauuuccggaaggguaca

SEQ ID NO: 1784053 - RNA, 19 nt, Artificial Sequence
  Description of Artificial Sequence: Synthetic oligonucleotide
  Sense strand starting at position 2897 of SEQ ID NO: 1562941
uccggaaaugucuguauua

SEQ ID NO: 1784054 - RNA, 19 nt, Artificial Sequence
  Description of Artificial Sequence: Synthetic oligonucleotide
  Antisense strand to SEQ ID NO: 1784053
uaauacagacauuuccgga

SEQ ID NO: 1784055 - RNA, 19 nt, Artificial Sequence
  Description of Artificial Sequence: Synthetic oligonucleotide
  Sense strand starting at position 2898 of SEQ ID NO: 1562941
ccggaaaugucuguauuau

SEQ ID NO: 1784056 - RNA, 19 nt, Artificial Sequence
  Description of Artificial Sequence: Synthetic oligonucleotide
  Antisense strand to SEQ ID NO: 1784055
auaauacagacauuuccgg

SEQ ID NO: 1784057 - RNA, 19 nt, Artificial Sequence
  Description of Artificial Sequence: Synthetic oligonucleotide
  Sense strand starting at position 2899 of SEQ ID NO: 1562941
cggaaaugucuguauuaug

SEQ ID NO: 1784058 - RNA, 19 nt, Artificial Sequence
  Description of Artificial Sequence: Synthetic oligonucleotide
  Antisense strand to SEQ ID NO: 1784057
cauaauacagacauuuccg

SEQ ID NO: 1784059 - RNA, 19 nt, Artificial Sequence
  Description of Artificial Sequence: Synthetic oligonucleotide
  Sense strand starting at position 2906 of SEQ ID NO: 1562941
gucuguauuauguaagaca

SEQ ID NO: 1784060 - RNA, 19 nt, Artificial Sequence
  Description of Artificial Sequence: Synthetic oligonucleotide
  Antisense strand to SEQ ID NO: 1784059
ugucuuacauaauacagac

SEQ ID NO: 1784061 - RNA, 19 nt, Artificial Sequence
  Description of Artificial Sequence: Synthetic oligonucleotide
  Sense strand starting at position 2935 of SEQ ID NO: 1562941
gaggaacuguugccgauua

SEQ ID NO: 1784062 - RNA, 19 nt, Artificial Sequence
  Description of Artificial Sequence: Synthetic oligonucleotide
  Antisense strand to SEQ ID NO: 1784061
uaaucggcaacaguuccuc

SEQ ID NO: 1784063 - RNA, 19 nt, Artificial Sequence
  Description of Artificial Sequence: Synthetic oligonucleotide
  Sense strand starting at position 2937 of SEQ ID NO: 1562941
ggaacuguugccgauuaca

SEQ ID NO: 1784064 - RNA, 19 nt, Artificial Sequence
  Description of Artificial Sequence: Synthetic oligonucleotide
  Antisense strand to SEQ ID NO: 1784063
uguaaucggcaacaguucc

SEQ ID NO: 1784065 - RNA, 19 nt, Artificial Sequence
  Description of Artificial Sequence: Synthetic oligonucleotide
  Sense strand starting at position 3098 of SEQ ID NO: 1562941
gauuaugguacaggguuau

SEQ ID NO: 1784066 - RNA, 19 nt, Artificial Sequence
  Description of Artificial Sequence: Synthetic oligonucleotide
  Antisense strand to SEQ ID NO: 1784065
auaacccuguaccauaauc

SEQ ID NO: 1784067 - RNA, 19 nt, Artificial Sequence
  Description of Artificial Sequence: Synthetic oligonucleotide
  Sense strand starting at position 3102 of SEQ ID NO: 1562941
augguacaggguuauguaa

SEQ ID NO: 1784068 - RNA, 19 nt, Artificial Sequence
  Description of Artificial Sequence: Synthetic oligonucleotide
  Antisense strand to SEQ ID NO: 1784067
uuacauaacccuguaccau

SEQ ID NO: 1784069 - RNA, 19 nt, Artificial Sequence
  Description of Artificial Sequence: Synthetic oligonucleotide
  Sense strand starting at position 3117 of SEQ ID NO: 1562941
guaagagacugcccuuguu

SEQ ID NO: 1784070 - RNA, 19 nt, Artificial Sequence
  Description of Artificial Sequence: Synthetic oligonucleotide
  Antisense strand to SEQ ID NO: 1784069
aacaagggcagucucuuac

SEQ ID NO: 1784071 - RNA, 19 nt, Artificial Sequence
  Description of Artificial Sequence: Synthetic oligonucleotide
  Sense strand starting at position 3125 of SEQ ID NO: 1562941
cugcccuuguucuuggaaa

SEQ ID NO: 1784072 - RNA, 19 nt, Artificial Sequence
  Description of Artificial Sequence: Synthetic oligonucleotide
  Antisense strand to SEQ ID NO: 1784071
uuuccaagaacaagggcag

SEQ ID NO: 1784073 - RNA, 19 nt, Artificial Sequence
  Description of Artificial Sequence: Synthetic oligonucleotide
  Sense strand starting at position 3150 of SEQ ID NO: 1562941
cugaaauaauuagggacaa

SEQ ID NO: 1784074 - RNA, 19 nt, Artificial Sequence
  Description of Artificial Sequence: Synthetic oligonucleotide
  Antisense strand to SEQ ID NO: 1784073
uugucccuaauuauuucag

SEQ ID NO: 1784075 - RNA, 19 nt, Artificial Sequence
  Description of Artificial Sequence: Synthetic oligonucleotide
  Sense strand starting at position 3151 of SEQ ID NO: 1562941
ugaaauaauuagggacaaa

SEQ ID NO: 1784076 - RNA, 19 nt, Artificial Sequence
  Description of Artificial Sequence: Synthetic oligonucleotide
  Antisense strand to SEQ ID NO: 1784075
uuugucccuaauuauuuca

SEQ ID NO: 1784077 - RNA, 19 nt, Artificial Sequence
  Description of Artificial Sequence: Synthetic oligonucleotide
  Sense strand starting at position 3174 of SEQ ID NO: 1562941
acaugaugucugcaaccuu

SEQ ID NO: 1784078 - RNA, 19 nt, Artificial Sequence
  Description of Artificial Sequence: Synthetic oligonucleotide
  Antisense strand to SEQ ID NO: 1784077
aagguugcagacaucaugu

SEQ ID NO: 1784079 - RNA, 19 nt, Artificial Sequence
  Description of Artificial Sequence: Synthetic oligonucleotide
  Sense strand starting at position 3181 of SEQ ID NO: 1562941
gucugcaaccuuuaugguu

SEQ ID NO: 1784080 - RNA, 19 nt, Artificial Sequence
  Description of Artificial Sequence: Synthetic oligonucleotide
  Antisense strand to SEQ ID NO: 1784079
aaccauaaagguugcagac

SEQ ID NO: 1784081 - RNA, 19 nt, Artificial Sequence
  Description of Artificial Sequence: Synthetic oligonucleotide
  Sense strand starting at position 3264 of SEQ ID NO: 1562941
caguuaaucugguugaaga

SEQ ID NO: 1784082 - RNA, 19 nt, Artificial Sequence
  Description of Artificial Sequence: Synthetic oligonucleotide
  Antisense strand to SEQ ID NO: 1784081
ucuucaaccagauuaacug

SEQ ID NO: 1784083 - RNA, 19 nt, Artificial Sequence
  Description of Artificial Sequence: Synthetic oligonucleotide
  Sense strand starting at position 3265 of SEQ ID NO: 1562941
aguuaaucugguugaagaa

SEQ ID NO: 1784084 - RNA, 19 nt, Artificial Sequence
  Description of Artificial Sequence: Synthetic oligonucleotide
  Antisense strand to SEQ ID NO: 1784083
uucuucaaccagauuaacu

SEQ ID NO: 1784085 - RNA, 19 nt, Artificial Sequence
  Description of Artificial Sequence: Synthetic oligonucleotide
  Sense strand starting at position 3274 of SEQ ID NO: 1562941
gguugaagaauaugggagu

SEQ ID NO: 1784086 - RNA, 19 nt, Artificial Sequence
  Description of Artificial Sequence: Synthetic oligonucleotide
  Antisense strand to SEQ ID NO: 1784085
acucccauauucuucaacc

SEQ ID NO: 1784087 - RNA, 19 nt, Artificial Sequence
  Description of Artificial Sequence: Synthetic oligonucleotide
  Sense strand starting at position 3277 of SEQ ID NO: 1562941
ugaagaauaugggaguucu

SEQ ID NO: 1784088 - RNA, 19 nt, Artificial Sequence
  Description of Artificial Sequence: Synthetic oligonucleotide
  Antisense strand to SEQ ID NO: 1784087
agaacucccauauucuuca

SEQ ID NO: 1784089 - RNA, 19 nt, Artificial Sequence
  Description of Artificial Sequence: Synthetic oligonucleotide
  Sense strand starting at position 3285 of SEQ ID NO: 1562941
augggaguucuuugaacau

SEQ ID NO: 1784090 - RNA, 19 nt, Artificial Sequence
  Description of Artificial Sequence: Synthetic oligonucleotide
  Antisense strand to SEQ ID NO: 1784089
auguucaaagaacucccau

SEQ ID NO: 1784091 - RNA, 19 nt, Artificial Sequence
  Description of Artificial Sequence: Synthetic oligonucleotide
  Sense strand starting at position 3499 of SEQ ID NO: 1562941
auuaguuggacgugauggu

SEQ ID NO: 1784092 - RNA, 19 nt, Artificial Sequence
  Description of Artificial Sequence: Synthetic oligonucleotide
  Antisense strand to SEQ ID NO: 1784091
accaucacguccaacuaau

SEQ ID NO: 1784093 - RNA, 19 nt, Artificial Sequence
  Description of Artificial Sequence: Synthetic oligonucleotide
  Sense strand starting at position 334 of SEQ ID NO: 1562942
accagagucggguguaaug

SEQ ID NO: 1784094 - RNA, 19 nt, Artificial Sequence
  Description of Artificial Sequence: Synthetic oligonucleotide
  Antisense strand to SEQ ID NO: 1784093
cauuacacccgacucuggu

SEQ ID NO: 1784095 - RNA, 19 nt, Artificial Sequence
  Description of Artificial Sequence: Synthetic oligonucleotide
  Sense strand starting at position 393 of SEQ ID NO: 1562942
ggcggaucgauugagcaca

SEQ ID NO: 1784096 - RNA, 19 nt, Artificial Sequence
  Description of Artificial Sequence: Synthetic oligonucleotide
  Antisense strand to SEQ ID NO: 1784095
ugugcucaaucgauccgcc

SEQ ID NO: 1784097 - RNA, 19 nt, Artificial Sequence
  Description of Artificial Sequence: Synthetic oligonucleotide
  Sense strand starting at position 678 of SEQ ID NO: 1562942
gcgggaagaucacuuuaga

SEQ ID NO: 1784098 - RNA, 19 nt, Artificial Sequence
  Description of Artificial Sequence: Synthetic oligonucleotide
  Antisense strand to SEQ ID NO: 1784097
ucuaaagugaucuucccgc

SEQ ID NO: 1784099 - RNA, 19 nt, Artificial Sequence
  Description of Artificial Sequence: Synthetic oligonucleotide
  Sense strand starting at position 969 of SEQ ID NO: 1562942
gcaguucugagaugggaca

SEQ ID NO: 1784100 - RNA, 19 nt, Artificial Sequence
  Description of Artificial Sequence: Synthetic oligonucleotide
  Antisense strand to SEQ ID NO: 1784099
ugucccaucucagaacugc

SEQ ID NO: 1784101 - RNA, 19 nt, Artificial Sequence
  Description of Artificial Sequence: Synthetic oligonucleotide
  Sense strand starting at position 982 of SEQ ID NO: 1562942
gggacaauuugaggguaaa

SEQ ID NO: 1784102 - RNA, 19 nt, Artificial Sequence
  Description of Artificial Sequence: Synthetic oligonucleotide
  Antisense strand to SEQ ID NO: 1784101
uuuacccucaaauuguccc

SEQ ID NO: 1784103 - RNA, 19 nt, Artificial Sequence
  Description of Artificial Sequence: Synthetic oligonucleotide
  Sense strand starting at position 1007 of SEQ ID NO: 1562942
uggugaagccuccagauag

SEQ ID NO: 1784104 - RNA, 19 nt, Artificial Sequence
  Description of Artificial Sequence: Synthetic oligonucleotide
  Antisense strand to SEQ ID NO: 1784103
cuaucuggaggcuucacca

SEQ ID NO: 1784105 - RNA, 19 nt, Artificial Sequence
  Description of Artificial Sequence: Synthetic oligonucleotide
  Sense strand starting at position 1236 of SEQ ID NO: 1562942
gucagagacuuucugaggu

SEQ ID NO: 1784106 - RNA, 19 nt, Artificial Sequence
  Description of Artificial Sequence: Synthetic oligonucleotide
  Antisense strand to SEQ ID NO: 1784105
accucagaaagucucugac

SEQ ID NO: 1784107 - RNA, 19 nt, Artificial Sequence
  Description of Artificial Sequence: Synthetic oligonucleotide
  Sense strand starting at position 1242 of SEQ ID NO: 1562942
gacuuucugaggugagaug

SEQ ID NO: 1784108 - RNA, 19 nt, Artificial Sequence
  Description of Artificial Sequence: Synthetic oligonucleotide
  Antisense strand to SEQ ID NO: 1784107
caucucaccucagaaaguc

SEQ ID NO: 1784109 - RNA, 19 nt, Artificial Sequence
  Description of Artificial Sequence: Synthetic oligonucleotide
  Sense strand starting at position 1451 of SEQ ID NO: 1562942
gguugacaacaaugcuaau

SEQ ID NO: 1784110 - RNA, 19 nt, Artificial Sequence
  Description of Artificial Sequence: Synthetic oligonucleotide
  Antisense strand to SEQ ID NO: 1784109
auuagcauuguugucaacc

SEQ ID NO: 1784111 - RNA, 19 nt, Artificial Sequence
  Description of Artificial Sequence: Synthetic oligonucleotide
  Sense strand starting at position 1502 of SEQ ID NO: 1562942
gcugcucuggcgagucaga

SEQ ID NO: 1784112 - RNA, 19 nt, Artificial Sequence
  Description of Artificial Sequence: Synthetic oligonucleotide
  Antisense strand to SEQ ID NO: 1784111
ucugacucgccagagcagc

SEQ ID NO: 1784113 - RNA, 19 nt, Artificial Sequence
  Description of Artificial Sequence: Synthetic oligonucleotide
  Sense strand starting at position 1511 of SEQ ID NO: 1562942
gcgagucagacgcccuuua

SEQ ID NO: 1784114 - RNA, 19 nt, Artificial Sequence
  Description of Artificial Sequence: Synthetic oligonucleotide
  Antisense strand to SEQ ID NO: 1784113
uaaagggcgucugacucgc

SEQ ID NO: 1784115 - RNA, 19 nt, Artificial Sequence
  Description of Artificial Sequence: Synthetic oligonucleotide
  Sense strand starting at position 2260 of SEQ ID NO: 1562942
ucagcucuuccggaaaggu

SEQ ID NO: 1784116 - RNA, 19 nt, Artificial Sequence
  Description of Artificial Sequence: Synthetic oligonucleotide
  Antisense strand to SEQ ID NO: 1784115
accuuuccggaagagcuga

SEQ ID NO: 1784117 - RNA, 19 nt, Artificial Sequence
  Description of Artificial Sequence: Synthetic oligonucleotide
  Sense strand starting at position 2287 of SEQ ID NO: 1562942
cguaacuuuguugauaaca

SEQ ID NO: 1784118 - RNA, 19 nt, Artificial Sequence
  Description of Artificial Sequence: Synthetic oligonucleotide
  Antisense strand to SEQ ID NO: 1784117
uguuaucaacaaaguuacg

SEQ ID NO: 1784119 - RNA, 19 nt, Artificial Sequence
  Description of Artificial Sequence: Synthetic oligonucleotide
  Sense strand starting at position 2322 of SEQ ID NO: 1562942
gggucucuugggcaagaca

SEQ ID NO: 1784120 - RNA, 19 nt, Artificial Sequence
  Description of Artificial Sequence: Synthetic oligonucleotide
  Antisense strand to SEQ ID NO: 1784119
ugucuugcccaagagaccc

SEQ ID NO: 1784121 - RNA, 19 nt, Artificial Sequence
  Description of Artificial Sequence: Synthetic oligonucleotide
  Sense strand starting at position 2448 of SEQ ID NO: 1562942
gggaaauaguaacuaucgu

SEQ ID NO: 1784122 - RNA, 19 nt, Artificial Sequence
  Description of Artificial Sequence: Synthetic oligonucleotide
  Antisense strand to SEQ ID NO: 1784121
acgauaguuacuauuuccc

SEQ ID NO: 1784123 - RNA, 19 nt, Artificial Sequence
  Description of Artificial Sequence: Synthetic oligonucleotide
  Sense strand starting at position 2449 of SEQ ID NO: 1562942
ggaaauaguaacuaucgua

SEQ ID NO: 1784124 - RNA, 19 nt, Artificial Sequence
  Description of Artificial Sequence: Synthetic oligonucleotide
  Antisense strand to SEQ ID NO: 1784123
uacgauaguuacuauuucc

SEQ ID NO: 1784125 - RNA, 19 nt, Artificial Sequence
  Description of Artificial Sequence: Synthetic oligonucleotide
  Sense strand starting at position 2584 of SEQ ID NO: 1562942
gucuauaaugcaugaccuu

SEQ ID NO: 1784126 - RNA, 19 nt, Artificial Sequence
  Description of Artificial Sequence: Synthetic oligonucleotide
  Antisense strand to SEQ ID NO: 1784125
aaggucaugcauuauagac

SEQ ID NO: 1784127 - RNA, 19 nt, Artificial Sequence
  Description of Artificial Sequence: Synthetic oligonucleotide
  Sense strand starting at position 2593 of SEQ ID NO: 1562942
gcaugaccuuagucuaauc

SEQ ID NO: 1784128 - RNA, 19 nt, Artificial Sequence
  Description of Artificial Sequence: Synthetic oligonucleotide
  Antisense strand to SEQ ID NO: 1784127
gauuagacuaaggucaugc

SEQ ID NO: 1784129 - RNA, 19 nt, Artificial Sequence
  Description of Artificial Sequence: Synthetic oligonucleotide
  Sense strand starting at position 2655 of SEQ ID NO: 1562942
uguacccuuccggaaaugu

SEQ ID NO: 1784130 - RNA, 19 nt, Artificial Sequence
  Description of Artificial Sequence: Synthetic oligonucleotide
  Antisense strand to SEQ ID NO: 1784129
acauuuccggaaggguaca

SEQ ID NO: 1784131 - RNA, 19 nt, Artificial Sequence
  Description of Artificial Sequence: Synthetic oligonucleotide
  Sense strand starting at position 2663 of SEQ ID NO: 1562942
uccggaaaugucuguauua

SEQ ID NO: 1784132 - RNA, 19 nt, Artificial Sequence
  Description of Artificial Sequence: Synthetic oligonucleotide
  Antisense strand to SEQ ID NO: 1784131
uaauacagacauuuccgga

SEQ ID NO: 1784133 - RNA, 19 nt, Artificial Sequence
  Description of Artificial Sequence: Synthetic oligonucleotide
  Sense strand starting at position 2664 of SEQ ID NO: 1562942
ccggaaaugucuguauuau

SEQ ID NO: 1784134 - RNA, 19 nt, Artificial Sequence
  Description of Artificial Sequence: Synthetic oligonucleotide
  Antisense strand to SEQ ID NO: 1784133
auaauacagacauuuccgg

SEQ ID NO: 1784135 - RNA, 19 nt, Artificial Sequence
  Description of Artificial Sequence: Synthetic oligonucleotide
  Sense strand starting at position 2665 of SEQ ID NO: 1562942
cggaaaugucuguauuaug

SEQ ID NO: 1784136 - RNA, 19 nt, Artificial Sequence
  Description of Artificial Sequence: Synthetic oligonucleotide
  Antisense strand to SEQ ID NO: 1784135
cauaauacagacauuuccg

SEQ ID NO: 1784137 - RNA, 19 nt, Artificial Sequence
  Description of Artificial Sequence: Synthetic oligonucleotide
  Sense strand starting at position 2672 of SEQ ID NO: 1562942
gucuguauuauguaagaca

SEQ ID NO: 1784138 - RNA, 19 nt, Artificial Sequence
  Description of Artificial Sequence: Synthetic oligonucleotide
  Antisense strand to SEQ ID NO: 1784137
ugucuuacauaauacagac

SEQ ID NO: 1784139 - RNA, 19 nt, Artificial Sequence
  Description of Artificial Sequence: Synthetic oligonucleotide
  Sense strand starting at position 2701 of SEQ ID NO: 1562942
gaggaacuguugccgauua

SEQ ID NO: 1784140 - RNA, 19 nt, Artificial Sequence
  Description of Artificial Sequence: Synthetic oligonucleotide
  Antisense strand to SEQ ID NO: 1784139
uaaucggcaacaguuccuc

SEQ ID NO: 1784141 - RNA, 19 nt, Artificial Sequence
  Description of Artificial Sequence: Synthetic oligonucleotide
  Sense strand starting at position 2703 of SEQ ID NO: 1562942
ggaacuguugccgauuaca

SEQ ID NO: 1784142 - RNA, 19 nt, Artificial Sequence
  Description of Artificial Sequence: Synthetic oligonucleotide
  Antisense strand to SEQ ID NO: 1784141
uguaaucggcaacaguucc

SEQ ID NO: 1784143 - RNA, 19 nt, Artificial Sequence
  Description of Artificial Sequence: Synthetic oligonucleotide
  Sense strand starting at position 2864 of SEQ ID NO: 1562942
gauuaugguacaggguuau

SEQ ID NO: 1784144 - RNA, 19 nt, Artificial Sequence
  Description of Artificial Sequence: Synthetic oligonucleotide
  Antisense strand to SEQ ID NO: 1784143
auaacccuguaccauaauc

SEQ ID NO: 1784145 - RNA, 19 nt, Artificial Sequence
  Description of Artificial Sequence: Synthetic oligonucleotide
  Sense strand starting at position 2868 of SEQ ID NO: 1562942
augguacaggguuauguaa

SEQ ID NO: 1784146 - RNA, 19 nt, Artificial Sequence
  Description of Artificial Sequence: Synthetic oligonucleotide
  Antisense strand to SEQ ID NO: 1784145
uuacauaacccuguaccau

SEQ ID NO: 1784147 - RNA, 19 nt, Artificial Sequence
  Description of Artificial Sequence: Synthetic oligonucleotide
  Sense strand starting at position 2891 of SEQ ID NO: 1562942
cugcccuuguucuuggaaa

SEQ ID NO: 1784148 - RNA, 19 nt, Artificial Sequence
  Description of Artificial Sequence: Synthetic oligonucleotide
  Antisense strand to SEQ ID NO: 1784147
uuuccaagaacaagggcag

SEQ ID NO: 1784149 - RNA, 19 nt, Artificial Sequence
  Description of Artificial Sequence: Synthetic oligonucleotide
  Sense strand starting at position 2917 of SEQ ID NO: 1562942
ugaaauaauuagggacaaa

SEQ ID NO: 1784150 - RNA, 19 nt, Artificial Sequence
  Description of Artificial Sequence: Synthetic oligonucleotide
  Antisense strand to SEQ ID NO: 1784149
uuugucccuaauuauuuca

SEQ ID NO: 1784151 - RNA, 19 nt, Artificial Sequence
  Description of Artificial Sequence: Synthetic oligonucleotide
  Sense strand starting at position 2940 of SEQ ID NO: 1562942
acaugaugucugcaaccuu

SEQ ID NO: 1784152 - RNA, 19 nt, Artificial Sequence
  Description of Artificial Sequence: Synthetic oligonucleotide
  Antisense strand to SEQ ID NO: 1784151
aagguugcagacaucaugu

SEQ ID NO: 1784153 - RNA, 19 nt, Artificial Sequence
  Description of Artificial Sequence: Synthetic oligonucleotide
  Sense strand starting at position 2947 of SEQ ID NO: 1562942
gucugcaaccuuuaugguu

SEQ ID NO: 1784154 - RNA, 19 nt, Artificial Sequence
  Description of Artificial Sequence: Synthetic oligonucleotide
  Antisense strand to SEQ ID NO: 1784153
aaccauaaagguugcagac

SEQ ID NO: 1784155 - RNA, 19 nt, Artificial Sequence
  Description of Artificial Sequence: Synthetic oligonucleotide
  Sense strand starting at position 3030 of SEQ ID NO: 1562942
caguuaaucugguugaaga

SEQ ID NO: 1784156 - RNA, 19 nt, Artificial Sequence
  Description of Artificial Sequence: Synthetic oligonucleotide
  Antisense strand to SEQ ID NO: 1784155
ucuucaaccagauuaacug

SEQ ID NO: 1784157 - RNA, 19 nt, Artificial Sequence
  Description of Artificial Sequence: Synthetic oligonucleotide
  Sense strand starting at position 3031 of SEQ ID NO: 1562942
aguuaaucugguugaagaa

SEQ ID NO: 1784158 - RNA, 19 nt, Artificial Sequence
  Description of Artificial Sequence: Synthetic oligonucleotide
  Antisense strand to SEQ ID NO: 1784157
uucuucaaccagauuaacu

SEQ ID NO: 1784159 - RNA, 19 nt, Artificial Sequence
  Description of Artificial Sequence: Synthetic oligonucleotide
  Sense strand starting at position 3040 of SEQ ID NO: 1562942
gguugaagaauaugggagu

SEQ ID NO: 1784160 - RNA, 19 nt, Artificial Sequence
  Description of Artificial Sequence: Synthetic oligonucleotide
  Antisense strand to SEQ ID NO: 1784159
acucccauauucuucaacc

SEQ ID NO: 1784161 - RNA, 19 nt, Artificial Sequence
  Description of Artificial Sequence: Synthetic oligonucleotide
  Sense strand starting at position 3051 of SEQ ID NO: 1562942
augggaguucuuugaacau

SEQ ID NO: 1784162 - RNA, 19 nt, Artificial Sequence
  Description of Artificial Sequence: Synthetic oligonucleotide
  Antisense strand to SEQ ID NO: 1784161
auguucaaagaacucccau

SEQ ID NO: 1784163 - RNA, 19 nt, Artificial Sequence
  Description of Artificial Sequence: Synthetic oligonucleotide
  Sense strand starting at position 3882 of SEQ ID NO: 1562942
gaguguaacucucccaguu

SEQ ID NO: 1784164 - RNA, 19 nt, Artificial Sequence
  Description of Artificial Sequence: Synthetic oligonucleotide
  Antisense strand to SEQ ID NO: 1784163
aacugggagaguuacacuc

SEQ ID NO: 1784165 - RNA, 19 nt, Artificial Sequence
  Description of Artificial Sequence: Synthetic oligonucleotide
  Sense strand starting at position 3899 of SEQ ID NO: 1562942
uucucaaaguuccugagau

SEQ ID NO: 1784166 - RNA, 19 nt, Artificial Sequence
  Description of Artificial Sequence: Synthetic oligonucleotide
  Antisense strand to SEQ ID NO: 1784165
aucucaggaacuuugagaa

SEQ ID NO: 1784167 - RNA, 19 nt, Artificial Sequence
  Description of Artificial Sequence: Synthetic oligonucleotide
  Sense strand starting at position 3901 of SEQ ID NO: 1562942
cucaaaguuccugagaugu

SEQ ID NO: 1784168 - RNA, 19 nt, Artificial Sequence
  Description of Artificial Sequence: Synthetic oligonucleotide
  Antisense strand to SEQ ID NO: 1784167
acaucucaggaacuuugag

SEQ ID NO: 1784169 - RNA, 19 nt, Artificial Sequence
  Description of Artificial Sequence: Synthetic oligonucleotide
  Sense strand starting at position 3905 of SEQ ID NO: 1562942
aaguuccugagauguggau

SEQ ID NO: 1784170 - RNA, 19 nt, Artificial Sequence
  Description of Artificial Sequence: Synthetic oligonucleotide
  Antisense strand to SEQ ID NO: 1784169
auccacaucucaggaacuu

SEQ ID NO: 1784171 - RNA, 19 nt, Artificial Sequence
  Description of Artificial Sequence: Synthetic oligonucleotide
  Sense strand starting at position 3953 of SEQ ID NO: 1562942
cuacaaggcccaugucaaa

SEQ ID NO: 1784172 - RNA, 19 nt, Artificial Sequence
  Description of Artificial Sequence: Synthetic oligonucleotide
  Antisense strand to SEQ ID NO: 1784171
uuugacaugggccuuguag

SEQ ID NO: 1784173 - RNA, 19 nt, Artificial Sequence
  Description of Artificial Sequence: Synthetic oligonucleotide
  Sense strand starting at position 2 of SEQ ID NO: 1562943
cagguaucugaaugcacau

SEQ ID NO: 1784174 - RNA, 19 nt, Artificial Sequence
  Description of Artificial Sequence: Synthetic oligonucleotide
  Antisense strand to SEQ ID NO: 1784173
augugcauucagauaccug

SEQ ID NO: 1784175 - RNA, 19 nt, Artificial Sequence
  Description of Artificial Sequence: Synthetic oligonucleotide
  Sense strand starting at position 70 of SEQ ID NO: 1562943
ccagaaaguucccagagca

SEQ ID NO: 1784176 - RNA, 19 nt, Artificial Sequence
  Description of Artificial Sequence: Synthetic oligonucleotide
  Antisense strand to SEQ ID NO: 1784175
ugcucugggaacuuucugg

SEQ ID NO: 1784177 - RNA, 19 nt, Artificial Sequence
  Description of Artificial Sequence: Synthetic oligonucleotide
  Sense strand starting at position 265 of SEQ ID NO: 1562943
ggcucuuaacucuaugaaa

SEQ ID NO: 1784178 - RNA, 19 nt, Artificial Sequence
  Description of Artificial Sequence: Synthetic oligonucleotide
  Antisense strand to SEQ ID NO: 1784177
uuucauagaguuaagagcc

SEQ ID NO: 1784179 - RNA, 19 nt, Artificial Sequence
  Description of Artificial Sequence: Synthetic oligonucleotide
  Sense strand starting at position 318 of SEQ ID NO: 1562943
cacugucugucucagugaa

SEQ ID NO: 1784180 - RNA, 19 nt, Artificial Sequence
  Description of Artificial Sequence: Synthetic oligonucleotide
  Antisense strand to SEQ ID NO: 1784179
uucacugagacagacagug

SEQ ID NO: 1784181 - RNA, 19 nt, Artificial Sequence
  Description of Artificial Sequence: Synthetic oligonucleotide
  Sense strand starting at position 519 of SEQ ID NO: 1562943
cagggccugccugaaagau

SEQ ID NO: 1784182 - RNA, 19 nt, Artificial Sequence
  Description of Artificial Sequence: Synthetic oligonucleotide
  Antisense strand to SEQ ID NO: 1784181
aucuuucaggcaggcccug

SEQ ID NO: 1784183 - RNA, 19 nt, Artificial Sequence
  Description of Artificial Sequence: Synthetic oligonucleotide
  Sense strand starting at position 579 of SEQ ID NO: 1562943
acguguccucccgguguau

SEQ ID NO: 1784184 - RNA, 19 nt, Artificial Sequence
  Description of Artificial Sequence: Synthetic oligonucleotide
  Antisense strand to SEQ ID NO: 1784183
auacaccgggaggacacgu

SEQ ID NO: 1784185 - RNA, 19 nt, Artificial Sequence
  Description of Artificial Sequence: Synthetic oligonucleotide
  Sense strand starting at position 861 of SEQ ID NO: 1562943
ucagguuauuccucuguua

SEQ ID NO: 1784186 - RNA, 19 nt, Artificial Sequence
  Description of Artificial Sequence: Synthetic oligonucleotide
  Antisense strand to SEQ ID NO: 1784185
uaacagaggaauaaccuga

SEQ ID NO: 1784187 - RNA, 19 nt, Artificial Sequence
  Description of Artificial Sequence: Synthetic oligonucleotide
  Sense strand starting at position 863 of SEQ ID NO: 1562943
agguuauuccucuguuaau

SEQ ID NO: 1784188 - RNA, 19 nt, Artificial Sequence
  Description of Artificial Sequence: Synthetic oligonucleotide
  Antisense strand to SEQ ID NO: 1784187
auuaacagaggaauaaccu

SEQ ID NO: 1784189 - RNA, 19 nt, Artificial Sequence
  Description of Artificial Sequence: Synthetic oligonucleotide
  Sense strand starting at position 864 of SEQ ID NO: 1562943
gguuauuccucuguuaaug

SEQ ID NO: 1784190 - RNA, 19 nt, Artificial Sequence
  Description of Artificial Sequence: Synthetic oligonucleotide
  Antisense strand to SEQ ID NO: 1784189
cauuaacagaggaauaacc

SEQ ID NO: 1784191 - RNA, 19 nt, Artificial Sequence
  Description of Artificial Sequence: Synthetic oligonucleotide
  Sense strand starting at position 872 of SEQ ID NO: 1562943
cucuguuaaugguaagaca

SEQ ID NO: 1784192 - RNA, 19 nt, Artificial Sequence
  Description of Artificial Sequence: Synthetic oligonucleotide
  Antisense strand to SEQ ID NO: 1784191
ugucuuaccauuaacagag

SEQ ID NO: 1784193 - RNA, 19 nt, Artificial Sequence
  Description of Artificial Sequence: Synthetic oligonucleotide
  Sense strand starting at position 875 of SEQ ID NO: 1562943
uguuaaugguaagacauaa

SEQ ID NO: 1784194 - RNA, 19 nt, Artificial Sequence
  Description of Artificial Sequence: Synthetic oligonucleotide
  Antisense strand to SEQ ID NO: 1784193
uuaugucuuaccauuaaca

SEQ ID NO: 1784195 - RNA, 19 nt, Artificial Sequence
  Description of Artificial Sequence: Synthetic oligonucleotide
  Sense strand starting at position 905 of SEQ ID NO: 1562943
ggcccuggguuuccaauaa

SEQ ID NO: 1784196 - RNA, 19 nt, Artificial Sequence
  Description of Artificial Sequence: Synthetic oligonucleotide
  Antisense strand to SEQ ID NO: 1784195
uuauuggaaacccagggcc

SEQ ID NO: 1784197 - RNA, 19 nt, Artificial Sequence
  Description of Artificial Sequence: Synthetic oligonucleotide
  Sense strand starting at position 909 of SEQ ID NO: 1562943
cuggguuuccaauaagucu

SEQ ID NO: 1784198 - RNA, 19 nt, Artificial Sequence
  Description of Artificial Sequence: Synthetic oligonucleotide
  Antisense strand to SEQ ID NO: 1784197
agacuuauuggaaacccag

SEQ ID NO: 1784199 - RNA, 19 nt, Artificial Sequence
  Description of Artificial Sequence: Synthetic oligonucleotide
  Sense strand starting at position 990 of SEQ ID NO: 1562943
ggcacuuuaucuuggcagu

SEQ ID NO: 1784200 - RNA, 19 nt, Artificial Sequence
  Description of Artificial Sequence: Synthetic oligonucleotide
  Antisense strand to SEQ ID NO: 1784199
acugccaagauaaagugcc

SEQ ID NO: 1784201 - RNA, 19 nt, Artificial Sequence
  Description of Artificial Sequence: Synthetic oligonucleotide
  Sense strand starting at position 1157 of SEQ ID NO: 1562943
ccaugaggucuuggacaac

SEQ ID NO: 1784202 - RNA, 19 nt, Artificial Sequence
  Description of Artificial Sequence: Synthetic oligonucleotide
  Antisense strand to SEQ ID NO: 1784201
guuguccaagaccucaugg

SEQ ID NO: 1784203 - RNA, 19 nt, Artificial Sequence
  Description of Artificial Sequence: Synthetic oligonucleotide
  Sense strand starting at position 1335 of SEQ ID NO: 1562943
gcucaagaacucuggauaa

SEQ ID NO: 1784204 - RNA, 19 nt, Artificial Sequence
  Description of Artificial Sequence: Synthetic oligonucleotide
  Antisense strand to SEQ ID NO: 1784203
uuauccagaguucuugagc

SEQ ID NO: 1784205 - RNA, 19 nt, Artificial Sequence
  Description of Artificial Sequence: Synthetic oligonucleotide
  Sense strand starting at position 1427 of SEQ ID NO: 1562943
gaguguuugugguaguuga

SEQ ID NO: 1784206 - RNA, 19 nt, Artificial Sequence
  Description of Artificial Sequence: Synthetic oligonucleotide
  Antisense strand to SEQ ID NO: 1784205
ucaacuaccacaaacacuc

SEQ ID NO: 1784207 - RNA, 19 nt, Artificial Sequence
  Description of Artificial Sequence: Synthetic oligonucleotide
  Sense strand starting at position 1435 of SEQ ID NO: 1562943
gugguaguugacucgucuu

SEQ ID NO: 1784208 - RNA, 19 nt, Artificial Sequence
  Description of Artificial Sequence: Synthetic oligonucleotide
  Antisense strand to SEQ ID NO: 1784207
aagacgagucaacuaccac

SEQ ID NO: 1784209 - RNA, 19 nt, Artificial Sequence
  Description of Artificial Sequence: Synthetic oligonucleotide
  Sense strand starting at position 1441 of SEQ ID NO: 1562943
guugacucgucuucccuga

SEQ ID NO: 1784210 - RNA, 19 nt, Artificial Sequence
  Description of Artificial Sequence: Synthetic oligonucleotide
  Antisense strand to SEQ ID NO: 1784209
ucagggaagacgagucaac

SEQ ID NO: 1784211 - RNA, 19 nt, Artificial Sequence
  Description of Artificial Sequence: Synthetic oligonucleotide
  Sense strand starting at position 1484 of SEQ ID NO: 1562943
gggcuauuacucuagcucu

SEQ ID NO: 1784212 - RNA, 19 nt, Artificial Sequence
  Description of Artificial Sequence: Synthetic oligonucleotide
  Antisense strand to SEQ ID NO: 1784211
agagcuagaguaauagccc

SEQ ID NO: 1784213 - RNA, 19 nt, Artificial Sequence
  Description of Artificial Sequence: Synthetic oligonucleotide
  Sense strand starting at position 1540 of SEQ ID NO: 1562943
guagaagcucaauaaaucu

SEQ ID NO: 1784214 - RNA, 19 nt, Artificial Sequence
  Description of Artificial Sequence: Synthetic oligonucleotide
  Antisense strand to SEQ ID NO: 1784213
agauuuauugagcuucuac

SEQ ID NO: 1784215 - RNA, 19 nt, Artificial Sequence
  Description of Artificial Sequence: Synthetic oligonucleotide
  Sense strand starting at position 1557 of SEQ ID NO: 1562943
cuuucuuuccugggauuaa

SEQ ID NO: 1784216 - RNA, 19 nt, Artificial Sequence
  Description of Artificial Sequence: Synthetic oligonucleotide
  Antisense strand to SEQ ID NO: 1784215
uuaaucccaggaaagaaag

SEQ ID NO: 1784217 - RNA, 19 nt, Artificial Sequence
  Description of Artificial Sequence: Synthetic oligonucleotide
  Sense strand starting at position 1558 of SEQ ID NO: 1562943
uuucuuuccugggauuaag

SEQ ID NO: 1784218 - RNA, 19 nt, Artificial Sequence
  Description of Artificial Sequence: Synthetic oligonucleotide
  Antisense strand to SEQ ID NO: 1784217
cuuaaucccaggaaagaaa

SEQ ID NO: 1784219 - RNA, 19 nt, Artificial Sequence
  Description of Artificial Sequence: Synthetic oligonucleotide
  Sense strand starting at position 1569 of SEQ ID NO: 1562943
ggauuaagucaaggguaua

SEQ ID NO: 1784220 - RNA, 19 nt, Artificial Sequence
  Description of Artificial Sequence: Synthetic oligonucleotide
  Antisense strand to SEQ ID NO: 1784219
uauacccuugacuuaaucc

SEQ ID NO: 1784221 - RNA, 19 nt, Artificial Sequence
  Description of Artificial Sequence: Synthetic oligonucleotide
  Sense strand starting at position 1609 of SEQ ID NO: 1562943
guaggugcucaacgaauuu

SEQ ID NO: 1784222 - RNA, 19 nt, Artificial Sequence
  Description of Artificial Sequence: Synthetic oligonucleotide
  Antisense strand to SEQ ID NO: 1784221
aaauucguugagcaccuac

SEQ ID NO: 1784223 - RNA, 19 nt, Artificial Sequence
  Description of Artificial Sequence: Synthetic oligonucleotide
  Sense strand starting at position 1700 of SEQ ID NO: 1562943
cuggucaucuaaggaauca

SEQ ID NO: 1784224 - RNA, 19 nt, Artificial Sequence
  Description of Artificial Sequence: Synthetic oligonucleotide
  Antisense strand to SEQ ID NO: 1784223
ugauuccuuagaugaccag

SEQ ID NO: 1784225 - RNA, 19 nt, Artificial Sequence
  Description of Artificial Sequence: Synthetic oligonucleotide
  Sense strand starting at position 1795 of SEQ ID NO: 1562943
gcgucuccuaccugggaau

SEQ ID NO: 1784226 - RNA, 19 nt, Artificial Sequence
  Description of Artificial Sequence: Synthetic oligonucleotide
  Antisense strand to SEQ ID NO: 1784225
auucccagguaggagacgc

SEQ ID NO: 1784227 - RNA, 19 nt, Artificial Sequence
  Description of Artificial Sequence: Synthetic oligonucleotide
  Sense strand starting at position 2191 of SEQ ID NO: 1562943
gggcgacuccagugaugaa

SEQ ID NO: 1784228 - RNA, 19 nt, Artificial Sequence
  Description of Artificial Sequence: Synthetic oligonucleotide
  Antisense strand to SEQ ID NO: 1784227
uucaucacuggagucgccc

SEQ ID NO: 1784229 - RNA, 19 nt, Artificial Sequence
  Description of Artificial Sequence: Synthetic oligonucleotide
  Sense strand starting at position 2582 of SEQ ID NO: 1562943
ugaggagaacuuugugugu

SEQ ID NO: 1784230 - RNA, 19 nt, Artificial Sequence
  Description of Artificial Sequence: Synthetic oligonucleotide
  Antisense strand to SEQ ID NO: 1784229
acacacaaaguucuccuca

SEQ ID NO: 1784231 - RNA, 19 nt, Artificial Sequence
  Description of Artificial Sequence: Synthetic oligonucleotide
  Sense strand starting at position 2672 of SEQ ID NO: 1562943
gcugaucccuccgaaaggu

SEQ ID NO: 1784232 - RNA, 19 nt, Artificial Sequence
  Description of Artificial Sequence: Synthetic oligonucleotide
  Antisense strand to SEQ ID NO: 1784231
accuuucggagggaucagc

SEQ ID NO: 1784233 - RNA, 19 nt, Artificial Sequence
  Description of Artificial Sequence: Synthetic oligonucleotide
  Sense strand starting at position 3306 of SEQ ID NO: 1562943
ggagucaccuaggcuuagu

SEQ ID NO: 1784234 - RNA, 19 nt, Artificial Sequence
  Description of Artificial Sequence: Synthetic oligonucleotide
  Antisense strand to SEQ ID NO: 1784233
acuaagccuaggugacucc

SEQ ID NO: 1784235 - RNA, 19 nt, Artificial Sequence
  Description of Artificial Sequence: Synthetic oligonucleotide
  Sense strand starting at position 3326 of SEQ ID NO: 1562943
gccagaggucuucgaggca

SEQ ID NO: 1784236 - RNA, 19 nt, Artificial Sequence
  Description of Artificial Sequence: Synthetic oligonucleotide
  Antisense strand to SEQ ID NO: 1784235
ugccucgaagaccucuggc

SEQ ID NO: 1784237 - RNA, 19 nt, Artificial Sequence
  Description of Artificial Sequence: Synthetic oligonucleotide
  Sense strand starting at position 3697 of SEQ ID NO: 1562943
ugagaugugugcccucagu

SEQ ID NO: 1784238 - RNA, 19 nt, Artificial Sequence
  Description of Artificial Sequence: Synthetic oligonucleotide
  Antisense strand to SEQ ID NO: 1784237
acugagggcacacaucuca

SEQ ID NO: 1784239 - RNA, 19 nt, Artificial Sequence
  Description of Artificial Sequence: Synthetic oligonucleotide
  Sense strand starting at position 3733 of SEQ ID NO: 1562943
aagguuuggagagguguua

SEQ ID NO: 1784240 - RNA, 19 nt, Artificial Sequence
  Description of Artificial Sequence: Synthetic oligonucleotide
  Antisense strand to SEQ ID NO: 1784239
uaacaccucuccaaaccuu

SEQ ID NO: 1784241 - RNA, 19 nt, Artificial Sequence
  Description of Artificial Sequence: Synthetic oligonucleotide
  Sense strand starting at position 3806 of SEQ ID NO: 1562943
aagagaauguucucguugu

SEQ ID NO: 1784242 - RNA, 19 nt, Artificial Sequence
  Description of Artificial Sequence: Synthetic oligonucleotide
  Antisense strand to SEQ ID NO: 1784241
acaacgagaacauucucuu

SEQ ID NO: 1784243 - RNA, 19 nt, Artificial Sequence
  Description of Artificial Sequence: Synthetic oligonucleotide
  Sense strand starting at position 3807 of SEQ ID NO: 1562943
agagaauguucucguugug

SEQ ID NO: 1784244 - RNA, 19 nt, Artificial Sequence
  Description of Artificial Sequence: Synthetic oligonucleotide
  Antisense strand to SEQ ID NO: 1784243
cacaacgagaacauucucu

SEQ ID NO: 1784245 - RNA, 19 nt, Artificial Sequence
  Description of Artificial Sequence: Synthetic oligonucleotide
  Sense strand starting at position 3814 of SEQ ID NO: 1562943
guucucguugugugauaca

SEQ ID NO: 1784246 - RNA, 19 nt, Artificial Sequence
  Description of Artificial Sequence: Synthetic oligonucleotide
  Antisense strand to SEQ ID NO: 1784245
uguaucacacaacgagaac

SEQ ID NO: 1784247 - RNA, 19 nt, Artificial Sequence
  Description of Artificial Sequence: Synthetic oligonucleotide
  Sense strand starting at position 3817 of SEQ ID NO: 1562943
cucguugugugauacagca

SEQ ID NO: 1784248 - RNA, 19 nt, Artificial Sequence
  Description of Artificial Sequence: Synthetic oligonucleotide
  Antisense strand to SEQ ID NO: 1784247
ugcuguaucacacaacgag

SEQ ID NO: 1784249 - RNA, 19 nt, Artificial Sequence
  Description of Artificial Sequence: Synthetic oligonucleotide
  Sense strand starting at position 3819 of SEQ ID NO: 1562943
cguugugugauacagcaaa

SEQ ID NO: 1784250 - RNA, 19 nt, Artificial Sequence
  Description of Artificial Sequence: Synthetic oligonucleotide
  Antisense strand to SEQ ID NO: 1784249
uuugcuguaucacacaacg

SEQ ID NO: 1784251 - RNA, 19 nt, Artificial Sequence
  Description of Artificial Sequence: Synthetic oligonucleotide
  Sense strand starting at position 3977 of SEQ ID NO: 1562943
agcuccauuggcugagaga

SEQ ID NO: 1784252 - RNA, 19 nt, Artificial Sequence
  Description of Artificial Sequence: Synthetic oligonucleotide
  Antisense strand to SEQ ID NO: 1784251
ucucucagccaauggagcu

SEQ ID NO: 1784253 - RNA, 19 nt, Artificial Sequence
  Description of Artificial Sequence: Synthetic oligonucleotide
  Sense strand starting at position 599 of SEQ ID NO: 1562944
cccagauugucagcuguaa

SEQ ID NO: 1784254 - RNA, 19 nt, Artificial Sequence
  Description of Artificial Sequence: Synthetic oligonucleotide
  Antisense strand to SEQ ID NO: 1784253
uuacagcugacaaucuggg

SEQ ID NO: 1784255 - RNA, 19 nt, Artificial Sequence
  Description of Artificial Sequence: Synthetic oligonucleotide
  Sense strand starting at position 607 of SEQ ID NO: 1562944
gucagcuguaaccguuuau

SEQ ID NO: 1784256 - RNA, 19 nt, Artificial Sequence
  Description of Artificial Sequence: Synthetic oligonucleotide
  Antisense strand to SEQ ID NO: 1784255
auaaacgguuacagcugac

SEQ ID NO: 1784257 - RNA, 19 nt, Artificial Sequence
  Description of Artificial Sequence: Synthetic oligonucleotide
  Sense strand starting at position 619 of SEQ ID NO: 1562944
cguuuaugaccguagcgua

SEQ ID NO: 1784258 - RNA, 19 nt, Artificial Sequence
  Description of Artificial Sequence: Synthetic oligonucleotide
  Antisense strand to SEQ ID NO: 1784257
uacgcuacggucauaaacg

SEQ ID NO: 1784259 - RNA, 19 nt, Artificial Sequence
  Description of Artificial Sequence: Synthetic oligonucleotide
  Sense strand starting at position 648 of SEQ ID NO: 1562944
ggucuuuccaccugguaug

SEQ ID NO: 1784260 - RNA, 19 nt, Artificial Sequence
  Description of Artificial Sequence: Synthetic oligonucleotide
  Antisense strand to SEQ ID NO: 1784259
cauaccagguggaaagacc

SEQ ID NO: 1784261 - RNA, 19 nt, Artificial Sequence
  Description of Artificial Sequence: Synthetic oligonucleotide
  Sense strand starting at position 787 of SEQ ID NO: 1562944
ggaggucuguccuuuacuu

SEQ ID NO: 1784262 - RNA, 19 nt, Artificial Sequence
  Description of Artificial Sequence: Synthetic oligonucleotide
  Antisense strand to SEQ ID NO: 1784261
aaguaaaggacagaccucc

SEQ ID NO: 1784263 - RNA, 19 nt, Artificial Sequence
  Description of Artificial Sequence: Synthetic oligonucleotide
  Sense strand starting at position 910 of SEQ ID NO: 1562944
cccagucucucccauugua

SEQ ID NO: 1784264 - RNA, 19 nt, Artificial Sequence
  Description of Artificial Sequence: Synthetic oligonucleotide
  Antisense strand to SEQ ID NO: 1784263
uacaaugggagagacuggg

SEQ ID NO: 1784265 - RNA, 19 nt, Artificial Sequence
  Description of Artificial Sequence: Synthetic oligonucleotide
  Sense strand starting at position 1128 of SEQ ID NO: 1562944
gcaaguaucccaggacgca

SEQ ID NO: 1784266 - RNA, 19 nt, Artificial Sequence
  Description of Artificial Sequence: Synthetic oligonucleotide
  Antisense strand to SEQ ID NO: 1784265
ugcguccugggauacuugc

SEQ ID NO: 1784267 - RNA, 19 nt, Artificial Sequence
  Description of Artificial Sequence: Synthetic oligonucleotide
  Sense strand starting at position 1316 of SEQ ID NO: 1562944
cgcggaugcucaagucgua

SEQ ID NO: 1784268 - RNA, 19 nt, Artificial Sequence
  Description of Artificial Sequence: Synthetic oligonucleotide
  Antisense strand to SEQ ID NO: 1784267
uacgacuugagcauccgcg

SEQ ID NO: 1784269 - RNA, 19 nt, Artificial Sequence
  Description of Artificial Sequence: Synthetic oligonucleotide
  Sense strand starting at position 2270 of SEQ ID NO: 1562944
cugugugaccuugggcgaa

SEQ ID NO: 1784270 - RNA, 19 nt, Artificial Sequence
  Description of Artificial Sequence: Synthetic oligonucleotide
  Antisense strand to SEQ ID NO: 1784269
uucgcccaaggucacacag

SEQ ID NO: 1784271 - RNA, 19 nt, Artificial Sequence
  Description of Artificial Sequence: Synthetic oligonucleotide
  Sense strand starting at position 2382 of SEQ ID NO: 1562944
gcccauuaccuacgugauu

SEQ ID NO: 1784272 - RNA, 19 nt, Artificial Sequence
  Description of Artificial Sequence: Synthetic oligonucleotide
  Antisense strand to SEQ ID NO: 1784271
aaucacguagguaaugggc

SEQ ID NO: 1784273 - RNA, 19 nt, Artificial Sequence
  Description of Artificial Sequence: Synthetic oligonucleotide
  Sense strand starting at position 2391 of SEQ ID NO: 1562944
cuacgugauucucgaaccu

SEQ ID NO: 1784274 - RNA, 19 nt, Artificial Sequence
  Description of Artificial Sequence: Synthetic oligonucleotide
  Antisense strand to SEQ ID NO: 1784273
agguucgagaaucacguag

SEQ ID NO: 1784275 - RNA, 19 nt, Artificial Sequence
  Description of Artificial Sequence: Synthetic oligonucleotide
  Sense strand starting at position 2423 of SEQ ID NO: 1562944
ggcaucgcugguugagaga

SEQ ID NO: 1784276 - RNA, 19 nt, Artificial Sequence
  Description of Artificial Sequence: Synthetic oligonucleotide
  Antisense strand to SEQ ID NO: 1784275
ucucucaaccagcgaugcc

SEQ ID NO: 1784277 - RNA, 19 nt, Artificial Sequence
  Description of Artificial Sequence: Synthetic oligonucleotide
  Sense strand starting at position 2462 of SEQ ID NO: 1562944
gggaaucugcaagguuaga

SEQ ID NO: 1784278 - RNA, 19 nt, Artificial Sequence
  Description of Artificial Sequence: Synthetic oligonucleotide
  Antisense strand to SEQ ID NO: 1784277
ucuaaccuugcagauuccc

SEQ ID NO: 1784279 - RNA, 19 nt, Artificial Sequence
  Description of Artificial Sequence: Synthetic oligonucleotide
  Sense strand starting at position 2498 of SEQ ID NO: 1562944
cuugaagucuccuuugaag

SEQ ID NO: 1784280 - RNA, 19 nt, Artificial Sequence
  Description of Artificial Sequence: Synthetic oligonucleotide
  Antisense strand to SEQ ID NO: 1784279
cuucaaaggagacuucaag

SEQ ID NO: 1784281 - RNA, 19 nt, Artificial Sequence
  Description of Artificial Sequence: Synthetic oligonucleotide
  Sense strand starting at position 2500 of SEQ ID NO: 1562944
ugaagucuccuuugaaguc

SEQ ID NO: 1784282 - RNA, 19 nt, Artificial Sequence
  Description of Artificial Sequence: Synthetic oligonucleotide
  Antisense strand to SEQ ID NO: 1784281
gacuucaaaggagacuuca

SEQ ID NO: 1784283 - RNA, 19 nt, Artificial Sequence
  Description of Artificial Sequence: Synthetic oligonucleotide
  Sense strand starting at position 2544 of SEQ ID NO: 1562944
ggguaaauggcccacacua

SEQ ID NO: 1784284 - RNA, 19 nt, Artificial Sequence
  Description of Artificial Sequence: Synthetic oligonucleotide
  Antisense strand to SEQ ID NO: 1784283
uagugugggccauuuaccc

SEQ ID NO: 1784285 - RNA, 19 nt, Artificial Sequence
  Description of Artificial Sequence: Synthetic oligonucleotide
  Sense strand starting at position 2715 of SEQ ID NO: 1562944
ucaccuuuccugcgugagu

SEQ ID NO: 1784286 - RNA, 19 nt, Artificial Sequence
  Description of Artificial Sequence: Synthetic oligonucleotide
  Antisense strand to SEQ ID NO: 1784285
acucacgcaggaaagguga

SEQ ID NO: 1784287 - RNA, 19 nt, Artificial Sequence
  Description of Artificial Sequence: Synthetic oligonucleotide
  Sense strand starting at position 2716 of SEQ ID NO: 1562944
caccuuuccugcgugaguu

SEQ ID NO: 1784288 - RNA, 19 nt, Artificial Sequence
  Description of Artificial Sequence: Synthetic oligonucleotide
  Antisense strand to SEQ ID NO: 1784287
aacucacgcaggaaaggug

SEQ ID NO: 1784289 - RNA, 19 nt, Artificial Sequence
  Description of Artificial Sequence: Synthetic oligonucleotide
  Sense strand starting at position 2948 of SEQ ID NO: 1562944
ggcggcaaugcucaagaaa

SEQ ID NO: 1784290 - RNA, 19 nt, Artificial Sequence
  Description of Artificial Sequence: Synthetic oligonucleotide
  Antisense strand to SEQ ID NO: 1784289
uuucuugagcauugccgcc

SEQ ID NO: 1784291 - RNA, 19 nt, Artificial Sequence
  Description of Artificial Sequence: Synthetic oligonucleotide
  Sense strand starting at position 2981 of SEQ ID NO: 1562944
agaucucugcacugacuaa

SEQ ID NO: 1784292 - RNA, 19 nt, Artificial Sequence
  Description of Artificial Sequence: Synthetic oligonucleotide
  Antisense strand to SEQ ID NO: 1784291
uuagucagugcagagaucu

SEQ ID NO: 1784293 - RNA, 19 nt, Artificial Sequence
  Description of Artificial Sequence: Synthetic oligonucleotide
  Sense strand starting at position 3038 of SEQ ID NO: 1562944
ucuuauugcuugucaggag

SEQ ID NO: 1784294 - RNA, 19 nt, Artificial Sequence
  Description of Artificial Sequence: Synthetic oligonucleotide
  Antisense strand to SEQ ID NO: 1784293
cuccugacaagcaauaaga

SEQ ID NO: 1784295 - RNA, 19 nt, Artificial Sequence
  Description of Artificial Sequence: Synthetic oligonucleotide
  Sense strand starting at position 3047 of SEQ ID NO: 1562944
uugucaggaggcugagaua

SEQ ID NO: 1784296 - RNA, 19 nt, Artificial Sequence
  Description of Artificial Sequence: Synthetic oligonucleotide
  Antisense strand to SEQ ID NO: 1784295
uaucucagccuccugacaa

SEQ ID NO: 1784297 - RNA, 19 nt, Artificial Sequence
  Description of Artificial Sequence: Synthetic oligonucleotide
  Sense strand starting at position 3098 of SEQ ID NO: 1562944
aaaguucugcuuugggaga

SEQ ID NO: 1784298 - RNA, 19 nt, Artificial Sequence
  Description of Artificial Sequence: Synthetic oligonucleotide
  Antisense strand to SEQ ID NO: 1784297
ucucccaaagcagaacuuu

SEQ ID NO: 1784299 - RNA, 19 nt, Artificial Sequence
  Description of Artificial Sequence: Synthetic oligonucleotide
  Sense strand starting at position 3100 of SEQ ID NO: 1562944
aguucugcuuugggagaga

SEQ ID NO: 1784300 - RNA, 19 nt, Artificial Sequence
  Description of Artificial Sequence: Synthetic oligonucleotide
  Antisense strand to SEQ ID NO: 1784299
ucucucccaaagcagaacu

SEQ ID NO: 1784301 - RNA, 19 nt, Artificial Sequence
  Description of Artificial Sequence: Synthetic oligonucleotide
  Sense strand starting at position 3113 of SEQ ID NO: 1562944
gagagaagguucuagaaca

SEQ ID NO: 1784302 - RNA, 19 nt, Artificial Sequence
  Description of Artificial Sequence: Synthetic oligonucleotide
  Antisense strand to SEQ ID NO: 1784301
uguucuagaaccuucucuc

SEQ ID NO: 1784303 - RNA, 19 nt, Artificial Sequence
  Description of Artificial Sequence: Synthetic oligonucleotide
  Sense strand starting at position 3251 of SEQ ID NO: 1562944
accagaaagugucuccaga

SEQ ID NO: 1784304 - RNA, 19 nt, Artificial Sequence
  Description of Artificial Sequence: Synthetic oligonucleotide
  Antisense strand to SEQ ID NO: 1784303
ucuggagacacuuucuggu

SEQ ID NO: 1784305 - RNA, 19 nt, Artificial Sequence
  Description of Artificial Sequence: Synthetic oligonucleotide
  Sense strand starting at position 3621 of SEQ ID NO: 1562944
gcagguguguacuacgaca

SEQ ID NO: 1784306 - RNA, 19 nt, Artificial Sequence
  Description of Artificial Sequence: Synthetic oligonucleotide
  Antisense strand to SEQ ID NO: 1784305
ugucguaguacacaccugc

SEQ ID NO: 1784307 - RNA, 19 nt, Artificial Sequence
  Description of Artificial Sequence: Synthetic oligonucleotide
  Sense strand starting at position 3778 of SEQ ID NO: 1562944
uggccaaacuucuggguuu

SEQ ID NO: 1784308 - RNA, 19 nt, Artificial Sequence
  Description of Artificial Sequence: Synthetic oligonucleotide
  Antisense strand to SEQ ID NO: 1784307
aaacccagaaguuuggcca

SEQ ID NO: 1784309 - RNA, 19 nt, Artificial Sequence
  Description of Artificial Sequence: Synthetic oligonucleotide
  Sense strand starting at position 99 of SEQ ID NO: 1562945
gcgcuaaggccgagagcau

SEQ ID NO: 1784310 - RNA, 19 nt, Artificial Sequence
  Description of Artificial Sequence: Synthetic oligonucleotide
  Antisense strand to SEQ ID NO: 1784309
augcucucggccuuagcgc

SEQ ID NO: 1784311 - RNA, 19 nt, Artificial Sequence
  Description of Artificial Sequence: Synthetic oligonucleotide
  Sense strand starting at position 210 of SEQ ID NO: 1562945
gaggaaggaguuuguugaa

SEQ ID NO: 1784312 - RNA, 19 nt, Artificial Sequence
  Description of Artificial Sequence: Synthetic oligonucleotide
  Antisense strand to SEQ ID NO: 1784311
uucaacaaacuccuuccuc

SEQ ID NO: 1784313 - RNA, 19 nt, Artificial Sequence
  Description of Artificial Sequence: Synthetic oligonucleotide
  Sense strand starting at position 236 of SEQ ID NO: 1562945
aaacucagauuuggugaaa

SEQ ID NO: 1784314 - RNA, 19 nt, Artificial Sequence
  Description of Artificial Sequence: Synthetic oligonucleotide
  Antisense strand to SEQ ID NO: 1784313
uuucaccaaaucugaguuu

SEQ ID NO: 1784315 - RNA, 19 nt, Artificial Sequence
  Description of Artificial Sequence: Synthetic oligonucleotide
  Sense strand starting at position 343 of SEQ ID NO: 1562945
acugcagggcauuauauaa

SEQ ID NO: 1784316 - RNA, 19 nt, Artificial Sequence
  Description of Artificial Sequence: Synthetic oligonucleotide
  Antisense strand to SEQ ID NO: 1784315
uuauauaaugcccugcagu

SEQ ID NO: 1784317 - RNA, 19 nt, Artificial Sequence
  Description of Artificial Sequence: Synthetic oligonucleotide
  Sense strand starting at position 489 of SEQ ID NO: 1562945
gaaagcacuguccagugau

SEQ ID NO: 1784318 - RNA, 19 nt, Artificial Sequence
  Description of Artificial Sequence: Synthetic oligonucleotide
  Antisense strand to SEQ ID NO: 1784317
aucacuggacagugcuuuc

SEQ ID NO: 1784319 - RNA, 19 nt, Artificial Sequence
  Description of Artificial Sequence: Synthetic oligonucleotide
  Sense strand starting at position 492 of SEQ ID NO: 1562945
agcacuguccagugaugaa

SEQ ID NO: 1784320 - RNA, 19 nt, Artificial Sequence
  Description of Artificial Sequence: Synthetic oligonucleotide
  Antisense strand to SEQ ID NO: 1784319
uucaucacuggacagugcu

SEQ ID NO: 1784321 - RNA, 19 nt, Artificial Sequence
  Description of Artificial Sequence: Synthetic oligonucleotide
  Sense strand starting at position 504 of SEQ ID NO: 1562945
ugaugaaauuuccacagag

SEQ ID NO: 1784322 - RNA, 19 nt, Artificial Sequence
  Description of Artificial Sequence: Synthetic oligonucleotide
  Antisense strand to SEQ ID NO: 1784321
cucuguggaaauuucauca

SEQ ID NO: 1784323 - RNA, 19 nt, Artificial Sequence
  Description of Artificial Sequence: Synthetic oligonucleotide
  Sense strand starting at position 544 of SEQ ID NO: 1562945
ugaucuuaagucugagacu

SEQ ID NO: 1784324 - RNA, 19 nt, Artificial Sequence
  Description of Artificial Sequence: Synthetic oligonucleotide
  Antisense strand to SEQ ID NO: 1784323
agucucagacuuaagauca

SEQ ID NO: 1784325 - RNA, 19 nt, Artificial Sequence
  Description of Artificial Sequence: Synthetic oligonucleotide
  Sense strand starting at position 570 of SEQ ID NO: 1562945
uugaauguccuacagugua

SEQ ID NO: 1784326 - RNA, 19 nt, Artificial Sequence
  Description of Artificial Sequence: Synthetic oligonucleotide
  Antisense strand to SEQ ID NO: 1784325
uacacuguaggacauucaa

SEQ ID NO: 1784327 - RNA, 19 nt, Artificial Sequence
  Description of Artificial Sequence: Synthetic oligonucleotide
  Sense strand starting at position 575 of SEQ ID NO: 1562945
uguccuacaguguaaauga

SEQ ID NO: 1784328 - RNA, 19 nt, Artificial Sequence
  Description of Artificial Sequence: Synthetic oligonucleotide
  Antisense strand to SEQ ID NO: 1784327
ucauuuacacuguaggaca

SEQ ID NO: 1784329 - RNA, 19 nt, Artificial Sequence
  Description of Artificial Sequence: Synthetic oligonucleotide
  Sense strand starting at position 654 of SEQ ID NO: 1562945
gguaauggagcguacagaa

SEQ ID NO: 1784330 - RNA, 19 nt, Artificial Sequence
  Description of Artificial Sequence: Synthetic oligonucleotide
  Antisense strand to SEQ ID NO: 1784329
uucuguacgcuccauuacc

SEQ ID NO: 1784331 - RNA, 19 nt, Artificial Sequence
  Description of Artificial Sequence: Synthetic oligonucleotide
  Sense strand starting at position 763 of SEQ ID NO: 1562945
auuagauauugccuggcau

SEQ ID NO: 1784332 - RNA, 19 nt, Artificial Sequence
  Description of Artificial Sequence: Synthetic oligonucleotide
  Antisense strand to SEQ ID NO: 1784331
augccaggcaauaucuaau

SEQ ID NO: 1784333 - RNA, 19 nt, Artificial Sequence
  Description of Artificial Sequence: Synthetic oligonucleotide
  Sense strand starting at position 764 of SEQ ID NO: 1562945
uuagauauugccuggcaua

SEQ ID NO: 1784334 - RNA, 19 nt, Artificial Sequence
  Description of Artificial Sequence: Synthetic oligonucleotide
  Antisense strand to SEQ ID NO: 1784333
uaugccaggcaauaucuaa

SEQ ID NO: 1784335 - RNA, 19 nt, Artificial Sequence
  Description of Artificial Sequence: Synthetic oligonucleotide
  Sense strand starting at position 1118 of SEQ ID NO: 1562945
uaauaagcaguuuagagua

SEQ ID NO: 1784336 - RNA, 19 nt, Artificial Sequence
  Description of Artificial Sequence: Synthetic oligonucleotide
  Antisense strand to SEQ ID NO: 1784335
uacucuaaacugcuuauua

SEQ ID NO: 1784337 - RNA, 19 nt, Artificial Sequence
  Description of Artificial Sequence: Synthetic oligonucleotide
  Sense strand starting at position 1384 of SEQ ID NO: 1562945
aggaaucugcuauggaguu

SEQ ID NO: 1784338 - RNA, 19 nt, Artificial Sequence
  Description of Artificial Sequence: Synthetic oligonucleotide
  Antisense strand to SEQ ID NO: 1784337
aacuccauagcagauuccu

SEQ ID NO: 1784339 - RNA, 19 nt, Artificial Sequence
  Description of Artificial Sequence: Synthetic oligonucleotide
  Sense strand starting at position 1484 of SEQ ID NO: 1562945
auaaaucuggucuguucua

SEQ ID NO: 1784340 - RNA, 19 nt, Artificial Sequence
  Description of Artificial Sequence: Synthetic oligonucleotide
  Antisense strand to SEQ ID NO: 1784339
uagaacagaccagauuuau

SEQ ID NO: 1784341 - RNA, 19 nt, Artificial Sequence
  Description of Artificial Sequence: Synthetic oligonucleotide
  Sense strand starting at position 1554 of SEQ ID NO: 1562945
uuauuuagaucccagagag

SEQ ID NO: 1784342 - RNA, 19 nt, Artificial Sequence
  Description of Artificial Sequence: Synthetic oligonucleotide
  Antisense strand to SEQ ID NO: 1784341
cucucugggaucuaaauaa

SEQ ID NO: 1784343 - RNA, 19 nt, Artificial Sequence
  Description of Artificial Sequence: Synthetic oligonucleotide
  Sense strand starting at position 1740 of SEQ ID NO: 1562945
guggguaauugaucucucu

SEQ ID NO: 1784344 - RNA, 19 nt, Artificial Sequence
  Description of Artificial Sequence: Synthetic oligonucleotide
  Antisense strand to SEQ ID NO: 1784343
agagagaucaauuacccac

SEQ ID NO: 1784345 - RNA, 19 nt, Artificial Sequence
  Description of Artificial Sequence: Synthetic oligonucleotide
  Sense strand starting at position 1743 of SEQ ID NO: 1562945
gguaauugaucucucuuua

SEQ ID NO: 1784346 - RNA, 19 nt, Artificial Sequence
  Description of Artificial Sequence: Synthetic oligonucleotide
  Antisense strand to SEQ ID NO: 1784345
uaaagagagaucaauuacc

SEQ ID NO: 1784347 - RNA, 19 nt, Artificial Sequence
  Description of Artificial Sequence: Synthetic oligonucleotide
  Sense strand starting at position 1899 of SEQ ID NO: 1562945
ugccuaagguaauuaauca

SEQ ID NO: 1784348 - RNA, 19 nt, Artificial Sequence
  Description of Artificial Sequence: Synthetic oligonucleotide
  Antisense strand to SEQ ID NO: 1784347
ugauuaauuaccuuaggca

SEQ ID NO: 1784349 - RNA, 19 nt, Artificial Sequence
  Description of Artificial Sequence: Synthetic oligonucleotide
  Sense strand starting at position 1903 of SEQ ID NO: 1562945
uaagguaauuaaucagagu

SEQ ID NO: 1784350 - RNA, 19 nt, Artificial Sequence
  Description of Artificial Sequence: Synthetic oligonucleotide
  Antisense strand to SEQ ID NO: 1784349
acucugauuaauuaccuua

SEQ ID NO: 1784351 - RNA, 19 nt, Artificial Sequence
  Description of Artificial Sequence: Synthetic oligonucleotide
  Sense strand starting at position 2102 of SEQ ID NO: 1562945
cgccaugugcuggcauauu

SEQ ID NO: 1784352 - RNA, 19 nt, Artificial Sequence
  Description of Artificial Sequence: Synthetic oligonucleotide
  Antisense strand to SEQ ID NO: 1784351
aauaugccagcacauggcg

SEQ ID NO: 1784353 - RNA, 19 nt, Artificial Sequence
  Description of Artificial Sequence: Synthetic oligonucleotide
  Sense strand starting at position 2125 of SEQ ID NO: 1562945
ggaugcgaugauggaauua

SEQ ID NO: 1784354 - RNA, 19 nt, Artificial Sequence
  Description of Artificial Sequence: Synthetic oligonucleotide
  Antisense strand to SEQ ID NO: 1784353
uaauuccaucaucgcaucc

SEQ ID NO: 1784355 - RNA, 19 nt, Artificial Sequence
  Description of Artificial Sequence: Synthetic oligonucleotide
  Sense strand starting at position 2200 of SEQ ID NO: 1562945
agauuccagccaugaaugu

SEQ ID NO: 1784356 - RNA, 19 nt, Artificial Sequence
  Description of Artificial Sequence: Synthetic oligonucleotide
  Antisense strand to SEQ ID NO: 1784355
acauucauggcuggaaucu

SEQ ID NO: 1784357 - RNA, 19 nt, Artificial Sequence
  Description of Artificial Sequence: Synthetic oligonucleotide
  Sense strand starting at position 2379 of SEQ ID NO: 1562945
gaacuugcuuguccuggaa

SEQ ID NO: 1784358 - RNA, 19 nt, Artificial Sequence
  Description of Artificial Sequence: Synthetic oligonucleotide
  Antisense strand to SEQ ID NO: 1784357
uuccaggacaagcaaguuc

SEQ ID NO: 1784359 - RNA, 19 nt, Artificial Sequence
  Description of Artificial Sequence: Synthetic oligonucleotide
  Sense strand starting at position 2549 of SEQ ID NO: 1562945
cacaaaggugcaugcaaau

SEQ ID NO: 1784360 - RNA, 19 nt, Artificial Sequence
  Description of Artificial Sequence: Synthetic oligonucleotide
  Antisense strand to SEQ ID NO: 1784359
auuugcaugcaccuuugug

SEQ ID NO: 1784361 - RNA, 19 nt, Artificial Sequence
  Description of Artificial Sequence: Synthetic oligonucleotide
  Sense strand starting at position 2749 of SEQ ID NO: 1562945
ggagaauacugacaauaag

SEQ ID NO: 1784362 - RNA, 19 nt, Artificial Sequence
  Description of Artificial Sequence: Synthetic oligonucleotide
  Antisense strand to SEQ ID NO: 1784361
cuuauugucaguauucucc

SEQ ID NO: 1784363 - RNA, 19 nt, Artificial Sequence
  Description of Artificial Sequence: Synthetic oligonucleotide
  Sense strand starting at position 2819 of SEQ ID NO: 1562945
agaugugguucaguccaga

SEQ ID NO: 1784364 - RNA, 19 nt, Artificial Sequence
  Description of Artificial Sequence: Synthetic oligonucleotide
  Antisense strand to SEQ ID NO: 1784363
ucuggacugaaccacaucu

SEQ ID NO: 1784365 - RNA, 19 nt, Artificial Sequence
  Description of Artificial Sequence: Synthetic oligonucleotide
  Sense strand starting at position 2822 of SEQ ID NO: 1562945
ugugguucaguccagaagu

SEQ ID NO: 1784366 - RNA, 19 nt, Artificial Sequence
  Description of Artificial Sequence: Synthetic oligonucleotide
  Antisense strand to SEQ ID NO: 1784365
acuucuggacugaaccaca

SEQ ID NO: 1784367 - RNA, 19 nt, Artificial Sequence
  Description of Artificial Sequence: Synthetic oligonucleotide
  Sense strand starting at position 2830 of SEQ ID NO: 1562945
aguccagaaguuggucuaa

SEQ ID NO: 1784368 - RNA, 19 nt, Artificial Sequence
  Description of Artificial Sequence: Synthetic oligonucleotide
  Antisense strand to SEQ ID NO: 1784367
uuagaccaacuucuggacu

SEQ ID NO: 1784369 - RNA, 19 nt, Artificial Sequence
  Description of Artificial Sequence: Synthetic oligonucleotide
  Sense strand starting at position 2832 of SEQ ID NO: 1562945
uccagaaguuggucuaauu

SEQ ID NO: 1784370 - RNA, 19 nt, Artificial Sequence
  Description of Artificial Sequence: Synthetic oligonucleotide
  Antisense strand to SEQ ID NO: 1784369
aauuagaccaacuucugga

SEQ ID NO: 1784371 - RNA, 19 nt, Artificial Sequence
  Description of Artificial Sequence: Synthetic oligonucleotide
  Sense strand starting at position 2856 of SEQ ID NO: 1562945
cuuuacuagugaucuugga

SEQ ID NO: 1784372 - RNA, 19 nt, Artificial Sequence
  Description of Artificial Sequence: Synthetic oligonucleotide
  Antisense strand to SEQ ID NO: 1784371
uccaagaucacuaguaaag

SEQ ID NO: 1784373 - RNA, 19 nt, Artificial Sequence
  Description of Artificial Sequence: Synthetic oligonucleotide
  Sense strand starting at position 2963 of SEQ ID NO: 1562945
uuuaucaguugucucauaa

SEQ ID NO: 1784374 - RNA, 19 nt, Artificial Sequence
  Description of Artificial Sequence: Synthetic oligonucleotide
  Antisense strand to SEQ ID NO: 1784373
uuaugagacaacugauaaa

SEQ ID NO: 1784375 - RNA, 19 nt, Artificial Sequence
  Description of Artificial Sequence: Synthetic oligonucleotide
  Sense strand starting at position 3637 of SEQ ID NO: 1562945
ggcucuauucugugcauuu

SEQ ID NO: 1784376 - RNA, 19 nt, Artificial Sequence
  Description of Artificial Sequence: Synthetic oligonucleotide
  Antisense strand to SEQ ID NO: 1784375
aaaugcacagaauagagcc

SEQ ID NO: 1784377 - RNA, 19 nt, Artificial Sequence
  Description of Artificial Sequence: Synthetic oligonucleotide
  Sense strand starting at position 3676 of SEQ ID NO: 1562945
uggcauaauccauaguaau

SEQ ID NO: 1784378 - RNA, 19 nt, Artificial Sequence
  Description of Artificial Sequence: Synthetic oligonucleotide
  Antisense strand to SEQ ID NO: 1784377
auuacuauggauuaugcca

SEQ ID NO: 1784379 - RNA, 19 nt, Artificial Sequence
  Description of Artificial Sequence: Synthetic oligonucleotide
  Sense strand starting at position 3734 of SEQ ID NO: 1562945
cgcugaguaaaguaauaua

SEQ ID NO: 1784380 - RNA, 19 nt, Artificial Sequence
  Description of Artificial Sequence: Synthetic oligonucleotide
  Antisense strand to SEQ ID NO: 1784379
uauauuacuuuacucagcg

SEQ ID NO: 1784381 - RNA, 19 nt, Artificial Sequence
  Description of Artificial Sequence: Synthetic oligonucleotide
  Sense strand starting at position 3761 of SEQ ID NO: 1562945
cuaggccuguucuuauuua

SEQ ID NO: 1784382 - RNA, 19 nt, Artificial Sequence
  Description of Artificial Sequence: Synthetic oligonucleotide
  Antisense strand to SEQ ID NO: 1784381
uaaauaagaacaggccuag

SEQ ID NO: 1784383 - RNA, 19 nt, Artificial Sequence
  Description of Artificial Sequence: Synthetic oligonucleotide
  Sense strand starting at position 3814 of SEQ ID NO: 1562945
auaguacucucugaauuug

SEQ ID NO: 1784384 - RNA, 19 nt, Artificial Sequence
  Description of Artificial Sequence: Synthetic oligonucleotide
  Antisense strand to SEQ ID NO: 1784383
caaauucagagaguacuau

SEQ ID NO: 1784385 - RNA, 19 nt, Artificial Sequence
  Description of Artificial Sequence: Synthetic oligonucleotide
  Sense strand starting at position 3885 of SEQ ID NO: 1562945
caaagugaguaagcagaaa

SEQ ID NO: 1784386 - RNA, 19 nt, Artificial Sequence
  Description of Artificial Sequence: Synthetic oligonucleotide
  Antisense strand to SEQ ID NO: 1784385
uuucugcuuacucacuuug

SEQ ID NO: 1784387 - RNA, 19 nt, Artificial Sequence
  Description of Artificial Sequence: Synthetic oligonucleotide
  Sense strand starting at position 3910 of SEQ ID NO: 1562945
aggugaguuucacuggaag

SEQ ID NO: 1784388 - RNA, 19 nt, Artificial Sequence
  Description of Artificial Sequence: Synthetic oligonucleotide
  Antisense strand to SEQ ID NO: 1784387
cuuccagugaaacucaccu

SEQ ID NO: 1784389 - RNA, 19 nt, Artificial Sequence
  Description of Artificial Sequence: Synthetic oligonucleotide
  Sense strand starting at position 244 of SEQ ID NO: 1562946
agggucacuuuaccuaaau

SEQ ID NO: 1784390 - RNA, 19 nt, Artificial Sequence
  Description of Artificial Sequence: Synthetic oligonucleotide
  Antisense strand to SEQ ID NO: 1784389
auuuagguaaagugacccu

SEQ ID NO: 1784391 - RNA, 19 nt, Artificial Sequence
  Description of Artificial Sequence: Synthetic oligonucleotide
  Sense strand starting at position 245 of SEQ ID NO: 1562946
gggucacuuuaccuaaauc

SEQ ID NO: 1784392 - RNA, 19 nt, Artificial Sequence
  Description of Artificial Sequence: Synthetic oligonucleotide
  Antisense strand to SEQ ID NO: 1784391
gauuuagguaaagugaccc

SEQ ID NO: 1784393 - RNA, 19 nt, Artificial Sequence
  Description of Artificial Sequence: Synthetic oligonucleotide
  Sense strand starting at position 421 of SEQ ID NO: 1562946
ccaagagugguguaaugga

SEQ ID NO: 1784394 - RNA, 19 nt, Artificial Sequence
  Description of Artificial Sequence: Synthetic oligonucleotide
  Antisense strand to SEQ ID NO: 1784393
uccauuacaccacucuugg

SEQ ID NO: 1784395 - RNA, 19 nt, Artificial Sequence
  Description of Artificial Sequence: Synthetic oligonucleotide
  Sense strand starting at position 581 of SEQ ID NO: 1562946
ggacuugaaucuccuccaa

SEQ ID NO: 1784396 - RNA, 19 nt, Artificial Sequence
  Description of Artificial Sequence: Synthetic oligonucleotide
  Antisense strand to SEQ ID NO: 1784395
uuggaggagauucaagucc

SEQ ID NO: 1784397 - RNA, 19 nt, Artificial Sequence
  Description of Artificial Sequence: Synthetic oligonucleotide
  Sense strand starting at position 660 of SEQ ID NO: 1562946
gaguaagaaucuuccaagu

SEQ ID NO: 1784398 - RNA, 19 nt, Artificial Sequence
  Description of Artificial Sequence: Synthetic oligonucleotide
  Antisense strand to SEQ ID NO: 1784397
acuuggaagauucuuacuc

SEQ ID NO: 1784399 - RNA, 19 nt, Artificial Sequence
  Description of Artificial Sequence: Synthetic oligonucleotide
  Sense strand starting at position 674 of SEQ ID NO: 1562946
caagucuucccagguuaag

SEQ ID NO: 1784400 - RNA, 19 nt, Artificial Sequence
  Description of Artificial Sequence: Synthetic oligonucleotide
  Antisense strand to SEQ ID NO: 1784399
cuuaaccugggaagacuug

SEQ ID NO: 1784401 - RNA, 19 nt, Artificial Sequence
  Description of Artificial Sequence: Synthetic oligonucleotide
  Sense strand starting at position 739 of SEQ ID NO: 1562946
auccuaugacuccgagaga

SEQ ID NO: 1784402 - RNA, 19 nt, Artificial Sequence
  Description of Artificial Sequence: Synthetic oligonucleotide
  Antisense strand to SEQ ID NO: 1784401
ucucucggagucauaggau

SEQ ID NO: 1784403 - RNA, 19 nt, Artificial Sequence
  Description of Artificial Sequence: Synthetic oligonucleotide
  Sense strand starting at position 785 of SEQ ID NO: 1562946
guaggugagacucaucaug

SEQ ID NO: 1784404 - RNA, 19 nt, Artificial Sequence
  Description of Artificial Sequence: Synthetic oligonucleotide
  Antisense strand to SEQ ID NO: 1784403
caugaugagucucaccuac

SEQ ID NO: 1784405 - RNA, 19 nt, Artificial Sequence
  Description of Artificial Sequence: Synthetic oligonucleotide
  Sense strand starting at position 787 of SEQ ID NO: 1562946
aggugagacucaucauguc

SEQ ID NO: 1784406 - RNA, 19 nt, Artificial Sequence
  Description of Artificial Sequence: Synthetic oligonucleotide
  Antisense strand to SEQ ID NO: 1784405
gacaugaugagucucaccu

SEQ ID NO: 1784407 - RNA, 19 nt, Artificial Sequence
  Description of Artificial Sequence: Synthetic oligonucleotide
  Sense strand starting at position 988 of SEQ ID NO: 1562946
uuuauagcccgggacauua

SEQ ID NO: 1784408 - RNA, 19 nt, Artificial Sequence
  Description of Artificial Sequence: Synthetic oligonucleotide
  Antisense strand to SEQ ID NO: 1784407
uaaugucccgggcuauaaa

SEQ ID NO: 1784409 - RNA, 19 nt, Artificial Sequence
  Description of Artificial Sequence: Synthetic oligonucleotide
  Sense strand starting at position 1026 of SEQ ID NO: 1562946
ggugauguagaaugcaauu

SEQ ID NO: 1784410 - RNA, 19 nt, Artificial Sequence
  Description of Artificial Sequence: Synthetic oligonucleotide
  Antisense strand to SEQ ID NO: 1784409
aauugcauucuacaucacc

SEQ ID NO: 1784411 - RNA, 19 nt, Artificial Sequence
  Description of Artificial Sequence: Synthetic oligonucleotide
  Sense strand starting at position 1032 of SEQ ID NO: 1562946
guagaaugcaauuggcaaa

SEQ ID NO: 1784412 - RNA, 19 nt, Artificial Sequence
  Description of Artificial Sequence: Synthetic oligonucleotide
  Antisense strand to SEQ ID NO: 1784411
uuugccaauugcauucuac

SEQ ID NO: 1784413 - RNA, 19 nt, Artificial Sequence
  Description of Artificial Sequence: Synthetic oligonucleotide
  Sense strand starting at position 1089 of SEQ ID NO: 1562946
auuaguaugcuccacaaag

SEQ ID NO: 1784414 - RNA, 19 nt, Artificial Sequence
  Description of Artificial Sequence: Synthetic oligonucleotide
  Antisense strand to SEQ ID NO: 1784413
cuuuguggagcauacuaau

SEQ ID NO: 1784415 - RNA, 19 nt, Artificial Sequence
  Description of Artificial Sequence: Synthetic oligonucleotide
  Sense strand starting at position 1304 of SEQ ID NO: 1562946
cccucuucucgggagguuu

SEQ ID NO: 1784416 - RNA, 19 nt, Artificial Sequence
  Description of Artificial Sequence: Synthetic oligonucleotide
  Antisense strand to SEQ ID NO: 1784415
aaaccucccgagaagaggg

SEQ ID NO: 1784417 - RNA, 19 nt, Artificial Sequence
  Description of Artificial Sequence: Synthetic oligonucleotide
  Sense strand starting at position 1316 of SEQ ID NO: 1562946
gagguuucccaccagaucu

SEQ ID NO: 1784418 - RNA, 19 nt, Artificial Sequence
  Description of Artificial Sequence: Synthetic oligonucleotide
  Antisense strand to SEQ ID NO: 1784417
agaucuggugggaaaccuc

SEQ ID NO: 1784419 - RNA, 19 nt, Artificial Sequence
  Description of Artificial Sequence: Synthetic oligonucleotide
  Sense strand starting at position 1427 of SEQ ID NO: 1562946
ucucaaccuuguucgauuu

SEQ ID NO: 1784420 - RNA, 19 nt, Artificial Sequence
  Description of Artificial Sequence: Synthetic oligonucleotide
  Antisense strand to SEQ ID NO: 1784419
aaaucgaacaagguugaga

SEQ ID NO: 1784421 - RNA, 19 nt, Artificial Sequence
  Description of Artificial Sequence: Synthetic oligonucleotide
  Sense strand starting at position 2603 of SEQ ID NO: 1562946
ugggauuguccuggaggca

SEQ ID NO: 1784422 - RNA, 19 nt, Artificial Sequence
  Description of Artificial Sequence: Synthetic oligonucleotide
  Antisense strand to SEQ ID NO: 1784421
ugccuccaggacaauccca

SEQ ID NO: 1784423 - RNA, 19 nt, Artificial Sequence
  Description of Artificial Sequence: Synthetic oligonucleotide
  Sense strand starting at position 2746 of SEQ ID NO: 1562946
guacuaguuguacagaguu

SEQ ID NO: 1784424 - RNA, 19 nt, Artificial Sequence
  Description of Artificial Sequence: Synthetic oligonucleotide
  Antisense strand to SEQ ID NO: 1784423
aacucuguacaacuaguac

SEQ ID NO: 1784425 - RNA, 19 nt, Artificial Sequence
  Description of Artificial Sequence: Synthetic oligonucleotide
  Sense strand starting at position 2748 of SEQ ID NO: 1562946
acuaguuguacagaguuaa

SEQ ID NO: 1784426 - RNA, 19 nt, Artificial Sequence
  Description of Artificial Sequence: Synthetic oligonucleotide
  Antisense strand to SEQ ID NO: 1784425
uuaacucuguacaacuagu

SEQ ID NO: 1784427 - RNA, 19 nt, Artificial Sequence
  Description of Artificial Sequence: Synthetic oligonucleotide
  Sense strand starting at position 2760 of SEQ ID NO: 1562946
gaguuaaguccugaguuua

SEQ ID NO: 1784428 - RNA, 19 nt, Artificial Sequence
  Description of Artificial Sequence: Synthetic oligonucleotide
  Antisense strand to SEQ ID NO: 1784427
uaaacucaggacuuaacuc

SEQ ID NO: 1784429 - RNA, 19 nt, Artificial Sequence
  Description of Artificial Sequence: Synthetic oligonucleotide
  Sense strand starting at position 2970 of SEQ ID NO: 1562946
guaauaauacccgauguuu

SEQ ID NO: 1784430 - RNA, 19 nt, Artificial Sequence
  Description of Artificial Sequence: Synthetic oligonucleotide
  Antisense strand to SEQ ID NO: 1784429
aaacaucggguauuauuac

SEQ ID NO: 1784431 - RNA, 19 nt, Artificial Sequence
  Description of Artificial Sequence: Synthetic oligonucleotide
  Sense strand starting at position 2976 of SEQ ID NO: 1562946
auacccgauguuuguaaga

SEQ ID NO: 1784432 - RNA, 19 nt, Artificial Sequence
  Description of Artificial Sequence: Synthetic oligonucleotide
  Antisense strand to SEQ ID NO: 1784431
ucuuacaaacaucggguau

SEQ ID NO: 1784433 - RNA, 19 nt, Artificial Sequence
  Description of Artificial Sequence: Synthetic oligonucleotide
  Sense strand starting at position 3093 of SEQ ID NO: 1562946
aguuaaauccugcagcaaa

SEQ ID NO: 1784434 - RNA, 19 nt, Artificial Sequence
  Description of Artificial Sequence: Synthetic oligonucleotide
  Antisense strand to SEQ ID NO: 1784433
uuugcugcaggauuuaacu

SEQ ID NO: 1784435 - RNA, 19 nt, Artificial Sequence
  Description of Artificial Sequence: Synthetic oligonucleotide
  Sense strand starting at position 3115 of SEQ ID NO: 1562946
guggcagauccggaauuca

SEQ ID NO: 1784436 - RNA, 19 nt, Artificial Sequence
  Description of Artificial Sequence: Synthetic oligonucleotide
  Antisense strand to SEQ ID NO: 1784435
ugaauuccggaucugccac

SEQ ID NO: 1784437 - RNA, 19 nt, Artificial Sequence
  Description of Artificial Sequence: Synthetic oligonucleotide
  Sense strand starting at position 3138 of SEQ ID NO: 1562946
acgagaacauauucucuuu

SEQ ID NO: 1784438 - RNA, 19 nt, Artificial Sequence
  Description of Artificial Sequence: Synthetic oligonucleotide
  Antisense strand to SEQ ID NO: 1784437
aaagagaauauguucucgu

SEQ ID NO: 1784439 - RNA, 19 nt, Artificial Sequence
  Description of Artificial Sequence: Synthetic oligonucleotide
  Sense strand starting at position 3193 of SEQ ID NO: 1562946
uaccaacuucguggagaua

SEQ ID NO: 1784440 - RNA, 19 nt, Artificial Sequence
  Description of Artificial Sequence: Synthetic oligonucleotide
  Antisense strand to SEQ ID NO: 1784439
uaucuccacgaaguuggua

SEQ ID NO: 1784441 - RNA, 19 nt, Artificial Sequence
  Description of Artificial Sequence: Synthetic oligonucleotide
  Sense strand starting at position 3210 of SEQ ID NO: 1562946
uagagauaucugugcaaua

SEQ ID NO: 1784442 - RNA, 19 nt, Artificial Sequence
  Description of Artificial Sequence: Synthetic oligonucleotide
  Antisense strand to SEQ ID NO: 1784441
uauugcacagauaucucua

SEQ ID NO: 1784443 - RNA, 19 nt, Artificial Sequence
  Description of Artificial Sequence: Synthetic oligonucleotide
  Sense strand starting at position 3211 of SEQ ID NO: 1562946
agagauaucugugcaauag

SEQ ID NO: 1784444 - RNA, 19 nt, Artificial Sequence
  Description of Artificial Sequence: Synthetic oligonucleotide
  Antisense strand to SEQ ID NO: 1784443
cuauugcacagauaucucu

SEQ ID NO: 1784445 - RNA, 19 nt, Artificial Sequence
  Description of Artificial Sequence: Synthetic oligonucleotide
  Sense strand starting at position 3215 of SEQ ID NO: 1562946
auaucugugcaauagauuc

SEQ ID NO: 1784446 - RNA, 19 nt, Artificial Sequence
  Description of Artificial Sequence: Synthetic oligonucleotide
  Antisense strand to SEQ ID NO: 1784445
gaaucuauugcacagauau

SEQ ID NO: 1784447 - RNA, 19 nt, Artificial Sequence
  Description of Artificial Sequence: Synthetic oligonucleotide
  Sense strand starting at position 3315 of SEQ ID NO: 1562946
aaaggauauugcgugaaua

SEQ ID NO: 1784448 - RNA, 19 nt, Artificial Sequence
  Description of Artificial Sequence: Synthetic oligonucleotide
  Antisense strand to SEQ ID NO: 1784447
uauucacgcaauauccuuu

SEQ ID NO: 1784449 - RNA, 19 nt, Artificial Sequence
  Description of Artificial Sequence: Synthetic oligonucleotide
  Sense strand starting at position 3316 of SEQ ID NO: 1562946
aaggauauugcgugaauaa

SEQ ID NO: 1784450 - RNA, 19 nt, Artificial Sequence
  Description of Artificial Sequence: Synthetic oligonucleotide
  Antisense strand to SEQ ID NO: 1784449
uuauucacgcaauauccuu

SEQ ID NO: 1784451 - RNA, 19 nt, Artificial Sequence
  Description of Artificial Sequence: Synthetic oligonucleotide
  Sense strand starting at position 3317 of SEQ ID NO: 1562946
aggauauugcgugaauaac

SEQ ID NO: 1784452 - RNA, 19 nt, Artificial Sequence
  Description of Artificial Sequence: Synthetic oligonucleotide
  Antisense strand to SEQ ID NO: 1784451
guuauucacgcaauauccu

SEQ ID NO: 1784453 - RNA, 19 nt, Artificial Sequence
  Description of Artificial Sequence: Synthetic oligonucleotide
  Sense strand starting at position 3326 of SEQ ID NO: 1562946
cgugaauaaccuggauucu

SEQ ID NO: 1784454 - RNA, 19 nt, Artificial Sequence
  Description of Artificial Sequence: Synthetic oligonucleotide
  Antisense strand to SEQ ID NO: 1784453
agaauccagguuauucacg

SEQ ID NO: 1784455 - RNA, 19 nt, Artificial Sequence
  Description of Artificial Sequence: Synthetic oligonucleotide
  Sense strand starting at position 3391 of SEQ ID NO: 1562946
ggaccucagcuccaucauu

SEQ ID NO: 1784456 - RNA, 19 nt, Artificial Sequence
  Description of Artificial Sequence: Synthetic oligonucleotide
  Antisense strand to SEQ ID NO: 1784455
aaugauggagcugaggucc

SEQ ID NO: 1784457 - RNA, 19 nt, Artificial Sequence
  Description of Artificial Sequence: Synthetic oligonucleotide
  Sense strand starting at position 3861 of SEQ ID NO: 1562946
guguguagaagccaggaau

SEQ ID NO: 1784458 - RNA, 19 nt, Artificial Sequence
  Description of Artificial Sequence: Synthetic oligonucleotide
  Antisense strand to SEQ ID NO: 1784457
auuccuggcuucuacacac

SEQ ID NO: 1784459 - RNA, 19 nt, Artificial Sequence
  Description of Artificial Sequence: Synthetic oligonucleotide
  Sense strand starting at position 3872 of SEQ ID NO: 1562946
ccaggaauguugcuugaca

SEQ ID NO: 1784460 - RNA, 19 nt, Artificial Sequence
  Description of Artificial Sequence: Synthetic oligonucleotide
  Antisense strand to SEQ ID NO: 1784459
ugucaagcaacauuccugg

SEQ ID NO: 1784461 - RNA, 19 nt, Artificial Sequence
  Description of Artificial Sequence: Synthetic oligonucleotide
  Sense strand starting at position 3873 of SEQ ID NO: 1562946
caggaauguugcuugacau

SEQ ID NO: 1784462 - RNA, 19 nt, Artificial Sequence
  Description of Artificial Sequence: Synthetic oligonucleotide
  Antisense strand to SEQ ID NO: 1784461
augucaagcaacauuccug

SEQ ID NO: 1784463 - RNA, 19 nt, Artificial Sequence
  Description of Artificial Sequence: Synthetic oligonucleotide
  Sense strand starting at position 3874 of SEQ ID NO: 1562946
aggaauguugcuugacauc

SEQ ID NO: 1784464 - RNA, 19 nt, Artificial Sequence
  Description of Artificial Sequence: Synthetic oligonucleotide
  Antisense strand to SEQ ID NO: 1784463
gaugucaagcaacauuccu

SEQ ID NO: 1784465 - RNA, 19 nt, Artificial Sequence
  Description of Artificial Sequence: Synthetic oligonucleotide
  Sense strand starting at position 3958 of SEQ ID NO: 1562946
ugagaaacgcuggguuaga

SEQ ID NO: 1784466 - RNA, 19 nt, Artificial Sequence
  Description of Artificial Sequence: Synthetic oligonucleotide
  Antisense strand to SEQ ID NO: 1784465
ucuaacccagcguuucuca

SEQ ID NO: 1784467 - RNA, 19 nt, Artificial Sequence
  Description of Artificial Sequence: Synthetic oligonucleotide
  Sense strand starting at position 3959 of SEQ ID NO: 1562946
gagaaacgcuggguuagau

SEQ ID NO: 1784468 - RNA, 19 nt, Artificial Sequence
  Description of Artificial Sequence: Synthetic oligonucleotide
  Antisense strand to SEQ ID NO: 1784467
aucuaacccagcguuucuc

SEQ ID NO: 1784469 - RNA, 19 nt, Artificial Sequence
  Description of Artificial Sequence: Synthetic oligonucleotide
  Sense strand starting at position 375 of SEQ ID NO: 1562947
uugaauuucugugcagguu

SEQ ID NO: 1784470 - RNA, 19 nt, Artificial Sequence
  Description of Artificial Sequence: Synthetic oligonucleotide
  Antisense strand to SEQ ID NO: 1784469
aaccugcacagaaauucaa

SEQ ID NO: 1784471 - RNA, 19 nt, Artificial Sequence
  Description of Artificial Sequence: Synthetic oligonucleotide
  Sense strand starting at position 520 of SEQ ID NO: 1562947
ggguaaucaugggauaagc

SEQ ID NO: 1784472 - RNA, 19 nt, Artificial Sequence
  Description of Artificial Sequence: Synthetic oligonucleotide
  Antisense strand to SEQ ID NO: 1784471
gcuuaucccaugauuaccc

SEQ ID NO: 1784473 - RNA, 19 nt, Artificial Sequence
  Description of Artificial Sequence: Synthetic oligonucleotide
  Sense strand starting at position 545 of SEQ ID NO: 1562947
auuaaauacccgugucagu

SEQ ID NO: 1784474 - RNA, 19 nt, Artificial Sequence
  Description of Artificial Sequence: Synthetic oligonucleotide
  Antisense strand to SEQ ID NO: 1784473
acugacacggguauuuaau

SEQ ID NO: 1784475 - RNA, 19 nt, Artificial Sequence
  Description of Artificial Sequence: Synthetic oligonucleotide
  Sense strand starting at position 674 of SEQ ID NO: 1562947
uguuuagacucuucuauua

SEQ ID NO: 1784476 - RNA, 19 nt, Artificial Sequence
  Description of Artificial Sequence: Synthetic oligonucleotide
  Antisense strand to SEQ ID NO: 1784475
uaauagaagagucuaaaca

SEQ ID NO: 1784477 - RNA, 19 nt, Artificial Sequence
  Description of Artificial Sequence: Synthetic oligonucleotide
  Sense strand starting at position 693 of SEQ ID NO: 1562947
agauaauaauuccaguaag

SEQ ID NO: 1784478 - RNA, 19 nt, Artificial Sequence
  Description of Artificial Sequence: Synthetic oligonucleotide
  Antisense strand to SEQ ID NO: 1784477
cuuacuggaauuauuaucu

SEQ ID NO: 1784479 - RNA, 19 nt, Artificial Sequence
  Description of Artificial Sequence: Synthetic oligonucleotide
  Sense strand starting at position 707 of SEQ ID NO: 1562947
guaagaguuuaacagaauu

SEQ ID NO: 1784480 - RNA, 19 nt, Artificial Sequence
  Description of Artificial Sequence: Synthetic oligonucleotide
  Antisense strand to SEQ ID NO: 1784479
aauucuguuaaacucuuac

SEQ ID NO: 1784481 - RNA, 19 nt, Artificial Sequence
  Description of Artificial Sequence: Synthetic oligonucleotide
  Sense strand starting at position 941 of SEQ ID NO: 1562947
gggauauugucaguguuua

SEQ ID NO: 1784482 - RNA, 19 nt, Artificial Sequence
  Description of Artificial Sequence: Synthetic oligonucleotide
  Antisense strand to SEQ ID NO: 1784481
uaaacacugacaauauccc

SEQ ID NO: 1784483 - RNA, 19 nt, Artificial Sequence
  Description of Artificial Sequence: Synthetic oligonucleotide
  Sense strand starting at position 945 of SEQ ID NO: 1562947
uauugucaguguuuagcca

SEQ ID NO: 1784484 - RNA, 19 nt, Artificial Sequence
  Description of Artificial Sequence: Synthetic oligonucleotide
  Antisense strand to SEQ ID NO: 1784483
uggcuaaacacugacaaua

SEQ ID NO: 1784485 - RNA, 19 nt, Artificial Sequence
  Description of Artificial Sequence: Synthetic oligonucleotide
  Sense strand starting at position 949 of SEQ ID NO: 1562947
gucaguguuuagccagaug

SEQ ID NO: 1784486 - RNA, 19 nt, Artificial Sequence
  Description of Artificial Sequence: Synthetic oligonucleotide
  Antisense strand to SEQ ID NO: 1784485
caucuggcuaaacacugac

SEQ ID NO: 1784487 - RNA, 19 nt, Artificial Sequence
  Description of Artificial Sequence: Synthetic oligonucleotide
  Sense strand starting at position 952 of SEQ ID NO: 1562947
aguguuuagccagauguuc

SEQ ID NO: 1784488 - RNA, 19 nt, Artificial Sequence
  Description of Artificial Sequence: Synthetic oligonucleotide
  Antisense strand to SEQ ID NO: 1784487
gaacaucuggcuaaacacu

SEQ ID NO: 1784489 - RNA, 19 nt, Artificial Sequence
  Description of Artificial Sequence: Synthetic oligonucleotide
  Sense strand starting at position 961 of SEQ ID NO: 1562947
ccagauguucuaggaauau

SEQ ID NO: 1784490 - RNA, 19 nt, Artificial Sequence
  Description of Artificial Sequence: Synthetic oligonucleotide
  Antisense strand to SEQ ID NO: 1784489
auauuccuagaacaucugg

SEQ ID NO: 1784491 - RNA, 19 nt, Artificial Sequence
  Description of Artificial Sequence: Synthetic oligonucleotide
  Sense strand starting at position 1016 of SEQ ID NO: 1562947
cauguuaggugagaaucga

SEQ ID NO: 1784492 - RNA, 19 nt, Artificial Sequence
  Description of Artificial Sequence: Synthetic oligonucleotide
  Antisense strand to SEQ ID NO: 1784491
ucgauucucaccuaacaug

SEQ ID NO: 1784493 - RNA, 19 nt, Artificial Sequence
  Description of Artificial Sequence: Synthetic oligonucleotide
  Sense strand starting at position 1020 of SEQ ID NO: 1562947
uuaggugagaaucgauacu

SEQ ID NO: 1784494 - RNA, 19 nt, Artificial Sequence
  Description of Artificial Sequence: Synthetic oligonucleotide
  Antisense strand to SEQ ID NO: 1784493
aguaucgauucucaccuaa

SEQ ID NO: 1784495 - RNA, 19 nt, Artificial Sequence
  Description of Artificial Sequence: Synthetic oligonucleotide
  Sense strand starting at position 1031 of SEQ ID NO: 1562947
ucgauacuguucucccaaa

SEQ ID NO: 1784496 - RNA, 19 nt, Artificial Sequence
  Description of Artificial Sequence: Synthetic oligonucleotide
  Antisense strand to SEQ ID NO: 1784495
uuugggagaacaguaucga

SEQ ID NO: 1784497 - RNA, 19 nt, Artificial Sequence
  Description of Artificial Sequence: Synthetic oligonucleotide
  Sense strand starting at position 1223 of SEQ ID NO: 1562947
ggagauucuggacgugaca

SEQ ID NO: 1784498 - RNA, 19 nt, Artificial Sequence
  Description of Artificial Sequence: Synthetic oligonucleotide
  Antisense strand to SEQ ID NO: 1784497
ugucacguccagaaucucc

SEQ ID NO: 1784499 - RNA, 19 nt, Artificial Sequence
  Description of Artificial Sequence: Synthetic oligonucleotide
  Sense strand starting at position 1225 of SEQ ID NO: 1562947
agauucuggacgugacaga

SEQ ID NO: 1784500 - RNA, 19 nt, Artificial Sequence
  Description of Artificial Sequence: Synthetic oligonucleotide
  Antisense strand to SEQ ID NO: 1784499
ucugucacguccagaaucu

SEQ ID NO: 1784501 - RNA, 19 nt, Artificial Sequence
  Description of Artificial Sequence: Synthetic oligonucleotide
  Sense strand starting at position 1347 of SEQ ID NO: 1562947
cgaggaucccuccaaguga

SEQ ID NO: 1784502 - RNA, 19 nt, Artificial Sequence
  Description of Artificial Sequence: Synthetic oligonucleotide
  Antisense strand to SEQ ID NO: 1784501
ucacuuggagggauccucg

SEQ ID NO: 1784503 - RNA, 19 nt, Artificial Sequence
  Description of Artificial Sequence: Synthetic oligonucleotide
  Sense strand starting at position 1759 of SEQ ID NO: 1562947
ccaggaacgcccugaaaug

SEQ ID NO: 1784504 - RNA, 19 nt, Artificial Sequence
  Description of Artificial Sequence: Synthetic oligonucleotide
  Antisense strand to SEQ ID NO: 1784503
cauuucagggcguuccugg

SEQ ID NO: 1784505 - RNA, 19 nt, Artificial Sequence
  Description of Artificial Sequence: Synthetic oligonucleotide
  Sense strand starting at position 2520 of SEQ ID NO: 1562947
uccgauuucuguucgggaa

SEQ ID NO: 1784506 - RNA, 19 nt, Artificial Sequence
  Description of Artificial Sequence: Synthetic oligonucleotide
  Antisense strand to SEQ ID NO: 1784505
uucccgaacagaaaucgga

SEQ ID NO: 1784507 - RNA, 19 nt, Artificial Sequence
  Description of Artificial Sequence: Synthetic oligonucleotide
  Sense strand starting at position 2521 of SEQ ID NO: 1562947
ccgauuucuguucgggaac

SEQ ID NO: 1784508 - RNA, 19 nt, Artificial Sequence
  Description of Artificial Sequence: Synthetic oligonucleotide
  Antisense strand to SEQ ID NO: 1784507
guucccgaacagaaaucgg

SEQ ID NO: 1784509 - RNA, 19 nt, Artificial Sequence
  Description of Artificial Sequence: Synthetic oligonucleotide
  Sense strand starting at position 2522 of SEQ ID NO: 1562947
cgauuucuguucgggaacu

SEQ ID NO: 1784510 - RNA, 19 nt, Artificial Sequence
  Description of Artificial Sequence: Synthetic oligonucleotide
  Antisense strand to SEQ ID NO: 1784509
aguucccgaacagaaaucg

SEQ ID NO: 1784511 - RNA, 19 nt, Artificial Sequence
  Description of Artificial Sequence: Synthetic oligonucleotide
  Sense strand starting at position 2523 of SEQ ID NO: 1562947
gauuucuguucgggaacug

SEQ ID NO: 1784512 - RNA, 19 nt, Artificial Sequence
  Description of Artificial Sequence: Synthetic oligonucleotide
  Antisense strand to SEQ ID NO: 1784511
caguucccgaacagaaauc

SEQ ID NO: 1784513 - RNA, 19 nt, Artificial Sequence
  Description of Artificial Sequence: Synthetic oligonucleotide
  Sense strand starting at position 2532 of SEQ ID NO: 1562947
ucgggaacugcucagggau

SEQ ID NO: 1784514 - RNA, 19 nt, Artificial Sequence
  Description of Artificial Sequence: Synthetic oligonucleotide
  Antisense strand to SEQ ID NO: 1784513
aucccugagcaguucccga

SEQ ID NO: 1784515 - RNA, 19 nt, Artificial Sequence
  Description of Artificial Sequence: Synthetic oligonucleotide
  Sense strand starting at position 2732 of SEQ ID NO: 1562947
ccgcauuccucaguuguca

SEQ ID NO: 1784516 - RNA, 19 nt, Artificial Sequence
  Description of Artificial Sequence: Synthetic oligonucleotide
  Antisense strand to SEQ ID NO: 1784515
ugacaacugaggaaugcgg

SEQ ID NO: 1784517 - RNA, 19 nt, Artificial Sequence
  Description of Artificial Sequence: Synthetic oligonucleotide
  Sense strand starting at position 2747 of SEQ ID NO: 1562947
gucaucuuuguagggugau

SEQ ID NO: 1784518 - RNA, 19 nt, Artificial Sequence
  Description of Artificial Sequence: Synthetic oligonucleotide
  Antisense strand to SEQ ID NO: 1784517
aucacccuacaaagaugac

SEQ ID NO: 1784519 - RNA, 19 nt, Artificial Sequence
  Description of Artificial Sequence: Synthetic oligonucleotide
  Sense strand starting at position 2792 of SEQ ID NO: 1562947
gcugcuugugcuguaguga

SEQ ID NO: 1784520 - RNA, 19 nt, Artificial Sequence
  Description of Artificial Sequence: Synthetic oligonucleotide
  Antisense strand to SEQ ID NO: 1784519
ucacuacagcacaagcagc

SEQ ID NO: 1784521 - RNA, 19 nt, Artificial Sequence
  Description of Artificial Sequence: Synthetic oligonucleotide
  Sense strand starting at position 2793 of SEQ ID NO: 1562947
cugcuugugcuguagugaa

SEQ ID NO: 1784522 - RNA, 19 nt, Artificial Sequence
  Description of Artificial Sequence: Synthetic oligonucleotide
  Antisense strand to SEQ ID NO: 1784521
uucacuacagcacaagcag

SEQ ID NO: 1784523 - RNA, 19 nt, Artificial Sequence
  Description of Artificial Sequence: Synthetic oligonucleotide
  Sense strand starting at position 2827 of SEQ ID NO: 1562947
gucgcuguauuucuugaau

SEQ ID NO: 1784524 - RNA, 19 nt, Artificial Sequence
  Description of Artificial Sequence: Synthetic oligonucleotide
  Antisense strand to SEQ ID NO: 1784523
auucaagaaauacagcgac

SEQ ID NO: 1784525 - RNA, 19 nt, Artificial Sequence
  Description of Artificial Sequence: Synthetic oligonucleotide
  Sense strand starting at position 2829 of SEQ ID NO: 1562947
cgcuguauuucuugaauuu

SEQ ID NO: 1784526 - RNA, 19 nt, Artificial Sequence
  Description of Artificial Sequence: Synthetic oligonucleotide
  Antisense strand to SEQ ID NO: 1784525
aaauucaagaaauacagcg

SEQ ID NO: 1784527 - RNA, 19 nt, Artificial Sequence
  Description of Artificial Sequence: Synthetic oligonucleotide
  Sense strand starting at position 3289 of SEQ ID NO: 1562947
ucucccauuucuggcuaga

SEQ ID NO: 1784528 - RNA, 19 nt, Artificial Sequence
  Description of Artificial Sequence: Synthetic oligonucleotide
  Antisense strand to SEQ ID NO: 1784527
ucuagccagaaaugggaga

SEQ ID NO: 1784529 - RNA, 19 nt, Artificial Sequence
  Description of Artificial Sequence: Synthetic oligonucleotide
  Sense strand starting at position 3358 of SEQ ID NO: 1562947
agcacucuuagaugucgua

SEQ ID NO: 1784530 - RNA, 19 nt, Artificial Sequence
  Description of Artificial Sequence: Synthetic oligonucleotide
  Antisense strand to SEQ ID NO: 1784529
uacgacaucuaagagugcu

SEQ ID NO: 1784531 - RNA, 19 nt, Artificial Sequence
  Description of Artificial Sequence: Synthetic oligonucleotide
  Sense strand starting at position 3409 of SEQ ID NO: 1562947
aaagauaacuggcggguaa

SEQ ID NO: 1784532 - RNA, 19 nt, Artificial Sequence
  Description of Artificial Sequence: Synthetic oligonucleotide
  Antisense strand to SEQ ID NO: 1784531
uuacccgccaguuaucuuu

SEQ ID NO: 1784533 - RNA, 19 nt, Artificial Sequence
  Description of Artificial Sequence: Synthetic oligonucleotide
  Sense strand starting at position 3410 of SEQ ID NO: 1562947
aagauaacuggcggguaau

SEQ ID NO: 1784534 - RNA, 19 nt, Artificial Sequence
  Description of Artificial Sequence: Synthetic oligonucleotide
  Antisense strand to SEQ ID NO: 1784533
auuacccgccaguuaucuu

SEQ ID NO: 1784535 - RNA, 19 nt, Artificial Sequence
  Description of Artificial Sequence: Synthetic oligonucleotide
  Sense strand starting at position 3411 of SEQ ID NO: 1562947
agauaacuggcggguaaug

SEQ ID NO: 1784536 - RNA, 19 nt, Artificial Sequence
  Description of Artificial Sequence: Synthetic oligonucleotide
  Antisense strand to SEQ ID NO: 1784535
cauuacccgccaguuaucu

SEQ ID NO: 1784537 - RNA, 19 nt, Artificial Sequence
  Description of Artificial Sequence: Synthetic oligonucleotide
  Sense strand starting at position 3437 of SEQ ID NO: 1562947
cugacucuauugcuaaaga

SEQ ID NO: 1784538 - RNA, 19 nt, Artificial Sequence
  Description of Artificial Sequence: Synthetic oligonucleotide
  Antisense strand to SEQ ID NO: 1784537
ucuuuagcaauagagucag

SEQ ID NO: 1784539 - RNA, 19 nt, Artificial Sequence
  Description of Artificial Sequence: Synthetic oligonucleotide
  Sense strand starting at position 3438 of SEQ ID NO: 1562947
ugacucuauugcuaaagag

SEQ ID NO: 1784540 - RNA, 19 nt, Artificial Sequence
  Description of Artificial Sequence: Synthetic oligonucleotide
  Antisense strand to SEQ ID NO: 1784539
cucuuuagcaauagaguca

SEQ ID NO: 1784541 - RNA, 19 nt, Artificial Sequence
  Description of Artificial Sequence: Synthetic oligonucleotide
  Sense strand starting at position 3773 of SEQ ID NO: 1562947
cugagauuuguuuguuagu

SEQ ID NO: 1784542 - RNA, 19 nt, Artificial Sequence
  Description of Artificial Sequence: Synthetic oligonucleotide
  Antisense strand to SEQ ID NO: 1784541
acuaacaaacaaaucucag

SEQ ID NO: 1784543 - RNA, 19 nt, Artificial Sequence
  Description of Artificial Sequence: Synthetic oligonucleotide
  Sense strand starting at position 3774 of SEQ ID NO: 1562947
ugagauuuguuuguuaguu

SEQ ID NO: 1784544 - RNA, 19 nt, Artificial Sequence
  Description of Artificial Sequence: Synthetic oligonucleotide
  Antisense strand to SEQ ID NO: 1784543
aacuaacaaacaaaucuca

SEQ ID NO: 1784545 - RNA, 19 nt, Artificial Sequence
  Description of Artificial Sequence: Synthetic oligonucleotide
  Sense strand starting at position 3782 of SEQ ID NO: 1562947
guuuguuaguuauaaacag

SEQ ID NO: 1784546 - RNA, 19 nt, Artificial Sequence
  Description of Artificial Sequence: Synthetic oligonucleotide
  Antisense strand to SEQ ID NO: 1784545
cuguuuauaacuaacaaac

SEQ ID NO: 1784547 - RNA, 19 nt, Artificial Sequence
  Description of Artificial Sequence: Synthetic oligonucleotide
  Sense strand starting at position 3941 of SEQ ID NO: 1562947
uuaauuuguugugugccua

SEQ ID NO: 1784548 - RNA, 19 nt, Artificial Sequence
  Description of Artificial Sequence: Synthetic oligonucleotide
  Antisense strand to SEQ ID NO: 1784547
uaggcacacaacaaauuaa

SEQ ID NO: 1784549 - RNA, 19 nt, Artificial Sequence
  Description of Artificial Sequence: Synthetic oligonucleotide
  Sense strand starting at position 10 of SEQ ID NO: 1562948
aaagaaaguuguucgucau

SEQ ID NO: 1784550 - RNA, 19 nt, Artificial Sequence
  Description of Artificial Sequence: Synthetic oligonucleotide
  Antisense strand to SEQ ID NO: 1784549
augacgaacaacuuucuuu

SEQ ID NO: 1784551 - RNA, 19 nt, Artificial Sequence
  Description of Artificial Sequence: Synthetic oligonucleotide
  Sense strand starting at position 11 of SEQ ID NO: 1562948
aagaaaguuguucgucaua

SEQ ID NO: 1784552 - RNA, 19 nt, Artificial Sequence
  Description of Artificial Sequence: Synthetic oligonucleotide
  Antisense strand to SEQ ID NO: 1784551
uaugacgaacaacuuucuu

SEQ ID NO: 1784553 - RNA, 19 nt, Artificial Sequence
  Description of Artificial Sequence: Synthetic oligonucleotide
  Sense strand starting at position 13 of SEQ ID NO: 1562948
gaaaguuguucgucauaac

SEQ ID NO: 1784554 - RNA, 19 nt, Artificial Sequence
  Description of Artificial Sequence: Synthetic oligonucleotide
  Antisense strand to SEQ ID NO: 1784553
guuaugacgaacaacuuuc

SEQ ID NO: 1784555 - RNA, 19 nt, Artificial Sequence
  Description of Artificial Sequence: Synthetic oligonucleotide
  Sense strand starting at position 14 of SEQ ID NO: 1562948
aaaguuguucgucauaacu

SEQ ID NO: 1784556 - RNA, 19 nt, Artificial Sequence
  Description of Artificial Sequence: Synthetic oligonucleotide
  Antisense strand to SEQ ID NO: 1784555
aguuaugacgaacaacuuu

SEQ ID NO: 1784557 - RNA, 19 nt, Artificial Sequence
  Description of Artificial Sequence: Synthetic oligonucleotide
  Sense strand starting at position 20 of SEQ ID NO: 1562948
guucgucauaacugacuga

SEQ ID NO: 1784558 - RNA, 19 nt, Artificial Sequence
  Description of Artificial Sequence: Synthetic oligonucleotide
  Antisense strand to SEQ ID NO: 1784557
ucagucaguuaugacgaac

SEQ ID NO: 1784559 - RNA, 19 nt, Artificial Sequence
  Description of Artificial Sequence: Synthetic oligonucleotide
  Sense strand starting at position 24 of SEQ ID NO: 1562948
gucauaacugacugaucgu

SEQ ID NO: 1784560 - RNA, 19 nt, Artificial Sequence
  Description of Artificial Sequence: Synthetic oligonucleotide
  Antisense strand to SEQ ID NO: 1784559
acgaucagucaguuaugac

SEQ ID NO: 1784561 - RNA, 19 nt, Artificial Sequence
  Description of Artificial Sequence: Synthetic oligonucleotide
  Sense strand starting at position 27 of SEQ ID NO: 1562948
auaacugacugaucguaga

SEQ ID NO: 1784562 - RNA, 19 nt, Artificial Sequence
  Description of Artificial Sequence: Synthetic oligonucleotide
  Antisense strand to SEQ ID NO: 1784561
ucuacgaucagucaguuau

SEQ ID NO: 1784563 - RNA, 19 nt, Artificial Sequence
  Description of Artificial Sequence: Synthetic oligonucleotide
  Sense strand starting at position 88 of SEQ ID NO: 1562948
ggguaugugguugauaggu

SEQ ID NO: 1784564 - RNA, 19 nt, Artificial Sequence
  Description of Artificial Sequence: Synthetic oligonucleotide
  Antisense strand to SEQ ID NO: 1784563
accuaucaaccacauaccc

SEQ ID NO: 1784565 - RNA, 19 nt, Artificial Sequence
  Description of Artificial Sequence: Synthetic oligonucleotide
  Sense strand starting at position 136 of SEQ ID NO: 1562948
ugugaucuggccuaaagaa

SEQ ID NO: 1784566 - RNA, 19 nt, Artificial Sequence
  Description of Artificial Sequence: Synthetic oligonucleotide
  Antisense strand to SEQ ID NO: 1784565
uucuuuaggccagaucaca

SEQ ID NO: 1784567 - RNA, 19 nt, Artificial Sequence
  Description of Artificial Sequence: Synthetic oligonucleotide
  Sense strand starting at position 156 of SEQ ID NO: 1562948
auuaauuguccagagcauu

SEQ ID NO: 1784568 - RNA, 19 nt, Artificial Sequence
  Description of Artificial Sequence: Synthetic oligonucleotide
  Antisense strand to SEQ ID NO: 1784567
aaugcucuggacaauuaau

SEQ ID NO: 1784569 - RNA, 19 nt, Artificial Sequence
  Description of Artificial Sequence: Synthetic oligonucleotide
  Sense strand starting at position 277 of SEQ ID NO: 1562948
cuguuugauggugaauuag

SEQ ID NO: 1784570 - RNA, 19 nt, Artificial Sequence
  Description of Artificial Sequence: Synthetic oligonucleotide
  Antisense strand to SEQ ID NO: 1784569
cuaauucaccaucaaacag

SEQ ID NO: 1784571 - RNA, 19 nt, Artificial Sequence
  Description of Artificial Sequence: Synthetic oligonucleotide
  Sense strand starting at position 352 of SEQ ID NO: 1562948
ugacuuaggcagggugaau

SEQ ID NO: 1784572 - RNA, 19 nt, Artificial Sequence
  Description of Artificial Sequence: Synthetic oligonucleotide
  Antisense strand to SEQ ID NO: 1784571
auucacccugccuaaguca

SEQ ID NO: 1784573 - RNA, 19 nt, Artificial Sequence
  Description of Artificial Sequence: Synthetic oligonucleotide
  Sense strand starting at position 363 of SEQ ID NO: 1562948
gggugaaucuguccuccau

SEQ ID NO: 1784574 - RNA, 19 nt, Artificial Sequence
  Description of Artificial Sequence: Synthetic oligonucleotide
  Antisense strand to SEQ ID NO: 1784573
auggaggacagauucaccc

SEQ ID NO: 1784575 - RNA, 19 nt, Artificial Sequence
  Description of Artificial Sequence: Synthetic oligonucleotide
  Sense strand starting at position 365 of SEQ ID NO: 1562948
gugaaucuguccuccauau

SEQ ID NO: 1784576 - RNA, 19 nt, Artificial Sequence
  Description of Artificial Sequence: Synthetic oligonucleotide
  Antisense strand to SEQ ID NO: 1784575
auauggaggacagauucac

SEQ ID NO: 1784577 - RNA, 19 nt, Artificial Sequence
  Description of Artificial Sequence: Synthetic oligonucleotide
  Sense strand starting at position 565 of SEQ ID NO: 1562948
uguugaaguccauggcaca

SEQ ID NO: 1784578 - RNA, 19 nt, Artificial Sequence
  Description of Artificial Sequence: Synthetic oligonucleotide
  Antisense strand to SEQ ID NO: 1784577
ugugccauggacuucaaca

SEQ ID NO: 1784579 - RNA, 19 nt, Artificial Sequence
  Description of Artificial Sequence: Synthetic oligonucleotide
  Sense strand starting at position 703 of SEQ ID NO: 1562948
cucacugugcauuagaauu

SEQ ID NO: 1784580 - RNA, 19 nt, Artificial Sequence
  Description of Artificial Sequence: Synthetic oligonucleotide
  Antisense strand to SEQ ID NO: 1784579
aauucuaaugcacagugag

SEQ ID NO: 1784581 - RNA, 19 nt, Artificial Sequence
  Description of Artificial Sequence: Synthetic oligonucleotide
  Sense strand starting at position 714 of SEQ ID NO: 1562948
uuagaauuaccaggcccau

SEQ ID NO: 1784582 - RNA, 19 nt, Artificial Sequence
  Description of Artificial Sequence: Synthetic oligonucleotide
  Antisense strand to SEQ ID NO: 1784581
augggccugguaauucuaa

SEQ ID NO: 1784583 - RNA, 19 nt, Artificial Sequence
  Description of Artificial Sequence: Synthetic oligonucleotide
  Sense strand starting at position 729 of SEQ ID NO: 1562948
ccauuuaaaugucagaguc

SEQ ID NO: 1784584 - RNA, 19 nt, Artificial Sequence
  Description of Artificial Sequence: Synthetic oligonucleotide
  Antisense strand to SEQ ID NO: 1784583
gacucugacauuuaaaugg

SEQ ID NO: 1784585 - RNA, 19 nt, Artificial Sequence
  Description of Artificial Sequence: Synthetic oligonucleotide
  Sense strand starting at position 731 of SEQ ID NO: 1562948
auuuaaaugucagaguccu

SEQ ID NO: 1784586 - RNA, 19 nt, Artificial Sequence
  Description of Artificial Sequence: Synthetic oligonucleotide
  Antisense strand to SEQ ID NO: 1784585
aggacucugacauuuaaau

SEQ ID NO: 1784587 - RNA, 19 nt, Artificial Sequence
  Description of Artificial Sequence: Synthetic oligonucleotide
  Sense strand starting at position 739 of SEQ ID NO: 1562948
gucagaguccugggaaccu

SEQ ID NO: 1784588 - RNA, 19 nt, Artificial Sequence
  Description of Artificial Sequence: Synthetic oligonucleotide
  Antisense strand to SEQ ID NO: 1784587
agguucccaggacucugac

SEQ ID NO: 1784589 - RNA, 19 nt, Artificial Sequence
  Description of Artificial Sequence: Synthetic oligonucleotide
  Sense strand starting at position 1244 of SEQ ID NO: 1562948
uggagaucaccaggugauu

SEQ ID NO: 1784590 - RNA, 19 nt, Artificial Sequence
  Description of Artificial Sequence: Synthetic oligonucleotide
  Antisense strand to SEQ ID NO: 1784589
aaucaccuggugaucucca

SEQ ID NO: 1784591 - RNA, 19 nt, Artificial Sequence
  Description of Artificial Sequence: Synthetic oligonucleotide
  Sense strand starting at position 1353 of SEQ ID NO: 1562948
gccaguugcacagaugauu

SEQ ID NO: 1784592 - RNA, 19 nt, Artificial Sequence
  Description of Artificial Sequence: Synthetic oligonucleotide
  Antisense strand to SEQ ID NO: 1784591
aaucaucugugcaacuggc

SEQ ID NO: 1784593 - RNA, 19 nt, Artificial Sequence
  Description of Artificial Sequence: Synthetic oligonucleotide
  Sense strand starting at position 2058 of SEQ ID NO: 1562948
ccagcaagagauugauuga

SEQ ID NO: 1784594 - RNA, 19 nt, Artificial Sequence
  Description of Artificial Sequence: Synthetic oligonucleotide
  Antisense strand to SEQ ID NO: 1784593
ucaaucaaucucuugcugg

SEQ ID NO: 1784595 - RNA, 19 nt, Artificial Sequence
  Description of Artificial Sequence: Synthetic oligonucleotide
  Sense strand starting at position 2161 of SEQ ID NO: 1562948
aucaucugaggucgucaaa

SEQ ID NO: 1784596 - RNA, 19 nt, Artificial Sequence
  Description of Artificial Sequence: Synthetic oligonucleotide
  Antisense strand to SEQ ID NO: 1784595
uuugacgaccucagaugau

SEQ ID NO: 1784597 - RNA, 19 nt, Artificial Sequence
  Description of Artificial Sequence: Synthetic oligonucleotide
  Sense strand starting at position 2739 of SEQ ID NO: 1562948
cagacagccuuuguugaau

SEQ ID NO: 1784598 - RNA, 19 nt, Artificial Sequence
  Description of Artificial Sequence: Synthetic oligonucleotide
  Antisense strand to SEQ ID NO: 1784597
auucaacaaaggcugucug

SEQ ID NO: 1784599 - RNA, 19 nt, Artificial Sequence
  Description of Artificial Sequence: Synthetic oligonucleotide
  Sense strand starting at position 3037 of SEQ ID NO: 1562948
ggugauauaucuccaguua

SEQ ID NO: 1784600 - RNA, 19 nt, Artificial Sequence
  Description of Artificial Sequence: Synthetic oligonucleotide
  Antisense strand to SEQ ID NO: 1784599
uaacuggagauauaucacc

SEQ ID NO: 1784601 - RNA, 19 nt, Artificial Sequence
  Description of Artificial Sequence: Synthetic oligonucleotide
  Sense strand starting at position 3038 of SEQ ID NO: 1562948
gugauauaucuccaguuaa

SEQ ID NO: 1784602 - RNA, 19 nt, Artificial Sequence
  Description of Artificial Sequence: Synthetic oligonucleotide
  Antisense strand to SEQ ID NO: 1784601
uuaacuggagauauaucac

SEQ ID NO: 1784603 - RNA, 19 nt, Artificial Sequence
  Description of Artificial Sequence: Synthetic oligonucleotide
  Sense strand starting at position 3181 of SEQ ID NO: 1562948
uuccaucaguugucaguaa

SEQ ID NO: 1784604 - RNA, 19 nt, Artificial Sequence
  Description of Artificial Sequence: Synthetic oligonucleotide
  Antisense strand to SEQ ID NO: 1784603
uuacugacaacugauggaa

SEQ ID NO: 1784605 - RNA, 19 nt, Artificial Sequence
  Description of Artificial Sequence: Synthetic oligonucleotide
  Sense strand starting at position 3185 of SEQ ID NO: 1562948
aucaguugucaguaaagau

SEQ ID NO: 1784606 - RNA, 19 nt, Artificial Sequence
  Description of Artificial Sequence: Synthetic oligonucleotide
  Antisense strand to SEQ ID NO: 1784605
aucuuuacugacaacugau

SEQ ID NO: 1784607 - RNA, 19 nt, Artificial Sequence
  Description of Artificial Sequence: Synthetic oligonucleotide
  Sense strand starting at position 3228 of SEQ ID NO: 1562948
ucaagcuuugcuuggaaac

SEQ ID NO: 1784608 - RNA, 19 nt, Artificial Sequence
  Description of Artificial Sequence: Synthetic oligonucleotide
  Antisense strand to SEQ ID NO: 1784607
guuuccaagcaaagcuuga

SEQ ID NO: 1784609 - RNA, 19 nt, Artificial Sequence
  Description of Artificial Sequence: Synthetic oligonucleotide
  Sense strand starting at position 3342 of SEQ ID NO: 1562948
aggaaauucuagggaauuu

SEQ ID NO: 1784610 - RNA, 19 nt, Artificial Sequence
  Description of Artificial Sequence: Synthetic oligonucleotide
  Antisense strand to SEQ ID NO: 1784609
aaauucccuagaauuuccu

SEQ ID NO: 1784611 - RNA, 19 nt, Artificial Sequence
  Description of Artificial Sequence: Synthetic oligonucleotide
  Sense strand starting at position 3529 of SEQ ID NO: 1562948
ugugaaacuuguguucuca

SEQ ID NO: 1784612 - RNA, 19 nt, Artificial Sequence
  Description of Artificial Sequence: Synthetic oligonucleotide
  Antisense strand to SEQ ID NO: 1784611
ugagaacacaaguuucaca

SEQ ID NO: 1784613 - RNA, 19 nt, Artificial Sequence
  Description of Artificial Sequence: Synthetic oligonucleotide
  Sense strand starting at position 3531 of SEQ ID NO: 1562948
ugaaacuuguguucucaaa

SEQ ID NO: 1784614 - RNA, 19 nt, Artificial Sequence
  Description of Artificial Sequence: Synthetic oligonucleotide
  Antisense strand to SEQ ID NO: 1784613
uuugagaacacaaguuuca

SEQ ID NO: 1784615 - RNA, 19 nt, Artificial Sequence
  Description of Artificial Sequence: Synthetic oligonucleotide
  Sense strand starting at position 3555 of SEQ ID NO: 1562948
auuguuacccgugaaguga

SEQ ID NO: 1784616 - RNA, 19 nt, Artificial Sequence
  Description of Artificial Sequence: Synthetic oligonucleotide
  Antisense strand to SEQ ID NO: 1784615
ucacuucacggguaacaau

SEQ ID NO: 1784617 - RNA, 19 nt, Artificial Sequence
  Description of Artificial Sequence: Synthetic oligonucleotide
  Sense strand starting at position 3763 of SEQ ID NO: 1562948
uuuggucggcuuuaaauau

SEQ ID NO: 1784618 - RNA, 19 nt, Artificial Sequence
  Description of Artificial Sequence: Synthetic oligonucleotide
  Antisense strand to SEQ ID NO: 1784617
auauuuaaagccgaccaaa

SEQ ID NO: 1784619 - RNA, 19 nt, Artificial Sequence
  Description of Artificial Sequence: Synthetic oligonucleotide
  Sense strand starting at position 3767 of SEQ ID NO: 1562948
gucggcuuuaaauaugauu

SEQ ID NO: 1784620 - RNA, 19 nt, Artificial Sequence
  Description of Artificial Sequence: Synthetic oligonucleotide
  Antisense strand to SEQ ID NO: 1784619
aaucauauuuaaagccgac

SEQ ID NO: 1784621 - RNA, 19 nt, Artificial Sequence
  Description of Artificial Sequence: Synthetic oligonucleotide
  Sense strand starting at position 3780 of SEQ ID NO: 1562948
augauuccucaugggauua

SEQ ID NO: 1784622 - RNA, 19 nt, Artificial Sequence
  Description of Artificial Sequence: Synthetic oligonucleotide
  Antisense strand to SEQ ID NO: 1784621
uaaucccaugaggaaucau

SEQ ID NO: 1784623 - RNA, 19 nt, Artificial Sequence
  Description of Artificial Sequence: Synthetic oligonucleotide
  Sense strand starting at position 3910 of SEQ ID NO: 1562948
augcauaaaguguguaaua

SEQ ID NO: 1784624 - RNA, 19 nt, Artificial Sequence
  Description of Artificial Sequence: Synthetic oligonucleotide
  Antisense strand to SEQ ID NO: 1784623
uauuacacacuuuaugcau

SEQ ID NO: 1784625 - RNA, 19 nt, Artificial Sequence
  Description of Artificial Sequence: Synthetic oligonucleotide
  Sense strand starting at position 3911 of SEQ ID NO: 1562948
ugcauaaaguguguaauaa

SEQ ID NO: 1784626 - RNA, 19 nt, Artificial Sequence
  Description of Artificial Sequence: Synthetic oligonucleotide
  Antisense strand to SEQ ID NO: 1784625
uuauuacacacuuuaugca

SEQ ID NO: 1784627 - RNA, 19 nt, Artificial Sequence
  Description of Artificial Sequence: Synthetic oligonucleotide
  Sense strand starting at position 3912 of SEQ ID NO: 1562948
gcauaaaguguguaauaau

SEQ ID NO: 1784628 - RNA, 19 nt, Artificial Sequence
  Description of Artificial Sequence: Synthetic oligonucleotide
  Antisense strand to SEQ ID NO: 1784627
auuauuacacacuuuaugc

SEQ ID NO: 1784629 - RNA, 19 nt, Artificial Sequence
  Description of Artificial Sequence: Synthetic oligonucleotide
  Sense strand starting at position 19 of SEQ ID NO: 1562949
gugaccugugucuguaagu

SEQ ID NO: 1784630 - RNA, 19 nt, Artificial Sequence
  Description of Artificial Sequence: Synthetic oligonucleotide
  Antisense strand to SEQ ID NO: 1784629
acuuacagacacaggucac

SEQ ID NO: 1784631 - RNA, 19 nt, Artificial Sequence
  Description of Artificial Sequence: Synthetic oligonucleotide
  Sense strand starting at position 121 of SEQ ID NO: 1562949
acgcaucauuuauagaaac

SEQ ID NO: 1784632 - RNA, 19 nt, Artificial Sequence
  Description of Artificial Sequence: Synthetic oligonucleotide
  Antisense strand to SEQ ID NO: 1784631
guuucuauaaaugaugcgu

SEQ ID NO: 1784633 - RNA, 19 nt, Artificial Sequence
  Description of Artificial Sequence: Synthetic oligonucleotide
  Sense strand starting at position 871 of SEQ ID NO: 1562949
accaucaugucugcaaagu

SEQ ID NO: 1784634 - RNA, 19 nt, Artificial Sequence
  Description of Artificial Sequence: Synthetic oligonucleotide
  Antisense strand to SEQ ID NO: 1784633
acuuugcagacaugauggu

SEQ ID NO: 1784635 - RNA, 19 nt, Artificial Sequence
  Description of Artificial Sequence: Synthetic oligonucleotide
  Sense strand starting at position 872 of SEQ ID NO: 1562949
ccaucaugucugcaaaguc

SEQ ID NO: 1784636 - RNA, 19 nt, Artificial Sequence
  Description of Artificial Sequence: Synthetic oligonucleotide
  Antisense strand to SEQ ID NO: 1784635
gacuuugcagacaugaugg

SEQ ID NO: 1784637 - RNA, 19 nt, Artificial Sequence
  Description of Artificial Sequence: Synthetic oligonucleotide
  Sense strand starting at position 1083 of SEQ ID NO: 1562949
gaugcagagugguaacauu

SEQ ID NO: 1784638 - RNA, 19 nt, Artificial Sequence
  Description of Artificial Sequence: Synthetic oligonucleotide
  Antisense strand to SEQ ID NO: 1784637
aauguuaccacucugcauc

SEQ ID NO: 1784639 - RNA, 19 nt, Artificial Sequence
  Description of Artificial Sequence: Synthetic oligonucleotide
  Sense strand starting at position 1140 of SEQ ID NO: 1562949
gccgguuucagcgaaggua

SEQ ID NO: 1784640 - RNA, 19 nt, Artificial Sequence
  Description of Artificial Sequence: Synthetic oligonucleotide
  Antisense strand to SEQ ID NO: 1784639
uaccuucgcugaaaccggc

SEQ ID NO: 1784641 - RNA, 19 nt, Artificial Sequence
  Description of Artificial Sequence: Synthetic oligonucleotide
  Sense strand starting at position 1808 of SEQ ID NO: 1562949
ggaaaugacucccgggaua

SEQ ID NO: 1784642 - RNA, 19 nt, Artificial Sequence
  Description of Artificial Sequence: Synthetic oligonucleotide
  Antisense strand to SEQ ID NO: 1784641
uaucccgggagucauuucc

SEQ ID NO: 1784643 - RNA, 19 nt, Artificial Sequence
  Description of Artificial Sequence: Synthetic oligonucleotide
  Sense strand starting at position 1853 of SEQ ID NO: 1562949
ggcagugacgccuggagua

SEQ ID NO: 1784644 - RNA, 19 nt, Artificial Sequence
  Description of Artificial Sequence: Synthetic oligonucleotide
  Antisense strand to SEQ ID NO: 1784643
uacuccaggcgucacugcc

SEQ ID NO: 1784645 - RNA, 19 nt, Artificial Sequence
  Description of Artificial Sequence: Synthetic oligonucleotide
  Sense strand starting at position 2131 of SEQ ID NO: 1562949
ccgauaaugucccauacac

SEQ ID NO: 1784646 - RNA, 19 nt, Artificial Sequence
  Description of Artificial Sequence: Synthetic oligonucleotide
  Antisense strand to SEQ ID NO: 1784645
guguaugggacauuaucgg

SEQ ID NO: 1784647 - RNA, 19 nt, Artificial Sequence
  Description of Artificial Sequence: Synthetic oligonucleotide
  Sense strand starting at position 2211 of SEQ ID NO: 1562949
gagugaugccucggauaac

SEQ ID NO: 1784648 - RNA, 19 nt, Artificial Sequence
  Description of Artificial Sequence: Synthetic oligonucleotide
  Antisense strand to SEQ ID NO: 1784647
guuauccgaggcaucacuc

SEQ ID NO: 1784649 - RNA, 19 nt, Artificial Sequence
  Description of Artificial Sequence: Synthetic oligonucleotide
  Sense strand starting at position 2357 of SEQ ID NO: 1562949
ggaaaugacgcccgggaua

SEQ ID NO: 1784650 - RNA, 19 nt, Artificial Sequence
  Description of Artificial Sequence: Synthetic oligonucleotide
  Antisense strand to SEQ ID NO: 1784649
uaucccgggcgucauuucc

SEQ ID NO: 1784651 - RNA, 19 nt, Artificial Sequence
  Description of Artificial Sequence: Synthetic oligonucleotide
  Sense strand starting at position 2394 of SEQ ID NO: 1562949
cgccaugagcaaugcaaca

SEQ ID NO: 1784652 - RNA, 19 nt, Artificial Sequence
  Description of Artificial Sequence: Synthetic oligonucleotide
  Antisense strand to SEQ ID NO: 1784651
uguugcauugcucauggcg

SEQ ID NO: 1784653 - RNA, 19 nt, Artificial Sequence
  Description of Artificial Sequence: Synthetic oligonucleotide
  Sense strand starting at position 2699 of SEQ ID NO: 1562949
ggcaguguagcccauagau

SEQ ID NO: 1784654 - RNA, 19 nt, Artificial Sequence
  Description of Artificial Sequence: Synthetic oligonucleotide
  Antisense strand to SEQ ID NO: 1784653
aucuaugggcuacacugcc

SEQ ID NO: 1784655 - RNA, 19 nt, Artificial Sequence
  Description of Artificial Sequence: Synthetic oligonucleotide
  Sense strand starting at position 2701 of SEQ ID NO: 1562949
caguguagcccauagauag

SEQ ID NO: 1784656 - RNA, 19 nt, Artificial Sequence
  Description of Artificial Sequence: Synthetic oligonucleotide
  Antisense strand to SEQ ID NO: 1784655
cuaucuaugggcuacacug

SEQ ID NO: 1784657 - RNA, 19 nt, Artificial Sequence
  Description of Artificial Sequence: Synthetic oligonucleotide
  Sense strand starting at position 2747 of SEQ ID NO: 1562949
cagugacgccucggauauc

SEQ ID NO: 1784658 - RNA, 19 nt, Artificial Sequence
  Description of Artificial Sequence: Synthetic oligonucleotide
  Antisense strand to SEQ ID NO: 1784657
gauauccgaggcgucacug

SEQ ID NO: 1784659 - RNA, 19 nt, Artificial Sequence
  Description of Artificial Sequence: Synthetic oligonucleotide
  Sense strand starting at position 2884 of SEQ ID NO: 1562949
ggaaaugacguccgguaaa

SEQ ID NO: 1784660 - RNA, 19 nt, Artificial Sequence
  Description of Artificial Sequence: Synthetic oligonucleotide
  Antisense strand to SEQ ID NO: 1784659
uuuaccggacgucauuucc

SEQ ID NO: 1784661 - RNA, 19 nt, Artificial Sequence
  Description of Artificial Sequence: Synthetic oligonucleotide
  Sense strand starting at position 3209 of SEQ ID NO: 1562949
acaggugacuccuccucua

SEQ ID NO: 1784662 - RNA, 19 nt, Artificial Sequence
  Description of Artificial Sequence: Synthetic oligonucleotide
  Antisense strand to SEQ ID NO: 1784661
uagaggaggagucaccugu

SEQ ID NO: 1784663 - RNA, 19 nt, Artificial Sequence
  Description of Artificial Sequence: Synthetic oligonucleotide
  Sense strand starting at position 3258 of SEQ ID NO: 1562949
cgcagaagugccuggaaug

SEQ ID NO: 1784664 - RNA, 19 nt, Artificial Sequence
  Description of Artificial Sequence: Synthetic oligonucleotide
  Antisense strand to SEQ ID NO: 1784663
cauuccaggcacuucugcg

SEQ ID NO: 1784665 - RNA, 19 nt, Artificial Sequence
  Description of Artificial Sequence: Synthetic oligonucleotide
  Sense strand starting at position 3298 of SEQ ID NO: 1562949
gaccgagguuaugcaagua

SEQ ID NO: 1784666 - RNA, 19 nt, Artificial Sequence
  Description of Artificial Sequence: Synthetic oligonucleotide
  Antisense strand to SEQ ID NO: 1784665
uacuugcauaaccucgguc

SEQ ID NO: 1784667 - RNA, 19 nt, Artificial Sequence
  Description of Artificial Sequence: Synthetic oligonucleotide
  Sense strand starting at position 3303 of SEQ ID NO: 1562949
agguuaugcaaguaagguu

SEQ ID NO: 1784668 - RNA, 19 nt, Artificial Sequence
  Description of Artificial Sequence: Synthetic oligonucleotide
  Antisense strand to SEQ ID NO: 1784667
aaccuuacuugcauaaccu

SEQ ID NO: 1784669 - RNA, 19 nt, Artificial Sequence
  Description of Artificial Sequence: Synthetic oligonucleotide
  Sense strand starting at position 3311 of SEQ ID NO: 1562949
caaguaagguuucuggacu

SEQ ID NO: 1784670 - RNA, 19 nt, Artificial Sequence
  Description of Artificial Sequence: Synthetic oligonucleotide
  Antisense strand to SEQ ID NO: 1784669
aguccagaaaccuuacuug

SEQ ID NO: 1784671 - RNA, 19 nt, Artificial Sequence
  Description of Artificial Sequence: Synthetic oligonucleotide
  Sense strand starting at position 3360 of SEQ ID NO: 1562949
cuaggucuacucugauugu

SEQ ID NO: 1784672 - RNA, 19 nt, Artificial Sequence
  Description of Artificial Sequence: Synthetic oligonucleotide
  Antisense strand to SEQ ID NO: 1784671
acaaucagaguagaccuag

SEQ ID NO: 1784673 - RNA, 19 nt, Artificial Sequence
  Description of Artificial Sequence: Synthetic oligonucleotide
  Sense strand starting at position 3369 of SEQ ID NO: 1562949
cucugauugugcuuuauuu

SEQ ID NO: 1784674 - RNA, 19 nt, Artificial Sequence
  Description of Artificial Sequence: Synthetic oligonucleotide
  Antisense strand to SEQ ID NO: 1784673
aaauaaagcacaaucagag

SEQ ID NO: 1784675 - RNA, 19 nt, Artificial Sequence
  Description of Artificial Sequence: Synthetic oligonucleotide
  Sense strand starting at position 3388 of SEQ ID NO: 1562949
ucacguucugacuggauga

SEQ ID NO: 1784676 - RNA, 19 nt, Artificial Sequence
  Description of Artificial Sequence: Synthetic oligonucleotide
  Antisense strand to SEQ ID NO: 1784675
ucauccagucagaacguga

SEQ ID NO: 1784677 - RNA, 19 nt, Artificial Sequence
  Description of Artificial Sequence: Synthetic oligonucleotide
  Sense strand starting at position 3390 of SEQ ID NO: 1562949
acguucugacuggaugaca

SEQ ID NO: 1784678 - RNA, 19 nt, Artificial Sequence
  Description of Artificial Sequence: Synthetic oligonucleotide
  Antisense strand to SEQ ID NO: 1784677
ugucauccagucagaacgu

SEQ ID NO: 1784679 - RNA, 19 nt, Artificial Sequence
  Description of Artificial Sequence: Synthetic oligonucleotide
  Sense strand starting at position 3405 of SEQ ID NO: 1562949
gacagcaagucuuaggaua

SEQ ID NO: 1784680 - RNA, 19 nt, Artificial Sequence
  Description of Artificial Sequence: Synthetic oligonucleotide
  Antisense strand to SEQ ID NO: 1784679
uauccuaagacuugcuguc

SEQ ID NO: 1784681 - RNA, 19 nt, Artificial Sequence
  Description of Artificial Sequence: Synthetic oligonucleotide
  Sense strand starting at position 3463 of SEQ ID NO: 1562949
ccuagagguuucucucauc

SEQ ID NO: 1784682 - RNA, 19 nt, Artificial Sequence
  Description of Artificial Sequence: Synthetic oligonucleotide
  Antisense strand to SEQ ID NO: 1784681
gaugagagaaaccucuagg

SEQ ID NO: 1784683 - RNA, 19 nt, Artificial Sequence
  Description of Artificial Sequence: Synthetic oligonucleotide
  Sense strand starting at position 3468 of SEQ ID NO: 1562949
agguuucucucauccgauc

SEQ ID NO: 1784684 - RNA, 19 nt, Artificial Sequence
  Description of Artificial Sequence: Synthetic oligonucleotide
  Antisense strand to SEQ ID NO: 1784683
gaucggaugagagaaaccu

SEQ ID NO: 1784685 - RNA, 19 nt, Artificial Sequence
  Description of Artificial Sequence: Synthetic oligonucleotide
  Sense strand starting at position 3474 of SEQ ID NO: 1562949
cucucauccgaucagacua

SEQ ID NO: 1784686 - RNA, 19 nt, Artificial Sequence
  Description of Artificial Sequence: Synthetic oligonucleotide
  Antisense strand to SEQ ID NO: 1784685
uagucugaucggaugagag

SEQ ID NO: 1784687 - RNA, 19 nt, Artificial Sequence
  Description of Artificial Sequence: Synthetic oligonucleotide
  Sense strand starting at position 3486 of SEQ ID NO: 1562949
cagacuauguagucgagaa

SEQ ID NO: 1784688 - RNA, 19 nt, Artificial Sequence
  Description of Artificial Sequence: Synthetic oligonucleotide
  Antisense strand to SEQ ID NO: 1784687
uucucgacuacauagucug

SEQ ID NO: 1784689 - RNA, 19 nt, Artificial Sequence
  Description of Artificial Sequence: Synthetic oligonucleotide
  Sense strand starting at position 3487 of SEQ ID NO: 1562949
agacuauguagucgagaaa

SEQ ID NO: 1784690 - RNA, 19 nt, Artificial Sequence
  Description of Artificial Sequence: Synthetic oligonucleotide
  Antisense strand to SEQ ID NO: 1784689
uuucucgacuacauagucu

SEQ ID NO: 1784691 - RNA, 19 nt, Artificial Sequence
  Description of Artificial Sequence: Synthetic oligonucleotide
  Sense strand starting at position 3488 of SEQ ID NO: 1562949
gacuauguagucgagaaac

SEQ ID NO: 1784692 - RNA, 19 nt, Artificial Sequence
  Description of Artificial Sequence: Synthetic oligonucleotide
  Antisense strand to SEQ ID NO: 1784691
guuucucgacuacauaguc

SEQ ID NO: 1784693 - RNA, 19 nt, Artificial Sequence
  Description of Artificial Sequence: Synthetic oligonucleotide
  Sense strand starting at position 3490 of SEQ ID NO: 1562949
cuauguagucgagaaacuu

SEQ ID NO: 1784694 - RNA, 19 nt, Artificial Sequence
  Description of Artificial Sequence: Synthetic oligonucleotide
  Antisense strand to SEQ ID NO: 1784693
aaguuucucgacuacauag

SEQ ID NO: 1784695 - RNA, 19 nt, Artificial Sequence
  Description of Artificial Sequence: Synthetic oligonucleotide
  Sense strand starting at position 3762 of SEQ ID NO: 1562949
gcagaauagguucguuauc

SEQ ID NO: 1784696 - RNA, 19 nt, Artificial Sequence
  Description of Artificial Sequence: Synthetic oligonucleotide
  Antisense strand to SEQ ID NO: 1784695
gauaacgaaccuauucugc

SEQ ID NO: 1784697 - RNA, 19 nt, Artificial Sequence
  Description of Artificial Sequence: Synthetic oligonucleotide
  Sense strand starting at position 3772 of SEQ ID NO: 1562949
uucguuaucccaggccgua

SEQ ID NO: 1784698 - RNA, 19 nt, Artificial Sequence
  Description of Artificial Sequence: Synthetic oligonucleotide
  Antisense strand to SEQ ID NO: 1784697
uacggccugggauaacgaa

SEQ ID NO: 1784699 - RNA, 19 nt, Artificial Sequence
  Description of Artificial Sequence: Synthetic oligonucleotide
  Sense strand starting at position 3956 of SEQ ID NO: 1562949
ggcgcuauccgaagcugua

SEQ ID NO: 1784700 - RNA, 19 nt, Artificial Sequence
  Description of Artificial Sequence: Synthetic oligonucleotide
  Antisense strand to SEQ ID NO: 1784699
uacagcuucggauagcgcc

SEQ ID NO: 1784701 - RNA, 19 nt, Artificial Sequence
  Description of Artificial Sequence: Synthetic oligonucleotide
  Sense strand starting at position 3957 of SEQ ID NO: 1562949
gcgcuauccgaagcuguaa

SEQ ID NO: 1784702 - RNA, 19 nt, Artificial Sequence
  Description of Artificial Sequence: Synthetic oligonucleotide
  Antisense strand to SEQ ID NO: 1784701
uuacagcuucggauagcgc

SEQ ID NO: 1784703 - RNA, 19 nt, Artificial Sequence
  Description of Artificial Sequence: Synthetic oligonucleotide
  Sense strand starting at position 3958 of SEQ ID NO: 1562949
cgcuauccgaagcuguaau

SEQ ID NO: 1784704 - RNA, 19 nt, Artificial Sequence
  Description of Artificial Sequence: Synthetic oligonucleotide
  Antisense strand to SEQ ID NO: 1784703
auuacagcuucggauagcg

SEQ ID NO: 1784705 - RNA, 19 nt, Artificial Sequence
  Description of Artificial Sequence: Synthetic oligonucleotide
  Sense strand starting at position 3959 of SEQ ID NO: 1562949
gcuauccgaagcuguaauu

SEQ ID NO: 1784706 - RNA, 19 nt, Artificial Sequence
  Description of Artificial Sequence: Synthetic oligonucleotide
  Antisense strand to SEQ ID NO: 1784705
aauuacagcuucggauagc

SEQ ID NO: 1784707 - RNA, 19 nt, Artificial Sequence
  Description of Artificial Sequence: Synthetic oligonucleotide
  Sense strand starting at position 3970 of SEQ ID NO: 1562949
cuguaauuccugcggcagu

SEQ ID NO: 1784708 - RNA, 19 nt, Artificial Sequence
  Description of Artificial Sequence: Synthetic oligonucleotide
  Antisense strand to SEQ ID NO: 1784707
acugccgcaggaauuacag

SEQ ID NO: 1784709 - RNA, 19 nt, Artificial Sequence
  Description of Artificial Sequence: Synthetic oligonucleotide
  Sense strand starting at position 554 of SEQ ID NO: 1562950
ggaaaugacucccgggaua

SEQ ID NO: 1784710 - RNA, 19 nt, Artificial Sequence
  Description of Artificial Sequence: Synthetic oligonucleotide
  Antisense strand to SEQ ID NO: 1784709
uaucccgggagucauuucc

SEQ ID NO: 1784711 - RNA, 19 nt, Artificial Sequence
  Description of Artificial Sequence: Synthetic oligonucleotide
  Sense strand starting at position 599 of SEQ ID NO: 1562950
ggcagugacgccuggagua

SEQ ID NO: 1784712 - RNA, 19 nt, Artificial Sequence
  Description of Artificial Sequence: Synthetic oligonucleotide
  Antisense strand to SEQ ID NO: 1784711
uacuccaggcgucacugcc

SEQ ID NO: 1784713 - RNA, 19 nt, Artificial Sequence
  Description of Artificial Sequence: Synthetic oligonucleotide
  Sense strand starting at position 957 of SEQ ID NO: 1562950
gagugaugccucggauaac

SEQ ID NO: 1784714 - RNA, 19 nt, Artificial Sequence
  Description of Artificial Sequence: Synthetic oligonucleotide
  Antisense strand to SEQ ID NO: 1784713
guuauccgaggcaucacuc

SEQ ID NO: 1784715 - RNA, 19 nt, Artificial Sequence
  Description of Artificial Sequence: Synthetic oligonucleotide
  Sense strand starting at position 1103 of SEQ ID NO: 1562950
ggaaaugacgcccgggaua

SEQ ID NO: 1784716 - RNA, 19 nt, Artificial Sequence
  Description of Artificial Sequence: Synthetic oligonucleotide
  Antisense strand to SEQ ID NO: 1784715
uaucccgggcgucauuucc

SEQ ID NO: 1784717 - RNA, 19 nt, Artificial Sequence
  Description of Artificial Sequence: Synthetic oligonucleotide
  Sense strand starting at position 1140 of SEQ ID NO: 1562950
cgccaugagcaaugcaaca

SEQ ID NO: 1784718 - RNA, 19 nt, Artificial Sequence
  Description of Artificial Sequence: Synthetic oligonucleotide
  Antisense strand to SEQ ID NO: 1784717
uguugcauugcucauggcg

SEQ ID NO: 1784719 - RNA, 19 nt, Artificial Sequence
  Description of Artificial Sequence: Synthetic oligonucleotide
  Sense strand starting at position 1445 of SEQ ID NO: 1562950
ggcaguguagcccauagau

SEQ ID NO: 1784720 - RNA, 19 nt, Artificial Sequence
  Description of Artificial Sequence: Synthetic oligonucleotide
  Antisense strand to SEQ ID NO: 1784719
aucuaugggcuacacugcc

SEQ ID NO: 1784721 - RNA, 19 nt, Artificial Sequence
  Description of Artificial Sequence: Synthetic oligonucleotide
  Sense strand starting at position 1447 of SEQ ID NO: 1562950
caguguagcccauagauag

SEQ ID NO: 1784722 - RNA, 19 nt, Artificial Sequence
  Description of Artificial Sequence: Synthetic oligonucleotide
  Antisense strand to SEQ ID NO: 1784721
cuaucuaugggcuacacug

SEQ ID NO: 1784723 - RNA, 19 nt, Artificial Sequence
  Description of Artificial Sequence: Synthetic oligonucleotide
  Sense strand starting at position 1493 of SEQ ID NO: 1562950
cagugacgccucggauauc

SEQ ID NO: 1784724 - RNA, 19 nt, Artificial Sequence
  Description of Artificial Sequence: Synthetic oligonucleotide
  Antisense strand to SEQ ID NO: 1784723
gauauccgaggcgucacug

SEQ ID NO: 1784725 - RNA, 19 nt, Artificial Sequence
  Description of Artificial Sequence: Synthetic oligonucleotide
  Sense strand starting at position 1630 of SEQ ID NO: 1562950
ggaaaugacguccgguaaa

SEQ ID NO: 1784726 - RNA, 19 nt, Artificial Sequence
  Description of Artificial Sequence: Synthetic oligonucleotide
  Antisense strand to SEQ ID NO: 1784725
uuuaccggacgucauuucc

SEQ ID NO: 1784727 - RNA, 19 nt, Artificial Sequence
  Description of Artificial Sequence: Synthetic oligonucleotide
  Sense strand starting at position 1955 of SEQ ID NO: 1562950
acaggugacuccuccucua

SEQ ID NO: 1784728 - RNA, 19 nt, Artificial Sequence
  Description of Artificial Sequence: Synthetic oligonucleotide
  Antisense strand to SEQ ID NO: 1784727
uagaggaggagucaccugu

SEQ ID NO: 1784729 - RNA, 19 nt, Artificial Sequence
  Description of Artificial Sequence: Synthetic oligonucleotide
  Sense strand starting at position 2004 of SEQ ID NO: 1562950
cgcagaagugccuggaaug

SEQ ID NO: 1784730 - RNA, 19 nt, Artificial Sequence
  Description of Artificial Sequence: Synthetic oligonucleotide
  Antisense strand to SEQ ID NO: 1784729
cauuccaggcacuucugcg

SEQ ID NO: 1784731 - RNA, 19 nt, Artificial Sequence
  Description of Artificial Sequence: Synthetic oligonucleotide
  Sense strand starting at position 2044 of SEQ ID NO: 1562950
gaccgagguuaugcaagua

SEQ ID NO: 1784732 - RNA, 19 nt, Artificial Sequence
  Description of Artificial Sequence: Synthetic oligonucleotide
  Antisense strand to SEQ ID NO: 1784731
uacuugcauaaccucgguc

SEQ ID NO: 1784733 - RNA, 19 nt, Artificial Sequence
  Description of Artificial Sequence: Synthetic oligonucleotide
  Sense strand starting at position 2049 of SEQ ID NO: 1562950
agguuaugcaaguaagguu

SEQ ID NO: 1784734 - RNA, 19 nt, Artificial Sequence
  Description of Artificial Sequence: Synthetic oligonucleotide
  Antisense strand to SEQ ID NO: 1784733
aaccuuacuugcauaaccu

SEQ ID NO: 1784735 - RNA, 19 nt, Artificial Sequence
  Description of Artificial Sequence: Synthetic oligonucleotide
  Sense strand starting at position 2057 of SEQ ID NO: 1562950
caaguaagguuucuggacu

SEQ ID NO: 1784736 - RNA, 19 nt, Artificial Sequence
  Description of Artificial Sequence: Synthetic oligonucleotide
  Antisense strand to SEQ ID NO: 1784735
aguccagaaaccuuacuug

SEQ ID NO: 1784737 - RNA, 19 nt, Artificial Sequence
  Description of Artificial Sequence: Synthetic oligonucleotide
  Sense strand starting at position 2106 of SEQ ID NO: 1562950
cuaggucuacucugauugu

SEQ ID NO: 1784738 - RNA, 19 nt, Artificial Sequence
  Description of Artificial Sequence: Synthetic oligonucleotide
  Antisense strand to SEQ ID NO: 1784737
acaaucagaguagaccuag

SEQ ID NO: 1784739 - RNA, 19 nt, Artificial Sequence
  Description of Artificial Sequence: Synthetic oligonucleotide
  Sense strand starting at position 2115 of SEQ ID NO: 1562950
cucugauugugcuuuauuu

SEQ ID NO: 1784740 - RNA, 19 nt, Artificial Sequence
  Description of Artificial Sequence: Synthetic oligonucleotide
  Antisense strand to SEQ ID NO: 1784739
aaauaaagcacaaucagag

SEQ ID NO: 1784741 - RNA, 19 nt, Artificial Sequence
  Description of Artificial Sequence: Synthetic oligonucleotide
  Sense strand starting at position 2134 of SEQ ID NO: 1562950
ucacguucugacuggauga

SEQ ID NO: 1784742 - RNA, 19 nt, Artificial Sequence
  Description of Artificial Sequence: Synthetic oligonucleotide
  Antisense strand to SEQ ID NO: 1784741
ucauccagucagaacguga

SEQ ID NO: 1784743 - RNA, 19 nt, Artificial Sequence
  Description of Artificial Sequence: Synthetic oligonucleotide
  Sense strand starting at position 2136 of SEQ ID NO: 1562950
acguucugacuggaugaca

SEQ ID NO: 1784744 - RNA, 19 nt, Artificial Sequence
  Description of Artificial Sequence: Synthetic oligonucleotide
  Antisense strand to SEQ ID NO: 1784743
ugucauccagucagaacgu

SEQ ID NO: 1784745 - RNA, 19 nt, Artificial Sequence
  Description of Artificial Sequence: Synthetic oligonucleotide
  Sense strand starting at position 2151 of SEQ ID NO: 1562950
gacagcaagucuuaggaua

SEQ ID NO: 1784746 - RNA, 19 nt, Artificial Sequence
  Description of Artificial Sequence: Synthetic oligonucleotide
  Antisense strand to SEQ ID NO: 1784745
uauccuaagacuugcuguc

SEQ ID NO: 1784747 - RNA, 19 nt, Artificial Sequence
  Description of Artificial Sequence: Synthetic oligonucleotide
  Sense strand starting at position 2209 of SEQ ID NO: 1562950
ccuagagguuucucucauc

SEQ ID NO: 1784748 - RNA, 19 nt, Artificial Sequence
  Description of Artificial Sequence: Synthetic oligonucleotide
  Antisense strand to SEQ ID NO: 1784747
gaugagagaaaccucuagg

SEQ ID NO: 1784749 - RNA, 19 nt, Artificial Sequence
  Description of Artificial Sequence: Synthetic oligonucleotide
  Sense strand starting at position 2214 of SEQ ID NO: 1562950
agguuucucucauccgauc

SEQ ID NO: 1784750 - RNA, 19 nt, Artificial Sequence
  Description of Artificial Sequence: Synthetic oligonucleotide
  Antisense strand to SEQ ID NO: 1784749
gaucggaugagagaaaccu

SEQ ID NO: 1784751 - RNA, 19 nt, Artificial Sequence
  Description of Artificial Sequence: Synthetic oligonucleotide
  Sense strand starting at position 2220 of SEQ ID NO: 1562950
cucucauccgaucagacua

SEQ ID NO: 1784752 - RNA, 19 nt, Artificial Sequence
  Description of Artificial Sequence: Synthetic oligonucleotide
  Antisense strand to SEQ ID NO: 1784751
uagucugaucggaugagag

SEQ ID NO: 1784753 - RNA, 19 nt, Artificial Sequence
  Description of Artificial Sequence: Synthetic oligonucleotide
  Sense strand starting at position 2232 of SEQ ID NO: 1562950
cagacuauguagucgagaa

SEQ ID NO: 1784754 - RNA, 19 nt, Artificial Sequence
  Description of Artificial Sequence: Synthetic oligonucleotide
  Antisense strand to SEQ ID NO: 1784753
uucucgacuacauagucug

SEQ ID NO: 1784755 - RNA, 19 nt, Artificial Sequence
  Description of Artificial Sequence: Synthetic oligonucleotide
  Sense strand starting at position 2233 of SEQ ID NO: 1562950
agacuauguagucgagaaa

SEQ ID NO: 1784756 - RNA, 19 nt, Artificial Sequence
  Description of Artificial Sequence: Synthetic oligonucleotide
  Antisense strand to SEQ ID NO: 1784755
uuucucgacuacauagucu

SEQ ID NO: 1784757 - RNA, 19 nt, Artificial Sequence
  Description of Artificial Sequence: Synthetic oligonucleotide
  Sense strand starting at position 2234 of SEQ ID NO: 1562950
gacuauguagucgagaaac

SEQ ID NO: 1784758 - RNA, 19 nt, Artificial Sequence
  Description of Artificial Sequence: Synthetic oligonucleotide
  Antisense strand to SEQ ID NO: 1784757
guuucucgacuacauaguc

SEQ ID NO: 1784759 - RNA, 19 nt, Artificial Sequence
  Description of Artificial Sequence: Synthetic oligonucleotide
  Sense strand starting at position 2236 of SEQ ID NO: 1562950
cuauguagucgagaaacuu

SEQ ID NO: 1784760 - RNA, 19 nt, Artificial Sequence
  Description of Artificial Sequence: Synthetic oligonucleotide
  Antisense strand to SEQ ID NO: 1784759
aaguuucucgacuacauag

SEQ ID NO: 1784761 - RNA, 19 nt, Artificial Sequence
  Description of Artificial Sequence: Synthetic oligonucleotide
  Sense strand starting at position 2508 of SEQ ID NO: 1562950
gcagaauagguucguuauc

SEQ ID NO: 1784762 - RNA, 19 nt, Artificial Sequence
  Description of Artificial Sequence: Synthetic oligonucleotide
  Antisense strand to SEQ ID NO: 1784761
gauaacgaaccuauucugc

SEQ ID NO: 1784763 - RNA, 19 nt, Artificial Sequence
  Description of Artificial Sequence: Synthetic oligonucleotide
  Sense strand starting at position 2518 of SEQ ID NO: 1562950
uucguuaucccaggccgua

SEQ ID NO: 1784764 - RNA, 19 nt, Artificial Sequence
  Description of Artificial Sequence: Synthetic oligonucleotide
  Antisense strand to SEQ ID NO: 1784763
uacggccugggauaacgaa

SEQ ID NO: 1784765 - RNA, 19 nt, Artificial Sequence
  Description of Artificial Sequence: Synthetic oligonucleotide
  Sense strand starting at position 2702 of SEQ ID NO: 1562950
ggcgcuauccgaagcugua

SEQ ID NO: 1784766 - RNA, 19 nt, Artificial Sequence
  Description of Artificial Sequence: Synthetic oligonucleotide
  Antisense strand to SEQ ID NO: 1784765
uacagcuucggauagcgcc

SEQ ID NO: 1784767 - RNA, 19 nt, Artificial Sequence
  Description of Artificial Sequence: Synthetic oligonucleotide
  Sense strand starting at position 2703 of SEQ ID NO: 1562950
gcgcuauccgaagcuguaa

SEQ ID NO: 1784768 - RNA, 19 nt, Artificial Sequence
  Description of Artificial Sequence: Synthetic oligonucleotide
  Antisense strand to SEQ ID NO: 1784767
uuacagcuucggauagcgc

SEQ ID NO: 1784769 - RNA, 19 nt, Artificial Sequence
  Description of Artificial Sequence: Synthetic oligonucleotide
  Sense strand starting at position 2704 of SEQ ID NO: 1562950
cgcuauccgaagcuguaau

SEQ ID NO: 1784770 - RNA, 19 nt, Artificial Sequence
  Description of Artificial Sequence: Synthetic oligonucleotide
  Antisense strand to SEQ ID NO: 1784769
auuacagcuucggauagcg

SEQ ID NO: 1784771 - RNA, 19 nt, Artificial Sequence
  Description of Artificial Sequence: Synthetic oligonucleotide
  Sense strand starting at position 2705 of SEQ ID NO: 1562950
gcuauccgaagcuguaauu

SEQ ID NO: 1784772 - RNA, 19 nt, Artificial Sequence
  Description of Artificial Sequence: Synthetic oligonucleotide
  Antisense strand to SEQ ID NO: 1784771
aauuacagcuucggauagc

SEQ ID NO: 1784773 - RNA, 19 nt, Artificial Sequence
  Description of Artificial Sequence: Synthetic oligonucleotide
  Sense strand starting at position 2800 of SEQ ID NO: 1562950
agaacuaucaggugcugca

SEQ ID NO: 1784774 - RNA, 19 nt, Artificial Sequence
  Description of Artificial Sequence: Synthetic oligonucleotide
  Antisense strand to SEQ ID NO: 1784773
ugcagcaccugauaguucu

SEQ ID NO: 1784775 - RNA, 19 nt, Artificial Sequence
  Description of Artificial Sequence: Synthetic oligonucleotide
  Sense strand starting at position 2935 of SEQ ID NO: 1562950
gcgugauauccagggcauc

SEQ ID NO: 1784776 - RNA, 19 nt, Artificial Sequence
  Description of Artificial Sequence: Synthetic oligonucleotide
  Antisense strand to SEQ ID NO: 1784775
gaugcccuggauaucacgc

SEQ ID NO: 1784777 - RNA, 19 nt, Artificial Sequence
  Description of Artificial Sequence: Synthetic oligonucleotide
  Sense strand starting at position 2936 of SEQ ID NO: 1562950
cgugauauccagggcauca

SEQ ID NO: 1784778 - RNA, 19 nt, Artificial Sequence
  Description of Artificial Sequence: Synthetic oligonucleotide
  Antisense strand to SEQ ID NO: 1784777
ugaugcccuggauaucacg

SEQ ID NO: 1784779 - RNA, 19 nt, Artificial Sequence
  Description of Artificial Sequence: Synthetic oligonucleotide
  Sense strand starting at position 2938 of SEQ ID NO: 1562950
ugauauccagggcaucauu

SEQ ID NO: 1784780 - RNA, 19 nt, Artificial Sequence
  Description of Artificial Sequence: Synthetic oligonucleotide
  Antisense strand to SEQ ID NO: 1784779
aaugaugcccuggauauca

SEQ ID NO: 1784781 - RNA, 19 nt, Artificial Sequence
  Description of Artificial Sequence: Synthetic oligonucleotide
  Sense strand starting at position 3345 of SEQ ID NO: 1562950
gcagguugggugcacuaua

SEQ ID NO: 1784782 - RNA, 19 nt, Artificial Sequence
  Description of Artificial Sequence: Synthetic oligonucleotide
  Antisense strand to SEQ ID NO: 1784781
uauagugcacccaaccugc

SEQ ID NO: 1784783 - RNA, 19 nt, Artificial Sequence
  Description of Artificial Sequence: Synthetic oligonucleotide
  Sense strand starting at position 3532 of SEQ ID NO: 1562950
ggcacuauccaggguugca

SEQ ID NO: 1784784 - RNA, 19 nt, Artificial Sequence
  Description of Artificial Sequence: Synthetic oligonucleotide
  Antisense strand to SEQ ID NO: 1784783
ugcaacccuggauagugcc

SEQ ID NO: 1784785 - RNA, 19 nt, Artificial Sequence
  Description of Artificial Sequence: Synthetic oligonucleotide
  Sense strand starting at position 3565 of SEQ ID NO: 1562950
gggcgauuugggugccaua

SEQ ID NO: 1784786 - RNA, 19 nt, Artificial Sequence
  Description of Artificial Sequence: Synthetic oligonucleotide
  Antisense strand to SEQ ID NO: 1784785
uauggcacccaaaucgccc

SEQ ID NO: 1784787 - RNA, 19 nt, Artificial Sequence
  Description of Artificial Sequence: Synthetic oligonucleotide
  Sense strand starting at position 3850 of SEQ ID NO: 1562950
agcggaggugucagugaca

SEQ ID NO: 1784788 - RNA, 19 nt, Artificial Sequence
  Description of Artificial Sequence: Synthetic oligonucleotide
  Antisense strand to SEQ ID NO: 1784787
ugucacugacaccuccgcu

SEQ ID NO: 1784789 - RNA, 19 nt, Artificial Sequence
  Description of Artificial Sequence: Synthetic oligonucleotide
  Sense strand starting at position 79 of SEQ ID NO: 1562951
gaagcugucccuggcugaa

SEQ ID NO: 1784790 - RNA, 19 nt, Artificial Sequence
  Description of Artificial Sequence: Synthetic oligonucleotide
  Antisense strand to SEQ ID NO: 1784789
uucagccagggacagcuuc

SEQ ID NO: 1784791 - RNA, 19 nt, Artificial Sequence
  Description of Artificial Sequence: Synthetic oligonucleotide
  Sense strand starting at position 159 of SEQ ID NO: 1562951
cuguuucuuuagucuugaa

SEQ ID NO: 1784792 - RNA, 19 nt, Artificial Sequence
  Description of Artificial Sequence: Synthetic oligonucleotide
  Antisense strand to SEQ ID NO: 1784791
uucaagacuaaagaaacag

SEQ ID NO: 1784793 - RNA, 19 nt, Artificial Sequence
  Description of Artificial Sequence: Synthetic oligonucleotide
  Sense strand starting at position 409 of SEQ ID NO: 1562951
ggcucaggaugcuugugaa

SEQ ID NO: 1784794 - RNA, 19 nt, Artificial Sequence
  Description of Artificial Sequence: Synthetic oligonucleotide
  Antisense strand to SEQ ID NO: 1784793
uucacaagcauccugagcc

SEQ ID NO: 1784795 - RNA, 19 nt, Artificial Sequence
  Description of Artificial Sequence: Synthetic oligonucleotide
  Sense strand starting at position 412 of SEQ ID NO: 1562951
ucaggaugcuugugaaaga

SEQ ID NO: 1784796 - RNA, 19 nt, Artificial Sequence
  Description of Artificial Sequence: Synthetic oligonucleotide
  Antisense strand to SEQ ID NO: 1784795
ucuuucacaagcauccuga

SEQ ID NO: 1784797 - RNA, 19 nt, Artificial Sequence
  Description of Artificial Sequence: Synthetic oligonucleotide
  Sense strand starting at position 413 of SEQ ID NO: 1562951
caggaugcuugugaaagau

SEQ ID NO: 1784798 - RNA, 19 nt, Artificial Sequence
  Description of Artificial Sequence: Synthetic oligonucleotide
  Antisense strand to SEQ ID NO: 1784797
aucuuucacaagcauccug

SEQ ID NO: 1784799 - RNA, 19 nt, Artificial Sequence
  Description of Artificial Sequence: Synthetic oligonucleotide
  Sense strand starting at position 419 of SEQ ID NO: 1562951
gcuugugaaagauaguauc

SEQ ID NO: 1784800 - RNA, 19 nt, Artificial Sequence
  Description of Artificial Sequence: Synthetic oligonucleotide
  Antisense strand to SEQ ID NO: 1784799
gauacuaucuuucacaagc

SEQ ID NO: 1784801 - RNA, 19 nt, Artificial Sequence
  Description of Artificial Sequence: Synthetic oligonucleotide
  Sense strand starting at position 422 of SEQ ID NO: 1562951
ugugaaagauaguaucuga

SEQ ID NO: 1784802 - RNA, 19 nt, Artificial Sequence
  Description of Artificial Sequence: Synthetic oligonucleotide
  Antisense strand to SEQ ID NO: 1784801
ucagauacuaucuuucaca

SEQ ID NO: 1784803 - RNA, 19 nt, Artificial Sequence
  Description of Artificial Sequence: Synthetic oligonucleotide
  Sense strand starting at position 425 of SEQ ID NO: 1562951
gaaagauaguaucugagcu

SEQ ID NO: 1784804 - RNA, 19 nt, Artificial Sequence
  Description of Artificial Sequence: Synthetic oligonucleotide
  Antisense strand to SEQ ID NO: 1784803
agcucagauacuaucuuuc

SEQ ID NO: 1784805 - RNA, 19 nt, Artificial Sequence
  Description of Artificial Sequence: Synthetic oligonucleotide
  Sense strand starting at position 435 of SEQ ID NO: 1562951
aucugagcuccgcaggaaa

SEQ ID NO: 1784806 - RNA, 19 nt, Artificial Sequence
  Description of Artificial Sequence: Synthetic oligonucleotide
  Antisense strand to SEQ ID NO: 1784805
uuuccugcggagcucagau

SEQ ID NO: 1784807 - RNA, 19 nt, Artificial Sequence
  Description of Artificial Sequence: Synthetic oligonucleotide
  Sense strand starting at position 466 of SEQ ID NO: 1562951
gguaauagguguucccuua

SEQ ID NO: 1784808 - RNA, 19 nt, Artificial Sequence
  Description of Artificial Sequence: Synthetic oligonucleotide
  Antisense strand to SEQ ID NO: 1784807
uaagggaacaccuauuacc

SEQ ID NO: 1784809 - RNA, 19 nt, Artificial Sequence
  Description of Artificial Sequence: Synthetic oligonucleotide
  Sense strand starting at position 772 of SEQ ID NO: 1562951
gccacugugccugacaagu

SEQ ID NO: 1784810 - RNA, 19 nt, Artificial Sequence
  Description of Artificial Sequence: Synthetic oligonucleotide
  Antisense strand to SEQ ID NO: 1784809
acuugucaggcacaguggc

SEQ ID NO: 1784811 - RNA, 19 nt, Artificial Sequence
  Description of Artificial Sequence: Synthetic oligonucleotide
  Sense strand starting at position 781 of SEQ ID NO: 1562951
ccugacaaguguucccuua

SEQ ID NO: 1784812 - RNA, 19 nt, Artificial Sequence
  Description of Artificial Sequence: Synthetic oligonucleotide
  Antisense strand to SEQ ID NO: 1784811
uaagggaacacuugucagg

SEQ ID NO: 1784813 - RNA, 19 nt, Artificial Sequence
  Description of Artificial Sequence: Synthetic oligonucleotide
  Sense strand starting at position 783 of SEQ ID NO: 1562951
ugacaaguguucccuuauu

SEQ ID NO: 1784814 - RNA, 19 nt, Artificial Sequence
  Description of Artificial Sequence: Synthetic oligonucleotide
  Antisense strand to SEQ ID NO: 1784813
aauaagggaacacuuguca

SEQ ID NO: 1784815 - RNA, 19 nt, Artificial Sequence
  Description of Artificial Sequence: Synthetic oligonucleotide
  Sense strand starting at position 788 of SEQ ID NO: 1562951
aguguucccuuauuucuau

SEQ ID NO: 1784816 - RNA, 19 nt, Artificial Sequence
  Description of Artificial Sequence: Synthetic oligonucleotide
  Antisense strand to SEQ ID NO: 1784815
auagaaauaagggaacacu

SEQ ID NO: 1784817 - RNA, 19 nt, Artificial Sequence
  Description of Artificial Sequence: Synthetic oligonucleotide
  Sense strand starting at position 885 of SEQ ID NO: 1562951
gaggacccgucuuaaccaa

SEQ ID NO: 1784818 - RNA, 19 nt, Artificial Sequence
  Description of Artificial Sequence: Synthetic oligonucleotide
  Antisense strand to SEQ ID NO: 1784817
uugguuaagacggguccuc

SEQ ID NO: 1784819 - RNA, 19 nt, Artificial Sequence
  Description of Artificial Sequence: Synthetic oligonucleotide
  Sense strand starting at position 906 of SEQ ID NO: 1562951
ccucaauauugaugggauu

SEQ ID NO: 1784820 - RNA, 19 nt, Artificial Sequence
  Description of Artificial Sequence: Synthetic oligonucleotide
  Antisense strand to SEQ ID NO: 1784819
aaucccaucaauauugagg

SEQ ID NO: 1784821 - RNA, 19 nt, Artificial Sequence
  Description of Artificial Sequence: Synthetic oligonucleotide
  Sense strand starting at position 946 of SEQ ID NO: 1562951
gugaccugugucuguaagu

SEQ ID NO: 1784822 - RNA, 19 nt, Artificial Sequence
  Description of Artificial Sequence: Synthetic oligonucleotide
  Antisense strand to SEQ ID NO: 1784821
acuuacagacacaggucac

SEQ ID NO: 1784823 - RNA, 19 nt, Artificial Sequence
  Description of Artificial Sequence: Synthetic oligonucleotide
  Sense strand starting at position 996 of SEQ ID NO: 1562951
uggcgauucucucagguac

SEQ ID NO: 1784824 - RNA, 19 nt, Artificial Sequence
  Description of Artificial Sequence: Synthetic oligonucleotide
  Antisense strand to SEQ ID NO: 1784823
guaccugagagaaucgcca

SEQ ID NO: 1784825 - RNA, 19 nt, Artificial Sequence
  Description of Artificial Sequence: Synthetic oligonucleotide
  Sense strand starting at position 998 of SEQ ID NO: 1562951
gcgauucucucagguacuu

SEQ ID NO: 1784826 - RNA, 19 nt, Artificial Sequence
  Description of Artificial Sequence: Synthetic oligonucleotide
  Antisense strand to SEQ ID NO: 1784825
aaguaccugagagaaucgc

SEQ ID NO: 1784827 - RNA, 19 nt, Artificial Sequence
  Description of Artificial Sequence: Synthetic oligonucleotide
  Sense strand starting at position 1048 of SEQ ID NO: 1562951
acgcaucauuuauagaaac

SEQ ID NO: 1784828 - RNA, 19 nt, Artificial Sequence
  Description of Artificial Sequence: Synthetic oligonucleotide
  Antisense strand to SEQ ID NO: 1784827
guuucuauaaaugaugcgu

SEQ ID NO: 1784829 - RNA, 19 nt, Artificial Sequence
  Description of Artificial Sequence: Synthetic oligonucleotide
  Sense strand starting at position 1407 of SEQ ID NO: 1562951
uuuauucucucccagguau

SEQ ID NO: 1784830 - RNA, 19 nt, Artificial Sequence
  Description of Artificial Sequence: Synthetic oligonucleotide
  Antisense strand to SEQ ID NO: 1784829
auaccugggagagaauaaa

SEQ ID NO: 1784831 - RNA, 19 nt, Artificial Sequence
  Description of Artificial Sequence: Synthetic oligonucleotide
  Sense strand starting at position 1798 of SEQ ID NO: 1562951
accaucaugucugcaaagu

SEQ ID NO: 1784832 - RNA, 19 nt, Artificial Sequence
  Description of Artificial Sequence: Synthetic oligonucleotide
  Antisense strand to SEQ ID NO: 1784831
acuuugcagacaugauggu

SEQ ID NO: 1784833 - RNA, 19 nt, Artificial Sequence
  Description of Artificial Sequence: Synthetic oligonucleotide
  Sense strand starting at position 1799 of SEQ ID NO: 1562951
ccaucaugucugcaaaguc

SEQ ID NO: 1784834 - RNA, 19 nt, Artificial Sequence
  Description of Artificial Sequence: Synthetic oligonucleotide
  Antisense strand to SEQ ID NO: 1784833
gacuuugcagacaugaugg

SEQ ID NO: 1784835 - RNA, 19 nt, Artificial Sequence
  Description of Artificial Sequence: Synthetic oligonucleotide
  Sense strand starting at position 1906 of SEQ ID NO: 1562951
ggcaaaucauggugccaca

SEQ ID NO: 1784836 - RNA, 19 nt, Artificial Sequence
  Description of Artificial Sequence: Synthetic oligonucleotide
  Antisense strand to SEQ ID NO: 1784835
uguggcaccaugauuugcc

SEQ ID NO: 1784837 - RNA, 19 nt, Artificial Sequence
  Description of Artificial Sequence: Synthetic oligonucleotide
  Sense strand starting at position 2010 of SEQ ID NO: 1562951
gaugcagagugguaacauu

SEQ ID NO: 1784838 - RNA, 19 nt, Artificial Sequence
  Description of Artificial Sequence: Synthetic oligonucleotide
  Antisense strand to SEQ ID NO: 1784837
aauguuaccacucugcauc

SEQ ID NO: 1784839 - RNA, 19 nt, Artificial Sequence
  Description of Artificial Sequence: Synthetic oligonucleotide
  Sense strand starting at position 2067 of SEQ ID NO: 1562951
gccgguuucagcgaaggua

SEQ ID NO: 1784840 - RNA, 19 nt, Artificial Sequence
  Description of Artificial Sequence: Synthetic oligonucleotide
  Antisense strand to SEQ ID NO: 1784839
uaccuucgcugaaaccggc

SEQ ID NO: 1784841 - RNA, 19 nt, Artificial Sequence
  Description of Artificial Sequence: Synthetic oligonucleotide
  Sense strand starting at position 2735 of SEQ ID NO: 1562951
ggaaaugacucccgggaua

SEQ ID NO: 1784842 - RNA, 19 nt, Artificial Sequence
  Description of Artificial Sequence: Synthetic oligonucleotide
  Antisense strand to SEQ ID NO: 1784841
uaucccgggagucauuucc

SEQ ID NO: 1784843 - RNA, 19 nt, Artificial Sequence
  Description of Artificial Sequence: Synthetic oligonucleotide
  Sense strand starting at position 2780 of SEQ ID NO: 1562951
ggcagugacgccuggagua

SEQ ID NO: 1784844 - RNA, 19 nt, Artificial Sequence
  Description of Artificial Sequence: Synthetic oligonucleotide
  Antisense strand to SEQ ID NO: 1784843
uacuccaggcgucacugcc

SEQ ID NO: 1784845 - RNA, 19 nt, Artificial Sequence
  Description of Artificial Sequence: Synthetic oligonucleotide
  Sense strand starting at position 3058 of SEQ ID NO: 1562951
ccgauaaugucccauacac

SEQ ID NO: 1784846 - RNA, 19 nt, Artificial Sequence
  Description of Artificial Sequence: Synthetic oligonucleotide
  Antisense strand to SEQ ID NO: 1784845
guguaugggacauuaucgg

SEQ ID NO: 1784847 - RNA, 19 nt, Artificial Sequence
  Description of Artificial Sequence: Synthetic oligonucleotide
  Sense strand starting at position 3138 of SEQ ID NO: 1562951
gagugaugccucggauaac

SEQ ID NO: 1784848 - RNA, 19 nt, Artificial Sequence
  Description of Artificial Sequence: Synthetic oligonucleotide
  Antisense strand to SEQ ID NO: 1784847
guuauccgaggcaucacuc

SEQ ID NO: 1784849 - RNA, 19 nt, Artificial Sequence
  Description of Artificial Sequence: Synthetic oligonucleotide
  Sense strand starting at position 3139 of SEQ ID NO: 1562951
agugaugccucggauaaca

SEQ ID NO: 1784850 - RNA, 19 nt, Artificial Sequence
  Description of Artificial Sequence: Synthetic oligonucleotide
  Antisense strand to SEQ ID NO: 1784849
uguuauccgaggcaucacu

SEQ ID NO: 1784851 - RNA, 19 nt, Artificial Sequence
  Description of Artificial Sequence: Synthetic oligonucleotide
  Sense strand starting at position 3284 of SEQ ID NO: 1562951
ggaaaugacgcccgggaua

SEQ ID NO: 1784852 - RNA, 19 nt, Artificial Sequence
  Description of Artificial Sequence: Synthetic oligonucleotide
  Antisense strand to SEQ ID NO: 1784851
uaucccgggcgucauuucc

SEQ ID NO: 1784853 - RNA, 19 nt, Artificial Sequence
  Description of Artificial Sequence: Synthetic oligonucleotide
  Sense strand starting at position 3321 of SEQ ID NO: 1562951
cgccaugagcaaugcaaca

SEQ ID NO: 1784854 - RNA, 19 nt, Artificial Sequence
  Description of Artificial Sequence: Synthetic oligonucleotide
  Antisense strand to SEQ ID NO: 1784853
uguugcauugcucauggcg

SEQ ID NO: 1784855 - RNA, 19 nt, Artificial Sequence
  Description of Artificial Sequence: Synthetic oligonucleotide
  Sense strand starting at position 3419 of SEQ ID NO: 1562951
caguguagcucccgauagu

SEQ ID NO: 1784856 - RNA, 19 nt, Artificial Sequence
  Description of Artificial Sequence: Synthetic oligonucleotide
  Antisense strand to SEQ ID NO: 1784855
acuaucgggagcuacacug

SEQ ID NO: 1784857 - RNA, 19 nt, Artificial Sequence
  Description of Artificial Sequence: Synthetic oligonucleotide
  Sense strand starting at position 3626 of SEQ ID NO: 1562951
ggcaguguagcccauagau

SEQ ID NO: 1784858 - RNA, 19 nt, Artificial Sequence
  Description of Artificial Sequence: Synthetic oligonucleotide
  Antisense strand to SEQ ID NO: 1784857
aucuaugggcuacacugcc

SEQ ID NO: 1784859 - RNA, 19 nt, Artificial Sequence
  Description of Artificial Sequence: Synthetic oligonucleotide
  Sense strand starting at position 3628 of SEQ ID NO: 1562951
caguguagcccauagauag

SEQ ID NO: 1784860 - RNA, 19 nt, Artificial Sequence
  Description of Artificial Sequence: Synthetic oligonucleotide
  Antisense strand to SEQ ID NO: 1784859
cuaucuaugggcuacacug

SEQ ID NO: 1784861 - RNA, 19 nt, Artificial Sequence
  Description of Artificial Sequence: Synthetic oligonucleotide
  Sense strand starting at position 3674 of SEQ ID NO: 1562951
cagugacgccucggauauc

SEQ ID NO: 1784862 - RNA, 19 nt, Artificial Sequence
  Description of Artificial Sequence: Synthetic oligonucleotide
  Antisense strand to SEQ ID NO: 1784861
gauauccgaggcgucacug

SEQ ID NO: 1784863 - RNA, 19 nt, Artificial Sequence
  Description of Artificial Sequence: Synthetic oligonucleotide
  Sense strand starting at position 3811 of SEQ ID NO: 1562951
ggaaaugacguccgguaaa

SEQ ID NO: 1784864 - RNA, 19 nt, Artificial Sequence
  Description of Artificial Sequence: Synthetic oligonucleotide
  Antisense strand to SEQ ID NO: 1784863
uuuaccggacgucauuucc

SEQ ID NO: 1784865 - RNA, 19 nt, Artificial Sequence
  Description of Artificial Sequence: Synthetic oligonucleotide
  Sense strand starting at position 54 of SEQ ID NO: 1562952
ggcaauaccugacccuuau

SEQ ID NO: 1784866 - RNA, 19 nt, Artificial Sequence
  Description of Artificial Sequence: Synthetic oligonucleotide
  Antisense strand to SEQ ID NO: 1784865
auaagggucagguauugcc

SEQ ID NO: 1784867 - RNA, 19 nt, Artificial Sequence
  Description of Artificial Sequence: Synthetic oligonucleotide
  Sense strand starting at position 214 of SEQ ID NO: 1562952
caaugcaaguggucgauau

SEQ ID NO: 1784868 - RNA, 19 nt, Artificial Sequence
  Description of Artificial Sequence: Synthetic oligonucleotide
  Antisense strand to SEQ ID NO: 1784867
auaucgaccacuugcauug

SEQ ID NO: 1784869 - RNA, 19 nt, Artificial Sequence
  Description of Artificial Sequence: Synthetic oligonucleotide
  Sense strand starting at position 215 of SEQ ID NO: 1562952
aaugcaaguggucgauauu

SEQ ID NO: 1784870 - RNA, 19 nt, Artificial Sequence
  Description of Artificial Sequence: Synthetic oligonucleotide
  Antisense strand to SEQ ID NO: 1784869
aauaucgaccacuugcauu

SEQ ID NO: 1784871 - RNA, 19 nt, Artificial Sequence
  Description of Artificial Sequence: Synthetic oligonucleotide
  Sense strand starting at position 216 of SEQ ID NO: 1562952
augcaaguggucgauauua

SEQ ID NO: 1784872 - RNA, 19 nt, Artificial Sequence
  Description of Artificial Sequence: Synthetic oligonucleotide
  Antisense strand to SEQ ID NO: 1784871
uaauaucgaccacuugcau

SEQ ID NO: 1784873 - RNA, 19 nt, Artificial Sequence
  Description of Artificial Sequence: Synthetic oligonucleotide
  Sense strand starting at position 218 of SEQ ID NO: 1562952
gcaaguggucgauauuaaa

SEQ ID NO: 1784874 - RNA, 19 nt, Artificial Sequence
  Description of Artificial Sequence: Synthetic oligonucleotide
  Antisense strand to SEQ ID NO: 1784873
uuuaauaucgaccacuugc

SEQ ID NO: 1784875 - RNA, 19 nt, Artificial Sequence
  Description of Artificial Sequence: Synthetic oligonucleotide
  Sense strand starting at position 225 of SEQ ID NO: 1562952
gucgauauuaaaugauguu

SEQ ID NO: 1784876 - RNA, 19 nt, Artificial Sequence
  Description of Artificial Sequence: Synthetic oligonucleotide
  Antisense strand to SEQ ID NO: 1784875
aacaucauuuaauaucgac

SEQ ID NO: 1784877 - RNA, 19 nt, Artificial Sequence
  Description of Artificial Sequence: Synthetic oligonucleotide
  Sense strand starting at position 237 of SEQ ID NO: 1562952
ugauguuuguuuccacauu

SEQ ID NO: 1784878 - RNA, 19 nt, Artificial Sequence
  Description of Artificial Sequence: Synthetic oligonucleotide
  Antisense strand to SEQ ID NO: 1784877
aauguggaaacaaacauca

SEQ ID NO: 1784879 - RNA, 19 nt, Artificial Sequence
  Description of Artificial Sequence: Synthetic oligonucleotide
  Sense strand starting at position 274 of SEQ ID NO: 1562952
uaguaucuagagcaugagu

SEQ ID NO: 1784880 - RNA, 19 nt, Artificial Sequence
  Description of Artificial Sequence: Synthetic oligonucleotide
  Antisense strand to SEQ ID NO: 1784879
acucaugcucuagauacua

SEQ ID NO: 1784881 - RNA, 19 nt, Artificial Sequence
  Description of Artificial Sequence: Synthetic oligonucleotide
  Sense strand starting at position 322 of SEQ ID NO: 1562952
aaauuaaucguguacaguu

SEQ ID NO: 1784882 - RNA, 19 nt, Artificial Sequence
  Description of Artificial Sequence: Synthetic oligonucleotide
  Antisense strand to SEQ ID NO: 1784881
aacuguacacgauuaauuu

SEQ ID NO: 1784883 - RNA, 19 nt, Artificial Sequence
  Description of Artificial Sequence: Synthetic oligonucleotide
  Sense strand starting at position 353 of SEQ ID NO: 1562952
ggaauaucucugcagcuga

SEQ ID NO: 1784884 - RNA, 19 nt, Artificial Sequence
  Description of Artificial Sequence: Synthetic oligonucleotide
  Antisense strand to SEQ ID NO: 1784883
ucagcugcagagauauucc

SEQ ID NO: 1784885 - RNA, 19 nt, Artificial Sequence
  Description of Artificial Sequence: Synthetic oligonucleotide
  Sense strand starting at position 529 of SEQ ID NO: 1562952
ugaagagauugauugcugu

SEQ ID NO: 1784886 - RNA, 19 nt, Artificial Sequence
  Description of Artificial Sequence: Synthetic oligonucleotide
  Antisense strand to SEQ ID NO: 1784885
acagcaaucaaucucuuca

SEQ ID NO: 1784887 - RNA, 19 nt, Artificial Sequence
  Description of Artificial Sequence: Synthetic oligonucleotide
  Sense strand starting at position 808 of SEQ ID NO: 1562952
ucuccagaguuauagagau

SEQ ID NO: 1784888 - RNA, 19 nt, Artificial Sequence
  Description of Artificial Sequence: Synthetic oligonucleotide
  Antisense strand to SEQ ID NO: 1784887
aucucuauaacucuggaga

SEQ ID NO: 1784889 - RNA, 19 nt, Artificial Sequence
  Description of Artificial Sequence: Synthetic oligonucleotide
  Sense strand starting at position 814 of SEQ ID NO: 1562952
gaguuauagagauguauag

SEQ ID NO: 1784890 - RNA, 19 nt, Artificial Sequence
  Description of Artificial Sequence: Synthetic oligonucleotide
  Antisense strand to SEQ ID NO: 1784889
cuauacaucucuauaacuc

SEQ ID NO: 1784891 - RNA, 19 nt, Artificial Sequence
  Description of Artificial Sequence: Synthetic oligonucleotide
  Sense strand starting at position 816 of SEQ ID NO: 1562952
guuauagagauguauagua

SEQ ID NO: 1784892 - RNA, 19 nt, Artificial Sequence
  Description of Artificial Sequence: Synthetic oligonucleotide
  Antisense strand to SEQ ID NO: 1784891
uacuauacaucucuauaac

SEQ ID NO: 1784893 - RNA, 19 nt, Artificial Sequence
  Description of Artificial Sequence: Synthetic oligonucleotide
  Sense strand starting at position 882 of SEQ ID NO: 1562952
gagaacacugucugaaacu

SEQ ID NO: 1784894 - RNA, 19 nt, Artificial Sequence
  Description of Artificial Sequence: Synthetic oligonucleotide
  Antisense strand to SEQ ID NO: 1784893
aguuucagacaguguucuc

SEQ ID NO: 1784895 - RNA, 19 nt, Artificial Sequence
  Description of Artificial Sequence: Synthetic oligonucleotide
  Sense strand starting at position 962 of SEQ ID NO: 1562952
ggguaagguuguuuguaca

SEQ ID NO: 1784896 - RNA, 19 nt, Artificial Sequence
  Description of Artificial Sequence: Synthetic oligonucleotide
  Antisense strand to SEQ ID NO: 1784895
uguacaaacaaccuuaccc

SEQ ID NO: 1784897 - RNA, 19 nt, Artificial Sequence
  Description of Artificial Sequence: Synthetic oligonucleotide
  Sense strand starting at position 968 of SEQ ID NO: 1562952
gguuguuuguacaaugggu

SEQ ID NO: 1784898 - RNA, 19 nt, Artificial Sequence
  Description of Artificial Sequence: Synthetic oligonucleotide
  Antisense strand to SEQ ID NO: 1784897
acccauuguacaaacaacc

SEQ ID NO: 1784899 - RNA, 19 nt, Artificial Sequence
  Description of Artificial Sequence: Synthetic oligonucleotide
  Sense strand starting at position 1250 of SEQ ID NO: 1562952
uugacaucaccaggugauu

SEQ ID NO: 1784900 - RNA, 19 nt, Artificial Sequence
  Description of Artificial Sequence: Synthetic oligonucleotide
  Antisense strand to SEQ ID NO: 1784899
aaucaccuggugaugucaa

SEQ ID NO: 1784901 - RNA, 19 nt, Artificial Sequence
  Description of Artificial Sequence: Synthetic oligonucleotide
  Sense strand starting at position 1403 of SEQ ID NO: 1562952
aggguauacagaugccuua

SEQ ID NO: 1784902 - RNA, 19 nt, Artificial Sequence
  Description of Artificial Sequence: Synthetic oligonucleotide
  Antisense strand to SEQ ID NO: 1784901
uaaggcaucuguauacccu

SEQ ID NO: 1784903 - RNA, 19 nt, Artificial Sequence
  Description of Artificial Sequence: Synthetic oligonucleotide
  Sense strand starting at position 1801 of SEQ ID NO: 1562952
gagguauuguguuccagcu

SEQ ID NO: 1784904 - RNA, 19 nt, Artificial Sequence
  Description of Artificial Sequence: Synthetic oligonucleotide
  Antisense strand to SEQ ID NO: 1784903
agcuggaacacaauaccuc

SEQ ID NO: 1784905 - RNA, 19 nt, Artificial Sequence
  Description of Artificial Sequence: Synthetic oligonucleotide
  Sense strand starting at position 1820 of SEQ ID NO: 1562952
uugucacuccgagaauaag

SEQ ID NO: 1784906 - RNA, 19 nt, Artificial Sequence
  Description of Artificial Sequence: Synthetic oligonucleotide
  Antisense strand to SEQ ID NO: 1784905
cuuauucucggagugacaa

SEQ ID NO: 1784907 - RNA, 19 nt, Artificial Sequence
  Description of Artificial Sequence: Synthetic oligonucleotide
  Sense strand starting at position 2556 of SEQ ID NO: 1562952
cagagaucacgccaaguca

SEQ ID NO: 1784908 - RNA, 19 nt, Artificial Sequence
  Description of Artificial Sequence: Synthetic oligonucleotide
  Antisense strand to SEQ ID NO: 1784907
ugacuuggcgugaucucug

SEQ ID NO: 1784909 - RNA, 19 nt, Artificial Sequence
  Description of Artificial Sequence: Synthetic oligonucleotide
  Sense strand starting at position 2591 of SEQ ID NO: 1562952
agaguuaagacccgucuca

SEQ ID NO: 1784910 - RNA, 19 nt, Artificial Sequence
  Description of Artificial Sequence: Synthetic oligonucleotide
  Antisense strand to SEQ ID NO: 1784909
ugagacgggucuuaacucu

SEQ ID NO: 1784911 - RNA, 19 nt, Artificial Sequence
  Description of Artificial Sequence: Synthetic oligonucleotide
  Sense strand starting at position 2822 of SEQ ID NO: 1562952
cuaggcaucuaagaggaaa

SEQ ID NO: 1784912 - RNA, 19 nt, Artificial Sequence
  Description of Artificial Sequence: Synthetic oligonucleotide
  Antisense strand to SEQ ID NO: 1784911
uuuccucuuagaugccuag

SEQ ID NO: 1784913 - RNA, 19 nt, Artificial Sequence
  Description of Artificial Sequence: Synthetic oligonucleotide
  Sense strand starting at position 3353 of SEQ ID NO: 1562952
gaggaaauucuagguacuu

SEQ ID NO: 1784914 - RNA, 19 nt, Artificial Sequence
  Description of Artificial Sequence: Synthetic oligonucleotide
  Antisense strand to SEQ ID NO: 1784913
aaguaccuagaauuuccuc

SEQ ID NO: 1784915 - RNA, 19 nt, Artificial Sequence
  Description of Artificial Sequence: Synthetic oligonucleotide
  Sense strand starting at position 3354 of SEQ ID NO: 1562952
aggaaauucuagguacuuu

SEQ ID NO: 1784916 - RNA, 19 nt, Artificial Sequence
  Description of Artificial Sequence: Synthetic oligonucleotide
  Antisense strand to SEQ ID NO: 1784915
aaaguaccuagaauuuccu

SEQ ID NO: 1784917 - RNA, 19 nt, Artificial Sequence
  Description of Artificial Sequence: Synthetic oligonucleotide
  Sense strand starting at position 3375 of SEQ ID NO: 1562952
auuuguuuccauugguuua

SEQ ID NO: 1784918 - RNA, 19 nt, Artificial Sequence
  Description of Artificial Sequence: Synthetic oligonucleotide
  Antisense strand to SEQ ID NO: 1784917
uaaaccaauggaaacaaau

SEQ ID NO: 1784919 - RNA, 19 nt, Artificial Sequence
  Description of Artificial Sequence: Synthetic oligonucleotide
  Sense strand starting at position 3377 of SEQ ID NO: 1562952
uuguuuccauugguuuauu

SEQ ID NO: 1784920 - RNA, 19 nt, Artificial Sequence
  Description of Artificial Sequence: Synthetic oligonucleotide
  Antisense strand to SEQ ID NO: 1784919
aauaaaccaauggaaacaa

SEQ ID NO: 1784921 - RNA, 19 nt, Artificial Sequence
  Description of Artificial Sequence: Synthetic oligonucleotide
  Sense strand starting at position 3537 of SEQ ID NO: 1562952
ucuugugaaaccuguguuu

SEQ ID NO: 1784922 - RNA, 19 nt, Artificial Sequence
  Description of Artificial Sequence: Synthetic oligonucleotide
  Antisense strand to SEQ ID NO: 1784921
aaacacagguuucacaaga

SEQ ID NO: 1784923 - RNA, 19 nt, Artificial Sequence
  Description of Artificial Sequence: Synthetic oligonucleotide
  Sense strand starting at position 3565 of SEQ ID NO: 1562952
aauuguuacccgugaagug

SEQ ID NO: 1784924 - RNA, 19 nt, Artificial Sequence
  Description of Artificial Sequence: Synthetic oligonucleotide
  Antisense strand to SEQ ID NO: 1784923
cacuucacggguaacaauu

SEQ ID NO: 1784925 - RNA, 19 nt, Artificial Sequence
  Description of Artificial Sequence: Synthetic oligonucleotide
  Sense strand starting at position 3566 of SEQ ID NO: 1562952
auuguuacccgugaaguga

SEQ ID NO: 1784926 - RNA, 19 nt, Artificial Sequence
  Description of Artificial Sequence: Synthetic oligonucleotide
  Antisense strand to SEQ ID NO: 1784925
ucacuucacggguaacaau

SEQ ID NO: 1784927 - RNA, 19 nt, Artificial Sequence
  Description of Artificial Sequence: Synthetic oligonucleotide
  Sense strand starting at position 3584 of SEQ ID NO: 1562952
aguugugcuuucuuccauu

SEQ ID NO: 1784928 - RNA, 19 nt, Artificial Sequence
  Description of Artificial Sequence: Synthetic oligonucleotide
  Antisense strand to SEQ ID NO: 1784927
aauggaagaaagcacaacu

SEQ ID NO: 1784929 - RNA, 19 nt, Artificial Sequence
  Description of Artificial Sequence: Synthetic oligonucleotide
  Sense strand starting at position 3587 of SEQ ID NO: 1562952
ugugcuuucuuccauuuga

SEQ ID NO: 1784930 - RNA, 19 nt, Artificial Sequence
  Description of Artificial Sequence: Synthetic oligonucleotide
  Antisense strand to SEQ ID NO: 1784929
ucaaauggaagaaagcaca

SEQ ID NO: 1784931 - RNA, 19 nt, Artificial Sequence
  Description of Artificial Sequence: Synthetic oligonucleotide
  Sense strand starting at position 3646 of SEQ ID NO: 1562952
gugggaucuuuacugcuuu

SEQ ID NO: 1784932 - RNA, 19 nt, Artificial Sequence
  Description of Artificial Sequence: Synthetic oligonucleotide
  Antisense strand to SEQ ID NO: 1784931
aaagcaguaaagaucccac

SEQ ID NO: 1784933 - RNA, 19 nt, Artificial Sequence
  Description of Artificial Sequence: Synthetic oligonucleotide
  Sense strand starting at position 3773 of SEQ ID NO: 1562952
uuuggucagcuuuaaauau

SEQ ID NO: 1784934 - RNA, 19 nt, Artificial Sequence
  Description of Artificial Sequence: Synthetic oligonucleotide
  Antisense strand to SEQ ID NO: 1784933
auauuuaaagcugaccaaa

SEQ ID NO: 1784935 - RNA, 19 nt, Artificial Sequence
  Description of Artificial Sequence: Synthetic oligonucleotide
  Sense strand starting at position 3790 of SEQ ID NO: 1562952
augauuccucaugggauua

SEQ ID NO: 1784936 - RNA, 19 nt, Artificial Sequence
  Description of Artificial Sequence: Synthetic oligonucleotide
  Antisense strand to SEQ ID NO: 1784935
uaaucccaugaggaaucau

SEQ ID NO: 1784937 - RNA, 19 nt, Artificial Sequence
  Description of Artificial Sequence: Synthetic oligonucleotide
  Sense strand starting at position 3792 of SEQ ID NO: 1562952
gauuccucaugggauuaga

SEQ ID NO: 1784938 - RNA, 19 nt, Artificial Sequence
  Description of Artificial Sequence: Synthetic oligonucleotide
  Antisense strand to SEQ ID NO: 1784937
ucuaaucccaugaggaauc

SEQ ID NO: 1784939 - RNA, 19 nt, Artificial Sequence
  Description of Artificial Sequence: Synthetic oligonucleotide
  Sense strand starting at position 3884 of SEQ ID NO: 1562952
uguacauauuuauggcaca

SEQ ID NO: 1784940 - RNA, 19 nt, Artificial Sequence
  Description of Artificial Sequence: Synthetic oligonucleotide
  Antisense strand to SEQ ID NO: 1784939
ugugccauaaauauguaca

SEQ ID NO: 1784941 - RNA, 19 nt, Artificial Sequence
  Description of Artificial Sequence: Synthetic oligonucleotide
  Sense strand starting at position 3913 of SEQ ID NO: 1562952
uugauacaugcauguauaa

SEQ ID NO: 1784942 - RNA, 19 nt, Artificial Sequence
  Description of Artificial Sequence: Synthetic oligonucleotide
  Antisense strand to SEQ ID NO: 1784941
uuauacaugcauguaucaa

SEQ ID NO: 1784943 - RNA, 19 nt, Artificial Sequence
  Description of Artificial Sequence: Synthetic oligonucleotide
  Sense strand starting at position 3931 of SEQ ID NO: 1562952
auaaucaagucaggauaau

SEQ ID NO: 1784944 - RNA, 19 nt, Artificial Sequence
  Description of Artificial Sequence: Synthetic oligonucleotide
  Antisense strand to SEQ ID NO: 1784943
auuauccugacuugauuau

SEQ ID NO: 1784945 - RNA, 19 nt, Artificial Sequence
  Description of Artificial Sequence: Synthetic oligonucleotide
  Sense strand starting at position 126 of SEQ ID NO: 1562953
cagagaugcugguccugga

SEQ ID NO: 1784946 - RNA, 19 nt, Artificial Sequence
  Description of Artificial Sequence: Synthetic oligonucleotide
  Antisense strand to SEQ ID NO: 1784945
uccaggaccagcaucucug

SEQ ID NO: 1784947 - RNA, 19 nt, Artificial Sequence
  Description of Artificial Sequence: Synthetic oligonucleotide
  Sense strand starting at position 130 of SEQ ID NO: 1562953
gaugcugguccuggacauu

SEQ ID NO: 1784948 - RNA, 19 nt, Artificial Sequence
  Description of Artificial Sequence: Synthetic oligonucleotide
  Antisense strand to SEQ ID NO: 1784947
aauguccaggaccagcauc

SEQ ID NO: 1784949 - RNA, 19 nt, Artificial Sequence
  Description of Artificial Sequence: Synthetic oligonucleotide
  Sense strand starting at position 267 of SEQ ID NO: 1562953
guauuugaaaguugucugu

SEQ ID NO: 1784950 - RNA, 19 nt, Artificial Sequence
  Description of Artificial Sequence: Synthetic oligonucleotide
  Antisense strand to SEQ ID NO: 1784949
acagacaacuuucaaauac

SEQ ID NO: 1784951 - RNA, 19 nt, Artificial Sequence
  Description of Artificial Sequence: Synthetic oligonucleotide
  Sense strand starting at position 270 of SEQ ID NO: 1562953
uuugaaaguugucugucau

SEQ ID NO: 1784952 - RNA, 19 nt, Artificial Sequence
  Description of Artificial Sequence: Synthetic oligonucleotide
  Antisense strand to SEQ ID NO: 1784951
augacagacaacuuucaaa

SEQ ID NO: 1784953 - RNA, 19 nt, Artificial Sequence
  Description of Artificial Sequence: Synthetic oligonucleotide
  Sense strand starting at position 271 of SEQ ID NO: 1562953
uugaaaguugucugucaua

SEQ ID NO: 1784954 - RNA, 19 nt, Artificial Sequence
  Description of Artificial Sequence: Synthetic oligonucleotide
  Antisense strand to SEQ ID NO: 1784953
uaugacagacaacuuucaa

SEQ ID NO: 1784955 - RNA, 19 nt, Artificial Sequence
  Description of Artificial Sequence: Synthetic oligonucleotide
  Sense strand starting at position 284 of SEQ ID NO: 1562953
gucauaacugacugauugu

SEQ ID NO: 1784956 - RNA, 19 nt, Artificial Sequence
  Description of Artificial Sequence: Synthetic oligonucleotide
  Antisense strand to SEQ ID NO: 1784955
acaaucagucaguuaugac

SEQ ID NO: 1784957 - RNA, 19 nt, Artificial Sequence
  Description of Artificial Sequence: Synthetic oligonucleotide
  Sense strand starting at position 287 of SEQ ID NO: 1562953
auaacugacugauuguaga

SEQ ID NO: 1784958 - RNA, 19 nt, Artificial Sequence
  Description of Artificial Sequence: Synthetic oligonucleotide
  Antisense strand to SEQ ID NO: 1784957
ucuacaaucagucaguuau

SEQ ID NO: 1784959 - RNA, 19 nt, Artificial Sequence
  Description of Artificial Sequence: Synthetic oligonucleotide
  Sense strand starting at position 290 of SEQ ID NO: 1562953
acugacugauuguagagaa

SEQ ID NO: 1784960 - RNA, 19 nt, Artificial Sequence
  Description of Artificial Sequence: Synthetic oligonucleotide
  Antisense strand to SEQ ID NO: 1784959
uucucuacaaucagucagu

SEQ ID NO: 1784961 - RNA, 19 nt, Artificial Sequence
  Description of Artificial Sequence: Synthetic oligonucleotide
  Sense strand starting at position 348 of SEQ ID NO: 1562953
ggguaugugacugacaggu

SEQ ID NO: 1784962 - RNA, 19 nt, Artificial Sequence
  Description of Artificial Sequence: Synthetic oligonucleotide
  Antisense strand to SEQ ID NO: 1784961
accugucagucacauaccc

SEQ ID NO: 1784963 - RNA, 19 nt, Artificial Sequence
  Description of Artificial Sequence: Synthetic oligonucleotide
  Sense strand starting at position 396 of SEQ ID NO: 1562953
ugugaucuggccuagagaa

SEQ ID NO: 1784964 - RNA, 19 nt, Artificial Sequence
  Description of Artificial Sequence: Synthetic oligonucleotide
  Antisense strand to SEQ ID NO: 1784963
uucucuaggccagaucaca

SEQ ID NO: 1784965 - RNA, 19 nt, Artificial Sequence
  Description of Artificial Sequence: Synthetic oligonucleotide
  Sense strand starting at position 518 of SEQ ID NO: 1562953
guaagacuacccuagucaa

SEQ ID NO: 1784966 - RNA, 19 nt, Artificial Sequence
  Description of Artificial Sequence: Synthetic oligonucleotide
  Antisense strand to SEQ ID NO: 1784965
uugacuaggguagucuuac

SEQ ID NO: 1784967 - RNA, 19 nt, Artificial Sequence
  Description of Artificial Sequence: Synthetic oligonucleotide
  Sense strand starting at position 531 of SEQ ID NO: 1562953
agucaagacuagggauuga

SEQ ID NO: 1784968 - RNA, 19 nt, Artificial Sequence
  Description of Artificial Sequence: Synthetic oligonucleotide
  Antisense strand to SEQ ID NO: 1784967
ucaaucccuagucuugacu

SEQ ID NO: 1784969 - RNA, 19 nt, Artificial Sequence
  Description of Artificial Sequence: Synthetic oligonucleotide
  Sense strand starting at position 542 of SEQ ID NO: 1562953
gggauugauugcuauuuaa

SEQ ID NO: 1784970 - RNA, 19 nt, Artificial Sequence
  Description of Artificial Sequence: Synthetic oligonucleotide
  Antisense strand to SEQ ID NO: 1784969
uuaaauagcaaucaauccc

SEQ ID NO: 1784971 - RNA, 19 nt, Artificial Sequence
  Description of Artificial Sequence: Synthetic oligonucleotide
  Sense strand starting at position 549 of SEQ ID NO: 1562953
auugcuauuuaauggugaa

SEQ ID NO: 1784972 - RNA, 19 nt, Artificial Sequence
  Description of Artificial Sequence: Synthetic oligonucleotide
  Antisense strand to SEQ ID NO: 1784971
uucaccauuaaauagcaau

SEQ ID NO: 1784973 - RNA, 19 nt, Artificial Sequence
  Description of Artificial Sequence: Synthetic oligonucleotide
  Sense strand starting at position 552 of SEQ ID NO: 1562953
gcuauuuaauggugaauua

SEQ ID NO: 1784974 - RNA, 19 nt, Artificial Sequence
  Description of Artificial Sequence: Synthetic oligonucleotide
  Antisense strand to SEQ ID NO: 1784973
uaauucaccauuaaauagc

SEQ ID NO: 1784975 - RNA, 19 nt, Artificial Sequence
  Description of Artificial Sequence: Synthetic oligonucleotide
  Sense strand starting at position 614 of SEQ ID NO: 1562953
ugacuuggacagggugaau

SEQ ID NO: 1784976 - RNA, 19 nt, Artificial Sequence
  Description of Artificial Sequence: Synthetic oligonucleotide
  Antisense strand to SEQ ID NO: 1784975
auucacccuguccaaguca

SEQ ID NO: 1784977 - RNA, 19 nt, Artificial Sequence
  Description of Artificial Sequence: Synthetic oligonucleotide
  Sense strand starting at position 627 of SEQ ID NO: 1562953
gugaaucucuguccuccau

SEQ ID NO: 1784978 - RNA, 19 nt, Artificial Sequence
  Description of Artificial Sequence: Synthetic oligonucleotide
  Antisense strand to SEQ ID NO: 1784977
auggaggacagagauucac

SEQ ID NO: 1784979 - RNA, 19 nt, Artificial Sequence
  Description of Artificial Sequence: Synthetic oligonucleotide
  Sense strand starting at position 631 of SEQ ID NO: 1562953
aucucuguccuccauaguu

SEQ ID NO: 1784980 - RNA, 19 nt, Artificial Sequence
  Description of Artificial Sequence: Synthetic oligonucleotide
  Antisense strand to SEQ ID NO: 1784979
aacuauggaggacagagau

SEQ ID NO: 1784981 - RNA, 19 nt, Artificial Sequence
  Description of Artificial Sequence: Synthetic oligonucleotide
  Sense strand starting at position 661 of SEQ ID NO: 1562953
cagucagguauggguagau

SEQ ID NO: 1784982 - RNA, 19 nt, Artificial Sequence
  Description of Artificial Sequence: Synthetic oligonucleotide
  Antisense strand to SEQ ID NO: 1784981
aucuacccauaccugacug

SEQ ID NO: 1784983 - RNA, 19 nt, Artificial Sequence
  Description of Artificial Sequence: Synthetic oligonucleotide
  Sense strand starting at position 965 of SEQ ID NO: 1562953
ugagguuguuugguacaau

SEQ ID NO: 1784984 - RNA, 19 nt, Artificial Sequence
  Description of Artificial Sequence: Synthetic oligonucleotide
  Antisense strand to SEQ ID NO: 1784983
auuguaccaaacaaccuca

SEQ ID NO: 1784985 - RNA, 19 nt, Artificial Sequence
  Description of Artificial Sequence: Synthetic oligonucleotide
  Sense strand starting at position 1216 of SEQ ID NO: 1562953
ugacauagacaucggguuu

SEQ ID NO: 1784986 - RNA, 19 nt, Artificial Sequence
  Description of Artificial Sequence: Synthetic oligonucleotide
  Antisense strand to SEQ ID NO: 1784985
aaacccgaugucuauguca

SEQ ID NO: 1784987 - RNA, 19 nt, Artificial Sequence
  Description of Artificial Sequence: Synthetic oligonucleotide
  Sense strand starting at position 1251 of SEQ ID NO: 1562953
uugacaucaccaggugauu

SEQ ID NO: 1784988 - RNA, 19 nt, Artificial Sequence
  Description of Artificial Sequence: Synthetic oligonucleotide
  Antisense strand to SEQ ID NO: 1784987
aaucaccuggugaugucaa

SEQ ID NO: 1784989 - RNA, 19 nt, Artificial Sequence
  Description of Artificial Sequence: Synthetic oligonucleotide
  Sense strand starting at position 1262 of SEQ ID NO: 1562953
aggugauucuauguguugu

SEQ ID NO: 1784990 - RNA, 19 nt, Artificial Sequence
  Description of Artificial Sequence: Synthetic oligonucleotide
  Antisense strand to SEQ ID NO: 1784989
acaacacauagaaucaccu

SEQ ID NO: 1784991 - RNA, 19 nt, Artificial Sequence
  Description of Artificial Sequence: Synthetic oligonucleotide
  Sense strand starting at position 1263 of SEQ ID NO: 1562953
ggugauucuauguguuguc

SEQ ID NO: 1784992 - RNA, 19 nt, Artificial Sequence
  Description of Artificial Sequence: Synthetic oligonucleotide
  Antisense strand to SEQ ID NO: 1784991
gacaacacauagaaucacc

SEQ ID NO: 1784993 - RNA, 19 nt, Artificial Sequence
  Description of Artificial Sequence: Synthetic oligonucleotide
  Sense strand starting at position 1264 of SEQ ID NO: 1562953
gugauucuauguguuguca

SEQ ID NO: 1784994 - RNA, 19 nt, Artificial Sequence
  Description of Artificial Sequence: Synthetic oligonucleotide
  Antisense strand to SEQ ID NO: 1784993
ugacaacacauagaaucac

SEQ ID NO: 1784995 - RNA, 19 nt, Artificial Sequence
  Description of Artificial Sequence: Synthetic oligonucleotide
  Sense strand starting at position 1286 of SEQ ID NO: 1562953
cugagaaugugaugaugaa

SEQ ID NO: 1784996 - RNA, 19 nt, Artificial Sequence
  Description of Artificial Sequence: Synthetic oligonucleotide
  Antisense strand to SEQ ID NO: 1784995
uucaucaucacauucucag

SEQ ID NO: 1784997 - RNA, 19 nt, Artificial Sequence
  Description of Artificial Sequence: Synthetic oligonucleotide
  Sense strand starting at position 2058 of SEQ ID NO: 1562953
ccagcaagagacugauuga

SEQ ID NO: 1784998 - RNA, 19 nt, Artificial Sequence
  Description of Artificial Sequence: Synthetic oligonucleotide
  Antisense strand to SEQ ID NO: 1784997
ucaaucagucucuugcugg

SEQ ID NO: 1784999 - RNA, 19 nt, Artificial Sequence
  Description of Artificial Sequence: Synthetic oligonucleotide
  Sense strand starting at position 2065 of SEQ ID NO: 1562953
gagacugauugaugaacau

SEQ ID NO: 1785000 - RNA, 19 nt, Artificial Sequence
  Description of Artificial Sequence: Synthetic oligonucleotide
  Antisense strand to SEQ ID NO: 1784999
auguucaucaaucagucuc

SEQ ID NO: 1785001 - RNA, 19 nt, Artificial Sequence
  Description of Artificial Sequence: Synthetic oligonucleotide
  Sense strand starting at position 2642 of SEQ ID NO: 1562953
ggaaaugaauaccaaauua

SEQ ID NO: 1785002 - RNA, 19 nt, Artificial Sequence
  Description of Artificial Sequence: Synthetic oligonucleotide
  Antisense strand to SEQ ID NO: 1785001
uaauuugguauucauuucc

SEQ ID NO: 1785003 - RNA, 19 nt, Artificial Sequence
  Description of Artificial Sequence: Synthetic oligonucleotide
  Sense strand starting at position 3180 of SEQ ID NO: 1562953
ugaagaauguucuuagguc

SEQ ID NO: 1785004 - RNA, 19 nt, Artificial Sequence
  Description of Artificial Sequence: Synthetic oligonucleotide
  Antisense strand to SEQ ID NO: 1785003
gaccuaagaacauucuuca

SEQ ID NO: 1785005 - RNA, 19 nt, Artificial Sequence
  Description of Artificial Sequence: Synthetic oligonucleotide
  Sense strand starting at position 3572 of SEQ ID NO: 1562953
ugacuacuuccuggaugaa

SEQ ID NO: 1785006 - RNA, 19 nt, Artificial Sequence
  Description of Artificial Sequence: Synthetic oligonucleotide
  Antisense strand to SEQ ID NO: 1785005
uucauccaggaaguaguca

SEQ ID NO: 1785007 - RNA, 19 nt, Artificial Sequence
  Description of Artificial Sequence: Synthetic oligonucleotide
  Sense strand starting at position 3665 of SEQ ID NO: 1562953
cuguuucuuuagccuugaa

SEQ ID NO: 1785008 - RNA, 19 nt, Artificial Sequence
  Description of Artificial Sequence: Synthetic oligonucleotide
  Antisense strand to SEQ ID NO: 1785007
uucaaggcuaaagaaacag

SEQ ID NO: 1785009 - RNA, 19 nt, Artificial Sequence
  Description of Artificial Sequence: Synthetic oligonucleotide
  Sense strand starting at position 3777 of SEQ ID NO: 1562953
acuguugcaucgucaaauu

SEQ ID NO: 1785010 - RNA, 19 nt, Artificial Sequence
  Description of Artificial Sequence: Synthetic oligonucleotide
  Antisense strand to SEQ ID NO: 1785009
aauuugacgaugcaacagu

SEQ ID NO: 1785011 - RNA, 19 nt, Artificial Sequence
  Description of Artificial Sequence: Synthetic oligonucleotide
  Sense strand starting at position 3910 of SEQ ID NO: 1562953
ggcucaggaugcuugugaa

SEQ ID NO: 1785012 - RNA, 19 nt, Artificial Sequence
  Description of Artificial Sequence: Synthetic oligonucleotide
  Antisense strand to SEQ ID NO: 1785011
uucacaagcauccugagcc

SEQ ID NO: 1785013 - RNA, 19 nt, Artificial Sequence
  Description of Artificial Sequence: Synthetic oligonucleotide
  Sense strand starting at position 3916 of SEQ ID NO: 1562953
ggaugcuugugaaagguag

SEQ ID NO: 1785014 - RNA, 19 nt, Artificial Sequence
  Description of Artificial Sequence: Synthetic oligonucleotide
  Antisense strand to SEQ ID NO: 1785013
cuaccuuucacaagcaucc

SEQ ID NO: 1785015 - RNA, 19 nt, Artificial Sequence
  Description of Artificial Sequence: Synthetic oligonucleotide
  Sense strand starting at position 3918 of SEQ ID NO: 1562953
augcuugugaaagguagua

SEQ ID NO: 1785016 - RNA, 19 nt, Artificial Sequence
  Description of Artificial Sequence: Synthetic oligonucleotide
  Antisense strand to SEQ ID NO: 1785015
uacuaccuuucacaagcau

SEQ ID NO: 1785017 - RNA, 19 nt, Artificial Sequence
  Description of Artificial Sequence: Synthetic oligonucleotide
  Sense strand starting at position 3920 of SEQ ID NO: 1562953
gcuugugaaagguaguauc

SEQ ID NO: 1785018 - RNA, 19 nt, Artificial Sequence
  Description of Artificial Sequence: Synthetic oligonucleotide
  Antisense strand to SEQ ID NO: 1785017
gauacuaccuuucacaagc

SEQ ID NO: 1785019 - RNA, 19 nt, Artificial Sequence
  Description of Artificial Sequence: Synthetic oligonucleotide
  Sense strand starting at position 3931 of SEQ ID NO: 1562953
guaguaucccagcugugca

SEQ ID NO: 1785020 - RNA, 19 nt, Artificial Sequence
  Description of Artificial Sequence: Synthetic oligonucleotide
  Antisense strand to SEQ ID NO: 1785019
ugcacagcugggauacuac

SEQ ID NO: 1785021 - RNA, 19 nt, Artificial Sequence
  Description of Artificial Sequence: Synthetic oligonucleotide
  Sense strand starting at position 3967 of SEQ ID NO: 1562953
gguaauagguguucccuua

SEQ ID NO: 1785022 - RNA, 19 nt, Artificial Sequence
  Description of Artificial Sequence: Synthetic oligonucleotide
  Antisense strand to SEQ ID NO: 1785021
uaagggaacaccuauuacc

SEQ ID NO: 1785023 - RNA, 19 nt, Artificial Sequence
  Description of Artificial Sequence: Synthetic oligonucleotide
  Sense strand starting at position 3974 of SEQ ID NO: 1562953
gguguucccuuauuucuau

SEQ ID NO: 1785024 - RNA, 19 nt, Artificial Sequence
  Description of Artificial Sequence: Synthetic oligonucleotide
  Antisense strand to SEQ ID NO: 1785023
auagaaauaagggaacacc

SEQ ID NO: 1785025 - RNA, 19 nt, Artificial Sequence
  Description of Artificial Sequence: Synthetic oligonucleotide
  Sense strand starting at position 198 of SEQ ID NO: 1562954
ugaagaauguucuuagguc

SEQ ID NO: 1785026 - RNA, 19 nt, Artificial Sequence
  Description of Artificial Sequence: Synthetic oligonucleotide
  Antisense strand to SEQ ID NO: 1785025
gaccuaagaacauucuuca

SEQ ID NO: 1785027 - RNA, 19 nt, Artificial Sequence
  Description of Artificial Sequence: Synthetic oligonucleotide
  Sense strand starting at position 590 of SEQ ID NO: 1562954
ugacuacuuccuggaugaa

SEQ ID NO: 1785028 - RNA, 19 nt, Artificial Sequence
  Description of Artificial Sequence: Synthetic oligonucleotide
  Antisense strand to SEQ ID NO: 1785027
uucauccaggaaguaguca

SEQ ID NO: 1785029 - RNA, 19 nt, Artificial Sequence
  Description of Artificial Sequence: Synthetic oligonucleotide
  Sense strand starting at position 683 of SEQ ID NO: 1562954
cuguuucuuuagccuugaa

SEQ ID NO: 1785030 - RNA, 19 nt, Artificial Sequence
  Description of Artificial Sequence: Synthetic oligonucleotide
  Antisense strand to SEQ ID NO: 1785029
uucaaggcuaaagaaacag

SEQ ID NO: 1785031 - RNA, 19 nt, Artificial Sequence
  Description of Artificial Sequence: Synthetic oligonucleotide
  Sense strand starting at position 795 of SEQ ID NO: 1562954
acuguugcaucgucaaauu

SEQ ID NO: 1785032 - RNA, 19 nt, Artificial Sequence
  Description of Artificial Sequence: Synthetic oligonucleotide
  Antisense strand to SEQ ID NO: 1785031
aauuugacgaugcaacagu

SEQ ID NO: 1785033 - RNA, 19 nt, Artificial Sequence
  Description of Artificial Sequence: Synthetic oligonucleotide
  Sense strand starting at position 928 of SEQ ID NO: 1562954
ggcucaggaugcuugugaa

SEQ ID NO: 1785034 - RNA, 19 nt, Artificial Sequence
  Description of Artificial Sequence: Synthetic oligonucleotide
  Antisense strand to SEQ ID NO: 1785033
uucacaagcauccugagcc

SEQ ID NO: 1785035 - RNA, 19 nt, Artificial Sequence
  Description of Artificial Sequence: Synthetic oligonucleotide
  Sense strand starting at position 934 of SEQ ID NO: 1562954
ggaugcuugugaaagguag

SEQ ID NO: 1785036 - RNA, 19 nt, Artificial Sequence
  Description of Artificial Sequence: Synthetic oligonucleotide
  Antisense strand to SEQ ID NO: 1785035
cuaccuuucacaagcaucc

SEQ ID NO: 1785037 - RNA, 19 nt, Artificial Sequence
  Description of Artificial Sequence: Synthetic oligonucleotide
  Sense strand starting at position 936 of SEQ ID NO: 1562954
augcuugugaaagguagua

SEQ ID NO: 1785038 - RNA, 19 nt, Artificial Sequence
  Description of Artificial Sequence: Synthetic oligonucleotide
  Antisense strand to SEQ ID NO: 1785037
uacuaccuuucacaagcau

SEQ ID NO: 1785039 - RNA, 19 nt, Artificial Sequence
  Description of Artificial Sequence: Synthetic oligonucleotide
  Sense strand starting at position 938 of SEQ ID NO: 1562954
gcuugugaaagguaguauc

SEQ ID NO: 1785040 - RNA, 19 nt, Artificial Sequence
  Description of Artificial Sequence: Synthetic oligonucleotide
  Antisense strand to SEQ ID NO: 1785039
gauacuaccuuucacaagc

SEQ ID NO: 1785041 - RNA, 19 nt, Artificial Sequence
  Description of Artificial Sequence: Synthetic oligonucleotide
  Sense strand starting at position 949 of SEQ ID NO: 1562954
guaguaucccagcugugca

SEQ ID NO: 1785042 - RNA, 19 nt, Artificial Sequence
  Description of Artificial Sequence: Synthetic oligonucleotide
  Antisense strand to SEQ ID NO: 1785041
ugcacagcugggauacuac

SEQ ID NO: 1785043 - RNA, 19 nt, Artificial Sequence
  Description of Artificial Sequence: Synthetic oligonucleotide
  Sense strand starting at position 985 of SEQ ID NO: 1562954
gguaauagguguucccuua

SEQ ID NO: 1785044 - RNA, 19 nt, Artificial Sequence
  Description of Artificial Sequence: Synthetic oligonucleotide
  Antisense strand to SEQ ID NO: 1785043
uaagggaacaccuauuacc

SEQ ID NO: 1785045 - RNA, 19 nt, Artificial Sequence
  Description of Artificial Sequence: Synthetic oligonucleotide
  Sense strand starting at position 992 of SEQ ID NO: 1562954
gguguucccuuauuucuau

SEQ ID NO: 1785046 - RNA, 19 nt, Artificial Sequence
  Description of Artificial Sequence: Synthetic oligonucleotide
  Antisense strand to SEQ ID NO: 1785045
auagaaauaagggaacacc

SEQ ID NO: 1785047 - RNA, 19 nt, Artificial Sequence
  Description of Artificial Sequence: Synthetic oligonucleotide
  Sense strand starting at position 1252 of SEQ ID NO: 1562954
ccucaauauugaugggauu

SEQ ID NO: 1785048 - RNA, 19 nt, Artificial Sequence
  Description of Artificial Sequence: Synthetic oligonucleotide
  Antisense strand to SEQ ID NO: 1785047
aaucccaucaauauugagg

SEQ ID NO: 1785049 - RNA, 19 nt, Artificial Sequence
  Description of Artificial Sequence: Synthetic oligonucleotide
  Sense strand starting at position 1384 of SEQ ID NO: 1562954
augcaucauuuauggaaac

SEQ ID NO: 1785050 - RNA, 19 nt, Artificial Sequence
  Description of Artificial Sequence: Synthetic oligonucleotide
  Antisense strand to SEQ ID NO: 1785049
guuuccauaaaugaugcau

SEQ ID NO: 1785051 - RNA, 19 nt, Artificial Sequence
  Description of Artificial Sequence: Synthetic oligonucleotide
  Sense strand starting at position 1385 of SEQ ID NO: 1562954
ugcaucauuuauggaaaca

SEQ ID NO: 1785052 - RNA, 19 nt, Artificial Sequence
  Description of Artificial Sequence: Synthetic oligonucleotide
  Antisense strand to SEQ ID NO: 1785051
uguuuccauaaaugaugca

SEQ ID NO: 1785053 - RNA, 19 nt, Artificial Sequence
  Description of Artificial Sequence: Synthetic oligonucleotide
  Sense strand starting at position 1396 of SEQ ID NO: 1562954
uggaaacacuucuuuauug

SEQ ID NO: 1785054 - RNA, 19 nt, Artificial Sequence
  Description of Artificial Sequence: Synthetic oligonucleotide
  Antisense strand to SEQ ID NO: 1785053
caauaaagaaguguuucca

SEQ ID NO: 1785055 - RNA, 19 nt, Artificial Sequence
  Description of Artificial Sequence: Synthetic oligonucleotide
  Sense strand starting at position 1601 of SEQ ID NO: 1562954
cugauuggaugagaagaaa

SEQ ID NO: 1785056 - RNA, 19 nt, Artificial Sequence
  Description of Artificial Sequence: Synthetic oligonucleotide
  Antisense strand to SEQ ID NO: 1785055
uuucuucucauccaaucag

SEQ ID NO: 1785057 - RNA, 19 nt, Artificial Sequence
  Description of Artificial Sequence: Synthetic oligonucleotide
  Sense strand starting at position 1861 of SEQ ID NO: 1562954
uuaguacuggcuuagagga

SEQ ID NO: 1785058 - RNA, 19 nt, Artificial Sequence
  Description of Artificial Sequence: Synthetic oligonucleotide
  Antisense strand to SEQ ID NO: 1785057
uccucuaagccaguacuaa

SEQ ID NO: 1785059 - RNA, 19 nt, Artificial Sequence
  Description of Artificial Sequence: Synthetic oligonucleotide
  Sense strand starting at position 1890 of SEQ ID NO: 1562954
gagucacuuccugagcaca

SEQ ID NO: 1785060 - RNA, 19 nt, Artificial Sequence
  Description of Artificial Sequence: Synthetic oligonucleotide
  Antisense strand to SEQ ID NO: 1785059
ugugcucaggaagugacuc

SEQ ID NO: 1785061 - RNA, 19 nt, Artificial Sequence
  Description of Artificial Sequence: Synthetic oligonucleotide
  Sense strand starting at position 2114 of SEQ ID NO: 1562954
ggcccuauccagggcguua

SEQ ID NO: 1785062 - RNA, 19 nt, Artificial Sequence
  Description of Artificial Sequence: Synthetic oligonucleotide
  Antisense strand to SEQ ID NO: 1785061
uaacgcccuggauagggcc

SEQ ID NO: 1785063 - RNA, 19 nt, Artificial Sequence
  Description of Artificial Sequence: Synthetic oligonucleotide
  Sense strand starting at position 2336 of SEQ ID NO: 1562954
ggaagaacuaucggguguu

SEQ ID NO: 1785064 - RNA, 19 nt, Artificial Sequence
  Description of Artificial Sequence: Synthetic oligonucleotide
  Antisense strand to SEQ ID NO: 1785063
aacacccgauaguucuucc

SEQ ID NO: 1785065 - RNA, 19 nt, Artificial Sequence
  Description of Artificial Sequence: Synthetic oligonucleotide
  Sense strand starting at position 2339 of SEQ ID NO: 1562954
agaacuaucggguguugca

SEQ ID NO: 1785066 - RNA, 19 nt, Artificial Sequence
  Description of Artificial Sequence: Synthetic oligonucleotide
  Antisense strand to SEQ ID NO: 1785065
ugcaacacccgauaguucu

SEQ ID NO: 1785067 - RNA, 19 nt, Artificial Sequence
  Description of Artificial Sequence: Synthetic oligonucleotide
  Sense strand starting at position 2411 of SEQ ID NO: 1562954
gugggcgggacguguuaua

SEQ ID NO: 1785068 - RNA, 19 nt, Artificial Sequence
  Description of Artificial Sequence: Synthetic oligonucleotide
  Antisense strand to SEQ ID NO: 1785067
uauaacacgucccgcccac

SEQ ID NO: 1785069 - RNA, 19 nt, Artificial Sequence
  Description of Artificial Sequence: Synthetic oligonucleotide
  Sense strand starting at position 2420 of SEQ ID NO: 1562954
acguguuauauccagggca

SEQ ID NO: 1785070 - RNA, 19 nt, Artificial Sequence
  Description of Artificial Sequence: Synthetic oligonucleotide
  Antisense strand to SEQ ID NO: 1785069
ugcccuggauauaacacgu

SEQ ID NO: 1785071 - RNA, 19 nt, Artificial Sequence
  Description of Artificial Sequence: Synthetic oligonucleotide
  Sense strand starting at position 2422 of SEQ ID NO: 1562954
guguuauauccagggcauc

SEQ ID NO: 1785072 - RNA, 19 nt, Artificial Sequence
  Description of Artificial Sequence: Synthetic oligonucleotide
  Antisense strand to SEQ ID NO: 1785071
gaugcccuggauauaacac

SEQ ID NO: 1785073 - RNA, 19 nt, Artificial Sequence
  Description of Artificial Sequence: Synthetic oligonucleotide
  Sense strand starting at position 2423 of SEQ ID NO: 1562954
uguuauauccagggcauca

SEQ ID NO: 1785074 - RNA, 19 nt, Artificial Sequence
  Description of Artificial Sequence: Synthetic oligonucleotide
  Antisense strand to SEQ ID NO: 1785073
ugaugcccuggauauaaca

SEQ ID NO: 1785075 - RNA, 19 nt, Artificial Sequence
  Description of Artificial Sequence: Synthetic oligonucleotide
  Sense strand starting at position 2436 of SEQ ID NO: 1562954
gcaucauugccugcgucua

SEQ ID NO: 1785076 - RNA, 19 nt, Artificial Sequence
  Description of Artificial Sequence: Synthetic oligonucleotide
  Antisense strand to SEQ ID NO: 1785075
uagacgcaggcaaugaugc

SEQ ID NO: 1785077 - RNA, 19 nt, Artificial Sequence
  Description of Artificial Sequence: Synthetic oligonucleotide
  Sense strand starting at position 2547 of SEQ ID NO: 1562954
acggguuaggcucauuaca

SEQ ID NO: 1785078 - RNA, 19 nt, Artificial Sequence
  Description of Artificial Sequence: Synthetic oligonucleotide
  Antisense strand to SEQ ID NO: 1785077
uguaaugagccuaacccgu

SEQ ID NO: 1785079 - RNA, 19 nt, Artificial Sequence
  Description of Artificial Sequence: Synthetic oligonucleotide
  Sense strand starting at position 2555 of SEQ ID NO: 1562954
ggcucauuacagggugcua

SEQ ID NO: 1785080 - RNA, 19 nt, Artificial Sequence
  Description of Artificial Sequence: Synthetic oligonucleotide
  Antisense strand to SEQ ID NO: 1785079
uagcacccuguaaugagcc

SEQ ID NO: 1785081 - RNA, 19 nt, Artificial Sequence
  Description of Artificial Sequence: Synthetic oligonucleotide
  Sense strand starting at position 2641 of SEQ ID NO: 1562954
aggauuuauugggagugcu

SEQ ID NO: 1785082 - RNA, 19 nt, Artificial Sequence
  Description of Artificial Sequence: Synthetic oligonucleotide
  Antisense strand to SEQ ID NO: 1785081
agcacucccaauaaauccu

SEQ ID NO: 1785083 - RNA, 19 nt, Artificial Sequence
  Description of Artificial Sequence: Synthetic oligonucleotide
  Sense strand starting at position 2707 of SEQ ID NO: 1562954
ggcgcuauugagggacgua

SEQ ID NO: 1785084 - RNA, 19 nt, Artificial Sequence
  Description of Artificial Sequence: Synthetic oligonucleotide
  Antisense strand to SEQ ID NO: 1785083
uacgucccucaauagcgcc

SEQ ID NO: 1785085 - RNA, 19 nt, Artificial Sequence
  Description of Artificial Sequence: Synthetic oligonucleotide
  Sense strand starting at position 2708 of SEQ ID NO: 1562954
gcgcuauugagggacguau

SEQ ID NO: 1785086 - RNA, 19 nt, Artificial Sequence
  Description of Artificial Sequence: Synthetic oligonucleotide
  Antisense strand to SEQ ID NO: 1785085
auacgucccucaauagcgc

SEQ ID NO: 1785087 - RNA, 19 nt, Artificial Sequence
  Description of Artificial Sequence: Synthetic oligonucleotide
  Sense strand starting at position 2757 of SEQ ID NO: 1562954
ggugcuaucagaggucugu

SEQ ID NO: 1785088 - RNA, 19 nt, Artificial Sequence
  Description of Artificial Sequence: Synthetic oligonucleotide
  Antisense strand to SEQ ID NO: 1785087
acagaccucugauagcacc

SEQ ID NO: 1785089 - RNA, 19 nt, Artificial Sequence
  Description of Artificial Sequence: Synthetic oligonucleotide
  Sense strand starting at position 3007 of SEQ ID NO: 1562954
gggcgguuugggugccaua

SEQ ID NO: 1785090 - RNA, 19 nt, Artificial Sequence
  Description of Artificial Sequence: Synthetic oligonucleotide
  Antisense strand to SEQ ID NO: 1785089
uauggcacccaaaccgccc

SEQ ID NO: 1785091 - RNA, 19 nt, Artificial Sequence
  Description of Artificial Sequence: Synthetic oligonucleotide
  Sense strand starting at position 3008 of SEQ ID NO: 1562954
ggcgguuugggugccauau

SEQ ID NO: 1785092 - RNA, 19 nt, Artificial Sequence
  Description of Artificial Sequence: Synthetic oligonucleotide
  Antisense strand to SEQ ID NO: 1785091
auauggcacccaaaccgcc

SEQ ID NO: 1785093 - RNA, 19 nt, Artificial Sequence
  Description of Artificial Sequence: Synthetic oligonucleotide
  Sense strand starting at position 3018 of SEQ ID NO: 1562954
gugccauaucagggcauua

SEQ ID NO: 1785094 - RNA, 19 nt, Artificial Sequence
  Description of Artificial Sequence: Synthetic oligonucleotide
  Antisense strand to SEQ ID NO: 1785093
uaaugcccugauauggcac

SEQ ID NO: 1785095 - RNA, 19 nt, Artificial Sequence
  Description of Artificial Sequence: Synthetic oligonucleotide
  Sense strand starting at position 3020 of SEQ ID NO: 1562954
gccauaucagggcauuacu

SEQ ID NO: 1785096 - RNA, 19 nt, Artificial Sequence
  Description of Artificial Sequence: Synthetic oligonucleotide
  Antisense strand to SEQ ID NO: 1785095
aguaaugcccugauauggc

SEQ ID NO: 1785097 - RNA, 19 nt, Artificial Sequence
  Description of Artificial Sequence: Synthetic oligonucleotide
  Sense strand starting at position 3063 of SEQ ID NO: 1562954
ggcacuauucguggcuaca

SEQ ID NO: 1785098 - RNA, 19 nt, Artificial Sequence
  Description of Artificial Sequence: Synthetic oligonucleotide
  Antisense strand to SEQ ID NO: 1785097
uguagccacgaauagugcc

SEQ ID NO: 1785099 - RNA, 19 nt, Artificial Sequence
  Description of Artificial Sequence: Synthetic oligonucleotide
  Sense strand starting at position 3487 of SEQ ID NO: 1562954
cuauguguugcggaaacug

SEQ ID NO: 1785100 - RNA, 19 nt, Artificial Sequence
  Description of Artificial Sequence: Synthetic oligonucleotide
  Antisense strand to SEQ ID NO: 1785099
caguuuccgcaacacauag

SEQ ID NO: 1785101 - RNA, 19 nt, Artificial Sequence
  Description of Artificial Sequence: Synthetic oligonucleotide
  Sense strand starting at position 3666 of SEQ ID NO: 1562954
cgguucuaguagaguagga

SEQ ID NO: 1785102 - RNA, 19 nt, Artificial Sequence
  Description of Artificial Sequence: Synthetic oligonucleotide
  Antisense strand to SEQ ID NO: 1785101
uccuacucuacuagaaccg

SEQ ID NO: 1785103 - RNA, 19 nt, Artificial Sequence
  Description of Artificial Sequence: Synthetic oligonucleotide
  Sense strand starting at position 3777 of SEQ ID NO: 1562954
gcgugagugccuucgcuga

SEQ ID NO: 1785104 - RNA, 19 nt, Artificial Sequence
  Description of Artificial Sequence: Synthetic oligonucleotide
  Antisense strand to SEQ ID NO: 1785103
ucagcgaaggcacucacgc

SEQ ID NO: 1785105 - RNA, 19 nt, Artificial Sequence
  Description of Artificial Sequence: Synthetic oligonucleotide
  Sense strand starting at position 250 of SEQ ID NO: 1562955
cagaaaugaccggguggaa

SEQ ID NO: 1785106 - RNA, 19 nt, Artificial Sequence
  Description of Artificial Sequence: Synthetic oligonucleotide
  Antisense strand to SEQ ID NO: 1785105
uuccacccggucauuucug

SEQ ID NO: 1785107 - RNA, 19 nt, Artificial Sequence
  Description of Artificial Sequence: Synthetic oligonucleotide
  Sense strand starting at position 262 of SEQ ID NO: 1562955
gguggaauuuaagggaauu

SEQ ID NO: 1785108 - RNA, 19 nt, Artificial Sequence
  Description of Artificial Sequence: Synthetic oligonucleotide
  Antisense strand to SEQ ID NO: 1785107
aauucccuuaaauuccacc

SEQ ID NO: 1785109 - RNA, 19 nt, Artificial Sequence
  Description of Artificial Sequence: Synthetic oligonucleotide
  Sense strand starting at position 304 of SEQ ID NO: 1562955
gaaagucuugcagacugca

SEQ ID NO: 1785110 - RNA, 19 nt, Artificial Sequence
  Description of Artificial Sequence: Synthetic oligonucleotide
  Antisense strand to SEQ ID NO: 1785109
ugcagucugcaagacuuuc

SEQ ID NO: 1785111 - RNA, 19 nt, Artificial Sequence
  Description of Artificial Sequence: Synthetic oligonucleotide
  Sense strand starting at position 536 of SEQ ID NO: 1562955
ggaguagacagcugaguca

SEQ ID NO: 1785112 - RNA, 19 nt, Artificial Sequence
  Description of Artificial Sequence: Synthetic oligonucleotide
  Antisense strand to SEQ ID NO: 1785111
ugacucagcugucuacucc

SEQ ID NO: 1785113 - RNA, 19 nt, Artificial Sequence
  Description of Artificial Sequence: Synthetic oligonucleotide
  Sense strand starting at position 1989 of SEQ ID NO: 1562955
ggagauggguuuaguuaga

SEQ ID NO: 1785114 - RNA, 19 nt, Artificial Sequence
  Description of Artificial Sequence: Synthetic oligonucleotide
  Antisense strand to SEQ ID NO: 1785113
ucuaacuaaacccaucucc

SEQ ID NO: 1785115 - RNA, 19 nt, Artificial Sequence
  Description of Artificial Sequence: Synthetic oligonucleotide
  Sense strand starting at position 2060 of SEQ ID NO: 1562955
guuagcauccugcagaucu

SEQ ID NO: 1785116 - RNA, 19 nt, Artificial Sequence
  Description of Artificial Sequence: Synthetic oligonucleotide
  Antisense strand to SEQ ID NO: 1785115
agaucugcaggaugcuaac

SEQ ID NO: 1785117 - RNA, 19 nt, Artificial Sequence
  Description of Artificial Sequence: Synthetic oligonucleotide
  Sense strand starting at position 2109 of SEQ ID NO: 1562955
augggagucagugguaaca

SEQ ID NO: 1785118 - RNA, 19 nt, Artificial Sequence
  Description of Artificial Sequence: Synthetic oligonucleotide
  Antisense strand to SEQ ID NO: 1785117
uguuaccacugacucccau

SEQ ID NO: 1785119 - RNA, 19 nt, Artificial Sequence
  Description of Artificial Sequence: Synthetic oligonucleotide
  Sense strand starting at position 2186 of SEQ ID NO: 1562955
gggacuugugcauauggag

SEQ ID NO: 1785120 - RNA, 19 nt, Artificial Sequence
  Description of Artificial Sequence: Synthetic oligonucleotide
  Antisense strand to SEQ ID NO: 1785119
cuccauaugcacaaguccc

SEQ ID NO: 1785121 - RNA, 19 nt, Artificial Sequence
  Description of Artificial Sequence: Synthetic oligonucleotide
  Sense strand starting at position 2208 of SEQ ID NO: 1562955
cugggugcccauggugaaa

SEQ ID NO: 1785122 - RNA, 19 nt, Artificial Sequence
  Description of Artificial Sequence: Synthetic oligonucleotide
  Antisense strand to SEQ ID NO: 1785121
uuucaccaugggcacccag

SEQ ID NO: 1785123 - RNA, 19 nt, Artificial Sequence
  Description of Artificial Sequence: Synthetic oligonucleotide
  Sense strand starting at position 2254 of SEQ ID NO: 1562955
gcaugugaggauggagaau

SEQ ID NO: 1785124 - RNA, 19 nt, Artificial Sequence
  Description of Artificial Sequence: Synthetic oligonucleotide
  Antisense strand to SEQ ID NO: 1785123
auucuccauccucacaugc

SEQ ID NO: 1785125 - RNA, 19 nt, Artificial Sequence
  Description of Artificial Sequence: Synthetic oligonucleotide
  Sense strand starting at position 2361 of SEQ ID NO: 1562955
gagcaucaucccugcaagu

SEQ ID NO: 1785126 - RNA, 19 nt, Artificial Sequence
  Description of Artificial Sequence: Synthetic oligonucleotide
  Antisense strand to SEQ ID NO: 1785125
acuugcagggaugaugcuc

SEQ ID NO: 1785127 - RNA, 19 nt, Artificial Sequence
  Description of Artificial Sequence: Synthetic oligonucleotide
  Sense strand starting at position 2629 of SEQ ID NO: 1562955
agguauugaacccgugaaa

SEQ ID NO: 1785128 - RNA, 19 nt, Artificial Sequence
  Description of Artificial Sequence: Synthetic oligonucleotide
  Antisense strand to SEQ ID NO: 1785127
uuucacggguucaauaccu

SEQ ID NO: 1785129 - RNA, 19 nt, Artificial Sequence
  Description of Artificial Sequence: Synthetic oligonucleotide
  Sense strand starting at position 2632 of SEQ ID NO: 1562955
uauugaacccgugaaaggu

SEQ ID NO: 1785130 - RNA, 19 nt, Artificial Sequence
  Description of Artificial Sequence: Synthetic oligonucleotide
  Antisense strand to SEQ ID NO: 1785129
accuuucacggguucaaua

SEQ ID NO: 1785131 - RNA, 19 nt, Artificial Sequence
  Description of Artificial Sequence: Synthetic oligonucleotide
  Sense strand starting at position 2642 of SEQ ID NO: 1562955
gugaaagguuacgcaaaug

SEQ ID NO: 1785132 - RNA, 19 nt, Artificial Sequence
  Description of Artificial Sequence: Synthetic oligonucleotide
  Antisense strand to SEQ ID NO: 1785131
cauuugcguaaccuuucac

SEQ ID NO: 1785133 - RNA, 19 nt, Artificial Sequence
  Description of Artificial Sequence: Synthetic oligonucleotide
  Sense strand starting at position 2651 of SEQ ID NO: 1562955
uacgcaaauguauguuuga

SEQ ID NO: 1785134 - RNA, 19 nt, Artificial Sequence
  Description of Artificial Sequence: Synthetic oligonucleotide
  Antisense strand to SEQ ID NO: 1785133
ucaaacauacauuugcgua

SEQ ID NO: 1785135 - RNA, 19 nt, Artificial Sequence
  Description of Artificial Sequence: Synthetic oligonucleotide
  Sense strand starting at position 2652 of SEQ ID NO: 1562955
acgcaaauguauguuugaa

SEQ ID NO: 1785136 - RNA, 19 nt, Artificial Sequence
  Description of Artificial Sequence: Synthetic oligonucleotide
  Antisense strand to SEQ ID NO: 1785135
uucaaacauacauuugcgu

SEQ ID NO: 1785137 - RNA, 19 nt, Artificial Sequence
  Description of Artificial Sequence: Synthetic oligonucleotide
  Sense strand starting at position 2654 of SEQ ID NO: 1562955
gcaaauguauguuugaaag

SEQ ID NO: 1785138 - RNA, 19 nt, Artificial Sequence
  Description of Artificial Sequence: Synthetic oligonucleotide
  Antisense strand to SEQ ID NO: 1785137
cuuucaaacauacauuugc

SEQ ID NO: 1785139 - RNA, 19 nt, Artificial Sequence
  Description of Artificial Sequence: Synthetic oligonucleotide
  Sense strand starting at position 2749 of SEQ ID NO: 1562955
ggaggcugcguucagagaa

SEQ ID NO: 1785140 - RNA, 19 nt, Artificial Sequence
  Description of Artificial Sequence: Synthetic oligonucleotide
  Antisense strand to SEQ ID NO: 1785139
uucucugaacgcagccucc

SEQ ID NO: 1785141 - RNA, 19 nt, Artificial Sequence
  Description of Artificial Sequence: Synthetic oligonucleotide
  Sense strand starting at position 2829 of SEQ ID NO: 1562955
acuagcuagagcuguugaa

SEQ ID NO: 1785142 - RNA, 19 nt, Artificial Sequence
  Description of Artificial Sequence: Synthetic oligonucleotide
  Antisense strand to SEQ ID NO: 1785141
uucaacagcucuagcuagu

SEQ ID NO: 1785143 - RNA, 19 nt, Artificial Sequence
  Description of Artificial Sequence: Synthetic oligonucleotide
  Sense strand starting at position 2833 of SEQ ID NO: 1562955
gcuagagcuguugaaaguu

SEQ ID NO: 1785144 - RNA, 19 nt, Artificial Sequence
  Description of Artificial Sequence: Synthetic oligonucleotide
  Antisense strand to SEQ ID NO: 1785143
aacuuucaacagcucuagc

SEQ ID NO: 1785145 - RNA, 19 nt, Artificial Sequence
  Description of Artificial Sequence: Synthetic oligonucleotide
  Sense strand starting at position 2839 of SEQ ID NO: 1562955
gcuguugaaaguugauauc

SEQ ID NO: 1785146 - RNA, 19 nt, Artificial Sequence
  Description of Artificial Sequence: Synthetic oligonucleotide
  Antisense strand to SEQ ID NO: 1785145
gauaucaacuuucaacagc

SEQ ID NO: 1785147 - RNA, 19 nt, Artificial Sequence
  Description of Artificial Sequence: Synthetic oligonucleotide
  Sense strand starting at position 2845 of SEQ ID NO: 1562955
gaaaguugauaucugcaua

SEQ ID NO: 1785148 - RNA, 19 nt, Artificial Sequence
  Description of Artificial Sequence: Synthetic oligonucleotide
  Antisense strand to SEQ ID NO: 1785147
uaugcagauaucaacuuuc

SEQ ID NO: 1785149 - RNA, 19 nt, Artificial Sequence
  Description of Artificial Sequence: Synthetic oligonucleotide
  Sense strand starting at position 3024 of SEQ ID NO: 1562955
gguaauucaggugaaguga

SEQ ID NO: 1785150 - RNA, 19 nt, Artificial Sequence
  Description of Artificial Sequence: Synthetic oligonucleotide
  Antisense strand to SEQ ID NO: 1785149
ucacuucaccugaauuacc

SEQ ID NO: 1785151 - RNA, 19 nt, Artificial Sequence
  Description of Artificial Sequence: Synthetic oligonucleotide
  Sense strand starting at position 3127 of SEQ ID NO: 1562955
cccugugcugacugagaua

SEQ ID NO: 1785152 - RNA, 19 nt, Artificial Sequence
  Description of Artificial Sequence: Synthetic oligonucleotide
  Antisense strand to SEQ ID NO: 1785151
uaucucagucagcacaggg

SEQ ID NO: 1785153 - RNA, 19 nt, Artificial Sequence
  Description of Artificial Sequence: Synthetic oligonucleotide
  Sense strand starting at position 3227 of SEQ ID NO: 1562955
ccagaauugugaggaacca

SEQ ID NO: 1785154 - RNA, 19 nt, Artificial Sequence
  Description of Artificial Sequence: Synthetic oligonucleotide
  Antisense strand to SEQ ID NO: 1785153
ugguuccucacaauucugg

SEQ ID NO: 1785155 - RNA, 19 nt, Artificial Sequence
  Description of Artificial Sequence: Synthetic oligonucleotide
  Sense strand starting at position 3240 of SEQ ID NO: 1562955
gaaccagauuucugugguu

SEQ ID NO: 1785156 - RNA, 19 nt, Artificial Sequence
  Description of Artificial Sequence: Synthetic oligonucleotide
  Antisense strand to SEQ ID NO: 1785155
aaccacagaaaucugguuc

SEQ ID NO: 1785157 - RNA, 19 nt, Artificial Sequence
  Description of Artificial Sequence: Synthetic oligonucleotide
  Sense strand starting at position 3243 of SEQ ID NO: 1562955
ccagauuucugugguuaag

SEQ ID NO: 1785158 - RNA, 19 nt, Artificial Sequence
  Description of Artificial Sequence: Synthetic oligonucleotide
  Antisense strand to SEQ ID NO: 1785157
cuuaaccacagaaaucugg

SEQ ID NO: 1785159 - RNA, 19 nt, Artificial Sequence
  Description of Artificial Sequence: Synthetic oligonucleotide
  Sense strand starting at position 3315 of SEQ ID NO: 1562955
uuaggacacgcauaggauu

SEQ ID NO: 1785160 - RNA, 19 nt, Artificial Sequence
  Description of Artificial Sequence: Synthetic oligonucleotide
  Antisense strand to SEQ ID NO: 1785159
aauccuaugcguguccuaa

SEQ ID NO: 1785161 - RNA, 19 nt, Artificial Sequence
  Description of Artificial Sequence: Synthetic oligonucleotide
  Sense strand starting at position 3326 of SEQ ID NO: 1562955
auaggauuaugcuccuugu

SEQ ID NO: 1785162 - RNA, 19 nt, Artificial Sequence
  Description of Artificial Sequence: Synthetic oligonucleotide
  Antisense strand to SEQ ID NO: 1785161
acaaggagcauaauccuau

SEQ ID NO: 1785163 - RNA, 19 nt, Artificial Sequence
  Description of Artificial Sequence: Synthetic oligonucleotide
  Sense strand starting at position 3329 of SEQ ID NO: 1562955
ggauuaugcuccuuguaga

SEQ ID NO: 1785164 - RNA, 19 nt, Artificial Sequence
  Description of Artificial Sequence: Synthetic oligonucleotide
  Antisense strand to SEQ ID NO: 1785163
ucuacaaggagcauaaucc

SEQ ID NO: 1785165 - RNA, 19 nt, Artificial Sequence
  Description of Artificial Sequence: Synthetic oligonucleotide
  Sense strand starting at position 3330 of SEQ ID NO: 1562955
gauuaugcuccuuguagaa

SEQ ID NO: 1785166 - RNA, 19 nt, Artificial Sequence
  Description of Artificial Sequence: Synthetic oligonucleotide
  Antisense strand to SEQ ID NO: 1785165
uucuacaaggagcauaauc

SEQ ID NO: 1785167 - RNA, 19 nt, Artificial Sequence
  Description of Artificial Sequence: Synthetic oligonucleotide
  Sense strand starting at position 3344 of SEQ ID NO: 1562955
uagaaaggcugccucgaaa

SEQ ID NO: 1785168 - RNA, 19 nt, Artificial Sequence
  Description of Artificial Sequence: Synthetic oligonucleotide
  Antisense strand to SEQ ID NO: 1785167
uuucgaggcagccuuucua

SEQ ID NO: 1785169 - RNA, 19 nt, Artificial Sequence
  Description of Artificial Sequence: Synthetic oligonucleotide
  Sense strand starting at position 3490 of SEQ ID NO: 1562955
aguucugugagaugacacu

SEQ ID NO: 1785170 - RNA, 19 nt, Artificial Sequence
  Description of Artificial Sequence: Synthetic oligonucleotide
  Antisense strand to SEQ ID NO: 1785169
agugucaucucacagaacu

SEQ ID NO: 1785171 - RNA, 19 nt, Artificial Sequence
  Description of Artificial Sequence: Synthetic oligonucleotide
  Sense strand starting at position 3681 of SEQ ID NO: 1562955
aaaugauaacagugugagu

SEQ ID NO: 1785172 - RNA, 19 nt, Artificial Sequence
  Description of Artificial Sequence: Synthetic oligonucleotide
  Antisense strand to SEQ ID NO: 1785171
acucacacuguuaucauuu

SEQ ID NO: 1785173 - RNA, 19 nt, Artificial Sequence
  Description of Artificial Sequence: Synthetic oligonucleotide
  Sense strand starting at position 3683 of SEQ ID NO: 1562955
augauaacagugugaguau

SEQ ID NO: 1785174 - RNA, 19 nt, Artificial Sequence
  Description of Artificial Sequence: Synthetic oligonucleotide
  Antisense strand to SEQ ID NO: 1785173
auacucacacuguuaucau

SEQ ID NO: 1785175 - RNA, 19 nt, Artificial Sequence
  Description of Artificial Sequence: Synthetic oligonucleotide
  Sense strand starting at position 3747 of SEQ ID NO: 1562955
cgagauacuccuggcauag

SEQ ID NO: 1785176 - RNA, 19 nt, Artificial Sequence
  Description of Artificial Sequence: Synthetic oligonucleotide
  Antisense strand to SEQ ID NO: 1785175
cuaugccaggaguaucucg

SEQ ID NO: 1785177 - RNA, 19 nt, Artificial Sequence
  Description of Artificial Sequence: Synthetic oligonucleotide
  Sense strand starting at position 3818 of SEQ ID NO: 1562955
ggacuuugccuguaaccaa

SEQ ID NO: 1785178 - RNA, 19 nt, Artificial Sequence
  Description of Artificial Sequence: Synthetic oligonucleotide
  Antisense strand to SEQ ID NO: 1785177
uugguuacaggcaaagucc

SEQ ID NO: 1785179 - RNA, 19 nt, Artificial Sequence
  Description of Artificial Sequence: Synthetic oligonucleotide
  Sense strand starting at position 3858 of SEQ ID NO: 1562955
cagccagauuccuuuggga

SEQ ID NO: 1785180 - RNA, 19 nt, Artificial Sequence
  Description of Artificial Sequence: Synthetic oligonucleotide
  Antisense strand to SEQ ID NO: 1785179
ucccaaaggaaucuggcug

SEQ ID NO: 1785181 - RNA, 19 nt, Artificial Sequence
  Description of Artificial Sequence: Synthetic oligonucleotide
  Sense strand starting at position 3860 of SEQ ID NO: 1562955
gccagauuccuuugggaga

SEQ ID NO: 1785182 - RNA, 19 nt, Artificial Sequence
  Description of Artificial Sequence: Synthetic oligonucleotide
  Antisense strand to SEQ ID NO: 1785181
ucucccaaaggaaucuggc

SEQ ID NO: 1785183 - RNA, 19 nt, Artificial Sequence
  Description of Artificial Sequence: Synthetic oligonucleotide
  Sense strand starting at position 3931 of SEQ ID NO: 1562955
ccauauucgugucugaguc

SEQ ID NO: 1785184 - RNA, 19 nt, Artificial Sequence
  Description of Artificial Sequence: Synthetic oligonucleotide
  Antisense strand to SEQ ID NO: 1785183
gacucagacacgaauaugg

SEQ ID NO: 1785185 - RNA, 19 nt, Artificial Sequence
  Description of Artificial Sequence: Synthetic oligonucleotide
  Sense strand starting at position 124 of SEQ ID NO: 1562956
cuuaaugcuccagaugguu

SEQ ID NO: 1785186 - RNA, 19 nt, Artificial Sequence
  Description of Artificial Sequence: Synthetic oligonucleotide
  Antisense strand to SEQ ID NO: 1785185
aaccaucuggagcauuaag

SEQ ID NO: 1785187 - RNA, 19 nt, Artificial Sequence
  Description of Artificial Sequence: Synthetic oligonucleotide
  Sense strand starting at position 214 of SEQ ID NO: 1562956
gcagaagucccacaucuug

SEQ ID NO: 1785188 - RNA, 19 nt, Artificial Sequence
  Description of Artificial Sequence: Synthetic oligonucleotide
  Antisense strand to SEQ ID NO: 1785187
caagaugugggacuucugc

SEQ ID NO: 1785189 - RNA, 19 nt, Artificial Sequence
  Description of Artificial Sequence: Synthetic oligonucleotide
  Sense strand starting at position 232 of SEQ ID NO: 1562956
gagccauacucagagaccu

SEQ ID NO: 1785190 - RNA, 19 nt, Artificial Sequence
  Description of Artificial Sequence: Synthetic oligonucleotide
  Antisense strand to SEQ ID NO: 1785189
aggucucugaguauggcuc

SEQ ID NO: 1785191 - RNA, 19 nt, Artificial Sequence
  Description of Artificial Sequence: Synthetic oligonucleotide
  Sense strand starting at position 244 of SEQ ID NO: 1562956
gagaccugcgacugagaca

SEQ ID NO: 1785192 - RNA, 19 nt, Artificial Sequence
  Description of Artificial Sequence: Synthetic oligonucleotide
  Antisense strand to SEQ ID NO: 1785191
ugucucagucgcaggucuc

SEQ ID NO: 1785193 - RNA, 19 nt, Artificial Sequence
  Description of Artificial Sequence: Synthetic oligonucleotide
  Sense strand starting at position 245 of SEQ ID NO: 1562956
agaccugcgacugagacau

SEQ ID NO: 1785194 - RNA, 19 nt, Artificial Sequence
  Description of Artificial Sequence: Synthetic oligonucleotide
  Antisense strand to SEQ ID NO: 1785193
augucucagucgcaggucu

SEQ ID NO: 1785195 - RNA, 19 nt, Artificial Sequence
  Description of Artificial Sequence: Synthetic oligonucleotide
  Sense strand starting at position 491 of SEQ ID NO: 1562956
uuccucagaguaugaugaa

SEQ ID NO: 1785196 - RNA, 19 nt, Artificial Sequence
  Description of Artificial Sequence: Synthetic oligonucleotide
  Antisense strand to SEQ ID NO: 1785195
uucaucauacucugaggaa

SEQ ID NO: 1785197 - RNA, 19 nt, Artificial Sequence
  Description of Artificial Sequence: Synthetic oligonucleotide
  Sense strand starting at position 492 of SEQ ID NO: 1562956
uccucagaguaugaugaaa

SEQ ID NO: 1785198 - RNA, 19 nt, Artificial Sequence
  Description of Artificial Sequence: Synthetic oligonucleotide
  Antisense strand to SEQ ID NO: 1785197
uuucaucauacucugagga

SEQ ID NO: 1785199 - RNA, 19 nt, Artificial Sequence
  Description of Artificial Sequence: Synthetic oligonucleotide
  Sense strand starting at position 494 of SEQ ID NO: 1562956
cucagaguaugaugaaaua

SEQ ID NO: 1785200 - RNA, 19 nt, Artificial Sequence
  Description of Artificial Sequence: Synthetic oligonucleotide
  Antisense strand to SEQ ID NO: 1785199
uauuucaucauacucugag

SEQ ID NO: 1785201 - RNA, 19 nt, Artificial Sequence
  Description of Artificial Sequence: Synthetic oligonucleotide
  Sense strand starting at position 567 of SEQ ID NO: 1562956
agcaauccgcacuaaucau

SEQ ID NO: 1785202 - RNA, 19 nt, Artificial Sequence
  Description of Artificial Sequence: Synthetic oligonucleotide
  Antisense strand to SEQ ID NO: 1785201
augauuagugcggauugcu

SEQ ID NO: 1785203 - RNA, 19 nt, Artificial Sequence
  Description of Artificial Sequence: Synthetic oligonucleotide
  Sense strand starting at position 616 of SEQ ID NO: 1562956
ucgagaaggccucaauaug

SEQ ID NO: 1785204 - RNA, 19 nt, Artificial Sequence
  Description of Artificial Sequence: Synthetic oligonucleotide
  Antisense strand to SEQ ID NO: 1785203
cauauugaggccuucucga

SEQ ID NO: 1785205 - RNA, 19 nt, Artificial Sequence
  Description of Artificial Sequence: Synthetic oligonucleotide
  Sense strand starting at position 664 of SEQ ID NO: 1562956
agcuuuggcccucaaacau

SEQ ID NO: 1785206 - RNA, 19 nt, Artificial Sequence
  Description of Artificial Sequence: Synthetic oligonucleotide
  Antisense strand to SEQ ID NO: 1785205
auguuugagggccaaagcu

SEQ ID NO: 1785207 - RNA, 19 nt, Artificial Sequence
  Description of Artificial Sequence: Synthetic oligonucleotide
  Sense strand starting at position 892 of SEQ ID NO: 1562956
accaguuuccugcaggaaa

SEQ ID NO: 1785208 - RNA, 19 nt, Artificial Sequence
  Description of Artificial Sequence: Synthetic oligonucleotide
  Antisense strand to SEQ ID NO: 1785207
uuuccugcaggaaacuggu

SEQ ID NO: 1785209 - RNA, 19 nt, Artificial Sequence
  Description of Artificial Sequence: Synthetic oligonucleotide
  Sense strand starting at position 1383 of SEQ ID NO: 1562956
gcaccuuagcaagggugaa

SEQ ID NO: 1785210 - RNA, 19 nt, Artificial Sequence
  Description of Artificial Sequence: Synthetic oligonucleotide
  Antisense strand to SEQ ID NO: 1785209
uucacccuugcuaaggugc

SEQ ID NO: 1785211 - RNA, 19 nt, Artificial Sequence
  Description of Artificial Sequence: Synthetic oligonucleotide
  Sense strand starting at position 1544 of SEQ ID NO: 1562956
agauucuuccgguggcgga

SEQ ID NO: 1785212 - RNA, 19 nt, Artificial Sequence
  Description of Artificial Sequence: Synthetic oligonucleotide
  Antisense strand to SEQ ID NO: 1785211
uccgccaccggaagaaucu

SEQ ID NO: 1785213 - RNA, 19 nt, Artificial Sequence
  Description of Artificial Sequence: Synthetic oligonucleotide
  Sense strand starting at position 1580 of SEQ ID NO: 1562956
ggaucugucugguucgaac

SEQ ID NO: 1785214 - RNA, 19 nt, Artificial Sequence
  Description of Artificial Sequence: Synthetic oligonucleotide
  Antisense strand to SEQ ID NO: 1785213
guucgaaccagacagaucc

SEQ ID NO: 1785215 - RNA, 19 nt, Artificial Sequence
  Description of Artificial Sequence: Synthetic oligonucleotide
  Sense strand starting at position 1602 of SEQ ID NO: 1562956
gcuggugacuuugcagaga

SEQ ID NO: 1785216 - RNA, 19 nt, Artificial Sequence
  Description of Artificial Sequence: Synthetic oligonucleotide
  Antisense strand to SEQ ID NO: 1785215
ucucugcaaagucaccagc

SEQ ID NO: 1785217 - RNA, 19 nt, Artificial Sequence
  Description of Artificial Sequence: Synthetic oligonucleotide
  Sense strand starting at position 1605 of SEQ ID NO: 1562956
ggugacuuugcagagauac

SEQ ID NO: 1785218 - RNA, 19 nt, Artificial Sequence
  Description of Artificial Sequence: Synthetic oligonucleotide
  Antisense strand to SEQ ID NO: 1785217
guaucucugcaaagucacc

SEQ ID NO: 1785219 - RNA, 19 nt, Artificial Sequence
  Description of Artificial Sequence: Synthetic oligonucleotide
  Sense strand starting at position 1985 of SEQ ID NO: 1562956
cgcggauuagucagcaguu

SEQ ID NO: 1785220 - RNA, 19 nt, Artificial Sequence
  Description of Artificial Sequence: Synthetic oligonucleotide
  Antisense strand to SEQ ID NO: 1785219
aacugcugacuaauccgcg

SEQ ID NO: 1785221 - RNA, 19 nt, Artificial Sequence
  Description of Artificial Sequence: Synthetic oligonucleotide
  Sense strand starting at position 1986 of SEQ ID NO: 1562956
gcggauuagucagcaguug

SEQ ID NO: 1785222 - RNA, 19 nt, Artificial Sequence
  Description of Artificial Sequence: Synthetic oligonucleotide
  Antisense strand to SEQ ID NO: 1785221
caacugcugacuaauccgc

SEQ ID NO: 1785223 - RNA, 19 nt, Artificial Sequence
  Description of Artificial Sequence: Synthetic oligonucleotide
  Sense strand starting at position 1987 of SEQ ID NO: 1562956
cggauuagucagcaguugu

SEQ ID NO: 1785224 - RNA, 19 nt, Artificial Sequence
  Description of Artificial Sequence: Synthetic oligonucleotide
  Antisense strand to SEQ ID NO: 1785223
acaacugcugacuaauccg

SEQ ID NO: 1785225 - RNA, 19 nt, Artificial Sequence
  Description of Artificial Sequence: Synthetic oligonucleotide
  Sense strand starting at position 1991 of SEQ ID NO: 1562956
uuagucagcaguuguucua

SEQ ID NO: 1785226 - RNA, 19 nt, Artificial Sequence
  Description of Artificial Sequence: Synthetic oligonucleotide
  Antisense strand to SEQ ID NO: 1785225
uagaacaacugcugacuaa

SEQ ID NO: 1785227 - RNA, 19 nt, Artificial Sequence
  Description of Artificial Sequence: Synthetic oligonucleotide
  Sense strand starting at position 2504 of SEQ ID NO: 1562956
gggaagacugaguggaguu

SEQ ID NO: 1785228 - RNA, 19 nt, Artificial Sequence
  Description of Artificial Sequence: Synthetic oligonucleotide
  Antisense strand to SEQ ID NO: 1785227
aacuccacucagucuuccc

SEQ ID NO: 1785229 - RNA, 19 nt, Artificial Sequence
  Description of Artificial Sequence: Synthetic oligonucleotide
  Sense strand starting at position 2787 of SEQ ID NO: 1562956
caagccggucacuaugaaa

SEQ ID NO: 1785230 - RNA, 19 nt, Artificial Sequence
  Description of Artificial Sequence: Synthetic oligonucleotide
  Antisense strand to SEQ ID NO: 1785229
uuucauagugaccggcuug

SEQ ID NO: 1785231 - RNA, 19 nt, Artificial Sequence
  Description of Artificial Sequence: Synthetic oligonucleotide
  Sense strand starting at position 2859 of SEQ ID NO: 1562956
aggguuuccugagaaacca

SEQ ID NO: 1785232 - RNA, 19 nt, Artificial Sequence
  Description of Artificial Sequence: Synthetic oligonucleotide
  Antisense strand to SEQ ID NO: 1785231
ugguuucucaggaaacccu

SEQ ID NO: 1785233 - RNA, 19 nt, Artificial Sequence
  Description of Artificial Sequence: Synthetic oligonucleotide
  Sense strand starting at position 2889 of SEQ ID NO: 1562956
aaauaaagauaccguggau

SEQ ID NO: 1785234 - RNA, 19 nt, Artificial Sequence
  Description of Artificial Sequence: Synthetic oligonucleotide
  Antisense strand to SEQ ID NO: 1785233
auccacgguaucuuuauuu

SEQ ID NO: 1785235 - RNA, 19 nt, Artificial Sequence
  Description of Artificial Sequence: Synthetic oligonucleotide
  Sense strand starting at position 3188 of SEQ ID NO: 1562956
agggacauccguuguauaa

SEQ ID NO: 1785236 - RNA, 19 nt, Artificial Sequence
  Description of Artificial Sequence: Synthetic oligonucleotide
  Antisense strand to SEQ ID NO: 1785235
uuauacaacggaugucccu

SEQ ID NO: 1785237 - RNA, 19 nt, Artificial Sequence
  Description of Artificial Sequence: Synthetic oligonucleotide
  Sense strand starting at position 3245 of SEQ ID NO: 1562956
gaaagauauuucuggucuc

SEQ ID NO: 1785238 - RNA, 19 nt, Artificial Sequence
  Description of Artificial Sequence: Synthetic oligonucleotide
  Antisense strand to SEQ ID NO: 1785237
gagaccagaaauaucuuuc

SEQ ID NO: 1785239 - RNA, 19 nt, Artificial Sequence
  Description of Artificial Sequence: Synthetic oligonucleotide
  Sense strand starting at position 3327 of SEQ ID NO: 1562956
acguuuauucgccugcguu

SEQ ID NO: 1785240 - RNA, 19 nt, Artificial Sequence
  Description of Artificial Sequence: Synthetic oligonucleotide
  Antisense strand to SEQ ID NO: 1785239
aacgcaggcgaauaaacgu

SEQ ID NO: 1785241 - RNA, 19 nt, Artificial Sequence
  Description of Artificial Sequence: Synthetic oligonucleotide
  Sense strand starting at position 3361 of SEQ ID NO: 1562956
uugauuucguaggucgaca

SEQ ID NO: 1785242 - RNA, 19 nt, Artificial Sequence
  Description of Artificial Sequence: Synthetic oligonucleotide
  Antisense strand to SEQ ID NO: 1785241
ugucgaccuacgaaaucaa

SEQ ID NO: 1785243 - RNA, 19 nt, Artificial Sequence
  Description of Artificial Sequence: Synthetic oligonucleotide
  Sense strand starting at position 3363 of SEQ ID NO: 1562956
gauuucguaggucgacaga

SEQ ID NO: 1785244 - RNA, 19 nt, Artificial Sequence
  Description of Artificial Sequence: Synthetic oligonucleotide
  Antisense strand to SEQ ID NO: 1785243
ucugucgaccuacgaaauc

SEQ ID NO: 1785245 - RNA, 19 nt, Artificial Sequence
  Description of Artificial Sequence: Synthetic oligonucleotide
  Sense strand starting at position 3458 of SEQ ID NO: 1562956
ggaguagagugguccuuga

SEQ ID NO: 1785246 - RNA, 19 nt, Artificial Sequence
  Description of Artificial Sequence: Synthetic oligonucleotide
  Antisense strand to SEQ ID NO: 1785245
ucaaggaccacucuacucc

SEQ ID NO: 1785247 - RNA, 19 nt, Artificial Sequence
  Description of Artificial Sequence: Synthetic oligonucleotide
  Sense strand starting at position 3462 of SEQ ID NO: 1562956
uagagugguccuugaugga

SEQ ID NO: 1785248 - RNA, 19 nt, Artificial Sequence
  Description of Artificial Sequence: Synthetic oligonucleotide
  Antisense strand to SEQ ID NO: 1785247
uccaucaaggaccacucua

SEQ ID NO: 1785249 - RNA, 19 nt, Artificial Sequence
  Description of Artificial Sequence: Synthetic oligonucleotide
  Sense strand starting at position 3486 of SEQ ID NO: 1562956
cguuuaagagugucgccua

SEQ ID NO: 1785250 - RNA, 19 nt, Artificial Sequence
  Description of Artificial Sequence: Synthetic oligonucleotide
  Antisense strand to SEQ ID NO: 1785249
uaggcgacacucuuaaacg

SEQ ID NO: 1785251 - RNA, 19 nt, Artificial Sequence
  Description of Artificial Sequence: Synthetic oligonucleotide
  Sense strand starting at position 3491 of SEQ ID NO: 1562956
aagagugucgccuagccau

SEQ ID NO: 1785252 - RNA, 19 nt, Artificial Sequence
  Description of Artificial Sequence: Synthetic oligonucleotide
  Antisense strand to SEQ ID NO: 1785251
auggcuaggcgacacucuu

SEQ ID NO: 1785253 - RNA, 19 nt, Artificial Sequence
  Description of Artificial Sequence: Synthetic oligonucleotide
  Sense strand starting at position 3522 of SEQ ID NO: 1562956
gcaaucuguggguacacua

SEQ ID NO: 1785254 - RNA, 19 nt, Artificial Sequence
  Description of Artificial Sequence: Synthetic oligonucleotide
  Antisense strand to SEQ ID NO: 1785253
uaguguacccacagauugc

SEQ ID NO: 1785255 - RNA, 19 nt, Artificial Sequence
  Description of Artificial Sequence: Synthetic oligonucleotide
  Sense strand starting at position 3688 of SEQ ID NO: 1562956
gcaacuuaaggacaguuua

SEQ ID NO: 1785256 - RNA, 19 nt, Artificial Sequence
  Description of Artificial Sequence: Synthetic oligonucleotide
  Antisense strand to SEQ ID NO: 1785255
uaaacuguccuuaaguugc

SEQ ID NO: 1785257 - RNA, 19 nt, Artificial Sequence
  Description of Artificial Sequence: Synthetic oligonucleotide
  Sense strand starting at position 3716 of SEQ ID NO: 1562956
cccaucuguggucaauaaa

SEQ ID NO: 1785258 - RNA, 19 nt, Artificial Sequence
  Description of Artificial Sequence: Synthetic oligonucleotide
  Antisense strand to SEQ ID NO: 1785257
uuuauugaccacagauggg

SEQ ID NO: 1785259 - RNA, 19 nt, Artificial Sequence
  Description of Artificial Sequence: Synthetic oligonucleotide
  Sense strand starting at position 3725 of SEQ ID NO: 1562956
ggucaauaaacagguaagu

SEQ ID NO: 1785260 - RNA, 19 nt, Artificial Sequence
  Description of Artificial Sequence: Synthetic oligonucleotide
  Antisense strand to SEQ ID NO: 1785259
acuuaccuguuuauugacc

SEQ ID NO: 1785261 - RNA, 19 nt, Artificial Sequence
  Description of Artificial Sequence: Synthetic oligonucleotide
  Sense strand starting at position 3895 of SEQ ID NO: 1562956
aaacgugugcguugacauu

SEQ ID NO: 1785262 - RNA, 19 nt, Artificial Sequence
  Description of Artificial Sequence: Synthetic oligonucleotide
  Antisense strand to SEQ ID NO: 1785261
aaugucaacgcacacguuu

SEQ ID NO: 1785263 - RNA, 19 nt, Artificial Sequence
  Description of Artificial Sequence: Synthetic oligonucleotide
  Sense strand starting at position 3980 of SEQ ID NO: 1562956
ugugcuguacuguauuaga

SEQ ID NO: 1785264 - RNA, 19 nt, Artificial Sequence
  Description of Artificial Sequence: Synthetic oligonucleotide
  Antisense strand to SEQ ID NO: 1785263
ucuaauacaguacagcaca

SEQ ID NO: 1785265 - RNA, 19 nt, Artificial Sequence
  Description of Artificial Sequence: Synthetic oligonucleotide
  Sense strand starting at position 5 of SEQ ID NO: 1562957
gauaaacacuucugaggag

SEQ ID NO: 1785266 - RNA, 19 nt, Artificial Sequence
  Description of Artificial Sequence: Synthetic oligonucleotide
  Antisense strand to SEQ ID NO: 1785265
cuccucagaaguguuuauc

SEQ ID NO: 1785267 - RNA, 19 nt, Artificial Sequence
  Description of Artificial Sequence: Synthetic oligonucleotide
  Sense strand starting at position 6 of SEQ ID NO: 1562957
auaaacacuucugaggaga

SEQ ID NO: 1785268 - RNA, 19 nt, Artificial Sequence
  Description of Artificial Sequence: Synthetic oligonucleotide
  Antisense strand to SEQ ID NO: 1785267
ucuccucagaaguguuuau

SEQ ID NO: 1785269 - RNA, 19 nt, Artificial Sequence
  Description of Artificial Sequence: Synthetic oligonucleotide
  Sense strand starting at position 54 of SEQ ID NO: 1562957
agggcaguguuguuauaua

SEQ ID NO: 1785270 - RNA, 19 nt, Artificial Sequence
  Description of Artificial Sequence: Synthetic oligonucleotide
  Antisense strand to SEQ ID NO: 1785269
uauauaacaacacugcccu

SEQ ID NO: 1785271 - RNA, 19 nt, Artificial Sequence
  Description of Artificial Sequence: Synthetic oligonucleotide
  Sense strand starting at position 153 of SEQ ID NO: 1562957
guuaacaucuagucugaug

SEQ ID NO: 1785272 - RNA, 19 nt, Artificial Sequence
  Description of Artificial Sequence: Synthetic oligonucleotide
  Antisense strand to SEQ ID NO: 1785271
caucagacuagauguuaac

SEQ ID NO: 1785273 - RNA, 19 nt, Artificial Sequence
  Description of Artificial Sequence: Synthetic oligonucleotide
  Sense strand starting at position 164 of SEQ ID NO: 1562957
gucugaugguggguacaua

SEQ ID NO: 1785274 - RNA, 19 nt, Artificial Sequence
  Description of Artificial Sequence: Synthetic oligonucleotide
  Antisense strand to SEQ ID NO: 1785273
uauguacccaccaucagac

SEQ ID NO: 1785275 - RNA, 19 nt, Artificial Sequence
  Description of Artificial Sequence: Synthetic oligonucleotide
  Sense strand starting at position 165 of SEQ ID NO: 1562957
ucugaugguggguacauau

SEQ ID NO: 1785276 - RNA, 19 nt, Artificial Sequence
  Description of Artificial Sequence: Synthetic oligonucleotide
  Antisense strand to SEQ ID NO: 1785275
auauguacccaccaucaga

SEQ ID NO: 1785277 - RNA, 19 nt, Artificial Sequence
  Description of Artificial Sequence: Synthetic oligonucleotide
  Sense strand starting at position 395 of SEQ ID NO: 1562957
agcccauuguauguacaau

SEQ ID NO: 1785278 - RNA, 19 nt, Artificial Sequence
  Description of Artificial Sequence: Synthetic oligonucleotide
  Antisense strand to SEQ ID NO: 1785277
auuguacauacaaugggcu

SEQ ID NO: 1785279 - RNA, 19 nt, Artificial Sequence
  Description of Artificial Sequence: Synthetic oligonucleotide
  Sense strand starting at position 521 of SEQ ID NO: 1562957
cgcuuuguugcccaggcaa

SEQ ID NO: 1785280 - RNA, 19 nt, Artificial Sequence
  Description of Artificial Sequence: Synthetic oligonucleotide
  Antisense strand to SEQ ID NO: 1785279
uugccugggcaacaaagcg

SEQ ID NO: 1785281 - RNA, 19 nt, Artificial Sequence
  Description of Artificial Sequence: Synthetic oligonucleotide
  Sense strand starting at position 579 of SEQ ID NO: 1562957
ccucucaaagugugaaauu

SEQ ID NO: 1785282 - RNA, 19 nt, Artificial Sequence
  Description of Artificial Sequence: Synthetic oligonucleotide
  Antisense strand to SEQ ID NO: 1785281
aauuucacacuuugagagg

SEQ ID NO: 1785283 - RNA, 19 nt, Artificial Sequence
  Description of Artificial Sequence: Synthetic oligonucleotide
  Sense strand starting at position 580 of SEQ ID NO: 1562957
cucucaaagugugaaauuu

SEQ ID NO: 1785284 - RNA, 19 nt, Artificial Sequence
  Description of Artificial Sequence: Synthetic oligonucleotide
  Antisense strand to SEQ ID NO: 1785283
aaauuucacacuuugagag

SEQ ID NO: 1785285 - RNA, 19 nt, Artificial Sequence
  Description of Artificial Sequence: Synthetic oligonucleotide
  Sense strand starting at position 608 of SEQ ID NO: 1562957
uugaaauuguuggacacga

SEQ ID NO: 1785286 - RNA, 19 nt, Artificial Sequence
  Description of Artificial Sequence: Synthetic oligonucleotide
  Antisense strand to SEQ ID NO: 1785285
ucguguccaacaauuucaa

SEQ ID NO: 1785287 - RNA, 19 nt, Artificial Sequence
  Description of Artificial Sequence: Synthetic oligonucleotide
  Sense strand starting at position 687 of SEQ ID NO: 1562957
guacuugaauacuaugauu

SEQ ID NO: 1785288 - RNA, 19 nt, Artificial Sequence
  Description of Artificial Sequence: Synthetic oligonucleotide
  Antisense strand to SEQ ID NO: 1785287
aaucauaguauucaaguac

SEQ ID NO: 1785289 - RNA, 19 nt, Artificial Sequence
  Description of Artificial Sequence: Synthetic oligonucleotide
  Sense strand starting at position 701 of SEQ ID NO: 1562957
ugauuugaaucaugucugu

SEQ ID NO: 1785290 - RNA, 19 nt, Artificial Sequence
  Description of Artificial Sequence: Synthetic oligonucleotide
  Antisense strand to SEQ ID NO: 1785289
acagacaugauucaaauca

SEQ ID NO: 1785291 - RNA, 19 nt, Artificial Sequence
  Description of Artificial Sequence: Synthetic oligonucleotide
  Sense strand starting at position 736 of SEQ ID NO: 1562957
gggugugagcccggacaua

SEQ ID NO: 1785292 - RNA, 19 nt, Artificial Sequence
  Description of Artificial Sequence: Synthetic oligonucleotide
  Antisense strand to SEQ ID NO: 1785291
uauguccgggcucacaccc

SEQ ID NO: 1785293 - RNA, 19 nt, Artificial Sequence
  Description of Artificial Sequence: Synthetic oligonucleotide
  Sense strand starting at position 750 of SEQ ID NO: 1562957
acauauguguugucuggua

SEQ ID NO: 1785294 - RNA, 19 nt, Artificial Sequence
  Description of Artificial Sequence: Synthetic oligonucleotide
  Antisense strand to SEQ ID NO: 1785293
uaccagacaacacauaugu

SEQ ID NO: 1785295 - RNA, 19 nt, Artificial Sequence
  Description of Artificial Sequence: Synthetic oligonucleotide
  Sense strand starting at position 752 of SEQ ID NO: 1562957
auauguguugucugguaua

SEQ ID NO: 1785296 - RNA, 19 nt, Artificial Sequence
  Description of Artificial Sequence: Synthetic oligonucleotide
  Antisense strand to SEQ ID NO: 1785295
uauaccagacaacacauau

SEQ ID NO: 1785297 - RNA, 19 nt, Artificial Sequence
  Description of Artificial Sequence: Synthetic oligonucleotide
  Sense strand starting at position 784 of SEQ ID NO: 1562957
cauagacggucuuaaacuu

SEQ ID NO: 1785298 - RNA, 19 nt, Artificial Sequence
  Description of Artificial Sequence: Synthetic oligonucleotide
  Antisense strand to SEQ ID NO: 1785297
aaguuuaagaccgucuaug

SEQ ID NO: 1785299 - RNA, 19 nt, Artificial Sequence
  Description of Artificial Sequence: Synthetic oligonucleotide
  Sense strand starting at position 828 of SEQ ID NO: 1562957
gugugucuuucuguguuua

SEQ ID NO: 1785300 - RNA, 19 nt, Artificial Sequence
  Description of Artificial Sequence: Synthetic oligonucleotide
  Antisense strand to SEQ ID NO: 1785299
uaaacacagaaagacacac

SEQ ID NO: 1785301 - RNA, 19 nt, Artificial Sequence
  Description of Artificial Sequence: Synthetic oligonucleotide
  Sense strand starting at position 829 of SEQ ID NO: 1562957
ugugucuuucuguguuuaa

SEQ ID NO: 1785302 - RNA, 19 nt, Artificial Sequence
  Description of Artificial Sequence: Synthetic oligonucleotide
  Antisense strand to SEQ ID NO: 1785301
uuaaacacagaaagacaca

SEQ ID NO: 1785303 - RNA, 19 nt, Artificial Sequence
  Description of Artificial Sequence: Synthetic oligonucleotide
  Sense strand starting at position 830 of SEQ ID NO: 1562957
gugucuuucuguguuuaag

SEQ ID NO: 1785304 - RNA, 19 nt, Artificial Sequence
  Description of Artificial Sequence: Synthetic oligonucleotide
  Antisense strand to SEQ ID NO: 1785303
cuuaaacacagaaagacac

SEQ ID NO: 1785305 - RNA, 19 nt, Artificial Sequence
  Description of Artificial Sequence: Synthetic oligonucleotide
  Sense strand starting at position 949 of SEQ ID NO: 1562957
agagaagaaucagugcauu

SEQ ID NO: 1785306 - RNA, 19 nt, Artificial Sequence
  Description of Artificial Sequence: Synthetic oligonucleotide
  Antisense strand to SEQ ID NO: 1785305
aaugcacugauucuucucu

SEQ ID NO: 1785307 - RNA, 19 nt, Artificial Sequence
  Description of Artificial Sequence: Synthetic oligonucleotide
  Sense strand starting at position 955 of SEQ ID NO: 1562957
gaaucagugcauuaaguua

SEQ ID NO: 1785308 - RNA, 19 nt, Artificial Sequence
  Description of Artificial Sequence: Synthetic oligonucleotide
  Antisense strand to SEQ ID NO: 1785307
uaacuuaaugcacugauuc

SEQ ID NO: 1785309 - RNA, 19 nt, Artificial Sequence
  Description of Artificial Sequence: Synthetic oligonucleotide
  Sense strand starting at position 966 of SEQ ID NO: 1562957
uuaaguuaacugggcacaa

SEQ ID NO: 1785310 - RNA, 19 nt, Artificial Sequence
  Description of Artificial Sequence: Synthetic oligonucleotide
  Antisense strand to SEQ ID NO: 1785309
uugugcccaguuaacuuaa

SEQ ID NO: 1785311 - RNA, 19 nt, Artificial Sequence
  Description of Artificial Sequence: Synthetic oligonucleotide
  Sense strand starting at position 978 of SEQ ID NO: 1562957
ggcacaagaaauugugaaa

SEQ ID NO: 1785312 - RNA, 19 nt, Artificial Sequence
  Description of Artificial Sequence: Synthetic oligonucleotide
  Antisense strand to SEQ ID NO: 1785311
uuucacaauuucuugugcc

SEQ ID NO: 1785313 - RNA, 19 nt, Artificial Sequence
  Description of Artificial Sequence: Synthetic oligonucleotide
  Sense strand starting at position 1396 of SEQ ID NO: 1562957
ggguuagagccagaucauu

SEQ ID NO: 1785314 - RNA, 19 nt, Artificial Sequence
  Description of Artificial Sequence: Synthetic oligonucleotide
  Antisense strand to SEQ ID NO: 1785313
aaugaucuggcucuaaccc

SEQ ID NO: 1785315 - RNA, 19 nt, Artificial Sequence
  Description of Artificial Sequence: Synthetic oligonucleotide
  Sense strand starting at position 1465 of SEQ ID NO: 1562957
cuguaaacgaguuguagaa

SEQ ID NO: 1785316 - RNA, 19 nt, Artificial Sequence
  Description of Artificial Sequence: Synthetic oligonucleotide
  Antisense strand to SEQ ID NO: 1785315
uucuacaacucguuuacag

SEQ ID NO: 1785317 - RNA, 19 nt, Artificial Sequence
  Description of Artificial Sequence: Synthetic oligonucleotide
  Sense strand starting at position 1499 of SEQ ID NO: 1562957
aggagaaccguuggugacu

SEQ ID NO: 1785318 - RNA, 19 nt, Artificial Sequence
  Description of Artificial Sequence: Synthetic oligonucleotide
  Antisense strand to SEQ ID NO: 1785317
agucaccaacgguucuccu

SEQ ID NO: 1785319 - RNA, 19 nt, Artificial Sequence
  Description of Artificial Sequence: Synthetic oligonucleotide
  Sense strand starting at position 1536 of SEQ ID NO: 1562957
gagcauuauuggcccugca

SEQ ID NO: 1785320 - RNA, 19 nt, Artificial Sequence
  Description of Artificial Sequence: Synthetic oligonucleotide
  Antisense strand to SEQ ID NO: 1785319
ugcagggccaauaaugcuc

SEQ ID NO: 1785321 - RNA, 19 nt, Artificial Sequence
  Description of Artificial Sequence: Synthetic oligonucleotide
  Sense strand starting at position 1539 of SEQ ID NO: 1562957
cauuauuggcccugcagga

SEQ ID NO: 1785322 - RNA, 19 nt, Artificial Sequence
  Description of Artificial Sequence: Synthetic oligonucleotide
  Antisense strand to SEQ ID NO: 1785321
uccugcagggccaauaaug

SEQ ID NO: 1785323 - RNA, 19 nt, Artificial Sequence
  Description of Artificial Sequence: Synthetic oligonucleotide
  Sense strand starting at position 1991 of SEQ ID NO: 1562957
gucaacaacucguugcuaa

SEQ ID NO: 1785324 - RNA, 19 nt, Artificial Sequence
  Description of Artificial Sequence: Synthetic oligonucleotide
  Antisense strand to SEQ ID NO: 1785323
uuagcaacgaguuguugac

SEQ ID NO: 1785325 - RNA, 19 nt, Artificial Sequence
  Description of Artificial Sequence: Synthetic oligonucleotide
  Sense strand starting at position 1995 of SEQ ID NO: 1562957
acaacucguugcuaaggaa

SEQ ID NO: 1785326 - RNA, 19 nt, Artificial Sequence
  Description of Artificial Sequence: Synthetic oligonucleotide
  Antisense strand to SEQ ID NO: 1785325
uuccuuagcaacgaguugu

SEQ ID NO: 1785327 - RNA, 19 nt, Artificial Sequence
  Description of Artificial Sequence: Synthetic oligonucleotide
  Sense strand starting at position 2781 of SEQ ID NO: 1562957
gggagcugucgaggaggua

SEQ ID NO: 1785328 - RNA, 19 nt, Artificial Sequence
  Description of Artificial Sequence: Synthetic oligonucleotide
  Antisense strand to SEQ ID NO: 1785327
uaccuccucgacagcuccc

SEQ ID NO: 1785329 - RNA, 19 nt, Artificial Sequence
  Description of Artificial Sequence: Synthetic oligonucleotide
  Sense strand starting at position 2782 of SEQ ID NO: 1562957
ggagcugucgaggagguaa

SEQ ID NO: 1785330 - RNA, 19 nt, Artificial Sequence
  Description of Artificial Sequence: Synthetic oligonucleotide
  Antisense strand to SEQ ID NO: 1785329
uuaccuccucgacagcucc

SEQ ID NO: 1785331 - RNA, 19 nt, Artificial Sequence
  Description of Artificial Sequence: Synthetic oligonucleotide
  Sense strand starting at position 2841 of SEQ ID NO: 1562957
agcuuugacccaggaaugu

SEQ ID NO: 1785332 - RNA, 19 nt, Artificial Sequence
  Description of Artificial Sequence: Synthetic oligonucleotide
  Antisense strand to SEQ ID NO: 1785331
acauuccugggucaaagcu

SEQ ID NO: 1785333 - RNA, 19 nt, Artificial Sequence
  Description of Artificial Sequence: Synthetic oligonucleotide
  Sense strand starting at position 2850 of SEQ ID NO: 1562957
ccaggaauguagugaugau

SEQ ID NO: 1785334 - RNA, 19 nt, Artificial Sequence
  Description of Artificial Sequence: Synthetic oligonucleotide
  Antisense strand to SEQ ID NO: 1785333
aucaucacuacauuccugg

SEQ ID NO: 1785335 - RNA, 19 nt, Artificial Sequence
  Description of Artificial Sequence: Synthetic oligonucleotide
  Sense strand starting at position 2889 of SEQ ID NO: 1562957
uccuaaguuccuggcgaca

SEQ ID NO: 1785336 - RNA, 19 nt, Artificial Sequence
  Description of Artificial Sequence: Synthetic oligonucleotide
  Antisense strand to SEQ ID NO: 1785335
ugucgccaggaacuuagga

SEQ ID NO: 1785337 - RNA, 19 nt, Artificial Sequence
  Description of Artificial Sequence: Synthetic oligonucleotide
  Sense strand starting at position 2902 of SEQ ID NO: 1562957
gcgacaccgucuuugguua

SEQ ID NO: 1785338 - RNA, 19 nt, Artificial Sequence
  Description of Artificial Sequence: Synthetic oligonucleotide
  Antisense strand to SEQ ID NO: 1785337
uaaccaaagacggugucgc

SEQ ID NO: 1785339 - RNA, 19 nt, Artificial Sequence
  Description of Artificial Sequence: Synthetic oligonucleotide
  Sense strand starting at position 2990 of SEQ ID NO: 1562957
ugcggaggucucuacuaau

SEQ ID NO: 1785340 - RNA, 19 nt, Artificial Sequence
  Description of Artificial Sequence: Synthetic oligonucleotide
  Antisense strand to SEQ ID NO: 1785339
auuaguagagaccuccgca

SEQ ID NO: 1785341 - RNA, 19 nt, Artificial Sequence
  Description of Artificial Sequence: Synthetic oligonucleotide
  Sense strand starting at position 2993 of SEQ ID NO: 1562957
ggaggucucuacuaauaau

SEQ ID NO: 1785342 - RNA, 19 nt, Artificial Sequence
  Description of Artificial Sequence: Synthetic oligonucleotide
  Antisense strand to SEQ ID NO: 1785341
auuauuaguagagaccucc

SEQ ID NO: 1785343 - RNA, 19 nt, Artificial Sequence
  Description of Artificial Sequence: Synthetic oligonucleotide
  Sense strand starting at position 3152 of SEQ ID NO: 1562957
gugcgacucucgucucaaa

SEQ ID NO: 1785344 - RNA, 19 nt, Artificial Sequence
  Description of Artificial Sequence: Synthetic oligonucleotide
  Antisense strand to SEQ ID NO: 1785343
uuugagacgagagucgcac

SEQ ID NO: 1785345 - RNA, 19 nt, Artificial Sequence
  Description of Artificial Sequence: Synthetic oligonucleotide
  Sense strand starting at position 3450 of SEQ ID NO: 1562958
uagagauggucucgaucuc

SEQ ID NO: 1785346 - RNA, 19 nt, Artificial Sequence
  Description of Artificial Sequence: Synthetic oligonucleotide
  Antisense strand to SEQ ID NO: 1785345
gagaucgagaccaucucua

SEQ ID NO: 1785347 - RNA, 19 nt, Artificial Sequence
  Description of Artificial Sequence: Synthetic oligonucleotide
  Sense strand starting at position 2483 of SEQ ID NO: 1562959
aaaggaugugccugauaca

SEQ ID NO: 1785348 - RNA, 19 nt, Artificial Sequence
  Description of Artificial Sequence: Synthetic oligonucleotide
  Antisense strand to SEQ ID NO: 1785347
uguaucaggcacauccuuu

SEQ ID NO: 1785349 - RNA, 19 nt, Artificial Sequence
  Description of Artificial Sequence: Synthetic oligonucleotide
  Sense strand starting at position 2484 of SEQ ID NO: 1562959
aaggaugugccugauacac

SEQ ID NO: 1785350 - RNA, 19 nt, Artificial Sequence
  Description of Artificial Sequence: Synthetic oligonucleotide
  Antisense strand to SEQ ID NO: 1785349
guguaucaggcacauccuu

SEQ ID NO: 1785351 - RNA, 19 nt, Artificial Sequence
  Description of Artificial Sequence: Synthetic oligonucleotide
  Sense strand starting at position 2486 of SEQ ID NO: 1562959
ggaugugccugauacacau

SEQ ID NO: 1785352 - RNA, 19 nt, Artificial Sequence
  Description of Artificial Sequence: Synthetic oligonucleotide
  Antisense strand to SEQ ID NO: 1785351
auguguaucaggcacaucc

SEQ ID NO: 1785353 - RNA, 19 nt, Artificial Sequence
  Description of Artificial Sequence: Synthetic oligonucleotide
  Sense strand starting at position 2505 of SEQ ID NO: 1562959
uuguguuacugcgcagagu

SEQ ID NO: 1785354 - RNA, 19 nt, Artificial Sequence
  Description of Artificial Sequence: Synthetic oligonucleotide
  Antisense strand to SEQ ID NO: 1785353
acucugcgcaguaacacaa

SEQ ID NO: 1785355 - RNA, 19 nt, Artificial Sequence
  Description of Artificial Sequence: Synthetic oligonucleotide
  Sense strand starting at position 2646 of SEQ ID NO: 1562959
gguaccaccuggugacaaa

SEQ ID NO: 1785356 - RNA, 19 nt, Artificial Sequence
  Description of Artificial Sequence: Synthetic oligonucleotide
  Antisense strand to SEQ ID NO: 1785355
uuugucaccaggugguacc

SEQ ID NO: 1785357 - RNA, 19 nt, Artificial Sequence
  Description of Artificial Sequence: Synthetic oligonucleotide
  Sense strand starting at position 2686 of SEQ ID NO: 1562959
gcuacucauuggcaucuua

SEQ ID NO: 1785358 - RNA, 19 nt, Artificial Sequence
  Description of Artificial Sequence: Synthetic oligonucleotide
  Antisense strand to SEQ ID NO: 1785357
uaagaugccaaugaguagc

SEQ ID NO: 1785359 - RNA, 19 nt, Artificial Sequence
  Description of Artificial Sequence: Synthetic oligonucleotide
  Sense strand starting at position 2748 of SEQ ID NO: 1562959
gcagaaauguuggaggcau

SEQ ID NO: 1785360 - RNA, 19 nt, Artificial Sequence
  Description of Artificial Sequence: Synthetic oligonucleotide
  Antisense strand to SEQ ID NO: 1785359
augccuccaacauuucugc

SEQ ID NO: 1785361 - RNA, 19 nt, Artificial Sequence
  Description of Artificial Sequence: Synthetic oligonucleotide
  Sense strand starting at position 3083 of SEQ ID NO: 1562959
ggcagucugcauugagaca

SEQ ID NO: 1785362 - RNA, 19 nt, Artificial Sequence
  Description of Artificial Sequence: Synthetic oligonucleotide
  Antisense strand to SEQ ID NO: 1785361
ugucucaaugcagacugcc

SEQ ID NO: 1785363 - RNA, 19 nt, Artificial Sequence
  Description of Artificial Sequence: Synthetic oligonucleotide
  Sense strand starting at position 3084 of SEQ ID NO: 1562959
gcagucugcauugagacau

SEQ ID NO: 1785364 - RNA, 19 nt, Artificial Sequence
  Description of Artificial Sequence: Synthetic oligonucleotide
  Antisense strand to SEQ ID NO: 1785363
augucucaaugcagacugc

SEQ ID NO: 1785365 - RNA, 19 nt, Artificial Sequence
  Description of Artificial Sequence: Synthetic oligonucleotide
  Sense strand starting at position 3394 of SEQ ID NO: 1562959
ccgacaagaccuugauauu

SEQ ID NO: 1785366 - RNA, 19 nt, Artificial Sequence
  Description of Artificial Sequence: Synthetic oligonucleotide
  Antisense strand to SEQ ID NO: 1785365
aauaucaaggucuugucgg

SEQ ID NO: 1785367 - RNA, 19 nt, Artificial Sequence
  Description of Artificial Sequence: Synthetic oligonucleotide
  Sense strand starting at position 3397 of SEQ ID NO: 1562959
acaagaccuugauauugaa

SEQ ID NO: 1785368 - RNA, 19 nt, Artificial Sequence
  Description of Artificial Sequence: Synthetic oligonucleotide
  Antisense strand to SEQ ID NO: 1785367
uucaauaucaaggucuugu

SEQ ID NO: 1785369 - RNA, 19 nt, Artificial Sequence
  Description of Artificial Sequence: Synthetic oligonucleotide
  Sense strand starting at position 3580 of SEQ ID NO: 1562959
ggcagugucaaguaacaag

SEQ ID NO: 1785370 - RNA, 19 nt, Artificial Sequence
  Description of Artificial Sequence: Synthetic oligonucleotide
  Antisense strand to SEQ ID NO: 1785369
cuuguuacuugacacugcc

SEQ ID NO: 1785371 - RNA, 19 nt, Artificial Sequence
  Description of Artificial Sequence: Synthetic oligonucleotide
  Sense strand starting at position 3594 of SEQ ID NO: 1562959
acaagaacaucgggaauua

SEQ ID NO: 1785372 - RNA, 19 nt, Artificial Sequence
  Description of Artificial Sequence: Synthetic oligonucleotide
  Antisense strand to SEQ ID NO: 1785371
uaauucccgauguucuugu

SEQ ID NO: 1785373 - RNA, 19 nt, Artificial Sequence
  Description of Artificial Sequence: Synthetic oligonucleotide
  Sense strand starting at position 3604 of SEQ ID NO: 1562959
cgggaauuauggcuccaga

SEQ ID NO: 1785374 - RNA, 19 nt, Artificial Sequence
  Description of Artificial Sequence: Synthetic oligonucleotide
  Antisense strand to SEQ ID NO: 1785373
ucuggagccauaauucccg

SEQ ID NO: 1785375 - RNA, 19 nt, Artificial Sequence
  Description of Artificial Sequence: Synthetic oligonucleotide
  Sense strand starting at position 3607 of SEQ ID NO: 1562959
gaauuauggcuccagaugu

SEQ ID NO: 1785376 - RNA, 19 nt, Artificial Sequence
  Description of Artificial Sequence: Synthetic oligonucleotide
  Antisense strand to SEQ ID NO: 1785375
acaucuggagccauaauuc

SEQ ID NO: 1785377 - RNA, 19 nt, Artificial Sequence
  Description of Artificial Sequence: Synthetic oligonucleotide
  Sense strand starting at position 701 of SEQ ID NO: 1562960
ucuccucuugcaggguaua

SEQ ID NO: 1785378 - RNA, 19 nt, Artificial Sequence
  Description of Artificial Sequence: Synthetic oligonucleotide
  Antisense strand to SEQ ID NO: 1785377
uauacccugcaagaggaga

SEQ ID NO: 1785379 - RNA, 19 nt, Artificial Sequence
  Description of Artificial Sequence: Synthetic oligonucleotide
  Sense strand starting at position 702 of SEQ ID NO: 1562960
cuccucuugcaggguauaa

SEQ ID NO: 1785380 - RNA, 19 nt, Artificial Sequence
  Description of Artificial Sequence: Synthetic oligonucleotide
  Antisense strand to SEQ ID NO: 1785379
uuauacccugcaagaggag

SEQ ID NO: 1785381 - RNA, 19 nt, Artificial Sequence
  Description of Artificial Sequence: Synthetic oligonucleotide
  Sense strand starting at position 2106 of SEQ ID NO: 1562961
aaaggaugugccugauaca

SEQ ID NO: 1785382 - RNA, 19 nt, Artificial Sequence
  Description of Artificial Sequence: Synthetic oligonucleotide
  Antisense strand to SEQ ID NO: 1785381
uguaucaggcacauccuuu

SEQ ID NO: 1785383 - RNA, 19 nt, Artificial Sequence
  Description of Artificial Sequence: Synthetic oligonucleotide
  Sense strand starting at position 2107 of SEQ ID NO: 1562961
aaggaugugccugauacac

SEQ ID NO: 1785384 - RNA, 19 nt, Artificial Sequence
  Description of Artificial Sequence: Synthetic oligonucleotide
  Antisense strand to SEQ ID NO: 1785383
guguaucaggcacauccuu

SEQ ID NO: 1785385 - RNA, 19 nt, Artificial Sequence
  Description of Artificial Sequence: Synthetic oligonucleotide
  Sense strand starting at position 2109 of SEQ ID NO: 1562961
ggaugugccugauacacau

SEQ ID NO: 1785386 - RNA, 19 nt, Artificial Sequence
  Description of Artificial Sequence: Synthetic oligonucleotide
  Antisense strand to SEQ ID NO: 1785385
auguguaucaggcacaucc

SEQ ID NO: 1785387 - RNA, 19 nt, Artificial Sequence
  Description of Artificial Sequence: Synthetic oligonucleotide
  Sense strand starting at position 2128 of SEQ ID NO: 1562961
uuguguuacugcgcagagu

SEQ ID NO: 1785388 - RNA, 19 nt, Artificial Sequence
  Description of Artificial Sequence: Synthetic oligonucleotide
  Antisense strand to SEQ ID NO: 1785387
acucugcgcaguaacacaa

SEQ ID NO: 1785389 - RNA, 19 nt, Artificial Sequence
  Description of Artificial Sequence: Synthetic oligonucleotide
  Sense strand starting at position 2269 of SEQ ID NO: 1562961
gguaccaccuggugacaaa

SEQ ID NO: 1785390 - RNA, 19 nt, Artificial Sequence
  Description of Artificial Sequence: Synthetic oligonucleotide
  Antisense strand to SEQ ID NO: 1785389
uuugucaccaggugguacc

SEQ ID NO: 1785391 - RNA, 19 nt, Artificial Sequence
  Description of Artificial Sequence: Synthetic oligonucleotide
  Sense strand starting at position 2309 of SEQ ID NO: 1562961
gcuacucauuggcaucuua

SEQ ID NO: 1785392 - RNA, 19 nt, Artificial Sequence
  Description of Artificial Sequence: Synthetic oligonucleotide
  Antisense strand to SEQ ID NO: 1785391
uaagaugccaaugaguagc

SEQ ID NO: 1785393 - RNA, 19 nt, Artificial Sequence
  Description of Artificial Sequence: Synthetic oligonucleotide
  Sense strand starting at position 2371 of SEQ ID NO: 1562961
gcagaaauguuggaggcau

SEQ ID NO: 1785394 - RNA, 19 nt, Artificial Sequence
  Description of Artificial Sequence: Synthetic oligonucleotide
  Antisense strand to SEQ ID NO: 1785393
augccuccaacauuucugc

SEQ ID NO: 1785395 - RNA, 19 nt, Artificial Sequence
  Description of Artificial Sequence: Synthetic oligonucleotide
  Sense strand starting at position 2706 of SEQ ID NO: 1562961
ggcagucugcauugagaca

SEQ ID NO: 1785396 - RNA, 19 nt, Artificial Sequence
  Description of Artificial Sequence: Synthetic oligonucleotide
  Antisense strand to SEQ ID NO: 1785395
ugucucaaugcagacugcc

SEQ ID NO: 1785397 - RNA, 19 nt, Artificial Sequence
  Description of Artificial Sequence: Synthetic oligonucleotide
  Sense strand starting at position 2707 of SEQ ID NO: 1562961
gcagucugcauugagacau

SEQ ID NO: 1785398 - RNA, 19 nt, Artificial Sequence
  Description of Artificial Sequence: Synthetic oligonucleotide
  Antisense strand to SEQ ID NO: 1785397
augucucaaugcagacugc

SEQ ID NO: 1785399 - RNA, 19 nt, Artificial Sequence
  Description of Artificial Sequence: Synthetic oligonucleotide
  Sense strand starting at position 3017 of SEQ ID NO: 1562961
ccgacaagaccuugauauu

SEQ ID NO: 1785400 - RNA, 19 nt, Artificial Sequence
  Description of Artificial Sequence: Synthetic oligonucleotide
  Antisense strand to SEQ ID NO: 1785399
aauaucaaggucuugucgg

SEQ ID NO: 1785401 - RNA, 19 nt, Artificial Sequence
  Description of Artificial Sequence: Synthetic oligonucleotide
  Sense strand starting at position 3020 of SEQ ID NO: 1562961
acaagaccuugauauugaa

SEQ ID NO: 1785402 - RNA, 19 nt, Artificial Sequence
  Description of Artificial Sequence: Synthetic oligonucleotide
  Antisense strand to SEQ ID NO: 1785401
uucaauaucaaggucuugu

SEQ ID NO: 1785403 - RNA, 19 nt, Artificial Sequence
  Description of Artificial Sequence: Synthetic oligonucleotide
  Sense strand starting at position 3203 of SEQ ID NO: 1562961
ggcagugucaaguaacaag

SEQ ID NO: 1785404 - RNA, 19 nt, Artificial Sequence
  Description of Artificial Sequence: Synthetic oligonucleotide
  Antisense strand to SEQ ID NO: 1785403
cuuguuacuugacacugcc

SEQ ID NO: 1785405 - RNA, 19 nt, Artificial Sequence
  Description of Artificial Sequence: Synthetic oligonucleotide
  Sense strand starting at position 3217 of SEQ ID NO: 1562961
acaagaacaucgggaauua

SEQ ID NO: 1785406 - RNA, 19 nt, Artificial Sequence
  Description of Artificial Sequence: Synthetic oligonucleotide
  Antisense strand to SEQ ID NO: 1785405
uaauucccgauguucuugu

SEQ ID NO: 1785407 - RNA, 19 nt, Artificial Sequence
  Description of Artificial Sequence: Synthetic oligonucleotide
  Sense strand starting at position 3227 of SEQ ID NO: 1562961
cgggaauuauggcuccaga

SEQ ID NO: 1785408 - RNA, 19 nt, Artificial Sequence
  Description of Artificial Sequence: Synthetic oligonucleotide
  Antisense strand to SEQ ID NO: 1785407
ucuggagccauaauucccg

SEQ ID NO: 1785409 - RNA, 19 nt, Artificial Sequence
  Description of Artificial Sequence: Synthetic oligonucleotide
  Sense strand starting at position 3230 of SEQ ID NO: 1562961
gaauuauggcuccagaugu

SEQ ID NO: 1785410 - RNA, 19 nt, Artificial Sequence
  Description of Artificial Sequence: Synthetic oligonucleotide
  Antisense strand to SEQ ID NO: 1785409
acaucuggagccauaauuc

SEQ ID NO: 1785411 - RNA, 19 nt, Artificial Sequence
  Description of Artificial Sequence: Synthetic oligonucleotide
  Sense strand starting at position 3878 of SEQ ID NO: 1562961
cccagauguucuuuaugag

SEQ ID NO: 1785412 - RNA, 19 nt, Artificial Sequence
  Description of Artificial Sequence: Synthetic oligonucleotide
  Antisense strand to SEQ ID NO: 1785411
cucauaaagaacaucuggg

SEQ ID NO: 1785413 - RNA, 19 nt, Artificial Sequence
  Description of Artificial Sequence: Synthetic oligonucleotide
  Sense strand starting at position 3881 of SEQ ID NO: 1562961
agauguucuuuaugagagg

SEQ ID NO: 1785414 - RNA, 19 nt, Artificial Sequence
  Description of Artificial Sequence: Synthetic oligonucleotide
  Antisense strand to SEQ ID NO: 1785413
ccucucauaaagaacaucu

SEQ ID NO: 1785415 - RNA, 19 nt, Artificial Sequence
  Description of Artificial Sequence: Synthetic oligonucleotide
  Sense strand starting at position 3882 of SEQ ID NO: 1562961
gauguucuuuaugagaggu

SEQ ID NO: 1785416 - RNA, 19 nt, Artificial Sequence
  Description of Artificial Sequence: Synthetic oligonucleotide
  Antisense strand to SEQ ID NO: 1785415
accucucauaaagaacauc

SEQ ID NO: 1785417 - RNA, 19 nt, Artificial Sequence
  Description of Artificial Sequence: Synthetic oligonucleotide
  Sense strand starting at position 3884 of SEQ ID NO: 1562961
uguucuuuaugagagguga

SEQ ID NO: 1785418 - RNA, 19 nt, Artificial Sequence
  Description of Artificial Sequence: Synthetic oligonucleotide
  Antisense strand to SEQ ID NO: 1785417
ucaccucucauaaagaaca

SEQ ID NO: 1785419 - RNA, 19 nt, Artificial Sequence
  Description of Artificial Sequence: Synthetic oligonucleotide
  Sense strand starting at position 3904 of SEQ ID NO: 1562961
gcagauguaguguguaugu

SEQ ID NO: 1785420 - RNA, 19 nt, Artificial Sequence
  Description of Artificial Sequence: Synthetic oligonucleotide
  Antisense strand to SEQ ID NO: 1785419
acauacacacuacaucugc

SEQ ID NO: 1785421 - RNA, 19 nt, Artificial Sequence
  Description of Artificial Sequence: Synthetic oligonucleotide
  Sense strand starting at position 3906 of SEQ ID NO: 1562961
agauguaguguguauguga

SEQ ID NO: 1785422 - RNA, 19 nt, Artificial Sequence
  Description of Artificial Sequence: Synthetic oligonucleotide
  Antisense strand to SEQ ID NO: 1785421
ucacauacacacuacaucu

SEQ ID NO: 1785423 - RNA, 19 nt, Artificial Sequence
  Description of Artificial Sequence: Synthetic oligonucleotide
  Sense strand starting at position 324 of SEQ ID NO: 1562962
ucuccucuugcaggguaua

SEQ ID NO: 1785424 - RNA, 19 nt, Artificial Sequence
  Description of Artificial Sequence: Synthetic oligonucleotide
  Antisense strand to SEQ ID NO: 1785423
uauacccugcaagaggaga

SEQ ID NO: 1785425 - RNA, 19 nt, Artificial Sequence
  Description of Artificial Sequence: Synthetic oligonucleotide
  Sense strand starting at position 325 of SEQ ID NO: 1562962
cuccucuugcaggguauaa

SEQ ID NO: 1785426 - RNA, 19 nt, Artificial Sequence
  Description of Artificial Sequence: Synthetic oligonucleotide
  Antisense strand to SEQ ID NO: 1785425
uuauacccugcaagaggag

SEQ ID NO: 1785427 - RNA, 19 nt, Artificial Sequence
  Description of Artificial Sequence: Synthetic oligonucleotide
  Sense strand starting at position 304 of SEQ ID NO: 1562963
gcaagucaagucuauaaga

SEQ ID NO: 1785428 - RNA, 19 nt, Artificial Sequence
  Description of Artificial Sequence: Synthetic oligonucleotide
  Antisense strand to SEQ ID NO: 1785427
ucuuauagacuugacuugc

SEQ ID NO: 1785429 - RNA, 19 nt, Artificial Sequence
  Description of Artificial Sequence: Synthetic oligonucleotide
  Sense strand starting at position 332 of SEQ ID NO: 1562963
uuauaugaugcauggaaag

SEQ ID NO: 1785430 - RNA, 19 nt, Artificial Sequence
  Description of Artificial Sequence: Synthetic oligonucleotide
  Antisense strand to SEQ ID NO: 1785429
cuuuccaugcaucauauaa

SEQ ID NO: 1785431 - RNA, 19 nt, Artificial Sequence
  Description of Artificial Sequence: Synthetic oligonucleotide
  Sense strand starting at position 334 of SEQ ID NO: 1562963
auaugaugcauggaaagcu

SEQ ID NO: 1785432 - RNA, 19 nt, Artificial Sequence
  Description of Artificial Sequence: Synthetic oligonucleotide
  Antisense strand to SEQ ID NO: 1785431
agcuuuccaugcaucauau

SEQ ID NO: 1785433 - RNA, 19 nt, Artificial Sequence
  Description of Artificial Sequence: Synthetic oligonucleotide
  Sense strand starting at position 435 of SEQ ID NO: 1562963
agagaaggcuggucugaac

SEQ ID NO: 1785434 - RNA, 19 nt, Artificial Sequence
  Description of Artificial Sequence: Synthetic oligonucleotide
  Antisense strand to SEQ ID NO: 1785433
guucagaccagccuucucu

SEQ ID NO: 1785435 - RNA, 19 nt, Artificial Sequence
  Description of Artificial Sequence: Synthetic oligonucleotide
  Sense strand starting at position 511 of SEQ ID NO: 1562963
gcuucuccuggucaaacau

SEQ ID NO: 1785436 - RNA, 19 nt, Artificial Sequence
  Description of Artificial Sequence: Synthetic oligonucleotide
  Antisense strand to SEQ ID NO: 1785435
auguuugaccaggagaagc

SEQ ID NO: 1785437 - RNA, 19 nt, Artificial Sequence
  Description of Artificial Sequence: Synthetic oligonucleotide
  Sense strand starting at position 634 of SEQ ID NO: 1562963
aucagauauugggucauuc

SEQ ID NO: 1785438 - RNA, 19 nt, Artificial Sequence
  Description of Artificial Sequence: Synthetic oligonucleotide
  Antisense strand to SEQ ID NO: 1785437
gaaugacccaauaucugau

SEQ ID NO: 1785439 - RNA, 19 nt, Artificial Sequence
  Description of Artificial Sequence: Synthetic oligonucleotide
  Sense strand starting at position 638 of SEQ ID NO: 1562963
gauauugggucauuccaaa

SEQ ID NO: 1785440 - RNA, 19 nt, Artificial Sequence
  Description of Artificial Sequence: Synthetic oligonucleotide
  Antisense strand to SEQ ID NO: 1785439
uuuggaaugacccaauauc

SEQ ID NO: 1785441 - RNA, 19 nt, Artificial Sequence
  Description of Artificial Sequence: Synthetic oligonucleotide
  Sense strand starting at position 720 of SEQ ID NO: 1562963
uggccuuauuuacaggaga

SEQ ID NO: 1785442 - RNA, 19 nt, Artificial Sequence
  Description of Artificial Sequence: Synthetic oligonucleotide
  Antisense strand to SEQ ID NO: 1785441
ucuccuguaaauaaggcca

SEQ ID NO: 1785443 - RNA, 19 nt, Artificial Sequence
  Description of Artificial Sequence: Synthetic oligonucleotide
  Sense strand starting at position 731 of SEQ ID NO: 1562963
acaggagauguaggcuaaa

SEQ ID NO: 1785444 - RNA, 19 nt, Artificial Sequence
  Description of Artificial Sequence: Synthetic oligonucleotide
  Antisense strand to SEQ ID NO: 1785443
uuuagccuacaucuccugu

SEQ ID NO: 1785445 - RNA, 19 nt, Artificial Sequence
  Description of Artificial Sequence: Synthetic oligonucleotide
  Sense strand starting at position 734 of SEQ ID NO: 1562963
ggagauguaggcuaaagug

SEQ ID NO: 1785446 - RNA, 19 nt, Artificial Sequence
  Description of Artificial Sequence: Synthetic oligonucleotide
  Antisense strand to SEQ ID NO: 1785445
cacuuuagccuacaucucc

SEQ ID NO: 1785447 - RNA, 19 nt, Artificial Sequence
  Description of Artificial Sequence: Synthetic oligonucleotide
  Sense strand starting at position 744 of SEQ ID NO: 1562963
gcuaaagugauggaagugu

SEQ ID NO: 1785448 - RNA, 19 nt, Artificial Sequence
  Description of Artificial Sequence: Synthetic oligonucleotide
  Antisense strand to SEQ ID NO: 1785447
acacuuccaucacuuuagc

SEQ ID NO: 1785449 - RNA, 19 nt, Artificial Sequence
  Description of Artificial Sequence: Synthetic oligonucleotide
  Sense strand starting at position 748 of SEQ ID NO: 1562963
aagugauggaagugucaaa

SEQ ID NO: 1785450 - RNA, 19 nt, Artificial Sequence
  Description of Artificial Sequence: Synthetic oligonucleotide
  Antisense strand to SEQ ID NO: 1785449
uuugacacuuccaucacuu

SEQ ID NO: 1785451 - RNA, 19 nt, Artificial Sequence
  Description of Artificial Sequence: Synthetic oligonucleotide
  Sense strand starting at position 781 of SEQ ID NO: 1562963
ucacauuugccuugagagc

SEQ ID NO: 1785452 - RNA, 19 nt, Artificial Sequence
  Description of Artificial Sequence: Synthetic oligonucleotide
  Antisense strand to SEQ ID NO: 1785451
gcucucaaggcaaauguga

SEQ ID NO: 1785453 - RNA, 19 nt, Artificial Sequence
  Description of Artificial Sequence: Synthetic oligonucleotide
  Sense strand starting at position 1008 of SEQ ID NO: 1562963
guccuaguucugccucuuu

SEQ ID NO: 1785454 - RNA, 19 nt, Artificial Sequence
  Description of Artificial Sequence: Synthetic oligonucleotide
  Antisense strand to SEQ ID NO: 1785453
aaagaggcagaacuaggac

SEQ ID NO: 1785455 - RNA, 19 nt, Artificial Sequence
  Description of Artificial Sequence: Synthetic oligonucleotide
  Sense strand starting at position 1289 of SEQ ID NO: 1562963
uugagucccgcgcuguaaa

SEQ ID NO: 1785456 - RNA, 19 nt, Artificial Sequence
  Description of Artificial Sequence: Synthetic oligonucleotide
  Antisense strand to SEQ ID NO: 1785455
uuuacagcgcgggacucaa

SEQ ID NO: 1785457 - RNA, 19 nt, Artificial Sequence
  Description of Artificial Sequence: Synthetic oligonucleotide
  Sense strand starting at position 1310 of SEQ ID NO: 1562963
cggcaucucagagaauuac

SEQ ID NO: 1785458 - RNA, 19 nt, Artificial Sequence
  Description of Artificial Sequence: Synthetic oligonucleotide
  Antisense strand to SEQ ID NO: 1785457
guaauucucugagaugccg

SEQ ID NO: 1785459 - RNA, 19 nt, Artificial Sequence
  Description of Artificial Sequence: Synthetic oligonucleotide
  Sense strand starting at position 1661 of SEQ ID NO: 1562963
guauucaugggacgcagaa

SEQ ID NO: 1785460 - RNA, 19 nt, Artificial Sequence
  Description of Artificial Sequence: Synthetic oligonucleotide
  Antisense strand to SEQ ID NO: 1785459
uucugcgucccaugaauac

SEQ ID NO: 1785461 - RNA, 19 nt, Artificial Sequence
  Description of Artificial Sequence: Synthetic oligonucleotide
  Sense strand starting at position 2453 of SEQ ID NO: 1562963
agaacuaacucauuccgga

SEQ ID NO: 1785462 - RNA, 19 nt, Artificial Sequence
  Description of Artificial Sequence: Synthetic oligonucleotide
  Antisense strand to SEQ ID NO: 1785461
uccggaaugaguuaguucu

SEQ ID NO: 1785463 - RNA, 19 nt, Artificial Sequence
  Description of Artificial Sequence: Synthetic oligonucleotide
  Sense strand starting at position 2458 of SEQ ID NO: 1562963
uaacucauuccggaaagua

SEQ ID NO: 1785464 - RNA, 19 nt, Artificial Sequence
  Description of Artificial Sequence: Synthetic oligonucleotide
  Antisense strand to SEQ ID NO: 1785463
uacuuuccggaaugaguua

SEQ ID NO: 1785465 - RNA, 19 nt, Artificial Sequence
  Description of Artificial Sequence: Synthetic oligonucleotide
  Sense strand starting at position 2531 of SEQ ID NO: 1562963
gaaucaugggaauguguca

SEQ ID NO: 1785466 - RNA, 19 nt, Artificial Sequence
  Description of Artificial Sequence: Synthetic oligonucleotide
  Antisense strand to SEQ ID NO: 1785465
ugacacauucccaugauuc

SEQ ID NO: 1785467 - RNA, 19 nt, Artificial Sequence
  Description of Artificial Sequence: Synthetic oligonucleotide
  Sense strand starting at position 2562 of SEQ ID NO: 1562963
gcugucuuuaaggagaucu

SEQ ID NO: 1785468 - RNA, 19 nt, Artificial Sequence
  Description of Artificial Sequence: Synthetic oligonucleotide
  Antisense strand to SEQ ID NO: 1785467
agaucuccuuaaagacagc

SEQ ID NO: 1785469 - RNA, 19 nt, Artificial Sequence
  Description of Artificial Sequence: Synthetic oligonucleotide
  Sense strand starting at position 2573 of SEQ ID NO: 1562963
ggagaucuuacuggccaag

SEQ ID NO: 1785470 - RNA, 19 nt, Artificial Sequence
  Description of Artificial Sequence: Synthetic oligonucleotide
  Antisense strand to SEQ ID NO: 1785469
cuuggccaguaagaucucc

SEQ ID NO: 1785471 - RNA, 19 nt, Artificial Sequence
  Description of Artificial Sequence: Synthetic oligonucleotide
  Sense strand starting at position 2576 of SEQ ID NO: 1562963
gaucuuacuggccaaguca

SEQ ID NO: 1785472 - RNA, 19 nt, Artificial Sequence
  Description of Artificial Sequence: Synthetic oligonucleotide
  Antisense strand to SEQ ID NO: 1785471
ugacuuggccaguaagauc

SEQ ID NO: 1785473 - RNA, 19 nt, Artificial Sequence
  Description of Artificial Sequence: Synthetic oligonucleotide
  Sense strand starting at position 2654 of SEQ ID NO: 1562963
auaguaauccaugagucuu

SEQ ID NO: 1785474 - RNA, 19 nt, Artificial Sequence
  Description of Artificial Sequence: Synthetic oligonucleotide
  Antisense strand to SEQ ID NO: 1785473
aagacucauggauuacuau

SEQ ID NO: 1785475 - RNA, 19 nt, Artificial Sequence
  Description of Artificial Sequence: Synthetic oligonucleotide
  Sense strand starting at position 2656 of SEQ ID NO: 1562963
aguaauccaugagucuuua

SEQ ID NO: 1785476 - RNA, 19 nt, Artificial Sequence
  Description of Artificial Sequence: Synthetic oligonucleotide
  Antisense strand to SEQ ID NO: 1785475
uaaagacucauggauuacu

SEQ ID NO: 1785477 - RNA, 19 nt, Artificial Sequence
  Description of Artificial Sequence: Synthetic oligonucleotide
  Sense strand starting at position 2691 of SEQ ID NO: 1562963
agcauauuaaugggugaag

SEQ ID NO: 1785478 - RNA, 19 nt, Artificial Sequence
  Description of Artificial Sequence: Synthetic oligonucleotide
  Antisense strand to SEQ ID NO: 1785477
cuucacccauuaauaugcu

SEQ ID NO: 1785479 - RNA, 19 nt, Artificial Sequence
  Description of Artificial Sequence: Synthetic oligonucleotide
  Sense strand starting at position 2727 of SEQ ID NO: 1562963
guagaaugcuagcuaauaa

SEQ ID NO: 1785480 - RNA, 19 nt, Artificial Sequence
  Description of Artificial Sequence: Synthetic oligonucleotide
  Antisense strand to SEQ ID NO: 1785479
uuauuagcuagcauucuac

SEQ ID NO: 1785481 - RNA, 19 nt, Artificial Sequence
  Description of Artificial Sequence: Synthetic oligonucleotide
  Sense strand starting at position 2738 of SEQ ID NO: 1562963
gcuaauaaacaugguggaa

SEQ ID NO: 1785482 - RNA, 19 nt, Artificial Sequence
  Description of Artificial Sequence: Synthetic oligonucleotide
  Antisense strand to SEQ ID NO: 1785481
uuccaccauguuuauuagc

SEQ ID NO: 1785483 - RNA, 19 nt, Artificial Sequence
  Description of Artificial Sequence: Synthetic oligonucleotide
  Sense strand starting at position 2763 of SEQ ID NO: 1562963
aaucaauaaugugugguaa

SEQ ID NO: 1785484 - RNA, 19 nt, Artificial Sequence
  Description of Artificial Sequence: Synthetic oligonucleotide
  Antisense strand to SEQ ID NO: 1785483
uuaccacacauuauugauu

SEQ ID NO: 1785485 - RNA, 19 nt, Artificial Sequence
  Description of Artificial Sequence: Synthetic oligonucleotide
  Sense strand starting at position 2764 of SEQ ID NO: 1562963
aucaauaaugugugguaaa

SEQ ID NO: 1785486 - RNA, 19 nt, Artificial Sequence
  Description of Artificial Sequence: Synthetic oligonucleotide
  Antisense strand to SEQ ID NO: 1785485
uuuaccacacauuauugau

SEQ ID NO: 1785487 - RNA, 19 nt, Artificial Sequence
  Description of Artificial Sequence: Synthetic oligonucleotide
  Sense strand starting at position 2855 of SEQ ID NO: 1562963
ggugauguuacagagguuu

SEQ ID NO: 1785488 - RNA, 19 nt, Artificial Sequence
  Description of Artificial Sequence: Synthetic oligonucleotide
  Antisense strand to SEQ ID NO: 1785487
aaaccucuguaacaucacc

SEQ ID NO: 1785489 - RNA, 19 nt, Artificial Sequence
  Description of Artificial Sequence: Synthetic oligonucleotide
  Sense strand starting at position 2857 of SEQ ID NO: 1562963
ugauguuacagagguuuaa

SEQ ID NO: 1785490 - RNA, 19 nt, Artificial Sequence
  Description of Artificial Sequence: Synthetic oligonucleotide
  Antisense strand to SEQ ID NO: 1785489
uuaaaccucuguaacauca

SEQ ID NO: 1785491 - RNA, 19 nt, Artificial Sequence
  Description of Artificial Sequence: Synthetic oligonucleotide
  Sense strand starting at position 2861 of SEQ ID NO: 1562963
guuacagagguuuaaccua

SEQ ID NO: 1785492 - RNA, 19 nt, Artificial Sequence
  Description of Artificial Sequence: Synthetic oligonucleotide
  Antisense strand to SEQ ID NO: 1785491
uagguuaaaccucuguaac

SEQ ID NO: 1785493 - RNA, 19 nt, Artificial Sequence
  Description of Artificial Sequence: Synthetic oligonucleotide
  Sense strand starting at position 2917 of SEQ ID NO: 1562963
acuaguuaaugggucagau

SEQ ID NO: 1785494 - RNA, 19 nt, Artificial Sequence
  Description of Artificial Sequence: Synthetic oligonucleotide
  Antisense strand to SEQ ID NO: 1785493
aucugacccauuaacuagu

SEQ ID NO: 1785495 - RNA, 19 nt, Artificial Sequence
  Description of Artificial Sequence: Synthetic oligonucleotide
  Sense strand starting at position 2960 of SEQ ID NO: 1562963
ugagaacacaucuguggua

SEQ ID NO: 1785496 - RNA, 19 nt, Artificial Sequence
  Description of Artificial Sequence: Synthetic oligonucleotide
  Antisense strand to SEQ ID NO: 1785495
uaccacagauguguucuca

SEQ ID NO: 1785497 - RNA, 19 nt, Artificial Sequence
  Description of Artificial Sequence: Synthetic oligonucleotide
  Sense strand starting at position 2961 of SEQ ID NO: 1562963
gagaacacaucugugguau

SEQ ID NO: 1785498 - RNA, 19 nt, Artificial Sequence
  Description of Artificial Sequence: Synthetic oligonucleotide
  Antisense strand to SEQ ID NO: 1785497
auaccacagauguguucuc

SEQ ID NO: 1785499 - RNA, 19 nt, Artificial Sequence
  Description of Artificial Sequence: Synthetic oligonucleotide
  Sense strand starting at position 2962 of SEQ ID NO: 1562963
agaacacaucugugguauu

SEQ ID NO: 1785500 - RNA, 19 nt, Artificial Sequence
  Description of Artificial Sequence: Synthetic oligonucleotide
  Antisense strand to SEQ ID NO: 1785499
aauaccacagauguguucu

SEQ ID NO: 1785501 - RNA, 19 nt, Artificial Sequence
  Description of Artificial Sequence: Synthetic oligonucleotide
  Sense strand starting at position 3093 of SEQ ID NO: 1562963
acuguuccaguuuaaagga

SEQ ID NO: 1785502 - RNA, 19 nt, Artificial Sequence
  Description of Artificial Sequence: Synthetic oligonucleotide
  Antisense strand to SEQ ID NO: 1785501
uccuuuaaacuggaacagu

SEQ ID NO: 1785503 - RNA, 19 nt, Artificial Sequence
  Description of Artificial Sequence: Synthetic oligonucleotide
  Sense strand starting at position 3375 of SEQ ID NO: 1562963
caguuaucccaggaacggu

SEQ ID NO: 1785504 - RNA, 19 nt, Artificial Sequence
  Description of Artificial Sequence: Synthetic oligonucleotide
  Antisense strand to SEQ ID NO: 1785503
accguuccugggauaacug

SEQ ID NO: 1785505 - RNA, 19 nt, Artificial Sequence
  Description of Artificial Sequence: Synthetic oligonucleotide
  Sense strand starting at position 3788 of SEQ ID NO: 1562963
aaguuccugugaucaagaa

SEQ ID NO: 1785506 - RNA, 19 nt, Artificial Sequence
  Description of Artificial Sequence: Synthetic oligonucleotide
  Antisense strand to SEQ ID NO: 1785505
uucuugaucacaggaacuu

SEQ ID NO: 1785507 - RNA, 19 nt, Artificial Sequence
  Description of Artificial Sequence: Synthetic oligonucleotide
  Sense strand starting at position 447 of SEQ ID NO: 1562964
gggcaacacgagugauacu

SEQ ID NO: 1785508 - RNA, 19 nt, Artificial Sequence
  Description of Artificial Sequence: Synthetic oligonucleotide
  Antisense strand to SEQ ID NO: 1785507
aguaucacucguguugccc

SEQ ID NO: 1785509 - RNA, 19 nt, Artificial Sequence
  Description of Artificial Sequence: Synthetic oligonucleotide
  Sense strand starting at position 518 of SEQ ID NO: 1562964
cccucaguccaugggagaa

SEQ ID NO: 1785510 - RNA, 19 nt, Artificial Sequence
  Description of Artificial Sequence: Synthetic oligonucleotide
  Antisense strand to SEQ ID NO: 1785509
uucucccauggacugaggg

SEQ ID NO: 1785511 - RNA, 19 nt, Artificial Sequence
  Description of Artificial Sequence: Synthetic oligonucleotide
  Sense strand starting at position 555 of SEQ ID NO: 1562964
cagggucaguccuuugaag

SEQ ID NO: 1785512 - RNA, 19 nt, Artificial Sequence
  Description of Artificial Sequence: Synthetic oligonucleotide
  Antisense strand to SEQ ID NO: 1785511
cuucaaaggacugacccug

SEQ ID NO: 1785513 - RNA, 19 nt, Artificial Sequence
  Description of Artificial Sequence: Synthetic oligonucleotide
  Sense strand starting at position 557 of SEQ ID NO: 1562964
gggucaguccuuugaaguc

SEQ ID NO: 1785514 - RNA, 19 nt, Artificial Sequence
  Description of Artificial Sequence: Synthetic oligonucleotide
  Antisense strand to SEQ ID NO: 1785513
gacuucaaaggacugaccc

SEQ ID NO: 1785515 - RNA, 19 nt, Artificial Sequence
  Description of Artificial Sequence: Synthetic oligonucleotide
  Sense strand starting at position 604 of SEQ ID NO: 1562964
ccaacagcuuggugacauu

SEQ ID NO: 1785516 - RNA, 19 nt, Artificial Sequence
  Description of Artificial Sequence: Synthetic oligonucleotide
  Antisense strand to SEQ ID NO: 1785515
aaugucaccaagcuguugg

SEQ ID NO: 1785517 - RNA, 19 nt, Artificial Sequence
  Description of Artificial Sequence: Synthetic oligonucleotide
  Sense strand starting at position 611 of SEQ ID NO: 1562964
cuuggugacauuggaggaa

SEQ ID NO: 1785518 - RNA, 19 nt, Artificial Sequence
  Description of Artificial Sequence: Synthetic oligonucleotide
  Antisense strand to SEQ ID NO: 1785517
uuccuccaaugucaccaag

SEQ ID NO: 1785519 - RNA, 19 nt, Artificial Sequence
  Description of Artificial Sequence: Synthetic oligonucleotide
  Sense strand starting at position 654 of SEQ ID NO: 1562964
agcagaagcugggauaugu

SEQ ID NO: 1785520 - RNA, 19 nt, Artificial Sequence
  Description of Artificial Sequence: Synthetic oligonucleotide
  Antisense strand to SEQ ID NO: 1785519
acauaucccagcuucugcu

SEQ ID NO: 1785521 - RNA, 19 nt, Artificial Sequence
  Description of Artificial Sequence: Synthetic oligonucleotide
  Sense strand starting at position 749 of SEQ ID NO: 1562964
cgauuuaccucucggacca

SEQ ID NO: 1785522 - RNA, 19 nt, Artificial Sequence
  Description of Artificial Sequence: Synthetic oligonucleotide
  Antisense strand to SEQ ID NO: 1785521
ugguccgagagguaaaucg

SEQ ID NO: 1785523 - RNA, 19 nt, Artificial Sequence
  Description of Artificial Sequence: Synthetic oligonucleotide
  Sense strand starting at position 771 of SEQ ID NO: 1562964
ugugguucaggaugagaag

SEQ ID NO: 1785524 - RNA, 19 nt, Artificial Sequence
  Description of Artificial Sequence: Synthetic oligonucleotide
  Antisense strand to SEQ ID NO: 1785523
cuucucauccugaaccaca

SEQ ID NO: 1785525 - RNA, 19 nt, Artificial Sequence
  Description of Artificial Sequence: Synthetic oligonucleotide
  Sense strand starting at position 949 of SEQ ID NO: 1562964
gccauaagcuccuugaggu

SEQ ID NO: 1785526 - RNA, 19 nt, Artificial Sequence
  Description of Artificial Sequence: Synthetic oligonucleotide
  Antisense strand to SEQ ID NO: 1785525
accucaaggagcuuauggc

SEQ ID NO: 1785527 - RNA, 19 nt, Artificial Sequence
  Description of Artificial Sequence: Synthetic oligonucleotide
  Sense strand starting at position 953 of SEQ ID NO: 1562964
uaagcuccuugaggucaaa

SEQ ID NO: 1785528 - RNA, 19 nt, Artificial Sequence
  Description of Artificial Sequence: Synthetic oligonucleotide
  Antisense strand to SEQ ID NO: 1785527
uuugaccucaaggagcuua

SEQ ID NO: 1785529 - RNA, 19 nt, Artificial Sequence
  Description of Artificial Sequence: Synthetic oligonucleotide
  Sense strand starting at position 1308 of SEQ ID NO: 1562964
ggaccagggccuugggaua

SEQ ID NO: 1785530 - RNA, 19 nt, Artificial Sequence
  Description of Artificial Sequence: Synthetic oligonucleotide
  Antisense strand to SEQ ID NO: 1785529
uaucccaaggcccuggucc

SEQ ID NO: 1785531 - RNA, 19 nt, Artificial Sequence
  Description of Artificial Sequence: Synthetic oligonucleotide
  Sense strand starting at position 1343 of SEQ ID NO: 1562964
cccuuauucuccuggugga

SEQ ID NO: 1785532 - RNA, 19 nt, Artificial Sequence
  Description of Artificial Sequence: Synthetic oligonucleotide
  Antisense strand to SEQ ID NO: 1785531
uccaccaggagaauaaggg

SEQ ID NO: 1785533 - RNA, 19 nt, Artificial Sequence
  Description of Artificial Sequence: Synthetic oligonucleotide
  Sense strand starting at position 1344 of SEQ ID NO: 1562964
ccuuauucuccugguggaa

SEQ ID NO: 1785534 - RNA, 19 nt, Artificial Sequence
  Description of Artificial Sequence: Synthetic oligonucleotide
  Antisense strand to SEQ ID NO: 1785533
uuccaccaggagaauaagg

SEQ ID NO: 1785535 - RNA, 19 nt, Artificial Sequence
  Description of Artificial Sequence: Synthetic oligonucleotide
  Sense strand starting at position 1346 of SEQ ID NO: 1562964
uuauucuccugguggaacu

SEQ ID NO: 1785536 - RNA, 19 nt, Artificial Sequence
  Description of Artificial Sequence: Synthetic oligonucleotide
  Antisense strand to SEQ ID NO: 1785535
aguuccaccaggagaauaa

SEQ ID NO: 1785537 - RNA, 19 nt, Artificial Sequence
  Description of Artificial Sequence: Synthetic oligonucleotide
  Sense strand starting at position 2667 of SEQ ID NO: 1562964
cugugaaaugggcaccaua

SEQ ID NO: 1785538 - RNA, 19 nt, Artificial Sequence
  Description of Artificial Sequence: Synthetic oligonucleotide
  Antisense strand to SEQ ID NO: 1785537
uauggugcccauuucacag

SEQ ID NO: 1785539 - RNA, 19 nt, Artificial Sequence
  Description of Artificial Sequence: Synthetic oligonucleotide
  Sense strand starting at position 3033 of SEQ ID NO: 1562964
ucaaaugucuacuggaaug

SEQ ID NO: 1785540 - RNA, 19 nt, Artificial Sequence
  Description of Artificial Sequence: Synthetic oligonucleotide
  Antisense strand to SEQ ID NO: 1785539
cauuccaguagacauuuga

SEQ ID NO: 1785541 - RNA, 19 nt, Artificial Sequence
  Description of Artificial Sequence: Synthetic oligonucleotide
  Sense strand starting at position 3038 of SEQ ID NO: 1562964
ugucuacuggaauguggaa

SEQ ID NO: 1785542 - RNA, 19 nt, Artificial Sequence
  Description of Artificial Sequence: Synthetic oligonucleotide
  Antisense strand to SEQ ID NO: 1785541
uuccacauuccaguagaca

SEQ ID NO: 1785543 - RNA, 19 nt, Artificial Sequence
  Description of Artificial Sequence: Synthetic oligonucleotide
  Sense strand starting at position 3109 of SEQ ID NO: 1562964
ggagcuggcucagucugaa

SEQ ID NO: 1785544 - RNA, 19 nt, Artificial Sequence
  Description of Artificial Sequence: Synthetic oligonucleotide
  Antisense strand to SEQ ID NO: 1785543
uucagacugagccagcucc

SEQ ID NO: 1785545 - RNA, 19 nt, Artificial Sequence
  Description of Artificial Sequence: Synthetic oligonucleotide
  Sense strand starting at position 3122 of SEQ ID NO: 1562964
ucugaaaccugagccuuua

SEQ ID NO: 1785546 - RNA, 19 nt, Artificial Sequence
  Description of Artificial Sequence: Synthetic oligonucleotide
  Antisense strand to SEQ ID NO: 1785545
uaaaggcucagguuucaga

SEQ ID NO: 1785547 - RNA, 19 nt, Artificial Sequence
  Description of Artificial Sequence: Synthetic oligonucleotide
  Sense strand starting at position 3500 of SEQ ID NO: 1562964
ccaaguugcuccugaagaa

SEQ ID NO: 1785548 - RNA, 19 nt, Artificial Sequence
  Description of Artificial Sequence: Synthetic oligonucleotide
  Antisense strand to SEQ ID NO: 1785547
uucuucaggagcaacuugg

SEQ ID NO: 1785549 - RNA, 19 nt, Artificial Sequence
  Description of Artificial Sequence: Synthetic oligonucleotide
  Sense strand starting at position 3501 of SEQ ID NO: 1562964
caaguugcuccugaagaag

SEQ ID NO: 1785550 - RNA, 19 nt, Artificial Sequence
  Description of Artificial Sequence: Synthetic oligonucleotide
  Antisense strand to SEQ ID NO: 1785549
cuucuucaggagcaacuug

SEQ ID NO: 1785551 - RNA, 19 nt, Artificial Sequence
  Description of Artificial Sequence: Synthetic oligonucleotide
  Sense strand starting at position 3515 of SEQ ID NO: 1562964
agaagugugagacggguau

SEQ ID NO: 1785552 - RNA, 19 nt, Artificial Sequence
  Description of Artificial Sequence: Synthetic oligonucleotide
  Antisense strand to SEQ ID NO: 1785551
auacccgucucacacuucu

SEQ ID NO: 1785553 - RNA, 19 nt, Artificial Sequence
  Description of Artificial Sequence: Synthetic oligonucleotide
  Sense strand starting at position 3517 of SEQ ID NO: 1562964
aagugugagacggguauau

SEQ ID NO: 1785554 - RNA, 19 nt, Artificial Sequence
  Description of Artificial Sequence: Synthetic oligonucleotide
  Antisense strand to SEQ ID NO: 1785553
auauacccgucucacacuu

SEQ ID NO: 1785555 - RNA, 19 nt, Artificial Sequence
  Description of Artificial Sequence: Synthetic oligonucleotide
  Sense strand starting at position 3519 of SEQ ID NO: 1562964
gugugagacggguauauaa

SEQ ID NO: 1785556 - RNA, 19 nt, Artificial Sequence
  Description of Artificial Sequence: Synthetic oligonucleotide
  Antisense strand to SEQ ID NO: 1785555
uuauauacccgucucacac

SEQ ID NO: 1785557 - RNA, 19 nt, Artificial Sequence
  Description of Artificial Sequence: Synthetic oligonucleotide
  Sense strand starting at position 3546 of SEQ ID NO: 1562964
ccgauaucagccuaaagac

SEQ ID NO: 1785558 - RNA, 19 nt, Artificial Sequence
  Description of Artificial Sequence: Synthetic oligonucleotide
  Antisense strand to SEQ ID NO: 1785557
gucuuuaggcugauaucgg

SEQ ID NO: 1785559 - RNA, 19 nt, Artificial Sequence
  Description of Artificial Sequence: Synthetic oligonucleotide
  Sense strand starting at position 3606 of SEQ ID NO: 1562964
aucuaaagaugguguacau

SEQ ID NO: 1785560 - RNA, 19 nt, Artificial Sequence
  Description of Artificial Sequence: Synthetic oligonucleotide
  Antisense strand to SEQ ID NO: 1785559
auguacaccaucuuuagau

SEQ ID NO: 1785561 - RNA, 19 nt, Artificial Sequence
  Description of Artificial Sequence: Synthetic oligonucleotide
  Sense strand starting at position 3615 of SEQ ID NO: 1562964
ugguguacaucagaggaaa

SEQ ID NO: 1785562 - RNA, 19 nt, Artificial Sequence
  Description of Artificial Sequence: Synthetic oligonucleotide
  Antisense strand to SEQ ID NO: 1785561
uuuccucugauguacacca

SEQ ID NO: 1785563 - RNA, 19 nt, Artificial Sequence
  Description of Artificial Sequence: Synthetic oligonucleotide
  Sense strand starting at position 3627 of SEQ ID NO: 1562964
gaggaaacauuguguuugu

SEQ ID NO: 1785564 - RNA, 19 nt, Artificial Sequence
  Description of Artificial Sequence: Synthetic oligonucleotide
  Antisense strand to SEQ ID NO: 1785563
acaaacacaauguuuccuc

SEQ ID NO: 1785565 - RNA, 19 nt, Artificial Sequence
  Description of Artificial Sequence: Synthetic oligonucleotide
  Sense strand starting at position 3630 of SEQ ID NO: 1562964
gaaacauuguguuugugga

SEQ ID NO: 1785566 - RNA, 19 nt, Artificial Sequence
  Description of Artificial Sequence: Synthetic oligonucleotide
  Antisense strand to SEQ ID NO: 1785565
uccacaaacacaauguuuc

SEQ ID NO: 1785567 - RNA, 19 nt, Artificial Sequence
  Description of Artificial Sequence: Synthetic oligonucleotide
  Sense strand starting at position 3632 of SEQ ID NO: 1562964
aacauuguguuuguggaga

SEQ ID NO: 1785568 - RNA, 19 nt, Artificial Sequence
  Description of Artificial Sequence: Synthetic oligonucleotide
  Antisense strand to SEQ ID NO: 1785567
ucuccacaaacacaauguu

SEQ ID NO: 1785569 - RNA, 19 nt, Artificial Sequence
  Description of Artificial Sequence: Synthetic oligonucleotide
  Sense strand starting at position 3634 of SEQ ID NO: 1562964
cauuguguuuguggagaua

SEQ ID NO: 1785570 - RNA, 19 nt, Artificial Sequence
  Description of Artificial Sequence: Synthetic oligonucleotide
  Antisense strand to SEQ ID NO: 1785569
uaucuccacaaacacaaug

SEQ ID NO: 1785571 - RNA, 19 nt, Artificial Sequence
  Description of Artificial Sequence: Synthetic oligonucleotide
  Sense strand starting at position 3637 of SEQ ID NO: 1562964
uguguuuguggagauacaa

SEQ ID NO: 1785572 - RNA, 19 nt, Artificial Sequence
  Description of Artificial Sequence: Synthetic oligonucleotide
  Antisense strand to SEQ ID NO: 1785571
uuguaucuccacaaacaca

SEQ ID NO: 1785573 - RNA, 19 nt, Artificial Sequence
  Description of Artificial Sequence: Synthetic oligonucleotide
  Sense strand starting at position 3667 of SEQ ID NO: 1562964
cauggacuguuugguaaau

SEQ ID NO: 1785574 - RNA, 19 nt, Artificial Sequence
  Description of Artificial Sequence: Synthetic oligonucleotide
  Antisense strand to SEQ ID NO: 1785573
auuuaccaaacaguccaug

SEQ ID NO: 1785575 - RNA, 19 nt, Artificial Sequence
  Description of Artificial Sequence: Synthetic oligonucleotide
  Sense strand starting at position 3668 of SEQ ID NO: 1562964
auggacuguuugguaaauu

SEQ ID NO: 1785576 - RNA, 19 nt, Artificial Sequence
  Description of Artificial Sequence: Synthetic oligonucleotide
  Antisense strand to SEQ ID NO: 1785575
aauuuaccaaacaguccau

SEQ ID NO: 1785577 - RNA, 19 nt, Artificial Sequence
  Description of Artificial Sequence: Synthetic oligonucleotide
  Sense strand starting at position 3669 of SEQ ID NO: 1562964
uggacuguuugguaaauug

SEQ ID NO: 1785578 - RNA, 19 nt, Artificial Sequence
  Description of Artificial Sequence: Synthetic oligonucleotide
  Antisense strand to SEQ ID NO: 1785577
caauuuaccaaacagucca

SEQ ID NO: 1785579 - RNA, 19 nt, Artificial Sequence
  Description of Artificial Sequence: Synthetic oligonucleotide
  Sense strand starting at position 3677 of SEQ ID NO: 1562964
uugguaaauugugcuaaga

SEQ ID NO: 1785580 - RNA, 19 nt, Artificial Sequence
  Description of Artificial Sequence: Synthetic oligonucleotide
  Antisense strand to SEQ ID NO: 1785579
ucuuagcacaauuuaccaa

SEQ ID NO: 1785581 - RNA, 19 nt, Artificial Sequence
  Description of Artificial Sequence: Synthetic oligonucleotide
  Sense strand starting at position 3679 of SEQ ID NO: 1562964
gguaaauugugcuaagaaa

SEQ ID NO: 1785582 - RNA, 19 nt, Artificial Sequence
  Description of Artificial Sequence: Synthetic oligonucleotide
  Antisense strand to SEQ ID NO: 1785581
uuucuuagcacaauuuacc

SEQ ID NO: 1785583 - RNA, 19 nt, Artificial Sequence
  Description of Artificial Sequence: Synthetic oligonucleotide
  Sense strand starting at position 219 of SEQ ID NO: 1562965
ggcagacaagauugcuauu

SEQ ID NO: 1785584 - RNA, 19 nt, Artificial Sequence
  Description of Artificial Sequence: Synthetic oligonucleotide
  Antisense strand to SEQ ID NO: 1785583
aauagcaaucuugucugcc

SEQ ID NO: 1785585 - RNA, 19 nt, Artificial Sequence
  Description of Artificial Sequence: Synthetic oligonucleotide
  Sense strand starting at position 222 of SEQ ID NO: 1562965
agacaagauugcuauuuau

SEQ ID NO: 1785586 - RNA, 19 nt, Artificial Sequence
  Description of Artificial Sequence: Synthetic oligonucleotide
  Antisense strand to SEQ ID NO: 1785585
auaaauagcaaucuugucu

SEQ ID NO: 1785587 - RNA, 19 nt, Artificial Sequence
  Description of Artificial Sequence: Synthetic oligonucleotide
  Sense strand starting at position 265 of SEQ ID NO: 1562965
uagcucugagcucagagau

SEQ ID NO: 1785588 - RNA, 19 nt, Artificial Sequence
  Description of Artificial Sequence: Synthetic oligonucleotide
  Antisense strand to SEQ ID NO: 1785587
aucucugagcucagagcua

SEQ ID NO: 1785589 - RNA, 19 nt, Artificial Sequence
  Description of Artificial Sequence: Synthetic oligonucleotide
  Sense strand starting at position 275 of SEQ ID NO: 1562965
cucagagauuagucaguau

SEQ ID NO: 1785590 - RNA, 19 nt, Artificial Sequence
  Description of Artificial Sequence: Synthetic oligonucleotide
  Antisense strand to SEQ ID NO: 1785589
auacugacuaaucucugag

SEQ ID NO: 1785591 - RNA, 19 nt, Artificial Sequence
  Description of Artificial Sequence: Synthetic oligonucleotide
  Sense strand starting at position 278 of SEQ ID NO: 1562965
agagauuagucaguaucaa

SEQ ID NO: 1785592 - RNA, 19 nt, Artificial Sequence
  Description of Artificial Sequence: Synthetic oligonucleotide
  Antisense strand to SEQ ID NO: 1785591
uugauacugacuaaucucu

SEQ ID NO: 1785593 - RNA, 19 nt, Artificial Sequence
  Description of Artificial Sequence: Synthetic oligonucleotide
  Sense strand starting at position 338 of SEQ ID NO: 1562965
guuagacaucucuaaguag

SEQ ID NO: 1785594 - RNA, 19 nt, Artificial Sequence
  Description of Artificial Sequence: Synthetic oligonucleotide
  Antisense strand to SEQ ID NO: 1785593
cuacuuagagaugucuaac

SEQ ID NO: 1785595 - RNA, 19 nt, Artificial Sequence
  Description of Artificial Sequence: Synthetic oligonucleotide
  Sense strand starting at position 364 of SEQ ID NO: 1562965
acagguaaguggccauuau

SEQ ID NO: 1785596 - RNA, 19 nt, Artificial Sequence
  Description of Artificial Sequence: Synthetic oligonucleotide
  Antisense strand to SEQ ID NO: 1785595
auaauggccacuuaccugu

SEQ ID NO: 1785597 - RNA, 19 nt, Artificial Sequence
  Description of Artificial Sequence: Synthetic oligonucleotide
  Sense strand starting at position 365 of SEQ ID NO: 1562965
cagguaaguggccauuauu

SEQ ID NO: 1785598 - RNA, 19 nt, Artificial Sequence
  Description of Artificial Sequence: Synthetic oligonucleotide
  Antisense strand to SEQ ID NO: 1785597
aauaauggccacuuaccug

SEQ ID NO: 1785599 - RNA, 19 nt, Artificial Sequence
  Description of Artificial Sequence: Synthetic oligonucleotide
  Sense strand starting at position 458 of SEQ ID NO: 1562965
guguuaacuucucuuugcu

SEQ ID NO: 1785600 - RNA, 19 nt, Artificial Sequence
  Description of Artificial Sequence: Synthetic oligonucleotide
  Antisense strand to SEQ ID NO: 1785599
agcaaagagaaguuaacac

SEQ ID NO: 1785601 - RNA, 19 nt, Artificial Sequence
  Description of Artificial Sequence: Synthetic oligonucleotide
  Sense strand starting at position 476 of SEQ ID NO: 1562965
uaagguuccuggcaaauuu

SEQ ID NO: 1785602 - RNA, 19 nt, Artificial Sequence
  Description of Artificial Sequence: Synthetic oligonucleotide
  Antisense strand to SEQ ID NO: 1785601
aaauuugccaggaaccuua

SEQ ID NO: 1785603 - RNA, 19 nt, Artificial Sequence
  Description of Artificial Sequence: Synthetic oligonucleotide
  Sense strand starting at position 549 of SEQ ID NO: 1562965
aucuguagccuuggaauau

SEQ ID NO: 1785604 - RNA, 19 nt, Artificial Sequence
  Description of Artificial Sequence: Synthetic oligonucleotide
  Antisense strand to SEQ ID NO: 1785603
auauuccaaggcuacagau

SEQ ID NO: 1785605 - RNA, 19 nt, Artificial Sequence
  Description of Artificial Sequence: Synthetic oligonucleotide
  Sense strand starting at position 553 of SEQ ID NO: 1562965
guagccuuggaauauuagu

SEQ ID NO: 1785606 - RNA, 19 nt, Artificial Sequence
  Description of Artificial Sequence: Synthetic oligonucleotide
  Antisense strand to SEQ ID NO: 1785605
acuaauauuccaaggcuac

SEQ ID NO: 1785607 - RNA, 19 nt, Artificial Sequence
  Description of Artificial Sequence: Synthetic oligonucleotide
  Sense strand starting at position 606 of SEQ ID NO: 1562965
caguucugacaacguguaa

SEQ ID NO: 1785608 - RNA, 19 nt, Artificial Sequence
  Description of Artificial Sequence: Synthetic oligonucleotide
  Antisense strand to SEQ ID NO: 1785607
uuacacguugucagaacug

SEQ ID NO: 1785609 - RNA, 19 nt, Artificial Sequence
  Description of Artificial Sequence: Synthetic oligonucleotide
  Sense strand starting at position 716 of SEQ ID NO: 1562965
uuaggaugucuguacauac

SEQ ID NO: 1785610 - RNA, 19 nt, Artificial Sequence
  Description of Artificial Sequence: Synthetic oligonucleotide
  Antisense strand to SEQ ID NO: 1785609
guauguacagacauccuaa

SEQ ID NO: 1785611 - RNA, 19 nt, Artificial Sequence
  Description of Artificial Sequence: Synthetic oligonucleotide
  Sense strand starting at position 819 of SEQ ID NO: 1562965
acgggucauccuuagggaa

SEQ ID NO: 1785612 - RNA, 19 nt, Artificial Sequence
  Description of Artificial Sequence: Synthetic oligonucleotide
  Antisense strand to SEQ ID NO: 1785611
uucccuaaggaugacccgu

SEQ ID NO: 1785613 - RNA, 19 nt, Artificial Sequence
  Description of Artificial Sequence: Synthetic oligonucleotide
  Sense strand starting at position 911 of SEQ ID NO: 1562965
gagaacuuucugugagacu

SEQ ID NO: 1785614 - RNA, 19 nt, Artificial Sequence
  Description of Artificial Sequence: Synthetic oligonucleotide
  Antisense strand to SEQ ID NO: 1785613
agucucacagaaaguucuc

SEQ ID NO: 1785615 - RNA, 19 nt, Artificial Sequence
  Description of Artificial Sequence: Synthetic oligonucleotide
  Sense strand starting at position 912 of SEQ ID NO: 1562965
agaacuuucugugagacua

SEQ ID NO: 1785616 - RNA, 19 nt, Artificial Sequence
  Description of Artificial Sequence: Synthetic oligonucleotide
  Antisense strand to SEQ ID NO: 1785615
uagucucacagaaaguucu

SEQ ID NO: 1785617 - RNA, 19 nt, Artificial Sequence
  Description of Artificial Sequence: Synthetic oligonucleotide
  Sense strand starting at position 1228 of SEQ ID NO: 1562965
gcagcuuuauaugccaauu

SEQ ID NO: 1785618 - RNA, 19 nt, Artificial Sequence
  Description of Artificial Sequence: Synthetic oligonucleotide
  Antisense strand to SEQ ID NO: 1785617
aauuggcauauaaagcugc

SEQ ID NO: 1785619 - RNA, 19 nt, Artificial Sequence
  Description of Artificial Sequence: Synthetic oligonucleotide
  Sense strand starting at position 1383 of SEQ ID NO: 1562965
gccaaaucagaacgugaca

SEQ ID NO: 1785620 - RNA, 19 nt, Artificial Sequence
  Description of Artificial Sequence: Synthetic oligonucleotide
  Antisense strand to SEQ ID NO: 1785619
ugucacguucugauuuggc

SEQ ID NO: 1785621 - RNA, 19 nt, Artificial Sequence
  Description of Artificial Sequence: Synthetic oligonucleotide
  Sense strand starting at position 1415 of SEQ ID NO: 1562965
uucuguccgcccgucaaua

SEQ ID NO: 1785622 - RNA, 19 nt, Artificial Sequence
  Description of Artificial Sequence: Synthetic oligonucleotide
  Antisense strand to SEQ ID NO: 1785621
uauugacgggcggacagaa

SEQ ID NO: 1785623 - RNA, 19 nt, Artificial Sequence
  Description of Artificial Sequence: Synthetic oligonucleotide
  Sense strand starting at position 1416 of SEQ ID NO: 1562965
ucuguccgcccgucaauaa

SEQ ID NO: 1785624 - RNA, 19 nt, Artificial Sequence
  Description of Artificial Sequence: Synthetic oligonucleotide
  Antisense strand to SEQ ID NO: 1785623
uuauugacgggcggacaga

SEQ ID NO: 1785625 - RNA, 19 nt, Artificial Sequence
  Description of Artificial Sequence: Synthetic oligonucleotide
  Sense strand starting at position 1632 of SEQ ID NO: 1562965
auuggugaggucgaaacuu

SEQ ID NO: 1785626 - RNA, 19 nt, Artificial Sequence
  Description of Artificial Sequence: Synthetic oligonucleotide
  Antisense strand to SEQ ID NO: 1785625
aaguuucgaccucaccaau

SEQ ID NO: 1785627 - RNA, 19 nt, Artificial Sequence
  Description of Artificial Sequence: Synthetic oligonucleotide
  Sense strand starting at position 1640 of SEQ ID NO: 1562965
ggucgaaacuuagaaauga

SEQ ID NO: 1785628 - RNA, 19 nt, Artificial Sequence
  Description of Artificial Sequence: Synthetic oligonucleotide
  Antisense strand to SEQ ID NO: 1785627
ucauuucuaaguuucgacc

SEQ ID NO: 1785629 - RNA, 19 nt, Artificial Sequence
  Description of Artificial Sequence: Synthetic oligonucleotide
  Sense strand starting at position 1765 of SEQ ID NO: 1562965
ccucucgacuuuccagaaa

SEQ ID NO: 1785630 - RNA, 19 nt, Artificial Sequence
  Description of Artificial Sequence: Synthetic oligonucleotide
  Antisense strand to SEQ ID NO: 1785629
uuucuggaaagucgagagg

SEQ ID NO: 1785631 - RNA, 19 nt, Artificial Sequence
  Description of Artificial Sequence: Synthetic oligonucleotide
  Sense strand starting at position 1860 of SEQ ID NO: 1562965
cggcgaugcgucgcggauu

SEQ ID NO: 1785632 - RNA, 19 nt, Artificial Sequence
  Description of Artificial Sequence: Synthetic oligonucleotide
  Antisense strand to SEQ ID NO: 1785631
aauccgcgacgcaucgccg

SEQ ID NO: 1785633 - RNA, 19 nt, Artificial Sequence
  Description of Artificial Sequence: Synthetic oligonucleotide
  Sense strand starting at position 2117 of SEQ ID NO: 1562965
gucagcuucggagacagaa

SEQ ID NO: 1785634 - RNA, 19 nt, Artificial Sequence
  Description of Artificial Sequence: Synthetic oligonucleotide
  Antisense strand to SEQ ID NO: 1785633
uucugucuccgaagcugac

SEQ ID NO: 1785635 - RNA, 19 nt, Artificial Sequence
  Description of Artificial Sequence: Synthetic oligonucleotide
  Sense strand starting at position 2203 of SEQ ID NO: 1562965
gugggugagccacaaaucu

SEQ ID NO: 1785636 - RNA, 19 nt, Artificial Sequence
  Description of Artificial Sequence: Synthetic oligonucleotide
  Antisense strand to SEQ ID NO: 1785635
agauuuguggcucacccac

SEQ ID NO: 1785637 - RNA, 19 nt, Artificial Sequence
  Description of Artificial Sequence: Synthetic oligonucleotide
  Sense strand starting at position 2235 of SEQ ID NO: 1562965
gcagccaaauuugauaaua

SEQ ID NO: 1785638 - RNA, 19 nt, Artificial Sequence
  Description of Artificial Sequence: Synthetic oligonucleotide
  Antisense strand to SEQ ID NO: 1785637
uauuaucaaauuuggcugc

SEQ ID NO: 1785639 - RNA, 19 nt, Artificial Sequence
  Description of Artificial Sequence: Synthetic oligonucleotide
  Sense strand starting at position 2276 of SEQ ID NO: 1562965
cuucuccuccugugauaug

SEQ ID NO: 1785640 - RNA, 19 nt, Artificial Sequence
  Description of Artificial Sequence: Synthetic oligonucleotide
  Antisense strand to SEQ ID NO: 1785639
cauaucacaggaggagaag

SEQ ID NO: 1785641 - RNA, 19 nt, Artificial Sequence
  Description of Artificial Sequence: Synthetic oligonucleotide
  Sense strand starting at position 2293 of SEQ ID NO: 1562965
ugcagcuaucucuggaauu

SEQ ID NO: 1785642 - RNA, 19 nt, Artificial Sequence
  Description of Artificial Sequence: Synthetic oligonucleotide
  Antisense strand to SEQ ID NO: 1785641
aauuccagagauagcugca

SEQ ID NO: 1785643 - RNA, 19 nt, Artificial Sequence
  Description of Artificial Sequence: Synthetic oligonucleotide
  Sense strand starting at position 2975 of SEQ ID NO: 1562965
agaaucaaguaucucguua

SEQ ID NO: 1785644 - RNA, 19 nt, Artificial Sequence
  Description of Artificial Sequence: Synthetic oligonucleotide
  Antisense strand to SEQ ID NO: 1785643
uaacgagauacuugauucu

SEQ ID NO: 1785645 - RNA, 19 nt, Artificial Sequence
  Description of Artificial Sequence: Synthetic oligonucleotide
  Sense strand starting at position 2979 of SEQ ID NO: 1562965
ucaaguaucucguuacuuu

SEQ ID NO: 1785646 - RNA, 19 nt, Artificial Sequence
  Description of Artificial Sequence: Synthetic oligonucleotide
  Antisense strand to SEQ ID NO: 1785645
aaaguaacgagauacuuga

SEQ ID NO: 1785647 - RNA, 19 nt, Artificial Sequence
  Description of Artificial Sequence: Synthetic oligonucleotide
  Sense strand starting at position 3007 of SEQ ID NO: 1562965
ccucguuguuuccucggaa

SEQ ID NO: 1785648 - RNA, 19 nt, Artificial Sequence
  Description of Artificial Sequence: Synthetic oligonucleotide
  Antisense strand to SEQ ID NO: 1785647
uuccgaggaaacaacgagg

SEQ ID NO: 1785649 - RNA, 19 nt, Artificial Sequence
  Description of Artificial Sequence: Synthetic oligonucleotide
  Sense strand starting at position 3008 of SEQ ID NO: 1562965
cucguuguuuccucggaau

SEQ ID NO: 1785650 - RNA, 19 nt, Artificial Sequence
  Description of Artificial Sequence: Synthetic oligonucleotide
  Antisense strand to SEQ ID NO: 1785649
auuccgaggaaacaacgag

SEQ ID NO: 1785651 - RNA, 19 nt, Artificial Sequence
  Description of Artificial Sequence: Synthetic oligonucleotide
  Sense strand starting at position 3010 of SEQ ID NO: 1562965
cguuguuuccucggaauua

SEQ ID NO: 1785652 - RNA, 19 nt, Artificial Sequence
  Description of Artificial Sequence: Synthetic oligonucleotide
  Antisense strand to SEQ ID NO: 1785651
uaauuccgaggaaacaacg

SEQ ID NO: 1785653 - RNA, 19 nt, Artificial Sequence
  Description of Artificial Sequence: Synthetic oligonucleotide
  Sense strand starting at position 3170 of SEQ ID NO: 1562965
cucccaccgucguuugaaa

SEQ ID NO: 1785654 - RNA, 19 nt, Artificial Sequence
  Description of Artificial Sequence: Synthetic oligonucleotide
  Antisense strand to SEQ ID NO: 1785653
uuucaaacgacggugggag

SEQ ID NO: 1785655 - RNA, 19 nt, Artificial Sequence
  Description of Artificial Sequence: Synthetic oligonucleotide
  Sense strand starting at position 3344 of SEQ ID NO: 1562965
cgauggugugcgucuguaa

SEQ ID NO: 1785656 - RNA, 19 nt, Artificial Sequence
  Description of Artificial Sequence: Synthetic oligonucleotide
  Antisense strand to SEQ ID NO: 1785655
uuacagacgcacaccaucg

SEQ ID NO: 1785657 - RNA, 19 nt, Artificial Sequence
  Description of Artificial Sequence: Synthetic oligonucleotide
  Sense strand starting at position 3486 of SEQ ID NO: 1562965
accauucccgaaggacaua

SEQ ID NO: 1785658 - RNA, 19 nt, Artificial Sequence
  Description of Artificial Sequence: Synthetic oligonucleotide
  Antisense strand to SEQ ID NO: 1785657
uauguccuucgggaauggu

SEQ ID NO: 1785659 - RNA, 19 nt, Artificial Sequence
  Description of Artificial Sequence: Synthetic oligonucleotide
  Sense strand starting at position 3498 of SEQ ID NO: 1562965
ggacauaagugauagaucu

SEQ ID NO: 1785660 - RNA, 19 nt, Artificial Sequence
  Description of Artificial Sequence: Synthetic oligonucleotide
  Antisense strand to SEQ ID NO: 1785659
agaucuaucacuuaugucc

SEQ ID NO: 1785661 - RNA, 19 nt, Artificial Sequence
  Description of Artificial Sequence: Synthetic oligonucleotide
  Sense strand starting at position 3595 of SEQ ID NO: 1562965
gugcacauacuguauauua

SEQ ID NO: 1785662 - RNA, 19 nt, Artificial Sequence
  Description of Artificial Sequence: Synthetic oligonucleotide
  Antisense strand to SEQ ID NO: 1785661
uaauauacaguaugugcac

SEQ ID NO: 1785663 - RNA, 19 nt, Artificial Sequence
  Description of Artificial Sequence: Synthetic oligonucleotide
  Sense strand starting at position 76 of SEQ ID NO: 1562966
uugguugcuguugagaaca

SEQ ID NO: 1785664 - RNA, 19 nt, Artificial Sequence
  Description of Artificial Sequence: Synthetic oligonucleotide
  Antisense strand to SEQ ID NO: 1785663
uguucucaacagcaaccaa

SEQ ID NO: 1785665 - RNA, 19 nt, Artificial Sequence
  Description of Artificial Sequence: Synthetic oligonucleotide
  Sense strand starting at position 81 of SEQ ID NO: 1562966
ugcuguugagaacaagauu

SEQ ID NO: 1785666 - RNA, 19 nt, Artificial Sequence
  Description of Artificial Sequence: Synthetic oligonucleotide
  Antisense strand to SEQ ID NO: 1785665
aaucuuguucucaacagca

SEQ ID NO: 1785667 - RNA, 19 nt, Artificial Sequence
  Description of Artificial Sequence: Synthetic oligonucleotide
  Sense strand starting at position 131 of SEQ ID NO: 1562966
ccggcuaggcuucugcaau

SEQ ID NO: 1785668 - RNA, 19 nt, Artificial Sequence
  Description of Artificial Sequence: Synthetic oligonucleotide
  Antisense strand to SEQ ID NO: 1785667
auugcagaagccuagccgg

SEQ ID NO: 1785669 - RNA, 19 nt, Artificial Sequence
  Description of Artificial Sequence: Synthetic oligonucleotide
  Sense strand starting at position 383 of SEQ ID NO: 1562966
gggaaugaccucuggcacu

SEQ ID NO: 1785670 - RNA, 19 nt, Artificial Sequence
  Description of Artificial Sequence: Synthetic oligonucleotide
  Antisense strand to SEQ ID NO: 1785669
agugccagaggucauuccc

SEQ ID NO: 1785671 - RNA, 19 nt, Artificial Sequence
  Description of Artificial Sequence: Synthetic oligonucleotide
  Sense strand starting at position 461 of SEQ ID NO: 1562966
uccagacuuuggcuuaagu

SEQ ID NO: 1785672 - RNA, 19 nt, Artificial Sequence
  Description of Artificial Sequence: Synthetic oligonucleotide
  Antisense strand to SEQ ID NO: 1785671
acuuaagccaaagucugga

SEQ ID NO: 1785673 - RNA, 19 nt, Artificial Sequence
  Description of Artificial Sequence: Synthetic oligonucleotide
  Sense strand starting at position 624 of SEQ ID NO: 1562966
uccgaaagucuuuaugucu

SEQ ID NO: 1785674 - RNA, 19 nt, Artificial Sequence
  Description of Artificial Sequence: Synthetic oligonucleotide
  Antisense strand to SEQ ID NO: 1785673
agacauaaagacuuucgga

SEQ ID NO: 1785675 - RNA, 19 nt, Artificial Sequence
  Description of Artificial Sequence: Synthetic oligonucleotide
  Sense strand starting at position 630 of SEQ ID NO: 1562966
agucuuuaugucuauuaag

SEQ ID NO: 1785676 - RNA, 19 nt, Artificial Sequence
  Description of Artificial Sequence: Synthetic oligonucleotide
  Antisense strand to SEQ ID NO: 1785675
cuuaauagacauaaagacu

SEQ ID NO: 1785677 - RNA, 19 nt, Artificial Sequence
  Description of Artificial Sequence: Synthetic oligonucleotide
  Sense strand starting at position 708 of SEQ ID NO: 1562966
cccucuaaaggcugaaauu

SEQ ID NO: 1785678 - RNA, 19 nt, Artificial Sequence
  Description of Artificial Sequence: Synthetic oligonucleotide
  Antisense strand to SEQ ID NO: 1785677
aauuucagccuuuagaggg

SEQ ID NO: 1785679 - RNA, 19 nt, Artificial Sequence
  Description of Artificial Sequence: Synthetic oligonucleotide
  Sense strand starting at position 953 of SEQ ID NO: 1562966
ugcuguaaggaucaaacga

SEQ ID NO: 1785680 - RNA, 19 nt, Artificial Sequence
  Description of Artificial Sequence: Synthetic oligonucleotide
  Antisense strand to SEQ ID NO: 1785679
ucguuugauccuuacagca

SEQ ID NO: 1785681 - RNA, 19 nt, Artificial Sequence
  Description of Artificial Sequence: Synthetic oligonucleotide
  Sense strand starting at position 969 of SEQ ID NO: 1562966
cgagcuuacauuuguacag

SEQ ID NO: 1785682 - RNA, 19 nt, Artificial Sequence
  Description of Artificial Sequence: Synthetic oligonucleotide
  Antisense strand to SEQ ID NO: 1785681
cuguacaaauguaagcucg

SEQ ID NO: 1785683 - RNA, 19 nt, Artificial Sequence
  Description of Artificial Sequence: Synthetic oligonucleotide
  Sense strand starting at position 1008 of SEQ ID NO: 1562966
uacagaguguuagugaaug

SEQ ID NO: 1785684 - RNA, 19 nt, Artificial Sequence
  Description of Artificial Sequence: Synthetic oligonucleotide
  Antisense strand to SEQ ID NO: 1785683
cauucacuaacacucugua

SEQ ID NO: 1785685 - RNA, 19 nt, Artificial Sequence
  Description of Artificial Sequence: Synthetic oligonucleotide
  Sense strand starting at position 1018 of SEQ ID NO: 1562966
uagugaauguguuuaaaug

SEQ ID NO: 1785686 - RNA, 19 nt, Artificial Sequence
  Description of Artificial Sequence: Synthetic oligonucleotide
  Antisense strand to SEQ ID NO: 1785685
cauuuaaacacauucacua

SEQ ID NO: 1785687 - RNA, 19 nt, Artificial Sequence
  Description of Artificial Sequence: Synthetic oligonucleotide
  Sense strand starting at position 1124 of SEQ ID NO: 1562966
aggaccuuugcacauacua

SEQ ID NO: 1785688 - RNA, 19 nt, Artificial Sequence
  Description of Artificial Sequence: Synthetic oligonucleotide
  Antisense strand to SEQ ID NO: 1785687
uaguaugugcaaagguccu

SEQ ID NO: 1785689 - RNA, 19 nt, Artificial Sequence
  Description of Artificial Sequence: Synthetic oligonucleotide
  Sense strand starting at position 1252 of SEQ ID NO: 1562966
aucagaguaccguagucuu

SEQ ID NO: 1785690 - RNA, 19 nt, Artificial Sequence
  Description of Artificial Sequence: Synthetic oligonucleotide
  Antisense strand to SEQ ID NO: 1785689
aagacuacgguacucugau

SEQ ID NO: 1785691 - RNA, 19 nt, Artificial Sequence
  Description of Artificial Sequence: Synthetic oligonucleotide
  Sense strand starting at position 1289 of SEQ ID NO: 1562966
ugcacuuagcaaugacaca

SEQ ID NO: 1785692 - RNA, 19 nt, Artificial Sequence
  Description of Artificial Sequence: Synthetic oligonucleotide
  Antisense strand to SEQ ID NO: 1785691
ugugucauugcuaagugca

SEQ ID NO: 1785693 - RNA, 19 nt, Artificial Sequence
  Description of Artificial Sequence: Synthetic oligonucleotide
  Sense strand starting at position 1303 of SEQ ID NO: 1562966
acacacuggguuugauauu

SEQ ID NO: 1785694 - RNA, 19 nt, Artificial Sequence
  Description of Artificial Sequence: Synthetic oligonucleotide
  Antisense strand to SEQ ID NO: 1785693
aauaucaaacccagugugu

SEQ ID NO: 1785695 - RNA, 19 nt, Artificial Sequence
  Description of Artificial Sequence: Synthetic oligonucleotide
  Sense strand starting at position 1309 of SEQ ID NO: 1562966
uggguuugauauucuuuga

SEQ ID NO: 1785696 - RNA, 19 nt, Artificial Sequence
  Description of Artificial Sequence: Synthetic oligonucleotide
  Antisense strand to SEQ ID NO: 1785695
ucaaagaauaucaaaccca

SEQ ID NO: 1785697 - RNA, 19 nt, Artificial Sequence
  Description of Artificial Sequence: Synthetic oligonucleotide
  Sense strand starting at position 1313 of SEQ ID NO: 1562966
uuugauauucuuugaugcu

SEQ ID NO: 1785698 - RNA, 19 nt, Artificial Sequence
  Description of Artificial Sequence: Synthetic oligonucleotide
  Antisense strand to SEQ ID NO: 1785697
agcaucaaagaauaucaaa

SEQ ID NO: 1785699 - RNA, 19 nt, Artificial Sequence
  Description of Artificial Sequence: Synthetic oligonucleotide
  Sense strand starting at position 1373 of SEQ ID NO: 1562966
uggcguguucugucaccuu

SEQ ID NO: 1785700 - RNA, 19 nt, Artificial Sequence
  Description of Artificial Sequence: Synthetic oligonucleotide
  Antisense strand to SEQ ID NO: 1785699
aaggugacagaacacgcca

SEQ ID NO: 1785701 - RNA, 19 nt, Artificial Sequence
  Description of Artificial Sequence: Synthetic oligonucleotide
  Sense strand starting at position 1377 of SEQ ID NO: 1562966
guguucugucaccuucgua

SEQ ID NO: 1785702 - RNA, 19 nt, Artificial Sequence
  Description of Artificial Sequence: Synthetic oligonucleotide
  Antisense strand to SEQ ID NO: 1785701
uacgaaggugacagaacac

SEQ ID NO: 1785703 - RNA, 19 nt, Artificial Sequence
  Description of Artificial Sequence: Synthetic oligonucleotide
  Sense strand starting at position 1378 of SEQ ID NO: 1562966
uguucugucaccuucguau

SEQ ID NO: 1785704 - RNA, 19 nt, Artificial Sequence
  Description of Artificial Sequence: Synthetic oligonucleotide
  Antisense strand to SEQ ID NO: 1785703
auacgaaggugacagaaca

SEQ ID NO: 1785705 - RNA, 19 nt, Artificial Sequence
  Description of Artificial Sequence: Synthetic oligonucleotide
  Sense strand starting at position 1590 of SEQ ID NO: 1562966
gccugaauugccuucgucu

SEQ ID NO: 1785706 - RNA, 19 nt, Artificial Sequence
  Description of Artificial Sequence: Synthetic oligonucleotide
  Antisense strand to SEQ ID NO: 1785705
agacgaaggcaauucaggc

SEQ ID NO: 1785707 - RNA, 19 nt, Artificial Sequence
  Description of Artificial Sequence: Synthetic oligonucleotide
  Sense strand starting at position 2031 of SEQ ID NO: 1562966
uuacacuugagcggaagaa

SEQ ID NO: 1785708 - RNA, 19 nt, Artificial Sequence
  Description of Artificial Sequence: Synthetic oligonucleotide
  Antisense strand to SEQ ID NO: 1785707
uucuuccgcucaaguguaa

SEQ ID NO: 1785709 - RNA, 19 nt, Artificial Sequence
  Description of Artificial Sequence: Synthetic oligonucleotide
  Sense strand starting at position 2087 of SEQ ID NO: 1562966
acacauguguuacucaauc

SEQ ID NO: 1785710 - RNA, 19 nt, Artificial Sequence
  Description of Artificial Sequence: Synthetic oligonucleotide
  Antisense strand to SEQ ID NO: 1785709
gauugaguaacacaugugu

SEQ ID NO: 1785711 - RNA, 19 nt, Artificial Sequence
  Description of Artificial Sequence: Synthetic oligonucleotide
  Sense strand starting at position 2275 of SEQ ID NO: 1562966
gguugagugcagcaugaga

SEQ ID NO: 1785712 - RNA, 19 nt, Artificial Sequence
  Description of Artificial Sequence: Synthetic oligonucleotide
  Antisense strand to SEQ ID NO: 1785711
ucucaugcugcacucaacc

SEQ ID NO: 1785713 - RNA, 19 nt, Artificial Sequence
  Description of Artificial Sequence: Synthetic oligonucleotide
  Sense strand starting at position 2277 of SEQ ID NO: 1562966
uugagugcagcaugagaau

SEQ ID NO: 1785714 - RNA, 19 nt, Artificial Sequence
  Description of Artificial Sequence: Synthetic oligonucleotide
  Antisense strand to SEQ ID NO: 1785713
auucucaugcugcacucaa

SEQ ID NO: 1785715 - RNA, 19 nt, Artificial Sequence
  Description of Artificial Sequence: Synthetic oligonucleotide
  Sense strand starting at position 2836 of SEQ ID NO: 1562966
guaagaagcuucuuagacc

SEQ ID NO: 1785716 - RNA, 19 nt, Artificial Sequence
  Description of Artificial Sequence: Synthetic oligonucleotide
  Antisense strand to SEQ ID NO: 1785715
ggucuaagaagcuucuuac

SEQ ID NO: 1785717 - RNA, 19 nt, Artificial Sequence
  Description of Artificial Sequence: Synthetic oligonucleotide
  Sense strand starting at position 2972 of SEQ ID NO: 1562966
gcaauaagugaacggugaa

SEQ ID NO: 1785718 - RNA, 19 nt, Artificial Sequence
  Description of Artificial Sequence: Synthetic oligonucleotide
  Antisense strand to SEQ ID NO: 1785717
uucaccguucacuuauugc

SEQ ID NO: 1785719 - RNA, 19 nt, Artificial Sequence
  Description of Artificial Sequence: Synthetic oligonucleotide
  Sense strand starting at position 2975 of SEQ ID NO: 1562966
auaagugaacggugaauca

SEQ ID NO: 1785720 - RNA, 19 nt, Artificial Sequence
  Description of Artificial Sequence: Synthetic oligonucleotide
  Antisense strand to SEQ ID NO: 1785719
ugauucaccguucacuuau

SEQ ID NO: 1785721 - RNA, 19 nt, Artificial Sequence
  Description of Artificial Sequence: Synthetic oligonucleotide
  Sense strand starting at position 3029 of SEQ ID NO: 1562966
gggccuucuguguacuuga

SEQ ID NO: 1785722 - RNA, 19 nt, Artificial Sequence
  Description of Artificial Sequence: Synthetic oligonucleotide
  Antisense strand to SEQ ID NO: 1785721
ucaaguacacagaaggccc

SEQ ID NO: 1785723 - RNA, 19 nt, Artificial Sequence
  Description of Artificial Sequence: Synthetic oligonucleotide
  Sense strand starting at position 3084 of SEQ ID NO: 1562966
gauagaccacaccguuuaa

SEQ ID NO: 1785724 - RNA, 19 nt, Artificial Sequence
  Description of Artificial Sequence: Synthetic oligonucleotide
  Antisense strand to SEQ ID NO: 1785723
uuaaacgguguggucuauc

SEQ ID NO: 1785725 - RNA, 19 nt, Artificial Sequence
  Description of Artificial Sequence: Synthetic oligonucleotide
  Sense strand starting at position 3109 of SEQ ID NO: 1562966
ucggcuagagaguaauaau

SEQ ID NO: 1785726 - RNA, 19 nt, Artificial Sequence
  Description of Artificial Sequence: Synthetic oligonucleotide
  Antisense strand to SEQ ID NO: 1785725
auuauuacucucuagccga

SEQ ID NO: 1785727 - RNA, 19 nt, Artificial Sequence
  Description of Artificial Sequence: Synthetic oligonucleotide
  Sense strand starting at position 3206 of SEQ ID NO: 1562966
ccagguaggaauugucuuu

SEQ ID NO: 1785728 - RNA, 19 nt, Artificial Sequence
  Description of Artificial Sequence: Synthetic oligonucleotide
  Antisense strand to SEQ ID NO: 1785727
aaagacaauuccuaccugg

SEQ ID NO: 1785729 - RNA, 19 nt, Artificial Sequence
  Description of Artificial Sequence: Synthetic oligonucleotide
  Sense strand starting at position 3419 of SEQ ID NO: 1562966
ggaggagcugaccauguau

SEQ ID NO: 1785730 - RNA, 19 nt, Artificial Sequence
  Description of Artificial Sequence: Synthetic oligonucleotide
  Antisense strand to SEQ ID NO: 1785729
auacauggucagcuccucc

SEQ ID NO: 1785731 - RNA, 19 nt, Artificial Sequence
  Description of Artificial Sequence: Synthetic oligonucleotide
  Sense strand starting at position 3448 of SEQ ID NO: 1562966
gauuguucuaggcggagac

SEQ ID NO: 1785732 - RNA, 19 nt, Artificial Sequence
  Description of Artificial Sequence: Synthetic oligonucleotide
  Antisense strand to SEQ ID NO: 1785731
gucuccgccuagaacaauc

SEQ ID NO: 1785733 - RNA, 19 nt, Artificial Sequence
  Description of Artificial Sequence: Synthetic oligonucleotide
  Sense strand starting at position 3543 of SEQ ID NO: 1562966
ggccucagacuccaugauu

SEQ ID NO: 1785734 - RNA, 19 nt, Artificial Sequence
  Description of Artificial Sequence: Synthetic oligonucleotide
  Antisense strand to SEQ ID NO: 1785733
aaucauggagucugaggcc

SEQ ID NO: 1785735 - RNA, 19 nt, Artificial Sequence
  Description of Artificial Sequence: Synthetic oligonucleotide
  Sense strand starting at position 3628 of SEQ ID NO: 1562966
cuaacauagccggauuguu

SEQ ID NO: 1785736 - RNA, 19 nt, Artificial Sequence
  Description of Artificial Sequence: Synthetic oligonucleotide
  Antisense strand to SEQ ID NO: 1785735
aacaauccggcuauguuag

SEQ ID NO: 1785737 - RNA, 19 nt, Artificial Sequence
  Description of Artificial Sequence: Synthetic oligonucleotide
  Sense strand starting at position 3654 of SEQ ID NO: 1562966
uuauuauguguauugcgua

SEQ ID NO: 1785738 - RNA, 19 nt, Artificial Sequence
  Description of Artificial Sequence: Synthetic oligonucleotide
  Antisense strand to SEQ ID NO: 1785737
uacgcaauacacauaauaa

SEQ ID NO: 1785739 - RNA, 19 nt, Artificial Sequence
  Description of Artificial Sequence: Synthetic oligonucleotide
  Sense strand starting at position 3793 of SEQ ID NO: 1562966
gcacgaaaugaguggauga

SEQ ID NO: 1785740 - RNA, 19 nt, Artificial Sequence
  Description of Artificial Sequence: Synthetic oligonucleotide
  Antisense strand to SEQ ID NO: 1785739
ucauccacucauuucgugc

SEQ ID NO: 1785741 - RNA, 19 nt, Artificial Sequence
  Description of Artificial Sequence: Synthetic oligonucleotide
  Sense strand starting at position 3804 of SEQ ID NO: 1562966
guggaugagagcugaguuu

SEQ ID NO: 1785742 - RNA, 19 nt, Artificial Sequence
  Description of Artificial Sequence: Synthetic oligonucleotide
  Antisense strand to SEQ ID NO: 1785741
aaacucagcucucauccac

SEQ ID NO: 1785743 - RNA, 19 nt, Artificial Sequence
  Description of Artificial Sequence: Synthetic oligonucleotide
  Sense strand starting at position 259 of SEQ ID NO: 1562967
cgccgugugcucucacaua

SEQ ID NO: 1785744 - RNA, 19 nt, Artificial Sequence
  Description of Artificial Sequence: Synthetic oligonucleotide
  Antisense strand to SEQ ID NO: 1785743
uaugugagagcacacggcg

SEQ ID NO: 1785745 - RNA, 19 nt, Artificial Sequence
  Description of Artificial Sequence: Synthetic oligonucleotide
  Sense strand starting at position 903 of SEQ ID NO: 1562967
aggcuauauugaugagauu

SEQ ID NO: 1785746 - RNA, 19 nt, Artificial Sequence
  Description of Artificial Sequence: Synthetic oligonucleotide
  Antisense strand to SEQ ID NO: 1785745
aaucucaucaauauagccu

SEQ ID NO: 1785747 - RNA, 19 nt, Artificial Sequence
  Description of Artificial Sequence: Synthetic oligonucleotide
  Sense strand starting at position 1092 of SEQ ID NO: 1562967
uuguaucaauugugaaaga

SEQ ID NO: 1785748 - RNA, 19 nt, Artificial Sequence
  Description of Artificial Sequence: Synthetic oligonucleotide
  Antisense strand to SEQ ID NO: 1785747
ucuuucacaauugauacaa

SEQ ID NO: 1785749 - RNA, 19 nt, Artificial Sequence
  Description of Artificial Sequence: Synthetic oligonucleotide
  Sense strand starting at position 1093 of SEQ ID NO: 1562967
uguaucaauugugaaagaa

SEQ ID NO: 1785750 - RNA, 19 nt, Artificial Sequence
  Description of Artificial Sequence: Synthetic oligonucleotide
  Antisense strand to SEQ ID NO: 1785749
uucuuucacaauugauaca

SEQ ID NO: 1785751 - RNA, 19 nt, Artificial Sequence
  Description of Artificial Sequence: Synthetic oligonucleotide
  Sense strand starting at position 1139 of SEQ ID NO: 1562967
gucuucuuuccauaggcca

SEQ ID NO: 1785752 - RNA, 19 nt, Artificial Sequence
  Description of Artificial Sequence: Synthetic oligonucleotide
  Antisense strand to SEQ ID NO: 1785751
uggccuauggaaagaagac

SEQ ID NO: 1785753 - RNA, 19 nt, Artificial Sequence
  Description of Artificial Sequence: Synthetic oligonucleotide
  Sense strand starting at position 2106 of SEQ ID NO: 1562967
gagauaaaucagcgcgcga

SEQ ID NO: 1785754 - RNA, 19 nt, Artificial Sequence
  Description of Artificial Sequence: Synthetic oligonucleotide
  Antisense strand to SEQ ID NO: 1785753
ucgcgcgcugauuuaucuc

SEQ ID NO: 1785755 - RNA, 19 nt, Artificial Sequence
  Description of Artificial Sequence: Synthetic oligonucleotide
  Sense strand starting at position 2108 of SEQ ID NO: 1562967
gauaaaucagcgcgcgaaa

SEQ ID NO: 1785756 - RNA, 19 nt, Artificial Sequence
  Description of Artificial Sequence: Synthetic oligonucleotide
  Antisense strand to SEQ ID NO: 1785755
uuucgcgcgcugauuuauc

SEQ ID NO: 1785757 - RNA, 19 nt, Artificial Sequence
  Description of Artificial Sequence: Synthetic oligonucleotide
  Sense strand starting at position 2328 of SEQ ID NO: 1562967
uggaguagaucaguucucu

SEQ ID NO: 1785758 - RNA, 19 nt, Artificial Sequence
  Description of Artificial Sequence: Synthetic oligonucleotide
  Antisense strand to SEQ ID NO: 1785757
agagaacugaucuacucca

SEQ ID NO: 1785759 - RNA, 19 nt, Artificial Sequence
  Description of Artificial Sequence: Synthetic oligonucleotide
  Sense strand starting at position 2332 of SEQ ID NO: 1562967
guagaucaguucucuguga

SEQ ID NO: 1785760 - RNA, 19 nt, Artificial Sequence
  Description of Artificial Sequence: Synthetic oligonucleotide
  Antisense strand to SEQ ID NO: 1785759
ucacagagaacugaucuac

SEQ ID NO: 1785761 - RNA, 19 nt, Artificial Sequence
  Description of Artificial Sequence: Synthetic oligonucleotide
  Sense strand starting at position 2334 of SEQ ID NO: 1562967
agaucaguucucugugagc

SEQ ID NO: 1785762 - RNA, 19 nt, Artificial Sequence
  Description of Artificial Sequence: Synthetic oligonucleotide
  Antisense strand to SEQ ID NO: 1785761
gcucacagagaacugaucu

SEQ ID NO: 1785763 - RNA, 19 nt, Artificial Sequence
  Description of Artificial Sequence: Synthetic oligonucleotide
  Sense strand starting at position 2344 of SEQ ID NO: 1562967
ucugugagccguggugaga

SEQ ID NO: 1785764 - RNA, 19 nt, Artificial Sequence
  Description of Artificial Sequence: Synthetic oligonucleotide
  Antisense strand to SEQ ID NO: 1785763
ucucaccacggcucacaga

SEQ ID NO: 1785765 - RNA, 19 nt, Artificial Sequence
  Description of Artificial Sequence: Synthetic oligonucleotide
  Sense strand starting at position 2397 of SEQ ID NO: 1562967
ggcacuuagauaugagacu

SEQ ID NO: 1785766 - RNA, 19 nt, Artificial Sequence
  Description of Artificial Sequence: Synthetic oligonucleotide
  Antisense strand to SEQ ID NO: 1785765
agucucauaucuaagugcc

SEQ ID NO: 1785767 - RNA, 19 nt, Artificial Sequence
  Description of Artificial Sequence: Synthetic oligonucleotide
  Sense strand starting at position 2421 of SEQ ID NO: 1562967
gacugaacaucagagaugu

SEQ ID NO: 1785768 - RNA, 19 nt, Artificial Sequence
  Description of Artificial Sequence: Synthetic oligonucleotide
  Antisense strand to SEQ ID NO: 1785767
acaucucugauguucaguc

SEQ ID NO: 1785769 - RNA, 19 nt, Artificial Sequence
  Description of Artificial Sequence: Synthetic oligonucleotide
  Sense strand starting at position 2436 of SEQ ID NO: 1562967
augucaggccuggagcaau

SEQ ID NO: 1785770 - RNA, 19 nt, Artificial Sequence
  Description of Artificial Sequence: Synthetic oligonucleotide
  Antisense strand to SEQ ID NO: 1785769
auugcuccaggccugacau

SEQ ID NO: 1785771 - RNA, 19 nt, Artificial Sequence
  Description of Artificial Sequence: Synthetic oligonucleotide
  Sense strand starting at position 2466 of SEQ ID NO: 1562967
uggccauggauagguuauu

SEQ ID NO: 1785772 - RNA, 19 nt, Artificial Sequence
  Description of Artificial Sequence: Synthetic oligonucleotide
  Antisense strand to SEQ ID NO: 1785771
aauaaccuauccauggcca

SEQ ID NO: 1785773 - RNA, 19 nt, Artificial Sequence
  Description of Artificial Sequence: Synthetic oligonucleotide
  Sense strand starting at position 2479 of SEQ ID NO: 1562967
guuauugacaguuacgaga

SEQ ID NO: 1785774 - RNA, 19 nt, Artificial Sequence
  Description of Artificial Sequence: Synthetic oligonucleotide
  Antisense strand to SEQ ID NO: 1785773
ucucguaacugucaauaac

SEQ ID NO: 1785775 - RNA, 19 nt, Artificial Sequence
  Description of Artificial Sequence: Synthetic oligonucleotide
  Sense strand starting at position 2609 of SEQ ID NO: 1562967
ccgugucuacuagguacaa

SEQ ID NO: 1785776 - RNA, 19 nt, Artificial Sequence
  Description of Artificial Sequence: Synthetic oligonucleotide
  Antisense strand to SEQ ID NO: 1785775
uuguaccuaguagacacgg

SEQ ID NO: 1785777 - RNA, 19 nt, Artificial Sequence
  Description of Artificial Sequence: Synthetic oligonucleotide
  Sense strand starting at position 2610 of SEQ ID NO: 1562967
cgugucuacuagguacaaa

SEQ ID NO: 1785778 - RNA, 19 nt, Artificial Sequence
  Description of Artificial Sequence: Synthetic oligonucleotide
  Antisense strand to SEQ ID NO: 1785777
uuuguaccuaguagacacg

SEQ ID NO: 1785779 - RNA, 19 nt, Artificial Sequence
  Description of Artificial Sequence: Synthetic oligonucleotide
  Sense strand starting at position 2808 of SEQ ID NO: 1562967
aaguuaugagaggguguga

SEQ ID NO: 1785780 - RNA, 19 nt, Artificial Sequence
  Description of Artificial Sequence: Synthetic oligonucleotide
  Antisense strand to SEQ ID NO: 1785779
ucacacccucucauaacuu

SEQ ID NO: 1785781 - RNA, 19 nt, Artificial Sequence
  Description of Artificial Sequence: Synthetic oligonucleotide
  Sense strand starting at position 2819 of SEQ ID NO: 1562967
gggugugaucgccaaggga

SEQ ID NO: 1785782 - RNA, 19 nt, Artificial Sequence
  Description of Artificial Sequence: Synthetic oligonucleotide
  Antisense strand to SEQ ID NO: 1785781
ucccuuggcgaucacaccc

SEQ ID NO: 1785783 - RNA, 19 nt, Artificial Sequence
  Description of Artificial Sequence: Synthetic oligonucleotide
  Sense strand starting at position 2915 of SEQ ID NO: 1562967
ccgccagcccuugauguau

SEQ ID NO: 1785784 - RNA, 19 nt, Artificial Sequence
  Description of Artificial Sequence: Synthetic oligonucleotide
  Antisense strand to SEQ ID NO: 1785783
auacaucaagggcuggcgg

SEQ ID NO: 1785785 - RNA, 19 nt, Artificial Sequence
  Description of Artificial Sequence: Synthetic oligonucleotide
  Sense strand starting at position 2926 of SEQ ID NO: 1562967
ugauguaucuacuauuucu

SEQ ID NO: 1785786 - RNA, 19 nt, Artificial Sequence
  Description of Artificial Sequence: Synthetic oligonucleotide
  Antisense strand to SEQ ID NO: 1785785
agaaauaguagauacauca

SEQ ID NO: 1785787 - RNA, 19 nt, Artificial Sequence
  Description of Artificial Sequence: Synthetic oligonucleotide
  Sense strand starting at position 2957 of SEQ ID NO: 1562967
uacaguugcuucuuggaaa

SEQ ID NO: 1785788 - RNA, 19 nt, Artificial Sequence
  Description of Artificial Sequence: Synthetic oligonucleotide
  Antisense strand to SEQ ID NO: 1785787
uuuccaagaagcaacugua

SEQ ID NO: 1785789 - RNA, 19 nt, Artificial Sequence
  Description of Artificial Sequence: Synthetic oligonucleotide
  Sense strand starting at position 2993 of SEQ ID NO: 1562967
gggaaagauuaggagccua

SEQ ID NO: 1785790 - RNA, 19 nt, Artificial Sequence
  Description of Artificial Sequence: Synthetic oligonucleotide
  Antisense strand to SEQ ID NO: 1785789
uaggcuccuaaucuuuccc

SEQ ID NO: 1785791 - RNA, 19 nt, Artificial Sequence
  Description of Artificial Sequence: Synthetic oligonucleotide
  Sense strand starting at position 3058 of SEQ ID NO: 1562967
gucagugaccucugguucu

SEQ ID NO: 1785792 - RNA, 19 nt, Artificial Sequence
  Description of Artificial Sequence: Synthetic oligonucleotide
  Antisense strand to SEQ ID NO: 1785791
agaaccagaggucacugac

SEQ ID NO: 1785793 - RNA, 19 nt, Artificial Sequence
  Description of Artificial Sequence: Synthetic oligonucleotide
  Sense strand starting at position 3071 of SEQ ID NO: 1562967
gguucugaggccuagcuua

SEQ ID NO: 1785794 - RNA, 19 nt, Artificial Sequence
  Description of Artificial Sequence: Synthetic oligonucleotide
  Antisense strand to SEQ ID NO: 1785793
uaagcuaggccucagaacc

SEQ ID NO: 1785795 - RNA, 19 nt, Artificial Sequence
  Description of Artificial Sequence: Synthetic oligonucleotide
  Sense strand starting at position 3082 of SEQ ID NO: 1562967
cuagcuuaggccuggaaac

SEQ ID NO: 1785796 - RNA, 19 nt, Artificial Sequence
  Description of Artificial Sequence: Synthetic oligonucleotide
  Antisense strand to SEQ ID NO: 1785795
guuuccaggccuaagcuag

SEQ ID NO: 1785797 - RNA, 19 nt, Artificial Sequence
  Description of Artificial Sequence: Synthetic oligonucleotide
  Sense strand starting at position 3083 of SEQ ID NO: 1562967
uagcuuaggccuggaaacu

SEQ ID NO: 1785798 - RNA, 19 nt, Artificial Sequence
  Description of Artificial Sequence: Synthetic oligonucleotide
  Antisense strand to SEQ ID NO: 1785797
aguuuccaggccuaagcua

SEQ ID NO: 1785799 - RNA, 19 nt, Artificial Sequence
  Description of Artificial Sequence: Synthetic oligonucleotide
  Sense strand starting at position 3219 of SEQ ID NO: 1562967
cugggaauaccguggucua

SEQ ID NO: 1785800 - RNA, 19 nt, Artificial Sequence
  Description of Artificial Sequence: Synthetic oligonucleotide
  Antisense strand to SEQ ID NO: 1785799
uagaccacgguauucccag

SEQ ID NO: 1785801 - RNA, 19 nt, Artificial Sequence
  Description of Artificial Sequence: Synthetic oligonucleotide
  Sense strand starting at position 3220 of SEQ ID NO: 1562967
ugggaauaccguggucuac

SEQ ID NO: 1785802 - RNA, 19 nt, Artificial Sequence
  Description of Artificial Sequence: Synthetic oligonucleotide
  Antisense strand to SEQ ID NO: 1785801
guagaccacgguauuccca

SEQ ID NO: 1785803 - RNA, 19 nt, Artificial Sequence
  Description of Artificial Sequence: Synthetic oligonucleotide
  Sense strand starting at position 3222 of SEQ ID NO: 1562967
ggaauaccguggucuacua

SEQ ID NO: 1785804 - RNA, 19 nt, Artificial Sequence
  Description of Artificial Sequence: Synthetic oligonucleotide
  Antisense strand to SEQ ID NO: 1785803
uaguagaccacgguauucc

SEQ ID NO: 1785805 - RNA, 19 nt, Artificial Sequence
  Description of Artificial Sequence: Synthetic oligonucleotide
  Sense strand starting at position 3291 of SEQ ID NO: 1562967
ccuugcuccuguucugaca

SEQ ID NO: 1785806 - RNA, 19 nt, Artificial Sequence
  Description of Artificial Sequence: Synthetic oligonucleotide
  Antisense strand to SEQ ID NO: 1785805
ugucagaacaggagcaagg

SEQ ID NO: 1785807 - RNA, 19 nt, Artificial Sequence
  Description of Artificial Sequence: Synthetic oligonucleotide
  Sense strand starting at position 3456 of SEQ ID NO: 1562967
caaagcagucucuggugaa

SEQ ID NO: 1785808 - RNA, 19 nt, Artificial Sequence
  Description of Artificial Sequence: Synthetic oligonucleotide
  Antisense strand to SEQ ID NO: 1785807
uucaccagagacugcuuug

SEQ ID NO: 1785809 - RNA, 19 nt, Artificial Sequence
  Description of Artificial Sequence: Synthetic oligonucleotide
  Sense strand starting at position 3496 of SEQ ID NO: 1562967
uggcuucucagauguugca

SEQ ID NO: 1785810 - RNA, 19 nt, Artificial Sequence
  Description of Artificial Sequence: Synthetic oligonucleotide
  Antisense strand to SEQ ID NO: 1785809
ugcaacaucugagaagcca

SEQ ID NO: 1785811 - RNA, 19 nt, Artificial Sequence
  Description of Artificial Sequence: Synthetic oligonucleotide
  Sense strand starting at position 3503 of SEQ ID NO: 1562967
ucagauguugcauaauaaa

SEQ ID NO: 1785812 - RNA, 19 nt, Artificial Sequence
  Description of Artificial Sequence: Synthetic oligonucleotide
  Antisense strand to SEQ ID NO: 1785811
uuuauuaugcaacaucuga

SEQ ID NO: 1785813 - RNA, 19 nt, Artificial Sequence
  Description of Artificial Sequence: Synthetic oligonucleotide
  Sense strand starting at position 3626 of SEQ ID NO: 1562967
gagccaucucgauggauau

SEQ ID NO: 1785814 - RNA, 19 nt, Artificial Sequence
  Description of Artificial Sequence: Synthetic oligonucleotide
  Antisense strand to SEQ ID NO: 1785813
auauccaucgagauggcuc

SEQ ID NO: 1785815 - RNA, 19 nt, Artificial Sequence
  Description of Artificial Sequence: Synthetic oligonucleotide
  Sense strand starting at position 3627 of SEQ ID NO: 1562967
agccaucucgauggauauc

SEQ ID NO: 1785816 - RNA, 19 nt, Artificial Sequence
  Description of Artificial Sequence: Synthetic oligonucleotide
  Antisense strand to SEQ ID NO: 1785815
gauauccaucgagauggcu

SEQ ID NO: 1785817 - RNA, 19 nt, Artificial Sequence
  Description of Artificial Sequence: Synthetic oligonucleotide
  Sense strand starting at position 3628 of SEQ ID NO: 1562967
gccaucucgauggauauca

SEQ ID NO: 1785818 - RNA, 19 nt, Artificial Sequence
  Description of Artificial Sequence: Synthetic oligonucleotide
  Antisense strand to SEQ ID NO: 1785817
ugauauccaucgagauggc

SEQ ID NO: 1785819 - RNA, 19 nt, Artificial Sequence
  Description of Artificial Sequence: Synthetic oligonucleotide
  Sense strand starting at position 3851 of SEQ ID NO: 1562967
gacacagagcuucgccaua

SEQ ID NO: 1785820 - RNA, 19 nt, Artificial Sequence
  Description of Artificial Sequence: Synthetic oligonucleotide
  Antisense strand to SEQ ID NO: 1785819
uauggcgaagcucuguguc

SEQ ID NO: 1785821 - RNA, 19 nt, Artificial Sequence
  Description of Artificial Sequence: Synthetic oligonucleotide
  Sense strand starting at position 3853 of SEQ ID NO: 1562967
cacagagcuucgccauauu

SEQ ID NO: 1785822 - RNA, 19 nt, Artificial Sequence
  Description of Artificial Sequence: Synthetic oligonucleotide
  Antisense strand to SEQ ID NO: 1785821
aauauggcgaagcucugug

SEQ ID NO: 1785823 - RNA, 19 nt, Artificial Sequence
  Description of Artificial Sequence: Synthetic oligonucleotide
  Sense strand starting at position 294 of SEQ ID NO: 1562968
ggccauaggcagugguaau

SEQ ID NO: 1785824 - RNA, 19 nt, Artificial Sequence
  Description of Artificial Sequence: Synthetic oligonucleotide
  Antisense strand to SEQ ID NO: 1785823
auuaccacugccuauggcc

SEQ ID NO: 1785825 - RNA, 19 nt, Artificial Sequence
  Description of Artificial Sequence: Synthetic oligonucleotide
  Sense strand starting at position 304 of SEQ ID NO: 1562968
agugguaaucuggguggca

SEQ ID NO: 1785826 - RNA, 19 nt, Artificial Sequence
  Description of Artificial Sequence: Synthetic oligonucleotide
  Antisense strand to SEQ ID NO: 1785825
ugccacccagauuaccacu

SEQ ID NO: 1785827 - RNA, 19 nt, Artificial Sequence
  Description of Artificial Sequence: Synthetic oligonucleotide
  Sense strand starting at position 305 of SEQ ID NO: 1562968
gugguaaucuggguggcau

SEQ ID NO: 1785828 - RNA, 19 nt, Artificial Sequence
  Description of Artificial Sequence: Synthetic oligonucleotide
  Antisense strand to SEQ ID NO: 1785827
augccacccagauuaccac

SEQ ID NO: 1785829 - RNA, 19 nt, Artificial Sequence
  Description of Artificial Sequence: Synthetic oligonucleotide
  Sense strand starting at position 306 of SEQ ID NO: 1562968
ugguaaucuggguggcauu

SEQ ID NO: 1785830 - RNA, 19 nt, Artificial Sequence
  Description of Artificial Sequence: Synthetic oligonucleotide
  Antisense strand to SEQ ID NO: 1785829
aaugccacccagauuacca

SEQ ID NO: 1785831 - RNA, 19 nt, Artificial Sequence
  Description of Artificial Sequence: Synthetic oligonucleotide
  Sense strand starting at position 866 of SEQ ID NO: 1562968
ggccaugaaacugguaaga

SEQ ID NO: 1785832 - RNA, 19 nt, Artificial Sequence
  Description of Artificial Sequence: Synthetic oligonucleotide
  Antisense strand to SEQ ID NO: 1785831
ucuuaccaguuucauggcc

SEQ ID NO: 1785833 - RNA, 19 nt, Artificial Sequence
  Description of Artificial Sequence: Synthetic oligonucleotide
  Sense strand starting at position 1350 of SEQ ID NO: 1562968
guagguuaguaguuaagaa

SEQ ID NO: 1785834 - RNA, 19 nt, Artificial Sequence
  Description of Artificial Sequence: Synthetic oligonucleotide
  Antisense strand to SEQ ID NO: 1785833
uucuuaacuacuaaccuac

SEQ ID NO: 1785835 - RNA, 19 nt, Artificial Sequence
  Description of Artificial Sequence: Synthetic oligonucleotide
  Sense strand starting at position 1403 of SEQ ID NO: 1562968
aguuacuuccucuaucugu

SEQ ID NO: 1785836 - RNA, 19 nt, Artificial Sequence
  Description of Artificial Sequence: Synthetic oligonucleotide
  Antisense strand to SEQ ID NO: 1785835
acagauagaggaaguaacu

SEQ ID NO: 1785837 - RNA, 19 nt, Artificial Sequence
  Description of Artificial Sequence: Synthetic oligonucleotide
  Sense strand starting at position 1472 of SEQ ID NO: 1562968
cucccagaguugucauauu

SEQ ID NO: 1785838 - RNA, 19 nt, Artificial Sequence
  Description of Artificial Sequence: Synthetic oligonucleotide
  Antisense strand to SEQ ID NO: 1785837
aauaugacaacucugggag

SEQ ID NO: 1785839 - RNA, 19 nt, Artificial Sequence
  Description of Artificial Sequence: Synthetic oligonucleotide
  Sense strand starting at position 1532 of SEQ ID NO: 1562968
guuggcugugguuauuauu

SEQ ID NO: 1785840 - RNA, 19 nt, Artificial Sequence
  Description of Artificial Sequence: Synthetic oligonucleotide
  Antisense strand to SEQ ID NO: 1785839
aauaauaaccacagccaac

SEQ ID NO: 1785841 - RNA, 19 nt, Artificial Sequence
  Description of Artificial Sequence: Synthetic oligonucleotide
  Sense strand starting at position 1553 of SEQ ID NO: 1562968
gguuauuaucaugguuagu

SEQ ID NO: 1785842 - RNA, 19 nt, Artificial Sequence
  Description of Artificial Sequence: Synthetic oligonucleotide
  Antisense strand to SEQ ID NO: 1785841
acuaaccaugauaauaacc

SEQ ID NO: 1785843 - RNA, 19 nt, Artificial Sequence
  Description of Artificial Sequence: Synthetic oligonucleotide
  Sense strand starting at position 1555 of SEQ ID NO: 1562968
uuauuaucaugguuaguag

SEQ ID NO: 1785844 - RNA, 19 nt, Artificial Sequence
  Description of Artificial Sequence: Synthetic oligonucleotide
  Antisense strand to SEQ ID NO: 1785843
cuacuaaccaugauaauaa

SEQ ID NO: 1785845 - RNA, 19 nt, Artificial Sequence
  Description of Artificial Sequence: Synthetic oligonucleotide
  Sense strand starting at position 1556 of SEQ ID NO: 1562968
uauuaucaugguuaguaga

SEQ ID NO: 1785846 - RNA, 19 nt, Artificial Sequence
  Description of Artificial Sequence: Synthetic oligonucleotide
  Antisense strand to SEQ ID NO: 1785845
ucuacuaaccaugauaaua

SEQ ID NO: 1785847 - RNA, 19 nt, Artificial Sequence
  Description of Artificial Sequence: Synthetic oligonucleotide
  Sense strand starting at position 1558 of SEQ ID NO: 1562968
uuaucaugguuaguagaau

SEQ ID NO: 1785848 - RNA, 19 nt, Artificial Sequence
  Description of Artificial Sequence: Synthetic oligonucleotide
  Antisense strand to SEQ ID NO: 1785847
auucuacuaaccaugauaa

SEQ ID NO: 1785849 - RNA, 19 nt, Artificial Sequence
  Description of Artificial Sequence: Synthetic oligonucleotide
  Sense strand starting at position 1583 of SEQ ID NO: 1562968
gccacaggccuguaggaau

SEQ ID NO: 1785850 - RNA, 19 nt, Artificial Sequence
  Description of Artificial Sequence: Synthetic oligonucleotide
  Antisense strand to SEQ ID NO: 1785849
auuccuacaggccuguggc

SEQ ID NO: 1785851 - RNA, 19 nt, Artificial Sequence
  Description of Artificial Sequence: Synthetic oligonucleotide
  Sense strand starting at position 1594 of SEQ ID NO: 1562968
guaggaaucuacuccagua

SEQ ID NO: 1785852 - RNA, 19 nt, Artificial Sequence
  Description of Artificial Sequence: Synthetic oligonucleotide
  Antisense strand to SEQ ID NO: 1785851
uacuggaguagauuccuac

SEQ ID NO: 1785853 - RNA, 19 nt, Artificial Sequence
  Description of Artificial Sequence: Synthetic oligonucleotide
  Sense strand starting at position 1642 of SEQ ID NO: 1562968
ccagaugacaacgguagaa

SEQ ID NO: 1785854 - RNA, 19 nt, Artificial Sequence
  Description of Artificial Sequence: Synthetic oligonucleotide
  Antisense strand to SEQ ID NO: 1785853
uucuaccguugucaucugg

SEQ ID NO: 1785855 - RNA, 19 nt, Artificial Sequence
  Description of Artificial Sequence: Synthetic oligonucleotide
  Sense strand starting at position 1679 of SEQ ID NO: 1562968
gggacguggccauguuuga

SEQ ID NO: 1785856 - RNA, 19 nt, Artificial Sequence
  Description of Artificial Sequence: Synthetic oligonucleotide
  Antisense strand to SEQ ID NO: 1785855
ucaaacauggccacguccc

SEQ ID NO: 1785857 - RNA, 19 nt, Artificial Sequence
  Description of Artificial Sequence: Synthetic oligonucleotide
  Sense strand starting at position 1688 of SEQ ID NO: 1562968
ccauguuugaguugagcuc

SEQ ID NO: 1785858 - RNA, 19 nt, Artificial Sequence
  Description of Artificial Sequence: Synthetic oligonucleotide
  Antisense strand to SEQ ID NO: 1785857
gagcucaacucaaacaugg

SEQ ID NO: 1785859 - RNA, 19 nt, Artificial Sequence
  Description of Artificial Sequence: Synthetic oligonucleotide
  Sense strand starting at position 2058 of SEQ ID NO: 1562968
gcugcaaagcgggaacaau

SEQ ID NO: 1785860 - RNA, 19 nt, Artificial Sequence
  Description of Artificial Sequence: Synthetic oligonucleotide
  Antisense strand to SEQ ID NO: 1785859
auuguucccgcuuugcagc

SEQ ID NO: 1785861 - RNA, 19 nt, Artificial Sequence
  Description of Artificial Sequence: Synthetic oligonucleotide
  Sense strand starting at position 2185 of SEQ ID NO: 1562968
gccucugauccucagagua

SEQ ID NO: 1785862 - RNA, 19 nt, Artificial Sequence
  Description of Artificial Sequence: Synthetic oligonucleotide
  Antisense strand to SEQ ID NO: 1785861
uacucugaggaucagaggc

SEQ ID NO: 1785863 - RNA, 19 nt, Artificial Sequence
  Description of Artificial Sequence: Synthetic oligonucleotide
  Sense strand starting at position 2213 of SEQ ID NO: 1562968
ggugguaacaucuaguuua

SEQ ID NO: 1785864 - RNA, 19 nt, Artificial Sequence
  Description of Artificial Sequence: Synthetic oligonucleotide
  Antisense strand to SEQ ID NO: 1785863
uaaacuagauguuaccacc

SEQ ID NO: 1785865 - RNA, 19 nt, Artificial Sequence
  Description of Artificial Sequence: Synthetic oligonucleotide
  Sense strand starting at position 2216 of SEQ ID NO: 1562968
gguaacaucuaguuuagag

SEQ ID NO: 1785866 - RNA, 19 nt, Artificial Sequence
  Description of Artificial Sequence: Synthetic oligonucleotide
  Antisense strand to SEQ ID NO: 1785865
cucuaaacuagauguuacc

SEQ ID NO: 1785867 - RNA, 19 nt, Artificial Sequence
  Description of Artificial Sequence: Synthetic oligonucleotide
  Sense strand starting at position 2235 of SEQ ID NO: 1562968
acaagaaccucagagaagu

SEQ ID NO: 1785868 - RNA, 19 nt, Artificial Sequence
  Description of Artificial Sequence: Synthetic oligonucleotide
  Antisense strand to SEQ ID NO: 1785867
acuucucugagguucuugu

SEQ ID NO: 1785869 - RNA, 19 nt, Artificial Sequence
  Description of Artificial Sequence: Synthetic oligonucleotide
  Sense strand starting at position 2597 of SEQ ID NO: 1562968
uuacauaggccugaucuca

SEQ ID NO: 1785870 - RNA, 19 nt, Artificial Sequence
  Description of Artificial Sequence: Synthetic oligonucleotide
  Antisense strand to SEQ ID NO: 1785869
ugagaucaggccuauguaa

SEQ ID NO: 1785871 - RNA, 19 nt, Artificial Sequence
  Description of Artificial Sequence: Synthetic oligonucleotide
  Sense strand starting at position 2894 of SEQ ID NO: 1562968
aagccugagcgcucuguaa

SEQ ID NO: 1785872 - RNA, 19 nt, Artificial Sequence
  Description of Artificial Sequence: Synthetic oligonucleotide
  Antisense strand to SEQ ID NO: 1785871
uuacagagcgcucaggcuu

SEQ ID NO: 1785873 - RNA, 19 nt, Artificial Sequence
  Description of Artificial Sequence: Synthetic oligonucleotide
  Sense strand starting at position 2898 of SEQ ID NO: 1562968
cugagcgcucuguaacacu

SEQ ID NO: 1785874 - RNA, 19 nt, Artificial Sequence
  Description of Artificial Sequence: Synthetic oligonucleotide
  Antisense strand to SEQ ID NO: 1785873
aguguuacagagcgcucag

SEQ ID NO: 1785875 - RNA, 19 nt, Artificial Sequence
  Description of Artificial Sequence: Synthetic oligonucleotide
  Sense strand starting at position 2940 of SEQ ID NO: 1562968
ggaugcaacuuggugaaca

SEQ ID NO: 1785876 - RNA, 19 nt, Artificial Sequence
  Description of Artificial Sequence: Synthetic oligonucleotide
  Antisense strand to SEQ ID NO: 1785875
uguucaccaaguugcaucc

SEQ ID NO: 1785877 - RNA, 19 nt, Artificial Sequence
  Description of Artificial Sequence: Synthetic oligonucleotide
  Sense strand starting at position 2951 of SEQ ID NO: 1562968
ggugaacacuucuuccaug

SEQ ID NO: 1785878 - RNA, 19 nt, Artificial Sequence
  Description of Artificial Sequence: Synthetic oligonucleotide
  Antisense strand to SEQ ID NO: 1785877
cauggaagaaguguucacc

SEQ ID NO: 1785879 - RNA, 19 nt, Artificial Sequence
  Description of Artificial Sequence: Synthetic oligonucleotide
  Sense strand starting at position 2952 of SEQ ID NO: 1562968
gugaacacuucuuccauga

SEQ ID NO: 1785880 - RNA, 19 nt, Artificial Sequence
  Description of Artificial Sequence: Synthetic oligonucleotide
  Antisense strand to SEQ ID NO: 1785879
ucauggaagaaguguucac

SEQ ID NO: 1785881 - RNA, 19 nt, Artificial Sequence
  Description of Artificial Sequence: Synthetic oligonucleotide
  Sense strand starting at position 2974 of SEQ ID NO: 1562968
cuuccuucucccugaagga

SEQ ID NO: 1785882 - RNA, 19 nt, Artificial Sequence
  Description of Artificial Sequence: Synthetic oligonucleotide
  Antisense strand to SEQ ID NO: 1785881
uccuucagggagaaggaag

SEQ ID NO: 1785883 - RNA, 19 nt, Artificial Sequence
  Description of Artificial Sequence: Synthetic oligonucleotide
  Sense strand starting at position 3015 of SEQ ID NO: 1562968
auaugcuggauugguauau

SEQ ID NO: 1785884 - RNA, 19 nt, Artificial Sequence
  Description of Artificial Sequence: Synthetic oligonucleotide
  Antisense strand to SEQ ID NO: 1785883
auauaccaauccagcauau

SEQ ID NO: 1785885 - RNA, 19 nt, Artificial Sequence
  Description of Artificial Sequence: Synthetic oligonucleotide
  Sense strand starting at position 3016 of SEQ ID NO: 1562968
uaugcuggauugguauauu

SEQ ID NO: 1785886 - RNA, 19 nt, Artificial Sequence
  Description of Artificial Sequence: Synthetic oligonucleotide
  Antisense strand to SEQ ID NO: 1785885
aauauaccaauccagcaua

SEQ ID NO: 1785887 - RNA, 19 nt, Artificial Sequence
  Description of Artificial Sequence: Synthetic oligonucleotide
  Sense strand starting at position 3019 of SEQ ID NO: 1562968
gcuggauugguauauugac

SEQ ID NO: 1785888 - RNA, 19 nt, Artificial Sequence
  Description of Artificial Sequence: Synthetic oligonucleotide
  Antisense strand to SEQ ID NO: 1785887
gucaauauaccaauccagc

SEQ ID NO: 1785889 - RNA, 19 nt, Artificial Sequence
  Description of Artificial Sequence: Synthetic oligonucleotide
  Sense strand starting at position 3317 of SEQ ID NO: 1562968
agauaugcuucuuucugca

SEQ ID NO: 1785890 - RNA, 19 nt, Artificial Sequence
  Description of Artificial Sequence: Synthetic oligonucleotide
  Antisense strand to SEQ ID NO: 1785889
ugcagaaagaagcauaucu

SEQ ID NO: 1785891 - RNA, 19 nt, Artificial Sequence
  Description of Artificial Sequence: Synthetic oligonucleotide
  Sense strand starting at position 3396 of SEQ ID NO: 1562968
uagcccuugucaccugaga

SEQ ID NO: 1785892 - RNA, 19 nt, Artificial Sequence
  Description of Artificial Sequence: Synthetic oligonucleotide
  Antisense strand to SEQ ID NO: 1785891
ucucaggugacaagggcua

SEQ ID NO: 1785893 - RNA, 19 nt, Artificial Sequence
  Description of Artificial Sequence: Synthetic oligonucleotide
  Sense strand starting at position 3459 of SEQ ID NO: 1562968
ccugucuuccacuaaguuu

SEQ ID NO: 1785894 - RNA, 19 nt, Artificial Sequence
  Description of Artificial Sequence: Synthetic oligonucleotide
  Antisense strand to SEQ ID NO: 1785893
aaacuuaguggaagacagg

SEQ ID NO: 1785895 - RNA, 19 nt, Artificial Sequence
  Description of Artificial Sequence: Synthetic oligonucleotide
  Sense strand starting at position 3563 of SEQ ID NO: 1562968
uugucauccuuugucuaaa

SEQ ID NO: 1785896 - RNA, 19 nt, Artificial Sequence
  Description of Artificial Sequence: Synthetic oligonucleotide
  Antisense strand to SEQ ID NO: 1785895
uuuagacaaaggaugacaa

SEQ ID NO: 1785897 - RNA, 19 nt, Artificial Sequence
  Description of Artificial Sequence: Synthetic oligonucleotide
  Sense strand starting at position 3603 of SEQ ID NO: 1562968
uggccacuucucuagacuu

SEQ ID NO: 1785898 - RNA, 19 nt, Artificial Sequence
  Description of Artificial Sequence: Synthetic oligonucleotide
  Antisense strand to SEQ ID NO: 1785897
aagucuagagaaguggcca

SEQ ID NO: 1785899 - RNA, 19 nt, Artificial Sequence
  Description of Artificial Sequence: Synthetic oligonucleotide
  Sense strand starting at position 3705 of SEQ ID NO: 1562968
gguuucuagaucuaggcaa

SEQ ID NO: 1785900 - RNA, 19 nt, Artificial Sequence
  Description of Artificial Sequence: Synthetic oligonucleotide
  Antisense strand to SEQ ID NO: 1785899
uugccuagaucuagaaacc

SEQ ID NO: 1785901 - RNA, 19 nt, Artificial Sequence
  Description of Artificial Sequence: Synthetic oligonucleotide
  Sense strand starting at position 3707 of SEQ ID NO: 1562968
uuucuagaucuaggcaaag

SEQ ID NO: 1785902 - RNA, 19 nt, Artificial Sequence
  Description of Artificial Sequence: Synthetic oligonucleotide
  Antisense strand to SEQ ID NO: 1785901
cuuugccuagaucuagaaa

SEQ ID NO: 1785903 - RNA, 19 nt, Artificial Sequence
  Description of Artificial Sequence: Synthetic oligonucleotide
  Sense strand starting at position 12 of SEQ ID NO: 1562969
gcagaacaucuaggaacua

SEQ ID NO: 1785904 - RNA, 19 nt, Artificial Sequence
  Description of Artificial Sequence: Synthetic oligonucleotide
  Antisense strand to SEQ ID NO: 1785903
uaguuccuagauguucugc

SEQ ID NO: 1785905 - RNA, 19 nt, Artificial Sequence
  Description of Artificial Sequence: Synthetic oligonucleotide
  Sense strand starting at position 122 of SEQ ID NO: 1562969
gagauuuaguaacagauga

SEQ ID NO: 1785906 - RNA, 19 nt, Artificial Sequence
  Description of Artificial Sequence: Synthetic oligonucleotide
  Antisense strand to SEQ ID NO: 1785905
ucaucuguuacuaaaucuc

SEQ ID NO: 1785907 - RNA, 19 nt, Artificial Sequence
  Description of Artificial Sequence: Synthetic oligonucleotide
  Sense strand starting at position 130 of SEQ ID NO: 1562969
guaacagaugauuaucugu

SEQ ID NO: 1785908 - RNA, 19 nt, Artificial Sequence
  Description of Artificial Sequence: Synthetic oligonucleotide
  Antisense strand to SEQ ID NO: 1785907
acagauaaucaucuguuac

SEQ ID NO: 1785909 - RNA, 19 nt, Artificial Sequence
  Description of Artificial Sequence: Synthetic oligonucleotide
  Sense strand starting at position 132 of SEQ ID NO: 1562969
aacagaugauuaucugugu

SEQ ID NO: 1785910 - RNA, 19 nt, Artificial Sequence
  Description of Artificial Sequence: Synthetic oligonucleotide
  Antisense strand to SEQ ID NO: 1785909
acacagauaaucaucuguu

SEQ ID NO: 1785911 - RNA, 19 nt, Artificial Sequence
  Description of Artificial Sequence: Synthetic oligonucleotide
  Sense strand starting at position 135 of SEQ ID NO: 1562969
agaugauuaucugugugaa

SEQ ID NO: 1785912 - RNA, 19 nt, Artificial Sequence
  Description of Artificial Sequence: Synthetic oligonucleotide
  Antisense strand to SEQ ID NO: 1785911
uucacacagauaaucaucu

SEQ ID NO: 1785913 - RNA, 19 nt, Artificial Sequence
  Description of Artificial Sequence: Synthetic oligonucleotide
  Sense strand starting at position 136 of SEQ ID NO: 1562969
gaugauuaucugugugaaa

SEQ ID NO: 1785914 - RNA, 19 nt, Artificial Sequence
  Description of Artificial Sequence: Synthetic oligonucleotide
  Antisense strand to SEQ ID NO: 1785913
uuucacacagauaaucauc

SEQ ID NO: 1785915 - RNA, 19 nt, Artificial Sequence
  Description of Artificial Sequence: Synthetic oligonucleotide
  Sense strand starting at position 137 of SEQ ID NO: 1562969
augauuaucugugugaaau

SEQ ID NO: 1785916 - RNA, 19 nt, Artificial Sequence
  Description of Artificial Sequence: Synthetic oligonucleotide
  Antisense strand to SEQ ID NO: 1785915
auuucacacagauaaucau

SEQ ID NO: 1785917 - RNA, 19 nt, Artificial Sequence
  Description of Artificial Sequence: Synthetic oligonucleotide
  Sense strand starting at position 138 of SEQ ID NO: 1562969
ugauuaucugugugaaauu

SEQ ID NO: 1785918 - RNA, 19 nt, Artificial Sequence
  Description of Artificial Sequence: Synthetic oligonucleotide
  Antisense strand to SEQ ID NO: 1785917
aauuucacacagauaauca

SEQ ID NO: 1785919 - RNA, 19 nt, Artificial Sequence
  Description of Artificial Sequence: Synthetic oligonucleotide
  Sense strand starting at position 209 of SEQ ID NO: 1562969
agagcaaugcauuaacauu

SEQ ID NO: 1785920 - RNA, 19 nt, Artificial Sequence
  Description of Artificial Sequence: Synthetic oligonucleotide
  Antisense strand to SEQ ID NO: 1785919
aauguuaaugcauugcucu

SEQ ID NO: 1785921 - RNA, 19 nt, Artificial Sequence
  Description of Artificial Sequence: Synthetic oligonucleotide
  Sense strand starting at position 258 of SEQ ID NO: 1562969
aguaaagugcuguauacaa

SEQ ID NO: 1785922 - RNA, 19 nt, Artificial Sequence
  Description of Artificial Sequence: Synthetic oligonucleotide
  Antisense strand to SEQ ID NO: 1785921
uuguauacagcacuuuacu

SEQ ID NO: 1785923 - RNA, 19 nt, Artificial Sequence
  Description of Artificial Sequence: Synthetic oligonucleotide
  Sense strand starting at position 283 of SEQ ID NO: 1562969
accagaacugccuagcaaa

SEQ ID NO: 1785924 - RNA, 19 nt, Artificial Sequence
  Description of Artificial Sequence: Synthetic oligonucleotide
  Antisense strand to SEQ ID NO: 1785923
uuugcuaggcaguucuggu

SEQ ID NO: 1785925 - RNA, 19 nt, Artificial Sequence
  Description of Artificial Sequence: Synthetic oligonucleotide
  Sense strand starting at position 834 of SEQ ID NO: 1562969
guaagugacuugccaacaa

SEQ ID NO: 1785926 - RNA, 19 nt, Artificial Sequence
  Description of Artificial Sequence: Synthetic oligonucleotide
  Antisense strand to SEQ ID NO: 1785925
uuguuggcaagucacuuac

SEQ ID NO: 1785927 - RNA, 19 nt, Artificial Sequence
  Description of Artificial Sequence: Synthetic oligonucleotide
  Sense strand starting at position 908 of SEQ ID NO: 1562969
uguuuaccaagacgugaga

SEQ ID NO: 1785928 - RNA, 19 nt, Artificial Sequence
  Description of Artificial Sequence: Synthetic oligonucleotide
  Antisense strand to SEQ ID NO: 1785927
ucucacgucuugguaaaca

SEQ ID NO: 1785929 - RNA, 19 nt, Artificial Sequence
  Description of Artificial Sequence: Synthetic oligonucleotide
  Sense strand starting at position 1119 of SEQ ID NO: 1562969
cuccaucugggacgucaaa

SEQ ID NO: 1785930 - RNA, 19 nt, Artificial Sequence
  Description of Artificial Sequence: Synthetic oligonucleotide
  Antisense strand to SEQ ID NO: 1785929
uuugacgucccagauggag

SEQ ID NO: 1785931 - RNA, 19 nt, Artificial Sequence
  Description of Artificial Sequence: Synthetic oligonucleotide
  Sense strand starting at position 1192 of SEQ ID NO: 1562969
agcuaugucaccgacagau

SEQ ID NO: 1785932 - RNA, 19 nt, Artificial Sequence
  Description of Artificial Sequence: Synthetic oligonucleotide
  Antisense strand to SEQ ID NO: 1785931
aucugucggugacauagcu

SEQ ID NO: 1785933 - RNA, 19 nt, Artificial Sequence
  Description of Artificial Sequence: Synthetic oligonucleotide
  Sense strand starting at position 1277 of SEQ ID NO: 1562969
augacaucgcuuuauuaaa

SEQ ID NO: 1785934 - RNA, 19 nt, Artificial Sequence
  Description of Artificial Sequence: Synthetic oligonucleotide
  Antisense strand to SEQ ID NO: 1785933
uuuaauaaagcgaugucau

SEQ ID NO: 1785935 - RNA, 19 nt, Artificial Sequence
  Description of Artificial Sequence: Synthetic oligonucleotide
  Sense strand starting at position 1322 of SEQ ID NO: 1562969
aaaccugguuuagugaaca

SEQ ID NO: 1785936 - RNA, 19 nt, Artificial Sequence
  Description of Artificial Sequence: Synthetic oligonucleotide
  Antisense strand to SEQ ID NO: 1785935
uguucacuaaaccagguuu

SEQ ID NO: 1785937 - RNA, 19 nt, Artificial Sequence
  Description of Artificial Sequence: Synthetic oligonucleotide
  Sense strand starting at position 1327 of SEQ ID NO: 1562969
ugguuuagugaacaaaggu

SEQ ID NO: 1785938 - RNA, 19 nt, Artificial Sequence
  Description of Artificial Sequence: Synthetic oligonucleotide
  Antisense strand to SEQ ID NO: 1785937
accuuuguucacuaaacca

SEQ ID NO: 1785939 - RNA, 19 nt, Artificial Sequence
  Description of Artificial Sequence: Synthetic oligonucleotide
  Sense strand starting at position 1335 of SEQ ID NO: 1562969
ugaacaaagguuuguaaac

SEQ ID NO: 1785940 - RNA, 19 nt, Artificial Sequence
  Description of Artificial Sequence: Synthetic oligonucleotide
  Antisense strand to SEQ ID NO: 1785939
guuuacaaaccuuuguuca

SEQ ID NO: 1785941 - RNA, 19 nt, Artificial Sequence
  Description of Artificial Sequence: Synthetic oligonucleotide
  Sense strand starting at position 1472 of SEQ ID NO: 1562969
ucacgauacguuuaugaga

SEQ ID NO: 1785942 - RNA, 19 nt, Artificial Sequence
  Description of Artificial Sequence: Synthetic oligonucleotide
  Antisense strand to SEQ ID NO: 1785941
ucucauaaacguaucguga

SEQ ID NO: 1785943 - RNA, 19 nt, Artificial Sequence
  Description of Artificial Sequence: Synthetic oligonucleotide
  Sense strand starting at position 1480 of SEQ ID NO: 1562969
cguuuaugagacugaucug

SEQ ID NO: 1785944 - RNA, 19 nt, Artificial Sequence
  Description of Artificial Sequence: Synthetic oligonucleotide
  Antisense strand to SEQ ID NO: 1785943
cagaucagucucauaaacg

SEQ ID NO: 1785945 - RNA, 19 nt, Artificial Sequence
  Description of Artificial Sequence: Synthetic oligonucleotide
  Sense strand starting at position 1481 of SEQ ID NO: 1562969
guuuaugagacugaucugu

SEQ ID NO: 1785946 - RNA, 19 nt, Artificial Sequence
  Description of Artificial Sequence: Synthetic oligonucleotide
  Antisense strand to SEQ ID NO: 1785945
acagaucagucucauaaac

SEQ ID NO: 1785947 - RNA, 19 nt, Artificial Sequence
  Description of Artificial Sequence: Synthetic oligonucleotide
  Sense strand starting at position 1483 of SEQ ID NO: 1562969
uuaugagacugaucuguga

SEQ ID NO: 1785948 - RNA, 19 nt, Artificial Sequence
  Description of Artificial Sequence: Synthetic oligonucleotide
  Antisense strand to SEQ ID NO: 1785947
ucacagaucagucucauaa

SEQ ID NO: 1785949 - RNA, 19 nt, Artificial Sequence
  Description of Artificial Sequence: Synthetic oligonucleotide
  Sense strand starting at position 1924 of SEQ ID NO: 1562969
cguaguccggcuucucaga

SEQ ID NO: 1785950 - RNA, 19 nt, Artificial Sequence
  Description of Artificial Sequence: Synthetic oligonucleotide
  Antisense strand to SEQ ID NO: 1785949
ucugagaagccggacuacg

SEQ ID NO: 1785951 - RNA, 19 nt, Artificial Sequence
  Description of Artificial Sequence: Synthetic oligonucleotide
  Sense strand starting at position 2068 of SEQ ID NO: 1562969
aguguauaacuuuaggauc

SEQ ID NO: 1785952 - RNA, 19 nt, Artificial Sequence
  Description of Artificial Sequence: Synthetic oligonucleotide
  Antisense strand to SEQ ID NO: 1785951
gauccuaaaguuauacacu

SEQ ID NO: 1785953 - RNA, 19 nt, Artificial Sequence
  Description of Artificial Sequence: Synthetic oligonucleotide
  Sense strand starting at position 2076 of SEQ ID NO: 1562969
acuuuaggaucuuuauuag

SEQ ID NO: 1785954 - RNA, 19 nt, Artificial Sequence
  Description of Artificial Sequence: Synthetic oligonucleotide
  Antisense strand to SEQ ID NO: 1785953
cuaauaaagauccuaaagu

SEQ ID NO: 1785955 - RNA, 19 nt, Artificial Sequence
  Description of Artificial Sequence: Synthetic oligonucleotide
  Sense strand starting at position 2118 of SEQ ID NO: 1562969
aagcgaaauccagaaguuu

SEQ ID NO: 1785956 - RNA, 19 nt, Artificial Sequence
  Description of Artificial Sequence: Synthetic oligonucleotide
  Antisense strand to SEQ ID NO: 1785955
aaacuucuggauuucgcuu

SEQ ID NO: 1785957 - RNA, 19 nt, Artificial Sequence
  Description of Artificial Sequence: Synthetic oligonucleotide
  Sense strand starting at position 2435 of SEQ ID NO: 1562969
aucuauuguggccagacau

SEQ ID NO: 1785958 - RNA, 19 nt, Artificial Sequence
  Description of Artificial Sequence: Synthetic oligonucleotide
  Antisense strand to SEQ ID NO: 1785957
augucuggccacaauagau

SEQ ID NO: 1785959 - RNA, 19 nt, Artificial Sequence
  Description of Artificial Sequence: Synthetic oligonucleotide
  Sense strand starting at position 2575 of SEQ ID NO: 1562969
guaagugagcuuuaaguga

SEQ ID NO: 1785960 - RNA, 19 nt, Artificial Sequence
  Description of Artificial Sequence: Synthetic oligonucleotide
  Antisense strand to SEQ ID NO: 1785959
ucacuuaaagcucacuuac

SEQ ID NO: 1785961 - RNA, 19 nt, Artificial Sequence
  Description of Artificial Sequence: Synthetic oligonucleotide
  Sense strand starting at position 2579 of SEQ ID NO: 1562969
gugagcuuuaagugauuuc

SEQ ID NO: 1785962 - RNA, 19 nt, Artificial Sequence
  Description of Artificial Sequence: Synthetic oligonucleotide
  Antisense strand to SEQ ID NO: 1785961
gaaaucacuuaaagcucac

SEQ ID NO: 1785963 - RNA, 19 nt, Artificial Sequence
  Description of Artificial Sequence: Synthetic oligonucleotide
  Sense strand starting at position 2679 of SEQ ID NO: 1562969
acugacuuggugugauuaa

SEQ ID NO: 1785964 - RNA, 19 nt, Artificial Sequence
  Description of Artificial Sequence: Synthetic oligonucleotide
  Antisense strand to SEQ ID NO: 1785963
uuaaucacaccaagucagu

SEQ ID NO: 1785965 - RNA, 19 nt, Artificial Sequence
  Description of Artificial Sequence: Synthetic oligonucleotide
  Sense strand starting at position 2758 of SEQ ID NO: 1562969
ggcuaaaugaagugacacu

SEQ ID NO: 1785966 - RNA, 19 nt, Artificial Sequence
  Description of Artificial Sequence: Synthetic oligonucleotide
  Antisense strand to SEQ ID NO: 1785965
agugucacuucauuuagcc

SEQ ID NO: 1785967 - RNA, 19 nt, Artificial Sequence
  Description of Artificial Sequence: Synthetic oligonucleotide
  Sense strand starting at position 2807 of SEQ ID NO: 1562969
cggcaagcacucuauaaac

SEQ ID NO: 1785968 - RNA, 19 nt, Artificial Sequence
  Description of Artificial Sequence: Synthetic oligonucleotide
  Antisense strand to SEQ ID NO: 1785967
guuuauagagugcuugccg

SEQ ID NO: 1785969 - RNA, 19 nt, Artificial Sequence
  Description of Artificial Sequence: Synthetic oligonucleotide
  Sense strand starting at position 2977 of SEQ ID NO: 1562969
auaucauucucaguuauga

SEQ ID NO: 1785970 - RNA, 19 nt, Artificial Sequence
  Description of Artificial Sequence: Synthetic oligonucleotide
  Antisense strand to SEQ ID NO: 1785969
ucauaacugagaaugauau

SEQ ID NO: 1785971 - RNA, 19 nt, Artificial Sequence
  Description of Artificial Sequence: Synthetic oligonucleotide
  Sense strand starting at position 3033 of SEQ ID NO: 1562969
gaaucuguggugggugaaa

SEQ ID NO: 1785972 - RNA, 19 nt, Artificial Sequence
  Description of Artificial Sequence: Synthetic oligonucleotide
  Antisense strand to SEQ ID NO: 1785971
uuucacccaccacagauuc

SEQ ID NO: 1785973 - RNA, 19 nt, Artificial Sequence
  Description of Artificial Sequence: Synthetic oligonucleotide
  Sense strand starting at position 3099 of SEQ ID NO: 1562969
cccuguuccuucuuggaaa

SEQ ID NO: 1785974 - RNA, 19 nt, Artificial Sequence
  Description of Artificial Sequence: Synthetic oligonucleotide
  Antisense strand to SEQ ID NO: 1785973
uuuccaagaaggaacaggg

SEQ ID NO: 1785975 - RNA, 19 nt, Artificial Sequence
  Description of Artificial Sequence: Synthetic oligonucleotide
  Sense strand starting at position 3101 of SEQ ID NO: 1562969
cuguuccuucuuggaaaga

SEQ ID NO: 1785976 - RNA, 19 nt, Artificial Sequence
  Description of Artificial Sequence: Synthetic oligonucleotide
  Antisense strand to SEQ ID NO: 1785975
ucuuuccaagaaggaacag

SEQ ID NO: 1785977 - RNA, 19 nt, Artificial Sequence
  Description of Artificial Sequence: Synthetic oligonucleotide
  Sense strand starting at position 3111 of SEQ ID NO: 1562969
uuggaaagauuucagaggu

SEQ ID NO: 1785978 - RNA, 19 nt, Artificial Sequence
  Description of Artificial Sequence: Synthetic oligonucleotide
  Antisense strand to SEQ ID NO: 1785977
accucugaaaucuuuccaa

SEQ ID NO: 1785979 - RNA, 19 nt, Artificial Sequence
  Description of Artificial Sequence: Synthetic oligonucleotide
  Sense strand starting at position 3909 of SEQ ID NO: 1562969
ucacaagggcuuuacaauu

SEQ ID NO: 1785980 - RNA, 19 nt, Artificial Sequence
  Description of Artificial Sequence: Synthetic oligonucleotide
  Antisense strand to SEQ ID NO: 1785979
aauuguaaagcccuuguga

SEQ ID NO: 1785981 - RNA, 19 nt, Artificial Sequence
  Description of Artificial Sequence: Synthetic oligonucleotide
  Sense strand starting at position 3959 of SEQ ID NO: 1562969
acaguaguuguaggauuaa

SEQ ID NO: 1785982 - RNA, 19 nt, Artificial Sequence
  Description of Artificial Sequence: Synthetic oligonucleotide
  Antisense strand to SEQ ID NO: 1785981
uuaauccuacaacuacugu

SEQ ID NO: 1785983 - RNA, 19 nt, Artificial Sequence
  Description of Artificial Sequence: Synthetic oligonucleotide
  Sense strand starting at position 3 of SEQ ID NO: 1562970
ggagguguggccugccaau

SEQ ID NO: 1785984 - RNA, 19 nt, Artificial Sequence
  Description of Artificial Sequence: Synthetic oligonucleotide
  Antisense strand to SEQ ID NO: 1785983
auuggcaggccacaccucc

SEQ ID NO: 1785985 - RNA, 19 nt, Artificial Sequence
  Description of Artificial Sequence: Synthetic oligonucleotide
  Sense strand starting at position 151 of SEQ ID NO: 1562970
ccaagaagguccucaccau

SEQ ID NO: 1785986 - RNA, 19 nt, Artificial Sequence
  Description of Artificial Sequence: Synthetic oligonucleotide
  Antisense strand to SEQ ID NO: 1785985
auggugaggaccuucuugg

SEQ ID NO: 1785987 - RNA, 19 nt, Artificial Sequence
  Description of Artificial Sequence: Synthetic oligonucleotide
  Sense strand starting at position 158 of SEQ ID NO: 1562970
gguccucaccauggagaaa

SEQ ID NO: 1785988 - RNA, 19 nt, Artificial Sequence
  Description of Artificial Sequence: Synthetic oligonucleotide
  Antisense strand to SEQ ID NO: 1785987
uuucuccauggugaggacc

SEQ ID NO: 1785989 - RNA, 19 nt, Artificial Sequence
  Description of Artificial Sequence: Synthetic oligonucleotide
  Sense strand starting at position 270 of SEQ ID NO: 1562970
gccuguuggucacaguguu

SEQ ID NO: 1785990 - RNA, 19 nt, Artificial Sequence
  Description of Artificial Sequence: Synthetic oligonucleotide
  Antisense strand to SEQ ID NO: 1785989
aacacugugaccaacaggc

SEQ ID NO: 1785991 - RNA, 19 nt, Artificial Sequence
  Description of Artificial Sequence: Synthetic oligonucleotide
  Sense strand starting at position 289 of SEQ ID NO: 1562970
gaccucauggccugaaaug

SEQ ID NO: 1785992 - RNA, 19 nt, Artificial Sequence
  Description of Artificial Sequence: Synthetic oligonucleotide
  Antisense strand to SEQ ID NO: 1785991
cauuucaggccaugagguc

SEQ ID NO: 1785993 - RNA, 19 nt, Artificial Sequence
  Description of Artificial Sequence: Synthetic oligonucleotide
  Sense strand starting at position 404 of SEQ ID NO: 1562970
ugggcuuugcgguauucaa

SEQ ID NO: 1785994 - RNA, 19 nt, Artificial Sequence
  Description of Artificial Sequence: Synthetic oligonucleotide
  Antisense strand to SEQ ID NO: 1785993
uugaauaccgcaaagccca

SEQ ID NO: 1785995 - RNA, 19 nt, Artificial Sequence
  Description of Artificial Sequence: Synthetic oligonucleotide
  Sense strand starting at position 445 of SEQ ID NO: 1562970
gggccucugcuccagauua

SEQ ID NO: 1785996 - RNA, 19 nt, Artificial Sequence
  Description of Artificial Sequence: Synthetic oligonucleotide
  Antisense strand to SEQ ID NO: 1785995
uaaucuggagcagaggccc

SEQ ID NO: 1785997 - RNA, 19 nt, Artificial Sequence
  Description of Artificial Sequence: Synthetic oligonucleotide
  Sense strand starting at position 508 of SEQ ID NO: 1562970
ggcaaagagacaugccuau

SEQ ID NO: 1785998 - RNA, 19 nt, Artificial Sequence
  Description of Artificial Sequence: Synthetic oligonucleotide
  Antisense strand to SEQ ID NO: 1785997
auaggcaugucucuuugcc

SEQ ID NO: 1785999 - RNA, 19 nt, Artificial Sequence
  Description of Artificial Sequence: Synthetic oligonucleotide
  Sense strand starting at position 567 of SEQ ID NO: 1562970
gcagaugcauaccaaguua

SEQ ID NO: 1786000 - RNA, 19 nt, Artificial Sequence
  Description of Artificial Sequence: Synthetic oligonucleotide
  Antisense strand to SEQ ID NO: 1785999
uaacuugguaugcaucugc

SEQ ID NO: 1786001 - RNA, 19 nt, Artificial Sequence
  Description of Artificial Sequence: Synthetic oligonucleotide
  Sense strand starting at position 715 of SEQ ID NO: 1562970
cgggagugguuauugcgaa

SEQ ID NO: 1786002 - RNA, 19 nt, Artificial Sequence
  Description of Artificial Sequence: Synthetic oligonucleotide
  Antisense strand to SEQ ID NO: 1786001
uucgcaauaaccacucccg

SEQ ID NO: 1786003 - RNA, 19 nt, Artificial Sequence
  Description of Artificial Sequence: Synthetic oligonucleotide
  Sense strand starting at position 716 of SEQ ID NO: 1562970
gggagugguuauugcgaaa

SEQ ID NO: 1786004 - RNA, 19 nt, Artificial Sequence
  Description of Artificial Sequence: Synthetic oligonucleotide
  Antisense strand to SEQ ID NO: 1786003
uuucgcaauaaccacuccc

SEQ ID NO: 1786005 - RNA, 19 nt, Artificial Sequence
  Description of Artificial Sequence: Synthetic oligonucleotide
  Sense strand starting at position 923 of SEQ ID NO: 1562970
ugugcaguccguguagaca

SEQ ID NO: 1786006 - RNA, 19 nt, Artificial Sequence
  Description of Artificial Sequence: Synthetic oligonucleotide
  Antisense strand to SEQ ID NO: 1786005
ugucuacacggacugcaca

SEQ ID NO: 1786007 - RNA, 19 nt, Artificial Sequence
  Description of Artificial Sequence: Synthetic oligonucleotide
  Sense strand starting at position 1306 of SEQ ID NO: 1562970
guggacugaccucggagaa

SEQ ID NO: 1786008 - RNA, 19 nt, Artificial Sequence
  Description of Artificial Sequence: Synthetic oligonucleotide
  Antisense strand to SEQ ID NO: 1786007
uucuccgaggucaguccac

SEQ ID NO: 1786009 - RNA, 19 nt, Artificial Sequence
  Description of Artificial Sequence: Synthetic oligonucleotide
  Sense strand starting at position 1534 of SEQ ID NO: 1562970
ugccgaagccgucaacuuu

SEQ ID NO: 1786010 - RNA, 19 nt, Artificial Sequence
  Description of Artificial Sequence: Synthetic oligonucleotide
  Antisense strand to SEQ ID NO: 1786009
aaaguugacggcuucggca

SEQ ID NO: 1786011 - RNA, 19 nt, Artificial Sequence
  Description of Artificial Sequence: Synthetic oligonucleotide
  Sense strand starting at position 2391 of SEQ ID NO: 1562970
aggcucagggcuuaagaga

SEQ ID NO: 1786012 - RNA, 19 nt, Artificial Sequence
  Description of Artificial Sequence: Synthetic oligonucleotide
  Antisense strand to SEQ ID NO: 1786011
ucucuuaagcccugagccu

SEQ ID NO: 1786013 - RNA, 19 nt, Artificial Sequence
  Description of Artificial Sequence: Synthetic oligonucleotide
  Sense strand starting at position 2444 of SEQ ID NO: 1562970
ucugcaccauccuagagaa

SEQ ID NO: 1786014 - RNA, 19 nt, Artificial Sequence
  Description of Artificial Sequence: Synthetic oligonucleotide
  Antisense strand to SEQ ID NO: 1786013
uucucuaggauggugcaga

SEQ ID NO: 1786015 - RNA, 19 nt, Artificial Sequence
  Description of Artificial Sequence: Synthetic oligonucleotide
  Sense strand starting at position 2464 of SEQ ID NO: 1562970
ggaccuaggccugauguua

SEQ ID NO: 1786016 - RNA, 19 nt, Artificial Sequence
  Description of Artificial Sequence: Synthetic oligonucleotide
  Antisense strand to SEQ ID NO: 1786015
uaacaucaggccuaggucc

SEQ ID NO: 1786017 - RNA, 19 nt, Artificial Sequence
  Description of Artificial Sequence: Synthetic oligonucleotide
  Sense strand starting at position 2557 of SEQ ID NO: 1562970
gaggucaccugcuuaguau

SEQ ID NO: 1786018 - RNA, 19 nt, Artificial Sequence
  Description of Artificial Sequence: Synthetic oligonucleotide
  Antisense strand to SEQ ID NO: 1786017
auacuaagcaggugaccuc

SEQ ID NO: 1786019 - RNA, 19 nt, Artificial Sequence
  Description of Artificial Sequence: Synthetic oligonucleotide
  Sense strand starting at position 2948 of SEQ ID NO: 1562970
gguccacugauaugaagca

SEQ ID NO: 1786020 - RNA, 19 nt, Artificial Sequence
  Description of Artificial Sequence: Synthetic oligonucleotide
  Antisense strand to SEQ ID NO: 1786019
ugcuucauaucaguggacc

SEQ ID NO: 1786021 - RNA, 19 nt, Artificial Sequence
  Description of Artificial Sequence: Synthetic oligonucleotide
  Sense strand starting at position 3611 of SEQ ID NO: 1562970
gagcucucuccacagggau

SEQ ID NO: 1786022 - RNA, 19 nt, Artificial Sequence
  Description of Artificial Sequence: Synthetic oligonucleotide
  Antisense strand to SEQ ID NO: 1786021
aucccuguggagagagcuc

SEQ ID NO: 1786023 - RNA, 19 nt, Artificial Sequence
  Description of Artificial Sequence: Synthetic oligonucleotide
  Sense strand starting at position 3642 of SEQ ID NO: 1562970
agaugagucacguggcacu

SEQ ID NO: 1786024 - RNA, 19 nt, Artificial Sequence
  Description of Artificial Sequence: Synthetic oligonucleotide
  Antisense strand to SEQ ID NO: 1786023
agugccacgugacucaucu

SEQ ID NO: 1786025 - RNA, 19 nt, Artificial Sequence
  Description of Artificial Sequence: Synthetic oligonucleotide
  Sense strand starting at position 3661 of SEQ ID NO: 1562970
gaccaucagucugaggaca

SEQ ID NO: 1786026 - RNA, 19 nt, Artificial Sequence
  Description of Artificial Sequence: Synthetic oligonucleotide
  Antisense strand to SEQ ID NO: 1786025
uguccucagacugaugguc

SEQ ID NO: 1786027 - RNA, 19 nt, Artificial Sequence
  Description of Artificial Sequence: Synthetic oligonucleotide
  Sense strand starting at position 3711 of SEQ ID NO: 1562970
cugcucugugcuugcagaa

SEQ ID NO: 1786028 - RNA, 19 nt, Artificial Sequence
  Description of Artificial Sequence: Synthetic oligonucleotide
  Antisense strand to SEQ ID NO: 1786027
uucugcaagcacagagcag

SEQ ID NO: 1786029 - RNA, 19 nt, Artificial Sequence
  Description of Artificial Sequence: Synthetic oligonucleotide
  Sense strand starting at position 3739 of SEQ ID NO: 1562970
gaggacacuugcuugcuua

SEQ ID NO: 1786030 - RNA, 19 nt, Artificial Sequence
  Description of Artificial Sequence: Synthetic oligonucleotide
  Antisense strand to SEQ ID NO: 1786029
uaagcaagcaaguguccuc

SEQ ID NO: 1786031 - RNA, 19 nt, Artificial Sequence
  Description of Artificial Sequence: Synthetic oligonucleotide
  Sense strand starting at position 3798 of SEQ ID NO: 1562970
cccacuauagcugaagauu

SEQ ID NO: 1786032 - RNA, 19 nt, Artificial Sequence
  Description of Artificial Sequence: Synthetic oligonucleotide
  Antisense strand to SEQ ID NO: 1786031
aaucuucagcuauaguggg

SEQ ID NO: 1786033 - RNA, 19 nt, Artificial Sequence
  Description of Artificial Sequence: Synthetic oligonucleotide
  Sense strand starting at position 78 of SEQ ID NO: 1562971
cagccuuagcaggaagauu

SEQ ID NO: 1786034 - RNA, 19 nt, Artificial Sequence
  Description of Artificial Sequence: Synthetic oligonucleotide
  Antisense strand to SEQ ID NO: 1786033
aaucuuccugcuaaggcug

SEQ ID NO: 1786035 - RNA, 19 nt, Artificial Sequence
  Description of Artificial Sequence: Synthetic oligonucleotide
  Sense strand starting at position 205 of SEQ ID NO: 1562971
cuuugcuuuguauacauga

SEQ ID NO: 1786036 - RNA, 19 nt, Artificial Sequence
  Description of Artificial Sequence: Synthetic oligonucleotide
  Antisense strand to SEQ ID NO: 1786035
ucauguauacaaagcaaag

SEQ ID NO: 1786037 - RNA, 19 nt, Artificial Sequence
  Description of Artificial Sequence: Synthetic oligonucleotide
  Sense strand starting at position 619 of SEQ ID NO: 1562971
acggaaucagcaugagaag

SEQ ID NO: 1786038 - RNA, 19 nt, Artificial Sequence
  Description of Artificial Sequence: Synthetic oligonucleotide
  Antisense strand to SEQ ID NO: 1786037
cuucucaugcugauuccgu

SEQ ID NO: 1786039 - RNA, 19 nt, Artificial Sequence
  Description of Artificial Sequence: Synthetic oligonucleotide
  Sense strand starting at position 620 of SEQ ID NO: 1562971
cggaaucagcaugagaagu

SEQ ID NO: 1786040 - RNA, 19 nt, Artificial Sequence
  Description of Artificial Sequence: Synthetic oligonucleotide
  Antisense strand to SEQ ID NO: 1786039
acuucucaugcugauuccg

SEQ ID NO: 1786041 - RNA, 19 nt, Artificial Sequence
  Description of Artificial Sequence: Synthetic oligonucleotide
  Sense strand starting at position 631 of SEQ ID NO: 1562971
ugagaaguuuccucaucuc

SEQ ID NO: 1786042 - RNA, 19 nt, Artificial Sequence
  Description of Artificial Sequence: Synthetic oligonucleotide
  Antisense strand to SEQ ID NO: 1786041
gagaugaggaaacuucuca

SEQ ID NO: 1786043 - RNA, 19 nt, Artificial Sequence
  Description of Artificial Sequence: Synthetic oligonucleotide
  Sense strand starting at position 825 of SEQ ID NO: 1562971
aguguauugacuuaucgag

SEQ ID NO: 1786044 - RNA, 19 nt, Artificial Sequence
  Description of Artificial Sequence: Synthetic oligonucleotide
  Antisense strand to SEQ ID NO: 1786043
cucgauaagucaauacacu

SEQ ID NO: 1786045 - RNA, 19 nt, Artificial Sequence
  Description of Artificial Sequence: Synthetic oligonucleotide
  Sense strand starting at position 832 of SEQ ID NO: 1562971
ugacuuaucgagcacacug

SEQ ID NO: 1786046 - RNA, 19 nt, Artificial Sequence
  Description of Artificial Sequence: Synthetic oligonucleotide
  Antisense strand to SEQ ID NO: 1786045
cagugugcucgauaaguca

SEQ ID NO: 1786047 - RNA, 19 nt, Artificial Sequence
  Description of Artificial Sequence: Synthetic oligonucleotide
  Sense strand starting at position 891 of SEQ ID NO: 1562971
gagaaacgguguuugaucu

SEQ ID NO: 1786048 - RNA, 19 nt, Artificial Sequence
  Description of Artificial Sequence: Synthetic oligonucleotide
  Antisense strand to SEQ ID NO: 1786047
agaucaaacaccguuucuc

SEQ ID NO: 1786049 - RNA, 19 nt, Artificial Sequence
  Description of Artificial Sequence: Synthetic oligonucleotide
  Sense strand starting at position 895 of SEQ ID NO: 1562971
aacgguguuugaucugaau

SEQ ID NO: 1786050 - RNA, 19 nt, Artificial Sequence
  Description of Artificial Sequence: Synthetic oligonucleotide
  Antisense strand to SEQ ID NO: 1786049
auucagaucaaacaccguu

SEQ ID NO: 1786051 - RNA, 19 nt, Artificial Sequence
  Description of Artificial Sequence: Synthetic oligonucleotide
  Sense strand starting at position 926 of SEQ ID NO: 1562971
aagggaaguuaaguccaau

SEQ ID NO: 1786052 - RNA, 19 nt, Artificial Sequence
  Description of Artificial Sequence: Synthetic oligonucleotide
  Antisense strand to SEQ ID NO: 1786051
auuggacuuaacuucccuu

SEQ ID NO: 1786053 - RNA, 19 nt, Artificial Sequence
  Description of Artificial Sequence: Synthetic oligonucleotide
  Sense strand starting at position 1020 of SEQ ID NO: 1562971
ggucaagugaagcaaucaa

SEQ ID NO: 1786054 - RNA, 19 nt, Artificial Sequence
  Description of Artificial Sequence: Synthetic oligonucleotide
  Antisense strand to SEQ ID NO: 1786053
uugauugcuucacuugacc

SEQ ID NO: 1786055 - RNA, 19 nt, Artificial Sequence
  Description of Artificial Sequence: Synthetic oligonucleotide
  Sense strand starting at position 1108 of SEQ ID NO: 1562971
guaacuaugugaccuugga

SEQ ID NO: 1786056 - RNA, 19 nt, Artificial Sequence
  Description of Artificial Sequence: Synthetic oligonucleotide
  Antisense strand to SEQ ID NO: 1786055
uccaaggucacauaguuac

SEQ ID NO: 1786057 - RNA, 19 nt, Artificial Sequence
  Description of Artificial Sequence: Synthetic oligonucleotide
  Sense strand starting at position 1126 of SEQ ID NO: 1562971
agaaguaacucauuaucug

SEQ ID NO: 1786058 - RNA, 19 nt, Artificial Sequence
  Description of Artificial Sequence: Synthetic oligonucleotide
  Antisense strand to SEQ ID NO: 1786057
cagauaaugaguuacuucu

SEQ ID NO: 1786059 - RNA, 19 nt, Artificial Sequence
  Description of Artificial Sequence: Synthetic oligonucleotide
  Sense strand starting at position 1162 of SEQ ID NO: 1562971
ggauaaacgagaggaguuu

SEQ ID NO: 1786060 - RNA, 19 nt, Artificial Sequence
  Description of Artificial Sequence: Synthetic oligonucleotide
  Antisense strand to SEQ ID NO: 1786059
aaacuccucucguuuaucc

SEQ ID NO: 1786061 - RNA, 19 nt, Artificial Sequence
  Description of Artificial Sequence: Synthetic oligonucleotide
  Sense strand starting at position 1256 of SEQ ID NO: 1562971
aggcgagguagguacuauu

SEQ ID NO: 1786062 - RNA, 19 nt, Artificial Sequence
  Description of Artificial Sequence: Synthetic oligonucleotide
  Antisense strand to SEQ ID NO: 1786061
aauaguaccuaccucgccu

SEQ ID NO: 1786063 - RNA, 19 nt, Artificial Sequence
  Description of Artificial Sequence: Synthetic oligonucleotide
  Sense strand starting at position 1353 of SEQ ID NO: 1562971
ccuagauagguuugaguua

SEQ ID NO: 1786064 - RNA, 19 nt, Artificial Sequence
  Description of Artificial Sequence: Synthetic oligonucleotide
  Antisense strand to SEQ ID NO: 1786063
uaacucaaaccuaucuagg

SEQ ID NO: 1786065 - RNA, 19 nt, Artificial Sequence
  Description of Artificial Sequence: Synthetic oligonucleotide
  Sense strand starting at position 1441 of SEQ ID NO: 1562971
gcuggaagugaccaguaaa

SEQ ID NO: 1786066 - RNA, 19 nt, Artificial Sequence
  Description of Artificial Sequence: Synthetic oligonucleotide
  Antisense strand to SEQ ID NO: 1786065
uuuacuggucacuuccagc

SEQ ID NO: 1786067 - RNA, 19 nt, Artificial Sequence
  Description of Artificial Sequence: Synthetic oligonucleotide
  Sense strand starting at position 1553 of SEQ ID NO: 1562971
ccgagugaccuuuagccaa

SEQ ID NO: 1786068 - RNA, 19 nt, Artificial Sequence
  Description of Artificial Sequence: Synthetic oligonucleotide
  Antisense strand to SEQ ID NO: 1786067
uuggcuaaaggucacucgg

SEQ ID NO: 1786069 - RNA, 19 nt, Artificial Sequence
  Description of Artificial Sequence: Synthetic oligonucleotide
  Sense strand starting at position 1598 of SEQ ID NO: 1562971
cucgaaggucugcaagacu

SEQ ID NO: 1786070 - RNA, 19 nt, Artificial Sequence
  Description of Artificial Sequence: Synthetic oligonucleotide
  Antisense strand to SEQ ID NO: 1786069
agucuugcagaccuucgag

SEQ ID NO: 1786071 - RNA, 19 nt, Artificial Sequence
  Description of Artificial Sequence: Synthetic oligonucleotide
  Sense strand starting at position 2002 of SEQ ID NO: 1562971
gguccuuaugcgccuguga

SEQ ID NO: 1786072 - RNA, 19 nt, Artificial Sequence
  Description of Artificial Sequence: Synthetic oligonucleotide
  Antisense strand to SEQ ID NO: 1786071
ucacaggcgcauaaggacc

SEQ ID NO: 1786073 - RNA, 19 nt, Artificial Sequence
  Description of Artificial Sequence: Synthetic oligonucleotide
  Sense strand starting at position 2181 of SEQ ID NO: 1562971
gcgccugaaagagaucaga

SEQ ID NO: 1786074 - RNA, 19 nt, Artificial Sequence
  Description of Artificial Sequence: Synthetic oligonucleotide
  Antisense strand to SEQ ID NO: 1786073
ucugaucucuuucaggcgc

SEQ ID NO: 1786075 - RNA, 19 nt, Artificial Sequence
  Description of Artificial Sequence: Synthetic oligonucleotide
  Sense strand starting at position 2544 of SEQ ID NO: 1562971
cuagauaaugaccgcuauu

SEQ ID NO: 1786076 - RNA, 19 nt, Artificial Sequence
  Description of Artificial Sequence: Synthetic oligonucleotide
  Antisense strand to SEQ ID NO: 1786075
aauagcggucauuaucuag

SEQ ID NO: 1786077 - RNA, 19 nt, Artificial Sequence
  Description of Artificial Sequence: Synthetic oligonucleotide
  Sense strand starting at position 2618 of SEQ ID NO: 1562971
accagucauaucggugaag

SEQ ID NO: 1786078 - RNA, 19 nt, Artificial Sequence
  Description of Artificial Sequence: Synthetic oligonucleotide
  Antisense strand to SEQ ID NO: 1786077
cuucaccgauaugacuggu

SEQ ID NO: 1786079 - RNA, 19 nt, Artificial Sequence
  Description of Artificial Sequence: Synthetic oligonucleotide
  Sense strand starting at position 2619 of SEQ ID NO: 1562971
ccagucauaucggugaaga

SEQ ID NO: 1786080 - RNA, 19 nt, Artificial Sequence
  Description of Artificial Sequence: Synthetic oligonucleotide
  Antisense strand to SEQ ID NO: 1786079
ucuucaccgauaugacugg

SEQ ID NO: 1786081 - RNA, 19 nt, Artificial Sequence
  Description of Artificial Sequence: Synthetic oligonucleotide
  Sense strand starting at position 2620 of SEQ ID NO: 1562971
cagucauaucggugaagaa

SEQ ID NO: 1786082 - RNA, 19 nt, Artificial Sequence
  Description of Artificial Sequence: Synthetic oligonucleotide
  Antisense strand to SEQ ID NO: 1786081
uucuucaccgauaugacug

SEQ ID NO: 1786083 - RNA, 19 nt, Artificial Sequence
  Description of Artificial Sequence: Synthetic oligonucleotide
  Sense strand starting at position 2621 of SEQ ID NO: 1562971
agucauaucggugaagaag

SEQ ID NO: 1786084 - RNA, 19 nt, Artificial Sequence
  Description of Artificial Sequence: Synthetic oligonucleotide
  Antisense strand to SEQ ID NO: 1786083
cuucuucaccgauaugacu

SEQ ID NO: 1786085 - RNA, 19 nt, Artificial Sequence
  Description of Artificial Sequence: Synthetic oligonucleotide
  Sense strand starting at position 2728 of SEQ ID NO: 1562971
ucagccacacauugugaua

SEQ ID NO: 1786086 - RNA, 19 nt, Artificial Sequence
  Description of Artificial Sequence: Synthetic oligonucleotide
  Antisense strand to SEQ ID NO: 1786085
uaucacaauguguggcuga

SEQ ID NO: 1786087 - RNA, 19 nt, Artificial Sequence
  Description of Artificial Sequence: Synthetic oligonucleotide
  Sense strand starting at position 3098 of SEQ ID NO: 1562971
ccuggcacucuguaaacau

SEQ ID NO: 1786088 - RNA, 19 nt, Artificial Sequence
  Description of Artificial Sequence: Synthetic oligonucleotide
  Antisense strand to SEQ ID NO: 1786087
auguuuacagagugccagg

SEQ ID NO: 1786089 - RNA, 19 nt, Artificial Sequence
  Description of Artificial Sequence: Synthetic oligonucleotide
  Sense strand starting at position 3105 of SEQ ID NO: 1562971
cucuguaaacaucgaauca

SEQ ID NO: 1786090 - RNA, 19 nt, Artificial Sequence
  Description of Artificial Sequence: Synthetic oligonucleotide
  Antisense strand to SEQ ID NO: 1786089
ugauucgauguuuacagag

SEQ ID NO: 1786091 - RNA, 19 nt, Artificial Sequence
  Description of Artificial Sequence: Synthetic oligonucleotide
  Sense strand starting at position 3201 of SEQ ID NO: 1562971
aaggauaagccaugagguu

SEQ ID NO: 1786092 - RNA, 19 nt, Artificial Sequence
  Description of Artificial Sequence: Synthetic oligonucleotide
  Antisense strand to SEQ ID NO: 1786091
aaccucauggcuuauccuu

SEQ ID NO: 1786093 - RNA, 19 nt, Artificial Sequence
  Description of Artificial Sequence: Synthetic oligonucleotide
  Sense strand starting at position 3364 of SEQ ID NO: 1562971
auuaaaggcuaucugugau

SEQ ID NO: 1786094 - RNA, 19 nt, Artificial Sequence
  Description of Artificial Sequence: Synthetic oligonucleotide
  Antisense strand to SEQ ID NO: 1786093
aucacagauagccuuuaau

SEQ ID NO: 1786095 - RNA, 19 nt, Artificial Sequence
  Description of Artificial Sequence: Synthetic oligonucleotide
  Sense strand starting at position 3367 of SEQ ID NO: 1562971
aaaggcuaucugugauagu

SEQ ID NO: 1786096 - RNA, 19 nt, Artificial Sequence
  Description of Artificial Sequence: Synthetic oligonucleotide
  Antisense strand to SEQ ID NO: 1786095
acuaucacagauagccuuu

SEQ ID NO: 1786097 - RNA, 19 nt, Artificial Sequence
  Description of Artificial Sequence: Synthetic oligonucleotide
  Sense strand starting at position 3413 of SEQ ID NO: 1562971
gucugugguaguuaacaau

SEQ ID NO: 1786098 - RNA, 19 nt, Artificial Sequence
  Description of Artificial Sequence: Synthetic oligonucleotide
  Antisense strand to SEQ ID NO: 1786097
auuguuaacuaccacagac

SEQ ID NO: 1786099 - RNA, 19 nt, Artificial Sequence
  Description of Artificial Sequence: Synthetic oligonucleotide
  Sense strand starting at position 3435 of SEQ ID NO: 1562971
uauauuaaaggcugugaua

SEQ ID NO: 1786100 - RNA, 19 nt, Artificial Sequence
  Description of Artificial Sequence: Synthetic oligonucleotide
  Antisense strand to SEQ ID NO: 1786099
uaucacagccuuuaauaua

SEQ ID NO: 1786101 - RNA, 19 nt, Artificial Sequence
  Description of Artificial Sequence: Synthetic oligonucleotide
  Sense strand starting at position 3444 of SEQ ID NO: 1562971
ggcugugauaguuacaaug

SEQ ID NO: 1786102 - RNA, 19 nt, Artificial Sequence
  Description of Artificial Sequence: Synthetic oligonucleotide
  Antisense strand to SEQ ID NO: 1786101
cauuguaacuaucacagcc

SEQ ID NO: 1786103 - RNA, 19 nt, Artificial Sequence
  Description of Artificial Sequence: Synthetic oligonucleotide
  Sense strand starting at position 3549 of SEQ ID NO: 1562971
ggcugugauaguuauaaug

SEQ ID NO: 1786104 - RNA, 19 nt, Artificial Sequence
  Description of Artificial Sequence: Synthetic oligonucleotide
  Antisense strand to SEQ ID NO: 1786103
cauuauaacuaucacagcc

SEQ ID NO: 1786105 - RNA, 19 nt, Artificial Sequence
  Description of Artificial Sequence: Synthetic oligonucleotide
  Sense strand starting at position 3583 of SEQ ID NO: 1562971
gucugugaugguuauaaug

SEQ ID NO: 1786106 - RNA, 19 nt, Artificial Sequence
  Description of Artificial Sequence: Synthetic oligonucleotide
  Antisense strand to SEQ ID NO: 1786105
cauuauaaccaucacagac

SEQ ID NO: 1786107 - RNA, 19 nt, Artificial Sequence
  Description of Artificial Sequence: Synthetic oligonucleotide
  Sense strand starting at position 3661 of SEQ ID NO: 1562971
gucugugauaguuaagaug

SEQ ID NO: 1786108 - RNA, 19 nt, Artificial Sequence
  Description of Artificial Sequence: Synthetic oligonucleotide
  Antisense strand to SEQ ID NO: 1786107
caucuuaacuaucacagac

SEQ ID NO: 1786109 - RNA, 19 nt, Artificial Sequence
  Description of Artificial Sequence: Synthetic oligonucleotide
  Sense strand starting at position 3695 of SEQ ID NO: 1562971
gucugugaugguuacaaug

SEQ ID NO: 1786110 - RNA, 19 nt, Artificial Sequence
  Description of Artificial Sequence: Synthetic oligonucleotide
  Antisense strand to SEQ ID NO: 1786109
cauuguaaccaucacagac

SEQ ID NO: 1786111 - RNA, 19 nt, Artificial Sequence
  Description of Artificial Sequence: Synthetic oligonucleotide
  Sense strand starting at position 3917 of SEQ ID NO: 1562971
acuugcuuuggucaacaca

SEQ ID NO: 1786112 - RNA, 19 nt, Artificial Sequence
  Description of Artificial Sequence: Synthetic oligonucleotide
  Antisense strand to SEQ ID NO: 1786111
uguguugaccaaagcaagu

SEQ ID NO: 1786113 - RNA, 19 nt, Artificial Sequence
  Description of Artificial Sequence: Synthetic oligonucleotide
  Sense strand starting at position 176 of SEQ ID NO: 1562972
ucaggaucaucagggucau

SEQ ID NO: 1786114 - RNA, 19 nt, Artificial Sequence
  Description of Artificial Sequence: Synthetic oligonucleotide
  Antisense strand to SEQ ID NO: 1786113
augacccugaugauccuga

SEQ ID NO: 1786115 - RNA, 19 nt, Artificial Sequence
  Description of Artificial Sequence: Synthetic oligonucleotide
  Sense strand starting at position 404 of SEQ ID NO: 1562972
ugaggacuaugugguccua

SEQ ID NO: 1786116 - RNA, 19 nt, Artificial Sequence
  Description of Artificial Sequence: Synthetic oligonucleotide
  Antisense strand to SEQ ID NO: 1786115
uaggaccacauaguccuca

SEQ ID NO: 1786117 - RNA, 19 nt, Artificial Sequence
  Description of Artificial Sequence: Synthetic oligonucleotide
  Sense strand starting at position 453 of SEQ ID NO: 1562972
gacagaugcucaugacuga

SEQ ID NO: 1786118 - RNA, 19 nt, Artificial Sequence
  Description of Artificial Sequence: Synthetic oligonucleotide
  Antisense strand to SEQ ID NO: 1786117
ucagucaugagcaucuguc

SEQ ID NO: 1786119 - RNA, 19 nt, Artificial Sequence
  Description of Artificial Sequence: Synthetic oligonucleotide
  Sense strand starting at position 512 of SEQ ID NO: 1562972
aggagugugugcugaguaa

SEQ ID NO: 1786120 - RNA, 19 nt, Artificial Sequence
  Description of Artificial Sequence: Synthetic oligonucleotide
  Antisense strand to SEQ ID NO: 1786119
uuacucagcacacacuccu

SEQ ID NO: 1786121 - RNA, 19 nt, Artificial Sequence
  Description of Artificial Sequence: Synthetic oligonucleotide
  Sense strand starting at position 593 of SEQ ID NO: 1562972
ggguguccagcagaagaaa

SEQ ID NO: 1786122 - RNA, 19 nt, Artificial Sequence
  Description of Artificial Sequence: Synthetic oligonucleotide
  Antisense strand to SEQ ID NO: 1786121
uuucuucugcuggacaccc

SEQ ID NO: 1786123 - RNA, 19 nt, Artificial Sequence
  Description of Artificial Sequence: Synthetic oligonucleotide
  Sense strand starting at position 621 of SEQ ID NO: 1562972
gagagaacuccagguccuu

SEQ ID NO: 1786124 - RNA, 19 nt, Artificial Sequence
  Description of Artificial Sequence: Synthetic oligonucleotide
  Antisense strand to SEQ ID NO: 1786123
aaggaccuggaguucucuc

SEQ ID NO: 1786125 - RNA, 19 nt, Artificial Sequence
  Description of Artificial Sequence: Synthetic oligonucleotide
  Sense strand starting at position 830 of SEQ ID NO: 1562972
ucagcuuauccgcgccuaa

SEQ ID NO: 1786126 - RNA, 19 nt, Artificial Sequence
  Description of Artificial Sequence: Synthetic oligonucleotide
  Antisense strand to SEQ ID NO: 1786125
uuaggcgcggauaagcuga

SEQ ID NO: 1786127 - RNA, 19 nt, Artificial Sequence
  Description of Artificial Sequence: Synthetic oligonucleotide
  Sense strand starting at position 832 of SEQ ID NO: 1562972
agcuuauccgcgccuaacu

SEQ ID NO: 1786128 - RNA, 19 nt, Artificial Sequence
  Description of Artificial Sequence: Synthetic oligonucleotide
  Antisense strand to SEQ ID NO: 1786127
aguuaggcgcggauaagcu

SEQ ID NO: 1786129 - RNA, 19 nt, Artificial Sequence
  Description of Artificial Sequence: Synthetic oligonucleotide
  Sense strand starting at position 842 of SEQ ID NO: 1562972
cgccuaacuucucuacaga

SEQ ID NO: 1786130 - RNA, 19 nt, Artificial Sequence
  Description of Artificial Sequence: Synthetic oligonucleotide
  Antisense strand to SEQ ID NO: 1786129
ucuguagagaaguuaggcg

SEQ ID NO: 1786131 - RNA, 19 nt, Artificial Sequence
  Description of Artificial Sequence: Synthetic oligonucleotide
  Sense strand starting at position 979 of SEQ ID NO: 1562972
ggcuguugcugaugucauc

SEQ ID NO: 1786132 - RNA, 19 nt, Artificial Sequence
  Description of Artificial Sequence: Synthetic oligonucleotide
  Antisense strand to SEQ ID NO: 1786131
gaugacaucagcaacagcc

SEQ ID NO: 1786133 - RNA, 19 nt, Artificial Sequence
  Description of Artificial Sequence: Synthetic oligonucleotide
  Sense strand starting at position 2579 of SEQ ID NO: 1562972
gagcaaauguucuaagcgu

SEQ ID NO: 1786134 - RNA, 19 nt, Artificial Sequence
  Description of Artificial Sequence: Synthetic oligonucleotide
  Antisense strand to SEQ ID NO: 1786133
acgcuuagaacauuugcuc

SEQ ID NO: 1786135 - RNA, 19 nt, Artificial Sequence
  Description of Artificial Sequence: Synthetic oligonucleotide
  Sense strand starting at position 2583 of SEQ ID NO: 1562972
aaauguucuaagcguguga

SEQ ID NO: 1786136 - RNA, 19 nt, Artificial Sequence
  Description of Artificial Sequence: Synthetic oligonucleotide
  Antisense strand to SEQ ID NO: 1786135
ucacacgcuuagaacauuu

SEQ ID NO: 1786137 - RNA, 19 nt, Artificial Sequence
  Description of Artificial Sequence: Synthetic oligonucleotide
  Sense strand starting at position 2587 of SEQ ID NO: 1562972
guucuaagcgugugaggca

SEQ ID NO: 1786138 - RNA, 19 nt, Artificial Sequence
  Description of Artificial Sequence: Synthetic oligonucleotide
  Antisense strand to SEQ ID NO: 1786137
ugccucacacgcuuagaac

SEQ ID NO: 1786139 - RNA, 19 nt, Artificial Sequence
  Description of Artificial Sequence: Synthetic oligonucleotide
  Sense strand starting at position 2703 of SEQ ID NO: 1562972
ccugaaguggcucagggau

SEQ ID NO: 1786140 - RNA, 19 nt, Artificial Sequence
  Description of Artificial Sequence: Synthetic oligonucleotide
  Antisense strand to SEQ ID NO: 1786139
aucccugagccacuucagg

SEQ ID NO: 1786141 - RNA, 19 nt, Artificial Sequence
  Description of Artificial Sequence: Synthetic oligonucleotide
  Sense strand starting at position 3474 of SEQ ID NO: 1562972
gaguuuggcugcugcaaga

SEQ ID NO: 1786142 - RNA, 19 nt, Artificial Sequence
  Description of Artificial Sequence: Synthetic oligonucleotide
  Antisense strand to SEQ ID NO: 1786141
ucuugcagcagccaaacuc

SEQ ID NO: 1786143 - RNA, 19 nt, Artificial Sequence
  Description of Artificial Sequence: Synthetic oligonucleotide
  Sense strand starting at position 3687 of SEQ ID NO: 1562972
gagacagggucuugauaag

SEQ ID NO: 1786144 - RNA, 19 nt, Artificial Sequence
  Description of Artificial Sequence: Synthetic oligonucleotide
  Antisense strand to SEQ ID NO: 1786143
cuuaucaagacccugucuc

SEQ ID NO: 1786145 - RNA, 19 nt, Artificial Sequence
  Description of Artificial Sequence: Synthetic oligonucleotide
  Sense strand starting at position 3787 of SEQ ID NO: 1562972
gaaacugugcccugccaga

SEQ ID NO: 1786146 - RNA, 19 nt, Artificial Sequence
  Description of Artificial Sequence: Synthetic oligonucleotide
  Antisense strand to SEQ ID NO: 1786145
ucuggcagggcacaguuuc

SEQ ID NO: 1786147 - RNA, 19 nt, Artificial Sequence
  Description of Artificial Sequence: Synthetic oligonucleotide
  Sense strand starting at position 3835 of SEQ ID NO: 1562972
guugguuucugucacuugu

SEQ ID NO: 1786148 - RNA, 19 nt, Artificial Sequence
  Description of Artificial Sequence: Synthetic oligonucleotide
  Antisense strand to SEQ ID NO: 1786147
acaagugacagaaaccaac

SEQ ID NO: 1786149 - RNA, 19 nt, Artificial Sequence
  Description of Artificial Sequence: Synthetic oligonucleotide
  Sense strand starting at position 3953 of SEQ ID NO: 1562972
cuggcucucuucggagaga

SEQ ID NO: 1786150 - RNA, 19 nt, Artificial Sequence
  Description of Artificial Sequence: Synthetic oligonucleotide
  Antisense strand to SEQ ID NO: 1786149
ucucuccgaagagagccag

SEQ ID NO: 1786151 - RNA, 19 nt, Artificial Sequence
  Description of Artificial Sequence: Synthetic oligonucleotide
  Sense strand starting at position 4 of SEQ ID NO: 1562973
aguguaggugcauaggauu

SEQ ID NO: 1786152 - RNA, 19 nt, Artificial Sequence
  Description of Artificial Sequence: Synthetic oligonucleotide
  Antisense strand to SEQ ID NO: 1786151
aauccuaugcaccuacacu

SEQ ID NO: 1786153 - RNA, 19 nt, Artificial Sequence
  Description of Artificial Sequence: Synthetic oligonucleotide
  Sense strand starting at position 218 of SEQ ID NO: 1562973
gguugugaucacuauccca

SEQ ID NO: 1786154 - RNA, 19 nt, Artificial Sequence
  Description of Artificial Sequence: Synthetic oligonucleotide
  Antisense strand to SEQ ID NO: 1786153
ugggauagugaucacaacc

SEQ ID NO: 1786155 - RNA, 19 nt, Artificial Sequence
  Description of Artificial Sequence: Synthetic oligonucleotide
  Sense strand starting at position 1238 of SEQ ID NO: 1562973
acgcgaaucugucuuucca

SEQ ID NO: 1786156 - RNA, 19 nt, Artificial Sequence
  Description of Artificial Sequence: Synthetic oligonucleotide
  Antisense strand to SEQ ID NO: 1786155
uggaaagacagauucgcgu

SEQ ID NO: 1786157 - RNA, 19 nt, Artificial Sequence
  Description of Artificial Sequence: Synthetic oligonucleotide
  Sense strand starting at position 1240 of SEQ ID NO: 1562973
gcgaaucugucuuuccaag

SEQ ID NO: 1786158 - RNA, 19 nt, Artificial Sequence
  Description of Artificial Sequence: Synthetic oligonucleotide
  Antisense strand to SEQ ID NO: 1786157
cuuggaaagacagauucgc

SEQ ID NO: 1786159 - RNA, 19 nt, Artificial Sequence
  Description of Artificial Sequence: Synthetic oligonucleotide
  Sense strand starting at position 1367 of SEQ ID NO: 1562973
gcaguuccuuuggcuugaa

SEQ ID NO: 1786160 - RNA, 19 nt, Artificial Sequence
  Description of Artificial Sequence: Synthetic oligonucleotide
  Antisense strand to SEQ ID NO: 1786159
uucaagccaaaggaacugc

SEQ ID NO: 1786161 - RNA, 19 nt, Artificial Sequence
  Description of Artificial Sequence: Synthetic oligonucleotide
  Sense strand starting at position 1442 of SEQ ID NO: 1562973
ccaggucuuuccugauauc

SEQ ID NO: 1786162 - RNA, 19 nt, Artificial Sequence
  Description of Artificial Sequence: Synthetic oligonucleotide
  Antisense strand to SEQ ID NO: 1786161
gauaucaggaaagaccugg

SEQ ID NO: 1786163 - RNA, 19 nt, Artificial Sequence
  Description of Artificial Sequence: Synthetic oligonucleotide
  Sense strand starting at position 1451 of SEQ ID NO: 1562973
uccugauaucccggacaac

SEQ ID NO: 1786164 - RNA, 19 nt, Artificial Sequence
  Description of Artificial Sequence: Synthetic oligonucleotide
  Antisense strand to SEQ ID NO: 1786163
guuguccgggauaucagga

SEQ ID NO: 1786165 - RNA, 19 nt, Artificial Sequence
  Description of Artificial Sequence: Synthetic oligonucleotide
  Sense strand starting at position 1516 of SEQ ID NO: 1562973
ugacuucucguccaggguu

SEQ ID NO: 1786166 - RNA, 19 nt, Artificial Sequence
  Description of Artificial Sequence: Synthetic oligonucleotide
  Antisense strand to SEQ ID NO: 1786165
aacccuggacgagaaguca

SEQ ID NO: 1786167 - RNA, 19 nt, Artificial Sequence
  Description of Artificial Sequence: Synthetic oligonucleotide
  Sense strand starting at position 2196 of SEQ ID NO: 1562973
gaggguccgcccgaggaau

SEQ ID NO: 1786168 - RNA, 19 nt, Artificial Sequence
  Description of Artificial Sequence: Synthetic oligonucleotide
  Antisense strand to SEQ ID NO: 1786167
auuccucgggcggacccuc

SEQ ID NO: 1786169 - RNA, 19 nt, Artificial Sequence
  Description of Artificial Sequence: Synthetic oligonucleotide
  Sense strand starting at position 2436 of SEQ ID NO: 1562973
ccgcgaaguccuuguagug

SEQ ID NO: 1786170 - RNA, 19 nt, Artificial Sequence
  Description of Artificial Sequence: Synthetic oligonucleotide
  Antisense strand to SEQ ID NO: 1786169
cacuacaaggacuucgcgg

SEQ ID NO: 1786171 - RNA, 19 nt, Artificial Sequence
  Description of Artificial Sequence: Synthetic oligonucleotide
  Sense strand starting at position 2526 of SEQ ID NO: 1562973
augcuugaggccuguggua

SEQ ID NO: 1786172 - RNA, 19 nt, Artificial Sequence
  Description of Artificial Sequence: Synthetic oligonucleotide
  Antisense strand to SEQ ID NO: 1786171
uaccacaggccucaagcau

SEQ ID NO: 1786173 - RNA, 19 nt, Artificial Sequence
  Description of Artificial Sequence: Synthetic oligonucleotide
  Sense strand starting at position 2528 of SEQ ID NO: 1562973
gcuugaggccugugguaga

SEQ ID NO: 1786174 - RNA, 19 nt, Artificial Sequence
  Description of Artificial Sequence: Synthetic oligonucleotide
  Antisense strand to SEQ ID NO: 1786173
ucuaccacaggccucaagc

SEQ ID NO: 1786175 - RNA, 19 nt, Artificial Sequence
  Description of Artificial Sequence: Synthetic oligonucleotide
  Sense strand starting at position 2691 of SEQ ID NO: 1562973
aguccuaguugaggaguga

SEQ ID NO: 1786176 - RNA, 19 nt, Artificial Sequence
  Description of Artificial Sequence: Synthetic oligonucleotide
  Antisense strand to SEQ ID NO: 1786175
ucacuccucaacuaggacu

SEQ ID NO: 1786177 - RNA, 19 nt, Artificial Sequence
  Description of Artificial Sequence: Synthetic oligonucleotide
  Sense strand starting at position 2692 of SEQ ID NO: 1562973
guccuaguugaggagugaa

SEQ ID NO: 1786178 - RNA, 19 nt, Artificial Sequence
  Description of Artificial Sequence: Synthetic oligonucleotide
  Antisense strand to SEQ ID NO: 1786177
uucacuccucaacuaggac

SEQ ID NO: 1786179 - RNA, 19 nt, Artificial Sequence
  Description of Artificial Sequence: Synthetic oligonucleotide
  Sense strand starting at position 2967 of SEQ ID NO: 1562973
gcacaaaugucccgugugu

SEQ ID NO: 1786180 - RNA, 19 nt, Artificial Sequence
  Description of Artificial Sequence: Synthetic oligonucleotide
  Antisense strand to SEQ ID NO: 1786179
acacacgggacauuugugc

SEQ ID NO: 1786181 - RNA, 19 nt, Artificial Sequence
  Description of Artificial Sequence: Synthetic oligonucleotide
  Sense strand starting at position 2969 of SEQ ID NO: 1562973
acaaaugucccguguguag

SEQ ID NO: 1786182 - RNA, 19 nt, Artificial Sequence
  Description of Artificial Sequence: Synthetic oligonucleotide
  Antisense strand to SEQ ID NO: 1786181
cuacacacgggacauuugu

SEQ ID NO: 1786183 - RNA, 19 nt, Artificial Sequence
  Description of Artificial Sequence: Synthetic oligonucleotide
  Sense strand starting at position 2991 of SEQ ID NO: 1562973
gguccuagugaggauguuu

SEQ ID NO: 1786184 - RNA, 19 nt, Artificial Sequence
  Description of Artificial Sequence: Synthetic oligonucleotide
  Antisense strand to SEQ ID NO: 1786183
aaacauccucacuaggacc

SEQ ID NO: 1786185 - RNA, 19 nt, Artificial Sequence
  Description of Artificial Sequence: Synthetic oligonucleotide
  Sense strand starting at position 2996 of SEQ ID NO: 1562973
uagugaggauguuugucuu

SEQ ID NO: 1786186 - RNA, 19 nt, Artificial Sequence
  Description of Artificial Sequence: Synthetic oligonucleotide
  Antisense strand to SEQ ID NO: 1786185
aagacaaacauccucacua

SEQ ID NO: 1786187 - RNA, 19 nt, Artificial Sequence
  Description of Artificial Sequence: Synthetic oligonucleotide
  Sense strand starting at position 3019 of SEQ ID NO: 1562973
ggacuugagagcuggcaga

SEQ ID NO: 1786188 - RNA, 19 nt, Artificial Sequence
  Description of Artificial Sequence: Synthetic oligonucleotide
  Antisense strand to SEQ ID NO: 1786187
ucugccagcucucaagucc

SEQ ID NO: 1786189 - RNA, 19 nt, Artificial Sequence
  Description of Artificial Sequence: Synthetic oligonucleotide
  Sense strand starting at position 3575 of SEQ ID NO: 1562973
aggucaugaauaggcauau

SEQ ID NO: 1786190 - RNA, 19 nt, Artificial Sequence
  Description of Artificial Sequence: Synthetic oligonucleotide
  Antisense strand to SEQ ID NO: 1786189
auaugccuauucaugaccu

SEQ ID NO: 1786191 - RNA, 19 nt, Artificial Sequence
  Description of Artificial Sequence: Synthetic oligonucleotide
  Sense strand starting at position 3683 of SEQ ID NO: 1562973
ugucuuagaucucugccca

SEQ ID NO: 1786192 - RNA, 19 nt, Artificial Sequence
  Description of Artificial Sequence: Synthetic oligonucleotide
  Antisense strand to SEQ ID NO: 1786191
ugggcagagaucuaagaca

SEQ ID NO: 1786193 - RNA, 19 nt, Artificial Sequence
  Description of Artificial Sequence: Synthetic oligonucleotide
  Sense strand starting at position 3803 of SEQ ID NO: 1562973
acauacaucccuugcagua

SEQ ID NO: 1786194 - RNA, 19 nt, Artificial Sequence
  Description of Artificial Sequence: Synthetic oligonucleotide
  Antisense strand to SEQ ID NO: 1786193
uacugcaagggauguaugu

SEQ ID NO: 1786195 - RNA, 19 nt, Artificial Sequence
  Description of Artificial Sequence: Synthetic oligonucleotide
  Sense strand starting at position 3893 of SEQ ID NO: 1562973
ugagaaguaugggaggaau

SEQ ID NO: 1786196 - RNA, 19 nt, Artificial Sequence
  Description of Artificial Sequence: Synthetic oligonucleotide
  Antisense strand to SEQ ID NO: 1786195
auuccucccauacuucuca

SEQ ID NO: 1786197 - RNA, 19 nt, Artificial Sequence
  Description of Artificial Sequence: Synthetic oligonucleotide
  Sense strand starting at position 347 of SEQ ID NO: 1562974
guaacucucuggcuugcaa

SEQ ID NO: 1786198 - RNA, 19 nt, Artificial Sequence
  Description of Artificial Sequence: Synthetic oligonucleotide
  Antisense strand to SEQ ID NO: 1786197
uugcaagccagagaguuac

SEQ ID NO: 1786199 - RNA, 19 nt, Artificial Sequence
  Description of Artificial Sequence: Synthetic oligonucleotide
  Sense strand starting at position 375 of SEQ ID NO: 1562974
gcaaccgauuccuccaaca

SEQ ID NO: 1786200 - RNA, 19 nt, Artificial Sequence
  Description of Artificial Sequence: Synthetic oligonucleotide
  Antisense strand to SEQ ID NO: 1786199
uguuggaggaaucgguugc

SEQ ID NO: 1786201 - RNA, 19 nt, Artificial Sequence
  Description of Artificial Sequence: Synthetic oligonucleotide
  Sense strand starting at position 826 of SEQ ID NO: 1562974
gcgcgagcgcguuauaacu

SEQ ID NO: 1786202 - RNA, 19 nt, Artificial Sequence
  Description of Artificial Sequence: Synthetic oligonucleotide
  Antisense strand to SEQ ID NO: 1786201
aguuauaacgcgcucgcgc

SEQ ID NO: 1786203 - RNA, 19 nt, Artificial Sequence
  Description of Artificial Sequence: Synthetic oligonucleotide
  Sense strand starting at position 832 of SEQ ID NO: 1562974
gcgcguuauaacugugcuu

SEQ ID NO: 1786204 - RNA, 19 nt, Artificial Sequence
  Description of Artificial Sequence: Synthetic oligonucleotide
  Antisense strand to SEQ ID NO: 1786203
aagcacaguuauaacgcgc

SEQ ID NO: 1786205 - RNA, 19 nt, Artificial Sequence
  Description of Artificial Sequence: Synthetic oligonucleotide
  Sense strand starting at position 843 of SEQ ID NO: 1562974
cugugcuuggccgcgagaa

SEQ ID NO: 1786206 - RNA, 19 nt, Artificial Sequence
  Description of Artificial Sequence: Synthetic oligonucleotide
  Antisense strand to SEQ ID NO: 1786205
uucucgcggccaagcacag

SEQ ID NO: 1786207 - RNA, 19 nt, Artificial Sequence
  Description of Artificial Sequence: Synthetic oligonucleotide
  Sense strand starting at position 845 of SEQ ID NO: 1562974
gugcuuggccgcgagaaca

SEQ ID NO: 1786208 - RNA, 19 nt, Artificial Sequence
  Description of Artificial Sequence: Synthetic oligonucleotide
  Antisense strand to SEQ ID NO: 1786207
uguucucgcggccaagcac

SEQ ID NO: 1786209 - RNA, 19 nt, Artificial Sequence
  Description of Artificial Sequence: Synthetic oligonucleotide
  Sense strand starting at position 1309 of SEQ ID NO: 1562974
aagguuucgcggcaaagga

SEQ ID NO: 1786210 - RNA, 19 nt, Artificial Sequence
  Description of Artificial Sequence: Synthetic oligonucleotide
  Antisense strand to SEQ ID NO: 1786209
uccuuugccgcgaaaccuu

SEQ ID NO: 1786211 - RNA, 19 nt, Artificial Sequence
  Description of Artificial Sequence: Synthetic oligonucleotide
  Sense strand starting at position 1869 of SEQ ID NO: 1562974
gcgggacuucccgagcaca

SEQ ID NO: 1786212 - RNA, 19 nt, Artificial Sequence
  Description of Artificial Sequence: Synthetic oligonucleotide
  Antisense strand to SEQ ID NO: 1786211
ugugcucgggaagucccgc

SEQ ID NO: 1786213 - RNA, 19 nt, Artificial Sequence
  Description of Artificial Sequence: Synthetic oligonucleotide
  Sense strand starting at position 2349 of SEQ ID NO: 1562974
gccgguucuuggucgaacu

SEQ ID NO: 1786214 - RNA, 19 nt, Artificial Sequence
  Description of Artificial Sequence: Synthetic oligonucleotide
  Antisense strand to SEQ ID NO: 1786213
aguucgaccaagaaccggc

SEQ ID NO: 1786215 - RNA, 19 nt, Artificial Sequence
  Description of Artificial Sequence: Synthetic oligonucleotide
  Sense strand starting at position 2404 of SEQ ID NO: 1562974
gcaugaagucagggaagga

SEQ ID NO: 1786216 - RNA, 19 nt, Artificial Sequence
  Description of Artificial Sequence: Synthetic oligonucleotide
  Antisense strand to SEQ ID NO: 1786215
uccuucccugacuucaugc

SEQ ID NO: 1786217 - RNA, 19 nt, Artificial Sequence
  Description of Artificial Sequence: Synthetic oligonucleotide
  Sense strand starting at position 2540 of SEQ ID NO: 1562974
agccuugaccucuaaaguc

SEQ ID NO: 1786218 - RNA, 19 nt, Artificial Sequence
  Description of Artificial Sequence: Synthetic oligonucleotide
  Antisense strand to SEQ ID NO: 1786217
gacuuuagaggucaaggcu

SEQ ID NO: 1786219 - RNA, 19 nt, Artificial Sequence
  Description of Artificial Sequence: Synthetic oligonucleotide
  Sense strand starting at position 2818 of SEQ ID NO: 1562974
ccacgaguuucuuacugag

SEQ ID NO: 1786220 - RNA, 19 nt, Artificial Sequence
  Description of Artificial Sequence: Synthetic oligonucleotide
  Antisense strand to SEQ ID NO: 1786219
cucaguaagaaacucgugg

SEQ ID NO: 1786221 - RNA, 19 nt, Artificial Sequence
  Description of Artificial Sequence: Synthetic oligonucleotide
  Sense strand starting at position 2820 of SEQ ID NO: 1562974
acgaguuucuuacugagaa

SEQ ID NO: 1786222 - RNA, 19 nt, Artificial Sequence
  Description of Artificial Sequence: Synthetic oligonucleotide
  Antisense strand to SEQ ID NO: 1786221
uucucaguaagaaacucgu

SEQ ID NO: 1786223 - RNA, 19 nt, Artificial Sequence
  Description of Artificial Sequence: Synthetic oligonucleotide
  Sense strand starting at position 2821 of SEQ ID NO: 1562974
cgaguuucuuacugagaau

SEQ ID NO: 1786224 - RNA, 19 nt, Artificial Sequence
  Description of Artificial Sequence: Synthetic oligonucleotide
  Antisense strand to SEQ ID NO: 1786223
auucucaguaagaaacucg

SEQ ID NO: 1786225 - RNA, 19 nt, Artificial Sequence
  Description of Artificial Sequence: Synthetic oligonucleotide
  Sense strand starting at position 2824 of SEQ ID NO: 1562974
guuucuuacugagaaugga

SEQ ID NO: 1786226 - RNA, 19 nt, Artificial Sequence
  Description of Artificial Sequence: Synthetic oligonucleotide
  Antisense strand to SEQ ID NO: 1786225
uccauucucaguaagaaac

SEQ ID NO: 1786227 - RNA, 19 nt, Artificial Sequence
  Description of Artificial Sequence: Synthetic oligonucleotide
  Sense strand starting at position 2858 of SEQ ID NO: 1562974
agaggagguuggagacaau

SEQ ID NO: 1786228 - RNA, 19 nt, Artificial Sequence
  Description of Artificial Sequence: Synthetic oligonucleotide
  Antisense strand to SEQ ID NO: 1786227
auugucuccaaccuccucu

SEQ ID NO: 1786229 - RNA, 19 nt, Artificial Sequence
  Description of Artificial Sequence: Synthetic oligonucleotide
  Sense strand starting at position 2883 of SEQ ID NO: 1562974
ccuggagcuucuugggaga

SEQ ID NO: 1786230 - RNA, 19 nt, Artificial Sequence
  Description of Artificial Sequence: Synthetic oligonucleotide
  Antisense strand to SEQ ID NO: 1786229
ucucccaagaagcuccagg

SEQ ID NO: 1786231 - RNA, 19 nt, Artificial Sequence
  Description of Artificial Sequence: Synthetic oligonucleotide
  Sense strand starting at position 2885 of SEQ ID NO: 1562974
uggagcuucuugggagagu

SEQ ID NO: 1786232 - RNA, 19 nt, Artificial Sequence
  Description of Artificial Sequence: Synthetic oligonucleotide
  Antisense strand to SEQ ID NO: 1786231
acucucccaagaagcucca

SEQ ID NO: 1786233 - RNA, 19 nt, Artificial Sequence
  Description of Artificial Sequence: Synthetic oligonucleotide
  Sense strand starting at position 2886 of SEQ ID NO: 1562974
ggagcuucuugggagaguu

SEQ ID NO: 1786234 - RNA, 19 nt, Artificial Sequence
  Description of Artificial Sequence: Synthetic oligonucleotide
  Antisense strand to SEQ ID NO: 1786233
aacucucccaagaagcucc

SEQ ID NO: 1786235 - RNA, 19 nt, Artificial Sequence
  Description of Artificial Sequence: Synthetic oligonucleotide
  Sense strand starting at position 2944 of SEQ ID NO: 1562974
agggucaagucccuuauua

SEQ ID NO: 1786236 - RNA, 19 nt, Artificial Sequence
  Description of Artificial Sequence: Synthetic oligonucleotide
  Antisense strand to SEQ ID NO: 1786235
uaauaagggacuugacccu

SEQ ID NO: 1786237 - RNA, 19 nt, Artificial Sequence
  Description of Artificial Sequence: Synthetic oligonucleotide
  Sense strand starting at position 2946 of SEQ ID NO: 1562974
ggucaagucccuuauuaug

SEQ ID NO: 1786238 - RNA, 19 nt, Artificial Sequence
  Description of Artificial Sequence: Synthetic oligonucleotide
  Antisense strand to SEQ ID NO: 1786237
cauaauaagggacuugacc

SEQ ID NO: 1786239 - RNA, 19 nt, Artificial Sequence
  Description of Artificial Sequence: Synthetic oligonucleotide
  Sense strand starting at position 3079 of SEQ ID NO: 1562974
aggcccuugacuugaguuu

SEQ ID NO: 1786240 - RNA, 19 nt, Artificial Sequence
  Description of Artificial Sequence: Synthetic oligonucleotide
  Antisense strand to SEQ ID NO: 1786239
aaacucaagucaagggccu

SEQ ID NO: 1786241 - RNA, 19 nt, Artificial Sequence
  Description of Artificial Sequence: Synthetic oligonucleotide
  Sense strand starting at position 3141 of SEQ ID NO: 1562974
caggucaccugugaugagu

SEQ ID NO: 1786242 - RNA, 19 nt, Artificial Sequence
  Description of Artificial Sequence: Synthetic oligonucleotide
  Antisense strand to SEQ ID NO: 1786241
acucaucacaggugaccug

SEQ ID NO: 1786243 - RNA, 19 nt, Artificial Sequence
  Description of Artificial Sequence: Synthetic oligonucleotide
  Sense strand starting at position 3182 of SEQ ID NO: 1562974
ucacaucucuggcugcaua

SEQ ID NO: 1786244 - RNA, 19 nt, Artificial Sequence
  Description of Artificial Sequence: Synthetic oligonucleotide
  Antisense strand to SEQ ID NO: 1786243
uaugcagccagagauguga

SEQ ID NO: 1786245 - RNA, 19 nt, Artificial Sequence
  Description of Artificial Sequence: Synthetic oligonucleotide
  Sense strand starting at position 3202 of SEQ ID NO: 1562974
aggauuccguccgcaggaa

SEQ ID NO: 1786246 - RNA, 19 nt, Artificial Sequence
  Description of Artificial Sequence: Synthetic oligonucleotide
  Antisense strand to SEQ ID NO: 1786245
uuccugcggacggaauccu

SEQ ID NO: 1786247 - RNA, 19 nt, Artificial Sequence
  Description of Artificial Sequence: Synthetic oligonucleotide
  Sense strand starting at position 3271 of SEQ ID NO: 1562974
acuugcaucuggucagaca

SEQ ID NO: 1786248 - RNA, 19 nt, Artificial Sequence
  Description of Artificial Sequence: Synthetic oligonucleotide
  Antisense strand to SEQ ID NO: 1786247
ugucugaccagaugcaagu

SEQ ID NO: 1786249 - RNA, 19 nt, Artificial Sequence
  Description of Artificial Sequence: Synthetic oligonucleotide
  Sense strand starting at position 3272 of SEQ ID NO: 1562974
cuugcaucuggucagacau

SEQ ID NO: 1786250 - RNA, 19 nt, Artificial Sequence
  Description of Artificial Sequence: Synthetic oligonucleotide
  Antisense strand to SEQ ID NO: 1786249
augucugaccagaugcaag

SEQ ID NO: 1786251 - RNA, 19 nt, Artificial Sequence
  Description of Artificial Sequence: Synthetic oligonucleotide
  Sense strand starting at position 3292 of SEQ ID NO: 1562974
cccuguucucagugacuua

SEQ ID NO: 1786252 - RNA, 19 nt, Artificial Sequence
  Description of Artificial Sequence: Synthetic oligonucleotide
  Antisense strand to SEQ ID NO: 1786251
uaagucacugagaacaggg

SEQ ID NO: 1786253 - RNA, 19 nt, Artificial Sequence
  Description of Artificial Sequence: Synthetic oligonucleotide
  Sense strand starting at position 3299 of SEQ ID NO: 1562974
cucagugacuuaugguaaa

SEQ ID NO: 1786254 - RNA, 19 nt, Artificial Sequence
  Description of Artificial Sequence: Synthetic oligonucleotide
  Antisense strand to SEQ ID NO: 1786253
uuuaccauaagucacugag

SEQ ID NO: 1786255 - RNA, 19 nt, Artificial Sequence
  Description of Artificial Sequence: Synthetic oligonucleotide
  Sense strand starting at position 3302 of SEQ ID NO: 1562974
agugacuuaugguaaauga

SEQ ID NO: 1786256 - RNA, 19 nt, Artificial Sequence
  Description of Artificial Sequence: Synthetic oligonucleotide
  Antisense strand to SEQ ID NO: 1786255
ucauuuaccauaagucacu

SEQ ID NO: 1786257 - RNA, 19 nt, Artificial Sequence
  Description of Artificial Sequence: Synthetic oligonucleotide
  Sense strand starting at position 3313 of SEQ ID NO: 1562974
guaaaugacuuagcagcuu

SEQ ID NO: 1786258 - RNA, 19 nt, Artificial Sequence
  Description of Artificial Sequence: Synthetic oligonucleotide
  Antisense strand to SEQ ID NO: 1786257
aagcugcuaagucauuuac

SEQ ID NO: 1786259 - RNA, 19 nt, Artificial Sequence
  Description of Artificial Sequence: Synthetic oligonucleotide
  Sense strand starting at position 3356 of SEQ ID NO: 1562974
ugaagagucuuccucuguu

SEQ ID NO: 1786260 - RNA, 19 nt, Artificial Sequence
  Description of Artificial Sequence: Synthetic oligonucleotide
  Antisense strand to SEQ ID NO: 1786259
aacagaggaagacucuuca

SEQ ID NO: 1786261 - RNA, 19 nt, Artificial Sequence
  Description of Artificial Sequence: Synthetic oligonucleotide
  Sense strand starting at position 3385 of SEQ ID NO: 1562974
gagugcaguuggcacaauu

SEQ ID NO: 1786262 - RNA, 19 nt, Artificial Sequence
  Description of Artificial Sequence: Synthetic oligonucleotide
  Antisense strand to SEQ ID NO: 1786261
aauugugccaacugcacuc

SEQ ID NO: 1786263 - RNA, 19 nt, Artificial Sequence
  Description of Artificial Sequence: Synthetic oligonucleotide
  Sense strand starting at position 3861 of SEQ ID NO: 1562974
ccgccagccaucugugauu

SEQ ID NO: 1786264 - RNA, 19 nt, Artificial Sequence
  Description of Artificial Sequence: Synthetic oligonucleotide
  Antisense strand to SEQ ID NO: 1786263
aaucacagauggcuggcgg

SEQ ID NO: 1786265 - RNA, 19 nt, Artificial Sequence
  Description of Artificial Sequence: Synthetic oligonucleotide
  Sense strand starting at position 3937 of SEQ ID NO: 1562974
ggcccagugacucaugagu

SEQ ID NO: 1786266 - RNA, 19 nt, Artificial Sequence
  Description of Artificial Sequence: Synthetic oligonucleotide
  Antisense strand to SEQ ID NO: 1786265
acucaugagucacugggcc

SEQ ID NO: 1786267 - RNA, 19 nt, Artificial Sequence
  Description of Artificial Sequence: Synthetic oligonucleotide
  Sense strand starting at position 3939 of SEQ ID NO: 1562974
cccagugacucaugaguaa

SEQ ID NO: 1786268 - RNA, 19 nt, Artificial Sequence
  Description of Artificial Sequence: Synthetic oligonucleotide
  Antisense strand to SEQ ID NO: 1786267
uuacucaugagucacuggg

SEQ ID NO: 1786269 - RNA, 19 nt, Artificial Sequence
  Description of Artificial Sequence: Synthetic oligonucleotide
  Sense strand starting at position 3943 of SEQ ID NO: 1562974
gugacucaugaguaaccuu

SEQ ID NO: 1786270 - RNA, 19 nt, Artificial Sequence
  Description of Artificial Sequence: Synthetic oligonucleotide
  Antisense strand to SEQ ID NO: 1786269
aagguuacucaugagucac

SEQ ID NO: 1786271 - RNA, 19 nt, Artificial Sequence
  Description of Artificial Sequence: Synthetic oligonucleotide
  Sense strand starting at position 3950 of SEQ ID NO: 1562974
augaguaaccuugaccagu

SEQ ID NO: 1786272 - RNA, 19 nt, Artificial Sequence
  Description of Artificial Sequence: Synthetic oligonucleotide
  Antisense strand to SEQ ID NO: 1786271
acuggucaagguuacucau

SEQ ID NO: 1786273 - RNA, 19 nt, Artificial Sequence
  Description of Artificial Sequence: Synthetic oligonucleotide
  Sense strand starting at position 3959 of SEQ ID NO: 1562974
cuugaccaguguucucauu

SEQ ID NO: 1786274 - RNA, 19 nt, Artificial Sequence
  Description of Artificial Sequence: Synthetic oligonucleotide
  Antisense strand to SEQ ID NO: 1786273
aaugagaacacuggucaag

SEQ ID NO: 1786275 - RNA, 19 nt, Artificial Sequence
  Description of Artificial Sequence: Synthetic oligonucleotide
  Sense strand starting at position 3961 of SEQ ID NO: 1562974
ugaccaguguucucauuag

SEQ ID NO: 1786276 - RNA, 19 nt, Artificial Sequence
  Description of Artificial Sequence: Synthetic oligonucleotide
  Antisense strand to SEQ ID NO: 1786275
cuaaugagaacacugguca

SEQ ID NO: 1786277 - RNA, 19 nt, Artificial Sequence
  Description of Artificial Sequence: Synthetic oligonucleotide
  Sense strand starting at position 641 of SEQ ID NO: 1562975
guaacucucuggcuugcaa

SEQ ID NO: 1786278 - RNA, 19 nt, Artificial Sequence
  Description of Artificial Sequence: Synthetic oligonucleotide
  Antisense strand to SEQ ID NO: 1786277
uugcaagccagagaguuac

SEQ ID NO: 1786279 - RNA, 19 nt, Artificial Sequence
  Description of Artificial Sequence: Synthetic oligonucleotide
  Sense strand starting at position 669 of SEQ ID NO: 1562975
gcaaccgauuccuccaaca

SEQ ID NO: 1786280 - RNA, 19 nt, Artificial Sequence
  Description of Artificial Sequence: Synthetic oligonucleotide
  Antisense strand to SEQ ID NO: 1786279
uguuggaggaaucgguugc

SEQ ID NO: 1786281 - RNA, 19 nt, Artificial Sequence
  Description of Artificial Sequence: Synthetic oligonucleotide
  Sense strand starting at position 1120 of SEQ ID NO: 1562975
gcgcgagcgcguuauaacu

SEQ ID NO: 1786282 - RNA, 19 nt, Artificial Sequence
  Description of Artificial Sequence: Synthetic oligonucleotide
  Antisense strand to SEQ ID NO: 1786281
aguuauaacgcgcucgcgc

SEQ ID NO: 1786283 - RNA, 19 nt, Artificial Sequence
  Description of Artificial Sequence: Synthetic oligonucleotide
  Sense strand starting at position 1126 of SEQ ID NO: 1562975
gcgcguuauaacugugcuu

SEQ ID NO: 1786284 - RNA, 19 nt, Artificial Sequence
  Description of Artificial Sequence: Synthetic oligonucleotide
  Antisense strand to SEQ ID NO: 1786283
aagcacaguuauaacgcgc

SEQ ID NO: 1786285 - RNA, 19 nt, Artificial Sequence
  Description of Artificial Sequence: Synthetic oligonucleotide
  Sense strand starting at position 1137 of SEQ ID NO: 1562975
cugugcuuggccgcgagaa

SEQ ID NO: 1786286 - RNA, 19 nt, Artificial Sequence
  Description of Artificial Sequence: Synthetic oligonucleotide
  Antisense strand to SEQ ID NO: 1786285
uucucgcggccaagcacag

SEQ ID NO: 1786287 - RNA, 19 nt, Artificial Sequence
  Description of Artificial Sequence: Synthetic oligonucleotide
  Sense strand starting at position 1139 of SEQ ID NO: 1562975
gugcuuggccgcgagaaca

SEQ ID NO: 1786288 - RNA, 19 nt, Artificial Sequence
  Description of Artificial Sequence: Synthetic oligonucleotide
  Antisense strand to SEQ ID NO: 1786287
uguucucgcggccaagcac

SEQ ID NO: 1786289 - RNA, 19 nt, Artificial Sequence
  Description of Artificial Sequence: Synthetic oligonucleotide
  Sense strand starting at position 1603 of SEQ ID NO: 1562975
aagguuucgcggcaaagga

SEQ ID NO: 1786290 - RNA, 19 nt, Artificial Sequence
  Description of Artificial Sequence: Synthetic oligonucleotide
  Antisense strand to SEQ ID NO: 1786289
uccuuugccgcgaaaccuu

SEQ ID NO: 1786291 - RNA, 19 nt, Artificial Sequence
  Description of Artificial Sequence: Synthetic oligonucleotide
  Sense strand starting at position 2163 of SEQ ID NO: 1562975
gcgggacuucccgagcaca

SEQ ID NO: 1786292 - RNA, 19 nt, Artificial Sequence
  Description of Artificial Sequence: Synthetic oligonucleotide
  Antisense strand to SEQ ID NO: 1786291
ugugcucgggaagucccgc

SEQ ID NO: 1786293 - RNA, 19 nt, Artificial Sequence
  Description of Artificial Sequence: Synthetic oligonucleotide
  Sense strand starting at position 2643 of SEQ ID NO: 1562975
gccgguucuuggucgaacu

SEQ ID NO: 1786294 - RNA, 19 nt, Artificial Sequence
  Description of Artificial Sequence: Synthetic oligonucleotide
  Antisense strand to SEQ ID NO: 1786293
aguucgaccaagaaccggc

SEQ ID NO: 1786295 - RNA, 19 nt, Artificial Sequence
  Description of Artificial Sequence: Synthetic oligonucleotide
  Sense strand starting at position 2698 of SEQ ID NO: 1562975
gcaugaagucagggaagga

SEQ ID NO: 1786296 - RNA, 19 nt, Artificial Sequence
  Description of Artificial Sequence: Synthetic oligonucleotide
  Antisense strand to SEQ ID NO: 1786295
uccuucccugacuucaugc

SEQ ID NO: 1786297 - RNA, 19 nt, Artificial Sequence
  Description of Artificial Sequence: Synthetic oligonucleotide
  Sense strand starting at position 2834 of SEQ ID NO: 1562975
agccuugaccucuaaaguc

SEQ ID NO: 1786298 - RNA, 19 nt, Artificial Sequence
  Description of Artificial Sequence: Synthetic oligonucleotide
  Antisense strand to SEQ ID NO: 1786297
gacuuuagaggucaaggcu

SEQ ID NO: 1786299 - RNA, 19 nt, Artificial Sequence
  Description of Artificial Sequence: Synthetic oligonucleotide
  Sense strand starting at position 3112 of SEQ ID NO: 1562975
ccacgaguuucuuacugag

SEQ ID NO: 1786300 - RNA, 19 nt, Artificial Sequence
  Description of Artificial Sequence: Synthetic oligonucleotide
  Antisense strand to SEQ ID NO: 1786299
cucaguaagaaacucgugg

SEQ ID NO: 1786301 - RNA, 19 nt, Artificial Sequence
  Description of Artificial Sequence: Synthetic oligonucleotide
  Sense strand starting at position 3114 of SEQ ID NO: 1562975
acgaguuucuuacugagaa

SEQ ID NO: 1786302 - RNA, 19 nt, Artificial Sequence
  Description of Artificial Sequence: Synthetic oligonucleotide
  Antisense strand to SEQ ID NO: 1786301
uucucaguaagaaacucgu

SEQ ID NO: 1786303 - RNA, 19 nt, Artificial Sequence
  Description of Artificial Sequence: Synthetic oligonucleotide
  Sense strand starting at position 3115 of SEQ ID NO: 1562975
cgaguuucuuacugagaau

SEQ ID NO: 1786304 - RNA, 19 nt, Artificial Sequence
  Description of Artificial Sequence: Synthetic oligonucleotide
  Antisense strand to SEQ ID NO: 1786303
auucucaguaagaaacucg

SEQ ID NO: 1786305 - RNA, 19 nt, Artificial Sequence
  Description of Artificial Sequence: Synthetic oligonucleotide
  Sense strand starting at position 3118 of SEQ ID NO: 1562975
guuucuuacugagaaugga

SEQ ID NO: 1786306 - RNA, 19 nt, Artificial Sequence
  Description of Artificial Sequence: Synthetic oligonucleotide
  Antisense strand to SEQ ID NO: 1786305
uccauucucaguaagaaac

SEQ ID NO: 1786307 - RNA, 19 nt, Artificial Sequence
  Description of Artificial Sequence: Synthetic oligonucleotide
  Sense strand starting at position 3152 of SEQ ID NO: 1562975
agaggagguuggagacaau

SEQ ID NO: 1786308 - RNA, 19 nt, Artificial Sequence
  Description of Artificial Sequence: Synthetic oligonucleotide
  Antisense strand to SEQ ID NO: 1786307
auugucuccaaccuccucu

SEQ ID NO: 1786309 - RNA, 19 nt, Artificial Sequence
  Description of Artificial Sequence: Synthetic oligonucleotide
  Sense strand starting at position 3177 of SEQ ID NO: 1562975
ccuggagcuucuugggaga

SEQ ID NO: 1786310 - RNA, 19 nt, Artificial Sequence
  Description of Artificial Sequence: Synthetic oligonucleotide
  Antisense strand to SEQ ID NO: 1786309
ucucccaagaagcuccagg

SEQ ID NO: 1786311 - RNA, 19 nt, Artificial Sequence
  Description of Artificial Sequence: Synthetic oligonucleotide
  Sense strand starting at position 3179 of SEQ ID NO: 1562975
uggagcuucuugggagagu

SEQ ID NO: 1786312 - RNA, 19 nt, Artificial Sequence
  Description of Artificial Sequence: Synthetic oligonucleotide
  Antisense strand to SEQ ID NO: 1786311
acucucccaagaagcucca

SEQ ID NO: 1786313 - RNA, 19 nt, Artificial Sequence
  Description of Artificial Sequence: Synthetic oligonucleotide
  Sense strand starting at position 3180 of SEQ ID NO: 1562975
ggagcuucuugggagaguu

SEQ ID NO: 1786314 - RNA, 19 nt, Artificial Sequence
  Description of Artificial Sequence: Synthetic oligonucleotide
  Antisense strand to SEQ ID NO: 1786313
aacucucccaagaagcucc

SEQ ID NO: 1786315 - RNA, 19 nt, Artificial Sequence
  Description of Artificial Sequence: Synthetic oligonucleotide
  Sense strand starting at position 3238 of SEQ ID NO: 1562975
agggucaagucccuuauua

SEQ ID NO: 1786316 - RNA, 19 nt, Artificial Sequence
  Description of Artificial Sequence: Synthetic oligonucleotide
  Antisense strand to SEQ ID NO: 1786315
uaauaagggacuugacccu

SEQ ID NO: 1786317 - RNA, 19 nt, Artificial Sequence
  Description of Artificial Sequence: Synthetic oligonucleotide
  Sense strand starting at position 3240 of SEQ ID NO: 1562975
ggucaagucccuuauuaug

SEQ ID NO: 1786318 - RNA, 19 nt, Artificial Sequence
  Description of Artificial Sequence: Synthetic oligonucleotide
  Antisense strand to SEQ ID NO: 1786317
cauaauaagggacuugacc

SEQ ID NO: 1786319 - RNA, 19 nt, Artificial Sequence
  Description of Artificial Sequence: Synthetic oligonucleotide
  Sense strand starting at position 3373 of SEQ ID NO: 1562975
aggcccuugacuugaguuu

SEQ ID NO: 1786320 - RNA, 19 nt, Artificial Sequence
  Description of Artificial Sequence: Synthetic oligonucleotide
  Antisense strand to SEQ ID NO: 1786319
aaacucaagucaagggccu

SEQ ID NO: 1786321 - RNA, 19 nt, Artificial Sequence
  Description of Artificial Sequence: Synthetic oligonucleotide
  Sense strand starting at position 3435 of SEQ ID NO: 1562975
caggucaccugugaugagu

SEQ ID NO: 1786322 - RNA, 19 nt, Artificial Sequence
  Description of Artificial Sequence: Synthetic oligonucleotide
  Antisense strand to SEQ ID NO: 1786321
acucaucacaggugaccug

SEQ ID NO: 1786323 - RNA, 19 nt, Artificial Sequence
  Description of Artificial Sequence: Synthetic oligonucleotide
  Sense strand starting at position 3476 of SEQ ID NO: 1562975
ucacaucucuggcugcaua

SEQ ID NO: 1786324 - RNA, 19 nt, Artificial Sequence
  Description of Artificial Sequence: Synthetic oligonucleotide
  Antisense strand to SEQ ID NO: 1786323
uaugcagccagagauguga

SEQ ID NO: 1786325 - RNA, 19 nt, Artificial Sequence
  Description of Artificial Sequence: Synthetic oligonucleotide
  Sense strand starting at position 3496 of SEQ ID NO: 1562975
aggauuccguccgcaggaa

SEQ ID NO: 1786326 - RNA, 19 nt, Artificial Sequence
  Description of Artificial Sequence: Synthetic oligonucleotide
  Antisense strand to SEQ ID NO: 1786325
uuccugcggacggaauccu

SEQ ID NO: 1786327 - RNA, 19 nt, Artificial Sequence
  Description of Artificial Sequence: Synthetic oligonucleotide
  Sense strand starting at position 3563 of SEQ ID NO: 1562975
gcacuugcaucuggucaga

SEQ ID NO: 1786328 - RNA, 19 nt, Artificial Sequence
  Description of Artificial Sequence: Synthetic oligonucleotide
  Antisense strand to SEQ ID NO: 1786327
ucugaccagaugcaagugc

SEQ ID NO: 1786329 - RNA, 19 nt, Artificial Sequence
  Description of Artificial Sequence: Synthetic oligonucleotide
  Sense strand starting at position 3565 of SEQ ID NO: 1562975
acuugcaucuggucagaca

SEQ ID NO: 1786330 - RNA, 19 nt, Artificial Sequence
  Description of Artificial Sequence: Synthetic oligonucleotide
  Antisense strand to SEQ ID NO: 1786329
ugucugaccagaugcaagu

SEQ ID NO: 1786331 - RNA, 19 nt, Artificial Sequence
  Description of Artificial Sequence: Synthetic oligonucleotide
  Sense strand starting at position 3566 of SEQ ID NO: 1562975
cuugcaucuggucagacau

SEQ ID NO: 1786332 - RNA, 19 nt, Artificial Sequence
  Description of Artificial Sequence: Synthetic oligonucleotide
  Antisense strand to SEQ ID NO: 1786331
augucugaccagaugcaag

SEQ ID NO: 1786333 - RNA, 19 nt, Artificial Sequence
  Description of Artificial Sequence: Synthetic oligonucleotide
  Sense strand starting at position 3586 of SEQ ID NO: 1562975
cccuguucucagugacuua

SEQ ID NO: 1786334 - RNA, 19 nt, Artificial Sequence
  Description of Artificial Sequence: Synthetic oligonucleotide
  Antisense strand to SEQ ID NO: 1786333
uaagucacugagaacaggg

SEQ ID NO: 1786335 - RNA, 19 nt, Artificial Sequence
  Description of Artificial Sequence: Synthetic oligonucleotide
  Sense strand starting at position 3593 of SEQ ID NO: 1562975
cucagugacuuaugguaaa

SEQ ID NO: 1786336 - RNA, 19 nt, Artificial Sequence
  Description of Artificial Sequence: Synthetic oligonucleotide
  Antisense strand to SEQ ID NO: 1786335
uuuaccauaagucacugag

SEQ ID NO: 1786337 - RNA, 19 nt, Artificial Sequence
  Description of Artificial Sequence: Synthetic oligonucleotide
  Sense strand starting at position 3596 of SEQ ID NO: 1562975
agugacuuaugguaaauga

SEQ ID NO: 1786338 - RNA, 19 nt, Artificial Sequence
  Description of Artificial Sequence: Synthetic oligonucleotide
  Antisense strand to SEQ ID NO: 1786337
ucauuuaccauaagucacu

SEQ ID NO: 1786339 - RNA, 19 nt, Artificial Sequence
  Description of Artificial Sequence: Synthetic oligonucleotide
  Sense strand starting at position 3607 of SEQ ID NO: 1562975
guaaaugacuuagcagcuu

SEQ ID NO: 1786340 - RNA, 19 nt, Artificial Sequence
  Description of Artificial Sequence: Synthetic oligonucleotide
  Antisense strand to SEQ ID NO: 1786339
aagcugcuaagucauuuac

SEQ ID NO: 1786341 - RNA, 19 nt, Artificial Sequence
  Description of Artificial Sequence: Synthetic oligonucleotide
  Sense strand starting at position 3650 of SEQ ID NO: 1562975
ugaagagucuuccucuguu

SEQ ID NO: 1786342 - RNA, 19 nt, Artificial Sequence
  Description of Artificial Sequence: Synthetic oligonucleotide
  Antisense strand to SEQ ID NO: 1786341
aacagaggaagacucuuca

SEQ ID NO: 1786343 - RNA, 19 nt, Artificial Sequence
  Description of Artificial Sequence: Synthetic oligonucleotide
  Sense strand starting at position 3679 of SEQ ID NO: 1562975
gagugcaguuggcacaauu

SEQ ID NO: 1786344 - RNA, 19 nt, Artificial Sequence
  Description of Artificial Sequence: Synthetic oligonucleotide
  Antisense strand to SEQ ID NO: 1786343
aauugugccaacugcacuc

SEQ ID NO: 1786345 - RNA, 19 nt, Artificial Sequence
  Description of Artificial Sequence: Synthetic oligonucleotide
  Sense strand starting at position 1182 of SEQ ID NO: 1562976
guaacucucuggcuugcaa

SEQ ID NO: 1786346 - RNA, 19 nt, Artificial Sequence
  Description of Artificial Sequence: Synthetic oligonucleotide
  Antisense strand to SEQ ID NO: 1786345
uugcaagccagagaguuac

SEQ ID NO: 1786347 - RNA, 19 nt, Artificial Sequence
  Description of Artificial Sequence: Synthetic oligonucleotide
  Sense strand starting at position 1210 of SEQ ID NO: 1562976
gcaaccgauuccuccaaca

SEQ ID NO: 1786348 - RNA, 19 nt, Artificial Sequence
  Description of Artificial Sequence: Synthetic oligonucleotide
  Antisense strand to SEQ ID NO: 1786347
uguuggaggaaucgguugc

SEQ ID NO: 1786349 - RNA, 19 nt, Artificial Sequence
  Description of Artificial Sequence: Synthetic oligonucleotide
  Sense strand starting at position 1661 of SEQ ID NO: 1562976
gcgcgagcgcguuauaacu

SEQ ID NO: 1786350 - RNA, 19 nt, Artificial Sequence
  Description of Artificial Sequence: Synthetic oligonucleotide
  Antisense strand to SEQ ID NO: 1786349
aguuauaacgcgcucgcgc

SEQ ID NO: 1786351 - RNA, 19 nt, Artificial Sequence
  Description of Artificial Sequence: Synthetic oligonucleotide
  Sense strand starting at position 1667 of SEQ ID NO: 1562976
gcgcguuauaacugugcuu

SEQ ID NO: 1786352 - RNA, 19 nt, Artificial Sequence
  Description of Artificial Sequence: Synthetic oligonucleotide
  Antisense strand to SEQ ID NO: 1786351
aagcacaguuauaacgcgc

SEQ ID NO: 1786353 - RNA, 19 nt, Artificial Sequence
  Description of Artificial Sequence: Synthetic oligonucleotide
  Sense strand starting at position 1678 of SEQ ID NO: 1562976
cugugcuuggccgcgagaa

SEQ ID NO: 1786354 - RNA, 19 nt, Artificial Sequence
  Description of Artificial Sequence: Synthetic oligonucleotide
  Antisense strand to SEQ ID NO: 1786353
uucucgcggccaagcacag

SEQ ID NO: 1786355 - RNA, 19 nt, Artificial Sequence
  Description of Artificial Sequence: Synthetic oligonucleotide
  Sense strand starting at position 1680 of SEQ ID NO: 1562976
gugcuuggccgcgagaaca

SEQ ID NO: 1786356 - RNA, 19 nt, Artificial Sequence
  Description of Artificial Sequence: Synthetic oligonucleotide
  Antisense strand to SEQ ID NO: 1786355
uguucucgcggccaagcac

SEQ ID NO: 1786357 - RNA, 19 nt, Artificial Sequence
  Description of Artificial Sequence: Synthetic oligonucleotide
  Sense strand starting at position 2144 of SEQ ID NO: 1562976
aagguuucgcggcaaagga

SEQ ID NO: 1786358 - RNA, 19 nt, Artificial Sequence
  Description of Artificial Sequence: Synthetic oligonucleotide
  Antisense strand to SEQ ID NO: 1786357
uccuuugccgcgaaaccuu

SEQ ID NO: 1786359 - RNA, 19 nt, Artificial Sequence
  Description of Artificial Sequence: Synthetic oligonucleotide
  Sense strand starting at position 2704 of SEQ ID NO: 1562976
gcgggacuucccgagcaca

SEQ ID NO: 1786360 - RNA, 19 nt, Artificial Sequence
  Description of Artificial Sequence: Synthetic oligonucleotide
  Antisense strand to SEQ ID NO: 1786359
ugugcucgggaagucccgc

SEQ ID NO: 1786361 - RNA, 19 nt, Artificial Sequence
  Description of Artificial Sequence: Synthetic oligonucleotide
  Sense strand starting at position 3184 of SEQ ID NO: 1562976
gccgguucuuggucgaacu

SEQ ID NO: 1786362 - RNA, 19 nt, Artificial Sequence
  Description of Artificial Sequence: Synthetic oligonucleotide
  Antisense strand to SEQ ID NO: 1786361
aguucgaccaagaaccggc

SEQ ID NO: 1786363 - RNA, 19 nt, Artificial Sequence
  Description of Artificial Sequence: Synthetic oligonucleotide
  Sense strand starting at position 3239 of SEQ ID NO: 1562976
gcaugaagucagggaagga

SEQ ID NO: 1786364 - RNA, 19 nt, Artificial Sequence
  Description of Artificial Sequence: Synthetic oligonucleotide
  Antisense strand to SEQ ID NO: 1786363
uccuucccugacuucaugc

SEQ ID NO: 1786365 - RNA, 19 nt, Artificial Sequence
  Description of Artificial Sequence: Synthetic oligonucleotide
  Sense strand starting at position 3375 of SEQ ID NO: 1562976
agccuugaccucuaaaguc

SEQ ID NO: 1786366 - RNA, 19 nt, Artificial Sequence
  Description of Artificial Sequence: Synthetic oligonucleotide
  Antisense strand to SEQ ID NO: 1786365
gacuuuagaggucaaggcu

SEQ ID NO: 1786367 - RNA, 19 nt, Artificial Sequence
  Description of Artificial Sequence: Synthetic oligonucleotide
  Sense strand starting at position 3653 of SEQ ID NO: 1562976
ccacgaguuucuuacugag

SEQ ID NO: 1786368 - RNA, 19 nt, Artificial Sequence
  Description of Artificial Sequence: Synthetic oligonucleotide
  Antisense strand to SEQ ID NO: 1786367
cucaguaagaaacucgugg

SEQ ID NO: 1786369 - RNA, 19 nt, Artificial Sequence
  Description of Artificial Sequence: Synthetic oligonucleotide
  Sense strand starting at position 3655 of SEQ ID NO: 1562976
acgaguuucuuacugagaa

SEQ ID NO: 1786370 - RNA, 19 nt, Artificial Sequence
  Description of Artificial Sequence: Synthetic oligonucleotide
  Antisense strand to SEQ ID NO: 1786369
uucucaguaagaaacucgu

SEQ ID NO: 1786371 - RNA, 19 nt, Artificial Sequence
  Description of Artificial Sequence: Synthetic oligonucleotide
  Sense strand starting at position 3656 of SEQ ID NO: 1562976
cgaguuucuuacugagaau

SEQ ID NO: 1786372 - RNA, 19 nt, Artificial Sequence
  Description of Artificial Sequence: Synthetic oligonucleotide
  Antisense strand to SEQ ID NO: 1786371
auucucaguaagaaacucg

SEQ ID NO: 1786373 - RNA, 19 nt, Artificial Sequence
  Description of Artificial Sequence: Synthetic oligonucleotide
  Sense strand starting at position 3659 of SEQ ID NO: 1562976
guuucuuacugagaaugga

SEQ ID NO: 1786374 - RNA, 19 nt, Artificial Sequence
  Description of Artificial Sequence: Synthetic oligonucleotide
  Antisense strand to SEQ ID NO: 1786373
uccauucucaguaagaaac

SEQ ID NO: 1786375 - RNA, 19 nt, Artificial Sequence
  Description of Artificial Sequence: Synthetic oligonucleotide
  Sense strand starting at position 3693 of SEQ ID NO: 1562976
agaggagguuggagacaau

SEQ ID NO: 1786376 - RNA, 19 nt, Artificial Sequence
  Description of Artificial Sequence: Synthetic oligonucleotide
  Antisense strand to SEQ ID NO: 1786375
auugucuccaaccuccucu

SEQ ID NO: 1786377 - RNA, 19 nt, Artificial Sequence
  Description of Artificial Sequence: Synthetic oligonucleotide
  Sense strand starting at position 3718 of SEQ ID NO: 1562976
ccuggagcuucuugggaga

SEQ ID NO: 1786378 - RNA, 19 nt, Artificial Sequence
  Description of Artificial Sequence: Synthetic oligonucleotide
  Antisense strand to SEQ ID NO: 1786377
ucucccaagaagcuccagg

SEQ ID NO: 1786379 - RNA, 19 nt, Artificial Sequence
  Description of Artificial Sequence: Synthetic oligonucleotide
  Sense strand starting at position 3720 of SEQ ID NO: 1562976
uggagcuucuugggagagu

SEQ ID NO: 1786380 - RNA, 19 nt, Artificial Sequence
  Description of Artificial Sequence: Synthetic oligonucleotide
  Antisense strand to SEQ ID NO: 1786379
acucucccaagaagcucca

SEQ ID NO: 1786381 - RNA, 19 nt, Artificial Sequence
  Description of Artificial Sequence: Synthetic oligonucleotide
  Sense strand starting at position 3721 of SEQ ID NO: 1562976
ggagcuucuugggagaguu

SEQ ID NO: 1786382 - RNA, 19 nt, Artificial Sequence
  Description of Artificial Sequence: Synthetic oligonucleotide
  Antisense strand to SEQ ID NO: 1786381
aacucucccaagaagcucc

SEQ ID NO: 1786383 - RNA, 19 nt, Artificial Sequence
  Description of Artificial Sequence: Synthetic oligonucleotide
  Sense strand starting at position 3779 of SEQ ID NO: 1562976
agggucaagucccuuauua

SEQ ID NO: 1786384 - RNA, 19 nt, Artificial Sequence
  Description of Artificial Sequence: Synthetic oligonucleotide
  Antisense strand to SEQ ID NO: 1786383
uaauaagggacuugacccu

SEQ ID NO: 1786385 - RNA, 19 nt, Artificial Sequence
  Description of Artificial Sequence: Synthetic oligonucleotide
  Sense strand starting at position 3781 of SEQ ID NO: 1562976
ggucaagucccuuauuaug

SEQ ID NO: 1786386 - RNA, 19 nt, Artificial Sequence
  Description of Artificial Sequence: Synthetic oligonucleotide
  Antisense strand to SEQ ID NO: 1786385
cauaauaagggacuugacc

SEQ ID NO: 1786387 - RNA, 19 nt, Artificial Sequence
  Description of Artificial Sequence: Synthetic oligonucleotide
  Sense strand starting at position 3914 of SEQ ID NO: 1562976
aggcccuugacuugaguuu

SEQ ID NO: 1786388 - RNA, 19 nt, Artificial Sequence
  Description of Artificial Sequence: Synthetic oligonucleotide
  Antisense strand to SEQ ID NO: 1786387
aaacucaagucaagggccu

SEQ ID NO: 1786389 - RNA, 19 nt, Artificial Sequence
  Description of Artificial Sequence: Synthetic oligonucleotide
  Sense strand starting at position 3976 of SEQ ID NO: 1562976
caggucaccugugaugagu

SEQ ID NO: 1786390 - RNA, 19 nt, Artificial Sequence
  Description of Artificial Sequence: Synthetic oligonucleotide
  Antisense strand to SEQ ID NO: 1786389
acucaucacaggugaccug

SEQ ID NO: 1786391 - RNA, 19 nt, Artificial Sequence
  Description of Artificial Sequence: Synthetic oligonucleotide
  Sense strand starting at position 1181 of SEQ ID NO: 1562977
guaacucucuggcuugcaa

SEQ ID NO: 1786392 - RNA, 19 nt, Artificial Sequence
  Description of Artificial Sequence: Synthetic oligonucleotide
  Antisense strand to SEQ ID NO: 1786391
uugcaagccagagaguuac

SEQ ID NO: 1786393 - RNA, 19 nt, Artificial Sequence
  Description of Artificial Sequence: Synthetic oligonucleotide
  Sense strand starting at position 1209 of SEQ ID NO: 1562977
gcaaccgauuccuccaaca

SEQ ID NO: 1786394 - RNA, 19 nt, Artificial Sequence
  Description of Artificial Sequence: Synthetic oligonucleotide
  Antisense strand to SEQ ID NO: 1786393
uguuggaggaaucgguugc

SEQ ID NO: 1786395 - RNA, 19 nt, Artificial Sequence
  Description of Artificial Sequence: Synthetic oligonucleotide
  Sense strand starting at position 1660 of SEQ ID NO: 1562977
gcgcgagcgcguuauaacu

SEQ ID NO: 1786396 - RNA, 19 nt, Artificial Sequence
  Description of Artificial Sequence: Synthetic oligonucleotide
  Antisense strand to SEQ ID NO: 1786395
aguuauaacgcgcucgcgc

SEQ ID NO: 1786397 - RNA, 19 nt, Artificial Sequence
  Description of Artificial Sequence: Synthetic oligonucleotide
  Sense strand starting at position 1666 of SEQ ID NO: 1562977
gcgcguuauaacugugcuu

SEQ ID NO: 1786398 - RNA, 19 nt, Artificial Sequence
  Description of Artificial Sequence: Synthetic oligonucleotide
  Antisense strand to SEQ ID NO: 1786397
aagcacaguuauaacgcgc

SEQ ID NO: 1786399 - RNA, 19 nt, Artificial Sequence
  Description of Artificial Sequence: Synthetic oligonucleotide
  Sense strand starting at position 1677 of SEQ ID NO: 1562977
cugugcuuggccgcgagaa

SEQ ID NO: 1786400 - RNA, 19 nt, Artificial Sequence
  Description of Artificial Sequence: Synthetic oligonucleotide
  Antisense strand to SEQ ID NO: 1786399
uucucgcggccaagcacag

SEQ ID NO: 1786401 - RNA, 19 nt, Artificial Sequence
  Description of Artificial Sequence: Synthetic oligonucleotide
  Sense strand starting at position 1679 of SEQ ID NO: 1562977
gugcuuggccgcgagaaca

SEQ ID NO: 1786402 - RNA, 19 nt, Artificial Sequence
  Description of Artificial Sequence: Synthetic oligonucleotide
  Antisense strand to SEQ ID NO: 1786401
uguucucgcggccaagcac

SEQ ID NO: 1786403 - RNA, 19 nt, Artificial Sequence
  Description of Artificial Sequence: Synthetic oligonucleotide
  Sense strand starting at position 2143 of SEQ ID NO: 1562977
aagguuucgcggcaaagga

SEQ ID NO: 1786404 - RNA, 19 nt, Artificial Sequence
  Description of Artificial Sequence: Synthetic oligonucleotide
  Antisense strand to SEQ ID NO: 1786403
uccuuugccgcgaaaccuu

SEQ ID NO: 1786405 - RNA, 19 nt, Artificial Sequence
  Description of Artificial Sequence: Synthetic oligonucleotide
  Sense strand starting at position 2703 of SEQ ID NO: 1562977
gcgggacuucccgagcaca

SEQ ID NO: 1786406 - RNA, 19 nt, Artificial Sequence
  Description of Artificial Sequence: Synthetic oligonucleotide
  Antisense strand to SEQ ID NO: 1786405
ugugcucgggaagucccgc

SEQ ID NO: 1786407 - RNA, 19 nt, Artificial Sequence
  Description of Artificial Sequence: Synthetic oligonucleotide
  Sense strand starting at position 3183 of SEQ ID NO: 1562977
gccgguucuuggucgaacu

SEQ ID NO: 1786408 - RNA, 19 nt, Artificial Sequence
  Description of Artificial Sequence: Synthetic oligonucleotide
  Antisense strand to SEQ ID NO: 1786407
aguucgaccaagaaccggc

SEQ ID NO: 1786409 - RNA, 19 nt, Artificial Sequence
  Description of Artificial Sequence: Synthetic oligonucleotide
  Sense strand starting at position 3238 of SEQ ID NO: 1562977
gcaugaagucagggaagga

SEQ ID NO: 1786410 - RNA, 19 nt, Artificial Sequence
  Description of Artificial Sequence: Synthetic oligonucleotide
  Antisense strand to SEQ ID NO: 1786409
uccuucccugacuucaugc

SEQ ID NO: 1786411 - RNA, 19 nt, Artificial Sequence
  Description of Artificial Sequence: Synthetic oligonucleotide
  Sense strand starting at position 3374 of SEQ ID NO: 1562977
agccuugaccucuaaaguc

SEQ ID NO: 1786412 - RNA, 19 nt, Artificial Sequence
  Description of Artificial Sequence: Synthetic oligonucleotide
  Antisense strand to SEQ ID NO: 1786411
gacuuuagaggucaaggcu

SEQ ID NO: 1786413 - RNA, 19 nt, Artificial Sequence
  Description of Artificial Sequence: Synthetic oligonucleotide
  Sense strand starting at position 3652 of SEQ ID NO: 1562977
ccacgaguuucuuacugag

SEQ ID NO: 1786414 - RNA, 19 nt, Artificial Sequence
  Description of Artificial Sequence: Synthetic oligonucleotide
  Antisense strand to SEQ ID NO: 1786413
cucaguaagaaacucgugg

SEQ ID NO: 1786415 - RNA, 19 nt, Artificial Sequence
  Description of Artificial Sequence: Synthetic oligonucleotide
  Sense strand starting at position 3654 of SEQ ID NO: 1562977
acgaguuucuuacugagaa

SEQ ID NO: 1786416 - RNA, 19 nt, Artificial Sequence
  Description of Artificial Sequence: Synthetic oligonucleotide
  Antisense strand to SEQ ID NO: 1786415
uucucaguaagaaacucgu

SEQ ID NO: 1786417 - RNA, 19 nt, Artificial Sequence
  Description of Artificial Sequence: Synthetic oligonucleotide
  Sense strand starting at position 3655 of SEQ ID NO: 1562977
cgaguuucuuacugagaau

SEQ ID NO: 1786418 - RNA, 19 nt, Artificial Sequence
  Description of Artificial Sequence: Synthetic oligonucleotide
  Antisense strand to SEQ ID NO: 1786417
auucucaguaagaaacucg

SEQ ID NO: 1786419 - RNA, 19 nt, Artificial Sequence
  Description of Artificial Sequence: Synthetic oligonucleotide
  Sense strand starting at position 3658 of SEQ ID NO: 1562977
guuucuuacugagaaugga

SEQ ID NO: 1786420 - RNA, 19 nt, Artificial Sequence
  Description of Artificial Sequence: Synthetic oligonucleotide
  Antisense strand to SEQ ID NO: 1786419
uccauucucaguaagaaac

SEQ ID NO: 1786421 - RNA, 19 nt, Artificial Sequence
  Description of Artificial Sequence: Synthetic oligonucleotide
  Sense strand starting at position 3692 of SEQ ID NO: 1562977
agaggagguuggagacaau

SEQ ID NO: 1786422 - RNA, 19 nt, Artificial Sequence
  Description of Artificial Sequence: Synthetic oligonucleotide
  Antisense strand to SEQ ID NO: 1786421
auugucuccaaccuccucu

SEQ ID NO: 1786423 - RNA, 19 nt, Artificial Sequence
  Description of Artificial Sequence: Synthetic oligonucleotide
  Sense strand starting at position 3717 of SEQ ID NO: 1562977
ccuggagcuucuugggaga

SEQ ID NO: 1786424 - RNA, 19 nt, Artificial Sequence
  Description of Artificial Sequence: Synthetic oligonucleotide
  Antisense strand to SEQ ID NO: 1786423
ucucccaagaagcuccagg

SEQ ID NO: 1786425 - RNA, 19 nt, Artificial Sequence
  Description of Artificial Sequence: Synthetic oligonucleotide
  Sense strand starting at position 3719 of SEQ ID NO: 1562977
uggagcuucuugggagagu

SEQ ID NO: 1786426 - RNA, 19 nt, Artificial Sequence
  Description of Artificial Sequence: Synthetic oligonucleotide
  Antisense strand to SEQ ID NO: 1786425
acucucccaagaagcucca

SEQ ID NO: 1786427 - RNA, 19 nt, Artificial Sequence
  Description of Artificial Sequence: Synthetic oligonucleotide
  Sense strand starting at position 3720 of SEQ ID NO: 1562977
ggagcuucuugggagaguu

SEQ ID NO: 1786428 - RNA, 19 nt, Artificial Sequence
  Description of Artificial Sequence: Synthetic oligonucleotide
  Antisense strand to SEQ ID NO: 1786427
aacucucccaagaagcucc

SEQ ID NO: 1786429 - RNA, 19 nt, Artificial Sequence
  Description of Artificial Sequence: Synthetic oligonucleotide
  Sense strand starting at position 3778 of SEQ ID NO: 1562977
agggucaagucccuuauua

SEQ ID NO: 1786430 - RNA, 19 nt, Artificial Sequence
  Description of Artificial Sequence: Synthetic oligonucleotide
  Antisense strand to SEQ ID NO: 1786429
uaauaagggacuugacccu

SEQ ID NO: 1786431 - RNA, 19 nt, Artificial Sequence
  Description of Artificial Sequence: Synthetic oligonucleotide
  Sense strand starting at position 3780 of SEQ ID NO: 1562977
ggucaagucccuuauuaug

SEQ ID NO: 1786432 - RNA, 19 nt, Artificial Sequence
  Description of Artificial Sequence: Synthetic oligonucleotide
  Antisense strand to SEQ ID NO: 1786431
cauaauaagggacuugacc

SEQ ID NO: 1786433 - RNA, 19 nt, Artificial Sequence
  Description of Artificial Sequence: Synthetic oligonucleotide
  Sense strand starting at position 3913 of SEQ ID NO: 1562977
aggcccuugacuugaguuu

SEQ ID NO: 1786434 - RNA, 19 nt, Artificial Sequence
  Description of Artificial Sequence: Synthetic oligonucleotide
  Antisense strand to SEQ ID NO: 1786433
aaacucaagucaagggccu

SEQ ID NO: 1786435 - RNA, 19 nt, Artificial Sequence
  Description of Artificial Sequence: Synthetic oligonucleotide
  Sense strand starting at position 3975 of SEQ ID NO: 1562977
caggucaccugugaugagu

SEQ ID NO: 1786436 - RNA, 19 nt, Artificial Sequence
  Description of Artificial Sequence: Synthetic oligonucleotide
  Antisense strand to SEQ ID NO: 1786435
acucaucacaggugaccug

SEQ ID NO: 1786437 - RNA, 19 nt, Artificial Sequence
  Description of Artificial Sequence: Synthetic oligonucleotide
  Sense strand starting at position 16 of SEQ ID NO: 1562978
ggucacuuaugagacagga

SEQ ID NO: 1786438 - RNA, 19 nt, Artificial Sequence
  Description of Artificial Sequence: Synthetic oligonucleotide
  Antisense strand to SEQ ID NO: 1786437
uccugucucauaagugacc

SEQ ID NO: 1786439 - RNA, 19 nt, Artificial Sequence
  Description of Artificial Sequence: Synthetic oligonucleotide
  Sense strand starting at position 43 of SEQ ID NO: 1562978
ggcagugggccacagauau

SEQ ID NO: 1786440 - RNA, 19 nt, Artificial Sequence
  Description of Artificial Sequence: Synthetic oligonucleotide
  Antisense strand to SEQ ID NO: 1786439
auaucuguggcccacugcc

SEQ ID NO: 1786441 - RNA, 19 nt, Artificial Sequence
  Description of Artificial Sequence: Synthetic oligonucleotide
  Sense strand starting at position 147 of SEQ ID NO: 1562978
aggugucuucacuggaaug

SEQ ID NO: 1786442 - RNA, 19 nt, Artificial Sequence
  Description of Artificial Sequence: Synthetic oligonucleotide
  Antisense strand to SEQ ID NO: 1786441
cauuccagugaagacaccu

SEQ ID NO: 1786443 - RNA, 19 nt, Artificial Sequence
  Description of Artificial Sequence: Synthetic oligonucleotide
  Sense strand starting at position 196 of SEQ ID NO: 1562978
ggagcuaucucccaacaca

SEQ ID NO: 1786444 - RNA, 19 nt, Artificial Sequence
  Description of Artificial Sequence: Synthetic oligonucleotide
  Antisense strand to SEQ ID NO: 1786443
uguguugggagauagcucc

SEQ ID NO: 1786445 - RNA, 19 nt, Artificial Sequence
  Description of Artificial Sequence: Synthetic oligonucleotide
  Sense strand starting at position 261 of SEQ ID NO: 1562978
augggaguuugaggagaga

SEQ ID NO: 1786446 - RNA, 19 nt, Artificial Sequence
  Description of Artificial Sequence: Synthetic oligonucleotide
  Antisense strand to SEQ ID NO: 1786445
ucucuccucaaacucccau

SEQ ID NO: 1786447 - RNA, 19 nt, Artificial Sequence
  Description of Artificial Sequence: Synthetic oligonucleotide
  Sense strand starting at position 625 of SEQ ID NO: 1562978
gguguugcuguggaagagu

SEQ ID NO: 1786448 - RNA, 19 nt, Artificial Sequence
  Description of Artificial Sequence: Synthetic oligonucleotide
  Antisense strand to SEQ ID NO: 1786447
acucuuccacagcaacacc

SEQ ID NO: 1786449 - RNA, 19 nt, Artificial Sequence
  Description of Artificial Sequence: Synthetic oligonucleotide
  Sense strand starting at position 1176 of SEQ ID NO: 1562978
ucccuuaucaucgguggga

SEQ ID NO: 1786450 - RNA, 19 nt, Artificial Sequence
  Description of Artificial Sequence: Synthetic oligonucleotide
  Antisense strand to SEQ ID NO: 1786449
ucccaccgaugauaaggga

SEQ ID NO: 1786451 - RNA, 19 nt, Artificial Sequence
  Description of Artificial Sequence: Synthetic oligonucleotide
  Sense strand starting at position 1641 of SEQ ID NO: 1562978
ccuagaaguuacuuugcaa

SEQ ID NO: 1786452 - RNA, 19 nt, Artificial Sequence
  Description of Artificial Sequence: Synthetic oligonucleotide
  Antisense strand to SEQ ID NO: 1786451
uugcaaaguaacuucuagg

SEQ ID NO: 1786453 - RNA, 19 nt, Artificial Sequence
  Description of Artificial Sequence: Synthetic oligonucleotide
  Sense strand starting at position 1644 of SEQ ID NO: 1562978
agaaguuacuuugcaaaga

SEQ ID NO: 1786454 - RNA, 19 nt, Artificial Sequence
  Description of Artificial Sequence: Synthetic oligonucleotide
  Antisense strand to SEQ ID NO: 1786453
ucuuugcaaaguaacuucu

SEQ ID NO: 1786455 - RNA, 19 nt, Artificial Sequence
  Description of Artificial Sequence: Synthetic oligonucleotide
  Sense strand starting at position 1645 of SEQ ID NO: 1562978
gaaguuacuuugcaaagag

SEQ ID NO: 1786456 - RNA, 19 nt, Artificial Sequence
  Description of Artificial Sequence: Synthetic oligonucleotide
  Antisense strand to SEQ ID NO: 1786455
cucuuugcaaaguaacuuc

SEQ ID NO: 1786457 - RNA, 19 nt, Artificial Sequence
  Description of Artificial Sequence: Synthetic oligonucleotide
  Sense strand starting at position 2426 of SEQ ID NO: 1562978
gcuggacguuucuugagca

SEQ ID NO: 1786458 - RNA, 19 nt, Artificial Sequence
  Description of Artificial Sequence: Synthetic oligonucleotide
  Antisense strand to SEQ ID NO: 1786457
ugcucaagaaacguccagc

SEQ ID NO: 1786459 - RNA, 19 nt, Artificial Sequence
  Description of Artificial Sequence: Synthetic oligonucleotide
  Sense strand starting at position 2501 of SEQ ID NO: 1562978
ucgugaagaucacuugaaa

SEQ ID NO: 1786460 - RNA, 19 nt, Artificial Sequence
  Description of Artificial Sequence: Synthetic oligonucleotide
  Antisense strand to SEQ ID NO: 1786459
uuucaagugaucuucacga

SEQ ID NO: 1786461 - RNA, 19 nt, Artificial Sequence
  Description of Artificial Sequence: Synthetic oligonucleotide
  Sense strand starting at position 2545 of SEQ ID NO: 1562978
uuuagcacucgucaaagga

SEQ ID NO: 1786462 - RNA, 19 nt, Artificial Sequence
  Description of Artificial Sequence: Synthetic oligonucleotide
  Antisense strand to SEQ ID NO: 1786461
uccuuugacgagugcuaaa

SEQ ID NO: 1786463 - RNA, 19 nt, Artificial Sequence
  Description of Artificial Sequence: Synthetic oligonucleotide
  Sense strand starting at position 2927 of SEQ ID NO: 1562978
gacgcuuuaagggacgaaa

SEQ ID NO: 1786464 - RNA, 19 nt, Artificial Sequence
  Description of Artificial Sequence: Synthetic oligonucleotide
  Antisense strand to SEQ ID NO: 1786463
uuucgucccuuaaagcguc

SEQ ID NO: 1786465 - RNA, 19 nt, Artificial Sequence
  Description of Artificial Sequence: Synthetic oligonucleotide
  Sense strand starting at position 2929 of SEQ ID NO: 1562978
cgcuuuaagggacgaaagu

SEQ ID NO: 1786466 - RNA, 19 nt, Artificial Sequence
  Description of Artificial Sequence: Synthetic oligonucleotide
  Antisense strand to SEQ ID NO: 1786465
acuuucgucccuuaaagcg

SEQ ID NO: 1786467 - RNA, 19 nt, Artificial Sequence
  Description of Artificial Sequence: Synthetic oligonucleotide
  Sense strand starting at position 2930 of SEQ ID NO: 1562978
gcuuuaagggacgaaaguu

SEQ ID NO: 1786468 - RNA, 19 nt, Artificial Sequence
  Description of Artificial Sequence: Synthetic oligonucleotide
  Antisense strand to SEQ ID NO: 1786467
aacuuucgucccuuaaagc

SEQ ID NO: 1786469 - RNA, 19 nt, Artificial Sequence
  Description of Artificial Sequence: Synthetic oligonucleotide
  Sense strand starting at position 2962 of SEQ ID NO: 1562978
ggcccaucuccuugacaac

SEQ ID NO: 1786470 - RNA, 19 nt, Artificial Sequence
  Description of Artificial Sequence: Synthetic oligonucleotide
  Antisense strand to SEQ ID NO: 1786469
guugucaaggagaugggcc

SEQ ID NO: 1786471 - RNA, 19 nt, Artificial Sequence
  Description of Artificial Sequence: Synthetic oligonucleotide
  Sense strand starting at position 3301 of SEQ ID NO: 1562978
aagguuaaaucugugucca

SEQ ID NO: 1786472 - RNA, 19 nt, Artificial Sequence
  Description of Artificial Sequence: Synthetic oligonucleotide
  Antisense strand to SEQ ID NO: 1786471
uggacacagauuuaaccuu

SEQ ID NO: 1786473 - RNA, 19 nt, Artificial Sequence
  Description of Artificial Sequence: Synthetic oligonucleotide
  Sense strand starting at position 3302 of SEQ ID NO: 1562978
agguuaaaucuguguccag

SEQ ID NO: 1786474 - RNA, 19 nt, Artificial Sequence
  Description of Artificial Sequence: Synthetic oligonucleotide
  Antisense strand to SEQ ID NO: 1786473
cuggacacagauuuaaccu

SEQ ID NO: 1786475 - RNA, 19 nt, Artificial Sequence
  Description of Artificial Sequence: Synthetic oligonucleotide
  Sense strand starting at position 3485 of SEQ ID NO: 1562978
ccagacauuucggucugca

SEQ ID NO: 1786476 - RNA, 19 nt, Artificial Sequence
  Description of Artificial Sequence: Synthetic oligonucleotide
  Antisense strand to SEQ ID NO: 1786475
ugcagaccgaaaugucugg

SEQ ID NO: 1786477 - RNA, 19 nt, Artificial Sequence
  Description of Artificial Sequence: Synthetic oligonucleotide
  Sense strand starting at position 3512 of SEQ ID NO: 1562978
ccuggcugcugguuuaauu

SEQ ID NO: 1786478 - RNA, 19 nt, Artificial Sequence
  Description of Artificial Sequence: Synthetic oligonucleotide
  Antisense strand to SEQ ID NO: 1786477
aauuaaaccagcagccagg

SEQ ID NO: 1786479 - RNA, 19 nt, Artificial Sequence
  Description of Artificial Sequence: Synthetic oligonucleotide
  Sense strand starting at position 3520 of SEQ ID NO: 1562978
cugguuuaauuugggagau

SEQ ID NO: 1786480 - RNA, 19 nt, Artificial Sequence
  Description of Artificial Sequence: Synthetic oligonucleotide
  Antisense strand to SEQ ID NO: 1786479
aucucccaaauuaaaccag

SEQ ID NO: 1786481 - RNA, 19 nt, Artificial Sequence
  Description of Artificial Sequence: Synthetic oligonucleotide
  Sense strand starting at position 3521 of SEQ ID NO: 1562978
ugguuuaauuugggagaug

SEQ ID NO: 1786482 - RNA, 19 nt, Artificial Sequence
  Description of Artificial Sequence: Synthetic oligonucleotide
  Antisense strand to SEQ ID NO: 1786481
caucucccaaauuaaacca

SEQ ID NO: 1786483 - RNA, 19 nt, Artificial Sequence
  Description of Artificial Sequence: Synthetic oligonucleotide
  Sense strand starting at position 3564 of SEQ ID NO: 1562978
ccgucaauuguguagcuuu

SEQ ID NO: 1786484 - RNA, 19 nt, Artificial Sequence
  Description of Artificial Sequence: Synthetic oligonucleotide
  Antisense strand to SEQ ID NO: 1786483
aaagcuacacaauugacgg

SEQ ID NO: 1786485 - RNA, 19 nt, Artificial Sequence
  Description of Artificial Sequence: Synthetic oligonucleotide
  Sense strand starting at position 3711 of SEQ ID NO: 1562978
ccucuaaugugccugguca

SEQ ID NO: 1786486 - RNA, 19 nt, Artificial Sequence
  Description of Artificial Sequence: Synthetic oligonucleotide
  Antisense strand to SEQ ID NO: 1786485
ugaccaggcacauuagagg

SEQ ID NO: 1786487 - RNA, 19 nt, Artificial Sequence
  Description of Artificial Sequence: Synthetic oligonucleotide
  Sense strand starting at position 3712 of SEQ ID NO: 1562978
cucuaaugugccuggucau

SEQ ID NO: 1786488 - RNA, 19 nt, Artificial Sequence
  Description of Artificial Sequence: Synthetic oligonucleotide
  Antisense strand to SEQ ID NO: 1786487
augaccaggcacauuagag

SEQ ID NO: 1786489 - RNA, 19 nt, Artificial Sequence
  Description of Artificial Sequence: Synthetic oligonucleotide
  Sense strand starting at position 3713 of SEQ ID NO: 1562978
ucuaaugugccuggucauu

SEQ ID NO: 1786490 - RNA, 19 nt, Artificial Sequence
  Description of Artificial Sequence: Synthetic oligonucleotide
  Antisense strand to SEQ ID NO: 1786489
aaugaccaggcacauuaga

SEQ ID NO: 1786491 - RNA, 19 nt, Artificial Sequence
  Description of Artificial Sequence: Synthetic oligonucleotide
  Sense strand starting at position 3715 of SEQ ID NO: 1562978
uaaugugccuggucauuag

SEQ ID NO: 1786492 - RNA, 19 nt, Artificial Sequence
  Description of Artificial Sequence: Synthetic oligonucleotide
  Antisense strand to SEQ ID NO: 1786491
cuaaugaccaggcacauua

SEQ ID NO: 1786493 - RNA, 19 nt, Artificial Sequence
  Description of Artificial Sequence: Synthetic oligonucleotide
  Sense strand starting at position 3771 of SEQ ID NO: 1562978
gcuugauggcagcaagaga

SEQ ID NO: 1786494 - RNA, 19 nt, Artificial Sequence
  Description of Artificial Sequence: Synthetic oligonucleotide
  Antisense strand to SEQ ID NO: 1786493
ucucuugcugccaucaagc

SEQ ID NO: 1786495 - RNA, 19 nt, Artificial Sequence
  Description of Artificial Sequence: Synthetic oligonucleotide
  Sense strand starting at position 3866 of SEQ ID NO: 1562978
guagcugucccuuguacca

SEQ ID NO: 1786496 - RNA, 19 nt, Artificial Sequence
  Description of Artificial Sequence: Synthetic oligonucleotide
  Antisense strand to SEQ ID NO: 1786495
ugguacaagggacagcuac

SEQ ID NO: 1786497 - RNA, 19 nt, Artificial Sequence
  Description of Artificial Sequence: Synthetic oligonucleotide
  Sense strand starting at position 3910 of SEQ ID NO: 1562978
agcgauugcucaggucaag

SEQ ID NO: 1786498 - RNA, 19 nt, Artificial Sequence
  Description of Artificial Sequence: Synthetic oligonucleotide
  Antisense strand to SEQ ID NO: 1786497
cuugaccugagcaaucgcu

SEQ ID NO: 1786499 - RNA, 19 nt, Artificial Sequence
  Description of Artificial Sequence: Synthetic oligonucleotide
  Sense strand starting at position 3913 of SEQ ID NO: 1562978
gauugcucaggucaaguuu

SEQ ID NO: 1786500 - RNA, 19 nt, Artificial Sequence
  Description of Artificial Sequence: Synthetic oligonucleotide
  Antisense strand to SEQ ID NO: 1786499
aaacuugaccugagcaauc

SEQ ID NO: 1786501 - RNA, 19 nt, Artificial Sequence
  Description of Artificial Sequence: Synthetic oligonucleotide
  Sense strand starting at position 3925 of SEQ ID NO: 1562978
caaguuugcuggugaauua

SEQ ID NO: 1786502 - RNA, 19 nt, Artificial Sequence
  Description of Artificial Sequence: Synthetic oligonucleotide
  Antisense strand to SEQ ID NO: 1786501
uaauucaccagcaaacuug

SEQ ID NO: 1786503 - RNA, 19 nt, Artificial Sequence
  Description of Artificial Sequence: Synthetic oligonucleotide
  Sense strand starting at position 3926 of SEQ ID NO: 1562978
aaguuugcuggugaauuau

SEQ ID NO: 1786504 - RNA, 19 nt, Artificial Sequence
  Description of Artificial Sequence: Synthetic oligonucleotide
  Antisense strand to SEQ ID NO: 1786503
auaauucaccagcaaacuu

SEQ ID NO: 1786505 - RNA, 19 nt, Artificial Sequence
  Description of Artificial Sequence: Synthetic oligonucleotide
  Sense strand starting at position 3935 of SEQ ID NO: 1562978
ggugaauuaucacccucua

SEQ ID NO: 1786506 - RNA, 19 nt, Artificial Sequence
  Description of Artificial Sequence: Synthetic oligonucleotide
  Antisense strand to SEQ ID NO: 1786505
uagagggugauaauucacc

SEQ ID NO: 1786507 - RNA, 19 nt, Artificial Sequence
  Description of Artificial Sequence: Synthetic oligonucleotide
  Sense strand starting at position 403 of SEQ ID NO: 1562979
gcggcauucgcaccuagua

SEQ ID NO: 1786508 - RNA, 19 nt, Artificial Sequence
  Description of Artificial Sequence: Synthetic oligonucleotide
  Antisense strand to SEQ ID NO: 1786507
uacuaggugcgaaugccgc

SEQ ID NO: 1786509 - RNA, 19 nt, Artificial Sequence
  Description of Artificial Sequence: Synthetic oligonucleotide
  Sense strand starting at position 405 of SEQ ID NO: 1562979
ggcauucgcaccuaguaca

SEQ ID NO: 1786510 - RNA, 19 nt, Artificial Sequence
  Description of Artificial Sequence: Synthetic oligonucleotide
  Antisense strand to SEQ ID NO: 1786509
uguacuaggugcgaaugcc

SEQ ID NO: 1786511 - RNA, 19 nt, Artificial Sequence
  Description of Artificial Sequence: Synthetic oligonucleotide
  Sense strand starting at position 560 of SEQ ID NO: 1562979
gcaucugucugugcagaga

SEQ ID NO: 1786512 - RNA, 19 nt, Artificial Sequence
  Description of Artificial Sequence: Synthetic oligonucleotide
  Antisense strand to SEQ ID NO: 1786511
ucucugcacagacagaugc

SEQ ID NO: 1786513 - RNA, 19 nt, Artificial Sequence
  Description of Artificial Sequence: Synthetic oligonucleotide
  Sense strand starting at position 678 of SEQ ID NO: 1562979
agucaagcugucuaucuau

SEQ ID NO: 1786514 - RNA, 19 nt, Artificial Sequence
  Description of Artificial Sequence: Synthetic oligonucleotide
  Antisense strand to SEQ ID NO: 1786513
auagauagacagcuugacu

SEQ ID NO: 1786515 - RNA, 19 nt, Artificial Sequence
  Description of Artificial Sequence: Synthetic oligonucleotide
  Sense strand starting at position 902 of SEQ ID NO: 1562979
cccucaaggcuguguggau

SEQ ID NO: 1786516 - RNA, 19 nt, Artificial Sequence
  Description of Artificial Sequence: Synthetic oligonucleotide
  Antisense strand to SEQ ID NO: 1786515
auccacacagccuugaggg

SEQ ID NO: 1786517 - RNA, 19 nt, Artificial Sequence
  Description of Artificial Sequence: Synthetic oligonucleotide
  Sense strand starting at position 952 of SEQ ID NO: 1562979
aagagcuauccaggcguau

SEQ ID NO: 1786518 - RNA, 19 nt, Artificial Sequence
  Description of Artificial Sequence: Synthetic oligonucleotide
  Antisense strand to SEQ ID NO: 1786517
auacgccuggauagcucuu

SEQ ID NO: 1786519 - RNA, 19 nt, Artificial Sequence
  Description of Artificial Sequence: Synthetic oligonucleotide
  Sense strand starting at position 964 of SEQ ID NO: 1562979
ggcguaucucuccggaucu

SEQ ID NO: 1786520 - RNA, 19 nt, Artificial Sequence
  Description of Artificial Sequence: Synthetic oligonucleotide
  Antisense strand to SEQ ID NO: 1786519
agauccggagagauacgcc

SEQ ID NO: 1786521 - RNA, 19 nt, Artificial Sequence
  Description of Artificial Sequence: Synthetic oligonucleotide
  Sense strand starting at position 1024 of SEQ ID NO: 1562979
gcaggauccuggcggaguu

SEQ ID NO: 1786522 - RNA, 19 nt, Artificial Sequence
  Description of Artificial Sequence: Synthetic oligonucleotide
  Antisense strand to SEQ ID NO: 1786521
aacuccgccaggauccugc

SEQ ID NO: 1786523 - RNA, 19 nt, Artificial Sequence
  Description of Artificial Sequence: Synthetic oligonucleotide
  Sense strand starting at position 1070 of SEQ ID NO: 1562979
guaaccaucucugaaguga

SEQ ID NO: 1786524 - RNA, 19 nt, Artificial Sequence
  Description of Artificial Sequence: Synthetic oligonucleotide
  Antisense strand to SEQ ID NO: 1786523
ucacuucagagaugguuac

SEQ ID NO: 1786525 - RNA, 19 nt, Artificial Sequence
  Description of Artificial Sequence: Synthetic oligonucleotide
  Sense strand starting at position 2136 of SEQ ID NO: 1562979
ccacgcuuccgaggacuua

SEQ ID NO: 1786526 - RNA, 19 nt, Artificial Sequence
  Description of Artificial Sequence: Synthetic oligonucleotide
  Antisense strand to SEQ ID NO: 1786525
uaaguccucggaagcgugg

SEQ ID NO: 1786527 - RNA, 19 nt, Artificial Sequence
  Description of Artificial Sequence: Synthetic oligonucleotide
  Sense strand starting at position 2198 of SEQ ID NO: 1562979
gagagugagcgugaacagu

SEQ ID NO: 1786528 - RNA, 19 nt, Artificial Sequence
  Description of Artificial Sequence: Synthetic oligonucleotide
  Antisense strand to SEQ ID NO: 1786527
acuguucacgcucacucuc

SEQ ID NO: 1786529 - RNA, 19 nt, Artificial Sequence
  Description of Artificial Sequence: Synthetic oligonucleotide
  Sense strand starting at position 2378 of SEQ ID NO: 1562979
ugagguuguuggaucgcua

SEQ ID NO: 1786530 - RNA, 19 nt, Artificial Sequence
  Description of Artificial Sequence: Synthetic oligonucleotide
  Antisense strand to SEQ ID NO: 1786529
uagcgauccaacaaccuca

SEQ ID NO: 1786531 - RNA, 19 nt, Artificial Sequence
  Description of Artificial Sequence: Synthetic oligonucleotide
  Sense strand starting at position 2382 of SEQ ID NO: 1562979
guuguuggaucgcuagauu

SEQ ID NO: 1786532 - RNA, 19 nt, Artificial Sequence
  Description of Artificial Sequence: Synthetic oligonucleotide
  Antisense strand to SEQ ID NO: 1786531
aaucuagcgauccaacaac

SEQ ID NO: 1786533 - RNA, 19 nt, Artificial Sequence
  Description of Artificial Sequence: Synthetic oligonucleotide
  Sense strand starting at position 2440 of SEQ ID NO: 1562979
cgggaucaguccuuaaguc

SEQ ID NO: 1786534 - RNA, 19 nt, Artificial Sequence
  Description of Artificial Sequence: Synthetic oligonucleotide
  Antisense strand to SEQ ID NO: 1786533
gacuuaaggacugaucccg

SEQ ID NO: 1786535 - RNA, 19 nt, Artificial Sequence
  Description of Artificial Sequence: Synthetic oligonucleotide
  Sense strand starting at position 2576 of SEQ ID NO: 1562979
ugacuccuuucguggcuaa

SEQ ID NO: 1786536 - RNA, 19 nt, Artificial Sequence
  Description of Artificial Sequence: Synthetic oligonucleotide
  Antisense strand to SEQ ID NO: 1786535
uuagccacgaaaggaguca

SEQ ID NO: 1786537 - RNA, 19 nt, Artificial Sequence
  Description of Artificial Sequence: Synthetic oligonucleotide
  Sense strand starting at position 2577 of SEQ ID NO: 1562979
gacuccuuucguggcuaaa

SEQ ID NO: 1786538 - RNA, 19 nt, Artificial Sequence
  Description of Artificial Sequence: Synthetic oligonucleotide
  Antisense strand to SEQ ID NO: 1786537
uuuagccacgaaaggaguc

SEQ ID NO: 1786539 - RNA, 19 nt, Artificial Sequence
  Description of Artificial Sequence: Synthetic oligonucleotide
  Sense strand starting at position 2579 of SEQ ID NO: 1562979
cuccuuucguggcuaaauc

SEQ ID NO: 1786540 - RNA, 19 nt, Artificial Sequence
  Description of Artificial Sequence: Synthetic oligonucleotide
  Antisense strand to SEQ ID NO: 1786539
gauuuagccacgaaaggag

SEQ ID NO: 1786541 - RNA, 19 nt, Artificial Sequence
  Description of Artificial Sequence: Synthetic oligonucleotide
  Sense strand starting at position 2590 of SEQ ID NO: 1562979
gcuaaaucucguggucacu

SEQ ID NO: 1786542 - RNA, 19 nt, Artificial Sequence
  Description of Artificial Sequence: Synthetic oligonucleotide
  Antisense strand to SEQ ID NO: 1786541
agugaccacgagauuuagc

SEQ ID NO: 1786543 - RNA, 19 nt, Artificial Sequence
  Description of Artificial Sequence: Synthetic oligonucleotide
  Sense strand starting at position 2638 of SEQ ID NO: 1562979
agcuguagcguugagaaua

SEQ ID NO: 1786544 - RNA, 19 nt, Artificial Sequence
  Description of Artificial Sequence: Synthetic oligonucleotide
  Antisense strand to SEQ ID NO: 1786543
uauucucaacgcuacagcu

SEQ ID NO: 1786545 - RNA, 19 nt, Artificial Sequence
  Description of Artificial Sequence: Synthetic oligonucleotide
  Sense strand starting at position 2659 of SEQ ID NO: 1562979
ggcagcuucucaccagaaa

SEQ ID NO: 1786546 - RNA, 19 nt, Artificial Sequence
  Description of Artificial Sequence: Synthetic oligonucleotide
  Antisense strand to SEQ ID NO: 1786545
uuucuggugagaagcugcc

SEQ ID NO: 1786547 - RNA, 19 nt, Artificial Sequence
  Description of Artificial Sequence: Synthetic oligonucleotide
  Sense strand starting at position 2660 of SEQ ID NO: 1562979
gcagcuucucaccagaaag

SEQ ID NO: 1786548 - RNA, 19 nt, Artificial Sequence
  Description of Artificial Sequence: Synthetic oligonucleotide
  Antisense strand to SEQ ID NO: 1786547
cuuucuggugagaagcugc

SEQ ID NO: 1786549 - RNA, 19 nt, Artificial Sequence
  Description of Artificial Sequence: Synthetic oligonucleotide
  Sense strand starting at position 2679 of SEQ ID NO: 1562979
ucccaaagcugucuuagga

SEQ ID NO: 1786550 - RNA, 19 nt, Artificial Sequence
  Description of Artificial Sequence: Synthetic oligonucleotide
  Antisense strand to SEQ ID NO: 1786549
uccuaagacagcuuuggga

SEQ ID NO: 1786551 - RNA, 19 nt, Artificial Sequence
  Description of Artificial Sequence: Synthetic oligonucleotide
  Sense strand starting at position 2769 of SEQ ID NO: 1562979
augaguaggucuccuucuu

SEQ ID NO: 1786552 - RNA, 19 nt, Artificial Sequence
  Description of Artificial Sequence: Synthetic oligonucleotide
  Antisense strand to SEQ ID NO: 1786551
aagaaggagaccuacucau

SEQ ID NO: 1786553 - RNA, 19 nt, Artificial Sequence
  Description of Artificial Sequence: Synthetic oligonucleotide
  Sense strand starting at position 2790 of SEQ ID NO: 1562979
cgccuucucagaguguugu

SEQ ID NO: 1786554 - RNA, 19 nt, Artificial Sequence
  Description of Artificial Sequence: Synthetic oligonucleotide
  Antisense strand to SEQ ID NO: 1786553
acaacacucugagaaggcg

SEQ ID NO: 1786555 - RNA, 19 nt, Artificial Sequence
  Description of Artificial Sequence: Synthetic oligonucleotide
  Sense strand starting at position 2910 of SEQ ID NO: 1562979
gcaaauagcucugggcuca

SEQ ID NO: 1786556 - RNA, 19 nt, Artificial Sequence
  Description of Artificial Sequence: Synthetic oligonucleotide
  Antisense strand to SEQ ID NO: 1786555
ugagcccagagcuauuugc

SEQ ID NO: 1786557 - RNA, 19 nt, Artificial Sequence
  Description of Artificial Sequence: Synthetic oligonucleotide
  Sense strand starting at position 2915 of SEQ ID NO: 1562979
uagcucugggcucaagagu

SEQ ID NO: 1786558 - RNA, 19 nt, Artificial Sequence
  Description of Artificial Sequence: Synthetic oligonucleotide
  Antisense strand to SEQ ID NO: 1786557
acucuugagcccagagcua

SEQ ID NO: 1786559 - RNA, 19 nt, Artificial Sequence
  Description of Artificial Sequence: Synthetic oligonucleotide
  Sense strand starting at position 2923 of SEQ ID NO: 1562979
ggcucaagagucugacuag

SEQ ID NO: 1786560 - RNA, 19 nt, Artificial Sequence
  Description of Artificial Sequence: Synthetic oligonucleotide
  Antisense strand to SEQ ID NO: 1786559
cuagucagacucuugagcc

SEQ ID NO: 1786561 - RNA, 19 nt, Artificial Sequence
  Description of Artificial Sequence: Synthetic oligonucleotide
  Sense strand starting at position 2926 of SEQ ID NO: 1562979
ucaagagucugacuagggu

SEQ ID NO: 1786562 - RNA, 19 nt, Artificial Sequence
  Description of Artificial Sequence: Synthetic oligonucleotide
  Antisense strand to SEQ ID NO: 1786561
acccuagucagacucuuga

SEQ ID NO: 1786563 - RNA, 19 nt, Artificial Sequence
  Description of Artificial Sequence: Synthetic oligonucleotide
  Sense strand starting at position 3063 of SEQ ID NO: 1562979
ggguuucguguuuaauacu

SEQ ID NO: 1786564 - RNA, 19 nt, Artificial Sequence
  Description of Artificial Sequence: Synthetic oligonucleotide
  Antisense strand to SEQ ID NO: 1786563
aguauuaaacacgaaaccc

SEQ ID NO: 1786565 - RNA, 19 nt, Artificial Sequence
  Description of Artificial Sequence: Synthetic oligonucleotide
  Sense strand starting at position 3091 of SEQ ID NO: 1562979
uugaguuacauguaguaua

SEQ ID NO: 1786566 - RNA, 19 nt, Artificial Sequence
  Description of Artificial Sequence: Synthetic oligonucleotide
  Antisense strand to SEQ ID NO: 1786565
uauacuacauguaacucaa

SEQ ID NO: 1786567 - RNA, 19 nt, Artificial Sequence
  Description of Artificial Sequence: Synthetic oligonucleotide
  Sense strand starting at position 3094 of SEQ ID NO: 1562979
aguuacauguaguauaaga

SEQ ID NO: 1786568 - RNA, 19 nt, Artificial Sequence
  Description of Artificial Sequence: Synthetic oligonucleotide
  Antisense strand to SEQ ID NO: 1786567
ucuuauacuacauguaacu

SEQ ID NO: 1786569 - RNA, 19 nt, Artificial Sequence
  Description of Artificial Sequence: Synthetic oligonucleotide
  Sense strand starting at position 3135 of SEQ ID NO: 1562979
agguguccaaacgguuaaa

SEQ ID NO: 1786570 - RNA, 19 nt, Artificial Sequence
  Description of Artificial Sequence: Synthetic oligonucleotide
  Antisense strand to SEQ ID NO: 1786569
uuuaaccguuuggacaccu

SEQ ID NO: 1786571 - RNA, 19 nt, Artificial Sequence
  Description of Artificial Sequence: Synthetic oligonucleotide
  Sense strand starting at position 3155 of SEQ ID NO: 1562979
gucagucugcccuggauuu

SEQ ID NO: 1786572 - RNA, 19 nt, Artificial Sequence
  Description of Artificial Sequence: Synthetic oligonucleotide
  Antisense strand to SEQ ID NO: 1786571
aaauccagggcagacugac

SEQ ID NO: 1786573 - RNA, 19 nt, Artificial Sequence
  Description of Artificial Sequence: Synthetic oligonucleotide
  Sense strand starting at position 3222 of SEQ ID NO: 1562979
aguacuaucugagaggcga

SEQ ID NO: 1786574 - RNA, 19 nt, Artificial Sequence
  Description of Artificial Sequence: Synthetic oligonucleotide
  Antisense strand to SEQ ID NO: 1786573
ucgccucucagauaguacu

SEQ ID NO: 1786575 - RNA, 19 nt, Artificial Sequence
  Description of Artificial Sequence: Synthetic oligonucleotide
  Sense strand starting at position 3230 of SEQ ID NO: 1562979
cugagaggcgauggauaua

SEQ ID NO: 1786576 - RNA, 19 nt, Artificial Sequence
  Description of Artificial Sequence: Synthetic oligonucleotide
  Antisense strand to SEQ ID NO: 1786575
uauauccaucgccucucag

SEQ ID NO: 1786577 - RNA, 19 nt, Artificial Sequence
  Description of Artificial Sequence: Synthetic oligonucleotide
  Sense strand starting at position 3244 of SEQ ID NO: 1562979
auauauacucuuggacaug

SEQ ID NO: 1786578 - RNA, 19 nt, Artificial Sequence
  Description of Artificial Sequence: Synthetic oligonucleotide
  Antisense strand to SEQ ID NO: 1786577
cauguccaagaguauauau

SEQ ID NO: 1786579 - RNA, 19 nt, Artificial Sequence
  Description of Artificial Sequence: Synthetic oligonucleotide
  Sense strand starting at position 3337 of SEQ ID NO: 1562979
gcuuaugagucucaguaaa

SEQ ID NO: 1786580 - RNA, 19 nt, Artificial Sequence
  Description of Artificial Sequence: Synthetic oligonucleotide
  Antisense strand to SEQ ID NO: 1786579
uuuacugagacucauaagc

SEQ ID NO: 1786581 - RNA, 19 nt, Artificial Sequence
  Description of Artificial Sequence: Synthetic oligonucleotide
  Sense strand starting at position 3339 of SEQ ID NO: 1562979
uuaugagucucaguaaaug

SEQ ID NO: 1786582 - RNA, 19 nt, Artificial Sequence
  Description of Artificial Sequence: Synthetic oligonucleotide
  Antisense strand to SEQ ID NO: 1786581
cauuuacugagacucauaa

SEQ ID NO: 1786583 - RNA, 19 nt, Artificial Sequence
  Description of Artificial Sequence: Synthetic oligonucleotide
  Sense strand starting at position 3454 of SEQ ID NO: 1562979
uuucuuuaauacggaguuu

SEQ ID NO: 1786584 - RNA, 19 nt, Artificial Sequence
  Description of Artificial Sequence: Synthetic oligonucleotide
  Antisense strand to SEQ ID NO: 1786583
aaacuccguauuaaagaaa

SEQ ID NO: 1786585 - RNA, 19 nt, Artificial Sequence
  Description of Artificial Sequence: Synthetic oligonucleotide
  Sense strand starting at position 3774 of SEQ ID NO: 1562979
uugagucucccaugugcau

SEQ ID NO: 1786586 - RNA, 19 nt, Artificial Sequence
  Description of Artificial Sequence: Synthetic oligonucleotide
  Antisense strand to SEQ ID NO: 1786585
augcacaugggagacucaa

SEQ ID NO: 1786587 - RNA, 19 nt, Artificial Sequence
  Description of Artificial Sequence: Synthetic oligonucleotide
  Sense strand starting at position 8 of SEQ ID NO: 1562980
ucacaacccguagaaguau

SEQ ID NO: 1786588 - RNA, 19 nt, Artificial Sequence
  Description of Artificial Sequence: Synthetic oligonucleotide
  Antisense strand to SEQ ID NO: 1786587
auacuucuacggguuguga

SEQ ID NO: 1786589 - RNA, 19 nt, Artificial Sequence
  Description of Artificial Sequence: Synthetic oligonucleotide
  Sense strand starting at position 91 of SEQ ID NO: 1562980
acagcuagucauuagcaga

SEQ ID NO: 1786590 - RNA, 19 nt, Artificial Sequence
  Description of Artificial Sequence: Synthetic oligonucleotide
  Antisense strand to SEQ ID NO: 1786589
ucugcuaaugacuagcugu

SEQ ID NO: 1786591 - RNA, 19 nt, Artificial Sequence
  Description of Artificial Sequence: Synthetic oligonucleotide
  Sense strand starting at position 126 of SEQ ID NO: 1562980
gggucugucugaguccaga

SEQ ID NO: 1786592 - RNA, 19 nt, Artificial Sequence
  Description of Artificial Sequence: Synthetic oligonucleotide
  Antisense strand to SEQ ID NO: 1786591
ucuggacucagacagaccc

SEQ ID NO: 1786593 - RNA, 19 nt, Artificial Sequence
  Description of Artificial Sequence: Synthetic oligonucleotide
  Sense strand starting at position 228 of SEQ ID NO: 1562980
ucacacggcuuccuauaaa

SEQ ID NO: 1786594 - RNA, 19 nt, Artificial Sequence
  Description of Artificial Sequence: Synthetic oligonucleotide
  Antisense strand to SEQ ID NO: 1786593
uuuauaggaagccguguga

SEQ ID NO: 1786595 - RNA, 19 nt, Artificial Sequence
  Description of Artificial Sequence: Synthetic oligonucleotide
  Sense strand starting at position 252 of SEQ ID NO: 1562980
gcauuugugcugggcuuga

SEQ ID NO: 1786596 - RNA, 19 nt, Artificial Sequence
  Description of Artificial Sequence: Synthetic oligonucleotide
  Antisense strand to SEQ ID NO: 1786595
ucaagcccagcacaaaugc

SEQ ID NO: 1786597 - RNA, 19 nt, Artificial Sequence
  Description of Artificial Sequence: Synthetic oligonucleotide
  Sense strand starting at position 379 of SEQ ID NO: 1562980
gguggacagugaccucaau

SEQ ID NO: 1786598 - RNA, 19 nt, Artificial Sequence
  Description of Artificial Sequence: Synthetic oligonucleotide
  Antisense strand to SEQ ID NO: 1786597
auugaggucacuguccacc

SEQ ID NO: 1786599 - RNA, 19 nt, Artificial Sequence
  Description of Artificial Sequence: Synthetic oligonucleotide
  Sense strand starting at position 932 of SEQ ID NO: 1562980
ucggcucuugcccagagaa

SEQ ID NO: 1786600 - RNA, 19 nt, Artificial Sequence
  Description of Artificial Sequence: Synthetic oligonucleotide
  Antisense strand to SEQ ID NO: 1786599
uucucugggcaagagccga

SEQ ID NO: 1786601 - RNA, 19 nt, Artificial Sequence
  Description of Artificial Sequence: Synthetic oligonucleotide
  Sense strand starting at position 934 of SEQ ID NO: 1562980
ggcucuugcccagagaaga

SEQ ID NO: 1786602 - RNA, 19 nt, Artificial Sequence
  Description of Artificial Sequence: Synthetic oligonucleotide
  Antisense strand to SEQ ID NO: 1786601
ucuucucugggcaagagcc

SEQ ID NO: 1786603 - RNA, 19 nt, Artificial Sequence
  Description of Artificial Sequence: Synthetic oligonucleotide
  Sense strand starting at position 1076 of SEQ ID NO: 1562980
uugccuucugaggagcaua

SEQ ID NO: 1786604 - RNA, 19 nt, Artificial Sequence
  Description of Artificial Sequence: Synthetic oligonucleotide
  Antisense strand to SEQ ID NO: 1786603
uaugcuccucagaaggcaa

SEQ ID NO: 1786605 - RNA, 19 nt, Artificial Sequence
  Description of Artificial Sequence: Synthetic oligonucleotide
  Sense strand starting at position 1146 of SEQ ID NO: 1562980
cuggucucagcucaaacua

SEQ ID NO: 1786606 - RNA, 19 nt, Artificial Sequence
  Description of Artificial Sequence: Synthetic oligonucleotide
  Antisense strand to SEQ ID NO: 1786605
uaguuugagcugagaccag

SEQ ID NO: 1786607 - RNA, 19 nt, Artificial Sequence
  Description of Artificial Sequence: Synthetic oligonucleotide
  Sense strand starting at position 1319 of SEQ ID NO: 1562980
gcaggagcuauccaagucu

SEQ ID NO: 1786608 - RNA, 19 nt, Artificial Sequence
  Description of Artificial Sequence: Synthetic oligonucleotide
  Antisense strand to SEQ ID NO: 1786607
agacuuggauagcuccugc

SEQ ID NO: 1786609 - RNA, 19 nt, Artificial Sequence
  Description of Artificial Sequence: Synthetic oligonucleotide
  Sense strand starting at position 1454 of SEQ ID NO: 1562980
gccagucccgaggaugaau

SEQ ID NO: 1786610 - RNA, 19 nt, Artificial Sequence
  Description of Artificial Sequence: Synthetic oligonucleotide
  Antisense strand to SEQ ID NO: 1786609
auucauccucgggacuggc

SEQ ID NO: 1786611 - RNA, 19 nt, Artificial Sequence
  Description of Artificial Sequence: Synthetic oligonucleotide
  Sense strand starting at position 2212 of SEQ ID NO: 1562980
gagggauugaaaggugcua

SEQ ID NO: 1786612 - RNA, 19 nt, Artificial Sequence
  Description of Artificial Sequence: Synthetic oligonucleotide
  Antisense strand to SEQ ID NO: 1786611
uagcaccuuucaaucccuc

SEQ ID NO: 1786613 - RNA, 19 nt, Artificial Sequence
  Description of Artificial Sequence: Synthetic oligonucleotide
  Sense strand starting at position 2214 of SEQ ID NO: 1562980
gggauugaaaggugcuauc

SEQ ID NO: 1786614 - RNA, 19 nt, Artificial Sequence
  Description of Artificial Sequence: Synthetic oligonucleotide
  Antisense strand to SEQ ID NO: 1786613
gauagcaccuuucaauccc

SEQ ID NO: 1786615 - RNA, 19 nt, Artificial Sequence
  Description of Artificial Sequence: Synthetic oligonucleotide
  Sense strand starting at position 2615 of SEQ ID NO: 1562980
auguauccugaaugaauga

SEQ ID NO: 1786616 - RNA, 19 nt, Artificial Sequence
  Description of Artificial Sequence: Synthetic oligonucleotide
  Antisense strand to SEQ ID NO: 1786615
ucauucauucaggauacau

SEQ ID NO: 1786617 - RNA, 19 nt, Artificial Sequence
  Description of Artificial Sequence: Synthetic oligonucleotide
  Sense strand starting at position 2736 of SEQ ID NO: 1562980
ucguuuaacagcuagggaa

SEQ ID NO: 1786618 - RNA, 19 nt, Artificial Sequence
  Description of Artificial Sequence: Synthetic oligonucleotide
  Antisense strand to SEQ ID NO: 1786617
uucccuagcuguuaaacga

SEQ ID NO: 1786619 - RNA, 19 nt, Artificial Sequence
  Description of Artificial Sequence: Synthetic oligonucleotide
  Sense strand starting at position 2785 of SEQ ID NO: 1562980
aaaguuguuaguggcauga

SEQ ID NO: 1786620 - RNA, 19 nt, Artificial Sequence
  Description of Artificial Sequence: Synthetic oligonucleotide
  Antisense strand to SEQ ID NO: 1786619
ucaugccacuaacaacuuu

SEQ ID NO: 1786621 - RNA, 19 nt, Artificial Sequence
  Description of Artificial Sequence: Synthetic oligonucleotide
  Sense strand starting at position 2789 of SEQ ID NO: 1562980
uuguuaguggcaugacaua

SEQ ID NO: 1786622 - RNA, 19 nt, Artificial Sequence
  Description of Artificial Sequence: Synthetic oligonucleotide
  Antisense strand to SEQ ID NO: 1786621
uaugucaugccacuaacaa

SEQ ID NO: 1786623 - RNA, 19 nt, Artificial Sequence
  Description of Artificial Sequence: Synthetic oligonucleotide
  Sense strand starting at position 2857 of SEQ ID NO: 1562980
cccuuauggccuggaauua

SEQ ID NO: 1786624 - RNA, 19 nt, Artificial Sequence
  Description of Artificial Sequence: Synthetic oligonucleotide
  Antisense strand to SEQ ID NO: 1786623
uaauuccaggccauaaggg

SEQ ID NO: 1786625 - RNA, 19 nt, Artificial Sequence
  Description of Artificial Sequence: Synthetic oligonucleotide
  Sense strand starting at position 2858 of SEQ ID NO: 1562980
ccuuauggccuggaauuaa

SEQ ID NO: 1786626 - RNA, 19 nt, Artificial Sequence
  Description of Artificial Sequence: Synthetic oligonucleotide
  Antisense strand to SEQ ID NO: 1786625
uuaauuccaggccauaagg

SEQ ID NO: 1786627 - RNA, 19 nt, Artificial Sequence
  Description of Artificial Sequence: Synthetic oligonucleotide
  Sense strand starting at position 2942 of SEQ ID NO: 1562980
cacucaagucucugggaga

SEQ ID NO: 1786628 - RNA, 19 nt, Artificial Sequence
  Description of Artificial Sequence: Synthetic oligonucleotide
  Antisense strand to SEQ ID NO: 1786627
ucucccagagacuugagug

SEQ ID NO: 1786629 - RNA, 19 nt, Artificial Sequence
  Description of Artificial Sequence: Synthetic oligonucleotide
  Sense strand starting at position 3005 of SEQ ID NO: 1562980
aggcaccaggccuguuaaa

SEQ ID NO: 1786630 - RNA, 19 nt, Artificial Sequence
  Description of Artificial Sequence: Synthetic oligonucleotide
  Antisense strand to SEQ ID NO: 1786629
uuuaacaggccuggugccu

SEQ ID NO: 1786631 - RNA, 19 nt, Artificial Sequence
  Description of Artificial Sequence: Synthetic oligonucleotide
  Sense strand starting at position 3189 of SEQ ID NO: 1562980
cugccuuccuuacuggaua

SEQ ID NO: 1786632 - RNA, 19 nt, Artificial Sequence
  Description of Artificial Sequence: Synthetic oligonucleotide
  Antisense strand to SEQ ID NO: 1786631
uauccaguaaggaaggcag

SEQ ID NO: 1786633 - RNA, 19 nt, Artificial Sequence
  Description of Artificial Sequence: Synthetic oligonucleotide
  Sense strand starting at position 3201 of SEQ ID NO: 1562980
cuggauacauggcuaagau

SEQ ID NO: 1786634 - RNA, 19 nt, Artificial Sequence
  Description of Artificial Sequence: Synthetic oligonucleotide
  Antisense strand to SEQ ID NO: 1786633
aucuuagccauguauccag

SEQ ID NO: 1786635 - RNA, 19 nt, Artificial Sequence
  Description of Artificial Sequence: Synthetic oligonucleotide
  Sense strand starting at position 3210 of SEQ ID NO: 1562980
uggcuaagaucuuuauaua

SEQ ID NO: 1786636 - RNA, 19 nt, Artificial Sequence
  Description of Artificial Sequence: Synthetic oligonucleotide
  Antisense strand to SEQ ID NO: 1786635
uauauaaagaucuuagcca

SEQ ID NO: 1786637 - RNA, 19 nt, Artificial Sequence
  Description of Artificial Sequence: Synthetic oligonucleotide
  Sense strand starting at position 3234 of SEQ ID NO: 1562980
cuuccagggccaggauauu

SEQ ID NO: 1786638 - RNA, 19 nt, Artificial Sequence
  Description of Artificial Sequence: Synthetic oligonucleotide
  Antisense strand to SEQ ID NO: 1786637
aauauccuggcccuggaag

SEQ ID NO: 1786639 - RNA, 19 nt, Artificial Sequence
  Description of Artificial Sequence: Synthetic oligonucleotide
  Sense strand starting at position 3245 of SEQ ID NO: 1562980
aggauauucuuuccaggcu

SEQ ID NO: 1786640 - RNA, 19 nt, Artificial Sequence
  Description of Artificial Sequence: Synthetic oligonucleotide
  Antisense strand to SEQ ID NO: 1786639
agccuggaaagaauauccu

SEQ ID NO: 1786641 - RNA, 19 nt, Artificial Sequence
  Description of Artificial Sequence: Synthetic oligonucleotide
  Sense strand starting at position 3248 of SEQ ID NO: 1562980
auauucuuuccaggcuaga

SEQ ID NO: 1786642 - RNA, 19 nt, Artificial Sequence
  Description of Artificial Sequence: Synthetic oligonucleotide
  Antisense strand to SEQ ID NO: 1786641
ucuagccuggaaagaauau

SEQ ID NO: 1786643 - RNA, 19 nt, Artificial Sequence
  Description of Artificial Sequence: Synthetic oligonucleotide
  Sense strand starting at position 3277 of SEQ ID NO: 1562980
aggaaacuauuauagaaga

SEQ ID NO: 1786644 - RNA, 19 nt, Artificial Sequence
  Description of Artificial Sequence: Synthetic oligonucleotide
  Antisense strand to SEQ ID NO: 1786643
ucuucuauaauaguuuccu

SEQ ID NO: 1786645 - RNA, 19 nt, Artificial Sequence
  Description of Artificial Sequence: Synthetic oligonucleotide
  Sense strand starting at position 3677 of SEQ ID NO: 1562980
agaucuagcuugucacuua

SEQ ID NO: 1786646 - RNA, 19 nt, Artificial Sequence
  Description of Artificial Sequence: Synthetic oligonucleotide
  Antisense strand to SEQ ID NO: 1786645
uaagugacaagcuagaucu

SEQ ID NO: 1786647 - RNA, 19 nt, Artificial Sequence
  Description of Artificial Sequence: Synthetic oligonucleotide
  Sense strand starting at position 3688 of SEQ ID NO: 1562980
gucacuuaagugugggaca

SEQ ID NO: 1786648 - RNA, 19 nt, Artificial Sequence
  Description of Artificial Sequence: Synthetic oligonucleotide
  Antisense strand to SEQ ID NO: 1786647
ugucccacacuuaagugac

SEQ ID NO: 1786649 - RNA, 19 nt, Artificial Sequence
  Description of Artificial Sequence: Synthetic oligonucleotide
  Sense strand starting at position 3690 of SEQ ID NO: 1562980
cacuuaagugugggacaau

SEQ ID NO: 1786650 - RNA, 19 nt, Artificial Sequence
  Description of Artificial Sequence: Synthetic oligonucleotide
  Antisense strand to SEQ ID NO: 1786649
auugucccacacuuaagug

SEQ ID NO: 1786651 - RNA, 19 nt, Artificial Sequence
  Description of Artificial Sequence: Synthetic oligonucleotide
  Sense strand starting at position 3726 of SEQ ID NO: 1562980
ucaggugacuuauugagga

SEQ ID NO: 1786652 - RNA, 19 nt, Artificial Sequence
  Description of Artificial Sequence: Synthetic oligonucleotide
  Antisense strand to SEQ ID NO: 1786651
uccucaauaagucaccuga

SEQ ID NO: 1786653 - RNA, 19 nt, Artificial Sequence
  Description of Artificial Sequence: Synthetic oligonucleotide
  Sense strand starting at position 3748 of SEQ ID NO: 1562980
ugagggagagguggucaua

SEQ ID NO: 1786654 - RNA, 19 nt, Artificial Sequence
  Description of Artificial Sequence: Synthetic oligonucleotide
  Antisense strand to SEQ ID NO: 1786653
uaugaccaccucucccuca

SEQ ID NO: 1786655 - RNA, 19 nt, Artificial Sequence
  Description of Artificial Sequence: Synthetic oligonucleotide
  Sense strand starting at position 3751 of SEQ ID NO: 1562980
gggagagguggucauaggu

SEQ ID NO: 1786656 - RNA, 19 nt, Artificial Sequence
  Description of Artificial Sequence: Synthetic oligonucleotide
  Antisense strand to SEQ ID NO: 1786655
accuaugaccaccucuccc

SEQ ID NO: 1786657 - RNA, 19 nt, Artificial Sequence
  Description of Artificial Sequence: Synthetic oligonucleotide
  Sense strand starting at position 3849 of SEQ ID NO: 1562980
cugggaacugccugcgaaa

SEQ ID NO: 1786658 - RNA, 19 nt, Artificial Sequence
  Description of Artificial Sequence: Synthetic oligonucleotide
  Antisense strand to SEQ ID NO: 1786657
uuucgcaggcaguucccag

SEQ ID NO: 1786659 - RNA, 19 nt, Artificial Sequence
  Description of Artificial Sequence: Synthetic oligonucleotide
  Sense strand starting at position 3861 of SEQ ID NO: 1562980
ugcgaaaguuacccacgaa

SEQ ID NO: 1786660 - RNA, 19 nt, Artificial Sequence
  Description of Artificial Sequence: Synthetic oligonucleotide
  Antisense strand to SEQ ID NO: 1786659
uucguggguaacuuucgca

SEQ ID NO: 1786661 - RNA, 19 nt, Artificial Sequence
  Description of Artificial Sequence: Synthetic oligonucleotide
  Sense strand starting at position 3862 of SEQ ID NO: 1562980
gcgaaaguuacccacgaaa

SEQ ID NO: 1786662 - RNA, 19 nt, Artificial Sequence
  Description of Artificial Sequence: Synthetic oligonucleotide
  Antisense strand to SEQ ID NO: 1786661
uuucguggguaacuuucgc

SEQ ID NO: 1786663 - RNA, 19 nt, Artificial Sequence
  Description of Artificial Sequence: Synthetic oligonucleotide
  Sense strand starting at position 3864 of SEQ ID NO: 1562980
gaaaguuacccacgaaagu

SEQ ID NO: 1786664 - RNA, 19 nt, Artificial Sequence
  Description of Artificial Sequence: Synthetic oligonucleotide
  Antisense strand to SEQ ID NO: 1786663
acuuucguggguaacuuuc

SEQ ID NO: 1786665 - RNA, 19 nt, Artificial Sequence
  Description of Artificial Sequence: Synthetic oligonucleotide
  Sense strand starting at position 3865 of SEQ ID NO: 1562980
aaaguuacccacgaaagua

SEQ ID NO: 1786666 - RNA, 19 nt, Artificial Sequence
  Description of Artificial Sequence: Synthetic oligonucleotide
  Antisense strand to SEQ ID NO: 1786665
uacuuucguggguaacuuu

SEQ ID NO: 1786667 - RNA, 19 nt, Artificial Sequence
  Description of Artificial Sequence: Synthetic oligonucleotide
  Sense strand starting at position 4 of SEQ ID NO: 1562981
uauccauggucuuccggaa

SEQ ID NO: 1786668 - RNA, 19 nt, Artificial Sequence
  Description of Artificial Sequence: Synthetic oligonucleotide
  Antisense strand to SEQ ID NO: 1786667
uuccggaagaccauggaua

SEQ ID NO: 1786669 - RNA, 19 nt, Artificial Sequence
  Description of Artificial Sequence: Synthetic oligonucleotide
  Sense strand starting at position 180 of SEQ ID NO: 1562981
cuccgacuucugcaaguca

SEQ ID NO: 1786670 - RNA, 19 nt, Artificial Sequence
  Description of Artificial Sequence: Synthetic oligonucleotide
  Antisense strand to SEQ ID NO: 1786669
ugacuugcagaagucggag

SEQ ID NO: 1786671 - RNA, 19 nt, Artificial Sequence
  Description of Artificial Sequence: Synthetic oligonucleotide
  Sense strand starting at position 200 of SEQ ID NO: 1562981
aauuccgagcugugggaaa

SEQ ID NO: 1786672 - RNA, 19 nt, Artificial Sequence
  Description of Artificial Sequence: Synthetic oligonucleotide
  Antisense strand to SEQ ID NO: 1786671
uuucccacagcucggaauu

SEQ ID NO: 1786673 - RNA, 19 nt, Artificial Sequence
  Description of Artificial Sequence: Synthetic oligonucleotide
  Sense strand starting at position 371 of SEQ ID NO: 1562981
cccugagagccaugagaca

SEQ ID NO: 1786674 - RNA, 19 nt, Artificial Sequence
  Description of Artificial Sequence: Synthetic oligonucleotide
  Antisense strand to SEQ ID NO: 1786673
ugucucauggcucucaggg

SEQ ID NO: 1786675 - RNA, 19 nt, Artificial Sequence
  Description of Artificial Sequence: Synthetic oligonucleotide
  Sense strand starting at position 541 of SEQ ID NO: 1562981
aagagagaugcugguuaaa

SEQ ID NO: 1786676 - RNA, 19 nt, Artificial Sequence
  Description of Artificial Sequence: Synthetic oligonucleotide
  Antisense strand to SEQ ID NO: 1786675
uuuaaccagcaucucucuu

SEQ ID NO: 1786677 - RNA, 19 nt, Artificial Sequence
  Description of Artificial Sequence: Synthetic oligonucleotide
  Sense strand starting at position 543 of SEQ ID NO: 1562981
gagagaugcugguuaaagu

SEQ ID NO: 1786678 - RNA, 19 nt, Artificial Sequence
  Description of Artificial Sequence: Synthetic oligonucleotide
  Antisense strand to SEQ ID NO: 1786677
acuuuaaccagcaucucuc

SEQ ID NO: 1786679 - RNA, 19 nt, Artificial Sequence
  Description of Artificial Sequence: Synthetic oligonucleotide
  Sense strand starting at position 659 of SEQ ID NO: 1562981
auggguuaaugguugaaua

SEQ ID NO: 1786680 - RNA, 19 nt, Artificial Sequence
  Description of Artificial Sequence: Synthetic oligonucleotide
  Antisense strand to SEQ ID NO: 1786679
uauucaaccauuaacccau

SEQ ID NO: 1786681 - RNA, 19 nt, Artificial Sequence
  Description of Artificial Sequence: Synthetic oligonucleotide
  Sense strand starting at position 660 of SEQ ID NO: 1562981
uggguuaaugguugaauag

SEQ ID NO: 1786682 - RNA, 19 nt, Artificial Sequence
  Description of Artificial Sequence: Synthetic oligonucleotide
  Antisense strand to SEQ ID NO: 1786681
cuauucaaccauuaaccca

SEQ ID NO: 1786683 - RNA, 19 nt, Artificial Sequence
  Description of Artificial Sequence: Synthetic oligonucleotide
  Sense strand starting at position 683 of SEQ ID NO: 1562981
gcagauggaucacuggaua

SEQ ID NO: 1786684 - RNA, 19 nt, Artificial Sequence
  Description of Artificial Sequence: Synthetic oligonucleotide
  Antisense strand to SEQ ID NO: 1786683
uauccagugauccaucugc

SEQ ID NO: 1786685 - RNA, 19 nt, Artificial Sequence
  Description of Artificial Sequence: Synthetic oligonucleotide
  Sense strand starting at position 840 of SEQ ID NO: 1562981
guggauaaaucagugaaug

SEQ ID NO: 1786686 - RNA, 19 nt, Artificial Sequence
  Description of Artificial Sequence: Synthetic oligonucleotide
  Antisense strand to SEQ ID NO: 1786685
cauucacugauuuauccac

SEQ ID NO: 1786687 - RNA, 19 nt, Artificial Sequence
  Description of Artificial Sequence: Synthetic oligonucleotide
  Sense strand starting at position 866 of SEQ ID NO: 1562981
gagagaugggugggugauu

SEQ ID NO: 1786688 - RNA, 19 nt, Artificial Sequence
  Description of Artificial Sequence: Synthetic oligonucleotide
  Antisense strand to SEQ ID NO: 1786687
aaucacccacccaucucuc

SEQ ID NO: 1786689 - RNA, 19 nt, Artificial Sequence
  Description of Artificial Sequence: Synthetic oligonucleotide
  Sense strand starting at position 1281 of SEQ ID NO: 1562981
gaauaaguggauuggaguu

SEQ ID NO: 1786690 - RNA, 19 nt, Artificial Sequence
  Description of Artificial Sequence: Synthetic oligonucleotide
  Antisense strand to SEQ ID NO: 1786689
aacuccaauccacuuauuc

SEQ ID NO: 1786691 - RNA, 19 nt, Artificial Sequence
  Description of Artificial Sequence: Synthetic oligonucleotide
  Sense strand starting at position 1294 of SEQ ID NO: 1562981
ggaguuuggaugcauucuu

SEQ ID NO: 1786692 - RNA, 19 nt, Artificial Sequence
  Description of Artificial Sequence: Synthetic oligonucleotide
  Antisense strand to SEQ ID NO: 1786691
aagaaugcauccaaacucc

SEQ ID NO: 1786693 - RNA, 19 nt, Artificial Sequence
  Description of Artificial Sequence: Synthetic oligonucleotide
  Sense strand starting at position 1403 of SEQ ID NO: 1562981
uccuuuagcucuuugaaag

SEQ ID NO: 1786694 - RNA, 19 nt, Artificial Sequence
  Description of Artificial Sequence: Synthetic oligonucleotide
  Antisense strand to SEQ ID NO: 1786693
cuuucaaagagcuaaagga

SEQ ID NO: 1786695 - RNA, 19 nt, Artificial Sequence
  Description of Artificial Sequence: Synthetic oligonucleotide
  Sense strand starting at position 1404 of SEQ ID NO: 1562981
ccuuuagcucuuugaaaga

SEQ ID NO: 1786696 - RNA, 19 nt, Artificial Sequence
  Description of Artificial Sequence: Synthetic oligonucleotide
  Antisense strand to SEQ ID NO: 1786695
ucuuucaaagagcuaaagg

SEQ ID NO: 1786697 - RNA, 19 nt, Artificial Sequence
  Description of Artificial Sequence: Synthetic oligonucleotide
  Sense strand starting at position 1451 of SEQ ID NO: 1562981
uuuacagacuggucaucuu

SEQ ID NO: 1786698 - RNA, 19 nt, Artificial Sequence
  Description of Artificial Sequence: Synthetic oligonucleotide
  Antisense strand to SEQ ID NO: 1786697
aagaugaccagucuguaaa

SEQ ID NO: 1786699 - RNA, 19 nt, Artificial Sequence
  Description of Artificial Sequence: Synthetic oligonucleotide
  Sense strand starting at position 1571 of SEQ ID NO: 1562981
gguaaaccucucugguucu

SEQ ID NO: 1786700 - RNA, 19 nt, Artificial Sequence
  Description of Artificial Sequence: Synthetic oligonucleotide
  Antisense strand to SEQ ID NO: 1786699
agaaccagagagguuuacc

SEQ ID NO: 1786701 - RNA, 19 nt, Artificial Sequence
  Description of Artificial Sequence: Synthetic oligonucleotide
  Sense strand starting at position 1717 of SEQ ID NO: 1562981
gacccuuugggagguaaca

SEQ ID NO: 1786702 - RNA, 19 nt, Artificial Sequence
  Description of Artificial Sequence: Synthetic oligonucleotide
  Antisense strand to SEQ ID NO: 1786701
uguuaccucccaaaggguc

SEQ ID NO: 1786703 - RNA, 19 nt, Artificial Sequence
  Description of Artificial Sequence: Synthetic oligonucleotide
  Sense strand starting at position 1930 of SEQ ID NO: 1562981
aggagugguggccacuaua

SEQ ID NO: 1786704 - RNA, 19 nt, Artificial Sequence
  Description of Artificial Sequence: Synthetic oligonucleotide
  Antisense strand to SEQ ID NO: 1786703
uauaguggccaccacuccu

SEQ ID NO: 1786705 - RNA, 19 nt, Artificial Sequence
  Description of Artificial Sequence: Synthetic oligonucleotide
  Sense strand starting at position 2036 of SEQ ID NO: 1562981
ugggccaacuguuuaaauu

SEQ ID NO: 1786706 - RNA, 19 nt, Artificial Sequence
  Description of Artificial Sequence: Synthetic oligonucleotide
  Antisense strand to SEQ ID NO: 1786705
aauuuaaacaguuggccca

SEQ ID NO: 1786707 - RNA, 19 nt, Artificial Sequence
  Description of Artificial Sequence: Synthetic oligonucleotide
  Sense strand starting at position 2037 of SEQ ID NO: 1562981
gggccaacuguuuaaauug

SEQ ID NO: 1786708 - RNA, 19 nt, Artificial Sequence
  Description of Artificial Sequence: Synthetic oligonucleotide
  Antisense strand to SEQ ID NO: 1786707
caauuuaaacaguuggccc

SEQ ID NO: 1786709 - RNA, 19 nt, Artificial Sequence
  Description of Artificial Sequence: Synthetic oligonucleotide
  Sense strand starting at position 2046 of SEQ ID NO: 1562981
guuuaaauugcagauuaca

SEQ ID NO: 1786710 - RNA, 19 nt, Artificial Sequence
  Description of Artificial Sequence: Synthetic oligonucleotide
  Antisense strand to SEQ ID NO: 1786709
uguaaucugcaauuuaaac

SEQ ID NO: 1786711 - RNA, 19 nt, Artificial Sequence
  Description of Artificial Sequence: Synthetic oligonucleotide
  Sense strand starting at position 2252 of SEQ ID NO: 1562981
ugaccacugcccuggagaa

SEQ ID NO: 1786712 - RNA, 19 nt, Artificial Sequence
  Description of Artificial Sequence: Synthetic oligonucleotide
  Antisense strand to SEQ ID NO: 1786711
uucuccagggcagugguca

SEQ ID NO: 1786713 - RNA, 19 nt, Artificial Sequence
  Description of Artificial Sequence: Synthetic oligonucleotide
  Sense strand starting at position 2601 of SEQ ID NO: 1562981
aaggguugugugcaucuga

SEQ ID NO: 1786714 - RNA, 19 nt, Artificial Sequence
  Description of Artificial Sequence: Synthetic oligonucleotide
  Antisense strand to SEQ ID NO: 1786713
ucagaugcacacaacccuu

SEQ ID NO: 1786715 - RNA, 19 nt, Artificial Sequence
  Description of Artificial Sequence: Synthetic oligonucleotide
  Sense strand starting at position 2609 of SEQ ID NO: 1562981
ugugcaucugagggauacu

SEQ ID NO: 1786716 - RNA, 19 nt, Artificial Sequence
  Description of Artificial Sequence: Synthetic oligonucleotide
  Antisense strand to SEQ ID NO: 1786715
aguaucccucagaugcaca

SEQ ID NO: 1786717 - RNA, 19 nt, Artificial Sequence
  Description of Artificial Sequence: Synthetic oligonucleotide
  Sense strand starting at position 2688 of SEQ ID NO: 1562981
cccuguuauccaugacucu

SEQ ID NO: 1786718 - RNA, 19 nt, Artificial Sequence
  Description of Artificial Sequence: Synthetic oligonucleotide
  Antisense strand to SEQ ID NO: 1786717
agagucauggauaacaggg

SEQ ID NO: 1786719 - RNA, 19 nt, Artificial Sequence
  Description of Artificial Sequence: Synthetic oligonucleotide
  Sense strand starting at position 2937 of SEQ ID NO: 1562981
gggucucuuuaggcuagua

SEQ ID NO: 1786720 - RNA, 19 nt, Artificial Sequence
  Description of Artificial Sequence: Synthetic oligonucleotide
  Antisense strand to SEQ ID NO: 1786719
uacuagccuaaagagaccc

SEQ ID NO: 1786721 - RNA, 19 nt, Artificial Sequence
  Description of Artificial Sequence: Synthetic oligonucleotide
  Sense strand starting at position 2939 of SEQ ID NO: 1562981
gucucuuuaggcuaguaga

SEQ ID NO: 1786722 - RNA, 19 nt, Artificial Sequence
  Description of Artificial Sequence: Synthetic oligonucleotide
  Antisense strand to SEQ ID NO: 1786721
ucuacuagccuaaagagac

SEQ ID NO: 1786723 - RNA, 19 nt, Artificial Sequence
  Description of Artificial Sequence: Synthetic oligonucleotide
  Sense strand starting at position 2952 of SEQ ID NO: 1562981
aguagauguuggucaguau

SEQ ID NO: 1786724 - RNA, 19 nt, Artificial Sequence
  Description of Artificial Sequence: Synthetic oligonucleotide
  Antisense strand to SEQ ID NO: 1786723
auacugaccaacaucuacu

SEQ ID NO: 1786725 - RNA, 19 nt, Artificial Sequence
  Description of Artificial Sequence: Synthetic oligonucleotide
  Sense strand starting at position 2953 of SEQ ID NO: 1562981
guagauguuggucaguauc

SEQ ID NO: 1786726 - RNA, 19 nt, Artificial Sequence
  Description of Artificial Sequence: Synthetic oligonucleotide
  Antisense strand to SEQ ID NO: 1786725
gauacugaccaacaucuac

SEQ ID NO: 1786727 - RNA, 19 nt, Artificial Sequence
  Description of Artificial Sequence: Synthetic oligonucleotide
  Sense strand starting at position 2956 of SEQ ID NO: 1562981
gauguuggucaguaucaga

SEQ ID NO: 1786728 - RNA, 19 nt, Artificial Sequence
  Description of Artificial Sequence: Synthetic oligonucleotide
  Antisense strand to SEQ ID NO: 1786727
ucugauacugaccaacauc

SEQ ID NO: 1786729 - RNA, 19 nt, Artificial Sequence
  Description of Artificial Sequence: Synthetic oligonucleotide
  Sense strand starting at position 2970 of SEQ ID NO: 1562981
ucagacaucuucucaggga

SEQ ID NO: 1786730 - RNA, 19 nt, Artificial Sequence
  Description of Artificial Sequence: Synthetic oligonucleotide
  Antisense strand to SEQ ID NO: 1786729
ucccugagaagaugucuga

SEQ ID NO: 1786731 - RNA, 19 nt, Artificial Sequence
  Description of Artificial Sequence: Synthetic oligonucleotide
  Sense strand starting at position 2974 of SEQ ID NO: 1562981
acaucuucucagggacauc

SEQ ID NO: 1786732 - RNA, 19 nt, Artificial Sequence
  Description of Artificial Sequence: Synthetic oligonucleotide
  Antisense strand to SEQ ID NO: 1786731
gaugucccugagaagaugu

SEQ ID NO: 1786733 - RNA, 19 nt, Artificial Sequence
  Description of Artificial Sequence: Synthetic oligonucleotide
  Sense strand starting at position 2985 of SEQ ID NO: 1562981
gggacaucuuccuugcucu

SEQ ID NO: 1786734 - RNA, 19 nt, Artificial Sequence
  Description of Artificial Sequence: Synthetic oligonucleotide
  Antisense strand to SEQ ID NO: 1786733
agagcaaggaagauguccc

SEQ ID NO: 1786735 - RNA, 19 nt, Artificial Sequence
  Description of Artificial Sequence: Synthetic oligonucleotide
  Sense strand starting at position 3078 of SEQ ID NO: 1562981
cguggcauguacucaggaa

SEQ ID NO: 1786736 - RNA, 19 nt, Artificial Sequence
  Description of Artificial Sequence: Synthetic oligonucleotide
  Antisense strand to SEQ ID NO: 1786735
uuccugaguacaugccacg

SEQ ID NO: 1786737 - RNA, 19 nt, Artificial Sequence
  Description of Artificial Sequence: Synthetic oligonucleotide
  Sense strand starting at position 3082 of SEQ ID NO: 1562981
gcauguacucaggaacagu

SEQ ID NO: 1786738 - RNA, 19 nt, Artificial Sequence
  Description of Artificial Sequence: Synthetic oligonucleotide
  Antisense strand to SEQ ID NO: 1786737
acuguuccugaguacaugc

SEQ ID NO: 1786739 - RNA, 19 nt, Artificial Sequence
  Description of Artificial Sequence: Synthetic oligonucleotide
  Sense strand starting at position 3189 of SEQ ID NO: 1562981
cugccaggccaguaaugua

SEQ ID NO: 1786740 - RNA, 19 nt, Artificial Sequence
  Description of Artificial Sequence: Synthetic oligonucleotide
  Antisense strand to SEQ ID NO: 1786739
uacauuacuggccuggcag

SEQ ID NO: 1786741 - RNA, 19 nt, Artificial Sequence
  Description of Artificial Sequence: Synthetic oligonucleotide
  Sense strand starting at position 3196 of SEQ ID NO: 1562981
gccaguaauguacagagau

SEQ ID NO: 1786742 - RNA, 19 nt, Artificial Sequence
  Description of Artificial Sequence: Synthetic oligonucleotide
  Antisense strand to SEQ ID NO: 1786741
aucucuguacauuacuggc

SEQ ID NO: 1786743 - RNA, 19 nt, Artificial Sequence
  Description of Artificial Sequence: Synthetic oligonucleotide
  Sense strand starting at position 3478 of SEQ ID NO: 1562981
cagaacuuccugugauggu

SEQ ID NO: 1786744 - RNA, 19 nt, Artificial Sequence
  Description of Artificial Sequence: Synthetic oligonucleotide
  Antisense strand to SEQ ID NO: 1786743
accaucacaggaaguucug

SEQ ID NO: 1786745 - RNA, 19 nt, Artificial Sequence
  Description of Artificial Sequence: Synthetic oligonucleotide
  Sense strand starting at position 3627 of SEQ ID NO: 1562981
guucaaucuggcuaguggu

SEQ ID NO: 1786746 - RNA, 19 nt, Artificial Sequence
  Description of Artificial Sequence: Synthetic oligonucleotide
  Antisense strand to SEQ ID NO: 1786745
accacuagccagauugaac

SEQ ID NO: 1786747 - RNA, 19 nt, Artificial Sequence
  Description of Artificial Sequence: Synthetic oligonucleotide
  Sense strand starting at position 27 of SEQ ID NO: 1562982
gagguucucccggaacuga

SEQ ID NO: 1786748 - RNA, 19 nt, Artificial Sequence
  Description of Artificial Sequence: Synthetic oligonucleotide
  Antisense strand to SEQ ID NO: 1786747
ucaguuccgggagaaccuc

SEQ ID NO: 1786749 - RNA, 19 nt, Artificial Sequence
  Description of Artificial Sequence: Synthetic oligonucleotide
  Sense strand starting at position 169 of SEQ ID NO: 1562982
gaacgacuuugccaucuga

SEQ ID NO: 1786750 - RNA, 19 nt, Artificial Sequence
  Description of Artificial Sequence: Synthetic oligonucleotide
  Antisense strand to SEQ ID NO: 1786749
ucagauggcaaagucguuc

SEQ ID NO: 1786751 - RNA, 19 nt, Artificial Sequence
  Description of Artificial Sequence: Synthetic oligonucleotide
  Sense strand starting at position 221 of SEQ ID NO: 1562982
agaguuggguccuucccaa

SEQ ID NO: 1786752 - RNA, 19 nt, Artificial Sequence
  Description of Artificial Sequence: Synthetic oligonucleotide
  Antisense strand to SEQ ID NO: 1786751
uugggaaggacccaacucu

SEQ ID NO: 1786753 - RNA, 19 nt, Artificial Sequence
  Description of Artificial Sequence: Synthetic oligonucleotide
  Sense strand starting at position 397 of SEQ ID NO: 1562982
agcguaguugcgugaucuu

SEQ ID NO: 1786754 - RNA, 19 nt, Artificial Sequence
  Description of Artificial Sequence: Synthetic oligonucleotide
  Antisense strand to SEQ ID NO: 1786753
aagaucacgcaacuacgcu

SEQ ID NO: 1786755 - RNA, 19 nt, Artificial Sequence
  Description of Artificial Sequence: Synthetic oligonucleotide
  Sense strand starting at position 703 of SEQ ID NO: 1562982
uuaggaauguugucccuga

SEQ ID NO: 1786756 - RNA, 19 nt, Artificial Sequence
  Description of Artificial Sequence: Synthetic oligonucleotide
  Antisense strand to SEQ ID NO: 1786755
ucagggacaacauuccuaa

SEQ ID NO: 1786757 - RNA, 19 nt, Artificial Sequence
  Description of Artificial Sequence: Synthetic oligonucleotide
  Sense strand starting at position 704 of SEQ ID NO: 1562982
uaggaauguugucccugau

SEQ ID NO: 1786758 - RNA, 19 nt, Artificial Sequence
  Description of Artificial Sequence: Synthetic oligonucleotide
  Antisense strand to SEQ ID NO: 1786757
aucagggacaacauuccua

SEQ ID NO: 1786759 - RNA, 19 nt, Artificial Sequence
  Description of Artificial Sequence: Synthetic oligonucleotide
  Sense strand starting at position 707 of SEQ ID NO: 1562982
gaauguugucccugauacu

SEQ ID NO: 1786760 - RNA, 19 nt, Artificial Sequence
  Description of Artificial Sequence: Synthetic oligonucleotide
  Antisense strand to SEQ ID NO: 1786759
aguaucagggacaacauuc

SEQ ID NO: 1786761 - RNA, 19 nt, Artificial Sequence
  Description of Artificial Sequence: Synthetic oligonucleotide
  Sense strand starting at position 708 of SEQ ID NO: 1562982
aauguugucccugauacug

SEQ ID NO: 1786762 - RNA, 19 nt, Artificial Sequence
  Description of Artificial Sequence: Synthetic oligonucleotide
  Antisense strand to SEQ ID NO: 1786761
caguaucagggacaacauu

SEQ ID NO: 1786763 - RNA, 19 nt, Artificial Sequence
  Description of Artificial Sequence: Synthetic oligonucleotide
  Sense strand starting at position 736 of SEQ ID NO: 1562982
gguuuagauuuagaggcaa

SEQ ID NO: 1786764 - RNA, 19 nt, Artificial Sequence
  Description of Artificial Sequence: Synthetic oligonucleotide
  Antisense strand to SEQ ID NO: 1786763
uugccucuaaaucuaaacc

SEQ ID NO: 1786765 - RNA, 19 nt, Artificial Sequence
  Description of Artificial Sequence: Synthetic oligonucleotide
  Sense strand starting at position 825 of SEQ ID NO: 1562982
aaaggagucugugcacgua

SEQ ID NO: 1786766 - RNA, 19 nt, Artificial Sequence
  Description of Artificial Sequence: Synthetic oligonucleotide
  Antisense strand to SEQ ID NO: 1786765
uacgugcacagacuccuuu

SEQ ID NO: 1786767 - RNA, 19 nt, Artificial Sequence
  Description of Artificial Sequence: Synthetic oligonucleotide
  Sense strand starting at position 865 of SEQ ID NO: 1562982
ccgagcaggugucagauau

SEQ ID NO: 1786768 - RNA, 19 nt, Artificial Sequence
  Description of Artificial Sequence: Synthetic oligonucleotide
  Antisense strand to SEQ ID NO: 1786767
auaucugacaccugcucgg

SEQ ID NO: 1786769 - RNA, 19 nt, Artificial Sequence
  Description of Artificial Sequence: Synthetic oligonucleotide
  Sense strand starting at position 869 of SEQ ID NO: 1562982
gcaggugucagauauaugu

SEQ ID NO: 1786770 - RNA, 19 nt, Artificial Sequence
  Description of Artificial Sequence: Synthetic oligonucleotide
  Antisense strand to SEQ ID NO: 1786769
acauauaucugacaccugc

SEQ ID NO: 1786771 - RNA, 19 nt, Artificial Sequence
  Description of Artificial Sequence: Synthetic oligonucleotide
  Sense strand starting at position 871 of SEQ ID NO: 1562982
aggugucagauauauguga

SEQ ID NO: 1786772 - RNA, 19 nt, Artificial Sequence
  Description of Artificial Sequence: Synthetic oligonucleotide
  Antisense strand to SEQ ID NO: 1786771
ucacauauaucugacaccu

SEQ ID NO: 1786773 - RNA, 19 nt, Artificial Sequence
  Description of Artificial Sequence: Synthetic oligonucleotide
  Sense strand starting at position 875 of SEQ ID NO: 1562982
gucagauauaugugagcac

SEQ ID NO: 1786774 - RNA, 19 nt, Artificial Sequence
  Description of Artificial Sequence: Synthetic oligonucleotide
  Antisense strand to SEQ ID NO: 1786773
gugcucacauauaucugac

SEQ ID NO: 1786775 - RNA, 19 nt, Artificial Sequence
  Description of Artificial Sequence: Synthetic oligonucleotide
  Sense strand starting at position 876 of SEQ ID NO: 1562982
ucagauauaugugagcacu

SEQ ID NO: 1786776 - RNA, 19 nt, Artificial Sequence
  Description of Artificial Sequence: Synthetic oligonucleotide
  Antisense strand to SEQ ID NO: 1786775
agugcucacauauaucuga

SEQ ID NO: 1786777 - RNA, 19 nt, Artificial Sequence
  Description of Artificial Sequence: Synthetic oligonucleotide
  Sense strand starting at position 878 of SEQ ID NO: 1562982
agauauaugugagcacuca

SEQ ID NO: 1786778 - RNA, 19 nt, Artificial Sequence
  Description of Artificial Sequence: Synthetic oligonucleotide
  Antisense strand to SEQ ID NO: 1786777
ugagugcucacauauaucu

SEQ ID NO: 1786779 - RNA, 19 nt, Artificial Sequence
  Description of Artificial Sequence: Synthetic oligonucleotide
  Sense strand starting at position 879 of SEQ ID NO: 1562982
gauauaugugagcacucag

SEQ ID NO: 1786780 - RNA, 19 nt, Artificial Sequence
  Description of Artificial Sequence: Synthetic oligonucleotide
  Antisense strand to SEQ ID NO: 1786779
cugagugcucacauauauc

SEQ ID NO: 1786781 - RNA, 19 nt, Artificial Sequence
  Description of Artificial Sequence: Synthetic oligonucleotide
  Sense strand starting at position 926 of SEQ ID NO: 1562982
aauggaggcuuuguggaaa

SEQ ID NO: 1786782 - RNA, 19 nt, Artificial Sequence
  Description of Artificial Sequence: Synthetic oligonucleotide
  Antisense strand to SEQ ID NO: 1786781
uuuccacaaagccuccauu

SEQ ID NO: 1786783 - RNA, 19 nt, Artificial Sequence
  Description of Artificial Sequence: Synthetic oligonucleotide
  Sense strand starting at position 1007 of SEQ ID NO: 1562982
gcaucuguugcgucugaga

SEQ ID NO: 1786784 - RNA, 19 nt, Artificial Sequence
  Description of Artificial Sequence: Synthetic oligonucleotide
  Antisense strand to SEQ ID NO: 1786783
ucucagacgcaacagaugc

SEQ ID NO: 1786785 - RNA, 19 nt, Artificial Sequence
  Description of Artificial Sequence: Synthetic oligonucleotide
  Sense strand starting at position 1009 of SEQ ID NO: 1562982
aucuguugcgucugagaga

SEQ ID NO: 1786786 - RNA, 19 nt, Artificial Sequence
  Description of Artificial Sequence: Synthetic oligonucleotide
  Antisense strand to SEQ ID NO: 1786785
ucucucagacgcaacagau

SEQ ID NO: 1786787 - RNA, 19 nt, Artificial Sequence
  Description of Artificial Sequence: Synthetic oligonucleotide
  Sense strand starting at position 1066 of SEQ ID NO: 1562982
ggcaaaggcuggguuugaa

SEQ ID NO: 1786788 - RNA, 19 nt, Artificial Sequence
  Description of Artificial Sequence: Synthetic oligonucleotide
  Antisense strand to SEQ ID NO: 1786787
uucaaacccagccuuugcc

SEQ ID NO: 1786789 - RNA, 19 nt, Artificial Sequence
  Description of Artificial Sequence: Synthetic oligonucleotide
  Sense strand starting at position 1075 of SEQ ID NO: 1562982
uggguuugaaggugaaucu

SEQ ID NO: 1786790 - RNA, 19 nt, Artificial Sequence
  Description of Artificial Sequence: Synthetic oligonucleotide
  Antisense strand to SEQ ID NO: 1786789
agauucaccuucaaaccca

SEQ ID NO: 1786791 - RNA, 19 nt, Artificial Sequence
  Description of Artificial Sequence: Synthetic oligonucleotide
  Sense strand starting at position 1082 of SEQ ID NO: 1562982
gaaggugaaucugugaauc

SEQ ID NO: 1786792 - RNA, 19 nt, Artificial Sequence
  Description of Artificial Sequence: Synthetic oligonucleotide
  Antisense strand to SEQ ID NO: 1786791
gauucacagauucaccuuc

SEQ ID NO: 1786793 - RNA, 19 nt, Artificial Sequence
  Description of Artificial Sequence: Synthetic oligonucleotide
  Sense strand starting at position 1084 of SEQ ID NO: 1562982
aggugaaucugugaaucca

SEQ ID NO: 1786794 - RNA, 19 nt, Artificial Sequence
  Description of Artificial Sequence: Synthetic oligonucleotide
  Antisense strand to SEQ ID NO: 1786793
uggauucacagauucaccu

SEQ ID NO: 1786795 - RNA, 19 nt, Artificial Sequence
  Description of Artificial Sequence: Synthetic oligonucleotide
  Sense strand starting at position 1098 of SEQ ID NO: 1562982
auccaaauuugggauuaga

SEQ ID NO: 1786796 - RNA, 19 nt, Artificial Sequence
  Description of Artificial Sequence: Synthetic oligonucleotide
  Antisense strand to SEQ ID NO: 1786795
ucuaaucccaaauuuggau

SEQ ID NO: 1786797 - RNA, 19 nt, Artificial Sequence
  Description of Artificial Sequence: Synthetic oligonucleotide
  Sense strand starting at position 1746 of SEQ ID NO: 1562982
cucgguguuccagucugua

SEQ ID NO: 1786798 - RNA, 19 nt, Artificial Sequence
  Description of Artificial Sequence: Synthetic oligonucleotide
  Antisense strand to SEQ ID NO: 1786797
uacagacuggaacaccgag

SEQ ID NO: 1786799 - RNA, 19 nt, Artificial Sequence
  Description of Artificial Sequence: Synthetic oligonucleotide
  Sense strand starting at position 2834 of SEQ ID NO: 1562982
accugucagugcucacuga

SEQ ID NO: 1786800 - RNA, 19 nt, Artificial Sequence
  Description of Artificial Sequence: Synthetic oligonucleotide
  Antisense strand to SEQ ID NO: 1786799
ucagugagcacugacaggu

SEQ ID NO: 1786801 - RNA, 19 nt, Artificial Sequence
  Description of Artificial Sequence: Synthetic oligonucleotide
  Sense strand starting at position 2838 of SEQ ID NO: 1562982
gucagugcucacugacuga

SEQ ID NO: 1786802 - RNA, 19 nt, Artificial Sequence
  Description of Artificial Sequence: Synthetic oligonucleotide
  Antisense strand to SEQ ID NO: 1786801
ucagucagugagcacugac

SEQ ID NO: 1786803 - RNA, 19 nt, Artificial Sequence
  Description of Artificial Sequence: Synthetic oligonucleotide
  Sense strand starting at position 2845 of SEQ ID NO: 1562982
cucacugacugauaggaca

SEQ ID NO: 1786804 - RNA, 19 nt, Artificial Sequence
  Description of Artificial Sequence: Synthetic oligonucleotide
  Antisense strand to SEQ ID NO: 1786803
uguccuaucagucagugag

SEQ ID NO: 1786805 - RNA, 19 nt, Artificial Sequence
  Description of Artificial Sequence: Synthetic oligonucleotide
  Sense strand starting at position 2891 of SEQ ID NO: 1562982
ucaagaugguuggaaggau

SEQ ID NO: 1786806 - RNA, 19 nt, Artificial Sequence
  Description of Artificial Sequence: Synthetic oligonucleotide
  Antisense strand to SEQ ID NO: 1786805
auccuuccaaccaucuuga

SEQ ID NO: 1786807 - RNA, 19 nt, Artificial Sequence
  Description of Artificial Sequence: Synthetic oligonucleotide
  Sense strand starting at position 2942 of SEQ ID NO: 1562982
ggcguugccugcucaguaa

SEQ ID NO: 1786808 - RNA, 19 nt, Artificial Sequence
  Description of Artificial Sequence: Synthetic oligonucleotide
  Antisense strand to SEQ ID NO: 1786807
uuacugagcaggcaacgcc

SEQ ID NO: 1786809 - RNA, 19 nt, Artificial Sequence
  Description of Artificial Sequence: Synthetic oligonucleotide
  Sense strand starting at position 2963 of SEQ ID NO: 1562982
gcuggcugguaggaauaua

SEQ ID NO: 1786810 - RNA, 19 nt, Artificial Sequence
  Description of Artificial Sequence: Synthetic oligonucleotide
  Antisense strand to SEQ ID NO: 1786809
uauauuccuaccagccagc

SEQ ID NO: 1786811 - RNA, 19 nt, Artificial Sequence
  Description of Artificial Sequence: Synthetic oligonucleotide
  Sense strand starting at position 2984 of SEQ ID NO: 1562982
ucagaauuguguuauuacu

SEQ ID NO: 1786812 - RNA, 19 nt, Artificial Sequence
  Description of Artificial Sequence: Synthetic oligonucleotide
  Antisense strand to SEQ ID NO: 1786811
aguaauaacacaauucuga

SEQ ID NO: 1786813 - RNA, 19 nt, Artificial Sequence
  Description of Artificial Sequence: Synthetic oligonucleotide
  Sense strand starting at position 3537 of SEQ ID NO: 1562982
guuggcugggugugaauuu

SEQ ID NO: 1786814 - RNA, 19 nt, Artificial Sequence
  Description of Artificial Sequence: Synthetic oligonucleotide
  Antisense strand to SEQ ID NO: 1786813
aaauucacacccagccaac

SEQ ID NO: 1786815 - RNA, 19 nt, Artificial Sequence
  Description of Artificial Sequence: Synthetic oligonucleotide
  Sense strand starting at position 3649 of SEQ ID NO: 1562982
agcucuagucccgaaagga

SEQ ID NO: 1786816 - RNA, 19 nt, Artificial Sequence
  Description of Artificial Sequence: Synthetic oligonucleotide
  Antisense strand to SEQ ID NO: 1786815
uccuuucgggacuagagcu

SEQ ID NO: 1786817 - RNA, 19 nt, Artificial Sequence
  Description of Artificial Sequence: Synthetic oligonucleotide
  Sense strand starting at position 3708 of SEQ ID NO: 1562982
gacaacguggcuugucaua

SEQ ID NO: 1786818 - RNA, 19 nt, Artificial Sequence
  Description of Artificial Sequence: Synthetic oligonucleotide
  Antisense strand to SEQ ID NO: 1786817
uaugacaagccacguuguc

SEQ ID NO: 1786819 - RNA, 19 nt, Artificial Sequence
  Description of Artificial Sequence: Synthetic oligonucleotide
  Sense strand starting at position 3710 of SEQ ID NO: 1562982
caacguggcuugucauaac

SEQ ID NO: 1786820 - RNA, 19 nt, Artificial Sequence
  Description of Artificial Sequence: Synthetic oligonucleotide
  Antisense strand to SEQ ID NO: 1786819
guuaugacaagccacguug

SEQ ID NO: 1786821 - RNA, 19 nt, Artificial Sequence
  Description of Artificial Sequence: Synthetic oligonucleotide
  Sense strand starting at position 3730 of SEQ ID NO: 1562982
agcauagagacaugcugua

SEQ ID NO: 1786822 - RNA, 19 nt, Artificial Sequence
  Description of Artificial Sequence: Synthetic oligonucleotide
  Antisense strand to SEQ ID NO: 1786821
uacagcaugucucuaugcu

SEQ ID NO: 1786823 - RNA, 19 nt, Artificial Sequence
  Description of Artificial Sequence: Synthetic oligonucleotide
  Sense strand starting at position 3735 of SEQ ID NO: 1562982
agagacaugcuguaauugu

SEQ ID NO: 1786824 - RNA, 19 nt, Artificial Sequence
  Description of Artificial Sequence: Synthetic oligonucleotide
  Antisense strand to SEQ ID NO: 1786823
acaauuacagcaugucucu

SEQ ID NO: 1786825 - RNA, 19 nt, Artificial Sequence
  Description of Artificial Sequence: Synthetic oligonucleotide
  Sense strand starting at position 3821 of SEQ ID NO: 1562982
uuauuuauguacugagaca

SEQ ID NO: 1786826 - RNA, 19 nt, Artificial Sequence
  Description of Artificial Sequence: Synthetic oligonucleotide
  Antisense strand to SEQ ID NO: 1786825
ugucucaguacauaaauaa

SEQ ID NO: 1786827 - RNA, 19 nt, Artificial Sequence
  Description of Artificial Sequence: Synthetic oligonucleotide
  Sense strand starting at position 134 of SEQ ID NO: 1562983
cgcugugggugccuguaaa

SEQ ID NO: 1786828 - RNA, 19 nt, Artificial Sequence
  Description of Artificial Sequence: Synthetic oligonucleotide
  Antisense strand to SEQ ID NO: 1786827
uuuacaggcacccacagcg

SEQ ID NO: 1786829 - RNA, 19 nt, Artificial Sequence
  Description of Artificial Sequence: Synthetic oligonucleotide
  Sense strand starting at position 356 of SEQ ID NO: 1562983
acccuaugauggcaggaau

SEQ ID NO: 1786830 - RNA, 19 nt, Artificial Sequence
  Description of Artificial Sequence: Synthetic oligonucleotide
  Antisense strand to SEQ ID NO: 1786829
auuccugccaucauagggu

SEQ ID NO: 1786831 - RNA, 19 nt, Artificial Sequence
  Description of Artificial Sequence: Synthetic oligonucleotide
  Sense strand starting at position 417 of SEQ ID NO: 1562983
ccgugugagucuuccugga

SEQ ID NO: 1786832 - RNA, 19 nt, Artificial Sequence
  Description of Artificial Sequence: Synthetic oligonucleotide
  Antisense strand to SEQ ID NO: 1786831
uccaggaagacucacacgg

SEQ ID NO: 1786833 - RNA, 19 nt, Artificial Sequence
  Description of Artificial Sequence: Synthetic oligonucleotide
  Sense strand starting at position 600 of SEQ ID NO: 1562983
agcccuguccaauauggua

SEQ ID NO: 1786834 - RNA, 19 nt, Artificial Sequence
  Description of Artificial Sequence: Synthetic oligonucleotide
  Antisense strand to SEQ ID NO: 1786833
uaccauauuggacagggcu

SEQ ID NO: 1786835 - RNA, 19 nt, Artificial Sequence
  Description of Artificial Sequence: Synthetic oligonucleotide
  Sense strand starting at position 652 of SEQ ID NO: 1562983
ugaggucugcugugagugu

SEQ ID NO: 1786836 - RNA, 19 nt, Artificial Sequence
  Description of Artificial Sequence: Synthetic oligonucleotide
  Antisense strand to SEQ ID NO: 1786835
acacucacagcagaccuca

SEQ ID NO: 1786837 - RNA, 19 nt, Artificial Sequence
  Description of Artificial Sequence: Synthetic oligonucleotide
  Sense strand starting at position 654 of SEQ ID NO: 1562983
aggucugcugugaguguaa

SEQ ID NO: 1786838 - RNA, 19 nt, Artificial Sequence
  Description of Artificial Sequence: Synthetic oligonucleotide
  Antisense strand to SEQ ID NO: 1786837
uuacacucacagcagaccu

SEQ ID NO: 1786839 - RNA, 19 nt, Artificial Sequence
  Description of Artificial Sequence: Synthetic oligonucleotide
  Sense strand starting at position 941 of SEQ ID NO: 1562983
uuuguaaagauguguucuu

SEQ ID NO: 1786840 - RNA, 19 nt, Artificial Sequence
  Description of Artificial Sequence: Synthetic oligonucleotide
  Antisense strand to SEQ ID NO: 1786839
aagaacacaucuuuacaaa

SEQ ID NO: 1786841 - RNA, 19 nt, Artificial Sequence
  Description of Artificial Sequence: Synthetic oligonucleotide
  Sense strand starting at position 946 of SEQ ID NO: 1562983
aaagauguguucuugcuau

SEQ ID NO: 1786842 - RNA, 19 nt, Artificial Sequence
  Description of Artificial Sequence: Synthetic oligonucleotide
  Antisense strand to SEQ ID NO: 1786841
auagcaagaacacaucuuu

SEQ ID NO: 1786843 - RNA, 19 nt, Artificial Sequence
  Description of Artificial Sequence: Synthetic oligonucleotide
  Sense strand starting at position 1775 of SEQ ID NO: 1562983
ugguauuucuauugguuag

SEQ ID NO: 1786844 - RNA, 19 nt, Artificial Sequence
  Description of Artificial Sequence: Synthetic oligonucleotide
  Antisense strand to SEQ ID NO: 1786843
cuaaccaauagaaauacca

SEQ ID NO: 1786845 - RNA, 19 nt, Artificial Sequence
  Description of Artificial Sequence: Synthetic oligonucleotide
  Sense strand starting at position 1776 of SEQ ID NO: 1562983
gguauuucuauugguuagu

SEQ ID NO: 1786846 - RNA, 19 nt, Artificial Sequence
  Description of Artificial Sequence: Synthetic oligonucleotide
  Antisense strand to SEQ ID NO: 1786845
acuaaccaauagaaauacc

SEQ ID NO: 1786847 - RNA, 19 nt, Artificial Sequence
  Description of Artificial Sequence: Synthetic oligonucleotide
  Sense strand starting at position 1953 of SEQ ID NO: 1562983
cagcgacuucuccugcgau

SEQ ID NO: 1786848 - RNA, 19 nt, Artificial Sequence
  Description of Artificial Sequence: Synthetic oligonucleotide
  Antisense strand to SEQ ID NO: 1786847
aucgcaggagaagucgcug

SEQ ID NO: 1786849 - RNA, 19 nt, Artificial Sequence
  Description of Artificial Sequence: Synthetic oligonucleotide
  Sense strand starting at position 1995 of SEQ ID NO: 1562983
acucaugcugcccaugaau

SEQ ID NO: 1786850 - RNA, 19 nt, Artificial Sequence
  Description of Artificial Sequence: Synthetic oligonucleotide
  Antisense strand to SEQ ID NO: 1786849
auucaugggcagcaugagu

SEQ ID NO: 1786851 - RNA, 19 nt, Artificial Sequence
  Description of Artificial Sequence: Synthetic oligonucleotide
  Sense strand starting at position 2213 of SEQ ID NO: 1562983
aaauuaggacagcgauguu

SEQ ID NO: 1786852 - RNA, 19 nt, Artificial Sequence
  Description of Artificial Sequence: Synthetic oligonucleotide
  Antisense strand to SEQ ID NO: 1786851
aacaucgcuguccuaauuu

SEQ ID NO: 1786853 - RNA, 19 nt, Artificial Sequence
  Description of Artificial Sequence: Synthetic oligonucleotide
  Sense strand starting at position 2234 of SEQ ID NO: 1562983
cucggagcguugaugacau

SEQ ID NO: 1786854 - RNA, 19 nt, Artificial Sequence
  Description of Artificial Sequence: Synthetic oligonucleotide
  Antisense strand to SEQ ID NO: 1786853
augucaucaacgcuccgag

SEQ ID NO: 1786855 - RNA, 19 nt, Artificial Sequence
  Description of Artificial Sequence: Synthetic oligonucleotide
  Sense strand starting at position 2394 of SEQ ID NO: 1562983
cccggaagucacugucauc

SEQ ID NO: 1786856 - RNA, 19 nt, Artificial Sequence
  Description of Artificial Sequence: Synthetic oligonucleotide
  Antisense strand to SEQ ID NO: 1786855
gaugacagugacuuccggg

SEQ ID NO: 1786857 - RNA, 19 nt, Artificial Sequence
  Description of Artificial Sequence: Synthetic oligonucleotide
  Sense strand starting at position 2397 of SEQ ID NO: 1562983
ggaagucacugucaucaug

SEQ ID NO: 1786858 - RNA, 19 nt, Artificial Sequence
  Description of Artificial Sequence: Synthetic oligonucleotide
  Antisense strand to SEQ ID NO: 1786857
caugaugacagugacuucc

SEQ ID NO: 1786859 - RNA, 19 nt, Artificial Sequence
  Description of Artificial Sequence: Synthetic oligonucleotide
  Sense strand starting at position 2448 of SEQ ID NO: 1562983
cugacauguccagagcaac

SEQ ID NO: 1786860 - RNA, 19 nt, Artificial Sequence
  Description of Artificial Sequence: Synthetic oligonucleotide
  Antisense strand to SEQ ID NO: 1786859
guugcucuggacaugucag

SEQ ID NO: 1786861 - RNA, 19 nt, Artificial Sequence
  Description of Artificial Sequence: Synthetic oligonucleotide
  Sense strand starting at position 2459 of SEQ ID NO: 1562983
agagcaacugcccaugauu

SEQ ID NO: 1786862 - RNA, 19 nt, Artificial Sequence
  Description of Artificial Sequence: Synthetic oligonucleotide
  Antisense strand to SEQ ID NO: 1786861
aaucaugggcaguugcucu

SEQ ID NO: 1786863 - RNA, 19 nt, Artificial Sequence
  Description of Artificial Sequence: Synthetic oligonucleotide
  Sense strand starting at position 2703 of SEQ ID NO: 1562983
ccuggaacacaguaguuau

SEQ ID NO: 1786864 - RNA, 19 nt, Artificial Sequence
  Description of Artificial Sequence: Synthetic oligonucleotide
  Antisense strand to SEQ ID NO: 1786863
auaacuacuguguuccagg

SEQ ID NO: 1786865 - RNA, 19 nt, Artificial Sequence
  Description of Artificial Sequence: Synthetic oligonucleotide
  Sense strand starting at position 2710 of SEQ ID NO: 1562983
cacaguaguuauuuguagu

SEQ ID NO: 1786866 - RNA, 19 nt, Artificial Sequence
  Description of Artificial Sequence: Synthetic oligonucleotide
  Antisense strand to SEQ ID NO: 1786865
acuacaaauaacuacugug

SEQ ID NO: 1786867 - RNA, 19 nt, Artificial Sequence
  Description of Artificial Sequence: Synthetic oligonucleotide
  Sense strand starting at position 2711 of SEQ ID NO: 1562983
acaguaguuauuuguagua

SEQ ID NO: 1786868 - RNA, 19 nt, Artificial Sequence
  Description of Artificial Sequence: Synthetic oligonucleotide
  Antisense strand to SEQ ID NO: 1786867
uacuacaaauaacuacugu

SEQ ID NO: 1786869 - RNA, 19 nt, Artificial Sequence
  Description of Artificial Sequence: Synthetic oligonucleotide
  Sense strand starting at position 2713 of SEQ ID NO: 1562983
aguaguuauuuguaguagu

SEQ ID NO: 1786870 - RNA, 19 nt, Artificial Sequence
  Description of Artificial Sequence: Synthetic oligonucleotide
  Antisense strand to SEQ ID NO: 1786869
acuacuacaaauaacuacu

SEQ ID NO: 1786871 - RNA, 19 nt, Artificial Sequence
  Description of Artificial Sequence: Synthetic oligonucleotide
  Sense strand starting at position 2750 of SEQ ID NO: 1562983
aggaguucagggcaaguuu

SEQ ID NO: 1786872 - RNA, 19 nt, Artificial Sequence
  Description of Artificial Sequence: Synthetic oligonucleotide
  Antisense strand to SEQ ID NO: 1786871
aaacuugcccugaacuccu

SEQ ID NO: 1786873 - RNA, 19 nt, Artificial Sequence
  Description of Artificial Sequence: Synthetic oligonucleotide
  Sense strand starting at position 2758 of SEQ ID NO: 1562983
agggcaaguuuauuaggga

SEQ ID NO: 1786874 - RNA, 19 nt, Artificial Sequence
  Description of Artificial Sequence: Synthetic oligonucleotide
  Antisense strand to SEQ ID NO: 1786873
ucccuaauaaacuugcccu

SEQ ID NO: 1786875 - RNA, 19 nt, Artificial Sequence
  Description of Artificial Sequence: Synthetic oligonucleotide
  Sense strand starting at position 2834 of SEQ ID NO: 1562983
gcuguauaggccugguuau

SEQ ID NO: 1786876 - RNA, 19 nt, Artificial Sequence
  Description of Artificial Sequence: Synthetic oligonucleotide
  Antisense strand to SEQ ID NO: 1786875
auaaccaggccuauacagc

SEQ ID NO: 1786877 - RNA, 19 nt, Artificial Sequence
  Description of Artificial Sequence: Synthetic oligonucleotide
  Sense strand starting at position 2844 of SEQ ID NO: 1562983
ccugguuaucaaggaagua

SEQ ID NO: 1786878 - RNA, 19 nt, Artificial Sequence
  Description of Artificial Sequence: Synthetic oligonucleotide
  Antisense strand to SEQ ID NO: 1786877
uacuuccuugauaaccagg

SEQ ID NO: 1786879 - RNA, 19 nt, Artificial Sequence
  Description of Artificial Sequence: Synthetic oligonucleotide
  Sense strand starting at position 2919 of SEQ ID NO: 1562983
agcguuuccuugccugagu

SEQ ID NO: 1786880 - RNA, 19 nt, Artificial Sequence
  Description of Artificial Sequence: Synthetic oligonucleotide
  Antisense strand to SEQ ID NO: 1786879
acucaggcaaggaaacgcu

SEQ ID NO: 1786881 - RNA, 19 nt, Artificial Sequence
  Description of Artificial Sequence: Synthetic oligonucleotide
  Sense strand starting at position 3059 of SEQ ID NO: 1562983
gagcguacuuaggcagaga

SEQ ID NO: 1786882 - RNA, 19 nt, Artificial Sequence
  Description of Artificial Sequence: Synthetic oligonucleotide
  Antisense strand to SEQ ID NO: 1786881
ucucugccuaaguacgcuc

SEQ ID NO: 1786883 - RNA, 19 nt, Artificial Sequence
  Description of Artificial Sequence: Synthetic oligonucleotide
  Sense strand starting at position 3060 of SEQ ID NO: 1562983
agcguacuuaggcagagaa

SEQ ID NO: 1786884 - RNA, 19 nt, Artificial Sequence
  Description of Artificial Sequence: Synthetic oligonucleotide
  Antisense strand to SEQ ID NO: 1786883
uucucugccuaaguacgcu

SEQ ID NO: 1786885 - RNA, 19 nt, Artificial Sequence
  Description of Artificial Sequence: Synthetic oligonucleotide
  Sense strand starting at position 3215 of SEQ ID NO: 1562983
cccagacuguucuucccua

SEQ ID NO: 1786886 - RNA, 19 nt, Artificial Sequence
  Description of Artificial Sequence: Synthetic oligonucleotide
  Antisense strand to SEQ ID NO: 1786885
uagggaagaacagucuggg

SEQ ID NO: 1786887 - RNA, 19 nt, Artificial Sequence
  Description of Artificial Sequence: Synthetic oligonucleotide
  Sense strand starting at position 3220 of SEQ ID NO: 1562983
acuguucuucccuaccuga

SEQ ID NO: 1786888 - RNA, 19 nt, Artificial Sequence
  Description of Artificial Sequence: Synthetic oligonucleotide
  Antisense strand to SEQ ID NO: 1786887
ucagguagggaagaacagu

SEQ ID NO: 1786889 - RNA, 19 nt, Artificial Sequence
  Description of Artificial Sequence: Synthetic oligonucleotide
  Sense strand starting at position 3272 of SEQ ID NO: 1562983
gccauacagccauguagua

SEQ ID NO: 1786890 - RNA, 19 nt, Artificial Sequence
  Description of Artificial Sequence: Synthetic oligonucleotide
  Antisense strand to SEQ ID NO: 1786889
uacuacauggcuguauggc

SEQ ID NO: 1786891 - RNA, 19 nt, Artificial Sequence
  Description of Artificial Sequence: Synthetic oligonucleotide
  Sense strand starting at position 3290 of SEQ ID NO: 1562983
aagugacaaucaggacuau

SEQ ID NO: 1786892 - RNA, 19 nt, Artificial Sequence
  Description of Artificial Sequence: Synthetic oligonucleotide
  Antisense strand to SEQ ID NO: 1786891
auaguccugauugucacuu

SEQ ID NO: 1786893 - RNA, 19 nt, Artificial Sequence
  Description of Artificial Sequence: Synthetic oligonucleotide
  Sense strand starting at position 3328 of SEQ ID NO: 1562983
aggacauuguaucccacau

SEQ ID NO: 1786894 - RNA, 19 nt, Artificial Sequence
  Description of Artificial Sequence: Synthetic oligonucleotide
  Antisense strand to SEQ ID NO: 1786893
augugggauacaauguccu

SEQ ID NO: 1786895 - RNA, 19 nt, Artificial Sequence
  Description of Artificial Sequence: Synthetic oligonucleotide
  Sense strand starting at position 3382 of SEQ ID NO: 1562983
cuuacuaagucccaggaga

SEQ ID NO: 1786896 - RNA, 19 nt, Artificial Sequence
  Description of Artificial Sequence: Synthetic oligonucleotide
  Antisense strand to SEQ ID NO: 1786895
ucuccugggacuuaguaag

SEQ ID NO: 1786897 - RNA, 19 nt, Artificial Sequence
  Description of Artificial Sequence: Synthetic oligonucleotide
  Sense strand starting at position 3384 of SEQ ID NO: 1562983
uacuaagucccaggagagu

SEQ ID NO: 1786898 - RNA, 19 nt, Artificial Sequence
  Description of Artificial Sequence: Synthetic oligonucleotide
  Antisense strand to SEQ ID NO: 1786897
acucuccugggacuuagua

SEQ ID NO: 1786899 - RNA, 19 nt, Artificial Sequence
  Description of Artificial Sequence: Synthetic oligonucleotide
  Sense strand starting at position 3485 of SEQ ID NO: 1562983
gcuggagcuugagccauaa

SEQ ID NO: 1786900 - RNA, 19 nt, Artificial Sequence
  Description of Artificial Sequence: Synthetic oligonucleotide
  Antisense strand to SEQ ID NO: 1786899
uuauggcucaagcuccagc

SEQ ID NO: 1786901 - RNA, 19 nt, Artificial Sequence
  Description of Artificial Sequence: Synthetic oligonucleotide
  Sense strand starting at position 3910 of SEQ ID NO: 1562983
gcuggcuucugaguaaguc

SEQ ID NO: 1786902 - RNA, 19 nt, Artificial Sequence
  Description of Artificial Sequence: Synthetic oligonucleotide
  Antisense strand to SEQ ID NO: 1786901
gacuuacucagaagccagc

SEQ ID NO: 1786903 - RNA, 19 nt, Artificial Sequence
  Description of Artificial Sequence: Synthetic oligonucleotide
  Sense strand starting at position 3958 of SEQ ID NO: 1562983
ccuuguuacccucaguuaa

SEQ ID NO: 1786904 - RNA, 19 nt, Artificial Sequence
  Description of Artificial Sequence: Synthetic oligonucleotide
  Antisense strand to SEQ ID NO: 1786903
uuaacugaggguaacaagg

SEQ ID NO: 1786905 - RNA, 19 nt, Artificial Sequence
  Description of Artificial Sequence: Synthetic oligonucleotide
  Sense strand starting at position 3982 of SEQ ID NO: 1562983
guagaugccuucgccuaga

SEQ ID NO: 1786906 - RNA, 19 nt, Artificial Sequence
  Description of Artificial Sequence: Synthetic oligonucleotide
  Antisense strand to SEQ ID NO: 1786905
ucuaggcgaaggcaucuac

SEQ ID NO: 1786907 - RNA, 19 nt, Artificial Sequence
  Description of Artificial Sequence: Synthetic oligonucleotide
  Sense strand starting at position 26 of SEQ ID NO: 1562984
ucugaaguuacguggagau

SEQ ID NO: 1786908 - RNA, 19 nt, Artificial Sequence
  Description of Artificial Sequence: Synthetic oligonucleotide
  Antisense strand to SEQ ID NO: 1786907
aucuccacguaacuucaga

SEQ ID NO: 1786909 - RNA, 19 nt, Artificial Sequence
  Description of Artificial Sequence: Synthetic oligonucleotide
  Sense strand starting at position 99 of SEQ ID NO: 1562984
ggaauguccugcgugacga

SEQ ID NO: 1786910 - RNA, 19 nt, Artificial Sequence
  Description of Artificial Sequence: Synthetic oligonucleotide
  Antisense strand to SEQ ID NO: 1786909
ucgucacgcaggacauucc

SEQ ID NO: 1786911 - RNA, 19 nt, Artificial Sequence
  Description of Artificial Sequence: Synthetic oligonucleotide
  Sense strand starting at position 100 of SEQ ID NO: 1562984
gaauguccugcgugacgaa

SEQ ID NO: 1786912 - RNA, 19 nt, Artificial Sequence
  Description of Artificial Sequence: Synthetic oligonucleotide
  Antisense strand to SEQ ID NO: 1786911
uucgucacgcaggacauuc

SEQ ID NO: 1786913 - RNA, 19 nt, Artificial Sequence
  Description of Artificial Sequence: Synthetic oligonucleotide
  Sense strand starting at position 101 of SEQ ID NO: 1562984
aauguccugcgugacgaaa

SEQ ID NO: 1786914 - RNA, 19 nt, Artificial Sequence
  Description of Artificial Sequence: Synthetic oligonucleotide
  Antisense strand to SEQ ID NO: 1786913
uuucgucacgcaggacauu

SEQ ID NO: 1786915 - RNA, 19 nt, Artificial Sequence
  Description of Artificial Sequence: Synthetic oligonucleotide
  Sense strand starting at position 470 of SEQ ID NO: 1562984
acuuccuuaucccugaguu

SEQ ID NO: 1786916 - RNA, 19 nt, Artificial Sequence
  Description of Artificial Sequence: Synthetic oligonucleotide
  Antisense strand to SEQ ID NO: 1786915
aacucagggauaaggaagu

SEQ ID NO: 1786917 - RNA, 19 nt, Artificial Sequence
  Description of Artificial Sequence: Synthetic oligonucleotide
  Sense strand starting at position 471 of SEQ ID NO: 1562984
cuuccuuaucccugaguug

SEQ ID NO: 1786918 - RNA, 19 nt, Artificial Sequence
  Description of Artificial Sequence: Synthetic oligonucleotide
  Antisense strand to SEQ ID NO: 1786917
caacucagggauaaggaag

SEQ ID NO: 1786919 - RNA, 19 nt, Artificial Sequence
  Description of Artificial Sequence: Synthetic oligonucleotide
  Sense strand starting at position 730 of SEQ ID NO: 1562984
gcaguagagaccugggcuu

SEQ ID NO: 1786920 - RNA, 19 nt, Artificial Sequence
  Description of Artificial Sequence: Synthetic oligonucleotide
  Antisense strand to SEQ ID NO: 1786919
aagcccaggucucuacugc

SEQ ID NO: 1786921 - RNA, 19 nt, Artificial Sequence
  Description of Artificial Sequence: Synthetic oligonucleotide
  Sense strand starting at position 749 of SEQ ID NO: 1562984
ggccuuugaucccugaaau

SEQ ID NO: 1786922 - RNA, 19 nt, Artificial Sequence
  Description of Artificial Sequence: Synthetic oligonucleotide
  Antisense strand to SEQ ID NO: 1786921
auuucagggaucaaaggcc

SEQ ID NO: 1786923 - RNA, 19 nt, Artificial Sequence
  Description of Artificial Sequence: Synthetic oligonucleotide
  Sense strand starting at position 750 of SEQ ID NO: 1562984
gccuuugaucccugaaauc

SEQ ID NO: 1786924 - RNA, 19 nt, Artificial Sequence
  Description of Artificial Sequence: Synthetic oligonucleotide
  Antisense strand to SEQ ID NO: 1786923
gauuucagggaucaaaggc

SEQ ID NO: 1786925 - RNA, 19 nt, Artificial Sequence
  Description of Artificial Sequence: Synthetic oligonucleotide
  Sense strand starting at position 760 of SEQ ID NO: 1562984
ccugaaaucucacagugga

SEQ ID NO: 1786926 - RNA, 19 nt, Artificial Sequence
  Description of Artificial Sequence: Synthetic oligonucleotide
  Antisense strand to SEQ ID NO: 1786925
uccacugugagauuucagg

SEQ ID NO: 1786927 - RNA, 19 nt, Artificial Sequence
  Description of Artificial Sequence: Synthetic oligonucleotide
  Sense strand starting at position 907 of SEQ ID NO: 1562984
ugugguugcuucccugaca

SEQ ID NO: 1786928 - RNA, 19 nt, Artificial Sequence
  Description of Artificial Sequence: Synthetic oligonucleotide
  Antisense strand to SEQ ID NO: 1786927
ugucagggaagcaaccaca

SEQ ID NO: 1786929 - RNA, 19 nt, Artificial Sequence
  Description of Artificial Sequence: Synthetic oligonucleotide
  Sense strand starting at position 908 of SEQ ID NO: 1562984
gugguugcuucccugacau

SEQ ID NO: 1786930 - RNA, 19 nt, Artificial Sequence
  Description of Artificial Sequence: Synthetic oligonucleotide
  Antisense strand to SEQ ID NO: 1786929
augucagggaagcaaccac

SEQ ID NO: 1786931 - RNA, 19 nt, Artificial Sequence
  Description of Artificial Sequence: Synthetic oligonucleotide
  Sense strand starting at position 948 of SEQ ID NO: 1562984
ccugccuucccugaggaga

SEQ ID NO: 1786932 - RNA, 19 nt, Artificial Sequence
  Description of Artificial Sequence: Synthetic oligonucleotide
  Antisense strand to SEQ ID NO: 1786931
ucuccucagggaaggcagg

SEQ ID NO: 1786933 - RNA, 19 nt, Artificial Sequence
  Description of Artificial Sequence: Synthetic oligonucleotide
  Sense strand starting at position 1178 of SEQ ID NO: 1562984
gucagacagagcugacaaa

SEQ ID NO: 1786934 - RNA, 19 nt, Artificial Sequence
  Description of Artificial Sequence: Synthetic oligonucleotide
  Antisense strand to SEQ ID NO: 1786933
uuugucagcucugucugac

SEQ ID NO: 1786935 - RNA, 19 nt, Artificial Sequence
  Description of Artificial Sequence: Synthetic oligonucleotide
  Sense strand starting at position 1207 of SEQ ID NO: 1562984
gcgggcugugauggucaaa

SEQ ID NO: 1786936 - RNA, 19 nt, Artificial Sequence
  Description of Artificial Sequence: Synthetic oligonucleotide
  Antisense strand to SEQ ID NO: 1786935
uuugaccaucacagcccgc

SEQ ID NO: 1786937 - RNA, 19 nt, Artificial Sequence
  Description of Artificial Sequence: Synthetic oligonucleotide
  Sense strand starting at position 1210 of SEQ ID NO: 1562984
ggcugugauggucaaaguc

SEQ ID NO: 1786938 - RNA, 19 nt, Artificial Sequence
  Description of Artificial Sequence: Synthetic oligonucleotide
  Antisense strand to SEQ ID NO: 1786937
gacuuugaccaucacagcc

SEQ ID NO: 1786939 - RNA, 19 nt, Artificial Sequence
  Description of Artificial Sequence: Synthetic oligonucleotide
  Sense strand starting at position 1281 of SEQ ID NO: 1562984
gaggcugcugcagaguaaa

SEQ ID NO: 1786940 - RNA, 19 nt, Artificial Sequence
  Description of Artificial Sequence: Synthetic oligonucleotide
  Antisense strand to SEQ ID NO: 1786939
uuuacucugcagcagccuc

SEQ ID NO: 1786941 - RNA, 19 nt, Artificial Sequence
  Description of Artificial Sequence: Synthetic oligonucleotide
  Sense strand starting at position 1293 of SEQ ID NO: 1562984
gaguaaauguuggcaacca

SEQ ID NO: 1786942 - RNA, 19 nt, Artificial Sequence
  Description of Artificial Sequence: Synthetic oligonucleotide
  Antisense strand to SEQ ID NO: 1786941
ugguugccaacauuuacuc

SEQ ID NO: 1786943 - RNA, 19 nt, Artificial Sequence
  Description of Artificial Sequence: Synthetic oligonucleotide
  Sense strand starting at position 1508 of SEQ ID NO: 1562984
ggagucauaggccacgaga

SEQ ID NO: 1786944 - RNA, 19 nt, Artificial Sequence
  Description of Artificial Sequence: Synthetic oligonucleotide
  Antisense strand to SEQ ID NO: 1786943
ucucguggccuaugacucc

SEQ ID NO: 1786945 - RNA, 19 nt, Artificial Sequence
  Description of Artificial Sequence: Synthetic oligonucleotide
  Sense strand starting at position 1824 of SEQ ID NO: 1562984
gcggguuaggccgcucaga

SEQ ID NO: 1786946 - RNA, 19 nt, Artificial Sequence
  Description of Artificial Sequence: Synthetic oligonucleotide
  Antisense strand to SEQ ID NO: 1786945
ucugagcggccuaacccgc

SEQ ID NO: 1786947 - RNA, 19 nt, Artificial Sequence
  Description of Artificial Sequence: Synthetic oligonucleotide
  Sense strand starting at position 2157 of SEQ ID NO: 1562984
gcguuugggccgucacuuu

SEQ ID NO: 1786948 - RNA, 19 nt, Artificial Sequence
  Description of Artificial Sequence: Synthetic oligonucleotide
  Antisense strand to SEQ ID NO: 1786947
aaagugacggcccaaacgc

SEQ ID NO: 1786949 - RNA, 19 nt, Artificial Sequence
  Description of Artificial Sequence: Synthetic oligonucleotide
  Sense strand starting at position 2297 of SEQ ID NO: 1562984
uggaguuucugagccgaac

SEQ ID NO: 1786950 - RNA, 19 nt, Artificial Sequence
  Description of Artificial Sequence: Synthetic oligonucleotide
  Antisense strand to SEQ ID NO: 1786949
guucggcucagaaacucca

SEQ ID NO: 1786951 - RNA, 19 nt, Artificial Sequence
  Description of Artificial Sequence: Synthetic oligonucleotide
  Sense strand starting at position 2321 of SEQ ID NO: 1562984
acuuuaagauagggaaacu

SEQ ID NO: 1786952 - RNA, 19 nt, Artificial Sequence
  Description of Artificial Sequence: Synthetic oligonucleotide
  Antisense strand to SEQ ID NO: 1786951
aguuucccuaucuuaaagu

SEQ ID NO: 1786953 - RNA, 19 nt, Artificial Sequence
  Description of Artificial Sequence: Synthetic oligonucleotide
  Sense strand starting at position 2392 of SEQ ID NO: 1562984
gaaacuggcuuucugagga

SEQ ID NO: 1786954 - RNA, 19 nt, Artificial Sequence
  Description of Artificial Sequence: Synthetic oligonucleotide
  Antisense strand to SEQ ID NO: 1786953
uccucagaaagccaguuuc

SEQ ID NO: 1786955 - RNA, 19 nt, Artificial Sequence
  Description of Artificial Sequence: Synthetic oligonucleotide
  Sense strand starting at position 2406 of SEQ ID NO: 1562984
gaggacuccucgcuuugga

SEQ ID NO: 1786956 - RNA, 19 nt, Artificial Sequence
  Description of Artificial Sequence: Synthetic oligonucleotide
  Antisense strand to SEQ ID NO: 1786955
uccaaagcgaggaguccuc

SEQ ID NO: 1786957 - RNA, 19 nt, Artificial Sequence
  Description of Artificial Sequence: Synthetic oligonucleotide
  Sense strand starting at position 2430 of SEQ ID NO: 1562984
ggagaugaggagugagguu

SEQ ID NO: 1786958 - RNA, 19 nt, Artificial Sequence
  Description of Artificial Sequence: Synthetic oligonucleotide
  Antisense strand to SEQ ID NO: 1786957
aaccucacuccucaucucc

SEQ ID NO: 1786959 - RNA, 19 nt, Artificial Sequence
  Description of Artificial Sequence: Synthetic oligonucleotide
  Sense strand starting at position 2490 of SEQ ID NO: 1562984
cagcgugucuucuuaccau

SEQ ID NO: 1786960 - RNA, 19 nt, Artificial Sequence
  Description of Artificial Sequence: Synthetic oligonucleotide
  Antisense strand to SEQ ID NO: 1786959
augguaagaagacacgcug

SEQ ID NO: 1786961 - RNA, 19 nt, Artificial Sequence
  Description of Artificial Sequence: Synthetic oligonucleotide
  Sense strand starting at position 2607 of SEQ ID NO: 1562984
acaacagggucuuaaauca

SEQ ID NO: 1786962 - RNA, 19 nt, Artificial Sequence
  Description of Artificial Sequence: Synthetic oligonucleotide
  Antisense strand to SEQ ID NO: 1786961
ugauuuaagacccuguugu

SEQ ID NO: 1786963 - RNA, 19 nt, Artificial Sequence
  Description of Artificial Sequence: Synthetic oligonucleotide
  Sense strand starting at position 2617 of SEQ ID NO: 1562984
cuuaaaucagcuggguuaa

SEQ ID NO: 1786964 - RNA, 19 nt, Artificial Sequence
  Description of Artificial Sequence: Synthetic oligonucleotide
  Antisense strand to SEQ ID NO: 1786963
uuaacccagcugauuuaag

SEQ ID NO: 1786965 - RNA, 19 nt, Artificial Sequence
  Description of Artificial Sequence: Synthetic oligonucleotide
  Sense strand starting at position 2618 of SEQ ID NO: 1562984
uuaaaucagcuggguuaaa

SEQ ID NO: 1786966 - RNA, 19 nt, Artificial Sequence
  Description of Artificial Sequence: Synthetic oligonucleotide
  Antisense strand to SEQ ID NO: 1786965
uuuaacccagcugauuuaa

SEQ ID NO: 1786967 - RNA, 19 nt, Artificial Sequence
  Description of Artificial Sequence: Synthetic oligonucleotide
  Sense strand starting at position 2619 of SEQ ID NO: 1562984
uaaaucagcuggguuaaau

SEQ ID NO: 1786968 - RNA, 19 nt, Artificial Sequence
  Description of Artificial Sequence: Synthetic oligonucleotide
  Antisense strand to SEQ ID NO: 1786967
auuuaacccagcugauuua

SEQ ID NO: 1786969 - RNA, 19 nt, Artificial Sequence
  Description of Artificial Sequence: Synthetic oligonucleotide
  Sense strand starting at position 2629 of SEQ ID NO: 1562984
ggguuaaauuuauggaguc

SEQ ID NO: 1786970 - RNA, 19 nt, Artificial Sequence
  Description of Artificial Sequence: Synthetic oligonucleotide
  Antisense strand to SEQ ID NO: 1786969
gacuccauaaauuuaaccc

SEQ ID NO: 1786971 - RNA, 19 nt, Artificial Sequence
  Description of Artificial Sequence: Synthetic oligonucleotide
  Sense strand starting at position 2630 of SEQ ID NO: 1562984
gguuaaauuuauggaguca

SEQ ID NO: 1786972 - RNA, 19 nt, Artificial Sequence
  Description of Artificial Sequence: Synthetic oligonucleotide
  Antisense strand to SEQ ID NO: 1786971
ugacuccauaaauuuaacc

SEQ ID NO: 1786973 - RNA, 19 nt, Artificial Sequence
  Description of Artificial Sequence: Synthetic oligonucleotide
  Sense strand starting at position 2717 of SEQ ID NO: 1562984
ugccgcguuaccucuguua

SEQ ID NO: 1786974 - RNA, 19 nt, Artificial Sequence
  Description of Artificial Sequence: Synthetic oligonucleotide
  Antisense strand to SEQ ID NO: 1786973
uaacagagguaacgcggca

SEQ ID NO: 1786975 - RNA, 19 nt, Artificial Sequence
  Description of Artificial Sequence: Synthetic oligonucleotide
  Sense strand starting at position 3062 of SEQ ID NO: 1562984
auaaauauaugggagucua

SEQ ID NO: 1786976 - RNA, 19 nt, Artificial Sequence
  Description of Artificial Sequence: Synthetic oligonucleotide
  Antisense strand to SEQ ID NO: 1786975
uagacucccauauauuuau

SEQ ID NO: 1786977 - RNA, 19 nt, Artificial Sequence
  Description of Artificial Sequence: Synthetic oligonucleotide
  Sense strand starting at position 3070 of SEQ ID NO: 1562984
augggagucuacuucugaa

SEQ ID NO: 1786978 - RNA, 19 nt, Artificial Sequence
  Description of Artificial Sequence: Synthetic oligonucleotide
  Antisense strand to SEQ ID NO: 1786977
uucagaaguagacucccau

SEQ ID NO: 1786979 - RNA, 19 nt, Artificial Sequence
  Description of Artificial Sequence: Synthetic oligonucleotide
  Sense strand starting at position 3122 of SEQ ID NO: 1562984
gucuaacuacgcugucuua

SEQ ID NO: 1786980 - RNA, 19 nt, Artificial Sequence
  Description of Artificial Sequence: Synthetic oligonucleotide
  Antisense strand to SEQ ID NO: 1786979
uaagacagcguaguuagac

SEQ ID NO: 1786981 - RNA, 19 nt, Artificial Sequence
  Description of Artificial Sequence: Synthetic oligonucleotide
  Sense strand starting at position 3147 of SEQ ID NO: 1562984
auagcuuuauagucagacu

SEQ ID NO: 1786982 - RNA, 19 nt, Artificial Sequence
  Description of Artificial Sequence: Synthetic oligonucleotide
  Antisense strand to SEQ ID NO: 1786981
agucugacuauaaagcuau

SEQ ID NO: 1786983 - RNA, 19 nt, Artificial Sequence
  Description of Artificial Sequence: Synthetic oligonucleotide
  Sense strand starting at position 3165 of SEQ ID NO: 1562984
uugacaucugguugugugu

SEQ ID NO: 1786984 - RNA, 19 nt, Artificial Sequence
  Description of Artificial Sequence: Synthetic oligonucleotide
  Antisense strand to SEQ ID NO: 1786983
acacacaaccagaugucaa

SEQ ID NO: 1786985 - RNA, 19 nt, Artificial Sequence
  Description of Artificial Sequence: Synthetic oligonucleotide
  Sense strand starting at position 3179 of SEQ ID NO: 1562984
uguguugguccucuagcuu

SEQ ID NO: 1786986 - RNA, 19 nt, Artificial Sequence
  Description of Artificial Sequence: Synthetic oligonucleotide
  Antisense strand to SEQ ID NO: 1786985
aagcuagaggaccaacaca

SEQ ID NO: 1786987 - RNA, 19 nt, Artificial Sequence
  Description of Artificial Sequence: Synthetic oligonucleotide
  Sense strand starting at position 18 of SEQ ID NO: 1562985
aagggauguuuccauuuau

SEQ ID NO: 1786988 - RNA, 19 nt, Artificial Sequence
  Description of Artificial Sequence: Synthetic oligonucleotide
  Antisense strand to SEQ ID NO: 1786987
auaaauggaaacaucccuu

SEQ ID NO: 1786989 - RNA, 19 nt, Artificial Sequence
  Description of Artificial Sequence: Synthetic oligonucleotide
  Sense strand starting at position 109 of SEQ ID NO: 1562985
agacguuagccucaaucuu

SEQ ID NO: 1786990 - RNA, 19 nt, Artificial Sequence
  Description of Artificial Sequence: Synthetic oligonucleotide
  Antisense strand to SEQ ID NO: 1786989
aagauugaggcuaacgucu

SEQ ID NO: 1786991 - RNA, 19 nt, Artificial Sequence
  Description of Artificial Sequence: Synthetic oligonucleotide
  Sense strand starting at position 236 of SEQ ID NO: 1562985
gcucucaggucugaaagca

SEQ ID NO: 1786992 - RNA, 19 nt, Artificial Sequence
  Description of Artificial Sequence: Synthetic oligonucleotide
  Antisense strand to SEQ ID NO: 1786991
ugcuuucagaccugagagc

SEQ ID NO: 1786993 - RNA, 19 nt, Artificial Sequence
  Description of Artificial Sequence: Synthetic oligonucleotide
  Sense strand starting at position 245 of SEQ ID NO: 1562985
ucugaaagcagugaguuaa

SEQ ID NO: 1786994 - RNA, 19 nt, Artificial Sequence
  Description of Artificial Sequence: Synthetic oligonucleotide
  Antisense strand to SEQ ID NO: 1786993
uuaacucacugcuuucaga

SEQ ID NO: 1786995 - RNA, 19 nt, Artificial Sequence
  Description of Artificial Sequence: Synthetic oligonucleotide
  Sense strand starting at position 255 of SEQ ID NO: 1562985
gugaguuaauacucaaguc

SEQ ID NO: 1786996 - RNA, 19 nt, Artificial Sequence
  Description of Artificial Sequence: Synthetic oligonucleotide
  Antisense strand to SEQ ID NO: 1786995
gacuugaguauuaacucac

SEQ ID NO: 1786997 - RNA, 19 nt, Artificial Sequence
  Description of Artificial Sequence: Synthetic oligonucleotide
  Sense strand starting at position 287 of SEQ ID NO: 1562985
agugucuuccagcgacaga

SEQ ID NO: 1786998 - RNA, 19 nt, Artificial Sequence
  Description of Artificial Sequence: Synthetic oligonucleotide
  Antisense strand to SEQ ID NO: 1786997
ucugucgcuggaagacacu

SEQ ID NO: 1786999 - RNA, 19 nt, Artificial Sequence
  Description of Artificial Sequence: Synthetic oligonucleotide
  Sense strand starting at position 288 of SEQ ID NO: 1562985
gugucuuccagcgacagau

SEQ ID NO: 1787000 - RNA, 19 nt, Artificial Sequence
  Description of Artificial Sequence: Synthetic oligonucleotide
  Antisense strand to SEQ ID NO: 1786999
aucugucgcuggaagacac

SEQ ID NO: 1787001 - RNA, 19 nt, Artificial Sequence
  Description of Artificial Sequence: Synthetic oligonucleotide
  Sense strand starting at position 290 of SEQ ID NO: 1562985
gucuuccagcgacagauua

SEQ ID NO: 1787002 - RNA, 19 nt, Artificial Sequence
  Description of Artificial Sequence: Synthetic oligonucleotide
  Antisense strand to SEQ ID NO: 1787001
uaaucugucgcuggaagac

SEQ ID NO: 1787003 - RNA, 19 nt, Artificial Sequence
  Description of Artificial Sequence: Synthetic oligonucleotide
  Sense strand starting at position 298 of SEQ ID NO: 1562985
gcgacagauuacucucaua

SEQ ID NO: 1787004 - RNA, 19 nt, Artificial Sequence
  Description of Artificial Sequence: Synthetic oligonucleotide
  Antisense strand to SEQ ID NO: 1787003
uaugagaguaaucugucgc

SEQ ID NO: 1787005 - RNA, 19 nt, Artificial Sequence
  Description of Artificial Sequence: Synthetic oligonucleotide
  Sense strand starting at position 367 of SEQ ID NO: 1562985
aguuuaagaugaucgccaa

SEQ ID NO: 1787006 - RNA, 19 nt, Artificial Sequence
  Description of Artificial Sequence: Synthetic oligonucleotide
  Antisense strand to SEQ ID NO: 1787005
uuggcgaucaucuuaaacu

SEQ ID NO: 1787007 - RNA, 19 nt, Artificial Sequence
  Description of Artificial Sequence: Synthetic oligonucleotide
  Sense strand starting at position 368 of SEQ ID NO: 1562985
guuuaagaugaucgccaaa

SEQ ID NO: 1787008 - RNA, 19 nt, Artificial Sequence
  Description of Artificial Sequence: Synthetic oligonucleotide
  Antisense strand to SEQ ID NO: 1787007
uuuggcgaucaucuuaaac

SEQ ID NO: 1787009 - RNA, 19 nt, Artificial Sequence
  Description of Artificial Sequence: Synthetic oligonucleotide
  Sense strand starting at position 457 of SEQ ID NO: 1562985
ccacguuccaagggucaga

SEQ ID NO: 1787010 - RNA, 19 nt, Artificial Sequence
  Description of Artificial Sequence: Synthetic oligonucleotide
  Antisense strand to SEQ ID NO: 1787009
ucugacccuuggaacgugg

SEQ ID NO: 1787011 - RNA, 19 nt, Artificial Sequence
  Description of Artificial Sequence: Synthetic oligonucleotide
  Sense strand starting at position 614 of SEQ ID NO: 1562985
aggagcuugcuugggagau

SEQ ID NO: 1787012 - RNA, 19 nt, Artificial Sequence
  Description of Artificial Sequence: Synthetic oligonucleotide
  Antisense strand to SEQ ID NO: 1787011
aucucccaagcaagcuccu

SEQ ID NO: 1787013 - RNA, 19 nt, Artificial Sequence
  Description of Artificial Sequence: Synthetic oligonucleotide
  Sense strand starting at position 615 of SEQ ID NO: 1562985
ggagcuugcuugggagaug

SEQ ID NO: 1787014 - RNA, 19 nt, Artificial Sequence
  Description of Artificial Sequence: Synthetic oligonucleotide
  Antisense strand to SEQ ID NO: 1787013
caucucccaagcaagcucc

SEQ ID NO: 1787015 - RNA, 19 nt, Artificial Sequence
  Description of Artificial Sequence: Synthetic oligonucleotide
  Sense strand starting at position 715 of SEQ ID NO: 1562985
cggaugagaugcggguuua

SEQ ID NO: 1787016 - RNA, 19 nt, Artificial Sequence
  Description of Artificial Sequence: Synthetic oligonucleotide
  Antisense strand to SEQ ID NO: 1787015
uaaacccgcaucucauccg

SEQ ID NO: 1787017 - RNA, 19 nt, Artificial Sequence
  Description of Artificial Sequence: Synthetic oligonucleotide
  Sense strand starting at position 716 of SEQ ID NO: 1562985
ggaugagaugcggguuuag

SEQ ID NO: 1787018 - RNA, 19 nt, Artificial Sequence
  Description of Artificial Sequence: Synthetic oligonucleotide
  Antisense strand to SEQ ID NO: 1787017
cuaaacccgcaucucaucc

SEQ ID NO: 1787019 - RNA, 19 nt, Artificial Sequence
  Description of Artificial Sequence: Synthetic oligonucleotide
  Sense strand starting at position 754 of SEQ ID NO: 1562985
uguacacuuuccuagucau

SEQ ID NO: 1787020 - RNA, 19 nt, Artificial Sequence
  Description of Artificial Sequence: Synthetic oligonucleotide
  Antisense strand to SEQ ID NO: 1787019
augacuaggaaaguguaca

SEQ ID NO: 1787021 - RNA, 19 nt, Artificial Sequence
  Description of Artificial Sequence: Synthetic oligonucleotide
  Sense strand starting at position 783 of SEQ ID NO: 1562985
aguaaagaauauggaguaa

SEQ ID NO: 1787022 - RNA, 19 nt, Artificial Sequence
  Description of Artificial Sequence: Synthetic oligonucleotide
  Antisense strand to SEQ ID NO: 1787021
uuacuccauauucuuuacu

SEQ ID NO: 1787023 - RNA, 19 nt, Artificial Sequence
  Description of Artificial Sequence: Synthetic oligonucleotide
  Sense strand starting at position 796 of SEQ ID NO: 1562985
gaguaaguacauuguuuag

SEQ ID NO: 1787024 - RNA, 19 nt, Artificial Sequence
  Description of Artificial Sequence: Synthetic oligonucleotide
  Antisense strand to SEQ ID NO: 1787023
cuaaacaauguacuuacuc

SEQ ID NO: 1787025 - RNA, 19 nt, Artificial Sequence
  Description of Artificial Sequence: Synthetic oligonucleotide
  Sense strand starting at position 798 of SEQ ID NO: 1562985
guaaguacauuguuuagua

SEQ ID NO: 1787026 - RNA, 19 nt, Artificial Sequence
  Description of Artificial Sequence: Synthetic oligonucleotide
  Antisense strand to SEQ ID NO: 1787025
uacuaaacaauguacuuac

SEQ ID NO: 1787027 - RNA, 19 nt, Artificial Sequence
  Description of Artificial Sequence: Synthetic oligonucleotide
  Sense strand starting at position 800 of SEQ ID NO: 1562985
aaguacauuguuuaguaga

SEQ ID NO: 1787028 - RNA, 19 nt, Artificial Sequence
  Description of Artificial Sequence: Synthetic oligonucleotide
  Antisense strand to SEQ ID NO: 1787027
ucuacuaaacaauguacuu

SEQ ID NO: 1787029 - RNA, 19 nt, Artificial Sequence
  Description of Artificial Sequence: Synthetic oligonucleotide
  Sense strand starting at position 802 of SEQ ID NO: 1562985
guacauuguuuaguagaaa

SEQ ID NO: 1787030 - RNA, 19 nt, Artificial Sequence
  Description of Artificial Sequence: Synthetic oligonucleotide
  Antisense strand to SEQ ID NO: 1787029
uuucuacuaaacaauguac

SEQ ID NO: 1787031 - RNA, 19 nt, Artificial Sequence
  Description of Artificial Sequence: Synthetic oligonucleotide
  Sense strand starting at position 1161 of SEQ ID NO: 1562985
cagcgaacgucgguaaaca

SEQ ID NO: 1787032 - RNA, 19 nt, Artificial Sequence
  Description of Artificial Sequence: Synthetic oligonucleotide
  Antisense strand to SEQ ID NO: 1787031
uguuuaccgacguucgcug

SEQ ID NO: 1787033 - RNA, 19 nt, Artificial Sequence
  Description of Artificial Sequence: Synthetic oligonucleotide
  Sense strand starting at position 1162 of SEQ ID NO: 1562985
agcgaacgucgguaaacau

SEQ ID NO: 1787034 - RNA, 19 nt, Artificial Sequence
  Description of Artificial Sequence: Synthetic oligonucleotide
  Antisense strand to SEQ ID NO: 1787033
auguuuaccgacguucgcu

SEQ ID NO: 1787035 - RNA, 19 nt, Artificial Sequence
  Description of Artificial Sequence: Synthetic oligonucleotide
  Sense strand starting at position 2596 of SEQ ID NO: 1562985
gucuguguguccgaaugaa

SEQ ID NO: 1787036 - RNA, 19 nt, Artificial Sequence
  Description of Artificial Sequence: Synthetic oligonucleotide
  Antisense strand to SEQ ID NO: 1787035
uucauucggacacacagac

SEQ ID NO: 1787037 - RNA, 19 nt, Artificial Sequence
  Description of Artificial Sequence: Synthetic oligonucleotide
  Sense strand starting at position 2728 of SEQ ID NO: 1562985
gccugugguuucccuuuau

SEQ ID NO: 1787038 - RNA, 19 nt, Artificial Sequence
  Description of Artificial Sequence: Synthetic oligonucleotide
  Antisense strand to SEQ ID NO: 1787037
auaaagggaaaccacaggc

SEQ ID NO: 1787039 - RNA, 19 nt, Artificial Sequence
  Description of Artificial Sequence: Synthetic oligonucleotide
  Sense strand starting at position 3132 of SEQ ID NO: 1562985
ucuggaaucuggugggacu

SEQ ID NO: 1787040 - RNA, 19 nt, Artificial Sequence
  Description of Artificial Sequence: Synthetic oligonucleotide
  Antisense strand to SEQ ID NO: 1787039
agucccaccagauuccaga

SEQ ID NO: 1787041 - RNA, 19 nt, Artificial Sequence
  Description of Artificial Sequence: Synthetic oligonucleotide
  Sense strand starting at position 216 of SEQ ID NO: 1562986
gcgaaauuccaaggacacu

SEQ ID NO: 1787042 - RNA, 19 nt, Artificial Sequence
  Description of Artificial Sequence: Synthetic oligonucleotide
  Antisense strand to SEQ ID NO: 1787041
aguguccuuggaauuucgc

SEQ ID NO: 1787043 - RNA, 19 nt, Artificial Sequence
  Description of Artificial Sequence: Synthetic oligonucleotide
  Sense strand starting at position 282 of SEQ ID NO: 1562986
aagggugccugacaaauaa

SEQ ID NO: 1787044 - RNA, 19 nt, Artificial Sequence
  Description of Artificial Sequence: Synthetic oligonucleotide
  Antisense strand to SEQ ID NO: 1787043
uuauuugucaggcacccuu

SEQ ID NO: 1787045 - RNA, 19 nt, Artificial Sequence
  Description of Artificial Sequence: Synthetic oligonucleotide
  Sense strand starting at position 386 of SEQ ID NO: 1562986
ccaccaugucaacgucaga

SEQ ID NO: 1787046 - RNA, 19 nt, Artificial Sequence
  Description of Artificial Sequence: Synthetic oligonucleotide
  Antisense strand to SEQ ID NO: 1787045
ucugacguugacauggugg

SEQ ID NO: 1787047 - RNA, 19 nt, Artificial Sequence
  Description of Artificial Sequence: Synthetic oligonucleotide
  Sense strand starting at position 490 of SEQ ID NO: 1562986
cuugcuggguuucuaugaa

SEQ ID NO: 1787048 - RNA, 19 nt, Artificial Sequence
  Description of Artificial Sequence: Synthetic oligonucleotide
  Antisense strand to SEQ ID NO: 1787047
uucauagaaacccagcaag

SEQ ID NO: 1787049 - RNA, 19 nt, Artificial Sequence
  Description of Artificial Sequence: Synthetic oligonucleotide
  Sense strand starting at position 497 of SEQ ID NO: 1562986
gguuucuaugaagguuaua

SEQ ID NO: 1787050 - RNA, 19 nt, Artificial Sequence
  Description of Artificial Sequence: Synthetic oligonucleotide
  Antisense strand to SEQ ID NO: 1787049
uauaaccuucauagaaacc

SEQ ID NO: 1787051 - RNA, 19 nt, Artificial Sequence
  Description of Artificial Sequence: Synthetic oligonucleotide
  Sense strand starting at position 502 of SEQ ID NO: 1562986
cuaugaagguuauacagaa

SEQ ID NO: 1787052 - RNA, 19 nt, Artificial Sequence
  Description of Artificial Sequence: Synthetic oligonucleotide
  Antisense strand to SEQ ID NO: 1787051
uucuguauaaccuucauag

SEQ ID NO: 1787053 - RNA, 19 nt, Artificial Sequence
  Description of Artificial Sequence: Synthetic oligonucleotide
  Sense strand starting at position 525 of SEQ ID NO: 1562986
gaauguaaauuaucuggca

SEQ ID NO: 1787054 - RNA, 19 nt, Artificial Sequence
  Description of Artificial Sequence: Synthetic oligonucleotide
  Antisense strand to SEQ ID NO: 1787053
ugccagauaauuuacauuc

SEQ ID NO: 1787055 - RNA, 19 nt, Artificial Sequence
  Description of Artificial Sequence: Synthetic oligonucleotide
  Sense strand starting at position 540 of SEQ ID NO: 1562986
ggcacaaauacguacuagu

SEQ ID NO: 1787056 - RNA, 19 nt, Artificial Sequence
  Description of Artificial Sequence: Synthetic oligonucleotide
  Antisense strand to SEQ ID NO: 1787055
acuaguacguauuugugcc

SEQ ID NO: 1787057 - RNA, 19 nt, Artificial Sequence
  Description of Artificial Sequence: Synthetic oligonucleotide
  Sense strand starting at position 580 of SEQ ID NO: 1562986
ggccgugucuuauugaucu

SEQ ID NO: 1787058 - RNA, 19 nt, Artificial Sequence
  Description of Artificial Sequence: Synthetic oligonucleotide
  Antisense strand to SEQ ID NO: 1787057
agaucaauaagacacggcc

SEQ ID NO: 1787059 - RNA, 19 nt, Artificial Sequence
  Description of Artificial Sequence: Synthetic oligonucleotide
  Sense strand starting at position 628 of SEQ ID NO: 1562986
ggcacuccucaauaaguga

SEQ ID NO: 1787060 - RNA, 19 nt, Artificial Sequence
  Description of Artificial Sequence: Synthetic oligonucleotide
  Antisense strand to SEQ ID NO: 1787059
ucacuuauugaggagugcc

SEQ ID NO: 1787061 - RNA, 19 nt, Artificial Sequence
  Description of Artificial Sequence: Synthetic oligonucleotide
  Sense strand starting at position 666 of SEQ ID NO: 1562986
augagaacuucagagugag

SEQ ID NO: 1787062 - RNA, 19 nt, Artificial Sequence
  Description of Artificial Sequence: Synthetic oligonucleotide
  Antisense strand to SEQ ID NO: 1787061
cucacucugaaguucucau

SEQ ID NO: 1787063 - RNA, 19 nt, Artificial Sequence
  Description of Artificial Sequence: Synthetic oligonucleotide
  Sense strand starting at position 789 of SEQ ID NO: 1562986
ggaguagaauuguugagac

SEQ ID NO: 1787064 - RNA, 19 nt, Artificial Sequence
  Description of Artificial Sequence: Synthetic oligonucleotide
  Antisense strand to SEQ ID NO: 1787063
gucucaacaauucuacucc

SEQ ID NO: 1787065 - RNA, 19 nt, Artificial Sequence
  Description of Artificial Sequence: Synthetic oligonucleotide
  Sense strand starting at position 1039 of SEQ ID NO: 1562986
cucgguugcagccaagaaa

SEQ ID NO: 1787066 - RNA, 19 nt, Artificial Sequence
  Description of Artificial Sequence: Synthetic oligonucleotide
  Antisense strand to SEQ ID NO: 1787065
uuucuuggcugcaaccgag

SEQ ID NO: 1787067 - RNA, 19 nt, Artificial Sequence
  Description of Artificial Sequence: Synthetic oligonucleotide
  Sense strand starting at position 1321 of SEQ ID NO: 1562986
agcccuaggcucugggaaa

SEQ ID NO: 1787068 - RNA, 19 nt, Artificial Sequence
  Description of Artificial Sequence: Synthetic oligonucleotide
  Antisense strand to SEQ ID NO: 1787067
uuucccagagccuagggcu

SEQ ID NO: 1787069 - RNA, 19 nt, Artificial Sequence
  Description of Artificial Sequence: Synthetic oligonucleotide
  Sense strand starting at position 1502 of SEQ ID NO: 1562986
acguauguaucagugcaca

SEQ ID NO: 1787070 - RNA, 19 nt, Artificial Sequence
  Description of Artificial Sequence: Synthetic oligonucleotide
  Antisense strand to SEQ ID NO: 1787069
ugugcacugauacauacgu

SEQ ID NO: 1787071 - RNA, 19 nt, Artificial Sequence
  Description of Artificial Sequence: Synthetic oligonucleotide
  Sense strand starting at position 1669 of SEQ ID NO: 1562986
gucugccucucuccaagau

SEQ ID NO: 1787072 - RNA, 19 nt, Artificial Sequence
  Description of Artificial Sequence: Synthetic oligonucleotide
  Antisense strand to SEQ ID NO: 1787071
aucuuggagagaggcagac

SEQ ID NO: 1787073 - RNA, 19 nt, Artificial Sequence
  Description of Artificial Sequence: Synthetic oligonucleotide
  Sense strand starting at position 2485 of SEQ ID NO: 1562986
ggcccugcuccagaaugau

SEQ ID NO: 1787074 - RNA, 19 nt, Artificial Sequence
  Description of Artificial Sequence: Synthetic oligonucleotide
  Antisense strand to SEQ ID NO: 1787073
aucauucuggagcagggcc

SEQ ID NO: 1787075 - RNA, 19 nt, Artificial Sequence
  Description of Artificial Sequence: Synthetic oligonucleotide
  Sense strand starting at position 2488 of SEQ ID NO: 1562986
ccugcuccagaaugaugaa

SEQ ID NO: 1787076 - RNA, 19 nt, Artificial Sequence
  Description of Artificial Sequence: Synthetic oligonucleotide
  Antisense strand to SEQ ID NO: 1787075
uucaucauucuggagcagg

SEQ ID NO: 1787077 - RNA, 19 nt, Artificial Sequence
  Description of Artificial Sequence: Synthetic oligonucleotide
  Sense strand starting at position 3017 of SEQ ID NO: 1562986
uggugagucacugacgaau

SEQ ID NO: 1787078 - RNA, 19 nt, Artificial Sequence
  Description of Artificial Sequence: Synthetic oligonucleotide
  Antisense strand to SEQ ID NO: 1787077
auucgucagugacucacca

SEQ ID NO: 1787079 - RNA, 19 nt, Artificial Sequence
  Description of Artificial Sequence: Synthetic oligonucleotide
  Sense strand starting at position 3020 of SEQ ID NO: 1562986
ugagucacugacgaauauu

SEQ ID NO: 1787080 - RNA, 19 nt, Artificial Sequence
  Description of Artificial Sequence: Synthetic oligonucleotide
  Antisense strand to SEQ ID NO: 1787079
aauauucgucagugacuca

SEQ ID NO: 1787081 - RNA, 19 nt, Artificial Sequence
  Description of Artificial Sequence: Synthetic oligonucleotide
  Sense strand starting at position 3029 of SEQ ID NO: 1562986
gacgaauauuaagccgaaa

SEQ ID NO: 1787082 - RNA, 19 nt, Artificial Sequence
  Description of Artificial Sequence: Synthetic oligonucleotide
  Antisense strand to SEQ ID NO: 1787081
uuucggcuuaauauucguc

SEQ ID NO: 1787083 - RNA, 19 nt, Artificial Sequence
  Description of Artificial Sequence: Synthetic oligonucleotide
  Sense strand starting at position 3031 of SEQ ID NO: 1562986
cgaauauuaagccgaaagu

SEQ ID NO: 1787084 - RNA, 19 nt, Artificial Sequence
  Description of Artificial Sequence: Synthetic oligonucleotide
  Antisense strand to SEQ ID NO: 1787083
acuuucggcuuaauauucg

SEQ ID NO: 1787085 - RNA, 19 nt, Artificial Sequence
  Description of Artificial Sequence: Synthetic oligonucleotide
  Sense strand starting at position 3032 of SEQ ID NO: 1562986
gaauauuaagccgaaagug

SEQ ID NO: 1787086 - RNA, 19 nt, Artificial Sequence
  Description of Artificial Sequence: Synthetic oligonucleotide
  Antisense strand to SEQ ID NO: 1787085
cacuuucggcuuaauauuc

SEQ ID NO: 1787087 - RNA, 19 nt, Artificial Sequence
  Description of Artificial Sequence: Synthetic oligonucleotide
  Sense strand starting at position 3162 of SEQ ID NO: 1562986
ccagauaguugaguacuga

SEQ ID NO: 1787088 - RNA, 19 nt, Artificial Sequence
  Description of Artificial Sequence: Synthetic oligonucleotide
  Antisense strand to SEQ ID NO: 1787087
ucaguacucaacuaucugg

SEQ ID NO: 1787089 - RNA, 19 nt, Artificial Sequence
  Description of Artificial Sequence: Synthetic oligonucleotide
  Sense strand starting at position 3352 of SEQ ID NO: 1562986
ggacaugcccgggagacau

SEQ ID NO: 1787090 - RNA, 19 nt, Artificial Sequence
  Description of Artificial Sequence: Synthetic oligonucleotide
  Antisense strand to SEQ ID NO: 1787089
augucucccgggcaugucc

SEQ ID NO: 1787091 - RNA, 19 nt, Artificial Sequence
  Description of Artificial Sequence: Synthetic oligonucleotide
  Sense strand starting at position 3362 of SEQ ID NO: 1562986
gggagacauccggguagau

SEQ ID NO: 1787092 - RNA, 19 nt, Artificial Sequence
  Description of Artificial Sequence: Synthetic oligonucleotide
  Antisense strand to SEQ ID NO: 1787091
aucuacccggaugucuccc

SEQ ID NO: 1787093 - RNA, 19 nt, Artificial Sequence
  Description of Artificial Sequence: Synthetic oligonucleotide
  Sense strand starting at position 3454 of SEQ ID NO: 1562986
ugagaucucguagggagaa

SEQ ID NO: 1787094 - RNA, 19 nt, Artificial Sequence
  Description of Artificial Sequence: Synthetic oligonucleotide
  Antisense strand to SEQ ID NO: 1787093
uucucccuacgagaucuca

SEQ ID NO: 1787095 - RNA, 19 nt, Artificial Sequence
  Description of Artificial Sequence: Synthetic oligonucleotide
  Sense strand starting at position 3456 of SEQ ID NO: 1562986
agaucucguagggagaagu

SEQ ID NO: 1787096 - RNA, 19 nt, Artificial Sequence
  Description of Artificial Sequence: Synthetic oligonucleotide
  Antisense strand to SEQ ID NO: 1787095
acuucucccuacgagaucu

SEQ ID NO: 1787097 - RNA, 19 nt, Artificial Sequence
  Description of Artificial Sequence: Synthetic oligonucleotide
  Sense strand starting at position 3603 of SEQ ID NO: 1562986
cucugagcccuugaaaugu

SEQ ID NO: 1787098 - RNA, 19 nt, Artificial Sequence
  Description of Artificial Sequence: Synthetic oligonucleotide
  Antisense strand to SEQ ID NO: 1787097
acauuucaagggcucagag

SEQ ID NO: 1787099 - RNA, 19 nt, Artificial Sequence
  Description of Artificial Sequence: Synthetic oligonucleotide
  Sense strand starting at position 3611 of SEQ ID NO: 1562986
ccuugaaauguugggaaug

SEQ ID NO: 1787100 - RNA, 19 nt, Artificial Sequence
  Description of Artificial Sequence: Synthetic oligonucleotide
  Antisense strand to SEQ ID NO: 1787099
cauucccaacauuucaagg

SEQ ID NO: 1787101 - RNA, 19 nt, Artificial Sequence
  Description of Artificial Sequence: Synthetic oligonucleotide
  Sense strand starting at position 3612 of SEQ ID NO: 1562986
cuugaaauguugggaauga

SEQ ID NO: 1787102 - RNA, 19 nt, Artificial Sequence
  Description of Artificial Sequence: Synthetic oligonucleotide
  Antisense strand to SEQ ID NO: 1787101
ucauucccaacauuucaag

SEQ ID NO: 1787103 - RNA, 19 nt, Artificial Sequence
  Description of Artificial Sequence: Synthetic oligonucleotide
  Sense strand starting at position 3625 of SEQ ID NO: 1562986
gaaugaggcugcccaaagu

SEQ ID NO: 1787104 - RNA, 19 nt, Artificial Sequence
  Description of Artificial Sequence: Synthetic oligonucleotide
  Antisense strand to SEQ ID NO: 1787103
acuuugggcagccucauuc

SEQ ID NO: 1787105 - RNA, 19 nt, Artificial Sequence
  Description of Artificial Sequence: Synthetic oligonucleotide
  Sense strand starting at position 3688 of SEQ ID NO: 1562986
ccagcuuuggugugacuuu

SEQ ID NO: 1787106 - RNA, 19 nt, Artificial Sequence
  Description of Artificial Sequence: Synthetic oligonucleotide
  Antisense strand to SEQ ID NO: 1787105
aaagucacaccaaagcugg

SEQ ID NO: 1787107 - RNA, 19 nt, Artificial Sequence
  Description of Artificial Sequence: Synthetic oligonucleotide
  Sense strand starting at position 3700 of SEQ ID NO: 1562986
ugacuuuaggcaugucaca

SEQ ID NO: 1787108 - RNA, 19 nt, Artificial Sequence
  Description of Artificial Sequence: Synthetic oligonucleotide
  Antisense strand to SEQ ID NO: 1787107
ugugacaugccuaaaguca

SEQ ID NO: 1787109 - RNA, 19 nt, Artificial Sequence
  Description of Artificial Sequence: Synthetic oligonucleotide
  Sense strand starting at position 3764 of SEQ ID NO: 1562986
uuuagaguucuguguagga

SEQ ID NO: 1787110 - RNA, 19 nt, Artificial Sequence
  Description of Artificial Sequence: Synthetic oligonucleotide
  Antisense strand to SEQ ID NO: 1787109
uccuacacagaacucuaaa

SEQ ID NO: 1787111 - RNA, 19 nt, Artificial Sequence
  Description of Artificial Sequence: Synthetic oligonucleotide
  Sense strand starting at position 3766 of SEQ ID NO: 1562986
uagaguucuguguaggacu

SEQ ID NO: 1787112 - RNA, 19 nt, Artificial Sequence
  Description of Artificial Sequence: Synthetic oligonucleotide
  Antisense strand to SEQ ID NO: 1787111
aguccuacacagaacucua

SEQ ID NO: 1787113 - RNA, 19 nt, Artificial Sequence
  Description of Artificial Sequence: Synthetic oligonucleotide
  Sense strand starting at position 3917 of SEQ ID NO: 1562986
uggaaagucucgagugagg

SEQ ID NO: 1787114 - RNA, 19 nt, Artificial Sequence
  Description of Artificial Sequence: Synthetic oligonucleotide
  Antisense strand to SEQ ID NO: 1787113
ccucacucgagacuuucca

SEQ ID NO: 1787115 - RNA, 19 nt, Artificial Sequence
  Description of Artificial Sequence: Synthetic oligonucleotide
  Sense strand starting at position 3919 of SEQ ID NO: 1562986
gaaagucucgagugagguc

SEQ ID NO: 1787116 - RNA, 19 nt, Artificial Sequence
  Description of Artificial Sequence: Synthetic oligonucleotide
  Antisense strand to SEQ ID NO: 1787115
gaccucacucgagacuuuc

SEQ ID NO: 1787117 - RNA, 19 nt, Artificial Sequence
  Description of Artificial Sequence: Synthetic oligonucleotide
  Sense strand starting at position 3928 of SEQ ID NO: 1562986
gagugaggucauuaucuca

SEQ ID NO: 1787118 - RNA, 19 nt, Artificial Sequence
  Description of Artificial Sequence: Synthetic oligonucleotide
  Antisense strand to SEQ ID NO: 1787117
ugagauaaugaccucacuc

SEQ ID NO: 1787119 - RNA, 19 nt, Artificial Sequence
  Description of Artificial Sequence: Synthetic oligonucleotide
  Sense strand starting at position 3931 of SEQ ID NO: 1562986
ugaggucauuaucucacau

SEQ ID NO: 1787120 - RNA, 19 nt, Artificial Sequence
  Description of Artificial Sequence: Synthetic oligonucleotide
  Antisense strand to SEQ ID NO: 1787119
augugagauaaugaccuca

SEQ ID NO: 1787121 - RNA, 19 nt, Artificial Sequence
  Description of Artificial Sequence: Synthetic oligonucleotide
  Sense strand starting at position 862 of SEQ ID NO: 1562987
acacaaagguuucuccaga

SEQ ID NO: 1787122 - RNA, 19 nt, Artificial Sequence
  Description of Artificial Sequence: Synthetic oligonucleotide
  Antisense strand to SEQ ID NO: 1787121
ucuggagaaaccuuugugu

SEQ ID NO: 1787123 - RNA, 19 nt, Artificial Sequence
  Description of Artificial Sequence: Synthetic oligonucleotide
  Sense strand starting at position 1301 of SEQ ID NO: 1562987
cggagcagcgccuauuuau

SEQ ID NO: 1787124 - RNA, 19 nt, Artificial Sequence
  Description of Artificial Sequence: Synthetic oligonucleotide
  Antisense strand to SEQ ID NO: 1787123
auaaauaggcgcugcuccg

SEQ ID NO: 1787125 - RNA, 19 nt, Artificial Sequence
  Description of Artificial Sequence: Synthetic oligonucleotide
  Sense strand starting at position 3274 of SEQ ID NO: 1562987
ggcucuccuggcugagaga

SEQ ID NO: 1787126 - RNA, 19 nt, Artificial Sequence
  Description of Artificial Sequence: Synthetic oligonucleotide
  Antisense strand to SEQ ID NO: 1787125
ucucucagccaggagagcc

SEQ ID NO: 1787127 - RNA, 19 nt, Artificial Sequence
  Description of Artificial Sequence: Synthetic oligonucleotide
  Sense strand starting at position 3643 of SEQ ID NO: 1562987
caggcuaggaggugucuaa

SEQ ID NO: 1787128 - RNA, 19 nt, Artificial Sequence
  Description of Artificial Sequence: Synthetic oligonucleotide
  Antisense strand to SEQ ID NO: 1787127
uuagacaccuccuagccug

SEQ ID NO: 1787129 - RNA, 19 nt, Artificial Sequence
  Description of Artificial Sequence: Synthetic oligonucleotide
  Sense strand starting at position 3650 of SEQ ID NO: 1562987
ggaggugucuaacagagug

SEQ ID NO: 1787130 - RNA, 19 nt, Artificial Sequence
  Description of Artificial Sequence: Synthetic oligonucleotide
  Antisense strand to SEQ ID NO: 1787129
cacucuguuagacaccucc

SEQ ID NO: 1787131 - RNA, 19 nt, Artificial Sequence
  Description of Artificial Sequence: Synthetic oligonucleotide
  Sense strand starting at position 3743 of SEQ ID NO: 1562987
gcaagaaucucacucucag

SEQ ID NO: 1787132 - RNA, 19 nt, Artificial Sequence
  Description of Artificial Sequence: Synthetic oligonucleotide
  Antisense strand to SEQ ID NO: 1787131
cugagagugagauucuugc

SEQ ID NO: 1787133 - RNA, 19 nt, Artificial Sequence
  Description of Artificial Sequence: Synthetic oligonucleotide
  Sense strand starting at position 3894 of SEQ ID NO: 1562987
ggcuuccugagccauauga

SEQ ID NO: 1787134 - RNA, 19 nt, Artificial Sequence
  Description of Artificial Sequence: Synthetic oligonucleotide
  Antisense strand to SEQ ID NO: 1787133
ucauauggcucaggaagcc

SEQ ID NO: 1787135 - RNA, 19 nt, Artificial Sequence
  Description of Artificial Sequence: Synthetic oligonucleotide
  Sense strand starting at position 3896 of SEQ ID NO: 1562987
cuuccugagccauaugaca

SEQ ID NO: 1787136 - RNA, 19 nt, Artificial Sequence
  Description of Artificial Sequence: Synthetic oligonucleotide
  Antisense strand to SEQ ID NO: 1787135
ugucauauggcucaggaag

SEQ ID NO: 1787137 - RNA, 19 nt, Artificial Sequence
  Description of Artificial Sequence: Synthetic oligonucleotide
  Sense strand starting at position 378 of SEQ ID NO: 1562988
ugcaguaaugggcaagaga

SEQ ID NO: 1787138 - RNA, 19 nt, Artificial Sequence
  Description of Artificial Sequence: Synthetic oligonucleotide
  Antisense strand to SEQ ID NO: 1787137
ucucuugcccauuacugca

SEQ ID NO: 1787139 - RNA, 19 nt, Artificial Sequence
  Description of Artificial Sequence: Synthetic oligonucleotide
  Sense strand starting at position 552 of SEQ ID NO: 1562988
gacgcaugugucccugcau

SEQ ID NO: 1787140 - RNA, 19 nt, Artificial Sequence
  Description of Artificial Sequence: Synthetic oligonucleotide
  Antisense strand to SEQ ID NO: 1787139
augcagggacacaugcguc

SEQ ID NO: 1787141 - RNA, 19 nt, Artificial Sequence
  Description of Artificial Sequence: Synthetic oligonucleotide
  Sense strand starting at position 667 of SEQ ID NO: 1562988
gugugucccuuccaggaga

SEQ ID NO: 1787142 - RNA, 19 nt, Artificial Sequence
  Description of Artificial Sequence: Synthetic oligonucleotide
  Antisense strand to SEQ ID NO: 1787141
ucuccuggaagggacacac

SEQ ID NO: 1787143 - RNA, 19 nt, Artificial Sequence
  Description of Artificial Sequence: Synthetic oligonucleotide
  Sense strand starting at position 669 of SEQ ID NO: 1562988
gugucccuuccaggagaau

SEQ ID NO: 1787144 - RNA, 19 nt, Artificial Sequence
  Description of Artificial Sequence: Synthetic oligonucleotide
  Antisense strand to SEQ ID NO: 1787143
auucuccuggaagggacac

SEQ ID NO: 1787145 - RNA, 19 nt, Artificial Sequence
  Description of Artificial Sequence: Synthetic oligonucleotide
  Sense strand starting at position 789 of SEQ ID NO: 1562988
auccauggcuccugagaaa

SEQ ID NO: 1787146 - RNA, 19 nt, Artificial Sequence
  Description of Artificial Sequence: Synthetic oligonucleotide
  Antisense strand to SEQ ID NO: 1787145
uuucucaggagccauggau

SEQ ID NO: 1787147 - RNA, 19 nt, Artificial Sequence
  Description of Artificial Sequence: Synthetic oligonucleotide
  Sense strand starting at position 967 of SEQ ID NO: 1562988
gccucacagcauuguuuaa

SEQ ID NO: 1787148 - RNA, 19 nt, Artificial Sequence
  Description of Artificial Sequence: Synthetic oligonucleotide
  Antisense strand to SEQ ID NO: 1787147
uuaaacaaugcugugaggc

SEQ ID NO: 1787149 - RNA, 19 nt, Artificial Sequence
  Description of Artificial Sequence: Synthetic oligonucleotide
  Sense strand starting at position 977 of SEQ ID NO: 1562988
auuguuuaacccugagcuc

SEQ ID NO: 1787150 - RNA, 19 nt, Artificial Sequence
  Description of Artificial Sequence: Synthetic oligonucleotide
  Antisense strand to SEQ ID NO: 1787149
gagcucaggguuaaacaau

SEQ ID NO: 1787151 - RNA, 19 nt, Artificial Sequence
  Description of Artificial Sequence: Synthetic oligonucleotide
  Sense strand starting at position 2542 of SEQ ID NO: 1562988
ugggauuauuugugaagag

SEQ ID NO: 1787152 - RNA, 19 nt, Artificial Sequence
  Description of Artificial Sequence: Synthetic oligonucleotide
  Antisense strand to SEQ ID NO: 1787151
cucuucacaaauaauccca

SEQ ID NO: 1787153 - RNA, 19 nt, Artificial Sequence
  Description of Artificial Sequence: Synthetic oligonucleotide
  Sense strand starting at position 2543 of SEQ ID NO: 1562988
gggauuauuugugaagagg

SEQ ID NO: 1787154 - RNA, 19 nt, Artificial Sequence
  Description of Artificial Sequence: Synthetic oligonucleotide
  Antisense strand to SEQ ID NO: 1787153
ccucuucacaaauaauccc

SEQ ID NO: 1787155 - RNA, 19 nt, Artificial Sequence
  Description of Artificial Sequence: Synthetic oligonucleotide
  Sense strand starting at position 2557 of SEQ ID NO: 1562988
agaggagugaucugaggug

SEQ ID NO: 1787156 - RNA, 19 nt, Artificial Sequence
  Description of Artificial Sequence: Synthetic oligonucleotide
  Antisense strand to SEQ ID NO: 1787155
caccucagaucacuccucu

SEQ ID NO: 1787157 - RNA, 19 nt, Artificial Sequence
  Description of Artificial Sequence: Synthetic oligonucleotide
  Sense strand starting at position 2801 of SEQ ID NO: 1562988
gcaagucucuccggucauu

SEQ ID NO: 1787158 - RNA, 19 nt, Artificial Sequence
  Description of Artificial Sequence: Synthetic oligonucleotide
  Antisense strand to SEQ ID NO: 1787157
aaugaccggagagacuugc

SEQ ID NO: 1787159 - RNA, 19 nt, Artificial Sequence
  Description of Artificial Sequence: Synthetic oligonucleotide
  Sense strand starting at position 2811 of SEQ ID NO: 1562988
ccggucauuugugucacua

SEQ ID NO: 1787160 - RNA, 19 nt, Artificial Sequence
  Description of Artificial Sequence: Synthetic oligonucleotide
  Antisense strand to SEQ ID NO: 1787159
uagugacacaaaugaccgg

SEQ ID NO: 1787161 - RNA, 19 nt, Artificial Sequence
  Description of Artificial Sequence: Synthetic oligonucleotide
  Sense strand starting at position 2813 of SEQ ID NO: 1562988
ggucauuugugucacuauc

SEQ ID NO: 1787162 - RNA, 19 nt, Artificial Sequence
  Description of Artificial Sequence: Synthetic oligonucleotide
  Antisense strand to SEQ ID NO: 1787161
gauagugacacaaaugacc

SEQ ID NO: 1787163 - RNA, 19 nt, Artificial Sequence
  Description of Artificial Sequence: Synthetic oligonucleotide
  Sense strand starting at position 3170 of SEQ ID NO: 1562988
gcugcauucuguggccaga

SEQ ID NO: 1787164 - RNA, 19 nt, Artificial Sequence
  Description of Artificial Sequence: Synthetic oligonucleotide
  Antisense strand to SEQ ID NO: 1787163
ucuggccacagaaugcagc

SEQ ID NO: 1787165 - RNA, 19 nt, Artificial Sequence
  Description of Artificial Sequence: Synthetic oligonucleotide
  Sense strand starting at position 3258 of SEQ ID NO: 1562988
ccucucauccaagaugugu

SEQ ID NO: 1787166 - RNA, 19 nt, Artificial Sequence
  Description of Artificial Sequence: Synthetic oligonucleotide
  Antisense strand to SEQ ID NO: 1787165
acacaucuuggaugagagg

SEQ ID NO: 1787167 - RNA, 19 nt, Artificial Sequence
  Description of Artificial Sequence: Synthetic oligonucleotide
  Sense strand starting at position 3263 of SEQ ID NO: 1562988
cauccaagauguguuugga

SEQ ID NO: 1787168 - RNA, 19 nt, Artificial Sequence
  Description of Artificial Sequence: Synthetic oligonucleotide
  Antisense strand to SEQ ID NO: 1787167
uccaaacacaucuuggaug

SEQ ID NO: 1787169 - RNA, 19 nt, Artificial Sequence
  Description of Artificial Sequence: Synthetic oligonucleotide
  Sense strand starting at position 3266 of SEQ ID NO: 1562988
ccaagauguguuuggaacu

SEQ ID NO: 1787170 - RNA, 19 nt, Artificial Sequence
  Description of Artificial Sequence: Synthetic oligonucleotide
  Antisense strand to SEQ ID NO: 1787169
aguuccaaacacaucuugg

SEQ ID NO: 1787171 - RNA, 19 nt, Artificial Sequence
  Description of Artificial Sequence: Synthetic oligonucleotide
  Sense strand starting at position 3442 of SEQ ID NO: 1562988
cagcuuugccacugaguuu

SEQ ID NO: 1787172 - RNA, 19 nt, Artificial Sequence
  Description of Artificial Sequence: Synthetic oligonucleotide
  Antisense strand to SEQ ID NO: 1787171
aaacucaguggcaaagcug

SEQ ID NO: 1787173 - RNA, 19 nt, Artificial Sequence
  Description of Artificial Sequence: Synthetic oligonucleotide
  Sense strand starting at position 3468 of SEQ ID NO: 1562988
ccuuuauguuucugagcuu

SEQ ID NO: 1787174 - RNA, 19 nt, Artificial Sequence
  Description of Artificial Sequence: Synthetic oligonucleotide
  Antisense strand to SEQ ID NO: 1787173
aagcucagaaacauaaagg

SEQ ID NO: 1787175 - RNA, 19 nt, Artificial Sequence
  Description of Artificial Sequence: Synthetic oligonucleotide
  Sense strand starting at position 3469 of SEQ ID NO: 1562988
cuuuauguuucugagcuuu

SEQ ID NO: 1787176 - RNA, 19 nt, Artificial Sequence
  Description of Artificial Sequence: Synthetic oligonucleotide
  Antisense strand to SEQ ID NO: 1787175
aaagcucagaaacauaaag

SEQ ID NO: 1787177 - RNA, 19 nt, Artificial Sequence
  Description of Artificial Sequence: Synthetic oligonucleotide
  Sense strand starting at position 3475 of SEQ ID NO: 1562988
guuucugagcuuuggagaa

SEQ ID NO: 1787178 - RNA, 19 nt, Artificial Sequence
  Description of Artificial Sequence: Synthetic oligonucleotide
  Antisense strand to SEQ ID NO: 1787177
uucuccaaagcucagaaac

SEQ ID NO: 1787179 - RNA, 19 nt, Artificial Sequence
  Description of Artificial Sequence: Synthetic oligonucleotide
  Sense strand starting at position 3477 of SEQ ID NO: 1562988
uucugagcuuuggagaauu

SEQ ID NO: 1787180 - RNA, 19 nt, Artificial Sequence
  Description of Artificial Sequence: Synthetic oligonucleotide
  Antisense strand to SEQ ID NO: 1787179
aauucuccaaagcucagaa

SEQ ID NO: 1787181 - RNA, 19 nt, Artificial Sequence
  Description of Artificial Sequence: Synthetic oligonucleotide
  Sense strand starting at position 3503 of SEQ ID NO: 1562988
ucgauaaagaaaugugugu

SEQ ID NO: 1787182 - RNA, 19 nt, Artificial Sequence
  Description of Artificial Sequence: Synthetic oligonucleotide
  Antisense strand to SEQ ID NO: 1787181
acacacauuucuuuaucga

SEQ ID NO: 1787183 - RNA, 19 nt, Artificial Sequence
  Description of Artificial Sequence: Synthetic oligonucleotide
  Sense strand starting at position 3505 of SEQ ID NO: 1562988
gauaaagaaauguguguug

SEQ ID NO: 1787184 - RNA, 19 nt, Artificial Sequence
  Description of Artificial Sequence: Synthetic oligonucleotide
  Antisense strand to SEQ ID NO: 1787183
caacacacauuucuuuauc

SEQ ID NO: 1787185 - RNA, 19 nt, Artificial Sequence
  Description of Artificial Sequence: Synthetic oligonucleotide
  Sense strand starting at position 3510 of SEQ ID NO: 1562988
agaaauguguguugagguc

SEQ ID NO: 1787186 - RNA, 19 nt, Artificial Sequence
  Description of Artificial Sequence: Synthetic oligonucleotide
  Antisense strand to SEQ ID NO: 1787185
gaccucaacacacauuucu

SEQ ID NO: 1787187 - RNA, 19 nt, Artificial Sequence
  Description of Artificial Sequence: Synthetic oligonucleotide
  Sense strand starting at position 3516 of SEQ ID NO: 1562988
guguguugaggucaggaga

SEQ ID NO: 1787188 - RNA, 19 nt, Artificial Sequence
  Description of Artificial Sequence: Synthetic oligonucleotide
  Antisense strand to SEQ ID NO: 1787187
ucuccugaccucaacacac

SEQ ID NO: 1787189 - RNA, 19 nt, Artificial Sequence
  Description of Artificial Sequence: Synthetic oligonucleotide
  Sense strand starting at position 3810 of SEQ ID NO: 1562988
caggacuucugagcauaga

SEQ ID NO: 1787190 - RNA, 19 nt, Artificial Sequence
  Description of Artificial Sequence: Synthetic oligonucleotide
  Antisense strand to SEQ ID NO: 1787189
ucuaugcucagaaguccug

SEQ ID NO: 1787191 - RNA, 19 nt, Artificial Sequence
  Description of Artificial Sequence: Synthetic oligonucleotide
  Sense strand starting at position 3893 of SEQ ID NO: 1562988
gccugugcuuguggagaca

SEQ ID NO: 1787192 - RNA, 19 nt, Artificial Sequence
  Description of Artificial Sequence: Synthetic oligonucleotide
  Antisense strand to SEQ ID NO: 1787191
ugucuccacaagcacaggc

SEQ ID NO: 1787193 - RNA, 19 nt, Artificial Sequence
  Description of Artificial Sequence: Synthetic oligonucleotide
  Sense strand starting at position 2292 of SEQ ID NO: 1562989
cccuuuguuuaguggcuua

SEQ ID NO: 1787194 - RNA, 19 nt, Artificial Sequence
  Description of Artificial Sequence: Synthetic oligonucleotide
  Antisense strand to SEQ ID NO: 1787193
uaagccacuaaacaaaggg

SEQ ID NO: 1787195 - RNA, 19 nt, Artificial Sequence
  Description of Artificial Sequence: Synthetic oligonucleotide
  Sense strand starting at position 2295 of SEQ ID NO: 1562989
uuuguuuaguggcuuacua

SEQ ID NO: 1787196 - RNA, 19 nt, Artificial Sequence
  Description of Artificial Sequence: Synthetic oligonucleotide
  Antisense strand to SEQ ID NO: 1787195
uaguaagccacuaaacaaa

SEQ ID NO: 1787197 - RNA, 19 nt, Artificial Sequence
  Description of Artificial Sequence: Synthetic oligonucleotide
  Sense strand starting at position 2751 of SEQ ID NO: 1562989
ccuccaggugagggauuau

SEQ ID NO: 1787198 - RNA, 19 nt, Artificial Sequence
  Description of Artificial Sequence: Synthetic oligonucleotide
  Antisense strand to SEQ ID NO: 1787197
auaaucccucaccuggagg

SEQ ID NO: 1787199 - RNA, 19 nt, Artificial Sequence
  Description of Artificial Sequence: Synthetic oligonucleotide
  Sense strand starting at position 2772 of SEQ ID NO: 1562989
acaauaucugccuggaaag

SEQ ID NO: 1787200 - RNA, 19 nt, Artificial Sequence
  Description of Artificial Sequence: Synthetic oligonucleotide
  Antisense strand to SEQ ID NO: 1787199
cuuuccaggcagauauugu

SEQ ID NO: 1787201 - RNA, 19 nt, Artificial Sequence
  Description of Artificial Sequence: Synthetic oligonucleotide
  Sense strand starting at position 2874 of SEQ ID NO: 1562989
acccuuugagucugaaaca

SEQ ID NO: 1787202 - RNA, 19 nt, Artificial Sequence
  Description of Artificial Sequence: Synthetic oligonucleotide
  Antisense strand to SEQ ID NO: 1787201
uguuucagacucaaagggu

SEQ ID NO: 1787203 - RNA, 19 nt, Artificial Sequence
  Description of Artificial Sequence: Synthetic oligonucleotide
  Sense strand starting at position 2875 of SEQ ID NO: 1562989
cccuuugagucugaaacag

SEQ ID NO: 1787204 - RNA, 19 nt, Artificial Sequence
  Description of Artificial Sequence: Synthetic oligonucleotide
  Antisense strand to SEQ ID NO: 1787203
cuguuucagacucaaaggg

SEQ ID NO: 1787205 - RNA, 19 nt, Artificial Sequence
  Description of Artificial Sequence: Synthetic oligonucleotide
  Sense strand starting at position 2893 of SEQ ID NO: 1562989
guggcaagucuaggacaaa

SEQ ID NO: 1787206 - RNA, 19 nt, Artificial Sequence
  Description of Artificial Sequence: Synthetic oligonucleotide
  Antisense strand to SEQ ID NO: 1787205
uuuguccuagacuugccac

SEQ ID NO: 1787207 - RNA, 19 nt, Artificial Sequence
  Description of Artificial Sequence: Synthetic oligonucleotide
  Sense strand starting at position 2894 of SEQ ID NO: 1562989
uggcaagucuaggacaaau

SEQ ID NO: 1787208 - RNA, 19 nt, Artificial Sequence
  Description of Artificial Sequence: Synthetic oligonucleotide
  Antisense strand to SEQ ID NO: 1787207
auuuguccuagacuugcca

SEQ ID NO: 1787209 - RNA, 19 nt, Artificial Sequence
  Description of Artificial Sequence: Synthetic oligonucleotide
  Sense strand starting at position 2966 of SEQ ID NO: 1562989
aacagagucucgcuuugua

SEQ ID NO: 1787210 - RNA, 19 nt, Artificial Sequence
  Description of Artificial Sequence: Synthetic oligonucleotide
  Antisense strand to SEQ ID NO: 1787209
uacaaagcgagacucuguu

SEQ ID NO: 1787211 - RNA, 19 nt, Artificial Sequence
  Description of Artificial Sequence: Synthetic oligonucleotide
  Sense strand starting at position 3391 of SEQ ID NO: 1562989
gccguaccaguauaauaaa

SEQ ID NO: 1787212 - RNA, 19 nt, Artificial Sequence
  Description of Artificial Sequence: Synthetic oligonucleotide
  Antisense strand to SEQ ID NO: 1787211
uuuauuauacugguacggc

SEQ ID NO: 1787213 - RNA, 19 nt, Artificial Sequence
  Description of Artificial Sequence: Synthetic oligonucleotide
  Sense strand starting at position 3587 of SEQ ID NO: 1562989
gcgagaagugaccggaaga

SEQ ID NO: 1787214 - RNA, 19 nt, Artificial Sequence
  Description of Artificial Sequence: Synthetic oligonucleotide
  Antisense strand to SEQ ID NO: 1787213
ucuuccggucacuucucgc

SEQ ID NO: 1787215 - RNA, 19 nt, Artificial Sequence
  Description of Artificial Sequence: Synthetic oligonucleotide
  Sense strand starting at position 3835 of SEQ ID NO: 1562989
acugauugcccacaguuau

SEQ ID NO: 1787216 - RNA, 19 nt, Artificial Sequence
  Description of Artificial Sequence: Synthetic oligonucleotide
  Antisense strand to SEQ ID NO: 1787215
auaacugugggcaaucagu

SEQ ID NO: 1787217 - RNA, 19 nt, Artificial Sequence
  Description of Artificial Sequence: Synthetic oligonucleotide
  Sense strand starting at position 47 of SEQ ID NO: 1562990
augcucagccucuagaaau

SEQ ID NO: 1787218 - RNA, 19 nt, Artificial Sequence
  Description of Artificial Sequence: Synthetic oligonucleotide
  Antisense strand to SEQ ID NO: 1787217
auuucuagaggcugagcau

SEQ ID NO: 1787219 - RNA, 19 nt, Artificial Sequence
  Description of Artificial Sequence: Synthetic oligonucleotide
  Sense strand starting at position 114 of SEQ ID NO: 1562990
uggcacuuugaguaacuua

SEQ ID NO: 1787220 - RNA, 19 nt, Artificial Sequence
  Description of Artificial Sequence: Synthetic oligonucleotide
  Antisense strand to SEQ ID NO: 1787219
uaaguuacucaaagugcca

SEQ ID NO: 1787221 - RNA, 19 nt, Artificial Sequence
  Description of Artificial Sequence: Synthetic oligonucleotide
  Sense strand starting at position 159 of SEQ ID NO: 1562990
ucaggagacuguguaucaa

SEQ ID NO: 1787222 - RNA, 19 nt, Artificial Sequence
  Description of Artificial Sequence: Synthetic oligonucleotide
  Antisense strand to SEQ ID NO: 1787221
uugauacacagucuccuga

SEQ ID NO: 1787223 - RNA, 19 nt, Artificial Sequence
  Description of Artificial Sequence: Synthetic oligonucleotide
  Sense strand starting at position 569 of SEQ ID NO: 1562990
agaguaaagacaugcaugu

SEQ ID NO: 1787224 - RNA, 19 nt, Artificial Sequence
  Description of Artificial Sequence: Synthetic oligonucleotide
  Antisense strand to SEQ ID NO: 1787223
acaugcaugucuuuacucu

SEQ ID NO: 1787225 - RNA, 19 nt, Artificial Sequence
  Description of Artificial Sequence: Synthetic oligonucleotide
  Sense strand starting at position 604 of SEQ ID NO: 1562990
gaaguuauauuuggaaacu

SEQ ID NO: 1787226 - RNA, 19 nt, Artificial Sequence
  Description of Artificial Sequence: Synthetic oligonucleotide
  Antisense strand to SEQ ID NO: 1787225
aguuuccaaauauaacuuc

SEQ ID NO: 1787227 - RNA, 19 nt, Artificial Sequence
  Description of Artificial Sequence: Synthetic oligonucleotide
  Sense strand starting at position 634 of SEQ ID NO: 1562990
guucccacauuaucugaua

SEQ ID NO: 1787228 - RNA, 19 nt, Artificial Sequence
  Description of Artificial Sequence: Synthetic oligonucleotide
  Antisense strand to SEQ ID NO: 1787227
uaucagauaaugugggaac

SEQ ID NO: 1787229 - RNA, 19 nt, Artificial Sequence
  Description of Artificial Sequence: Synthetic oligonucleotide
  Sense strand starting at position 671 of SEQ ID NO: 1562990
ucgucauucccuuaccaga

SEQ ID NO: 1787230 - RNA, 19 nt, Artificial Sequence
  Description of Artificial Sequence: Synthetic oligonucleotide
  Antisense strand to SEQ ID NO: 1787229
ucugguaagggaaugacga

SEQ ID NO: 1787231 - RNA, 19 nt, Artificial Sequence
  Description of Artificial Sequence: Synthetic oligonucleotide
  Sense strand starting at position 740 of SEQ ID NO: 1562990
gaagguaaaucuuccugau

SEQ ID NO: 1787232 - RNA, 19 nt, Artificial Sequence
  Description of Artificial Sequence: Synthetic oligonucleotide
  Antisense strand to SEQ ID NO: 1787231
aucaggaagauuuaccuuc

SEQ ID NO: 1787233 - RNA, 19 nt, Artificial Sequence
  Description of Artificial Sequence: Synthetic oligonucleotide
  Sense strand starting at position 742 of SEQ ID NO: 1562990
agguaaaucuuccugaugu

SEQ ID NO: 1787234 - RNA, 19 nt, Artificial Sequence
  Description of Artificial Sequence: Synthetic oligonucleotide
  Antisense strand to SEQ ID NO: 1787233
acaucaggaagauuuaccu

SEQ ID NO: 1787235 - RNA, 19 nt, Artificial Sequence
  Description of Artificial Sequence: Synthetic oligonucleotide
  Sense strand starting at position 744 of SEQ ID NO: 1562990
guaaaucuuccugauguuu

SEQ ID NO: 1787236 - RNA, 19 nt, Artificial Sequence
  Description of Artificial Sequence: Synthetic oligonucleotide
  Antisense strand to SEQ ID NO: 1787235
aaacaucaggaagauuuac

SEQ ID NO: 1787237 - RNA, 19 nt, Artificial Sequence
  Description of Artificial Sequence: Synthetic oligonucleotide
  Sense strand starting at position 804 of SEQ ID NO: 1562990
cuaucacuagguugugauu

SEQ ID NO: 1787238 - RNA, 19 nt, Artificial Sequence
  Description of Artificial Sequence: Synthetic oligonucleotide
  Antisense strand to SEQ ID NO: 1787237
aaucacaaccuagugauag

SEQ ID NO: 1787239 - RNA, 19 nt, Artificial Sequence
  Description of Artificial Sequence: Synthetic oligonucleotide
  Sense strand starting at position 827 of SEQ ID NO: 1562990
ccagauuacuguuugaaga

SEQ ID NO: 1787240 - RNA, 19 nt, Artificial Sequence
  Description of Artificial Sequence: Synthetic oligonucleotide
  Antisense strand to SEQ ID NO: 1787239
ucuucaaacaguaaucugg

SEQ ID NO: 1787241 - RNA, 19 nt, Artificial Sequence
  Description of Artificial Sequence: Synthetic oligonucleotide
  Sense strand starting at position 828 of SEQ ID NO: 1562990
cagauuacuguuugaagag

SEQ ID NO: 1787242 - RNA, 19 nt, Artificial Sequence
  Description of Artificial Sequence: Synthetic oligonucleotide
  Antisense strand to SEQ ID NO: 1787241
cucuucaaacaguaaucug

SEQ ID NO: 1787243 - RNA, 19 nt, Artificial Sequence
  Description of Artificial Sequence: Synthetic oligonucleotide
  Sense strand starting at position 982 of SEQ ID NO: 1562990
uugauaaaccgucaucccu

SEQ ID NO: 1787244 - RNA, 19 nt, Artificial Sequence
  Description of Artificial Sequence: Synthetic oligonucleotide
  Antisense strand to SEQ ID NO: 1787243
agggaugacgguuuaucaa

SEQ ID NO: 1787245 - RNA, 19 nt, Artificial Sequence
  Description of Artificial Sequence: Synthetic oligonucleotide
  Sense strand starting at position 1046 of SEQ ID NO: 1562990
agaaguaacugccuaaagu

SEQ ID NO: 1787246 - RNA, 19 nt, Artificial Sequence
  Description of Artificial Sequence: Synthetic oligonucleotide
  Antisense strand to SEQ ID NO: 1787245
acuuuaggcaguuacuucu

SEQ ID NO: 1787247 - RNA, 19 nt, Artificial Sequence
  Description of Artificial Sequence: Synthetic oligonucleotide
  Sense strand starting at position 1047 of SEQ ID NO: 1562990
gaaguaacugccuaaaguu

SEQ ID NO: 1787248 - RNA, 19 nt, Artificial Sequence
  Description of Artificial Sequence: Synthetic oligonucleotide
  Antisense strand to SEQ ID NO: 1787247
aacuuuaggcaguuacuuc

SEQ ID NO: 1787249 - RNA, 19 nt, Artificial Sequence
  Description of Artificial Sequence: Synthetic oligonucleotide
  Sense strand starting at position 1258 of SEQ ID NO: 1562990
ucuagaccauuugagagua

SEQ ID NO: 1787250 - RNA, 19 nt, Artificial Sequence
  Description of Artificial Sequence: Synthetic oligonucleotide
  Antisense strand to SEQ ID NO: 1787249
uacucucaaauggucuaga

SEQ ID NO: 1787251 - RNA, 19 nt, Artificial Sequence
  Description of Artificial Sequence: Synthetic oligonucleotide
  Sense strand starting at position 1270 of SEQ ID NO: 1562990
gagaguaggucuccuauau

SEQ ID NO: 1787252 - RNA, 19 nt, Artificial Sequence
  Description of Artificial Sequence: Synthetic oligonucleotide
  Antisense strand to SEQ ID NO: 1787251
auauaggagaccuacucuc

SEQ ID NO: 1787253 - RNA, 19 nt, Artificial Sequence
  Description of Artificial Sequence: Synthetic oligonucleotide
  Sense strand starting at position 1274 of SEQ ID NO: 1562990
guaggucuccuauaucuug

SEQ ID NO: 1787254 - RNA, 19 nt, Artificial Sequence
  Description of Artificial Sequence: Synthetic oligonucleotide
  Antisense strand to SEQ ID NO: 1787253
caagauauaggagaccuac

SEQ ID NO: 1787255 - RNA, 19 nt, Artificial Sequence
  Description of Artificial Sequence: Synthetic oligonucleotide
  Sense strand starting at position 1651 of SEQ ID NO: 1562990
acccaagagcaaggauauu

SEQ ID NO: 1787256 - RNA, 19 nt, Artificial Sequence
  Description of Artificial Sequence: Synthetic oligonucleotide
  Antisense strand to SEQ ID NO: 1787255
aauauccuugcucuugggu

SEQ ID NO: 1787257 - RNA, 19 nt, Artificial Sequence
  Description of Artificial Sequence: Synthetic oligonucleotide
  Sense strand starting at position 1683 of SEQ ID NO: 1562990
acaggacaguuauccaauu

SEQ ID NO: 1787258 - RNA, 19 nt, Artificial Sequence
  Description of Artificial Sequence: Synthetic oligonucleotide
  Antisense strand to SEQ ID NO: 1787257
aauuggauaacuguccugu

SEQ ID NO: 1787259 - RNA, 19 nt, Artificial Sequence
  Description of Artificial Sequence: Synthetic oligonucleotide
  Sense strand starting at position 1750 of SEQ ID NO: 1562990
auucuaaguuugucaacuc

SEQ ID NO: 1787260 - RNA, 19 nt, Artificial Sequence
  Description of Artificial Sequence: Synthetic oligonucleotide
  Antisense strand to SEQ ID NO: 1787259
gaguugacaaacuuagaau

SEQ ID NO: 1787261 - RNA, 19 nt, Artificial Sequence
  Description of Artificial Sequence: Synthetic oligonucleotide
  Sense strand starting at position 1857 of SEQ ID NO: 1562990
gaauucuuaguuugcuaga

SEQ ID NO: 1787262 - RNA, 19 nt, Artificial Sequence
  Description of Artificial Sequence: Synthetic oligonucleotide
  Antisense strand to SEQ ID NO: 1787261
ucuagcaaacuaagaauuc

SEQ ID NO: 1787263 - RNA, 19 nt, Artificial Sequence
  Description of Artificial Sequence: Synthetic oligonucleotide
  Sense strand starting at position 1993 of SEQ ID NO: 1562990
caaggucaucagugggauu

SEQ ID NO: 1787264 - RNA, 19 nt, Artificial Sequence
  Description of Artificial Sequence: Synthetic oligonucleotide
  Antisense strand to SEQ ID NO: 1787263
aaucccacugaugaccuug

SEQ ID NO: 1787265 - RNA, 19 nt, Artificial Sequence
  Description of Artificial Sequence: Synthetic oligonucleotide
  Sense strand starting at position 2119 of SEQ ID NO: 1562990
ugccuuugauaacuguaga

SEQ ID NO: 1787266 - RNA, 19 nt, Artificial Sequence
  Description of Artificial Sequence: Synthetic oligonucleotide
  Antisense strand to SEQ ID NO: 1787265
ucuacaguuaucaaaggca

SEQ ID NO: 1787267 - RNA, 19 nt, Artificial Sequence
  Description of Artificial Sequence: Synthetic oligonucleotide
  Sense strand starting at position 2120 of SEQ ID NO: 1562990
gccuuugauaacuguagag

SEQ ID NO: 1787268 - RNA, 19 nt, Artificial Sequence
  Description of Artificial Sequence: Synthetic oligonucleotide
  Antisense strand to SEQ ID NO: 1787267
cucuacaguuaucaaaggc

SEQ ID NO: 1787269 - RNA, 19 nt, Artificial Sequence
  Description of Artificial Sequence: Synthetic oligonucleotide
  Sense strand starting at position 2122 of SEQ ID NO: 1562990
cuuugauaacuguagagug

SEQ ID NO: 1787270 - RNA, 19 nt, Artificial Sequence
  Description of Artificial Sequence: Synthetic oligonucleotide
  Antisense strand to SEQ ID NO: 1787269
cacucuacaguuaucaaag

SEQ ID NO: 1787271 - RNA, 19 nt, Artificial Sequence
  Description of Artificial Sequence: Synthetic oligonucleotide
  Sense strand starting at position 2162 of SEQ ID NO: 1562990
guucuuagagcugacacuu

SEQ ID NO: 1787272 - RNA, 19 nt, Artificial Sequence
  Description of Artificial Sequence: Synthetic oligonucleotide
  Antisense strand to SEQ ID NO: 1787271
aagugucagcucuaagaac

SEQ ID NO: 1787273 - RNA, 19 nt, Artificial Sequence
  Description of Artificial Sequence: Synthetic oligonucleotide
  Sense strand starting at position 2343 of SEQ ID NO: 1562990
uccucucuucugggaugau

SEQ ID NO: 1787274 - RNA, 19 nt, Artificial Sequence
  Description of Artificial Sequence: Synthetic oligonucleotide
  Antisense strand to SEQ ID NO: 1787273
aucaucccagaagagagga

SEQ ID NO: 1787275 - RNA, 19 nt, Artificial Sequence
  Description of Artificial Sequence: Synthetic oligonucleotide
  Sense strand starting at position 2594 of SEQ ID NO: 1562990
aggacuauuacugagcagu

SEQ ID NO: 1787276 - RNA, 19 nt, Artificial Sequence
  Description of Artificial Sequence: Synthetic oligonucleotide
  Antisense strand to SEQ ID NO: 1787275
acugcucaguaauaguccu

SEQ ID NO: 1787277 - RNA, 19 nt, Artificial Sequence
  Description of Artificial Sequence: Synthetic oligonucleotide
  Sense strand starting at position 2649 of SEQ ID NO: 1562990
gaucucugaggcugugaua

SEQ ID NO: 1787278 - RNA, 19 nt, Artificial Sequence
  Description of Artificial Sequence: Synthetic oligonucleotide
  Antisense strand to SEQ ID NO: 1787277
uaucacagccucagagauc

SEQ ID NO: 1787279 - RNA, 19 nt, Artificial Sequence
  Description of Artificial Sequence: Synthetic oligonucleotide
  Sense strand starting at position 2674 of SEQ ID NO: 1562990
guguuuauggguguuuguu

SEQ ID NO: 1787280 - RNA, 19 nt, Artificial Sequence
  Description of Artificial Sequence: Synthetic oligonucleotide
  Antisense strand to SEQ ID NO: 1787279
aacaaacacccauaaacac

SEQ ID NO: 1787281 - RNA, 19 nt, Artificial Sequence
  Description of Artificial Sequence: Synthetic oligonucleotide
  Sense strand starting at position 2909 of SEQ ID NO: 1562990
uguugaacuccuggaguga

SEQ ID NO: 1787282 - RNA, 19 nt, Artificial Sequence
  Description of Artificial Sequence: Synthetic oligonucleotide
  Antisense strand to SEQ ID NO: 1787281
ucacuccaggaguucaaca

SEQ ID NO: 1787283 - RNA, 19 nt, Artificial Sequence
  Description of Artificial Sequence: Synthetic oligonucleotide
  Sense strand starting at position 2910 of SEQ ID NO: 1562990
guugaacuccuggagugaa

SEQ ID NO: 1787284 - RNA, 19 nt, Artificial Sequence
  Description of Artificial Sequence: Synthetic oligonucleotide
  Antisense strand to SEQ ID NO: 1787283
uucacuccaggaguucaac

SEQ ID NO: 1787285 - RNA, 19 nt, Artificial Sequence
  Description of Artificial Sequence: Synthetic oligonucleotide
  Sense strand starting at position 3286 of SEQ ID NO: 1562990
gccuuaugauaauuuguuu

SEQ ID NO: 1787286 - RNA, 19 nt, Artificial Sequence
  Description of Artificial Sequence: Synthetic oligonucleotide
  Antisense strand to SEQ ID NO: 1787285
aaacaaauuaucauaaggc

SEQ ID NO: 1787287 - RNA, 19 nt, Artificial Sequence
  Description of Artificial Sequence: Synthetic oligonucleotide
  Sense strand starting at position 3349 of SEQ ID NO: 1562990
uauucuggauugucuggaa

SEQ ID NO: 1787288 - RNA, 19 nt, Artificial Sequence
  Description of Artificial Sequence: Synthetic oligonucleotide
  Antisense strand to SEQ ID NO: 1787287
uuccagacaauccagaaua

SEQ ID NO: 1787289 - RNA, 19 nt, Artificial Sequence
  Description of Artificial Sequence: Synthetic oligonucleotide
  Sense strand starting at position 3421 of SEQ ID NO: 1562990
cccagagucuaucugaaga

SEQ ID NO: 1787290 - RNA, 19 nt, Artificial Sequence
  Description of Artificial Sequence: Synthetic oligonucleotide
  Antisense strand to SEQ ID NO: 1787289
ucuucagauagacucuggg

SEQ ID NO: 1787291 - RNA, 19 nt, Artificial Sequence
  Description of Artificial Sequence: Synthetic oligonucleotide
  Sense strand starting at position 3444 of SEQ ID NO: 1562990
augugacuccuaggagaau

SEQ ID NO: 1787292 - RNA, 19 nt, Artificial Sequence
  Description of Artificial Sequence: Synthetic oligonucleotide
  Antisense strand to SEQ ID NO: 1787291
auucuccuaggagucacau

SEQ ID NO: 1787293 - RNA, 19 nt, Artificial Sequence
  Description of Artificial Sequence: Synthetic oligonucleotide
  Sense strand starting at position 3514 of SEQ ID NO: 1562990
gaaauuccagaguguaaag

SEQ ID NO: 1787294 - RNA, 19 nt, Artificial Sequence
  Description of Artificial Sequence: Synthetic oligonucleotide
  Antisense strand to SEQ ID NO: 1787293
cuuuacacucuggaauuuc

SEQ ID NO: 1787295 - RNA, 19 nt, Artificial Sequence
  Description of Artificial Sequence: Synthetic oligonucleotide
  Sense strand starting at position 3913 of SEQ ID NO: 1562990
cugaaaugagggugacagu

SEQ ID NO: 1787296 - RNA, 19 nt, Artificial Sequence
  Description of Artificial Sequence: Synthetic oligonucleotide
  Antisense strand to SEQ ID NO: 1787295
acugucacccucauuucag

SEQ ID NO: 1787297 - RNA, 19 nt, Artificial Sequence
  Description of Artificial Sequence: Synthetic oligonucleotide
  Sense strand starting at position 29 of SEQ ID NO: 1562991
guaagcugcuggguagauu

SEQ ID NO: 1787298 - RNA, 19 nt, Artificial Sequence
  Description of Artificial Sequence: Synthetic oligonucleotide
  Antisense strand to SEQ ID NO: 1787297
aaucuacccagcagcuuac

SEQ ID NO: 1787299 - RNA, 19 nt, Artificial Sequence
  Description of Artificial Sequence: Synthetic oligonucleotide
  Sense strand starting at position 60 of SEQ ID NO: 1562991
auauguguguuagucacaa

SEQ ID NO: 1787300 - RNA, 19 nt, Artificial Sequence
  Description of Artificial Sequence: Synthetic oligonucleotide
  Antisense strand to SEQ ID NO: 1787299
uugugacuaacacacauau

SEQ ID NO: 1787301 - RNA, 19 nt, Artificial Sequence
  Description of Artificial Sequence: Synthetic oligonucleotide
  Sense strand starting at position 62 of SEQ ID NO: 1562991
auguguguuagucacaaca

SEQ ID NO: 1787302 - RNA, 19 nt, Artificial Sequence
  Description of Artificial Sequence: Synthetic oligonucleotide
  Antisense strand to SEQ ID NO: 1787301
uguugugacuaacacacau

SEQ ID NO: 1787303 - RNA, 19 nt, Artificial Sequence
  Description of Artificial Sequence: Synthetic oligonucleotide
  Sense strand starting at position 128 of SEQ ID NO: 1562991
ccaccaagccauuguuaga

SEQ ID NO: 1787304 - RNA, 19 nt, Artificial Sequence
  Description of Artificial Sequence: Synthetic oligonucleotide
  Antisense strand to SEQ ID NO: 1787303
ucuaacaauggcuuggugg

SEQ ID NO: 1787305 - RNA, 19 nt, Artificial Sequence
  Description of Artificial Sequence: Synthetic oligonucleotide
  Sense strand starting at position 232 of SEQ ID NO: 1562991
cuguccagaccugguguaa

SEQ ID NO: 1787306 - RNA, 19 nt, Artificial Sequence
  Description of Artificial Sequence: Synthetic oligonucleotide
  Antisense strand to SEQ ID NO: 1787305
uuacaccaggucuggacag

SEQ ID NO: 1787307 - RNA, 19 nt, Artificial Sequence
  Description of Artificial Sequence: Synthetic oligonucleotide
  Sense strand starting at position 245 of SEQ ID NO: 1562991
guguaaauuguggacauua

SEQ ID NO: 1787308 - RNA, 19 nt, Artificial Sequence
  Description of Artificial Sequence: Synthetic oligonucleotide
  Antisense strand to SEQ ID NO: 1787307
uaauguccacaauuuacac

SEQ ID NO: 1787309 - RNA, 19 nt, Artificial Sequence
  Description of Artificial Sequence: Synthetic oligonucleotide
  Sense strand starting at position 247 of SEQ ID NO: 1562991
guaaauuguggacauuauu

SEQ ID NO: 1787310 - RNA, 19 nt, Artificial Sequence
  Description of Artificial Sequence: Synthetic oligonucleotide
  Antisense strand to SEQ ID NO: 1787309
aauaauguccacaauuuac

SEQ ID NO: 1787311 - RNA, 19 nt, Artificial Sequence
  Description of Artificial Sequence: Synthetic oligonucleotide
  Sense strand starting at position 296 of SEQ ID NO: 1562991
augauaugcuuuguuaaac

SEQ ID NO: 1787312 - RNA, 19 nt, Artificial Sequence
  Description of Artificial Sequence: Synthetic oligonucleotide
  Antisense strand to SEQ ID NO: 1787311
guuuaacaaagcauaucau

SEQ ID NO: 1787313 - RNA, 19 nt, Artificial Sequence
  Description of Artificial Sequence: Synthetic oligonucleotide
  Sense strand starting at position 297 of SEQ ID NO: 1562991
ugauaugcuuuguuaaaca

SEQ ID NO: 1787314 - RNA, 19 nt, Artificial Sequence
  Description of Artificial Sequence: Synthetic oligonucleotide
  Antisense strand to SEQ ID NO: 1787313
uguuuaacaaagcauauca

SEQ ID NO: 1787315 - RNA, 19 nt, Artificial Sequence
  Description of Artificial Sequence: Synthetic oligonucleotide
  Sense strand starting at position 489 of SEQ ID NO: 1562991
gccuuuggugcugaaagca

SEQ ID NO: 1787316 - RNA, 19 nt, Artificial Sequence
  Description of Artificial Sequence: Synthetic oligonucleotide
  Antisense strand to SEQ ID NO: 1787315
ugcuuucagcaccaaaggc

SEQ ID NO: 1787317 - RNA, 19 nt, Artificial Sequence
  Description of Artificial Sequence: Synthetic oligonucleotide
  Sense strand starting at position 568 of SEQ ID NO: 1562991
gagucaagacggugcaaau

SEQ ID NO: 1787318 - RNA, 19 nt, Artificial Sequence
  Description of Artificial Sequence: Synthetic oligonucleotide
  Antisense strand to SEQ ID NO: 1787317
auuugcaccgucuugacuc

SEQ ID NO: 1787319 - RNA, 19 nt, Artificial Sequence
  Description of Artificial Sequence: Synthetic oligonucleotide
  Sense strand starting at position 682 of SEQ ID NO: 1562991
agcgcauuucugggaccuu

SEQ ID NO: 1787320 - RNA, 19 nt, Artificial Sequence
  Description of Artificial Sequence: Synthetic oligonucleotide
  Antisense strand to SEQ ID NO: 1787319
aaggucccagaaaugcgcu

SEQ ID NO: 1787321 - RNA, 19 nt, Artificial Sequence
  Description of Artificial Sequence: Synthetic oligonucleotide
  Sense strand starting at position 751 of SEQ ID NO: 1562991
ucuccuaggugccugagaa

SEQ ID NO: 1787322 - RNA, 19 nt, Artificial Sequence
  Description of Artificial Sequence: Synthetic oligonucleotide
  Antisense strand to SEQ ID NO: 1787321
uucucaggcaccuaggaga

SEQ ID NO: 1787323 - RNA, 19 nt, Artificial Sequence
  Description of Artificial Sequence: Synthetic oligonucleotide
  Sense strand starting at position 752 of SEQ ID NO: 1562991
cuccuaggugccugagaaa

SEQ ID NO: 1787324 - RNA, 19 nt, Artificial Sequence
  Description of Artificial Sequence: Synthetic oligonucleotide
  Antisense strand to SEQ ID NO: 1787323
uuucucaggcaccuaggag

SEQ ID NO: 1787325 - RNA, 19 nt, Artificial Sequence
  Description of Artificial Sequence: Synthetic oligonucleotide
  Sense strand starting at position 785 of SEQ ID NO: 1562991
gaggguuagcuuuggguga

SEQ ID NO: 1787326 - RNA, 19 nt, Artificial Sequence
  Description of Artificial Sequence: Synthetic oligonucleotide
  Antisense strand to SEQ ID NO: 1787325
ucacccaaagcuaacccuc

SEQ ID NO: 1787327 - RNA, 19 nt, Artificial Sequence
  Description of Artificial Sequence: Synthetic oligonucleotide
  Sense strand starting at position 789 of SEQ ID NO: 1562991
guuagcuuugggugaguua

SEQ ID NO: 1787328 - RNA, 19 nt, Artificial Sequence
  Description of Artificial Sequence: Synthetic oligonucleotide
  Antisense strand to SEQ ID NO: 1787327
uaacucacccaaagcuaac

SEQ ID NO: 1787329 - RNA, 19 nt, Artificial Sequence
  Description of Artificial Sequence: Synthetic oligonucleotide
  Sense strand starting at position 954 of SEQ ID NO: 1562991
caacaaacacgugguagau

SEQ ID NO: 1787330 - RNA, 19 nt, Artificial Sequence
  Description of Artificial Sequence: Synthetic oligonucleotide
  Antisense strand to SEQ ID NO: 1787329
aucuaccacguguuuguug

SEQ ID NO: 1787331 - RNA, 19 nt, Artificial Sequence
  Description of Artificial Sequence: Synthetic oligonucleotide
  Sense strand starting at position 960 of SEQ ID NO: 1562991
acacgugguagaugaaacu

SEQ ID NO: 1787332 - RNA, 19 nt, Artificial Sequence
  Description of Artificial Sequence: Synthetic oligonucleotide
  Antisense strand to SEQ ID NO: 1787331
aguuucaucuaccacgugu

SEQ ID NO: 1787333 - RNA, 19 nt, Artificial Sequence
  Description of Artificial Sequence: Synthetic oligonucleotide
  Sense strand starting at position 998 of SEQ ID NO: 1562991
uccuaacagugaucagaga

SEQ ID NO: 1787334 - RNA, 19 nt, Artificial Sequence
  Description of Artificial Sequence: Synthetic oligonucleotide
  Antisense strand to SEQ ID NO: 1787333
ucucugaucacuguuagga

SEQ ID NO: 1787335 - RNA, 19 nt, Artificial Sequence
  Description of Artificial Sequence: Synthetic oligonucleotide
  Sense strand starting at position 1267 of SEQ ID NO: 1562991
guuugagucuaguccucag

SEQ ID NO: 1787336 - RNA, 19 nt, Artificial Sequence
  Description of Artificial Sequence: Synthetic oligonucleotide
  Antisense strand to SEQ ID NO: 1787335
cugaggacuagacucaaac

SEQ ID NO: 1787337 - RNA, 19 nt, Artificial Sequence
  Description of Artificial Sequence: Synthetic oligonucleotide
  Sense strand starting at position 1335 of SEQ ID NO: 1562991
ggaagauaauuaucuggca

SEQ ID NO: 1787338 - RNA, 19 nt, Artificial Sequence
  Description of Artificial Sequence: Synthetic oligonucleotide
  Antisense strand to SEQ ID NO: 1787337
ugccagauaauuaucuucc

SEQ ID NO: 1787339 - RNA, 19 nt, Artificial Sequence
  Description of Artificial Sequence: Synthetic oligonucleotide
  Sense strand starting at position 1375 of SEQ ID NO: 1562991
agagaagcgccgggaauuu

SEQ ID NO: 1787340 - RNA, 19 nt, Artificial Sequence
  Description of Artificial Sequence: Synthetic oligonucleotide
  Antisense strand to SEQ ID NO: 1787339
aaauucccggcgcuucucu

SEQ ID NO: 1787341 - RNA, 19 nt, Artificial Sequence
  Description of Artificial Sequence: Synthetic oligonucleotide
  Sense strand starting at position 2400 of SEQ ID NO: 1562991
aguuccaguucuuuccaga

SEQ ID NO: 1787342 - RNA, 19 nt, Artificial Sequence
  Description of Artificial Sequence: Synthetic oligonucleotide
  Antisense strand to SEQ ID NO: 1787341
ucuggaaagaacuggaacu

SEQ ID NO: 1787343 - RNA, 19 nt, Artificial Sequence
  Description of Artificial Sequence: Synthetic oligonucleotide
  Sense strand starting at position 2454 of SEQ ID NO: 1562991
gggccucacugcuuccaaa

SEQ ID NO: 1787344 - RNA, 19 nt, Artificial Sequence
  Description of Artificial Sequence: Synthetic oligonucleotide
  Antisense strand to SEQ ID NO: 1787343
uuuggaagcagugaggccc

SEQ ID NO: 1787345 - RNA, 19 nt, Artificial Sequence
  Description of Artificial Sequence: Synthetic oligonucleotide
  Sense strand starting at position 2487 of SEQ ID NO: 1562991
ccuagaaagucuguaacuc

SEQ ID NO: 1787346 - RNA, 19 nt, Artificial Sequence
  Description of Artificial Sequence: Synthetic oligonucleotide
  Antisense strand to SEQ ID NO: 1787345
gaguuacagacuuucuagg

SEQ ID NO: 1787347 - RNA, 19 nt, Artificial Sequence
  Description of Artificial Sequence: Synthetic oligonucleotide
  Sense strand starting at position 2488 of SEQ ID NO: 1562991
cuagaaagucuguaacucu

SEQ ID NO: 1787348 - RNA, 19 nt, Artificial Sequence
  Description of Artificial Sequence: Synthetic oligonucleotide
  Antisense strand to SEQ ID NO: 1787347
agaguuacagacuuucuag

SEQ ID NO: 1787349 - RNA, 19 nt, Artificial Sequence
  Description of Artificial Sequence: Synthetic oligonucleotide
  Sense strand starting at position 2496 of SEQ ID NO: 1562991
ucuguaacucuguggaucu

SEQ ID NO: 1787350 - RNA, 19 nt, Artificial Sequence
  Description of Artificial Sequence: Synthetic oligonucleotide
  Antisense strand to SEQ ID NO: 1787349
agauccacagaguuacaga

SEQ ID NO: 1787351 - RNA, 19 nt, Artificial Sequence
  Description of Artificial Sequence: Synthetic oligonucleotide
  Sense strand starting at position 2514 of SEQ ID NO: 1562991
uggugacagcugugaaucu

SEQ ID NO: 1787352 - RNA, 19 nt, Artificial Sequence
  Description of Artificial Sequence: Synthetic oligonucleotide
  Antisense strand to SEQ ID NO: 1787351
agauucacagcugucacca

SEQ ID NO: 1787353 - RNA, 19 nt, Artificial Sequence
  Description of Artificial Sequence: Synthetic oligonucleotide
  Sense strand starting at position 2836 of SEQ ID NO: 1562991
gacaaucaaugagggagau

SEQ ID NO: 1787354 - RNA, 19 nt, Artificial Sequence
  Description of Artificial Sequence: Synthetic oligonucleotide
  Antisense strand to SEQ ID NO: 1787353
aucucccucauugauuguc

SEQ ID NO: 1787355 - RNA, 19 nt, Artificial Sequence
  Description of Artificial Sequence: Synthetic oligonucleotide
  Sense strand starting at position 3095 of SEQ ID NO: 1562991
ggaggaauaugucuuuagc

SEQ ID NO: 1787356 - RNA, 19 nt, Artificial Sequence
  Description of Artificial Sequence: Synthetic oligonucleotide
  Antisense strand to SEQ ID NO: 1787355
gcuaaagacauauuccucc

SEQ ID NO: 1787357 - RNA, 19 nt, Artificial Sequence
  Description of Artificial Sequence: Synthetic oligonucleotide
  Sense strand starting at position 3097 of SEQ ID NO: 1562991
aggaauaugucuuuagcag

SEQ ID NO: 1787358 - RNA, 19 nt, Artificial Sequence
  Description of Artificial Sequence: Synthetic oligonucleotide
  Antisense strand to SEQ ID NO: 1787357
cugcuaaagacauauuccu

SEQ ID NO: 1787359 - RNA, 19 nt, Artificial Sequence
  Description of Artificial Sequence: Synthetic oligonucleotide
  Sense strand starting at position 3098 of SEQ ID NO: 1562991
ggaauaugucuuuagcagc

SEQ ID NO: 1787360 - RNA, 19 nt, Artificial Sequence
  Description of Artificial Sequence: Synthetic oligonucleotide
  Antisense strand to SEQ ID NO: 1787359
gcugcuaaagacauauucc

SEQ ID NO: 1787361 - RNA, 19 nt, Artificial Sequence
  Description of Artificial Sequence: Synthetic oligonucleotide
  Sense strand starting at position 3423 of SEQ ID NO: 1562991
gauuucuccuuuggagaag

SEQ ID NO: 1787362 - RNA, 19 nt, Artificial Sequence
  Description of Artificial Sequence: Synthetic oligonucleotide
  Antisense strand to SEQ ID NO: 1787361
cuucuccaaaggagaaauc

SEQ ID NO: 1787363 - RNA, 19 nt, Artificial Sequence
  Description of Artificial Sequence: Synthetic oligonucleotide
  Sense strand starting at position 3443 of SEQ ID NO: 1562991
ugaagcacuccaugcuuua

SEQ ID NO: 1787364 - RNA, 19 nt, Artificial Sequence
  Description of Artificial Sequence: Synthetic oligonucleotide
  Antisense strand to SEQ ID NO: 1787363
uaaagcauggagugcuuca

SEQ ID NO: 1787365 - RNA, 19 nt, Artificial Sequence
  Description of Artificial Sequence: Synthetic oligonucleotide
  Sense strand starting at position 3518 of SEQ ID NO: 1562991
ucaggcucuguauaguaua

SEQ ID NO: 1787366 - RNA, 19 nt, Artificial Sequence
  Description of Artificial Sequence: Synthetic oligonucleotide
  Antisense strand to SEQ ID NO: 1787365
uauacuauacagagccuga

SEQ ID NO: 1787367 - RNA, 19 nt, Artificial Sequence
  Description of Artificial Sequence: Synthetic oligonucleotide
  Sense strand starting at position 3561 of SEQ ID NO: 1562991
gugagacuuguucaaugga

SEQ ID NO: 1787368 - RNA, 19 nt, Artificial Sequence
  Description of Artificial Sequence: Synthetic oligonucleotide
  Antisense strand to SEQ ID NO: 1787367
uccauugaacaagucucac

SEQ ID NO: 1787369 - RNA, 19 nt, Artificial Sequence
  Description of Artificial Sequence: Synthetic oligonucleotide
  Sense strand starting at position 3647 of SEQ ID NO: 1562991
gagguaguuuagcuccaua

SEQ ID NO: 1787370 - RNA, 19 nt, Artificial Sequence
  Description of Artificial Sequence: Synthetic oligonucleotide
  Antisense strand to SEQ ID NO: 1787369
uauggagcuaaacuaccuc

SEQ ID NO: 1787371 - RNA, 19 nt, Artificial Sequence
  Description of Artificial Sequence: Synthetic oligonucleotide
  Sense strand starting at position 3650 of SEQ ID NO: 1562991
guaguuuagcuccauacuu

SEQ ID NO: 1787372 - RNA, 19 nt, Artificial Sequence
  Description of Artificial Sequence: Synthetic oligonucleotide
  Antisense strand to SEQ ID NO: 1787371
aaguauggagcuaaacuac

SEQ ID NO: 1787373 - RNA, 19 nt, Artificial Sequence
  Description of Artificial Sequence: Synthetic oligonucleotide
  Sense strand starting at position 3721 of SEQ ID NO: 1562991
uuguuaugugugcaaacuu

SEQ ID NO: 1787374 - RNA, 19 nt, Artificial Sequence
  Description of Artificial Sequence: Synthetic oligonucleotide
  Antisense strand to SEQ ID NO: 1787373
aaguuugcacacauaacaa

SEQ ID NO: 1787375 - RNA, 19 nt, Artificial Sequence
  Description of Artificial Sequence: Synthetic oligonucleotide
  Sense strand starting at position 3789 of SEQ ID NO: 1562991
ccugguacucaauaguaau

SEQ ID NO: 1787376 - RNA, 19 nt, Artificial Sequence
  Description of Artificial Sequence: Synthetic oligonucleotide
  Antisense strand to SEQ ID NO: 1787375
auuacuauugaguaccagg

SEQ ID NO: 1787377 - RNA, 19 nt, Artificial Sequence
  Description of Artificial Sequence: Synthetic oligonucleotide
  Sense strand starting at position 66 of SEQ ID NO: 1562992
agccuauaagauuaaguac

SEQ ID NO: 1787378 - RNA, 19 nt, Artificial Sequence
  Description of Artificial Sequence: Synthetic oligonucleotide
  Antisense strand to SEQ ID NO: 1787377
guacuuaaucuuauaggcu

SEQ ID NO: 1787379 - RNA, 19 nt, Artificial Sequence
  Description of Artificial Sequence: Synthetic oligonucleotide
  Sense strand starting at position 538 of SEQ ID NO: 1562992
cccucauagugauucucca

SEQ ID NO: 1787380 - RNA, 19 nt, Artificial Sequence
  Description of Artificial Sequence: Synthetic oligonucleotide
  Antisense strand to SEQ ID NO: 1787379
uggagaaucacuaugaggg

SEQ ID NO: 1787381 - RNA, 19 nt, Artificial Sequence
  Description of Artificial Sequence: Synthetic oligonucleotide
  Sense strand starting at position 545 of SEQ ID NO: 1562992
agugauucuccacacgucu

SEQ ID NO: 1787382 - RNA, 19 nt, Artificial Sequence
  Description of Artificial Sequence: Synthetic oligonucleotide
  Antisense strand to SEQ ID NO: 1787381
agacguguggagaaucacu

SEQ ID NO: 1787383 - RNA, 19 nt, Artificial Sequence
  Description of Artificial Sequence: Synthetic oligonucleotide
  Sense strand starting at position 900 of SEQ ID NO: 1562992
aagcaaugaucagcguaug

SEQ ID NO: 1787384 - RNA, 19 nt, Artificial Sequence
  Description of Artificial Sequence: Synthetic oligonucleotide
  Antisense strand to SEQ ID NO: 1787383
cauacgcugaucauugcuu

SEQ ID NO: 1787385 - RNA, 19 nt, Artificial Sequence
  Description of Artificial Sequence: Synthetic oligonucleotide
  Sense strand starting at position 903 of SEQ ID NO: 1562992
caaugaucagcguaugugu

SEQ ID NO: 1787386 - RNA, 19 nt, Artificial Sequence
  Description of Artificial Sequence: Synthetic oligonucleotide
  Antisense strand to SEQ ID NO: 1787385
acacauacgcugaucauug

SEQ ID NO: 1787387 - RNA, 19 nt, Artificial Sequence
  Description of Artificial Sequence: Synthetic oligonucleotide
  Sense strand starting at position 1030 of SEQ ID NO: 1562992
gggcuucccuaccuuaaua

SEQ ID NO: 1787388 - RNA, 19 nt, Artificial Sequence
  Description of Artificial Sequence: Synthetic oligonucleotide
  Antisense strand to SEQ ID NO: 1787387
uauuaagguagggaagccc

SEQ ID NO: 1787389 - RNA, 19 nt, Artificial Sequence
  Description of Artificial Sequence: Synthetic oligonucleotide
  Sense strand starting at position 1074 of SEQ ID NO: 1562992
ucauuagauuuguaccuga

SEQ ID NO: 1787390 - RNA, 19 nt, Artificial Sequence
  Description of Artificial Sequence: Synthetic oligonucleotide
  Antisense strand to SEQ ID NO: 1787389
ucagguacaaaucuaauga

SEQ ID NO: 1787391 - RNA, 19 nt, Artificial Sequence
  Description of Artificial Sequence: Synthetic oligonucleotide
  Sense strand starting at position 1095 of SEQ ID NO: 1562992
cuucuaucacagggcauau

SEQ ID NO: 1787392 - RNA, 19 nt, Artificial Sequence
  Description of Artificial Sequence: Synthetic oligonucleotide
  Antisense strand to SEQ ID NO: 1787391
auaugcccugugauagaag

SEQ ID NO: 1787393 - RNA, 19 nt, Artificial Sequence
  Description of Artificial Sequence: Synthetic oligonucleotide
  Sense strand starting at position 1135 of SEQ ID NO: 1562992
gugcacauucgagauugga

SEQ ID NO: 1787394 - RNA, 19 nt, Artificial Sequence
  Description of Artificial Sequence: Synthetic oligonucleotide
  Antisense strand to SEQ ID NO: 1787393
uccaaucucgaaugugcac

SEQ ID NO: 1787395 - RNA, 19 nt, Artificial Sequence
  Description of Artificial Sequence: Synthetic oligonucleotide
  Sense strand starting at position 1179 of SEQ ID NO: 1562992
cuguaucaucgauggccau

SEQ ID NO: 1787396 - RNA, 19 nt, Artificial Sequence
  Description of Artificial Sequence: Synthetic oligonucleotide
  Antisense strand to SEQ ID NO: 1787395
auggccaucgaugauacag

SEQ ID NO: 1787397 - RNA, 19 nt, Artificial Sequence
  Description of Artificial Sequence: Synthetic oligonucleotide
  Sense strand starting at position 1180 of SEQ ID NO: 1562992
uguaucaucgauggccauu

SEQ ID NO: 1787398 - RNA, 19 nt, Artificial Sequence
  Description of Artificial Sequence: Synthetic oligonucleotide
  Antisense strand to SEQ ID NO: 1787397
aauggccaucgaugauaca

SEQ ID NO: 1787399 - RNA, 19 nt, Artificial Sequence
  Description of Artificial Sequence: Synthetic oligonucleotide
  Sense strand starting at position 1214 of SEQ ID NO: 1562992
uggugagcauucucauaug

SEQ ID NO: 1787400 - RNA, 19 nt, Artificial Sequence
  Description of Artificial Sequence: Synthetic oligonucleotide
  Antisense strand to SEQ ID NO: 1787399
cauaugagaaugcucacca

SEQ ID NO: 1787401 - RNA, 19 nt, Artificial Sequence
  Description of Artificial Sequence: Synthetic oligonucleotide
  Sense strand starting at position 1229 of SEQ ID NO: 1562992
uaugucugucuucucguua

SEQ ID NO: 1787402 - RNA, 19 nt, Artificial Sequence
  Description of Artificial Sequence: Synthetic oligonucleotide
  Antisense strand to SEQ ID NO: 1787401
uaacgagaagacagacaua

SEQ ID NO: 1787403 - RNA, 19 nt, Artificial Sequence
  Description of Artificial Sequence: Synthetic oligonucleotide
  Sense strand starting at position 1460 of SEQ ID NO: 1562992
gcgccucucgcacuuauaa

SEQ ID NO: 1787404 - RNA, 19 nt, Artificial Sequence
  Description of Artificial Sequence: Synthetic oligonucleotide
  Antisense strand to SEQ ID NO: 1787403
uuauaagugcgagaggcgc

SEQ ID NO: 1787405 - RNA, 19 nt, Artificial Sequence
  Description of Artificial Sequence: Synthetic oligonucleotide
  Sense strand starting at position 1620 of SEQ ID NO: 1562992
ucauuucgcuaccagaaca

SEQ ID NO: 1787406 - RNA, 19 nt, Artificial Sequence
  Description of Artificial Sequence: Synthetic oligonucleotide
  Antisense strand to SEQ ID NO: 1787405
uguucugguagcgaaauga

SEQ ID NO: 1787407 - RNA, 19 nt, Artificial Sequence
  Description of Artificial Sequence: Synthetic oligonucleotide
  Sense strand starting at position 2186 of SEQ ID NO: 1562992
gugagauguuguacgucac

SEQ ID NO: 1787408 - RNA, 19 nt, Artificial Sequence
  Description of Artificial Sequence: Synthetic oligonucleotide
  Antisense strand to SEQ ID NO: 1787407
gugacguacaacaucucac

SEQ ID NO: 1787409 - RNA, 19 nt, Artificial Sequence
  Description of Artificial Sequence: Synthetic oligonucleotide
  Sense strand starting at position 2903 of SEQ ID NO: 1562992
gaggacgucucccuauguu

SEQ ID NO: 1787410 - RNA, 19 nt, Artificial Sequence
  Description of Artificial Sequence: Synthetic oligonucleotide
  Antisense strand to SEQ ID NO: 1787409
aacauagggagacguccuc

SEQ ID NO: 1787411 - RNA, 19 nt, Artificial Sequence
  Description of Artificial Sequence: Synthetic oligonucleotide
  Sense strand starting at position 3233 of SEQ ID NO: 1562992
aggaaagguugcucucuca

SEQ ID NO: 1787412 - RNA, 19 nt, Artificial Sequence
  Description of Artificial Sequence: Synthetic oligonucleotide
  Antisense strand to SEQ ID NO: 1787411
ugagagagcaaccuuuccu

SEQ ID NO: 1787413 - RNA, 19 nt, Artificial Sequence
  Description of Artificial Sequence: Synthetic oligonucleotide
  Sense strand starting at position 3236 of SEQ ID NO: 1562992
aaagguugcucucucaagu

SEQ ID NO: 1787414 - RNA, 19 nt, Artificial Sequence
  Description of Artificial Sequence: Synthetic oligonucleotide
  Antisense strand to SEQ ID NO: 1787413
acuugagagagcaaccuuu

SEQ ID NO: 1787415 - RNA, 19 nt, Artificial Sequence
  Description of Artificial Sequence: Synthetic oligonucleotide
  Sense strand starting at position 3283 of SEQ ID NO: 1562992
cugugugucaugguuguua

SEQ ID NO: 1787416 - RNA, 19 nt, Artificial Sequence
  Description of Artificial Sequence: Synthetic oligonucleotide
  Antisense strand to SEQ ID NO: 1787415
uaacaaccaugacacacag

SEQ ID NO: 1787417 - RNA, 19 nt, Artificial Sequence
  Description of Artificial Sequence: Synthetic oligonucleotide
  Sense strand starting at position 3313 of SEQ ID NO: 1562992
uaaugauagcugggaugua

SEQ ID NO: 1787418 - RNA, 19 nt, Artificial Sequence
  Description of Artificial Sequence: Synthetic oligonucleotide
  Antisense strand to SEQ ID NO: 1787417
uacaucccagcuaucauua

SEQ ID NO: 1787419 - RNA, 19 nt, Artificial Sequence
  Description of Artificial Sequence: Synthetic oligonucleotide
  Sense strand starting at position 3322 of SEQ ID NO: 1562992
cugggauguauuggucauu

SEQ ID NO: 1787420 - RNA, 19 nt, Artificial Sequence
  Description of Artificial Sequence: Synthetic oligonucleotide
  Antisense strand to SEQ ID NO: 1787419
aaugaccaauacaucccag

SEQ ID NO: 1787421 - RNA, 19 nt, Artificial Sequence
  Description of Artificial Sequence: Synthetic oligonucleotide
  Sense strand starting at position 3352 of SEQ ID NO: 1562992
ggauacugugcccaacacu

SEQ ID NO: 1787422 - RNA, 19 nt, Artificial Sequence
  Description of Artificial Sequence: Synthetic oligonucleotide
  Antisense strand to SEQ ID NO: 1787421
aguguugggcacaguaucc

SEQ ID NO: 1787423 - RNA, 19 nt, Artificial Sequence
  Description of Artificial Sequence: Synthetic oligonucleotide
  Sense strand starting at position 3374 of SEQ ID NO: 1562992
uguguuacgucauuuauuc

SEQ ID NO: 1787424 - RNA, 19 nt, Artificial Sequence
  Description of Artificial Sequence: Synthetic oligonucleotide
  Antisense strand to SEQ ID NO: 1787423
gaauaaaugacguaacaca

SEQ ID NO: 1787425 - RNA, 19 nt, Artificial Sequence
  Description of Artificial Sequence: Synthetic oligonucleotide
  Sense strand starting at position 3378 of SEQ ID NO: 1562992
uuacgucauuuauuccuua

SEQ ID NO: 1787426 - RNA, 19 nt, Artificial Sequence
  Description of Artificial Sequence: Synthetic oligonucleotide
  Antisense strand to SEQ ID NO: 1787425
uaaggaauaaaugacguaa

SEQ ID NO: 1787427 - RNA, 19 nt, Artificial Sequence
  Description of Artificial Sequence: Synthetic oligonucleotide
  Sense strand starting at position 3382 of SEQ ID NO: 1562992
gucauuuauuccuuauagc

SEQ ID NO: 1787428 - RNA, 19 nt, Artificial Sequence
  Description of Artificial Sequence: Synthetic oligonucleotide
  Antisense strand to SEQ ID NO: 1787427
gcuauaaggaauaaaugac

SEQ ID NO: 1787429 - RNA, 19 nt, Artificial Sequence
  Description of Artificial Sequence: Synthetic oligonucleotide
  Sense strand starting at position 3419 of SEQ ID NO: 1562992
gacagugaaguuuggaguu

SEQ ID NO: 1787430 - RNA, 19 nt, Artificial Sequence
  Description of Artificial Sequence: Synthetic oligonucleotide
  Antisense strand to SEQ ID NO: 1787429
aacuccaaacuucacuguc

SEQ ID NO: 1787431 - RNA, 19 nt, Artificial Sequence
  Description of Artificial Sequence: Synthetic oligonucleotide
  Sense strand starting at position 3425 of SEQ ID NO: 1562992
gaaguuuggaguugguaga

SEQ ID NO: 1787432 - RNA, 19 nt, Artificial Sequence
  Description of Artificial Sequence: Synthetic oligonucleotide
  Antisense strand to SEQ ID NO: 1787431
ucuaccaacuccaaacuuc

SEQ ID NO: 1787433 - RNA, 19 nt, Artificial Sequence
  Description of Artificial Sequence: Synthetic oligonucleotide
  Sense strand starting at position 3466 of SEQ ID NO: 1562992
gucuuauuccucuacuagu

SEQ ID NO: 1787434 - RNA, 19 nt, Artificial Sequence
  Description of Artificial Sequence: Synthetic oligonucleotide
  Antisense strand to SEQ ID NO: 1787433
acuaguagaggaauaagac

SEQ ID NO: 1787435 - RNA, 19 nt, Artificial Sequence
  Description of Artificial Sequence: Synthetic oligonucleotide
  Sense strand starting at position 3548 of SEQ ID NO: 1562992
cauguuugagacugacauc

SEQ ID NO: 1787436 - RNA, 19 nt, Artificial Sequence
  Description of Artificial Sequence: Synthetic oligonucleotide
  Antisense strand to SEQ ID NO: 1787435
gaugucagucucaaacaug

SEQ ID NO: 1787437 - RNA, 19 nt, Artificial Sequence
  Description of Artificial Sequence: Synthetic oligonucleotide
  Sense strand starting at position 3613 of SEQ ID NO: 1562992
cuuugaaucucaccaggca

SEQ ID NO: 1787438 - RNA, 19 nt, Artificial Sequence
  Description of Artificial Sequence: Synthetic oligonucleotide
  Antisense strand to SEQ ID NO: 1787437
ugccuggugagauucaaag

SEQ ID NO: 1787439 - RNA, 19 nt, Artificial Sequence
  Description of Artificial Sequence: Synthetic oligonucleotide
  Sense strand starting at position 3641 of SEQ ID NO: 1562992
ggaaguaggcaucaucuuu

SEQ ID NO: 1787440 - RNA, 19 nt, Artificial Sequence
  Description of Artificial Sequence: Synthetic oligonucleotide
  Antisense strand to SEQ ID NO: 1787439
aaagaugaugccuacuucc

SEQ ID NO: 1787441 - RNA, 19 nt, Artificial Sequence
  Description of Artificial Sequence: Synthetic oligonucleotide
  Sense strand starting at position 3646 of SEQ ID NO: 1562992
uaggcaucaucuuuaccga

SEQ ID NO: 1787442 - RNA, 19 nt, Artificial Sequence
  Description of Artificial Sequence: Synthetic oligonucleotide
  Antisense strand to SEQ ID NO: 1787441
ucgguaaagaugaugccua

SEQ ID NO: 1787443 - RNA, 19 nt, Artificial Sequence
  Description of Artificial Sequence: Synthetic oligonucleotide
  Sense strand starting at position 3649 of SEQ ID NO: 1562992
gcaucaucuuuaccgagua

SEQ ID NO: 1787444 - RNA, 19 nt, Artificial Sequence
  Description of Artificial Sequence: Synthetic oligonucleotide
  Antisense strand to SEQ ID NO: 1787443
uacucgguaaagaugaugc

SEQ ID NO: 1787445 - RNA, 19 nt, Artificial Sequence
  Description of Artificial Sequence: Synthetic oligonucleotide
  Sense strand starting at position 3654 of SEQ ID NO: 1562992
aucuuuaccgaguaggguu

SEQ ID NO: 1787446 - RNA, 19 nt, Artificial Sequence
  Description of Artificial Sequence: Synthetic oligonucleotide
  Antisense strand to SEQ ID NO: 1787445
aacccuacucgguaaagau

SEQ ID NO: 1787447 - RNA, 19 nt, Artificial Sequence
  Description of Artificial Sequence: Synthetic oligonucleotide
  Sense strand starting at position 3692 of SEQ ID NO: 1562992
agagaaggcgcuugaaugu

SEQ ID NO: 1787448 - RNA, 19 nt, Artificial Sequence
  Description of Artificial Sequence: Synthetic oligonucleotide
  Antisense strand to SEQ ID NO: 1787447
acauucaagcgccuucucu

SEQ ID NO: 1787449 - RNA, 19 nt, Artificial Sequence
  Description of Artificial Sequence: Synthetic oligonucleotide
  Sense strand starting at position 3703 of SEQ ID NO: 1562992
uugaauguugaacggaaau

SEQ ID NO: 1787450 - RNA, 19 nt, Artificial Sequence
  Description of Artificial Sequence: Synthetic oligonucleotide
  Antisense strand to SEQ ID NO: 1787449
auuuccguucaacauucaa

SEQ ID NO: 1787451 - RNA, 19 nt, Artificial Sequence
  Description of Artificial Sequence: Synthetic oligonucleotide
  Sense strand starting at position 3736 of SEQ ID NO: 1562992
ugcucuucucugggaguca

SEQ ID NO: 1787452 - RNA, 19 nt, Artificial Sequence
  Description of Artificial Sequence: Synthetic oligonucleotide
  Antisense strand to SEQ ID NO: 1787451
ugacucccagagaagagca

SEQ ID NO: 1787453 - RNA, 19 nt, Artificial Sequence
  Description of Artificial Sequence: Synthetic oligonucleotide
  Sense strand starting at position 3838 of SEQ ID NO: 1562992
cuauguggucauggguaca

SEQ ID NO: 1787454 - RNA, 19 nt, Artificial Sequence
  Description of Artificial Sequence: Synthetic oligonucleotide
  Antisense strand to SEQ ID NO: 1787453
uguacccaugaccacauag

SEQ ID NO: 1787455 - RNA, 19 nt, Artificial Sequence
  Description of Artificial Sequence: Synthetic oligonucleotide
  Sense strand starting at position 3973 of SEQ ID NO: 1562992
cuuguaucugcaugacuuc

SEQ ID NO: 1787456 - RNA, 19 nt, Artificial Sequence
  Description of Artificial Sequence: Synthetic oligonucleotide
  Antisense strand to SEQ ID NO: 1787455
gaagucaugcagauacaag

SEQ ID NO: 1787457 - RNA, 19 nt, Artificial Sequence
  Description of Artificial Sequence: Synthetic oligonucleotide
  Sense strand starting at position 197 of SEQ ID NO: 1562993
cauacuguguuagcagaca

SEQ ID NO: 1787458 - RNA, 19 nt, Artificial Sequence
  Description of Artificial Sequence: Synthetic oligonucleotide
  Antisense strand to SEQ ID NO: 1787457
ugucugcuaacacaguaug

SEQ ID NO: 1787459 - RNA, 19 nt, Artificial Sequence
  Description of Artificial Sequence: Synthetic oligonucleotide
  Sense strand starting at position 202 of SEQ ID NO: 1562993
uguguuagcagacauguaa

SEQ ID NO: 1787460 - RNA, 19 nt, Artificial Sequence
  Description of Artificial Sequence: Synthetic oligonucleotide
  Antisense strand to SEQ ID NO: 1787459
uuacaugucugcuaacaca

SEQ ID NO: 1787461 - RNA, 19 nt, Artificial Sequence
  Description of Artificial Sequence: Synthetic oligonucleotide
  Sense strand starting at position 249 of SEQ ID NO: 1562993
aucagaguuccuuggugac

SEQ ID NO: 1787462 - RNA, 19 nt, Artificial Sequence
  Description of Artificial Sequence: Synthetic oligonucleotide
  Antisense strand to SEQ ID NO: 1787461
gucaccaaggaacucugau

SEQ ID NO: 1787463 - RNA, 19 nt, Artificial Sequence
  Description of Artificial Sequence: Synthetic oligonucleotide
  Sense strand starting at position 251 of SEQ ID NO: 1562993
cagaguuccuuggugacca

SEQ ID NO: 1787464 - RNA, 19 nt, Artificial Sequence
  Description of Artificial Sequence: Synthetic oligonucleotide
  Antisense strand to SEQ ID NO: 1787463
uggucaccaaggaacucug

SEQ ID NO: 1787465 - RNA, 19 nt, Artificial Sequence
  Description of Artificial Sequence: Synthetic oligonucleotide
  Sense strand starting at position 274 of SEQ ID NO: 1562993
ccuuguuaaugaccaguaa

SEQ ID NO: 1787466 - RNA, 19 nt, Artificial Sequence
  Description of Artificial Sequence: Synthetic oligonucleotide
  Antisense strand to SEQ ID NO: 1787465
uuacuggucauuaacaagg

SEQ ID NO: 1787467 - RNA, 19 nt, Artificial Sequence
  Description of Artificial Sequence: Synthetic oligonucleotide
  Sense strand starting at position 275 of SEQ ID NO: 1562993
cuuguuaaugaccaguaau

SEQ ID NO: 1787468 - RNA, 19 nt, Artificial Sequence
  Description of Artificial Sequence: Synthetic oligonucleotide
  Antisense strand to SEQ ID NO: 1787467
auuacuggucauuaacaag

SEQ ID NO: 1787469 - RNA, 19 nt, Artificial Sequence
  Description of Artificial Sequence: Synthetic oligonucleotide
  Sense strand starting at position 278 of SEQ ID NO: 1562993
guuaaugaccaguaauauc

SEQ ID NO: 1787470 - RNA, 19 nt, Artificial Sequence
  Description of Artificial Sequence: Synthetic oligonucleotide
  Antisense strand to SEQ ID NO: 1787469
gauauuacuggucauuaac

SEQ ID NO: 1787471 - RNA, 19 nt, Artificial Sequence
  Description of Artificial Sequence: Synthetic oligonucleotide
  Sense strand starting at position 320 of SEQ ID NO: 1562993
acaguaggucucgauagua

SEQ ID NO: 1787472 - RNA, 19 nt, Artificial Sequence
  Description of Artificial Sequence: Synthetic oligonucleotide
  Antisense strand to SEQ ID NO: 1787471
uacuaucgagaccuacugu

SEQ ID NO: 1787473 - RNA, 19 nt, Artificial Sequence
  Description of Artificial Sequence: Synthetic oligonucleotide
  Sense strand starting at position 328 of SEQ ID NO: 1562993
ucucgauaguaggcuuaaa

SEQ ID NO: 1787474 - RNA, 19 nt, Artificial Sequence
  Description of Artificial Sequence: Synthetic oligonucleotide
  Antisense strand to SEQ ID NO: 1787473
uuuaagccuacuaucgaga

SEQ ID NO: 1787475 - RNA, 19 nt, Artificial Sequence
  Description of Artificial Sequence: Synthetic oligonucleotide
  Sense strand starting at position 391 of SEQ ID NO: 1562993
uaaagagauguguggucau

SEQ ID NO: 1787476 - RNA, 19 nt, Artificial Sequence
  Description of Artificial Sequence: Synthetic oligonucleotide
  Antisense strand to SEQ ID NO: 1787475
augaccacacaucucuuua

SEQ ID NO: 1787477 - RNA, 19 nt, Artificial Sequence
  Description of Artificial Sequence: Synthetic oligonucleotide
  Sense strand starting at position 394 of SEQ ID NO: 1562993
agagauguguggucauccu

SEQ ID NO: 1787478 - RNA, 19 nt, Artificial Sequence
  Description of Artificial Sequence: Synthetic oligonucleotide
  Antisense strand to SEQ ID NO: 1787477
aggaugaccacacaucucu

SEQ ID NO: 1787479 - RNA, 19 nt, Artificial Sequence
  Description of Artificial Sequence: Synthetic oligonucleotide
  Sense strand starting at position 487 of SEQ ID NO: 1562993
gauauaaagugagagacau

SEQ ID NO: 1787480 - RNA, 19 nt, Artificial Sequence
  Description of Artificial Sequence: Synthetic oligonucleotide
  Antisense strand to SEQ ID NO: 1787479
augucucucacuuuauauc

SEQ ID NO: 1787481 - RNA, 19 nt, Artificial Sequence
  Description of Artificial Sequence: Synthetic oligonucleotide
  Sense strand starting at position 668 of SEQ ID NO: 1562993
gucuuauaccagugagguu

SEQ ID NO: 1787482 - RNA, 19 nt, Artificial Sequence
  Description of Artificial Sequence: Synthetic oligonucleotide
  Antisense strand to SEQ ID NO: 1787481
aaccucacugguauaagac

SEQ ID NO: 1787483 - RNA, 19 nt, Artificial Sequence
  Description of Artificial Sequence: Synthetic oligonucleotide
  Sense strand starting at position 734 of SEQ ID NO: 1562993
cacagaucacuguaacggu

SEQ ID NO: 1787484 - RNA, 19 nt, Artificial Sequence
  Description of Artificial Sequence: Synthetic oligonucleotide
  Antisense strand to SEQ ID NO: 1787483
accguuacagugaucugug

SEQ ID NO: 1787485 - RNA, 19 nt, Artificial Sequence
  Description of Artificial Sequence: Synthetic oligonucleotide
  Sense strand starting at position 747 of SEQ ID NO: 1562993
aacggugcaccugaaauaa

SEQ ID NO: 1787486 - RNA, 19 nt, Artificial Sequence
  Description of Artificial Sequence: Synthetic oligonucleotide
  Antisense strand to SEQ ID NO: 1787485
uuauuucaggugcaccguu

SEQ ID NO: 1787487 - RNA, 19 nt, Artificial Sequence
  Description of Artificial Sequence: Synthetic oligonucleotide
  Sense strand starting at position 771 of SEQ ID NO: 1562993
uugaaauauagcgauaguu

SEQ ID NO: 1787488 - RNA, 19 nt, Artificial Sequence
  Description of Artificial Sequence: Synthetic oligonucleotide
  Antisense strand to SEQ ID NO: 1787487
aacuaucgcuauauuucaa

SEQ ID NO: 1787489 - RNA, 19 nt, Artificial Sequence
  Description of Artificial Sequence: Synthetic oligonucleotide
  Sense strand starting at position 773 of SEQ ID NO: 1562993
gaaauauagcgauaguuac

SEQ ID NO: 1787490 - RNA, 19 nt, Artificial Sequence
  Description of Artificial Sequence: Synthetic oligonucleotide
  Antisense strand to SEQ ID NO: 1787489
guaacuaucgcuauauuuc

SEQ ID NO: 1787491 - RNA, 19 nt, Artificial Sequence
  Description of Artificial Sequence: Synthetic oligonucleotide
  Sense strand starting at position 779 of SEQ ID NO: 1562993
uagcgauaguuaccaaagu

SEQ ID NO: 1787492 - RNA, 19 nt, Artificial Sequence
  Description of Artificial Sequence: Synthetic oligonucleotide
  Antisense strand to SEQ ID NO: 1787491
acuuugguaacuaucgcua

SEQ ID NO: 1787493 - RNA, 19 nt, Artificial Sequence
  Description of Artificial Sequence: Synthetic oligonucleotide
  Sense strand starting at position 848 of SEQ ID NO: 1562993
cagggcugcuugcuacaaa

SEQ ID NO: 1787494 - RNA, 19 nt, Artificial Sequence
  Description of Artificial Sequence: Synthetic oligonucleotide
  Antisense strand to SEQ ID NO: 1787493
uuuguagcaagcagcccug

SEQ ID NO: 1787495 - RNA, 19 nt, Artificial Sequence
  Description of Artificial Sequence: Synthetic oligonucleotide
  Sense strand starting at position 851 of SEQ ID NO: 1562993
ggcugcuugcuacaaacuu

SEQ ID NO: 1787496 - RNA, 19 nt, Artificial Sequence
  Description of Artificial Sequence: Synthetic oligonucleotide
  Antisense strand to SEQ ID NO: 1787495
aaguuuguagcaagcagcc

SEQ ID NO: 1787497 - RNA, 19 nt, Artificial Sequence
  Description of Artificial Sequence: Synthetic oligonucleotide
  Sense strand starting at position 900 of SEQ ID NO: 1562993
gugcaauaaagcgagguau

SEQ ID NO: 1787498 - RNA, 19 nt, Artificial Sequence
  Description of Artificial Sequence: Synthetic oligonucleotide
  Antisense strand to SEQ ID NO: 1787497
auaccucgcuuuauugcac

SEQ ID NO: 1787499 - RNA, 19 nt, Artificial Sequence
  Description of Artificial Sequence: Synthetic oligonucleotide
  Sense strand starting at position 912 of SEQ ID NO: 1562993
gagguauggcuguacucaa

SEQ ID NO: 1787500 - RNA, 19 nt, Artificial Sequence
  Description of Artificial Sequence: Synthetic oligonucleotide
  Antisense strand to SEQ ID NO: 1787499
uugaguacagccauaccuc

SEQ ID NO: 1787501 - RNA, 19 nt, Artificial Sequence
  Description of Artificial Sequence: Synthetic oligonucleotide
  Sense strand starting at position 1082 of SEQ ID NO: 1562993
ggaguaaggucgcccauau

SEQ ID NO: 1787502 - RNA, 19 nt, Artificial Sequence
  Description of Artificial Sequence: Synthetic oligonucleotide
  Antisense strand to SEQ ID NO: 1787501
auaugggcgaccuuacucc

SEQ ID NO: 1787503 - RNA, 19 nt, Artificial Sequence
  Description of Artificial Sequence: Synthetic oligonucleotide
  Sense strand starting at position 2049 of SEQ ID NO: 1562993
accggaacccguggaguau

SEQ ID NO: 1787504 - RNA, 19 nt, Artificial Sequence
  Description of Artificial Sequence: Synthetic oligonucleotide
  Antisense strand to SEQ ID NO: 1787503
auacuccacggguuccggu

SEQ ID NO: 1787505 - RNA, 19 nt, Artificial Sequence
  Description of Artificial Sequence: Synthetic oligonucleotide
  Sense strand starting at position 2141 of SEQ ID NO: 1562993
uuagaaaugccaggcucau

SEQ ID NO: 1787506 - RNA, 19 nt, Artificial Sequence
  Description of Artificial Sequence: Synthetic oligonucleotide
  Antisense strand to SEQ ID NO: 1787505
augagccuggcauuucuaa

SEQ ID NO: 1787507 - RNA, 19 nt, Artificial Sequence
  Description of Artificial Sequence: Synthetic oligonucleotide
  Sense strand starting at position 2311 of SEQ ID NO: 1562993
uuugaaagcacgugagauu

SEQ ID NO: 1787508 - RNA, 19 nt, Artificial Sequence
  Description of Artificial Sequence: Synthetic oligonucleotide
  Antisense strand to SEQ ID NO: 1787507
aaucucacgugcuuucaaa

SEQ ID NO: 1787509 - RNA, 19 nt, Artificial Sequence
  Description of Artificial Sequence: Synthetic oligonucleotide
  Sense strand starting at position 2923 of SEQ ID NO: 1562993
gagaucguguauuugcauu

SEQ ID NO: 1787510 - RNA, 19 nt, Artificial Sequence
  Description of Artificial Sequence: Synthetic oligonucleotide
  Antisense strand to SEQ ID NO: 1787509
aaugcaaauacacgaucuc

SEQ ID NO: 1787511 - RNA, 19 nt, Artificial Sequence
  Description of Artificial Sequence: Synthetic oligonucleotide
  Sense strand starting at position 2934 of SEQ ID NO: 1562993
uuugcauuugccugggcaa

SEQ ID NO: 1787512 - RNA, 19 nt, Artificial Sequence
  Description of Artificial Sequence: Synthetic oligonucleotide
  Antisense strand to SEQ ID NO: 1787511
uugcccaggcaaaugcaaa

SEQ ID NO: 1787513 - RNA, 19 nt, Artificial Sequence
  Description of Artificial Sequence: Synthetic oligonucleotide
  Sense strand starting at position 2936 of SEQ ID NO: 1562993
ugcauuugccugggcaaca

SEQ ID NO: 1787514 - RNA, 19 nt, Artificial Sequence
  Description of Artificial Sequence: Synthetic oligonucleotide
  Antisense strand to SEQ ID NO: 1787513
uguugcccaggcaaaugca

SEQ ID NO: 1787515 - RNA, 19 nt, Artificial Sequence
  Description of Artificial Sequence: Synthetic oligonucleotide
  Sense strand starting at position 2937 of SEQ ID NO: 1562993
gcauuugccugggcaacaa

SEQ ID NO: 1787516 - RNA, 19 nt, Artificial Sequence
  Description of Artificial Sequence: Synthetic oligonucleotide
  Antisense strand to SEQ ID NO: 1787515
uuguugcccaggcaaaugc

SEQ ID NO: 1787517 - RNA, 19 nt, Artificial Sequence
  Description of Artificial Sequence: Synthetic oligonucleotide
  Sense strand starting at position 2998 of SEQ ID NO: 1562993
ggaguucuacuuuagcgga

SEQ ID NO: 1787518 - RNA, 19 nt, Artificial Sequence
  Description of Artificial Sequence: Synthetic oligonucleotide
  Antisense strand to SEQ ID NO: 1787517
uccgcuaaaguagaacucc

SEQ ID NO: 1787519 - RNA, 19 nt, Artificial Sequence
  Description of Artificial Sequence: Synthetic oligonucleotide
  Sense strand starting at position 3011 of SEQ ID NO: 1562993
agcggacaucaaugcuaau

SEQ ID NO: 1787520 - RNA, 19 nt, Artificial Sequence
  Description of Artificial Sequence: Synthetic oligonucleotide
  Antisense strand to SEQ ID NO: 1787519
auuagcauugauguccgcu

SEQ ID NO: 1787521 - RNA, 19 nt, Artificial Sequence
  Description of Artificial Sequence: Synthetic oligonucleotide
  Sense strand starting at position 3053 of SEQ ID NO: 1562993
aacuuaauguggccaagua

SEQ ID NO: 1787522 - RNA, 19 nt, Artificial Sequence
  Description of Artificial Sequence: Synthetic oligonucleotide
  Antisense strand to SEQ ID NO: 1787521
uacuuggccacauuaaguu

SEQ ID NO: 1787523 - RNA, 19 nt, Artificial Sequence
  Description of Artificial Sequence: Synthetic oligonucleotide
  Sense strand starting at position 3216 of SEQ ID NO: 1562993
ucuagaugauuugagcuaa

SEQ ID NO: 1787524 - RNA, 19 nt, Artificial Sequence
  Description of Artificial Sequence: Synthetic oligonucleotide
  Antisense strand to SEQ ID NO: 1787523
uuagcucaaaucaucuaga

SEQ ID NO: 1787525 - RNA, 19 nt, Artificial Sequence
  Description of Artificial Sequence: Synthetic oligonucleotide
  Sense strand starting at position 3243 of SEQ ID NO: 1562993
ugcuuucuuccuguuaugu

SEQ ID NO: 1787526 - RNA, 19 nt, Artificial Sequence
  Description of Artificial Sequence: Synthetic oligonucleotide
  Antisense strand to SEQ ID NO: 1787525
acauaacaggaagaaagca

SEQ ID NO: 1787527 - RNA, 19 nt, Artificial Sequence
  Description of Artificial Sequence: Synthetic oligonucleotide
  Sense strand starting at position 3312 of SEQ ID NO: 1562993
ccauuugaguuacaaugaa

SEQ ID NO: 1787528 - RNA, 19 nt, Artificial Sequence
  Description of Artificial Sequence: Synthetic oligonucleotide
  Antisense strand to SEQ ID NO: 1787527
uucauuguaacucaaaugg

SEQ ID NO: 1787529 - RNA, 19 nt, Artificial Sequence
  Description of Artificial Sequence: Synthetic oligonucleotide
  Sense strand starting at position 3342 of SEQ ID NO: 1562993
ugggaaagauuagaagaua

SEQ ID NO: 1787530 - RNA, 19 nt, Artificial Sequence
  Description of Artificial Sequence: Synthetic oligonucleotide
  Antisense strand to SEQ ID NO: 1787529
uaucuucuaaucuuuccca

SEQ ID NO: 1787531 - RNA, 19 nt, Artificial Sequence
  Description of Artificial Sequence: Synthetic oligonucleotide
  Sense strand starting at position 3831 of SEQ ID NO: 1562993
aggguuacucuuggagcaa

SEQ ID NO: 1787532 - RNA, 19 nt, Artificial Sequence
  Description of Artificial Sequence: Synthetic oligonucleotide
  Antisense strand to SEQ ID NO: 1787531
uugcuccaagaguaacccu

SEQ ID NO: 1787533 - RNA, 19 nt, Artificial Sequence
  Description of Artificial Sequence: Synthetic oligonucleotide
  Sense strand starting at position 3918 of SEQ ID NO: 1562993
aggucauggccuggcauua

SEQ ID NO: 1787534 - RNA, 19 nt, Artificial Sequence
  Description of Artificial Sequence: Synthetic oligonucleotide
  Antisense strand to SEQ ID NO: 1787533
uaaugccaggccaugaccu

SEQ ID NO: 1787535 - RNA, 19 nt, Artificial Sequence
  Description of Artificial Sequence: Synthetic oligonucleotide
  Sense strand starting at position 3942 of SEQ ID NO: 1562993
ucucacaggugcucucaua

SEQ ID NO: 1787536 - RNA, 19 nt, Artificial Sequence
  Description of Artificial Sequence: Synthetic oligonucleotide
  Antisense strand to SEQ ID NO: 1787535
uaugagagcaccugugaga

SEQ ID NO: 1787537 - RNA, 19 nt, Artificial Sequence
  Description of Artificial Sequence: Synthetic oligonucleotide
  Sense strand starting at position 76 of SEQ ID NO: 1562994
agagguucuagauggaucu

SEQ ID NO: 1787538 - RNA, 19 nt, Artificial Sequence
  Description of Artificial Sequence: Synthetic oligonucleotide
  Antisense strand to SEQ ID NO: 1787537
agauccaucuagaaccucu

SEQ ID NO: 1787539 - RNA, 19 nt, Artificial Sequence
  Description of Artificial Sequence: Synthetic oligonucleotide
  Sense strand starting at position 87 of SEQ ID NO: 1562994
auggaucucccuuggaaua

SEQ ID NO: 1787540 - RNA, 19 nt, Artificial Sequence
  Description of Artificial Sequence: Synthetic oligonucleotide
  Antisense strand to SEQ ID NO: 1787539
uauuccaagggagauccau

SEQ ID NO: 1787541 - RNA, 19 nt, Artificial Sequence
  Description of Artificial Sequence: Synthetic oligonucleotide
  Sense strand starting at position 146 of SEQ ID NO: 1562994
ggccuuucugagggaucca

SEQ ID NO: 1787542 - RNA, 19 nt, Artificial Sequence
  Description of Artificial Sequence: Synthetic oligonucleotide
  Antisense strand to SEQ ID NO: 1787541
uggaucccucagaaaggcc

SEQ ID NO: 1787543 - RNA, 19 nt, Artificial Sequence
  Description of Artificial Sequence: Synthetic oligonucleotide
  Sense strand starting at position 172 of SEQ ID NO: 1562994
uugcaugucucauucgaaa

SEQ ID NO: 1787544 - RNA, 19 nt, Artificial Sequence
  Description of Artificial Sequence: Synthetic oligonucleotide
  Antisense strand to SEQ ID NO: 1787543
uuucgaaugagacaugcaa

SEQ ID NO: 1787545 - RNA, 19 nt, Artificial Sequence
  Description of Artificial Sequence: Synthetic oligonucleotide
  Sense strand starting at position 214 of SEQ ID NO: 1562994
uggagcucauucuuuaaac

SEQ ID NO: 1787546 - RNA, 19 nt, Artificial Sequence
  Description of Artificial Sequence: Synthetic oligonucleotide
  Antisense strand to SEQ ID NO: 1787545
guuuaaagaaugagcucca

SEQ ID NO: 1787547 - RNA, 19 nt, Artificial Sequence
  Description of Artificial Sequence: Synthetic oligonucleotide
  Sense strand starting at position 215 of SEQ ID NO: 1562994
ggagcucauucuuuaaaca

SEQ ID NO: 1787548 - RNA, 19 nt, Artificial Sequence
  Description of Artificial Sequence: Synthetic oligonucleotide
  Antisense strand to SEQ ID NO: 1787547
uguuuaaagaaugagcucc

SEQ ID NO: 1787549 - RNA, 19 nt, Artificial Sequence
  Description of Artificial Sequence: Synthetic oligonucleotide
  Sense strand starting at position 496 of SEQ ID NO: 1562994
ccacgaugucugcugccau

SEQ ID NO: 1787550 - RNA, 19 nt, Artificial Sequence
  Description of Artificial Sequence: Synthetic oligonucleotide
  Antisense strand to SEQ ID NO: 1787549
auggcagcagacaucgugg

SEQ ID NO: 1787551 - RNA, 19 nt, Artificial Sequence
  Description of Artificial Sequence: Synthetic oligonucleotide
  Sense strand starting at position 629 of SEQ ID NO: 1562994
gagucacagcccuaguuau

SEQ ID NO: 1787552 - RNA, 19 nt, Artificial Sequence
  Description of Artificial Sequence: Synthetic oligonucleotide
  Antisense strand to SEQ ID NO: 1787551
auaacuagggcugugacuc

SEQ ID NO: 1787553 - RNA, 19 nt, Artificial Sequence
  Description of Artificial Sequence: Synthetic oligonucleotide
  Sense strand starting at position 820 of SEQ ID NO: 1562994
acacuuagguaucuccaga

SEQ ID NO: 1787554 - RNA, 19 nt, Artificial Sequence
  Description of Artificial Sequence: Synthetic oligonucleotide
  Antisense strand to SEQ ID NO: 1787553
ucuggagauaccuaagugu

SEQ ID NO: 1787555 - RNA, 19 nt, Artificial Sequence
  Description of Artificial Sequence: Synthetic oligonucleotide
  Sense strand starting at position 1059 of SEQ ID NO: 1562994
ggcagaaccucucugauuc

SEQ ID NO: 1787556 - RNA, 19 nt, Artificial Sequence
  Description of Artificial Sequence: Synthetic oligonucleotide
  Antisense strand to SEQ ID NO: 1787555
gaaucagagagguucugcc

SEQ ID NO: 1787557 - RNA, 19 nt, Artificial Sequence
  Description of Artificial Sequence: Synthetic oligonucleotide
  Sense strand starting at position 1060 of SEQ ID NO: 1562994
gcagaaccucucugauucu

SEQ ID NO: 1787558 - RNA, 19 nt, Artificial Sequence
  Description of Artificial Sequence: Synthetic oligonucleotide
  Antisense strand to SEQ ID NO: 1787557
agaaucagagagguucugc

SEQ ID NO: 1787559 - RNA, 19 nt, Artificial Sequence
  Description of Artificial Sequence: Synthetic oligonucleotide
  Sense strand starting at position 1195 of SEQ ID NO: 1562994
ggcuccaaggacugagaau

SEQ ID NO: 1787560 - RNA, 19 nt, Artificial Sequence
  Description of Artificial Sequence: Synthetic oligonucleotide
  Antisense strand to SEQ ID NO: 1787559
auucucaguccuuggagcc

SEQ ID NO: 1787561 - RNA, 19 nt, Artificial Sequence
  Description of Artificial Sequence: Synthetic oligonucleotide
  Sense strand starting at position 1395 of SEQ ID NO: 1562994
agguccuaucgggauacau

SEQ ID NO: 1787562 - RNA, 19 nt, Artificial Sequence
  Description of Artificial Sequence: Synthetic oligonucleotide
  Antisense strand to SEQ ID NO: 1787561
auguaucccgauaggaccu

SEQ ID NO: 1787563 - RNA, 19 nt, Artificial Sequence
  Description of Artificial Sequence: Synthetic oligonucleotide
  Sense strand starting at position 1403 of SEQ ID NO: 1562994
ucgggauacauccaggugu

SEQ ID NO: 1787564 - RNA, 19 nt, Artificial Sequence
  Description of Artificial Sequence: Synthetic oligonucleotide
  Antisense strand to SEQ ID NO: 1787563
acaccuggauguaucccga

SEQ ID NO: 1787565 - RNA, 19 nt, Artificial Sequence
  Description of Artificial Sequence: Synthetic oligonucleotide
  Sense strand starting at position 2281 of SEQ ID NO: 1562994
auggguauaaugugguaua

SEQ ID NO: 1787566 - RNA, 19 nt, Artificial Sequence
  Description of Artificial Sequence: Synthetic oligonucleotide
  Antisense strand to SEQ ID NO: 1787565
uauaccacauuauacccau

SEQ ID NO: 1787567 - RNA, 19 nt, Artificial Sequence
  Description of Artificial Sequence: Synthetic oligonucleotide
  Sense strand starting at position 2313 of SEQ ID NO: 1562994
gggucucagaacgaucuga

SEQ ID NO: 1787568 - RNA, 19 nt, Artificial Sequence
  Description of Artificial Sequence: Synthetic oligonucleotide
  Antisense strand to SEQ ID NO: 1787567
ucagaucguucugagaccc

SEQ ID NO: 1787569 - RNA, 19 nt, Artificial Sequence
  Description of Artificial Sequence: Synthetic oligonucleotide
  Sense strand starting at position 2324 of SEQ ID NO: 1562994
cgaucugagccuuaaguga

SEQ ID NO: 1787570 - RNA, 19 nt, Artificial Sequence
  Description of Artificial Sequence: Synthetic oligonucleotide
  Antisense strand to SEQ ID NO: 1787569
ucacuuaaggcucagaucg

SEQ ID NO: 1787571 - RNA, 19 nt, Artificial Sequence
  Description of Artificial Sequence: Synthetic oligonucleotide
  Sense strand starting at position 2328 of SEQ ID NO: 1562994
cugagccuuaagugagaua

SEQ ID NO: 1787572 - RNA, 19 nt, Artificial Sequence
  Description of Artificial Sequence: Synthetic oligonucleotide
  Antisense strand to SEQ ID NO: 1787571
uaucucacuuaaggcucag

SEQ ID NO: 1787573 - RNA, 19 nt, Artificial Sequence
  Description of Artificial Sequence: Synthetic oligonucleotide
  Sense strand starting at position 2329 of SEQ ID NO: 1562994
ugagccuuaagugagauau

SEQ ID NO: 1787574 - RNA, 19 nt, Artificial Sequence
  Description of Artificial Sequence: Synthetic oligonucleotide
  Antisense strand to SEQ ID NO: 1787573
auaucucacuuaaggcuca

SEQ ID NO: 1787575 - RNA, 19 nt, Artificial Sequence
  Description of Artificial Sequence: Synthetic oligonucleotide
  Sense strand starting at position 2331 of SEQ ID NO: 1562994
agccuuaagugagauauug

SEQ ID NO: 1787576 - RNA, 19 nt, Artificial Sequence
  Description of Artificial Sequence: Synthetic oligonucleotide
  Antisense strand to SEQ ID NO: 1787575
caauaucucacuuaaggcu

SEQ ID NO: 1787577 - RNA, 19 nt, Artificial Sequence
  Description of Artificial Sequence: Synthetic oligonucleotide
  Sense strand starting at position 2351 of SEQ ID NO: 1562994
augugaagcccuuaauaca

SEQ ID NO: 1787578 - RNA, 19 nt, Artificial Sequence
  Description of Artificial Sequence: Synthetic oligonucleotide
  Antisense strand to SEQ ID NO: 1787577
uguauuaagggcuucacau

SEQ ID NO: 1787579 - RNA, 19 nt, Artificial Sequence
  Description of Artificial Sequence: Synthetic oligonucleotide
  Sense strand starting at position 2392 of SEQ ID NO: 1562994
agcauaaaugcuugccacu

SEQ ID NO: 1787580 - RNA, 19 nt, Artificial Sequence
  Description of Artificial Sequence: Synthetic oligonucleotide
  Antisense strand to SEQ ID NO: 1787579
aguggcaagcauuuaugcu

SEQ ID NO: 1787581 - RNA, 19 nt, Artificial Sequence
  Description of Artificial Sequence: Synthetic oligonucleotide
  Sense strand starting at position 3054 of SEQ ID NO: 1562994
gcacuugucagccaggauc

SEQ ID NO: 1787582 - RNA, 19 nt, Artificial Sequence
  Description of Artificial Sequence: Synthetic oligonucleotide
  Antisense strand to SEQ ID NO: 1787581
gauccuggcugacaagugc

SEQ ID NO: 1787583 - RNA, 19 nt, Artificial Sequence
  Description of Artificial Sequence: Synthetic oligonucleotide
  Sense strand starting at position 3167 of SEQ ID NO: 1562994
ugcaacucaggucaauauu

SEQ ID NO: 1787584 - RNA, 19 nt, Artificial Sequence
  Description of Artificial Sequence: Synthetic oligonucleotide
  Antisense strand to SEQ ID NO: 1787583
aauauugaccugaguugca

SEQ ID NO: 1787585 - RNA, 19 nt, Artificial Sequence
  Description of Artificial Sequence: Synthetic oligonucleotide
  Sense strand starting at position 3203 of SEQ ID NO: 1562994
gugccaagugacugugcua

SEQ ID NO: 1787586 - RNA, 19 nt, Artificial Sequence
  Description of Artificial Sequence: Synthetic oligonucleotide
  Antisense strand to SEQ ID NO: 1787585
uagcacagucacuuggcac

SEQ ID NO: 1787587 - RNA, 19 nt, Artificial Sequence
  Description of Artificial Sequence: Synthetic oligonucleotide
  Sense strand starting at position 3218 of SEQ ID NO: 1562994
gcuagagauuucuaaguga

SEQ ID NO: 1787588 - RNA, 19 nt, Artificial Sequence
  Description of Artificial Sequence: Synthetic oligonucleotide
  Antisense strand to SEQ ID NO: 1787587
ucacuuagaaaucucuagc

SEQ ID NO: 1787589 - RNA, 19 nt, Artificial Sequence
  Description of Artificial Sequence: Synthetic oligonucleotide
  Sense strand starting at position 3226 of SEQ ID NO: 1562994
uuucuaagugagcaagaca

SEQ ID NO: 1787590 - RNA, 19 nt, Artificial Sequence
  Description of Artificial Sequence: Synthetic oligonucleotide
  Antisense strand to SEQ ID NO: 1787589
ugucuugcucacuuagaaa

SEQ ID NO: 1787591 - RNA, 19 nt, Artificial Sequence
  Description of Artificial Sequence: Synthetic oligonucleotide
  Sense strand starting at position 3315 of SEQ ID NO: 1562994
cuggaaaguucuggagaaa

SEQ ID NO: 1787592 - RNA, 19 nt, Artificial Sequence
  Description of Artificial Sequence: Synthetic oligonucleotide
  Antisense strand to SEQ ID NO: 1787591
uuucuccagaacuuuccag

SEQ ID NO: 1787593 - RNA, 19 nt, Artificial Sequence
  Description of Artificial Sequence: Synthetic oligonucleotide
  Sense strand starting at position 3472 of SEQ ID NO: 1562994
ggaagagcaguugagucaa

SEQ ID NO: 1787594 - RNA, 19 nt, Artificial Sequence
  Description of Artificial Sequence: Synthetic oligonucleotide
  Antisense strand to SEQ ID NO: 1787593
uugacucaacugcucuucc

SEQ ID NO: 1787595 - RNA, 19 nt, Artificial Sequence
  Description of Artificial Sequence: Synthetic oligonucleotide
  Sense strand starting at position 3520 of SEQ ID NO: 1562994
gggaguguguccagucaaa

SEQ ID NO: 1787596 - RNA, 19 nt, Artificial Sequence
  Description of Artificial Sequence: Synthetic oligonucleotide
  Antisense strand to SEQ ID NO: 1787595
uuugacuggacacacuccc

SEQ ID NO: 1787597 - RNA, 19 nt, Artificial Sequence
  Description of Artificial Sequence: Synthetic oligonucleotide
  Sense strand starting at position 3530 of SEQ ID NO: 1562994
ccagucaaacagugacaaa

SEQ ID NO: 1787598 - RNA, 19 nt, Artificial Sequence
  Description of Artificial Sequence: Synthetic oligonucleotide
  Antisense strand to SEQ ID NO: 1787597
uuugucacuguuugacugg

SEQ ID NO: 1787599 - RNA, 19 nt, Artificial Sequence
  Description of Artificial Sequence: Synthetic oligonucleotide
  Sense strand starting at position 3598 of SEQ ID NO: 1562994
gugggauguuggccagaga

SEQ ID NO: 1787600 - RNA, 19 nt, Artificial Sequence
  Description of Artificial Sequence: Synthetic oligonucleotide
  Antisense strand to SEQ ID NO: 1787599
ucucuggccaacaucccac

SEQ ID NO: 1787601 - RNA, 19 nt, Artificial Sequence
  Description of Artificial Sequence: Synthetic oligonucleotide
  Sense strand starting at position 3601 of SEQ ID NO: 1562994
ggauguuggccagagaggu

SEQ ID NO: 1787602 - RNA, 19 nt, Artificial Sequence
  Description of Artificial Sequence: Synthetic oligonucleotide
  Antisense strand to SEQ ID NO: 1787601
accucucuggccaacaucc

SEQ ID NO: 1787603 - RNA, 19 nt, Artificial Sequence
  Description of Artificial Sequence: Synthetic oligonucleotide
  Sense strand starting at position 3633 of SEQ ID NO: 1562994
ccuguaugacuuugauggu

SEQ ID NO: 1787604 - RNA, 19 nt, Artificial Sequence
  Description of Artificial Sequence: Synthetic oligonucleotide
  Antisense strand to SEQ ID NO: 1787603
accaucaaagucauacagg

SEQ ID NO: 1787605 - RNA, 19 nt, Artificial Sequence
  Description of Artificial Sequence: Synthetic oligonucleotide
  Sense strand starting at position 3640 of SEQ ID NO: 1562994
gacuuugauggugauguua

SEQ ID NO: 1787606 - RNA, 19 nt, Artificial Sequence
  Description of Artificial Sequence: Synthetic oligonucleotide
  Antisense strand to SEQ ID NO: 1787605
uaacaucaccaucaaaguc

SEQ ID NO: 1787607 - RNA, 19 nt, Artificial Sequence
  Description of Artificial Sequence: Synthetic oligonucleotide
  Sense strand starting at position 3648 of SEQ ID NO: 1562994
uggugauguuaaggauuug

SEQ ID NO: 1787608 - RNA, 19 nt, Artificial Sequence
  Description of Artificial Sequence: Synthetic oligonucleotide
  Antisense strand to SEQ ID NO: 1787607
caaauccuuaacaucacca

SEQ ID NO: 1787609 - RNA, 19 nt, Artificial Sequence
  Description of Artificial Sequence: Synthetic oligonucleotide
  Sense strand starting at position 3841 of SEQ ID NO: 1562994
gaaauaaacugggaagaua

SEQ ID NO: 1787610 - RNA, 19 nt, Artificial Sequence
  Description of Artificial Sequence: Synthetic oligonucleotide
  Antisense strand to SEQ ID NO: 1787609
uaucuucccaguuuauuuc

SEQ ID NO: 1787611 - RNA, 19 nt, Artificial Sequence
  Description of Artificial Sequence: Synthetic oligonucleotide
  Sense strand starting at position 3849 of SEQ ID NO: 1562994
cugggaagauaauauguga

SEQ ID NO: 1787612 - RNA, 19 nt, Artificial Sequence
  Description of Artificial Sequence: Synthetic oligonucleotide
  Antisense strand to SEQ ID NO: 1787611
ucacauauuaucuucccag

SEQ ID NO: 1787613 - RNA, 19 nt, Artificial Sequence
  Description of Artificial Sequence: Synthetic oligonucleotide
  Sense strand starting at position 3856 of SEQ ID NO: 1562994
gauaauaugugaucccaga

SEQ ID NO: 1787614 - RNA, 19 nt, Artificial Sequence
  Description of Artificial Sequence: Synthetic oligonucleotide
  Antisense strand to SEQ ID NO: 1787613
ucugggaucacauauuauc

SEQ ID NO: 1787615 - RNA, 19 nt, Artificial Sequence
  Description of Artificial Sequence: Synthetic oligonucleotide
  Sense strand starting at position 3905 of SEQ ID NO: 1562994
ggaugaaaucaagguggcu

SEQ ID NO: 1787616 - RNA, 19 nt, Artificial Sequence
  Description of Artificial Sequence: Synthetic oligonucleotide
  Antisense strand to SEQ ID NO: 1787615
agccaccuugauuucaucc

SEQ ID NO: 1787617 - RNA, 19 nt, Artificial Sequence
  Description of Artificial Sequence: Synthetic oligonucleotide
  Sense strand starting at position 1 of SEQ ID NO: 1562995
ugaagcaauuguuuguuua

SEQ ID NO: 1787618 - RNA, 19 nt, Artificial Sequence
  Description of Artificial Sequence: Synthetic oligonucleotide
  Antisense strand to SEQ ID NO: 1787617
uaaacaaacaauugcuuca

SEQ ID NO: 1787619 - RNA, 19 nt, Artificial Sequence
  Description of Artificial Sequence: Synthetic oligonucleotide
  Sense strand starting at position 43 of SEQ ID NO: 1562995
ggguuauguuaaccuauua

SEQ ID NO: 1787620 - RNA, 19 nt, Artificial Sequence
  Description of Artificial Sequence: Synthetic oligonucleotide
  Antisense strand to SEQ ID NO: 1787619
uaauagguuaacauaaccc

SEQ ID NO: 1787621 - RNA, 19 nt, Artificial Sequence
  Description of Artificial Sequence: Synthetic oligonucleotide
  Sense strand starting at position 935 of SEQ ID NO: 1562995
cuguuuagagugcagagau

SEQ ID NO: 1787622 - RNA, 19 nt, Artificial Sequence
  Description of Artificial Sequence: Synthetic oligonucleotide
  Antisense strand to SEQ ID NO: 1787621
aucucugcacucuaaacag

SEQ ID NO: 1787623 - RNA, 19 nt, Artificial Sequence
  Description of Artificial Sequence: Synthetic oligonucleotide
  Sense strand starting at position 979 of SEQ ID NO: 1562995
gcgggaaacauauguaccu

SEQ ID NO: 1787624 - RNA, 19 nt, Artificial Sequence
  Description of Artificial Sequence: Synthetic oligonucleotide
  Antisense strand to SEQ ID NO: 1787623
agguacauauguuucccgc

SEQ ID NO: 1787625 - RNA, 19 nt, Artificial Sequence
  Description of Artificial Sequence: Synthetic oligonucleotide
  Sense strand starting at position 980 of SEQ ID NO: 1562995
cgggaaacauauguaccua

SEQ ID NO: 1787626 - RNA, 19 nt, Artificial Sequence
  Description of Artificial Sequence: Synthetic oligonucleotide
  Antisense strand to SEQ ID NO: 1787625
uagguacauauguuucccg

SEQ ID NO: 1787627 - RNA, 19 nt, Artificial Sequence
  Description of Artificial Sequence: Synthetic oligonucleotide
  Sense strand starting at position 1032 of SEQ ID NO: 1562995
gaguaaacgagucgaaguu

SEQ ID NO: 1787628 - RNA, 19 nt, Artificial Sequence
  Description of Artificial Sequence: Synthetic oligonucleotide
  Antisense strand to SEQ ID NO: 1787627
aacuucgacucguuuacuc

SEQ ID NO: 1787629 - RNA, 19 nt, Artificial Sequence
  Description of Artificial Sequence: Synthetic oligonucleotide
  Sense strand starting at position 1067 of SEQ ID NO: 1562995
gaaucagagucugauuuga

SEQ ID NO: 1787630 - RNA, 19 nt, Artificial Sequence
  Description of Artificial Sequence: Synthetic oligonucleotide
  Antisense strand to SEQ ID NO: 1787629
ucaaaucagacucugauuc

SEQ ID NO: 1787631 - RNA, 19 nt, Artificial Sequence
  Description of Artificial Sequence: Synthetic oligonucleotide
  Sense strand starting at position 1271 of SEQ ID NO: 1562995
gagccuaggucaguaaacu

SEQ ID NO: 1787632 - RNA, 19 nt, Artificial Sequence
  Description of Artificial Sequence: Synthetic oligonucleotide
  Antisense strand to SEQ ID NO: 1787631
aguuuacugaccuaggcuc

SEQ ID NO: 1787633 - RNA, 19 nt, Artificial Sequence
  Description of Artificial Sequence: Synthetic oligonucleotide
  Sense strand starting at position 1272 of SEQ ID NO: 1562995
agccuaggucaguaaacua

SEQ ID NO: 1787634 - RNA, 19 nt, Artificial Sequence
  Description of Artificial Sequence: Synthetic oligonucleotide
  Antisense strand to SEQ ID NO: 1787633
uaguuuacugaccuaggcu

SEQ ID NO: 1787635 - RNA, 19 nt, Artificial Sequence
  Description of Artificial Sequence: Synthetic oligonucleotide
  Sense strand starting at position 1283 of SEQ ID NO: 1562995
guaaacuaaguaugagaau

SEQ ID NO: 1787636 - RNA, 19 nt, Artificial Sequence
  Description of Artificial Sequence: Synthetic oligonucleotide
  Antisense strand to SEQ ID NO: 1787635
auucucauacuuaguuuac

SEQ ID NO: 1787637 - RNA, 19 nt, Artificial Sequence
  Description of Artificial Sequence: Synthetic oligonucleotide
  Sense strand starting at position 1332 of SEQ ID NO: 1562995
ggaugauucuggcuaacgu

SEQ ID NO: 1787638 - RNA, 19 nt, Artificial Sequence
  Description of Artificial Sequence: Synthetic oligonucleotide
  Antisense strand to SEQ ID NO: 1787637
acguuagccagaaucaucc

SEQ ID NO: 1787639 - RNA, 19 nt, Artificial Sequence
  Description of Artificial Sequence: Synthetic oligonucleotide
  Sense strand starting at position 1333 of SEQ ID NO: 1562995
gaugauucuggcuaacgua

SEQ ID NO: 1787640 - RNA, 19 nt, Artificial Sequence
  Description of Artificial Sequence: Synthetic oligonucleotide
  Antisense strand to SEQ ID NO: 1787639
uacguuagccagaaucauc

SEQ ID NO: 1787641 - RNA, 19 nt, Artificial Sequence
  Description of Artificial Sequence: Synthetic oligonucleotide
  Sense strand starting at position 1460 of SEQ ID NO: 1562995
gcaaguuaaaccugaggag

SEQ ID NO: 1787642 - RNA, 19 nt, Artificial Sequence
  Description of Artificial Sequence: Synthetic oligonucleotide
  Antisense strand to SEQ ID NO: 1787641
cuccucagguuuaacuugc

SEQ ID NO: 1787643 - RNA, 19 nt, Artificial Sequence
  Description of Artificial Sequence: Synthetic oligonucleotide
  Sense strand starting at position 2076 of SEQ ID NO: 1562995
caugcauagcgaugauuuc

SEQ ID NO: 1787644 - RNA, 19 nt, Artificial Sequence
  Description of Artificial Sequence: Synthetic oligonucleotide
  Antisense strand to SEQ ID NO: 1787643
gaaaucaucgcuaugcaug

SEQ ID NO: 1787645 - RNA, 19 nt, Artificial Sequence
  Description of Artificial Sequence: Synthetic oligonucleotide
  Sense strand starting at position 2086 of SEQ ID NO: 1562995
gaugauuucuucgucugca

SEQ ID NO: 1787646 - RNA, 19 nt, Artificial Sequence
  Description of Artificial Sequence: Synthetic oligonucleotide
  Antisense strand to SEQ ID NO: 1787645
ugcagacgaagaaaucauc

SEQ ID NO: 1787647 - RNA, 19 nt, Artificial Sequence
  Description of Artificial Sequence: Synthetic oligonucleotide
  Sense strand starting at position 2087 of SEQ ID NO: 1562995
augauuucuucgucugcac

SEQ ID NO: 1787648 - RNA, 19 nt, Artificial Sequence
  Description of Artificial Sequence: Synthetic oligonucleotide
  Antisense strand to SEQ ID NO: 1787647
gugcagacgaagaaaucau

SEQ ID NO: 1787649 - RNA, 19 nt, Artificial Sequence
  Description of Artificial Sequence: Synthetic oligonucleotide
  Sense strand starting at position 2110 of SEQ ID NO: 1562995
gccugagaagcuugggaca

SEQ ID NO: 1787650 - RNA, 19 nt, Artificial Sequence
  Description of Artificial Sequence: Synthetic oligonucleotide
  Antisense strand to SEQ ID NO: 1787649
ugucccaagcuucucaggc

SEQ ID NO: 1787651 - RNA, 19 nt, Artificial Sequence
  Description of Artificial Sequence: Synthetic oligonucleotide
  Sense strand starting at position 2159 of SEQ ID NO: 1562995
ggagauagacgcugcaaau

SEQ ID NO: 1787652 - RNA, 19 nt, Artificial Sequence
  Description of Artificial Sequence: Synthetic oligonucleotide
  Antisense strand to SEQ ID NO: 1787651
auuugcagcgucuaucucc

SEQ ID NO: 1787653 - RNA, 19 nt, Artificial Sequence
  Description of Artificial Sequence: Synthetic oligonucleotide
  Sense strand starting at position 2523 of SEQ ID NO: 1562995
gaguaccuucugugucaga

SEQ ID NO: 1787654 - RNA, 19 nt, Artificial Sequence
  Description of Artificial Sequence: Synthetic oligonucleotide
  Antisense strand to SEQ ID NO: 1787653
ucugacacagaagguacuc

SEQ ID NO: 1787655 - RNA, 19 nt, Artificial Sequence
  Description of Artificial Sequence: Synthetic oligonucleotide
  Sense strand starting at position 2656 of SEQ ID NO: 1562995
aggcucuccugguucuuaa

SEQ ID NO: 1787656 - RNA, 19 nt, Artificial Sequence
  Description of Artificial Sequence: Synthetic oligonucleotide
  Antisense strand to SEQ ID NO: 1787655
uuaagaaccaggagagccu

SEQ ID NO: 1787657 - RNA, 19 nt, Artificial Sequence
  Description of Artificial Sequence: Synthetic oligonucleotide
  Sense strand starting at position 2697 of SEQ ID NO: 1562995
gaaagagggcauuaagugu

SEQ ID NO: 1787658 - RNA, 19 nt, Artificial Sequence
  Description of Artificial Sequence: Synthetic oligonucleotide
  Antisense strand to SEQ ID NO: 1787657
acacuuaaugcccucuuuc

SEQ ID NO: 1787659 - RNA, 19 nt, Artificial Sequence
  Description of Artificial Sequence: Synthetic oligonucleotide
  Sense strand starting at position 2775 of SEQ ID NO: 1562995
accugacaucuggguaguu

SEQ ID NO: 1787660 - RNA, 19 nt, Artificial Sequence
  Description of Artificial Sequence: Synthetic oligonucleotide
  Antisense strand to SEQ ID NO: 1787659
aacuacccagaugucaggu

SEQ ID NO: 1787661 - RNA, 19 nt, Artificial Sequence
  Description of Artificial Sequence: Synthetic oligonucleotide
  Sense strand starting at position 2891 of SEQ ID NO: 1562995
aaaugaaccacgugugguu

SEQ ID NO: 1787662 - RNA, 19 nt, Artificial Sequence
  Description of Artificial Sequence: Synthetic oligonucleotide
  Antisense strand to SEQ ID NO: 1787661
aaccacacgugguucauuu

SEQ ID NO: 1787663 - RNA, 19 nt, Artificial Sequence
  Description of Artificial Sequence: Synthetic oligonucleotide
  Sense strand starting at position 3027 of SEQ ID NO: 1562995
gcaagaucuugucuauaua

SEQ ID NO: 1787664 - RNA, 19 nt, Artificial Sequence
  Description of Artificial Sequence: Synthetic oligonucleotide
  Antisense strand to SEQ ID NO: 1787663
uauauagacaagaucuugc

SEQ ID NO: 1787665 - RNA, 19 nt, Artificial Sequence
  Description of Artificial Sequence: Synthetic oligonucleotide
  Sense strand starting at position 3237 of SEQ ID NO: 1562995
gcauacaaguauguaaaua

SEQ ID NO: 1787666 - RNA, 19 nt, Artificial Sequence
  Description of Artificial Sequence: Synthetic oligonucleotide
  Antisense strand to SEQ ID NO: 1787665
uauuuacauacuuguaugc

SEQ ID NO: 1787667 - RNA, 19 nt, Artificial Sequence
  Description of Artificial Sequence: Synthetic oligonucleotide
  Sense strand starting at position 3347 of SEQ ID NO: 1562995
ucgccaaucacuggagauc

SEQ ID NO: 1787668 - RNA, 19 nt, Artificial Sequence
  Description of Artificial Sequence: Synthetic oligonucleotide
  Antisense strand to SEQ ID NO: 1787667
gaucuccagugauuggcga

SEQ ID NO: 1787669 - RNA, 19 nt, Artificial Sequence
  Description of Artificial Sequence: Synthetic oligonucleotide
  Sense strand starting at position 3348 of SEQ ID NO: 1562995
cgccaaucacuggagauca

SEQ ID NO: 1787670 - RNA, 19 nt, Artificial Sequence
  Description of Artificial Sequence: Synthetic oligonucleotide
  Antisense strand to SEQ ID NO: 1787669
ugaucuccagugauuggcg

SEQ ID NO: 1787671 - RNA, 19 nt, Artificial Sequence
  Description of Artificial Sequence: Synthetic oligonucleotide
  Sense strand starting at position 3358 of SEQ ID NO: 1562995
uggagaucauuagucuaac

SEQ ID NO: 1787672 - RNA, 19 nt, Artificial Sequence
  Description of Artificial Sequence: Synthetic oligonucleotide
  Antisense strand to SEQ ID NO: 1787671
guuagacuaaugaucucca

SEQ ID NO: 1787673 - RNA, 19 nt, Artificial Sequence
  Description of Artificial Sequence: Synthetic oligonucleotide
  Sense strand starting at position 3359 of SEQ ID NO: 1562995
ggagaucauuagucuaaca

SEQ ID NO: 1787674 - RNA, 19 nt, Artificial Sequence
  Description of Artificial Sequence: Synthetic oligonucleotide
  Antisense strand to SEQ ID NO: 1787673
uguuagacuaaugaucucc

SEQ ID NO: 1787675 - RNA, 19 nt, Artificial Sequence
  Description of Artificial Sequence: Synthetic oligonucleotide
  Sense strand starting at position 3390 of SEQ ID NO: 1562995
caggaacaagacuguuauu

SEQ ID NO: 1787676 - RNA, 19 nt, Artificial Sequence
  Description of Artificial Sequence: Synthetic oligonucleotide
  Antisense strand to SEQ ID NO: 1787675
aauaacagucuuguuccug

SEQ ID NO: 1787677 - RNA, 19 nt, Artificial Sequence
  Description of Artificial Sequence: Synthetic oligonucleotide
  Sense strand starting at position 3525 of SEQ ID NO: 1562995
ccaaguugcccauagcaga

SEQ ID NO: 1787678 - RNA, 19 nt, Artificial Sequence
  Description of Artificial Sequence: Synthetic oligonucleotide
  Antisense strand to SEQ ID NO: 1787677
ucugcuaugggcaacuugg

SEQ ID NO: 1787679 - RNA, 19 nt, Artificial Sequence
  Description of Artificial Sequence: Synthetic oligonucleotide
  Sense strand starting at position 3556 of SEQ ID NO: 1562995
cagaauaucuggucagagu

SEQ ID NO: 1787680 - RNA, 19 nt, Artificial Sequence
  Description of Artificial Sequence: Synthetic oligonucleotide
  Antisense strand to SEQ ID NO: 1787679
acucugaccagauauucug

SEQ ID NO: 1787681 - RNA, 19 nt, Artificial Sequence
  Description of Artificial Sequence: Synthetic oligonucleotide
  Sense strand starting at position 3567 of SEQ ID NO: 1562995
gucagagucccaugacuua

SEQ ID NO: 1787682 - RNA, 19 nt, Artificial Sequence
  Description of Artificial Sequence: Synthetic oligonucleotide
  Antisense strand to SEQ ID NO: 1787681
uaagucaugggacucugac

SEQ ID NO: 1787683 - RNA, 19 nt, Artificial Sequence
  Description of Artificial Sequence: Synthetic oligonucleotide
  Sense strand starting at position 3570 of SEQ ID NO: 1562995
agagucccaugacuuaauu

SEQ ID NO: 1787684 - RNA, 19 nt, Artificial Sequence
  Description of Artificial Sequence: Synthetic oligonucleotide
  Antisense strand to SEQ ID NO: 1787683
aauuaagucaugggacucu

SEQ ID NO: 1787685 - RNA, 19 nt, Artificial Sequence
  Description of Artificial Sequence: Synthetic oligonucleotide
  Sense strand starting at position 3579 of SEQ ID NO: 1562995
ugacuuaauuuccuugugu

SEQ ID NO: 1787686 - RNA, 19 nt, Artificial Sequence
  Description of Artificial Sequence: Synthetic oligonucleotide
  Antisense strand to SEQ ID NO: 1787685
acacaaggaaauuaaguca

SEQ ID NO: 1787687 - RNA, 19 nt, Artificial Sequence
  Description of Artificial Sequence: Synthetic oligonucleotide
  Sense strand starting at position 3581 of SEQ ID NO: 1562995
acuuaauuuccuuguguca

SEQ ID NO: 1787688 - RNA, 19 nt, Artificial Sequence
  Description of Artificial Sequence: Synthetic oligonucleotide
  Antisense strand to SEQ ID NO: 1787687
ugacacaaggaaauuaagu

SEQ ID NO: 1787689 - RNA, 19 nt, Artificial Sequence
  Description of Artificial Sequence: Synthetic oligonucleotide
  Sense strand starting at position 3592 of SEQ ID NO: 1562995
uugugucagacuuaguauc

SEQ ID NO: 1787690 - RNA, 19 nt, Artificial Sequence
  Description of Artificial Sequence: Synthetic oligonucleotide
  Antisense strand to SEQ ID NO: 1787689
gauacuaagucugacacaa

SEQ ID NO: 1787691 - RNA, 19 nt, Artificial Sequence
  Description of Artificial Sequence: Synthetic oligonucleotide
  Sense strand starting at position 3947 of SEQ ID NO: 1562995
cagaguaacucuuucugga

SEQ ID NO: 1787692 - RNA, 19 nt, Artificial Sequence
  Description of Artificial Sequence: Synthetic oligonucleotide
  Antisense strand to SEQ ID NO: 1787691
uccagaaagaguuacucug

SEQ ID NO: 1787693 - RNA, 19 nt, Artificial Sequence
  Description of Artificial Sequence: Synthetic oligonucleotide
  Sense strand starting at position 3949 of SEQ ID NO: 1562995
gaguaacucuuucuggaag

SEQ ID NO: 1787694 - RNA, 19 nt, Artificial Sequence
  Description of Artificial Sequence: Synthetic oligonucleotide
  Antisense strand to SEQ ID NO: 1787693
cuuccagaaagaguuacuc

SEQ ID NO: 1787695 - RNA, 19 nt, Artificial Sequence
  Description of Artificial Sequence: Synthetic oligonucleotide
  Sense strand starting at position 3971 of SEQ ID NO: 1562995
agcaaauggcucuaugcua

SEQ ID NO: 1787696 - RNA, 19 nt, Artificial Sequence
  Description of Artificial Sequence: Synthetic oligonucleotide
  Antisense strand to SEQ ID NO: 1787695
uagcauagagccauuugcu

SEQ ID NO: 1787697 - RNA, 19 nt, Artificial Sequence
  Description of Artificial Sequence: Synthetic oligonucleotide
  Sense strand starting at position 294 of SEQ ID NO: 1562996
cgcuguucuaccugggaag

SEQ ID NO: 1787698 - RNA, 19 nt, Artificial Sequence
  Description of Artificial Sequence: Synthetic oligonucleotide
  Antisense strand to SEQ ID NO: 1787697
cuucccagguagaacagcg

SEQ ID NO: 1787699 - RNA, 19 nt, Artificial Sequence
  Description of Artificial Sequence: Synthetic oligonucleotide
  Sense strand starting at position 296 of SEQ ID NO: 1562996
cuguucuaccugggaagga

SEQ ID NO: 1787700 - RNA, 19 nt, Artificial Sequence
  Description of Artificial Sequence: Synthetic oligonucleotide
  Antisense strand to SEQ ID NO: 1787699
uccuucccagguagaacag

SEQ ID NO: 1787701 - RNA, 19 nt, Artificial Sequence
  Description of Artificial Sequence: Synthetic oligonucleotide
  Sense strand starting at position 356 of SEQ ID NO: 1562996
gcaggaaacuuucuccugu

SEQ ID NO: 1787702 - RNA, 19 nt, Artificial Sequence
  Description of Artificial Sequence: Synthetic oligonucleotide
  Antisense strand to SEQ ID NO: 1787701
acaggagaaaguuuccugc

SEQ ID NO: 1787703 - RNA, 19 nt, Artificial Sequence
  Description of Artificial Sequence: Synthetic oligonucleotide
  Sense strand starting at position 391 of SEQ ID NO: 1562996
ggccaacagcuugaggaau

SEQ ID NO: 1787704 - RNA, 19 nt, Artificial Sequence
  Description of Artificial Sequence: Synthetic oligonucleotide
  Antisense strand to SEQ ID NO: 1787703
auuccucaagcuguuggcc

SEQ ID NO: 1787705 - RNA, 19 nt, Artificial Sequence
  Description of Artificial Sequence: Synthetic oligonucleotide
  Sense strand starting at position 446 of SEQ ID NO: 1562996
ggcccucugcuccgagaca

SEQ ID NO: 1787706 - RNA, 19 nt, Artificial Sequence
  Description of Artificial Sequence: Synthetic oligonucleotide
  Antisense strand to SEQ ID NO: 1787705
ugucucggagcagagggcc

SEQ ID NO: 1787707 - RNA, 19 nt, Artificial Sequence
  Description of Artificial Sequence: Synthetic oligonucleotide
  Sense strand starting at position 594 of SEQ ID NO: 1562996
gagccugccuggguuagaa

SEQ ID NO: 1787708 - RNA, 19 nt, Artificial Sequence
  Description of Artificial Sequence: Synthetic oligonucleotide
  Antisense strand to SEQ ID NO: 1787707
uucuaacccaggcaggcuc

SEQ ID NO: 1787709 - RNA, 19 nt, Artificial Sequence
  Description of Artificial Sequence: Synthetic oligonucleotide
  Sense strand starting at position 775 of SEQ ID NO: 1562996
gggcuguguccugagagag

SEQ ID NO: 1787710 - RNA, 19 nt, Artificial Sequence
  Description of Artificial Sequence: Synthetic oligonucleotide
  Antisense strand to SEQ ID NO: 1787709
cucucucaggacacagccc

SEQ ID NO: 1787711 - RNA, 19 nt, Artificial Sequence
  Description of Artificial Sequence: Synthetic oligonucleotide
  Sense strand starting at position 1418 of SEQ ID NO: 1562996
ccaggucuguggcccuaau

SEQ ID NO: 1787712 - RNA, 19 nt, Artificial Sequence
  Description of Artificial Sequence: Synthetic oligonucleotide
  Antisense strand to SEQ ID NO: 1787711
auuagggccacagaccugg

SEQ ID NO: 1787713 - RNA, 19 nt, Artificial Sequence
  Description of Artificial Sequence: Synthetic oligonucleotide
  Sense strand starting at position 1648 of SEQ ID NO: 1562996
uccagcucugcccgagaga

SEQ ID NO: 1787714 - RNA, 19 nt, Artificial Sequence
  Description of Artificial Sequence: Synthetic oligonucleotide
  Antisense strand to SEQ ID NO: 1787713
ucucucgggcagagcugga

SEQ ID NO: 1787715 - RNA, 19 nt, Artificial Sequence
  Description of Artificial Sequence: Synthetic oligonucleotide
  Sense strand starting at position 2326 of SEQ ID NO: 1562996
gcagacccgaaguauaaau

SEQ ID NO: 1787716 - RNA, 19 nt, Artificial Sequence
  Description of Artificial Sequence: Synthetic oligonucleotide
  Antisense strand to SEQ ID NO: 1787715
auuuauacuucgggucugc

SEQ ID NO: 1787717 - RNA, 19 nt, Artificial Sequence
  Description of Artificial Sequence: Synthetic oligonucleotide
  Sense strand starting at position 2575 of SEQ ID NO: 1562996
cggacucgcuguuucuaau

SEQ ID NO: 1787718 - RNA, 19 nt, Artificial Sequence
  Description of Artificial Sequence: Synthetic oligonucleotide
  Antisense strand to SEQ ID NO: 1787717
auuagaaacagcgaguccg

SEQ ID NO: 1787719 - RNA, 19 nt, Artificial Sequence
  Description of Artificial Sequence: Synthetic oligonucleotide
  Sense strand starting at position 2582 of SEQ ID NO: 1562996
gcuguuucuaauggucuga

SEQ ID NO: 1787720 - RNA, 19 nt, Artificial Sequence
  Description of Artificial Sequence: Synthetic oligonucleotide
  Antisense strand to SEQ ID NO: 1787719
ucagaccauuagaaacagc

SEQ ID NO: 1787721 - RNA, 19 nt, Artificial Sequence
  Description of Artificial Sequence: Synthetic oligonucleotide
  Sense strand starting at position 2653 of SEQ ID NO: 1562996
gccagcucccuuuaaggga

SEQ ID NO: 1787722 - RNA, 19 nt, Artificial Sequence
  Description of Artificial Sequence: Synthetic oligonucleotide
  Antisense strand to SEQ ID NO: 1787721
ucccuuaaagggagcuggc

SEQ ID NO: 1787723 - RNA, 19 nt, Artificial Sequence
  Description of Artificial Sequence: Synthetic oligonucleotide
  Sense strand starting at position 2744 of SEQ ID NO: 1562996
ggcaguuugcuccaucugu

SEQ ID NO: 1787724 - RNA, 19 nt, Artificial Sequence
  Description of Artificial Sequence: Synthetic oligonucleotide
  Antisense strand to SEQ ID NO: 1787723
acagauggagcaaacugcc

SEQ ID NO: 1787725 - RNA, 19 nt, Artificial Sequence
  Description of Artificial Sequence: Synthetic oligonucleotide
  Sense strand starting at position 2813 of SEQ ID NO: 1562996
cuucuuguagggcaaugau

SEQ ID NO: 1787726 - RNA, 19 nt, Artificial Sequence
  Description of Artificial Sequence: Synthetic oligonucleotide
  Antisense strand to SEQ ID NO: 1787725
aucauugcccuacaagaag

SEQ ID NO: 1787727 - RNA, 19 nt, Artificial Sequence
  Description of Artificial Sequence: Synthetic oligonucleotide
  Sense strand starting at position 2816 of SEQ ID NO: 1562996
cuuguagggcaaugaugua

SEQ ID NO: 1787728 - RNA, 19 nt, Artificial Sequence
  Description of Artificial Sequence: Synthetic oligonucleotide
  Antisense strand to SEQ ID NO: 1787727
uacaucauugcccuacaag

SEQ ID NO: 1787729 - RNA, 19 nt, Artificial Sequence
  Description of Artificial Sequence: Synthetic oligonucleotide
  Sense strand starting at position 2859 of SEQ ID NO: 1562996
cucaguaguucuccucuuu

SEQ ID NO: 1787730 - RNA, 19 nt, Artificial Sequence
  Description of Artificial Sequence: Synthetic oligonucleotide
  Antisense strand to SEQ ID NO: 1787729
aaagaggagaacuacugag

SEQ ID NO: 1787731 - RNA, 19 nt, Artificial Sequence
  Description of Artificial Sequence: Synthetic oligonucleotide
  Sense strand starting at position 2894 of SEQ ID NO: 1562996
cagaguuaggcauacagua

SEQ ID NO: 1787732 - RNA, 19 nt, Artificial Sequence
  Description of Artificial Sequence: Synthetic oligonucleotide
  Antisense strand to SEQ ID NO: 1787731
uacuguaugccuaacucug

SEQ ID NO: 1787733 - RNA, 19 nt, Artificial Sequence
  Description of Artificial Sequence: Synthetic oligonucleotide
  Sense strand starting at position 3055 of SEQ ID NO: 1562996
ugcacuuugcuuuguuagu

SEQ ID NO: 1787734 - RNA, 19 nt, Artificial Sequence
  Description of Artificial Sequence: Synthetic oligonucleotide
  Antisense strand to SEQ ID NO: 1787733
acuaacaaagcaaagugca

SEQ ID NO: 1787735 - RNA, 19 nt, Artificial Sequence
  Description of Artificial Sequence: Synthetic oligonucleotide
  Sense strand starting at position 3056 of SEQ ID NO: 1562996
gcacuuugcuuuguuaguu

SEQ ID NO: 1787736 - RNA, 19 nt, Artificial Sequence
  Description of Artificial Sequence: Synthetic oligonucleotide
  Antisense strand to SEQ ID NO: 1787735
aacuaacaaagcaaagugc

SEQ ID NO: 1787737 - RNA, 19 nt, Artificial Sequence
  Description of Artificial Sequence: Synthetic oligonucleotide
  Sense strand starting at position 3075 of SEQ ID NO: 1562996
ucaguuuaguuugagacua

SEQ ID NO: 1787738 - RNA, 19 nt, Artificial Sequence
  Description of Artificial Sequence: Synthetic oligonucleotide
  Antisense strand to SEQ ID NO: 1787737
uagucucaaacuaaacuga

SEQ ID NO: 1787739 - RNA, 19 nt, Artificial Sequence
  Description of Artificial Sequence: Synthetic oligonucleotide
  Sense strand starting at position 3077 of SEQ ID NO: 1562996
aguuuaguuugagacuauu

SEQ ID NO: 1787740 - RNA, 19 nt, Artificial Sequence
  Description of Artificial Sequence: Synthetic oligonucleotide
  Antisense strand to SEQ ID NO: 1787739
aauagucucaaacuaaacu

SEQ ID NO: 1787741 - RNA, 19 nt, Artificial Sequence
  Description of Artificial Sequence: Synthetic oligonucleotide
  Sense strand starting at position 3336 of SEQ ID NO: 1562996
guguggaauccugguggga

SEQ ID NO: 1787742 - RNA, 19 nt, Artificial Sequence
  Description of Artificial Sequence: Synthetic oligonucleotide
  Antisense strand to SEQ ID NO: 1787741
ucccaccaggauuccacac

SEQ ID NO: 1787743 - RNA, 19 nt, Artificial Sequence
  Description of Artificial Sequence: Synthetic oligonucleotide
  Sense strand starting at position 3338 of SEQ ID NO: 1562996
guggaauccuggugggaag

SEQ ID NO: 1787744 - RNA, 19 nt, Artificial Sequence
  Description of Artificial Sequence: Synthetic oligonucleotide
  Antisense strand to SEQ ID NO: 1787743
cuucccaccaggauuccac

SEQ ID NO: 1787745 - RNA, 19 nt, Artificial Sequence
  Description of Artificial Sequence: Synthetic oligonucleotide
  Sense strand starting at position 3340 of SEQ ID NO: 1562996
ggaauccuggugggaaguu

SEQ ID NO: 1787746 - RNA, 19 nt, Artificial Sequence
  Description of Artificial Sequence: Synthetic oligonucleotide
  Antisense strand to SEQ ID NO: 1787745
aacuucccaccaggauucc

SEQ ID NO: 1787747 - RNA, 19 nt, Artificial Sequence
  Description of Artificial Sequence: Synthetic oligonucleotide
  Sense strand starting at position 3391 of SEQ ID NO: 1562996
ugagaugucaggcaagguu

SEQ ID NO: 1787748 - RNA, 19 nt, Artificial Sequence
  Description of Artificial Sequence: Synthetic oligonucleotide
  Antisense strand to SEQ ID NO: 1787747
aaccuugccugacaucuca

SEQ ID NO: 1787749 - RNA, 19 nt, Artificial Sequence
  Description of Artificial Sequence: Synthetic oligonucleotide
  Sense strand starting at position 3505 of SEQ ID NO: 1562996
ucgggaagucucuggacua

SEQ ID NO: 1787750 - RNA, 19 nt, Artificial Sequence
  Description of Artificial Sequence: Synthetic oligonucleotide
  Antisense strand to SEQ ID NO: 1787749
uaguccagagacuucccga

SEQ ID NO: 1787751 - RNA, 19 nt, Artificial Sequence
  Description of Artificial Sequence: Synthetic oligonucleotide
  Sense strand starting at position 3506 of SEQ ID NO: 1562996
cgggaagucucuggacuau

SEQ ID NO: 1787752 - RNA, 19 nt, Artificial Sequence
  Description of Artificial Sequence: Synthetic oligonucleotide
  Antisense strand to SEQ ID NO: 1787751
auaguccagagacuucccg

SEQ ID NO: 1787753 - RNA, 19 nt, Artificial Sequence
  Description of Artificial Sequence: Synthetic oligonucleotide
  Sense strand starting at position 3579 of SEQ ID NO: 1562996
gggcuugucugguucugua

SEQ ID NO: 1787754 - RNA, 19 nt, Artificial Sequence
  Description of Artificial Sequence: Synthetic oligonucleotide
  Antisense strand to SEQ ID NO: 1787753
uacagaaccagacaagccc

SEQ ID NO: 1787755 - RNA, 19 nt, Artificial Sequence
  Description of Artificial Sequence: Synthetic oligonucleotide
  Sense strand starting at position 3591 of SEQ ID NO: 1562996
uucuguagcuggucugaaa

SEQ ID NO: 1787756 - RNA, 19 nt, Artificial Sequence
  Description of Artificial Sequence: Synthetic oligonucleotide
  Antisense strand to SEQ ID NO: 1787755
uuucagaccagcuacagaa

SEQ ID NO: 1787757 - RNA, 19 nt, Artificial Sequence
  Description of Artificial Sequence: Synthetic oligonucleotide
  Sense strand starting at position 3604 of SEQ ID NO: 1562996
cugaaaguccuugaaggca

SEQ ID NO: 1787758 - RNA, 19 nt, Artificial Sequence
  Description of Artificial Sequence: Synthetic oligonucleotide
  Antisense strand to SEQ ID NO: 1787757
ugccuucaaggacuuucag

SEQ ID NO: 1787759 - RNA, 19 nt, Artificial Sequence
  Description of Artificial Sequence: Synthetic oligonucleotide
  Sense strand starting at position 3636 of SEQ ID NO: 1562996
accucugucucuccuagau

SEQ ID NO: 1787760 - RNA, 19 nt, Artificial Sequence
  Description of Artificial Sequence: Synthetic oligonucleotide
  Antisense strand to SEQ ID NO: 1787759
aucuaggagagacagaggu

SEQ ID NO: 1787761 - RNA, 19 nt, Artificial Sequence
  Description of Artificial Sequence: Synthetic oligonucleotide
  Sense strand starting at position 3638 of SEQ ID NO: 1562996
cucugucucuccuagauuu

SEQ ID NO: 1787762 - RNA, 19 nt, Artificial Sequence
  Description of Artificial Sequence: Synthetic oligonucleotide
  Antisense strand to SEQ ID NO: 1787761
aaaucuaggagagacagag

SEQ ID NO: 1787763 - RNA, 19 nt, Artificial Sequence
  Description of Artificial Sequence: Synthetic oligonucleotide
  Sense strand starting at position 3716 of SEQ ID NO: 1562996
gcagcugugguggaaacua

SEQ ID NO: 1787764 - RNA, 19 nt, Artificial Sequence
  Description of Artificial Sequence: Synthetic oligonucleotide
  Antisense strand to SEQ ID NO: 1787763
uaguuuccaccacagcugc

SEQ ID NO: 1787765 - RNA, 19 nt, Artificial Sequence
  Description of Artificial Sequence: Synthetic oligonucleotide
  Sense strand starting at position 3884 of SEQ ID NO: 1562996
gcugggugauggguagauu

SEQ ID NO: 1787766 - RNA, 19 nt, Artificial Sequence
  Description of Artificial Sequence: Synthetic oligonucleotide
  Antisense strand to SEQ ID NO: 1787765
aaucuacccaucacccagc

SEQ ID NO: 1787767 - RNA, 19 nt, Artificial Sequence
  Description of Artificial Sequence: Synthetic oligonucleotide
  Sense strand starting at position 3917 of SEQ ID NO: 1562996
gucacaccuggauguugaa

SEQ ID NO: 1787768 - RNA, 19 nt, Artificial Sequence
  Description of Artificial Sequence: Synthetic oligonucleotide
  Antisense strand to SEQ ID NO: 1787767
uucaacauccaggugugac

SEQ ID NO: 1787769 - RNA, 19 nt, Artificial Sequence
  Description of Artificial Sequence: Synthetic oligonucleotide
  Sense strand starting at position 3927 of SEQ ID NO: 1562996
gauguugaaucauagaagg

SEQ ID NO: 1787770 - RNA, 19 nt, Artificial Sequence
  Description of Artificial Sequence: Synthetic oligonucleotide
  Antisense strand to SEQ ID NO: 1787769
ccuucuaugauucaacauc

SEQ ID NO: 1787771 - RNA, 19 nt, Artificial Sequence
  Description of Artificial Sequence: Synthetic oligonucleotide
  Sense strand starting at position 3975 of SEQ ID NO: 1562996
auaggcuguuccuuagaag

SEQ ID NO: 1787772 - RNA, 19 nt, Artificial Sequence
  Description of Artificial Sequence: Synthetic oligonucleotide
  Antisense strand to SEQ ID NO: 1787771
cuucuaaggaacagccuau

SEQ ID NO: 1787773 - RNA, 19 nt, Artificial Sequence
  Description of Artificial Sequence: Synthetic oligonucleotide
  Sense strand starting at position 3978 of SEQ ID NO: 1562996
ggcuguuccuuagaaggaa

SEQ ID NO: 1787774 - RNA, 19 nt, Artificial Sequence
  Description of Artificial Sequence: Synthetic oligonucleotide
  Antisense strand to SEQ ID NO: 1787773
uuccuucuaaggaacagcc

SEQ ID NO: 1787775 - RNA, 19 nt, Artificial Sequence
  Description of Artificial Sequence: Synthetic oligonucleotide
  Sense strand starting at position 3982 of SEQ ID NO: 1562996
guuccuuagaaggaauugu

SEQ ID NO: 1787776 - RNA, 19 nt, Artificial Sequence
  Description of Artificial Sequence: Synthetic oligonucleotide
  Antisense strand to SEQ ID NO: 1787775
acaauuccuucuaaggaac

SEQ ID NO: 1787777 - RNA, 19 nt, Artificial Sequence
  Description of Artificial Sequence: Synthetic oligonucleotide
  Sense strand starting at position 15 of SEQ ID NO: 1562997
aucgaaacugcucagauaa

SEQ ID NO: 1787778 - RNA, 19 nt, Artificial Sequence
  Description of Artificial Sequence: Synthetic oligonucleotide
  Antisense strand to SEQ ID NO: 1787777
uuaucugagcaguuucgau

SEQ ID NO: 1787779 - RNA, 19 nt, Artificial Sequence
  Description of Artificial Sequence: Synthetic oligonucleotide
  Sense strand starting at position 17 of SEQ ID NO: 1562997
cgaaacugcucagauaaag

SEQ ID NO: 1787780 - RNA, 19 nt, Artificial Sequence
  Description of Artificial Sequence: Synthetic oligonucleotide
  Antisense strand to SEQ ID NO: 1787779
cuuuaucugagcaguuucg

SEQ ID NO: 1787781 - RNA, 19 nt, Artificial Sequence
  Description of Artificial Sequence: Synthetic oligonucleotide
  Sense strand starting at position 324 of SEQ ID NO: 1562997
ggcuuaccauccuagacau

SEQ ID NO: 1787782 - RNA, 19 nt, Artificial Sequence
  Description of Artificial Sequence: Synthetic oligonucleotide
  Antisense strand to SEQ ID NO: 1787781
augucuaggaugguaagcc

SEQ ID NO: 1787783 - RNA, 19 nt, Artificial Sequence
  Description of Artificial Sequence: Synthetic oligonucleotide
  Sense strand starting at position 347 of SEQ ID NO: 1562997
cuccacucuccagguagaa

SEQ ID NO: 1787784 - RNA, 19 nt, Artificial Sequence
  Description of Artificial Sequence: Synthetic oligonucleotide
  Antisense strand to SEQ ID NO: 1787783
uucuaccuggagaguggag

SEQ ID NO: 1787785 - RNA, 19 nt, Artificial Sequence
  Description of Artificial Sequence: Synthetic oligonucleotide
  Sense strand starting at position 549 of SEQ ID NO: 1562997
ccaugcaugggugaguaaa

SEQ ID NO: 1787786 - RNA, 19 nt, Artificial Sequence
  Description of Artificial Sequence: Synthetic oligonucleotide
  Antisense strand to SEQ ID NO: 1787785
uuuacucacccaugcaugg

SEQ ID NO: 1787787 - RNA, 19 nt, Artificial Sequence
  Description of Artificial Sequence: Synthetic oligonucleotide
  Sense strand starting at position 1166 of SEQ ID NO: 1562997
cgcgccuacucaucgcaua

SEQ ID NO: 1787788 - RNA, 19 nt, Artificial Sequence
  Description of Artificial Sequence: Synthetic oligonucleotide
  Antisense strand to SEQ ID NO: 1787787
uaugcgaugaguaggcgcg

SEQ ID NO: 1787789 - RNA, 19 nt, Artificial Sequence
  Description of Artificial Sequence: Synthetic oligonucleotide
  Sense strand starting at position 2628 of SEQ ID NO: 1562997
acaauuaauuuccggaggu

SEQ ID NO: 1787790 - RNA, 19 nt, Artificial Sequence
  Description of Artificial Sequence: Synthetic oligonucleotide
  Antisense strand to SEQ ID NO: 1787789
accuccggaaauuaauugu

SEQ ID NO: 1787791 - RNA, 19 nt, Artificial Sequence
  Description of Artificial Sequence: Synthetic oligonucleotide
  Sense strand starting at position 2629 of SEQ ID NO: 1562997
caauuaauuuccggaggug

SEQ ID NO: 1787792 - RNA, 19 nt, Artificial Sequence
  Description of Artificial Sequence: Synthetic oligonucleotide
  Antisense strand to SEQ ID NO: 1787791
caccuccggaaauuaauug

SEQ ID NO: 1787793 - RNA, 19 nt, Artificial Sequence
  Description of Artificial Sequence: Synthetic oligonucleotide
  Sense strand starting at position 2867 of SEQ ID NO: 1562997
gggaguuugcuccggacuu

SEQ ID NO: 1787794 - RNA, 19 nt, Artificial Sequence
  Description of Artificial Sequence: Synthetic oligonucleotide
  Antisense strand to SEQ ID NO: 1787793
aaguccggagcaaacuccc

SEQ ID NO: 1787795 - RNA, 19 nt, Artificial Sequence
  Description of Artificial Sequence: Synthetic oligonucleotide
  Sense strand starting at position 2868 of SEQ ID NO: 1562997
ggaguuugcuccggacuuc

SEQ ID NO: 1787796 - RNA, 19 nt, Artificial Sequence
  Description of Artificial Sequence: Synthetic oligonucleotide
  Antisense strand to SEQ ID NO: 1787795
gaaguccggagcaaacucc

SEQ ID NO: 1787797 - RNA, 19 nt, Artificial Sequence
  Description of Artificial Sequence: Synthetic oligonucleotide
  Sense strand starting at position 3305 of SEQ ID NO: 1562997
cccagauccuccuagagga

SEQ ID NO: 1787798 - RNA, 19 nt, Artificial Sequence
  Description of Artificial Sequence: Synthetic oligonucleotide
  Antisense strand to SEQ ID NO: 1787797
uccucuaggaggaucuggg

SEQ ID NO: 1787799 - RNA, 19 nt, Artificial Sequence
  Description of Artificial Sequence: Synthetic oligonucleotide
  Sense strand starting at position 3341 of SEQ ID NO: 1562997
ggcagagcuugagaacguu

SEQ ID NO: 1787800 - RNA, 19 nt, Artificial Sequence
  Description of Artificial Sequence: Synthetic oligonucleotide
  Antisense strand to SEQ ID NO: 1787799
aacguucucaagcucugcc

SEQ ID NO: 1787801 - RNA, 19 nt, Artificial Sequence
  Description of Artificial Sequence: Synthetic oligonucleotide
  Sense strand starting at position 3465 of SEQ ID NO: 1562997
gccugagccucccaggaau

SEQ ID NO: 1787802 - RNA, 19 nt, Artificial Sequence
  Description of Artificial Sequence: Synthetic oligonucleotide
  Antisense strand to SEQ ID NO: 1787801
auuccugggaggcucaggc

SEQ ID NO: 1787803 - RNA, 19 nt, Artificial Sequence
  Description of Artificial Sequence: Synthetic oligonucleotide
  Sense strand starting at position 3467 of SEQ ID NO: 1562997
cugagccucccaggaauaa

SEQ ID NO: 1787804 - RNA, 19 nt, Artificial Sequence
  Description of Artificial Sequence: Synthetic oligonucleotide
  Antisense strand to SEQ ID NO: 1787803
uuauuccugggaggcucag

SEQ ID NO: 1787805 - RNA, 19 nt, Artificial Sequence
  Description of Artificial Sequence: Synthetic oligonucleotide
  Sense strand starting at position 3666 of SEQ ID NO: 1562997
cugacagaguguuucugau

SEQ ID NO: 1787806 - RNA, 19 nt, Artificial Sequence
  Description of Artificial Sequence: Synthetic oligonucleotide
  Antisense strand to SEQ ID NO: 1787805
aucagaaacacucugucag

SEQ ID NO: 1787807 - RNA, 19 nt, Artificial Sequence
  Description of Artificial Sequence: Synthetic oligonucleotide
  Sense strand starting at position 3668 of SEQ ID NO: 1562997
gacagaguguuucugauga

SEQ ID NO: 1787808 - RNA, 19 nt, Artificial Sequence
  Description of Artificial Sequence: Synthetic oligonucleotide
  Antisense strand to SEQ ID NO: 1787807
ucaucagaaacacucuguc

SEQ ID NO: 1787809 - RNA, 19 nt, Artificial Sequence
  Description of Artificial Sequence: Synthetic oligonucleotide
  Sense strand starting at position 451 of SEQ ID NO: 1562998
cuuagagcucccugggaga

SEQ ID NO: 1787810 - RNA, 19 nt, Artificial Sequence
  Description of Artificial Sequence: Synthetic oligonucleotide
  Antisense strand to SEQ ID NO: 1787809
ucucccagggagcucuaag

SEQ ID NO: 1787811 - RNA, 19 nt, Artificial Sequence
  Description of Artificial Sequence: Synthetic oligonucleotide
  Sense strand starting at position 453 of SEQ ID NO: 1562998
uagagcucccugggagaaa

SEQ ID NO: 1787812 - RNA, 19 nt, Artificial Sequence
  Description of Artificial Sequence: Synthetic oligonucleotide
  Antisense strand to SEQ ID NO: 1787811
uuucucccagggagcucua

SEQ ID NO: 1787813 - RNA, 19 nt, Artificial Sequence
  Description of Artificial Sequence: Synthetic oligonucleotide
  Sense strand starting at position 762 of SEQ ID NO: 1562998
cacauagaguccuagaguc

SEQ ID NO: 1787814 - RNA, 19 nt, Artificial Sequence
  Description of Artificial Sequence: Synthetic oligonucleotide
  Antisense strand to SEQ ID NO: 1787813
gacucuaggacucuaugug

SEQ ID NO: 1787815 - RNA, 19 nt, Artificial Sequence
  Description of Artificial Sequence: Synthetic oligonucleotide
  Sense strand starting at position 1298 of SEQ ID NO: 1562998
ucaggugucucccugauga

SEQ ID NO: 1787816 - RNA, 19 nt, Artificial Sequence
  Description of Artificial Sequence: Synthetic oligonucleotide
  Antisense strand to SEQ ID NO: 1787815
ucaucagggagacaccuga

SEQ ID NO: 1787817 - RNA, 19 nt, Artificial Sequence
  Description of Artificial Sequence: Synthetic oligonucleotide
  Sense strand starting at position 1302 of SEQ ID NO: 1562998
gugucucccugaugaagug

SEQ ID NO: 1787818 - RNA, 19 nt, Artificial Sequence
  Description of Artificial Sequence: Synthetic oligonucleotide
  Antisense strand to SEQ ID NO: 1787817
cacuucaucagggagacac

SEQ ID NO: 1787819 - RNA, 19 nt, Artificial Sequence
  Description of Artificial Sequence: Synthetic oligonucleotide
  Sense strand starting at position 1665 of SEQ ID NO: 1562998
cggcgugucguaguuggaa

SEQ ID NO: 1787820 - RNA, 19 nt, Artificial Sequence
  Description of Artificial Sequence: Synthetic oligonucleotide
  Antisense strand to SEQ ID NO: 1787819
uuccaacuacgacacgccg

SEQ ID NO: 1787821 - RNA, 19 nt, Artificial Sequence
  Description of Artificial Sequence: Synthetic oligonucleotide
  Sense strand starting at position 1667 of SEQ ID NO: 1562998
gcgugucguaguuggaaca

SEQ ID NO: 1787822 - RNA, 19 nt, Artificial Sequence
  Description of Artificial Sequence: Synthetic oligonucleotide
  Antisense strand to SEQ ID NO: 1787821
uguuccaacuacgacacgc

SEQ ID NO: 1787823 - RNA, 19 nt, Artificial Sequence
  Description of Artificial Sequence: Synthetic oligonucleotide
  Sense strand starting at position 2771 of SEQ ID NO: 1562998
cucuguccguucugaucau

SEQ ID NO: 1787824 - RNA, 19 nt, Artificial Sequence
  Description of Artificial Sequence: Synthetic oligonucleotide
  Antisense strand to SEQ ID NO: 1787823
augaucagaacggacagag

SEQ ID NO: 1787825 - RNA, 19 nt, Artificial Sequence
  Description of Artificial Sequence: Synthetic oligonucleotide
  Sense strand starting at position 2772 of SEQ ID NO: 1562998
ucuguccguucugaucaua

SEQ ID NO: 1787826 - RNA, 19 nt, Artificial Sequence
  Description of Artificial Sequence: Synthetic oligonucleotide
  Antisense strand to SEQ ID NO: 1787825
uaugaucagaacggacaga

SEQ ID NO: 1787827 - RNA, 19 nt, Artificial Sequence
  Description of Artificial Sequence: Synthetic oligonucleotide
  Sense strand starting at position 2775 of SEQ ID NO: 1562998
guccguucugaucauaaca

SEQ ID NO: 1787828 - RNA, 19 nt, Artificial Sequence
  Description of Artificial Sequence: Synthetic oligonucleotide
  Antisense strand to SEQ ID NO: 1787827
uguuaugaucagaacggac

SEQ ID NO: 1787829 - RNA, 19 nt, Artificial Sequence
  Description of Artificial Sequence: Synthetic oligonucleotide
  Sense strand starting at position 2777 of SEQ ID NO: 1562998
ccguucugaucauaacaua

SEQ ID NO: 1787830 - RNA, 19 nt, Artificial Sequence
  Description of Artificial Sequence: Synthetic oligonucleotide
  Antisense strand to SEQ ID NO: 1787829
uauguuaugaucagaacgg

SEQ ID NO: 1787831 - RNA, 19 nt, Artificial Sequence
  Description of Artificial Sequence: Synthetic oligonucleotide
  Sense strand starting at position 3200 of SEQ ID NO: 1562998
ggagaagguccuggugcuu

SEQ ID NO: 1787832 - RNA, 19 nt, Artificial Sequence
  Description of Artificial Sequence: Synthetic oligonucleotide
  Antisense strand to SEQ ID NO: 1787831
aagcaccaggaccuucucc

SEQ ID NO: 1787833 - RNA, 19 nt, Artificial Sequence
  Description of Artificial Sequence: Synthetic oligonucleotide
  Sense strand starting at position 3230 of SEQ ID NO: 1562998
gccucaguaucucaucuua

SEQ ID NO: 1787834 - RNA, 19 nt, Artificial Sequence
  Description of Artificial Sequence: Synthetic oligonucleotide
  Antisense strand to SEQ ID NO: 1787833
uaagaugagauacugaggc

SEQ ID NO: 1787835 - RNA, 19 nt, Artificial Sequence
  Description of Artificial Sequence: Synthetic oligonucleotide
  Sense strand starting at position 3397 of SEQ ID NO: 1562998
gucggcauuugcugaauga

SEQ ID NO: 1787836 - RNA, 19 nt, Artificial Sequence
  Description of Artificial Sequence: Synthetic oligonucleotide
  Antisense strand to SEQ ID NO: 1787835
ucauucagcaaaugccgac

SEQ ID NO: 1787837 - RNA, 19 nt, Artificial Sequence
  Description of Artificial Sequence: Synthetic oligonucleotide
  Sense strand starting at position 3438 of SEQ ID NO: 1562998
gcgccuaguuucugugaga

SEQ ID NO: 1787838 - RNA, 19 nt, Artificial Sequence
  Description of Artificial Sequence: Synthetic oligonucleotide
  Antisense strand to SEQ ID NO: 1787837
ucucacagaaacuaggcgc

SEQ ID NO: 1787839 - RNA, 19 nt, Artificial Sequence
  Description of Artificial Sequence: Synthetic oligonucleotide
  Sense strand starting at position 3439 of SEQ ID NO: 1562998
cgccuaguuucugugagau

SEQ ID NO: 1787840 - RNA, 19 nt, Artificial Sequence
  Description of Artificial Sequence: Synthetic oligonucleotide
  Antisense strand to SEQ ID NO: 1787839
aucucacagaaacuaggcg

SEQ ID NO: 1787841 - RNA, 19 nt, Artificial Sequence
  Description of Artificial Sequence: Synthetic oligonucleotide
  Sense strand starting at position 3443 of SEQ ID NO: 1562998
uaguuucugugagaugaaa

SEQ ID NO: 1787842 - RNA, 19 nt, Artificial Sequence
  Description of Artificial Sequence: Synthetic oligonucleotide
  Antisense strand to SEQ ID NO: 1787841
uuucaucucacagaaacua

SEQ ID NO: 1787843 - RNA, 19 nt, Artificial Sequence
  Description of Artificial Sequence: Synthetic oligonucleotide
  Sense strand starting at position 3445 of SEQ ID NO: 1562998
guuucugugagaugaaaca

SEQ ID NO: 1787844 - RNA, 19 nt, Artificial Sequence
  Description of Artificial Sequence: Synthetic oligonucleotide
  Antisense strand to SEQ ID NO: 1787843
uguuucaucucacagaaac

SEQ ID NO: 1787845 - RNA, 19 nt, Artificial Sequence
  Description of Artificial Sequence: Synthetic oligonucleotide
  Sense strand starting at position 3523 of SEQ ID NO: 1562998
gggaccagcuuaugaaagu

SEQ ID NO: 1787846 - RNA, 19 nt, Artificial Sequence
  Description of Artificial Sequence: Synthetic oligonucleotide
  Antisense strand to SEQ ID NO: 1787845
acuuucauaagcugguccc

SEQ ID NO: 1787847 - RNA, 19 nt, Artificial Sequence
  Description of Artificial Sequence: Synthetic oligonucleotide
  Sense strand starting at position 3529 of SEQ ID NO: 1562998
agcuuaugaaaguggagaa

SEQ ID NO: 1787848 - RNA, 19 nt, Artificial Sequence
  Description of Artificial Sequence: Synthetic oligonucleotide
  Antisense strand to SEQ ID NO: 1787847
uucuccacuuucauaagcu

SEQ ID NO: 1787849 - RNA, 19 nt, Artificial Sequence
  Description of Artificial Sequence: Synthetic oligonucleotide
  Sense strand starting at position 3588 of SEQ ID NO: 1562998
gaucaagucuguugccuga

SEQ ID NO: 1787850 - RNA, 19 nt, Artificial Sequence
  Description of Artificial Sequence: Synthetic oligonucleotide
  Antisense strand to SEQ ID NO: 1787849
ucaggcaacagacuugauc

SEQ ID NO: 1787851 - RNA, 19 nt, Artificial Sequence
  Description of Artificial Sequence: Synthetic oligonucleotide
  Sense strand starting at position 3590 of SEQ ID NO: 1562998
ucaagucuguugccugaca

SEQ ID NO: 1787852 - RNA, 19 nt, Artificial Sequence
  Description of Artificial Sequence: Synthetic oligonucleotide
  Antisense strand to SEQ ID NO: 1787851
ugucaggcaacagacuuga

SEQ ID NO: 1787853 - RNA, 19 nt, Artificial Sequence
  Description of Artificial Sequence: Synthetic oligonucleotide
  Sense strand starting at position 3591 of SEQ ID NO: 1562998
caagucuguugccugacau

SEQ ID NO: 1787854 - RNA, 19 nt, Artificial Sequence
  Description of Artificial Sequence: Synthetic oligonucleotide
  Antisense strand to SEQ ID NO: 1787853
augucaggcaacagacuug

SEQ ID NO: 1787855 - RNA, 19 nt, Artificial Sequence
  Description of Artificial Sequence: Synthetic oligonucleotide
  Sense strand starting at position 3592 of SEQ ID NO: 1562998
aagucuguugccugacaug

SEQ ID NO: 1787856 - RNA, 19 nt, Artificial Sequence
  Description of Artificial Sequence: Synthetic oligonucleotide
  Antisense strand to SEQ ID NO: 1787855
caugucaggcaacagacuu

SEQ ID NO: 1787857 - RNA, 19 nt, Artificial Sequence
  Description of Artificial Sequence: Synthetic oligonucleotide
  Sense strand starting at position 3856 of SEQ ID NO: 1562998
gcuuuaaucccauguccag

SEQ ID NO: 1787858 - RNA, 19 nt, Artificial Sequence
  Description of Artificial Sequence: Synthetic oligonucleotide
  Antisense strand to SEQ ID NO: 1787857
cuggacaugggauuaaagc

SEQ ID NO: 1787859 - RNA, 19 nt, Artificial Sequence
  Description of Artificial Sequence: Synthetic oligonucleotide
  Sense strand starting at position 3908 of SEQ ID NO: 1562998
gcuggauuguaacuaguuu

SEQ ID NO: 1787860 - RNA, 19 nt, Artificial Sequence
  Description of Artificial Sequence: Synthetic oligonucleotide
  Antisense strand to SEQ ID NO: 1787859
aaacuaguuacaauccagc

SEQ ID NO: 1787861 - RNA, 19 nt, Artificial Sequence
  Description of Artificial Sequence: Synthetic oligonucleotide
  Sense strand starting at position 3916 of SEQ ID NO: 1562998
guaacuaguuugugguuua

SEQ ID NO: 1787862 - RNA, 19 nt, Artificial Sequence
  Description of Artificial Sequence: Synthetic oligonucleotide
  Antisense strand to SEQ ID NO: 1787861
uaaaccacaaacuaguuac

SEQ ID NO: 1787863 - RNA, 19 nt, Artificial Sequence
  Description of Artificial Sequence: Synthetic oligonucleotide
  Sense strand starting at position 3919 of SEQ ID NO: 1562998
acuaguuugugguuuacuu

SEQ ID NO: 1787864 - RNA, 19 nt, Artificial Sequence
  Description of Artificial Sequence: Synthetic oligonucleotide
  Antisense strand to SEQ ID NO: 1787863
aaguaaaccacaaacuagu

SEQ ID NO: 1787865 - RNA, 19 nt, Artificial Sequence
  Description of Artificial Sequence: Synthetic oligonucleotide
  Sense strand starting at position 632 of SEQ ID NO: 1562999
cgaagacugucccucauag

SEQ ID NO: 1787866 - RNA, 19 nt, Artificial Sequence
  Description of Artificial Sequence: Synthetic oligonucleotide
  Antisense strand to SEQ ID NO: 1787865
cuaugagggacagucuucg

SEQ ID NO: 1787867 - RNA, 19 nt, Artificial Sequence
  Description of Artificial Sequence: Synthetic oligonucleotide
  Sense strand starting at position 636 of SEQ ID NO: 1562999
gacugucccucauagggaa

SEQ ID NO: 1787868 - RNA, 19 nt, Artificial Sequence
  Description of Artificial Sequence: Synthetic oligonucleotide
  Antisense strand to SEQ ID NO: 1787867
uucccuaugagggacaguc

SEQ ID NO: 1787869 - RNA, 19 nt, Artificial Sequence
  Description of Artificial Sequence: Synthetic oligonucleotide
  Sense strand starting at position 907 of SEQ ID NO: 1562999
uggcuugaguccucuaagg

SEQ ID NO: 1787870 - RNA, 19 nt, Artificial Sequence
  Description of Artificial Sequence: Synthetic oligonucleotide
  Antisense strand to SEQ ID NO: 1787869
ccuuagaggacucaagcca

SEQ ID NO: 1787871 - RNA, 19 nt, Artificial Sequence
  Description of Artificial Sequence: Synthetic oligonucleotide
  Sense strand starting at position 909 of SEQ ID NO: 1562999
gcuugaguccucuaaggaa

SEQ ID NO: 1787872 - RNA, 19 nt, Artificial Sequence
  Description of Artificial Sequence: Synthetic oligonucleotide
  Antisense strand to SEQ ID NO: 1787871
uuccuuagaggacucaagc

SEQ ID NO: 1787873 - RNA, 19 nt, Artificial Sequence
  Description of Artificial Sequence: Synthetic oligonucleotide
  Sense strand starting at position 912 of SEQ ID NO: 1562999
ugaguccucuaaggaauaa

SEQ ID NO: 1787874 - RNA, 19 nt, Artificial Sequence
  Description of Artificial Sequence: Synthetic oligonucleotide
  Antisense strand to SEQ ID NO: 1787873
uuauuccuuagaggacuca

SEQ ID NO: 1787875 - RNA, 19 nt, Artificial Sequence
  Description of Artificial Sequence: Synthetic oligonucleotide
  Sense strand starting at position 1252 of SEQ ID NO: 1562999
gggcggguguggucuuaga

SEQ ID NO: 1787876 - RNA, 19 nt, Artificial Sequence
  Description of Artificial Sequence: Synthetic oligonucleotide
  Antisense strand to SEQ ID NO: 1787875
ucuaagaccacacccgccc

SEQ ID NO: 1787877 - RNA, 19 nt, Artificial Sequence
  Description of Artificial Sequence: Synthetic oligonucleotide
  Sense strand starting at position 2023 of SEQ ID NO: 1562999
cagguaugugccuggaggu

SEQ ID NO: 1787878 - RNA, 19 nt, Artificial Sequence
  Description of Artificial Sequence: Synthetic oligonucleotide
  Antisense strand to SEQ ID NO: 1787877
accuccaggcacauaccug

SEQ ID NO: 1787879 - RNA, 19 nt, Artificial Sequence
  Description of Artificial Sequence: Synthetic oligonucleotide
  Sense strand starting at position 2161 of SEQ ID NO: 1562999
ccgccauguuccuaauguu

SEQ ID NO: 1787880 - RNA, 19 nt, Artificial Sequence
  Description of Artificial Sequence: Synthetic oligonucleotide
  Antisense strand to SEQ ID NO: 1787879
aacauuaggaacauggcgg

SEQ ID NO: 1787881 - RNA, 19 nt, Artificial Sequence
  Description of Artificial Sequence: Synthetic oligonucleotide
  Sense strand starting at position 2164 of SEQ ID NO: 1562999
ccauguuccuaauguuucu

SEQ ID NO: 1787882 - RNA, 19 nt, Artificial Sequence
  Description of Artificial Sequence: Synthetic oligonucleotide
  Antisense strand to SEQ ID NO: 1787881
agaaacauuaggaacaugg

SEQ ID NO: 1787883 - RNA, 19 nt, Artificial Sequence
  Description of Artificial Sequence: Synthetic oligonucleotide
  Sense strand starting at position 2170 of SEQ ID NO: 1562999
uccuaauguuucucaguga

SEQ ID NO: 1787884 - RNA, 19 nt, Artificial Sequence
  Description of Artificial Sequence: Synthetic oligonucleotide
  Antisense strand to SEQ ID NO: 1787883
ucacugagaaacauuagga

SEQ ID NO: 1787885 - RNA, 19 nt, Artificial Sequence
  Description of Artificial Sequence: Synthetic oligonucleotide
  Sense strand starting at position 2171 of SEQ ID NO: 1562999
ccuaauguuucucagugau

SEQ ID NO: 1787886 - RNA, 19 nt, Artificial Sequence
  Description of Artificial Sequence: Synthetic oligonucleotide
  Antisense strand to SEQ ID NO: 1787885
aucacugagaaacauuagg

SEQ ID NO: 1787887 - RNA, 19 nt, Artificial Sequence
  Description of Artificial Sequence: Synthetic oligonucleotide
  Sense strand starting at position 2177 of SEQ ID NO: 1562999
guuucucagugaucacaaa

SEQ ID NO: 1787888 - RNA, 19 nt, Artificial Sequence
  Description of Artificial Sequence: Synthetic oligonucleotide
  Antisense strand to SEQ ID NO: 1787887
uuugugaucacugagaaac

SEQ ID NO: 1787889 - RNA, 19 nt, Artificial Sequence
  Description of Artificial Sequence: Synthetic oligonucleotide
  Sense strand starting at position 2196 of SEQ ID NO: 1562999
ugacuauugucauuagaac

SEQ ID NO: 1787890 - RNA, 19 nt, Artificial Sequence
  Description of Artificial Sequence: Synthetic oligonucleotide
  Antisense strand to SEQ ID NO: 1787889
guucuaaugacaauaguca

SEQ ID NO: 1787891 - RNA, 19 nt, Artificial Sequence
  Description of Artificial Sequence: Synthetic oligonucleotide
  Sense strand starting at position 2334 of SEQ ID NO: 1562999
cucccuuuccuccgaugua

SEQ ID NO: 1787892 - RNA, 19 nt, Artificial Sequence
  Description of Artificial Sequence: Synthetic oligonucleotide
  Antisense strand to SEQ ID NO: 1787891
uacaucggaggaaagggag

SEQ ID NO: 1787893 - RNA, 19 nt, Artificial Sequence
  Description of Artificial Sequence: Synthetic oligonucleotide
  Sense strand starting at position 2335 of SEQ ID NO: 1562999
ucccuuuccuccgauguaa

SEQ ID NO: 1787894 - RNA, 19 nt, Artificial Sequence
  Description of Artificial Sequence: Synthetic oligonucleotide
  Antisense strand to SEQ ID NO: 1787893
uuacaucggaggaaaggga

SEQ ID NO: 1787895 - RNA, 19 nt, Artificial Sequence
  Description of Artificial Sequence: Synthetic oligonucleotide
  Sense strand starting at position 2337 of SEQ ID NO: 1562999
ccuuuccuccgauguaaga

SEQ ID NO: 1787896 - RNA, 19 nt, Artificial Sequence
  Description of Artificial Sequence: Synthetic oligonucleotide
  Antisense strand to SEQ ID NO: 1787895
ucuuacaucggaggaaagg

SEQ ID NO: 1787897 - RNA, 19 nt, Artificial Sequence
  Description of Artificial Sequence: Synthetic oligonucleotide
  Sense strand starting at position 2346 of SEQ ID NO: 1562999
cgauguaagaugggugauu

SEQ ID NO: 1787898 - RNA, 19 nt, Artificial Sequence
  Description of Artificial Sequence: Synthetic oligonucleotide
  Antisense strand to SEQ ID NO: 1787897
aaucacccaucuuacaucg

SEQ ID NO: 1787899 - RNA, 19 nt, Artificial Sequence
  Description of Artificial Sequence: Synthetic oligonucleotide
  Sense strand starting at position 2348 of SEQ ID NO: 1562999
auguaagaugggugauuga

SEQ ID NO: 1787900 - RNA, 19 nt, Artificial Sequence
  Description of Artificial Sequence: Synthetic oligonucleotide
  Antisense strand to SEQ ID NO: 1787899
ucaaucacccaucuuacau

SEQ ID NO: 1787901 - RNA, 19 nt, Artificial Sequence
  Description of Artificial Sequence: Synthetic oligonucleotide
  Sense strand starting at position 2382 of SEQ ID NO: 1562999
cugggaaucuugcgggaga

SEQ ID NO: 1787902 - RNA, 19 nt, Artificial Sequence
  Description of Artificial Sequence: Synthetic oligonucleotide
  Antisense strand to SEQ ID NO: 1787901
ucucccgcaagauucccag

SEQ ID NO: 1787903 - RNA, 19 nt, Artificial Sequence
  Description of Artificial Sequence: Synthetic oligonucleotide
  Sense strand starting at position 2584 of SEQ ID NO: 1562999
gguguacucagagacaggu

SEQ ID NO: 1787904 - RNA, 19 nt, Artificial Sequence
  Description of Artificial Sequence: Synthetic oligonucleotide
  Antisense strand to SEQ ID NO: 1787903
accugucucugaguacacc

SEQ ID NO: 1787905 - RNA, 19 nt, Artificial Sequence
  Description of Artificial Sequence: Synthetic oligonucleotide
  Sense strand starting at position 2741 of SEQ ID NO: 1562999
gccuguuguccucuuguca

SEQ ID NO: 1787906 - RNA, 19 nt, Artificial Sequence
  Description of Artificial Sequence: Synthetic oligonucleotide
  Antisense strand to SEQ ID NO: 1787905
ugacaagaggacaacaggc

SEQ ID NO: 1787907 - RNA, 19 nt, Artificial Sequence
  Description of Artificial Sequence: Synthetic oligonucleotide
  Sense strand starting at position 3325 of SEQ ID NO: 1562999
gcuggcagcuuucucuaga

SEQ ID NO: 1787908 - RNA, 19 nt, Artificial Sequence
  Description of Artificial Sequence: Synthetic oligonucleotide
  Antisense strand to SEQ ID NO: 1787907
ucuagagaaagcugccagc

SEQ ID NO: 1787909 - RNA, 19 nt, Artificial Sequence
  Description of Artificial Sequence: Synthetic oligonucleotide
  Sense strand starting at position 3326 of SEQ ID NO: 1562999
cuggcagcuuucucuagaa

SEQ ID NO: 1787910 - RNA, 19 nt, Artificial Sequence
  Description of Artificial Sequence: Synthetic oligonucleotide
  Antisense strand to SEQ ID NO: 1787909
uucuagagaaagcugccag

SEQ ID NO: 1787911 - RNA, 19 nt, Artificial Sequence
  Description of Artificial Sequence: Synthetic oligonucleotide
  Sense strand starting at position 3328 of SEQ ID NO: 1562999
ggcagcuuucucuagaaug

SEQ ID NO: 1787912 - RNA, 19 nt, Artificial Sequence
  Description of Artificial Sequence: Synthetic oligonucleotide
  Antisense strand to SEQ ID NO: 1787911
cauucuagagaaagcugcc

SEQ ID NO: 1787913 - RNA, 19 nt, Artificial Sequence
  Description of Artificial Sequence: Synthetic oligonucleotide
  Sense strand starting at position 3484 of SEQ ID NO: 1562999
gccgcuacuuccuaggaaa

SEQ ID NO: 1787914 - RNA, 19 nt, Artificial Sequence
  Description of Artificial Sequence: Synthetic oligonucleotide
  Antisense strand to SEQ ID NO: 1787913
uuuccuaggaaguagcggc

SEQ ID NO: 1787915 - RNA, 19 nt, Artificial Sequence
  Description of Artificial Sequence: Synthetic oligonucleotide
  Sense strand starting at position 3740 of SEQ ID NO: 1562999
gcguccacuuccuuuauuu

SEQ ID NO: 1787916 - RNA, 19 nt, Artificial Sequence
  Description of Artificial Sequence: Synthetic oligonucleotide
  Antisense strand to SEQ ID NO: 1787915
aaauaaaggaaguggacgc

SEQ ID NO: 1787917 - RNA, 19 nt, Artificial Sequence
  Description of Artificial Sequence: Synthetic oligonucleotide
  Sense strand starting at position 98 of SEQ ID NO: 1563000
agaggaguguuuccaaaga

SEQ ID NO: 1787918 - RNA, 19 nt, Artificial Sequence
  Description of Artificial Sequence: Synthetic oligonucleotide
  Antisense strand to SEQ ID NO: 1787917
ucuuuggaaacacuccucu

SEQ ID NO: 1787919 - RNA, 19 nt, Artificial Sequence
  Description of Artificial Sequence: Synthetic oligonucleotide
  Sense strand starting at position 611 of SEQ ID NO: 1563000
ucaccuuguucccgcacaa

SEQ ID NO: 1787920 - RNA, 19 nt, Artificial Sequence
  Description of Artificial Sequence: Synthetic oligonucleotide
  Antisense strand to SEQ ID NO: 1787919
uugugcgggaacaagguga

SEQ ID NO: 1787921 - RNA, 19 nt, Artificial Sequence
  Description of Artificial Sequence: Synthetic oligonucleotide
  Sense strand starting at position 672 of SEQ ID NO: 1563000
gggaggucuggucguggau

SEQ ID NO: 1787922 - RNA, 19 nt, Artificial Sequence
  Description of Artificial Sequence: Synthetic oligonucleotide
  Antisense strand to SEQ ID NO: 1787921
auccacgaccagaccuccc

SEQ ID NO: 1787923 - RNA, 19 nt, Artificial Sequence
  Description of Artificial Sequence: Synthetic oligonucleotide
  Sense strand starting at position 674 of SEQ ID NO: 1563000
gaggucuggucguggauga

SEQ ID NO: 1787924 - RNA, 19 nt, Artificial Sequence
  Description of Artificial Sequence: Synthetic oligonucleotide
  Antisense strand to SEQ ID NO: 1787923
ucauccacgaccagaccuc

SEQ ID NO: 1787925 - RNA, 19 nt, Artificial Sequence
  Description of Artificial Sequence: Synthetic oligonucleotide
  Sense strand starting at position 675 of SEQ ID NO: 1563000
aggucuggucguggaugaa

SEQ ID NO: 1787926 - RNA, 19 nt, Artificial Sequence
  Description of Artificial Sequence: Synthetic oligonucleotide
  Antisense strand to SEQ ID NO: 1787925
uucauccacgaccagaccu

SEQ ID NO: 1787927 - RNA, 19 nt, Artificial Sequence
  Description of Artificial Sequence: Synthetic oligonucleotide
  Sense strand starting at position 1335 of SEQ ID NO: 1563000
ugcugaggaacucgaacau

SEQ ID NO: 1787928 - RNA, 19 nt, Artificial Sequence
  Description of Artificial Sequence: Synthetic oligonucleotide
  Antisense strand to SEQ ID NO: 1787927
auguucgaguuccucagca

SEQ ID NO: 1787929 - RNA, 19 nt, Artificial Sequence
  Description of Artificial Sequence: Synthetic oligonucleotide
  Sense strand starting at position 1670 of SEQ ID NO: 1563000
gcagcugcgucuucacgua

SEQ ID NO: 1787930 - RNA, 19 nt, Artificial Sequence
  Description of Artificial Sequence: Synthetic oligonucleotide
  Antisense strand to SEQ ID NO: 1787929
uacgugaagacgcagcugc

SEQ ID NO: 1787931 - RNA, 19 nt, Artificial Sequence
  Description of Artificial Sequence: Synthetic oligonucleotide
  Sense strand starting at position 2831 of SEQ ID NO: 1563000
gcuguauucuccuaggcag

SEQ ID NO: 1787932 - RNA, 19 nt, Artificial Sequence
  Description of Artificial Sequence: Synthetic oligonucleotide
  Antisense strand to SEQ ID NO: 1787931
cugccuaggagaauacagc

SEQ ID NO: 1787933 - RNA, 19 nt, Artificial Sequence
  Description of Artificial Sequence: Synthetic oligonucleotide
  Sense strand starting at position 2961 of SEQ ID NO: 1563000
gagcaccuuugccuggaua

SEQ ID NO: 1787934 - RNA, 19 nt, Artificial Sequence
  Description of Artificial Sequence: Synthetic oligonucleotide
  Antisense strand to SEQ ID NO: 1787933
uauccaggcaaaggugcuc

SEQ ID NO: 1787935 - RNA, 19 nt, Artificial Sequence
  Description of Artificial Sequence: Synthetic oligonucleotide
  Sense strand starting at position 2962 of SEQ ID NO: 1563000
agcaccuuugccuggauaa

SEQ ID NO: 1787936 - RNA, 19 nt, Artificial Sequence
  Description of Artificial Sequence: Synthetic oligonucleotide
  Antisense strand to SEQ ID NO: 1787935
uuauccaggcaaaggugcu

SEQ ID NO: 1787937 - RNA, 19 nt, Artificial Sequence
  Description of Artificial Sequence: Synthetic oligonucleotide
  Sense strand starting at position 2963 of SEQ ID NO: 1563000
gcaccuuugccuggauaaa

SEQ ID NO: 1787938 - RNA, 19 nt, Artificial Sequence
  Description of Artificial Sequence: Synthetic oligonucleotide
  Antisense strand to SEQ ID NO: 1787937
uuuauccaggcaaaggugc

SEQ ID NO: 1787939 - RNA, 19 nt, Artificial Sequence
  Description of Artificial Sequence: Synthetic oligonucleotide
  Sense strand starting at position 3153 of SEQ ID NO: 1563000
gucucuguugucggcuaaa

SEQ ID NO: 1787940 - RNA, 19 nt, Artificial Sequence
  Description of Artificial Sequence: Synthetic oligonucleotide
  Antisense strand to SEQ ID NO: 1787939
uuuagccgacaacagagac

SEQ ID NO: 1787941 - RNA, 19 nt, Artificial Sequence
  Description of Artificial Sequence: Synthetic oligonucleotide
  Sense strand starting at position 3156 of SEQ ID NO: 1563000
ucuguugucggcuaaagcu

SEQ ID NO: 1787942 - RNA, 19 nt, Artificial Sequence
  Description of Artificial Sequence: Synthetic oligonucleotide
  Antisense strand to SEQ ID NO: 1787941
agcuuuagccgacaacaga

SEQ ID NO: 1787943 - RNA, 19 nt, Artificial Sequence
  Description of Artificial Sequence: Synthetic oligonucleotide
  Sense strand starting at position 3224 of SEQ ID NO: 1563000
cucagagguugccgucauu

SEQ ID NO: 1787944 - RNA, 19 nt, Artificial Sequence
  Description of Artificial Sequence: Synthetic oligonucleotide
  Antisense strand to SEQ ID NO: 1787943
aaugacggcaaccucugag

SEQ ID NO: 1787945 - RNA, 19 nt, Artificial Sequence
  Description of Artificial Sequence: Synthetic oligonucleotide
  Sense strand starting at position 3257 of SEQ ID NO: 1563000
auaaauauuguccaggugu

SEQ ID NO: 1787946 - RNA, 19 nt, Artificial Sequence
  Description of Artificial Sequence: Synthetic oligonucleotide
  Antisense strand to SEQ ID NO: 1787945
acaccuggacaauauuuau

SEQ ID NO: 1787947 - RNA, 19 nt, Artificial Sequence
  Description of Artificial Sequence: Synthetic oligonucleotide
  Sense strand starting at position 3311 of SEQ ID NO: 1563000
ugacaugcuccuuggagaa

SEQ ID NO: 1787948 - RNA, 19 nt, Artificial Sequence
  Description of Artificial Sequence: Synthetic oligonucleotide
  Antisense strand to SEQ ID NO: 1787947
uucuccaaggagcauguca

SEQ ID NO: 1787949 - RNA, 19 nt, Artificial Sequence
  Description of Artificial Sequence: Synthetic oligonucleotide
  Sense strand starting at position 3313 of SEQ ID NO: 1563000
acaugcuccuuggagaagu

SEQ ID NO: 1787950 - RNA, 19 nt, Artificial Sequence
  Description of Artificial Sequence: Synthetic oligonucleotide
  Antisense strand to SEQ ID NO: 1787949
acuucuccaaggagcaugu

SEQ ID NO: 1787951 - RNA, 19 nt, Artificial Sequence
  Description of Artificial Sequence: Synthetic oligonucleotide
  Sense strand starting at position 3315 of SEQ ID NO: 1563000
augcuccuuggagaaguua

SEQ ID NO: 1787952 - RNA, 19 nt, Artificial Sequence
  Description of Artificial Sequence: Synthetic oligonucleotide
  Antisense strand to SEQ ID NO: 1787951
uaacuucuccaaggagcau

SEQ ID NO: 1787953 - RNA, 19 nt, Artificial Sequence
  Description of Artificial Sequence: Synthetic oligonucleotide
  Sense strand starting at position 3323 of SEQ ID NO: 1563000
uggagaaguuaguaacucu

SEQ ID NO: 1787954 - RNA, 19 nt, Artificial Sequence
  Description of Artificial Sequence: Synthetic oligonucleotide
  Antisense strand to SEQ ID NO: 1787953
agaguuacuaacuucucca

SEQ ID NO: 1787955 - RNA, 19 nt, Artificial Sequence
  Description of Artificial Sequence: Synthetic oligonucleotide
  Sense strand starting at position 3330 of SEQ ID NO: 1563000
guuaguaacucugcaggua

SEQ ID NO: 1787956 - RNA, 19 nt, Artificial Sequence
  Description of Artificial Sequence: Synthetic oligonucleotide
  Antisense strand to SEQ ID NO: 1787955
uaccugcagaguuacuaac

SEQ ID NO: 1787957 - RNA, 19 nt, Artificial Sequence
  Description of Artificial Sequence: Synthetic oligonucleotide
  Sense strand starting at position 3410 of SEQ ID NO: 1563000
ggagcagaggcauauccau

SEQ ID NO: 1787958 - RNA, 19 nt, Artificial Sequence
  Description of Artificial Sequence: Synthetic oligonucleotide
  Antisense strand to SEQ ID NO: 1787957
auggauaugccucugcucc

SEQ ID NO: 1787959 - RNA, 19 nt, Artificial Sequence
  Description of Artificial Sequence: Synthetic oligonucleotide
  Sense strand starting at position 3662 of SEQ ID NO: 1563000
aggauaagcuagucuccaa

SEQ ID NO: 1787960 - RNA, 19 nt, Artificial Sequence
  Description of Artificial Sequence: Synthetic oligonucleotide
  Antisense strand to SEQ ID NO: 1787959
uuggagacuagcuuauccu

SEQ ID NO: 1787961 - RNA, 19 nt, Artificial Sequence
  Description of Artificial Sequence: Synthetic oligonucleotide
  Sense strand starting at position 3746 of SEQ ID NO: 1563000
gaaugacauuaauggugga

SEQ ID NO: 1787962 - RNA, 19 nt, Artificial Sequence
  Description of Artificial Sequence: Synthetic oligonucleotide
  Antisense strand to SEQ ID NO: 1787961
uccaccauuaaugucauuc

SEQ ID NO: 1787963 - RNA, 19 nt, Artificial Sequence
  Description of Artificial Sequence: Synthetic oligonucleotide
  Sense strand starting at position 253 of SEQ ID NO: 1563001
ucaccuuguucccgcacaa

SEQ ID NO: 1787964 - RNA, 19 nt, Artificial Sequence
  Description of Artificial Sequence: Synthetic oligonucleotide
  Antisense strand to SEQ ID NO: 1787963
uugugcgggaacaagguga

SEQ ID NO: 1787965 - RNA, 19 nt, Artificial Sequence
  Description of Artificial Sequence: Synthetic oligonucleotide
  Sense strand starting at position 314 of SEQ ID NO: 1563001
gggaggucuggucguggau

SEQ ID NO: 1787966 - RNA, 19 nt, Artificial Sequence
  Description of Artificial Sequence: Synthetic oligonucleotide
  Antisense strand to SEQ ID NO: 1787965
auccacgaccagaccuccc

SEQ ID NO: 1787967 - RNA, 19 nt, Artificial Sequence
  Description of Artificial Sequence: Synthetic oligonucleotide
  Sense strand starting at position 316 of SEQ ID NO: 1563001
gaggucuggucguggauga

SEQ ID NO: 1787968 - RNA, 19 nt, Artificial Sequence
  Description of Artificial Sequence: Synthetic oligonucleotide
  Antisense strand to SEQ ID NO: 1787967
ucauccacgaccagaccuc

SEQ ID NO: 1787969 - RNA, 19 nt, Artificial Sequence
  Description of Artificial Sequence: Synthetic oligonucleotide
  Sense strand starting at position 317 of SEQ ID NO: 1563001
aggucuggucguggaugaa

SEQ ID NO: 1787970 - RNA, 19 nt, Artificial Sequence
  Description of Artificial Sequence: Synthetic oligonucleotide
  Antisense strand to SEQ ID NO: 1787969
uucauccacgaccagaccu

SEQ ID NO: 1787971 - RNA, 19 nt, Artificial Sequence
  Description of Artificial Sequence: Synthetic oligonucleotide
  Sense strand starting at position 977 of SEQ ID NO: 1563001
ugcugaggaacucgaacau

SEQ ID NO: 1787972 - RNA, 19 nt, Artificial Sequence
  Description of Artificial Sequence: Synthetic oligonucleotide
  Antisense strand to SEQ ID NO: 1787971
auguucgaguuccucagca

SEQ ID NO: 1787973 - RNA, 19 nt, Artificial Sequence
  Description of Artificial Sequence: Synthetic oligonucleotide
  Sense strand starting at position 1312 of SEQ ID NO: 1563001
gcagcugcgucuucacgua

SEQ ID NO: 1787974 - RNA, 19 nt, Artificial Sequence
  Description of Artificial Sequence: Synthetic oligonucleotide
  Antisense strand to SEQ ID NO: 1787973
uacgugaagacgcagcugc

SEQ ID NO: 1787975 - RNA, 19 nt, Artificial Sequence
  Description of Artificial Sequence: Synthetic oligonucleotide
  Sense strand starting at position 2473 of SEQ ID NO: 1563001
gcuguauucuccuaggcag

SEQ ID NO: 1787976 - RNA, 19 nt, Artificial Sequence
  Description of Artificial Sequence: Synthetic oligonucleotide
  Antisense strand to SEQ ID NO: 1787975
cugccuaggagaauacagc

SEQ ID NO: 1787977 - RNA, 19 nt, Artificial Sequence
  Description of Artificial Sequence: Synthetic oligonucleotide
  Sense strand starting at position 2603 of SEQ ID NO: 1563001
gagcaccuuugccuggaua

SEQ ID NO: 1787978 - RNA, 19 nt, Artificial Sequence
  Description of Artificial Sequence: Synthetic oligonucleotide
  Antisense strand to SEQ ID NO: 1787977
uauccaggcaaaggugcuc

SEQ ID NO: 1787979 - RNA, 19 nt, Artificial Sequence
  Description of Artificial Sequence: Synthetic oligonucleotide
  Sense strand starting at position 2604 of SEQ ID NO: 1563001
agcaccuuugccuggauaa

SEQ ID NO: 1787980 - RNA, 19 nt, Artificial Sequence
  Description of Artificial Sequence: Synthetic oligonucleotide
  Antisense strand to SEQ ID NO: 1787979
uuauccaggcaaaggugcu

SEQ ID NO: 1787981 - RNA, 19 nt, Artificial Sequence
  Description of Artificial Sequence: Synthetic oligonucleotide
  Sense strand starting at position 2605 of SEQ ID NO: 1563001
gcaccuuugccuggauaaa

SEQ ID NO: 1787982 - RNA, 19 nt, Artificial Sequence
  Description of Artificial Sequence: Synthetic oligonucleotide
  Antisense strand to SEQ ID NO: 1787981
uuuauccaggcaaaggugc

SEQ ID NO: 1787983 - RNA, 19 nt, Artificial Sequence
  Description of Artificial Sequence: Synthetic oligonucleotide
  Sense strand starting at position 2795 of SEQ ID NO: 1563001
gucucuguugucggcuaaa

SEQ ID NO: 1787984 - RNA, 19 nt, Artificial Sequence
  Description of Artificial Sequence: Synthetic oligonucleotide
  Antisense strand to SEQ ID NO: 1787983
uuuagccgacaacagagac

SEQ ID NO: 1787985 - RNA, 19 nt, Artificial Sequence
  Description of Artificial Sequence: Synthetic oligonucleotide
  Sense strand starting at position 2798 of SEQ ID NO: 1563001
ucuguugucggcuaaagcu

SEQ ID NO: 1787986 - RNA, 19 nt, Artificial Sequence
  Description of Artificial Sequence: Synthetic oligonucleotide
  Antisense strand to SEQ ID NO: 1787985
agcuuuagccgacaacaga

SEQ ID NO: 1787987 - RNA, 19 nt, Artificial Sequence
  Description of Artificial Sequence: Synthetic oligonucleotide
  Sense strand starting at position 2866 of SEQ ID NO: 1563001
cucagagguugccgucauu

SEQ ID NO: 1787988 - RNA, 19 nt, Artificial Sequence
  Description of Artificial Sequence: Synthetic oligonucleotide
  Antisense strand to SEQ ID NO: 1787987
aaugacggcaaccucugag

SEQ ID NO: 1787989 - RNA, 19 nt, Artificial Sequence
  Description of Artificial Sequence: Synthetic oligonucleotide
  Sense strand starting at position 2899 of SEQ ID NO: 1563001
auaaauauuguccaggugu

SEQ ID NO: 1787990 - RNA, 19 nt, Artificial Sequence
  Description of Artificial Sequence: Synthetic oligonucleotide
  Antisense strand to SEQ ID NO: 1787989
acaccuggacaauauuuau

SEQ ID NO: 1787991 - RNA, 19 nt, Artificial Sequence
  Description of Artificial Sequence: Synthetic oligonucleotide
  Sense strand starting at position 2953 of SEQ ID NO: 1563001
ugacaugcuccuuggagaa

SEQ ID NO: 1787992 - RNA, 19 nt, Artificial Sequence
  Description of Artificial Sequence: Synthetic oligonucleotide
  Antisense strand to SEQ ID NO: 1787991
uucuccaaggagcauguca

SEQ ID NO: 1787993 - RNA, 19 nt, Artificial Sequence
  Description of Artificial Sequence: Synthetic oligonucleotide
  Sense strand starting at position 2955 of SEQ ID NO: 1563001
acaugcuccuuggagaagu

SEQ ID NO: 1787994 - RNA, 19 nt, Artificial Sequence
  Description of Artificial Sequence: Synthetic oligonucleotide
  Antisense strand to SEQ ID NO: 1787993
acuucuccaaggagcaugu

SEQ ID NO: 1787995 - RNA, 19 nt, Artificial Sequence
  Description of Artificial Sequence: Synthetic oligonucleotide
  Sense strand starting at position 2957 of SEQ ID NO: 1563001
augcuccuuggagaaguua

SEQ ID NO: 1787996 - RNA, 19 nt, Artificial Sequence
  Description of Artificial Sequence: Synthetic oligonucleotide
  Antisense strand to SEQ ID NO: 1787995
uaacuucuccaaggagcau

SEQ ID NO: 1787997 - RNA, 19 nt, Artificial Sequence
  Description of Artificial Sequence: Synthetic oligonucleotide
  Sense strand starting at position 2965 of SEQ ID NO: 1563001
uggagaaguuaguaacucu

SEQ ID NO: 1787998 - RNA, 19 nt, Artificial Sequence
  Description of Artificial Sequence: Synthetic oligonucleotide
  Antisense strand to SEQ ID NO: 1787997
agaguuacuaacuucucca

SEQ ID NO: 1787999 - RNA, 19 nt, Artificial Sequence
  Description of Artificial Sequence: Synthetic oligonucleotide
  Sense strand starting at position 2972 of SEQ ID NO: 1563001
guuaguaacucugcaggua

SEQ ID NO: 1788000 - RNA, 19 nt, Artificial Sequence
  Description of Artificial Sequence: Synthetic oligonucleotide
  Antisense strand to SEQ ID NO: 1787999
uaccugcagaguuacuaac

SEQ ID NO: 1788001 - RNA, 19 nt, Artificial Sequence
  Description of Artificial Sequence: Synthetic oligonucleotide
  Sense strand starting at position 3052 of SEQ ID NO: 1563001
ggagcagaggcauauccau

SEQ ID NO: 1788002 - RNA, 19 nt, Artificial Sequence
  Description of Artificial Sequence: Synthetic oligonucleotide
  Antisense strand to SEQ ID NO: 1788001
auggauaugccucugcucc

SEQ ID NO: 1788003 - RNA, 19 nt, Artificial Sequence
  Description of Artificial Sequence: Synthetic oligonucleotide
  Sense strand starting at position 3304 of SEQ ID NO: 1563001
aggauaagcuagucuccaa

SEQ ID NO: 1788004 - RNA, 19 nt, Artificial Sequence
  Description of Artificial Sequence: Synthetic oligonucleotide
  Antisense strand to SEQ ID NO: 1788003
uuggagacuagcuuauccu

SEQ ID NO: 1788005 - RNA, 19 nt, Artificial Sequence
  Description of Artificial Sequence: Synthetic oligonucleotide
  Sense strand starting at position 3388 of SEQ ID NO: 1563001
gaaugacauuaauggugga

SEQ ID NO: 1788006 - RNA, 19 nt, Artificial Sequence
  Description of Artificial Sequence: Synthetic oligonucleotide
  Antisense strand to SEQ ID NO: 1788005
uccaccauuaaugucauuc

SEQ ID NO: 1788007 - RNA, 19 nt, Artificial Sequence
  Description of Artificial Sequence: Synthetic oligonucleotide
  Sense strand starting at position 3697 of SEQ ID NO: 1563001
gccaacauuccugggcgua

SEQ ID NO: 1788008 - RNA, 19 nt, Artificial Sequence
  Description of Artificial Sequence: Synthetic oligonucleotide
  Antisense strand to SEQ ID NO: 1788007
uacgcccaggaauguuggc

SEQ ID NO: 1788009 - RNA, 19 nt, Artificial Sequence
  Description of Artificial Sequence: Synthetic oligonucleotide
  Sense strand starting at position 3699 of SEQ ID NO: 1563001
caacauuccugggcguaca

SEQ ID NO: 1788010 - RNA, 19 nt, Artificial Sequence
  Description of Artificial Sequence: Synthetic oligonucleotide
  Antisense strand to SEQ ID NO: 1788009
uguacgcccaggaauguug

SEQ ID NO: 1788011 - RNA, 19 nt, Artificial Sequence
  Description of Artificial Sequence: Synthetic oligonucleotide
  Sense strand starting at position 225 of SEQ ID NO: 1563002
ggucaaugaucacuucuac

SEQ ID NO: 1788012 - RNA, 19 nt, Artificial Sequence
  Description of Artificial Sequence: Synthetic oligonucleotide
  Antisense strand to SEQ ID NO: 1788011
guagaagugaucauugacc

SEQ ID NO: 1788013 - RNA, 19 nt, Artificial Sequence
  Description of Artificial Sequence: Synthetic oligonucleotide
  Sense strand starting at position 342 of SEQ ID NO: 1563002
ggugaucacguuuaaaggu

SEQ ID NO: 1788014 - RNA, 19 nt, Artificial Sequence
  Description of Artificial Sequence: Synthetic oligonucleotide
  Antisense strand to SEQ ID NO: 1788013
accuuuaaacgugaucacc

SEQ ID NO: 1788015 - RNA, 19 nt, Artificial Sequence
  Description of Artificial Sequence: Synthetic oligonucleotide
  Sense strand starting at position 355 of SEQ ID NO: 1563002
aaagguaaaucagcaaguu

SEQ ID NO: 1788016 - RNA, 19 nt, Artificial Sequence
  Description of Artificial Sequence: Synthetic oligonucleotide
  Antisense strand to SEQ ID NO: 1788015
aacuugcugauuuaccuuu

SEQ ID NO: 1788017 - RNA, 19 nt, Artificial Sequence
  Description of Artificial Sequence: Synthetic oligonucleotide
  Sense strand starting at position 597 of SEQ ID NO: 1563002
ucucuaaacucugugaggu

SEQ ID NO: 1788018 - RNA, 19 nt, Artificial Sequence
  Description of Artificial Sequence: Synthetic oligonucleotide
  Antisense strand to SEQ ID NO: 1788017
accucacagaguuuagaga

SEQ ID NO: 1788019 - RNA, 19 nt, Artificial Sequence
  Description of Artificial Sequence: Synthetic oligonucleotide
  Sense strand starting at position 598 of SEQ ID NO: 1563002
cucuaaacucugugaggua

SEQ ID NO: 1788020 - RNA, 19 nt, Artificial Sequence
  Description of Artificial Sequence: Synthetic oligonucleotide
  Antisense strand to SEQ ID NO: 1788019
uaccucacagaguuuagag

SEQ ID NO: 1788021 - RNA, 19 nt, Artificial Sequence
  Description of Artificial Sequence: Synthetic oligonucleotide
  Sense strand starting at position 607 of SEQ ID NO: 1563002
cugugagguagguaucacu

SEQ ID NO: 1788022 - RNA, 19 nt, Artificial Sequence
  Description of Artificial Sequence: Synthetic oligonucleotide
  Antisense strand to SEQ ID NO: 1788021
agugauaccuaccucacag

SEQ ID NO: 1788023 - RNA, 19 nt, Artificial Sequence
  Description of Artificial Sequence: Synthetic oligonucleotide
  Sense strand starting at position 722 of SEQ ID NO: 1563002
ugagcucucagugaaguuu

SEQ ID NO: 1788024 - RNA, 19 nt, Artificial Sequence
  Description of Artificial Sequence: Synthetic oligonucleotide
  Antisense strand to SEQ ID NO: 1788023
aaacuucacugagagcuca

SEQ ID NO: 1788025 - RNA, 19 nt, Artificial Sequence
  Description of Artificial Sequence: Synthetic oligonucleotide
  Sense strand starting at position 734 of SEQ ID NO: 1563002
gaaguuucuggaggcuaaa

SEQ ID NO: 1788026 - RNA, 19 nt, Artificial Sequence
  Description of Artificial Sequence: Synthetic oligonucleotide
  Antisense strand to SEQ ID NO: 1788025
uuuagccuccagaaacuuc

SEQ ID NO: 1788027 - RNA, 19 nt, Artificial Sequence
  Description of Artificial Sequence: Synthetic oligonucleotide
  Sense strand starting at position 762 of SEQ ID NO: 1563002
cagugauguuccucugaag

SEQ ID NO: 1788028 - RNA, 19 nt, Artificial Sequence
  Description of Artificial Sequence: Synthetic oligonucleotide
  Antisense strand to SEQ ID NO: 1788027
cuucagaggaacaucacug

SEQ ID NO: 1788029 - RNA, 19 nt, Artificial Sequence
  Description of Artificial Sequence: Synthetic oligonucleotide
  Sense strand starting at position 808 of SEQ ID NO: 1563002
ugugcuaacaacuggugaa

SEQ ID NO: 1788030 - RNA, 19 nt, Artificial Sequence
  Description of Artificial Sequence: Synthetic oligonucleotide
  Antisense strand to SEQ ID NO: 1788029
uucaccaguuguuagcaca

SEQ ID NO: 1788031 - RNA, 19 nt, Artificial Sequence
  Description of Artificial Sequence: Synthetic oligonucleotide
  Sense strand starting at position 809 of SEQ ID NO: 1563002
gugcuaacaacuggugaag

SEQ ID NO: 1788032 - RNA, 19 nt, Artificial Sequence
  Description of Artificial Sequence: Synthetic oligonucleotide
  Antisense strand to SEQ ID NO: 1788031
cuucaccaguuguuagcac

SEQ ID NO: 1788033 - RNA, 19 nt, Artificial Sequence
  Description of Artificial Sequence: Synthetic oligonucleotide
  Sense strand starting at position 1077 of SEQ ID NO: 1563002
aaucgagaggaucguuuga

SEQ ID NO: 1788034 - RNA, 19 nt, Artificial Sequence
  Description of Artificial Sequence: Synthetic oligonucleotide
  Antisense strand to SEQ ID NO: 1788033
ucaaacgauccucucgauu

SEQ ID NO: 1788035 - RNA, 19 nt, Artificial Sequence
  Description of Artificial Sequence: Synthetic oligonucleotide
  Sense strand starting at position 1419 of SEQ ID NO: 1563002
gaagcaugugacuaagcaa

SEQ ID NO: 1788036 - RNA, 19 nt, Artificial Sequence
  Description of Artificial Sequence: Synthetic oligonucleotide
  Antisense strand to SEQ ID NO: 1788035
uugcuuagucacaugcuuc

SEQ ID NO: 1788037 - RNA, 19 nt, Artificial Sequence
  Description of Artificial Sequence: Synthetic oligonucleotide
  Sense strand starting at position 1499 of SEQ ID NO: 1563002
guagccugaccuuaaacuu

SEQ ID NO: 1788038 - RNA, 19 nt, Artificial Sequence
  Description of Artificial Sequence: Synthetic oligonucleotide
  Antisense strand to SEQ ID NO: 1788037
aaguuuaaggucaggcuac

SEQ ID NO: 1788039 - RNA, 19 nt, Artificial Sequence
  Description of Artificial Sequence: Synthetic oligonucleotide
  Sense strand starting at position 1510 of SEQ ID NO: 1563002
uuaaacuucccacggcaaa

SEQ ID NO: 1788040 - RNA, 19 nt, Artificial Sequence
  Description of Artificial Sequence: Synthetic oligonucleotide
  Antisense strand to SEQ ID NO: 1788039
uuugccgugggaaguuuaa

SEQ ID NO: 1788041 - RNA, 19 nt, Artificial Sequence
  Description of Artificial Sequence: Synthetic oligonucleotide
  Sense strand starting at position 2333 of SEQ ID NO: 1563002
acuuguggacuuggaaacu

SEQ ID NO: 1788042 - RNA, 19 nt, Artificial Sequence
  Description of Artificial Sequence: Synthetic oligonucleotide
  Antisense strand to SEQ ID NO: 1788041
aguuuccaaguccacaagu

SEQ ID NO: 1788043 - RNA, 19 nt, Artificial Sequence
  Description of Artificial Sequence: Synthetic oligonucleotide
  Sense strand starting at position 2345 of SEQ ID NO: 1563002
ggaaacuucuuccuccaga

SEQ ID NO: 1788044 - RNA, 19 nt, Artificial Sequence
  Description of Artificial Sequence: Synthetic oligonucleotide
  Antisense strand to SEQ ID NO: 1788043
ucuggaggaagaaguuucc

SEQ ID NO: 1788045 - RNA, 19 nt, Artificial Sequence
  Description of Artificial Sequence: Synthetic oligonucleotide
  Sense strand starting at position 2440 of SEQ ID NO: 1563002
cuaguuggcaacuauggaa

SEQ ID NO: 1788046 - RNA, 19 nt, Artificial Sequence
  Description of Artificial Sequence: Synthetic oligonucleotide
  Antisense strand to SEQ ID NO: 1788045
uuccauaguugccaacuag

SEQ ID NO: 1788047 - RNA, 19 nt, Artificial Sequence
  Description of Artificial Sequence: Synthetic oligonucleotide
  Sense strand starting at position 2473 of SEQ ID NO: 1563002
uggguuuccucugugaaau

SEQ ID NO: 1788048 - RNA, 19 nt, Artificial Sequence
  Description of Artificial Sequence: Synthetic oligonucleotide
  Antisense strand to SEQ ID NO: 1788047
auuucacagaggaaaccca

SEQ ID NO: 1788049 - RNA, 19 nt, Artificial Sequence
  Description of Artificial Sequence: Synthetic oligonucleotide
  Sense strand starting at position 2474 of SEQ ID NO: 1563002
ggguuuccucugugaaaug

SEQ ID NO: 1788050 - RNA, 19 nt, Artificial Sequence
  Description of Artificial Sequence: Synthetic oligonucleotide
  Antisense strand to SEQ ID NO: 1788049
cauuucacagaggaaaccc

SEQ ID NO: 1788051 - RNA, 19 nt, Artificial Sequence
  Description of Artificial Sequence: Synthetic oligonucleotide
  Sense strand starting at position 2485 of SEQ ID NO: 1563002
gugaaaugacaauguacua

SEQ ID NO: 1788052 - RNA, 19 nt, Artificial Sequence
  Description of Artificial Sequence: Synthetic oligonucleotide
  Antisense strand to SEQ ID NO: 1788051
uaguacauugucauuucac

SEQ ID NO: 1788053 - RNA, 19 nt, Artificial Sequence
  Description of Artificial Sequence: Synthetic oligonucleotide
  Sense strand starting at position 2522 of SEQ ID NO: 1563002
ugcugugaggauuacgaaa

SEQ ID NO: 1788054 - RNA, 19 nt, Artificial Sequence
  Description of Artificial Sequence: Synthetic oligonucleotide
  Antisense strand to SEQ ID NO: 1788053
uuucguaauccucacagca

SEQ ID NO: 1788055 - RNA, 19 nt, Artificial Sequence
  Description of Artificial Sequence: Synthetic oligonucleotide
  Sense strand starting at position 2597 of SEQ ID NO: 1563002
guugcaaagugacuaacaa

SEQ ID NO: 1788056 - RNA, 19 nt, Artificial Sequence
  Description of Artificial Sequence: Synthetic oligonucleotide
  Antisense strand to SEQ ID NO: 1788055
uuguuagucacuuugcaac

SEQ ID NO: 1788057 - RNA, 19 nt, Artificial Sequence
  Description of Artificial Sequence: Synthetic oligonucleotide
  Sense strand starting at position 2653 of SEQ ID NO: 1563002
ccugucauacugugagauu

SEQ ID NO: 1788058 - RNA, 19 nt, Artificial Sequence
  Description of Artificial Sequence: Synthetic oligonucleotide
  Antisense strand to SEQ ID NO: 1788057
aaucucacaguaugacagg

SEQ ID NO: 1788059 - RNA, 19 nt, Artificial Sequence
  Description of Artificial Sequence: Synthetic oligonucleotide
  Sense strand starting at position 2664 of SEQ ID NO: 1563002
gugagauucugcuucagga

SEQ ID NO: 1788060 - RNA, 19 nt, Artificial Sequence
  Description of Artificial Sequence: Synthetic oligonucleotide
  Antisense strand to SEQ ID NO: 1788059
uccugaagcagaaucucac

SEQ ID NO: 1788061 - RNA, 19 nt, Artificial Sequence
  Description of Artificial Sequence: Synthetic oligonucleotide
  Sense strand starting at position 2677 of SEQ ID NO: 1563002
ucaggaugcuccucaggga

SEQ ID NO: 1788062 - RNA, 19 nt, Artificial Sequence
  Description of Artificial Sequence: Synthetic oligonucleotide
  Antisense strand to SEQ ID NO: 1788061
ucccugaggagcauccuga

SEQ ID NO: 1788063 - RNA, 19 nt, Artificial Sequence
  Description of Artificial Sequence: Synthetic oligonucleotide
  Sense strand starting at position 2698 of SEQ ID NO: 1563002
cagggauucuuuccugaga

SEQ ID NO: 1788064 - RNA, 19 nt, Artificial Sequence
  Description of Artificial Sequence: Synthetic oligonucleotide
  Antisense strand to SEQ ID NO: 1788063
ucucaggaaagaaucccug

SEQ ID NO: 1788065 - RNA, 19 nt, Artificial Sequence
  Description of Artificial Sequence: Synthetic oligonucleotide
  Sense strand starting at position 2749 of SEQ ID NO: 1563002
uuuagaauauccucgugau

SEQ ID NO: 1788066 - RNA, 19 nt, Artificial Sequence
  Description of Artificial Sequence: Synthetic oligonucleotide
  Antisense strand to SEQ ID NO: 1788065
aucacgaggauauucuaaa

SEQ ID NO: 1788067 - RNA, 19 nt, Artificial Sequence
  Description of Artificial Sequence: Synthetic oligonucleotide
  Sense strand starting at position 2750 of SEQ ID NO: 1563002
uuagaauauccucgugaua

SEQ ID NO: 1788068 - RNA, 19 nt, Artificial Sequence
  Description of Artificial Sequence: Synthetic oligonucleotide
  Antisense strand to SEQ ID NO: 1788067
uaucacgaggauauucuaa

SEQ ID NO: 1788069 - RNA, 19 nt, Artificial Sequence
  Description of Artificial Sequence: Synthetic oligonucleotide
  Sense strand starting at position 2753 of SEQ ID NO: 1563002
gaauauccucgugauaacu

SEQ ID NO: 1788070 - RNA, 19 nt, Artificial Sequence
  Description of Artificial Sequence: Synthetic oligonucleotide
  Antisense strand to SEQ ID NO: 1788069
aguuaucacgaggauauuc

SEQ ID NO: 1788071 - RNA, 19 nt, Artificial Sequence
  Description of Artificial Sequence: Synthetic oligonucleotide
  Sense strand starting at position 2763 of SEQ ID NO: 1563002
gugauaacuccucagugcu

SEQ ID NO: 1788072 - RNA, 19 nt, Artificial Sequence
  Description of Artificial Sequence: Synthetic oligonucleotide
  Antisense strand to SEQ ID NO: 1788071
agcacugaggaguuaucac

SEQ ID NO: 1788073 - RNA, 19 nt, Artificial Sequence
  Description of Artificial Sequence: Synthetic oligonucleotide
  Sense strand starting at position 2765 of SEQ ID NO: 1563002
gauaacuccucagugcuga

SEQ ID NO: 1788074 - RNA, 19 nt, Artificial Sequence
  Description of Artificial Sequence: Synthetic oligonucleotide
  Antisense strand to SEQ ID NO: 1788073
ucagcacugaggaguuauc

SEQ ID NO: 1788075 - RNA, 19 nt, Artificial Sequence
  Description of Artificial Sequence: Synthetic oligonucleotide
  Sense strand starting at position 2919 of SEQ ID NO: 1563002
agaaucaugacgugaaagu

SEQ ID NO: 1788076 - RNA, 19 nt, Artificial Sequence
  Description of Artificial Sequence: Synthetic oligonucleotide
  Antisense strand to SEQ ID NO: 1788075
acuuucacgucaugauucu

SEQ ID NO: 1788077 - RNA, 19 nt, Artificial Sequence
  Description of Artificial Sequence: Synthetic oligonucleotide
  Sense strand starting at position 2920 of SEQ ID NO: 1563002
gaaucaugacgugaaagug

SEQ ID NO: 1788078 - RNA, 19 nt, Artificial Sequence
  Description of Artificial Sequence: Synthetic oligonucleotide
  Antisense strand to SEQ ID NO: 1788077
cacuuucacgucaugauuc

SEQ ID NO: 1788079 - RNA, 19 nt, Artificial Sequence
  Description of Artificial Sequence: Synthetic oligonucleotide
  Sense strand starting at position 3304 of SEQ ID NO: 1563002
agaaacuaguuggcuguaa

SEQ ID NO: 1788080 - RNA, 19 nt, Artificial Sequence
  Description of Artificial Sequence: Synthetic oligonucleotide
  Antisense strand to SEQ ID NO: 1788079
uuacagccaacuaguuucu

SEQ ID NO: 1788081 - RNA, 19 nt, Artificial Sequence
  Description of Artificial Sequence: Synthetic oligonucleotide
  Sense strand starting at position 3305 of SEQ ID NO: 1563002
gaaacuaguuggcuguaaa

SEQ ID NO: 1788082 - RNA, 19 nt, Artificial Sequence
  Description of Artificial Sequence: Synthetic oligonucleotide
  Antisense strand to SEQ ID NO: 1788081
uuuacagccaacuaguuuc

SEQ ID NO: 1788083 - RNA, 19 nt, Artificial Sequence
  Description of Artificial Sequence: Synthetic oligonucleotide
  Sense strand starting at position 3329 of SEQ ID NO: 1563002
agaacucaguucucauuga

SEQ ID NO: 1788084 - RNA, 19 nt, Artificial Sequence
  Description of Artificial Sequence: Synthetic oligonucleotide
  Antisense strand to SEQ ID NO: 1788083
ucaaugagaacugaguucu

SEQ ID NO: 1788085 - RNA, 19 nt, Artificial Sequence
  Description of Artificial Sequence: Synthetic oligonucleotide
  Sense strand starting at position 3366 of SEQ ID NO: 1563002
gcuugcugucaagaauaua

SEQ ID NO: 1788086 - RNA, 19 nt, Artificial Sequence
  Description of Artificial Sequence: Synthetic oligonucleotide
  Antisense strand to SEQ ID NO: 1788085
uauauucuugacagcaagc

SEQ ID NO: 1788087 - RNA, 19 nt, Artificial Sequence
  Description of Artificial Sequence: Synthetic oligonucleotide
  Sense strand starting at position 3386 of SEQ ID NO: 1563002
uggauuaugcaucauaguu

SEQ ID NO: 1788088 - RNA, 19 nt, Artificial Sequence
  Description of Artificial Sequence: Synthetic oligonucleotide
  Antisense strand to SEQ ID NO: 1788087
aacuaugaugcauaaucca

SEQ ID NO: 1788089 - RNA, 19 nt, Artificial Sequence
  Description of Artificial Sequence: Synthetic oligonucleotide
  Sense strand starting at position 3983 of SEQ ID NO: 1563002
ugacgcgaucuugacucau

SEQ ID NO: 1788090 - RNA, 19 nt, Artificial Sequence
  Description of Artificial Sequence: Synthetic oligonucleotide
  Antisense strand to SEQ ID NO: 1788089
augagucaagaucgcguca

SEQ ID NO: 1788091 - RNA, 19 nt, Artificial Sequence
  Description of Artificial Sequence: Synthetic oligonucleotide
  Sense strand starting at position 416 of SEQ ID NO: 1563003
cagaaugagucugcacaga

SEQ ID NO: 1788092 - RNA, 19 nt, Artificial Sequence
  Description of Artificial Sequence: Synthetic oligonucleotide
  Antisense strand to SEQ ID NO: 1788091
ucugugcagacucauucug

SEQ ID NO: 1788093 - RNA, 19 nt, Artificial Sequence
  Description of Artificial Sequence: Synthetic oligonucleotide
  Sense strand starting at position 966 of SEQ ID NO: 1563003
uaugcuaugccucagguuu

SEQ ID NO: 1788094 - RNA, 19 nt, Artificial Sequence
  Description of Artificial Sequence: Synthetic oligonucleotide
  Antisense strand to SEQ ID NO: 1788093
aaaccugaggcauagcaua

SEQ ID NO: 1788095 - RNA, 19 nt, Artificial Sequence
  Description of Artificial Sequence: Synthetic oligonucleotide
  Sense strand starting at position 972 of SEQ ID NO: 1563003
augccucagguuugaagau

SEQ ID NO: 1788096 - RNA, 19 nt, Artificial Sequence
  Description of Artificial Sequence: Synthetic oligonucleotide
  Antisense strand to SEQ ID NO: 1788095
aucuucaaaccugaggcau

SEQ ID NO: 1788097 - RNA, 19 nt, Artificial Sequence
  Description of Artificial Sequence: Synthetic oligonucleotide
  Sense strand starting at position 1193 of SEQ ID NO: 1563003
gugagaacaucacaauaga

SEQ ID NO: 1788098 - RNA, 19 nt, Artificial Sequence
  Description of Artificial Sequence: Synthetic oligonucleotide
  Antisense strand to SEQ ID NO: 1788097
ucuauugugauguucucac

SEQ ID NO: 1788099 - RNA, 19 nt, Artificial Sequence
  Description of Artificial Sequence: Synthetic oligonucleotide
  Sense strand starting at position 1208 of SEQ ID NO: 1563003
uagaucaugugagugagaa

SEQ ID NO: 1788100 - RNA, 19 nt, Artificial Sequence
  Description of Artificial Sequence: Synthetic oligonucleotide
  Antisense strand to SEQ ID NO: 1788099
uucucacucacaugaucua

SEQ ID NO: 1788101 - RNA, 19 nt, Artificial Sequence
  Description of Artificial Sequence: Synthetic oligonucleotide
  Sense strand starting at position 1209 of SEQ ID NO: 1563003
agaucaugugagugagaau

SEQ ID NO: 1788102 - RNA, 19 nt, Artificial Sequence
  Description of Artificial Sequence: Synthetic oligonucleotide
  Antisense strand to SEQ ID NO: 1788101
auucucacucacaugaucu

SEQ ID NO: 1788103 - RNA, 19 nt, Artificial Sequence
  Description of Artificial Sequence: Synthetic oligonucleotide
  Sense strand starting at position 1282 of SEQ ID NO: 1563003
gcaguuucugcagaucuac

SEQ ID NO: 1788104 - RNA, 19 nt, Artificial Sequence
  Description of Artificial Sequence: Synthetic oligonucleotide
  Antisense strand to SEQ ID NO: 1788103
guagaucugcagaaacugc

SEQ ID NO: 1788105 - RNA, 19 nt, Artificial Sequence
  Description of Artificial Sequence: Synthetic oligonucleotide
  Sense strand starting at position 1297 of SEQ ID NO: 1563003
cuacgcugccuuugggaaa

SEQ ID NO: 1788106 - RNA, 19 nt, Artificial Sequence
  Description of Artificial Sequence: Synthetic oligonucleotide
  Antisense strand to SEQ ID NO: 1788105
uuucccaaaggcagcguag

SEQ ID NO: 1788107 - RNA, 19 nt, Artificial Sequence
  Description of Artificial Sequence: Synthetic oligonucleotide
  Sense strand starting at position 1304 of SEQ ID NO: 1563003
gccuuugggaaauguuuag

SEQ ID NO: 1788108 - RNA, 19 nt, Artificial Sequence
  Description of Artificial Sequence: Synthetic oligonucleotide
  Antisense strand to SEQ ID NO: 1788107
cuaaacauuucccaaaggc

SEQ ID NO: 1788109 - RNA, 19 nt, Artificial Sequence
  Description of Artificial Sequence: Synthetic oligonucleotide
  Sense strand starting at position 1308 of SEQ ID NO: 1563003
uugggaaauguuuagcauc

SEQ ID NO: 1788110 - RNA, 19 nt, Artificial Sequence
  Description of Artificial Sequence: Synthetic oligonucleotide
  Antisense strand to SEQ ID NO: 1788109
gaugcuaaacauuucccaa

SEQ ID NO: 1788111 - RNA, 19 nt, Artificial Sequence
  Description of Artificial Sequence: Synthetic oligonucleotide
  Sense strand starting at position 1310 of SEQ ID NO: 1563003
gggaaauguuuagcaucac

SEQ ID NO: 1788112 - RNA, 19 nt, Artificial Sequence
  Description of Artificial Sequence: Synthetic oligonucleotide
  Antisense strand to SEQ ID NO: 1788111
gugaugcuaaacauuuccc

SEQ ID NO: 1788113 - RNA, 19 nt, Artificial Sequence
  Description of Artificial Sequence: Synthetic oligonucleotide
  Sense strand starting at position 1673 of SEQ ID NO: 1563003
uaugaacucugagcagaug

SEQ ID NO: 1788114 - RNA, 19 nt, Artificial Sequence
  Description of Artificial Sequence: Synthetic oligonucleotide
  Antisense strand to SEQ ID NO: 1788113
caucugcucagaguucaua

SEQ ID NO: 1788115 - RNA, 19 nt, Artificial Sequence
  Description of Artificial Sequence: Synthetic oligonucleotide
  Sense strand starting at position 1709 of SEQ ID NO: 1563003
uuugguuucuuaguaacua

SEQ ID NO: 1788116 - RNA, 19 nt, Artificial Sequence
  Description of Artificial Sequence: Synthetic oligonucleotide
  Antisense strand to SEQ ID NO: 1788115
uaguuacuaagaaaccaaa

SEQ ID NO: 1788117 - RNA, 19 nt, Artificial Sequence
  Description of Artificial Sequence: Synthetic oligonucleotide
  Sense strand starting at position 1717 of SEQ ID NO: 1563003
cuuaguaacuaggcaaagu

SEQ ID NO: 1788118 - RNA, 19 nt, Artificial Sequence
  Description of Artificial Sequence: Synthetic oligonucleotide
  Antisense strand to SEQ ID NO: 1788117
acuuugccuaguuacuaag

SEQ ID NO: 1788119 - RNA, 19 nt, Artificial Sequence
  Description of Artificial Sequence: Synthetic oligonucleotide
  Sense strand starting at position 1989 of SEQ ID NO: 1563003
aguccaaauccaggauucu

SEQ ID NO: 1788120 - RNA, 19 nt, Artificial Sequence
  Description of Artificial Sequence: Synthetic oligonucleotide
  Antisense strand to SEQ ID NO: 1788119
agaauccuggauuuggacu

SEQ ID NO: 1788121 - RNA, 19 nt, Artificial Sequence
  Description of Artificial Sequence: Synthetic oligonucleotide
  Sense strand starting at position 2012 of SEQ ID NO: 1563003
gcaugucaugcuuucucga

SEQ ID NO: 1788122 - RNA, 19 nt, Artificial Sequence
  Description of Artificial Sequence: Synthetic oligonucleotide
  Antisense strand to SEQ ID NO: 1788121
ucgagaaagcaugacaugc

SEQ ID NO: 1788123 - RNA, 19 nt, Artificial Sequence
  Description of Artificial Sequence: Synthetic oligonucleotide
  Sense strand starting at position 2014 of SEQ ID NO: 1563003
augucaugcuuucucgaac

SEQ ID NO: 1788124 - RNA, 19 nt, Artificial Sequence
  Description of Artificial Sequence: Synthetic oligonucleotide
  Antisense strand to SEQ ID NO: 1788123
guucgagaaagcaugacau

SEQ ID NO: 1788125 - RNA, 19 nt, Artificial Sequence
  Description of Artificial Sequence: Synthetic oligonucleotide
  Sense strand starting at position 2057 of SEQ ID NO: 1563003
cauugauaugcaugucaug

SEQ ID NO: 1788126 - RNA, 19 nt, Artificial Sequence
  Description of Artificial Sequence: Synthetic oligonucleotide
  Antisense strand to SEQ ID NO: 1788125
caugacaugcauaucaaug

SEQ ID NO: 1788127 - RNA, 19 nt, Artificial Sequence
  Description of Artificial Sequence: Synthetic oligonucleotide
  Sense strand starting at position 2066 of SEQ ID NO: 1563003
gcaugucauggcuguagaa

SEQ ID NO: 1788128 - RNA, 19 nt, Artificial Sequence
  Description of Artificial Sequence: Synthetic oligonucleotide
  Antisense strand to SEQ ID NO: 1788127
uucuacagccaugacaugc

SEQ ID NO: 1788129 - RNA, 19 nt, Artificial Sequence
  Description of Artificial Sequence: Synthetic oligonucleotide
  Sense strand starting at position 2285 of SEQ ID NO: 1563003
gaaacaucugcagggucaa

SEQ ID NO: 1788130 - RNA, 19 nt, Artificial Sequence
  Description of Artificial Sequence: Synthetic oligonucleotide
  Antisense strand to SEQ ID NO: 1788129
uugacccugcagauguuuc

SEQ ID NO: 1788131 - RNA, 19 nt, Artificial Sequence
  Description of Artificial Sequence: Synthetic oligonucleotide
  Sense strand starting at position 2286 of SEQ ID NO: 1563003
aaacaucugcagggucaau

SEQ ID NO: 1788132 - RNA, 19 nt, Artificial Sequence
  Description of Artificial Sequence: Synthetic oligonucleotide
  Antisense strand to SEQ ID NO: 1788131
auugacccugcagauguuu

SEQ ID NO: 1788133 - RNA, 19 nt, Artificial Sequence
  Description of Artificial Sequence: Synthetic oligonucleotide
  Sense strand starting at position 2412 of SEQ ID NO: 1563003
aaggaaaggucccaugaua

SEQ ID NO: 1788134 - RNA, 19 nt, Artificial Sequence
  Description of Artificial Sequence: Synthetic oligonucleotide
  Antisense strand to SEQ ID NO: 1788133
uaucaugggaccuuuccuu

SEQ ID NO: 1788135 - RNA, 19 nt, Artificial Sequence
  Description of Artificial Sequence: Synthetic oligonucleotide
  Sense strand starting at position 2626 of SEQ ID NO: 1563003
aguaacacgaauugguuua

SEQ ID NO: 1788136 - RNA, 19 nt, Artificial Sequence
  Description of Artificial Sequence: Synthetic oligonucleotide
  Antisense strand to SEQ ID NO: 1788135
uaaaccaauucguguuacu

SEQ ID NO: 1788137 - RNA, 19 nt, Artificial Sequence
  Description of Artificial Sequence: Synthetic oligonucleotide
  Sense strand starting at position 2679 of SEQ ID NO: 1563003
accuauggaugucuccaaa

SEQ ID NO: 1788138 - RNA, 19 nt, Artificial Sequence
  Description of Artificial Sequence: Synthetic oligonucleotide
  Antisense strand to SEQ ID NO: 1788137
uuuggagacauccauaggu

SEQ ID NO: 1788139 - RNA, 19 nt, Artificial Sequence
  Description of Artificial Sequence: Synthetic oligonucleotide
  Sense strand starting at position 2682 of SEQ ID NO: 1563003
uauggaugucuccaaaugu

SEQ ID NO: 1788140 - RNA, 19 nt, Artificial Sequence
  Description of Artificial Sequence: Synthetic oligonucleotide
  Antisense strand to SEQ ID NO: 1788139
acauuuggagacauccaua

SEQ ID NO: 1788141 - RNA, 19 nt, Artificial Sequence
  Description of Artificial Sequence: Synthetic oligonucleotide
  Sense strand starting at position 2766 of SEQ ID NO: 1563003
cccuaaaucuugcccgagu

SEQ ID NO: 1788142 - RNA, 19 nt, Artificial Sequence
  Description of Artificial Sequence: Synthetic oligonucleotide
  Antisense strand to SEQ ID NO: 1788141
acucgggcaagauuuaggg

SEQ ID NO: 1788143 - RNA, 19 nt, Artificial Sequence
  Description of Artificial Sequence: Synthetic oligonucleotide
  Sense strand starting at position 2767 of SEQ ID NO: 1563003
ccuaaaucuugcccgagua

SEQ ID NO: 1788144 - RNA, 19 nt, Artificial Sequence
  Description of Artificial Sequence: Synthetic oligonucleotide
  Antisense strand to SEQ ID NO: 1788143
uacucgggcaagauuuagg

SEQ ID NO: 1788145 - RNA, 19 nt, Artificial Sequence
  Description of Artificial Sequence: Synthetic oligonucleotide
  Sense strand starting at position 2768 of SEQ ID NO: 1563003
cuaaaucuugcccgaguag

SEQ ID NO: 1788146 - RNA, 19 nt, Artificial Sequence
  Description of Artificial Sequence: Synthetic oligonucleotide
  Antisense strand to SEQ ID NO: 1788145
cuacucgggcaagauuuag

SEQ ID NO: 1788147 - RNA, 19 nt, Artificial Sequence
  Description of Artificial Sequence: Synthetic oligonucleotide
  Sense strand starting at position 2803 of SEQ ID NO: 1563003
uuaagaagcucacugugua

SEQ ID NO: 1788148 - RNA, 19 nt, Artificial Sequence
  Description of Artificial Sequence: Synthetic oligonucleotide
  Antisense strand to SEQ ID NO: 1788147
uacacagugagcuucuuaa

SEQ ID NO: 1788149 - RNA, 19 nt, Artificial Sequence
  Description of Artificial Sequence: Synthetic oligonucleotide
  Sense strand starting at position 2810 of SEQ ID NO: 1563003
gcucacuguguaggauuau

SEQ ID NO: 1788150 - RNA, 19 nt, Artificial Sequence
  Description of Artificial Sequence: Synthetic oligonucleotide
  Antisense strand to SEQ ID NO: 1788149
auaauccuacacagugagc

SEQ ID NO: 1788151 - RNA, 19 nt, Artificial Sequence
  Description of Artificial Sequence: Synthetic oligonucleotide
  Sense strand starting at position 2819 of SEQ ID NO: 1563003
guaggauuaucuguguaag

SEQ ID NO: 1788152 - RNA, 19 nt, Artificial Sequence
  Description of Artificial Sequence: Synthetic oligonucleotide
  Antisense strand to SEQ ID NO: 1788151
cuuacacagauaauccuac

SEQ ID NO: 1788153 - RNA, 19 nt, Artificial Sequence
  Description of Artificial Sequence: Synthetic oligonucleotide
  Sense strand starting at position 2820 of SEQ ID NO: 1563003
uaggauuaucuguguaaga

SEQ ID NO: 1788154 - RNA, 19 nt, Artificial Sequence
  Description of Artificial Sequence: Synthetic oligonucleotide
  Antisense strand to SEQ ID NO: 1788153
ucuuacacagauaauccua

SEQ ID NO: 1788155 - RNA, 19 nt, Artificial Sequence
  Description of Artificial Sequence: Synthetic oligonucleotide
  Sense strand starting at position 2821 of SEQ ID NO: 1563003
aggauuaucuguguaagau

SEQ ID NO: 1788156 - RNA, 19 nt, Artificial Sequence
  Description of Artificial Sequence: Synthetic oligonucleotide
  Antisense strand to SEQ ID NO: 1788155
aucuuacacagauaauccu

SEQ ID NO: 1788157 - RNA, 19 nt, Artificial Sequence
  Description of Artificial Sequence: Synthetic oligonucleotide
  Sense strand starting at position 2863 of SEQ ID NO: 1563003
agcguuaaacaguaacagu

SEQ ID NO: 1788158 - RNA, 19 nt, Artificial Sequence
  Description of Artificial Sequence: Synthetic oligonucleotide
  Antisense strand to SEQ ID NO: 1788157
acuguuacuguuuaacgcu

SEQ ID NO: 1788159 - RNA, 19 nt, Artificial Sequence
  Description of Artificial Sequence: Synthetic oligonucleotide
  Sense strand starting at position 2928 of SEQ ID NO: 1563003
acaguuaaccaguggaaga

SEQ ID NO: 1788160 - RNA, 19 nt, Artificial Sequence
  Description of Artificial Sequence: Synthetic oligonucleotide
  Antisense strand to SEQ ID NO: 1788159
ucuuccacugguuaacugu

SEQ ID NO: 1788161 - RNA, 19 nt, Artificial Sequence
  Description of Artificial Sequence: Synthetic oligonucleotide
  Sense strand starting at position 3016 of SEQ ID NO: 1563003
auggcuaaguuccuuauaa

SEQ ID NO: 1788162 - RNA, 19 nt, Artificial Sequence
  Description of Artificial Sequence: Synthetic oligonucleotide
  Antisense strand to SEQ ID NO: 1788161
uuauaaggaacuuagccau

SEQ ID NO: 1788163 - RNA, 19 nt, Artificial Sequence
  Description of Artificial Sequence: Synthetic oligonucleotide
  Sense strand starting at position 3017 of SEQ ID NO: 1563003
uggcuaaguuccuuauaaa

SEQ ID NO: 1788164 - RNA, 19 nt, Artificial Sequence
  Description of Artificial Sequence: Synthetic oligonucleotide
  Antisense strand to SEQ ID NO: 1788163
uuuauaaggaacuuagcca

SEQ ID NO: 1788165 - RNA, 19 nt, Artificial Sequence
  Description of Artificial Sequence: Synthetic oligonucleotide
  Sense strand starting at position 3132 of SEQ ID NO: 1563003
gggcaacaucgugagacaa

SEQ ID NO: 1788166 - RNA, 19 nt, Artificial Sequence
  Description of Artificial Sequence: Synthetic oligonucleotide
  Antisense strand to SEQ ID NO: 1788165
uugucucacgauguugccc

SEQ ID NO: 1788167 - RNA, 19 nt, Artificial Sequence
  Description of Artificial Sequence: Synthetic oligonucleotide
  Sense strand starting at position 3344 of SEQ ID NO: 1563003
gugagaauuuaauaaguca

SEQ ID NO: 1788168 - RNA, 19 nt, Artificial Sequence
  Description of Artificial Sequence: Synthetic oligonucleotide
  Antisense strand to SEQ ID NO: 1788167
ugacuuauuaaauucucac

SEQ ID NO: 1788169 - RNA, 19 nt, Artificial Sequence
  Description of Artificial Sequence: Synthetic oligonucleotide
  Sense strand starting at position 3407 of SEQ ID NO: 1563003
gagaauagauguuucuugu

SEQ ID NO: 1788170 - RNA, 19 nt, Artificial Sequence
  Description of Artificial Sequence: Synthetic oligonucleotide
  Antisense strand to SEQ ID NO: 1788169
acaagaaacaucuauucuc

SEQ ID NO: 1788171 - RNA, 19 nt, Artificial Sequence
  Description of Artificial Sequence: Synthetic oligonucleotide
  Sense strand starting at position 47 of SEQ ID NO: 1563004
gugagauccuauuagaucc

SEQ ID NO: 1788172 - RNA, 19 nt, Artificial Sequence
  Description of Artificial Sequence: Synthetic oligonucleotide
  Antisense strand to SEQ ID NO: 1788171
ggaucuaauaggaucucac

SEQ ID NO: 1788173 - RNA, 19 nt, Artificial Sequence
  Description of Artificial Sequence: Synthetic oligonucleotide
  Sense strand starting at position 55 of SEQ ID NO: 1563004
cuauuagaucccugcagcu

SEQ ID NO: 1788174 - RNA, 19 nt, Artificial Sequence
  Description of Artificial Sequence: Synthetic oligonucleotide
  Antisense strand to SEQ ID NO: 1788173
agcugcagggaucuaauag

SEQ ID NO: 1788175 - RNA, 19 nt, Artificial Sequence
  Description of Artificial Sequence: Synthetic oligonucleotide
  Sense strand starting at position 72 of SEQ ID NO: 1563004
cuucgaacuccugggcgau

SEQ ID NO: 1788176 - RNA, 19 nt, Artificial Sequence
  Description of Artificial Sequence: Synthetic oligonucleotide
  Antisense strand to SEQ ID NO: 1788175
aucgcccaggaguucgaag

SEQ ID NO: 1788177 - RNA, 19 nt, Artificial Sequence
  Description of Artificial Sequence: Synthetic oligonucleotide
  Sense strand starting at position 114 of SEQ ID NO: 1563004
uuuaaauaaggcugucaag

SEQ ID NO: 1788178 - RNA, 19 nt, Artificial Sequence
  Description of Artificial Sequence: Synthetic oligonucleotide
  Antisense strand to SEQ ID NO: 1788177
cuugacagccuuauuuaaa

SEQ ID NO: 1788179 - RNA, 19 nt, Artificial Sequence
  Description of Artificial Sequence: Synthetic oligonucleotide
  Sense strand starting at position 117 of SEQ ID NO: 1563004
aaauaaggcugucaaggaa

SEQ ID NO: 1788180 - RNA, 19 nt, Artificial Sequence
  Description of Artificial Sequence: Synthetic oligonucleotide
  Antisense strand to SEQ ID NO: 1788179
uuccuugacagccuuauuu

SEQ ID NO: 1788181 - RNA, 19 nt, Artificial Sequence
  Description of Artificial Sequence: Synthetic oligonucleotide
  Sense strand starting at position 164 of SEQ ID NO: 1563004
gagggaaugugccaugcaa

SEQ ID NO: 1788182 - RNA, 19 nt, Artificial Sequence
  Description of Artificial Sequence: Synthetic oligonucleotide
  Antisense strand to SEQ ID NO: 1788181
uugcauggcacauucccuc

SEQ ID NO: 1788183 - RNA, 19 nt, Artificial Sequence
  Description of Artificial Sequence: Synthetic oligonucleotide
  Sense strand starting at position 166 of SEQ ID NO: 1563004
gggaaugugccaugcaaau

SEQ ID NO: 1788184 - RNA, 19 nt, Artificial Sequence
  Description of Artificial Sequence: Synthetic oligonucleotide
  Antisense strand to SEQ ID NO: 1788183
auuugcauggcacauuccc

SEQ ID NO: 1788185 - RNA, 19 nt, Artificial Sequence
  Description of Artificial Sequence: Synthetic oligonucleotide
  Sense strand starting at position 407 of SEQ ID NO: 1563004
ggcugaucggcagaggauu

SEQ ID NO: 1788186 - RNA, 19 nt, Artificial Sequence
  Description of Artificial Sequence: Synthetic oligonucleotide
  Antisense strand to SEQ ID NO: 1788185
aauccucugccgaucagcc

SEQ ID NO: 1788187 - RNA, 19 nt, Artificial Sequence
  Description of Artificial Sequence: Synthetic oligonucleotide
  Sense strand starting at position 491 of SEQ ID NO: 1563004
ggcguaaacaccugccuau

SEQ ID NO: 1788188 - RNA, 19 nt, Artificial Sequence
  Description of Artificial Sequence: Synthetic oligonucleotide
  Antisense strand to SEQ ID NO: 1788187
auaggcagguguuuacgcc

SEQ ID NO: 1788189 - RNA, 19 nt, Artificial Sequence
  Description of Artificial Sequence: Synthetic oligonucleotide
  Sense strand starting at position 561 of SEQ ID NO: 1563004
uugaacauuugacgacuua

SEQ ID NO: 1788190 - RNA, 19 nt, Artificial Sequence
  Description of Artificial Sequence: Synthetic oligonucleotide
  Antisense strand to SEQ ID NO: 1788189
uaagucgucaaauguucaa

SEQ ID NO: 1788191 - RNA, 19 nt, Artificial Sequence
  Description of Artificial Sequence: Synthetic oligonucleotide
  Sense strand starting at position 622 of SEQ ID NO: 1563004
uccgcaaucccucaucuga

SEQ ID NO: 1788192 - RNA, 19 nt, Artificial Sequence
  Description of Artificial Sequence: Synthetic oligonucleotide
  Antisense strand to SEQ ID NO: 1788191
ucagaugagggauugcgga

SEQ ID NO: 1788193 - RNA, 19 nt, Artificial Sequence
  Description of Artificial Sequence: Synthetic oligonucleotide
  Sense strand starting at position 624 of SEQ ID NO: 1563004
cgcaaucccucaucugaaa

SEQ ID NO: 1788194 - RNA, 19 nt, Artificial Sequence
  Description of Artificial Sequence: Synthetic oligonucleotide
  Antisense strand to SEQ ID NO: 1788193
uuucagaugagggauugcg

SEQ ID NO: 1788195 - RNA, 19 nt, Artificial Sequence
  Description of Artificial Sequence: Synthetic oligonucleotide
  Sense strand starting at position 651 of SEQ ID NO: 1563004
cugggcaaguaugagaauu

SEQ ID NO: 1788196 - RNA, 19 nt, Artificial Sequence
  Description of Artificial Sequence: Synthetic oligonucleotide
  Antisense strand to SEQ ID NO: 1788195
aauucucauacuugcccag

SEQ ID NO: 1788197 - RNA, 19 nt, Artificial Sequence
  Description of Artificial Sequence: Synthetic oligonucleotide
  Sense strand starting at position 842 of SEQ ID NO: 1563004
gcgcagugagcguuugaga

SEQ ID NO: 1788198 - RNA, 19 nt, Artificial Sequence
  Description of Artificial Sequence: Synthetic oligonucleotide
  Antisense strand to SEQ ID NO: 1788197
ucucaaacgcucacugcgc

SEQ ID NO: 1788199 - RNA, 19 nt, Artificial Sequence
  Description of Artificial Sequence: Synthetic oligonucleotide
  Sense strand starting at position 843 of SEQ ID NO: 1563004
cgcagugagcguuugagag

SEQ ID NO: 1788200 - RNA, 19 nt, Artificial Sequence
  Description of Artificial Sequence: Synthetic oligonucleotide
  Antisense strand to SEQ ID NO: 1788199
cucucaaacgcucacugcg

SEQ ID NO: 1788201 - RNA, 19 nt, Artificial Sequence
  Description of Artificial Sequence: Synthetic oligonucleotide
  Sense strand starting at position 849 of SEQ ID NO: 1563004
gagcguuugagaggagcaa

SEQ ID NO: 1788202 - RNA, 19 nt, Artificial Sequence
  Description of Artificial Sequence: Synthetic oligonucleotide
  Antisense strand to SEQ ID NO: 1788201
uugcuccucucaaacgcuc

SEQ ID NO: 1788203 - RNA, 19 nt, Artificial Sequence
  Description of Artificial Sequence: Synthetic oligonucleotide
  Sense strand starting at position 850 of SEQ ID NO: 1563004
agcguuugagaggagcaaa

SEQ ID NO: 1788204 - RNA, 19 nt, Artificial Sequence
  Description of Artificial Sequence: Synthetic oligonucleotide
  Antisense strand to SEQ ID NO: 1788203
uuugcuccucucaaacgcu

SEQ ID NO: 1788205 - RNA, 19 nt, Artificial Sequence
  Description of Artificial Sequence: Synthetic oligonucleotide
  Sense strand starting at position 928 of SEQ ID NO: 1563004
gaggguucgcgcaacgcua

SEQ ID NO: 1788206 - RNA, 19 nt, Artificial Sequence
  Description of Artificial Sequence: Synthetic oligonucleotide
  Antisense strand to SEQ ID NO: 1788205
uagcguugcgcgaacccuc

SEQ ID NO: 1788207 - RNA, 19 nt, Artificial Sequence
  Description of Artificial Sequence: Synthetic oligonucleotide
  Sense strand starting at position 946 of SEQ ID NO: 1563004
aaacgauggccgggacuaa

SEQ ID NO: 1788208 - RNA, 19 nt, Artificial Sequence
  Description of Artificial Sequence: Synthetic oligonucleotide
  Antisense strand to SEQ ID NO: 1788207
uuagucccggccaucguuu

SEQ ID NO: 1788209 - RNA, 19 nt, Artificial Sequence
  Description of Artificial Sequence: Synthetic oligonucleotide
  Sense strand starting at position 957 of SEQ ID NO: 1563004
gggacuaaggccugagacu

SEQ ID NO: 1788210 - RNA, 19 nt, Artificial Sequence
  Description of Artificial Sequence: Synthetic oligonucleotide
  Antisense strand to SEQ ID NO: 1788209
agucucaggccuuaguccc

SEQ ID NO: 1788211 - RNA, 19 nt, Artificial Sequence
  Description of Artificial Sequence: Synthetic oligonucleotide
  Sense strand starting at position 2040 of SEQ ID NO: 1563004
ugugaugggcacuguagua

SEQ ID NO: 1788212 - RNA, 19 nt, Artificial Sequence
  Description of Artificial Sequence: Synthetic oligonucleotide
  Antisense strand to SEQ ID NO: 1788211
uacuacagugcccaucaca

SEQ ID NO: 1788213 - RNA, 19 nt, Artificial Sequence
  Description of Artificial Sequence: Synthetic oligonucleotide
  Sense strand starting at position 2058 of SEQ ID NO: 1563004
agcucuauugcucagacuu

SEQ ID NO: 1788214 - RNA, 19 nt, Artificial Sequence
  Description of Artificial Sequence: Synthetic oligonucleotide
  Antisense strand to SEQ ID NO: 1788213
aagucugagcaauagagcu

SEQ ID NO: 1788215 - RNA, 19 nt, Artificial Sequence
  Description of Artificial Sequence: Synthetic oligonucleotide
  Sense strand starting at position 2191 of SEQ ID NO: 1563004
ucgugcaucuauuaagaug

SEQ ID NO: 1788216 - RNA, 19 nt, Artificial Sequence
  Description of Artificial Sequence: Synthetic oligonucleotide
  Antisense strand to SEQ ID NO: 1788215
caucuuaauagaugcacga

SEQ ID NO: 1788217 - RNA, 19 nt, Artificial Sequence
  Description of Artificial Sequence: Synthetic oligonucleotide
  Sense strand starting at position 2205 of SEQ ID NO: 1563004
agaugaucauauggguauu

SEQ ID NO: 1788218 - RNA, 19 nt, Artificial Sequence
  Description of Artificial Sequence: Synthetic oligonucleotide
  Antisense strand to SEQ ID NO: 1788217
aauacccauaugaucaucu

SEQ ID NO: 1788219 - RNA, 19 nt, Artificial Sequence
  Description of Artificial Sequence: Synthetic oligonucleotide
  Sense strand starting at position 2216 of SEQ ID NO: 1563004
uggguauucuccuuuaauc

SEQ ID NO: 1788220 - RNA, 19 nt, Artificial Sequence
  Description of Artificial Sequence: Synthetic oligonucleotide
  Antisense strand to SEQ ID NO: 1788219
gauuaaaggagaauaccca

SEQ ID NO: 1788221 - RNA, 19 nt, Artificial Sequence
  Description of Artificial Sequence: Synthetic oligonucleotide
  Sense strand starting at position 2218 of SEQ ID NO: 1563004
gguauucuccuuuaaucug

SEQ ID NO: 1788222 - RNA, 19 nt, Artificial Sequence
  Description of Artificial Sequence: Synthetic oligonucleotide
  Antisense strand to SEQ ID NO: 1788221
cagauuaaaggagaauacc

SEQ ID NO: 1788223 - RNA, 19 nt, Artificial Sequence
  Description of Artificial Sequence: Synthetic oligonucleotide
  Sense strand starting at position 2226 of SEQ ID NO: 1563004
ccuuuaaucuguuaaugag

SEQ ID NO: 1788224 - RNA, 19 nt, Artificial Sequence
  Description of Artificial Sequence: Synthetic oligonucleotide
  Antisense strand to SEQ ID NO: 1788223
cucauuaacagauuaaagg

SEQ ID NO: 1788225 - RNA, 19 nt, Artificial Sequence
  Description of Artificial Sequence: Synthetic oligonucleotide
  Sense strand starting at position 2229 of SEQ ID NO: 1563004
uuaaucuguuaaugagauc

SEQ ID NO: 1788226 - RNA, 19 nt, Artificial Sequence
  Description of Artificial Sequence: Synthetic oligonucleotide
  Antisense strand to SEQ ID NO: 1788225
gaucucauuaacagauuaa

SEQ ID NO: 1788227 - RNA, 19 nt, Artificial Sequence
  Description of Artificial Sequence: Synthetic oligonucleotide
  Sense strand starting at position 2232 of SEQ ID NO: 1563004
aucuguuaaugagaucagu

SEQ ID NO: 1788228 - RNA, 19 nt, Artificial Sequence
  Description of Artificial Sequence: Synthetic oligonucleotide
  Antisense strand to SEQ ID NO: 1788227
acugaucucauuaacagau

SEQ ID NO: 1788229 - RNA, 19 nt, Artificial Sequence
  Description of Artificial Sequence: Synthetic oligonucleotide
  Sense strand starting at position 2235 of SEQ ID NO: 1563004
uguuaaugagaucaguuac

SEQ ID NO: 1788230 - RNA, 19 nt, Artificial Sequence
  Description of Artificial Sequence: Synthetic oligonucleotide
  Antisense strand to SEQ ID NO: 1788229
guaacugaucucauuaaca

SEQ ID NO: 1788231 - RNA, 19 nt, Artificial Sequence
  Description of Artificial Sequence: Synthetic oligonucleotide
  Sense strand starting at position 2241 of SEQ ID NO: 1563004
ugagaucaguuacaucaau

SEQ ID NO: 1788232 - RNA, 19 nt, Artificial Sequence
  Description of Artificial Sequence: Synthetic oligonucleotide
  Antisense strand to SEQ ID NO: 1788231
auugauguaacugaucuca

SEQ ID NO: 1788233 - RNA, 19 nt, Artificial Sequence
  Description of Artificial Sequence: Synthetic oligonucleotide
  Sense strand starting at position 2272 of SEQ ID NO: 1563004
gguaaaccauucuugaauu

SEQ ID NO: 1788234 - RNA, 19 nt, Artificial Sequence
  Description of Artificial Sequence: Synthetic oligonucleotide
  Antisense strand to SEQ ID NO: 1788233
aauucaagaaugguuuacc

SEQ ID NO: 1788235 - RNA, 19 nt, Artificial Sequence
  Description of Artificial Sequence: Synthetic oligonucleotide
  Sense strand starting at position 2299 of SEQ ID NO: 1563004
agacgcaacuuggucauaa

SEQ ID NO: 1788236 - RNA, 19 nt, Artificial Sequence
  Description of Artificial Sequence: Synthetic oligonucleotide
  Antisense strand to SEQ ID NO: 1788235
uuaugaccaaguugcgucu

SEQ ID NO: 1788237 - RNA, 19 nt, Artificial Sequence
  Description of Artificial Sequence: Synthetic oligonucleotide
  Sense strand starting at position 2300 of SEQ ID NO: 1563004
gacgcaacuuggucauaau

SEQ ID NO: 1788238 - RNA, 19 nt, Artificial Sequence
  Description of Artificial Sequence: Synthetic oligonucleotide
  Antisense strand to SEQ ID NO: 1788237
auuaugaccaaguugcguc

SEQ ID NO: 1788239 - RNA, 19 nt, Artificial Sequence
  Description of Artificial Sequence: Synthetic oligonucleotide
  Sense strand starting at position 2301 of SEQ ID NO: 1563004
acgcaacuuggucauaaua

SEQ ID NO: 1788240 - RNA, 19 nt, Artificial Sequence
  Description of Artificial Sequence: Synthetic oligonucleotide
  Antisense strand to SEQ ID NO: 1788239
uauuaugaccaaguugcgu

SEQ ID NO: 1788241 - RNA, 19 nt, Artificial Sequence
  Description of Artificial Sequence: Synthetic oligonucleotide
  Sense strand starting at position 2303 of SEQ ID NO: 1563004
gcaacuuggucauaauauu

SEQ ID NO: 1788242 - RNA, 19 nt, Artificial Sequence
  Description of Artificial Sequence: Synthetic oligonucleotide
  Antisense strand to SEQ ID NO: 1788241
aauauuaugaccaaguugc

SEQ ID NO: 1788243 - RNA, 19 nt, Artificial Sequence
  Description of Artificial Sequence: Synthetic oligonucleotide
  Sense strand starting at position 55 of SEQ ID NO: 1563005
uacugaguguuggccggau

SEQ ID NO: 1788244 - RNA, 19 nt, Artificial Sequence
  Description of Artificial Sequence: Synthetic oligonucleotide
  Antisense strand to SEQ ID NO: 1788243
auccggccaacacucagua

SEQ ID NO: 1788245 - RNA, 19 nt, Artificial Sequence
  Description of Artificial Sequence: Synthetic oligonucleotide
  Sense strand starting at position 368 of SEQ ID NO: 1563005
auguuuaucucagccagga

SEQ ID NO: 1788246 - RNA, 19 nt, Artificial Sequence
  Description of Artificial Sequence: Synthetic oligonucleotide
  Antisense strand to SEQ ID NO: 1788245
uccuggcugagauaaacau

SEQ ID NO: 1788247 - RNA, 19 nt, Artificial Sequence
  Description of Artificial Sequence: Synthetic oligonucleotide
  Sense strand starting at position 370 of SEQ ID NO: 1563005
guuuaucucagccaggaag

SEQ ID NO: 1788248 - RNA, 19 nt, Artificial Sequence
  Description of Artificial Sequence: Synthetic oligonucleotide
  Antisense strand to SEQ ID NO: 1788247
cuuccuggcugagauaaac

SEQ ID NO: 1788249 - RNA, 19 nt, Artificial Sequence
  Description of Artificial Sequence: Synthetic oligonucleotide
  Sense strand starting at position 400 of SEQ ID NO: 1563005
gcaagauacagcugggaaa

SEQ ID NO: 1788250 - RNA, 19 nt, Artificial Sequence
  Description of Artificial Sequence: Synthetic oligonucleotide
  Antisense strand to SEQ ID NO: 1788249
uuucccagcuguaucuugc

SEQ ID NO: 1788251 - RNA, 19 nt, Artificial Sequence
  Description of Artificial Sequence: Synthetic oligonucleotide
  Sense strand starting at position 503 of SEQ ID NO: 1563005
ugcugaaggccuugccaua

SEQ ID NO: 1788252 - RNA, 19 nt, Artificial Sequence
  Description of Artificial Sequence: Synthetic oligonucleotide
  Antisense strand to SEQ ID NO: 1788251
uauggcaaggccuucagca

SEQ ID NO: 1788253 - RNA, 19 nt, Artificial Sequence
  Description of Artificial Sequence: Synthetic oligonucleotide
  Sense strand starting at position 566 of SEQ ID NO: 1563005
uccaauaaggccuaaguaa

SEQ ID NO: 1788254 - RNA, 19 nt, Artificial Sequence
  Description of Artificial Sequence: Synthetic oligonucleotide
  Antisense strand to SEQ ID NO: 1788253
uuacuuaggccuuauugga

SEQ ID NO: 1788255 - RNA, 19 nt, Artificial Sequence
  Description of Artificial Sequence: Synthetic oligonucleotide
  Sense strand starting at position 641 of SEQ ID NO: 1563005
ucccauugaggccaaauua

SEQ ID NO: 1788256 - RNA, 19 nt, Artificial Sequence
  Description of Artificial Sequence: Synthetic oligonucleotide
  Antisense strand to SEQ ID NO: 1788255
uaauuuggccucaauggga

SEQ ID NO: 1788257 - RNA, 19 nt, Artificial Sequence
  Description of Artificial Sequence: Synthetic oligonucleotide
  Sense strand starting at position 749 of SEQ ID NO: 1563005
gcucauguagcaggagaua

SEQ ID NO: 1788258 - RNA, 19 nt, Artificial Sequence
  Description of Artificial Sequence: Synthetic oligonucleotide
  Antisense strand to SEQ ID NO: 1788257
uaucuccugcuacaugagc

SEQ ID NO: 1788259 - RNA, 19 nt, Artificial Sequence
  Description of Artificial Sequence: Synthetic oligonucleotide
  Sense strand starting at position 760 of SEQ ID NO: 1563005
aggagauauugacaggucu

SEQ ID NO: 1788260 - RNA, 19 nt, Artificial Sequence
  Description of Artificial Sequence: Synthetic oligonucleotide
  Antisense strand to SEQ ID NO: 1788259
agaccugucaauaucuccu

SEQ ID NO: 1788261 - RNA, 19 nt, Artificial Sequence
  Description of Artificial Sequence: Synthetic oligonucleotide
  Sense strand starting at position 787 of SEQ ID NO: 1563005
acaggaaaucguugaauuc

SEQ ID NO: 1788262 - RNA, 19 nt, Artificial Sequence
  Description of Artificial Sequence: Synthetic oligonucleotide
  Antisense strand to SEQ ID NO: 1788261
gaauucaacgauuuccugu

SEQ ID NO: 1788263 - RNA, 19 nt, Artificial Sequence
  Description of Artificial Sequence: Synthetic oligonucleotide
  Sense strand starting at position 808 of SEQ ID NO: 1563005
ugagaucaugcauggagau

SEQ ID NO: 1788264 - RNA, 19 nt, Artificial Sequence
  Description of Artificial Sequence: Synthetic oligonucleotide
  Antisense strand to SEQ ID NO: 1788263
aucuccaugcaugaucuca

SEQ ID NO: 1788265 - RNA, 19 nt, Artificial Sequence
  Description of Artificial Sequence: Synthetic oligonucleotide
  Sense strand starting at position 809 of SEQ ID NO: 1563005
gagaucaugcauggagauu

SEQ ID NO: 1788266 - RNA, 19 nt, Artificial Sequence
  Description of Artificial Sequence: Synthetic oligonucleotide
  Antisense strand to SEQ ID NO: 1788265
aaucuccaugcaugaucuc

SEQ ID NO: 1788267 - RNA, 19 nt, Artificial Sequence
  Description of Artificial Sequence: Synthetic oligonucleotide
  Sense strand starting at position 995 of SEQ ID NO: 1563005
cuuuccuuccagcagagaa

SEQ ID NO: 1788268 - RNA, 19 nt, Artificial Sequence
  Description of Artificial Sequence: Synthetic oligonucleotide
  Antisense strand to SEQ ID NO: 1788267
uucucugcuggaaggaaag

SEQ ID NO: 1788269 - RNA, 19 nt, Artificial Sequence
  Description of Artificial Sequence: Synthetic oligonucleotide
  Sense strand starting at position 1061 of SEQ ID NO: 1563005
uggugcuacagagacuuaa

SEQ ID NO: 1788270 - RNA, 19 nt, Artificial Sequence
  Description of Artificial Sequence: Synthetic oligonucleotide
  Antisense strand to SEQ ID NO: 1788269
uuaagucucuguagcacca

SEQ ID NO: 1788271 - RNA, 19 nt, Artificial Sequence
  Description of Artificial Sequence: Synthetic oligonucleotide
  Sense strand starting at position 1094 of SEQ ID NO: 1563005
guaggaaguguuuggacca

SEQ ID NO: 1788272 - RNA, 19 nt, Artificial Sequence
  Description of Artificial Sequence: Synthetic oligonucleotide
  Antisense strand to SEQ ID NO: 1788271
ugguccaaacacuuccuac

SEQ ID NO: 1788273 - RNA, 19 nt, Artificial Sequence
  Description of Artificial Sequence: Synthetic oligonucleotide
  Sense strand starting at position 1205 of SEQ ID NO: 1563005
cuauuagaucccugcagcu

SEQ ID NO: 1788274 - RNA, 19 nt, Artificial Sequence
  Description of Artificial Sequence: Synthetic oligonucleotide
  Antisense strand to SEQ ID NO: 1788273
agcugcagggaucuaauag

SEQ ID NO: 1788275 - RNA, 19 nt, Artificial Sequence
  Description of Artificial Sequence: Synthetic oligonucleotide
  Sense strand starting at position 1222 of SEQ ID NO: 1563005
cuucgaacuccugggcgau

SEQ ID NO: 1788276 - RNA, 19 nt, Artificial Sequence
  Description of Artificial Sequence: Synthetic oligonucleotide
  Antisense strand to SEQ ID NO: 1788275
aucgcccaggaguucgaag

SEQ ID NO: 1788277 - RNA, 19 nt, Artificial Sequence
  Description of Artificial Sequence: Synthetic oligonucleotide
  Sense strand starting at position 1264 of SEQ ID NO: 1563005
uuuaaauaaggcugucaag

SEQ ID NO: 1788278 - RNA, 19 nt, Artificial Sequence
  Description of Artificial Sequence: Synthetic oligonucleotide
  Antisense strand to SEQ ID NO: 1788277
cuugacagccuuauuuaaa

SEQ ID NO: 1788279 - RNA, 19 nt, Artificial Sequence
  Description of Artificial Sequence: Synthetic oligonucleotide
  Sense strand starting at position 1267 of SEQ ID NO: 1563005
aaauaaggcugucaaggaa

SEQ ID NO: 1788280 - RNA, 19 nt, Artificial Sequence
  Description of Artificial Sequence: Synthetic oligonucleotide
  Antisense strand to SEQ ID NO: 1788279
uuccuugacagccuuauuu

SEQ ID NO: 1788281 - RNA, 19 nt, Artificial Sequence
  Description of Artificial Sequence: Synthetic oligonucleotide
  Sense strand starting at position 1316 of SEQ ID NO: 1563005
gggaaugugccaugcaaau

SEQ ID NO: 1788282 - RNA, 19 nt, Artificial Sequence
  Description of Artificial Sequence: Synthetic oligonucleotide
  Antisense strand to SEQ ID NO: 1788281
auuugcauggcacauuccc

SEQ ID NO: 1788283 - RNA, 19 nt, Artificial Sequence
  Description of Artificial Sequence: Synthetic oligonucleotide
  Sense strand starting at position 1557 of SEQ ID NO: 1563005
ggcugaucggcagaggauu

SEQ ID NO: 1788284 - RNA, 19 nt, Artificial Sequence
  Description of Artificial Sequence: Synthetic oligonucleotide
  Antisense strand to SEQ ID NO: 1788283
aauccucugccgaucagcc

SEQ ID NO: 1788285 - RNA, 19 nt, Artificial Sequence
  Description of Artificial Sequence: Synthetic oligonucleotide
  Sense strand starting at position 1711 of SEQ ID NO: 1563005
uugaacauuugacgacuua

SEQ ID NO: 1788286 - RNA, 19 nt, Artificial Sequence
  Description of Artificial Sequence: Synthetic oligonucleotide
  Antisense strand to SEQ ID NO: 1788285
uaagucgucaaauguucaa

SEQ ID NO: 1788287 - RNA, 19 nt, Artificial Sequence
  Description of Artificial Sequence: Synthetic oligonucleotide
  Sense strand starting at position 1772 of SEQ ID NO: 1563005
uccgcaaucccucaucuga

SEQ ID NO: 1788288 - RNA, 19 nt, Artificial Sequence
  Description of Artificial Sequence: Synthetic oligonucleotide
  Antisense strand to SEQ ID NO: 1788287
ucagaugagggauugcgga

SEQ ID NO: 1788289 - RNA, 19 nt, Artificial Sequence
  Description of Artificial Sequence: Synthetic oligonucleotide
  Sense strand starting at position 1774 of SEQ ID NO: 1563005
cgcaaucccucaucugaaa

SEQ ID NO: 1788290 - RNA, 19 nt, Artificial Sequence
  Description of Artificial Sequence: Synthetic oligonucleotide
  Antisense strand to SEQ ID NO: 1788289
uuucagaugagggauugcg

SEQ ID NO: 1788291 - RNA, 19 nt, Artificial Sequence
  Description of Artificial Sequence: Synthetic oligonucleotide
  Sense strand starting at position 1992 of SEQ ID NO: 1563005
gcgcagugagcguuugaga

SEQ ID NO: 1788292 - RNA, 19 nt, Artificial Sequence
  Description of Artificial Sequence: Synthetic oligonucleotide
  Antisense strand to SEQ ID NO: 1788291
ucucaaacgcucacugcgc

SEQ ID NO: 1788293 - RNA, 19 nt, Artificial Sequence
  Description of Artificial Sequence: Synthetic oligonucleotide
  Sense strand starting at position 1993 of SEQ ID NO: 1563005
cgcagugagcguuugagag

SEQ ID NO: 1788294 - RNA, 19 nt, Artificial Sequence
  Description of Artificial Sequence: Synthetic oligonucleotide
  Antisense strand to SEQ ID NO: 1788293
cucucaaacgcucacugcg

SEQ ID NO: 1788295 - RNA, 19 nt, Artificial Sequence
  Description of Artificial Sequence: Synthetic oligonucleotide
  Sense strand starting at position 1999 of SEQ ID NO: 1563005
gagcguuugagaggagcaa

SEQ ID NO: 1788296 - RNA, 19 nt, Artificial Sequence
  Description of Artificial Sequence: Synthetic oligonucleotide
  Antisense strand to SEQ ID NO: 1788295
uugcuccucucaaacgcuc

SEQ ID NO: 1788297 - RNA, 19 nt, Artificial Sequence
  Description of Artificial Sequence: Synthetic oligonucleotide
  Sense strand starting at position 2000 of SEQ ID NO: 1563005
agcguuugagaggagcaaa

SEQ ID NO: 1788298 - RNA, 19 nt, Artificial Sequence
  Description of Artificial Sequence: Synthetic oligonucleotide
  Antisense strand to SEQ ID NO: 1788297
uuugcuccucucaaacgcu

SEQ ID NO: 1788299 - RNA, 19 nt, Artificial Sequence
  Description of Artificial Sequence: Synthetic oligonucleotide
  Sense strand starting at position 2078 of SEQ ID NO: 1563005
gaggguucgcgcaacgcua

SEQ ID NO: 1788300 - RNA, 19 nt, Artificial Sequence
  Description of Artificial Sequence: Synthetic oligonucleotide
  Antisense strand to SEQ ID NO: 1788299
uagcguugcgcgaacccuc

SEQ ID NO: 1788301 - RNA, 19 nt, Artificial Sequence
  Description of Artificial Sequence: Synthetic oligonucleotide
  Sense strand starting at position 2096 of SEQ ID NO: 1563005
aaacgauggccgggacuaa

SEQ ID NO: 1788302 - RNA, 19 nt, Artificial Sequence
  Description of Artificial Sequence: Synthetic oligonucleotide
  Antisense strand to SEQ ID NO: 1788301
uuagucccggccaucguuu

SEQ ID NO: 1788303 - RNA, 19 nt, Artificial Sequence
  Description of Artificial Sequence: Synthetic oligonucleotide
  Sense strand starting at position 2107 of SEQ ID NO: 1563005
gggacuaaggccugagacu

SEQ ID NO: 1788304 - RNA, 19 nt, Artificial Sequence
  Description of Artificial Sequence: Synthetic oligonucleotide
  Antisense strand to SEQ ID NO: 1788303
agucucaggccuuaguccc

SEQ ID NO: 1788305 - RNA, 19 nt, Artificial Sequence
  Description of Artificial Sequence: Synthetic oligonucleotide
  Sense strand starting at position 3190 of SEQ ID NO: 1563005
ugugaugggcacuguagua

SEQ ID NO: 1788306 - RNA, 19 nt, Artificial Sequence
  Description of Artificial Sequence: Synthetic oligonucleotide
  Antisense strand to SEQ ID NO: 1788305
uacuacagugcccaucaca

SEQ ID NO: 1788307 - RNA, 19 nt, Artificial Sequence
  Description of Artificial Sequence: Synthetic oligonucleotide
  Sense strand starting at position 3208 of SEQ ID NO: 1563005
agcucuauugcucagacuu

SEQ ID NO: 1788308 - RNA, 19 nt, Artificial Sequence
  Description of Artificial Sequence: Synthetic oligonucleotide
  Antisense strand to SEQ ID NO: 1788307
aagucugagcaauagagcu

SEQ ID NO: 1788309 - RNA, 19 nt, Artificial Sequence
  Description of Artificial Sequence: Synthetic oligonucleotide
  Sense strand starting at position 3366 of SEQ ID NO: 1563005
uggguauucuccuuuaauc

SEQ ID NO: 1788310 - RNA, 19 nt, Artificial Sequence
  Description of Artificial Sequence: Synthetic oligonucleotide
  Antisense strand to SEQ ID NO: 1788309
gauuaaaggagaauaccca

SEQ ID NO: 1788311 - RNA, 19 nt, Artificial Sequence
  Description of Artificial Sequence: Synthetic oligonucleotide
  Sense strand starting at position 3368 of SEQ ID NO: 1563005
gguauucuccuuuaaucug

SEQ ID NO: 1788312 - RNA, 19 nt, Artificial Sequence
  Description of Artificial Sequence: Synthetic oligonucleotide
  Antisense strand to SEQ ID NO: 1788311
cagauuaaaggagaauacc

SEQ ID NO: 1788313 - RNA, 19 nt, Artificial Sequence
  Description of Artificial Sequence: Synthetic oligonucleotide
  Sense strand starting at position 3385 of SEQ ID NO: 1563005
uguuaaugagaucaguuac

SEQ ID NO: 1788314 - RNA, 19 nt, Artificial Sequence
  Description of Artificial Sequence: Synthetic oligonucleotide
  Antisense strand to SEQ ID NO: 1788313
guaacugaucucauuaaca

SEQ ID NO: 1788315 - RNA, 19 nt, Artificial Sequence
  Description of Artificial Sequence: Synthetic oligonucleotide
  Sense strand starting at position 3422 of SEQ ID NO: 1563005
gguaaaccauucuugaauu

SEQ ID NO: 1788316 - RNA, 19 nt, Artificial Sequence
  Description of Artificial Sequence: Synthetic oligonucleotide
  Antisense strand to SEQ ID NO: 1788315
aauucaagaaugguuuacc

SEQ ID NO: 1788317 - RNA, 19 nt, Artificial Sequence
  Description of Artificial Sequence: Synthetic oligonucleotide
  Sense strand starting at position 3449 of SEQ ID NO: 1563005
agacgcaacuuggucauaa

SEQ ID NO: 1788318 - RNA, 19 nt, Artificial Sequence
  Description of Artificial Sequence: Synthetic oligonucleotide
  Antisense strand to SEQ ID NO: 1788317
uuaugaccaaguugcgucu

SEQ ID NO: 1788319 - RNA, 19 nt, Artificial Sequence
  Description of Artificial Sequence: Synthetic oligonucleotide
  Sense strand starting at position 3450 of SEQ ID NO: 1563005
gacgcaacuuggucauaau

SEQ ID NO: 1788320 - RNA, 19 nt, Artificial Sequence
  Description of Artificial Sequence: Synthetic oligonucleotide
  Antisense strand to SEQ ID NO: 1788319
auuaugaccaaguugcguc

SEQ ID NO: 1788321 - RNA, 19 nt, Artificial Sequence
  Description of Artificial Sequence: Synthetic oligonucleotide
  Sense strand starting at position 3451 of SEQ ID NO: 1563005
acgcaacuuggucauaaua

SEQ ID NO: 1788322 - RNA, 19 nt, Artificial Sequence
  Description of Artificial Sequence: Synthetic oligonucleotide
  Antisense strand to SEQ ID NO: 1788321
uauuaugaccaaguugcgu

SEQ ID NO: 1788323 - RNA, 19 nt, Artificial Sequence
  Description of Artificial Sequence: Synthetic oligonucleotide
  Sense strand starting at position 69 of SEQ ID NO: 1563006
ggucaauaauccuacuguu

SEQ ID NO: 1788324 - RNA, 19 nt, Artificial Sequence
  Description of Artificial Sequence: Synthetic oligonucleotide
  Antisense strand to SEQ ID NO: 1788323
aacaguaggauuauugacc

SEQ ID NO: 1788325 - RNA, 19 nt, Artificial Sequence
  Description of Artificial Sequence: Synthetic oligonucleotide
  Sense strand starting at position 139 of SEQ ID NO: 1563006
gagcuuuccuuccagcaga

SEQ ID NO: 1788326 - RNA, 19 nt, Artificial Sequence
  Description of Artificial Sequence: Synthetic oligonucleotide
  Antisense strand to SEQ ID NO: 1788325
ucugcuggaaggaaagcuc

SEQ ID NO: 1788327 - RNA, 19 nt, Artificial Sequence
  Description of Artificial Sequence: Synthetic oligonucleotide
  Sense strand starting at position 142 of SEQ ID NO: 1563006
cuuuccuuccagcagagaa

SEQ ID NO: 1788328 - RNA, 19 nt, Artificial Sequence
  Description of Artificial Sequence: Synthetic oligonucleotide
  Antisense strand to SEQ ID NO: 1788327
uucucugcuggaaggaaag

SEQ ID NO: 1788329 - RNA, 19 nt, Artificial Sequence
  Description of Artificial Sequence: Synthetic oligonucleotide
  Sense strand starting at position 208 of SEQ ID NO: 1563006
uggugcuacagagacuuaa

SEQ ID NO: 1788330 - RNA, 19 nt, Artificial Sequence
  Description of Artificial Sequence: Synthetic oligonucleotide
  Antisense strand to SEQ ID NO: 1788329
uuaagucucuguagcacca

SEQ ID NO: 1788331 - RNA, 19 nt, Artificial Sequence
  Description of Artificial Sequence: Synthetic oligonucleotide
  Sense strand starting at position 241 of SEQ ID NO: 1563006
guaggaaguguuuggacca

SEQ ID NO: 1788332 - RNA, 19 nt, Artificial Sequence
  Description of Artificial Sequence: Synthetic oligonucleotide
  Antisense strand to SEQ ID NO: 1788331
ugguccaaacacuuccuac

SEQ ID NO: 1788333 - RNA, 19 nt, Artificial Sequence
  Description of Artificial Sequence: Synthetic oligonucleotide
  Sense strand starting at position 344 of SEQ ID NO: 1563006
gugagauccuauuagaucc

SEQ ID NO: 1788334 - RNA, 19 nt, Artificial Sequence
  Description of Artificial Sequence: Synthetic oligonucleotide
  Antisense strand to SEQ ID NO: 1788333
ggaucuaauaggaucucac

SEQ ID NO: 1788335 - RNA, 19 nt, Artificial Sequence
  Description of Artificial Sequence: Synthetic oligonucleotide
  Sense strand starting at position 352 of SEQ ID NO: 1563006
cuauuagaucccugcagcu

SEQ ID NO: 1788336 - RNA, 19 nt, Artificial Sequence
  Description of Artificial Sequence: Synthetic oligonucleotide
  Antisense strand to SEQ ID NO: 1788335
agcugcagggaucuaauag

SEQ ID NO: 1788337 - RNA, 19 nt, Artificial Sequence
  Description of Artificial Sequence: Synthetic oligonucleotide
  Sense strand starting at position 369 of SEQ ID NO: 1563006
cuucgaacuccugggcgau

SEQ ID NO: 1788338 - RNA, 19 nt, Artificial Sequence
  Description of Artificial Sequence: Synthetic oligonucleotide
  Antisense strand to SEQ ID NO: 1788337
aucgcccaggaguucgaag

SEQ ID NO: 1788339 - RNA, 19 nt, Artificial Sequence
  Description of Artificial Sequence: Synthetic oligonucleotide
  Sense strand starting at position 411 of SEQ ID NO: 1563006
uuuaaauaaggcugucaag

SEQ ID NO: 1788340 - RNA, 19 nt, Artificial Sequence
  Description of Artificial Sequence: Synthetic oligonucleotide
  Antisense strand to SEQ ID NO: 1788339
cuugacagccuuauuuaaa

SEQ ID NO: 1788341 - RNA, 19 nt, Artificial Sequence
  Description of Artificial Sequence: Synthetic oligonucleotide
  Sense strand starting at position 414 of SEQ ID NO: 1563006
aaauaaggcugucaaggaa

SEQ ID NO: 1788342 - RNA, 19 nt, Artificial Sequence
  Description of Artificial Sequence: Synthetic oligonucleotide
  Antisense strand to SEQ ID NO: 1788341
uuccuugacagccuuauuu

SEQ ID NO: 1788343 - RNA, 19 nt, Artificial Sequence
  Description of Artificial Sequence: Synthetic oligonucleotide
  Sense strand starting at position 461 of SEQ ID NO: 1563006
gagggaaugugccaugcaa

SEQ ID NO: 1788344 - RNA, 19 nt, Artificial Sequence
  Description of Artificial Sequence: Synthetic oligonucleotide
  Antisense strand to SEQ ID NO: 1788343
uugcauggcacauucccuc

SEQ ID NO: 1788345 - RNA, 19 nt, Artificial Sequence
  Description of Artificial Sequence: Synthetic oligonucleotide
  Sense strand starting at position 463 of SEQ ID NO: 1563006
gggaaugugccaugcaaau

SEQ ID NO: 1788346 - RNA, 19 nt, Artificial Sequence
  Description of Artificial Sequence: Synthetic oligonucleotide
  Antisense strand to SEQ ID NO: 1788345
auuugcauggcacauuccc

SEQ ID NO: 1788347 - RNA, 19 nt, Artificial Sequence
  Description of Artificial Sequence: Synthetic oligonucleotide
  Sense strand starting at position 704 of SEQ ID NO: 1563006
ggcugaucggcagaggauu

SEQ ID NO: 1788348 - RNA, 19 nt, Artificial Sequence
  Description of Artificial Sequence: Synthetic oligonucleotide
  Antisense strand to SEQ ID NO: 1788347
aauccucugccgaucagcc

SEQ ID NO: 1788349 - RNA, 19 nt, Artificial Sequence
  Description of Artificial Sequence: Synthetic oligonucleotide
  Sense strand starting at position 788 of SEQ ID NO: 1563006
ggcguaaacaccugccuau

SEQ ID NO: 1788350 - RNA, 19 nt, Artificial Sequence
  Description of Artificial Sequence: Synthetic oligonucleotide
  Antisense strand to SEQ ID NO: 1788349
auaggcagguguuuacgcc

SEQ ID NO: 1788351 - RNA, 19 nt, Artificial Sequence
  Description of Artificial Sequence: Synthetic oligonucleotide
  Sense strand starting at position 858 of SEQ ID NO: 1563006
uugaacauuugacgacuua

SEQ ID NO: 1788352 - RNA, 19 nt, Artificial Sequence
  Description of Artificial Sequence: Synthetic oligonucleotide
  Antisense strand to SEQ ID NO: 1788351
uaagucgucaaauguucaa

SEQ ID NO: 1788353 - RNA, 19 nt, Artificial Sequence
  Description of Artificial Sequence: Synthetic oligonucleotide
  Sense strand starting at position 919 of SEQ ID NO: 1563006
uccgcaaucccucaucuga

SEQ ID NO: 1788354 - RNA, 19 nt, Artificial Sequence
  Description of Artificial Sequence: Synthetic oligonucleotide
  Antisense strand to SEQ ID NO: 1788353
ucagaugagggauugcgga

SEQ ID NO: 1788355 - RNA, 19 nt, Artificial Sequence
  Description of Artificial Sequence: Synthetic oligonucleotide
  Sense strand starting at position 921 of SEQ ID NO: 1563006
cgcaaucccucaucugaaa

SEQ ID NO: 1788356 - RNA, 19 nt, Artificial Sequence
  Description of Artificial Sequence: Synthetic oligonucleotide
  Antisense strand to SEQ ID NO: 1788355
uuucagaugagggauugcg

SEQ ID NO: 1788357 - RNA, 19 nt, Artificial Sequence
  Description of Artificial Sequence: Synthetic oligonucleotide
  Sense strand starting at position 948 of SEQ ID NO: 1563006
cugggcaaguaugagaauu

SEQ ID NO: 1788358 - RNA, 19 nt, Artificial Sequence
  Description of Artificial Sequence: Synthetic oligonucleotide
  Antisense strand to SEQ ID NO: 1788357
aauucucauacuugcccag

SEQ ID NO: 1788359 - RNA, 19 nt, Artificial Sequence
  Description of Artificial Sequence: Synthetic oligonucleotide
  Sense strand starting at position 1139 of SEQ ID NO: 1563006
gcgcagugagcguuugaga

SEQ ID NO: 1788360 - RNA, 19 nt, Artificial Sequence
  Description of Artificial Sequence: Synthetic oligonucleotide
  Antisense strand to SEQ ID NO: 1788359
ucucaaacgcucacugcgc

SEQ ID NO: 1788361 - RNA, 19 nt, Artificial Sequence
  Description of Artificial Sequence: Synthetic oligonucleotide
  Sense strand starting at position 1140 of SEQ ID NO: 1563006
cgcagugagcguuugagag

SEQ ID NO: 1788362 - RNA, 19 nt, Artificial Sequence
  Description of Artificial Sequence: Synthetic oligonucleotide
  Antisense strand to SEQ ID NO: 1788361
cucucaaacgcucacugcg

SEQ ID NO: 1788363 - RNA, 19 nt, Artificial Sequence
  Description of Artificial Sequence: Synthetic oligonucleotide
  Sense strand starting at position 1146 of SEQ ID NO: 1563006
gagcguuugagaggagcaa

SEQ ID NO: 1788364 - RNA, 19 nt, Artificial Sequence
  Description of Artificial Sequence: Synthetic oligonucleotide
  Antisense strand to SEQ ID NO: 1788363
uugcuccucucaaacgcuc

SEQ ID NO: 1788365 - RNA, 19 nt, Artificial Sequence
  Description of Artificial Sequence: Synthetic oligonucleotide
  Sense strand starting at position 1147 of SEQ ID NO: 1563006
agcguuugagaggagcaaa

SEQ ID NO: 1788366 - RNA, 19 nt, Artificial Sequence
  Description of Artificial Sequence: Synthetic oligonucleotide
  Antisense strand to SEQ ID NO: 1788365
uuugcuccucucaaacgcu

SEQ ID NO: 1788367 - RNA, 19 nt, Artificial Sequence
  Description of Artificial Sequence: Synthetic oligonucleotide
  Sense strand starting at position 1225 of SEQ ID NO: 1563006
gaggguucgcgcaacgcua

SEQ ID NO: 1788368 - RNA, 19 nt, Artificial Sequence
  Description of Artificial Sequence: Synthetic oligonucleotide
  Antisense strand to SEQ ID NO: 1788367
uagcguugcgcgaacccuc

SEQ ID NO: 1788369 - RNA, 19 nt, Artificial Sequence
  Description of Artificial Sequence: Synthetic oligonucleotide
  Sense strand starting at position 1243 of SEQ ID NO: 1563006
aaacgauggccgggacuaa

SEQ ID NO: 1788370 - RNA, 19 nt, Artificial Sequence
  Description of Artificial Sequence: Synthetic oligonucleotide
  Antisense strand to SEQ ID NO: 1788369
uuagucccggccaucguuu

SEQ ID NO: 1788371 - RNA, 19 nt, Artificial Sequence
  Description of Artificial Sequence: Synthetic oligonucleotide
  Sense strand starting at position 1254 of SEQ ID NO: 1563006
gggacuaaggccugagacu

SEQ ID NO: 1788372 - RNA, 19 nt, Artificial Sequence
  Description of Artificial Sequence: Synthetic oligonucleotide
  Antisense strand to SEQ ID NO: 1788371
agucucaggccuuaguccc

SEQ ID NO: 1788373 - RNA, 19 nt, Artificial Sequence
  Description of Artificial Sequence: Synthetic oligonucleotide
  Sense strand starting at position 2337 of SEQ ID NO: 1563006
ugugaugggcacuguagua

SEQ ID NO: 1788374 - RNA, 19 nt, Artificial Sequence
  Description of Artificial Sequence: Synthetic oligonucleotide
  Antisense strand to SEQ ID NO: 1788373
uacuacagugcccaucaca

SEQ ID NO: 1788375 - RNA, 19 nt, Artificial Sequence
  Description of Artificial Sequence: Synthetic oligonucleotide
  Sense strand starting at position 2355 of SEQ ID NO: 1563006
agcucuauugcucagacuu

SEQ ID NO: 1788376 - RNA, 19 nt, Artificial Sequence
  Description of Artificial Sequence: Synthetic oligonucleotide
  Antisense strand to SEQ ID NO: 1788375
aagucugagcaauagagcu

SEQ ID NO: 1788377 - RNA, 19 nt, Artificial Sequence
  Description of Artificial Sequence: Synthetic oligonucleotide
  Sense strand starting at position 2502 of SEQ ID NO: 1563006
agaugaucauauggguauu

SEQ ID NO: 1788378 - RNA, 19 nt, Artificial Sequence
  Description of Artificial Sequence: Synthetic oligonucleotide
  Antisense strand to SEQ ID NO: 1788377
aauacccauaugaucaucu

SEQ ID NO: 1788379 - RNA, 19 nt, Artificial Sequence
  Description of Artificial Sequence: Synthetic oligonucleotide
  Sense strand starting at position 2513 of SEQ ID NO: 1563006
uggguauucuccuuuaauc

SEQ ID NO: 1788380 - RNA, 19 nt, Artificial Sequence
  Description of Artificial Sequence: Synthetic oligonucleotide
  Antisense strand to SEQ ID NO: 1788379
gauuaaaggagaauaccca

SEQ ID NO: 1788381 - RNA, 19 nt, Artificial Sequence
  Description of Artificial Sequence: Synthetic oligonucleotide
  Sense strand starting at position 2515 of SEQ ID NO: 1563006
gguauucuccuuuaaucug

SEQ ID NO: 1788382 - RNA, 19 nt, Artificial Sequence
  Description of Artificial Sequence: Synthetic oligonucleotide
  Antisense strand to SEQ ID NO: 1788381
cagauuaaaggagaauacc

SEQ ID NO: 1788383 - RNA, 19 nt, Artificial Sequence
  Description of Artificial Sequence: Synthetic oligonucleotide
  Sense strand starting at position 2523 of SEQ ID NO: 1563006
ccuuuaaucuguuaaugag

SEQ ID NO: 1788384 - RNA, 19 nt, Artificial Sequence
  Description of Artificial Sequence: Synthetic oligonucleotide
  Antisense strand to SEQ ID NO: 1788383
cucauuaacagauuaaagg

SEQ ID NO: 1788385 - RNA, 19 nt, Artificial Sequence
  Description of Artificial Sequence: Synthetic oligonucleotide
  Sense strand starting at position 2526 of SEQ ID NO: 1563006
uuaaucuguuaaugagauc

SEQ ID NO: 1788386 - RNA, 19 nt, Artificial Sequence
  Description of Artificial Sequence: Synthetic oligonucleotide
  Antisense strand to SEQ ID NO: 1788385
gaucucauuaacagauuaa

SEQ ID NO: 1788387 - RNA, 19 nt, Artificial Sequence
  Description of Artificial Sequence: Synthetic oligonucleotide
  Sense strand starting at position 2529 of SEQ ID NO: 1563006
aucuguuaaugagaucagu

SEQ ID NO: 1788388 - RNA, 19 nt, Artificial Sequence
  Description of Artificial Sequence: Synthetic oligonucleotide
  Antisense strand to SEQ ID NO: 1788387
acugaucucauuaacagau

SEQ ID NO: 1788389 - RNA, 19 nt, Artificial Sequence
  Description of Artificial Sequence: Synthetic oligonucleotide
  Sense strand starting at position 2532 of SEQ ID NO: 1563006
uguuaaugagaucaguuac

SEQ ID NO: 1788390 - RNA, 19 nt, Artificial Sequence
  Description of Artificial Sequence: Synthetic oligonucleotide
  Antisense strand to SEQ ID NO: 1788389
guaacugaucucauuaaca

SEQ ID NO: 1788391 - RNA, 19 nt, Artificial Sequence
  Description of Artificial Sequence: Synthetic oligonucleotide
  Sense strand starting at position 2538 of SEQ ID NO: 1563006
ugagaucaguuacaucaau

SEQ ID NO: 1788392 - RNA, 19 nt, Artificial Sequence
  Description of Artificial Sequence: Synthetic oligonucleotide
  Antisense strand to SEQ ID NO: 1788391
auugauguaacugaucuca

SEQ ID NO: 1788393 - RNA, 19 nt, Artificial Sequence
  Description of Artificial Sequence: Synthetic oligonucleotide
  Sense strand starting at position 2569 of SEQ ID NO: 1563006
gguaaaccauucuugaauu

SEQ ID NO: 1788394 - RNA, 19 nt, Artificial Sequence
  Description of Artificial Sequence: Synthetic oligonucleotide
  Antisense strand to SEQ ID NO: 1788393
aauucaagaaugguuuacc

SEQ ID NO: 1788395 - RNA, 19 nt, Artificial Sequence
  Description of Artificial Sequence: Synthetic oligonucleotide
  Sense strand starting at position 2596 of SEQ ID NO: 1563006
agacgcaacuuggucauaa

SEQ ID NO: 1788396 - RNA, 19 nt, Artificial Sequence
  Description of Artificial Sequence: Synthetic oligonucleotide
  Antisense strand to SEQ ID NO: 1788395
uuaugaccaaguugcgucu

SEQ ID NO: 1788397 - RNA, 19 nt, Artificial Sequence
  Description of Artificial Sequence: Synthetic oligonucleotide
  Sense strand starting at position 2597 of SEQ ID NO: 1563006
gacgcaacuuggucauaau

SEQ ID NO: 1788398 - RNA, 19 nt, Artificial Sequence
  Description of Artificial Sequence: Synthetic oligonucleotide
  Antisense strand to SEQ ID NO: 1788397
auuaugaccaaguugcguc

SEQ ID NO: 1788399 - RNA, 19 nt, Artificial Sequence
  Description of Artificial Sequence: Synthetic oligonucleotide
  Sense strand starting at position 2598 of SEQ ID NO: 1563006
acgcaacuuggucauaaua

SEQ ID NO: 1788400 - RNA, 19 nt, Artificial Sequence
  Description of Artificial Sequence: Synthetic oligonucleotide
  Antisense strand to SEQ ID NO: 1788399
uauuaugaccaaguugcgu

SEQ ID NO: 1788401 - RNA, 19 nt, Artificial Sequence
  Description of Artificial Sequence: Synthetic oligonucleotide
  Sense strand starting at position 2600 of SEQ ID NO: 1563006
gcaacuuggucauaauauu

SEQ ID NO: 1788402 - RNA, 19 nt, Artificial Sequence
  Description of Artificial Sequence: Synthetic oligonucleotide
  Antisense strand to SEQ ID NO: 1788401
aauauuaugaccaaguugc

SEQ ID NO: 1788403 - RNA, 19 nt, Artificial Sequence
  Description of Artificial Sequence: Synthetic oligonucleotide
  Sense strand starting at position 7 of SEQ ID NO: 1563007
ggguuuagaucuugccucu

SEQ ID NO: 1788404 - RNA, 19 nt, Artificial Sequence
  Description of Artificial Sequence: Synthetic oligonucleotide
  Antisense strand to SEQ ID NO: 1788403
agaggcaagaucuaaaccc

SEQ ID NO: 1788405 - RNA, 19 nt, Artificial Sequence
  Description of Artificial Sequence: Synthetic oligonucleotide
  Sense strand starting at position 65 of SEQ ID NO: 1563007
ucuaucaaaugggaacaau

SEQ ID NO: 1788406 - RNA, 19 nt, Artificial Sequence
  Description of Artificial Sequence: Synthetic oligonucleotide
  Antisense strand to SEQ ID NO: 1788405
auuguucccauuugauaga

SEQ ID NO: 1788407 - RNA, 19 nt, Artificial Sequence
  Description of Artificial Sequence: Synthetic oligonucleotide
  Sense strand starting at position 127 of SEQ ID NO: 1563007
acuaaauacugguuuguaa

SEQ ID NO: 1788408 - RNA, 19 nt, Artificial Sequence
  Description of Artificial Sequence: Synthetic oligonucleotide
  Antisense strand to SEQ ID NO: 1788407
uuacaaaccaguauuuagu

SEQ ID NO: 1788409 - RNA, 19 nt, Artificial Sequence
  Description of Artificial Sequence: Synthetic oligonucleotide
  Sense strand starting at position 134 of SEQ ID NO: 1563007
acugguuuguaauuccaga

SEQ ID NO: 1788410 - RNA, 19 nt, Artificial Sequence
  Description of Artificial Sequence: Synthetic oligonucleotide
  Antisense strand to SEQ ID NO: 1788409
ucuggaauuacaaaccagu

SEQ ID NO: 1788411 - RNA, 19 nt, Artificial Sequence
  Description of Artificial Sequence: Synthetic oligonucleotide
  Sense strand starting at position 218 of SEQ ID NO: 1563007
gcaagacucugugucuaua

SEQ ID NO: 1788412 - RNA, 19 nt, Artificial Sequence
  Description of Artificial Sequence: Synthetic oligonucleotide
  Antisense strand to SEQ ID NO: 1788411
uauagacacagagucuugc

SEQ ID NO: 1788413 - RNA, 19 nt, Artificial Sequence
  Description of Artificial Sequence: Synthetic oligonucleotide
  Sense strand starting at position 2510 of SEQ ID NO: 1563007
ccugaucucuggccacaau

SEQ ID NO: 1788414 - RNA, 19 nt, Artificial Sequence
  Description of Artificial Sequence: Synthetic oligonucleotide
  Antisense strand to SEQ ID NO: 1788413
auuguggccagagaucagg

SEQ ID NO: 1788415 - RNA, 19 nt, Artificial Sequence
  Description of Artificial Sequence: Synthetic oligonucleotide
  Sense strand starting at position 2511 of SEQ ID NO: 1563007
cugaucucuggccacaauu

SEQ ID NO: 1788416 - RNA, 19 nt, Artificial Sequence
  Description of Artificial Sequence: Synthetic oligonucleotide
  Antisense strand to SEQ ID NO: 1788415
aauuguggccagagaucag

SEQ ID NO: 1788417 - RNA, 19 nt, Artificial Sequence
  Description of Artificial Sequence: Synthetic oligonucleotide
  Sense strand starting at position 2522 of SEQ ID NO: 1563007
ccacaauuaucucguggga

SEQ ID NO: 1788418 - RNA, 19 nt, Artificial Sequence
  Description of Artificial Sequence: Synthetic oligonucleotide
  Antisense strand to SEQ ID NO: 1788417
ucccacgagauaauugugg

SEQ ID NO: 1788419 - RNA, 19 nt, Artificial Sequence
  Description of Artificial Sequence: Synthetic oligonucleotide
  Sense strand starting at position 2525 of SEQ ID NO: 1563007
caauuaucucgugggaccu

SEQ ID NO: 1788420 - RNA, 19 nt, Artificial Sequence
  Description of Artificial Sequence: Synthetic oligonucleotide
  Antisense strand to SEQ ID NO: 1788419
aggucccacgagauaauug

SEQ ID NO: 1788421 - RNA, 19 nt, Artificial Sequence
  Description of Artificial Sequence: Synthetic oligonucleotide
  Sense strand starting at position 2766 of SEQ ID NO: 1563007
gaagcugacucauagcaga

SEQ ID NO: 1788422 - RNA, 19 nt, Artificial Sequence
  Description of Artificial Sequence: Synthetic oligonucleotide
  Antisense strand to SEQ ID NO: 1788421
ucugcuaugagucagcuuc

SEQ ID NO: 1788423 - RNA, 19 nt, Artificial Sequence
  Description of Artificial Sequence: Synthetic oligonucleotide
  Sense strand starting at position 2769 of SEQ ID NO: 1563007
gcugacucauagcagaacu

SEQ ID NO: 1788424 - RNA, 19 nt, Artificial Sequence
  Description of Artificial Sequence: Synthetic oligonucleotide
  Antisense strand to SEQ ID NO: 1788423
aguucugcuaugagucagc

SEQ ID NO: 1788425 - RNA, 19 nt, Artificial Sequence
  Description of Artificial Sequence: Synthetic oligonucleotide
  Sense strand starting at position 2909 of SEQ ID NO: 1563007
gcucucugaggucaggauu

SEQ ID NO: 1788426 - RNA, 19 nt, Artificial Sequence
  Description of Artificial Sequence: Synthetic oligonucleotide
  Antisense strand to SEQ ID NO: 1788425
aauccugaccucagagagc

SEQ ID NO: 1788427 - RNA, 19 nt, Artificial Sequence
  Description of Artificial Sequence: Synthetic oligonucleotide
  Sense strand starting at position 2915 of SEQ ID NO: 1563007
ugaggucaggauuggguaa

SEQ ID NO: 1788428 - RNA, 19 nt, Artificial Sequence
  Description of Artificial Sequence: Synthetic oligonucleotide
  Antisense strand to SEQ ID NO: 1788427
uuacccaauccugaccuca

SEQ ID NO: 1788429 - RNA, 19 nt, Artificial Sequence
  Description of Artificial Sequence: Synthetic oligonucleotide
  Sense strand starting at position 2916 of SEQ ID NO: 1563007
gaggucaggauuggguaaa

SEQ ID NO: 1788430 - RNA, 19 nt, Artificial Sequence
  Description of Artificial Sequence: Synthetic oligonucleotide
  Antisense strand to SEQ ID NO: 1788429
uuuacccaauccugaccuc

SEQ ID NO: 1788431 - RNA, 19 nt, Artificial Sequence
  Description of Artificial Sequence: Synthetic oligonucleotide
  Sense strand starting at position 3037 of SEQ ID NO: 1563007
ccaugugcccaguaucaga

SEQ ID NO: 1788432 - RNA, 19 nt, Artificial Sequence
  Description of Artificial Sequence: Synthetic oligonucleotide
  Antisense strand to SEQ ID NO: 1788431
ucugauacugggcacaugg

SEQ ID NO: 1788433 - RNA, 19 nt, Artificial Sequence
  Description of Artificial Sequence: Synthetic oligonucleotide
  Sense strand starting at position 3042 of SEQ ID NO: 1563007
ugcccaguaucagauguga

SEQ ID NO: 1788434 - RNA, 19 nt, Artificial Sequence
  Description of Artificial Sequence: Synthetic oligonucleotide
  Antisense strand to SEQ ID NO: 1788433
ucacaucugauacugggca

SEQ ID NO: 1788435 - RNA, 19 nt, Artificial Sequence
  Description of Artificial Sequence: Synthetic oligonucleotide
  Sense strand starting at position 3125 of SEQ ID NO: 1563007
ccuguugucuaaccagcaa

SEQ ID NO: 1788436 - RNA, 19 nt, Artificial Sequence
  Description of Artificial Sequence: Synthetic oligonucleotide
  Antisense strand to SEQ ID NO: 1788435
uugcugguuagacaacagg

SEQ ID NO: 1788437 - RNA, 19 nt, Artificial Sequence
  Description of Artificial Sequence: Synthetic oligonucleotide
  Sense strand starting at position 3136 of SEQ ID NO: 1563007
accagcaaauccuugauga

SEQ ID NO: 1788438 - RNA, 19 nt, Artificial Sequence
  Description of Artificial Sequence: Synthetic oligonucleotide
  Antisense strand to SEQ ID NO: 1788437
ucaucaaggauuugcuggu

SEQ ID NO: 1788439 - RNA, 19 nt, Artificial Sequence
  Description of Artificial Sequence: Synthetic oligonucleotide
  Sense strand starting at position 3137 of SEQ ID NO: 1563007
ccagcaaauccuugaugac

SEQ ID NO: 1788440 - RNA, 19 nt, Artificial Sequence
  Description of Artificial Sequence: Synthetic oligonucleotide
  Antisense strand to SEQ ID NO: 1788439
gucaucaaggauuugcugg

SEQ ID NO: 1788441 - RNA, 19 nt, Artificial Sequence
  Description of Artificial Sequence: Synthetic oligonucleotide
  Sense strand starting at position 3154 of SEQ ID NO: 1563007
acagcaaccugucuugaga

SEQ ID NO: 1788442 - RNA, 19 nt, Artificial Sequence
  Description of Artificial Sequence: Synthetic oligonucleotide
  Antisense strand to SEQ ID NO: 1788441
ucucaagacagguugcugu

SEQ ID NO: 1788443 - RNA, 19 nt, Artificial Sequence
  Description of Artificial Sequence: Synthetic oligonucleotide
  Sense strand starting at position 3156 of SEQ ID NO: 1563007
agcaaccugucuugagaca

SEQ ID NO: 1788444 - RNA, 19 nt, Artificial Sequence
  Description of Artificial Sequence: Synthetic oligonucleotide
  Antisense strand to SEQ ID NO: 1788443
ugucucaagacagguugcu

SEQ ID NO: 1788445 - RNA, 19 nt, Artificial Sequence
  Description of Artificial Sequence: Synthetic oligonucleotide
  Sense strand starting at position 3223 of SEQ ID NO: 1563007
uggccaggcgcugaauaua

SEQ ID NO: 1788446 - RNA, 19 nt, Artificial Sequence
  Description of Artificial Sequence: Synthetic oligonucleotide
  Antisense strand to SEQ ID NO: 1788445
uauauucagcgccuggcca

SEQ ID NO: 1788447 - RNA, 19 nt, Artificial Sequence
  Description of Artificial Sequence: Synthetic oligonucleotide
  Sense strand starting at position 3351 of SEQ ID NO: 1563007
ggucacauuugccucugua

SEQ ID NO: 1788448 - RNA, 19 nt, Artificial Sequence
  Description of Artificial Sequence: Synthetic oligonucleotide
  Antisense strand to SEQ ID NO: 1788447
uacagaggcaaaugugacc

SEQ ID NO: 1788449 - RNA, 19 nt, Artificial Sequence
  Description of Artificial Sequence: Synthetic oligonucleotide
  Sense strand starting at position 3389 of SEQ ID NO: 1563007
ccugcagaucucugcugaa

SEQ ID NO: 1788450 - RNA, 19 nt, Artificial Sequence
  Description of Artificial Sequence: Synthetic oligonucleotide
  Antisense strand to SEQ ID NO: 1788449
uucagcagagaucugcagg

SEQ ID NO: 1788451 - RNA, 19 nt, Artificial Sequence
  Description of Artificial Sequence: Synthetic oligonucleotide
  Sense strand starting at position 3392 of SEQ ID NO: 1563007
gcagaucucugcugaauag

SEQ ID NO: 1788452 - RNA, 19 nt, Artificial Sequence
  Description of Artificial Sequence: Synthetic oligonucleotide
  Antisense strand to SEQ ID NO: 1788451
cuauucagcagagaucugc

SEQ ID NO: 1788453 - RNA, 19 nt, Artificial Sequence
  Description of Artificial Sequence: Synthetic oligonucleotide
  Sense strand starting at position 3401 of SEQ ID NO: 1563007
ugcugaauagccuaagcua

SEQ ID NO: 1788454 - RNA, 19 nt, Artificial Sequence
  Description of Artificial Sequence: Synthetic oligonucleotide
  Antisense strand to SEQ ID NO: 1788453
uagcuuaggcuauucagca

SEQ ID NO: 1788455 - RNA, 19 nt, Artificial Sequence
  Description of Artificial Sequence: Synthetic oligonucleotide
  Sense strand starting at position 3438 of SEQ ID NO: 1563007
uagggaaauuuccaggcca

SEQ ID NO: 1788456 - RNA, 19 nt, Artificial Sequence
  Description of Artificial Sequence: Synthetic oligonucleotide
  Antisense strand to SEQ ID NO: 1788455
uggccuggaaauuucccua

SEQ ID NO: 1788457 - RNA, 19 nt, Artificial Sequence
  Description of Artificial Sequence: Synthetic oligonucleotide
  Sense strand starting at position 3473 of SEQ ID NO: 1563007
ggcauuuaguguuucucca

SEQ ID NO: 1788458 - RNA, 19 nt, Artificial Sequence
  Description of Artificial Sequence: Synthetic oligonucleotide
  Antisense strand to SEQ ID NO: 1788457
uggagaaacacuaaaugcc

SEQ ID NO: 1788459 - RNA, 19 nt, Artificial Sequence
  Description of Artificial Sequence: Synthetic oligonucleotide
  Sense strand starting at position 3477 of SEQ ID NO: 1563007
uuuaguguuucuccagaaa

SEQ ID NO: 1788460 - RNA, 19 nt, Artificial Sequence
  Description of Artificial Sequence: Synthetic oligonucleotide
  Antisense strand to SEQ ID NO: 1788459
uuucuggagaaacacuaaa

SEQ ID NO: 1788461 - RNA, 19 nt, Artificial Sequence
  Description of Artificial Sequence: Synthetic oligonucleotide
  Sense strand starting at position 3488 of SEQ ID NO: 1563007
uccagaaaggguuguggaa

SEQ ID NO: 1788462 - RNA, 19 nt, Artificial Sequence
  Description of Artificial Sequence: Synthetic oligonucleotide
  Antisense strand to SEQ ID NO: 1788461
uuccacaacccuuucugga

SEQ ID NO: 1788463 - RNA, 19 nt, Artificial Sequence
  Description of Artificial Sequence: Synthetic oligonucleotide
  Sense strand starting at position 3552 of SEQ ID NO: 1563007
cuugccauuuccugaggaa

SEQ ID NO: 1788464 - RNA, 19 nt, Artificial Sequence
  Description of Artificial Sequence: Synthetic oligonucleotide
  Antisense strand to SEQ ID NO: 1788463
uuccucaggaaauggcaag

SEQ ID NO: 1788465 - RNA, 19 nt, Artificial Sequence
  Description of Artificial Sequence: Synthetic oligonucleotide
  Sense strand starting at position 3585 of SEQ ID NO: 1563007
cccuaaggguuauaauuau

SEQ ID NO: 1788466 - RNA, 19 nt, Artificial Sequence
  Description of Artificial Sequence: Synthetic oligonucleotide
  Antisense strand to SEQ ID NO: 1788465
auaauuauaacccuuaggg

SEQ ID NO: 1788467 - RNA, 19 nt, Artificial Sequence
  Description of Artificial Sequence: Synthetic oligonucleotide
  Sense strand starting at position 3591 of SEQ ID NO: 1563007
ggguuauaauuaucuuuga

SEQ ID NO: 1788468 - RNA, 19 nt, Artificial Sequence
  Description of Artificial Sequence: Synthetic oligonucleotide
  Antisense strand to SEQ ID NO: 1788467
ucaaagauaauuauaaccc

SEQ ID NO: 1788469 - RNA, 19 nt, Artificial Sequence
  Description of Artificial Sequence: Synthetic oligonucleotide
  Sense strand starting at position 3943 of SEQ ID NO: 1563007
ucuaguaagucuccuuuag

SEQ ID NO: 1788470 - RNA, 19 nt, Artificial Sequence
  Description of Artificial Sequence: Synthetic oligonucleotide
  Antisense strand to SEQ ID NO: 1788469
cuaaaggagacuuacuaga

SEQ ID NO: 1788471 - RNA, 19 nt, Artificial Sequence
  Description of Artificial Sequence: Synthetic oligonucleotide
  Sense strand starting at position 3947 of SEQ ID NO: 1563007
guaagucuccuuuaguaaa

SEQ ID NO: 1788472 - RNA, 19 nt, Artificial Sequence
  Description of Artificial Sequence: Synthetic oligonucleotide
  Antisense strand to SEQ ID NO: 1788471
uuuacuaaaggagacuuac

SEQ ID NO: 1788473 - RNA, 19 nt, Artificial Sequence
  Description of Artificial Sequence: Synthetic oligonucleotide
  Sense strand starting at position 3966 of SEQ ID NO: 1563007
aaacaauagucuggguaca

SEQ ID NO: 1788474 - RNA, 19 nt, Artificial Sequence
  Description of Artificial Sequence: Synthetic oligonucleotide
  Antisense strand to SEQ ID NO: 1788473
uguacccagacuauuguuu

SEQ ID NO: 1788475 - RNA, 19 nt, Artificial Sequence
  Description of Artificial Sequence: Synthetic oligonucleotide
  Sense strand starting at position 3968 of SEQ ID NO: 1563007
acaauagucuggguacagu

SEQ ID NO: 1788476 - RNA, 19 nt, Artificial Sequence
  Description of Artificial Sequence: Synthetic oligonucleotide
  Antisense strand to SEQ ID NO: 1788475
acuguacccagacuauugu

SEQ ID NO: 1788477 - RNA, 19 nt, Artificial Sequence
  Description of Artificial Sequence: Synthetic oligonucleotide
  Sense strand starting at position 270 of SEQ ID NO: 1563008
auaagaguguaccuauguu

SEQ ID NO: 1788478 - RNA, 19 nt, Artificial Sequence
  Description of Artificial Sequence: Synthetic oligonucleotide
  Antisense strand to SEQ ID NO: 1788477
aacauagguacacucuuau

SEQ ID NO: 1788479 - RNA, 19 nt, Artificial Sequence
  Description of Artificial Sequence: Synthetic oligonucleotide
  Sense strand starting at position 274 of SEQ ID NO: 1563008
gaguguaccuauguuaaag

SEQ ID NO: 1788480 - RNA, 19 nt, Artificial Sequence
  Description of Artificial Sequence: Synthetic oligonucleotide
  Antisense strand to SEQ ID NO: 1788479
cuuuaacauagguacacuc

SEQ ID NO: 1788481 - RNA, 19 nt, Artificial Sequence
  Description of Artificial Sequence: Synthetic oligonucleotide
  Sense strand starting at position 285 of SEQ ID NO: 1563008
uguuaaaguugaguaaacu

SEQ ID NO: 1788482 - RNA, 19 nt, Artificial Sequence
  Description of Artificial Sequence: Synthetic oligonucleotide
  Antisense strand to SEQ ID NO: 1788481
aguuuacucaacuuuaaca

SEQ ID NO: 1788483 - RNA, 19 nt, Artificial Sequence
  Description of Artificial Sequence: Synthetic oligonucleotide
  Sense strand starting at position 286 of SEQ ID NO: 1563008
guuaaaguugaguaaacug

SEQ ID NO: 1788484 - RNA, 19 nt, Artificial Sequence
  Description of Artificial Sequence: Synthetic oligonucleotide
  Antisense strand to SEQ ID NO: 1788483
caguuuacucaacuuuaac

SEQ ID NO: 1788485 - RNA, 19 nt, Artificial Sequence
  Description of Artificial Sequence: Synthetic oligonucleotide
  Sense strand starting at position 311 of SEQ ID NO: 1563008
gagggaaguuacccaaugu

SEQ ID NO: 1788486 - RNA, 19 nt, Artificial Sequence
  Description of Artificial Sequence: Synthetic oligonucleotide
  Antisense strand to SEQ ID NO: 1788485
acauuggguaacuucccuc

SEQ ID NO: 1788487 - RNA, 19 nt, Artificial Sequence
  Description of Artificial Sequence: Synthetic oligonucleotide
  Sense strand starting at position 343 of SEQ ID NO: 1563008
ccaugugaaagccaguagu

SEQ ID NO: 1788488 - RNA, 19 nt, Artificial Sequence
  Description of Artificial Sequence: Synthetic oligonucleotide
  Antisense strand to SEQ ID NO: 1788487
acuacuggcuuucacaugg

SEQ ID NO: 1788489 - RNA, 19 nt, Artificial Sequence
  Description of Artificial Sequence: Synthetic oligonucleotide
  Sense strand starting at position 346 of SEQ ID NO: 1563008
ugugaaagccaguagugaa

SEQ ID NO: 1788490 - RNA, 19 nt, Artificial Sequence
  Description of Artificial Sequence: Synthetic oligonucleotide
  Antisense strand to SEQ ID NO: 1788489
uucacuacuggcuuucaca

SEQ ID NO: 1788491 - RNA, 19 nt, Artificial Sequence
  Description of Artificial Sequence: Synthetic oligonucleotide
  Sense strand starting at position 356 of SEQ ID NO: 1563008
aguagugaacuugaguauc

SEQ ID NO: 1788492 - RNA, 19 nt, Artificial Sequence
  Description of Artificial Sequence: Synthetic oligonucleotide
  Antisense strand to SEQ ID NO: 1788491
gauacucaaguucacuacu

SEQ ID NO: 1788493 - RNA, 19 nt, Artificial Sequence
  Description of Artificial Sequence: Synthetic oligonucleotide
  Sense strand starting at position 358 of SEQ ID NO: 1563008
uagugaacuugaguauccu

SEQ ID NO: 1788494 - RNA, 19 nt, Artificial Sequence
  Description of Artificial Sequence: Synthetic oligonucleotide
  Antisense strand to SEQ ID NO: 1788493
aggauacucaaguucacua

SEQ ID NO: 1788495 - RNA, 19 nt, Artificial Sequence
  Description of Artificial Sequence: Synthetic oligonucleotide
  Sense strand starting at position 539 of SEQ ID NO: 1563008
aagcucuguguccacagaa

SEQ ID NO: 1788496 - RNA, 19 nt, Artificial Sequence
  Description of Artificial Sequence: Synthetic oligonucleotide
  Antisense strand to SEQ ID NO: 1788495
uucuguggacacagagcuu

SEQ ID NO: 1788497 - RNA, 19 nt, Artificial Sequence
  Description of Artificial Sequence: Synthetic oligonucleotide
  Sense strand starting at position 663 of SEQ ID NO: 1563008
acgagaauggcuggaacau

SEQ ID NO: 1788498 - RNA, 19 nt, Artificial Sequence
  Description of Artificial Sequence: Synthetic oligonucleotide
  Antisense strand to SEQ ID NO: 1788497
auguuccagccauucucgu

SEQ ID NO: 1788499 - RNA, 19 nt, Artificial Sequence
  Description of Artificial Sequence: Synthetic oligonucleotide
  Sense strand starting at position 672 of SEQ ID NO: 1563008
gcuggaacaucugcaaaca

SEQ ID NO: 1788500 - RNA, 19 nt, Artificial Sequence
  Description of Artificial Sequence: Synthetic oligonucleotide
  Antisense strand to SEQ ID NO: 1788499
uguuugcagauguuccagc

SEQ ID NO: 1788501 - RNA, 19 nt, Artificial Sequence
  Description of Artificial Sequence: Synthetic oligonucleotide
  Sense strand starting at position 891 of SEQ ID NO: 1563008
gucugucauaagugaaaug

SEQ ID NO: 1788502 - RNA, 19 nt, Artificial Sequence
  Description of Artificial Sequence: Synthetic oligonucleotide
  Antisense strand to SEQ ID NO: 1788501
cauuucacuuaugacagac

SEQ ID NO: 1788503 - RNA, 19 nt, Artificial Sequence
  Description of Artificial Sequence: Synthetic oligonucleotide
  Sense strand starting at position 900 of SEQ ID NO: 1563008
aagugaaaugcccauguuc

SEQ ID NO: 1788504 - RNA, 19 nt, Artificial Sequence
  Description of Artificial Sequence: Synthetic oligonucleotide
  Antisense strand to SEQ ID NO: 1788503
gaacaugggcauuucacuu

SEQ ID NO: 1788505 - RNA, 19 nt, Artificial Sequence
  Description of Artificial Sequence: Synthetic oligonucleotide
  Sense strand starting at position 929 of SEQ ID NO: 1563008
agaacaaguuucucugguu

SEQ ID NO: 1788506 - RNA, 19 nt, Artificial Sequence
  Description of Artificial Sequence: Synthetic oligonucleotide
  Antisense strand to SEQ ID NO: 1788505
aaccagagaaacuuguucu

SEQ ID NO: 1788507 - RNA, 19 nt, Artificial Sequence
  Description of Artificial Sequence: Synthetic oligonucleotide
  Sense strand starting at position 930 of SEQ ID NO: 1563008
gaacaaguuucucugguuu

SEQ ID NO: 1788508 - RNA, 19 nt, Artificial Sequence
  Description of Artificial Sequence: Synthetic oligonucleotide
  Antisense strand to SEQ ID NO: 1788507
aaaccagagaaacuuguuc

SEQ ID NO: 1788509 - RNA, 19 nt, Artificial Sequence
  Description of Artificial Sequence: Synthetic oligonucleotide
  Sense strand starting at position 1469 of SEQ ID NO: 1563008
gugccucugagugcuucua

SEQ ID NO: 1788510 - RNA, 19 nt, Artificial Sequence
  Description of Artificial Sequence: Synthetic oligonucleotide
  Antisense strand to SEQ ID NO: 1788509
uagaagcacucagaggcac

SEQ ID NO: 1788511 - RNA, 19 nt, Artificial Sequence
  Description of Artificial Sequence: Synthetic oligonucleotide
  Sense strand starting at position 2202 of SEQ ID NO: 1563008
uuggcuuguccgcuuguaa

SEQ ID NO: 1788512 - RNA, 19 nt, Artificial Sequence
  Description of Artificial Sequence: Synthetic oligonucleotide
  Antisense strand to SEQ ID NO: 1788511
uuacaagcggacaagccaa

SEQ ID NO: 1788513 - RNA, 19 nt, Artificial Sequence
  Description of Artificial Sequence: Synthetic oligonucleotide
  Sense strand starting at position 2203 of SEQ ID NO: 1563008
uggcuuguccgcuuguaaa

SEQ ID NO: 1788514 - RNA, 19 nt, Artificial Sequence
  Description of Artificial Sequence: Synthetic oligonucleotide
  Antisense strand to SEQ ID NO: 1788513
uuuacaagcggacaagcca

SEQ ID NO: 1788515 - RNA, 19 nt, Artificial Sequence
  Description of Artificial Sequence: Synthetic oligonucleotide
  Sense strand starting at position 2238 of SEQ ID NO: 1563008
ucugaagaaucagucaagu

SEQ ID NO: 1788516 - RNA, 19 nt, Artificial Sequence
  Description of Artificial Sequence: Synthetic oligonucleotide
  Antisense strand to SEQ ID NO: 1788515
acuugacugauucuucaga

SEQ ID NO: 1788517 - RNA, 19 nt, Artificial Sequence
  Description of Artificial Sequence: Synthetic oligonucleotide
  Sense strand starting at position 2256 of SEQ ID NO: 1563008
ucuuguucucccuggagaa

SEQ ID NO: 1788518 - RNA, 19 nt, Artificial Sequence
  Description of Artificial Sequence: Synthetic oligonucleotide
  Antisense strand to SEQ ID NO: 1788517
uucuccagggagaacaaga

SEQ ID NO: 1788519 - RNA, 19 nt, Artificial Sequence
  Description of Artificial Sequence: Synthetic oligonucleotide
  Sense strand starting at position 2257 of SEQ ID NO: 1563008
cuuguucucccuggagaac

SEQ ID NO: 1788520 - RNA, 19 nt, Artificial Sequence
  Description of Artificial Sequence: Synthetic oligonucleotide
  Antisense strand to SEQ ID NO: 1788519
guucuccagggagaacaag

SEQ ID NO: 1788521 - RNA, 19 nt, Artificial Sequence
  Description of Artificial Sequence: Synthetic oligonucleotide
  Sense strand starting at position 2258 of SEQ ID NO: 1563008
uuguucucccuggagaaca

SEQ ID NO: 1788522 - RNA, 19 nt, Artificial Sequence
  Description of Artificial Sequence: Synthetic oligonucleotide
  Antisense strand to SEQ ID NO: 1788521
uguucuccagggagaacaa

SEQ ID NO: 1788523 - RNA, 19 nt, Artificial Sequence
  Description of Artificial Sequence: Synthetic oligonucleotide
  Sense strand starting at position 2260 of SEQ ID NO: 1563008
guucucccuggagaacauu

SEQ ID NO: 1788524 - RNA, 19 nt, Artificial Sequence
  Description of Artificial Sequence: Synthetic oligonucleotide
  Antisense strand to SEQ ID NO: 1788523
aauguucuccagggagaac

SEQ ID NO: 1788525 - RNA, 19 nt, Artificial Sequence
  Description of Artificial Sequence: Synthetic oligonucleotide
  Sense strand starting at position 2456 of SEQ ID NO: 1563008
gggaucucaccgggagcua

SEQ ID NO: 1788526 - RNA, 19 nt, Artificial Sequence
  Description of Artificial Sequence: Synthetic oligonucleotide
  Antisense strand to SEQ ID NO: 1788525
uagcucccggugagauccc

SEQ ID NO: 1788527 - RNA, 19 nt, Artificial Sequence
  Description of Artificial Sequence: Synthetic oligonucleotide
  Sense strand starting at position 2457 of SEQ ID NO: 1563008
ggaucucaccgggagcuau

SEQ ID NO: 1788528 - RNA, 19 nt, Artificial Sequence
  Description of Artificial Sequence: Synthetic oligonucleotide
  Antisense strand to SEQ ID NO: 1788527
auagcucccggugagaucc

SEQ ID NO: 1788529 - RNA, 19 nt, Artificial Sequence
  Description of Artificial Sequence: Synthetic oligonucleotide
  Sense strand starting at position 2468 of SEQ ID NO: 1563008
ggagcuauuuccuugcccu

SEQ ID NO: 1788530 - RNA, 19 nt, Artificial Sequence
  Description of Artificial Sequence: Synthetic oligonucleotide
  Antisense strand to SEQ ID NO: 1788529
agggcaaggaaauagcucc

SEQ ID NO: 1788531 - RNA, 19 nt, Artificial Sequence
  Description of Artificial Sequence: Synthetic oligonucleotide
  Sense strand starting at position 2469 of SEQ ID NO: 1563008
gagcuauuuccuugcccug

SEQ ID NO: 1788532 - RNA, 19 nt, Artificial Sequence
  Description of Artificial Sequence: Synthetic oligonucleotide
  Antisense strand to SEQ ID NO: 1788531
cagggcaaggaaauagcuc

SEQ ID NO: 1788533 - RNA, 19 nt, Artificial Sequence
  Description of Artificial Sequence: Synthetic oligonucleotide
  Sense strand starting at position 2488 of SEQ ID NO: 1563008
ucccucucccaguauugau

SEQ ID NO: 1788534 - RNA, 19 nt, Artificial Sequence
  Description of Artificial Sequence: Synthetic oligonucleotide
  Antisense strand to SEQ ID NO: 1788533
aucaauacugggagaggga

SEQ ID NO: 1788535 - RNA, 19 nt, Artificial Sequence
  Description of Artificial Sequence: Synthetic oligonucleotide
  Sense strand starting at position 2790 of SEQ ID NO: 1563008
aagugacuguucccaaaga

SEQ ID NO: 1788536 - RNA, 19 nt, Artificial Sequence
  Description of Artificial Sequence: Synthetic oligonucleotide
  Antisense strand to SEQ ID NO: 1788535
ucuuugggaacagucacuu

SEQ ID NO: 1788537 - RNA, 19 nt, Artificial Sequence
  Description of Artificial Sequence: Synthetic oligonucleotide
  Sense strand starting at position 3145 of SEQ ID NO: 1563008
gaauucuuacgaggaaccu

SEQ ID NO: 1788538 - RNA, 19 nt, Artificial Sequence
  Description of Artificial Sequence: Synthetic oligonucleotide
  Antisense strand to SEQ ID NO: 1788537
agguuccucguaagaauuc

SEQ ID NO: 1788539 - RNA, 19 nt, Artificial Sequence
  Description of Artificial Sequence: Synthetic oligonucleotide
  Sense strand starting at position 3330 of SEQ ID NO: 1563008
uguucuagucuggaaguga

SEQ ID NO: 1788540 - RNA, 19 nt, Artificial Sequence
  Description of Artificial Sequence: Synthetic oligonucleotide
  Antisense strand to SEQ ID NO: 1788539
ucacuuccagacuagaaca

SEQ ID NO: 1788541 - RNA, 19 nt, Artificial Sequence
  Description of Artificial Sequence: Synthetic oligonucleotide
  Sense strand starting at position 3493 of SEQ ID NO: 1563008
agagccauucuuugaucuu

SEQ ID NO: 1788542 - RNA, 19 nt, Artificial Sequence
  Description of Artificial Sequence: Synthetic oligonucleotide
  Antisense strand to SEQ ID NO: 1788541
aagaucaaagaauggcucu

SEQ ID NO: 1788543 - RNA, 19 nt, Artificial Sequence
  Description of Artificial Sequence: Synthetic oligonucleotide
  Sense strand starting at position 3622 of SEQ ID NO: 1563008
uucuaugugccagaucaua

SEQ ID NO: 1788544 - RNA, 19 nt, Artificial Sequence
  Description of Artificial Sequence: Synthetic oligonucleotide
  Antisense strand to SEQ ID NO: 1788543
uaugaucuggcacauagaa

SEQ ID NO: 1788545 - RNA, 19 nt, Artificial Sequence
  Description of Artificial Sequence: Synthetic oligonucleotide
  Sense strand starting at position 3693 of SEQ ID NO: 1563008
agagcuuccugaccaauga

SEQ ID NO: 1788546 - RNA, 19 nt, Artificial Sequence
  Description of Artificial Sequence: Synthetic oligonucleotide
  Antisense strand to SEQ ID NO: 1788545
ucauuggucaggaagcucu

SEQ ID NO: 1788547 - RNA, 19 nt, Artificial Sequence
  Description of Artificial Sequence: Synthetic oligonucleotide
  Sense strand starting at position 3697 of SEQ ID NO: 1563008
cuuccugaccaaugacaga

SEQ ID NO: 1788548 - RNA, 19 nt, Artificial Sequence
  Description of Artificial Sequence: Synthetic oligonucleotide
  Antisense strand to SEQ ID NO: 1788547
ucugucauuggucaggaag

SEQ ID NO: 1788549 - RNA, 19 nt, Artificial Sequence
  Description of Artificial Sequence: Synthetic oligonucleotide
  Sense strand starting at position 3735 of SEQ ID NO: 1563008
ugagacaacuaccugugaa

SEQ ID NO: 1788550 - RNA, 19 nt, Artificial Sequence
  Description of Artificial Sequence: Synthetic oligonucleotide
  Antisense strand to SEQ ID NO: 1788549
uucacagguaguugucuca

SEQ ID NO: 1788551 - RNA, 19 nt, Artificial Sequence
  Description of Artificial Sequence: Synthetic oligonucleotide
  Sense strand starting at position 3750 of SEQ ID NO: 1563008
ugaaauuaccauugugaca

SEQ ID NO: 1788552 - RNA, 19 nt, Artificial Sequence
  Description of Artificial Sequence: Synthetic oligonucleotide
  Antisense strand to SEQ ID NO: 1788551
ugucacaaugguaauuuca

SEQ ID NO: 1788553 - RNA, 19 nt, Artificial Sequence
  Description of Artificial Sequence: Synthetic oligonucleotide
  Sense strand starting at position 3764 of SEQ ID NO: 1563008
ugacacaugcuuugaagga

SEQ ID NO: 1788554 - RNA, 19 nt, Artificial Sequence
  Description of Artificial Sequence: Synthetic oligonucleotide
  Antisense strand to SEQ ID NO: 1788553
uccuucaaagcauguguca

SEQ ID NO: 1788555 - RNA, 19 nt, Artificial Sequence
  Description of Artificial Sequence: Synthetic oligonucleotide
  Sense strand starting at position 3964 of SEQ ID NO: 1563008
uacaauauuuagggaggga

SEQ ID NO: 1788556 - RNA, 19 nt, Artificial Sequence
  Description of Artificial Sequence: Synthetic oligonucleotide
  Antisense strand to SEQ ID NO: 1788555
ucccucccuaaauauugua

SEQ ID NO: 1788557 - RNA, 19 nt, Artificial Sequence
  Description of Artificial Sequence: Synthetic oligonucleotide
  Sense strand starting at position 192 of SEQ ID NO: 1563009
ugcccuagaguguauugaa

SEQ ID NO: 1788558 - RNA, 19 nt, Artificial Sequence
  Description of Artificial Sequence: Synthetic oligonucleotide
  Antisense strand to SEQ ID NO: 1788557
uucaauacacucuagggca

SEQ ID NO: 1788559 - RNA, 19 nt, Artificial Sequence
  Description of Artificial Sequence: Synthetic oligonucleotide
  Sense strand starting at position 1271 of SEQ ID NO: 1563009
acuggaaggcuugguagaa

SEQ ID NO: 1788560 - RNA, 19 nt, Artificial Sequence
  Description of Artificial Sequence: Synthetic oligonucleotide
  Antisense strand to SEQ ID NO: 1788559
uucuaccaagccuuccagu

SEQ ID NO: 1788561 - RNA, 19 nt, Artificial Sequence
  Description of Artificial Sequence: Synthetic oligonucleotide
  Sense strand starting at position 1272 of SEQ ID NO: 1563009
cuggaaggcuugguagaau

SEQ ID NO: 1788562 - RNA, 19 nt, Artificial Sequence
  Description of Artificial Sequence: Synthetic oligonucleotide
  Antisense strand to SEQ ID NO: 1788561
auucuaccaagccuuccag

SEQ ID NO: 1788563 - RNA, 19 nt, Artificial Sequence
  Description of Artificial Sequence: Synthetic oligonucleotide
  Sense strand starting at position 1335 of SEQ ID NO: 1563009
caaagauauuucgacugga

SEQ ID NO: 1788564 - RNA, 19 nt, Artificial Sequence
  Description of Artificial Sequence: Synthetic oligonucleotide
  Antisense strand to SEQ ID NO: 1788563
uccagucgaaauaucuuug

SEQ ID NO: 1788565 - RNA, 19 nt, Artificial Sequence
  Description of Artificial Sequence: Synthetic oligonucleotide
  Sense strand starting at position 1384 of SEQ ID NO: 1563009
ggaaaucauuccgcaaaca

SEQ ID NO: 1788566 - RNA, 19 nt, Artificial Sequence
  Description of Artificial Sequence: Synthetic oligonucleotide
  Antisense strand to SEQ ID NO: 1788565
uguuugcggaaugauuucc

SEQ ID NO: 1788567 - RNA, 19 nt, Artificial Sequence
  Description of Artificial Sequence: Synthetic oligonucleotide
  Sense strand starting at position 1426 of SEQ ID NO: 1563009
uugugagaguucucagagg

SEQ ID NO: 1788568 - RNA, 19 nt, Artificial Sequence
  Description of Artificial Sequence: Synthetic oligonucleotide
  Antisense strand to SEQ ID NO: 1788567
ccucugagaacucucacaa

SEQ ID NO: 1788569 - RNA, 19 nt, Artificial Sequence
  Description of Artificial Sequence: Synthetic oligonucleotide
  Sense strand starting at position 1431 of SEQ ID NO: 1563009
agaguucucagaggugauc

SEQ ID NO: 1788570 - RNA, 19 nt, Artificial Sequence
  Description of Artificial Sequence: Synthetic oligonucleotide
  Antisense strand to SEQ ID NO: 1788569
gaucaccucugagaacucu

SEQ ID NO: 1788571 - RNA, 19 nt, Artificial Sequence
  Description of Artificial Sequence: Synthetic oligonucleotide
  Sense strand starting at position 1471 of SEQ ID NO: 1563009
gguuguugaccagagcacu

SEQ ID NO: 1788572 - RNA, 19 nt, Artificial Sequence
  Description of Artificial Sequence: Synthetic oligonucleotide
  Antisense strand to SEQ ID NO: 1788571
agugcucuggucaacaacc

SEQ ID NO: 1788573 - RNA, 19 nt, Artificial Sequence
  Description of Artificial Sequence: Synthetic oligonucleotide
  Sense strand starting at position 2092 of SEQ ID NO: 1563009
agaggacauucuuugcaca

SEQ ID NO: 1788574 - RNA, 19 nt, Artificial Sequence
  Description of Artificial Sequence: Synthetic oligonucleotide
  Antisense strand to SEQ ID NO: 1788573
ugugcaaagaauguccucu

SEQ ID NO: 1788575 - RNA, 19 nt, Artificial Sequence
  Description of Artificial Sequence: Synthetic oligonucleotide
  Sense strand starting at position 2093 of SEQ ID NO: 1563009
gaggacauucuuugcacau

SEQ ID NO: 1788576 - RNA, 19 nt, Artificial Sequence
  Description of Artificial Sequence: Synthetic oligonucleotide
  Antisense strand to SEQ ID NO: 1788575
augugcaaagaauguccuc

SEQ ID NO: 1788577 - RNA, 19 nt, Artificial Sequence
  Description of Artificial Sequence: Synthetic oligonucleotide
  Sense strand starting at position 2094 of SEQ ID NO: 1563009
aggacauucuuugcacaug

SEQ ID NO: 1788578 - RNA, 19 nt, Artificial Sequence
  Description of Artificial Sequence: Synthetic oligonucleotide
  Antisense strand to SEQ ID NO: 1788577
caugugcaaagaauguccu

SEQ ID NO: 1788579 - RNA, 19 nt, Artificial Sequence
  Description of Artificial Sequence: Synthetic oligonucleotide
  Sense strand starting at position 2121 of SEQ ID NO: 1563009
ucaguaaagaucugcugag

SEQ ID NO: 1788580 - RNA, 19 nt, Artificial Sequence
  Description of Artificial Sequence: Synthetic oligonucleotide
  Antisense strand to SEQ ID NO: 1788579
cucagcagaucuuuacuga

SEQ ID NO: 1788581 - RNA, 19 nt, Artificial Sequence
  Description of Artificial Sequence: Synthetic oligonucleotide
  Sense strand starting at position 2122 of SEQ ID NO: 1563009
caguaaagaucugcugagu

SEQ ID NO: 1788582 - RNA, 19 nt, Artificial Sequence
  Description of Artificial Sequence: Synthetic oligonucleotide
  Antisense strand to SEQ ID NO: 1788581
acucagcagaucuuuacug

SEQ ID NO: 1788583 - RNA, 19 nt, Artificial Sequence
  Description of Artificial Sequence: Synthetic oligonucleotide
  Sense strand starting at position 2127 of SEQ ID NO: 1563009
aagaucugcugagugagua

SEQ ID NO: 1788584 - RNA, 19 nt, Artificial Sequence
  Description of Artificial Sequence: Synthetic oligonucleotide
  Antisense strand to SEQ ID NO: 1788583
uacucacucagcagaucuu

SEQ ID NO: 1788585 - RNA, 19 nt, Artificial Sequence
  Description of Artificial Sequence: Synthetic oligonucleotide
  Sense strand starting at position 2128 of SEQ ID NO: 1563009
agaucugcugagugaguaa

SEQ ID NO: 1788586 - RNA, 19 nt, Artificial Sequence
  Description of Artificial Sequence: Synthetic oligonucleotide
  Antisense strand to SEQ ID NO: 1788585
uuacucacucagcagaucu

SEQ ID NO: 1788587 - RNA, 19 nt, Artificial Sequence
  Description of Artificial Sequence: Synthetic oligonucleotide
  Sense strand starting at position 2135 of SEQ ID NO: 1563009
cugagugaguaagugauau

SEQ ID NO: 1788588 - RNA, 19 nt, Artificial Sequence
  Description of Artificial Sequence: Synthetic oligonucleotide
  Antisense strand to SEQ ID NO: 1788587
auaucacuuacucacucag

SEQ ID NO: 1788589 - RNA, 19 nt, Artificial Sequence
  Description of Artificial Sequence: Synthetic oligonucleotide
  Sense strand starting at position 2137 of SEQ ID NO: 1563009
gagugaguaagugauauca

SEQ ID NO: 1788590 - RNA, 19 nt, Artificial Sequence
  Description of Artificial Sequence: Synthetic oligonucleotide
  Antisense strand to SEQ ID NO: 1788589
ugauaucacuuacucacuc

SEQ ID NO: 1788591 - RNA, 19 nt, Artificial Sequence
  Description of Artificial Sequence: Synthetic oligonucleotide
  Sense strand starting at position 2205 of SEQ ID NO: 1563009
augucugagagcugcauuu

SEQ ID NO: 1788592 - RNA, 19 nt, Artificial Sequence
  Description of Artificial Sequence: Synthetic oligonucleotide
  Antisense strand to SEQ ID NO: 1788591
aaaugcagcucucagacau

SEQ ID NO: 1788593 - RNA, 19 nt, Artificial Sequence
  Description of Artificial Sequence: Synthetic oligonucleotide
  Sense strand starting at position 2244 of SEQ ID NO: 1563009
ucaggacucuucucaggga

SEQ ID NO: 1788594 - RNA, 19 nt, Artificial Sequence
  Description of Artificial Sequence: Synthetic oligonucleotide
  Antisense strand to SEQ ID NO: 1788593
ucccugagaagaguccuga

SEQ ID NO: 1788595 - RNA, 19 nt, Artificial Sequence
  Description of Artificial Sequence: Synthetic oligonucleotide
  Sense strand starting at position 2248 of SEQ ID NO: 1563009
gacucuucucagggacaug

SEQ ID NO: 1788596 - RNA, 19 nt, Artificial Sequence
  Description of Artificial Sequence: Synthetic oligonucleotide
  Antisense strand to SEQ ID NO: 1788595
caugucccugagaagaguc

SEQ ID NO: 1788597 - RNA, 19 nt, Artificial Sequence
  Description of Artificial Sequence: Synthetic oligonucleotide
  Sense strand starting at position 2360 of SEQ ID NO: 1563009
ugaaguggcucugugaaau

SEQ ID NO: 1788598 - RNA, 19 nt, Artificial Sequence
  Description of Artificial Sequence: Synthetic oligonucleotide
  Antisense strand to SEQ ID NO: 1788597
auuucacagagccacuuca

SEQ ID NO: 1788599 - RNA, 19 nt, Artificial Sequence
  Description of Artificial Sequence: Synthetic oligonucleotide
  Sense strand starting at position 2366 of SEQ ID NO: 1563009
ggcucugugaaauaucagu

SEQ ID NO: 1788600 - RNA, 19 nt, Artificial Sequence
  Description of Artificial Sequence: Synthetic oligonucleotide
  Antisense strand to SEQ ID NO: 1788599
acugauauuucacagagcc

SEQ ID NO: 1788601 - RNA, 19 nt, Artificial Sequence
  Description of Artificial Sequence: Synthetic oligonucleotide
  Sense strand starting at position 2444 of SEQ ID NO: 1563009
agguuaguccgucaaauag

SEQ ID NO: 1788602 - RNA, 19 nt, Artificial Sequence
  Description of Artificial Sequence: Synthetic oligonucleotide
  Antisense strand to SEQ ID NO: 1788601
cuauuugacggacuaaccu

SEQ ID NO: 1788603 - RNA, 19 nt, Artificial Sequence
  Description of Artificial Sequence: Synthetic oligonucleotide
  Sense strand starting at position 2486 of SEQ ID NO: 1563009
gguguuggcaaauaaauag

SEQ ID NO: 1788604 - RNA, 19 nt, Artificial Sequence
  Description of Artificial Sequence: Synthetic oligonucleotide
  Antisense strand to SEQ ID NO: 1788603
cuauuuauuugccaacacc

SEQ ID NO: 1788605 - RNA, 19 nt, Artificial Sequence
  Description of Artificial Sequence: Synthetic oligonucleotide
  Sense strand starting at position 2513 of SEQ ID NO: 1563009
acauauuucugguagagau

SEQ ID NO: 1788606 - RNA, 19 nt, Artificial Sequence
  Description of Artificial Sequence: Synthetic oligonucleotide
  Antisense strand to SEQ ID NO: 1788605
aucucuaccagaaauaugu

SEQ ID NO: 1788607 - RNA, 19 nt, Artificial Sequence
  Description of Artificial Sequence: Synthetic oligonucleotide
  Sense strand starting at position 2561 of SEQ ID NO: 1563009
gucgguugguacacguuaa

SEQ ID NO: 1788608 - RNA, 19 nt, Artificial Sequence
  Description of Artificial Sequence: Synthetic oligonucleotide
  Antisense strand to SEQ ID NO: 1788607
uuaacguguaccaaccgac

SEQ ID NO: 1788609 - RNA, 19 nt, Artificial Sequence
  Description of Artificial Sequence: Synthetic oligonucleotide
  Sense strand starting at position 2735 of SEQ ID NO: 1563009
cacguaagggcccaacaau

SEQ ID NO: 1788610 - RNA, 19 nt, Artificial Sequence
  Description of Artificial Sequence: Synthetic oligonucleotide
  Antisense strand to SEQ ID NO: 1788609
auuguugggcccuuacgug

SEQ ID NO: 1788611 - RNA, 19 nt, Artificial Sequence
  Description of Artificial Sequence: Synthetic oligonucleotide
  Sense strand starting at position 2821 of SEQ ID NO: 1563009
gggaucucgcuauauugac

SEQ ID NO: 1788612 - RNA, 19 nt, Artificial Sequence
  Description of Artificial Sequence: Synthetic oligonucleotide
  Antisense strand to SEQ ID NO: 1788611
gucaauauagcgagauccc

SEQ ID NO: 1788613 - RNA, 19 nt, Artificial Sequence
  Description of Artificial Sequence: Synthetic oligonucleotide
  Sense strand starting at position 2968 of SEQ ID NO: 1563009
cuuugaagaauucguuaug

SEQ ID NO: 1788614 - RNA, 19 nt, Artificial Sequence
  Description of Artificial Sequence: Synthetic oligonucleotide
  Antisense strand to SEQ ID NO: 1788613
cauaacgaauucuucaaag

SEQ ID NO: 1788615 - RNA, 19 nt, Artificial Sequence
  Description of Artificial Sequence: Synthetic oligonucleotide
  Sense strand starting at position 2969 of SEQ ID NO: 1563009
uuugaagaauucguuauga

SEQ ID NO: 1788616 - RNA, 19 nt, Artificial Sequence
  Description of Artificial Sequence: Synthetic oligonucleotide
  Antisense strand to SEQ ID NO: 1788615
ucauaacgaauucuucaaa

SEQ ID NO: 1788617 - RNA, 19 nt, Artificial Sequence
  Description of Artificial Sequence: Synthetic oligonucleotide
  Sense strand starting at position 2978 of SEQ ID NO: 1563009
uucguuaugacaugaggag

SEQ ID NO: 1788618 - RNA, 19 nt, Artificial Sequence
  Description of Artificial Sequence: Synthetic oligonucleotide
  Antisense strand to SEQ ID NO: 1788617
cuccucaugucauaacgaa

SEQ ID NO: 1788619 - RNA, 19 nt, Artificial Sequence
  Description of Artificial Sequence: Synthetic oligonucleotide
  Sense strand starting at position 3033 of SEQ ID NO: 1563009
uaaauauaugcauaggugu

SEQ ID NO: 1788620 - RNA, 19 nt, Artificial Sequence
  Description of Artificial Sequence: Synthetic oligonucleotide
  Antisense strand to SEQ ID NO: 1788619
acaccuaugcauauauuua

SEQ ID NO: 1788621 - RNA, 19 nt, Artificial Sequence
  Description of Artificial Sequence: Synthetic oligonucleotide
  Sense strand starting at position 3063 of SEQ ID NO: 1563009
uguaccuguguauacauau

SEQ ID NO: 1788622 - RNA, 19 nt, Artificial Sequence
  Description of Artificial Sequence: Synthetic oligonucleotide
  Antisense strand to SEQ ID NO: 1788621
auauguauacacagguaca

SEQ ID NO: 1788623 - RNA, 19 nt, Artificial Sequence
  Description of Artificial Sequence: Synthetic oligonucleotide
  Sense strand starting at position 3223 of SEQ ID NO: 1563009
acaacaauuccagagcugu

SEQ ID NO: 1788624 - RNA, 19 nt, Artificial Sequence
  Description of Artificial Sequence: Synthetic oligonucleotide
  Antisense strand to SEQ ID NO: 1788623
acagcucuggaauuguugu

SEQ ID NO: 1788625 - RNA, 19 nt, Artificial Sequence
  Description of Artificial Sequence: Synthetic oligonucleotide
  Sense strand starting at position 3342 of SEQ ID NO: 1563009
gugcuagcuacaguuaugu

SEQ ID NO: 1788626 - RNA, 19 nt, Artificial Sequence
  Description of Artificial Sequence: Synthetic oligonucleotide
  Antisense strand to SEQ ID NO: 1788625
acauaacuguagcuagcac

SEQ ID NO: 1788627 - RNA, 19 nt, Artificial Sequence
  Description of Artificial Sequence: Synthetic oligonucleotide
  Sense strand starting at position 3407 of SEQ ID NO: 1563009
ugauguuagagcuggaauu

SEQ ID NO: 1788628 - RNA, 19 nt, Artificial Sequence
  Description of Artificial Sequence: Synthetic oligonucleotide
  Antisense strand to SEQ ID NO: 1788627
aauuccagcucuaacauca

SEQ ID NO: 1788629 - RNA, 19 nt, Artificial Sequence
  Description of Artificial Sequence: Synthetic oligonucleotide
  Sense strand starting at position 3408 of SEQ ID NO: 1563009
gauguuagagcuggaauua

SEQ ID NO: 1788630 - RNA, 19 nt, Artificial Sequence
  Description of Artificial Sequence: Synthetic oligonucleotide
  Antisense strand to SEQ ID NO: 1788629
uaauuccagcucuaacauc

SEQ ID NO: 1788631 - RNA, 19 nt, Artificial Sequence
  Description of Artificial Sequence: Synthetic oligonucleotide
  Sense strand starting at position 3409 of SEQ ID NO: 1563009
auguuagagcuggaauuac

SEQ ID NO: 1788632 - RNA, 19 nt, Artificial Sequence
  Description of Artificial Sequence: Synthetic oligonucleotide
  Antisense strand to SEQ ID NO: 1788631
guaauuccagcucuaacau

SEQ ID NO: 1788633 - RNA, 19 nt, Artificial Sequence
  Description of Artificial Sequence: Synthetic oligonucleotide
  Sense strand starting at position 3488 of SEQ ID NO: 1563009
agaagaaagugauucacgu

SEQ ID NO: 1788634 - RNA, 19 nt, Artificial Sequence
  Description of Artificial Sequence: Synthetic oligonucleotide
  Antisense strand to SEQ ID NO: 1788633
acgugaaucacuuucuucu

SEQ ID NO: 1788635 - RNA, 19 nt, Artificial Sequence
  Description of Artificial Sequence: Synthetic oligonucleotide
  Sense strand starting at position 3900 of SEQ ID NO: 1563009
aagaauugccuagggcaau

SEQ ID NO: 1788636 - RNA, 19 nt, Artificial Sequence
  Description of Artificial Sequence: Synthetic oligonucleotide
  Antisense strand to SEQ ID NO: 1788635
auugcccuaggcaauucuu

SEQ ID NO: 1788637 - RNA, 19 nt, Artificial Sequence
  Description of Artificial Sequence: Synthetic oligonucleotide
  Sense strand starting at position 48 of SEQ ID NO: 1563010
ccaauaacugcaugggaca

SEQ ID NO: 1788638 - RNA, 19 nt, Artificial Sequence
  Description of Artificial Sequence: Synthetic oligonucleotide
  Antisense strand to SEQ ID NO: 1788637
ugucccaugcaguuauugg

SEQ ID NO: 1788639 - RNA, 19 nt, Artificial Sequence
  Description of Artificial Sequence: Synthetic oligonucleotide
  Sense strand starting at position 91 of SEQ ID NO: 1563010
aggcuccucagaugagaaa

SEQ ID NO: 1788640 - RNA, 19 nt, Artificial Sequence
  Description of Artificial Sequence: Synthetic oligonucleotide
  Antisense strand to SEQ ID NO: 1788639
uuucucaucugaggagccu

SEQ ID NO: 1788641 - RNA, 19 nt, Artificial Sequence
  Description of Artificial Sequence: Synthetic oligonucleotide
  Sense strand starting at position 311 of SEQ ID NO: 1563010
gcugucauaauaggugaca

SEQ ID NO: 1788642 - RNA, 19 nt, Artificial Sequence
  Description of Artificial Sequence: Synthetic oligonucleotide
  Antisense strand to SEQ ID NO: 1788641
ugucaccuauuaugacagc

SEQ ID NO: 1788643 - RNA, 19 nt, Artificial Sequence
  Description of Artificial Sequence: Synthetic oligonucleotide
  Sense strand starting at position 312 of SEQ ID NO: 1563010
cugucauaauaggugacau

SEQ ID NO: 1788644 - RNA, 19 nt, Artificial Sequence
  Description of Artificial Sequence: Synthetic oligonucleotide
  Antisense strand to SEQ ID NO: 1788643
augucaccuauuaugacag

SEQ ID NO: 1788645 - RNA, 19 nt, Artificial Sequence
  Description of Artificial Sequence: Synthetic oligonucleotide
  Sense strand starting at position 332 of SEQ ID NO: 1563010
uuguaauguccuggaauua

SEQ ID NO: 1788646 - RNA, 19 nt, Artificial Sequence
  Description of Artificial Sequence: Synthetic oligonucleotide
  Antisense strand to SEQ ID NO: 1788645
uaauuccaggacauuacaa

SEQ ID NO: 1788647 - RNA, 19 nt, Artificial Sequence
  Description of Artificial Sequence: Synthetic oligonucleotide
  Sense strand starting at position 333 of SEQ ID NO: 1563010
uguaauguccuggaauuac

SEQ ID NO: 1788648 - RNA, 19 nt, Artificial Sequence
  Description of Artificial Sequence: Synthetic oligonucleotide
  Antisense strand to SEQ ID NO: 1788647
guaauuccaggacauuaca

SEQ ID NO: 1788649 - RNA, 19 nt, Artificial Sequence
  Description of Artificial Sequence: Synthetic oligonucleotide
  Sense strand starting at position 395 of SEQ ID NO: 1563010
cgaguaggcaaccaaugua

SEQ ID NO: 1788650 - RNA, 19 nt, Artificial Sequence
  Description of Artificial Sequence: Synthetic oligonucleotide
  Antisense strand to SEQ ID NO: 1788649
uacauugguugccuacucg

SEQ ID NO: 1788651 - RNA, 19 nt, Artificial Sequence
  Description of Artificial Sequence: Synthetic oligonucleotide
  Sense strand starting at position 1003 of SEQ ID NO: 1563010
gcuggaaaguguucuauag

SEQ ID NO: 1788652 - RNA, 19 nt, Artificial Sequence
  Description of Artificial Sequence: Synthetic oligonucleotide
  Antisense strand to SEQ ID NO: 1788651
cuauagaacacuuuccagc

SEQ ID NO: 1788653 - RNA, 19 nt, Artificial Sequence
  Description of Artificial Sequence: Synthetic oligonucleotide
  Sense strand starting at position 1577 of SEQ ID NO: 1563010
aagcgaaagaaaugcgaua

SEQ ID NO: 1788654 - RNA, 19 nt, Artificial Sequence
  Description of Artificial Sequence: Synthetic oligonucleotide
  Antisense strand to SEQ ID NO: 1788653
uaucgcauuucuuucgcuu

SEQ ID NO: 1788655 - RNA, 19 nt, Artificial Sequence
  Description of Artificial Sequence: Synthetic oligonucleotide
  Sense strand starting at position 1579 of SEQ ID NO: 1563010
gcgaaagaaaugcgauaau

SEQ ID NO: 1788656 - RNA, 19 nt, Artificial Sequence
  Description of Artificial Sequence: Synthetic oligonucleotide
  Antisense strand to SEQ ID NO: 1788655
auuaucgcauuucuuucgc

SEQ ID NO: 1788657 - RNA, 19 nt, Artificial Sequence
  Description of Artificial Sequence: Synthetic oligonucleotide
  Sense strand starting at position 1709 of SEQ ID NO: 1563010
cauuguaagcguuauuuau

SEQ ID NO: 1788658 - RNA, 19 nt, Artificial Sequence
  Description of Artificial Sequence: Synthetic oligonucleotide
  Antisense strand to SEQ ID NO: 1788657
auaaauaacgcuuacaaug

SEQ ID NO: 1788659 - RNA, 19 nt, Artificial Sequence
  Description of Artificial Sequence: Synthetic oligonucleotide
  Sense strand starting at position 1713 of SEQ ID NO: 1563010
guaagcguuauuuaugcaa

SEQ ID NO: 1788660 - RNA, 19 nt, Artificial Sequence
  Description of Artificial Sequence: Synthetic oligonucleotide
  Antisense strand to SEQ ID NO: 1788659
uugcauaaauaacgcuuac

SEQ ID NO: 1788661 - RNA, 19 nt, Artificial Sequence
  Description of Artificial Sequence: Synthetic oligonucleotide
  Sense strand starting at position 1908 of SEQ ID NO: 1563010
cugagaugucagcagcauu

SEQ ID NO: 1788662 - RNA, 19 nt, Artificial Sequence
  Description of Artificial Sequence: Synthetic oligonucleotide
  Antisense strand to SEQ ID NO: 1788661
aaugcugcugacaucucag

SEQ ID NO: 1788663 - RNA, 19 nt, Artificial Sequence
  Description of Artificial Sequence: Synthetic oligonucleotide
  Sense strand starting at position 1926 of SEQ ID NO: 1563010
uucggauguggucagacaa

SEQ ID NO: 1788664 - RNA, 19 nt, Artificial Sequence
  Description of Artificial Sequence: Synthetic oligonucleotide
  Antisense strand to SEQ ID NO: 1788663
uugucugaccacauccgaa

SEQ ID NO: 1788665 - RNA, 19 nt, Artificial Sequence
  Description of Artificial Sequence: Synthetic oligonucleotide
  Sense strand starting at position 2046 of SEQ ID NO: 1563010
uaaguucuggguuaaugau

SEQ ID NO: 1788666 - RNA, 19 nt, Artificial Sequence
  Description of Artificial Sequence: Synthetic oligonucleotide
  Antisense strand to SEQ ID NO: 1788665
aucauuaacccagaacuua

SEQ ID NO: 1788667 - RNA, 19 nt, Artificial Sequence
  Description of Artificial Sequence: Synthetic oligonucleotide
  Sense strand starting at position 2094 of SEQ ID NO: 1563010
gagccagcuccuggauaug

SEQ ID NO: 1788668 - RNA, 19 nt, Artificial Sequence
  Description of Artificial Sequence: Synthetic oligonucleotide
  Antisense strand to SEQ ID NO: 1788667
cauauccaggagcuggcuc

SEQ ID NO: 1788669 - RNA, 19 nt, Artificial Sequence
  Description of Artificial Sequence: Synthetic oligonucleotide
  Sense strand starting at position 2175 of SEQ ID NO: 1563010
cuagguagagugugagaau

SEQ ID NO: 1788670 - RNA, 19 nt, Artificial Sequence
  Description of Artificial Sequence: Synthetic oligonucleotide
  Antisense strand to SEQ ID NO: 1788669
auucucacacucuaccuag

SEQ ID NO: 1788671 - RNA, 19 nt, Artificial Sequence
  Description of Artificial Sequence: Synthetic oligonucleotide
  Sense strand starting at position 2241 of SEQ ID NO: 1563010
gggcguucucugagugcaa

SEQ ID NO: 1788672 - RNA, 19 nt, Artificial Sequence
  Description of Artificial Sequence: Synthetic oligonucleotide
  Antisense strand to SEQ ID NO: 1788671
uugcacucagagaacgccc

SEQ ID NO: 1788673 - RNA, 19 nt, Artificial Sequence
  Description of Artificial Sequence: Synthetic oligonucleotide
  Sense strand starting at position 2407 of SEQ ID NO: 1563010
guuucugaccaaugagcua

SEQ ID NO: 1788674 - RNA, 19 nt, Artificial Sequence
  Description of Artificial Sequence: Synthetic oligonucleotide
  Antisense strand to SEQ ID NO: 1788673
uagcucauuggucagaaac

SEQ ID NO: 1788675 - RNA, 19 nt, Artificial Sequence
  Description of Artificial Sequence: Synthetic oligonucleotide
  Sense strand starting at position 2419 of SEQ ID NO: 1563010
ugagcuauaucccuugaca

SEQ ID NO: 1788676 - RNA, 19 nt, Artificial Sequence
  Description of Artificial Sequence: Synthetic oligonucleotide
  Antisense strand to SEQ ID NO: 1788675
ugucaagggauauagcuca

SEQ ID NO: 1788677 - RNA, 19 nt, Artificial Sequence
  Description of Artificial Sequence: Synthetic oligonucleotide
  Sense strand starting at position 2421 of SEQ ID NO: 1563010
agcuauaucccuugacagu

SEQ ID NO: 1788678 - RNA, 19 nt, Artificial Sequence
  Description of Artificial Sequence: Synthetic oligonucleotide
  Antisense strand to SEQ ID NO: 1788677
acugucaagggauauagcu

SEQ ID NO: 1788679 - RNA, 19 nt, Artificial Sequence
  Description of Artificial Sequence: Synthetic oligonucleotide
  Sense strand starting at position 2422 of SEQ ID NO: 1563010
gcuauaucccuugacagug

SEQ ID NO: 1788680 - RNA, 19 nt, Artificial Sequence
  Description of Artificial Sequence: Synthetic oligonucleotide
  Antisense strand to SEQ ID NO: 1788679
cacugucaagggauauagc

SEQ ID NO: 1788681 - RNA, 19 nt, Artificial Sequence
  Description of Artificial Sequence: Synthetic oligonucleotide
  Sense strand starting at position 2432 of SEQ ID NO: 1563010
uugacagugaagugaauua

SEQ ID NO: 1788682 - RNA, 19 nt, Artificial Sequence
  Description of Artificial Sequence: Synthetic oligonucleotide
  Antisense strand to SEQ ID NO: 1788681
uaauucacuucacugucaa

SEQ ID NO: 1788683 - RNA, 19 nt, Artificial Sequence
  Description of Artificial Sequence: Synthetic oligonucleotide
  Sense strand starting at position 2554 of SEQ ID NO: 1563010
accauauguggugaguuga

SEQ ID NO: 1788684 - RNA, 19 nt, Artificial Sequence
  Description of Artificial Sequence: Synthetic oligonucleotide
  Antisense strand to SEQ ID NO: 1788683
ucaacucaccacauauggu

SEQ ID NO: 1788685 - RNA, 19 nt, Artificial Sequence
  Description of Artificial Sequence: Synthetic oligonucleotide
  Sense strand starting at position 2595 of SEQ ID NO: 1563010
gggucagaggguuguacaa

SEQ ID NO: 1788686 - RNA, 19 nt, Artificial Sequence
  Description of Artificial Sequence: Synthetic oligonucleotide
  Antisense strand to SEQ ID NO: 1788685
uuguacaacccucugaccc

SEQ ID NO: 1788687 - RNA, 19 nt, Artificial Sequence
  Description of Artificial Sequence: Synthetic oligonucleotide
  Sense strand starting at position 2617 of SEQ ID NO: 1563010
gugaaucaaccuggaagca

SEQ ID NO: 1788688 - RNA, 19 nt, Artificial Sequence
  Description of Artificial Sequence: Synthetic oligonucleotide
  Antisense strand to SEQ ID NO: 1788687
ugcuuccagguugauucac

SEQ ID NO: 1788689 - RNA, 19 nt, Artificial Sequence
  Description of Artificial Sequence: Synthetic oligonucleotide
  Sense strand starting at position 2803 of SEQ ID NO: 1563010
uagggagucuuugucucua

SEQ ID NO: 1788690 - RNA, 19 nt, Artificial Sequence
  Description of Artificial Sequence: Synthetic oligonucleotide
  Antisense strand to SEQ ID NO: 1788689
uagagacaaagacucccua

SEQ ID NO: 1788691 - RNA, 19 nt, Artificial Sequence
  Description of Artificial Sequence: Synthetic oligonucleotide
  Sense strand starting at position 2805 of SEQ ID NO: 1563010
gggagucuuugucucuaua

SEQ ID NO: 1788692 - RNA, 19 nt, Artificial Sequence
  Description of Artificial Sequence: Synthetic oligonucleotide
  Antisense strand to SEQ ID NO: 1788691
uauagagacaaagacuccc

SEQ ID NO: 1788693 - RNA, 19 nt, Artificial Sequence
  Description of Artificial Sequence: Synthetic oligonucleotide
  Sense strand starting at position 2894 of SEQ ID NO: 1563010
cugugacugggaggucaaa

SEQ ID NO: 1788694 - RNA, 19 nt, Artificial Sequence
  Description of Artificial Sequence: Synthetic oligonucleotide
  Antisense strand to SEQ ID NO: 1788693
uuugaccucccagucacag

SEQ ID NO: 1788695 - RNA, 19 nt, Artificial Sequence
  Description of Artificial Sequence: Synthetic oligonucleotide
  Sense strand starting at position 3214 of SEQ ID NO: 1563010
agaaguauguacccacuaa

SEQ ID NO: 1788696 - RNA, 19 nt, Artificial Sequence
  Description of Artificial Sequence: Synthetic oligonucleotide
  Antisense strand to SEQ ID NO: 1788695
uuaguggguacauacuucu

SEQ ID NO: 1788697 - RNA, 19 nt, Artificial Sequence
  Description of Artificial Sequence: Synthetic oligonucleotide
  Sense strand starting at position 3552 of SEQ ID NO: 1563010
gugcaaggaucuguuugaa

SEQ ID NO: 1788698 - RNA, 19 nt, Artificial Sequence
  Description of Artificial Sequence: Synthetic oligonucleotide
  Antisense strand to SEQ ID NO: 1788697
uucaaacagauccuugcac

SEQ ID NO: 1788699 - RNA, 19 nt, Artificial Sequence
  Description of Artificial Sequence: Synthetic oligonucleotide
  Sense strand starting at position 3590 of SEQ ID NO: 1563010
ugagucuauauguagaagu

SEQ ID NO: 1788700 - RNA, 19 nt, Artificial Sequence
  Description of Artificial Sequence: Synthetic oligonucleotide
  Antisense strand to SEQ ID NO: 1788699
acuucuacauauagacuca

SEQ ID NO: 1788701 - RNA, 19 nt, Artificial Sequence
  Description of Artificial Sequence: Synthetic oligonucleotide
  Sense strand starting at position 3606 of SEQ ID NO: 1563010
aguggaauugcaugugaua

SEQ ID NO: 1788702 - RNA, 19 nt, Artificial Sequence
  Description of Artificial Sequence: Synthetic oligonucleotide
  Antisense strand to SEQ ID NO: 1788701
uaucacaugcaauuccacu

SEQ ID NO: 1788703 - RNA, 19 nt, Artificial Sequence
  Description of Artificial Sequence: Synthetic oligonucleotide
  Sense strand starting at position 3608 of SEQ ID NO: 1563010
uggaauugcaugugauaau

SEQ ID NO: 1788704 - RNA, 19 nt, Artificial Sequence
  Description of Artificial Sequence: Synthetic oligonucleotide
  Antisense strand to SEQ ID NO: 1788703
auuaucacaugcaauucca

SEQ ID NO: 1788705 - RNA, 19 nt, Artificial Sequence
  Description of Artificial Sequence: Synthetic oligonucleotide
  Sense strand starting at position 3772 of SEQ ID NO: 1563010
guagguaucaaguggguau

SEQ ID NO: 1788706 - RNA, 19 nt, Artificial Sequence
  Description of Artificial Sequence: Synthetic oligonucleotide
  Antisense strand to SEQ ID NO: 1788705
auacccacuugauaccuac

SEQ ID NO: 1788707 - RNA, 19 nt, Artificial Sequence
  Description of Artificial Sequence: Synthetic oligonucleotide
  Sense strand starting at position 3776 of SEQ ID NO: 1563010
guaucaaguggguaucaca

SEQ ID NO: 1788708 - RNA, 19 nt, Artificial Sequence
  Description of Artificial Sequence: Synthetic oligonucleotide
  Antisense strand to SEQ ID NO: 1788707
ugugauacccacuugauac

SEQ ID NO: 1788709 - RNA, 19 nt, Artificial Sequence
  Description of Artificial Sequence: Synthetic oligonucleotide
  Sense strand starting at position 3784 of SEQ ID NO: 1563010
uggguaucacaauauaguu

SEQ ID NO: 1788710 - RNA, 19 nt, Artificial Sequence
  Description of Artificial Sequence: Synthetic oligonucleotide
  Antisense strand to SEQ ID NO: 1788709
aacuauauugugauaccca

SEQ ID NO: 1788711 - RNA, 19 nt, Artificial Sequence
  Description of Artificial Sequence: Synthetic oligonucleotide
  Sense strand starting at position 3864 of SEQ ID NO: 1563010
uugugcaucuucuuggaga

SEQ ID NO: 1788712 - RNA, 19 nt, Artificial Sequence
  Description of Artificial Sequence: Synthetic oligonucleotide
  Antisense strand to SEQ ID NO: 1788711
ucuccaagaagaugcacaa

SEQ ID NO: 1788713 - RNA, 19 nt, Artificial Sequence
  Description of Artificial Sequence: Synthetic oligonucleotide
  Sense strand starting at position 3966 of SEQ ID NO: 1563010
uuggcaguguacccagaau

SEQ ID NO: 1788714 - RNA, 19 nt, Artificial Sequence
  Description of Artificial Sequence: Synthetic oligonucleotide
  Antisense strand to SEQ ID NO: 1788713
auucuggguacacugccaa

SEQ ID NO: 1788715 - RNA, 19 nt, Artificial Sequence
  Description of Artificial Sequence: Synthetic oligonucleotide
  Sense strand starting at position 3978 of SEQ ID NO: 1563010
ccagaauagccuuauguug

SEQ ID NO: 1788716 - RNA, 19 nt, Artificial Sequence
  Description of Artificial Sequence: Synthetic oligonucleotide
  Antisense strand to SEQ ID NO: 1788715
caacauaaggcuauucugg

SEQ ID NO: 1788717 - RNA, 19 nt, Artificial Sequence
  Description of Artificial Sequence: Synthetic oligonucleotide
  Sense strand starting at position 18 of SEQ ID NO: 1563011
agucccucugccuaggaaa

SEQ ID NO: 1788718 - RNA, 19 nt, Artificial Sequence
  Description of Artificial Sequence: Synthetic oligonucleotide
  Antisense strand to SEQ ID NO: 1788717
uuuccuaggcagagggacu

SEQ ID NO: 1788719 - RNA, 19 nt, Artificial Sequence
  Description of Artificial Sequence: Synthetic oligonucleotide
  Sense strand starting at position 20 of SEQ ID NO: 1563011
ucccucugccuaggaaaua

SEQ ID NO: 1788720 - RNA, 19 nt, Artificial Sequence
  Description of Artificial Sequence: Synthetic oligonucleotide
  Antisense strand to SEQ ID NO: 1788719
uauuuccuaggcagaggga

SEQ ID NO: 1788721 - RNA, 19 nt, Artificial Sequence
  Description of Artificial Sequence: Synthetic oligonucleotide
  Sense strand starting at position 61 of SEQ ID NO: 1563011
cuaauaugcuauggaccau

SEQ ID NO: 1788722 - RNA, 19 nt, Artificial Sequence
  Description of Artificial Sequence: Synthetic oligonucleotide
  Antisense strand to SEQ ID NO: 1788721
augguccauagcauauuag

SEQ ID NO: 1788723 - RNA, 19 nt, Artificial Sequence
  Description of Artificial Sequence: Synthetic oligonucleotide
  Sense strand starting at position 86 of SEQ ID NO: 1563011
ggcggucccuuccaaaguu

SEQ ID NO: 1788724 - RNA, 19 nt, Artificial Sequence
  Description of Artificial Sequence: Synthetic oligonucleotide
  Antisense strand to SEQ ID NO: 1788723
aacuuuggaagggaccgcc

SEQ ID NO: 1788725 - RNA, 19 nt, Artificial Sequence
  Description of Artificial Sequence: Synthetic oligonucleotide
  Sense strand starting at position 94 of SEQ ID NO: 1563011
cuuccaaaguuucugaaga

SEQ ID NO: 1788726 - RNA, 19 nt, Artificial Sequence
  Description of Artificial Sequence: Synthetic oligonucleotide
  Antisense strand to SEQ ID NO: 1788725
ucuucagaaacuuuggaag

SEQ ID NO: 1788727 - RNA, 19 nt, Artificial Sequence
  Description of Artificial Sequence: Synthetic oligonucleotide
  Sense strand starting at position 96 of SEQ ID NO: 1563011
uccaaaguuucugaagaaa

SEQ ID NO: 1788728 - RNA, 19 nt, Artificial Sequence
  Description of Artificial Sequence: Synthetic oligonucleotide
  Antisense strand to SEQ ID NO: 1788727
uuucuucagaaacuuugga

SEQ ID NO: 1788729 - RNA, 19 nt, Artificial Sequence
  Description of Artificial Sequence: Synthetic oligonucleotide
  Sense strand starting at position 205 of SEQ ID NO: 1563011
ccaagaaucugaggacaag

SEQ ID NO: 1788730 - RNA, 19 nt, Artificial Sequence
  Description of Artificial Sequence: Synthetic oligonucleotide
  Antisense strand to SEQ ID NO: 1788729
cuuguccucagauucuugg

SEQ ID NO: 1788731 - RNA, 19 nt, Artificial Sequence
  Description of Artificial Sequence: Synthetic oligonucleotide
  Sense strand starting at position 258 of SEQ ID NO: 1563011
ggaagagucucucaccgca

SEQ ID NO: 1788732 - RNA, 19 nt, Artificial Sequence
  Description of Artificial Sequence: Synthetic oligonucleotide
  Antisense strand to SEQ ID NO: 1788731
ugcggugagagacucuucc

SEQ ID NO: 1788733 - RNA, 19 nt, Artificial Sequence
  Description of Artificial Sequence: Synthetic oligonucleotide
  Sense strand starting at position 656 of SEQ ID NO: 1563011
gccgagaaggugugauuga

SEQ ID NO: 1788734 - RNA, 19 nt, Artificial Sequence
  Description of Artificial Sequence: Synthetic oligonucleotide
  Antisense strand to SEQ ID NO: 1788733
ucaaucacaccuucucggc

SEQ ID NO: 1788735 - RNA, 19 nt, Artificial Sequence
  Description of Artificial Sequence: Synthetic oligonucleotide
  Sense strand starting at position 783 of SEQ ID NO: 1563011
ccacgugggucucagugaa

SEQ ID NO: 1788736 - RNA, 19 nt, Artificial Sequence
  Description of Artificial Sequence: Synthetic oligonucleotide
  Antisense strand to SEQ ID NO: 1788735
uucacugagacccacgugg

SEQ ID NO: 1788737 - RNA, 19 nt, Artificial Sequence
  Description of Artificial Sequence: Synthetic oligonucleotide
  Sense strand starting at position 807 of SEQ ID NO: 1563011
ggaugcuguggcugaacau

SEQ ID NO: 1788738 - RNA, 19 nt, Artificial Sequence
  Description of Artificial Sequence: Synthetic oligonucleotide
  Antisense strand to SEQ ID NO: 1788737
auguucagccacagcaucc

SEQ ID NO: 1788739 - RNA, 19 nt, Artificial Sequence
  Description of Artificial Sequence: Synthetic oligonucleotide
  Sense strand starting at position 808 of SEQ ID NO: 1563011
gaugcuguggcugaacaua

SEQ ID NO: 1788740 - RNA, 19 nt, Artificial Sequence
  Description of Artificial Sequence: Synthetic oligonucleotide
  Antisense strand to SEQ ID NO: 1788739
uauguucagccacagcauc

SEQ ID NO: 1788741 - RNA, 19 nt, Artificial Sequence
  Description of Artificial Sequence: Synthetic oligonucleotide
  Sense strand starting at position 870 of SEQ ID NO: 1563011
cgaugauguauucgaggag

SEQ ID NO: 1788742 - RNA, 19 nt, Artificial Sequence
  Description of Artificial Sequence: Synthetic oligonucleotide
  Antisense strand to SEQ ID NO: 1788741
cuccucgaauacaucaucg

SEQ ID NO: 1788743 - RNA, 19 nt, Artificial Sequence
  Description of Artificial Sequence: Synthetic oligonucleotide
  Sense strand starting at position 871 of SEQ ID NO: 1563011
gaugauguauucgaggaga

SEQ ID NO: 1788744 - RNA, 19 nt, Artificial Sequence
  Description of Artificial Sequence: Synthetic oligonucleotide
  Antisense strand to SEQ ID NO: 1788743
ucuccucgaauacaucauc

SEQ ID NO: 1788745 - RNA, 19 nt, Artificial Sequence
  Description of Artificial Sequence: Synthetic oligonucleotide
  Sense strand starting at position 873 of SEQ ID NO: 1563011
ugauguauucgaggagaac

SEQ ID NO: 1788746 - RNA, 19 nt, Artificial Sequence
  Description of Artificial Sequence: Synthetic oligonucleotide
  Antisense strand to SEQ ID NO: 1788745
guucuccucgaauacauca

SEQ ID NO: 1788747 - RNA, 19 nt, Artificial Sequence
  Description of Artificial Sequence: Synthetic oligonucleotide
  Sense strand starting at position 1152 of SEQ ID NO: 1563011
gccgcagugacgucuccau

SEQ ID NO: 1788748 - RNA, 19 nt, Artificial Sequence
  Description of Artificial Sequence: Synthetic oligonucleotide
  Antisense strand to SEQ ID NO: 1788747
auggagacgucacugcggc

SEQ ID NO: 1788749 - RNA, 19 nt, Artificial Sequence
  Description of Artificial Sequence: Synthetic oligonucleotide
  Sense strand starting at position 2384 of SEQ ID NO: 1563011
ggcacagugaguuagauga

SEQ ID NO: 1788750 - RNA, 19 nt, Artificial Sequence
  Description of Artificial Sequence: Synthetic oligonucleotide
  Antisense strand to SEQ ID NO: 1788749
ucaucuaacucacugugcc

SEQ ID NO: 1788751 - RNA, 19 nt, Artificial Sequence
  Description of Artificial Sequence: Synthetic oligonucleotide
  Sense strand starting at position 2388 of SEQ ID NO: 1563011
cagugaguuagaugaagac

SEQ ID NO: 1788752 - RNA, 19 nt, Artificial Sequence
  Description of Artificial Sequence: Synthetic oligonucleotide
  Antisense strand to SEQ ID NO: 1788751
gucuucaucuaacucacug

SEQ ID NO: 1788753 - RNA, 19 nt, Artificial Sequence
  Description of Artificial Sequence: Synthetic oligonucleotide
  Sense strand starting at position 2402 of SEQ ID NO: 1563011
aagacaugggucuggcaga

SEQ ID NO: 1788754 - RNA, 19 nt, Artificial Sequence
  Description of Artificial Sequence: Synthetic oligonucleotide
  Antisense strand to SEQ ID NO: 1788753
ucugccagacccaugucuu

SEQ ID NO: 1788755 - RNA, 19 nt, Artificial Sequence
  Description of Artificial Sequence: Synthetic oligonucleotide
  Sense strand starting at position 2476 of SEQ ID NO: 1563011
uugagagaguucugcgaau

SEQ ID NO: 1788756 - RNA, 19 nt, Artificial Sequence
  Description of Artificial Sequence: Synthetic oligonucleotide
  Antisense strand to SEQ ID NO: 1788755
auucgcagaacucucucaa

SEQ ID NO: 1788757 - RNA, 19 nt, Artificial Sequence
  Description of Artificial Sequence: Synthetic oligonucleotide
  Sense strand starting at position 2478 of SEQ ID NO: 1563011
gagagaguucugcgaauug

SEQ ID NO: 1788758 - RNA, 19 nt, Artificial Sequence
  Description of Artificial Sequence: Synthetic oligonucleotide
  Antisense strand to SEQ ID NO: 1788757
caauucgcagaacucucuc

SEQ ID NO: 1788759 - RNA, 19 nt, Artificial Sequence
  Description of Artificial Sequence: Synthetic oligonucleotide
  Sense strand starting at position 2688 of SEQ ID NO: 1563011
uuguguuuaucagcgacag

SEQ ID NO: 1788760 - RNA, 19 nt, Artificial Sequence
  Description of Artificial Sequence: Synthetic oligonucleotide
  Antisense strand to SEQ ID NO: 1788759
cugucgcugauaaacacaa

SEQ ID NO: 1788761 - RNA, 19 nt, Artificial Sequence
  Description of Artificial Sequence: Synthetic oligonucleotide
  Sense strand starting at position 2754 of SEQ ID NO: 1563011
gcagcuaugcaacaauaca

SEQ ID NO: 1788762 - RNA, 19 nt, Artificial Sequence
  Description of Artificial Sequence: Synthetic oligonucleotide
  Antisense strand to SEQ ID NO: 1788761
uguauuguugcauagcugc

SEQ ID NO: 1788763 - RNA, 19 nt, Artificial Sequence
  Description of Artificial Sequence: Synthetic oligonucleotide
  Sense strand starting at position 2898 of SEQ ID NO: 1563011
cccagaacgcuauacuaga

SEQ ID NO: 1788764 - RNA, 19 nt, Artificial Sequence
  Description of Artificial Sequence: Synthetic oligonucleotide
  Antisense strand to SEQ ID NO: 1788763
ucuaguauagcguucuggg

SEQ ID NO: 1788765 - RNA, 19 nt, Artificial Sequence
  Description of Artificial Sequence: Synthetic oligonucleotide
  Sense strand starting at position 2930 of SEQ ID NO: 1563011
uuacaugugguuuguggaa

SEQ ID NO: 1788766 - RNA, 19 nt, Artificial Sequence
  Description of Artificial Sequence: Synthetic oligonucleotide
  Antisense strand to SEQ ID NO: 1788765
uuccacaaaccacauguaa

SEQ ID NO: 1788767 - RNA, 19 nt, Artificial Sequence
  Description of Artificial Sequence: Synthetic oligonucleotide
  Sense strand starting at position 2935 of SEQ ID NO: 1563011
ugugguuuguggaauggaa

SEQ ID NO: 1788768 - RNA, 19 nt, Artificial Sequence
  Description of Artificial Sequence: Synthetic oligonucleotide
  Antisense strand to SEQ ID NO: 1788767
uuccauuccacaaaccaca

SEQ ID NO: 1788769 - RNA, 19 nt, Artificial Sequence
  Description of Artificial Sequence: Synthetic oligonucleotide
  Sense strand starting at position 2980 of SEQ ID NO: 1563011
gccuauugggcuggugaca

SEQ ID NO: 1788770 - RNA, 19 nt, Artificial Sequence
  Description of Artificial Sequence: Synthetic oligonucleotide
  Antisense strand to SEQ ID NO: 1788769
ugucaccagcccaauaggc

SEQ ID NO: 1788771 - RNA, 19 nt, Artificial Sequence
  Description of Artificial Sequence: Synthetic oligonucleotide
  Sense strand starting at position 3080 of SEQ ID NO: 1563011
cugguauugucuugaggaa

SEQ ID NO: 1788772 - RNA, 19 nt, Artificial Sequence
  Description of Artificial Sequence: Synthetic oligonucleotide
  Antisense strand to SEQ ID NO: 1788771
uuccucaagacaauaccag

SEQ ID NO: 1788773 - RNA, 19 nt, Artificial Sequence
  Description of Artificial Sequence: Synthetic oligonucleotide
  Sense strand starting at position 3081 of SEQ ID NO: 1563011
ugguauugucuugaggaac

SEQ ID NO: 1788774 - RNA, 19 nt, Artificial Sequence
  Description of Artificial Sequence: Synthetic oligonucleotide
  Antisense strand to SEQ ID NO: 1788773
guuccucaagacaauacca

SEQ ID NO: 1788775 - RNA, 19 nt, Artificial Sequence
  Description of Artificial Sequence: Synthetic oligonucleotide
  Sense strand starting at position 3166 of SEQ ID NO: 1563011
agacgucccuuguccugaa

SEQ ID NO: 1788776 - RNA, 19 nt, Artificial Sequence
  Description of Artificial Sequence: Synthetic oligonucleotide
  Antisense strand to SEQ ID NO: 1788775
uucaggacaagggacgucu

SEQ ID NO: 1788777 - RNA, 19 nt, Artificial Sequence
  Description of Artificial Sequence: Synthetic oligonucleotide
  Sense strand starting at position 3167 of SEQ ID NO: 1563011
gacgucccuuguccugaaa

SEQ ID NO: 1788778 - RNA, 19 nt, Artificial Sequence
  Description of Artificial Sequence: Synthetic oligonucleotide
  Antisense strand to SEQ ID NO: 1788777
uuucaggacaagggacguc

SEQ ID NO: 1788779 - RNA, 19 nt, Artificial Sequence
  Description of Artificial Sequence: Synthetic oligonucleotide
  Sense strand starting at position 3170 of SEQ ID NO: 1563011
gucccuuguccugaaaugu

SEQ ID NO: 1788780 - RNA, 19 nt, Artificial Sequence
  Description of Artificial Sequence: Synthetic oligonucleotide
  Antisense strand to SEQ ID NO: 1788779
acauuucaggacaagggac

SEQ ID NO: 1788781 - RNA, 19 nt, Artificial Sequence
  Description of Artificial Sequence: Synthetic oligonucleotide
  Sense strand starting at position 3270 of SEQ ID NO: 1563011
gccuuauugcuggugucca

SEQ ID NO: 1788782 - RNA, 19 nt, Artificial Sequence
  Description of Artificial Sequence: Synthetic oligonucleotide
  Antisense strand to SEQ ID NO: 1788781
uggacaccagcaauaaggc

SEQ ID NO: 1788783 - RNA, 19 nt, Artificial Sequence
  Description of Artificial Sequence: Synthetic oligonucleotide
  Sense strand starting at position 3366 of SEQ ID NO: 1563011
acggauaugugagacuaag

SEQ ID NO: 1788784 - RNA, 19 nt, Artificial Sequence
  Description of Artificial Sequence: Synthetic oligonucleotide
  Antisense strand to SEQ ID NO: 1788783
cuuagucucacauauccgu

SEQ ID NO: 1788785 - RNA, 19 nt, Artificial Sequence
  Description of Artificial Sequence: Synthetic oligonucleotide
  Sense strand starting at position 3394 of SEQ ID NO: 1563011
ugcaguaaauuguacauuu

SEQ ID NO: 1788786 - RNA, 19 nt, Artificial Sequence
  Description of Artificial Sequence: Synthetic oligonucleotide
  Antisense strand to SEQ ID NO: 1788785
aaauguacaauuuacugca

SEQ ID NO: 1788787 - RNA, 19 nt, Artificial Sequence
  Description of Artificial Sequence: Synthetic oligonucleotide
  Sense strand starting at position 3402 of SEQ ID NO: 1563011
auuguacauuuccagagau

SEQ ID NO: 1788788 - RNA, 19 nt, Artificial Sequence
  Description of Artificial Sequence: Synthetic oligonucleotide
  Antisense strand to SEQ ID NO: 1788787
aucucuggaaauguacaau

SEQ ID NO: 1788789 - RNA, 19 nt, Artificial Sequence
  Description of Artificial Sequence: Synthetic oligonucleotide
  Sense strand starting at position 3427 of SEQ ID NO: 1563011
cucacuacugagugagaca

SEQ ID NO: 1788790 - RNA, 19 nt, Artificial Sequence
  Description of Artificial Sequence: Synthetic oligonucleotide
  Antisense strand to SEQ ID NO: 1788789
ugucucacucaguagugag

SEQ ID NO: 1788791 - RNA, 19 nt, Artificial Sequence
  Description of Artificial Sequence: Synthetic oligonucleotide
  Sense strand starting at position 3465 of SEQ ID NO: 1563011
cagugaugcagugaagaca

SEQ ID NO: 1788792 - RNA, 19 nt, Artificial Sequence
  Description of Artificial Sequence: Synthetic oligonucleotide
  Antisense strand to SEQ ID NO: 1788791
ugucuucacugcaucacug

SEQ ID NO: 1788793 - RNA, 19 nt, Artificial Sequence
  Description of Artificial Sequence: Synthetic oligonucleotide
  Sense strand starting at position 3525 of SEQ ID NO: 1563011
ccaggauuacccugacacu

SEQ ID NO: 1788794 - RNA, 19 nt, Artificial Sequence
  Description of Artificial Sequence: Synthetic oligonucleotide
  Antisense strand to SEQ ID NO: 1788793
agugucaggguaauccugg

SEQ ID NO: 1788795 - RNA, 19 nt, Artificial Sequence
  Description of Artificial Sequence: Synthetic oligonucleotide
  Sense strand starting at position 3528 of SEQ ID NO: 1563011
ggauuacccugacacuaaa

SEQ ID NO: 1788796 - RNA, 19 nt, Artificial Sequence
  Description of Artificial Sequence: Synthetic oligonucleotide
  Antisense strand to SEQ ID NO: 1788795
uuuagugucaggguaaucc

SEQ ID NO: 1788797 - RNA, 19 nt, Artificial Sequence
  Description of Artificial Sequence: Synthetic oligonucleotide
  Sense strand starting at position 81 of SEQ ID NO: 1563012
agucaaaccucguccagaa

SEQ ID NO: 1788798 - RNA, 19 nt, Artificial Sequence
  Description of Artificial Sequence: Synthetic oligonucleotide
  Antisense strand to SEQ ID NO: 1788797
uucuggacgagguuugacu

SEQ ID NO: 1788799 - RNA, 19 nt, Artificial Sequence
  Description of Artificial Sequence: Synthetic oligonucleotide
  Sense strand starting at position 150 of SEQ ID NO: 1563012
uagucucauccaugggacu

SEQ ID NO: 1788800 - RNA, 19 nt, Artificial Sequence
  Description of Artificial Sequence: Synthetic oligonucleotide
  Antisense strand to SEQ ID NO: 1788799
agucccauggaugagacua

SEQ ID NO: 1788801 - RNA, 19 nt, Artificial Sequence
  Description of Artificial Sequence: Synthetic oligonucleotide
  Sense strand starting at position 165 of SEQ ID NO: 1563012
gacucagugugaccaucuu

SEQ ID NO: 1788802 - RNA, 19 nt, Artificial Sequence
  Description of Artificial Sequence: Synthetic oligonucleotide
  Antisense strand to SEQ ID NO: 1788801
aagauggucacacugaguc

SEQ ID NO: 1788803 - RNA, 19 nt, Artificial Sequence
  Description of Artificial Sequence: Synthetic oligonucleotide
  Sense strand starting at position 198 of SEQ ID NO: 1563012
ucaugcuaugcucaauugu

SEQ ID NO: 1788804 - RNA, 19 nt, Artificial Sequence
  Description of Artificial Sequence: Synthetic oligonucleotide
  Antisense strand to SEQ ID NO: 1788803
acaauugagcauagcauga

SEQ ID NO: 1788805 - RNA, 19 nt, Artificial Sequence
  Description of Artificial Sequence: Synthetic oligonucleotide
  Sense strand starting at position 558 of SEQ ID NO: 1563012
gcuggaauaugauacuaaa

SEQ ID NO: 1788806 - RNA, 19 nt, Artificial Sequence
  Description of Artificial Sequence: Synthetic oligonucleotide
  Antisense strand to SEQ ID NO: 1788805
uuuaguaucauauuccagc

SEQ ID NO: 1788807 - RNA, 19 nt, Artificial Sequence
  Description of Artificial Sequence: Synthetic oligonucleotide
  Sense strand starting at position 616 of SEQ ID NO: 1563012
agcuuuaauucuccaggau

SEQ ID NO: 1788808 - RNA, 19 nt, Artificial Sequence
  Description of Artificial Sequence: Synthetic oligonucleotide
  Antisense strand to SEQ ID NO: 1788807
auccuggagaauuaaagcu

SEQ ID NO: 1788809 - RNA, 19 nt, Artificial Sequence
  Description of Artificial Sequence: Synthetic oligonucleotide
  Sense strand starting at position 617 of SEQ ID NO: 1563012
gcuuuaauucuccaggauu

SEQ ID NO: 1788810 - RNA, 19 nt, Artificial Sequence
  Description of Artificial Sequence: Synthetic oligonucleotide
  Antisense strand to SEQ ID NO: 1788809
aauccuggagaauuaaagc

SEQ ID NO: 1788811 - RNA, 19 nt, Artificial Sequence
  Description of Artificial Sequence: Synthetic oligonucleotide
  Sense strand starting at position 656 of SEQ ID NO: 1563012
agauucuacugcuugacau

SEQ ID NO: 1788812 - RNA, 19 nt, Artificial Sequence
  Description of Artificial Sequence: Synthetic oligonucleotide
  Antisense strand to SEQ ID NO: 1788811
augucaagcaguagaaucu

SEQ ID NO: 1788813 - RNA, 19 nt, Artificial Sequence
  Description of Artificial Sequence: Synthetic oligonucleotide
  Sense strand starting at position 666 of SEQ ID NO: 1563012
gcuugacauuuguacaucu

SEQ ID NO: 1788814 - RNA, 19 nt, Artificial Sequence
  Description of Artificial Sequence: Synthetic oligonucleotide
  Antisense strand to SEQ ID NO: 1788813
agauguacaaaugucaagc

SEQ ID NO: 1788815 - RNA, 19 nt, Artificial Sequence
  Description of Artificial Sequence: Synthetic oligonucleotide
  Sense strand starting at position 752 of SEQ ID NO: 1563012
aaaggcuaguuugagacaa

SEQ ID NO: 1788816 - RNA, 19 nt, Artificial Sequence
  Description of Artificial Sequence: Synthetic oligonucleotide
  Antisense strand to SEQ ID NO: 1788815
uugucucaaacuagccuuu

SEQ ID NO: 1788817 - RNA, 19 nt, Artificial Sequence
  Description of Artificial Sequence: Synthetic oligonucleotide
  Sense strand starting at position 930 of SEQ ID NO: 1563012
cuaauagacuuggaacaaa

SEQ ID NO: 1788818 - RNA, 19 nt, Artificial Sequence
  Description of Artificial Sequence: Synthetic oligonucleotide
  Antisense strand to SEQ ID NO: 1788817
uuuguuccaagucuauuag

SEQ ID NO: 1788819 - RNA, 19 nt, Artificial Sequence
  Description of Artificial Sequence: Synthetic oligonucleotide
  Sense strand starting at position 978 of SEQ ID NO: 1563012
ugaagucagucauccaguu

SEQ ID NO: 1788820 - RNA, 19 nt, Artificial Sequence
  Description of Artificial Sequence: Synthetic oligonucleotide
  Antisense strand to SEQ ID NO: 1788819
aacuggaugacugacuuca

SEQ ID NO: 1788821 - RNA, 19 nt, Artificial Sequence
  Description of Artificial Sequence: Synthetic oligonucleotide
  Sense strand starting at position 1028 of SEQ ID NO: 1563012
gguuaaacauccuuaggcu

SEQ ID NO: 1788822 - RNA, 19 nt, Artificial Sequence
  Description of Artificial Sequence: Synthetic oligonucleotide
  Antisense strand to SEQ ID NO: 1788821
agccuaaggauguuuaacc

SEQ ID NO: 1788823 - RNA, 19 nt, Artificial Sequence
  Description of Artificial Sequence: Synthetic oligonucleotide
  Sense strand starting at position 1079 of SEQ ID NO: 1563012
agauauggaaagugucaau

SEQ ID NO: 1788824 - RNA, 19 nt, Artificial Sequence
  Description of Artificial Sequence: Synthetic oligonucleotide
  Antisense strand to SEQ ID NO: 1788823
auugacacuuuccauaucu

SEQ ID NO: 1788825 - RNA, 19 nt, Artificial Sequence
  Description of Artificial Sequence: Synthetic oligonucleotide
  Sense strand starting at position 1184 of SEQ ID NO: 1563012
ccgguaaacaaaggucaaa

SEQ ID NO: 1788826 - RNA, 19 nt, Artificial Sequence
  Description of Artificial Sequence: Synthetic oligonucleotide
  Antisense strand to SEQ ID NO: 1788825
uuugaccuuuguuuaccgg

SEQ ID NO: 1788827 - RNA, 19 nt, Artificial Sequence
  Description of Artificial Sequence: Synthetic oligonucleotide
  Sense strand starting at position 1281 of SEQ ID NO: 1563012
auuugagguucccacaagu

SEQ ID NO: 1788828 - RNA, 19 nt, Artificial Sequence
  Description of Artificial Sequence: Synthetic oligonucleotide
  Antisense strand to SEQ ID NO: 1788827
acuugugggaaccucaaau

SEQ ID NO: 1788829 - RNA, 19 nt, Artificial Sequence
  Description of Artificial Sequence: Synthetic oligonucleotide
  Sense strand starting at position 1320 of SEQ ID NO: 1563012
acgugaaauuuacgacauc

SEQ ID NO: 1788830 - RNA, 19 nt, Artificial Sequence
  Description of Artificial Sequence: Synthetic oligonucleotide
  Antisense strand to SEQ ID NO: 1788829
gaugucguaaauuucacgu

SEQ ID NO: 1788831 - RNA, 19 nt, Artificial Sequence
  Description of Artificial Sequence: Synthetic oligonucleotide
  Sense strand starting at position 1321 of SEQ ID NO: 1563012
cgugaaauuuacgacaucu

SEQ ID NO: 1788832 - RNA, 19 nt, Artificial Sequence
  Description of Artificial Sequence: Synthetic oligonucleotide
  Antisense strand to SEQ ID NO: 1788831
agaugucguaaauuucacg

SEQ ID NO: 1788833 - RNA, 19 nt, Artificial Sequence
  Description of Artificial Sequence: Synthetic oligonucleotide
  Sense strand starting at position 1400 of SEQ ID NO: 1563012
cguuucuuugcgucugacu

SEQ ID NO: 1788834 - RNA, 19 nt, Artificial Sequence
  Description of Artificial Sequence: Synthetic oligonucleotide
  Antisense strand to SEQ ID NO: 1788833
agucagacgcaaagaaacg

SEQ ID NO: 1788835 - RNA, 19 nt, Artificial Sequence
  Description of Artificial Sequence: Synthetic oligonucleotide
  Sense strand starting at position 1405 of SEQ ID NO: 1563012
cuuugcgucugacuggaaa

SEQ ID NO: 1788836 - RNA, 19 nt, Artificial Sequence
  Description of Artificial Sequence: Synthetic oligonucleotide
  Antisense strand to SEQ ID NO: 1788835
uuuccagucagacgcaaag

SEQ ID NO: 1788837 - RNA, 19 nt, Artificial Sequence
  Description of Artificial Sequence: Synthetic oligonucleotide
  Sense strand starting at position 1486 of SEQ ID NO: 1563012
ggcggaccucggcgaaaua

SEQ ID NO: 1788838 - RNA, 19 nt, Artificial Sequence
  Description of Artificial Sequence: Synthetic oligonucleotide
  Antisense strand to SEQ ID NO: 1788837
uauuucgccgagguccgcc

SEQ ID NO: 1788839 - RNA, 19 nt, Artificial Sequence
  Description of Artificial Sequence: Synthetic oligonucleotide
  Sense strand starting at position 1487 of SEQ ID NO: 1563012
gcggaccucggcgaaauaa

SEQ ID NO: 1788840 - RNA, 19 nt, Artificial Sequence
  Description of Artificial Sequence: Synthetic oligonucleotide
  Antisense strand to SEQ ID NO: 1788839
uuauuucgccgagguccgc

SEQ ID NO: 1788841 - RNA, 19 nt, Artificial Sequence
  Description of Artificial Sequence: Synthetic oligonucleotide
  Sense strand starting at position 1495 of SEQ ID NO: 1563012
cggcgaaauaaguaaggaa

SEQ ID NO: 1788842 - RNA, 19 nt, Artificial Sequence
  Description of Artificial Sequence: Synthetic oligonucleotide
  Antisense strand to SEQ ID NO: 1788841
uuccuuacuuauuucgccg

SEQ ID NO: 1788843 - RNA, 19 nt, Artificial Sequence
  Description of Artificial Sequence: Synthetic oligonucleotide
  Sense strand starting at position 1498 of SEQ ID NO: 1563012
cgaaauaaguaaggaaauc

SEQ ID NO: 1788844 - RNA, 19 nt, Artificial Sequence
  Description of Artificial Sequence: Synthetic oligonucleotide
  Antisense strand to SEQ ID NO: 1788843
gauuuccuuacuuauuucg

SEQ ID NO: 1788845 - RNA, 19 nt, Artificial Sequence
  Description of Artificial Sequence: Synthetic oligonucleotide
  Sense strand starting at position 1508 of SEQ ID NO: 1563012
aaggaaaucccaggucgau

SEQ ID NO: 1788846 - RNA, 19 nt, Artificial Sequence
  Description of Artificial Sequence: Synthetic oligonucleotide
  Antisense strand to SEQ ID NO: 1788845
aucgaccugggauuuccuu

SEQ ID NO: 1788847 - RNA, 19 nt, Artificial Sequence
  Description of Artificial Sequence: Synthetic oligonucleotide
  Sense strand starting at position 2119 of SEQ ID NO: 1563012
aggacuucucacggacaaa

SEQ ID NO: 1788848 - RNA, 19 nt, Artificial Sequence
  Description of Artificial Sequence: Synthetic oligonucleotide
  Antisense strand to SEQ ID NO: 1788847
uuuguccgugagaaguccu

SEQ ID NO: 1788849 - RNA, 19 nt, Artificial Sequence
  Description of Artificial Sequence: Synthetic oligonucleotide
  Sense strand starting at position 2220 of SEQ ID NO: 1563012
cgaagugaggccugaagga

SEQ ID NO: 1788850 - RNA, 19 nt, Artificial Sequence
  Description of Artificial Sequence: Synthetic oligonucleotide
  Antisense strand to SEQ ID NO: 1788849
uccuucaggccucacuucg

SEQ ID NO: 1788851 - RNA, 19 nt, Artificial Sequence
  Description of Artificial Sequence: Synthetic oligonucleotide
  Sense strand starting at position 2424 of SEQ ID NO: 1563012
gcggaugaggcuuggcaau

SEQ ID NO: 1788852 - RNA, 19 nt, Artificial Sequence
  Description of Artificial Sequence: Synthetic oligonucleotide
  Antisense strand to SEQ ID NO: 1788851
auugccaagccucauccgc

SEQ ID NO: 1788853 - RNA, 19 nt, Artificial Sequence
  Description of Artificial Sequence: Synthetic oligonucleotide
  Sense strand starting at position 2426 of SEQ ID NO: 1563012
ggaugaggcuuggcaaugu

SEQ ID NO: 1788854 - RNA, 19 nt, Artificial Sequence
  Description of Artificial Sequence: Synthetic oligonucleotide
  Antisense strand to SEQ ID NO: 1788853
acauugccaagccucaucc

SEQ ID NO: 1788855 - RNA, 19 nt, Artificial Sequence
  Description of Artificial Sequence: Synthetic oligonucleotide
  Sense strand starting at position 2628 of SEQ ID NO: 1563012
uagugaaacuaaugaaagu

SEQ ID NO: 1788856 - RNA, 19 nt, Artificial Sequence
  Description of Artificial Sequence: Synthetic oligonucleotide
  Antisense strand to SEQ ID NO: 1788855
acuuucauuaguuucacua

SEQ ID NO: 1788857 - RNA, 19 nt, Artificial Sequence
  Description of Artificial Sequence: Synthetic oligonucleotide
  Sense strand starting at position 2663 of SEQ ID NO: 1563012
uugaauaaugcagggagua

SEQ ID NO: 1788858 - RNA, 19 nt, Artificial Sequence
  Description of Artificial Sequence: Synthetic oligonucleotide
  Antisense strand to SEQ ID NO: 1788857
uacucccugcauuauucaa

SEQ ID NO: 1788859 - RNA, 19 nt, Artificial Sequence
  Description of Artificial Sequence: Synthetic oligonucleotide
  Sense strand starting at position 2664 of SEQ ID NO: 1563012
ugaauaaugcagggaguaa

SEQ ID NO: 1788860 - RNA, 19 nt, Artificial Sequence
  Description of Artificial Sequence: Synthetic oligonucleotide
  Antisense strand to SEQ ID NO: 1788859
uuacucccugcauuauuca

SEQ ID NO: 1788861 - RNA, 19 nt, Artificial Sequence
  Description of Artificial Sequence: Synthetic oligonucleotide
  Sense strand starting at position 3195 of SEQ ID NO: 1563012
caagguuauagugagcuga

SEQ ID NO: 1788862 - RNA, 19 nt, Artificial Sequence
  Description of Artificial Sequence: Synthetic oligonucleotide
  Antisense strand to SEQ ID NO: 1788861
ucagcucacuauaaccuug

SEQ ID NO: 1788863 - RNA, 19 nt, Artificial Sequence
  Description of Artificial Sequence: Synthetic oligonucleotide
  Sense strand starting at position 3197 of SEQ ID NO: 1563012
agguuauagugagcugauu

SEQ ID NO: 1788864 - RNA, 19 nt, Artificial Sequence
  Description of Artificial Sequence: Synthetic oligonucleotide
  Antisense strand to SEQ ID NO: 1788863
aaucagcucacuauaaccu

SEQ ID NO: 1788865 - RNA, 19 nt, Artificial Sequence
  Description of Artificial Sequence: Synthetic oligonucleotide
  Sense strand starting at position 3361 of SEQ ID NO: 1563012
gaaguugcuuuguucugua

SEQ ID NO: 1788866 - RNA, 19 nt, Artificial Sequence
  Description of Artificial Sequence: Synthetic oligonucleotide
  Antisense strand to SEQ ID NO: 1788865
uacagaacaaagcaacuuc

SEQ ID NO: 1788867 - RNA, 19 nt, Artificial Sequence
  Description of Artificial Sequence: Synthetic oligonucleotide
  Sense strand starting at position 3371 of SEQ ID NO: 1563012
uguucuguauccucacagu

SEQ ID NO: 1788868 - RNA, 19 nt, Artificial Sequence
  Description of Artificial Sequence: Synthetic oligonucleotide
  Antisense strand to SEQ ID NO: 1788867
acugugaggauacagaaca

SEQ ID NO: 1788869 - RNA, 19 nt, Artificial Sequence
  Description of Artificial Sequence: Synthetic oligonucleotide
  Sense strand starting at position 3416 of SEQ ID NO: 1563012
cucaguauccaugggaauu

SEQ ID NO: 1788870 - RNA, 19 nt, Artificial Sequence
  Description of Artificial Sequence: Synthetic oligonucleotide
  Antisense strand to SEQ ID NO: 1788869
aauucccauggauacugag

SEQ ID NO: 1788871 - RNA, 19 nt, Artificial Sequence
  Description of Artificial Sequence: Synthetic oligonucleotide
  Sense strand starting at position 3417 of SEQ ID NO: 1563012
ucaguauccaugggaauug

SEQ ID NO: 1788872 - RNA, 19 nt, Artificial Sequence
  Description of Artificial Sequence: Synthetic oligonucleotide
  Antisense strand to SEQ ID NO: 1788871
caauucccauggauacuga

SEQ ID NO: 1788873 - RNA, 19 nt, Artificial Sequence
  Description of Artificial Sequence: Synthetic oligonucleotide
  Sense strand starting at position 3600 of SEQ ID NO: 1563012
uuauacuauuguuuaggga

SEQ ID NO: 1788874 - RNA, 19 nt, Artificial Sequence
  Description of Artificial Sequence: Synthetic oligonucleotide
  Antisense strand to SEQ ID NO: 1788873
ucccuaaacaauaguauaa

SEQ ID NO: 1788875 - RNA, 19 nt, Artificial Sequence
  Description of Artificial Sequence: Synthetic oligonucleotide
  Sense strand starting at position 3640 of SEQ ID NO: 1563012
cguacauguucaguacaga

SEQ ID NO: 1788876 - RNA, 19 nt, Artificial Sequence
  Description of Artificial Sequence: Synthetic oligonucleotide
  Antisense strand to SEQ ID NO: 1788875
ucuguacugaacauguacg

SEQ ID NO: 1788877 - RNA, 19 nt, Artificial Sequence
  Description of Artificial Sequence: Synthetic oligonucleotide
  Sense strand starting at position 603 of SEQ ID NO: 1563013
cgaagucucgcucuuguua

SEQ ID NO: 1788878 - RNA, 19 nt, Artificial Sequence
  Description of Artificial Sequence: Synthetic oligonucleotide
  Antisense strand to SEQ ID NO: 1788877
uaacaagagcgagacuucg

SEQ ID NO: 1788879 - RNA, 19 nt, Artificial Sequence
  Description of Artificial Sequence: Synthetic oligonucleotide
  Sense strand starting at position 731 of SEQ ID NO: 1563013
gucaccacacccgauuaau

SEQ ID NO: 1788880 - RNA, 19 nt, Artificial Sequence
  Description of Artificial Sequence: Synthetic oligonucleotide
  Antisense strand to SEQ ID NO: 1788879
auuaaucggguguggugac

SEQ ID NO: 1788881 - RNA, 19 nt, Artificial Sequence
  Description of Artificial Sequence: Synthetic oligonucleotide
  Sense strand starting at position 909 of SEQ ID NO: 1563013
acgagagucgcacuguguu

SEQ ID NO: 1788882 - RNA, 19 nt, Artificial Sequence
  Description of Artificial Sequence: Synthetic oligonucleotide
  Antisense strand to SEQ ID NO: 1788881
aacacagugcgacucucgu

SEQ ID NO: 1788883 - RNA, 19 nt, Artificial Sequence
  Description of Artificial Sequence: Synthetic oligonucleotide
  Sense strand starting at position 1060 of SEQ ID NO: 1563013
guauuauuaguagagaccu

SEQ ID NO: 1788884 - RNA, 19 nt, Artificial Sequence
  Description of Artificial Sequence: Synthetic oligonucleotide
  Antisense strand to SEQ ID NO: 1788883
aggucucuacuaauaauac

SEQ ID NO: 1788885 - RNA, 19 nt, Artificial Sequence
  Description of Artificial Sequence: Synthetic oligonucleotide
  Sense strand starting at position 1163 of SEQ ID NO: 1563013
cggugucgccaggaacuua

SEQ ID NO: 1788886 - RNA, 19 nt, Artificial Sequence
  Description of Artificial Sequence: Synthetic oligonucleotide
  Antisense strand to SEQ ID NO: 1788885
uaaguuccuggcgacaccg

SEQ ID NO: 1788887 - RNA, 19 nt, Artificial Sequence
  Description of Artificial Sequence: Synthetic oligonucleotide
  Sense strand starting at position 1190 of SEQ ID NO: 1563013
ucaguaaacugggucauca

SEQ ID NO: 1788888 - RNA, 19 nt, Artificial Sequence
  Description of Artificial Sequence: Synthetic oligonucleotide
  Antisense strand to SEQ ID NO: 1788887
ugaugacccaguuuacuga

SEQ ID NO: 1788889 - RNA, 19 nt, Artificial Sequence
  Description of Artificial Sequence: Synthetic oligonucleotide
  Sense strand starting at position 1198 of SEQ ID NO: 1563013
cugggucaucaucacuaca

SEQ ID NO: 1788890 - RNA, 19 nt, Artificial Sequence
  Description of Artificial Sequence: Synthetic oligonucleotide
  Antisense strand to SEQ ID NO: 1788889
uguagugaugaugacccag

SEQ ID NO: 1788891 - RNA, 19 nt, Artificial Sequence
  Description of Artificial Sequence: Synthetic oligonucleotide
  Sense strand starting at position 1211 of SEQ ID NO: 1563013
acuacauuccugggucaaa

SEQ ID NO: 1788892 - RNA, 19 nt, Artificial Sequence
  Description of Artificial Sequence: Synthetic oligonucleotide
  Antisense strand to SEQ ID NO: 1788891
uuugacccaggaauguagu

SEQ ID NO: 1788893 - RNA, 19 nt, Artificial Sequence
  Description of Artificial Sequence: Synthetic oligonucleotide
  Sense strand starting at position 1212 of SEQ ID NO: 1563013
cuacauuccugggucaaag

SEQ ID NO: 1788894 - RNA, 19 nt, Artificial Sequence
  Description of Artificial Sequence: Synthetic oligonucleotide
  Antisense strand to SEQ ID NO: 1788893
cuuugacccaggaauguag

SEQ ID NO: 1788895 - RNA, 19 nt, Artificial Sequence
  Description of Artificial Sequence: Synthetic oligonucleotide
  Sense strand starting at position 1223 of SEQ ID NO: 1563013
ggucaaagcucccuuggau

SEQ ID NO: 1788896 - RNA, 19 nt, Artificial Sequence
  Description of Artificial Sequence: Synthetic oligonucleotide
  Antisense strand to SEQ ID NO: 1788895
auccaagggagcuuugacc

SEQ ID NO: 1788897 - RNA, 19 nt, Artificial Sequence
  Description of Artificial Sequence: Synthetic oligonucleotide
  Sense strand starting at position 1900 of SEQ ID NO: 1563013
cccgccacgacuugaaauu

SEQ ID NO: 1788898 - RNA, 19 nt, Artificial Sequence
  Description of Artificial Sequence: Synthetic oligonucleotide
  Antisense strand to SEQ ID NO: 1788897
aauuucaagucguggcggg

SEQ ID NO: 1788899 - RNA, 19 nt, Artificial Sequence
  Description of Artificial Sequence: Synthetic oligonucleotide
  Sense strand starting at position 1964 of SEQ ID NO: 1563013
gccucacccgcguuaucaa

SEQ ID NO: 1788900 - RNA, 19 nt, Artificial Sequence
  Description of Artificial Sequence: Synthetic oligonucleotide
  Antisense strand to SEQ ID NO: 1788899
uugauaacgcgggugaggc

SEQ ID NO: 1788901 - RNA, 19 nt, Artificial Sequence
  Description of Artificial Sequence: Synthetic oligonucleotide
  Sense strand starting at position 2012 of SEQ ID NO: 1563013
ucgccaagugucgcgagaa

SEQ ID NO: 1788902 - RNA, 19 nt, Artificial Sequence
  Description of Artificial Sequence: Synthetic oligonucleotide
  Antisense strand to SEQ ID NO: 1788901
uucucgcgacacuuggcga

SEQ ID NO: 1788903 - RNA, 19 nt, Artificial Sequence
  Description of Artificial Sequence: Synthetic oligonucleotide
  Sense strand starting at position 2066 of SEQ ID NO: 1563013
agcaacgaguuguugacau

SEQ ID NO: 1788904 - RNA, 19 nt, Artificial Sequence
  Description of Artificial Sequence: Synthetic oligonucleotide
  Antisense strand to SEQ ID NO: 1788903
augucaacaacucguugcu

SEQ ID NO: 1788905 - RNA, 19 nt, Artificial Sequence
  Description of Artificial Sequence: Synthetic oligonucleotide
  Sense strand starting at position 2466 of SEQ ID NO: 1563013
ggagaugaguucuaggaug

SEQ ID NO: 1788906 - RNA, 19 nt, Artificial Sequence
  Description of Artificial Sequence: Synthetic oligonucleotide
  Antisense strand to SEQ ID NO: 1788905
cauccuagaacucaucucc

SEQ ID NO: 1788907 - RNA, 19 nt, Artificial Sequence
  Description of Artificial Sequence: Synthetic oligonucleotide
  Sense strand starting at position 2480 of SEQ ID NO: 1563013
ggaugaaacaucugagcca

SEQ ID NO: 1788908 - RNA, 19 nt, Artificial Sequence
  Description of Artificial Sequence: Synthetic oligonucleotide
  Antisense strand to SEQ ID NO: 1788907
uggcucagauguuucaucc

SEQ ID NO: 1788909 - RNA, 19 nt, Artificial Sequence
  Description of Artificial Sequence: Synthetic oligonucleotide
  Sense strand starting at position 2636 of SEQ ID NO: 1563013
guaggauuguuauuacuga

SEQ ID NO: 1788910 - RNA, 19 nt, Artificial Sequence
  Description of Artificial Sequence: Synthetic oligonucleotide
  Antisense strand to SEQ ID NO: 1788909
ucaguaauaacaauccuac

SEQ ID NO: 1788911 - RNA, 19 nt, Artificial Sequence
  Description of Artificial Sequence: Synthetic oligonucleotide
  Sense strand starting at position 2691 of SEQ ID NO: 1563013
uuccauuuauagggagaca

SEQ ID NO: 1788912 - RNA, 19 nt, Artificial Sequence
  Description of Artificial Sequence: Synthetic oligonucleotide
  Antisense strand to SEQ ID NO: 1788911
ugucucccuauaaauggaa

SEQ ID NO: 1788913 - RNA, 19 nt, Artificial Sequence
  Description of Artificial Sequence: Synthetic oligonucleotide
  Sense strand starting at position 2771 of SEQ ID NO: 1563013
acaugaaaccuuuggugag

SEQ ID NO: 1788914 - RNA, 19 nt, Artificial Sequence
  Description of Artificial Sequence: Synthetic oligonucleotide
  Antisense strand to SEQ ID NO: 1788913
cucaccaaagguuucaugu

SEQ ID NO: 1788915 - RNA, 19 nt, Artificial Sequence
  Description of Artificial Sequence: Synthetic oligonucleotide
  Sense strand starting at position 2775 of SEQ ID NO: 1563013
gaaaccuuuggugagcauu

SEQ ID NO: 1788916 - RNA, 19 nt, Artificial Sequence
  Description of Artificial Sequence: Synthetic oligonucleotide
  Antisense strand to SEQ ID NO: 1788915
aaugcucaccaaagguuuc

SEQ ID NO: 1788917 - RNA, 19 nt, Artificial Sequence
  Description of Artificial Sequence: Synthetic oligonucleotide
  Sense strand starting at position 2789 of SEQ ID NO: 1563013
gcauuuccugaaugcuuau

SEQ ID NO: 1788918 - RNA, 19 nt, Artificial Sequence
  Description of Artificial Sequence: Synthetic oligonucleotide
  Antisense strand to SEQ ID NO: 1788917
auaagcauucaggaaaugc

SEQ ID NO: 1788919 - RNA, 19 nt, Artificial Sequence
  Description of Artificial Sequence: Synthetic oligonucleotide
  Sense strand starting at position 2795 of SEQ ID NO: 1563013
ccugaaugcuuaucuauug

SEQ ID NO: 1788920 - RNA, 19 nt, Artificial Sequence
  Description of Artificial Sequence: Synthetic oligonucleotide
  Antisense strand to SEQ ID NO: 1788919
caauagauaagcauucagg

SEQ ID NO: 1788921 - RNA, 19 nt, Artificial Sequence
  Description of Artificial Sequence: Synthetic oligonucleotide
  Sense strand starting at position 2803 of SEQ ID NO: 1563013
cuuaucuauugguuuagga

SEQ ID NO: 1788922 - RNA, 19 nt, Artificial Sequence
  Description of Artificial Sequence: Synthetic oligonucleotide
  Antisense strand to SEQ ID NO: 1788921
uccuaaaccaauagauaag

SEQ ID NO: 1788923 - RNA, 19 nt, Artificial Sequence
  Description of Artificial Sequence: Synthetic oligonucleotide
  Sense strand starting at position 2805 of SEQ ID NO: 1563013
uaucuauugguuuaggauu

SEQ ID NO: 1788924 - RNA, 19 nt, Artificial Sequence
  Description of Artificial Sequence: Synthetic oligonucleotide
  Antisense strand to SEQ ID NO: 1788923
aauccuaaaccaauagaua

SEQ ID NO: 1788925 - RNA, 19 nt, Artificial Sequence
  Description of Artificial Sequence: Synthetic oligonucleotide
  Sense strand starting at position 2818 of SEQ ID NO: 1563013
aggauuguguggcuuuaga

SEQ ID NO: 1788926 - RNA, 19 nt, Artificial Sequence
  Description of Artificial Sequence: Synthetic oligonucleotide
  Antisense strand to SEQ ID NO: 1788925
ucuaaagccacacaauccu

SEQ ID NO: 1788927 - RNA, 19 nt, Artificial Sequence
  Description of Artificial Sequence: Synthetic oligonucleotide
  Sense strand starting at position 2828 of SEQ ID NO: 1563013
ggcuuuagacuccagucuu

SEQ ID NO: 1788928 - RNA, 19 nt, Artificial Sequence
  Description of Artificial Sequence: Synthetic oligonucleotide
  Antisense strand to SEQ ID NO: 1788927
aagacuggagucuaaagcc

SEQ ID NO: 1788929 - RNA, 19 nt, Artificial Sequence
  Description of Artificial Sequence: Synthetic oligonucleotide
  Sense strand starting at position 3132 of SEQ ID NO: 1563013
agcuauugaauucgaaugu

SEQ ID NO: 1788930 - RNA, 19 nt, Artificial Sequence
  Description of Artificial Sequence: Synthetic oligonucleotide
  Antisense strand to SEQ ID NO: 1788929
acauucgaauucaauagcu

SEQ ID NO: 1788931 - RNA, 19 nt, Artificial Sequence
  Description of Artificial Sequence: Synthetic oligonucleotide
  Sense strand starting at position 3136 of SEQ ID NO: 1563013
auugaauucgaauguggau

SEQ ID NO: 1788932 - RNA, 19 nt, Artificial Sequence
  Description of Artificial Sequence: Synthetic oligonucleotide
  Antisense strand to SEQ ID NO: 1788931
auccacauucgaauucaau

SEQ ID NO: 1788933 - RNA, 19 nt, Artificial Sequence
  Description of Artificial Sequence: Synthetic oligonucleotide
  Sense strand starting at position 3138 of SEQ ID NO: 1563013
ugaauucgaauguggauua

SEQ ID NO: 1788934 - RNA, 19 nt, Artificial Sequence
  Description of Artificial Sequence: Synthetic oligonucleotide
  Antisense strand to SEQ ID NO: 1788933
uaauccacauucgaauuca

SEQ ID NO: 1788935 - RNA, 19 nt, Artificial Sequence
  Description of Artificial Sequence: Synthetic oligonucleotide
  Sense strand starting at position 3145 of SEQ ID NO: 1563013
gaauguggauuauaagaaa

SEQ ID NO: 1788936 - RNA, 19 nt, Artificial Sequence
  Description of Artificial Sequence: Synthetic oligonucleotide
  Antisense strand to SEQ ID NO: 1788935
uuucuuauaauccacauuc

SEQ ID NO: 1788937 - RNA, 19 nt, Artificial Sequence
  Description of Artificial Sequence: Synthetic oligonucleotide
  Sense strand starting at position 3270 of SEQ ID NO: 1563013
aaaguuuaagaccgucuau

SEQ ID NO: 1788938 - RNA, 19 nt, Artificial Sequence
  Description of Artificial Sequence: Synthetic oligonucleotide
  Antisense strand to SEQ ID NO: 1788937
auagacggucuuaaacuuu

SEQ ID NO: 1788939 - RNA, 19 nt, Artificial Sequence
  Description of Artificial Sequence: Synthetic oligonucleotide
  Sense strand starting at position 3405 of SEQ ID NO: 1563013
agguauuauuauuccacuu

SEQ ID NO: 1788940 - RNA, 19 nt, Artificial Sequence
  Description of Artificial Sequence: Synthetic oligonucleotide
  Antisense strand to SEQ ID NO: 1788939
aaguggaauaauaauaccu

SEQ ID NO: 1788941 - RNA, 19 nt, Artificial Sequence
  Description of Artificial Sequence: Synthetic oligonucleotide
  Sense strand starting at position 3442 of SEQ ID NO: 1563013
cccuaucguguccaacaau

SEQ ID NO: 1788942 - RNA, 19 nt, Artificial Sequence
  Description of Artificial Sequence: Synthetic oligonucleotide
  Antisense strand to SEQ ID NO: 1788941
auuguuggacacgauaggg

SEQ ID NO: 1788943 - RNA, 19 nt, Artificial Sequence
  Description of Artificial Sequence: Synthetic oligonucleotide
  Sense strand starting at position 3737 of SEQ ID NO: 1563013
aaauguuagcaggguaaug

SEQ ID NO: 1788944 - RNA, 19 nt, Artificial Sequence
  Description of Artificial Sequence: Synthetic oligonucleotide
  Antisense strand to SEQ ID NO: 1788943
cauuacccugcuaacauuu

SEQ ID NO: 1788945 - RNA, 19 nt, Artificial Sequence
  Description of Artificial Sequence: Synthetic oligonucleotide
  Sense strand starting at position 3739 of SEQ ID NO: 1563013
auguuagcaggguaauguu

SEQ ID NO: 1788946 - RNA, 19 nt, Artificial Sequence
  Description of Artificial Sequence: Synthetic oligonucleotide
  Antisense strand to SEQ ID NO: 1788945
aacauuacccugcuaacau

SEQ ID NO: 1788947 - RNA, 19 nt, Artificial Sequence
  Description of Artificial Sequence: Synthetic oligonucleotide
  Sense strand starting at position 3748 of SEQ ID NO: 1563013
ggguaauguuggagggaua

SEQ ID NO: 1788948 - RNA, 19 nt, Artificial Sequence
  Description of Artificial Sequence: Synthetic oligonucleotide
  Antisense strand to SEQ ID NO: 1788947
uaucccuccaacauuaccc

SEQ ID NO: 1788949 - RNA, 19 nt, Artificial Sequence
  Description of Artificial Sequence: Synthetic oligonucleotide
  Sense strand starting at position 3749 of SEQ ID NO: 1563013
gguaauguuggagggauag

SEQ ID NO: 1788950 - RNA, 19 nt, Artificial Sequence
  Description of Artificial Sequence: Synthetic oligonucleotide
  Antisense strand to SEQ ID NO: 1788949
cuaucccuccaacauuacc

SEQ ID NO: 1788951 - RNA, 19 nt, Artificial Sequence
  Description of Artificial Sequence: Synthetic oligonucleotide
  Sense strand starting at position 3798 of SEQ ID NO: 1563013
uacuguucuguauguucua

SEQ ID NO: 1788952 - RNA, 19 nt, Artificial Sequence
  Description of Artificial Sequence: Synthetic oligonucleotide
  Antisense strand to SEQ ID NO: 1788951
uagaacauacagaacagua

SEQ ID NO: 1788953 - RNA, 19 nt, Artificial Sequence
  Description of Artificial Sequence: Synthetic oligonucleotide
  Sense strand starting at position 3799 of SEQ ID NO: 1563013
acuguucuguauguucuaa

SEQ ID NO: 1788954 - RNA, 19 nt, Artificial Sequence
  Description of Artificial Sequence: Synthetic oligonucleotide
  Antisense strand to SEQ ID NO: 1788953
uuagaacauacagaacagu

SEQ ID NO: 1788955 - RNA, 19 nt, Artificial Sequence
  Description of Artificial Sequence: Synthetic oligonucleotide
  Sense strand starting at position 3801 of SEQ ID NO: 1563013
uguucuguauguucuaaac

SEQ ID NO: 1788956 - RNA, 19 nt, Artificial Sequence
  Description of Artificial Sequence: Synthetic oligonucleotide
  Antisense strand to SEQ ID NO: 1788955
guuuagaacauacagaaca

SEQ ID NO: 1788957 - RNA, 19 nt, Artificial Sequence
  Description of Artificial Sequence: Synthetic oligonucleotide
  Sense strand starting at position 524 of SEQ ID NO: 1563014
gagauaaggugacuguuau

SEQ ID NO: 1788958 - RNA, 19 nt, Artificial Sequence
  Description of Artificial Sequence: Synthetic oligonucleotide
  Antisense strand to SEQ ID NO: 1788957
auaacagucaccuuaucuc

SEQ ID NO: 1788959 - RNA, 19 nt, Artificial Sequence
  Description of Artificial Sequence: Synthetic oligonucleotide
  Sense strand starting at position 525 of SEQ ID NO: 1563014
agauaaggugacuguuaug

SEQ ID NO: 1788960 - RNA, 19 nt, Artificial Sequence
  Description of Artificial Sequence: Synthetic oligonucleotide
  Antisense strand to SEQ ID NO: 1788959
cauaacagucaccuuaucu

SEQ ID NO: 1788961 - RNA, 19 nt, Artificial Sequence
  Description of Artificial Sequence: Synthetic oligonucleotide
  Sense strand starting at position 530 of SEQ ID NO: 1563014
aggugacuguuauggccau

SEQ ID NO: 1788962 - RNA, 19 nt, Artificial Sequence
  Description of Artificial Sequence: Synthetic oligonucleotide
  Antisense strand to SEQ ID NO: 1788961
auggccauaacagucaccu

SEQ ID NO: 1788963 - RNA, 19 nt, Artificial Sequence
  Description of Artificial Sequence: Synthetic oligonucleotide
  Sense strand starting at position 534 of SEQ ID NO: 1563014
gacuguuauggccaucaaa

SEQ ID NO: 1788964 - RNA, 19 nt, Artificial Sequence
  Description of Artificial Sequence: Synthetic oligonucleotide
  Antisense strand to SEQ ID NO: 1788963
uuugauggccauaacaguc

SEQ ID NO: 1788965 - RNA, 19 nt, Artificial Sequence
  Description of Artificial Sequence: Synthetic oligonucleotide
  Sense strand starting at position 683 of SEQ ID NO: 1563014
gugagcucugccugaacac

SEQ ID NO: 1788966 - RNA, 19 nt, Artificial Sequence
  Description of Artificial Sequence: Synthetic oligonucleotide
  Antisense strand to SEQ ID NO: 1788965
guguucaggcagagcucac

SEQ ID NO: 1788967 - RNA, 19 nt, Artificial Sequence
  Description of Artificial Sequence: Synthetic oligonucleotide
  Sense strand starting at position 731 of SEQ ID NO: 1563014
uguacagugaagggauauu

SEQ ID NO: 1788968 - RNA, 19 nt, Artificial Sequence
  Description of Artificial Sequence: Synthetic oligonucleotide
  Antisense strand to SEQ ID NO: 1788967
aauaucccuucacuguaca

SEQ ID NO: 1788969 - RNA, 19 nt, Artificial Sequence
  Description of Artificial Sequence: Synthetic oligonucleotide
  Sense strand starting at position 773 of SEQ ID NO: 1563014
guucccugaugccugagaa

SEQ ID NO: 1788970 - RNA, 19 nt, Artificial Sequence
  Description of Artificial Sequence: Synthetic oligonucleotide
  Antisense strand to SEQ ID NO: 1788969
uucucaggcaucagggaac

SEQ ID NO: 1788971 - RNA, 19 nt, Artificial Sequence
  Description of Artificial Sequence: Synthetic oligonucleotide
  Sense strand starting at position 777 of SEQ ID NO: 1563014
ccugaugccugagaaauuu

SEQ ID NO: 1788972 - RNA, 19 nt, Artificial Sequence
  Description of Artificial Sequence: Synthetic oligonucleotide
  Antisense strand to SEQ ID NO: 1788971
aaauuucucaggcaucagg

SEQ ID NO: 1788973 - RNA, 19 nt, Artificial Sequence
  Description of Artificial Sequence: Synthetic oligonucleotide
  Sense strand starting at position 823 of SEQ ID NO: 1563014
uuugaaagugggcauguau

SEQ ID NO: 1788974 - RNA, 19 nt, Artificial Sequence
  Description of Artificial Sequence: Synthetic oligonucleotide
  Antisense strand to SEQ ID NO: 1788973
auacaugcccacuuucaaa

SEQ ID NO: 1788975 - RNA, 19 nt, Artificial Sequence
  Description of Artificial Sequence: Synthetic oligonucleotide
  Sense strand starting at position 857 of SEQ ID NO: 1563014
uuagauggauugggagaau

SEQ ID NO: 1788976 - RNA, 19 nt, Artificial Sequence
  Description of Artificial Sequence: Synthetic oligonucleotide
  Antisense strand to SEQ ID NO: 1788975
auucucccaauccaucuaa

SEQ ID NO: 1788977 - RNA, 19 nt, Artificial Sequence
  Description of Artificial Sequence: Synthetic oligonucleotide
  Sense strand starting at position 866 of SEQ ID NO: 1563014
uugggagaaugucaguaaa

SEQ ID NO: 1788978 - RNA, 19 nt, Artificial Sequence
  Description of Artificial Sequence: Synthetic oligonucleotide
  Antisense strand to SEQ ID NO: 1788977
uuuacugacauucucccaa

SEQ ID NO: 1788979 - RNA, 19 nt, Artificial Sequence
  Description of Artificial Sequence: Synthetic oligonucleotide
  Sense strand starting at position 890 of SEQ ID NO: 1563014
agcaacauuucucucguau

SEQ ID NO: 1788980 - RNA, 19 nt, Artificial Sequence
  Description of Artificial Sequence: Synthetic oligonucleotide
  Antisense strand to SEQ ID NO: 1788979
auacgagagaaauguugcu

SEQ ID NO: 1788981 - RNA, 19 nt, Artificial Sequence
  Description of Artificial Sequence: Synthetic oligonucleotide
  Sense strand starting at position 897 of SEQ ID NO: 1563014
uuucucucguauuccuaga

SEQ ID NO: 1788982 - RNA, 19 nt, Artificial Sequence
  Description of Artificial Sequence: Synthetic oligonucleotide
  Antisense strand to SEQ ID NO: 1788981
ucuaggaauacgagagaaa

SEQ ID NO: 1788983 - RNA, 19 nt, Artificial Sequence
  Description of Artificial Sequence: Synthetic oligonucleotide
  Sense strand starting at position 899 of SEQ ID NO: 1563014
ucucucguauuccuagaau

SEQ ID NO: 1788984 - RNA, 19 nt, Artificial Sequence
  Description of Artificial Sequence: Synthetic oligonucleotide
  Antisense strand to SEQ ID NO: 1788983
auucuaggaauacgagaga

SEQ ID NO: 1788985 - RNA, 19 nt, Artificial Sequence
  Description of Artificial Sequence: Synthetic oligonucleotide
  Sense strand starting at position 902 of SEQ ID NO: 1563014
cucguauuccuagaauuaa

SEQ ID NO: 1788986 - RNA, 19 nt, Artificial Sequence
  Description of Artificial Sequence: Synthetic oligonucleotide
  Antisense strand to SEQ ID NO: 1788985
uuaauucuaggaauacgag

SEQ ID NO: 1788987 - RNA, 19 nt, Artificial Sequence
  Description of Artificial Sequence: Synthetic oligonucleotide
  Sense strand starting at position 951 of SEQ ID NO: 1563014
gcaggucuuucccaacaug

SEQ ID NO: 1788988 - RNA, 19 nt, Artificial Sequence
  Description of Artificial Sequence: Synthetic oligonucleotide
  Antisense strand to SEQ ID NO: 1788987
cauguugggaaagaccugc

SEQ ID NO: 1788989 - RNA, 19 nt, Artificial Sequence
  Description of Artificial Sequence: Synthetic oligonucleotide
  Sense strand starting at position 972 of SEQ ID NO: 1563014
ccuacagucaauuguguga

SEQ ID NO: 1788990 - RNA, 19 nt, Artificial Sequence
  Description of Artificial Sequence: Synthetic oligonucleotide
  Antisense strand to SEQ ID NO: 1788989
ucacacaauugacuguagg

SEQ ID NO: 1788991 - RNA, 19 nt, Artificial Sequence
  Description of Artificial Sequence: Synthetic oligonucleotide
  Sense strand starting at position 974 of SEQ ID NO: 1563014
uacagucaauugugugagu

SEQ ID NO: 1788992 - RNA, 19 nt, Artificial Sequence
  Description of Artificial Sequence: Synthetic oligonucleotide
  Antisense strand to SEQ ID NO: 1788991
acucacacaauugacugua

SEQ ID NO: 1788993 - RNA, 19 nt, Artificial Sequence
  Description of Artificial Sequence: Synthetic oligonucleotide
  Sense strand starting at position 975 of SEQ ID NO: 1563014
acagucaauugugugaguu

SEQ ID NO: 1788994 - RNA, 19 nt, Artificial Sequence
  Description of Artificial Sequence: Synthetic oligonucleotide
  Antisense strand to SEQ ID NO: 1788993
aacucacacaauugacugu

SEQ ID NO: 1788995 - RNA, 19 nt, Artificial Sequence
  Description of Artificial Sequence: Synthetic oligonucleotide
  Sense strand starting at position 976 of SEQ ID NO: 1563014
cagucaauugugugaguua

SEQ ID NO: 1788996 - RNA, 19 nt, Artificial Sequence
  Description of Artificial Sequence: Synthetic oligonucleotide
  Antisense strand to SEQ ID NO: 1788995
uaacucacacaauugacug

SEQ ID NO: 1788997 - RNA, 19 nt, Artificial Sequence
  Description of Artificial Sequence: Synthetic oligonucleotide
  Sense strand starting at position 977 of SEQ ID NO: 1563014
agucaauugugugaguuag

SEQ ID NO: 1788998 - RNA, 19 nt, Artificial Sequence
  Description of Artificial Sequence: Synthetic oligonucleotide
  Antisense strand to SEQ ID NO: 1788997
cuaacucacacaauugacu

SEQ ID NO: 1788999 - RNA, 19 nt, Artificial Sequence
  Description of Artificial Sequence: Synthetic oligonucleotide
  Sense strand starting at position 979 of SEQ ID NO: 1563014
ucaauugugugaguuagca

SEQ ID NO: 1789000 - RNA, 19 nt, Artificial Sequence
  Description of Artificial Sequence: Synthetic oligonucleotide
  Antisense strand to SEQ ID NO: 1788999
ugcuaacucacacaauuga

SEQ ID NO: 1789001 - RNA, 19 nt, Artificial Sequence
  Description of Artificial Sequence: Synthetic oligonucleotide
  Sense strand starting at position 988 of SEQ ID NO: 1563014
ugaguuagcauaggcuaga

SEQ ID NO: 1789002 - RNA, 19 nt, Artificial Sequence
  Description of Artificial Sequence: Synthetic oligonucleotide
  Antisense strand to SEQ ID NO: 1789001
ucuagccuaugcuaacuca

SEQ ID NO: 1789003 - RNA, 19 nt, Artificial Sequence
  Description of Artificial Sequence: Synthetic oligonucleotide
  Sense strand starting at position 1065 of SEQ ID NO: 1563014
agcaaacuuucgcuugaua

SEQ ID NO: 1789004 - RNA, 19 nt, Artificial Sequence
  Description of Artificial Sequence: Synthetic oligonucleotide
  Antisense strand to SEQ ID NO: 1789003
uaucaagcgaaaguuugcu

SEQ ID NO: 1789005 - RNA, 19 nt, Artificial Sequence
  Description of Artificial Sequence: Synthetic oligonucleotide
  Sense strand starting at position 1072 of SEQ ID NO: 1563014
uuucgcuugauauaaggga

SEQ ID NO: 1789006 - RNA, 19 nt, Artificial Sequence
  Description of Artificial Sequence: Synthetic oligonucleotide
  Antisense strand to SEQ ID NO: 1789005
ucccuuauaucaagcgaaa

SEQ ID NO: 1789007 - RNA, 19 nt, Artificial Sequence
  Description of Artificial Sequence: Synthetic oligonucleotide
  Sense strand starting at position 1076 of SEQ ID NO: 1563014
gcuugauauaagggacugu

SEQ ID NO: 1789008 - RNA, 19 nt, Artificial Sequence
  Description of Artificial Sequence: Synthetic oligonucleotide
  Antisense strand to SEQ ID NO: 1789007
acagucccuuauaucaagc

SEQ ID NO: 1789009 - RNA, 19 nt, Artificial Sequence
  Description of Artificial Sequence: Synthetic oligonucleotide
  Sense strand starting at position 1122 of SEQ ID NO: 1563014
augugauagcguucagugu

SEQ ID NO: 1789010 - RNA, 19 nt, Artificial Sequence
  Description of Artificial Sequence: Synthetic oligonucleotide
  Antisense strand to SEQ ID NO: 1789009
acacugaacgcuaucacau

SEQ ID NO: 1789011 - RNA, 19 nt, Artificial Sequence
  Description of Artificial Sequence: Synthetic oligonucleotide
  Sense strand starting at position 1123 of SEQ ID NO: 1563014
ugugauagcguucaguguu

SEQ ID NO: 1789012 - RNA, 19 nt, Artificial Sequence
  Description of Artificial Sequence: Synthetic oligonucleotide
  Antisense strand to SEQ ID NO: 1789011
aacacugaacgcuaucaca

SEQ ID NO: 1789013 - RNA, 19 nt, Artificial Sequence
  Description of Artificial Sequence: Synthetic oligonucleotide
  Sense strand starting at position 1126 of SEQ ID NO: 1563014
gauagcguucaguguugga

SEQ ID NO: 1789014 - RNA, 19 nt, Artificial Sequence
  Description of Artificial Sequence: Synthetic oligonucleotide
  Antisense strand to SEQ ID NO: 1789013
uccaacacugaacgcuauc

SEQ ID NO: 1789015 - RNA, 19 nt, Artificial Sequence
  Description of Artificial Sequence: Synthetic oligonucleotide
  Sense strand starting at position 1282 of SEQ ID NO: 1563014
aucuaucaggacuguaaau

SEQ ID NO: 1789016 - RNA, 19 nt, Artificial Sequence
  Description of Artificial Sequence: Synthetic oligonucleotide
  Antisense strand to SEQ ID NO: 1789015
auuuacaguccugauagau

SEQ ID NO: 1789017 - RNA, 19 nt, Artificial Sequence
  Description of Artificial Sequence: Synthetic oligonucleotide
  Sense strand starting at position 1429 of SEQ ID NO: 1563014
acaggacugcucuaagcua

SEQ ID NO: 1789018 - RNA, 19 nt, Artificial Sequence
  Description of Artificial Sequence: Synthetic oligonucleotide
  Antisense strand to SEQ ID NO: 1789017
uagcuuagagcaguccugu

SEQ ID NO: 1789019 - RNA, 19 nt, Artificial Sequence
  Description of Artificial Sequence: Synthetic oligonucleotide
  Sense strand starting at position 1460 of SEQ ID NO: 1563014
cuagucuucugacuccaga

SEQ ID NO: 1789020 - RNA, 19 nt, Artificial Sequence
  Description of Artificial Sequence: Synthetic oligonucleotide
  Antisense strand to SEQ ID NO: 1789019
ucuggagucagaagacuag

SEQ ID NO: 1789021 - RNA, 19 nt, Artificial Sequence
  Description of Artificial Sequence: Synthetic oligonucleotide
  Sense strand starting at position 1587 of SEQ ID NO: 1563014
uuagcaacucauuagcgua

SEQ ID NO: 1789022 - RNA, 19 nt, Artificial Sequence
  Description of Artificial Sequence: Synthetic oligonucleotide
  Antisense strand to SEQ ID NO: 1789021
uacgcuaaugaguugcuaa

SEQ ID NO: 1789023 - RNA, 19 nt, Artificial Sequence
  Description of Artificial Sequence: Synthetic oligonucleotide
  Sense strand starting at position 1623 of SEQ ID NO: 1563014
agucuacgguaaucguuau

SEQ ID NO: 1789024 - RNA, 19 nt, Artificial Sequence
  Description of Artificial Sequence: Synthetic oligonucleotide
  Antisense strand to SEQ ID NO: 1789023
auaacgauuaccguagacu

SEQ ID NO: 1789025 - RNA, 19 nt, Artificial Sequence
  Description of Artificial Sequence: Synthetic oligonucleotide
  Sense strand starting at position 1627 of SEQ ID NO: 1563014
uacgguaaucguuaugauu

SEQ ID NO: 1789026 - RNA, 19 nt, Artificial Sequence
  Description of Artificial Sequence: Synthetic oligonucleotide
  Antisense strand to SEQ ID NO: 1789025
aaucauaacgauuaccgua

SEQ ID NO: 1789027 - RNA, 19 nt, Artificial Sequence
  Description of Artificial Sequence: Synthetic oligonucleotide
  Sense strand starting at position 1646 of SEQ ID NO: 1563014
ggccuuggcuccuaucaau

SEQ ID NO: 1789028 - RNA, 19 nt, Artificial Sequence
  Description of Artificial Sequence: Synthetic oligonucleotide
  Antisense strand to SEQ ID NO: 1789027
auugauaggagccaaggcc

SEQ ID NO: 1789029 - RNA, 19 nt, Artificial Sequence
  Description of Artificial Sequence: Synthetic oligonucleotide
  Sense strand starting at position 2002 of SEQ ID NO: 1563014
cgaagccucgcgagaguuu

SEQ ID NO: 1789030 - RNA, 19 nt, Artificial Sequence
  Description of Artificial Sequence: Synthetic oligonucleotide
  Antisense strand to SEQ ID NO: 1789029
aaacucucgcgaggcuucg

SEQ ID NO: 1789031 - RNA, 19 nt, Artificial Sequence
  Description of Artificial Sequence: Synthetic oligonucleotide
  Sense strand starting at position 2011 of SEQ ID NO: 1563014
gcgagaguuugaggaguac

SEQ ID NO: 1789032 - RNA, 19 nt, Artificial Sequence
  Description of Artificial Sequence: Synthetic oligonucleotide
  Antisense strand to SEQ ID NO: 1789031
guacuccucaaacucucgc

SEQ ID NO: 1789033 - RNA, 19 nt, Artificial Sequence
  Description of Artificial Sequence: Synthetic oligonucleotide
  Sense strand starting at position 2015 of SEQ ID NO: 1563014
gaguuugaggaguacacga

SEQ ID NO: 1789034 - RNA, 19 nt, Artificial Sequence
  Description of Artificial Sequence: Synthetic oligonucleotide
  Antisense strand to SEQ ID NO: 1789033
ucguguacuccucaaacuc

SEQ ID NO: 1789035 - RNA, 19 nt, Artificial Sequence
  Description of Artificial Sequence: Synthetic oligonucleotide
  Sense strand starting at position 2084 of SEQ ID NO: 1563014
gagggagguguuugucacu

SEQ ID NO: 1789036 - RNA, 19 nt, Artificial Sequence
  Description of Artificial Sequence: Synthetic oligonucleotide
  Antisense strand to SEQ ID NO: 1789035
agugacaaacaccucccuc

SEQ ID NO: 1789037 - RNA, 19 nt, Artificial Sequence
  Description of Artificial Sequence: Synthetic oligonucleotide
  Sense strand starting at position 85 of SEQ ID NO: 1563015
aucuguccuuucccagaga

SEQ ID NO: 1789038 - RNA, 19 nt, Artificial Sequence
  Description of Artificial Sequence: Synthetic oligonucleotide
  Antisense strand to SEQ ID NO: 1789037
ucucugggaaaggacagau

SEQ ID NO: 1789039 - RNA, 19 nt, Artificial Sequence
  Description of Artificial Sequence: Synthetic oligonucleotide
  Sense strand starting at position 151 of SEQ ID NO: 1563015
ccgagccucgcuuaagaga

SEQ ID NO: 1789040 - RNA, 19 nt, Artificial Sequence
  Description of Artificial Sequence: Synthetic oligonucleotide
  Antisense strand to SEQ ID NO: 1789039
ucucuuaagcgaggcucgg

SEQ ID NO: 1789041 - RNA, 19 nt, Artificial Sequence
  Description of Artificial Sequence: Synthetic oligonucleotide
  Sense strand starting at position 200 of SEQ ID NO: 1563015
gccuguggauaccuugaga

SEQ ID NO: 1789042 - RNA, 19 nt, Artificial Sequence
  Description of Artificial Sequence: Synthetic oligonucleotide
  Antisense strand to SEQ ID NO: 1789041
ucucaagguauccacaggc

SEQ ID NO: 1789043 - RNA, 19 nt, Artificial Sequence
  Description of Artificial Sequence: Synthetic oligonucleotide
  Sense strand starting at position 413 of SEQ ID NO: 1563015
ugcgcugguccgagaacau

SEQ ID NO: 1789044 - RNA, 19 nt, Artificial Sequence
  Description of Artificial Sequence: Synthetic oligonucleotide
  Antisense strand to SEQ ID NO: 1789043
auguucucggaccagcgca

SEQ ID NO: 1789045 - RNA, 19 nt, Artificial Sequence
  Description of Artificial Sequence: Synthetic oligonucleotide
  Sense strand starting at position 541 of SEQ ID NO: 1563015
gugggucacuugucuucua

SEQ ID NO: 1789046 - RNA, 19 nt, Artificial Sequence
  Description of Artificial Sequence: Synthetic oligonucleotide
  Antisense strand to SEQ ID NO: 1789045
uagaagacaagugacccac

SEQ ID NO: 1789047 - RNA, 19 nt, Artificial Sequence
  Description of Artificial Sequence: Synthetic oligonucleotide
  Sense strand starting at position 544 of SEQ ID NO: 1563015
ggucacuugucuucuaggu

SEQ ID NO: 1789048 - RNA, 19 nt, Artificial Sequence
  Description of Artificial Sequence: Synthetic oligonucleotide
  Antisense strand to SEQ ID NO: 1789047
accuagaagacaagugacc

SEQ ID NO: 1789049 - RNA, 19 nt, Artificial Sequence
  Description of Artificial Sequence: Synthetic oligonucleotide
  Sense strand starting at position 548 of SEQ ID NO: 1563015
acuugucuucuagguaaag

SEQ ID NO: 1789050 - RNA, 19 nt, Artificial Sequence
  Description of Artificial Sequence: Synthetic oligonucleotide
  Antisense strand to SEQ ID NO: 1789049
cuuuaccuagaagacaagu

SEQ ID NO: 1789051 - RNA, 19 nt, Artificial Sequence
  Description of Artificial Sequence: Synthetic oligonucleotide
  Sense strand starting at position 549 of SEQ ID NO: 1563015
cuugucuucuagguaaagu

SEQ ID NO: 1789052 - RNA, 19 nt, Artificial Sequence
  Description of Artificial Sequence: Synthetic oligonucleotide
  Antisense strand to SEQ ID NO: 1789051
acuuuaccuagaagacaag

SEQ ID NO: 1789053 - RNA, 19 nt, Artificial Sequence
  Description of Artificial Sequence: Synthetic oligonucleotide
  Sense strand starting at position 550 of SEQ ID NO: 1563015
uugucuucuagguaaagua

SEQ ID NO: 1789054 - RNA, 19 nt, Artificial Sequence
  Description of Artificial Sequence: Synthetic oligonucleotide
  Antisense strand to SEQ ID NO: 1789053
uacuuuaccuagaagacaa

SEQ ID NO: 1789055 - RNA, 19 nt, Artificial Sequence
  Description of Artificial Sequence: Synthetic oligonucleotide
  Sense strand starting at position 777 of SEQ ID NO: 1563015
accugagaucuggguccau

SEQ ID NO: 1789056 - RNA, 19 nt, Artificial Sequence
  Description of Artificial Sequence: Synthetic oligonucleotide
  Antisense strand to SEQ ID NO: 1789055
auggacccagaucucaggu

SEQ ID NO: 1789057 - RNA, 19 nt, Artificial Sequence
  Description of Artificial Sequence: Synthetic oligonucleotide
  Sense strand starting at position 829 of SEQ ID NO: 1563015
uagagcuugugugcaaaca

SEQ ID NO: 1789058 - RNA, 19 nt, Artificial Sequence
  Description of Artificial Sequence: Synthetic oligonucleotide
  Antisense strand to SEQ ID NO: 1789057
uguuugcacacaagcucua

SEQ ID NO: 1789059 - RNA, 19 nt, Artificial Sequence
  Description of Artificial Sequence: Synthetic oligonucleotide
  Sense strand starting at position 976 of SEQ ID NO: 1563015
uugacuuucccaggacucu

SEQ ID NO: 1789060 - RNA, 19 nt, Artificial Sequence
  Description of Artificial Sequence: Synthetic oligonucleotide
  Antisense strand to SEQ ID NO: 1789059
agaguccugggaaagucaa

SEQ ID NO: 1789061 - RNA, 19 nt, Artificial Sequence
  Description of Artificial Sequence: Synthetic oligonucleotide
  Sense strand starting at position 1040 of SEQ ID NO: 1563015
uucuuagauggguguccuu

SEQ ID NO: 1789062 - RNA, 19 nt, Artificial Sequence
  Description of Artificial Sequence: Synthetic oligonucleotide
  Antisense strand to SEQ ID NO: 1789061
aaggacacccaucuaagaa

SEQ ID NO: 1789063 - RNA, 19 nt, Artificial Sequence
  Description of Artificial Sequence: Synthetic oligonucleotide
  Sense strand starting at position 1052 of SEQ ID NO: 1563015
uguccuugagcaggugauu

SEQ ID NO: 1789064 - RNA, 19 nt, Artificial Sequence
  Description of Artificial Sequence: Synthetic oligonucleotide
  Antisense strand to SEQ ID NO: 1789063
aaucaccugcucaaggaca

SEQ ID NO: 1789065 - RNA, 19 nt, Artificial Sequence
  Description of Artificial Sequence: Synthetic oligonucleotide
  Sense strand starting at position 1109 of SEQ ID NO: 1563015
ugcugugauuauucuguga

SEQ ID NO: 1789066 - RNA, 19 nt, Artificial Sequence
  Description of Artificial Sequence: Synthetic oligonucleotide
  Antisense strand to SEQ ID NO: 1789065
ucacagaauaaucacagca

SEQ ID NO: 1789067 - RNA, 19 nt, Artificial Sequence
  Description of Artificial Sequence: Synthetic oligonucleotide
  Sense strand starting at position 1112 of SEQ ID NO: 1563015
ugugauuauucugugacau

SEQ ID NO: 1789068 - RNA, 19 nt, Artificial Sequence
  Description of Artificial Sequence: Synthetic oligonucleotide
  Antisense strand to SEQ ID NO: 1789067
augucacagaauaaucaca

SEQ ID NO: 1789069 - RNA, 19 nt, Artificial Sequence
  Description of Artificial Sequence: Synthetic oligonucleotide
  Sense strand starting at position 1113 of SEQ ID NO: 1563015
gugauuauucugugacaug

SEQ ID NO: 1789070 - RNA, 19 nt, Artificial Sequence
  Description of Artificial Sequence: Synthetic oligonucleotide
  Antisense strand to SEQ ID NO: 1789069
caugucacagaauaaucac

SEQ ID NO: 1789071 - RNA, 19 nt, Artificial Sequence
  Description of Artificial Sequence: Synthetic oligonucleotide
  Sense strand starting at position 1162 of SEQ ID NO: 1563015
aggccuuggcauuauuaau

SEQ ID NO: 1789072 - RNA, 19 nt, Artificial Sequence
  Description of Artificial Sequence: Synthetic oligonucleotide
  Antisense strand to SEQ ID NO: 1789071
auuaauaaugccaaggccu

SEQ ID NO: 1789073 - RNA, 19 nt, Artificial Sequence
  Description of Artificial Sequence: Synthetic oligonucleotide
  Sense strand starting at position 1232 of SEQ ID NO: 1563015
gagcuauugcucuggagag

SEQ ID NO: 1789074 - RNA, 19 nt, Artificial Sequence
  Description of Artificial Sequence: Synthetic oligonucleotide
  Antisense strand to SEQ ID NO: 1789073
cucuccagagcaauagcuc

SEQ ID NO: 1789075 - RNA, 19 nt, Artificial Sequence
  Description of Artificial Sequence: Synthetic oligonucleotide
  Sense strand starting at position 1298 of SEQ ID NO: 1563015
agcaguuacuguuuaaaca

SEQ ID NO: 1789076 - RNA, 19 nt, Artificial Sequence
  Description of Artificial Sequence: Synthetic oligonucleotide
  Antisense strand to SEQ ID NO: 1789075
uguuuaaacaguaacugcu

SEQ ID NO: 1789077 - RNA, 19 nt, Artificial Sequence
  Description of Artificial Sequence: Synthetic oligonucleotide
  Sense strand starting at position 1299 of SEQ ID NO: 1563015
gcaguuacuguuuaaacag

SEQ ID NO: 1789078 - RNA, 19 nt, Artificial Sequence
  Description of Artificial Sequence: Synthetic oligonucleotide
  Antisense strand to SEQ ID NO: 1789077
cuguuuaaacaguaacugc

SEQ ID NO: 1789079 - RNA, 19 nt, Artificial Sequence
  Description of Artificial Sequence: Synthetic oligonucleotide
  Sense strand starting at position 2337 of SEQ ID NO: 1563015
caggcaaacugagaagauu

SEQ ID NO: 1789080 - RNA, 19 nt, Artificial Sequence
  Description of Artificial Sequence: Synthetic oligonucleotide
  Antisense strand to SEQ ID NO: 1789079
aaucuucucaguuugccug

SEQ ID NO: 1789081 - RNA, 19 nt, Artificial Sequence
  Description of Artificial Sequence: Synthetic oligonucleotide
  Sense strand starting at position 2408 of SEQ ID NO: 1563015
ggcagagaaggauguaauc

SEQ ID NO: 1789082 - RNA, 19 nt, Artificial Sequence
  Description of Artificial Sequence: Synthetic oligonucleotide
  Antisense strand to SEQ ID NO: 1789081
gauuacauccuucucugcc

SEQ ID NO: 1789083 - RNA, 19 nt, Artificial Sequence
  Description of Artificial Sequence: Synthetic oligonucleotide
  Sense strand starting at position 2485 of SEQ ID NO: 1563015
gaacacucucagugacaga

SEQ ID NO: 1789084 - RNA, 19 nt, Artificial Sequence
  Description of Artificial Sequence: Synthetic oligonucleotide
  Antisense strand to SEQ ID NO: 1789083
ucugucacugagaguguuc

SEQ ID NO: 1789085 - RNA, 19 nt, Artificial Sequence
  Description of Artificial Sequence: Synthetic oligonucleotide
  Sense strand starting at position 2523 of SEQ ID NO: 1563015
cccagugcugcccaucaaa

SEQ ID NO: 1789086 - RNA, 19 nt, Artificial Sequence
  Description of Artificial Sequence: Synthetic oligonucleotide
  Antisense strand to SEQ ID NO: 1789085
uuugaugggcagcacuggg

SEQ ID NO: 1789087 - RNA, 19 nt, Artificial Sequence
  Description of Artificial Sequence: Synthetic oligonucleotide
  Sense strand starting at position 2602 of SEQ ID NO: 1563015
caacuaaugucugucugga

SEQ ID NO: 1789088 - RNA, 19 nt, Artificial Sequence
  Description of Artificial Sequence: Synthetic oligonucleotide
  Antisense strand to SEQ ID NO: 1789087
uccagacagacauuaguug

SEQ ID NO: 1789089 - RNA, 19 nt, Artificial Sequence
  Description of Artificial Sequence: Synthetic oligonucleotide
  Sense strand starting at position 2604 of SEQ ID NO: 1563015
acuaaugucugucuggaau

SEQ ID NO: 1789090 - RNA, 19 nt, Artificial Sequence
  Description of Artificial Sequence: Synthetic oligonucleotide
  Antisense strand to SEQ ID NO: 1789089
auuccagacagacauuagu

SEQ ID NO: 1789091 - RNA, 19 nt, Artificial Sequence
  Description of Artificial Sequence: Synthetic oligonucleotide
  Sense strand starting at position 2644 of SEQ ID NO: 1563015
cacuguggaugcuuaguua

SEQ ID NO: 1789092 - RNA, 19 nt, Artificial Sequence
  Description of Artificial Sequence: Synthetic oligonucleotide
  Antisense strand to SEQ ID NO: 1789091
uaacuaagcauccacagug

SEQ ID NO: 1789093 - RNA, 19 nt, Artificial Sequence
  Description of Artificial Sequence: Synthetic oligonucleotide
  Sense strand starting at position 2647 of SEQ ID NO: 1563015
uguggaugcuuaguuaaug

SEQ ID NO: 1789094 - RNA, 19 nt, Artificial Sequence
  Description of Artificial Sequence: Synthetic oligonucleotide
  Antisense strand to SEQ ID NO: 1789093
cauuaacuaagcauccaca

SEQ ID NO: 1789095 - RNA, 19 nt, Artificial Sequence
  Description of Artificial Sequence: Synthetic oligonucleotide
  Sense strand starting at position 2662 of SEQ ID NO: 1563015
aauguauggugacugacua

SEQ ID NO: 1789096 - RNA, 19 nt, Artificial Sequence
  Description of Artificial Sequence: Synthetic oligonucleotide
  Antisense strand to SEQ ID NO: 1789095
uagucagucaccauacauu

SEQ ID NO: 1789097 - RNA, 19 nt, Artificial Sequence
  Description of Artificial Sequence: Synthetic oligonucleotide
  Sense strand starting at position 2663 of SEQ ID NO: 1563015
auguauggugacugacuaa

SEQ ID NO: 1789098 - RNA, 19 nt, Artificial Sequence
  Description of Artificial Sequence: Synthetic oligonucleotide
  Antisense strand to SEQ ID NO: 1789097
uuagucagucaccauacau

SEQ ID NO: 1789099 - RNA, 19 nt, Artificial Sequence
  Description of Artificial Sequence: Synthetic oligonucleotide
  Sense strand starting at position 2912 of SEQ ID NO: 1563015
uuaggauccuugccucuua

SEQ ID NO: 1789100 - RNA, 19 nt, Artificial Sequence
  Description of Artificial Sequence: Synthetic oligonucleotide
  Antisense strand to SEQ ID NO: 1789099
uaagaggcaaggauccuaa

SEQ ID NO: 1789101 - RNA, 19 nt, Artificial Sequence
  Description of Artificial Sequence: Synthetic oligonucleotide
  Sense strand starting at position 2934 of SEQ ID NO: 1563015
aguuacucugucuggguua

SEQ ID NO: 1789102 - RNA, 19 nt, Artificial Sequence
  Description of Artificial Sequence: Synthetic oligonucleotide
  Antisense strand to SEQ ID NO: 1789101
uaacccagacagaguaacu

SEQ ID NO: 1789103 - RNA, 19 nt, Artificial Sequence
  Description of Artificial Sequence: Synthetic oligonucleotide
  Sense strand starting at position 2936 of SEQ ID NO: 1563015
uuacucugucuggguuaaa

SEQ ID NO: 1789104 - RNA, 19 nt, Artificial Sequence
  Description of Artificial Sequence: Synthetic oligonucleotide
  Antisense strand to SEQ ID NO: 1789103
uuuaacccagacagaguaa

SEQ ID NO: 1789105 - RNA, 19 nt, Artificial Sequence
  Description of Artificial Sequence: Synthetic oligonucleotide
  Sense strand starting at position 2937 of SEQ ID NO: 1563015
uacucugucuggguuaaac

SEQ ID NO: 1789106 - RNA, 19 nt, Artificial Sequence
  Description of Artificial Sequence: Synthetic oligonucleotide
  Antisense strand to SEQ ID NO: 1789105
guuuaacccagacagagua

SEQ ID NO: 1789107 - RNA, 19 nt, Artificial Sequence
  Description of Artificial Sequence: Synthetic oligonucleotide
  Sense strand starting at position 3060 of SEQ ID NO: 1563015
ggacacccaugggauuaua

SEQ ID NO: 1789108 - RNA, 19 nt, Artificial Sequence
  Description of Artificial Sequence: Synthetic oligonucleotide
  Antisense strand to SEQ ID NO: 1789107
uauaaucccaugggugucc

SEQ ID NO: 1789109 - RNA, 19 nt, Artificial Sequence
  Description of Artificial Sequence: Synthetic oligonucleotide
  Sense strand starting at position 3068 of SEQ ID NO: 1563015
augggauuauaagaagauc

SEQ ID NO: 1789110 - RNA, 19 nt, Artificial Sequence
  Description of Artificial Sequence: Synthetic oligonucleotide
  Antisense strand to SEQ ID NO: 1789109
gaucuucuuauaaucccau

SEQ ID NO: 1789111 - RNA, 19 nt, Artificial Sequence
  Description of Artificial Sequence: Synthetic oligonucleotide
  Sense strand starting at position 3212 of SEQ ID NO: 1563015
ggcguggagucucuuagga

SEQ ID NO: 1789112 - RNA, 19 nt, Artificial Sequence
  Description of Artificial Sequence: Synthetic oligonucleotide
  Antisense strand to SEQ ID NO: 1789111
uccuaagagacuccacgcc

SEQ ID NO: 1789113 - RNA, 19 nt, Artificial Sequence
  Description of Artificial Sequence: Synthetic oligonucleotide
  Sense strand starting at position 3332 of SEQ ID NO: 1563015
ucuagacauccggguucca

SEQ ID NO: 1789114 - RNA, 19 nt, Artificial Sequence
  Description of Artificial Sequence: Synthetic oligonucleotide
  Antisense strand to SEQ ID NO: 1789113
uggaacccggaugucuaga

SEQ ID NO: 1789115 - RNA, 19 nt, Artificial Sequence
  Description of Artificial Sequence: Synthetic oligonucleotide
  Sense strand starting at position 3883 of SEQ ID NO: 1563015
cucuuuguuccugagacca

SEQ ID NO: 1789116 - RNA, 19 nt, Artificial Sequence
  Description of Artificial Sequence: Synthetic oligonucleotide
  Antisense strand to SEQ ID NO: 1789115
uggucucaggaacaaagag

SEQ ID NO: 1789117 - RNA, 19 nt, Artificial Sequence
  Description of Artificial Sequence: Synthetic oligonucleotide
  Sense strand starting at position 67 of SEQ ID NO: 1563016
ccgucauuccuuucugcuu

SEQ ID NO: 1789118 - RNA, 19 nt, Artificial Sequence
  Description of Artificial Sequence: Synthetic oligonucleotide
  Antisense strand to SEQ ID NO: 1789117
aagcagaaaggaaugacgg

SEQ ID NO: 1789119 - RNA, 19 nt, Artificial Sequence
  Description of Artificial Sequence: Synthetic oligonucleotide
  Sense strand starting at position 68 of SEQ ID NO: 1563016
cgucauuccuuucugcuua

SEQ ID NO: 1789120 - RNA, 19 nt, Artificial Sequence
  Description of Artificial Sequence: Synthetic oligonucleotide
  Antisense strand to SEQ ID NO: 1789119
uaagcagaaaggaaugacg

SEQ ID NO: 1789121 - RNA, 19 nt, Artificial Sequence
  Description of Artificial Sequence: Synthetic oligonucleotide
  Sense strand starting at position 176 of SEQ ID NO: 1563016
uuguccuagucugaagaga

SEQ ID NO: 1789122 - RNA, 19 nt, Artificial Sequence
  Description of Artificial Sequence: Synthetic oligonucleotide
  Antisense strand to SEQ ID NO: 1789121
ucucuucagacuaggacaa

SEQ ID NO: 1789123 - RNA, 19 nt, Artificial Sequence
  Description of Artificial Sequence: Synthetic oligonucleotide
  Sense strand starting at position 230 of SEQ ID NO: 1563016
ccacauuccugaggaauua

SEQ ID NO: 1789124 - RNA, 19 nt, Artificial Sequence
  Description of Artificial Sequence: Synthetic oligonucleotide
  Antisense strand to SEQ ID NO: 1789123
uaauuccucaggaaugugg

SEQ ID NO: 1789125 - RNA, 19 nt, Artificial Sequence
  Description of Artificial Sequence: Synthetic oligonucleotide
  Sense strand starting at position 511 of SEQ ID NO: 1563016
aggcaucaguaacauuuau

SEQ ID NO: 1789126 - RNA, 19 nt, Artificial Sequence
  Description of Artificial Sequence: Synthetic oligonucleotide
  Antisense strand to SEQ ID NO: 1789125
auaaauguuacugaugccu

SEQ ID NO: 1789127 - RNA, 19 nt, Artificial Sequence
  Description of Artificial Sequence: Synthetic oligonucleotide
  Sense strand starting at position 663 of SEQ ID NO: 1563016
ggucaaaugaccugagcca

SEQ ID NO: 1789128 - RNA, 19 nt, Artificial Sequence
  Description of Artificial Sequence: Synthetic oligonucleotide
  Antisense strand to SEQ ID NO: 1789127
uggcucaggucauuugacc

SEQ ID NO: 1789129 - RNA, 19 nt, Artificial Sequence
  Description of Artificial Sequence: Synthetic oligonucleotide
  Sense strand starting at position 726 of SEQ ID NO: 1563016
ugaagauagcucugcuacu

SEQ ID NO: 1789130 - RNA, 19 nt, Artificial Sequence
  Description of Artificial Sequence: Synthetic oligonucleotide
  Antisense strand to SEQ ID NO: 1789129
aguagcagagcuaucuuca

SEQ ID NO: 1789131 - RNA, 19 nt, Artificial Sequence
  Description of Artificial Sequence: Synthetic oligonucleotide
  Sense strand starting at position 727 of SEQ ID NO: 1563016
gaagauagcucugcuacug

SEQ ID NO: 1789132 - RNA, 19 nt, Artificial Sequence
  Description of Artificial Sequence: Synthetic oligonucleotide
  Antisense strand to SEQ ID NO: 1789131
caguagcagagcuaucuuc

SEQ ID NO: 1789133 - RNA, 19 nt, Artificial Sequence
  Description of Artificial Sequence: Synthetic oligonucleotide
  Sense strand starting at position 910 of SEQ ID NO: 1563016
agccuucugugguacauuu

SEQ ID NO: 1789134 - RNA, 19 nt, Artificial Sequence
  Description of Artificial Sequence: Synthetic oligonucleotide
  Antisense strand to SEQ ID NO: 1789133
aaauguaccacagaaggcu

SEQ ID NO: 1789135 - RNA, 19 nt, Artificial Sequence
  Description of Artificial Sequence: Synthetic oligonucleotide
  Sense strand starting at position 1057 of SEQ ID NO: 1563016
ggguccuugucucugacaa

SEQ ID NO: 1789136 - RNA, 19 nt, Artificial Sequence
  Description of Artificial Sequence: Synthetic oligonucleotide
  Antisense strand to SEQ ID NO: 1789135
uugucagagacaaggaccc

SEQ ID NO: 1789137 - RNA, 19 nt, Artificial Sequence
  Description of Artificial Sequence: Synthetic oligonucleotide
  Sense strand starting at position 1058 of SEQ ID NO: 1563016
gguccuugucucugacaaa

SEQ ID NO: 1789138 - RNA, 19 nt, Artificial Sequence
  Description of Artificial Sequence: Synthetic oligonucleotide
  Antisense strand to SEQ ID NO: 1789137
uuugucagagacaaggacc

SEQ ID NO: 1789139 - RNA, 19 nt, Artificial Sequence
  Description of Artificial Sequence: Synthetic oligonucleotide
  Sense strand starting at position 1406 of SEQ ID NO: 1563016
gaaacugcccagugaaauu

SEQ ID NO: 1789140 - RNA, 19 nt, Artificial Sequence
  Description of Artificial Sequence: Synthetic oligonucleotide
  Antisense strand to SEQ ID NO: 1789139
aauuucacugggcaguuuc

SEQ ID NO: 1789141 - RNA, 19 nt, Artificial Sequence
  Description of Artificial Sequence: Synthetic oligonucleotide
  Sense strand starting at position 1415 of SEQ ID NO: 1563016
cagugaaauucucccggga

SEQ ID NO: 1789142 - RNA, 19 nt, Artificial Sequence
  Description of Artificial Sequence: Synthetic oligonucleotide
  Antisense strand to SEQ ID NO: 1789141
ucccgggagaauuucacug

SEQ ID NO: 1789143 - RNA, 19 nt, Artificial Sequence
  Description of Artificial Sequence: Synthetic oligonucleotide
  Sense strand starting at position 2221 of SEQ ID NO: 1563016
aucuguccuuucccagaga

SEQ ID NO: 1789144 - RNA, 19 nt, Artificial Sequence
  Description of Artificial Sequence: Synthetic oligonucleotide
  Antisense strand to SEQ ID NO: 1789143
ucucugggaaaggacagau

SEQ ID NO: 1789145 - RNA, 19 nt, Artificial Sequence
  Description of Artificial Sequence: Synthetic oligonucleotide
  Sense strand starting at position 2285 of SEQ ID NO: 1563016
gcccgagccucgcuuaaga

SEQ ID NO: 1789146 - RNA, 19 nt, Artificial Sequence
  Description of Artificial Sequence: Synthetic oligonucleotide
  Antisense strand to SEQ ID NO: 1789145
ucuuaagcgaggcucgggc

SEQ ID NO: 1789147 - RNA, 19 nt, Artificial Sequence
  Description of Artificial Sequence: Synthetic oligonucleotide
  Sense strand starting at position 2287 of SEQ ID NO: 1563016
ccgagccucgcuuaagaga

SEQ ID NO: 1789148 - RNA, 19 nt, Artificial Sequence
  Description of Artificial Sequence: Synthetic oligonucleotide
  Antisense strand to SEQ ID NO: 1789147
ucucuuaagcgaggcucgg

SEQ ID NO: 1789149 - RNA, 19 nt, Artificial Sequence
  Description of Artificial Sequence: Synthetic oligonucleotide
  Sense strand starting at position 2336 of SEQ ID NO: 1563016
gccuguggauaccuugaga

SEQ ID NO: 1789150 - RNA, 19 nt, Artificial Sequence
  Description of Artificial Sequence: Synthetic oligonucleotide
  Antisense strand to SEQ ID NO: 1789149
ucucaagguauccacaggc

SEQ ID NO: 1789151 - RNA, 19 nt, Artificial Sequence
  Description of Artificial Sequence: Synthetic oligonucleotide
  Sense strand starting at position 2549 of SEQ ID NO: 1563016
ugcgcugguccgagaacau

SEQ ID NO: 1789152 - RNA, 19 nt, Artificial Sequence
  Description of Artificial Sequence: Synthetic oligonucleotide
  Antisense strand to SEQ ID NO: 1789151
auguucucggaccagcgca

SEQ ID NO: 1789153 - RNA, 19 nt, Artificial Sequence
  Description of Artificial Sequence: Synthetic oligonucleotide
  Sense strand starting at position 2677 of SEQ ID NO: 1563016
gugggucacuugucuucua

SEQ ID NO: 1789154 - RNA, 19 nt, Artificial Sequence
  Description of Artificial Sequence: Synthetic oligonucleotide
  Antisense strand to SEQ ID NO: 1789153
uagaagacaagugacccac

SEQ ID NO: 1789155 - RNA, 19 nt, Artificial Sequence
  Description of Artificial Sequence: Synthetic oligonucleotide
  Sense strand starting at position 2680 of SEQ ID NO: 1563016
ggucacuugucuucuaggu

SEQ ID NO: 1789156 - RNA, 19 nt, Artificial Sequence
  Description of Artificial Sequence: Synthetic oligonucleotide
  Antisense strand to SEQ ID NO: 1789155
accuagaagacaagugacc

SEQ ID NO: 1789157 - RNA, 19 nt, Artificial Sequence
  Description of Artificial Sequence: Synthetic oligonucleotide
  Sense strand starting at position 2684 of SEQ ID NO: 1563016
acuugucuucuagguaaag

SEQ ID NO: 1789158 - RNA, 19 nt, Artificial Sequence
  Description of Artificial Sequence: Synthetic oligonucleotide
  Antisense strand to SEQ ID NO: 1789157
cuuuaccuagaagacaagu

SEQ ID NO: 1789159 - RNA, 19 nt, Artificial Sequence
  Description of Artificial Sequence: Synthetic oligonucleotide
  Sense strand starting at position 2685 of SEQ ID NO: 1563016
cuugucuucuagguaaagu

SEQ ID NO: 1789160 - RNA, 19 nt, Artificial Sequence
  Description of Artificial Sequence: Synthetic oligonucleotide
  Antisense strand to SEQ ID NO: 1789159
acuuuaccuagaagacaag

SEQ ID NO: 1789161 - RNA, 19 nt, Artificial Sequence
  Description of Artificial Sequence: Synthetic oligonucleotide
  Sense strand starting at position 2686 of SEQ ID NO: 1563016
uugucuucuagguaaagua

SEQ ID NO: 1789162 - RNA, 19 nt, Artificial Sequence
  Description of Artificial Sequence: Synthetic oligonucleotide
  Antisense strand to SEQ ID NO: 1789161
uacuuuaccuagaagacaa

SEQ ID NO: 1789163 - RNA, 19 nt, Artificial Sequence
  Description of Artificial Sequence: Synthetic oligonucleotide
  Sense strand starting at position 2913 of SEQ ID NO: 1563016
accugagaucuggguccau

SEQ ID NO: 1789164 - RNA, 19 nt, Artificial Sequence
  Description of Artificial Sequence: Synthetic oligonucleotide
  Antisense strand to SEQ ID NO: 1789163
auggacccagaucucaggu

SEQ ID NO: 1789165 - RNA, 19 nt, Artificial Sequence
  Description of Artificial Sequence: Synthetic oligonucleotide
  Sense strand starting at position 2963 of SEQ ID NO: 1563016
ccuagagcuugugugcaaa

SEQ ID NO: 1789166 - RNA, 19 nt, Artificial Sequence
  Description of Artificial Sequence: Synthetic oligonucleotide
  Antisense strand to SEQ ID NO: 1789165
uuugcacacaagcucuagg

SEQ ID NO: 1789167 - RNA, 19 nt, Artificial Sequence
  Description of Artificial Sequence: Synthetic oligonucleotide
  Sense strand starting at position 2965 of SEQ ID NO: 1563016
uagagcuugugugcaaaca

SEQ ID NO: 1789168 - RNA, 19 nt, Artificial Sequence
  Description of Artificial Sequence: Synthetic oligonucleotide
  Antisense strand to SEQ ID NO: 1789167
uguuugcacacaagcucua

SEQ ID NO: 1789169 - RNA, 19 nt, Artificial Sequence
  Description of Artificial Sequence: Synthetic oligonucleotide
  Sense strand starting at position 3112 of SEQ ID NO: 1563016
uugacuuucccaggacucu

SEQ ID NO: 1789170 - RNA, 19 nt, Artificial Sequence
  Description of Artificial Sequence: Synthetic oligonucleotide
  Antisense strand to SEQ ID NO: 1789169
agaguccugggaaagucaa

SEQ ID NO: 1789171 - RNA, 19 nt, Artificial Sequence
  Description of Artificial Sequence: Synthetic oligonucleotide
  Sense strand starting at position 3176 of SEQ ID NO: 1563016
uucuuagauggguguccuu

SEQ ID NO: 1789172 - RNA, 19 nt, Artificial Sequence
  Description of Artificial Sequence: Synthetic oligonucleotide
  Antisense strand to SEQ ID NO: 1789171
aaggacacccaucuaagaa

SEQ ID NO: 1789173 - RNA, 19 nt, Artificial Sequence
  Description of Artificial Sequence: Synthetic oligonucleotide
  Sense strand starting at position 3188 of SEQ ID NO: 1563016
uguccuugagcaggugauu

SEQ ID NO: 1789174 - RNA, 19 nt, Artificial Sequence
  Description of Artificial Sequence: Synthetic oligonucleotide
  Antisense strand to SEQ ID NO: 1789173
aaucaccugcucaaggaca

SEQ ID NO: 1789175 - RNA, 19 nt, Artificial Sequence
  Description of Artificial Sequence: Synthetic oligonucleotide
  Sense strand starting at position 3245 of SEQ ID NO: 1563016
ugcugugauuauucuguga

SEQ ID NO: 1789176 - RNA, 19 nt, Artificial Sequence
  Description of Artificial Sequence: Synthetic oligonucleotide
  Antisense strand to SEQ ID NO: 1789175
ucacagaauaaucacagca

SEQ ID NO: 1789177 - RNA, 19 nt, Artificial Sequence
  Description of Artificial Sequence: Synthetic oligonucleotide
  Sense strand starting at position 3248 of SEQ ID NO: 1563016
ugugauuauucugugacau

SEQ ID NO: 1789178 - RNA, 19 nt, Artificial Sequence
  Description of Artificial Sequence: Synthetic oligonucleotide
  Antisense strand to SEQ ID NO: 1789177
augucacagaauaaucaca

SEQ ID NO: 1789179 - RNA, 19 nt, Artificial Sequence
  Description of Artificial Sequence: Synthetic oligonucleotide
  Sense strand starting at position 3249 of SEQ ID NO: 1563016
gugauuauucugugacaug

SEQ ID NO: 1789180 - RNA, 19 nt, Artificial Sequence
  Description of Artificial Sequence: Synthetic oligonucleotide
  Antisense strand to SEQ ID NO: 1789179
caugucacagaauaaucac

SEQ ID NO: 1789181 - RNA, 19 nt, Artificial Sequence
  Description of Artificial Sequence: Synthetic oligonucleotide
  Sense strand starting at position 3250 of SEQ ID NO: 1563016
ugauuauucugugacaugg

SEQ ID NO: 1789182 - RNA, 19 nt, Artificial Sequence
  Description of Artificial Sequence: Synthetic oligonucleotide
  Antisense strand to SEQ ID NO: 1789181
ccaugucacagaauaauca

SEQ ID NO: 1789183 - RNA, 19 nt, Artificial Sequence
  Description of Artificial Sequence: Synthetic oligonucleotide
  Sense strand starting at position 3252 of SEQ ID NO: 1563016
auuauucugugacauggua

SEQ ID NO: 1789184 - RNA, 19 nt, Artificial Sequence
  Description of Artificial Sequence: Synthetic oligonucleotide
  Antisense strand to SEQ ID NO: 1789183
uaccaugucacagaauaau

SEQ ID NO: 1789185 - RNA, 19 nt, Artificial Sequence
  Description of Artificial Sequence: Synthetic oligonucleotide
  Sense strand starting at position 3298 of SEQ ID NO: 1563016
aggccuuggcauuauuaau

SEQ ID NO: 1789186 - RNA, 19 nt, Artificial Sequence
  Description of Artificial Sequence: Synthetic oligonucleotide
  Antisense strand to SEQ ID NO: 1789185
auuaauaaugccaaggccu

SEQ ID NO: 1789187 - RNA, 19 nt, Artificial Sequence
  Description of Artificial Sequence: Synthetic oligonucleotide
  Sense strand starting at position 3355 of SEQ ID NO: 1563016
gugggcauugcccgagcua

SEQ ID NO: 1789188 - RNA, 19 nt, Artificial Sequence
  Description of Artificial Sequence: Synthetic oligonucleotide
  Antisense strand to SEQ ID NO: 1789187
uagcucgggcaaugcccac

SEQ ID NO: 1789189 - RNA, 19 nt, Artificial Sequence
  Description of Artificial Sequence: Synthetic oligonucleotide
  Sense strand starting at position 3356 of SEQ ID NO: 1563016
ugggcauugcccgagcuau

SEQ ID NO: 1789190 - RNA, 19 nt, Artificial Sequence
  Description of Artificial Sequence: Synthetic oligonucleotide
  Antisense strand to SEQ ID NO: 1789189
auagcucgggcaaugccca

SEQ ID NO: 1789191 - RNA, 19 nt, Artificial Sequence
  Description of Artificial Sequence: Synthetic oligonucleotide
  Sense strand starting at position 3368 of SEQ ID NO: 1563016
gagcuauugcucuggagag

SEQ ID NO: 1789192 - RNA, 19 nt, Artificial Sequence
  Description of Artificial Sequence: Synthetic oligonucleotide
  Antisense strand to SEQ ID NO: 1789191
cucuccagagcaauagcuc

SEQ ID NO: 1789193 - RNA, 19 nt, Artificial Sequence
  Description of Artificial Sequence: Synthetic oligonucleotide
  Sense strand starting at position 3434 of SEQ ID NO: 1563016
agcaguuacuguuuaaaca

SEQ ID NO: 1789194 - RNA, 19 nt, Artificial Sequence
  Description of Artificial Sequence: Synthetic oligonucleotide
  Antisense strand to SEQ ID NO: 1789193
uguuuaaacaguaacugcu

SEQ ID NO: 1789195 - RNA, 19 nt, Artificial Sequence
  Description of Artificial Sequence: Synthetic oligonucleotide
  Sense strand starting at position 3435 of SEQ ID NO: 1563016
gcaguuacuguuuaaacag

SEQ ID NO: 1789196 - RNA, 19 nt, Artificial Sequence
  Description of Artificial Sequence: Synthetic oligonucleotide
  Antisense strand to SEQ ID NO: 1789195
cuguuuaaacaguaacugc

SEQ ID NO: 1789197 - RNA, 19 nt, Artificial Sequence
  Description of Artificial Sequence: Synthetic oligonucleotide
  Sense strand starting at position 619 of SEQ ID NO: 1563017
uacacugugucuuccgauu

SEQ ID NO: 1789198 - RNA, 19 nt, Artificial Sequence
  Description of Artificial Sequence: Synthetic oligonucleotide
  Antisense strand to SEQ ID NO: 1789197
aaucggaagacacagugua

SEQ ID NO: 1789199 - RNA, 19 nt, Artificial Sequence
  Description of Artificial Sequence: Synthetic oligonucleotide
  Sense strand starting at position 773 of SEQ ID NO: 1563017
caggcaaacugagaagauu

SEQ ID NO: 1789200 - RNA, 19 nt, Artificial Sequence
  Description of Artificial Sequence: Synthetic oligonucleotide
  Antisense strand to SEQ ID NO: 1789199
aaucuucucaguuugccug

SEQ ID NO: 1789201 - RNA, 19 nt, Artificial Sequence
  Description of Artificial Sequence: Synthetic oligonucleotide
  Sense strand starting at position 844 of SEQ ID NO: 1563017
ggcagagaaggauguaauc

SEQ ID NO: 1789202 - RNA, 19 nt, Artificial Sequence
  Description of Artificial Sequence: Synthetic oligonucleotide
  Antisense strand to SEQ ID NO: 1789201
gauuacauccuucucugcc

SEQ ID NO: 1789203 - RNA, 19 nt, Artificial Sequence
  Description of Artificial Sequence: Synthetic oligonucleotide
  Sense strand starting at position 921 of SEQ ID NO: 1563017
gaacacucucagugacaga

SEQ ID NO: 1789204 - RNA, 19 nt, Artificial Sequence
  Description of Artificial Sequence: Synthetic oligonucleotide
  Antisense strand to SEQ ID NO: 1789203
ucugucacugagaguguuc

SEQ ID NO: 1789205 - RNA, 19 nt, Artificial Sequence
  Description of Artificial Sequence: Synthetic oligonucleotide
  Sense strand starting at position 959 of SEQ ID NO: 1563017
cccagugcugcccaucaaa

SEQ ID NO: 1789206 - RNA, 19 nt, Artificial Sequence
  Description of Artificial Sequence: Synthetic oligonucleotide
  Antisense strand to SEQ ID NO: 1789205
uuugaugggcagcacuggg

SEQ ID NO: 1789207 - RNA, 19 nt, Artificial Sequence
  Description of Artificial Sequence: Synthetic oligonucleotide
  Sense strand starting at position 1038 of SEQ ID NO: 1563017
caacuaaugucugucugga

SEQ ID NO: 1789208 - RNA, 19 nt, Artificial Sequence
  Description of Artificial Sequence: Synthetic oligonucleotide
  Antisense strand to SEQ ID NO: 1789207
uccagacagacauuaguug

SEQ ID NO: 1789209 - RNA, 19 nt, Artificial Sequence
  Description of Artificial Sequence: Synthetic oligonucleotide
  Sense strand starting at position 1040 of SEQ ID NO: 1563017
acuaaugucugucuggaau

SEQ ID NO: 1789210 - RNA, 19 nt, Artificial Sequence
  Description of Artificial Sequence: Synthetic oligonucleotide
  Antisense strand to SEQ ID NO: 1789209
auuccagacagacauuagu

SEQ ID NO: 1789211 - RNA, 19 nt, Artificial Sequence
  Description of Artificial Sequence: Synthetic oligonucleotide
  Sense strand starting at position 1042 of SEQ ID NO: 1563017
uaaugucugucuggaauuu

SEQ ID NO: 1789212 - RNA, 19 nt, Artificial Sequence
  Description of Artificial Sequence: Synthetic oligonucleotide
  Antisense strand to SEQ ID NO: 1789211
aaauuccagacagacauua

SEQ ID NO: 1789213 - RNA, 19 nt, Artificial Sequence
  Description of Artificial Sequence: Synthetic oligonucleotide
  Sense strand starting at position 1080 of SEQ ID NO: 1563017
cacuguggaugcuuaguua

SEQ ID NO: 1789214 - RNA, 19 nt, Artificial Sequence
  Description of Artificial Sequence: Synthetic oligonucleotide
  Antisense strand to SEQ ID NO: 1789213
uaacuaagcauccacagug

SEQ ID NO: 1789215 - RNA, 19 nt, Artificial Sequence
  Description of Artificial Sequence: Synthetic oligonucleotide
  Sense strand starting at position 1083 of SEQ ID NO: 1563017
uguggaugcuuaguuaaug

SEQ ID NO: 1789216 - RNA, 19 nt, Artificial Sequence
  Description of Artificial Sequence: Synthetic oligonucleotide
  Antisense strand to SEQ ID NO: 1789215
cauuaacuaagcauccaca

SEQ ID NO: 1789217 - RNA, 19 nt, Artificial Sequence
  Description of Artificial Sequence: Synthetic oligonucleotide
  Sense strand starting at position 1084 of SEQ ID NO: 1563017
guggaugcuuaguuaaugu

SEQ ID NO: 1789218 - RNA, 19 nt, Artificial Sequence
  Description of Artificial Sequence: Synthetic oligonucleotide
  Antisense strand to SEQ ID NO: 1789217
acauuaacuaagcauccac

SEQ ID NO: 1789219 - RNA, 19 nt, Artificial Sequence
  Description of Artificial Sequence: Synthetic oligonucleotide
  Sense strand starting at position 1093 of SEQ ID NO: 1563017
uaguuaauguauggugacu

SEQ ID NO: 1789220 - RNA, 19 nt, Artificial Sequence
  Description of Artificial Sequence: Synthetic oligonucleotide
  Antisense strand to SEQ ID NO: 1789219
agucaccauacauuaacua

SEQ ID NO: 1789221 - RNA, 19 nt, Artificial Sequence
  Description of Artificial Sequence: Synthetic oligonucleotide
  Sense strand starting at position 1095 of SEQ ID NO: 1563017
guuaauguauggugacuga

SEQ ID NO: 1789222 - RNA, 19 nt, Artificial Sequence
  Description of Artificial Sequence: Synthetic oligonucleotide
  Antisense strand to SEQ ID NO: 1789221
ucagucaccauacauuaac

SEQ ID NO: 1789223 - RNA, 19 nt, Artificial Sequence
  Description of Artificial Sequence: Synthetic oligonucleotide
  Sense strand starting at position 1098 of SEQ ID NO: 1563017
aauguauggugacugacua

SEQ ID NO: 1789224 - RNA, 19 nt, Artificial Sequence
  Description of Artificial Sequence: Synthetic oligonucleotide
  Antisense strand to SEQ ID NO: 1789223
uagucagucaccauacauu

SEQ ID NO: 1789225 - RNA, 19 nt, Artificial Sequence
  Description of Artificial Sequence: Synthetic oligonucleotide
  Sense strand starting at position 1099 of SEQ ID NO: 1563017
auguauggugacugacuaa

SEQ ID NO: 1789226 - RNA, 19 nt, Artificial Sequence
  Description of Artificial Sequence: Synthetic oligonucleotide
  Antisense strand to SEQ ID NO: 1789225
uuagucagucaccauacau

SEQ ID NO: 1789227 - RNA, 19 nt, Artificial Sequence
  Description of Artificial Sequence: Synthetic oligonucleotide
  Sense strand starting at position 1348 of SEQ ID NO: 1563017
uuaggauccuugccucuua

SEQ ID NO: 1789228 - RNA, 19 nt, Artificial Sequence
  Description of Artificial Sequence: Synthetic oligonucleotide
  Antisense strand to SEQ ID NO: 1789227
uaagaggcaaggauccuaa

SEQ ID NO: 1789229 - RNA, 19 nt, Artificial Sequence
  Description of Artificial Sequence: Synthetic oligonucleotide
  Sense strand starting at position 1370 of SEQ ID NO: 1563017
aguuacucugucuggguua

SEQ ID NO: 1789230 - RNA, 19 nt, Artificial Sequence
  Description of Artificial Sequence: Synthetic oligonucleotide
  Antisense strand to SEQ ID NO: 1789229
uaacccagacagaguaacu

SEQ ID NO: 1789231 - RNA, 19 nt, Artificial Sequence
  Description of Artificial Sequence: Synthetic oligonucleotide
  Sense strand starting at position 1371 of SEQ ID NO: 1563017
guuacucugucuggguuaa

SEQ ID NO: 1789232 - RNA, 19 nt, Artificial Sequence
  Description of Artificial Sequence: Synthetic oligonucleotide
  Antisense strand to SEQ ID NO: 1789231
uuaacccagacagaguaac

SEQ ID NO: 1789233 - RNA, 19 nt, Artificial Sequence
  Description of Artificial Sequence: Synthetic oligonucleotide
  Sense strand starting at position 1372 of SEQ ID NO: 1563017
uuacucugucuggguuaaa

SEQ ID NO: 1789234 - RNA, 19 nt, Artificial Sequence
  Description of Artificial Sequence: Synthetic oligonucleotide
  Antisense strand to SEQ ID NO: 1789233
uuuaacccagacagaguaa

SEQ ID NO: 1789235 - RNA, 19 nt, Artificial Sequence
  Description of Artificial Sequence: Synthetic oligonucleotide
  Sense strand starting at position 1373 of SEQ ID NO: 1563017
uacucugucuggguuaaac

SEQ ID NO: 1789236 - RNA, 19 nt, Artificial Sequence
  Description of Artificial Sequence: Synthetic oligonucleotide
  Antisense strand to SEQ ID NO: 1789235
guuuaacccagacagagua

SEQ ID NO: 1789237 - RNA, 19 nt, Artificial Sequence
  Description of Artificial Sequence: Synthetic oligonucleotide
  Sense strand starting at position 1496 of SEQ ID NO: 1563017
ggacacccaugggauuaua

SEQ ID NO: 1789238 - RNA, 19 nt, Artificial Sequence
  Description of Artificial Sequence: Synthetic oligonucleotide
  Antisense strand to SEQ ID NO: 1789237
uauaaucccaugggugucc

SEQ ID NO: 1789239 - RNA, 19 nt, Artificial Sequence
  Description of Artificial Sequence: Synthetic oligonucleotide
  Sense strand starting at position 1504 of SEQ ID NO: 1563017
augggauuauaagaagauc

SEQ ID NO: 1789240 - RNA, 19 nt, Artificial Sequence
  Description of Artificial Sequence: Synthetic oligonucleotide
  Antisense strand to SEQ ID NO: 1789239
gaucuucuuauaaucccau

SEQ ID NO: 1789241 - RNA, 19 nt, Artificial Sequence
  Description of Artificial Sequence: Synthetic oligonucleotide
  Sense strand starting at position 1648 of SEQ ID NO: 1563017
ggcguggagucucuuagga

SEQ ID NO: 1789242 - RNA, 19 nt, Artificial Sequence
  Description of Artificial Sequence: Synthetic oligonucleotide
  Antisense strand to SEQ ID NO: 1789241
uccuaagagacuccacgcc

SEQ ID NO: 1789243 - RNA, 19 nt, Artificial Sequence
  Description of Artificial Sequence: Synthetic oligonucleotide
  Sense strand starting at position 1650 of SEQ ID NO: 1563017
cguggagucucuuaggaau

SEQ ID NO: 1789244 - RNA, 19 nt, Artificial Sequence
  Description of Artificial Sequence: Synthetic oligonucleotide
  Antisense strand to SEQ ID NO: 1789243
auuccuaagagacuccacg

SEQ ID NO: 1789245 - RNA, 19 nt, Artificial Sequence
  Description of Artificial Sequence: Synthetic oligonucleotide
  Sense strand starting at position 1768 of SEQ ID NO: 1563017
ucuagacauccggguucca

SEQ ID NO: 1789246 - RNA, 19 nt, Artificial Sequence
  Description of Artificial Sequence: Synthetic oligonucleotide
  Antisense strand to SEQ ID NO: 1789245
uggaacccggaugucuaga

SEQ ID NO: 1789247 - RNA, 19 nt, Artificial Sequence
  Description of Artificial Sequence: Synthetic oligonucleotide
  Sense strand starting at position 2146 of SEQ ID NO: 1563017
gucggaaauugggagucuu

SEQ ID NO: 1789248 - RNA, 19 nt, Artificial Sequence
  Description of Artificial Sequence: Synthetic oligonucleotide
  Antisense strand to SEQ ID NO: 1789247
aagacucccaauuuccgac

SEQ ID NO: 1789249 - RNA, 19 nt, Artificial Sequence
  Description of Artificial Sequence: Synthetic oligonucleotide
  Sense strand starting at position 2277 of SEQ ID NO: 1563017
guaggagucucagagccuu

SEQ ID NO: 1789250 - RNA, 19 nt, Artificial Sequence
  Description of Artificial Sequence: Synthetic oligonucleotide
  Antisense strand to SEQ ID NO: 1789249
aaggcucugagacuccuac

SEQ ID NO: 1789251 - RNA, 19 nt, Artificial Sequence
  Description of Artificial Sequence: Synthetic oligonucleotide
  Sense strand starting at position 2319 of SEQ ID NO: 1563017
cucuuuguuccugagacca

SEQ ID NO: 1789252 - RNA, 19 nt, Artificial Sequence
  Description of Artificial Sequence: Synthetic oligonucleotide
  Antisense strand to SEQ ID NO: 1789251
uggucucaggaacaaagag

SEQ ID NO: 1789253 - RNA, 19 nt, Artificial Sequence
  Description of Artificial Sequence: Synthetic oligonucleotide
  Sense strand starting at position 2367 of SEQ ID NO: 1563017
cgcgucaguguuuaagcuu

SEQ ID NO: 1789254 - RNA, 19 nt, Artificial Sequence
  Description of Artificial Sequence: Synthetic oligonucleotide
  Antisense strand to SEQ ID NO: 1789253
aagcuuaaacacugacgcg

SEQ ID NO: 1789255 - RNA, 19 nt, Artificial Sequence
  Description of Artificial Sequence: Synthetic oligonucleotide
  Sense strand starting at position 2589 of SEQ ID NO: 1563017
cccugagagucugccuuua

SEQ ID NO: 1789256 - RNA, 19 nt, Artificial Sequence
  Description of Artificial Sequence: Synthetic oligonucleotide
  Antisense strand to SEQ ID NO: 1789255
uaaaggcagacucucaggg

SEQ ID NO: 1789257 - RNA, 19 nt, Artificial Sequence
  Description of Artificial Sequence: Synthetic oligonucleotide
  Sense strand starting at position 2618 of SEQ ID NO: 1563017
aguccuaaauagggaauau

SEQ ID NO: 1789258 - RNA, 19 nt, Artificial Sequence
  Description of Artificial Sequence: Synthetic oligonucleotide
  Antisense strand to SEQ ID NO: 1789257
auauucccuauuuaggacu

SEQ ID NO: 1789259 - RNA, 19 nt, Artificial Sequence
  Description of Artificial Sequence: Synthetic oligonucleotide
  Sense strand starting at position 2636 of SEQ ID NO: 1563017
uggaguccaggcugucauu

SEQ ID NO: 1789260 - RNA, 19 nt, Artificial Sequence
  Description of Artificial Sequence: Synthetic oligonucleotide
  Antisense strand to SEQ ID NO: 1789259
aaugacagccuggacucca

SEQ ID NO: 1789261 - RNA, 19 nt, Artificial Sequence
  Description of Artificial Sequence: Synthetic oligonucleotide
  Sense strand starting at position 2808 of SEQ ID NO: 1563017
gacuaaaguggguggaguu

SEQ ID NO: 1789262 - RNA, 19 nt, Artificial Sequence
  Description of Artificial Sequence: Synthetic oligonucleotide
  Antisense strand to SEQ ID NO: 1789261
aacuccacccacuuuaguc

SEQ ID NO: 1789263 - RNA, 19 nt, Artificial Sequence
  Description of Artificial Sequence: Synthetic oligonucleotide
  Sense strand starting at position 2888 of SEQ ID NO: 1563017
ugccauguaccaggcauau

SEQ ID NO: 1789264 - RNA, 19 nt, Artificial Sequence
  Description of Artificial Sequence: Synthetic oligonucleotide
  Antisense strand to SEQ ID NO: 1789263
auaugccugguacauggca

SEQ ID NO: 1789265 - RNA, 19 nt, Artificial Sequence
  Description of Artificial Sequence: Synthetic oligonucleotide
  Sense strand starting at position 2968 of SEQ ID NO: 1563017
gcugauaaguaguaaagcu

SEQ ID NO: 1789266 - RNA, 19 nt, Artificial Sequence
  Description of Artificial Sequence: Synthetic oligonucleotide
  Antisense strand to SEQ ID NO: 1789265
agcuuuacuacuuaucagc

SEQ ID NO: 1789267 - RNA, 19 nt, Artificial Sequence
  Description of Artificial Sequence: Synthetic oligonucleotide
  Sense strand starting at position 3552 of SEQ ID NO: 1563017
gcgacuugucaaugcuaca

SEQ ID NO: 1789268 - RNA, 19 nt, Artificial Sequence
  Description of Artificial Sequence: Synthetic oligonucleotide
  Antisense strand to SEQ ID NO: 1789267
uguagcauugacaagucgc

SEQ ID NO: 1789269 - RNA, 19 nt, Artificial Sequence
  Description of Artificial Sequence: Synthetic oligonucleotide
  Sense strand starting at position 3591 of SEQ ID NO: 1563017
gcucacuucggaggacaua

SEQ ID NO: 1789270 - RNA, 19 nt, Artificial Sequence
  Description of Artificial Sequence: Synthetic oligonucleotide
  Antisense strand to SEQ ID NO: 1789269
uauguccuccgaagugagc

SEQ ID NO: 1789271 - RNA, 19 nt, Artificial Sequence
  Description of Artificial Sequence: Synthetic oligonucleotide
  Sense strand starting at position 3650 of SEQ ID NO: 1563017
uguuauuauccagaacgag

SEQ ID NO: 1789272 - RNA, 19 nt, Artificial Sequence
  Description of Artificial Sequence: Synthetic oligonucleotide
  Antisense strand to SEQ ID NO: 1789271
cucguucuggauaauaaca

SEQ ID NO: 1789273 - RNA, 19 nt, Artificial Sequence
  Description of Artificial Sequence: Synthetic oligonucleotide
  Sense strand starting at position 3807 of SEQ ID NO: 1563017
uggccugcuuugugcuaau

SEQ ID NO: 1789274 - RNA, 19 nt, Artificial Sequence
  Description of Artificial Sequence: Synthetic oligonucleotide
  Antisense strand to SEQ ID NO: 1789273
auuagcacaaagcaggcca

SEQ ID NO: 1789275 - RNA, 19 nt, Artificial Sequence
  Description of Artificial Sequence: Synthetic oligonucleotide
  Sense strand starting at position 3892 of SEQ ID NO: 1563017
gauuuacugucuggcacau

SEQ ID NO: 1789276 - RNA, 19 nt, Artificial Sequence
  Description of Artificial Sequence: Synthetic oligonucleotide
  Antisense strand to SEQ ID NO: 1789275
augugccagacaguaaauc

SEQ ID NO: 1789277 - RNA, 19 nt, Artificial Sequence
  Description of Artificial Sequence: Synthetic oligonucleotide
  Sense strand starting at position 304 of SEQ ID NO: 1563018
gagacugugguguacaaua

SEQ ID NO: 1789278 - RNA, 19 nt, Artificial Sequence
  Description of Artificial Sequence: Synthetic oligonucleotide
  Antisense strand to SEQ ID NO: 1789277
uauuguacaccacagucuc

SEQ ID NO: 1789279 - RNA, 19 nt, Artificial Sequence
  Description of Artificial Sequence: Synthetic oligonucleotide
  Sense strand starting at position 306 of SEQ ID NO: 1563018
gacugugguguacaauaaa

SEQ ID NO: 1789280 - RNA, 19 nt, Artificial Sequence
  Description of Artificial Sequence: Synthetic oligonucleotide
  Antisense strand to SEQ ID NO: 1789279
uuuauuguacaccacaguc

SEQ ID NO: 1789281 - RNA, 19 nt, Artificial Sequence
  Description of Artificial Sequence: Synthetic oligonucleotide
  Sense strand starting at position 931 of SEQ ID NO: 1563018
cggccagaauaauuguuau

SEQ ID NO: 1789282 - RNA, 19 nt, Artificial Sequence
  Description of Artificial Sequence: Synthetic oligonucleotide
  Antisense strand to SEQ ID NO: 1789281
auaacaauuauucuggccg

SEQ ID NO: 1789283 - RNA, 19 nt, Artificial Sequence
  Description of Artificial Sequence: Synthetic oligonucleotide
  Sense strand starting at position 934 of SEQ ID NO: 1563018
ccagaauaauuguuauuga

SEQ ID NO: 1789284 - RNA, 19 nt, Artificial Sequence
  Description of Artificial Sequence: Synthetic oligonucleotide
  Antisense strand to SEQ ID NO: 1789283
ucaauaacaauuauucugg

SEQ ID NO: 1789285 - RNA, 19 nt, Artificial Sequence
  Description of Artificial Sequence: Synthetic oligonucleotide
  Sense strand starting at position 942 of SEQ ID NO: 1563018
auuguuauugaagguacua

SEQ ID NO: 1789286 - RNA, 19 nt, Artificial Sequence
  Description of Artificial Sequence: Synthetic oligonucleotide
  Antisense strand to SEQ ID NO: 1789285
uaguaccuucaauaacaau

SEQ ID NO: 1789287 - RNA, 19 nt, Artificial Sequence
  Description of Artificial Sequence: Synthetic oligonucleotide
  Sense strand starting at position 953 of SEQ ID NO: 1563018
agguacuacucucugaaau

SEQ ID NO: 1789288 - RNA, 19 nt, Artificial Sequence
  Description of Artificial Sequence: Synthetic oligonucleotide
  Antisense strand to SEQ ID NO: 1789287
auuucagagaguaguaccu

SEQ ID NO: 1789289 - RNA, 19 nt, Artificial Sequence
  Description of Artificial Sequence: Synthetic oligonucleotide
  Sense strand starting at position 954 of SEQ ID NO: 1563018
gguacuacucucugaaauc

SEQ ID NO: 1789290 - RNA, 19 nt, Artificial Sequence
  Description of Artificial Sequence: Synthetic oligonucleotide
  Antisense strand to SEQ ID NO: 1789289
gauuucagagaguaguacc

SEQ ID NO: 1789291 - RNA, 19 nt, Artificial Sequence
  Description of Artificial Sequence: Synthetic oligonucleotide
  Sense strand starting at position 992 of SEQ ID NO: 1563018
ugaagaugaguuggagcaa

SEQ ID NO: 1789292 - RNA, 19 nt, Artificial Sequence
  Description of Artificial Sequence: Synthetic oligonucleotide
  Antisense strand to SEQ ID NO: 1789291
uugcuccaacucaucuuca

SEQ ID NO: 1789293 - RNA, 19 nt, Artificial Sequence
  Description of Artificial Sequence: Synthetic oligonucleotide
  Sense strand starting at position 1129 of SEQ ID NO: 1563018
uaccucuauugguugguua

SEQ ID NO: 1789294 - RNA, 19 nt, Artificial Sequence
  Description of Artificial Sequence: Synthetic oligonucleotide
  Antisense strand to SEQ ID NO: 1789293
uaaccaaccaauagaggua

SEQ ID NO: 1789295 - RNA, 19 nt, Artificial Sequence
  Description of Artificial Sequence: Synthetic oligonucleotide
  Sense strand starting at position 1157 of SEQ ID NO: 1563018
gucaaugaugcgggaagaa

SEQ ID NO: 1789296 - RNA, 19 nt, Artificial Sequence
  Description of Artificial Sequence: Synthetic oligonucleotide
  Antisense strand to SEQ ID NO: 1789295
uucuucccgcaucauugac

SEQ ID NO: 1789297 - RNA, 19 nt, Artificial Sequence
  Description of Artificial Sequence: Synthetic oligonucleotide
  Sense strand starting at position 1394 of SEQ ID NO: 1563018
gugagcuaggcguaagaaa

SEQ ID NO: 1789298 - RNA, 19 nt, Artificial Sequence
  Description of Artificial Sequence: Synthetic oligonucleotide
  Antisense strand to SEQ ID NO: 1789297
uuucuuacgccuagcucac

SEQ ID NO: 1789299 - RNA, 19 nt, Artificial Sequence
  Description of Artificial Sequence: Synthetic oligonucleotide
  Sense strand starting at position 1529 of SEQ ID NO: 1563018
gucacuaaggugcaagaau

SEQ ID NO: 1789300 - RNA, 19 nt, Artificial Sequence
  Description of Artificial Sequence: Synthetic oligonucleotide
  Antisense strand to SEQ ID NO: 1789299
auucuugcaccuuagugac

SEQ ID NO: 1789301 - RNA, 19 nt, Artificial Sequence
  Description of Artificial Sequence: Synthetic oligonucleotide
  Sense strand starting at position 1537 of SEQ ID NO: 1563018
ggugcaagaaucuaugcua

SEQ ID NO: 1789302 - RNA, 19 nt, Artificial Sequence
  Description of Artificial Sequence: Synthetic oligonucleotide
  Antisense strand to SEQ ID NO: 1789301
uagcauagauucuugcacc

SEQ ID NO: 1789303 - RNA, 19 nt, Artificial Sequence
  Description of Artificial Sequence: Synthetic oligonucleotide
  Sense strand starting at position 2415 of SEQ ID NO: 1563018
agaccagcauccuuggaga

SEQ ID NO: 1789304 - RNA, 19 nt, Artificial Sequence
  Description of Artificial Sequence: Synthetic oligonucleotide
  Antisense strand to SEQ ID NO: 1789303
ucuccaaggaugcuggucu

SEQ ID NO: 1789305 - RNA, 19 nt, Artificial Sequence
  Description of Artificial Sequence: Synthetic oligonucleotide
  Sense strand starting at position 2852 of SEQ ID NO: 1563018
gaagauggcuuucuuguaa

SEQ ID NO: 1789306 - RNA, 19 nt, Artificial Sequence
  Description of Artificial Sequence: Synthetic oligonucleotide
  Antisense strand to SEQ ID NO: 1789305
uuacaagaaagccaucuuc

SEQ ID NO: 1789307 - RNA, 19 nt, Artificial Sequence
  Description of Artificial Sequence: Synthetic oligonucleotide
  Sense strand starting at position 2926 of SEQ ID NO: 1563018
acgaaacacugucuugaaa

SEQ ID NO: 1789308 - RNA, 19 nt, Artificial Sequence
  Description of Artificial Sequence: Synthetic oligonucleotide
  Antisense strand to SEQ ID NO: 1789307
uuucaagacaguguuucgu

SEQ ID NO: 1789309 - RNA, 19 nt, Artificial Sequence
  Description of Artificial Sequence: Synthetic oligonucleotide
  Sense strand starting at position 3049 of SEQ ID NO: 1563018
aggagagugaacugucagu

SEQ ID NO: 1789310 - RNA, 19 nt, Artificial Sequence
  Description of Artificial Sequence: Synthetic oligonucleotide
  Antisense strand to SEQ ID NO: 1789309
acugacaguucacucuccu

SEQ ID NO: 1789311 - RNA, 19 nt, Artificial Sequence
  Description of Artificial Sequence: Synthetic oligonucleotide
  Sense strand starting at position 3110 of SEQ ID NO: 1563018
gaagucaugccagagcaau

SEQ ID NO: 1789312 - RNA, 19 nt, Artificial Sequence
  Description of Artificial Sequence: Synthetic oligonucleotide
  Antisense strand to SEQ ID NO: 1789311
auugcucuggcaugacuuc

SEQ ID NO: 1789313 - RNA, 19 nt, Artificial Sequence
  Description of Artificial Sequence: Synthetic oligonucleotide
  Sense strand starting at position 3168 of SEQ ID NO: 1563018
ugccuugagaucuggaaag

SEQ ID NO: 1789314 - RNA, 19 nt, Artificial Sequence
  Description of Artificial Sequence: Synthetic oligonucleotide
  Antisense strand to SEQ ID NO: 1789313
cuuuccagaucucaaggca

SEQ ID NO: 1789315 - RNA, 19 nt, Artificial Sequence
  Description of Artificial Sequence: Synthetic oligonucleotide
  Sense strand starting at position 3209 of SEQ ID NO: 1563018
ugaauuuguucccugcacu

SEQ ID NO: 1789316 - RNA, 19 nt, Artificial Sequence
  Description of Artificial Sequence: Synthetic oligonucleotide
  Antisense strand to SEQ ID NO: 1789315
agugcagggaacaaauuca

SEQ ID NO: 1789317 - RNA, 19 nt, Artificial Sequence
  Description of Artificial Sequence: Synthetic oligonucleotide
  Sense strand starting at position 3210 of SEQ ID NO: 1563018
gaauuuguucccugcacug

SEQ ID NO: 1789318 - RNA, 19 nt, Artificial Sequence
  Description of Artificial Sequence: Synthetic oligonucleotide
  Antisense strand to SEQ ID NO: 1789317
cagugcagggaacaaauuc

SEQ ID NO: 1789319 - RNA, 19 nt, Artificial Sequence
  Description of Artificial Sequence: Synthetic oligonucleotide
  Sense strand starting at position 3240 of SEQ ID NO: 1563018
ccauguccucuuggguaaa

SEQ ID NO: 1789320 - RNA, 19 nt, Artificial Sequence
  Description of Artificial Sequence: Synthetic oligonucleotide
  Antisense strand to SEQ ID NO: 1789319
uuuacccaagaggacaugg

SEQ ID NO: 1789321 - RNA, 19 nt, Artificial Sequence
  Description of Artificial Sequence: Synthetic oligonucleotide
  Sense strand starting at position 3242 of SEQ ID NO: 1563018
auguccucuuggguaaauu

SEQ ID NO: 1789322 - RNA, 19 nt, Artificial Sequence
  Description of Artificial Sequence: Synthetic oligonucleotide
  Antisense strand to SEQ ID NO: 1789321
aauuuacccaagaggacau

SEQ ID NO: 1789323 - RNA, 19 nt, Artificial Sequence
  Description of Artificial Sequence: Synthetic oligonucleotide
  Sense strand starting at position 3275 of SEQ ID NO: 1563018
ucuguauccuuaucuguaa

SEQ ID NO: 1789324 - RNA, 19 nt, Artificial Sequence
  Description of Artificial Sequence: Synthetic oligonucleotide
  Antisense strand to SEQ ID NO: 1789323
uuacagauaaggauacaga

SEQ ID NO: 1789325 - RNA, 19 nt, Artificial Sequence
  Description of Artificial Sequence: Synthetic oligonucleotide
  Sense strand starting at position 3319 of SEQ ID NO: 1563018
ugaguucuagcauaaagca

SEQ ID NO: 1789326 - RNA, 19 nt, Artificial Sequence
  Description of Artificial Sequence: Synthetic oligonucleotide
  Antisense strand to SEQ ID NO: 1789325
ugcuuuaugcuagaacuca

SEQ ID NO: 1789327 - RNA, 19 nt, Artificial Sequence
  Description of Artificial Sequence: Synthetic oligonucleotide
  Sense strand starting at position 3361 of SEQ ID NO: 1563018
gugggugagcaguaaaugu

SEQ ID NO: 1789328 - RNA, 19 nt, Artificial Sequence
  Description of Artificial Sequence: Synthetic oligonucleotide
  Antisense strand to SEQ ID NO: 1789327
acauuuacugcucacccac

SEQ ID NO: 1789329 - RNA, 19 nt, Artificial Sequence
  Description of Artificial Sequence: Synthetic oligonucleotide
  Sense strand starting at position 3404 of SEQ ID NO: 1563018
cgaugagacucagcacagu

SEQ ID NO: 1789330 - RNA, 19 nt, Artificial Sequence
  Description of Artificial Sequence: Synthetic oligonucleotide
  Antisense strand to SEQ ID NO: 1789329
acugugcugagucucaucg

SEQ ID NO: 1789331 - RNA, 19 nt, Artificial Sequence
  Description of Artificial Sequence: Synthetic oligonucleotide
  Sense strand starting at position 3417 of SEQ ID NO: 1563018
cacaguguuuagcucugaa

SEQ ID NO: 1789332 - RNA, 19 nt, Artificial Sequence
  Description of Artificial Sequence: Synthetic oligonucleotide
  Antisense strand to SEQ ID NO: 1789331
uucagagcuaaacacugug

SEQ ID NO: 1789333 - RNA, 19 nt, Artificial Sequence
  Description of Artificial Sequence: Synthetic oligonucleotide
  Sense strand starting at position 3420 of SEQ ID NO: 1563018
aguguuuagcucugaaagg

SEQ ID NO: 1789334 - RNA, 19 nt, Artificial Sequence
  Description of Artificial Sequence: Synthetic oligonucleotide
  Antisense strand to SEQ ID NO: 1789333
ccuuucagagcuaaacacu

SEQ ID NO: 1789335 - RNA, 19 nt, Artificial Sequence
  Description of Artificial Sequence: Synthetic oligonucleotide
  Sense strand starting at position 3552 of SEQ ID NO: 1563018
cugucugcugauggaugaa

SEQ ID NO: 1789336 - RNA, 19 nt, Artificial Sequence
  Description of Artificial Sequence: Synthetic oligonucleotide
  Antisense strand to SEQ ID NO: 1789335
uucauccaucagcagacag

SEQ ID NO: 1789337 - RNA, 19 nt, Artificial Sequence
  Description of Artificial Sequence: Synthetic oligonucleotide
  Sense strand starting at position 3662 of SEQ ID NO: 1563018
ugagaaggucccggcagau

SEQ ID NO: 1789338 - RNA, 19 nt, Artificial Sequence
  Description of Artificial Sequence: Synthetic oligonucleotide
  Antisense strand to SEQ ID NO: 1789337
aucugccgggaccuucuca

SEQ ID NO: 1789339 - RNA, 19 nt, Artificial Sequence
  Description of Artificial Sequence: Synthetic oligonucleotide
  Sense strand starting at position 3683 of SEQ ID NO: 1563018
gugcuaaccugacuucuag

SEQ ID NO: 1789340 - RNA, 19 nt, Artificial Sequence
  Description of Artificial Sequence: Synthetic oligonucleotide
  Antisense strand to SEQ ID NO: 1789339
cuagaagucagguuagcac

SEQ ID NO: 1789341 - RNA, 19 nt, Artificial Sequence
  Description of Artificial Sequence: Synthetic oligonucleotide
  Sense strand starting at position 3690 of SEQ ID NO: 1563018
ccugacuucuagcuaaaga

SEQ ID NO: 1789342 - RNA, 19 nt, Artificial Sequence
  Description of Artificial Sequence: Synthetic oligonucleotide
  Antisense strand to SEQ ID NO: 1789341
ucuuuagcuagaagucagg

SEQ ID NO: 1789343 - RNA, 19 nt, Artificial Sequence
  Description of Artificial Sequence: Synthetic oligonucleotide
  Sense strand starting at position 3784 of SEQ ID NO: 1563018
ucacuagugugacucuaga

SEQ ID NO: 1789344 - RNA, 19 nt, Artificial Sequence
  Description of Artificial Sequence: Synthetic oligonucleotide
  Antisense strand to SEQ ID NO: 1789343
ucuagagucacacuaguga

SEQ ID NO: 1789345 - RNA, 19 nt, Artificial Sequence
  Description of Artificial Sequence: Synthetic oligonucleotide
  Sense strand starting at position 3807 of SEQ ID NO: 1563018
ucaguucccuucucugaua

SEQ ID NO: 1789346 - RNA, 19 nt, Artificial Sequence
  Description of Artificial Sequence: Synthetic oligonucleotide
  Antisense strand to SEQ ID NO: 1789345
uaucagagaagggaacuga

SEQ ID NO: 1789347 - RNA, 19 nt, Artificial Sequence
  Description of Artificial Sequence: Synthetic oligonucleotide
  Sense strand starting at position 3839 of SEQ ID NO: 1563018
ugucaaauacaagguagua

SEQ ID NO: 1789348 - RNA, 19 nt, Artificial Sequence
  Description of Artificial Sequence: Synthetic oligonucleotide
  Antisense strand to SEQ ID NO: 1789347
uacuaccuuguauuugaca

SEQ ID NO: 1789349 - RNA, 19 nt, Artificial Sequence
  Description of Artificial Sequence: Synthetic oligonucleotide
  Sense strand starting at position 3866 of SEQ ID NO: 1563018
gaguauugugaagagcaac

SEQ ID NO: 1789350 - RNA, 19 nt, Artificial Sequence
  Description of Artificial Sequence: Synthetic oligonucleotide
  Antisense strand to SEQ ID NO: 1789349
guugcucuucacaauacuc

SEQ ID NO: 1789351 - RNA, 19 nt, Artificial Sequence
  Description of Artificial Sequence: Synthetic oligonucleotide
  Sense strand starting at position 3911 of SEQ ID NO: 1563018
ugagcacuguuaucauuag

SEQ ID NO: 1789352 - RNA, 19 nt, Artificial Sequence
  Description of Artificial Sequence: Synthetic oligonucleotide
  Antisense strand to SEQ ID NO: 1789351
cuaaugauaacagugcuca

SEQ ID NO: 1789353 - RNA, 19 nt, Artificial Sequence
  Description of Artificial Sequence: Synthetic oligonucleotide
  Sense strand starting at position 3922 of SEQ ID NO: 1563018
aucauuagauagucugacu

SEQ ID NO: 1789354 - RNA, 19 nt, Artificial Sequence
  Description of Artificial Sequence: Synthetic oligonucleotide
  Antisense strand to SEQ ID NO: 1789353
agucagacuaucuaaugau

SEQ ID NO: 1789355 - RNA, 19 nt, Artificial Sequence
  Description of Artificial Sequence: Synthetic oligonucleotide
  Sense strand starting at position 3933 of SEQ ID NO: 1563018
gucugacuaauggagugua

SEQ ID NO: 1789356 - RNA, 19 nt, Artificial Sequence
  Description of Artificial Sequence: Synthetic oligonucleotide
  Antisense strand to SEQ ID NO: 1789355
uacacuccauuagucagac

SEQ ID NO: 1789357 - RNA, 19 nt, Artificial Sequence
  Description of Artificial Sequence: Synthetic oligonucleotide
  Sense strand starting at position 168 of SEQ ID NO: 1563019
cuggcaaauaugugcaaga

SEQ ID NO: 1789358 - RNA, 19 nt, Artificial Sequence
  Description of Artificial Sequence: Synthetic oligonucleotide
  Antisense strand to SEQ ID NO: 1789357
ucuugcacauauuugccag

SEQ ID NO: 1789359 - RNA, 19 nt, Artificial Sequence
  Description of Artificial Sequence: Synthetic oligonucleotide
  Sense strand starting at position 169 of SEQ ID NO: 1563019
uggcaaauaugugcaagau

SEQ ID NO: 1789360 - RNA, 19 nt, Artificial Sequence
  Description of Artificial Sequence: Synthetic oligonucleotide
  Antisense strand to SEQ ID NO: 1789359
aucuugcacauauuugcca

SEQ ID NO: 1789361 - RNA, 19 nt, Artificial Sequence
  Description of Artificial Sequence: Synthetic oligonucleotide
  Sense strand starting at position 170 of SEQ ID NO: 1563019
ggcaaauaugugcaagaug

SEQ ID NO: 1789362 - RNA, 19 nt, Artificial Sequence
  Description of Artificial Sequence: Synthetic oligonucleotide
  Antisense strand to SEQ ID NO: 1789361
caucuugcacauauuugcc

SEQ ID NO: 1789363 - RNA, 19 nt, Artificial Sequence
  Description of Artificial Sequence: Synthetic oligonucleotide
  Sense strand starting at position 242 of SEQ ID NO: 1563019
gagcaucucccauggguca

SEQ ID NO: 1789364 - RNA, 19 nt, Artificial Sequence
  Description of Artificial Sequence: Synthetic oligonucleotide
  Antisense strand to SEQ ID NO: 1789363
ugacccaugggagaugcuc

SEQ ID NO: 1789365 - RNA, 19 nt, Artificial Sequence
  Description of Artificial Sequence: Synthetic oligonucleotide
  Sense strand starting at position 355 of SEQ ID NO: 1563019
guugcacuguuauuuguua

SEQ ID NO: 1789366 - RNA, 19 nt, Artificial Sequence
  Description of Artificial Sequence: Synthetic oligonucleotide
  Antisense strand to SEQ ID NO: 1789365
uaacaaauaacagugcaac

SEQ ID NO: 1789367 - RNA, 19 nt, Artificial Sequence
  Description of Artificial Sequence: Synthetic oligonucleotide
  Sense strand starting at position 356 of SEQ ID NO: 1563019
uugcacuguuauuuguuaa

SEQ ID NO: 1789368 - RNA, 19 nt, Artificial Sequence
  Description of Artificial Sequence: Synthetic oligonucleotide
  Antisense strand to SEQ ID NO: 1789367
uuaacaaauaacagugcaa

SEQ ID NO: 1789369 - RNA, 19 nt, Artificial Sequence
  Description of Artificial Sequence: Synthetic oligonucleotide
  Sense strand starting at position 367 of SEQ ID NO: 1563019
uuuguuaacccuuaauugu

SEQ ID NO: 1789370 - RNA, 19 nt, Artificial Sequence
  Description of Artificial Sequence: Synthetic oligonucleotide
  Antisense strand to SEQ ID NO: 1789369
acaauuaaggguuaacaaa

SEQ ID NO: 1789371 - RNA, 19 nt, Artificial Sequence
  Description of Artificial Sequence: Synthetic oligonucleotide
  Sense strand starting at position 370 of SEQ ID NO: 1563019
guuaacccuuaauuguaga

SEQ ID NO: 1789372 - RNA, 19 nt, Artificial Sequence
  Description of Artificial Sequence: Synthetic oligonucleotide
  Antisense strand to SEQ ID NO: 1789371
ucuacaauuaaggguuaac

SEQ ID NO: 1789373 - RNA, 19 nt, Artificial Sequence
  Description of Artificial Sequence: Synthetic oligonucleotide
  Sense strand starting at position 375 of SEQ ID NO: 1563019
cccuuaauuguagaugauu

SEQ ID NO: 1789374 - RNA, 19 nt, Artificial Sequence
  Description of Artificial Sequence: Synthetic oligonucleotide
  Antisense strand to SEQ ID NO: 1789373
aaucaucuacaauuaaggg

SEQ ID NO: 1789375 - RNA, 19 nt, Artificial Sequence
  Description of Artificial Sequence: Synthetic oligonucleotide
  Sense strand starting at position 417 of SEQ ID NO: 1563019
cgagcuguccaauacagca

SEQ ID NO: 1789376 - RNA, 19 nt, Artificial Sequence
  Description of Artificial Sequence: Synthetic oligonucleotide
  Antisense strand to SEQ ID NO: 1789375
ugcuguauuggacagcucg

SEQ ID NO: 1789377 - RNA, 19 nt, Artificial Sequence
  Description of Artificial Sequence: Synthetic oligonucleotide
  Sense strand starting at position 697 of SEQ ID NO: 1563019
acgugcuauaugcaggaaa

SEQ ID NO: 1789378 - RNA, 19 nt, Artificial Sequence
  Description of Artificial Sequence: Synthetic oligonucleotide
  Antisense strand to SEQ ID NO: 1789377
uuuccugcauauagcacgu

SEQ ID NO: 1789379 - RNA, 19 nt, Artificial Sequence
  Description of Artificial Sequence: Synthetic oligonucleotide
  Sense strand starting at position 699 of SEQ ID NO: 1563019
gugcuauaugcaggaaaug

SEQ ID NO: 1789380 - RNA, 19 nt, Artificial Sequence
  Description of Artificial Sequence: Synthetic oligonucleotide
  Antisense strand to SEQ ID NO: 1789379
cauuuccugcauauagcac

SEQ ID NO: 1789381 - RNA, 19 nt, Artificial Sequence
  Description of Artificial Sequence: Synthetic oligonucleotide
  Sense strand starting at position 710 of SEQ ID NO: 1563019
aggaaaugcuugucaugga

SEQ ID NO: 1789382 - RNA, 19 nt, Artificial Sequence
  Description of Artificial Sequence: Synthetic oligonucleotide
  Antisense strand to SEQ ID NO: 1789381
uccaugacaagcauuuccu

SEQ ID NO: 1789383 - RNA, 19 nt, Artificial Sequence
  Description of Artificial Sequence: Synthetic oligonucleotide
  Sense strand starting at position 714 of SEQ ID NO: 1563019
aaugcuugucauggaggaa

SEQ ID NO: 1789384 - RNA, 19 nt, Artificial Sequence
  Description of Artificial Sequence: Synthetic oligonucleotide
  Antisense strand to SEQ ID NO: 1789383
uuccuccaugacaagcauu

SEQ ID NO: 1789385 - RNA, 19 nt, Artificial Sequence
  Description of Artificial Sequence: Synthetic oligonucleotide
  Sense strand starting at position 767 of SEQ ID NO: 1563019
agcaucaagcagugaacuu

SEQ ID NO: 1789386 - RNA, 19 nt, Artificial Sequence
  Description of Artificial Sequence: Synthetic oligonucleotide
  Antisense strand to SEQ ID NO: 1789385
aaguucacugcuugaugcu

SEQ ID NO: 1789387 - RNA, 19 nt, Artificial Sequence
  Description of Artificial Sequence: Synthetic oligonucleotide
  Sense strand starting at position 815 of SEQ ID NO: 1563019
ucaacuuaagcguaccuaa

SEQ ID NO: 1789388 - RNA, 19 nt, Artificial Sequence
  Description of Artificial Sequence: Synthetic oligonucleotide
  Antisense strand to SEQ ID NO: 1789387
uuagguacgcuuaaguuga

SEQ ID NO: 1789389 - RNA, 19 nt, Artificial Sequence
  Description of Artificial Sequence: Synthetic oligonucleotide
  Sense strand starting at position 884 of SEQ ID NO: 1563019
ggcuuucagccuuaggagu

SEQ ID NO: 1789390 - RNA, 19 nt, Artificial Sequence
  Description of Artificial Sequence: Synthetic oligonucleotide
  Antisense strand to SEQ ID NO: 1789389
acuccuaaggcugaaagcc

SEQ ID NO: 1789391 - RNA, 19 nt, Artificial Sequence
  Description of Artificial Sequence: Synthetic oligonucleotide
  Sense strand starting at position 993 of SEQ ID NO: 1563019
auggauagaacguaagguu

SEQ ID NO: 1789392 - RNA, 19 nt, Artificial Sequence
  Description of Artificial Sequence: Synthetic oligonucleotide
  Antisense strand to SEQ ID NO: 1789391
aaccuuacguucuauccau

SEQ ID NO: 1789393 - RNA, 19 nt, Artificial Sequence
  Description of Artificial Sequence: Synthetic oligonucleotide
  Sense strand starting at position 1317 of SEQ ID NO: 1563019
cagaaaugacuucgagauu

SEQ ID NO: 1789394 - RNA, 19 nt, Artificial Sequence
  Description of Artificial Sequence: Synthetic oligonucleotide
  Antisense strand to SEQ ID NO: 1789393
aaucucgaagucauuucug

SEQ ID NO: 1789395 - RNA, 19 nt, Artificial Sequence
  Description of Artificial Sequence: Synthetic oligonucleotide
  Sense strand starting at position 1329 of SEQ ID NO: 1563019
cgagauuacugccuggaag

SEQ ID NO: 1789396 - RNA, 19 nt, Artificial Sequence
  Description of Artificial Sequence: Synthetic oligonucleotide
  Antisense strand to SEQ ID NO: 1789395
cuuccaggcaguaaucucg

SEQ ID NO: 1789397 - RNA, 19 nt, Artificial Sequence
  Description of Artificial Sequence: Synthetic oligonucleotide
  Sense strand starting at position 1330 of SEQ ID NO: 1563019
gagauuacugccuggaagc

SEQ ID NO: 1789398 - RNA, 19 nt, Artificial Sequence
  Description of Artificial Sequence: Synthetic oligonucleotide
  Antisense strand to SEQ ID NO: 1789397
gcuuccaggcaguaaucuc

SEQ ID NO: 1789399 - RNA, 19 nt, Artificial Sequence
  Description of Artificial Sequence: Synthetic oligonucleotide
  Sense strand starting at position 1331 of SEQ ID NO: 1563019
agauuacugccuggaagcu

SEQ ID NO: 1789400 - RNA, 19 nt, Artificial Sequence
  Description of Artificial Sequence: Synthetic oligonucleotide
  Antisense strand to SEQ ID NO: 1789399
agcuuccaggcaguaaucu

SEQ ID NO: 1789401 - RNA, 19 nt, Artificial Sequence
  Description of Artificial Sequence: Synthetic oligonucleotide
  Sense strand starting at position 1332 of SEQ ID NO: 1563019
gauuacugccuggaagcuu

SEQ ID NO: 1789402 - RNA, 19 nt, Artificial Sequence
  Description of Artificial Sequence: Synthetic oligonucleotide
  Antisense strand to SEQ ID NO: 1789401
aagcuuccaggcaguaauc

SEQ ID NO: 1789403 - RNA, 19 nt, Artificial Sequence
  Description of Artificial Sequence: Synthetic oligonucleotide
  Sense strand starting at position 1992 of SEQ ID NO: 1563019
aggacuucccgucacaauu

SEQ ID NO: 1789404 - RNA, 19 nt, Artificial Sequence
  Description of Artificial Sequence: Synthetic oligonucleotide
  Antisense strand to SEQ ID NO: 1789403
aauugugacgggaaguccu

SEQ ID NO: 1789405 - RNA, 19 nt, Artificial Sequence
  Description of Artificial Sequence: Synthetic oligonucleotide
  Sense strand starting at position 2061 of SEQ ID NO: 1563019
agguaucugguacggauaa

SEQ ID NO: 1789406 - RNA, 19 nt, Artificial Sequence
  Description of Artificial Sequence: Synthetic oligonucleotide
  Antisense strand to SEQ ID NO: 1789405
uuauccguaccagauaccu

SEQ ID NO: 1789407 - RNA, 19 nt, Artificial Sequence
  Description of Artificial Sequence: Synthetic oligonucleotide
  Sense strand starting at position 2063 of SEQ ID NO: 1563019
guaucugguacggauaaag

SEQ ID NO: 1789408 - RNA, 19 nt, Artificial Sequence
  Description of Artificial Sequence: Synthetic oligonucleotide
  Antisense strand to SEQ ID NO: 1789407
cuuuauccguaccagauac

SEQ ID NO: 1789409 - RNA, 19 nt, Artificial Sequence
  Description of Artificial Sequence: Synthetic oligonucleotide
  Sense strand starting at position 2071 of SEQ ID NO: 1563019
uacggauaaaguuagguau

SEQ ID NO: 1789410 - RNA, 19 nt, Artificial Sequence
  Description of Artificial Sequence: Synthetic oligonucleotide
  Antisense strand to SEQ ID NO: 1789409
auaccuaacuuuauccgua

SEQ ID NO: 1789411 - RNA, 19 nt, Artificial Sequence
  Description of Artificial Sequence: Synthetic oligonucleotide
  Sense strand starting at position 2253 of SEQ ID NO: 1563019
caggaaaugcacgagcuuu

SEQ ID NO: 1789412 - RNA, 19 nt, Artificial Sequence
  Description of Artificial Sequence: Synthetic oligonucleotide
  Antisense strand to SEQ ID NO: 1789411
aaagcucgugcauuuccug

SEQ ID NO: 1789413 - RNA, 19 nt, Artificial Sequence
  Description of Artificial Sequence: Synthetic oligonucleotide
  Sense strand starting at position 3149 of SEQ ID NO: 1563019
augucuuggccguuaguuu

SEQ ID NO: 1789414 - RNA, 19 nt, Artificial Sequence
  Description of Artificial Sequence: Synthetic oligonucleotide
  Antisense strand to SEQ ID NO: 1789413
aaacuaacggccaagacau

SEQ ID NO: 1789415 - RNA, 19 nt, Artificial Sequence
  Description of Artificial Sequence: Synthetic oligonucleotide
  Sense strand starting at position 3197 of SEQ ID NO: 1563019
acgugauuccuguccugcu

SEQ ID NO: 1789416 - RNA, 19 nt, Artificial Sequence
  Description of Artificial Sequence: Synthetic oligonucleotide
  Antisense strand to SEQ ID NO: 1789415
agcaggacaggaaucacgu

SEQ ID NO: 1789417 - RNA, 19 nt, Artificial Sequence
  Description of Artificial Sequence: Synthetic oligonucleotide
  Sense strand starting at position 3239 of SEQ ID NO: 1563019
cggaguucuagcuaguaaa

SEQ ID NO: 1789418 - RNA, 19 nt, Artificial Sequence
  Description of Artificial Sequence: Synthetic oligonucleotide
  Antisense strand to SEQ ID NO: 1789417
uuuacuagcuagaacuccg

SEQ ID NO: 1789419 - RNA, 19 nt, Artificial Sequence
  Description of Artificial Sequence: Synthetic oligonucleotide
  Sense strand starting at position 3249 of SEQ ID NO: 1563019
gcuaguaaacucugaagug

SEQ ID NO: 1789420 - RNA, 19 nt, Artificial Sequence
  Description of Artificial Sequence: Synthetic oligonucleotide
  Antisense strand to SEQ ID NO: 1789419
cacuucagaguuuacuagc

SEQ ID NO: 1789421 - RNA, 19 nt, Artificial Sequence
  Description of Artificial Sequence: Synthetic oligonucleotide
  Sense strand starting at position 3469 of SEQ ID NO: 1563019
gggaguguucuaugaggca

SEQ ID NO: 1789422 - RNA, 19 nt, Artificial Sequence
  Description of Artificial Sequence: Synthetic oligonucleotide
  Antisense strand to SEQ ID NO: 1789421
ugccucauagaacacuccc

SEQ ID NO: 1789423 - RNA, 19 nt, Artificial Sequence
  Description of Artificial Sequence: Synthetic oligonucleotide
  Sense strand starting at position 3593 of SEQ ID NO: 1563019
cugagucugagauggguua

SEQ ID NO: 1789424 - RNA, 19 nt, Artificial Sequence
  Description of Artificial Sequence: Synthetic oligonucleotide
  Antisense strand to SEQ ID NO: 1789423
uaacccaucucagacucag

SEQ ID NO: 1789425 - RNA, 19 nt, Artificial Sequence
  Description of Artificial Sequence: Synthetic oligonucleotide
  Sense strand starting at position 3594 of SEQ ID NO: 1563019
ugagucugagauggguuaa

SEQ ID NO: 1789426 - RNA, 19 nt, Artificial Sequence
  Description of Artificial Sequence: Synthetic oligonucleotide
  Antisense strand to SEQ ID NO: 1789425
uuaacccaucucagacuca

SEQ ID NO: 1789427 - RNA, 19 nt, Artificial Sequence
  Description of Artificial Sequence: Synthetic oligonucleotide
  Sense strand starting at position 3595 of SEQ ID NO: 1563019
gagucugagauggguuaag

SEQ ID NO: 1789428 - RNA, 19 nt, Artificial Sequence
  Description of Artificial Sequence: Synthetic oligonucleotide
  Antisense strand to SEQ ID NO: 1789427
cuuaacccaucucagacuc

SEQ ID NO: 1789429 - RNA, 19 nt, Artificial Sequence
  Description of Artificial Sequence: Synthetic oligonucleotide
  Sense strand starting at position 3726 of SEQ ID NO: 1563019
uuguguuuagaaggcuaaa

SEQ ID NO: 1789430 - RNA, 19 nt, Artificial Sequence
  Description of Artificial Sequence: Synthetic oligonucleotide
  Antisense strand to SEQ ID NO: 1789429
uuuagccuucuaaacacaa

SEQ ID NO: 1789431 - RNA, 19 nt, Artificial Sequence
  Description of Artificial Sequence: Synthetic oligonucleotide
  Sense strand starting at position 3930 of SEQ ID NO: 1563019
ugcugucuugugccacauu

SEQ ID NO: 1789432 - RNA, 19 nt, Artificial Sequence
  Description of Artificial Sequence: Synthetic oligonucleotide
  Antisense strand to SEQ ID NO: 1789431
aauguggcacaagacagca

SEQ ID NO: 1789433 - RNA, 19 nt, Artificial Sequence
  Description of Artificial Sequence: Synthetic oligonucleotide
  Sense strand starting at position 3975 of SEQ ID NO: 1563019
acagucauagccuggcaga

SEQ ID NO: 1789434 - RNA, 19 nt, Artificial Sequence
  Description of Artificial Sequence: Synthetic oligonucleotide
  Antisense strand to SEQ ID NO: 1789433
ucugccaggcuaugacugu

SEQ ID NO: 1789435 - RNA, 19 nt, Artificial Sequence
  Description of Artificial Sequence: Synthetic oligonucleotide
  Sense strand starting at position 3976 of SEQ ID NO: 1563019
cagucauagccuggcagaa

SEQ ID NO: 1789436 - RNA, 19 nt, Artificial Sequence
  Description of Artificial Sequence: Synthetic oligonucleotide
  Antisense strand to SEQ ID NO: 1789435
uucugccaggcuaugacug

SEQ ID NO: 1789437 - RNA, 19 nt, Artificial Sequence
  Description of Artificial Sequence: Synthetic oligonucleotide
  Sense strand starting at position 35 of SEQ ID NO: 1563020
guuuccuucuggccagagu

SEQ ID NO: 1789438 - RNA, 19 nt, Artificial Sequence
  Description of Artificial Sequence: Synthetic oligonucleotide
  Antisense strand to SEQ ID NO: 1789437
acucuggccagaaggaaac

SEQ ID NO: 1789439 - RNA, 19 nt, Artificial Sequence
  Description of Artificial Sequence: Synthetic oligonucleotide
  Sense strand starting at position 80 of SEQ ID NO: 1563020
ggaagagguugcucaacgu

SEQ ID NO: 1789440 - RNA, 19 nt, Artificial Sequence
  Description of Artificial Sequence: Synthetic oligonucleotide
  Antisense strand to SEQ ID NO: 1789439
acguugagcaaccucuucc

SEQ ID NO: 1789441 - RNA, 19 nt, Artificial Sequence
  Description of Artificial Sequence: Synthetic oligonucleotide
  Sense strand starting at position 149 of SEQ ID NO: 1563020
aagagaucagcuuggugac

SEQ ID NO: 1789442 - RNA, 19 nt, Artificial Sequence
  Description of Artificial Sequence: Synthetic oligonucleotide
  Antisense strand to SEQ ID NO: 1789441
gucaccaagcugaucucuu

SEQ ID NO: 1789443 - RNA, 19 nt, Artificial Sequence
  Description of Artificial Sequence: Synthetic oligonucleotide
  Sense strand starting at position 150 of SEQ ID NO: 1563020
agagaucagcuuggugacu

SEQ ID NO: 1789444 - RNA, 19 nt, Artificial Sequence
  Description of Artificial Sequence: Synthetic oligonucleotide
  Antisense strand to SEQ ID NO: 1789443
agucaccaagcugaucucu

SEQ ID NO: 1789445 - RNA, 19 nt, Artificial Sequence
  Description of Artificial Sequence: Synthetic oligonucleotide
  Sense strand starting at position 254 of SEQ ID NO: 1563020
gucagaaagucccagggaa

SEQ ID NO: 1789446 - RNA, 19 nt, Artificial Sequence
  Description of Artificial Sequence: Synthetic oligonucleotide
  Antisense strand to SEQ ID NO: 1789445
uucccugggacuuucugac

SEQ ID NO: 1789447 - RNA, 19 nt, Artificial Sequence
  Description of Artificial Sequence: Synthetic oligonucleotide
  Sense strand starting at position 306 of SEQ ID NO: 1563020
agauuugucccgcaguucu

SEQ ID NO: 1789448 - RNA, 19 nt, Artificial Sequence
  Description of Artificial Sequence: Synthetic oligonucleotide
  Antisense strand to SEQ ID NO: 1789447
agaacugcgggacaaaucu

SEQ ID NO: 1789449 - RNA, 19 nt, Artificial Sequence
  Description of Artificial Sequence: Synthetic oligonucleotide
  Sense strand starting at position 379 of SEQ ID NO: 1563020
cccugaguucuccaucuga

SEQ ID NO: 1789450 - RNA, 19 nt, Artificial Sequence
  Description of Artificial Sequence: Synthetic oligonucleotide
  Antisense strand to SEQ ID NO: 1789449
ucagauggagaacucaggg

SEQ ID NO: 1789451 - RNA, 19 nt, Artificial Sequence
  Description of Artificial Sequence: Synthetic oligonucleotide
  Sense strand starting at position 399 of SEQ ID NO: 1563020
ugccucaguuucccugaau

SEQ ID NO: 1789452 - RNA, 19 nt, Artificial Sequence
  Description of Artificial Sequence: Synthetic oligonucleotide
  Antisense strand to SEQ ID NO: 1789451
auucagggaaacugaggca

SEQ ID NO: 1789453 - RNA, 19 nt, Artificial Sequence
  Description of Artificial Sequence: Synthetic oligonucleotide
  Sense strand starting at position 400 of SEQ ID NO: 1563020
gccucaguuucccugaauc

SEQ ID NO: 1789454 - RNA, 19 nt, Artificial Sequence
  Description of Artificial Sequence: Synthetic oligonucleotide
  Antisense strand to SEQ ID NO: 1789453
gauucagggaaacugaggc

SEQ ID NO: 1789455 - RNA, 19 nt, Artificial Sequence
  Description of Artificial Sequence: Synthetic oligonucleotide
  Sense strand starting at position 442 of SEQ ID NO: 1563020
ccaagcguuucccucguau

SEQ ID NO: 1789456 - RNA, 19 nt, Artificial Sequence
  Description of Artificial Sequence: Synthetic oligonucleotide
  Antisense strand to SEQ ID NO: 1789455
auacgagggaaacgcuugg
